United States Patent Application Publication US 2005/0244851 A1 - sequence listing, part 149

SEQ ID NO: 5818239 - DNA, 25 bp, Homo sapien
atagcaagtggctatttttaaagtt

SEQ ID NO: 5818240 - DNA, 25 bp, Homo sapien
gattccccactcctcaagttctaag

SEQ ID NO: 5818241 - DNA, 25 bp, Homo sapien
aataagactagaagtatcagacggc

SEQ ID NO: 5818242 - DNA, 25 bp, Homo sapien
gcacccggctctaccagcaatctcg

SEQ ID NO: 5818243 - DNA, 25 bp, Homo sapien
gtgtgcctcaggcacttaacttttc

SEQ ID NO: 5818244 - DNA, 25 bp, Homo sapien
attgtgccactgcactccagcctgg

SEQ ID NO: 5818245 - DNA, 25 bp, Homo sapien
agccctctggccggggagaagttcg

SEQ ID NO: 5818246 - DNA, 25 bp, Homo sapien
aggacaaaaatcccagctgagaagg

SEQ ID NO: 5818247 - DNA, 25 bp, Homo sapien
tcggggcctgtttggagcggggcat

SEQ ID NO: 5818248 - DNA, 25 bp, Homo sapien
gttctaagccgaaccaaatcctttg

SEQ ID NO: 5818249 - DNA, 25 bp, Homo sapien
attcatacaggagtcaaaattaaaa

SEQ ID NO: 5818250 - DNA, 25 bp, Homo sapien
tgatgaagtcttcttcggacccttt

SEQ ID NO: 5818251 - DNA, 25 bp, Homo sapien
aatgagaactgaaccaacaagggag

SEQ ID NO: 5818252 - DNA, 25 bp, Homo sapien
attggtgactccccggacagctcaa

SEQ ID NO: 5818253 - DNA, 25 bp, Homo sapien
gcaggctgcagtgggctgtgattgt

SEQ ID NO: 5818254 - DNA, 25 bp, Homo sapien
caaaaattagccgggtgtggtagtg

SEQ ID NO: 5818255 - DNA, 25 bp, Homo sapien
gtaggatctgaaagcaggcctctga

SEQ ID NO: 5818256 - DNA, 25 bp, Homo sapien
tcagacagccccttgctggggcccc

SEQ ID NO: 5818257 - DNA, 25 bp, Homo sapien
gtggtagtgcatgcctgtagtccca

SEQ ID NO: 5818258 - DNA, 25 bp, Homo sapien
aaggtggcggccagtggctgaactc

SEQ ID NO: 5818259 - DNA, 25 bp, Homo sapien
cacccaaggcctctgcttcccgccg

SEQ ID NO: 5818260 - DNA, 25 bp, Homo sapien
gagcagctcacggcacccccctcag

SEQ ID NO: 5818261 - DNA, 25 bp, Homo sapien
gctctggccttccaccgatgacccc

SEQ ID NO: 5818262 - DNA, 25 bp, Homo sapien
gccaccctcctcgctgccattctct

SEQ ID NO: 5818263 - DNA, 25 bp, Homo sapien
caccgatgacccccaaaacgatgcc

SEQ ID NO: 5818264 - DNA, 25 bp, Homo sapien
acttctgcgataccccagaagcaca

SEQ ID NO: 5818265 - DNA, 25 bp, Homo sapien
aagcacccggctctaccagcaatct

SEQ ID NO: 5818266 - DNA, 25 bp, Homo sapien
gtggtgggacagctcatagacctga

SEQ ID NO: 5818267 - DNA, 25 bp, Homo sapien
tcggagacgttcctctgagccccgc

SEQ ID NO: 5818268 - DNA, 25 bp, Homo sapien
ggacagctcaacaccaaagctttcg

SEQ ID NO: 5818269 - DNA, 25 bp, Homo sapien
aatcttctcaattgaataagactag

SEQ ID NO: 5818270 - DNA, 25 bp, Homo sapien
ggaagccaagccgggtggagatgca

SEQ ID NO: 5818271 - DNA, 25 bp, Homo sapien
agaggaaagcgattctactttctcc

SEQ ID NO: 5818272 - DNA, 25 bp, Homo sapien
agctaaatcaagtgaatttgcaagt

SEQ ID NO: 5818273 - DNA, 25 bp, Homo sapien
aaacactccagacatgaataaaaat

SEQ ID NO: 5818274 - DNA, 25 bp, Homo sapien
ggcgctgctctggccttccaccgat

SEQ ID NO: 5818275 - DNA, 25 bp, Homo sapien
tcatgctttgcccagggaatcatgc

SEQ ID NO: 5818276 - DNA, 25 bp, Homo sapien
aataatccggttcccgaacagcctc

SEQ ID NO: 5818277 - DNA, 25 bp, Homo sapien
caggcacttaacttttctccagagg

SEQ ID NO: 5818278 - DNA, 25 bp, Homo sapien
gtctcttaaaagggagacatactac

SEQ ID NO: 5818279 - DNA, 25 bp, Homo sapien
agcgcacggcgtgtgtcagccttgc

SEQ ID NO: 5818280 - DNA, 25 bp, Homo sapien
acaagggagagcaacagaaagacag

SEQ ID NO: 5818281 - DNA, 25 bp, Homo sapien
gcctcaggcacttaacttttctcca

SEQ ID NO: 5818282 - DNA, 25 bp, Homo sapien
ggcggccgcgatgagccttcagcct

SEQ ID NO: 5818283 - DNA, 25 bp, Homo sapien
gtctaaattccaagacaaaggttat

SEQ ID NO: 5818284 - DNA, 25 bp, Homo sapien
tgatcgacctcatgacaaacactcc

SEQ ID NO: 5818285 - DNA, 25 bp, Homo sapien
cccaggcccgcctcacccgggcgcc

SEQ ID NO: 5818286 - DNA, 25 bp, Homo sapien
gggtgctgtcaatgtgccggccgcc

SEQ ID NO: 5818287 - DNA, 25 bp, Homo sapien
caaattgctgctgcctcgagcggcc

SEQ ID NO: 5818288 - DNA, 25 bp, Homo sapien
gctggcagcggagcagctcacggca

SEQ ID NO: 5818289 - DNA, 25 bp, Homo sapien
gctcggagacgttcctctgagcccc

SEQ ID NO: 5818290 - DNA, 25 bp, Homo sapien
tgaggctgacaaggagaacgtggat

SEQ ID NO: 5818291 - DNA, 25 bp, Homo sapien
cctgttccaaacaagttggggctga

SEQ ID NO: 5818292 - DNA, 25 bp, Homo sapien
cccagactccggaaggtggcggcca

SEQ ID NO: 5818293 - DNA, 25 bp, Homo sapien
cctccttcccgtgtgcctcaggcac

SEQ ID NO: 5818294 - DNA, 25 bp, Homo sapien
ttggtcagaatcttctcaattgaat

SEQ ID NO: 5818295 - DNA, 25 bp, Homo sapien
ctgcgataccccagaagcacacgtg

SEQ ID NO: 5818296 - DNA, 25 bp, Homo sapien
aggttatgcctactcctacaaatca

SEQ ID NO: 5818297 - DNA, 25 bp, Homo sapien
tgcggagaagcccaagaaagagatt

SEQ ID NO: 5818298 - DNA, 25 bp, Homo sapien
acagctcaacaccaaagctttcgcg

SEQ ID NO: 5818299 - DNA, 25 bp, Homo sapien
tagtccttccaggacaaaaatccca

SEQ ID NO: 5818300 - DNA, 25 bp, Homo sapien
ctgacaaacctgccccgggtgctgt

SEQ ID NO: 5818301 - DNA, 25 bp, Homo sapien
tgcctgcaggccctgtgggggcatc

SEQ ID NO: 5818302 - DNA, 25 bp, Homo sapien
tgtcaaacatcagcaagtcaggcag

SEQ ID NO: 5818303 - DNA, 25 bp, Homo sapien
ctggctttacacattgagagcagca

SEQ ID NO: 5818304 - DNA, 25 bp, Homo sapien
ccggggcctccgcactctgctcatg

SEQ ID NO: 5818305 - DNA, 25 bp, Homo sapien
aaatgaagaattttcttttgaatgt

SEQ ID NO: 5818306 - DNA, 25 bp, Homo sapien
cgccagccggcgctgctctggcctt

SEQ ID NO: 5818307 - DNA, 25 bp, Homo sapien
ggtgtacaaagaagctcacttactg

SEQ ID NO: 5818308 - DNA, 25 bp, Homo sapien
ggaagaagcatccctggggctgcgg

SEQ ID NO: 5818309 - DNA, 25 bp, Homo sapien
ctcttaaaagggagacatactacct

SEQ ID NO: 5818310 - DNA, 25 bp, Homo sapien
gctgccagcttggaattaaataatc

SEQ ID NO: 5818311 - DNA, 25 bp, Homo sapien
cggctcttggcctcctccccggccc

SEQ ID NO: 5818312 - DNA, 25 bp, Homo sapien
cgacttctgcgataccccagaagca

SEQ ID NO: 5818313 - DNA, 25 bp, Homo sapien
gaaaaggaaatgaagaaaagcccca

SEQ ID NO: 5818314 - DNA, 25 bp, Homo sapien
acttgggaggctgaggtgggcggat

SEQ ID NO: 5818315 - DNA, 25 bp, Homo sapien
gatccctgttccaaacaagttgggg

SEQ ID NO: 5818316 - DNA, 25 bp, Homo sapien
cgagtgcaaatgaagatgatgaagt

SEQ ID NO: 5818317 - DNA, 25 bp, Homo sapien
tctcgcaaggaagtcctcctcgggg

SEQ ID NO: 5818318 - DNA, 25 bp, Homo sapien
gccggaagccacttgggccagggca

SEQ ID NO: 5818319 - DNA, 25 bp, Homo sapien
ctctaccagcaatctcgcaaggaag

SEQ ID NO: 5818320 - DNA, 25 bp, Homo sapien
ccttcctctcatcgacttctgcgat

SEQ ID NO: 5818321 - DNA, 25 bp, Homo sapien
cagctagtccttccaggacaaaaat

SEQ ID NO: 5818322 - DNA, 25 bp, Homo sapien
gagcggggcatccagtgcgtgcaca

SEQ ID NO: 5818323 - DNA, 25 bp, Homo sapien
gacccgccatgctgcggccagctct

SEQ ID NO: 5818324 - DNA, 25 bp, Homo sapien
tggacataaagaaagatgtattgct

SEQ ID NO: 5818325 - DNA, 25 bp, Homo sapien
gtgggggcatcctcctggcaggcca

SEQ ID NO: 5818326 - DNA, 25 bp, Homo sapien
aaatagttagatattctagatttac

SEQ ID NO: 5818327 - DNA, 25 bp, Homo sapien
ggaccacccaaggcctctgcttccc

SEQ ID NO: 5818328 - DNA, 25 bp, Homo sapien
cccctgacaggggttctcctccttc

SEQ ID NO: 5818329 - DNA, 25 bp, Homo sapien
cagggaatcatgcactgctcatgct

SEQ ID NO: 5818330 - DNA, 25 bp, Homo sapien
tcgggaccagcctgggaaatatagt

SEQ ID NO: 5818331 - DNA, 25 bp, Homo sapien
accctagaacttgggaggctgaggt

SEQ ID NO: 5818332 - DNA, 25 bp, Homo sapien
gttatgcctactcctacaaatcaat

SEQ ID NO: 5818333 - DNA, 25 bp, Homo sapien
aagtcctcctcggggcctgtttgga

SEQ ID NO: 5818334 - DNA, 25 bp, Homo sapien
cataaagaaagatgtattgctgcca

SEQ ID NO: 5818335 - DNA, 25 bp, Homo sapien
gcccagggccgtgggctctcccctg

SEQ ID NO: 5818336 - DNA, 25 bp, Homo sapien
ccgggatgttctccctgacaaacct

SEQ ID NO: 5818337 - DNA, 25 bp, Homo sapien
agcggagcagctcacggcacccccc

SEQ ID NO: 5818338 - DNA, 25 bp, Homo sapien
ccaagcgggtcgatgtttctgagct

SEQ ID NO: 5818339 - DNA, 25 bp, Homo sapien
ggccgtgggctctcccctgtgtgtg

SEQ ID NO: 5818340 - DNA, 25 bp, Homo sapien
cactctaaatgaagaattttctttt

SEQ ID NO: 5818341 - DNA, 25 bp, Homo sapien
gccagcccctcattgaccttcctct

SEQ ID NO: 5818342 - DNA, 25 bp, Homo sapien
tggtggatgtgtcccctgacagggg

SEQ ID NO: 5818343 - DNA, 25 bp, Homo sapien
ggggacgtgaacatggatgacccta

SEQ ID NO: 5818344 - DNA, 25 bp, Homo sapien
gtgggctctcccctgtgtgtgccag

SEQ ID NO: 5818345 - DNA, 25 bp, Homo sapien
gcgtgtgtcagccttgcccacaccc

SEQ ID NO: 5818346 - DNA, 25 bp, Homo sapien
agcgactcagaggaagcccgggacc

SEQ ID NO: 5818347 - DNA, 25 bp, Homo sapien
taaacctctttgagaaagaaaagga

SEQ ID NO: 5818348 - DNA, 25 bp, Homo sapien
ttcgagtgcaaatgaagatgatgaa

SEQ ID NO: 5818349 - DNA, 25 bp, Homo sapien
caccgggatgttctccctgacaaac

SEQ ID NO: 5818350 - DNA, 25 bp, Homo sapien
gggaatcatgcactgctcatgctgc

SEQ ID NO: 5818351 - DNA, 25 bp, Homo sapien
aggaaatgaagaaaagccccacgtc

SEQ ID NO: 5818352 - DNA, 25 bp, Homo sapien
ccagaggaaagcgattctactttct

SEQ ID NO: 5818353 - DNA, 25 bp, Homo sapien
ccctgtgggtgagcctcggctcttg

SEQ ID NO: 5818354 - DNA, 25 bp, Homo sapien
gggaccagcctgggaaatatagtga

SEQ ID NO: 5818355 - DNA, 25 bp, Homo sapien
ctcggctcttggcctcctccccggc

SEQ ID NO: 5818356 - DNA, 25 bp, Homo sapien
gcggcggccgcgatgagccttcagc

SEQ ID NO: 5818357 - DNA, 25 bp, Homo sapien
atgcagcccctagtgaggctcttct

SEQ ID NO: 5818358 - DNA, 25 bp, Homo sapien
ccctcggagccagggcgtggaaaga

SEQ ID NO: 5818359 - DNA, 25 bp, Homo sapien
acagcaccccggttagacgctcatc

SEQ ID NO: 5818360 - DNA, 25 bp, Homo sapien
aaatagcaagtggctatttttaaag

SEQ ID NO: 5818361 - DNA, 25 bp, Homo sapien
aaaatcccagctgagaaggaatccc

SEQ ID NO: 5818362 - DNA, 25 bp, Homo sapien
gcgtgcacatccccagcagtgggca

SEQ ID NO: 5818363 - DNA, 25 bp, Homo sapien
aagccaagccgggtggagatgcagc

SEQ ID NO: 5818364 - DNA, 25 bp, Homo sapien
gtcctcctcggggcctgtttggagc

SEQ ID NO: 5818365 - DNA, 25 bp, Homo sapien
ccaggctggtggatgtgtcccctga

SEQ ID NO: 5818366 - DNA, 25 bp, Homo sapien
gccagcacggaccacccaaggcctc

SEQ ID NO: 5818367 - DNA, 25 bp, Homo sapien
tgacccccaaaacgatgcccagggc

SEQ ID NO: 5818368 - DNA, 25 bp, Homo sapien
cgtggaggtgtacaaagaagctcac

SEQ ID NO: 5818369 - DNA, 25 bp, Homo sapien
tacaaatcaatttaaaattcctaag

SEQ ID NO: 5818370 - DNA, 25 bp, Homo sapien
ggagccctctggccggggagaagtt

SEQ ID NO: 5818371 - DNA, 25 bp, Homo sapien
tctcatcgacttctgcgatacccca

SEQ ID NO: 5818372 - DNA, 25 bp, Homo sapien
cccgggaccaaattgctgctgcctc

SEQ ID NO: 5818373 - DNA, 25 bp, Homo sapien
tggcctgagctcaaggagatgcagg

SEQ ID NO: 5818374 - DNA, 25 bp, Homo sapien
taaagaaagatgtattgctgccagc

SEQ ID NO: 5818375 - DNA, 25 bp, Homo sapien
tcccagctacttgggaggctgaagt

SEQ ID NO: 5818376 - DNA, 25 bp, Homo sapien
gaaaaatttgacttcgatctttcat

SEQ ID NO: 5818377 - DNA, 25 bp, Homo sapien
gtgaacatggatgaccctaagaagg

SEQ ID NO: 5818378 - DNA, 25 bp, Homo sapien
cacttaacttttctccagaggaaag

SEQ ID NO: 5818379 - DNA, 25 bp, Homo sapien
gaggaagccaagccgggtggagatg

SEQ ID NO: 5818380 - DNA, 25 bp, Homo sapien
gcccctcattgaccttcctctcatc

SEQ ID NO: 5818381 - DNA, 25 bp, Homo sapien
gctgagcgcacggcgtgtgtcagcc

SEQ ID NO: 5818382 - DNA, 25 bp, Homo sapien
ttcctctcatcgacttctgcgatac

SEQ ID NO: 5818383 - DNA, 25 bp, Homo sapien
tcaggcagcgactcagaggaagccc

SEQ ID NO: 5818384 - DNA, 25 bp, Homo sapien
acaaacactccagacatgaataaaa

SEQ ID NO: 5818385 - DNA, 25 bp, Homo sapien
gcaagccagcccctcattgaccttc

SEQ ID NO: 5818386 - DNA, 25 bp, Homo sapien
tgaatttgcaagtattcctgcaaat

SEQ ID NO: 5818387 - DNA, 25 bp, Homo sapien
aattttcttttgaatgttttgtatg

SEQ ID NO: 5818388 - DNA, 25 bp, Homo sapien
accacaaagcctgctgagcgcacgg

SEQ ID NO: 5818389 - DNA, 25 bp, Homo sapien
ctggcaggccaagcgggtcgatgtt

SEQ ID NO: 5818390 - DNA, 25 bp, Homo sapien
ccagtggctgaactccagttgcgct

SEQ ID NO: 5818391 - DNA, 25 bp, Homo sapien
gtgactccccggacagctcaacacc

SEQ ID NO: 5818392 - DNA, 25 bp, Homo sapien
aagccagcccctcattgaccttcct

SEQ ID NO: 5818393 - DNA, 25 bp, Homo sapien
ttgtagatatcaaactggaaccact

SEQ ID NO: 5818394 - DNA, 25 bp, Homo sapien
aattgctgctgcctcgagcggcctc

SEQ ID NO: 5818395 - DNA, 25 bp, Homo sapien
ttccaggacaaaaatcccagctgag

SEQ ID NO: 5818396 - DNA, 25 bp, Homo sapien
ggcagaatgggacccgccatgctgc

SEQ ID NO: 5818397 - DNA, 25 bp, Homo sapien
cttcggaccctttggacataaagaa

SEQ ID NO: 5818398 - DNA, 25 bp, Homo sapien
acatctgagagtccctttgcctgga

SEQ ID NO: 5818399 - DNA, 25 bp, Homo sapien
gtggaaagattcatacaggagtcaa

SEQ ID NO: 5818400 - DNA, 25 bp, Homo sapien
ctggggccccctgtgggtgagcctc

SEQ ID NO: 5818401 - DNA, 25 bp, Homo sapien
tcactccagatgctgcaagccagcc

SEQ ID NO: 5818402 - DNA, 25 bp, Homo sapien
agtgaaactcctgtccctacaaaaa

SEQ ID NO: 5818403 - DNA, 25 bp, Homo sapien
aacagaaagacagattccaggctgg

SEQ ID NO: 5818404 - DNA, 25 bp, Homo sapien
ggtgggacagctcatagacctgagc

SEQ ID NO: 5818405 - DNA, 25 bp, Homo sapien
agctcacggcacccccctcagcatc

SEQ ID NO: 5818406 - DNA, 25 bp, Homo sapien
agtattcctgcaaatagctcccggc

SEQ ID NO: 5818407 - DNA, 25 bp, Homo sapien
cagggcaagcgggcgatccctgttc

SEQ ID NO: 5818408 - DNA, 25 bp, Homo sapien
cgggcgccggggcctccgcactctg

SEQ ID NO: 5818409 - DNA, 25 bp, Homo sapien
ggagacgttcctctgagccccgcaa

SEQ ID NO: 5818410 - DNA, 25 bp, Homo sapien
cggagcagctcacggcacccccctc

SEQ ID NO: 5818411 - DNA, 25 bp, Homo sapien
ttctattggtgactccccggacagc

SEQ ID NO: 5818412 - DNA, 25 bp, Homo sapien
gctgagggactggggccagcacgga

SEQ ID NO: 5818413 - DNA, 25 bp, Homo sapien
cactgtccacagcaccccggttaga

SEQ ID NO: 5818414 - DNA, 25 bp, Homo sapien
tgcaaatagctcccggcctctgtca

SEQ ID NO: 5818415 - DNA, 25 bp, Homo sapien
gcaaggaagtcctcctcggggcctg

SEQ ID NO: 5818416 - DNA, 25 bp, Homo sapien
cgcgatgagccttcagcctgccggg

SEQ ID NO: 5818417 - DNA, 25 bp, Homo sapien
agcctccgttgcccacatctgagag

SEQ ID NO: 5818418 - DNA, 25 bp, Homo sapien
ttacttgagcccaggagttcgggac

SEQ ID NO: 5818419 - DNA, 25 bp, Homo sapien
caaggcctctgcttcccgccgccac

SEQ ID NO: 5818420 - DNA, 25 bp, Homo sapien
tgccactgcactccagcctgggcac

SEQ ID NO: 5818421 - DNA, 25 bp, Homo sapien
ctgttagaggaagaagcatccctgg

SEQ ID NO: 5818422 - DNA, 25 bp, Homo sapien
gcacagcggccgcagtcgtgcacgt

SEQ ID NO: 5818423 - DNA, 25 bp, Homo sapien
aatagctcccggcctctgtcaaaca

SEQ ID NO: 5818424 - DNA, 25 bp, Homo sapien
ccccctgtgggtgagcctcggctct

SEQ ID NO: 5818425 - DNA, 25 bp, Homo sapien
gccagcaccacaaagcctgctgagc

SEQ ID NO: 5818426 - DNA, 25 bp, Homo sapien
taccccagaagcacacgtggctgta

SEQ ID NO: 5818427 - DNA, 25 bp, Homo sapien
tactcctacaaatcaatttaaaatt

SEQ ID NO: 5818428 - DNA, 25 bp, Homo sapien
ccgatgacccccaaaacgatgccca

SEQ ID NO: 5818429 - DNA, 25 bp, Homo sapien
agaatcttctcaattgaataagact

SEQ ID NO: 5818430 - DNA, 25 bp, Homo sapien
agtgaatttgcaagtattcctgcaa

SEQ ID NO: 5818431 - DNA, 25 bp, Homo sapien
cgggcaggggacgtgaacatggatg

SEQ ID NO: 5818432 - DNA, 25 bp, Homo sapien
aagaagctcacttactggctttaca

SEQ ID NO: 5818433 - DNA, 25 bp, Homo sapien
aaagagattccagctagtccttcca

SEQ ID NO: 5818434 - DNA, 25 bp, Homo sapien
agacatactacctgtcagacagccc

SEQ ID NO: 5818435 - DNA, 25 bp, Homo sapien
gctgaactccagttgcgcttggtca

SEQ ID NO: 5818436 - DNA, 25 bp, Homo sapien
gatgttctccctgacaaacctgccc

SEQ ID NO: 5818437 - DNA, 25 bp, Homo sapien
ctgccaagcctgaagaccctcggag

SEQ ID NO: 5818438 - DNA, 25 bp, Homo sapien
ctgccgggcaggggacgtgaacatg

SEQ ID NO: 5818439 - DNA, 25 bp, Homo sapien
agggccgtgggctctcccctgtgtg

SEQ ID NO: 5818440 - DNA, 25 bp, Homo sapien
gggaggaagccaagccgggtggaga

SEQ ID NO: 5818441 - DNA, 25 bp, Homo sapien
ccgtgggctctcccctgtgtgtgcc

SEQ ID NO: 5818442 - DNA, 25 bp, Homo sapien
cctcctcggggcctgtttggagcgg

SEQ ID NO: 5818443 - DNA, 25 bp, Homo sapien
gaggaagaagcatccctggggctgc

SEQ ID NO: 5818444 - DNA, 25 bp, Homo sapien
ttccaggctggtggatgtgtcccct

SEQ ID NO: 5818445 - DNA, 25 bp, Homo sapien
tggggccagcacggaccacccaagg

SEQ ID NO: 5818446 - DNA, 25 bp, Homo sapien
ctcctacaaatcaatttaaaattcc

SEQ ID NO: 5818447 - DNA, 25 bp, Homo sapien
ggcctctgatcgacctcatgacaaa

SEQ ID NO: 5818448 - DNA, 25 bp, Homo sapien
ggctgtaggatctgaaagcaggcct

SEQ ID NO: 5818449 - DNA, 25 bp, Homo sapien
tagacctgagctcccctctgatcca

SEQ ID NO: 5818450 - DNA, 25 bp, Homo sapien
cctgtcagacagccccttgctgggg

SEQ ID NO: 5818451 - DNA, 25 bp, Homo sapien
ccctctggccggggagaagttcgtg

SEQ ID NO: 5818452 - DNA, 25 bp, Homo sapien
cagtgggcaaagctaaatcaagtga

SEQ ID NO: 5818453 - DNA, 25 bp, Homo sapien
aagtggttttcaaccctcagaaaca

SEQ ID NO: 5818454 - DNA, 25 bp, Homo sapien
gggaggctgaggtgggcggattact

SEQ ID NO: 5818455 - DNA, 25 bp, Homo sapien
ggcacttaacttttctccagaggaa

SEQ ID NO: 5818456 - DNA, 25 bp, Homo sapien
cgccgccaccctcctcgctgccatt

SEQ ID NO: 5818457 - DNA, 25 bp, Homo sapien
gaaccaaatcctttgccttgaaaga

SEQ ID NO: 5818458 - DNA, 25 bp, Homo sapien
tgagagcagcagccggaaccaggca

SEQ ID NO: 5818459 - DNA, 25 bp, Homo sapien
ccccggccctgcccagctctggtgc

SEQ ID NO: 5818460 - DNA, 25 bp, Homo sapien
ggaatgtgaagcctcagtcactcta

SEQ ID NO: 5818461 - DNA, 25 bp, Homo sapien
ccggacagctcaacaccaaagcttt

SEQ ID NO: 5818462 - DNA, 25 bp, Homo sapien
ctgagctcaaggagatgcaggctgc

SEQ ID NO: 5818463 - DNA, 25 bp, Homo sapien
ccagcttggaattaaataatccggt

SEQ ID NO: 5818464 - DNA, 25 bp, Homo sapien
gctgccattctctgggctggaatgt

SEQ ID NO: 5818465 - DNA, 25 bp, Homo sapien
catgttttagtagaagttttatttg

SEQ ID NO: 5818466 - DNA, 25 bp, Homo sapien
tgtttggagcggggcatccagtgcg

SEQ ID NO: 5818467 - DNA, 25 bp, Homo sapien
gaagaccctgttaaaagcacccggc

SEQ ID NO: 5818468 - DNA, 25 bp, Homo sapien
tgcccacacccgccagccggcgctg

SEQ ID NO: 5818469 - DNA, 25 bp, Homo sapien
atagtgaaactcctgtccctacaaa

SEQ ID NO: 5818470 - DNA, 25 bp, Homo sapien
cagctctgcctgcaggccctgtggg

SEQ ID NO: 5818471 - DNA, 25 bp, Homo sapien
agaaagagattccagctagtccttc

SEQ ID NO: 5818472 - DNA, 25 bp, Homo sapien
ctgtgtgtgccagctcggagacgtt

SEQ ID NO: 5818473 - DNA, 25 bp, Homo sapien
ccatgctgcggccagctctgcctgc

SEQ ID NO: 5818474 - DNA, 25 bp, Homo sapien
ttctcctccttcccgtgtgcctcag

SEQ ID NO: 5818475 - DNA, 25 bp, Homo sapien
tgccagcttggaattaaataatccg

SEQ ID NO: 5818476 - DNA, 25 bp, Homo sapien
cagtgcgtgcacatccccagcagtg

SEQ ID NO: 5818477 - DNA, 25 bp, Homo sapien
ataagcataaatatattcccagtgc

SEQ ID NO: 5818478 - DNA, 25 bp, Homo sapien
caaagctttcgcgggcacagcggcc

SEQ ID NO: 5818479 - DNA, 25 bp, Homo sapien
gaagtatcagacggcgagattcctg

SEQ ID NO: 5818480 - DNA, 25 bp, Homo sapien
caaatgaagatgatgaagtcttctt

SEQ ID NO: 5818481 - DNA, 25 bp, Homo sapien
acagcctccgttgcccacatctgag

SEQ ID NO: 5818482 - DNA, 25 bp, Homo sapien
tcagacggcgagattcctgtctaaa

SEQ ID NO: 5818483 - DNA, 25 bp, Homo sapien
gaagaattttcttttgaatgttttg

SEQ ID NO: 5818484 - DNA, 25 bp, Homo sapien
gggagaagttcgtggaggtgtacaa

SEQ ID NO: 5818485 - DNA, 25 bp, Homo sapien
agctcatagacctgagctcccctct

SEQ ID NO: 5818486 - DNA, 25 bp, Homo sapien
gcggggcatccagtgcgtgcacatc

SEQ ID NO: 5818487 - DNA, 25 bp, Homo sapien
gagcctcggctcttggcctcctccc

SEQ ID NO: 5818488 - DNA, 25 bp, Homo sapien
aaatatattcccagtgctggagagg

SEQ ID NO: 5818489 - DNA, 25 bp, Homo sapien
ctcatgacaaacactccagacatga

SEQ ID NO: 5818490 - DNA, 25 bp, Homo sapien
ctggtgcccaggcccgcctcacccg

SEQ ID NO: 5818491 - DNA, 25 bp, Homo sapien
tttgcccagggaatcatgcactgct

SEQ ID NO: 5818492 - DNA, 25 bp, Homo sapien
ggtcagaatcttctcaattgaataa

SEQ ID NO: 5818493 - DNA, 25 bp, Homo sapien
gaccctcggagccagggcgtggaaa

SEQ ID NO: 5818494 - DNA, 25 bp, Homo sapien
ccccacgtctcttaaaagggagaca

SEQ ID NO: 5818495 - DNA, 25 bp, Homo sapien
taaatggacttattgaagcataaaa

SEQ ID NO: 5818496 - DNA, 25 bp, Homo sapien
accagcaatctcgcaaggaagtcct

SEQ ID NO: 5818497 - DNA, 25 bp, Homo sapien
gaaagacagattccaggctggtgga

SEQ ID NO: 5818498 - DNA, 25 bp, Homo sapien
atgaagaattttcttttgaatgttt

SEQ ID NO: 5818499 - DNA, 25 bp, Homo sapien
atgaagtcttcttcggaccctttgg

SEQ ID NO: 5818500 - DNA, 25 bp, Homo sapien
ccagcagtgggcaaagctaaatcaa

SEQ ID NO: 5818501 - DNA, 25 bp, Homo sapien
gaacagccctaaagtggttttcaac

SEQ ID NO: 5818502 - DNA, 25 bp, Homo sapien
tcgcagtggcttacacttgtaaccc

SEQ ID NO: 5818503 - DNA, 25 bp, Homo sapien
aatgtgagaacctgtcttggaaaaa

SEQ ID NO: 5818504 - DNA, 25 bp, Homo sapien
ctcagcatcccccacccaaccccag

SEQ ID NO: 5818505 - DNA, 25 bp, Homo sapien
ggggctgaagaagaccctgttaaaa

SEQ ID NO: 5818506 - DNA, 25 bp, Homo sapien
ccagtgctggagagggtgggctgag

SEQ ID NO: 5818507 - DNA, 25 bp, Homo sapien
aactcctgtccctacaaaaagtaca

SEQ ID NO: 5818508 - DNA, 25 bp, Homo sapien
aatcccagctgagaaggaatcccac

SEQ ID NO: 5818509 - DNA, 25 bp, Homo sapien
ccacttgggccagggcaagcgggcg

SEQ ID NO: 5818510 - DNA, 25 bp, Homo sapien
ccagttgcgcttggtcagaatcttc

SEQ ID NO: 5818511 - DNA, 25 bp, Homo sapien
aggaatcccaccgggatgttctccc

SEQ ID NO: 5818512 - DNA, 25 bp, Homo sapien
atagttagatattctagatttacat

SEQ ID NO: 5818513 - DNA, 25 bp, Homo sapien
tgcaaatgaagatgatgaagtcttc

SEQ ID NO: 5818514 - DNA, 25 bp, Homo sapien
ctgagccctgaggctgacaaggaga

SEQ ID NO: 5818515 - DNA, 25 bp, Homo sapien
gcatcctcctggcaggccaagcggg

SEQ ID NO: 5818516 - DNA, 25 bp, Homo sapien
aaagtactgccacagaagtagctcg

SEQ ID NO: 5818517 - DNA, 25 bp, Homo sapien
acaaaggttatgcctactcctacaa

SEQ ID NO: 5818518 - DNA, 25 bp, Homo sapien
aatgtgccggccgccggaagccact

SEQ ID NO: 5818519 - DNA, 25 bp, Homo sapien
gctttgcccagggaatcatgcactg

SEQ ID NO: 5818520 - DNA, 25 bp, Homo sapien
gagagtccctttgcctggagccctc

SEQ ID NO: 5818521 - DNA, 25 bp, Homo sapien
caggggttctcctccttcccgtgtg

SEQ ID NO: 5818522 - DNA, 25 bp, Homo sapien
accaaattgctgctgcctcgagcgg

SEQ ID NO: 5818523 - DNA, 25 bp, Homo sapien
gcccaggagttcgggaccagcctgg

SEQ ID NO: 5818524 - DNA, 25 bp, Homo sapien
tggccgatgaaaaatttgacttcga

SEQ ID NO: 5818525 - DNA, 25 bp, Homo sapien
tcgcggtcactccagatgctgcaag

SEQ ID NO: 5818526 - DNA, 25 bp, Homo sapien
gcctctgcttcccgccgccaccctc

SEQ ID NO: 5818527 - DNA, 25 bp, Homo sapien
ctctggccggggagaagttcgtgga

SEQ ID NO: 5818528 - DNA, 25 bp, Homo sapien
tagctcccggcctctgtcaaacatc

SEQ ID NO: 5818529 - DNA, 25 bp, Homo sapien
ccgaaccaaatcctttgccttgaaa

SEQ ID NO: 5818530 - DNA, 25 bp, Homo sapien
ccggcgctgctctggccttccaccg

SEQ ID NO: 5818531 - DNA, 25 bp, Homo sapien
cacccgggcgccggggcctccgcac

SEQ ID NO: 5818532 - DNA, 25 bp, Homo sapien
atgctgcggccagctctgcctgcag

SEQ ID NO: 5818533 - DNA, 25 bp, Homo sapien
gggtgagcctcggctcttggcctcc

SEQ ID NO: 5818534 - DNA, 25 bp, Homo sapien
gcacatccccagcagtgggcaaagc

SEQ ID NO: 5818535 - DNA, 25 bp, Homo sapien
ccgtgtgcctcaggcacttaacttt

SEQ ID NO: 5818536 - DNA, 25 bp, Homo sapien
ttctcaattgaataagactagaagt

SEQ ID NO: 5818537 - DNA, 25 bp, Homo sapien
ccacgtctcttaaaagggagacata

SEQ ID NO: 5818538 - DNA, 25 bp, Homo sapien
ccccctcagcatcccccacccaacc

SEQ ID NO: 5818539 - DNA, 25 bp, Homo sapien
tggccggggagaagttcgtggaggt

SEQ ID NO: 5818540 - DNA, 25 bp, Homo sapien
ctgagagtccctttgcctggagccc

SEQ ID NO: 5818541 - DNA, 25 bp, Homo sapien
tattcctgcaaatagctcccggcct

SEQ ID NO: 5818542 - DNA, 25 bp, Homo sapien
gccgggcaggggacgtgaacatgga

SEQ ID NO: 5818543 - DNA, 25 bp, Homo sapien
gtgtcagccttgcccacacccgcca

SEQ ID NO: 5818544 - DNA, 25 bp, Homo sapien
gaagacattcttcttttggccgatg

SEQ ID NO: 5818545 - DNA, 25 bp, Homo sapien
gaaagcgattctactttctccaaaa

SEQ ID NO: 5818546 - DNA, 25 bp, Homo sapien
tactggctttacacattgagagcag

SEQ ID NO: 5818547 - DNA, 25 bp, Homo sapien
tccggttcccgaacagcctccgttg

SEQ ID NO: 5818548 - DNA, 25 bp, Homo sapien
ctcaattgaataagactagaagtat

SEQ ID NO: 5818549 - DNA, 25 bp, Homo sapien
gaagttcgtggaggtgtacaaagaa

SEQ ID NO: 5818550 - DNA, 25 bp, Homo sapien
ccaggacaaaaatcccagctgagaa

SEQ ID NO: 5818551 - DNA, 25 bp, Homo sapien
ctgcaatgagaactgaaccaacaag

SEQ ID NO: 5818552 - DNA, 25 bp, Homo sapien
ggcagggtcactgtccacagcaccc

SEQ ID NO: 5818553 - DNA, 25 bp, Homo sapien
cctgggaaatatagtgaaactcctg

SEQ ID NO: 5818554 - DNA, 25 bp, Homo sapien
gcctcggctcttggcctcctccccg

SEQ ID NO: 5818555 - DNA, 25 bp, Homo sapien
cctactcctacaaatcaatttaaaa

SEQ ID NO: 5818556 - DNA, 25 bp, Homo sapien
accggtggtgggacagctcatagac

SEQ ID NO: 5818557 - DNA, 25 bp, Homo sapien
agattccagctagtccttccaggac

SEQ ID NO: 5818558 - DNA, 25 bp, Homo sapien
ttggcagggtcactgtccacagcac

SEQ ID NO: 5818559 - DNA, 25 bp, Homo sapien
ttcttttggccgatgaaaaatttga

SEQ ID NO: 5818560 - DNA, 25 bp, Homo sapien
cggagaagcccaagaaagagattcc

SEQ ID NO: 5818561 - DNA, 25 bp, Homo sapien
caggcccgcctcacccgggcgccgg

SEQ ID NO: 5818562 - DNA, 25 bp, Homo sapien
ttaaataatccggttcccgaacagc

SEQ ID NO: 5818563 - DNA, 25 bp, Homo sapien
ccaaaacgatgcccagggccgtggg

SEQ ID NO: 5818564 - DNA, 25 bp, Homo sapien
tgcacgtcagttggcagggtcactg

SEQ ID NO: 5818565 - DNA, 25 bp, Homo sapien
gcaatgagaactgaaccaacaaggg

SEQ ID NO: 5818566 - DNA, 25 bp, Homo sapien
agttcgtggaggtgtacaaagaagc

SEQ ID NO: 5818567 - DNA, 25 bp, Homo sapien
ggcctccgcactctgctcatgcttt

SEQ ID NO: 5818568 - DNA, 25 bp, Homo sapien
tgggcggattacttgagcccaggag

SEQ ID NO: 5818569 - DNA, 25 bp, Homo sapien
tgtgccactgcactccagcctgggc

SEQ ID NO: 5818570 - DNA, 25 bp, Homo sapien
tgaagatgatgaagtcttcttcgga

SEQ ID NO: 5818571 - DNA, 25 bp, Homo sapien
cagctcggagacgttcctctgagcc

SEQ ID NO: 5818572 - DNA, 25 bp, Homo sapien
cgcacggcgtgtgtcagccttgccc

SEQ ID NO: 5818573 - DNA, 25 bp, Homo sapien
ccccggacagctcaacaccaaagct

SEQ ID NO: 5818574 - DNA, 25 bp, Homo sapien
tggccttccaccgatgacccccaaa

SEQ ID NO: 5818575 - DNA, 25 bp, Homo sapien
attcctaagttttctattggtgact

SEQ ID NO: 5818576 - DNA, 25 bp, Homo sapien
tggcttacacttgtaaccctagaac

SEQ ID NO: 5818577 - DNA, 25 bp, Homo sapien
aaaacgatgcccagggccgtgggct

SEQ ID NO: 5818578 - DNA, 25 bp, Homo sapien
accctcagaaacaagctttaggctg

SEQ ID NO: 5818579 - DNA, 25 bp, Homo sapien
cctccgttgcccacatctgagagtc

SEQ ID NO: 5818580 - DNA, 25 bp, Homo sapien
agtgggaggatggcctgagctcaag

SEQ ID NO: 5818581 - DNA, 25 bp, Homo sapien
aagatgtattgctgccagcttggaa

SEQ ID NO: 5818582 - DNA, 25 bp, Homo sapien
gaacttgggaggctgaggtgggcgg

SEQ ID NO: 5818583 - DNA, 25 bp, Homo sapien
cgcactctgctcatgctttgcccag

SEQ ID NO: 5818584 - DNA, 25 bp, Homo sapien
gctgtcaatgtgccggccgccggaa

SEQ ID NO: 5818585 - DNA, 25 bp, Homo sapien
ccaatgtgagaacctgtcttggaaa

SEQ ID NO: 5818586 - DNA, 25 bp, Homo sapien
gaacatggatgaccctaagaaggaa

SEQ ID NO: 5818587 - DNA, 25 bp, Homo sapien
aatctcgcaaggaagtcctcctcgg

SEQ ID NO: 5818588 - DNA, 25 bp, Homo sapien
gccttccaccgatgacccccaaaac

SEQ ID NO: 5818589 - DNA, 25 bp, Homo sapien
agaccctgttaaaagcacccggctc

SEQ ID NO: 5818590 - DNA, 25 bp, Homo sapien
agcctgggaaatatagtgaaactcc

SEQ ID NO: 5818591 - DNA, 25 bp, Homo sapien
tgggaaatatagtgaaactcctgtc

SEQ ID NO: 5818592 - DNA, 25 bp, Homo sapien
agcatccctggggctgcggagaagc

SEQ ID NO: 5818593 - DNA, 25 bp, Homo sapien
gcctcgagcggcctctgttagagga

SEQ ID NO: 5818594 - DNA, 25 bp, Homo sapien
ccgccaccctcctcgctgccattct

SEQ ID NO: 5818595 - DNA, 25 bp, Homo sapien
ggtcactccagatgctgcaagccag

SEQ ID NO: 5818596 - DNA, 25 bp, Homo sapien
atctgagagtccctttgcctggagc

SEQ ID NO: 5818597 - DNA, 25 bp, Homo sapien
caggggacgtgaacatggatgaccc

SEQ ID NO: 5818598 - DNA, 25 bp, Homo sapien
accctgttaaaagcacccggctcta

SEQ ID NO: 5818599 - DNA, 25 bp, Homo sapien
agccccttgctggggccccctgtgg

SEQ ID NO: 5818600 - DNA, 25 bp, Homo sapien
cggaagccacttgggccagggcaag

SEQ ID NO: 5818601 - DNA, 25 bp, Homo sapien
gtcttcttcgagtgcaaatgaagat

SEQ ID NO: 5818602 - DNA, 25 bp, Homo sapien
ctgcccagctctggtgcccaggccc

SEQ ID NO: 5818603 - DNA, 25 bp, Homo sapien
caccctcctcgctgccattctctgg

SEQ ID NO: 5818604 - DNA, 25 bp, Homo sapien
cgcagtcgtgcacgtcagttggcag

SEQ ID NO: 5818605 - DNA, 25 bp, Homo sapien
ggacagctcatagacctgagctccc

SEQ ID NO: 5818606 - DNA, 25 bp, Homo sapien
acactccagacatgaataaaaatgt

SEQ ID NO: 5818607 - DNA, 25 bp, Homo sapien
gggtggagatgcagcccctagtgag

SEQ ID NO: 5818608 - DNA, 25 bp, Homo sapien
gagcaacagaaagacagattccagg

SEQ ID NO: 5818609 - DNA, 25 bp, Homo sapien
cagaaagacagattccaggctggtg

SEQ ID NO: 5818610 - DNA, 25 bp, Homo sapien
gggctgtgattgtgccactgcactc

SEQ ID NO: 5818611 - DNA, 25 bp, Homo sapien
tcctcggggcctgtttggagcgggg

SEQ ID NO: 5818612 - DNA, 25 bp, Homo sapien
tgtcaatgtgccggccgccggaagc

SEQ ID NO: 5818613 - DNA, 25 bp, Homo sapien
ggggttctcctccttcccgtgtgcc

SEQ ID NO: 5818614 - DNA, 25 bp, Homo sapien
ttttctccagaggaaagcgattcta

SEQ ID NO: 5818615 - DNA, 25 bp, Homo sapien
agttagatattctagatttacatta

SEQ ID NO: 5818616 - DNA, 25 bp, Homo sapien
ggaaccaggcagcccaagctgccaa

SEQ ID NO: 5818617 - DNA, 25 bp, Homo sapien
aatcctttgccttgaaagaacagcc

SEQ ID NO: 5818618 - DNA, 25 bp, Homo sapien
gcacggaccacccaaggcctctgct

SEQ ID NO: 5818619 - DNA, 25 bp, Homo sapien
ccagccggcgctgctctggccttcc

SEQ ID NO: 5818620 - DNA, 25 bp, Homo sapien
gagccagggcgtggaaagattcata

SEQ ID NO: 5818621 - DNA, 25 bp, Homo sapien
gaaggaatcccaccgggatgttctc

SEQ ID NO: 5818622 - DNA, 25 bp, Homo sapien
catgcactgctcatgctgcaagtca

SEQ ID NO: 5818623 - DNA, 25 bp, Homo sapien
gcgggtcgatgtttctgagctggca

SEQ ID NO: 5818624 - DNA, 25 bp, Homo sapien
gatgctgcaagccagcccctcattg

SEQ ID NO: 5818625 - DNA, 25 bp, Homo sapien
taaagtggttttcaaccctcagaaa

SEQ ID NO: 5818626 - DNA, 25 bp, Homo sapien
ggtggcggccagtggctgaactcca

SEQ ID NO: 5818627 - DNA, 25 bp, Homo sapien
ggcatccagtgcgtgcacatcccca

SEQ ID NO: 5818628 - DNA, 25 bp, Homo sapien
acaagctttaggctggtcgcagtgg

SEQ ID NO: 5818629 - DNA, 25 bp, Homo sapien
cctagtgaggctcttcttgtagata

SEQ ID NO: 5818630 - DNA, 25 bp, Homo sapien
ccccagaagcacacgtggctgtagg

SEQ ID NO: 5818631 - DNA, 25 bp, Homo sapien
aaattccaagacaaaggttatgcct

SEQ ID NO: 5818632 - DNA, 25 bp, Homo sapien
tccaaaagtactgccacagaagtag

SEQ ID NO: 5818633 - DNA, 25 bp, Homo sapien
cgatgaaaaatttgacttcgatctt

SEQ ID NO: 5818634 - DNA, 25 bp, Homo sapien
cggccagctctgcctgcaggccctg

SEQ ID NO: 5818635 - DNA, 25 bp, Homo sapien
agcaccccggttagacgctcatctg

SEQ ID NO: 5818636 - DNA, 25 bp, Homo sapien
tccagctagtccttccaggacaaaa

SEQ ID NO: 5818637 - DNA, 25 bp, Homo sapien
gcgtggaaagattcatacaggagtc

SEQ ID NO: 5818638 - DNA, 25 bp, Homo sapien
atccccagcagtgggcaaagctaaa

SEQ ID NO: 5818639 - DNA, 25 bp, Homo sapien
gactccccggacagctcaacaccaa

SEQ ID NO: 5818640 - DNA, 25 bp, Homo sapien
aggaagacattcttcttttggccga

SEQ ID NO: 5818641 - DNA, 25 bp, Homo sapien
caagttctaagccgaaccaaatcct

SEQ ID NO: 5818642 - DNA, 25 bp, Homo sapien
ctacttgggaggctgaagtgggagg

SEQ ID NO: 5818643 - DNA, 25 bp, Homo sapien
cccaaggcctctgcttcccgccgcc

SEQ ID NO: 5818644 - DNA, 25 bp, Homo sapien
taaaaatgtggccaaaccttcaccg

SEQ ID NO: 5818645 - DNA, 25 bp, Homo sapien
aggcagcgactcagaggaagcccgg

SEQ ID NO: 5818646 - DNA, 25 bp, Homo sapien
tctgcctgcaggccctgtgggggca

SEQ ID NO: 5818647 - DNA, 25 bp, Homo sapien
tttggccgatgaaaaatttgacttc

SEQ ID NO: 5818648 - DNA, 25 bp, Homo sapien
caagaaagagattccagctagtcct

SEQ ID NO: 5818649 - DNA, 25 bp, Homo sapien
gaggctcttcttgtagatatcaaac

SEQ ID NO: 5818650 - DNA, 25 bp, Homo sapien
ttagccgggtgtggtagtgcatgcc

SEQ ID NO: 5818651 - DNA, 25 bp, Homo sapien
cccacacccgccagccggcgctgct

SEQ ID NO: 5818652 - DNA, 25 bp, Homo sapien
cagaatgggacccgccatgctgcgg

SEQ ID NO: 5818653 - DNA, 25 bp, Homo sapien
cctctgtcaaacatcagcaagtcag

SEQ ID NO: 5818654 - DNA, 25 bp, Homo sapien
ctaagttttctattggtgactcccc

SEQ ID NO: 5818655 - DNA, 25 bp, Homo sapien
gtcgtgcacgtcagttggcagggtc

SEQ ID NO: 5818656 - DNA, 25 bp, Homo sapien
tgtaaccctagaacttgggaggctg

SEQ ID NO: 5818657 - DNA, 25 bp, Homo sapien
gagagcaacagaaagacagattcca

SEQ ID NO: 5818658 - DNA, 25 bp, Homo sapien
cagcaccacaaagcctgctgagcgc

SEQ ID NO: 5818659 - DNA, 25 bp, Homo sapien
gaagtgggaggatggcctgagctca

SEQ ID NO: 5818660 - DNA, 25 bp, Homo sapien
gggccagcaccacaaagcctgctga

SEQ ID NO: 5818661 - DNA, 25 bp, Homo sapien
gggagagcaacagaaagacagattc

SEQ ID NO: 5818662 - DNA, 25 bp, Homo sapien
cacggcacccccctcagcatccccc

SEQ ID NO: 5818663 - DNA, 25 bp, Homo sapien
tgctgcctcgagcggcctctgttag

SEQ ID NO: 5818664 - DNA, 25 bp, Homo sapien
gccgcagtcgtgcacgtcagttggc

SEQ ID NO: 5818665 - DNA, 25 bp, Homo sapien
tgtcagacagccccttgctggggcc

SEQ ID NO: 5818666 - DNA, 25 bp, Homo sapien
ctcccctctgatccagctgagccct

SEQ ID NO: 5818667 - DNA, 25 bp, Homo sapien
gtgggcaaagctaaatcaagtgaat

SEQ ID NO: 5818668 - DNA, 25 bp, Homo sapien
atgtggccaaaccttcaccggtggt

SEQ ID NO: 5818669 - DNA, 25 bp, Homo sapien
aagcacacgtggctgtaggatctga

SEQ ID NO: 5818670 - DNA, 25 bp, Homo sapien
gcaaagctaaatcaagtgaatttgc

SEQ ID NO: 5818671 - DNA, 25 bp, Homo sapien
gccggggagaagttcgtggaggtgt

SEQ ID NO: 5818672 - DNA, 25 bp, Homo sapien
acagcggccgcagtcgtgcacgtca

SEQ ID NO: 5818673 - DNA, 25 bp, Homo sapien
agctgagccctgaggctgacaagga

SEQ ID NO: 5818674 - DNA, 25 bp, Homo sapien
ggctggaatgtgaagcctcagtcac

SEQ ID NO: 5818675 - DNA, 25 bp, Homo sapien
atgttttgtatgtaaaatagcaagt

SEQ ID NO: 5818676 - DNA, 25 bp, Homo sapien
agtactgccacagaagtagctcggg

SEQ ID NO: 5818677 - DNA, 25 bp, Homo sapien
ggaccaaattgctgctgcctcgagc

SEQ ID NO: 5818678 - DNA, 25 bp, Homo sapien
gccctgaggctgacaaggagaacgt

SEQ ID NO: 5818679 - DNA, 25 bp, Homo sapien
ttggcctcctccccggccctgccca

SEQ ID NO: 5818680 - DNA, 25 bp, Homo sapien
aagggagagcaacagaaagacagat

SEQ ID NO: 5818681 - DNA, 25 bp, Homo sapien
agcccgggaccaaattgctgctgcc

SEQ ID NO: 5818682 - DNA, 25 bp, Homo sapien
agcccctagtgaggctcttcttgta

SEQ ID NO: 5818683 - DNA, 25 bp, Homo sapien
ttgggccagggcaagcgggcgatcc

SEQ ID NO: 5818684 - DNA, 25 bp, Homo sapien
ttacacttgtaaccctagaacttgg

SEQ ID NO: 5818685 - DNA, 25 bp, Homo sapien
tcatcgacttctgcgataccccaga

SEQ ID NO: 5818686 - DNA, 25 bp, Homo sapien
gctctcccctgtgtgtgccagctcg

SEQ ID NO: 5818687 - DNA, 25 bp, Homo sapien
aacgtggattccccactcctcaagt

SEQ ID NO: 5818688 - DNA, 25 bp, Homo sapien
atgaccctaagaaggaagacattct

SEQ ID NO: 5818689 - DNA, 25 bp, Homo sapien
cttccaccgatgacccccaaaacga

SEQ ID NO: 5818690 - DNA, 25 bp, Homo sapien
gaagcccgggaccaaattgctgctg

SEQ ID NO: 5818691 - DNA, 25 bp, Homo sapien
ttcttttgaatgttttgtatgtaaa

SEQ ID NO: 5818692 - DNA, 25 bp, Homo sapien
gtcactgtccacagcaccccggtta

SEQ ID NO: 5818693 - DNA, 25 bp, Homo sapien
gttcctctgagccccgcaagaactc

SEQ ID NO: 5818694 - DNA, 25 bp, Homo sapien
aaatcaagtgaatttgcaagtattc

SEQ ID NO: 5818695 - DNA, 25 bp, Homo sapien
caaacctgccccgggtgctgtcaat

SEQ ID NO: 5818696 - DNA, 25 bp, Homo sapien
gggcaagcgggcgatccctgttcca

SEQ ID NO: 5818697 - DNA, 25 bp, Homo sapien
acattgagagcagcagccggaacca

SEQ ID NO: 5818698 - DNA, 25 bp, Homo sapien
gtggccaaaccttcaccggtggtgg

SEQ ID NO: 5818699 - DNA, 25 bp, Homo sapien
ttccccactcctcaagttctaagcc

SEQ ID NO: 5818700 - DNA, 25 bp, Homo sapien
acgtggctgtaggatctgaaagcag

SEQ ID NO: 5818701 - DNA, 25 bp, Homo sapien
tggagcggggcatccagtgcgtgca

SEQ ID NO: 5818702 - DNA, 25 bp, Homo sapien
ctgaagtgggaggatggcctgagct

SEQ ID NO: 5818703 - DNA, 25 bp, Homo sapien
cttgaaagaacagccctaaagtggt

SEQ ID NO: 5818704 - DNA, 25 bp, Homo sapien
atgcccagggccgtgggctctcccc

SEQ ID NO: 5818705 - DNA, 25 bp, Homo sapien
cccgccagccggcgctgctctggcc

SEQ ID NO: 5818706 - DNA, 25 bp, Homo sapien
gtgtcccctgacaggggttctcctc

SEQ ID NO: 5818707 - DNA, 25 bp, Homo sapien
ttttcttttgaatgttttgtatgta

SEQ ID NO: 5818708 - DNA, 25 bp, Homo sapien
agcaggcctctgatcgacctcatga

SEQ ID NO: 5818709 - DNA, 25 bp, Homo sapien
aaagcaggcctctgatcgacctcat

SEQ ID NO: 5818710 - DNA, 25 bp, Homo sapien
ccggaaggtggcggccagtggctga

SEQ ID NO: 5818711 - DNA, 25 bp, Homo sapien
agctcaacaccaaagctttcgcggg

SEQ ID NO: 5818712 - DNA, 25 bp, Homo sapien
atatcaaactggaaccactcgcggt

SEQ ID NO: 5818713 - DNA, 25 bp, Homo sapien
gccagctcggagacgttcctctgag

SEQ ID NO: 5818714 - DNA, 25 bp, Homo sapien
acccggctctaccagcaatctcgca

SEQ ID NO: 5818715 - DNA, 25 bp, Homo sapien
ttcgatctttcattgtcttcttcga

SEQ ID NO: 5818716 - DNA, 25 bp, Homo sapien
cccaccgggatgttctccctgacaa

SEQ ID NO: 5818717 - DNA, 25 bp, Homo sapien
tgagggactggggccagcacggacc

SEQ ID NO: 5818718 - DNA, 25 bp, Homo sapien
gatctgaaagcaggcctctgatcga

SEQ ID NO: 5818719 - DNA, 25 bp, Homo sapien
ccgccggaagccacttgggccaggg

SEQ ID NO: 5818720 - DNA, 25 bp, Homo sapien
actggggccagcacggaccacccaa

SEQ ID NO: 5818721 - DNA, 25 bp, Homo sapien
ccaaaccttcaccggtggtgggaca

SEQ ID NO: 5818722 - DNA, 25 bp, Homo sapien
atcagcaagtcaggcagaatgggac

SEQ ID NO: 5818723 - DNA, 25 bp, Homo sapien
agctcacttactggctttacacatt

SEQ ID NO: 5818724 - DNA, 25 bp, Homo sapien
aaagctaaatcaagtgaatttgcaa

SEQ ID NO: 5818725 - DNA, 25 bp, Homo sapien
cctgacaggggttctcctccttccc

SEQ ID NO: 5818726 - DNA, 25 bp, Homo sapien
tagaggaagaagcatccctggggct

SEQ ID NO: 5818727 - DNA, 25 bp, Homo sapien
tcatgctgcaagtcaggcagcgact

SEQ ID NO: 5818728 - DNA, 25 bp, Homo sapien
ccagctgagaaggaatcccaccggg

SEQ ID NO: 5818729 - DNA, 25 bp, Homo sapien
gcgggcacagcggccgcagtcgtgc

SEQ ID NO: 5818730 - DNA, 25 bp, Homo sapien
gcgcttggtcagaatcttctcaatt

SEQ ID NO: 5818731 - DNA, 25 bp, Homo sapien
ctgaggtgggcggattacttgagcc

SEQ ID NO: 5818732 - DNA, 25 bp, Homo sapien
gcccgcctcacccgggcgccggggc

SEQ ID NO: 5818733 - DNA, 25 bp, Homo sapien
tgccattctctgggctggaatgtga

SEQ ID NO: 5818734 - DNA, 25 bp, Homo sapien
aaccactcgcggtcactccagatgc

SEQ ID NO: 5818735 - DNA, 25 bp, Homo sapien
cctccgcactctgctcatgctttgc

SEQ ID NO: 5818736 - DNA, 25 bp, Homo sapien
ggcaggccaagcgggtcgatgtttc

SEQ ID NO: 5818737 - DNA, 25 bp, Homo sapien
agttttctattggtgactccccgga

SEQ ID NO: 5818738 - DNA, 25 bp, Homo sapien
gtgggtgagcctcggctcttggcct

SEQ ID NO: 5818739 - DNA, 25 bp, Homo sapien
ttgccttgaaagaacagccctaaag

SEQ ID NO: 5818740 - DNA, 25 bp, Homo sapien
tgggaggatggcctgagctcaagga

SEQ ID NO: 5818741 - DNA, 25 bp, Homo sapien
caaccctcagaaacaagctttaggc

SEQ ID NO: 5818742 - DNA, 25 bp, Homo sapien
gattacttgagcccaggagttcggg

SEQ ID NO: 5818743 - DNA, 25 bp, Homo sapien
agacgttcctctgagccccgcaaga

SEQ ID NO: 5818744 - DNA, 25 bp, Homo sapien
cctgaggctgacaaggagaacgtgg

SEQ ID NO: 5818745 - DNA, 25 bp, Homo sapien
tgggctgagggactggggccagcac

SEQ ID NO: 5818746 - DNA, 25 bp, Homo sapien
ctccagaggaaagcgattctacttt

SEQ ID NO: 5818747 - DNA, 25 bp, Homo sapien
ggctcttcttgtagatatcaaactg

SEQ ID NO: 5818748 - DNA, 25 bp, Homo sapien
gggccagggcaagcgggcgatccct

SEQ ID NO: 5818749 - DNA, 25 bp, Homo sapien
ccggttagacgctcatctgggccag

SEQ ID NO: 5818750 - DNA, 25 bp, Homo sapien
acggaccacccaaggcctctgcttc

SEQ ID NO: 5818751 - DNA, 25 bp, Homo sapien
agctgccaagcctgaagaccctcgg

SEQ ID NO: 5818752 - DNA, 25 bp, Homo sapien
agcccaagctgccaagcctgaagac

SEQ ID NO: 5818753 - DNA, 25 bp, Homo sapien
ggatgaccctaagaaggaagacatt

SEQ ID NO: 5818754 - DNA, 25 bp, Homo sapien
aaaccttcaccggtggtgggacagc

SEQ ID NO: 5818755 - DNA, 25 bp, Homo sapien
cactctgctcatgctttgcccaggg

SEQ ID NO: 5818756 - DNA, 25 bp, Homo sapien
tcctggcaggccaagcgggtcgatg

SEQ ID NO: 5818757 - DNA, 25 bp, Homo sapien
gagccctgaggctgacaaggagaac

SEQ ID NO: 5818758 - DNA, 25 bp, Homo sapien
tacctgtcagacagccccttgctgg

SEQ ID NO: 5818759 - DNA, 25 bp, Homo sapien
ctccagcctgggcaccaatgtgaga

SEQ ID NO: 5818760 - DNA, 25 bp, Homo sapien
ccagcctgggaaatatagtgaaact

SEQ ID NO: 5818761 - DNA, 25 bp, Homo sapien
cagtcgtgcacgtcagttggcaggg

SEQ ID NO: 5818762 - DNA, 25 bp, Homo sapien
tcccagtgctggagagggtgggctg

SEQ ID NO: 5818763 - DNA, 25 bp, Homo sapien
ctgctgagcgcacggcgtgtgtcag

SEQ ID NO: 5818764 - DNA, 25 bp, Homo sapien
tcaaggagatgcaggctgcagtggg

SEQ ID NO: 5818765 - DNA, 25 bp, Homo sapien
gatgtattgctgccagcttggaatt

SEQ ID NO: 5818766 - DNA, 25 bp, Homo sapien
tgggctggaatgtgaagcctcagtc

SEQ ID NO: 5818767 - DNA, 25 bp, Homo sapien
gcgataccccagaagcacacgtggc

SEQ ID NO: 5818768 - DNA, 25 bp, Homo sapien
cgacctcatgacaaacactccagac

SEQ ID NO: 5818769 - DNA, 25 bp, Homo sapien
gagtccctttgcctggagccctctg

SEQ ID NO: 5818770 - DNA, 25 bp, Homo sapien
cagcaatctcgcaaggaagtcctcc

SEQ ID NO: 5818771 - DNA, 25 bp, Homo sapien
gatgacccccaaaacgatgcccagg

SEQ ID NO: 5818772 - DNA, 25 bp, Homo sapien
aagcctcagtcactctaaatgaaga

SEQ ID NO: 5818773 - DNA, 25 bp, Homo sapien
tgggcaccaatgtgagaacctgtct

SEQ ID NO: 5818774 - DNA, 25 bp, Homo sapien
agtgctggagagggtgggctgaggg

SEQ ID NO: 5818775 - DNA, 25 bp, Homo sapien
aaaatttgacttcgatctttcattg

SEQ ID NO: 5818776 - DNA, 25 bp, Homo sapien
cctgccccgggtgctgtcaatgtgc

SEQ ID NO: 5818777 - DNA, 25 bp, Homo sapien
ttctactttctccaaaagtactgcc

SEQ ID NO: 5818778 - DNA, 25 bp, Homo sapien
ccctgtgggggcatcctcctggcag

SEQ ID NO: 5818779 - DNA, 25 bp, Homo sapien
cagcacggaccacccaaggcctctg

SEQ ID NO: 5818780 - DNA, 25 bp, Homo sapien
gcacccccctcagcatcccccaccc

SEQ ID NO: 5818781 - DNA, 25 bp, Homo sapien
agaagcacacgtggctgtaggatct

SEQ ID NO: 5818782 - DNA, 25 bp, Homo sapien
ggccaagcgggtcgatgtttctgag

SEQ ID NO: 5818783 - DNA, 25 bp, Homo sapien
tagtgaggctcttcttgtagatatc

SEQ ID NO: 5818784 - DNA, 25 bp, Homo sapien
gttcgggaccagcctgggaaatata

SEQ ID NO: 5818785 - DNA, 25 bp, Homo sapien
cacgtcagttggcagggtcactgtc

SEQ ID NO: 5818786 - DNA, 25 bp, Homo sapien
ttctgagctggcagcggagcagctc

SEQ ID NO: 5818787 - DNA, 25 bp, Homo sapien
aatgaagatgatgaagtcttcttcg

SEQ ID NO: 5818788 - DNA, 25 bp, Homo sapien
ggctctaccagcaatctcgcaagga

SEQ ID NO: 5818789 - DNA, 25 bp, Homo sapien
cctgagctcccctctgatccagctg

SEQ ID NO: 5818790 - DNA, 25 bp, Homo sapien
tctgaaagcaggcctctgatcgacc

SEQ ID NO: 5818791 - DNA, 25 bp, Homo sapien
caggcctctgatcgacctcatgaca

SEQ ID NO: 5818792 - DNA, 25 bp, Homo sapien
atactacctgtcagacagccccttg

SEQ ID NO: 5818793 - DNA, 25 bp, Homo sapien
gactccggaaggtggcggccagtgg

SEQ ID NO: 5818794 - DNA, 25 bp, Homo sapien
ctcttcttgtagatatcaaactgga

SEQ ID NO: 5818795 - DNA, 25 bp, Homo sapien
cgatgcccagggccgtgggctctcc

SEQ ID NO: 5818796 - DNA, 25 bp, Homo sapien
agccccacgtctcttaaaagggaga

SEQ ID NO: 5818797 - DNA, 25 bp, Homo sapien
caaactggaaccactcgcggtcact

SEQ ID NO: 5818798 - DNA, 25 bp, Homo sapien
ctcacggcacccccctcagcatccc

SEQ ID NO: 5818799 - DNA, 25 bp, Homo sapien
aggctggtggatgtgtcccctgaca

SEQ ID NO: 5818800 - DNA, 25 bp, Homo sapien
agtcttcttcggaccctttggacat

SEQ ID NO: 5818801 - DNA, 25 bp, Homo sapien
taagccgaaccaaatcctttgcctt

SEQ ID NO: 5818802 - DNA, 25 bp, Homo sapien
tagaagtatcagacggcgagattcc

SEQ ID NO: 5818803 - DNA, 25 bp, Homo sapien
gctcgggaggaagccaagccgggtg

SEQ ID NO: 5818804 - DNA, 25 bp, Homo sapien
tccaccgatgacccccaaaacgatg

SEQ ID NO: 5818805 - DNA, 25 bp, Homo sapien
ggcgagattcctgtctaaattccaa

SEQ ID NO: 5818806 - DNA, 25 bp, Homo sapien
tcgctgccattctctgggctggaat

SEQ ID NO: 5818807 - DNA, 25 bp, Homo sapien
tcagaaacaagctttaggctggtcg

SEQ ID NO: 5818808 - DNA, 25 bp, Homo sapien
actttctccaaaagtactgccacag

SEQ ID NO: 5818809 - DNA, 25 bp, Homo sapien
agacagccccttgctggggccccct

SEQ ID NO: 5818810 - DNA, 25 bp, Homo sapien
tgtgagaacctgtcttggaaaaaaa

SEQ ID NO: 5818811 - DNA, 25 bp, Homo sapien
tcaccggtggtgggacagctcatag

SEQ ID NO: 5818812 - DNA, 25 bp, Homo sapien
ccactgcactccagcctgggcacca

SEQ ID NO: 5818813 - DNA, 25 bp, Homo sapien
tcttctcaattgaataagactagaa

SEQ ID NO: 5818814 - DNA, 25 bp, Homo sapien
tctgggctggaatgtgaagcctcag

SEQ ID NO: 5818815 - DNA, 25 bp, Homo sapien
tgccccgggtgctgtcaatgtgccg

SEQ ID NO: 5818816 - DNA, 25 bp, Homo sapien
ctccccggccctgcccagctctggt

SEQ ID NO: 5818817 - DNA, 25 bp, Homo sapien
cccagggaatcatgcactgctcatg

SEQ ID NO: 5818818 - DNA, 25 bp, Homo sapien
agttggcagggtcactgtccacagc

SEQ ID NO: 5818819 - DNA, 25 bp, Homo sapien
ctggagagggtgggctgagggactg

SEQ ID NO: 5818820 - DNA, 25 bp, Homo sapien
ctctgcttcccgccgccaccctcct

SEQ ID NO: 5818821 - DNA, 25 bp, Homo sapien
cagattccaggctggtggatgtgtc

SEQ ID NO: 5818822 - DNA, 25 bp, Homo sapien
aggcagcccaagctgccaagcctga

SEQ ID NO: 5818823 - DNA, 25 bp, Homo sapien
agatgcagcccctagtgaggctctt

SEQ ID NO: 5818824 - DNA, 25 bp, Homo sapien
cggggagaagttcgtggaggtgtac

SEQ ID NO: 5818825 - DNA, 25 bp, Homo sapien
tacaaagaagctcacttactggctt

SEQ ID NO: 5818826 - DNA, 25 bp, Homo sapien
cttgcccacacccgccagccggcgc

SEQ ID NO: 5818827 - DNA, 25 bp, Homo sapien
tcctcaagttctaagccgaaccaaa

SEQ ID NO: 5818828 - DNA, 25 bp, Homo sapien
gaggctgaggtgggcggattacttg

SEQ ID NO: 5818829 - DNA, 25 bp, Homo sapien
gtggctgtaggatctgaaagcaggc

SEQ ID NO: 5818830 - DNA, 25 bp, Homo sapien
ttgggaggctgaggtgggcggatta

SEQ ID NO: 5818831 - DNA, 25 bp, Homo sapien
atgtttctgagctggcagcggagca

SEQ ID NO: 5818832 - DNA, 25 bp, Homo sapien
aagcgattctactttctccaaaagt

SEQ ID NO: 5818833 - DNA, 25 bp, Homo sapien
gccccgcaagaactctgcaatgaga

SEQ ID NO: 5818834 - DNA, 25 bp, Homo sapien
agttggggctgaagaagaccctgtt

SEQ ID NO: 5818835 - DNA, 25 bp, Homo sapien
tttctccaaaagtactgccacagaa

SEQ ID NO: 5818836 - DNA, 25 bp, Homo sapien
atcctcctggcaggccaagcgggtc

SEQ ID NO: 5818837 - DNA, 25 bp, Homo sapien
ttcattgtcttcttcgagtgcaaat

SEQ ID NO: 5818838 - DNA, 25 bp, Homo sapien
gtggatgtgtcccctgacaggggtt

SEQ ID NO: 5818839 - DNA, 25 bp, Homo sapien
aaaattagccgggtgtggtagtgca

SEQ ID NO: 5818840 - DNA, 25 bp, Homo sapien
cccctagtgaggctcttcttgtaga

SEQ ID NO: 5818841 - DNA, 25 bp, Homo sapien
agttgcgcttggtcagaatcttctc

SEQ ID NO: 5818842 - DNA, 25 bp, Homo sapien
tcgggaggaagccaagccgggtgga

SEQ ID NO: 5818843 - DNA, 25 bp, Homo sapien
agatattctagatttacattaaatt

SEQ ID NO: 5818844 - DNA, 25 bp, Homo sapien
cttcaccggtggtgggacagctcat

SEQ ID NO: 5818845 - DNA, 25 bp, Homo sapien
cgggaccaaattgctgctgcctcga

SEQ ID NO: 5818846 - DNA, 25 bp, Homo sapien
accaaatcctttgccttgaaagaac

SEQ ID NO: 5818847 - DNA, 25 bp, Homo sapien
ggcgccggggcctccgcactctgct

SEQ ID NO: 5818848 - DNA, 25 bp, Homo sapien
tccagacatgaataaaaatgtggcc

SEQ ID NO: 5818849 - DNA, 25 bp, Homo sapien
gcaagtcaggcagaatgggacccgc

SEQ ID NO: 5818850 - DNA, 25 bp, Homo sapien
agctctggtgcccaggcccgcctca

SEQ ID NO: 5818851 - DNA, 25 bp, Homo sapien
tgttttagtagaagttttatttgaa

SEQ ID NO: 5818852 - DNA, 25 bp, Homo sapien
gctgcagtgggctgtgattgtgcca

SEQ ID NO: 5818853 - DNA, 25 bp, Homo sapien
cttaacttttctccagaggaaagcg

SEQ ID NO: 5818854 - DNA, 25 bp, Homo sapien
cggattacttgagcccaggagttcg

SEQ ID NO: 5818855 - DNA, 25 bp, Homo sapien
gagaagttcgtggaggtgtacaaag

SEQ ID NO: 5818856 - DNA, 25 bp, Homo sapien
agacgctcatctgggccagcaccac

SEQ ID NO: 5818857 - DNA, 25 bp, Homo sapien
gctgcggagaagcccaagaaagaga

SEQ ID NO: 5818858 - DNA, 25 bp, Homo sapien
cttaaaagggagacatactacctgt

SEQ ID NO: 5818859 - DNA, 25 bp, Homo sapien
acaaggagaacgtggattccccact

SEQ ID NO: 5818860 - DNA, 25 bp, Homo sapien
aattagccgggtgtggtagtgcatg

SEQ ID NO: 5818861 - DNA, 25 bp, Homo sapien
caagctgccaagcctgaagaccctc

SEQ ID NO: 5818862 - DNA, 25 bp, Homo sapien
cctaaagtggttttcaaccctcaga

SEQ ID NO: 5818863 - DNA, 25 bp, Homo sapien
ggccctgtgggggcatcctcctggc

SEQ ID NO: 5818864 - DNA, 25 bp, Homo sapien
tctggccttccaccgatgaccccca

SEQ ID NO: 5818865 - DNA, 25 bp, Homo sapien
aatgaagaaaagccccacgtctctt

SEQ ID NO: 5818866 - DNA, 25 bp, Homo sapien
ctgagccccgcaagaactctgcaat

SEQ ID NO: 5818867 - DNA, 25 bp, Homo sapien
gggtcgatgtttctgagctggcagc

SEQ ID NO: 5818868 - DNA, 25 bp, Homo sapien
tgaaagaacagccctaaagtggttt

SEQ ID NO: 5818869 - DNA, 25 bp, Homo sapien
cctcctggcaggccaagcgggtcga

SEQ ID NO: 5818870 - DNA, 25 bp, Homo sapien
gccgatgaaaaatttgacttcgatc

SEQ ID NO: 5818871 - DNA, 25 bp, Homo sapien
catgaataaaaatgtggccaaacct

SEQ ID NO: 5818872 - DNA, 25 bp, Homo sapien
ctctgctcatgctttgcccagggaa

SEQ ID NO: 5818873 - DNA, 25 bp, Homo sapien
atgcctgtagtcccagctacttggg

SEQ ID NO: 5818874 - DNA, 25 bp, Homo sapien
agggagacatactacctgtcagaca

SEQ ID NO: 5818875 - DNA, 25 bp, Homo sapien
ctcctcgctgccattctctgggctg

SEQ ID NO: 5818876 - DNA, 25 bp, Homo sapien
ctcatagacctgagctcccctctga

SEQ ID NO: 5818877 - DNA, 25 bp, Homo sapien
gtgcctcaggcacttaacttttctc

SEQ ID NO: 5818878 - DNA, 25 bp, Homo sapien
ctcaagttctaagccgaaccaaatc

SEQ ID NO: 5818879 - DNA, 25 bp, Homo sapien
ggctgaagtgggaggatggcctgag

SEQ ID NO: 5818880 - DNA, 25 bp, Homo sapien
gccctaaagtggttttcaaccctca

SEQ ID NO: 5818881 - DNA, 25 bp, Homo sapien
ccacagcaccccggttagacgctca

SEQ ID NO: 5818882 - DNA, 25 bp, Homo sapien
taaccctagaacttgggaggctgag

SEQ ID NO: 5818883 - DNA, 25 bp, Homo sapien
tgaagaaaagccccacgtctcttaa

SEQ ID NO: 5818884 - DNA, 25 bp, Homo sapien
aagatgatgaagtcttcttcggacc

SEQ ID NO: 5818885 - DNA, 25 bp, Homo sapien
aaataagcataaatatattcccagt

SEQ ID NO: 5818886 - DNA, 25 bp, Homo sapien
gaaatgaagaaaagccccacgtctc

SEQ ID NO: 5818887 - DNA, 25 bp, Homo sapien
ctgctcatgctgcaagtcaggcagc

SEQ ID NO: 5818888 - DNA, 25 bp, Homo sapien
gaggctgaagtgggaggatggcctg

SEQ ID NO: 5818889 - DNA, 25 bp, Homo sapien
ctttgccttgaaagaacagccctaa

SEQ ID NO: 5818890 - DNA, 25 bp, Homo sapien
agccggcgctgctctggccttccac

SEQ ID NO: 5818891 - DNA, 25 bp, Homo sapien
gtagatatcaaactggaaccactcg

SEQ ID NO: 5818892 - DNA, 25 bp, Homo sapien
gtggttttcaaccctcagaaacaag

SEQ ID NO: 5818893 - DNA, 25 bp, Homo sapien
ccggcctctgtcaaacatcagcaag

SEQ ID NO: 5818894 - DNA, 25 bp, Homo sapien
tatgcctactcctacaaatcaattt

SEQ ID NO: 5818895 - DNA, 25 bp, Homo sapien
aaacatcagcaagtcaggcagaatg

SEQ ID NO: 5818896 - DNA, 25 bp, Homo sapien
agtagctcgggaggaagccaagccg

SEQ ID NO: 5818897 - DNA, 25 bp, Homo sapien
aagcctgctgagcgcacggcgtgtg

SEQ ID NO: 5818898 - DNA, 25 bp, Homo sapien
ctggagccctctggccggggagaag

SEQ ID NO: 5818899 - DNA, 25 bp, Homo sapien
tcctccccggccctgcccagctctg

SEQ ID NO: 5818900 - DNA, 25 bp, Homo sapien
tcatctgggccagcaccacaaagcc

SEQ ID NO: 5818901 - DNA, 25 bp, Homo sapien
ctccccggacagctcaacaccaaag

SEQ ID NO: 5818902 - DNA, 25 bp, Homo sapien
gcggccagtggctgaactccagttg

SEQ ID NO: 5818903 - DNA, 25 bp, Homo sapien
cagacatgaataaaaatgtggccaa

SEQ ID NO: 5818904 - DNA, 25 bp, Homo sapien
gttcccgaacagcctccgttgccca

SEQ ID NO: 5818905 - DNA, 25 bp, Homo sapien
gtgcacatccccagcagtgggcaaa

SEQ ID NO: 5818906 - DNA, 25 bp, Homo sapien
aactgaaccaacaagggagagcaac

SEQ ID NO: 5818907 - DNA, 25 bp, Homo sapien
tgagaactgaaccaacaagggagag

SEQ ID NO: 5818908 - DNA, 25 bp, Homo sapien
aatgtgaagcctcagtcactctaaa

SEQ ID NO: 5818909 - DNA, 25 bp, Homo sapien
tttaggctggtcgcagtggcttaca

SEQ ID NO: 5818910 - DNA, 25 bp, Homo sapien
attccagctagtccttccaggacaa

SEQ ID NO: 5818911 - DNA, 25 bp, Homo sapien
gggggcatcctcctggcaggccaag

SEQ ID NO: 5818912 - DNA, 25 bp, Homo sapien
cagaagtagctcgggaggaagccaa

SEQ ID NO: 5818913 - DNA, 25 bp, Homo sapien
ctgagctggcagcggagcagctcac

SEQ ID NO: 5818914 - DNA, 25 bp, Homo sapien
ccgggtggagatgcagcccctagtg

SEQ ID NO: 5818915 - DNA, 25 bp, Homo sapien
gcagtggcttacacttgtaacccta

SEQ ID NO: 5818916 - DNA, 25 bp, Homo sapien
tactgccacagaagtagctcgggag

SEQ ID NO: 5818917 - DNA, 25 bp, Homo sapien
acaccaaagctttcgcgggcacagc

SEQ ID NO: 5818918 - DNA, 25 bp, Homo sapien
ggttttcaaccctcagaaacaagct

SEQ ID NO: 5818919 - DNA, 25 bp, Homo sapien
gaatgggacccgccatgctgcggcc

SEQ ID NO: 5818920 - DNA, 25 bp, Homo sapien
tggggctgcggagaagcccaagaaa

SEQ ID NO: 5818921 - DNA, 25 bp, Homo sapien
cctgttaaaagcacccggctctacc

SEQ ID NO: 5818922 - DNA, 25 bp, Homo sapien
agagcagcagccggaaccaggcagc

SEQ ID NO: 5818923 - DNA, 25 bp, Homo sapien
agcagcagccggaaccaggcagccc

SEQ ID NO: 5818924 - DNA, 25 bp, Homo sapien
aaatgtggccaaaccttcaccggtg

SEQ ID NO: 5818925 - DNA, 25 bp, Homo sapien
caagcctgaagaccctcggagccag

SEQ ID NO: 5818926 - DNA, 25 bp, Homo sapien
caccccggttagacgctcatctggg

SEQ ID NO: 5818927 - DNA, 25 bp, Homo sapien
gaagcatccctggggctgcggagaa

SEQ ID NO: 5818928 - DNA, 25 bp, Homo sapien
acgtgaacatggatgaccctaagaa

SEQ ID NO: 5818929 - DNA, 25 bp, Homo sapien
ggggcatccagtgcgtgcacatccc

SEQ ID NO: 5818930 - DNA, 25 bp, Homo sapien
cctcgctgccattctctgggctgga

SEQ ID NO: 5818931 - DNA, 25 bp, Homo sapien
cggttcccgaacagcctccgttgcc

SEQ ID NO: 5818932 - DNA, 25 bp, Homo sapien
gtccttccaggacaaaaatcccagc

SEQ ID NO: 5818933 - DNA, 25 bp, Homo sapien
catagacctgagctcccctctgatc

SEQ ID NO: 5818934 - DNA, 25 bp, Homo sapien
aggaagcccgggaccaaattgctgc

SEQ ID NO: 5818935 - DNA, 25 bp, Homo sapien
atctttcattgtcttcttcgagtgc

SEQ ID NO: 5818936 - DNA, 25 bp, Homo sapien
agaactgaaccaacaagggagagca

SEQ ID NO: 5818937 - DNA, 25 bp, Homo sapien
gaagaagaccctgttaaaagcaccc

SEQ ID NO: 5818938 - DNA, 25 bp, Homo sapien
gaacagcctccgttgcccacatctg

SEQ ID NO: 5818939 - DNA, 25 bp, Homo sapien
tccagtgcgtgcacatccccagcag

SEQ ID NO: 5818940 - DNA, 25 bp, Homo sapien
ggaccctttggacataaagaaagat

SEQ ID NO: 5818941 - DNA, 25 bp, Homo sapien
acttgggaggctgaagtgggaggat

SEQ ID NO: 5818942 - DNA, 25 bp, Homo sapien
ctgtagtcccagctacttgggaggc

SEQ ID NO: 5818943 - DNA, 25 bp, Homo sapien
tgcactccagcctgggcaccaatgt

SEQ ID NO: 5818944 - DNA, 25 bp, Homo sapien
gctgcggccagctctgcctgcaggc

SEQ ID NO: 5818945 - DNA, 25 bp, Homo sapien
gctttaggctggtcgcagtggctta

SEQ ID NO: 5818946 - DNA, 25 bp, Homo sapien
gaagccacttgggccagggcaagcg

SEQ ID NO: 5818947 - DNA, 25 bp, Homo sapien
aactggaaccactcgcggtcactcc

SEQ ID NO: 5818948 - DNA, 25 bp, Homo sapien
aataaaaatgtggccaaaccttcac

SEQ ID NO: 5818949 - DNA, 25 bp, Homo sapien
attcccagtgctggagagggtgggc

SEQ ID NO: 5818950 - DNA, 25 bp, Homo sapien
tgacaaggagaacgtggattcccca

SEQ ID NO: 5818951 - DNA, 25 bp, Homo sapien
ggcctgtttggagcggggcatccag

SEQ ID NO: 5818952 - DNA, 25 bp, Homo sapien
cagcaagtcaggcagaatgggaccc

SEQ ID NO: 5818953 - DNA, 25 bp, Homo sapien
ggttctcctccttcccgtgtgcctc

SEQ ID NO: 5818954 - DNA, 25 bp, Homo sapien
ctaaattccaagacaaaggttatgc

SEQ ID NO: 5818955 - DNA, 25 bp, Homo sapien
ttggggctgaagaagaccctgttaa

SEQ ID NO: 5818956 - DNA, 25 bp, Homo sapien
tgagcgcacggcgtgtgtcagcctt

SEQ ID NO: 5818957 - DNA, 25 bp, Homo sapien
tatcagacggcgagattcctgtcta

SEQ ID NO: 5818958 - DNA, 25 bp, Homo sapien
gcagcccaagctgccaagcctgaag

SEQ ID NO: 5818959 - DNA, 25 bp, Homo sapien
ctttacacattgagagcagcagccg

SEQ ID NO: 5818960 - DNA, 25 bp, Homo sapien
gcccacatctgagagtccctttgcc

SEQ ID NO: 5818961 - DNA, 25 bp, Homo sapien
tctgtcaaacatcagcaagtcaggc

SEQ ID NO: 5818962 - DNA, 25 bp, Homo sapien
gcctgtagtcccagctacttgggag

SEQ ID NO: 5818963 - DNA, 25 bp, Homo sapien
tgcactgctcatgctgcaagtcagg

SEQ ID NO: 5818964 - DNA, 25 bp, Homo sapien
ggaagtcctcctcggggcctgtttg

SEQ ID NO: 5818965 - DNA, 25 bp, Homo sapien
ggcaggggacgtgaacatggatgac

SEQ ID NO: 5818966 - DNA, 25 bp, Homo sapien
gttttgtatgtaaaatagcaagtgg

SEQ ID NO: 5818967 - DNA, 25 bp, Homo sapien
attgaataagactagaagtatcaga

SEQ ID NO: 5818968 - DNA, 25 bp, Homo sapien
accctttggacataaagaaagatgt

SEQ ID NO: 5818969 - DNA, 25 bp, Homo sapien
agtatcagacggcgagattcctgtc

SEQ ID NO: 5818970 - DNA, 25 bp, Homo sapien
ttctgcgataccccagaagcacacg

SEQ ID NO: 5818971 - DNA, 25 bp, Homo sapien
cagactccggaaggtggcggccagt

SEQ ID NO: 5818972 - DNA, 25 bp, Homo sapien
tgggacagctcatagacctgagctc

SEQ ID NO: 5818973 - DNA, 25 bp, Homo sapien
tcagaatcttctcaattgaataaga

SEQ ID NO: 5818974 - DNA, 25 bp, Homo sapien
agccgaaccaaatcctttgccttga

SEQ ID NO: 5818975 - DNA, 25 bp, Homo sapien
gatggcctgagctcaaggagatgca

SEQ ID NO: 5818976 - DNA, 25 bp, Homo sapien
ctgaagaagaccctgttaaaagcac

SEQ ID NO: 5818977 - DNA, 25 bp, Homo sapien
caagaactctgcaatgagaactgaa

SEQ ID NO: 5818978 - DNA, 25 bp, Homo sapien
actacctgtcagacagccccttgct

SEQ ID NO: 5818979 - DNA, 25 bp, Homo sapien
tcctaagttttctattggtgactcc

SEQ ID NO: 5818980 - DNA, 25 bp, Homo sapien
tccaagacaaaggttatgcctactc

SEQ ID NO: 5818981 - DNA, 25 bp, Homo sapien
cctgggcaccaatgtgagaacctgt

SEQ ID NO: 5818982 - DNA, 25 bp, Homo sapien
ggctggtcgcagtggcttacacttg

SEQ ID NO: 5818983 - DNA, 25 bp, Homo sapien
tgttaaaagcacccggctctaccag

SEQ ID NO: 5818984 - DNA, 25 bp, Homo sapien
ctcacttactggctttacacattga

SEQ ID NO: 5818985 - DNA, 25 bp, Homo sapien
cgcctcacccgggcgccggggcctc

SEQ ID NO: 5818986 - DNA, 25 bp, Homo sapien
gcaagcgggcgatccctgttccaaa

SEQ ID NO: 5818987 - DNA, 25 bp, Homo sapien
caggccaagcgggtcgatgtttctg

SEQ ID NO: 5818988 - DNA, 25 bp, Homo sapien
cctgtttggagcggggcatccagtg

SEQ ID NO: 5818989 - DNA, 25 bp, Homo sapien
cgatgtttctgagctggcagcggag

SEQ ID NO: 5818990 - DNA, 25 bp, Homo sapien
tgcccagggaatcatgcactgctca

SEQ ID NO: 5818991 - DNA, 25 bp, Homo sapien
attcctgtctaaattccaagacaaa

SEQ ID NO: 5818992 - DNA, 25 bp, Homo sapien
gtgccagctcggagacgttcctctg

SEQ ID NO: 5818993 - DNA, 25 bp, Homo sapien
ccagcctgggcaccaatgtgagaac

SEQ ID NO: 5818994 - DNA, 25 bp, Homo sapien
agacattcttcttttggccgatgaa

SEQ ID NO: 5818995 - DNA, 25 bp, Homo sapien
gtacaaaaattagccgggtgtggta

SEQ ID NO: 5818996 - DNA, 25 bp, Homo sapien
tgctggggccccctgtgggtgagcc

SEQ ID NO: 5818997 - DNA, 25 bp, Homo sapien
cgttgcccacatctgagagtccctt

SEQ ID NO: 5818998 - DNA, 25 bp, Homo sapien
ggacgtgaacatggatgaccctaag

SEQ ID NO: 5818999 - DNA, 25 bp, Homo sapien
ctcattgaccttcctctcatcgact

SEQ ID NO: 5819000 - DNA, 25 bp, Homo sapien
gcggtcactccagatgctgcaagcc

SEQ ID NO: 5819001 - DNA, 25 bp, Homo sapien
ctttcattgtcttcttcgagtgcaa

SEQ ID NO: 5819002 - DNA, 25 bp, Homo sapien
ccggccgccggaagccacttgggcc

SEQ ID NO: 5819003 - DNA, 25 bp, Homo sapien
agatgcaggctgcagtgggctgtga

SEQ ID NO: 5819004 - DNA, 25 bp, Homo sapien
aaccaggcagcccaagctgccaagc

SEQ ID NO: 5819005 - DNA, 25 bp, Homo sapien
cggagccagggcgtggaaagattca

SEQ ID NO: 5819006 - DNA, 25 bp, Homo sapien
gtgggctgtgattgtgccactgcac

SEQ ID NO: 5819007 - DNA, 25 bp, Homo sapien
ctgcctcgagcggcctctgttagag

SEQ ID NO: 5819008 - DNA, 25 bp, Homo sapien
cgtcagttggcagggtcactgtcca

SEQ ID NO: 5819009 - DNA, 25 bp, Homo sapien
aaaaataagcataaatatattccca

SEQ ID NO: 5819010 - DNA, 25 bp, Homo sapien
tgatccagctgagccctgaggctga

SEQ ID NO: 5819011 - DNA, 25 bp, Homo sapien
caagccgggtggagatgcagcccct

SEQ ID NO: 5819012 - DNA, 25 bp, Homo sapien
gccaagcctgaagaccctcggagcc

SEQ ID NO: 5819013 - DNA, 25 bp, Homo sapien
ctaagaaggaagacattcttctttt

SEQ ID NO: 5819014 - DNA, 25 bp, Homo sapien
tttgacttcgatctttcattgtctt

SEQ ID NO: 5819015 - DNA, 25 bp, Homo sapien
ctcgagcggcctctgttagaggaag

SEQ ID NO: 5819016 - DNA, 25 bp, Homo sapien
gagcccaggagttcgggaccagcct

SEQ ID NO: 5819017 - DNA, 25 bp, Homo sapien
cctgcaggccctgtgggggcatcct

SEQ ID NO: 5819018 - DNA, 25 bp, Homo sapien
acacttgtaaccctagaacttggga

SEQ ID NO: 5819019 - DNA, 25 bp, Homo sapien
tcccggcctctgtcaaacatcagca

SEQ ID NO: 5819020 - DNA, 25 bp, Homo sapien
gagaaggaatcccaccgggatgttc

SEQ ID NO: 5819021 - DNA, 25 bp, Homo sapien
ttctccagaggaaagcgattctact

SEQ ID NO: 5819022 - DNA, 25 bp, Homo sapien
gctcatgctttgcccagggaatcat

SEQ ID NO: 5819023 - DNA, 25 bp, Homo sapien
agactagaagtatcagacggcgaga

SEQ ID NO: 5819024 - DNA, 25 bp, Homo sapien
atccctggggctgcggagaagccca

SEQ ID NO: 5819025 - DNA, 25 bp, Homo sapien
tgctgcaagccagcccctcattgac

SEQ ID NO: 5819026 - DNA, 25 bp, Homo sapien
gcatcccccacccaaccccagactc

SEQ ID NO: 5819027 - DNA, 25 bp, Homo sapien
tgaataagactagaagtatcagacg

SEQ ID NO: 5819028 - DNA, 25 bp, Homo sapien
ccagctctggtgcccaggcccgcct

SEQ ID NO: 5819029 - DNA, 25 bp, Homo sapien
cagatgctgcaagccagcccctcat

SEQ ID NO: 5819030 - DNA, 25 bp, Homo sapien
cagcatcccccacccaaccccagac

SEQ ID NO: 5819031 - DNA, 25 bp, Homo sapien
gtggagatgcagcccctagtgaggc

SEQ ID NO: 5819032 - DNA, 25 bp, Homo sapien
ccccactcctcaagttctaagccga

SEQ ID NO: 5819033 - DNA, 25 bp, Homo sapien
aaggagaacgtggattccccactcc

SEQ ID NO: 5819034 - DNA, 25 bp, Homo sapien
acatggatgaccctaagaaggaaga

SEQ ID NO: 5819035 - DNA, 25 bp, Homo sapien
tggcggccagtggctgaactccagt

SEQ ID NO: 5819036 - DNA, 25 bp, Homo sapien
ccctgtgtgtgccagctcggagacg

SEQ ID NO: 5819037 - DNA, 25 bp, Homo sapien
ctaaatcaagtgaatttgcaagtat

SEQ ID NO: 5819038 - DNA, 25 bp, Homo sapien
ggctttacacattgagagcagcagc

SEQ ID NO: 5819039 - DNA, 25 bp, Homo sapien
ttttcaaccctcagaaacaagcttt

SEQ ID NO: 5819040 - DNA, 25 bp, Homo sapien
tccgcactctgctcatgctttgccc

SEQ ID NO: 5819041 - DNA, 25 bp, Homo sapien
cctgaagaccctcggagccagggcg

SEQ ID NO: 5819042 - DNA, 25 bp, Homo sapien
aagaagcatccctggggctgcggag

SEQ ID NO: 5819043 - DNA, 25 bp, Homo sapien
gggacccgccatgctgcggccagct

SEQ ID NO: 5819044 - DNA, 25 bp, Homo sapien
tgtgaagcctcagtcactctaaatg

SEQ ID NO: 5819045 - DNA, 25 bp, Homo sapien
ccaggagttcgggaccagcctggga

SEQ ID NO: 5819046 - DNA, 25 bp, Homo sapien
gtcactctaaatgaagaattttctt

SEQ ID NO: 5819047 - DNA, 25 bp, Homo sapien
aagctttcgcgggcacagcggccgc

SEQ ID NO: 5819048 - DNA, 25 bp, Homo sapien
ccccgggtgctgtcaatgtgccggc

SEQ ID NO: 5819049 - DNA, 25 bp, Homo sapien
atattcccagtgctggagagggtgg

SEQ ID NO: 5819050 - DNA, 25 bp, Homo sapien
ggcctctgtcaaacatcagcaagtc

SEQ ID NO: 5819051 - DNA, 25 bp, Homo sapien
gtccctttgcctggagccctctggc

SEQ ID NO: 5819052 - DNA, 25 bp, Homo sapien
aataaatggacttattgaagcataa

SEQ ID NO: 5819053 - DNA, 25 bp, Homo sapien
gaaccaacaagggagagcaacagaa

SEQ ID NO: 5819054 - DNA, 25 bp, Homo sapien
ctccctgacaaacctgccccgggtg

SEQ ID NO: 5819055 - DNA, 25 bp, Homo sapien
ctccggaaggtggcggccagtggct

SEQ ID NO: 5819056 - DNA, 25 bp, Homo sapien
gcagcggagcagctcacggcacccc

SEQ ID NO: 5819057 - DNA, 25 bp, Homo sapien
atctgggccagcaccacaaagcctg

SEQ ID NO: 5819058 - DNA, 25 bp, Homo sapien
ctctaaatgaagaattttcttttga

SEQ ID NO: 5819059 - DNA, 25 bp, Homo sapien
aaaataaatggacttattgaagcat

SEQ ID NO: 5819060 - DNA, 25 bp, Homo sapien
cccgcaagaactctgcaatgagaac

SEQ ID NO: 5819061 - DNA, 25 bp, Homo sapien
attcttcttttggccgatgaaaaat

SEQ ID NO: 5819062 - DNA, 25 bp, Homo sapien
cagtcactctaaatgaagaattttc

SEQ ID NO: 5819063 - DNA, 25 bp, Homo sapien
cttttgaatgttttgtatgtaaaat

SEQ ID NO: 5819064 - DNA, 25 bp, Homo sapien
tgccggccgccggaagccacttggg

SEQ ID NO: 5819065 - DNA, 25 bp, Homo sapien
cctcagaaacaagctttaggctggt

SEQ ID NO: 5819066 - DNA, 25 bp, Homo sapien
tgtgccggccgccggaagccacttg

SEQ ID NO: 5819067 - DNA, 25 bp, Homo sapien
acggcgagattcctgtctaaattcc

SEQ ID NO: 5819068 - DNA, 25 bp, Homo sapien
gtcccctgacaggggttctcctcct

SEQ ID NO: 5819069 - DNA, 25 bp, Homo sapien
ggcctcctccccggccctgcccagc

SEQ ID NO: 5819070 - DNA, 25 bp, Homo sapien
aggctgcagtgggctgtgattgtgc

SEQ ID NO: 5819071 - DNA, 25 bp, Homo sapien
ttgctgccagcttggaattaaataa

SEQ ID NO: 5819072 - DNA, 25 bp, Homo sapien
cggcctctgttagaggaagaagcat

SEQ ID NO: 5819073 - DNA, 25 bp, Homo sapien
cgatgagccttcagcctgccgggca

SEQ ID NO: 5819074 - DNA, 25 bp, Homo sapien
ttcccgccgccaccctcctcgctgc

SEQ ID NO: 5819075 - DNA, 25 bp, Homo sapien
agacggcgagattcctgtctaaatt

SEQ ID NO: 5819076 - DNA, 25 bp, Homo sapien
cttcttcgagtgcaaatgaagatga

SEQ ID NO: 5819077 - DNA, 25 bp, Homo sapien
atgggacccgccatgctgcggccag

SEQ ID NO: 5819078 - DNA, 25 bp, Homo sapien
tgctggagagggtgggctgagggac

SEQ ID NO: 5819079 - DNA, 25 bp, Homo sapien
tcgcaaggaagtcctcctcggggcc

SEQ ID NO: 5819080 - DNA, 25 bp, Homo sapien
ttgtcttcttcgagtgcaaatgaag

SEQ ID NO: 5819081 - DNA, 25 bp, Homo sapien
tcttcttttggccgatgaaaaattt

SEQ ID NO: 5819082 - DNA, 25 bp, Homo sapien
ccccggttagacgctcatctgggcc

SEQ ID NO: 5819083 - DNA, 25 bp, Homo sapien
ttgcgcttggtcagaatcttctcaa

SEQ ID NO: 5819084 - DNA, 25 bp, Homo sapien
ccagctacttgggaggctgaagtgg

SEQ ID NO: 5819085 - DNA, 25 bp, Homo sapien
ccggctctaccagcaatctcgcaag

SEQ ID NO: 5819086 - DNA, 25 bp, Homo sapien
gcctggagccctctggccggggaga

SEQ ID NO: 5819087 - DNA, 25 bp, Homo sapien
tgcaagtattcctgcaaatagctcc

SEQ ID NO: 5819088 - DNA, 25 bp, Homo sapien
atgctgcaagtcaggcagcgactca

SEQ ID NO: 5819089 - DNA, 25 bp, Homo sapien
gtagtcccagctacttgggaggctg

SEQ ID NO: 5819090 - DNA, 25 bp, Homo sapien
acagccccttgctggggccccctgt

SEQ ID NO: 5819091 - DNA, 25 bp, Homo sapien
cagccttgcccacacccgccagccg

SEQ ID NO: 5819092 - DNA, 25 bp, Homo sapien
ctgagaaggaatcccaccgggatgt

SEQ ID NO: 5819093 - DNA, 25 bp, Homo sapien
atgctttgcccagggaatcatgcac

SEQ ID NO: 5819094 - DNA, 25 bp, Homo sapien
ccactcgcggtcactccagatgctg

SEQ ID NO: 5819095 - DNA, 25 bp, Homo sapien
gcagctcacggcacccccctcagca

SEQ ID NO: 5819096 - DNA, 25 bp, Homo sapien
cctctgatccagctgagccctgagg

SEQ ID NO: 5819097 - DNA, 25 bp, Homo sapien
agatatcaaactggaaccactcgcg

SEQ ID NO: 5819098 - DNA, 25 bp, Homo sapien
cgccatgctgcggccagctctgcct

SEQ ID NO: 5819099 - DNA, 25 bp, Homo sapien
atcaagtgaatttgcaagtattcct

SEQ ID NO: 5819100 - DNA, 25 bp, Homo sapien
aactccagttgcgcttggtcagaat

SEQ ID NO: 5819101 - DNA, 25 bp, Homo sapien
gggcacagcggccgcagtcgtgcac

SEQ ID NO: 5819102 - DNA, 25 bp, Homo sapien
tggcagcggagcagctcacggcacc

SEQ ID NO: 5819103 - DNA, 25 bp, Homo sapien
caagtcaggcagcgactcagaggaa

SEQ ID NO: 5819104 - DNA, 25 bp, Homo sapien
gaaggaagacattcttcttttggcc

SEQ ID NO: 5819105 - DNA, 25 bp, Homo sapien
gaatgttttgtatgtaaaatagcaa

SEQ ID NO: 5819106 - DNA, 25 bp, Homo sapien
ccaggcagcccaagctgccaagcct

SEQ ID NO: 5819107 - DNA, 25 bp, Homo sapien
taaaaataaacctctttgagaaaga

SEQ ID NO: 5819108 - DNA, 25 bp, Homo sapien
agccgggtgtggtagtgcatgcctg

SEQ ID NO: 5819109 - DNA, 25 bp, Homo sapien
aacaagttggggctgaagaagaccc

SEQ ID NO: 5819110 - DNA, 25 bp, Homo sapien
cagcagccggaaccaggcagcccaa

SEQ ID NO: 5819111 - DNA, 25 bp, Homo sapien
ccctaagaaggaagacattcttctt

SEQ ID NO: 5819112 - DNA, 25 bp, Homo sapien
caaatagctcccggcctctgtcaaa

SEQ ID NO: 5819113 - DNA, 25 bp, Homo sapien
tgttccaaacaagttggggctgaag

SEQ ID NO: 5819114 - DNA, 25 bp, Homo sapien
cactccagcctgggcaccaatgtga

SEQ ID NO: 5819115 - DNA, 25 bp, Homo sapien
tgcagtgggctgtgattgtgccact

SEQ ID NO: 5819116 - DNA, 25 bp, Homo sapien
actgcactccagcctgggcaccaat

SEQ ID NO: 5819117 - DNA, 25 bp, Homo sapien
cttcttgtagatatcaaactggaac

SEQ ID NO: 5819118 - DNA, 25 bp, Homo sapien
cagggcgtggaaagattcatacagg

SEQ ID NO: 5819119 - DNA, 25 bp, Homo sapien
cgctgctctggccttccaccgatga

SEQ ID NO: 5819120 - DNA, 25 bp, Homo sapien
ctgtctaaattccaagacaaaggtt

SEQ ID NO: 5819121 - DNA, 25 bp, Homo sapien
tgcccaggcccgcctcacccgggcg

SEQ ID NO: 5819122 - DNA, 25 bp, Homo sapien
ctcctccttcccgtgtgcctcaggc

SEQ ID NO: 5819123 - DNA, 25 bp, Homo sapien
ttgcctggagccctctggccgggga

SEQ ID NO: 5819124 - DNA, 25 bp, Homo sapien
tcggaccctttggacataaagaaag

SEQ ID NO: 5819125 - DNA, 25 bp, Homo sapien
agaacgtggattccccactcctcaa

SEQ ID NO: 5819126 - DNA, 25 bp, Homo sapien
ctcacccgggcgccggggcctccgc

SEQ ID NO: 5819127 - DNA, 25 bp, Homo sapien
atcgacttctgcgataccccagaag

SEQ ID NO: 5819128 - DNA, 25 bp, Homo sapien
cccttgctggggccccctgtgggtg

SEQ ID NO: 5819129 - DNA, 25 bp, Homo sapien
caagtattcctgcaaatagctcccg

SEQ ID NO: 5819130 - DNA, 25 bp, Homo sapien
aagcgggcgatccctgttccaaaca

SEQ ID NO: 5819131 - DNA, 25 bp, Homo sapien
tctgatccagctgagccctgaggct

SEQ ID NO: 5819132 - DNA, 25 bp, Homo sapien
aatggacttattgaagcataaaaaa

SEQ ID NO: 5819133 - DNA, 25 bp, Homo sapien
tagtgcatgcctgtagtcccagcta

SEQ ID NO: 5819134 - DNA, 25 bp, Homo sapien
aggaaagcgattctactttctccaa

SEQ ID NO: 5819135 - DNA, 25 bp, Homo sapien
acattcttcttttggccgatgaaaa

SEQ ID NO: 5819136 - DNA, 25 bp, Homo sapien
tctccaaaagtactgccacagaagt

SEQ ID NO: 5819137 - DNA, 25 bp, Homo sapien
gcttacacttgtaaccctagaactt

SEQ ID NO: 5819138 - DNA, 25 bp, Homo sapien
gtaaaataaatggacttattgaagc

SEQ ID NO: 5819139 - DNA, 25 bp, Homo sapien
ctgtgggtgagcctcggctcttggc

SEQ ID NO: 5819140 - DNA, 25 bp, Homo sapien
agcccaagaaagagattccagctag

SEQ ID NO: 5819141 - DNA, 25 bp, Homo sapien
acttgggccagggcaagcgggcgat

SEQ ID NO: 5819142 - DNA, 25 bp, Homo sapien
cccgccgccaccctcctcgctgcca

SEQ ID NO: 5819143 - DNA, 25 bp, Homo sapien
ccattctctgggctggaatgtgaag

SEQ ID NO: 5819144 - DNA, 25 bp, Homo sapien
tcctgtctaaattccaagacaaagg

SEQ ID NO: 5819145 - DNA, 25 bp, Homo sapien
ggagaacgtggattccccactcctc

SEQ ID NO: 5819146 - DNA, 25 bp, Homo sapien
ggtgggcggattacttgagcccagg

SEQ ID NO: 5819147 - DNA, 25 bp, Homo sapien
gcatgcctgtagtcccagctacttg

SEQ ID NO: 5819148 - DNA, 25 bp, Homo sapien
ctgtgggggcatcctcctggcaggc

SEQ ID NO: 5819149 - DNA, 25 bp, Homo sapien
gccttgcccacacccgccagccggc

SEQ ID NO: 5819150 - DNA, 25 bp, Homo sapien
gcccagctctggtgcccaggcccgc

SEQ ID NO: 5819151 - DNA, 25 bp, Homo sapien
aagctttaggctggtcgcagtggct

SEQ ID NO: 5819152 - DNA, 25 bp, Homo sapien
ggccaaaccttcaccggtggtggga

SEQ ID NO: 5819153 - DNA, 25 bp, Homo sapien
gaccctaagaaggaagacattcttc

SEQ ID NO: 5819154 - DNA, 25 bp, Homo sapien
agtcaggcagcgactcagaggaagc

SEQ ID NO: 5819155 - DNA, 25 bp, Homo sapien
gggtcactgtccacagcaccccggt

SEQ ID NO: 5819156 - DNA, 25 bp, Homo sapien
tcttcgagtgcaaatgaagatgatg

SEQ ID NO: 5819157 - DNA, 25 bp, Homo sapien
aaaagcacccggctctaccagcaat

SEQ ID NO: 5819158 - DNA, 25 bp, Homo sapien
aggagttcgggaccagcctgggaaa

SEQ ID NO: 5819159 - DNA, 25 bp, Homo sapien
ctttgcctggagccctctggccggg

SEQ ID NO: 5819160 - DNA, 25 bp, Homo sapien
tgagaacctgtcttggaaaaaaaaa

SEQ ID NO: 5819161 - DNA, 25 bp, Homo sapien
cctcctccccggccctgcccagctc

SEQ ID NO: 5819162 - DNA, 25 bp, Homo sapien
taggctggtcgcagtggcttacact

SEQ ID NO: 5819163 - DNA, 25 bp, Homo sapien
ttcttcggaccctttggacataaag

SEQ ID NO: 5819164 - DNA, 25 bp, Homo sapien
ctgctctggccttccaccgatgacc

SEQ ID NO: 5819165 - DNA, 25 bp, Homo sapien
accaaagctttcgcgggcacagcgg

SEQ ID NO: 5819166 - DNA, 25 bp, Homo sapien
gcctgccgggcaggggacgtgaaca

SEQ ID NO: 5819167 - DNA, 25 bp, Homo sapien
ctctgagccccgcaagaactctgca

SEQ ID NO: 5819168 - DNA, 25 bp, Homo sapien
gcctctgttagaggaagaagcatcc

SEQ ID NO: 5819169 - DNA, 25 bp, Homo sapien
tctgatcgacctcatgacaaacact

SEQ ID NO: 5819170 - DNA, 25 bp, Homo sapien
acatccccagcagtgggcaaagcta

SEQ ID NO: 5819171 - DNA, 25 bp, Homo sapien
tggaggtgtacaaagaagctcactt

SEQ ID NO: 5819172 - DNA, 25 bp, Homo sapien
gtgctgtcaatgtgccggccgccgg

SEQ ID NO: 5819173 - DNA, 25 bp, Homo sapien
atccagctgagccctgaggctgaca

SEQ ID NO: 5819174 - DNA, 25 bp, Homo sapien
tccctgttccaaacaagttggggct

SEQ ID NO: 5819175 - DNA, 25 bp, Homo sapien
cctagaacttgggaggctgaggtgg

SEQ ID NO: 5819176 - DNA, 25 bp, Homo sapien
agaattttcttttgaatgttttgta

SEQ ID NO: 5819177 - DNA, 25 bp, Homo sapien
gacataaagaaagatgtattgctgc

SEQ ID NO: 5819178 - DNA, 25 bp, Homo sapien
ggggccccctgtgggtgagcctcgg

SEQ ID NO: 5819179 - DNA, 25 bp, Homo sapien
ctcctgtccctacaaaaagtacaaa

SEQ ID NO: 5819180 - DNA, 25 bp, Homo sapien
cttgtaaccctagaacttgggaggc

SEQ ID NO: 5819181 - DNA, 25 bp, Homo sapien
ctctgcaatgagaactgaaccaaca

SEQ ID NO: 5819182 - DNA, 25 bp, Homo sapien
tgaataaaaatgtggccaaaccttc

SEQ ID NO: 5819183 - DNA, 25 bp, Homo sapien
gggcgtggaaagattcatacaggag

SEQ ID NO: 5819184 - DNA, 25 bp, Homo sapien
accttcaccggtggtgggacagctc

SEQ ID NO: 5819185 - DNA, 25 bp, Homo sapien
gaatcatgcactgctcatgctgcaa

SEQ ID NO: 5819186 - DNA, 25 bp, Homo sapien
aacctgccccgggtgctgtcaatgt

SEQ ID NO: 5819187 - DNA, 25 bp, Homo sapien
aatttgcaagtattcctgcaaatag

SEQ ID NO: 5819188 - DNA, 25 bp, Homo sapien
ctgtccacagcaccccggttagacg

SEQ ID NO: 5819189 - DNA, 25 bp, Homo sapien
actccagacatgaataaaaatgtgg

SEQ ID NO: 5819190 - DNA, 25 bp, Homo sapien
cacaaagcctgctgagcgcacggcg

SEQ ID NO: 5819191 - DNA, 25 bp, Homo sapien
tgacaaacactccagacatgaataa

SEQ ID NO: 5819192 - DNA, 25 bp, Homo sapien
ttcaaccctcagaaacaagctttag

SEQ ID NO: 5819193 - DNA, 25 bp, Homo sapien
gctgacaaggagaacgtggattccc

SEQ ID NO: 5819194 - DNA, 25 bp, Homo sapien
gtccacagcaccccggttagacgct

SEQ ID NO: 5819195 - DNA, 25 bp, Homo sapien
ggaaatatagtgaaactcctgtccc

SEQ ID NO: 5819196 - DNA, 25 bp, Homo sapien
tgacaggggttctcctccttcccgt

SEQ ID NO: 5819197 - DNA, 25 bp, Homo sapien
ctattggtgactccccggacagctc

SEQ ID NO: 5819198 - DNA, 25 bp, Homo sapien
ctaccagcaatctcgcaaggaagtc

SEQ ID NO: 5819199 - DNA, 25 bp, Homo sapien
tttgcaagtattcctgcaaatagct

SEQ ID NO: 5819200 - DNA, 25 bp, Homo sapien
ccagctgagccctgaggctgacaag

SEQ ID NO: 5819201 - DNA, 25 bp, Homo sapien
tgagctcccctctgatccagctgag

SEQ ID NO: 5819202 - DNA, 25 bp, Homo sapien
gggcatcctcctggcaggccaagcg

SEQ ID NO: 5819203 - DNA, 25 bp, Homo sapien
acgctcatctgggccagcaccacaa

SEQ ID NO: 5819204 - DNA, 25 bp, Homo sapien
ggagatgcagcccctagtgaggctc

SEQ ID NO: 5819205 - DNA, 25 bp, Homo sapien
gagctggcagcggagcagctcacgg

SEQ ID NO: 5819206 - DNA, 25 bp, Homo sapien
agcttggaattaaataatccggttc

SEQ ID NO: 5819207 - DNA, 25 bp, Homo sapien
tcaatgtgccggccgccggaagcca

SEQ ID NO: 5819208 - DNA, 25 bp, Homo sapien
acgtctcttaaaagggagacatact

SEQ ID NO: 5819209 - DNA, 25 bp, Homo sapien
gctcttggcctcctccccggccctg

SEQ ID NO: 5819210 - DNA, 25 bp, Homo sapien
gccaagccgggtggagatgcagccc

SEQ ID NO: 5819211 - DNA, 25 bp, Homo sapien
gacctgagctcccctctgatccagc

SEQ ID NO: 5819212 - DNA, 25 bp, Homo sapien
actcctcaagttctaagccgaacca

SEQ ID NO: 5819213 - DNA, 25 bp, Homo sapien
ctactttctccaaaagtactgccac

SEQ ID NO: 5819214 - DNA, 25 bp, Homo sapien
gctttcgcgggcacagcggccgcag

SEQ ID NO: 5819215 - DNA, 25 bp, Homo sapien
aagggactctcagatgtgggcaacg

SEQ ID NO: 5819216 - DNA, 25 bp, Homo sapien
tccggggagtcaccaatagaaaact

SEQ ID NO: 5819217 - DNA, 25 bp, Homo sapien
tcaattgagaagattctgaccaagc

SEQ ID NO: 5819218 - DNA, 25 bp, Homo sapien
tggggtatcgcagaagtcgatgaga

SEQ ID NO: 5819219 - DNA, 25 bp, Homo sapien
catccaccagcctggaatctgtctt

SEQ ID NO: 5819220 - DNA, 25 bp, Homo sapien
tcacattggtgcccaggctggagtg

SEQ ID NO: 5819221 - DNA, 25 bp, Homo sapien
tttttttccaagacaggttctcaca

SEQ ID NO: 5819222 - DNA, 25 bp, Homo sapien
gcctgccaggaggatgcccccacag

SEQ ID NO: 5819223 - DNA, 25 bp, Homo sapien
gtggaaggccagagcagcgccggct

SEQ ID NO: 5819224 - DNA, 25 bp, Homo sapien
cagcctcccaagtagctgggactac

SEQ ID NO: 5819225 - DNA, 25 bp, Homo sapien
gtaggcataacctttgtcttggaat

SEQ ID NO: 5819226 - DNA, 25 bp, Homo sapien
ctgccaggaggatgcccccacaggg

SEQ ID NO: 5819227 - DNA, 25 bp, Homo sapien
tggagtgcagtggcacaatcacagc

SEQ ID NO: 5819228 - DNA, 25 bp, Homo sapien
gcctgacttgctgatgtttgacaga

SEQ ID NO: 5819229 - DNA, 25 bp, Homo sapien
tggcttccggcggccggcacattga

SEQ ID NO: 5819230 - DNA, 25 bp, Homo sapien
gctgtccggggagtcaccaatagaa

SEQ ID NO: 5819231 - DNA, 25 bp, Homo sapien
ctgccaactgacgtgcacgactgcg

SEQ ID NO: 5819232 - DNA, 25 bp, Homo sapien
ggagtcaccaatagaaaacttagga

SEQ ID NO: 5819233 - DNA, 25 bp, Homo sapien
tgtgcacgcactggatgccccgctc

SEQ ID NO: 5819234 - DNA, 25 bp, Homo sapien
cctggttccggctgctgctctcaat

SEQ ID NO: 5819235 - DNA, 25 bp, Homo sapien
tctgaccaagcgcaactggagttca

SEQ ID NO: 5819236 - DNA, 25 bp, Homo sapien
acatttttattcatgtctggagtgt

SEQ ID NO: 5819237 - DNA, 25 bp, Homo sapien
cttcctcccgagctacttctgtggc

SEQ ID NO: 5819238 - DNA, 25 bp, Homo sapien
agaggggagctcaggtctatgagct

SEQ ID NO: 5819239 - DNA, 25 bp, Homo sapien
gaatcgctttcctctggagaaaagt

SEQ ID NO: 5819240 - DNA, 25 bp, Homo sapien
tttcagatcctacagccacgtgtgc

SEQ ID NO: 5819241 - DNA, 25 bp, Homo sapien
ccgtgagctgctccgctgccagctc

SEQ ID NO: 5819242 - DNA, 25 bp, Homo sapien
atgtccaaagggtccgaagaagact

SEQ ID NO: 5819243 - DNA, 25 bp, Homo sapien
cacgaacttctccccggccagaggg

SEQ ID NO: 5819244 - DNA, 25 bp, Homo sapien
gtatcgcagaagtcgatgagaggaa

SEQ ID NO: 5819245 - DNA, 25 bp, Homo sapien
gggtgtgggcaaggctgacacacgc

SEQ ID NO: 5819246 - DNA, 25 bp, Homo sapien
tcttattcaattgagaagattctga

SEQ ID NO: 5819247 - DNA, 25 bp, Homo sapien
tcagcctcagggctcagctggatca

SEQ ID NO: 5819248 - DNA, 25 bp, Homo sapien
gatgagcgtctaaccggggtgctgt

SEQ ID NO: 5819249 - DNA, 25 bp, Homo sapien
tggatcagaggggagctcaggtcta

SEQ ID NO: 5819250 - DNA, 25 bp, Homo sapien
cgcaactggagttcagccactggcc

SEQ ID NO: 5819251 - DNA, 25 bp, Homo sapien
aatggcagcgaggagggtggcggcg

SEQ ID NO: 5819252 - DNA, 25 bp, Homo sapien
acttctgtggcagtacttttggaga

SEQ ID NO: 5819253 - DNA, 25 bp, Homo sapien
ccctcagcccaccctctccagcact

SEQ ID NO: 5819254 - DNA, 25 bp, Homo sapien
tctagggttacaagtgtaagccact

SEQ ID NO: 5819255 - DNA, 25 bp, Homo sapien
tcttgcggggctcagaggaacgtct

SEQ ID NO: 5819256 - DNA, 25 bp, Homo sapien
ccgctgccagctcagaaacatcgac

SEQ ID NO: 5819257 - DNA, 25 bp, Homo sapien
tcgccgtctgatacttctagtctta

SEQ ID NO: 5819258 - DNA, 25 bp, Homo sapien
gctggagtgcagtggcacaatcaca

SEQ ID NO: 5819259 - DNA, 25 bp, Homo sapien
ggggagtcaccaatagaaaacttag

SEQ ID NO: 5819260 - DNA, 25 bp, Homo sapien
attggtgcccaggctggagtgcagt

SEQ ID NO: 5819261 - DNA, 25 bp, Homo sapien
tttccacgccctggctccgagggtc

SEQ ID NO: 5819262 - DNA, 25 bp, Homo sapien
gaggcacacgggaaggaggagaacc

SEQ ID NO: 5819263 - DNA, 25 bp, Homo sapien
cacatccaccagcctggaatctgtc

SEQ ID NO: 5819264 - DNA, 25 bp, Homo sapien
atcggtggaaggccagagcagcgcc

SEQ ID NO: 5819265 - DNA, 25 bp, Homo sapien
ggccgctgtgcccgcgaaagctttg

SEQ ID NO: 5819266 - DNA, 25 bp, Homo sapien
aggtttgtcagggagaacatcccgg

SEQ ID NO: 5819267 - DNA, 25 bp, Homo sapien
gctttcagatcctacagccacgtgt

SEQ ID NO: 5819268 - DNA, 25 bp, Homo sapien
tgtactttttgtagggacaggagtt

SEQ ID NO: 5819269 - DNA, 25 bp, Homo sapien
tcgaggcagcagcaatttggtcccg

SEQ ID NO: 5819270 - DNA, 25 bp, Homo sapien
attcacttgatttagctttgcccac

SEQ ID NO: 5819271 - DNA, 25 bp, Homo sapien
gggcaaagcatgagcagagtgcgga

SEQ ID NO: 5819272 - DNA, 25 bp, Homo sapien
gaacagggatcgcccgcttgccctg

SEQ ID NO: 5819273 - DNA, 25 bp, Homo sapien
ctgctttcagatcctacagccacgt

SEQ ID NO: 5819274 - DNA, 25 bp, Homo sapien
caagaagagcctcactaggggctgc

SEQ ID NO: 5819275 - DNA, 25 bp, Homo sapien
gcttgggctgcctggttccggctgc

SEQ ID NO: 5819276 - DNA, 25 bp, Homo sapien
cctacagccacgtgtgcttctgggg

SEQ ID NO: 5819277 - DNA, 25 bp, Homo sapien
ctgctggggatgtgcacgcactgga

SEQ ID NO: 5819278 - DNA, 25 bp, Homo sapien
cgtctccgagctggcacacacaggg

SEQ ID NO: 5819279 - DNA, 25 bp, Homo sapien
caatgaggggctggcttgcagcatc

SEQ ID NO: 5819280 - DNA, 25 bp, Homo sapien
ccacttgctattttacatacaaaac

SEQ ID NO: 5819281 - DNA, 25 bp, Homo sapien
gtgtgggcaaggctgacacacgccg

SEQ ID NO: 5819282 - DNA, 25 bp, Homo sapien
gcaaattcacttgatttagctttgc

SEQ ID NO: 5819283 - DNA, 25 bp, Homo sapien
atcttcatttgcactcgaagaagac

SEQ ID NO: 5819284 - DNA, 25 bp, Homo sapien
ttggaatttagacaggaatctcgcc

SEQ ID NO: 5819285 - DNA, 25 bp, Homo sapien
gcaggaatacttgcaaattcacttg

SEQ ID NO: 5819286 - DNA, 25 bp, Homo sapien
gggatgctgaggggggtgccgtgag

SEQ ID NO: 5819287 - DNA, 25 bp, Homo sapien
gccagagggctccaggcaaagggac

SEQ ID NO: 5819288 - DNA, 25 bp, Homo sapien
gttccagtttgatatctacaagaag

SEQ ID NO: 5819289 - DNA, 25 bp, Homo sapien
cctgcatctccttgagctcaggcca

SEQ ID NO: 5819290 - DNA, 25 bp, Homo sapien
tgggctcaagtaatccgcccacctc

SEQ ID NO: 5819291 - DNA, 25 bp, Homo sapien
gcttcctctgagtcgctgcctgact

SEQ ID NO: 5819292 - DNA, 25 bp, Homo sapien
tggagttcagccactggccgccacc

SEQ ID NO: 5819293 - DNA, 25 bp, Homo sapien
gactagctggaatctctttcttggg

SEQ ID NO: 5819294 - DNA, 25 bp, Homo sapien
ggaatctcgccgtctgatacttcta

SEQ ID NO: 5819295 - DNA, 25 bp, Homo sapien
ccgctgtgcccgcgaaagctttggt

SEQ ID NO: 5819296 - DNA, 25 bp, Homo sapien
gaaggtcaatgaggggctggcttgc

SEQ ID NO: 5819297 - DNA, 25 bp, Homo sapien
cgccctggctccgagggtcttcagg

SEQ ID NO: 5819298 - DNA, 25 bp, Homo sapien
cccactgctggggatgtgcacgcac

SEQ ID NO: 5819299 - DNA, 25 bp, Homo sapien
tttgcccactgctggggatgtgcac

SEQ ID NO: 5819300 - DNA, 25 bp, Homo sapien
ttcatcggccaaaagaagaatgtct

SEQ ID NO: 5819301 - DNA, 25 bp, Homo sapien
agcaatttggtcccgggcttcctct

SEQ ID NO: 5819302 - DNA, 25 bp, Homo sapien
ccaaaagaagaatgtcttccttctt

SEQ ID NO: 5819303 - DNA, 25 bp, Homo sapien
tttggttcggcttagaacttgagga

SEQ ID NO: 5819304 - DNA, 25 bp, Homo sapien
cgcgagtggttccagtttgatatct

SEQ ID NO: 5819305 - DNA, 25 bp, Homo sapien
gtaaatctagaatatctaactattt

SEQ ID NO: 5819306 - DNA, 25 bp, Homo sapien
taaaacttctactaaaacatgtttc

SEQ ID NO: 5819307 - DNA, 25 bp, Homo sapien
ggcacacgggaaggaggagaacccc

SEQ ID NO: 5819308 - DNA, 25 bp, Homo sapien
ttttaacagggtcttcttcagcccc

SEQ ID NO: 5819309 - DNA, 25 bp, Homo sapien
tgcagcatctggagtgaccgcgagt

SEQ ID NO: 5819310 - DNA, 25 bp, Homo sapien
tacagccacgtgtgcttctggggta

SEQ ID NO: 5819311 - DNA, 25 bp, Homo sapien
cggctggcgggtgtgggcaaggctg

SEQ ID NO: 5819312 - DNA, 25 bp, Homo sapien
tgggatttttgtcctggaaggacta

SEQ ID NO: 5819313 - DNA, 25 bp, Homo sapien
cttgctgatgtttgacagaggccgg

SEQ ID NO: 5819314 - DNA, 25 bp, Homo sapien
actatatttcccaggctggtcccga

SEQ ID NO: 5819315 - DNA, 25 bp, Homo sapien
ctcagcccaccctctccagcactgg

SEQ ID NO: 5819316 - DNA, 25 bp, Homo sapien
gaatccacgttctccttgtcagcct

SEQ ID NO: 5819317 - DNA, 25 bp, Homo sapien
ttcttagggtcatccatgttcacgt

SEQ ID NO: 5819318 - DNA, 25 bp, Homo sapien
actcgaagaagacaatgaaagatcg

SEQ ID NO: 5819319 - DNA, 25 bp, Homo sapien
cccgaactcctgggctcaagtaatc

SEQ ID NO: 5819320 - DNA, 25 bp, Homo sapien
tctgatacttctagtcttattcaat

SEQ ID NO: 5819321 - DNA, 25 bp, Homo sapien
gactcctgtatgaatctttccacgc

SEQ ID NO: 5819322 - DNA, 25 bp, Homo sapien
cgaactcctgggctcaagtaatccg

SEQ ID NO: 5819323 - DNA, 25 bp, Homo sapien
cggaggctgttcgggaaccggatta

SEQ ID NO: 5819324 - DNA, 25 bp, Homo sapien
agctggccgcagcatggcgggtccc

SEQ ID NO: 5819325 - DNA, 25 bp, Homo sapien
ctcccgagctacttctgtggcagta

SEQ ID NO: 5819326 - DNA, 25 bp, Homo sapien
tcacattccagcccagagaatggca

SEQ ID NO: 5819327 - DNA, 25 bp, Homo sapien
gaaaattcttcatttagagtgactg

SEQ ID NO: 5819328 - DNA, 25 bp, Homo sapien
gttctagggttacaagtgtaagcca

SEQ ID NO: 5819329 - DNA, 25 bp, Homo sapien
cacacaggggagagcccacggccct

SEQ ID NO: 5819330 - DNA, 25 bp, Homo sapien
ggaatttagacaggaatctcgccgt

SEQ ID NO: 5819331 - DNA, 25 bp, Homo sapien
ttgatatctacaagaagagcctcac

SEQ ID NO: 5819332 - DNA, 25 bp, Homo sapien
gggcctgcaggcagagctggccgca

SEQ ID NO: 5819333 - DNA, 25 bp, Homo sapien
cttgtttggaacagggatcgcccgc

SEQ ID NO: 5819334 - DNA, 25 bp, Homo sapien
ggtcgatcagaggcctgctttcaga

SEQ ID NO: 5819335 - DNA, 25 bp, Homo sapien
ccacagggggccccagcaaggggct

SEQ ID NO: 5819336 - DNA, 25 bp, Homo sapien
ctttaaaaatagccacttgctattt

SEQ ID NO: 5819337 - DNA, 25 bp, Homo sapien
acagggatcgcccgcttgccctggc

SEQ ID NO: 5819338 - DNA, 25 bp, Homo sapien
gaaacatcgacccgcttggcctgcc

SEQ ID NO: 5819339 - DNA, 25 bp, Homo sapien
aggctgaaggctcatcgcggccgcc

SEQ ID NO: 5819340 - DNA, 25 bp, Homo sapien
cagagctgggcagggccggggagga

SEQ ID NO: 5819341 - DNA, 25 bp, Homo sapien
gggacacatccaccagcctggaatc

SEQ ID NO: 5819342 - DNA, 25 bp, Homo sapien
agcgcaactggagttcagccactgg

SEQ ID NO: 5819343 - DNA, 25 bp, Homo sapien
ggctgacacacgccgtgcgctcagc

SEQ ID NO: 5819344 - DNA, 25 bp, Homo sapien
catgttcacgtcccctgcccggcag

SEQ ID NO: 5819345 - DNA, 25 bp, Homo sapien
gatcgaagtcaaatttttcatcggc

SEQ ID NO: 5819346 - DNA, 25 bp, Homo sapien
tgggcaacggaggctgttcgggaac

SEQ ID NO: 5819347 - DNA, 25 bp, Homo sapien
ttgcggggctcagaggaacgtctcc

SEQ ID NO: 5819348 - DNA, 25 bp, Homo sapien
gtgcccaggctggagtgcagtggca

SEQ ID NO: 5819349 - DNA, 25 bp, Homo sapien
atgaggtcgatcagaggcctgcttt

SEQ ID NO: 5819350 - DNA, 25 bp, Homo sapien
ttgactcctgtatgaatctttccac

SEQ ID NO: 5819351 - DNA, 25 bp, Homo sapien
ctcctgggctcaagtaatccgccca

SEQ ID NO: 5819352 - DNA, 25 bp, Homo sapien
gattccttctcagctgggatttttg

SEQ ID NO: 5819353 - DNA, 25 bp, Homo sapien
agagcccacggccctgggcatcgtt

SEQ ID NO: 5819354 - DNA, 25 bp, Homo sapien
gcttcaataagtccatttattttac

SEQ ID NO: 5819355 - DNA, 25 bp, Homo sapien
agaagagcctcactaggggctgcat

SEQ ID NO: 5819356 - DNA, 25 bp, Homo sapien
atgtctggagtgtttgtcatgaggt

SEQ ID NO: 5819357 - DNA, 25 bp, Homo sapien
ccgagggtcttcaggcttggcagct

SEQ ID NO: 5819358 - DNA, 25 bp, Homo sapien
ctcccttgttggttcagttctcatt

SEQ ID NO: 5819359 - DNA, 25 bp, Homo sapien
tgacaggtagtatgtctccctttta

SEQ ID NO: 5819360 - DNA, 25 bp, Homo sapien
ttgggctgcctggttccggctgctg

SEQ ID NO: 5819361 - DNA, 25 bp, Homo sapien
gaggaggacttccttgcgagattgc

SEQ ID NO: 5819362 - DNA, 25 bp, Homo sapien
cgcgaaagctttggtgttgagctgt

SEQ ID NO: 5819363 - DNA, 25 bp, Homo sapien
tgtccggggagtcaccaatagaaaa

SEQ ID NO: 5819364 - DNA, 25 bp, Homo sapien
cccggggcaggtttgtcagggagaa

SEQ ID NO: 5819365 - DNA, 25 bp, Homo sapien
ctgcggccgctgtgcccgcgaaagc

SEQ ID NO: 5819366 - DNA, 25 bp, Homo sapien
ttttattcatgtctggagtgtttgt

SEQ ID NO: 5819367 - DNA, 25 bp, Homo sapien
gctggatcagaggggagctcaggtc

SEQ ID NO: 5819368 - DNA, 25 bp, Homo sapien
ctgcagcctgcatctccttgagctc

SEQ ID NO: 5819369 - DNA, 25 bp, Homo sapien
gggctgtctgacaggtagtatgtct

SEQ ID NO: 5819370 - DNA, 25 bp, Homo sapien
gtcagggagaacatcccggtgggat

SEQ ID NO: 5819371 - DNA, 25 bp, Homo sapien
agtggcacaatcacagcccactgca

SEQ ID NO: 5819372 - DNA, 25 bp, Homo sapien
tgagcagagtgcggaggccccggcg

SEQ ID NO: 5819373 - DNA, 25 bp, Homo sapien
atcctacagccacgtgtgcttctgg

SEQ ID NO: 5819374 - DNA, 25 bp, Homo sapien
tcgttttgggggtcatcggtggaag

SEQ ID NO: 5819375 - DNA, 25 bp, Homo sapien
tctccacccggcttggcttcctccc

SEQ ID NO: 5819376 - DNA, 25 bp, Homo sapien
gtcccgaactcctgggctcaagtaa

SEQ ID NO: 5819377 - DNA, 25 bp, Homo sapien
ggaggatgcccccacagggcctgca

SEQ ID NO: 5819378 - DNA, 25 bp, Homo sapien
gcaggcagagctggccgcagcatgg

SEQ ID NO: 5819379 - DNA, 25 bp, Homo sapien
tttttgtagggacaggagtttcact

SEQ ID NO: 5819380 - DNA, 25 bp, Homo sapien
gctgggatttttgtcctggaaggac

SEQ ID NO: 5819381 - DNA, 25 bp, Homo sapien
gccaccttccggagtctggggttgg

SEQ ID NO: 5819382 - DNA, 25 bp, Homo sapien
tcggcttagaacttgaggagtgggg

SEQ ID NO: 5819383 - DNA, 25 bp, Homo sapien
caggagtttcactatatttcccagg

SEQ ID NO: 5819384 - DNA, 25 bp, Homo sapien
ccacctcagcctcccaagttctagg

SEQ ID NO: 5819385 - DNA, 25 bp, Homo sapien
ctaaagcttgtttctgagggttgaa

SEQ ID NO: 5819386 - DNA, 25 bp, Homo sapien
gcctcactaggggctgcatctccac

SEQ ID NO: 5819387 - DNA, 25 bp, Homo sapien
tccttgtcagcctcagggctcagct

SEQ ID NO: 5819388 - DNA, 25 bp, Homo sapien
tcagatcctacagccacgtgtgctt

SEQ ID NO: 5819389 - DNA, 25 bp, Homo sapien
acttgaggagtggggaatccacgtt

SEQ ID NO: 5819390 - DNA, 25 bp, Homo sapien
ggccacatttttattcatgtctgga

SEQ ID NO: 5819391 - DNA, 25 bp, Homo sapien
atgaggggctggcttgcagcatctg

SEQ ID NO: 5819392 - DNA, 25 bp, Homo sapien
gctgcctgacttgcagcatgagcag

SEQ ID NO: 5819393 - DNA, 25 bp, Homo sapien
tcatgtctggagtgtttgtcatgag

SEQ ID NO: 5819394 - DNA, 25 bp, Homo sapien
taaagccagtaagtgagcttctttg

SEQ ID NO: 5819395 - DNA, 25 bp, Homo sapien
gggtcccattctgcctgacttgctg

SEQ ID NO: 5819396 - DNA, 25 bp, Homo sapien
tggtcccgaactcctgggctcaagt

SEQ ID NO: 5819397 - DNA, 25 bp, Homo sapien
cccattctgcctgacttgctgatgt

SEQ ID NO: 5819398 - DNA, 25 bp, Homo sapien
tcgaagaagacaatgaaagatcgaa

SEQ ID NO: 5819399 - DNA, 25 bp, Homo sapien
cttaggaattttaaattgatttgta

SEQ ID NO: 5819400 - DNA, 25 bp, Homo sapien
gcaggtttgtcagggagaacatccc

SEQ ID NO: 5819401 - DNA, 25 bp, Homo sapien
tgctgaggggggtgccgtgagctgc

SEQ ID NO: 5819402 - DNA, 25 bp, Homo sapien
gtcttcttcagccccaacttgtttg

SEQ ID NO: 5819403 - DNA, 25 bp, Homo sapien
tctttcaaggcaaaggatttggttc

SEQ ID NO: 5819404 - DNA, 25 bp, Homo sapien
tttttccaagacaggttctcacatt

SEQ ID NO: 5819405 - DNA, 25 bp, Homo sapien
ttctgcctgacttgctgatgtttga

SEQ ID NO: 5819406 - DNA, 25 bp, Homo sapien
tcactatatttcccaggctggtccc

SEQ ID NO: 5819407 - DNA, 25 bp, Homo sapien
cggggcaggtttgtcagggagaaca

SEQ ID NO: 5819408 - DNA, 25 bp, Homo sapien
ggcgcccgggtgaggcgggcctggg

SEQ ID NO: 5819409 - DNA, 25 bp, Homo sapien
gggctccaggcaaagggactctcag

SEQ ID NO: 5819410 - DNA, 25 bp, Homo sapien
tgctggtagagccgggtgcttttaa

SEQ ID NO: 5819411 - DNA, 25 bp, Homo sapien
atgcttcttcctctaacagaggccg

SEQ ID NO: 5819412 - DNA, 25 bp, Homo sapien
ctcagaggaacgtctccgagctggc

SEQ ID NO: 5819413 - DNA, 25 bp, Homo sapien
gaggaacgtctccgagctggcacac

SEQ ID NO: 5819414 - DNA, 25 bp, Homo sapien
gcttctttgtacacctccacgaact

SEQ ID NO: 5819415 - DNA, 25 bp, Homo sapien
tacatacaaaacattcaaaagaaaa

SEQ ID NO: 5819416 - DNA, 25 bp, Homo sapien
agtggcttccggcggccggcacatt

SEQ ID NO: 5819417 - DNA, 25 bp, Homo sapien
gtacacctccacgaacttctccccg

SEQ ID NO: 5819418 - DNA, 25 bp, Homo sapien
ttcatttagagtgactgaggcttca

SEQ ID NO: 5819419 - DNA, 25 bp, Homo sapien
ggagctatttgcaggaatacttgca

SEQ ID NO: 5819420 - DNA, 25 bp, Homo sapien
gggggatgctgaggggggtgccgtg

SEQ ID NO: 5819421 - DNA, 25 bp, Homo sapien
agcatgagcagagtgcggaggcccc

SEQ ID NO: 5819422 - DNA, 25 bp, Homo sapien
tgctgatgtttgacagaggccggga

SEQ ID NO: 5819423 - DNA, 25 bp, Homo sapien
tgcccactgctggggatgtgcacgc

SEQ ID NO: 5819424 - DNA, 25 bp, Homo sapien
gtcccattctgcctgacttgctgat

SEQ ID NO: 5819425 - DNA, 25 bp, Homo sapien
tcgggaaccggattatttaattcca

SEQ ID NO: 5819426 - DNA, 25 bp, Homo sapien
tccttttctttctcaaagaggttta

SEQ ID NO: 5819427 - DNA, 25 bp, Homo sapien
accctctccagcactgggaatatat

SEQ ID NO: 5819428 - DNA, 25 bp, Homo sapien
ctgttctttcaaggcaaaggatttg

SEQ ID NO: 5819429 - DNA, 25 bp, Homo sapien
ggccatcctcccacttcagcctccc

SEQ ID NO: 5819430 - DNA, 25 bp, Homo sapien
tccttgcgagattgctggtagagcc

SEQ ID NO: 5819431 - DNA, 25 bp, Homo sapien
cccactgcagcctgcatctccttga

SEQ ID NO: 5819432 - DNA, 25 bp, Homo sapien
attcatgtctggagtgtttgtcatg

SEQ ID NO: 5819433 - DNA, 25 bp, Homo sapien
tccaccagcctggaatctgtctttc

SEQ ID NO: 5819434 - DNA, 25 bp, Homo sapien
gcagcctgcatctccttgagctcag

SEQ ID NO: 5819435 - DNA, 25 bp, Homo sapien
ggccccagcaaggggctgtctgaca

SEQ ID NO: 5819436 - DNA, 25 bp, Homo sapien
tttgtactttttgtagggacaggag

SEQ ID NO: 5819437 - DNA, 25 bp, Homo sapien
cattctgcctgacttgctgatgttt

SEQ ID NO: 5819438 - DNA, 25 bp, Homo sapien
cccttgttggttcagttctcattgc

SEQ ID NO: 5819439 - DNA, 25 bp, Homo sapien
ttcctctgagtcgctgcctgacttg

SEQ ID NO: 5819440 - DNA, 25 bp, Homo sapien
tggtgcccaggctggagtgcagtgg

SEQ ID NO: 5819441 - DNA, 25 bp, Homo sapien
gtgagctgctccgctgccagctcag

SEQ ID NO: 5819442 - DNA, 25 bp, Homo sapien
ggctttgtggtgctggcccagatga

SEQ ID NO: 5819443 - DNA, 25 bp, Homo sapien
ccgctcgaggcagcagcaatttggt

SEQ ID NO: 5819444 - DNA, 25 bp, Homo sapien
tctgagggttgaaaaccactttagg

SEQ ID NO: 5819445 - DNA, 25 bp, Homo sapien
gttcagccactggccgccaccttcc

SEQ ID NO: 5819446 - DNA, 25 bp, Homo sapien
acagaggccgggagctatttgcagg

SEQ ID NO: 5819447 - DNA, 25 bp, Homo sapien
ggtgctggcccagatgagcgtctaa

SEQ ID NO: 5819448 - DNA, 25 bp, Homo sapien
cagaagtcgatgagaggaaggtcaa

SEQ ID NO: 5819449 - DNA, 25 bp, Homo sapien
ccttgggtggtccgtgctggcccca

SEQ ID NO: 5819450 - DNA, 25 bp, Homo sapien
cccggcttggcttcctcccgagcta

SEQ ID NO: 5819451 - DNA, 25 bp, Homo sapien
ccaagctggcagcaatacatctttc

SEQ ID NO: 5819452 - DNA, 25 bp, Homo sapien
cagtccctcagcccaccctctccag

SEQ ID NO: 5819453 - DNA, 25 bp, Homo sapien
ccaccaccggtgaaggtttggccac

SEQ ID NO: 5819454 - DNA, 25 bp, Homo sapien
gtgagcttctttgtacacctccacg

SEQ ID NO: 5819455 - DNA, 25 bp, Homo sapien
tgtgggcaacggaggctgttcggga

SEQ ID NO: 5819456 - DNA, 25 bp, Homo sapien
tggttccggctgctgctctcaatgt

SEQ ID NO: 5819457 - DNA, 25 bp, Homo sapien
ccctgccaactgacgtgcacgactg

SEQ ID NO: 5819458 - DNA, 25 bp, Homo sapien
tcagggctcagctggatcagagggg

SEQ ID NO: 5819459 - DNA, 25 bp, Homo sapien
tgcttctggggtatcgcagaagtcg

SEQ ID NO: 5819460 - DNA, 25 bp, Homo sapien
tcaggggacacatccaccagcctgg

SEQ ID NO: 5819461 - DNA, 25 bp, Homo sapien
tgtttggaacagggatcgcccgctt

SEQ ID NO: 5819462 - DNA, 25 bp, Homo sapien
ttggtgttgagctgtccggggagtc

SEQ ID NO: 5819463 - DNA, 25 bp, Homo sapien
cagagttcttgcggggctcagagga

SEQ ID NO: 5819464 - DNA, 25 bp, Homo sapien
tttcccaggctggtcccgaactcct

SEQ ID NO: 5819465 - DNA, 25 bp, Homo sapien
cacacgggaaggaggagaacccctg

SEQ ID NO: 5819466 - DNA, 25 bp, Homo sapien
gttctccttgtcagcctcagggctc

SEQ ID NO: 5819467 - DNA, 25 bp, Homo sapien
acaggttctcacattggtgcccagg

SEQ ID NO: 5819468 - DNA, 25 bp, Homo sapien
ttgcaggaatacttgcaaattcact

SEQ ID NO: 5819469 - DNA, 25 bp, Homo sapien
tcgatcagaggcctgctttcagatc

SEQ ID NO: 5819470 - DNA, 25 bp, Homo sapien
gtgggcaaggctgacacacgccgtg

SEQ ID NO: 5819471 - DNA, 25 bp, Homo sapien
ttgtacacctccacgaacttctccc

SEQ ID NO: 5819472 - DNA, 25 bp, Homo sapien
gggtgcttttaacagggtcttcttc

SEQ ID NO: 5819473 - DNA, 25 bp, Homo sapien
gcttggcttcctcccgagctacttc

SEQ ID NO: 5819474 - DNA, 25 bp, Homo sapien
ggtgttgagctgtccggggagtcac

SEQ ID NO: 5819475 - DNA, 25 bp, Homo sapien
gcaaagcatgagcagagtgcggagg

SEQ ID NO: 5819476 - DNA, 25 bp, Homo sapien
cacaggggagagcccacggccctgg

SEQ ID NO: 5819477 - DNA, 25 bp, Homo sapien
tagagtgactgaggcttcacattcc

SEQ ID NO: 5819478 - DNA, 25 bp, Homo sapien
gtctggagtgtttgtcatgaggtcg

SEQ ID NO: 5819479 - DNA, 25 bp, Homo sapien
tgggcagggccggggaggaggccaa

SEQ ID NO: 5819480 - DNA, 25 bp, Homo sapien
gggaatccacgttctccttgtcagc

SEQ ID NO: 5819481 - DNA, 25 bp, Homo sapien
ggcttcctcccgagctacttctgtg

SEQ ID NO: 5819482 - DNA, 25 bp, Homo sapien
caagtagctgggactacaggcatgc

SEQ ID NO: 5819483 - DNA, 25 bp, Homo sapien
agccccagggatgcttcttcctcta

SEQ ID NO: 5819484 - DNA, 25 bp, Homo sapien
tctggggtatcgcagaagtcgatga

SEQ ID NO: 5819485 - DNA, 25 bp, Homo sapien
ttgcaaattcacttgatttagcttt

SEQ ID NO: 5819486 - DNA, 25 bp, Homo sapien
ggaattttaaattgatttgtaggag

SEQ ID NO: 5819487 - DNA, 25 bp, Homo sapien
atttgtaggagtaggcataaccttt

SEQ ID NO: 5819488 - DNA, 25 bp, Homo sapien
tggggcttttcttcatttccttttc

SEQ ID NO: 5819489 - DNA, 25 bp, Homo sapien
aaatttttcatcggccaaaagaaga

SEQ ID NO: 5819490 - DNA, 25 bp, Homo sapien
gtgcggaggccccggcgcccgggtg

SEQ ID NO: 5819491 - DNA, 25 bp, Homo sapien
aatttagacaggaatctcgccgtct

SEQ ID NO: 5819492 - DNA, 25 bp, Homo sapien
tccagcccagagaatggcagcgagg

SEQ ID NO: 5819493 - DNA, 25 bp, Homo sapien
agattctgaccaagcgcaactggag

SEQ ID NO: 5819494 - DNA, 25 bp, Homo sapien
gttttgggggtcatcggtggaaggc

SEQ ID NO: 5819495 - DNA, 25 bp, Homo sapien
atcccggtgggattccttctcagct

SEQ ID NO: 5819496 - DNA, 25 bp, Homo sapien
ttttgactcctgtatgaatctttcc

SEQ ID NO: 5819497 - DNA, 25 bp, Homo sapien
gcggggctcagaggaacgtctccga

SEQ ID NO: 5819498 - DNA, 25 bp, Homo sapien
ccgaggaggacttccttgcgagatt

SEQ ID NO: 5819499 - DNA, 25 bp, Homo sapien
aagatcgaagtcaaatttttcatcg

SEQ ID NO: 5819500 - DNA, 25 bp, Homo sapien
tcatcttcatttgcactcgaagaag

SEQ ID NO: 5819501 - DNA, 25 bp, Homo sapien
ccgtgcgctcagcaggctttgtggt

SEQ ID NO: 5819502 - DNA, 25 bp, Homo sapien
ctatttgcaggaatacttgcaaatt

SEQ ID NO: 5819503 - DNA, 25 bp, Homo sapien
tccacgaacttctccccggccagag

SEQ ID NO: 5819504 - DNA, 25 bp, Homo sapien
gcagagctggccgcagcatggcggg

SEQ ID NO: 5819505 - DNA, 25 bp, Homo sapien
aggatgcccccacagggcctgcagg

SEQ ID NO: 5819506 - DNA, 25 bp, Homo sapien
gctcagcaggctttgtggtgctggc

SEQ ID NO: 5819507 - DNA, 25 bp, Homo sapien
ctgttgctctcccttgttggttcag

SEQ ID NO: 5819508 - DNA, 25 bp, Homo sapien
ccagctcagaaacatcgacccgctt

SEQ ID NO: 5819509 - DNA, 25 bp, Homo sapien
cactaggggctgcatctccacccgg

SEQ ID NO: 5819510 - DNA, 25 bp, Homo sapien
aaattcacttgatttagctttgccc

SEQ ID NO: 5819511 - DNA, 25 bp, Homo sapien
tcaaggcaaaggatttggttcggct

SEQ ID NO: 5819512 - DNA, 25 bp, Homo sapien
ttctttatgtccaaagggtccgaag

SEQ ID NO: 5819513 - DNA, 25 bp, Homo sapien
cggtggaaggccagagcagcgccgg

SEQ ID NO: 5819514 - DNA, 25 bp, Homo sapien
agcagagtgcggaggccccggcgcc

SEQ ID NO: 5819515 - DNA, 25 bp, Homo sapien
acctcagcctcccaagttctagggt

SEQ ID NO: 5819516 - DNA, 25 bp, Homo sapien
cgcttgccctggcccaagtggcttc

SEQ ID NO: 5819517 - DNA, 25 bp, Homo sapien
cccgcgaaagctttggtgttgagct

SEQ ID NO: 5819518 - DNA, 25 bp, Homo sapien
ggctgttctttcaaggcaaaggatt

SEQ ID NO: 5819519 - DNA, 25 bp, Homo sapien
ggctcagctggatcagaggggagct

SEQ ID NO: 5819520 - DNA, 25 bp, Homo sapien
tgcgagattgctggtagagccgggt

SEQ ID NO: 5819521 - DNA, 25 bp, Homo sapien
gctgaaggctcatcgcggccgccgc

SEQ ID NO: 5819522 - DNA, 25 bp, Homo sapien
cagcactgggaatatatttatgctt

SEQ ID NO: 5819523 - DNA, 25 bp, Homo sapien
catccatgttcacgtcccctgcccg

SEQ ID NO: 5819524 - DNA, 25 bp, Homo sapien
cttctccccggccagagggctccag

SEQ ID NO: 5819525 - DNA, 25 bp, Homo sapien
cagcatctggagtgaccgcgagtgg

SEQ ID NO: 5819526 - DNA, 25 bp, Homo sapien
gatgtgcacgcactggatgccccgc

SEQ ID NO: 5819527 - DNA, 25 bp, Homo sapien
cctggaaggactagctggaatctct

SEQ ID NO: 5819528 - DNA, 25 bp, Homo sapien
cggggtgctgtggacagtgaccctg

SEQ ID NO: 5819529 - DNA, 25 bp, Homo sapien
gggagaacatcccggtgggattcct

SEQ ID NO: 5819530 - DNA, 25 bp, Homo sapien
ttccttctcagctgggatttttgtc

SEQ ID NO: 5819531 - DNA, 25 bp, Homo sapien
ctgaggggggtgccgtgagctgctc

SEQ ID NO: 5819532 - DNA, 25 bp, Homo sapien
agtatgtctcccttttaagagacgt

SEQ ID NO: 5819533 - DNA, 25 bp, Homo sapien
ccaagttctagggttacaagtgtaa

SEQ ID NO: 5819534 - DNA, 25 bp, Homo sapien
actgcgaccagcctaaagcttgttt

SEQ ID NO: 5819535 - DNA, 25 bp, Homo sapien
gcacgactgcggccgctgtgcccgc

SEQ ID NO: 5819536 - DNA, 25 bp, Homo sapien
agacttcatcatcttcatttgcact

SEQ ID NO: 5819537 - DNA, 25 bp, Homo sapien
ggcagcagcaatttggtcccgggct

SEQ ID NO: 5819538 - DNA, 25 bp, Homo sapien
ggagtgtttgtcatgaggtcgatca

SEQ ID NO: 5819539 - DNA, 25 bp, Homo sapien
cctggaatctgtctttctgttgctc

SEQ ID NO: 5819540 - DNA, 25 bp, Homo sapien
cctctggagaaaagttaagtgcctg

SEQ ID NO: 5819541 - DNA, 25 bp, Homo sapien
ctcccaagtagctgggactacaggc

SEQ ID NO: 5819542 - DNA, 25 bp, Homo sapien
gagccgggtgcttttaacagggtct

SEQ ID NO: 5819543 - DNA, 25 bp, Homo sapien
tgagcgtctaaccggggtgctgtgg

SEQ ID NO: 5819544 - DNA, 25 bp, Homo sapien
tgccagctcagaaacatcgacccgc

SEQ ID NO: 5819545 - DNA, 25 bp, Homo sapien
gaaaagttaagtgcctgaggcacac

SEQ ID NO: 5819546 - DNA, 25 bp, Homo sapien
tccaagacaggttctcacattggtg

SEQ ID NO: 5819547 - DNA, 25 bp, Homo sapien
accggattatttaattccaagctgg

SEQ ID NO: 5819548 - DNA, 25 bp, Homo sapien
tatctacaagaagagcctcactagg

SEQ ID NO: 5819549 - DNA, 25 bp, Homo sapien
aggccaagagccgaggctcacccac

SEQ ID NO: 5819550 - DNA, 25 bp, Homo sapien
acagcacccggggcaggtttgtcag

SEQ ID NO: 5819551 - DNA, 25 bp, Homo sapien
ccggcgcccgggtgaggcgggcctg

SEQ ID NO: 5819552 - DNA, 25 bp, Homo sapien
cagaggaacgtctccgagctggcac

SEQ ID NO: 5819553 - DNA, 25 bp, Homo sapien
gaggccgctcgaggcagcagcaatt

SEQ ID NO: 5819554 - DNA, 25 bp, Homo sapien
ctcctgtatgaatctttccacgccc

SEQ ID NO: 5819555 - DNA, 25 bp, Homo sapien
gggctgcctggttccggctgctgct

SEQ ID NO: 5819556 - DNA, 25 bp, Homo sapien
aaaagaaaattcttcatttagagtg

SEQ ID NO: 5819557 - DNA, 25 bp, Homo sapien
tgtaagccactgcgaccagcctaaa

SEQ ID NO: 5819558 - DNA, 25 bp, Homo sapien
agccactggccgccaccttccggag

SEQ ID NO: 5819559 - DNA, 25 bp, Homo sapien
tttcttgggcttctccgcagcccca

SEQ ID NO: 5819560 - DNA, 25 bp, Homo sapien
gggatgtgcacgcactggatgcccc

SEQ ID NO: 5819561 - DNA, 25 bp, Homo sapien
atcgcccgcttgccctggcccaagt

SEQ ID NO: 5819562 - DNA, 25 bp, Homo sapien
ttggtcccgggcttcctctgagtcg

SEQ ID NO: 5819563 - DNA, 25 bp, Homo sapien
agaatggcagcgaggagggtggcgg

SEQ ID NO: 5819564 - DNA, 25 bp, Homo sapien
ctgatgtttgacagaggccgggagc

SEQ ID NO: 5819565 - DNA, 25 bp, Homo sapien
ccagcaaggggctgtctgacaggta

SEQ ID NO: 5819566 - DNA, 25 bp, Homo sapien
gctggcgggtgtgggcaaggctgac

SEQ ID NO: 5819567 - DNA, 25 bp, Homo sapien
agggatcgcccgcttgccctggccc

SEQ ID NO: 5819568 - DNA, 25 bp, Homo sapien
tctccagcactgggaatatatttat

SEQ ID NO: 5819569 - DNA, 25 bp, Homo sapien
ttccggcggccggcacattgacagc

SEQ ID NO: 5819570 - DNA, 25 bp, Homo sapien
tggcctgccaggaggatgcccccac

SEQ ID NO: 5819571 - DNA, 25 bp, Homo sapien
gccggggaggaggccaagagccgag

SEQ ID NO: 5819572 - DNA, 25 bp, Homo sapien
tgtcagcctcagggctcagctggat

SEQ ID NO: 5819573 - DNA, 25 bp, Homo sapien
ttgatttagctttgcccactgctgg

SEQ ID NO: 5819574 - DNA, 25 bp, Homo sapien
ttttaaattgatttgtaggagtagg

SEQ ID NO: 5819575 - DNA, 25 bp, Homo sapien
caaataaaacttctactaaaacatg

SEQ ID NO: 5819576 - DNA, 25 bp, Homo sapien
tcagccactggccgccaccttccgg

SEQ ID NO: 5819577 - DNA, 25 bp, Homo sapien
attcttcatttagagtgactgaggc

SEQ ID NO: 5819578 - DNA, 25 bp, Homo sapien
cgcagaagtcgatgagaggaaggtc

SEQ ID NO: 5819579 - DNA, 25 bp, Homo sapien
cagagggctccaggcaaagggactc

SEQ ID NO: 5819580 - DNA, 25 bp, Homo sapien
gatgtttgacagaggccgggagcta

SEQ ID NO: 5819581 - DNA, 25 bp, Homo sapien
cagcctcccaagttctagggttaca

SEQ ID NO: 5819582 - DNA, 25 bp, Homo sapien
aaattcttcatttagagtgactgag

SEQ ID NO: 5819583 - DNA, 25 bp, Homo sapien
gatttggttcggcttagaacttgag

SEQ ID NO: 5819584 - DNA, 25 bp, Homo sapien
gggccggggaggaggccaagagccg

SEQ ID NO: 5819585 - DNA, 25 bp, Homo sapien
gggaaggaggagaacccctgtcagg

SEQ ID NO: 5819586 - DNA, 25 bp, Homo sapien
gcagcatgagcagtgcatgattccc

SEQ ID NO: 5819587 - DNA, 25 bp, Homo sapien
gagtaggcataacctttgtcttgga

SEQ ID NO: 5819588 - DNA, 25 bp, Homo sapien
gctggtcccgaactcctgggctcaa

SEQ ID NO: 5819589 - DNA, 25 bp, Homo sapien
ccttctcagctgggatttttgtcct

SEQ ID NO: 5819590 - DNA, 25 bp, Homo sapien
tgtttgtcatgaggtcgatcagagg

SEQ ID NO: 5819591 - DNA, 25 bp, Homo sapien
ggccttgggtggtccgtgctggccc

SEQ ID NO: 5819592 - DNA, 25 bp, Homo sapien
aggactagctggaatctctttcttg

SEQ ID NO: 5819593 - DNA, 25 bp, Homo sapien
gaaggtttggccacatttttattca

SEQ ID NO: 5819594 - DNA, 25 bp, Homo sapien
gggtggcggcgggaagcagaggcct

SEQ ID NO: 5819595 - DNA, 25 bp, Homo sapien
tcatcggtggaaggccagagcagcg

SEQ ID NO: 5819596 - DNA, 25 bp, Homo sapien
tctcacattggtgcccaggctggag

SEQ ID NO: 5819597 - DNA, 25 bp, Homo sapien
gtggcggcgggaagcagaggccttg

SEQ ID NO: 5819598 - DNA, 25 bp, Homo sapien
ttatttttaattttgactcctgtat

SEQ ID NO: 5819599 - DNA, 25 bp, Homo sapien
gttctcattgcagagttcttgcggg

SEQ ID NO: 5819600 - DNA, 25 bp, Homo sapien
tcgacccgcttggcctgccaggagg

SEQ ID NO: 5819601 - DNA, 25 bp, Homo sapien
ggcttgcagcatctggagtgaccgc

SEQ ID NO: 5819602 - DNA, 25 bp, Homo sapien
cagtgcatgattccctgggcaaagc

SEQ ID NO: 5819603 - DNA, 25 bp, Homo sapien
gaggagtggggaatccacgttctcc

SEQ ID NO: 5819604 - DNA, 25 bp, Homo sapien
tgctggcccagatgagcgtctaacc

SEQ ID NO: 5819605 - DNA, 25 bp, Homo sapien
ctgaggcttcacattccagcccaga

SEQ ID NO: 5819606 - DNA, 25 bp, Homo sapien
tgtcaggggacacatccaccagcct

SEQ ID NO: 5819607 - DNA, 25 bp, Homo sapien
ctcagatgtgggcaacggaggctgt

SEQ ID NO: 5819608 - DNA, 25 bp, Homo sapien
tccagtttgatatctacaagaagag

SEQ ID NO: 5819609 - DNA, 25 bp, Homo sapien
atttttcatcggccaaaagaagaat

SEQ ID NO: 5819610 - DNA, 25 bp, Homo sapien
gggtgggggatgctgaggggggtgc

SEQ ID NO: 5819611 - DNA, 25 bp, Homo sapien
tggagaaaagttaagtgcctgaggc

SEQ ID NO: 5819612 - DNA, 25 bp, Homo sapien
gctgttcgggaaccggattatttaa

SEQ ID NO: 5819613 - DNA, 25 bp, Homo sapien
gctgcctggttccggctgctgctct

SEQ ID NO: 5819614 - DNA, 25 bp, Homo sapien
agcccactgcagcctgcatctcctt

SEQ ID NO: 5819615 - DNA, 25 bp, Homo sapien
tttgtagggacaggagtttcactat

SEQ ID NO: 5819616 - DNA, 25 bp, Homo sapien
ggtcccgggcttcctctgagtcgct

SEQ ID NO: 5819617 - DNA, 25 bp, Homo sapien
atgaaagatcgaagtcaaatttttc

SEQ ID NO: 5819618 - DNA, 25 bp, Homo sapien
gccctgggcatcgttttgggggtca

SEQ ID NO: 5819619 - DNA, 25 bp, Homo sapien
agcaaggggctgtctgacaggtagt

SEQ ID NO: 5819620 - DNA, 25 bp, Homo sapien
gggattccttctcagctgggatttt

SEQ ID NO: 5819621 - DNA, 25 bp, Homo sapien
cctctgagtcgctgcctgacttgca

SEQ ID NO: 5819622 - DNA, 25 bp, Homo sapien
gggtcatccatgttcacgtcccctg

SEQ ID NO: 5819623 - DNA, 25 bp, Homo sapien
cccagtccctcagcccaccctctcc

SEQ ID NO: 5819624 - DNA, 25 bp, Homo sapien
tggggaatccacgttctccttgtca

SEQ ID NO: 5819625 - DNA, 25 bp, Homo sapien
cctgtcaggggacacatccaccagc

SEQ ID NO: 5819626 - DNA, 25 bp, Homo sapien
gtttgatatctacaagaagagcctc

SEQ ID NO: 5819627 - DNA, 25 bp, Homo sapien
gtggtccgtgctggccccagtccct

SEQ ID NO: 5819628 - DNA, 25 bp, Homo sapien
tccaggcaaagggactctcagatgt

SEQ ID NO: 5819629 - DNA, 25 bp, Homo sapien
cacccacagggggccccagcaaggg

SEQ ID NO: 5819630 - DNA, 25 bp, Homo sapien
ctggcttgcagcatctggagtgacc

SEQ ID NO: 5819631 - DNA, 25 bp, Homo sapien
ccaggctggagtgcagtggcacaat

SEQ ID NO: 5819632 - DNA, 25 bp, Homo sapien
gactctcagatgtgggcaacggagg

SEQ ID NO: 5819633 - DNA, 25 bp, Homo sapien
gagaaaagttaagtgcctgaggcac

SEQ ID NO: 5819634 - DNA, 25 bp, Homo sapien
tgtagggacaggagtttcactatat

SEQ ID NO: 5819635 - DNA, 25 bp, Homo sapien
tgctgctctcaatgtgtaaagccag

SEQ ID NO: 5819636 - DNA, 25 bp, Homo sapien
tgtctgacaggtagtatgtctccct

SEQ ID NO: 5819637 - DNA, 25 bp, Homo sapien
gggtcttcaggcttggcagcttggg

SEQ ID NO: 5819638 - DNA, 25 bp, Homo sapien
attctgaccaagcgcaactggagtt

SEQ ID NO: 5819639 - DNA, 25 bp, Homo sapien
aggggctgcatctccacccggcttg

SEQ ID NO: 5819640 - DNA, 25 bp, Homo sapien
ctacttctgtggcagtacttttgga

SEQ ID NO: 5819641 - DNA, 25 bp, Homo sapien
ctagtcttattcaattgagaagatt

SEQ ID NO: 5819642 - DNA, 25 bp, Homo sapien
gggcaccagagctgggcagggccgg

SEQ ID NO: 5819643 - DNA, 25 bp, Homo sapien
agcatgagcagtgcatgattccctg

SEQ ID NO: 5819644 - DNA, 25 bp, Homo sapien
agctatttgcaggaatacttgcaaa

SEQ ID NO: 5819645 - DNA, 25 bp, Homo sapien
ggagtttcactatatttcccaggct

SEQ ID NO: 5819646 - DNA, 25 bp, Homo sapien
ggctcaagtaatccgcccacctcag

SEQ ID NO: 5819647 - DNA, 25 bp, Homo sapien
tccccggccagagggctccaggcaa

SEQ ID NO: 5819648 - DNA, 25 bp, Homo sapien
cgcccgcttgccctggcccaagtgg

SEQ ID NO: 5819649 - DNA, 25 bp, Homo sapien
cgagattgctggtagagccgggtgc

SEQ ID NO: 5819650 - DNA, 25 bp, Homo sapien
ggcagtacttttggagaaagtagaa

SEQ ID NO: 5819651 - DNA, 25 bp, Homo sapien
ctcagctggatcagaggggagctca

SEQ ID NO: 5819652 - DNA, 25 bp, Homo sapien
gcccaggctggagtgcagtggcaca

SEQ ID NO: 5819653 - DNA, 25 bp, Homo sapien
gaggggctggcttgcagcatctgga

SEQ ID NO: 5819654 - DNA, 25 bp, Homo sapien
ttaacagggtcttcttcagccccaa

SEQ ID NO: 5819655 - DNA, 25 bp, Homo sapien
ggcccagatgagcgtctaaccgggg

SEQ ID NO: 5819656 - DNA, 25 bp, Homo sapien
tgacgtgcacgactgcggccgctgt

SEQ ID NO: 5819657 - DNA, 25 bp, Homo sapien
ttcttcctctaacagaggccgctcg

SEQ ID NO: 5819658 - DNA, 25 bp, Homo sapien
gttccggctgctgctctcaatgtgt

SEQ ID NO: 5819659 - DNA, 25 bp, Homo sapien
ggttcagttctcattgcagagttct

SEQ ID NO: 5819660 - DNA, 25 bp, Homo sapien
gccgccaccttccggagtctggggt

SEQ ID NO: 5819661 - DNA, 25 bp, Homo sapien
gggtggtccgtgctggccccagtcc

SEQ ID NO: 5819662 - DNA, 25 bp, Homo sapien
gggcaaggctgacacacgccgtgcg

SEQ ID NO: 5819663 - DNA, 25 bp, Homo sapien
cagggagaacatcccggtgggattc

SEQ ID NO: 5819664 - DNA, 25 bp, Homo sapien
ttctgtggcagtacttttggagaaa

SEQ ID NO: 5819665 - DNA, 25 bp, Homo sapien
cttagaacttgaggagtggggaatc

SEQ ID NO: 5819666 - DNA, 25 bp, Homo sapien
attgcagagttcttgcggggctcag

SEQ ID NO: 5819667 - DNA, 25 bp, Homo sapien
ccagagaatggcagcgaggagggtg

SEQ ID NO: 5819668 - DNA, 25 bp, Homo sapien
tttcaaggcaaaggatttggttcgg

SEQ ID NO: 5819669 - DNA, 25 bp, Homo sapien
ggcccaagtggcttccggcggccgg

SEQ ID NO: 5819670 - DNA, 25 bp, Homo sapien
caactgacgtgcacgactgcggccg

SEQ ID NO: 5819671 - DNA, 25 bp, Homo sapien
tcatttgcactcgaagaagacaatg

SEQ ID NO: 5819672 - DNA, 25 bp, Homo sapien
atgcttcaataagtccatttatttt

SEQ ID NO: 5819673 - DNA, 25 bp, Homo sapien
gatcagaggggagctcaggtctatg

SEQ ID NO: 5819674 - DNA, 25 bp, Homo sapien
cagatgagcgtctaaccggggtgct

SEQ ID NO: 5819675 - DNA, 25 bp, Homo sapien
tggttcggcttagaacttgaggagt

SEQ ID NO: 5819676 - DNA, 25 bp, Homo sapien
acgactgcggccgctgtgcccgcga

SEQ ID NO: 5819677 - DNA, 25 bp, Homo sapien
aatctcgccgtctgatacttctagt

SEQ ID NO: 5819678 - DNA, 25 bp, Homo sapien
aatctttccacgccctggctccgag

SEQ ID NO: 5819679 - DNA, 25 bp, Homo sapien
cacacacaggggagagcccacggcc

SEQ ID NO: 5819680 - DNA, 25 bp, Homo sapien
catctccttgagctcaggccatcct

SEQ ID NO: 5819681 - DNA, 25 bp, Homo sapien
tgcacgcactggatgccccgctcca

SEQ ID NO: 5819682 - DNA, 25 bp, Homo sapien
ggccgcagcatggcgggtcccattc

SEQ ID NO: 5819683 - DNA, 25 bp, Homo sapien
agtcttattcaattgagaagattct

SEQ ID NO: 5819684 - DNA, 25 bp, Homo sapien
aactttaaaaatagccacttgctat

SEQ ID NO: 5819685 - DNA, 25 bp, Homo sapien
tgagggttgaaaaccactttagggc

SEQ ID NO: 5819686 - DNA, 25 bp, Homo sapien
actacaggcatgcactaccacaccc

SEQ ID NO: 5819687 - DNA, 25 bp, Homo sapien
agaaagtagaatcgctttcctctgg

SEQ ID NO: 5819688 - DNA, 25 bp, Homo sapien
gagctcaggtctatgagctgtccca

SEQ ID NO: 5819689 - DNA, 25 bp, Homo sapien
cagtacttttggagaaagtagaatc

SEQ ID NO: 5819690 - DNA, 25 bp, Homo sapien
tggggatgtgcacgcactggatgcc

SEQ ID NO: 5819691 - DNA, 25 bp, Homo sapien
gcatgattccctgggcaaagcatga

SEQ ID NO: 5819692 - DNA, 25 bp, Homo sapien
gaggagaacccctgtcaggggacac

SEQ ID NO: 5819693 - DNA, 25 bp, Homo sapien
atgagctgtcccaccaccggtgaag

SEQ ID NO: 5819694 - DNA, 25 bp, Homo sapien
cagagtgcggaggccccggcgcccg

SEQ ID NO: 5819695 - DNA, 25 bp, Homo sapien
ggccgctcgaggcagcagcaatttg

SEQ ID NO: 5819696 - DNA, 25 bp, Homo sapien
tgtaaagccagtaagtgagcttctt

SEQ ID NO: 5819697 - DNA, 25 bp, Homo sapien
cggtgaaggtttggccacattttta

SEQ ID NO: 5819698 - DNA, 25 bp, Homo sapien
ggagagcccacggccctgggcatcg

SEQ ID NO: 5819699 - DNA, 25 bp, Homo sapien
gaccctgccaactgacgtgcacgac

SEQ ID NO: 5819700 - DNA, 25 bp, Homo sapien
ggggctggcttgcagcatctggagt

SEQ ID NO: 5819701 - DNA, 25 bp, Homo sapien
ccctgggcaaagcatgagcagagtg

SEQ ID NO: 5819702 - DNA, 25 bp, Homo sapien
tgctctcccttgttggttcagttct

SEQ ID NO: 5819703 - DNA, 25 bp, Homo sapien
agctttggtgttgagctgtccgggg

SEQ ID NO: 5819704 - DNA, 25 bp, Homo sapien
ataacctttgtcttggaatttagac

SEQ ID NO: 5819705 - DNA, 25 bp, Homo sapien
ctggggttgggtgggggatgctgag

SEQ ID NO: 5819706 - DNA, 25 bp, Homo sapien
tggccgccaccttccggagtctggg

SEQ ID NO: 5819707 - DNA, 25 bp, Homo sapien
tgaccaagcgcaactggagttcagc

SEQ ID NO: 5819708 - DNA, 25 bp, Homo sapien
aggcttggcagcttgggctgcctgg

SEQ ID NO: 5819709 - DNA, 25 bp, Homo sapien
cactgcagcctgcatctccttgagc

SEQ ID NO: 5819710 - DNA, 25 bp, Homo sapien
tacaagaagagcctcactaggggct

SEQ ID NO: 5819711 - DNA, 25 bp, Homo sapien
cacgccctggctccgagggtcttca

SEQ ID NO: 5819712 - DNA, 25 bp, Homo sapien
gtgggggatgctgaggggggtgccg

SEQ ID NO: 5819713 - DNA, 25 bp, Homo sapien
tacaagtgtaagccactgcgaccag

SEQ ID NO: 5819714 - DNA, 25 bp, Homo sapien
gctgtgcccgcgaaagctttggtgt

SEQ ID NO: 5819715 - DNA, 25 bp, Homo sapien
caggcatgcactaccacacccggct

SEQ ID NO: 5819716 - DNA, 25 bp, Homo sapien
attttacatacaaaacattcaaaag

SEQ ID NO: 5819717 - DNA, 25 bp, Homo sapien
ggaggacttccttgcgagattgctg

SEQ ID NO: 5819718 - DNA, 25 bp, Homo sapien
cccggcaggctgaaggctcatcgcg

SEQ ID NO: 5819719 - DNA, 25 bp, Homo sapien
gcttggcagcttgggctgcctggtt

SEQ ID NO: 5819720 - DNA, 25 bp, Homo sapien
gcggaggccccggcgcccgggtgag

SEQ ID NO: 5819721 - DNA, 25 bp, Homo sapien
aaagtagaatcgctttcctctggag

SEQ ID NO: 5819722 - DNA, 25 bp, Homo sapien
tagctttgcccactgctggggatgt

SEQ ID NO: 5819723 - DNA, 25 bp, Homo sapien
atagccacttgctattttacataca

SEQ ID NO: 5819724 - DNA, 25 bp, Homo sapien
gcatctggagtgaccgcgagtggtt

SEQ ID NO: 5819725 - DNA, 25 bp, Homo sapien
gagggtggcggcgggaagcagaggc

SEQ ID NO: 5819726 - DNA, 25 bp, Homo sapien
cttgcgagattgctggtagagccgg

SEQ ID NO: 5819727 - DNA, 25 bp, Homo sapien
tgcccccacagggcctgcaggcaga

SEQ ID NO: 5819728 - DNA, 25 bp, Homo sapien
gcgggtgtgggcaaggctgacacac

SEQ ID NO: 5819729 - DNA, 25 bp, Homo sapien
agcaatacatctttctttatgtcca

SEQ ID NO: 5819730 - DNA, 25 bp, Homo sapien
aaagggtccgaagaagacttcatca

SEQ ID NO: 5819731 - DNA, 25 bp, Homo sapien
caagtaatccgcccacctcagcctc

SEQ ID NO: 5819732 - DNA, 25 bp, Homo sapien
gacaggagtttcactatatttccca

SEQ ID NO: 5819733 - DNA, 25 bp, Homo sapien
gaagacttcatcatcttcatttgca

SEQ ID NO: 5819734 - DNA, 25 bp, Homo sapien
gacaggaatctcgccgtctgatact

SEQ ID NO: 5819735 - DNA, 25 bp, Homo sapien
tctttcttgggcttctccgcagccc

SEQ ID NO: 5819736 - DNA, 25 bp, Homo sapien
tcagccccaacttgtttggaacagg

SEQ ID NO: 5819737 - DNA, 25 bp, Homo sapien
gccaagagccgaggctcacccacag

SEQ ID NO: 5819738 - DNA, 25 bp, Homo sapien
tttgacagaggccgggagctatttg

SEQ ID NO: 5819739 - DNA, 25 bp, Homo sapien
acttgcagcatgagcagtgcatgat

SEQ ID NO: 5819740 - DNA, 25 bp, Homo sapien
gaatctgtctttctgttgctctccc

SEQ ID NO: 5819741 - DNA, 25 bp, Homo sapien
tggaaggactagctggaatctcttt

SEQ ID NO: 5819742 - DNA, 25 bp, Homo sapien
tgacagaggccgggagctatttgca

SEQ ID NO: 5819743 - DNA, 25 bp, Homo sapien
tgagtcgctgcctgacttgcagcat

SEQ ID NO: 5819744 - DNA, 25 bp, Homo sapien
gcgggaagcagaggccttgggtggt

SEQ ID NO: 5819745 - DNA, 25 bp, Homo sapien
cgggagctatttgcaggaatacttg

SEQ ID NO: 5819746 - DNA, 25 bp, Homo sapien
cccggtgggattccttctcagctgg

SEQ ID NO: 5819747 - DNA, 25 bp, Homo sapien
tatatttcccaggctggtcccgaac

SEQ ID NO: 5819748 - DNA, 25 bp, Homo sapien
agtagctgggactacaggcatgcac

SEQ ID NO: 5819749 - DNA, 25 bp, Homo sapien
tgccgtgagctgctccgctgccagc

SEQ ID NO: 5819750 - DNA, 25 bp, Homo sapien
atttaattccaagctggcagcaata

SEQ ID NO: 5819751 - DNA, 25 bp, Homo sapien
ggctcagaggaacgtctccgagctg

SEQ ID NO: 5819752 - DNA, 25 bp, Homo sapien
aacctttgtcttggaatttagacag

SEQ ID NO: 5819753 - DNA, 25 bp, Homo sapien
caaacaggccccgaggaggacttcc

SEQ ID NO: 5819754 - DNA, 25 bp, Homo sapien
attccagcccagagaatggcagcga

SEQ ID NO: 5819755 - DNA, 25 bp, Homo sapien
gcgctcagcaggctttgtggtgctg

SEQ ID NO: 5819756 - DNA, 25 bp, Homo sapien
agccacttgctattttacatacaaa

SEQ ID NO: 5819757 - DNA, 25 bp, Homo sapien
gcataacctttgtcttggaatttag

SEQ ID NO: 5819758 - DNA, 25 bp, Homo sapien
ctggtagagccgggtgcttttaaca

SEQ ID NO: 5819759 - DNA, 25 bp, Homo sapien
caggcaaagggactctcagatgtgg

SEQ ID NO: 5819760 - DNA, 25 bp, Homo sapien
cacccggcttggcttcctcccgagc

SEQ ID NO: 5819761 - DNA, 25 bp, Homo sapien
tgtggacagtgaccctgccaactga

SEQ ID NO: 5819762 - DNA, 25 bp, Homo sapien
aagctggcagcaatacatctttctt

SEQ ID NO: 5819763 - DNA, 25 bp, Homo sapien
tgtatgaatctttccacgccctggc

SEQ ID NO: 5819764 - DNA, 25 bp, Homo sapien
cgcttggcctgccaggaggatgccc

SEQ ID NO: 5819765 - DNA, 25 bp, Homo sapien
gcttccggcggccggcacattgaca

SEQ ID NO: 5819766 - DNA, 25 bp, Homo sapien
ctgctctcaatgtgtaaagccagta

SEQ ID NO: 5819767 - DNA, 25 bp, Homo sapien
caggctttgtggtgctggcccagat

SEQ ID NO: 5819768 - DNA, 25 bp, Homo sapien
gtgctgtggacagtgaccctgccaa

SEQ ID NO: 5819769 - DNA, 25 bp, Homo sapien
ctgcaggcagagctggccgcagcat

SEQ ID NO: 5819770 - DNA, 25 bp, Homo sapien
cccacagggcctgcaggcagagctg

SEQ ID NO: 5819771 - DNA, 25 bp, Homo sapien
tctgacaggtagtatgtctcccttt

SEQ ID NO: 5819772 - DNA, 25 bp, Homo sapien
tctccttgtcagcctcagggctcag

SEQ ID NO: 5819773 - DNA, 25 bp, Homo sapien
ggtccgaagaagacttcatcatctt

SEQ ID NO: 5819774 - DNA, 25 bp, Homo sapien
agctacttctgtggcagtacttttg

SEQ ID NO: 5819775 - DNA, 25 bp, Homo sapien
tccaaacaggccccgaggaggactt

SEQ ID NO: 5819776 - DNA, 25 bp, Homo sapien
gtccaaagggtccgaagaagacttc

SEQ ID NO: 5819777 - DNA, 25 bp, Homo sapien
cagcccaccctctccagcactggga

SEQ ID NO: 5819778 - DNA, 25 bp, Homo sapien
tagctgggactacaggcatgcacta

SEQ ID NO: 5819779 - DNA, 25 bp, Homo sapien
cgaagaagacttcatcatcttcatt

SEQ ID NO: 5819780 - DNA, 25 bp, Homo sapien
ctttctttatgtccaaagggtccga

SEQ ID NO: 5819781 - DNA, 25 bp, Homo sapien
tctccgagctggcacacacagggga

SEQ ID NO: 5819782 - DNA, 25 bp, Homo sapien
ccacttcagcctcccaagtagctgg

SEQ ID NO: 5819783 - DNA, 25 bp, Homo sapien
ttattcatgtctggagtgtttgtca

SEQ ID NO: 5819784 - DNA, 25 bp, Homo sapien
tggcgggtcccattctgcctgactt

SEQ ID NO: 5819785 - DNA, 25 bp, Homo sapien
gaatacttgcaaattcacttgattt

SEQ ID NO: 5819786 - DNA, 25 bp, Homo sapien
ttttatgcttcaataagtccattta

SEQ ID NO: 5819787 - DNA, 25 bp, Homo sapien
gacacacgccgtgcgctcagcaggc

SEQ ID NO: 5819788 - DNA, 25 bp, Homo sapien
tctccccggccagagggctccaggc

SEQ ID NO: 5819789 - DNA, 25 bp, Homo sapien
ctggagtgtttgtcatgaggtcgat

SEQ ID NO: 5819790 - DNA, 25 bp, Homo sapien
ccagagcagcgccggctggcgggtg

SEQ ID NO: 5819791 - DNA, 25 bp, Homo sapien
cggctgctgctctcaatgtgtaaag

SEQ ID NO: 5819792 - DNA, 25 bp, Homo sapien
ggcagggccggggaggaggccaaga

SEQ ID NO: 5819793 - DNA, 25 bp, Homo sapien
gccaactgacgtgcacgactgcggc

SEQ ID NO: 5819794 - DNA, 25 bp, Homo sapien
gcctgctttcagatcctacagccac

SEQ ID NO: 5819795 - DNA, 25 bp, Homo sapien
tctccttgagctcaggccatcctcc

SEQ ID NO: 5819796 - DNA, 25 bp, Homo sapien
gccggcacattgacagcacccgggg

SEQ ID NO: 5819797 - DNA, 25 bp, Homo sapien
gggacaggagtttcactatatttcc

SEQ ID NO: 5819798 - DNA, 25 bp, Homo sapien
cttgcagcatctggagtgaccgcga

SEQ ID NO: 5819799 - DNA, 25 bp, Homo sapien
tcaaaagaaaattcttcatttagag

SEQ ID NO: 5819800 - DNA, 25 bp, Homo sapien
gctgcatctccacccggcttggctt

SEQ ID NO: 5819801 - DNA, 25 bp, Homo sapien
gtgaccctgccaactgacgtgcacg

SEQ ID NO: 5819802 - DNA, 25 bp, Homo sapien
gcgggcctgggcaccagagctgggc

SEQ ID NO: 5819803 - DNA, 25 bp, Homo sapien
tggaacagggatcgcccgcttgccc

SEQ ID NO: 5819804 - DNA, 25 bp, Homo sapien
gttgctctcccttgttggttcagtt

SEQ ID NO: 5819805 - DNA, 25 bp, Homo sapien
ccccagggatgcttcttcctctaac

SEQ ID NO: 5819806 - DNA, 25 bp, Homo sapien
aatcacagcccactgcagcctgcat

SEQ ID NO: 5819807 - DNA, 25 bp, Homo sapien
ctaacagaggccgctcgaggcagca

SEQ ID NO: 5819808 - DNA, 25 bp, Homo sapien
gaggaggccaagagccgaggctcac

SEQ ID NO: 5819809 - DNA, 25 bp, Homo sapien
cctctccagcactgggaatatattt

SEQ ID NO: 5819810 - DNA, 25 bp, Homo sapien
aagccagtaagtgagcttctttgta

SEQ ID NO: 5819811 - DNA, 25 bp, Homo sapien
actgacgtgcacgactgcggccgct

SEQ ID NO: 5819812 - DNA, 25 bp, Homo sapien
aggtcaatgaggggctggcttgcag

SEQ ID NO: 5819813 - DNA, 25 bp, Homo sapien
gtggtgctggcccagatgagcgtct

SEQ ID NO: 5819814 - DNA, 25 bp, Homo sapien
ttaagagacgtggggcttttcttca

SEQ ID NO: 5819815 - DNA, 25 bp, Homo sapien
cccccacagggcctgcaggcagagc

SEQ ID NO: 5819816 - DNA, 25 bp, Homo sapien
ttcagcctcccaagtagctgggact

SEQ ID NO: 5819817 - DNA, 25 bp, Homo sapien
ttggcttcctcccgagctacttctg

SEQ ID NO: 5819818 - DNA, 25 bp, Homo sapien
tagggacaggagtttcactatattt

SEQ ID NO: 5819819 - DNA, 25 bp, Homo sapien
ccagggatgcttcttcctctaacag

SEQ ID NO: 5819820 - DNA, 25 bp, Homo sapien
aggcgggcctgggcaccagagctgg

SEQ ID NO: 5819821 - DNA, 25 bp, Homo sapien
acttctagtcttattcaattgagaa

SEQ ID NO: 5819822 - DNA, 25 bp, Homo sapien
tgcccggcaggctgaaggctcatcg

SEQ ID NO: 5819823 - DNA, 25 bp, Homo sapien
gcgccggctggcgggtgtgggcaag

SEQ ID NO: 5819824 - DNA, 25 bp, Homo sapien
ctggagtgaccgcgagtggttccag

SEQ ID NO: 5819825 - DNA, 25 bp, Homo sapien
acttcatcatcttcatttgcactcg

SEQ ID NO: 5819826 - DNA, 25 bp, Homo sapien
cagggcctgcaggcagagctggccg

SEQ ID NO: 5819827 - DNA, 25 bp, Homo sapien
tgggaatatatttatgcttattttt

SEQ ID NO: 5819828 - DNA, 25 bp, Homo sapien
ctccgcagccccagggatgcttctt

SEQ ID NO: 5819829 - DNA, 25 bp, Homo sapien
agcgtctaaccggggtgctgtggac

SEQ ID NO: 5819830 - DNA, 25 bp, Homo sapien
gatatctacaagaagagcctcacta

SEQ ID NO: 5819831 - DNA, 25 bp, Homo sapien
gatgctgaggggggtgccgtgagct

SEQ ID NO: 5819832 - DNA, 25 bp, Homo sapien
cgagctggcacacacaggggagagc

SEQ ID NO: 5819833 - DNA, 25 bp, Homo sapien
atttgcactcgaagaagacaatgaa

SEQ ID NO: 5819834 - DNA, 25 bp, Homo sapien
ttgggtgggggatgctgaggggggt

SEQ ID NO: 5819835 - DNA, 25 bp, Homo sapien
gattccctgggcaaagcatgagcag

SEQ ID NO: 5819836 - DNA, 25 bp, Homo sapien
gcgggtcccattctgcctgacttgc

SEQ ID NO: 5819837 - DNA, 25 bp, Homo sapien
ttgtggtgctggcccagatgagcgt

SEQ ID NO: 5819838 - DNA, 25 bp, Homo sapien
atctgtctttctgttgctctccctt

SEQ ID NO: 5819839 - DNA, 25 bp, Homo sapien
agcgaggagggtggcggcgggaagc

SEQ ID NO: 5819840 - DNA, 25 bp, Homo sapien
gcttttaacagggtcttcttcagcc

SEQ ID NO: 5819841 - DNA, 25 bp, Homo sapien
gcactcgaagaagacaatgaaagat

SEQ ID NO: 5819842 - DNA, 25 bp, Homo sapien
tcccaccaccggtgaaggtttggcc

SEQ ID NO: 5819843 - DNA, 25 bp, Homo sapien
ggatgccccgctccaaacaggcccc

SEQ ID NO: 5819844 - DNA, 25 bp, Homo sapien
aagtgcctgaggcacacgggaagga

SEQ ID NO: 5819845 - DNA, 25 bp, Homo sapien
cgtgtgcttctggggtatcgcagaa

SEQ ID NO: 5819846 - DNA, 25 bp, Homo sapien
agcacccggggcaggtttgtcaggg

SEQ ID NO: 5819847 - DNA, 25 bp, Homo sapien
ctcacccacagggggccccagcaag

SEQ ID NO: 5819848 - DNA, 25 bp, Homo sapien
cttgttggttcagttctcattgcag

SEQ ID NO: 5819849 - DNA, 25 bp, Homo sapien
acagggggccccagcaaggggctgt

SEQ ID NO: 5819850 - DNA, 25 bp, Homo sapien
atctggagtgaccgcgagtggttcc

SEQ ID NO: 5819851 - DNA, 25 bp, Homo sapien
ccttcttagggtcatccatgttcac

SEQ ID NO: 5819852 - DNA, 25 bp, Homo sapien
agaggcctgctttcagatcctacag

SEQ ID NO: 5819853 - DNA, 25 bp, Homo sapien
ctgacacacgccgtgcgctcagcag

SEQ ID NO: 5819854 - DNA, 25 bp, Homo sapien
tgaccgcgagtggttccagtttgat

SEQ ID NO: 5819855 - DNA, 25 bp, Homo sapien
caagacaggttctcacattggtgcc

SEQ ID NO: 5819856 - DNA, 25 bp, Homo sapien
gtgactgaggcttcacattccagcc

SEQ ID NO: 5819857 - DNA, 25 bp, Homo sapien
tttagctttgcccactgctggggat

SEQ ID NO: 5819858 - DNA, 25 bp, Homo sapien
tgtttgacagaggccgggagctatt

SEQ ID NO: 5819859 - DNA, 25 bp, Homo sapien
cgaaagctttggtgttgagctgtcc

SEQ ID NO: 5819860 - DNA, 25 bp, Homo sapien
aaggctgacacacgccgtgcgctca

SEQ ID NO: 5819861 - DNA, 25 bp, Homo sapien
gtcaatgaggggctggcttgcagca

SEQ ID NO: 5819862 - DNA, 25 bp, Homo sapien
ctccgctgccagctcagaaacatcg

SEQ ID NO: 5819863 - DNA, 25 bp, Homo sapien
aacagggtcttcttcagccccaact

SEQ ID NO: 5819864 - DNA, 25 bp, Homo sapien
gaggctgttcgggaaccggattatt

SEQ ID NO: 5819865 - DNA, 25 bp, Homo sapien
gagtgcggaggccccggcgcccggg

SEQ ID NO: 5819866 - DNA, 25 bp, Homo sapien
ccgcccacctcagcctcccaagttc

SEQ ID NO: 5819867 - DNA, 25 bp, Homo sapien
gggagctcaggtctatgagctgtcc

SEQ ID NO: 5819868 - DNA, 25 bp, Homo sapien
tatttcccaggctggtcccgaactc

SEQ ID NO: 5819869 - DNA, 25 bp, Homo sapien
gggactctcagatgtgggcaacgga

SEQ ID NO: 5819870 - DNA, 25 bp, Homo sapien
ttgaggagtggggaatccacgttct

SEQ ID NO: 5819871 - DNA, 25 bp, Homo sapien
ccgcagcatggcgggtcccattctg

SEQ ID NO: 5819872 - DNA, 25 bp, Homo sapien
agcctgcatctccttgagctcaggc

SEQ ID NO: 5819873 - DNA, 25 bp, Homo sapien
ctgtctttctgttgctctcccttgt

SEQ ID NO: 5819874 - DNA, 25 bp, Homo sapien
gaaggaggagaacccctgtcagggg

SEQ ID NO: 5819875 - DNA, 25 bp, Homo sapien
tagacaggaatctcgccgtctgata

SEQ ID NO: 5819876 - DNA, 25 bp, Homo sapien
ttgagctgtccggggagtcaccaat

SEQ ID NO: 5819877 - DNA, 25 bp, Homo sapien
cctcccacttcagcctcccaagtag

SEQ ID NO: 5819878 - DNA, 25 bp, Homo sapien
agcccacggccctgggcatcgtttt

SEQ ID NO: 5819879 - DNA, 25 bp, Homo sapien
agtaatccgcccacctcagcctccc

SEQ ID NO: 5819880 - DNA, 25 bp, Homo sapien
acattggtgcccaggctggagtgca

SEQ ID NO: 5819881 - DNA, 25 bp, Homo sapien
tcatgaggtcgatcagaggcctgct

SEQ ID NO: 5819882 - DNA, 25 bp, Homo sapien
accaagcgcaactggagttcagcca

SEQ ID NO: 5819883 - DNA, 25 bp, Homo sapien
caaagggactctcagatgtgggcaa

SEQ ID NO: 5819884 - DNA, 25 bp, Homo sapien
gatcagaggcctgctttcagatcct

SEQ ID NO: 5819885 - DNA, 25 bp, Homo sapien
ggcatgcactaccacacccggctaa

SEQ ID NO: 5819886 - DNA, 25 bp, Homo sapien
aagagacgtggggcttttcttcatt

SEQ ID NO: 5819887 - DNA, 25 bp, Homo sapien
gcaggctgaaggctcatcgcggccg

SEQ ID NO: 5819888 - DNA, 25 bp, Homo sapien
gagacgtggggcttttcttcatttc

SEQ ID NO: 5819889 - DNA, 25 bp, Homo sapien
tgtgcttctggggtatcgcagaagt

SEQ ID NO: 5819890 - DNA, 25 bp, Homo sapien
aaggcaaaggatttggttcggctta

SEQ ID NO: 5819891 - DNA, 25 bp, Homo sapien
cccaagtggcttccggcggccggca

SEQ ID NO: 5819892 - DNA, 25 bp, Homo sapien
cttgtcagcctcagggctcagctgg

SEQ ID NO: 5819893 - DNA, 25 bp, Homo sapien
gttgaaaaccactttagggctgttc

SEQ ID NO: 5819894 - DNA, 25 bp, Homo sapien
aacagaggccgctcgaggcagcagc

SEQ ID NO: 5819895 - DNA, 25 bp, Homo sapien
tcttccttcttagggtcatccatgt

SEQ ID NO: 5819896 - DNA, 25 bp, Homo sapien
cttccttgcgagattgctggtagag

SEQ ID NO: 5819897 - DNA, 25 bp, Homo sapien
agaggaaggtcaatgaggggctggc

SEQ ID NO: 5819898 - DNA, 25 bp, Homo sapien
gcaccagagctgggcagggccgggg

SEQ ID NO: 5819899 - DNA, 25 bp, Homo sapien
tagaacttgaggagtggggaatcca

SEQ ID NO: 5819900 - DNA, 25 bp, Homo sapien
caggccatcctcccacttcagcctc

SEQ ID NO: 5819901 - DNA, 25 bp, Homo sapien
aggttctcacattggtgcccaggct

SEQ ID NO: 5819902 - DNA, 25 bp, Homo sapien
ttttcatcggccaaaagaagaatgt

SEQ ID NO: 5819903 - DNA, 25 bp, Homo sapien
ctcaagtaatccgcccacctcagcc

SEQ ID NO: 5819904 - DNA, 25 bp, Homo sapien
tcacagcccactgcagcctgcatct

SEQ ID NO: 5819905 - DNA, 25 bp, Homo sapien
attgctggtagagccgggtgctttt

SEQ ID NO: 5819906 - DNA, 25 bp, Homo sapien
aaacattcaaaagaaaattcttcat

SEQ ID NO: 5819907 - DNA, 25 bp, Homo sapien
cacggccctgggcatcgttttgggg

SEQ ID NO: 5819908 - DNA, 25 bp, Homo sapien
aacgtctccgagctggcacacacag

SEQ ID NO: 5819909 - DNA, 25 bp, Homo sapien
ggggctcagaggaacgtctccgagc

SEQ ID NO: 5819910 - DNA, 25 bp, Homo sapien
catcggccaaaagaagaatgtcttc

SEQ ID NO: 5819911 - DNA, 25 bp, Homo sapien
tcattgcagagttcttgcggggctc

SEQ ID NO: 5819912 - DNA, 25 bp, Homo sapien
tcaggcttggcagcttgggctgcct

SEQ ID NO: 5819913 - DNA, 25 bp, Homo sapien
ggtcatcggtggaaggccagagcag

SEQ ID NO: 5819914 - DNA, 25 bp, Homo sapien
tgcctggttccggctgctgctctca

SEQ ID NO: 5819915 - DNA, 25 bp, Homo sapien
tttcactatatttcccaggctggtc

SEQ ID NO: 5819916 - DNA, 25 bp, Homo sapien
ggcggccggcacattgacagcaccc

SEQ ID NO: 5819917 - DNA, 25 bp, Homo sapien
gctattttacatacaaaacattcaa

SEQ ID NO: 5819918 - DNA, 25 bp, Homo sapien
attgacagcacccggggcaggtttg

SEQ ID NO: 5819919 - DNA, 25 bp, Homo sapien
agcagcgccggctggcgggtgtggg

SEQ ID NO: 5819920 - DNA, 25 bp, Homo sapien
agcatggcgggtcccattctgcctg

SEQ ID NO: 5819921 - DNA, 25 bp, Homo sapien
gctcaggtctatgagctgtcccacc

SEQ ID NO: 5819922 - DNA, 25 bp, Homo sapien
tctggagaaaagttaagtgcctgag

SEQ ID NO: 5819923 - DNA, 25 bp, Homo sapien
cccgggtgaggcgggcctgggcacc

SEQ ID NO: 5819924 - DNA, 25 bp, Homo sapien
ggaatctctttcttgggcttctccg

SEQ ID NO: 5819925 - DNA, 25 bp, Homo sapien
taaccggggtgctgtggacagtgac

SEQ ID NO: 5819926 - DNA, 25 bp, Homo sapien
tcttcatttagagtgactgaggctt

SEQ ID NO: 5819927 - DNA, 25 bp, Homo sapien
ttgcactcgaagaagacaatgaaag

SEQ ID NO: 5819928 - DNA, 25 bp, Homo sapien
gcctcccaagttctagggttacaag

SEQ ID NO: 5819929 - DNA, 25 bp, Homo sapien
tgtcatgaggtcgatcagaggcctg

SEQ ID NO: 5819930 - DNA, 25 bp, Homo sapien
gtgcgctcagcaggctttgtggtgc

SEQ ID NO: 5819931 - DNA, 25 bp, Homo sapien
aggaatacttgcaaattcacttgat

SEQ ID NO: 5819932 - DNA, 25 bp, Homo sapien
tacaaaacattcaaaagaaaattct

SEQ ID NO: 5819933 - DNA, 25 bp, Homo sapien
caaaggatttggttcggcttagaac

SEQ ID NO: 5819934 - DNA, 25 bp, Homo sapien
agagaatggcagcgaggagggtggc

SEQ ID NO: 5819935 - DNA, 25 bp, Homo sapien
agggtccgaagaagacttcatcatc

SEQ ID NO: 5819936 - DNA, 25 bp, Homo sapien
ggagtggggaatccacgttctcctt

SEQ ID NO: 5819937 - DNA, 25 bp, Homo sapien
tcctcccgagctacttctgtggcag

SEQ ID NO: 5819938 - DNA, 25 bp, Homo sapien
gagctgtcccaccaccggtgaaggt

SEQ ID NO: 5819939 - DNA, 25 bp, Homo sapien
gatgtgggcaacggaggctgttcgg

SEQ ID NO: 5819940 - DNA, 25 bp, Homo sapien
ctttgtggtgctggcccagatgagc

SEQ ID NO: 5819941 - DNA, 25 bp, Homo sapien
ttgctattttacatacaaaacattc

SEQ ID NO: 5819942 - DNA, 25 bp, Homo sapien
caatgaaagatcgaagtcaaatttt

SEQ ID NO: 5819943 - DNA, 25 bp, Homo sapien
cacacgccgtgcgctcagcaggctt

SEQ ID NO: 5819944 - DNA, 25 bp, Homo sapien
gccgggagctatttgcaggaatact

SEQ ID NO: 5819945 - DNA, 25 bp, Homo sapien
cactaccacacccggctaatttttg

SEQ ID NO: 5819946 - DNA, 25 bp, Homo sapien
ccgggcttcctctgagtcgctgcct

SEQ ID NO: 5819947 - DNA, 25 bp, Homo sapien
cacgtgtgcttctggggtatcgcag

SEQ ID NO: 5819948 - DNA, 25 bp, Homo sapien
cccctgtcaggggacacatccacca

SEQ ID NO: 5819949 - DNA, 25 bp, Homo sapien
ctctcccttgttggttcagttctca

SEQ ID NO: 5819950 - DNA, 25 bp, Homo sapien
aattccaagctggcagcaatacatc

SEQ ID NO: 5819951 - DNA, 25 bp, Homo sapien
catggcgggtcccattctgcctgac

SEQ ID NO: 5819952 - DNA, 25 bp, Homo sapien
aagaagacttcatcatcttcatttg

SEQ ID NO: 5819953 - DNA, 25 bp, Homo sapien
tcaccaatagaaaacttaggaattt

SEQ ID NO: 5819954 - DNA, 25 bp, Homo sapien
ggggtcatcggtggaaggccagagc

SEQ ID NO: 5819955 - DNA, 25 bp, Homo sapien
agctggaatctctttcttgggcttc

SEQ ID NO: 5819956 - DNA, 25 bp, Homo sapien
tatgtctcccttttaagagacgtgg

SEQ ID NO: 5819957 - DNA, 25 bp, Homo sapien
acagcccactgcagcctgcatctcc

SEQ ID NO: 5819958 - DNA, 25 bp, Homo sapien
ttctccgcagccccagggatgcttc

SEQ ID NO: 5819959 - DNA, 25 bp, Homo sapien
tcaatgtgtaaagccagtaagtgag

SEQ ID NO: 5819960 - DNA, 25 bp, Homo sapien
aacttctccccggccagagggctcc

SEQ ID NO: 5819961 - DNA, 25 bp, Homo sapien
tagagccgggtgcttttaacagggt

SEQ ID NO: 5819962 - DNA, 25 bp, Homo sapien
cactggatgccccgctccaaacagg

SEQ ID NO: 5819963 - DNA, 25 bp, Homo sapien
tttagagtgactgaggcttcacatt

SEQ ID NO: 5819964 - DNA, 25 bp, Homo sapien
acttcagcctcccaagtagctggga

SEQ ID NO: 5819965 - DNA, 25 bp, Homo sapien
tggttccagtttgatatctacaaga

SEQ ID NO: 5819966 - DNA, 25 bp, Homo sapien
atgattccctgggcaaagcatgagc

SEQ ID NO: 5819967 - DNA, 25 bp, Homo sapien
gagcctcactaggggctgcatctcc

SEQ ID NO: 5819968 - DNA, 25 bp, Homo sapien
ctctcagatgtgggcaacggaggct

SEQ ID NO: 5819969 - DNA, 25 bp, Homo sapien
gtctttctgttgctctcccttgttg

SEQ ID NO: 5819970 - DNA, 25 bp, Homo sapien
gggctgcatctccacccggcttggc

SEQ ID NO: 5819971 - DNA, 25 bp, Homo sapien
tttttttttccaagacaggttctca

SEQ ID NO: 5819972 - DNA, 25 bp, Homo sapien
tcagaggggagctcaggtctatgag

SEQ ID NO: 5819973 - DNA, 25 bp, Homo sapien
tgaaaaccactttagggctgttctt

SEQ ID NO: 5819974 - DNA, 25 bp, Homo sapien
accactttagggctgttctttcaag

SEQ ID NO: 5819975 - DNA, 25 bp, Homo sapien
ctaggggctgcatctccacccggct

SEQ ID NO: 5819976 - DNA, 25 bp, Homo sapien
cccagatgagcgtctaaccggggtg

SEQ ID NO: 5819977 - DNA, 25 bp, Homo sapien
aggccgggagctatttgcaggaata

SEQ ID NO: 5819978 - DNA, 25 bp, Homo sapien
aattgagaagattctgaccaagcgc

SEQ ID NO: 5819979 - DNA, 25 bp, Homo sapien
ggttgggtgggggatgctgaggggg

SEQ ID NO: 5819980 - DNA, 25 bp, Homo sapien
tgtcccaccaccggtgaaggtttgg

SEQ ID NO: 5819981 - DNA, 25 bp, Homo sapien
tttctgagggttgaaaaccacttta

SEQ ID NO: 5819982 - DNA, 25 bp, Homo sapien
gaggtcgatcagaggcctgctttca

SEQ ID NO: 5819983 - DNA, 25 bp, Homo sapien
ggcaaagggactctcagatgtgggc

SEQ ID NO: 5819984 - DNA, 25 bp, Homo sapien
cagcagcaatttggtcccgggcttc

SEQ ID NO: 5819985 - DNA, 25 bp, Homo sapien
tagggttacaagtgtaagccactgc

SEQ ID NO: 5819986 - DNA, 25 bp, Homo sapien
gggcaggtttgtcagggagaacatc

SEQ ID NO: 5819987 - DNA, 25 bp, Homo sapien
ccctggcccaagtggcttccggcgg

SEQ ID NO: 5819988 - DNA, 25 bp, Homo sapien
tgttgagctgtccggggagtcacca

SEQ ID NO: 5819989 - DNA, 25 bp, Homo sapien
ctcagaaacatcgacccgcttggcc

SEQ ID NO: 5819990 - DNA, 25 bp, Homo sapien
agtttcactatatttcccaggctgg

SEQ ID NO: 5819991 - DNA, 25 bp, Homo sapien
gcagcatggcgggtcccattctgcc

SEQ ID NO: 5819992 - DNA, 25 bp, Homo sapien
aggcataacctttgtcttggaattt

SEQ ID NO: 5819993 - DNA, 25 bp, Homo sapien
cggtgggattccttctcagctggga

SEQ ID NO: 5819994 - DNA, 25 bp, Homo sapien
ggatgcttcttcctctaacagaggc

SEQ ID NO: 5819995 - DNA, 25 bp, Homo sapien
ctggcccagatgagcgtctaaccgg

SEQ ID NO: 5819996 - DNA, 25 bp, Homo sapien
tccacccggcttggcttcctcccga

SEQ ID NO: 5819997 - DNA, 25 bp, Homo sapien
gagtgcagtggcacaatcacagccc

SEQ ID NO: 5819998 - DNA, 25 bp, Homo sapien
caagcgcaactggagttcagccact

SEQ ID NO: 5819999 - DNA, 25 bp, Homo sapien
tggcagcgaggagggtggcggcggg

SEQ ID NO: 5820000 - DNA, 25 bp, Homo sapien
cagccacgtgtgcttctggggtatc

SEQ ID NO: 5820001 - DNA, 25 bp, Homo sapien
tcgatgagaggaaggtcaatgaggg

SEQ ID NO: 5820002 - DNA, 25 bp, Homo sapien
ggactacaggcatgcactaccacac

SEQ ID NO: 5820003 - DNA, 25 bp, Homo sapien
ctttcctctggagaaaagttaagtg

SEQ ID NO: 5820004 - DNA, 25 bp, Homo sapien
aacatcgacccgcttggcctgccag

SEQ ID NO: 5820005 - DNA, 25 bp, Homo sapien
atacatctttctttatgtccaaagg

SEQ ID NO: 5820006 - DNA, 25 bp, Homo sapien
ttgggtggtccgtgctggccccagt

SEQ ID NO: 5820007 - DNA, 25 bp, Homo sapien
agcttgtttctgagggttgaaaacc

SEQ ID NO: 5820008 - DNA, 25 bp, Homo sapien
gtccctcagcccaccctctccagca

SEQ ID NO: 5820009 - DNA, 25 bp, Homo sapien
aaagcatgagcagagtgcggaggcc

SEQ ID NO: 5820010 - DNA, 25 bp, Homo sapien
ttattcaattgagaagattctgacc

SEQ ID NO: 5820011 - DNA, 25 bp, Homo sapien
ctggatgccccgctccaaacaggcc

SEQ ID NO: 5820012 - DNA, 25 bp, Homo sapien
gacagtgaccctgccaactgacgtg

SEQ ID NO: 5820013 - DNA, 25 bp, Homo sapien
gagctgctccgctgccagctcagaa

SEQ ID NO: 5820014 - DNA, 25 bp, Homo sapien
gctggggatgtgcacgcactggatg

SEQ ID NO: 5820015 - DNA, 25 bp, Homo sapien
accgcgagtggttccagtttgatat

SEQ ID NO: 5820016 - DNA, 25 bp, Homo sapien
cgggtgaggcgggcctgggcaccag

SEQ ID NO: 5820017 - DNA, 25 bp, Homo sapien
aagacaatgaaagatcgaagtcaaa

SEQ ID NO: 5820018 - DNA, 25 bp, Homo sapien
ttggagaaagtagaatcgctttcct

SEQ ID NO: 5820019 - DNA, 25 bp, Homo sapien
ggaggccaagagccgaggctcaccc

SEQ ID NO: 5820020 - DNA, 25 bp, Homo sapien
agggctcagctggatcagaggggag

SEQ ID NO: 5820021 - DNA, 25 bp, Homo sapien
tgacagcacccggggcaggtttgtc

SEQ ID NO: 5820022 - DNA, 25 bp, Homo sapien
ctggaatctctttcttgggcttctc

SEQ ID NO: 5820023 - DNA, 25 bp, Homo sapien
aggggacacatccaccagcctggaa

SEQ ID NO: 5820024 - DNA, 25 bp, Homo sapien
agtggttccagtttgatatctacaa

SEQ ID NO: 5820025 - DNA, 25 bp, Homo sapien
ctagctggaatctctttcttgggct

SEQ ID NO: 5820026 - DNA, 25 bp, Homo sapien
cccgcttgccctggcccaagtggct

SEQ ID NO: 5820027 - DNA, 25 bp, Homo sapien
ttaactttaaaaatagccacttgct

SEQ ID NO: 5820028 - DNA, 25 bp, Homo sapien
ggatttttgtcctggaaggactagc

SEQ ID NO: 5820029 - DNA, 25 bp, Homo sapien
gcggccgctgtgcccgcgaaagctt

SEQ ID NO: 5820030 - DNA, 25 bp, Homo sapien
tcctctaacagaggccgctcgaggc

SEQ ID NO: 5820031 - DNA, 25 bp, Homo sapien
tgtcttccttcttagggtcatccat

SEQ ID NO: 5820032 - DNA, 25 bp, Homo sapien
acatctttctttatgtccaaagggt

SEQ ID NO: 5820033 - DNA, 25 bp, Homo sapien
gggttacaagtgtaagccactgcga

SEQ ID NO: 5820034 - DNA, 25 bp, Homo sapien
gggtcttcttcagccccaacttgtt

SEQ ID NO: 5820035 - DNA, 25 bp, Homo sapien
cggccagagggctccaggcaaaggg

SEQ ID NO: 5820036 - DNA, 25 bp, Homo sapien
ggcttagaacttgaggagtggggaa

SEQ ID NO: 5820037 - DNA, 25 bp, Homo sapien
ggatcgcccgcttgccctggcccaa

SEQ ID NO: 5820038 - DNA, 25 bp, Homo sapien
gctgtctgacaggtagtatgtctcc

SEQ ID NO: 5820039 - DNA, 25 bp, Homo sapien
agccactgcgaccagcctaaagctt

SEQ ID NO: 5820040 - DNA, 25 bp, Homo sapien
aggaaggtcaatgaggggctggctt

SEQ ID NO: 5820041 - DNA, 25 bp, Homo sapien
gtttgtcagggagaacatcccggtg

SEQ ID NO: 5820042 - DNA, 25 bp, Homo sapien
gaacttgaggagtggggaatccacg

SEQ ID NO: 5820043 - DNA, 25 bp, Homo sapien
ctcagctgggatttttgtcctggaa

SEQ ID NO: 5820044 - DNA, 25 bp, Homo sapien
ttttaattttgactcctgtatgaat

SEQ ID NO: 5820045 - DNA, 25 bp, Homo sapien
ccagcctggaatctgtctttctgtt

SEQ ID NO: 5820046 - DNA, 25 bp, Homo sapien
tctctttcttgggcttctccgcagc

SEQ ID NO: 5820047 - DNA, 25 bp, Homo sapien
aggggctgtctgacaggtagtatgt

SEQ ID NO: 5820048 - DNA, 25 bp, Homo sapien
caaggggctgtctgacaggtagtat

SEQ ID NO: 5820049 - DNA, 25 bp, Homo sapien
ggcttcacattccagcccagagaat

SEQ ID NO: 5820050 - DNA, 25 bp, Homo sapien
gccacgtgtgcttctggggtatcgc

SEQ ID NO: 5820051 - DNA, 25 bp, Homo sapien
agggggccccagcaaggggctgtct

SEQ ID NO: 5820052 - DNA, 25 bp, Homo sapien
agtggggaatccacgttctccttgt

SEQ ID NO: 5820053 - DNA, 25 bp, Homo sapien
ggccagagcagcgccggctggcggg

SEQ ID NO: 5820054 - DNA, 25 bp, Homo sapien
acttgcaaattcacttgatttagct

SEQ ID NO: 5820055 - DNA, 25 bp, Homo sapien
tgcactaccacacccggctaatttt

SEQ ID NO: 5820056 - DNA, 25 bp, Homo sapien
ttagggctgttctttcaaggcaaag

SEQ ID NO: 5820057 - DNA, 25 bp, Homo sapien
cagtgaccctgccaactgacgtgca

SEQ ID NO: 5820058 - DNA, 25 bp, Homo sapien
cagatgtgggcaacggaggctgttc

SEQ ID NO: 5820059 - DNA, 25 bp, Homo sapien
cccaagtagctgggactacaggcat

SEQ ID NO: 5820060 - DNA, 25 bp, Homo sapien
tccttgagctcaggccatcctccca

SEQ ID NO: 5820061 - DNA, 25 bp, Homo sapien
attcaattgagaagattctgaccaa

SEQ ID NO: 5820062 - DNA, 25 bp, Homo sapien
tgaatctttccacgccctggctccg

SEQ ID NO: 5820063 - DNA, 25 bp, Homo sapien
agtgtaagccactgcgaccagccta

SEQ ID NO: 5820064 - DNA, 25 bp, Homo sapien
ggagaacccctgtcaggggacacat

SEQ ID NO: 5820065 - DNA, 25 bp, Homo sapien
tctgagtcgctgcctgacttgcagc

SEQ ID NO: 5820066 - DNA, 25 bp, Homo sapien
agtgtttgtcatgaggtcgatcaga

SEQ ID NO: 5820067 - DNA, 25 bp, Homo sapien
gtttggccacatttttattcatgtc

SEQ ID NO: 5820068 - DNA, 25 bp, Homo sapien
gagttcagccactggccgccacctt

SEQ ID NO: 5820069 - DNA, 25 bp, Homo sapien
catcgttttgggggtcatcggtgga

SEQ ID NO: 5820070 - DNA, 25 bp, Homo sapien
tcagaggcctgctttcagatcctac

SEQ ID NO: 5820071 - DNA, 25 bp, Homo sapien
agctcaggccatcctcccacttcag

SEQ ID NO: 5820072 - DNA, 25 bp, Homo sapien
tgagaggaaggtcaatgaggggctg

SEQ ID NO: 5820073 - DNA, 25 bp, Homo sapien
gacgtggggcttttcttcatttcct

SEQ ID NO: 5820074 - DNA, 25 bp, Homo sapien
cgctttcctctggagaaaagttaag

SEQ ID NO: 5820075 - DNA, 25 bp, Homo sapien
atccacgttctccttgtcagcctca

SEQ ID NO: 5820076 - DNA, 25 bp, Homo sapien
cccgagctacttctgtggcagtact

SEQ ID NO: 5820077 - DNA, 25 bp, Homo sapien
aatttaatgtaaatctagaatatct

SEQ ID NO: 5820078 - DNA, 25 bp, Homo sapien
acatcccggtgggattccttctcag

SEQ ID NO: 5820079 - DNA, 25 bp, Homo sapien
caggccccgaggaggacttccttgc

SEQ ID NO: 5820080 - DNA, 25 bp, Homo sapien
aggaggagaacccctgtcaggggac

SEQ ID NO: 5820081 - DNA, 25 bp, Homo sapien
tgcagagttcttgcggggctcagag

SEQ ID NO: 5820082 - DNA, 25 bp, Homo sapien
cgaggagggtggcggcgggaagcag

SEQ ID NO: 5820083 - DNA, 25 bp, Homo sapien
aagtgagcttctttgtacacctcca

SEQ ID NO: 5820084 - DNA, 25 bp, Homo sapien
gcagcgaggagggtggcggcgggaa

SEQ ID NO: 5820085 - DNA, 25 bp, Homo sapien
tgggcttctccgcagccccagggat

SEQ ID NO: 5820086 - DNA, 25 bp, Homo sapien
tgtttctgagggttgaaaaccactt

SEQ ID NO: 5820087 - DNA, 25 bp, Homo sapien
acacctccacgaacttctccccggc

SEQ ID NO: 5820088 - DNA, 25 bp, Homo sapien
cccggccagagggctccaggcaaag

SEQ ID NO: 5820089 - DNA, 25 bp, Homo sapien
aacccctgtcaggggacacatccac

SEQ ID NO: 5820090 - DNA, 25 bp, Homo sapien
cgccgtgcgctcagcaggctttgtg

SEQ ID NO: 5820091 - DNA, 25 bp, Homo sapien
tcgctgcctgacttgcagcatgagc

SEQ ID NO: 5820092 - DNA, 25 bp, Homo sapien
cagcttgggctgcctggttccggct

SEQ ID NO: 5820093 - DNA, 25 bp, Homo sapien
gaaagatcgaagtcaaatttttcat

SEQ ID NO: 5820094 - DNA, 25 bp, Homo sapien
tgaggcgggcctgggcaccagagct

SEQ ID NO: 5820095 - DNA, 25 bp, Homo sapien
ttgtcctggaaggactagctggaat

SEQ ID NO: 5820096 - DNA, 25 bp, Homo sapien
caggaggatgcccccacagggcctg

SEQ ID NO: 5820097 - DNA, 25 bp, Homo sapien
actggccgccaccttccggagtctg

SEQ ID NO: 5820098 - DNA, 25 bp, Homo sapien
gctgggactacaggcatgcactacc

SEQ ID NO: 5820099 - DNA, 25 bp, Homo sapien
agatcctacagccacgtgtgcttct

SEQ ID NO: 5820100 - DNA, 25 bp, Homo sapien
ttaattccaagctggcagcaataca

SEQ ID NO: 5820101 - DNA, 25 bp, Homo sapien
ctccgagggtcttcaggcttggcag

SEQ ID NO: 5820102 - DNA, 25 bp, Homo sapien
ctgacttgctgatgtttgacagagg

SEQ ID NO: 5820103 - DNA, 25 bp, Homo sapien
acattcaaaagaaaattcttcattt

SEQ ID NO: 5820104 - DNA, 25 bp, Homo sapien
ggtccgtgctggccccagtccctca

SEQ ID NO: 5820105 - DNA, 25 bp, Homo sapien
ggcatcgttttgggggtcatcggtg

SEQ ID NO: 5820106 - DNA, 25 bp, Homo sapien
cttgagctcaggccatcctcccact

SEQ ID NO: 5820107 - DNA, 25 bp, Homo sapien
gagaagattctgaccaagcgcaact

SEQ ID NO: 5820108 - DNA, 25 bp, Homo sapien
cagcgccggctggcgggtgtgggca

SEQ ID NO: 5820109 - DNA, 25 bp, Homo sapien
ggaaggccagagcagcgccggctgg

SEQ ID NO: 5820110 - DNA, 25 bp, Homo sapien
catgcactaccacacccggctaatt

SEQ ID NO: 5820111 - DNA, 25 bp, Homo sapien
ttctcagctgggatttttgtcctgg

SEQ ID NO: 5820112 - DNA, 25 bp, Homo sapien
ggccccgaggaggacttccttgcga

SEQ ID NO: 5820113 - DNA, 25 bp, Homo sapien
agtcgctgcctgacttgcagcatga

SEQ ID NO: 5820114 - DNA, 25 bp, Homo sapien
caccagcctggaatctgtctttctg

SEQ ID NO: 5820115 - DNA, 25 bp, Homo sapien
gctgctccgctgccagctcagaaac

SEQ ID NO: 5820116 - DNA, 25 bp, Homo sapien
gaacatcccggtgggattccttctc

SEQ ID NO: 5820117 - DNA, 25 bp, Homo sapien
tgccctggcccaagtggcttccggc

SEQ ID NO: 5820118 - DNA, 25 bp, Homo sapien
cccctgcccggcaggctgaaggctc

SEQ ID NO: 5820119 - DNA, 25 bp, Homo sapien
aggggagctcaggtctatgagctgt

SEQ ID NO: 5820120 - DNA, 25 bp, Homo sapien
ctggcacacacaggggagagcccac

SEQ ID NO: 5820121 - DNA, 25 bp, Homo sapien
ttctgttgctctcccttgttggttc

SEQ ID NO: 5820122 - DNA, 25 bp, Homo sapien
cgtctaaccggggtgctgtggacag

SEQ ID NO: 5820123 - DNA, 25 bp, Homo sapien
tagggtcatccatgttcacgtcccc

SEQ ID NO: 5820124 - DNA, 25 bp, Homo sapien
tttaatgtaaatctagaatatctaa

SEQ ID NO: 5820125 - DNA, 25 bp, Homo sapien
gctgccagctcagaaacatcgaccc

SEQ ID NO: 5820126 - DNA, 25 bp, Homo sapien
ttccaagctggcagcaatacatctt

SEQ ID NO: 5820127 - DNA, 25 bp, Homo sapien
cccgcttggcctgccaggaggatgc

SEQ ID NO: 5820128 - DNA, 25 bp, Homo sapien
cctttgtcttggaatttagacagga

SEQ ID NO: 5820129 - DNA, 25 bp, Homo sapien
gctgctgctctcaatgtgtaaagcc

SEQ ID NO: 5820130 - DNA, 25 bp, Homo sapien
gcttctccgcagccccagggatgct

SEQ ID NO: 5820131 - DNA, 25 bp, Homo sapien
gccggctggcgggtgtgggcaaggc

SEQ ID NO: 5820132 - DNA, 25 bp, Homo sapien
aaagttaagtgcctgaggcacacgg

SEQ ID NO: 5820133 - DNA, 25 bp, Homo sapien
tgagctcaggccatcctcccacttc

SEQ ID NO: 5820134 - DNA, 25 bp, Homo sapien
gacccgcttggcctgccaggaggat

SEQ ID NO: 5820135 - DNA, 25 bp, Homo sapien
gctgggcagggccggggaggaggcc

SEQ ID NO: 5820136 - DNA, 25 bp, Homo sapien
ctatgagctgtcccaccaccggtga

SEQ ID NO: 5820137 - DNA, 25 bp, Homo sapien
cagaaacatcgacccgcttggcctg

SEQ ID NO: 5820138 - DNA, 25 bp, Homo sapien
agagccgaggctcacccacaggggg

SEQ ID NO: 5820139 - DNA, 25 bp, Homo sapien
ccctggctccgagggtcttcaggct

SEQ ID NO: 5820140 - DNA, 25 bp, Homo sapien
atgccccgctccaaacaggccccga

SEQ ID NO: 5820141 - DNA, 25 bp, Homo sapien
acattccagcccagagaatggcagc

SEQ ID NO: 5820142 - DNA, 25 bp, Homo sapien
aggcagagctggccgcagcatggcg

SEQ ID NO: 5820143 - DNA, 25 bp, Homo sapien
ccgctccaaacaggccccgaggagg

SEQ ID NO: 5820144 - DNA, 25 bp, Homo sapien
ctcactaggggctgcatctccaccc

SEQ ID NO: 5820145 - DNA, 25 bp, Homo sapien
ttccctgggcaaagcatgagcagag

SEQ ID NO: 5820146 - DNA, 25 bp, Homo sapien
agcagtgcatgattccctgggcaaa

SEQ ID NO: 5820147 - DNA, 25 bp, Homo sapien
gctcgaggcagcagcaatttggtcc

SEQ ID NO: 5820148 - DNA, 25 bp, Homo sapien
cgcactggatgccccgctccaaaca

SEQ ID NO: 5820149 - DNA, 25 bp, Homo sapien
gccagtaagtgagcttctttgtaca

SEQ ID NO: 5820150 - DNA, 25 bp, Homo sapien
gtgaaggtttggccacatttttatt

SEQ ID NO: 5820151 - DNA, 25 bp, Homo sapien
accaccggtgaaggtttggccacat

SEQ ID NO: 5820152 - DNA, 25 bp, Homo sapien
cctcagggctcagctggatcagagg

SEQ ID NO: 5820153 - DNA, 25 bp, Homo sapien
gtcctggaaggactagctggaatct

SEQ ID NO: 5820154 - DNA, 25 bp, Homo sapien
tcacttgatttagctttgcccactg

SEQ ID NO: 5820155 - DNA, 25 bp, Homo sapien
atcctcccacttcagcctcccaagt

SEQ ID NO: 5820156 - DNA, 25 bp, Homo sapien
atcgctttcctctggagaaaagtta

SEQ ID NO: 5820157 - DNA, 25 bp, Homo sapien
ggcacacacaggggagagcccacgg

SEQ ID NO: 5820158 - DNA, 25 bp, Homo sapien
ggggggtgccgtgagctgctccgct

SEQ ID NO: 5820159 - DNA, 25 bp, Homo sapien
gcctcccaagtagctgggactacag

SEQ ID NO: 5820160 - DNA, 25 bp, Homo sapien
agccgaggctcacccacagggggcc

SEQ ID NO: 5820161 - DNA, 25 bp, Homo sapien
cagttctcattgcagagttcttgcg

SEQ ID NO: 5820162 - DNA, 25 bp, Homo sapien
ggggtgccgtgagctgctccgctgc

SEQ ID NO: 5820163 - DNA, 25 bp, Homo sapien
atccgcccacctcagcctcccaagt

SEQ ID NO: 5820164 - DNA, 25 bp, Homo sapien
tgttcacgtcccctgcccggcaggc

SEQ ID NO: 5820165 - DNA, 25 bp, Homo sapien
cttcacattccagcccagagaatgg

SEQ ID NO: 5820166 - DNA, 25 bp, Homo sapien
agggctgttctttcaaggcaaagga

SEQ ID NO: 5820167 - DNA, 25 bp, Homo sapien
gctctcaatgtgtaaagccagtaag

SEQ ID NO: 5820168 - DNA, 25 bp, Homo sapien
gcccaccctctccagcactgggaat

SEQ ID NO: 5820169 - DNA, 25 bp, Homo sapien
gaaggactagctggaatctctttct

SEQ ID NO: 5820170 - DNA, 25 bp, Homo sapien
ctcaggccatcctcccacttcagcc

SEQ ID NO: 5820171 - DNA, 25 bp, Homo sapien
ttaaattgatttgtaggagtaggca

SEQ ID NO: 5820172 - DNA, 25 bp, Homo sapien
aagagcctcactaggggctgcatct

SEQ ID NO: 5820173 - DNA, 25 bp, Homo sapien
gaggggggtgccgtgagctgctccg

SEQ ID NO: 5820174 - DNA, 25 bp, Homo sapien
ccatcctcccacttcagcctcccaa

SEQ ID NO: 5820175 - DNA, 25 bp, Homo sapien
tttacatacaaaacattcaaaagaa

SEQ ID NO: 5820176 - DNA, 25 bp, Homo sapien
gtgcacgactgcggccgctgtgccc

SEQ ID NO: 5820177 - DNA, 25 bp, Homo sapien
cctgacttgcagcatgagcagtgca

SEQ ID NO: 5820178 - DNA, 25 bp, Homo sapien
agcaggctttgtggtgctggcccag

SEQ ID NO: 5820179 - DNA, 25 bp, Homo sapien
gattatttaattccaagctggcagc

SEQ ID NO: 5820180 - DNA, 25 bp, Homo sapien
acttgatttagctttgcccactgct

SEQ ID NO: 5820181 - DNA, 25 bp, Homo sapien
aggcctgctttcagatcctacagcc

SEQ ID NO: 5820182 - DNA, 25 bp, Homo sapien
taatccgcccacctcagcctcccaa

SEQ ID NO: 5820183 - DNA, 25 bp, Homo sapien
aggtctatgagctgtcccaccaccg

SEQ ID NO: 5820184 - DNA, 25 bp, Homo sapien
caatttggtcccgggcttcctctga

SEQ ID NO: 5820185 - DNA, 25 bp, Homo sapien
cagtttgatatctacaagaagagcc

SEQ ID NO: 5820186 - DNA, 25 bp, Homo sapien
tcccacttcagcctcccaagtagct

SEQ ID NO: 5820187 - DNA, 25 bp, Homo sapien
gaagcagaggccttgggtggtccgt

SEQ ID NO: 5820188 - DNA, 25 bp, Homo sapien
tgcatctccttgagctcaggccatc

SEQ ID NO: 5820189 - DNA, 25 bp, Homo sapien
aagttctagggttacaagtgtaagc

SEQ ID NO: 5820190 - DNA, 25 bp, Homo sapien
cagtaagtgagcttctttgtacacc

SEQ ID NO: 5820191 - DNA, 25 bp, Homo sapien
aggagtaggcataacctttgtcttg

SEQ ID NO: 5820192 - DNA, 25 bp, Homo sapien
tgtcttggaatttagacaggaatct

SEQ ID NO: 5820193 - DNA, 25 bp, Homo sapien
tccatgttcacgtcccctgcccggc

SEQ ID NO: 5820194 - DNA, 25 bp, Homo sapien
cggattatttaattccaagctggca

SEQ ID NO: 5820195 - DNA, 25 bp, Homo sapien
gaggccccggcgcccgggtgaggcg

SEQ ID NO: 5820196 - DNA, 25 bp, Homo sapien
agctggcacacacaggggagagccc

SEQ ID NO: 5820197 - DNA, 25 bp, Homo sapien
acttgctattttacatacaaaacat

SEQ ID NO: 5820198 - DNA, 25 bp, Homo sapien
ggagaaagtagaatcgctttcctct

SEQ ID NO: 5820199 - DNA, 25 bp, Homo sapien
cggggaggaggccaagagccgaggc

SEQ ID NO: 5820200 - DNA, 25 bp, Homo sapien
cttgtttctgagggttgaaaaccac

SEQ ID NO: 5820201 - DNA, 25 bp, Homo sapien
aatgtcttccttcttagggtcatcc

SEQ ID NO: 5820202 - DNA, 25 bp, Homo sapien
gtgcagtggcacaatcacagcccac

SEQ ID NO: 5820203 - DNA, 25 bp, Homo sapien
atacttgcaaattcacttgatttag

SEQ ID NO: 5820204 - DNA, 25 bp, Homo sapien
catctccacccggcttggcttcctc

SEQ ID NO: 5820205 - DNA, 25 bp, Homo sapien
ccactgcgaccagcctaaagcttgt

SEQ ID NO: 5820206 - DNA, 25 bp, Homo sapien
tggacagtgaccctgccaactgacg

SEQ ID NO: 5820207 - DNA, 25 bp, Homo sapien
atgtaaatctagaatatctaactat

SEQ ID NO: 5820208 - DNA, 25 bp, Homo sapien
aagaagaatgtcttccttcttaggg

SEQ ID NO: 5820209 - DNA, 25 bp, Homo sapien
agaacccctgtcaggggacacatcc

SEQ ID NO: 5820210 - DNA, 25 bp, Homo sapien
ccgaggctcacccacagggggcccc

SEQ ID NO: 5820211 - DNA, 25 bp, Homo sapien
agcagaggccttgggtggtccgtgc

SEQ ID NO: 5820212 - DNA, 25 bp, Homo sapien
gagttcttgcggggctcagaggaac

SEQ ID NO: 5820213 - DNA, 25 bp, Homo sapien
tttagacaggaatctcgccgtctga

SEQ ID NO: 5820214 - DNA, 25 bp, Homo sapien
ccaccctctccagcactgggaatat

SEQ ID NO: 5820215 - DNA, 25 bp, Homo sapien
ttatgtccaaagggtccgaagaaga

SEQ ID NO: 5820216 - DNA, 25 bp, Homo sapien
tggcacaatcacagcccactgcagc

SEQ ID NO: 5820217 - DNA, 25 bp, Homo sapien
cagaggccgctcgaggcagcagcaa

SEQ ID NO: 5820218 - DNA, 25 bp, Homo sapien
gttcttgcggggctcagaggaacgt

SEQ ID NO: 5820219 - DNA, 25 bp, Homo sapien
acgggaaggaggagaacccctgtca

SEQ ID NO: 5820220 - DNA, 25 bp, Homo sapien
catcgacccgcttggcctgccagga

SEQ ID NO: 5820221 - DNA, 25 bp, Homo sapien
gccgtctgatacttctagtcttatt

SEQ ID NO: 5820222 - DNA, 25 bp, Homo sapien
gtgcctgaggcacacgggaaggagg

SEQ ID NO: 5820223 - DNA, 25 bp, Homo sapien
cagctgggatttttgtcctggaagg

SEQ ID NO: 5820224 - DNA, 25 bp, Homo sapien
tcccaggctggtcccgaactcctgg

SEQ ID NO: 5820225 - DNA, 25 bp, Homo sapien
cttcagccccaacttgtttggaaca

SEQ ID NO: 5820226 - DNA, 25 bp, Homo sapien
agaggccgggagctatttgcaggaa

SEQ ID NO: 5820227 - DNA, 25 bp, Homo sapien
gcaaggctgacacacgccgtgcgct

SEQ ID NO: 5820228 - DNA, 25 bp, Homo sapien
gagggtcttcaggcttggcagcttg

SEQ ID NO: 5820229 - DNA, 25 bp, Homo sapien
gaagattctgaccaagcgcaactgg

SEQ ID NO: 5820230 - DNA, 25 bp, Homo sapien
tcaggtctatgagctgtcccaccac

SEQ ID NO: 5820231 - DNA, 25 bp, Homo sapien
tgttggttcagttctcattgcagag

SEQ ID NO: 5820232 - DNA, 25 bp, Homo sapien
cttcctctaacagaggccgctcgag

SEQ ID NO: 5820233 - DNA, 25 bp, Homo sapien
caactggagttcagccactggccgc

SEQ ID NO: 5820234 - DNA, 25 bp, Homo sapien
tagaatcgctttcctctggagaaaa

SEQ ID NO: 5820235 - DNA, 25 bp, Homo sapien
ttaattttgactcctgtatgaatct

SEQ ID NO: 5820236 - DNA, 25 bp, Homo sapien
cacagggcctgcaggcagagctggc

SEQ ID NO: 5820237 - DNA, 25 bp, Homo sapien
gttctcacattggtgcccaggctgg

SEQ ID NO: 5820238 - DNA, 25 bp, Homo sapien
tgggcatcgttttgggggtcatcgg

SEQ ID NO: 5820239 - DNA, 25 bp, Homo sapien
tccgagctggcacacacaggggaga

SEQ ID NO: 5820240 - DNA, 25 bp, Homo sapien
gtctatgagctgtcccaccaccggt

SEQ ID NO: 5820241 - DNA, 25 bp, Homo sapien
tgcccgcgaaagctttggtgttgag

SEQ ID NO: 5820242 - DNA, 25 bp, Homo sapien
aggagggtggcggcgggaagcagag

SEQ ID NO: 5820243 - DNA, 25 bp, Homo sapien
aaagcttgtttctgagggttgaaaa

SEQ ID NO: 5820244 - DNA, 25 bp, Homo sapien
acgttctccttgtcagcctcagggc

SEQ ID NO: 5820245 - DNA, 25 bp, Homo sapien
ttcctctggagaaaagttaagtgcc

SEQ ID NO: 5820246 - DNA, 25 bp, Homo sapien
ttctagtcttattcaattgagaaga

SEQ ID NO: 5820247 - DNA, 25 bp, Homo sapien
agtcaccaatagaaaacttaggaat

SEQ ID NO: 5820248 - DNA, 25 bp, Homo sapien
caaaacattcaaaagaaaattcttc

SEQ ID NO: 5820249 - DNA, 25 bp, Homo sapien
cgagtggttccagtttgatatctac

SEQ ID NO: 5820250 - DNA, 25 bp, Homo sapien
tctacaagaagagcctcactagggg

SEQ ID NO: 5820251 - DNA, 25 bp, Homo sapien
ggctccgagggtcttcaggcttggc

SEQ ID NO: 5820252 - DNA, 25 bp, Homo sapien
gggaagcagaggccttgggtggtcc

SEQ ID NO: 5820253 - DNA, 25 bp, Homo sapien
agcctcagggctcagctggatcaga

SEQ ID NO: 5820254 - DNA, 25 bp, Homo sapien
gtaggagtaggcataacctttgtct

SEQ ID NO: 5820255 - DNA, 25 bp, Homo sapien
acttttggagaaagtagaatcgctt

SEQ ID NO: 5820256 - DNA, 25 bp, Homo sapien
cccacggccctgggcatcgttttgg

SEQ ID NO: 5820257 - DNA, 25 bp, Homo sapien
ccaggctggtcccgaactcctgggc

SEQ ID NO: 5820258 - DNA, 25 bp, Homo sapien
ctttgtacacctccacgaacttctc

SEQ ID NO: 5820259 - DNA, 25 bp, Homo sapien
gctttgcccactgctggggatgtgc

SEQ ID NO: 5820260 - DNA, 25 bp, Homo sapien
acaggtagtatgtctcccttttaag

SEQ ID NO: 5820261 - DNA, 25 bp, Homo sapien
gccgggtgcttttaacagggtcttc

SEQ ID NO: 5820262 - DNA, 25 bp, Homo sapien
tctttctcaaagaggtttattttta

SEQ ID NO: 5820263 - DNA, 25 bp, Homo sapien
gaggccttgggtggtccgtgctggc

SEQ ID NO: 5820264 - DNA, 25 bp, Homo sapien
gcagccccagggatgcttcttcctc

SEQ ID NO: 5820265 - DNA, 25 bp, Homo sapien
atttttgtcctggaaggactagctg

SEQ ID NO: 5820266 - DNA, 25 bp, Homo sapien
tatgaatctttccacgccctggctc

SEQ ID NO: 5820267 - DNA, 25 bp, Homo sapien
aggtagtatgtctcccttttaagag

SEQ ID NO: 5820268 - DNA, 25 bp, Homo sapien
atctttctttatgtccaaagggtcc

SEQ ID NO: 5820269 - DNA, 25 bp, Homo sapien
ggtagagccgggtgcttttaacagg

SEQ ID NO: 5820270 - DNA, 25 bp, Homo sapien
gcacattgacagcacccggggcagg

SEQ ID NO: 5820271 - DNA, 25 bp, Homo sapien
cacgcactggatgccccgctccaaa

SEQ ID NO: 5820272 - DNA, 25 bp, Homo sapien
gcagcaatacatctttctttatgtc

SEQ ID NO: 5820273 - DNA, 25 bp, Homo sapien
atttggtcccgggcttcctctgagt

SEQ ID NO: 5820274 - DNA, 25 bp, Homo sapien
caacggaggctgttcgggaaccgga

SEQ ID NO: 5820275 - DNA, 25 bp, Homo sapien
ccggcggccggcacattgacagcac

SEQ ID NO: 5820276 - DNA, 25 bp, Homo sapien
aaagctttggtgttgagctgtccgg

SEQ ID NO: 5820277 - DNA, 25 bp, Homo sapien
ggcaaaggatttggttcggcttaga

SEQ ID NO: 5820278 - DNA, 25 bp, Homo sapien
caagtggcttccggcggccggcaca

SEQ ID NO: 5820279 - DNA, 25 bp, Homo sapien
tcggccaaaagaagaatgtcttcct

SEQ ID NO: 5820280 - DNA, 25 bp, Homo sapien
ctttggtgttgagctgtccggggag

SEQ ID NO: 5820281 - DNA, 25 bp, Homo sapien
gaagaagacaatgaaagatcgaagt

SEQ ID NO: 5820282 - DNA, 25 bp, Homo sapien
gttcggcttagaacttgaggagtgg

SEQ ID NO: 5820283 - DNA, 25 bp, Homo sapien
tttgggggtcatcggtggaaggcca

SEQ ID NO: 5820284 - DNA, 25 bp, Homo sapien
cagctggatcagaggggagctcagg

SEQ ID NO: 5820285 - DNA, 25 bp, Homo sapien
gggcttcctctgagtcgctgcctga

SEQ ID NO: 5820286 - DNA, 25 bp, Homo sapien
accagagctgggcagggccggggag

SEQ ID NO: 5820287 - DNA, 25 bp, Homo sapien
agccccaacttgtttggaacaggga

SEQ ID NO: 5820288 - DNA, 25 bp, Homo sapien
ttgtcagggagaacatcccggtggg

SEQ ID NO: 5820289 - DNA, 25 bp, Homo sapien
gaagtcaaatttttcatcggccaaa

SEQ ID NO: 5820290 - DNA, 25 bp, Homo sapien
ctttagggctgttctttcaaggcaa

SEQ ID NO: 5820291 - DNA, 25 bp, Homo sapien
agagcagcgccggctggcgggtgtg

SEQ ID NO: 5820292 - DNA, 25 bp, Homo sapien
tgacttgcagcatgagcagtgcatg

SEQ ID NO: 5820293 - DNA, 25 bp, Homo sapien
ggaacgtctccgagctggcacacac

SEQ ID NO: 5820294 - DNA, 25 bp, Homo sapien
gagcttctttgtacacctccacgaa

SEQ ID NO: 5820295 - DNA, 25 bp, Homo sapien
gcctaaagcttgtttctgagggttg

SEQ ID NO: 5820296 - DNA, 25 bp, Homo sapien
ctctaacagaggccgctcgaggcag

SEQ ID NO: 5820297 - DNA, 25 bp, Homo sapien
ttgagaagattctgaccaagcgcaa

SEQ ID NO: 5820298 - DNA, 25 bp, Homo sapien
tgggggtcatcggtggaaggccaga

SEQ ID NO: 5820299 - DNA, 25 bp, Homo sapien
cagggccggggaggaggccaagagc

SEQ ID NO: 5820300 - DNA, 25 bp, Homo sapien
tggaatctgtctttctgttgctctc

SEQ ID NO: 5820301 - DNA, 25 bp, Homo sapien
tacaggcatgcactaccacacccgg

SEQ ID NO: 5820302 - DNA, 25 bp, Homo sapien
catcatcttcatttgcactcgaaga

SEQ ID NO: 5820303 - DNA, 25 bp, Homo sapien
tgtctcccttttaagagacgtgggg

SEQ ID NO: 5820304 - DNA, 25 bp, Homo sapien
ttcaaataaaacttctactaaaaca

SEQ ID NO: 5820305 - DNA, 25 bp, Homo sapien
aattttaaattgatttgtaggagta

SEQ ID NO: 5820306 - DNA, 25 bp, Homo sapien
gcagtggcacaatcacagcccactg

SEQ ID NO: 5820307 - DNA, 25 bp, Homo sapien
cagcctaaagcttgtttctgagggt

SEQ ID NO: 5820308 - DNA, 25 bp, Homo sapien
caggggagagcccacggccctgggc

SEQ ID NO: 5820309 - DNA, 25 bp, Homo sapien
gtaagtgagcttctttgtacacctc

SEQ ID NO: 5820310 - DNA, 25 bp, Homo sapien
ttcatcatcttcatttgcactcgaa

SEQ ID NO: 5820311 - DNA, 25 bp, Homo sapien
ttggccacatttttattcatgtctg

SEQ ID NO: 5820312 - DNA, 25 bp, Homo sapien
cagcccagagaatggcagcgaggag

SEQ ID NO: 5820313 - DNA, 25 bp, Homo sapien
tggcgggtgtgggcaaggctgacac

SEQ ID NO: 5820314 - DNA, 25 bp, Homo sapien
tgagcagtgcatgattccctgggca

SEQ ID NO: 5820315 - DNA, 25 bp, Homo sapien
gtgggattccttctcagctgggatt

SEQ ID NO: 5820316 - DNA, 25 bp, Homo sapien
gtggcagtacttttggagaaagtag

SEQ ID NO: 5820317 - DNA, 25 bp, Homo sapien
ttctttgtacacctccacgaacttc

SEQ ID NO: 5820318 - DNA, 25 bp, Homo sapien
gagggctccaggcaaagggactctc

SEQ ID NO: 5820319 - DNA, 25 bp, Homo sapien
gggtatcgcagaagtcgatgagagg

SEQ ID NO: 5820320 - DNA, 25 bp, Homo sapien
cacccggggcaggtttgtcagggag

SEQ ID NO: 5820321 - DNA, 25 bp, Homo sapien
gcccacctcagcctcccaagttcta

SEQ ID NO: 5820322 - DNA, 25 bp, Homo sapien
ggggagagcccacggccctgggcat

SEQ ID NO: 5820323 - DNA, 25 bp, Homo sapien
tctttccacgccctggctccgaggg

SEQ ID NO: 5820324 - DNA, 25 bp, Homo sapien
ttggcagcttgggctgcctggttcc

SEQ ID NO: 5820325 - DNA, 25 bp, Homo sapien
ccgcagccccagggatgcttcttcc

SEQ ID NO: 5820326 - DNA, 25 bp, Homo sapien
cgtctgatacttctagtcttattca

SEQ ID NO: 5820327 - DNA, 25 bp, Homo sapien
aatctctttcttgggcttctccgca

SEQ ID NO: 5820328 - DNA, 25 bp, Homo sapien
ctgaggcacacgggaaggaggagaa

SEQ ID NO: 5820329 - DNA, 25 bp, Homo sapien
tttgtcttggaatttagacaggaat

SEQ ID NO: 5820330 - DNA, 25 bp, Homo sapien
tctaaccggggtgctgtggacagtg

SEQ ID NO: 5820331 - DNA, 25 bp, Homo sapien
gtgcttttaacagggtcttcttcag

SEQ ID NO: 5820332 - DNA, 25 bp, Homo sapien
cggcaggctgaaggctcatcgcggc

SEQ ID NO: 5820333 - DNA, 25 bp, Homo sapien
agctcagaaacatcgacccgcttgg

SEQ ID NO: 5820334 - DNA, 25 bp, Homo sapien
cacgccgtgcgctcagcaggctttg

SEQ ID NO: 5820335 - DNA, 25 bp, Homo sapien
gcctgaggcacacgggaaggaggag

SEQ ID NO: 5820336 - DNA, 25 bp, Homo sapien
accagcctaaagcttgtttctgagg

SEQ ID NO: 5820337 - DNA, 25 bp, Homo sapien
ggggccccagcaaggggctgtctga

SEQ ID NO: 5820338 - DNA, 25 bp, Homo sapien
tccgtgctggccccagtccctcagc

SEQ ID NO: 5820339 - DNA, 25 bp, Homo sapien
ctggccgcagcatggcgggtcccat

SEQ ID NO: 5820340 - DNA, 25 bp, Homo sapien
atacttctagtcttattcaattgag

SEQ ID NO: 5820341 - DNA, 25 bp, Homo sapien
gaggcagcagcaatttggtcccggg

SEQ ID NO: 5820342 - DNA, 25 bp, Homo sapien
cggcacattgacagcacccggggca

SEQ ID NO: 5820343 - DNA, 25 bp, Homo sapien
cggcttggcttcctcccgagctact

SEQ ID NO: 5820344 - DNA, 25 bp, Homo sapien
cttgccctggcccaagtggcttccg

SEQ ID NO: 5820345 - DNA, 25 bp, Homo sapien
ccaacttgtttggaacagggatcgc

SEQ ID NO: 5820346 - DNA, 25 bp, Homo sapien
ttggttcagttctcattgcagagtt

SEQ ID NO: 5820347 - DNA, 25 bp, Homo sapien
aagaaaattcttcatttagagtgac

SEQ ID NO: 5820348 - DNA, 25 bp, Homo sapien
gttacaagtgtaagccactgcgacc

SEQ ID NO: 5820349 - DNA, 25 bp, Homo sapien
ctgggcaccagagctgggcagggcc

SEQ ID NO: 5820350 - DNA, 25 bp, Homo sapien
agacaggttctcacattggtgccca

SEQ ID NO: 5820351 - DNA, 25 bp, Homo sapien
ggcagcttgggctgcctggttccgg

SEQ ID NO: 5820352 - DNA, 25 bp, Homo sapien
tccgaagaagacttcatcatcttca

SEQ ID NO: 5820353 - DNA, 25 bp, Homo sapien
cttcaggcttggcagcttgggctgc

SEQ ID NO: 5820354 - DNA, 25 bp, Homo sapien
ggtgaggcgggcctgggcaccagag

SEQ ID NO: 5820355 - DNA, 25 bp, Homo sapien
gcactgggaatatatttatgcttat

SEQ ID NO: 5820356 - DNA, 25 bp, Homo sapien
aacttgtttggaacagggatcgccc

SEQ ID NO: 5820357 - DNA, 25 bp, Homo sapien
ggagtgaccgcgagtggttccagtt

SEQ ID NO: 5820358 - DNA, 25 bp, Homo sapien
aggatttggttcggcttagaacttg

SEQ ID NO: 5820359 - DNA, 25 bp, Homo sapien
agattgctggtagagccgggtgctt

SEQ ID NO: 5820360 - DNA, 25 bp, Homo sapien
catgagcagtgcatgattccctggg

SEQ ID NO: 5820361 - DNA, 25 bp, Homo sapien
cgcccgggtgaggcgggcctgggca

SEQ ID NO: 5820362 - DNA, 25 bp, Homo sapien
tcagcaggctttgtggtgctggccc

SEQ ID NO: 5820363 - DNA, 25 bp, Homo sapien
ctggctccgagggtcttcaggcttg

SEQ ID NO: 5820364 - DNA, 25 bp, Homo sapien
gtgcatgattccctgggcaaagcat

SEQ ID NO: 5820365 - DNA, 25 bp, Homo sapien
tgatttgtaggagtaggcataacct

SEQ ID NO: 5820366 - DNA, 25 bp, Homo sapien
ggggttgggtgggggatgctgaggg

SEQ ID NO: 5820367 - DNA, 25 bp, Homo sapien
tctcccttttaagagacgtggggct

SEQ ID NO: 5820368 - DNA, 25 bp, Homo sapien
ccccgctccaaacaggccccgagga

SEQ ID NO: 5820369 - DNA, 25 bp, Homo sapien
ccccagcaaggggctgtctgacagg

SEQ ID NO: 5820370 - DNA, 25 bp, Homo sapien
tttccaagacaggttctcacattgg

SEQ ID NO: 5820371 - DNA, 25 bp, Homo sapien
cactgctggggatgtgcacgcactg

SEQ ID NO: 5820372 - DNA, 25 bp, Homo sapien
agtcgatgagaggaaggtcaatgag

SEQ ID NO: 5820373 - DNA, 25 bp, Homo sapien
gagctgtccggggagtcaccaatag

SEQ ID NO: 5820374 - DNA, 25 bp, Homo sapien
cttggcctgccaggaggatgccccc

SEQ ID NO: 5820375 - DNA, 25 bp, Homo sapien
agtagaatcgctttcctctggagaa

SEQ ID NO: 5820376 - DNA, 25 bp, Homo sapien
actggagttcagccactggccgcca

SEQ ID NO: 5820377 - DNA, 25 bp, Homo sapien
ttgcagcatgagcagtgcatgattc

SEQ ID NO: 5820378 - DNA, 25 bp, Homo sapien
ttaagtgcctgaggcacacgggaag

SEQ ID NO: 5820379 - DNA, 25 bp, Homo sapien
cgaacttctccccggccagagggct

SEQ ID NO: 5820380 - DNA, 25 bp, Homo sapien
ttatttaattccaagctggcagcaa

SEQ ID NO: 5820381 - DNA, 25 bp, Homo sapien
tgctccgctgccagctcagaaacat

SEQ ID NO: 5820382 - DNA, 25 bp, Homo sapien
ctgggcaaagcatgagcagagtgcg

SEQ ID NO: 5820383 - DNA, 25 bp, Homo sapien
gagctgggcagggccggggaggagg

SEQ ID NO: 5820384 - DNA, 25 bp, Homo sapien
gctccaaacaggccccgaggaggac

SEQ ID NO: 5820385 - DNA, 25 bp, Homo sapien
agttaagtgcctgaggcacacggga

SEQ ID NO: 5820386 - DNA, 25 bp, Homo sapien
cctgcccggcaggctgaaggctcat

SEQ ID NO: 5820387 - DNA, 25 bp, Homo sapien
tctcaatgtgtaaagccagtaagtg

SEQ ID NO: 5820388 - DNA, 25 bp, Homo sapien
gggcctgggcaccagagctgggcag

SEQ ID NO: 5820389 - DNA, 25 bp, Homo sapien
caccggtgaaggtttggccacattt

SEQ ID NO: 5820390 - DNA, 25 bp, Homo sapien
cactttagggctgttctttcaaggc

SEQ ID NO: 5820391 - DNA, 25 bp, Homo sapien
taccacacccggctaatttttgtac

SEQ ID NO: 5820392 - DNA, 25 bp, Homo sapien
cggccggcacattgacagcacccgg

SEQ ID NO: 5820393 - DNA, 25 bp, Homo sapien
tcgaagtcaaatttttcatcggcca

SEQ ID NO: 5820394 - DNA, 25 bp, Homo sapien
taatgtaaatctagaatatctaact

SEQ ID NO: 5820395 - DNA, 25 bp, Homo sapien
aattttgactcctgtatgaatcttt

SEQ ID NO: 5820396 - DNA, 25 bp, Homo sapien
caagtgtaagccactgcgaccagcc

SEQ ID NO: 5820397 - DNA, 25 bp, Homo sapien
aaaccactttagggctgttctttca

SEQ ID NO: 5820398 - DNA, 25 bp, Homo sapien
cgagctacttctgtggcagtacttt

SEQ ID NO: 5820399 - DNA, 25 bp, Homo sapien
tccagcactgggaatatatttatgc

SEQ ID NO: 5820400 - DNA, 25 bp, Homo sapien
caggaatctcgccgtctgatacttc

SEQ ID NO: 5820401 - DNA, 25 bp, Homo sapien
tgcatctccacccggcttggcttcc

SEQ ID NO: 5820402 - DNA, 25 bp, Homo sapien
ggcaacggaggctgttcgggaaccg

SEQ ID NO: 5820403 - DNA, 25 bp, Homo sapien
actgggaatatatttatgcttattt

SEQ ID NO: 5820404 - DNA, 25 bp, Homo sapien
acaatcacagcccactgcagcctgc

SEQ ID NO: 5820405 - DNA, 25 bp, Homo sapien
acctccacgaacttctccccggcca

SEQ ID NO: 5820406 - DNA, 25 bp, Homo sapien
gccaggaggatgcccccacagggcc

SEQ ID NO: 5820407 - DNA, 25 bp, Homo sapien
acattgacagcacccggggcaggtt

SEQ ID NO: 5820408 - DNA, 25 bp, Homo sapien
ctcagcctcccaagttctagggtta

SEQ ID NO: 5820409 - DNA, 25 bp, Homo sapien
gggaggaggccaagagccgaggctc

SEQ ID NO: 5820410 - DNA, 25 bp, Homo sapien
tgatacttctagtcttattcaattg

SEQ ID NO: 5820411 - DNA, 25 bp, Homo sapien
gctgtcccaccaccggtgaaggttt

SEQ ID NO: 5820412 - DNA, 25 bp, Homo sapien
attgatttgtaggagtaggcataac

SEQ ID NO: 5820413 - DNA, 25 bp, Homo sapien
cgaccagcctaaagcttgtttctga

SEQ ID NO: 5820414 - DNA, 25 bp, Homo sapien
ttgtaggagtaggcataacctttgt

SEQ ID NO: 5820415 - DNA, 25 bp, Homo sapien
tctcgccgtctgatacttctagtct

SEQ ID NO: 5820416 - DNA, 25 bp, Homo sapien
gccccggcgcccgggtgaggcgggc

SEQ ID NO: 5820417 - DNA, 25 bp, Homo sapien
aaattgatttgtaggagtaggcata

SEQ ID NO: 5820418 - DNA, 25 bp, Homo sapien
gactgcggccgctgtgcccgcgaaa

SEQ ID NO: 5820419 - DNA, 25 bp, Homo sapien
tgcctgacttgcagcatgagcagtg

SEQ ID NO: 5820420 - DNA, 25 bp, Homo sapien
gacaatgaaagatcgaagtcaaatt

SEQ ID NO: 5820421 - DNA, 25 bp, Homo sapien
gtctggggttgggtgggggatgctg

SEQ ID NO: 5820422 - DNA, 25 bp, Homo sapien
gtacttttggagaaagtagaatcgc

SEQ ID NO: 5820423 - DNA, 25 bp, Homo sapien
gagaacatcccggtgggattccttc

SEQ ID NO: 5820424 - DNA, 25 bp, Homo sapien
ctggcccaagtggcttccggcggcc

SEQ ID NO: 5820425 - DNA, 25 bp, Homo sapien
gatgagaggaaggtcaatgaggggc

SEQ ID NO: 5820426 - DNA, 25 bp, Homo sapien
tgtgcccgcgaaagctttggtgttg

SEQ ID NO: 5820427 - DNA, 25 bp, Homo sapien
cctgggcatcgttttgggggtcatc

SEQ ID NO: 5820428 - DNA, 25 bp, Homo sapien
gaggcttcacattccagcccagaga

SEQ ID NO: 5820429 - DNA, 25 bp, Homo sapien
gctgtggacagtgaccctgccaact

SEQ ID NO: 5820430 - DNA, 25 bp, Homo sapien
gacttccttgcgagattgctggtag

SEQ ID NO: 5820431 - DNA, 25 bp, Homo sapien
cttcatttgcactcgaagaagacaa

SEQ ID NO: 5820432 - DNA, 25 bp, Homo sapien
gctggcagcaatacatctttcttta

SEQ ID NO: 5820433 - DNA, 25 bp, Homo sapien
gtcttcaggcttggcagcttgggct

SEQ ID NO: 5820434 - DNA, 25 bp, Homo sapien
gtgctggccccagtccctcagccca

SEQ ID NO: 5820435 - DNA, 25 bp, Homo sapien
ccaaagggtccgaagaagacttcat

SEQ ID NO: 5820436 - DNA, 25 bp, Homo sapien
gaaccggattatttaattccaagct

SEQ ID NO: 5820437 - DNA, 25 bp, Homo sapien
agtgaccgcgagtggttccagtttg

SEQ ID NO: 5820438 - DNA, 25 bp, Homo sapien
ttttggagaaagtagaatcgctttc

SEQ ID NO: 5820439 - DNA, 25 bp, Homo sapien
agtcaaatttttcatcggccaaaag

SEQ ID NO: 5820440 - DNA, 25 bp, Homo sapien
gagtgactgaggcttcacattccag

SEQ ID NO: 5820441 - DNA, 25 bp, Homo sapien
aatgtgtaaagccagtaagtgagct

SEQ ID NO: 5820442 - DNA, 25 bp, Homo sapien
cagggtcttcttcagccccaacttg

SEQ ID NO: 5820443 - DNA, 25 bp, Homo sapien
tcccgggcttcctctgagtcgctgc

SEQ ID NO: 5820444 - DNA, 25 bp, Homo sapien
gcagcaatttggtcccgggcttcct

SEQ ID NO: 5820445 - DNA, 25 bp, Homo sapien
ggtgccgtgagctgctccgctgcca

SEQ ID NO: 5820446 - DNA, 25 bp, Homo sapien
atcgcagaagtcgatgagaggaagg

SEQ ID NO: 5820447 - DNA, 25 bp, Homo sapien
accggggtgctgtggacagtgaccc

SEQ ID NO: 5820448 - DNA, 25 bp, Homo sapien
actttttgtagggacaggagtttca

SEQ ID NO: 5820449 - DNA, 25 bp, Homo sapien
atttgcaggaatacttgcaaattca

SEQ ID NO: 5820450 - DNA, 25 bp, Homo sapien
ggccaaaagaagaatgtcttccttc

SEQ ID NO: 5820451 - DNA, 25 bp, Homo sapien
ccccgaggaggacttccttgcgaga

SEQ ID NO: 5820452 - DNA, 25 bp, Homo sapien
ccacgttctccttgtcagcctcagg

SEQ ID NO: 5820453 - DNA, 25 bp, Homo sapien
cttagggtcatccatgttcacgtcc

SEQ ID NO: 5820454 - DNA, 25 bp, Homo sapien
gcctgcaggcagagctggccgcagc

SEQ ID NO: 5820455 - DNA, 25 bp, Homo sapien
cctgtatgaatctttccacgccctg

SEQ ID NO: 5820456 - DNA, 25 bp, Homo sapien
tccacgccctggctccgagggtctt

SEQ ID NO: 5820457 - DNA, 25 bp, Homo sapien
ccccaacttgtttggaacagggatc

SEQ ID NO: 5820458 - DNA, 25 bp, Homo sapien
agaagacaatgaaagatcgaagtca

SEQ ID NO: 5820459 - DNA, 25 bp, Homo sapien
ggctcacccacagggggccccagca

SEQ ID NO: 5820460 - DNA, 25 bp, Homo sapien
gctccaggcaaagggactctcagat

SEQ ID NO: 5820461 - DNA, 25 bp, Homo sapien
taagccactgcgaccagcctaaagc

SEQ ID NO: 5820462 - DNA, 25 bp, Homo sapien
atttttattcatgtctggagtgttt

SEQ ID NO: 5820463 - DNA, 25 bp, Homo sapien
tgcgaccagcctaaagcttgtttct

SEQ ID NO: 5820464 - DNA, 25 bp, Homo sapien
tccggctgctgctctcaatgtgtaa

SEQ ID NO: 5820465 - DNA, 25 bp, Homo sapien
acgtgcacgactgcggccgctgtgc

SEQ ID NO: 5820466 - DNA, 25 bp, Homo sapien
ctttatgtccaaagggtccgaagaa

SEQ ID NO: 5820467 - DNA, 25 bp, Homo sapien
atttttaattttgactcctgtatga

SEQ ID NO: 5820468 - DNA, 25 bp, Homo sapien
agaatgtcttccttcttagggtcat

SEQ ID NO: 5820469 - DNA, 25 bp, Homo sapien
aggctggtcccgaactcctgggctc

SEQ ID NO: 5820470 - DNA, 25 bp, Homo sapien
catttagagtgactgaggcttcaca

SEQ ID NO: 5820471 - DNA, 25 bp, Homo sapien
ttttttatgcttcaataagtccatt

SEQ ID NO: 5820472 - DNA, 25 bp, Homo sapien
tctcattgcagagttcttgcggggc

SEQ ID NO: 5820473 - DNA, 25 bp, Homo sapien
cctgggctcaagtaatccgcccacc

SEQ ID NO: 5820474 - DNA, 25 bp, Homo sapien
tggcagcaatacatctttctttatg

SEQ ID NO: 5820475 - DNA, 25 bp, Homo sapien
gactgaggcttcacattccagccca

SEQ ID NO: 5820476 - DNA, 25 bp, Homo sapien
gcttcttcctctaacagaggccgct

SEQ ID NO: 5820477 - DNA, 25 bp, Homo sapien
gaagtcgatgagaggaaggtcaatg

SEQ ID NO: 5820478 - DNA, 25 bp, Homo sapien
tcaaatttttcatcggccaaaagaa

SEQ ID NO: 5820479 - DNA, 25 bp, Homo sapien
gttctttcaaggcaaaggatttggt

SEQ ID NO: 5820480 - DNA, 25 bp, Homo sapien
aggacttccttgcgagattgctggt

SEQ ID NO: 5820481 - DNA, 25 bp, Homo sapien
caagagccgaggctcacccacaggg

SEQ ID NO: 5820482 - DNA, 25 bp, Homo sapien
ccactggccgccaccttccggagtc

SEQ ID NO: 5820483 - DNA, 25 bp, Homo sapien
aactcctgggctcaagtaatccgcc

SEQ ID NO: 5820484 - DNA, 25 bp, Homo sapien
gcccagagaatggcagcgaggaggg

SEQ ID NO: 5820485 - DNA, 25 bp, Homo sapien
agggatgcttcttcctctaacagag

SEQ ID NO: 5820486 - DNA, 25 bp, Homo sapien
gggtgctgtggacagtgaccctgcc

SEQ ID NO: 5820487 - DNA, 25 bp, Homo sapien
tttggaacagggatcgcccgcttgc

SEQ ID NO: 5820488 - DNA, 25 bp, Homo sapien
ttttttttatgcttcaataagtcca

SEQ ID NO: 5820489 - DNA, 25 bp, Homo sapien
gacttgctgatgtttgacagaggcc

SEQ ID NO: 5820490 - DNA, 25 bp, Homo sapien
ggcggcgggaagcagaggccttggg

SEQ ID NO: 5820491 - DNA, 25 bp, Homo sapien
aggtttggccacatttttattcatg

SEQ ID NO: 5820492 - DNA, 25 bp, Homo sapien
tttgtcatgaggtcgatcagaggcc

SEQ ID NO: 5820493 - DNA, 25 bp, Homo sapien
ccacatttttattcatgtctggagt

SEQ ID NO: 5820494 - DNA, 25 bp, Homo sapien
ttatgcttcaataagtccatttatt

SEQ ID NO: 5820495 - DNA, 25 bp, Homo sapien
gaggctcacccacagggggccccag

SEQ ID NO: 5820496 - DNA, 25 bp, Homo sapien
aaggccagagcagcgccggctggcg

SEQ ID NO: 5820497 - DNA, 25 bp, Homo sapien
gtcatccatgttcacgtcccctgcc

SEQ ID NO: 5820498 - DNA, 25 bp, Homo sapien
aaaagaagaatgtcttccttcttag

SEQ ID NO: 5820499 - DNA, 25 bp, Homo sapien
gcctgggcaccagagctgggcaggg

SEQ ID NO: 5820500 - DNA, 25 bp, Homo sapien
catgagcagagtgcggaggccccgg

SEQ ID NO: 5820501 - DNA, 25 bp, Homo sapien
ctgtggcagtacttttggagaaagt

SEQ ID NO: 5820502 - DNA, 25 bp, Homo sapien
ttcagttctcattgcagagttcttg

SEQ ID NO: 5820503 - DNA, 25 bp, Homo sapien
gtagtatgtctcccttttaagagac

SEQ ID NO: 5820504 - DNA, 25 bp, Homo sapien
aggctggagtgcagtggcacaatca

SEQ ID NO: 5820505 - DNA, 25 bp, Homo sapien
gatgcccccacagggcctgcaggca

SEQ ID NO: 5820506 - DNA, 25 bp, Homo sapien
gcacaatcacagcccactgcagcct

SEQ ID NO: 5820507 - DNA, 25 bp, Homo sapien
gacacatccaccagcctggaatctg

SEQ ID NO: 5820508 - DNA, 25 bp, Homo sapien
agagctggccgcagcatggcgggtc

SEQ ID NO: 5820509 - DNA, 25 bp, Homo sapien
cagaggccttgggtggtccgtgctg

SEQ ID NO: 5820510 - DNA, 25 bp, Homo sapien
catacaaaacattcaaaagaaaatt

SEQ ID NO: 5820511 - DNA, 25 bp, Homo sapien
agcctggaatctgtctttctgttgc

SEQ ID NO: 5820512 - DNA, 25 bp, Homo sapien
tgggactacaggcatgcactaccac

SEQ ID NO: 5820513 - DNA, 25 bp, Homo sapien
ttccttcttagggtcatccatgttc

SEQ ID NO: 5820514 - DNA, 25 bp, Homo sapien
gaagaatgtcttccttcttagggtc

SEQ ID NO: 5820515 - DNA, 25 bp, Homo sapien
ggctggcttgcagcatctggagtga

SEQ ID NO: 5820516 - DNA, 25 bp, Homo sapien
tcccaagttctagggttacaagtgt

SEQ ID NO: 5820517 - DNA, 25 bp, Homo sapien
tgtgtaaagccagtaagtgagcttc

SEQ ID NO: 5820518 - DNA, 25 bp, Homo sapien
tcttggaatttagacaggaatctcg

SEQ ID NO: 5820519 - DNA, 25 bp, Homo sapien
gatttagctttgcccactgctgggg

SEQ ID NO: 5820520 - DNA, 25 bp, Homo sapien
ttttgtcctggaaggactagctgga

SEQ ID NO: 5820521 - DNA, 25 bp, Homo sapien
gagtctggggttgggtgggggatgc

SEQ ID NO: 5820522 - DNA, 25 bp, Homo sapien
ctttctgttgctctcccttgttggt

SEQ ID NO: 5820523 - DNA, 25 bp, Homo sapien
ctgcctgacttgctgatgtttgaca

SEQ ID NO: 5820524 - DNA, 25 bp, Homo sapien
cttctggggtatcgcagaagtcgat

SEQ ID NO: 5820525 - DNA, 25 bp, Homo sapien
cggcgggaagcagaggccttgggtg

SEQ ID NO: 5820526 - DNA, 25 bp, Homo sapien
gggacaaagaaaatggacagtattt

SEQ ID NO: 5820527 - DNA, 25 bp, Homo sapien
gagcccaggggttcaagaccagccc

SEQ ID NO: 5820528 - DNA, 25 bp, Homo sapien
aagtgttataacagcacaggtgtgg

SEQ ID NO: 5820529 - DNA, 25 bp, Homo sapien
tgatctgtgtgacatcccagcttgc

SEQ ID NO: 5820530 - DNA, 25 bp, Homo sapien
tctgtcagccatacagagggattgc

SEQ ID NO: 5820531 - DNA, 25 bp, Homo sapien
agtccaggatactcagatgagtatg

SEQ ID NO: 5820532 - DNA, 25 bp, Homo sapien
gctgctggccgcacgcggggctgct

SEQ ID NO: 5820533 - DNA, 25 bp, Homo sapien
tacctgcagccattgcactcgtgga

SEQ ID NO: 5820534 - DNA, 25 bp, Homo sapien
ccggccgcgccgccgcgggacgcgc

SEQ ID NO: 5820535 - DNA, 25 bp, Homo sapien
tcacgcccactggtgcgacccggac

SEQ ID NO: 5820536 - DNA, 25 bp, Homo sapien
aaacagagtacatttttgcaagatc

SEQ ID NO: 5820537 - DNA, 25 bp, Homo sapien
aatggtctgcgtccaagtggacctt

SEQ ID NO: 5820538 - DNA, 25 bp, Homo sapien
agtgtgaccaaatcagggcgccagt

SEQ ID NO: 5820539 - DNA, 25 bp, Homo sapien
tgattggcacttccagtcacttatc

SEQ ID NO: 5820540 - DNA, 25 bp, Homo sapien
cctcccaccatccgctggttcaaaa

SEQ ID NO: 5820541 - DNA, 25 bp, Homo sapien
gctccctggtgcttcaccttggatg

SEQ ID NO: 5820542 - DNA, 25 bp, Homo sapien
aacggcaaggaggtggtttcttcca

SEQ ID NO: 5820543 - DNA, 25 bp, Homo sapien
ggtttcttccactggagtcttgttt

SEQ ID NO: 5820544 - DNA, 25 bp, Homo sapien
caagaagtcaactgcctttatacct

SEQ ID NO: 5820545 - DNA, 25 bp, Homo sapien
tgtatccggattggaattcccatgg

SEQ ID NO: 5820546 - DNA, 25 bp, Homo sapien
gacgcgcccgccgctcctggcgctg

SEQ ID NO: 5820547 - DNA, 25 bp, Homo sapien
tgcagccattgcactcgtggatgta

SEQ ID NO: 5820548 - DNA, 25 bp, Homo sapien
tcagtgtgaccaaatcagggcgcca

SEQ ID NO: 5820549 - DNA, 25 bp, Homo sapien
agagagcccagaagctgcgaactgt

SEQ ID NO: 5820550 - DNA, 25 bp, Homo sapien
cccggacagcctgggactgacccgc

SEQ ID NO: 5820551 - DNA, 25 bp, Homo sapien
ggaagctccctggtgcttcaccttg

SEQ ID NO: 5820552 - DNA, 25 bp, Homo sapien
ggtgtggactaccgggggaccgtca

SEQ ID NO: 5820553 - DNA, 25 bp, Homo sapien
ctgccgcaacccagggaatcaaaag

SEQ ID NO: 5820554 - DNA, 25 bp, Homo sapien
aaaaggaagctccctggtgcttcac

SEQ ID NO: 5820555 - DNA, 25 bp, Homo sapien
agtttatcacattgatttttataga

SEQ ID NO: 5820556 - DNA, 25 bp, Homo sapien
gcccaggggttcaagaccagcccag

SEQ ID NO: 5820557 - DNA, 25 bp, Homo sapien
ggagcaggttagagggacaaagagc

SEQ ID NO: 5820558 - DNA, 25 bp, Homo sapien
atcatggaacatctcaagtgaactc

SEQ ID NO: 5820559 - DNA, 25 bp, Homo sapien
gcacttccagtcacttatctgataa

SEQ ID NO: 5820560 - DNA, 25 bp, Homo sapien
gtactgcgatgaaacttcatccgtc

SEQ ID NO: 5820561 - DNA, 25 bp, Homo sapien
ccacagacacaggctacttccagtg

SEQ ID NO: 5820562 - DNA, 25 bp, Homo sapien
aataatgaaaatgggccaagcatgg

SEQ ID NO: 5820563 - DNA, 25 bp, Homo sapien
tagggtaaaccttgccgtttctaca

SEQ ID NO: 5820564 - DNA, 25 bp, Homo sapien
ctgaatggaggccattcctactgcc

SEQ ID NO: 5820565 - DNA, 25 bp, Homo sapien
aggaatattggaagcaggaagaaat

SEQ ID NO: 5820566 - DNA, 25 bp, Homo sapien
agaatggtctgcgtccaagtggacc

SEQ ID NO: 5820567 - DNA, 25 bp, Homo sapien
agagctggagcagccgccaccgccg

SEQ ID NO: 5820568 - DNA, 25 bp, Homo sapien
ccccacacacacactttcaccgccc

SEQ ID NO: 5820569 - DNA, 25 bp, Homo sapien
taggaaggccgaggcaggaggatca

SEQ ID NO: 5820570 - DNA, 25 bp, Homo sapien
ttctgatgaggctgaaactgccaaa

SEQ ID NO: 5820571 - DNA, 25 bp, Homo sapien
gaatattggaagcaggaagaaattg

SEQ ID NO: 5820572 - DNA, 25 bp, Homo sapien
ggcggccaggcggaggcgagggagc

SEQ ID NO: 5820573 - DNA, 25 bp, Homo sapien
gggtaaaccttgccgtttctacata

SEQ ID NO: 5820574 - DNA, 25 bp, Homo sapien
tcttccactggagtcttgtttgtca

SEQ ID NO: 5820575 - DNA, 25 bp, Homo sapien
tggctctcggctgcggattagaaac

SEQ ID NO: 5820576 - DNA, 25 bp, Homo sapien
actgcctttatacctgcagccattg

SEQ ID NO: 5820577 - DNA, 25 bp, Homo sapien
gccactatgccttcccgtactgcga

SEQ ID NO: 5820578 - DNA, 25 bp, Homo sapien
cgcaacccagggaatcaaaaggaag

SEQ ID NO: 5820579 - DNA, 25 bp, Homo sapien
cccgccgctcctggcgctgctggcc

SEQ ID NO: 5820580 - DNA, 25 bp, Homo sapien
tttgtcaagtttggcccccctccca

SEQ ID NO: 5820581 - DNA, 25 bp, Homo sapien
agcagaactgcactgcaaagtctct

SEQ ID NO: 5820582 - DNA, 25 bp, Homo sapien
agagctgtcagtcagtgctgaatta

SEQ ID NO: 5820583 - DNA, 25 bp, Homo sapien
gtggcaacaaacggcaaggaggtgg

SEQ ID NO: 5820584 - DNA, 25 bp, Homo sapien
ccaccgccgccgccgagggagcccc

SEQ ID NO: 5820585 - DNA, 25 bp, Homo sapien
gacccgccggcccaggcgaggctgc

SEQ ID NO: 5820586 - DNA, 25 bp, Homo sapien
gccgccgccgcctcagcgagaggag

SEQ ID NO: 5820587 - DNA, 25 bp, Homo sapien
agtgcctacctcatcatggaacatc

SEQ ID NO: 5820588 - DNA, 25 bp, Homo sapien
gattggaattcccatggcagatcct

SEQ ID NO: 5820589 - DNA, 25 bp, Homo sapien
ccccggaggctctcctttcggtcca

SEQ ID NO: 5820590 - DNA, 25 bp, Homo sapien
ggacgaggcggccgggagcccggga

SEQ ID NO: 5820591 - DNA, 25 bp, Homo sapien
ttcgtttcccagagctgaatggagg

SEQ ID NO: 5820592 - DNA, 25 bp, Homo sapien
cagaggcacagttgagacagtttat

SEQ ID NO: 5820593 - DNA, 25 bp, Homo sapien
acatagtgagactccatctctacca

SEQ ID NO: 5820594 - DNA, 25 bp, Homo sapien
gttgagacagtttatcacattgatt

SEQ ID NO: 5820595 - DNA, 25 bp, Homo sapien
gcggggctgctgcccaagaaacaga

SEQ ID NO: 5820596 - DNA, 25 bp, Homo sapien
acagcacaggtgtggactaccgggg

SEQ ID NO: 5820597 - DNA, 25 bp, Homo sapien
tgtgtccttcgttatgtctgttaat

SEQ ID NO: 5820598 - DNA, 25 bp, Homo sapien
agaaacagagctgtcagtcagtgct

SEQ ID NO: 5820599 - DNA, 25 bp, Homo sapien
ttaagaacaccacaaggcaggatga

SEQ ID NO: 5820600 - DNA, 25 bp, Homo sapien
ccttccctgtgccactatgccttcc

SEQ ID NO: 5820601 - DNA, 25 bp, Homo sapien
caggcggaggcgagggagcaggtta

SEQ ID NO: 5820602 - DNA, 25 bp, Homo sapien
cgctgctgctggccgcacgcggggc

SEQ ID NO: 5820603 - DNA, 25 bp, Homo sapien
ccagaatggtctgcgtccaagtgga

SEQ ID NO: 5820604 - DNA, 25 bp, Homo sapien
agaaaataatgaaaatgggccaagc

SEQ ID NO: 5820605 - DNA, 25 bp, Homo sapien
catcccagcttgcggtaaatagaag

SEQ ID NO: 5820606 - DNA, 25 bp, Homo sapien
catccagaggcggccaggcggaggc

SEQ ID NO: 5820607 - DNA, 25 bp, Homo sapien
tgcttgatctcaatctggttttagg

SEQ ID NO: 5820608 - DNA, 25 bp, Homo sapien
cagatgagtatgaagaagatggatt

SEQ ID NO: 5820609 - DNA, 25 bp, Homo sapien
acctgacccttgatgaaccaatgaa

SEQ ID NO: 5820610 - DNA, 25 bp, Homo sapien
gtaacagggacccagcccttcagag

SEQ ID NO: 5820611 - DNA, 25 bp, Homo sapien
gcaaccgcaccgtctatatggagtc

SEQ ID NO: 5820612 - DNA, 25 bp, Homo sapien
ggcccaggcgaggctgcagccagag

SEQ ID NO: 5820613 - DNA, 25 bp, Homo sapien
gtggatgttctgcgcgcggcctggg

SEQ ID NO: 5820614 - DNA, 25 bp, Homo sapien
ggcaatctgtgggtaaactgtgtcc

SEQ ID NO: 5820615 - DNA, 25 bp, Homo sapien
ctgagtcagttaactgttccttttt

SEQ ID NO: 5820616 - DNA, 25 bp, Homo sapien
tgcaagatcaaatcccatgattctg

SEQ ID NO: 5820617 - DNA, 25 bp, Homo sapien
ggtccaggagccccggaggctctcc

SEQ ID NO: 5820618 - DNA, 25 bp, Homo sapien
tggagaatgtcctgtgtcaaacaga

SEQ ID NO: 5820619 - DNA, 25 bp, Homo sapien
tgtgtcaaacagagtacatttttgc

SEQ ID NO: 5820620 - DNA, 25 bp, Homo sapien
gggagccccgggacggcagcccctg

SEQ ID NO: 5820621 - DNA, 25 bp, Homo sapien
ttccactggagtcttgtttgtcaag

SEQ ID NO: 5820622 - DNA, 25 bp, Homo sapien
caggaggatcatttgagcccagggg

SEQ ID NO: 5820623 - DNA, 25 bp, Homo sapien
cgactcacgcccactggtgcgaccc

SEQ ID NO: 5820624 - DNA, 25 bp, Homo sapien
accgtcagtgtgaccaaatcagggc

SEQ ID NO: 5820625 - DNA, 25 bp, Homo sapien
ggagcccgggaagagcccgtggatg

SEQ ID NO: 5820626 - DNA, 25 bp, Homo sapien
caagaaacagagctgtcagtcagtg

SEQ ID NO: 5820627 - DNA, 25 bp, Homo sapien
caacaaacggcaaggaggtggtttc

SEQ ID NO: 5820628 - DNA, 25 bp, Homo sapien
agctgcgaactgtatccggattgga

SEQ ID NO: 5820629 - DNA, 25 bp, Homo sapien
atgaaccaatgaataacatcaccac

SEQ ID NO: 5820630 - DNA, 25 bp, Homo sapien
agcccagaagctgcgaactgtatcc

SEQ ID NO: 5820631 - DNA, 25 bp, Homo sapien
gagtcttgtttgtcaagtttggccc

SEQ ID NO: 5820632 - DNA, 25 bp, Homo sapien
tgcggtaaatagaagtcattgcccc

SEQ ID NO: 5820633 - DNA, 25 bp, Homo sapien
gttatgtctgttaatactgcagaag

SEQ ID NO: 5820634 - DNA, 25 bp, Homo sapien
ggtaccaaaacacgttctcaagaag

SEQ ID NO: 5820635 - DNA, 25 bp, Homo sapien
agtgttctcagttcgccattccttc

SEQ ID NO: 5820636 - DNA, 25 bp, Homo sapien
agatttattggcaaccgcaccgtct

SEQ ID NO: 5820637 - DNA, 25 bp, Homo sapien
tatacctgcagccattgcactcgtg

SEQ ID NO: 5820638 - DNA, 25 bp, Homo sapien
atcagatcacagctgccttcactat

SEQ ID NO: 5820639 - DNA, 25 bp, Homo sapien
ctgttctcggagtccgacccagggc

SEQ ID NO: 5820640 - DNA, 25 bp, Homo sapien
tggcagatcctataaataaaaatca

SEQ ID NO: 5820641 - DNA, 25 bp, Homo sapien
acactctaggaaggccgaggcagga

SEQ ID NO: 5820642 - DNA, 25 bp, Homo sapien
acagagctgtcagtcagtgctgaat

SEQ ID NO: 5820643 - DNA, 25 bp, Homo sapien
cgccaccgccgccgccgagggagcc

SEQ ID NO: 5820644 - DNA, 25 bp, Homo sapien
ttggatgaaaactttaagtctgatc

SEQ ID NO: 5820645 - DNA, 25 bp, Homo sapien
gccattccttccctgtgccactatg

SEQ ID NO: 5820646 - DNA, 25 bp, Homo sapien
cctgtgtcaaacagagtacattttt

SEQ ID NO: 5820647 - DNA, 25 bp, Homo sapien
ttgcccctaatgtattcaatcatct

SEQ ID NO: 5820648 - DNA, 25 bp, Homo sapien
gcgagcgccagcggccgggacgagg

SEQ ID NO: 5820649 - DNA, 25 bp, Homo sapien
tccaggatactcagatgagtatgaa

SEQ ID NO: 5820650 - DNA, 25 bp, Homo sapien
agcaggttagagggacaaagagctt

SEQ ID NO: 5820651 - DNA, 25 bp, Homo sapien
tcccatgattctgatgaggctgaaa

SEQ ID NO: 5820652 - DNA, 25 bp, Homo sapien
tgaggctgaaactgccaaactgtga

SEQ ID NO: 5820653 - DNA, 25 bp, Homo sapien
aaactgtgtccttcgttatgtctgt

SEQ ID NO: 5820654 - DNA, 25 bp, Homo sapien
gaattcctgagtcagttaactgttc

SEQ ID NO: 5820655 - DNA, 25 bp, Homo sapien
gcgacccggacagcctgggactgac

SEQ ID NO: 5820656 - DNA, 25 bp, Homo sapien
atctcaagtgaactcaacaaagatt

SEQ ID NO: 5820657 - DNA, 25 bp, Homo sapien
gggaaatagaaaatcagatcacagc

SEQ ID NO: 5820658 - DNA, 25 bp, Homo sapien
ccccggcgtcctgcgagcgccagcg

SEQ ID NO: 5820659 - DNA, 25 bp, Homo sapien
aagaaaatggacagtatttgcttga

SEQ ID NO: 5820660 - DNA, 25 bp, Homo sapien
ggcgaggctgcagccagagggctgg

SEQ ID NO: 5820661 - DNA, 25 bp, Homo sapien
gcgtggagagctggagcagccgcca

SEQ ID NO: 5820662 - DNA, 25 bp, Homo sapien
agatggattctgtcagccatacaga

SEQ ID NO: 5820663 - DNA, 25 bp, Homo sapien
gcccctaatgtattcaatcatcttt

SEQ ID NO: 5820664 - DNA, 25 bp, Homo sapien
gaagcatataggtatctagtaagaa

SEQ ID NO: 5820665 - DNA, 25 bp, Homo sapien
ccgcacgcggggctgctgcccaaga

SEQ ID NO: 5820666 - DNA, 25 bp, Homo sapien
agattcttacctgacccttgatgaa

SEQ ID NO: 5820667 - DNA, 25 bp, Homo sapien
ccactggtgcgacccggacagcctg

SEQ ID NO: 5820668 - DNA, 25 bp, Homo sapien
caactgcctttatacctgcagccat

SEQ ID NO: 5820669 - DNA, 25 bp, Homo sapien
atacagagggattgcatgtgcaaga

SEQ ID NO: 5820670 - DNA, 25 bp, Homo sapien
caagtgaactcaacaaagattctta

SEQ ID NO: 5820671 - DNA, 25 bp, Homo sapien
gggatcgcgctcgcggcatccagag

SEQ ID NO: 5820672 - DNA, 25 bp, Homo sapien
gcgccgccgcgggacgcgcccgccg

SEQ ID NO: 5820673 - DNA, 25 bp, Homo sapien
ctgtgggtaaactgtgtccttcgtt

SEQ ID NO: 5820674 - DNA, 25 bp, Homo sapien
tcgcgatgaatgtgaaatcctggag

SEQ ID NO: 5820675 - DNA, 25 bp, Homo sapien
gaccttttcagcaaaaaaaggaata

SEQ ID NO: 5820676 - DNA, 25 bp, Homo sapien
tcacttatctgataagtgttctcag

SEQ ID NO: 5820677 - DNA, 25 bp, Homo sapien
gacccggacagcctgggactgaccc

SEQ ID NO: 5820678 - DNA, 25 bp, Homo sapien
tcttacctgacccttgatgaaccaa

SEQ ID NO: 5820679 - DNA, 25 bp, Homo sapien
gccgcaacccagggaatcaaaagga

SEQ ID NO: 5820680 - DNA, 25 bp, Homo sapien
cactgcaaagtctctgggaatccac

SEQ ID NO: 5820681 - DNA, 25 bp, Homo sapien
cgcgctgctgctggccgcacgcggg

SEQ ID NO: 5820682 - DNA, 25 bp, Homo sapien
aaatagaagtcattgcccctaatgt

SEQ ID NO: 5820683 - DNA, 25 bp, Homo sapien
tgcagccagagggctgggaagggat

SEQ ID NO: 5820684 - DNA, 25 bp, Homo sapien
ctgcggattagaaacctcgacacca

SEQ ID NO: 5820685 - DNA, 25 bp, Homo sapien
cgccgagggagccccgggacggcag

SEQ ID NO: 5820686 - DNA, 25 bp, Homo sapien
tttgcttgatctcaatctggtttta

SEQ ID NO: 5820687 - DNA, 25 bp, Homo sapien
accgggggaccgtcagtgtgaccaa

SEQ ID NO: 5820688 - DNA, 25 bp, Homo sapien
tagaaaaagatgttacccagaatgg

SEQ ID NO: 5820689 - DNA, 25 bp, Homo sapien
tcgcggcatccagaggcggccaggc

SEQ ID NO: 5820690 - DNA, 25 bp, Homo sapien
cccagcccttcagaggcacagttga

SEQ ID NO: 5820691 - DNA, 25 bp, Homo sapien
aaaacacgttctcaagaagtcaact

SEQ ID NO: 5820692 - DNA, 25 bp, Homo sapien
tttcccagagctgaatggaggccat

SEQ ID NO: 5820693 - DNA, 25 bp, Homo sapien
tctacataaaacacctcgtaaggta

SEQ ID NO: 5820694 - DNA, 25 bp, Homo sapien
acgcggggctgctgcccaagaaaca

SEQ ID NO: 5820695 - DNA, 25 bp, Homo sapien
tgtgaccaaatcagggcgccagtgc

SEQ ID NO: 5820696 - DNA, 25 bp, Homo sapien
catataggtatctagtaagaaaatg

SEQ ID NO: 5820697 - DNA, 25 bp, Homo sapien
cagcccttcagaggcacagttgaga

SEQ ID NO: 5820698 - DNA, 25 bp, Homo sapien
gtgcttcaccttggatgaaaacttt

SEQ ID NO: 5820699 - DNA, 25 bp, Homo sapien
aagaacaccacaaggcaggatgaat

SEQ ID NO: 5820700 - DNA, 25 bp, Homo sapien
cctcagcgagaggaggaatgcaccg

SEQ ID NO: 5820701 - DNA, 25 bp, Homo sapien
gcgtccaagtggaccttttcagcaa

SEQ ID NO: 5820702 - DNA, 25 bp, Homo sapien
cgccagtgccagccatggaattccc

SEQ ID NO: 5820703 - DNA, 25 bp, Homo sapien
cggacagcctgggactgacccgccg

SEQ ID NO: 5820704 - DNA, 25 bp, Homo sapien
tcaccacgtctctgggccagacagc

SEQ ID NO: 5820705 - DNA, 25 bp, Homo sapien
cgaggagagagggagcgtggagagc

SEQ ID NO: 5820706 - DNA, 25 bp, Homo sapien
gcctgggactgacccgccggcccag

SEQ ID NO: 5820707 - DNA, 25 bp, Homo sapien
tctaggaaggccgaggcaggaggat

SEQ ID NO: 5820708 - DNA, 25 bp, Homo sapien
ccctaatgtattcaatcatctttaa

SEQ ID NO: 5820709 - DNA, 25 bp, Homo sapien
atgaataacatcaccacgtctctgg

SEQ ID NO: 5820710 - DNA, 25 bp, Homo sapien
gccccgggacggcagcccctgggcg

SEQ ID NO: 5820711 - DNA, 25 bp, Homo sapien
gaaaatgggccaagcatggtggctt

SEQ ID NO: 5820712 - DNA, 25 bp, Homo sapien
aatcagggcgccagtgccagccatg

SEQ ID NO: 5820713 - DNA, 25 bp, Homo sapien
caacactctaggaaggccgaggcag

SEQ ID NO: 5820714 - DNA, 25 bp, Homo sapien
gctgcagccagagggctgggaaggg

SEQ ID NO: 5820715 - DNA, 25 bp, Homo sapien
ggccgcgccgccgcgggacgcgccc

SEQ ID NO: 5820716 - DNA, 25 bp, Homo sapien
cggtaaatagaagtcattgccccta

SEQ ID NO: 5820717 - DNA, 25 bp, Homo sapien
actttaagtctgatctgtgtgacat

SEQ ID NO: 5820718 - DNA, 25 bp, Homo sapien
agagctgaatggaggccattcctac

SEQ ID NO: 5820719 - DNA, 25 bp, Homo sapien
cccagaagctgcgaactgtatccgg

SEQ ID NO: 5820720 - DNA, 25 bp, Homo sapien
ttcccatggcagatcctataaataa

SEQ ID NO: 5820721 - DNA, 25 bp, Homo sapien
aggatgaatctacaaccattactcg

SEQ ID NO: 5820722 - DNA, 25 bp, Homo sapien
gtgcgacccggacagcctgggactg

SEQ ID NO: 5820723 - DNA, 25 bp, Homo sapien
taaagatccctatcctacccctctt

SEQ ID NO: 5820724 - DNA, 25 bp, Homo sapien
taggagaatcctataagggggacaa

SEQ ID NO: 5820725 - DNA, 25 bp, Homo sapien
atgtcctgtgtcaaacagagtacat

SEQ ID NO: 5820726 - DNA, 25 bp, Homo sapien
gtctgcgtccaagtggaccttttca

SEQ ID NO: 5820727 - DNA, 25 bp, Homo sapien
tcgtaaggtaccaaaacacgttctc

SEQ ID NO: 5820728 - DNA, 25 bp, Homo sapien
ggacggcagcccctgggcgcagggt

SEQ ID NO: 5820729 - DNA, 25 bp, Homo sapien
cttgcggtaaatagaagtcattgcc

SEQ ID NO: 5820730 - DNA, 25 bp, Homo sapien
tccaggagccccggaggctctcctt

SEQ ID NO: 5820731 - DNA, 25 bp, Homo sapien
gaatgtcctgtgtcaaacagagtac

SEQ ID NO: 5820732 - DNA, 25 bp, Homo sapien
ctggccgcacgcggggctgctgccc

SEQ ID NO: 5820733 - DNA, 25 bp, Homo sapien
gtcctgtgtcaaacagagtacattt

SEQ ID NO: 5820734 - DNA, 25 bp, Homo sapien
ttgttttctgtatgccttaagaaca

SEQ ID NO: 5820735 - DNA, 25 bp, Homo sapien
atagtgagactccatctctaccaaa

SEQ ID NO: 5820736 - DNA, 25 bp, Homo sapien
agggaatcaaaaggaagctccctgg

SEQ ID NO: 5820737 - DNA, 25 bp, Homo sapien
aagaaattgttttctgtatgcctta

SEQ ID NO: 5820738 - DNA, 25 bp, Homo sapien
cccaacactctaggaaggccgaggc

SEQ ID NO: 5820739 - DNA, 25 bp, Homo sapien
tgcgatgaaacttcatccgtcccaa

SEQ ID NO: 5820740 - DNA, 25 bp, Homo sapien
accaatgaataacatcaccacgtct

SEQ ID NO: 5820741 - DNA, 25 bp, Homo sapien
aaaaaaaggaatattggaagcagga

SEQ ID NO: 5820742 - DNA, 25 bp, Homo sapien
gtggtttcttccactggagtcttgt

SEQ ID NO: 5820743 - DNA, 25 bp, Homo sapien
agggcgccagtgccagccatggaat

SEQ ID NO: 5820744 - DNA, 25 bp, Homo sapien
caacaaagattcttacctgaccctt

SEQ ID NO: 5820745 - DNA, 25 bp, Homo sapien
agaagaagcatataggtatctagta

SEQ ID NO: 5820746 - DNA, 25 bp, Homo sapien
aagctccctggtgcttcaccttgga

SEQ ID NO: 5820747 - DNA, 25 bp, Homo sapien
gaggcgagggagcaggttagaggga

SEQ ID NO: 5820748 - DNA, 25 bp, Homo sapien
cacagttgagacagtttatcacatt

SEQ ID NO: 5820749 - DNA, 25 bp, Homo sapien
aattcccatggcagatcctataaat

SEQ ID NO: 5820750 - DNA, 25 bp, Homo sapien
tctgtatgccttaagaacaccacaa

SEQ ID NO: 5820751 - DNA, 25 bp, Homo sapien
cacgttctcaagaagtcaactgcct

SEQ ID NO: 5820752 - DNA, 25 bp, Homo sapien
cagttaactgttcctttttctagaa

SEQ ID NO: 5820753 - DNA, 25 bp, Homo sapien
gaaattgttttctgtatgccttaag

SEQ ID NO: 5820754 - DNA, 25 bp, Homo sapien
tgttcctttttctagaaaatgtttg

SEQ ID NO: 5820755 - DNA, 25 bp, Homo sapien
gaggcacagttgagacagtttatca

SEQ ID NO: 5820756 - DNA, 25 bp, Homo sapien
tgggaatccacctcccaccatccgc

SEQ ID NO: 5820757 - DNA, 25 bp, Homo sapien
cacaggtgtggactaccgggggacc

SEQ ID NO: 5820758 - DNA, 25 bp, Homo sapien
tcccccagccagagagcccagaagc

SEQ ID NO: 5820759 - DNA, 25 bp, Homo sapien
cttgtgtcgcgatgaatgtgaaatc

SEQ ID NO: 5820760 - DNA, 25 bp, Homo sapien
aaaagatgttacccagaatggtctg

SEQ ID NO: 5820761 - DNA, 25 bp, Homo sapien
taatcccaacactctaggaaggccg

SEQ ID NO: 5820762 - DNA, 25 bp, Homo sapien
actcgtggatgtaacagggacccag

SEQ ID NO: 5820763 - DNA, 25 bp, Homo sapien
gacaaagaaaatggacagtatttgc

SEQ ID NO: 5820764 - DNA, 25 bp, Homo sapien
tctatatggagtctttgcacatgca

SEQ ID NO: 5820765 - DNA, 25 bp, Homo sapien
aataaaaatcacaagtgttataaca

SEQ ID NO: 5820766 - DNA, 25 bp, Homo sapien
gccagagggctgggaagggatcgcg

SEQ ID NO: 5820767 - DNA, 25 bp, Homo sapien
tgcatgtgcaagatttattggcaac

SEQ ID NO: 5820768 - DNA, 25 bp, Homo sapien
tgtgaagatctcccccagccagaga

SEQ ID NO: 5820769 - DNA, 25 bp, Homo sapien
aggctgcagccagagggctgggaag

SEQ ID NO: 5820770 - DNA, 25 bp, Homo sapien
cacctcccaccatccgctggttcaa

SEQ ID NO: 5820771 - DNA, 25 bp, Homo sapien
tgccaaactgtgaagatctccccca

SEQ ID NO: 5820772 - DNA, 25 bp, Homo sapien
ccagagctgaatggaggccattcct

SEQ ID NO: 5820773 - DNA, 25 bp, Homo sapien
gagccgccgccgccgccgcctcagc

SEQ ID NO: 5820774 - DNA, 25 bp, Homo sapien
ttcaccttggatgaaaactttaagt

SEQ ID NO: 5820775 - DNA, 25 bp, Homo sapien
cgccgccgccgagggagccccggga

SEQ ID NO: 5820776 - DNA, 25 bp, Homo sapien
agtccgacccagggcgactcacgcc

SEQ ID NO: 5820777 - DNA, 25 bp, Homo sapien
ggaggccattcctactgccgcaacc

SEQ ID NO: 5820778 - DNA, 25 bp, Homo sapien
accacgtctctgggccagacagcag

SEQ ID NO: 5820779 - DNA, 25 bp, Homo sapien
ttggaattcccatggcagatcctat

SEQ ID NO: 5820780 - DNA, 25 bp, Homo sapien
gaggaatgcaccggccgcgccgccg

SEQ ID NO: 5820781 - DNA, 25 bp, Homo sapien
cggcctgggagccgccgccgccgcc

SEQ ID NO: 5820782 - DNA, 25 bp, Homo sapien
cgccgcgggacgcgcccgccgctcc

SEQ ID NO: 5820783 - DNA, 25 bp, Homo sapien
agctttgcagacgtccccggcgtcc

SEQ ID NO: 5820784 - DNA, 25 bp, Homo sapien
atgaaacttcatccgtcccaaagcc

SEQ ID NO: 5820785 - DNA, 25 bp, Homo sapien
aaatggacagtatttgcttgatctc

SEQ ID NO: 5820786 - DNA, 25 bp, Homo sapien
caagatcaaatcccatgattctgat

SEQ ID NO: 5820787 - DNA, 25 bp, Homo sapien
gtaaatagaagtcattgcccctaat

SEQ ID NO: 5820788 - DNA, 25 bp, Homo sapien
ttgccgtttctacataaaacacctc

SEQ ID NO: 5820789 - DNA, 25 bp, Homo sapien
agcccgggaagagcccgtggatgtt

SEQ ID NO: 5820790 - DNA, 25 bp, Homo sapien
tcagggcgccagtgccagccatgga

SEQ ID NO: 5820791 - DNA, 25 bp, Homo sapien
gtccaagtggaccttttcagcaaaa

SEQ ID NO: 5820792 - DNA, 25 bp, Homo sapien
atgttctgcgcgcggcctgggagcc

SEQ ID NO: 5820793 - DNA, 25 bp, Homo sapien
actccatctctaccaaaaaaaagaa

SEQ ID NO: 5820794 - DNA, 25 bp, Homo sapien
atccagggcaatctgtgggtaaact

SEQ ID NO: 5820795 - DNA, 25 bp, Homo sapien
ggaattcccatggcagatcctataa

SEQ ID NO: 5820796 - DNA, 25 bp, Homo sapien
aatgtgaaatcctggagaatgtcct

SEQ ID NO: 5820797 - DNA, 25 bp, Homo sapien
cgcgcggcctgggagccgccgccgc

SEQ ID NO: 5820798 - DNA, 25 bp, Homo sapien
atgaaaactttaagtctgatctgtg

SEQ ID NO: 5820799 - DNA, 25 bp, Homo sapien
gggctgggaagggatcgcgctcgcg

SEQ ID NO: 5820800 - DNA, 25 bp, Homo sapien
tgcctttatacctgcagccattgca

SEQ ID NO: 5820801 - DNA, 25 bp, Homo sapien
tgcaccggccgcgccgccgcgggac

SEQ ID NO: 5820802 - DNA, 25 bp, Homo sapien
aatccacctcccaccatccgctggt

SEQ ID NO: 5820803 - DNA, 25 bp, Homo sapien
catgtgcaagatttattggcaaccg

SEQ ID NO: 5820804 - DNA, 25 bp, Homo sapien
caagatttattggcaaccgcaccgt

SEQ ID NO: 5820805 - DNA, 25 bp, Homo sapien
agctggagcagccgccaccgccgcc

SEQ ID NO: 5820806 - DNA, 25 bp, Homo sapien
ctggagcagccgccaccgccgccgc

SEQ ID NO: 5820807 - DNA, 25 bp, Homo sapien
gttttctgtatgccttaagaacacc

SEQ ID NO: 5820808 - DNA, 25 bp, Homo sapien
tgcccaagaaacagagctgtcagtc

SEQ ID NO: 5820809 - DNA, 25 bp, Homo sapien
agcatataggtatctagtaagaaaa

SEQ ID NO: 5820810 - DNA, 25 bp, Homo sapien
cgcgcccgccgctcctggcgctgct

SEQ ID NO: 5820811 - DNA, 25 bp, Homo sapien
caggcaacatagtgagactccatct

SEQ ID NO: 5820812 - DNA, 25 bp, Homo sapien
tcatttgagcccaggggttcaagac

SEQ ID NO: 5820813 - DNA, 25 bp, Homo sapien
aaagagctttgcagacgtccccggc

SEQ ID NO: 5820814 - DNA, 25 bp, Homo sapien
caggcgaggctgcagccagagggct

SEQ ID NO: 5820815 - DNA, 25 bp, Homo sapien
gcgatgaatgtgaaatcctggagaa

SEQ ID NO: 5820816 - DNA, 25 bp, Homo sapien
aaagattcttacctgacccttgatg

SEQ ID NO: 5820817 - DNA, 25 bp, Homo sapien
gatgttacccagaatggtctgcgtc

SEQ ID NO: 5820818 - DNA, 25 bp, Homo sapien
taactgttcctttttctagaaaatg

SEQ ID NO: 5820819 - DNA, 25 bp, Homo sapien
gttctcggagtccgacccagggcga

SEQ ID NO: 5820820 - DNA, 25 bp, Homo sapien
tagaaaatcagatcacagctgcctt

SEQ ID NO: 5820821 - DNA, 25 bp, Homo sapien
taagaaaatggaattcctgagtcag

SEQ ID NO: 5820822 - DNA, 25 bp, Homo sapien
ccgtactgcgatgaaacttcatccg

SEQ ID NO: 5820823 - DNA, 25 bp, Homo sapien
ctgatgaggctgaaactgccaaact

SEQ ID NO: 5820824 - DNA, 25 bp, Homo sapien
agtcacttatctgataagtgttctc

SEQ ID NO: 5820825 - DNA, 25 bp, Homo sapien
aagtttggcccccctcccactgcaa

SEQ ID NO: 5820826 - DNA, 25 bp, Homo sapien
taccaaaacacgttctcaagaagtc

SEQ ID NO: 5820827 - DNA, 25 bp, Homo sapien
cgacccagggcgactcacgcccact

SEQ ID NO: 5820828 - DNA, 25 bp, Homo sapien
tcctgtggtccaggagccccggagg

SEQ ID NO: 5820829 - DNA, 25 bp, Homo sapien
aaagtctctgggaatccacctccca

SEQ ID NO: 5820830 - DNA, 25 bp, Homo sapien
ctggcgctgctggccgcgctgctgc

SEQ ID NO: 5820831 - DNA, 25 bp, Homo sapien
ttactcggtcatccagggcaatctg

SEQ ID NO: 5820832 - DNA, 25 bp, Homo sapien
ctgccttcactatgattggcacttc

SEQ ID NO: 5820833 - DNA, 25 bp, Homo sapien
tcagccatacagagggattgcatgt

SEQ ID NO: 5820834 - DNA, 25 bp, Homo sapien
tatgaagaagatggattctgtcagc

SEQ ID NO: 5820835 - DNA, 25 bp, Homo sapien
gacccttgatgaaccaatgaataac

SEQ ID NO: 5820836 - DNA, 25 bp, Homo sapien
ttccctgtgccactatgccttcccg

SEQ ID NO: 5820837 - DNA, 25 bp, Homo sapien
gttcgccattccttccctgtgccac

SEQ ID NO: 5820838 - DNA, 25 bp, Homo sapien
atctgtgtgacatcccagcttgcgg

SEQ ID NO: 5820839 - DNA, 25 bp, Homo sapien
gcggcatccagaggcggccaggcgg

SEQ ID NO: 5820840 - DNA, 25 bp, Homo sapien
acacacacactttcaccgcccttcg

SEQ ID NO: 5820841 - DNA, 25 bp, Homo sapien
agcccaggcaacatagtgagactcc

SEQ ID NO: 5820842 - DNA, 25 bp, Homo sapien
cggattggaattcccatggcagatc

SEQ ID NO: 5820843 - DNA, 25 bp, Homo sapien
gactaccgggggaccgtcagtgtga

SEQ ID NO: 5820844 - DNA, 25 bp, Homo sapien
tactgccgcaacccagggaatcaaa

SEQ ID NO: 5820845 - DNA, 25 bp, Homo sapien
caggaagaaattgttttctgtatgc

SEQ ID NO: 5820846 - DNA, 25 bp, Homo sapien
cctcatcatggaacatctcaagtga

SEQ ID NO: 5820847 - DNA, 25 bp, Homo sapien
tgatctcaatctggttttagggtaa

SEQ ID NO: 5820848 - DNA, 25 bp, Homo sapien
aatgcaccggccgcgccgccgcggg

SEQ ID NO: 5820849 - DNA, 25 bp, Homo sapien
aatggaattcctgagtcagttaact

SEQ ID NO: 5820850 - DNA, 25 bp, Homo sapien
tggccgcgctgctgctggccgcacg

SEQ ID NO: 5820851 - DNA, 25 bp, Homo sapien
ggaggtggtttcttccactggagtc

SEQ ID NO: 5820852 - DNA, 25 bp, Homo sapien
ctgggagccgccgccgccgccgcct

SEQ ID NO: 5820853 - DNA, 25 bp, Homo sapien
gccgcctcagcgagaggaggaatgc

SEQ ID NO: 5820854 - DNA, 25 bp, Homo sapien
caaagaaaatggacagtatttgctt

SEQ ID NO: 5820855 - DNA, 25 bp, Homo sapien
cagccattgcactcgtggatgtaac

SEQ ID NO: 5820856 - DNA, 25 bp, Homo sapien
gctgaattagtgcctacctcatcat

SEQ ID NO: 5820857 - DNA, 25 bp, Homo sapien
gtgttataacagcacaggtgtggac

SEQ ID NO: 5820858 - DNA, 25 bp, Homo sapien
actgcaagtccaggatactcagatg

SEQ ID NO: 5820859 - DNA, 25 bp, Homo sapien
tctttaaagatccctatcctacccc

SEQ ID NO: 5820860 - DNA, 25 bp, Homo sapien
agatcaaatcccatgattctgatga

SEQ ID NO: 5820861 - DNA, 25 bp, Homo sapien
ggatgaaaactttaagtctgatctg

SEQ ID NO: 5820862 - DNA, 25 bp, Homo sapien
cctcccactgcaagtccaggatact

SEQ ID NO: 5820863 - DNA, 25 bp, Homo sapien
aattgttttctgtatgccttaagaa

SEQ ID NO: 5820864 - DNA, 25 bp, Homo sapien
gagggagcgtggagagctggagcag

SEQ ID NO: 5820865 - DNA, 25 bp, Homo sapien
gacagcctgggactgacccgccggc

SEQ ID NO: 5820866 - DNA, 25 bp, Homo sapien
acccctcttatttaggagaatccta

SEQ ID NO: 5820867 - DNA, 25 bp, Homo sapien
tatgccttaagaacaccacaaggca

SEQ ID NO: 5820868 - DNA, 25 bp, Homo sapien
agacacaggctacttccagtgcgtg

SEQ ID NO: 5820869 - DNA, 25 bp, Homo sapien
cccatggcagatcctataaataaaa

SEQ ID NO: 5820870 - DNA, 25 bp, Homo sapien
ctgggactgacccgccggcccaggc

SEQ ID NO: 5820871 - DNA, 25 bp, Homo sapien
tactgcagaagaagcatataggtat

SEQ ID NO: 5820872 - DNA, 25 bp, Homo sapien
gcggattagaaacctcgacaccaca

SEQ ID NO: 5820873 - DNA, 25 bp, Homo sapien
ccaaaacacgttctcaagaagtcaa

SEQ ID NO: 5820874 - DNA, 25 bp, Homo sapien
ggacagtatttgcttgatctcaatc

SEQ ID NO: 5820875 - DNA, 25 bp, Homo sapien
atgctcctgtggtccaggagccccg

SEQ ID NO: 5820876 - DNA, 25 bp, Homo sapien
atctgtgggtaaactgtgtccttcg

SEQ ID NO: 5820877 - DNA, 25 bp, Homo sapien
agggcaatctgtgggtaaactgtgt

SEQ ID NO: 5820878 - DNA, 25 bp, Homo sapien
ctttcaccgcccttcgtttcccaga

SEQ ID NO: 5820879 - DNA, 25 bp, Homo sapien
ctcagttcgccattccttccctgtg

SEQ ID NO: 5820880 - DNA, 25 bp, Homo sapien
tgcctacctcatcatggaacatctc

SEQ ID NO: 5820881 - DNA, 25 bp, Homo sapien
acagagtacatttttgcaagatcaa

SEQ ID NO: 5820882 - DNA, 25 bp, Homo sapien
gctcctggcgctgctggccgcgctg

SEQ ID NO: 5820883 - DNA, 25 bp, Homo sapien
tgtcgcgatgaatgtgaaatcctgg

SEQ ID NO: 5820884 - DNA, 25 bp, Homo sapien
gccgccgcgggacgcgcccgccgct

SEQ ID NO: 5820885 - DNA, 25 bp, Homo sapien
acgtccccggcgtcctgcgagcgcc

SEQ ID NO: 5820886 - DNA, 25 bp, Homo sapien
atttattggcaaccgcaccgtctat

SEQ ID NO: 5820887 - DNA, 25 bp, Homo sapien
acaaagagctttgcagacgtccccg

SEQ ID NO: 5820888 - DNA, 25 bp, Homo sapien
catccgctggttcaaaaatgatgct

SEQ ID NO: 5820889 - DNA, 25 bp, Homo sapien
aaaatggaattcctgagtcagttaa

SEQ ID NO: 5820890 - DNA, 25 bp, Homo sapien
tatgtctgttaatactgcagaagaa

SEQ ID NO: 5820891 - DNA, 25 bp, Homo sapien
actcggtcatccagggcaatctgtg

SEQ ID NO: 5820892 - DNA, 25 bp, Homo sapien
ataacatcaccacgtctctgggcca

SEQ ID NO: 5820893 - DNA, 25 bp, Homo sapien
tgcgctgttctcggagtccgaccca

SEQ ID NO: 5820894 - DNA, 25 bp, Homo sapien
tttttatagaaaaagatgttaccca

SEQ ID NO: 5820895 - DNA, 25 bp, Homo sapien
cgtcagtgtgaccaaatcagggcgc

SEQ ID NO: 5820896 - DNA, 25 bp, Homo sapien
gctggccgcgctgctgctggccgca

SEQ ID NO: 5820897 - DNA, 25 bp, Homo sapien
gcgtggcaacaaacggcaaggaggt

SEQ ID NO: 5820898 - DNA, 25 bp, Homo sapien
aactcaacaaagattcttacctgac

SEQ ID NO: 5820899 - DNA, 25 bp, Homo sapien
ggtcatccagggcaatctgtgggta

SEQ ID NO: 5820900 - DNA, 25 bp, Homo sapien
agggattgcatgtgcaagatttatt

SEQ ID NO: 5820901 - DNA, 25 bp, Homo sapien
ccagcccaggcaacatagtgagact

SEQ ID NO: 5820902 - DNA, 25 bp, Homo sapien
tataacagcacaggtgtggactacc

SEQ ID NO: 5820903 - DNA, 25 bp, Homo sapien
ttaatactgcagaagaagcatatag

SEQ ID NO: 5820904 - DNA, 25 bp, Homo sapien
tggaacatctcaagtgaactcaaca

SEQ ID NO: 5820905 - DNA, 25 bp, Homo sapien
cgggggaccgtcagtgtgaccaaat

SEQ ID NO: 5820906 - DNA, 25 bp, Homo sapien
tgtatgccttaagaacaccacaagg

SEQ ID NO: 5820907 - DNA, 25 bp, Homo sapien
gcacgcggggctgctgcccaagaaa

SEQ ID NO: 5820908 - DNA, 25 bp, Homo sapien
ggctgctgcccaagaaacagagctg

SEQ ID NO: 5820909 - DNA, 25 bp, Homo sapien
tcatccagggcaatctgtgggtaaa

SEQ ID NO: 5820910 - DNA, 25 bp, Homo sapien
agcttgcggtaaatagaagtcattg

SEQ ID NO: 5820911 - DNA, 25 bp, Homo sapien
ataggtatctagtaagaaaatggaa

SEQ ID NO: 5820912 - DNA, 25 bp, Homo sapien
gctctcggctgcggattagaaacct

SEQ ID NO: 5820913 - DNA, 25 bp, Homo sapien
tactcagatgagtatgaagaagatg

SEQ ID NO: 5820914 - DNA, 25 bp, Homo sapien
cagatcacagctgccttcactatga

SEQ ID NO: 5820915 - DNA, 25 bp, Homo sapien
cacgtctctgggccagacagcagaa

SEQ ID NO: 5820916 - DNA, 25 bp, Homo sapien
ccctgggcgcagggtgcgctgttct

SEQ ID NO: 5820917 - DNA, 25 bp, Homo sapien
ccgctcctggcgctgctggccgcgc

SEQ ID NO: 5820918 - DNA, 25 bp, Homo sapien
agtgagactccatctctaccaaaaa

SEQ ID NO: 5820919 - DNA, 25 bp, Homo sapien
acttcatccgtcccaaagccccgtg

SEQ ID NO: 5820920 - DNA, 25 bp, Homo sapien
ggcggaggcgagggagcaggttaga

SEQ ID NO: 5820921 - DNA, 25 bp, Homo sapien
tcctacccctcttatttaggagaat

SEQ ID NO: 5820922 - DNA, 25 bp, Homo sapien
ggagccccggaggctctcctttcgg

SEQ ID NO: 5820923 - DNA, 25 bp, Homo sapien
tacttccagtgcgtggcaacaaacg

SEQ ID NO: 5820924 - DNA, 25 bp, Homo sapien
ccgaggcaggaggatcatttgagcc

SEQ ID NO: 5820925 - DNA, 25 bp, Homo sapien
acccagggaatcaaaaggaagctcc

SEQ ID NO: 5820926 - DNA, 25 bp, Homo sapien
atcctataaataaaaatcacaagtg

SEQ ID NO: 5820927 - DNA, 25 bp, Homo sapien
ttctcaagaagtcaactgcctttat

SEQ ID NO: 5820928 - DNA, 25 bp, Homo sapien
ttagagggacaaagagctttgcaga

SEQ ID NO: 5820929 - DNA, 25 bp, Homo sapien
taatgaaaatgggccaagcatggtg

SEQ ID NO: 5820930 - DNA, 25 bp, Homo sapien
gaagatggattctgtcagccataca

SEQ ID NO: 5820931 - DNA, 25 bp, Homo sapien
tgaatgtgaaatcctggagaatgtc

SEQ ID NO: 5820932 - DNA, 25 bp, Homo sapien
ttcctactgccgcaacccagggaat

SEQ ID NO: 5820933 - DNA, 25 bp, Homo sapien
ggcgagggagcaggttagagggaca

SEQ ID NO: 5820934 - DNA, 25 bp, Homo sapien
gttataacagcacaggtgtggacta

SEQ ID NO: 5820935 - DNA, 25 bp, Homo sapien
actgtgaagatctcccccagccaga

SEQ ID NO: 5820936 - DNA, 25 bp, Homo sapien
ctgcgagcgccagcggccgggacga

SEQ ID NO: 5820937 - DNA, 25 bp, Homo sapien
ctgctggccgcgctgctgctggccg

SEQ ID NO: 5820938 - DNA, 25 bp, Homo sapien
accacaaggcaggatgaatctacaa

SEQ ID NO: 5820939 - DNA, 25 bp, Homo sapien
tacctcatcatggaacatctcaagt

SEQ ID NO: 5820940 - DNA, 25 bp, Homo sapien
ctgtggtccaggagccccggaggct

SEQ ID NO: 5820941 - DNA, 25 bp, Homo sapien
tgcgcgcggcctgggagccgccgcc

SEQ ID NO: 5820942 - DNA, 25 bp, Homo sapien
tctatggctctcggctgcggattag

SEQ ID NO: 5820943 - DNA, 25 bp, Homo sapien
agagtacatttttgcaagatcaaat

SEQ ID NO: 5820944 - DNA, 25 bp, Homo sapien
gaaaaagatgttacccagaatggtc

SEQ ID NO: 5820945 - DNA, 25 bp, Homo sapien
tgtggactaccgggggaccgtcagt

SEQ ID NO: 5820946 - DNA, 25 bp, Homo sapien
ttacctgacccttgatgaaccaatg

SEQ ID NO: 5820947 - DNA, 25 bp, Homo sapien
ccaagtggaccttttcagcaaaaaa

SEQ ID NO: 5820948 - DNA, 25 bp, Homo sapien
tgcaagtccaggatactcagatgag

SEQ ID NO: 5820949 - DNA, 25 bp, Homo sapien
cgtctatatggagtctttgcacatg

SEQ ID NO: 5820950 - DNA, 25 bp, Homo sapien
attagaaacctcgacaccacagaca

SEQ ID NO: 5820951 - DNA, 25 bp, Homo sapien
agtctgatctgtgtgacatcccagc

SEQ ID NO: 5820952 - DNA, 25 bp, Homo sapien
tctcggagtccgacccagggcgact

SEQ ID NO: 5820953 - DNA, 25 bp, Homo sapien
cttcccgtactgcgatgaaacttca

SEQ ID NO: 5820954 - DNA, 25 bp, Homo sapien
gaagcaggaagaaattgttttctgt

SEQ ID NO: 5820955 - DNA, 25 bp, Homo sapien
ggcttatacctgtaatcccaacact

SEQ ID NO: 5820956 - DNA, 25 bp, Homo sapien
ggagagctggagcagccgccaccgc

SEQ ID NO: 5820957 - DNA, 25 bp, Homo sapien
ctgcgtccaagtggaccttttcagc

SEQ ID NO: 5820958 - DNA, 25 bp, Homo sapien
tatcacattgatttttatagaaaaa

SEQ ID NO: 5820959 - DNA, 25 bp, Homo sapien
ttgtttgtcaagtttggcccccctc

SEQ ID NO: 5820960 - DNA, 25 bp, Homo sapien
tctgatctgtgtgacatcccagctt

SEQ ID NO: 5820961 - DNA, 25 bp, Homo sapien
tcctggcgctgctggccgcgctgct

SEQ ID NO: 5820962 - DNA, 25 bp, Homo sapien
gctgaaactgccaaactgtgaagat

SEQ ID NO: 5820963 - DNA, 25 bp, Homo sapien
ggattgcatgtgcaagatttattgg

SEQ ID NO: 5820964 - DNA, 25 bp, Homo sapien
gctacttccagtgcgtggcaacaaa

SEQ ID NO: 5820965 - DNA, 25 bp, Homo sapien
tccgtcccaaagccccgtgacttgt

SEQ ID NO: 5820966 - DNA, 25 bp, Homo sapien
ccttggatgaaaactttaagtctga

SEQ ID NO: 5820967 - DNA, 25 bp, Homo sapien
ggcatccagaggcggccaggcggag

SEQ ID NO: 5820968 - DNA, 25 bp, Homo sapien
tgtcagccatacagagggattgcat

SEQ ID NO: 5820969 - DNA, 25 bp, Homo sapien
tgagacagtttatcacattgatttt

SEQ ID NO: 5820970 - DNA, 25 bp, Homo sapien
tctgttaatactgcagaagaagcat

SEQ ID NO: 5820971 - DNA, 25 bp, Homo sapien
ttcggtccaccatctatggctctcg

SEQ ID NO: 5820972 - DNA, 25 bp, Homo sapien
gagaatgtcctgtgtcaaacagagt

SEQ ID NO: 5820973 - DNA, 25 bp, Homo sapien
caatcatctttaaagatccctatcc

SEQ ID NO: 5820974 - DNA, 25 bp, Homo sapien
ccactgcaagtccaggatactcaga

SEQ ID NO: 5820975 - DNA, 25 bp, Homo sapien
tacaaccattactcggtcatccagg

SEQ ID NO: 5820976 - DNA, 25 bp, Homo sapien
cagtgctgaattagtgcctacctca

SEQ ID NO: 5820977 - DNA, 25 bp, Homo sapien
aaatcctggagaatgtcctgtgtca

SEQ ID NO: 5820978 - DNA, 25 bp, Homo sapien
cttgatgaaccaatgaataacatca

SEQ ID NO: 5820979 - DNA, 25 bp, Homo sapien
aagatccctatcctacccctcttat

SEQ ID NO: 5820980 - DNA, 25 bp, Homo sapien
cgctggttcaaaaatgatgctcctg

SEQ ID NO: 5820981 - DNA, 25 bp, Homo sapien
ccgccgccgccgcctcagcgagagg

SEQ ID NO: 5820982 - DNA, 25 bp, Homo sapien
actatgattggcacttccagtcact

SEQ ID NO: 5820983 - DNA, 25 bp, Homo sapien
aattagtgcctacctcatcatggaa

SEQ ID NO: 5820984 - DNA, 25 bp, Homo sapien
ttcagaggcacagttgagacagttt

SEQ ID NO: 5820985 - DNA, 25 bp, Homo sapien
gtggagagctggagcagccgccacc

SEQ ID NO: 5820986 - DNA, 25 bp, Homo sapien
gtaaactgtgtccttcgttatgtct

SEQ ID NO: 5820987 - DNA, 25 bp, Homo sapien
aagtcaactgcctttatacctgcag

SEQ ID NO: 5820988 - DNA, 25 bp, Homo sapien
gaactgtatccggattggaattccc

SEQ ID NO: 5820989 - DNA, 25 bp, Homo sapien
tctgggccagacagcagaactgcac

SEQ ID NO: 5820990 - DNA, 25 bp, Homo sapien
ctgggcgcagggtgcgctgttctcg

SEQ ID NO: 5820991 - DNA, 25 bp, Homo sapien
attggaagcaggaagaaattgtttt

SEQ ID NO: 5820992 - DNA, 25 bp, Homo sapien
ccagccatggaattcccagtatccc

SEQ ID NO: 5820993 - DNA, 25 bp, Homo sapien
tgaagatctcccccagccagagagc

SEQ ID NO: 5820994 - DNA, 25 bp, Homo sapien
tcccaaagccccgtgacttgtgtcg

SEQ ID NO: 5820995 - DNA, 25 bp, Homo sapien
tatggagtctttgcacatgcaaggg

SEQ ID NO: 5820996 - DNA, 25 bp, Homo sapien
gtcttgtttgtcaagtttggccccc

SEQ ID NO: 5820997 - DNA, 25 bp, Homo sapien
gggacccagcccttcagaggcacag

SEQ ID NO: 5820998 - DNA, 25 bp, Homo sapien
gggacgcgcccgccgctcctggcgc

SEQ ID NO: 5820999 - DNA, 25 bp, Homo sapien
gcctgggagccgccgccgccgccgc

SEQ ID NO: 5821000 - DNA, 25 bp, Homo sapien
acggcagcccctgggcgcagggtgc

SEQ ID NO: 5821001 - DNA, 25 bp, Homo sapien
gtggaccttttcagcaaaaaaagga

SEQ ID NO: 5821002 - DNA, 25 bp, Homo sapien
cgcctcagcgagaggaggaatgcac

SEQ ID NO: 5821003 - DNA, 25 bp, Homo sapien
cggcaaggaggtggtttcttccact

SEQ ID NO: 5821004 - DNA, 25 bp, Homo sapien
atgggccaagcatggtggcttatac

SEQ ID NO: 5821005 - DNA, 25 bp, Homo sapien
cctacctcatcatggaacatctcaa

SEQ ID NO: 5821006 - DNA, 25 bp, Homo sapien
gaaccaatgaataacatcaccacgt

SEQ ID NO: 5821007 - DNA, 25 bp, Homo sapien
ttcaatcatctttaaagatccctat

SEQ ID NO: 5821008 - DNA, 25 bp, Homo sapien
attcctgagtcagttaactgttcct

SEQ ID NO: 5821009 - DNA, 25 bp, Homo sapien
attggcaaccgcaccgtctatatgg

SEQ ID NO: 5821010 - DNA, 25 bp, Homo sapien
tctcccccagccagagagcccagaa

SEQ ID NO: 5821011 - DNA, 25 bp, Homo sapien
ccatacagagggattgcatgtgcaa

SEQ ID NO: 5821012 - DNA, 25 bp, Homo sapien
ttccttccctgtgccactatgcctt

SEQ ID NO: 5821013 - DNA, 25 bp, Homo sapien
ctgcaaagtctctgggaatccacct

SEQ ID NO: 5821014 - DNA, 25 bp, Homo sapien
catggtggcttatacctgtaatccc

SEQ ID NO: 5821015 - DNA, 25 bp, Homo sapien
agccccgtgacttgtgtcgcgatga

SEQ ID NO: 5821016 - DNA, 25 bp, Homo sapien
gcaaagtctctgggaatccacctcc

SEQ ID NO: 5821017 - DNA, 25 bp, Homo sapien
ggaatcaaaaggaagctccctggtg

SEQ ID NO: 5821018 - DNA, 25 bp, Homo sapien
gatcacagctgccttcactatgatt

SEQ ID NO: 5821019 - DNA, 25 bp, Homo sapien
gcgggacgcgcccgccgctcctggc

SEQ ID NO: 5821020 - DNA, 25 bp, Homo sapien
cgtcctgcgagcgccagcggccggg

SEQ ID NO: 5821021 - DNA, 25 bp, Homo sapien
ctgacccttgatgaaccaatgaata

SEQ ID NO: 5821022 - DNA, 25 bp, Homo sapien
ccgcgccgccgcgggacgcgcccgc

SEQ ID NO: 5821023 - DNA, 25 bp, Homo sapien
ctagtaagaaaatggaattcctgag

SEQ ID NO: 5821024 - DNA, 25 bp, Homo sapien
ttccagtcacttatctgataagtgt

SEQ ID NO: 5821025 - DNA, 25 bp, Homo sapien
ttgcactcgtggatgtaacagggac

SEQ ID NO: 5821026 - DNA, 25 bp, Homo sapien
tggtgcgacccggacagcctgggac

SEQ ID NO: 5821027 - DNA, 25 bp, Homo sapien
ccactggagtcttgtttgtcaagtt

SEQ ID NO: 5821028 - DNA, 25 bp, Homo sapien
aatctacaaccattactcggtcatc

SEQ ID NO: 5821029 - DNA, 25 bp, Homo sapien
caacccagggaatcaaaaggaagct

SEQ ID NO: 5821030 - DNA, 25 bp, Homo sapien
gggagcgtggagagctggagcagcc

SEQ ID NO: 5821031 - DNA, 25 bp, Homo sapien
ccggaggctctcctttcggtccacc

SEQ ID NO: 5821032 - DNA, 25 bp, Homo sapien
ggcgtcctgcgagcgccagcggccg

SEQ ID NO: 5821033 - DNA, 25 bp, Homo sapien
cccgggaagagcccgtggatgttct

SEQ ID NO: 5821034 - DNA, 25 bp, Homo sapien
gggcgcagggtgcgctgttctcgga

SEQ ID NO: 5821035 - DNA, 25 bp, Homo sapien
caaatcccatgattctgatgaggct

SEQ ID NO: 5821036 - DNA, 25 bp, Homo sapien
attcttacctgacccttgatgaacc

SEQ ID NO: 5821037 - DNA, 25 bp, Homo sapien
ggccagacagcagaactgcactgca

SEQ ID NO: 5821038 - DNA, 25 bp, Homo sapien
tatacctgtaatcccaacactctag

SEQ ID NO: 5821039 - DNA, 25 bp, Homo sapien
tatagaaaaagatgttacccagaat

SEQ ID NO: 5821040 - DNA, 25 bp, Homo sapien
cccaagaaacagagctgtcagtcag

SEQ ID NO: 5821041 - DNA, 25 bp, Homo sapien
ggctgcggattagaaacctcgacac

SEQ ID NO: 5821042 - DNA, 25 bp, Homo sapien
caccggccgcgccgccgcgggacgc

SEQ ID NO: 5821043 - DNA, 25 bp, Homo sapien
actggagtcttgtttgtcaagtttg

SEQ ID NO: 5821044 - DNA, 25 bp, Homo sapien
tcccactgcaagtccaggatactca

SEQ ID NO: 5821045 - DNA, 25 bp, Homo sapien
tggaagcaggaagaaattgttttct

SEQ ID NO: 5821046 - DNA, 25 bp, Homo sapien
ccgcccttcgtttcccagagctgaa

SEQ ID NO: 5821047 - DNA, 25 bp, Homo sapien
cgatgaaacttcatccgtcccaaag

SEQ ID NO: 5821048 - DNA, 25 bp, Homo sapien
tcaagaccagcccaggcaacatagt

SEQ ID NO: 5821049 - DNA, 25 bp, Homo sapien
gaataacatcaccacgtctctgggc

SEQ ID NO: 5821050 - DNA, 25 bp, Homo sapien
caggagccccggaggctctcctttc

SEQ ID NO: 5821051 - DNA, 25 bp, Homo sapien
ctaccgggggaccgtcagtgtgacc

SEQ ID NO: 5821052 - DNA, 25 bp, Homo sapien
gtcagtcagtgctgaattagtgcct

SEQ ID NO: 5821053 - DNA, 25 bp, Homo sapien
ctgctgcccaagaaacagagctgtc

SEQ ID NO: 5821054 - DNA, 25 bp, Homo sapien
tggcaaccgcaccgtctatatggag

SEQ ID NO: 5821055 - DNA, 25 bp, Homo sapien
ctcaagaagtcaactgcctttatac

SEQ ID NO: 5821056 - DNA, 25 bp, Homo sapien
gccattcctactgccgcaacccagg

SEQ ID NO: 5821057 - DNA, 25 bp, Homo sapien
atcctggagaatgtcctgtgtcaaa

SEQ ID NO: 5821058 - DNA, 25 bp, Homo sapien
caccacagacacaggctacttccag

SEQ ID NO: 5821059 - DNA, 25 bp, Homo sapien
tgtcaagtttggcccccctcccact

SEQ ID NO: 5821060 - DNA, 25 bp, Homo sapien
agaaaatggaattcctgagtcagtt

SEQ ID NO: 5821061 - DNA, 25 bp, Homo sapien
tttctacataaaacacctcgtaagg

SEQ ID NO: 5821062 - DNA, 25 bp, Homo sapien
agctgtcagtcagtgctgaattagt

SEQ ID NO: 5821063 - DNA, 25 bp, Homo sapien
tcctgcgagcgccagcggccgggac

SEQ ID NO: 5821064 - DNA, 25 bp, Homo sapien
ctgtgccactatgccttcccgtact

SEQ ID NO: 5821065 - DNA, 25 bp, Homo sapien
catggcagatcctataaataaaaat

SEQ ID NO: 5821066 - DNA, 25 bp, Homo sapien
acagtttatcacattgatttttata

SEQ ID NO: 5821067 - DNA, 25 bp, Homo sapien
gtccccggcgtcctgcgagcgccag

SEQ ID NO: 5821068 - DNA, 25 bp, Homo sapien
ccagtgccagccatggaattcccag

SEQ ID NO: 5821069 - DNA, 25 bp, Homo sapien
accattactcggtcatccagggcaa

SEQ ID NO: 5821070 - DNA, 25 bp, Homo sapien
agagcccagaagctgcgaactgtat

SEQ ID NO: 5821071 - DNA, 25 bp, Homo sapien
atggaggccattcctactgccgcaa

SEQ ID NO: 5821072 - DNA, 25 bp, Homo sapien
acagagggattgcatgtgcaagatt

SEQ ID NO: 5821073 - DNA, 25 bp, Homo sapien
gccaagcatggtggcttatacctgt

SEQ ID NO: 5821074 - DNA, 25 bp, Homo sapien
agggtgcgctgttctcggagtccga

SEQ ID NO: 5821075 - DNA, 25 bp, Homo sapien
gtcaactgcctttatacctgcagcc

SEQ ID NO: 5821076 - DNA, 25 bp, Homo sapien
gtcattgcccctaatgtattcaatc

SEQ ID NO: 5821077 - DNA, 25 bp, Homo sapien
aggctacttccagtgcgtggcaaca

SEQ ID NO: 5821078 - DNA, 25 bp, Homo sapien
ctatgccttcccgtactgcgatgaa

SEQ ID NO: 5821079 - DNA, 25 bp, Homo sapien
aaccgcaccgtctatatggagtctt

SEQ ID NO: 5821080 - DNA, 25 bp, Homo sapien
tgaccaaatcagggcgccagtgcca

SEQ ID NO: 5821081 - DNA, 25 bp, Homo sapien
actgcactgcaaagtctctgggaat

SEQ ID NO: 5821082 - DNA, 25 bp, Homo sapien
agccagagagcccagaagctgcgaa

SEQ ID NO: 5821083 - DNA, 25 bp, Homo sapien
gtcagttaactgttcctttttctag

SEQ ID NO: 5821084 - DNA, 25 bp, Homo sapien
gtgggtaaactgtgtccttcgttat

SEQ ID NO: 5821085 - DNA, 25 bp, Homo sapien
gtatccccacacacacactttcacc

SEQ ID NO: 5821086 - DNA, 25 bp, Homo sapien
ctgtcagtcagtgctgaattagtgc

SEQ ID NO: 5821087 - DNA, 25 bp, Homo sapien
aaggaggtggtttcttccactggag

SEQ ID NO: 5821088 - DNA, 25 bp, Homo sapien
atctagtaagaaaatggaattcctg

SEQ ID NO: 5821089 - DNA, 25 bp, Homo sapien
tgcactgcaaagtctctgggaatcc

SEQ ID NO: 5821090 - DNA, 25 bp, Homo sapien
gctctcctttcggtccaccatctat

SEQ ID NO: 5821091 - DNA, 25 bp, Homo sapien
cccgggacggcagcccctgggcgca

SEQ ID NO: 5821092 - DNA, 25 bp, Homo sapien
caagcatggtggcttatacctgtaa

SEQ ID NO: 5821093 - DNA, 25 bp, Homo sapien
ggcccccctcccactgcaagtccag

SEQ ID NO: 5821094 - DNA, 25 bp, Homo sapien
cccctcccactgcaagtccaggata

SEQ ID NO: 5821095 - DNA, 25 bp, Homo sapien
gccgcgctgctgctggccgcacgcg

SEQ ID NO: 5821096 - DNA, 25 bp, Homo sapien
tgccttaagaacaccacaaggcagg

SEQ ID NO: 5821097 - DNA, 25 bp, Homo sapien
agtgccagccatggaattcccagta

SEQ ID NO: 5821098 - DNA, 25 bp, Homo sapien
gggtaaactgtgtccttcgttatgt

SEQ ID NO: 5821099 - DNA, 25 bp, Homo sapien
agacagtttatcacattgattttta

SEQ ID NO: 5821100 - DNA, 25 bp, Homo sapien
gtttggcccccctcccactgcaagt

SEQ ID NO: 5821101 - DNA, 25 bp, Homo sapien
tatttgcttgatctcaatctggttt

SEQ ID NO: 5821102 - DNA, 25 bp, Homo sapien
tccgctggttcaaaaatgatgctcc

SEQ ID NO: 5821103 - DNA, 25 bp, Homo sapien
tctgggaatccacctcccaccatcc

SEQ ID NO: 5821104 - DNA, 25 bp, Homo sapien
tctctgggccagacagcagaactgc

SEQ ID NO: 5821105 - DNA, 25 bp, Homo sapien
aggggttcaagaccagcccaggcaa

SEQ ID NO: 5821106 - DNA, 25 bp, Homo sapien
ggcacagttgagacagtttatcaca

SEQ ID NO: 5821107 - DNA, 25 bp, Homo sapien
gagggctgggaagggatcgcgctcg

SEQ ID NO: 5821108 - DNA, 25 bp, Homo sapien
gatccctatcctacccctcttattt

SEQ ID NO: 5821109 - DNA, 25 bp, Homo sapien
aggaggaatgcaccggccgcgccgc

SEQ ID NO: 5821110 - DNA, 25 bp, Homo sapien
aatcccatgattctgatgaggctga

SEQ ID NO: 5821111 - DNA, 25 bp, Homo sapien
aacatcaccacgtctctgggccaga

SEQ ID NO: 5821112 - DNA, 25 bp, Homo sapien
tcccagcttgcggtaaatagaagtc

SEQ ID NO: 5821113 - DNA, 25 bp, Homo sapien
agggacaaagagctttgcagacgtc

SEQ ID NO: 5821114 - DNA, 25 bp, Homo sapien
gcactcgtggatgtaacagggaccc

SEQ ID NO: 5821115 - DNA, 25 bp, Homo sapien
gatgaatctacaaccattactcggt

SEQ ID NO: 5821116 - DNA, 25 bp, Homo sapien
atctcaatctggttttagggtaaac

SEQ ID NO: 5821117 - DNA, 25 bp, Homo sapien
agcaggaagaaattgttttctgtat

SEQ ID NO: 5821118 - DNA, 25 bp, Homo sapien
ggaagggatcgcgctcgcggcatcc

SEQ ID NO: 5821119 - DNA, 25 bp, Homo sapien
tgtcaaacagagtacatttttgcaa

SEQ ID NO: 5821120 - DNA, 25 bp, Homo sapien
tcatcatggaacatctcaagtgaac

SEQ ID NO: 5821121 - DNA, 25 bp, Homo sapien
cagcctgggactgacccgccggccc

SEQ ID NO: 5821122 - DNA, 25 bp, Homo sapien
agggcgactcacgcccactggtgcg

SEQ ID NO: 5821123 - DNA, 25 bp, Homo sapien
gccaggcggaggcgagggagcaggt

SEQ ID NO: 5821124 - DNA, 25 bp, Homo sapien
cataaaacacctcgtaaggtaccaa

SEQ ID NO: 5821125 - DNA, 25 bp, Homo sapien
cattgcccctaatgtattcaatcat

SEQ ID NO: 5821126 - DNA, 25 bp, Homo sapien
tggagtctttgcacatgcaagggga

SEQ ID NO: 5821127 - DNA, 25 bp, Homo sapien
aagatgttacccagaatggtctgcg

SEQ ID NO: 5821128 - DNA, 25 bp, Homo sapien
tgaagaagatggattctgtcagcca

SEQ ID NO: 5821129 - DNA, 25 bp, Homo sapien
tggtctgcgtccaagtggacctttt

SEQ ID NO: 5821130 - DNA, 25 bp, Homo sapien
tctacaaccattactcggtcatcca

SEQ ID NO: 5821131 - DNA, 25 bp, Homo sapien
caaatcagggcgccagtgccagcca

SEQ ID NO: 5821132 - DNA, 25 bp, Homo sapien
acatctcaagtgaactcaacaaaga

SEQ ID NO: 5821133 - DNA, 25 bp, Homo sapien
gtgccactatgccttcccgtactgc

SEQ ID NO: 5821134 - DNA, 25 bp, Homo sapien
ggcgactcacgcccactggtgcgac

SEQ ID NO: 5821135 - DNA, 25 bp, Homo sapien
actgtatccggattggaattcccat

SEQ ID NO: 5821136 - DNA, 25 bp, Homo sapien
aggctgaaactgccaaactgtgaag

SEQ ID NO: 5821137 - DNA, 25 bp, Homo sapien
ctttgcagacgtccccggcgtcctg

SEQ ID NO: 5821138 - DNA, 25 bp, Homo sapien
agacagcagaactgcactgcaaagt

SEQ ID NO: 5821139 - DNA, 25 bp, Homo sapien
gccattgcactcgtggatgtaacag

SEQ ID NO: 5821140 - DNA, 25 bp, Homo sapien
agtacatttttgcaagatcaaatcc

SEQ ID NO: 5821141 - DNA, 25 bp, Homo sapien
atctgataagtgttctcagttcgcc

SEQ ID NO: 5821142 - DNA, 25 bp, Homo sapien
acttccagtcacttatctgataagt

SEQ ID NO: 5821143 - DNA, 25 bp, Homo sapien
tcctgagtcagttaactgttccttt

SEQ ID NO: 5821144 - DNA, 25 bp, Homo sapien
gtgcgtggcaacaaacggcaaggag

SEQ ID NO: 5821145 - DNA, 25 bp, Homo sapien
tcccaccatccgctggttcaaaaat

SEQ ID NO: 5821146 - DNA, 25 bp, Homo sapien
ggaatccacctcccaccatccgctg

SEQ ID NO: 5821147 - DNA, 25 bp, Homo sapien
gcaaggaggtggtttcttccactgg

SEQ ID NO: 5821148 - DNA, 25 bp, Homo sapien
aatcaaaaggaagctccctggtgct

SEQ ID NO: 5821149 - DNA, 25 bp, Homo sapien
cgctgctggccgcgctgctgctggc

SEQ ID NO: 5821150 - DNA, 25 bp, Homo sapien
gagtctttgcacatgcaaggggaaa

SEQ ID NO: 5821151 - DNA, 25 bp, Homo sapien
ttggcccccctcccactgcaagtcc

SEQ ID NO: 5821152 - DNA, 25 bp, Homo sapien
cttcactatgattggcacttccagt

SEQ ID NO: 5821153 - DNA, 25 bp, Homo sapien
aggccattcctactgccgcaaccca

SEQ ID NO: 5821154 - DNA, 25 bp, Homo sapien
ccgcgggacgcgcccgccgctcctg

SEQ ID NO: 5821155 - DNA, 25 bp, Homo sapien
gactgacccgccggcccaggcgagg

SEQ ID NO: 5821156 - DNA, 25 bp, Homo sapien
cagcggccgggacgaggcggccggg

SEQ ID NO: 5821157 - DNA, 25 bp, Homo sapien
ccttaagaacaccacaaggcaggat

SEQ ID NO: 5821158 - DNA, 25 bp, Homo sapien
tggtgcttcaccttggatgaaaact

SEQ ID NO: 5821159 - DNA, 25 bp, Homo sapien
ccaaactgtgaagatctcccccagc

SEQ ID NO: 5821160 - DNA, 25 bp, Homo sapien
gatcatttgagcccaggggttcaag

SEQ ID NO: 5821161 - DNA, 25 bp, Homo sapien
cgtttcccagagctgaatggaggcc

SEQ ID NO: 5821162 - DNA, 25 bp, Homo sapien
aggatcatttgagcccaggggttca

SEQ ID NO: 5821163 - DNA, 25 bp, Homo sapien
aagaagatggattctgtcagccata

SEQ ID NO: 5821164 - DNA, 25 bp, Homo sapien
ccaggggttcaagaccagcccaggc

SEQ ID NO: 5821165 - DNA, 25 bp, Homo sapien
ccttgccgtttctacataaaacacc

SEQ ID NO: 5821166 - DNA, 25 bp, Homo sapien
tgtgtcgcgatgaatgtgaaatcct

SEQ ID NO: 5821167 - DNA, 25 bp, Homo sapien
ctcaacaaagattcttacctgaccc

SEQ ID NO: 5821168 - DNA, 25 bp, Homo sapien
cagttgagacagtttatcacattga

SEQ ID NO: 5821169 - DNA, 25 bp, Homo sapien
aattcccagtatccccacacacaca

SEQ ID NO: 5821170 - DNA, 25 bp, Homo sapien
ccgtggatgttctgcgcgcggcctg

SEQ ID NO: 5821171 - DNA, 25 bp, Homo sapien
gtaaggtaccaaaacacgttctcaa

SEQ ID NO: 5821172 - DNA, 25 bp, Homo sapien
agagggattgcatgtgcaagattta

SEQ ID NO: 5821173 - DNA, 25 bp, Homo sapien
gccgccgagggagccccgggacggc

SEQ ID NO: 5821174 - DNA, 25 bp, Homo sapien
tatatggagtctttgcacatgcaag

SEQ ID NO: 5821175 - DNA, 25 bp, Homo sapien
caggttagagggacaaagagctttg

SEQ ID NO: 5821176 - DNA, 25 bp, Homo sapien
ttattggcaaccgcaccgtctatat

SEQ ID NO: 5821177 - DNA, 25 bp, Homo sapien
cgagaggaggaatgcaccggccgcg

SEQ ID NO: 5821178 - DNA, 25 bp, Homo sapien
gaacaccacaaggcaggatgaatct

SEQ ID NO: 5821179 - DNA, 25 bp, Homo sapien
cgcggcctgggagccgccgccgccg

SEQ ID NO: 5821180 - DNA, 25 bp, Homo sapien
catctatggctctcggctgcggatt

SEQ ID NO: 5821181 - DNA, 25 bp, Homo sapien
attggcacttccagtcacttatctg

SEQ ID NO: 5821182 - DNA, 25 bp, Homo sapien
ggacaaagagctttgcagacgtccc

SEQ ID NO: 5821183 - DNA, 25 bp, Homo sapien
gaaacctcgacaccacagacacagg

SEQ ID NO: 5821184 - DNA, 25 bp, Homo sapien
tgtgaaatcctggagaatgtcctgt

SEQ ID NO: 5821185 - DNA, 25 bp, Homo sapien
tccatctctaccaaaaaaaagaaaa

SEQ ID NO: 5821186 - DNA, 25 bp, Homo sapien
cctatcctacccctcttatttagga

SEQ ID NO: 5821187 - DNA, 25 bp, Homo sapien
cgttctcaagaagtcaactgccttt

SEQ ID NO: 5821188 - DNA, 25 bp, Homo sapien
ccagtcacttatctgataagtgttc

SEQ ID NO: 5821189 - DNA, 25 bp, Homo sapien
ttcaccgcccttcgtttcccagagc

SEQ ID NO: 5821190 - DNA, 25 bp, Homo sapien
ctgctgctggccgcacgcggggctg

SEQ ID NO: 5821191 - DNA, 25 bp, Homo sapien
gcccgtggatgttctgcgcgcggcc

SEQ ID NO: 5821192 - DNA, 25 bp, Homo sapien
aaaatgatgctcctgtggtccagga

SEQ ID NO: 5821193 - DNA, 25 bp, Homo sapien
aggctctcctttcggtccaccatct

SEQ ID NO: 5821194 - DNA, 25 bp, Homo sapien
tcaaaaggaagctccctggtgcttc

SEQ ID NO: 5821195 - DNA, 25 bp, Homo sapien
accgtctatatggagtctttgcaca

SEQ ID NO: 5821196 - DNA, 25 bp, Homo sapien
aaccttgccgtttctacataaaaca

SEQ ID NO: 5821197 - DNA, 25 bp, Homo sapien
gacttgtgtcgcgatgaatgtgaaa

SEQ ID NO: 5821198 - DNA, 25 bp, Homo sapien
gcttcaccttggatgaaaactttaa

SEQ ID NO: 5821199 - DNA, 25 bp, Homo sapien
catttttgcaagatcaaatcccatg

SEQ ID NO: 5821200 - DNA, 25 bp, Homo sapien
ccttcagaggcacagttgagacagt

SEQ ID NO: 5821201 - DNA, 25 bp, Homo sapien
ggttagagggacaaagagctttgca

SEQ ID NO: 5821202 - DNA, 25 bp, Homo sapien
aatcacaagtgttataacagcacag

SEQ ID NO: 5821203 - DNA, 25 bp, Homo sapien
cccagtatccccacacacacacttt

SEQ ID NO: 5821204 - DNA, 25 bp, Homo sapien
gaccagcccaggcaacatagtgaga

SEQ ID NO: 5821205 - DNA, 25 bp, Homo sapien
tcggtcatccagggcaatctgtggg

SEQ ID NO: 5821206 - DNA, 25 bp, Homo sapien
gccgccgccgccgccgcctcagcga

SEQ ID NO: 5821207 - DNA, 25 bp, Homo sapien
ccccgtgacttgtgtcgcgatgaat

SEQ ID NO: 5821208 - DNA, 25 bp, Homo sapien
ccatgattctgatgaggctgaaact

SEQ ID NO: 5821209 - DNA, 25 bp, Homo sapien
gggagccgccgccgccgccgcctca

SEQ ID NO: 5821210 - DNA, 25 bp, Homo sapien
atcaaatcccatgattctgatgagg

SEQ ID NO: 5821211 - DNA, 25 bp, Homo sapien
ccaaagccccgtgacttgtgtcgcg

SEQ ID NO: 5821212 - DNA, 25 bp, Homo sapien
ccagggaatcaaaaggaagctccct

SEQ ID NO: 5821213 - DNA, 25 bp, Homo sapien
caatctgtgggtaaactgtgtcctt

SEQ ID NO: 5821214 - DNA, 25 bp, Homo sapien
tcacaagtgttataacagcacaggt

SEQ ID NO: 5821215 - DNA, 25 bp, Homo sapien
gtgacatcccagcttgcggtaaata

SEQ ID NO: 5821216 - DNA, 25 bp, Homo sapien
agacgtccccggcgtcctgcgagcg

SEQ ID NO: 5821217 - DNA, 25 bp, Homo sapien
ggcgccagtgccagccatggaattc

SEQ ID NO: 5821218 - DNA, 25 bp, Homo sapien
accaaatcagggcgccagtgccagc

SEQ ID NO: 5821219 - DNA, 25 bp, Homo sapien
gagggagccccgggacggcagcccc

SEQ ID NO: 5821220 - DNA, 25 bp, Homo sapien
tcccgtactgcgatgaaacttcatc

SEQ ID NO: 5821221 - DNA, 25 bp, Homo sapien
gataagtgttctcagttcgccattc

SEQ ID NO: 5821222 - DNA, 25 bp, Homo sapien
gaacatctcaagtgaactcaacaaa

SEQ ID NO: 5821223 - DNA, 25 bp, Homo sapien
ctacccctcttatttaggagaatcc

SEQ ID NO: 5821224 - DNA, 25 bp, Homo sapien
gatgagtatgaagaagatggattct

SEQ ID NO: 5821225 - DNA, 25 bp, Homo sapien
ctgacccgccggcccaggcgaggct

SEQ ID NO: 5821226 - DNA, 25 bp, Homo sapien
aagaccagcccaggcaacatagtga

SEQ ID NO: 5821227 - DNA, 25 bp, Homo sapien
tgttacccagaatggtctgcgtcca

SEQ ID NO: 5821228 - DNA, 25 bp, Homo sapien
atccccacacacacactttcaccgc

SEQ ID NO: 5821229 - DNA, 25 bp, Homo sapien
ttagtgcctacctcatcatggaaca

SEQ ID NO: 5821230 - DNA, 25 bp, Homo sapien
acaccacaaggcaggatgaatctac

SEQ ID NO: 5821231 - DNA, 25 bp, Homo sapien
aaacagagctgtcagtcagtgctga

SEQ ID NO: 5821232 - DNA, 25 bp, Homo sapien
gcccctgggcgcagggtgcgctgtt

SEQ ID NO: 5821233 - DNA, 25 bp, Homo sapien
atggaattcccagtatccccacaca

SEQ ID NO: 5821234 - DNA, 25 bp, Homo sapien
tatgattggcacttccagtcactta

SEQ ID NO: 5821235 - DNA, 25 bp, Homo sapien
cattccttccctgtgccactatgcc

SEQ ID NO: 5821236 - DNA, 25 bp, Homo sapien
tggtggcttatacctgtaatcccaa

SEQ ID NO: 5821237 - DNA, 25 bp, Homo sapien
gacccagcccttcagaggcacagtt

SEQ ID NO: 5821238 - DNA, 25 bp, Homo sapien
tgttaatactgcagaagaagcatat

SEQ ID NO: 5821239 - DNA, 25 bp, Homo sapien
gctcgcggcatccagaggcggccag

SEQ ID NO: 5821240 - DNA, 25 bp, Homo sapien
actgcgatgaaacttcatccgtccc

SEQ ID NO: 5821241 - DNA, 25 bp, Homo sapien
aaactttaagtctgatctgtgtgac

SEQ ID NO: 5821242 - DNA, 25 bp, Homo sapien
tgggccagacagcagaactgcactg

SEQ ID NO: 5821243 - DNA, 25 bp, Homo sapien
tgagactccatctctaccaaaaaaa

SEQ ID NO: 5821244 - DNA, 25 bp, Homo sapien
caaccattactcggtcatccagggc

SEQ ID NO: 5821245 - DNA, 25 bp, Homo sapien
ttcatccgtcccaaagccccgtgac

SEQ ID NO: 5821246 - DNA, 25 bp, Homo sapien
ccagccagagagcccagaagctgcg

SEQ ID NO: 5821247 - DNA, 25 bp, Homo sapien
tttttgcaagatcaaatcccatgat

SEQ ID NO: 5821248 - DNA, 25 bp, Homo sapien
aaactgccaaactgtgaagatctcc

SEQ ID NO: 5821249 - DNA, 25 bp, Homo sapien
gagccccgggacggcagcccctggg

SEQ ID NO: 5821250 - DNA, 25 bp, Homo sapien
tgaaatcctggagaatgtcctgtgt

SEQ ID NO: 5821251 - DNA, 25 bp, Homo sapien
ctgcgaactgtatccggattggaat

SEQ ID NO: 5821252 - DNA, 25 bp, Homo sapien
cctttttctagaaaatgtttggaga

SEQ ID NO: 5821253 - DNA, 25 bp, Homo sapien
cagccagagggctgggaagggatcg

SEQ ID NO: 5821254 - DNA, 25 bp, Homo sapien
ggagcagccgccaccgccgccgccg

SEQ ID NO: 5821255 - DNA, 25 bp, Homo sapien
agtaagaaaatggaattcctgagtc

SEQ ID NO: 5821256 - DNA, 25 bp, Homo sapien
gaatggaggccattcctactgccgc

SEQ ID NO: 5821257 - DNA, 25 bp, Homo sapien
atgaaaatgggccaagcatggtggc

SEQ ID NO: 5821258 - DNA, 25 bp, Homo sapien
aacctcgacaccacagacacaggct

SEQ ID NO: 5821259 - DNA, 25 bp, Homo sapien
tagaaacctcgacaccacagacaca

SEQ ID NO: 5821260 - DNA, 25 bp, Homo sapien
tgaattagtgcctacctcatcatgg

SEQ ID NO: 5821261 - DNA, 25 bp, Homo sapien
tggaattcctgagtcagttaactgt

SEQ ID NO: 5821262 - DNA, 25 bp, Homo sapien
gtctttgcacatgcaaggggaaata

SEQ ID NO: 5821263 - DNA, 25 bp, Homo sapien
tccagtgcgtggcaacaaacggcaa

SEQ ID NO: 5821264 - DNA, 25 bp, Homo sapien
cggtccaccatctatggctctcggc

SEQ ID NO: 5821265 - DNA, 25 bp, Homo sapien
agctgaatggaggccattcctactg

SEQ ID NO: 5821266 - DNA, 25 bp, Homo sapien
gccttcactatgattggcacttcca

SEQ ID NO: 5821267 - DNA, 25 bp, Homo sapien
cgccgctcctggcgctgctggccgc

SEQ ID NO: 5821268 - DNA, 25 bp, Homo sapien
ttatctgataagtgttctcagttcg

SEQ ID NO: 5821269 - DNA, 25 bp, Homo sapien
catggaacatctcaagtgaactcaa

SEQ ID NO: 5821270 - DNA, 25 bp, Homo sapien
agccatacagagggattgcatgtgc

SEQ ID NO: 5821271 - DNA, 25 bp, Homo sapien
taagtgttctcagttcgccattcct

SEQ ID NO: 5821272 - DNA, 25 bp, Homo sapien
tgagtatgaagaagatggattctgt

SEQ ID NO: 5821273 - DNA, 25 bp, Homo sapien
tgtattcaatcatctttaaagatcc

SEQ ID NO: 5821274 - DNA, 25 bp, Homo sapien
cgcccgccgctcctggcgctgctgg

SEQ ID NO: 5821275 - DNA, 25 bp, Homo sapien
tgggaagggatcgcgctcgcggcat

SEQ ID NO: 5821276 - DNA, 25 bp, Homo sapien
cattactcggtcatccagggcaatc

SEQ ID NO: 5821277 - DNA, 25 bp, Homo sapien
cccttgatgaaccaatgaataacat

SEQ ID NO: 5821278 - DNA, 25 bp, Homo sapien
caaacggcaaggaggtggtttcttc

SEQ ID NO: 5821279 - DNA, 25 bp, Homo sapien
aatgtattcaatcatctttaaagat

SEQ ID NO: 5821280 - DNA, 25 bp, Homo sapien
aatagaaaatcagatcacagctgcc

SEQ ID NO: 5821281 - DNA, 25 bp, Homo sapien
gaaaatggacagtatttgcttgatc

SEQ ID NO: 5821282 - DNA, 25 bp, Homo sapien
agaagtcattgcccctaatgtattc

SEQ ID NO: 5821283 - DNA, 25 bp, Homo sapien
tttctgtatgccttaagaacaccac

SEQ ID NO: 5821284 - DNA, 25 bp, Homo sapien
cctggagaatgtcctgtgtcaaaca

SEQ ID NO: 5821285 - DNA, 25 bp, Homo sapien
tcaaacagagtacatttttgcaaga

SEQ ID NO: 5821286 - DNA, 25 bp, Homo sapien
agctgccttcactatgattggcact

SEQ ID NO: 5821287 - DNA, 25 bp, Homo sapien
atgattctgatgaggctgaaactgc

SEQ ID NO: 5821288 - DNA, 25 bp, Homo sapien
actcacgcccactggtgcgacccgg

SEQ ID NO: 5821289 - DNA, 25 bp, Homo sapien
gagagggagcgtggagagctggagc

SEQ ID NO: 5821290 - DNA, 25 bp, Homo sapien
atattggaagcaggaagaaattgtt

SEQ ID NO: 5821291 - DNA, 25 bp, Homo sapien
cttatacctgtaatcccaacactct

SEQ ID NO: 5821292 - DNA, 25 bp, Homo sapien
ccgtgacttgtgtcgcgatgaatgt

SEQ ID NO: 5821293 - DNA, 25 bp, Homo sapien
ttgcacatgcaaggggaaatagaaa

SEQ ID NO: 5821294 - DNA, 25 bp, Homo sapien
tgaactcaacaaagattcttacctg

SEQ ID NO: 5821295 - DNA, 25 bp, Homo sapien
cagcccctgggcgcagggtgcgctg

SEQ ID NO: 5821296 - DNA, 25 bp, Homo sapien
tttatacctgcagccattgcactcg

SEQ ID NO: 5821297 - DNA, 25 bp, Homo sapien
acacactttcaccgcccttcgtttc

SEQ ID NO: 5821298 - DNA, 25 bp, Homo sapien
cgccgccgccgccgcctcagcgaga

SEQ ID NO: 5821299 - DNA, 25 bp, Homo sapien
caccgcccttcgtttcccagagctg

SEQ ID NO: 5821300 - DNA, 25 bp, Homo sapien
aacagggacccagcccttcagaggc

SEQ ID NO: 5821301 - DNA, 25 bp, Homo sapien
gaactgcactgcaaagtctctggga

SEQ ID NO: 5821302 - DNA, 25 bp, Homo sapien
ttcctttttctagaaaatgtttgga

SEQ ID NO: 5821303 - DNA, 25 bp, Homo sapien
cagttcgccattccttccctgtgcc

SEQ ID NO: 5821304 - DNA, 25 bp, Homo sapien
ggaatgcaccggccgcgccgccgcg

SEQ ID NO: 5821305 - DNA, 25 bp, Homo sapien
cagagggctgggaagggatcgcgct

SEQ ID NO: 5821306 - DNA, 25 bp, Homo sapien
tatcctacccctcttatttaggaga

SEQ ID NO: 5821307 - DNA, 25 bp, Homo sapien
accatccgctggttcaaaaatgatg

SEQ ID NO: 5821308 - DNA, 25 bp, Homo sapien
tgaaactgccaaactgtgaagatct

SEQ ID NO: 5821309 - DNA, 25 bp, Homo sapien
gcgaactgtatccggattggaattc

SEQ ID NO: 5821310 - DNA, 25 bp, Homo sapien
gggttcaagaccagcccaggcaaca

SEQ ID NO: 5821311 - DNA, 25 bp, Homo sapien
taaaaatcacaagtgttataacagc

SEQ ID NO: 5821312 - DNA, 25 bp, Homo sapien
agcatggtggcttatacctgtaatc

SEQ ID NO: 5821313 - DNA, 25 bp, Homo sapien
caacatagtgagactccatctctac

SEQ ID NO: 5821314 - DNA, 25 bp, Homo sapien
cgctgttctcggagtccgacccagg

SEQ ID NO: 5821315 - DNA, 25 bp, Homo sapien
gcccttcagaggcacagttgagaca

SEQ ID NO: 5821316 - DNA, 25 bp, Homo sapien
tcgtggatgtaacagggacccagcc

SEQ ID NO: 5821317 - DNA, 25 bp, Homo sapien
acaagtgttataacagcacaggtgt

SEQ ID NO: 5821318 - DNA, 25 bp, Homo sapien
ggcgctgctggccgcgctgctgctg

SEQ ID NO: 5821319 - DNA, 25 bp, Homo sapien
tattcaatcatctttaaagatccct

SEQ ID NO: 5821320 - DNA, 25 bp, Homo sapien
acacacactttcaccgcccttcgtt

SEQ ID NO: 5821321 - DNA, 25 bp, Homo sapien
gctcctgtggtccaggagccccgga

SEQ ID NO: 5821322 - DNA, 25 bp, Homo sapien
aggcaggatgaatctacaaccatta

SEQ ID NO: 5821323 - DNA, 25 bp, Homo sapien
tctcggctgcggattagaaacctcg

SEQ ID NO: 5821324 - DNA, 25 bp, Homo sapien
cctgtaatcccaacactctaggaag

SEQ ID NO: 5821325 - DNA, 25 bp, Homo sapien
gccgccaccgccgccgccgagggag

SEQ ID NO: 5821326 - DNA, 25 bp, Homo sapien
gccttcccgtactgcgatgaaactt

SEQ ID NO: 5821327 - DNA, 25 bp, Homo sapien
tcggagtccgacccagggcgactca

SEQ ID NO: 5821328 - DNA, 25 bp, Homo sapien
caaggcaggatgaatctacaaccat

SEQ ID NO: 5821329 - DNA, 25 bp, Homo sapien
agtgaactcaacaaagattcttacc

SEQ ID NO: 5821330 - DNA, 25 bp, Homo sapien
tctctgggaatccacctcccaccat

SEQ ID NO: 5821331 - DNA, 25 bp, Homo sapien
gagcgtggagagctggagcagccgc

SEQ ID NO: 5821332 - DNA, 25 bp, Homo sapien
cgccgccgcctcagcgagaggagga

SEQ ID NO: 5821333 - DNA, 25 bp, Homo sapien
gatcgcgctcgcggcatccagaggc

SEQ ID NO: 5821334 - DNA, 25 bp, Homo sapien
aaggaagctccctggtgcttcacct

SEQ ID NO: 5821335 - DNA, 25 bp, Homo sapien
cggaggcgagggagcaggttagagg

SEQ ID NO: 5821336 - DNA, 25 bp, Homo sapien
ctttcggtccaccatctatggctct

SEQ ID NO: 5821337 - DNA, 25 bp, Homo sapien
tttatagaaaaagatgttacccaga

SEQ ID NO: 5821338 - DNA, 25 bp, Homo sapien
tttcttccactggagtcttgtttgt

SEQ ID NO: 5821339 - DNA, 25 bp, Homo sapien
caaaaatgatgctcctgtggtccag

SEQ ID NO: 5821340 - DNA, 25 bp, Homo sapien
atggattctgtcagccatacagagg

SEQ ID NO: 5821341 - DNA, 25 bp, Homo sapien
ggaagagcccgtggatgttctgcgc

SEQ ID NO: 5821342 - DNA, 25 bp, Homo sapien
agccccggaggctctcctttcggtc

SEQ ID NO: 5821343 - DNA, 25 bp, Homo sapien
ttcaaaaatgatgctcctgtggtcc

SEQ ID NO: 5821344 - DNA, 25 bp, Homo sapien
aggagagagggagcgtggagagctg

SEQ ID NO: 5821345 - DNA, 25 bp, Homo sapien
gcagaagaagcatataggtatctag

SEQ ID NO: 5821346 - DNA, 25 bp, Homo sapien
ggagtccgacccagggcgactcacg

SEQ ID NO: 5821347 - DNA, 25 bp, Homo sapien
caagtccaggatactcagatgagta

SEQ ID NO: 5821348 - DNA, 25 bp, Homo sapien
tccctggtgcttcaccttggatgaa

SEQ ID NO: 5821349 - DNA, 25 bp, Homo sapien
ctcttatttaggagaatcctataag

SEQ ID NO: 5821350 - DNA, 25 bp, Homo sapien
ggcaggaggatcatttgagcccagg

SEQ ID NO: 5821351 - DNA, 25 bp, Homo sapien
gaagctgcgaactgtatccggattg

SEQ ID NO: 5821352 - DNA, 25 bp, Homo sapien
ccagagagcccagaagctgcgaact

SEQ ID NO: 5821353 - DNA, 25 bp, Homo sapien
attctgtcagccatacagagggatt

SEQ ID NO: 5821354 - DNA, 25 bp, Homo sapien
tcgccattccttccctgtgccacta

SEQ ID NO: 5821355 - DNA, 25 bp, Homo sapien
tcgcgctcgcggcatccagaggcgg

SEQ ID NO: 5821356 - DNA, 25 bp, Homo sapien
gtgctgaattagtgcctacctcatc

SEQ ID NO: 5821357 - DNA, 25 bp, Homo sapien
cctcgacaccacagacacaggctac

SEQ ID NO: 5821358 - DNA, 25 bp, Homo sapien
agaagtcaactgcctttatacctgc

SEQ ID NO: 5821359 - DNA, 25 bp, Homo sapien
cgggaagagcccgtggatgttctgc

SEQ ID NO: 5821360 - DNA, 25 bp, Homo sapien
ggatgtaacagggacccagcccttc

SEQ ID NO: 5821361 - DNA, 25 bp, Homo sapien
tatccggattggaattcccatggca

SEQ ID NO: 5821362 - DNA, 25 bp, Homo sapien
tgcaagatttattggcaaccgcacc

SEQ ID NO: 5821363 - DNA, 25 bp, Homo sapien
ccacacacacactttcaccgccctt

SEQ ID NO: 5821364 - DNA, 25 bp, Homo sapien
tttaaagatccctatcctacccctc

SEQ ID NO: 5821365 - DNA, 25 bp, Homo sapien
cattgcactcgtggatgtaacaggg

SEQ ID NO: 5821366 - DNA, 25 bp, Homo sapien
taacagcacaggtgtggactaccgg

SEQ ID NO: 5821367 - DNA, 25 bp, Homo sapien
gcagatcctataaataaaaatcaca

SEQ ID NO: 5821368 - DNA, 25 bp, Homo sapien
gatctcccccagccagagagcccag

SEQ ID NO: 5821369 - DNA, 25 bp, Homo sapien
tgaatctacaaccattactcggtca

SEQ ID NO: 5821370 - DNA, 25 bp, Homo sapien
gcaccgtctatatggagtctttgca

SEQ ID NO: 5821371 - DNA, 25 bp, Homo sapien
agagggacaaagagctttgcagacg

SEQ ID NO: 5821372 - DNA, 25 bp, Homo sapien
ccaccatctatggctctcggctgcg

SEQ ID NO: 5821373 - DNA, 25 bp, Homo sapien
tccggattggaattcccatggcaga

SEQ ID NO: 5821374 - DNA, 25 bp, Homo sapien
ccttcgtttcccagagctgaatgga

SEQ ID NO: 5821375 - DNA, 25 bp, Homo sapien
cacaaggcaggatgaatctacaacc

SEQ ID NO: 5821376 - DNA, 25 bp, Homo sapien
tggcacttccagtcacttatctgat

SEQ ID NO: 5821377 - DNA, 25 bp, Homo sapien
tgtccttcgttatgtctgttaatac

SEQ ID NO: 5821378 - DNA, 25 bp, Homo sapien
cgggacggcagcccctgggcgcagg

SEQ ID NO: 5821379 - DNA, 25 bp, Homo sapien
tgatgaaccaatgaataacatcacc

SEQ ID NO: 5821380 - DNA, 25 bp, Homo sapien
ccagggcgactcacgcccactggtg

SEQ ID NO: 5821381 - DNA, 25 bp, Homo sapien
ccggcccaggcgaggctgcagccag

SEQ ID NO: 5821382 - DNA, 25 bp, Homo sapien
agtctctgggaatccacctcccacc

SEQ ID NO: 5821383 - DNA, 25 bp, Homo sapien
tttgcaagatcaaatcccatgattc

SEQ ID NO: 5821384 - DNA, 25 bp, Homo sapien
tgtctgttaatactgcagaagaagc

SEQ ID NO: 5821385 - DNA, 25 bp, Homo sapien
gaaaactttaagtctgatctgtgtg

SEQ ID NO: 5821386 - DNA, 25 bp, Homo sapien
tccctatcctacccctcttatttag

SEQ ID NO: 5821387 - DNA, 25 bp, Homo sapien
tgatgctcctgtggtccaggagccc

SEQ ID NO: 5821388 - DNA, 25 bp, Homo sapien
gtggtccaggagccccggaggctct

SEQ ID NO: 5821389 - DNA, 25 bp, Homo sapien
gtcagtgctgaattagtgcctacct

SEQ ID NO: 5821390 - DNA, 25 bp, Homo sapien
cggccaggcggaggcgagggagcag

SEQ ID NO: 5821391 - DNA, 25 bp, Homo sapien
aagatctcccccagccagagagccc

SEQ ID NO: 5821392 - DNA, 25 bp, Homo sapien
gattctgatgaggctgaaactgcca

SEQ ID NO: 5821393 - DNA, 25 bp, Homo sapien
tccagaggcggccaggcggaggcga

SEQ ID NO: 5821394 - DNA, 25 bp, Homo sapien
caccttggatgaaaactttaagtct

SEQ ID NO: 5821395 - DNA, 25 bp, Homo sapien
aaactgtgaagatctcccccagcca

SEQ ID NO: 5821396 - DNA, 25 bp, Homo sapien
tgctggccgcacgcggggctgctgc

SEQ ID NO: 5821397 - DNA, 25 bp, Homo sapien
cactttcaccgcccttcgtttccca

SEQ ID NO: 5821398 - DNA, 25 bp, Homo sapien
agcacaggtgtggactaccggggga

SEQ ID NO: 5821399 - DNA, 25 bp, Homo sapien
cctttatacctgcagccattgcact

SEQ ID NO: 5821400 - DNA, 25 bp, Homo sapien
cctgcagccattgcactcgtggatg

SEQ ID NO: 5821401 - DNA, 25 bp, Homo sapien
ggaagaaattgttttctgtatgcct

SEQ ID NO: 5821402 - DNA, 25 bp, Homo sapien
ccgcaccgtctatatggagtctttg

SEQ ID NO: 5821403 - DNA, 25 bp, Homo sapien
aaggccgaggcaggaggatcatttg

SEQ ID NO: 5821404 - DNA, 25 bp, Homo sapien
gggactgacccgccggcccaggcga

SEQ ID NO: 5821405 - DNA, 25 bp, Homo sapien
gcccactggtgcgacccggacagcc

SEQ ID NO: 5821406 - DNA, 25 bp, Homo sapien
atcatctttaaagatccctatccta

SEQ ID NO: 5821407 - DNA, 25 bp, Homo sapien
tgtgcaagatttattggcaaccgca

SEQ ID NO: 5821408 - DNA, 25 bp, Homo sapien
aaggtaccaaaacacgttctcaaga

SEQ ID NO: 5821409 - DNA, 25 bp, Homo sapien
actctaggaaggccgaggcaggagg

SEQ ID NO: 5821410 - DNA, 25 bp, Homo sapien
ccagcttgcggtaaatagaagtcat

SEQ ID NO: 5821411 - DNA, 25 bp, Homo sapien
atttgagcccaggggttcaagacca

SEQ ID NO: 5821412 - DNA, 25 bp, Homo sapien
tcactatgattggcacttccagtca

SEQ ID NO: 5821413 - DNA, 25 bp, Homo sapien
cctactgccgcaacccagggaatca

SEQ ID NO: 5821414 - DNA, 25 bp, Homo sapien
ccggcgtcctgcgagcgccagcggc

SEQ ID NO: 5821415 - DNA, 25 bp, Homo sapien
gaggcaggaggatcatttgagccca

SEQ ID NO: 5821416 - DNA, 25 bp, Homo sapien
gagagagggagcgtggagagctgga

SEQ ID NO: 5821417 - DNA, 25 bp, Homo sapien
ccagggcaatctgtgggtaaactgt

SEQ ID NO: 5821418 - DNA, 25 bp, Homo sapien
ccccagccagagagcccagaagctg

SEQ ID NO: 5821419 - DNA, 25 bp, Homo sapien
cccaggcaacatagtgagactccat

SEQ ID NO: 5821420 - DNA, 25 bp, Homo sapien
ccaccatccgctggttcaaaaatga

SEQ ID NO: 5821421 - DNA, 25 bp, Homo sapien
cagggacccagcccttcagaggcac

SEQ ID NO: 5821422 - DNA, 25 bp, Homo sapien
tcctttcggtccaccatctatggct

SEQ ID NO: 5821423 - DNA, 25 bp, Homo sapien
cagaactgcactgcaaagtctctgg

SEQ ID NO: 5821424 - DNA, 25 bp, Homo sapien
attgcatgtgcaagatttattggca

SEQ ID NO: 5821425 - DNA, 25 bp, Homo sapien
ccctcttatttaggagaatcctata

SEQ ID NO: 5821426 - DNA, 25 bp, Homo sapien
ttcccagtatccccacacacacact

SEQ ID NO: 5821427 - DNA, 25 bp, Homo sapien
tacataaaacacctcgtaaggtacc

SEQ ID NO: 5821428 - DNA, 25 bp, Homo sapien
aggtggtttcttccactggagtctt

SEQ ID NO: 5821429 - DNA, 25 bp, Homo sapien
agaggaggaatgcaccggccgcgcc

SEQ ID NO: 5821430 - DNA, 25 bp, Homo sapien
ctcaagtgaactcaacaaagattct

SEQ ID NO: 5821431 - DNA, 25 bp, Homo sapien
tacctgtaatcccaacactctagga

SEQ ID NO: 5821432 - DNA, 25 bp, Homo sapien
aaaaaggaatattggaagcaggaag

SEQ ID NO: 5821433 - DNA, 25 bp, Homo sapien
aggtatctagtaagaaaatggaatt

SEQ ID NO: 5821434 - DNA, 25 bp, Homo sapien
gtccaccatctatggctctcggctg

SEQ ID NO: 5821435 - DNA, 25 bp, Homo sapien
tcaagtttggcccccctcccactgc

SEQ ID NO: 5821436 - DNA, 25 bp, Homo sapien
cttgatctcaatctggttttagggt

SEQ ID NO: 5821437 - DNA, 25 bp, Homo sapien
cagtgcgtggcaacaaacggcaagg

SEQ ID NO: 5821438 - DNA, 25 bp, Homo sapien
acagtatttgcttgatctcaatctg

SEQ ID NO: 5821439 - DNA, 25 bp, Homo sapien
tctcctttcggtccaccatctatgg

SEQ ID NO: 5821440 - DNA, 25 bp, Homo sapien
gtgacttgtgtcgcgatgaatgtga

SEQ ID NO: 5821441 - DNA, 25 bp, Homo sapien
ggaggatcatttgagcccaggggtt

SEQ ID NO: 5821442 - DNA, 25 bp, Homo sapien
tggagtcttgtttgtcaagtttggc

SEQ ID NO: 5821443 - DNA, 25 bp, Homo sapien
acaaagattcttacctgacccttga

SEQ ID NO: 5821444 - DNA, 25 bp, Homo sapien
cagaggcggccaggcggaggcgagg

SEQ ID NO: 5821445 - DNA, 25 bp, Homo sapien
aagagcccgtggatgttctgcgcgc

SEQ ID NO: 5821446 - DNA, 25 bp, Homo sapien
catccgtcccaaagccccgtgactt

SEQ ID NO: 5821447 - DNA, 25 bp, Homo sapien
aaaataatgaaaatgggccaagcat

SEQ ID NO: 5821448 - DNA, 25 bp, Homo sapien
cttccagtgcgtggcaacaaacggc

SEQ ID NO: 5821449 - DNA, 25 bp, Homo sapien
cccccctcccactgcaagtccagga

SEQ ID NO: 5821450 - DNA, 25 bp, Homo sapien
agtatttgcttgatctcaatctggt

SEQ ID NO: 5821451 - DNA, 25 bp, Homo sapien
ggccgggacgaggcggccgggagcc

SEQ ID NO: 5821452 - DNA, 25 bp, Homo sapien
ggatgttctgcgcgcggcctgggag

SEQ ID NO: 5821453 - DNA, 25 bp, Homo sapien
catctttaaagatccctatcctacc

SEQ ID NO: 5821454 - DNA, 25 bp, Homo sapien
gcagggtgcgctgttctcggagtcc

SEQ ID NO: 5821455 - DNA, 25 bp, Homo sapien
gaaatagaaaatcagatcacagctg

SEQ ID NO: 5821456 - DNA, 25 bp, Homo sapien
ttgcagacgtccccggcgtcctgcg

SEQ ID NO: 5821457 - DNA, 25 bp, Homo sapien
cttcgttatgtctgttaatactgca

SEQ ID NO: 5821458 - DNA, 25 bp, Homo sapien
tcccagagctgaatggaggccattc

SEQ ID NO: 5821459 - DNA, 25 bp, Homo sapien
aaaggaatattggaagcaggaagaa

SEQ ID NO: 5821460 - DNA, 25 bp, Homo sapien
ctcagatgagtatgaagaagatgga

SEQ ID NO: 5821461 - DNA, 25 bp, Homo sapien
agggagcaggttagagggacaaaga

SEQ ID NO: 5821462 - DNA, 25 bp, Homo sapien
ggggaccgtcagtgtgaccaaatca

SEQ ID NO: 5821463 - DNA, 25 bp, Homo sapien
gagcccgtggatgttctgcgcgcgg

SEQ ID NO: 5821464 - DNA, 25 bp, Homo sapien
aagtcattgcccctaatgtattcaa

SEQ ID NO: 5821465 - DNA, 25 bp, Homo sapien
tctgcgcgcggcctgggagccgccg

SEQ ID NO: 5821466 - DNA, 25 bp, Homo sapien
ctgataagtgttctcagttcgccat

SEQ ID NO: 5821467 - DNA, 25 bp, Homo sapien
tttatcacattgatttttatagaaa

SEQ ID NO: 5821468 - DNA, 25 bp, Homo sapien
aagggatcgcgctcgcggcatccag

SEQ ID NO: 5821469 - DNA, 25 bp, Homo sapien
aatactgcagaagaagcatataggt

SEQ ID NO: 5821470 - DNA, 25 bp, Homo sapien
ggcaacatagtgagactccatctct

SEQ ID NO: 5821471 - DNA, 25 bp, Homo sapien
ctggttcaaaaatgatgctcctgtg

SEQ ID NO: 5821472 - DNA, 25 bp, Homo sapien
cgtctctgggccagacagcagaact

SEQ ID NO: 5821473 - DNA, 25 bp, Homo sapien
atcccaacactctaggaaggccgag

SEQ ID NO: 5821474 - DNA, 25 bp, Homo sapien
gggccaagcatggtggcttatacct

SEQ ID NO: 5821475 - DNA, 25 bp, Homo sapien
gctgggaagggatcgcgctcgcggc

SEQ ID NO: 5821476 - DNA, 25 bp, Homo sapien
tcgacaccacagacacaggctactt

SEQ ID NO: 5821477 - DNA, 25 bp, Homo sapien
cgagggagcaggttagagggacaaa

SEQ ID NO: 5821478 - DNA, 25 bp, Homo sapien
gttctgcgcgcggcctgggagccgc

SEQ ID NO: 5821479 - DNA, 25 bp, Homo sapien
aatgatgctcctgtggtccaggagc

SEQ ID NO: 5821480 - DNA, 25 bp, Homo sapien
acagctgccttcactatgattggca

SEQ ID NO: 5821481 - DNA, 25 bp, Homo sapien
accatctatggctctcggctgcgga

SEQ ID NO: 5821482 - DNA, 25 bp, Homo sapien
ggaggctctcctttcggtccaccat

SEQ ID NO: 5821483 - DNA, 25 bp, Homo sapien
gtatctagtaagaaaatggaattcc

SEQ ID NO: 5821484 - DNA, 25 bp, Homo sapien
gctgcccaagaaacagagctgtcag

SEQ ID NO: 5821485 - DNA, 25 bp, Homo sapien
tcgttatgtctgttaatactgcaga

SEQ ID NO: 5821486 - DNA, 25 bp, Homo sapien
tgtaatcccaacactctaggaaggc

SEQ ID NO: 5821487 - DNA, 25 bp, Homo sapien
acagcagaactgcactgcaaagtct

SEQ ID NO: 5821488 - DNA, 25 bp, Homo sapien
ggattagaaacctcgacaccacaga

SEQ ID NO: 5821489 - DNA, 25 bp, Homo sapien
gccgtttctacataaaacacctcgt

SEQ ID NO: 5821490 - DNA, 25 bp, Homo sapien
gaggcggccaggcggaggcgaggga

SEQ ID NO: 5821491 - DNA, 25 bp, Homo sapien
agactccatctctaccaaaaaaaag

SEQ ID NO: 5821492 - DNA, 25 bp, Homo sapien
gcggccgggacgaggcggccgggag

SEQ ID NO: 5821493 - DNA, 25 bp, Homo sapien
ccagacagcagaactgcactgcaaa

SEQ ID NO: 5821494 - DNA, 25 bp, Homo sapien
ctgcagaagaagcatataggtatct

SEQ ID NO: 5821495 - DNA, 25 bp, Homo sapien
cagtatccccacacacacactttca

SEQ ID NO: 5821496 - DNA, 25 bp, Homo sapien
ctaatgtattcaatcatctttaaag

SEQ ID NO: 5821497 - DNA, 25 bp, Homo sapien
tcggctgcggattagaaacctcgac

SEQ ID NO: 5821498 - DNA, 25 bp, Homo sapien
agcgagaggaggaatgcaccggccg

SEQ ID NO: 5821499 - DNA, 25 bp, Homo sapien
cgaggctgcagccagagggctggga

SEQ ID NO: 5821500 - DNA, 25 bp, Homo sapien
acttatctgataagtgttctcagtt

SEQ ID NO: 5821501 - DNA, 25 bp, Homo sapien
ccctgtgccactatgccttcccgta

SEQ ID NO: 5821502 - DNA, 25 bp, Homo sapien
gtggcttatacctgtaatcccaaca

SEQ ID NO: 5821503 - DNA, 25 bp, Homo sapien
tcagcgagaggaggaatgcaccggc

SEQ ID NO: 5821504 - DNA, 25 bp, Homo sapien
aaatcagatcacagctgccttcact

SEQ ID NO: 5821505 - DNA, 25 bp, Homo sapien
gccgggagcccgggaagagcccgtg

SEQ ID NO: 5821506 - DNA, 25 bp, Homo sapien
cctataaataaaaatcacaagtgtt

SEQ ID NO: 5821507 - DNA, 25 bp, Homo sapien
tccttcgttatgtctgttaatactg

SEQ ID NO: 5821508 - DNA, 25 bp, Homo sapien
aacacgttctcaagaagtcaactgc

SEQ ID NO: 5821509 - DNA, 25 bp, Homo sapien
atagaagtcattgcccctaatgtat

SEQ ID NO: 5821510 - DNA, 25 bp, Homo sapien
atgtaacagggacccagcccttcag

SEQ ID NO: 5821511 - DNA, 25 bp, Homo sapien
aagaagcatataggtatctagtaag

SEQ ID NO: 5821512 - DNA, 25 bp, Homo sapien
actggtgcgacccggacagcctggg

SEQ ID NO: 5821513 - DNA, 25 bp, Homo sapien
caggatactcagatgagtatgaaga

SEQ ID NO: 5821514 - DNA, 25 bp, Homo sapien
ccgagggagccccgggacggcagcc

SEQ ID NO: 5821515 - DNA, 25 bp, Homo sapien
gtaaaccttgccgtttctacataaa

SEQ ID NO: 5821516 - DNA, 25 bp, Homo sapien
agagctttgcagacgtccccggcgt

SEQ ID NO: 5821517 - DNA, 25 bp, Homo sapien
cagtcagtgctgaattagtgcctac

SEQ ID NO: 5821518 - DNA, 25 bp, Homo sapien
gcgctcgcggcatccagaggcggcc

SEQ ID NO: 5821519 - DNA, 25 bp, Homo sapien
ctgtgtgacatcccagcttgcggta

SEQ ID NO: 5821520 - DNA, 25 bp, Homo sapien
agcagccgccaccgccgccgccgag

SEQ ID NO: 5821521 - DNA, 25 bp, Homo sapien
catcaccacgtctctgggccagaca

SEQ ID NO: 5821522 - DNA, 25 bp, Homo sapien
actgccaaactgtgaagatctcccc

SEQ ID NO: 5821523 - DNA, 25 bp, Homo sapien
agtatgaagaagatggattctgtca

SEQ ID NO: 5821524 - DNA, 25 bp, Homo sapien
acacaggctacttccagtgcgtggc

SEQ ID NO: 5821525 - DNA, 25 bp, Homo sapien
gaaacttcatccgtcccaaagcccc

SEQ ID NO: 5821526 - DNA, 25 bp, Homo sapien
gcagacgtccccggcgtcctgcgag

SEQ ID NO: 5821527 - DNA, 25 bp, Homo sapien
ccgccgcctcagcgagaggaggaat

SEQ ID NO: 5821528 - DNA, 25 bp, Homo sapien
ggaaggccgaggcaggaggatcatt

SEQ ID NO: 5821529 - DNA, 25 bp, Homo sapien
atggacagtatttgcttgatctcaa

SEQ ID NO: 5821530 - DNA, 25 bp, Homo sapien
gcccttcgtttcccagagctgaatg

SEQ ID NO: 5821531 - DNA, 25 bp, Homo sapien
cgtcccaaagccccgtgacttgtgt

SEQ ID NO: 5821532 - DNA, 25 bp, Homo sapien
acccagaatggtctgcgtccaagtg

SEQ ID NO: 5821533 - DNA, 25 bp, Homo sapien
ggccgcacgcggggctgctgcccaa

SEQ ID NO: 5821534 - DNA, 25 bp, Homo sapien
cgccggcccaggcgaggctgcagcc

SEQ ID NO: 5821535 - DNA, 25 bp, Homo sapien
gagtcagttaactgttcctttttct

SEQ ID NO: 5821536 - DNA, 25 bp, Homo sapien
gaaaatcagatcacagctgccttca

SEQ ID NO: 5821537 - DNA, 25 bp, Homo sapien
cagccgccaccgccgccgccgaggg

SEQ ID NO: 5821538 - DNA, 25 bp, Homo sapien
ttctcagttcgccattccttccctg

SEQ ID NO: 5821539 - DNA, 25 bp, Homo sapien
tacatttttgcaagatcaaatccca

SEQ ID NO: 5821540 - DNA, 25 bp, Homo sapien
tcacagctgccttcactatgattgg

SEQ ID NO: 5821541 - DNA, 25 bp, Homo sapien
gcaggatgaatctacaaccattact

SEQ ID NO: 5821542 - DNA, 25 bp, Homo sapien
gttcaagaccagcccaggcaacata

SEQ ID NO: 5821543 - DNA, 25 bp, Homo sapien
cgggagcccgggaagagcccgtgga

SEQ ID NO: 5821544 - DNA, 25 bp, Homo sapien
aggcggccgggagcccgggaagagc

SEQ ID NO: 5821545 - DNA, 25 bp, Homo sapien
cactatgccttcccgtactgcgatg

SEQ ID NO: 5821546 - DNA, 25 bp, Homo sapien
acagacacaggctacttccagtgcg

SEQ ID NO: 5821547 - DNA, 25 bp, Homo sapien
cctggtgcttcaccttggatgaaaa

SEQ ID NO: 5821548 - DNA, 25 bp, Homo sapien
gacatcccagcttgcggtaaataga

SEQ ID NO: 5821549 - DNA, 25 bp, Homo sapien
ggccgaggcaggaggatcatttgag

SEQ ID NO: 5821550 - DNA, 25 bp, Homo sapien
cgtttctacataaaacacctcgtaa

SEQ ID NO: 5821551 - DNA, 25 bp, Homo sapien
cttatttaggagaatcctataaggg

SEQ ID NO: 5821552 - DNA, 25 bp, Homo sapien
actgtgtccttcgttatgtctgtta

SEQ ID NO: 5821553 - DNA, 25 bp, Homo sapien
gtgtgacatcccagcttgcggtaaa

SEQ ID NO: 5821554 - DNA, 25 bp, Homo sapien
tgccagccatggaattcccagtatc

SEQ ID NO: 5821555 - DNA, 25 bp, Homo sapien
ggagaaaataatgaaaatgggccaa

SEQ ID NO: 5821556 - DNA, 25 bp, Homo sapien
ggaattcccagtatccccacacaca

SEQ ID NO: 5821557 - DNA, 25 bp, Homo sapien
ttgagcccaggggttcaagaccagc

SEQ ID NO: 5821558 - DNA, 25 bp, Homo sapien
tggactaccgggggaccgtcagtgt

SEQ ID NO: 5821559 - DNA, 25 bp, Homo sapien
agatcctataaataaaaatcacaag

SEQ ID NO: 5821560 - DNA, 25 bp, Homo sapien
gtggatgtaacagggacccagccct

SEQ ID NO: 5821561 - DNA, 25 bp, Homo sapien
taagtctgatctgtgtgacatccca

SEQ ID NO: 5821562 - DNA, 25 bp, Homo sapien
cccaggcgaggctgcagccagaggg

SEQ ID NO: 5821563 - DNA, 25 bp, Homo sapien
gatgaggctgaaactgccaaactgt

SEQ ID NO: 5821564 - DNA, 25 bp, Homo sapien
acgcccactggtgcgacccggacag

SEQ ID NO: 5821565 - DNA, 25 bp, Homo sapien
ccatggaattcccagtatccccaca

SEQ ID NO: 5821566 - DNA, 25 bp, Homo sapien
tttaagtctgatctgtgtgacatcc

SEQ ID NO: 5821567 - DNA, 25 bp, Homo sapien
atgccttcccgtactgcgatgaaac

SEQ ID NO: 5821568 - DNA, 25 bp, Homo sapien
ggaccgtcagtgtgaccaaatcagg

SEQ ID NO: 5821569 - DNA, 25 bp, Homo sapien
tgttctcagttcgccattccttccc

SEQ ID NO: 5821570 - DNA, 25 bp, Homo sapien
tccacctcccaccatccgctggttc

SEQ ID NO: 5821571 - DNA, 25 bp, Homo sapien
gatgaatgtgaaatcctggagaatg

SEQ ID NO: 5821572 - DNA, 25 bp, Homo sapien
aaagccccgtgacttgtgtcgcgat

SEQ ID NO: 5821573 - DNA, 25 bp, Homo sapien
ggattctgtcagccatacagaggga

SEQ ID NO: 5821574 - DNA, 25 bp, Homo sapien
tatggctctcggctgcggattagaa

SEQ ID NO: 5821575 - DNA, 25 bp, Homo sapien
cattcctactgccgcaacccaggga

SEQ ID NO: 5821576 - DNA, 25 bp, Homo sapien
ggttcaaaaatgatgctcctgtggt

SEQ ID NO: 5821577 - DNA, 25 bp, Homo sapien
cccgccggcccaggcgaggctgcag

SEQ ID NO: 5821578 - DNA, 25 bp, Homo sapien
ttacccagaatggtctgcgtccaag

SEQ ID NO: 5821579 - DNA, 25 bp, Homo sapien
ggcagcccctgggcgcagggtgcgc

SEQ ID NO: 5821580 - DNA, 25 bp, Homo sapien
gagcgccagcggccgggacgaggcg

SEQ ID NO: 5821581 - DNA, 25 bp, Homo sapien
ggcaacaaacggcaaggaggtggtt

SEQ ID NO: 5821582 - DNA, 25 bp, Homo sapien
aaatgggccaagcatggtggcttat

SEQ ID NO: 5821583 - DNA, 25 bp, Homo sapien
gacaccacagacacaggctacttcc

SEQ ID NO: 5821584 - DNA, 25 bp, Homo sapien
cagaagctgcgaactgtatccggat

SEQ ID NO: 5821585 - DNA, 25 bp, Homo sapien
tccgacccagggcgactcacgccca

SEQ ID NO: 5821586 - DNA, 25 bp, Homo sapien
cgaggcggccgggagcccgggaaga

SEQ ID NO: 5821587 - DNA, 25 bp, Homo sapien
acaggctacttccagtgcgtggcaa

SEQ ID NO: 5821588 - DNA, 25 bp, Homo sapien
caatgaataacatcaccacgtctct

SEQ ID NO: 5821589 - DNA, 25 bp, Homo sapien
ggtgcgctgttctcggagtccgacc

SEQ ID NO: 5821590 - DNA, 25 bp, Homo sapien
aaaatcacaagtgttataacagcac

SEQ ID NO: 5821591 - DNA, 25 bp, Homo sapien
gcgcagggtgcgctgttctcggagt

SEQ ID NO: 5821592 - DNA, 25 bp, Homo sapien
ggggctgctgcccaagaaacagagc

SEQ ID NO: 5821593 - DNA, 25 bp, Homo sapien
agccatggaattcccagtatcccca

SEQ ID NO: 5821594 - DNA, 25 bp, Homo sapien
acccagggcgactcacgcccactgg

SEQ ID NO: 5821595 - DNA, 25 bp, Homo sapien
tgaaaaggtccacttggacgcagac

SEQ ID NO: 5821596 - DNA, 25 bp, Homo sapien
ggctttgggacggatgaagtttcat

SEQ ID NO: 5821597 - DNA, 25 bp, Homo sapien
tttggcagtttcagcctcatcagaa

SEQ ID NO: 5821598 - DNA, 25 bp, Homo sapien
agcatcatttttgaaccagcggatg

SEQ ID NO: 5821599 - DNA, 25 bp, Homo sapien
aggtttctaatccgcagccgagagc

SEQ ID NO: 5821600 - DNA, 25 bp, Homo sapien
cgagcgcgatcccttcccagccctc

SEQ ID NO: 5821601 - DNA, 25 bp, Homo sapien
agcctcatcagaatcatgggatttg

SEQ ID NO: 5821602 - DNA, 25 bp, Homo sapien
cgcaccagtgggcgtgagtcgccct

SEQ ID NO: 5821603 - DNA, 25 bp, Homo sapien
acattaggggcaatgacttctattt

SEQ ID NO: 5821604 - DNA, 25 bp, Homo sapien
aagcaaatactgtccattttctttg

SEQ ID NO: 5821605 - DNA, 25 bp, Homo sapien
gaagtgccaatcatagtgaaggcag

SEQ ID NO: 5821606 - DNA, 25 bp, Homo sapien
cagattgagatcaagcaaatactgt

SEQ ID NO: 5821607 - DNA, 25 bp, Homo sapien
ccttgtggtgttcttaaggcataca

SEQ ID NO: 5821608 - DNA, 25 bp, Homo sapien
tcatagtgaaggcagctgtgatctg

SEQ ID NO: 5821609 - DNA, 25 bp, Homo sapien
gccctggatgaccgagtaatggttg

SEQ ID NO: 5821610 - DNA, 25 bp, Homo sapien
ctgcctcggccttcctagagtgttg

SEQ ID NO: 5821611 - DNA, 25 bp, Homo sapien
acatgcaatccctctgtatggctga

SEQ ID NO: 5821612 - DNA, 25 bp, Homo sapien
caggagcatcatttttgaaccagcg

SEQ ID NO: 5821613 - DNA, 25 bp, Homo sapien
tgtggggatactgggaattccatgg

SEQ ID NO: 5821614 - DNA, 25 bp, Homo sapien
cagatcagacttaaagttttcatcc

SEQ ID NO: 5821615 - DNA, 25 bp, Homo sapien
aaggagagcctccggggctcctgga

SEQ ID NO: 5821616 - DNA, 25 bp, Homo sapien
aagggtcaggtaagaatctttgttg

SEQ ID NO: 5821617 - DNA, 25 bp, Homo sapien
ttgcggcagtaggaatggcctccat

SEQ ID NO: 5821618 - DNA, 25 bp, Homo sapien
gcgcggccagcagcgccaggagcgg

SEQ ID NO: 5821619 - DNA, 25 bp, Homo sapien
gccgctggcgctcgcaggacgccgg

SEQ ID NO: 5821620 - DNA, 25 bp, Homo sapien
tgcagtgcagttctgctgtctggcc

SEQ ID NO: 5821621 - DNA, 25 bp, Homo sapien
gaaaccacctccttgccgtttgttg

SEQ ID NO: 5821622 - DNA, 25 bp, Homo sapien
tcttcccgggctcccggccgcctcg

SEQ ID NO: 5821623 - DNA, 25 bp, Homo sapien
aactgactcaggaattccattttct

SEQ ID NO: 5821624 - DNA, 25 bp, Homo sapien
cggccagcagcagcgcggccagcag

SEQ ID NO: 5821625 - DNA, 25 bp, Homo sapien
cgcggccggtgcattcctcctctcg

SEQ ID NO: 5821626 - DNA, 25 bp, Homo sapien
gctgaggcggcggcggcggcggctc

SEQ ID NO: 5821627 - DNA, 25 bp, Homo sapien
aactgagaacacttatcagataagt

SEQ ID NO: 5821628 - DNA, 25 bp, Homo sapien
tgactggaagtgccaatcatagtga

SEQ ID NO: 5821629 - DNA, 25 bp, Homo sapien
gtggcacagggaaggaatggcgaac

SEQ ID NO: 5821630 - DNA, 25 bp, Homo sapien
cgatcccttcccagccctctggctg

SEQ ID NO: 5821631 - DNA, 25 bp, Homo sapien
ggcagctgtgatctgattttctatt

SEQ ID NO: 5821632 - DNA, 25 bp, Homo sapien
gcggccagcagcgccaggagcggcg

SEQ ID NO: 5821633 - DNA, 25 bp, Homo sapien
tatttaccgcaagctgggatgtcac

SEQ ID NO: 5821634 - DNA, 25 bp, Homo sapien
gtcccaggctgtccgggtcgcacca

SEQ ID NO: 5821635 - DNA, 25 bp, Homo sapien
tcgcctgggccggcgggtcagtccc

SEQ ID NO: 5821636 - DNA, 25 bp, Homo sapien
attcccagagactttgcagtgcagt

SEQ ID NO: 5821637 - DNA, 25 bp, Homo sapien
gccggcgggtcagtcccaggctgtc

SEQ ID NO: 5821638 - DNA, 25 bp, Homo sapien
agcggcgggcgcgtcccgcggcggc

SEQ ID NO: 5821639 - DNA, 25 bp, Homo sapien
ggaagtagcctgtgtctgtggtgtc

SEQ ID NO: 5821640 - DNA, 25 bp, Homo sapien
ctgtgctgttataacacttgtgatt

SEQ ID NO: 5821641 - DNA, 25 bp, Homo sapien
gcgccaggagcggcgggcgcgtccc

SEQ ID NO: 5821642 - DNA, 25 bp, Homo sapien
cgcagaccattctgggtaacatctt

SEQ ID NO: 5821643 - DNA, 25 bp, Homo sapien
cgacacaagtcacggggctttggga

SEQ ID NO: 5821644 - DNA, 25 bp, Homo sapien
tgcagtattaacagacataacgaag

SEQ ID NO: 5821645 - DNA, 25 bp, Homo sapien
cagtaggaatggcctccattcagct

SEQ ID NO: 5821646 - DNA, 25 bp, Homo sapien
cggccttcctagagtgttgggatta

SEQ ID NO: 5821647 - DNA, 25 bp, Homo sapien
ctgtgcctctgaagggctgggtccc

SEQ ID NO: 5821648 - DNA, 25 bp, Homo sapien
acagacataacgaaggacacagttt

SEQ ID NO: 5821649 - DNA, 25 bp, Homo sapien
ctgttacatccacgagtgcaatggc

SEQ ID NO: 5821650 - DNA, 25 bp, Homo sapien
gtattaacagacataacgaaggaca

SEQ ID NO: 5821651 - DNA, 25 bp, Homo sapien
tgtgatttttatttataggatctgc

SEQ ID NO: 5821652 - DNA, 25 bp, Homo sapien
agagccatagatggtggaccgaaag

SEQ ID NO: 5821653 - DNA, 25 bp, Homo sapien
tagtggcacagggaaggaatggcga

SEQ ID NO: 5821654 - DNA, 25 bp, Homo sapien
gcttggcccattttcattattttct

SEQ ID NO: 5821655 - DNA, 25 bp, Homo sapien
tggctgggggagatcttcacagttt

SEQ ID NO: 5821656 - DNA, 25 bp, Homo sapien
cggcgggtcagtcccaggctgtccg

SEQ ID NO: 5821657 - DNA, 25 bp, Homo sapien
catgggatttgatcttgcaaaaatg

SEQ ID NO: 5821658 - DNA, 25 bp, Homo sapien
attccctgggttgcggcagtaggaa

SEQ ID NO: 5821659 - DNA, 25 bp, Homo sapien
gctccctcgcctccgcctggccgcc

SEQ ID NO: 5821660 - DNA, 25 bp, Homo sapien
tctgcagtattaacagacataacga

SEQ ID NO: 5821661 - DNA, 25 bp, Homo sapien
gggcgcgtcccgcggcggcgcggcc

SEQ ID NO: 5821662 - DNA, 25 bp, Homo sapien
aagtcacggggctttgggacggatg

SEQ ID NO: 5821663 - DNA, 25 bp, Homo sapien
aaccacctccttgccgtttgttgcc

SEQ ID NO: 5821664 - DNA, 25 bp, Homo sapien
agttttcatccaaggtgaagcacca

SEQ ID NO: 5821665 - DNA, 25 bp, Homo sapien
tgtttcttgggcagcagccccgcgt

SEQ ID NO: 5821666 - DNA, 25 bp, Homo sapien
gtcacggggctttgggacggatgaa

SEQ ID NO: 5821667 - DNA, 25 bp, Homo sapien
actttgcagtgcagttctgctgtct

SEQ ID NO: 5821668 - DNA, 25 bp, Homo sapien
agatacctatatgcttcttctgcag

SEQ ID NO: 5821669 - DNA, 25 bp, Homo sapien
catccaaggtgaagcaccagggagc

SEQ ID NO: 5821670 - DNA, 25 bp, Homo sapien
ttcttctgcagtattaacagacata

SEQ ID NO: 5821671 - DNA, 25 bp, Homo sapien
ccggtagtccacacctgtgctgtta

SEQ ID NO: 5821672 - DNA, 25 bp, Homo sapien
gagatcaagcaaatactgtccattt

SEQ ID NO: 5821673 - DNA, 25 bp, Homo sapien
catcgcagtacgggaaggcatagtg

SEQ ID NO: 5821674 - DNA, 25 bp, Homo sapien
cctgggtcggactccgagaacagcg

SEQ ID NO: 5821675 - DNA, 25 bp, Homo sapien
ctgggaattccatggctggcactgg

SEQ ID NO: 5821676 - DNA, 25 bp, Homo sapien
ttttcatccaaggtgaagcaccagg

SEQ ID NO: 5821677 - DNA, 25 bp, Homo sapien
tggaagtgccaatcatagtgaaggc

SEQ ID NO: 5821678 - DNA, 25 bp, Homo sapien
atcttcacagtttggcagtttcagc

SEQ ID NO: 5821679 - DNA, 25 bp, Homo sapien
gacggatgaagtttcatcgcagtac

SEQ ID NO: 5821680 - DNA, 25 bp, Homo sapien
ttttcttttttttggtagagatgga

SEQ ID NO: 5821681 - DNA, 25 bp, Homo sapien
tgatttggtcacactgacggtcccc

SEQ ID NO: 5821682 - DNA, 25 bp, Homo sapien
cctgccttgtggtgttcttaaggca

SEQ ID NO: 5821683 - DNA, 25 bp, Homo sapien
tttctataaaaatcaatgtgataaa

SEQ ID NO: 5821684 - DNA, 25 bp, Homo sapien
tttccccttgcatgtgcaaagactc

SEQ ID NO: 5821685 - DNA, 25 bp, Homo sapien
ctatatgcttcttctgcagtattaa

SEQ ID NO: 5821686 - DNA, 25 bp, Homo sapien
aataaatcttgcacatgcaatccct

SEQ ID NO: 5821687 - DNA, 25 bp, Homo sapien
gcggcggcggcggcggctcccaggc

SEQ ID NO: 5821688 - DNA, 25 bp, Homo sapien
agtcgccctgggtcggactccgaga

SEQ ID NO: 5821689 - DNA, 25 bp, Homo sapien
ggccgcgcgcagaacatccacgggc

SEQ ID NO: 5821690 - DNA, 25 bp, Homo sapien
aaaaaggaacagttaactgactcag

SEQ ID NO: 5821691 - DNA, 25 bp, Homo sapien
cagcttctgggctctctggctgggg

SEQ ID NO: 5821692 - DNA, 25 bp, Homo sapien
ctgggtccctgttacatccacgagt

SEQ ID NO: 5821693 - DNA, 25 bp, Homo sapien
gcatacagaaaacaatttcttcctg

SEQ ID NO: 5821694 - DNA, 25 bp, Homo sapien
gcgggtcagtcccaggctgtccggg

SEQ ID NO: 5821695 - DNA, 25 bp, Homo sapien
gaatggcgaactgagaacacttatc

SEQ ID NO: 5821696 - DNA, 25 bp, Homo sapien
ataagccaccatgcttggcccattt

SEQ ID NO: 5821697 - DNA, 25 bp, Homo sapien
gcggtggcggctgctccagctctcc

SEQ ID NO: 5821698 - DNA, 25 bp, Homo sapien
aaagatgattgaatacattaggggc

SEQ ID NO: 5821699 - DNA, 25 bp, Homo sapien
ttcatactcatctgagtatcctgga

SEQ ID NO: 5821700 - DNA, 25 bp, Homo sapien
gcgcaccctgcgcccaggggctgcc

SEQ ID NO: 5821701 - DNA, 25 bp, Homo sapien
ttctagaaaaaggaacagttaactg

SEQ ID NO: 5821702 - DNA, 25 bp, Homo sapien
cttccttttgattccctgggttgcg

SEQ ID NO: 5821703 - DNA, 25 bp, Homo sapien
ctcccaggccgcgcgcagaacatcc

SEQ ID NO: 5821704 - DNA, 25 bp, Homo sapien
ttccattttcttactagatacctat

SEQ ID NO: 5821705 - DNA, 25 bp, Homo sapien
ttgaaccagcggatggtgggaggtg

SEQ ID NO: 5821706 - DNA, 25 bp, Homo sapien
cgaggtttctaatccgcagccgaga

SEQ ID NO: 5821707 - DNA, 25 bp, Homo sapien
gcaatccctctgtatggctgacaga

SEQ ID NO: 5821708 - DNA, 25 bp, Homo sapien
gtataaaggcagttgacttcttgag

SEQ ID NO: 5821709 - DNA, 25 bp, Homo sapien
tgggggagatcttcacagtttggca

SEQ ID NO: 5821710 - DNA, 25 bp, Homo sapien
atcccttcccagccctctggctgca

SEQ ID NO: 5821711 - DNA, 25 bp, Homo sapien
tccggggctcctggaccacaggagc

SEQ ID NO: 5821712 - DNA, 25 bp, Homo sapien
gggtcagtcccaggctgtccgggtc

SEQ ID NO: 5821713 - DNA, 25 bp, Homo sapien
attaggggcaatgacttctatttac

SEQ ID NO: 5821714 - DNA, 25 bp, Homo sapien
tctgcaaagctctttgtccctctaa

SEQ ID NO: 5821715 - DNA, 25 bp, Homo sapien
caaacattttctagaaaaaggaaca

SEQ ID NO: 5821716 - DNA, 25 bp, Homo sapien
tgaagtttcatcgcagtacgggaag

SEQ ID NO: 5821717 - DNA, 25 bp, Homo sapien
gaaacgaagggcggtgaaagtgtgt

SEQ ID NO: 5821718 - DNA, 25 bp, Homo sapien
cacttgtgatttttatttataggat

SEQ ID NO: 5821719 - DNA, 25 bp, Homo sapien
ccagtggaagaaaccacctccttgc

SEQ ID NO: 5821720 - DNA, 25 bp, Homo sapien
cagctctccacgctccctctctcct

SEQ ID NO: 5821721 - DNA, 25 bp, Homo sapien
ccgcaagctgggatgtcacacagat

SEQ ID NO: 5821722 - DNA, 25 bp, Homo sapien
aaggcagctgtgatctgattttcta

SEQ ID NO: 5821723 - DNA, 25 bp, Homo sapien
gctggcactggcgccctgatttggt

SEQ ID NO: 5821724 - DNA, 25 bp, Homo sapien
gtgcctctgaagggctgggtccctg

SEQ ID NO: 5821725 - DNA, 25 bp, Homo sapien
catgtgcaaagactccatatagacg

SEQ ID NO: 5821726 - DNA, 25 bp, Homo sapien
taccttacgaggtgttttatgtaga

SEQ ID NO: 5821727 - DNA, 25 bp, Homo sapien
gcagaacatccacgggctcttcccg

SEQ ID NO: 5821728 - DNA, 25 bp, Homo sapien
tccacttggacgcagaccattctgg

SEQ ID NO: 5821729 - DNA, 25 bp, Homo sapien
caggggctgccgtcccggggctccc

SEQ ID NO: 5821730 - DNA, 25 bp, Homo sapien
tggctggcactggcgccctgatttg

SEQ ID NO: 5821731 - DNA, 25 bp, Homo sapien
acctgtgctgttataacacttgtga

SEQ ID NO: 5821732 - DNA, 25 bp, Homo sapien
aagactccatatagacggtgcggtt

SEQ ID NO: 5821733 - DNA, 25 bp, Homo sapien
caggacgccggggacgtctgcaaag

SEQ ID NO: 5821734 - DNA, 25 bp, Homo sapien
ccagagactttgcagtgcagttctg

SEQ ID NO: 5821735 - DNA, 25 bp, Homo sapien
aatgatcctcctgcctcggccttcc

SEQ ID NO: 5821736 - DNA, 25 bp, Homo sapien
aatccatcttcttcatactcatctg

SEQ ID NO: 5821737 - DNA, 25 bp, Homo sapien
cattcagctctgggaaacgaagggc

SEQ ID NO: 5821738 - DNA, 25 bp, Homo sapien
gggctctctggctgggggagatctt

SEQ ID NO: 5821739 - DNA, 25 bp, Homo sapien
tgttgagttcacttgagatgttcca

SEQ ID NO: 5821740 - DNA, 25 bp, Homo sapien
gagatgttccatgatgaggtaggca

SEQ ID NO: 5821741 - DNA, 25 bp, Homo sapien
gcctctggatgccgcgagcgcgatc

SEQ ID NO: 5821742 - DNA, 25 bp, Homo sapien
ccccggtagtccacacctgtgctgt

SEQ ID NO: 5821743 - DNA, 25 bp, Homo sapien
tcctcctctcgctgaggcggcggcg

SEQ ID NO: 5821744 - DNA, 25 bp, Homo sapien
gctcctggaccacaggagcatcatt

SEQ ID NO: 5821745 - DNA, 25 bp, Homo sapien
actaattcagcactgactgacagct

SEQ ID NO: 5821746 - DNA, 25 bp, Homo sapien
atttttgaaccagcggatggtggga

SEQ ID NO: 5821747 - DNA, 25 bp, Homo sapien
cctgtgtctgtggtgtcgaggtttc

SEQ ID NO: 5821748 - DNA, 25 bp, Homo sapien
catcaagggtcaggtaagaatcttt

SEQ ID NO: 5821749 - DNA, 25 bp, Homo sapien
ccaatcatagtgaaggcagctgtga

SEQ ID NO: 5821750 - DNA, 25 bp, Homo sapien
gggggccaaacttgacaaacaagac

SEQ ID NO: 5821751 - DNA, 25 bp, Homo sapien
cgtctgcaaagctctttgtccctct

SEQ ID NO: 5821752 - DNA, 25 bp, Homo sapien
cagcgcggccagcagcgccaggagc

SEQ ID NO: 5821753 - DNA, 25 bp, Homo sapien
ggagagcctccggggctcctggacc

SEQ ID NO: 5821754 - DNA, 25 bp, Homo sapien
tgccaataaatcttgcacatgcaat

SEQ ID NO: 5821755 - DNA, 25 bp, Homo sapien
cacgcactggaagtagcctgtgtct

SEQ ID NO: 5821756 - DNA, 25 bp, Homo sapien
gccggggacgtctgcaaagctcttt

SEQ ID NO: 5821757 - DNA, 25 bp, Homo sapien
ggtgcggttgccaataaatcttgca

SEQ ID NO: 5821758 - DNA, 25 bp, Homo sapien
gcctctgaagggctgggtccctgtt

SEQ ID NO: 5821759 - DNA, 25 bp, Homo sapien
tcttcatactcatctgagtatcctg

SEQ ID NO: 5821760 - DNA, 25 bp, Homo sapien
ggacttgcagtgggaggggggccaa

SEQ ID NO: 5821761 - DNA, 25 bp, Homo sapien
ggggctttgggacggatgaagtttc

SEQ ID NO: 5821762 - DNA, 25 bp, Homo sapien
ggatgccgcgagcgcgatcccttcc

SEQ ID NO: 5821763 - DNA, 25 bp, Homo sapien
tcagcactgactgacagctctgttt

SEQ ID NO: 5821764 - DNA, 25 bp, Homo sapien
tgttgccacgcactggaagtagcct

SEQ ID NO: 5821765 - DNA, 25 bp, Homo sapien
gggccggcgggtcagtcccaggctg

SEQ ID NO: 5821766 - DNA, 25 bp, Homo sapien
ccgcgcgcagaacatccacgggctc

SEQ ID NO: 5821767 - DNA, 25 bp, Homo sapien
ggcggcggcggcggctcccaggccg

SEQ ID NO: 5821768 - DNA, 25 bp, Homo sapien
caccagtgggcgtgagtcgccctgg

SEQ ID NO: 5821769 - DNA, 25 bp, Homo sapien
ggtccacttggacgcagaccattct

SEQ ID NO: 5821770 - DNA, 25 bp, Homo sapien
ctgctccctcgcctccgcctggccg

SEQ ID NO: 5821771 - DNA, 25 bp, Homo sapien
ccggatacagttcgcagcttctggg

SEQ ID NO: 5821772 - DNA, 25 bp, Homo sapien
tgagtcgccctgggtcggactccga

SEQ ID NO: 5821773 - DNA, 25 bp, Homo sapien
ctctgaagggctgggtccctgttac

SEQ ID NO: 5821774 - DNA, 25 bp, Homo sapien
acaaacaagactccagtggaagaaa

SEQ ID NO: 5821775 - DNA, 25 bp, Homo sapien
tccatggctggcactggcgccctga

SEQ ID NO: 5821776 - DNA, 25 bp, Homo sapien
tcatcgcgacacaagtcacggggct

SEQ ID NO: 5821777 - DNA, 25 bp, Homo sapien
ggattctcctaaataagaggggtag

SEQ ID NO: 5821778 - DNA, 25 bp, Homo sapien
agcttccttttgattccctgggttg

SEQ ID NO: 5821779 - DNA, 25 bp, Homo sapien
agcagcgccaggagcggcgggcgcg

SEQ ID NO: 5821780 - DNA, 25 bp, Homo sapien
tcatcagaatcatgggatttgatct

SEQ ID NO: 5821781 - DNA, 25 bp, Homo sapien
tgaggtaggcactaattcagcactg

SEQ ID NO: 5821782 - DNA, 25 bp, Homo sapien
gctctgggaaacgaagggcggtgaa

SEQ ID NO: 5821783 - DNA, 25 bp, Homo sapien
ggcctccattcagctctgggaaacg

SEQ ID NO: 5821784 - DNA, 25 bp, Homo sapien
ctggccgcctctggatgccgcgagc

SEQ ID NO: 5821785 - DNA, 25 bp, Homo sapien
aaaccagattgagatcaagcaaata

SEQ ID NO: 5821786 - DNA, 25 bp, Homo sapien
cgcaggacgccggggacgtctgcaa

SEQ ID NO: 5821787 - DNA, 25 bp, Homo sapien
cggatgaagtttcatcgcagtacgg

SEQ ID NO: 5821788 - DNA, 25 bp, Homo sapien
atgtactctgtttgacacaggacat

SEQ ID NO: 5821789 - DNA, 25 bp, Homo sapien
tgacggtcccccggtagtccacacc

SEQ ID NO: 5821790 - DNA, 25 bp, Homo sapien
cgtgagtcgccctgggtcggactcc

SEQ ID NO: 5821791 - DNA, 25 bp, Homo sapien
ctccgcctggccgcctctggatgcc

SEQ ID NO: 5821792 - DNA, 25 bp, Homo sapien
atagggatctttaaagatgattgaa

SEQ ID NO: 5821793 - DNA, 25 bp, Homo sapien
tcagacttaaagttttcatccaagg

SEQ ID NO: 5821794 - DNA, 25 bp, Homo sapien
agagcctccggggctcctggaccac

SEQ ID NO: 5821795 - DNA, 25 bp, Homo sapien
ccatgatgaggtaggcactaattca

SEQ ID NO: 5821796 - DNA, 25 bp, Homo sapien
gaattccaatccggatacagttcgc

SEQ ID NO: 5821797 - DNA, 25 bp, Homo sapien
ctggcgctcgcaggacgccggggac

SEQ ID NO: 5821798 - DNA, 25 bp, Homo sapien
ccatagatggtggaccgaaaggaga

SEQ ID NO: 5821799 - DNA, 25 bp, Homo sapien
atggagtctcactatgttgcctggg

SEQ ID NO: 5821800 - DNA, 25 bp, Homo sapien
ataacgaaggacacagtttacccac

SEQ ID NO: 5821801 - DNA, 25 bp, Homo sapien
gaccattctgggtaacatctttttc

SEQ ID NO: 5821802 - DNA, 25 bp, Homo sapien
tcccgggctcccggccgcctcgtcc

SEQ ID NO: 5821803 - DNA, 25 bp, Homo sapien
tggcgccctgatttggtcacactga

SEQ ID NO: 5821804 - DNA, 25 bp, Homo sapien
cggtgcattcctcctctcgctgagg

SEQ ID NO: 5821805 - DNA, 25 bp, Homo sapien
caggagcggcgggcgcgtcccgcgg

SEQ ID NO: 5821806 - DNA, 25 bp, Homo sapien
tgcaatggctgcaggtataaaggca

SEQ ID NO: 5821807 - DNA, 25 bp, Homo sapien
tggcggctgctccagctctccacgc

SEQ ID NO: 5821808 - DNA, 25 bp, Homo sapien
gccttcctagagtgttgggattaca

SEQ ID NO: 5821809 - DNA, 25 bp, Homo sapien
aaggcatagtggcacagggaaggaa

SEQ ID NO: 5821810 - DNA, 25 bp, Homo sapien
tctgtttcttgggcagcagccccgc

SEQ ID NO: 5821811 - DNA, 25 bp, Homo sapien
gctctgtttcttgggcagcagcccc

SEQ ID NO: 5821812 - DNA, 25 bp, Homo sapien
gaattccatggctggcactggcgcc

SEQ ID NO: 5821813 - DNA, 25 bp, Homo sapien
caaatgatcctcctgcctcggcctt

SEQ ID NO: 5821814 - DNA, 25 bp, Homo sapien
atagtgaaggcagctgtgatctgat

SEQ ID NO: 5821815 - DNA, 25 bp, Homo sapien
ggaaggcatagtggcacagggaagg

SEQ ID NO: 5821816 - DNA, 25 bp, Homo sapien
gactccagtggaagaaaccacctcc

SEQ ID NO: 5821817 - DNA, 25 bp, Homo sapien
aatcttgcacatgcaatccctctgt

SEQ ID NO: 5821818 - DNA, 25 bp, Homo sapien
ggtaagaatctttgttgagttcact

SEQ ID NO: 5821819 - DNA, 25 bp, Homo sapien
ctgaagggctgggtccctgttacat

SEQ ID NO: 5821820 - DNA, 25 bp, Homo sapien
gtggtgttcttaaggcatacagaaa

SEQ ID NO: 5821821 - DNA, 25 bp, Homo sapien
gtccctgttacatccacgagtgcaa

SEQ ID NO: 5821822 - DNA, 25 bp, Homo sapien
cctggatgaccgagtaatggttgta

SEQ ID NO: 5821823 - DNA, 25 bp, Homo sapien
gcactaattcagcactgactgacag

SEQ ID NO: 5821824 - DNA, 25 bp, Homo sapien
ttgagttcacttgagatgttccatg

SEQ ID NO: 5821825 - DNA, 25 bp, Homo sapien
cacagggaaggaatggcgaactgag

SEQ ID NO: 5821826 - DNA, 25 bp, Homo sapien
gactcaggaattccattttcttact

SEQ ID NO: 5821827 - DNA, 25 bp, Homo sapien
agatggtggaccgaaaggagagcct

SEQ ID NO: 5821828 - DNA, 25 bp, Homo sapien
ggtcacactgacggtcccccggtag

SEQ ID NO: 5821829 - DNA, 25 bp, Homo sapien
cccttataggattctcctaaataag

SEQ ID NO: 5821830 - DNA, 25 bp, Homo sapien
ggtaggatagggatctttaaagatg

SEQ ID NO: 5821831 - DNA, 25 bp, Homo sapien
acacttatcagataagtgactggaa

SEQ ID NO: 5821832 - DNA, 25 bp, Homo sapien
agagtgttgggattacaggtataag

SEQ ID NO: 5821833 - DNA, 25 bp, Homo sapien
agaaaacaatttcttcctgcttcca

SEQ ID NO: 5821834 - DNA, 25 bp, Homo sapien
agtgggaggggggccaaacttgaca

SEQ ID NO: 5821835 - DNA, 25 bp, Homo sapien
tctttgtccctctaacctgctccct

SEQ ID NO: 5821836 - DNA, 25 bp, Homo sapien
tggggatactgggaattccatggct

SEQ ID NO: 5821837 - DNA, 25 bp, Homo sapien
acctatatgcttcttctgcagtatt

SEQ ID NO: 5821838 - DNA, 25 bp, Homo sapien
cagcgccaggagcggcgggcgcgtc

SEQ ID NO: 5821839 - DNA, 25 bp, Homo sapien
tgaggcggcggcggcggcggctccc

SEQ ID NO: 5821840 - DNA, 25 bp, Homo sapien
ggtgttcttaaggcatacagaaaac

SEQ ID NO: 5821841 - DNA, 25 bp, Homo sapien
tggatgaccgagtaatggttgtaga

SEQ ID NO: 5821842 - DNA, 25 bp, Homo sapien
ggtgttttatgtagaaacggcaagg

SEQ ID NO: 5821843 - DNA, 25 bp, Homo sapien
taaatcttgcacatgcaatccctct

SEQ ID NO: 5821844 - DNA, 25 bp, Homo sapien
tctttgttgagttcacttgagatgt

SEQ ID NO: 5821845 - DNA, 25 bp, Homo sapien
ccgcctctggatgccgcgagcgcga

SEQ ID NO: 5821846 - DNA, 25 bp, Homo sapien
ctgactcaggaattccattttctta

SEQ ID NO: 5821847 - DNA, 25 bp, Homo sapien
taaaaccagattgagatcaagcaaa

SEQ ID NO: 5821848 - DNA, 25 bp, Homo sapien
ggagatcttcacagtttggcagttt

SEQ ID NO: 5821849 - DNA, 25 bp, Homo sapien
attcagcactgactgacagctctgt

SEQ ID NO: 5821850 - DNA, 25 bp, Homo sapien
tcccggggctccctcggcggcggcg

SEQ ID NO: 5821851 - DNA, 25 bp, Homo sapien
cctgatttggtcacactgacggtcc

SEQ ID NO: 5821852 - DNA, 25 bp, Homo sapien
tgcaaagactccatatagacggtgc

SEQ ID NO: 5821853 - DNA, 25 bp, Homo sapien
gagaacacttatcagataagtgact

SEQ ID NO: 5821854 - DNA, 25 bp, Homo sapien
aaaacaatttcttcctgcttccaat

SEQ ID NO: 5821855 - DNA, 25 bp, Homo sapien
ttgatcttgcaaaaatgtactctgt

SEQ ID NO: 5821856 - DNA, 25 bp, Homo sapien
gaacacttatcagataagtgactgg

SEQ ID NO: 5821857 - DNA, 25 bp, Homo sapien
atagacggtgcggttgccaataaat

SEQ ID NO: 5821858 - DNA, 25 bp, Homo sapien
caggaattccattttcttactagat

SEQ ID NO: 5821859 - DNA, 25 bp, Homo sapien
ggtggcggctgctccagctctccac

SEQ ID NO: 5821860 - DNA, 25 bp, Homo sapien
ggagcatcatttttgaaccagcgga

SEQ ID NO: 5821861 - DNA, 25 bp, Homo sapien
cgtttgttgccacgcactggaagta

SEQ ID NO: 5821862 - DNA, 25 bp, Homo sapien
acgccggggacgtctgcaaagctct

SEQ ID NO: 5821863 - DNA, 25 bp, Homo sapien
tttatgtagaaacggcaaggtttac

SEQ ID NO: 5821864 - DNA, 25 bp, Homo sapien
agagactttgcagtgcagttctgct

SEQ ID NO: 5821865 - DNA, 25 bp, Homo sapien
cgcctcgtcccggccgctggcgctc

SEQ ID NO: 5821866 - DNA, 25 bp, Homo sapien
aaggtccacttggacgcagaccatt

SEQ ID NO: 5821867 - DNA, 25 bp, Homo sapien
gggtcgcaccagtgggcgtgagtcg

SEQ ID NO: 5821868 - DNA, 25 bp, Homo sapien
atttggtcacactgacggtcccccg

SEQ ID NO: 5821869 - DNA, 25 bp, Homo sapien
ttgcctgggctggtcttgaacccct

SEQ ID NO: 5821870 - DNA, 25 bp, Homo sapien
tgtctggcccagagacgtggtgatg

SEQ ID NO: 5821871 - DNA, 25 bp, Homo sapien
caccagggagcttccttttgattcc

SEQ ID NO: 5821872 - DNA, 25 bp, Homo sapien
gatgaccgagtaatggttgtagatt

SEQ ID NO: 5821873 - DNA, 25 bp, Homo sapien
tggaccgaaaggagagcctccgggg

SEQ ID NO: 5821874 - DNA, 25 bp, Homo sapien
gtgctgttataacacttgtgatttt

SEQ ID NO: 5821875 - DNA, 25 bp, Homo sapien
gcctcggccttcctagagtgttggg

SEQ ID NO: 5821876 - DNA, 25 bp, Homo sapien
tttcagcctcatcagaatcatggga

SEQ ID NO: 5821877 - DNA, 25 bp, Homo sapien
acacaagtcacggggctttgggacg

SEQ ID NO: 5821878 - DNA, 25 bp, Homo sapien
gaggggggccaaacttgacaaacaa

SEQ ID NO: 5821879 - DNA, 25 bp, Homo sapien
tcctttttttgctgaaaaggtccac

SEQ ID NO: 5821880 - DNA, 25 bp, Homo sapien
gccccgcgtgcggccagcagcagcg

SEQ ID NO: 5821881 - DNA, 25 bp, Homo sapien
gtgcattcctcctctcgctgaggcg

SEQ ID NO: 5821882 - DNA, 25 bp, Homo sapien
gctgacagaatccatcttcttcata

SEQ ID NO: 5821883 - DNA, 25 bp, Homo sapien
ccatatagacggtgcggttgccaat

SEQ ID NO: 5821884 - DNA, 25 bp, Homo sapien
ttcttttttttggtagagatggagt

SEQ ID NO: 5821885 - DNA, 25 bp, Homo sapien
tgggaggggggccaaacttgacaaa

SEQ ID NO: 5821886 - DNA, 25 bp, Homo sapien
gctggtcttgaacccctgggctcaa

SEQ ID NO: 5821887 - DNA, 25 bp, Homo sapien
tcccccggtagtccacacctgtgct

SEQ ID NO: 5821888 - DNA, 25 bp, Homo sapien
ccctcggcggcggcggtggcggctg

SEQ ID NO: 5821889 - DNA, 25 bp, Homo sapien
ttcatcgcagtacgggaaggcatag

SEQ ID NO: 5821890 - DNA, 25 bp, Homo sapien
aggtataaaggcagttgacttcttg

SEQ ID NO: 5821891 - DNA, 25 bp, Homo sapien
ggtaccttacgaggtgttttatgta

SEQ ID NO: 5821892 - DNA, 25 bp, Homo sapien
attctgggtaacatctttttctata

SEQ ID NO: 5821893 - DNA, 25 bp, Homo sapien
ctggatgccgcgagcgcgatccctt

SEQ ID NO: 5821894 - DNA, 25 bp, Homo sapien
ttgctgaaaaggtccacttggacgc

SEQ ID NO: 5821895 - DNA, 25 bp, Homo sapien
tgccaatcatagtgaaggcagctgt

SEQ ID NO: 5821896 - DNA, 25 bp, Homo sapien
tccgagaacagcgcaccctgcgccc

SEQ ID NO: 5821897 - DNA, 25 bp, Homo sapien
ctcatctgagtatcctggacttgca

SEQ ID NO: 5821898 - DNA, 25 bp, Homo sapien
ttgccgtttgttgccacgcactgga

SEQ ID NO: 5821899 - DNA, 25 bp, Homo sapien
ttttttgctgaaaaggtccacttgg

SEQ ID NO: 5821900 - DNA, 25 bp, Homo sapien
tcctgcttccaatattccttttttt

SEQ ID NO: 5821901 - DNA, 25 bp, Homo sapien
ctgactgacagctctgtttcttggg

SEQ ID NO: 5821902 - DNA, 25 bp, Homo sapien
acagttaactgactcaggaattcca

SEQ ID NO: 5821903 - DNA, 25 bp, Homo sapien
cagctctgtttcttgggcagcagcc

SEQ ID NO: 5821904 - DNA, 25 bp, Homo sapien
acttgagatgttccatgatgaggta

SEQ ID NO: 5821905 - DNA, 25 bp, Homo sapien
taggggcaatgacttctatttaccg

SEQ ID NO: 5821906 - DNA, 25 bp, Homo sapien
gctgggggagatcttcacagtttgg

SEQ ID NO: 5821907 - DNA, 25 bp, Homo sapien
ttgtagattcatcctgccttgtggt

SEQ ID NO: 5821908 - DNA, 25 bp, Homo sapien
tcctagagtgttgggattacaggta

SEQ ID NO: 5821909 - DNA, 25 bp, Homo sapien
ttcatcaagggtcaggtaagaatct

SEQ ID NO: 5821910 - DNA, 25 bp, Homo sapien
atgcttggcccattttcattatttt

SEQ ID NO: 5821911 - DNA, 25 bp, Homo sapien
aaagttttcatccaaggtgaagcac

SEQ ID NO: 5821912 - DNA, 25 bp, Homo sapien
gttgccaataaatcttgcacatgca

SEQ ID NO: 5821913 - DNA, 25 bp, Homo sapien
gaatggcctccattcagctctggga

SEQ ID NO: 5821914 - DNA, 25 bp, Homo sapien
ggctcccaggccgcgcgcagaacat

SEQ ID NO: 5821915 - DNA, 25 bp, Homo sapien
cacagattgccctggatgaccgagt

SEQ ID NO: 5821916 - DNA, 25 bp, Homo sapien
tgttttatgtagaaacggcaaggtt

SEQ ID NO: 5821917 - DNA, 25 bp, Homo sapien
acttaaagttttcatccaaggtgaa

SEQ ID NO: 5821918 - DNA, 25 bp, Homo sapien
ctccaggatttcacattcatcgcga

SEQ ID NO: 5821919 - DNA, 25 bp, Homo sapien
caatttcttcctgcttccaatattc

SEQ ID NO: 5821920 - DNA, 25 bp, Homo sapien
cagaatcatgggatttgatcttgca

SEQ ID NO: 5821921 - DNA, 25 bp, Homo sapien
cacgggctcttcccgggctcccggc

SEQ ID NO: 5821922 - DNA, 25 bp, Homo sapien
cttcttgagaacgtgttttggtacc

SEQ ID NO: 5821923 - DNA, 25 bp, Homo sapien
gacagctctgtttcttgggcagcag

SEQ ID NO: 5821924 - DNA, 25 bp, Homo sapien
gccctgggtcggactccgagaacag

SEQ ID NO: 5821925 - DNA, 25 bp, Homo sapien
cctcgcctgggccggcgggtcagtc

SEQ ID NO: 5821926 - DNA, 25 bp, Homo sapien
catcatttttgaaccagcggatggt

SEQ ID NO: 5821927 - DNA, 25 bp, Homo sapien
ccttacgaggtgttttatgtagaaa

SEQ ID NO: 5821928 - DNA, 25 bp, Homo sapien
cacttggacgcagaccattctgggt

SEQ ID NO: 5821929 - DNA, 25 bp, Homo sapien
atcctgccttgtggtgttcttaagg

SEQ ID NO: 5821930 - DNA, 25 bp, Homo sapien
caatggctgcaggtataaaggcagt

SEQ ID NO: 5821931 - DNA, 25 bp, Homo sapien
aatccgcagccgagagccatagatg

SEQ ID NO: 5821932 - DNA, 25 bp, Homo sapien
tgtttgacacaggacattctccagg

SEQ ID NO: 5821933 - DNA, 25 bp, Homo sapien
agcaccagggagcttccttttgatt

SEQ ID NO: 5821934 - DNA, 25 bp, Homo sapien
ggagcggcgggcgcgtcccgcggcg

SEQ ID NO: 5821935 - DNA, 25 bp, Homo sapien
cccttcccagccctctggctgcagc

SEQ ID NO: 5821936 - DNA, 25 bp, Homo sapien
tctgggtaacatctttttctataaa

SEQ ID NO: 5821937 - DNA, 25 bp, Homo sapien
gtccacacctgtgctgttataacac

SEQ ID NO: 5821938 - DNA, 25 bp, Homo sapien
gggcagcagccccgcgtgcggccag

SEQ ID NO: 5821939 - DNA, 25 bp, Homo sapien
caatccggatacagttcgcagcttc

SEQ ID NO: 5821940 - DNA, 25 bp, Homo sapien
tggacgcagaccattctgggtaaca

SEQ ID NO: 5821941 - DNA, 25 bp, Homo sapien
gtactctgtttgacacaggacattc

SEQ ID NO: 5821942 - DNA, 25 bp, Homo sapien
cagataagtgactggaagtgccaat

SEQ ID NO: 5821943 - DNA, 25 bp, Homo sapien
gcaccctgcgcccaggggctgccgt

SEQ ID NO: 5821944 - DNA, 25 bp, Homo sapien
ttttgaaccagcggatggtgggagg

SEQ ID NO: 5821945 - DNA, 25 bp, Homo sapien
tgtctgtggtgtcgaggtttctaat

SEQ ID NO: 5821946 - DNA, 25 bp, Homo sapien
tctaacctgctccctcgcctccgcc

SEQ ID NO: 5821947 - DNA, 25 bp, Homo sapien
ggacgccggggacgtctgcaaagct

SEQ ID NO: 5821948 - DNA, 25 bp, Homo sapien
cctcatcagaatcatgggatttgat

SEQ ID NO: 5821949 - DNA, 25 bp, Homo sapien
ttgcaaaaatgtactctgtttgaca

SEQ ID NO: 5821950 - DNA, 25 bp, Homo sapien
agttgacttcttgagaacgtgtttt

SEQ ID NO: 5821951 - DNA, 25 bp, Homo sapien
ggttgcggcagtaggaatggcctcc

SEQ ID NO: 5821952 - DNA, 25 bp, Homo sapien
ctcaaatgatcctcctgcctcggcc

SEQ ID NO: 5821953 - DNA, 25 bp, Homo sapien
atttataggatctgccatgggaatt

SEQ ID NO: 5821954 - DNA, 25 bp, Homo sapien
tgcggccagcagcagcgcggccagc

SEQ ID NO: 5821955 - DNA, 25 bp, Homo sapien
gcctggccgcctctggatgccgcga

SEQ ID NO: 5821956 - DNA, 25 bp, Homo sapien
atttcttcctgcttccaatattcct

SEQ ID NO: 5821957 - DNA, 25 bp, Homo sapien
tataggattctcctaaataagaggg

SEQ ID NO: 5821958 - DNA, 25 bp, Homo sapien
aggcggcggcggcggcggctcccag

SEQ ID NO: 5821959 - DNA, 25 bp, Homo sapien
cattttctagaaaaaggaacagtta

SEQ ID NO: 5821960 - DNA, 25 bp, Homo sapien
aagaggggtaggatagggatcttta

SEQ ID NO: 5821961 - DNA, 25 bp, Homo sapien
tccacgagtgcaatggctgcaggta

SEQ ID NO: 5821962 - DNA, 25 bp, Homo sapien
atgacttctatttaccgcaagctgg

SEQ ID NO: 5821963 - DNA, 25 bp, Homo sapien
gacgtctgcaaagctctttgtccct

SEQ ID NO: 5821964 - DNA, 25 bp, Homo sapien
ttcttcctgcttccaatattccttt

SEQ ID NO: 5821965 - DNA, 25 bp, Homo sapien
gtcccgcggcggcgcggccggtgca

SEQ ID NO: 5821966 - DNA, 25 bp, Homo sapien
ttggtaccttacgaggtgttttatg

SEQ ID NO: 5821967 - DNA, 25 bp, Homo sapien
gcttctgggctctctggctggggga

SEQ ID NO: 5821968 - DNA, 25 bp, Homo sapien
agtaatggttgtagattcatcctgc

SEQ ID NO: 5821969 - DNA, 25 bp, Homo sapien
cgagtgcaatggctgcaggtataaa

SEQ ID NO: 5821970 - DNA, 25 bp, Homo sapien
cttactagatacctatatgcttctt

SEQ ID NO: 5821971 - DNA, 25 bp, Homo sapien
cgctcgcaggacgccggggacgtct

SEQ ID NO: 5821972 - DNA, 25 bp, Homo sapien
gatcagacttaaagttttcatccaa

SEQ ID NO: 5821973 - DNA, 25 bp, Homo sapien
ctgggccggcgggtcagtcccaggc

SEQ ID NO: 5821974 - DNA, 25 bp, Homo sapien
ctgagaacacttatcagataagtga

SEQ ID NO: 5821975 - DNA, 25 bp, Homo sapien
cccggccgcctcgtcccggccgctg

SEQ ID NO: 5821976 - DNA, 25 bp, Homo sapien
ttacgaggtgttttatgtagaaacg

SEQ ID NO: 5821977 - DNA, 25 bp, Homo sapien
ggctcccggccgcctcgtcccggcc

SEQ ID NO: 5821978 - DNA, 25 bp, Homo sapien
taattcagcactgactgacagctct

SEQ ID NO: 5821979 - DNA, 25 bp, Homo sapien
gcgcgtcccgcggcggcgcggccgg

SEQ ID NO: 5821980 - DNA, 25 bp, Homo sapien
tgtgataaactgtctcaactgtgcc

SEQ ID NO: 5821981 - DNA, 25 bp, Homo sapien
cgtgcggccagcagcagcgcggcca

SEQ ID NO: 5821982 - DNA, 25 bp, Homo sapien
ctagagtgttgggattacaggtata

SEQ ID NO: 5821983 - DNA, 25 bp, Homo sapien
ccctgttacatccacgagtgcaatg

SEQ ID NO: 5821984 - DNA, 25 bp, Homo sapien
gcggctcccaggccgcgcgcagaac

SEQ ID NO: 5821985 - DNA, 25 bp, Homo sapien
aatcatagtgaaggcagctgtgatc

SEQ ID NO: 5821986 - DNA, 25 bp, Homo sapien
tttacccacagattgccctggatga

SEQ ID NO: 5821987 - DNA, 25 bp, Homo sapien
ctgcaggtataaaggcagttgactt

SEQ ID NO: 5821988 - DNA, 25 bp, Homo sapien
ggcggcggtggcggctgctccagct

SEQ ID NO: 5821989 - DNA, 25 bp, Homo sapien
cggggacgtctgcaaagctctttgt

SEQ ID NO: 5821990 - DNA, 25 bp, Homo sapien
acgaggtgttttatgtagaaacggc

SEQ ID NO: 5821991 - DNA, 25 bp, Homo sapien
acacaggacattctccaggatttca

SEQ ID NO: 5821992 - DNA, 25 bp, Homo sapien
tcaatgtgataaactgtctcaactg

SEQ ID NO: 5821993 - DNA, 25 bp, Homo sapien
tggtcttgaacccctgggctcaaat

SEQ ID NO: 5821994 - DNA, 25 bp, Homo sapien
tcccagagactttgcagtgcagttc

SEQ ID NO: 5821995 - DNA, 25 bp, Homo sapien
gaaggaatggcgaactgagaacact

SEQ ID NO: 5821996 - DNA, 25 bp, Homo sapien
agtggaagaaaccacctccttgccg

SEQ ID NO: 5821997 - DNA, 25 bp, Homo sapien
aacgaaggacacagtttacccacag

SEQ ID NO: 5821998 - DNA, 25 bp, Homo sapien
ttgggacggatgaagtttcatcgca

SEQ ID NO: 5821999 - DNA, 25 bp, Homo sapien
gtagagatggagtctcactatgttg

SEQ ID NO: 5822000 - DNA, 25 bp, Homo sapien
atcgcgacacaagtcacggggcttt

SEQ ID NO: 5822001 - DNA, 25 bp, Homo sapien
cgcactggaagtagcctgtgtctgt

SEQ ID NO: 5822002 - DNA, 25 bp, Homo sapien
gtagattcatcctgccttgtggtgt

SEQ ID NO: 5822003 - DNA, 25 bp, Homo sapien
aggtgaagcaccagggagcttcctt

SEQ ID NO: 5822004 - DNA, 25 bp, Homo sapien
tcttgggcagcagccccgcgtgcgg

SEQ ID NO: 5822005 - DNA, 25 bp, Homo sapien
caaacttgacaaacaagactccagt

SEQ ID NO: 5822006 - DNA, 25 bp, Homo sapien
atatagacggtgcggttgccaataa

SEQ ID NO: 5822007 - DNA, 25 bp, Homo sapien
taggattctcctaaataagaggggt

SEQ ID NO: 5822008 - DNA, 25 bp, Homo sapien
ataagaggggtaggatagggatctt

SEQ ID NO: 5822009 - DNA, 25 bp, Homo sapien
acactgacggtcccccggtagtcca

SEQ ID NO: 5822010 - DNA, 25 bp, Homo sapien
ggatctttaaagatgattgaataca

SEQ ID NO: 5822011 - DNA, 25 bp, Homo sapien
cgcagcttctgggctctctggctgg

SEQ ID NO: 5822012 - DNA, 25 bp, Homo sapien
aaaggaacagttaactgactcagga

SEQ ID NO: 5822013 - DNA, 25 bp, Homo sapien
gcagcagcgcggccagcagcgccag

SEQ ID NO: 5822014 - DNA, 25 bp, Homo sapien
tgagtatcctggacttgcagtggga

SEQ ID NO: 5822015 - DNA, 25 bp, Homo sapien
ggtgatgttattcattggttcatca

SEQ ID NO: 5822016 - DNA, 25 bp, Homo sapien
cttcacagtttggcagtttcagcct

SEQ ID NO: 5822017 - DNA, 25 bp, Homo sapien
tgcgcccaggggctgccgtcccggg

SEQ ID NO: 5822018 - DNA, 25 bp, Homo sapien
cctcctgcctcggccttcctagagt

SEQ ID NO: 5822019 - DNA, 25 bp, Homo sapien
gcggcgcggccggtgcattcctcct

SEQ ID NO: 5822020 - DNA, 25 bp, Homo sapien
cacggggctttgggacggatgaagt

SEQ ID NO: 5822021 - DNA, 25 bp, Homo sapien
ttataggatctgccatgggaattcc

SEQ ID NO: 5822022 - DNA, 25 bp, Homo sapien
aaggacacagtttacccacagattg

SEQ ID NO: 5822023 - DNA, 25 bp, Homo sapien
gtgtcgaggtttctaatccgcagcc

SEQ ID NO: 5822024 - DNA, 25 bp, Homo sapien
tgacagaatccatcttcttcatact

SEQ ID NO: 5822025 - DNA, 25 bp, Homo sapien
gattgccctggatgaccgagtaatg

SEQ ID NO: 5822026 - DNA, 25 bp, Homo sapien
taacctgctccctcgcctccgcctg

SEQ ID NO: 5822027 - DNA, 25 bp, Homo sapien
tttcacattcatcgcgacacaagtc

SEQ ID NO: 5822028 - DNA, 25 bp, Homo sapien
aggatctgccatgggaattccaatc

SEQ ID NO: 5822029 - DNA, 25 bp, Homo sapien
atatgcttcttctgcagtattaaca

SEQ ID NO: 5822030 - DNA, 25 bp, Homo sapien
cttcccagccctctggctgcagcct

SEQ ID NO: 5822031 - DNA, 25 bp, Homo sapien
ctgccgtcccggggctccctcggcg

SEQ ID NO: 5822032 - DNA, 25 bp, Homo sapien
agaacatccacgggctcttcccggg

SEQ ID NO: 5822033 - DNA, 25 bp, Homo sapien
ttggcccattttcattattttctcc

SEQ ID NO: 5822034 - DNA, 25 bp, Homo sapien
cagccccgcgtgcggccagcagcag

SEQ ID NO: 5822035 - DNA, 25 bp, Homo sapien
tgtctcaactgtgcctctgaagggc

SEQ ID NO: 5822036 - DNA, 25 bp, Homo sapien
gtcccggccgctggcgctcgcagga

SEQ ID NO: 5822037 - DNA, 25 bp, Homo sapien
caatgacttctatttaccgcaagct

SEQ ID NO: 5822038 - DNA, 25 bp, Homo sapien
ggggtaggatagggatctttaaaga

SEQ ID NO: 5822039 - DNA, 25 bp, Homo sapien
gaagaaaccacctccttgccgtttg

SEQ ID NO: 5822040 - DNA, 25 bp, Homo sapien
gccgtcccggggctccctcggcggc

SEQ ID NO: 5822041 - DNA, 25 bp, Homo sapien
gttattcattggttcatcaagggtc

SEQ ID NO: 5822042 - DNA, 25 bp, Homo sapien
gttcacttgagatgttccatgatga

SEQ ID NO: 5822043 - DNA, 25 bp, Homo sapien
ctctggatgccgcgagcgcgatccc

SEQ ID NO: 5822044 - DNA, 25 bp, Homo sapien
ccaggatttcacattcatcgcgaca

SEQ ID NO: 5822045 - DNA, 25 bp, Homo sapien
tacatccacgagtgcaatggctgca

SEQ ID NO: 5822046 - DNA, 25 bp, Homo sapien
cgcgacacaagtcacggggctttgg

SEQ ID NO: 5822047 - DNA, 25 bp, Homo sapien
cgcggcggcgcggccggtgcattcc

SEQ ID NO: 5822048 - DNA, 25 bp, Homo sapien
tccaaggtgaagcaccagggagctt

SEQ ID NO: 5822049 - DNA, 25 bp, Homo sapien
gaacagttaactgactcaggaattc

SEQ ID NO: 5822050 - DNA, 25 bp, Homo sapien
agatggagtctcactatgttgcctg

SEQ ID NO: 5822051 - DNA, 25 bp, Homo sapien
actctgtttgacacaggacattctc

SEQ ID NO: 5822052 - DNA, 25 bp, Homo sapien
gattgagatcaagcaaatactgtcc

SEQ ID NO: 5822053 - DNA, 25 bp, Homo sapien
gcactggcgccctgatttggtcaca

SEQ ID NO: 5822054 - DNA, 25 bp, Homo sapien
cgcccaggggctgccgtcccggggc

SEQ ID NO: 5822055 - DNA, 25 bp, Homo sapien
tgatcctcctgcctcggccttccta

SEQ ID NO: 5822056 - DNA, 25 bp, Homo sapien
tttgacacaggacattctccaggat

SEQ ID NO: 5822057 - DNA, 25 bp, Homo sapien
cagaccattctgggtaacatctttt

SEQ ID NO: 5822058 - DNA, 25 bp, Homo sapien
aggcatacagaaaacaatttcttcc

SEQ ID NO: 5822059 - DNA, 25 bp, Homo sapien
tactagatacctatatgcttcttct

SEQ ID NO: 5822060 - DNA, 25 bp, Homo sapien
gttacatccacgagtgcaatggctg

SEQ ID NO: 5822061 - DNA, 25 bp, Homo sapien
gcggcagtaggaatggcctccattc

SEQ ID NO: 5822062 - DNA, 25 bp, Homo sapien
ttgaatacattaggggcaatgactt

SEQ ID NO: 5822063 - DNA, 25 bp, Homo sapien
gaaaggagagcctccggggctcctg

SEQ ID NO: 5822064 - DNA, 25 bp, Homo sapien
ccatgggaattccaatccggataca

SEQ ID NO: 5822065 - DNA, 25 bp, Homo sapien
ctagatacctatatgcttcttctgc

SEQ ID NO: 5822066 - DNA, 25 bp, Homo sapien
acttatcagataagtgactggaagt

SEQ ID NO: 5822067 - DNA, 25 bp, Homo sapien
aaaatcaatgtgataaactgtctca

SEQ ID NO: 5822068 - DNA, 25 bp, Homo sapien
tgtgtgtggggatactgggaattcc

SEQ ID NO: 5822069 - DNA, 25 bp, Homo sapien
gccacgcactggaagtagcctgtgt

SEQ ID NO: 5822070 - DNA, 25 bp, Homo sapien
gcacatgcaatccctctgtatggct

SEQ ID NO: 5822071 - DNA, 25 bp, Homo sapien
actatgttgcctgggctggtcttga

SEQ ID NO: 5822072 - DNA, 25 bp, Homo sapien
ctcgcaggacgccggggacgtctgc

SEQ ID NO: 5822073 - DNA, 25 bp, Homo sapien
agtgtgtgtgtggggatactgggaa

SEQ ID NO: 5822074 - DNA, 25 bp, Homo sapien
aacagcgcaccctgcgcccaggggc

SEQ ID NO: 5822075 - DNA, 25 bp, Homo sapien
cggcggctcccaggccgcgcgcaga

SEQ ID NO: 5822076 - DNA, 25 bp, Homo sapien
ggactccgagaacagcgcaccctgc

SEQ ID NO: 5822077 - DNA, 25 bp, Homo sapien
ttctgggctctctggctgggggaga

SEQ ID NO: 5822078 - DNA, 25 bp, Homo sapien
ctcggccttcctagagtgttgggat

SEQ ID NO: 5822079 - DNA, 25 bp, Homo sapien
ttaaagatgattgaatacattaggg

SEQ ID NO: 5822080 - DNA, 25 bp, Homo sapien
agcactgactgacagctctgtttct

SEQ ID NO: 5822081 - DNA, 25 bp, Homo sapien
cggccggtgcattcctcctctcgct

SEQ ID NO: 5822082 - DNA, 25 bp, Homo sapien
ggagcttccttttgattccctgggt

SEQ ID NO: 5822083 - DNA, 25 bp, Homo sapien
attctcctaaataagaggggtagga

SEQ ID NO: 5822084 - DNA, 25 bp, Homo sapien
tcttgagaacgtgttttggtacctt

SEQ ID NO: 5822085 - DNA, 25 bp, Homo sapien
ggcacagggaaggaatggcgaactg

SEQ ID NO: 5822086 - DNA, 25 bp, Homo sapien
ggcaatgacttctatttaccgcaag

SEQ ID NO: 5822087 - DNA, 25 bp, Homo sapien
gccgcgagcgcgatcccttcccagc

SEQ ID NO: 5822088 - DNA, 25 bp, Homo sapien
ttggttcatcaagggtcaggtaaga

SEQ ID NO: 5822089 - DNA, 25 bp, Homo sapien
gtggtgatgttattcattggttcat

SEQ ID NO: 5822090 - DNA, 25 bp, Homo sapien
cttcctgcttccaatattccttttt

SEQ ID NO: 5822091 - DNA, 25 bp, Homo sapien
ctccctcggcggcggcggtggcggc

SEQ ID NO: 5822092 - DNA, 25 bp, Homo sapien
acacagtttacccacagattgccct

SEQ ID NO: 5822093 - DNA, 25 bp, Homo sapien
ctgctccagctctccacgctccctc

SEQ ID NO: 5822094 - DNA, 25 bp, Homo sapien
ccagtgggcgtgagtcgccctgggt

SEQ ID NO: 5822095 - DNA, 25 bp, Homo sapien
tcccagccctctggctgcagcctcg

SEQ ID NO: 5822096 - DNA, 25 bp, Homo sapien
agggagcttccttttgattccctgg

SEQ ID NO: 5822097 - DNA, 25 bp, Homo sapien
tttgttgccacgcactggaagtagc

SEQ ID NO: 5822098 - DNA, 25 bp, Homo sapien
ggctgggtccctgttacatccacga

SEQ ID NO: 5822099 - DNA, 25 bp, Homo sapien
ctgctgtctggcccagagacgtggt

SEQ ID NO: 5822100 - DNA, 25 bp, Homo sapien
ggccgcctctggatgccgcgagcgc

SEQ ID NO: 5822101 - DNA, 25 bp, Homo sapien
gatgaggtaggcactaattcagcac

SEQ ID NO: 5822102 - DNA, 25 bp, Homo sapien
tgggatttgatcttgcaaaaatgta

SEQ ID NO: 5822103 - DNA, 25 bp, Homo sapien
ttatttataggatctgccatgggaa

SEQ ID NO: 5822104 - DNA, 25 bp, Homo sapien
cggcggcggcggtggcggctgctcc

SEQ ID NO: 5822105 - DNA, 25 bp, Homo sapien
attcatcctgccttgtggtgttctt

SEQ ID NO: 5822106 - DNA, 25 bp, Homo sapien
atgatgaggtaggcactaattcagc

SEQ ID NO: 5822107 - DNA, 25 bp, Homo sapien
cctaaaaccagattgagatcaagca

SEQ ID NO: 5822108 - DNA, 25 bp, Homo sapien
ataaaggcagttgacttcttgagaa

SEQ ID NO: 5822109 - DNA, 25 bp, Homo sapien
gatgttccatgatgaggtaggcact

SEQ ID NO: 5822110 - DNA, 25 bp, Homo sapien
gggaattccatggctggcactggcg

SEQ ID NO: 5822111 - DNA, 25 bp, Homo sapien
aggcactaattcagcactgactgac

SEQ ID NO: 5822112 - DNA, 25 bp, Homo sapien
cgaaggacacagtttacccacagat

SEQ ID NO: 5822113 - DNA, 25 bp, Homo sapien
acctgctccctcgcctccgcctggc

SEQ ID NO: 5822114 - DNA, 25 bp, Homo sapien
tatgttgcctgggctggtcttgaac

SEQ ID NO: 5822115 - DNA, 25 bp, Homo sapien
agcctcgcctgggccggcgggtcag

SEQ ID NO: 5822116 - DNA, 25 bp, Homo sapien
attcatcgcgacacaagtcacgggg

SEQ ID NO: 5822117 - DNA, 25 bp, Homo sapien
accagattgagatcaagcaaatact

SEQ ID NO: 5822118 - DNA, 25 bp, Homo sapien
ccagggagcttccttttgattccct

SEQ ID NO: 5822119 - DNA, 25 bp, Homo sapien
agtatcctggacttgcagtgggagg

SEQ ID NO: 5822120 - DNA, 25 bp, Homo sapien
tgtgcaaagactccatatagacggt

SEQ ID NO: 5822121 - DNA, 25 bp, Homo sapien
cagcggatggtgggaggtggattcc

SEQ ID NO: 5822122 - DNA, 25 bp, Homo sapien
agacggtgcggttgccaataaatct

SEQ ID NO: 5822123 - DNA, 25 bp, Homo sapien
tataaaaatcaatgtgataaactgt

SEQ ID NO: 5822124 - DNA, 25 bp, Homo sapien
tgataaactgtctcaactgtgcctc

SEQ ID NO: 5822125 - DNA, 25 bp, Homo sapien
tttaccgcaagctgggatgtcacac

SEQ ID NO: 5822126 - DNA, 25 bp, Homo sapien
ggttcatcaagggtcaggtaagaat

SEQ ID NO: 5822127 - DNA, 25 bp, Homo sapien
gaagggctgggtccctgttacatcc

SEQ ID NO: 5822128 - DNA, 25 bp, Homo sapien
gctctttgtccctctaacctgctcc

SEQ ID NO: 5822129 - DNA, 25 bp, Homo sapien
gatctgccatgggaattccaatccg

SEQ ID NO: 5822130 - DNA, 25 bp, Homo sapien
acacctgtgctgttataacacttgt

SEQ ID NO: 5822131 - DNA, 25 bp, Homo sapien
ctaatccgcagccgagagccataga

SEQ ID NO: 5822132 - DNA, 25 bp, Homo sapien
aggtaggcactaattcagcactgac

SEQ ID NO: 5822133 - DNA, 25 bp, Homo sapien
caccatgcttggcccattttcatta

SEQ ID NO: 5822134 - DNA, 25 bp, Homo sapien
ctggctgcagcctcgcctgggccgg

SEQ ID NO: 5822135 - DNA, 25 bp, Homo sapien
aagccaccatgcttggcccattttc

SEQ ID NO: 5822136 - DNA, 25 bp, Homo sapien
tacccacagattgccctggatgacc

SEQ ID NO: 5822137 - DNA, 25 bp, Homo sapien
tactgggaattccatggctggcact

SEQ ID NO: 5822138 - DNA, 25 bp, Homo sapien
ttgagatgttccatgatgaggtagg

SEQ ID NO: 5822139 - DNA, 25 bp, Homo sapien
ctcggcggcggcggtggcggctgct

SEQ ID NO: 5822140 - DNA, 25 bp, Homo sapien
ccttgccgtttgttgccacgcactg

SEQ ID NO: 5822141 - DNA, 25 bp, Homo sapien
ctccagtggaagaaaccacctcctt

SEQ ID NO: 5822142 - DNA, 25 bp, Homo sapien
acagtttacccacagattgccctgg

SEQ ID NO: 5822143 - DNA, 25 bp, Homo sapien
cccaggctgtccgggtcgcaccagt

SEQ ID NO: 5822144 - DNA, 25 bp, Homo sapien
gtcaggtaagaatctttgttgagtt

SEQ ID NO: 5822145 - DNA, 25 bp, Homo sapien
tcgtcccggccgctggcgctcgcag

SEQ ID NO: 5822146 - DNA, 25 bp, Homo sapien
cctctcgctgaggcggcggcggcgg

SEQ ID NO: 5822147 - DNA, 25 bp, Homo sapien
aaatgtactctgtttgacacaggac

SEQ ID NO: 5822148 - DNA, 25 bp, Homo sapien
attccatggctggcactggcgccct

SEQ ID NO: 5822149 - DNA, 25 bp, Homo sapien
accctaaaaccagattgagatcaag

SEQ ID NO: 5822150 - DNA, 25 bp, Homo sapien
tattcctttttttgctgaaaaggtc

SEQ ID NO: 5822151 - DNA, 25 bp, Homo sapien
tgttataacacttgtgatttttatt

SEQ ID NO: 5822152 - DNA, 25 bp, Homo sapien
cactggaagtagcctgtgtctgtgg

SEQ ID NO: 5822153 - DNA, 25 bp, Homo sapien
acaggacattctccaggatttcaca

SEQ ID NO: 5822154 - DNA, 25 bp, Homo sapien
ggctgcagcctcgcctgggccggcg

SEQ ID NO: 5822155 - DNA, 25 bp, Homo sapien
aggatttcacattcatcgcgacaca

SEQ ID NO: 5822156 - DNA, 25 bp, Homo sapien
atggctgcaggtataaaggcagttg

SEQ ID NO: 5822157 - DNA, 25 bp, Homo sapien
acgtggtgatgttattcattggttc

SEQ ID NO: 5822158 - DNA, 25 bp, Homo sapien
aggtataagccaccatgcttggccc

SEQ ID NO: 5822159 - DNA, 25 bp, Homo sapien
cttggacgcagaccattctgggtaa

SEQ ID NO: 5822160 - DNA, 25 bp, Homo sapien
ataggatctgccatgggaattccaa

SEQ ID NO: 5822161 - DNA, 25 bp, Homo sapien
ggctcaaatgatcctcctgcctcgg

SEQ ID NO: 5822162 - DNA, 25 bp, Homo sapien
gcagttgacttcttgagaacgtgtt

SEQ ID NO: 5822163 - DNA, 25 bp, Homo sapien
gcggcggcggctcccaggccgcgcg

SEQ ID NO: 5822164 - DNA, 25 bp, Homo sapien
taggatagggatctttaaagatgat

SEQ ID NO: 5822165 - DNA, 25 bp, Homo sapien
gtcacacagatcagacttaaagttt

SEQ ID NO: 5822166 - DNA, 25 bp, Homo sapien
ttgccctggatgaccgagtaatggt

SEQ ID NO: 5822167 - DNA, 25 bp, Homo sapien
tgtagaaacggcaaggtttacccta

SEQ ID NO: 5822168 - DNA, 25 bp, Homo sapien
tgggtcggactccgagaacagcgca

SEQ ID NO: 5822169 - DNA, 25 bp, Homo sapien
ttgagatcaagcaaatactgtccat

SEQ ID NO: 5822170 - DNA, 25 bp, Homo sapien
cggcgggcgcgtcccgcggcggcgc

SEQ ID NO: 5822171 - DNA, 25 bp, Homo sapien
tttttttggtagagatggagtctca

SEQ ID NO: 5822172 - DNA, 25 bp, Homo sapien
gatactgggaattccatggctggca

SEQ ID NO: 5822173 - DNA, 25 bp, Homo sapien
cagctgtgatctgattttctatttc

SEQ ID NO: 5822174 - DNA, 25 bp, Homo sapien
ccaataaatcttgcacatgcaatcc

SEQ ID NO: 5822175 - DNA, 25 bp, Homo sapien
ttgggcagcagccccgcgtgcggcc

SEQ ID NO: 5822176 - DNA, 25 bp, Homo sapien
acttgcagtgggaggggggccaaac

SEQ ID NO: 5822177 - DNA, 25 bp, Homo sapien
agaacagcgcaccctgcgcccaggg

SEQ ID NO: 5822178 - DNA, 25 bp, Homo sapien
cctcgtcccggccgctggcgctcgc

SEQ ID NO: 5822179 - DNA, 25 bp, Homo sapien
cagggaaggaatggcgaactgagaa

SEQ ID NO: 5822180 - DNA, 25 bp, Homo sapien
cgggaaggcatagtggcacagggaa

SEQ ID NO: 5822181 - DNA, 25 bp, Homo sapien
cccgcgtgcggccagcagcagcgcg

SEQ ID NO: 5822182 - DNA, 25 bp, Homo sapien
ggctgtccgggtcgcaccagtgggc

SEQ ID NO: 5822183 - DNA, 25 bp, Homo sapien
aaaggcagttgacttcttgagaacg

SEQ ID NO: 5822184 - DNA, 25 bp, Homo sapien
cttcctagagtgttgggattacagg

SEQ ID NO: 5822185 - DNA, 25 bp, Homo sapien
actggaagtgccaatcatagtgaag

SEQ ID NO: 5822186 - DNA, 25 bp, Homo sapien
agtgactggaagtgccaatcatagt

SEQ ID NO: 5822187 - DNA, 25 bp, Homo sapien
tccaaacattttctagaaaaaggaa

SEQ ID NO: 5822188 - DNA, 25 bp, Homo sapien
cttttgattccctgggttgcggcag

SEQ ID NO: 5822189 - DNA, 25 bp, Homo sapien
gccaaacttgacaaacaagactcca

SEQ ID NO: 5822190 - DNA, 25 bp, Homo sapien
tcatcctgccttgtggtgttcttaa

SEQ ID NO: 5822191 - DNA, 25 bp, Homo sapien
gccaccatgcttggcccattttcat

SEQ ID NO: 5822192 - DNA, 25 bp, Homo sapien
acaggtataagccaccatgcttggc

SEQ ID NO: 5822193 - DNA, 25 bp, Homo sapien
agcctccggggctcctggaccacag

SEQ ID NO: 5822194 - DNA, 25 bp, Homo sapien
tcctaaataagaggggtaggatagg

SEQ ID NO: 5822195 - DNA, 25 bp, Homo sapien
aacgaagggcggtgaaagtgtgtgt

SEQ ID NO: 5822196 - DNA, 25 bp, Homo sapien
atcctcctgcctcggccttcctaga

SEQ ID NO: 5822197 - DNA, 25 bp, Homo sapien
tcgccctgggtcggactccgagaac

SEQ ID NO: 5822198 - DNA, 25 bp, Homo sapien
gtgcagttctgctgtctggcccaga

SEQ ID NO: 5822199 - DNA, 25 bp, Homo sapien
tctggcccagagacgtggtgatgtt

SEQ ID NO: 5822200 - DNA, 25 bp, Homo sapien
tcactatgttgcctgggctggtctt

SEQ ID NO: 5822201 - DNA, 25 bp, Homo sapien
gcagttctgctgtctggcccagaga

SEQ ID NO: 5822202 - DNA, 25 bp, Homo sapien
gacttctatttaccgcaagctggga

SEQ ID NO: 5822203 - DNA, 25 bp, Homo sapien
tttctatttccccttgcatgtgcaa

SEQ ID NO: 5822204 - DNA, 25 bp, Homo sapien
ggatttgatcttgcaaaaatgtact

SEQ ID NO: 5822205 - DNA, 25 bp, Homo sapien
aaacaagactccagtggaagaaacc

SEQ ID NO: 5822206 - DNA, 25 bp, Homo sapien
catactcatctgagtatcctggact

SEQ ID NO: 5822207 - DNA, 25 bp, Homo sapien
gccagcagcagcgcggccagcagcg

SEQ ID NO: 5822208 - DNA, 25 bp, Homo sapien
gacgcagaccattctgggtaacatc

SEQ ID NO: 5822209 - DNA, 25 bp, Homo sapien
gatgaagtttcatcgcagtacggga

SEQ ID NO: 5822210 - DNA, 25 bp, Homo sapien
cgctggcgctcgcaggacgccgggg

SEQ ID NO: 5822211 - DNA, 25 bp, Homo sapien
gcttcttctgcagtattaacagaca

SEQ ID NO: 5822212 - DNA, 25 bp, Homo sapien
aacaatttcttcctgcttccaatat

SEQ ID NO: 5822213 - DNA, 25 bp, Homo sapien
acagttcgcagcttctgggctctct

SEQ ID NO: 5822214 - DNA, 25 bp, Homo sapien
ggccagcagcgccaggagcggcggg

SEQ ID NO: 5822215 - DNA, 25 bp, Homo sapien
tcacttgagatgttccatgatgagg

SEQ ID NO: 5822216 - DNA, 25 bp, Homo sapien
tggcagtttcagcctcatcagaatc

SEQ ID NO: 5822217 - DNA, 25 bp, Homo sapien
tgaaggcagctgtgatctgattttc

SEQ ID NO: 5822218 - DNA, 25 bp, Homo sapien
acagaatccatcttcttcatactca

SEQ ID NO: 5822219 - DNA, 25 bp, Homo sapien
tctgtatggctgacagaatccatct

SEQ ID NO: 5822220 - DNA, 25 bp, Homo sapien
cactgactgacagctctgtttcttg

SEQ ID NO: 5822221 - DNA, 25 bp, Homo sapien
ttggtcacactgacggtcccccggt

SEQ ID NO: 5822222 - DNA, 25 bp, Homo sapien
catccacgggctcttcccgggctcc

SEQ ID NO: 5822223 - DNA, 25 bp, Homo sapien
acggtgcggttgccaataaatcttg

SEQ ID NO: 5822224 - DNA, 25 bp, Homo sapien
ttccatgatgaggtaggcactaatt

SEQ ID NO: 5822225 - DNA, 25 bp, Homo sapien
cccgcggcggcgcggccggtgcatt

SEQ ID NO: 5822226 - DNA, 25 bp, Homo sapien
agactttgcagtgcagttctgctgt

SEQ ID NO: 5822227 - DNA, 25 bp, Homo sapien
ttcttactagatacctatatgcttc

SEQ ID NO: 5822228 - DNA, 25 bp, Homo sapien
gtcgaggtttctaatccgcagccga

SEQ ID NO: 5822229 - DNA, 25 bp, Homo sapien
gcggatggtgggaggtggattccca

SEQ ID NO: 5822230 - DNA, 25 bp, Homo sapien
cttttttttggtagagatggagtct

SEQ ID NO: 5822231 - DNA, 25 bp, Homo sapien
gtttcatcgcagtacgggaaggcat

SEQ ID NO: 5822232 - DNA, 25 bp, Homo sapien
gctgaaaaggtccacttggacgcag

SEQ ID NO: 5822233 - DNA, 25 bp, Homo sapien
atggcgaactgagaacacttatcag

SEQ ID NO: 5822234 - DNA, 25 bp, Homo sapien
ttgggattacaggtataagccacca

SEQ ID NO: 5822235 - DNA, 25 bp, Homo sapien
ggatggtgggaggtggattcccaga

SEQ ID NO: 5822236 - DNA, 25 bp, Homo sapien
gtaggcactaattcagcactgactg

SEQ ID NO: 5822237 - DNA, 25 bp, Homo sapien
aggaatggcgaactgagaacactta

SEQ ID NO: 5822238 - DNA, 25 bp, Homo sapien
aggacattctccaggatttcacatt

SEQ ID NO: 5822239 - DNA, 25 bp, Homo sapien
cccggccgctggcgctcgcaggacg

SEQ ID NO: 5822240 - DNA, 25 bp, Homo sapien
ttttgctgaaaaggtccacttggac

SEQ ID NO: 5822241 - DNA, 25 bp, Homo sapien
gtagcctgtgtctgtggtgtcgagg

SEQ ID NO: 5822242 - DNA, 25 bp, Homo sapien
catggctggcactggcgccctgatt

SEQ ID NO: 5822243 - DNA, 25 bp, Homo sapien
ccagagacgtggtgatgttattcat

SEQ ID NO: 5822244 - DNA, 25 bp, Homo sapien
cacgagtgcaatggctgcaggtata

SEQ ID NO: 5822245 - DNA, 25 bp, Homo sapien
tgatgttattcattggttcatcaag

SEQ ID NO: 5822246 - DNA, 25 bp, Homo sapien
atccggatacagttcgcagcttctg

SEQ ID NO: 5822247 - DNA, 25 bp, Homo sapien
ccgaaaggagagcctccggggctcc

SEQ ID NO: 5822248 - DNA, 25 bp, Homo sapien
gcggcggcggtggcggctgctccag

SEQ ID NO: 5822249 - DNA, 25 bp, Homo sapien
cagattgccctggatgaccgagtaa

SEQ ID NO: 5822250 - DNA, 25 bp, Homo sapien
tctcaactgtgcctctgaagggctg

SEQ ID NO: 5822251 - DNA, 25 bp, Homo sapien
ggggagatcttcacagtttggcagt

SEQ ID NO: 5822252 - DNA, 25 bp, Homo sapien
agattcatcctgccttgtggtgttc

SEQ ID NO: 5822253 - DNA, 25 bp, Homo sapien
aacacttgtgatttttatttatagg

SEQ ID NO: 5822254 - DNA, 25 bp, Homo sapien
acctccttgccgtttgttgccacgc

SEQ ID NO: 5822255 - DNA, 25 bp, Homo sapien
ggattcccagagactttgcagtgca

SEQ ID NO: 5822256 - DNA, 25 bp, Homo sapien
ccgcctggccgcctctggatgccgc

SEQ ID NO: 5822257 - DNA, 25 bp, Homo sapien
gtttaccctaaaaccagattgagat

SEQ ID NO: 5822258 - DNA, 25 bp, Homo sapien
ccctctggctgcagcctcgcctggg

SEQ ID NO: 5822259 - DNA, 25 bp, Homo sapien
gctgtctggcccagagacgtggtga

SEQ ID NO: 5822260 - DNA, 25 bp, Homo sapien
aagactccagtggaagaaaccacct

SEQ ID NO: 5822261 - DNA, 25 bp, Homo sapien
ctgcagcctcgcctgggccggcggg

SEQ ID NO: 5822262 - DNA, 25 bp, Homo sapien
caggctgtccgggtcgcaccagtgg

SEQ ID NO: 5822263 - DNA, 25 bp, Homo sapien
gcagcctcgcctgggccggcgggtc

SEQ ID NO: 5822264 - DNA, 25 bp, Homo sapien
tgcaaagctctttgtccctctaacc

SEQ ID NO: 5822265 - DNA, 25 bp, Homo sapien
taccgcaagctgggatgtcacacag

SEQ ID NO: 5822266 - DNA, 25 bp, Homo sapien
aggtggattcccagagactttgcag

SEQ ID NO: 5822267 - DNA, 25 bp, Homo sapien
gcccagagacgtggtgatgttattc

SEQ ID NO: 5822268 - DNA, 25 bp, Homo sapien
agtttacccacagattgccctggat

SEQ ID NO: 5822269 - DNA, 25 bp, Homo sapien
caaagctctttgtccctctaacctg

SEQ ID NO: 5822270 - DNA, 25 bp, Homo sapien
tccttttgattccctgggttgcggc

SEQ ID NO: 5822271 - DNA, 25 bp, Homo sapien
agcagccccgcgtgcggccagcagc

SEQ ID NO: 5822272 - DNA, 25 bp, Homo sapien
agagatggagtctcactatgttgcc

SEQ ID NO: 5822273 - DNA, 25 bp, Homo sapien
agatgattgaatacattaggggcaa

SEQ ID NO: 5822274 - DNA, 25 bp, Homo sapien
tgggctcaaatgatcctcctgcctc

SEQ ID NO: 5822275 - DNA, 25 bp, Homo sapien
cgcgagcgcgatcccttcccagccc

SEQ ID NO: 5822276 - DNA, 25 bp, Homo sapien
ataaactgtctcaactgtgcctctg

SEQ ID NO: 5822277 - DNA, 25 bp, Homo sapien
cttataggattctcctaaataagag

SEQ ID NO: 5822278 - DNA, 25 bp, Homo sapien
cccacagattgccctggatgaccga

SEQ ID NO: 5822279 - DNA, 25 bp, Homo sapien
tctcactatgttgcctgggctggtc

SEQ ID NO: 5822280 - DNA, 25 bp, Homo sapien
tttcttgggcagcagccccgcgtgc

SEQ ID NO: 5822281 - DNA, 25 bp, Homo sapien
cggccgctggcgctcgcaggacgcc

SEQ ID NO: 5822282 - DNA, 25 bp, Homo sapien
catcttcttcatactcatctgagta

SEQ ID NO: 5822283 - DNA, 25 bp, Homo sapien
cttgcatgtgcaaagactccatata

SEQ ID NO: 5822284 - DNA, 25 bp, Homo sapien
cttgacaaacaagactccagtggaa

SEQ ID NO: 5822285 - DNA, 25 bp, Homo sapien
gtttctaatccgcagccgagagcca

SEQ ID NO: 5822286 - DNA, 25 bp, Homo sapien
ttcttaaggcatacagaaaacaatt

SEQ ID NO: 5822287 - DNA, 25 bp, Homo sapien
agaatctttgttgagttcacttgag

SEQ ID NO: 5822288 - DNA, 25 bp, Homo sapien
ggatgtcacacagatcagacttaaa

SEQ ID NO: 5822289 - DNA, 25 bp, Homo sapien
tgggttgcggcagtaggaatggcct

SEQ ID NO: 5822290 - DNA, 25 bp, Homo sapien
ctggaccacaggagcatcatttttg

SEQ ID NO: 5822291 - DNA, 25 bp, Homo sapien
ttttatttataggatctgccatggg

SEQ ID NO: 5822292 - DNA, 25 bp, Homo sapien
gccaggagcggcgggcgcgtcccgc

SEQ ID NO: 5822293 - DNA, 25 bp, Homo sapien
cctccattcagctctgggaaacgaa

SEQ ID NO: 5822294 - DNA, 25 bp, Homo sapien
ttacaggtataagccaccatgcttg

SEQ ID NO: 5822295 - DNA, 25 bp, Homo sapien
ggcggcggctcccaggccgcgcgca

SEQ ID NO: 5822296 - DNA, 25 bp, Homo sapien
cttgaacccctgggctcaaatgatc

SEQ ID NO: 5822297 - DNA, 25 bp, Homo sapien
ggaccacaggagcatcatttttgaa

SEQ ID NO: 5822298 - DNA, 25 bp, Homo sapien
cgcagccgagagccatagatggtgg

SEQ ID NO: 5822299 - DNA, 25 bp, Homo sapien
atggtggaccgaaaggagagcctcc

SEQ ID NO: 5822300 - DNA, 25 bp, Homo sapien
tcacattcatcgcgacacaagtcac

SEQ ID NO: 5822301 - DNA, 25 bp, Homo sapien
acagtttggcagtttcagcctcatc

SEQ ID NO: 5822302 - DNA, 25 bp, Homo sapien
aaaaggtccacttggacgcagacca

SEQ ID NO: 5822303 - DNA, 25 bp, Homo sapien
tggcactggcgccctgatttggtca

SEQ ID NO: 5822304 - DNA, 25 bp, Homo sapien
agtctcactatgttgcctgggctgg

SEQ ID NO: 5822305 - DNA, 25 bp, Homo sapien
ggaggtggattcccagagactttgc

SEQ ID NO: 5822306 - DNA, 25 bp, Homo sapien
gcaaatactgtccattttctttgtc

SEQ ID NO: 5822307 - DNA, 25 bp, Homo sapien
gcggctgctccagctctccacgctc

SEQ ID NO: 5822308 - DNA, 25 bp, Homo sapien
gattacaggtataagccaccatgct

SEQ ID NO: 5822309 - DNA, 25 bp, Homo sapien
gctctccacgctccctctctcctcg

SEQ ID NO: 5822310 - DNA, 25 bp, Homo sapien
aaatactgtccattttctttgtccc

SEQ ID NO: 5822311 - DNA, 25 bp, Homo sapien
gcctccgcctggccgcctctggatg

SEQ ID NO: 5822312 - DNA, 25 bp, Homo sapien
ttgtggtgttcttaaggcatacaga

SEQ ID NO: 5822313 - DNA, 25 bp, Homo sapien
ttgtcccccttataggattctccta

SEQ ID NO: 5822314 - DNA, 25 bp, Homo sapien
cgagagccatagatggtggaccgaa

SEQ ID NO: 5822315 - DNA, 25 bp, Homo sapien
actggcgccctgatttggtcacact

SEQ ID NO: 5822316 - DNA, 25 bp, Homo sapien
gtcagtcccaggctgtccgggtcgc

SEQ ID NO: 5822317 - DNA, 25 bp, Homo sapien
agggctgggtccctgttacatccac

SEQ ID NO: 5822318 - DNA, 25 bp, Homo sapien
gaagcaccagggagcttccttttga

SEQ ID NO: 5822319 - DNA, 25 bp, Homo sapien
cattttcttactagatacctatatg

SEQ ID NO: 5822320 - DNA, 25 bp, Homo sapien
agtgcaatggctgcaggtataaagg

SEQ ID NO: 5822321 - DNA, 25 bp, Homo sapien
tacgggaaggcatagtggcacaggg

SEQ ID NO: 5822322 - DNA, 25 bp, Homo sapien
ggcagtaggaatggcctccattcag

SEQ ID NO: 5822323 - DNA, 25 bp, Homo sapien
tgcggttgccaataaatcttgcaca

SEQ ID NO: 5822324 - DNA, 25 bp, Homo sapien
cagcgcaccctgcgcccaggggctg

SEQ ID NO: 5822325 - DNA, 25 bp, Homo sapien
accagcggatggtgggaggtggatt

SEQ ID NO: 5822326 - DNA, 25 bp, Homo sapien
tggtgtcgaggtttctaatccgcag

SEQ ID NO: 5822327 - DNA, 25 bp, Homo sapien
atagatggtggaccgaaaggagagc

SEQ ID NO: 5822328 - DNA, 25 bp, Homo sapien
cagctctgggaaacgaagggcggtg

SEQ ID NO: 5822329 - DNA, 25 bp, Homo sapien
gccgtttgttgccacgcactggaag

SEQ ID NO: 5822330 - DNA, 25 bp, Homo sapien
ggggctccctcggcggcggcggtgg

SEQ ID NO: 5822331 - DNA, 25 bp, Homo sapien
agttctgctgtctggcccagagacg

SEQ ID NO: 5822332 - DNA, 25 bp, Homo sapien
ggacacagtttacccacagattgcc

SEQ ID NO: 5822333 - DNA, 25 bp, Homo sapien
gcggtgaaagtgtgtgtgtggggat

SEQ ID NO: 5822334 - DNA, 25 bp, Homo sapien
tctgtttgacacaggacattctcca

SEQ ID NO: 5822335 - DNA, 25 bp, Homo sapien
actgacggtcccccggtagtccaca

SEQ ID NO: 5822336 - DNA, 25 bp, Homo sapien
tcacagtttggcagtttcagcctca

SEQ ID NO: 5822337 - DNA, 25 bp, Homo sapien
gactgacagctctgtttcttgggca

SEQ ID NO: 5822338 - DNA, 25 bp, Homo sapien
caggccgcgcgcagaacatccacgg

SEQ ID NO: 5822339 - DNA, 25 bp, Homo sapien
gggaattccaatccggatacagttc

SEQ ID NO: 5822340 - DNA, 25 bp, Homo sapien
cggcggcggcggctcccaggccgcg

SEQ ID NO: 5822341 - DNA, 25 bp, Homo sapien
agccctctggctgcagcctcgcctg

SEQ ID NO: 5822342 - DNA, 25 bp, Homo sapien
ctccttgccgtttgttgccacgcac

SEQ ID NO: 5822343 - DNA, 25 bp, Homo sapien
tgaacccctgggctcaaatgatcct

SEQ ID NO: 5822344 - DNA, 25 bp, Homo sapien
tatcctggacttgcagtgggagggg

SEQ ID NO: 5822345 - DNA, 25 bp, Homo sapien
tgacacaggacattctccaggattt

SEQ ID NO: 5822346 - DNA, 25 bp, Homo sapien
tcagcctcatcagaatcatgggatt

SEQ ID NO: 5822347 - DNA, 25 bp, Homo sapien
tcttgcacatgcaatccctctgtat

SEQ ID NO: 5822348 - DNA, 25 bp, Homo sapien
aatctttgttgagttcacttgagat

SEQ ID NO: 5822349 - DNA, 25 bp, Homo sapien
ttgccacgcactggaagtagcctgt

SEQ ID NO: 5822350 - DNA, 25 bp, Homo sapien
cacacagatcagacttaaagttttc

SEQ ID NO: 5822351 - DNA, 25 bp, Homo sapien
gaatcatgggatttgatcttgcaaa

SEQ ID NO: 5822352 - DNA, 25 bp, Homo sapien
atacattaggggcaatgacttctat

SEQ ID NO: 5822353 - DNA, 25 bp, Homo sapien
ttatcagataagtgactggaagtgc

SEQ ID NO: 5822354 - DNA, 25 bp, Homo sapien
ccatgcttggcccattttcattatt

SEQ ID NO: 5822355 - DNA, 25 bp, Homo sapien
ggatagggatctttaaagatgattg

SEQ ID NO: 5822356 - DNA, 25 bp, Homo sapien
tcacactgacggtcccccggtagtc

SEQ ID NO: 5822357 - DNA, 25 bp, Homo sapien
attcctcctctcgctgaggcggcgg

SEQ ID NO: 5822358 - DNA, 25 bp, Homo sapien
agccatagatggtggaccgaaagga

SEQ ID NO: 5822359 - DNA, 25 bp, Homo sapien
tctatttaccgcaagctgggatgtc

SEQ ID NO: 5822360 - DNA, 25 bp, Homo sapien
gtggattcccagagactttgcagtg

SEQ ID NO: 5822361 - DNA, 25 bp, Homo sapien
agacgtggtgatgttattcattggt

SEQ ID NO: 5822362 - DNA, 25 bp, Homo sapien
aacttgacaaacaagactccagtgg

SEQ ID NO: 5822363 - DNA, 25 bp, Homo sapien
gacttcttgagaacgtgttttggta

SEQ ID NO: 5822364 - DNA, 25 bp, Homo sapien
agatcttcacagtttggcagtttca

SEQ ID NO: 5822365 - DNA, 25 bp, Homo sapien
aagggcggtgaaagtgtgtgtgtgg

SEQ ID NO: 5822366 - DNA, 25 bp, Homo sapien
agtacgggaaggcatagtggcacag

SEQ ID NO: 5822367 - DNA, 25 bp, Homo sapien
cagccgagagccatagatggtggac

SEQ ID NO: 5822368 - DNA, 25 bp, Homo sapien
ggtcccccggtagtccacacctgtg

SEQ ID NO: 5822369 - DNA, 25 bp, Homo sapien
tttttctataaaaatcaatgtgata

SEQ ID NO: 5822370 - DNA, 25 bp, Homo sapien
agaatccatcttcttcatactcatc

SEQ ID NO: 5822371 - DNA, 25 bp, Homo sapien
gggacggatgaagtttcatcgcagt

SEQ ID NO: 5822372 - DNA, 25 bp, Homo sapien
caaagactccatatagacggtgcgg

SEQ ID NO: 5822373 - DNA, 25 bp, Homo sapien
acattcatcgcgacacaagtcacgg

SEQ ID NO: 5822374 - DNA, 25 bp, Homo sapien
aaactgtctcaactgtgcctctgaa

SEQ ID NO: 5822375 - DNA, 25 bp, Homo sapien
tctataaaaatcaatgtgataaact

SEQ ID NO: 5822376 - DNA, 25 bp, Homo sapien
gggatactgggaattccatggctgg

SEQ ID NO: 5822377 - DNA, 25 bp, Homo sapien
ggcgtgagtcgccctgggtcggact

SEQ ID NO: 5822378 - DNA, 25 bp, Homo sapien
tttgtccctctaacctgctccctcg

SEQ ID NO: 5822379 - DNA, 25 bp, Homo sapien
gctgtgatctgattttctatttccc

SEQ ID NO: 5822380 - DNA, 25 bp, Homo sapien
ttctaatccgcagccgagagccata

SEQ ID NO: 5822381 - DNA, 25 bp, Homo sapien
gtataagccaccatgcttggcccat

SEQ ID NO: 5822382 - DNA, 25 bp, Homo sapien
cccaggggctgccgtcccggggctc

SEQ ID NO: 5822383 - DNA, 25 bp, Homo sapien
gagaacgtgttttggtaccttacga

SEQ ID NO: 5822384 - DNA, 25 bp, Homo sapien
tgtccctctaacctgctccctcgcc

SEQ ID NO: 5822385 - DNA, 25 bp, Homo sapien
gggctcctggaccacaggagcatca

SEQ ID NO: 5822386 - DNA, 25 bp, Homo sapien
ggtagtccacacctgtgctgttata

SEQ ID NO: 5822387 - DNA, 25 bp, Homo sapien
cttaaggcatacagaaaacaatttc

SEQ ID NO: 5822388 - DNA, 25 bp, Homo sapien
tgcatgtgcaaagactccatataga

SEQ ID NO: 5822389 - DNA, 25 bp, Homo sapien
tccctgggttgcggcagtaggaatg

SEQ ID NO: 5822390 - DNA, 25 bp, Homo sapien
ttaaagttttcatccaaggtgaagc

SEQ ID NO: 5822391 - DNA, 25 bp, Homo sapien
gggaaggaatggcgaactgagaaca

SEQ ID NO: 5822392 - DNA, 25 bp, Homo sapien
gccgagagccatagatggtggaccg

SEQ ID NO: 5822393 - DNA, 25 bp, Homo sapien
cccaggccgcgcgcagaacatccac

SEQ ID NO: 5822394 - DNA, 25 bp, Homo sapien
tccacgggctcttcccgggctcccg

SEQ ID NO: 5822395 - DNA, 25 bp, Homo sapien
aagctctttgtccctctaacctgct

SEQ ID NO: 5822396 - DNA, 25 bp, Homo sapien
tcgcagtacgggaaggcatagtggc

SEQ ID NO: 5822397 - DNA, 25 bp, Homo sapien
tattcattggttcatcaagggtcag

SEQ ID NO: 5822398 - DNA, 25 bp, Homo sapien
tgggaggtggattcccagagacttt

SEQ ID NO: 5822399 - DNA, 25 bp, Homo sapien
tggcccagagacgtggtgatgttat

SEQ ID NO: 5822400 - DNA, 25 bp, Homo sapien
ctccatatagacggtgcggttgcca

SEQ ID NO: 5822401 - DNA, 25 bp, Homo sapien
cgagaacagcgcaccctgcgcccag

SEQ ID NO: 5822402 - DNA, 25 bp, Homo sapien
tcgctgaggcggcggcggcggcggc

SEQ ID NO: 5822403 - DNA, 25 bp, Homo sapien
taaaaatcaatgtgataaactgtct

SEQ ID NO: 5822404 - DNA, 25 bp, Homo sapien
gcgccctgatttggtcacactgacg

SEQ ID NO: 5822405 - DNA, 25 bp, Homo sapien
tgccttgtggtgttcttaaggcata

SEQ ID NO: 5822406 - DNA, 25 bp, Homo sapien
aagtagcctgtgtctgtggtgtcga

SEQ ID NO: 5822407 - DNA, 25 bp, Homo sapien
agttcgcagcttctgggctctctgg

SEQ ID NO: 5822408 - DNA, 25 bp, Homo sapien
ctcctctcgctgaggcggcggcggc

SEQ ID NO: 5822409 - DNA, 25 bp, Homo sapien
caaggtgaagcaccagggagcttcc

SEQ ID NO: 5822410 - DNA, 25 bp, Homo sapien
atgccgcgagcgcgatcccttccca

SEQ ID NO: 5822411 - DNA, 25 bp, Homo sapien
cctccggggctcctggaccacagga

SEQ ID NO: 5822412 - DNA, 25 bp, Homo sapien
atttttatttataggatctgccatg

SEQ ID NO: 5822413 - DNA, 25 bp, Homo sapien
aaagtgtgtgtgtggggatactggg

SEQ ID NO: 5822414 - DNA, 25 bp, Homo sapien
acaagactccagtggaagaaaccac

SEQ ID NO: 5822415 - DNA, 25 bp, Homo sapien
ctggacttgcagtgggaggggggcc

SEQ ID NO: 5822416 - DNA, 25 bp, Homo sapien
accgagtaatggttgtagattcatc

SEQ ID NO: 5822417 - DNA, 25 bp, Homo sapien
atctttaaagatgattgaatacatt

SEQ ID NO: 5822418 - DNA, 25 bp, Homo sapien
gcagtttcagcctcatcagaatcat

SEQ ID NO: 5822419 - DNA, 25 bp, Homo sapien
tggctgacagaatccatcttcttca

SEQ ID NO: 5822420 - DNA, 25 bp, Homo sapien
gctgttataacacttgtgattttta

SEQ ID NO: 5822421 - DNA, 25 bp, Homo sapien
atacagaaaacaatttcttcctgct

SEQ ID NO: 5822422 - DNA, 25 bp, Homo sapien
tgttgcctgggctggtcttgaaccc

SEQ ID NO: 5822423 - DNA, 25 bp, Homo sapien
gattgaatacattaggggcaatgac

SEQ ID NO: 5822424 - DNA, 25 bp, Homo sapien
aagctgggatgtcacacagatcaga

SEQ ID NO: 5822425 - DNA, 25 bp, Homo sapien
atcatgggatttgatcttgcaaaaa

SEQ ID NO: 5822426 - DNA, 25 bp, Homo sapien
taacagacataacgaaggacacagt

SEQ ID NO: 5822427 - DNA, 25 bp, Homo sapien
tgaaagtgtgtgtgtggggatactg

SEQ ID NO: 5822428 - DNA, 25 bp, Homo sapien
ccattctgggtaacatctttttcta

SEQ ID NO: 5822429 - DNA, 25 bp, Homo sapien
cggttgccaataaatcttgcacatg

SEQ ID NO: 5822430 - DNA, 25 bp, Homo sapien
ggctccctcggcggcggcggtggcg

SEQ ID NO: 5822431 - DNA, 25 bp, Homo sapien
accctgcgcccaggggctgccgtcc

SEQ ID NO: 5822432 - DNA, 25 bp, Homo sapien
gagttcacttgagatgttccatgat

SEQ ID NO: 5822433 - DNA, 25 bp, Homo sapien
tccaatccggatacagttcgcagct

SEQ ID NO: 5822434 - DNA, 25 bp, Homo sapien
aatcaatgtgataaactgtctcaac

SEQ ID NO: 5822435 - DNA, 25 bp, Homo sapien
ggcatagtggcacagggaaggaatg

SEQ ID NO: 5822436 - DNA, 25 bp, Homo sapien
cccctgggctcaaatgatcctcctg

SEQ ID NO: 5822437 - DNA, 25 bp, Homo sapien
tctgtggtgtcgaggtttctaatcc

SEQ ID NO: 5822438 - DNA, 25 bp, Homo sapien
cattctccaggatttcacattcatc

SEQ ID NO: 5822439 - DNA, 25 bp, Homo sapien
atggttgtagattcatcctgccttg

SEQ ID NO: 5822440 - DNA, 25 bp, Homo sapien
ctgggctctctggctgggggagatc

SEQ ID NO: 5822441 - DNA, 25 bp, Homo sapien
agcgcgatcccttcccagccctctg

SEQ ID NO: 5822442 - DNA, 25 bp, Homo sapien
atgattgaatacattaggggcaatg

SEQ ID NO: 5822443 - DNA, 25 bp, Homo sapien
gggtcaggtaagaatctttgttgag

SEQ ID NO: 5822444 - DNA, 25 bp, Homo sapien
tactcatctgagtatcctggacttg

SEQ ID NO: 5822445 - DNA, 25 bp, Homo sapien
ttcattggttcatcaagggtcaggt

SEQ ID NO: 5822446 - DNA, 25 bp, Homo sapien
tttggtagagatggagtctcactat

SEQ ID NO: 5822447 - DNA, 25 bp, Homo sapien
ggtggaccgaaaggagagcctccgg

SEQ ID NO: 5822448 - DNA, 25 bp, Homo sapien
cgaactgagaacacttatcagataa

SEQ ID NO: 5822449 - DNA, 25 bp, Homo sapien
cctgcgcccaggggctgccgtcccg

SEQ ID NO: 5822450 - DNA, 25 bp, Homo sapien
agtgggcgtgagtcgccctgggtcg

SEQ ID NO: 5822451 - DNA, 25 bp, Homo sapien
ttcagctctgggaaacgaagggcgg

SEQ ID NO: 5822452 - DNA, 25 bp, Homo sapien
aattccattttcttactagatacct

SEQ ID NO: 5822453 - DNA, 25 bp, Homo sapien
gaaccagcggatggtgggaggtgga

SEQ ID NO: 5822454 - DNA, 25 bp, Homo sapien
tctgagtatcctggacttgcagtgg

SEQ ID NO: 5822455 - DNA, 25 bp, Homo sapien
gggattacaggtataagccaccatg

SEQ ID NO: 5822456 - DNA, 25 bp, Homo sapien
ttgcacatgcaatccctctgtatgg

SEQ ID NO: 5822457 - DNA, 25 bp, Homo sapien
ctctggctgcagcctcgcctgggcc

SEQ ID NO: 5822458 - DNA, 25 bp, Homo sapien
tccgcagccgagagccatagatggt

SEQ ID NO: 5822459 - DNA, 25 bp, Homo sapien
ttgacttcttgagaacgtgttttgg

SEQ ID NO: 5822460 - DNA, 25 bp, Homo sapien
acagaaaacaatttcttcctgcttc

SEQ ID NO: 5822461 - DNA, 25 bp, Homo sapien
atacctatatgcttcttctgcagta

SEQ ID NO: 5822462 - DNA, 25 bp, Homo sapien
ttcgcagcttctgggctctctggct

SEQ ID NO: 5822463 - DNA, 25 bp, Homo sapien
taaggcatacagaaaacaatttctt

SEQ ID NO: 5822464 - DNA, 25 bp, Homo sapien
gaggtgttttatgtagaaacggcaa

SEQ ID NO: 5822465 - DNA, 25 bp, Homo sapien
tcgcctccgcctggccgcctctgga

SEQ ID NO: 5822466 - DNA, 25 bp, Homo sapien
tcaagcaaatactgtccattttctt

SEQ ID NO: 5822467 - DNA, 25 bp, Homo sapien
aggcagttgacttcttgagaacgtg

SEQ ID NO: 5822468 - DNA, 25 bp, Homo sapien
gggacgtctgcaaagctctttgtcc

SEQ ID NO: 5822469 - DNA, 25 bp, Homo sapien
ctgggctggtcttgaacccctgggc

SEQ ID NO: 5822470 - DNA, 25 bp, Homo sapien
gcattcctcctctcgctgaggcggc

SEQ ID NO: 5822471 - DNA, 25 bp, Homo sapien
gatcaagcaaatactgtccattttc

SEQ ID NO: 5822472 - DNA, 25 bp, Homo sapien
ctggaagtagcctgtgtctgtggtg

SEQ ID NO: 5822473 - DNA, 25 bp, Homo sapien
agggatctttaaagatgattgaata

SEQ ID NO: 5822474 - DNA, 25 bp, Homo sapien
agacataacgaaggacacagtttac

SEQ ID NO: 5822475 - DNA, 25 bp, Homo sapien
gcagtacgggaaggcatagtggcac

SEQ ID NO: 5822476 - DNA, 25 bp, Homo sapien
ccgggtcgcaccagtgggcgtgagt

SEQ ID NO: 5822477 - DNA, 25 bp, Homo sapien
tatttccccttgcatgtgcaaagac

SEQ ID NO: 5822478 - DNA, 25 bp, Homo sapien
gcctgggccggcgggtcagtcccag

SEQ ID NO: 5822479 - DNA, 25 bp, Homo sapien
tccctcgcctccgcctggccgcctc

SEQ ID NO: 5822480 - DNA, 25 bp, Homo sapien
tgtatggctgacagaatccatcttc

SEQ ID NO: 5822481 - DNA, 25 bp, Homo sapien
tgggcgtgagtcgccctgggtcgga

SEQ ID NO: 5822482 - DNA, 25 bp, Homo sapien
aacatccacgggctcttcccgggct

SEQ ID NO: 5822483 - DNA, 25 bp, Homo sapien
gcctgggctggtcttgaacccctgg

SEQ ID NO: 5822484 - DNA, 25 bp, Homo sapien
gggccaaacttgacaaacaagactc

SEQ ID NO: 5822485 - DNA, 25 bp, Homo sapien
taagtgactggaagtgccaatcata

SEQ ID NO: 5822486 - DNA, 25 bp, Homo sapien
tgtgtgtgtggggatactgggaatt

SEQ ID NO: 5822487 - DNA, 25 bp, Homo sapien
ggctgccgtcccggggctccctcgg

SEQ ID NO: 5822488 - DNA, 25 bp, Homo sapien
gtccgggtcgcaccagtgggcgtga

SEQ ID NO: 5822489 - DNA, 25 bp, Homo sapien
atggcctccattcagctctgggaaa

SEQ ID NO: 5822490 - DNA, 25 bp, Homo sapien
aggaacagttaactgactcaggaat

SEQ ID NO: 5822491 - DNA, 25 bp, Homo sapien
tctcctaaataagaggggtaggata

SEQ ID NO: 5822492 - DNA, 25 bp, Homo sapien
atcagaatcatgggatttgatcttg

SEQ ID NO: 5822493 - DNA, 25 bp, Homo sapien
ctgacagctctgtttcttgggcagc

SEQ ID NO: 5822494 - DNA, 25 bp, Homo sapien
ggaattccattttcttactagatac

SEQ ID NO: 5822495 - DNA, 25 bp, Homo sapien
catagtggcacagggaaggaatggc

SEQ ID NO: 5822496 - DNA, 25 bp, Homo sapien
cacagatcagacttaaagttttcat

SEQ ID NO: 5822497 - DNA, 25 bp, Homo sapien
cacaggagcatcatttttgaaccag

SEQ ID NO: 5822498 - DNA, 25 bp, Homo sapien
tatggctgacagaatccatcttctt

SEQ ID NO: 5822499 - DNA, 25 bp, Homo sapien
atgggaattccaatccggatacagt

SEQ ID NO: 5822500 - DNA, 25 bp, Homo sapien
gtcgcaccagtgggcgtgagtcgcc

SEQ ID NO: 5822501 - DNA, 25 bp, Homo sapien
ccagccctctggctgcagcctcgcc

SEQ ID NO: 5822502 - DNA, 25 bp, Homo sapien
gaccgaaaggagagcctccggggct

SEQ ID NO: 5822503 - DNA, 25 bp, Homo sapien
gtcttgaacccctgggctcaaatga

SEQ ID NO: 5822504 - DNA, 25 bp, Homo sapien
ctgtccgggtcgcaccagtgggcgt

SEQ ID NO: 5822505 - DNA, 25 bp, Homo sapien
ctcccggccgcctcgtcccggccgc

SEQ ID NO: 5822506 - DNA, 25 bp, Homo sapien
cgcgtgcggccagcagcagcgcggc

SEQ ID NO: 5822507 - DNA, 25 bp, Homo sapien
gctctctggctgggggagatcttca

SEQ ID NO: 5822508 - DNA, 25 bp, Homo sapien
gatcttgcaaaaatgtactctgttt

SEQ ID NO: 5822509 - DNA, 25 bp, Homo sapien
ggcgcggccggtgcattcctcctct

SEQ ID NO: 5822510 - DNA, 25 bp, Homo sapien
ttgcagtgggaggggggccaaactt

SEQ ID NO: 5822511 - DNA, 25 bp, Homo sapien
cccttgcatgtgcaaagactccata

SEQ ID NO: 5822512 - DNA, 25 bp, Homo sapien
cctctaacctgctccctcgcctccg

SEQ ID NO: 5822513 - DNA, 25 bp, Homo sapien
tatgtagaaacggcaaggtttaccc

SEQ ID NO: 5822514 - DNA, 25 bp, Homo sapien
atgcttcttctgcagtattaacaga

SEQ ID NO: 5822515 - DNA, 25 bp, Homo sapien
atggtgggaggtggattcccagaga

SEQ ID NO: 5822516 - DNA, 25 bp, Homo sapien
ggtgggaggtggattcccagagact

SEQ ID NO: 5822517 - DNA, 25 bp, Homo sapien
acataacgaaggacacagtttaccc

SEQ ID NO: 5822518 - DNA, 25 bp, Homo sapien
aactgtgcctctgaagggctgggtc

SEQ ID NO: 5822519 - DNA, 25 bp, Homo sapien
tccctctgtatggctgacagaatcc

SEQ ID NO: 5822520 - DNA, 25 bp, Homo sapien
tctggctgggggagatcttcacagt

SEQ ID NO: 5822521 - DNA, 25 bp, Homo sapien
cttgtgatttttatttataggatct

SEQ ID NO: 5822522 - DNA, 25 bp, Homo sapien
ttgagaacgtgttttggtaccttac

SEQ ID NO: 5822523 - DNA, 25 bp, Homo sapien
catctgagtatcctggacttgcagt

SEQ ID NO: 5822524 - DNA, 25 bp, Homo sapien
gcgcgcagaacatccacgggctctt

SEQ ID NO: 5822525 - DNA, 25 bp, Homo sapien
cggcggcgcggccggtgcattcctc

SEQ ID NO: 5822526 - DNA, 25 bp, Homo sapien
ggggcaatgacttctatttaccgca

SEQ ID NO: 5822527 - DNA, 25 bp, Homo sapien
atgtcacacagatcagacttaaagt

SEQ ID NO: 5822528 - DNA, 25 bp, Homo sapien
cgcgatcccttcccagccctctggc

SEQ ID NO: 5822529 - DNA, 25 bp, Homo sapien
tccagctctccacgctccctctctc

SEQ ID NO: 5822530 - DNA, 25 bp, Homo sapien
tttgcagtgcagttctgctgtctgg

SEQ ID NO: 5822531 - DNA, 25 bp, Homo sapien
actccgagaacagcgcaccctgcgc

SEQ ID NO: 5822532 - DNA, 25 bp, Homo sapien
attaacagacataacgaaggacaca

SEQ ID NO: 5822533 - DNA, 25 bp, Homo sapien
caggtaagaatctttgttgagttca

SEQ ID NO: 5822534 - DNA, 25 bp, Homo sapien
ggtcggactccgagaacagcgcacc

SEQ ID NO: 5822535 - DNA, 25 bp, Homo sapien
atgcaatccctctgtatggctgaca

SEQ ID NO: 5822536 - DNA, 25 bp, Homo sapien
gtaggaatggcctccattcagctct

SEQ ID NO: 5822537 - DNA, 25 bp, Homo sapien
ttaccctaaaaccagattgagatca

SEQ ID NO: 5822538 - DNA, 25 bp, Homo sapien
gtgaagcaccagggagcttcctttt

SEQ ID NO: 5822539 - DNA, 25 bp, Homo sapien
ccacctccttgccgtttgttgccac

SEQ ID NO: 5822540 - DNA, 25 bp, Homo sapien
gcaggtataaaggcagttgacttct

SEQ ID NO: 5822541 - DNA, 25 bp, Homo sapien
gccctgatttggtcacactgacggt

SEQ ID NO: 5822542 - DNA, 25 bp, Homo sapien
ttttcttactagatacctatatgct

SEQ ID NO: 5822543 - DNA, 25 bp, Homo sapien
gcgggcgcgtcccgcggcggcgcgg

SEQ ID NO: 5822544 - DNA, 25 bp, Homo sapien
ttctccaggatttcacattcatcgc

SEQ ID NO: 5822545 - DNA, 25 bp, Homo sapien
tccctctaacctgctccctcgcctc

SEQ ID NO: 5822546 - DNA, 25 bp, Homo sapien
agacttaaagttttcatccaaggtg

SEQ ID NO: 5822547 - DNA, 25 bp, Homo sapien
cctctgtatggctgacagaatccat

SEQ ID NO: 5822548 - DNA, 25 bp, Homo sapien
gaatacattaggggcaatgacttct

SEQ ID NO: 5822549 - DNA, 25 bp, Homo sapien
aatgtgataaactgtctcaactgtg

SEQ ID NO: 5822550 - DNA, 25 bp, Homo sapien
gaggggtaggatagggatctttaaa

SEQ ID NO: 5822551 - DNA, 25 bp, Homo sapien
tgaccgagtaatggttgtagattca

SEQ ID NO: 5822552 - DNA, 25 bp, Homo sapien
tcatttttgaaccagcggatggtgg

SEQ ID NO: 5822553 - DNA, 25 bp, Homo sapien
agttaactgactcaggaattccatt

SEQ ID NO: 5822554 - DNA, 25 bp, Homo sapien
tctccaaacattttctagaaaaagg

SEQ ID NO: 5822555 - DNA, 25 bp, Homo sapien
ttcatccaaggtgaagcaccaggga

SEQ ID NO: 5822556 - DNA, 25 bp, Homo sapien
cattggttcatcaagggtcaggtaa

SEQ ID NO: 5822557 - DNA, 25 bp, Homo sapien
cgaagggcggtgaaagtgtgtgtgt

SEQ ID NO: 5822558 - DNA, 25 bp, Homo sapien
cttctatttaccgcaagctgggatg

SEQ ID NO: 5822559 - DNA, 25 bp, Homo sapien
agtgttgggattacaggtataagcc

SEQ ID NO: 5822560 - DNA, 25 bp, Homo sapien
agtgaaggcagctgtgatctgattt

SEQ ID NO: 5822561 - DNA, 25 bp, Homo sapien
taagaatctttgttgagttcacttg

SEQ ID NO: 5822562 - DNA, 25 bp, Homo sapien
ctttaaagatgattgaatacattag

SEQ ID NO: 5822563 - DNA, 25 bp, Homo sapien
tcttgcaaaaatgtactctgtttga

SEQ ID NO: 5822564 - DNA, 25 bp, Homo sapien
ggcgctcgcaggacgccggggacgt

SEQ ID NO: 5822565 - DNA, 25 bp, Homo sapien
catccacgagtgcaatggctgcagg

SEQ ID NO: 5822566 - DNA, 25 bp, Homo sapien
ggatacagttcgcagcttctgggct

SEQ ID NO: 5822567 - DNA, 25 bp, Homo sapien
gggcggtgaaagtgtgtgtgtgggg

SEQ ID NO: 5822568 - DNA, 25 bp, Homo sapien
aagtttcatcgcagtacgggaaggc

SEQ ID NO: 5822569 - DNA, 25 bp, Homo sapien
gctcttcccgggctcccggccgcct

SEQ ID NO: 5822570 - DNA, 25 bp, Homo sapien
gctgggatgtcacacagatcagact

SEQ ID NO: 5822571 - DNA, 25 bp, Homo sapien
aggaatggcctccattcagctctgg

SEQ ID NO: 5822572 - DNA, 25 bp, Homo sapien
ctaaataagaggggtaggataggga

SEQ ID NO: 5822573 - DNA, 25 bp, Homo sapien
tctgccatgggaattccaatccgga

SEQ ID NO: 5822574 - DNA, 25 bp, Homo sapien
agtgccaatcatagtgaaggcagct

SEQ ID NO: 5822575 - DNA, 25 bp, Homo sapien
accacaggagcatcatttttgaacc

SEQ ID NO: 5822576 - DNA, 25 bp, Homo sapien
tgttccatgatgaggtaggcactaa

SEQ ID NO: 5822577 - DNA, 25 bp, Homo sapien
cggcggtggcggctgctccagctct

SEQ ID NO: 5822578 - DNA, 25 bp, Homo sapien
agaaaaaggaacagttaactgactc

SEQ ID NO: 5822579 - DNA, 25 bp, Homo sapien
tttgttgagttcacttgagatgttc

SEQ ID NO: 5822580 - DNA, 25 bp, Homo sapien
attccaatccggatacagttcgcag

SEQ ID NO: 5822581 - DNA, 25 bp, Homo sapien
gctccagctctccacgctccctctc

SEQ ID NO: 5822582 - DNA, 25 bp, Homo sapien
gccggtgcattcctcctctcgctga

SEQ ID NO: 5822583 - DNA, 25 bp, Homo sapien
aaaaatgtactctgtttgacacagg

SEQ ID NO: 5822584 - DNA, 25 bp, Homo sapien
ggggctgccgtcccggggctccctc

SEQ ID NO: 5822585 - DNA, 25 bp, Homo sapien
tccatcttcttcatactcatctgag

SEQ ID NO: 5822586 - DNA, 25 bp, Homo sapien
agcctgtgtctgtggtgtcgaggtt

SEQ ID NO: 5822587 - DNA, 25 bp, Homo sapien
gcgtcccgcggcggcgcggccggtg

SEQ ID NO: 5822588 - DNA, 25 bp, Homo sapien
gggtccctgttacatccacgagtgc

SEQ ID NO: 5822589 - DNA, 25 bp, Homo sapien
tctcgctgaggcggcggcggcggcg

SEQ ID NO: 5822590 - DNA, 25 bp, Homo sapien
ccagcagcgccaggagcggcgggcg

SEQ ID NO: 5822591 - DNA, 25 bp, Homo sapien
taatggttgtagattcatcctgcct

SEQ ID NO: 5822592 - DNA, 25 bp, Homo sapien
actgtctcaactgtgcctctgaagg

SEQ ID NO: 5822593 - DNA, 25 bp, Homo sapien
ttctgctgtctggcccagagacgtg

SEQ ID NO: 5822594 - DNA, 25 bp, Homo sapien
tggtagagatggagtctcactatgt

SEQ ID NO: 5822595 - DNA, 25 bp, Homo sapien
tcctggacttgcagtgggagggggg

SEQ ID NO: 5822596 - DNA, 25 bp, Homo sapien
gatttcacattcatcgcgacacaag

SEQ ID NO: 5822597 - DNA, 25 bp, Homo sapien
gcgcagaacatccacgggctcttcc

SEQ ID NO: 5822598 - DNA, 25 bp, Homo sapien
cttctgcagtattaacagacataac

SEQ ID NO: 5822599 - DNA, 25 bp, Homo sapien
aaataagaggggtaggatagggatc

SEQ ID NO: 5822600 - DNA, 25 bp, Homo sapien
agcagcgcggccagcagcgccagga

SEQ ID NO: 5822601 - DNA, 25 bp, Homo sapien
agagacgtggtgatgttattcattg

SEQ ID NO: 5822602 - DNA, 25 bp, Homo sapien
tggaagaaaccacctccttgccgtt

SEQ ID NO: 5822603 - DNA, 25 bp, Homo sapien
ctttgggacggatgaagtttcatcg

SEQ ID NO: 5822604 - DNA, 25 bp, Homo sapien
gcagtgggaggggggccaaacttga

SEQ ID NO: 5822605 - DNA, 25 bp, Homo sapien
tcaactgtgcctctgaagggctggg

SEQ ID NO: 5822606 - DNA, 25 bp, Homo sapien
tgattccctgggttgcggcagtagg

SEQ ID NO: 5822607 - DNA, 25 bp, Homo sapien
tgtgtctgtggtgtcgaggtttcta

SEQ ID NO: 5822608 - DNA, 25 bp, Homo sapien
ttaactgactcaggaattccatttt

SEQ ID NO: 5822609 - DNA, 25 bp, Homo sapien
gggctggtcttgaacccctgggctc

SEQ ID NO: 5822610 - DNA, 25 bp, Homo sapien
cagtgcagttctgctgtctggccca

SEQ ID NO: 5822611 - DNA, 25 bp, Homo sapien
ggctgcaggtataaaggcagttgac

SEQ ID NO: 5822612 - DNA, 25 bp, Homo sapien
tgtgtggggatactgggaattccat

SEQ ID NO: 5822613 - DNA, 25 bp, Homo sapien
ggagtctcactatgttgcctgggct

SEQ ID NO: 5822614 - DNA, 25 bp, Homo sapien
ctcaggaattccattttcttactag

SEQ ID NO: 5822615 - DNA, 25 bp, Homo sapien
cagtattaacagacataacgaagga

SEQ ID NO: 5822616 - DNA, 25 bp, Homo sapien
cgagtaatggttgtagattcatcct

SEQ ID NO: 5822617 - DNA, 25 bp, Homo sapien
tccattcagctctgggaaacgaagg

SEQ ID NO: 5822618 - DNA, 25 bp, Homo sapien
tgggatgtcacacagatcagactta

SEQ ID NO: 5822619 - DNA, 25 bp, Homo sapien
gataagtgactggaagtgccaatca

SEQ ID NO: 5822620 - DNA, 25 bp, Homo sapien
agtttcagcctcatcagaatcatgg

SEQ ID NO: 5822621 - DNA, 25 bp, Homo sapien
tgggtaacatctttttctataaaaa

SEQ ID NO: 5822622 - DNA, 25 bp, Homo sapien
cctgggttgcggcagtaggaatggc

SEQ ID NO: 5822623 - DNA, 25 bp, Homo sapien
tgttgggattacaggtataagccac

SEQ ID NO: 5822624 - DNA, 25 bp, Homo sapien
ggctgctccagctctccacgctccc

SEQ ID NO: 5822625 - DNA, 25 bp, Homo sapien
tcctgcctcggccttcctagagtgt

SEQ ID NO: 5822626 - DNA, 25 bp, Homo sapien
tttgattccctgggttgcggcagta

SEQ ID NO: 5822627 - DNA, 25 bp, Homo sapien
tcaagggtcaggtaagaatctttgt

SEQ ID NO: 5822628 - DNA, 25 bp, Homo sapien
ccacacctgtgctgttataacactt

SEQ ID NO: 5822629 - DNA, 25 bp, Homo sapien
cagcagcagcgcggccagcagcgcc

SEQ ID NO: 5822630 - DNA, 25 bp, Homo sapien
tctctggctgggggagatcttcaca

SEQ ID NO: 5822631 - DNA, 25 bp, Homo sapien
tcctggaccacaggagcatcatttt

SEQ ID NO: 5822632 - DNA, 25 bp, Homo sapien
cagtcccaggctgtccgggtcgcac

SEQ ID NO: 5822633 - DNA, 25 bp, Homo sapien
agtttggcagtttcagcctcatcag

SEQ ID NO: 5822634 - DNA, 25 bp, Homo sapien
tcggactccgagaacagcgcaccct

SEQ ID NO: 5822635 - DNA, 25 bp, Homo sapien
tctgggaaacgaagggcggtgaaag

SEQ ID NO: 5822636 - DNA, 25 bp, Homo sapien
aacccctgggctcaaatgatcctcc

SEQ ID NO: 5822637 - DNA, 25 bp, Homo sapien
ggtgaaagtgtgtgtgtggggatac

SEQ ID NO: 5822638 - DNA, 25 bp, Homo sapien
aatccctctgtatggctgacagaat

SEQ ID NO: 5822639 - DNA, 25 bp, Homo sapien
cctgggctcaaatgatcctcctgcc

SEQ ID NO: 5822640 - DNA, 25 bp, Homo sapien
gcaaaaatgtactctgtttgacaca

SEQ ID NO: 5822641 - DNA, 25 bp, Homo sapien
gacattctccaggatttcacattca

SEQ ID NO: 5822642 - DNA, 25 bp, Homo sapien
ggcgaactgagaacacttatcagat

SEQ ID NO: 5822643 - DNA, 25 bp, Homo sapien
tccccttgcatgtgcaaagactcca

SEQ ID NO: 5822644 - DNA, 25 bp, Homo sapien
tgacaaacaagactccagtggaaga

SEQ ID NO: 5822645 - DNA, 25 bp, Homo sapien
tgccatgggaattccaatccggata

SEQ ID NO: 5822646 - DNA, 25 bp, Homo sapien
cctcgcctccgcctggccgcctctg

SEQ ID NO: 5822647 - DNA, 25 bp, Homo sapien
tgtggtgtcgaggtttctaatccgc

SEQ ID NO: 5822648 - DNA, 25 bp, Homo sapien
tttttggtagagatggagtctcact

SEQ ID NO: 5822649 - DNA, 25 bp, Homo sapien
cggggctcctggaccacaggagcat

SEQ ID NO: 5822650 - DNA, 25 bp, Homo sapien
atacagttcgcagcttctgggctct

SEQ ID NO: 5822651 - DNA, 25 bp, Homo sapien
tgttcttaaggcatacagaaaacaa

SEQ ID NO: 5822652 - DNA, 25 bp, Homo sapien
ctagaaaaaggaacagttaactgac

SEQ ID NO: 5822653 - DNA, 25 bp, Homo sapien
gactccatatagacggtgcggttgc

SEQ ID NO: 5822654 - DNA, 25 bp, Homo sapien
atgttattcattggttcatcaaggg

SEQ ID NO: 5822655 - DNA, 25 bp, Homo sapien
atcagataagtgactggaagtgcca

SEQ ID NO: 5822656 - DNA, 25 bp, Homo sapien
gcagcagccccgcgtgcggccagca

SEQ ID NO: 5822657 - DNA, 25 bp, Homo sapien
atttgatcttgcaaaaatgtactct

SEQ ID NO: 5822658 - DNA, 25 bp, Homo sapien
ggttgtagattcatcctgccttgtg

SEQ ID NO: 5822659 - DNA, 25 bp, Homo sapien
tgggaaacgaagggcggtgaaagtg

SEQ ID NO: 5822660 - DNA, 25 bp, Homo sapien
tagtccacacctgtgctgttataac

SEQ ID NO: 5822661 - DNA, 25 bp, Homo sapien
tgatttttatttataggatctgcca

SEQ ID NO: 5822662 - DNA, 25 bp, Homo sapien
gcaagctgggatgtcacacagatca

SEQ ID NO: 5822663 - DNA, 25 bp, Homo sapien
acaagtcacggggctttgggacgga

SEQ ID NO: 5822664 - DNA, 25 bp, Homo sapien
gatttaataaccttgtaatatttat

SEQ ID NO: 5822665 - DNA, 25 bp, Homo sapien
ataaatattacaaggttattaaatc

SEQ ID NO: 5822666 - DNA, 25 bp, Homo sapien
cccttagtaaaatcttattgataag

SEQ ID NO: 5822667 - DNA, 25 bp, Homo sapien
cttatcaataagattttactaaggg

SEQ ID NO: 5822668 - DNA, 25 bp, Homo sapien
tcgttatcgggtggaccagaccgac

SEQ ID NO: 5822669 - DNA, 25 bp, Homo sapien
gtcggtctggtccacccgataacga

SEQ ID NO: 5822670 - DNA, 25 bp, Homo sapien
gtaacataattaagcgactttcccg

SEQ ID NO: 5822671 - DNA, 25 bp, Homo sapien
cgggaaagtcgcttaattatgttac

SEQ ID NO: 5822672 - DNA, 25 bp, Homo sapien
ggaccgtgagggacttggcgtgtcg

SEQ ID NO: 5822673 - DNA, 25 bp, Homo sapien
cgacacgccaagtccctcacggtcc

SEQ ID NO: 5822674 - DNA, 25 bp, Homo sapien
gaatcgatgatggaaccctaggtct

SEQ ID NO: 5822675 - DNA, 25 bp, Homo sapien
agacctagggttccatcatcgattc

SEQ ID NO: 5822676 - DNA, 25 bp, Homo sapien
gaaaacattaacacactaaccaccg

SEQ ID NO: 5822677 - DNA, 25 bp, Homo sapien
cggtggttagtgtgttaatgttttc

SEQ ID NO: 5822678 - DNA, 25 bp, Homo sapien
tcaaacagaaatagacgcgaaaatg

SEQ ID NO: 5822679 - DNA, 25 bp, Homo sapien
cattttcgcgtctatttctgtttga

SEQ ID NO: 5822680 - DNA, 25 bp, Homo sapien
agacggtgaccctataggaagttcg

SEQ ID NO: 5822681 - DNA, 25 bp, Homo sapien
cgaacttcctatagggtcaccgtct

SEQ ID NO: 5822682 - DNA, 25 bp, Homo sapien
gagtgagcgagctttgtaaactact

SEQ ID NO: 5822683 - DNA, 25 bp, Homo sapien
ttctgcaaggtcagacatgcaagac

SEQ ID NO: 5822684 - DNA, 25 bp, Homo sapien
tgctcattcctctgggcacagcctt

SEQ ID NO: 5822685 - DNA, 25 bp, Homo sapien
tgggcacagcctttcagagcattta

SEQ ID NO: 5822686 - DNA, 25 bp, Homo sapien
ctatttgctcattcctctgggcaca

SEQ ID NO: 5822687 - DNA, 25 bp, Homo sapien
aagtacttggccaaaacagcaggat

SEQ ID NO: 5822688 - DNA, 25 bp, Homo sapien
accccagcttctgcaaggtcagaca

SEQ ID NO: 5822689 - DNA, 25 bp, Homo sapien
ctgggcacagcctttcagagcattt

SEQ ID NO: 5822690 - DNA, 25 bp, Homo sapien
agtagtttggaaacacttgcctatt

SEQ ID NO: 5822691 - DNA, 25 bp, Homo sapien
ggcacagcctttcagagcatttatc

SEQ ID NO: 5822692 - DNA, 25 bp, Homo sapien
tcctctgggcacagcctttcagagc

SEQ ID NO: 5822693 - DNA, 25 bp, Homo sapien
tcagacatgcaagacaagtacttgg

SEQ ID NO: 5822694 - DNA, 25 bp, Homo sapien
aagacaagtacttggccaaaacagc

SEQ ID NO: 5822695 - DNA, 25 bp, Homo sapien
attcctctgggcacagcctttcaga

SEQ ID NO: 5822696 - DNA, 25 bp, Homo sapien
ggagtgagcgagctttgtaaactac

SEQ ID NO: 5822697 - DNA, 25 bp, Homo sapien
aaacaacttctgtctgatgtgattt

SEQ ID NO: 5822698 - DNA, 25 bp, Homo sapien
aatcaagtagtgttatgcaataaac

SEQ ID NO: 5822699 - DNA, 25 bp, Homo sapien
gtttattgcataacactacttgatt

SEQ ID NO: 5822700 - DNA, 25 bp, Homo sapien
ctgtcgttcatatgcttttacgtat

SEQ ID NO: 5822701 - DNA, 25 bp, Homo sapien
atacgtaaaagcatatgaacgacag

SEQ ID NO: 5822702 - DNA, 25 bp, Homo sapien
gggcgaaaagttaaagcgatgccat

SEQ ID NO: 5822703 - DNA, 25 bp, Homo sapien
tactttggtgacaacttggggcgaa

SEQ ID NO: 5822704 - DNA, 25 bp, Homo sapien
gaccgtatttatcatcagaagcaat

SEQ ID NO: 5822705 - DNA, 25 bp, Homo sapien
catgcccgtgtggtgctgccgctgc

SEQ ID NO: 5822706 - DNA, 25 bp, Homo sapien
actttggtgacaacttggggcgaaa

SEQ ID NO: 5822707 - DNA, 25 bp, Homo sapien
cttcttcatccagatgctgactttg

SEQ ID NO: 5822708 - DNA, 25 bp, Homo sapien
ataataggaaatggaccctcaggaa

SEQ ID NO: 5822709 - DNA, 25 bp, Homo sapien
cttagaatacttgtctgagggcctt

SEQ ID NO: 5822710 - DNA, 25 bp, Homo sapien
ctccctggccggtcatttcagaaac

SEQ ID NO: 5822711 - DNA, 25 bp, Homo sapien
actatagtgacactgaaactgaagg

SEQ ID NO: 5822712 - DNA, 25 bp, Homo sapien
gaatacttgtctgagggccttgagg

SEQ ID NO: 5822713 - DNA, 25 bp, Homo sapien
aatacttgtctgagggccttgaggg

SEQ ID NO: 5822714 - DNA, 25 bp, Homo sapien
ggaaatggaccctcaggaatatgcc

SEQ ID NO: 5822715 - DNA, 25 bp, Homo sapien
agaaactatagtgacactgaaactg

SEQ ID NO: 5822716 - DNA, 25 bp, Homo sapien
atggaccctcaggaatatgcctttc

SEQ ID NO: 5822717 - DNA, 25 bp, Homo sapien
ttactggaagattcgtcagtgactt

SEQ ID NO: 5822718 - DNA, 25 bp, Homo sapien
tcagtgagaaaggtagtttcggtgg

SEQ ID NO: 5822719 - DNA, 25 bp, Homo sapien
ccaccgaaactacctttctcactga

SEQ ID NO: 5822720 - DNA, 25 bp, Homo sapien
ttcgagtcagtgtaactagtaactc

SEQ ID NO: 5822721 - DNA, 25 bp, Homo sapien
gagttactagttacactgactcgaa

SEQ ID NO: 5822722 - DNA, 25 bp, Homo sapien
ttctccataaggaactaggttaaag

SEQ ID NO: 5822723 - DNA, 25 bp, Homo sapien
ctttaacctagttccttatggagaa

SEQ ID NO: 5822724 - DNA, 25 bp, Homo sapien
caccctggtgagttcctactcgacg

SEQ ID NO: 5822725 - DNA, 25 bp, Homo sapien
cgtcgagtaggaactcaccagggtg

SEQ ID NO: 5822726 - DNA, 25 bp, Homo sapien
gtgtgtttaggtgtgcttatattat

SEQ ID NO: 5822727 - DNA, 25 bp, Homo sapien
ataatataagcacacctaaacacac

SEQ ID NO: 5822728 - DNA, 25 bp, Homo sapien
gcggctagaggtcggaggcgcgtcg

SEQ ID NO: 5822729 - DNA, 25 bp, Homo sapien
cgacgcgcctccgacctctagccgc

SEQ ID NO: 5822730 - DNA, 25 bp, Homo sapien
tagagccaacacttccaactcatgc

SEQ ID NO: 5822731 - DNA, 25 bp, Homo sapien
gcatgagttggaagtgttggctcta

SEQ ID NO: 5822732 - DNA, 25 bp, Homo sapien
ctttacggtaacatcctaattattc

SEQ ID NO: 5822733 - DNA, 25 bp, Homo sapien
gaataattaggatgttaccgtaaag

SEQ ID NO: 5822734 - DNA, 25 bp, Homo sapien
taaccccagcgataagaaacattag

SEQ ID NO: 5822735 - DNA, 25 bp, Homo sapien
ctaatgtttcttatcgctggggtta

SEQ ID NO: 5822736 - DNA, 25 bp, Homo sapien
gggtccagtcgacacgggtggcggt

SEQ ID NO: 5822737 - DNA, 25 bp, Homo sapien
accgccacccgtgtcgactggaccc

SEQ ID NO: 5822738 - DNA, 25 bp, Homo sapien
atatttgatcgaaggatgtgaccgg

SEQ ID NO: 5822739 - DNA, 25 bp, Homo sapien
ccggtcacatccttcgatcaaatat

SEQ ID NO: 5822740 - DNA, 25 bp, Homo sapien
gagaccggaacgtctaagaacctct

SEQ ID NO: 5822741 - DNA, 25 bp, Homo sapien
agaggttcttagacgttccggtctc

SEQ ID NO: 5822742 - DNA, 25 bp, Homo sapien
ctcgtagcccataaatgtgaagcag

SEQ ID NO: 5822743 - DNA, 25 bp, Homo sapien
ctgcttcacatttatgggctacgag

SEQ ID NO: 5822744 - DNA, 25 bp, Homo sapien
gcccacaatgtatagaaggacacgg

SEQ ID NO: 5822745 - DNA, 25 bp, Homo sapien
ccgtgtccttctatacattgtgggc

SEQ ID NO: 5822746 - DNA, 25 bp, Homo sapien
cggtatcagggtacacacgcacacg

SEQ ID NO: 5822747 - DNA, 25 bp, Homo sapien
cgtgtgcgtgtgtaccctgataccg

SEQ ID NO: 5822748 - DNA, 25 bp, Homo sapien
tcagggcgggccaacagcagggtct

SEQ ID NO: 5822749 - DNA, 25 bp, Homo sapien
agaccctgctgttggcccgccctga

SEQ ID NO: 5822750 - DNA, 25 bp, Homo sapien
gcaacgcgccgcctggagatcggtc

SEQ ID NO: 5822751 - DNA, 25 bp, Homo sapien
gaccgatctccaggcggcgcgttgc

SEQ ID NO: 5822752 - DNA, 25 bp, Homo sapien
gactcgtaccagtcccgcattttgt

SEQ ID NO: 5822753 - DNA, 25 bp, Homo sapien
acaaaatgcgggactggtacgagtc

SEQ ID NO: 5822754 - DNA, 25 bp, Homo sapien
ccacagatttcttcactaacaggga

SEQ ID NO: 5822755 - DNA, 25 bp, Homo sapien
tccctgttagtgaagaaatctgtgg

SEQ ID NO: 5822756 - DNA, 25 bp, Homo sapien
aatcgtgcgtcgtcagctttacggg

SEQ ID NO: 5822757 - DNA, 25 bp, Homo sapien
cccgtaaagctgacgacgcacgatt

SEQ ID NO: 5822758 - DNA, 25 bp, Homo sapien
agaagatacattgactgaccctgtg

SEQ ID NO: 5822759 - DNA, 25 bp, Homo sapien
ccaggagatgagaaggatcccctgc

SEQ ID NO: 5822760 - DNA, 25 bp, Homo sapien
tctccgaggggcatcctgatgtgcc

SEQ ID NO: 5822761 - DNA, 25 bp, Homo sapien
cctgggacgcagaggagcacacaca

SEQ ID NO: 5822762 - DNA, 25 bp, Homo sapien
agggcagaagacaggcacaccaaac

SEQ ID NO: 5822763 - DNA, 25 bp, Homo sapien
aggatcccctgcaccctcaggagaa

SEQ ID NO: 5822764 - DNA, 25 bp, Homo sapien
gacaggcacaccaaaccctagacgt

SEQ ID NO: 5822765 - DNA, 25 bp, Homo sapien
atacattgactgaccctgtgggctc

SEQ ID NO: 5822766 - DNA, 25 bp, Homo sapien
acatgctctccgaggggcatcctga

SEQ ID NO: 5822767 - DNA, 25 bp, Homo sapien
acccggctcagctgcctaggagctg

SEQ ID NO: 5822768 - DNA, 25 bp, Homo sapien
agaggcacgtagaagatacattgac

SEQ ID NO: 5822769 - DNA, 25 bp, Homo sapien
tccaaacctgggacgcagaggagca

SEQ ID NO: 5822770 - DNA, 25 bp, Homo sapien
agaggagcacacacacacgctcgct

SEQ ID NO: 5822771 - DNA, 25 bp, Homo sapien
ggtccaggagatgagaaggatcccc

SEQ ID NO: 5822772 - DNA, 25 bp, Homo sapien
agaaggatcccctgcaccctcagga

SEQ ID NO: 5822773 - DNA, 25 bp, Homo sapien
cctagacgtccaaacctgggacgca

SEQ ID NO: 5822774 - DNA, 25 bp, Homo sapien
tgacggtgaggtactgaccctaggt

SEQ ID NO: 5822775 - DNA, 25 bp, Homo sapien
acctagggtcagtacctcaccgtca

SEQ ID NO: 5822776 - DNA, 25 bp, Homo sapien
ggacgtccctcggtgggaacatcag

SEQ ID NO: 5822777 - DNA, 25 bp, Homo sapien
ctgatgttcccaccgagggacgtcc

SEQ ID NO: 5822778 - DNA, 25 bp, Homo sapien
actgggcgacaggtcccgacaggag

SEQ ID NO: 5822779 - DNA, 25 bp, Homo sapien
ctcctgtcgggacctgtcgcccagt

SEQ ID NO: 5822780 - DNA, 25 bp, Homo sapien
tccattgacattaatgttataagat

SEQ ID NO: 5822781 - DNA, 25 bp, Homo sapien
atcttataacattaatgtcaatgga

SEQ ID NO: 5822782 - DNA, 25 bp, Homo sapien
acagtgccatgctcatcagaagagg

SEQ ID NO: 5822783 - DNA, 25 bp, Homo sapien
cctcttctgatgagcatggcactgt

SEQ ID NO: 5822784 - DNA, 25 bp, Homo sapien
caccttgccgcagggacacgtctcc

SEQ ID NO: 5822785 - DNA, 25 bp, Homo sapien
ggagacgtgtccctgcggcaaggtg

SEQ ID NO: 5822786 - DNA, 25 bp, Homo sapien
tattctgtactaggcttgaaatttc

SEQ ID NO: 5822787 - DNA, 25 bp, Homo sapien
gaaatttcaagcctagtacagaata

SEQ ID NO: 5822788 - DNA, 25 bp, Homo sapien
accagggcgaccgattcacacgtgt

SEQ ID NO: 5822789 - DNA, 25 bp, Homo sapien
acacgtgtgaatcggtcgccctggt

SEQ ID NO: 5822790 - DNA, 25 bp, Homo sapien
ggttgagtccgaggacgacgtcggg

SEQ ID NO: 5822791 - DNA, 25 bp, Homo sapien
cccgacgtcgtcctcggactcaacc

SEQ ID NO: 5822792 - DNA, 25 bp, Homo sapien
acctgcgtctcgacggcttcaagct

SEQ ID NO: 5822793 - DNA, 25 bp, Homo sapien
agcttgaagccgtcgagacgcaggt

SEQ ID NO: 5822794 - DNA, 25 bp, Homo sapien
tcgtccagacgtccttttgtggtcg

SEQ ID NO: 5822795 - DNA, 25 bp, Homo sapien
cgaccacaaaaggacgtctggacga

SEQ ID NO: 5822796 - DNA, 25 bp, Homo sapien
tgttacaattgttatgtgagataaa

SEQ ID NO: 5822797 - DNA, 25 bp, Homo sapien
tttatctcacataacaattgtaaca

SEQ ID NO: 5822798 - DNA, 25 bp, Homo sapien
ggccgggccggctaggcacccgtcg

SEQ ID NO: 5822799 - DNA, 25 bp, Homo sapien
cgacgggtgcctagccggcccggcc

SEQ ID NO: 5822800 - DNA, 25 bp, Homo sapien
ctcgggcactgcgccaccgccgctc

SEQ ID NO: 5822801 - DNA, 25 bp, Homo sapien
gagcggcggtggcgcagtgcccgag

SEQ ID NO: 5822802 - DNA, 25 bp, Homo sapien
acctcgggcactgcgccaccgccgc

SEQ ID NO: 5822803 - DNA, 25 bp, Homo sapien
gcggcggtggcgcagtgcccgaggt

SEQ ID NO: 5822804 - DNA, 25 bp, Homo sapien
gaagtcgggtgactgtacctttaac

SEQ ID NO: 5822805 - DNA, 25 bp, Homo sapien
gttaaaggtacagtcacccgacttc

SEQ ID NO: 5822806 - DNA, 25 bp, Homo sapien
gactccggccgtcggccgccgccgc

SEQ ID NO: 5822807 - DNA, 25 bp, Homo sapien
gcggcggcggccgacggccggagtc

SEQ ID NO: 5822808 - DNA, 25 bp, Homo sapien
cggccgccgccgcccacgcgtcgca

SEQ ID NO: 5822809 - DNA, 25 bp, Homo sapien
tgcgacgcgtgggcggcggcggccg

SEQ ID NO: 5822810 - DNA, 25 bp, Homo sapien
tcggccgccgccgcccacgcgtcgc

SEQ ID NO: 5822811 - DNA, 25 bp, Homo sapien
gcgacgcgtgggcggcggcggccga

SEQ ID NO: 5822812 - DNA, 25 bp, Homo sapien
gtcggccgccgccgcccacgcgtcg

SEQ ID NO: 5822813 - DNA, 25 bp, Homo sapien
cgacgcgtgggcggcggcggccgac

SEQ ID NO: 5822814 - DNA, 25 bp, Homo sapien
ctagcaagtccgagaaatgggttcg

SEQ ID NO: 5822815 - DNA, 25 bp, Homo sapien
cgaacccatttctcggacttgctag

SEQ ID NO: 5822816 - DNA, 25 bp, Homo sapien
tcgacgggttggtcgcggttcactc

SEQ ID NO: 5822817 - DNA, 25 bp, Homo sapien
gagtgaaccgcgaccaacccgtcga

SEQ ID NO: 5822818 - DNA, 25 bp, Homo sapien
cgcaaagtgtcggagtcctacaaat

SEQ ID NO: 5822819 - DNA, 25 bp, Homo sapien
atttgtaggactccgacactttgcg

SEQ ID NO: 5822820 - DNA, 25 bp, Homo sapien
tcggtacgtatcgtccgtcgccgag

SEQ ID NO: 5822821 - DNA, 25 bp, Homo sapien
ctcggcgacggacgatacgtaccga

SEQ ID NO: 5822822 - DNA, 25 bp, Homo sapien
cacgacaccgggtgcacccgtagcc

SEQ ID NO: 5822823 - DNA, 25 bp, Homo sapien
ggctacgggtgcacccggtgtcgtg

SEQ ID NO: 5822824 - DNA, 25 bp, Homo sapien
gggacaaaggcattaggtaaaggac

SEQ ID NO: 5822825 - DNA, 25 bp, Homo sapien
gtcctttacctaatgcctttgtccc

SEQ ID NO: 5822826 - DNA, 25 bp, Homo sapien
tcgtccggggcggagtgacctcact

SEQ ID NO: 5822827 - DNA, 25 bp, Homo sapien
agtgaggtcactccgccccggacga

SEQ ID NO: 5822828 - DNA, 25 bp, Homo sapien
gtcacaactggtggccgggtgcacc

SEQ ID NO: 5822829 - DNA, 25 bp, Homo sapien
ggtgcacccggccaccagttgtgac

SEQ ID NO: 5822830 - DNA, 25 bp, Homo sapien
caaactcattaacctacagacttaa

SEQ ID NO: 5822831 - DNA, 25 bp, Homo sapien
ttaagtctgtaggttaatgagtttg

SEQ ID NO: 5822832 - DNA, 25 bp, Homo sapien
atcaaactcttaatcgagaactagg

SEQ ID NO: 5822833 - DNA, 25 bp, Homo sapien
cctagttctcgattaagagtttgat

SEQ ID NO: 5822834 - DNA, 25 bp, Homo sapien
taatcgtaatttctaggtgactacc

SEQ ID NO: 5822835 - DNA, 25 bp, Homo sapien
ggtagtcacctagaaattacgatta

SEQ ID NO: 5822836 - DNA, 25 bp, Homo sapien
acgttgagtatactcttaaatccgt

SEQ ID NO: 5822837 - DNA, 25 bp, Homo sapien
acggatttaagagtatactcaacgt

SEQ ID NO: 5822838 - DNA, 25 bp, Homo sapien
ccttcctgacagaactcagactgtg

SEQ ID NO: 5822839 - DNA, 25 bp, Homo sapien
cacagtctgagttctgtcaggaagg

SEQ ID NO: 5822840 - DNA, 25 bp, Homo sapien
tcgcccgctggagggactcttgagt

SEQ ID NO: 5822841 - DNA, 25 bp, Homo sapien
actcaagagtccctccagcgggcga

SEQ ID NO: 5822842 - DNA, 25 bp, Homo sapien
tcggaccccgcactcctggacccga

SEQ ID NO: 5822843 - DNA, 25 bp, Homo sapien
tcgggtccaggagtgcggggtccga

SEQ ID NO: 5822844 - DNA, 25 bp, Homo sapien
cggaccccgcactcctggacccgag

SEQ ID NO: 5822845 - DNA, 25 bp, Homo sapien
ctcgggtccaggagtgcggggtccg

SEQ ID NO: 5822846 - DNA, 25 bp, Homo sapien
gaaccgacacttctcgccgcaaagg

SEQ ID NO: 5822847 - DNA, 25 bp, Homo sapien
cctttgcggcgagaagtgtcggttc

SEQ ID NO: 5822848 - DNA, 25 bp, Homo sapien
cgaactgagactagagaggttctac

SEQ ID NO: 5822849 - DNA, 25 bp, Homo sapien
gtagaacctctctagtctcagttcg

SEQ ID NO: 5822850 - DNA, 25 bp, Homo sapien
cgtcgtgggaccgtccctccctgcc

SEQ ID NO: 5822851 - DNA, 25 bp, Homo sapien
ggcagggagggacggtcccacgacg

SEQ ID NO: 5822852 - DNA, 25 bp, Homo sapien
gatcctgagtacctaccctggaagt

SEQ ID NO: 5822853 - DNA, 25 bp, Homo sapien
acttccagggtaggtactcaggatc

SEQ ID NO: 5822854 - DNA, 25 bp, Homo sapien
agttctcagtggaaagagtccacat

SEQ ID NO: 5822855 - DNA, 25 bp, Homo sapien
atgtggactctttccactgagaact

SEQ ID NO: 5822856 - DNA, 25 bp, Homo sapien
ggacctcggctcctcaggtgggccc

SEQ ID NO: 5822857 - DNA, 25 bp, Homo sapien
gggcccacctgaggagccgaggtcc

SEQ ID NO: 5822858 - DNA, 25 bp, Homo sapien
acctcggctcctcaggtgggcccct

SEQ ID NO: 5822859 - DNA, 25 bp, Homo sapien
aggggcccacctgaggagccgaggt

SEQ ID NO: 5822860 - DNA, 25 bp, Homo sapien
gacctcggctcctcaggtgggcccc

SEQ ID NO: 5822861 - DNA, 25 bp, Homo sapien
ggggcccacctgaggagccgaggtc

SEQ ID NO: 5822862 - DNA, 25 bp, Homo sapien
agtcacattatcaggtgaactaaaa

SEQ ID NO: 5822863 - DNA, 25 bp, Homo sapien
ttttagttcacctgataatgtgact

SEQ ID NO: 5822864 - DNA, 25 bp, Homo sapien
gatgttgtttgagggcgaatctaag

SEQ ID NO: 5822865 - DNA, 25 bp, Homo sapien
cttagattcgccctcaaacaacatc

SEQ ID NO: 5822866 - DNA, 25 bp, Homo sapien
gtacttttctaaggagctggttaag

SEQ ID NO: 5822867 - DNA, 25 bp, Homo sapien
cttaaccagctccttagaaaagtac

SEQ ID NO: 5822868 - DNA, 25 bp, Homo sapien
tgtccacaaatcaccatcccgatag

SEQ ID NO: 5822869 - DNA, 25 bp, Homo sapien
ctatcgggatggtgatttgtggaca

SEQ ID NO: 5822870 - DNA, 25 bp, Homo sapien
gcccacaaattgagacaagtctaag

SEQ ID NO: 5822871 - DNA, 25 bp, Homo sapien
cttagacttgtctcaatttgtgggc

SEQ ID NO: 5822872 - DNA, 25 bp, Homo sapien
aaccatctttatcctactctggaag

SEQ ID NO: 5822873 - DNA, 25 bp, Homo sapien
cttccagagtaggataaagatggtt

SEQ ID NO: 5822874 - DNA, 25 bp, Homo sapien
caggtgacaagggtacactagggcc

SEQ ID NO: 5822875 - DNA, 25 bp, Homo sapien
ggccctagtgtacccttgtcacctg

SEQ ID NO: 5822876 - DNA, 25 bp, Homo sapien
tctccgtgccctccacaccgacaac

SEQ ID NO: 5822877 - DNA, 25 bp, Homo sapien
gttgtcggtgtggagggcacggaga

SEQ ID NO: 5822878 - DNA, 25 bp, Homo sapien
cgtctgcggtcgtcctaggtcgtcg

SEQ ID NO: 5822879 - DNA, 25 bp, Homo sapien
cgacgacctaggacgaccgcagacg

SEQ ID NO: 5822880 - DNA, 25 bp, Homo sapien
ccaccaaccgcgccgccgcgactgc

SEQ ID NO: 5822881 - DNA, 25 bp, Homo sapien
gcagtcgcggcggcgcggttggtgg

SEQ ID NO: 5822882 - DNA, 25 bp, Homo sapien
ccagagacaaatactctaatggtat

SEQ ID NO: 5822883 - DNA, 25 bp, Homo sapien
ataccattagagtatttgtctctgg

SEQ ID NO: 5822884 - DNA, 25 bp, Homo sapien
tttcttctcaaaacatactagaaaa

SEQ ID NO: 5822885 - DNA, 25 bp, Homo sapien
ttttctagtatgttttgagaagaaa

SEQ ID NO: 5822886 - DNA, 25 bp, Homo sapien
gagggcccggctacggccgcgcgac

SEQ ID NO: 5822887 - DNA, 25 bp, Homo sapien
gtcgcgcggccgtagccgggccctc

SEQ ID NO: 5822888 - DNA, 25 bp, Homo sapien
ccccgcccgcgagggctctccgcgg

SEQ ID NO: 5822889 - DNA, 25 bp, Homo sapien
ccgcggagagccctcgcgggcgggg

SEQ ID NO: 5822890 - DNA, 25 bp, Homo sapien
gtactgtcgcgtgtgtatgtggtgt

SEQ ID NO: 5822891 - DNA, 25 bp, Homo sapien
acaccacatacacacgcgacagtac

SEQ ID NO: 5822892 - DNA, 25 bp, Homo sapien
tctgctcgtccagagctttcagtgc

SEQ ID NO: 5822893 - DNA, 25 bp, Homo sapien
gcactgaaagctctggacgagcaga

SEQ ID NO: 5822894 - DNA, 25 bp, Homo sapien
gaagtgaagacgatatcattcaaaa

SEQ ID NO: 5822895 - DNA, 25 bp, Homo sapien
ttttgaatgatatcgtcttcacttc

SEQ ID NO: 5822896 - DNA, 25 bp, Homo sapien
ggacgtctcgaactctcaccaggtt

SEQ ID NO: 5822897 - DNA, 25 bp, Homo sapien
aacctggtgagagttcgagacgtcc

SEQ ID NO: 5822898 - DNA, 25 bp, Homo sapien
ctcttcaggggaacgttgatgactc

SEQ ID NO: 5822899 - DNA, 25 bp, Homo sapien
gagtcatcaacgttcccctgaagag

SEQ ID NO: 5822900 - DNA, 25 bp, Homo sapien
tgtttttgttagacctgatattatt

SEQ ID NO: 5822901 - DNA, 25 bp, Homo sapien
aataatatcaggtctaacaaaaaca

SEQ ID NO: 5822902 - DNA, 25 bp, Homo sapien
tggacacgaacaccgttttagcctt

SEQ ID NO: 5822903 - DNA, 25 bp, Homo sapien
aaggctaaaacggtgttcgtgtcca

SEQ ID NO: 5822904 - DNA, 25 bp, Homo sapien
tgtcgggtctgaggttccgtttgac

SEQ ID NO: 5822905 - DNA, 25 bp, Homo sapien
gtcaaacggaacctcagacccgaca

SEQ ID NO: 5822906 - DNA, 25 bp, Homo sapien
cttactatgaggtaatacgggtctc

SEQ ID NO: 5822907 - DNA, 25 bp, Homo sapien
gagacccgtattacctcatagtaag

SEQ ID NO: 5822908 - DNA, 25 bp, Homo sapien
aaggtgttccgcggggacgtcacac

SEQ ID NO: 5822909 - DNA, 25 bp, Homo sapien
gtgtgacgtccccgcggaacacctt

SEQ ID NO: 5822910 - DNA, 25 bp, Homo sapien
cgctcccgagtcacgccgtgaccga

SEQ ID NO: 5822911 - DNA, 25 bp, Homo sapien
tcggtcacggcgtgactcgggagcg

SEQ ID NO: 5822912 - DNA, 25 bp, Homo sapien
gcctcgcggcggacaccgtgacacg

SEQ ID NO: 5822913 - DNA, 25 bp, Homo sapien
cgtgtcacggtgtccgccgcgaggc

SEQ ID NO: 5822914 - DNA, 25 bp, Homo sapien
tccccgacgccccggcctccgtgtg

SEQ ID NO: 5822915 - DNA, 25 bp, Homo sapien
cacacggaggccggggcgtcgggga

SEQ ID NO: 5822916 - DNA, 25 bp, Homo sapien
caccacggcccgcacagaccacttc

SEQ ID NO: 5822917 - DNA, 25 bp, Homo sapien
gaagtggtctgtgcgggccgtggtg

SEQ ID NO: 5822918 - DNA, 25 bp, Homo sapien
tttttcattagctactgttattcat

SEQ ID NO: 5822919 - DNA, 25 bp, Homo sapien
atgaataacagtagctaatgaaaaa

SEQ ID NO: 5822920 - DNA, 25 bp, Homo sapien
gggtgagcgatcttaccgtctggat

SEQ ID NO: 5822921 - DNA, 25 bp, Homo sapien
atccagacggtaagatcgctcaccc

SEQ ID NO: 5822922 - DNA, 25 bp, Homo sapien
gggtgtaaatcacgacttccgatag

SEQ ID NO: 5822923 - DNA, 25 bp, Homo sapien
ctatcggaagtcgtgatttacaccc

SEQ ID NO: 5822924 - DNA, 25 bp, Homo sapien
agtagcttccgcactcagacgacgt

SEQ ID NO: 5822925 - DNA, 25 bp, Homo sapien
acgtcgtctgagtgcggaagctact

SEQ ID NO: 5822926 - DNA, 25 bp, Homo sapien
attgaaaaataactgctatataaag

SEQ ID NO: 5822927 - DNA, 25 bp, Homo sapien
ctttatatagcagttatttttcaat

SEQ ID NO: 5822928 - DNA, 25 bp, Homo sapien
acgggttgaggccctaccggagcgc

SEQ ID NO: 5822929 - DNA, 25 bp, Homo sapien
gcgctccggtagggcctcaacccgt

SEQ ID NO: 5822930 - DNA, 25 bp, Homo sapien
aaatagtcggtctcaccacacctat

SEQ ID NO: 5822931 - DNA, 25 bp, Homo sapien
ataggtgtggtgagaccgactattt

SEQ ID NO: 5822932 - DNA, 25 bp, Homo sapien
cccagcaccggtggatgtctacgag

SEQ ID NO: 5822933 - DNA, 25 bp, Homo sapien
ctcgtagacatccaccggtgctggg

SEQ ID NO: 5822934 - DNA, 25 bp, Homo sapien
aagaagatgatcgtgtactgacaaa

SEQ ID NO: 5822935 - DNA, 25 bp, Homo sapien
tttgtcagtacacgatcatcttctt

SEQ ID NO: 5822936 - DNA, 25 bp, Homo sapien
acggtcggtgctcggggtactccaa

SEQ ID NO: 5822937 - DNA, 25 bp, Homo sapien
ttggagtaccccgagcaccgaccgt

SEQ ID NO: 5822938 - DNA, 25 bp, Homo sapien
tcgaccgaatcaagacgtacgttgt

SEQ ID NO: 5822939 - DNA, 25 bp, Homo sapien
acaacgtacgtcttgattcggtcga

SEQ ID NO: 5822940 - DNA, 25 bp, Homo sapien
gagagggtcagccgtggtgtcgcca

SEQ ID NO: 5822941 - DNA, 25 bp, Homo sapien
tggcgacaccacggctgaccctctc

SEQ ID NO: 5822942 - DNA, 25 bp, Homo sapien
ggagagggtcagccgtggtgtcgcc

SEQ ID NO: 5822943 - DNA, 25 bp, Homo sapien
ggcgacaccacggctgaccctctcc

SEQ ID NO: 5822944 - DNA, 25 bp, Homo sapien
actgatagtagttccctgtgatgag

SEQ ID NO: 5822945 - DNA, 25 bp, Homo sapien
ctcatcacagggaactactatcagt

SEQ ID NO: 5822946 - DNA, 25 bp, Homo sapien
gagtcttcgaagacccttgttaggt

SEQ ID NO: 5822947 - DNA, 25 bp, Homo sapien
acctaacaagggtcttcgaagactc

SEQ ID NO: 5822948 - DNA, 25 bp, Homo sapien
aaacgatacgaataagtgttactgc

SEQ ID NO: 5822949 - DNA, 25 bp, Homo sapien
gcagtaacacttattcgtatcgttt

SEQ ID NO: 5822950 - DNA, 25 bp, Homo sapien
cggcgatgggactcgtccgccatgc

SEQ ID NO: 5822951 - DNA, 25 bp, Homo sapien
gcatggcggacgagtcccatcgccg

SEQ ID NO: 5822952 - DNA, 25 bp, Homo sapien
gttatctcccttgcacttcttaaat

SEQ ID NO: 5822953 - DNA, 25 bp, Homo sapien
atttaagaagtgcaagggagataac

SEQ ID NO: 5822954 - DNA, 25 bp, Homo sapien
agttgctacgagtcccacgggagag

SEQ ID NO: 5822955 - DNA, 25 bp, Homo sapien
ctctcccgtgggactcgtagcaact

SEQ ID NO: 5822956 - DNA, 25 bp, Homo sapien
ctagtcgttcccctaaaggaagtca

SEQ ID NO: 5822957 - DNA, 25 bp, Homo sapien
tgacttcctttaggggaacgactag

SEQ ID NO: 5822958 - DNA, 25 bp, Homo sapien
tctcccgtgcttgggacgaacggag

SEQ ID NO: 5822959 - DNA, 25 bp, Homo sapien
ctccgttcgtcccaagcacgggaga

SEQ ID NO: 5822960 - DNA, 25 bp, Homo sapien
gggcgcttaccaagacgaggcagac

SEQ ID NO: 5822961 - DNA, 25 bp, Homo sapien
gtctgcctcgtcttggtaagcgccc

SEQ ID NO: 5822962 - DNA, 25 bp, Homo sapien
tggagtttcctcagtcgtgggaagt

SEQ ID NO: 5822963 - DNA, 25 bp, Homo sapien
acttcccacgactgaggaaactcca

SEQ ID NO: 5822964 - DNA, 25 bp, Homo sapien
ccctcccggcgtaaggactcgcggc

SEQ ID NO: 5822965 - DNA, 25 bp, Homo sapien
gccgcgagtccttacgccgggaggg

SEQ ID NO: 5822966 - DNA, 25 bp, Homo sapien
agtaattacctttacacatacttaa

SEQ ID NO: 5822967 - DNA, 25 bp, Homo sapien
ttaagtatgtgtaaaggtaattact

SEQ ID NO: 5822968 - DNA, 25 bp, Homo sapien
tcaccgtctaacagttcaacaagag

SEQ ID NO: 5822969 - DNA, 25 bp, Homo sapien
ctcttgttgaactgttagacggtga

SEQ ID NO: 5822970 - DNA, 25 bp, Homo sapien
tcctcctcctcaattgggtattctt

SEQ ID NO: 5822971 - DNA, 25 bp, Homo sapien
aagaatacccaattgaggaggagga

SEQ ID NO: 5822972 - DNA, 25 bp, Homo sapien
gttccagggtagcagctactcataa

SEQ ID NO: 5822973 - DNA, 25 bp, Homo sapien
gcttccctgggcaacctcatgggct

SEQ ID NO: 5822974 - DNA, 25 bp, Homo sapien
cgttccagggtagcagctactcata

SEQ ID NO: 5822975 - DNA, 25 bp, Homo sapien
tctgcccaccgttccagggtagcag

SEQ ID NO: 5822976 - DNA, 25 bp, Homo sapien
catgggcttccacattgaccaggca

SEQ ID NO: 5822977 - DNA, 25 bp, Homo sapien
ttccctgggcaacctcatgggcttc

SEQ ID NO: 5822978 - DNA, 25 bp, Homo sapien
cacatttcctagtaggctctctgcc

SEQ ID NO: 5822979 - DNA, 25 bp, Homo sapien
gcattacattcagcatccttggaca

SEQ ID NO: 5822980 - DNA, 25 bp, Homo sapien
acatttcctagtaggctctctgccc

SEQ ID NO: 5822981 - DNA, 25 bp, Homo sapien
cttcagttcccaaagcagcatcgat

SEQ ID NO: 5822982 - DNA, 25 bp, Homo sapien
tcagttcccaaagcagcatcgattc

SEQ ID NO: 5822983 - DNA, 25 bp, Homo sapien
ttccagggtagcagctactcataac

SEQ ID NO: 5822984 - DNA, 25 bp, Homo sapien
gttcccaaagcagcatcgattcttc

SEQ ID NO: 5822985 - DNA, 25 bp, Homo sapien
attgaccaggcattacattcagcat

SEQ ID NO: 5822986 - DNA, 25 bp, Homo sapien
tgcacatttcctagtaggctctctg

SEQ ID NO: 5822987 - DNA, 25 bp, Homo sapien
ccttcagttcccaaagcagcatcga

SEQ ID NO: 5822988 - DNA, 25 bp, Homo sapien
agtactcgatccaactactatggag

SEQ ID NO: 5822989 - DNA, 25 bp, Homo sapien
ctccatagtagttggatcgagtact

SEQ ID NO: 5822990 - DNA, 25 bp, Homo sapien
cgtatcgtataaagaggtcaggtac

SEQ ID NO: 5822991 - DNA, 25 bp, Homo sapien
gtacctgacctctttatacgatacg

SEQ ID NO: 5822992 - DNA, 25 bp, Homo sapien
gacgcaccgtgtctcgggtgtcacg

SEQ ID NO: 5822993 - DNA, 25 bp, Homo sapien
cgtgacacccgagacacggtgcgtc

SEQ ID NO: 5822994 - DNA, 25 bp, Homo sapien
agaacctgaggaaggtcccttagac

SEQ ID NO: 5822995 - DNA, 25 bp, Homo sapien
gtctaagggaccttcctcaggttct

SEQ ID NO: 5822996 - DNA, 25 bp, Homo sapien
tgcggcgcacggtcgccacccctcc

SEQ ID NO: 5822997 - DNA, 25 bp, Homo sapien
ggaggggtggcgaccgtgcgccgca

SEQ ID NO: 5822998 - DNA, 25 bp, Homo sapien
gtgcggcgcacggtcgccacccctc

SEQ ID NO: 5822999 - DNA, 25 bp, Homo sapien
gaggggtggcgaccgtgcgccgcac

SEQ ID NO: 5823000 - DNA, 25 bp, Homo sapien
aagtgcggcgcacggtcgccacccc

SEQ ID NO: 5823001 - DNA, 25 bp, Homo sapien
ggggtggcgaccgtgcgccgcactt

SEQ ID NO: 5823002 - DNA, 25 bp, Homo sapien
tatcttaataatttgtgttcatgta

SEQ ID NO: 5823003 - DNA, 25 bp, Homo sapien
tacatgaacacaaattattaagata

SEQ ID NO: 5823004 - DNA, 25 bp, Homo sapien
atatcttaataatttgtgttcatgt

SEQ ID NO: 5823005 - DNA, 25 bp, Homo sapien
acatgaacacaaattattaagatat

SEQ ID NO: 5823006 - DNA, 25 bp, Homo sapien
aatatcttaataatttgtgttcatg

SEQ ID NO: 5823007 - DNA, 25 bp, Homo sapien
catgaacacaaattattaagatatt

SEQ ID NO: 5823008 - DNA, 25 bp, Homo sapien
taatatcttaataatttgtgttcat

SEQ ID NO: 5823009 - DNA, 25 bp, Homo sapien
atgaacacaaattattaagatatta

SEQ ID NO: 5823010 - DNA, 25 bp, Homo sapien
actcgtatagatatagattagccgt

SEQ ID NO: 5823011 - DNA, 25 bp, Homo sapien
acggctaatctatatctatacgagt

SEQ ID NO: 5823012 - DNA, 25 bp, Homo sapien
gtcaagggcacgcacagcgaccctt

SEQ ID NO: 5823013 - DNA, 25 bp, Homo sapien
aagggtcgctgtgcgtgcccttgac

SEQ ID NO: 5823014 - DNA, 25 bp, Homo sapien
tccggagtgccttccccgagagctg

SEQ ID NO: 5823015 - DNA, 25 bp, Homo sapien
cagctctcggggaaggcactccgga

SEQ ID NO: 5823016 - DNA, 25 bp, Homo sapien
acagctatacggtaatctcgacgat

SEQ ID NO: 5823017 - DNA, 25 bp, Homo sapien
atcgtcgagattaccgtatagctgt

SEQ ID NO: 5823018 - DNA, 25 bp, Homo sapien
gcactcgcgccgatgaaaagggatc

SEQ ID NO: 5823019 - DNA, 25 bp, Homo sapien
gatcccttttcatcggcgcgagtgc

SEQ ID NO: 5823020 - DNA, 25 bp, Homo sapien
gcccgtacccacgatgtcttagtga

SEQ ID NO: 5823021 - DNA, 25 bp, Homo sapien
tcactaagacatcgtgggtacgggc

SEQ ID NO: 5823022 - DNA, 25 bp, Homo sapien
cctttcacttcgaggtgttacacaa

SEQ ID NO: 5823023 - DNA, 25 bp, Homo sapien
ttgtgtaacacctcgaagtgaaagg

SEQ ID NO: 5823024 - DNA, 25 bp, Homo sapien
accatcatgtcgttctccgtgaccg

SEQ ID NO: 5823025 - DNA, 25 bp, Homo sapien
cggtcacggagaacgacatgatggt

SEQ ID NO: 5823026 - DNA, 25 bp, Homo sapien
gagagagttctacaccccttaatat

SEQ ID NO: 5823027 - DNA, 25 bp, Homo sapien
atattaaggggtgtagaactctctc

SEQ ID NO: 5823028 - DNA, 25 bp, Homo sapien
tgaactttccaacctaacactccga

SEQ ID NO: 5823029 - DNA, 25 bp, Homo sapien
tcggagtgttaggttggaaagttca

SEQ ID NO: 5823030 - DNA, 25 bp, Homo sapien
accgtccctatttcatgatccagag

SEQ ID NO: 5823031 - DNA, 25 bp, Homo sapien
ctctggatcatgaaatagggacggt

SEQ ID NO: 5823032 - DNA, 25 bp, Homo sapien
caggagcccttcgaggacctagggt

SEQ ID NO: 5823033 - DNA, 25 bp, Homo sapien
accctaggtcctcgaagggctcctg

SEQ ID NO: 5823034 - DNA, 25 bp, Homo sapien
gctcgattcgaccggcgcggcgtag

SEQ ID NO: 5823035 - DNA, 25 bp, Homo sapien
ctacgccgcgccggtcgaatcgagc

SEQ ID NO: 5823036 - DNA, 25 bp, Homo sapien
caagcacatttcactgtctcagttt

SEQ ID NO: 5823037 - DNA, 25 bp, Homo sapien
aaactgagacagtgaaatgtgcttg

SEQ ID NO: 5823038 - DNA, 25 bp, Homo sapien
gtgggtctgcgggaccctacgactt

SEQ ID NO: 5823039 - DNA, 25 bp, Homo sapien
aagtcgtagggtcccgcagacccac

SEQ ID NO: 5823040 - DNA, 25 bp, Homo sapien
agggcgaccacgagacatggaggtc

SEQ ID NO: 5823041 - DNA, 25 bp, Homo sapien
gacctccatgtctcgtggtcgccct

SEQ ID NO: 5823042 - DNA, 25 bp, Homo sapien
cgacgagggcgaccacgagacatgg

SEQ ID NO: 5823043 - DNA, 25 bp, Homo sapien
ccatgtctcgtggtcgccctcgtcg

SEQ ID NO: 5823044 - DNA, 25 bp, Homo sapien
cgacaggtagtacgtggaccgtcct

SEQ ID NO: 5823045 - DNA, 25 bp, Homo sapien
aggacggtccacgtactacctgtcg

SEQ ID NO: 5823046 - DNA, 25 bp, Homo sapien
gagaacaacccgccttctccgtgaa

SEQ ID NO: 5823047 - DNA, 25 bp, Homo sapien
ttcacggagaaggcgggttgttctc

SEQ ID NO: 5823048 - DNA, 25 bp, Homo sapien
tcgtccgtccaagacgcagggtgtc

SEQ ID NO: 5823049 - DNA, 25 bp, Homo sapien
gacaccctgcgtcttggacggacga

SEQ ID NO: 5823050 - DNA, 25 bp, Homo sapien
aggtccttgcgggtctcagagtccg

SEQ ID NO: 5823051 - DNA, 25 bp, Homo sapien
cggactctgagacccgcaaggacct

SEQ ID NO: 5823052 - DNA, 25 bp, Homo sapien
cattacctctacacagactcgtcgt

SEQ ID NO: 5823053 - DNA, 25 bp, Homo sapien
acgacgagtctgtgtagaggtaatg

SEQ ID NO: 5823054 - DNA, 25 bp, Homo sapien
ggaccacagggacgtgttcactgta

SEQ ID NO: 5823055 - DNA, 25 bp, Homo sapien
tacagtgaacacgtccctgtggtcc

SEQ ID NO: 5823056 - DNA, 25 bp, Homo sapien
aggttctaacttatcagactcctct

SEQ ID NO: 5823057 - DNA, 25 bp, Homo sapien
agaggagtctgataagttagaacct

SEQ ID NO: 5823058 - DNA, 25 bp, Homo sapien
caactcaacctgagattacagacgt

SEQ ID NO: 5823059 - DNA, 25 bp, Homo sapien
acgtctgtaatctcaggttgagttg

SEQ ID NO: 5823060 - DNA, 25 bp, Homo sapien
taaaggaaatttcggtatagagata

SEQ ID NO: 5823061 - DNA, 25 bp, Homo sapien
tatctctataccgaaatttccttta

SEQ ID NO: 5823062 - DNA, 25 bp, Homo sapien
ttataaacaagtgtatattctgtag

SEQ ID NO: 5823063 - DNA, 25 bp, Homo sapien
ctacagaatatacacttgtttataa

SEQ ID NO: 5823064 - DNA, 25 bp, Homo sapien
cctttaataaatggcgtataagtct

SEQ ID NO: 5823065 - DNA, 25 bp, Homo sapien
agacttatacgccatttattaaagg

SEQ ID NO: 5823066 - DNA, 25 bp, Homo sapien
ccctcaggacatcccggtccagagg

SEQ ID NO: 5823067 - DNA, 25 bp, Homo sapien
cctctggaccgggatgtcctgaggg

SEQ ID NO: 5823068 - DNA, 25 bp, Homo sapien
gagaagttgagaaaatgagagtgac

SEQ ID NO: 5823069 - DNA, 25 bp, Homo sapien
gtcactctcattttctcaacttctc

SEQ ID NO: 5823070 - DNA, 25 bp, Homo sapien
agaagactgcatcggaaaccaggag

SEQ ID NO: 5823071 - DNA, 25 bp, Homo sapien
ctcctggtttccgatgcagtcttct

SEQ ID NO: 5823072 - DNA, 25 bp, Homo sapien
acacctgtcgcggtagggtgggctc

SEQ ID NO: 5823073 - DNA, 25 bp, Homo sapien
gagcccaccctaccgcgacaggtgt

SEQ ID NO: 5823074 - DNA, 25 bp, Homo sapien
cgtcgcgggtccttgcggcccggga

SEQ ID NO: 5823075 - DNA, 25 bp, Homo sapien
tcccgggccgcaaggacccgcgacg

SEQ ID NO: 5823076 - DNA, 25 bp, Homo sapien
tatacctgatacccaaagtgtaaat

SEQ ID NO: 5823077 - DNA, 25 bp, Homo sapien
atttacactttgggtatcaggtata

SEQ ID NO: 5823078 - DNA, 25 bp, Homo sapien
ggttgaccgccattcgacacgacct

SEQ ID NO: 5823079 - DNA, 25 bp, Homo sapien
aggtcgtgtcgaatggcggtcaacc

SEQ ID NO: 5823080 - DNA, 25 bp, Homo sapien
ccggtgtcgtacgacagagtgtcga

SEQ ID NO: 5823081 - DNA, 25 bp, Homo sapien
tcgacactctgtcgtacgacaccgg

SEQ ID NO: 5823082 - DNA, 25 bp, Homo sapien
gaacacacacccacgcagaagccgt

SEQ ID NO: 5823083 - DNA, 25 bp, Homo sapien
acggcttctgcgtgggtgtgtgttc

SEQ ID NO: 5823084 - DNA, 25 bp, Homo sapien
tctccctatgcctcagtagctaagg

SEQ ID NO: 5823085 - DNA, 25 bp, Homo sapien
gtacgtggttgagaaggtcctcctc

SEQ ID NO: 5823086 - DNA, 25 bp, Homo sapien
gagcaggcacagagaagttctcacc

SEQ ID NO: 5823087 - DNA, 25 bp, Homo sapien
tgtacgtggttgagaaggtcctcct

SEQ ID NO: 5823088 - DNA, 25 bp, Homo sapien
ccaggcagatacttgcaaaacaaca

SEQ ID NO: 5823089 - DNA, 25 bp, Homo sapien
agagaagttctcaccctctgcaaaa

SEQ ID NO: 5823090 - DNA, 25 bp, Homo sapien
ctgagtactggctggccccaaggcg

SEQ ID NO: 5823091 - DNA, 25 bp, Homo sapien
ccccgaggagccagcaggacctgga

SEQ ID NO: 5823092 - DNA, 25 bp, Homo sapien
cctagggcgcctctgagcaggcaca

SEQ ID NO: 5823093 - DNA, 25 bp, Homo sapien
caaaccaaaggcagccatgaaaacc

SEQ ID NO: 5823094 - DNA, 25 bp, Homo sapien
tgagcaggcacagagaagttctcac

SEQ ID NO: 5823095 - DNA, 25 bp, Homo sapien
ctctctgagtactggctggccccaa

SEQ ID NO: 5823096 - DNA, 25 bp, Homo sapien
aatcaaagtaccaggcagatacttg

SEQ ID NO: 5823097 - DNA, 25 bp, Homo sapien
aggcagccatgaaaacccgtgttct

SEQ ID NO: 5823098 - DNA, 25 bp, Homo sapien
aaacccgtgttctgtacgtggttga

SEQ ID NO: 5823099 - DNA, 25 bp, Homo sapien
ccaaggcgcagaactgggaggtcca

SEQ ID NO: 5823100 - DNA, 25 bp, Homo sapien
taaggtgaccagacagcacgactcc

SEQ ID NO: 5823101 - DNA, 25 bp, Homo sapien
ggagtcgtgctgtctggtcacctta

SEQ ID NO: 5823102 - DNA, 25 bp, Homo sapien
acattttacaggactttttaatgag

SEQ ID NO: 5823103 - DNA, 25 bp, Homo sapien
ctcattaaaaagtcctgtaaaatgt

SEQ ID NO: 5823104 - DNA, 25 bp, Homo sapien
ggcccggaggagctcagggcgcaag

SEQ ID NO: 5823105 - DNA, 25 bp, Homo sapien
cttgcgccctgagctcctccgggcc

SEQ ID NO: 5823106 - DNA, 25 bp, Homo sapien
aggtctggagcctacgctgcgagta

SEQ ID NO: 5823107 - DNA, 25 bp, Homo sapien
tactcgcagcgtaggctccagacct

SEQ ID NO: 5823108 - DNA, 25 bp, Homo sapien
ataaataaaggaaaggaggtcgata

SEQ ID NO: 5823109 - DNA, 25 bp, Homo sapien
tatcgacctcctttcctttatttat

SEQ ID NO: 5823110 - DNA, 25 bp, Homo sapien
aggtgagactaattgggtaggtgta

SEQ ID NO: 5823111 - DNA, 25 bp, Homo sapien
tacacctacccaattagtctcacct

SEQ ID NO: 5823112 - DNA, 25 bp, Homo sapien
gtacacgtgtcgtcctaccaaaatt

SEQ ID NO: 5823113 - DNA, 25 bp, Homo sapien
aattttggtaggacgacacgtgtac

SEQ ID NO: 5823114 - DNA, 25 bp, Homo sapien
cggagcgacgagttccaacaccact

SEQ ID NO: 5823115 - DNA, 25 bp, Homo sapien
agtggtgttggaactcgtcgctccg

SEQ ID NO: 5823116 - DNA, 25 bp, Homo sapien
agccatcgtcgtggaagctggatat

SEQ ID NO: 5823117 - DNA, 25 bp, Homo sapien
atatccagcttccacgacgatggct

SEQ ID NO: 5823118 - DNA, 25 bp, Homo sapien
ttactccttcggcaaagactaaggt

SEQ ID NO: 5823119 - DNA, 25 bp, Homo sapien
accttagtctttgccgaaggagtaa

SEQ ID NO: 5823120 - DNA, 25 bp, Homo sapien
aaatttttgagtctacagaatatgg

SEQ ID NO: 5823121 - DNA, 25 bp, Homo sapien
ccatattctgtagactcaaaaattt

SEQ ID NO: 5823122 - DNA, 25 bp, Homo sapien
tcagtagtttcggtaccctcagttt

SEQ ID NO: 5823123 - DNA, 25 bp, Homo sapien
aaactgagggtaccgaaactactga

SEQ ID NO: 5823124 - DNA, 25 bp, Homo sapien
tatacgtggtaagtggagaggcccc

SEQ ID NO: 5823125 - DNA, 25 bp, Homo sapien
ggggcctctccacttaccacgtata

SEQ ID NO: 5823126 - DNA, 25 bp, Homo sapien
atttttgaaatgaacgtcgtgttaa

SEQ ID NO: 5823127 - DNA, 25 bp, Homo sapien
ttaacacgacgttcatttcaaaaat

SEQ ID NO: 5823128 - DNA, 25 bp, Homo sapien
cctgggcacaacgaggttgtctttc

SEQ ID NO: 5823129 - DNA, 25 bp, Homo sapien
gaaagacaacctcgttgtgcccagg

SEQ ID NO: 5823130 - DNA, 25 bp, Homo sapien
gatggagggccccacggacggccct

SEQ ID NO: 5823131 - DNA, 25 bp, Homo sapien
agggccgtccgtggggccctccatc

SEQ ID NO: 5823132 - DNA, 25 bp, Homo sapien
taacaaacagcatttaacttgagga

SEQ ID NO: 5823133 - DNA, 25 bp, Homo sapien
tcctcaagttaaatgctgtttgtta

SEQ ID NO: 5823134 - DNA, 25 bp, Homo sapien
tcaccactgtcgacccgtctccgcg

SEQ ID NO: 5823135 - DNA, 25 bp, Homo sapien
cgcggagacgggtcgacagtggtga

SEQ ID NO: 5823136 - DNA, 25 bp, Homo sapien
caagacccaagccatacatatgtat

SEQ ID NO: 5823137 - DNA, 25 bp, Homo sapien
atacatatgtatggcttgggtcttg

SEQ ID NO: 5823138 - DNA, 25 bp, Homo sapien
gcccccgacccgtctggacgtagta

SEQ ID NO: 5823139 - DNA, 25 bp, Homo sapien
tactacgtccagacgggtcgggggc

SEQ ID NO: 5823140 - DNA, 25 bp, Homo sapien
cggtccgctctcgtccggaacaccg

SEQ ID NO: 5823141 - DNA, 25 bp, Homo sapien
cggtgttccggacgagagcggaccg

SEQ ID NO: 5823142 - DNA, 25 bp, Homo sapien
gaaaagagtctaggttgactaagtc

SEQ ID NO: 5823143 - DNA, 25 bp, Homo sapien
gacttagtcaacctagactcttttc

SEQ ID NO: 5823144 - DNA, 25 bp, Homo sapien
gacccacccgccagcctgggtggtt

SEQ ID NO: 5823145 - DNA, 25 bp, Homo sapien
aaccacccaggctggcgggtgggtc

SEQ ID NO: 5823146 - DNA, 25 bp, Homo sapien
gcacacacggtttagccaagtcgat

SEQ ID NO: 5823147 - DNA, 25 bp, Homo sapien
atcgacttggctaaaccgtgtgtgc

SEQ ID NO: 5823148 - DNA, 25 bp, Homo sapien
caacgtaagtatgcatattgattcg

SEQ ID NO: 5823149 - DNA, 25 bp, Homo sapien
cgaatcaatatgcatacttacgttg

SEQ ID NO: 5823150 - DNA, 25 bp, Homo sapien
ttacaacgtaagtatgcatattgat

SEQ ID NO: 5823151 - DNA, 25 bp, Homo sapien
atcaatatgcatacttacgttgtaa

SEQ ID NO: 5823152 - DNA, 25 bp, Homo sapien
ttgactcttattaatcttagtatct

SEQ ID NO: 5823153 - DNA, 25 bp, Homo sapien
agatactaagattaataagagtcaa

SEQ ID NO: 5823154 - DNA, 25 bp, Homo sapien
tttatgactttaatttcttgaaact

SEQ ID NO: 5823155 - DNA, 25 bp, Homo sapien
agtttcaagaaattaaagtcataaa

SEQ ID NO: 5823156 - DNA, 25 bp, Homo sapien
taatgagggtactagggttacggaa

SEQ ID NO: 5823157 - DNA, 25 bp, Homo sapien
ttccgtaaccctagtaccctcatta

SEQ ID NO: 5823158 - DNA, 25 bp, Homo sapien
cccgtgaagccaccttgtcacattg

SEQ ID NO: 5823159 - DNA, 25 bp, Homo sapien
caatgtgacaaggtggcttcacggg

SEQ ID NO: 5823160 - DNA, 25 bp, Homo sapien
tctgggccgccgactcccggctcgg

SEQ ID NO: 5823161 - DNA, 25 bp, Homo sapien
ccgagccgggagtcggcggcccaga

SEQ ID NO: 5823162 - DNA, 25 bp, Homo sapien
acgggaccagggtcacgggcctcga

SEQ ID NO: 5823163 - DNA, 25 bp, Homo sapien
tcgaggcccgtgaccctggtcccgt

SEQ ID NO: 5823164 - DNA, 25 bp, Homo sapien
gacgggaccagggtcacgggcctcg

SEQ ID NO: 5823165 - DNA, 25 bp, Homo sapien
cgaggcccgtgaccctggtcccgtc

SEQ ID NO: 5823166 - DNA, 25 bp, Homo sapien
gatctttaggcgtgacaagagaaga

SEQ ID NO: 5823167 - DNA, 25 bp, Homo sapien
tcttctcttgtcacgcctaaagatc

SEQ ID NO: 5823168 - DNA, 25 bp, Homo sapien
gtagtcgcgcagatatcatttatat

SEQ ID NO: 5823169 - DNA, 25 bp, Homo sapien
atataaatgatatctgcgcgactac

SEQ ID NO: 5823170 - DNA, 25 bp, Homo sapien
aatacagtcagtgtgtgaaccgtga

SEQ ID NO: 5823171 - DNA, 25 bp, Homo sapien
tcacggttcacacactgactgtatt

SEQ ID NO: 5823172 - DNA, 25 bp, Homo sapien
acgcgactgtttttgcacggatctt

SEQ ID NO: 5823173 - DNA, 25 bp, Homo sapien
aagatccgtgcaaaaacagtcgcgt

SEQ ID NO: 5823174 - DNA, 25 bp, Homo sapien
gggcgcgtgggctcccgccgggcgt

SEQ ID NO: 5823175 - DNA, 25 bp, Homo sapien
acgcccggcgggagcccacgcgccc

SEQ ID NO: 5823176 - DNA, 25 bp, Homo sapien
ccgtcgaggtgtccacgtaggggcg

SEQ ID NO: 5823177 - DNA, 25 bp, Homo sapien
cgcccctacgtggacacctcgacgg

SEQ ID NO: 5823178 - DNA, 25 bp, Homo sapien
gggcagacaagagtgagtgcactaa

SEQ ID NO: 5823179 - DNA, 25 bp, Homo sapien
cccaactctgccagcgaggcaaagt

SEQ ID NO: 5823180 - DNA, 25 bp, Homo sapien
tgtcctgctgggagctcagcctaac

SEQ ID NO: 5823181 - DNA, 25 bp, Homo sapien
tggcccaggtgagcaggaagcatca

SEQ ID NO: 5823182 - DNA, 25 bp, Homo sapien
tctgtaagtgtccaagatccagggg

SEQ ID NO: 5823183 - DNA, 25 bp, Homo sapien
tgaccttcatctcaaggtcaaggag

SEQ ID NO: 5823184 - DNA, 25 bp, Homo sapien
gctcaatctgtaagtgtccaagatc

SEQ ID NO: 5823185 - DNA, 25 bp, Homo sapien
accttcatctcaaggtcaaggagag

SEQ ID NO: 5823186 - DNA, 25 bp, Homo sapien
actctgccagcgaggcaaagtaatg

SEQ ID NO: 5823187 - DNA, 25 bp, Homo sapien
ctgactcaaggaacaaaacagatga

SEQ ID NO: 5823188 - DNA, 25 bp, Homo sapien
cgttctgaccctctggagtgagacc

SEQ ID NO: 5823189 - DNA, 25 bp, Homo sapien
ctcccttgggcatctgcttgagaat

SEQ ID NO: 5823190 - DNA, 25 bp, Homo sapien
gaagggacattatcagggcaggtcc

SEQ ID NO: 5823191 - DNA, 25 bp, Homo sapien
aagcaaacgttctgaccctctggag

SEQ ID NO: 5823192 - DNA, 25 bp, Homo sapien
ccagcgaggcaaagtaatggtgatt

SEQ ID NO: 5823193 - DNA, 25 bp, Homo sapien
tcagggcaggtcctttctgcaggcg

SEQ ID NO: 5823194 - DNA, 25 bp, Homo sapien
aaaagagagaatacacgacatagct

SEQ ID NO: 5823195 - DNA, 25 bp, Homo sapien
agctatgtcgtgtattctctctttt

SEQ ID NO: 5823196 - DNA, 25 bp, Homo sapien
ctggggcccactgaggcaccattat

SEQ ID NO: 5823197 - DNA, 25 bp, Homo sapien
ttatccacaaagatggaggtgcgga

SEQ ID NO: 5823198 - DNA, 25 bp, Homo sapien
acacacacatgcatggaggcaataa

SEQ ID NO: 5823199 - DNA, 25 bp, Homo sapien
tattatccacaaagatggaggtgcg

SEQ ID NO: 5823200 - DNA, 25 bp, Homo sapien
gagggagaaacagtgcagtgctcaa

SEQ ID NO: 5823201 - DNA, 25 bp, Homo sapien
ctgtggtccctgaaagagccccaca

SEQ ID NO: 5823202 - DNA, 25 bp, Homo sapien
aaatatgttccgtaccagactgccc

SEQ ID NO: 5823203 - DNA, 25 bp, Homo sapien
actgaggcaccattattggggattt

SEQ ID NO: 5823204 - DNA, 25 bp, Homo sapien
agggaaccgtactctcccactggaa

SEQ ID NO: 5823205 - DNA, 25 bp, Homo sapien
actctggggcccactgaggcaccat

SEQ ID NO: 5823206 - DNA, 25 bp, Homo sapien
ttcagacgtgtccacgcacaccagt

SEQ ID NO: 5823207 - DNA, 25 bp, Homo sapien
gagacaggagggaaccgtactctcc

SEQ ID NO: 5823208 - DNA, 25 bp, Homo sapien
gaggcaccattattggggatttcag

SEQ ID NO: 5823209 - DNA, 25 bp, Homo sapien
cctcctctgtggtccctgaaagagc

SEQ ID NO: 5823210 - DNA, 25 bp, Homo sapien
ccattattggggatttcagggtggc

SEQ ID NO: 5823211 - DNA, 25 bp, Homo sapien
aatatgttccgtaccagactgcccc

SEQ ID NO: 5823212 - DNA, 25 bp, Homo sapien
atttctgagtaattatacactaata

SEQ ID NO: 5823213 - DNA, 25 bp, Homo sapien
tattagtgtataattactcagaaat

SEQ ID NO: 5823214 - DNA, 25 bp, Homo sapien
cctacgaggcgggtcagtcgacctg

SEQ ID NO: 5823215 - DNA, 25 bp, Homo sapien
caggtcgactgacccgcctcgtagg

SEQ ID NO: 5823216 - DNA, 25 bp, Homo sapien
gaggatcctacattcgtcctaaaaa

SEQ ID NO: 5823217 - DNA, 25 bp, Homo sapien
tttttaggacgaatgtaggatcctc

SEQ ID NO: 5823218 - DNA, 25 bp, Homo sapien
ggagtcacatgtcccaggtgtcacc

SEQ ID NO: 5823219 - DNA, 25 bp, Homo sapien
ggtgacacctgggacatgtgactcc

SEQ ID NO: 5823220 - DNA, 25 bp, Homo sapien
cgggactaccgccgctcgaccaccg

SEQ ID NO: 5823221 - DNA, 25 bp, Homo sapien
cggtggtcgagcggcggtagtcccg

SEQ ID NO: 5823222 - DNA, 25 bp, Homo sapien
cccagttcagtggaggtcgtttaac

SEQ ID NO: 5823223 - DNA, 25 bp, Homo sapien
tacaacagaggtcaaacccagttca

SEQ ID NO: 5823224 - DNA, 25 bp, Homo sapien
tcacaacacatcagtacaacagagg

SEQ ID NO: 5823225 - DNA, 25 bp, Homo sapien
gtcaaacccagttcagtggaggtcg

SEQ ID NO: 5823226 - DNA, 25 bp, Homo sapien
agaaaatatggcagtcccaggaaaa

SEQ ID NO: 5823227 - DNA, 25 bp, Homo sapien
agtacaacagaggtcaaacccagtt

SEQ ID NO: 5823228 - DNA, 25 bp, Homo sapien
tggcaaccacagttccatgcaccaa

SEQ ID NO: 5823229 - DNA, 25 bp, Homo sapien
acaacagaggtcaaacccagttcag

SEQ ID NO: 5823230 - DNA, 25 bp, Homo sapien
gttcagtggaggtcgtttaactaca

SEQ ID NO: 5823231 - DNA, 25 bp, Homo sapien
taccttggcaaccacagttccatgc

SEQ ID NO: 5823232 - DNA, 25 bp, Homo sapien
gttccatgcaccaaaaggaaaactc

SEQ ID NO: 5823233 - DNA, 25 bp, Homo sapien
aggtcaaacccagttcagtggaggt

SEQ ID NO: 5823234 - DNA, 25 bp, Homo sapien
ccacagttccatgcaccaaaaggaa

SEQ ID NO: 5823235 - DNA, 25 bp, Homo sapien
agagaaggaggcaggaaagcccttt

SEQ ID NO: 5823236 - DNA, 25 bp, Homo sapien
cacatcagtacaacagaggtcaaac

SEQ ID NO: 5823237 - DNA, 25 bp, Homo sapien
caacacatcagtacaacagaggtca

SEQ ID NO: 5823238 - DNA, 25 bp, Homo sapien
tccgaacttgtgtgtcaaatttcct

SEQ ID NO: 5823239 - DNA, 25 bp, Homo sapien
aggaaatttgacacacaagttcgga

SEQ ID NO: 5823240 - DNA, 25 bp, Homo sapien
cgtggacgacttcaagtctaagtgg

SEQ ID NO: 5823241 - DNA, 25 bp, Homo sapien
ccacttagacttgaagtcgtccacg

SEQ ID NO: 5823242 - DNA, 25 bp, Homo sapien
cacttcacagtgtggtccttggtgg

SEQ ID NO: 5823243 - DNA, 25 bp, Homo sapien
agccatcttgctaggaagcttccca

SEQ ID NO: 5823244 - DNA, 25 bp, Homo sapien
ggggttcaaggcagttatcacttca

SEQ ID NO: 5823245 - DNA, 25 bp, Homo sapien
tgctaggaagcttcccacagaagga

SEQ ID NO: 5823246 - DNA, 25 bp, Homo sapien
ttatcacttcacagtgtggtccttg

SEQ ID NO: 5823247 - DNA, 25 bp, Homo sapien
gggaccaggactccaagccatcttg

SEQ ID NO: 5823248 - DNA, 25 bp, Homo sapien
gcttcccacagaaggaagacctgca

SEQ ID NO: 5823249 - DNA, 25 bp, Homo sapien
tccaagccatcttgctaggaagctt

SEQ ID NO: 5823250 - DNA, 25 bp, Homo sapien
tccaactcggaaaggggctcgagca

SEQ ID NO: 5823251 - DNA, 25 bp, Homo sapien
ccacagaaggaagacctgcagggct

SEQ ID NO: 5823252 - DNA, 25 bp, Homo sapien
acttcacagtgtggtccttggtggg

SEQ ID NO: 5823253 - DNA, 25 bp, Homo sapien
tcacttcacagtgtggtccttggtg

SEQ ID NO: 5823254 - DNA, 25 bp, Homo sapien
agaaacagaaacgaacgagagggcc

SEQ ID NO: 5823255 - DNA, 25 bp, Homo sapien
agggatggtcgagtccaactcggaa

SEQ ID NO: 5823256 - DNA, 25 bp, Homo sapien
ggcagttatcacttcacagtgtggt

SEQ ID NO: 5823257 - DNA, 25 bp, Homo sapien
agcaaaggggatgtaaatcacctgt

SEQ ID NO: 5823258 - DNA, 25 bp, Homo sapien
gacctggtgagactagtgatcaaag

SEQ ID NO: 5823259 - DNA, 25 bp, Homo sapien
ctttgatcactagtctcaccaggtc

SEQ ID NO: 5823260 - DNA, 25 bp, Homo sapien
gacattaaggaacttgtactcatag

SEQ ID NO: 5823261 - DNA, 25 bp, Homo sapien
ctatgagtacaagttccttaatgtc

SEQ ID NO: 5823262 - DNA, 25 bp, Homo sapien
agaactgtcattattgataactaag

SEQ ID NO: 5823263 - DNA, 25 bp, Homo sapien
cttagttatcaataatgacagttct

SEQ ID NO: 5823264 - DNA, 25 bp, Homo sapien
cgagaagataggtaaagaccatcat

SEQ ID NO: 5823265 - DNA, 25 bp, Homo sapien
atgatggtctttacctatcttctcg

SEQ ID NO: 5823266 - DNA, 25 bp, Homo sapien
aaaggacgacagattggtcaaccag

SEQ ID NO: 5823267 - DNA, 25 bp, Homo sapien
ctggttgaccaatctgtcgtccttt

SEQ ID NO: 5823268 - DNA, 25 bp, Homo sapien
tctctgacagactttgacgataaag

SEQ ID NO: 5823269 - DNA, 25 bp, Homo sapien
ctttatcgtcaaagtctgtcagaga

SEQ ID NO: 5823270 - DNA, 25 bp, Homo sapien
gtctctgagggtctcaccttcgcct

SEQ ID NO: 5823271 - DNA, 25 bp, Homo sapien
aggcgaaggtgagaccctcagagac

SEQ ID NO: 5823272 - DNA, 25 bp, Homo sapien
tacacgatcgatacaaggttccaaa

SEQ ID NO: 5823273 - DNA, 25 bp, Homo sapien
tttggaaccttgtatcgatcgtgta

SEQ ID NO: 5823274 - DNA, 25 bp, Homo sapien
gcgattcccggctggagcacgtcga

SEQ ID NO: 5823275 - DNA, 25 bp, Homo sapien
tcgacgtgctccagccgggaatcgc

SEQ ID NO: 5823276 - DNA, 25 bp, Homo sapien
gttggaggtccagcgaggagttctc

SEQ ID NO: 5823277 - DNA, 25 bp, Homo sapien
gagaactcctcgctggacctccaac

SEQ ID NO: 5823278 - DNA, 25 bp, Homo sapien
ctctgtggtgtcaccaggaccgtag

SEQ ID NO: 5823279 - DNA, 25 bp, Homo sapien
ctacggtcctggtgacaccacagag

SEQ ID NO: 5823280 - DNA, 25 bp, Homo sapien
tgactaagaatctggaacgaccgac

SEQ ID NO: 5823281 - DNA, 25 bp, Homo sapien
gtcggtcgttccagattcttagtca

SEQ ID NO: 5823282 - DNA, 25 bp, Homo sapien
cttacagattacatcaaagtgtaag

SEQ ID NO: 5823283 - DNA, 25 bp, Homo sapien
cttacactttgatgtaatctgtaag

SEQ ID NO: 5823284 - DNA, 25 bp, Homo sapien
tctagtgttaatgtcagaagcgtgt

SEQ ID NO: 5823285 - DNA, 25 bp, Homo sapien
acacgcttctgacattaacactaga

SEQ ID NO: 5823286 - DNA, 25 bp, Homo sapien
gaatacctattggtcggaggccggt

SEQ ID NO: 5823287 - DNA, 25 bp, Homo sapien
accggcctccgaccaataggtattc

SEQ ID NO: 5823288 - DNA, 25 bp, Homo sapien
gacccctgcccggtatgaacatgtg

SEQ ID NO: 5823289 - DNA, 25 bp, Homo sapien
cacatgttcataccgggcaggggtc

SEQ ID NO: 5823290 - DNA, 25 bp, Homo sapien
tccgtttatgtgaccacgggtgacc

SEQ ID NO: 5823291 - DNA, 25 bp, Homo sapien
ggtcacccgtggtcacataaacgga

SEQ ID NO: 5823292 - DNA, 25 bp, Homo sapien
gtattgttctagacgaccaagtgat

SEQ ID NO: 5823293 - DNA, 25 bp, Homo sapien
atcacttggtcgtctagaacaatac

SEQ ID NO: 5823294 - DNA, 25 bp, Homo sapien
gagtattgttctagacgaccaagtg

SEQ ID NO: 5823295 - DNA, 25 bp, Homo sapien
cacttggtcgtctagaacaatactc

SEQ ID NO: 5823296 - DNA, 25 bp, Homo sapien
tgttattttgagagcgaaaacaact

SEQ ID NO: 5823297 - DNA, 25 bp, Homo sapien
agttgttttcgctctcaaaataaca

SEQ ID NO: 5823298 - DNA, 25 bp, Homo sapien
taagtctaccaaacgctacgacgac

SEQ ID NO: 5823299 - DNA, 25 bp, Homo sapien
gtcgtcgtagcgtttggtagactta

SEQ ID NO: 5823300 - DNA, 25 bp, Homo sapien
cacgggcgaggtgtggtcctttcgg

SEQ ID NO: 5823301 - DNA, 25 bp, Homo sapien
ccgaaaggaccacacctcgcccgtg

SEQ ID NO: 5823302 - DNA, 25 bp, Homo sapien
gatgctccctctctttgtgtgcgtt

SEQ ID NO: 5823303 - DNA, 25 bp, Homo sapien
aacgcacacaaagagagggagcatc

SEQ ID NO: 5823304 - DNA, 25 bp, Homo sapien
cgtctgggtccgggtgggtcagtgt

SEQ ID NO: 5823305 - DNA, 25 bp, Homo sapien
acactgacccacccggacccagacg

SEQ ID NO: 5823306 - DNA, 25 bp, Homo sapien
agacccctctagtgcccgtcgtccg

SEQ ID NO: 5823307 - DNA, 25 bp, Homo sapien
cggacgacgggcactagaggggtct

SEQ ID NO: 5823308 - DNA, 25 bp, Homo sapien
gtacacccattgtaatatctgacga

SEQ ID NO: 5823309 - DNA, 25 bp, Homo sapien
tcgtcagatattacaatgggtgtac

SEQ ID NO: 5823310 - DNA, 25 bp, Homo sapien
actctggcagaaggccagatcaggg

SEQ ID NO: 5823311 - DNA, 25 bp, Homo sapien
ccctgatctggccttctgccagagt

SEQ ID NO: 5823312 - DNA, 25 bp, Homo sapien
aagtagttaattgtgacaagatgac

SEQ ID NO: 5823313 - DNA, 25 bp, Homo sapien
gtcatcttgtcacaattaactactt

SEQ ID NO: 5823314 - DNA, 25 bp, Homo sapien
cgaacagacacaagactgtcactct

SEQ ID NO: 5823315 - DNA, 25 bp, Homo sapien
agagtgacagtcttgtgtctgttcg

SEQ ID NO: 5823316 - DNA, 25 bp, Homo sapien
gctcaggaacccgggtcacccacag

SEQ ID NO: 5823317 - DNA, 25 bp, Homo sapien
ctgtgggtgacccgggttcctgagc

SEQ ID NO: 5823318 - DNA, 25 bp, Homo sapien
cagccgaaacggtgaagttcagccg

SEQ ID NO: 5823319 - DNA, 25 bp, Homo sapien
cggctgaacttcaccgtttcggctg

SEQ ID NO: 5823320 - DNA, 25 bp, Homo sapien
tcaaactacgaacttgtaaggaact

SEQ ID NO: 5823321 - DNA, 25 bp, Homo sapien
agttccttacaagttcgtagtttga

SEQ ID NO: 5823322 - DNA, 25 bp, Homo sapien
acgcggaagccctggccgtcctccg

SEQ ID NO: 5823323 - DNA, 25 bp, Homo sapien
cggaggacggccagggcttccgcgt

SEQ ID NO: 5823324 - DNA, 25 bp, Homo sapien
gccctcaggcgggaagggacgcgga

SEQ ID NO: 5823325 - DNA, 25 bp, Homo sapien
tccgcgtcccttcccgcctgagggc

SEQ ID NO: 5823326 - DNA, 25 bp, Homo sapien
aggtgtccggtctggcggagaagac

SEQ ID NO: 5823327 - DNA, 25 bp, Homo sapien
gtcttctccgccagaccggacacct

SEQ ID NO: 5823328 - DNA, 25 bp, Homo sapien
agtatgtagaactcagaagacaaat

SEQ ID NO: 5823329 - DNA, 25 bp, Homo sapien
atttgtcttctgagttctacatact

SEQ ID NO: 5823330 - DNA, 25 bp, Homo sapien
acaacgaacaagtagtggtaaacat

SEQ ID NO: 5823331 - DNA, 25 bp, Homo sapien
atgtttaccactacttgttcgttgt

SEQ ID NO: 5823332 - DNA, 25 bp, Homo sapien
aaggactatgaggacactgaaaact

SEQ ID NO: 5823333 - DNA, 25 bp, Homo sapien
agttttcagtgtcctcatagtcctt

SEQ ID NO: 5823334 - DNA, 25 bp, Homo sapien
gaggcactcctcgcccgtggccccc

SEQ ID NO: 5823335 - DNA, 25 bp, Homo sapien
gggggccacgggcgaggagtgcctc

SEQ ID NO: 5823336 - DNA, 25 bp, Homo sapien
ccgttatagtccatttcactgggtc

SEQ ID NO: 5823337 - DNA, 25 bp, Homo sapien
gacccagtgaaatggactataacgg

SEQ ID NO: 5823338 - DNA, 25 bp, Homo sapien
ctcagaaagtaagcaggggtgtgac

SEQ ID NO: 5823339 - DNA, 25 bp, Homo sapien
gtcacacccctgcttactttctgag

SEQ ID NO: 5823340 - DNA, 25 bp, Homo sapien
ggcccagctccggcggcggagttgt

SEQ ID NO: 5823341 - DNA, 25 bp, Homo sapien
acaactccgccgccggagctgggcc

SEQ ID NO: 5823342 - DNA, 25 bp, Homo sapien
cggcccagctccggcggcggagttg

SEQ ID NO: 5823343 - DNA, 25 bp, Homo sapien
caactccgccgccggagctgggccg

SEQ ID NO: 5823344 - DNA, 25 bp, Homo sapien
ccggcccagctccggcggcggagtt

SEQ ID NO: 5823345 - DNA, 25 bp, Homo sapien
aactccgccgccggagctgggccgg

SEQ ID NO: 5823346 - DNA, 25 bp, Homo sapien
agaggtatttcaatcagttttgaag

SEQ ID NO: 5823347 - DNA, 25 bp, Homo sapien
cttcaaaactgattgaaatacctct

SEQ ID NO: 5823348 - DNA, 25 bp, Homo sapien
ggttgctccggggattactcgtgag

SEQ ID NO: 5823349 - DNA, 25 bp, Homo sapien
ctcacgagtaatccccggagcaacc

SEQ ID NO: 5823350 - DNA, 25 bp, Homo sapien
gctgaacacgacaatgacgtcatgt

SEQ ID NO: 5823351 - DNA, 25 bp, Homo sapien
acatgacgtcattgtcgtgttcagc

SEQ ID NO: 5823352 - DNA, 25 bp, Homo sapien
cgttcgtagacgacgtgatccttgg

SEQ ID NO: 5823353 - DNA, 25 bp, Homo sapien
ccaaggatcacgtcgtctacgaacg

SEQ ID NO: 5823354 - DNA, 25 bp, Homo sapien
gagtccgagggcgtggaacccgaag

SEQ ID NO: 5823355 - DNA, 25 bp, Homo sapien
cttcgggttccacgccctcggactc

SEQ ID NO: 5823356 - DNA, 25 bp, Homo sapien
cactaaccgtttagtaatgtatggt

SEQ ID NO: 5823357 - DNA, 25 bp, Homo sapien
accatacattactaaacggttagtg

SEQ ID NO: 5823358 - DNA, 25 bp, Homo sapien
gagattcaggcagtcagcatggtgc

SEQ ID NO: 5823359 - DNA, 25 bp, Homo sapien
ccgccagcactgtcaggtcagcaga

SEQ ID NO: 5823360 - DNA, 25 bp, Homo sapien
ttatttgctcgtaatgagacagaac

SEQ ID NO: 5823361 - DNA, 25 bp, Homo sapien
caatctgttcaacactgggctggac

SEQ ID NO: 5823362 - DNA, 25 bp, Homo sapien
ggcagcctcagcagagattcaggca

SEQ ID NO: 5823363 - DNA, 25 bp, Homo sapien
cgctacaatctgttcaacactgggc

SEQ ID NO: 5823364 - DNA, 25 bp, Homo sapien
gctacaatctgttcaacactgggct

SEQ ID NO: 5823365 - DNA, 25 bp, Homo sapien
taatgagacagaacgctacaatctg

SEQ ID NO: 5823366 - DNA, 25 bp, Homo sapien
cagcagagattcaggcagtcagcat

SEQ ID NO: 5823367 - DNA, 25 bp, Homo sapien
caggcagtcagcatggtgcggccct

SEQ ID NO: 5823368 - DNA, 25 bp, Homo sapien
gctcgtaatgagacagaacgctaca

SEQ ID NO: 5823369 - DNA, 25 bp, Homo sapien
aatctgttcaacactgggctggaca

SEQ ID NO: 5823370 - DNA, 25 bp, Homo sapien
agattcaggcagtcagcatggtgcg

SEQ ID NO: 5823371 - DNA, 25 bp, Homo sapien
aacactgggctggacactgcagtga

SEQ ID NO: 5823372 - DNA, 25 bp, Homo sapien
aggcagtcagcatggtgcggccctc

SEQ ID NO: 5823373 - DNA, 25 bp, Homo sapien
tcaacactgggctggacactgcagt

SEQ ID NO: 5823374 - DNA, 25 bp, Homo sapien
ccgtgtcgctcggactaagtcacag

SEQ ID NO: 5823375 - DNA, 25 bp, Homo sapien
ctgtgacttagtccgagcgacacgg

SEQ ID NO: 5823376 - DNA, 25 bp, Homo sapien
gaaagtcaccatccttctaatagtc

SEQ ID NO: 5823377 - DNA, 25 bp, Homo sapien
gactattagaaggatggtgactttc

SEQ ID NO: 5823378 - DNA, 25 bp, Homo sapien
ttgtggcgatattctgagtcagtag

SEQ ID NO: 5823379 - DNA, 25 bp, Homo sapien
ctactgactcagaatatcgccacaa

SEQ ID NO: 5823380 - DNA, 25 bp, Homo sapien
ggggagggaagcgcgcccgagcgtg

SEQ ID NO: 5823381 - DNA, 25 bp, Homo sapien
cacgctcgggcgcgcttccctcccc

SEQ ID NO: 5823382 - DNA, 25 bp, Homo sapien
gacagacgtaagacacccataggag

SEQ ID NO: 5823383 - DNA, 25 bp, Homo sapien
ggatggacagacgtaagacacccat

SEQ ID NO: 5823384 - DNA, 25 bp, Homo sapien
aagcagagtcaaaccacacaccaga

SEQ ID NO: 5823385 - DNA, 25 bp, Homo sapien
ctgaccacggacagatggatggaca

SEQ ID NO: 5823386 - DNA, 25 bp, Homo sapien
accacggacagatggatggacagac

SEQ ID NO: 5823387 - DNA, 25 bp, Homo sapien
agacacccataggaggccccagcag

SEQ ID NO: 5823388 - DNA, 25 bp, Homo sapien
cagatggatggacagacgtaagaca

SEQ ID NO: 5823389 - DNA, 25 bp, Homo sapien
gcagagtcaaaccacacaccagagt

SEQ ID NO: 5823390 - DNA, 25 bp, Homo sapien
caatccggaagaaaagcagagtcaa

SEQ ID NO: 5823391 - DNA, 25 bp, Homo sapien
gccaatccggaagaaaagcagagtc

SEQ ID NO: 5823392 - DNA, 25 bp, Homo sapien
aaagcagagtcaaaccacacaccag

SEQ ID NO: 5823393 - DNA, 25 bp, Homo sapien
gatggatggacagacgtaagacacc

SEQ ID NO: 5823394 - DNA, 25 bp, Homo sapien
catggcccccgagttatggctgggc

SEQ ID NO: 5823395 - DNA, 25 bp, Homo sapien
atggacagacgtaagacacccatag

SEQ ID NO: 5823396 - DNA, 25 bp, Homo sapien
cagacgtaagacacccataggaggc

SEQ ID NO: 5823397 - DNA, 25 bp, Homo sapien
acggacagatggatggacagacgta

SEQ ID NO: 5823398 - DNA, 25 bp, Homo sapien
tcggcgcgttgtccacgcgtccacg

SEQ ID NO: 5823399 - DNA, 25 bp, Homo sapien
cgtggacgcgtggacaacgcgccga

SEQ ID NO: 5823400 - DNA, 25 bp, Homo sapien
ctcggcgcgttgtccacgcgtccac

SEQ ID NO: 5823401 - DNA, 25 bp, Homo sapien
gtggacgcgtggacaacgcgccgag

SEQ ID NO: 5823402 - DNA, 25 bp, Homo sapien
ccctcggcgcgttgtccacgcgtcc

SEQ ID NO: 5823403 - DNA, 25 bp, Homo sapien
ggacgcgtggacaacgcgccgaggg

SEQ ID NO: 5823404 - DNA, 25 bp, Homo sapien
cttttacaagtttgagagtagtgtc

SEQ ID NO: 5823405 - DNA, 25 bp, Homo sapien
gacactactctcaaacttgtaaaag

SEQ ID NO: 5823406 - DNA, 25 bp, Homo sapien
aacctgtaaaggcatccggacttat

SEQ ID NO: 5823407 - DNA, 25 bp, Homo sapien
ataagtccggatgcctttacaggtt

SEQ ID NO: 5823408 - DNA, 25 bp, Homo sapien
ggaaggaagttttctcttaatgtaa

SEQ ID NO: 5823409 - DNA, 25 bp, Homo sapien
ttacattaagagaaaacttccttcc

SEQ ID NO: 5823410 - DNA, 25 bp, Homo sapien
aaatctaaaggaagtataagtcaaa

SEQ ID NO: 5823411 - DNA, 25 bp, Homo sapien
tttgacttatacttcctttagattt

SEQ ID NO: 5823412 - DNA, 25 bp, Homo sapien
aaaatctaaaggaagtataagtcaa

SEQ ID NO: 5823413 - DNA, 25 bp, Homo sapien
ttgacttatacttcctttagatttt

SEQ ID NO: 5823414 - DNA, 25 bp, Homo sapien
acgtcggcagacagggcgtgagcgg

SEQ ID NO: 5823415 - DNA, 25 bp, Homo sapien
ccgctcacgccctgtctgccgacgt

SEQ ID NO: 5823416 - DNA, 25 bp, Homo sapien
ccctgcaaacagtctaatgggccca

SEQ ID NO: 5823417 - DNA, 25 bp, Homo sapien
atgatcaaagacacaattctgatag

SEQ ID NO: 5823418 - DNA, 25 bp, Homo sapien
gcatttctgtggttctaagtttgca

SEQ ID NO: 5823419 - DNA, 25 bp, Homo sapien
tgcatctgcacaatctggataccca

SEQ ID NO: 5823420 - DNA, 25 bp, Homo sapien
gatcttctatgcaataatgttgcaa

SEQ ID NO: 5823421 - DNA, 25 bp, Homo sapien
acagcctaagtttgcatctgcacaa

SEQ ID NO: 5823422 - DNA, 25 bp, Homo sapien
gcatctgcacaatctggatacccaa

SEQ ID NO: 5823423 - DNA, 25 bp, Homo sapien
aaagacacaattctgatagctttga

SEQ ID NO: 5823424 - DNA, 25 bp, Homo sapien
caaacagtctaatgggcccagggaa

SEQ ID NO: 5823425 - DNA, 25 bp, Homo sapien
atcaagacagcctaagtttgcatct

SEQ ID NO: 5823426 - DNA, 25 bp, Homo sapien
aaaacagggcccttcatagtcagca

SEQ ID NO: 5823427 - DNA, 25 bp, Homo sapien
ggggaagcagtgatgccctgcaaac

SEQ ID NO: 5823428 - DNA, 25 bp, Homo sapien
ctcaacctgaggttgcatccttgat

SEQ ID NO: 5823429 - DNA, 25 bp, Homo sapien
agcatttctgtggttctaagtttgc

SEQ ID NO: 5823430 - DNA, 25 bp, Homo sapien
tagtgaaagagcacttgtacagaac

SEQ ID NO: 5823431 - DNA, 25 bp, Homo sapien
tctccaggaaaagagattagtgctt

SEQ ID NO: 5823432 - DNA, 25 bp, Homo sapien
acaagaaccagagtcacaaaccggt

SEQ ID NO: 5823433 - DNA, 25 bp, Homo sapien
accggtttgtgactctggttcttgt

SEQ ID NO: 5823434 - DNA, 25 bp, Homo sapien
aatttaatctagaccgactgaaacg

SEQ ID NO: 5823435 - DNA, 25 bp, Homo sapien
cgtttcagtcggtctagattaaatt

SEQ ID NO: 5823436 - DNA, 25 bp, Homo sapien
tacgagaaaaccgtccgatgaccaa

SEQ ID NO: 5823437 - DNA, 25 bp, Homo sapien
ttggtcatcggacggttttctcgta

SEQ ID NO: 5823438 - DNA, 25 bp, Homo sapien
ccgtgtccgagagggcaagtcataa

SEQ ID NO: 5823439 - DNA, 25 bp, Homo sapien
ttatgacttgccctctcggacacgg

SEQ ID NO: 5823440 - DNA, 25 bp, Homo sapien
gacacggttcctctggttatttaag

SEQ ID NO: 5823441 - DNA, 25 bp, Homo sapien
cttaaataaccagaggaaccgtgtc

SEQ ID NO: 5823442 - DNA, 25 bp, Homo sapien
acaacaccagtaacatccatttact

SEQ ID NO: 5823443 - DNA, 25 bp, Homo sapien
agtaaatggatgttactggtgttgt

SEQ ID NO: 5823444 - DNA, 25 bp, Homo sapien
cggctggattagtccaaatggaggt

SEQ ID NO: 5823445 - DNA, 25 bp, Homo sapien
acctccatttggactaatccagccg

SEQ ID NO: 5823446 - DNA, 25 bp, Homo sapien
tctcccatggtacgtggcccaaagg

SEQ ID NO: 5823447 - DNA, 25 bp, Homo sapien
cctttgggccacgtaccatgggaga

SEQ ID NO: 5823448 - DNA, 25 bp, Homo sapien
acgtgcccggcgagagacgtgcgtg

SEQ ID NO: 5823449 - DNA, 25 bp, Homo sapien
cacgcacgtctctcgccgggcacgt

SEQ ID NO: 5823450 - DNA, 25 bp, Homo sapien
cttactacagagacatgtgagggta

SEQ ID NO: 5823451 - DNA, 25 bp, Homo sapien
taccctcacatgtctctgtagtaag

SEQ ID NO: 5823452 - DNA, 25 bp, Homo sapien
ttaagtgaagcttctttgaagacac

SEQ ID NO: 5823453 - DNA, 25 bp, Homo sapien
gtgtcttcaaagaagcttcacttaa

SEQ ID NO: 5823454 - DNA, 25 bp, Homo sapien
aagtagtagacatgaggttgacaaa

SEQ ID NO: 5823455 - DNA, 25 bp, Homo sapien
tttgtcaacctcatgtctactactt

SEQ ID NO: 5823456 - DNA, 25 bp, Homo sapien
acgggaaagacatcgttcatgtcgg

SEQ ID NO: 5823457 - DNA, 25 bp, Homo sapien
ccgacatgaacgatgtctttcccgt

SEQ ID NO: 5823458 - DNA, 25 bp, Homo sapien
gtcaggaaactagtcctgaagggag

SEQ ID NO: 5823459 - DNA, 25 bp, Homo sapien
ctcccttcaggactagtttcctgac

SEQ ID NO: 5823460 - DNA, 25 bp, Homo sapien
attcagttcgaaccactcctctact

SEQ ID NO: 5823461 - DNA, 25 bp, Homo sapien
agtagaggagtggttcgaactgaat

SEQ ID NO: 5823462 - DNA, 25 bp, Homo sapien
tcgtctttctgaccgtagtaaacca

SEQ ID NO: 5823463 - DNA, 25 bp, Homo sapien
tggtttactacggtcagaaagacga

SEQ ID NO: 5823464 - DNA, 25 bp, Homo sapien
agtctacaatgtccatataaaaacc

SEQ ID NO: 5823465 - DNA, 25 bp, Homo sapien
ggtttttatatggacattgtagact

SEQ ID NO: 5823466 - DNA, 25 bp, Homo sapien
tcggtagtccccacgtcagaacgga

SEQ ID NO: 5823467 - DNA, 25 bp, Homo sapien
tccgttctgacgtggggactaccga

SEQ ID NO: 5823468 - DNA, 25 bp, Homo sapien
tgacgaacagacaagacccagtatg

SEQ ID NO: 5823469 - DNA, 25 bp, Homo sapien
catactgggtcttgtctgttcgtca

SEQ ID NO: 5823470 - DNA, 25 bp, Homo sapien
gactaccggcttgtcacggagggca

SEQ ID NO: 5823471 - DNA, 25 bp, Homo sapien
tgccctccgtgacaagccggtagtc

SEQ ID NO: 5823472 - DNA, 25 bp, Homo sapien
atccccctctggacgaagggtctta

SEQ ID NO: 5823473 - DNA, 25 bp, Homo sapien
taagacccttcgtccagagggggat

SEQ ID NO: 5823474 - DNA, 25 bp, Homo sapien
tggtaccggactgtcgaacgcgacg

SEQ ID NO: 5823475 - DNA, 25 bp, Homo sapien
cgtcgcgttcgacagtccggtacca

SEQ ID NO: 5823476 - DNA, 25 bp, Homo sapien
ggacgaaggtcaagtcgtctgacct

SEQ ID NO: 5823477 - DNA, 25 bp, Homo sapien
aggtcagacgacttgaccttcgtcc

SEQ ID NO: 5823478 - DNA, 25 bp, Homo sapien
aaacgtaattaatgtgattctagac

SEQ ID NO: 5823479 - DNA, 25 bp, Homo sapien
gtctagaatcacattaattacgttt

SEQ ID NO: 5823480 - DNA, 25 bp, Homo sapien
tactcaagatgtatagcaccaaaag

SEQ ID NO: 5823481 - DNA, 25 bp, Homo sapien
cttttggtgctatacatcttgagta

SEQ ID NO: 5823482 - DNA, 25 bp, Homo sapien
cgtacgtggtggtggcttatcatct

SEQ ID NO: 5823483 - DNA, 25 bp, Homo sapien
agatgataagccaccaccacgtacg

SEQ ID NO: 5823484 - DNA, 25 bp, Homo sapien
acgaaaaggttaattgttcttctga

SEQ ID NO: 5823485 - DNA, 25 bp, Homo sapien
tcagaagaacaattaaccttttcgt

SEQ ID NO: 5823486 - DNA, 25 bp, Homo sapien
aaactgcagaggaactcaagaggcc

SEQ ID NO: 5823487 - DNA, 25 bp, Homo sapien
tggggcaacaaacagctgcagacaa

SEQ ID NO: 5823488 - DNA, 25 bp, Homo sapien
aaatgcagagcaagatgtggctttc

SEQ ID NO: 5823489 - DNA, 25 bp, Homo sapien
ataaactcctcttaggaatggggca

SEQ ID NO: 5823490 - DNA, 25 bp, Homo sapien
acatggcttccctctgtgcgcatga

SEQ ID NO: 5823491 - DNA, 25 bp, Homo sapien
atgtcaaaactgcagaggaactcaa

SEQ ID NO: 5823492 - DNA, 25 bp, Homo sapien
cactgtccaaagtctgtcacagtcc

SEQ ID NO: 5823493 - DNA, 25 bp, Homo sapien
cctccatatggcaaagatgaagaaa

SEQ ID NO: 5823494 - DNA, 25 bp, Homo sapien
ctccatatggcaaagatgaagaaaa

SEQ ID NO: 5823495 - DNA, 25 bp, Homo sapien
gtctgtcacagtcctccatatggca

SEQ ID NO: 5823496 - DNA, 25 bp, Homo sapien
cagagcaagatgtggctttcctgcc

SEQ ID NO: 5823497 - DNA, 25 bp, Homo sapien
aatcctaaatgtcaaaactgcagag

SEQ ID NO: 5823498 - DNA, 25 bp, Homo sapien
tctgtcacagtcctccatatggcaa

SEQ ID NO: 5823499 - DNA, 25 bp, Homo sapien
atggggcaacaaacagctgcagaca

SEQ ID NO: 5823500 - DNA, 25 bp, Homo sapien
attggcaatctttttaggggtacca

SEQ ID NO: 5823501 - DNA, 25 bp, Homo sapien
gatggataaactcctcttaggaatg

SEQ ID NO: 5823502 - DNA, 25 bp, Homo sapien
ggtcctgccggcggggcgacgggcg

SEQ ID NO: 5823503 - DNA, 25 bp, Homo sapien
cgcccgtcgccccgccggcaggacc

SEQ ID NO: 5823504 - DNA, 25 bp, Homo sapien
tggtttaaacaacattttatagtgt

SEQ ID NO: 5823505 - DNA, 25 bp, Homo sapien
acactataaaatgttgtttaaacca

SEQ ID NO: 5823506 - DNA, 25 bp, Homo sapien
ccgtagatgaccatgagtagaatca

SEQ ID NO: 5823507 - DNA, 25 bp, Homo sapien
tgattctactcatggtcatctacgg

SEQ ID NO: 5823508 - DNA, 25 bp, Homo sapien
cggttcttcgcagagtggtttaccg

SEQ ID NO: 5823509 - DNA, 25 bp, Homo sapien
cggtaaaccactctgcgaagaaccg

SEQ ID NO: 5823510 - DNA, 25 bp, Homo sapien
ggacgagagggtggtgtcccccgcg

SEQ ID NO: 5823511 - DNA, 25 bp, Homo sapien
cgcgggggacaccaccctctcgtcc

SEQ ID NO: 5823512 - DNA, 25 bp, Homo sapien
tggaggccgggacgcgcacgcggca

SEQ ID NO: 5823513 - DNA, 25 bp, Homo sapien
tgccgcgtgcgcgtcccggcctcca

SEQ ID NO: 5823514 - DNA, 25 bp, Homo sapien
tggtcgttcccatcgcgacctcgaa

SEQ ID NO: 5823515 - DNA, 25 bp, Homo sapien
ttcgaggtcgcgatgggaacgacca

SEQ ID NO: 5823516 - DNA, 25 bp, Homo sapien
tgacagcatgcagagcaagttagga

SEQ ID NO: 5823517 - DNA, 25 bp, Homo sapien
agcacagcagcagaggggccctaga

SEQ ID NO: 5823518 - DNA, 25 bp, Homo sapien
catgcagagcaagttaggaaaaacc

SEQ ID NO: 5823519 - DNA, 25 bp, Homo sapien
tgcagtcctttaagtctatgacggc

SEQ ID NO: 5823520 - DNA, 25 bp, Homo sapien
gcccaagaaggcagttccactggga

SEQ ID NO: 5823521 - DNA, 25 bp, Homo sapien
agtcctttaagtctatgacggcggg

SEQ ID NO: 5823522 - DNA, 25 bp, Homo sapien
gaccagcccagcttgttgtgtagaa

SEQ ID NO: 5823523 - DNA, 25 bp, Homo sapien
cagagcaagttaggaaaaaccgagg

SEQ ID NO: 5823524 - DNA, 25 bp, Homo sapien
tgtgggaacagcaacgcgggctcca

SEQ ID NO: 5823525 - DNA, 25 bp, Homo sapien
ccagcacagcagcagaggggcccta

SEQ ID NO: 5823526 - DNA, 25 bp, Homo sapien
aaaccgaggccctgtgggaacagca

SEQ ID NO: 5823527 - DNA, 25 bp, Homo sapien
cagtcctttaagtctatgacggcgg

SEQ ID NO: 5823528 - DNA, 25 bp, Homo sapien
cagcgcttcctctggcagggccgag

SEQ ID NO: 5823529 - DNA, 25 bp, Homo sapien
cctgtgggaacagcaacgcgggctc

SEQ ID NO: 5823530 - DNA, 25 bp, Homo sapien
ctcgggagcaagagatggctccctc

SEQ ID NO: 5823531 - DNA, 25 bp, Homo sapien
gacagcatgcagagcaagttaggaa

SEQ ID NO: 5823532 - DNA, 25 bp, Homo sapien
aaaatcttttaacactacagtcaaa

SEQ ID NO: 5823533 - DNA, 25 bp, Homo sapien
tttgactgtagtgttaaaagatttt

SEQ ID NO: 5823534 - DNA, 25 bp, Homo sapien
aagtggtacttaacactcacatagt

SEQ ID NO: 5823535 - DNA, 25 bp, Homo sapien
actatgtgagtgttaagtaccactt

SEQ ID NO: 5823536 - DNA, 25 bp, Homo sapien
agaaatttagtcatcaaaaactgta

SEQ ID NO: 5823537 - DNA, 25 bp, Homo sapien
tacagtttttgatgactaaatttct

SEQ ID NO: 5823538 - DNA, 25 bp, Homo sapien
aagaaatttagtcatcaaaaactgt

SEQ ID NO: 5823539 - DNA, 25 bp, Homo sapien
acagtttttgatgactaaatttctt

SEQ ID NO: 5823540 - DNA, 25 bp, Homo sapien
ttttcggccgaatattcattttcgt

SEQ ID NO: 5823541 - DNA, 25 bp, Homo sapien
acgaaaatgaatattcggccgaaaa

SEQ ID NO: 5823542 - DNA, 25 bp, Homo sapien
attaaacttagatttgaatcttctt

SEQ ID NO: 5823543 - DNA, 25 bp, Homo sapien
aagaagattcaaatctaagtttaat

SEQ ID NO: 5823544 - DNA, 25 bp, Homo sapien
aattaaacttagatttgaatcttct

SEQ ID NO: 5823545 - DNA, 25 bp, Homo sapien
agaagattcaaatctaagtttaatt

SEQ ID NO: 5823546 - DNA, 25 bp, Homo sapien
tgcggtaggcccagacgcaagtcgg

SEQ ID NO: 5823547 - DNA, 25 bp, Homo sapien
ccgacttgcgtctgggcctaccgca

SEQ ID NO: 5823548 - DNA, 25 bp, Homo sapien
cacgtgccgccacctcccgtgtccg

SEQ ID NO: 5823549 - DNA, 25 bp, Homo sapien
cggacacgggaggtggcggcacgtg

SEQ ID NO: 5823550 - DNA, 25 bp, Homo sapien
cgcgaggtgtagtcctgggaatcca

SEQ ID NO: 5823551 - DNA, 25 bp, Homo sapien
tggattcccaggactacacctcgcg

SEQ ID NO: 5823552 - DNA, 25 bp, Homo sapien
cctgagggcgcgacccgcgcgactc

SEQ ID NO: 5823553 - DNA, 25 bp, Homo sapien
gagtcgcgcgggtcgcgccctcagg

SEQ ID NO: 5823554 - DNA, 25 bp, Homo sapien
acccgcgcgactccgccgggggctc

SEQ ID NO: 5823555 - DNA, 25 bp, Homo sapien
gagcccccggcggagtcgcgcgggt

SEQ ID NO: 5823556 - DNA, 25 bp, Homo sapien
gttgtactcctactttcgtgaacgt

SEQ ID NO: 5823557 - DNA, 25 bp, Homo sapien
acgttcacgaaagtaggagtacaac

SEQ ID NO: 5823558 - DNA, 25 bp, Homo sapien
tcaggagccgggaggtcggtccccc

SEQ ID NO: 5823559 - DNA, 25 bp, Homo sapien
gggggaccgacctcccggctcctga

SEQ ID NO: 5823560 - DNA, 25 bp, Homo sapien
ccgtgaggcccaaccgccgtggaga

SEQ ID NO: 5823561 - DNA, 25 bp, Homo sapien
tctccacggcggttgggcctcacgg

SEQ ID NO: 5823562 - DNA, 25 bp, Homo sapien
tataaaggtaatgggaatgatcttt

SEQ ID NO: 5823563 - DNA, 25 bp, Homo sapien
aaagatcattcccattacctttata

SEQ ID NO: 5823564 - DNA, 25 bp, Homo sapien
tgtccgaatctcctgtttaggaggg

SEQ ID NO: 5823565 - DNA, 25 bp, Homo sapien
ccctcctaaacaggagattcggaca

SEQ ID NO: 5823566 - DNA, 25 bp, Homo sapien
tgacacaaacgtgtgcaccctcgag

SEQ ID NO: 5823567 - DNA, 25 bp, Homo sapien
ctcgagggtgcacacgtttgtgtca

SEQ ID NO: 5823568 - DNA, 25 bp, Homo sapien
gggcctcgggtctgtccggggcgtg

SEQ ID NO: 5823569 - DNA, 25 bp, Homo sapien
cacgccccggacagacccgaggccc

SEQ ID NO: 5823570 - DNA, 25 bp, Homo sapien
cgcgtcgggcctcgggtctgtccgg

SEQ ID NO: 5823571 - DNA, 25 bp, Homo sapien
ccggacagacccgaggcccgacgcg

SEQ ID NO: 5823572 - DNA, 25 bp, Homo sapien
tttcctaaacattctgtatacacat

SEQ ID NO: 5823573 - DNA, 25 bp, Homo sapien
atgtgtatacagaatgtttaggaaa

SEQ ID NO: 5823574 - DNA, 25 bp, Homo sapien
aatgtattatcgtatagttatttac

SEQ ID NO: 5823575 - DNA, 25 bp, Homo sapien
gtaaataactatacgataatacatt

SEQ ID NO: 5823576 - DNA, 25 bp, Homo sapien
aaatgtattatcgtatagttattta

SEQ ID NO: 5823577 - DNA, 25 bp, Homo sapien
taaataactatacgataatacattt

SEQ ID NO: 5823578 - DNA, 25 bp, Homo sapien
aaaatgtattatcgtatagttattt

SEQ ID NO: 5823579 - DNA, 25 bp, Homo sapien
aaataactatacgataatacatttt

SEQ ID NO: 5823580 - DNA, 25 bp, Homo sapien
gaaaatgtattatcgtatagttatt

SEQ ID NO: 5823581 - DNA, 25 bp, Homo sapien
aataactatacgataatacattttc

SEQ ID NO: 5823582 - DNA, 25 bp, Homo sapien
tcctccatacgagggcaggacgtgg

SEQ ID NO: 5823583 - DNA, 25 bp, Homo sapien
ccacgtcctgccctcgtatggagga

SEQ ID NO: 5823584 - DNA, 25 bp, Homo sapien
ctcaatttggtacacttccgctgtc

SEQ ID NO: 5823585 - DNA, 25 bp, Homo sapien
gacagcggaagtgtaccaaattgag

SEQ ID NO: 5823586 - DNA, 25 bp, Homo sapien
tactaaggaagtagaatttacgaaa

SEQ ID NO: 5823587 - DNA, 25 bp, Homo sapien
tttcgtaaattctacttccttagta

SEQ ID NO: 5823588 - DNA, 25 bp, Homo sapien
gacgtactaaccgacgacttggatt

SEQ ID NO: 5823589 - DNA, 25 bp, Homo sapien
aatccaagtcgtcggttagtacgtc

SEQ ID NO: 5823590 - DNA, 25 bp, Homo sapien
tggctcttcttcgtgggaatcgtcc

SEQ ID NO: 5823591 - DNA, 25 bp, Homo sapien
ggacgattcccacgaagaagagcca

SEQ ID NO: 5823592 - DNA, 25 bp, Homo sapien
gtgtcacggcatgaacgttatcttt

SEQ ID NO: 5823593 - DNA, 25 bp, Homo sapien
aaagataacgttcatgccgtgacac

SEQ ID NO: 5823594 - DNA, 25 bp, Homo sapien
gccgcggacccctcagctcaggcgg

SEQ ID NO: 5823595 - DNA, 25 bp, Homo sapien
ccgcctgagctgaggggtccgcggc

SEQ ID NO: 5823596 - DNA, 25 bp, Homo sapien
cgacggggttggtccttgcgtgtaa

SEQ ID NO: 5823597 - DNA, 25 bp, Homo sapien
ttacacgcaaggaccaaccccgtcg

SEQ ID NO: 5823598 - DNA, 25 bp, Homo sapien
cctgaaaacattcacagccctagga

SEQ ID NO: 5823599 - DNA, 25 bp, Homo sapien
taggagagacaaagtgatacgaccc

SEQ ID NO: 5823600 - DNA, 25 bp, Homo sapien
gaaaacattcacagccctaggagca

SEQ ID NO: 5823601 - DNA, 25 bp, Homo sapien
ggacacaataagttacactgttagg

SEQ ID NO: 5823602 - DNA, 25 bp, Homo sapien
tctgaaggggcacagcaccctgtcc

SEQ ID NO: 5823603 - DNA, 25 bp, Homo sapien
tatgccattgtccacagcaggccca

SEQ ID NO: 5823604 - DNA, 25 bp, Homo sapien
ctgaaaacattcacagccctaggag

SEQ ID NO: 5823605 - DNA, 25 bp, Homo sapien
agtatgccattgtccacagcaggcc

SEQ ID NO: 5823606 - DNA, 25 bp, Homo sapien
gccctaggagcaggactaggcccac

SEQ ID NO: 5823607 - DNA, 25 bp, Homo sapien
acacaataagttacactgttaggag

SEQ ID NO: 5823608 - DNA, 25 bp, Homo sapien
taagttacactgttaggagccctcc

SEQ ID NO: 5823609 - DNA, 25 bp, Homo sapien
aataagttacactgttaggagccct

SEQ ID NO: 5823610 - DNA, 25 bp, Homo sapien
agagtatgccattgtccacagcagg

SEQ ID NO: 5823611 - DNA, 25 bp, Homo sapien
gctggaagagagtatgccattgtcc

SEQ ID NO: 5823612 - DNA, 25 bp, Homo sapien
aagttacactgttaggagccctcct

SEQ ID NO: 5823613 - DNA, 25 bp, Homo sapien
ggctggaagagagtatgccattgtc

SEQ ID NO: 5823614 - DNA, 25 bp, Homo sapien
agtattttcatgacgaaaaggaaga

SEQ ID NO: 5823615 - DNA, 25 bp, Homo sapien
tcttccttttcgtcatgaaaatact

SEQ ID NO: 5823616 - DNA, 25 bp, Homo sapien
aacagtatcttctacctcttagact

SEQ ID NO: 5823617 - DNA, 25 bp, Homo sapien
agtctaagaggtagaagatactgtt

SEQ ID NO: 5823618 - DNA, 25 bp, Homo sapien
acgtaataccctgaaaacattccac

SEQ ID NO: 5823619 - DNA, 25 bp, Homo sapien
gtggaatgttttcagggtattacgt

SEQ ID NO: 5823620 - DNA, 25 bp, Homo sapien
cctcccgaggccctcttgcgccgag

SEQ ID NO: 5823621 - DNA, 25 bp, Homo sapien
ctcggcgcaagagggcctcgggagg

SEQ ID NO: 5823622 - DNA, 25 bp, Homo sapien
acggcgggccgctggttgagacgcc

SEQ ID NO: 5823623 - DNA, 25 bp, Homo sapien
ggcgtctcaaccagcggcccgccgt

SEQ ID NO: 5823624 - DNA, 25 bp, Homo sapien
accctgaggagtctcgcatcttccc

SEQ ID NO: 5823625 - DNA, 25 bp, Homo sapien
gggaagatgcgagactcctcagggt

SEQ ID NO: 5823626 - DNA, 25 bp, Homo sapien
gacaatgtaaatcatgttttattct

SEQ ID NO: 5823627 - DNA, 25 bp, Homo sapien
agaataaaacatgatttacattgtc

SEQ ID NO: 5823628 - DNA, 25 bp, Homo sapien
gggcgatcgtgtccgccagggccgg

SEQ ID NO: 5823629 - DNA, 25 bp, Homo sapien
ccggccctggcggacacgatcgccc

SEQ ID NO: 5823630 - DNA, 25 bp, Homo sapien
ggtgccgcgcgagtggtgggaggag

SEQ ID NO: 5823631 - DNA, 25 bp, Homo sapien
ctcctcccaccactcgcgcggcacc

SEQ ID NO: 5823632 - DNA, 25 bp, Homo sapien
ccggtgccgcgcgagtggtgggagg

SEQ ID NO: 5823633 - DNA, 25 bp, Homo sapien
cctcccaccactcgcgcggcaccgg

SEQ ID NO: 5823634 - DNA, 25 bp, Homo sapien
gaacgggggggatggtgtccacaag

SEQ ID NO: 5823635 - DNA, 25 bp, Homo sapien
cttgtggacaccatcccccccgttc

SEQ ID NO: 5823636 - DNA, 25 bp, Homo sapien
ctcaaaaacgtaggacactaccacg

SEQ ID NO: 5823637 - DNA, 25 bp, Homo sapien
cgtggtagtgtcctacgtttttgag

SEQ ID NO: 5823638 - DNA, 25 bp, Homo sapien
ctcgaatcacgagagcagtagtggt

SEQ ID NO: 5823639 - DNA, 25 bp, Homo sapien
accactactgctctcgtgattcgag

SEQ ID NO: 5823640 - DNA, 25 bp, Homo sapien
cgggacaggatccttcacccactgg

SEQ ID NO: 5823641 - DNA, 25 bp, Homo sapien
ccagtgggtgaaggatcctgtcccg

SEQ ID NO: 5823642 - DNA, 25 bp, Homo sapien
gaaatcttattcctggtcaacacac

SEQ ID NO: 5823643 - DNA, 25 bp, Homo sapien
gtgtgttgaccaggaataagatttc

SEQ ID NO: 5823644 - DNA, 25 bp, Homo sapien
agaactgatagtaaaacctatatcg

SEQ ID NO: 5823645 - DNA, 25 bp, Homo sapien
cgatataggttttactatcagttct

SEQ ID NO: 5823646 - DNA, 25 bp, Homo sapien
ccctggcaaagaaagaagattgtgt

SEQ ID NO: 5823647 - DNA, 25 bp, Homo sapien
tcactgcccttgtctgatggggtag

SEQ ID NO: 5823648 - DNA, 25 bp, Homo sapien
tgcccagggtatattttggggcaaa

SEQ ID NO: 5823649 - DNA, 25 bp, Homo sapien
tactttaatgaggtgacttacagac

SEQ ID NO: 5823650 - DNA, 25 bp, Homo sapien
ggtacactcccatatatagcagctc

SEQ ID NO: 5823651 - DNA, 25 bp, Homo sapien
acttacagacactggaaaaggagtt

SEQ ID NO: 5823652 - DNA, 25 bp, Homo sapien
cccaaaataccctggcaaagaaaga

SEQ ID NO: 5823653 - DNA, 25 bp, Homo sapien
gcagctctctcgaggatacagtctg

SEQ ID NO: 5823654 - DNA, 25 bp, Homo sapien
aatggtaccagaaccctcttgagcc

SEQ ID NO: 5823655 - DNA, 25 bp, Homo sapien
ggctcactgcccttgtctgatgggg

SEQ ID NO: 5823656 - DNA, 25 bp, Homo sapien
aagactgcagtaatgctatgcccag

SEQ ID NO: 5823657 - DNA, 25 bp, Homo sapien
tttaatgaggtgacttacagacact

SEQ ID NO: 5823658 - DNA, 25 bp, Homo sapien
gtaggatctcccagaggagacagct

SEQ ID NO: 5823659 - DNA, 25 bp, Homo sapien
cccagaggagacagctaattatact

SEQ ID NO: 5823660 - DNA, 25 bp, Homo sapien
acatccaagactgcagtaatgctat

SEQ ID NO: 5823661 - DNA, 25 bp, Homo sapien
accctggcaaagaaagaagattgtg

SEQ ID NO: 5823662 - DNA, 25 bp, Homo sapien
gatttctattgacctttaaagaatt

SEQ ID NO: 5823663 - DNA, 25 bp, Homo sapien
aattctttaaaggtcaatagaaatc

SEQ ID NO: 5823664 - DNA, 25 bp, Homo sapien
tgatttctattgacctttaaagaat

SEQ ID NO: 5823665 - DNA, 25 bp, Homo sapien
attctttaaaggtcaatagaaatca

SEQ ID NO: 5823666 - DNA, 25 bp, Homo sapien
aaattaactgctcaactacctaaag

SEQ ID NO: 5823667 - DNA, 25 bp, Homo sapien
ctttaggtagttgagcagttaattt

SEQ ID NO: 5823668 - DNA, 25 bp, Homo sapien
gtcctacgtggcggagcggcggtgt

SEQ ID NO: 5823669 - DNA, 25 bp, Homo sapien
acaccgccgctccgccacgtaggac

SEQ ID NO: 5823670 - DNA, 25 bp, Homo sapien
ggttgacacctacatttgagacgag

SEQ ID NO: 5823671 - DNA, 25 bp, Homo sapien
ctcgtctcaaatgtaggtgtcaacc

SEQ ID NO: 5823672 - DNA, 25 bp, Homo sapien
ctctccaccttgagagggtctccta

SEQ ID NO: 5823673 - DNA, 25 bp, Homo sapien
taggagaccctctcaaggtggagag

SEQ ID NO: 5823674 - DNA, 25 bp, Homo sapien
gacgtgacgacgattcgagtattcg

SEQ ID NO: 5823675 - DNA, 25 bp, Homo sapien
cgaatactcgaatcgtcgtcacgtc

SEQ ID NO: 5823676 - DNA, 25 bp, Homo sapien
tgggtgaggtgattccctaacaaag

SEQ ID NO: 5823677 - DNA, 25 bp, Homo sapien
ctttgttagggaatcacctcaccca

SEQ ID NO: 5823678 - DNA, 25 bp, Homo sapien
gatctgggagcaagaactccccggc

SEQ ID NO: 5823679 - DNA, 25 bp, Homo sapien
gccggggagttcttgctcccagatc

SEQ ID NO: 5823680 - DNA, 25 bp, Homo sapien
aatccttcgtagataatttaggtaa

SEQ ID NO: 5823681 - DNA, 25 bp, Homo sapien
ttacctaaattatctacgaaggatt

SEQ ID NO: 5823682 - DNA, 25 bp, Homo sapien
ccaggcaccgtgtctatggtacaca

SEQ ID NO: 5823683 - DNA, 25 bp, Homo sapien
tgtgtaccatagacacggtgcctgg

SEQ ID NO: 5823684 - DNA, 25 bp, Homo sapien
acggtgggctcagttccgcgactac

SEQ ID NO: 5823685 - DNA, 25 bp, Homo sapien
gtagtcgcggaactgagcccaccgt

SEQ ID NO: 5823686 - DNA, 25 bp, Homo sapien
gtgggccgtagagccggctgggtgt

SEQ ID NO: 5823687 - DNA, 25 bp, Homo sapien
acacccagccggctctacggcccac

SEQ ID NO: 5823688 - DNA, 25 bp, Homo sapien
ccagagtttcccgtggaacagggtc

SEQ ID NO: 5823689 - DNA, 25 bp, Homo sapien
gaccctgttccacgggaaactctgg

SEQ ID NO: 5823690 - DNA, 25 bp, Homo sapien
gactcagatgcctgaaacagacctg

SEQ ID NO: 5823691 - DNA, 25 bp, Homo sapien
acgccgactcagatgcctgaaacag

SEQ ID NO: 5823692 - DNA, 25 bp, Homo sapien
accaaggccagtgacgaggccgata

SEQ ID NO: 5823693 - DNA, 25 bp, Homo sapien
tacaaagtgaccaaggccagtgacg

SEQ ID NO: 5823694 - DNA, 25 bp, Homo sapien
atgcctgaaacagacctgggccgag

SEQ ID NO: 5823695 - DNA, 25 bp, Homo sapien
ctcagatgcctgaaacagacctggg

SEQ ID NO: 5823696 - DNA, 25 bp, Homo sapien
gggtaaacgccgactcagatgcctg

SEQ ID NO: 5823697 - DNA, 25 bp, Homo sapien
aaacgccgactcagatgcctgaaac

SEQ ID NO: 5823698 - DNA, 25 bp, Homo sapien
gtaaacgccgactcagatgcctgaa

SEQ ID NO: 5823699 - DNA, 25 bp, Homo sapien
cgccgactcagatgcctgaaacaga

SEQ ID NO: 5823700 - DNA, 25 bp, Homo sapien
ctggagtctggtcactttggggccc

SEQ ID NO: 5823701 - DNA, 25 bp, Homo sapien
tcagatgcctgaaacagacctgggc

SEQ ID NO: 5823702 - DNA, 25 bp, Homo sapien
tctctgtgggcaggtgtggacacca

SEQ ID NO: 5823703 - DNA, 25 bp, Homo sapien
cagaaatacaaagtgaccaaggcca

SEQ ID NO: 5823704 - DNA, 25 bp, Homo sapien
agatgcctgaaacagacctgggccg

SEQ ID NO: 5823705 - DNA, 25 bp, Homo sapien
gcccctgggtaaacgccgactcaga

SEQ ID NO: 5823706 - DNA, 25 bp, Homo sapien
acataagcttgtggtcactacgcag

SEQ ID NO: 5823707 - DNA, 25 bp, Homo sapien
taagcttgtggtcactacgcagcct

SEQ ID NO: 5823708 - DNA, 25 bp, Homo sapien
cttccccgaggttctcttctgggag

SEQ ID NO: 5823709 - DNA, 25 bp, Homo sapien
acaccaagacggttctgccggcggg

SEQ ID NO: 5823710 - DNA, 25 bp, Homo sapien
gcggggacacatcgtcttcacgagg

SEQ ID NO: 5823711 - DNA, 25 bp, Homo sapien
ctcggcagaggctggactcttccct

SEQ ID NO: 5823712 - DNA, 25 bp, Homo sapien
cacataagcttgtggtcactacgca

SEQ ID NO: 5823713 - DNA, 25 bp, Homo sapien
tggtcactacgcagcctgggctcag

SEQ ID NO: 5823714 - DNA, 25 bp, Homo sapien
cggggctgcagaaggagcccacttt

SEQ ID NO: 5823715 - DNA, 25 bp, Homo sapien
tcctcgccacacaggctgtgtctga

SEQ ID NO: 5823716 - DNA, 25 bp, Homo sapien
cagcctgggctcagctcacggggct

SEQ ID NO: 5823717 - DNA, 25 bp, Homo sapien
cttgtggtcactacgcagcctgggc

SEQ ID NO: 5823718 - DNA, 25 bp, Homo sapien
agcttgtggtcactacgcagcctgg

SEQ ID NO: 5823719 - DNA, 25 bp, Homo sapien
cctgggctcagctcacggggctgca

SEQ ID NO: 5823720 - DNA, 25 bp, Homo sapien
acatatgaaaggaaatttagacacc

SEQ ID NO: 5823721 - DNA, 25 bp, Homo sapien
gaggccagacacacgggcttgcacc

SEQ ID NO: 5823722 - DNA, 25 bp, Homo sapien
aaccgacagagaaaaggtcagagat

SEQ ID NO: 5823723 - DNA, 25 bp, Homo sapien
atctctgaccttttctctgtcggtt

SEQ ID NO: 5823724 - DNA, 25 bp, Homo sapien
gacaactataagttatattagactt

SEQ ID NO: 5823725 - DNA, 25 bp, Homo sapien
aagtctaatataacttatagttgtc

SEQ ID NO: 5823726 - DNA, 25 bp, Homo sapien
ccgtagttctggtttggctcttgat

SEQ ID NO: 5823727 - DNA, 25 bp, Homo sapien
atcaagagccaaaccagaactacgg

SEQ ID NO: 5823728 - DNA, 25 bp, Homo sapien
tgtcctttgggacacgtccctcgcg

SEQ ID NO: 5823729 - DNA, 25 bp, Homo sapien
cgcgagggacgtgtcccaaaggaca

SEQ ID NO: 5823730 - DNA, 25 bp, Homo sapien
ccccattgactagcgggtagcggga

SEQ ID NO: 5823731 - DNA, 25 bp, Homo sapien
tcccgctacccgctagtcaatgggg

SEQ ID NO: 5823732 - DNA, 25 bp, Homo sapien
ttaaagacctttaacatatcagaac

SEQ ID NO: 5823733 - DNA, 25 bp, Homo sapien
gttctgatatgttaaaggtctttaa

SEQ ID NO: 5823734 - DNA, 25 bp, Homo sapien
agtttctagcataaatatacttcgt

SEQ ID NO: 5823735 - DNA, 25 bp, Homo sapien
acgaagtatatttatgctagaaact

SEQ ID NO: 5823736 - DNA, 25 bp, Homo sapien
atttaagtttctagcataaatatac

SEQ ID NO: 5823737 - DNA, 25 bp, Homo sapien
gtatatttatgctagaaacttaaat

SEQ ID NO: 5823738 - DNA, 25 bp, Homo sapien
actgaagggaccgatcacccgggtg

SEQ ID NO: 5823739 - DNA, 25 bp, Homo sapien
cacccgggtgatcggtcccttcagt

SEQ ID NO: 5823740 - DNA, 25 bp, Homo sapien
gaccgtctaggcacccttctttcgg

SEQ ID NO: 5823741 - DNA, 25 bp, Homo sapien
ccgaaagaagggtgcctagacggtc

SEQ ID NO: 5823742 - DNA, 25 bp, Homo sapien
ttacacggagatacctgtggggttc

SEQ ID NO: 5823743 - DNA, 25 bp, Homo sapien
gaaccccacaggtatctccgtgtaa

SEQ ID NO: 5823744 - DNA, 25 bp, Homo sapien
cgtgaaccgccccatgacgtcagta

SEQ ID NO: 5823745 - DNA, 25 bp, Homo sapien
tactgacgtcatggggcggttcacg

SEQ ID NO: 5823746 - DNA, 25 bp, Homo sapien
ggtgatggcattgatcaactttaat

SEQ ID NO: 5823747 - DNA, 25 bp, Homo sapien
attaaagttgatcaatgccatcacc

SEQ ID NO: 5823748 - DNA, 25 bp, Homo sapien
tcacagaggcgctactcacagaagt

SEQ ID NO: 5823749 - DNA, 25 bp, Homo sapien
acttctgtgagtagcgcctctgtga

SEQ ID NO: 5823750 - DNA, 25 bp, Homo sapien
agactgcccgtgtcgccgtgtccgt

SEQ ID NO: 5823751 - DNA, 25 bp, Homo sapien
acggacacggcgacacgggcagtct

SEQ ID NO: 5823752 - DNA, 25 bp, Homo sapien
gaggtaaggccagggcccgcgtggg

SEQ ID NO: 5823753 - DNA, 25 bp, Homo sapien
cccacgcgggccctggccttacctc

SEQ ID NO: 5823754 - DNA, 25 bp, Homo sapien
ccggtctcgctaaggacccggcgga

SEQ ID NO: 5823755 - DNA, 25 bp, Homo sapien
tccgccgggtccttagcgagaccgg

SEQ ID NO: 5823756 - DNA, 25 bp, Homo sapien
gtccactcaacggatctgtgtcgaa

SEQ ID NO: 5823757 - DNA, 25 bp, Homo sapien
ttcgacacagatccgttgagtggac

SEQ ID NO: 5823758 - DNA, 25 bp, Homo sapien
tcaagaaaggtaggatcgtgacgaa

SEQ ID NO: 5823759 - DNA, 25 bp, Homo sapien
ttcgtcacgatcctacctttcttga

SEQ ID NO: 5823760 - DNA, 25 bp, Homo sapien
tttcattatgtaagaatctaagaag

SEQ ID NO: 5823761 - DNA, 25 bp, Homo sapien
cttcttagattcttacataatgaaa

SEQ ID NO: 5823762 - DNA, 25 bp, Homo sapien
ataccgtgactcaccctacatcaga

SEQ ID NO: 5823763 - DNA, 25 bp, Homo sapien
tctgatgtagggtgagtcacggtat

SEQ ID NO: 5823764 - DNA, 25 bp, Homo sapien
aatatcacttcgactatccccgtag

SEQ ID NO: 5823765 - DNA, 25 bp, Homo sapien
ctacggggatagtcgaagtgatatt

SEQ ID NO: 5823766 - DNA, 25 bp, Homo sapien
actgtcaaaactgggttcaacgaaa

SEQ ID NO: 5823767 - DNA, 25 bp, Homo sapien
tttcgttgaacccagttttgacagt

SEQ ID NO: 5823768 - DNA, 25 bp, Homo sapien
tcccgtcgtggacaggggagcctcc

SEQ ID NO: 5823769 - DNA, 25 bp, Homo sapien
ggaggctcccctgtccacgacggga

SEQ ID NO: 5823770 - DNA, 25 bp, Homo sapien
ctcggcgtccacgccgccgtcgtcg

SEQ ID NO: 5823771 - DNA, 25 bp, Homo sapien
cgacgacggcggcgtggacgccgag

SEQ ID NO: 5823772 - DNA, 25 bp, Homo sapien
tctccagacaaaaaggagcagtaac

SEQ ID NO: 5823773 - DNA, 25 bp, Homo sapien
gttactgctcctttttgtctggaga

SEQ ID NO: 5823774 - DNA, 25 bp, Homo sapien
gtttacatggccaaaaagtgacgtc

SEQ ID NO: 5823775 - DNA, 25 bp, Homo sapien
ttacatggccaaaaagtgacgtcaa

SEQ ID NO: 5823776 - DNA, 25 bp, Homo sapien
tcttccagatgctggtccgtcccag

SEQ ID NO: 5823777 - DNA, 25 bp, Homo sapien
aaaggccaccttgcacaagaggtgg

SEQ ID NO: 5823778 - DNA, 25 bp, Homo sapien
atgtacatcttccagatgctggtcc

SEQ ID NO: 5823779 - DNA, 25 bp, Homo sapien
gccacaaatagtttacatggccaaa

SEQ ID NO: 5823780 - DNA, 25 bp, Homo sapien
aggctcactgagtgcctctctgggg

SEQ ID NO: 5823781 - DNA, 25 bp, Homo sapien
acatggccaaaaagtgacgtcaaaa

SEQ ID NO: 5823782 - DNA, 25 bp, Homo sapien
tggcttgaggtctgcagggaaatcc

SEQ ID NO: 5823783 - DNA, 25 bp, Homo sapien
caggaggctcactgagtgcctctct

SEQ ID NO: 5823784 - DNA, 25 bp, Homo sapien
gaagctgtcaaaagcaaaccaaacc

SEQ ID NO: 5823785 - DNA, 25 bp, Homo sapien
acaaatagtttacatggccaaaaag

SEQ ID NO: 5823786 - DNA, 25 bp, Homo sapien
tacatcttccagatgctggtccgtc

SEQ ID NO: 5823787 - DNA, 25 bp, Homo sapien
aattgccacaaatagtttacatggc

SEQ ID NO: 5823788 - DNA, 25 bp, Homo sapien
cacaggaggctcactgagtgcctct

SEQ ID NO: 5823789 - DNA, 25 bp, Homo sapien
ctatgtacatcttccagatgctggt

SEQ ID NO: 5823790 - DNA, 25 bp, Homo sapien
cggtctgaacggtatcatcccgaac

SEQ ID NO: 5823791 - DNA, 25 bp, Homo sapien
gttcgggatgataccgttcagaccg

SEQ ID NO: 5823792 - DNA, 25 bp, Homo sapien
gagaaggcctaagagagttgtcccg

SEQ ID NO: 5823793 - DNA, 25 bp, Homo sapien
cgggacaactctcttaggccttctc

SEQ ID NO: 5823794 - DNA, 25 bp, Homo sapien
aacgagttcaggagcctaaggaagg

SEQ ID NO: 5823795 - DNA, 25 bp, Homo sapien
agaagaggaacatagagacagccag

SEQ ID NO: 5823796 - DNA, 25 bp, Homo sapien
ttgttctcgttaaatgcactcgacc

SEQ ID NO: 5823797 - DNA, 25 bp, Homo sapien
ttctctgtaccgtcccagctggggt

SEQ ID NO: 5823798 - DNA, 25 bp, Homo sapien
gtttggcatatcgaaaaggagacca

SEQ ID NO: 5823799 - DNA, 25 bp, Homo sapien
tttggcatatcgaaaaggagaccaa

SEQ ID NO: 5823800 - DNA, 25 bp, Homo sapien
acaagatttaggagcaaacgagttc

SEQ ID NO: 5823801 - DNA, 25 bp, Homo sapien
ggaacatagagacagccagaaagac

SEQ ID NO: 5823802 - DNA, 25 bp, Homo sapien
aacgttcttgttgttatgagccttt

SEQ ID NO: 5823803 - DNA, 25 bp, Homo sapien
cccgaatggacagaaagttgaggat

SEQ ID NO: 5823804 - DNA, 25 bp, Homo sapien
gagacagccagaaagacatggggaa

SEQ ID NO: 5823805 - DNA, 25 bp, Homo sapien
acccaaaattggtttggcatatcga

SEQ ID NO: 5823806 - DNA, 25 bp, Homo sapien
aggaggcccgaatggacagaaagtt

SEQ ID NO: 5823807 - DNA, 25 bp, Homo sapien
taaatgcactcgacccaaaattggt

SEQ ID NO: 5823808 - DNA, 25 bp, Homo sapien
tcgacccaaaattggtttggcatat

SEQ ID NO: 5823809 - DNA, 25 bp, Homo sapien
aaacgttcttgttgttatgagcctt

SEQ ID NO: 5823810 - DNA, 25 bp, Homo sapien
gtccacgggacggatcgtcgtcgta

SEQ ID NO: 5823811 - DNA, 25 bp, Homo sapien
tacgacgacgatccgtcccgtggac

SEQ ID NO: 5823812 - DNA, 25 bp, Homo sapien
ttctgaaaccaaggaggcaacgaga

SEQ ID NO: 5823813 - DNA, 25 bp, Homo sapien
ctctcttctgaaaccaaggaggcaa

SEQ ID NO: 5823814 - DNA, 25 bp, Homo sapien
ccagctttatatgacaatgaaaaag

SEQ ID NO: 5823815 - DNA, 25 bp, Homo sapien
ccgctctttctgcaattaggactag

SEQ ID NO: 5823816 - DNA, 25 bp, Homo sapien
tctcttctgaaaccaaggaggcaac

SEQ ID NO: 5823817 - DNA, 25 bp, Homo sapien
ctactctcttctgaaaccaaggagg

SEQ ID NO: 5823818 - DNA, 25 bp, Homo sapien
tactgatctgaagtgctcgtgggga

SEQ ID NO: 5823819 - DNA, 25 bp, Homo sapien
cttctgaaaccaaggaggcaacgag

SEQ ID NO: 5823820 - DNA, 25 bp, Homo sapien
aactgaccgctctttctgcaattag

SEQ ID NO: 5823821 - DNA, 25 bp, Homo sapien
tcttctgaaaccaaggaggcaacga

SEQ ID NO: 5823822 - DNA, 25 bp, Homo sapien
ctcttctgaaaccaaggaggcaacg

SEQ ID NO: 5823823 - DNA, 25 bp, Homo sapien
tgaatacaatactgatctgaagtgc

SEQ ID NO: 5823824 - DNA, 25 bp, Homo sapien
tttctgcaattaggactaggtactt

SEQ ID NO: 5823825 - DNA, 25 bp, Homo sapien
actctcttctgaaaccaaggaggca

SEQ ID NO: 5823826 - DNA, 25 bp, Homo sapien
aatacaatactgatctgaagtgctc

SEQ ID NO: 5823827 - DNA, 25 bp, Homo sapien
tactctcttctgaaaccaaggaggc

SEQ ID NO: 5823828 - DNA, 25 bp, Homo sapien
cgcctccccctgtcgagaagactct

SEQ ID NO: 5823829 - DNA, 25 bp, Homo sapien
agagtcttctcgacagggggaggcg

SEQ ID NO: 5823830 - DNA, 25 bp, Homo sapien
ccgtcagaccccacgtctattgtag

SEQ ID NO: 5823831 - DNA, 25 bp, Homo sapien
ctacaatagacgtggggtctgacgg

SEQ ID NO: 5823832 - DNA, 25 bp, Homo sapien
cataaaacctagtatctcgacgaag

SEQ ID NO: 5823833 - DNA, 25 bp, Homo sapien
cttcgtcgagatactaggttttatg

SEQ ID NO: 5823834 - DNA, 25 bp, Homo sapien
acggtggccttcgtcttcaggtttg

SEQ ID NO: 5823835 - DNA, 25 bp, Homo sapien
caaacctgaagacgaaggccaccgt

SEQ ID NO: 5823836 - DNA, 25 bp, Homo sapien
ccatcccggtcctattcgcagcaac

SEQ ID NO: 5823837 - DNA, 25 bp, Homo sapien
gttgctgcgaataggaccgggatgg

SEQ ID NO: 5823838 - DNA, 25 bp, Homo sapien
aatcaacaaatactaagaccataac

SEQ ID NO: 5823839 - DNA, 25 bp, Homo sapien
gttatggtcttagtatttgttgatt

SEQ ID NO: 5823840 - DNA, 25 bp, Homo sapien
gcctcgtcttcctcgggtcgcccgc

SEQ ID NO: 5823841 - DNA, 25 bp, Homo sapien
gcgggcgacccgaggaagacgaggc

SEQ ID NO: 5823842 - DNA, 25 bp, Homo sapien
tctatcctggttcgaaatgaaaagg

SEQ ID NO: 5823843 - DNA, 25 bp, Homo sapien
ccttttcatttcgaaccaggataga

SEQ ID NO: 5823844 - DNA, 25 bp, Homo sapien
ggaagaattagctctaaaactttcg

SEQ ID NO: 5823845 - DNA, 25 bp, Homo sapien
cgaaagttttagagctaattcttcc

SEQ ID NO: 5823846 - DNA, 25 bp, Homo sapien
ttctctaggaagaattagctctaaa

SEQ ID NO: 5823847 - DNA, 25 bp, Homo sapien
tttagagctaattcttcctagagaa

SEQ ID NO: 5823848 - DNA, 25 bp, Homo sapien
ggtctaactctgtccatcagtatta

SEQ ID NO: 5823849 - DNA, 25 bp, Homo sapien
taatactgatggacagagttagacc

SEQ ID NO: 5823850 - DNA, 25 bp, Homo sapien
ccacctttacttagtgaagtacatt

SEQ ID NO: 5823851 - DNA, 25 bp, Homo sapien
aatgtacttcactaagtaaaggtgg

SEQ ID NO: 5823852 - DNA, 25 bp, Homo sapien
cctcggacccgggtgctagggcgag

SEQ ID NO: 5823853 - DNA, 25 bp, Homo sapien
ctcgccctagcacccgggtccgagg

SEQ ID NO: 5823854 - DNA, 25 bp, Homo sapien
acgtcgtatagtattaggtgcagat

SEQ ID NO: 5823855 - DNA, 25 bp, Homo sapien
atctgcacctaatactatacgacgt

SEQ ID NO: 5823856 - DNA, 25 bp, Homo sapien
ggaccatctagtgcgggagcgcacc

SEQ ID NO: 5823857 - DNA, 25 bp, Homo sapien
ggtgcgctcccgcactagatggtcc

SEQ ID NO: 5823858 - DNA, 25 bp, Homo sapien
tatgagaacctcgagcagtcaccgg

SEQ ID NO: 5823859 - DNA, 25 bp, Homo sapien
ccggtgactgctcgaggttctcata

SEQ ID NO: 5823860 - DNA, 25 bp, Homo sapien
cctacctcccgcagtcgcgacggcg

SEQ ID NO: 5823861 - DNA, 25 bp, Homo sapien
cgccgtcgcgactgcgggaggtagg

SEQ ID NO: 5823862 - DNA, 25 bp, Homo sapien
ccacttactggtaaccatgcagaac

SEQ ID NO: 5823863 - DNA, 25 bp, Homo sapien
aaatgactatctcagggtaagccac

SEQ ID NO: 5823864 - DNA, 25 bp, Homo sapien
gtgtgcactgacatgaaccctggtt

SEQ ID NO: 5823865 - DNA, 25 bp, Homo sapien
ggaaacatcactcacagcaccagct

SEQ ID NO: 5823866 - DNA, 25 bp, Homo sapien
gaacacggtgagagggagccactta

SEQ ID NO: 5823867 - DNA, 25 bp, Homo sapien
gcaagtagagtgtacaatggagcca

SEQ ID NO: 5823868 - DNA, 25 bp, Homo sapien
acctggcatccctgagttgtatggg

SEQ ID NO: 5823869 - DNA, 25 bp, Homo sapien
ggcatccctgagttgtatgggaaac

SEQ ID NO: 5823870 - DNA, 25 bp, Homo sapien
actggtaaccatgcagaacatgcct

SEQ ID NO: 5823871 - DNA, 25 bp, Homo sapien
ttgctctcatttgacaatgaacacg

SEQ ID NO: 5823872 - DNA, 25 bp, Homo sapien
tcatttgacaatgaacacggtgaga

SEQ ID NO: 5823873 - DNA, 25 bp, Homo sapien
gggtaagccacctggcatccctgag

SEQ ID NO: 5823874 - DNA, 25 bp, Homo sapien
tccctgagttgtatgggaaacatca

SEQ ID NO: 5823875 - DNA, 25 bp, Homo sapien
tacaatggagccaacacctaaagtt

SEQ ID NO: 5823876 - DNA, 25 bp, Homo sapien
agggagccacttactggtaaccatg

SEQ ID NO: 5823877 - DNA, 25 bp, Homo sapien
tatctcagggtaagccacctggcat

SEQ ID NO: 5823878 - DNA, 25 bp, Homo sapien
taaatatatttctttcagttcgaat

SEQ ID NO: 5823879 - DNA, 25 bp, Homo sapien
attcgaactgaaagaaatatattta

SEQ ID NO: 5823880 - DNA, 25 bp, Homo sapien
ccagcctccggtgctcccctgtcgc

SEQ ID NO: 5823881 - DNA, 25 bp, Homo sapien
gcgacaggggagcaccggaggctgg

SEQ ID NO: 5823882 - DNA, 25 bp, Homo sapien
gatttgtagtgaacactcattaagt

SEQ ID NO: 5823883 - DNA, 25 bp, Homo sapien
acttaatgagtgttcactacaaatc

SEQ ID NO: 5823884 - DNA, 25 bp, Homo sapien
cgtcaagtaacttgtagatacataa

SEQ ID NO: 5823885 - DNA, 25 bp, Homo sapien
ttatgtatctacaagttacttgacg

SEQ ID NO: 5823886 - DNA, 25 bp, Homo sapien
tccgctcggtcgtgccgtcacgagt

SEQ ID NO: 5823887 - DNA, 25 bp, Homo sapien
actcgtgacggcacgaccgagcgga

SEQ ID NO: 5823888 - DNA, 25 bp, Homo sapien
gtccgctcggtcgtgccgtcacgag

SEQ ID NO: 5823889 - DNA, 25 bp, Homo sapien
ctcgtgacggcacgaccgagcggac

SEQ ID NO: 5823890 - DNA, 25 bp, Homo sapien
gtcggtcatccgaccctaaaggacg

SEQ ID NO: 5823891 - DNA, 25 bp, Homo sapien
cgtcctttagggtcggatgaccgac

SEQ ID NO: 5823892 - DNA, 25 bp, Homo sapien
agtcaagttctagtttcgtaattag

SEQ ID NO: 5823893 - DNA, 25 bp, Homo sapien
ctaattacgaaactagaacttgact

SEQ ID NO: 5823894 - DNA, 25 bp, Homo sapien
gggcgcgctcgtggcggccggcgaa

SEQ ID NO: 5823895 - DNA, 25 bp, Homo sapien
ttcgccggccgccacgagcgcgccc

SEQ ID NO: 5823896 - DNA, 25 bp, Homo sapien
ttaggaaagtacaagtatacatatg

SEQ ID NO: 5823897 - DNA, 25 bp, Homo sapien
catatgtatacttgtactttcctaa

SEQ ID NO: 5823898 - DNA, 25 bp, Homo sapien
ttttacataactacgtaaggaggta

SEQ ID NO: 5823899 - DNA, 25 bp, Homo sapien
tacctccttacgtagttatgtaaaa

SEQ ID NO: 5823900 - DNA, 25 bp, Homo sapien
cgccgcccctggaacggtggtcatg

SEQ ID NO: 5823901 - DNA, 25 bp, Homo sapien
catgaccaccgttccaggggcggcg

SEQ ID NO: 5823902 - DNA, 25 bp, Homo sapien
attctctagtagttgaaagccaaag

SEQ ID NO: 5823903 - DNA, 25 bp, Homo sapien
ctttggctttcaactactagagaat

SEQ ID NO: 5823904 - DNA, 25 bp, Homo sapien
ggtcgaaaacaagcaggatcatcgg

SEQ ID NO: 5823905 - DNA, 25 bp, Homo sapien
ccgatgatcctgcttgttttcgacc

SEQ ID NO: 5823906 - DNA, 25 bp, Homo sapien
ttgttcgcagcccttgttcggccct

SEQ ID NO: 5823907 - DNA, 25 bp, Homo sapien
agggccgaacaagggctgcgaacaa

SEQ ID NO: 5823908 - DNA, 25 bp, Homo sapien
tgtggagggtctaccagtgagcccc

SEQ ID NO: 5823909 - DNA, 25 bp, Homo sapien
ggggctcactggtagaccctccaca

SEQ ID NO: 5823910 - DNA, 25 bp, Homo sapien
aaaacatcattcaagacaattctat

SEQ ID NO: 5823911 - DNA, 25 bp, Homo sapien
atagaattgtcttgaatgatgtttt

SEQ ID NO: 5823912 - DNA, 25 bp, Homo sapien
cgtcgtgaccgctttcgttccgtgg

SEQ ID NO: 5823913 - DNA, 25 bp, Homo sapien
ccacggaacgaaagcggtcacgacg

SEQ ID NO: 5823914 - DNA, 25 bp, Homo sapien
agtgttggtttcgaatttcgacaac

SEQ ID NO: 5823915 - DNA, 25 bp, Homo sapien
gttgtcgaaattcgaaaccaacact

SEQ ID NO: 5823916 - DNA, 25 bp, Homo sapien
aaatcgtccaccgagggaggagatc

SEQ ID NO: 5823917 - DNA, 25 bp, Homo sapien
gatctcctccctcggtggacgattt

SEQ ID NO: 5823918 - DNA, 25 bp, Homo sapien
gtccggaaggcccggaagggctcag

SEQ ID NO: 5823919 - DNA, 25 bp, Homo sapien
ctgagcccttccgggccttccggac

SEQ ID NO: 5823920 - DNA, 25 bp, Homo sapien
ctccccctgcgtcggtccggaaggc

SEQ ID NO: 5823921 - DNA, 25 bp, Homo sapien
gccttccggaccgacgcagggggag

SEQ ID NO: 5823922 - DNA, 25 bp, Homo sapien
tcccagagacgacgtggaagtcccg

SEQ ID NO: 5823923 - DNA, 25 bp, Homo sapien
cgggacttccacgtcgtctctggga

SEQ ID NO: 5823924 - DNA, 25 bp, Homo sapien
aaggtgttatgacaaagtacgtgac

SEQ ID NO: 5823925 - DNA, 25 bp, Homo sapien
gtcacgtactttgtcataacacctt

SEQ ID NO: 5823926 - DNA, 25 bp, Homo sapien
gtcgtgtctagtgaaagtagtttgt

SEQ ID NO: 5823927 - DNA, 25 bp, Homo sapien
acaaactactttcactagacacgac

SEQ ID NO: 5823928 - DNA, 25 bp, Homo sapien
ggtccgtgcaataatttgtacacgt

SEQ ID NO: 5823929 - DNA, 25 bp, Homo sapien
acgtgtacaaattattgcacggacc

SEQ ID NO: 5823930 - DNA, 25 bp, Homo sapien
tattcccatgtgcacctaagggcct

SEQ ID NO: 5823931 - DNA, 25 bp, Homo sapien
aggcccttaggtgcacatgggaata

SEQ ID NO: 5823932 - DNA, 25 bp, Homo sapien
gtgactcgagtcaacgaaccggcgt

SEQ ID NO: 5823933 - DNA, 25 bp, Homo sapien
acgccggttcgttgactcgagtcac

SEQ ID NO: 5823934 - DNA, 25 bp, Homo sapien
aaatcttcacttacagttatgatag

SEQ ID NO: 5823935 - DNA, 25 bp, Homo sapien
ctatcataactgtaagtgaagattt

SEQ ID NO: 5823936 - DNA, 25 bp, Homo sapien
agtagagggaccgtgctgcgtccgg

SEQ ID NO: 5823937 - DNA, 25 bp, Homo sapien
ccggacgcagcacggtccctctact

SEQ ID NO: 5823938 - DNA, 25 bp, Homo sapien
tcccaagttaggtgagcccttgggc

SEQ ID NO: 5823939 - DNA, 25 bp, Homo sapien
cacagataaggcaaagagctgaggg

SEQ ID NO: 5823940 - DNA, 25 bp, Homo sapien
cagaaaagcagatttgtgtccttca

SEQ ID NO: 5823941 - DNA, 25 bp, Homo sapien
gagctgagctggtggttaccccatg

SEQ ID NO: 5823942 - DNA, 25 bp, Homo sapien
agagctgagctggtggttaccccat

SEQ ID NO: 5823943 - DNA, 25 bp, Homo sapien
ggagaccgtgcaaaatggcagtcta

SEQ ID NO: 5823944 - DNA, 25 bp, Homo sapien
acagtgacacagataaggcaaagag

SEQ ID NO: 5823945 - DNA, 25 bp, Homo sapien
agtgacacagataaggcaaagagct

SEQ ID NO: 5823946 - DNA, 25 bp, Homo sapien
gggcagaaaagcagatttgtgtcct

SEQ ID NO: 5823947 - DNA, 25 bp, Homo sapien
acaactgaactaacggaatggctta

SEQ ID NO: 5823948 - DNA, 25 bp, Homo sapien
gcaaaatggcagtctaacagaaaat

SEQ ID NO: 5823949 - DNA, 25 bp, Homo sapien
tcccggcaaccctggcagagtgtga

SEQ ID NO: 5823950 - DNA, 25 bp, Homo sapien
gggagaccgtgcaaaatggcagtct

SEQ ID NO: 5823951 - DNA, 25 bp, Homo sapien
ggtgtggacaccaaatcccgcaggg

SEQ ID NO: 5823952 - DNA, 25 bp, Homo sapien
ccgtgggcatccttgccctggctgg

SEQ ID NO: 5823953 - DNA, 25 bp, Homo sapien
acggaatggcttaatcagatagctc

SEQ ID NO: 5823954 - DNA, 25 bp, Homo sapien
gactgcgaaggtgggacgttgagaa

SEQ ID NO: 5823955 - DNA, 25 bp, Homo sapien
ttctcaacgtcccaccttcgcagtc

SEQ ID NO: 5823956 - DNA, 25 bp, Homo sapien
accacgacggtcatggtaagcgagc

SEQ ID NO: 5823957 - DNA, 25 bp, Homo sapien
gctcgcttaccatgaccgtcgtggt

SEQ ID NO: 5823958 - DNA, 25 bp, Homo sapien
tatatccatagaaatgtaaacggtg

SEQ ID NO: 5823959 - DNA, 25 bp, Homo sapien
caccgtttacatttctatggatata

SEQ ID NO: 5823960 - DNA, 25 bp, Homo sapien
accgagggccggagactgcaggggg

SEQ ID NO: 5823961 - DNA, 25 bp, Homo sapien
ccccctgcagtctccggccctcggt

SEQ ID NO: 5823962 - DNA, 25 bp, Homo sapien
cccggtgcacacgaggcccgccccg

SEQ ID NO: 5823963 - DNA, 25 bp, Homo sapien
cggggcgggcctcgtgtgcaccggg

SEQ ID NO: 5823964 - DNA, 25 bp, Homo sapien
gtcgggaccgtcagacaactgatac

SEQ ID NO: 5823965 - DNA, 25 bp, Homo sapien
gtatcagttgtctgacggtcccgac

SEQ ID NO: 5823966 - DNA, 25 bp, Homo sapien
gacccctccagaaccttgggaggct

SEQ ID NO: 5823967 - DNA, 25 bp, Homo sapien
agcctcccaaggttctggaggggtc

SEQ ID NO: 5823968 - DNA, 25 bp, Homo sapien
ccggtccggcacacatttaggaggt

SEQ ID NO: 5823969 - DNA, 25 bp, Homo sapien
acctcctaaatgtgtgccggaccgg

SEQ ID NO: 5823970 - DNA, 25 bp, Homo sapien
gactcatcacatagattgtcgacgg

SEQ ID NO: 5823971 - DNA, 25 bp, Homo sapien
ccgtcgacaatctatgtgatgagtc

SEQ ID NO: 5823972 - DNA, 25 bp, Homo sapien
gggtcagagggcgggccacgaagag

SEQ ID NO: 5823973 - DNA, 25 bp, Homo sapien
ctcttcgtggcccgccctctgaccc

SEQ ID NO: 5823974 - DNA, 25 bp, Homo sapien
tgtttgtctgtttttattttataag

SEQ ID NO: 5823975 - DNA, 25 bp, Homo sapien
cttataaaataaaaacagacaaaca

SEQ ID NO: 5823976 - DNA, 25 bp, Homo sapien
tcgccggcgctaccgccgttgccga

SEQ ID NO: 5823977 - DNA, 25 bp, Homo sapien
tcggcaacggcggtagcgccggcga

SEQ ID NO: 5823978 - DNA, 25 bp, Homo sapien
ccgttctactgcagacccacaggaa

SEQ ID NO: 5823979 - DNA, 25 bp, Homo sapien
ttcctgtgggtctgcagtagaacgg

SEQ ID NO: 5823980 - DNA, 25 bp, Homo sapien
tcgtaaagattttgatttgagtaat

SEQ ID NO: 5823981 - DNA, 25 bp, Homo sapien
attactcaaatcaaaatctttacga

SEQ ID NO: 5823982 - DNA, 25 bp, Homo sapien
gcggtccgagcccaggacggtgacg

SEQ ID NO: 5823983 - DNA, 25 bp, Homo sapien
cgtcaccgtcctgggctcggaccgc

SEQ ID NO: 5823984 - DNA, 25 bp, Homo sapien
acttctatgatcactaaaaaggtaa

SEQ ID NO: 5823985 - DNA, 25 bp, Homo sapien
ttacctttttagtgatcatagaagt

SEQ ID NO: 5823986 - DNA, 25 bp, Homo sapien
gacgactcccgccacgccccgcaac

SEQ ID NO: 5823987 - DNA, 25 bp, Homo sapien
gttgcggggcgtggcgggagtcgtc

SEQ ID NO: 5823988 - DNA, 25 bp, Homo sapien
gcgaccggttccgcgccgacgactc

SEQ ID NO: 5823989 - DNA, 25 bp, Homo sapien
gagtcgtcggcgcggaaccggtcgc

SEQ ID NO: 5823990 - DNA, 25 bp, Homo sapien
cgtgagccggaagtcttttattaag

SEQ ID NO: 5823991 - DNA, 25 bp, Homo sapien
cttaataaaagacttccggctcacg

SEQ ID NO: 5823992 - DNA, 25 bp, Homo sapien
acggaacgtccactcattgcatttg

SEQ ID NO: 5823993 - DNA, 25 bp, Homo sapien
caaatgcaatgagtggacgttccgt

SEQ ID NO: 5823994 - DNA, 25 bp, Homo sapien
aaaagatgcaacctttactaataga

SEQ ID NO: 5823995 - DNA, 25 bp, Homo sapien
tctattagtaaaggttgcatctttt

SEQ ID NO: 5823996 - DNA, 25 bp, Homo sapien
agtgtgtatcgaaaggcatagagcc

SEQ ID NO: 5823997 - DNA, 25 bp, Homo sapien
ggctctatgcctttcgatacacact

SEQ ID NO: 5823998 - DNA, 25 bp, Homo sapien
aagacttaatcgagagacacctaac

SEQ ID NO: 5823999 - DNA, 25 bp, Homo sapien
gttaggtgtctctcgattaagtctt

SEQ ID NO: 5824000 - DNA, 25 bp, Homo sapien
tgtgccgactatgccgactggggac

SEQ ID NO: 5824001 - DNA, 25 bp, Homo sapien
gtccccagtcggcatagtcggcaca

SEQ ID NO: 5824002 - DNA, 25 bp, Homo sapien
actccctcgcccactatttgtgtag

SEQ ID NO: 5824003 - DNA, 25 bp, Homo sapien
ctacacaaatagtgggcgagggagt

SEQ ID NO: 5824004 - DNA, 25 bp, Homo sapien
ggacggccgggaacgtccaggacac

SEQ ID NO: 5824005 - DNA, 25 bp, Homo sapien
gtgtcctggacgttcccggccgtcc

SEQ ID NO: 5824006 - DNA, 25 bp, Homo sapien
gacggccgggaacgtccaggacacg

SEQ ID NO: 5824007 - DNA, 25 bp, Homo sapien
cgtgtcctggacgttcccggccgtc

SEQ ID NO: 5824008 - DNA, 25 bp, Homo sapien
acgtctcgggcacccaggtccgacg

SEQ ID NO: 5824009 - DNA, 25 bp, Homo sapien
cgtcggacctgggtgcccgagacgt

SEQ ID NO: 5824010 - DNA, 25 bp, Homo sapien
tataggtgctgaccctttccttctt

SEQ ID NO: 5824011 - DNA, 25 bp, Homo sapien
aagaaggaaagggtcagcacctata

SEQ ID NO: 5824012 - DNA, 25 bp, Homo sapien
taacttccggctggatgacaaatgc

SEQ ID NO: 5824013 - DNA, 25 bp, Homo sapien
caatactccatttgactggttcgag

SEQ ID NO: 5824014 - DNA, 25 bp, Homo sapien
accatacaagtgactccctcaggca

SEQ ID NO: 5824015 - DNA, 25 bp, Homo sapien
gtgacccagcctgttccatagccaa

SEQ ID NO: 5824016 - DNA, 25 bp, Homo sapien
aagtgtgctttaacttccggctgga

SEQ ID NO: 5824017 - DNA, 25 bp, Homo sapien
agtttctcagtgcagacatgtggct

SEQ ID NO: 5824018 - DNA, 25 bp, Homo sapien
aaatgcagtttctcagtgcagacat

SEQ ID NO: 5824019 - DNA, 25 bp, Homo sapien
catacaagtgactccctcaggcagc

SEQ ID NO: 5824020 - DNA, 25 bp, Homo sapien
agtgcagacatgtggctcgcaatgg

SEQ ID NO: 5824021 - DNA, 25 bp, Homo sapien
tggagacacagactgggacctccct

SEQ ID NO: 5824022 - DNA, 25 bp, Homo sapien
gctttattccatagaacaggatggg

SEQ ID NO: 5824023 - DNA, 25 bp, Homo sapien
ggtggccaccctagtgtgacgtgca

SEQ ID NO: 5824024 - DNA, 25 bp, Homo sapien
tccatttgactggttcgaggcagag

SEQ ID NO: 5824025 - DNA, 25 bp, Homo sapien
ttaagcctgatggagacacagactg

SEQ ID NO: 5824026 - DNA, 25 bp, Homo sapien
tcacagcagcaagaacgtttattat

SEQ ID NO: 5824027 - DNA, 25 bp, Homo sapien
ccggctggatgacaaatgctactga

SEQ ID NO: 5824028 - DNA, 25 bp, Homo sapien
ttgatacgattagtgtaaatatagt

SEQ ID NO: 5824029 - DNA, 25 bp, Homo sapien
actatatttacactaatcgtatcaa

SEQ ID NO: 5824030 - DNA, 25 bp, Homo sapien
acattcggaggttctctttctttat

SEQ ID NO: 5824031 - DNA, 25 bp, Homo sapien
ataaagaaagagaacctccgaatgt

SEQ ID NO: 5824032 - DNA, 25 bp, Homo sapien
caaaaggatcacctgtgacaactgt

SEQ ID NO: 5824033 - DNA, 25 bp, Homo sapien
acagttgtcacaggtgatccttttg

SEQ ID NO: 5824034 - DNA, 25 bp, Homo sapien
gaaactgaactacaagtagattaaa

SEQ ID NO: 5824035 - DNA, 25 bp, Homo sapien
tttaatctacttgtagttcagtttc

SEQ ID NO: 5824036 - DNA, 25 bp, Homo sapien
cctcaccggggctgaccactggagg

SEQ ID NO: 5824037 - DNA, 25 bp, Homo sapien
cctccagtggtcagccccggtgagg

SEQ ID NO: 5824038 - DNA, 25 bp, Homo sapien
gtactgccaacagacgacagtgcct

SEQ ID NO: 5824039 - DNA, 25 bp, Homo sapien
aggcactgtcgtctgttggcagtac

SEQ ID NO: 5824040 - DNA, 25 bp, Homo sapien
aagtttctgactcaactctagagac

SEQ ID NO: 5824041 - DNA, 25 bp, Homo sapien
gtctctagagttgagtcagaaactt

SEQ ID NO: 5824042 - DNA, 25 bp, Homo sapien
tcgaaatccaatacaagtagtctag

SEQ ID NO: 5824043 - DNA, 25 bp, Homo sapien
ctagactacttgtattggatttcga

SEQ ID NO: 5824044 - DNA, 25 bp, Homo sapien
agaggtccatctgcagagcccacag

SEQ ID NO: 5824045 - DNA, 25 bp, Homo sapien
agccatttgggagaagggcatctct

SEQ ID NO: 5824046 - DNA, 25 bp, Homo sapien
cactggaaaggagacgaggactcag

SEQ ID NO: 5824047 - DNA, 25 bp, Homo sapien
agacgaggactcaggctgggccttc

SEQ ID NO: 5824048 - DNA, 25 bp, Homo sapien
gccagagtggcaagtgctcaaagcg

SEQ ID NO: 5824049 - DNA, 25 bp, Homo sapien
agcccacaggtcatgggaaacatgt

SEQ ID NO: 5824050 - DNA, 25 bp, Homo sapien
tcaaagcgagacacaaagtgctgtg

SEQ ID NO: 5824051 - DNA, 25 bp, Homo sapien
gcagcaccagccagagtggcaagtg

SEQ ID NO: 5824052 - DNA, 25 bp, Homo sapien
ctgggccttccaggagggaagccat

SEQ ID NO: 5824053 - DNA, 25 bp, Homo sapien
ccatttgggagaagggcatctctag

SEQ ID NO: 5824054 - DNA, 25 bp, Homo sapien
aagcactggaaaggagacgaggact

SEQ ID NO: 5824055 - DNA, 25 bp, Homo sapien
cttccaggagggaagccatttggga

SEQ ID NO: 5824056 - DNA, 25 bp, Homo sapien
tggcagcagcaccagccagagtggc

SEQ ID NO: 5824057 - DNA, 25 bp, Homo sapien
gcaccagccagagtggcaagtgctc

SEQ ID NO: 5824058 - DNA, 25 bp, Homo sapien
caccagccagagtggcaagtgctca

SEQ ID NO: 5824059 - DNA, 25 bp, Homo sapien
tagcggagagaggtccatctgcaga

SEQ ID NO: 5824060 - DNA, 25 bp, Homo sapien
gtctgaacaaacgaatagaactgac

SEQ ID NO: 5824061 - DNA, 25 bp, Homo sapien
gtcagttctattcgtttgttcagac

SEQ ID NO: 5824062 - DNA, 25 bp, Homo sapien
agaagaattgagcatttcacctacg

SEQ ID NO: 5824063 - DNA, 25 bp, Homo sapien
cgtaggtgaaatgctcaattcttct

SEQ ID NO: 5824064 - DNA, 25 bp, Homo sapien
gtcgaaggaccatgtcctttgccac

SEQ ID NO: 5824065 - DNA, 25 bp, Homo sapien
gtggcaaaggacatggtccttcgac

SEQ ID NO: 5824066 - DNA, 25 bp, Homo sapien
ccaaaatcaacgtctaaataactct

SEQ ID NO: 5824067 - DNA, 25 bp, Homo sapien
agagttatttagacgttgattttgg

SEQ ID NO: 5824068 - DNA, 25 bp, Homo sapien
gatcatcagtttatggcttatgtct

SEQ ID NO: 5824069 - DNA, 25 bp, Homo sapien
agacataagccataaactgatgatc

SEQ ID NO: 5824070 - DNA, 25 bp, Homo sapien
aagacatcttttattgttgtctaaa

SEQ ID NO: 5824071 - DNA, 25 bp, Homo sapien
tttagacaacaataaaagatgtctt

SEQ ID NO: 5824072 - DNA, 25 bp, Homo sapien
cgttccgagcggtcgaaagtctcag

SEQ ID NO: 5824073 - DNA, 25 bp, Homo sapien
ctgagactttcgaccgctcggaacg

SEQ ID NO: 5824074 - DNA, 25 bp, Homo sapien
ggcgaggagacctcggcgaccccga

SEQ ID NO: 5824075 - DNA, 25 bp, Homo sapien
tcggggtcgccgaggtctcctcgcc

SEQ ID NO: 5824076 - DNA, 25 bp, Homo sapien
tactcttcctcggttttggactcag

SEQ ID NO: 5824077 - DNA, 25 bp, Homo sapien
ctgagtccaaaaccgaggaagagta

SEQ ID NO: 5824078 - DNA, 25 bp, Homo sapien
actccgctcgctacccgacccgatg

SEQ ID NO: 5824079 - DNA, 25 bp, Homo sapien
catcgggtcgggtagcgagcggagt

SEQ ID NO: 5824080 - DNA, 25 bp, Homo sapien
acaaacacatcaattatctataaag

SEQ ID NO: 5824081 - DNA, 25 bp, Homo sapien
ctttatagataattgatgtgtttgt

SEQ ID NO: 5824082 - DNA, 25 bp, Homo sapien
gactctcaaccttcatcgttgtcgg

SEQ ID NO: 5824083 - DNA, 25 bp, Homo sapien
ccgacaacgatgaaggttgagagtc

SEQ ID NO: 5824084 - DNA, 25 bp, Homo sapien
aagaccggtacaagccccttgcctg

SEQ ID NO: 5824085 - DNA, 25 bp, Homo sapien
caggcaaggggcttgtaccggtctt

SEQ ID NO: 5824086 - DNA, 25 bp, Homo sapien
gaaactggagatgcagacaaagggt

SEQ ID NO: 5824087 - DNA, 25 bp, Homo sapien
accctttgtctgcatctccagtttc

SEQ ID NO: 5824088 - DNA, 25 bp, Homo sapien
cgagtataccactgaatatctttct

SEQ ID NO: 5824089 - DNA, 25 bp, Homo sapien
agaaagatattcagtggtatactcg

SEQ ID NO: 5824090 - DNA, 25 bp, Homo sapien
gaggtctcgatcaggcctcctgtcc

SEQ ID NO: 5824091 - DNA, 25 bp, Homo sapien
ggacaggaggcctgatcgagacctc

SEQ ID NO: 5824092 - DNA, 25 bp, Homo sapien
ggtgccggagctgggtccccacggc

SEQ ID NO: 5824093 - DNA, 25 bp, Homo sapien
gccgtggggacccagctccggcacc

SEQ ID NO: 5824094 - DNA, 25 bp, Homo sapien
acccgagcggcctcgggtcgtctga

SEQ ID NO: 5824095 - DNA, 25 bp, Homo sapien
tcagacgacccgaggccgctcgggt

SEQ ID NO: 5824096 - DNA, 25 bp, Homo sapien
ggcgccacgcgcactcgccggtcgt

SEQ ID NO: 5824097 - DNA, 25 bp, Homo sapien
acgaccggcgagtgcgcgtggcgcc

SEQ ID NO: 5824098 - DNA, 25 bp, Homo sapien
gtcccctgtcgctggcggatccggt

SEQ ID NO: 5824099 - DNA, 25 bp, Homo sapien
accggatccgccagcgacaggggac

SEQ ID NO: 5824100 - DNA, 25 bp, Homo sapien
gcagtcacatcattatgactgtgta

SEQ ID NO: 5824101 - DNA, 25 bp, Homo sapien
agcagtcacatcattatgactgtgt

SEQ ID NO: 5824102 - DNA, 25 bp, Homo sapien
taggggctaagcagtcacatcatta

SEQ ID NO: 5824103 - DNA, 25 bp, Homo sapien
ggggctaagcagtcacatcattatg

SEQ ID NO: 5824104 - DNA, 25 bp, Homo sapien
aggggctaagcagtcacatcattat

SEQ ID NO: 5824105 - DNA, 25 bp, Homo sapien
tatttaggggctaagcagtcacatc

SEQ ID NO: 5824106 - DNA, 25 bp, Homo sapien
ccatattgtcccagagtagttacca

SEQ ID NO: 5824107 - DNA, 25 bp, Homo sapien
cctcccatattgtcccagagtagtt

SEQ ID NO: 5824108 - DNA, 25 bp, Homo sapien
catattgtcccagagtagttaccat

SEQ ID NO: 5824109 - DNA, 25 bp, Homo sapien
ttctgccctagaatgattgcctaac

SEQ ID NO: 5824110 - DNA, 25 bp, Homo sapien
atatttaggggctaagcagtcacat

SEQ ID NO: 5824111 - DNA, 25 bp, Homo sapien
ttctttctgccctagaatgattgcc

SEQ ID NO: 5824112 - DNA, 25 bp, Homo sapien
ctgtacttctttctgccctagaatg

SEQ ID NO: 5824113 - DNA, 25 bp, Homo sapien
tgtacttctttctgccctagaatga

SEQ ID NO: 5824114 - DNA, 25 bp, Homo sapien
attgtcccagagtagttaccatatt

SEQ ID NO: 5824115 - DNA, 25 bp, Homo sapien
ctccttgttgagaaaaacagtgtat

SEQ ID NO: 5824116 - DNA, 25 bp, Homo sapien
ccatctacggctcccggggtcctgt

SEQ ID NO: 5824117 - DNA, 25 bp, Homo sapien
acaggaccccgggagccgtagatgg

SEQ ID NO: 5824118 - DNA, 25 bp, Homo sapien
agttaagaaatatcataagtagttg

SEQ ID NO: 5824119 - DNA, 25 bp, Homo sapien
caactacttatgatatttcttaact

SEQ ID NO: 5824120 - DNA, 25 bp, Homo sapien
aacaagggacagttgttcggacgac

SEQ ID NO: 5824121 - DNA, 25 bp, Homo sapien
gtcgtccgaacaactgtcccttgtt

SEQ ID NO: 5824122 - DNA, 25 bp, Homo sapien
gaagtcacctcgtcgccggtaaaga

SEQ ID NO: 5824123 - DNA, 25 bp, Homo sapien
tctttaccggcgacgaggtgacttc

SEQ ID NO: 5824124 - DNA, 25 bp, Homo sapien
cattaacatgatctaagtcacatat

SEQ ID NO: 5824125 - DNA, 25 bp, Homo sapien
atatgtgacttagatcatgttaatg

SEQ ID NO: 5824126 - DNA, 25 bp, Homo sapien
gtcacattaacatgatctaagtcac

SEQ ID NO: 5824127 - DNA, 25 bp, Homo sapien
gtgacttagatcatgttaatgtgac

SEQ ID NO: 5824128 - DNA, 25 bp, Homo sapien
gactcctacctcgtccacaccgaca

SEQ ID NO: 5824129 - DNA, 25 bp, Homo sapien
tgtcggtgtggacgaggtaggagtc

SEQ ID NO: 5824130 - DNA, 25 bp, Homo sapien
accaccaaagaacagtttatataac

SEQ ID NO: 5824131 - DNA, 25 bp, Homo sapien
gttatataaactgttctttggtggt

SEQ ID NO: 5824132 - DNA, 25 bp, Homo sapien
tgaactgtgtcggccggtcccgtcg

SEQ ID NO: 5824133 - DNA, 25 bp, Homo sapien
cgacgggaccggccgacacagttca

SEQ ID NO: 5824134 - DNA, 25 bp, Homo sapien
taacatgtcatattgaaaaggttta

SEQ ID NO: 5824135 - DNA, 25 bp, Homo sapien
taaaccttttcaatatgacatgtta

SEQ ID NO: 5824136 - DNA, 25 bp, Homo sapien
cgacgcgttctctcgtcgactgaag

SEQ ID NO: 5824137 - DNA, 25 bp, Homo sapien
cttcagtcgacgagagaacgcgtcg

SEQ ID NO: 5824138 - DNA, 25 bp, Homo sapien
ggtacccaccagacgtctacacggt

SEQ ID NO: 5824139 - DNA, 25 bp, Homo sapien
accgtgtagacgtctggtgggtacc

SEQ ID NO: 5824140 - DNA, 25 bp, Homo sapien
gacacaatgatcgtgccgtccacaa

SEQ ID NO: 5824141 - DNA, 25 bp, Homo sapien
ttgtggacggcacgatcattgtgtc

SEQ ID NO: 5824142 - DNA, 25 bp, Homo sapien
gtgtgggttccaaataaaatctacc

SEQ ID NO: 5824143 - DNA, 25 bp, Homo sapien
ggtagattttatttggaacccacac

SEQ ID NO: 5824144 - DNA, 25 bp, Homo sapien
ctgagggcctccgacacctccgtcg

SEQ ID NO: 5824145 - DNA, 25 bp, Homo sapien
cgacggaggtgtcggaggccctcag

SEQ ID NO: 5824146 - DNA, 25 bp, Homo sapien
gtctgcaagtctgcgagcctgttcg

SEQ ID NO: 5824147 - DNA, 25 bp, Homo sapien
cgaacaggctcgcagacttgcagac

SEQ ID NO: 5824148 - DNA, 25 bp, Homo sapien
ccgtcccgatcagactacccaccca

SEQ ID NO: 5824149 - DNA, 25 bp, Homo sapien
tgggtgggtagtctgatcgggacgg

SEQ ID NO: 5824150 - DNA, 25 bp, Homo sapien
ctcaacggacgacaacctctttcgg

SEQ ID NO: 5824151 - DNA, 25 bp, Homo sapien
ccgaaagaggttgtcgtccgttgag

SEQ ID NO: 5824152 - DNA, 25 bp, Homo sapien
tcccgtggtggtgctgtcagcaccg

SEQ ID NO: 5824153 - DNA, 25 bp, Homo sapien
cggtgctgacagcaccaccacggga

SEQ ID NO: 5824154 - DNA, 25 bp, Homo sapien
ccgtagtgacatcgtacctgaccag

SEQ ID NO: 5824155 - DNA, 25 bp, Homo sapien
ctggtcaggtacgatgtcactacgg

SEQ ID NO: 5824156 - DNA, 25 bp, Homo sapien
tcgtcgcctcacacgacaggggtcg

SEQ ID NO: 5824157 - DNA, 25 bp, Homo sapien
cgacccctgtcgtgtgaggcgacga

SEQ ID NO: 5824158 - DNA, 25 bp, Homo sapien
ctacttctactagttgatttccttt

SEQ ID NO: 5824159 - DNA, 25 bp, Homo sapien
aaaggaaatcaactagtagaagtag

SEQ ID NO: 5824160 - DNA, 25 bp, Homo sapien
tctcgtctccccgacaccgtcgtcg

SEQ ID NO: 5824161 - DNA, 25 bp, Homo sapien
cgacgacggtgtcggggagacgaga

SEQ ID NO: 5824162 - DNA, 25 bp, Homo sapien
agttggagatcccttaggaggaacc

SEQ ID NO: 5824163 - DNA, 25 bp, Homo sapien
ggttcctcctaagggatctccaact

SEQ ID NO: 5824164 - DNA, 25 bp, Homo sapien
atttctcgtagtactaattttaatg

SEQ ID NO: 5824165 - DNA, 25 bp, Homo sapien
cattaaaattagtactacgagaaat

SEQ ID NO: 5824166 - DNA, 25 bp, Homo sapien
tatttctcgtagtactaattttaat

SEQ ID NO: 5824167 - DNA, 25 bp, Homo sapien
attaaaattagtactacgagaaata

SEQ ID NO: 5824168 - DNA, 25 bp, Homo sapien
aatacatatttctcgtagtactaat

SEQ ID NO: 5824169 - DNA, 25 bp, Homo sapien
attagtactacgagaaatatgtatt

SEQ ID NO: 5824170 - DNA, 25 bp, Homo sapien
ctaaaagttgtttttgctagagtag

SEQ ID NO: 5824171 - DNA, 25 bp, Homo sapien
ctactctagcaaaaacaacttttag

SEQ ID NO: 5824172 - DNA, 25 bp, Homo sapien
ttgtgtattatcgaacattatactt

SEQ ID NO: 5824173 - DNA, 25 bp, Homo sapien
aagtataatgttcgataatacacaa

SEQ ID NO: 5824174 - DNA, 25 bp, Homo sapien
taatttgtgtattatcgaacattat

SEQ ID NO: 5824175 - DNA, 25 bp, Homo sapien
ataatgttcgataatacacaaatta

SEQ ID NO: 5824176 - DNA, 25 bp, Homo sapien
cggctcgggcgtgtgacgagggtcc

SEQ ID NO: 5824177 - DNA, 25 bp, Homo sapien
ggaccctcgtcacacgcccgagccg

SEQ ID NO: 5824178 - DNA, 25 bp, Homo sapien
ggaccggctcggtcagggccccgag

SEQ ID NO: 5824179 - DNA, 25 bp, Homo sapien
ctcggggccctgaccgagccggtcc

SEQ ID NO: 5824180 - DNA, 25 bp, Homo sapien
tggtcaatgtcatatacatcattaa

SEQ ID NO: 5824181 - DNA, 25 bp, Homo sapien
ttaatgatgtatatgacattgacca

SEQ ID NO: 5824182 - DNA, 25 bp, Homo sapien
ctggtgcctgacagggtgagccatc

SEQ ID NO: 5824183 - DNA, 25 bp, Homo sapien
agcctgtgcagaagtagcagttcag

SEQ ID NO: 5824184 - DNA, 25 bp, Homo sapien
aatctattgccgtcagctcagccca

SEQ ID NO: 5824185 - DNA, 25 bp, Homo sapien
tcctatgtcacaatccagcaggtgg

SEQ ID NO: 5824186 - DNA, 25 bp, Homo sapien
tgtcacaatccagcaggtggccagg

SEQ ID NO: 5824187 - DNA, 25 bp, Homo sapien
gaagtgcttttgtctggggaaacac

SEQ ID NO: 5824188 - DNA, 25 bp, Homo sapien
ttattaaggcgcaaagtcacaggac

SEQ ID NO: 5824189 - DNA, 25 bp, Homo sapien
tacagccccaggagaaggagcctgt

SEQ ID NO: 5824190 - DNA, 25 bp, Homo sapien
ccagggtaggcaaggttcaagaatg

SEQ ID NO: 5824191 - DNA, 25 bp, Homo sapien
cccaggagaaggagcctgtgcagaa

SEQ ID NO: 5824192 - DNA, 25 bp, Homo sapien
ggtacagccccaggagaaggagcct

SEQ ID NO: 5824193 - DNA, 25 bp, Homo sapien
tcagctcagcccagggtaggcaagg

SEQ ID NO: 5824194 - DNA, 25 bp, Homo sapien
cacgcaggtaatgtgatgctaggaa

SEQ ID NO: 5824195 - DNA, 25 bp, Homo sapien
cctgacagggtgagccatcagggct

SEQ ID NO: 5824196 - DNA, 25 bp, Homo sapien
cttttgttcttattaaggcgcaaag

SEQ ID NO: 5824197 - DNA, 25 bp, Homo sapien
gtgctggaatgttctggaacagatc

SEQ ID NO: 5824198 - DNA, 25 bp, Homo sapien
ttcgaaagaggttaaagatttatag

SEQ ID NO: 5824199 - DNA, 25 bp, Homo sapien
ctataaatctttaacctctttcgaa

SEQ ID NO: 5824200 - DNA, 25 bp, Homo sapien
ccagtgcccctgcaggtccgtgcgt

SEQ ID NO: 5824201 - DNA, 25 bp, Homo sapien
acgcacggacctgcaggggcactgg

SEQ ID NO: 5824202 - DNA, 25 bp, Homo sapien
gagggaagaacagcctcgggtaccg

SEQ ID NO: 5824203 - DNA, 25 bp, Homo sapien
cggtacccgaggctgttcttccctc

SEQ ID NO: 5824204 - DNA, 25 bp, Homo sapien
catacgttttaatgcaagtttttag

SEQ ID NO: 5824205 - DNA, 25 bp, Homo sapien
ctaaaaacttgcattaaaacgtatg

SEQ ID NO: 5824206 - DNA, 25 bp, Homo sapien
agaaaattaggacatcctcattaat

SEQ ID NO: 5824207 - DNA, 25 bp, Homo sapien
attaatgaggatgtcctaattttct

SEQ ID NO: 5824208 - DNA, 25 bp, Homo sapien
caaaatgacatattcgatagtaagg

SEQ ID NO: 5824209 - DNA, 25 bp, Homo sapien
ccttactatcgaatatgtcattttg

SEQ ID NO: 5824210 - DNA, 25 bp, Homo sapien
ccaaaatgacatattcgatagtaag

SEQ ID NO: 5824211 - DNA, 25 bp, Homo sapien
cttactatcgaatatgtcattttgg

SEQ ID NO: 5824212 - DNA, 25 bp, Homo sapien
tccggggctaggccgggtctcggca

SEQ ID NO: 5824213 - DNA, 25 bp, Homo sapien
tgccgagacccggcctagccccgga

SEQ ID NO: 5824214 - DNA, 25 bp, Homo sapien
tgtgtctgggagtgactcccgactc

SEQ ID NO: 5824215 - DNA, 25 bp, Homo sapien
gagtcgggagtcactcccagacaca

SEQ ID NO: 5824216 - DNA, 25 bp, Homo sapien
ggtacctatccaaacggcctcgaga

SEQ ID NO: 5824217 - DNA, 25 bp, Homo sapien
tctcgaggccgtttggataggtacc

SEQ ID NO: 5824218 - DNA, 25 bp, Homo sapien
accgacgactgttgaggtacaggtc

SEQ ID NO: 5824219 - DNA, 25 bp, Homo sapien
gacctgtacctcaacagtcgtcggt

SEQ ID NO: 5824220 - DNA, 25 bp, Homo sapien
aaatgactatagaagagaggtgaga

SEQ ID NO: 5824221 - DNA, 25 bp, Homo sapien
tctcacctctcttctatagtcattt

SEQ ID NO: 5824222 - DNA, 25 bp, Homo sapien
cgttccagggtagcagctactcata

SEQ ID NO: 5824223 - DNA, 25 bp, Homo sapien
attctgcacatttcctagtaggctc

SEQ ID NO: 5824224 - DNA, 25 bp, Homo sapien
accgttccagggtagcagctactca

SEQ ID NO: 5824225 - DNA, 25 bp, Homo sapien
gttccagggtagcagctactcataa

SEQ ID NO: 5824226 - DNA, 25 bp, Homo sapien
tgcacatttcctagtaggctctctg

SEQ ID NO: 5824227 - DNA, 25 bp, Homo sapien
cacatttcctagtaggctctctgcc

SEQ ID NO: 5824228 - DNA, 25 bp, Homo sapien
tctgcccaccgttccagggtagcag

SEQ ID NO: 5824229 - DNA, 25 bp, Homo sapien
gcccaccgttccagggtagcagcta

SEQ ID NO: 5824230 - DNA, 25 bp, Homo sapien
acatttcctagtaggctctctgccc

SEQ ID NO: 5824231 - DNA, 25 bp, Homo sapien
cttcagttcccaaagcagcatcgat

SEQ ID NO: 5824232 - DNA, 25 bp, Homo sapien
cagttcccaaagcagcatcgattct

SEQ ID NO: 5824233 - DNA, 25 bp, Homo sapien
tcagttcccaaagcagcatcgattc

SEQ ID NO: 5824234 - DNA, 25 bp, Homo sapien
ttcagttcccaaagcagcatcgatt

SEQ ID NO: 5824235 - DNA, 25 bp, Homo sapien
ttccagggtagcagctactcataac

SEQ ID NO: 5824236 - DNA, 25 bp, Homo sapien
gttcccaaagcagcatcgattcttc

SEQ ID NO: 5824237 - DNA, 25 bp, Homo sapien
ccttcagttcccaaagcagcatcga

SEQ ID NO: 5824238 - DNA, 25 bp, Homo sapien
aatagaccgcgatatttatagacgt

SEQ ID NO: 5824239 - DNA, 25 bp, Homo sapien
acgtctataaatatcgcggtctatt

SEQ ID NO: 5824240 - DNA, 25 bp, Homo sapien
acgtcgaaggttccggaacttgtgc

SEQ ID NO: 5824241 - DNA, 25 bp, Homo sapien
gcacaagttccggaaccttcgacgt

SEQ ID NO: 5824242 - DNA, 25 bp, Homo sapien
gtgagtccacatgtactcatcagga

SEQ ID NO: 5824243 - DNA, 25 bp, Homo sapien
gagcaggagagcatgttccatcaat

SEQ ID NO: 5824244 - DNA, 25 bp, Homo sapien
tttaatccttcctagaggaatacag

SEQ ID NO: 5824245 - DNA, 25 bp, Homo sapien
gggtctgcttctgagaaacgctgga

SEQ ID NO: 5824246 - DNA, 25 bp, Homo sapien
ccttcctagaggaatacagatttga

SEQ ID NO: 5824247 - DNA, 25 bp, Homo sapien
gccccctttgtctgaatggctggat

SEQ ID NO: 5824248 - DNA, 25 bp, Homo sapien
ttcccttcctcaggtgagtccacat

SEQ ID NO: 5824249 - DNA, 25 bp, Homo sapien
catgtactcatcaggagacaatcca

SEQ ID NO: 5824250 - DNA, 25 bp, Homo sapien
atgaccaggtgcatgggtgacttaa

SEQ ID NO: 5824251 - DNA, 25 bp, Homo sapien
agcagcaaaaccttcccaccagagt

SEQ ID NO: 5824252 - DNA, 25 bp, Homo sapien
aggtgcatgggtgacttaactaagc

SEQ ID NO: 5824253 - DNA, 25 bp, Homo sapien
atgggtgacttaactaagctgggac

SEQ ID NO: 5824254 - DNA, 25 bp, Homo sapien
actccagcccagaggttgtgccttg

SEQ ID NO: 5824255 - DNA, 25 bp, Homo sapien
cctcaggtgagtccacatgtactca

SEQ ID NO: 5824256 - DNA, 25 bp, Homo sapien
ctccaggccccctttgtctgaatgg

SEQ ID NO: 5824257 - DNA, 25 bp, Homo sapien
ccctttgtctgaatggctggatgtt

SEQ ID NO: 5824258 - DNA, 25 bp, Homo sapien
ggtggtggacagaccggactggtcc

SEQ ID NO: 5824259 - DNA, 25 bp, Homo sapien
ggaccagtccggtctgtccaccacc

SEQ ID NO: 5824260 - DNA, 25 bp, Homo sapien
ccgggtggtggacagaccggactgg

SEQ ID NO: 5824261 - DNA, 25 bp, Homo sapien
ccagtccggtctgtccaccacccgg

SEQ ID NO: 5824262 - DNA, 25 bp, Homo sapien
ccgggcaacgccagagacaccgggc

SEQ ID NO: 5824263 - DNA, 25 bp, Homo sapien
gcccggtgtctctggcgttgcccgg

SEQ ID NO: 5824264 - DNA, 25 bp, Homo sapien
tgtcgttcataacatttagtaacaa

SEQ ID NO: 5824265 - DNA, 25 bp, Homo sapien
ttgttactaaatgttatgaacgaca

SEQ ID NO: 5824266 - DNA, 25 bp, Homo sapien
gccgggctctggtcgggtgggccgg

SEQ ID NO: 5824267 - DNA, 25 bp, Homo sapien
ccggcccacccgaccagagcccggc

SEQ ID NO: 5824268 - DNA, 25 bp, Homo sapien
aggtcattaaccctgagaccggtgt

SEQ ID NO: 5824269 - DNA, 25 bp, Homo sapien
acaccggtctcagggttaatgacct

SEQ ID NO: 5824270 - DNA, 25 bp, Homo sapien
tggctcaacaagaaccgttgtcggc

SEQ ID NO: 5824271 - DNA, 25 bp, Homo sapien
gccgacaacggttcttgttgagcca

SEQ ID NO: 5824272 - DNA, 25 bp, Homo sapien
tacgaagtccaagacatctgaagat

SEQ ID NO: 5824273 - DNA, 25 bp, Homo sapien
atcttcagatgtcttggacttcgta

SEQ ID NO: 5824274 - DNA, 25 bp, Homo sapien
atgtaagttattgtatgtagaagta

SEQ ID NO: 5824275 - DNA, 25 bp, Homo sapien
tacttctacatacaataacttacat

SEQ ID NO: 5824276 - DNA, 25 bp, Homo sapien
ttgtctcacgtcctaaaggaactgt

SEQ ID NO: 5824277 - DNA, 25 bp, Homo sapien
acagttcctttaggacgtgagacaa

SEQ ID NO: 5824278 - DNA, 25 bp, Homo sapien
aattataagtgagagtcattacagt

SEQ ID NO: 5824279 - DNA, 25 bp, Homo sapien
actgtaatgactctcacttataatt

SEQ ID NO: 5824280 - DNA, 25 bp, Homo sapien
gtgaccggaccgacgtcgcgtcttg

SEQ ID NO: 5824281 - DNA, 25 bp, Homo sapien
caagacgcgacgtcggtccggtcac

SEQ ID NO: 5824282 - DNA, 25 bp, Homo sapien
tgtcccaacagccagaggtgacggc

SEQ ID NO: 5824283 - DNA, 25 bp, Homo sapien
gccgtcacctctggctgttgggaca

SEQ ID NO: 5824284 - DNA, 25 bp, Homo sapien
gacctccgtctcctcggacccggac

SEQ ID NO: 5824285 - DNA, 25 bp, Homo sapien
gtccgggtccgaggagacggaggtc

SEQ ID NO: 5824286 - DNA, 25 bp, Homo sapien
tgatcccataaaataacccagtaat

SEQ ID NO: 5824287 - DNA, 25 bp, Homo sapien
attactgggttattttatgggatca

SEQ ID NO: 5824288 - DNA, 25 bp, Homo sapien
ttgaaatacgaattgtcttttaggt

SEQ ID NO: 5824289 - DNA, 25 bp, Homo sapien
acctaaaagacaattcgtatttcaa

SEQ ID NO: 5824290 - DNA, 25 bp, Homo sapien
acgacgacagccctctttgtggttg

SEQ ID NO: 5824291 - DNA, 25 bp, Homo sapien
caaccacaaagagggctgtcgtcgt

SEQ ID NO: 5824292 - DNA, 25 bp, Homo sapien
ttaacccgacaccacagacgagtcg

SEQ ID NO: 5824293 - DNA, 25 bp, Homo sapien
cgactcgtctgtggtgtcgggttaa

SEQ ID NO: 5824294 - DNA, 25 bp, Homo sapien
acctttctaaatactaatgacctaa

SEQ ID NO: 5824295 - DNA, 25 bp, Homo sapien
ttaggtcattagtatttagaaaggt

SEQ ID NO: 5824296 - DNA, 25 bp, Homo sapien
ctggcaggccagctgagaatgaaca

SEQ ID NO: 5824297 - DNA, 25 bp, Homo sapien
gtgctctcacttcttgaaagctcta

SEQ ID NO: 5824298 - DNA, 25 bp, Homo sapien
ggtccctgtccactcctcaggttgg

SEQ ID NO: 5824299 - DNA, 25 bp, Homo sapien
tcagcctgggggacatcacagcatt

SEQ ID NO: 5824300 - DNA, 25 bp, Homo sapien
ctgagatgagatgagaagtgtctcc

SEQ ID NO: 5824301 - DNA, 25 bp, Homo sapien
ctgcctgtggtcatctgtttgtcca

SEQ ID NO: 5824302 - DNA, 25 bp, Homo sapien
ctgtccactcctcaggttggtgctc

SEQ ID NO: 5824303 - DNA, 25 bp, Homo sapien
tgctctcacttcttgaaagctctag

SEQ ID NO: 5824304 - DNA, 25 bp, Homo sapien
caatctcagattctcctgcctgtgg

SEQ ID NO: 5824305 - DNA, 25 bp, Homo sapien
tggtccctgtccactcctcaggttg

SEQ ID NO: 5824306 - DNA, 25 bp, Homo sapien
actgggggccccagagcctagcttc

SEQ ID NO: 5824307 - DNA, 25 bp, Homo sapien
tgagatgagaagtgtctcctgtatc

SEQ ID NO: 5824308 - DNA, 25 bp, Homo sapien
tcacttcttgaaagctctaggcacc

SEQ ID NO: 5824309 - DNA, 25 bp, Homo sapien
ccagctgagaatgaacaggagatgg

SEQ ID NO: 5824310 - DNA, 25 bp, Homo sapien
tcaccccaggacagggcagacagag

SEQ ID NO: 5824311 - DNA, 25 bp, Homo sapien
acttcttgaaagctctaggcacccc

SEQ ID NO: 5824312 - DNA, 25 bp, Homo sapien
gctatcgcatcgaagatccggccgg

SEQ ID NO: 5824313 - DNA, 25 bp, Homo sapien
ccggccggatcttcgatgcgatagc

SEQ ID NO: 5824314 - DNA, 25 bp, Homo sapien
agttggcgtcgaaccaggtttacga

SEQ ID NO: 5824315 - DNA, 25 bp, Homo sapien
tcgtaaacctggttcgacgccaact

SEQ ID NO: 5824316 - DNA, 25 bp, Homo sapien
actgctacctactcttgaagtcaaa

SEQ ID NO: 5824317 - DNA, 25 bp, Homo sapien
tttgacttcaagagtaggtagcagt

SEQ ID NO: 5824318 - DNA, 25 bp, Homo sapien
ccgtcgcattggaagtcgtaagtag

SEQ ID NO: 5824319 - DNA, 25 bp, Homo sapien
ctacttacgacttccaatgcgacgg

SEQ ID NO: 5824320 - DNA, 25 bp, Homo sapien
gtcgtttcagttacaagtcttatga

SEQ ID NO: 5824321 - DNA, 25 bp, Homo sapien
tcataagacttgtaactgaaacgac

SEQ ID NO: 5824322 - DNA, 25 bp, Homo sapien
acggaaactcaaggatcaggtatca

SEQ ID NO: 5824323 - DNA, 25 bp, Homo sapien
tgatacctgatccttgagtttccgt

SEQ ID NO: 5824324 - DNA, 25 bp, Homo sapien
aagacacatctacgtcggacccgaa

SEQ ID NO: 5824325 - DNA, 25 bp, Homo sapien
ttcgggtccgacgtagatgtgtctt

SEQ ID NO: 5824326 - DNA, 25 bp, Homo sapien
ggagtcaggcacgtgactagtcaaa

SEQ ID NO: 5824327 - DNA, 25 bp, Homo sapien
tttgactagtcacgtgcctgactcc

SEQ ID NO: 5824328 - DNA, 25 bp, Homo sapien
aataagaatctgtgaacttgagtac

SEQ ID NO: 5824329 - DNA, 25 bp, Homo sapien
gtactcaagttcacagattcttatt

SEQ ID NO: 5824330 - DNA, 25 bp, Homo sapien
tttcttactgaggaaacccaaccag

SEQ ID NO: 5824331 - DNA, 25 bp, Homo sapien
ctggttgggtttcctcagtaagaaa

SEQ ID NO: 5824332 - DNA, 25 bp, Homo sapien
agtccaccgggtgctacccgaagga

SEQ ID NO: 5824333 - DNA, 25 bp, Homo sapien
tccttcgggtagcacccggtggact

SEQ ID NO: 5824334 - DNA, 25 bp, Homo sapien
tagaaaacataaagttctgtaagta

SEQ ID NO: 5824335 - DNA, 25 bp, Homo sapien
tacttacagaactttatgttttcta

SEQ ID NO: 5824336 - DNA, 25 bp, Homo sapien
gtgtccggcggtagctagccccggg

SEQ ID NO: 5824337 - DNA, 25 bp, Homo sapien
cccggggctagctaccgccggacac

SEQ ID NO: 5824338 - DNA, 25 bp, Homo sapien
aacagttaattcacttttagttaga

SEQ ID NO: 5824339 - DNA, 25 bp, Homo sapien
tctaactaaaagtgaattaactgtt

SEQ ID NO: 5824340 - DNA, 25 bp, Homo sapien
cacaaaccattatacaaaagttaca

SEQ ID NO: 5824341 - DNA, 25 bp, Homo sapien
tgtaacttttgtataatggtttgtg

SEQ ID NO: 5824342 - DNA, 25 bp, Homo sapien
gccgcgggcttggtagggccaagcg

SEQ ID NO: 5824343 - DNA, 25 bp, Homo sapien
cgcttggccctaccaagcccgcggc

SEQ ID NO: 5824344 - DNA, 25 bp, Homo sapien
acgaaaagagaacttcagacaactc

SEQ ID NO: 5824345 - DNA, 25 bp, Homo sapien
gagttgtctgaagttctcttttcgt

SEQ ID NO: 5824346 - DNA, 25 bp, Homo sapien
ggccttccacctacgtgactcgtcg

SEQ ID NO: 5824347 - DNA, 25 bp, Homo sapien
cgacgagtcacgtaggtggaaggcc

SEQ ID NO: 5824348 - DNA, 25 bp, Homo sapien
cgtggcggtcgtgtccgggcgggta

SEQ ID NO: 5824349 - DNA, 25 bp, Homo sapien
tacccgcccggacacgaccgccacg

SEQ ID NO: 5824350 - DNA, 25 bp, Homo sapien
gacccgggagaccgccgtcgtgtcg

SEQ ID NO: 5824351 - DNA, 25 bp, Homo sapien
cgacacgacggcggtctcccgggtc

SEQ ID NO: 5824352 - DNA, 25 bp, Homo sapien
gacacatttatccataaatacaaaa

SEQ ID NO: 5824353 - DNA, 25 bp, Homo sapien
ttttgtatttatggataaatgtgtc

SEQ ID NO: 5824354 - DNA, 25 bp, Homo sapien
acaatcctgtataattaactagtct

SEQ ID NO: 5824355 - DNA, 25 bp, Homo sapien
agactagttaattatacaggattgt

SEQ ID NO: 5824356 - DNA, 25 bp, Homo sapien
aagtgaaaacaatggcgacaactaa

SEQ ID NO: 5824357 - DNA, 25 bp, Homo sapien
ttagttgtcgccattgttttcactt

SEQ ID NO: 5824358 - DNA, 25 bp, Homo sapien
agaatagtatataacggatcaagaa

SEQ ID NO: 5824359 - DNA, 25 bp, Homo sapien
ttcttgatccgttatatactattct

SEQ ID NO: 5824360 - DNA, 25 bp, Homo sapien
acccttgaaacggtgtatgcctaat

SEQ ID NO: 5824361 - DNA, 25 bp, Homo sapien
attaggcatacaccgtttcaagggt

SEQ ID NO: 5824362 - DNA, 25 bp, Homo sapien
atatgaaattattcttatagactat

SEQ ID NO: 5824363 - DNA, 25 bp, Homo sapien
atagtctataagaataatttcatat

SEQ ID NO: 5824364 - DNA, 25 bp, Homo sapien
caaacgttgtaaagagccaccgaag

SEQ ID NO: 5824365 - DNA, 25 bp, Homo sapien
cttcggtggctctttacaacgtttg

SEQ ID NO: 5824366 - DNA, 25 bp, Homo sapien
ttgacttctgcattaaaacatctga

SEQ ID NO: 5824367 - DNA, 25 bp, Homo sapien
tcagatgttttaatgcagaagtcaa

SEQ ID NO: 5824368 - DNA, 25 bp, Homo sapien
cattgacttctgcattaaaacatct

SEQ ID NO: 5824369 - DNA, 25 bp, Homo sapien
agatgttttaatgcagaagtcaatg

SEQ ID NO: 5824370 - DNA, 25 bp, Homo sapien
agtaataattgagattatcaacggt

SEQ ID NO: 5824371 - DNA, 25 bp, Homo sapien
accgttgataatctcaattattact

SEQ ID NO: 5824372 - DNA, 25 bp, Homo sapien
gtcccgaccctgaatgtgggccaga

SEQ ID NO: 5824373 - DNA, 25 bp, Homo sapien
tctggcccacattcagggtcgggac

SEQ ID NO: 5824374 - DNA, 25 bp, Homo sapien
tgtagtagcttcacgtatgattttt

SEQ ID NO: 5824375 - DNA, 25 bp, Homo sapien
aaaaatcatacgtgaagctactaca

SEQ ID NO: 5824376 - DNA, 25 bp, Homo sapien
cagtaaagcacagtaagaatgtatt

SEQ ID NO: 5824377 - DNA, 25 bp, Homo sapien
aatacattcttactgtgctttactg

SEQ ID NO: 5824378 - DNA, 25 bp, Homo sapien
gtgggctgtacgcgcccgaggcacg

SEQ ID NO: 5824379 - DNA, 25 bp, Homo sapien
cgtgcctcgggcgcgtacagcccac

SEQ ID NO: 5824380 - DNA, 25 bp, Homo sapien
ccttttattttgagtaatctgtgtg

SEQ ID NO: 5824381 - DNA, 25 bp, Homo sapien
cacacagattactcaaaataaaagg

SEQ ID NO: 5824382 - DNA, 25 bp, Homo sapien
gccctcccccgcgacggcgggcgcc

SEQ ID NO: 5824383 - DNA, 25 bp, Homo sapien
ggcgcccgccgtcgcgggggagggc

SEQ ID NO: 5824384 - DNA, 25 bp, Homo sapien
ggccctcccccgcgacggcgggcgc

SEQ ID NO: 5824385 - DNA, 25 bp, Homo sapien
gcgcccgccgtcgcgggggagggcc

SEQ ID NO: 5824386 - DNA, 25 bp, Homo sapien
ccccgcaggtgcccggccgaccgag

SEQ ID NO: 5824387 - DNA, 25 bp, Homo sapien
ctcggtcggccgggcacctgcgggg

SEQ ID NO: 5824388 - DNA, 25 bp, Homo sapien
cgcgcgaccccgcaggtgcccggcc

SEQ ID NO: 5824389 - DNA, 25 bp, Homo sapien
ggccgggcacctgcggggtcgcgcg

SEQ ID NO: 5824390 - DNA, 25 bp, Homo sapien
tcgcgcgaccccgcaggtgcccggc

SEQ ID NO: 5824391 - DNA, 25 bp, Homo sapien
gccgggcacctgcggggtcgcgcga

SEQ ID NO: 5824392 - DNA, 25 bp, Homo sapien
ctcctcgcgcgaccccgcaggtgcc

SEQ ID NO: 5824393 - DNA, 25 bp, Homo sapien
ggcacctgcggggtcgcgcgaggag

SEQ ID NO: 5824394 - DNA, 25 bp, Homo sapien
ggcccgtcacagagcaggcaactta

SEQ ID NO: 5824395 - DNA, 25 bp, Homo sapien
taagttgcctgctctgtgacgggcc

SEQ ID NO: 5824396 - DNA, 25 bp, Homo sapien
agaacaaggtagcagtcattgaaat

SEQ ID NO: 5824397 - DNA, 25 bp, Homo sapien
atttcaatgactgctaccttgttct

SEQ ID NO: 5824398 - DNA, 25 bp, Homo sapien
aagaattccgataggttagacgaaa

SEQ ID NO: 5824399 - DNA, 25 bp, Homo sapien
tttcgtctaacctatcggaattctt

SEQ ID NO: 5824400 - DNA, 25 bp, Homo sapien
gtacctgccgttcccagtgtgacgg

SEQ ID NO: 5824401 - DNA, 25 bp, Homo sapien
ccgtcacactgggaacggcaggtac

SEQ ID NO: 5824402 - DNA, 25 bp, Homo sapien
ggatggacagacgtaagacacccat

SEQ ID NO: 5824403 - DNA, 25 bp, Homo sapien
aagcagagtcaaaccacacaccaga

SEQ ID NO: 5824404 - DNA, 25 bp, Homo sapien
accacggacagatggatggacagac

SEQ ID NO: 5824405 - DNA, 25 bp, Homo sapien
gacagacgtaagacacccataggag

SEQ ID NO: 5824406 - DNA, 25 bp, Homo sapien
cagatggatggacagacgtaagaca

SEQ ID NO: 5824407 - DNA, 25 bp, Homo sapien
acggacagatggatggacagacgta

SEQ ID NO: 5824408 - DNA, 25 bp, Homo sapien
aaagcagagtcaaaccacacaccag

SEQ ID NO: 5824409 - DNA, 25 bp, Homo sapien
gcagagtcaaaccacacaccagagt

SEQ ID NO: 5824410 - DNA, 25 bp, Homo sapien
ctgaccacggacagatggatggaca

SEQ ID NO: 5824411 - DNA, 25 bp, Homo sapien
gccaatccggaagaaaagcagagtc

SEQ ID NO: 5824412 - DNA, 25 bp, Homo sapien
caatccggaagaaaagcagagtcaa

SEQ ID NO: 5824413 - DNA, 25 bp, Homo sapien
atggacagacgtaagacacccatag

SEQ ID NO: 5824414 - DNA, 25 bp, Homo sapien
gatggatggacagacgtaagacacc

SEQ ID NO: 5824415 - DNA, 25 bp, Homo sapien
agacacccataggaggccccagcag

SEQ ID NO: 5824416 - DNA, 25 bp, Homo sapien
cagacgtaagacacccataggaggc

SEQ ID NO: 5824417 - DNA, 25 bp, Homo sapien
gtaagacacccataggaggccccag

SEQ ID NO: 5824418 - DNA, 25 bp, Homo sapien
acttcctcagtacggatgttcctgc

SEQ ID NO: 5824419 - DNA, 25 bp, Homo sapien
gcaggaacatccgtactgaggaagt

SEQ ID NO: 5824420 - DNA, 25 bp, Homo sapien
ttcattggttgttcaaagttttagt

SEQ ID NO: 5824421 - DNA, 25 bp, Homo sapien
actaaaactttgaacaaccaatgaa

SEQ ID NO: 5824422 - DNA, 25 bp, Homo sapien
cggaacggtacacctcaggtgcaat

SEQ ID NO: 5824423 - DNA, 25 bp, Homo sapien
attgcacctgaggtgtaccgttccg

SEQ ID NO: 5824424 - DNA, 25 bp, Homo sapien
gcgcgtcaagggtcgggagcgcggc

SEQ ID NO: 5824425 - DNA, 25 bp, Homo sapien
gccgcgctcccgacccttgacgcgc

SEQ ID NO: 5824426 - DNA, 25 bp, Homo sapien
tgttcgtcaacgtatacctttaaac

SEQ ID NO: 5824427 - DNA, 25 bp, Homo sapien
gtttaaaggtatacgttgacgaaca

SEQ ID NO: 5824428 - DNA, 25 bp, Homo sapien
gtcgacagtccgtatgacacatcgt

SEQ ID NO: 5824429 - DNA, 25 bp, Homo sapien
acgatgtgtcatacggactgtcgac

SEQ ID NO: 5824430 - DNA, 25 bp, Homo sapien
gaaaccttgaaacataaagtgaaag

SEQ ID NO: 5824431 - DNA, 25 bp, Homo sapien
ctttcactttatgtttcaaggtttc

SEQ ID NO: 5824432 - DNA, 25 bp, Homo sapien
aatatggcgagcgacgaccaacacg

SEQ ID NO: 5824433 - DNA, 25 bp, Homo sapien
cgtgttggtcgtcgctcgccatatt

SEQ ID NO: 5824434 - DNA, 25 bp, Homo sapien
ttacgggtaccctaagacactcagt

SEQ ID NO: 5824435 - DNA, 25 bp, Homo sapien
actgagtgtcttagggtacccgtaa

SEQ ID NO: 5824436 - DNA, 25 bp, Homo sapien
gcgacagaaccacctagtggaaggt

SEQ ID NO: 5824437 - DNA, 25 bp, Homo sapien
accttccactaggtggttctgtcgc

SEQ ID NO: 5824438 - DNA, 25 bp, Homo sapien
gggtcggtcctggacttgtccgtga

SEQ ID NO: 5824439 - DNA, 25 bp, Homo sapien
tcacggacaagtccaggaccgaccc

SEQ ID NO: 5824440 - DNA, 25 bp, Homo sapien
tcggggcgtcggaagcccctcgcgg

SEQ ID NO: 5824441 - DNA, 25 bp, Homo sapien
ccgcgaggggcttccgacgccccga

SEQ ID NO: 5824442 - DNA, 25 bp, Homo sapien
atctgtcgcgtccagttcgttcact

SEQ ID NO: 5824443 - DNA, 25 bp, Homo sapien
agtgaacgaactggacgcgacagat

SEQ ID NO: 5824444 - DNA, 25 bp, Homo sapien
ttaagaaataacaatgacccgtctt

SEQ ID NO: 5824445 - DNA, 25 bp, Homo sapien
aagacgggtcattgttatttcttaa

SEQ ID NO: 5824446 - DNA, 25 bp, Homo sapien
ccgttcagaaccactccggggtcaa

SEQ ID NO: 5824447 - DNA, 25 bp, Homo sapien
ttgaccccggagtggttctgaacgg

SEQ ID NO: 5824448 - DNA, 25 bp, Homo sapien
gaataaggtgtgagattgtaagtga

SEQ ID NO: 5824449 - DNA, 25 bp, Homo sapien
tcacttacaatctcacaccttattc

SEQ ID NO: 5824450 - DNA, 25 bp, Homo sapien
tggtaggtccactcctagtgaaagg

SEQ ID NO: 5824451 - DNA, 25 bp, Homo sapien
cctttcactaggagtggacctacca

SEQ ID NO: 5824452 - DNA, 25 bp, Homo sapien
tatactataccttttcaccgggtcc

SEQ ID NO: 5824453 - DNA, 25 bp, Homo sapien
ggacccggtgaaaaggtatagtata

SEQ ID NO: 5824454 - DNA, 25 bp, Homo sapien
gacaagggtacgttcaacacagtag

SEQ ID NO: 5824455 - DNA, 25 bp, Homo sapien
ctactgtgttgaacgtacccttgtc

SEQ ID NO: 5824456 - DNA, 25 bp, Homo sapien
gtatcgacgtcaccgagaacgtaag

SEQ ID NO: 5824457 - DNA, 25 bp, Homo sapien
cttacgttctcggtgacgtcgatac

SEQ ID NO: 5824458 - DNA, 25 bp, Homo sapien
cgccgagccggcacagaccgtcggg

SEQ ID NO: 5824459 - DNA, 25 bp, Homo sapien
cccgacggtctgtgccggctcggcg

SEQ ID NO: 5824460 - DNA, 25 bp, Homo sapien
gacgccgagccggcacagaccgtcg

SEQ ID NO: 5824461 - DNA, 25 bp, Homo sapien
cgacggtctgtgccggctcggcgtc

SEQ ID NO: 5824462 - DNA, 25 bp, Homo sapien
tagtaccttcattagtaggtaaacc

SEQ ID NO: 5824463 - DNA, 25 bp, Homo sapien
ggtttacctactaatgaaggtacta

SEQ ID NO: 5824464 - DNA, 25 bp, Homo sapien
cggttccctcgtccgccgcggtgac

SEQ ID NO: 5824465 - DNA, 25 bp, Homo sapien
gtcaccgcggcggacgagggaaccg

SEQ ID NO: 5824466 - DNA, 25 bp, Homo sapien
ggtgttctttcttgacccaccactc

SEQ ID NO: 5824467 - DNA, 25 bp, Homo sapien
gagtggtgggtcaagaaagaacacc

SEQ ID NO: 5824468 - DNA, 25 bp, Homo sapien
aaggtaatcattgtcgactattata

SEQ ID NO: 5824469 - DNA, 25 bp, Homo sapien
tataatagtcgacaatgattacctt

SEQ ID NO: 5824470 - DNA, 25 bp, Homo sapien
gtgagcccgggctccccggagcacc

SEQ ID NO: 5824471 - DNA, 25 bp, Homo sapien
ggtgctccggggagcccgggctcac

SEQ ID NO: 5824472 - DNA, 25 bp, Homo sapien
gtgccgaccgtccagtgagcccggg

SEQ ID NO: 5824473 - DNA, 25 bp, Homo sapien
cccgggctcactggacggtcggcac

SEQ ID NO: 5824474 - DNA, 25 bp, Homo sapien
gggcgagcctcacctcccgccgggc

SEQ ID NO: 5824475 - DNA, 25 bp, Homo sapien
gcccggcgggaggtgaggctcgccc

SEQ ID NO: 5824476 - DNA, 25 bp, Homo sapien
cgcggggggcgagcctcacctcccg

SEQ ID NO: 5824477 - DNA, 25 bp, Homo sapien
cgggaggtgaggctcgccccccgcg

SEQ ID NO: 5824478 - DNA, 25 bp, Homo sapien
caggggcgcctcgggtttcggcgac

SEQ ID NO: 5824479 - DNA, 25 bp, Homo sapien
gtcgccgaaacccgaggcgcccctg

SEQ ID NO: 5824480 - DNA, 25 bp, Homo sapien
gaatacgtattcatcctgcgtccgg

SEQ ID NO: 5824481 - DNA, 25 bp, Homo sapien
ccggacgcaggatgaatacgtattc

SEQ ID NO: 5824482 - DNA, 25 bp, Homo sapien
tcgtgcttagggaccaagggcccag

SEQ ID NO: 5824483 - DNA, 25 bp, Homo sapien
ctgggcccttggtccctaagcacga

SEQ ID NO: 5824484 - DNA, 25 bp, Homo sapien
ttaccactgttgcagtcacacgact

SEQ ID NO: 5824485 - DNA, 25 bp, Homo sapien
agtcgtgtgactgcaacagtggtaa

SEQ ID NO: 5824486 - DNA, 25 bp, Homo sapien
atcaaaatgactttcacacaaatat

SEQ ID NO: 5824487 - DNA, 25 bp, Homo sapien
atatttgtgtgaaagtcattttgat

SEQ ID NO: 5824488 - DNA, 25 bp, Homo sapien
tacattttgtataaaaccatttatt

SEQ ID NO: 5824489 - DNA, 25 bp, Homo sapien
aataaatggttttatacaaaatgta

SEQ ID NO: 5824490 - DNA, 25 bp, Homo sapien
gaaatttgtttaataggtcaagaca

SEQ ID NO: 5824491 - DNA, 25 bp, Homo sapien
tgtcttgacctattaaacaaatttc

SEQ ID NO: 5824492 - DNA, 25 bp, Homo sapien
ctgaggccggcacgagaggaaccgg

SEQ ID NO: 5824493 - DNA, 25 bp, Homo sapien
ccggttcctctcgtgccggcctcag

SEQ ID NO: 5824494 - DNA, 25 bp, Homo sapien
agagacacggatatcataaaacagt

SEQ ID NO: 5824495 - DNA, 25 bp, Homo sapien
actgttttatgatatccgtgtctct

SEQ ID NO: 5824496 - DNA, 25 bp, Homo sapien
agttagtctatacacaagtgggaag

SEQ ID NO: 5824497 - DNA, 25 bp, Homo sapien
cttcccacttgtgtatagactaact

SEQ ID NO: 5824498 - DNA, 25 bp, Homo sapien
gtgacacccatcgcctcgctcccga

SEQ ID NO: 5824499 - DNA, 25 bp, Homo sapien
tcgggagcgaggcgatgggtgtcac

SEQ ID NO: 5824500 - DNA, 25 bp, Homo sapien
cgtcgacaacccgagggttcgagac

SEQ ID NO: 5824501 - DNA, 25 bp, Homo sapien
gtctcgaaccctcgggttgtcgacg

SEQ ID NO: 5824502 - DNA, 25 bp, Homo sapien
tcactctagttaattaactcttgtc

SEQ ID NO: 5824503 - DNA, 25 bp, Homo sapien
gacaagagttaattaactagagtga

SEQ ID NO: 5824504 - DNA, 25 bp, Homo sapien
gtgacaggaccacctccgagagggt

SEQ ID NO: 5824505 - DNA, 25 bp, Homo sapien
accctctcggaggtggtcctgtcac

SEQ ID NO: 5824506 - DNA, 25 bp, Homo sapien
ggtctgcgaccgctgcacttctgtc

SEQ ID NO: 5824507 - DNA, 25 bp, Homo sapien
gacagaagtgcagcggtcgcagacc

SEQ ID NO: 5824508 - DNA, 25 bp, Homo sapien
ccgcggcacgcgtgcccccgctccc

SEQ ID NO: 5824509 - DNA, 25 bp, Homo sapien
gggagcgggggcacgcgtgccgcgg

SEQ ID NO: 5824510 - DNA, 25 bp, Homo sapien
ggtactctttgtagacccaggtcga

SEQ ID NO: 5824511 - DNA, 25 bp, Homo sapien
tcgacctgggtctacaaagagtacc

SEQ ID NO: 5824512 - DNA, 25 bp, Homo sapien
ccgagaccggtacgacgtcaaatgt

SEQ ID NO: 5824513 - DNA, 25 bp, Homo sapien
acatttgacgtcgtaccggtctcgg

SEQ ID NO: 5824514 - DNA, 25 bp, Homo sapien
tatgtcttgaacctttttgtactct

SEQ ID NO: 5824515 - DNA, 25 bp, Homo sapien
agagtacaaaaaggttcaagacata

SEQ ID NO: 5824516 - DNA, 25 bp, Homo sapien
agttactgacacgtcggaacacggt

SEQ ID NO: 5824517 - DNA, 25 bp, Homo sapien
accgtgttccgacgtgtcagtaact

SEQ ID NO: 5824518 - DNA, 25 bp, Homo sapien
gcagggcgctccaggaagcggcccg

SEQ ID NO: 5824519 - DNA, 25 bp, Homo sapien
cgggccgcttcctggagcgccctgc

SEQ ID NO: 5824520 - DNA, 25 bp, Homo sapien
ccctcgatctgctcgtgcgtcccgt

SEQ ID NO: 5824521 - DNA, 25 bp, Homo sapien
acgggacgcacgagcagatcgaggg

SEQ ID NO: 5824522 - DNA, 25 bp, Homo sapien
ataaaacgaagtattgtgacaacaa

SEQ ID NO: 5824523 - DNA, 25 bp, Homo sapien
ttgttgtcacaatacttcgttttat

SEQ ID NO: 5824524 - DNA, 25 bp, Homo sapien
ttgtgacaacaaatttaaagtttct

SEQ ID NO: 5824525 - DNA, 25 bp, Homo sapien
agaaactttaaatttgttgtcacaa

SEQ ID NO: 5824526 - DNA, 25 bp, Homo sapien
gcgcgccccgtcatggcatcgccgg

SEQ ID NO: 5824527 - DNA, 25 bp, Homo sapien
ccggcgatgccatgacggggcgcgc

SEQ ID NO: 5824528 - DNA, 25 bp, Homo sapien
gcgggcgggagagcccagtccgccc

SEQ ID NO: 5824529 - DNA, 25 bp, Homo sapien
gggcggactgggctctcccgcccgc

SEQ ID NO: 5824530 - DNA, 25 bp, Homo sapien
ataattcttatcttattatccatgt

SEQ ID NO: 5824531 - DNA, 25 bp, Homo sapien
acatggataataagataagaattat

SEQ ID NO: 5824532 - DNA, 25 bp, Homo sapien
ccaatttatctttctggtctcgttg

SEQ ID NO: 5824533 - DNA, 25 bp, Homo sapien
caacgagaccagaaagataaattgg

SEQ ID NO: 5824534 - DNA, 25 bp, Homo sapien
gtctccgctggagacccccggcccg

SEQ ID NO: 5824535 - DNA, 25 bp, Homo sapien
cgggccgggggtctccagcggagac

SEQ ID NO: 5824536 - DNA, 25 bp, Homo sapien
gtcgatactctaattatcttctgag

SEQ ID NO: 5824537 - DNA, 25 bp, Homo sapien
ctcagaagataattagagtatcgac

SEQ ID NO: 5824538 - DNA, 25 bp, Homo sapien
acgggtccagttccagaaatcgtag

SEQ ID NO: 5824539 - DNA, 25 bp, Homo sapien
ctacgatttctggaactggacccgt

SEQ ID NO: 5824540 - DNA, 25 bp, Homo sapien
acaataagagtactaatacattaag

SEQ ID NO: 5824541 - DNA, 25 bp, Homo sapien
cttaatgtattagtactcttattgt

SEQ ID NO: 5824542 - DNA, 25 bp, Homo sapien
tactttgtcgagaaactacccgaag

SEQ ID NO: 5824543 - DNA, 25 bp, Homo sapien
cttcgggtagtttctcgacaaagta

SEQ ID NO: 5824544 - DNA, 25 bp, Homo sapien
acaatactttgaggcgactaggtag

SEQ ID NO: 5824545 - DNA, 25 bp, Homo sapien
ctacctagtcgcctcaaagtattgt

SEQ ID NO: 5824546 - DNA, 25 bp, Homo sapien
taaaggaatcttcttcgtgtacgtt

SEQ ID NO: 5824547 - DNA, 25 bp, Homo sapien
aacgtacacgaagaagattccttta

SEQ ID NO: 5824548 - DNA, 25 bp, Homo sapien
actcacaaaacctctagacccccta

SEQ ID NO: 5824549 - DNA, 25 bp, Homo sapien
tagggggtctagaggttttgtgagt

SEQ ID NO: 5824550 - DNA, 25 bp, Homo sapien
acttgtcagattcttccagcataag

SEQ ID NO: 5824551 - DNA, 25 bp, Homo sapien
ttatgaacatggaaaccctaagaat

SEQ ID NO: 5824552 - DNA, 25 bp, Homo sapien
aattctgcaggcaggtagcaatgaa

SEQ ID NO: 5824553 - DNA, 25 bp, Homo sapien
gaaaaacttcacaatatcgagctgc

SEQ ID NO: 5824554 - DNA, 25 bp, Homo sapien
ggcattaattctgcaggcaggtagc

SEQ ID NO: 5824555 - DNA, 25 bp, Homo sapien
gcaggcaggtagcaatgaaaatgcc

SEQ ID NO: 5824556 - DNA, 25 bp, Homo sapien
aatttcaagttgacagtctgtccat

SEQ ID NO: 5824557 - DNA, 25 bp, Homo sapien
attactatagaatgtctggtccctc

SEQ ID NO: 5824558 - DNA, 25 bp, Homo sapien
caagttatgtgactcatcagtaaat

SEQ ID NO: 5824559 - DNA, 25 bp, Homo sapien
taacacagtaatatcttagacaagg

SEQ ID NO: 5824560 - DNA, 25 bp, Homo sapien
tgtaaagttatgaacatggaaaccc

SEQ ID NO: 5824561 - DNA, 25 bp, Homo sapien
gttgacagtctgtccattttgaact

SEQ ID NO: 5824562 - DNA, 25 bp, Homo sapien
ttgaagaaaccatggaattatacac

SEQ ID NO: 5824563 - DNA, 25 bp, Homo sapien
aggtagcaatgaaaatgccaaacct

SEQ ID NO: 5824564 - DNA, 25 bp, Homo sapien
tgaaaaacttcacaatatcgagctg

SEQ ID NO: 5824565 - DNA, 25 bp, Homo sapien
gagtccccttgcacctataattaga

SEQ ID NO: 5824566 - DNA, 25 bp, Homo sapien
aaacgtcgacaaagtaaatattata

SEQ ID NO: 5824567 - DNA, 25 bp, Homo sapien
tataatatttactttgtcgacgttt

SEQ ID NO: 5824568 - DNA, 25 bp, Homo sapien
gacccaacatcaattaccgacttaa

SEQ ID NO: 5824569 - DNA, 25 bp, Homo sapien
ttaagtcggtaattgatgttgggtc

SEQ ID NO: 5824570 - DNA, 25 bp, Homo sapien
cgtctagtggtctcggtacgattat

SEQ ID NO: 5824571 - DNA, 25 bp, Homo sapien
ataatcgtaccgagaccactagacg

SEQ ID NO: 5824572 - DNA, 25 bp, Homo sapien
acgtgaccaggaccacgggtgggca

SEQ ID NO: 5824573 - DNA, 25 bp, Homo sapien
tgcccacccgtggtcctggtcacgt

SEQ ID NO: 5824574 - DNA, 25 bp, Homo sapien
gttcacttactataccgtcgtcgga

SEQ ID NO: 5824575 - DNA, 25 bp, Homo sapien
tccgacgacggtatagtaagtgaac

SEQ ID NO: 5824576 - DNA, 25 bp, Homo sapien
cccgtgacggactgaacgttcgtgt

SEQ ID NO: 5824577 - DNA, 25 bp, Homo sapien
acacgaacgttcagtccgtcacggg

SEQ ID NO: 5824578 - DNA, 25 bp, Homo sapien
gtaacaggagactcgtatacgaaac

SEQ ID NO: 5824579 - DNA, 25 bp, Homo sapien
gtttcgtatacgagtctcctgttac

SEQ ID NO: 5824580 - DNA, 25 bp, Homo sapien
gactcccgagcgacgacaatgccgt

SEQ ID NO: 5824581 - DNA, 25 bp, Homo sapien
acggcattgtcgtcgctcgggagtc

SEQ ID NO: 5824582 - DNA, 25 bp, Homo sapien
acaatcattggacggtggctaagac

SEQ ID NO: 5824583 - DNA, 25 bp, Homo sapien
gtcttagccaccgtccaatgattgt

SEQ ID NO: 5824584 - DNA, 25 bp, Homo sapien
gaactgttcttgcttagtaatcttg

SEQ ID NO: 5824585 - DNA, 25 bp, Homo sapien
caagattactaagcaagaacagttc

SEQ ID NO: 5824586 - DNA, 25 bp, Homo sapien
acagacatagactaagaatttcgac

SEQ ID NO: 5824587 - DNA, 25 bp, Homo sapien
gtcgaaattcttagtctatgtctgt

SEQ ID NO: 5824588 - DNA, 25 bp, Homo sapien
tcggcgtcggctgcgcctcgctccg

SEQ ID NO: 5824589 - DNA, 25 bp, Homo sapien
cggagcgaggcgcagccgacgccga

SEQ ID NO: 5824590 - DNA, 25 bp, Homo sapien
tttaacctatcatcgacacacctaa

SEQ ID NO: 5824591 - DNA, 25 bp, Homo sapien
ttaggtgtgtcgatgataggttaaa

SEQ ID NO: 5824592 - DNA, 25 bp, Homo sapien
atagtcgacgtgcaaaagtaccggg

SEQ ID NO: 5824593 - DNA, 25 bp, Homo sapien
cccggtacttttgcacgtcgactat

SEQ ID NO: 5824594 - DNA, 25 bp, Homo sapien
gactcttgtaacctcggacgttcgt

SEQ ID NO: 5824595 - DNA, 25 bp, Homo sapien
acgaacgtccgaggttacaagagtc

SEQ ID NO: 5824596 - DNA, 25 bp, Homo sapien
ggtgcggcgggcctcctctgtccgg

SEQ ID NO: 5824597 - DNA, 25 bp, Homo sapien
ccggacagaggaggcccgccgcacc

SEQ ID NO: 5824598 - DNA, 25 bp, Homo sapien
gtgcggcgggcctcctctgtccggg

SEQ ID NO: 5824599 - DNA, 25 bp, Homo sapien
cccggacagaggaggcccgccgcac

SEQ ID NO: 5824600 - DNA, 25 bp, Homo sapien
agaggaacaggttaccagggtgtat

SEQ ID NO: 5824601 - DNA, 25 bp, Homo sapien
atacaccctggtaacctgttcctct

SEQ ID NO: 5824602 - DNA, 25 bp, Homo sapien
tgacggactttcaaatataggaggt

SEQ ID NO: 5824603 - DNA, 25 bp, Homo sapien
acctcctatatttgaaagtccgtca

SEQ ID NO: 5824604 - DNA, 25 bp, Homo sapien
acggaccacctctcaatcacgatga

SEQ ID NO: 5824605 - DNA, 25 bp, Homo sapien
tcatcgtgattgagaggtggtccgt

SEQ ID NO: 5824606 - DNA, 25 bp, Homo sapien
tcgaagtcgcgctccacgagaggta

SEQ ID NO: 5824607 - DNA, 25 bp, Homo sapien
tacctctcgtggagcgcgacttcga

SEQ ID NO: 5824608 - DNA, 25 bp, Homo sapien
gagaggaagatccaggaaccggacg

SEQ ID NO: 5824609 - DNA, 25 bp, Homo sapien
cgtccggttcctggatcttcctctc

SEQ ID NO: 5824610 - DNA, 25 bp, Homo sapien
tcccgaactgtaaggatttgaacaa

SEQ ID NO: 5824611 - DNA, 25 bp, Homo sapien
ttgttcaaatccttacagttcggga

SEQ ID NO: 5824612 - DNA, 25 bp, Homo sapien
acctttcggacaaagagtgtccaac

SEQ ID NO: 5824613 - DNA, 25 bp, Homo sapien
gttggacactctttgtccgaaaggt

SEQ ID NO: 5824614 - DNA, 25 bp, Homo sapien
tagacgtcagcacccgtgcacgagt

SEQ ID NO: 5824615 - DNA, 25 bp, Homo sapien
actcgtgcacgggtgctgacgtcta

SEQ ID NO: 5824616 - DNA, 25 bp, Homo sapien
tcctagggcctgcacgaaggtagac

SEQ ID NO: 5824617 - DNA, 25 bp, Homo sapien
gtctaccttcgtgcaggccctagga

SEQ ID NO: 5824618 - DNA, 25 bp, Homo sapien
cagaaaaatacttctccaacgtaaa

SEQ ID NO: 5824619 - DNA, 25 bp, Homo sapien
tttacgttggagaagtatttttctg

SEQ ID NO: 5824620 - DNA, 25 bp, Homo sapien
agaagatggtgtaagttagtacaat

SEQ ID NO: 5824621 - DNA, 25 bp, Homo sapien
attgtactaacttacaccatcttct

SEQ ID NO: 5824622 - DNA, 25 bp, Homo sapien
ccctccgagacgggctgtggtcggt

SEQ ID NO: 5824623 - DNA, 25 bp, Homo sapien
accgaccacagcccgtctcggaggg

SEQ ID NO: 5824624 - DNA, 25 bp, Homo sapien
ggtcgtcagcaagagtgtcaccggt

SEQ ID NO: 5824625 - DNA, 25 bp, Homo sapien
accggtgacactcttgctgacgacc

SEQ ID NO: 5824626 - DNA, 25 bp, Homo sapien
gggacccagcacttccgcggtgctg

SEQ ID NO: 5824627 - DNA, 25 bp, Homo sapien
cagcaccgcggaagtgctgggtccc

SEQ ID NO: 5824628 - DNA, 25 bp, Homo sapien
cacccggtagactgcgagccaggcg

SEQ ID NO: 5824629 - DNA, 25 bp, Homo sapien
cgcctggctcgcagtctaccgggtg

SEQ ID NO: 5824630 - DNA, 25 bp, Homo sapien
gtcgggctccgggccgtgcgggttg

SEQ ID NO: 5824631 - DNA, 25 bp, Homo sapien
caacccgcacggcccggagcccgac

SEQ ID NO: 5824632 - DNA, 25 bp, Homo sapien
tcgtaaattagtacgaacacattca

SEQ ID NO: 5824633 - DNA, 25 bp, Homo sapien
tgaatgtgttcgtactaatttacga

SEQ ID NO: 5824634 - DNA, 25 bp, Homo sapien
aatatcgaaggacaagtaaatagta

SEQ ID NO: 5824635 - DNA, 25 bp, Homo sapien
tactatttacttgtccttcgatatt

SEQ ID NO: 5824636 - DNA, 25 bp, Homo sapien
aattatccttacaatctttaaggac

SEQ ID NO: 5824637 - DNA, 25 bp, Homo sapien
gtccttaaagattgtaaggataatt

SEQ ID NO: 5824638 - DNA, 25 bp, Homo sapien
tccttcaaccatttatatatattaa

SEQ ID NO: 5824639 - DNA, 25 bp, Homo sapien
ttaatatatataaatggttgaagga

SEQ ID NO: 5824640 - DNA, 25 bp, Homo sapien
gacccctgtcccgtacaggcgggcc

SEQ ID NO: 5824641 - DNA, 25 bp, Homo sapien
ggcccgcctgtacgggacaggggtc

SEQ ID NO: 5824642 - DNA, 25 bp, Homo sapien
cgcgagggcccccgtctccagcgcc

SEQ ID NO: 5824643 - DNA, 25 bp, Homo sapien
ggcgctggagacgggggccctcgcg

SEQ ID NO: 5824644 - DNA, 25 bp, Homo sapien
agccgcgcgagggcccccgtctcca

SEQ ID NO: 5824645 - DNA, 25 bp, Homo sapien
tggagacgggggccctcgcgcggct

SEQ ID NO: 5824646 - DNA, 25 bp, Homo sapien
gcgagggcccccgtctccagcgcca

SEQ ID NO: 5824647 - DNA, 25 bp, Homo sapien
tggcgctggagacgggggccctcgc

SEQ ID NO: 5824648 - DNA, 25 bp, Homo sapien
ttatagattgaacatagataactag

SEQ ID NO: 5824649 - DNA, 25 bp, Homo sapien
ctagttatctatgttcaatctataa

SEQ ID NO: 5824650 - DNA, 25 bp, Homo sapien
accgtgaactgtattcgacgggacc

SEQ ID NO: 5824651 - DNA, 25 bp, Homo sapien
ggtcccgtcgaatacagttcacggt

SEQ ID NO: 5824652 - DNA, 25 bp, Homo sapien
cccgagagcacaactggcttctcgt

SEQ ID NO: 5824653 - DNA, 25 bp, Homo sapien
acgagaagccagttgtgctctcggg

SEQ ID NO: 5824654 - DNA, 25 bp, Homo sapien
tcgtttataacaccccagcgaccgg

SEQ ID NO: 5824655 - DNA, 25 bp, Homo sapien
ccggtcgctggggtgttataaacga

SEQ ID NO: 5824656 - DNA, 25 bp, Homo sapien
gacagacgggcccacttctgtgcga

SEQ ID NO: 5824657 - DNA, 25 bp, Homo sapien
tcgcacagaagtgggcccgtctgtc

SEQ ID NO: 5824658 - DNA, 25 bp, Homo sapien
ttctctctcaagtccagatcagtgt

SEQ ID NO: 5824659 - DNA, 25 bp, Homo sapien
acactgatctggacttgagagagaa

SEQ ID NO: 5824660 - DNA, 25 bp, Homo sapien
agacctgtaaaaacacagacggtag

SEQ ID NO: 5824661 - DNA, 25 bp, Homo sapien
ctaccgtctgtgtttttacaggtct

SEQ ID NO: 5824662 - DNA, 25 bp, Homo sapien
ttttcctctcaccagtgaacagcag

SEQ ID NO: 5824663 - DNA, 25 bp, Homo sapien
caggaaaactagaaaactggtcaag

SEQ ID NO: 5824664 - DNA, 25 bp, Homo sapien
cagcaggtgaggaaacagactctgg

SEQ ID NO: 5824665 - DNA, 25 bp, Homo sapien
acagcaggtgaggaaacagactctg

SEQ ID NO: 5824666 - DNA, 25 bp, Homo sapien
gtgggtgctggcagccacaatctcc

SEQ ID NO: 5824667 - DNA, 25 bp, Homo sapien
tgtcatcaggcaaagaccagggtgg

SEQ ID NO: 5824668 - DNA, 25 bp, Homo sapien
aacagcaggtgaggaaacagactct

SEQ ID NO: 5824669 - DNA, 25 bp, Homo sapien
actggtcaagggagaacaagtccct

SEQ ID NO: 5824670 - DNA, 25 bp, Homo sapien
ttctctgtcatcaggcaaagaccag

SEQ ID NO: 5824671 - DNA, 25 bp, Homo sapien
ctagaaaactggtcaagggagaaca

SEQ ID NO: 5824672 - DNA, 25 bp, Homo sapien
ctgtcatcaggcaaagaccagggtg

SEQ ID NO: 5824673 - DNA, 25 bp, Homo sapien
gaacagcaggtgaggaaacagactc

SEQ ID NO: 5824674 - DNA, 25 bp, Homo sapien
tcctctcaccagtgaacagcaggtg

SEQ ID NO: 5824675 - DNA, 25 bp, Homo sapien
tttcctctcaccagtgaacagcagg

SEQ ID NO: 5824676 - DNA, 25 bp, Homo sapien
ctggtcaagggagaacaagtccctt

SEQ ID NO: 5824677 - DNA, 25 bp, Homo sapien
actagaaaactggtcaagggagaac

SEQ ID NO: 5824678 - DNA, 25 bp, Homo sapien
acaactatcaggactttacacgtag

SEQ ID NO: 5824679 - DNA, 25 bp, Homo sapien
ctacgtgtaaagtcctgatagttgt

SEQ ID NO: 5824680 - DNA, 25 bp, Homo sapien
ccacacattcacacaaatttgacac

SEQ ID NO: 5824681 - DNA, 25 bp, Homo sapien
gtgtcaaatttgtgtgaatgtgtgg

SEQ ID NO: 5824682 - DNA, 25 bp, Homo sapien
tccgtctcgacgtcaggtgagggac

SEQ ID NO: 5824683 - DNA, 25 bp, Homo sapien
gtccctcacctgacgtcgagacgga

SEQ ID NO: 5824684 - DNA, 25 bp, Homo sapien
tactgtcgttgaactatcctggacg

SEQ ID NO: 5824685 - DNA, 25 bp, Homo sapien
cgtccaggatagttcaacgacagta

SEQ ID NO: 5824686 - DNA, 25 bp, Homo sapien
ggtctcccctcgtgcccgggcggat

SEQ ID NO: 5824687 - DNA, 25 bp, Homo sapien
atccgcccgggcacgaggggagacc

SEQ ID NO: 5824688 - DNA, 25 bp, Homo sapien
gggtctcccctcgtgcccgggcgga

SEQ ID NO: 5824689 - DNA, 25 bp, Homo sapien
tccgcccgggcacgaggggagaccc

SEQ ID NO: 5824690 - DNA, 25 bp, Homo sapien
taaaaggacttattttggaagtatc

SEQ ID NO: 5824691 - DNA, 25 bp, Homo sapien
gatacttccaaaataagtcctttta

SEQ ID NO: 5824692 - DNA, 25 bp, Homo sapien
tctaaacttgcacttcttgtaacat

SEQ ID NO: 5824693 - DNA, 25 bp, Homo sapien
atgttacaagaagtgcaagtttaga

SEQ ID NO: 5824694 - DNA, 25 bp, Homo sapien
ctgtcctatatagatctttatcgag

SEQ ID NO: 5824695 - DNA, 25 bp, Homo sapien
ctcgataaagatctatataggacag

SEQ ID NO: 5824696 - DNA, 25 bp, Homo sapien
aacgacagtgtccaatctaaattgt

SEQ ID NO: 5824697 - DNA, 25 bp, Homo sapien
acaatttagattggacactgtcgtt

SEQ ID NO: 5824698 - DNA, 25 bp, Homo sapien
aggttaccatctcttcgatcgacag

SEQ ID NO: 5824699 - DNA, 25 bp, Homo sapien
ctgtcgatcgaagagatggtaacct

SEQ ID NO: 5824700 - DNA, 25 bp, Homo sapien
gtaacgatcttcatcctaaccttcg

SEQ ID NO: 5824701 - DNA, 25 bp, Homo sapien
cgaaggttaggatgaagatcgttac

SEQ ID NO: 5824702 - DNA, 25 bp, Homo sapien
tcattctggacgtgagtctcttttc

SEQ ID NO: 5824703 - DNA, 25 bp, Homo sapien
gaaaagagactcacgtccagaatga

SEQ ID NO: 5824704 - DNA, 25 bp, Homo sapien
ttttccacaccgctacacttacagg

SEQ ID NO: 5824705 - DNA, 25 bp, Homo sapien
cctgtaagtgtagcggtgtggaaaa

SEQ ID NO: 5824706 - DNA, 25 bp, Homo sapien
tataacagcttccttgaataaaagt

SEQ ID NO: 5824707 - DNA, 25 bp, Homo sapien
acttttattcaaggaagctgttata

SEQ ID NO: 5824708 - DNA, 25 bp, Homo sapien
cgttcaaacgtttcggctcctatgt

SEQ ID NO: 5824709 - DNA, 25 bp, Homo sapien
acataggagccgaaacgtttgaacg

SEQ ID NO: 5824710 - DNA, 25 bp, Homo sapien
gagacgactcggtggtcaacccccg

SEQ ID NO: 5824711 - DNA, 25 bp, Homo sapien
cgggggttgaccaccgagtcgtctc

SEQ ID NO: 5824712 - DNA, 25 bp, Homo sapien
acgatccctcgcaccgtcggacgta

SEQ ID NO: 5824713 - DNA, 25 bp, Homo sapien
tacgtccgacggtgcgagggatcgt

SEQ ID NO: 5824714 - DNA, 25 bp, Homo sapien
gcgcgggccggctcgagctaaagga

SEQ ID NO: 5824715 - DNA, 25 bp, Homo sapien
tcctttagctcgagccggcccgcgc

SEQ ID NO: 5824716 - DNA, 25 bp, Homo sapien
gagccgaactccgttggggtcgttg

SEQ ID NO: 5824717 - DNA, 25 bp, Homo sapien
caacgaccccaacggagttcggctc

SEQ ID NO: 5824718 - DNA, 25 bp, Homo sapien
gcagctgccggcaggagtctgacaa

SEQ ID NO: 5824719 - DNA, 25 bp, Homo sapien
agtgtacccggtgcaccccatgctg

SEQ ID NO: 5824720 - DNA, 25 bp, Homo sapien
cggcacagggccttggtgacaacgt

SEQ ID NO: 5824721 - DNA, 25 bp, Homo sapien
gtctacacggttactctggcacttg

SEQ ID NO: 5824722 - DNA, 25 bp, Homo sapien
cctctctggcctcaaactgcagggg

SEQ ID NO: 5824723 - DNA, 25 bp, Homo sapien
ctacactgctctgtctacacggtta

SEQ ID NO: 5824724 - DNA, 25 bp, Homo sapien
agctctggtcccagggccaccttga

SEQ ID NO: 5824725 - DNA, 25 bp, Homo sapien
tggaacagtgaagagcggactgcac

SEQ ID NO: 5824726 - DNA, 25 bp, Homo sapien
cccaaaggaatccacagagcagggg

SEQ ID NO: 5824727 - DNA, 25 bp, Homo sapien
cccaggggagccatcaccagcatga

SEQ ID NO: 5824728 - DNA, 25 bp, Homo sapien
acagggccttggtgacaacgtgaag

SEQ ID NO: 5824729 - DNA, 25 bp, Homo sapien
tcccaaaggaatccacagagcaggg

SEQ ID NO: 5824730 - DNA, 25 bp, Homo sapien
actctggcacttgtcaggtccactc

SEQ ID NO: 5824731 - DNA, 25 bp, Homo sapien
ctggaggatgccagatgggcacaca

SEQ ID NO: 5824732 - DNA, 25 bp, Homo sapien
accagcatgaggtccacacctgggg

SEQ ID NO: 5824733 - DNA, 25 bp, Homo sapien
gctggggctgagtgctgtctacact

SEQ ID NO: 5824734 - DNA, 25 bp, Homo sapien
gatccataaaatttaacagactgaa

SEQ ID NO: 5824735 - DNA, 25 bp, Homo sapien
ttcagtctgttaaattttatggatc

SEQ ID NO: 5824736 - DNA, 25 bp, Homo sapien
accttcttgtaaaacacactgaaag

SEQ ID NO: 5824737 - DNA, 25 bp, Homo sapien
ctttcagtgtgttttacaagaaggt

SEQ ID NO: 5824738 - DNA, 25 bp, Homo sapien
ccgcaagtcacgaaagagtcagtct

SEQ ID NO: 5824739 - DNA, 25 bp, Homo sapien
agactgactctttcgtgacttgcgg

SEQ ID NO: 5824740 - DNA, 25 bp, Homo sapien
aattatgcttcccatagtccactac

SEQ ID NO: 5824741 - DNA, 25 bp, Homo sapien
gtagtggactatgggaagcataatt

SEQ ID NO: 5824742 - DNA, 25 bp, Homo sapien
gtgtatctaagacaaccttgactcc

SEQ ID NO: 5824743 - DNA, 25 bp, Homo sapien
ggagtcaaggttgtcttagatacac

SEQ ID NO: 5824744 - DNA, 25 bp, Homo sapien
ccgtccccgacacagtgcgtcggac

SEQ ID NO: 5824745 - DNA, 25 bp, Homo sapien
gtccgacgcactgtgtcggggacgg

SEQ ID NO: 5824746 - DNA, 25 bp, Homo sapien
ttcatccgaaaatcgagtcccttcc

SEQ ID NO: 5824747 - DNA, 25 bp, Homo sapien
ggaagggactcgattttcggatgaa

SEQ ID NO: 5824748 - DNA, 25 bp, Homo sapien
gtacaatttttgagatctcaagagg

SEQ ID NO: 5824749 - DNA, 25 bp, Homo sapien
cctcttgagatctcaaaaattgtac

SEQ ID NO: 5824750 - DNA, 25 bp, Homo sapien
cggccgacaggtcacggtgtggagg

SEQ ID NO: 5824751 - DNA, 25 bp, Homo sapien
cctccacaccgtgacctgtcggccg

SEQ ID NO: 5824752 - DNA, 25 bp, Homo sapien
cggtcggccgacaggtcacggtgtg

SEQ ID NO: 5824753 - DNA, 25 bp, Homo sapien
cacaccgtgacctgtcggccgaccg

SEQ ID NO: 5824754 - DNA, 25 bp, Homo sapien
gtgggtgtcgcggactctggtggcg

SEQ ID NO: 5824755 - DNA, 25 bp, Homo sapien
cgccaccagagtccgcgacacccac

SEQ ID NO: 5824756 - DNA, 25 bp, Homo sapien
gtaaccatggagctacaaatctccc

SEQ ID NO: 5824757 - DNA, 25 bp, Homo sapien
gggagatttgtagctccatggttac

SEQ ID NO: 5824758 - DNA, 25 bp, Homo sapien
tacgacattgacttctagaaacgta

SEQ ID NO: 5824759 - DNA, 25 bp, Homo sapien
tacgtttctagaagtcaatgtcgta

SEQ ID NO: 5824760 - DNA, 25 bp, Homo sapien
cggtcattattatcctcagggttcc

SEQ ID NO: 5824761 - DNA, 25 bp, Homo sapien
ggaaccctgaggataataatgaccg

SEQ ID NO: 5824762 - DNA, 25 bp, Homo sapien
acgacaacttgttgggtgtccgtcc

SEQ ID NO: 5824763 - DNA, 25 bp, Homo sapien
ggacggacacccaacaagttgtcgt

SEQ ID NO: 5824764 - DNA, 25 bp, Homo sapien
accaggaggttgtacgagttatact

SEQ ID NO: 5824765 - DNA, 25 bp, Homo sapien
agtataactcgtacaacctcctggt

SEQ ID NO: 5824766 - DNA, 25 bp, Homo sapien
aacacaacccagtcaagggaagtcc

SEQ ID NO: 5824767 - DNA, 25 bp, Homo sapien
aaccacctggcatggcaaggtgagc

SEQ ID NO: 5824768 - DNA, 25 bp, Homo sapien
gaggaagcagatgaaatctacaaca

SEQ ID NO: 5824769 - DNA, 25 bp, Homo sapien
atatcccagccttccctaaggagga

SEQ ID NO: 5824770 - DNA, 25 bp, Homo sapien
aaatagggcagcaccattaggatcc

SEQ ID NO: 5824771 - DNA, 25 bp, Homo sapien
catatcccagccttccctaaggagg

SEQ ID NO: 5824772 - DNA, 25 bp, Homo sapien
cgggcttgggctggaatctctcatc

SEQ ID NO: 5824773 - DNA, 25 bp, Homo sapien
tagggcagcaccattaggatcctga

SEQ ID NO: 5824774 - DNA, 25 bp, Homo sapien
cagcaccattaggatcctgattcac

SEQ ID NO: 5824775 - DNA, 25 bp, Homo sapien
agcaccattaggatcctgattcacc

SEQ ID NO: 5824776 - DNA, 25 bp, Homo sapien
taatacagacccaggtataaatagg

SEQ ID NO: 5824777 - DNA, 25 bp, Homo sapien
acaacccagtcaagggaagtccctc

SEQ ID NO: 5824778 - DNA, 25 bp, Homo sapien
gtagcaccaaaaggtgtgaagggca

SEQ ID NO: 5824779 - DNA, 25 bp, Homo sapien
agcagatgaaatctacaacaggggg

SEQ ID NO: 5824780 - DNA, 25 bp, Homo sapien
ttggtccccaaaccacctggcatgg

SEQ ID NO: 5824781 - DNA, 25 bp, Homo sapien
caaattatgccctatggcctggcgg

SEQ ID NO: 5824782 - DNA, 25 bp, Homo sapien
cagaaacactctaaattcgtcaaac

SEQ ID NO: 5824783 - DNA, 25 bp, Homo sapien
gtttgacgaatttagagtgtttctg

SEQ ID NO: 5824784 - DNA, 25 bp, Homo sapien
acccttcacaccttaggtcgtccag

SEQ ID NO: 5824785 - DNA, 25 bp, Homo sapien
ctggacgacctaaggtgtgaagggt

SEQ ID NO: 5824786 - DNA, 25 bp, Homo sapien
ggtccccagtcattgacacgcgaca

SEQ ID NO: 5824787 - DNA, 25 bp, Homo sapien
tgtcgcgtgtcaatgactggggacc

SEQ ID NO: 5824788 - DNA, 25 bp, Homo sapien
gtcttcacccccgaggcgggagact

SEQ ID NO: 5824789 - DNA, 25 bp, Homo sapien
agtctcccgcctcgggggtgaagac

SEQ ID NO: 5824790 - DNA, 25 bp, Homo sapien
gggaccttatgggtatgtcgtgaca

SEQ ID NO: 5824791 - DNA, 25 bp, Homo sapien
tgtcacgacatacccataaggtccc

SEQ ID NO: 5824792 - DNA, 25 bp, Homo sapien
ccgagaggcccctcacacctctggt

SEQ ID NO: 5824793 - DNA, 25 bp, Homo sapien
accagaggtgtgaggggcctctcgg

SEQ ID NO: 5824794 - DNA, 25 bp, Homo sapien
gacgtgggcctctttgttgagttcc

SEQ ID NO: 5824795 - DNA, 25 bp, Homo sapien
ggaactcaacaaagaggcccacgtc

SEQ ID NO: 5824796 - DNA, 25 bp, Homo sapien
tccccggtctttacgaagtctgagt

SEQ ID NO: 5824797 - DNA, 25 bp, Homo sapien
actcagacttcgtaaagaccgggga

SEQ ID NO: 5824798 - DNA, 25 bp, Homo sapien
cgccgagccgtcccgcgcgttcggc

SEQ ID NO: 5824799 - DNA, 25 bp, Homo sapien
gccgaacgcgcgggacggctcggcg

SEQ ID NO: 5824800 - DNA, 25 bp, Homo sapien
tcgtcgtggacgggcgccggggggc

SEQ ID NO: 5824801 - DNA, 25 bp, Homo sapien
gccccccggcgcccgtccacgacga

SEQ ID NO: 5824802 - DNA, 25 bp, Homo sapien
accggtctctggctttcggtaggtc

SEQ ID NO: 5824803 - DNA, 25 bp, Homo sapien
gacctaccgaaagccagagaccggt

SEQ ID NO: 5824804 - DNA, 25 bp, Homo sapien
cttacggtcgtggtcctgaggtagt

SEQ ID NO: 5824805 - DNA, 25 bp, Homo sapien
actacctcaggaccacgaccgtaag

SEQ ID NO: 5824806 - DNA, 25 bp, Homo sapien
gtccataactattattcctacctat

SEQ ID NO: 5824807 - DNA, 25 bp, Homo sapien
ataggtaggaataatagttatggac

SEQ ID NO: 5824808 - DNA, 25 bp, Homo sapien
tgtgaccacttcgtgacgcaatcgt

SEQ ID NO: 5824809 - DNA, 25 bp, Homo sapien
acgattgcgtcacgaagtggtcaca

SEQ ID NO: 5824810 - DNA, 25 bp, Homo sapien
ttcaccgtgcttcctccgccacaga

SEQ ID NO: 5824811 - DNA, 25 bp, Homo sapien
tctgtggcggaggaagcacggtgaa

SEQ ID NO: 5824812 - DNA, 25 bp, Homo sapien
ggtcggggcggactcggaagtgtcg

SEQ ID NO: 5824813 - DNA, 25 bp, Homo sapien
cgacacttccgagtccgccccgacc

SEQ ID NO: 5824814 - DNA, 25 bp, Homo sapien
ggagagcgtggcctgcgcccacggt

SEQ ID NO: 5824815 - DNA, 25 bp, Homo sapien
accgtgggcgcaggccacgctctcc

SEQ ID NO: 5824816 - DNA, 25 bp, Homo sapien
caggctgcgacaccggagagcgtgg

SEQ ID NO: 5824817 - DNA, 25 bp, Homo sapien
ccacgctctccggtgtcgcagcctg

SEQ ID NO: 5824818 - DNA, 25 bp, Homo sapien
aactcaagactcggaaattattaca

SEQ ID NO: 5824819 - DNA, 25 bp, Homo sapien
tgtaataatttccgagtcttgagtt

SEQ ID NO: 5824820 - DNA, 25 bp, Homo sapien
gatttttaattttgccctcgtatag

SEQ ID NO: 5824821 - DNA, 25 bp, Homo sapien
ctatacgagggcaaaattaaaaatc

SEQ ID NO: 5824822 - DNA, 25 bp, Homo sapien
cgggcccaccaaggcgaccgtgtgc

SEQ ID NO: 5824823 - DNA, 25 bp, Homo sapien
gcacacggtcgccttggtgggcccg

SEQ ID NO: 5824824 - DNA, 25 bp, Homo sapien
gggccccaaggacaaactcctctgt

SEQ ID NO: 5824825 - DNA, 25 bp, Homo sapien
acagaggagtttgtccttggggccc

SEQ ID NO: 5824826 - DNA, 25 bp, Homo sapien
gagtagacgtcttcgcttccggacc

SEQ ID NO: 5824827 - DNA, 25 bp, Homo sapien
ggtccggaagcgaagacgtctactc

SEQ ID NO: 5824828 - DNA, 25 bp, Homo sapien
tcgccgcgagcctcgcgcaaccggg

SEQ ID NO: 5824829 - DNA, 25 bp, Homo sapien
cccggttgcgcgaggctcgcggcga

SEQ ID NO: 5824830 - DNA, 25 bp, Homo sapien
agtccgaaggtagtggcgctccccg

SEQ ID NO: 5824831 - DNA, 25 bp, Homo sapien
cggggagcgccactaccttcggact

SEQ ID NO: 5824832 - DNA, 25 bp, Homo sapien
ccacttccgagaaattatagcaaga

SEQ ID NO: 5824833 - DNA, 25 bp, Homo sapien
tcttgctataatttctcggaagtgg

SEQ ID NO: 5824834 - DNA, 25 bp, Homo sapien
aatttctccatgaccatctcactag

SEQ ID NO: 5824835 - DNA, 25 bp, Homo sapien
ctagtgagatggtcatggagaaatt

SEQ ID NO: 5824836 - DNA, 25 bp, Homo sapien
ctccctgctactgacggaagtttaa

SEQ ID NO: 5824837 - DNA, 25 bp, Homo sapien
ttaaacttccgtcagtagcagggag

SEQ ID NO: 5824838 - DNA, 25 bp, Homo sapien
ggttatcattcctccttttgaagaa

SEQ ID NO: 5824839 - DNA, 25 bp, Homo sapien
gagcaaacagcctgctttgtttgga

SEQ ID NO: 5824840 - DNA, 25 bp, Homo sapien
cttgggcagatttgggttatcattc

SEQ ID NO: 5824841 - DNA, 25 bp, Homo sapien
tcaagtgtcacttgggcagatttgg

SEQ ID NO: 5824842 - DNA, 25 bp, Homo sapien
agaagtgagcaaacagcctgctttg

SEQ ID NO: 5824843 - DNA, 25 bp, Homo sapien
ccttctcaagtgtcacttgggcaga

SEQ ID NO: 5824844 - DNA, 25 bp, Homo sapien
gtcacttgggcagatttgggttatc

SEQ ID NO: 5824845 - DNA, 25 bp, Homo sapien
cagcctgctttgtttggagaagttg

SEQ ID NO: 5824846 - DNA, 25 bp, Homo sapien
cactgctcagccagtcagaagtcag

SEQ ID NO: 5824847 - DNA, 25 bp, Homo sapien
taagaaatccaccaggaaccccagc

SEQ ID NO: 5824848 - DNA, 25 bp, Homo sapien
tgaaggaacccactgctcagccagt

SEQ ID NO: 5824849 - DNA, 25 bp, Homo sapien
ggaacctgaaggaacccactgctca

SEQ ID NO: 5824850 - DNA, 25 bp, Homo sapien
gcgttaggtagtaagaaatccacca

SEQ ID NO: 5824851 - DNA, 25 bp, Homo sapien
agtaagaaatccaccaggaacccca

SEQ ID NO: 5824852 - DNA, 25 bp, Homo sapien
aggtagtaagaaatccaccaggaac

SEQ ID NO: 5824853 - DNA, 25 bp, Homo sapien
ttggcaaggaacctgaaggaaccca

SEQ ID NO: 5824854 - DNA, 25 bp, Homo sapien
agaggtgaatttcggaaccactgcg

SEQ ID NO: 5824855 - DNA, 25 bp, Homo sapien
cgcagtggttccgaaattcacctct

SEQ ID NO: 5824856 - DNA, 25 bp, Homo sapien
agaccagagaaccttgcgactcgac

SEQ ID NO: 5824857 - DNA, 25 bp, Homo sapien
gtcgagtcgcaaggttctctggtct

SEQ ID NO: 5824858 - DNA, 25 bp, Homo sapien
aagaaggcggccctcgcgcagaccg

SEQ ID NO: 5824859 - DNA, 25 bp, Homo sapien
cggtctgcgcgagggccgccttctt

SEQ ID NO: 5824860 - DNA, 25 bp, Homo sapien
aactgagactcattacgtggaagat

SEQ ID NO: 5824861 - DNA, 25 bp, Homo sapien
atcttccacgtaatgagtctcagtt

SEQ ID NO: 5824862 - DNA, 25 bp, Homo sapien
ggaaataatcgtaagagggaaacat

SEQ ID NO: 5824863 - DNA, 25 bp, Homo sapien
atgtttccctcttacgattatttcc

SEQ ID NO: 5824864 - DNA, 25 bp, Homo sapien
cgggagcggtcggacgctagagctc

SEQ ID NO: 5824865 - DNA, 25 bp, Homo sapien
gagctctagcgtccgaccgctcccg

SEQ ID NO: 5824866 - DNA, 25 bp, Homo sapien
gtttctaaagtttatgacgtgtaaa

SEQ ID NO: 5824867 - DNA, 25 bp, Homo sapien
tttacacgtcataaactttagaaac

SEQ ID NO: 5824868 - DNA, 25 bp, Homo sapien
cagccgcaacgtggccgaagaggta

SEQ ID NO: 5824869 - DNA, 25 bp, Homo sapien
tacctcttcggccacgttgcggctg

SEQ ID NO: 5824870 - DNA, 25 bp, Homo sapien
actagaaactacacgtacagttaag

SEQ ID NO: 5824871 - DNA, 25 bp, Homo sapien
cccatcctgtatcaggcaagcaggc

SEQ ID NO: 5824872 - DNA, 25 bp, Homo sapien
agccttgggctagctttggcctagg

SEQ ID NO: 5824873 - DNA, 25 bp, Homo sapien
ccaccacaatgtttctatgatgagt

SEQ ID NO: 5824874 - DNA, 25 bp, Homo sapien
aacaaaatgatcagagccttgattt

SEQ ID NO: 5824875 - DNA, 25 bp, Homo sapien
tgtttccctcattagctgtagacta

SEQ ID NO: 5824876 - DNA, 25 bp, Homo sapien
cacaatgtttctatgatgagttaca

SEQ ID NO: 5824877 - DNA, 25 bp, Homo sapien
gcaacaccttaaatcacagactgag

SEQ ID NO: 5824878 - DNA, 25 bp, Homo sapien
ggtgtttccctcattagctgtagac

SEQ ID NO: 5824879 - DNA, 25 bp, Homo sapien
cacagactgagacctcacattctga

SEQ ID NO: 5824880 - DNA, 25 bp, Homo sapien
ccagccttgggctagctttggccta

SEQ ID NO: 5824881 - DNA, 25 bp, Homo sapien
accacaatgtttctatgatgagtta

SEQ ID NO: 5824882 - DNA, 25 bp, Homo sapien
acaaaatgatcagagccttgatttc

SEQ ID NO: 5824883 - DNA, 25 bp, Homo sapien
acaggcgctgctctgagggccttgc

SEQ ID NO: 5824884 - DNA, 25 bp, Homo sapien
cctgagtgaggacctgcccactgtc

SEQ ID NO: 5824885 - DNA, 25 bp, Homo sapien
actcctgagtgaggacctgcccact

SEQ ID NO: 5824886 - DNA, 25 bp, Homo sapien
ctgctccttccttgaggctgtcaga

SEQ ID NO: 5824887 - DNA, 25 bp, Homo sapien
tcctccatgcccttggcttctgtga

SEQ ID NO: 5824888 - DNA, 25 bp, Homo sapien
gaggtgatcacataggcactgtccc

SEQ ID NO: 5824889 - DNA, 25 bp, Homo sapien
ccagcacaggggaaacagaggctcc

SEQ ID NO: 5824890 - DNA, 25 bp, Homo sapien
gaaatgcccctaagcttagccttta

SEQ ID NO: 5824891 - DNA, 25 bp, Homo sapien
caggcactgctccttccttgaggct

SEQ ID NO: 5824892 - DNA, 25 bp, Homo sapien
cagcacaggggaaacagaggctccc

SEQ ID NO: 5824893 - DNA, 25 bp, Homo sapien
cctctgtccccactttgggaaatgc

SEQ ID NO: 5824894 - DNA, 25 bp, Homo sapien
tccaagggccccatggctgacacag

SEQ ID NO: 5824895 - DNA, 25 bp, Homo sapien
cttgaggctgtcagacaccagggcg

SEQ ID NO: 5824896 - DNA, 25 bp, Homo sapien
cacataggcactgtccctgggtggt

SEQ ID NO: 5824897 - DNA, 25 bp, Homo sapien
cctccatgcccttggcttctgtgag

SEQ ID NO: 5824898 - DNA, 25 bp, Homo sapien
ccctctgtccccactttgggaaatg

SEQ ID NO: 5824899 - DNA, 25 bp, Homo sapien
ggctgcctgggcagaaacccaggcc

SEQ ID NO: 5824900 - DNA, 25 bp, Homo sapien
tcatcactcacacttggggccaggc

SEQ ID NO: 5824901 - DNA, 25 bp, Homo sapien
cactttgggaaatgcccctaagctt

SEQ ID NO: 5824902 - DNA, 25 bp, Homo sapien
cgtctgtaccaaataatccagggaa

SEQ ID NO: 5824903 - DNA, 25 bp, Homo sapien
ttccctggattatttggtacagacg

SEQ ID NO: 5824904 - DNA, 25 bp, Homo sapien
ggcactcgtcccaccaggggccggc

SEQ ID NO: 5824905 - DNA, 25 bp, Homo sapien
gccggcccctggtgggacgagtgcc

SEQ ID NO: 5824906 - DNA, 25 bp, Homo sapien
cggcactcgtcccaccaggggccgg

SEQ ID NO: 5824907 - DNA, 25 bp, Homo sapien
ccggcccctggtgggacgagtgccg

SEQ ID NO: 5824908 - DNA, 25 bp, Homo sapien
gggccccacgagcacgggtcgcaga

SEQ ID NO: 5824909 - DNA, 25 bp, Homo sapien
tctgcgacccgtgctcgtggggccc

SEQ ID NO: 5824910 - DNA, 25 bp, Homo sapien
taggatttcttaatcttttactttg

SEQ ID NO: 5824911 - DNA, 25 bp, Homo sapien
caaagtaaaagattaagaaatccta

SEQ ID NO: 5824912 - DNA, 25 bp, Homo sapien
tgtcggtctagtccggttgtcaatg

SEQ ID NO: 5824913 - DNA, 25 bp, Homo sapien
cattgacaaccggactagaccgaca

SEQ ID NO: 5824914 - DNA, 25 bp, Homo sapien
tactaaacccattcccaagtctctg

SEQ ID NO: 5824915 - DNA, 25 bp, Homo sapien
cagagacttgggaatgggtttagta

SEQ ID NO: 5824916 - DNA, 25 bp, Homo sapien
aagtagaaaggcttatggtcacagt

SEQ ID NO: 5824917 - DNA, 25 bp, Homo sapien
actgtgaccataagcctttctactt

SEQ ID NO: 5824918 - DNA, 25 bp, Homo sapien
ctgtggccagggtggccatatcatc

SEQ ID NO: 5824919 - DNA, 25 bp, Homo sapien
gttggcgctgaccaatgtgggatcc

SEQ ID NO: 5824920 - DNA, 25 bp, Homo sapien
cggtcagtgaaaaacacatgattat

SEQ ID NO: 5824921 - DNA, 25 bp, Homo sapien
cacatgaagtcagagtttacgggag

SEQ ID NO: 5824922 - DNA, 25 bp, Homo sapien
agctctcagggagaccccatgcctg

SEQ ID NO: 5824923 - DNA, 25 bp, Homo sapien
tcacatgaagtcagagtttacggga

SEQ ID NO: 5824924 - DNA, 25 bp, Homo sapien
tgggaggtctcctgccttgttaagg

SEQ ID NO: 5824925 - DNA, 25 bp, Homo sapien
ccggttatcagctctcagggagacc

SEQ ID NO: 5824926 - DNA, 25 bp, Homo sapien
gttttcccggttatcagctctcagg

SEQ ID NO: 5824927 - DNA, 25 bp, Homo sapien
cccatgcctgctcacatgaagtcag

SEQ ID NO: 5824928 - DNA, 25 bp, Homo sapien
ccagctgtggccagggtggccatat

SEQ ID NO: 5824929 - DNA, 25 bp, Homo sapien
ctgtatataaagacaaaagcagagc

SEQ ID NO: 5824930 - DNA, 25 bp, Homo sapien
ggttttcccggttatcagctctcag

SEQ ID NO: 5824931 - DNA, 25 bp, Homo sapien
tgagaaactgacatgcaattccaag

SEQ ID NO: 5824932 - DNA, 25 bp, Homo sapien
tatagttttagatcctgtgctcagg

SEQ ID NO: 5824933 - DNA, 25 bp, Homo sapien
cctgctcacatgaagtcagagttta

SEQ ID NO: 5824934 - DNA, 25 bp, Homo sapien
aattcctcaacaggaggtcactatg

SEQ ID NO: 5824935 - DNA, 25 bp, Homo sapien
catagtgacctcctgttgaggaatt

SEQ ID NO: 5824936 - DNA, 25 bp, Homo sapien
tttatgatcgcaaagtctcgaacag

SEQ ID NO: 5824937 - DNA, 25 bp, Homo sapien
ctgttcgagactttgcgatcataaa

SEQ ID NO: 5824938 - DNA, 25 bp, Homo sapien
acggtgagttggtagaaaggagacc

SEQ ID NO: 5824939 - DNA, 25 bp, Homo sapien
ggtctcctttctaccaactcaccgt

SEQ ID NO: 5824940 - DNA, 25 bp, Homo sapien
gcagggggctaaggacctgtcaaat

SEQ ID NO: 5824941 - DNA, 25 bp, Homo sapien
atttgacaggtccttagccccctgc

SEQ ID NO: 5824942 - DNA, 25 bp, Homo sapien
gaaataacaaacgtcaattaccacc

SEQ ID NO: 5824943 - DNA, 25 bp, Homo sapien
ggtggtaattgacgtttgttatttc

SEQ ID NO: 5824944 - DNA, 25 bp, Homo sapien
aagtctgagatgtcttttagataat

SEQ ID NO: 5824945 - DNA, 25 bp, Homo sapien
attatctaaaagacatctcagactt

SEQ ID NO: 5824946 - DNA, 25 bp, Homo sapien
aaggaggtgtgggtctggtacaagg

SEQ ID NO: 5824947 - DNA, 25 bp, Homo sapien
ccttgtaccagacccacacctcctt

SEQ ID NO: 5824948 - DNA, 25 bp, Homo sapien
aagacgacaataacttattatacat

SEQ ID NO: 5824949 - DNA, 25 bp, Homo sapien
atgtataataagttattgtcgtctt

SEQ ID NO: 5824950 - DNA, 25 bp, Homo sapien
ccccacccttgtcgtagaggaagag

SEQ ID NO: 5824951 - DNA, 25 bp, Homo sapien
ctcttcctctacgacaagggtgggg

SEQ ID NO: 5824952 - DNA, 25 bp, Homo sapien
tcttctctaatggacaatagaccgt

SEQ ID NO: 5824953 - DNA, 25 bp, Homo sapien
acggtctattgtccattagagaaga

SEQ ID NO: 5824954 - DNA, 25 bp, Homo sapien
attaagtgtaagaagggctactact

SEQ ID NO: 5824955 - DNA, 25 bp, Homo sapien
agtagtagcccttcttacacttaat

SEQ ID NO: 5824956 - DNA, 25 bp, Homo sapien
atcctttaactacacagacggtcaa

SEQ ID NO: 5824957 - DNA, 25 bp, Homo sapien
ttgaccgtctgtgtagttaaaggat

SEQ ID NO: 5824958 - DNA, 25 bp, Homo sapien
aaagatagagtcttaaaagtttaga

SEQ ID NO: 5824959 - DNA, 25 bp, Homo sapien
tctaaacttttaagactctatcttt

SEQ ID NO: 5824960 - DNA, 25 bp, Homo sapien
tgtttttacagtcgagaaaatttta

SEQ ID NO: 5824961 - DNA, 25 bp, Homo sapien
taaaattttctcgactgtaaaaaca

SEQ ID NO: 5824962 - DNA, 25 bp, Homo sapien
ctaatattacttggtgacttgtcaa

SEQ ID NO: 5824963 - DNA, 25 bp, Homo sapien
ttgacaagtcaccaagtaatattag

SEQ ID NO: 5824964 - DNA, 25 bp, Homo sapien
taatatatgtattcagggaaaattt

SEQ ID NO: 5824965 - DNA, 25 bp, Homo sapien
aaattttccctgaatacatatatta

SEQ ID NO: 5824966 - DNA, 25 bp, Homo sapien
cgcccctgagcgtcgagagggacgt

SEQ ID NO: 5824967 - DNA, 25 bp, Homo sapien
acgtccctctcgacgctcaggggcg

SEQ ID NO: 5824968 - DNA, 25 bp, Homo sapien
attttctaacctattagttttcatg

SEQ ID NO: 5824969 - DNA, 25 bp, Homo sapien
catgaaaactaataggttagaaaat

SEQ ID NO: 5824970 - DNA, 25 bp, Homo sapien
tcgtcctcgtccacggggacgtcgg

SEQ ID NO: 5824971 - DNA, 25 bp, Homo sapien
ccgacgtccccgtggacgaggacga

SEQ ID NO: 5824972 - DNA, 25 bp, Homo sapien
gacatcaattaaacactcccagtag

SEQ ID NO: 5824973 - DNA, 25 bp, Homo sapien
ctactgggagtgtttaattgatgtc

SEQ ID NO: 5824974 - DNA, 25 bp, Homo sapien
atatttattgtttctaaggggagta

SEQ ID NO: 5824975 - DNA, 25 bp, Homo sapien
tactccccttagaaacaataaatat

SEQ ID NO: 5824976 - DNA, 25 bp, Homo sapien
ctataaatttaagttgcgactaaaa

SEQ ID NO: 5824977 - DNA, 25 bp, Homo sapien
ttttagtcgcaacttaaatttatag

SEQ ID NO: 5824978 - DNA, 25 bp, Homo sapien
ccccggtcgactcttaagacagtgg

SEQ ID NO: 5824979 - DNA, 25 bp, Homo sapien
ccactgtcttaagagtcgaccgggg

SEQ ID NO: 5824980 - DNA, 25 bp, Homo sapien
ccaagggtaactcaggtcctacgaa

SEQ ID NO: 5824981 - DNA, 25 bp, Homo sapien
ttcgtaggacctgagttacccttgg

SEQ ID NO: 5824982 - DNA, 25 bp, Homo sapien
acataacaaccaataaacataacat

SEQ ID NO: 5824983 - DNA, 25 bp, Homo sapien
atgttatgtttattggttgttatgt

SEQ ID NO: 5824984 - DNA, 25 bp, Homo sapien
tctgtcgtatctgtggtgagtcacg

SEQ ID NO: 5824985 - DNA, 25 bp, Homo sapien
cgtgactcaccacagatacgacaga

SEQ ID NO: 5824986 - DNA, 25 bp, Homo sapien
gccgcactccgcgtgtccggcgacc

SEQ ID NO: 5824987 - DNA, 25 bp, Homo sapien
ggtcgccggacacgcggagtgcggc

SEQ ID NO: 5824988 - DNA, 25 bp, Homo sapien
caatgtagccatattccatgaaatg

SEQ ID NO: 5824989 - DNA, 25 bp, Homo sapien
agccatattccatgaaatgtggtta

SEQ ID NO: 5824990 - DNA, 25 bp, Homo sapien
gtattacaatacagctgaaagcttt

SEQ ID NO: 5824991 - DNA, 25 bp, Homo sapien
catattccatgaaatgtggttagca

SEQ ID NO: 5824992 - DNA, 25 bp, Homo sapien
tagatgagagacaaagaaactctac

SEQ ID NO: 5824993 - DNA, 25 bp, Homo sapien
ttaattgcactaatgcagacagttt

SEQ ID NO: 5824994 - DNA, 25 bp, Homo sapien
ttcccaccagtttagatgggaagac

SEQ ID NO: 5824995 - DNA, 25 bp, Homo sapien
agtattacaatacagctgaaagctt

SEQ ID NO: 5824996 - DNA, 25 bp, Homo sapien
ggtatctttagtgttcactgtcagt

SEQ ID NO: 5824997 - DNA, 25 bp, Homo sapien
atttaatgcaagatgcaatgtagcc

SEQ ID NO: 5824998 - DNA, 25 bp, Homo sapien
cttgtgctttttctactttgggagg

SEQ ID NO: 5824999 - DNA, 25 bp, Homo sapien
taatgcaagatgcaatgtagccata

SEQ ID NO: 5825000 - DNA, 25 bp, Homo sapien
ctactggtttaagagttctcagttt

SEQ ID NO: 5825001 - DNA, 25 bp, Homo sapien
gaagacccagcctttggtataaata

SEQ ID NO: 5825002 - DNA, 25 bp, Homo sapien
ccatattccatgaaatgtggttagc

SEQ ID NO: 5825003 - DNA, 25 bp, Homo sapien
agagacaaagaaactctactggttt

SEQ ID NO: 5825004 - DNA, 25 bp, Homo sapien
acttctaacttcttaatctaagtct

SEQ ID NO: 5825005 - DNA, 25 bp, Homo sapien
agacttagattaagaagttagaagt

SEQ ID NO: 5825006 - DNA, 25 bp, Homo sapien
gtacttcggaggagctctcggtgtt

SEQ ID NO: 5825007 - DNA, 25 bp, Homo sapien
aacaccgagagctcctccgaagtac

SEQ ID NO: 5825008 - DNA, 25 bp, Homo sapien
aggtctgactgaggtaaggagcttc

SEQ ID NO: 5825009 - DNA, 25 bp, Homo sapien
gaagctccttacctcagtcagacct

SEQ ID NO: 5825010 - DNA, 25 bp, Homo sapien
acggactgaagggctccgtcaccct

SEQ ID NO: 5825011 - DNA, 25 bp, Homo sapien
agggtgacggagcccttcagtccgt

SEQ ID NO: 5825012 - DNA, 25 bp, Homo sapien
gctccgaggcggttacctcctacag

SEQ ID NO: 5825013 - DNA, 25 bp, Homo sapien
ctgtaggaggtaaccgcctcggagc

SEQ ID NO: 5825014 - DNA, 25 bp, Homo sapien
atggtgaagcaaaacctagtgtgta

SEQ ID NO: 5825015 - DNA, 25 bp, Homo sapien
tacacactaggttttgcttcaccat

SEQ ID NO: 5825016 - DNA, 25 bp, Homo sapien
atgacgtcaggtcccaccggttact

SEQ ID NO: 5825017 - DNA, 25 bp, Homo sapien
agtaaccggtgggacctgacgtcat

SEQ ID NO: 5825018 - DNA, 25 bp, Homo sapien
gatcgtcctctttttttatcacgta

SEQ ID NO: 5825019 - DNA, 25 bp, Homo sapien
tacgtgataaaaaaagaggacgatc

SEQ ID NO: 5825020 - DNA, 25 bp, Homo sapien
agttcaggaggagattaaaataggt

SEQ ID NO: 5825021 - DNA, 25 bp, Homo sapien
acctattttaatctcctcctgaact

SEQ ID NO: 5825022 - DNA, 25 bp, Homo sapien
cccgaacagttggtggaccaggtct

SEQ ID NO: 5825023 - DNA, 25 bp, Homo sapien
agacctggtccaccaactgttcggg

SEQ ID NO: 5825024 - DNA, 25 bp, Homo sapien
gactataacatgttctaaatattca

SEQ ID NO: 5825025 - DNA, 25 bp, Homo sapien
tgaatatttagaacatgttatagtc

SEQ ID NO: 5825026 - DNA, 25 bp, Homo sapien
acaggtctaccgacggacgtgtctc

SEQ ID NO: 5825027 - DNA, 25 bp, Homo sapien
gagacacgtccgtcggtagacctgt

SEQ ID NO: 5825028 - DNA, 25 bp, Homo sapien
gcctcgtcggtcgcccccgtcccac

SEQ ID NO: 5825029 - DNA, 25 bp, Homo sapien
gtgggacgggggcgaccgacgaggc

SEQ ID NO: 5825030 - DNA, 25 bp, Homo sapien
agaattagagcatccgggttataaa

SEQ ID NO: 5825031 - DNA, 25 bp, Homo sapien
tttataacccggatgctctaattct

SEQ ID NO: 5825032 - DNA, 25 bp, Homo sapien
agttccagggttgacagcaccgtat

SEQ ID NO: 5825033 - DNA, 25 bp, Homo sapien
atacggtgctgtcaaccctggaact

SEQ ID NO: 5825034 - DNA, 25 bp, Homo sapien
cggacactagcccatgacggtccgg

SEQ ID NO: 5825035 - DNA, 25 bp, Homo sapien
ccggaccgtcatgggctagtgtccg

SEQ ID NO: 5825036 - DNA, 25 bp, Homo sapien
tgggcgcgcgatcccgggactgccg

SEQ ID NO: 5825037 - DNA, 25 bp, Homo sapien
cggcagtcccgggatcgcgcgccca

SEQ ID NO: 5825038 - DNA, 25 bp, Homo sapien
ctcaccggagcggttaccggaggta

SEQ ID NO: 5825039 - DNA, 25 bp, Homo sapien
tacctccggtaaccgctccggtgag

SEQ ID NO: 5825040 - DNA, 25 bp, Homo sapien
cgacggatgccgacgacttttcgac

SEQ ID NO: 5825041 - DNA, 25 bp, Homo sapien
gtcgaaaagtcgtcggcatccgtcg

SEQ ID NO: 5825042 - DNA, 25 bp, Homo sapien
gagacccttcacgtcctgggacacc

SEQ ID NO: 5825043 - DNA, 25 bp, Homo sapien
ggtgtcccaggacgtgaagggtctc

SEQ ID NO: 5825044 - DNA, 25 bp, Homo sapien
tcgaattcacaacccgggttgacgt

SEQ ID NO: 5825045 - DNA, 25 bp, Homo sapien
acgtcaacccgggttgtgaattcga

SEQ ID NO: 5825046 - DNA, 25 bp, Homo sapien
tccgacccgccgctcgaccctcctc

SEQ ID NO: 5825047 - DNA, 25 bp, Homo sapien
gaggagggtcgagcggcgggtcgga

SEQ ID NO: 5825048 - DNA, 25 bp, Homo sapien
tcgttgtagtaaatttaccaaacca

SEQ ID NO: 5825049 - DNA, 25 bp, Homo sapien
tggtttggtaaatttactacaacga

SEQ ID NO: 5825050 - DNA, 25 bp, Homo sapien
ctcgcgcagccatcggacaccggtc

SEQ ID NO: 5825051 - DNA, 25 bp, Homo sapien
gaccggtgtccgatggctgcgcgag

SEQ ID NO: 5825052 - DNA, 25 bp, Homo sapien
gaaacttttacattagaggagtcag

SEQ ID NO: 5825053 - DNA, 25 bp, Homo sapien
ctgactcctctaatgtaaaagtttc

SEQ ID NO: 5825054 - DNA, 25 bp, Homo sapien
ctacctcgtactcgaagtcacctta

SEQ ID NO: 5825055 - DNA, 25 bp, Homo sapien
taaggtgacttcgagtacgaggtag

SEQ ID NO: 5825056 - DNA, 25 bp, Homo sapien
gagtcgtcggtctcggccggcccgg

SEQ ID NO: 5825057 - DNA, 25 bp, Homo sapien
ccgggccggccgagaccgacgactc

SEQ ID NO: 5825058 - DNA, 25 bp, Homo sapien
tataagaaatttcaccatctaaagg

SEQ ID NO: 5825059 - DNA, 25 bp, Homo sapien
cctttagatggtgaaatttcttata

SEQ ID NO: 5825060 - DNA, 25 bp, Homo sapien
tccggaggccggactacgaaaccaa

SEQ ID NO: 5825061 - DNA, 25 bp, Homo sapien
ttggtttcgtagtccggcctccgga

SEQ ID NO: 5825062 - DNA, 25 bp, Homo sapien
agaagtcgtaggacacctttcttca

SEQ ID NO: 5825063 - DNA, 25 bp, Homo sapien
tgaagaaaggtgtcctacgacttct

SEQ ID NO: 5825064 - DNA, 25 bp, Homo sapien
aacatataattcttccttagaagtc

SEQ ID NO: 5825065 - DNA, 25 bp, Homo sapien
gacttctaaggaagaattatatgtt

SEQ ID NO: 5825066 - DNA, 25 bp, Homo sapien
ccgagacgacttggatccgggaacg

SEQ ID NO: 5825067 - DNA, 25 bp, Homo sapien
cgttcccggatccaagtcgtctcgg

SEQ ID NO: 5825068 - DNA, 25 bp, Homo sapien
gggatgacgtcttagaagatctcac

SEQ ID NO: 5825069 - DNA, 25 bp, Homo sapien
gtgagatcttctaagacgtcatccc

SEQ ID NO: 5825070 - DNA, 25 bp, Homo sapien
gccccgtaggagacggccccgtaga

SEQ ID NO: 5825071 - DNA, 25 bp, Homo sapien
tctacggggccgtctcctacggggc

SEQ ID NO: 5825072 - DNA, 25 bp, Homo sapien
gaggcggccctgtaggaggtggccc

SEQ ID NO: 5825073 - DNA, 25 bp, Homo sapien
gggccacctcctacagggccgcctc

SEQ ID NO: 5825074 - DNA, 25 bp, Homo sapien
tcagcaaataccgtaaatacgaagt

SEQ ID NO: 5825075 - DNA, 25 bp, Homo sapien
acttcgtatttacggtatttgctga

SEQ ID NO: 5825076 - DNA, 25 bp, Homo sapien
gtgacgacgagtgcggtcccgtacc

SEQ ID NO: 5825077 - DNA, 25 bp, Homo sapien
ggtacgggaccgcactcgtcgtcac

SEQ ID NO: 5825078 - DNA, 25 bp, Homo sapien
actcccgggtcccgccgcagaggta

SEQ ID NO: 5825079 - DNA, 25 bp, Homo sapien
tacctctgcggcgggacccgggagt

SEQ ID NO: 5825080 - DNA, 25 bp, Homo sapien
taatcatacaagttatataaacaga

SEQ ID NO: 5825081 - DNA, 25 bp, Homo sapien
tctgtttatataacttgtatgatta

SEQ ID NO: 5825082 - DNA, 25 bp, Homo sapien
ctgcgacgacccgttcgcccgagac

SEQ ID NO: 5825083 - DNA, 25 bp, Homo sapien
gtctcgggcgaacgggtcgtcgcag

SEQ ID NO: 5825084 - DNA, 25 bp, Homo sapien
cgtttccgtcatcgtgagggtgaat

SEQ ID NO: 5825085 - DNA, 25 bp, Homo sapien
attcaccctcacgatgacggaaacg

SEQ ID NO: 5825086 - DNA, 25 bp, Homo sapien
taacctgaagatttgcctaaacacg

SEQ ID NO: 5825087 - DNA, 25 bp, Homo sapien
cgtgtttaggcaaatcttcaggtta

SEQ ID NO: 5825088 - DNA, 25 bp, Homo sapien
cgactgacaagaatagacacgttcc

SEQ ID NO: 5825089 - DNA, 25 bp, Homo sapien
ggaacgtgtctattcttgtcagtcg

SEQ ID NO: 5825090 - DNA, 25 bp, Homo sapien
gtcgaccgccggtttcggacagcca

SEQ ID NO: 5825091 - DNA, 25 bp, Homo sapien
tggctgtccgaaaccggcggtcgac

SEQ ID NO: 5825092 - DNA, 25 bp, Homo sapien
ggtcatctcggtctgggtcgtcgac

SEQ ID NO: 5825093 - DNA, 25 bp, Homo sapien
gtcgacgacccagaccgagatgacc

SEQ ID NO: 5825094 - DNA, 25 bp, Homo sapien
acggaatatgcttcctctaagtaac

SEQ ID NO: 5825095 - DNA, 25 bp, Homo sapien
gttacttagaggaagcatattccgt

SEQ ID NO: 5825096 - DNA, 25 bp, Homo sapien
catgacagtcccacagcataggctg

SEQ ID NO: 5825097 - DNA, 25 bp, Homo sapien
agcttgttagacacaaattgcaaca

SEQ ID NO: 5825098 - DNA, 25 bp, Homo sapien
gcagcaggaggacagaatgcctcat

SEQ ID NO: 5825099 - DNA, 25 bp, Homo sapien
aaagtatacctaacaaggttcacgc

SEQ ID NO: 5825100 - DNA, 25 bp, Homo sapien
gcagcatcaggtaaagtatacctaa

SEQ ID NO: 5825101 - DNA, 25 bp, Homo sapien
cagactgcgaggatggaagcagcat

SEQ ID NO: 5825102 - DNA, 25 bp, Homo sapien
cactctgaactaaatgccatgacag

SEQ ID NO: 5825103 - DNA, 25 bp, Homo sapien
tgcaggagggctacagagcacagtt

SEQ ID NO: 5825104 - DNA, 25 bp, Homo sapien
actctgaactaaatgccatgacagt

SEQ ID NO: 5825105 - DNA, 25 bp, Homo sapien
aaatgccatgacagtcccacagcat

SEQ ID NO: 5825106 - DNA, 25 bp, Homo sapien
caggagggctacagagcacagttct

SEQ ID NO: 5825107 - DNA, 25 bp, Homo sapien
gcaggaggacagaatgcctcattgt

SEQ ID NO: 5825108 - DNA, 25 bp, Homo sapien
ggctacagagcacagttctgaagca

SEQ ID NO: 5825109 - DNA, 25 bp, Homo sapien
actaaatgccatgacagtcccacag

SEQ ID NO: 5825110 - DNA, 25 bp, Homo sapien
ctctgctacagcttgttagacacaa

SEQ ID NO: 5825111 - DNA, 25 bp, Homo sapien
ctccttctctgctacagcttgttag

SEQ ID NO: 5825112 - DNA, 25 bp, Homo sapien
aatgtcatataaaagagtttcagta

SEQ ID NO: 5825113 - DNA, 25 bp, Homo sapien
tactgaaactcttttatatgacatt

SEQ ID NO: 5825114 - DNA, 25 bp, Homo sapien
cttaggacctaaggggcatgtgtta

SEQ ID NO: 5825115 - DNA, 25 bp, Homo sapien
taacacatgccccttaggtcctaag

SEQ ID NO: 5825116 - DNA, 25 bp, Homo sapien
tcaccctcaagatctgtgtccgaat

SEQ ID NO: 5825117 - DNA, 25 bp, Homo sapien
attcggacacagatcttgagggtga

SEQ ID NO: 5825118 - DNA, 25 bp, Homo sapien
ctaggtcggcgagtcactacgtcgt

SEQ ID NO: 5825119 - DNA, 25 bp, Homo sapien
acgacgtagtgactcgccgacctag

SEQ ID NO: 5825120 - DNA, 25 bp, Homo sapien
gacgacaaaaacaccccgcaaagga

SEQ ID NO: 5825121 - DNA, 25 bp, Homo sapien
tcctttgcggggtgtttttgtcgtc

SEQ ID NO: 5825122 - DNA, 25 bp, Homo sapien
cttctttgtgcttgcttaaggagtg

SEQ ID NO: 5825123 - DNA, 25 bp, Homo sapien
taatgcaggaaaacccaatgcaaag

SEQ ID NO: 5825124 - DNA, 25 bp, Homo sapien
tggcagtctagtagggctccgctgc

SEQ ID NO: 5825125 - DNA, 25 bp, Homo sapien
ggatgtctgttgcagctgtagttac

SEQ ID NO: 5825126 - DNA, 25 bp, Homo sapien
gcaaagaggaaaatgcctgaggcag

SEQ ID NO: 5825127 - DNA, 25 bp, Homo sapien
aaaggaactttcagctctgacaatt

SEQ ID NO: 5825128 - DNA, 25 bp, Homo sapien
aaaggcaaaaccagtgtgcacaatg

SEQ ID NO: 5825129 - DNA, 25 bp, Homo sapien
gtatcaactcttgaggacaaaggca

SEQ ID NO: 5825130 - DNA, 25 bp, Homo sapien
acccagccacagacccatgaggatg

SEQ ID NO: 5825131 - DNA, 25 bp, Homo sapien
tgcatacctgagttgtgagcaacca

SEQ ID NO: 5825132 - DNA, 25 bp, Homo sapien
atgagactggcagtctagtagggct

SEQ ID NO: 5825133 - DNA, 25 bp, Homo sapien
ctcatcttctttgtgcttgcttaag

SEQ ID NO: 5825134 - DNA, 25 bp, Homo sapien
ggcagtccccacttctgtctcgtgg

SEQ ID NO: 5825135 - DNA, 25 bp, Homo sapien
tgttgcagctgtagttactaatgca

SEQ ID NO: 5825136 - DNA, 25 bp, Homo sapien
aaaaccagtgtgcacaatgtggagg

SEQ ID NO: 5825137 - DNA, 25 bp, Homo sapien
ccagaggccacaatctggccacagg

SEQ ID NO: 5825138 - DNA, 25 bp, Homo sapien
ccggtcccctcttactgacaggtat

SEQ ID NO: 5825139 - DNA, 25 bp, Homo sapien
atacctgtcagtaagaggggaccgg

SEQ ID NO: 5825140 - DNA, 25 bp, Homo sapien
tcggagaggcacttgaaatacaact

SEQ ID NO: 5825141 - DNA, 25 bp, Homo sapien
agttgtatttcaagtgcctctccga

SEQ ID NO: 5825142 - DNA, 25 bp, Homo sapien
ccggcccgtccgccacgtctcgacc

SEQ ID NO: 5825143 - DNA, 25 bp, Homo sapien
ggtcgagacgtggcggacgggccgg

SEQ ID NO: 5825144 - DNA, 25 bp, Homo sapien
agaagcagcttttggtgacatgagc

SEQ ID NO: 5825145 - DNA, 25 bp, Homo sapien
gagtttgtctcaatgaaaagtgccc

SEQ ID NO: 5825146 - DNA, 25 bp, Homo sapien
aaagattgtcagtttcaaagaccga

SEQ ID NO: 5825147 - DNA, 25 bp, Homo sapien
ttcaaagattgtcagtttcaaagac

SEQ ID NO: 5825148 - DNA, 25 bp, Homo sapien
agcagcttttggtgacatgagcttt

SEQ ID NO: 5825149 - DNA, 25 bp, Homo sapien
tgtctcaatgaaaagtgcccactgc

SEQ ID NO: 5825150 - DNA, 25 bp, Homo sapien
tggacaccctggagtttgtctcaat

SEQ ID NO: 5825151 - DNA, 25 bp, Homo sapien
gtattcacatttcaaagattgtcag

SEQ ID NO: 5825152 - DNA, 25 bp, Homo sapien
tgggccttcacaaggggcagaaccc

SEQ ID NO: 5825153 - DNA, 25 bp, Homo sapien
agattgtcagtttcaaagaccgaat

SEQ ID NO: 5825154 - DNA, 25 bp, Homo sapien
gggtgactacagaccctacatgtca

SEQ ID NO: 5825155 - DNA, 25 bp, Homo sapien
actagaacgaaagattgctgagttc

SEQ ID NO: 5825156 - DNA, 25 bp, Homo sapien
ctaagtgccaggaatgggccttcac

SEQ ID NO: 5825157 - DNA, 25 bp, Homo sapien
ctcaatgaaaagtgcccactgctac

SEQ ID NO: 5825158 - DNA, 25 bp, Homo sapien
tctttctgtctctaagtgccaggaa

SEQ ID NO: 5825159 - DNA, 25 bp, Homo sapien
accctggagtttgtctcaatgaaaa

SEQ ID NO: 5825160 - DNA, 25 bp, Homo sapien
aaaccacaaacttatcataactcag

SEQ ID NO: 5825161 - DNA, 25 bp, Homo sapien
ctgagttatgataagtttgtggttt

SEQ ID NO: 5825162 - DNA, 25 bp, Homo sapien
gtgagtaaagaacttccacctccct

SEQ ID NO: 5825163 - DNA, 25 bp, Homo sapien
agggaggtggaagttctttactcac

SEQ ID NO: 5825164 - DNA, 25 bp, Homo sapien
cgtcataataacagatatcgtttat

SEQ ID NO: 5825165 - DNA, 25 bp, Homo sapien
ataaacgatatctgttattatgacg

SEQ ID NO: 5825166 - DNA, 25 bp, Homo sapien
aataatgagtcatatctggtcaaat

SEQ ID NO: 5825167 - DNA, 25 bp, Homo sapien
atttgaccagatatgactcattatt

SEQ ID NO: 5825168 - DNA, 25 bp, Homo sapien
tgcacgtttcagaccaaactagact

SEQ ID NO: 5825169 - DNA, 25 bp, Homo sapien
agtctagtttggtctgaaacgtgca

SEQ ID NO: 5825170 - DNA, 25 bp, Homo sapien
ctacgacggtcatctcacagtccag

SEQ ID NO: 5825171 - DNA, 25 bp, Homo sapien
ctggactgtgagatgaccgtcgtag

SEQ ID NO: 5825172 - DNA, 25 bp, Homo sapien
tacaatcatattcacattagttatt

SEQ ID NO: 5825173 - DNA, 25 bp, Homo sapien
aataactaatgtgaatatgattgta

SEQ ID NO: 5825174 - DNA, 25 bp, Homo sapien
ttacaatcatattcacattagttat

SEQ ID NO: 5825175 - DNA, 25 bp, Homo sapien
ataactaatgtgaatatgattgtaa

SEQ ID NO: 5825176 - DNA, 25 bp, Homo sapien
gttacaatcatattcacattagtta

SEQ ID NO: 5825177 - DNA, 25 bp, Homo sapien
taactaatgtgaatatgattgtaac

SEQ ID NO: 5825178 - DNA, 25 bp, Homo sapien
cccaagacgagccaagaggtgtcgg

SEQ ID NO: 5825179 - DNA, 25 bp, Homo sapien
ccgacacctcttggctcgtcttggg

SEQ ID NO: 5825180 - DNA, 25 bp, Homo sapien
agtcccagactcaacggttgtgtcc

SEQ ID NO: 5825181 - DNA, 25 bp, Homo sapien
ggacacaaccgttgagtctgggact

SEQ ID NO: 5825182 - DNA, 25 bp, Homo sapien
actgacagaccactaagtgagtaat

SEQ ID NO: 5825183 - DNA, 25 bp, Homo sapien
attactcacttagtggtctgtcagt

SEQ ID NO: 5825184 - DNA, 25 bp, Homo sapien
gtaaattgaagaaagcgaaagtgtc

SEQ ID NO: 5825185 - DNA, 25 bp, Homo sapien
gacactttcgctttcttcaatttac

SEQ ID NO: 5825186 - DNA, 25 bp, Homo sapien
cgttgtacatgacgaaacaacgaag

SEQ ID NO: 5825187 - DNA, 25 bp, Homo sapien
cttcgttgtttcgtcatgtacaacg

SEQ ID NO: 5825188 - DNA, 25 bp, Homo sapien
gtgtcccgcccgcagcacccgcgcc

SEQ ID NO: 5825189 - DNA, 25 bp, Homo sapien
ggcgcgggtgctgcgggcgggacac

SEQ ID NO: 5825190 - DNA, 25 bp, Homo sapien
acggtcgtggtatcgtgtatagtag

SEQ ID NO: 5825191 - DNA, 25 bp, Homo sapien
ctactatacacgataccacgaccgt

SEQ ID NO: 5825192 - DNA, 25 bp, Homo sapien
cagatcaaataattagtgtctttat

SEQ ID NO: 5825193 - DNA, 25 bp, Homo sapien
ataaagacactaattatttgatctg

SEQ ID NO: 5825194 - DNA, 25 bp, Homo sapien
acagatcaaataattagtgtcttta

SEQ ID NO: 5825195 - DNA, 25 bp, Homo sapien
taaagacactaattatttgatctgt

SEQ ID NO: 5825196 - DNA, 25 bp, Homo sapien
agatcaaataattagtgtctttata

SEQ ID NO: 5825197 - DNA, 25 bp, Homo sapien
tataaagacactaattatttgatct

SEQ ID NO: 5825198 - DNA, 25 bp, Homo sapien
gacaacggacgcaagaacggaaaat

SEQ ID NO: 5825199 - DNA, 25 bp, Homo sapien
attttccgttcttgcgtccgttgtc

SEQ ID NO: 5825200 - DNA, 25 bp, Homo sapien
tgatgggtgccggagcaggagcgcg

SEQ ID NO: 5825201 - DNA, 25 bp, Homo sapien
cgcgctcctgctccggcacccatca

SEQ ID NO: 5825202 - DNA, 25 bp, Homo sapien
gaaccttctatttatctggtatcat

SEQ ID NO: 5825203 - DNA, 25 bp, Homo sapien
atgataccagataaatagaaggttc

SEQ ID NO: 5825204 - DNA, 25 bp, Homo sapien
ctctgcgggccgtccgcacgtcggt

SEQ ID NO: 5825205 - DNA, 25 bp, Homo sapien
accgacgtgcggacggcccgcagag

SEQ ID NO: 5825206 - DNA, 25 bp, Homo sapien
cgtcctttaacacgtccttgatcat

SEQ ID NO: 5825207 - DNA, 25 bp, Homo sapien
atgatcaaggacgtgttaaaggacg

SEQ ID NO: 5825208 - DNA, 25 bp, Homo sapien
ggtttagtgtctcttcctgtaaatt

SEQ ID NO: 5825209 - DNA, 25 bp, Homo sapien
aatttacaggaagagacactaaacc

SEQ ID NO: 5825210 - DNA, 25 bp, Homo sapien
cgggacccctgtggcggtgtgagct

SEQ ID NO: 5825211 - DNA, 25 bp, Homo sapien
agctcacaccgccacaggggtcccg

SEQ ID NO: 5825212 - DNA, 25 bp, Homo sapien
gtcctcaactcttcagtctaacata

SEQ ID NO: 5825213 - DNA, 25 bp, Homo sapien
tatgttagactgaagagttgaggac

SEQ ID NO: 5825214 - DNA, 25 bp, Homo sapien
tcgtgggtcgcggcgtttggtcctc

SEQ ID NO: 5825215 - DNA, 25 bp, Homo sapien
gaggaccaaacgccgcgacccacga

SEQ ID NO: 5825216 - DNA, 25 bp, Homo sapien
tcctcgaagtgacgaacaatattcg

SEQ ID NO: 5825217 - DNA, 25 bp, Homo sapien
cgaatattgttcgtcacttcgagga

SEQ ID NO: 5825218 - DNA, 25 bp, Homo sapien
aatacaaaactatcaaacaaaactg

SEQ ID NO: 5825219 - DNA, 25 bp, Homo sapien
cagttttgtttgatagttttgtatt

SEQ ID NO: 5825220 - DNA, 25 bp, Homo sapien
tcgaaagccatgtggttgctccgaa

SEQ ID NO: 5825221 - DNA, 25 bp, Homo sapien
ttcggagcaaccacatggctttcga

SEQ ID NO: 5825222 - DNA, 25 bp, Homo sapien
agtgattcggttgcgtacgttttac

SEQ ID NO: 5825223 - DNA, 25 bp, Homo sapien
gtaaaacgtacgcaaccgaatcact

SEQ ID NO: 5825224 - DNA, 25 bp, Homo sapien
ggaaactcggtagcgtgtggtccta

SEQ ID NO: 5825225 - DNA, 25 bp, Homo sapien
taggaccacacgctaccgagtttcc

SEQ ID NO: 5825226 - DNA, 25 bp, Homo sapien
gcctctgcggccggggacagggacg

SEQ ID NO: 5825227 - DNA, 25 bp, Homo sapien
cgtccctgtccccggccgcagaggc

SEQ ID NO: 5825228 - DNA, 25 bp, Homo sapien
ccctggccctcgacccgcgcgtcgg

SEQ ID NO: 5825229 - DNA, 25 bp, Homo sapien
ccgacgcgcgggtcgagggccaggg

SEQ ID NO: 5825230 - DNA, 25 bp, Homo sapien
ctccctggccctcgacccgcgcgtc

SEQ ID NO: 5825231 - DNA, 25 bp, Homo sapien
gacgcgcgggtcgagggccagggag

SEQ ID NO: 5825232 - DNA, 25 bp, Homo sapien
aaagtcgcctggtgtagcctcggtg

SEQ ID NO: 5825233 - DNA, 25 bp, Homo sapien
caccgaggctacaccaggcgacttt

SEQ ID NO: 5825234 - DNA, 25 bp, Homo sapien
aaaactgtcatcctaaggtgagatg

SEQ ID NO: 5825235 - DNA, 25 bp, Homo sapien
catctcaccttaggatgacagtttt

SEQ ID NO: 5825236 - DNA, 25 bp, Homo sapien
ctcgtctaaacttcactaatacgta

SEQ ID NO: 5825237 - DNA, 25 bp, Homo sapien
tacgtattagtgaagtttagacgag

SEQ ID NO: 5825238 - DNA, 25 bp, Homo sapien
cctagatgatctttatacattacgg

SEQ ID NO: 5825239 - DNA, 25 bp, Homo sapien
ccgtaatgtataaagatcatctagg

SEQ ID NO: 5825240 - DNA, 25 bp, Homo sapien
attcttcatctcagtgaccagtgtg

SEQ ID NO: 5825241 - DNA, 25 bp, Homo sapien
cacactggtcactgagatgaagaat

SEQ ID NO: 5825242 - DNA, 25 bp, Homo sapien
gactctctcgtagtagttatctcgt

SEQ ID NO: 5825243 - DNA, 25 bp, Homo sapien
acgagataactactacgagagagtc

SEQ ID NO: 5825244 - DNA, 25 bp, Homo sapien
cgctcccgacggagctccacgtgtg

SEQ ID NO: 5825245 - DNA, 25 bp, Homo sapien
cacacgtggagctccgtcgggagcg

SEQ ID NO: 5825246 - DNA, 25 bp, Homo sapien
ggggacgacgctcccgacggagctc

SEQ ID NO: 5825247 - DNA, 25 bp, Homo sapien
gagctccgtcgggagcgtcgtcccc

SEQ ID NO: 5825248 - DNA, 25 bp, Homo sapien
gggtcaatgtctccggcgcgcgccg

SEQ ID NO: 5825249 - DNA, 25 bp, Homo sapien
cggcgcgcgccggagacattgaccc

SEQ ID NO: 5825250 - DNA, 25 bp, Homo sapien
ctcgattctgcataagagtcccaaa

SEQ ID NO: 5825251 - DNA, 25 bp, Homo sapien
taagagtcccaaacactgagaacta

SEQ ID NO: 5825252 - DNA, 25 bp, Homo sapien
cctttccttccaaaaaggccagcag

SEQ ID NO: 5825253 - DNA, 25 bp, Homo sapien
ttgaatgcgtagtcttgtgaactcc

SEQ ID NO: 5825254 - DNA, 25 bp, Homo sapien
acactgagaactagggtgtcttccc

SEQ ID NO: 5825255 - DNA, 25 bp, Homo sapien
agcagcctcaagcaagccaaagtcc

SEQ ID NO: 5825256 - DNA, 25 bp, Homo sapien
tccaaaaaggccagcagcctcaagc

SEQ ID NO: 5825257 - DNA, 25 bp, Homo sapien
tcccaaacactgagaactagggtgt

SEQ ID NO: 5825258 - DNA, 25 bp, Homo sapien
caacatgtttcctgcagatttagtg

SEQ ID NO: 5825259 - DNA, 25 bp, Homo sapien
tttagtggaggaaaaatccacacat

SEQ ID NO: 5825260 - DNA, 25 bp, Homo sapien
ttagtggaggaaaaatccacacata

SEQ ID NO: 5825261 - DNA, 25 bp, Homo sapien
gattttcttcaacatgccgcttctg

SEQ ID NO: 5825262 - DNA, 25 bp, Homo sapien
aacactgagaactagggtgtcttcc

SEQ ID NO: 5825263 - DNA, 25 bp, Homo sapien
agaggtgcttgcagaggtatttcac

SEQ ID NO: 5825264 - DNA, 25 bp, Homo sapien
cttggaagagttaactgcctcgatt

SEQ ID NO: 5825265 - DNA, 25 bp, Homo sapien
aactgcctcgattctgcataagagt

SEQ ID NO: 5825266 - DNA, 25 bp, Homo sapien
gaggccgccgaggtccattggccgg

SEQ ID NO: 5825267 - DNA, 25 bp, Homo sapien
ccggccaatggacctcggcggcctc

SEQ ID NO: 5825268 - DNA, 25 bp, Homo sapien
tgagcggagtctcgccggccgggta

SEQ ID NO: 5825269 - DNA, 25 bp, Homo sapien
tacccggccggcgagactccgctca

SEQ ID NO: 5825270 - DNA, 25 bp, Homo sapien
ttatatgacgacccgttaactgact

SEQ ID NO: 5825271 - DNA, 25 bp, Homo sapien
agtcagttaacgggtcgtcatataa

SEQ ID NO: 5825272 - DNA, 25 bp, Homo sapien
gcgcggtccgggcactcggtgcgac

SEQ ID NO: 5825273 - DNA, 25 bp, Homo sapien
gtcgcaccgagtgcccggaccgcgc

SEQ ID NO: 5825274 - DNA, 25 bp, Homo sapien
tctattctcgaaggggactaaagct

SEQ ID NO: 5825275 - DNA, 25 bp, Homo sapien
agctttagtccccttcgagaataga

SEQ ID NO: 5825276 - DNA, 25 bp, Homo sapien
atagtttcgcagtcgttttcgtctt

SEQ ID NO: 5825277 - DNA, 25 bp, Homo sapien
aagacgaaaacgactgcgaaactat

SEQ ID NO: 5825278 - DNA, 25 bp, Homo sapien
actaccgcggcccttgagggctgtc

SEQ ID NO: 5825279 - DNA, 25 bp, Homo sapien
gacagccctcaagggccgcggtagt

SEQ ID NO: 5825280 - DNA, 25 bp, Homo sapien
gaacgagaaggccatagtaatgctt

SEQ ID NO: 5825281 - DNA, 25 bp, Homo sapien
aagcattactatggccttctcgttc

SEQ ID NO: 5825282 - DNA, 25 bp, Homo sapien
ttccttatgagaagaacgatcagta

SEQ ID NO: 5825283 - DNA, 25 bp, Homo sapien
tactgatcgttcttctcataaggaa

SEQ ID NO: 5825284 - DNA, 25 bp, Homo sapien
agtataggttgacttccttatgaga

SEQ ID NO: 5825285 - DNA, 25 bp, Homo sapien
tctcataaggaagtcaacctatact

SEQ ID NO: 5825286 - DNA, 25 bp, Homo sapien
aagacttgattcttcacttcgatcg

SEQ ID NO: 5825287 - DNA, 25 bp, Homo sapien
cgatcgaagtgaagaatcaagtctt

SEQ ID NO: 5825288 - DNA, 25 bp, Homo sapien
aatatatttcgaaaagacagtaaaa

SEQ ID NO: 5825289 - DNA, 25 bp, Homo sapien
ttttactgtcttttcgaaatatatt

SEQ ID NO: 5825290 - DNA, 25 bp, Homo sapien
ctcttaggtacagttttcaatgtcg

SEQ ID NO: 5825291 - DNA, 25 bp, Homo sapien
cgacattgaaaactgtacctaagag

SEQ ID NO: 5825292 - DNA, 25 bp, Homo sapien
tcctctcagcagaaggtctaaggac

SEQ ID NO: 5825293 - DNA, 25 bp, Homo sapien
gtccttagaccttctgctgagagga

SEQ ID NO: 5825294 - DNA, 25 bp, Homo sapien
tagagatcggcacagacaggagaca

SEQ ID NO: 5825295 - DNA, 25 bp, Homo sapien
ccaccaagagggagtcctttaatag

SEQ ID NO: 5825296 - DNA, 25 bp, Homo sapien
agtcctttaatagagatcggcacag

SEQ ID NO: 5825297 - DNA, 25 bp, Homo sapien
ctttaatagagatcggcacagacag

SEQ ID NO: 5825298 - DNA, 25 bp, Homo sapien
accaagagggagtcctttaatagag

SEQ ID NO: 5825299 - DNA, 25 bp, Homo sapien
ggagtcctttaatagagatcggcac

SEQ ID NO: 5825300 - DNA, 25 bp, Homo sapien
agggagtcctttaatagagatcggc

SEQ ID NO: 5825301 - DNA, 25 bp, Homo sapien
cacccattggaggttcctccctgat

SEQ ID NO: 5825302 - DNA, 25 bp, Homo sapien
gacaggagacacaacagcccaggcg

SEQ ID NO: 5825303 - DNA, 25 bp, Homo sapien
ccaacagatgcagtggcttcctcct

SEQ ID NO: 5825304 - DNA, 25 bp, Homo sapien
tcctttaatagagatcggcacagac

SEQ ID NO: 5825305 - DNA, 25 bp, Homo sapien
gctggggccctgagccaacagatgc

SEQ ID NO: 5825306 - DNA, 25 bp, Homo sapien
tctcccagctgttagtgtttctaca

SEQ ID NO: 5825307 - DNA, 25 bp, Homo sapien
gatcggcacagacaggagacacaac

SEQ ID NO: 5825308 - DNA, 25 bp, Homo sapien
tcggcacagacaggagacacaacag

SEQ ID NO: 5825309 - DNA, 25 bp, Homo sapien
accccgaggcctctgcttgaagctg

SEQ ID NO: 5825310 - DNA, 25 bp, Homo sapien
tcaccggattctaccagttacttgt

SEQ ID NO: 5825311 - DNA, 25 bp, Homo sapien
acaagtaactggtagaatccggtga

SEQ ID NO: 5825312 - DNA, 25 bp, Homo sapien
cgacggggctttgggttcagccgac

SEQ ID NO: 5825313 - DNA, 25 bp, Homo sapien
gtcggctgaacccaaagccccgtcg

SEQ ID NO: 5825314 - DNA, 25 bp, Homo sapien
gacaaaatattagttatcgagccct

SEQ ID NO: 5825315 - DNA, 25 bp, Homo sapien
agggctcgataactaatattttgtc

SEQ ID NO: 5825316 - DNA, 25 bp, Homo sapien
attaattcagtctaaagtgttaaaa

SEQ ID NO: 5825317 - DNA, 25 bp, Homo sapien
ttttaacactttagactgaattaat

SEQ ID NO: 5825318 - DNA, 25 bp, Homo sapien
ttaattcagtctaaagtgttaaaaa

SEQ ID NO: 5825319 - DNA, 25 bp, Homo sapien
tttttaacactttagactgaattaa

SEQ ID NO: 5825320 - DNA, 25 bp, Homo sapien
ggtttcgaaaactacctactcatat

SEQ ID NO: 5825321 - DNA, 25 bp, Homo sapien
atatgagtaggtagttttcgaaacc

SEQ ID NO: 5825322 - DNA, 25 bp, Homo sapien
aagagtgtttccaatggtaattcga

SEQ ID NO: 5825323 - DNA, 25 bp, Homo sapien
tcgaattaccattggaaacactctt

SEQ ID NO: 5825324 - DNA, 25 bp, Homo sapien
gtgttcatcgtctttgtcttcttaa

SEQ ID NO: 5825325 - DNA, 25 bp, Homo sapien
ttaagaagacaaagacgatgaacac

SEQ ID NO: 5825326 - DNA, 25 bp, Homo sapien
acgcctagcgcggcggcaagtacgt

SEQ ID NO: 5825327 - DNA, 25 bp, Homo sapien
acgtacttgccgccgcgctaggcgt

SEQ ID NO: 5825328 - DNA, 25 bp, Homo sapien
tttacgccattttggctgatttacg

SEQ ID NO: 5825329 - DNA, 25 bp, Homo sapien
cgtaaatcagccaaaatggcgtaaa

SEQ ID NO: 5825330 - DNA, 25 bp, Homo sapien
ttccgtcgaaccataagatttttct

SEQ ID NO: 5825331 - DNA, 25 bp, Homo sapien
agaaaaatcttatggttcgacggaa

SEQ ID NO: 5825332 - DNA, 25 bp, Homo sapien
gacggtccggtactcacgtcacgac

SEQ ID NO: 5825333 - DNA, 25 bp, Homo sapien
gtcgtgacgtgagtaccggaccgtc

SEQ ID NO: 5825334 - DNA, 25 bp, Homo sapien
tcaagaaactcgtgtacgtccggtc

SEQ ID NO: 5825335 - DNA, 25 bp, Homo sapien
gaccggacgtacacgagtttcttga

SEQ ID NO: 5825336 - DNA, 25 bp, Homo sapien
attccatttaaacacggaagataca

SEQ ID NO: 5825337 - DNA, 25 bp, Homo sapien
tgtatcttccgtgtttaaatggaat

SEQ ID NO: 5825338 - DNA, 25 bp, Homo sapien
gcacagccgcggacgccaaaagaag

SEQ ID NO: 5825339 - DNA, 25 bp, Homo sapien
cttcttttggcgtccgcggctgtgc

SEQ ID NO: 5825340 - DNA, 25 bp, Homo sapien
aataataccatagtttcagcaaaag

SEQ ID NO: 5825341 - DNA, 25 bp, Homo sapien
cttttgctgaaactatggtattatt

SEQ ID NO: 5825342 - DNA, 25 bp, Homo sapien
tccagggactcagaagactagtcac

SEQ ID NO: 5825343 - DNA, 25 bp, Homo sapien
gtgactagtcttctgagtccctgga

SEQ ID NO: 5825344 - DNA, 25 bp, Homo sapien
gaccgtcaccccgccgtcgcgcctg

SEQ ID NO: 5825345 - DNA, 25 bp, Homo sapien
caggcgcgacggcggggtgacggtc

SEQ ID NO: 5825346 - DNA, 25 bp, Homo sapien
gacgtagtgggacggcccgattccc

SEQ ID NO: 5825347 - DNA, 25 bp, Homo sapien
gggaatcgggccgtcccactacgtc

SEQ ID NO: 5825348 - DNA, 25 bp, Homo sapien
tcgggacacccgaacgtcgtggaac

SEQ ID NO: 5825349 - DNA, 25 bp, Homo sapien
gttccacgacgttcgggtgtcccga

SEQ ID NO: 5825350 - DNA, 25 bp, Homo sapien
ggacgacggggctccttggggacag

SEQ ID NO: 5825351 - DNA, 25 bp, Homo sapien
ctgtccccaaggagccccgtcgtcc

SEQ ID NO: 5825352 - DNA, 25 bp, Homo sapien
tgcagaaagtatccttattactcgt

SEQ ID NO: 5825353 - DNA, 25 bp, Homo sapien
acgagtaataaggatactttctgca

SEQ ID NO: 5825354 - DNA, 25 bp, Homo sapien
aggtggcacaagtcttcgaaccgac

SEQ ID NO: 5825355 - DNA, 25 bp, Homo sapien
gtcggttcgaagacttgtgccacct

SEQ ID NO: 5825356 - DNA, 25 bp, Homo sapien
gcgtatactgaaataaggtttgaat

SEQ ID NO: 5825357 - DNA, 25 bp, Homo sapien
attcaaaccttatttcagtatacgc

SEQ ID NO: 5825358 - DNA, 25 bp, Homo sapien
cgtctcgtcccggacggcgcgccgg

SEQ ID NO: 5825359 - DNA, 25 bp, Homo sapien
ccggcgcgccgtccgggacgagacg

SEQ ID NO: 5825360 - DNA, 25 bp, Homo sapien
gggcgctactcgtccttacccttgg

SEQ ID NO: 5825361 - DNA, 25 bp, Homo sapien
ccaagggtaaggacgagtagcgccc

SEQ ID NO: 5825362 - DNA, 25 bp, Homo sapien
gcgacactgtacactctgaaccggt

SEQ ID NO: 5825363 - DNA, 25 bp, Homo sapien
accggttcagagtgtacagtgtcgc

SEQ ID NO: 5825364 - DNA, 25 bp, Homo sapien
cgttcagttctaaggtcatcgttct

SEQ ID NO: 5825365 - DNA, 25 bp, Homo sapien
agaacgatgaccttagaactgaacg

SEQ ID NO: 5825366 - DNA, 25 bp, Homo sapien
gtgccggaggtaccgtcgctcgacc

SEQ ID NO: 5825367 - DNA, 25 bp, Homo sapien
ggtcgagcgacggtacctccggcac

SEQ ID NO: 5825368 - DNA, 25 bp, Homo sapien
ttcggccctcaagagggtcgtgccg

SEQ ID NO: 5825369 - DNA, 25 bp, Homo sapien
cggcacgaccctcttgagggccgaa

SEQ ID NO: 5825370 - DNA, 25 bp, Homo sapien
cgagttgtcctgtaccctcatcaac

SEQ ID NO: 5825371 - DNA, 25 bp, Homo sapien
gttgatgagggtacaggacaactcg

SEQ ID NO: 5825372 - DNA, 25 bp, Homo sapien
caggttcactgcaaaggtcagtatt

SEQ ID NO: 5825373 - DNA, 25 bp, Homo sapien
aatactgacctttgcagtgaacctg

SEQ ID NO: 5825374 - DNA, 25 bp, Homo sapien
cgagacgactcggttcctgttggag

SEQ ID NO: 5825375 - DNA, 25 bp, Homo sapien
ctccaacaggaaccgagtcgtctcg

SEQ ID NO: 5825376 - DNA, 25 bp, Homo sapien
cgtggccgtccgtgggactactatg

SEQ ID NO: 5825377 - DNA, 25 bp, Homo sapien
catagtagtcccacggacggccacg

SEQ ID NO: 5825378 - DNA, 25 bp, Homo sapien
gtcccctgagacgttccaatagggt

SEQ ID NO: 5825379 - DNA, 25 bp, Homo sapien
accctattggaacgtctcaggggac

SEQ ID NO: 5825380 - DNA, 25 bp, Homo sapien
ccctccaaacgtcctccacaatatc

SEQ ID NO: 5825381 - DNA, 25 bp, Homo sapien
gatattgtggaggacgtttggaggg

SEQ ID NO: 5825382 - DNA, 25 bp, Homo sapien
gtctcagtttacagggtgagtatat

SEQ ID NO: 5825383 - DNA, 25 bp, Homo sapien
atatactcaccctgtaaactgagac

SEQ ID NO: 5825384 - DNA, 25 bp, Homo sapien
taaaagtttataatcatttagcagt

SEQ ID NO: 5825385 - DNA, 25 bp, Homo sapien
actgctaaatgattataaactttta

SEQ ID NO: 5825386 - DNA, 25 bp, Homo sapien
ggcgtctgaatctcgtcaattaaag

SEQ ID NO: 5825387 - DNA, 25 bp, Homo sapien
ctttaattgacgagattcagacgcc

SEQ ID NO: 5825388 - DNA, 25 bp, Homo sapien
ggtatcttcgacaccgcacttacca

SEQ ID NO: 5825389 - DNA, 25 bp, Homo sapien
tggtaagtgcggtgtcgaagatacc

SEQ ID NO: 5825390 - DNA, 25 bp, Homo sapien
agactctgtcgggtaccttgcacag

SEQ ID NO: 5825391 - DNA, 25 bp, Homo sapien
ctgtgcaaggtacccgacagagtct

SEQ ID NO: 5825392 - DNA, 25 bp, Homo sapien
tcgtcggtcccgcactcctgcaccc

SEQ ID NO: 5825393 - DNA, 25 bp, Homo sapien
gggtgcaggagtgcgggaccgacga

SEQ ID NO: 5825394 - DNA, 25 bp, Homo sapien
tcggtcccgcactcctgcacccaag

SEQ ID NO: 5825395 - DNA, 25 bp, Homo sapien
cttgggtgcaggagtgcgggaccga

SEQ ID NO: 5825396 - DNA, 25 bp, Homo sapien
tcaggggcagagcaaaaatccagtc

SEQ ID NO: 5825397 - DNA, 25 bp, Homo sapien
ttttcagtatcaaaagaagctagcg

SEQ ID NO: 5825398 - DNA, 25 bp, Homo sapien
tgaggttggagtcctagcatagctc

SEQ ID NO: 5825399 - DNA, 25 bp, Homo sapien
cgagtccctgaggttggagtcctag

SEQ ID NO: 5825400 - DNA, 25 bp, Homo sapien
cctccattctattcctgtggggcag

SEQ ID NO: 5825401 - DNA, 25 bp, Homo sapien
atcaaaagaagctagcgcaggccac

SEQ ID NO: 5825402 - DNA, 25 bp, Homo sapien
cctgaggttggagtcctagcatagc

SEQ ID NO: 5825403 - DNA, 25 bp, Homo sapien
cccgagtccctgaggttggagtcct

SEQ ID NO: 5825404 - DNA, 25 bp, Homo sapien
agaagctagcgcaggccacccgagt

SEQ ID NO: 5825405 - DNA, 25 bp, Homo sapien
ttcagtatcaaaagaagctagcgca

SEQ ID NO: 5825406 - DNA, 25 bp, Homo sapien
aaaatcaggctatggcaaaggggct

SEQ ID NO: 5825407 - DNA, 25 bp, Homo sapien
tgccctggggccaccctggaacagt

SEQ ID NO: 5825408 - DNA, 25 bp, Homo sapien
cacccgagtccctgaggttggagtc

SEQ ID NO: 5825409 - DNA, 25 bp, Homo sapien
cagtatcaaaagaagctagcgcagg

SEQ ID NO: 5825410 - DNA, 25 bp, Homo sapien
attttccttcctctgcctccgaggg

SEQ ID NO: 5825411 - DNA, 25 bp, Homo sapien
gaaaccagacccagccataagcttt

SEQ ID NO: 5825412 - DNA, 25 bp, Homo sapien
gactaaattcgtaggcagagaacct

SEQ ID NO: 5825413 - DNA, 25 bp, Homo sapien
aggttctctgcctacgaatttagtc

SEQ ID NO: 5825414 - DNA, 25 bp, Homo sapien
gacgaaaagacctggtttattctag

SEQ ID NO: 5825415 - DNA, 25 bp, Homo sapien
ctagaataaaccaggtcttttcgtc

SEQ ID NO: 5825416 - DNA, 25 bp, Homo sapien
gtgagaaaacctgtgaagaaaggcc

SEQ ID NO: 5825417 - DNA, 25 bp, Homo sapien
ggcctttcttcacaggttttctcac

SEQ ID NO: 5825418 - DNA, 25 bp, Homo sapien
accatctaaactagtattaacccaa

SEQ ID NO: 5825419 - DNA, 25 bp, Homo sapien
ttgggttaatactagtttagatggt

SEQ ID NO: 5825420 - DNA, 25 bp, Homo sapien
ggcttctctggaactagtgcatagc

SEQ ID NO: 5825421 - DNA, 25 bp, Homo sapien
acatggcagcctgttagtggcttct

SEQ ID NO: 5825422 - DNA, 25 bp, Homo sapien
ccacccagaatctgagcggacagaa

SEQ ID NO: 5825423 - DNA, 25 bp, Homo sapien
gacccagcctgtgatctcttaagaa

SEQ ID NO: 5825424 - DNA, 25 bp, Homo sapien
actagtgcatagctgctcaatgtta

SEQ ID NO: 5825425 - DNA, 25 bp, Homo sapien
tctggaactagtgcatagctgctca

SEQ ID NO: 5825426 - DNA, 25 bp, Homo sapien
gagctatccatccagtgatcagatg

SEQ ID NO: 5825427 - DNA, 25 bp, Homo sapien
tcccgccatcctgagggctttagaa

SEQ ID NO: 5825428 - DNA, 25 bp, Homo sapien
tccatccagtgatcagatgacccag

SEQ ID NO: 5825429 - DNA, 25 bp, Homo sapien
aatgttagagccagaactctggttc

SEQ ID NO: 5825430 - DNA, 25 bp, Homo sapien
gcatgatgctcacctggcctgtttc

SEQ ID NO: 5825431 - DNA, 25 bp, Homo sapien
ccagacatgctctcactgctgaatt

SEQ ID NO: 5825432 - DNA, 25 bp, Homo sapien
caactccccataagtcaggagattt

SEQ ID NO: 5825433 - DNA, 25 bp, Homo sapien
gctctcactgctgaattcctgcact

SEQ ID NO: 5825434 - DNA, 25 bp, Homo sapien
cgagtatcccaaagagatttgaggt

SEQ ID NO: 5825435 - DNA, 25 bp, Homo sapien
acctacatctacacatggcagcctg

SEQ ID NO: 5825436 - DNA, 25 bp, Homo sapien
tgtgagcagaacgattgtccaaacg

SEQ ID NO: 5825437 - DNA, 25 bp, Homo sapien
cgtttggacaatcgttctgctcaca

SEQ ID NO: 5825438 - DNA, 25 bp, Homo sapien
atgagaaaaattgtacgtttttgta

SEQ ID NO: 5825439 - DNA, 25 bp, Homo sapien
tacaaaaacgtacaatttttctcat

SEQ ID NO: 5825440 - DNA, 25 bp, Homo sapien
gggtgtcgtcacaccgagcaccgag

SEQ ID NO: 5825441 - DNA, 25 bp, Homo sapien
ctcggtgctcggtgtgacgacaccc

SEQ ID NO: 5825442 - DNA, 25 bp, Homo sapien
gctgccgtggcgtccggtcgtgacc

SEQ ID NO: 5825443 - DNA, 25 bp, Homo sapien
ggtcacgaccggacgccacggcagc

SEQ ID NO: 5825444 - DNA, 25 bp, Homo sapien
ccggccggctggctgccgtggcgtc

SEQ ID NO: 5825445 - DNA, 25 bp, Homo sapien
gacgccacggcagccagccggccgg

SEQ ID NO: 5825446 - DNA, 25 bp, Homo sapien
agagtctgtaagcatagagttggta

SEQ ID NO: 5825447 - DNA, 25 bp, Homo sapien
taccaactctatgcttacagactct

SEQ ID NO: 5825448 - DNA, 25 bp, Homo sapien
tacacaatcatctttattgaaacaa

SEQ ID NO: 5825449 - DNA, 25 bp, Homo sapien
ttgtttcaataaagatgattgtgta

SEQ ID NO: 5825450 - DNA, 25 bp, Homo sapien
aggtaaattatcttcgagagctgta

SEQ ID NO: 5825451 - DNA, 25 bp, Homo sapien
tacagctctcgaagataatttacct

SEQ ID NO: 5825452 - DNA, 25 bp, Homo sapien
gacgtcctctggtaaggatccatga

SEQ ID NO: 5825453 - DNA, 25 bp, Homo sapien
tcatggatccttaccagaggacgtc

SEQ ID NO: 5825454 - DNA, 25 bp, Homo sapien
ggcagtagacagtgaccggattctt

SEQ ID NO: 5825455 - DNA, 25 bp, Homo sapien
aagaatccggtcactgtctactgcc

SEQ ID NO: 5825456 - DNA, 25 bp, Homo sapien
ccgactttcaaaccgcagactctta

SEQ ID NO: 5825457 - DNA, 25 bp, Homo sapien
taagagtctgcggtttgaaagtcgg

SEQ ID NO: 5825458 - DNA, 25 bp, Homo sapien
cggaactggaagaactgtatctggt

SEQ ID NO: 5825459 - DNA, 25 bp, Homo sapien
accagatacagttcttccagttccg

SEQ ID NO: 5825460 - DNA, 25 bp, Homo sapien
ctaagacacacgacagcctgggtct

SEQ ID NO: 5825461 - DNA, 25 bp, Homo sapien
agacccaggctgtcgtgtgtcttag

SEQ ID NO: 5825462 - DNA, 25 bp, Homo sapien
ctcggactcgccaccacccaaaaga

SEQ ID NO: 5825463 - DNA, 25 bp, Homo sapien
tcttttgggtggtggcgagtccgag

SEQ ID NO: 5825464 - DNA, 25 bp, Homo sapien
gggtcagttcaaggatactctctac

SEQ ID NO: 5825465 - DNA, 25 bp, Homo sapien
gtagagagtatccttgaactgaccc

SEQ ID NO: 5825466 - DNA, 25 bp, Homo sapien
gacgacacacgtcggtgggaagagg

SEQ ID NO: 5825467 - DNA, 25 bp, Homo sapien
cctcttcccaccgacgtgtgtcgtc

SEQ ID NO: 5825468 - DNA, 25 bp, Homo sapien
gatggtatgagtgtcgttagatacg

SEQ ID NO: 5825469 - DNA, 25 bp, Homo sapien
cgtatctaacgacactcataccatc

SEQ ID NO: 5825470 - DNA, 25 bp, Homo sapien
tggttacaagtgatagctggaacct

SEQ ID NO: 5825471 - DNA, 25 bp, Homo sapien
cttatgtactgagaactggcattaa

SEQ ID NO: 5825472 - DNA, 25 bp, Homo sapien
acttatgtactgagaactggcatta

SEQ ID NO: 5825473 - DNA, 25 bp, Homo sapien
tgatagctggaacctctttcaaaat

SEQ ID NO: 5825474 - DNA, 25 bp, Homo sapien
gatagctggaacctctttcaaaatg

SEQ ID NO: 5825475 - DNA, 25 bp, Homo sapien
ttacaagtgatagctggaacctctt

SEQ ID NO: 5825476 - DNA, 25 bp, Homo sapien
ccaagaaacccaaagcacgggacgc

SEQ ID NO: 5825477 - DNA, 25 bp, Homo sapien
cgcaaataaacactttgtagataga

SEQ ID NO: 5825478 - DNA, 25 bp, Homo sapien
ttcaaaatgcacttatgtactgaga

SEQ ID NO: 5825479 - DNA, 25 bp, Homo sapien
tcgcaaataaacactttgtagatag

SEQ ID NO: 5825480 - DNA, 25 bp, Homo sapien
aaaatgcacttatgtactgagaact

SEQ ID NO: 5825481 - DNA, 25 bp, Homo sapien
gaactcaccgttgaaacatctcgca

SEQ ID NO: 5825482 - DNA, 25 bp, Homo sapien
gcacttatgtactgagaactggcat

SEQ ID NO: 5825483 - DNA, 25 bp, Homo sapien
taatacatacagtgatggcccgtcc

SEQ ID NO: 5825484 - DNA, 25 bp, Homo sapien
ccgaactcaccgttgaaacatctcg

SEQ ID NO: 5825485 - DNA, 25 bp, Homo sapien
gttacaagtgatagctggaacctct

SEQ ID NO: 5825486 - DNA, 25 bp, Homo sapien
gcttgtgggccctcaagcgaaagta

SEQ ID NO: 5825487 - DNA, 25 bp, Homo sapien
tactttcgcttgagggcccacaagc

SEQ ID NO: 5825488 - DNA, 25 bp, Homo sapien
aactttctcctgttacttttacata

SEQ ID NO: 5825489 - DNA, 25 bp, Homo sapien
tatgtaaaagtaacaggagaaagtt

SEQ ID NO: 5825490 - DNA, 25 bp, Homo sapien
ctaggttttacacatatttaaggag

SEQ ID NO: 5825491 - DNA, 25 bp, Homo sapien
ctccttaaatatgtgtaaaacctag

SEQ ID NO: 5825492 - DNA, 25 bp, Homo sapien
ctatgttacttgttaacttcaaaat

SEQ ID NO: 5825493 - DNA, 25 bp, Homo sapien
attttgaagttaacaagtaacatag

SEQ ID NO: 5825494 - DNA, 25 bp, Homo sapien
cagtatggaggaatctcgtacaaat

SEQ ID NO: 5825495 - DNA, 25 bp, Homo sapien
atttgtacgagattcctccatactg

SEQ ID NO: 5825496 - DNA, 25 bp, Homo sapien
ttttattcacaaaatgttcttgtat

SEQ ID NO: 5825497 - DNA, 25 bp, Homo sapien
atacaagaacattttgtgaataaaa

SEQ ID NO: 5825498 - DNA, 25 bp, Homo sapien
tcttttattcacaaaatgttcttgt

SEQ ID NO: 5825499 - DNA, 25 bp, Homo sapien
acaagaacattttgtgaataaaaga

SEQ ID NO: 5825500 - DNA, 25 bp, Homo sapien
caatgggttaacctattagaataag

SEQ ID NO: 5825501 - DNA, 25 bp, Homo sapien
cttattctaataggttaacccattg

SEQ ID NO: 5825502 - DNA, 25 bp, Homo sapien
taaactggagtttatgtgtaattgt

SEQ ID NO: 5825503 - DNA, 25 bp, Homo sapien
acaattacacataaactccagttta

SEQ ID NO: 5825504 - DNA, 25 bp, Homo sapien
ctgtctactgccgtctccttaaggt

SEQ ID NO: 5825505 - DNA, 25 bp, Homo sapien
accttaaggagacggcagtagacag

SEQ ID NO: 5825506 - DNA, 25 bp, Homo sapien
gtccttcagccgtgagtcgccggag

SEQ ID NO: 5825507 - DNA, 25 bp, Homo sapien
ctccggcgactcacggctgaaggac

SEQ ID NO: 5825508 - DNA, 25 bp, Homo sapien
cgtccttgtgcaagacctccgacga

SEQ ID NO: 5825509 - DNA, 25 bp, Homo sapien
tcgtcggaggtcttgcacaaggacg

SEQ ID NO: 5825510 - DNA, 25 bp, Homo sapien
tactcgtaatcttcggtaatttaat

SEQ ID NO: 5825511 - DNA, 25 bp, Homo sapien
attaaattaccgaagattacgagta

SEQ ID NO: 5825512 - DNA, 25 bp, Homo sapien
acaaaaatggtaattcacaaactct

SEQ ID NO: 5825513 - DNA, 25 bp, Homo sapien
agagtttgtgaattaccatttttgt

SEQ ID NO: 5825514 - DNA, 25 bp, Homo sapien
tcgttgcaccagtcagaggcctgcg

SEQ ID NO: 5825515 - DNA, 25 bp, Homo sapien
cgcaggcctctgactggtgcaacga

SEQ ID NO: 5825516 - DNA, 25 bp, Homo sapien
gattttaacaatgattacaaagtaa

SEQ ID NO: 5825517 - DNA, 25 bp, Homo sapien
ttactttgtaatcattgttaaaatc

SEQ ID NO: 5825518 - DNA, 25 bp, Homo sapien
agattttaacaatgattacaaagta

SEQ ID NO: 5825519 - DNA, 25 bp, Homo sapien
tactttgtaatcattgttaaaatct

SEQ ID NO: 5825520 - DNA, 25 bp, Homo sapien
cggagaccacttccgagtgactctc

SEQ ID NO: 5825521 - DNA, 25 bp, Homo sapien
gagagtcactcggaagtggtctccg

SEQ ID NO: 5825522 - DNA, 25 bp, Homo sapien
gctgtacatcactctatcatgaaag

SEQ ID NO: 5825523 - DNA, 25 bp, Homo sapien
ctttcatgatagagtgatgtacagc

SEQ ID NO: 5825524 - DNA, 25 bp, Homo sapien
ataaagagtcacaaacggaaataga

SEQ ID NO: 5825525 - DNA, 25 bp, Homo sapien
tctatttccgtttgtgactctttat

SEQ ID NO: 5825526 - DNA, 25 bp, Homo sapien
ccctagtgggctgggccgcggcacg

SEQ ID NO: 5825527 - DNA, 25 bp, Homo sapien
cgtgccgcggcccagcccactaggg

SEQ ID NO: 5825528 - DNA, 25 bp, Homo sapien
gccctagtgggctgggccgcggcac

SEQ ID NO: 5825529 - DNA, 25 bp, Homo sapien
gtgccgcggcccagcccactagggc

SEQ ID NO: 5825530 - DNA, 25 bp, Homo sapien
atgcaaccatagcatggagacgctc

SEQ ID NO: 5825531 - DNA, 25 bp, Homo sapien
gcaaattcattcatagaaaacggaa

SEQ ID NO: 5825532 - DNA, 25 bp, Homo sapien
aaatgcaaccatagcatggagacgc

SEQ ID NO: 5825533 - DNA, 25 bp, Homo sapien
ggaaatgcaaccatagcatggagac

SEQ ID NO: 5825534 - DNA, 25 bp, Homo sapien
gcatggagacgctctgagaaaagat

SEQ ID NO: 5825535 - DNA, 25 bp, Homo sapien
atgcaaattcattcatagaaaacgg

SEQ ID NO: 5825536 - DNA, 25 bp, Homo sapien
cacgtagagggaaacagcacatccc

SEQ ID NO: 5825537 - DNA, 25 bp, Homo sapien
aaaacggaaatgcaaccatagcatg

SEQ ID NO: 5825538 - DNA, 25 bp, Homo sapien
attcattcatagaaaacggaaatgc

SEQ ID NO: 5825539 - DNA, 25 bp, Homo sapien
aacggaaatgcaaccatagcatgga

SEQ ID NO: 5825540 - DNA, 25 bp, Homo sapien
tagaaaacggaaatgcaaccatagc

SEQ ID NO: 5825541 - DNA, 25 bp, Homo sapien
actgggcacgtagagggaaacagca

SEQ ID NO: 5825542 - DNA, 25 bp, Homo sapien
cggaaatgcaaccatagcatggaga

SEQ ID NO: 5825543 - DNA, 25 bp, Homo sapien
atggagacgctctgagaaaagatcc

SEQ ID NO: 5825544 - DNA, 25 bp, Homo sapien
catagcatggagacgctctgagaaa

SEQ ID NO: 5825545 - DNA, 25 bp, Homo sapien
aaccatagcatggagacgctctgag

SEQ ID NO: 5825546 - DNA, 25 bp, Homo sapien
cttaacagacgagggaagactccaa

SEQ ID NO: 5825547 - DNA, 25 bp, Homo sapien
ttggagtcttccctcgtctgttaag

SEQ ID NO: 5825548 - DNA, 25 bp, Homo sapien
cgccgtagactcaaaagtaagtctc

SEQ ID NO: 5825549 - DNA, 25 bp, Homo sapien
gagacttacttttgagtctacggcg

SEQ ID NO: 5825550 - DNA, 25 bp, Homo sapien
aatggtattgatgaaaggactagag

SEQ ID NO: 5825551 - DNA, 25 bp, Homo sapien
ctctagtcctttcatcaataccatt

SEQ ID NO: 5825552 - DNA, 25 bp, Homo sapien
ccactcgtcctgagtttcgtataag

SEQ ID NO: 5825553 - DNA, 25 bp, Homo sapien
cttatacgaaactcaggacgagtgg

SEQ ID NO: 5825554 - DNA, 25 bp, Homo sapien
gtttccctagaagactcaacatggg

SEQ ID NO: 5825555 - DNA, 25 bp, Homo sapien
cccatgttgagtcttctagggaaac

SEQ ID NO: 5825556 - DNA, 25 bp, Homo sapien
cacttcataacattctatccaatag

SEQ ID NO: 5825557 - DNA, 25 bp, Homo sapien
ctattggatagaatgttatgaagtg

SEQ ID NO: 5825558 - DNA, 25 bp, Homo sapien
tttaaatctttgtccttcatattag

SEQ ID NO: 5825559 - DNA, 25 bp, Homo sapien
ctaatatgaaggacaaagatttaaa

SEQ ID NO: 5825560 - DNA, 25 bp, Homo sapien
acatcatatacaaaacaggttactg

SEQ ID NO: 5825561 - DNA, 25 bp, Homo sapien
cagtaacctgttttgtatatgatgt

SEQ ID NO: 5825562 - DNA, 25 bp, Homo sapien
gacctgtaactacttaacctataaa

SEQ ID NO: 5825563 - DNA, 25 bp, Homo sapien
tttataggttaagtagttacaggtc

SEQ ID NO: 5825564 - DNA, 25 bp, Homo sapien
agtcggttctcgaagaccgtaacta

SEQ ID NO: 5825565 - DNA, 25 bp, Homo sapien
tagttacggtcttcgagaaccgact

SEQ ID NO: 5825566 - DNA, 25 bp, Homo sapien
tattagaaatataccggaaaagaaa

SEQ ID NO: 5825567 - DNA, 25 bp, Homo sapien
tttcttttccggtatatttctaata

SEQ ID NO: 5825568 - DNA, 25 bp, Homo sapien
ataaatctcttggtgacaataggta

SEQ ID NO: 5825569 - DNA, 25 bp, Homo sapien
tacctattgtcaccaagagatttat

SEQ ID NO: 5825570 - DNA, 25 bp, Homo sapien
ccagccgactgactcgcgacctcgt

SEQ ID NO: 5825571 - DNA, 25 bp, Homo sapien
acgaggtcgcgagtcagtcggctgg

SEQ ID NO: 5825572 - DNA, 25 bp, Homo sapien
agccgactgactcgcgacctcgtcc

SEQ ID NO: 5825573 - DNA, 25 bp, Homo sapien
ggacgaggtcgcgagtcagtcggct

SEQ ID NO: 5825574 - DNA, 25 bp, Homo sapien
accttggttgcgcttccgggcgtaa

SEQ ID NO: 5825575 - DNA, 25 bp, Homo sapien
ttacgcccggaagcgcaaccaaggt

SEQ ID NO: 5825576 - DNA, 25 bp, Homo sapien
tgtttatcacgaaaaagtcagttcg

SEQ ID NO: 5825577 - DNA, 25 bp, Homo sapien
cgaactgactttttcgtgataaaca

SEQ ID NO: 5825578 - DNA, 25 bp, Homo sapien
gagctgacacgggaccacacctccc

SEQ ID NO: 5825579 - DNA, 25 bp, Homo sapien
gggaggtgtggtcccgtgtcagctc

SEQ ID NO: 5825580 - DNA, 25 bp, Homo sapien
tgagacgagccggaggcgtcgggcc

SEQ ID NO: 5825581 - DNA, 25 bp, Homo sapien
ggcccgacgcctccggctcgtctca

SEQ ID NO: 5825582 - DNA, 25 bp, Homo sapien
gaccgctgagacgagccggaggcgt

SEQ ID NO: 5825583 - DNA, 25 bp, Homo sapien
acgcctccggctcgtctcagcggtc

SEQ ID NO: 5825584 - DNA, 25 bp, Homo sapien
ccgcgtggtcggaagggcttcgcgt

SEQ ID NO: 5825585 - DNA, 25 bp, Homo sapien
acgcgaagcccttccgaccacgcgg

SEQ ID NO: 5825586 - DNA, 25 bp, Homo sapien
gggctccacggaagccagtcctggg

SEQ ID NO: 5825587 - DNA, 25 bp, Homo sapien
cccaggactggcttccgtggagccc

SEQ ID NO: 5825588 - DNA, 25 bp, Homo sapien
ggtaagtgcacgtgactcaaaagtg

SEQ ID NO: 5825589 - DNA, 25 bp, Homo sapien
cacttttgagtcacgtgcacttacc

SEQ ID NO: 5825590 - DNA, 25 bp, Homo sapien
cccagaagtggcaacaccaggagga

SEQ ID NO: 5825591 - DNA, 25 bp, Homo sapien
tggtccctgggttatgatttatggc

SEQ ID NO: 5825592 - DNA, 25 bp, Homo sapien
ccctgaactcccataatgctggggt

SEQ ID NO: 5825593 - DNA, 25 bp, Homo sapien
caaagtcacaggtcatccagccagt

SEQ ID NO: 5825594 - DNA, 25 bp, Homo sapien
cacagctgagctatttgtgacccat

SEQ ID NO: 5825595 - DNA, 25 bp, Homo sapien
gacaatttccctagggttgagtgtg

SEQ ID NO: 5825596 - DNA, 25 bp, Homo sapien
ttgaccataggcatcctttagacca

SEQ ID NO: 5825597 - DNA, 25 bp, Homo sapien
tccctagggttgagtgtggtccctg

SEQ ID NO: 5825598 - DNA, 25 bp, Homo sapien
cctattgaccataggcatcctttag

SEQ ID NO: 5825599 - DNA, 25 bp, Homo sapien
gggatggcacacatctgcccataat

SEQ ID NO: 5825600 - DNA, 25 bp, Homo sapien
acacatctgcccataatgacaatgg

SEQ ID NO: 5825601 - DNA, 25 bp, Homo sapien
caggaagacaatttccctagggttg

SEQ ID NO: 5825602 - DNA, 25 bp, Homo sapien
ccagaagtggcaacaccaggaggaa

SEQ ID NO: 5825603 - DNA, 25 bp, Homo sapien
ctgggttatgatttatggctatacc

SEQ ID NO: 5825604 - DNA, 25 bp, Homo sapien
tatctcatttcttgacctcagatgg

SEQ ID NO: 5825605 - DNA, 25 bp, Homo sapien
agcagtttcgtgagcccacagctga

SEQ ID NO: 5825606 - DNA, 25 bp, Homo sapien
gagttagtatataacacgtatataa

SEQ ID NO: 5825607 - DNA, 25 bp, Homo sapien
ttatatacgtgttatatactaactc

SEQ ID NO: 5825608 - DNA, 25 bp, Homo sapien
tccaagtacatcgttgttgtgttat

SEQ ID NO: 5825609 - DNA, 25 bp, Homo sapien
ataacacaacaacgatgtacttgga

SEQ ID NO: 5825610 - DNA, 25 bp, Homo sapien
tgtagtgaaagcaataactctcagt

SEQ ID NO: 5825611 - DNA, 25 bp, Homo sapien
actgagagttattgctttcactaca

SEQ ID NO: 5825612 - DNA, 25 bp, Homo sapien
aaagagaggtgagtttataaaatta

SEQ ID NO: 5825613 - DNA, 25 bp, Homo sapien
taattttataaactcacctctcttt

SEQ ID NO: 5825614 - DNA, 25 bp, Homo sapien
gaccgagtagactccgaaaacaaca

SEQ ID NO: 5825615 - DNA, 25 bp, Homo sapien
tgttgttttcggagtctactcggtc

SEQ ID NO: 5825616 - DNA, 25 bp, Homo sapien
gactcgttgaaccgttctccgaccg

SEQ ID NO: 5825617 - DNA, 25 bp, Homo sapien
cggtcggagaacggttcaacgagtc

SEQ ID NO: 5825618 - DNA, 25 bp, Homo sapien
ccccagcgccctccggtcggtgaga

SEQ ID NO: 5825619 - DNA, 25 bp, Homo sapien
tctcaccgaccggagggcgctgggg

SEQ ID NO: 5825620 - DNA, 25 bp, Homo sapien
gcgtgtcacccccagcgccctccgg

SEQ ID NO: 5825621 - DNA, 25 bp, Homo sapien
ccggagggcgctgggggtgacacgc

SEQ ID NO: 5825622 - DNA, 25 bp, Homo sapien
atctctcctgccaagttgcccatgg

SEQ ID NO: 5825623 - DNA, 25 bp, Homo sapien
catggacacacacagccatggtaac

SEQ ID NO: 5825624 - DNA, 25 bp, Homo sapien
tctccaggaagaaaaccagccttgg

SEQ ID NO: 5825625 - DNA, 25 bp, Homo sapien
agcacccagaaacagccctgggctg

SEQ ID NO: 5825626 - DNA, 25 bp, Homo sapien
cctctgctgggatgagcagcacagc

SEQ ID NO: 5825627 - DNA, 25 bp, Homo sapien
agaaaaccagccttgggggattcca

SEQ ID NO: 5825628 - DNA, 25 bp, Homo sapien
tctgctgggatgagcagcacagcac

SEQ ID NO: 5825629 - DNA, 25 bp, Homo sapien
ctttctatggccaaagggaagtcgc

SEQ ID NO: 5825630 - DNA, 25 bp, Homo sapien
ttctatggccaaagggaagtcgctg

SEQ ID NO: 5825631 - DNA, 25 bp, Homo sapien
acatggacacacacagccatggtaa

SEQ ID NO: 5825632 - DNA, 25 bp, Homo sapien
caccatttctttctatggccaaagg

SEQ ID NO: 5825633 - DNA, 25 bp, Homo sapien
ctgggatgagcagcacagcacggct

SEQ ID NO: 5825634 - DNA, 25 bp, Homo sapien
atggacacacacagccatggtaacc

SEQ ID NO: 5825635 - DNA, 25 bp, Homo sapien
cccaggtcacagaaatgggtgcagg

SEQ ID NO: 5825636 - DNA, 25 bp, Homo sapien
ctccaggaagaaaaccagccttggg

SEQ ID NO: 5825637 - DNA, 25 bp, Homo sapien
acacagccatggtaaccagacgcca

SEQ ID NO: 5825638 - DNA, 25 bp, Homo sapien
acagtcccggagaggcggctcccgg

SEQ ID NO: 5825639 - DNA, 25 bp, Homo sapien
ccgggagccgcctctccgggactgt

SEQ ID NO: 5825640 - DNA, 25 bp, Homo sapien
cttgccgctcaactcgcccggacag

SEQ ID NO: 5825641 - DNA, 25 bp, Homo sapien
ctgtccgggcgagttgagcggcaag

SEQ ID NO: 5825642 - DNA, 25 bp, Homo sapien
ttgtctcccgggtttactctcttcc

SEQ ID NO: 5825643 - DNA, 25 bp, Homo sapien
ggaagagagtaaacccgggagacaa

SEQ ID NO: 5825644 - DNA, 25 bp, Homo sapien
cggtcctggggctgcgggtcggcct

SEQ ID NO: 5825645 - DNA, 25 bp, Homo sapien
aggccgacccgcagccccaggaccg

SEQ ID NO: 5825646 - DNA, 25 bp, Homo sapien
gacccgtggcgggagggcgccgagg

SEQ ID NO: 5825647 - DNA, 25 bp, Homo sapien
cctcggcgccctcccgccacgggtc

SEQ ID NO: 5825648 - DNA, 25 bp, Homo sapien
ggttggggtccggactgtcggtgaa

SEQ ID NO: 5825649 - DNA, 25 bp, Homo sapien
ttcaccgacagtccggaccccaacc

SEQ ID NO: 5825650 - DNA, 25 bp, Homo sapien
ggggtccggactgtcggtgaagcag

SEQ ID NO: 5825651 - DNA, 25 bp, Homo sapien
ctgcttcaccgacagtccggacccc

SEQ ID NO: 5825652 - DNA, 25 bp, Homo sapien
gtcgaagagacacctcactccgtat

SEQ ID NO: 5825653 - DNA, 25 bp, Homo sapien
atacggagtgaggtgtctcttcgac

SEQ ID NO: 5825654 - DNA, 25 bp, Homo sapien
ataaatgttctacttatttggtaaa

SEQ ID NO: 5825655 - DNA, 25 bp, Homo sapien
tttaccaaataagtagaacatttat

SEQ ID NO: 5825656 - DNA, 25 bp, Homo sapien
cttctccagtttctagaccgggact

SEQ ID NO: 5825657 - DNA, 25 bp, Homo sapien
agtcccggtctagaaactggagaag

SEQ ID NO: 5825658 - DNA, 25 bp, Homo sapien
tcggtgcacctgttaggtcttctac

SEQ ID NO: 5825659 - DNA, 25 bp, Homo sapien
gtagaagacctaacaggtgcaccga

SEQ ID NO: 5825660 - DNA, 25 bp, Homo sapien
cccaaggcttagcacacagggcaaa

SEQ ID NO: 5825661 - DNA, 25 bp, Homo sapien
cattgcagactgtcgaattttctgg

SEQ ID NO: 5825662 - DNA, 25 bp, Homo sapien
atgcagccacccaaggcttagcaca

SEQ ID NO: 5825663 - DNA, 25 bp, Homo sapien
atttctttgctcaaaggcccctcgg

SEQ ID NO: 5825664 - DNA, 25 bp, Homo sapien
tttgctcacttcttcaaagtgcagg

SEQ ID NO: 5825665 - DNA, 25 bp, Homo sapien
gggaatgcagccacccaaggcttag

SEQ ID NO: 5825666 - DNA, 25 bp, Homo sapien
ctggaaactgtattacggtttgact

SEQ ID NO: 5825667 - DNA, 25 bp, Homo sapien
agactgtcgaattttctggaaactg

SEQ ID NO: 5825668 - DNA, 25 bp, Homo sapien
gcacacagggcaaaatgacccagca

SEQ ID NO: 5825669 - DNA, 25 bp, Homo sapien
ttttggcattgcagactgtcgaatt

SEQ ID NO: 5825670 - DNA, 25 bp, Homo sapien
tcgaattttctggaaactgtattac

SEQ ID NO: 5825671 - DNA, 25 bp, Homo sapien
catttctttgctcaaaggcccctcg

SEQ ID NO: 5825672 - DNA, 25 bp, Homo sapien
cacacagggcaaaatgacccagcaa

SEQ ID NO: 5825673 - DNA, 25 bp, Homo sapien
tctggaaactgtattacggtttgac

SEQ ID NO: 5825674 - DNA, 25 bp, Homo sapien
ctgtcgaattttctggaaactgtat

SEQ ID NO: 5825675 - DNA, 25 bp, Homo sapien
cagggcaaaatgacccagcaaaacc

SEQ ID NO: 5825676 - DNA, 25 bp, Homo sapien
aatgacctagtagttatacctcttt

SEQ ID NO: 5825677 - DNA, 25 bp, Homo sapien
aaagaggtataactactaggtcatt

SEQ ID NO: 5825678 - DNA, 25 bp, Homo sapien
aggaaaccgctcgttgatacgttat

SEQ ID NO: 5825679 - DNA, 25 bp, Homo sapien
ataacgtatcaacgagcggtttcct

SEQ ID NO: 5825680 - DNA, 25 bp, Homo sapien
ggtctcggtgctgagcggctctcct

SEQ ID NO: 5825681 - DNA, 25 bp, Homo sapien
aggagagccgctcagcaccgagacc

SEQ ID NO: 5825682 - DNA, 25 bp, Homo sapien
cccgtagtctgtagtgttgatgaag

SEQ ID NO: 5825683 - DNA, 25 bp, Homo sapien
cttcatcaacactacagactacggg

SEQ ID NO: 5825684 - DNA, 25 bp, Homo sapien
ccgccacgcccggagggtgcgcgtg

SEQ ID NO: 5825685 - DNA, 25 bp, Homo sapien
cacgcgcaccctccgggcgtggcgg

SEQ ID NO: 5825686 - DNA, 25 bp, Homo sapien
cccgccacgcccggagggtgcgcgt

SEQ ID NO: 5825687 - DNA, 25 bp, Homo sapien
acgcgcaccctccgggcgtggcggg

SEQ ID NO: 5825688 - DNA, 25 bp, Homo sapien
tcccgccacgcccggagggtgcgcg

SEQ ID NO: 5825689 - DNA, 25 bp, Homo sapien
cgcgcaccctccgggcgtggcggga

SEQ ID NO: 5825690 - DNA, 25 bp, Homo sapien
ggaaagtcgttcaaatgaccggcga

SEQ ID NO: 5825691 - DNA, 25 bp, Homo sapien
tcgccggtcatttgaacgactttcc

SEQ ID NO: 5825692 - DNA, 25 bp, Homo sapien
ctccgtacgagaagatacgacgtgt

SEQ ID NO: 5825693 - DNA, 25 bp, Homo sapien
acacgtcgtatcttctcgtacggag

SEQ ID NO: 5825694 - DNA, 25 bp, Homo sapien
aaagatctacagaacgatttaaaat

SEQ ID NO: 5825695 - DNA, 25 bp, Homo sapien
attttaaatcgttctgtagatcttt

SEQ ID NO: 5825696 - DNA, 25 bp, Homo sapien
gagacgcgggagagtccctctccac

SEQ ID NO: 5825697 - DNA, 25 bp, Homo sapien
gtggagagggactctcccgcgtctc

SEQ ID NO: 5825698 - DNA, 25 bp, Homo sapien
aatatttcgagagaagcatttcttc

SEQ ID NO: 5825699 - DNA, 25 bp, Homo sapien
gaagaaatgcttctctcgaaatatt

SEQ ID NO: 5825700 - DNA, 25 bp, Homo sapien
cgtcctaaactcttctcacggatcg

SEQ ID NO: 5825701 - DNA, 25 bp, Homo sapien
cgatccgtgagaagagtttaggacg

SEQ ID NO: 5825702 - DNA, 25 bp, Homo sapien
taatgcagttatggttaaagattct

SEQ ID NO: 5825703 - DNA, 25 bp, Homo sapien
agaatctttaaccataactgcatta

SEQ ID NO: 5825704 - DNA, 25 bp, Homo sapien
gacaccccgggcctcgaggctcccc

SEQ ID NO: 5825705 - DNA, 25 bp, Homo sapien
ggggagcctcgaggcccggggtgtc

SEQ ID NO: 5825706 - DNA, 25 bp, Homo sapien
cgtgaccgcagtccgcgggtactct

SEQ ID NO: 5825707 - DNA, 25 bp, Homo sapien
agagtacccgcggactgcggtcacg

SEQ ID NO: 5825708 - DNA, 25 bp, Homo sapien
ccgcccgcaggccgtcgtgggtccc

SEQ ID NO: 5825709 - DNA, 25 bp, Homo sapien
gggacccacgacggcctgcgggcgg

SEQ ID NO: 5825710 - DNA, 25 bp, Homo sapien
cccgcccgcaggccgtcgtgggtcc

SEQ ID NO: 5825711 - DNA, 25 bp, Homo sapien
ggacccacgacggcctgcgggcggg

SEQ ID NO: 5825712 - DNA, 25 bp, Homo sapien
caatcccggtgtggagacttctccg

SEQ ID NO: 5825713 - DNA, 25 bp, Homo sapien
cggagaagtctccacaccgggattg

SEQ ID NO: 5825714 - DNA, 25 bp, Homo sapien
acacttaacacgtagtttattcatt

SEQ ID NO: 5825715 - DNA, 25 bp, Homo sapien
aatgaataaactacgtgttaagtgt

SEQ ID NO: 5825716 - DNA, 25 bp, Homo sapien
gtctccctcgaacgtcggggtgtgc

SEQ ID NO: 5825717 - DNA, 25 bp, Homo sapien
gcacaccccgacgttcgagggagac

SEQ ID NO: 5825718 - DNA, 25 bp, Homo sapien
agacacaagactctataattaaaaa

SEQ ID NO: 5825719 - DNA, 25 bp, Homo sapien
tttttaattatagagtcttgtgtct

SEQ ID NO: 5825720 - DNA, 25 bp, Homo sapien
gacacaagactctataattaaaaat

SEQ ID NO: 5825721 - DNA, 25 bp, Homo sapien
atttttaattatagagtcttgtgtc

SEQ ID NO: 5825722 - DNA, 25 bp, Homo sapien
gtcacggtagcagggacgacagcca

SEQ ID NO: 5825723 - DNA, 25 bp, Homo sapien
tggctgtcgtccctgctaccgtgac

SEQ ID NO: 5825724 - DNA, 25 bp, Homo sapien
actacaatctagactaccacagtaa

SEQ ID NO: 5825725 - DNA, 25 bp, Homo sapien
ttactgtggtagtctagattgtagt

SEQ ID NO: 5825726 - DNA, 25 bp, Homo sapien
acttgtctgcagacacacaggaggc

SEQ ID NO: 5825727 - DNA, 25 bp, Homo sapien
caaataaagcacagcaagacttgtc

SEQ ID NO: 5825728 - DNA, 25 bp, Homo sapien
cacaggaggcacacggacagcccgt

SEQ ID NO: 5825729 - DNA, 25 bp, Homo sapien
aagacttgtctgcagacacacagga

SEQ ID NO: 5825730 - DNA, 25 bp, Homo sapien
gtctgcagacacacaggaggcacac

SEQ ID NO: 5825731 - DNA, 25 bp, Homo sapien
tgctggaggctttgctggctttcag

SEQ ID NO: 5825732 - DNA, 25 bp, Homo sapien
agcacagcaagacttgtctgcagac

SEQ ID NO: 5825733 - DNA, 25 bp, Homo sapien
ataaagcacagcaagacttgtctgc

SEQ ID NO: 5825734 - DNA, 25 bp, Homo sapien
cagacacacaggaggcacacggaca

SEQ ID NO: 5825735 - DNA, 25 bp, Homo sapien
taaagcacagcaagacttgtctgca

SEQ ID NO: 5825736 - DNA, 25 bp, Homo sapien
ggctgatgaaacttgctccgacaag

SEQ ID NO: 5825737 - DNA, 25 bp, Homo sapien
acagcaagacttgtctgcagacaca

SEQ ID NO: 5825738 - DNA, 25 bp, Homo sapien
aaaagatgctggaggctttgctggc

SEQ ID NO: 5825739 - DNA, 25 bp, Homo sapien
tgatgaaacttgctccgacaagcca

SEQ ID NO: 5825740 - DNA, 25 bp, Homo sapien
ccctagggctgatgaaacttgctcc

SEQ ID NO: 5825741 - DNA, 25 bp, Homo sapien
ctccgacaagccaggccactgggag

SEQ ID NO: 5825742 - DNA, 25 bp, Homo sapien
tcccgcggcctcgtttcgcgcgggc

SEQ ID NO: 5825743 - DNA, 25 bp, Homo sapien
gcccgcgcgaaacgaggccgcggga

SEQ ID NO: 5825744 - DNA, 25 bp, Homo sapien
cgcggcctcgtttcgcgcgggcagg

SEQ ID NO: 5825745 - DNA, 25 bp, Homo sapien
cctgcccgcgcgaaacgaggccgcg

SEQ ID NO: 5825746 - DNA, 25 bp, Homo sapien
gcacgtccctggagatgttgctcac

SEQ ID NO: 5825747 - DNA, 25 bp, Homo sapien
gtgagcaacatctccagggacgtgc

SEQ ID NO: 5825748 - DNA, 25 bp, Homo sapien
agtaccgatgtgttcatttatatgt

SEQ ID NO: 5825749 - DNA, 25 bp, Homo sapien
acatataaatgaacacatcggtact

SEQ ID NO: 5825750 - DNA, 25 bp, Homo sapien
tactattttatactctgtcctttat

SEQ ID NO: 5825751 - DNA, 25 bp, Homo sapien
ataaaggacagagtataaaatagta

SEQ ID NO: 5825752 - DNA, 25 bp, Homo sapien
acgcacgcgccgacacgatcccccg

SEQ ID NO: 5825753 - DNA, 25 bp, Homo sapien
cgggggatcgtgtcggcgcgtgcgt

SEQ ID NO: 5825754 - DNA, 25 bp, Homo sapien
gcgccgacacgatcccccgcccctc

SEQ ID NO: 5825755 - DNA, 25 bp, Homo sapien
gaggggcgggggatcgtgtcggcgc

SEQ ID NO: 5825756 - DNA, 25 bp, Homo sapien
gcacgcgccgacacgatcccccgcc

SEQ ID NO: 5825757 - DNA, 25 bp, Homo sapien
ggcgggggatcgtgtcggcgcgtgc

SEQ ID NO: 5825758 - DNA, 25 bp, Homo sapien
ttaacttgttatttcttagtccgta

SEQ ID NO: 5825759 - DNA, 25 bp, Homo sapien
tacggactaagaaataacaagttaa

SEQ ID NO: 5825760 - DNA, 25 bp, Homo sapien
tttacttttccactagtagaagtat

SEQ ID NO: 5825761 - DNA, 25 bp, Homo sapien
atacttctactagtggaaaagtaaa

SEQ ID NO: 5825762 - DNA, 25 bp, Homo sapien
accgaaaatagaaatattgtcagta

SEQ ID NO: 5825763 - DNA, 25 bp, Homo sapien
tactgacaatatttctattttcggt

SEQ ID NO: 5825764 - DNA, 25 bp, Homo sapien
cctcctctgaccccggggtgcagtg

SEQ ID NO: 5825765 - DNA, 25 bp, Homo sapien
cactgcaccccggggtcagaggagg

SEQ ID NO: 5825766 - DNA, 25 bp, Homo sapien
aggacaggtgcggactcccggaaag

SEQ ID NO: 5825767 - DNA, 25 bp, Homo sapien
ctttccgggagtccgcacctgtcct

SEQ ID NO: 5825768 - DNA, 25 bp, Homo sapien
aaatagtagttgtattagttgatag

SEQ ID NO: 5825769 - DNA, 25 bp, Homo sapien
ctatcaactaatacaactactattt

SEQ ID NO: 5825770 - DNA, 25 bp, Homo sapien
ggtcctgggacaggcgccgcgtagg

SEQ ID NO: 5825771 - DNA, 25 bp, Homo sapien
cctacgcggcgcctgtcccaggacc

SEQ ID NO: 5825772 - DNA, 25 bp, Homo sapien
gtaccgggaagcacctgggggacca

SEQ ID NO: 5825773 - DNA, 25 bp, Homo sapien
tggtcccccaggtgcttcccggtac

SEQ ID NO: 5825774 - DNA, 25 bp, Homo sapien
taaaaacggtgtcaatctagataat

SEQ ID NO: 5825775 - DNA, 25 bp, Homo sapien
attatctagattgacaccgttttta

SEQ ID NO: 5825776 - DNA, 25 bp, Homo sapien
tataaatgacaatacaacaacaatg

SEQ ID NO: 5825777 - DNA, 25 bp, Homo sapien
cattgttgttgtattgtcatttata

SEQ ID NO: 5825778 - DNA, 25 bp, Homo sapien
tatttttataaatcccagtaacaca

SEQ ID NO: 5825779 - DNA, 25 bp, Homo sapien
tgtgttactgggatttataaaaata

SEQ ID NO: 5825780 - DNA, 25 bp, Homo sapien
tcccctgactcacagcccgaccgaa

SEQ ID NO: 5825781 - DNA, 25 bp, Homo sapien
ttcggtcgggctgtgagtcagggga

SEQ ID NO: 5825782 - DNA, 25 bp, Homo sapien
gacaatctcagttccgctccgtccc

SEQ ID NO: 5825783 - DNA, 25 bp, Homo sapien
gggacggagcggaactgagattgtc

SEQ ID NO: 5825784 - DNA, 25 bp, Homo sapien
tactttctgttttaataccgtggtc

SEQ ID NO: 5825785 - DNA, 25 bp, Homo sapien
gaccacggtattaaaacagaaagta

SEQ ID NO: 5825786 - DNA, 25 bp, Homo sapien
tagtcgtatttatataaccgaaggt

SEQ ID NO: 5825787 - DNA, 25 bp, Homo sapien
accttcggttatataaatacgacta

SEQ ID NO: 5825788 - DNA, 25 bp, Homo sapien
ccggtgttcagtgtccgtgggtatc

SEQ ID NO: 5825789 - DNA, 25 bp, Homo sapien
gatacccacggacactgaacaccgg

SEQ ID NO: 5825790 - DNA, 25 bp, Homo sapien
ggtggacgctgtccacctcgcgtgc

SEQ ID NO: 5825791 - DNA, 25 bp, Homo sapien
gcacgcgaggtggacagcgtccacc

SEQ ID NO: 5825792 - DNA, 25 bp, Homo sapien
atgaggttgacagtatatcagagag

SEQ ID NO: 5825793 - DNA, 25 bp, Homo sapien
ctctctgatatactgtcaacctcat

SEQ ID NO: 5825794 - DNA, 25 bp, Homo sapien
aggcgacggagaaggccctgccggc

SEQ ID NO: 5825795 - DNA, 25 bp, Homo sapien
gccggcagggccttctccgtcgcct

SEQ ID NO: 5825796 - DNA, 25 bp, Homo sapien
attactgatagaaccttagaaaagg

SEQ ID NO: 5825797 - DNA, 25 bp, Homo sapien
ccttttctaaggttctatcagtaat

SEQ ID NO: 5825798 - DNA, 25 bp, Homo sapien
gagcactatactccttgcgggacac

SEQ ID NO: 5825799 - DNA, 25 bp, Homo sapien
gtgtcccgcaaggagtatagtgctc

SEQ ID NO: 5825800 - DNA, 25 bp, Homo sapien
acgaaggtccttggccgtcggcgaa

SEQ ID NO: 5825801 - DNA, 25 bp, Homo sapien
ttcgccgacggccaaggaccttcgt

SEQ ID NO: 5825802 - DNA, 25 bp, Homo sapien
tagtcccgactaacccgtggacacg

SEQ ID NO: 5825803 - DNA, 25 bp, Homo sapien
cgtgtccacgggttagtcgggacta

SEQ ID NO: 5825804 - DNA, 25 bp, Homo sapien
aaactctggaggtgttggaacgcga

SEQ ID NO: 5825805 - DNA, 25 bp, Homo sapien
tcgcgttccaacacctccagagttt

SEQ ID NO: 5825806 - DNA, 25 bp, Homo sapien
tctagagacaagaattagttatagt

SEQ ID NO: 5825807 - DNA, 25 bp, Homo sapien
actataactaattcttgtctctaga

SEQ ID NO: 5825808 - DNA, 25 bp, Homo sapien
aactgtggttttgtcggagcctagg

SEQ ID NO: 5825809 - DNA, 25 bp, Homo sapien
ctatttggacagagacatgggtcta

SEQ ID NO: 5825810 - DNA, 25 bp, Homo sapien
agaccactgtttgcaaactcaaatg

SEQ ID NO: 5825811 - DNA, 25 bp, Homo sapien
tgtttgcaaactcaaatgaccatag

SEQ ID NO: 5825812 - DNA, 25 bp, Homo sapien
acctgtatttggttgtaaaatatcc

SEQ ID NO: 5825813 - DNA, 25 bp, Homo sapien
cagcaagtcatataaatgagcggga

SEQ ID NO: 5825814 - DNA, 25 bp, Homo sapien
cgggaaatgccagatggaaaggcct

SEQ ID NO: 5825815 - DNA, 25 bp, Homo sapien
cctatttggacagagacatgggtct

SEQ ID NO: 5825816 - DNA, 25 bp, Homo sapien
gagacatgggtctaagaaatacttc

SEQ ID NO: 5825817 - DNA, 25 bp, Homo sapien
ggctcagctcccaacaactgtggtt

SEQ ID NO: 5825818 - DNA, 25 bp, Homo sapien
gtttgcaaactcaaatgaccatagg

SEQ ID NO: 5825819 - DNA, 25 bp, Homo sapien
gaccactgtttgcaaactcaaatga

SEQ ID NO: 5825820 - DNA, 25 bp, Homo sapien
ggaactcagcaagtcatataaatga

SEQ ID NO: 5825821 - DNA, 25 bp, Homo sapien
caaatgaccataggaactcagcaag

SEQ ID NO: 5825822 - DNA, 25 bp, Homo sapien
tcagcaagtcatataaatgagcggg

SEQ ID NO: 5825823 - DNA, 25 bp, Homo sapien
cagagacatgggtctaagaaatact

SEQ ID NO: 5825824 - DNA, 25 bp, Homo sapien
gagacatcaaattcctctgcgacgg

SEQ ID NO: 5825825 - DNA, 25 bp, Homo sapien
ccgtcgcagaggaatttgatgtctc

SEQ ID NO: 5825826 - DNA, 25 bp, Homo sapien
aaggggcccaatggatgggaattct

SEQ ID NO: 5825827 - DNA, 25 bp, Homo sapien
caggctgctgtctaggatgcctaac

SEQ ID NO: 5825828 - DNA, 25 bp, Homo sapien
cttcatataaaagaggaaatgccta

SEQ ID NO: 5825829 - DNA, 25 bp, Homo sapien
gcttcctcaggctgctgtctaggat

SEQ ID NO: 5825830 - DNA, 25 bp, Homo sapien
tgctgtctaggatgcctaaccccgg

SEQ ID NO: 5825831 - DNA, 25 bp, Homo sapien
tcttcatataaaagaggaaatgcct

SEQ ID NO: 5825832 - DNA, 25 bp, Homo sapien
aggtcccttgtctacccctgaggga

SEQ ID NO: 5825833 - DNA, 25 bp, Homo sapien
ggggcccaatggatgggaattcttc

SEQ ID NO: 5825834 - DNA, 25 bp, Homo sapien
aaaggcagctacatggcccaaatct

SEQ ID NO: 5825835 - DNA, 25 bp, Homo sapien
tgagagtcacagtggccacaatctc

SEQ ID NO: 5825836 - DNA, 25 bp, Homo sapien
aacaaaggcagctacatggcccaaa

SEQ ID NO: 5825837 - DNA, 25 bp, Homo sapien
ctggtgagagtcacagtggccacaa

SEQ ID NO: 5825838 - DNA, 25 bp, Homo sapien
gaaccaggcactgctggtgagagtc

SEQ ID NO: 5825839 - DNA, 25 bp, Homo sapien
cctcaggctgctgtctaggatgcct

SEQ ID NO: 5825840 - DNA, 25 bp, Homo sapien
cttcctcaggctgctgtctaggatg

SEQ ID NO: 5825841 - DNA, 25 bp, Homo sapien
catgtggaagctttggcggcctgcc

SEQ ID NO: 5825842 - DNA, 25 bp, Homo sapien
cacgactcatgaggccacgaactaa

SEQ ID NO: 5825843 - DNA, 25 bp, Homo sapien
ttagttcgtggcctcatgagtcgtg

SEQ ID NO: 5825844 - DNA, 25 bp, Homo sapien
gattaatctctactcgttggtgtcg

SEQ ID NO: 5825845 - DNA, 25 bp, Homo sapien
cgacaccaacgagtagagattaatc

SEQ ID NO: 5825846 - DNA, 25 bp, Homo sapien
gacactggggcggtccaccgtcggc

SEQ ID NO: 5825847 - DNA, 25 bp, Homo sapien
gccgacggtggaccgccccagtgtc

SEQ ID NO: 5825848 - DNA, 25 bp, Homo sapien
aaaccataccgaatgaatgataagt

SEQ ID NO: 5825849 - DNA, 25 bp, Homo sapien
taaaccagtgcaaaatgtgcaacag

SEQ ID NO: 5825850 - DNA, 25 bp, Homo sapien
cacaataacttatgcccttgatgcg

SEQ ID NO: 5825851 - DNA, 25 bp, Homo sapien
agagcccaaattggtgatttcttct

SEQ ID NO: 5825852 - DNA, 25 bp, Homo sapien
tgcaaaatgtgcaacagaatcaata

SEQ ID NO: 5825853 - DNA, 25 bp, Homo sapien
tcataccagaatgtgtacaagggac

SEQ ID NO: 5825854 - DNA, 25 bp, Homo sapien
cataccagaatgtgtacaagggaca

SEQ ID NO: 5825855 - DNA, 25 bp, Homo sapien
gattggcaaaaacgttcacaataac

SEQ ID NO: 5825856 - DNA, 25 bp, Homo sapien
ccagtgcaaaatgtgcaacagaatc

SEQ ID NO: 5825857 - DNA, 25 bp, Homo sapien
tttcttctcctgttcctcagttggg

SEQ ID NO: 5825858 - DNA, 25 bp, Homo sapien
cgccataaaccagtgcaaaatgtgc

SEQ ID NO: 5825859 - DNA, 25 bp, Homo sapien
ggcaagaatccacagtttcaataaa

SEQ ID NO: 5825860 - DNA, 25 bp, Homo sapien
tctagcagggctgttgagcagtgat

SEQ ID NO: 5825861 - DNA, 25 bp, Homo sapien
ttctcctgttcctcagttgggcacg

SEQ ID NO: 5825862 - DNA, 25 bp, Homo sapien
taccagaatgtgtacaagggacagg

SEQ ID NO: 5825863 - DNA, 25 bp, Homo sapien
gcttaaagtaaatacaagggacagc

SEQ ID NO: 5825864 - DNA, 25 bp, Homo sapien
ccaggtgtcactgtcactctttgac

SEQ ID NO: 5825865 - DNA, 25 bp, Homo sapien
gtcaaagagtgacagtgacacctgg

SEQ ID NO: 5825866 - DNA, 25 bp, Homo sapien
tccgggacgggtgaattccgtcgac

SEQ ID NO: 5825867 - DNA, 25 bp, Homo sapien
gtcgacggaattcacccgtcccgga

SEQ ID NO: 5825868 - DNA, 25 bp, Homo sapien
aattcagtgtgacggttcaggagat

SEQ ID NO: 5825869 - DNA, 25 bp, Homo sapien
atctcctgaaccgtcacactgaatt

SEQ ID NO: 5825870 - DNA, 25 bp, Homo sapien
agtttgtacatttaaagaagatgaa

SEQ ID NO: 5825871 - DNA, 25 bp, Homo sapien
ttcatcttctttaaatgtacaaact

SEQ ID NO: 5825872 - DNA, 25 bp, Homo sapien
ccattaagactacgatgacctgtag

SEQ ID NO: 5825873 - DNA, 25 bp, Homo sapien
ctacaggtcatcgtagtcttaatgg

SEQ ID NO: 5825874 - DNA, 25 bp, Homo sapien
acgtagttgtcacggtggcggtgag

SEQ ID NO: 5825875 - DNA, 25 bp, Homo sapien
ctcaccgccaccgtgacaactacgt

SEQ ID NO: 5825876 - DNA, 25 bp, Homo sapien
aggtccttgtctgagcctccgggag

SEQ ID NO: 5825877 - DNA, 25 bp, Homo sapien
ctcccggaggctcagacaaggacct

SEQ ID NO: 5825878 - DNA, 25 bp, Homo sapien
atttatcatccaagttaacacagac

SEQ ID NO: 5825879 - DNA, 25 bp, Homo sapien
gtctgtgttaacttggatgataaat

SEQ ID NO: 5825880 - DNA, 25 bp, Homo sapien
tccaacttggtcagacttcccagag

SEQ ID NO: 5825881 - DNA, 25 bp, Homo sapien
tttcagtccatgagccggcactcac

SEQ ID NO: 5825882 - DNA, 25 bp, Homo sapien
gaggtaacaatagtggcccaacacc

SEQ ID NO: 5825883 - DNA, 25 bp, Homo sapien
cgcactcggggcatgtcttcttgtg

SEQ ID NO: 5825884 - DNA, 25 bp, Homo sapien
aaaccatctgctccaacttggtcag

SEQ ID NO: 5825885 - DNA, 25 bp, Homo sapien
gctgagtttcagtccatgagccggc

SEQ ID NO: 5825886 - DNA, 25 bp, Homo sapien
atcctcttccgcactcggggcatgt

SEQ ID NO: 5825887 - DNA, 25 bp, Homo sapien
aaatttgaggtaacaatagtggccc

SEQ ID NO: 5825888 - DNA, 25 bp, Homo sapien
ggcccaacaccactgatctgaaata

SEQ ID NO: 5825889 - DNA, 25 bp, Homo sapien
tgtttggagattcaagtaacaaacc

SEQ ID NO: 5825890 - DNA, 25 bp, Homo sapien
tgagccggcactcacatagctcctt

SEQ ID NO: 5825891 - DNA, 25 bp, Homo sapien
atgagccggcactcacatagctcct

SEQ ID NO: 5825892 - DNA, 25 bp, Homo sapien
gtggcccaacaccactgatctgaaa

SEQ ID NO: 5825893 - DNA, 25 bp, Homo sapien
agacttcccagagtccctgctgagt

SEQ ID NO: 5825894 - DNA, 25 bp, Homo sapien
cattaaacaatagtacatggtagct

SEQ ID NO: 5825895 - DNA, 25 bp, Homo sapien
gtttcagtccatgagccggcactca

SEQ ID NO: 5825896 - DNA, 25 bp, Homo sapien
acacgagccggtcccgaaagcagcg

SEQ ID NO: 5825897 - DNA, 25 bp, Homo sapien
cgctgctttcgggaccggctcgtgt

SEQ ID NO: 5825898 - DNA, 25 bp, Homo sapien
gatatagtgcgggacaagatcccct

SEQ ID NO: 5825899 - DNA, 25 bp, Homo sapien
aggggatcttgtcccgcactatatc

SEQ ID NO: 5825900 - DNA, 25 bp, Homo sapien
gaacaaattgtattaagaagaggaa

SEQ ID NO: 5825901 - DNA, 25 bp, Homo sapien
ttcctcttcttaatacaatttgttc

SEQ ID NO: 5825902 - DNA, 25 bp, Homo sapien
gaatttagagagtcattaccggtcg

SEQ ID NO: 5825903 - DNA, 25 bp, Homo sapien
cgaccggtaatgactctctaaattc

SEQ ID NO: 5825904 - DNA, 25 bp, Homo sapien
agacggtgcgatgggcgtcccgggt

SEQ ID NO: 5825905 - DNA, 25 bp, Homo sapien
acccgggacgcccatcgcaccgtct

SEQ ID NO: 5825906 - DNA, 25 bp, Homo sapien
aaagaggtataaccttcatatgtat

SEQ ID NO: 5825907 - DNA, 25 bp, Homo sapien
atacatatgaaggttatacctcttt

SEQ ID NO: 5825908 - DNA, 25 bp, Homo sapien
ggttgtggctgagttaaaatttact

SEQ ID NO: 5825909 - DNA, 25 bp, Homo sapien
agtaaattttaactcagccacaacc

SEQ ID NO: 5825910 - DNA, 25 bp, Homo sapien
aagttaacgtatattatgtagaagt

SEQ ID NO: 5825911 - DNA, 25 bp, Homo sapien
acttctacataatatacgttaactt

SEQ ID NO: 5825912 - DNA, 25 bp, Homo sapien
ttaagtgaagacgaacggacgaacc

SEQ ID NO: 5825913 - DNA, 25 bp, Homo sapien
ggttcgtccgttcgtcttcacttaa

SEQ ID NO: 5825914 - DNA, 25 bp, Homo sapien
gaaaatataatttacgtgcaaaagg

SEQ ID NO: 5825915 - DNA, 25 bp, Homo sapien
ccttttgcacgtaaattatattttc

SEQ ID NO: 5825916 - DNA, 25 bp, Homo sapien
tcaacgataaccgaggaacgggcgt

SEQ ID NO: 5825917 - DNA, 25 bp, Homo sapien
acgcccgttcctcggttatcgttga

SEQ ID NO: 5825918 - DNA, 25 bp, Homo sapien
cgacccctttgaatcttcgtcttct

SEQ ID NO: 5825919 - DNA, 25 bp, Homo sapien
agaagacgaagattcaaaggggtcg

SEQ ID NO: 5825920 - DNA, 25 bp, Homo sapien
ccctgttggggaacactgactctaa

SEQ ID NO: 5825921 - DNA, 25 bp, Homo sapien
ttagagtcagtgttccccaacaggg

SEQ ID NO: 5825922 - DNA, 25 bp, Homo sapien
agaaatcgtagtaatacactctcac

SEQ ID NO: 5825923 - DNA, 25 bp, Homo sapien
gtgagagtgtattactacgatttct

SEQ ID NO: 5825924 - DNA, 25 bp, Homo sapien
gagaaagacttctgaattaagaaag

SEQ ID NO: 5825925 - DNA, 25 bp, Homo sapien
ctttcttaattcagaagtctttctc

SEQ ID NO: 5825926 - DNA, 25 bp, Homo sapien
tgtgtacaaccccagatccggtgga

SEQ ID NO: 5825927 - DNA, 25 bp, Homo sapien
tccaccggatctggggttgtacaca

SEQ ID NO: 5825928 - DNA, 25 bp, Homo sapien
cttcctatctcttcaacaaacagta

SEQ ID NO: 5825929 - DNA, 25 bp, Homo sapien
tactgtttgttgaagagataggaag

SEQ ID NO: 5825930 - DNA, 25 bp, Homo sapien
gtttttgcaaacaccggaacgtctc

SEQ ID NO: 5825931 - DNA, 25 bp, Homo sapien
gagacgttccggtgtttgcaaaaac

SEQ ID NO: 5825932 - DNA, 25 bp, Homo sapien
tctcgccgtgctgcccgctgccggg

SEQ ID NO: 5825933 - DNA, 25 bp, Homo sapien
cccggcagcgggcagcacggcgaga

SEQ ID NO: 5825934 - DNA, 25 bp, Homo sapien
ataaaaagggaacatgcgttactaa

SEQ ID NO: 5825935 - DNA, 25 bp, Homo sapien
ttagtaacgcatgttccctttttat

SEQ ID NO: 5825936 - DNA, 25 bp, Homo sapien
tcctggagatctttccgcacatccg

SEQ ID NO: 5825937 - DNA, 25 bp, Homo sapien
cggatgtgcggaaagatctccagga

SEQ ID NO: 5825938 - DNA, 25 bp, Homo sapien
gtgtttgagccttaagaaaatgtaa

SEQ ID NO: 5825939 - DNA, 25 bp, Homo sapien
ttacattttcttaaggctcaaacac

SEQ ID NO: 5825940 - DNA, 25 bp, Homo sapien
tcaggcaaaatagtcctataataac

SEQ ID NO: 5825941 - DNA, 25 bp, Homo sapien
gttattataggactattttgcctga

SEQ ID NO: 5825942 - DNA, 25 bp, Homo sapien
ggacgtgggctcactgtcgtccaca

SEQ ID NO: 5825943 - DNA, 25 bp, Homo sapien
tgtggacgacagtgagcccacgtcc

SEQ ID NO: 5825944 - DNA, 25 bp, Homo sapien
cggccacctccggtgcggcagccag

SEQ ID NO: 5825945 - DNA, 25 bp, Homo sapien
ctggctgccgcaccggaggtggccg

SEQ ID NO: 5825946 - DNA, 25 bp, Homo sapien
cggaccgacggctgcggccacctcc

SEQ ID NO: 5825947 - DNA, 25 bp, Homo sapien
ggaggtggccgcagccgtcggtccg

SEQ ID NO: 5825948 - DNA, 25 bp, Homo sapien
gccttggtctccctatcccgtcgtt

SEQ ID NO: 5825949 - DNA, 25 bp, Homo sapien
aacgacgggatagggagaccaaggc

SEQ ID NO: 5825950 - DNA, 25 bp, Homo sapien
tcggttggaattgggactcgaaacc

SEQ ID NO: 5825951 - DNA, 25 bp, Homo sapien
ggtttcgagtcccaattccaaccga

SEQ ID NO: 5825952 - DNA, 25 bp, Homo sapien
cggtcctgggtatggcctcgggccg

SEQ ID NO: 5825953 - DNA, 25 bp, Homo sapien
cggcccgaggccatacccaggaccg

SEQ ID NO: 5825954 - DNA, 25 bp, Homo sapien
tcacgtacgcgactcggcgtcggcg

SEQ ID NO: 5825955 - DNA, 25 bp, Homo sapien
cgccgacgccgagtcgcgtacgtga

SEQ ID NO: 5825956 - DNA, 25 bp, Homo sapien
cgcttaccccgtcacagtcgaagga

SEQ ID NO: 5825957 - DNA, 25 bp, Homo sapien
tccttcgactgtgacggggtaagcg

SEQ ID NO: 5825958 - DNA, 25 bp, Homo sapien
aaggcgtgcgacgagtaacccgcgt

SEQ ID NO: 5825959 - DNA, 25 bp, Homo sapien
acgcgggttactcgtcgcacgcctt

SEQ ID NO: 5825960 - DNA, 25 bp, Homo sapien
gacgacaggcacacccgtttaggga

SEQ ID NO: 5825961 - DNA, 25 bp, Homo sapien
tccctaaacgggtgtgcctgtcgtc

SEQ ID NO: 5825962 - DNA, 25 bp, Homo sapien
gccgttaaagatcgtctcgtcttca

SEQ ID NO: 5825963 - DNA, 25 bp, Homo sapien
tgaagacgagacgatctttaacggc

SEQ ID NO: 5825964 - DNA, 25 bp, Homo sapien
gattccggttcggagctggtcaccg

SEQ ID NO: 5825965 - DNA, 25 bp, Homo sapien
cggtgaccagctccgaaccggaatc

SEQ ID NO: 5825966 - DNA, 25 bp, Homo sapien
ctaatataacttcctcggacctaac

SEQ ID NO: 5825967 - DNA, 25 bp, Homo sapien
gttaggtccgaggaagttatattag

SEQ ID NO: 5825968 - DNA, 25 bp, Homo sapien
aagagcatgaggtactccaatgaag

SEQ ID NO: 5825969 - DNA, 25 bp, Homo sapien
cttcattggagtacctcatgctctt

SEQ ID NO: 5825970 - DNA, 25 bp, Homo sapien
gaggccatgcctttgaagtgaaacg

SEQ ID NO: 5825971 - DNA, 25 bp, Homo sapien
cgtttcacttcaaaggcatggcctc

SEQ ID NO: 5825972 - DNA, 25 bp, Homo sapien
ctttacacactcatactggtaagta

SEQ ID NO: 5825973 - DNA, 25 bp, Homo sapien
tacttaccagtatgagtgtgtaaag

SEQ ID NO: 5825974 - DNA, 25 bp, Homo sapien
gaagaggttcttcgaaggatattcg

SEQ ID NO: 5825975 - DNA, 25 bp, Homo sapien
cgaatatccttcgaagaacctcttc

SEQ ID NO: 5825976 - DNA, 25 bp, Homo sapien
ctctccccgagactaaaatgtgggt

SEQ ID NO: 5825977 - DNA, 25 bp, Homo sapien
acccacattttagtctcggggagag

SEQ ID NO: 5825978 - DNA, 25 bp, Homo sapien
aagaccgagcttccgcaatgccatg

SEQ ID NO: 5825979 - DNA, 25 bp, Homo sapien
catggcattgcggaagctcggtctt

SEQ ID NO: 5825980 - DNA, 25 bp, Homo sapien
agtgcagaagaggactattgactgt

SEQ ID NO: 5825981 - DNA, 25 bp, Homo sapien
acagtcaatagtcctcttctgcact

SEQ ID NO: 5825982 - DNA, 25 bp, Homo sapien
cttctcaggaaggacaatctgtcag

SEQ ID NO: 5825983 - DNA, 25 bp, Homo sapien
ggtacagccaagaatacagggctcc

SEQ ID NO: 5825984 - DNA, 25 bp, Homo sapien
ttcgacgggtacagccaagaataca

SEQ ID NO: 5825985 - DNA, 25 bp, Homo sapien
aggcagagggctgtcttctcaggaa

SEQ ID NO: 5825986 - DNA, 25 bp, Homo sapien
acgggtacagccaagaatacagggc

SEQ ID NO: 5825987 - DNA, 25 bp, Homo sapien
cagagggctgtcttctcaggaagga

SEQ ID NO: 5825988 - DNA, 25 bp, Homo sapien
gacaatctgtcaggaattctcatct

SEQ ID NO: 5825989 - DNA, 25 bp, Homo sapien
tctctggagctccaaggcagagggc

SEQ ID NO: 5825990 - DNA, 25 bp, Homo sapien
tctcatcttgcctccagtgtgcata

SEQ ID NO: 5825991 - DNA, 25 bp, Homo sapien
tgtcttctcaggaaggacaatctgt

SEQ ID NO: 5825992 - DNA, 25 bp, Homo sapien
agctccaaggcagagggctgtcttc

SEQ ID NO: 5825993 - DNA, 25 bp, Homo sapien
agccaagaatacagggctccctctc

SEQ ID NO: 5825994 - DNA, 25 bp, Homo sapien
ctctggagctccaaggcagagggct

SEQ ID NO: 5825995 - DNA, 25 bp, Homo sapien
gctccaaggcagagggctgtcttct

SEQ ID NO: 5825996 - DNA, 25 bp, Homo sapien
aaggcagagggctgtcttctcagga

SEQ ID NO: 5825997 - DNA, 25 bp, Homo sapien
tacagggctccctctctctggagct

SEQ ID NO: 5825998 - DNA, 25 bp, Homo sapien
taagactcacttatattcaacacgt

SEQ ID NO: 5825999 - DNA, 25 bp, Homo sapien
acgtgttgaatataagtgagtctta

SEQ ID NO: 5826000 - DNA, 25 bp, Homo sapien
actaatctcttcactacttttcggt

SEQ ID NO: 5826001 - DNA, 25 bp, Homo sapien
accgaaaagtagtgaagagattagt

SEQ ID NO: 5826002 - DNA, 25 bp, Homo sapien
ttccgaggaataacagatataaact

SEQ ID NO: 5826003 - DNA, 25 bp, Homo sapien
agtttatatctgttattcctcggaa

SEQ ID NO: 5826004 - DNA, 25 bp, Homo sapien
cgacggaagtactgttaattatggg

SEQ ID NO: 5826005 - DNA, 25 bp, Homo sapien
cccataattaacagtacttccgtcg

SEQ ID NO: 5826006 - DNA, 25 bp, Homo sapien
gaaccatcgtaatgttgagtttccg

SEQ ID NO: 5826007 - DNA, 25 bp, Homo sapien
cggaaactcaacattacgatggttc

SEQ ID NO: 5826008 - DNA, 25 bp, Homo sapien
tccgcgggaccggtcagcagacccg

SEQ ID NO: 5826009 - DNA, 25 bp, Homo sapien
cgggtctgctgaccggtcccgcgga

SEQ ID NO: 5826010 - DNA, 25 bp, Homo sapien
ggcagacaggcccacctcctgtccc

SEQ ID NO: 5826011 - DNA, 25 bp, Homo sapien
gggacaggaggtgggcctgtctgcc

SEQ ID NO: 5826012 - DNA, 25 bp, Homo sapien
cacaaacactgggtctaaagaagta

SEQ ID NO: 5826013 - DNA, 25 bp, Homo sapien
tacttctttagacccagtgtttgtg

SEQ ID NO: 5826014 - DNA, 25 bp, Homo sapien
gagaaatagaactgtaatagttggt

SEQ ID NO: 5826015 - DNA, 25 bp, Homo sapien
accaactattacagttctatttctc

SEQ ID NO: 5826016 - DNA, 25 bp, Homo sapien
ttacgtcaggttgataaatgacaat

SEQ ID NO: 5826017 - DNA, 25 bp, Homo sapien
attgtcatttatcaacctgacgtaa

SEQ ID NO: 5826018 - DNA, 25 bp, Homo sapien
ggtactccgtgtaccctctccttag

SEQ ID NO: 5826019 - DNA, 25 bp, Homo sapien
ctaaggagagggtacacggagtacc

SEQ ID NO: 5826020 - DNA, 25 bp, Homo sapien
cctgtcagacaaacgtcttctcctt

SEQ ID NO: 5826021 - DNA, 25 bp, Homo sapien
aaggagaagacgtttgtctgacagg

SEQ ID NO: 5826022 - DNA, 25 bp, Homo sapien
aagaagttatctcatttgaaataac

SEQ ID NO: 5826023 - DNA, 25 bp, Homo sapien
gttatttcaaatgagataacttctt

SEQ ID NO: 5826024 - DNA, 25 bp, Homo sapien
gttcacaaaccgtctacaaacaggg

SEQ ID NO: 5826025 - DNA, 25 bp, Homo sapien
ccctgtttgtagacggtttgtgaac

SEQ ID NO: 5826026 - DNA, 25 bp, Homo sapien
actctaccgacttgccagtgagaaa

SEQ ID NO: 5826027 - DNA, 25 bp, Homo sapien
tttctcactggcaagtcggtagagt

SEQ ID NO: 5826028 - DNA, 25 bp, Homo sapien
gagggtaggcccattcctgggaccg

SEQ ID NO: 5826029 - DNA, 25 bp, Homo sapien
cggtcccaggaatgggcctaccctc

SEQ ID NO: 5826030 - DNA, 25 bp, Homo sapien
aagtaatcgctgtccgtcctttgga

SEQ ID NO: 5826031 - DNA, 25 bp, Homo sapien
tccaaaggacggacagcgattactt

SEQ ID NO: 5826032 - DNA, 25 bp, Homo sapien
ggtcccctctggtgactgtcactgg

SEQ ID NO: 5826033 - DNA, 25 bp, Homo sapien
ccagtgacagtcaccagaggggacc

SEQ ID NO: 5826034 - DNA, 25 bp, Homo sapien
cttcccaagtcccatacgagacaag

SEQ ID NO: 5826035 - DNA, 25 bp, Homo sapien
cttgtctcgtatgggacttgggaag

SEQ ID NO: 5826036 - DNA, 25 bp, Homo sapien
cgcttagggaaattaagatggtaat

SEQ ID NO: 5826037 - DNA, 25 bp, Homo sapien
attaccatcttaatttccctaagcg

SEQ ID NO: 5826038 - DNA, 25 bp, Homo sapien
cgggaaactgtggtgttagtactaa

SEQ ID NO: 5826039 - DNA, 25 bp, Homo sapien
ttagtactaacaccacagtttcccg

SEQ ID NO: 5826040 - DNA, 25 bp, Homo sapien
tccggacctagctccgtgcgacagg

SEQ ID NO: 5826041 - DNA, 25 bp, Homo sapien
cctgtcgcacggagctaggtccgga

SEQ ID NO: 5826042 - DNA, 25 bp, Homo sapien
gaaatcttttactgaaaagttattg

SEQ ID NO: 5826043 - DNA, 25 bp, Homo sapien
caataacttttcagtaaaagatttc

SEQ ID NO: 5826044 - DNA, 25 bp, Homo sapien
tcgaaatcttttactgaaaagttat

SEQ ID NO: 5826045 - DNA, 25 bp, Homo sapien
ataacttttcagtaaaagatttcga

SEQ ID NO: 5826046 - DNA, 25 bp, Homo sapien
ccacagacactccgaggggacaccg

SEQ ID NO: 5826047 - DNA, 25 bp, Homo sapien
cggtgtcccctcggagtgtctgtgg

SEQ ID NO: 5826048 - DNA, 25 bp, Homo sapien
accgtgtcacctaccggctgagtaa

SEQ ID NO: 5826049 - DNA, 25 bp, Homo sapien
ttactcagccggtaggtgacacggt

SEQ ID NO: 5826050 - DNA, 25 bp, Homo sapien
tggactataaggaccccggataaag

SEQ ID NO: 5826051 - DNA, 25 bp, Homo sapien
ctttatccggggtccttatagtcca

SEQ ID NO: 5826052 - DNA, 25 bp, Homo sapien
cccggagatcagtccggcgcgactg

SEQ ID NO: 5826053 - DNA, 25 bp, Homo sapien
cagtcgcgccggactgatctccggg

SEQ ID NO: 5826054 - DNA, 25 bp, Homo sapien
aaactcgcgtgcgccttcggtctcc

SEQ ID NO: 5826055 - DNA, 25 bp, Homo sapien
ggagaccgaaggcgcacgcgagttt

SEQ ID NO: 5826056 - DNA, 25 bp, Homo sapien
gacttcaaatcatagaagtttccac

SEQ ID NO: 5826057 - DNA, 25 bp, Homo sapien
gtggaaacttctatgatttgaagtc

SEQ ID NO: 5826058 - DNA, 25 bp, Homo sapien
taatttgacttcaaatcatagaagt

SEQ ID NO: 5826059 - DNA, 25 bp, Homo sapien
acttctatgatttgaagtcaaatta

SEQ ID NO: 5826060 - DNA, 25 bp, Homo sapien
tcgataggttgtccgaccatcctct

SEQ ID NO: 5826061 - DNA, 25 bp, Homo sapien
agaggatggtcggacaacctatcga

SEQ ID NO: 5826062 - DNA, 25 bp, Homo sapien
gaattgttagtcgagaccggcgaag

SEQ ID NO: 5826063 - DNA, 25 bp, Homo sapien
cttcgccggtctcgactaacaattc

SEQ ID NO: 5826064 - DNA, 25 bp, Homo sapien
gtcgctggacaatgtcacttgtcat

SEQ ID NO: 5826065 - DNA, 25 bp, Homo sapien
atgacaagtgacattgtccagcgac

SEQ ID NO: 5826066 - DNA, 25 bp, Homo sapien
atgtctctaaatagttatgcaaact

SEQ ID NO: 5826067 - DNA, 25 bp, Homo sapien
agtttgcataactatttagagacat

SEQ ID NO: 5826068 - DNA, 25 bp, Homo sapien
gacaaagggcttgggtgacctgagt

SEQ ID NO: 5826069 - DNA, 25 bp, Homo sapien
actcaggtcacccaagccctttgtc

SEQ ID NO: 5826070 - DNA, 25 bp, Homo sapien
gaactacacagtttctctatttctt

SEQ ID NO: 5826071 - DNA, 25 bp, Homo sapien
aagaaatagagaaactgtgtagttc

SEQ ID NO: 5826072 - DNA, 25 bp, Homo sapien
cgcgtcccaaggtcggggcgctggg

SEQ ID NO: 5826073 - DNA, 25 bp, Homo sapien
cccagcgccccgaccttgggacgcg

SEQ ID NO: 5826074 - DNA, 25 bp, Homo sapien
acgcgtcccaaggtcggggcgctgg

SEQ ID NO: 5826075 - DNA, 25 bp, Homo sapien
ccagcgccccgaccttgggacgcgt

SEQ ID NO: 5826076 - DNA, 25 bp, Homo sapien
agacccgcacgaggctccggtggac

SEQ ID NO: 5826077 - DNA, 25 bp, Homo sapien
gtccaccggagcctcgtgcgggtct

SEQ ID NO: 5826078 - DNA, 25 bp, Homo sapien
acctcagaatggagtcaccagggac

SEQ ID NO: 5826079 - DNA, 25 bp, Homo sapien
catagcttcattgcttgtgacacct

SEQ ID NO: 5826080 - DNA, 25 bp, Homo sapien
attgcttgtgacacctcagaatgga

SEQ ID NO: 5826081 - DNA, 25 bp, Homo sapien
ttgcttgtgacacctcagaatggag

SEQ ID NO: 5826082 - DNA, 25 bp, Homo sapien
cttcattgcttgtgacacctcagaa

SEQ ID NO: 5826083 - DNA, 25 bp, Homo sapien
tagcttcattgcttgtgacacctca

SEQ ID NO: 5826084 - DNA, 25 bp, Homo sapien
aaagtctacggttcccctgtcacac

SEQ ID NO: 5826085 - DNA, 25 bp, Homo sapien
cacctcagaatggagtcaccaggga

SEQ ID NO: 5826086 - DNA, 25 bp, Homo sapien
agaatggagtcaccagggactccag

SEQ ID NO: 5826087 - DNA, 25 bp, Homo sapien
ctcagaatggagtcaccagggactc

SEQ ID NO: 5826088 - DNA, 25 bp, Homo sapien
taaagtctacggttcccctgtcaca

SEQ ID NO: 5826089 - DNA, 25 bp, Homo sapien
gcttgtgacacctcagaatggagtc

SEQ ID NO: 5826090 - DNA, 25 bp, Homo sapien
tgtgacacctcagaatggagtcacc

SEQ ID NO: 5826091 - DNA, 25 bp, Homo sapien
gcttcattgcttgtgacacctcaga

SEQ ID NO: 5826092 - DNA, 25 bp, Homo sapien
tgacacctcagaatggagtcaccag

SEQ ID NO: 5826093 - DNA, 25 bp, Homo sapien
ttcattgcttgtgacacctcagaat

SEQ ID NO: 5826094 - DNA, 25 bp, Homo sapien
cctcgaccctcccaagtcgacggtg

SEQ ID NO: 5826095 - DNA, 25 bp, Homo sapien
caccgtcgacttgggagggtcgagg

SEQ ID NO: 5826096 - DNA, 25 bp, Homo sapien
ttacgatcgaacaccgaggtaccgt

SEQ ID NO: 5826097 - DNA, 25 bp, Homo sapien
acggtacctcggtgttcgatcgtaa

SEQ ID NO: 5826098 - DNA, 25 bp, Homo sapien
ttttcctctcaccagtgaacagcag

SEQ ID NO: 5826099 - DNA, 25 bp, Homo sapien
tgtttcacagtcagaggagagagcc

SEQ ID NO: 5826100 - DNA, 25 bp, Homo sapien
ctggtcaagggagaacaagtccctt

SEQ ID NO: 5826101 - DNA, 25 bp, Homo sapien
aacagcaggtgaggaaacagactct

SEQ ID NO: 5826102 - DNA, 25 bp, Homo sapien
ctagaaaactggtcaagggagaaca

SEQ ID NO: 5826103 - DNA, 25 bp, Homo sapien
actggtcaagggagaacaagtccct

SEQ ID NO: 5826104 - DNA, 25 bp, Homo sapien
caggaaaactagaaaactggtcaag

SEQ ID NO: 5826105 - DNA, 25 bp, Homo sapien
gtttcacagtcagaggagagagcca

SEQ ID NO: 5826106 - DNA, 25 bp, Homo sapien
gaacagcaggtgaggaaacagactc

SEQ ID NO: 5826107 - DNA, 25 bp, Homo sapien
ttctctgcccttttgggtaccagag

SEQ ID NO: 5826108 - DNA, 25 bp, Homo sapien
tcctctcaccagtgaacagcaggtg

SEQ ID NO: 5826109 - DNA, 25 bp, Homo sapien
tttcctctcaccagtgaacagcagg

SEQ ID NO: 5826110 - DNA, 25 bp, Homo sapien
tcacagtcagaggagagagccatgg

SEQ ID NO: 5826111 - DNA, 25 bp, Homo sapien
cttctctgcccttttgggtaccaga

SEQ ID NO: 5826112 - DNA, 25 bp, Homo sapien
tgtcatcaggcaaagaccagggtgg

SEQ ID NO: 5826113 - DNA, 25 bp, Homo sapien
actagaaaactggtcaagggagaac

SEQ ID NO: 5826114 - DNA, 25 bp, Homo sapien
acagctctgaggtgttagcacccac

SEQ ID NO: 5826115 - DNA, 25 bp, Homo sapien
tacctccatacaagaggtagcaatt

SEQ ID NO: 5826116 - DNA, 25 bp, Homo sapien
aggagctctgggaaaggaagttcct

SEQ ID NO: 5826117 - DNA, 25 bp, Homo sapien
cctccatacaagaggtagcaattct

SEQ ID NO: 5826118 - DNA, 25 bp, Homo sapien
ctctgggaaaggaagttccttgatg

SEQ ID NO: 5826119 - DNA, 25 bp, Homo sapien
agttccttgatgtaagaggtcagtc

SEQ ID NO: 5826120 - DNA, 25 bp, Homo sapien
agcatctcgcaaaggggatcaggaa

SEQ ID NO: 5826121 - DNA, 25 bp, Homo sapien
aactgagtaagaatgtgctctcaga

SEQ ID NO: 5826122 - DNA, 25 bp, Homo sapien
tctcagaagaagactgacttcagct

SEQ ID NO: 5826123 - DNA, 25 bp, Homo sapien
gtgctctcagaagaagactgacttc

SEQ ID NO: 5826124 - DNA, 25 bp, Homo sapien
ctctgaggtgttagcacccacagca

SEQ ID NO: 5826125 - DNA, 25 bp, Homo sapien
acatctcttgccaacgcattgttga

SEQ ID NO: 5826126 - DNA, 25 bp, Homo sapien
tcagcttgattccatgaggagctct

SEQ ID NO: 5826127 - DNA, 25 bp, Homo sapien
gacttcagcttgattccatgaggag

SEQ ID NO: 5826128 - DNA, 25 bp, Homo sapien
agaagaagactgacttcagcttgat

SEQ ID NO: 5826129 - DNA, 25 bp, Homo sapien
cttttgtacctccatacaagaggta

SEQ ID NO: 5826130 - DNA, 25 bp, Homo sapien
gaataaccgtttagaacatgaaagt

SEQ ID NO: 5826131 - DNA, 25 bp, Homo sapien
actttcatgttctaaacggttattc

SEQ ID NO: 5826132 - DNA, 25 bp, Homo sapien
attcttctgggtcttcgagctttaa

SEQ ID NO: 5826133 - DNA, 25 bp, Homo sapien
ttaaagctcgaagacccagaagaat

SEQ ID NO: 5826134 - DNA, 25 bp, Homo sapien
cgctacctgtcggtccggcccacgg

SEQ ID NO: 5826135 - DNA, 25 bp, Homo sapien
ccgtgggccggaccgacaggtagcg

SEQ ID NO: 5826136 - DNA, 25 bp, Homo sapien
aggaccactacaagacgatgtgctg

SEQ ID NO: 5826137 - DNA, 25 bp, Homo sapien
cagcacatcgtcttgtagtggtcct

SEQ ID NO: 5826138 - DNA, 25 bp, Homo sapien
ggacttccaactagtcgacaaccga

SEQ ID NO: 5826139 - DNA, 25 bp, Homo sapien
tcggttgtcgactagttggaagtcc

SEQ ID NO: 5826140 - DNA, 25 bp, Homo sapien
cctcccccgtcgtgtcatcttcggg

SEQ ID NO: 5826141 - DNA, 25 bp, Homo sapien
cccgaagatgacacgacgggggagg

SEQ ID NO: 5826142 - DNA, 25 bp, Homo sapien
tcctcccccgtcgtgtcatcttcgg

SEQ ID NO: 5826143 - DNA, 25 bp, Homo sapien
ccgaagatgacacgacgggggagga

SEQ ID NO: 5826144 - DNA, 25 bp, Homo sapien
gggctggcaggcatggttcccaaca

SEQ ID NO: 5826145 - DNA, 25 bp, Homo sapien
gctggcaggcatggttcccaacacc

SEQ ID NO: 5826146 - DNA, 25 bp, Homo sapien
cgctgattgtctgcttgtctggttc

SEQ ID NO: 5826147 - DNA, 25 bp, Homo sapien
tgtccgctgattgtctgcttgtctg

SEQ ID NO: 5826148 - DNA, 25 bp, Homo sapien
ttgtctgcttgtctggttcggggct

SEQ ID NO: 5826149 - DNA, 25 bp, Homo sapien
gattgtccgctgattgtctgcttgt

SEQ ID NO: 5826150 - DNA, 25 bp, Homo sapien
gtccgctgattgtctgcttgtctgg

SEQ ID NO: 5826151 - DNA, 25 bp, Homo sapien
tgattgtctgcttgtctggttcggg

SEQ ID NO: 5826152 - DNA, 25 bp, Homo sapien
gctgattgtctgcttgtctggttcg

SEQ ID NO: 5826153 - DNA, 25 bp, Homo sapien
cgattgtccgctgattgtctgcttg

SEQ ID NO: 5826154 - DNA, 25 bp, Homo sapien
caaaaccgattgtccgctgattgtc

SEQ ID NO: 5826155 - DNA, 25 bp, Homo sapien
ggaatcggggcctgctgcccgcttt

SEQ ID NO: 5826156 - DNA, 25 bp, Homo sapien
ccgctgattgtctgcttgtctggtt

SEQ ID NO: 5826157 - DNA, 25 bp, Homo sapien
ccgattgtccgctgattgtctgctt

SEQ ID NO: 5826158 - DNA, 25 bp, Homo sapien
ggtgagtccaaaaccgattgtccgc

SEQ ID NO: 5826159 - DNA, 25 bp, Homo sapien
ggctgggtcggctcttcccggaatc

SEQ ID NO: 5826160 - DNA, 25 bp, Homo sapien
agacaatggacctcgaaataagaaa

SEQ ID NO: 5826161 - DNA, 25 bp, Homo sapien
tttcttatttcgaggtccattgtct

SEQ ID NO: 5826162 - DNA, 25 bp, Homo sapien
gtaaggacgaagagcctccggagtg

SEQ ID NO: 5826163 - DNA, 25 bp, Homo sapien
cactccggaggctcttcgtccttac

SEQ ID NO: 5826164 - DNA, 25 bp, Homo sapien
accattatttagaccgctggtatgt

SEQ ID NO: 5826165 - DNA, 25 bp, Homo sapien
acataccagcggtctaaataatggt

SEQ ID NO: 5826166 - DNA, 25 bp, Homo sapien
ggacctggctgacgtgtctcctcgt

SEQ ID NO: 5826167 - DNA, 25 bp, Homo sapien
acgaggagacacgtcagccaggtcc

SEQ ID NO: 5826168 - DNA, 25 bp, Homo sapien
aattggtatgattcggtcattttag

SEQ ID NO: 5826169 - DNA, 25 bp, Homo sapien
ctaaaatgaccgaatcataccaatt

SEQ ID NO: 5826170 - DNA, 25 bp, Homo sapien
ggtgcgcggcccagggcaaccgcgg

SEQ ID NO: 5826171 - DNA, 25 bp, Homo sapien
ccgcggttgccctgggccgcgcacc

SEQ ID NO: 5826172 - DNA, 25 bp, Homo sapien
cggcgacagggtgcgcggcccaggg

SEQ ID NO: 5826173 - DNA, 25 bp, Homo sapien
ccctgggccgcgcaccctgtcgccg

SEQ ID NO: 5826174 - DNA, 25 bp, Homo sapien
ccccgacgcgggagcctcgcgacgt

SEQ ID NO: 5826175 - DNA, 25 bp, Homo sapien
acgtcgcgaggctcccgcgtcgggg

SEQ ID NO: 5826176 - DNA, 25 bp, Homo sapien
ggagagggtctgcacgaggggggag

SEQ ID NO: 5826177 - DNA, 25 bp, Homo sapien
ctcccccctcgtgcagaccctctcc

SEQ ID NO: 5826178 - DNA, 25 bp, Homo sapien
ccttaggtaggtgagggccaccctg

SEQ ID NO: 5826179 - DNA, 25 bp, Homo sapien
cagggtggccctcacctacctaagg

SEQ ID NO: 5826180 - DNA, 25 bp, Homo sapien
aggaccagtctgaacctgtcggtgg

SEQ ID NO: 5826181 - DNA, 25 bp, Homo sapien
ccaccgacaggttcagactggtcct

SEQ ID NO: 5826182 - DNA, 25 bp, Homo sapien
ggagcggtccggcaggtgcgcaacc

SEQ ID NO: 5826183 - DNA, 25 bp, Homo sapien
ggttgcgcacctgccggaccgctcc

SEQ ID NO: 5826184 - DNA, 25 bp, Homo sapien
ttagtttcagaaatattctcgtcaa

SEQ ID NO: 5826185 - DNA, 25 bp, Homo sapien
ttgacgagaatatttctgaaactaa

SEQ ID NO: 5826186 - DNA, 25 bp, Homo sapien
gtcaatccgtaagtgactaatacag

SEQ ID NO: 5826187 - DNA, 25 bp, Homo sapien
ctgtattagtcacttacggattgac

SEQ ID NO: 5826188 - DNA, 25 bp, Homo sapien
caacttgtaaacagaaattacctca

SEQ ID NO: 5826189 - DNA, 25 bp, Homo sapien
tgaggtaatttctgtttacaagttg

SEQ ID NO: 5826190 - DNA, 25 bp, Homo sapien
cgacctgtcgcggtacgggtgcgtg

SEQ ID NO: 5826191 - DNA, 25 bp, Homo sapien
cacgcacccgtaccgcgacaggtcg

SEQ ID NO: 5826192 - DNA, 25 bp, Homo sapien
gttgtctcctcattagttacacatg

SEQ ID NO: 5826193 - DNA, 25 bp, Homo sapien
catgtgtaactaatgaggagacaac

SEQ ID NO: 5826194 - DNA, 25 bp, Homo sapien
ccttcgaccgtcgctccccgtgagt

SEQ ID NO: 5826195 - DNA, 25 bp, Homo sapien
actcacggggagcgacggtcgaagg

SEQ ID NO: 5826196 - DNA, 25 bp, Homo sapien
cgtccgtcagatactgaaaggctat

SEQ ID NO: 5826197 - DNA, 25 bp, Homo sapien
atagcctttcagtatctgacggacg

SEQ ID NO: 5826198 - DNA, 25 bp, Homo sapien
agtcattcatgtacaaggaccccaa

SEQ ID NO: 5826199 - DNA, 25 bp, Homo sapien
ttggggtccttgtacatgaatgact

SEQ ID NO: 5826200 - DNA, 25 bp, Homo sapien
cgtctacgaccctcatgaggtctac

SEQ ID NO: 5826201 - DNA, 25 bp, Homo sapien
gtagacctcatgagggtcgtagacg

SEQ ID NO: 5826202 - DNA, 25 bp, Homo sapien
tcacggtatgatgaaaagagtttac

SEQ ID NO: 5826203 - DNA, 25 bp, Homo sapien
gtaaactcttttcatcataccgtga

SEQ ID NO: 5826204 - DNA, 25 bp, Homo sapien
cccggggaacatcgatcgaggagaa

SEQ ID NO: 5826205 - DNA, 25 bp, Homo sapien
ttctcctcgatcgatgttccccggg

SEQ ID NO: 5826206 - DNA, 25 bp, Homo sapien
tactaaagacggcacattcacatcg

SEQ ID NO: 5826207 - DNA, 25 bp, Homo sapien
cgatgtgaatgtgccgtctttagta

SEQ ID NO: 5826208 - DNA, 25 bp, Homo sapien
cgaatgttatattgtccaattcgtt

SEQ ID NO: 5826209 - DNA, 25 bp, Homo sapien
aacgaattggacaatataacattcg

SEQ ID NO: 5826210 - DNA, 25 bp, Homo sapien
catgaagatcagtggagctactacc

SEQ ID NO: 5826211 - DNA, 25 bp, Homo sapien
ggtagtagctccactgatcttcatg

SEQ ID NO: 5826212 - DNA, 25 bp, Homo sapien
ctaggtgtaagtgtagtaggtgtaa

SEQ ID NO: 5826213 - DNA, 25 bp, Homo sapien
ttacacctactacacttacacctag

SEQ ID NO: 5826214 - DNA, 25 bp, Homo sapien
cactgaaagatgaatcttgtaaaac

SEQ ID NO: 5826215 - DNA, 25 bp, Homo sapien
gttttacaagattcatctttcagtg

SEQ ID NO: 5826216 - DNA, 25 bp, Homo sapien
gtcaaaacccgagactatgtccggt

SEQ ID NO: 5826217 - DNA, 25 bp, Homo sapien
accggacatagtctcgggttttgac

SEQ ID NO: 5826218 - DNA, 25 bp, Homo sapien
agaaaacaaagctattgacaaaagt

SEQ ID NO: 5826219 - DNA, 25 bp, Homo sapien
acttttgtcaatagctttgttttct

SEQ ID NO: 5826220 - DNA, 25 bp, Homo sapien
ctcgtgatctgtacctcagcttcgg

SEQ ID NO: 5826221 - DNA, 25 bp, Homo sapien
ccgaagctgaggtacagatcacgag

SEQ ID NO: 5826222 - DNA, 25 bp, Homo sapien
cattgttaccagaattatcaaggag

SEQ ID NO: 5826223 - DNA, 25 bp, Homo sapien
ctccttgataattctggtaacaatg

SEQ ID NO: 5826224 - DNA, 25 bp, Homo sapien
ggttcctctcatcgtacgtctcgac

SEQ ID NO: 5826225 - DNA, 25 bp, Homo sapien
gtcgagacgtacgatgagaggaacc

SEQ ID NO: 5826226 - DNA, 25 bp, Homo sapien
agtaccggttcacgcaactcgtctc

SEQ ID NO: 5826227 - DNA, 25 bp, Homo sapien
gagacgagttgcgtgaaccggtact

SEQ ID NO: 5826228 - DNA, 25 bp, Homo sapien
caagagaactaaatggatttcacct

SEQ ID NO: 5826229 - DNA, 25 bp, Homo sapien
aggtgaaatccatttagttctcttg

SEQ ID NO: 5826230 - DNA, 25 bp, Homo sapien
ccagggccgcacaagacgaggccga

SEQ ID NO: 5826231 - DNA, 25 bp, Homo sapien
tcggcctcgtcttgtgcggccctgg

SEQ ID NO: 5826232 - DNA, 25 bp, Homo sapien
acgacggaacacagaacttccataa

SEQ ID NO: 5826233 - DNA, 25 bp, Homo sapien
ttatggaagttctgtgttccgtcgt

SEQ ID NO: 5826234 - DNA, 25 bp, Homo sapien
ccgtccggtaattatgaaaacatct

SEQ ID NO: 5826235 - DNA, 25 bp, Homo sapien
agatgttttcataattaccggacgg

SEQ ID NO: 5826236 - DNA, 25 bp, Homo sapien
tcggtggacttgaaagtatctcctt

SEQ ID NO: 5826237 - DNA, 25 bp, Homo sapien
aaggagatactttcaagtccaccga

SEQ ID NO: 5826238 - DNA, 25 bp, Homo sapien
gtttacaattgaaccatcaacttaa

SEQ ID NO: 5826239 - DNA, 25 bp, Homo sapien
ttaagttgatggttcaattgtaaac

SEQ ID NO: 5826240 - DNA, 25 bp, Homo sapien
atgccacgtcctcttcaacagttgt

SEQ ID NO: 5826241 - DNA, 25 bp, Homo sapien
gcctacttatttaggggcatctaaa

SEQ ID NO: 5826242 - DNA, 25 bp, Homo sapien
caacagttgttggttgaaatgacac

SEQ ID NO: 5826243 - DNA, 25 bp, Homo sapien
ccacgtcctcttcaacagttgttgg

SEQ ID NO: 5826244 - DNA, 25 bp, Homo sapien
tgggcagatactggatgcctactta

SEQ ID NO: 5826245 - DNA, 25 bp, Homo sapien
gcatgaaggagagatgcttggacca

SEQ ID NO: 5826246 - DNA, 25 bp, Homo sapien
ttatttaggggcatctaaattcctg

SEQ ID NO: 5826247 - DNA, 25 bp, Homo sapien
actggatgcctacttatttaggggc

SEQ ID NO: 5826248 - DNA, 25 bp, Homo sapien
gcagctcttgaaaggagtgatggca

SEQ ID NO: 5826249 - DNA, 25 bp, Homo sapien
catgaaggagagatgcttggaccaa

SEQ ID NO: 5826250 - DNA, 25 bp, Homo sapien
ctaaattagaaaatagaggcagctc

SEQ ID NO: 5826251 - DNA, 25 bp, Homo sapien
gggcagatactggatgcctacttat

SEQ ID NO: 5826252 - DNA, 25 bp, Homo sapien
cagctcttgaaaggagtgatggcat

SEQ ID NO: 5826253 - DNA, 25 bp, Homo sapien
atgcctacttatttaggggcatcta

SEQ ID NO: 5826254 - DNA, 25 bp, Homo sapien
gtgtgggcagatactggatgcctac

SEQ ID NO: 5826255 - DNA, 25 bp, Homo sapien
ggagagatgcttggaccaaccacca

SEQ ID NO: 5826256 - DNA, 25 bp, Homo sapien
cacacgggtgctcccgccgaccgag

SEQ ID NO: 5826257 - DNA, 25 bp, Homo sapien
ctcggtcggcgggagcacccgtgtg

SEQ ID NO: 5826258 - DNA, 25 bp, Homo sapien
ccccagcactccctctcgctcgacc

SEQ ID NO: 5826259 - DNA, 25 bp, Homo sapien
ggtcgagcgagagggagtgctgggg

SEQ ID NO: 5826260 - DNA, 25 bp, Homo sapien
ctccccagcactccctctcgctcga

SEQ ID NO: 5826261 - DNA, 25 bp, Homo sapien
tcgagcgagagggagtgctggggag

SEQ ID NO: 5826262 - DNA, 25 bp, Homo sapien
gtttttagtaaaatgagctatgcat

SEQ ID NO: 5826263 - DNA, 25 bp, Homo sapien
atgcatagctcattttactaaaaac

SEQ ID NO: 5826264 - DNA, 25 bp, Homo sapien
tcccctccttggtgacggaccttga

SEQ ID NO: 5826265 - DNA, 25 bp, Homo sapien
tcaaggtccgtcaccaaggagggga

SEQ ID NO: 5826266 - DNA, 25 bp, Homo sapien
ggttccagaatacgtactgtcctct

SEQ ID NO: 5826267 - DNA, 25 bp, Homo sapien
agaggacagtacgtattctggaacc

SEQ ID NO: 5826268 - DNA, 25 bp, Homo sapien
ctaaggtcttaacttactattgaac

SEQ ID NO: 5826269 - DNA, 25 bp, Homo sapien
gttcaatagtaagttaagaccttag

SEQ ID NO: 5826270 - DNA, 25 bp, Homo sapien
ggacggagtcatggcggagcggccg

SEQ ID NO: 5826271 - DNA, 25 bp, Homo sapien
cggccgctccgccatgactccgtcc

SEQ ID NO: 5826272 - DNA, 25 bp, Homo sapien
agtcctacccgagctcctaggtagt

SEQ ID NO: 5826273 - DNA, 25 bp, Homo sapien
actacctaggagctcgggtaggact

SEQ ID NO: 5826274 - DNA, 25 bp, Homo sapien
agtcgaccgtcgttcgtaacagact

SEQ ID NO: 5826275 - DNA, 25 bp, Homo sapien
agtctgttacgaacgacggtcgact

SEQ ID NO: 5826276 - DNA, 25 bp, Homo sapien
ccgggcaggaagtccttcggaggcg

SEQ ID NO: 5826277 - DNA, 25 bp, Homo sapien
cgcctccgaaggacttcctgcccgg

SEQ ID NO: 5826278 - DNA, 25 bp, Homo sapien
acgtcgctcgaacgttcggacccga

SEQ ID NO: 5826279 - DNA, 25 bp, Homo sapien
tcgggtccgaacgttcgagcgacgt

SEQ ID NO: 5826280 - DNA, 25 bp, Homo sapien
cgccacaagtctaggactacgtaat

SEQ ID NO: 5826281 - DNA, 25 bp, Homo sapien
attacgtagtcctagacttgtggcg

SEQ ID NO: 5826282 - DNA, 25 bp, Homo sapien
tggatcctccgtacactcaccaaag

SEQ ID NO: 5826283 - DNA, 25 bp, Homo sapien
ctttggtgagtgtacggaggatcca

SEQ ID NO: 5826284 - DNA, 25 bp, Homo sapien
atatcgtttaaatatctttatccct

SEQ ID NO: 5826285 - DNA, 25 bp, Homo sapien
agggataaagatatttaaacgatat

SEQ ID NO: 5826286 - DNA, 25 bp, Homo sapien
gtgtccctgaacatgaaccaatatt

SEQ ID NO: 5826287 - DNA, 25 bp, Homo sapien
aatattggttcatgttcagggacac

SEQ ID NO: 5826288 - DNA, 25 bp, Homo sapien
tcctcgtcgaggatttaccgagaag

SEQ ID NO: 5826289 - DNA, 25 bp, Homo sapien
cttctcggtaaatcctcgacgagga

SEQ ID NO: 5826290 - DNA, 25 bp, Homo sapien
ttctgtaagaacaattttacttagt

SEQ ID NO: 5826291 - DNA, 25 bp, Homo sapien
actaagtaaaattgttcttacagaa

SEQ ID NO: 5826292 - DNA, 25 bp, Homo sapien
tttctgtaagaacaattttacttag

SEQ ID NO: 5826293 - DNA, 25 bp, Homo sapien
ctaagtaaaattgttcttacagaaa

SEQ ID NO: 5826294 - DNA, 25 bp, Homo sapien
gagaaaaagttattatcatgattat

SEQ ID NO: 5826295 - DNA, 25 bp, Homo sapien
ataatcatgataataactttttctc

SEQ ID NO: 5826296 - DNA, 25 bp, Homo sapien
agagaaaaagttattatcatgatta

SEQ ID NO: 5826297 - DNA, 25 bp, Homo sapien
taatcatgataataactttttctct

SEQ ID NO: 5826298 - DNA, 25 bp, Homo sapien
cggtccaatcttatgcacatagctt

SEQ ID NO: 5826299 - DNA, 25 bp, Homo sapien
aagctatgtgcataagattggaccg

SEQ ID NO: 5826300 - DNA, 25 bp, Homo sapien
gtcctgtcgtcttgatcccgggacg

SEQ ID NO: 5826301 - DNA, 25 bp, Homo sapien
cgtcccgggatcaagacgacaggac

SEQ ID NO: 5826302 - DNA, 25 bp, Homo sapien
cgggtcagagagttggactcagggt

SEQ ID NO: 5826303 - DNA, 25 bp, Homo sapien
accctgagtccaactctctgacccg

SEQ ID NO: 5826304 - DNA, 25 bp, Homo sapien
caagtctatgtttaaggtcgttgta

SEQ ID NO: 5826305 - DNA, 25 bp, Homo sapien
tacaacgaccttaaacatagacttg

SEQ ID NO: 5826306 - DNA, 25 bp, Homo sapien
ggccgccacgcaggggtgccagtgg

SEQ ID NO: 5826307 - DNA, 25 bp, Homo sapien
ccactggcacccctgcgtggcggcc

SEQ ID NO: 5826308 - DNA, 25 bp, Homo sapien
gttgtttcttccactgacacttgga

SEQ ID NO: 5826309 - DNA, 25 bp, Homo sapien
tccaagtgtcagtggaagaaacaac

SEQ ID NO: 5826310 - DNA, 25 bp, Homo sapien
gagagacagtctcgcggtgcccctc

SEQ ID NO: 5826311 - DNA, 25 bp, Homo sapien
gaggggcaccgcgagactgtctctc

SEQ ID NO: 5826312 - DNA, 25 bp, Homo sapien
catgtacaagatgtttacatataca

SEQ ID NO: 5826313 - DNA, 25 bp, Homo sapien
tgtatatgtaaacatcttgtacatg

SEQ ID NO: 5826314 - DNA, 25 bp, Homo sapien
tctacatcctcactgtctcactgag

SEQ ID NO: 5826315 - DNA, 25 bp, Homo sapien
ctcagtgagacagtgaggatgtaga

SEQ ID NO: 5826316 - DNA, 25 bp, Homo sapien
aacagtatctgactaagaaaataaa

SEQ ID NO: 5826317 - DNA, 25 bp, Homo sapien
tttattttcttagtcagatactgtt

SEQ ID NO: 5826318 - DNA, 25 bp, Homo sapien
ataaagacactaaacctatttgacg

SEQ ID NO: 5826319 - DNA, 25 bp, Homo sapien
cgtcaaataggtttagtgtctttat

SEQ ID NO: 5826320 - DNA, 25 bp, Homo sapien
cgtacggagtgaccgcacccctgga

SEQ ID NO: 5826321 - DNA, 25 bp, Homo sapien
tccaggggtgcggtcactccgtacg

SEQ ID NO: 5826322 - DNA, 25 bp, Homo sapien
agtccgctactccctccggaggact

SEQ ID NO: 5826323 - DNA, 25 bp, Homo sapien
agtcctccggagggagtagcggact

SEQ ID NO: 5826324 - DNA, 25 bp, Homo sapien
tccggacgcgcctctacggcccttc

SEQ ID NO: 5826325 - DNA, 25 bp, Homo sapien
gaagggccgtagaggcgcgtccgga

SEQ ID NO: 5826326 - DNA, 25 bp, Homo sapien
accggtcattaaaacctgattcatt

SEQ ID NO: 5826327 - DNA, 25 bp, Homo sapien
aatgaatcaggttttaatgaccggt

SEQ ID NO: 5826328 - DNA, 25 bp, Homo sapien
gttcatcagtgcactataactgagc

SEQ ID NO: 5826329 - DNA, 25 bp, Homo sapien
tacacttgagaaggtaccatatctt

SEQ ID NO: 5826330 - DNA, 25 bp, Homo sapien
atcagtgcactataactgagcttca

SEQ ID NO: 5826331 - DNA, 25 bp, Homo sapien
cactcccactgaatagatgtgaatg

SEQ ID NO: 5826332 - DNA, 25 bp, Homo sapien
cccagcattgactatatttgaaaga

SEQ ID NO: 5826333 - DNA, 25 bp, Homo sapien
agtgcactataactgagcttcaggg

SEQ ID NO: 5826334 - DNA, 25 bp, Homo sapien
cactgcatcagagaaccccagaatg

SEQ ID NO: 5826335 - DNA, 25 bp, Homo sapien
gtgaggagacacagggccaccacac

SEQ ID NO: 5826336 - DNA, 25 bp, Homo sapien
aaaaaacgcactcaggcatgcacac

SEQ ID NO: 5826337 - DNA, 25 bp, Homo sapien
cacactgcatcagagaaccccagaa

SEQ ID NO: 5826338 - DNA, 25 bp, Homo sapien
cccaaaaaacgcactcaggcatgca

SEQ ID NO: 5826339 - DNA, 25 bp, Homo sapien
gcatcctctcagttcatcagtgcac

SEQ ID NO: 5826340 - DNA, 25 bp, Homo sapien
aagagctacacttgagaaggtacca

SEQ ID NO: 5826341 - DNA, 25 bp, Homo sapien
ctgcatcagagaaccccagaatggg

SEQ ID NO: 5826342 - DNA, 25 bp, Homo sapien
aggtgaggagacacagggccaccac

SEQ ID NO: 5826343 - DNA, 25 bp, Homo sapien
acgcatcctctcagttcatcagtgc

SEQ ID NO: 5826344 - DNA, 25 bp, Homo sapien
taaatttgtaagatatggttcttgt

SEQ ID NO: 5826345 - DNA, 25 bp, Homo sapien
acaagaaccatatcttacaaattta

SEQ ID NO: 5826346 - DNA, 25 bp, Homo sapien
gattgtgaatcgtttcttttaccgt

SEQ ID NO: 5826347 - DNA, 25 bp, Homo sapien
acggtaaaagaaacgattcacaatc

SEQ ID NO: 5826348 - DNA, 25 bp, Homo sapien
cctaaggacggaacgatataggtcc

SEQ ID NO: 5826349 - DNA, 25 bp, Homo sapien
ggacctatatcgttccgtccttagg

SEQ ID NO: 5826350 - DNA, 25 bp, Homo sapien
caagaggtgggcagcccctacgacc

SEQ ID NO: 5826351 - DNA, 25 bp, Homo sapien
ggtcgtaggggctgcccacctcttg

SEQ ID NO: 5826352 - DNA, 25 bp, Homo sapien
tcgtcgtcatacacatctctcgtta

SEQ ID NO: 5826353 - DNA, 25 bp, Homo sapien
taacgagagatgtgtatgacgacga

SEQ ID NO: 5826354 - DNA, 25 bp, Homo sapien
taaacgaacgacataaagacactgt

SEQ ID NO: 5826355 - DNA, 25 bp, Homo sapien
acagtgtctttatgtcgttcgttta

SEQ ID NO: 5826356 - DNA, 25 bp, Homo sapien
atccgtaccgtttattagctggaga

SEQ ID NO: 5826357 - DNA, 25 bp, Homo sapien
tctccagctaataaacggtacggat

SEQ ID NO: 5826358 - DNA, 25 bp, Homo sapien
tttagatcaaataaatgaacaaccg

SEQ ID NO: 5826359 - DNA, 25 bp, Homo sapien
cggttgttcatttatttgatctaaa

SEQ ID NO: 5826360 - DNA, 25 bp, Homo sapien
taagtctcgaaatctctttaaagag

SEQ ID NO: 5826361 - DNA, 25 bp, Homo sapien
ctctttaaagagatttcgagactta

SEQ ID NO: 5826362 - DNA, 25 bp, Homo sapien
aatctttgagtaagcccattagcta

SEQ ID NO: 5826363 - DNA, 25 bp, Homo sapien
caatgcaactctgcaccacaagaga

SEQ ID NO: 5826364 - DNA, 25 bp, Homo sapien
gcaccacaagagagaaacaactgag

SEQ ID NO: 5826365 - DNA, 25 bp, Homo sapien
agaaacaactgagaatatcattgct

SEQ ID NO: 5826366 - DNA, 25 bp, Homo sapien
tgggaaaatgtagaaaacccaatgc

SEQ ID NO: 5826367 - DNA, 25 bp, Homo sapien
gggaaaatgtagaaaacccaatgca

SEQ ID NO: 5826368 - DNA, 25 bp, Homo sapien
gagtaagcccattagctaggaagag

SEQ ID NO: 5826369 - DNA, 25 bp, Homo sapien
gtagaaaacccaatgcaactctgca

SEQ ID NO: 5826370 - DNA, 25 bp, Homo sapien
tgcaactctgcaccacaagagagaa

SEQ ID NO: 5826371 - DNA, 25 bp, Homo sapien
gagaaacaactgagaatatcattgc

SEQ ID NO: 5826372 - DNA, 25 bp, Homo sapien
aaacaactgagaatatcattgctag

SEQ ID NO: 5826373 - DNA, 25 bp, Homo sapien
ttgagtaagcccattagctaggaag

SEQ ID NO: 5826374 - DNA, 25 bp, Homo sapien
ggtggtgaatctttgagtaagccca

SEQ ID NO: 5826375 - DNA, 25 bp, Homo sapien
ccaatgcaactctgcaccacaagag

SEQ ID NO: 5826376 - DNA, 25 bp, Homo sapien
ccattagctaggaagagattataac

SEQ ID NO: 5826377 - DNA, 25 bp, Homo sapien
tttacaacagggaagactcagtggg

SEQ ID NO: 5826378 - DNA, 25 bp, Homo sapien
agaatagacactactaagtcatatt

SEQ ID NO: 5826379 - DNA, 25 bp, Homo sapien
aatatgacttagtagtgtctattct

SEQ ID NO: 5826380 - DNA, 25 bp, Homo sapien
ccttttctgcagtagtggtcttcag

SEQ ID NO: 5826381 - DNA, 25 bp, Homo sapien
ctgaagaccactactgcagaaaagg

SEQ ID NO: 5826382 - DNA, 25 bp, Homo sapien
tacacgataacttctggtcactcag

SEQ ID NO: 5826383 - DNA, 25 bp, Homo sapien
ctgagtgaccagaagttatcgtgta

SEQ ID NO: 5826384 - DNA, 25 bp, Homo sapien
tcggcgcgccgcgcccagggccctt

SEQ ID NO: 5826385 - DNA, 25 bp, Homo sapien
aagggccctgggcgcggcgcgccga

SEQ ID NO: 5826386 - DNA, 25 bp, Homo sapien
gtcggcgcgccgcgcccagggccct

SEQ ID NO: 5826387 - DNA, 25 bp, Homo sapien
agggccctgggcgcggcgcgccgac

SEQ ID NO: 5826388 - DNA, 25 bp, Homo sapien
gggtcggcgcgccgcgcccagggcc

SEQ ID NO: 5826389 - DNA, 25 bp, Homo sapien
ggccctgggcgcggcgcgccgaccc

SEQ ID NO: 5826390 - DNA, 25 bp, Homo sapien
ccaagtgcaatggtacaaagacaac

SEQ ID NO: 5826391 - DNA, 25 bp, Homo sapien
gttgtctttgtaccattgcacttgg

SEQ ID NO: 5826392 - DNA, 25 bp, Homo sapien
taaacatctcaaagatacttaatag

SEQ ID NO: 5826393 - DNA, 25 bp, Homo sapien
ctattaagtatctttgagatgttta

SEQ ID NO: 5826394 - DNA, 25 bp, Homo sapien
acctatggagacaaaacgtgtggta

SEQ ID NO: 5826395 - DNA, 25 bp, Homo sapien
taccacacgttttgtctccataggt

SEQ ID NO: 5826396 - DNA, 25 bp, Homo sapien
gaaaggctcccgtgaactcctcctg

SEQ ID NO: 5826397 - DNA, 25 bp, Homo sapien
caggaggagttcacgggagcctttc

SEQ ID NO: 5826398 - DNA, 25 bp, Homo sapien
ttcgtagacatagatcttgacttgt

SEQ ID NO: 5826399 - DNA, 25 bp, Homo sapien
acaagtcaagatctatgtctacgaa

SEQ ID NO: 5826400 - DNA, 25 bp, Homo sapien
cacaagataccaatcattcgacgaa

SEQ ID NO: 5826401 - DNA, 25 bp, Homo sapien
ttcgtcgaatgattggtatcttgtg

SEQ ID NO: 5826402 - DNA, 25 bp, Homo sapien
ataagaatattcacaagataccaat

SEQ ID NO: 5826403 - DNA, 25 bp, Homo sapien
attggtatcttgtgaatattcttat

SEQ ID NO: 5826404 - DNA, 25 bp, Homo sapien
aacaactcacgtggtatgtacccga

SEQ ID NO: 5826405 - DNA, 25 bp, Homo sapien
tcgggtacataccacgtgagttgtt

SEQ ID NO: 5826406 - DNA, 25 bp, Homo sapien
aaagtacttatttatcgactgaaag

SEQ ID NO: 5826407 - DNA, 25 bp, Homo sapien
ctttcagtcgataaataagtacttt

SEQ ID NO: 5826408 - DNA, 25 bp, Homo sapien
gtcgacaccacacgaaagtcgacgt

SEQ ID NO: 5826409 - DNA, 25 bp, Homo sapien
acgtcgactttcgtgtggtgtcgac

SEQ ID NO: 5826410 - DNA, 25 bp, Homo sapien
ctcaacaaagaagagcagaactgat

SEQ ID NO: 5826411 - DNA, 25 bp, Homo sapien
atcagttctgctcttctttgttgag

SEQ ID NO: 5826412 - DNA, 25 bp, Homo sapien
cctggacctccaggcgcctgagaac

SEQ ID NO: 5826413 - DNA, 25 bp, Homo sapien
gttctcaggcgcctggaggtccagg

SEQ ID NO: 5826414 - DNA, 25 bp, Homo sapien
tcttttatcaagtataaattgcatt

SEQ ID NO: 5826415 - DNA, 25 bp, Homo sapien
aatgcaatttatacttgataaaaga

SEQ ID NO: 5826416 - DNA, 25 bp, Homo sapien
gattcatgtcttttatcaagtataa

SEQ ID NO: 5826417 - DNA, 25 bp, Homo sapien
ttatacttgataaaagacatgaatc

SEQ ID NO: 5826418 - DNA, 25 bp, Homo sapien
gtctctgaagaggtaacagatcatt

SEQ ID NO: 5826419 - DNA, 25 bp, Homo sapien
aatgatctgttacctcttcagagac

SEQ ID NO: 5826420 - DNA, 25 bp, Homo sapien
taagaatcatatccgaagttagaat

SEQ ID NO: 5826421 - DNA, 25 bp, Homo sapien
attctaacttcggatatgattctta

SEQ ID NO: 5826422 - DNA, 25 bp, Homo sapien
ggcggaggccactcgcgccctcttc

SEQ ID NO: 5826423 - DNA, 25 bp, Homo sapien
gaagagggcgcgagtggcctccgcc

SEQ ID NO: 5826424 - DNA, 25 bp, Homo sapien
cagagccactgctcgtcgacgggcg

SEQ ID NO: 5826425 - DNA, 25 bp, Homo sapien
cgcccgtcgacgagcagtggctctg

SEQ ID NO: 5826426 - DNA, 25 bp, Homo sapien
agactccagggtcttcttttcgtag

SEQ ID NO: 5826427 - DNA, 25 bp, Homo sapien
ctacgaaaagaagaccctggagtct

SEQ ID NO: 5826428 - DNA, 25 bp, Homo sapien
gtaaaaatacctacgtgcatatcca

SEQ ID NO: 5826429 - DNA, 25 bp, Homo sapien
tggatatgcacgtaggtatttttac

SEQ ID NO: 5826430 - DNA, 25 bp, Homo sapien
gccagggcggtacgcgcggcgagga

SEQ ID NO: 5826431 - DNA, 25 bp, Homo sapien
tcctcgccgcgcgtaccgccctggc

SEQ ID NO: 5826432 - DNA, 25 bp, Homo sapien
acggaccgtactcgtgaatataacg

SEQ ID NO: 5826433 - DNA, 25 bp, Homo sapien
cgttatattcacgagtacggtccgt

SEQ ID NO: 5826434 - DNA, 25 bp, Homo sapien
caccgggagctaagagcaggctctg

SEQ ID NO: 5826435 - DNA, 25 bp, Homo sapien
tgcaatctgccacagctctggggcg

SEQ ID NO: 5826436 - DNA, 25 bp, Homo sapien
ccctgaggtgctcctgagatgctgg

SEQ ID NO: 5826437 - DNA, 25 bp, Homo sapien
acacgatggctcctgcaatctgcca

SEQ ID NO: 5826438 - DNA, 25 bp, Homo sapien
gacaccctgaggtgctcctgagatg

SEQ ID NO: 5826439 - DNA, 25 bp, Homo sapien
taaccgacaccctgaggtgctcctg

SEQ ID NO: 5826440 - DNA, 25 bp, Homo sapien
atggctcctgcaatctgccacagct

SEQ ID NO: 5826441 - DNA, 25 bp, Homo sapien
ctgcaatctgccacagctctggggc

SEQ ID NO: 5826442 - DNA, 25 bp, Homo sapien
aatggcctgaggagctacgtgtgaa

SEQ ID NO: 5826443 - DNA, 25 bp, Homo sapien
ctcttaaccgacaccctgaggtgct

SEQ ID NO: 5826444 - DNA, 25 bp, Homo sapien
gtctcttaaccgacaccctgaggtg

SEQ ID NO: 5826445 - DNA, 25 bp, Homo sapien
gcaccgggagctaagagcaggctct

SEQ ID NO: 5826446 - DNA, 25 bp, Homo sapien
aggtgctcctgagatgctgggtcca

SEQ ID NO: 5826447 - DNA, 25 bp, Homo sapien
gcaatctgccacagctctggggcgt

SEQ ID NO: 5826448 - DNA, 25 bp, Homo sapien
gatggctcctgcaatctgccacagc

SEQ ID NO: 5826449 - DNA, 25 bp, Homo sapien
cgatggctcctgcaatctgccacag

SEQ ID NO: 5826450 - DNA, 25 bp, Homo sapien
ggctccaccctgaagatgtcgaagg

SEQ ID NO: 5826451 - DNA, 25 bp, Homo sapien
ccttcgacatcttcagggtggagcc

SEQ ID NO: 5826452 - DNA, 25 bp, Homo sapien
ccagggggtcccttgccaagtctgt

SEQ ID NO: 5826453 - DNA, 25 bp, Homo sapien
tctcagcagcaaacaggtaaaatct

SEQ ID NO: 5826454 - DNA, 25 bp, Homo sapien
gacaactatgaaaagctaaggaagc

SEQ ID NO: 5826455 - DNA, 25 bp, Homo sapien
taatcttaaagaactgactaggttc

SEQ ID NO: 5826456 - DNA, 25 bp, Homo sapien
tttcatggaaatgtcagacaactat

SEQ ID NO: 5826457 - DNA, 25 bp, Homo sapien
ttaggcagagatgttctcagcagca

SEQ ID NO: 5826458 - DNA, 25 bp, Homo sapien
gaaataggactgagaaatgaccaac

SEQ ID NO: 5826459 - DNA, 25 bp, Homo sapien
gtcagacaactatgaaaagctaagg

SEQ ID NO: 5826460 - DNA, 25 bp, Homo sapien
tgaccaacatcaagtataatacggt

SEQ ID NO: 5826461 - DNA, 25 bp, Homo sapien
aatcaagttctttatgatgtgaacc

SEQ ID NO: 5826462 - DNA, 25 bp, Homo sapien
aaaagaggaatttccagatggcagc

SEQ ID NO: 5826463 - DNA, 25 bp, Homo sapien
gcaaggcctcagaaattcagcgggt

SEQ ID NO: 5826464 - DNA, 25 bp, Homo sapien
ctttatgatgtgaaccagattttcc

SEQ ID NO: 5826465 - DNA, 25 bp, Homo sapien
caactatgaaaagctaaggaagcat

SEQ ID NO: 5826466 - DNA, 25 bp, Homo sapien
gcctaaaccacttctgagctttaag

SEQ ID NO: 5826467 - DNA, 25 bp, Homo sapien
cttaaagaactgactaggttctaaa

SEQ ID NO: 5826468 - DNA, 25 bp, Homo sapien
ttcgcagtcacctctcggaaagtct

SEQ ID NO: 5826469 - DNA, 25 bp, Homo sapien
agactttccgagaggtgactgcgaa

SEQ ID NO: 5826470 - DNA, 25 bp, Homo sapien
cgtatctacagtggttgttgtatgt

SEQ ID NO: 5826471 - DNA, 25 bp, Homo sapien
acatacaacaaccactgtagatacg

SEQ ID NO: 5826472 - DNA, 25 bp, Homo sapien
aggtgccgattgactccgctgtcat

SEQ ID NO: 5826473 - DNA, 25 bp, Homo sapien
atgacagcggagtcaatcggcacct

SEQ ID NO: 5826474 - DNA, 25 bp, Homo sapien
tttggtgaagattatatttatcaac

SEQ ID NO: 5826475 - DNA, 25 bp, Homo sapien
gttgataaatataatcttcaccaaa

SEQ ID NO: 5826476 - DNA, 25 bp, Homo sapien
taccagtggcgtcccggaaagtgtc

SEQ ID NO: 5826477 - DNA, 25 bp, Homo sapien
gacactttccgggacgccactggta

SEQ ID NO: 5826478 - DNA, 25 bp, Homo sapien
agactcgaagatcaggtcatcgaag

SEQ ID NO: 5826479 - DNA, 25 bp, Homo sapien
cttcgatgacctgatcttcgagtct

SEQ ID NO: 5826480 - DNA, 25 bp, Homo sapien
cgtaaattcatcaagttctagcaat

SEQ ID NO: 5826481 - DNA, 25 bp, Homo sapien
attgctagaacttgatgaatttacg

SEQ ID NO: 5826482 - DNA, 25 bp, Homo sapien
cgaggaccttcacttcgttgggtat

SEQ ID NO: 5826483 - DNA, 25 bp, Homo sapien
atacccaacgaagtgaaggtcctcg

SEQ ID NO: 5826484 - DNA, 25 bp, Homo sapien
agagttcctgttaccggtctcgaca

SEQ ID NO: 5826485 - DNA, 25 bp, Homo sapien
tgtcgagaccggtaacaggaactct

SEQ ID NO: 5826486 - DNA, 25 bp, Homo sapien
agtttaagaggaggtaacgatagag

SEQ ID NO: 5826487 - DNA, 25 bp, Homo sapien
ctctatcgttacctcctcttaaact

SEQ ID NO: 5826488 - DNA, 25 bp, Homo sapien
ctcaacattgacttatgtctacaca

SEQ ID NO: 5826489 - DNA, 25 bp, Homo sapien
tgtgtagacataagtcaatgttgag

SEQ ID NO: 5826490 - DNA, 25 bp, Homo sapien
cccgagtcgtgaagggccatgagat

SEQ ID NO: 5826491 - DNA, 25 bp, Homo sapien
atctcatggcccttcacgactcggg

SEQ ID NO: 5826492 - DNA, 25 bp, Homo sapien
gacctatagacccttataccttaat

SEQ ID NO: 5826493 - DNA, 25 bp, Homo sapien
attaaggtataagggtctataggtc

SEQ ID NO: 5826494 - DNA, 25 bp, Homo sapien
gttcctcgaaggagcccggcttcct

SEQ ID NO: 5826495 - DNA, 25 bp, Homo sapien
aggaagccgggctccttcgaggaac

SEQ ID NO: 5826496 - DNA, 25 bp, Homo sapien
ttacgataatcatcgtcgagaaaca

SEQ ID NO: 5826497 - DNA, 25 bp, Homo sapien
tgtttctcgacgatgattatcgtaa

SEQ ID NO: 5826498 - DNA, 25 bp, Homo sapien
acgtccagggcaggggcgaggtccc

SEQ ID NO: 5826499 - DNA, 25 bp, Homo sapien
gggacctcgcccctgccctggacgt

SEQ ID NO: 5826500 - DNA, 25 bp, Homo sapien
ccgcgcgtgcgccggacgggaaggg

SEQ ID NO: 5826501 - DNA, 25 bp, Homo sapien
cccttcccgtccggcgcacgcgcgg

SEQ ID NO: 5826502 - DNA, 25 bp, Homo sapien
taaggtcagtgtctattcataggac

SEQ ID NO: 5826503 - DNA, 25 bp, Homo sapien
gtcctatgaatagacactgacctta

SEQ ID NO: 5826504 - DNA, 25 bp, Homo sapien
tgtttttctgcccgtcttctatcac

SEQ ID NO: 5826505 - DNA, 25 bp, Homo sapien
gtgatagaagacgggcagaaaaaca

SEQ ID NO: 5826506 - DNA, 25 bp, Homo sapien
tcttgggggactactcgtcctcaat

SEQ ID NO: 5826507 - DNA, 25 bp, Homo sapien
attgaggacgagtagtcccccaaga

SEQ ID NO: 5826508 - DNA, 25 bp, Homo sapien
gacagtaccctcaaccaactttagt

SEQ ID NO: 5826509 - DNA, 25 bp, Homo sapien
actaaagttggttgagggtactgtc

SEQ ID NO: 5826510 - DNA, 25 bp, Homo sapien
agttatagattacgttattatcgaa

SEQ ID NO: 5826511 - DNA, 25 bp, Homo sapien
ttcgataataacgtaatctataact

SEQ ID NO: 5826512 - DNA, 25 bp, Homo sapien
gggaccgccgcgagtcctgtgccgg

SEQ ID NO: 5826513 - DNA, 25 bp, Homo sapien
ccggcacaggactcgcggcggtccc

SEQ ID NO: 5826514 - DNA, 25 bp, Homo sapien
gggcggtactgacggcgggtcctcc

SEQ ID NO: 5826515 - DNA, 25 bp, Homo sapien
ggaggacccgccgtcagtaccgccc

SEQ ID NO: 5826516 - DNA, 25 bp, Homo sapien
gagccccgagggtcgcctgggcggg

SEQ ID NO: 5826517 - DNA, 25 bp, Homo sapien
cccgcccaggcgaccctcggggctc

SEQ ID NO: 5826518 - DNA, 25 bp, Homo sapien
acggtgaggccatgttcagtattgg

SEQ ID NO: 5826519 - DNA, 25 bp, Homo sapien
ccaatactgaacatggcctcaccgt

SEQ ID NO: 5826520 - DNA, 25 bp, Homo sapien
gatctcgacccaagtacccaacgtt

SEQ ID NO: 5826521 - DNA, 25 bp, Homo sapien
aacgttgggtacttgggtcgagatc

SEQ ID NO: 5826522 - DNA, 25 bp, Homo sapien
ttcgtgagtccacagggaccagggg

SEQ ID NO: 5826523 - DNA, 25 bp, Homo sapien
cccctggtccctgtggactcacgaa

SEQ ID NO: 5826524 - DNA, 25 bp, Homo sapien
tattaccaccagtcatgtataaaat

SEQ ID NO: 5826525 - DNA, 25 bp, Homo sapien
attttatacatgactggtggtaata

SEQ ID NO: 5826526 - DNA, 25 bp, Homo sapien
gacttgtaacctatctgaaactctt

SEQ ID NO: 5826527 - DNA, 25 bp, Homo sapien
aagagtttcagataggttacaagtc

SEQ ID NO: 5826528 - DNA, 25 bp, Homo sapien
cgaggtcgttaatgataaggtatct

SEQ ID NO: 5826529 - DNA, 25 bp, Homo sapien
agataccttatcattaacgacctcg

SEQ ID NO: 5826530 - DNA, 25 bp, Homo sapien
aggttctgagcccaccaggttctcg

SEQ ID NO: 5826531 - DNA, 25 bp, Homo sapien
cgagaacctggtgggctcagaacct

SEQ ID NO: 5826532 - DNA, 25 bp, Homo sapien
ggagtcgagagaccgtgtcggggta

SEQ ID NO: 5826533 - DNA, 25 bp, Homo sapien
taccccgacacggtctctcgactcc

SEQ ID NO: 5826534 - DNA, 25 bp, Homo sapien
cccactttctcaagacctgtgagag

SEQ ID NO: 5826535 - DNA, 25 bp, Homo sapien
ctctcacaggtcttgagaaagtggg

SEQ ID NO: 5826536 - DNA, 25 bp, Homo sapien
agtcatcctgggaaaacgttattaa

SEQ ID NO: 5826537 - DNA, 25 bp, Homo sapien
ttaataacgttttcccaggatgact

SEQ ID NO: 5826538 - DNA, 25 bp, Homo sapien
ctggagggccccagcggtcggcgcg

SEQ ID NO: 5826539 - DNA, 25 bp, Homo sapien
cgcgccgaccgctggggccctccag

SEQ ID NO: 5826540 - DNA, 25 bp, Homo sapien
gatcaagtcccgtcctgttgtaagg

SEQ ID NO: 5826541 - DNA, 25 bp, Homo sapien
ccttacaacaggacgggacttgatc

SEQ ID NO: 5826542 - DNA, 25 bp, Homo sapien
ttgcctaacttcgacggtatcccgt

SEQ ID NO: 5826543 - DNA, 25 bp, Homo sapien
acgggataccgtcgaagttaggcaa

SEQ ID NO: 5826544 - DNA, 25 bp, Homo sapien
cggggaggtccaagagccactcggc

SEQ ID NO: 5826545 - DNA, 25 bp, Homo sapien
gccgagtggctcttggacctccccg

SEQ ID NO: 5826546 - DNA, 25 bp, Homo sapien
agacagaagatgctgtttccaatgt

SEQ ID NO: 5826547 - DNA, 25 bp, Homo sapien
acattggaaacagcatcttctgtct

SEQ ID NO: 5826548 - DNA, 25 bp, Homo sapien
gacggagcaggtgcaccctggcact

SEQ ID NO: 5826549 - DNA, 25 bp, Homo sapien
agtgccagggtgcacctgctccgtc

SEQ ID NO: 5826550 - DNA, 25 bp, Homo sapien
ctctagggactacgactgtaacctt

SEQ ID NO: 5826551 - DNA, 25 bp, Homo sapien
aaggttacagtcgtagtccctagag

SEQ ID NO: 5826552 - DNA, 25 bp, Homo sapien
acctcccgcagcacgggtagtctcg

SEQ ID NO: 5826553 - DNA, 25 bp, Homo sapien
cgagactacccgtgctgcgggaggt

SEQ ID NO: 5826554 - DNA, 25 bp, Homo sapien
gaggcattcccttggcacaacttgg

SEQ ID NO: 5826555 - DNA, 25 bp, Homo sapien
gcaccaccgctgtgtatttacatgt

SEQ ID NO: 5826556 - DNA, 25 bp, Homo sapien
ctttgctgagatgcagcggaggtcc

SEQ ID NO: 5826557 - DNA, 25 bp, Homo sapien
gggcaccaccgctgtgtatttacat

SEQ ID NO: 5826558 - DNA, 25 bp, Homo sapien
ctcttaccagggtccctgtccagga

SEQ ID NO: 5826559 - DNA, 25 bp, Homo sapien
ggcaagaggcattcccttggcacaa

SEQ ID NO: 5826560 - DNA, 25 bp, Homo sapien
ttgctgagatgcagcggaggtccct

SEQ ID NO: 5826561 - DNA, 25 bp, Homo sapien
ggcaccaccgctgtgtatttacatg

SEQ ID NO: 5826562 - DNA, 25 bp, Homo sapien
acatgtcctctgtacacctacggag

SEQ ID NO: 5826563 - DNA, 25 bp, Homo sapien
tgcctgggcaccaccgctgtgtatt

SEQ ID NO: 5826564 - DNA, 25 bp, Homo sapien
agaggcattcccttggcacaacttg

SEQ ID NO: 5826565 - DNA, 25 bp, Homo sapien
tcccttggcacaacttgggacatgg

SEQ ID NO: 5826566 - DNA, 25 bp, Homo sapien
tgtcctctgtacacctacggagagg

SEQ ID NO: 5826567 - DNA, 25 bp, Homo sapien
agctgcctgggcaccaccgctgtgt

SEQ ID NO: 5826568 - DNA, 25 bp, Homo sapien
cttggcacaacttgggacatgggct

SEQ ID NO: 5826569 - DNA, 25 bp, Homo sapien
aggacttgtgggatctgttaacccc

SEQ ID NO: 5826570 - DNA, 25 bp, Homo sapien
cggccaccgacctgggactgacgag

SEQ ID NO: 5826571 - DNA, 25 bp, Homo sapien
ctcgtcagtcccaggtcggtggccg

SEQ ID NO: 5826572 - DNA, 25 bp, Homo sapien
aatagacagcaacaagtgaaacggt

SEQ ID NO: 5826573 - DNA, 25 bp, Homo sapien
accgtttcacttgttgctgtctatt

SEQ ID NO: 5826574 - DNA, 25 bp, Homo sapien
agaggcctgatctggacccagttat

SEQ ID NO: 5826575 - DNA, 25 bp, Homo sapien
ataactgggtccagatcaggcctct

SEQ ID NO: 5826576 - DNA, 25 bp, Homo sapien
ccgtgacataaacacagcctgttaa

SEQ ID NO: 5826577 - DNA, 25 bp, Homo sapien
ttaacaggctgtgtttatgtcacgg

SEQ ID NO: 5826578 - DNA, 25 bp, Homo sapien
gtataaggaagacactcgtcagact

SEQ ID NO: 5826579 - DNA, 25 bp, Homo sapien
agtctgacgagtgtcttccttatac

SEQ ID NO: 5826580 - DNA, 25 bp, Homo sapien
gaaccaattcccgatagaccggaca

SEQ ID NO: 5826581 - DNA, 25 bp, Homo sapien
tgtccggtctatcgggaattggttc

SEQ ID NO: 5826582 - DNA, 25 bp, Homo sapien
taagagaccataaagtgaagtaaga

SEQ ID NO: 5826583 - DNA, 25 bp, Homo sapien
tcttacttcactttatggtctctta

SEQ ID NO: 5826584 - DNA, 25 bp, Homo sapien
gtgacggcggggtgtcacaccgagg

SEQ ID NO: 5826585 - DNA, 25 bp, Homo sapien
cctcggtgtgacaccccgccgtcac

SEQ ID NO: 5826586 - DNA, 25 bp, Homo sapien
ccgaaggtgcccaaccagcctctcg

SEQ ID NO: 5826587 - DNA, 25 bp, Homo sapien
cgagaggctggttgggcaccttcgg

SEQ ID NO: 5826588 - DNA, 25 bp, Homo sapien
aacttcgacatcaaacgaagattgt

SEQ ID NO: 5826589 - DNA, 25 bp, Homo sapien
acaatcttcgtttgatgtcgaagtt

SEQ ID NO: 5826590 - DNA, 25 bp, Homo sapien
tcctacggtgaaaaaccgacacgtg

SEQ ID NO: 5826591 - DNA, 25 bp, Homo sapien
cacgtgtcggtttttcaccgtagga

SEQ ID NO: 5826592 - DNA, 25 bp, Homo sapien
aatcgaatacaggagaagaggactg

SEQ ID NO: 5826593 - DNA, 25 bp, Homo sapien
cagtcctcttctcctgtattcgatt

SEQ ID NO: 5826594 - DNA, 25 bp, Homo sapien
ctctcccgagcctccccggggacga

SEQ ID NO: 5826595 - DNA, 25 bp, Homo sapien
tcgtccccggggaggctcgggagag

SEQ ID NO: 5826596 - DNA, 25 bp, Homo sapien
tccgctctcccgagcctccccgggg

SEQ ID NO: 5826597 - DNA, 25 bp, Homo sapien
ccccggggaggctcgggagagcgga

SEQ ID NO: 5826598 - DNA, 25 bp, Homo sapien
gaactatgatagaactggtctgaag

SEQ ID NO: 5826599 - DNA, 25 bp, Homo sapien
cttcagaccagttctatcatagttc

SEQ ID NO: 5826600 - DNA, 25 bp, Homo sapien
gccgcctctgctacatgatggtgaa

SEQ ID NO: 5826601 - DNA, 25 bp, Homo sapien
ttcaccatcatgtagcagaggcggc

SEQ ID NO: 5826602 - DNA, 25 bp, Homo sapien
aggtccctgcgggagactcgaccgg

SEQ ID NO: 5826603 - DNA, 25 bp, Homo sapien
ccggtcgagtctcccgcagggacct

SEQ ID NO: 5826604 - DNA, 25 bp, Homo sapien
acattcggtccctgaggactcgtgt

SEQ ID NO: 5826605 - DNA, 25 bp, Homo sapien
acacgagtcctcagggaccgaatgt

SEQ ID NO: 5826606 - DNA, 25 bp, Homo sapien
actcaactgatagacatactagacg

SEQ ID NO: 5826607 - DNA, 25 bp, Homo sapien
cgtctagtatgtctatcagttgagt

SEQ ID NO: 5826608 - DNA, 25 bp, Homo sapien
agtcaaaaagggacagagaattggt

SEQ ID NO: 5826609 - DNA, 25 bp, Homo sapien
accaattctctgtccctttttgact

SEQ ID NO: 5826610 - DNA, 25 bp, Homo sapien
gccctgacggggtgcctgcggcggt

SEQ ID NO: 5826611 - DNA, 25 bp, Homo sapien
accgccgcaggcaccccgtcagggc

SEQ ID NO: 5826612 - DNA, 25 bp, Homo sapien
gcgaggccgactccgccctgacggg

SEQ ID NO: 5826613 - DNA, 25 bp, Homo sapien
cccgtcagggcggagtcggcctcgc

SEQ ID NO: 5826614 - DNA, 25 bp, Homo sapien
gacggggtgcctgcggcggtgcagt

SEQ ID NO: 5826615 - DNA, 25 bp, Homo sapien
actgcaccgccgcaggcaccccgtc

SEQ ID NO: 5826616 - DNA, 25 bp, Homo sapien
tgtccaccgatcgtccggcctctgt

SEQ ID NO: 5826617 - DNA, 25 bp, Homo sapien
acagaggccggacgatcggtggaca

SEQ ID NO: 5826618 - DNA, 25 bp, Homo sapien
acgtgcggtcctgtcctacctccct

SEQ ID NO: 5826619 - DNA, 25 bp, Homo sapien
agggaggtaggacaggaccgcacgt

SEQ ID NO: 5826620 - DNA, 25 bp, Homo sapien
aggacggccgcggtgagccagcggt

SEQ ID NO: 5826621 - DNA, 25 bp, Homo sapien
accgctggctcaccgcggccgtcct

SEQ ID NO: 5826622 - DNA, 25 bp, Homo sapien
gggaggactctcgtccactcgcccg

SEQ ID NO: 5826623 - DNA, 25 bp, Homo sapien
cgggcgagtggacgagagtcctccc

SEQ ID NO: 5826624 - DNA, 25 bp, Homo sapien
aacaagtgcgactttgataaactgt

SEQ ID NO: 5826625 - DNA, 25 bp, Homo sapien
acagtttatcaaagtcgcacttgtt

SEQ ID NO: 5826626 - DNA, 25 bp, Homo sapien
cggacgaccggctgggtgactgggt

SEQ ID NO: 5826627 - DNA, 25 bp, Homo sapien
acccagtcacccagccggtcgtccg

SEQ ID NO: 5826628 - DNA, 25 bp, Homo sapien
ctttcttctaaaatgacttcacaag

SEQ ID NO: 5826629 - DNA, 25 bp, Homo sapien
cttgtgaagtcattttagaagaaag

SEQ ID NO: 5826630 - DNA, 25 bp, Homo sapien
gaccacaaagtttcaatactgttcg

SEQ ID NO: 5826631 - DNA, 25 bp, Homo sapien
cgaacagtattgaaactttgtggtc

SEQ ID NO: 5826632 - DNA, 25 bp, Homo sapien
gggtgtatttgggttcggatattta

SEQ ID NO: 5826633 - DNA, 25 bp, Homo sapien
taaatatccgaacccaaatacaccc

SEQ ID NO: 5826634 - DNA, 25 bp, Homo sapien
tcggagagcccctctgaccgtttgg

SEQ ID NO: 5826635 - DNA, 25 bp, Homo sapien
ccaaacggtcagaggggctctccga

SEQ ID NO: 5826636 - DNA, 25 bp, Homo sapien
ttgggccggcacagggacgtggccg

SEQ ID NO: 5826637 - DNA, 25 bp, Homo sapien
cggccacgtccctgtgccggcccaa

SEQ ID NO: 5826638 - DNA, 25 bp, Homo sapien
gacctctggcgtccggccgttcctc

SEQ ID NO: 5826639 - DNA, 25 bp, Homo sapien
gaggaacggccggacgccagaggtc

SEQ ID NO: 5826640 - DNA, 25 bp, Homo sapien
tagcaaaagagataaatagtacagg

SEQ ID NO: 5826641 - DNA, 25 bp, Homo sapien
cctgtactatttatctcttttgcta

SEQ ID NO: 5826642 - DNA, 25 bp, Homo sapien
gtctggccccgggtctaccggactg

SEQ ID NO: 5826643 - DNA, 25 bp, Homo sapien
cagtccggtagacccggggccagac

SEQ ID NO: 5826644 - DNA, 25 bp, Homo sapien
tctggtttgacggacttcgtacccc

SEQ ID NO: 5826645 - DNA, 25 bp, Homo sapien
ggggtacgaagtccgtcaaaccaga

SEQ ID NO: 5826646 - DNA, 25 bp, Homo sapien
ggaagtcgtcagcggctcgtctcag

SEQ ID NO: 5826647 - DNA, 25 bp, Homo sapien
ctgagacgagccgctgacgacttcc

SEQ ID NO: 5826648 - DNA, 25 bp, Homo sapien
ctcagaggtaaacagggacaatttt

SEQ ID NO: 5826649 - DNA, 25 bp, Homo sapien
aaaattgtccctgtttacctctgag

SEQ ID NO: 5826650 - DNA, 25 bp, Homo sapien
agaactgggtacatatgcatattaa

SEQ ID NO: 5826651 - DNA, 25 bp, Homo sapien
ttaatatgcatatgtacccagttct

SEQ ID NO: 5826652 - DNA, 25 bp, Homo sapien
gggtaagacggacgaacagacagta

SEQ ID NO: 5826653 - DNA, 25 bp, Homo sapien
tactgtctgttcgtccgtcttaccc

SEQ ID NO: 5826654 - DNA, 25 bp, Homo sapien
acacatcctaatccgcaaaagtaaa

SEQ ID NO: 5826655 - DNA, 25 bp, Homo sapien
tttacttttgcggattaggatgtgt

SEQ ID NO: 5826656 - DNA, 25 bp, Homo sapien
ttttttcatttacaaacactcctac

SEQ ID NO: 5826657 - DNA, 25 bp, Homo sapien
gtaggagtgtttgtaaatgaaaaaa

SEQ ID NO: 5826658 - DNA, 25 bp, Homo sapien
tttacaaacactcctaccccttgta

SEQ ID NO: 5826659 - DNA, 25 bp, Homo sapien
tacaaggggtaggagtgtttgtaaa

SEQ ID NO: 5826660 - DNA, 25 bp, Homo sapien
ttaagacgcacacagaacacagagg

SEQ ID NO: 5826661 - DNA, 25 bp, Homo sapien
cagtgagacccctctggaaagggca

SEQ ID NO: 5826662 - DNA, 25 bp, Homo sapien
gcagaagcaggcaagccaggcagaa

SEQ ID NO: 5826663 - DNA, 25 bp, Homo sapien
tgggacaggtgacacgcccactctc

SEQ ID NO: 5826664 - DNA, 25 bp, Homo sapien
gctgtctctggctgtcagtgagacc

SEQ ID NO: 5826665 - DNA, 25 bp, Homo sapien
cagggaccccaggactgcacagctg

SEQ ID NO: 5826666 - DNA, 25 bp, Homo sapien
gaaagggcgccacacacagcccaga

SEQ ID NO: 5826667 - DNA, 25 bp, Homo sapien
acagcccagaccaggcaggagcggc

SEQ ID NO: 5826668 - DNA, 25 bp, Homo sapien
ggaacctgggacaggtgacacgccc

SEQ ID NO: 5826669 - DNA, 25 bp, Homo sapien
ggaaagggcgccacacacagcccag

SEQ ID NO: 5826670 - DNA, 25 bp, Homo sapien
acagctgcagacttgctgggaacct

SEQ ID NO: 5826671 - DNA, 25 bp, Homo sapien
gacgcacacagaacacagaggaaca

SEQ ID NO: 5826672 - DNA, 25 bp, Homo sapien
acacacagcccagaccaggcaggag

SEQ ID NO: 5826673 - DNA, 25 bp, Homo sapien
aggcagggcccctgctggacagcac

SEQ ID NO: 5826674 - DNA, 25 bp, Homo sapien
tgcacagctgcagacttgctgggaa

SEQ ID NO: 5826675 - DNA, 25 bp, Homo sapien
acgctttattgcttaagacgcacac

SEQ ID NO: 5826676 - DNA, 25 bp, Homo sapien
tcctgccggtctgagcggctgccgc

SEQ ID NO: 5826677 - DNA, 25 bp, Homo sapien
gcggcagccgctcagaccggcagga

SEQ ID NO: 5826678 - DNA, 25 bp, Homo sapien
atcgactatcgcctgtgtgacacac

SEQ ID NO: 5826679 - DNA, 25 bp, Homo sapien
gtgtgtcacacaggcgatagtcgat

SEQ ID NO: 5826680 - DNA, 25 bp, Homo sapien
cggaagccccctgtgcggagcgccg

SEQ ID NO: 5826681 - DNA, 25 bp, Homo sapien
cggcgctccgcacagggggcttccg

SEQ ID NO: 5826682 - DNA, 25 bp, Homo sapien
gccccctgtgcggagcgccgagggc

SEQ ID NO: 5826683 - DNA, 25 bp, Homo sapien
gccctcggcgctccgcacagggggc

SEQ ID NO: 5826684 - DNA, 25 bp, Homo sapien
agccccctgtgcggagcgccgaggg

SEQ ID NO: 5826685 - DNA, 25 bp, Homo sapien
ccctcggcgctccgcacagggggct

SEQ ID NO: 5826686 - DNA, 25 bp, Homo sapien
tagatattttgtggaggacaataag

SEQ ID NO: 5826687 - DNA, 25 bp, Homo sapien
cttattgtcctccacaaaatatcta

SEQ ID NO: 5826688 - DNA, 25 bp, Homo sapien
aggaggataacagacttacatgcac

SEQ ID NO: 5826689 - DNA, 25 bp, Homo sapien
gtgcatgtaagtctgttatcctcct

SEQ ID NO: 5826690 - DNA, 25 bp, Homo sapien
caagataattagtaaacgtagaaat

SEQ ID NO: 5826691 - DNA, 25 bp, Homo sapien
atttctacgtttactaattatcttg

SEQ ID NO: 5826692 - DNA, 25 bp, Homo sapien
gacttctcaagacaaaaactgttcg

SEQ ID NO: 5826693 - DNA, 25 bp, Homo sapien
cgaacagtttttgtcttgagaagtc

SEQ ID NO: 5826694 - DNA, 25 bp, Homo sapien
gtgggtgtcacggttcaggttgtct

SEQ ID NO: 5826695 - DNA, 25 bp, Homo sapien
agacaacctgaaccgtgacacccac

SEQ ID NO: 5826696 - DNA, 25 bp, Homo sapien
gacacagaaattaaacgtttcaaaa

SEQ ID NO: 5826697 - DNA, 25 bp, Homo sapien
ttttgaaacgtttaatttctgtgtc

SEQ ID NO: 5826698 - DNA, 25 bp, Homo sapien
aaggacacagaaattaaacgtttca

SEQ ID NO: 5826699 - DNA, 25 bp, Homo sapien
tgaaacgtttaatttctgtgtcctt

SEQ ID NO: 5826700 - DNA, 25 bp, Homo sapien
tctttatttacttccttattctttc

SEQ ID NO: 5826701 - DNA, 25 bp, Homo sapien
gaaagaataaggaagtaaataaaga

SEQ ID NO: 5826702 - DNA, 25 bp, Homo sapien
taaatgcatccgtcagagccctaag

SEQ ID NO: 5826703 - DNA, 25 bp, Homo sapien
cttagggctctgacggatgcattta

SEQ ID NO: 5826704 - DNA, 25 bp, Homo sapien
ccacactgacgactgcgactgtacg

SEQ ID NO: 5826705 - DNA, 25 bp, Homo sapien
cgtacagtcgcagtcgtcagtgtgg

SEQ ID NO: 5826706 - DNA, 25 bp, Homo sapien
cgaccactgtccttctccccaccac

SEQ ID NO: 5826707 - DNA, 25 bp, Homo sapien
gtggtggggagaaggacagtggtcg

SEQ ID NO: 5826708 - DNA, 25 bp, Homo sapien
tcccgtcctgtcttaggtcaagtcc

SEQ ID NO: 5826709 - DNA, 25 bp, Homo sapien
ggacttgacctaagacaggacggga

SEQ ID NO: 5826710 - DNA, 25 bp, Homo sapien
aagatgttaaaccaatttaagatat

SEQ ID NO: 5826711 - DNA, 25 bp, Homo sapien
atatcttaaattggtttaacatctt

SEQ ID NO: 5826712 - DNA, 25 bp, Homo sapien
tattaaaccaatttacattcttagt

SEQ ID NO: 5826713 - DNA, 25 bp, Homo sapien
actaagaatgtaaattggtttaata

SEQ ID NO: 5826714 - DNA, 25 bp, Homo sapien
ttcaggactcggggcgggccacgga

SEQ ID NO: 5826715 - DNA, 25 bp, Homo sapien
tccgtggcccgccccgagtcctgaa

SEQ ID NO: 5826716 - DNA, 25 bp, Homo sapien
ctaggaacttgggaaccagtggtcg

SEQ ID NO: 5826717 - DNA, 25 bp, Homo sapien
cgaccactggttcccaagttcctag

SEQ ID NO: 5826718 - DNA, 25 bp, Homo sapien
ggtgtccaccgttcgggtgtggtat

SEQ ID NO: 5826719 - DNA, 25 bp, Homo sapien
ataccacacccgaacggtggacacc

SEQ ID NO: 5826720 - DNA, 25 bp, Homo sapien
tatccacctgtaggttcctgtaact

SEQ ID NO: 5826721 - DNA, 25 bp, Homo sapien
agttacaggaacctacaggtggata

SEQ ID NO: 5826722 - DNA, 25 bp, Homo sapien
gaccgtaacgttcgtcaagatataa

SEQ ID NO: 5826723 - DNA, 25 bp, Homo sapien
ttatatcttgacgaacgttacggtc

SEQ ID NO: 5826724 - DNA, 25 bp, Homo sapien
cgggccggcggctcctcgccctcct

SEQ ID NO: 5826725 - DNA, 25 bp, Homo sapien
aggagggcgaggagccgccggcccg

SEQ ID NO: 5826726 - DNA, 25 bp, Homo sapien
gcgggccggcggctcctcgccctcc

SEQ ID NO: 5826727 - DNA, 25 bp, Homo sapien
ggagggcgaggagccgccggcccgc

SEQ ID NO: 5826728 - DNA, 25 bp, Homo sapien
ggcgggccggcggctcctcgccctc

SEQ ID NO: 5826729 - DNA, 25 bp, Homo sapien
gagggcgaggagccgccggcccgcc

SEQ ID NO: 5826730 - DNA, 25 bp, Homo sapien
gggccggcggctcctcgccctcctc

SEQ ID NO: 5826731 - DNA, 25 bp, Homo sapien
gaggagggcgaggagccgccggccc

SEQ ID NO: 5826732 - DNA, 25 bp, Homo sapien
ttataggcccgagcgtctggtgcgc

SEQ ID NO: 5826733 - DNA, 25 bp, Homo sapien
gcgcaccagacgctcgggcctataa

SEQ ID NO: 5826734 - DNA, 25 bp, Homo sapien
tgttatctaacaccaaatcagcaat

SEQ ID NO: 5826735 - DNA, 25 bp, Homo sapien
attgctgatttggtgttagataaca

SEQ ID NO: 5826736 - DNA, 25 bp, Homo sapien
gtcttagaaagtaccatttatatag

SEQ ID NO: 5826737 - DNA, 25 bp, Homo sapien
ctatataaatggtactttctaagac

SEQ ID NO: 5826738 - DNA, 25 bp, Homo sapien
ggtgtacatcgtaacgttccaacgt

SEQ ID NO: 5826739 - DNA, 25 bp, Homo sapien
acgttggaacgttacgatgtacacc

SEQ ID NO: 5826740 - DNA, 25 bp, Homo sapien
agtttatcttagagattaactagac

SEQ ID NO: 5826741 - DNA, 25 bp, Homo sapien
gtctagttaatctctaagataaact

SEQ ID NO: 5826742 - DNA, 25 bp, Homo sapien
cgcggccctgccgacgcgggtggtc

SEQ ID NO: 5826743 - DNA, 25 bp, Homo sapien
gaccacccgcgtcggcagggccgcg

SEQ ID NO: 5826744 - DNA, 25 bp, Homo sapien
gcgcggccctgccgacgcgggtggt

SEQ ID NO: 5826745 - DNA, 25 bp, Homo sapien
accacccgcgtcggcagggccgcgc

SEQ ID NO: 5826746 - DNA, 25 bp, Homo sapien
cgcgcggccctgccgacgcgggtgg

SEQ ID NO: 5826747 - DNA, 25 bp, Homo sapien
ccacccgcgtcggcagggccgcgcg

SEQ ID NO: 5826748 - DNA, 25 bp, Homo sapien
acgcgcggccctgccgacgcgggtg

SEQ ID NO: 5826749 - DNA, 25 bp, Homo sapien
cacccgcgtcggcagggccgcgcgt

SEQ ID NO: 5826750 - DNA, 25 bp, Homo sapien
accgaggtccttgaccttctaagac

SEQ ID NO: 5826751 - DNA, 25 bp, Homo sapien
gtcttagaaggtcaaggacctcggt

SEQ ID NO: 5826752 - DNA, 25 bp, Homo sapien
cctcacgtttacacccacataaacg

SEQ ID NO: 5826753 - DNA, 25 bp, Homo sapien
cgtttatgtgggtgtaaacgtgagg

SEQ ID NO: 5826754 - DNA, 25 bp, Homo sapien
cggagaggtccgaggctcccgtccc

SEQ ID NO: 5826755 - DNA, 25 bp, Homo sapien
gggacgggagcctcggacctctccg

SEQ ID NO: 5826756 - DNA, 25 bp, Homo sapien
gggccgtcgtggtccgcccctgtcc

SEQ ID NO: 5826757 - DNA, 25 bp, Homo sapien
ggacaggggcggaccacgacggccc

SEQ ID NO: 5826758 - DNA, 25 bp, Homo sapien
ttgagagcattctattctgaaaatt

SEQ ID NO: 5826759 - DNA, 25 bp, Homo sapien
aattttcagaatagaatgctctcaa

SEQ ID NO: 5826760 - DNA, 25 bp, Homo sapien
aggacggcggctggtgcgcgggacg

SEQ ID NO: 5826761 - DNA, 25 bp, Homo sapien
cgtcccgcgcaccagccgccgtcct

SEQ ID NO: 5826762 - DNA, 25 bp, Homo sapien
gtcttacctgttcaccccatatcga

SEQ ID NO: 5826763 - DNA, 25 bp, Homo sapien
tcgatatggggtgaacaggtaagac

SEQ ID NO: 5826764 - DNA, 25 bp, Homo sapien
cgagcgtgcgtgaccgaccgcgcgt

SEQ ID NO: 5826765 - DNA, 25 bp, Homo sapien
acgcgcggtcggtcacgcacgctcg

SEQ ID NO: 5826766 - DNA, 25 bp, Homo sapien
gcgagcgtgcgtgaccgaccgcgcg

SEQ ID NO: 5826767 - DNA, 25 bp, Homo sapien
cgcgcggtcggtcacgcacgctcgc

SEQ ID NO: 5826768 - DNA, 25 bp, Homo sapien
gactctgggagccgtcagcgggagg

SEQ ID NO: 5826769 - DNA, 25 bp, Homo sapien
cctcccgctgacggctcccagagtc

SEQ ID NO: 5826770 - DNA, 25 bp, Homo sapien
atagaacttctactctatgcagaca

SEQ ID NO: 5826771 - DNA, 25 bp, Homo sapien
tgtctgcatagagtagaagttctat

SEQ ID NO: 5826772 - DNA, 25 bp, Homo sapien
ctctgaaagatgttaccttaaactt

SEQ ID NO: 5826773 - DNA, 25 bp, Homo sapien
aagtttaaggtaacatctttcagag

SEQ ID NO: 5826774 - DNA, 25 bp, Homo sapien
tgcttctcgtacaacgagaaaggaa

SEQ ID NO: 5826775 - DNA, 25 bp, Homo sapien
ttcctttctcgttgtacgagaagca

SEQ ID NO: 5826776 - DNA, 25 bp, Homo sapien
acatcttgggtcccgatgcgtcggg

SEQ ID NO: 5826777 - DNA, 25 bp, Homo sapien
cccgacgcatcgggacccaagatgt

SEQ ID NO: 5826778 - DNA, 25 bp, Homo sapien
tctgggcggcttgaggccgactgcg

SEQ ID NO: 5826779 - DNA, 25 bp, Homo sapien
cgcagtcggcctcaagccgcccaga

SEQ ID NO: 5826780 - DNA, 25 bp, Homo sapien
aataacaactgtccaggtcgacaag

SEQ ID NO: 5826781 - DNA, 25 bp, Homo sapien
cttgtcgacctggacagttgttatt

SEQ ID NO: 5826782 - DNA, 25 bp, Homo sapien
cctcgctgggtaacgggccgagacg

SEQ ID NO: 5826783 - DNA, 25 bp, Homo sapien
cgtctcggcccgttacccagcgagg

SEQ ID NO: 5826784 - DNA, 25 bp, Homo sapien
aagagtacgactccactgttctcca

SEQ ID NO: 5826785 - DNA, 25 bp, Homo sapien
tggagaacagtggagtcgtactctt

SEQ ID NO: 5826786 - DNA, 25 bp, Homo sapien
aacgctgtacgctcttgggttttcg

SEQ ID NO: 5826787 - DNA, 25 bp, Homo sapien
cgaaaacccaagagcgtacagcgtt

SEQ ID NO: 5826788 - DNA, 25 bp, Homo sapien
acataaggttggagtgactttttag

SEQ ID NO: 5826789 - DNA, 25 bp, Homo sapien
ctaaaaagtcactccaaccttatgt

SEQ ID NO: 5826790 - DNA, 25 bp, Homo sapien
gtacgtcgagtataccgtagtcggt

SEQ ID NO: 5826791 - DNA, 25 bp, Homo sapien
accgactacggtatactcgacgtac

SEQ ID NO: 5826792 - DNA, 25 bp, Homo sapien
agtaagttatgaagtcgtacgtata

SEQ ID NO: 5826793 - DNA, 25 bp, Homo sapien
tatacgtacgacttcataacttact

SEQ ID NO: 5826794 - DNA, 25 bp, Homo sapien
tatttgaaccccacaacttataaat

SEQ ID NO: 5826795 - DNA, 25 bp, Homo sapien
atttataagttgtggggttcaaata

SEQ ID NO: 5826796 - DNA, 25 bp, Homo sapien
actattataatcaccgttatagtaa

SEQ ID NO: 5826797 - DNA, 25 bp, Homo sapien
ttactataacggtgattataatagt

SEQ ID NO: 5826798 - DNA, 25 bp, Homo sapien
tacgtcacaataaagaactactcac

SEQ ID NO: 5826799 - DNA, 25 bp, Homo sapien
gtgagtagttctttattgtgacgta

SEQ ID NO: 5826800 - DNA, 25 bp, Homo sapien
gacactcgtcactagccgtcgtcgc

SEQ ID NO: 5826801 - DNA, 25 bp, Homo sapien
gcgacgacggctagtgacgagtgtc

SEQ ID NO: 5826802 - DNA, 25 bp, Homo sapien
taaagcactacacacaccctaccag

SEQ ID NO: 5826803 - DNA, 25 bp, Homo sapien
ctggtagggtgtgtgtagtgcttta

SEQ ID NO: 5826804 - DNA, 25 bp, Homo sapien
cgcggaagtcaggatgaagccttac

SEQ ID NO: 5826805 - DNA, 25 bp, Homo sapien
gtaaggcttcatcctgacttccgcg

SEQ ID NO: 5826806 - DNA, 25 bp, Homo sapien
ttgggtgtcaggtctgagatgcagc

SEQ ID NO: 5826807 - DNA, 25 bp, Homo sapien
acgccacctctggaggccagggagg

SEQ ID NO: 5826808 - DNA, 25 bp, Homo sapien
agggagagaaggtgggcacaggcca

SEQ ID NO: 5826809 - DNA, 25 bp, Homo sapien
gggccaggaatgggcggcccagggc

SEQ ID NO: 5826810 - DNA, 25 bp, Homo sapien
cggggagaaggctgagaaggcccgg

SEQ ID NO: 5826811 - DNA, 25 bp, Homo sapien
cagaacaaccaacccaaaaccagta

SEQ ID NO: 5826812 - DNA, 25 bp, Homo sapien
ccgttgggtgtcaggtctgagatgc

SEQ ID NO: 5826813 - DNA, 25 bp, Homo sapien
tcaggtctgagatgcagcgggaggg

SEQ ID NO: 5826814 - DNA, 25 bp, Homo sapien
actggcgaaacacacaggggtgggg

SEQ ID NO: 5826815 - DNA, 25 bp, Homo sapien
cgttgggtgtcaggtctgagatgca

SEQ ID NO: 5826816 - DNA, 25 bp, Homo sapien
cgcggggagaaggctgagaaggccc

SEQ ID NO: 5826817 - DNA, 25 bp, Homo sapien
ggtccccggagacccagctggccgc

SEQ ID NO: 5826818 - DNA, 25 bp, Homo sapien
agggtccccggagacccagctggcc

SEQ ID NO: 5826819 - DNA, 25 bp, Homo sapien
gggagggccaggaatgggcggccca

SEQ ID NO: 5826820 - DNA, 25 bp, Homo sapien
gccccgggtccggtctcccagcaca

SEQ ID NO: 5826821 - DNA, 25 bp, Homo sapien
ggagacccagctggccgcggggaga

SEQ ID NO: 5826822 - DNA, 25 bp, Homo sapien
aaagtgttctgaattggtcagtagt

SEQ ID NO: 5826823 - DNA, 25 bp, Homo sapien
actactgaccaattcagaacacttt

SEQ ID NO: 5826824 - DNA, 25 bp, Homo sapien
cggacccgaggtccagacttccgag

SEQ ID NO: 5826825 - DNA, 25 bp, Homo sapien
ctcggaagtctggacctcgggtccg

SEQ ID NO: 5826826 - DNA, 25 bp, Homo sapien
gtggaggggtccgcgcgtcgctccg

SEQ ID NO: 5826827 - DNA, 25 bp, Homo sapien
cggagcgacgcgcggacccctccac

SEQ ID NO: 5826828 - DNA, 25 bp, Homo sapien
ggtggaggggtccgcgcgtcgctcc

SEQ ID NO: 5826829 - DNA, 25 bp, Homo sapien
ggagcgacgcgcggacccctccacc

SEQ ID NO: 5826830 - DNA, 25 bp, Homo sapien
tgatgggctctacattctggagaca

SEQ ID NO: 5826831 - DNA, 25 bp, Homo sapien
gctctacattctggagacacgggca

SEQ ID NO: 5826832 - DNA, 25 bp, Homo sapien
gagacacgggcagtagaactattat

SEQ ID NO: 5826833 - DNA, 25 bp, Homo sapien
atgggctctacattctggagacacg

SEQ ID NO: 5826834 - DNA, 25 bp, Homo sapien
tctacattctggagacacgggcagt

SEQ ID NO: 5826835 - DNA, 25 bp, Homo sapien
cattctggagacacgggcagtagaa

SEQ ID NO: 5826836 - DNA, 25 bp, Homo sapien
gaactttatcttcacagtcgcggca

SEQ ID NO: 5826837 - DNA, 25 bp, Homo sapien
aactttatcttcacagtcgcggcaa

SEQ ID NO: 5826838 - DNA, 25 bp, Homo sapien
attgatgggctctacattctggaga

SEQ ID NO: 5826839 - DNA, 25 bp, Homo sapien
tccgttcctcacttcagttgtggtg

SEQ ID NO: 5826840 - DNA, 25 bp, Homo sapien
ctacattctggagacacgggcagta

SEQ ID NO: 5826841 - DNA, 25 bp, Homo sapien
gatgggctctacattctggagacac

SEQ ID NO: 5826842 - DNA, 25 bp, Homo sapien
ctctacattctggagacacgggcag

SEQ ID NO: 5826843 - DNA, 25 bp, Homo sapien
gttcctcacttcagttgtggtgata

SEQ ID NO: 5826844 - DNA, 25 bp, Homo sapien
tattgatgggctctacattctggag

SEQ ID NO: 5826845 - DNA, 25 bp, Homo sapien
ggagacacgggcagtagaactatta

SEQ ID NO: 5826846 - DNA, 25 bp, Homo sapien
tgtgtacgtgcgagtcaataagagg

SEQ ID NO: 5826847 - DNA, 25 bp, Homo sapien
cctcttattgactcgcacgtacaca

SEQ ID NO: 5826848 - DNA, 25 bp, Homo sapien
ccgggtgcagggagggtatgcgtcg

SEQ ID NO: 5826849 - DNA, 25 bp, Homo sapien
cgacgcataccctccctgcacccgg

SEQ ID NO: 5826850 - DNA, 25 bp, Homo sapien
ccagtgttcctccatgataaagtca

SEQ ID NO: 5826851 - DNA, 25 bp, Homo sapien
tgactttatcatggaggaacactgg

SEQ ID NO: 5826852 - DNA, 25 bp, Homo sapien
cgtccttccggcccccacgcagcga

SEQ ID NO: 5826853 - DNA, 25 bp, Homo sapien
tcgctgcgtgggggccggaaggacg

SEQ ID NO: 5826854 - DNA, 25 bp, Homo sapien
ggtcggcgcccagtgcgaggcgcgg

SEQ ID NO: 5826855 - DNA, 25 bp, Homo sapien
ccgcgcctcgcactgggcgccgacc

SEQ ID NO: 5826856 - DNA, 25 bp, Homo sapien
tcgtcctcagtagtatcattctctt

SEQ ID NO: 5826857 - DNA, 25 bp, Homo sapien
aagagaatgatactactgaggacga

SEQ ID NO: 5826858 - DNA, 25 bp, Homo sapien
gaatattgacccagaacctagaagg

SEQ ID NO: 5826859 - DNA, 25 bp, Homo sapien
ccttctaggttctgggtcaatattc

SEQ ID NO: 5826860 - DNA, 25 bp, Homo sapien
ccgacacggcagagacgaacctctt

SEQ ID NO: 5826861 - DNA, 25 bp, Homo sapien
aagaggttcgtctctgccgtgtcgg

SEQ ID NO: 5826862 - DNA, 25 bp, Homo sapien
gacgtgcgtccccacacccacccgg

SEQ ID NO: 5826863 - DNA, 25 bp, Homo sapien
ccgggtgggtgtggggacgcacgtc

SEQ ID NO: 5826864 - DNA, 25 bp, Homo sapien
ttataagagggaacagatttaccct

SEQ ID NO: 5826865 - DNA, 25 bp, Homo sapien
agggtaaatctgttccctcttataa

SEQ ID NO: 5826866 - DNA, 25 bp, Homo sapien
ggactcctaccgagtgttgaaacgg

SEQ ID NO: 5826867 - DNA, 25 bp, Homo sapien
ccgtttcaacactcggtaggagtcc

SEQ ID NO: 5826868 - DNA, 25 bp, Homo sapien
ctcgttccatccttggattagaccc

SEQ ID NO: 5826869 - DNA, 25 bp, Homo sapien
gggtctaatccaaggatggaacgag

SEQ ID NO: 5826870 - DNA, 25 bp, Homo sapien
ttttacactttaaccatacagtact

SEQ ID NO: 5826871 - DNA, 25 bp, Homo sapien
agtactgtatggttaaagtgtaaaa

SEQ ID NO: 5826872 - DNA, 25 bp, Homo sapien
atgtttgacttacttccagtagtat

SEQ ID NO: 5826873 - DNA, 25 bp, Homo sapien
atactactggaagtaagtcaaacat

SEQ ID NO: 5826874 - DNA, 25 bp, Homo sapien
cccgggcactctggcgtaaaaggac

SEQ ID NO: 5826875 - DNA, 25 bp, Homo sapien
gtccttttacgccagagtgcccggg

SEQ ID NO: 5826876 - DNA, 25 bp, Homo sapien
tacgaccaggcgtcggagacgagtc

SEQ ID NO: 5826877 - DNA, 25 bp, Homo sapien
gactcgtctccgacgcctggtcgta

SEQ ID NO: 5826878 - DNA, 25 bp, Homo sapien
ggagtctcttctacctgtgacccct

SEQ ID NO: 5826879 - DNA, 25 bp, Homo sapien
aggggtcacaggtagaagagactcc

SEQ ID NO: 5826880 - DNA, 25 bp, Homo sapien
gttatccacttgaaaacgtaactca

SEQ ID NO: 5826881 - DNA, 25 bp, Homo sapien
tgagttacgttttcaagtggataac

SEQ ID NO: 5826882 - DNA, 25 bp, Homo sapien
atatttcattgaactacacttaagg

SEQ ID NO: 5826883 - DNA, 25 bp, Homo sapien
ccttaagtgtagttcaatgaaatat

SEQ ID NO: 5826884 - DNA, 25 bp, Homo sapien
cgggaaggctagagcagtcgctaac

SEQ ID NO: 5826885 - DNA, 25 bp, Homo sapien
gttagcgactgctctagccttcccg

SEQ ID NO: 5826886 - DNA, 25 bp, Homo sapien
gcgtgtcacgcggtggcgcggcggg

SEQ ID NO: 5826887 - DNA, 25 bp, Homo sapien
cccgccgcgccaccgcgtgacacgc

SEQ ID NO: 5826888 - DNA, 25 bp, Homo sapien
tccaactttgataactaagtaatct

SEQ ID NO: 5826889 - DNA, 25 bp, Homo sapien
agattacttagttatcaaagttgga

SEQ ID NO: 5826890 - DNA, 25 bp, Homo sapien
actgtccgtcaggccgccgcagccc

SEQ ID NO: 5826891 - DNA, 25 bp, Homo sapien
gggctgcggcggcctgacggacagt

SEQ ID NO: 5826892 - DNA, 25 bp, Homo sapien
gcccggggtccgatggctcgacgtc

SEQ ID NO: 5826893 - DNA, 25 bp, Homo sapien
gacgtcgagccatcggaccccgggc

SEQ ID NO: 5826894 - DNA, 25 bp, Homo sapien
ccgtgtcccaattctcgtggggtgt

SEQ ID NO: 5826895 - DNA, 25 bp, Homo sapien
acaccccacgagaattgggacacgg

SEQ ID NO: 5826896 - DNA, 25 bp, Homo sapien
cagagacagaactattaagtgagat

SEQ ID NO: 5826897 - DNA, 25 bp, Homo sapien
atctcacttaatagttctgtctctg

SEQ ID NO: 5826898 - DNA, 25 bp, Homo sapien
aggcgacagcggcagcccggagggc

SEQ ID NO: 5826899 - DNA, 25 bp, Homo sapien
gccctccgggctgccgctgtcgcct

SEQ ID NO: 5826900 - DNA, 25 bp, Homo sapien
gcggcaggcgacagcggcagcccgg

SEQ ID NO: 5826901 - DNA, 25 bp, Homo sapien
ccgggctgccgctgtcgcctgccgc

SEQ ID NO: 5826902 - DNA, 25 bp, Homo sapien
ttgcgtgagctcgagggagcagtct

SEQ ID NO: 5826903 - DNA, 25 bp, Homo sapien
agactgctccctcgagctcacgcaa

SEQ ID NO: 5826904 - DNA, 25 bp, Homo sapien
taaagaaatgatcgtgaaaacatag

SEQ ID NO: 5826905 - DNA, 25 bp, Homo sapien
ctatgttttcacgatcatttcttta

SEQ ID NO: 5826906 - DNA, 25 bp, Homo sapien
tgaacttaaaaccacagacagaatg

SEQ ID NO: 5826907 - DNA, 25 bp, Homo sapien
cattctgtctgtggttttaagttca

SEQ ID NO: 5826908 - DNA, 25 bp, Homo sapien
agtgtcggtcgaatacctgtatcat

SEQ ID NO: 5826909 - DNA, 25 bp, Homo sapien
atgatacaggtattcgaccgacact

SEQ ID NO: 5826910 - DNA, 25 bp, Homo sapien
atcatgacagacaaacggtgaccaa

SEQ ID NO: 5826911 - DNA, 25 bp, Homo sapien
ttggtcaccgtttgtctgtcatgat

SEQ ID NO: 5826912 - DNA, 25 bp, Homo sapien
gtcaccaacgaaaaacggatcaaag

SEQ ID NO: 5826913 - DNA, 25 bp, Homo sapien
ctttgatccgtttttcgttggtgac

SEQ ID NO: 5826914 - DNA, 25 bp, Homo sapien
cgtaggcttccgtcaccttccagcc

SEQ ID NO: 5826915 - DNA, 25 bp, Homo sapien
ggctggaaggtgacggaagcctacg

SEQ ID NO: 5826916 - DNA, 25 bp, Homo sapien
gatcttaagacttccattgtaaacg

SEQ ID NO: 5826917 - DNA, 25 bp, Homo sapien
cgtttacaatggaagtcttaagatc

SEQ ID NO: 5826918 - DNA, 25 bp, Homo sapien
gacgtgccatttccctttgtcacga

SEQ ID NO: 5826919 - DNA, 25 bp, Homo sapien
tcgtgacaaagggaaatggcacgtc

SEQ ID NO: 5826920 - DNA, 25 bp, Homo sapien
tatgataaacgttctttgaatgaag

SEQ ID NO: 5826921 - DNA, 25 bp, Homo sapien
cttcattcaaagaacgtttatcata

SEQ ID NO: 5826922 - DNA, 25 bp, Homo sapien
gccgaaggtgggtcgccacgccgtg

SEQ ID NO: 5826923 - DNA, 25 bp, Homo sapien
cacggcgtggcgacccaccttcggc

SEQ ID NO: 5826924 - DNA, 25 bp, Homo sapien
cggtttaggggcaactctcgcggat

SEQ ID NO: 5826925 - DNA, 25 bp, Homo sapien
atccgcgagagttgcccctaaaccg

SEQ ID NO: 5826926 - DNA, 25 bp, Homo sapien
tctgaactttcttcgcggaatcgaa

SEQ ID NO: 5826927 - DNA, 25 bp, Homo sapien
ttcgattccgcgaagaaagttcaga

SEQ ID NO: 5826928 - DNA, 25 bp, Homo sapien
ctcttttcgggagtaacgttgagta

SEQ ID NO: 5826929 - DNA, 25 bp, Homo sapien
tactcaacgttactcccgaaaagag

SEQ ID NO: 5826930 - DNA, 25 bp, Homo sapien
ggtcgtcagtatgttggttatcaaa

SEQ ID NO: 5826931 - DNA, 25 bp, Homo sapien
tttgataaccaacatactgacgacc

SEQ ID NO: 5826932 - DNA, 25 bp, Homo sapien
tccttcgactgtgagtgtttgaaac

SEQ ID NO: 5826933 - DNA, 25 bp, Homo sapien
gtttcaaacactcacagtcgaagga

SEQ ID NO: 5826934 - DNA, 25 bp, Homo sapien
acctaccatttcattggtagtatgg

SEQ ID NO: 5826935 - DNA, 25 bp, Homo sapien
cttgtagagcaaagcatgcagagtg

SEQ ID NO: 5826936 - DNA, 25 bp, Homo sapien
atcttgtagagcaaagcatgcagag

SEQ ID NO: 5826937 - DNA, 25 bp, Homo sapien
ggctactggacaaattgtatattac

SEQ ID NO: 5826938 - DNA, 25 bp, Homo sapien
cagatcatcactagcagctttcagt

SEQ ID NO: 5826939 - DNA, 25 bp, Homo sapien
tgtagagcaaagcatgcagagtgct

SEQ ID NO: 5826940 - DNA, 25 bp, Homo sapien
actagcagctttcagttgcacttca

SEQ ID NO: 5826941 - DNA, 25 bp, Homo sapien
ctggctactggacaaattgtatatt

SEQ ID NO: 5826942 - DNA, 25 bp, Homo sapien
tcattggtagtatggcctgcggtga

SEQ ID NO: 5826943 - DNA, 25 bp, Homo sapien
aaacaaactggctactggacaaatt

SEQ ID NO: 5826944 - DNA, 25 bp, Homo sapien
agcaaagcatgcagagtgctatttc

SEQ ID NO: 5826945 - DNA, 25 bp, Homo sapien
ccagatcatcactagcagctttcag

SEQ ID NO: 5826946 - DNA, 25 bp, Homo sapien
ggtagtatggcctgcggtgaccatt

SEQ ID NO: 5826947 - DNA, 25 bp, Homo sapien
ttgtagagcaaagcatgcagagtgc

SEQ ID NO: 5826948 - DNA, 25 bp, Homo sapien
tcttgtagagcaaagcatgcagagt

SEQ ID NO: 5826949 - DNA, 25 bp, Homo sapien
catcttgtagagcaaagcatgcaga

SEQ ID NO: 5826950 - DNA, 25 bp, Homo sapien
gcgcggcggccgcttcttccgtctc

SEQ ID NO: 5826951 - DNA, 25 bp, Homo sapien
gagacggaagaagcggccgccgcgc

SEQ ID NO: 5826952 - DNA, 25 bp, Homo sapien
ctccgagagacgcagaacaatataa

SEQ ID NO: 5826953 - DNA, 25 bp, Homo sapien
ttatattgttctgcgtctctcggag

SEQ ID NO: 5826954 - DNA, 25 bp, Homo sapien
gctcggtggcccttccggatagtag

SEQ ID NO: 5826955 - DNA, 25 bp, Homo sapien
ctactatccggaagggccaccgagc

SEQ ID NO: 5826956 - DNA, 25 bp, Homo sapien
tagactatggattctatagaaacgg

SEQ ID NO: 5826957 - DNA, 25 bp, Homo sapien
ccgtttctatagaatccatagtcta

SEQ ID NO: 5826958 - DNA, 25 bp, Homo sapien
gtcccctaatcctggggtgtcagag

SEQ ID NO: 5826959 - DNA, 25 bp, Homo sapien
tggcccaaagccaggatttctttac

SEQ ID NO: 5826960 - DNA, 25 bp, Homo sapien
aggatttctttacagccaatacaag

SEQ ID NO: 5826961 - DNA, 25 bp, Homo sapien
acttcaacgatcctgcttcacaagg

SEQ ID NO: 5826962 - DNA, 25 bp, Homo sapien
cagccaatacaagtggcatttcccg

SEQ ID NO: 5826963 - DNA, 25 bp, Homo sapien
ggcccaaagccaggatttctttaca

SEQ ID NO: 5826964 - DNA, 25 bp, Homo sapien
tgctgtgtcccctaatcctggggtg

SEQ ID NO: 5826965 - DNA, 25 bp, Homo sapien
tggctgatgccctagccactgctgt

SEQ ID NO: 5826966 - DNA, 25 bp, Homo sapien
ctgcttcacaaggaaggatgagtgg

SEQ ID NO: 5826967 - DNA, 25 bp, Homo sapien
catttcccgctcagttctgtggctg

SEQ ID NO: 5826968 - DNA, 25 bp, Homo sapien
acacgcagcagagtgctggggaatc

SEQ ID NO: 5826969 - DNA, 25 bp, Homo sapien
agaattgagtggagttacacgcagc

SEQ ID NO: 5826970 - DNA, 25 bp, Homo sapien
tgagtggagttacacgcagcagagt

SEQ ID NO: 5826971 - DNA, 25 bp, Homo sapien
gtgcctggcccaaagccaggatttc

SEQ ID NO: 5826972 - DNA, 25 bp, Homo sapien
ggctgatgccctagccactgctgtg

SEQ ID NO: 5826973 - DNA, 25 bp, Homo sapien
gtgtcagagggatcctaagttttcc

SEQ ID NO: 5826974 - DNA, 25 bp, Homo sapien
gtgatttcagaacagaccctgaaaa

SEQ ID NO: 5826975 - DNA, 25 bp, Homo sapien
cacagctacaaagtaatgagatgtc

SEQ ID NO: 5826976 - DNA, 25 bp, Homo sapien
aagtaatgagatgtcccacatgaat

SEQ ID NO: 5826977 - DNA, 25 bp, Homo sapien
caaggggtgatttcagaacagaccc

SEQ ID NO: 5826978 - DNA, 25 bp, Homo sapien
cttctacacttgtattttggttaga

SEQ ID NO: 5826979 - DNA, 25 bp, Homo sapien
agtcgacacacatcttgccctgcat

SEQ ID NO: 5826980 - DNA, 25 bp, Homo sapien
tcccccaagagctgtttcacttaag

SEQ ID NO: 5826981 - DNA, 25 bp, Homo sapien
agtaatgagatgtcccacatgaata

SEQ ID NO: 5826982 - DNA, 25 bp, Homo sapien
aggggtgatttcagaacagaccctg

SEQ ID NO: 5826983 - DNA, 25 bp, Homo sapien
caaacaagggagaaaccacaccatc

SEQ ID NO: 5826984 - DNA, 25 bp, Homo sapien
gatttcagaacagaccctgaaaata

SEQ ID NO: 5826985 - DNA, 25 bp, Homo sapien
cacttacctgaagaaataagtaagt

SEQ ID NO: 5826986 - DNA, 25 bp, Homo sapien
aacaagggagaaaccacaccatctt

SEQ ID NO: 5826987 - DNA, 25 bp, Homo sapien
ctacaaagtaatgagatgtcccaca

SEQ ID NO: 5826988 - DNA, 25 bp, Homo sapien
atgagatgtcccacatgaatacttt

SEQ ID NO: 5826989 - DNA, 25 bp, Homo sapien
ataaagccacagctacaaagtaatg

SEQ ID NO: 5826990 - DNA, 25 bp, Homo sapien
ttccccactgcagtggacacaaatc

SEQ ID NO: 5826991 - DNA, 25 bp, Homo sapien
tcattcctccaaagagcaccacagg

SEQ ID NO: 5826992 - DNA, 25 bp, Homo sapien
ttggatgctcccagggacagatgcc

SEQ ID NO: 5826993 - DNA, 25 bp, Homo sapien
attgtcttgctttctcagatatgat

SEQ ID NO: 5826994 - DNA, 25 bp, Homo sapien
cactcaagggtgtcaatatatacaa

SEQ ID NO: 5826995 - DNA, 25 bp, Homo sapien
agtcttagtcttttctgcttggatg

SEQ ID NO: 5826996 - DNA, 25 bp, Homo sapien
tcagtggcggccagtgatctgtcta

SEQ ID NO: 5826997 - DNA, 25 bp, Homo sapien
tgtcttgctttctcagatatgatct

SEQ ID NO: 5826998 - DNA, 25 bp, Homo sapien
gacacacttcagtggcggccagtga

SEQ ID NO: 5826999 - DNA, 25 bp, Homo sapien
aattcctgccttcaagggtcttcca

SEQ ID NO: 5827000 - DNA, 25 bp, Homo sapien
aacacaaccagcactcctctatggg

SEQ ID NO: 5827001 - DNA, 25 bp, Homo sapien
gatgcctgccaacaaccttatgtct

SEQ ID NO: 5827002 - DNA, 25 bp, Homo sapien
tcctctatgggcacagacacacaca

SEQ ID NO: 5827003 - DNA, 25 bp, Homo sapien
caaaagaagtcataacactcaaggg

SEQ ID NO: 5827004 - DNA, 25 bp, Homo sapien
gatctgtctacaagggagtcttagt

SEQ ID NO: 5827005 - DNA, 25 bp, Homo sapien
tctcagatatgatctctggcatgac

SEQ ID NO: 5827006 - DNA, 25 bp, Homo sapien
acccggttgatgaccctcgtgtact

SEQ ID NO: 5827007 - DNA, 25 bp, Homo sapien
agtacacgagggtcatcaaccgggt

SEQ ID NO: 5827008 - DNA, 25 bp, Homo sapien
gacaaccacggacccggctgaccgg

SEQ ID NO: 5827009 - DNA, 25 bp, Homo sapien
ccggtcagccgggtccgtggttgtc

SEQ ID NO: 5827010 - DNA, 25 bp, Homo sapien
atcgaagtcttcatagtttctctcc

SEQ ID NO: 5827011 - DNA, 25 bp, Homo sapien
ggagagaaactatgaagacttcgat

SEQ ID NO: 5827012 - DNA, 25 bp, Homo sapien
gtcttggtctaaaagtatcggtaaa

SEQ ID NO: 5827013 - DNA, 25 bp, Homo sapien
tttaccgatacttttagaccaagac

SEQ ID NO: 5827014 - DNA, 25 bp, Homo sapien
tttaaaacaattatgtcatacactt

SEQ ID NO: 5827015 - DNA, 25 bp, Homo sapien
aagtgtatgacataattgttttaaa

SEQ ID NO: 5827016 - DNA, 25 bp, Homo sapien
ctgtaagtatccgtctcaaccgggt

SEQ ID NO: 5827017 - DNA, 25 bp, Homo sapien
acccggttgagacggatacttacag

SEQ ID NO: 5827018 - DNA, 25 bp, Homo sapien
actgaagagtaattgacgatctttt

SEQ ID NO: 5827019 - DNA, 25 bp, Homo sapien
aaaagatcgtcaattactcttcagt

SEQ ID NO: 5827020 - DNA, 25 bp, Homo sapien
aaaagattactcgattttcgtatat

SEQ ID NO: 5827021 - DNA, 25 bp, Homo sapien
atatacgaaaatcgagtaatctttt

SEQ ID NO: 5827022 - DNA, 25 bp, Homo sapien
gctagtctacacgtttatgacggag

SEQ ID NO: 5827023 - DNA, 25 bp, Homo sapien
ctccgtcataaacgtgtagactagc

SEQ ID NO: 5827024 - DNA, 25 bp, Homo sapien
caactataccctttgtaaagattgt

SEQ ID NO: 5827025 - DNA, 25 bp, Homo sapien
acaatctttacaaagggtatagttg

SEQ ID NO: 5827026 - DNA, 25 bp, Homo sapien
ggaccgggacggagccagagacatg

SEQ ID NO: 5827027 - DNA, 25 bp, Homo sapien
catgtctctggctccgtcccggtcc

SEQ ID NO: 5827028 - DNA, 25 bp, Homo sapien
attatagccctagataaagattaat

SEQ ID NO: 5827029 - DNA, 25 bp, Homo sapien
attaatctttatctagggctataat

SEQ ID NO: 5827030 - DNA, 25 bp, Homo sapien
acccgactgtagcttctcgtccggg

SEQ ID NO: 5827031 - DNA, 25 bp, Homo sapien
cccggacgagaagctacagtcgggt

SEQ ID NO: 5827032 - DNA, 25 bp, Homo sapien
tcaaggtttcggttattatatttcc

SEQ ID NO: 5827033 - DNA, 25 bp, Homo sapien
ggaaatataataaccgaaaccttga

SEQ ID NO: 5827034 - DNA, 25 bp, Homo sapien
gacccataagagaggtcgtggtaaa

SEQ ID NO: 5827035 - DNA, 25 bp, Homo sapien
tttaccacgacctctcttatgggtc

SEQ ID NO: 5827036 - DNA, 25 bp, Homo sapien
agcacttttacctatagacatgaac

SEQ ID NO: 5827037 - DNA, 25 bp, Homo sapien
gttcatgtctataggtaaaagtgct

SEQ ID NO: 5827038 - DNA, 25 bp, Homo sapien
atgtaatttcctctaagcttcagac

SEQ ID NO: 5827039 - DNA, 25 bp, Homo sapien
gtctgaagcttagaggaaattacat

SEQ ID NO: 5827040 - DNA, 25 bp, Homo sapien
cttcggtatccaccactctattcaa

SEQ ID NO: 5827041 - DNA, 25 bp, Homo sapien
ttgaatagagtggtggataccgaag

SEQ ID NO: 5827042 - DNA, 25 bp, Homo sapien
cagggggacatcgaccaacgtgggt

SEQ ID NO: 5827043 - DNA, 25 bp, Homo sapien
acccacgttggtcgatgtccccctg

SEQ ID NO: 5827044 - DNA, 25 bp, Homo sapien
ggttttcgaggtagacatattagat

SEQ ID NO: 5827045 - DNA, 25 bp, Homo sapien
atctaatatgtctacctcgaaaacc

SEQ ID NO: 5827046 - DNA, 25 bp, Homo sapien
aggtccagtcgaccatgtacaaagt

SEQ ID NO: 5827047 - DNA, 25 bp, Homo sapien
actttgtacatggtcgactggacct

SEQ ID NO: 5827048 - DNA, 25 bp, Homo sapien
ccctcactcgcccggcgccgggccg

SEQ ID NO: 5827049 - DNA, 25 bp, Homo sapien
cggcccggcgccgggcgagtgaggg

SEQ ID NO: 5827050 - DNA, 25 bp, Homo sapien
gcccctcactcgcccggcgccgggc

SEQ ID NO: 5827051 - DNA, 25 bp, Homo sapien
gcccggcgccgggcgagtgaggggc

SEQ ID NO: 5827052 - DNA, 25 bp, Homo sapien
ccgcccctcactcgcccggcgccgg

SEQ ID NO: 5827053 - DNA, 25 bp, Homo sapien
ccggcgccgggcgagtgaggggcgg

SEQ ID NO: 5827054 - DNA, 25 bp, Homo sapien
ggcgtcccgcccctcactcgcccgg

SEQ ID NO: 5827055 - DNA, 25 bp, Homo sapien
ccgggcgagtgaggggcgggacgcc

SEQ ID NO: 5827056 - DNA, 25 bp, Homo sapien
aggagcactaaaaacgacaactgat

SEQ ID NO: 5827057 - DNA, 25 bp, Homo sapien
gcctaaaggagcactaaaaacgaca

SEQ ID NO: 5827058 - DNA, 25 bp, Homo sapien
aaagttacaaaacatcatgggttct

SEQ ID NO: 5827059 - DNA, 25 bp, Homo sapien
aaacatcatgggttctttatacaag

SEQ ID NO: 5827060 - DNA, 25 bp, Homo sapien
gaaagttacaaaacatcatgggttc

SEQ ID NO: 5827061 - DNA, 25 bp, Homo sapien
gcatgaagcatggatcaccggggcc

SEQ ID NO: 5827062 - DNA, 25 bp, Homo sapien
agtgttagggaattcctctgcttga

SEQ ID NO: 5827063 - DNA, 25 bp, Homo sapien
aaatttaggcatataaaacagcctg

SEQ ID NO: 5827064 - DNA, 25 bp, Homo sapien
gacaactgatctccaaagtaaactg

SEQ ID NO: 5827065 - DNA, 25 bp, Homo sapien
taaactgaggcacacactgaggggt

SEQ ID NO: 5827066 - DNA, 25 bp, Homo sapien
ggcatataaaacagcctgaatatta

SEQ ID NO: 5827067 - DNA, 25 bp, Homo sapien
actgttttagtaagcctaaaggagc

SEQ ID NO: 5827068 - DNA, 25 bp, Homo sapien
gagcactaaaaacgacaactgatct

SEQ ID NO: 5827069 - DNA, 25 bp, Homo sapien
gttacaaaacatcatgggttcttta

SEQ ID NO: 5827070 - DNA, 25 bp, Homo sapien
tagggaattcctctgcttgaatact

SEQ ID NO: 5827071 - DNA, 25 bp, Homo sapien
acatcatgggttctttatacaagat

SEQ ID NO: 5827072 - DNA, 25 bp, Homo sapien
gtacatcaacacagtatcttatttt

SEQ ID NO: 5827073 - DNA, 25 bp, Homo sapien
aaaataagatactgtgttgatgtac

SEQ ID NO: 5827074 - DNA, 25 bp, Homo sapien
ggagtcacaaaagttccagacaaac

SEQ ID NO: 5827075 - DNA, 25 bp, Homo sapien
gtttgtctggaacttttgtgactcc

SEQ ID NO: 5827076 - DNA, 25 bp, Homo sapien
tggagtatttagaggactctgtccc

SEQ ID NO: 5827077 - DNA, 25 bp, Homo sapien
cccctgcaagtattgccgttggata

SEQ ID NO: 5827078 - DNA, 25 bp, Homo sapien
gccagggctggattgcagttccctg

SEQ ID NO: 5827079 - DNA, 25 bp, Homo sapien
aggggcctctgaagcacagacaggc

SEQ ID NO: 5827080 - DNA, 25 bp, Homo sapien
cgttggatatgaaacacacagagca

SEQ ID NO: 5827081 - DNA, 25 bp, Homo sapien
acaggctggatgctggacaaagttt

SEQ ID NO: 5827082 - DNA, 25 bp, Homo sapien
ctaaggtgacaagtggacagacgcc

SEQ ID NO: 5827083 - DNA, 25 bp, Homo sapien
aaggtgacaagtggacagacgcccc

SEQ ID NO: 5827084 - DNA, 25 bp, Homo sapien
gaacaggctggatgctggacaaagt

SEQ ID NO: 5827085 - DNA, 25 bp, Homo sapien
aacacacagagcaaaaccccaaggt

SEQ ID NO: 5827086 - DNA, 25 bp, Homo sapien
ttggagtatttagaggactctgtcc

SEQ ID NO: 5827087 - DNA, 25 bp, Homo sapien
caggcccagggtcctccacttgggg

SEQ ID NO: 5827088 - DNA, 25 bp, Homo sapien
cggccagggctggattgcagttccc

SEQ ID NO: 5827089 - DNA, 25 bp, Homo sapien
gaaaacctaaggtgacaagtggaca

SEQ ID NO: 5827090 - DNA, 25 bp, Homo sapien
cagttaccccacagccagggactgg

SEQ ID NO: 5827091 - DNA, 25 bp, Homo sapien
caggctggatgctggacaaagtttg

SEQ ID NO: 5827092 - DNA, 25 bp, Homo sapien
tcgactacaaaagtatgaaccttgg

SEQ ID NO: 5827093 - DNA, 25 bp, Homo sapien
ccaaggttcatacttttgtagtcga

SEQ ID NO: 5827094 - DNA, 25 bp, Homo sapien
ttttagataacaatccaatctttct

SEQ ID NO: 5827095 - DNA, 25 bp, Homo sapien
agaaagattggattgttatctaaaa

SEQ ID NO: 5827096 - DNA, 25 bp, Homo sapien
gcaccctaggcgagaaggaaccggg

SEQ ID NO: 5827097 - DNA, 25 bp, Homo sapien
cccggttccttctcgcctagggtgc

SEQ ID NO: 5827098 - DNA, 25 bp, Homo sapien
aaagagggaactgtcgattaagacc

SEQ ID NO: 5827099 - DNA, 25 bp, Homo sapien
ggtcttaatcgacagttccctcttt

SEQ ID NO: 5827100 - DNA, 25 bp, Homo sapien
aaagaggttttgtgaaagagaggta

SEQ ID NO: 5827101 - DNA, 25 bp, Homo sapien
tacctctctttcacaaaacctcttt

SEQ ID NO: 5827102 - DNA, 25 bp, Homo sapien
agtcaccatttctcttcacacatag

SEQ ID NO: 5827103 - DNA, 25 bp, Homo sapien
ctatgtgtgaagagaaatggtgact

SEQ ID NO: 5827104 - DNA, 25 bp, Homo sapien
ggagaaagtagtgttagagtataaa

SEQ ID NO: 5827105 - DNA, 25 bp, Homo sapien
tttatactctaacactactttctcc

SEQ ID NO: 5827106 - DNA, 25 bp, Homo sapien
taaatatgttgtcattcgtttataa

SEQ ID NO: 5827107 - DNA, 25 bp, Homo sapien
ttataaacgaatgacaacatattta

SEQ ID NO: 5827108 - DNA, 25 bp, Homo sapien
cgcaacggcagctgttgcaccctat

SEQ ID NO: 5827109 - DNA, 25 bp, Homo sapien
atagggtgcaacagctgccgttgcg

SEQ ID NO: 5827110 - DNA, 25 bp, Homo sapien
tcgaagcacactttaccgacgaaag

SEQ ID NO: 5827111 - DNA, 25 bp, Homo sapien
ctttcgtcggtaaagtgtgcttcga

SEQ ID NO: 5827112 - DNA, 25 bp, Homo sapien
cgaggtctgtagttcctccaggtgt

SEQ ID NO: 5827113 - DNA, 25 bp, Homo sapien
acacctggaggaactacagacctcg

SEQ ID NO: 5827114 - DNA, 25 bp, Homo sapien
agaggaaaataggacggaagaacag

SEQ ID NO: 5827115 - DNA, 25 bp, Homo sapien
ctgttcttccgtcctattttcctct

SEQ ID NO: 5827116 - DNA, 25 bp, Homo sapien
aaagtcctatacgaatcgtacgtcg

SEQ ID NO: 5827117 - DNA, 25 bp, Homo sapien
cgacgtacgattcgtataggacttt

SEQ ID NO: 5827118 - DNA, 25 bp, Homo sapien
aactctactactgtagtggaaatag

SEQ ID NO: 5827119 - DNA, 25 bp, Homo sapien
ctatttccactacagtagtagagtt

SEQ ID NO: 5827120 - DNA, 25 bp, Homo sapien
tagttcgtaggttccaagggctcaa

SEQ ID NO: 5827121 - DNA, 25 bp, Homo sapien
ttgagcccttggaacctacgaacta

SEQ ID NO: 5827122 - DNA, 25 bp, Homo sapien
gggaacacttcctgtctgcaacagt

SEQ ID NO: 5827123 - DNA, 25 bp, Homo sapien
actgttgcagacaggaagtgttccc

SEQ ID NO: 5827124 - DNA, 25 bp, Homo sapien
tcggactcgccggagagattggcgt

SEQ ID NO: 5827125 - DNA, 25 bp, Homo sapien
acgccaatctctccggcgagtccga

SEQ ID NO: 5827126 - DNA, 25 bp, Homo sapien
ccggttcaacaccaggtgagagtag

SEQ ID NO: 5827127 - DNA, 25 bp, Homo sapien
ctactctcacctggtgttgaaccgg

SEQ ID NO: 5827128 - DNA, 25 bp, Homo sapien
atgtttaagtatactgagtcttaaa

SEQ ID NO: 5827129 - DNA, 25 bp, Homo sapien
tttaagactcagtatacttaaacat

SEQ ID NO: 5827130 - DNA, 25 bp, Homo sapien
cagtttttatggactatataattta

SEQ ID NO: 5827131 - DNA, 25 bp, Homo sapien
taaattatatagtccataaaaactg

SEQ ID NO: 5827132 - DNA, 25 bp, Homo sapien
agtttttatggactatataatttag

SEQ ID NO: 5827133 - DNA, 25 bp, Homo sapien
ctaaattatatagtccataaaaact

SEQ ID NO: 5827134 - DNA, 25 bp, Homo sapien
tatcaaactaacaaattatactggg

SEQ ID NO: 5827135 - DNA, 25 bp, Homo sapien
cccagtataatttgttagtttgata

SEQ ID NO: 5827136 - DNA, 25 bp, Homo sapien
ttcgggttgtcactacacaaaaggg

SEQ ID NO: 5827137 - DNA, 25 bp, Homo sapien
cccttttgtgtagtgacaacccgaa

SEQ ID NO: 5827138 - DNA, 25 bp, Homo sapien
ccgagacgactccacgtcgccggag

SEQ ID NO: 5827139 - DNA, 25 bp, Homo sapien
ctccggcgacgtggagtcgtctcgg

SEQ ID NO: 5827140 - DNA, 25 bp, Homo sapien
gaagaagactctgtgaagtatttga

SEQ ID NO: 5827141 - DNA, 25 bp, Homo sapien
tcaaatacttcacagagtcttcttc

SEQ ID NO: 5827142 - DNA, 25 bp, Homo sapien
aaccaggtatgtaaacattaggaat

SEQ ID NO: 5827143 - DNA, 25 bp, Homo sapien
attcctaatgtttacatacctggtt

SEQ ID NO: 5827144 - DNA, 25 bp, Homo sapien
gtcgcacagccggtcccacagaaag

SEQ ID NO: 5827145 - DNA, 25 bp, Homo sapien
ctttctgtgggaccggctgtgcgac

SEQ ID NO: 5827146 - DNA, 25 bp, Homo sapien
gacagggtccacataggtcttcacc

SEQ ID NO: 5827147 - DNA, 25 bp, Homo sapien
ggtgaagacctatgtggaccctgtc

SEQ ID NO: 5827148 - DNA, 25 bp, Homo sapien
acggacaccgtagggcaagatacgc

SEQ ID NO: 5827149 - DNA, 25 bp, Homo sapien
gcgtatcttgccctacggtgtccgt

SEQ ID NO: 5827150 - DNA, 25 bp, Homo sapien
tgtattctcggaggtagaagaaaga

SEQ ID NO: 5827151 - DNA, 25 bp, Homo sapien
tctttcttctacctccgagaataca

SEQ ID NO: 5827152 - DNA, 25 bp, Homo sapien
cgacccggagcggtcggtcctctct

SEQ ID NO: 5827153 - DNA, 25 bp, Homo sapien
agagaggaccgaccgctccgggtcg

SEQ ID NO: 5827154 - DNA, 25 bp, Homo sapien
ccggttccggcgcaaggagcgggcg

SEQ ID NO: 5827155 - DNA, 25 bp, Homo sapien
cgcccgctccttgcgccggaaccgg

SEQ ID NO: 5827156 - DNA, 25 bp, Homo sapien
aatccactctattctgctcggtaag

SEQ ID NO: 5827157 - DNA, 25 bp, Homo sapien
cttaccgagcagaatagagtggatt

SEQ ID NO: 5827158 - DNA, 25 bp, Homo sapien
tgagacgtcccgacgcggttccgga

SEQ ID NO: 5827159 - DNA, 25 bp, Homo sapien
tccggaaccgcgtcgggacgtctca

SEQ ID NO: 5827160 - DNA, 25 bp, Homo sapien
cccgtcggagcctctccttcgacgg

SEQ ID NO: 5827161 - DNA, 25 bp, Homo sapien
ccgtcgaaggagaggctccgacggg

SEQ ID NO: 5827162 - DNA, 25 bp, Homo sapien
gtgccggggcacgagccgacggcgg

SEQ ID NO: 5827163 - DNA, 25 bp, Homo sapien
ccgccgtcggctcgtgccccggcac

SEQ ID NO: 5827164 - DNA, 25 bp, Homo sapien
cgtgccggggcacgagccgacggcg

SEQ ID NO: 5827165 - DNA, 25 bp, Homo sapien
cgccgtcggctcgtgccccggcacg

SEQ ID NO: 5827166 - DNA, 25 bp, Homo sapien
ggacgctgaggaccgtgccggggca

SEQ ID NO: 5827167 - DNA, 25 bp, Homo sapien
tgccccggcacggtcctcagcgtcc

SEQ ID NO: 5827168 - DNA, 25 bp, Homo sapien
tacactgggacccactagcgaccgt

SEQ ID NO: 5827169 - DNA, 25 bp, Homo sapien
acggtcgctagtgggtcccagtgta

SEQ ID NO: 5827170 - DNA, 25 bp, Homo sapien
tccgtcgtggagatctaccacaaag

SEQ ID NO: 5827171 - DNA, 25 bp, Homo sapien
ctttgtggtagatctccacgacgga

SEQ ID NO: 5827172 - DNA, 25 bp, Homo sapien
gcgggcgtgcgtccgcccgggctcg

SEQ ID NO: 5827173 - DNA, 25 bp, Homo sapien
cgagcccgggcggacgcacgcccgc

SEQ ID NO: 5827174 - DNA, 25 bp, Homo sapien
cgcgggcgtgcgtccgcccgggctc

SEQ ID NO: 5827175 - DNA, 25 bp, Homo sapien
gagcccgggcggacgcacgcccgcg

SEQ ID NO: 5827176 - DNA, 25 bp, Homo sapien
acgcgggcgtgcgtccgcccgggct

SEQ ID NO: 5827177 - DNA, 25 bp, Homo sapien
agcccgggcggacgcacgcccgcgt

SEQ ID NO: 5827178 - DNA, 25 bp, Homo sapien
gacgcgggcgtgcgtccgcccgggc

SEQ ID NO: 5827179 - DNA, 25 bp, Homo sapien
gcccgggcggacgcacgcccgcgtc

SEQ ID NO: 5827180 - DNA, 25 bp, Homo sapien
tcctcagggacaggacaggaattca

SEQ ID NO: 5827181 - DNA, 25 bp, Homo sapien
gcattactccaactcctagggaaat

SEQ ID NO: 5827182 - DNA, 25 bp, Homo sapien
aatttgtgagcctgcttgggatcca

SEQ ID NO: 5827183 - DNA, 25 bp, Homo sapien
agtaattgtcaacattccatggtga

SEQ ID NO: 5827184 - DNA, 25 bp, Homo sapien
gtatgaccatctgattcctcaggga

SEQ ID NO: 5827185 - DNA, 25 bp, Homo sapien
ctacacattggaaatgagtaaactg

SEQ ID NO: 5827186 - DNA, 25 bp, Homo sapien
tgtcaacattccatggtgactctcc

SEQ ID NO: 5827187 - DNA, 25 bp, Homo sapien
catctacacattggaaatgagtaaa

SEQ ID NO: 5827188 - DNA, 25 bp, Homo sapien
agtaccttccttctgggattttcaa

SEQ ID NO: 5827189 - DNA, 25 bp, Homo sapien
ttactcagaaggtcttcaattctag

SEQ ID NO: 5827190 - DNA, 25 bp, Homo sapien
ggacaggaattcagcaagggagctt

SEQ ID NO: 5827191 - DNA, 25 bp, Homo sapien
tattcatctacacattggaaatgag

SEQ ID NO: 5827192 - DNA, 25 bp, Homo sapien
attcatctacacattggaaatgagt

SEQ ID NO: 5827193 - DNA, 25 bp, Homo sapien
ctccccaaaaatctagtggtaggaa

SEQ ID NO: 5827194 - DNA, 25 bp, Homo sapien
ctagcattactccaactcctaggga

SEQ ID NO: 5827195 - DNA, 25 bp, Homo sapien
tgtgagcctgcttgggatccattac

SEQ ID NO: 5827196 - DNA, 25 bp, Homo sapien
aattacaagtacttatacaaagaaa

SEQ ID NO: 5827197 - DNA, 25 bp, Homo sapien
tttctttgtataagtacttgtaatt

SEQ ID NO: 5827198 - DNA, 25 bp, Homo sapien
tcctaacaccccactatcctagagt

SEQ ID NO: 5827199 - DNA, 25 bp, Homo sapien
actctaggatagtggggtgttagga

SEQ ID NO: 5827200 - DNA, 25 bp, Homo sapien
ctttatcccctcattagttacacgt

SEQ ID NO: 5827201 - DNA, 25 bp, Homo sapien
acgtgtaactaatgaggggataaag

SEQ ID NO: 5827202 - DNA, 25 bp, Homo sapien
ctgacaagtcactgtgttggtctct

SEQ ID NO: 5827203 - DNA, 25 bp, Homo sapien
agagaccaacacagtgacttgtcag

SEQ ID NO: 5827204 - DNA, 25 bp, Homo sapien
cttctgttcaacctgtaataactat

SEQ ID NO: 5827205 - DNA, 25 bp, Homo sapien
atagttattacaggttgaacagaag

SEQ ID NO: 5827206 - DNA, 25 bp, Homo sapien
gtcgtcacgtcagggaggccgtgcg

SEQ ID NO: 5827207 - DNA, 25 bp, Homo sapien
cgcacggcctccctgacgtgacgac

SEQ ID NO: 5827208 - DNA, 25 bp, Homo sapien
cgtcgactgaggtgatgtaattaag

SEQ ID NO: 5827209 - DNA, 25 bp, Homo sapien
cttaattacatcacctcagtcgacg

SEQ ID NO: 5827210 - DNA, 25 bp, Homo sapien
gggactgaccaagcctcgtacattc

SEQ ID NO: 5827211 - DNA, 25 bp, Homo sapien
gaatgtacgaggcttggtcagtccc

SEQ ID NO: 5827212 - DNA, 25 bp, Homo sapien
gtctcaagtccaagtgagggagtta

SEQ ID NO: 5827213 - DNA, 25 bp, Homo sapien
catacggggaagtttccagaaagca

SEQ ID NO: 5827214 - DNA, 25 bp, Homo sapien
gtgaagggtctcaagtccaagtgag

SEQ ID NO: 5827215 - DNA, 25 bp, Homo sapien
ggttgtgaagggtctcaagtccaag

SEQ ID NO: 5827216 - DNA, 25 bp, Homo sapien
tgaagggtctcaagtccaagtgagg

SEQ ID NO: 5827217 - DNA, 25 bp, Homo sapien
ggtctcaagtccaagtgagggagtt

SEQ ID NO: 5827218 - DNA, 25 bp, Homo sapien
gtcatccaagtggtgacctgggatg

SEQ ID NO: 5827219 - DNA, 25 bp, Homo sapien
ttgtgaagggtctcaagtccaagtg

SEQ ID NO: 5827220 - DNA, 25 bp, Homo sapien
ggaagtttccagaaagcatgatgtc

SEQ ID NO: 5827221 - DNA, 25 bp, Homo sapien
tgtgaagggtctcaagtccaagtga

SEQ ID NO: 5827222 - DNA, 25 bp, Homo sapien
ggtcatccaagtggtgacctgggat

SEQ ID NO: 5827223 - DNA, 25 bp, Homo sapien
cggggaagtttccagaaagcatgat

SEQ ID NO: 5827224 - DNA, 25 bp, Homo sapien
gaagtttccagaaagcatgatgtca

SEQ ID NO: 5827225 - DNA, 25 bp, Homo sapien
aagggtctcaagtccaagtgaggga

SEQ ID NO: 5827226 - DNA, 25 bp, Homo sapien
acggggaagtttccagaaagcatga

SEQ ID NO: 5827227 - DNA, 25 bp, Homo sapien
gttgtgaagggtctcaagtccaagt

SEQ ID NO: 5827228 - DNA, 25 bp, Homo sapien
atcatcccctaacgtacctattgtg

SEQ ID NO: 5827229 - DNA, 25 bp, Homo sapien
cacaataggtacgttaggggatgat

SEQ ID NO: 5827230 - DNA, 25 bp, Homo sapien
agtctgaacgatgatccctctaagg

SEQ ID NO: 5827231 - DNA, 25 bp, Homo sapien
ccttagagggatcatcgttcagact

SEQ ID NO: 5827232 - DNA, 25 bp, Homo sapien
gaggaagcaacaggtcttactagat

SEQ ID NO: 5827233 - DNA, 25 bp, Homo sapien
atctagtaagacctgttgcttcctc

SEQ ID NO: 5827234 - DNA, 25 bp, Homo sapien
ggttgaaatcgaagaaggccctggt

SEQ ID NO: 5827235 - DNA, 25 bp, Homo sapien
accagggccttcttcgatttcaacc

SEQ ID NO: 5827236 - DNA, 25 bp, Homo sapien
gtttgcatttattgctttaggaacc

SEQ ID NO: 5827237 - DNA, 25 bp, Homo sapien
aacacagagctagaatttgtttagc

SEQ ID NO: 5827238 - DNA, 25 bp, Homo sapien
agcccgacttggaaacacaggtggg

SEQ ID NO: 5827239 - DNA, 25 bp, Homo sapien
gtctccagcccgacttggaaacaca

SEQ ID NO: 5827240 - DNA, 25 bp, Homo sapien
gctaagatggaaattgctaggcagc

SEQ ID NO: 5827241 - DNA, 25 bp, Homo sapien
acacacaatagaatcaagtgaaggg

SEQ ID NO: 5827242 - DNA, 25 bp, Homo sapien
ttgcaccgggcctgcctgcctgtga

SEQ ID NO: 5827243 - DNA, 25 bp, Homo sapien
caagtgaagggaaagctactgtaac

SEQ ID NO: 5827244 - DNA, 25 bp, Homo sapien
ggaaagctactgtaacagcttagat

SEQ ID NO: 5827245 - DNA, 25 bp, Homo sapien
cagcagagctgttggcttgtttgca

SEQ ID NO: 5827246 - DNA, 25 bp, Homo sapien
gtgaagggaaagctactgtaacagc

SEQ ID NO: 5827247 - DNA, 25 bp, Homo sapien
gctactgtaacagcttagatacttt

SEQ ID NO: 5827248 - DNA, 25 bp, Homo sapien
agagtccactcttgcaccgggcctg

SEQ ID NO: 5827249 - DNA, 25 bp, Homo sapien
cacagagctagaatttgtttagcac

SEQ ID NO: 5827250 - DNA, 25 bp, Homo sapien
ctctttatttacaaaatgcggtgaa

SEQ ID NO: 5827251 - DNA, 25 bp, Homo sapien
gcctggccacggagtaaactgggat

SEQ ID NO: 5827252 - DNA, 25 bp, Homo sapien
ctcgggctctactgtacccatcggt

SEQ ID NO: 5827253 - DNA, 25 bp, Homo sapien
accgatgggtacagtagagcccgag

SEQ ID NO: 5827254 - DNA, 25 bp, Homo sapien
ccccactgcagaggacacagagagg

SEQ ID NO: 5827255 - DNA, 25 bp, Homo sapien
aattgcctgctcaccagactgtgag

SEQ ID NO: 5827256 - DNA, 25 bp, Homo sapien
gctcaccagactgtgagaaaataat

SEQ ID NO: 5827257 - DNA, 25 bp, Homo sapien
aaaacagacttcatgaaagaagggc

SEQ ID NO: 5827258 - DNA, 25 bp, Homo sapien
aatattcgggggaaccagcacttaa

SEQ ID NO: 5827259 - DNA, 25 bp, Homo sapien
gcagttacacccagcagaggggcac

SEQ ID NO: 5827260 - DNA, 25 bp, Homo sapien
cagttacacccagcagaggggcaca

SEQ ID NO: 5827261 - DNA, 25 bp, Homo sapien
attaattgcctgctcaccagactgt

SEQ ID NO: 5827262 - DNA, 25 bp, Homo sapien
atattcgggggaaccagcacttaaa

SEQ ID NO: 5827263 - DNA, 25 bp, Homo sapien
aattaattgcctgctcaccagactg

SEQ ID NO: 5827264 - DNA, 25 bp, Homo sapien
cctggttccccctggttccaaatga

SEQ ID NO: 5827265 - DNA, 25 bp, Homo sapien
cagcagaggggcacaggcttaaacg

SEQ ID NO: 5827266 - DNA, 25 bp, Homo sapien
cagcaaggcgtggatgctgcgcccc

SEQ ID NO: 5827267 - DNA, 25 bp, Homo sapien
actgcagaggacacagagaggccag

SEQ ID NO: 5827268 - DNA, 25 bp, Homo sapien
acagtccccggcagcagcttgtgtt

SEQ ID NO: 5827269 - DNA, 25 bp, Homo sapien
ccaggaatggtcacagctgaaaaaa

SEQ ID NO: 5827270 - DNA, 25 bp, Homo sapien
tatataaacgggaatttttgacacc

SEQ ID NO: 5827271 - DNA, 25 bp, Homo sapien
ggtgtcaaaaattcccgtttatata

SEQ ID NO: 5827272 - DNA, 25 bp, Homo sapien
aacgaacacaaagaatcttaaggaa

SEQ ID NO: 5827273 - DNA, 25 bp, Homo sapien
ttccttaagattctttgtgttcgtt

SEQ ID NO: 5827274 - DNA, 25 bp, Homo sapien
gaagataaagcatacagtaatcttt

SEQ ID NO: 5827275 - DNA, 25 bp, Homo sapien
aaagattactgtatgctttatcttc

SEQ ID NO: 5827276 - DNA, 25 bp, Homo sapien
gacgaagataaagcatacagtaatc

SEQ ID NO: 5827277 - DNA, 25 bp, Homo sapien
gattactgtatgctttatcttcgtc

SEQ ID NO: 5827278 - DNA, 25 bp, Homo sapien
gttatatctaataaatttgtcggtg

SEQ ID NO: 5827279 - DNA, 25 bp, Homo sapien
caccgacaaatttattagatataac

SEQ ID NO: 5827280 - DNA, 25 bp, Homo sapien
gcgggacctgcgacccggtctgacg

SEQ ID NO: 5827281 - DNA, 25 bp, Homo sapien
cgtcagaccgggtcgcaggtcccgc

SEQ ID NO: 5827282 - DNA, 25 bp, Homo sapien
ccgacgacataagcaacgaaggaaa

SEQ ID NO: 5827283 - DNA, 25 bp, Homo sapien
tttccttcgttgcttatgtcgtcgg

SEQ ID NO: 5827284 - DNA, 25 bp, Homo sapien
gaccgtttggactacttcttatcac

SEQ ID NO: 5827285 - DNA, 25 bp, Homo sapien
gtgataagaagtagtccaaacggtc

SEQ ID NO: 5827286 - DNA, 25 bp, Homo sapien
ctggtcgagaacacgatttataagt

SEQ ID NO: 5827287 - DNA, 25 bp, Homo sapien
acttataaatcgtgttctcgaccag

SEQ ID NO: 5827288 - DNA, 25 bp, Homo sapien
acaattaacgagatttatctttaac

SEQ ID NO: 5827289 - DNA, 25 bp, Homo sapien
gttaaagataaatctcgttaattgt

SEQ ID NO: 5827290 - DNA, 25 bp, Homo sapien
gtaaatcctctaatttgttacccat

SEQ ID NO: 5827291 - DNA, 25 bp, Homo sapien
atgggtaacaaattagaggatttac

SEQ ID NO: 5827292 - DNA, 25 bp, Homo sapien
cggacgtggccctggccaacgacgt

SEQ ID NO: 5827293 - DNA, 25 bp, Homo sapien
acgtcgttggccagggccacgtccg

SEQ ID NO: 5827294 - DNA, 25 bp, Homo sapien
acctttctttactagtgagaaagac

SEQ ID NO: 5827295 - DNA, 25 bp, Homo sapien
gtctttctcactagtaaagaaaggt

SEQ ID NO: 5827296 - DNA, 25 bp, Homo sapien
aggagcgaccacagggtcctagggt

SEQ ID NO: 5827297 - DNA, 25 bp, Homo sapien
accctaggaccctgtggtcgctcct

SEQ ID NO: 5827298 - DNA, 25 bp, Homo sapien
tccagatctgtcgaagagagggacg

SEQ ID NO: 5827299 - DNA, 25 bp, Homo sapien
cgtccctctcttcgacagatctgga

SEQ ID NO: 5827300 - DNA, 25 bp, Homo sapien
acgacatctacgaacgacaccggag

SEQ ID NO: 5827301 - DNA, 25 bp, Homo sapien
ctccggtgtcgttcgtagatgtcgt

SEQ ID NO: 5827302 - DNA, 25 bp, Homo sapien
gtggtcgttaggtcgtccctgctcc

SEQ ID NO: 5827303 - DNA, 25 bp, Homo sapien
ggagcagggacgacctaacgaccac

SEQ ID NO: 5827304 - DNA, 25 bp, Homo sapien
tttgaccgtgcaaatcgagacaggg

SEQ ID NO: 5827305 - DNA, 25 bp, Homo sapien
ccctgtctcgatttgcacggtcaaa

SEQ ID NO: 5827306 - DNA, 25 bp, Homo sapien
atccggcctcctcgagtgtcaaact

SEQ ID NO: 5827307 - DNA, 25 bp, Homo sapien
agtttgacactcgaggaggccggat

SEQ ID NO: 5827308 - DNA, 25 bp, Homo sapien
gtggtcgcccctctccagtcgggtg

SEQ ID NO: 5827309 - DNA, 25 bp, Homo sapien
cacccgactggagaggggcgaccac

SEQ ID NO: 5827310 - DNA, 25 bp, Homo sapien
caggaccgtaaggaaacagcaaaag

SEQ ID NO: 5827311 - DNA, 25 bp, Homo sapien
cttttgctgtttccttacggtcctg

SEQ ID NO: 5827312 - DNA, 25 bp, Homo sapien
cgggtgtaaccaaccgagggcgtca

SEQ ID NO: 5827313 - DNA, 25 bp, Homo sapien
tgacgccctcggttggttacacccg

SEQ ID NO: 5827314 - DNA, 25 bp, Homo sapien
attaaagccatgaataacagaatat

SEQ ID NO: 5827315 - DNA, 25 bp, Homo sapien
atattctgttattcatggctttaat

SEQ ID NO: 5827316 - DNA, 25 bp, Homo sapien
ggaactggtgtgaaattaaagccat

SEQ ID NO: 5827317 - DNA, 25 bp, Homo sapien
atggctttaatttcacaccagttcc

SEQ ID NO: 5827318 - DNA, 25 bp, Homo sapien
gtgcgggcagaactgccgcgggtgc

SEQ ID NO: 5827319 - DNA, 25 bp, Homo sapien
gcacccgcggcagttctgcccgcac

SEQ ID NO: 5827320 - DNA, 25 bp, Homo sapien
tcccacgaagcctcgggcgggaaag

SEQ ID NO: 5827321 - DNA, 25 bp, Homo sapien
ctttcccgcccgaggcttcgtggga

SEQ ID NO: 5827322 - DNA, 25 bp, Homo sapien
cacaggtcagctggtctttccgaat

SEQ ID NO: 5827323 - DNA, 25 bp, Homo sapien
attcggaaagaccagctgacctgtg

SEQ ID NO: 5827324 - DNA, 25 bp, Homo sapien
gccactggcgggtggtcgcgtcccg

SEQ ID NO: 5827325 - DNA, 25 bp, Homo sapien
cgggacgcgaccacccgccagtggc

SEQ ID NO: 5827326 - DNA, 25 bp, Homo sapien
gtgccactggcgggtggtcgcgtcc

SEQ ID NO: 5827327 - DNA, 25 bp, Homo sapien
ggacgcgaccacccgccagtggcac

SEQ ID NO: 5827328 - DNA, 25 bp, Homo sapien
ccgggtgccactggcgggtggtcgc

SEQ ID NO: 5827329 - DNA, 25 bp, Homo sapien
gcgaccacccgccagtggcacccgg

SEQ ID NO: 5827330 - DNA, 25 bp, Homo sapien
gaaagagagaattagacccccgcat

SEQ ID NO: 5827331 - DNA, 25 bp, Homo sapien
atgcgggggtctaattctctctttc

SEQ ID NO: 5827332 - DNA, 25 bp, Homo sapien
tccgacgggagcgtacatgtgaacg

SEQ ID NO: 5827333 - DNA, 25 bp, Homo sapien
cgttcacatgtacgctcccgtcgga

SEQ ID NO: 5827334 - DNA, 25 bp, Homo sapien
gtctgttacaggagccgtcccacca

SEQ ID NO: 5827335 - DNA, 25 bp, Homo sapien
tggtgggacggctcctgtaacagac

SEQ ID NO: 5827336 - DNA, 25 bp, Homo sapien
aggacgaccggaaaatcgacctcca

SEQ ID NO: 5827337 - DNA, 25 bp, Homo sapien
tggaggtcgattttccggtcgtcct

SEQ ID NO: 5827338 - DNA, 25 bp, Homo sapien
cagagagtaaagatagcaacacacg

SEQ ID NO: 5827339 - DNA, 25 bp, Homo sapien
cgtgtgttgctatctttactctctg

SEQ ID NO: 5827340 - DNA, 25 bp, Homo sapien
ggacggacgcaaggagactcggaga

SEQ ID NO: 5827341 - DNA, 25 bp, Homo sapien
tctccgagtctccttgcgtccgtcc

SEQ ID NO: 5827342 - DNA, 25 bp, Homo sapien
gtctaccggcgtgggcgtgtccaca

SEQ ID NO: 5827343 - DNA, 25 bp, Homo sapien
tgtggacacgcccacgccggtagac

SEQ ID NO: 5827344 - DNA, 25 bp, Homo sapien
gtctccgttaaatagaagcatttac

SEQ ID NO: 5827345 - DNA, 25 bp, Homo sapien
gtaaatgcttctatttaacggagac

SEQ ID NO: 5827346 - DNA, 25 bp, Homo sapien
agtctagggccccattgacgtcgag

SEQ ID NO: 5827347 - DNA, 25 bp, Homo sapien
ctcgacgtcaatggggccctagact

SEQ ID NO: 5827348 - DNA, 25 bp, Homo sapien
ctagggcccggacgcctcagacggg

SEQ ID NO: 5827349 - DNA, 25 bp, Homo sapien
cccgtctgaggcgtccgggccctag

SEQ ID NO: 5827350 - DNA, 25 bp, Homo sapien
agcggtatccctgatagtttcaaac

SEQ ID NO: 5827351 - DNA, 25 bp, Homo sapien
gtttgaaactatcagggataccgct

SEQ ID NO: 5827352 - DNA, 25 bp, Homo sapien
acttcgatggtcttggggctctcgg

SEQ ID NO: 5827353 - DNA, 25 bp, Homo sapien
ccgagagccccaagaccatcgaagt

SEQ ID NO: 5827354 - DNA, 25 bp, Homo sapien
acttactcacttcagtggtatccac

SEQ ID NO: 5827355 - DNA, 25 bp, Homo sapien
gtggataccactgaagtgagtaagt

SEQ ID NO: 5827356 - DNA, 25 bp, Homo sapien
cacccctcgcccgacggcagtcctg

SEQ ID NO: 5827357 - DNA, 25 bp, Homo sapien
caggactgccgtcgggcgaggggtg

SEQ ID NO: 5827358 - DNA, 25 bp, Homo sapien
ggtacaagcttccacgagacccgtt

SEQ ID NO: 5827359 - DNA, 25 bp, Homo sapien
aacgggtctcgtggaagcttgtacc

SEQ ID NO: 5827360 - DNA, 25 bp, Homo sapien
tactaaatatttaactaacgagtat

SEQ ID NO: 5827361 - DNA, 25 bp, Homo sapien
atactcgttagttaaatatttagta

SEQ ID NO: 5827362 - DNA, 25 bp, Homo sapien
tctcgaggtcttctatgcgccttgt

SEQ ID NO: 5827363 - DNA, 25 bp, Homo sapien
acaaggcgcatagaagacctcgaga

SEQ ID NO: 5827364 - DNA, 25 bp, Homo sapien
tttcacgtaccgaagggcacttgac

SEQ ID NO: 5827365 - DNA, 25 bp, Homo sapien
gtcaagtgcccttcggtacgtgaaa

SEQ ID NO: 5827366 - DNA, 25 bp, Homo sapien
gaaccgcccctcgagactcgaaata

SEQ ID NO: 5827367 - DNA, 25 bp, Homo sapien
tatttcgagtctcgaggggcggttc

SEQ ID NO: 5827368 - DNA, 25 bp, Homo sapien
ggtttaccgttctccgatagactgg

SEQ ID NO: 5827369 - DNA, 25 bp, Homo sapien
ccagtctatcggagaacggtaaacc

SEQ ID NO: 5827370 - DNA, 25 bp, Homo sapien
aaggtgtcaaggagataatgaatac

SEQ ID NO: 5827371 - DNA, 25 bp, Homo sapien
gtattcattatctccttgacacctt

SEQ ID NO: 5827372 - DNA, 25 bp, Homo sapien
agtagacaggactaaggtgcgccgt

SEQ ID NO: 5827373 - DNA, 25 bp, Homo sapien
acggcgcaccttagtcctgtctact

SEQ ID NO: 5827374 - DNA, 25 bp, Homo sapien
gttggtcgtaaacgagagaccatta

SEQ ID NO: 5827375 - DNA, 25 bp, Homo sapien
taatggtctctcgtttacgaccaac

SEQ ID NO: 5827376 - DNA, 25 bp, Homo sapien
ccccaaaggtctagaggtcaccgga

SEQ ID NO: 5827377 - DNA, 25 bp, Homo sapien
tccggtgacctctagacctttgggg

SEQ ID NO: 5827378 - DNA, 25 bp, Homo sapien
ggccctccccactgtgcggtgagaa

SEQ ID NO: 5827379 - DNA, 25 bp, Homo sapien
ttctcaccgcacagtggggagggcc

SEQ ID NO: 5827380 - DNA, 25 bp, Homo sapien
ggacgagtttactgaccgactgggt

SEQ ID NO: 5827381 - DNA, 25 bp, Homo sapien
acccagtcggtcagtaaactcgtcc

SEQ ID NO: 5827382 - DNA, 25 bp, Homo sapien
gaggacaggatcttacccgggcggg

SEQ ID NO: 5827383 - DNA, 25 bp, Homo sapien
cccgcccgggtaagatcctgtcctc

SEQ ID NO: 5827384 - DNA, 25 bp, Homo sapien
attacatctacactcctgttattta

SEQ ID NO: 5827385 - DNA, 25 bp, Homo sapien
taaataacaggagtgtagatgtaat

SEQ ID NO: 5827386 - DNA, 25 bp, Homo sapien
gaagagtaccggtacgacggacagt

SEQ ID NO: 5827387 - DNA, 25 bp, Homo sapien
actgtccgtcgtaccggtactcttc

SEQ ID NO: 5827388 - DNA, 25 bp, Homo sapien
gtcactcccactgcccgtatcaggg

SEQ ID NO: 5827389 - DNA, 25 bp, Homo sapien
ccctgatacgggcagtgggagtgac

SEQ ID NO: 5827390 - DNA, 25 bp, Homo sapien
gaaaactctctattggttccacata

SEQ ID NO: 5827391 - DNA, 25 bp, Homo sapien
tatgtggaaccaatagagagttttc

SEQ ID NO: 5827392 - DNA, 25 bp, Homo sapien
cagtctccatcgggtgtcccgtcac

SEQ ID NO: 5827393 - DNA, 25 bp, Homo sapien
gtgacgggacacccgatggagactg

SEQ ID NO: 5827394 - DNA, 25 bp, Homo sapien
tccggaataagtaatagcttctcaa

SEQ ID NO: 5827395 - DNA, 25 bp, Homo sapien
ttgagaagctattacttattccgga

SEQ ID NO: 5827396 - DNA, 25 bp, Homo sapien
cgacgggcggcggtagacttataca

SEQ ID NO: 5827397 - DNA, 25 bp, Homo sapien
tgtataagtctaccgccgcccgtcg

SEQ ID NO: 5827398 - DNA, 25 bp, Homo sapien
gaattcataacatagtaactttatt

SEQ ID NO: 5827399 - DNA, 25 bp, Homo sapien
aataaagttactatgttatgaattc

SEQ ID NO: 5827400 - DNA, 25 bp, Homo sapien
ttatagataggtaaactaaccttat

SEQ ID NO: 5827401 - DNA, 25 bp, Homo sapien
ataaggttagtttacctatctataa

SEQ ID NO: 5827402 - DNA, 25 bp, Homo sapien
tgaagagtcgtacttattaaagtag

SEQ ID NO: 5827403 - DNA, 25 bp, Homo sapien
ctactttaataagtacgactcttca

SEQ ID NO: 5827404 - DNA, 25 bp, Homo sapien
gattggtgagttacacaaaaaggag

SEQ ID NO: 5827405 - DNA, 25 bp, Homo sapien
ctcctttttgtgtaactcaccaatc

SEQ ID NO: 5827406 - DNA, 25 bp, Homo sapien
atcccagtccccatctccgtcgaca

SEQ ID NO: 5827407 - DNA, 25 bp, Homo sapien
tgtcgacggagatggggactgggat

SEQ ID NO: 5827408 - DNA, 25 bp, Homo sapien
catcccagtccccatctccgtcgac

SEQ ID NO: 5827409 - DNA, 25 bp, Homo sapien
gtcgacggagatggggactgggatg

SEQ ID NO: 5827410 - DNA, 25 bp, Homo sapien
tcgttttcgtgatatcaagactacg

SEQ ID NO: 5827411 - DNA, 25 bp, Homo sapien
cgtagtcttgatatcacgaaaacga

SEQ ID NO: 5827412 - DNA, 25 bp, Homo sapien
ccggtcgtcgaacgtatacgtatta

SEQ ID NO: 5827413 - DNA, 25 bp, Homo sapien
taatacgtatacgttcgacgaccgg

SEQ ID NO: 5827414 - DNA, 25 bp, Homo sapien
ctttgaagaagtggaaacgaagttc

SEQ ID NO: 5827415 - DNA, 25 bp, Homo sapien
gaacttcgtttccacttcttcaaag

SEQ ID NO: 5827416 - DNA, 25 bp, Homo sapien
atcttaaagagacacgatcttatag

SEQ ID NO: 5827417 - DNA, 25 bp, Homo sapien
ctataagatcgtgtctctttaagat

SEQ ID NO: 5827418 - DNA, 25 bp, Homo sapien
gactatgggacttaacattttgaaa

SEQ ID NO: 5827419 - DNA, 25 bp, Homo sapien
tttcaaaatgttaagtcccatagtc

SEQ ID NO: 5827420 - DNA, 25 bp, Homo sapien
aggctctatagtcgtactggtgtat

SEQ ID NO: 5827421 - DNA, 25 bp, Homo sapien
atacaccagtacgactatagagcct

SEQ ID NO: 5827422 - DNA, 25 bp, Homo sapien
aggggctctcgctcgccgtcctgcg

SEQ ID NO: 5827423 - DNA, 25 bp, Homo sapien
cgcaggacggcgagcgagagcccct

SEQ ID NO: 5827424 - DNA, 25 bp, Homo sapien
gccacaaccaccctcgaggggctct

SEQ ID NO: 5827425 - DNA, 25 bp, Homo sapien
agagcccctcgagggtggttgtggc

SEQ ID NO: 5827426 - DNA, 25 bp, Homo sapien
ggtgggagacggcaggcctcgggtc

SEQ ID NO: 5827427 - DNA, 25 bp, Homo sapien
gacccgaggcctgccgtctcccacc

SEQ ID NO: 5827428 - DNA, 25 bp, Homo sapien
gcagaggacccggtccccctctcct

SEQ ID NO: 5827429 - DNA, 25 bp, Homo sapien
aggagagggggaccgggtcctctgc

SEQ ID NO: 5827430 - DNA, 25 bp, Homo sapien
acttcatcttagatcaacggaaagg

SEQ ID NO: 5827431 - DNA, 25 bp, Homo sapien
cctttccgttgatctaagatgaagt

SEQ ID NO: 5827432 - DNA, 25 bp, Homo sapien
tttttcttccaagacttcaagtgag

SEQ ID NO: 5827433 - DNA, 25 bp, Homo sapien
ctcacttgaagtcttggaagaaaaa

SEQ ID NO: 5827434 - DNA, 25 bp, Homo sapien
atacgaagttcaagacccaaattta

SEQ ID NO: 5827435 - DNA, 25 bp, Homo sapien
taaatttgggtcttgaacttcgtat

SEQ ID NO: 5827436 - DNA, 25 bp, Homo sapien
gctaaggaagggtattgaattctgt

SEQ ID NO: 5827437 - DNA, 25 bp, Homo sapien
acagaattcaatacccttccttagc

SEQ ID NO: 5827438 - DNA, 25 bp, Homo sapien
accgtctgccgacacgggtgaactt

SEQ ID NO: 5827439 - DNA, 25 bp, Homo sapien
aagttcacccgtgtcggcagacggt

SEQ ID NO: 5827440 - DNA, 25 bp, Homo sapien
atatcggtattaattacaattttat

SEQ ID NO: 5827441 - DNA, 25 bp, Homo sapien
ataaaattgtaattaataccgatat

SEQ ID NO: 5827442 - DNA, 25 bp, Homo sapien
taatatcggtattaattacaatttt

SEQ ID NO: 5827443 - DNA, 25 bp, Homo sapien
aaaattgtaattaataccgatatta

SEQ ID NO: 5827444 - DNA, 25 bp, Homo sapien
acggttatagtcaccttctccattc

SEQ ID NO: 5827445 - DNA, 25 bp, Homo sapien
gaatggagaaggtgactataaccgt

SEQ ID NO: 5827446 - DNA, 25 bp, Homo sapien
taatttatagtgtgatcgaaaacct

SEQ ID NO: 5827447 - DNA, 25 bp, Homo sapien
aggttttcgatcacactataaatta

SEQ ID NO: 5827448 - DNA, 25 bp, Homo sapien
acttgagcgtattaaagggtgttct

SEQ ID NO: 5827449 - DNA, 25 bp, Homo sapien
agaacaccctttaatacgctcaagt

SEQ ID NO: 5827450 - DNA, 25 bp, Homo sapien
cattaattgtgacattaactacgac

SEQ ID NO: 5827451 - DNA, 25 bp, Homo sapien
gtcgtagttaatgtcacaattaatg

SEQ ID NO: 5827452 - DNA, 25 bp, Homo sapien
tttcattcctaacatgtagaaatgt

SEQ ID NO: 5827453 - DNA, 25 bp, Homo sapien
acatttctacatgttaggaatgaaa

SEQ ID NO: 5827454 - DNA, 25 bp, Homo sapien
ggtccgtggactaagcctgaaccag

SEQ ID NO: 5827455 - DNA, 25 bp, Homo sapien
ctggttcaggcttagtccacggacc

SEQ ID NO: 5827456 - DNA, 25 bp, Homo sapien
gtcatcgcaccttttagaccgagac

SEQ ID NO: 5827457 - DNA, 25 bp, Homo sapien
gtctcggtctaaaaggtgcgatgac

SEQ ID NO: 5827458 - DNA, 25 bp, Homo sapien
tattgtcctgtagatatgatataaa

SEQ ID NO: 5827459 - DNA, 25 bp, Homo sapien
tttatatcatatctacaggacaata

SEQ ID NO: 5827460 - DNA, 25 bp, Homo sapien
agtacagagtatgaggttttcagaa

SEQ ID NO: 5827461 - DNA, 25 bp, Homo sapien
ttctgaaaacctcatactctgtact

SEQ ID NO: 5827462 - DNA, 25 bp, Homo sapien
cgtgtccctggcctgctccgctccg

SEQ ID NO: 5827463 - DNA, 25 bp, Homo sapien
cggagcggagcaggccagggacacg

SEQ ID NO: 5827464 - DNA, 25 bp, Homo sapien
ggaagagaggaagattacgaaagaa

SEQ ID NO: 5827465 - DNA, 25 bp, Homo sapien
ttctttcgtaatcttcctctcttcc

SEQ ID NO: 5827466 - DNA, 25 bp, Homo sapien
acgtccggagtccatatctctaaga

SEQ ID NO: 5827467 - DNA, 25 bp, Homo sapien
tcttagagatatggactccggacgt

SEQ ID NO: 5827468 - DNA, 25 bp, Homo sapien
tgctgcaaaaccttatagtggtaac

SEQ ID NO: 5827469 - DNA, 25 bp, Homo sapien
gttaccactataaggttttgcagca

SEQ ID NO: 5827470 - DNA, 25 bp, Homo sapien
gaaggacaacaacagcatcaccaac

SEQ ID NO: 5827471 - DNA, 25 bp, Homo sapien
gttggtgatgctgttgttgtccttc

SEQ ID NO: 5827472 - DNA, 25 bp, Homo sapien
gagagaacgggtcccgtcgccgccg

SEQ ID NO: 5827473 - DNA, 25 bp, Homo sapien
cggcggcgacgggacccgttctctc

SEQ ID NO: 5827474 - DNA, 25 bp, Homo sapien
agtcattatgatatctgtcgtatca

SEQ ID NO: 5827475 - DNA, 25 bp, Homo sapien
tgatacgacagatatcataatgact

SEQ ID NO: 5827476 - DNA, 25 bp, Homo sapien
gacggtgcgaccgtactcgtcccac

SEQ ID NO: 5827477 - DNA, 25 bp, Homo sapien
gtgggacgagtacggtcgcaccgtc

SEQ ID NO: 5827478 - DNA, 25 bp, Homo sapien
ggtgcgaccgtactcgtcccacccg

SEQ ID NO: 5827479 - DNA, 25 bp, Homo sapien
cgggtgggacgagtacggtcgcacc

SEQ ID NO: 5827480 - DNA, 25 bp, Homo sapien
gacactgacgtagcgggtcccaggg

SEQ ID NO: 5827481 - DNA, 25 bp, Homo sapien
ccctgggacccgctacgtcagtgtc

SEQ ID NO: 5827482 - DNA, 25 bp, Homo sapien
aaagtgtaaattagaaagattgacc

SEQ ID NO: 5827483 - DNA, 25 bp, Homo sapien
ggtcaatctttctaatttacacttt

SEQ ID NO: 5827484 - DNA, 25 bp, Homo sapien
cgggtgctaccaatcgccgactggt

SEQ ID NO: 5827485 - DNA, 25 bp, Homo sapien
accagtcggcgattggtagcacccg

SEQ ID NO: 5827486 - DNA, 25 bp, Homo sapien
acagaaagacaacccagaaagacta

SEQ ID NO: 5827487 - DNA, 25 bp, Homo sapien
tagtctttctgggttgtctttctgt

SEQ ID NO: 5827488 - DNA, 25 bp, Homo sapien
gtccccgtgtaaagttatgagccat

SEQ ID NO: 5827489 - DNA, 25 bp, Homo sapien
atggctcataactttacacggggac

SEQ ID NO: 5827490 - DNA, 25 bp, Homo sapien
aaggtagttacgataattacaagta

SEQ ID NO: 5827491 - DNA, 25 bp, Homo sapien
tacttgtaattatcgtaactacctt

SEQ ID NO: 5827492 - DNA, 25 bp, Homo sapien
gactcgtctccttagctatctgaat

SEQ ID NO: 5827493 - DNA, 25 bp, Homo sapien
attcagatagctaaggagacgagtc

SEQ ID NO: 5827494 - DNA, 25 bp, Homo sapien
ggacacagagaggttgtgctgcccc

SEQ ID NO: 5827495 - DNA, 25 bp, Homo sapien
ggggcagcacaacctctctgtgtcc

SEQ ID NO: 5827496 - DNA, 25 bp, Homo sapien
gtccaactatccaactacgtcgtcg

SEQ ID NO: 5827497 - DNA, 25 bp, Homo sapien
cgacgacgtagttggatagttggac

SEQ ID NO: 5827498 - DNA, 25 bp, Homo sapien
gtgtatcggtaagtgagatcttaag

SEQ ID NO: 5827499 - DNA, 25 bp, Homo sapien
cttaagatctcacttaccgatacac

SEQ ID NO: 5827500 - DNA, 25 bp, Homo sapien
gtaacccggtgtagactgaattgaa

SEQ ID NO: 5827501 - DNA, 25 bp, Homo sapien
ttcaattcagtctacaccgggttac

SEQ ID NO: 5827502 - DNA, 25 bp, Homo sapien
cggggagtgtccacgctcggaccgg

SEQ ID NO: 5827503 - DNA, 25 bp, Homo sapien
ccggtccgagcgtggacactccccg

SEQ ID NO: 5827504 - DNA, 25 bp, Homo sapien
gttttctttacaggtgtacaaggta

SEQ ID NO: 5827505 - DNA, 25 bp, Homo sapien
taccttgtacacctgtaaagaaaac

SEQ ID NO: 5827506 - DNA, 25 bp, Homo sapien
gtaccgaccggttaaagtatatcac

SEQ ID NO: 5827507 - DNA, 25 bp, Homo sapien
gtgatatactttaaccggtcggtac

SEQ ID NO: 5827508 - DNA, 25 bp, Homo sapien
cttctctcccgtagcccccggtgta

SEQ ID NO: 5827509 - DNA, 25 bp, Homo sapien
tacaccgggggctacgggagagaag

SEQ ID NO: 5827510 - DNA, 25 bp, Homo sapien
tcggtttctagtaaacgtctggtaa

SEQ ID NO: 5827511 - DNA, 25 bp, Homo sapien
ttaccagacgtttactagaaaccga

SEQ ID NO: 5827512 - DNA, 25 bp, Homo sapien
acaatagaaaacgagcttgatactt

SEQ ID NO: 5827513 - DNA, 25 bp, Homo sapien
aagtatcaagctcgttttctattgt

SEQ ID NO: 5827514 - DNA, 25 bp, Homo sapien
agtgagaccttatattcgtttacag

SEQ ID NO: 5827515 - DNA, 25 bp, Homo sapien
ctgtaaacgaatataaggtctcact

SEQ ID NO: 5827516 - DNA, 25 bp, Homo sapien
cccgacgacggtgatcgaaccttaa

SEQ ID NO: 5827517 - DNA, 25 bp, Homo sapien
ttaaggttcgatcaccgtcgtcggg

SEQ ID NO: 5827518 - DNA, 25 bp, Homo sapien
gatatcagacgtgagtacgtcaaga

SEQ ID NO: 5827519 - DNA, 25 bp, Homo sapien
tcttgacgtactcacgtctgatatc

SEQ ID NO: 5827520 - DNA, 25 bp, Homo sapien
aggtcgtctctaaggccttcactga

SEQ ID NO: 5827521 - DNA, 25 bp, Homo sapien
tcagtgaaggccttagagacgacct

SEQ ID NO: 5827522 - DNA, 25 bp, Homo sapien
ccgagtcggacgcttggtggaccgg

SEQ ID NO: 5827523 - DNA, 25 bp, Homo sapien
ccggtccaccaagcgtccgactcgg

SEQ ID NO: 5827524 - DNA, 25 bp, Homo sapien
aatctaagtcatgtcttaggtagag

SEQ ID NO: 5827525 - DNA, 25 bp, Homo sapien
ctctacctaagacatgacttagatt

SEQ ID NO: 5827526 - DNA, 25 bp, Homo sapien
cttatgtttagataacagatatcgg

SEQ ID NO: 5827527 - DNA, 25 bp, Homo sapien
ccgatatctgttatctaaacataag

SEQ ID NO: 5827528 - DNA, 25 bp, Homo sapien
gacgtcggtgatgcggtagtactaa

SEQ ID NO: 5827529 - DNA, 25 bp, Homo sapien
ttagtactaccgcatcaccgacgtc

SEQ ID NO: 5827530 - DNA, 25 bp, Homo sapien
gtagcttaccccacaggggtcccag

SEQ ID NO: 5827531 - DNA, 25 bp, Homo sapien
ctgggacccctgtggggtaagctac

SEQ ID NO: 5827532 - DNA, 25 bp, Homo sapien
gaccggagtggcacctcgagagacc

SEQ ID NO: 5827533 - DNA, 25 bp, Homo sapien
ggtctctcgaggtgccactccggtc

SEQ ID NO: 5827534 - DNA, 25 bp, Homo sapien
gacccagaccaaaggacggcacttt

SEQ ID NO: 5827535 - DNA, 25 bp, Homo sapien
aaagtgccgtcctttggtctgggtc

SEQ ID NO: 5827536 - DNA, 25 bp, Homo sapien
tgtcgctactcaccgggtcccagag

SEQ ID NO: 5827537 - DNA, 25 bp, Homo sapien
ctctgggacccggtgagtagcgaca

SEQ ID NO: 5827538 - DNA, 25 bp, Homo sapien
gaaagtcccccatcgtggctgtcgt

SEQ ID NO: 5827539 - DNA, 25 bp, Homo sapien
acgacagccacgatgggggactttc

SEQ ID NO: 5827540 - DNA, 25 bp, Homo sapien
gataatcgttttacagaagataatg

SEQ ID NO: 5827541 - DNA, 25 bp, Homo sapien
cattatcttctgtaaaacgattatc

SEQ ID NO: 5827542 - DNA, 25 bp, Homo sapien
ccggagcgcaggtggagcggtggta

SEQ ID NO: 5827543 - DNA, 25 bp, Homo sapien
taccaccgctccacctgcgctccgg

SEQ ID NO: 5827544 - DNA, 25 bp, Homo sapien
cgggacgctcggtgcgaagacgccg

SEQ ID NO: 5827545 - DNA, 25 bp, Homo sapien
cggcgtcttcgcaccgagcgtcccg

SEQ ID NO: 5827546 - DNA, 25 bp, Homo sapien
gtcgcgcgcgagtcgagccacgtac

SEQ ID NO: 5827547 - DNA, 25 bp, Homo sapien
gtacgtggctcgactcgcgcgcgac

SEQ ID NO: 5827548 - DNA, 25 bp, Homo sapien
gtacctggaggccattccggatgac

SEQ ID NO: 5827549 - DNA, 25 bp, Homo sapien
gtcatccggaatggcctccaggtac

SEQ ID NO: 5827550 - DNA, 25 bp, Homo sapien
ttaaactggattttagtaactagta

SEQ ID NO: 5827551 - DNA, 25 bp, Homo sapien
tactagttactaaaatccagtttaa

SEQ ID NO: 5827552 - DNA, 25 bp, Homo sapien
gggtcgggcggtcacggcggcagtc

SEQ ID NO: 5827553 - DNA, 25 bp, Homo sapien
gactgccgccgtgaccgcccgaccc

SEQ ID NO: 5827554 - DNA, 25 bp, Homo sapien
tattacgaatagtttcaagagtaag

SEQ ID NO: 5827555 - DNA, 25 bp, Homo sapien
cttactcttgaaactattcgtaata

SEQ ID NO: 5827556 - DNA, 25 bp, Homo sapien
tgaccctaaccttcgggacctgtgt

SEQ ID NO: 5827557 - DNA, 25 bp, Homo sapien
acacaggtcccgaaggttagggtca

SEQ ID NO: 5827558 - DNA, 25 bp, Homo sapien
taaaggtcagatttgagtgaacggt

SEQ ID NO: 5827559 - DNA, 25 bp, Homo sapien
accgttcactcaaatctgaccttta

SEQ ID NO: 5827560 - DNA, 25 bp, Homo sapien
aaggttgtttaaggaactgtaatga

SEQ ID NO: 5827561 - DNA, 25 bp, Homo sapien
tcattacagttccttaaacaacctt

SEQ ID NO: 5827562 - DNA, 25 bp, Homo sapien
cgcggttggtggtgggcgccggtgg

SEQ ID NO: 5827563 - DNA, 25 bp, Homo sapien
ccaccggcgcccaccaccaaccgcg

SEQ ID NO: 5827564 - DNA, 25 bp, Homo sapien
aacggtcgtggcaacactcgatggg

SEQ ID NO: 5827565 - DNA, 25 bp, Homo sapien
cccatcgagtgttgccacgaccgtt

SEQ ID NO: 5827566 - DNA, 25 bp, Homo sapien
tagaaaatatgaacgtgcttaaaag

SEQ ID NO: 5827567 - DNA, 25 bp, Homo sapien
cttttaagcacgttcatattttcta

SEQ ID NO: 5827568 - DNA, 25 bp, Homo sapien
acatgaggaaataaatataactggt

SEQ ID NO: 5827569 - DNA, 25 bp, Homo sapien
accagttatatttatttcctcatgt

SEQ ID NO: 5827570 - DNA, 25 bp, Homo sapien
cttgtcgtcaagcagggcctcgtgc

SEQ ID NO: 5827571 - DNA, 25 bp, Homo sapien
gcacgaggccctgcttgacgacaag

SEQ ID NO: 5827572 - DNA, 25 bp, Homo sapien
gaggagacaacactaacatgggtct

SEQ ID NO: 5827573 - DNA, 25 bp, Homo sapien
agacccatgttagtgttgtctcctc

SEQ ID NO: 5827574 - DNA, 25 bp, Homo sapien
tgcaccaaatcgtataagtccatat

SEQ ID NO: 5827575 - DNA, 25 bp, Homo sapien
atatggacttatacgatttggtgca

SEQ ID NO: 5827576 - DNA, 25 bp, Homo sapien
ttgctagagtggtcagtcaggtgtc

SEQ ID NO: 5827577 - DNA, 25 bp, Homo sapien
gacacctgactgaccactctagcaa

SEQ ID NO: 5827578 - DNA, 25 bp, Homo sapien
acgattgctagagtggtcagtcagg

SEQ ID NO: 5827579 - DNA, 25 bp, Homo sapien
cctgactgaccactctagcaatcgt

SEQ ID NO: 5827580 - DNA, 25 bp, Homo sapien
tcgtgtcctttgttgaccgcggaac

SEQ ID NO: 5827581 - DNA, 25 bp, Homo sapien
gttccgcggtcaacaaaggacacga

SEQ ID NO: 5827582 - DNA, 25 bp, Homo sapien
caccacgaactcccctgtcaacctg

SEQ ID NO: 5827583 - DNA, 25 bp, Homo sapien
caggttgacaggggagttcgtggtg

SEQ ID NO: 5827584 - DNA, 25 bp, Homo sapien
tagtaaatgtgagtttgtgtgacta

SEQ ID NO: 5827585 - DNA, 25 bp, Homo sapien
tagtcacacaaactcacatttacta

SEQ ID NO: 5827586 - DNA, 25 bp, Homo sapien
cgtcaaagtccgtatcccgagtgag

SEQ ID NO: 5827587 - DNA, 25 bp, Homo sapien
ctcactcgggatacggactttgacg

SEQ ID NO: 5827588 - DNA, 25 bp, Homo sapien
cgctcactgagaccgccgcgtcgcg

SEQ ID NO: 5827589 - DNA, 25 bp, Homo sapien
cgcgacgcggcggtctcagtgagcg

SEQ ID NO: 5827590 - DNA, 25 bp, Homo sapien
agtgaagcaggtgatttactgggta

SEQ ID NO: 5827591 - DNA, 25 bp, Homo sapien
tacccagtaaatcacctgcttcact

SEQ ID NO: 5827592 - DNA, 25 bp, Homo sapien
ggccgacgaaagacgcatcgacccg

SEQ ID NO: 5827593 - DNA, 25 bp, Homo sapien
cgggtcgatgcgtctttcgtcggcc

SEQ ID NO: 5827594 - DNA, 25 bp, Homo sapien
gtcgtcgtccccatctctattgacc

SEQ ID NO: 5827595 - DNA, 25 bp, Homo sapien
ggtcaatagagatggggacgacgac

SEQ ID NO: 5827596 - DNA, 25 bp, Homo sapien
tatgagtatttatgagacctattgt

SEQ ID NO: 5827597 - DNA, 25 bp, Homo sapien
acaataggtctcataaatactcata

SEQ ID NO: 5827598 - DNA, 25 bp, Homo sapien
ccttattctaaacatgtcagatata

SEQ ID NO: 5827599 - DNA, 25 bp, Homo sapien
tatatctgacatgtttagaataagg

SEQ ID NO: 5827600 - DNA, 25 bp, Homo sapien
ctttagtctgaccttattctaaaca

SEQ ID NO: 5827601 - DNA, 25 bp, Homo sapien
tgtttagaataaggtcagactaaag

SEQ ID NO: 5827602 - DNA, 25 bp, Homo sapien
gattcttagttcagcaagacgttgg

SEQ ID NO: 5827603 - DNA, 25 bp, Homo sapien
ccaacgtcttgctgaactaagaatc

SEQ ID NO: 5827604 - DNA, 25 bp, Homo sapien
gtcgtaatcgtaccgtctctgtcga

SEQ ID NO: 5827605 - DNA, 25 bp, Homo sapien
tcgacagagacggtacgattacgac

SEQ ID NO: 5827606 - DNA, 25 bp, Homo sapien
ggagacctttgagtacttcgtgtac

SEQ ID NO: 5827607 - DNA, 25 bp, Homo sapien
gtacacgaagtactcaaaggtctcc

SEQ ID NO: 5827608 - DNA, 25 bp, Homo sapien
cctctgtcggctctcggcggaagtt

SEQ ID NO: 5827609 - DNA, 25 bp, Homo sapien
aacttccgccgagagccgacagagg

SEQ ID NO: 5827610 - DNA, 25 bp, Homo sapien
ccgctgctcctcggcgccccccgtc

SEQ ID NO: 5827611 - DNA, 25 bp, Homo sapien
gacggggggcgccgaggagcagcgg

SEQ ID NO: 5827612 - DNA, 25 bp, Homo sapien
gtagaacttaatgacggacaggaag

SEQ ID NO: 5827613 - DNA, 25 bp, Homo sapien
cttcctgtccgtcattaagttctac

SEQ ID NO: 5827614 - DNA, 25 bp, Homo sapien
ccaaggtccaagatagaacggtagg

SEQ ID NO: 5827615 - DNA, 25 bp, Homo sapien
cctaccgttctatcttggaccttgg

SEQ ID NO: 5827616 - DNA, 25 bp, Homo sapien
ccgaaccgggtgcacgacgtcaacc

SEQ ID NO: 5827617 - DNA, 25 bp, Homo sapien
ggttgacgtcgtgcacccggttcgg

SEQ ID NO: 5827618 - DNA, 25 bp, Homo sapien
ggtgttatttatgcatattctaatc

SEQ ID NO: 5827619 - DNA, 25 bp, Homo sapien
gattagaatatgcataaataacacc

SEQ ID NO: 5827620 - DNA, 25 bp, Homo sapien
gactggccccaccctcaggtcgtcc

SEQ ID NO: 5827621 - DNA, 25 bp, Homo sapien
ggacgacctgagggtggggccagtc

SEQ ID NO: 5827622 - DNA, 25 bp, Homo sapien
cgtcctccctcctctggtcccaaca

SEQ ID NO: 5827623 - DNA, 25 bp, Homo sapien
tgttgggaccagaggagggaggacg

SEQ ID NO: 5827624 - DNA, 25 bp, Homo sapien
atccagggagcggaaccaaggttct

SEQ ID NO: 5827625 - DNA, 25 bp, Homo sapien
agaaccttggttccgctccctggat

SEQ ID NO: 5827626 - DNA, 25 bp, Homo sapien
aatttagaccagaggtatcgtggag

SEQ ID NO: 5827627 - DNA, 25 bp, Homo sapien
ctccacgatacctctggtctaaatt

SEQ ID NO: 5827628 - DNA, 25 bp, Homo sapien
accccaacagatccgagacagggaa

SEQ ID NO: 5827629 - DNA, 25 bp, Homo sapien
ttccctgtctcggatctgttggggt

SEQ ID NO: 5827630 - DNA, 25 bp, Homo sapien
tgacgactcgtttcccttggcccag

SEQ ID NO: 5827631 - DNA, 25 bp, Homo sapien
ctgggccaagggaaacgagtcgtca

SEQ ID NO: 5827632 - DNA, 25 bp, Homo sapien
gacccttctcgttactttgcgacga

SEQ ID NO: 5827633 - DNA, 25 bp, Homo sapien
tcgtcgcaaagtaacgagaagggtc

SEQ ID NO: 5827634 - DNA, 25 bp, Homo sapien
ctaaacccagagtgccttcgactct

SEQ ID NO: 5827635 - DNA, 25 bp, Homo sapien
agagtcgaaggcactctgggtttag

SEQ ID NO: 5827636 - DNA, 25 bp, Homo sapien
gaccaaagtccgaacgcggagaccc

SEQ ID NO: 5827637 - DNA, 25 bp, Homo sapien
gggtctccgcgttcggactttggtc

SEQ ID NO: 5827638 - DNA, 25 bp, Homo sapien
cgggacgcgaaagcggaggctccgg

SEQ ID NO: 5827639 - DNA, 25 bp, Homo sapien
ccggagcctccgctttcgcgtcccg

SEQ ID NO: 5827640 - DNA, 25 bp, Homo sapien
gaaacccgacgtgagccacggtatg

SEQ ID NO: 5827641 - DNA, 25 bp, Homo sapien
cataccgtggctcacgtcgggtttc

SEQ ID NO: 5827642 - DNA, 25 bp, Homo sapien
gaatttctaaggagaccaattcttt

SEQ ID NO: 5827643 - DNA, 25 bp, Homo sapien
aaagaattggtctccttagaaattc

SEQ ID NO: 5827644 - DNA, 25 bp, Homo sapien
tccgcctgtgggcccgtcctatgag

SEQ ID NO: 5827645 - DNA, 25 bp, Homo sapien
ctcataggacgggcccacaggcgga

SEQ ID NO: 5827646 - DNA, 25 bp, Homo sapien
agtagtctttagtacgaaccctatg

SEQ ID NO: 5827647 - DNA, 25 bp, Homo sapien
catagggttcgtactaaagactact

SEQ ID NO: 5827648 - DNA, 25 bp, Homo sapien
aataacgttattattccataactgt

SEQ ID NO: 5827649 - DNA, 25 bp, Homo sapien
acagttatggaataataacgttatt

SEQ ID NO: 5827650 - DNA, 25 bp, Homo sapien
tattccataactgttaaaacgaaaa

SEQ ID NO: 5827651 - DNA, 25 bp, Homo sapien
ttttcgttttaacagttatggaata

SEQ ID NO: 5827652 - DNA, 25 bp, Homo sapien
ttattattccataactgttaaaacg

SEQ ID NO: 5827653 - DNA, 25 bp, Homo sapien
cgttttaacagttatggaataataa

SEQ ID NO: 5827654 - DNA, 25 bp, Homo sapien
cattttaagtattcatagtttgtag

SEQ ID NO: 5827655 - DNA, 25 bp, Homo sapien
ctacaaactatgaatacttaaaatg

SEQ ID NO: 5827656 - DNA, 25 bp, Homo sapien
cgactcccgtgtcggtcgcccgccg

SEQ ID NO: 5827657 - DNA, 25 bp, Homo sapien
cggcgggcgaccgacacgggagtcg

SEQ ID NO: 5827658 - DNA, 25 bp, Homo sapien
ccgactcccgtgtcggtcgcccgcc

SEQ ID NO: 5827659 - DNA, 25 bp, Homo sapien
ggcgggcgaccgacacgggagtcgg

SEQ ID NO: 5827660 - DNA, 25 bp, Homo sapien
attttatagctccttctataaaggg

SEQ ID NO: 5827661 - DNA, 25 bp, Homo sapien
ccctttatagaaggagctataaaat

SEQ ID NO: 5827662 - DNA, 25 bp, Homo sapien
aatgaatcattaaattataggaact

SEQ ID NO: 5827663 - DNA, 25 bp, Homo sapien
agttcctataatttaatgattcatt

SEQ ID NO: 5827664 - DNA, 25 bp, Homo sapien
atgaatcattaaattataggaacta

SEQ ID NO: 5827665 - DNA, 25 bp, Homo sapien
tagttcctataatttaatgattcat

SEQ ID NO: 5827666 - DNA, 25 bp, Homo sapien
ggatatgtgtaagagtaagtgtttt

SEQ ID NO: 5827667 - DNA, 25 bp, Homo sapien
aaaacacttactcttacacatatcc

SEQ ID NO: 5827668 - DNA, 25 bp, Homo sapien
tccctcgtctccgagtccgactcgt

SEQ ID NO: 5827669 - DNA, 25 bp, Homo sapien
acgagtcggactcggagacgaggga

SEQ ID NO: 5827670 - DNA, 25 bp, Homo sapien
gttaacagccatttaagtcgtagaa

SEQ ID NO: 5827671 - DNA, 25 bp, Homo sapien
ttctacgacttaaatggctgttaac

SEQ ID NO: 5827672 - DNA, 25 bp, Homo sapien
agagacgactgacgccgacgaacga

SEQ ID NO: 5827673 - DNA, 25 bp, Homo sapien
tcgttcgtcggcgtcagtcgtctct

SEQ ID NO: 5827674 - DNA, 25 bp, Homo sapien
actaccaaaattaacagctttgagg

SEQ ID NO: 5827675 - DNA, 25 bp, Homo sapien
cctcaaagctgttaattttggtagt

SEQ ID NO: 5827676 - DNA, 25 bp, Homo sapien
ccccagttctatagagcgggacaac

SEQ ID NO: 5827677 - DNA, 25 bp, Homo sapien
gttgtcccgctctatagaactgggg

SEQ ID NO: 5827678 - DNA, 25 bp, Homo sapien
agacaccacaattacttacctcatg

SEQ ID NO: 5827679 - DNA, 25 bp, Homo sapien
catgaggtaagtaattgtggtgtct

SEQ ID NO: 5827680 - DNA, 25 bp, Homo sapien
gtctcatccccgctgtcttcgggtg

SEQ ID NO: 5827681 - DNA, 25 bp, Homo sapien
cacccgaagacagcggggatgagac

SEQ ID NO: 5827682 - DNA, 25 bp, Homo sapien
tctaagagggagtagagtgtttgat

SEQ ID NO: 5827683 - DNA, 25 bp, Homo sapien
atcaaacactctactccctcttaga

SEQ ID NO: 5827684 - DNA, 25 bp, Homo sapien
ataccaaatagataaacaaagagtt

SEQ ID NO: 5827685 - DNA, 25 bp, Homo sapien
aactctttgtttatctatttggtat

SEQ ID NO: 5827686 - DNA, 25 bp, Homo sapien
ggcccgcgaccgccaggtgcgtggc

SEQ ID NO: 5827687 - DNA, 25 bp, Homo sapien
gccacgcacctggcggtcgcgggcc

SEQ ID NO: 5827688 - DNA, 25 bp, Homo sapien
gggcccgcgaccgccaggtgcgtgg

SEQ ID NO: 5827689 - DNA, 25 bp, Homo sapien
ccacgcacctggcggtcgcgggccc

SEQ ID NO: 5827690 - DNA, 25 bp, Homo sapien
ctcgttcaaactttctcggtatgtc

SEQ ID NO: 5827691 - DNA, 25 bp, Homo sapien
gacataccgagaaagtttgaacgag

SEQ ID NO: 5827692 - DNA, 25 bp, Homo sapien
cttgtggtggaggaagactttggac

SEQ ID NO: 5827693 - DNA, 25 bp, Homo sapien
gtccaaagtcttcctccaccacaag

SEQ ID NO: 5827694 - DNA, 25 bp, Homo sapien
gtgactagggataggcggcgcggga

SEQ ID NO: 5827695 - DNA, 25 bp, Homo sapien
tcccgcgccgcctatccctagtcac

SEQ ID NO: 5827696 - DNA, 25 bp, Homo sapien
gaaacgacaaatgaacggttattaa

SEQ ID NO: 5827697 - DNA, 25 bp, Homo sapien
ttaataaccgttcatttgtcgtttc

SEQ ID NO: 5827698 - DNA, 25 bp, Homo sapien
acagtgtctgccaagagagtagtaa

SEQ ID NO: 5827699 - DNA, 25 bp, Homo sapien
ttactactctcttggcagacactgt

SEQ ID NO: 5827700 - DNA, 25 bp, Homo sapien
agacgaacctatgacgcacgactgt

SEQ ID NO: 5827701 - DNA, 25 bp, Homo sapien
acagtcgtgcgtcataggttcgtct

SEQ ID NO: 5827702 - DNA, 25 bp, Homo sapien
tgctgggaagacctgggagggagct

SEQ ID NO: 5827703 - DNA, 25 bp, Homo sapien
agctccctcccaggtcttcccagca

SEQ ID NO: 5827704 - DNA, 25 bp, Homo sapien
cctggcgagatcctcgggccttccg

SEQ ID NO: 5827705 - DNA, 25 bp, Homo sapien
cggaaggcccgaggatctcgccagg

SEQ ID NO: 5827706 - DNA, 25 bp, Homo sapien
cacttataagtggttttggaagtag

SEQ ID NO: 5827707 - DNA, 25 bp, Homo sapien
ctacttccaaaaccacttataagtg

SEQ ID NO: 5827708 - DNA, 25 bp, Homo sapien
ccggtgccgcggcaggtcgagtggg

SEQ ID NO: 5827709 - DNA, 25 bp, Homo sapien
cccactcgacctgccgcggcaccgg

SEQ ID NO: 5827710 - DNA, 25 bp, Homo sapien
cctagtatgtatctggacgtgaccg

SEQ ID NO: 5827711 - DNA, 25 bp, Homo sapien
cggtcacgtccagatacatactagg

SEQ ID NO: 5827712 - DNA, 25 bp, Homo sapien
gacggcctggaacggcagggaaaca

SEQ ID NO: 5827713 - DNA, 25 bp, Homo sapien
tgtttccctgccgttccaggccgtc

SEQ ID NO: 5827714 - DNA, 25 bp, Homo sapien
ctctggaacatctcagacgccgacg

SEQ ID NO: 5827715 - DNA, 25 bp, Homo sapien
cgtcggcgtctgagatgttccagag

SEQ ID NO: 5827716 - DNA, 25 bp, Homo sapien
aaagaagtgtattaaagctaggtgg

SEQ ID NO: 5827717 - DNA, 25 bp, Homo sapien
ccacctagctttaatacacttcttt

SEQ ID NO: 5827718 - DNA, 25 bp, Homo sapien
cccgctcgtcaggagagcatcggag

SEQ ID NO: 5827719 - DNA, 25 bp, Homo sapien
ctccgatgctctcctgacgagcggg

SEQ ID NO: 5827720 - DNA, 25 bp, Homo sapien
gacattaagagacctgatatacgtc

SEQ ID NO: 5827721 - DNA, 25 bp, Homo sapien
gacgtatatcaggtctcttaatgtc

SEQ ID NO: 5827722 - DNA, 25 bp, Homo sapien
gagaatatgcctggtggtataaagt

SEQ ID NO: 5827723 - DNA, 25 bp, Homo sapien
actttataccaccaggcatattctc

SEQ ID NO: 5827724 - DNA, 25 bp, Homo sapien
agtatcttaactgtgtcttttaggt

SEQ ID NO: 5827725 - DNA, 25 bp, Homo sapien
acctaaaagacacagttaagatact

SEQ ID NO: 5827726 - DNA, 25 bp, Homo sapien
ggtggtgggcatgtggtcacgttcc

SEQ ID NO: 5827727 - DNA, 25 bp, Homo sapien
ggaacgtgaccacatgcccaccacc

SEQ ID NO: 5827728 - DNA, 25 bp, Homo sapien
acacaagaatgtaggaatataagct

SEQ ID NO: 5827729 - DNA, 25 bp, Homo sapien
agcttatattcctacattcttgtgt

SEQ ID NO: 5827730 - DNA, 25 bp, Homo sapien
tcggcacgaagtccggaagtacccg

SEQ ID NO: 5827731 - DNA, 25 bp, Homo sapien
cgggtacttccggacttcgtgccga

SEQ ID NO: 5827732 - DNA, 25 bp, Homo sapien
ggtacacgatcctcacaggaatgac

SEQ ID NO: 5827733 - DNA, 25 bp, Homo sapien
gtcattcctgtgaggatcgtgtacc

SEQ ID NO: 5827734 - DNA, 25 bp, Homo sapien
tcaactcgagaccatgcagaggtat

SEQ ID NO: 5827735 - DNA, 25 bp, Homo sapien
atacctctgcatggtctcgagttga

SEQ ID NO: 5827736 - DNA, 25 bp, Homo sapien
cgcaataactgcagattcggttaac

SEQ ID NO: 5827737 - DNA, 25 bp, Homo sapien
gttaaccgaatctgcagttattgcg

SEQ ID NO: 5827738 - DNA, 25 bp, Homo sapien
gagactttccatgaacattacaaag

SEQ ID NO: 5827739 - DNA, 25 bp, Homo sapien
ctttgtaatgttcatggaaagtctc

SEQ ID NO: 5827740 - DNA, 25 bp, Homo sapien
ataatgtttttgctgtgacagttac

SEQ ID NO: 5827741 - DNA, 25 bp, Homo sapien
gtaactgtcacagcaaaaacattat

SEQ ID NO: 5827742 - DNA, 25 bp, Homo sapien
agtttttgtcatagaaagtcactgt

SEQ ID NO: 5827743 - DNA, 25 bp, Homo sapien
acagtgactttctatgacaaaaact

SEQ ID NO: 5827744 - DNA, 25 bp, Homo sapien
atacacaagcgaggaaaactggtac

SEQ ID NO: 5827745 - DNA, 25 bp, Homo sapien
gtaccagttttcctcgcttgtgtat

SEQ ID NO: 5827746 - DNA, 25 bp, Homo sapien
cagggcaccggcacgacggagtcca

SEQ ID NO: 5827747 - DNA, 25 bp, Homo sapien
tggactccgtcgtgccggtgccctg

SEQ ID NO: 5827748 - DNA, 25 bp, Homo sapien
gtcgacgtcgctgtctcttccgacc

SEQ ID NO: 5827749 - DNA, 25 bp, Homo sapien
ggtcggaagagacagcgacgtcgac

SEQ ID NO: 5827750 - DNA, 25 bp, Homo sapien
cagactcgatgaattcggttgttgt

SEQ ID NO: 5827751 - DNA, 25 bp, Homo sapien
acaacaaccgaattcatcgagtctg

SEQ ID NO: 5827752 - DNA, 25 bp, Homo sapien
gaaattcaagttattaatacatgag

SEQ ID NO: 5827753 - DNA, 25 bp, Homo sapien
ctcatgtattaataacttgaatttc

SEQ ID NO: 5827754 - DNA, 25 bp, Homo sapien
gaacgacgtcgacgtaaaagagaga

SEQ ID NO: 5827755 - DNA, 25 bp, Homo sapien
tctctcttttacgtcgacgtcgttc

SEQ ID NO: 5827756 - DNA, 25 bp, Homo sapien
gagccccaaacgaccgagccccgca

SEQ ID NO: 5827757 - DNA, 25 bp, Homo sapien
tgcggggctcggtcgtttggggctc

SEQ ID NO: 5827758 - DNA, 25 bp, Homo sapien
gcatgtagaccggtaaaccaaagtg

SEQ ID NO: 5827759 - DNA, 25 bp, Homo sapien
cactttggtttaccggtctacatgc

SEQ ID NO: 5827760 - DNA, 25 bp, Homo sapien
agctgtcggggagccgccgaggcga

SEQ ID NO: 5827761 - DNA, 25 bp, Homo sapien
tcgcctcggcggctccccgacagct

SEQ ID NO: 5827762 - DNA, 25 bp, Homo sapien
gccgagcgcccactcctccgcaggc

SEQ ID NO: 5827763 - DNA, 25 bp, Homo sapien
gcctgcggaggagtgggcgctcggc

SEQ ID NO: 5827764 - DNA, 25 bp, Homo sapien
ttccttcagactaataaacagagag

SEQ ID NO: 5827765 - DNA, 25 bp, Homo sapien
ctctctgtttattagtctgaaggaa

SEQ ID NO: 5827766 - DNA, 25 bp, Homo sapien
gagaagggtctaattacgtgtaggt

SEQ ID NO: 5827767 - DNA, 25 bp, Homo sapien
acctacacgtaattagacccttctc

SEQ ID NO: 5827768 - DNA, 25 bp, Homo sapien
ggtgacgcccttccttgcaagggac

SEQ ID NO: 5827769 - DNA, 25 bp, Homo sapien
gtcccttgcaaggaagggcgtcacc

SEQ ID NO: 5827770 - DNA, 25 bp, Homo sapien
gcacgtccagccaccacaatgtgtg

SEQ ID NO: 5827771 - DNA, 25 bp, Homo sapien
cacacattgtggtggctggacgtgc

SEQ ID NO: 5827772 - DNA, 25 bp, Homo sapien
ttagaattgaggtagattcaggtcc

SEQ ID NO: 5827773 - DNA, 25 bp, Homo sapien
ggacctgaatctacctcaattctaa

SEQ ID NO: 5827774 - DNA, 25 bp, Homo sapien
gacttccttcaacttaaacatattt

SEQ ID NO: 5827775 - DNA, 25 bp, Homo sapien
aaatatgtttaagttgaaggaagtc

SEQ ID NO: 5827776 - DNA, 25 bp, Homo sapien
cggtgtcctagagtcgttccgaaag

SEQ ID NO: 5827777 - DNA, 25 bp, Homo sapien
ctttcggaacgactctaggacaccg

SEQ ID NO: 5827778 - DNA, 25 bp, Homo sapien
agaacttctttgtctctccgatcag

SEQ ID NO: 5827779 - DNA, 25 bp, Homo sapien
ctgatcggagagacaaagaagttct

SEQ ID NO: 5827780 - DNA, 25 bp, Homo sapien
atcctcgtagggtatagttgaccat

SEQ ID NO: 5827781 - DNA, 25 bp, Homo sapien
atggtcaactataccctacgaggat

SEQ ID NO: 5827782 - DNA, 25 bp, Homo sapien
gatctgtaagtttacggtgaaataa

SEQ ID NO: 5827783 - DNA, 25 bp, Homo sapien
ttatttcaccgtaaacttacagatc

SEQ ID NO: 5827784 - DNA, 25 bp, Homo sapien
ggcgcgggacgacgtgacgcccggg

SEQ ID NO: 5827785 - DNA, 25 bp, Homo sapien
cccgggcgtcacgtcgtcccgcgcc

SEQ ID NO: 5827786 - DNA, 25 bp, Homo sapien
ggacttcgagtctccgtctccgtgg

SEQ ID NO: 5827787 - DNA, 25 bp, Homo sapien
ccacggagacggagactcgaagtcc

SEQ ID NO: 5827788 - DNA, 25 bp, Homo sapien
actcaggaacgggtggcatttattt

SEQ ID NO: 5827789 - DNA, 25 bp, Homo sapien
aaataaatgccacccgttcctgagt

SEQ ID NO: 5827790 - DNA, 25 bp, Homo sapien
gtgaacgacacttcgtgtaacccca

SEQ ID NO: 5827791 - DNA, 25 bp, Homo sapien
tggggttacacgaagtgtcgttcac

SEQ ID NO: 5827792 - DNA, 25 bp, Homo sapien
aagggatgcctatctccaccagtct

SEQ ID NO: 5827793 - DNA, 25 bp, Homo sapien
agactggtggagataggcatccctt

SEQ ID NO: 5827794 - DNA, 25 bp, Homo sapien
tcgtgtcggcctcctccccagaggg

SEQ ID NO: 5827795 - DNA, 25 bp, Homo sapien
ccctctggggaggaggccgacacga

SEQ ID NO: 5827796 - DNA, 25 bp, Homo sapien
ccccgccgcctccgtggtcgtgtcg

SEQ ID NO: 5827797 - DNA, 25 bp, Homo sapien
cgacacgaccacggaggcggcgggg

SEQ ID NO: 5827798 - DNA, 25 bp, Homo sapien
agggtagcaacaccctgagacaaag

SEQ ID NO: 5827799 - DNA, 25 bp, Homo sapien
ctttgtctcagggtgttgctaccct

SEQ ID NO: 5827800 - DNA, 25 bp, Homo sapien
tgctccgacacccgaggaagtacgg

SEQ ID NO: 5827801 - DNA, 25 bp, Homo sapien
ccgtacttcctcgggtgtcggagca

SEQ ID NO: 5827802 - DNA, 25 bp, Homo sapien
ctccgacacccgaggaagtacggta

SEQ ID NO: 5827803 - DNA, 25 bp, Homo sapien
taccgtacttcctcgggtgtcggag

SEQ ID NO: 5827804 - DNA, 25 bp, Homo sapien
ggcctccacgctctccggggccccg

SEQ ID NO: 5827805 - DNA, 25 bp, Homo sapien
cggggccccggagagcgtggaggcc

SEQ ID NO: 5827806 - DNA, 25 bp, Homo sapien
tgtagttcaccggaaatactagttt

SEQ ID NO: 5827807 - DNA, 25 bp, Homo sapien
aaactagtatttccggtgaactaca

SEQ ID NO: 5827808 - DNA, 25 bp, Homo sapien
aaacctactcatgtccaactaaata

SEQ ID NO: 5827809 - DNA, 25 bp, Homo sapien
tatttagttggacatgagtaggttt

SEQ ID NO: 5827810 - DNA, 25 bp, Homo sapien
gtttaggcacaggactcgttttagt

SEQ ID NO: 5827811 - DNA, 25 bp, Homo sapien
actaaaacgagtcctgtgcctaaac

SEQ ID NO: 5827812 - DNA, 25 bp, Homo sapien
ttggcacaggcttggcgtgccgccg

SEQ ID NO: 5827813 - DNA, 25 bp, Homo sapien
cggcggcacgccaagcctgtgccaa

SEQ ID NO: 5827814 - DNA, 25 bp, Homo sapien
taccgtataagacgaagattgaaag

SEQ ID NO: 5827815 - DNA, 25 bp, Homo sapien
ctttcaatcttcgtcttatacggta

SEQ ID NO: 5827816 - DNA, 25 bp, Homo sapien
cctcagtgtcacagtctagagacgt

SEQ ID NO: 5827817 - DNA, 25 bp, Homo sapien
acgtctctagactgtgacactgagg

SEQ ID NO: 5827818 - DNA, 25 bp, Homo sapien
tcggacctgctcacctcccgcgagt

SEQ ID NO: 5827819 - DNA, 25 bp, Homo sapien
actcgcgggaggtgagcaggtccga

SEQ ID NO: 5827820 - DNA, 25 bp, Homo sapien
cgtcggcgacgtcgcctacccagtc

SEQ ID NO: 5827821 - DNA, 25 bp, Homo sapien
gactgggtaggcgacgtcgccgacg

SEQ ID NO: 5827822 - DNA, 25 bp, Homo sapien
acgttgtagacacataaccagtcat

SEQ ID NO: 5827823 - DNA, 25 bp, Homo sapien
atgactggttatgtgtctacaacgt

SEQ ID NO: 5827824 - DNA, 25 bp, Homo sapien
gaaccaagaggagggccgatgataa

SEQ ID NO: 5827825 - DNA, 25 bp, Homo sapien
ttatcatcggccctcctcttggttc

SEQ ID NO: 5827826 - DNA, 25 bp, Homo sapien
aggaaatggttcacaattaagtcgt

SEQ ID NO: 5827827 - DNA, 25 bp, Homo sapien
acgacttaattgtgaaccatttcct

SEQ ID NO: 5827828 - DNA, 25 bp, Homo sapien
acgggaccgacacactatggttcct

SEQ ID NO: 5827829 - DNA, 25 bp, Homo sapien
aggaaccatagtgtgtcggtcccgt

SEQ ID NO: 5827830 - DNA, 25 bp, Homo sapien
tcacgggaacctatagtggtgagag

SEQ ID NO: 5827831 - DNA, 25 bp, Homo sapien
ctctcaccactataggttcccgtga

SEQ ID NO: 5827832 - DNA, 25 bp, Homo sapien
ttttgtaatcactaccactattatt

SEQ ID NO: 5827833 - DNA, 25 bp, Homo sapien
aataatagtggtagtgattacaaaa

SEQ ID NO: 5827834 - DNA, 25 bp, Homo sapien
actactactgctattgtttttgtaa

SEQ ID NO: 5827835 - DNA, 25 bp, Homo sapien
ttacaaaaacaatagcagtagtagt

SEQ ID NO: 5827836 - DNA, 25 bp, Homo sapien
actagacaagtacattactgtacta

SEQ ID NO: 5827837 - DNA, 25 bp, Homo sapien
tagtacagtaatgtacttgtctagt

SEQ ID NO: 5827838 - DNA, 25 bp, Homo sapien
ttgttgtagataaggaagtagatca

SEQ ID NO: 5827839 - DNA, 25 bp, Homo sapien
tgatctacttccttatctacaacaa

SEQ ID NO: 5827840 - DNA, 25 bp, Homo sapien
acaaggaaaggtgtgactcgaaaaa

SEQ ID NO: 5827841 - DNA, 25 bp, Homo sapien
tttttcgagtcacacctttccttgt

SEQ ID NO: 5827842 - DNA, 25 bp, Homo sapien
gattatctggttcaataacaagtaa

SEQ ID NO: 5827843 - DNA, 25 bp, Homo sapien
ttacttgttattgaaccagataatc

SEQ ID NO: 5827844 - DNA, 25 bp, Homo sapien
gtcgtcgcacgccctgtggctcggg

SEQ ID NO: 5827845 - DNA, 25 bp, Homo sapien
cccgagccacagggcgtgcgacgac

SEQ ID NO: 5827846 - DNA, 25 bp, Homo sapien
tgtcgactggggtctacttgactga

SEQ ID NO: 5827847 - DNA, 25 bp, Homo sapien
tcagtcaagtagaccccagtcgaca

SEQ ID NO: 5827848 - DNA, 25 bp, Homo sapien
gacgctccgggtccgcccggcggcg

SEQ ID NO: 5827849 - DNA, 25 bp, Homo sapien
cgccgccgggcggacccggagcgtc

SEQ ID NO: 5827850 - DNA, 25 bp, Homo sapien
agccccgaggcctcggacgctccgg

SEQ ID NO: 5827851 - DNA, 25 bp, Homo sapien
ccggagcgtccgaggcctcggggct

SEQ ID NO: 5827852 - DNA, 25 bp, Homo sapien
ttgcctgctactaaacgactaccac

SEQ ID NO: 5827853 - DNA, 25 bp, Homo sapien
gtggtagtcgtttagtagcaggcaa

SEQ ID NO: 5827854 - DNA, 25 bp, Homo sapien
tctatctgagataaaaatcattgtc

SEQ ID NO: 5827855 - DNA, 25 bp, Homo sapien
gacaatgatttttatctcagataga

SEQ ID NO: 5827856 - DNA, 25 bp, Homo sapien
ctacgacgggtagttcaaggaagta

SEQ ID NO: 5827857 - DNA, 25 bp, Homo sapien
tacttccttgaactacccgtcgtag

SEQ ID NO: 5827858 - DNA, 25 bp, Homo sapien
cctgaccttaggagcgacgttttta

SEQ ID NO: 5827859 - DNA, 25 bp, Homo sapien
taaaaacgtcgctcctaaggtcagg

SEQ ID NO: 5827860 - DNA, 25 bp, Homo sapien
aaaaatcatgtaagaaatgtggagt

SEQ ID NO: 5827861 - DNA, 25 bp, Homo sapien
actccacatttcttacatgattttt

SEQ ID NO: 5827862 - DNA, 25 bp, Homo sapien
cccgaacaatagaacgcaaagactg

SEQ ID NO: 5827863 - DNA, 25 bp, Homo sapien
cagtctttgcgttctattgttcggg

SEQ ID NO: 5827864 - DNA, 25 bp, Homo sapien
agtccaggctgtcgggtcctgtggg

SEQ ID NO: 5827865 - DNA, 25 bp, Homo sapien
cccacaggacccgacagcctggact

SEQ ID NO: 5827866 - DNA, 25 bp, Homo sapien
tcggtgaccgggacaggtccgagac

SEQ ID NO: 5827867 - DNA, 25 bp, Homo sapien
gtctcggacctgtcccggtcaccga

SEQ ID NO: 5827868 - DNA, 25 bp, Homo sapien
gatccccacacgtccggacgctccc

SEQ ID NO: 5827869 - DNA, 25 bp, Homo sapien
gggagcgtccggacgtgtggggatc

SEQ ID NO: 5827870 - DNA, 25 bp, Homo sapien
atagtacacagtcagcgtaagaaag

SEQ ID NO: 5827871 - DNA, 25 bp, Homo sapien
ctttcttacgctgactgtgtactat

SEQ ID NO: 5827872 - DNA, 25 bp, Homo sapien
ttgttcaaagagatatagtacacag

SEQ ID NO: 5827873 - DNA, 25 bp, Homo sapien
ctgtgtactatatctctttgaacaa

SEQ ID NO: 5827874 - DNA, 25 bp, Homo sapien
agactctatatcactttgacataaa

SEQ ID NO: 5827875 - DNA, 25 bp, Homo sapien
tttatgtcaaagtgatatagagtct

SEQ ID NO: 5827876 - DNA, 25 bp, Homo sapien
cgtggagaccgttcggactgttccg

SEQ ID NO: 5827877 - DNA, 25 bp, Homo sapien
cggaacagtccgaacggtctccacg

SEQ ID NO: 5827878 - DNA, 25 bp, Homo sapien
aaagattcccgacacttagacttcg

SEQ ID NO: 5827879 - DNA, 25 bp, Homo sapien
cgaagtctaagtgtcgggaatcttt

SEQ ID NO: 5827880 - DNA, 25 bp, Homo sapien
gcgacgcggcgaaagggaccgcgcg

SEQ ID NO: 5827881 - DNA, 25 bp, Homo sapien
cgcgcggtccctttcgccgcgtcgc

SEQ ID NO: 5827882 - DNA, 25 bp, Homo sapien
cgcgcgcccagagccggcgtggacc

SEQ ID NO: 5827883 - DNA, 25 bp, Homo sapien
ggtccacgccggctctgggcgcgcg

SEQ ID NO: 5827884 - DNA, 25 bp, Homo sapien
cggcgaaagggaccgcgcgcccaga

SEQ ID NO: 5827885 - DNA, 25 bp, Homo sapien
tctgggcgcgcggtccctttcgccg

SEQ ID NO: 5827886 - DNA, 25 bp, Homo sapien
ttcaaatgtcacaccggcagagccg

SEQ ID NO: 5827887 - DNA, 25 bp, Homo sapien
cggctctgccggtgtgacatttgaa

SEQ ID NO: 5827888 - DNA, 25 bp, Homo sapien
gaaacttcacctcgatcgttgcagt

SEQ ID NO: 5827889 - DNA, 25 bp, Homo sapien
actgcaacgatcgaggtgaagtttc

SEQ ID NO: 5827890 - DNA, 25 bp, Homo sapien
tctttacgaagaattgggaatagag

SEQ ID NO: 5827891 - DNA, 25 bp, Homo sapien
ctctattcccaattcttcgtaaaga

SEQ ID NO: 5827892 - DNA, 25 bp, Homo sapien
ccctcatctcgtcccgccctcctgc

SEQ ID NO: 5827893 - DNA, 25 bp, Homo sapien
gcaggagggcgggacgagatgaggg

SEQ ID NO: 5827894 - DNA, 25 bp, Homo sapien
gaacgtgactagatcgtcaccgtga

SEQ ID NO: 5827895 - DNA, 25 bp, Homo sapien
tcacggtgacgatctagtcacgttc

SEQ ID NO: 5827896 - DNA, 25 bp, Homo sapien
gtctccttatccactgaatcttaga

SEQ ID NO: 5827897 - DNA, 25 bp, Homo sapien
tctaagattcagtggataaggagac

SEQ ID NO: 5827898 - DNA, 25 bp, Homo sapien
gaccatgtgggcgggaccacccaca

SEQ ID NO: 5827899 - DNA, 25 bp, Homo sapien
tgtgggtggtcccgcccacatggtc

SEQ ID NO: 5827900 - DNA, 25 bp, Homo sapien
tccgactggccggtcaaccccccga

SEQ ID NO: 5827901 - DNA, 25 bp, Homo sapien
tcggggggttgaccggccagtcgga

SEQ ID NO: 5827902 - DNA, 25 bp, Homo sapien
acaaaggtagaagtattgggaatcg

SEQ ID NO: 5827903 - DNA, 25 bp, Homo sapien
cgattcccaatacttctacctttgt

SEQ ID NO: 5827904 - DNA, 25 bp, Homo sapien
gaaaaggagaagacggacgtggtct

SEQ ID NO: 5827905 - DNA, 25 bp, Homo sapien
agaccacgtccgtcttctccttttc

SEQ ID NO: 5827906 - DNA, 25 bp, Homo sapien
agaaaagatgatatcttggattatt

SEQ ID NO: 5827907 - DNA, 25 bp, Homo sapien
aataatccaagatatcatcttttct

SEQ ID NO: 5827908 - DNA, 25 bp, Homo sapien
gtggttttagtcctgaccttgattg

SEQ ID NO: 5827909 - DNA, 25 bp, Homo sapien
caatcaaggtcaggactaaaaccac

SEQ ID NO: 5827910 - DNA, 25 bp, Homo sapien
gtcttctcggtacagggtcttttcc

SEQ ID NO: 5827911 - DNA, 25 bp, Homo sapien
ggaaaagaccctgtaccgagaagac

SEQ ID NO: 5827912 - DNA, 25 bp, Homo sapien
aataaaactataggaccttctattg

SEQ ID NO: 5827913 - DNA, 25 bp, Homo sapien
caatagaaggtcctatagttttatt

SEQ ID NO: 5827914 - DNA, 25 bp, Homo sapien
gtagtaatcgtatttcaacggcatt

SEQ ID NO: 5827915 - DNA, 25 bp, Homo sapien
aatgccgttgaaatacgattactac

SEQ ID NO: 5827916 - DNA, 25 bp, Homo sapien
gactctactttgtcccgcctgtggg

SEQ ID NO: 5827917 - DNA, 25 bp, Homo sapien
cccacaggcgggacaaagtagagtc

SEQ ID NO: 5827918 - DNA, 25 bp, Homo sapien
gccgtaactgggtccccacggtgca

SEQ ID NO: 5827919 - DNA, 25 bp, Homo sapien
tgcaccgtggggacccagttacggc

SEQ ID NO: 5827920 - DNA, 25 bp, Homo sapien
cggctgcgggcggagccgcgcgtgt

SEQ ID NO: 5827921 - DNA, 25 bp, Homo sapien
acacgcgcggctccgcccgcagccg

SEQ ID NO: 5827922 - DNA, 25 bp, Homo sapien
gggcctcgccggctgcgggcggagc

SEQ ID NO: 5827923 - DNA, 25 bp, Homo sapien
gctccgcccgcagccggcgaggccc

SEQ ID NO: 5827924 - DNA, 25 bp, Homo sapien
gggctcgggcctcgccggctgcggg

SEQ ID NO: 5827925 - DNA, 25 bp, Homo sapien
cccgcagccggcgaggcccgagccc

SEQ ID NO: 5827926 - DNA, 25 bp, Homo sapien
tacccgtgtcgggcggtggggagtc

SEQ ID NO: 5827927 - DNA, 25 bp, Homo sapien
gactccccaccgcccgacacgggta

SEQ ID NO: 5827928 - DNA, 25 bp, Homo sapien
gaggtaatttctaaacatcgacaat

SEQ ID NO: 5827929 - DNA, 25 bp, Homo sapien
attgtcgatgtttagaaattacctc

SEQ ID NO: 5827930 - DNA, 25 bp, Homo sapien
ccctcctgcgtccgtgggggcgtcg

SEQ ID NO: 5827931 - DNA, 25 bp, Homo sapien
cgacgcccccacggacgcaggaggg

SEQ ID NO: 5827932 - DNA, 25 bp, Homo sapien
ctcccctcctgcgtccgtgggggcg

SEQ ID NO: 5827933 - DNA, 25 bp, Homo sapien
cgcccccacggacgcaggaggggag

SEQ ID NO: 5827934 - DNA, 25 bp, Homo sapien
cctcctgcgtccgtgggggcgtcgg

SEQ ID NO: 5827935 - DNA, 25 bp, Homo sapien
ccgacgcccccacggacgcaggagg

SEQ ID NO: 5827936 - DNA, 25 bp, Homo sapien
gacgtctatggggagagggtccacg

SEQ ID NO: 5827937 - DNA, 25 bp, Homo sapien
cgtggaccctctccccatagacgtc

SEQ ID NO: 5827938 - DNA, 25 bp, Homo sapien
ggaacacccacggacgaacgtcaag

SEQ ID NO: 5827939 - DNA, 25 bp, Homo sapien
cttgacgttcgtccgtgggtgttcc

SEQ ID NO: 5827940 - DNA, 25 bp, Homo sapien
cgtgcgtcggccgactcccacgccc

SEQ ID NO: 5827941 - DNA, 25 bp, Homo sapien
gggcgtgggagtcggccgacgcacg

SEQ ID NO: 5827942 - DNA, 25 bp, Homo sapien
ccggcacgtcctcctgatgacgggt

SEQ ID NO: 5827943 - DNA, 25 bp, Homo sapien
acccgtcatcaggaggacgtgccgg

SEQ ID NO: 5827944 - DNA, 25 bp, Homo sapien
tcccggcacgtcctcctgatgacgg

SEQ ID NO: 5827945 - DNA, 25 bp, Homo sapien
ccgtcatcaggaggacgtgccggga

SEQ ID NO: 5827946 - DNA, 25 bp, Homo sapien
tcggttgtgtgcgtattgcagacag

SEQ ID NO: 5827947 - DNA, 25 bp, Homo sapien
ctgtctgcaatacgcacacaaccga

SEQ ID NO: 5827948 - DNA, 25 bp, Homo sapien
tccagagacttgacaatagagtcat

SEQ ID NO: 5827949 - DNA, 25 bp, Homo sapien
atgactctattgtcaagtctctgga

SEQ ID NO: 5827950 - DNA, 25 bp, Homo sapien
tttcacaataagaaacgttgtctac

SEQ ID NO: 5827951 - DNA, 25 bp, Homo sapien
gtagacaacgtttcttattgtgaaa

SEQ ID NO: 5827952 - DNA, 25 bp, Homo sapien
gacgaccgagttttgctgaaatcaa

SEQ ID NO: 5827953 - DNA, 25 bp, Homo sapien
ttgatttcagcaaaactcggtcgtc

SEQ ID NO: 5827954 - DNA, 25 bp, Homo sapien
aagaaatggactagggaaactgtag

SEQ ID NO: 5827955 - DNA, 25 bp, Homo sapien
ctacagtttccctagtccatttctt

SEQ ID NO: 5827956 - DNA, 25 bp, Homo sapien
tcgatgaaatagtacttgacttata

SEQ ID NO: 5827957 - DNA, 25 bp, Homo sapien
tataagtcaagtactatttcatcga

SEQ ID NO: 5827958 - DNA, 25 bp, Homo sapien
gatgtagttgcccagctcccgaagc

SEQ ID NO: 5827959 - DNA, 25 bp, Homo sapien
gcttcgggagctgggcaactacatc

SEQ ID NO: 5827960 - DNA, 25 bp, Homo sapien
aaggttgatcatacgtcgcacggac

SEQ ID NO: 5827961 - DNA, 25 bp, Homo sapien
gtccgtgcgacgtatgatcaacctt

SEQ ID NO: 5827962 - DNA, 25 bp, Homo sapien
attatttcttgtttcaacatatcgt

SEQ ID NO: 5827963 - DNA, 25 bp, Homo sapien
acgatatgttgaaacaagaaataat

SEQ ID NO: 5827964 - DNA, 25 bp, Homo sapien
gtgagattcgaattaaagaaaatcc

SEQ ID NO: 5827965 - DNA, 25 bp, Homo sapien
ggattttctttaattcgaatctcac

SEQ ID NO: 5827966 - DNA, 25 bp, Homo sapien
gacaaaccagtcgtcaccagggtca

SEQ ID NO: 5827967 - DNA, 25 bp, Homo sapien
tgaccctggtgacgactggtttgtc

SEQ ID NO: 5827968 - DNA, 25 bp, Homo sapien
agacctttcgagtgttacgtcagta

SEQ ID NO: 5827969 - DNA, 25 bp, Homo sapien
tactgacgtaacactcgaaaggtct

SEQ ID NO: 5827970 - DNA, 25 bp, Homo sapien
gacaaattatttattggttttatat

SEQ ID NO: 5827971 - DNA, 25 bp, Homo sapien
atataaaaccaataaataatttgtc

SEQ ID NO: 5827972 - DNA, 25 bp, Homo sapien
ggtcgacggacaaattattacatgt

SEQ ID NO: 5827973 - DNA, 25 bp, Homo sapien
acatgtaataatttgtccgtcgacc

SEQ ID NO: 5827974 - DNA, 25 bp, Homo sapien
ggggcggcgcgccggtgcggtcggt

SEQ ID NO: 5827975 - DNA, 25 bp, Homo sapien
accgaccgcaccggcgcgccgcccc

SEQ ID NO: 5827976 - DNA, 25 bp, Homo sapien
gcgctaaccgtgccggggcggcgcg

SEQ ID NO: 5827977 - DNA, 25 bp, Homo sapien
cgcgccgccccggcacggttagcgc

SEQ ID NO: 5827978 - DNA, 25 bp, Homo sapien
cgcgctaaccgtgccggggcggcgc

SEQ ID NO: 5827979 - DNA, 25 bp, Homo sapien
gcgccgccccggcacggttagcgcg

SEQ ID NO: 5827980 - DNA, 25 bp, Homo sapien
gggcggcgcgccggtgcggtcggta

SEQ ID NO: 5827981 - DNA, 25 bp, Homo sapien
taccgaccgcaccggcgcgccgccc

SEQ ID NO: 5827982 - DNA, 25 bp, Homo sapien
gcacgcttcagggcgtcgtcgcgcg

SEQ ID NO: 5827983 - DNA, 25 bp, Homo sapien
cgcgcgacgacgccctgaagcgtgc

SEQ ID NO: 5827984 - DNA, 25 bp, Homo sapien
ccttctactacagagactacattag

SEQ ID NO: 5827985 - DNA, 25 bp, Homo sapien
ctaatgtagtctctgtagtagaagg

SEQ ID NO: 5827986 - DNA, 25 bp, Homo sapien
cgcgaggcggggcggtgtctcaggg

SEQ ID NO: 5827987 - DNA, 25 bp, Homo sapien
ccctgagacaccgccccgcctcgcg

SEQ ID NO: 5827988 - DNA, 25 bp, Homo sapien
gagggccgcaggccgctcgcgggcc

SEQ ID NO: 5827989 - DNA, 25 bp, Homo sapien
ggcccgcgagcggcctgcggccctc

SEQ ID NO: 5827990 - DNA, 25 bp, Homo sapien
gttctgggagctacgaaggtacttc

SEQ ID NO: 5827991 - DNA, 25 bp, Homo sapien
gaagtaccttcgtagctcccagaac

SEQ ID NO: 5827992 - DNA, 25 bp, Homo sapien
aagtaccaatcttaactataattgg

SEQ ID NO: 5827993 - DNA, 25 bp, Homo sapien
ccaattatagttaagattggtactt

SEQ ID NO: 5827994 - DNA, 25 bp, Homo sapien
gataaaagtaccaatcttaactata

SEQ ID NO: 5827995 - DNA, 25 bp, Homo sapien
tatagttaagattggtacttttatc

SEQ ID NO: 5827996 - DNA, 25 bp, Homo sapien
tatacgaacaagcaaaagtatcgat

SEQ ID NO: 5827997 - DNA, 25 bp, Homo sapien
atcgatacttttgcttgttcgtata

SEQ ID NO: 5827998 - DNA, 25 bp, Homo sapien
ctattatgaaaatctcggtgcccct

SEQ ID NO: 5827999 - DNA, 25 bp, Homo sapien
aggggcaccgagattttcataatag

SEQ ID NO: 5828000 - DNA, 25 bp, Homo sapien
aacctactctgttgcgattgtaacg

SEQ ID NO: 5828001 - DNA, 25 bp, Homo sapien
cgttacaatcgcaacagagtaggtt

SEQ ID NO: 5828002 - DNA, 25 bp, Homo sapien
cacactgggtccagttccacaaact

SEQ ID NO: 5828003 - DNA, 25 bp, Homo sapien
agtttgtggaactggacccagtgtg

SEQ ID NO: 5828004 - DNA, 25 bp, Homo sapien
ctaagaatgtgagacaaccagattg

SEQ ID NO: 5828005 - DNA, 25 bp, Homo sapien
caatctggttgtctcacattcttag

SEQ ID NO: 5828006 - DNA, 25 bp, Homo sapien
agtttatatcttgaacactaaaagt

SEQ ID NO: 5828007 - DNA, 25 bp, Homo sapien
acttttagtgttcaagatataaact

SEQ ID NO: 5828008 - DNA, 25 bp, Homo sapien
cggggcgcgtaccatgccggcggct

SEQ ID NO: 5828009 - DNA, 25 bp, Homo sapien
agccgccggcatggtacgcgccccg

SEQ ID NO: 5828010 - DNA, 25 bp, Homo sapien
cggggtgcgaaagtcgagaactcct

SEQ ID NO: 5828011 - DNA, 25 bp, Homo sapien
aggagttctcgactttcgcaccccg

SEQ ID NO: 5828012 - DNA, 25 bp, Homo sapien
acggcctctggggcatacgagtaca

SEQ ID NO: 5828013 - DNA, 25 bp, Homo sapien
tgtactcgtatgccccagaggccgt

SEQ ID NO: 5828014 - DNA, 25 bp, Homo sapien
cccgtgaacagagatgaggaccgcg

SEQ ID NO: 5828015 - DNA, 25 bp, Homo sapien
cgcggtcctcatctctgttcacggg

SEQ ID NO: 5828016 - DNA, 25 bp, Homo sapien
accttctagggacacaagtcaccgg

SEQ ID NO: 5828017 - DNA, 25 bp, Homo sapien
ccggtgacttgtgtccctagaaggt

SEQ ID NO: 5828018 - DNA, 25 bp, Homo sapien
caaggggcttccagcgaatcacacg

SEQ ID NO: 5828019 - DNA, 25 bp, Homo sapien
cgtgtgattcgctggaagccccttg

SEQ ID NO: 5828020 - DNA, 25 bp, Homo sapien
ccagaggaacggaaaaacagcggta

SEQ ID NO: 5828021 - DNA, 25 bp, Homo sapien
taccgctgtttttccgttcctctgg

SEQ ID NO: 5828022 - DNA, 25 bp, Homo sapien
gccagaggaacggaaaaacagcggt

SEQ ID NO: 5828023 - DNA, 25 bp, Homo sapien
accgctgtttttccgttcctctggc

SEQ ID NO: 5828024 - DNA, 25 bp, Homo sapien
ctcctccatagtgtcttagttctac

SEQ ID NO: 5828025 - DNA, 25 bp, Homo sapien
gtagaactaagacactatggaggag

SEQ ID NO: 5828026 - DNA, 25 bp, Homo sapien
ttaagaacatgagaacaaggtgact

SEQ ID NO: 5828027 - DNA, 25 bp, Homo sapien
agtcaccttgttctcatgttcttaa

SEQ ID NO: 5828028 - DNA, 25 bp, Homo sapien
ggcacagatcccagaccctcgggta

SEQ ID NO: 5828029 - DNA, 25 bp, Homo sapien
tacccgagggtctgggatctgtgcc

SEQ ID NO: 5828030 - DNA, 25 bp, Homo sapien
gaccgtcgcaagaccccgactcgtc

SEQ ID NO: 5828031 - DNA, 25 bp, Homo sapien
gacgagtcggggtcttgcgacggtc

SEQ ID NO: 5828032 - DNA, 25 bp, Homo sapien
gacatagagaaagttaagcgagatt

SEQ ID NO: 5828033 - DNA, 25 bp, Homo sapien
aatctcgcttaactttctctatgtc

SEQ ID NO: 5828034 - DNA, 25 bp, Homo sapien
aggacccaatatctagttttctttg

SEQ ID NO: 5828035 - DNA, 25 bp, Homo sapien
caaagaaaactagatattgggtcct

SEQ ID NO: 5828036 - DNA, 25 bp, Homo sapien
aacactgatttaagaagaagtaagt

SEQ ID NO: 5828037 - DNA, 25 bp, Homo sapien
acttacttcttcttaaatcagtgtt

SEQ ID NO: 5828038 - DNA, 25 bp, Homo sapien
gtacctataacacaaatccaacatt

SEQ ID NO: 5828039 - DNA, 25 bp, Homo sapien
aatgttggatttgtgttataggtac

SEQ ID NO: 5828040 - DNA, 25 bp, Homo sapien
agactcactttgacttccggctgac

SEQ ID NO: 5828041 - DNA, 25 bp, Homo sapien
gtcagccggaagtcaaagtgagtct

SEQ ID NO: 5828042 - DNA, 25 bp, Homo sapien
ccctgactcctgtatgtttagtatt

SEQ ID NO: 5828043 - DNA, 25 bp, Homo sapien
aatactaaacatacaggagtcaggg

SEQ ID NO: 5828044 - DNA, 25 bp, Homo sapien
gggagaaagaaggtggcgagacagg

SEQ ID NO: 5828045 - DNA, 25 bp, Homo sapien
cctgtctcgccaccttctttctccc

SEQ ID NO: 5828046 - DNA, 25 bp, Homo sapien
gacaaggacgacaagttcttttata

SEQ ID NO: 5828047 - DNA, 25 bp, Homo sapien
tataaaagaacttgtcgtccttgtc

SEQ ID NO: 5828048 - DNA, 25 bp, Homo sapien
ctatttccgggacctcggccagagg

SEQ ID NO: 5828049 - DNA, 25 bp, Homo sapien
cctctggccgaggtcccggaaatag

SEQ ID NO: 5828050 - DNA, 25 bp, Homo sapien
catgcaaatattgagtaccgtcgac

SEQ ID NO: 5828051 - DNA, 25 bp, Homo sapien
gtcgacggtactcaatatttgcatg

SEQ ID NO: 5828052 - DNA, 25 bp, Homo sapien
cggaccggccgcacgtgacgtatgc

SEQ ID NO: 5828053 - DNA, 25 bp, Homo sapien
gcatacgtcacgtgcggccggtccg

SEQ ID NO: 5828054 - DNA, 25 bp, Homo sapien
gaggcgaggtcggtaggctccatta

SEQ ID NO: 5828055 - DNA, 25 bp, Homo sapien
taatggagcctaccgacctcgcctc

SEQ ID NO: 5828056 - DNA, 25 bp, Homo sapien
gcttcggctcacgcgcggtggcggg

SEQ ID NO: 5828057 - DNA, 25 bp, Homo sapien
cccgccaccgcgcgtgagccgaagc

SEQ ID NO: 5828058 - DNA, 25 bp, Homo sapien
gcgctccttggcacgtcgggtcgcg

SEQ ID NO: 5828059 - DNA, 25 bp, Homo sapien
cgcgacccgacgtgccaaggagcgc

SEQ ID NO: 5828060 - DNA, 25 bp, Homo sapien
agatcgagtctttgcaattataaag

SEQ ID NO: 5828061 - DNA, 25 bp, Homo sapien
ctttataattgcaaagactcgatct

SEQ ID NO: 5828062 - DNA, 25 bp, Homo sapien
cgggtgtttcgatggctttaggtca

SEQ ID NO: 5828063 - DNA, 25 bp, Homo sapien
tgacctaaagccatcgaaacacccg

SEQ ID NO: 5828064 - DNA, 25 bp, Homo sapien
gttttttcagtcactatgtcacttg

SEQ ID NO: 5828065 - DNA, 25 bp, Homo sapien
caagtgacatagtgactgaaaaaac

SEQ ID NO: 5828066 - DNA, 25 bp, Homo sapien
cgccgcgtccccagcacctctccgg

SEQ ID NO: 5828067 - DNA, 25 bp, Homo sapien
ccggagaggtgctggggacgcggcg

SEQ ID NO: 5828068 - DNA, 25 bp, Homo sapien
ggaacgactaataccttaagtgtat

SEQ ID NO: 5828069 - DNA, 25 bp, Homo sapien
atacacttaaggtattagtcgttcc

SEQ ID NO: 5828070 - DNA, 25 bp, Homo sapien
gaggtgccggggacgcctccggcag

SEQ ID NO: 5828071 - DNA, 25 bp, Homo sapien
ctgccggaggcgtccccggcacctc

SEQ ID NO: 5828072 - DNA, 25 bp, Homo sapien
tcaaacgtgtccattaagtagtagg

SEQ ID NO: 5828073 - DNA, 25 bp, Homo sapien
cctactacttaatggacacgtttga

SEQ ID NO: 5828074 - DNA, 25 bp, Homo sapien
tctatagtagtgatagtgtagatag

SEQ ID NO: 5828075 - DNA, 25 bp, Homo sapien
ctatctacactatcactactataga

SEQ ID NO: 5828076 - DNA, 25 bp, Homo sapien
gtcacgcgtgggtcaatctacccct

SEQ ID NO: 5828077 - DNA, 25 bp, Homo sapien
aggggtagattgacccacgcgtgac

SEQ ID NO: 5828078 - DNA, 25 bp, Homo sapien
agtaatcaggacacgggtagaaggc

SEQ ID NO: 5828079 - DNA, 25 bp, Homo sapien
gccttctacccgtgtcctgattact

SEQ ID NO: 5828080 - DNA, 25 bp, Homo sapien
caaaggtaattcagaggagacccgg

SEQ ID NO: 5828081 - DNA, 25 bp, Homo sapien
ccgggtctcctctgaattacctttg

SEQ ID NO: 5828082 - DNA, 25 bp, Homo sapien
aggcgcggtcactcgcgccgacgac

SEQ ID NO: 5828083 - DNA, 25 bp, Homo sapien
gtcgtcggcgcgagtgaccgcgcct

SEQ ID NO: 5828084 - DNA, 25 bp, Homo sapien
gcccaggcgcggtcactcgcgccga

SEQ ID NO: 5828085 - DNA, 25 bp, Homo sapien
tcggcgcgagtgaccgcgcctgggc

SEQ ID NO: 5828086 - DNA, 25 bp, Homo sapien
gcggactcggcgaggcccaggcgcg

SEQ ID NO: 5828087 - DNA, 25 bp, Homo sapien
cgcgcctgggcctcgccgagtccgc

SEQ ID NO: 5828088 - DNA, 25 bp, Homo sapien
gcagggccccactcgcggactcggc

SEQ ID NO: 5828089 - DNA, 25 bp, Homo sapien
gccgagtccgcgagtggggccctgc

SEQ ID NO: 5828090 - DNA, 25 bp, Homo sapien
aagattacccgttgtttatgattcg

SEQ ID NO: 5828091 - DNA, 25 bp, Homo sapien
cgaatcataaacaacgggtaatctt

SEQ ID NO: 5828092 - DNA, 25 bp, Homo sapien
ccgcaaacgtttctcgagaaaagta

SEQ ID NO: 5828093 - DNA, 25 bp, Homo sapien
tacttttctcgagaaacgtttgcgg

SEQ ID NO: 5828094 - DNA, 25 bp, Homo sapien
gtagtaccccgactcctgcggtcgt

SEQ ID NO: 5828095 - DNA, 25 bp, Homo sapien
acgaccgcaggagtcggggtactac

SEQ ID NO: 5828096 - DNA, 25 bp, Homo sapien
cactgtcccctatattcactataat

SEQ ID NO: 5828097 - DNA, 25 bp, Homo sapien
attatagtgaatataggggacagtg

SEQ ID NO: 5828098 - DNA, 25 bp, Homo sapien
tgtgagcggtactcttggagaaaaa

SEQ ID NO: 5828099 - DNA, 25 bp, Homo sapien
tttttctccaagagtaccgctcaca

SEQ ID NO: 5828100 - DNA, 25 bp, Homo sapien
ctacgaaagcgaagacctcaaaact

SEQ ID NO: 5828101 - DNA, 25 bp, Homo sapien
agttttgaggtcttcgctttcgtag

SEQ ID NO: 5828102 - DNA, 25 bp, Homo sapien
tcccctactcccacatgggctggcg

SEQ ID NO: 5828103 - DNA, 25 bp, Homo sapien
cgccagcccatgtgggagtagggga

SEQ ID NO: 5828104 - DNA, 25 bp, Homo sapien
tagtttgtttctcagtggagaaagt

SEQ ID NO: 5828105 - DNA, 25 bp, Homo sapien
actttctccactgagaaacaaacta

SEQ ID NO: 5828106 - DNA, 25 bp, Homo sapien
tccgttccgcgtaggcgtccactga

SEQ ID NO: 5828107 - DNA, 25 bp, Homo sapien
tcagtggacgcctacgcggaacgga

SEQ ID NO: 5828108 - DNA, 25 bp, Homo sapien
gacccctgcacccagcccggcgcag

SEQ ID NO: 5828109 - DNA, 25 bp, Homo sapien
ctgcgccgggctgggtgcaggggtc

SEQ ID NO: 5828110 - DNA, 25 bp, Homo sapien
agtcttaatcaaagtctaactataa

SEQ ID NO: 5828111 - DNA, 25 bp, Homo sapien
ttatagttagactttgattaagact

SEQ ID NO: 5828112 - DNA, 25 bp, Homo sapien
ggtcaggcgggagcaaggcccgatt

SEQ ID NO: 5828113 - DNA, 25 bp, Homo sapien
aatcgggccttgctcccgcctgacc

SEQ ID NO: 5828114 - DNA, 25 bp, Homo sapien
caaagtcgtgagtaggccgacggaa

SEQ ID NO: 5828115 - DNA, 25 bp, Homo sapien
ttccgtcggcctactcacgactttg

SEQ ID NO: 5828116 - DNA, 25 bp, Homo sapien
acaggaccttgttcttcctcgtgac

SEQ ID NO: 5828117 - DNA, 25 bp, Homo sapien
gtcacgaggaagaacaaggtcctgt

SEQ ID NO: 5828118 - DNA, 25 bp, Homo sapien
acacacccggagagtcacttatgtt

SEQ ID NO: 5828119 - DNA, 25 bp, Homo sapien
aacataagtgactctccgggtgtgt

SEQ ID NO: 5828120 - DNA, 25 bp, Homo sapien
ccgtctactcgagggtgtgaggaca

SEQ ID NO: 5828121 - DNA, 25 bp, Homo sapien
tgtcctcacaccctcgagtagacgg

SEQ ID NO: 5828122 - DNA, 25 bp, Homo sapien
ccactggaagcgacgggtgcatcta

SEQ ID NO: 5828123 - DNA, 25 bp, Homo sapien
tagatgcacccgtcgcttccagtgg

SEQ ID NO: 5828124 - DNA, 25 bp, Homo sapien
acctcgtcagagtatctcgtaccta

SEQ ID NO: 5828125 - DNA, 25 bp, Homo sapien
taggtacgagatactctgacgaggt

SEQ ID NO: 5828126 - DNA, 25 bp, Homo sapien
cagtgtcattggaccctggcgtccg

SEQ ID NO: 5828127 - DNA, 25 bp, Homo sapien
cggacgccagggtccaatgacactg

SEQ ID NO: 5828128 - DNA, 25 bp, Homo sapien
tcccctccctgtcgcgctacgtgag

SEQ ID NO: 5828129 - DNA, 25 bp, Homo sapien
ctcacgtagcgcgacagggagggga

SEQ ID NO: 5828130 - DNA, 25 bp, Homo sapien
tatatataagggtgtagacatatgt

SEQ ID NO: 5828131 - DNA, 25 bp, Homo sapien
acatatgtctacacccttatatata

SEQ ID NO: 5828132 - DNA, 25 bp, Homo sapien
tcctcccccgccggtcccaggcacg

SEQ ID NO: 5828133 - DNA, 25 bp, Homo sapien
cgtgcctgggaccggcgggggagga

SEQ ID NO: 5828134 - DNA, 25 bp, Homo sapien
gactcctcccccgccggtcccaggc

SEQ ID NO: 5828135 - DNA, 25 bp, Homo sapien
gcctgggaccggcgggggaggagtc

SEQ ID NO: 5828136 - DNA, 25 bp, Homo sapien
taaaactatagtacttgttaactat

SEQ ID NO: 5828137 - DNA, 25 bp, Homo sapien
atagttaacaagtactatagtttta

SEQ ID NO: 5828138 - DNA, 25 bp, Homo sapien
aagaagtttatgagcggacaaagat

SEQ ID NO: 5828139 - DNA, 25 bp, Homo sapien
atctttgtccgctcataaacttctt

SEQ ID NO: 5828140 - DNA, 25 bp, Homo sapien
acttcagagaagtgatacacggttt

SEQ ID NO: 5828141 - DNA, 25 bp, Homo sapien
aaaccgtgtatcacttctctgaagt

SEQ ID NO: 5828142 - DNA, 25 bp, Homo sapien
actcgcgacccggtccttcgaagga

SEQ ID NO: 5828143 - DNA, 25 bp, Homo sapien
tccttcgaaggaccgggtcgcgagt

SEQ ID NO: 5828144 - DNA, 25 bp, Homo sapien
taggactagacatagtatggtttac

SEQ ID NO: 5828145 - DNA, 25 bp, Homo sapien
gtaaaccatactatgtctagtccta

SEQ ID NO: 5828146 - DNA, 25 bp, Homo sapien
gtccgccggcagcggtccgccccgt

SEQ ID NO: 5828147 - DNA, 25 bp, Homo sapien
acggggcggaccgctgccggcggac

SEQ ID NO: 5828148 - DNA, 25 bp, Homo sapien
gcggccggccgaccgcgtcaggaca

SEQ ID NO: 5828149 - DNA, 25 bp, Homo sapien
tgtcctgacgcggtcggccggccgc

SEQ ID NO: 5828150 - DNA, 25 bp, Homo sapien
tataaagaacaaaagatgcacaaag

SEQ ID NO: 5828151 - DNA, 25 bp, Homo sapien
ctttgtgcatcttttgttctttata

SEQ ID NO: 5828152 - DNA, 25 bp, Homo sapien
cggacggaagagagcggcggccctt

SEQ ID NO: 5828153 - DNA, 25 bp, Homo sapien
aagggccgccgctctcttccgtccg

SEQ ID NO: 5828154 - DNA, 25 bp, Homo sapien
ttaacttagtccccataaacaataa

SEQ ID NO: 5828155 - DNA, 25 bp, Homo sapien
ttattgtttatggggactaagttaa

SEQ ID NO: 5828156 - DNA, 25 bp, Homo sapien
ggcccagcggatggacagaaaataa

SEQ ID NO: 5828157 - DNA, 25 bp, Homo sapien
aatgcagacaaaaggagaccgcaag

SEQ ID NO: 5828158 - DNA, 25 bp, Homo sapien
gcgctgctattgcaggcgcgaccgc

SEQ ID NO: 5828159 - DNA, 25 bp, Homo sapien
agggcccagcggatggacagaaaat

SEQ ID NO: 5828160 - DNA, 25 bp, Homo sapien
tgcagacaaaaggagaccgcaagtt

SEQ ID NO: 5828161 - DNA, 25 bp, Homo sapien
gcccagcggatggacagaaaataag

SEQ ID NO: 5828162 - DNA, 25 bp, Homo sapien
agacaaaaggagaccgcaagttcag

SEQ ID NO: 5828163 - DNA, 25 bp, Homo sapien
cagacaaaaggagaccgcaagttca

SEQ ID NO: 5828164 - DNA, 25 bp, Homo sapien
ggaaaatgcagacaaaaggagaccg

SEQ ID NO: 5828165 - DNA, 25 bp, Homo sapien
gggcccagcggatggacagaaaata

SEQ ID NO: 5828166 - DNA, 25 bp, Homo sapien
cgctgctattgcaggcgcgaccgcg

SEQ ID NO: 5828167 - DNA, 25 bp, Homo sapien
ccagcggatggacagaaaataagat

SEQ ID NO: 5828168 - DNA, 25 bp, Homo sapien
gcagacaaaaggagaccgcaagttc

SEQ ID NO: 5828169 - DNA, 25 bp, Homo sapien
gaaaatgcagacaaaaggagaccgc

SEQ ID NO: 5828170 - DNA, 25 bp, Homo sapien
cccagcggatggacagaaaataaga

SEQ ID NO: 5828171 - DNA, 25 bp, Homo sapien
atgcagacaaaaggagaccgcaagt

SEQ ID NO: 5828172 - DNA, 25 bp, Homo sapien
gtgaaattctataaggaagtgattc

SEQ ID NO: 5828173 - DNA, 25 bp, Homo sapien
gaatcacttccttatagaatttcac

SEQ ID NO: 5828174 - DNA, 25 bp, Homo sapien
agacggtcggagctgtccgggtcgg

SEQ ID NO: 5828175 - DNA, 25 bp, Homo sapien
ccgacccggacagctccgaccgtct

SEQ ID NO: 5828176 - DNA, 25 bp, Homo sapien
gacccacggccatggtccagggtga

SEQ ID NO: 5828177 - DNA, 25 bp, Homo sapien
tcaccctggaccatggccgtgggtc

SEQ ID NO: 5828178 - DNA, 25 bp, Homo sapien
tgtcatcaccgggtacccctgttcc

SEQ ID NO: 5828179 - DNA, 25 bp, Homo sapien
ggaacaggggtacccggtgatgaca

SEQ ID NO: 5828180 - DNA, 25 bp, Homo sapien
atactattactaaagattgtttctt

SEQ ID NO: 5828181 - DNA, 25 bp, Homo sapien
aagaaacaatctttagtaatagtat

SEQ ID NO: 5828182 - DNA, 25 bp, Homo sapien
aatactattactaaagattgtttct

SEQ ID NO: 5828183 - DNA, 25 bp, Homo sapien
agaaacaatctttagtaatagtatt

SEQ ID NO: 5828184 - DNA, 25 bp, Homo sapien
taatactattactaaagattgtttc

SEQ ID NO: 5828185 - DNA, 25 bp, Homo sapien
gaaacaatctttagtaatagtatta

SEQ ID NO: 5828186 - DNA, 25 bp, Homo sapien
ataatactattactaaagattgttt

SEQ ID NO: 5828187 - DNA, 25 bp, Homo sapien
aaacaatctttagtaatagtattat

SEQ ID NO: 5828188 - DNA, 25 bp, Homo sapien
gattatggtacatgtcgtgaacgtt

SEQ ID NO: 5828189 - DNA, 25 bp, Homo sapien
aacgttcacgacatgtaccataatc

SEQ ID NO: 5828190 - DNA, 25 bp, Homo sapien
ggacccggtactcggtgctccaagt

SEQ ID NO: 5828191 - DNA, 25 bp, Homo sapien
acttggagcaccgagtaccgggtcc

SEQ ID NO: 5828192 - DNA, 25 bp, Homo sapien
tacattgtccaaagaaaaatagaga

SEQ ID NO: 5828193 - DNA, 25 bp, Homo sapien
tctctatttttctttggacaatgta

SEQ ID NO: 5828194 - DNA, 25 bp, Homo sapien
gtcgtcccgggcttcagcgtcgacg

SEQ ID NO: 5828195 - DNA, 25 bp, Homo sapien
cgtcgacgctgaagcccgggacgac

SEQ ID NO: 5828196 - DNA, 25 bp, Homo sapien
attcgtctcatttgaaggtaaaaag

SEQ ID NO: 5828197 - DNA, 25 bp, Homo sapien
ctttttaccttcaaatgagacgaat

SEQ ID NO: 5828198 - DNA, 25 bp, Homo sapien
gtccccgctaggaggtgagcgagcg

SEQ ID NO: 5828199 - DNA, 25 bp, Homo sapien
cgctcgctcacctcctagcggggac

SEQ ID NO: 5828200 - DNA, 25 bp, Homo sapien
aaaagtctggacagactgtcccctt

SEQ ID NO: 5828201 - DNA, 25 bp, Homo sapien
aaggggacagtctgtccagactttt

SEQ ID NO: 5828202 - DNA, 25 bp, Homo sapien
gggacgaggacgccggagcgcaggg

SEQ ID NO: 5828203 - DNA, 25 bp, Homo sapien
ccctgcgctccggcgtcctcgtccc

SEQ ID NO: 5828204 - DNA, 25 bp, Homo sapien
tcagattttagtgttcttcatttct

SEQ ID NO: 5828205 - DNA, 25 bp, Homo sapien
agaaatgaagaacactaaaatctga

SEQ ID NO: 5828206 - DNA, 25 bp, Homo sapien
ccgcccggggtcgagtatgtcgaac

SEQ ID NO: 5828207 - DNA, 25 bp, Homo sapien
gttcgacatactcgaccccgggcgg

SEQ ID NO: 5828208 - DNA, 25 bp, Homo sapien
cccctcgcccgcacctggacgtcga

SEQ ID NO: 5828209 - DNA, 25 bp, Homo sapien
tcgacgtccaggtgcgggcgagggg

SEQ ID NO: 5828210 - DNA, 25 bp, Homo sapien
ccgttccacggactgactcgccccc

SEQ ID NO: 5828211 - DNA, 25 bp, Homo sapien
gggggcgagtcagtccgtggaacgg

SEQ ID NO: 5828212 - DNA, 25 bp, Homo sapien
tgtgggttacgattcatgtttcttt

SEQ ID NO: 5828213 - DNA, 25 bp, Homo sapien
aaagaaacatgaatcgtaacccaca

SEQ ID NO: 5828214 - DNA, 25 bp, Homo sapien
gacgtttgtgggagtctcctggcat

SEQ ID NO: 5828215 - DNA, 25 bp, Homo sapien
atgccaggagactcccacaaacgtc

SEQ ID NO: 5828216 - DNA, 25 bp, Homo sapien
ctcgactggcagtataggacacact

SEQ ID NO: 5828217 - DNA, 25 bp, Homo sapien
agtgtgtcctatactgccagtcgag

SEQ ID NO: 5828218 - DNA, 25 bp, Homo sapien
tcggtatcactggtcctccgaacca

SEQ ID NO: 5828219 - DNA, 25 bp, Homo sapien
tggttcggaggaccagtgataccga

SEQ ID NO: 5828220 - DNA, 25 bp, Homo sapien
cgacgtggtcctccctgccgcggcc

SEQ ID NO: 5828221 - DNA, 25 bp, Homo sapien
ggccgcggcagggaggaccacgtcg

SEQ ID NO: 5828222 - DNA, 25 bp, Homo sapien
ggaagatactaatctgtctcggagt

SEQ ID NO: 5828223 - DNA, 25 bp, Homo sapien
actccgagacagattagtatcttcc

SEQ ID NO: 5828224 - DNA, 25 bp, Homo sapien
gcaccaggtccgatgtagtcgtgac

SEQ ID NO: 5828225 - DNA, 25 bp, Homo sapien
gtcacgactacatcggacctggtgc

SEQ ID NO: 5828226 - DNA, 25 bp, Homo sapien
gacgccgacgcgtcctctgctgggg

SEQ ID NO: 5828227 - DNA, 25 bp, Homo sapien
ccccagcagaggacgcgtcggcgtc

SEQ ID NO: 5828228 - DNA, 25 bp, Homo sapien
gcagcgctctcctgcactacgcggg

SEQ ID NO: 5828229 - DNA, 25 bp, Homo sapien
cccgcgtagtgcaggagagcgctgc

SEQ ID NO: 5828230 - DNA, 25 bp, Homo sapien
aaaggtaatgataacaaccagtaac

SEQ ID NO: 5828231 - DNA, 25 bp, Homo sapien
gttactggttgttatcattaccttt

SEQ ID NO: 5828232 - DNA, 25 bp, Homo sapien
ccactgaggaggttcaggacgtccg

SEQ ID NO: 5828233 - DNA, 25 bp, Homo sapien
cggacgtcctgaacctcctcagtgg

SEQ ID NO: 5828234 - DNA, 25 bp, Homo sapien
gggtcggaagtcaccgcgccgcggg

SEQ ID NO: 5828235 - DNA, 25 bp, Homo sapien
cccgcggcgcggtgacttccgaccc

SEQ ID NO: 5828236 - DNA, 25 bp, Homo sapien
ccgtagggcctgaggccgcggcggg

SEQ ID NO: 5828237 - DNA, 25 bp, Homo sapien
cccgccgcggcctcaggccctacgg

SEQ ID NO: 5828238 - DNA, 25 bp, Homo sapien
cggccgtagggcctgaggccgcggc

SEQ ID NO: 5828239 - DNA, 25 bp, Homo sapien
gccgcggcctcaggccctacggccg

SEQ ID NO: 5828240 - DNA, 25 bp, Homo sapien
gtaacaataacgatttatacaataa

SEQ ID NO: 5828241 - DNA, 25 bp, Homo sapien
ttattgtataaatcgttattgttac

SEQ ID NO: 5828242 - DNA, 25 bp, Homo sapien
gatttgtaacaataacgatttatac

SEQ ID NO: 5828243 - DNA, 25 bp, Homo sapien
gtataaatcgttattgttacaaatc

SEQ ID NO: 5828244 - DNA, 25 bp, Homo sapien
ataacgatttatacaataacatttg

SEQ ID NO: 5828245 - DNA, 25 bp, Homo sapien
caaatgttattgtataaatcgttat

SEQ ID NO: 5828246 - DNA, 25 bp, Homo sapien
taacaataacgatttatacaataac

SEQ ID NO: 5828247 - DNA, 25 bp, Homo sapien
gttattgtataaatcgttattgtta

SEQ ID NO: 5828248 - DNA, 25 bp, Homo sapien
gggactcgaactacattactcagac

SEQ ID NO: 5828249 - DNA, 25 bp, Homo sapien
gtctgagtaatgtagttcgagtccc

SEQ ID NO: 5828250 - DNA, 25 bp, Homo sapien
gtctactggttcgaataatcccaat

SEQ ID NO: 5828251 - DNA, 25 bp, Homo sapien
attgggattattcgaaccagtagac

SEQ ID NO: 5828252 - DNA, 25 bp, Homo sapien
cgacatcgatgttataaggaaacgt

SEQ ID NO: 5828253 - DNA, 25 bp, Homo sapien
acgtttccttataacatcgatgtcg

SEQ ID NO: 5828254 - DNA, 25 bp, Homo sapien
atcttttccacaattagtcatataa

SEQ ID NO: 5828255 - DNA, 25 bp, Homo sapien
ttatatgactaattgtggaaaagat

SEQ ID NO: 5828256 - DNA, 25 bp, Homo sapien
cgtttcaggaaaagtattactatat

SEQ ID NO: 5828257 - DNA, 25 bp, Homo sapien
atatagtaatacttttcctgaaacg

SEQ ID NO: 5828258 - DNA, 25 bp, Homo sapien
cctacgggaatcgaaggacgctcct

SEQ ID NO: 5828259 - DNA, 25 bp, Homo sapien
aggagcgtccttcgattcccgtagg

SEQ ID NO: 5828260 - DNA, 25 bp, Homo sapien
ggtgtattgtaaacacttgtacggt

SEQ ID NO: 5828261 - DNA, 25 bp, Homo sapien
accgtacaagtgtttacaatacacc

SEQ ID NO: 5828262 - DNA, 25 bp, Homo sapien
tctaggccaactgtcaaaatcttgt

SEQ ID NO: 5828263 - DNA, 25 bp, Homo sapien
acaagattttgacagttggcctaga

SEQ ID NO: 5828264 - DNA, 25 bp, Homo sapien
tgcctggtaaacttattgacgacac

SEQ ID NO: 5828265 - DNA, 25 bp, Homo sapien
gtgtcgtcaataagtttaccaggca

SEQ ID NO: 5828266 - DNA, 25 bp, Homo sapien
aattaagagcatattaagtcgaaat

SEQ ID NO: 5828267 - DNA, 25 bp, Homo sapien
atttcgacttaatatgctcttaatt

SEQ ID NO: 5828268 - DNA, 25 bp, Homo sapien
gtgtctgaccacctgccgacgacgt

SEQ ID NO: 5828269 - DNA, 25 bp, Homo sapien
acgtcgtcggcaggtggtcagacac

SEQ ID NO: 5828270 - DNA, 25 bp, Homo sapien
gaagggcgagactttggacaatttc

SEQ ID NO: 5828271 - DNA, 25 bp, Homo sapien
gaaattgtccaaagtctcgcccttc

SEQ ID NO: 5828272 - DNA, 25 bp, Homo sapien
atcatttagaacttttctaagagat

SEQ ID NO: 5828273 - DNA, 25 bp, Homo sapien
atctcttagaaaagttctaaatgat

SEQ ID NO: 5828274 - DNA, 25 bp, Homo sapien
aagaagtgccgcctttacccagaca

SEQ ID NO: 5828275 - DNA, 25 bp, Homo sapien
tgtctgggtaaaggcggcacttctt

SEQ ID NO: 5828276 - DNA, 25 bp, Homo sapien
agcggggcaaccggcgccggtagcc

SEQ ID NO: 5828277 - DNA, 25 bp, Homo sapien
ggctaccggcgccggttgccccgct

SEQ ID NO: 5828278 - DNA, 25 bp, Homo sapien
gtgtggtatccctttttaccatttg

SEQ ID NO: 5828279 - DNA, 25 bp, Homo sapien
caaatggtaaaaagggataccacac

SEQ ID NO: 5828280 - DNA, 25 bp, Homo sapien
cgacgtgacttcatagagtcgaaga

SEQ ID NO: 5828281 - DNA, 25 bp, Homo sapien
tcttcgactctatgaagtcacgtcg

SEQ ID NO: 5828282 - DNA, 25 bp, Homo sapien
taaatatttcactttaatcgcggac

SEQ ID NO: 5828283 - DNA, 25 bp, Homo sapien
gtccgcgattaaagtgaaatattta

SEQ ID NO: 5828284 - DNA, 25 bp, Homo sapien
attttactcaacgaattataaacac

SEQ ID NO: 5828285 - DNA, 25 bp, Homo sapien
gtgtttataattcgttgagtaaaat

SEQ ID NO: 5828286 - DNA, 25 bp, Homo sapien
gactttcctcagggagaggggccct

SEQ ID NO: 5828287 - DNA, 25 bp, Homo sapien
agggcccctctccctgaggaaagtc

SEQ ID NO: 5828288 - DNA, 25 bp, Homo sapien
gacaatgttcactcccggtcgtcgg

SEQ ID NO: 5828289 - DNA, 25 bp, Homo sapien
ccgacgaccgggagtgaacattgtc

SEQ ID NO: 5828290 - DNA, 25 bp, Homo sapien
ctttcagttggacttgtacttgtaa

SEQ ID NO: 5828291 - DNA, 25 bp, Homo sapien
ttacaagtacaagtccaactgaaag

SEQ ID NO: 5828292 - DNA, 25 bp, Homo sapien
gtactaatctcagtctagaacttaa

SEQ ID NO: 5828293 - DNA, 25 bp, Homo sapien
ttaagttctagactgagattagtac

SEQ ID NO: 5828294 - DNA, 25 bp, Homo sapien
tacatagctcggtgcctgcaactgg

SEQ ID NO: 5828295 - DNA, 25 bp, Homo sapien
ccagttgcaggcaccgagctatgta

SEQ ID NO: 5828296 - DNA, 25 bp, Homo sapien
cgtctgcggtgctagaaggaccaag

SEQ ID NO: 5828297 - DNA, 25 bp, Homo sapien
cttggtccttctagcaccgcagacg

SEQ ID NO: 5828298 - DNA, 25 bp, Homo sapien
gagtcgtacggtttggagtccatct

SEQ ID NO: 5828299 - DNA, 25 bp, Homo sapien
agatggactccaaaccgtacgactc

SEQ ID NO: 5828300 - DNA, 25 bp, Homo sapien
tctctctccgaatgcctttacttac

SEQ ID NO: 5828301 - DNA, 25 bp, Homo sapien
gtaagtaaaggcattcggagagaga

SEQ ID NO: 5828302 - DNA, 25 bp, Homo sapien
gtgtattattaacagtaggagaaac

SEQ ID NO: 5828303 - DNA, 25 bp, Homo sapien
gtttctcctactgttaataatacac

SEQ ID NO: 5828304 - DNA, 25 bp, Homo sapien
tcgtggtcaggagcctgggacctcc

SEQ ID NO: 5828305 - DNA, 25 bp, Homo sapien
ggaggtcccaggctcctgaccacga

SEQ ID NO: 5828306 - DNA, 25 bp, Homo sapien
gtgataacattatattcgactgtgg

SEQ ID NO: 5828307 - DNA, 25 bp, Homo sapien
ccacagtcgaatataatgttatcac

SEQ ID NO: 5828308 - DNA, 25 bp, Homo sapien
aacatttttttcagaatactagtag

SEQ ID NO: 5828309 - DNA, 25 bp, Homo sapien
ctactagtattctgaaaaaaatgtt

SEQ ID NO: 5828310 - DNA, 25 bp, Homo sapien
gcaactgtagctctctacagtccaa

SEQ ID NO: 5828311 - DNA, 25 bp, Homo sapien
ttggactgtagagagctacagttgc

SEQ ID NO: 5828312 - DNA, 25 bp, Homo sapien
cttccggagtcacagtctctttccg

SEQ ID NO: 5828313 - DNA, 25 bp, Homo sapien
cggaaagagactgtgactccggaag

SEQ ID NO: 5828314 - DNA, 25 bp, Homo sapien
cgacacagaggtgactgatagaggt

SEQ ID NO: 5828315 - DNA, 25 bp, Homo sapien
acctctatcagtcacctctgtgtcg

SEQ ID NO: 5828316 - DNA, 25 bp, Homo sapien
ctaaacagaagaacgggattaaatc

SEQ ID NO: 5828317 - DNA, 25 bp, Homo sapien
gatttaatcccgttcttctgtttag

SEQ ID NO: 5828318 - DNA, 25 bp, Homo sapien
ggacctgacctggttctagtgttcg

SEQ ID NO: 5828319 - DNA, 25 bp, Homo sapien
cgaacactagaaccaggtcaggtcc

SEQ ID NO: 5828320 - DNA, 25 bp, Homo sapien
ctctaactaccactagtcctctaca

SEQ ID NO: 5828321 - DNA, 25 bp, Homo sapien
tgtagaggactagtggtagttagag

SEQ ID NO: 5828322 - DNA, 25 bp, Homo sapien
attaagctataattcctggaaaagt

SEQ ID NO: 5828323 - DNA, 25 bp, Homo sapien
acttttccaggaattatagcttaat

SEQ ID NO: 5828324 - DNA, 25 bp, Homo sapien
tcggcgggaaggcactccccgaaca

SEQ ID NO: 5828325 - DNA, 25 bp, Homo sapien
tgttcggggagtgccttcccgccga

SEQ ID NO: 5828326 - DNA, 25 bp, Homo sapien
cctcaaggatagtgttgtcttttca

SEQ ID NO: 5828327 - DNA, 25 bp, Homo sapien
tgaaaagacaacactatccttgagg

SEQ ID NO: 5828328 - DNA, 25 bp, Homo sapien
attacaagagtaagtgtctgacgta

SEQ ID NO: 5828329 - DNA, 25 bp, Homo sapien
tacgtcagacacttactcttgtaat

SEQ ID NO: 5828330 - DNA, 25 bp, Homo sapien
aatagtcactcaccaactacccttc

SEQ ID NO: 5828331 - DNA, 25 bp, Homo sapien
gaagggtagttggtgagtgactatt

SEQ ID NO: 5828332 - DNA, 25 bp, Homo sapien
aaaaattcatcgtgtactcctcttg

SEQ ID NO: 5828333 - DNA, 25 bp, Homo sapien
caagaggagtacacgatgaattttt

SEQ ID NO: 5828334 - DNA, 25 bp, Homo sapien
aaagaagtcttattatcattcgatt

SEQ ID NO: 5828335 - DNA, 25 bp, Homo sapien
aatcgaatgataataagacttcttt

SEQ ID NO: 5828336 - DNA, 25 bp, Homo sapien
gaagacccgataacggactcaacgg

SEQ ID NO: 5828337 - DNA, 25 bp, Homo sapien
ccgttgagtccgttatcgggtcttc

SEQ ID NO: 5828338 - DNA, 25 bp, Homo sapien
tctcgtgcttatcgcgacaataacg

SEQ ID NO: 5828339 - DNA, 25 bp, Homo sapien
cgttattgtcgcgataagcacgaga

SEQ ID NO: 5828340 - DNA, 25 bp, Homo sapien
gtttggagactttagaattcatcat

SEQ ID NO: 5828341 - DNA, 25 bp, Homo sapien
atgatgaattctaaagtctccaaac

SEQ ID NO: 5828342 - DNA, 25 bp, Homo sapien
agtcgaatagcttatcttaaagtcg

SEQ ID NO: 5828343 - DNA, 25 bp, Homo sapien
cgactttaagataagctattcgact

SEQ ID NO: 5828344 - DNA, 25 bp, Homo sapien
gggtgacgcgcgtcgcatcacctgg

SEQ ID NO: 5828345 - DNA, 25 bp, Homo sapien
ccaggtgatgcgacgcgcgtcaccc

SEQ ID NO: 5828346 - DNA, 25 bp, Homo sapien
ggactctggggtgagggctagcccg

SEQ ID NO: 5828347 - DNA, 25 bp, Homo sapien
cgggctagccctcaccccagagtcc

SEQ ID NO: 5828348 - DNA, 25 bp, Homo sapien
gtcgtcggcacccggcccctcactc

SEQ ID NO: 5828349 - DNA, 25 bp, Homo sapien
gagtgaggggccgggtgccgacgac

SEQ ID NO: 5828350 - DNA, 25 bp, Homo sapien
acattaccgtcgtcggcacccggcc

SEQ ID NO: 5828351 - DNA, 25 bp, Homo sapien
ggccgggtgccgacgacggtaatgt

SEQ ID NO: 5828352 - DNA, 25 bp, Homo sapien
tcggtgatagaccacaaggatctac

SEQ ID NO: 5828353 - DNA, 25 bp, Homo sapien
gtagatccttgtggtctatcaccga

SEQ ID NO: 5828354 - DNA, 25 bp, Homo sapien
cgtcaccatcctcacacgtatgggt

SEQ ID NO: 5828355 - DNA, 25 bp, Homo sapien
acccatacgtgtgaggatggtgacg

SEQ ID NO: 5828356 - DNA, 25 bp, Homo sapien
tgtggaggtcgcacgaacctcgacg

SEQ ID NO: 5828357 - DNA, 25 bp, Homo sapien
cgtcgaggttcgtgcgacctccaca

SEQ ID NO: 5828358 - DNA, 25 bp, Homo sapien
agaggttctagacgatcaattgaat

SEQ ID NO: 5828359 - DNA, 25 bp, Homo sapien
attcaattgatcgtctagaacctct

SEQ ID NO: 5828360 - DNA, 25 bp, Homo sapien
aatccaatgtcgctttatttagacg

SEQ ID NO: 5828361 - DNA, 25 bp, Homo sapien
cgtctaaataaagcgacattggatt

SEQ ID NO: 5828362 - DNA, 25 bp, Homo sapien
ataaaggactactacattgatggtt

SEQ ID NO: 5828363 - DNA, 25 bp, Homo sapien
aaccatcaatgtagtagtcctttat

SEQ ID NO: 5828364 - DNA, 25 bp, Homo sapien
ggcccgtcgagggagcgggtgccgt

SEQ ID NO: 5828365 - DNA, 25 bp, Homo sapien
acggcacccgctccctcgacgggcc

SEQ ID NO: 5828366 - DNA, 25 bp, Homo sapien
acaagagacgtacaggcaagaagtg

SEQ ID NO: 5828367 - DNA, 25 bp, Homo sapien
cacttcttgcctgtacgtctcttgt

SEQ ID NO: 5828368 - DNA, 25 bp, Homo sapien
gggctcggtcccaccctcgctgccg

SEQ ID NO: 5828369 - DNA, 25 bp, Homo sapien
cggcagcgagggtgggaccgagccc

SEQ ID NO: 5828370 - DNA, 25 bp, Homo sapien
tccttcgacggcatctaggacgtcc

SEQ ID NO: 5828371 - DNA, 25 bp, Homo sapien
ggacgtcctagatgccgtcgaagga

SEQ ID NO: 5828372 - DNA, 25 bp, Homo sapien
cgacaacgggagatctaccgcgggt

SEQ ID NO: 5828373 - DNA, 25 bp, Homo sapien
acccgcggtagatctcccgttgtcg

SEQ ID NO: 5828374 - DNA, 25 bp, Homo sapien
tccaaccgtgatggtatttataact

SEQ ID NO: 5828375 - DNA, 25 bp, Homo sapien
agttataaataccatcacggttgga

SEQ ID NO: 5828376 - DNA, 25 bp, Homo sapien
tcccggccctccccagcgcgcctct

SEQ ID NO: 5828377 - DNA, 25 bp, Homo sapien
agaggcgcgctggggagggccggga

SEQ ID NO: 5828378 - DNA, 25 bp, Homo sapien
gacgggtggcatcacccccttcccg

SEQ ID NO: 5828379 - DNA, 25 bp, Homo sapien
cgggaagggggtgatgccacccgtc

SEQ ID NO: 5828380 - DNA, 25 bp, Homo sapien
accctgtgatcaggagacctacaat

SEQ ID NO: 5828381 - DNA, 25 bp, Homo sapien
attgtaggtctcctgatcacagggt

SEQ ID NO: 5828382 - DNA, 25 bp, Homo sapien
ccgaccgccactcgcctggaaggga

SEQ ID NO: 5828383 - DNA, 25 bp, Homo sapien
tcccttccaggcgagtggcggtcgg

SEQ ID NO: 5828384 - DNA, 25 bp, Homo sapien
acgacaaagtgacctgcggcggtct

SEQ ID NO: 5828385 - DNA, 25 bp, Homo sapien
agaccgccgcaggtcactttgtcgt

SEQ ID NO: 5828386 - DNA, 25 bp, Homo sapien
tccgtaccgtctcggctcgttgtgg

SEQ ID NO: 5828387 - DNA, 25 bp, Homo sapien
ccacaacgagccgagacggtacgga

SEQ ID NO: 5828388 - DNA, 25 bp, Homo sapien
gtggtttcggccaccgtcgcactca

SEQ ID NO: 5828389 - DNA, 25 bp, Homo sapien
tgagtgcgacggtggccgaaaccac

SEQ ID NO: 5828390 - DNA, 25 bp, Homo sapien
ggtccgtctccgcgtccgcgccgta

SEQ ID NO: 5828391 - DNA, 25 bp, Homo sapien
tacggcgcggacgcggagacggacc

SEQ ID NO: 5828392 - DNA, 25 bp, Homo sapien
acactttaaattagacattaatact

SEQ ID NO: 5828393 - DNA, 25 bp, Homo sapien
agtattaatgtctaatttaaagtgt

SEQ ID NO: 5828394 - DNA, 25 bp, Homo sapien
tacactttaaattagacattaatac

SEQ ID NO: 5828395 - DNA, 25 bp, Homo sapien
gtattaatgtctaatttaaagtgta

SEQ ID NO: 5828396 - DNA, 25 bp, Homo sapien
aattagacattaatactagattttg

SEQ ID NO: 5828397 - DNA, 25 bp, Homo sapien
caaaatctagtattaatgtctaatt

SEQ ID NO: 5828398 - DNA, 25 bp, Homo sapien
acagtttattgactagacattagac

SEQ ID NO: 5828399 - DNA, 25 bp, Homo sapien
gtctaatgtctagtcaataaactgt

SEQ ID NO: 5828400 - DNA, 25 bp, Homo sapien
ccagtgggcctacaactccacgggc

SEQ ID NO: 5828401 - DNA, 25 bp, Homo sapien
gcccgtggagttgtaggcccactgg

SEQ ID NO: 5828402 - DNA, 25 bp, Homo sapien
actgttgaggatgcacatctgagtc

SEQ ID NO: 5828403 - DNA, 25 bp, Homo sapien
gactcagatgtgcatcctcaacagt

SEQ ID NO: 5828404 - DNA, 25 bp, Homo sapien
ggtccgagacagtagcaaaacgtgg

SEQ ID NO: 5828405 - DNA, 25 bp, Homo sapien
ccacgttttgctactgtctcggacc

SEQ ID NO: 5828406 - DNA, 25 bp, Homo sapien
tctcagtttctgttaccctctaacc

SEQ ID NO: 5828407 - DNA, 25 bp, Homo sapien
ggttagagggtaacagaaactgaga

SEQ ID NO: 5828408 - DNA, 25 bp, Homo sapien
acggaaggggcgactcacgagactc

SEQ ID NO: 5828409 - DNA, 25 bp, Homo sapien
gagtctcgtgagtcgccccttccgt

SEQ ID NO: 5828410 - DNA, 25 bp, Homo sapien
gaaaaccttaatgatctgagtagaa

SEQ ID NO: 5828411 - DNA, 25 bp, Homo sapien
ttctactcagatcattaaggttttc

SEQ ID NO: 5828412 - DNA, 25 bp, Homo sapien
gactcggtgttaggtcgtgcctcct

SEQ ID NO: 5828413 - DNA, 25 bp, Homo sapien
aggaggcacgacctaacaccgagtc

SEQ ID NO: 5828414 - DNA, 25 bp, Homo sapien
acatataagggacaagttacttggg

SEQ ID NO: 5828415 - DNA, 25 bp, Homo sapien
cccaagtaacttgtcccttatatgt

SEQ ID NO: 5828416 - DNA, 25 bp, Homo sapien
tcggccacggactggcgggccgcgg

SEQ ID NO: 5828417 - DNA, 25 bp, Homo sapien
ccgcggcccgccagtccgtggccga

SEQ ID NO: 5828418 - DNA, 25 bp, Homo sapien
ttacctacttagttcagttagttta

SEQ ID NO: 5828419 - DNA, 25 bp, Homo sapien
taaactaactgaactaagtaggtaa

SEQ ID NO: 5828420 - DNA, 25 bp, Homo sapien
aacctgacattgtaaagtatacact

SEQ ID NO: 5828421 - DNA, 25 bp, Homo sapien
agtgtatactttacaatgtcaggtt

SEQ ID NO: 5828422 - DNA, 25 bp, Homo sapien
gtctcgggtgcctacccgggacgtc

SEQ ID NO: 5828423 - DNA, 25 bp, Homo sapien
gacgtcccgggtaggcacccgagac

SEQ ID NO: 5828424 - DNA, 25 bp, Homo sapien
ccgaagtcttcgtagaatcctgttg

SEQ ID NO: 5828425 - DNA, 25 bp, Homo sapien
caacaggattctacgaagacttcgg

SEQ ID NO: 5828426 - DNA, 25 bp, Homo sapien
gaatcctgttgacaaaggttagaaa

SEQ ID NO: 5828427 - DNA, 25 bp, Homo sapien
tttctaacctttgtcaacaggattc

SEQ ID NO: 5828428 - DNA, 25 bp, Homo sapien
aactagactctattgaccatctaaa

SEQ ID NO: 5828429 - DNA, 25 bp, Homo sapien
tttagatggtcaatagagtctagtt

SEQ ID NO: 5828430 - DNA, 25 bp, Homo sapien
aatgataaaatggtcaattacacag

SEQ ID NO: 5828431 - DNA, 25 bp, Homo sapien
ctgtgtaattgaccattttatcatt

SEQ ID NO: 5828432 - DNA, 25 bp, Homo sapien
cgccactcacgagccctccaccggg

SEQ ID NO: 5828433 - DNA, 25 bp, Homo sapien
cccggtggagggctcgtgagtggcg

SEQ ID NO: 5828434 - DNA, 25 bp, Homo sapien
tgagcttagcaaaagtcgccccagt

SEQ ID NO: 5828435 - DNA, 25 bp, Homo sapien
actggggcgacttttgctaagctca

SEQ ID NO: 5828436 - DNA, 25 bp, Homo sapien
attttataggaacaattaatagtcg

SEQ ID NO: 5828437 - DNA, 25 bp, Homo sapien
cgactattaattgttcctataaaat

SEQ ID NO: 5828438 - DNA, 25 bp, Homo sapien
gtttacacatctacaagttaccggt

SEQ ID NO: 5828439 - DNA, 25 bp, Homo sapien
accggtaacttgtagatgtgtaaac

SEQ ID NO: 5828440 - DNA, 25 bp, Homo sapien
cgacacctctgtattccttgacggt

SEQ ID NO: 5828441 - DNA, 25 bp, Homo sapien
accgtcaaggaatacagaggtgtcg

SEQ ID NO: 5828442 - DNA, 25 bp, Homo sapien
gaattaagacagaactacttccact

SEQ ID NO: 5828443 - DNA, 25 bp, Homo sapien
agtggaagtagttctgtcttaattc

SEQ ID NO: 5828444 - DNA, 25 bp, Homo sapien
cggacgcacagatacggtgcacagt

SEQ ID NO: 5828445 - DNA, 25 bp, Homo sapien
actgtgcaccgtatctgtgcgtccg

SEQ ID NO: 5828446 - DNA, 25 bp, Homo sapien
cttagttcattaaacacaaatatac

SEQ ID NO: 5828447 - DNA, 25 bp, Homo sapien
gtatatttgtgtttaatgaactaag

SEQ ID NO: 5828448 - DNA, 25 bp, Homo sapien
gtggtccccacacctggggcctcct

SEQ ID NO: 5828449 - DNA, 25 bp, Homo sapien
aggaggccccaggtgtggggaccac

SEQ ID NO: 5828450 - DNA, 25 bp, Homo sapien
aagtgagcttctgataagggactac

SEQ ID NO: 5828451 - DNA, 25 bp, Homo sapien
gtagtcccttatcagaagctcactt

SEQ ID NO: 5828452 - DNA, 25 bp, Homo sapien
tcgggaagtctacggtgcgaacccc

SEQ ID NO: 5828453 - DNA, 25 bp, Homo sapien
ggggttcgcaccgtagacttcccga

SEQ ID NO: 5828454 - DNA, 25 bp, Homo sapien
gcccgtttcgaactcacacctccac

SEQ ID NO: 5828455 - DNA, 25 bp, Homo sapien
gtggaggtgtgagttcgaaacgggc

SEQ ID NO: 5828456 - DNA, 25 bp, Homo sapien
gccattacacgactggcgaccccct

SEQ ID NO: 5828457 - DNA, 25 bp, Homo sapien
agggggtcgccagtcgtgtaatggc

SEQ ID NO: 5828458 - DNA, 25 bp, Homo sapien
aaggatgatcgtttcttcatgtcag

SEQ ID NO: 5828459 - DNA, 25 bp, Homo sapien
ctgacatgaagaaacgatcatcctt

SEQ ID NO: 5828460 - DNA, 25 bp, Homo sapien
aggttctggaacaattatactaaag

SEQ ID NO: 5828461 - DNA, 25 bp, Homo sapien
ctttagtataattgttccagaacct

SEQ ID NO: 5828462 - DNA, 25 bp, Homo sapien
ggtctaacgaacctaactgactatt

SEQ ID NO: 5828463 - DNA, 25 bp, Homo sapien
aatagtcagttaggttcgttagacc

SEQ ID NO: 5828464 - DNA, 25 bp, Homo sapien
aaatgaggaagatgagggactgagt

SEQ ID NO: 5828465 - DNA, 25 bp, Homo sapien
actcagtccctcatcttcctcattt

SEQ ID NO: 5828466 - DNA, 25 bp, Homo sapien
ctaaagggaataatttcagactaca

SEQ ID NO: 5828467 - DNA, 25 bp, Homo sapien
tgtagtctgaaattattccctttag

SEQ ID NO: 5828468 - DNA, 25 bp, Homo sapien
ggagcgaggctcttcgcgcccaggg

SEQ ID NO: 5828469 - DNA, 25 bp, Homo sapien
ccctgggcgcgaagagcctcgctcc

SEQ ID NO: 5828470 - DNA, 25 bp, Homo sapien
tcgcgccccgcttgcgcgcagggcc

SEQ ID NO: 5828471 - DNA, 25 bp, Homo sapien
ggccctgcgcgcaagcggggcgcga

SEQ ID NO: 5828472 - DNA, 25 bp, Homo sapien
gtcgggtctgacttgaagtagaaca

SEQ ID NO: 5828473 - DNA, 25 bp, Homo sapien
tgttctacttcaagtcagacccgac

SEQ ID NO: 5828474 - DNA, 25 bp, Homo sapien
atcttcaaactcatccacgatttcc

SEQ ID NO: 5828475 - DNA, 25 bp, Homo sapien
ggaaatcgtggatgagtttgaagat

SEQ ID NO: 5828476 - DNA, 25 bp, Homo sapien
gcggcgagcgctcgagcggcggatg

SEQ ID NO: 5828477 - DNA, 25 bp, Homo sapien
catccgccgctcgagcgctcgccgc

SEQ ID NO: 5828478 - DNA, 25 bp, Homo sapien
cggcggcgagcgctcgagcggcgga

SEQ ID NO: 5828479 - DNA, 25 bp, Homo sapien
tccgccgctcgagcgctcgccgccg

SEQ ID NO: 5828480 - DNA, 25 bp, Homo sapien
agacggaggacggtcagggtctccc

SEQ ID NO: 5828481 - DNA, 25 bp, Homo sapien
gggagaccctgaccgtcctccgtct

SEQ ID NO: 5828482 - DNA, 25 bp, Homo sapien
aatcctactgtaggaggtcacatcc

SEQ ID NO: 5828483 - DNA, 25 bp, Homo sapien
ggatgtgacctcctacagtaggatt

SEQ ID NO: 5828484 - DNA, 25 bp, Homo sapien
agaggacttaacgaactctccatat

SEQ ID NO: 5828485 - DNA, 25 bp, Homo sapien
atatggagagttcgttaagtcctct

SEQ ID NO: 5828486 - DNA, 25 bp, Homo sapien
gtcactactcatgtcacgactgtaa

SEQ ID NO: 5828487 - DNA, 25 bp, Homo sapien
ttacagtcgtgacatgagtagtgac

SEQ ID NO: 5828488 - DNA, 25 bp, Homo sapien
ccatacagacaagattttccctggt

SEQ ID NO: 5828489 - DNA, 25 bp, Homo sapien
accagggaaaatcttgtctgtatgg

SEQ ID NO: 5828490 - DNA, 25 bp, Homo sapien
gggttaggaggatccgtcgtttgga

SEQ ID NO: 5828491 - DNA, 25 bp, Homo sapien
tccaaacgacggatcctcctaaccc

SEQ ID NO: 5828492 - DNA, 25 bp, Homo sapien
gaccgacgagggactgaccctctgt

SEQ ID NO: 5828493 - DNA, 25 bp, Homo sapien
acagagggtcagtccctcgtcggtc

SEQ ID NO: 5828494 - DNA, 25 bp, Homo sapien
atgtaaaccgtgtcagtagagtcag

SEQ ID NO: 5828495 - DNA, 25 bp, Homo sapien
ctgactctactgacacggtttacat

SEQ ID NO: 5828496 - DNA, 25 bp, Homo sapien
cacgctcgagatatcaacagttgtt

SEQ ID NO: 5828497 - DNA, 25 bp, Homo sapien
aacaactgttgatatctcgagcgtg

SEQ ID NO: 5828498 - DNA, 25 bp, Homo sapien
cctcaggaggctccgagccctatgg

SEQ ID NO: 5828499 - DNA, 25 bp, Homo sapien
ccatagggctcggagcctcctgagg

SEQ ID NO: 5828500 - DNA, 25 bp, Homo sapien
cctacaagaaacatggttcgattat

SEQ ID NO: 5828501 - DNA, 25 bp, Homo sapien
ataatcgaaccatgtttcttgtagg

SEQ ID NO: 5828502 - DNA, 25 bp, Homo sapien
tactacatctcctggaaaggggtat

SEQ ID NO: 5828503 - DNA, 25 bp, Homo sapien
atacccctttccaggagatgtagta

SEQ ID NO: 5828504 - DNA, 25 bp, Homo sapien
gatatataggtgctttacctttcaa

SEQ ID NO: 5828505 - DNA, 25 bp, Homo sapien
ttgaaaggtaaagcacctatatatc

SEQ ID NO: 5828506 - DNA, 25 bp, Homo sapien
gggcggaccggcgagtgggcggacc

SEQ ID NO: 5828507 - DNA, 25 bp, Homo sapien
ggtccgcccactcgccggtccgccc

SEQ ID NO: 5828508 - DNA, 25 bp, Homo sapien
acgaactttttattgtcgtcacacg

SEQ ID NO: 5828509 - DNA, 25 bp, Homo sapien
cgtgtgacgacaataaaaagttcgt

SEQ ID NO: 5828510 - DNA, 25 bp, Homo sapien
agaactatcgcttatatttaggtat

SEQ ID NO: 5828511 - DNA, 25 bp, Homo sapien
atacctaaatataagcgatagttct

SEQ ID NO: 5828512 - DNA, 25 bp, Homo sapien
aacatcgtagaactatcgcttatat

SEQ ID NO: 5828513 - DNA, 25 bp, Homo sapien
atataagcgatagttctacgatgtt

SEQ ID NO: 5828514 - DNA, 25 bp, Homo sapien
ttagaactgaaatactggaataaca

SEQ ID NO: 5828515 - DNA, 25 bp, Homo sapien
tgttattccagtatttcagttctaa

SEQ ID NO: 5828516 - DNA, 25 bp, Homo sapien
gattacttaagggtttattagtata

SEQ ID NO: 5828517 - DNA, 25 bp, Homo sapien
tatactaataaacccttaagtaatc

SEQ ID NO: 5828518 - DNA, 25 bp, Homo sapien
acagtatttctactttttaatagag

SEQ ID NO: 5828519 - DNA, 25 bp, Homo sapien
ctctattaaaaagtagaaatactgt

SEQ ID NO: 5828520 - DNA, 25 bp, Homo sapien
gacgtccggcttcactcacagtcca

SEQ ID NO: 5828521 - DNA, 25 bp, Homo sapien
tggactgtgagtgaagccggacgtc

SEQ ID NO: 5828522 - DNA, 25 bp, Homo sapien
gagacattataagaaatagacacag

SEQ ID NO: 5828523 - DNA, 25 bp, Homo sapien
ctgtgtctatttcttataatgtctc

SEQ ID NO: 5828524 - DNA, 25 bp, Homo sapien
gagaggccgggtgccgtgcgggacg

SEQ ID NO: 5828525 - DNA, 25 bp, Homo sapien
cgtcccgcacggcacccggcctctc

SEQ ID NO: 5828526 - DNA, 25 bp, Homo sapien
taaaaaatatctttgaggacaagag

SEQ ID NO: 5828527 - DNA, 25 bp, Homo sapien
ctcttgtcctcaaagatatttttta

SEQ ID NO: 5828528 - DNA, 25 bp, Homo sapien
gtttaacaattataactgacatagt

SEQ ID NO: 5828529 - DNA, 25 bp, Homo sapien
actatgtcagttataattgttaaac

SEQ ID NO: 5828530 - DNA, 25 bp, Homo sapien
tatgtaagtgaagatggcgttctgt

SEQ ID NO: 5828531 - DNA, 25 bp, Homo sapien
acagaacgccatcttcacttacata

SEQ ID NO: 5828532 - DNA, 25 bp, Homo sapien
ggactccgctcgtgcgccggtcgcg

SEQ ID NO: 5828533 - DNA, 25 bp, Homo sapien
cgcgaccggcgcacgagcggagtcc

SEQ ID NO: 5828534 - DNA, 25 bp, Homo sapien
aggactccgctcgtgcgccggtcgc

SEQ ID NO: 5828535 - DNA, 25 bp, Homo sapien
gcgaccggcgcacgagcggagtcct

SEQ ID NO: 5828536 - DNA, 25 bp, Homo sapien
tatccaagatcgtcgagaccggaaa

SEQ ID NO: 5828537 - DNA, 25 bp, Homo sapien
tttccggtctcgacgatcttggata

SEQ ID NO: 5828538 - DNA, 25 bp, Homo sapien
gacttctgtgaaacggacgacggac

SEQ ID NO: 5828539 - DNA, 25 bp, Homo sapien
gtccgtcgtccgtttcacagaagtc

SEQ ID NO: 5828540 - DNA, 25 bp, Homo sapien
gacctcgcataacccgaaccgacct

SEQ ID NO: 5828541 - DNA, 25 bp, Homo sapien
aggtcggttcgggttatgcgaggtc

SEQ ID NO: 5828542 - DNA, 25 bp, Homo sapien
caactgccagggtcccggcgtaaga

SEQ ID NO: 5828543 - DNA, 25 bp, Homo sapien
tcttacgccgggaccctggcagttg

SEQ ID NO: 5828544 - DNA, 25 bp, Homo sapien
ggtccattgacgatggtcgcgtcct

SEQ ID NO: 5828545 - DNA, 25 bp, Homo sapien
aggacgcgaccatcgtcaatggacc

SEQ ID NO: 5828546 - DNA, 25 bp, Homo sapien
tcagtggtttaaactgtacttatag

SEQ ID NO: 5828547 - DNA, 25 bp, Homo sapien
ctataagtacagtttaaaccactga

SEQ ID NO: 5828548 - DNA, 25 bp, Homo sapien
gccgctgtggacaagcgtcttagtg

SEQ ID NO: 5828549 - DNA, 25 bp, Homo sapien
gacaagcgtcttagtgtcatgcaga

SEQ ID NO: 5828550 - DNA, 25 bp, Homo sapien
tcactgcctctgatggggactccca

SEQ ID NO: 5828551 - DNA, 25 bp, Homo sapien
tcgccgctgtggacaagcgtcttag

SEQ ID NO: 5828552 - DNA, 25 bp, Homo sapien
tgtggacaagcgtcttagtgtcatg

SEQ ID NO: 5828553 - DNA, 25 bp, Homo sapien
caagcgtcttagtgtcatgcagacc

SEQ ID NO: 5828554 - DNA, 25 bp, Homo sapien
ggtcgccgctgtggacaagcgtctt

SEQ ID NO: 5828555 - DNA, 25 bp, Homo sapien
acaagcgtcttagtgtcatgcagac

SEQ ID NO: 5828556 - DNA, 25 bp, Homo sapien
ccgctgtggacaagcgtcttagtgt

SEQ ID NO: 5828557 - DNA, 25 bp, Homo sapien
aagcgtcttagtgtcatgcagacca

SEQ ID NO: 5828558 - DNA, 25 bp, Homo sapien
cactgcctctgatggggactcccag

SEQ ID NO: 5828559 - DNA, 25 bp, Homo sapien
cgccgctgtggacaagcgtcttagt

SEQ ID NO: 5828560 - DNA, 25 bp, Homo sapien
aaacgacggaaaagtctggccttgc

SEQ ID NO: 5828561 - DNA, 25 bp, Homo sapien
ggacaagcgtcttagtgtcatgcag

SEQ ID NO: 5828562 - DNA, 25 bp, Homo sapien
tggacaagcgtcttagtgtcatgca

SEQ ID NO: 5828563 - DNA, 25 bp, Homo sapien
gtcgccgctgtggacaagcgtctta

SEQ ID NO: 5828564 - DNA, 25 bp, Homo sapien
ttcgatcgtagaaccagcaccgggt

SEQ ID NO: 5828565 - DNA, 25 bp, Homo sapien
acccggtgctggttctacgatcgaa

SEQ ID NO: 5828566 - DNA, 25 bp, Homo sapien
aaaaatagtcatctcttacaatgac

SEQ ID NO: 5828567 - DNA, 25 bp, Homo sapien
gtcattgtaagagatgactattttt

SEQ ID NO: 5828568 - DNA, 25 bp, Homo sapien
cggcggctctcgacgggctcgggag

SEQ ID NO: 5828569 - DNA, 25 bp, Homo sapien
ctcccgagcccgtcgagagccgccg

SEQ ID NO: 5828570 - DNA, 25 bp, Homo sapien
cgtccttggacgtttgggtgcatct

SEQ ID NO: 5828571 - DNA, 25 bp, Homo sapien
agatgcacccaaacgtccaaggacg

SEQ ID NO: 5828572 - DNA, 25 bp, Homo sapien
gaatataagtctatactctaaatct

SEQ ID NO: 5828573 - DNA, 25 bp, Homo sapien
agatttagagtatagacttatattc

SEQ ID NO: 5828574 - DNA, 25 bp, Homo sapien
caagtaatctcgtaagaatataagt

SEQ ID NO: 5828575 - DNA, 25 bp, Homo sapien
acttatattcttacgagattacttg

SEQ ID NO: 5828576 - DNA, 25 bp, Homo sapien
gcaagatacccacacgcacgggcgc

SEQ ID NO: 5828577 - DNA, 25 bp, Homo sapien
gcgcccgtgcgtgtgggtatcttgc

SEQ ID NO: 5828578 - DNA, 25 bp, Homo sapien
tctcagtcgctgacggttggcgtcg

SEQ ID NO: 5828579 - DNA, 25 bp, Homo sapien
cgacgccaaccgtcagcgactgaga

SEQ ID NO: 5828580 - DNA, 25 bp, Homo sapien
cgacctcccgacaaggaccatcttt

SEQ ID NO: 5828581 - DNA, 25 bp, Homo sapien
aaagatggtccttgtcgggaggtcg

SEQ ID NO: 5828582 - DNA, 25 bp, Homo sapien
aatgcttttgggttagagtctaagg

SEQ ID NO: 5828583 - DNA, 25 bp, Homo sapien
ccttagactctaacccaaaagcatt

SEQ ID NO: 5828584 - DNA, 25 bp, Homo sapien
gaaaacgtcaatataagtatatcaa

SEQ ID NO: 5828585 - DNA, 25 bp, Homo sapien
ttgatatacttatattgacgttttc

SEQ ID NO: 5828586 - DNA, 25 bp, Homo sapien
cgttcgaccatggcggtcacacggg

SEQ ID NO: 5828587 - DNA, 25 bp, Homo sapien
cccgtgtgaccgccatggtcgaacg

SEQ ID NO: 5828588 - DNA, 25 bp, Homo sapien
ggtaaccacagaaccactcatttct

SEQ ID NO: 5828589 - DNA, 25 bp, Homo sapien
agaaatgagtggttctgtggttacc

SEQ ID NO: 5828590 - DNA, 25 bp, Homo sapien
tagaccataaaggtggattttagat

SEQ ID NO: 5828591 - DNA, 25 bp, Homo sapien
atctaaaatccacctttatggtcta

SEQ ID NO: 5828592 - DNA, 25 bp, Homo sapien
tggccccgtcaacttaggagtagaa

SEQ ID NO: 5828593 - DNA, 25 bp, Homo sapien
ttctactcctaagttgacggggcca

SEQ ID NO: 5828594 - DNA, 25 bp, Homo sapien
agaaacgtcttcacttattataaaa

SEQ ID NO: 5828595 - DNA, 25 bp, Homo sapien
ttttataataagtgaagacgtttct

SEQ ID NO: 5828596 - DNA, 25 bp, Homo sapien
gaggcgcccggggaccacactgccc

SEQ ID NO: 5828597 - DNA, 25 bp, Homo sapien
gggcagtgtggtccccgggcgcctc

SEQ ID NO: 5828598 - DNA, 25 bp, Homo sapien
atgtccaggtacatactttacttca

SEQ ID NO: 5828599 - DNA, 25 bp, Homo sapien
tgaagtaaagtatgtacctggacat

SEQ ID NO: 5828600 - DNA, 25 bp, Homo sapien
gtcaccctgtcgtcatccgggaacg

SEQ ID NO: 5828601 - DNA, 25 bp, Homo sapien
cgttcccggatgacgacagggtgac

SEQ ID NO: 5828602 - DNA, 25 bp, Homo sapien
aaagtcagaaactctttttgacaga

SEQ ID NO: 5828603 - DNA, 25 bp, Homo sapien
tctgtcaaaaagagtttctgacttt

SEQ ID NO: 5828604 - DNA, 25 bp, Homo sapien
ttatgcaatagtaatctgtttatat

SEQ ID NO: 5828605 - DNA, 25 bp, Homo sapien
atataaacagattactattgcataa

SEQ ID NO: 5828606 - DNA, 25 bp, Homo sapien
gactcctggtaaccggaccgacgag

SEQ ID NO: 5828607 - DNA, 25 bp, Homo sapien
ctcgtcggtccggttaccaggagtc

SEQ ID NO: 5828608 - DNA, 25 bp, Homo sapien
acccaccacaaaaaggagagtctcg

SEQ ID NO: 5828609 - DNA, 25 bp, Homo sapien
cgagactctcctttttgtggtgggt

SEQ ID NO: 5828610 - DNA, 25 bp, Homo sapien
gtccccatagtacatgacggttttc

SEQ ID NO: 5828611 - DNA, 25 bp, Homo sapien
gaaaaccgtcatgtactatggggac

SEQ ID NO: 5828612 - DNA, 25 bp, Homo sapien
gaaggacacgtggaccgtttggtat

SEQ ID NO: 5828613 - DNA, 25 bp, Homo sapien
ataccaaacggtccacgtgtccttc

SEQ ID NO: 5828614 - DNA, 25 bp, Homo sapien
ggtcgtgcggcacccggtcggaccg

SEQ ID NO: 5828615 - DNA, 25 bp, Homo sapien
cggtccgaccgggtgccgcacgacc

SEQ ID NO: 5828616 - DNA, 25 bp, Homo sapien
gaccacaggtcggtcgtgcggcacc

SEQ ID NO: 5828617 - DNA, 25 bp, Homo sapien
ggtgccgcacgaccgacctgtggtc

SEQ ID NO: 5828618 - DNA, 25 bp, Homo sapien
caggtcacgaccgacggttccctgt

SEQ ID NO: 5828619 - DNA, 25 bp, Homo sapien
acagggaaccgtcggtcgtgacctg

SEQ ID NO: 5828620 - DNA, 25 bp, Homo sapien
cgtagaatccctgttggtatcttga

SEQ ID NO: 5828621 - DNA, 25 bp, Homo sapien
tcaagataccaacagggattctacg

SEQ ID NO: 5828622 - DNA, 25 bp, Homo sapien
aacaacaataattacaacaatcacc

SEQ ID NO: 5828623 - DNA, 25 bp, Homo sapien
ggtgattgttgtaattattgttgtt

SEQ ID NO: 5828624 - DNA, 25 bp, Homo sapien
gcgggcgcggcgtccgtcggtcccg

SEQ ID NO: 5828625 - DNA, 25 bp, Homo sapien
cgggaccgacggacgccgcgcccgc

SEQ ID NO: 5828626 - DNA, 25 bp, Homo sapien
gacgctccctccgcgggcgcggcgt

SEQ ID NO: 5828627 - DNA, 25 bp, Homo sapien
acgccgcgcccgcggagggagcgtc

SEQ ID NO: 5828628 - DNA, 25 bp, Homo sapien
accagggctcgctcacaggagactc

SEQ ID NO: 5828629 - DNA, 25 bp, Homo sapien
gagtctcctgtgagcgagccctggt

SEQ ID NO: 5828630 - DNA, 25 bp, Homo sapien
acccgttccccaggtgtgtaagaca

SEQ ID NO: 5828631 - DNA, 25 bp, Homo sapien
tgtcttacacacctggggaacgggt

SEQ ID NO: 5828632 - DNA, 25 bp, Homo sapien
actatcagtcacttcgaacgtaact

SEQ ID NO: 5828633 - DNA, 25 bp, Homo sapien
agttacgttcgaagtgactgatagt

SEQ ID NO: 5828634 - DNA, 25 bp, Homo sapien
gggtggagaatcctcgaccgggtcc

SEQ ID NO: 5828635 - DNA, 25 bp, Homo sapien
ggacccggtcgaggattctccaccc

SEQ ID NO: 5828636 - DNA, 25 bp, Homo sapien
atttaagatgtttacgctaaaatat

SEQ ID NO: 5828637 - DNA, 25 bp, Homo sapien
atattttagcgtaaacatcttaaat

SEQ ID NO: 5828638 - DNA, 25 bp, Homo sapien
gataataaactgtagacattaaaat

SEQ ID NO: 5828639 - DNA, 25 bp, Homo sapien
attttaatgtctacagtttattatc

SEQ ID NO: 5828640 - DNA, 25 bp, Homo sapien
gtcctcgtcgcgagttccggcggaa

SEQ ID NO: 5828641 - DNA, 25 bp, Homo sapien
ttccgccggaactcgcgacgaggac

SEQ ID NO: 5828642 - DNA, 25 bp, Homo sapien
agggcggttacaggacccacatccg

SEQ ID NO: 5828643 - DNA, 25 bp, Homo sapien
cggatgtgggtcctgtaaccgccct

SEQ ID NO: 5828644 - DNA, 25 bp, Homo sapien
gcaccgcgccgtcggtagcggacgg

SEQ ID NO: 5828645 - DNA, 25 bp, Homo sapien
ccgtccgctaccgacggcgcggtgc

SEQ ID NO: 5828646 - DNA, 25 bp, Homo sapien
ggcaccgcgccgtcggtagcggacg

SEQ ID NO: 5828647 - DNA, 25 bp, Homo sapien
cgtccgctaccgacggcgcggtgcc

SEQ ID NO: 5828648 - DNA, 25 bp, Homo sapien
acaccggcggcaccgcgccgtcggt

SEQ ID NO: 5828649 - DNA, 25 bp, Homo sapien
accgacggcgcggtgccgccggtgt

SEQ ID NO: 5828650 - DNA, 25 bp, Homo sapien
tcgtgaccctagcaggagagacgta

SEQ ID NO: 5828651 - DNA, 25 bp, Homo sapien
tacgtctctcctgctagggtcacga

SEQ ID NO: 5828652 - DNA, 25 bp, Homo sapien
ttctcaacttcaaaactacgttcca

SEQ ID NO: 5828653 - DNA, 25 bp, Homo sapien
tggaacgtagttttgaagttgagaa

SEQ ID NO: 5828654 - DNA, 25 bp, Homo sapien
tcagattcaaatattagcgttaccg

SEQ ID NO: 5828655 - DNA, 25 bp, Homo sapien
cggtaacgctaatatttgaatctga

SEQ ID NO: 5828656 - DNA, 25 bp, Homo sapien
ccggccgtcacgctgaccccggtca

SEQ ID NO: 5828657 - DNA, 25 bp, Homo sapien
tgaccggggtcagcgtgacggccgg

SEQ ID NO: 5828658 - DNA, 25 bp, Homo sapien
cggccggccgtcacgctgaccccgg

SEQ ID NO: 5828659 - DNA, 25 bp, Homo sapien
ccggggtcagcgtgacggccggccg

SEQ ID NO: 5828660 - DNA, 25 bp, Homo sapien
accataagggggctacgtcgcgata

SEQ ID NO: 5828661 - DNA, 25 bp, Homo sapien
tatcgcgacgtagcccccttatggt

SEQ ID NO: 5828662 - DNA, 25 bp, Homo sapien
aactcctcgtaaccacagttggtgt

SEQ ID NO: 5828663 - DNA, 25 bp, Homo sapien
acaccaactgtggttacgaggagtt

SEQ ID NO: 5828664 - DNA, 25 bp, Homo sapien
ccgtccagtggtgaaggacacatga

SEQ ID NO: 5828665 - DNA, 25 bp, Homo sapien
tcatgtgtccttcaccactggacgg

SEQ ID NO: 5828666 - DNA, 25 bp, Homo sapien
aataaggtcctaaggagtcataaac

SEQ ID NO: 5828667 - DNA, 25 bp, Homo sapien
gtttatgactccttaggaccttatt

SEQ ID NO: 5828668 - DNA, 25 bp, Homo sapien
ccccggcccgtcagagttcgtgact

SEQ ID NO: 5828669 - DNA, 25 bp, Homo sapien
agtcacgaactctgacgggccgggg

SEQ ID NO: 5828670 - DNA, 25 bp, Homo sapien
tcccgtccgacaccggtcgccccga

SEQ ID NO: 5828671 - DNA, 25 bp, Homo sapien
tcggggcgaccggtgtcggacggga

SEQ ID NO: 5828672 - DNA, 25 bp, Homo sapien
aaacaagggtaagtacattgactta

SEQ ID NO: 5828673 - DNA, 25 bp, Homo sapien
taagtcaatgtacttacccttgttt

SEQ ID NO: 5828674 - DNA, 25 bp, Homo sapien
acgagtcatttaccgctacacccaa

SEQ ID NO: 5828675 - DNA, 25 bp, Homo sapien
ttgggtgtagcggtaaatgactcgt

SEQ ID NO: 5828676 - DNA, 25 bp, Homo sapien
gttcctaccacctcaacccttcatc

SEQ ID NO: 5828677 - DNA, 25 bp, Homo sapien
gatgaagggttgaggtggtaggaac

SEQ ID NO: 5828678 - DNA, 25 bp, Homo sapien
ccatcgggtactaccaggaaagtaa

SEQ ID NO: 5828679 - DNA, 25 bp, Homo sapien
ttactttcctggtagtacccgatgg

SEQ ID NO: 5828680 - DNA, 25 bp, Homo sapien
acttgttattatcaagactaattag

SEQ ID NO: 5828681 - DNA, 25 bp, Homo sapien
ctaattagtcttgataataacaagt

SEQ ID NO: 5828682 - DNA, 25 bp, Homo sapien
ggggagcgggacactcgtccgagac

SEQ ID NO: 5828683 - DNA, 25 bp, Homo sapien
gtctcggacgagtgtcccgctcccc

SEQ ID NO: 5828684 - DNA, 25 bp, Homo sapien
tactccctgttatcccttctctcca

SEQ ID NO: 5828685 - DNA, 25 bp, Homo sapien
tggagagaagggataacagggagta

SEQ ID NO: 5828686 - DNA, 25 bp, Homo sapien
ttgacatattctacattaaattccc

SEQ ID NO: 5828687 - DNA, 25 bp, Homo sapien
gggaatttaatgtagaatatgtcaa

SEQ ID NO: 5828688 - DNA, 25 bp, Homo sapien
atactttgacatattctacattaaa

SEQ ID NO: 5828689 - DNA, 25 bp, Homo sapien
tttaatgtagaatatgtcaaagtat

SEQ ID NO: 5828690 - DNA, 25 bp, Homo sapien
gtcgagcgcggcacacggcggggcc

SEQ ID NO: 5828691 - DNA, 25 bp, Homo sapien
ggccccgccgtgtgccgcgctcgac

SEQ ID NO: 5828692 - DNA, 25 bp, Homo sapien
ggtcgagcgcggcacacggcggggc

SEQ ID NO: 5828693 - DNA, 25 bp, Homo sapien
gccccgccgtgtgccgcgctcgacc

SEQ ID NO: 5828694 - DNA, 25 bp, Homo sapien
acgggtcgagcgcggcacacggcgg

SEQ ID NO: 5828695 - DNA, 25 bp, Homo sapien
ccgccgtgtgccgcgctcgacccgt

SEQ ID NO: 5828696 - DNA, 25 bp, Homo sapien
agacaaaggaggaggtgctggtgtc

SEQ ID NO: 5828697 - DNA, 25 bp, Homo sapien
gacaccagcacctcctcctttgtct

SEQ ID NO: 5828698 - DNA, 25 bp, Homo sapien
gtcgaggtctctgtgtgcggggttt

SEQ ID NO: 5828699 - DNA, 25 bp, Homo sapien
aaaccccgcacacagagacctcgac

SEQ ID NO: 5828700 - DNA, 25 bp, Homo sapien
cccttcagagcttaccaacgaatag

SEQ ID NO: 5828701 - DNA, 25 bp, Homo sapien
ctattcgttggtaagctctgaaggg

SEQ ID NO: 5828702 - DNA, 25 bp, Homo sapien
gaggacctcctcaattaacgacaag

SEQ ID NO: 5828703 - DNA, 25 bp, Homo sapien
cttgtcgttaattgaggaggtcctc

SEQ ID NO: 5828704 - DNA, 25 bp, Homo sapien
ctcgttggtgcctctacccggtgtc

SEQ ID NO: 5828705 - DNA, 25 bp, Homo sapien
gacaccgggtagaggcaccaacgag

SEQ ID NO: 5828706 - DNA, 25 bp, Homo sapien
gggaaccgaagaggcctgcacgaga

SEQ ID NO: 5828707 - DNA, 25 bp, Homo sapien
tctcgtgcaggcctcttcggttccc

SEQ ID NO: 5828708 - DNA, 25 bp, Homo sapien
aaacctataaggacccagtagtgag

SEQ ID NO: 5828709 - DNA, 25 bp, Homo sapien
ctcactactgggtccttataggttt

SEQ ID NO: 5828710 - DNA, 25 bp, Homo sapien
gggtatagctcacaagaacgaaaag

SEQ ID NO: 5828711 - DNA, 25 bp, Homo sapien
cttttcgttcttgtgagctataccc

SEQ ID NO: 5828712 - DNA, 25 bp, Homo sapien
cgtcgcggttacacttcgcaacgtc

SEQ ID NO: 5828713 - DNA, 25 bp, Homo sapien
gacgttgcgaagtgtaaccgcgacg

SEQ ID NO: 5828714 - DNA, 25 bp, Homo sapien
ttcagaggttacagttgtataccgt

SEQ ID NO: 5828715 - DNA, 25 bp, Homo sapien
acggtatacaactgtaacctctgaa

SEQ ID NO: 5828716 - DNA, 25 bp, Homo sapien
catgacttacgcaacaaaaatttat

SEQ ID NO: 5828717 - DNA, 25 bp, Homo sapien
ataaatttttgttgcgtaagtcatg

SEQ ID NO: 5828718 - DNA, 25 bp, Homo sapien
tcatgacttacgcaacaaaaattta

SEQ ID NO: 5828719 - DNA, 25 bp, Homo sapien
taaatttttgttgcgtaagtcatga

SEQ ID NO: 5828720 - DNA, 25 bp, Homo sapien
agttgctcacagtatatagttgtcg

SEQ ID NO: 5828721 - DNA, 25 bp, Homo sapien
cgacaactatatactgtgagcaact

SEQ ID NO: 5828722 - DNA, 25 bp, Homo sapien
ccaggaggttcgacccggagccgtg

SEQ ID NO: 5828723 - DNA, 25 bp, Homo sapien
cacggctccgggtcgaacctcctgg

SEQ ID NO: 5828724 - DNA, 25 bp, Homo sapien
cgctctgtcggccgcgtccgcccgt

SEQ ID NO: 5828725 - DNA, 25 bp, Homo sapien
acgggcggacgcggccgacagagcg

SEQ ID NO: 5828726 - DNA, 25 bp, Homo sapien
tcgctctgtcggccgcgtccgcccg

SEQ ID NO: 5828727 - DNA, 25 bp, Homo sapien
cgggcggacgcggccgacagagcga

SEQ ID NO: 5828728 - DNA, 25 bp, Homo sapien
gtagacgaactacataattgaacgt

SEQ ID NO: 5828729 - DNA, 25 bp, Homo sapien
acgttcaattatgtagttcgtctac

SEQ ID NO: 5828730 - DNA, 25 bp, Homo sapien
aaagaaagtagtccggtgtaagatg

SEQ ID NO: 5828731 - DNA, 25 bp, Homo sapien
catcttacaccggactactttcttt

SEQ ID NO: 5828732 - DNA, 25 bp, Homo sapien
aataagtcgtcaaatatgaatttgt

SEQ ID NO: 5828733 - DNA, 25 bp, Homo sapien
acaaattcatatttgacgacttatt

SEQ ID NO: 5828734 - DNA, 25 bp, Homo sapien
gtcattccagtctcatccctctggg

SEQ ID NO: 5828735 - DNA, 25 bp, Homo sapien
cccagagggatgagactggaatgac

SEQ ID NO: 5828736 - DNA, 25 bp, Homo sapien
caccacttaagaaggaatgaccggt

SEQ ID NO: 5828737 - DNA, 25 bp, Homo sapien
accggtcattccttcttaagtggtg

SEQ ID NO: 5828738 - DNA, 25 bp, Homo sapien
gtcggggtggttctcatgagacgga

SEQ ID NO: 5828739 - DNA, 25 bp, Homo sapien
tccgtctcatgagaaccaccccgac

SEQ ID NO: 5828740 - DNA, 25 bp, Homo sapien
cggggtggttctcatgagacggagg

SEQ ID NO: 5828741 - DNA, 25 bp, Homo sapien
cctccgtctcatgagaaccaccccg

SEQ ID NO: 5828742 - DNA, 25 bp, Homo sapien
acaacagagccggaactcgtcgaaa

SEQ ID NO: 5828743 - DNA, 25 bp, Homo sapien
tttcgacgagttccggctctgttgt

SEQ ID NO: 5828744 - DNA, 25 bp, Homo sapien
aaaagaaaattatagagactacatc

SEQ ID NO: 5828745 - DNA, 25 bp, Homo sapien
gatgtagtctctataattttctttt

SEQ ID NO: 5828746 - DNA, 25 bp, Homo sapien
atcgagccacatcgaacggacacct

SEQ ID NO: 5828747 - DNA, 25 bp, Homo sapien
aggtgtccgttcgatgtggctcgat

SEQ ID NO: 5828748 - DNA, 25 bp, Homo sapien
ggccgaggaggtccgccggagcggg

SEQ ID NO: 5828749 - DNA, 25 bp, Homo sapien
cccgctccggcggacctcctcggcc

SEQ ID NO: 5828750 - DNA, 25 bp, Homo sapien
gtctcggaccactgtcaggacgaca

SEQ ID NO: 5828751 - DNA, 25 bp, Homo sapien
tgtcgtcctgacagtggtccgagac

SEQ ID NO: 5828752 - DNA, 25 bp, Homo sapien
agggtccccaccattatcactacgt

SEQ ID NO: 5828753 - DNA, 25 bp, Homo sapien
acgtagtgataatggtggggaccct

SEQ ID NO: 5828754 - DNA, 25 bp, Homo sapien
gtcttcttatttagagtctcaaaag

SEQ ID NO: 5828755 - DNA, 25 bp, Homo sapien
cttttgagactctaaataagaagac

SEQ ID NO: 5828756 - DNA, 25 bp, Homo sapien
tcacattaataacatcattgtcaga

SEQ ID NO: 5828757 - DNA, 25 bp, Homo sapien
tctgacaatgatgttattaatgtga

SEQ ID NO: 5828758 - DNA, 25 bp, Homo sapien
ttgcgtcatacgtttactatagaag

SEQ ID NO: 5828759 - DNA, 25 bp, Homo sapien
cttctatagtaaacgtatgacgcaa

SEQ ID NO: 5828760 - DNA, 25 bp, Homo sapien
ccgacccctcctcttgtcgtgccca

SEQ ID NO: 5828761 - DNA, 25 bp, Homo sapien
tgggcacgacaagaggaggggtcgg

SEQ ID NO: 5828762 - DNA, 25 bp, Homo sapien
acagggacctatataaggaaaaaga

SEQ ID NO: 5828763 - DNA, 25 bp, Homo sapien
tctttttccttatataggtccctgt

SEQ ID NO: 5828764 - DNA, 25 bp, Homo sapien
ggtgtcgtagacccgtagggcgtga

SEQ ID NO: 5828765 - DNA, 25 bp, Homo sapien
tcacgccctacgggtctacgacacc

SEQ ID NO: 5828766 - DNA, 25 bp, Homo sapien
ttctaaatgtaactatcaacttaaa

SEQ ID NO: 5828767 - DNA, 25 bp, Homo sapien
tttaagttgatagttacatttagaa

SEQ ID NO: 5828768 - DNA, 25 bp, Homo sapien
cctacactacgcaaggtagtgtgaa

SEQ ID NO: 5828769 - DNA, 25 bp, Homo sapien
ttcacactaccttgcgtagtgtagg

SEQ ID NO: 5828770 - DNA, 25 bp, Homo sapien
tcacctttactaattagtgaagtcg

SEQ ID NO: 5828771 - DNA, 25 bp, Homo sapien
cgacttcactaattagtaaaggtga

SEQ ID NO: 5828772 - DNA, 25 bp, Homo sapien
aaggagtctactatatagtttaagg

SEQ ID NO: 5828773 - DNA, 25 bp, Homo sapien
ccttaaactatatagtagactcctt

SEQ ID NO: 5828774 - DNA, 25 bp, Homo sapien
actggtgaacgagtcggaatgagac

SEQ ID NO: 5828775 - DNA, 25 bp, Homo sapien
gtctcattccgactcgttcaccagt

SEQ ID NO: 5828776 - DNA, 25 bp, Homo sapien
cccgtagtctgtcacgtcgacaaca

SEQ ID NO: 5828777 - DNA, 25 bp, Homo sapien
tgttgtcgacgtgacagactacggg

SEQ ID NO: 5828778 - DNA, 25 bp, Homo sapien
aacacgttgtagtaacgaaccatgt

SEQ ID NO: 5828779 - DNA, 25 bp, Homo sapien
acatggttcgttactacaacgtgtt

SEQ ID NO: 5828780 - DNA, 25 bp, Homo sapien
ttcatagaagttattccaatctttg

SEQ ID NO: 5828781 - DNA, 25 bp, Homo sapien
caaagattggaataacttctatgaa

SEQ ID NO: 5828782 - DNA, 25 bp, Homo sapien
cgtcccacctctatcccgtcttttg

SEQ ID NO: 5828783 - DNA, 25 bp, Homo sapien
caaaagacgggatagaggtgggacg

SEQ ID NO: 5828784 - DNA, 25 bp, Homo sapien
acctccagtgttctcggacacgtgt

SEQ ID NO: 5828785 - DNA, 25 bp, Homo sapien
acacgtgtccgagaacactggaggt

SEQ ID NO: 5828786 - DNA, 25 bp, Homo sapien
gtggaccttccagagtaaaaatttc

SEQ ID NO: 5828787 - DNA, 25 bp, Homo sapien
gaaatttttactctggaaggtccac

SEQ ID NO: 5828788 - DNA, 25 bp, Homo sapien
tttcgacgtatctattcttgagtgt

SEQ ID NO: 5828789 - DNA, 25 bp, Homo sapien
acactcaagaatagatacgtcgaaa

SEQ ID NO: 5828790 - DNA, 25 bp, Homo sapien
aacttctttactagggtcaatctac

SEQ ID NO: 5828791 - DNA, 25 bp, Homo sapien
gtagattgaccctagtaaagaagtt

SEQ ID NO: 5828792 - DNA, 25 bp, Homo sapien
ggtcgagtcctgccggtgcggtccc

SEQ ID NO: 5828793 - DNA, 25 bp, Homo sapien
gggaccgcaccggcaggactcgacc

SEQ ID NO: 5828794 - DNA, 25 bp, Homo sapien
gtgtgtagtcgacacgtcggaagga

SEQ ID NO: 5828795 - DNA, 25 bp, Homo sapien
tccttccgacgtgtcgactacacac

SEQ ID NO: 5828796 - DNA, 25 bp, Homo sapien
gaggttctcctgaccacacctgtcg

SEQ ID NO: 5828797 - DNA, 25 bp, Homo sapien
cgacaggtgtggtcaggagaacctc

SEQ ID NO: 5828798 - DNA, 25 bp, Homo sapien
gaatcgcacatgactccaaggtccg

SEQ ID NO: 5828799 - DNA, 25 bp, Homo sapien
cggaccttggagtcatgtgcgattc

SEQ ID NO: 5828800 - DNA, 25 bp, Homo sapien
gttttcctcattttctaaagaatct

SEQ ID NO: 5828801 - DNA, 25 bp, Homo sapien
agattctttagaaaatgaggaaaac

SEQ ID NO: 5828802 - DNA, 25 bp, Homo sapien
ataccagagacatcaagggtctacc

SEQ ID NO: 5828803 - DNA, 25 bp, Homo sapien
ggtagacccttgatgtctctggtat

SEQ ID NO: 5828804 - DNA, 25 bp, Homo sapien
tcaaatcatgcaagagacactatat

SEQ ID NO: 5828805 - DNA, 25 bp, Homo sapien
atatagtgtctcttgcatgatttga

SEQ ID NO: 5828806 - DNA, 25 bp, Homo sapien
tttaaccaacgacttcgaggccagt

SEQ ID NO: 5828807 - DNA, 25 bp, Homo sapien
actggcctcgaagtcgttggttaaa

SEQ ID NO: 5828808 - DNA, 25 bp, Homo sapien
tggttcttatacaaatgagagtatt

SEQ ID NO: 5828809 - DNA, 25 bp, Homo sapien
aatactctcatttgtataagaacca

SEQ ID NO: 5828810 - DNA, 25 bp, Homo sapien
actctaatactttacgtattgagta

SEQ ID NO: 5828811 - DNA, 25 bp, Homo sapien
tactcaatacgtaaagtattagagt

SEQ ID NO: 5828812 - DNA, 25 bp, Homo sapien
gtttgagcattttagggcggatagt

SEQ ID NO: 5828813 - DNA, 25 bp, Homo sapien
actatccgccctaaaatgctcaaac

SEQ ID NO: 5828814 - DNA, 25 bp, Homo sapien
tccgaagggtaggggctaaaggcta

SEQ ID NO: 5828815 - DNA, 25 bp, Homo sapien
tagcctttagcccctacccttcgga

SEQ ID NO: 5828816 - DNA, 25 bp, Homo sapien
agggacggagcagggtgtaagtcgg

SEQ ID NO: 5828817 - DNA, 25 bp, Homo sapien
ccgacttacaccctgctccgtccct

SEQ ID NO: 5828818 - DNA, 25 bp, Homo sapien
ttaccgtaatatccatgaaacatgg

SEQ ID NO: 5828819 - DNA, 25 bp, Homo sapien
ccatgtttcatggatattacggtaa

SEQ ID NO: 5828820 - DNA, 25 bp, Homo sapien
acactatttaactcgtccttgtaaa

SEQ ID NO: 5828821 - DNA, 25 bp, Homo sapien
tttacaaggacgagttaaatagtgt

SEQ ID NO: 5828822 - DNA, 25 bp, Homo sapien
tgtccaactacctactatcctaggt

SEQ ID NO: 5828823 - DNA, 25 bp, Homo sapien
acctaggatagtaggtagttggaca

SEQ ID NO: 5828824 - DNA, 25 bp, Homo sapien
gcggcgggcactcgtcccggcccgt

SEQ ID NO: 5828825 - DNA, 25 bp, Homo sapien
acgggccgggacgagtgcccgccgc

SEQ ID NO: 5828826 - DNA, 25 bp, Homo sapien
agtggcccagggcgacggcgcgacg

SEQ ID NO: 5828827 - DNA, 25 bp, Homo sapien
cgtcgcgccgtcgccctgggccact

SEQ ID NO: 5828828 - DNA, 25 bp, Homo sapien
gccacggtggcctgccaggtccggg

SEQ ID NO: 5828829 - DNA, 25 bp, Homo sapien
cccggacctggcaggccaccgtggc

SEQ ID NO: 5828830 - DNA, 25 bp, Homo sapien
tcatcctttgttagtgacaccgtat

SEQ ID NO: 5828831 - DNA, 25 bp, Homo sapien
atacggtgtcactaacaaaggatga

SEQ ID NO: 5828832 - DNA, 25 bp, Homo sapien
ccggtgcaaatgtcgtggagtatag

SEQ ID NO: 5828833 - DNA, 25 bp, Homo sapien
ctatactccacgacatttgcaccgg

SEQ ID NO: 5828834 - DNA, 25 bp, Homo sapien
ctctgtctcggaccactacctacca

SEQ ID NO: 5828835 - DNA, 25 bp, Homo sapien
tggtaggtagtggtccgagacagag

SEQ ID NO: 5828836 - DNA, 25 bp, Homo sapien
ttgaaacgaattacccgaactggtg

SEQ ID NO: 5828837 - DNA, 25 bp, Homo sapien
caccagttcgggtaattcgtttcaa

SEQ ID NO: 5828838 - DNA, 25 bp, Homo sapien
gaagaatcaattcccactaaataag

SEQ ID NO: 5828839 - DNA, 25 bp, Homo sapien
cttatttagtgggaattgattcttc

SEQ ID NO: 5828840 - DNA, 25 bp, Homo sapien
caggaggttggacaccaactcctcg

SEQ ID NO: 5828841 - DNA, 25 bp, Homo sapien
cgaggagttggtgtccaacctcctg

SEQ ID NO: 5828842 - DNA, 25 bp, Homo sapien
ggcctcctcgaacgcggggcctcgc

SEQ ID NO: 5828843 - DNA, 25 bp, Homo sapien
gcgaggccccgcgttcgaggaggcc

SEQ ID NO: 5828844 - DNA, 25 bp, Homo sapien
cctcctcgaacgcggggcctcgccc

SEQ ID NO: 5828845 - DNA, 25 bp, Homo sapien
gggcgaggccccgcgttcgaggagg

SEQ ID NO: 5828846 - DNA, 25 bp, Homo sapien
gcctcctcgaacgcggggcctcgcc

SEQ ID NO: 5828847 - DNA, 25 bp, Homo sapien
ggcgaggccccgcgttcgaggaggc

SEQ ID NO: 5828848 - DNA, 25 bp, Homo sapien
ggtcggtgtccttacccttggcgat

SEQ ID NO: 5828849 - DNA, 25 bp, Homo sapien
atcgccaagggtaaggacaccgacc

SEQ ID NO: 5828850 - DNA, 25 bp, Homo sapien
ggtcccctcggtgctcccgggacgc

SEQ ID NO: 5828851 - DNA, 25 bp, Homo sapien
gcgtcccgggagcaccgaggggacc

SEQ ID NO: 5828852 - DNA, 25 bp, Homo sapien
cccgcgcgcgctcggtcccctcggt

SEQ ID NO: 5828853 - DNA, 25 bp, Homo sapien
accgaggggaccgagcgcgcgcggg

SEQ ID NO: 5828854 - DNA, 25 bp, Homo sapien
gtacaatatgtcctacaaatttcac

SEQ ID NO: 5828855 - DNA, 25 bp, Homo sapien
gtgaaatttgtaggacatattgtac

SEQ ID NO: 5828856 - DNA, 25 bp, Homo sapien
gtaacgaaacgtccgccatcaccgg

SEQ ID NO: 5828857 - DNA, 25 bp, Homo sapien
ccggtgatggcggacgtttcgttac

SEQ ID NO: 5828858 - DNA, 25 bp, Homo sapien
aggtttctctctatacagtctgaca

SEQ ID NO: 5828859 - DNA, 25 bp, Homo sapien
tgtcagactgtatagagagaaacct

SEQ ID NO: 5828860 - DNA, 25 bp, Homo sapien
agcggcgacccgctgggtctcgggg

SEQ ID NO: 5828861 - DNA, 25 bp, Homo sapien
ccccgagacccagcgggtcgccgct

SEQ ID NO: 5828862 - DNA, 25 bp, Homo sapien
gcgaaagcggcgacccgctgggtct

SEQ ID NO: 5828863 - DNA, 25 bp, Homo sapien
agacccagcgggtcgccgctttcgc

SEQ ID NO: 5828864 - DNA, 25 bp, Homo sapien
acaagaaacgagaggaccgacctga

SEQ ID NO: 5828865 - DNA, 25 bp, Homo sapien
tcaggtcggtcctctcgtttcttgt

SEQ ID NO: 5828866 - DNA, 25 bp, Homo sapien
taagacaacgattacaattgtagtt

SEQ ID NO: 5828867 - DNA, 25 bp, Homo sapien
aactacaattgtaatcgttgtctta

SEQ ID NO: 5828868 - DNA, 25 bp, Homo sapien
agtcccggtggttaatgatcccatg

SEQ ID NO: 5828869 - DNA, 25 bp, Homo sapien
catgggatcattaaccaccgggact

SEQ ID NO: 5828870 - DNA, 25 bp, Homo sapien
gacttgacggtccatggttcaccat

SEQ ID NO: 5828871 - DNA, 25 bp, Homo sapien
atggtgaaccatggaccgtcaagtc

SEQ ID NO: 5828872 - DNA, 25 bp, Homo sapien
cccttagtaacctggtgacttacag

SEQ ID NO: 5828873 - DNA, 25 bp, Homo sapien
ctgtaagtcaccaggttactaaggg

SEQ ID NO: 5828874 - DNA, 25 bp, Homo sapien
cgagtcacgactttcacaggtatga

SEQ ID NO: 5828875 - DNA, 25 bp, Homo sapien
tcatacctgtgaaagtcgtgactcg

SEQ ID NO: 5828876 - DNA, 25 bp, Homo sapien
agagggacaacgagattttgttcag

SEQ ID NO: 5828877 - DNA, 25 bp, Homo sapien
ctgaacaaaatctcgttgtccctct

SEQ ID NO: 5828878 - DNA, 25 bp, Homo sapien
aagaagtgttggaggctcgagactc

SEQ ID NO: 5828879 - DNA, 25 bp, Homo sapien
gagtctcgagcctccaacacttctt

SEQ ID NO: 5828880 - DNA, 25 bp, Homo sapien
atcgatatgcatggactgctgttgc

SEQ ID NO: 5828881 - DNA, 25 bp, Homo sapien
tgaccatttgtgtatcgatatgcat

SEQ ID NO: 5828882 - DNA, 25 bp, Homo sapien
cagaactgcagcaccaaatttgccc

SEQ ID NO: 5828883 - DNA, 25 bp, Homo sapien
accatttgtgtatcgatatgcatgg

SEQ ID NO: 5828884 - DNA, 25 bp, Homo sapien
ttgtgtatcgatatgcatggactgc

SEQ ID NO: 5828885 - DNA, 25 bp, Homo sapien
tatcgatatgcatggactgctgttg

SEQ ID NO: 5828886 - DNA, 25 bp, Homo sapien
ccagaactgcagcaccaaatttgcc

SEQ ID NO: 5828887 - DNA, 25 bp, Homo sapien
ttgaccatttgtgtatcgatatgca

SEQ ID NO: 5828888 - DNA, 25 bp, Homo sapien
gtgtatcgatatgcatggactgctg

SEQ ID NO: 5828889 - DNA, 25 bp, Homo sapien
ccatttgtgtatcgatatgcatgga

SEQ ID NO: 5828890 - DNA, 25 bp, Homo sapien
tgtgtatcgatatgcatggactgct

SEQ ID NO: 5828891 - DNA, 25 bp, Homo sapien
tgtatcgatatgcatggactgctgt

SEQ ID NO: 5828892 - DNA, 25 bp, Homo sapien
gaccatttgtgtatcgatatgcatg

SEQ ID NO: 5828893 - DNA, 25 bp, Homo sapien
catttgtgtatcgatatgcatggac

SEQ ID NO: 5828894 - DNA, 25 bp, Homo sapien
gtatcgatatgcatggactgctgtt

SEQ ID NO: 5828895 - DNA, 25 bp, Homo sapien
tcgatatgcatggactgctgttgcg

SEQ ID NO: 5828896 - DNA, 25 bp, Homo sapien
gaaataacctgactattactatagg

SEQ ID NO: 5828897 - DNA, 25 bp, Homo sapien
cctatagtaatagtcaggttatttc

SEQ ID NO: 5828898 - DNA, 25 bp, Homo sapien
tgtccgacggccacactaaagacac

SEQ ID NO: 5828899 - DNA, 25 bp, Homo sapien
gtgtctttagtgtggccgtcggaca

SEQ ID NO: 5828900 - DNA, 25 bp, Homo sapien
gggagagggtggacctgagccggct

SEQ ID NO: 5828901 - DNA, 25 bp, Homo sapien
agccggctcaggtccaccctctccc

SEQ ID NO: 5828902 - DNA, 25 bp, Homo sapien
tgtctccgcacgaggcgtcgcggcg

SEQ ID NO: 5828903 - DNA, 25 bp, Homo sapien
cgccgcgacgcctcgtgcggagaca

SEQ ID NO: 5828904 - DNA, 25 bp, Homo sapien
aatctcccagagacataacacgctc

SEQ ID NO: 5828905 - DNA, 25 bp, Homo sapien
gagcgtgttatgtctctgggagatt

SEQ ID NO: 5828906 - DNA, 25 bp, Homo sapien
tgtacatttttctgcgaacggttat

SEQ ID NO: 5828907 - DNA, 25 bp, Homo sapien
ataaccgttcgcagaaaaatgtaca

SEQ ID NO: 5828908 - DNA, 25 bp, Homo sapien
acaccccatcggtctctaccctatc

SEQ ID NO: 5828909 - DNA, 25 bp, Homo sapien
gatagggtagagaccgatggggtgt

SEQ ID NO: 5828910 - DNA, 25 bp, Homo sapien
tcgagagtcctctggttccccctag

SEQ ID NO: 5828911 - DNA, 25 bp, Homo sapien
ctagggggaaccagaggactctcga

SEQ ID NO: 5828912 - DNA, 25 bp, Homo sapien
tcggtgccgggtgctcccagtggtc

SEQ ID NO: 5828913 - DNA, 25 bp, Homo sapien
gaccactgggagcacccggcaccga

SEQ ID NO: 5828914 - DNA, 25 bp, Homo sapien
atataaatggtatttgtcaagtggg

SEQ ID NO: 5828915 - DNA, 25 bp, Homo sapien
cccacttgacaaataccatttatat

SEQ ID NO: 5828916 - DNA, 25 bp, Homo sapien
agtttaggagtattattgtttccac

SEQ ID NO: 5828917 - DNA, 25 bp, Homo sapien
gtggaaacaataatactcctaaact

SEQ ID NO: 5828918 - DNA, 25 bp, Homo sapien
aatttcacgctactaaaaatattaa

SEQ ID NO: 5828919 - DNA, 25 bp, Homo sapien
ttaatatttttagtagcgtgaaatt

SEQ ID NO: 5828920 - DNA, 25 bp, Homo sapien
tcgtcctctcctgcgtcgaccctcc

SEQ ID NO: 5828921 - DNA, 25 bp, Homo sapien
ggagggtcgacgcaggagaggacga

SEQ ID NO: 5828922 - DNA, 25 bp, Homo sapien
aagtttactgtgtaatcacactaaa

SEQ ID NO: 5828923 - DNA, 25 bp, Homo sapien
tttagtgtgattacacagtaaactt

SEQ ID NO: 5828924 - DNA, 25 bp, Homo sapien
gagcgtcggctccacggccgcccct

SEQ ID NO: 5828925 - DNA, 25 bp, Homo sapien
aggggcggccgtggagccgacgctc

SEQ ID NO: 5828926 - DNA, 25 bp, Homo sapien
gccgccacgagcgtcggctccacgg

SEQ ID NO: 5828927 - DNA, 25 bp, Homo sapien
ccgtggagccgacgctcgtggcggc

SEQ ID NO: 5828928 - DNA, 25 bp, Homo sapien
gcccccacgacgcagaccccccacg

SEQ ID NO: 5828929 - DNA, 25 bp, Homo sapien
cgtggggggtctgcgtcgtgggggc

SEQ ID NO: 5828930 - DNA, 25 bp, Homo sapien
gtgcggcccatgaccggacgggccg

SEQ ID NO: 5828931 - DNA, 25 bp, Homo sapien
cggcccgtccggtcatgggccgcac

SEQ ID NO: 5828932 - DNA, 25 bp, Homo sapien
cccgtgtgtgtgcgcctgtagtcca

SEQ ID NO: 5828933 - DNA, 25 bp, Homo sapien
tggactacaggcgcacacacacggg

SEQ ID NO: 5828934 - DNA, 25 bp, Homo sapien
agaccctctgtatggtccttggaat

SEQ ID NO: 5828935 - DNA, 25 bp, Homo sapien
attccaaggaccatacagagggtct

SEQ ID NO: 5828936 - DNA, 25 bp, Homo sapien
gaggagaacggtcccatgcgctgcc

SEQ ID NO: 5828937 - DNA, 25 bp, Homo sapien
ggcagcgcatgggaccgttctcctc

SEQ ID NO: 5828938 - DNA, 25 bp, Homo sapien
tctcctgttgtaaacatcaagacgt

SEQ ID NO: 5828939 - DNA, 25 bp, Homo sapien
acgtcttgatgtttacaacaggaga

SEQ ID NO: 5828940 - DNA, 25 bp, Homo sapien
ttttacaatgtatactgtcctgtat

SEQ ID NO: 5828941 - DNA, 25 bp, Homo sapien
atacaggacagtatacattgtaaaa

SEQ ID NO: 5828942 - DNA, 25 bp, Homo sapien
cgtccggcgcgacggctgcagagtg

SEQ ID NO: 5828943 - DNA, 25 bp, Homo sapien
cactctgcagccgtcgcgccggacg

SEQ ID NO: 5828944 - DNA, 25 bp, Homo sapien
tcttgacgccacagcgcggagggcc

SEQ ID NO: 5828945 - DNA, 25 bp, Homo sapien
ggccctccgcgctgtggcgtcaaga

SEQ ID NO: 5828946 - DNA, 25 bp, Homo sapien
gttgagttgaaactaagaacaattt

SEQ ID NO: 5828947 - DNA, 25 bp, Homo sapien
aaattgttcttagtttcaactcaac

SEQ ID NO: 5828948 - DNA, 25 bp, Homo sapien
tgtctcaccggcagtaatgaccgat

SEQ ID NO: 5828949 - DNA, 25 bp, Homo sapien
atcggtcattactgccggtgagaca

SEQ ID NO: 5828950 - DNA, 25 bp, Homo sapien
agagacatcggactgtaaacattat

SEQ ID NO: 5828951 - DNA, 25 bp, Homo sapien
ataatgtttacagtccgatgtctct

SEQ ID NO: 5828952 - DNA, 25 bp, Homo sapien
gcgctgccggcgttcgggcagacgc

SEQ ID NO: 5828953 - DNA, 25 bp, Homo sapien
gcgtctgcccgaacgccggcagcgc

SEQ ID NO: 5828954 - DNA, 25 bp, Homo sapien
agacaaatgaccttgattaaggtct

SEQ ID NO: 5828955 - DNA, 25 bp, Homo sapien
agaccttaatcaaggtcatttgtct

SEQ ID NO: 5828956 - DNA, 25 bp, Homo sapien
cctcaaccccagtctcagggacggt

SEQ ID NO: 5828957 - DNA, 25 bp, Homo sapien
gtctcagggacggtggaaaagccat

SEQ ID NO: 5828958 - DNA, 25 bp, Homo sapien
gacggtggaaaagccatccaagacc

SEQ ID NO: 5828959 - DNA, 25 bp, Homo sapien
tcagtcccctcaaccccagtctcag

SEQ ID NO: 5828960 - DNA, 25 bp, Homo sapien
gagcgaggcctcatggttcaggagt

SEQ ID NO: 5828961 - DNA, 25 bp, Homo sapien
agggtgggggtggggatatcctgac

SEQ ID NO: 5828962 - DNA, 25 bp, Homo sapien
gcgaggcctcatggttcaggagtgg

SEQ ID NO: 5828963 - DNA, 25 bp, Homo sapien
accccagagcgaggcctcatggttc

SEQ ID NO: 5828964 - DNA, 25 bp, Homo sapien
agccatccaagaccccagagcgagg

SEQ ID NO: 5828965 - DNA, 25 bp, Homo sapien
agaccccagagcgaggcctcatggt

SEQ ID NO: 5828966 - DNA, 25 bp, Homo sapien
agtctcagggacggtggaaaagcca

SEQ ID NO: 5828967 - DNA, 25 bp, Homo sapien
gggatatcctgacccctcaggtgtc

SEQ ID NO: 5828968 - DNA, 25 bp, Homo sapien
agaacaggaggcccagccaccctgg

SEQ ID NO: 5828969 - DNA, 25 bp, Homo sapien
gaggcctcatggttcaggagtgggg

SEQ ID NO: 5828970 - DNA, 25 bp, Homo sapien
caggagtggggaaaggcgtctttcc

SEQ ID NO: 5828971 - DNA, 25 bp, Homo sapien
acggtggaaaagccatccaagaccc

SEQ ID NO: 5828972 - DNA, 25 bp, Homo sapien
taaacttaggttcaagggtcggtca

SEQ ID NO: 5828973 - DNA, 25 bp, Homo sapien
tgaccgacccttgaacctaagttta

SEQ ID NO: 5828974 - DNA, 25 bp, Homo sapien
gtcccatgactgtcgggtccggtac

SEQ ID NO: 5828975 - DNA, 25 bp, Homo sapien
gtaccggacccgacagtcatgggac

SEQ ID NO: 5828976 - DNA, 25 bp, Homo sapien
caggagggaccggtgggatgacaca

SEQ ID NO: 5828977 - DNA, 25 bp, Homo sapien
tgtgtcatcccaccggtccctcctg

SEQ ID NO: 5828978 - DNA, 25 bp, Homo sapien
ccgcaggtaatttgatctaactaat

SEQ ID NO: 5828979 - DNA, 25 bp, Homo sapien
attagttagatcaaattacctgcgg

SEQ ID NO: 5828980 - DNA, 25 bp, Homo sapien
ccggtgcacgactcacggctgacgg

SEQ ID NO: 5828981 - DNA, 25 bp, Homo sapien
ccgtcagccgtgagtcgtgcaccgg

SEQ ID NO: 5828982 - DNA, 25 bp, Homo sapien
tcacggaacaaatacggaaaaatgt

SEQ ID NO: 5828983 - DNA, 25 bp, Homo sapien
acatttttccgtatttgttccgtga

SEQ ID NO: 5828984 - DNA, 25 bp, Homo sapien
ttagaagaacactaatcgatataaa

SEQ ID NO: 5828985 - DNA, 25 bp, Homo sapien
tttatatcgattagtgttcttctaa

SEQ ID NO: 5828986 - DNA, 25 bp, Homo sapien
tgtccagcggccctaggatcactgc

SEQ ID NO: 5828987 - DNA, 25 bp, Homo sapien
gcagtgatcctagggccgctggaca

SEQ ID NO: 5828988 - DNA, 25 bp, Homo sapien
tttgaactagaggtaggtcggaact

SEQ ID NO: 5828989 - DNA, 25 bp, Homo sapien
agttccgacctacctctagttcaaa

SEQ ID NO: 5828990 - DNA, 25 bp, Homo sapien
cgcctctcccgcgacgcgtcgccgc

SEQ ID NO: 5828991 - DNA, 25 bp, Homo sapien
gcggcgacgcgtcgcgggagaggcg

SEQ ID NO: 5828992 - DNA, 25 bp, Homo sapien
ccgcctctcccgcgacgcgtcgccg

SEQ ID NO: 5828993 - DNA, 25 bp, Homo sapien
cggcgacgcgtcgcgggagaggcgg

SEQ ID NO: 5828994 - DNA, 25 bp, Homo sapien
acccaatgtgcaggtgtcgtcccaa

SEQ ID NO: 5828995 - DNA, 25 bp, Homo sapien
ttgggacgacacctgcacattgggt

SEQ ID NO: 5828996 - DNA, 25 bp, Homo sapien
agtggcactagtatgacaggttgag

SEQ ID NO: 5828997 - DNA, 25 bp, Homo sapien
ctcaacctgtcatactagtgccact

SEQ ID NO: 5828998 - DNA, 25 bp, Homo sapien
gtcccagtggcactagtatgacagg

SEQ ID NO: 5828999 - DNA, 25 bp, Homo sapien
cctgtcatactagtgccactgggac

SEQ ID NO: 5829000 - DNA, 25 bp, Homo sapien
tcacgtgtgagtcttgttaacccac

SEQ ID NO: 5829001 - DNA, 25 bp, Homo sapien
gtgggttaacaagactcacacgtga

SEQ ID NO: 5829002 - DNA, 25 bp, Homo sapien
accaggaacggtgactctcggtacc

SEQ ID NO: 5829003 - DNA, 25 bp, Homo sapien
ggtaccgagagtcaccgttcctggt

SEQ ID NO: 5829004 - DNA, 25 bp, Homo sapien
agtaaatgaaacttccatcatagtc

SEQ ID NO: 5829005 - DNA, 25 bp, Homo sapien
gactatgatggaagtttcatttact

SEQ ID NO: 5829006 - DNA, 25 bp, Homo sapien
tgacactacccccatccaccgtccg

SEQ ID NO: 5829007 - DNA, 25 bp, Homo sapien
cggacggtggatgggggtagtgtca

SEQ ID NO: 5829008 - DNA, 25 bp, Homo sapien
catctcaggtactgtacacttgggt

SEQ ID NO: 5829009 - DNA, 25 bp, Homo sapien
acccaagtgtacagtacctgagatg

SEQ ID NO: 5829010 - DNA, 25 bp, Homo sapien
gggtaggaagtccacatctgcgttt

SEQ ID NO: 5829011 - DNA, 25 bp, Homo sapien
aaacgcagatgtggacttcctaccc

SEQ ID NO: 5829012 - DNA, 25 bp, Homo sapien
cgatgctggtctgagacgcccgcag

SEQ ID NO: 5829013 - DNA, 25 bp, Homo sapien
ctgcgggcgtctcagaccagcatcg

SEQ ID NO: 5829014 - DNA, 25 bp, Homo sapien
ttccacggccggagattccgtcggg

SEQ ID NO: 5829015 - DNA, 25 bp, Homo sapien
cccgacggaatctccggccgtggaa

SEQ ID NO: 5829016 - DNA, 25 bp, Homo sapien
agtgttacactggtgtttcttcagg

SEQ ID NO: 5829017 - DNA, 25 bp, Homo sapien
cctgaagaaacaccagtgtaacact

SEQ ID NO: 5829018 - DNA, 25 bp, Homo sapien
ttaggagacatcgataaaaaaaaca

SEQ ID NO: 5829019 - DNA, 25 bp, Homo sapien
tgttttttttatcgatgtctcctaa

SEQ ID NO: 5829020 - DNA, 25 bp, Homo sapien
caccttaaaggagatttctactctt

SEQ ID NO: 5829021 - DNA, 25 bp, Homo sapien
aagagtagaaatctcctttaaggtg

SEQ ID NO: 5829022 - DNA, 25 bp, Homo sapien
actaagtccagatagacttgaaaaa

SEQ ID NO: 5829023 - DNA, 25 bp, Homo sapien
tttttcaagtctatctggacttagt

SEQ ID NO: 5829024 - DNA, 25 bp, Homo sapien
aaaactaagtccagatagacttgaa

SEQ ID NO: 5829025 - DNA, 25 bp, Homo sapien
ttcaagtctatctggacttagtttt

SEQ ID NO: 5829026 - DNA, 25 bp, Homo sapien
gagaagatcacagaatctagggaag

SEQ ID NO: 5829027 - DNA, 25 bp, Homo sapien
cttccctagattctgtgatcttctc

SEQ ID NO: 5829028 - DNA, 25 bp, Homo sapien
attatacttagattatttacgacgt

SEQ ID NO: 5829029 - DNA, 25 bp, Homo sapien
acgtcgtaaataatctaagtataat

SEQ ID NO: 5829030 - DNA, 25 bp, Homo sapien
gggtccaggccgacaatcccttcac

SEQ ID NO: 5829031 - DNA, 25 bp, Homo sapien
gtgaagggattgtcggcctggaccc

SEQ ID NO: 5829032 - DNA, 25 bp, Homo sapien
tcggcgccgagaggagcggccgcgg

SEQ ID NO: 5829033 - DNA, 25 bp, Homo sapien
ccgcggccgctcctctcggcgccga

SEQ ID NO: 5829034 - DNA, 25 bp, Homo sapien
acgtcggcgccgagaggagcggccg

SEQ ID NO: 5829035 - DNA, 25 bp, Homo sapien
cggccgctcctctcggcgccgacgt

SEQ ID NO: 5829036 - DNA, 25 bp, Homo sapien
gacgtcggcgccgagaggagcggcc

SEQ ID NO: 5829037 - DNA, 25 bp, Homo sapien
ggccgctcctctcggcgccgacgtc

SEQ ID NO: 5829038 - DNA, 25 bp, Homo sapien
agcatcaccggaaacgcgcgggttt

SEQ ID NO: 5829039 - DNA, 25 bp, Homo sapien
aaacccgcgcgtttccggtgatgct

SEQ ID NO: 5829040 - DNA, 25 bp, Homo sapien
aattgaggtgtgtcttgttttaaat

SEQ ID NO: 5829041 - DNA, 25 bp, Homo sapien
atttaaaacaagacacacctcaatt

SEQ ID NO: 5829042 - DNA, 25 bp, Homo sapien
cgacagggtaattccttacttgtgt

SEQ ID NO: 5829043 - DNA, 25 bp, Homo sapien
acacaagtaaggaattaccctgtcg

SEQ ID NO: 5829044 - DNA, 25 bp, Homo sapien
tcatattaggaagttgtaatgtatg

SEQ ID NO: 5829045 - DNA, 25 bp, Homo sapien
catacattacaacttcctaatatga

SEQ ID NO: 5829046 - DNA, 25 bp, Homo sapien
gagttccttagaaacatgcaaaaag

SEQ ID NO: 5829047 - DNA, 25 bp, Homo sapien
ctttttgcatgtttctaaggaactc

SEQ ID NO: 5829048 - DNA, 25 bp, Homo sapien
tccccacagactcgtgcacagggag

SEQ ID NO: 5829049 - DNA, 25 bp, Homo sapien
ctccctgtgcacgagtctgtgggga

SEQ ID NO: 5829050 - DNA, 25 bp, Homo sapien
ctcaagggggtcgtcgcttggaacc

SEQ ID NO: 5829051 - DNA, 25 bp, Homo sapien
ggttccaagcgacgacccccttgag

SEQ ID NO: 5829052 - DNA, 25 bp, Homo sapien
tcctgtggtccccaagggacctccg

SEQ ID NO: 5829053 - DNA, 25 bp, Homo sapien
cggaggtcccttggggaccacagga

SEQ ID NO: 5829054 - DNA, 25 bp, Homo sapien
ggctcctccgggtaacgtgttcagg

SEQ ID NO: 5829055 - DNA, 25 bp, Homo sapien
cctgaacacgttacccggaggagcc

SEQ ID NO: 5829056 - DNA, 25 bp, Homo sapien
gatctcgtccaccctgttactcact

SEQ ID NO: 5829057 - DNA, 25 bp, Homo sapien
agtgagtaacagggtggacgagatc

SEQ ID NO: 5829058 - DNA, 25 bp, Homo sapien
tgaaaattcgtgactcttaacaggt

SEQ ID NO: 5829059 - DNA, 25 bp, Homo sapien
acctgttaagagtcacgaattttca

SEQ ID NO: 5829060 - DNA, 25 bp, Homo sapien
agaactaacattggaccacaagaac

SEQ ID NO: 5829061 - DNA, 25 bp, Homo sapien
gttcttgtggtccaatgttagttct

SEQ ID NO: 5829062 - DNA, 25 bp, Homo sapien
ttccctatactccacgacatttgca

SEQ ID NO: 5829063 - DNA, 25 bp, Homo sapien
tgcaaatgtcgtggagtatagggaa

SEQ ID NO: 5829064 - DNA, 25 bp, Homo sapien
gagttttctcatacaacgaattagt

SEQ ID NO: 5829065 - DNA, 25 bp, Homo sapien
actaattcgttgtatgagaaaactc

SEQ ID NO: 5829066 - DNA, 25 bp, Homo sapien
cgtcgactccggcaggacggtcgtg

SEQ ID NO: 5829067 - DNA, 25 bp, Homo sapien
cacgaccgtcctgccggagtcgacg

SEQ ID NO: 5829068 - DNA, 25 bp, Homo sapien
attaactttgggagtctattagacg

SEQ ID NO: 5829069 - DNA, 25 bp, Homo sapien
cgtctaatagactcccaaagttaat

SEQ ID NO: 5829070 - DNA, 25 bp, Homo sapien
tttaatagtataaggtagtctcagt

SEQ ID NO: 5829071 - DNA, 25 bp, Homo sapien
actgagactaccttatactattaaa

SEQ ID NO: 5829072 - DNA, 25 bp, Homo sapien
caacataattataatcaaggagaac

SEQ ID NO: 5829073 - DNA, 25 bp, Homo sapien
gttctccttgattataattatgttg

SEQ ID NO: 5829074 - DNA, 25 bp, Homo sapien
gcaccgaacttctcctcagtcaagg

SEQ ID NO: 5829075 - DNA, 25 bp, Homo sapien
ccttgactgaggagaagttcggtgc

SEQ ID NO: 5829076 - DNA, 25 bp, Homo sapien
ccgtcggggtgctgctgcgccgtcg

SEQ ID NO: 5829077 - DNA, 25 bp, Homo sapien
cgacggcgcagcagcaccccgacgg

SEQ ID NO: 5829078 - DNA, 25 bp, Homo sapien
ctttttagactggtgcatacaggat

SEQ ID NO: 5829079 - DNA, 25 bp, Homo sapien
atcctgtatgcaccagtctaaaaag

SEQ ID NO: 5829080 - DNA, 25 bp, Homo sapien
tctcgagtaccaagaaagacacgag

SEQ ID NO: 5829081 - DNA, 25 bp, Homo sapien
ctcgtgtctttcttggtactcgaga

SEQ ID NO: 5829082 - DNA, 25 bp, Homo sapien
gtcgatatcgtagacccagtcaaag

SEQ ID NO: 5829083 - DNA, 25 bp, Homo sapien
ctttgactgggtctacgatatcgac

SEQ ID NO: 5829084 - DNA, 25 bp, Homo sapien
aacatgtcatccgtacctttcgtat

SEQ ID NO: 5829085 - DNA, 25 bp, Homo sapien
atacgaaaggtacggatgacatgtt

SEQ ID NO: 5829086 - DNA, 25 bp, Homo sapien
acctcggacgagtcgggtctacgac

SEQ ID NO: 5829087 - DNA, 25 bp, Homo sapien
gtcgtagacccgactcgtccgaggt

SEQ ID NO: 5829088 - DNA, 25 bp, Homo sapien
gacgtcgggacgacaggaccccgtc

SEQ ID NO: 5829089 - DNA, 25 bp, Homo sapien
gacggggtcctgtcgtcccgacgtc

SEQ ID NO: 5829090 - DNA, 25 bp, Homo sapien
accggtgacgttgtcttagtaagtc

SEQ ID NO: 5829091 - DNA, 25 bp, Homo sapien
gacttactaagacaacgtcaccggt

SEQ ID NO: 5829092 - DNA, 25 bp, Homo sapien
aagcccagaaagtcggcaaaattct

SEQ ID NO: 5829093 - DNA, 25 bp, Homo sapien
ctcaaagtttgagcacattggtatg

SEQ ID NO: 5829094 - DNA, 25 bp, Homo sapien
aaggagaatcagcaccttgtgatat

SEQ ID NO: 5829095 - DNA, 25 bp, Homo sapien
cagaacacctgagactagctcctgc

SEQ ID NO: 5829096 - DNA, 25 bp, Homo sapien
tagggcaagggactaccaccttcac

SEQ ID NO: 5829097 - DNA, 25 bp, Homo sapien
tgaggcatccccagaacacctgaga

SEQ ID NO: 5829098 - DNA, 25 bp, Homo sapien
ttattaacgtcgtggcccactcatt

SEQ ID NO: 5829099 - DNA, 25 bp, Homo sapien
gcagacaagcaggatccacagcaca

SEQ ID NO: 5829100 - DNA, 25 bp, Homo sapien
cacaaatgaggaaaccgaggaccct

SEQ ID NO: 5829101 - DNA, 25 bp, Homo sapien
caaccaagcccagaaagtcggcaaa

SEQ ID NO: 5829102 - DNA, 25 bp, Homo sapien
cttgtttcaatgtaaagaacgttac

SEQ ID NO: 5829103 - DNA, 25 bp, Homo sapien
accagggctcccactgagtctgggg

SEQ ID NO: 5829104 - DNA, 25 bp, Homo sapien
ccttgtgatatttaagcaggggcat

SEQ ID NO: 5829105 - DNA, 25 bp, Homo sapien
agggctcccactgagtctggggcac

SEQ ID NO: 5829106 - DNA, 25 bp, Homo sapien
accgaggaccctgctgggagagttt

SEQ ID NO: 5829107 - DNA, 25 bp, Homo sapien
agctcctgcaccacaaagcttcggt

SEQ ID NO: 5829108 - DNA, 25 bp, Homo sapien
agactggcccggtgcccggtgcctc

SEQ ID NO: 5829109 - DNA, 25 bp, Homo sapien
gaggcaccgggcaccgggccagtct

SEQ ID NO: 5829110 - DNA, 25 bp, Homo sapien
gtgccgcggaacacgcgagagcctc

SEQ ID NO: 5829111 - DNA, 25 bp, Homo sapien
gaggctctcgcgtgttccgcggcac

SEQ ID NO: 5829112 - DNA, 25 bp, Homo sapien
tgctgtacctaaacagaagaatccc

SEQ ID NO: 5829113 - DNA, 25 bp, Homo sapien
gggattcttctgtttaggtacagca

SEQ ID NO: 5829114 - DNA, 25 bp, Homo sapien
cgaggacctctgtaaccgctcatgt

SEQ ID NO: 5829115 - DNA, 25 bp, Homo sapien
acatgagcggttacagaggtcctcg

SEQ ID NO: 5829116 - DNA, 25 bp, Homo sapien
tgtaacattgtcaaacattgaagtg

SEQ ID NO: 5829117 - DNA, 25 bp, Homo sapien
cacttcaatgtttgacaatgttaca

SEQ ID NO: 5829118 - DNA, 25 bp, Homo sapien
acctcgtgcactgggctctcctccg

SEQ ID NO: 5829119 - DNA, 25 bp, Homo sapien
cggaggagagcccagtgcacgaggt

SEQ ID NO: 5829120 - DNA, 25 bp, Homo sapien
aaaccttcaggcttttcctactgag

SEQ ID NO: 5829121 - DNA, 25 bp, Homo sapien
ctcagtaggaaaagcctgaaggttt

SEQ ID NO: 5829122 - DNA, 25 bp, Homo sapien
gggtagagtacacgtactgagggac

SEQ ID NO: 5829123 - DNA, 25 bp, Homo sapien
gtccctcagtacgtgtactctaccc

SEQ ID NO: 5829124 - DNA, 25 bp, Homo sapien
agaccaagttatggtggattgtaac

SEQ ID NO: 5829125 - DNA, 25 bp, Homo sapien
gttacaatccaccataacttggtct

SEQ ID NO: 5829126 - DNA, 25 bp, Homo sapien
caggaccgccagacctgtacatgag

SEQ ID NO: 5829127 - DNA, 25 bp, Homo sapien
ctcatgtacaggtctggcggtcctg

SEQ ID NO: 5829128 - DNA, 25 bp, Homo sapien
gacactccacacgtgggcgtctaaa

SEQ ID NO: 5829129 - DNA, 25 bp, Homo sapien
tttagacgcccacgtgtggagtgtc

SEQ ID NO: 5829130 - DNA, 25 bp, Homo sapien
ctgactgccggcgacggtctggaag

SEQ ID NO: 5829131 - DNA, 25 bp, Homo sapien
cttccagaccgtcgccggcagtcag

SEQ ID NO: 5829132 - DNA, 25 bp, Homo sapien
tgtctctaaagcccccggtgtcagg

SEQ ID NO: 5829133 - DNA, 25 bp, Homo sapien
cctgacaccgggggctttagagaca

SEQ ID NO: 5829134 - DNA, 25 bp, Homo sapien
gagtagatgaagacctggcatgagt

SEQ ID NO: 5829135 - DNA, 25 bp, Homo sapien
actcatgccaggtcttcatctactc

SEQ ID NO: 5829136 - DNA, 25 bp, Homo sapien
gagtcaaatcattatcaaaatatat

SEQ ID NO: 5829137 - DNA, 25 bp, Homo sapien
atatattttgataatgatttgactc

SEQ ID NO: 5829138 - DNA, 25 bp, Homo sapien
tgagtcaaatcattatcaaaatata

SEQ ID NO: 5829139 - DNA, 25 bp, Homo sapien
tatattttgataatgatttgactca

SEQ ID NO: 5829140 - DNA, 25 bp, Homo sapien
gaccttccggcggcccgcctccgcg

SEQ ID NO: 5829141 - DNA, 25 bp, Homo sapien
cgcggaggcgggccgccggaaggtc

SEQ ID NO: 5829142 - DNA, 25 bp, Homo sapien
ccggcggcccgcctccgcgtctcgg

SEQ ID NO: 5829143 - DNA, 25 bp, Homo sapien
ccgagacgcggaggcgggccgccgg

SEQ ID NO: 5829144 - DNA, 25 bp, Homo sapien
tccggcggcccgcctccgcgtctcg

SEQ ID NO: 5829145 - DNA, 25 bp, Homo sapien
cgagacgcggaggcgggccgccgga

SEQ ID NO: 5829146 - DNA, 25 bp, Homo sapien
cacttcgtgtcaggacgaggtggat

SEQ ID NO: 5829147 - DNA, 25 bp, Homo sapien
atccacctcgtcctgacacgaagtg

SEQ ID NO: 5829148 - DNA, 25 bp, Homo sapien
tacagacgtctcctgcactatttaa

SEQ ID NO: 5829149 - DNA, 25 bp, Homo sapien
ttaaatagtgcaggagacgtctgta

SEQ ID NO: 5829150 - DNA, 25 bp, Homo sapien
tataactcactaatcttatgacggg

SEQ ID NO: 5829151 - DNA, 25 bp, Homo sapien
cccgtcataagattagtgagttata

SEQ ID NO: 5829152 - DNA, 25 bp, Homo sapien
ttattatttacttctttcctttgag

SEQ ID NO: 5829153 - DNA, 25 bp, Homo sapien
ctcaaaggaaagaagtaaataataa

SEQ ID NO: 5829154 - DNA, 25 bp, Homo sapien
tgtcttttcatcagtaaagataatt

SEQ ID NO: 5829155 - DNA, 25 bp, Homo sapien
aattatctttactgatgaaaagaca

SEQ ID NO: 5829156 - DNA, 25 bp, Homo sapien
tgtcacacccctagataccttcgat

SEQ ID NO: 5829157 - DNA, 25 bp, Homo sapien
atcgaaggtatctaggggtgtgaca

SEQ ID NO: 5829158 - DNA, 25 bp, Homo sapien
aaagtcattctcaccctacttgagt

SEQ ID NO: 5829159 - DNA, 25 bp, Homo sapien
actcaagtagggtgagaatgacttt

SEQ ID NO: 5829160 - DNA, 25 bp, Homo sapien
gacttttgagctataacggaagaaa

SEQ ID NO: 5829161 - DNA, 25 bp, Homo sapien
tttcttccgttatagctcaaaagtc

SEQ ID NO: 5829162 - DNA, 25 bp, Homo sapien
taatggggaccaaggcaaaaacaca

SEQ ID NO: 5829163 - DNA, 25 bp, Homo sapien
aacataccaagtcatcacagaagag

SEQ ID NO: 5829164 - DNA, 25 bp, Homo sapien
ctgctgctgccaccaacgtaggatt

SEQ ID NO: 5829165 - DNA, 25 bp, Homo sapien
tcaaaagacatgtgccacagaaata

SEQ ID NO: 5829166 - DNA, 25 bp, Homo sapien
gccaccaacgtaggattgtcaggag

SEQ ID NO: 5829167 - DNA, 25 bp, Homo sapien
aagaggtgaagatgcctctcaaaag

SEQ ID NO: 5829168 - DNA, 25 bp, Homo sapien
gtcatcacagaagaggtgaagatgc

SEQ ID NO: 5829169 - DNA, 25 bp, Homo sapien
atttgcctgctgctgctgccaccaa

SEQ ID NO: 5829170 - DNA, 25 bp, Homo sapien
ggtgaagatgcctctcaaaagacat

SEQ ID NO: 5829171 - DNA, 25 bp, Homo sapien
aatgcaagatcctccgaaaatcaag

SEQ ID NO: 5829172 - DNA, 25 bp, Homo sapien
ggggaccaaggcaaaaacacacaca

SEQ ID NO: 5829173 - DNA, 25 bp, Homo sapien
gggaccaaggcaaaaacacacacac

SEQ ID NO: 5829174 - DNA, 25 bp, Homo sapien
aagacatgtgccacagaaatagagc

SEQ ID NO: 5829175 - DNA, 25 bp, Homo sapien
tcatcacagaagaggtgaagatgcc

SEQ ID NO: 5829176 - DNA, 25 bp, Homo sapien
caagtcatcacagaagaggtgaaga

SEQ ID NO: 5829177 - DNA, 25 bp, Homo sapien
cataatggggaccaaggcaaaaaca

SEQ ID NO: 5829178 - DNA, 25 bp, Homo sapien
ggatagacgaccctcgtgcctttcc

SEQ ID NO: 5829179 - DNA, 25 bp, Homo sapien
ggaaaggcacgagggtcgtctatcc

SEQ ID NO: 5829180 - DNA, 25 bp, Homo sapien
tggtgagtacccgaggagagaggag

SEQ ID NO: 5829181 - DNA, 25 bp, Homo sapien
ctcctctctcctcgggtactcacca

SEQ ID NO: 5829182 - DNA, 25 bp, Homo sapien
agaacagtctccgtcatttagctag

SEQ ID NO: 5829183 - DNA, 25 bp, Homo sapien
ctagctaaatgacggagactgttct

SEQ ID NO: 5829184 - DNA, 25 bp, Homo sapien
attgttcatcgagtgtagagaacag

SEQ ID NO: 5829185 - DNA, 25 bp, Homo sapien
ctgttctctacactcgatgaacaat

SEQ ID NO: 5829186 - DNA, 25 bp, Homo sapien
tttatactacttgcatggaaagaat

SEQ ID NO: 5829187 - DNA, 25 bp, Homo sapien
attctttccatgcaagtagtataaa

SEQ ID NO: 5829188 - DNA, 25 bp, Homo sapien
aacgaccgtgagaccggcgcacata

SEQ ID NO: 5829189 - DNA, 25 bp, Homo sapien
tatgtgcgccggtctcacggtcgtt

SEQ ID NO: 5829190 - DNA, 25 bp, Homo sapien
aaagtaactatacaaatggagagag

SEQ ID NO: 5829191 - DNA, 25 bp, Homo sapien
ctctctccatttgtatagttacttt

SEQ ID NO: 5829192 - DNA, 25 bp, Homo sapien
agaactaccgacagaagaaatggga

SEQ ID NO: 5829193 - DNA, 25 bp, Homo sapien
tcccatttcttctgtcggtagttct

SEQ ID NO: 5829194 - DNA, 25 bp, Homo sapien
tccccggacaaacagtaaagacaag

SEQ ID NO: 5829195 - DNA, 25 bp, Homo sapien
cttgtctttactgtttgtccgggga

SEQ ID NO: 5829196 - DNA, 25 bp, Homo sapien
tccgccacacctacgtcccgacggg

SEQ ID NO: 5829197 - DNA, 25 bp, Homo sapien
cccgtcgggacgtaggtgtggcgga

SEQ ID NO: 5829198 - DNA, 25 bp, Homo sapien
attaaaaatgatgctcgttaactgt

SEQ ID NO: 5829199 - DNA, 25 bp, Homo sapien
acagttaacgagcatcatttttaat

SEQ ID NO: 5829200 - DNA, 25 bp, Homo sapien
agtgttctatccttacttcttaaaa

SEQ ID NO: 5829201 - DNA, 25 bp, Homo sapien
ttttaagaagtaaggatagaacact

SEQ ID NO: 5829202 - DNA, 25 bp, Homo sapien
aaggaatcttggtctaaatcgaaac

SEQ ID NO: 5829203 - DNA, 25 bp, Homo sapien
gtttcgatttagaccaagattcctt

SEQ ID NO: 5829204 - DNA, 25 bp, Homo sapien
acaattcgtgccgtaaacgagagga

SEQ ID NO: 5829205 - DNA, 25 bp, Homo sapien
tcctctcgtttacggcacgaattgt

SEQ ID NO: 5829206 - DNA, 25 bp, Homo sapien
aaagaaagttgcataaaatattcgt

SEQ ID NO: 5829207 - DNA, 25 bp, Homo sapien
acgaatattttatgcaactttcttt

SEQ ID NO: 5829208 - DNA, 25 bp, Homo sapien
tcactgaccgttactacccttattt

SEQ ID NO: 5829209 - DNA, 25 bp, Homo sapien
aaataagggtagtaacggtcagtga

SEQ ID NO: 5829210 - DNA, 25 bp, Homo sapien
tcgtccggcgggtcacatcgttcgt

SEQ ID NO: 5829211 - DNA, 25 bp, Homo sapien
acgaacgatgtgacccgccggacga

SEQ ID NO: 5829212 - DNA, 25 bp, Homo sapien
taggacaccacactccagactcgtg

SEQ ID NO: 5829213 - DNA, 25 bp, Homo sapien
cacgagtctggagtgtggtgtccta

SEQ ID NO: 5829214 - DNA, 25 bp, Homo sapien
agagatttgtggacccaagactctc

SEQ ID NO: 5829215 - DNA, 25 bp, Homo sapien
gagagtcttgggtccacaaatctct

SEQ ID NO: 5829216 - DNA, 25 bp, Homo sapien
acgaatagttcgagaggtcttcatg

SEQ ID NO: 5829217 - DNA, 25 bp, Homo sapien
catgaagacctctcgaactattcgt

SEQ ID NO: 5829218 - DNA, 25 bp, Homo sapien
gacgatgaagactcaccattcccct

SEQ ID NO: 5829219 - DNA, 25 bp, Homo sapien
aggggaatggtgagtcttcatcgtc

SEQ ID NO: 5829220 - DNA, 25 bp, Homo sapien
tacatttataattatctaccggtta

SEQ ID NO: 5829221 - DNA, 25 bp, Homo sapien
taaccggtagataattataaatgta

SEQ ID NO: 5829222 - DNA, 25 bp, Homo sapien
cacggcggtactctactctccggta

SEQ ID NO: 5829223 - DNA, 25 bp, Homo sapien
taccggagagtagagtaccgccgtg

SEQ ID NO: 5829224 - DNA, 25 bp, Homo sapien
ccggtaacaacaaacagagaaatcg

SEQ ID NO: 5829225 - DNA, 25 bp, Homo sapien
cgatttctctgtttgttgttaccgg

SEQ ID NO: 5829226 - DNA, 25 bp, Homo sapien
gacgtgcgccgagctgcgccgggta

SEQ ID NO: 5829227 - DNA, 25 bp, Homo sapien
tacccggcgcagctcggcgcacgtc

SEQ ID NO: 5829228 - DNA, 25 bp, Homo sapien
atcgtgtagaggttaaataaactag

SEQ ID NO: 5829229 - DNA, 25 bp, Homo sapien
ctagtttatttaacctctacacgat

SEQ ID NO: 5829230 - DNA, 25 bp, Homo sapien
agtatcgtgtagaggttaaataaac

SEQ ID NO: 5829231 - DNA, 25 bp, Homo sapien
gtttatttaacctctacacgatact

SEQ ID NO: 5829232 - DNA, 25 bp, Homo sapien
acactgaagggattagcttggagaa

SEQ ID NO: 5829233 - DNA, 25 bp, Homo sapien
ttctccaagctaatcccttcagtgt

SEQ ID NO: 5829234 - DNA, 25 bp, Homo sapien
tccacatcgtccgtagtaaacaata

SEQ ID NO: 5829235 - DNA, 25 bp, Homo sapien
tattgtttactacggacgatgtgga

SEQ ID NO: 5829236 - DNA, 25 bp, Homo sapien
aagtgaatacaaagatatactcctt

SEQ ID NO: 5829237 - DNA, 25 bp, Homo sapien
aaggagtatatctttgtattcactt

SEQ ID NO: 5829238 - DNA, 25 bp, Homo sapien
gcctgctggtgccggcccagatgcg

SEQ ID NO: 5829239 - DNA, 25 bp, Homo sapien
cgcatctgggccggcaccagcaggc

SEQ ID NO: 5829240 - DNA, 25 bp, Homo sapien
gatgcgccaaggaaggcctgctggt

SEQ ID NO: 5829241 - DNA, 25 bp, Homo sapien
accagcaggccttccttggcgcatc

SEQ ID NO: 5829242 - DNA, 25 bp, Homo sapien
ttgtagaggtcatcgtcaaccgtac

SEQ ID NO: 5829243 - DNA, 25 bp, Homo sapien
gtacggttgacgatgacctctacaa

SEQ ID NO: 5829244 - DNA, 25 bp, Homo sapien
agacaccttattgacagtcaggaac

SEQ ID NO: 5829245 - DNA, 25 bp, Homo sapien
gttcctgactgtcaataaggtgtct

SEQ ID NO: 5829246 - DNA, 25 bp, Homo sapien
gggccgtctttcaagcctagtcgac

SEQ ID NO: 5829247 - DNA, 25 bp, Homo sapien
gtcgactaggcttgaaagacggccc

SEQ ID NO: 5829248 - DNA, 25 bp, Homo sapien
aggatgctatggttagcgcaccgcc

SEQ ID NO: 5829249 - DNA, 25 bp, Homo sapien
ggcggtgcgctaaccatagcatcct

SEQ ID NO: 5829250 - DNA, 25 bp, Homo sapien
ggtaagtctatattacatctaaaac

SEQ ID NO: 5829251 - DNA, 25 bp, Homo sapien
gttttagatgtaatatagacttacc

SEQ ID NO: 5829252 - DNA, 25 bp, Homo sapien
ggagccgcaggaggtttcacgccaa

SEQ ID NO: 5829253 - DNA, 25 bp, Homo sapien
ttggcgtgaaacctcctgcggctcc

SEQ ID NO: 5829254 - DNA, 25 bp, Homo sapien
tatcctgaagtgtgacatcgaacat

SEQ ID NO: 5829255 - DNA, 25 bp, Homo sapien
atgttcgatgtcacacttcaggata

SEQ ID NO: 5829256 - DNA, 25 bp, Homo sapien
gtctccgtctacctgaacgtcgact

SEQ ID NO: 5829257 - DNA, 25 bp, Homo sapien
agtcgacgttcaggtagacggagac

SEQ ID NO: 5829258 - DNA, 25 bp, Homo sapien
ttcctacttcatacactaaaatttt

SEQ ID NO: 5829259 - DNA, 25 bp, Homo sapien
aaaattttagtgtatgaagtaggaa

SEQ ID NO: 5829260 - DNA, 25 bp, Homo sapien
gaactctcgacctcgccggtcgtgc

SEQ ID NO: 5829261 - DNA, 25 bp, Homo sapien
gcacgaccggcgaggtcgagagttc

SEQ ID NO: 5829262 - DNA, 25 bp, Homo sapien
acagtgtgttggaacgtagactacg

SEQ ID NO: 5829263 - DNA, 25 bp, Homo sapien
cgtagtctacgttccaacacactgt

SEQ ID NO: 5829264 - DNA, 25 bp, Homo sapien
gaactcaccatcttcttactgggag

SEQ ID NO: 5829265 - DNA, 25 bp, Homo sapien
ctcccagtaagaagatggtgagttc

SEQ ID NO: 5829266 - DNA, 25 bp, Homo sapien
ctccggcgtcgtgccgggacgctaa

SEQ ID NO: 5829267 - DNA, 25 bp, Homo sapien
ttagcgtcccggcacgacgccggag

SEQ ID NO: 5829268 - DNA, 25 bp, Homo sapien
aaagccgcgcggtgcagtcctccgg

SEQ ID NO: 5829269 - DNA, 25 bp, Homo sapien
ccggaggactgcaccgcgcggcttt

SEQ ID NO: 5829270 - DNA, 25 bp, Homo sapien
gtctcaaatctcaaaatacggtcgt

SEQ ID NO: 5829271 - DNA, 25 bp, Homo sapien
acgaccgtattttgagatttgagac

SEQ ID NO: 5829272 - DNA, 25 bp, Homo sapien
gagtcccggacacttgtgtggactt

SEQ ID NO: 5829273 - DNA, 25 bp, Homo sapien
aagtccacacaagtgtccgggactc

SEQ ID NO: 5829274 - DNA, 25 bp, Homo sapien
ttgaaatcgcaaggataaagggact

SEQ ID NO: 5829275 - DNA, 25 bp, Homo sapien
agtccctttatccttgcgatttcaa

SEQ ID NO: 5829276 - DNA, 25 bp, Homo sapien
agaaccgacctcaggaggtgttggt

SEQ ID NO: 5829277 - DNA, 25 bp, Homo sapien
accaacacctcctgaggtcggttct

SEQ ID NO: 5829278 - DNA, 25 bp, Homo sapien
tgtcagcccgtcaggaggctggtcc

SEQ ID NO: 5829279 - DNA, 25 bp, Homo sapien
ggaccagcctcctgacgggctgaca

SEQ ID NO: 5829280 - DNA, 25 bp, Homo sapien
gtcgtgttatggggtcaggaccccg

SEQ ID NO: 5829281 - DNA, 25 bp, Homo sapien
cggggtcctgaccccataacacgac

SEQ ID NO: 5829282 - DNA, 25 bp, Homo sapien
tttcgcggtagagctcaagacacct

SEQ ID NO: 5829283 - DNA, 25 bp, Homo sapien
aggtgtcttgagctctaccgcgaaa

SEQ ID NO: 5829284 - DNA, 25 bp, Homo sapien
aatcggaggcgtcaagagaacttcg

SEQ ID NO: 5829285 - DNA, 25 bp, Homo sapien
cgaagttctcttgacgcctccgatt

SEQ ID NO: 5829286 - DNA, 25 bp, Homo sapien
ttaaagttcttaggtataatcaaag

SEQ ID NO: 5829287 - DNA, 25 bp, Homo sapien
ctttgattatacctaagaactttaa

SEQ ID NO: 5829288 - DNA, 25 bp, Homo sapien
cgtcagtcgaaacggccggatatcc

SEQ ID NO: 5829289 - DNA, 25 bp, Homo sapien
ggatatccggccgtttcgactgacg

SEQ ID NO: 5829290 - DNA, 25 bp, Homo sapien
tccggacgccgagggcactccgtgg

SEQ ID NO: 5829291 - DNA, 25 bp, Homo sapien
ccacggagtgccctcggcgtccgga

SEQ ID NO: 5829292 - DNA, 25 bp, Homo sapien
tctccggcgggtttatttcccagat

SEQ ID NO: 5829293 - DNA, 25 bp, Homo sapien
atctgggaaataaacccgccggaga

SEQ ID NO: 5829294 - DNA, 25 bp, Homo sapien
cgtacaaaaatgtagtggaagttgt

SEQ ID NO: 5829295 - DNA, 25 bp, Homo sapien
acaacttccactacatttttgtacg

SEQ ID NO: 5829296 - DNA, 25 bp, Homo sapien
gaaacaggttcggtatcgggacaga

SEQ ID NO: 5829297 - DNA, 25 bp, Homo sapien
tctgtcccgataccgaacctgtttc

SEQ ID NO: 5829298 - DNA, 25 bp, Homo sapien
gactaacattagtgtcttgattaac

SEQ ID NO: 5829299 - DNA, 25 bp, Homo sapien
gttaatcaagacactaatgttagtc

SEQ ID NO: 5829300 - DNA, 25 bp, Homo sapien
agtgtcttgattaacaacatattat

SEQ ID NO: 5829301 - DNA, 25 bp, Homo sapien
ataatatgttgttaatcaagacact

SEQ ID NO: 5829302 - DNA, 25 bp, Homo sapien
ggcccatggactcgcgtcggtcctt

SEQ ID NO: 5829303 - DNA, 25 bp, Homo sapien
aaggaccgacgcgagtccatgggcc

SEQ ID NO: 5829304 - DNA, 25 bp, Homo sapien
gcgtcagacctaataacacaagcgt

SEQ ID NO: 5829305 - DNA, 25 bp, Homo sapien
acgcttgtgttattaggtctgacgc

SEQ ID NO: 5829306 - DNA, 25 bp, Homo sapien
aaagccattggtctctacaaaacct

SEQ ID NO: 5829307 - DNA, 25 bp, Homo sapien
aggttttgtagagaccaatggcttt

SEQ ID NO: 5829308 - DNA, 25 bp, Homo sapien
cctttggtattgagtactttatctt

SEQ ID NO: 5829309 - DNA, 25 bp, Homo sapien
aagataaagtactcaataccaaagg

SEQ ID NO: 5829310 - DNA, 25 bp, Homo sapien
atcctatccgagcttaaggttacat

SEQ ID NO: 5829311 - DNA, 25 bp, Homo sapien
atgtaaccttaagctcggataggat

SEQ ID NO: 5829312 - DNA, 25 bp, Homo sapien
ttttaatgggtgaaacagataaagt

SEQ ID NO: 5829313 - DNA, 25 bp, Homo sapien
actttatctgtttcacccattaaaa

SEQ ID NO: 5829314 - DNA, 25 bp, Homo sapien
ttgttctacgattgtgtcaggagtg

SEQ ID NO: 5829315 - DNA, 25 bp, Homo sapien
cactcctgacacaatcgtagaacaa

SEQ ID NO: 5829316 - DNA, 25 bp, Homo sapien
tcagtctgattcataattttggtct

SEQ ID NO: 5829317 - DNA, 25 bp, Homo sapien
agaccaaaattatgaatcagactga

SEQ ID NO: 5829318 - DNA, 25 bp, Homo sapien
acactaaccgagtgtcaacggactt

SEQ ID NO: 5829319 - DNA, 25 bp, Homo sapien
aagtccgttgacactcggttagtgt

SEQ ID NO: 5829320 - DNA, 25 bp, Homo sapien
acacgtcacgactgttaaacgacga

SEQ ID NO: 5829321 - DNA, 25 bp, Homo sapien
tcgtcgtttaacagtcgtgacgtgt

SEQ ID NO: 5829322 - DNA, 25 bp, Homo sapien
actgtctagtcccatatgatattca

SEQ ID NO: 5829323 - DNA, 25 bp, Homo sapien
tgaatatcatatgggactagacagt

SEQ ID NO: 5829324 - DNA, 25 bp, Homo sapien
agaacgggactaaaagatgaggaca

SEQ ID NO: 5829325 - DNA, 25 bp, Homo sapien
tgtcctcatcttttagtcccgttct

SEQ ID NO: 5829326 - DNA, 25 bp, Homo sapien
tgtcggtcccgttcgagtatctggg

SEQ ID NO: 5829327 - DNA, 25 bp, Homo sapien
cccagatactcgaacgggaccgaca

SEQ ID NO: 5829328 - DNA, 25 bp, Homo sapien
gagttatgactctaattacggtgag

SEQ ID NO: 5829329 - DNA, 25 bp, Homo sapien
ctcaccgtaattagagtcataactc

SEQ ID NO: 5829330 - DNA, 25 bp, Homo sapien
cctgttggaattcctcgtgcccgag

SEQ ID NO: 5829331 - DNA, 25 bp, Homo sapien
ctcgggcacgaggaattccaacagg

SEQ ID NO: 5829332 - DNA, 25 bp, Homo sapien
aatatttgagcatttacgttttaat

SEQ ID NO: 5829333 - DNA, 25 bp, Homo sapien
attaaaacgtaaatgctcaaatatt

SEQ ID NO: 5829334 - DNA, 25 bp, Homo sapien
gcgggcccgggcgttcctgctggta

SEQ ID NO: 5829335 - DNA, 25 bp, Homo sapien
taccagcaggaacgcccgggcccgc

SEQ ID NO: 5829336 - DNA, 25 bp, Homo sapien
gggaagggcgcacgagactcactgg

SEQ ID NO: 5829337 - DNA, 25 bp, Homo sapien
ccagtgagtctcgtgcgcccttccc

SEQ ID NO: 5829338 - DNA, 25 bp, Homo sapien
tcgtcggagacctctattctgaaag

SEQ ID NO: 5829339 - DNA, 25 bp, Homo sapien
ctttcagaatagaggtctccgacga

SEQ ID NO: 5829340 - DNA, 25 bp, Homo sapien
agagtccctaaaatactcgtagtaa

SEQ ID NO: 5829341 - DNA, 25 bp, Homo sapien
ttactacgagtattttagggactct

SEQ ID NO: 5829342 - DNA, 25 bp, Homo sapien
agattgaccaccaacctcctgttct

SEQ ID NO: 5829343 - DNA, 25 bp, Homo sapien
agaacaggaggttggtggtcaatct

SEQ ID NO: 5829344 - DNA, 25 bp, Homo sapien
gtacttaccgcagcctgtgacacag

SEQ ID NO: 5829345 - DNA, 25 bp, Homo sapien
ctgtgtcacaggctgcggtaagtac

SEQ ID NO: 5829346 - DNA, 25 bp, Homo sapien
gaatctctcactcttgtggcatttc

SEQ ID NO: 5829347 - DNA, 25 bp, Homo sapien
gaaatgccacaagagtgagagattc

SEQ ID NO: 5829348 - DNA, 25 bp, Homo sapien
aatggtttgtatcttcaatagagag

SEQ ID NO: 5829349 - DNA, 25 bp, Homo sapien
ctctctattgaagatacaaaccatt

SEQ ID NO: 5829350 - DNA, 25 bp, Homo sapien
gaaatttcccctactacgatacaca

SEQ ID NO: 5829351 - DNA, 25 bp, Homo sapien
tgtgtatcgtagtaggggaaatttc

SEQ ID NO: 5829352 - DNA, 25 bp, Homo sapien
gtcggttgtctacacctgtactcgg

SEQ ID NO: 5829353 - DNA, 25 bp, Homo sapien
ccgagtacaggtgtagacaaccgac

SEQ ID NO: 5829354 - DNA, 25 bp, Homo sapien
actgttgattttatactagtatgta

SEQ ID NO: 5829355 - DNA, 25 bp, Homo sapien
tacatactagtataaaatcaacagt

SEQ ID NO: 5829356 - DNA, 25 bp, Homo sapien
aactgttgattttatactagtatgt

SEQ ID NO: 5829357 - DNA, 25 bp, Homo sapien
acatactagtataaaatcaacagtt

SEQ ID NO: 5829358 - DNA, 25 bp, Homo sapien
aggaaggtacacgaataataaagac

SEQ ID NO: 5829359 - DNA, 25 bp, Homo sapien
gtctttattattcgtgtaccttcct

SEQ ID NO: 5829360 - DNA, 25 bp, Homo sapien
gttgggtcgagacgcctaaggtgta

SEQ ID NO: 5829361 - DNA, 25 bp, Homo sapien
tacaccttaggcgtctcgacccaac

SEQ ID NO: 5829362 - DNA, 25 bp, Homo sapien
cataaatattcctgaggactatatt

SEQ ID NO: 5829363 - DNA, 25 bp, Homo sapien
aatatagtcctcaggaatatttatg

SEQ ID NO: 5829364 - DNA, 25 bp, Homo sapien
aggtgcgggcacaggcccgacgcga

SEQ ID NO: 5829365 - DNA, 25 bp, Homo sapien
tcgcgtcgggcctgtgcccgcacct

SEQ ID NO: 5829366 - DNA, 25 bp, Homo sapien
gccctggtgaagcaggtgcgggcac

SEQ ID NO: 5829367 - DNA, 25 bp, Homo sapien
gtgcccgcacctgcttcaccagggc

SEQ ID NO: 5829368 - DNA, 25 bp, Homo sapien
aggtggttcggcgctgtccctccgc

SEQ ID NO: 5829369 - DNA, 25 bp, Homo sapien
gcggagggacagcgccgaaccacct

SEQ ID NO: 5829370 - DNA, 25 bp, Homo sapien
cgcacggggcgcgaggtggttcggc

SEQ ID NO: 5829371 - DNA, 25 bp, Homo sapien
gccgaaccacctcgcgccccgtgcg

SEQ ID NO: 5829372 - DNA, 25 bp, Homo sapien
gttcgggcaacaggctcctcgggca

SEQ ID NO: 5829373 - DNA, 25 bp, Homo sapien
tgcccgaggagcctgttgcccgaac

SEQ ID NO: 5829374 - DNA, 25 bp, Homo sapien
attgaggagattatgaaagtctata

SEQ ID NO: 5829375 - DNA, 25 bp, Homo sapien
tatagactttcataatctcctcaat

SEQ ID NO: 5829376 - DNA, 25 bp, Homo sapien
aatagttagaatagtcttcggaatg

SEQ ID NO: 5829377 - DNA, 25 bp, Homo sapien
cattccgaagactattctaactatt

SEQ ID NO: 5829378 - DNA, 25 bp, Homo sapien
caggactagattggtgagacttaag

SEQ ID NO: 5829379 - DNA, 25 bp, Homo sapien
cttaagtctcaccaatctagtcctg

SEQ ID NO: 5829380 - DNA, 25 bp, Homo sapien
tgtgtctacccacggagaaacaaga

SEQ ID NO: 5829381 - DNA, 25 bp, Homo sapien
tcttgtttctccgtgggtagacaca

SEQ ID NO: 5829382 - DNA, 25 bp, Homo sapien
ccttttcactacaggactttagtag

SEQ ID NO: 5829383 - DNA, 25 bp, Homo sapien
ctactaaagtcctgtagtgaaaagg

SEQ ID NO: 5829384 - DNA, 25 bp, Homo sapien
tacatcaaaagtacagcaaagatat

SEQ ID NO: 5829385 - DNA, 25 bp, Homo sapien
atatctttgctgtacttttgatgta

SEQ ID NO: 5829386 - DNA, 25 bp, Homo sapien
ggtcggcggaatgggcccgtggagt

SEQ ID NO: 5829387 - DNA, 25 bp, Homo sapien
actccacgggcccattccgccgacc

SEQ ID NO: 5829388 - DNA, 25 bp, Homo sapien
gccggctgcctcgacacggtcagag

SEQ ID NO: 5829389 - DNA, 25 bp, Homo sapien
ctctgaccgtgtcgaggcagccggc

SEQ ID NO: 5829390 - DNA, 25 bp, Homo sapien
cacgagtcttatcgcagtctcgaac

SEQ ID NO: 5829391 - DNA, 25 bp, Homo sapien
gttcgagactgcgataagactcgtg

SEQ ID NO: 5829392 - DNA, 25 bp, Homo sapien
gtgggttatacgtgttgacaacaag

SEQ ID NO: 5829393 - DNA, 25 bp, Homo sapien
cttgttgtcaacacgtataacccac

SEQ ID NO: 5829394 - DNA, 25 bp, Homo sapien
ggtgtgagagtattggtgacctcct

SEQ ID NO: 5829395 - DNA, 25 bp, Homo sapien
aggaggtcaccaatactctcacacc

SEQ ID NO: 5829396 - DNA, 25 bp, Homo sapien
agtatcaactaccaaagacgtaagt

SEQ ID NO: 5829397 - DNA, 25 bp, Homo sapien
acttacgtctttggtagttgatact

SEQ ID NO: 5829398 - DNA, 25 bp, Homo sapien
ttcggtcaggacccgcagtcttttg

SEQ ID NO: 5829399 - DNA, 25 bp, Homo sapien
caaaagactgcgggtcctgaccgaa

SEQ ID NO: 5829400 - DNA, 25 bp, Homo sapien
ggtatctttggtcctccgcgcgtcg

SEQ ID NO: 5829401 - DNA, 25 bp, Homo sapien
cgacgcgcggaggaccaaagatacc

SEQ ID NO: 5829402 - DNA, 25 bp, Homo sapien
ccggccgacctcaagagacccagtg

SEQ ID NO: 5829403 - DNA, 25 bp, Homo sapien
cactgggtctcttgaggtcggccgg

SEQ ID NO: 5829404 - DNA, 25 bp, Homo sapien
gcctcctcgccccaggcttcgctcc

SEQ ID NO: 5829405 - DNA, 25 bp, Homo sapien
ggagcgaagcctggggcgaggaggc

SEQ ID NO: 5829406 - DNA, 25 bp, Homo sapien
gatttgagaacttaaccactcccga

SEQ ID NO: 5829407 - DNA, 25 bp, Homo sapien
tcgggagtggttaagttctcaaatc

SEQ ID NO: 5829408 - DNA, 25 bp, Homo sapien
gagataatccacaagtaaaagacgg

SEQ ID NO: 5829409 - DNA, 25 bp, Homo sapien
ccgtcttttacttgtggattatctc

SEQ ID NO: 5829410 - DNA, 25 bp, Homo sapien
ttaacattagtaccgtccccaacat

SEQ ID NO: 5829411 - DNA, 25 bp, Homo sapien
atgttggggacggtactaatgttaa

SEQ ID NO: 5829412 - DNA, 25 bp, Homo sapien
tatacaaaaccttagcttatatggt

SEQ ID NO: 5829413 - DNA, 25 bp, Homo sapien
accatataagctaaggttttgtata

SEQ ID NO: 5829414 - DNA, 25 bp, Homo sapien
ctggaatcagtgttataagaagttt

SEQ ID NO: 5829415 - DNA, 25 bp, Homo sapien
aaacttcttataacactgattccag

SEQ ID NO: 5829416 - DNA, 25 bp, Homo sapien
acaccggtgtccttcgggcccagcc

SEQ ID NO: 5829417 - DNA, 25 bp, Homo sapien
ggctgggcccgaaggacaccggtgt

SEQ ID NO: 5829418 - DNA, 25 bp, Homo sapien
taacaatagggaacaagtaaacaat

SEQ ID NO: 5829419 - DNA, 25 bp, Homo sapien
attgtttacttgttccctattgtta

SEQ ID NO: 5829420 - DNA, 25 bp, Homo sapien
gtccaacgaaccttactactggtct

SEQ ID NO: 5829421 - DNA, 25 bp, Homo sapien
agaccagtagtaaggttcgttggac

SEQ ID NO: 5829422 - DNA, 25 bp, Homo sapien
gaaaaggtaaattctcggagacgat

SEQ ID NO: 5829423 - DNA, 25 bp, Homo sapien
atcgtctccgagaatttaccttttc

SEQ ID NO: 5829424 - DNA, 25 bp, Homo sapien
gaactagttgtattcgtctacttat

SEQ ID NO: 5829425 - DNA, 25 bp, Homo sapien
ataagtagacgaatacaactagttc

SEQ ID NO: 5829426 - DNA, 25 bp, Homo sapien
ggagtaactctcctggtccaaaagg

SEQ ID NO: 5829427 - DNA, 25 bp, Homo sapien
ccttttggaccaggagagttactcc

SEQ ID NO: 5829428 - DNA, 25 bp, Homo sapien
tgattcttaggttcacatttaaatg

SEQ ID NO: 5829429 - DNA, 25 bp, Homo sapien
catttaaatgtgaacctaagaatca

SEQ ID NO: 5829430 - DNA, 25 bp, Homo sapien
actccgagggactacaccgccccac

SEQ ID NO: 5829431 - DNA, 25 bp, Homo sapien
gtggggcggtgtagtccctcggagt

SEQ ID NO: 5829432 - DNA, 25 bp, Homo sapien
ccgagtttacacgtttggtgtgata

SEQ ID NO: 5829433 - DNA, 25 bp, Homo sapien
tatcacaccaaacgtgtaaactcgg

SEQ ID NO: 5829434 - DNA, 25 bp, Homo sapien
taaaaggtcaatatttacatttgta

SEQ ID NO: 5829435 - DNA, 25 bp, Homo sapien
tacaaatgtaaatattgacctttta

SEQ ID NO: 5829436 - DNA, 25 bp, Homo sapien
ttaaaaggtcaatatttacatttgt

SEQ ID NO: 5829437 - DNA, 25 bp, Homo sapien
acaaatgtaaatattgaccttttaa

SEQ ID NO: 5829438 - DNA, 25 bp, Homo sapien
gattaaaaggtcaatatttacattt

SEQ ID NO: 5829439 - DNA, 25 bp, Homo sapien
aaatgtaaatattgaccttttaatc

SEQ ID NO: 5829440 - DNA, 25 bp, Homo sapien
aagtaactttgaaaatcaagacgaa

SEQ ID NO: 5829441 - DNA, 25 bp, Homo sapien
ttcgtcttgattttcaaagttactt

SEQ ID NO: 5829442 - DNA, 25 bp, Homo sapien
gaagtaactttgaaaatcaagacga

SEQ ID NO: 5829443 - DNA, 25 bp, Homo sapien
tcgtcttgattttcaaagttacttc

SEQ ID NO: 5829444 - DNA, 25 bp, Homo sapien
cctgtctcccgcgacactcacggcc

SEQ ID NO: 5829445 - DNA, 25 bp, Homo sapien
ggccgtgagtgtcgcgggagacagg

SEQ ID NO: 5829446 - DNA, 25 bp, Homo sapien
tcagaagaggcatacgaaccgttac

SEQ ID NO: 5829447 - DNA, 25 bp, Homo sapien
gtaacggttcgtatgcctcttctga

SEQ ID NO: 5829448 - DNA, 25 bp, Homo sapien
tcgtctaggtctcggacaggtccac

SEQ ID NO: 5829449 - DNA, 25 bp, Homo sapien
gtggacctgtccgagacctagacga

SEQ ID NO: 5829450 - DNA, 25 bp, Homo sapien
ctcgtctaggtctcggacaggtcca

SEQ ID NO: 5829451 - DNA, 25 bp, Homo sapien
tggacctgtccgagacctagacgag

SEQ ID NO: 5829452 - DNA, 25 bp, Homo sapien
gaggtcctgtcgcgggggagtcgag

SEQ ID NO: 5829453 - DNA, 25 bp, Homo sapien
ctcgactcccccgcgacaggacctc

SEQ ID NO: 5829454 - DNA, 25 bp, Homo sapien
aagtacatatgagaaaagtcttaat

SEQ ID NO: 5829455 - DNA, 25 bp, Homo sapien
attaagacttttctcatatgtactt

SEQ ID NO: 5829456 - DNA, 25 bp, Homo sapien
tgactgtggtacatctgtggcgtct

SEQ ID NO: 5829457 - DNA, 25 bp, Homo sapien
agacgccacagatgtaccacagtca

SEQ ID NO: 5829458 - DNA, 25 bp, Homo sapien
gtattagataattcagtttacattg

SEQ ID NO: 5829459 - DNA, 25 bp, Homo sapien
caatgtaaactgaattatctaatac

SEQ ID NO: 5829460 - DNA, 25 bp, Homo sapien
aagtattagataattcagtttacat

SEQ ID NO: 5829461 - DNA, 25 bp, Homo sapien
atgtaaactgaattatctaatactt

SEQ ID NO: 5829462 - DNA, 25 bp, Homo sapien
ggtgaactgttaagttggtttcgta

SEQ ID NO: 5829463 - DNA, 25 bp, Homo sapien
tacgaaaccaacttaacagttcacc

SEQ ID NO: 5829464 - DNA, 25 bp, Homo sapien
tacctttaaagtcaataattcaata

SEQ ID NO: 5829465 - DNA, 25 bp, Homo sapien
tattgaattattgactttaaaggta

SEQ ID NO: 5829466 - DNA, 25 bp, Homo sapien
ttacctttaaagtcaataattcaat

SEQ ID NO: 5829467 - DNA, 25 bp, Homo sapien
attgaattattgactttaaaggtaa

SEQ ID NO: 5829468 - DNA, 25 bp, Homo sapien
acgtggtgggtcatctgggaactcc

SEQ ID NO: 5829469 - DNA, 25 bp, Homo sapien
ggagttcccagatgacccaccacgt

SEQ ID NO: 5829470 - DNA, 25 bp, Homo sapien
tctccaatctgtaagacaactaaat

SEQ ID NO: 5829471 - DNA, 25 bp, Homo sapien
atttagttgtcttacagattggaga

SEQ ID NO: 5829472 - DNA, 25 bp, Homo sapien
tatccattacggtatttggaggtgg

SEQ ID NO: 5829473 - DNA, 25 bp, Homo sapien
ccacctccaaataccgtaatggata

SEQ ID NO: 5829474 - DNA, 25 bp, Homo sapien
cgtctcctcgcgagctgtcgggcgt

SEQ ID NO: 5829475 - DNA, 25 bp, Homo sapien
acgcccgacagctcgcgaggagacg

SEQ ID NO: 5829476 - DNA, 25 bp, Homo sapien
gaacccagaggtaacacatccatca

SEQ ID NO: 5829477 - DNA, 25 bp, Homo sapien
tgatggatgtgttacctctgggttc

SEQ ID NO: 5829478 - DNA, 25 bp, Homo sapien
gtgacaaaaaagaggcgagatgcag

SEQ ID NO: 5829479 - DNA, 25 bp, Homo sapien
ctgcatctcgcctcttttttgtcac

SEQ ID NO: 5829480 - DNA, 25 bp, Homo sapien
gtactgggagactttaatctggtag

SEQ ID NO: 5829481 - DNA, 25 bp, Homo sapien
ctaccagattaaagtctcccagtac

SEQ ID NO: 5829482 - DNA, 25 bp, Homo sapien
aatgaagtagtatacagagtcctat

SEQ ID NO: 5829483 - DNA, 25 bp, Homo sapien
ataggactctgtatactacttcatt

SEQ ID NO: 5829484 - DNA, 25 bp, Homo sapien
cccatatcttgtttattcaacgatt

SEQ ID NO: 5829485 - DNA, 25 bp, Homo sapien
aatcgttgaataaacaagatatggg

SEQ ID NO: 5829486 - DNA, 25 bp, Homo sapien
tttcccgggagatcccgacgactga

SEQ ID NO: 5829487 - DNA, 25 bp, Homo sapien
tcagtcgtcgggatctcccgggaaa

SEQ ID NO: 5829488 - DNA, 25 bp, Homo sapien
ggtgttcactgacctggtcccgagt

SEQ ID NO: 5829489 - DNA, 25 bp, Homo sapien
actcgggaccaggtcagtgaacacc

SEQ ID NO: 5829490 - DNA, 25 bp, Homo sapien
gggccgcgacgaacccggacgactc

SEQ ID NO: 5829491 - DNA, 25 bp, Homo sapien
gagtcgtccgggttcgtcgcggccc

SEQ ID NO: 5829492 - DNA, 25 bp, Homo sapien
gcgcgttgcgcgggcgaggaccggc

SEQ ID NO: 5829493 - DNA, 25 bp, Homo sapien
gccggtcctcgcccgcgcaacgcgc

SEQ ID NO: 5829494 - DNA, 25 bp, Homo sapien
ctcgggcgcgcgttgcgcgggcgag

SEQ ID NO: 5829495 - DNA, 25 bp, Homo sapien
ctcgcccgcgcaacgcgcgcccgag

SEQ ID NO: 5829496 - DNA, 25 bp, Homo sapien
tcctcgggcgcgcgttgcgcgggcg

SEQ ID NO: 5829497 - DNA, 25 bp, Homo sapien
cgcccgcgcaacgcgcgcccgagga

SEQ ID NO: 5829498 - DNA, 25 bp, Homo sapien
taaaagaactttgagaaatatacat

SEQ ID NO: 5829499 - DNA, 25 bp, Homo sapien
atgtatatttctcaaagttctttta

SEQ ID NO: 5829500 - DNA, 25 bp, Homo sapien
acattcgtccaagaaactgtgttca

SEQ ID NO: 5829501 - DNA, 25 bp, Homo sapien
tgaacacagtttcttggacgaatgt

SEQ ID NO: 5829502 - DNA, 25 bp, Homo sapien
actgataaaaactgaacagggaagt

SEQ ID NO: 5829503 - DNA, 25 bp, Homo sapien
acttccctgttcagtttttatcagt

SEQ ID NO: 5829504 - DNA, 25 bp, Homo sapien
tagtctccgcggtcctaggacctcg

SEQ ID NO: 5829505 - DNA, 25 bp, Homo sapien
cgaggtcctaggaccgcggagacta

SEQ ID NO: 5829506 - DNA, 25 bp, Homo sapien
aggacccatccgagagcataataag

SEQ ID NO: 5829507 - DNA, 25 bp, Homo sapien
cttattatgctctcggatgggtcct

SEQ ID NO: 5829508 - DNA, 25 bp, Homo sapien
gacccggattcggactcagtcccag

SEQ ID NO: 5829509 - DNA, 25 bp, Homo sapien
ctgggactgagtccgaatccgggtc

SEQ ID NO: 5829510 - DNA, 25 bp, Homo sapien
taccacaggggaactggccaggtag

SEQ ID NO: 5829511 - DNA, 25 bp, Homo sapien
ctacctggccagttcccctgtggta

SEQ ID NO: 5829512 - DNA, 25 bp, Homo sapien
attcatttctcttttatatctagtc

SEQ ID NO: 5829513 - DNA, 25 bp, Homo sapien
gactagatataaaagagaaatgaat

SEQ ID NO: 5829514 - DNA, 25 bp, Homo sapien
tagtgacactctactgaaagtaaaa

SEQ ID NO: 5829515 - DNA, 25 bp, Homo sapien
ttttactttcagtagagtgtcacta

SEQ ID NO: 5829516 - DNA, 25 bp, Homo sapien
cctgccgtgacgtccccgacggcgg

SEQ ID NO: 5829517 - DNA, 25 bp, Homo sapien
ccgccgtcggggacgtcacggcagg

SEQ ID NO: 5829518 - DNA, 25 bp, Homo sapien
tcctgccgtgacgtccccgacggcg

SEQ ID NO: 5829519 - DNA, 25 bp, Homo sapien
cgccgtcggggacgtcacggcagga

SEQ ID NO: 5829520 - DNA, 25 bp, Homo sapien
cggtccctccctcctgccgtgacgt

SEQ ID NO: 5829521 - DNA, 25 bp, Homo sapien
acgtcacggcaggagggagggaccg

SEQ ID NO: 5829522 - DNA, 25 bp, Homo sapien
gtcgttgcgaggtcggcacacctgt

SEQ ID NO: 5829523 - DNA, 25 bp, Homo sapien
acaggtgtgccgacctcgcaacgac

SEQ ID NO: 5829524 - DNA, 25 bp, Homo sapien
gctactctaggtgaggtctcctcat

SEQ ID NO: 5829525 - DNA, 25 bp, Homo sapien
atgaggagacctcacctagagtagc

SEQ ID NO: 5829526 - DNA, 25 bp, Homo sapien
gaggaaaaggtggaatatcggtatg

SEQ ID NO: 5829527 - DNA, 25 bp, Homo sapien
cataccgatattccaccttttcctc

SEQ ID NO: 5829528 - DNA, 25 bp, Homo sapien
tgacttcacttaaggtcattctaat

SEQ ID NO: 5829529 - DNA, 25 bp, Homo sapien
attagaatgaccttaagtgaagtca

SEQ ID NO: 5829530 - DNA, 25 bp, Homo sapien
agactaggctgggtccgcccgcccg

SEQ ID NO: 5829531 - DNA, 25 bp, Homo sapien
cgggcgggcggacccagcctagtct

SEQ ID NO: 5829532 - DNA, 25 bp, Homo sapien
tcctgtgtcggtggcgtgcccgacg

SEQ ID NO: 5829533 - DNA, 25 bp, Homo sapien
cgtcgggcacgccaccgacacagga

SEQ ID NO: 5829534 - DNA, 25 bp, Homo sapien
tcaacgaggttgttaatacgatcac

SEQ ID NO: 5829535 - DNA, 25 bp, Homo sapien
gtgatcgtattaacaacctcgttga

SEQ ID NO: 5829536 - DNA, 25 bp, Homo sapien
tgctctctcccccgaggcgcttcct

SEQ ID NO: 5829537 - DNA, 25 bp, Homo sapien
aggaagcgcctcgggggagagagca

SEQ ID NO: 5829538 - DNA, 25 bp, Homo sapien
acgtgccaggacgaactttaggtcg

SEQ ID NO: 5829539 - DNA, 25 bp, Homo sapien
cgacctaaagttcgtcctggcacgt

SEQ ID NO: 5829540 - DNA, 25 bp, Homo sapien
cgaagtctggaggcctcgcgcggcg

SEQ ID NO: 5829541 - DNA, 25 bp, Homo sapien
cgccgcgcgaggcctccagacttcg

SEQ ID NO: 5829542 - DNA, 25 bp, Homo sapien
cccgcagtacgtgggcttaccataa

SEQ ID NO: 5829543 - DNA, 25 bp, Homo sapien
ttatggtaagcccacgtactgcggg

SEQ ID NO: 5829544 - DNA, 25 bp, Homo sapien
tagccgaaactacaatcggaaaact

SEQ ID NO: 5829545 - DNA, 25 bp, Homo sapien
agttttccgattgtagtttcggcta

SEQ ID NO: 5829546 - DNA, 25 bp, Homo sapien
taaatgatacaccaattgttcttta

SEQ ID NO: 5829547 - DNA, 25 bp, Homo sapien
taaagaacaattggtgtatcattta

SEQ ID NO: 5829548 - DNA, 25 bp, Homo sapien
agagatataggatgttgtaactaaa

SEQ ID NO: 5829549 - DNA, 25 bp, Homo sapien
tttagttacaacatcctatatctct

SEQ ID NO: 5829550 - DNA, 25 bp, Homo sapien
gacgttggagcaagatccgccccga

SEQ ID NO: 5829551 - DNA, 25 bp, Homo sapien
tcggggcggatcttgctccaacgtc

SEQ ID NO: 5829552 - DNA, 25 bp, Homo sapien
gtcgcggcggcacggacggaccccg

SEQ ID NO: 5829553 - DNA, 25 bp, Homo sapien
cggggtccgtccgtgccgccgcgac

SEQ ID NO: 5829554 - DNA, 25 bp, Homo sapien
acgtcgcggcggcacggacggaccc

SEQ ID NO: 5829555 - DNA, 25 bp, Homo sapien
gggtccgtccgtgccgccgcgacgt

SEQ ID NO: 5829556 - DNA, 25 bp, Homo sapien
gacgtcgcggcggcacggacggacc

SEQ ID NO: 5829557 - DNA, 25 bp, Homo sapien
ggtccgtccgtgccgccgcgacgtc

SEQ ID NO: 5829558 - DNA, 25 bp, Homo sapien
acgttcatgtgtatacaaactgtag

SEQ ID NO: 5829559 - DNA, 25 bp, Homo sapien
ctacagtttgtatacacatgaacgt

SEQ ID NO: 5829560 - DNA, 25 bp, Homo sapien
ccgtgtcacttcgctcccacccccg

SEQ ID NO: 5829561 - DNA, 25 bp, Homo sapien
cgggggtgggagcgaagtgacacgg

SEQ ID NO: 5829562 - DNA, 25 bp, Homo sapien
ggaccgtgtcacttcgctcccaccc

SEQ ID NO: 5829563 - DNA, 25 bp, Homo sapien
gggtgggagcgaagtgacacggtcc

SEQ ID NO: 5829564 - DNA, 25 bp, Homo sapien
gcatatcttatataccacgtaaaag

SEQ ID NO: 5829565 - DNA, 25 bp, Homo sapien
cttttacgtggtatataagatatgc

SEQ ID NO: 5829566 - DNA, 25 bp, Homo sapien
agacgtttcttacatgtcttgccag

SEQ ID NO: 5829567 - DNA, 25 bp, Homo sapien
ctggcaagacatgtaagaaacgtct

SEQ ID NO: 5829568 - DNA, 25 bp, Homo sapien
ctttcgtcaagaattggtataatac

SEQ ID NO: 5829569 - DNA, 25 bp, Homo sapien
gtattataccaattcttgacgaaag

SEQ ID NO: 5829570 - DNA, 25 bp, Homo sapien
gggtccggacgactgggtcggtctg

SEQ ID NO: 5829571 - DNA, 25 bp, Homo sapien
cagaccgacccagtcgtccggaccc

SEQ ID NO: 5829572 - DNA, 25 bp, Homo sapien
cccgggacacacatctccgaggaag

SEQ ID NO: 5829573 - DNA, 25 bp, Homo sapien
cttcctcggagatgtgtgtcccggg

SEQ ID NO: 5829574 - DNA, 25 bp, Homo sapien
ctcgggagactgtgaactctccctc

SEQ ID NO: 5829575 - DNA, 25 bp, Homo sapien
gagggagagttcacagtctcccgag

SEQ ID NO: 5829576 - DNA, 25 bp, Homo sapien
acacccatcgaagagcgcggagtag

SEQ ID NO: 5829577 - DNA, 25 bp, Homo sapien
ctactccgcgctcttcgatgggtgt

SEQ ID NO: 5829578 - DNA, 25 bp, Homo sapien
gccggcggaaggctcggagaaaggg

SEQ ID NO: 5829579 - DNA, 25 bp, Homo sapien
ccctttctccgagccttccgccggc

SEQ ID NO: 5829580 - DNA, 25 bp, Homo sapien
gggcagggtggcacgcacacgtcca

SEQ ID NO: 5829581 - DNA, 25 bp, Homo sapien
tggacgtgtgcgtgccaccctgccc

SEQ ID NO: 5829582 - DNA, 25 bp, Homo sapien
acccgggtctacagacggtaccaga

SEQ ID NO: 5829583 - DNA, 25 bp, Homo sapien
tctggtaccgtctgtagacccgggt

SEQ ID NO: 5829584 - DNA, 25 bp, Homo sapien
actggtggggaagacaactaatagg

SEQ ID NO: 5829585 - DNA, 25 bp, Homo sapien
cctattagttgtcttccccaccagt

SEQ ID NO: 5829586 - DNA, 25 bp, Homo sapien
ggtcacgtccctacaataataacct

SEQ ID NO: 5829587 - DNA, 25 bp, Homo sapien
aggttattattgtagggacgtgacc

SEQ ID NO: 5829588 - DNA, 25 bp, Homo sapien
cagtgttctcgcaccgaggtccgaa

SEQ ID NO: 5829589 - DNA, 25 bp, Homo sapien
ttcggacctcggtgcgagaacactg

SEQ ID NO: 5829590 - DNA, 25 bp, Homo sapien
aggggacctgtcgtgcgccgtaccg

SEQ ID NO: 5829591 - DNA, 25 bp, Homo sapien
cggtacggcgcacgacaggtcccct

SEQ ID NO: 5829592 - DNA, 25 bp, Homo sapien
gagactctaaagaaatttcaattac

SEQ ID NO: 5829593 - DNA, 25 bp, Homo sapien
gtaattgaaatttctttagagtctc

SEQ ID NO: 5829594 - DNA, 25 bp, Homo sapien
aataataacctctttaattgtctgt

SEQ ID NO: 5829595 - DNA, 25 bp, Homo sapien
acagacaattaaagaggttattatt

SEQ ID NO: 5829596 - DNA, 25 bp, Homo sapien
ataataataacctctttaattgtct

SEQ ID NO: 5829597 - DNA, 25 bp, Homo sapien
agacaattaaagaggttattattat

SEQ ID NO: 5829598 - DNA, 25 bp, Homo sapien
agtctaaacgatcacgatcaaaagg

SEQ ID NO: 5829599 - DNA, 25 bp, Homo sapien
ccttttgatcgtgatcgtttagact

SEQ ID NO: 5829600 - DNA, 25 bp, Homo sapien
taagggacgtcaacccaagacacgt

SEQ ID NO: 5829601 - DNA, 25 bp, Homo sapien
acgtgtcttgggttgacgtccctta

SEQ ID NO: 5829602 - DNA, 25 bp, Homo sapien
ctgcatcgttactgtatctactcac

SEQ ID NO: 5829603 - DNA, 25 bp, Homo sapien
gtgagtagatacagtaacgatgcag

SEQ ID NO: 5829604 - DNA, 25 bp, Homo sapien
tgtgcttctttgcatctcagtagtt

SEQ ID NO: 5829605 - DNA, 25 bp, Homo sapien
ggaaatgggttccaaatgcgaggct

SEQ ID NO: 5829606 - DNA, 25 bp, Homo sapien
atggtcaggggtcctccatacaggc

SEQ ID NO: 5829607 - DNA, 25 bp, Homo sapien
acttatgtcaactcaagagtagaat

SEQ ID NO: 5829608 - DNA, 25 bp, Homo sapien
gtcccccattgttctcatcggagat

SEQ ID NO: 5829609 - DNA, 25 bp, Homo sapien
cctacaaaggccagggtatttcctg

SEQ ID NO: 5829610 - DNA, 25 bp, Homo sapien
tcatgtctgtttactgccatgttag

SEQ ID NO: 5829611 - DNA, 25 bp, Homo sapien
tgcatctcagtagttccttctggaa

SEQ ID NO: 5829612 - DNA, 25 bp, Homo sapien
gctttcattggcagaccctcaatcc

SEQ ID NO: 5829613 - DNA, 25 bp, Homo sapien
ggtgtcccccattgttctcatcgga

SEQ ID NO: 5829614 - DNA, 25 bp, Homo sapien
gctcagtccctacaaaggccagggt

SEQ ID NO: 5829615 - DNA, 25 bp, Homo sapien
ccatctaatcccacgcatgtgtgca

SEQ ID NO: 5829616 - DNA, 25 bp, Homo sapien
ctgactttcgtcctgggtttccttc

SEQ ID NO: 5829617 - DNA, 25 bp, Homo sapien
ctgcagaagagatgggagtctactt

SEQ ID NO: 5829618 - DNA, 25 bp, Homo sapien
actgccatgttagcaatttgatgta

SEQ ID NO: 5829619 - DNA, 25 bp, Homo sapien
gatggtcaggggtcctccatacagg

SEQ ID NO: 5829620 - DNA, 25 bp, Homo sapien
cggtgccgctcgtcgggcgaggtgg

SEQ ID NO: 5829621 - DNA, 25 bp, Homo sapien
ccacctcgcccgacgagcggcaccg

SEQ ID NO: 5829622 - DNA, 25 bp, Homo sapien
gggcagcagggcaggacgaacctgt

SEQ ID NO: 5829623 - DNA, 25 bp, Homo sapien
acaggttcgtcctgccctgctgccc

SEQ ID NO: 5829624 - DNA, 25 bp, Homo sapien
aatctcacaaacgttaaacaagctt

SEQ ID NO: 5829625 - DNA, 25 bp, Homo sapien
aagcttgtttaacgtttgtgagatt

SEQ ID NO: 5829626 - DNA, 25 bp, Homo sapien
gactgctgcaccaacctattagaat

SEQ ID NO: 5829627 - DNA, 25 bp, Homo sapien
ctttgaaagtcaattccatggacag

SEQ ID NO: 5829628 - DNA, 25 bp, Homo sapien
ctgggatgaggcacatgacacgccc

SEQ ID NO: 5829629 - DNA, 25 bp, Homo sapien
gttccctggggcacgtgcatctcat

SEQ ID NO: 5829630 - DNA, 25 bp, Homo sapien
ccagccacaagcaacacctatggga

SEQ ID NO: 5829631 - DNA, 25 bp, Homo sapien
actgactgatagagaaatgccttcc

SEQ ID NO: 5829632 - DNA, 25 bp, Homo sapien
ctgggcttaggctgatctagtctgg

SEQ ID NO: 5829633 - DNA, 25 bp, Homo sapien
cttcccctctagaaaggaagctcca

SEQ ID NO: 5829634 - DNA, 25 bp, Homo sapien
aatgccttccctgttgctgggatga

SEQ ID NO: 5829635 - DNA, 25 bp, Homo sapien
aaatgccttccctgttgctgggatg

SEQ ID NO: 5829636 - DNA, 25 bp, Homo sapien
cagaagcaagtcacccagccacaag

SEQ ID NO: 5829637 - DNA, 25 bp, Homo sapien
agtctggccttgactccaggctaag

SEQ ID NO: 5829638 - DNA, 25 bp, Homo sapien
agacggcaggcctggcagtgcccac

SEQ ID NO: 5829639 - DNA, 25 bp, Homo sapien
ttccatggacagttagcatttgctc

SEQ ID NO: 5829640 - DNA, 25 bp, Homo sapien
ccatgagaatagaggccaaatctac

SEQ ID NO: 5829641 - DNA, 25 bp, Homo sapien
atcatttaccaactgactgatagag

SEQ ID NO: 5829642 - DNA, 25 bp, Homo sapien
gacgagaactactatcaataatggt

SEQ ID NO: 5829643 - DNA, 25 bp, Homo sapien
accattattgatagtagttctcgtc

SEQ ID NO: 5829644 - DNA, 25 bp, Homo sapien
gaagtcatactaattactatcctgg

SEQ ID NO: 5829645 - DNA, 25 bp, Homo sapien
ccaggatagtaattagtatgacttc

SEQ ID NO: 5829646 - DNA, 25 bp, Homo sapien
tctctaaaatatccactacataact

SEQ ID NO: 5829647 - DNA, 25 bp, Homo sapien
agttatgtagtggatattttagaga

SEQ ID NO: 5829648 - DNA, 25 bp, Homo sapien
ttcggccggtggtcgccgaagcagc

SEQ ID NO: 5829649 - DNA, 25 bp, Homo sapien
gctgcttcggcgaccaccggccgaa

SEQ ID NO: 5829650 - DNA, 25 bp, Homo sapien
cagcgtggtttgtccgctggttgct

SEQ ID NO: 5829651 - DNA, 25 bp, Homo sapien
agcaaccagcggacaaaccacgctg

SEQ ID NO: 5829652 - DNA, 25 bp, Homo sapien
gaagtgcgggtgtcctaaaggttat

SEQ ID NO: 5829653 - DNA, 25 bp, Homo sapien
ataacctttaggacacccgcacttc

SEQ ID NO: 5829654 - DNA, 25 bp, Homo sapien
taaacaaacggagagtcaagacacc

SEQ ID NO: 5829655 - DNA, 25 bp, Homo sapien
ggtgtcttgactctccgtttgttta

SEQ ID NO: 5829656 - DNA, 25 bp, Homo sapien
ccgtgtctcgagttgaatagttaat

SEQ ID NO: 5829657 - DNA, 25 bp, Homo sapien
attaactattcaactcgagacacgg

SEQ ID NO: 5829658 - DNA, 25 bp, Homo sapien
tgtcgagaacagttgttgtcgaggt

SEQ ID NO: 5829659 - DNA, 25 bp, Homo sapien
acctcgacaacaactgttctcgaca

SEQ ID NO: 5829660 - DNA, 25 bp, Homo sapien
aactgcatgtcatttctgggttctc

SEQ ID NO: 5829661 - DNA, 25 bp, Homo sapien
gagaacccagaaatgacatgcagtt

SEQ ID NO: 5829662 - DNA, 25 bp, Homo sapien
cggaggcccgtcgtacgtagcgacg

SEQ ID NO: 5829663 - DNA, 25 bp, Homo sapien
cgtcgctacgtacgacgggcctccg

SEQ ID NO: 5829664 - DNA, 25 bp, Homo sapien
tcctcttcgcggacaaggtacctga

SEQ ID NO: 5829665 - DNA, 25 bp, Homo sapien
tcaggtaccttgtccgcgaagagga

SEQ ID NO: 5829666 - DNA, 25 bp, Homo sapien
tataagcaaagaagtcgttcaatag

SEQ ID NO: 5829667 - DNA, 25 bp, Homo sapien
ctattgaacgacttctttgcttata

SEQ ID NO: 5829668 - DNA, 25 bp, Homo sapien
gacgcttcccgcctcccgcgacgtt

SEQ ID NO: 5829669 - DNA, 25 bp, Homo sapien
aacgtcgcgggaggcgggaagcgtc

SEQ ID NO: 5829670 - DNA, 25 bp, Homo sapien
cgtctcatagagacaccccgatggg

SEQ ID NO: 5829671 - DNA, 25 bp, Homo sapien
cccatcggggtgtctctatgagacg

SEQ ID NO: 5829672 - DNA, 25 bp, Homo sapien
tgtaccgagactgacggtgtaaaac

SEQ ID NO: 5829673 - DNA, 25 bp, Homo sapien
gttttacaccgtcagtctcggtaca

SEQ ID NO: 5829674 - DNA, 25 bp, Homo sapien
agactagtgtgacccgaatttttag

SEQ ID NO: 5829675 - DNA, 25 bp, Homo sapien
ctaaaaattcgggtcacactagtct

SEQ ID NO: 5829676 - DNA, 25 bp, Homo sapien
tcttcctgaaaataggtatgggtcc

SEQ ID NO: 5829677 - DNA, 25 bp, Homo sapien
ggacccatacctattttcaggaaga

SEQ ID NO: 5829678 - DNA, 25 bp, Homo sapien
ttccgttccgggagccgatcccgga

SEQ ID NO: 5829679 - DNA, 25 bp, Homo sapien
tccgggatcggctcccggaacggaa

SEQ ID NO: 5829680 - DNA, 25 bp, Homo sapien
ctgccgaggtactggtccaaacgat

SEQ ID NO: 5829681 - DNA, 25 bp, Homo sapien
atcgtttggaccagtacctcggcag

SEQ ID NO: 5829682 - DNA, 25 bp, Homo sapien
gcggcgggtcggttcaggcgcgccc

SEQ ID NO: 5829683 - DNA, 25 bp, Homo sapien
gggcgcgcctgaaccgacccgccgc

SEQ ID NO: 5829684 - DNA, 25 bp, Homo sapien
agggccggcggcacgccactgttcg

SEQ ID NO: 5829685 - DNA, 25 bp, Homo sapien
cgaacagtggcgtgccgccggccct

SEQ ID NO: 5829686 - DNA, 25 bp, Homo sapien
cctcacactaggaccacgacagaga

SEQ ID NO: 5829687 - DNA, 25 bp, Homo sapien
tctctgtcgtggtcctagtgtgagg

SEQ ID NO: 5829688 - DNA, 25 bp, Homo sapien
ccgaagtgtggatactcattaagag

SEQ ID NO: 5829689 - DNA, 25 bp, Homo sapien
ctcttaatgagtatccacacttcgg

SEQ ID NO: 5829690 - DNA, 25 bp, Homo sapien
cgcgcgccccgctgtcccgagggta

SEQ ID NO: 5829691 - DNA, 25 bp, Homo sapien
taccctcgggacagcggggcgcgcg

SEQ ID NO: 5829692 - DNA, 25 bp, Homo sapien
ggtccgggcatctacgcgcgccccg

SEQ ID NO: 5829693 - DNA, 25 bp, Homo sapien
cggggcgcgcgtagatgcccggacc

SEQ ID NO: 5829694 - DNA, 25 bp, Homo sapien
gacggtccgggcatctacgcgcgcc

SEQ ID NO: 5829695 - DNA, 25 bp, Homo sapien
ggcgcgcgtagatgcccggaccgtc

SEQ ID NO: 5829696 - DNA, 25 bp, Homo sapien
gattcactagtacatcttttaaaag

SEQ ID NO: 5829697 - DNA, 25 bp, Homo sapien
cttttaaaagatgtactagtgaatc

SEQ ID NO: 5829698 - DNA, 25 bp, Homo sapien
aggtagggtcaagctgaattcttat

SEQ ID NO: 5829699 - DNA, 25 bp, Homo sapien
ataagaattcagcttgaccctacct

SEQ ID NO: 5829700 - DNA, 25 bp, Homo sapien
gggtcgggtgctgacgcaccggcga

SEQ ID NO: 5829701 - DNA, 25 bp, Homo sapien
tcgccggtgcgtcagcacccgaccc

SEQ ID NO: 5829702 - DNA, 25 bp, Homo sapien
gggccatggggtcgggtgctgacgc

SEQ ID NO: 5829703 - DNA, 25 bp, Homo sapien
gcgtcagcacccgaccccatggccc

SEQ ID NO: 5829704 - DNA, 25 bp, Homo sapien
aaagaatcacagtttgaaaaatcgt

SEQ ID NO: 5829705 - DNA, 25 bp, Homo sapien
acgatttttcaaactgtgattcttt

SEQ ID NO: 5829706 - DNA, 25 bp, Homo sapien
agcggcggcgatcggggcgtctcgg

SEQ ID NO: 5829707 - DNA, 25 bp, Homo sapien
ccgagacgccccgatcgccgccgct

SEQ ID NO: 5829708 - DNA, 25 bp, Homo sapien
acgcgtcagcgagcgggcgcacggg

SEQ ID NO: 5829709 - DNA, 25 bp, Homo sapien
cccgtgcgcccgctcgctgacgcgt

SEQ ID NO: 5829710 - DNA, 25 bp, Homo sapien
cgcgaggaacgcgtcagcgagcggg

SEQ ID NO: 5829711 - DNA, 25 bp, Homo sapien
cccgctcgctgacgcgttcctcgcg

SEQ ID NO: 5829712 - DNA, 25 bp, Homo sapien
gccgccggctgataaagcacccgga

SEQ ID NO: 5829713 - DNA, 25 bp, Homo sapien
tccgggtgctttatcagccggcggc

SEQ ID NO: 5829714 - DNA, 25 bp, Homo sapien
tccatcgacacgaaattcggacgcg

SEQ ID NO: 5829715 - DNA, 25 bp, Homo sapien
cgcgtccgaatttcgtgtcgatgga

SEQ ID NO: 5829716 - DNA, 25 bp, Homo sapien
actttacttctgtagatattagtat

SEQ ID NO: 5829717 - DNA, 25 bp, Homo sapien
atactaatatctacagaagtaaagt

SEQ ID NO: 5829718 - DNA, 25 bp, Homo sapien
acttctgtagatattagtatattcg

SEQ ID NO: 5829719 - DNA, 25 bp, Homo sapien
cgaatatactaatatctacagaagt

SEQ ID NO: 5829720 - DNA, 25 bp, Homo sapien
ttacttctgtagatattagtatatt

SEQ ID NO: 5829721 - DNA, 25 bp, Homo sapien
aatatactaatatctacagaagtaa

SEQ ID NO: 5829722 - DNA, 25 bp, Homo sapien
tggggtctctgaaagggtcccggag

SEQ ID NO: 5829723 - DNA, 25 bp, Homo sapien
ctccgggaccctttcagagacccca

SEQ ID NO: 5829724 - DNA, 25 bp, Homo sapien
gtcgccggctgccaccggccccacc

SEQ ID NO: 5829725 - DNA, 25 bp, Homo sapien
ggtggggccggtggcagccggcgac

SEQ ID NO: 5829726 - DNA, 25 bp, Homo sapien
cgtcgccggctgccaccggccccac

SEQ ID NO: 5829727 - DNA, 25 bp, Homo sapien
gtggggccggtggcagccggcgacg

SEQ ID NO: 5829728 - DNA, 25 bp, Homo sapien
gcgtcgccggctgccaccggcccca

SEQ ID NO: 5829729 - DNA, 25 bp, Homo sapien
tggggccggtggcagccggcgacgc

SEQ ID NO: 5829730 - DNA, 25 bp, Homo sapien
gacgacatctccgagaccccagact

SEQ ID NO: 5829731 - DNA, 25 bp, Homo sapien
agtctggggtctcggagatgtcgtc

SEQ ID NO: 5829732 - DNA, 25 bp, Homo sapien
acgatagaatgataggctttccaaa

SEQ ID NO: 5829733 - DNA, 25 bp, Homo sapien
tttggaaagcctatcattctatcgt

SEQ ID NO: 5829734 - DNA, 25 bp, Homo sapien
gttttgctaaacgatagaatgatag

SEQ ID NO: 5829735 - DNA, 25 bp, Homo sapien
ctatcattctatcgtttagcaaaac

SEQ ID NO: 5829736 - DNA, 25 bp, Homo sapien
ccgcctgctctggagcgcaccggta

SEQ ID NO: 5829737 - DNA, 25 bp, Homo sapien
taccggtgcgctccagagcaggcgg

SEQ ID NO: 5829738 - DNA, 25 bp, Homo sapien
acacaccggacaaatccgggtgacc

SEQ ID NO: 5829739 - DNA, 25 bp, Homo sapien
ggtcacccggatttgtccggtgtgt

SEQ ID NO: 5829740 - DNA, 25 bp, Homo sapien
tgactctctctatcttaaattctat

SEQ ID NO: 5829741 - DNA, 25 bp, Homo sapien
atagaatttaagatagagagagtca

SEQ ID NO: 5829742 - DNA, 25 bp, Homo sapien
accacaccatagaccctctggagga

SEQ ID NO: 5829743 - DNA, 25 bp, Homo sapien
tcctccagagggtctatggtgtggt

SEQ ID NO: 5829744 - DNA, 25 bp, Homo sapien
ctcgggtcctcgaagggtggtcatc

SEQ ID NO: 5829745 - DNA, 25 bp, Homo sapien
gatgaccacccttcgaggacccgag

SEQ ID NO: 5829746 - DNA, 25 bp, Homo sapien
tccgggcgaccggcgggacggtgtg

SEQ ID NO: 5829747 - DNA, 25 bp, Homo sapien
cacaccgtcccgccggtcgcccgga

SEQ ID NO: 5829748 - DNA, 25 bp, Homo sapien
gacttatgaataatctacagttcat

SEQ ID NO: 5829749 - DNA, 25 bp, Homo sapien
atgaactgtagattattcataagtc

SEQ ID NO: 5829750 - DNA, 25 bp, Homo sapien
cttgggacacggtgtgtgtcatccc

SEQ ID NO: 5829751 - DNA, 25 bp, Homo sapien
gggatgacacacaccgtgtcccaag

SEQ ID NO: 5829752 - DNA, 25 bp, Homo sapien
tacaagaaatctatttaatacacat

SEQ ID NO: 5829753 - DNA, 25 bp, Homo sapien
atgtgtattaaatagatttcttgta

SEQ ID NO: 5829754 - DNA, 25 bp, Homo sapien
aatacaagaaatctatttaatacac

SEQ ID NO: 5829755 - DNA, 25 bp, Homo sapien
gtgtattaaatagatttcttgtatt

SEQ ID NO: 5829756 - DNA, 25 bp, Homo sapien
ttacatatgtcattactaaataaag

SEQ ID NO: 5829757 - DNA, 25 bp, Homo sapien
ctttatttagtaatgacatatgtaa

SEQ ID NO: 5829758 - DNA, 25 bp, Homo sapien
tatgtcattactaaataaagaacga

SEQ ID NO: 5829759 - DNA, 25 bp, Homo sapien
tcgttctttatttagtaatgacata

SEQ ID NO: 5829760 - DNA, 25 bp, Homo sapien
acatatgtcattactaaataaagaa

SEQ ID NO: 5829761 - DNA, 25 bp, Homo sapien
ttctttatttagtaatgacatatgt

SEQ ID NO: 5829762 - DNA, 25 bp, Homo sapien
tctcaaagtattggaggacgtacgg

SEQ ID NO: 5829763 - DNA, 25 bp, Homo sapien
ccgtacgtcctccaatactttgaga

SEQ ID NO: 5829764 - DNA, 25 bp, Homo sapien
cctcgtgttgggaactttccgcagt

SEQ ID NO: 5829765 - DNA, 25 bp, Homo sapien
actgcggaaagttcccaacacgagg

SEQ ID NO: 5829766 - DNA, 25 bp, Homo sapien
acccagttgcacgacgtacctgcag

SEQ ID NO: 5829767 - DNA, 25 bp, Homo sapien
ctgcaggtacgtcgtgcaactgggt

SEQ ID NO: 5829768 - DNA, 25 bp, Homo sapien
cacgtccccgtcctgtggtcgggac

SEQ ID NO: 5829769 - DNA, 25 bp, Homo sapien
gtcccgaccacaggacggggacgtg

SEQ ID NO: 5829770 - DNA, 25 bp, Homo sapien
attagaaactcaaacgcagaacttt

SEQ ID NO: 5829771 - DNA, 25 bp, Homo sapien
aaagttctgcgtttgagtttctaat

SEQ ID NO: 5829772 - DNA, 25 bp, Homo sapien
gacgacgatccgcccgggggccgga

SEQ ID NO: 5829773 - DNA, 25 bp, Homo sapien
tccggcccccgggcggatcgtcgtc

SEQ ID NO: 5829774 - DNA, 25 bp, Homo sapien
gagtgcctaaaaattggagacaagg

SEQ ID NO: 5829775 - DNA, 25 bp, Homo sapien
ccttgtctccaatttttaggcactc

SEQ ID NO: 5829776 - DNA, 25 bp, Homo sapien
tagccacctagatcaacactcctag

SEQ ID NO: 5829777 - DNA, 25 bp, Homo sapien
ctaggagtgttgatctaggtggcta

SEQ ID NO: 5829778 - DNA, 25 bp, Homo sapien
tacatgaattaagtttttaccaaag

SEQ ID NO: 5829779 - DNA, 25 bp, Homo sapien
ctttggtaaaaacttaattcatgta

SEQ ID NO: 5829780 - DNA, 25 bp, Homo sapien
tacttacatgaattaagtttttacc

SEQ ID NO: 5829781 - DNA, 25 bp, Homo sapien
ggtaaaaacttaattcatgtaagta

SEQ ID NO: 5829782 - DNA, 25 bp, Homo sapien
agactacggcgcacgggtcgcaccc

SEQ ID NO: 5829783 - DNA, 25 bp, Homo sapien
gggtgcgacccgtgcgccgtagtct

SEQ ID NO: 5829784 - DNA, 25 bp, Homo sapien
aacagaaagaaacatagtcacgagt

SEQ ID NO: 5829785 - DNA, 25 bp, Homo sapien
actcgtgactatgtttctttctgtt

SEQ ID NO: 5829786 - DNA, 25 bp, Homo sapien
acggtgagagagacgtcgctggacc

SEQ ID NO: 5829787 - DNA, 25 bp, Homo sapien
ggtccagcgacgtctctctcaccgt

SEQ ID NO: 5829788 - DNA, 25 bp, Homo sapien
aattgtctctgtctttgagaaaaag

SEQ ID NO: 5829789 - DNA, 25 bp, Homo sapien
ctttttctcaaagacagagacaatt

SEQ ID NO: 5829790 - DNA, 25 bp, Homo sapien
attacaaagaaagtttgctgaggta

SEQ ID NO: 5829791 - DNA, 25 bp, Homo sapien
tacctcagcaaactttctttgtaat

SEQ ID NO: 5829792 - DNA, 25 bp, Homo sapien
gaagactaaaactacaaaggacata

SEQ ID NO: 5829793 - DNA, 25 bp, Homo sapien
tatgtcctttgtagttttagtcttc

SEQ ID NO: 5829794 - DNA, 25 bp, Homo sapien
gcttgcgggcggtgctgccgccggg

SEQ ID NO: 5829795 - DNA, 25 bp, Homo sapien
cccggcggcagcaccgcccgcaagc

SEQ ID NO: 5829796 - DNA, 25 bp, Homo sapien
aaaaaggttaaagttgtagatgatg

SEQ ID NO: 5829797 - DNA, 25 bp, Homo sapien
catcatctacaactttaaccttttt

SEQ ID NO: 5829798 - DNA, 25 bp, Homo sapien
ttggtgaaactttaagttacataaa

SEQ ID NO: 5829799 - DNA, 25 bp, Homo sapien
tttatgtaacttaaagtttcaccaa

SEQ ID NO: 5829800 - DNA, 25 bp, Homo sapien
cgacaggggcactgccgggcggtgt

SEQ ID NO: 5829801 - DNA, 25 bp, Homo sapien
acaccgcccggcagtgcccctgtcg

SEQ ID NO: 5829802 - DNA, 25 bp, Homo sapien
ccgacaggggcactgccgggcggtg

SEQ ID NO: 5829803 - DNA, 25 bp, Homo sapien
caccgcccggcagtgcccctgtcgg

SEQ ID NO: 5829804 - DNA, 25 bp, Homo sapien
gccgacaggggcactgccgggcggt

SEQ ID NO: 5829805 - DNA, 25 bp, Homo sapien
accgcccggcagtgcccctgtcggc

SEQ ID NO: 5829806 - DNA, 25 bp, Homo sapien
ggccgacaggggcactgccgggcgg

SEQ ID NO: 5829807 - DNA, 25 bp, Homo sapien
ccgcccggcagtgcccctgtcggcc

SEQ ID NO: 5829808 - DNA, 25 bp, Homo sapien
ccgtgatccgtccagacaccactgc

SEQ ID NO: 5829809 - DNA, 25 bp, Homo sapien
gcagtggtgtctggacggatcacgg

SEQ ID NO: 5829810 - DNA, 25 bp, Homo sapien
acgactttaggacgatcgcacaggc

SEQ ID NO: 5829811 - DNA, 25 bp, Homo sapien
gcctgtgcgatcgtcctaaagtcgt

SEQ ID NO: 5829812 - DNA, 25 bp, Homo sapien
taaaactatatcattggttacgttt

SEQ ID NO: 5829813 - DNA, 25 bp, Homo sapien
aaacgtaaccaatgatatagtttta

SEQ ID NO: 5829814 - DNA, 25 bp, Homo sapien
tactacgaccacacagcgacaacat

SEQ ID NO: 5829815 - DNA, 25 bp, Homo sapien
atgttgtcgctgtgtggtcgtagta

SEQ ID NO: 5829816 - DNA, 25 bp, Homo sapien
aatccttaaacataaaatatccgat

SEQ ID NO: 5829817 - DNA, 25 bp, Homo sapien
atcggatattttatgtttaaggatt

SEQ ID NO: 5829818 - DNA, 25 bp, Homo sapien
gaaagagaagaacattctaacgaag

SEQ ID NO: 5829819 - DNA, 25 bp, Homo sapien
cttcgttagaatgttcttctctttc

SEQ ID NO: 5829820 - DNA, 25 bp, Homo sapien
ctagagttgtgtcgggaaaaaacaa

SEQ ID NO: 5829821 - DNA, 25 bp, Homo sapien
ttgttttttcccgacacaactctag

SEQ ID NO: 5829822 - DNA, 25 bp, Homo sapien
acggcagcctaggccgcccgtgggg

SEQ ID NO: 5829823 - DNA, 25 bp, Homo sapien
ccccacgggcggcctaggctgccgt

SEQ ID NO: 5829824 - DNA, 25 bp, Homo sapien
cacggcagcctaggccgcccgtggg

SEQ ID NO: 5829825 - DNA, 25 bp, Homo sapien
cccacgggcggcctaggctgccgtg

SEQ ID NO: 5829826 - DNA, 25 bp, Homo sapien
tcacggcagcctaggccgcccgtgg

SEQ ID NO: 5829827 - DNA, 25 bp, Homo sapien
ccacgggcggcctaggctgccgtga

SEQ ID NO: 5829828 - DNA, 25 bp, Homo sapien
gacggtgctagagggagcactccac

SEQ ID NO: 5829829 - DNA, 25 bp, Homo sapien
gtggagtgctccctctagcaccgtc

SEQ ID NO: 5829830 - DNA, 25 bp, Homo sapien
gtttctcatttacatcacaactcac

SEQ ID NO: 5829831 - DNA, 25 bp, Homo sapien
gtgagttgtgatgtaaatgagaaac

SEQ ID NO: 5829832 - DNA, 25 bp, Homo sapien
tcgtgcgcagcaggtcttcgcacag

SEQ ID NO: 5829833 - DNA, 25 bp, Homo sapien
ctgtgcgaagacctgctgcgcacga

SEQ ID NO: 5829834 - DNA, 25 bp, Homo sapien
cccagggacgactgcgagagtcggt

SEQ ID NO: 5829835 - DNA, 25 bp, Homo sapien
accgactctcgcagtcgtccctggg

SEQ ID NO: 5829836 - DNA, 25 bp, Homo sapien
tcgggtgtaccctactcccgtgcgg

SEQ ID NO: 5829837 - DNA, 25 bp, Homo sapien
ccgcacgggagtagggtacacccga

SEQ ID NO: 5829838 - DNA, 25 bp, Homo sapien
gacctaatccgttcttaggcccgac

SEQ ID NO: 5829839 - DNA, 25 bp, Homo sapien
gtcgggcctaagaacggattaggtc

SEQ ID NO: 5829840 - DNA, 25 bp, Homo sapien
cagtgtaagtgctaaaacaaagagg

SEQ ID NO: 5829841 - DNA, 25 bp, Homo sapien
cctctttgttttagcacttacactg

SEQ ID NO: 5829842 - DNA, 25 bp, Homo sapien
tccgaaggtacacgtgcaatggccc

SEQ ID NO: 5829843 - DNA, 25 bp, Homo sapien
gggccattgcacgtgtaccttcgga

SEQ ID NO: 5829844 - DNA, 25 bp, Homo sapien
gtccgtcgctctgcccgcgggcccg

SEQ ID NO: 5829845 - DNA, 25 bp, Homo sapien
cgggcccgcgggcagagcgacggac

SEQ ID NO: 5829846 - DNA, 25 bp, Homo sapien
cgtccgtcgctctgcccgcgggccc

SEQ ID NO: 5829847 - DNA, 25 bp, Homo sapien
gggcccgcgggcagagcgacggacg

SEQ ID NO: 5829848 - DNA, 25 bp, Homo sapien
gacgtccgtcgctctgcccgcgggc

SEQ ID NO: 5829849 - DNA, 25 bp, Homo sapien
gcccgcgggcagagcgacggacgtc

SEQ ID NO: 5829850 - DNA, 25 bp, Homo sapien
tgtcgagactgtacccgcgagcacg

SEQ ID NO: 5829851 - DNA, 25 bp, Homo sapien
cgtgctcgcgggtacagtctcgaca

SEQ ID NO: 5829852 - DNA, 25 bp, Homo sapien
agagaggggccctccgagcggacac

SEQ ID NO: 5829853 - DNA, 25 bp, Homo sapien
gtgtccgctcggagggcccctctct

SEQ ID NO: 5829854 - DNA, 25 bp, Homo sapien
acgaggttttgtttcatactggcac

SEQ ID NO: 5829855 - DNA, 25 bp, Homo sapien
gtgccagtatgaaacaaaacctcgt

SEQ ID NO: 5829856 - DNA, 25 bp, Homo sapien
gctttcttatctgacgacacttctg

SEQ ID NO: 5829857 - DNA, 25 bp, Homo sapien
cagaagtgtcgtcagataagaaagc

SEQ ID NO: 5829858 - DNA, 25 bp, Homo sapien
agtttttgctacgaaaattcaagag

SEQ ID NO: 5829859 - DNA, 25 bp, Homo sapien
ctcttgaattttcgtagcaaaaact

SEQ ID NO: 5829860 - DNA, 25 bp, Homo sapien
agacaccaggtacgcgggggtcacg

SEQ ID NO: 5829861 - DNA, 25 bp, Homo sapien
cgtgacccccgcgtacctggtgtct

SEQ ID NO: 5829862 - DNA, 25 bp, Homo sapien
caggagattttacgcattattgaag

SEQ ID NO: 5829863 - DNA, 25 bp, Homo sapien
cttcaataatgcgtaaaatctcctg

SEQ ID NO: 5829864 - DNA, 25 bp, Homo sapien
gtttctgggaggatcgaggtcagtc

SEQ ID NO: 5829865 - DNA, 25 bp, Homo sapien
gactgacctcgatcctcccagaaac

SEQ ID NO: 5829866 - DNA, 25 bp, Homo sapien
ttgctcggtgcttgtgtcggaaccc

SEQ ID NO: 5829867 - DNA, 25 bp, Homo sapien
gggttccgacacaagcaccgagcaa

SEQ ID NO: 5829868 - DNA, 25 bp, Homo sapien
atatcttagacaactctaagacgta

SEQ ID NO: 5829869 - DNA, 25 bp, Homo sapien
tacgtcttagagttgtctaagatat

SEQ ID NO: 5829870 - DNA, 25 bp, Homo sapien
agacgtagtcgaaactggtatcctt

SEQ ID NO: 5829871 - DNA, 25 bp, Homo sapien
aaggataccagtttcgactacgtct

SEQ ID NO: 5829872 - DNA, 25 bp, Homo sapien
tcaaaaatctcatcactgtttacac

SEQ ID NO: 5829873 - DNA, 25 bp, Homo sapien
gtgtaaacagtgatgagatttttga

SEQ ID NO: 5829874 - DNA, 25 bp, Homo sapien
ctcggcgccgtcgaggccgttaccg

SEQ ID NO: 5829875 - DNA, 25 bp, Homo sapien
cggtaacggcctcgacggcgccgag

SEQ ID NO: 5829876 - DNA, 25 bp, Homo sapien
cctcggcgccgtcgaggccgttacc

SEQ ID NO: 5829877 - DNA, 25 bp, Homo sapien
ggtaacggcctcgacggcgccgagg

SEQ ID NO: 5829878 - DNA, 25 bp, Homo sapien
cgcgcgcgctcgggcctccccttca

SEQ ID NO: 5829879 - DNA, 25 bp, Homo sapien
tgaaggggaggcccgagcgcgcgcg

SEQ ID NO: 5829880 - DNA, 25 bp, Homo sapien
attcattctaggtgtccccgtggct

SEQ ID NO: 5829881 - DNA, 25 bp, Homo sapien
agccacggggacacctagaatgaat

SEQ ID NO: 5829882 - DNA, 25 bp, Homo sapien
ggagagacacgaactaggacttgtt

SEQ ID NO: 5829883 - DNA, 25 bp, Homo sapien
aacaagtcctagttcgtgtctctcc

SEQ ID NO: 5829884 - DNA, 25 bp, Homo sapien
gccgccccagctcccactgtgtcca

SEQ ID NO: 5829885 - DNA, 25 bp, Homo sapien
tggacacagtgggagctggggcggc

SEQ ID NO: 5829886 - DNA, 25 bp, Homo sapien
tcgtacttgaagtgtcgggactcct

SEQ ID NO: 5829887 - DNA, 25 bp, Homo sapien
aggagtcccgacacttcaagtacga

SEQ ID NO: 5829888 - DNA, 25 bp, Homo sapien
gataaaatagacgacctgctatcga

SEQ ID NO: 5829889 - DNA, 25 bp, Homo sapien
tcgatagcaggtcgtctattttatc

SEQ ID NO: 5829890 - DNA, 25 bp, Homo sapien
gggttcgagcggaggcacagggggc

SEQ ID NO: 5829891 - DNA, 25 bp, Homo sapien
gccccctgtgcctccgctcgaaccc

SEQ ID NO: 5829892 - DNA, 25 bp, Homo sapien
gcggggccgcgccagtcccgtcact

SEQ ID NO: 5829893 - DNA, 25 bp, Homo sapien
agtgacgggactggcgcggccccgc

SEQ ID NO: 5829894 - DNA, 25 bp, Homo sapien
ggcggggccgcgccagtcccgtcac

SEQ ID NO: 5829895 - DNA, 25 bp, Homo sapien
gtgacgggactggcgcggccccgcc

SEQ ID NO: 5829896 - DNA, 25 bp, Homo sapien
gggcggggccgcgccagtcccgtca

SEQ ID NO: 5829897 - DNA, 25 bp, Homo sapien
tgacgggactggcgcggccccgccc

SEQ ID NO: 5829898 - DNA, 25 bp, Homo sapien
cggggccgcgccagtcccgtcactg

SEQ ID NO: 5829899 - DNA, 25 bp, Homo sapien
cagtgacgggactggcgcggccccg

SEQ ID NO: 5829900 - DNA, 25 bp, Homo sapien
agttcaatgatctaaacatgttctg

SEQ ID NO: 5829901 - DNA, 25 bp, Homo sapien
cagaacatgtttagatcattgaact

SEQ ID NO: 5829902 - DNA, 25 bp, Homo sapien
gtcaccctcctgctttggagtcacg

SEQ ID NO: 5829903 - DNA, 25 bp, Homo sapien
cgtgactccaaagcaggagggtgac

SEQ ID NO: 5829904 - DNA, 25 bp, Homo sapien
cgtcgtcggtgcacccggccaccag

SEQ ID NO: 5829905 - DNA, 25 bp, Homo sapien
ctggtggccgggtgcaccgacgacg

SEQ ID NO: 5829906 - DNA, 25 bp, Homo sapien
ggtccggtgtccgcgggccgcaccc

SEQ ID NO: 5829907 - DNA, 25 bp, Homo sapien
gggtgcggcccgcggacaccggacc

SEQ ID NO: 5829908 - DNA, 25 bp, Homo sapien
aggtccggtgtccgcgggccgcacc

SEQ ID NO: 5829909 - DNA, 25 bp, Homo sapien
ggtgcggcccgcggacaccggacct

SEQ ID NO: 5829910 - DNA, 25 bp, Homo sapien
caggtccggtgtccgcgggccgcac

SEQ ID NO: 5829911 - DNA, 25 bp, Homo sapien
gtgcggcccgcggacaccggacctg

SEQ ID NO: 5829912 - DNA, 25 bp, Homo sapien
gagattaaacaatcggaattcaagg

SEQ ID NO: 5829913 - DNA, 25 bp, Homo sapien
ccttgaattccgattgtttaatctc

SEQ ID NO: 5829914 - DNA, 25 bp, Homo sapien
gactcgggcccgtcaggacgttcgt

SEQ ID NO: 5829915 - DNA, 25 bp, Homo sapien
acgaacgtcctgacgggcccgagtc

SEQ ID NO: 5829916 - DNA, 25 bp, Homo sapien
tacgtctccacttatcccgtaacac

SEQ ID NO: 5829917 - DNA, 25 bp, Homo sapien
gtgttacgggataagtggagacgta

SEQ ID NO: 5829918 - DNA, 25 bp, Homo sapien
acgagacagtatggttgctcattgt

SEQ ID NO: 5829919 - DNA, 25 bp, Homo sapien
acaatgagcaaccatactgtctcgt

SEQ ID NO: 5829920 - DNA, 25 bp, Homo sapien
tagatgctcgtctataagaaggagg

SEQ ID NO: 5829921 - DNA, 25 bp, Homo sapien
cctccttcttatagacgagcatcta

SEQ ID NO: 5829922 - DNA, 25 bp, Homo sapien
gttcaaggagatttgcaccgtcatt

SEQ ID NO: 5829923 - DNA, 25 bp, Homo sapien
aatgacggtgcaaatctccttgaac

SEQ ID NO: 5829924 - DNA, 25 bp, Homo sapien
aggatttccccagatcgtcttacgg

SEQ ID NO: 5829925 - DNA, 25 bp, Homo sapien
ccgtaagacgatctggggaaatcct

SEQ ID NO: 5829926 - DNA, 25 bp, Homo sapien
gtagagatggttagacactgaaaag

SEQ ID NO: 5829927 - DNA, 25 bp, Homo sapien
cttttcagtgtctaaccatctctac

SEQ ID NO: 5829928 - DNA, 25 bp, Homo sapien
gcctcgcagggggctgcccgtttct

SEQ ID NO: 5829929 - DNA, 25 bp, Homo sapien
agaaacgggcagccccctgcgaggc

SEQ ID NO: 5829930 - DNA, 25 bp, Homo sapien
gatatcggtaagaagaagttttagt

SEQ ID NO: 5829931 - DNA, 25 bp, Homo sapien
actaaaacttcttcttaccgatatc

SEQ ID NO: 5829932 - DNA, 25 bp, Homo sapien
ttcagaccttattacttcagcaata

SEQ ID NO: 5829933 - DNA, 25 bp, Homo sapien
tattgctgaagtaataaggtctgaa

SEQ ID NO: 5829934 - DNA, 25 bp, Homo sapien
agggagacccagtgcaccctctccc

SEQ ID NO: 5829935 - DNA, 25 bp, Homo sapien
gggagagggtgcactgggtctccct

SEQ ID NO: 5829936 - DNA, 25 bp, Homo sapien
ttccagggagacccagtgcaccctc

SEQ ID NO: 5829937 - DNA, 25 bp, Homo sapien
gagggtgcactgggtctccctggaa

SEQ ID NO: 5829938 - DNA, 25 bp, Homo sapien
caagagctccgtttacccagtgtaa

SEQ ID NO: 5829939 - DNA, 25 bp, Homo sapien
ttacactgggtaaacggagctcttg

SEQ ID NO: 5829940 - DNA, 25 bp, Homo sapien
ggaggtccacccgactagatcgggg

SEQ ID NO: 5829941 - DNA, 25 bp, Homo sapien
ccccgatctagtcgggtggacctcc

SEQ ID NO: 5829942 - DNA, 25 bp, Homo sapien
ctgcccaaacactatcgatgtttat

SEQ ID NO: 5829943 - DNA, 25 bp, Homo sapien
ataaacatcgatagtgtttgggcag

SEQ ID NO: 5829944 - DNA, 25 bp, Homo sapien
acaaagttacgttgcagtattttct

SEQ ID NO: 5829945 - DNA, 25 bp, Homo sapien
agaaaatactgcaacgtaactttgt

SEQ ID NO: 5829946 - DNA, 25 bp, Homo sapien
aagcagtcgagtagtaccaaacgac

SEQ ID NO: 5829947 - DNA, 25 bp, Homo sapien
gtcgtttggtactactcgactgctt

SEQ ID NO: 5829948 - DNA, 25 bp, Homo sapien
cgaggacattgacactcgtggaact

SEQ ID NO: 5829949 - DNA, 25 bp, Homo sapien
agttccacgagtgtcaatgtcctcg

SEQ ID NO: 5829950 - DNA, 25 bp, Homo sapien
atgtcgtgggaatgtcttcacgagg

SEQ ID NO: 5829951 - DNA, 25 bp, Homo sapien
cctcgtgaagacattcccacgacat

SEQ ID NO: 5829952 - DNA, 25 bp, Homo sapien
ttcagacggccactgtcaaagtcgt

SEQ ID NO: 5829953 - DNA, 25 bp, Homo sapien
acgactttgacagtggccgtctgaa

SEQ ID NO: 5829954 - DNA, 25 bp, Homo sapien
gttcgttaaggttataaatgtcgac

SEQ ID NO: 5829955 - DNA, 25 bp, Homo sapien
gtcgacatttataaccttaacgaac

SEQ ID NO: 5829956 - DNA, 25 bp, Homo sapien
gaaaggaaaaagtatatagtcgacg

SEQ ID NO: 5829957 - DNA, 25 bp, Homo sapien
cgtcgactatatactttttcctttc

SEQ ID NO: 5829958 - DNA, 25 bp, Homo sapien
ggatgccgacacttactgttcctaa

SEQ ID NO: 5829959 - DNA, 25 bp, Homo sapien
ttaggaacagtaagtgtcggcatcc

SEQ ID NO: 5829960 - DNA, 25 bp, Homo sapien
atcttctttatttctatgaagcaat

SEQ ID NO: 5829961 - DNA, 25 bp, Homo sapien
attgcttcatagaaataaagaagat

SEQ ID NO: 5829962 - DNA, 25 bp, Homo sapien
ctagctgtcgattccgaccggagac

SEQ ID NO: 5829963 - DNA, 25 bp, Homo sapien
gtctccggtcggaatcgacagctag

SEQ ID NO: 5829964 - DNA, 25 bp, Homo sapien
atcttcgttacgtagtgacaagggc

SEQ ID NO: 5829965 - DNA, 25 bp, Homo sapien
gcccttgtcactacgtaacgaagat

SEQ ID NO: 5829966 - DNA, 25 bp, Homo sapien
atagtcgatagtagcctataaacct

SEQ ID NO: 5829967 - DNA, 25 bp, Homo sapien
aggtttataggctactatcgactat

SEQ ID NO: 5829968 - DNA, 25 bp, Homo sapien
ttgtcagtccctcccggtggaaatc

SEQ ID NO: 5829969 - DNA, 25 bp, Homo sapien
gatttccaccgggagggactgacaa

SEQ ID NO: 5829970 - DNA, 25 bp, Homo sapien
cgatctcgagactgtggggaatgtc

SEQ ID NO: 5829971 - DNA, 25 bp, Homo sapien
gacattccccacagtctcgagatcg

SEQ ID NO: 5829972 - DNA, 25 bp, Homo sapien
tgacctatttaccatttcgaaaaag

SEQ ID NO: 5829973 - DNA, 25 bp, Homo sapien
ctttttcgaaatggtaaataggtca

SEQ ID NO: 5829974 - DNA, 25 bp, Homo sapien
acagtggagtcgctagagttgctat

SEQ ID NO: 5829975 - DNA, 25 bp, Homo sapien
atagcaactctagcgactccactgt

SEQ ID NO: 5829976 - DNA, 25 bp, Homo sapien
aggaagaaaacaccgcgataagaga

SEQ ID NO: 5829977 - DNA, 25 bp, Homo sapien
tctcttatcgcggtgttttcttcct

SEQ ID NO: 5829978 - DNA, 25 bp, Homo sapien
gactacatcaccagtttgtctatct

SEQ ID NO: 5829979 - DNA, 25 bp, Homo sapien
agatagacaaactggtgatgtagtc

SEQ ID NO: 5829980 - DNA, 25 bp, Homo sapien
caaatagtcgtttgttagaatatag

SEQ ID NO: 5829981 - DNA, 25 bp, Homo sapien
ctatattctaacaaacgactatttg

SEQ ID NO: 5829982 - DNA, 25 bp, Homo sapien
catgtgtatatgttatcataactac

SEQ ID NO: 5829983 - DNA, 25 bp, Homo sapien
gtagttatgataacatatacacatg

SEQ ID NO: 5829984 - DNA, 25 bp, Homo sapien
cggaaaatggtcgtttgagttatac

SEQ ID NO: 5829985 - DNA, 25 bp, Homo sapien
gtataactcaaacgaccattttccg

SEQ ID NO: 5829986 - DNA, 25 bp, Homo sapien
taattgccgtggtacggtgtcagcg

SEQ ID NO: 5829987 - DNA, 25 bp, Homo sapien
cgctgacaccgtaccacggcaatta

SEQ ID NO: 5829988 - DNA, 25 bp, Homo sapien
gtaaaaagtactagccttcccagcg

SEQ ID NO: 5829989 - DNA, 25 bp, Homo sapien
cgctgggaaggctagtactttttac

SEQ ID NO: 5829990 - DNA, 25 bp, Homo sapien
ctgaaaagtagagagcttagaagta

SEQ ID NO: 5829991 - DNA, 25 bp, Homo sapien
tacttctaagctctctacttttcag

SEQ ID NO: 5829992 - DNA, 25 bp, Homo sapien
cggaggcccggaccgtcagtacttc

SEQ ID NO: 5829993 - DNA, 25 bp, Homo sapien
gaagtactgacggtccgggcctccg

SEQ ID NO: 5829994 - DNA, 25 bp, Homo sapien
taatatggatgactctttaatacaa

SEQ ID NO: 5829995 - DNA, 25 bp, Homo sapien
ttgtattaaagagtcatccatatta

SEQ ID NO: 5829996 - DNA, 25 bp, Homo sapien
aatgtcgtcgggtcggccatattcg

SEQ ID NO: 5829997 - DNA, 25 bp, Homo sapien
cgaatatggccgacccgacgacatt

SEQ ID NO: 5829998 - DNA, 25 bp, Homo sapien
gtcagccacgtgtgacactcacgac

SEQ ID NO: 5829999 - DNA, 25 bp, Homo sapien
gtcgtgagtgtcacacgtggctgac

SEQ ID NO: 5830000 - DNA, 25 bp, Homo sapien
agtatattcatgacctttatagaaa

SEQ ID NO: 5830001 - DNA, 25 bp, Homo sapien
tttctataaaggtcatgaatatact

SEQ ID NO: 5830002 - DNA, 25 bp, Homo sapien
gataccattcatgccgaaatccaac

SEQ ID NO: 5830003 - DNA, 25 bp, Homo sapien
gttggatttcggcatgaatggtatc

SEQ ID NO: 5830004 - DNA, 25 bp, Homo sapien
ggccgcgcgccctacgtttacgcgc

SEQ ID NO: 5830005 - DNA, 25 bp, Homo sapien
gcgcgtaaacgtagggcgcgcggcc

SEQ ID NO: 5830006 - DNA, 25 bp, Homo sapien
tcttcgccccgagccgcggcccgtg

SEQ ID NO: 5830007 - DNA, 25 bp, Homo sapien
cacgggccgcggctcggggcgaaga

SEQ ID NO: 5830008 - DNA, 25 bp, Homo sapien
ctcttcgccccgagccgcggcccgt

SEQ ID NO: 5830009 - DNA, 25 bp, Homo sapien
acgggccgcggctcggggcgaagag

SEQ ID NO: 5830010 - DNA, 25 bp, Homo sapien
gccgcacctcttcgccccgagccgc

SEQ ID NO: 5830011 - DNA, 25 bp, Homo sapien
gcggctcggggcgaagaggtgcggc

SEQ ID NO: 5830012 - DNA, 25 bp, Homo sapien
gacgccgcacctcttcgccccgagc

SEQ ID NO: 5830013 - DNA, 25 bp, Homo sapien
gctcggggcgaagaggtgcggcgtc

SEQ ID NO: 5830014 - DNA, 25 bp, Homo sapien
cgaccggggactcacaagagtctaa

SEQ ID NO: 5830015 - DNA, 25 bp, Homo sapien
ttagactcttgtgagtccccggtcg

SEQ ID NO: 5830016 - DNA, 25 bp, Homo sapien
gatttaccgagaacaactaaacaaa

SEQ ID NO: 5830017 - DNA, 25 bp, Homo sapien
tttgtttagttgttctcggtaaatc

SEQ ID NO: 5830018 - DNA, 25 bp, Homo sapien
cgtctccctgccactggtacgccgg

SEQ ID NO: 5830019 - DNA, 25 bp, Homo sapien
ccggcgtaccagtggcagggagacg

SEQ ID NO: 5830020 - DNA, 25 bp, Homo sapien
attattaccttcattaacatagtat

SEQ ID NO: 5830021 - DNA, 25 bp, Homo sapien
atactatgttaatgaaggtaataat

SEQ ID NO: 5830022 - DNA, 25 bp, Homo sapien
taattattaccttcattaacatagt

SEQ ID NO: 5830023 - DNA, 25 bp, Homo sapien
actatgttaatgaaggtaataatta

SEQ ID NO: 5830024 - DNA, 25 bp, Homo sapien
accttcattaacatagtataaaaaa

SEQ ID NO: 5830025 - DNA, 25 bp, Homo sapien
ttttttatactatgttaatgaaggt

SEQ ID NO: 5830026 - DNA, 25 bp, Homo sapien
attaccttcattaacatagtataaa

SEQ ID NO: 5830027 - DNA, 25 bp, Homo sapien
tttatactatgttaatgaaggtaat

SEQ ID NO: 5830028 - DNA, 25 bp, Homo sapien
tgcaaaaagtagtttccacatgacg

SEQ ID NO: 5830029 - DNA, 25 bp, Homo sapien
cgtcatgtggaaactactttttgca

SEQ ID NO: 5830030 - DNA, 25 bp, Homo sapien
ggtgccagggctaccccgggaccac

SEQ ID NO: 5830031 - DNA, 25 bp, Homo sapien
gtggtcccggggtagccctggcacc

SEQ ID NO: 5830032 - DNA, 25 bp, Homo sapien
gaagacatatgttccaggtcattgt

SEQ ID NO: 5830033 - DNA, 25 bp, Homo sapien
acaatgacctggaacatatgtcttc

SEQ ID NO: 5830034 - DNA, 25 bp, Homo sapien
ctaacggacgttggtctcgttcaac

SEQ ID NO: 5830035 - DNA, 25 bp, Homo sapien
gttgaacgagaccaacgtccgttag

SEQ ID NO: 5830036 - DNA, 25 bp, Homo sapien
tactagtgacacgttgttttgttat

SEQ ID NO: 5830037 - DNA, 25 bp, Homo sapien
ataacaaaacaacgtgtcactagta

SEQ ID NO: 5830038 - DNA, 25 bp, Homo sapien
tttgtacgttcaaaagaagttggta

SEQ ID NO: 5830039 - DNA, 25 bp, Homo sapien
taccaacttcttttgaacgtacaaa

SEQ ID NO: 5830040 - DNA, 25 bp, Homo sapien
tgatcgacgggagctcactggtcgt

SEQ ID NO: 5830041 - DNA, 25 bp, Homo sapien
acgaccagtgagctcccgtcgatca

SEQ ID NO: 5830042 - DNA, 25 bp, Homo sapien
ctagacactgtttcgctttggggac

SEQ ID NO: 5830043 - DNA, 25 bp, Homo sapien
gtccccaaagcgaaacagtgtctag

SEQ ID NO: 5830044 - DNA, 25 bp, Homo sapien
atacagtagttcttattctaacaaa

SEQ ID NO: 5830045 - DNA, 25 bp, Homo sapien
tttgttagaataagaactactgtat

SEQ ID NO: 5830046 - DNA, 25 bp, Homo sapien
cgcgccgcgcaaagggcagaccggt

SEQ ID NO: 5830047 - DNA, 25 bp, Homo sapien
accggtctgccctttgcgcggcgcg

SEQ ID NO: 5830048 - DNA, 25 bp, Homo sapien
tcgggtacataaccctagaagtcag

SEQ ID NO: 5830049 - DNA, 25 bp, Homo sapien
ctgacttctagggttatgtacccga

SEQ ID NO: 5830050 - DNA, 25 bp, Homo sapien
aattcataaattactgagcagtatg

SEQ ID NO: 5830051 - DNA, 25 bp, Homo sapien
catactgctcagtaatttatgaatt

SEQ ID NO: 5830052 - DNA, 25 bp, Homo sapien
ttgttgttagtaagtcataatttaa

SEQ ID NO: 5830053 - DNA, 25 bp, Homo sapien
ttaaattatgacttactaacaacaa

SEQ ID NO: 5830054 - DNA, 25 bp, Homo sapien
tgttgttagtaagtcataatttaat

SEQ ID NO: 5830055 - DNA, 25 bp, Homo sapien
attaaattatgacttactaacaaca

SEQ ID NO: 5830056 - DNA, 25 bp, Homo sapien
acgtcaatgcaggacaggaggtagc

SEQ ID NO: 5830057 - DNA, 25 bp, Homo sapien
gctacctcctgtcctgcattgacgt

SEQ ID NO: 5830058 - DNA, 25 bp, Homo sapien
gggaatccttgcaccgacacggtaa

SEQ ID NO: 5830059 - DNA, 25 bp, Homo sapien
ttaccgtgtcggtgcaaggattccc

SEQ ID NO: 5830060 - DNA, 25 bp, Homo sapien
cacggaagcacgatgttgaccccag

SEQ ID NO: 5830061 - DNA, 25 bp, Homo sapien
ctggggtcaacatcgtgcttccgtg

SEQ ID NO: 5830062 - DNA, 25 bp, Homo sapien
gtgagagaagcccttagtcttctat

SEQ ID NO: 5830063 - DNA, 25 bp, Homo sapien
atagaagactaagggcttctctcac

SEQ ID NO: 5830064 - DNA, 25 bp, Homo sapien
acgaggctccgaacaagaggagaag

SEQ ID NO: 5830065 - DNA, 25 bp, Homo sapien
cttctcctcttgttcggagcctcgt

SEQ ID NO: 5830066 - DNA, 25 bp, Homo sapien
gtcagagaggtttgggtcctagtct

SEQ ID NO: 5830067 - DNA, 25 bp, Homo sapien
agactaggacccaaacctctctgac

SEQ ID NO: 5830068 - DNA, 25 bp, Homo sapien
cctgtcctctaagacggtgtcaaag

SEQ ID NO: 5830069 - DNA, 25 bp, Homo sapien
ctttgacaccgtcttagaggacagg

SEQ ID NO: 5830070 - DNA, 25 bp, Homo sapien
aattcatcgtgtctttggatctcct

SEQ ID NO: 5830071 - DNA, 25 bp, Homo sapien
aggagatccaaagacacgatgaatt

SEQ ID NO: 5830072 - DNA, 25 bp, Homo sapien
taaaaaaaatcacttctttagatat

SEQ ID NO: 5830073 - DNA, 25 bp, Homo sapien
atatctaaagaagtgatttttttta

SEQ ID NO: 5830074 - DNA, 25 bp, Homo sapien
ccggaggccaggtccgagcccgagg

SEQ ID NO: 5830075 - DNA, 25 bp, Homo sapien
cctcgggctcggacctggcctccgg

SEQ ID NO: 5830076 - DNA, 25 bp, Homo sapien
acgaaaaatgatttcatattcgaac

SEQ ID NO: 5830077 - DNA, 25 bp, Homo sapien
gttcgaatatgaaatcatttttcgt

SEQ ID NO: 5830078 - DNA, 25 bp, Homo sapien
accggagtctgtgggccattaccac

SEQ ID NO: 5830079 - DNA, 25 bp, Homo sapien
gtggtaatggcccacagactccggt

SEQ ID NO: 5830080 - DNA, 25 bp, Homo sapien
cagtcggtcgcgttctgtttaccga

SEQ ID NO: 5830081 - DNA, 25 bp, Homo sapien
tcggtaaacagaacgcgaccgactg

SEQ ID NO: 5830082 - DNA, 25 bp, Homo sapien
ggtagtctgtgcgtcgccggctgag

SEQ ID NO: 5830083 - DNA, 25 bp, Homo sapien
ctcagccggcgacgcacagactacc

SEQ ID NO: 5830084 - DNA, 25 bp, Homo sapien
gaaaatactccagaatatgagagtg

SEQ ID NO: 5830085 - DNA, 25 bp, Homo sapien
cactctcatattctggagtattttc

SEQ ID NO: 5830086 - DNA, 25 bp, Homo sapien
agtttaatatgttaccgtttatgag

SEQ ID NO: 5830087 - DNA, 25 bp, Homo sapien
ctcataaacggtaacatattaaact

SEQ ID NO: 5830088 - DNA, 25 bp, Homo sapien
tccacgagctatttgtgtataacgt

SEQ ID NO: 5830089 - DNA, 25 bp, Homo sapien
acgttatacacaaatagctcgtgga

SEQ ID NO: 5830090 - DNA, 25 bp, Homo sapien
ctgctaacagagcagccgaccgtgg

SEQ ID NO: 5830091 - DNA, 25 bp, Homo sapien
ccacggtcggctgctctgttagcag

SEQ ID NO: 5830092 - DNA, 25 bp, Homo sapien
aacagagcagccgaccgtgggtgtc

SEQ ID NO: 5830093 - DNA, 25 bp, Homo sapien
gacacccacggtcggctgctctgtt

SEQ ID NO: 5830094 - DNA, 25 bp, Homo sapien
actcccgccgagaaactaagaggtc

SEQ ID NO: 5830095 - DNA, 25 bp, Homo sapien
gacctcttagtttctcggcgggagt

SEQ ID NO: 5830096 - DNA, 25 bp, Homo sapien
gcagaaggcaatgtcagaattatat

SEQ ID NO: 5830097 - DNA, 25 bp, Homo sapien
atataattctgacattgccttctgc

SEQ ID NO: 5830098 - DNA, 25 bp, Homo sapien
ctataaactgaaacgatttacgtcg

SEQ ID NO: 5830099 - DNA, 25 bp, Homo sapien
cgacgtaaatcgtttcagtttatag

SEQ ID NO: 5830100 - DNA, 25 bp, Homo sapien
tcggtacctgccatagactcctagc

SEQ ID NO: 5830101 - DNA, 25 bp, Homo sapien
gctaggagtctatggcaggtaccga

SEQ ID NO: 5830102 - DNA, 25 bp, Homo sapien
gggctccccgctcctctcctcctcc

SEQ ID NO: 5830103 - DNA, 25 bp, Homo sapien
ggaggaggagaggagcggggagccc

SEQ ID NO: 5830104 - DNA, 25 bp, Homo sapien
gggtgcacggggagcgcgagtgtcg

SEQ ID NO: 5830105 - DNA, 25 bp, Homo sapien
cgacactcgcgctccccgtgcaccc

SEQ ID NO: 5830106 - DNA, 25 bp, Homo sapien
ccctcggcgtctctccgcgtcccct

SEQ ID NO: 5830107 - DNA, 25 bp, Homo sapien
aggggacgcggagagacgccgaggg

SEQ ID NO: 5830108 - DNA, 25 bp, Homo sapien
agttagtgacaaggcctaaagtagg

SEQ ID NO: 5830109 - DNA, 25 bp, Homo sapien
cctactttaggccttgtcactaact

SEQ ID NO: 5830110 - DNA, 25 bp, Homo sapien
tgtaatagaaaacttattttgtatc

SEQ ID NO: 5830111 - DNA, 25 bp, Homo sapien
gatacaaaataagttttctattaca

SEQ ID NO: 5830112 - DNA, 25 bp, Homo sapien
acattagtcgtccatcggttttacc

SEQ ID NO: 5830113 - DNA, 25 bp, Homo sapien
ggtaaaaccgatggacgactaatgt

SEQ ID NO: 5830114 - DNA, 25 bp, Homo sapien
atagtgatactatattttcaaatga

SEQ ID NO: 5830115 - DNA, 25 bp, Homo sapien
tcatttgaaaatatagtatcactat

SEQ ID NO: 5830116 - DNA, 25 bp, Homo sapien
aatagtgatactatattttcaaatg

SEQ ID NO: 5830117 - DNA, 25 bp, Homo sapien
catttgaaaatatagtatcactatt

SEQ ID NO: 5830118 - DNA, 25 bp, Homo sapien
gaaatagtgatactatattttcaaa

SEQ ID NO: 5830119 - DNA, 25 bp, Homo sapien
tttgaaaatatagtatcactatttc

SEQ ID NO: 5830120 - DNA, 25 bp, Homo sapien
tcagactttcggataaaaaatcaag

SEQ ID NO: 5830121 - DNA, 25 bp, Homo sapien
cttgattttttatccgaaagtctga

SEQ ID NO: 5830122 - DNA, 25 bp, Homo sapien
aacaattaacgagtaggaatgaatt

SEQ ID NO: 5830123 - DNA, 25 bp, Homo sapien
aattcattcctactcgttaattgtt

SEQ ID NO: 5830124 - DNA, 25 bp, Homo sapien
ctcggagctcgcccgcccggggtcg

SEQ ID NO: 5830125 - DNA, 25 bp, Homo sapien
cgaccccgggcgggcgagctccgag

SEQ ID NO: 5830126 - DNA, 25 bp, Homo sapien
gctcggagctcgcccgcccggggtc

SEQ ID NO: 5830127 - DNA, 25 bp, Homo sapien
gaccccgggcgggcgagctccgagc

SEQ ID NO: 5830128 - DNA, 25 bp, Homo sapien
tcgctcggagctcgcccgcccgggg

SEQ ID NO: 5830129 - DNA, 25 bp, Homo sapien
ccccgggcgggcgagctccgagcga

SEQ ID NO: 5830130 - DNA, 25 bp, Homo sapien
ctccctcgctcggagctcgcccgcc

SEQ ID NO: 5830131 - DNA, 25 bp, Homo sapien
ggcgggcgagctccgagcgagggag

SEQ ID NO: 5830132 - DNA, 25 bp, Homo sapien
cattgacaaccctgtaggtcctggg

SEQ ID NO: 5830133 - DNA, 25 bp, Homo sapien
cccaggacctacagggttgtcaatg

SEQ ID NO: 5830134 - DNA, 25 bp, Homo sapien
gaacgtataagaaagtcatcttggt

SEQ ID NO: 5830135 - DNA, 25 bp, Homo sapien
accaagatgactttcttatacgttc

SEQ ID NO: 5830136 - DNA, 25 bp, Homo sapien
tctctagggtcccacgacgcctcga

SEQ ID NO: 5830137 - DNA, 25 bp, Homo sapien
tcgaggcgtcgtgggaccctagaga

SEQ ID NO: 5830138 - DNA, 25 bp, Homo sapien
acctttaaaagtatctagaattatc

SEQ ID NO: 5830139 - DNA, 25 bp, Homo sapien
gataattctagatacttttaaaggt

SEQ ID NO: 5830140 - DNA, 25 bp, Homo sapien
ataacgagtactaactgtggttctc

SEQ ID NO: 5830141 - DNA, 25 bp, Homo sapien
gagaaccacagttagtactcgttat

SEQ ID NO: 5830142 - DNA, 25 bp, Homo sapien
tgagacccgcatccagacagtggtg

SEQ ID NO: 5830143 - DNA, 25 bp, Homo sapien
caccactgtctggatgcgggtctca

SEQ ID NO: 5830144 - DNA, 25 bp, Homo sapien
agccacgtattaacaagcagcgttt

SEQ ID NO: 5830145 - DNA, 25 bp, Homo sapien
aaacgctgcttgttaatacgtggct

SEQ ID NO: 5830146 - DNA, 25 bp, Homo sapien
gtcaagatgccccgagaggtctcgg

SEQ ID NO: 5830147 - DNA, 25 bp, Homo sapien
ccgagacctctcggggcatcttgac

SEQ ID NO: 5830148 - DNA, 25 bp, Homo sapien
gtagaaaataacctaggactaataa

SEQ ID NO: 5830149 - DNA, 25 bp, Homo sapien
ttattagtcctaggttattttctac

SEQ ID NO: 5830150 - DNA, 25 bp, Homo sapien
ttgtagaaaataacctaggactaat

SEQ ID NO: 5830151 - DNA, 25 bp, Homo sapien
attagtcctaggttattttctacaa

SEQ ID NO: 5830152 - DNA, 25 bp, Homo sapien
tcggccgaacacgtgccgcgggctt

SEQ ID NO: 5830153 - DNA, 25 bp, Homo sapien
aagcccgcggcacgtgttcggccga

SEQ ID NO: 5830154 - DNA, 25 bp, Homo sapien
ctatatctaagtcctaacccccaaa

SEQ ID NO: 5830155 - DNA, 25 bp, Homo sapien
tttgggggttaggacttagatatag

SEQ ID NO: 5830156 - DNA, 25 bp, Homo sapien
tttacattcatttcgaacctaagat

SEQ ID NO: 5830157 - DNA, 25 bp, Homo sapien
atcttaggttcgaaatgaatgtaaa

SEQ ID NO: 5830158 - DNA, 25 bp, Homo sapien
gaaccataaagagaagacccaatga

SEQ ID NO: 5830159 - DNA, 25 bp, Homo sapien
tcattgggtcttctctttatggttc

SEQ ID NO: 5830160 - DNA, 25 bp, Homo sapien
gggaaccataaagagaagacccaat

SEQ ID NO: 5830161 - DNA, 25 bp, Homo sapien
attgggtcttctctttatggttccc

SEQ ID NO: 5830162 - DNA, 25 bp, Homo sapien
gacagcagggtgacggtgccctcgt

SEQ ID NO: 5830163 - DNA, 25 bp, Homo sapien
acgagggcaccgtcaccctgctgtc

SEQ ID NO: 5830164 - DNA, 25 bp, Homo sapien
tagtagtcgtctaccttcggtgtcc

SEQ ID NO: 5830165 - DNA, 25 bp, Homo sapien
ggacaccgaaggtagacgactacta

SEQ ID NO: 5830166 - DNA, 25 bp, Homo sapien
tggagtgagacacccctggactgaa

SEQ ID NO: 5830167 - DNA, 25 bp, Homo sapien
ttcagtccaggggtgtctcactcca

SEQ ID NO: 5830168 - DNA, 25 bp, Homo sapien
caagaagatttttgtagtaaacgct

SEQ ID NO: 5830169 - DNA, 25 bp, Homo sapien
agcgtttactacaaaaatcttcttg

SEQ ID NO: 5830170 - DNA, 25 bp, Homo sapien
actcgacacggaacgtcggtcgacg

SEQ ID NO: 5830171 - DNA, 25 bp, Homo sapien
cgtcgaccgacgttccgtgtcgagt

SEQ ID NO: 5830172 - DNA, 25 bp, Homo sapien
caccgtggactggtgcacgacgggt

SEQ ID NO: 5830173 - DNA, 25 bp, Homo sapien
acccgtcgtgcaccagtccacggtg

SEQ ID NO: 5830174 - DNA, 25 bp, Homo sapien
cgtcagggcatctcccgatacttgt

SEQ ID NO: 5830175 - DNA, 25 bp, Homo sapien
acaagtatcgggagatgccctgacg

SEQ ID NO: 5830176 - DNA, 25 bp, Homo sapien
tggatgactctcaagtaatgtaagt

SEQ ID NO: 5830177 - DNA, 25 bp, Homo sapien
acttacattacttgagagtcatcca

SEQ ID NO: 5830178 - DNA, 25 bp, Homo sapien
ttgtgccacctcccgtacacgagga

SEQ ID NO: 5830179 - DNA, 25 bp, Homo sapien
tcctcgtgtacgggaggtggcacaa

SEQ ID NO: 5830180 - DNA, 25 bp, Homo sapien
tcattgttatcctattccttataat

SEQ ID NO: 5830181 - DNA, 25 bp, Homo sapien
attataaggaataggataacaatga

SEQ ID NO: 5830182 - DNA, 25 bp, Homo sapien
gtaatcattgttatcctattcctta

SEQ ID NO: 5830183 - DNA, 25 bp, Homo sapien
taaggaataggataacaatgattac

SEQ ID NO: 5830184 - DNA, 25 bp, Homo sapien
gggctcttgcggaggtcgcccctac

SEQ ID NO: 5830185 - DNA, 25 bp, Homo sapien
gtaggggcgacctccgcaagagccc

SEQ ID NO: 5830186 - DNA, 25 bp, Homo sapien
gaagtaaatccgttcttgataaaaa

SEQ ID NO: 5830187 - DNA, 25 bp, Homo sapien
tttttatcaagaacggatttacttc

SEQ ID NO: 5830188 - DNA, 25 bp, Homo sapien
tcggagaagcaacccaactccttcg

SEQ ID NO: 5830189 - DNA, 25 bp, Homo sapien
cgaaggagttgggttgcttctccga

SEQ ID NO: 5830190 - DNA, 25 bp, Homo sapien
ggggagcacgtgcgcccaccacctc

SEQ ID NO: 5830191 - DNA, 25 bp, Homo sapien
gaggtggtgggcgcacgtgctcccc

SEQ ID NO: 5830192 - DNA, 25 bp, Homo sapien
cggggagcacgtgcgcccaccacct

SEQ ID NO: 5830193 - DNA, 25 bp, Homo sapien
aggtggtgggcgcacgtgctccccg

SEQ ID NO: 5830194 - DNA, 25 bp, Homo sapien
ggttaattgagagtgaaacctcaac

SEQ ID NO: 5830195 - DNA, 25 bp, Homo sapien
gttgaggtttcactctcaattaacc

SEQ ID NO: 5830196 - DNA, 25 bp, Homo sapien
ggtatgagaaacgaagttggaagag

SEQ ID NO: 5830197 - DNA, 25 bp, Homo sapien
ctcttccaacttcgtttctcatacc

SEQ ID NO: 5830198 - DNA, 25 bp, Homo sapien
tgtccagactactatcgggactccg

SEQ ID NO: 5830199 - DNA, 25 bp, Homo sapien
cggagtcccgatagtagtctggaca

SEQ ID NO: 5830200 - DNA, 25 bp, Homo sapien
atttcgatcgataaaatcttatatt

SEQ ID NO: 5830201 - DNA, 25 bp, Homo sapien
aatataagattttatcgatcgaaat

SEQ ID NO: 5830202 - DNA, 25 bp, Homo sapien
gggtccgcccaaggcgctccccgag

SEQ ID NO: 5830203 - DNA, 25 bp, Homo sapien
ctcggggagcgccttgggcggaccc

SEQ ID NO: 5830204 - DNA, 25 bp, Homo sapien
tggagtagggcgacagggcccggcc

SEQ ID NO: 5830205 - DNA, 25 bp, Homo sapien
ggccgggccctgtcgccctactcca

SEQ ID NO: 5830206 - DNA, 25 bp, Homo sapien
ggcccggccgggcgcagaggtccgc

SEQ ID NO: 5830207 - DNA, 25 bp, Homo sapien
gcggacctctgcgcccggccgggcc

SEQ ID NO: 5830208 - DNA, 25 bp, Homo sapien
atttcacacaaatcgacgtgtccag

SEQ ID NO: 5830209 - DNA, 25 bp, Homo sapien
ctggacacgtcgatttgtgtgaaat

SEQ ID NO: 5830210 - DNA, 25 bp, Homo sapien
ggccggcagggcatctgagaggcgc

SEQ ID NO: 5830211 - DNA, 25 bp, Homo sapien
gcgcctctcagatgccctgccggcc

SEQ ID NO: 5830212 - DNA, 25 bp, Homo sapien
tatacgtacttaagcactaaaccct

SEQ ID NO: 5830213 - DNA, 25 bp, Homo sapien
agggtttagtgcttaagtacgtata

SEQ ID NO: 5830214 - DNA, 25 bp, Homo sapien
gtggtcgcgtagtaacgaaacccga

SEQ ID NO: 5830215 - DNA, 25 bp, Homo sapien
tcgggtttcgttactacgcgaccac

SEQ ID NO: 5830216 - DNA, 25 bp, Homo sapien
ttcaccaaggtttcatgttctagag

SEQ ID NO: 5830217 - DNA, 25 bp, Homo sapien
ctctagaacatgaaaccttggtgaa

SEQ ID NO: 5830218 - DNA, 25 bp, Homo sapien
tacagagaaagatgatctctaaact

SEQ ID NO: 5830219 - DNA, 25 bp, Homo sapien
agtttagagatcatctttctctgta

SEQ ID NO: 5830220 - DNA, 25 bp, Homo sapien
gacgccgccggcctcactggggcgg

SEQ ID NO: 5830221 - DNA, 25 bp, Homo sapien
ccgccccagtgaggccggcggcgtc

SEQ ID NO: 5830222 - DNA, 25 bp, Homo sapien
gagaactaccgaaaatgcggttatt

SEQ ID NO: 5830223 - DNA, 25 bp, Homo sapien
aataaccgcattttcggtagttctc

SEQ ID NO: 5830224 - DNA, 25 bp, Homo sapien
tgccaagtccgtcgcaggcgtccta

SEQ ID NO: 5830225 - DNA, 25 bp, Homo sapien
taggacgcctgcgacggacttggca

SEQ ID NO: 5830226 - DNA, 25 bp, Homo sapien
ctgccaagtccgtcgcaggcgtcct

SEQ ID NO: 5830227 - DNA, 25 bp, Homo sapien
aggacgcctgcgacggacttggcag

SEQ ID NO: 5830228 - DNA, 25 bp, Homo sapien
tcaacccacaaagccctctctcgtt

SEQ ID NO: 5830229 - DNA, 25 bp, Homo sapien
aacgagagagggctttgtgggttga

SEQ ID NO: 5830230 - DNA, 25 bp, Homo sapien
tcacgcgccggagccacccgggcgt

SEQ ID NO: 5830231 - DNA, 25 bp, Homo sapien
acgcccgggtggctccggcgcgtga

SEQ ID NO: 5830232 - DNA, 25 bp, Homo sapien
cccgcccgggtcacgcgccggagcc

SEQ ID NO: 5830233 - DNA, 25 bp, Homo sapien
ggctccggcgcgtgacccgggcggg

SEQ ID NO: 5830234 - DNA, 25 bp, Homo sapien
cgccccgcccgggtcacgcgccgga

SEQ ID NO: 5830235 - DNA, 25 bp, Homo sapien
tccggcgcgtgacccgggcggggcg

SEQ ID NO: 5830236 - DNA, 25 bp, Homo sapien
cacctcctccctctcaccgacccga

SEQ ID NO: 5830237 - DNA, 25 bp, Homo sapien
tcgggtcggtgagagggaggaggtg

SEQ ID NO: 5830238 - DNA, 25 bp, Homo sapien
gaagtattgtaagtagtctaatagt

SEQ ID NO: 5830239 - DNA, 25 bp, Homo sapien
actattagactacttacaatacttc

SEQ ID NO: 5830240 - DNA, 25 bp, Homo sapien
gtccggtgtcggtcgccacgacggg

SEQ ID NO: 5830241 - DNA, 25 bp, Homo sapien
cccgtcgtggcgaccgacaccggac

SEQ ID NO: 5830242 - DNA, 25 bp, Homo sapien
gggagccgcctgctgctggtgccgc

SEQ ID NO: 5830243 - DNA, 25 bp, Homo sapien
gcggcaccagcagcaggcggctccc

SEQ ID NO: 5830244 - DNA, 25 bp, Homo sapien
gaggggagccgcctgctgctggtgc

SEQ ID NO: 5830245 - DNA, 25 bp, Homo sapien
gcaccagcagcaggcggctcccctc

SEQ ID NO: 5830246 - DNA, 25 bp, Homo sapien
ttccggtgtaaatattgactgtaat

SEQ ID NO: 5830247 - DNA, 25 bp, Homo sapien
attacagtcaatatttacaccggaa

SEQ ID NO: 5830248 - DNA, 25 bp, Homo sapien
taggtagtctcatacccttaatccc

SEQ ID NO: 5830249 - DNA, 25 bp, Homo sapien
gggattaagggtatgagactaccta

SEQ ID NO: 5830250 - DNA, 25 bp, Homo sapien
agtatgtccggcagacgccagactg

SEQ ID NO: 5830251 - DNA, 25 bp, Homo sapien
cagtctggcgtctgccggacatact

SEQ ID NO: 5830252 - DNA, 25 bp, Homo sapien
ttgtatgcaggtatacttaaatcat

SEQ ID NO: 5830253 - DNA, 25 bp, Homo sapien
atgatttaagtatacctgcatacaa

SEQ ID NO: 5830254 - DNA, 25 bp, Homo sapien
gacaccacctgtgtccgaaaataag

SEQ ID NO: 5830255 - DNA, 25 bp, Homo sapien
cttattttcggacacaggtggtgtc

SEQ ID NO: 5830256 - DNA, 25 bp, Homo sapien
ccgttaaagtctcagtccatcccgt

SEQ ID NO: 5830257 - DNA, 25 bp, Homo sapien
acgggatggactgagactttaacgg

SEQ ID NO: 5830258 - DNA, 25 bp, Homo sapien
ctttctataaacgcttttagtagta

SEQ ID NO: 5830259 - DNA, 25 bp, Homo sapien
tactactaaaagcgtttatagaaag

SEQ ID NO: 5830260 - DNA, 25 bp, Homo sapien
cggaccggtgtggactctcgcacgt

SEQ ID NO: 5830261 - DNA, 25 bp, Homo sapien
acgtgcgagagtccacaccggtccg

SEQ ID NO: 5830262 - DNA, 25 bp, Homo sapien
cagtagtctaaacagttattcgtca

SEQ ID NO: 5830263 - DNA, 25 bp, Homo sapien
tgacgaataactgtttagactactg

SEQ ID NO: 5830264 - DNA, 25 bp, Homo sapien
tacagtaacctttaggttttctatg

SEQ ID NO: 5830265 - DNA, 25 bp, Homo sapien
catagaaaacctaaaggttactgta

SEQ ID NO: 5830266 - DNA, 25 bp, Homo sapien
tccgcgcagggagaccgcgacctcg

SEQ ID NO: 5830267 - DNA, 25 bp, Homo sapien
cgaggtcgcggtctccctgcgcgga

SEQ ID NO: 5830268 - DNA, 25 bp, Homo sapien
gggtgtcaaaaggtatcgatctcgt

SEQ ID NO: 5830269 - DNA, 25 bp, Homo sapien
acgagatcgataccttttgacaccc

SEQ ID NO: 5830270 - DNA, 25 bp, Homo sapien
caggcacgattatcgtagtagatat

SEQ ID NO: 5830271 - DNA, 25 bp, Homo sapien
atatctactacgataatcgtgcctg

SEQ ID NO: 5830272 - DNA, 25 bp, Homo sapien
gcaaagacgaaataacggttgacag

SEQ ID NO: 5830273 - DNA, 25 bp, Homo sapien
ctgtcaaccgttatttcgtctttgc

SEQ ID NO: 5830274 - DNA, 25 bp, Homo sapien
cccttgaggaggacgcggtccctgt

SEQ ID NO: 5830275 - DNA, 25 bp, Homo sapien
acagggaccgcgtcctcctcaaggg

SEQ ID NO: 5830276 - DNA, 25 bp, Homo sapien
ccgaggccgggctggctcgccgtcg

SEQ ID NO: 5830277 - DNA, 25 bp, Homo sapien
cgacggcgagccagcccggcctcgg

SEQ ID NO: 5830278 - DNA, 25 bp, Homo sapien
gccgggctggctcgccgtcgacgag

SEQ ID NO: 5830279 - DNA, 25 bp, Homo sapien
ctcgtcgacggcgagccagcccggc

SEQ ID NO: 5830280 - DNA, 25 bp, Homo sapien
cgaggccgggctggctcgccgtcga

SEQ ID NO: 5830281 - DNA, 25 bp, Homo sapien
tcgacggcgagccagcccggcctcg

SEQ ID NO: 5830282 - DNA, 25 bp, Homo sapien
gtagtcagtggcaccaattgttccg

SEQ ID NO: 5830283 - DNA, 25 bp, Homo sapien
cggaacaattggtgccactgactac

SEQ ID NO: 5830284 - DNA, 25 bp, Homo sapien
tgagacggttaggacccggaccact

SEQ ID NO: 5830285 - DNA, 25 bp, Homo sapien
agtggtccgggtcctaaccgtctca

SEQ ID NO: 5830286 - DNA, 25 bp, Homo sapien
caggtttatttgttattcttattcg

SEQ ID NO: 5830287 - DNA, 25 bp, Homo sapien
cgaataagaataacaaataaacctg

SEQ ID NO: 5830288 - DNA, 25 bp, Homo sapien
aatataaataagagtctaaccgtag

SEQ ID NO: 5830289 - DNA, 25 bp, Homo sapien
ctacggttagactcttatttatatt

SEQ ID NO: 5830290 - DNA, 25 bp, Homo sapien
ggagtgtgatctcgacagcgggaaa

SEQ ID NO: 5830291 - DNA, 25 bp, Homo sapien
tttcccgctgtcgagatcacactcc

SEQ ID NO: 5830292 - DNA, 25 bp, Homo sapien
ccaaaaaccaggatccgtgtaagtc

SEQ ID NO: 5830293 - DNA, 25 bp, Homo sapien
gacttacacggatcctggtttttgg

SEQ ID NO: 5830294 - DNA, 25 bp, Homo sapien
tcttttagagaggttacatagagag

SEQ ID NO: 5830295 - DNA, 25 bp, Homo sapien
ctctctatgtaacctctctaaaaga

SEQ ID NO: 5830296 - DNA, 25 bp, Homo sapien
gggttccccagcaccgaggcgacga

SEQ ID NO: 5830297 - DNA, 25 bp, Homo sapien
tcgtcgcctcggtgctggggaaccc

SEQ ID NO: 5830298 - DNA, 25 bp, Homo sapien
aggtcgtgagcgcgccacggaggct

SEQ ID NO: 5830299 - DNA, 25 bp, Homo sapien
agcctccgtggcgcgctcacgacct

SEQ ID NO: 5830300 - DNA, 25 bp, Homo sapien
atcgtggtaagaagttggaaaagta

SEQ ID NO: 5830301 - DNA, 25 bp, Homo sapien
tacttttccaacttcttaccacgat

SEQ ID NO: 5830302 - DNA, 25 bp, Homo sapien
taatcgtaaaagtttgaggtgtact

SEQ ID NO: 5830303 - DNA, 25 bp, Homo sapien
agtacacctcaaacttttacgatta

SEQ ID NO: 5830304 - DNA, 25 bp, Homo sapien
taacggacttgataaagatcgaggg

SEQ ID NO: 5830305 - DNA, 25 bp, Homo sapien
ccctcgatctttatcaagtccgtta

SEQ ID NO: 5830306 - DNA, 25 bp, Homo sapien
tctaagacggtacctgcgtcaacgg

SEQ ID NO: 5830307 - DNA, 25 bp, Homo sapien
ccgttgacgcaggtaccgtcttaga

SEQ ID NO: 5830308 - DNA, 25 bp, Homo sapien
gactctatggcggtcccgtcggcgt

SEQ ID NO: 5830309 - DNA, 25 bp, Homo sapien
acgccgacgggaccgccatagagtc

SEQ ID NO: 5830310 - DNA, 25 bp, Homo sapien
tattgtagtacagtttattatagta

SEQ ID NO: 5830311 - DNA, 25 bp, Homo sapien
tactataataaactgtactacaata

SEQ ID NO: 5830312 - DNA, 25 bp, Homo sapien
ttattgtagtacagtttattatagt

SEQ ID NO: 5830313 - DNA, 25 bp, Homo sapien
actataataaactgtactacaataa

SEQ ID NO: 5830314 - DNA, 25 bp, Homo sapien
tggttttattgtagtacagtttatt

SEQ ID NO: 5830315 - DNA, 25 bp, Homo sapien
aataaactgtactacaataaaacca

SEQ ID NO: 5830316 - DNA, 25 bp, Homo sapien
ttggttttattgtagtacagtttat

SEQ ID NO: 5830317 - DNA, 25 bp, Homo sapien
ataaactgtactacaataaaaccaa

SEQ ID NO: 5830318 - DNA, 25 bp, Homo sapien
agtggtacggccgtccaaggatatc

SEQ ID NO: 5830319 - DNA, 25 bp, Homo sapien
gatatccttggacggccgtaccact

SEQ ID NO: 5830320 - DNA, 25 bp, Homo sapien
taagatagttatactcgggttttcg

SEQ ID NO: 5830321 - DNA, 25 bp, Homo sapien
cgaaaacccgagtataactatctta

SEQ ID NO: 5830322 - DNA, 25 bp, Homo sapien
gcgggcggtcggacagggcgcggta

SEQ ID NO: 5830323 - DNA, 25 bp, Homo sapien
taccgcgccctgtccgaccgcccgc

SEQ ID NO: 5830324 - DNA, 25 bp, Homo sapien
gccgcgggcggtcggacagggcgcg

SEQ ID NO: 5830325 - DNA, 25 bp, Homo sapien
cgcgccctgtccgaccgcccgcggc

SEQ ID NO: 5830326 - DNA, 25 bp, Homo sapien
catattactaggacccaccaactgt

SEQ ID NO: 5830327 - DNA, 25 bp, Homo sapien
acagttggtgggtcctagtaatatg

SEQ ID NO: 5830328 - DNA, 25 bp, Homo sapien
aacactcgtcgttcgggagcgggta

SEQ ID NO: 5830329 - DNA, 25 bp, Homo sapien
tacccgctcccgaacgacgagtgtt

SEQ ID NO: 5830330 - DNA, 25 bp, Homo sapien
gtactgacttttagggcacgaaacg

SEQ ID NO: 5830331 - DNA, 25 bp, Homo sapien
cgtttcgtgccctaaaagtcagtac

SEQ ID NO: 5830332 - DNA, 25 bp, Homo sapien
tgtcctgtctcatacccgactcggc

SEQ ID NO: 5830333 - DNA, 25 bp, Homo sapien
gccgagtcgggtatgagacaggaca

SEQ ID NO: 5830334 - DNA, 25 bp, Homo sapien
tattggttttgttaacacacttact

SEQ ID NO: 5830335 - DNA, 25 bp, Homo sapien
agtaagtgtgttaacaaaaccaata

SEQ ID NO: 5830336 - DNA, 25 bp, Homo sapien
atttcttcaagttacaatcgccacg

SEQ ID NO: 5830337 - DNA, 25 bp, Homo sapien
cgtggcgattgtaacttgaagaaat

SEQ ID NO: 5830338 - DNA, 25 bp, Homo sapien
cggagtccacaagcgatggacttag

SEQ ID NO: 5830339 - DNA, 25 bp, Homo sapien
ctaagtccatcgcttgtggactccg

SEQ ID NO: 5830340 - DNA, 25 bp, Homo sapien
agtcacggacatcttttgagtttac

SEQ ID NO: 5830341 - DNA, 25 bp, Homo sapien
gtaaactcaaaagatgtccgtgact

SEQ ID NO: 5830342 - DNA, 25 bp, Homo sapien
atcgacaaccgaacgccaatatttc

SEQ ID NO: 5830343 - DNA, 25 bp, Homo sapien
gaaatattggcgttcggttgtcgat

SEQ ID NO: 5830344 - DNA, 25 bp, Homo sapien
ttcccgtttcacttccaggtctggt

SEQ ID NO: 5830345 - DNA, 25 bp, Homo sapien
accagacctggaagtgaaacgggaa

SEQ ID NO: 5830346 - DNA, 25 bp, Homo sapien
cctgggacctgtgctacgggtttcc

SEQ ID NO: 5830347 - DNA, 25 bp, Homo sapien
ggaaacccgtagcacaggtcccagg

SEQ ID NO: 5830348 - DNA, 25 bp, Homo sapien
gtagaagttattttacatgacagac

SEQ ID NO: 5830349 - DNA, 25 bp, Homo sapien
gtctgtcatgtaaaataacttctac

SEQ ID NO: 5830350 - DNA, 25 bp, Homo sapien
ggcgtcccgagggagggagcggagg

SEQ ID NO: 5830351 - DNA, 25 bp, Homo sapien
cctccgctccctccctcgggacgcc

SEQ ID NO: 5830352 - DNA, 25 bp, Homo sapien
gcccggcgtcccgagggagggagcg

SEQ ID NO: 5830353 - DNA, 25 bp, Homo sapien
cgctccctccctcgggacgccgggc

SEQ ID NO: 5830354 - DNA, 25 bp, Homo sapien
tcgtcgcgcccggcgtcccgaggga

SEQ ID NO: 5830355 - DNA, 25 bp, Homo sapien
tccctcgggacgccgggcgcgacga

SEQ ID NO: 5830356 - DNA, 25 bp, Homo sapien
atattctcctaccaatttattatac

SEQ ID NO: 5830357 - DNA, 25 bp, Homo sapien
gtataataaattggtaggagaatat

SEQ ID NO: 5830358 - DNA, 25 bp, Homo sapien
acactaaaccggcacgacattatgt

SEQ ID NO: 5830359 - DNA, 25 bp, Homo sapien
acataatgtcgtgccggtttagtgt

SEQ ID NO: 5830360 - DNA, 25 bp, Homo sapien
gacacacagcccccctccctgtggt

SEQ ID NO: 5830361 - DNA, 25 bp, Homo sapien
accacagggaggggggctgtgtgtc

SEQ ID NO: 5830362 - DNA, 25 bp, Homo sapien
tctgcctccgagcttccctcggggc

SEQ ID NO: 5830363 - DNA, 25 bp, Homo sapien
gccccgagggaagctcggaggcaga

SEQ ID NO: 5830364 - DNA, 25 bp, Homo sapien
cctctgcctccgagcttccctcggg

SEQ ID NO: 5830365 - DNA, 25 bp, Homo sapien
cccgagggaagctcggaggcagagg

SEQ ID NO: 5830366 - DNA, 25 bp, Homo sapien
attttgcttgtcttggacttcgtcc

SEQ ID NO: 5830367 - DNA, 25 bp, Homo sapien
ggacgaagtccaagacaagcaaaat

SEQ ID NO: 5830368 - DNA, 25 bp, Homo sapien
tacttcgtgagacacgagaacttca

SEQ ID NO: 5830369 - DNA, 25 bp, Homo sapien
tgaagttctcgtgtctcacgaagta

SEQ ID NO: 5830370 - DNA, 25 bp, Homo sapien
ccctgccctccgcaccgcggcggta

SEQ ID NO: 5830371 - DNA, 25 bp, Homo sapien
taccgccgcggtgcggagggcaggg

SEQ ID NO: 5830372 - DNA, 25 bp, Homo sapien
cccctgccctccgcaccgcggcggt

SEQ ID NO: 5830373 - DNA, 25 bp, Homo sapien
accgccgcggtgcggagggcagggg

SEQ ID NO: 5830374 - DNA, 25 bp, Homo sapien
tcaaaccctcagtatacagaaatct

SEQ ID NO: 5830375 - DNA, 25 bp, Homo sapien
agatttctgtatactgagggtttga

SEQ ID NO: 5830376 - DNA, 25 bp, Homo sapien
agaacagaagtggacctattggact

SEQ ID NO: 5830377 - DNA, 25 bp, Homo sapien
agtccaataggtccacttctgttct

SEQ ID NO: 5830378 - DNA, 25 bp, Homo sapien
gttgtccataacaaacacctaaaag

SEQ ID NO: 5830379 - DNA, 25 bp, Homo sapien
cttttaggtgtttgttatggacaac

SEQ ID NO: 5830380 - DNA, 25 bp, Homo sapien
actcgaagaaccgatcaaagactga

SEQ ID NO: 5830381 - DNA, 25 bp, Homo sapien
tcagtctttgatcggttcttcgagt

SEQ ID NO: 5830382 - DNA, 25 bp, Homo sapien
gcccctcgggtcctctgggtctggg

SEQ ID NO: 5830383 - DNA, 25 bp, Homo sapien
cccagacccagaggacccgaggggc

SEQ ID NO: 5830384 - DNA, 25 bp, Homo sapien
cgtatgacttactgattcttttaca

SEQ ID NO: 5830385 - DNA, 25 bp, Homo sapien
tgtaaaagaatcagtaagtcatacg

SEQ ID NO: 5830386 - DNA, 25 bp, Homo sapien
cacgaccccagcacgcggaccgccc

SEQ ID NO: 5830387 - DNA, 25 bp, Homo sapien
gggcggtccgcgtgctggggtcgtg

SEQ ID NO: 5830388 - DNA, 25 bp, Homo sapien
ccggtgcgctcgactgaaaactccg

SEQ ID NO: 5830389 - DNA, 25 bp, Homo sapien
cggagttttcagtcgagcgcaccgg

SEQ ID NO: 5830390 - DNA, 25 bp, Homo sapien
aagtcaccggggctgttcgggtcgc

SEQ ID NO: 5830391 - DNA, 25 bp, Homo sapien
gcgacccgaacagccccggtgactt

SEQ ID NO: 5830392 - DNA, 25 bp, Homo sapien
tccccgactgtaggctgagacacag

SEQ ID NO: 5830393 - DNA, 25 bp, Homo sapien
ctgtgtctcagcctacagtcgggga

SEQ ID NO: 5830394 - DNA, 25 bp, Homo sapien
ataacttatgtttgaggaatccgtc

SEQ ID NO: 5830395 - DNA, 25 bp, Homo sapien
gacggattcctcaaacataagttat

SEQ ID NO: 5830396 - DNA, 25 bp, Homo sapien
aaataacttatgtttgaggaatccg

SEQ ID NO: 5830397 - DNA, 25 bp, Homo sapien
cggattcctcaaacataagttattt

SEQ ID NO: 5830398 - DNA, 25 bp, Homo sapien
cactagtttatacaattaggaagga

SEQ ID NO: 5830399 - DNA, 25 bp, Homo sapien
tccttcctaattgtataaactagtg

SEQ ID NO: 5830400 - DNA, 25 bp, Homo sapien
agacggacaaactgtgagctagacc

SEQ ID NO: 5830401 - DNA, 25 bp, Homo sapien
ggtctagctcacagtttgtccgtct

SEQ ID NO: 5830402 - DNA, 25 bp, Homo sapien
gaaaagtatctccttcgttaagact

SEQ ID NO: 5830403 - DNA, 25 bp, Homo sapien
agtcttaacgaaggagatacttttc

SEQ ID NO: 5830404 - DNA, 25 bp, Homo sapien
caaatttcacttcgcgtttagggta

SEQ ID NO: 5830405 - DNA, 25 bp, Homo sapien
taccctaaacgcgaagtgaaatttg

SEQ ID NO: 5830406 - DNA, 25 bp, Homo sapien
tttctttataaatgtcatcgagact

SEQ ID NO: 5830407 - DNA, 25 bp, Homo sapien
agtctcgatgacatttataaagaaa

SEQ ID NO: 5830408 - DNA, 25 bp, Homo sapien
cgtcaagggccctcctggactcgac

SEQ ID NO: 5830409 - DNA, 25 bp, Homo sapien
gtcgagtccaggagggcccttgacg

SEQ ID NO: 5830410 - DNA, 25 bp, Homo sapien
gagtataaacttcaacaatcagaac

SEQ ID NO: 5830411 - DNA, 25 bp, Homo sapien
gttctgattgttgaagtttatactc

SEQ ID NO: 5830412 - DNA, 25 bp, Homo sapien
taggacaaaactcctgggtacaaat

SEQ ID NO: 5830413 - DNA, 25 bp, Homo sapien
atttgtacccaggagttttgtccta

SEQ ID NO: 5830414 - DNA, 25 bp, Homo sapien
tgtatcgagaatttaaatataggtt

SEQ ID NO: 5830415 - DNA, 25 bp, Homo sapien
aacctatatttaaattctcgataca

SEQ ID NO: 5830416 - DNA, 25 bp, Homo sapien
cagaaagttcagctttaatgaagac

SEQ ID NO: 5830417 - DNA, 25 bp, Homo sapien
ccagggattctctagaggcaagtta

SEQ ID NO: 5830418 - DNA, 25 bp, Homo sapien
tcaaacttccacagcagaagagttg

SEQ ID NO: 5830419 - DNA, 25 bp, Homo sapien
gcaaactagatctcaagtcacacag

SEQ ID NO: 5830420 - DNA, 25 bp, Homo sapien
cttgacgtgatgtttcagtgatctt

SEQ ID NO: 5830421 - DNA, 25 bp, Homo sapien
tgctacagtgaaatgcttcttaatg

SEQ ID NO: 5830422 - DNA, 25 bp, Homo sapien
atagaatgctacagtgaaatgcttc

SEQ ID NO: 5830423 - DNA, 25 bp, Homo sapien
catctgcttgctgagcaaacacaaa

SEQ ID NO: 5830424 - DNA, 25 bp, Homo sapien
caagttaaggctttctgggcaaaga

SEQ ID NO: 5830425 - DNA, 25 bp, Homo sapien
gtcgcttcaaacttccacagcagaa

SEQ ID NO: 5830426 - DNA, 25 bp, Homo sapien
tgaaagcctgagcaggaaggatttc

SEQ ID NO: 5830427 - DNA, 25 bp, Homo sapien
ctaagtcagaatcaatgccacagga

SEQ ID NO: 5830428 - DNA, 25 bp, Homo sapien
aatgactctcctgtcctgcctaaag

SEQ ID NO: 5830429 - DNA, 25 bp, Homo sapien
ttacatctcagacatctgcttgctg

SEQ ID NO: 5830430 - DNA, 25 bp, Homo sapien
ctggatcactcatattgttgaggga

SEQ ID NO: 5830431 - DNA, 25 bp, Homo sapien
ttcagctctaagtcagaatcaatgc

SEQ ID NO: 5830432 - DNA, 25 bp, Homo sapien
cttcttattttcgtctttgagtttc

SEQ ID NO: 5830433 - DNA, 25 bp, Homo sapien
gaaactcaaagacgaaaataagaag

SEQ ID NO: 5830434 - DNA, 25 bp, Homo sapien
gagacaagatgagtcctgtttcccc

SEQ ID NO: 5830435 - DNA, 25 bp, Homo sapien
ggggaaacaggactcatcttgtctc

SEQ ID NO: 5830436 - DNA, 25 bp, Homo sapien
acgagagcttggaagttttagtaag

SEQ ID NO: 5830437 - DNA, 25 bp, Homo sapien
cttactaaaacttccaagctctcgt

SEQ ID NO: 5830438 - DNA, 25 bp, Homo sapien
aaactaacattaaaacataactgtc

SEQ ID NO: 5830439 - DNA, 25 bp, Homo sapien
gacagttatgttttaatgttagttt

SEQ ID NO: 5830440 - DNA, 25 bp, Homo sapien
gttcaagaggcggacttctcttcct

SEQ ID NO: 5830441 - DNA, 25 bp, Homo sapien
aggaagagaagtccgcctcttgaac

SEQ ID NO: 5830442 - DNA, 25 bp, Homo sapien
gtgattggcgcttaagttctagtcg

SEQ ID NO: 5830443 - DNA, 25 bp, Homo sapien
cgactagaacttaagcgccaatcac

SEQ ID NO: 5830444 - DNA, 25 bp, Homo sapien
gtcagagagccggactccagtggtg

SEQ ID NO: 5830445 - DNA, 25 bp, Homo sapien
caccactggagtccggctctctgac

SEQ ID NO: 5830446 - DNA, 25 bp, Homo sapien
ggtccctaggcctcgtggggcaccc

SEQ ID NO: 5830447 - DNA, 25 bp, Homo sapien
gggtgccccacgaggcctagggacc

SEQ ID NO: 5830448 - DNA, 25 bp, Homo sapien
gacatgtaactctctcgcccgggta

SEQ ID NO: 5830449 - DNA, 25 bp, Homo sapien
tacccgggcgagagagttacatgtc

SEQ ID NO: 5830450 - DNA, 25 bp, Homo sapien
aagggaccgtgtcactcgaacactc

SEQ ID NO: 5830451 - DNA, 25 bp, Homo sapien
gagtgttcgagtgacacggtccctt

SEQ ID NO: 5830452 - DNA, 25 bp, Homo sapien
acccagacaccgtacgtcgaggccc

SEQ ID NO: 5830453 - DNA, 25 bp, Homo sapien
gggcctcgacgtacggtgtctgggt

SEQ ID NO: 5830454 - DNA, 25 bp, Homo sapien
ccttggtgcgcgtgacccagacacc

SEQ ID NO: 5830455 - DNA, 25 bp, Homo sapien
ggtgtctgggtcacgcgcaccaagg

SEQ ID NO: 5830456 - DNA, 25 bp, Homo sapien
ttcctgtcgcctcagagggcccgtg

SEQ ID NO: 5830457 - DNA, 25 bp, Homo sapien
cacgggccctctgaggcgacaggaa

SEQ ID NO: 5830458 - DNA, 25 bp, Homo sapien
agacagtctaggaactatgtctgta

SEQ ID NO: 5830459 - DNA, 25 bp, Homo sapien
tacagacatagttcctagactgtct

SEQ ID NO: 5830460 - DNA, 25 bp, Homo sapien
tatcgatagcaactactttgcagag

SEQ ID NO: 5830461 - DNA, 25 bp, Homo sapien
ctctgcaaagtagttgctatcgata

SEQ ID NO: 5830462 - DNA, 25 bp, Homo sapien
gtgtcctctctcggacccccgtcat

SEQ ID NO: 5830463 - DNA, 25 bp, Homo sapien
atgacgggggtccgagagaggacac

SEQ ID NO: 5830464 - DNA, 25 bp, Homo sapien
ggtcctccctgagggactcggggtg

SEQ ID NO: 5830465 - DNA, 25 bp, Homo sapien
caccccgagtccctcagggaggacc

SEQ ID NO: 5830466 - DNA, 25 bp, Homo sapien
aatttcgaacttgtataacgtctat

SEQ ID NO: 5830467 - DNA, 25 bp, Homo sapien
atagacgttatacaagttcgaaatt

SEQ ID NO: 5830468 - DNA, 25 bp, Homo sapien
gagacgagttggaaagaagttagac

SEQ ID NO: 5830469 - DNA, 25 bp, Homo sapien
gtctaacttctttccaactcgtctc

SEQ ID NO: 5830470 - DNA, 25 bp, Homo sapien
ctctaaacctaaggtgtgttcataa

SEQ ID NO: 5830471 - DNA, 25 bp, Homo sapien
ttatgaacacaccttaggtttagag

SEQ ID NO: 5830472 - DNA, 25 bp, Homo sapien
tggacacaggcacggcaggccgagg

SEQ ID NO: 5830473 - DNA, 25 bp, Homo sapien
cctcggcctgccgtgcctgtgtcca

SEQ ID NO: 5830474 - DNA, 25 bp, Homo sapien
tcaccgcacccggatagggtaggga

SEQ ID NO: 5830475 - DNA, 25 bp, Homo sapien
tccctaccctatccgggtgcggtga

SEQ ID NO: 5830476 - DNA, 25 bp, Homo sapien
gaccaaacgaggacacagagacgaa

SEQ ID NO: 5830477 - DNA, 25 bp, Homo sapien
ttcgtctctgtgtcctcgtttggtc

SEQ ID NO: 5830478 - DNA, 25 bp, Homo sapien
aggtgccaggagtgggcgagttcca

SEQ ID NO: 5830479 - DNA, 25 bp, Homo sapien
tggaactcgcccactcctggcacct

SEQ ID NO: 5830480 - DNA, 25 bp, Homo sapien
ggcctcctctccgtagggggcgctt

SEQ ID NO: 5830481 - DNA, 25 bp, Homo sapien
aagcgccccctacggagaggaggcc

SEQ ID NO: 5830482 - DNA, 25 bp, Homo sapien
tagttgtgacattctgacatgatat

SEQ ID NO: 5830483 - DNA, 25 bp, Homo sapien
atatcatgtcagaatgtcacaacta

SEQ ID NO: 5830484 - DNA, 25 bp, Homo sapien
tcgtcgtgtacgtccttattgacaa

SEQ ID NO: 5830485 - DNA, 25 bp, Homo sapien
ttgtcaataaggacgtacacgacga

SEQ ID NO: 5830486 - DNA, 25 bp, Homo sapien
ccttcagggactctgagtgtggaac

SEQ ID NO: 5830487 - DNA, 25 bp, Homo sapien
gttccacactcagagtccctgaagg

SEQ ID NO: 5830488 - DNA, 25 bp, Homo sapien
catgggaattcctagaagactcttt

SEQ ID NO: 5830489 - DNA, 25 bp, Homo sapien
aaagagtcttctaggaattcccatg

SEQ ID NO: 5830490 - DNA, 25 bp, Homo sapien
attgtcccacaaaccacgtcgtcgt

SEQ ID NO: 5830491 - DNA, 25 bp, Homo sapien
acgacgacgtggtttgtgggacaat

SEQ ID NO: 5830492 - DNA, 25 bp, Homo sapien
cttgtacacctattcgttgttcttg

SEQ ID NO: 5830493 - DNA, 25 bp, Homo sapien
caagaacaacgaataggtgtacaag

SEQ ID NO: 5830494 - DNA, 25 bp, Homo sapien
acaggaagcaagtccagtcagacgg

SEQ ID NO: 5830495 - DNA, 25 bp, Homo sapien
ccgtctgactggacttgcttcctgt

SEQ ID NO: 5830496 - DNA, 25 bp, Homo sapien
tccgtcgaccgccgggggtgtccac

SEQ ID NO: 5830497 - DNA, 25 bp, Homo sapien
gtggacacccccggcggtcgacgga

SEQ ID NO: 5830498 - DNA, 25 bp, Homo sapien
gtccgtcgaccgccgggggtgtcca

SEQ ID NO: 5830499 - DNA, 25 bp, Homo sapien
tggacacccccggcggtcgacggac

SEQ ID NO: 5830500 - DNA, 25 bp, Homo sapien
ggtcagtcccatcccattcgctcac

SEQ ID NO: 5830501 - DNA, 25 bp, Homo sapien
gtgagcgaatgggatgggactgacc

SEQ ID NO: 5830502 - DNA, 25 bp, Homo sapien
agtttgagcaaacggacctacgacc

SEQ ID NO: 5830503 - DNA, 25 bp, Homo sapien
ggtcgtaggtccgtttgctcaaact

SEQ ID NO: 5830504 - DNA, 25 bp, Homo sapien
cgtcgtccacacatccagagacgtg

SEQ ID NO: 5830505 - DNA, 25 bp, Homo sapien
cacgtctctggatgtgtggacgacg

SEQ ID NO: 5830506 - DNA, 25 bp, Homo sapien
gggactaggtccgtgccccctgcgg

SEQ ID NO: 5830507 - DNA, 25 bp, Homo sapien
ccgcagggggcacggacctagtccc

SEQ ID NO: 5830508 - DNA, 25 bp, Homo sapien
acgggactaggtccgtgccccctgc

SEQ ID NO: 5830509 - DNA, 25 bp, Homo sapien
gcagggggcacggacctagtcccgt

SEQ ID NO: 5830510 - DNA, 25 bp, Homo sapien
tcagtttaaaagacacttaaagttc

SEQ ID NO: 5830511 - DNA, 25 bp, Homo sapien
gaactttaagtgtcttttaaactga

SEQ ID NO: 5830512 - DNA, 25 bp, Homo sapien
atctgtcattgaattttcgaacatt

SEQ ID NO: 5830513 - DNA, 25 bp, Homo sapien
aatgttcgaaaattcaatgacagat

SEQ ID NO: 5830514 - DNA, 25 bp, Homo sapien
cacgttgggccaggaccacggtcgt

SEQ ID NO: 5830515 - DNA, 25 bp, Homo sapien
acgaccgtggtcctggcccaacgtg

SEQ ID NO: 5830516 - DNA, 25 bp, Homo sapien
gtcgggaaagtcagtacagatgtcc

SEQ ID NO: 5830517 - DNA, 25 bp, Homo sapien
ggacatctgtactgactttcccgac

SEQ ID NO: 5830518 - DNA, 25 bp, Homo sapien
actggatgtggtaccaaccataaag

SEQ ID NO: 5830519 - DNA, 25 bp, Homo sapien
ctttatggttggtaccacatccagt

SEQ ID NO: 5830520 - DNA, 25 bp, Homo sapien
atccaaaccgaacaacttcgataac

SEQ ID NO: 5830521 - DNA, 25 bp, Homo sapien
gttatcgaagttgttcggtttggat

SEQ ID NO: 5830522 - DNA, 25 bp, Homo sapien
cggtgtgataggttacacgtcgaca

SEQ ID NO: 5830523 - DNA, 25 bp, Homo sapien
tgtcgacgtgtaacctatcacaccg

SEQ ID NO: 5830524 - DNA, 25 bp, Homo sapien
aaagaggagtattagtgtaactata

SEQ ID NO: 5830525 - DNA, 25 bp, Homo sapien
tatagttacactaatactcctcttt

SEQ ID NO: 5830526 - DNA, 25 bp, Homo sapien
gaggtagtttatattgaactgttat

SEQ ID NO: 5830527 - DNA, 25 bp, Homo sapien
ataacagttcaatataaactacctc

SEQ ID NO: 5830528 - DNA, 25 bp, Homo sapien
tcacgtgacaacaccgtctagacat

SEQ ID NO: 5830529 - DNA, 25 bp, Homo sapien
atgtctagacggtgttgtcacgtga

SEQ ID NO: 5830530 - DNA, 25 bp, Homo sapien
gggtcacggtactctttctgtgagc

SEQ ID NO: 5830531 - DNA, 25 bp, Homo sapien
gctcacagaaagagtaccgtgaccc

SEQ ID NO: 5830532 - DNA, 25 bp, Homo sapien
ccagagcccgacaaacaccgtgggt

SEQ ID NO: 5830533 - DNA, 25 bp, Homo sapien
acccacggtgtttgtcgggctctgg

SEQ ID NO: 5830534 - DNA, 25 bp, Homo sapien
tatttaaacatcgtccctctaagta

SEQ ID NO: 5830535 - DNA, 25 bp, Homo sapien
tacttagagggacgatgtttaaata

SEQ ID NO: 5830536 - DNA, 25 bp, Homo sapien
aaagttctatcatccccgatcgaag

SEQ ID NO: 5830537 - DNA, 25 bp, Homo sapien
cttcgatcggggatgatagaacttt

SEQ ID NO: 5830538 - DNA, 25 bp, Homo sapien
cgggacctcgggaaactcctctcca

SEQ ID NO: 5830539 - DNA, 25 bp, Homo sapien
tggagaggagtttcccgaggtcccg

SEQ ID NO: 5830540 - DNA, 25 bp, Homo sapien
gacgtgcgaccggttagcttacgac

SEQ ID NO: 5830541 - DNA, 25 bp, Homo sapien
gtcgtaagctaaccggtcgcacgtc

SEQ ID NO: 5830542 - DNA, 25 bp, Homo sapien
ctgtcggtcactagtacccttcctg

SEQ ID NO: 5830543 - DNA, 25 bp, Homo sapien
caggaagggtactagtgaccgacag

SEQ ID NO: 5830544 - DNA, 25 bp, Homo sapien
accgtacacatcttgagttgaaccg

SEQ ID NO: 5830545 - DNA, 25 bp, Homo sapien
cggttcaactcaagatgtgtacggt

SEQ ID NO: 5830546 - DNA, 25 bp, Homo sapien
acactccgttctgcggttgccggaa

SEQ ID NO: 5830547 - DNA, 25 bp, Homo sapien
ttccggcaaccgcagaacggagtgt

SEQ ID NO: 5830548 - DNA, 25 bp, Homo sapien
ccaccgtctggtgaaccgtggaacg

SEQ ID NO: 5830549 - DNA, 25 bp, Homo sapien
cgttccacggttcaccagacggtgg

SEQ ID NO: 5830550 - DNA, 25 bp, Homo sapien
tcaggccgcggcgaacccttcgaaa

SEQ ID NO: 5830551 - DNA, 25 bp, Homo sapien
tttcgaagggttcgccgcggcctga

SEQ ID NO: 5830552 - DNA, 25 bp, Homo sapien
tgcctggcggactctcactccgagg

SEQ ID NO: 5830553 - DNA, 25 bp, Homo sapien
cctcggagtgagagtccgccaggca

SEQ ID NO: 5830554 - DNA, 25 bp, Homo sapien
atgacaaggtatgaaaggcatgacg

SEQ ID NO: 5830555 - DNA, 25 bp, Homo sapien
cgtcatgcctttcataccttgtcat

SEQ ID NO: 5830556 - DNA, 25 bp, Homo sapien
ttaagaacttgttatcaatacaagc

SEQ ID NO: 5830557 - DNA, 25 bp, Homo sapien
gcttgtattgataacaagttcttaa

SEQ ID NO: 5830558 - DNA, 25 bp, Homo sapien
ctcggtctccagtcggtctgacggg

SEQ ID NO: 5830559 - DNA, 25 bp, Homo sapien
cccgtcagaccgactggagaccgag

SEQ ID NO: 5830560 - DNA, 25 bp, Homo sapien
taaaaggtagtacaacgatttcact

SEQ ID NO: 5830561 - DNA, 25 bp, Homo sapien
agtgaaatcgttgtactacctttta

SEQ ID NO: 5830562 - DNA, 25 bp, Homo sapien
aagaaagactagtctcaacccgtcg

SEQ ID NO: 5830563 - DNA, 25 bp, Homo sapien
cgacgggttgagactagtctttctt

SEQ ID NO: 5830564 - DNA, 25 bp, Homo sapien
gacctttcctgaataagagacaggg

SEQ ID NO: 5830565 - DNA, 25 bp, Homo sapien
ccctgtctcttattcaggaaaggtc

SEQ ID NO: 5830566 - DNA, 25 bp, Homo sapien
gtggatttaacctctacatacgtga

SEQ ID NO: 5830567 - DNA, 25 bp, Homo sapien
tcacgtatgtagaggttaaatccac

SEQ ID NO: 5830568 - DNA, 25 bp, Homo sapien
ctaacagtgttctcccgtatagtaa

SEQ ID NO: 5830569 - DNA, 25 bp, Homo sapien
ttactatacgggagaacactgttag

SEQ ID NO: 5830570 - DNA, 25 bp, Homo sapien
gcggtccaggggtcccacggtggct

SEQ ID NO: 5830571 - DNA, 25 bp, Homo sapien
agccaccgtgggacccctggaccgc

SEQ ID NO: 5830572 - DNA, 25 bp, Homo sapien
gacgtggccctctcgtcgggcggac

SEQ ID NO: 5830573 - DNA, 25 bp, Homo sapien
gtccgcccgacgagagggccacgtc

SEQ ID NO: 5830574 - DNA, 25 bp, Homo sapien
aggagaccagttgagtagtacagga

SEQ ID NO: 5830575 - DNA, 25 bp, Homo sapien
tcctgtactactcaactggtctcct

SEQ ID NO: 5830576 - DNA, 25 bp, Homo sapien
gccgccgagacttgctacaggagga

SEQ ID NO: 5830577 - DNA, 25 bp, Homo sapien
tcctcctgtagcaagtctcggcggc

SEQ ID NO: 5830578 - DNA, 25 bp, Homo sapien
ggactccccacttccaatgtcggtg

SEQ ID NO: 5830579 - DNA, 25 bp, Homo sapien
caccgacattggaagtggggagtcc

SEQ ID NO: 5830580 - DNA, 25 bp, Homo sapien
gtcgtagggtcacggtaccgcctct

SEQ ID NO: 5830581 - DNA, 25 bp, Homo sapien
agaggcggtaccgtgaccctacgac

SEQ ID NO: 5830582 - DNA, 25 bp, Homo sapien
ttttatctctcactcttatgttttt

SEQ ID NO: 5830583 - DNA, 25 bp, Homo sapien
aaaaacataagagtgagagataaaa

SEQ ID NO: 5830584 - DNA, 25 bp, Homo sapien
gtctctctctcggtacagggcatgg

SEQ ID NO: 5830585 - DNA, 25 bp, Homo sapien
ccatgccctgtaccgagagagagac

SEQ ID NO: 5830586 - DNA, 25 bp, Homo sapien
gtcttagtctacgaggaacttctga

SEQ ID NO: 5830587 - DNA, 25 bp, Homo sapien
tcagaagttcctcgtagactaagac

SEQ ID NO: 5830588 - DNA, 25 bp, Homo sapien
gacaatttggggacttgctctatag

SEQ ID NO: 5830589 - DNA, 25 bp, Homo sapien
ctatagagcaagtccccaaattgtc

SEQ ID NO: 5830590 - DNA, 25 bp, Homo sapien
ccgaaggaggcgtccgtgacagacg

SEQ ID NO: 5830591 - DNA, 25 bp, Homo sapien
cgtctgtcacggacgcctccttcgg

SEQ ID NO: 5830592 - DNA, 25 bp, Homo sapien
cactcccgaacacgacccgtggtct

SEQ ID NO: 5830593 - DNA, 25 bp, Homo sapien
agaccacgggtcgtgttcgggagtg

SEQ ID NO: 5830594 - DNA, 25 bp, Homo sapien
agagaagatttagggctcttcttat

SEQ ID NO: 5830595 - DNA, 25 bp, Homo sapien
ataagaagagccctaaatcttctct

SEQ ID NO: 5830596 - DNA, 25 bp, Homo sapien
gagttacagaacacaggagttacag

SEQ ID NO: 5830597 - DNA, 25 bp, Homo sapien
ctgtaactcctgtgttctgtaactc

SEQ ID NO: 5830598 - DNA, 25 bp, Homo sapien
gacgaccggacacccggcgttgcgg

SEQ ID NO: 5830599 - DNA, 25 bp, Homo sapien
ccgcaacgccgggtgtccggtcgtc

SEQ ID NO: 5830600 - DNA, 25 bp, Homo sapien
gagcccctcgcttgtctcgtcgggg

SEQ ID NO: 5830601 - DNA, 25 bp, Homo sapien
ccccgacgagacaagcgaggggctc

SEQ ID NO: 5830602 - DNA, 25 bp, Homo sapien
aagtagcagcaggattacaaaaacc

SEQ ID NO: 5830603 - DNA, 25 bp, Homo sapien
ggtttttgtaatcctgctgctactt

SEQ ID NO: 5830604 - DNA, 25 bp, Homo sapien
atttaggtctgtttatcgtataaga

SEQ ID NO: 5830605 - DNA, 25 bp, Homo sapien
tcttatacgataaacagacctaaat

SEQ ID NO: 5830606 - DNA, 25 bp, Homo sapien
ttctcatacattgtccaactgggag

SEQ ID NO: 5830607 - DNA, 25 bp, Homo sapien
ctcccagttggacaatgtatgagaa

SEQ ID NO: 5830608 - DNA, 25 bp, Homo sapien
ccttgaaacgatcgtgaatacgttt

SEQ ID NO: 5830609 - DNA, 25 bp, Homo sapien
aaacgtattcacgatcgtttcaagg

SEQ ID NO: 5830610 - DNA, 25 bp, Homo sapien
aatcgtccgttataacacataaaac

SEQ ID NO: 5830611 - DNA, 25 bp, Homo sapien
gttttatgtgttataacggacgatt

SEQ ID NO: 5830612 - DNA, 25 bp, Homo sapien
ctcagtccctagacggggcggtgcg

SEQ ID NO: 5830613 - DNA, 25 bp, Homo sapien
cgcaccgccccgtctagggactgag

SEQ ID NO: 5830614 - DNA, 25 bp, Homo sapien
gacaccctaacgatcgaccagatct

SEQ ID NO: 5830615 - DNA, 25 bp, Homo sapien
agatctggtcgatcgttagggtgtc

SEQ ID NO: 5830616 - DNA, 25 bp, Homo sapien
ttccagagtccaagtcctgggttaa

SEQ ID NO: 5830617 - DNA, 25 bp, Homo sapien
ttaacccaggacttggactctggaa

SEQ ID NO: 5830618 - DNA, 25 bp, Homo sapien
gaaggggtgtcatcgagagtccgta

SEQ ID NO: 5830619 - DNA, 25 bp, Homo sapien
tacggactctcgatgacaccccttc

SEQ ID NO: 5830620 - DNA, 25 bp, Homo sapien
attcaacttgtctagactcgtcgac

SEQ ID NO: 5830621 - DNA, 25 bp, Homo sapien
gtcgacgagtctagacaagttgaat

SEQ ID NO: 5830622 - DNA, 25 bp, Homo sapien
aatgactcgtacaacgtaacgatgt

SEQ ID NO: 5830623 - DNA, 25 bp, Homo sapien
acatcgttacgttgtacgagtcatt

SEQ ID NO: 5830624 - DNA, 25 bp, Homo sapien
accatctagggagacccgggcagtg

SEQ ID NO: 5830625 - DNA, 25 bp, Homo sapien
cactgcccgggtctccctagatggt

SEQ ID NO: 5830626 - DNA, 25 bp, Homo sapien
cgggcaagggcgctcgaggacggta

SEQ ID NO: 5830627 - DNA, 25 bp, Homo sapien
taccgtcctcgagcgcccttgcccg

SEQ ID NO: 5830628 - DNA, 25 bp, Homo sapien
ggcccggtgtcccctcaactgctac

SEQ ID NO: 5830629 - DNA, 25 bp, Homo sapien
gtagcagttgaggggacaccgggcc

SEQ ID NO: 5830630 - DNA, 25 bp, Homo sapien
atttcaagtcacataatatttagta

SEQ ID NO: 5830631 - DNA, 25 bp, Homo sapien
tactaaatattatgtgacttgaaat

SEQ ID NO: 5830632 - DNA, 25 bp, Homo sapien
catttcaagtcacataatatttagt

SEQ ID NO: 5830633 - DNA, 25 bp, Homo sapien
actaaatattatgtgacttgaaatg

SEQ ID NO: 5830634 - DNA, 25 bp, Homo sapien
ttcatttcaagtcacataatattta

SEQ ID NO: 5830635 - DNA, 25 bp, Homo sapien
taaatattatgtgacttgaaatgaa

SEQ ID NO: 5830636 - DNA, 25 bp, Homo sapien
tttcaagtcacataatatttagtac

SEQ ID NO: 5830637 - DNA, 25 bp, Homo sapien
gtactaaatattatgtgacttgaaa

SEQ ID NO: 5830638 - DNA, 25 bp, Homo sapien
aagaccaagaaagccgcttaaccag

SEQ ID NO: 5830639 - DNA, 25 bp, Homo sapien
ctggttaagcggctttcttggtctt

SEQ ID NO: 5830640 - DNA, 25 bp, Homo sapien
aggtcccgttgtgcacacgaactgt

SEQ ID NO: 5830641 - DNA, 25 bp, Homo sapien
acagttcgtgtgcacaacgggacct

SEQ ID NO: 5830642 - DNA, 25 bp, Homo sapien
taacacgagggcagtttcgggacca

SEQ ID NO: 5830643 - DNA, 25 bp, Homo sapien
tggtcccgaaactgccctcgtgtta

SEQ ID NO: 5830644 - DNA, 25 bp, Homo sapien
ccgagaaaggccgtcgccactgggt

SEQ ID NO: 5830645 - DNA, 25 bp, Homo sapien
acccagtggcgacggcctttctcgg

SEQ ID NO: 5830646 - DNA, 25 bp, Homo sapien
ctggaagagaactcttatcggtaaa

SEQ ID NO: 5830647 - DNA, 25 bp, Homo sapien
tttaccgataagagttctcttccag

SEQ ID NO: 5830648 - DNA, 25 bp, Homo sapien
aggagaacttggagtaaacgtgtcg

SEQ ID NO: 5830649 - DNA, 25 bp, Homo sapien
cgacacgtttactccaagttctcct

SEQ ID NO: 5830650 - DNA, 25 bp, Homo sapien
gaccatttaattattccgagattca

SEQ ID NO: 5830651 - DNA, 25 bp, Homo sapien
tgaatctcggaataattaaatggtc

SEQ ID NO: 5830652 - DNA, 25 bp, Homo sapien
ccccaggtggtatgttcgggactct

SEQ ID NO: 5830653 - DNA, 25 bp, Homo sapien
agagtcccgaacataccacctgggg

SEQ ID NO: 5830654 - DNA, 25 bp, Homo sapien
cggaacacggatgggcggagcggcg

SEQ ID NO: 5830655 - DNA, 25 bp, Homo sapien
cgccgctccgcccatccgtgttccg

SEQ ID NO: 5830656 - DNA, 25 bp, Homo sapien
cagtttctcagacgtgaagtaatag

SEQ ID NO: 5830657 - DNA, 25 bp, Homo sapien
ctattacttcacgtctgagaaactg

SEQ ID NO: 5830658 - DNA, 25 bp, Homo sapien
tcaacacaaatagattatcaaatca

SEQ ID NO: 5830659 - DNA, 25 bp, Homo sapien
tgatttgataatctatttgtgttga

SEQ ID NO: 5830660 - DNA, 25 bp, Homo sapien
tgtccataatgcaaaagttgtatat

SEQ ID NO: 5830661 - DNA, 25 bp, Homo sapien
atatacaacttttgcattatggaca

SEQ ID NO: 5830662 - DNA, 25 bp, Homo sapien
acaactaaattctctatcgcgtata

SEQ ID NO: 5830663 - DNA, 25 bp, Homo sapien
tatacgcgatagagaatttagttgt

SEQ ID NO: 5830664 - DNA, 25 bp, Homo sapien
agacccaggaggaccggcactccgg

SEQ ID NO: 5830665 - DNA, 25 bp, Homo sapien
ccggagtgccggtcctcctgggtct

SEQ ID NO: 5830666 - DNA, 25 bp, Homo sapien
taaaaacgacatcactaactctaga

SEQ ID NO: 5830667 - DNA, 25 bp, Homo sapien
tctagagttagtgatgtcgttttta

SEQ ID NO: 5830668 - DNA, 25 bp, Homo sapien
gacaataaaaacgacatcactaact

SEQ ID NO: 5830669 - DNA, 25 bp, Homo sapien
agttagtgatgtcgtttttattgtc

SEQ ID NO: 5830670 - DNA, 25 bp, Homo sapien
tatatttttgtaacgactatagaca

SEQ ID NO: 5830671 - DNA, 25 bp, Homo sapien
tgtctatagtcgttacaaaaatata

SEQ ID NO: 5830672 - DNA, 25 bp, Homo sapien
gatatagatactatccttttacctg

SEQ ID NO: 5830673 - DNA, 25 bp, Homo sapien
caggtaaaaggatagtatctatatc

SEQ ID NO: 5830674 - DNA, 25 bp, Homo sapien
agatatagatactatccttttacct

SEQ ID NO: 5830675 - DNA, 25 bp, Homo sapien
aggtaaaaggatagtatctatatct

SEQ ID NO: 5830676 - DNA, 25 bp, Homo sapien
cggaagccactgacacaacactcgg

SEQ ID NO: 5830677 - DNA, 25 bp, Homo sapien
ccgagtgttgtgtcagtggcttccg

SEQ ID NO: 5830678 - DNA, 25 bp, Homo sapien
gtgcctcccggcgtcctcggtcgcc

SEQ ID NO: 5830679 - DNA, 25 bp, Homo sapien
ggcgaccgaggacgccgggaggcac

SEQ ID NO: 5830680 - DNA, 25 bp, Homo sapien
aaaggggttctatcgcgatttatgt

SEQ ID NO: 5830681 - DNA, 25 bp, Homo sapien
acataaatcgcgatagaaccccttt

SEQ ID NO: 5830682 - DNA, 25 bp, Homo sapien
ttaaacggtagcaaagtaaagatct

SEQ ID NO: 5830683 - DNA, 25 bp, Homo sapien
agatctttactttgctaccgtttaa

SEQ ID NO: 5830684 - DNA, 25 bp, Homo sapien
gacaccttagtatacttagtgataa

SEQ ID NO: 5830685 - DNA, 25 bp, Homo sapien
ttatcactaagtatactaaggtgtc

SEQ ID NO: 5830686 - DNA, 25 bp, Homo sapien
acagtttattacatctaagataaag

SEQ ID NO: 5830687 - DNA, 25 bp, Homo sapien
ctttatcttagatgtaataaactgt

SEQ ID NO: 5830688 - DNA, 25 bp, Homo sapien
gatccaccagtgaccagtgccacct

SEQ ID NO: 5830689 - DNA, 25 bp, Homo sapien
aggtggcactggtcactggtggatc

SEQ ID NO: 5830690 - DNA, 25 bp, Homo sapien
acttttccgacaagtatttggaatg

SEQ ID NO: 5830691 - DNA, 25 bp, Homo sapien
cattccaaatacttgtcggaaaagt

SEQ ID NO: 5830692 - DNA, 25 bp, Homo sapien
cggacttattccgttgctaggtcgg

SEQ ID NO: 5830693 - DNA, 25 bp, Homo sapien
ccgacctagcaacggaataagtccg

SEQ ID NO: 5830694 - DNA, 25 bp, Homo sapien
taggattatatctatgagtaaaaag

SEQ ID NO: 5830695 - DNA, 25 bp, Homo sapien
ctttttactcatagatataatccta

SEQ ID NO: 5830696 - DNA, 25 bp, Homo sapien
gtacgaacacacgacacgcgtcggg

SEQ ID NO: 5830697 - DNA, 25 bp, Homo sapien
cccgacgcgtgtcgtgtgttcgtac

SEQ ID NO: 5830698 - DNA, 25 bp, Homo sapien
tagacaagtcattccgcgagttccc

SEQ ID NO: 5830699 - DNA, 25 bp, Homo sapien
gggaactcgcggaatgacttgtcta

SEQ ID NO: 5830700 - DNA, 25 bp, Homo sapien
tgaccgatagttcaagataggtaaa

SEQ ID NO: 5830701 - DNA, 25 bp, Homo sapien
tttacctatcttgaactatcggtca

SEQ ID NO: 5830702 - DNA, 25 bp, Homo sapien
actagtctaactaaggatcttataa

SEQ ID NO: 5830703 - DNA, 25 bp, Homo sapien
ttataagatccttagttagactagt

SEQ ID NO: 5830704 - DNA, 25 bp, Homo sapien
tcacggggtttagtagacggaggta

SEQ ID NO: 5830705 - DNA, 25 bp, Homo sapien
tacctccgtctactaaaccccgtga

SEQ ID NO: 5830706 - DNA, 25 bp, Homo sapien
tgacacctgccgacggtttacgggc

SEQ ID NO: 5830707 - DNA, 25 bp, Homo sapien
gcccgtaaaccgtcggcaggtgtca

SEQ ID NO: 5830708 - DNA, 25 bp, Homo sapien
ccggagtccatcgtccgcgaggaac

SEQ ID NO: 5830709 - DNA, 25 bp, Homo sapien
gttcctcgcggacgatggactccgg

SEQ ID NO: 5830710 - DNA, 25 bp, Homo sapien
ttgtcaccactcaaacacaggaggc

SEQ ID NO: 5830711 - DNA, 25 bp, Homo sapien
gcctcctgtgtttgagtggtgacaa

SEQ ID NO: 5830712 - DNA, 25 bp, Homo sapien
gacaaatggttgaagacttgatata

SEQ ID NO: 5830713 - DNA, 25 bp, Homo sapien
tatatcaagtcttcaaccatttgtc

SEQ ID NO: 5830714 - DNA, 25 bp, Homo sapien
gacccggagtaaataataattgttg

SEQ ID NO: 5830715 - DNA, 25 bp, Homo sapien
caacaattattatttactccgggtc

SEQ ID NO: 5830716 - DNA, 25 bp, Homo sapien
aaaattaatcttgttatcggagacg

SEQ ID NO: 5830717 - DNA, 25 bp, Homo sapien
cgtctccgataacaagattaatttt

SEQ ID NO: 5830718 - DNA, 25 bp, Homo sapien
gaagttttctgttaataattgattt

SEQ ID NO: 5830719 - DNA, 25 bp, Homo sapien
aaatcaattattaacagaaaacttc

SEQ ID NO: 5830720 - DNA, 25 bp, Homo sapien
gcgcggcgccgtcgtcacgtcggcg

SEQ ID NO: 5830721 - DNA, 25 bp, Homo sapien
cgccgacgtgacgacggcgccgcgc

SEQ ID NO: 5830722 - DNA, 25 bp, Homo sapien
acgcgcggcgccgtcgtcacgtcgg

SEQ ID NO: 5830723 - DNA, 25 bp, Homo sapien
ccgacgtgacgacggcgccgcgcgt

SEQ ID NO: 5830724 - DNA, 25 bp, Homo sapien
cggttccgtggacgcgcggcgccgt

SEQ ID NO: 5830725 - DNA, 25 bp, Homo sapien
acggcgccgcgcgtccacggaaccg

SEQ ID NO: 5830726 - DNA, 25 bp, Homo sapien
gaaagagaatagtcttgaagatatc

SEQ ID NO: 5830727 - DNA, 25 bp, Homo sapien
gatatcttcaagactattctctttc

SEQ ID NO: 5830728 - DNA, 25 bp, Homo sapien
cacggcgaaggtgcccactcgagga

SEQ ID NO: 5830729 - DNA, 25 bp, Homo sapien
tcctcgagtgggcaccttcgccgtg

SEQ ID NO: 5830730 - DNA, 25 bp, Homo sapien
tggaacacgggtgtgctcgaggccc

SEQ ID NO: 5830731 - DNA, 25 bp, Homo sapien
gggcctcgagcacacccgtgttcca

SEQ ID NO: 5830732 - DNA, 25 bp, Homo sapien
ccaatcgagccctacttatcctccc

SEQ ID NO: 5830733 - DNA, 25 bp, Homo sapien
gggaggataagtagggctcgattgg

SEQ ID NO: 5830734 - DNA, 25 bp, Homo sapien
ttggagtcattctgatttaagatat

SEQ ID NO: 5830735 - DNA, 25 bp, Homo sapien
atatcttaaatcagaatgactccaa

SEQ ID NO: 5830736 - DNA, 25 bp, Homo sapien
ccgttccatgcgtccatcagatact

SEQ ID NO: 5830737 - DNA, 25 bp, Homo sapien
agtatctgatggacgcatggaacgg

SEQ ID NO: 5830738 - DNA, 25 bp, Homo sapien
ccggaagctcttcggagtctagtag

SEQ ID NO: 5830739 - DNA, 25 bp, Homo sapien
ctactagactccgaagagcttccgg

SEQ ID NO: 5830740 - DNA, 25 bp, Homo sapien
agggtagaagatatgtatcgacgaa

SEQ ID NO: 5830741 - DNA, 25 bp, Homo sapien
ttcgtcgatacatatcttctaccct

SEQ ID NO: 5830742 - DNA, 25 bp, Homo sapien
ggacacaataaggtacactacaccc

SEQ ID NO: 5830743 - DNA, 25 bp, Homo sapien
gggtgtagtgtaccttattgtgtcc

SEQ ID NO: 5830744 - DNA, 25 bp, Homo sapien
acaaatcgtactgacgggtgcacac

SEQ ID NO: 5830745 - DNA, 25 bp, Homo sapien
gtgtgcacccgtcagtacgatttgt

SEQ ID NO: 5830746 - DNA, 25 bp, Homo sapien
ggcatcggagcctccttggcctcct

SEQ ID NO: 5830747 - DNA, 25 bp, Homo sapien
aggaggccaaggaggctccgatgcc

SEQ ID NO: 5830748 - DNA, 25 bp, Homo sapien
tctccgtaggccgacgcgggtggcg

SEQ ID NO: 5830749 - DNA, 25 bp, Homo sapien
cgccacccgcgtcggcctacggaga

SEQ ID NO: 5830750 - DNA, 25 bp, Homo sapien
aataattatgtttatcgtctccttt

SEQ ID NO: 5830751 - DNA, 25 bp, Homo sapien
aaaggagacgataaacataattatt

SEQ ID NO: 5830752 - DNA, 25 bp, Homo sapien
acggaggagcacatttcgtaggacc

SEQ ID NO: 5830753 - DNA, 25 bp, Homo sapien
ggtcctacgaaatgtgctcctccgt

SEQ ID NO: 5830754 - DNA, 25 bp, Homo sapien
tcggtgtcgggctatattagtccga

SEQ ID NO: 5830755 - DNA, 25 bp, Homo sapien
tcggactaatatagcccgacaccga

SEQ ID NO: 5830756 - DNA, 25 bp, Homo sapien
tctggtctccccagtacactacctc

SEQ ID NO: 5830757 - DNA, 25 bp, Homo sapien
gaggtagtgtactggggagaccaga

SEQ ID NO: 5830758 - DNA, 25 bp, Homo sapien
aacatcctgtttcccctattataat

SEQ ID NO: 5830759 - DNA, 25 bp, Homo sapien
attataataggggaaacaggatgtt

SEQ ID NO: 5830760 - DNA, 25 bp, Homo sapien
cgagtcctggtagggccgcccgacg

SEQ ID NO: 5830761 - DNA, 25 bp, Homo sapien
cgtcgggcggccctaccaggactcg

SEQ ID NO: 5830762 - DNA, 25 bp, Homo sapien
aacaggttcaatacgactctctcag

SEQ ID NO: 5830763 - DNA, 25 bp, Homo sapien
ctgagagagtcgtattgaacctgtt

SEQ ID NO: 5830764 - DNA, 25 bp, Homo sapien
ctgtctgtgaccttggtactctact

SEQ ID NO: 5830765 - DNA, 25 bp, Homo sapien
agtagagtaccaaggtcacagacag

SEQ ID NO: 5830766 - DNA, 25 bp, Homo sapien
gggtctgacgtccgacgaaaggacc

SEQ ID NO: 5830767 - DNA, 25 bp, Homo sapien
ggtcctttcgtcggacgtcagaccc

SEQ ID NO: 5830768 - DNA, 25 bp, Homo sapien
ggcggcgcccaaggcgctgcgactg

SEQ ID NO: 5830769 - DNA, 25 bp, Homo sapien
cagtcgcagcgccttgggcgccgcc

SEQ ID NO: 5830770 - DNA, 25 bp, Homo sapien
acggcggcgcccaaggcgctgcgac

SEQ ID NO: 5830771 - DNA, 25 bp, Homo sapien
gtcgcagcgccttgggcgccgccgt

SEQ ID NO: 5830772 - DNA, 25 bp, Homo sapien
gaggcggccgtcggcggggagtcat

SEQ ID NO: 5830773 - DNA, 25 bp, Homo sapien
atgactccccgccgacggccgcctc

SEQ ID NO: 5830774 - DNA, 25 bp, Homo sapien
tccactaggcgagaaagtgactagg

SEQ ID NO: 5830775 - DNA, 25 bp, Homo sapien
cctagtcactttctcgcctagtgga

SEQ ID NO: 5830776 - DNA, 25 bp, Homo sapien
tacttcggaatacactcattaacag

SEQ ID NO: 5830777 - DNA, 25 bp, Homo sapien
ctgttaatgagtgtattccgaagta

SEQ ID NO: 5830778 - DNA, 25 bp, Homo sapien
gagtggcaggagaacagccctgcat

SEQ ID NO: 5830779 - DNA, 25 bp, Homo sapien
atgcagggctgttctcctgccactc

SEQ ID NO: 5830780 - DNA, 25 bp, Homo sapien
agacgggaactctgactcctggttc

SEQ ID NO: 5830781 - DNA, 25 bp, Homo sapien
gaaccaggagtcagagttcccgtct

SEQ ID NO: 5830782 - DNA, 25 bp, Homo sapien
gtgtaccaaggtttccaccatacgg

SEQ ID NO: 5830783 - DNA, 25 bp, Homo sapien
ccgtatggtggaaaccttggtacac

SEQ ID NO: 5830784 - DNA, 25 bp, Homo sapien
caaaccacaccttactaggttccag

SEQ ID NO: 5830785 - DNA, 25 bp, Homo sapien
ctggaacctagtaaggtgtggtttg

SEQ ID NO: 5830786 - DNA, 25 bp, Homo sapien
acctgtaccaataatgtcacaggat

SEQ ID NO: 5830787 - DNA, 25 bp, Homo sapien
atcctgtgacattattggtacaggt

SEQ ID NO: 5830788 - DNA, 25 bp, Homo sapien
cggaattacgaggtacacagacaaa

SEQ ID NO: 5830789 - DNA, 25 bp, Homo sapien
tttgtctgtgtacctcgtaattccg

SEQ ID NO: 5830790 - DNA, 25 bp, Homo sapien
ggaacgtgataattacaacgagaat

SEQ ID NO: 5830791 - DNA, 25 bp, Homo sapien
attctcgttgtaattatcacgttcc

SEQ ID NO: 5830792 - DNA, 25 bp, Homo sapien
tttgagggtctttcgccccgcctat

SEQ ID NO: 5830793 - DNA, 25 bp, Homo sapien
ataggcggggcgaaagaccctcaaa

SEQ ID NO: 5830794 - DNA, 25 bp, Homo sapien
ctcgtctcgtcgacggccaccgccg

SEQ ID NO: 5830795 - DNA, 25 bp, Homo sapien
cggcggtggccgtcgacgagacgag

SEQ ID NO: 5830796 - DNA, 25 bp, Homo sapien
gtcgctaggaagaactccagctgtg

SEQ ID NO: 5830797 - DNA, 25 bp, Homo sapien
cacagctggagttcttcctagcgac

SEQ ID NO: 5830798 - DNA, 25 bp, Homo sapien
gaaagggtcgtatttccgaccagtg

SEQ ID NO: 5830799 - DNA, 25 bp, Homo sapien
cactggtcggaaatacgaccctttc

SEQ ID NO: 5830800 - DNA, 25 bp, Homo sapien
gacacgcgccacgtaacacaagagg

SEQ ID NO: 5830801 - DNA, 25 bp, Homo sapien
cctcttgtgttacgtggcgcgtgtc

SEQ ID NO: 5830802 - DNA, 25 bp, Homo sapien
tttgactcccactatgacattgtat

SEQ ID NO: 5830803 - DNA, 25 bp, Homo sapien
atacaatgtcatagtgggagtcaaa

SEQ ID NO: 5830804 - DNA, 25 bp, Homo sapien
tctgaaactttaggtcatttttata

SEQ ID NO: 5830805 - DNA, 25 bp, Homo sapien
tataaaaatgacctaaagtttcaga

SEQ ID NO: 5830806 - DNA, 25 bp, Homo sapien
tttcctacgaacttcggacagagga

SEQ ID NO: 5830807 - DNA, 25 bp, Homo sapien
tcctctgtccgaagttcgtaggaaa

SEQ ID NO: 5830808 - DNA, 25 bp, Homo sapien
gcggcgcctcttactgtccgcggct

SEQ ID NO: 5830809 - DNA, 25 bp, Homo sapien
agccgcggacagtaagaggcgccgc

SEQ ID NO: 5830810 - DNA, 25 bp, Homo sapien
tactgtccgcggctccgcctcgtcg

SEQ ID NO: 5830811 - DNA, 25 bp, Homo sapien
cgacgaggcggagccgcggacagta

SEQ ID NO: 5830812 - DNA, 25 bp, Homo sapien
gagacacgtcggagggtcgaggtgt

SEQ ID NO: 5830813 - DNA, 25 bp, Homo sapien
acacctcgaccctccgacgtgtctc

SEQ ID NO: 5830814 - DNA, 25 bp, Homo sapien
agtccaggagccacaactgcgggac

SEQ ID NO: 5830815 - DNA, 25 bp, Homo sapien
gtcccgcagttgtggctcctggact

SEQ ID NO: 5830816 - DNA, 25 bp, Homo sapien
gacgtaggtgaacccaccaactcaa

SEQ ID NO: 5830817 - DNA, 25 bp, Homo sapien
ttgagttggtgggttcacctacgtc

SEQ ID NO: 5830818 - DNA, 25 bp, Homo sapien
tgggtgtggaactccctcgtaggta

SEQ ID NO: 5830819 - DNA, 25 bp, Homo sapien
tacctacgagggagttccacaccca

SEQ ID NO: 5830820 - DNA, 25 bp, Homo sapien
agaagaaataacacagagtggaagt

SEQ ID NO: 5830821 - DNA, 25 bp, Homo sapien
acttccactctgtgttatttcttct

SEQ ID NO: 5830822 - DNA, 25 bp, Homo sapien
agagtgtccggactatgtcccaggc

SEQ ID NO: 5830823 - DNA, 25 bp, Homo sapien
gcctgggacatagtccggacactct

SEQ ID NO: 5830824 - DNA, 25 bp, Homo sapien
ttatagtcacggtaagacacaactt

SEQ ID NO: 5830825 - DNA, 25 bp, Homo sapien
aagttgtgtcttaccgtgactataa

SEQ ID NO: 5830826 - DNA, 25 bp, Homo sapien
ggttcgtacggtcacctcacccagt

SEQ ID NO: 5830827 - DNA, 25 bp, Homo sapien
actgggtgaggtgaccgtacgaacc

SEQ ID NO: 5830828 - DNA, 25 bp, Homo sapien
gtctacccgtgcactagtcgccacg

SEQ ID NO: 5830829 - DNA, 25 bp, Homo sapien
cgtggcgactagtgcacgggtagac

SEQ ID NO: 5830830 - DNA, 25 bp, Homo sapien
ccccacgcacccgtaccgcgacagg

SEQ ID NO: 5830831 - DNA, 25 bp, Homo sapien
cctgtcgcggtacgggtgcgtgggg

SEQ ID NO: 5830832 - DNA, 25 bp, Homo sapien
tgtaacgtttagaaagatgttaggg

SEQ ID NO: 5830833 - DNA, 25 bp, Homo sapien
ccctaacatctttctaaacgttaca

SEQ ID NO: 5830834 - DNA, 25 bp, Homo sapien
gcacggtgtcgcgggggtgccccgt

SEQ ID NO: 5830835 - DNA, 25 bp, Homo sapien
acggggcacccccgcgacaccgtgc

SEQ ID NO: 5830836 - DNA, 25 bp, Homo sapien
cccgcaggggcgacgcacggtgtcg

SEQ ID NO: 5830837 - DNA, 25 bp, Homo sapien
cgacaccgtgcgtcgcccctgcggg

SEQ ID NO: 5830838 - DNA, 25 bp, Homo sapien
tgccccgtgaggccccgccgacgtc

SEQ ID NO: 5830839 - DNA, 25 bp, Homo sapien
gacgtcggcggggcctcacggggca

SEQ ID NO: 5830840 - DNA, 25 bp, Homo sapien
ctactgaaatttggaacgctcgaac

SEQ ID NO: 5830841 - DNA, 25 bp, Homo sapien
gttcgagcgttccaaatttcagtag

SEQ ID NO: 5830842 - DNA, 25 bp, Homo sapien
tgtgtgttagcatgtggtgtgacct

SEQ ID NO: 5830843 - DNA, 25 bp, Homo sapien
aggtcacaccacatgctaacacaca

SEQ ID NO: 5830844 - DNA, 25 bp, Homo sapien
gaggcggccgcatctcagggcacgc

SEQ ID NO: 5830845 - DNA, 25 bp, Homo sapien
gcgtgccctgagatgcggccgcctc

SEQ ID NO: 5830846 - DNA, 25 bp, Homo sapien
tatattattaactatcggacttttt

SEQ ID NO: 5830847 - DNA, 25 bp, Homo sapien
aaaaagtccgatagttaataatata

SEQ ID NO: 5830848 - DNA, 25 bp, Homo sapien
accctagttgatgaaggtagcagaa

SEQ ID NO: 5830849 - DNA, 25 bp, Homo sapien
ttctgctaccttcatcaactagggt

SEQ ID NO: 5830850 - DNA, 25 bp, Homo sapien
cctatgagggcttgtccagggctcc

SEQ ID NO: 5830851 - DNA, 25 bp, Homo sapien
atgagggcttgtccagggctcccct

SEQ ID NO: 5830852 - DNA, 25 bp, Homo sapien
cacattttattccaggatgcgacac

SEQ ID NO: 5830853 - DNA, 25 bp, Homo sapien
gccacattttattccaggatgcgac

SEQ ID NO: 5830854 - DNA, 25 bp, Homo sapien
cattttattccaggatgcgacacgg

SEQ ID NO: 5830855 - DNA, 25 bp, Homo sapien
ctccctgcctatgagggcttgtcca

SEQ ID NO: 5830856 - DNA, 25 bp, Homo sapien
ttttattccaggatgcgacacgggg

SEQ ID NO: 5830857 - DNA, 25 bp, Homo sapien
cagcaagcgcgacagtgcccgggac

SEQ ID NO: 5830858 - DNA, 25 bp, Homo sapien
ctatgagggcttgtccagggctccc

SEQ ID NO: 5830859 - DNA, 25 bp, Homo sapien
tccctgcctatgagggcttgtccag

SEQ ID NO: 5830860 - DNA, 25 bp, Homo sapien
ccggcctgccttgacaggaaggaga

SEQ ID NO: 5830861 - DNA, 25 bp, Homo sapien
cggcctgccttgacaggaaggagat

SEQ ID NO: 5830862 - DNA, 25 bp, Homo sapien
gcctgccttgacaggaaggagatag

SEQ ID NO: 5830863 - DNA, 25 bp, Homo sapien
ccctccaggtgaggaccaggagcac

SEQ ID NO: 5830864 - DNA, 25 bp, Homo sapien
cctccaggtgaggaccaggagcaca

SEQ ID NO: 5830865 - DNA, 25 bp, Homo sapien
gcctatgagggcttgtccagggctc

SEQ ID NO: 5830866 - DNA, 25 bp, Homo sapien
acacagagatctgaatttggcggcc

SEQ ID NO: 5830867 - DNA, 25 bp, Homo sapien
ggccgccaaattcagatctctgtgt

SEQ ID NO: 5830868 - DNA, 25 bp, Homo sapien
aaaaatattctttgaaacgacagta

SEQ ID NO: 5830869 - DNA, 25 bp, Homo sapien
tactgtcgtttcaaagaatattttt

SEQ ID NO: 5830870 - DNA, 25 bp, Homo sapien
tcgacgatgacggtgtctggtcccg

SEQ ID NO: 5830871 - DNA, 25 bp, Homo sapien
cgggaccagacaccgtcatcgtcga

SEQ ID NO: 5830872 - DNA, 25 bp, Homo sapien
cctcgtgggccgagagtccggtcgg

SEQ ID NO: 5830873 - DNA, 25 bp, Homo sapien
ccgaccggactctcggcccacgagg

SEQ ID NO: 5830874 - DNA, 25 bp, Homo sapien
cgattactggtttgtgaccttacga

SEQ ID NO: 5830875 - DNA, 25 bp, Homo sapien
tcgtaaggtcacaaaccagtaatcg

SEQ ID NO: 5830876 - DNA, 25 bp, Homo sapien
gagagggccggtgacctagggtggg

SEQ ID NO: 5830877 - DNA, 25 bp, Homo sapien
cccaccctaggtcaccggccctctc

SEQ ID NO: 5830878 - DNA, 25 bp, Homo sapien
cgtcgactagtcacagggcgtggga

SEQ ID NO: 5830879 - DNA, 25 bp, Homo sapien
tcccacgccctgtgactagtcgacg

SEQ ID NO: 5830880 - DNA, 25 bp, Homo sapien
ttgggtactcaagagtctctcgtac

SEQ ID NO: 5830881 - DNA, 25 bp, Homo sapien
gtacgagagactcttgagtacccaa

SEQ ID NO: 5830882 - DNA, 25 bp, Homo sapien
gttgaccacctgataaatgaactcg

SEQ ID NO: 5830883 - DNA, 25 bp, Homo sapien
cgagttcatttatcaggtggtcaac

SEQ ID NO: 5830884 - DNA, 25 bp, Homo sapien
gggcctcccgtccctctacagggga

SEQ ID NO: 5830885 - DNA, 25 bp, Homo sapien
tcccctgtagagggacgggaggccc

SEQ ID NO: 5830886 - DNA, 25 bp, Homo sapien
cgtacctgcgggaggacgagacgtg

SEQ ID NO: 5830887 - DNA, 25 bp, Homo sapien
cacgtctcgtcctcccgcaggtacg

SEQ ID NO: 5830888 - DNA, 25 bp, Homo sapien
ggatagaacaggtcaaacttcaggt

SEQ ID NO: 5830889 - DNA, 25 bp, Homo sapien
acctgaagtttgacctgttctatcc

SEQ ID NO: 5830890 - DNA, 25 bp, Homo sapien
gggtacgggtcgcacgtggtcgtcg

SEQ ID NO: 5830891 - DNA, 25 bp, Homo sapien
cgacgaccacgtgcgacccgtaccc

SEQ ID NO: 5830892 - DNA, 25 bp, Homo sapien
gaagagacgtcggactatactccag

SEQ ID NO: 5830893 - DNA, 25 bp, Homo sapien
ctggagtatagtccgacgtctcttc

SEQ ID NO: 5830894 - DNA, 25 bp, Homo sapien
ttgacgtaacatattctgctccgac

SEQ ID NO: 5830895 - DNA, 25 bp, Homo sapien
gtcggagcagaatatgttacgtcaa

SEQ ID NO: 5830896 - DNA, 25 bp, Homo sapien
aagaacgtaagagaatgtttgcaac

SEQ ID NO: 5830897 - DNA, 25 bp, Homo sapien
gttgcaaacattctcttacgttctt

SEQ ID NO: 5830898 - DNA, 25 bp, Homo sapien
ccgactcgcactcgtcacacgcgta

SEQ ID NO: 5830899 - DNA, 25 bp, Homo sapien
tacgcgtgtgacgagtgcgagtcgg

SEQ ID NO: 5830900 - DNA, 25 bp, Homo sapien
atgataattaaagattggcatgtgt

SEQ ID NO: 5830901 - DNA, 25 bp, Homo sapien
acacatgccaatctttaattatcat

SEQ ID NO: 5830902 - DNA, 25 bp, Homo sapien
cctaccgcgggcagcgcgaggactt

SEQ ID NO: 5830903 - DNA, 25 bp, Homo sapien
aagtcctcgcgctgcccgcggtagg

SEQ ID NO: 5830904 - DNA, 25 bp, Homo sapien
gtcgtgacctcgtgagcccaagatt

SEQ ID NO: 5830905 - DNA, 25 bp, Homo sapien
aatcttgggctcacgaggtcacgac

SEQ ID NO: 5830906 - DNA, 25 bp, Homo sapien
cccgggtcgtaccacactctgggaa

SEQ ID NO: 5830907 - DNA, 25 bp, Homo sapien
ttcccagagtgtggtacgacccggg

SEQ ID NO: 5830908 - DNA, 25 bp, Homo sapien
cggtgacgacacggccggtcgtcgt

SEQ ID NO: 5830909 - DNA, 25 bp, Homo sapien
acgacgaccggccgtgtcgtcaccg

SEQ ID NO: 5830910 - DNA, 25 bp, Homo sapien
gtcgtccctacgactcggtgtccgg

SEQ ID NO: 5830911 - DNA, 25 bp, Homo sapien
ccggacaccgagtcgtagggacgac

SEQ ID NO: 5830912 - DNA, 25 bp, Homo sapien
gtacaagacactgtactgaaaagtg

SEQ ID NO: 5830913 - DNA, 25 bp, Homo sapien
cacttttcagtacagtgtcttgtac

SEQ ID NO: 5830914 - DNA, 25 bp, Homo sapien
gggccgggcctgggcacaagtgtcg

SEQ ID NO: 5830915 - DNA, 25 bp, Homo sapien
cgacacttgtgcccaggcccggccc

SEQ ID NO: 5830916 - DNA, 25 bp, Homo sapien
ctctatcttataacaatagagggaa

SEQ ID NO: 5830917 - DNA, 25 bp, Homo sapien
ttccctctattgttataagatagag

SEQ ID NO: 5830918 - DNA, 25 bp, Homo sapien
acacgacgatgagggtataggcagt

SEQ ID NO: 5830919 - DNA, 25 bp, Homo sapien
actgcctataccctcatcgtcgtgt

SEQ ID NO: 5830920 - DNA, 25 bp, Homo sapien
ggaaccatagtatccctcgttttgt

SEQ ID NO: 5830921 - DNA, 25 bp, Homo sapien
acaaaacgagggatactatggttcc

SEQ ID NO: 5830922 - DNA, 25 bp, Homo sapien
caaaaaagtgtgtcgttcgtcttac

SEQ ID NO: 5830923 - DNA, 25 bp, Homo sapien
gtaagacgaacgacacacttttttg

SEQ ID NO: 5830924 - DNA, 25 bp, Homo sapien
taaaggtgccggtgtccgccccgtg

SEQ ID NO: 5830925 - DNA, 25 bp, Homo sapien
cacggggcggacaccggcaccttta

SEQ ID NO: 5830926 - DNA, 25 bp, Homo sapien
gttacgactacttttatcaagacat

SEQ ID NO: 5830927 - DNA, 25 bp, Homo sapien
atgtcttgataaaagtagtcgtaac

SEQ ID NO: 5830928 - DNA, 25 bp, Homo sapien
acgactaagtgtacataagactgag

SEQ ID NO: 5830929 - DNA, 25 bp, Homo sapien
ctcagtcttatgtacacttagtcgt

SEQ ID NO: 5830930 - DNA, 25 bp, Homo sapien
gaaaaggacgactagttccagttac

SEQ ID NO: 5830931 - DNA, 25 bp, Homo sapien
gtaactggaactagtcgtccttttc

SEQ ID NO: 5830932 - DNA, 25 bp, Homo sapien
ccccgagcccgttcacgggacagaa

SEQ ID NO: 5830933 - DNA, 25 bp, Homo sapien
ttctgtcccgtgaacgggctcgggg

SEQ ID NO: 5830934 - DNA, 25 bp, Homo sapien
gaatattaggacaagtagtatagaa

SEQ ID NO: 5830935 - DNA, 25 bp, Homo sapien
ttctatactacttgtcctaatattc

SEQ ID NO: 5830936 - DNA, 25 bp, Homo sapien
ggtaagtgtgtacgcacatgagtac

SEQ ID NO: 5830937 - DNA, 25 bp, Homo sapien
gtactcatgtgcgtacacacttacc

SEQ ID NO: 5830938 - DNA, 25 bp, Homo sapien
taacgattctacaggtaacgttagt

SEQ ID NO: 5830939 - DNA, 25 bp, Homo sapien
actaacgttacctgtagaatcgtta

SEQ ID NO: 5830940 - DNA, 25 bp, Homo sapien
actgtgaccgtttgtcgggacgcac

SEQ ID NO: 5830941 - DNA, 25 bp, Homo sapien
gtgcgtcccgacaaacggtcacagt

SEQ ID NO: 5830942 - DNA, 25 bp, Homo sapien
gatttcttttatttaaatctgttat

SEQ ID NO: 5830943 - DNA, 25 bp, Homo sapien
ataacagatttaaataaaagaaatc

SEQ ID NO: 5830944 - DNA, 25 bp, Homo sapien
tttaattttcatgtagatgtgagta

SEQ ID NO: 5830945 - DNA, 25 bp, Homo sapien
tactcacatctacatgaaaattaaa

SEQ ID NO: 5830946 - DNA, 25 bp, Homo sapien
agatagtgtctatactctcagagtt

SEQ ID NO: 5830947 - DNA, 25 bp, Homo sapien
aactctgagagtatagacactatct

SEQ ID NO: 5830948 - DNA, 25 bp, Homo sapien
acagggaggtcctgctacgacgccg

SEQ ID NO: 5830949 - DNA, 25 bp, Homo sapien
cggcgtcgtagcaggacctccctgt

SEQ ID NO: 5830950 - DNA, 25 bp, Homo sapien
gttaagaaatgactcttcgtccacg

SEQ ID NO: 5830951 - DNA, 25 bp, Homo sapien
cgtggacgaagagtcatttcttaac

SEQ ID NO: 5830952 - DNA, 25 bp, Homo sapien
ccagagtgcacctggtcgcgtctcg

SEQ ID NO: 5830953 - DNA, 25 bp, Homo sapien
cgagacgcgaccaggtgcactctgg

SEQ ID NO: 5830954 - DNA, 25 bp, Homo sapien
tagaactagaccttatgtctcaagt

SEQ ID NO: 5830955 - DNA, 25 bp, Homo sapien
acttgagacataaggtctagttcta

SEQ ID NO: 5830956 - DNA, 25 bp, Homo sapien
ctattatcagagtggttttccttat

SEQ ID NO: 5830957 - DNA, 25 bp, Homo sapien
ataaggaaaaccactctgataatag

SEQ ID NO: 5830958 - DNA, 25 bp, Homo sapien
gatttactttagtgttcgttagtaa

SEQ ID NO: 5830959 - DNA, 25 bp, Homo sapien
ttactaacgaacactaaagtaaatc

SEQ ID NO: 5830960 - DNA, 25 bp, Homo sapien
acctacatgcactacccacccgaca

SEQ ID NO: 5830961 - DNA, 25 bp, Homo sapien
tgtcgggtgggtagtgcatgtaggt

SEQ ID NO: 5830962 - DNA, 25 bp, Homo sapien
ctcgaggcatcgcacaacggactta

SEQ ID NO: 5830963 - DNA, 25 bp, Homo sapien
taagtccgttgtgcgatgcctcgag

SEQ ID NO: 5830964 - DNA, 25 bp, Homo sapien
ttttatgaaataatagtccaactat

SEQ ID NO: 5830965 - DNA, 25 bp, Homo sapien
atagttggactattatttcataaaa

SEQ ID NO: 5830966 - DNA, 25 bp, Homo sapien
cgacctccctcggccctgaggcgtg

SEQ ID NO: 5830967 - DNA, 25 bp, Homo sapien
cacgcctcagggccgagggaggtcg

SEQ ID NO: 5830968 - DNA, 25 bp, Homo sapien
acggtatagattggtccaacctcaa

SEQ ID NO: 5830969 - DNA, 25 bp, Homo sapien
ttgaggttggaccaatctataccgt

SEQ ID NO: 5830970 - DNA, 25 bp, Homo sapien
ttgcacgtctttgactcctcctggt

SEQ ID NO: 5830971 - DNA, 25 bp, Homo sapien
accaggaggagtcaaagacgtgcaa

SEQ ID NO: 5830972 - DNA, 25 bp, Homo sapien
gacggtaagagaccctcgcggtccc

SEQ ID NO: 5830973 - DNA, 25 bp, Homo sapien
gggaccgcgagggtctcttaccgtc

SEQ ID NO: 5830974 - DNA, 25 bp, Homo sapien
gacagagtacataggtagatctaag

SEQ ID NO: 5830975 - DNA, 25 bp, Homo sapien
cttagatctacctatgtactctgtc

SEQ ID NO: 5830976 - DNA, 25 bp, Homo sapien
aactgtaagttacaactaggtgacc

SEQ ID NO: 5830977 - DNA, 25 bp, Homo sapien
ggtcacctagttgtaacttacagtt

SEQ ID NO: 5830978 - DNA, 25 bp, Homo sapien
gggagaggcccagagtcgttcaagg

SEQ ID NO: 5830979 - DNA, 25 bp, Homo sapien
ccttgaacgactctgggcctctccc

SEQ ID NO: 5830980 - DNA, 25 bp, Homo sapien
tggggagaggcccagagtcgttcaa

SEQ ID NO: 5830981 - DNA, 25 bp, Homo sapien
ttgaacgactctgggcctctcccca

SEQ ID NO: 5830982 - DNA, 25 bp, Homo sapien
aacttgaccattacttttaccacta

SEQ ID NO: 5830983 - DNA, 25 bp, Homo sapien
tagtggtaaaagtaatggtcaagtt

SEQ ID NO: 5830984 - DNA, 25 bp, Homo sapien
tcctctcgacctccagctcagtgtc

SEQ ID NO: 5830985 - DNA, 25 bp, Homo sapien
gacactgagctggaggtcgagagga

SEQ ID NO: 5830986 - DNA, 25 bp, Homo sapien
taaattgaaaaatcgactaaaacac

SEQ ID NO: 5830987 - DNA, 25 bp, Homo sapien
gtgttttagtcgatttttcaattta

SEQ ID NO: 5830988 - DNA, 25 bp, Homo sapien
gtaaattgaaaaatcgactaaaaca

SEQ ID NO: 5830989 - DNA, 25 bp, Homo sapien
tgttttagtcgatttttcaatttac

SEQ ID NO: 5830990 - DNA, 25 bp, Homo sapien
ccctctatgctaggaaaaaccgtag

SEQ ID NO: 5830991 - DNA, 25 bp, Homo sapien
ctacggtttttcctagcatagaggg

SEQ ID NO: 5830992 - DNA, 25 bp, Homo sapien
gcccgcgggcgagaggctgacgaca

SEQ ID NO: 5830993 - DNA, 25 bp, Homo sapien
tgtcgtcagcctctcgcccgcgggc

SEQ ID NO: 5830994 - DNA, 25 bp, Homo sapien
tctctcacgtggtgtaggtgattgg

SEQ ID NO: 5830995 - DNA, 25 bp, Homo sapien
ccaatcacctacaccacgtgagaga

SEQ ID NO: 5830996 - DNA, 25 bp, Homo sapien
aaagtgattcacacgaatttcaagg

SEQ ID NO: 5830997 - DNA, 25 bp, Homo sapien
ccttgaaattcgtgtgaatcacttt

SEQ ID NO: 5830998 - DNA, 25 bp, Homo sapien
tggcgtcgagcaaccctactctcgg

SEQ ID NO: 5830999 - DNA, 25 bp, Homo sapien
ccgagagtagggttgctcgacgcca

SEQ ID NO: 5831000 - DNA, 25 bp, Homo sapien
aggtttctaacaacattctttggag

SEQ ID NO: 5831001 - DNA, 25 bp, Homo sapien
ctccaaagaatgttgttagaaacct

SEQ ID NO: 5831002 - DNA, 25 bp, Homo sapien
aggccgctgctgacccgccccgctt

SEQ ID NO: 5831003 - DNA, 25 bp, Homo sapien
aagcggggcgggtcagcagcggcct

SEQ ID NO: 5831004 - DNA, 25 bp, Homo sapien
tggaagtttctaagactatatatat

SEQ ID NO: 5831005 - DNA, 25 bp, Homo sapien
atatatatagtcttagaaacttcca

SEQ ID NO: 5831006 - DNA, 25 bp, Homo sapien
atggaagtttctaagactatatata

SEQ ID NO: 5831007 - DNA, 25 bp, Homo sapien
tatatatagtcttagaaacttccat

SEQ ID NO: 5831008 - DNA, 25 bp, Homo sapien
aacagaggacaaaactgaacataat

SEQ ID NO: 5831009 - DNA, 25 bp, Homo sapien
attatgttcagttttgtcctctgtt

SEQ ID NO: 5831010 - DNA, 25 bp, Homo sapien
tcacataggaatattcaggtaggta

SEQ ID NO: 5831011 - DNA, 25 bp, Homo sapien
tacctacctgaatattcctatgtga

SEQ ID NO: 5831012 - DNA, 25 bp, Homo sapien
ccataggtcatcgacatcttgagat

SEQ ID NO: 5831013 - DNA, 25 bp, Homo sapien
atctcaagatgtcgatgacctatgg

SEQ ID NO: 5831014 - DNA, 25 bp, Homo sapien
tagtgtgcgtgttggtttgtacttc

SEQ ID NO: 5831015 - DNA, 25 bp, Homo sapien
gaagtacaaaccaacacgcacacta

SEQ ID NO: 5831016 - DNA, 25 bp, Homo sapien
cggaggcgacctgctacttgtaact

SEQ ID NO: 5831017 - DNA, 25 bp, Homo sapien
agttacaagtagcaggtcgcctccg

SEQ ID NO: 5831018 - DNA, 25 bp, Homo sapien
aaccaccacccgcacccgacgccga

SEQ ID NO: 5831019 - DNA, 25 bp, Homo sapien
tcggcgtcgggtgcgggtggtggtt

SEQ ID NO: 5831020 - DNA, 25 bp, Homo sapien
aattcttattgacttattatgacaa

SEQ ID NO: 5831021 - DNA, 25 bp, Homo sapien
ttgtcataataagtcaataagaatt

SEQ ID NO: 5831022 - DNA, 25 bp, Homo sapien
attcttattgacttattatgacaat

SEQ ID NO: 5831023 - DNA, 25 bp, Homo sapien
attgtcataataagtcaataagaat

SEQ ID NO: 5831024 - DNA, 25 bp, Homo sapien
ccgactctctacctataaacgtaaa

SEQ ID NO: 5831025 - DNA, 25 bp, Homo sapien
tttacgtttataggtagagagtcgg

SEQ ID NO: 5831026 - DNA, 25 bp, Homo sapien
tttaccgaggagacgccaggcgtcc

SEQ ID NO: 5831027 - DNA, 25 bp, Homo sapien
ggacgcctggcgtctcctcggtaaa

SEQ ID NO: 5831028 - DNA, 25 bp, Homo sapien
gacctgtatctgtcaccgtaagaaa

SEQ ID NO: 5831029 - DNA, 25 bp, Homo sapien
tttcttacggtgacagatacaggtc

SEQ ID NO: 5831030 - DNA, 25 bp, Homo sapien
cgggtaactaccatctacgtcgtct

SEQ ID NO: 5831031 - DNA, 25 bp, Homo sapien
agacgacgtagatggtagttacccg

SEQ ID NO: 5831032 - DNA, 25 bp, Homo sapien
ggacctcgccgcgtgtcggagaggg

SEQ ID NO: 5831033 - DNA, 25 bp, Homo sapien
ccctctccgacacgcggcgaggtcc

SEQ ID NO: 5831034 - DNA, 25 bp, Homo sapien
ataatgctgcgtcttacctcggacc

SEQ ID NO: 5831035 - DNA, 25 bp, Homo sapien
ggtccgaggtaagacgcagcattat

SEQ ID NO: 5831036 - DNA, 25 bp, Homo sapien
tgagatagtcactgtatcttcaaga

SEQ ID NO: 5831037 - DNA, 25 bp, Homo sapien
tcttgaagatacagtgactatctca

SEQ ID NO: 5831038 - DNA, 25 bp, Homo sapien
tgacatcagaatctctttttatcct

SEQ ID NO: 5831039 - DNA, 25 bp, Homo sapien
aggataaaaagagattctgatgtca

SEQ ID NO: 5831040 - DNA, 25 bp, Homo sapien
gggtgacccccgccagtcgggtgac

SEQ ID NO: 5831041 - DNA, 25 bp, Homo sapien
gtcacccgactggcgggggtcaccc

SEQ ID NO: 5831042 - DNA, 25 bp, Homo sapien
cgggttccacccgtgaccaggacac

SEQ ID NO: 5831043 - DNA, 25 bp, Homo sapien
gtgtcctggtcacgggtggaacccg

SEQ ID NO: 5831044 - DNA, 25 bp, Homo sapien
aacgggacgtcctctgcgacggtgt

SEQ ID NO: 5831045 - DNA, 25 bp, Homo sapien
acaccgtcgcagaggacgtcccgtt

SEQ ID NO: 5831046 - DNA, 25 bp, Homo sapien
cctcggggaggggtctcctcgacca

SEQ ID NO: 5831047 - DNA, 25 bp, Homo sapien
tggtcgaggagacccctccccgagg

SEQ ID NO: 5831048 - DNA, 25 bp, Homo sapien
tctttgctctcatcgttgactatag

SEQ ID NO: 5831049 - DNA, 25 bp, Homo sapien
ctatagtcaacgatgagagcaaaga

SEQ ID NO: 5831050 - DNA, 25 bp, Homo sapien
ccgaagggtgcctgttttagtgccg

SEQ ID NO: 5831051 - DNA, 25 bp, Homo sapien
cggcactaaaacaggcacccttcgg

SEQ ID NO: 5831052 - DNA, 25 bp, Homo sapien
gagccccctggcagggactgggtcg

SEQ ID NO: 5831053 - DNA, 25 bp, Homo sapien
cgacccagtccctgccagggggctc

SEQ ID NO: 5831054 - DNA, 25 bp, Homo sapien
ttccgagggtgtctctacagtacac

SEQ ID NO: 5831055 - DNA, 25 bp, Homo sapien
gtgtactgtagagacaccctcggaa

SEQ ID NO: 5831056 - DNA, 25 bp, Homo sapien
gaccttagattaagaagctttccac

SEQ ID NO: 5831057 - DNA, 25 bp, Homo sapien
gtggaaagcttcttaatctaaggtc

SEQ ID NO: 5831058 - DNA, 25 bp, Homo sapien
cctgtttctcgagaaaggctctact

SEQ ID NO: 5831059 - DNA, 25 bp, Homo sapien
agtagagcctttctcgagaaacagg

SEQ ID NO: 5831060 - DNA, 25 bp, Homo sapien
acgtattagcgtgaatctgtaaaac

SEQ ID NO: 5831061 - DNA, 25 bp, Homo sapien
gttttacagattcacgctaatacgt

SEQ ID NO: 5831062 - DNA, 25 bp, Homo sapien
gtcgtctggcacaccggtgtgttcg

SEQ ID NO: 5831063 - DNA, 25 bp, Homo sapien
cgaacacaccggtgtgccagacgac

SEQ ID NO: 5831064 - DNA, 25 bp, Homo sapien
tcatcctgtcttacttaactttaat

SEQ ID NO: 5831065 - DNA, 25 bp, Homo sapien
attaaagttaagtaagacaggatga

SEQ ID NO: 5831066 - DNA, 25 bp, Homo sapien
gacccgcggcctctcgccggtctcg

SEQ ID NO: 5831067 - DNA, 25 bp, Homo sapien
cgagaccggcgagaggccgcgggtc

SEQ ID NO: 5831068 - DNA, 25 bp, Homo sapien
cgcccaccgcccgacggagcgccgg

SEQ ID NO: 5831069 - DNA, 25 bp, Homo sapien
ccggcgctccgtcgggcggtgggcg

SEQ ID NO: 5831070 - DNA, 25 bp, Homo sapien
cccgcggcctctcgccggtctcgcg

SEQ ID NO: 5831071 - DNA, 25 bp, Homo sapien
cgcgagaccggcgagaggccgcggg

SEQ ID NO: 5831072 - DNA, 25 bp, Homo sapien
agataagcttcctggagcccctcgg

SEQ ID NO: 5831073 - DNA, 25 bp, Homo sapien
ccgaggggctccaggaagcttatct

SEQ ID NO: 5831074 - DNA, 25 bp, Homo sapien
ccctagagagtatacccaattagac

SEQ ID NO: 5831075 - DNA, 25 bp, Homo sapien
gtctaattgggtatactctctaggg

SEQ ID NO: 5831076 - DNA, 25 bp, Homo sapien
ttctagagaaatgtcttccgaaaaa

SEQ ID NO: 5831077 - DNA, 25 bp, Homo sapien
tttttcggaagacatttctctagaa

SEQ ID NO: 5831078 - DNA, 25 bp, Homo sapien
ccggccagtggacgcgcggcgaccg

SEQ ID NO: 5831079 - DNA, 25 bp, Homo sapien
cggtcgccgcgcgtccactggccgg

SEQ ID NO: 5831080 - DNA, 25 bp, Homo sapien
tccggccagtggacgcgcggcgacc

SEQ ID NO: 5831081 - DNA, 25 bp, Homo sapien
ggtcgccgcgcgtccactggccgga

SEQ ID NO: 5831082 - DNA, 25 bp, Homo sapien
ggtaataattggttataccactaaa

SEQ ID NO: 5831083 - DNA, 25 bp, Homo sapien
tttagtggtataaccaattattacc

SEQ ID NO: 5831084 - DNA, 25 bp, Homo sapien
gacggcaaaaggacaaagacaccta

SEQ ID NO: 5831085 - DNA, 25 bp, Homo sapien
taggtgtctttgtccttttgccgtc

SEQ ID NO: 5831086 - DNA, 25 bp, Homo sapien
gagtccctctgcccgtatgtggcca

SEQ ID NO: 5831087 - DNA, 25 bp, Homo sapien
tggccacatacgggcagagggactc

SEQ ID NO: 5831088 - DNA, 25 bp, Homo sapien
tatcgtaagtacaattagtgtcggg

SEQ ID NO: 5831089 - DNA, 25 bp, Homo sapien
cccgacactaattgtacttacgata

SEQ ID NO: 5831090 - DNA, 25 bp, Homo sapien
tggaagaaaagtctacactaaacgt

SEQ ID NO: 5831091 - DNA, 25 bp, Homo sapien
acgtttagtgtagacttttcttcca

SEQ ID NO: 5831092 - DNA, 25 bp, Homo sapien
aggtcttttattcacaaaatgttct

SEQ ID NO: 5831093 - DNA, 25 bp, Homo sapien
agaacattttgtgaataaaagacct

SEQ ID NO: 5831094 - DNA, 25 bp, Homo sapien
ttttattcacaaaatgttcttgtat

SEQ ID NO: 5831095 - DNA, 25 bp, Homo sapien
atacaagaacattttgtgaataaaa

SEQ ID NO: 5831096 - DNA, 25 bp, Homo sapien
tcttttattcacaaaatgttcttgt

SEQ ID NO: 5831097 - DNA, 25 bp, Homo sapien
acaagaacattttgtgaataaaaga

SEQ ID NO: 5831098 - DNA, 25 bp, Homo sapien
aattgacgacaatagtaaagacacc

SEQ ID NO: 5831099 - DNA, 25 bp, Homo sapien
ggtgtctttactattgtcgtcaatt

SEQ ID NO: 5831100 - DNA, 25 bp, Homo sapien
tcctatttcttgatgattctattcg

SEQ ID NO: 5831101 - DNA, 25 bp, Homo sapien
cgaatagaatcatcaagaaatagga

SEQ ID NO: 5831102 - DNA, 25 bp, Homo sapien
aaacagatgtcaacactcaaattag

SEQ ID NO: 5831103 - DNA, 25 bp, Homo sapien
ctaatttgagtgttgacatctgttt

SEQ ID NO: 5831104 - DNA, 25 bp, Homo sapien
agtgctccgttctcgggtgttcctc

SEQ ID NO: 5831105 - DNA, 25 bp, Homo sapien
gaggaacacccgagaacggagcact

SEQ ID NO: 5831106 - DNA, 25 bp, Homo sapien
gtcgaccccaccctccctgcccgta

SEQ ID NO: 5831107 - DNA, 25 bp, Homo sapien
tacgggcagggagggtggggtcgac

SEQ ID NO: 5831108 - DNA, 25 bp, Homo sapien
tcgggacccagtcgggggacaggta

SEQ ID NO: 5831109 - DNA, 25 bp, Homo sapien
tacctgtcccccgactgggtcccga

SEQ ID NO: 5831110 - DNA, 25 bp, Homo sapien
atacatcattactgtgtttttctta

SEQ ID NO: 5831111 - DNA, 25 bp, Homo sapien
taagaaaaacacagtaatgatgtat

SEQ ID NO: 5831112 - DNA, 25 bp, Homo sapien
agtacctatcccgataattcaagaa

SEQ ID NO: 5831113 - DNA, 25 bp, Homo sapien
ttcttgaattatcgggataggtact

SEQ ID NO: 5831114 - DNA, 25 bp, Homo sapien
gactcctgctgttcgggaccctgag

SEQ ID NO: 5831115 - DNA, 25 bp, Homo sapien
ctcagggtcccgaacagcaggagtc

SEQ ID NO: 5831116 - DNA, 25 bp, Homo sapien
ctagtatttttttacaataagaaga

SEQ ID NO: 5831117 - DNA, 25 bp, Homo sapien
tcttcttattgtaaaaaaatactag

SEQ ID NO: 5831118 - DNA, 25 bp, Homo sapien
aactttatgagttaacaatgtaaat

SEQ ID NO: 5831119 - DNA, 25 bp, Homo sapien
atttacattgttaactcataaagtt

SEQ ID NO: 5831120 - DNA, 25 bp, Homo sapien
gcgccactggccgacttgttcgcac

SEQ ID NO: 5831121 - DNA, 25 bp, Homo sapien
gtgcgaacaagtcggccagtggcgc

SEQ ID NO: 5831122 - DNA, 25 bp, Homo sapien
accggtctcgatttttcacaaccag

SEQ ID NO: 5831123 - DNA, 25 bp, Homo sapien
ctggttgtgaaaaatcgagaccggt

SEQ ID NO: 5831124 - DNA, 25 bp, Homo sapien
ttccaccaacttgtctctagaaagg

SEQ ID NO: 5831125 - DNA, 25 bp, Homo sapien
cctttctagagacaagttggtggaa

SEQ ID NO: 5831126 - DNA, 25 bp, Homo sapien
ggtgtctatgtctcgtgtgaggccc

SEQ ID NO: 5831127 - DNA, 25 bp, Homo sapien
gggcctcacacgagacatagacacc

SEQ ID NO: 5831128 - DNA, 25 bp, Homo sapien
gggtcccggccactggtgcacacgt

SEQ ID NO: 5831129 - DNA, 25 bp, Homo sapien
acgtgtgcaccagtggccgggaccc

SEQ ID NO: 5831130 - DNA, 25 bp, Homo sapien
ctaaacaatgtaacgatttacgtac

SEQ ID NO: 5831131 - DNA, 25 bp, Homo sapien
gtacgtaaatcgttacattgtttag

SEQ ID NO: 5831132 - DNA, 25 bp, Homo sapien
atttacactggggatgaagacgaaa

SEQ ID NO: 5831133 - DNA, 25 bp, Homo sapien
tttcgtcttcatccccagtgtaaat

SEQ ID NO: 5831134 - DNA, 25 bp, Homo sapien
ccacccttctgagatctattgtaaa

SEQ ID NO: 5831135 - DNA, 25 bp, Homo sapien
tttacaatagatctcagaagggtgg

SEQ ID NO: 5831136 - DNA, 25 bp, Homo sapien
tggtggtcggtctgttgacagcaac

SEQ ID NO: 5831137 - DNA, 25 bp, Homo sapien
gttgctgtcaacagaccgaccacca

SEQ ID NO: 5831138 - DNA, 25 bp, Homo sapien
ggtccatcggacctcttccatctcc

SEQ ID NO: 5831139 - DNA, 25 bp, Homo sapien
ggagatggaagaggtccgatggacc

SEQ ID NO: 5831140 - DNA, 25 bp, Homo sapien
gagggggtcgacggatgtccggacg

SEQ ID NO: 5831141 - DNA, 25 bp, Homo sapien
cgtccggacatccgtcgaccccctc

SEQ ID NO: 5831142 - DNA, 25 bp, Homo sapien
agatggaattaacaatatttgtcgg

SEQ ID NO: 5831143 - DNA, 25 bp, Homo sapien
ccgacaaatattgttaattccatct

SEQ ID NO: 5831144 - DNA, 25 bp, Homo sapien
cagtagtggaactcacacatgggga

SEQ ID NO: 5831145 - DNA, 25 bp, Homo sapien
tccccatgtgtgagttccactactg

SEQ ID NO: 5831146 - DNA, 25 bp, Homo sapien
cactccctcacctccgcccggcgac

SEQ ID NO: 5831147 - DNA, 25 bp, Homo sapien
gtcgccgggcggaggtgagggagtg

SEQ ID NO: 5831148 - DNA, 25 bp, Homo sapien
cgcgaagaggccgttcgctctggga

SEQ ID NO: 5831149 - DNA, 25 bp, Homo sapien
tcccagagcgaacggcctcttcgcg

SEQ ID NO: 5831150 - DNA, 25 bp, Homo sapien
aacggccggaggctcctccaccagt

SEQ ID NO: 5831151 - DNA, 25 bp, Homo sapien
actggtggaggagcctccggccgtt

SEQ ID NO: 5831152 - DNA, 25 bp, Homo sapien
cccgcgcccctccagtgtcccgagg

SEQ ID NO: 5831153 - DNA, 25 bp, Homo sapien
cctcgggacactggaggggcgcggg

SEQ ID NO: 5831154 - DNA, 25 bp, Homo sapien
gtcctaaatacagtttaagatcaac

SEQ ID NO: 5831155 - DNA, 25 bp, Homo sapien
gttgatcttaaactgtatttaggac

SEQ ID NO: 5831156 - DNA, 25 bp, Homo sapien
ctctttcaggtcaggtctctaccct

SEQ ID NO: 5831157 - DNA, 25 bp, Homo sapien
agggtagagacctgacctgaaagag

SEQ ID NO: 5831158 - DNA, 25 bp, Homo sapien
cccgacgaagtcacaataatctgga

SEQ ID NO: 5831159 - DNA, 25 bp, Homo sapien
tccagattattgtgacttcgtcggg

SEQ ID NO: 5831160 - DNA, 25 bp, Homo sapien
actgtgtctattaactatttcaact

SEQ ID NO: 5831161 - DNA, 25 bp, Homo sapien
agttgaaatagttaatagacacagt

SEQ ID NO: 5831162 - DNA, 25 bp, Homo sapien
gggccgcggctgactccgctcccga

SEQ ID NO: 5831163 - DNA, 25 bp, Homo sapien
tcgggagcggagtcagccgcggccc

SEQ ID NO: 5831164 - DNA, 25 bp, Homo sapien
tcctgaaccccgctccgaggggagt

SEQ ID NO: 5831165 - DNA, 25 bp, Homo sapien
actcccctcggagcggggttcagga

SEQ ID NO: 5831166 - DNA, 25 bp, Homo sapien
accagtcattctgtccgaacctaaa

SEQ ID NO: 5831167 - DNA, 25 bp, Homo sapien
tttaggttcggacagaatgactggt

SEQ ID NO: 5831168 - DNA, 25 bp, Homo sapien
tagtctctgtaaaactaatcaataa

SEQ ID NO: 5831169 - DNA, 25 bp, Homo sapien
ttattgattagttttacagagacta

SEQ ID NO: 5831170 - DNA, 25 bp, Homo sapien
agtctctgtaaaactaatcaataat

SEQ ID NO: 5831171 - DNA, 25 bp, Homo sapien
attattgattagttttacagagact

SEQ ID NO: 5831172 - DNA, 25 bp, Homo sapien
tatattccactttctgaagaaaaat

SEQ ID NO: 5831173 - DNA, 25 bp, Homo sapien
atttttcttcagaaagtggaatata

SEQ ID NO: 5831174 - DNA, 25 bp, Homo sapien
aaactcgtaatccaaacctcaacac

SEQ ID NO: 5831175 - DNA, 25 bp, Homo sapien
gtgttgaggtttggattacgagttt

SEQ ID NO: 5831176 - DNA, 25 bp, Homo sapien
aaaaacacagatatcagtatctgat

SEQ ID NO: 5831177 - DNA, 25 bp, Homo sapien
atcagatactgatatctgtgttttt

SEQ ID NO: 5831178 - DNA, 25 bp, Homo sapien
tgacaccctccaactcaaggtacgt

SEQ ID NO: 5831179 - DNA, 25 bp, Homo sapien
acgtaccttgagttggagggtgtca

SEQ ID NO: 5831180 - DNA, 25 bp, Homo sapien
gtggaaagacgtgacatgggcaacc

SEQ ID NO: 5831181 - DNA, 25 bp, Homo sapien
ggttgcccatgtcacgtctttccac

SEQ ID NO: 5831182 - DNA, 25 bp, Homo sapien
gtcgaagtacgaaccgtggtcgtta

SEQ ID NO: 5831183 - DNA, 25 bp, Homo sapien
taacgaccacggttcgtacttcgac

SEQ ID NO: 5831184 - DNA, 25 bp, Homo sapien
agaacctgtgcggtcagtcaaagaa

SEQ ID NO: 5831185 - DNA, 25 bp, Homo sapien
ttctttgactgaccgcacaggttct

SEQ ID NO: 5831186 - DNA, 25 bp, Homo sapien
cgtcggtcccgacgtccgaggtgga

SEQ ID NO: 5831187 - DNA, 25 bp, Homo sapien
tccacctcggacgtcgggaccgacg

SEQ ID NO: 5831188 - DNA, 25 bp, Homo sapien
agaggacccggaggtgcggtcgagg

SEQ ID NO: 5831189 - DNA, 25 bp, Homo sapien
cctcgaccgcacctccgggtcctct

SEQ ID NO: 5831190 - DNA, 25 bp, Homo sapien
tgatatcagcaataattattaagaa

SEQ ID NO: 5831191 - DNA, 25 bp, Homo sapien
ttcttaataattattgctgatatca

SEQ ID NO: 5831192 - DNA, 25 bp, Homo sapien
cattcttgatatcagcaataattat

SEQ ID NO: 5831193 - DNA, 25 bp, Homo sapien
ataattattgctgatatcaagaatg

SEQ ID NO: 5831194 - DNA, 25 bp, Homo sapien
cacttaagtagatagagaccagcgt

SEQ ID NO: 5831195 - DNA, 25 bp, Homo sapien
acgctggtctctatctacttaagtg

SEQ ID NO: 5831196 - DNA, 25 bp, Homo sapien
gtgcaggcatgagggggtctacacg

SEQ ID NO: 5831197 - DNA, 25 bp, Homo sapien
cgtgtagaccccctcatgcctgcac

SEQ ID NO: 5831198 - DNA, 25 bp, Homo sapien
ggactccggtttccgaccgtgagaa

SEQ ID NO: 5831199 - DNA, 25 bp, Homo sapien
ttctcacggtcggaaaccggagtcc

SEQ ID NO: 5831200 - DNA, 25 bp, Homo sapien
tattcacctcccgaagttagtaaaa

SEQ ID NO: 5831201 - DNA, 25 bp, Homo sapien
ttttactaacttcgggaggtgaata

SEQ ID NO: 5831202 - DNA, 25 bp, Homo sapien
gcaccaggaccagaagtgagatccg

SEQ ID NO: 5831203 - DNA, 25 bp, Homo sapien
cggatctcacttctggtcctggtgc

SEQ ID NO: 5831204 - DNA, 25 bp, Homo sapien
aatcaaaaacgtccaaatacactaa

SEQ ID NO: 5831205 - DNA, 25 bp, Homo sapien
ttagtgtatttggacgtttttgatt

SEQ ID NO: 5831206 - DNA, 25 bp, Homo sapien
tatcctgcacaaccatcccggtgtt

SEQ ID NO: 5831207 - DNA, 25 bp, Homo sapien
aacaccgggatggttgtgcaggata

SEQ ID NO: 5831208 - DNA, 25 bp, Homo sapien
acccctgggtccaggttcactggtg

SEQ ID NO: 5831209 - DNA, 25 bp, Homo sapien
caccagtgaacctggacccaggggt

SEQ ID NO: 5831210 - DNA, 25 bp, Homo sapien
gtggtcgactctggtcccagacgac

SEQ ID NO: 5831211 - DNA, 25 bp, Homo sapien
gtcgtctgggaccagagtcgaccac

SEQ ID NO: 5831212 - DNA, 25 bp, Homo sapien
attgaaaaataactgctatataaag

SEQ ID NO: 5831213 - DNA, 25 bp, Homo sapien
ctttatatagcagttatttttcaat

SEQ ID NO: 5831214 - DNA, 25 bp, Homo sapien
tcgtcccgaatttaatcaatggtaa

SEQ ID NO: 5831215 - DNA, 25 bp, Homo sapien
ttaccattgattaaattcgggacga

SEQ ID NO: 5831216 - DNA, 25 bp, Homo sapien
atagttgattcaattatatgttgaa

SEQ ID NO: 5831217 - DNA, 25 bp, Homo sapien
ttcaacatataattgaatcaactat

SEQ ID NO: 5831218 - DNA, 25 bp, Homo sapien
gcagcggtccgaggcgcgggcccag

SEQ ID NO: 5831219 - DNA, 25 bp, Homo sapien
ctgggcccgcgcctcggaccgctgc

SEQ ID NO: 5831220 - DNA, 25 bp, Homo sapien
ccgcggccctatcgcgccccgacgc

SEQ ID NO: 5831221 - DNA, 25 bp, Homo sapien
gcgtcggggcgcgatagggccgcgg

SEQ ID NO: 5831222 - DNA, 25 bp, Homo sapien
gaactccttgtttagaccttgaatg

SEQ ID NO: 5831223 - DNA, 25 bp, Homo sapien
cattcaaggtctaaacaaggagttc

SEQ ID NO: 5831224 - DNA, 25 bp, Homo sapien
attatacatatgcaaaaggtactag

SEQ ID NO: 5831225 - DNA, 25 bp, Homo sapien
ctagtaccttttgcatatgtataat

SEQ ID NO: 5831226 - DNA, 25 bp, Homo sapien
cgaaggactcggttctaccgcacct

SEQ ID NO: 5831227 - DNA, 25 bp, Homo sapien
aggtgcggtagaaccgagtccttcg

SEQ ID NO: 5831228 - DNA, 25 bp, Homo sapien
ttctgagaactgtaagttacattat

SEQ ID NO: 5831229 - DNA, 25 bp, Homo sapien
ataatgtaacttacagttctcagaa

SEQ ID NO: 5831230 - DNA, 25 bp, Homo sapien
atgagcaaaaacctaaatctaaact

SEQ ID NO: 5831231 - DNA, 25 bp, Homo sapien
agtttagatttaggtttttgctcat

SEQ ID NO: 5831232 - DNA, 25 bp, Homo sapien
ctggagactgccgtcgagacgtcgc

SEQ ID NO: 5831233 - DNA, 25 bp, Homo sapien
gcgacgtctcgacggcagtctccag

SEQ ID NO: 5831234 - DNA, 25 bp, Homo sapien
cgcatgactgtatacccacacacgt

SEQ ID NO: 5831235 - DNA, 25 bp, Homo sapien
acgtgtgtgggtatacagtcatgcg

SEQ ID NO: 5831236 - DNA, 25 bp, Homo sapien
gacacacgcacaagcccctagacgt

SEQ ID NO: 5831237 - DNA, 25 bp, Homo sapien
acgtctaggggcttgtgcgtgtgtc

SEQ ID NO: 5831238 - DNA, 25 bp, Homo sapien
gatgaaacatagttcctcaagttct

SEQ ID NO: 5831239 - DNA, 25 bp, Homo sapien
agaacttgaggaactatgtttcatc

SEQ ID NO: 5831240 - DNA, 25 bp, Homo sapien
attcaataatatgaccttaaacaag

SEQ ID NO: 5831241 - DNA, 25 bp, Homo sapien
cttgtttaaggtcatattattgaat

SEQ ID NO: 5831242 - DNA, 25 bp, Homo sapien
agtagattcaataatatgaccttaa

SEQ ID NO: 5831243 - DNA, 25 bp, Homo sapien
ttaaggtcatattattgaatctact

SEQ ID NO: 5831244 - DNA, 25 bp, Homo sapien
gacggtacctaccgtcctccctgtc

SEQ ID NO: 5831245 - DNA, 25 bp, Homo sapien
gacagggaggacggtaggtaccgtc

SEQ ID NO: 5831246 - DNA, 25 bp, Homo sapien
gctgacatcgacgttccggaaccag

SEQ ID NO: 5831247 - DNA, 25 bp, Homo sapien
ctggttccggaacgtcgatgtcagc

SEQ ID NO: 5831248 - DNA, 25 bp, Homo sapien
aactaccactgccttcctcaatcat

SEQ ID NO: 5831249 - DNA, 25 bp, Homo sapien
atgattgaggaaggcagtggtagtt

SEQ ID NO: 5831250 - DNA, 25 bp, Homo sapien
gtgtaaacacctacaaaaactggag

SEQ ID NO: 5831251 - DNA, 25 bp, Homo sapien
ctccagtttttgtaggtgtttacac

SEQ ID NO: 5831252 - DNA, 25 bp, Homo sapien
cgccgcggccgtgtcaggctccccg

SEQ ID NO: 5831253 - DNA, 25 bp, Homo sapien
cggggagcctgacacggccgcggcg

SEQ ID NO: 5831254 - DNA, 25 bp, Homo sapien
cacgccgcggccgtgtcaggctccc

SEQ ID NO: 5831255 - DNA, 25 bp, Homo sapien
gggagcctgacacggccgcggcgtg

SEQ ID NO: 5831256 - DNA, 25 bp, Homo sapien
gtgtgaacatgaaagtcaaaagtaa

SEQ ID NO: 5831257 - DNA, 25 bp, Homo sapien
ttacttttgactttcatgttcacac

SEQ ID NO: 5831258 - DNA, 25 bp, Homo sapien
tccaccctccgccctggcccgaccg

SEQ ID NO: 5831259 - DNA, 25 bp, Homo sapien
cggtcgggccagggcggagggtgga

SEQ ID NO: 5831260 - DNA, 25 bp, Homo sapien
ccgatctgactcgtgggcggggtcc

SEQ ID NO: 5831261 - DNA, 25 bp, Homo sapien
ggaccccgcccacgagtcagatcgg

SEQ ID NO: 5831262 - DNA, 25 bp, Homo sapien
cgccgccgcaccgagccgaagcgcc

SEQ ID NO: 5831263 - DNA, 25 bp, Homo sapien
ggcgcttcggctcggtgcggcggcg

SEQ ID NO: 5831264 - DNA, 25 bp, Homo sapien
gccgaagcgcccaggcccgcgcgcc

SEQ ID NO: 5831265 - DNA, 25 bp, Homo sapien
ggcgcgcgggcctgggcgcttcggc

SEQ ID NO: 5831266 - DNA, 25 bp, Homo sapien
agccgaagcgcccaggcccgcgcgc

SEQ ID NO: 5831267 - DNA, 25 bp, Homo sapien
gcgcgcgggcctgggcgcttcggct

SEQ ID NO: 5831268 - DNA, 25 bp, Homo sapien
aagagaaaggacgatcaacatccac

SEQ ID NO: 5831269 - DNA, 25 bp, Homo sapien
gtggatgttgatcgtcctttctctt

SEQ ID NO: 5831270 - DNA, 25 bp, Homo sapien
ccgaggcccgaacggccgaccggca

SEQ ID NO: 5831271 - DNA, 25 bp, Homo sapien
tgccggtcggccgttcgggcctcgg

SEQ ID NO: 5831272 - DNA, 25 bp, Homo sapien
gctcgcacgccgaggcccgaacggc

SEQ ID NO: 5831273 - DNA, 25 bp, Homo sapien
gccgttcgggcctcggcgtgcgagc

SEQ ID NO: 5831274 - DNA, 25 bp, Homo sapien
tgcgagcgccgcctcggcgggtcag

SEQ ID NO: 5831275 - DNA, 25 bp, Homo sapien
ctgacccgccgaggcggcgctcgca

SEQ ID NO: 5831276 - DNA, 25 bp, Homo sapien
gagtgtgacaccttcagtgactgcc

SEQ ID NO: 5831277 - DNA, 25 bp, Homo sapien
ggcagtcactgaaggtgtcacactc

SEQ ID NO: 5831278 - DNA, 25 bp, Homo sapien
ccgagagagagctagcgtcttaaat

SEQ ID NO: 5831279 - DNA, 25 bp, Homo sapien
atttaagacgctagctctctctcgg

SEQ ID NO: 5831280 - DNA, 25 bp, Homo sapien
ggagtctcagtggtgttctcccggg

SEQ ID NO: 5831281 - DNA, 25 bp, Homo sapien
cccgggagaacaccactgagactcc

SEQ ID NO: 5831282 - DNA, 25 bp, Homo sapien
tacgacagactatttcgaattactc

SEQ ID NO: 5831283 - DNA, 25 bp, Homo sapien
gagtaattcgaaatagtctgtcgta

SEQ ID NO: 5831284 - DNA, 25 bp, Homo sapien
tccttggaccacttgataaagttta

SEQ ID NO: 5831285 - DNA, 25 bp, Homo sapien
taaactttatcaagtggtccaagga

SEQ ID NO: 5831286 - DNA, 25 bp, Homo sapien
ttatttaaacttcctgagataaaat

SEQ ID NO: 5831287 - DNA, 25 bp, Homo sapien
attttatctcaggaagtttaaataa

SEQ ID NO: 5831288 - DNA, 25 bp, Homo sapien
ggaccaccccgcagtcgcgggcgcc

SEQ ID NO: 5831289 - DNA, 25 bp, Homo sapien
ggcgcccgcgactgcggggtggtcc

SEQ ID NO: 5831290 - DNA, 25 bp, Homo sapien
cgtccgtaagaacaatggttatttg

SEQ ID NO: 5831291 - DNA, 25 bp, Homo sapien
caaataaccattgttcttacggacg

SEQ ID NO: 5831292 - DNA, 25 bp, Homo sapien
cactacaatgaaattcgacggaagg

SEQ ID NO: 5831293 - DNA, 25 bp, Homo sapien
ccttccgtcgaatttcattgtagtg

SEQ ID NO: 5831294 - DNA, 25 bp, Homo sapien
cttcagacacctatacaggtaaggg

SEQ ID NO: 5831295 - DNA, 25 bp, Homo sapien
cccttacctgtataggtgtctgaag

SEQ ID NO: 5831296 - DNA, 25 bp, Homo sapien
atattaagaaaaactaccagaacac

SEQ ID NO: 5831297 - DNA, 25 bp, Homo sapien
gtgttctggtagtttttcttaatat

SEQ ID NO: 5831298 - DNA, 25 bp, Homo sapien
agacaacgagaatctatctatcgac

SEQ ID NO: 5831299 - DNA, 25 bp, Homo sapien
gtcgatagatagattctcgttgtct

SEQ ID NO: 5831300 - DNA, 25 bp, Homo sapien
acgctaacgcctacccgacaaggta

SEQ ID NO: 5831301 - DNA, 25 bp, Homo sapien
taccttgtcgggtaggcgttagcgt

SEQ ID NO: 5831302 - DNA, 25 bp, Homo sapien
gcggcctcgggtcgctccgggtccc

SEQ ID NO: 5831303 - DNA, 25 bp, Homo sapien
gggacccggagcgacccgaggccgc

SEQ ID NO: 5831304 - DNA, 25 bp, Homo sapien
cgcggcctcgggtcgctccgggtcc

SEQ ID NO: 5831305 - DNA, 25 bp, Homo sapien
ggacccggagcgacccgaggccgcg

SEQ ID NO: 5831306 - DNA, 25 bp, Homo sapien
ccgcggcctcgggtcgctccgggtc

SEQ ID NO: 5831307 - DNA, 25 bp, Homo sapien
gacccggagcgacccgaggccgcgg

SEQ ID NO: 5831308 - DNA, 25 bp, Homo sapien
gccgcggcctcgggtcgctccgggt

SEQ ID NO: 5831309 - DNA, 25 bp, Homo sapien
acccggagcgacccgaggccgcggc

SEQ ID NO: 5831310 - DNA, 25 bp, Homo sapien
tccggtgggagcttgcaggcgacag

SEQ ID NO: 5831311 - DNA, 25 bp, Homo sapien
ctgtcgcctgcaagctcccaccgga

SEQ ID NO: 5831312 - DNA, 25 bp, Homo sapien
aaacattaagctcccgtcctagacc

SEQ ID NO: 5831313 - DNA, 25 bp, Homo sapien
ggtctaggacgggagcttaatgttt

SEQ ID NO: 5831314 - DNA, 25 bp, Homo sapien
ctcacagtgtgagaggactcaccgt

SEQ ID NO: 5831315 - DNA, 25 bp, Homo sapien
acggtgagtcctctcacactgtgag

SEQ ID NO: 5831316 - DNA, 25 bp, Homo sapien
gcgtctggaagaattacgttcatct

SEQ ID NO: 5831317 - DNA, 25 bp, Homo sapien
agatgaacgtaattcttccagacgc

SEQ ID NO: 5831318 - DNA, 25 bp, Homo sapien
gatcttcaggtcaaacttctcatgt

SEQ ID NO: 5831319 - DNA, 25 bp, Homo sapien
acatgagaagtttgacctgaagatc

SEQ ID NO: 5831320 - DNA, 25 bp, Homo sapien
ctattagagttgctggttttgatct

SEQ ID NO: 5831321 - DNA, 25 bp, Homo sapien
agatcaaaaccagcaactctaatag

SEQ ID NO: 5831322 - DNA, 25 bp, Homo sapien
aaagttcaagtatcaagaattatta

SEQ ID NO: 5831323 - DNA, 25 bp, Homo sapien
taataattcttgatacttgaacttt

SEQ ID NO: 5831324 - DNA, 25 bp, Homo sapien
ttcaagtatcaagaattattactat

SEQ ID NO: 5831325 - DNA, 25 bp, Homo sapien
atagtaataattcttgatacttgaa

SEQ ID NO: 5831326 - DNA, 25 bp, Homo sapien
agttcaagtatcaagaattattact

SEQ ID NO: 5831327 - DNA, 25 bp, Homo sapien
agtaataattcttgatacttgaact

SEQ ID NO: 5831328 - DNA, 25 bp, Homo sapien
tttggagtaccgtaacgccgacacg

SEQ ID NO: 5831329 - DNA, 25 bp, Homo sapien
cgtgtcggcgttacggtactccaaa

SEQ ID NO: 5831330 - DNA, 25 bp, Homo sapien
gtacccggtggtcagccctctcggt

SEQ ID NO: 5831331 - DNA, 25 bp, Homo sapien
accgagagggctgaccaccgggtac

SEQ ID NO: 5831332 - DNA, 25 bp, Homo sapien
actaacatcgtaatcgctacatcgc

SEQ ID NO: 5831333 - DNA, 25 bp, Homo sapien
gcgatgtagcgattacgatgttagt

SEQ ID NO: 5831334 - DNA, 25 bp, Homo sapien
cgtggtagttgtgaggtaaactgtt

SEQ ID NO: 5831335 - DNA, 25 bp, Homo sapien
aacagtttacctcacaactaccacg

SEQ ID NO: 5831336 - DNA, 25 bp, Homo sapien
gcaccccgtccgccgccggacccac

SEQ ID NO: 5831337 - DNA, 25 bp, Homo sapien
gtgggtccggcggcggacggggtgc

SEQ ID NO: 5831338 - DNA, 25 bp, Homo sapien
cggacgttcacacccggacccagaa

SEQ ID NO: 5831339 - DNA, 25 bp, Homo sapien
ttctgggtccgggtgtgaacgtccg

SEQ ID NO: 5831340 - DNA, 25 bp, Homo sapien
tctggaccccgttacacaggtatac

SEQ ID NO: 5831341 - DNA, 25 bp, Homo sapien
gtatacctgtgtaacggggtccaga

SEQ ID NO: 5831342 - DNA, 25 bp, Homo sapien
ggaaggcccagagccctgagctcag

SEQ ID NO: 5831343 - DNA, 25 bp, Homo sapien
ctgagctcagggctctgggccttcc

SEQ ID NO: 5831344 - DNA, 25 bp, Homo sapien
ggaccgagatgctcggccgactctc

SEQ ID NO: 5831345 - DNA, 25 bp, Homo sapien
gagagtcggccgagcatctcggtcc

SEQ ID NO: 5831346 - DNA, 25 bp, Homo sapien
gattatttacaaaaatagtgtcgaa

SEQ ID NO: 5831347 - DNA, 25 bp, Homo sapien
ttcgacactatttttgtaaataatc

SEQ ID NO: 5831348 - DNA, 25 bp, Homo sapien
aaaccccatggacaatactgaaagt

SEQ ID NO: 5831349 - DNA, 25 bp, Homo sapien
actttcagtattgtccatggggttt

SEQ ID NO: 5831350 - DNA, 25 bp, Homo sapien
aagaagaacgtatttggagacgacc

SEQ ID NO: 5831351 - DNA, 25 bp, Homo sapien
ggtcgtctccaaatacgttcttctt

SEQ ID NO: 5831352 - DNA, 25 bp, Homo sapien
gaaagaatcttttacctagttaata

SEQ ID NO: 5831353 - DNA, 25 bp, Homo sapien
tattaactaggtaaaagattctttc

SEQ ID NO: 5831354 - DNA, 25 bp, Homo sapien
tgacagaaggaggtgtaacccctct

SEQ ID NO: 5831355 - DNA, 25 bp, Homo sapien
agaggggttacacctccttctgtca

SEQ ID NO: 5831356 - DNA, 25 bp, Homo sapien
ataatagtcttacagatatacagac

SEQ ID NO: 5831357 - DNA, 25 bp, Homo sapien
gtctgtatatctgtaagactattat

SEQ ID NO: 5831358 - DNA, 25 bp, Homo sapien
cttgtccttccacttccgcctacag

SEQ ID NO: 5831359 - DNA, 25 bp, Homo sapien
ctgtaggcggaagtggaaggacaag

SEQ ID NO: 5831360 - DNA, 25 bp, Homo sapien
caagaatgccattgtagacgaagat

SEQ ID NO: 5831361 - DNA, 25 bp, Homo sapien
atcttcgtctacaatggcattcttg

SEQ ID NO: 5831362 - DNA, 25 bp, Homo sapien
aaaggatatcgatgtttcagttttc

SEQ ID NO: 5831363 - DNA, 25 bp, Homo sapien
gaaaactgaaacatcgatatccttt

SEQ ID NO: 5831364 - DNA, 25 bp, Homo sapien
gagtcctgcgggactcccactgcgg

SEQ ID NO: 5831365 - DNA, 25 bp, Homo sapien
ccgcagtgggagtcccgcaggactc

SEQ ID NO: 5831366 - DNA, 25 bp, Homo sapien
gccctaccaggtcctgggcggttgg

SEQ ID NO: 5831367 - DNA, 25 bp, Homo sapien
ccaaccgcccaggacctggtagggc

SEQ ID NO: 5831368 - DNA, 25 bp, Homo sapien
atacaggtcccgcggtcctcgtcct

SEQ ID NO: 5831369 - DNA, 25 bp, Homo sapien
aggacgaggaccgcgggacctgtat

SEQ ID NO: 5831370 - DNA, 25 bp, Homo sapien
agaacaggactccacgaactttgcc

SEQ ID NO: 5831371 - DNA, 25 bp, Homo sapien
ggcaaagttcgtggagtcctgttct

SEQ ID NO: 5831372 - DNA, 25 bp, Homo sapien
ggtatctcgaaaggtattggagtaa

SEQ ID NO: 5831373 - DNA, 25 bp, Homo sapien
ttactccaatacctttcgagatacc

SEQ ID NO: 5831374 - DNA, 25 bp, Homo sapien
gtataaacccgacctctccaagaac

SEQ ID NO: 5831375 - DNA, 25 bp, Homo sapien
gttcttggagaggtcgggtttatac

SEQ ID NO: 5831376 - DNA, 25 bp, Homo sapien
tccgtccccacccccctcgctcacc

SEQ ID NO: 5831377 - DNA, 25 bp, Homo sapien
ggtgagcgaggggggtggggacgga

SEQ ID NO: 5831378 - DNA, 25 bp, Homo sapien
gacgtctccggtgtccgtccccacc

SEQ ID NO: 5831379 - DNA, 25 bp, Homo sapien
ggtggggacggacaccggagacgtc

SEQ ID NO: 5831380 - DNA, 25 bp, Homo sapien
tcacacggattattctttagtcaac

SEQ ID NO: 5831381 - DNA, 25 bp, Homo sapien
gttgactaaagaataatccgtgtga

SEQ ID NO: 5831382 - DNA, 25 bp, Homo sapien
ggggtgggctatcggcgggacgtcg

SEQ ID NO: 5831383 - DNA, 25 bp, Homo sapien
cgacgtcccgccgatagcccacccc

SEQ ID NO: 5831384 - DNA, 25 bp, Homo sapien
gtccgattaaaggtgaagatctcct

SEQ ID NO: 5831385 - DNA, 25 bp, Homo sapien
aggagatcttcacctttaatcggac

SEQ ID NO: 5831386 - DNA, 25 bp, Homo sapien
ggaagtatacgtgttagattatata

SEQ ID NO: 5831387 - DNA, 25 bp, Homo sapien
tatataatctaacacgtatacttcc

SEQ ID NO: 5831388 - DNA, 25 bp, Homo sapien
tgggtctacgattcccattcactat

SEQ ID NO: 5831389 - DNA, 25 bp, Homo sapien
atagtgaatgggaatcgtagaccca

SEQ ID NO: 5831390 - DNA, 25 bp, Homo sapien
ttccgagaaccaagaaccaggaagt

SEQ ID NO: 5831391 - DNA, 25 bp, Homo sapien
acttcctggttcttggttctcggaa

SEQ ID NO: 5831392 - DNA, 25 bp, Homo sapien
ccccgacgcaggtggacagcccggg

SEQ ID NO: 5831393 - DNA, 25 bp, Homo sapien
cccgggctgtccacctgcgtcgggg

SEQ ID NO: 5831394 - DNA, 25 bp, Homo sapien
ggcccccgacgcaggtggacagccc

SEQ ID NO: 5831395 - DNA, 25 bp, Homo sapien
gggctgtccacctgcgtcgggggcc

SEQ ID NO: 5831396 - DNA, 25 bp, Homo sapien
gacccctgtgcgaggcccccgacgc

SEQ ID NO: 5831397 - DNA, 25 bp, Homo sapien
gcgtcgggggcctcgcacaggggtc

SEQ ID NO: 5831398 - DNA, 25 bp, Homo sapien
tcgaaggtggcaggcgctcttccgc

SEQ ID NO: 5831399 - DNA, 25 bp, Homo sapien
gcggaagagcgcctgccaccttcga

SEQ ID NO: 5831400 - DNA, 25 bp, Homo sapien
agaacttaatgaaatgagtcgtcag

SEQ ID NO: 5831401 - DNA, 25 bp, Homo sapien
ctgacgactcatttcattaagttct

SEQ ID NO: 5831402 - DNA, 25 bp, Homo sapien
cgcagcggctgtggagactctattt

SEQ ID NO: 5831403 - DNA, 25 bp, Homo sapien
aaatagagtctccacagccgctgcg

SEQ ID NO: 5831404 - DNA, 25 bp, Homo sapien
tcggcgccccactcgggccggtcga

SEQ ID NO: 5831405 - DNA, 25 bp, Homo sapien
tcgaccggcccgagtggggcgccga

SEQ ID NO: 5831406 - DNA, 25 bp, Homo sapien
aaatttctatttagactgagtgaga

SEQ ID NO: 5831407 - DNA, 25 bp, Homo sapien
tctcactcagtctaaatagaaattt

SEQ ID NO: 5831408 - DNA, 25 bp, Homo sapien
cggtcgtcactgtttgtacgtcact

SEQ ID NO: 5831409 - DNA, 25 bp, Homo sapien
agtgacgtacaaacagtgacgaccg

SEQ ID NO: 5831410 - DNA, 25 bp, Homo sapien
cgtcgagacgtctttgaaacagaac

SEQ ID NO: 5831411 - DNA, 25 bp, Homo sapien
gttctgtttcaaagacgtctcgacg

SEQ ID NO: 5831412 - DNA, 25 bp, Homo sapien
tatgttatcgaaccttacacttaca

SEQ ID NO: 5831413 - DNA, 25 bp, Homo sapien
tgtaagtgtaaggttcgataacata

SEQ ID NO: 5831414 - DNA, 25 bp, Homo sapien
aagaacgtctcgcccgagtacggtc

SEQ ID NO: 5831415 - DNA, 25 bp, Homo sapien
gaccgtactcgggcgagacgttctt

SEQ ID NO: 5831416 - DNA, 25 bp, Homo sapien
gaccagatagacctttaaatttcag

SEQ ID NO: 5831417 - DNA, 25 bp, Homo sapien
ctgaaatttaaaggtctatctggtc

SEQ ID NO: 5831418 - DNA, 25 bp, Homo sapien
gacgccacaggcgccgcccgcaggt

SEQ ID NO: 5831419 - DNA, 25 bp, Homo sapien
acctgcgggcggcgcctgtggcgtc

SEQ ID NO: 5831420 - DNA, 25 bp, Homo sapien
cgccacaggcgccgcccgcaggtcg

SEQ ID NO: 5831421 - DNA, 25 bp, Homo sapien
cgacctgcgggcggcgcctgtggcg

SEQ ID NO: 5831422 - DNA, 25 bp, Homo sapien
aataattaggaatatgttgagttac

SEQ ID NO: 5831423 - DNA, 25 bp, Homo sapien
gtaactcaacatattcctaattatt

SEQ ID NO: 5831424 - DNA, 25 bp, Homo sapien
ggtgaatccttatagtaacagtttg

SEQ ID NO: 5831425 - DNA, 25 bp, Homo sapien
caaactgttactataaggattcacc

SEQ ID NO: 5831426 - DNA, 25 bp, Homo sapien
tcaaaacctaagttcaacacttggt

SEQ ID NO: 5831427 - DNA, 25 bp, Homo sapien
accaagtgttgaacttaggttttga

SEQ ID NO: 5831428 - DNA, 25 bp, Homo sapien
cttggacaggactctacacgtgtac

SEQ ID NO: 5831429 - DNA, 25 bp, Homo sapien
gtacacgtgtagagtcctgtccaag

SEQ ID NO: 5831430 - DNA, 25 bp, Homo sapien
gtggccgaaacctcaacaggaaaac

SEQ ID NO: 5831431 - DNA, 25 bp, Homo sapien
gttttcctgttgaggtttcggccac

SEQ ID NO: 5831432 - DNA, 25 bp, Homo sapien
agaacttaggtcctgtcgaaaactc

SEQ ID NO: 5831433 - DNA, 25 bp, Homo sapien
gagttttcgacaggacctaagttct

SEQ ID NO: 5831434 - DNA, 25 bp, Homo sapien
ctctggcccgcgttgacctcgtccc

SEQ ID NO: 5831435 - DNA, 25 bp, Homo sapien
gggacgaggtcaacgcgggccagag

SEQ ID NO: 5831436 - DNA, 25 bp, Homo sapien
ttggttaggacaggccgctcgggac

SEQ ID NO: 5831437 - DNA, 25 bp, Homo sapien
gtcccgagcggcctgtcctaaccaa

SEQ ID NO: 5831438 - DNA, 25 bp, Homo sapien
actggactctttcgacgcatcgtat

SEQ ID NO: 5831439 - DNA, 25 bp, Homo sapien
atacgatgcgtcgaaagagtccagt

SEQ ID NO: 5831440 - DNA, 25 bp, Homo sapien
tcggttgtacgagggattaagattc

SEQ ID NO: 5831441 - DNA, 25 bp, Homo sapien
gaatcttaatccctcgtacaaccga

SEQ ID NO: 5831442 - DNA, 25 bp, Homo sapien
tccgcgtgaaggtagacaacgacaa

SEQ ID NO: 5831443 - DNA, 25 bp, Homo sapien
ttgtcgttgtctaccttcacgcgga

SEQ ID NO: 5831444 - DNA, 25 bp, Homo sapien
gtagtcattgaggacatttttaaat

SEQ ID NO: 5831445 - DNA, 25 bp, Homo sapien
atttaaaaatgtcctcaatgactac

SEQ ID NO: 5831446 - DNA, 25 bp, Homo sapien
ggttattaaagtcattacagtttta

SEQ ID NO: 5831447 - DNA, 25 bp, Homo sapien
taaaactgtaatgactttaataacc

SEQ ID NO: 5831448 - DNA, 25 bp, Homo sapien
tctctttgaactccagaagctcaac

SEQ ID NO: 5831449 - DNA, 25 bp, Homo sapien
gttgagcttctggagttcaaagaga

SEQ ID NO: 5831450 - DNA, 25 bp, Homo sapien
gccggacgccttagggaggcgacgg

SEQ ID NO: 5831451 - DNA, 25 bp, Homo sapien
ccgtcgcctccctaaggcgtccggc

SEQ ID NO: 5831452 - DNA, 25 bp, Homo sapien
ttacggtaagagtattagctgtggt

SEQ ID NO: 5831453 - DNA, 25 bp, Homo sapien
accacagctaatactcttaccgtaa

SEQ ID NO: 5831454 - DNA, 25 bp, Homo sapien
tcgcggctcctacgaggccccggtc

SEQ ID NO: 5831455 - DNA, 25 bp, Homo sapien
gaccggggcctcgtaggagccgcga

SEQ ID NO: 5831456 - DNA, 25 bp, Homo sapien
gggaccgtattccattagaccgata

SEQ ID NO: 5831457 - DNA, 25 bp, Homo sapien
tatcggtctaatggaatacggtccc

SEQ ID NO: 5831458 - DNA, 25 bp, Homo sapien
gtccttcaaataactaataaaagtg

SEQ ID NO: 5831459 - DNA, 25 bp, Homo sapien
cacttttattagttatttgaaggac

SEQ ID NO: 5831460 - DNA, 25 bp, Homo sapien
gggtccttcctaggatgtgaaccgt

SEQ ID NO: 5831461 - DNA, 25 bp, Homo sapien
acggttcacatcctaggaaggaccc

SEQ ID NO: 5831462 - DNA, 25 bp, Homo sapien
gaccttcggtacactagctcgcctg

SEQ ID NO: 5831463 - DNA, 25 bp, Homo sapien
caggcgagctagtgtaccgaaggtc

SEQ ID NO: 5831464 - DNA, 25 bp, Homo sapien
gaaagacccttgagtccttcgtaaa

SEQ ID NO: 5831465 - DNA, 25 bp, Homo sapien
tttacgaaggactcaagggtctttc

SEQ ID NO: 5831466 - DNA, 25 bp, Homo sapien
cgccggcgtacgtgtcggccctgga

SEQ ID NO: 5831467 - DNA, 25 bp, Homo sapien
tccagggccgacacgtacgccggcg

SEQ ID NO: 5831468 - DNA, 25 bp, Homo sapien
cggcgtacgtgtcggccctggagtg

SEQ ID NO: 5831469 - DNA, 25 bp, Homo sapien
cactccagggccgacacgtacgccg

SEQ ID NO: 5831470 - DNA, 25 bp, Homo sapien
cgtctctctgcttcggggtgctcgg

SEQ ID NO: 5831471 - DNA, 25 bp, Homo sapien
ccgagcaccccgaagcagagagacg

SEQ ID NO: 5831472 - DNA, 25 bp, Homo sapien
gatctcagggaaaccgcacacacga

SEQ ID NO: 5831473 - DNA, 25 bp, Homo sapien
tcgtgtgtgcggtttccctgagatc

SEQ ID NO: 5831474 - DNA, 25 bp, Homo sapien
gaccactcgcgggacgtctcccgta

SEQ ID NO: 5831475 - DNA, 25 bp, Homo sapien
tacgggagacgtcccgcgagtggtc

SEQ ID NO: 5831476 - DNA, 25 bp, Homo sapien
aatatcgaaatgtaagcaccatcgg

SEQ ID NO: 5831477 - DNA, 25 bp, Homo sapien
ccgatggtgcttacatttcgatatt

SEQ ID NO: 5831478 - DNA, 25 bp, Homo sapien
tccttgagagaccaccaccttccct

SEQ ID NO: 5831479 - DNA, 25 bp, Homo sapien
agggaaggtggtggtctctcaagga

SEQ ID NO: 5831480 - DNA, 25 bp, Homo sapien
ccaggaacacgggccacgcgggagg

SEQ ID NO: 5831481 - DNA, 25 bp, Homo sapien
cctcccgcgtggcccgtgttcctgg

SEQ ID NO: 5831482 - DNA, 25 bp, Homo sapien
agagtgtattagaccagtttcaaaa

SEQ ID NO: 5831483 - DNA, 25 bp, Homo sapien
ttttgaaactggtctaatacactct

SEQ ID NO: 5831484 - DNA, 25 bp, Homo sapien
aaggaccactaattggacttcttat

SEQ ID NO: 5831485 - DNA, 25 bp, Homo sapien
ataagaagtccaattagtggtcctt

SEQ ID NO: 5831486 - DNA, 25 bp, Homo sapien
aatgacttgactgtagtctctagta

SEQ ID NO: 5831487 - DNA, 25 bp, Homo sapien
tactagagactacagtcaagtcatt

SEQ ID NO: 5831488 - DNA, 25 bp, Homo sapien
gactggtgcaggacggccgggaggg

SEQ ID NO: 5831489 - DNA, 25 bp, Homo sapien
ccctcccggccgtcctgcaccagtc

SEQ ID NO: 5831490 - DNA, 25 bp, Homo sapien
cgggctctgccgagccgagggtcgg

SEQ ID NO: 5831491 - DNA, 25 bp, Homo sapien
ccgaccctcggctcggcagagcccg

SEQ ID NO: 5831492 - DNA, 25 bp, Homo sapien
tgcgccgcggcctcccgggctctgc

SEQ ID NO: 5831493 - DNA, 25 bp, Homo sapien
gcagagcccgggaggccgcggcgca

SEQ ID NO: 5831494 - DNA, 25 bp, Homo sapien
ggagaggtgtcaacaacggaggtcg

SEQ ID NO: 5831495 - DNA, 25 bp, Homo sapien
cgacctccgttgttgacacctctcc

SEQ ID NO: 5831496 - DNA, 25 bp, Homo sapien
acatcacagaacaccccgaaaaggt

SEQ ID NO: 5831497 - DNA, 25 bp, Homo sapien
accttttcggggtgttctgtgatgt

SEQ ID NO: 5831498 - DNA, 25 bp, Homo sapien
acggtccagactccggtgcaataat

SEQ ID NO: 5831499 - DNA, 25 bp, Homo sapien
attattgcaccggagtctggaccgt

SEQ ID NO: 5831500 - DNA, 25 bp, Homo sapien
aggtcacacgcacgttaaccggaac

SEQ ID NO: 5831501 - DNA, 25 bp, Homo sapien
gttccggttaacgtgcgtgtgacct

SEQ ID NO: 5831502 - DNA, 25 bp, Homo sapien
tgtcaatcaaccctttatccgtcct

SEQ ID NO: 5831503 - DNA, 25 bp, Homo sapien
aggacggataaagggttgattgaca

SEQ ID NO: 5831504 - DNA, 25 bp, Homo sapien
gggcccaccgacacacggaggagcc

SEQ ID NO: 5831505 - DNA, 25 bp, Homo sapien
ggctcctccgtgtgtcggtgggccc

SEQ ID NO: 5831506 - DNA, 25 bp, Homo sapien
tgacctagagtcaatacactaagtg

SEQ ID NO: 5831507 - DNA, 25 bp, Homo sapien
cacttagtgtattgactctaggtca

SEQ ID NO: 5831508 - DNA, 25 bp, Homo sapien
cgcggccctccctggccgccgccgt

SEQ ID NO: 5831509 - DNA, 25 bp, Homo sapien
acggcggcggccagggagggccgcg

SEQ ID NO: 5831510 - DNA, 25 bp, Homo sapien
gcgcggccctccctggccgccgccg

SEQ ID NO: 5831511 - DNA, 25 bp, Homo sapien
cggcggcggccagggagggccgcgc

SEQ ID NO: 5831512 - DNA, 25 bp, Homo sapien
gggccctcctccgcgcccgcgcggc

SEQ ID NO: 5831513 - DNA, 25 bp, Homo sapien
gccgcgcgggcgcggaggagggccc

SEQ ID NO: 5831514 - DNA, 25 bp, Homo sapien
gcggccctccctggccgccgccgta

SEQ ID NO: 5831515 - DNA, 25 bp, Homo sapien
tacggcggcggccagggagggccgc

SEQ ID NO: 5831516 - DNA, 25 bp, Homo sapien
gtagagacaggctcgtagaggacct

SEQ ID NO: 5831517 - DNA, 25 bp, Homo sapien
aggtcctctacgagcctgtctctac

SEQ ID NO: 5831518 - DNA, 25 bp, Homo sapien
acgacacgtacgaccattgacttag

SEQ ID NO: 5831519 - DNA, 25 bp, Homo sapien
ctaagtcaatggtcgtacgtgtcgt

SEQ ID NO: 5831520 - DNA, 25 bp, Homo sapien
ccgggtcctggccggacggcgcgcc

SEQ ID NO: 5831521 - DNA, 25 bp, Homo sapien
ggcgcgccgtccggccaggacccgg

SEQ ID NO: 5831522 - DNA, 25 bp, Homo sapien
cgggtcctggccggacggcgcgccg

SEQ ID NO: 5831523 - DNA, 25 bp, Homo sapien
cggcgcgccgtccggccaggacccg

SEQ ID NO: 5831524 - DNA, 25 bp, Homo sapien
agaacctacagggtgtctagtccgt

SEQ ID NO: 5831525 - DNA, 25 bp, Homo sapien
acggactagacaccctgtaggttct

SEQ ID NO: 5831526 - DNA, 25 bp, Homo sapien
gctgcgtcctcttgcgccgcttaga

SEQ ID NO: 5831527 - DNA, 25 bp, Homo sapien
tctaagcggcgcaagaggacgcagc

SEQ ID NO: 5831528 - DNA, 25 bp, Homo sapien
atcaagatgtctatactcacataac

SEQ ID NO: 5831529 - DNA, 25 bp, Homo sapien
gttatgtgagtatagacatcttgat

SEQ ID NO: 5831530 - DNA, 25 bp, Homo sapien
gtcgtgggcaaacaccgcgctgatt

SEQ ID NO: 5831531 - DNA, 25 bp, Homo sapien
aatcagcgcggtgtttgcccacgac

SEQ ID NO: 5831532 - DNA, 25 bp, Homo sapien
catctagtgtaagggtgaacggcct

SEQ ID NO: 5831533 - DNA, 25 bp, Homo sapien
aggccgttcacccttacactagatg

SEQ ID NO: 5831534 - DNA, 25 bp, Homo sapien
cacatcttgtataaagagtagagat

SEQ ID NO: 5831535 - DNA, 25 bp, Homo sapien
atctctactctttatacaagatgtg

SEQ ID NO: 5831536 - DNA, 25 bp, Homo sapien
aatttttcagctattcgatttacat

SEQ ID NO: 5831537 - DNA, 25 bp, Homo sapien
atgtaaatcgaatagctgaaaaatt

SEQ ID NO: 5831538 - DNA, 25 bp, Homo sapien
actcggggaacgtccattgctgggt

SEQ ID NO: 5831539 - DNA, 25 bp, Homo sapien
acccagcaatggacgttccccgagt

SEQ ID NO: 5831540 - DNA, 25 bp, Homo sapien
gggaatcacctagaagtccagggac

SEQ ID NO: 5831541 - DNA, 25 bp, Homo sapien
gtccctggacttctaggtgattccc

SEQ ID NO: 5831542 - DNA, 25 bp, Homo sapien
gtcattattaaaccggctataaaag

SEQ ID NO: 5831543 - DNA, 25 bp, Homo sapien
cttttatagccggtttaataatgac

SEQ ID NO: 5831544 - DNA, 25 bp, Homo sapien
catggttggtagctggtgaggtcgt

SEQ ID NO: 5831545 - DNA, 25 bp, Homo sapien
acgacctcaccagctaccaaccatg

SEQ ID NO: 5831546 - DNA, 25 bp, Homo sapien
gaaatgtagataccaggaggcccct

SEQ ID NO: 5831547 - DNA, 25 bp, Homo sapien
aggggcctcctggtatctacatttc

SEQ ID NO: 5831548 - DNA, 25 bp, Homo sapien
cctgagggacgcattatgtcttgaa

SEQ ID NO: 5831549 - DNA, 25 bp, Homo sapien
ttcaagacataatgcgtccctcagg

SEQ ID NO: 5831550 - DNA, 25 bp, Homo sapien
cggccctgctgacctcgggcaaccg

SEQ ID NO: 5831551 - DNA, 25 bp, Homo sapien
cggttgcccgaggtcagcagggccg

SEQ ID NO: 5831552 - DNA, 25 bp, Homo sapien
tgtagtagtaatattctttcacact

SEQ ID NO: 5831553 - DNA, 25 bp, Homo sapien
agtgtgaaagaatattactactaca

SEQ ID NO: 5831554 - DNA, 25 bp, Homo sapien
ttcttgtaatcggagcatcaggacg

SEQ ID NO: 5831555 - DNA, 25 bp, Homo sapien
cgtcctgatgctccgattacaagaa

SEQ ID NO: 5831556 - DNA, 25 bp, Homo sapien
aaacagcttgttgatgtgtggaaac

SEQ ID NO: 5831557 - DNA, 25 bp, Homo sapien
gtttccacacatcaacaagctgttt

SEQ ID NO: 5831558 - DNA, 25 bp, Homo sapien
ttctcgtggtagttgttcgggacat

SEQ ID NO: 5831559 - DNA, 25 bp, Homo sapien
atgtcccgaacaactaccacgagaa

SEQ ID NO: 5831560 - DNA, 25 bp, Homo sapien
agtccctcgcagtcggcggtcagcc

SEQ ID NO: 5831561 - DNA, 25 bp, Homo sapien
ggctgaccgccgactgcgagggact

SEQ ID NO: 5831562 - DNA, 25 bp, Homo sapien
cgcttcctatacgagagaagcagag

SEQ ID NO: 5831563 - DNA, 25 bp, Homo sapien
ctctgcttctctcgtataggaagcg

SEQ ID NO: 5831564 - DNA, 25 bp, Homo sapien
ggtgtacgtgtcaatacccttcgga

SEQ ID NO: 5831565 - DNA, 25 bp, Homo sapien
tccgaagggtattgacacgtacacc

SEQ ID NO: 5831566 - DNA, 25 bp, Homo sapien
gcagggggcgccctcgggcgtcggt

SEQ ID NO: 5831567 - DNA, 25 bp, Homo sapien
accgacgcccgagggcgccccctgc

SEQ ID NO: 5831568 - DNA, 25 bp, Homo sapien
cgcagggggcgccctcgggcgtcgg

SEQ ID NO: 5831569 - DNA, 25 bp, Homo sapien
ccgacgcccgagggcgccccctgcg

SEQ ID NO: 5831570 - DNA, 25 bp, Homo sapien
gacggtccggtgtcattcacttctt

SEQ ID NO: 5831571 - DNA, 25 bp, Homo sapien
aagaagtgaatgacaccggaccgtc

SEQ ID NO: 5831572 - DNA, 25 bp, Homo sapien
tccgagtgtcggactactacaaagt

SEQ ID NO: 5831573 - DNA, 25 bp, Homo sapien
actttgtagtagtccgacactcgga

SEQ ID NO: 5831574 - DNA, 25 bp, Homo sapien
tgcaagacagggacgtacgacgtaa

SEQ ID NO: 5831575 - DNA, 25 bp, Homo sapien
ttacgtcgtacgtccctgtcttgca

SEQ ID NO: 5831576 - DNA, 25 bp, Homo sapien
gaacagaaagtccattgaaaacata

SEQ ID NO: 5831577 - DNA, 25 bp, Homo sapien
tatgttttcaatggactttctgttc

SEQ ID NO: 5831578 - DNA, 25 bp, Homo sapien
tcgaaatgtgttaatacaggtttgt

SEQ ID NO: 5831579 - DNA, 25 bp, Homo sapien
acaaacctgtattaacacatttcga

SEQ ID NO: 5831580 - DNA, 25 bp, Homo sapien
ttccttccagtttacactttggtcg

SEQ ID NO: 5831581 - DNA, 25 bp, Homo sapien
cgaccaaagtgtaaactggaaggaa

SEQ ID NO: 5831582 - DNA, 25 bp, Homo sapien
gggtatcaacaagccgttcaattaa

SEQ ID NO: 5831583 - DNA, 25 bp, Homo sapien
ttaattgaacggcttgttgataccc

SEQ ID NO: 5831584 - DNA, 25 bp, Homo sapien
gaggaactccgtggagtggtggtga

SEQ ID NO: 5831585 - DNA, 25 bp, Homo sapien
tcaccaccactccacggagttcctc

SEQ ID NO: 5831586 - DNA, 25 bp, Homo sapien
tcgttgttaggtcctgtgtttttgt

SEQ ID NO: 5831587 - DNA, 25 bp, Homo sapien
acaaaaacacaggacctaacaacga

SEQ ID NO: 5831588 - DNA, 25 bp, Homo sapien
cgtccaatccctgggaccactcggg

SEQ ID NO: 5831589 - DNA, 25 bp, Homo sapien
cccgagtggtcccagggattggacg

SEQ ID NO: 5831590 - DNA, 25 bp, Homo sapien
gtcacacaaagtgcaggtagactgt

SEQ ID NO: 5831591 - DNA, 25 bp, Homo sapien
acagtctacctgcactttgtgtgac

SEQ ID NO: 5831592 - DNA, 25 bp, Homo sapien
ggtgccgccgaggccacccactggg

SEQ ID NO: 5831593 - DNA, 25 bp, Homo sapien
cccagtgggtggcctcggcggcacc

SEQ ID NO: 5831594 - DNA, 25 bp, Homo sapien
ttgaaaatgttgatatccggagaag

SEQ ID NO: 5831595 - DNA, 25 bp, Homo sapien
cttctccggatatcaacattttcaa

SEQ ID NO: 5831596 - DNA, 25 bp, Homo sapien
ctactaaaaggtctgtatacgtaat

SEQ ID NO: 5831597 - DNA, 25 bp, Homo sapien
attacgtatacagaccttttagtag

SEQ ID NO: 5831598 - DNA, 25 bp, Homo sapien
aataacacgtctaacatcctttaaa

SEQ ID NO: 5831599 - DNA, 25 bp, Homo sapien
tttaaaggatgttagacgtgttatt

SEQ ID NO: 5831600 - DNA, 25 bp, Homo sapien
taacacgtctaacatcctttaaacg

SEQ ID NO: 5831601 - DNA, 25 bp, Homo sapien
cgtttaaaggatgttagacgtgtta

SEQ ID NO: 5831602 - DNA, 25 bp, Homo sapien
gtgacccgtagtggtctcggtcctt

SEQ ID NO: 5831603 - DNA, 25 bp, Homo sapien
aaggaccgagaccactacgggtcac

SEQ ID NO: 5831604 - DNA, 25 bp, Homo sapien
aaaggttctttgactcactcaccgg

SEQ ID NO: 5831605 - DNA, 25 bp, Homo sapien
ccggtgagtgagtcaaagaaccttt

SEQ ID NO: 5831606 - DNA, 25 bp, Homo sapien
tctcgtttcagatatgtactaaatt

SEQ ID NO: 5831607 - DNA, 25 bp, Homo sapien
aatttagtacatatctgaaacgaga

SEQ ID NO: 5831608 - DNA, 25 bp, Homo sapien
tattaatataaaatggcgatcttaa

SEQ ID NO: 5831609 - DNA, 25 bp, Homo sapien
ttaagatcgccattttatattaata

SEQ ID NO: 5831610 - DNA, 25 bp, Homo sapien
ttattaatataaaatggcgatctta

SEQ ID NO: 5831611 - DNA, 25 bp, Homo sapien
taagatcgccattttatattaataa

SEQ ID NO: 5831612 - DNA, 25 bp, Homo sapien
agtctcacttcgcattgggtattcc

SEQ ID NO: 5831613 - DNA, 25 bp, Homo sapien
ggaatacccaatgcgaagtgagact

SEQ ID NO: 5831614 - DNA, 25 bp, Homo sapien
ctacactcttcactcaggacataac

SEQ ID NO: 5831615 - DNA, 25 bp, Homo sapien
gttatgtcctgagtgaagagtgtag

SEQ ID NO: 5831616 - DNA, 25 bp, Homo sapien
accgaaggaaggtaagcggtcatct

SEQ ID NO: 5831617 - DNA, 25 bp, Homo sapien
agatgaccgcttaccttccttcggt

SEQ ID NO: 5831618 - DNA, 25 bp, Homo sapien
agaagacgacatctataagaggttt

SEQ ID NO: 5831619 - DNA, 25 bp, Homo sapien
aaacctcttatagatgtcgtcttct

SEQ ID NO: 5831620 - DNA, 25 bp, Homo sapien
gatttgaagaatcaattgaacatat

SEQ ID NO: 5831621 - DNA, 25 bp, Homo sapien
atatgttcaattgattcttcaaatc

SEQ ID NO: 5831622 - DNA, 25 bp, Homo sapien
gtggtcggtcaggaagggctcctcg

SEQ ID NO: 5831623 - DNA, 25 bp, Homo sapien
cgaggagcccttcctgaccgaccac

SEQ ID NO: 5831624 - DNA, 25 bp, Homo sapien
agtgtaattaggataaacgtctatc

SEQ ID NO: 5831625 - DNA, 25 bp, Homo sapien
gatagacgtttatcctaattacact

SEQ ID NO: 5831626 - DNA, 25 bp, Homo sapien
cgaaagtacgattatagaaatgggt

SEQ ID NO: 5831627 - DNA, 25 bp, Homo sapien
acccatttctataatcgtactttcg

SEQ ID NO: 5831628 - DNA, 25 bp, Homo sapien
gtcggcgtcccaccgactgacaccg

SEQ ID NO: 5831629 - DNA, 25 bp, Homo sapien
cggtgtcagtcggtgggacgccgac

SEQ ID NO: 5831630 - DNA, 25 bp, Homo sapien
cccagttataggtctgtcctacgga

SEQ ID NO: 5831631 - DNA, 25 bp, Homo sapien
tccgtaggacagacctataactggg

SEQ ID NO: 5831632 - DNA, 25 bp, Homo sapien
agtagagcataaatttatgtcgtcc

SEQ ID NO: 5831633 - DNA, 25 bp, Homo sapien
ggacgacataaatttatgctctact

SEQ ID NO: 5831634 - DNA, 25 bp, Homo sapien
cgacgctcggccgacgctcgggtcg

SEQ ID NO: 5831635 - DNA, 25 bp, Homo sapien
cgacccgagcgtcggccgagcgtcg

SEQ ID NO: 5831636 - DNA, 25 bp, Homo sapien
gccgacgctcggccgacgctcgggt

SEQ ID NO: 5831637 - DNA, 25 bp, Homo sapien
acccgagcgtcggccgagcgtcggc

SEQ ID NO: 5831638 - DNA, 25 bp, Homo sapien
agccgacgctcggccgacgctcggg

SEQ ID NO: 5831639 - DNA, 25 bp, Homo sapien
cccgagcgtcggccgagcgtcggct

SEQ ID NO: 5831640 - DNA, 25 bp, Homo sapien
ggagtctggctcaggcccgcctcaa

SEQ ID NO: 5831641 - DNA, 25 bp, Homo sapien
ttgaggcgggcctgagccagactcc

SEQ ID NO: 5831642 - DNA, 25 bp, Homo sapien
ggaccgacacctggggcggccgagg

SEQ ID NO: 5831643 - DNA, 25 bp, Homo sapien
cctcggccgccccaggtgtcggtcc

SEQ ID NO: 5831644 - DNA, 25 bp, Homo sapien
agacaataactaaatcgggagttag

SEQ ID NO: 5831645 - DNA, 25 bp, Homo sapien
ctaactcccgatttagttattgtct

SEQ ID NO: 5831646 - DNA, 25 bp, Homo sapien
tcgtcgcgtcggcactcttcggcgt

SEQ ID NO: 5831647 - DNA, 25 bp, Homo sapien
acgccgaagagtgccgacgcgacga

SEQ ID NO: 5831648 - DNA, 25 bp, Homo sapien
agaccgaccggtctgacgaagtgtc

SEQ ID NO: 5831649 - DNA, 25 bp, Homo sapien
gacacttcgtcagaccggtcggtct

SEQ ID NO: 5831650 - DNA, 25 bp, Homo sapien
agtcgcggggtgcgcgcgcaccgag

SEQ ID NO: 5831651 - DNA, 25 bp, Homo sapien
ctcggtgcgcgcgcaccccgcgact

SEQ ID NO: 5831652 - DNA, 25 bp, Homo sapien
ggtgcgcgcgcaccgaggggcccga

SEQ ID NO: 5831653 - DNA, 25 bp, Homo sapien
tcgggcccctcggtgcgcgcgcacc

SEQ ID NO: 5831654 - DNA, 25 bp, Homo sapien
gggtgcgcgcgcaccgaggggcccg

SEQ ID NO: 5831655 - DNA, 25 bp, Homo sapien
cgggcccctcggtgcgcgcgcaccc

SEQ ID NO: 5831656 - DNA, 25 bp, Homo sapien
gaacttcctaacaccagagaagtag

SEQ ID NO: 5831657 - DNA, 25 bp, Homo sapien
ctacttctctggtgttaggaagttc

SEQ ID NO: 5831658 - DNA, 25 bp, Homo sapien
ttaaaactgtataagaccattatct

SEQ ID NO: 5831659 - DNA, 25 bp, Homo sapien
agataatggtcttatacagttttaa

SEQ ID NO: 5831660 - DNA, 25 bp, Homo sapien
atctttccctattagttgaccttag

SEQ ID NO: 5831661 - DNA, 25 bp, Homo sapien
ctaaggtcaactaatagggaaagat

SEQ ID NO: 5831662 - DNA, 25 bp, Homo sapien
gacggtgcctcgtacctccgtggaa

SEQ ID NO: 5831663 - DNA, 25 bp, Homo sapien
ttccacggaggtacgaggcaccgtc

SEQ ID NO: 5831664 - DNA, 25 bp, Homo sapien
gccgacggtgcctcgtacctccgtg

SEQ ID NO: 5831665 - DNA, 25 bp, Homo sapien
cacggaggtacgaggcaccgtcggc

SEQ ID NO: 5831666 - DNA, 25 bp, Homo sapien
gccccggtcctcgccttcaggctcc

SEQ ID NO: 5831667 - DNA, 25 bp, Homo sapien
ggagcctgaaggcgaggaccggggc

SEQ ID NO: 5831668 - DNA, 25 bp, Homo sapien
aaccatgattgggtagttcgaccag

SEQ ID NO: 5831669 - DNA, 25 bp, Homo sapien
ctggtcgaactacccaatcatggtt

SEQ ID NO: 5831670 - DNA, 25 bp, Homo sapien
accgcagaggactccgagcgcgcgg

SEQ ID NO: 5831671 - DNA, 25 bp, Homo sapien
ccgcgcgctcggagtcctctgcggt

SEQ ID NO: 5831672 - DNA, 25 bp, Homo sapien
ggcggtaggccgtcctgggcctcgc

SEQ ID NO: 5831673 - DNA, 25 bp, Homo sapien
gcgaggcccaggacggcctaccgcc

SEQ ID NO: 5831674 - DNA, 25 bp, Homo sapien
gtgaagcgaaagtcatatatttcta

SEQ ID NO: 5831675 - DNA, 25 bp, Homo sapien
tagaaatatatgactttcgcttcac

SEQ ID NO: 5831676 - DNA, 25 bp, Homo sapien
gggccctatctaaacgcacgtccaa

SEQ ID NO: 5831677 - DNA, 25 bp, Homo sapien
ttggacgtgcgtttagatagggccc

SEQ ID NO: 5831678 - DNA, 25 bp, Homo sapien
acccacaaggggtatctccattaac

SEQ ID NO: 5831679 - DNA, 25 bp, Homo sapien
gttaatggagataccccttgtgggt

SEQ ID NO: 5831680 - DNA, 25 bp, Homo sapien
cacccacttttaacccgtctgtatg

SEQ ID NO: 5831681 - DNA, 25 bp, Homo sapien
catacagacgggttaaaagtgggtg

SEQ ID NO: 5831682 - DNA, 25 bp, Homo sapien
acgggttggtgccttctataagaag

SEQ ID NO: 5831683 - DNA, 25 bp, Homo sapien
cttcttatagaaggcaccaacccgt

SEQ ID NO: 5831684 - DNA, 25 bp, Homo sapien
gtccctgtcaacaggctctccgcga

SEQ ID NO: 5831685 - DNA, 25 bp, Homo sapien
tcgcggagagcctgttgacagggac

SEQ ID NO: 5831686 - DNA, 25 bp, Homo sapien
tcgagtttattaggatactgtagat

SEQ ID NO: 5831687 - DNA, 25 bp, Homo sapien
atctacagtatcctaataaactcga

SEQ ID NO: 5831688 - DNA, 25 bp, Homo sapien
ccggttcctgtggtgatcagatcag

SEQ ID NO: 5831689 - DNA, 25 bp, Homo sapien
ctgatctgatcaccacaggaaccgg

SEQ ID NO: 5831690 - DNA, 25 bp, Homo sapien
aatatttaataacgtattgatcata

SEQ ID NO: 5831691 - DNA, 25 bp, Homo sapien
tatgatcaatacgttattaaatatt

SEQ ID NO: 5831692 - DNA, 25 bp, Homo sapien
gaatatttaataacgtattgatcat

SEQ ID NO: 5831693 - DNA, 25 bp, Homo sapien
atgatcaatacgttattaaatattc

SEQ ID NO: 5831694 - DNA, 25 bp, Homo sapien
tagccgccgtgcaaggtttcgccca

SEQ ID NO: 5831695 - DNA, 25 bp, Homo sapien
tgggcgaaaccttgcacggcggcta

SEQ ID NO: 5831696 - DNA, 25 bp, Homo sapien
cgagactcctattactagagttaaa

SEQ ID NO: 5831697 - DNA, 25 bp, Homo sapien
tttaactctagtaataggagtctcg

SEQ ID NO: 5831698 - DNA, 25 bp, Homo sapien
acggggcggccgtcacgcgagcccg

SEQ ID NO: 5831699 - DNA, 25 bp, Homo sapien
cgggctcgcgtgacggccgccccgt

SEQ ID NO: 5831700 - DNA, 25 bp, Homo sapien
gacggggcggccgtcacgcgagccc

SEQ ID NO: 5831701 - DNA, 25 bp, Homo sapien
gggctcgcgtgacggccgccccgtc

SEQ ID NO: 5831702 - DNA, 25 bp, Homo sapien
ctcacggtcaacttcagtaactgac

SEQ ID NO: 5831703 - DNA, 25 bp, Homo sapien
gtcagttactgaagttgaccgtgag

SEQ ID NO: 5831704 - DNA, 25 bp, Homo sapien
atgtcttattgagcagatttttcat

SEQ ID NO: 5831705 - DNA, 25 bp, Homo sapien
atgaaaaatctgctcaataagacat

SEQ ID NO: 5831706 - DNA, 25 bp, Homo sapien
ccttatctgagtaggaataataatt

SEQ ID NO: 5831707 - DNA, 25 bp, Homo sapien
aattattattcctactcagataagg

SEQ ID NO: 5831708 - DNA, 25 bp, Homo sapien
gtctcctcaacgagactttcgacaa

SEQ ID NO: 5831709 - DNA, 25 bp, Homo sapien
ttgtcgaaagtctcgttgaggagac

SEQ ID NO: 5831710 - DNA, 25 bp, Homo sapien
acggacgccatcctacgaggacctt

SEQ ID NO: 5831711 - DNA, 25 bp, Homo sapien
aaggtcctcgtaggatggcgtccgt

SEQ ID NO: 5831712 - DNA, 25 bp, Homo sapien
ttaggcttaggcttagttagcagta

SEQ ID NO: 5831713 - DNA, 25 bp, Homo sapien
tactgctaactaagcctaagcctaa

SEQ ID NO: 5831714 - DNA, 25 bp, Homo sapien
agggtagactagtgttacgagtccc

SEQ ID NO: 5831715 - DNA, 25 bp, Homo sapien
gggactcgtaacactagtctaccct

SEQ ID NO: 5831716 - DNA, 25 bp, Homo sapien
ctggacgccggccttgttcagggcg

SEQ ID NO: 5831717 - DNA, 25 bp, Homo sapien
cgccctgaacaaggccggcgtccag

SEQ ID NO: 5831718 - DNA, 25 bp, Homo sapien
acgtttctagagtcacgcaggagtt

SEQ ID NO: 5831719 - DNA, 25 bp, Homo sapien
aactcctgcgtgactctagaaacgt

SEQ ID NO: 5831720 - DNA, 25 bp, Homo sapien
gaccttatcccgtgtcacgggtaaa

SEQ ID NO: 5831721 - DNA, 25 bp, Homo sapien
tttacccgtgacacgggataaggtc

SEQ ID NO: 5831722 - DNA, 25 bp, Homo sapien
tccctgtaaagcattggtgagaaac

SEQ ID NO: 5831723 - DNA, 25 bp, Homo sapien
gtttctcaccaatgctttacaggga

SEQ ID NO: 5831724 - DNA, 25 bp, Homo sapien
ttcagtcggacaaagagtctgacta

SEQ ID NO: 5831725 - DNA, 25 bp, Homo sapien
tagtcagactctttgtccgactgaa

SEQ ID NO: 5831726 - DNA, 25 bp, Homo sapien
tcgggacctccaggcgtcacgactc

SEQ ID NO: 5831727 - DNA, 25 bp, Homo sapien
gagtcgtgacgcctggaggtcccga

SEQ ID NO: 5831728 - DNA, 25 bp, Homo sapien
ctctgatcctaccattcaataaaac

SEQ ID NO: 5831729 - DNA, 25 bp, Homo sapien
gttttattgaatggtaggatcagag

SEQ ID NO: 5831730 - DNA, 25 bp, Homo sapien
cggaacgcttatacttattacagaa

SEQ ID NO: 5831731 - DNA, 25 bp, Homo sapien
ttctgtaataagtataagcgttccg

SEQ ID NO: 5831732 - DNA, 25 bp, Homo sapien
gcaacgggacgtctcccatgacgat

SEQ ID NO: 5831733 - DNA, 25 bp, Homo sapien
atcgtcatgggagacgtcccgttgc

SEQ ID NO: 5831734 - DNA, 25 bp, Homo sapien
ttacaattaattttctctttcagag

SEQ ID NO: 5831735 - DNA, 25 bp, Homo sapien
ctctgaaagagaaaattaattgtaa

SEQ ID NO: 5831736 - DNA, 25 bp, Homo sapien
tggagttatacacgagggaccgaac

SEQ ID NO: 5831737 - DNA, 25 bp, Homo sapien
gttcggtccctcgtgtataactcca

SEQ ID NO: 5831738 - DNA, 25 bp, Homo sapien
agacgagggtacaagggacagtatc

SEQ ID NO: 5831739 - DNA, 25 bp, Homo sapien
gatactgtcccttgtaccctcgtct

SEQ ID NO: 5831740 - DNA, 25 bp, Homo sapien
ccccgcggtaagtatgtctcggact

SEQ ID NO: 5831741 - DNA, 25 bp, Homo sapien
agtccgagacatacttaccgcgggg

SEQ ID NO: 5831742 - DNA, 25 bp, Homo sapien
gttaagacgatttcaagaaccttct

SEQ ID NO: 5831743 - DNA, 25 bp, Homo sapien
agaaggttcttgaaatcgtcttaac

SEQ ID NO: 5831744 - DNA, 25 bp, Homo sapien
gtaattactgttactctctacattt

SEQ ID NO: 5831745 - DNA, 25 bp, Homo sapien
aaatgtagagagtaacagtaattac

SEQ ID NO: 5831746 - DNA, 25 bp, Homo sapien
tgacatcctgaagtactggaagtcg

SEQ ID NO: 5831747 - DNA, 25 bp, Homo sapien
cgacttccagtacttcaggatgtca

SEQ ID NO: 5831748 - DNA, 25 bp, Homo sapien
gtgtgtcttctttcgaaagggagac

SEQ ID NO: 5831749 - DNA, 25 bp, Homo sapien
gtctccctttcgaaagaagacacac

SEQ ID NO: 5831750 - DNA, 25 bp, Homo sapien
gcctgtcgtggctacgccggcgaac

SEQ ID NO: 5831751 - DNA, 25 bp, Homo sapien
gttcgccggcgtagccacgacaggc

SEQ ID NO: 5831752 - DNA, 25 bp, Homo sapien
cgggtcagagttcttctacatgcgg

SEQ ID NO: 5831753 - DNA, 25 bp, Homo sapien
ccgcatgtagaagaactctgacccg

SEQ ID NO: 5831754 - DNA, 25 bp, Homo sapien
cgtacggtacggaaatgatgtctaa

SEQ ID NO: 5831755 - DNA, 25 bp, Homo sapien
ttagacatcatttccgtaccgtacg

SEQ ID NO: 5831756 - DNA, 25 bp, Homo sapien
gaccaactatttctatttttataca

SEQ ID NO: 5831757 - DNA, 25 bp, Homo sapien
tgtataaaaatagaaatagttggtc

SEQ ID NO: 5831758 - DNA, 25 bp, Homo sapien
tacttcattgtggtcagaaataacg

SEQ ID NO: 5831759 - DNA, 25 bp, Homo sapien
cgttatttctgaccacaatgaagta

SEQ ID NO: 5831760 - DNA, 25 bp, Homo sapien
cggtacaccgagagaagtccttggg

SEQ ID NO: 5831761 - DNA, 25 bp, Homo sapien
cccaaggacttctctcggtgtaccg

SEQ ID NO: 5831762 - DNA, 25 bp, Homo sapien
gtacgacggtcaccgtctacggtct

SEQ ID NO: 5831763 - DNA, 25 bp, Homo sapien
agaccgtagacggtgaccgtcgtac

SEQ ID NO: 5831764 - DNA, 25 bp, Homo sapien
taaactacttacttataaattattc

SEQ ID NO: 5831765 - DNA, 25 bp, Homo sapien
gaataatttataagtaagtagttta

SEQ ID NO: 5831766 - DNA, 25 bp, Homo sapien
agaaagaaccgaagatgtaagttag

SEQ ID NO: 5831767 - DNA, 25 bp, Homo sapien
ctaacttacatcttcggttctttct

SEQ ID NO: 5831768 - DNA, 25 bp, Homo sapien
ccccttacttatagctgggagaagg

SEQ ID NO: 5831769 - DNA, 25 bp, Homo sapien
ccttctcccagctataagtaagggg

SEQ ID NO: 5831770 - DNA, 25 bp, Homo sapien
aaattagttacgcgattcactgcta

SEQ ID NO: 5831771 - DNA, 25 bp, Homo sapien
tagcagtgaatcgcgtaactaattt

SEQ ID NO: 5831772 - DNA, 25 bp, Homo sapien
taaatttggctttaggaacaggact

SEQ ID NO: 5831773 - DNA, 25 bp, Homo sapien
agtcctgttcctaaagccaaattta

SEQ ID NO: 5831774 - DNA, 25 bp, Homo sapien
gccgcccactcgagttgaagcgtgt

SEQ ID NO: 5831775 - DNA, 25 bp, Homo sapien
acacgcttcaactcgagtgggcggc

SEQ ID NO: 5831776 - DNA, 25 bp, Homo sapien
atcagaaaataaactagctattaat

SEQ ID NO: 5831777 - DNA, 25 bp, Homo sapien
attaatagctagtttattttctgat

SEQ ID NO: 5831778 - DNA, 25 bp, Homo sapien
ttttgactactttatactgaaagta

SEQ ID NO: 5831779 - DNA, 25 bp, Homo sapien
tactttcagtataaagtagtcaaaa

SEQ ID NO: 5831780 - DNA, 25 bp, Homo sapien
atcagtctagagaatctaaaaatac

SEQ ID NO: 5831781 - DNA, 25 bp, Homo sapien
gtatttttagattctctagactgat

SEQ ID NO: 5831782 - DNA, 25 bp, Homo sapien
tatatcaatagtaagaatttttccg

SEQ ID NO: 5831783 - DNA, 25 bp, Homo sapien
cggaaaaattcttactattgatata

SEQ ID NO: 5831784 - DNA, 25 bp, Homo sapien
ctatatcaatagtaagaatttttcc

SEQ ID NO: 5831785 - DNA, 25 bp, Homo sapien
ggaaaaattcttactattgatatag

SEQ ID NO: 5831786 - DNA, 25 bp, Homo sapien
tacacgattgcccagccctcgtaga

SEQ ID NO: 5831787 - DNA, 25 bp, Homo sapien
tctacgagggctgggcaatcgtgta

SEQ ID NO: 5831788 - DNA, 25 bp, Homo sapien
taagtcaagtccagaaggaagacac

SEQ ID NO: 5831789 - DNA, 25 bp, Homo sapien
gtgtcttccttctggacttgactta

SEQ ID NO: 5831790 - DNA, 25 bp, Homo sapien
ggacatacttctacctaagggtata

SEQ ID NO: 5831791 - DNA, 25 bp, Homo sapien
tatacccttaggtagaagtatgtcc

SEQ ID NO: 5831792 - DNA, 25 bp, Homo sapien
cgaaacatacttcgtttaaaccaca

SEQ ID NO: 5831793 - DNA, 25 bp, Homo sapien
tgtggtttaaacgaagtatgtttcg

SEQ ID NO: 5831794 - DNA, 25 bp, Homo sapien
gaggccccgggcgaaccgggagtca

SEQ ID NO: 5831795 - DNA, 25 bp, Homo sapien
tgactcccggttcgcccggggcctc

SEQ ID NO: 5831796 - DNA, 25 bp, Homo sapien
taagacgtgcacgtttactacgagt

SEQ ID NO: 5831797 - DNA, 25 bp, Homo sapien
actcgtagtaaacgtgcacgtctta

SEQ ID NO: 5831798 - DNA, 25 bp, Homo sapien
aggactgtggtccatacaattcaac

SEQ ID NO: 5831799 - DNA, 25 bp, Homo sapien
gttgaattgtatggaccacagtcct

SEQ ID NO: 5831800 - DNA, 25 bp, Homo sapien
catactttatgtctgggtcccgaag

SEQ ID NO: 5831801 - DNA, 25 bp, Homo sapien
cttcgggacccagacataaagtatg

SEQ ID NO: 5831802 - DNA, 25 bp, Homo sapien
gaggcccatttcccgagaaggtacg

SEQ ID NO: 5831803 - DNA, 25 bp, Homo sapien
cgtaccttctcgggaaatgggcctc

SEQ ID NO: 5831804 - DNA, 25 bp, Homo sapien
gacttccacgcccaactcccgagac

SEQ ID NO: 5831805 - DNA, 25 bp, Homo sapien
gtctcgggagttgggcgtggaagtc

SEQ ID NO: 5831806 - DNA, 25 bp, Homo sapien
ccatatgtctcgaaatatcataacg

SEQ ID NO: 5831807 - DNA, 25 bp, Homo sapien
cgttatgatatttcgagacatatgg

SEQ ID NO: 5831808 - DNA, 25 bp, Homo sapien
aagtcctgggaactaaagaaggaca

SEQ ID NO: 5831809 - DNA, 25 bp, Homo sapien
tgtccttctttagttcccaggactt

SEQ ID NO: 5831810 - DNA, 25 bp, Homo sapien
ccgccgaggtcggatcgagagaggt

SEQ ID NO: 5831811 - DNA, 25 bp, Homo sapien
acctctctcgatccgacctcggcgg

SEQ ID NO: 5831812 - DNA, 25 bp, Homo sapien
gacatttaaaaaacttcattaatag

SEQ ID NO: 5831813 - DNA, 25 bp, Homo sapien
ctattaatgaagttttttaaatgtc

SEQ ID NO: 5831814 - DNA, 25 bp, Homo sapien
gacacgcgtcctcctccgaccgtcg

SEQ ID NO: 5831815 - DNA, 25 bp, Homo sapien
cgacggtcggaggaggacgcgtgtc

SEQ ID NO: 5831816 - DNA, 25 bp, Homo sapien
taggaaaacctgcaaaggaacgact

SEQ ID NO: 5831817 - DNA, 25 bp, Homo sapien
agtcgttcctttgcaggttttccta

SEQ ID NO: 5831818 - DNA, 25 bp, Homo sapien
caatcagtgttactagacttgactg

SEQ ID NO: 5831819 - DNA, 25 bp, Homo sapien
cagtcaagtctagtaacactgattg

SEQ ID NO: 5831820 - DNA, 25 bp, Homo sapien
cggtccacaccataaaccattttct

SEQ ID NO: 5831821 - DNA, 25 bp, Homo sapien
agaaaatggtttatggtgtggaccg

SEQ ID NO: 5831822 - DNA, 25 bp, Homo sapien
gaccgagacgatcaccgtggtagca

SEQ ID NO: 5831823 - DNA, 25 bp, Homo sapien
tgctaccacggtgatcgtctcggtc

SEQ ID NO: 5831824 - DNA, 25 bp, Homo sapien
agtgactgttgagatcgacagtaat

SEQ ID NO: 5831825 - DNA, 25 bp, Homo sapien
attactgtcgatctcaacagtcact

SEQ ID NO: 5831826 - DNA, 25 bp, Homo sapien
aatgaatctgtaaaaggatggaact

SEQ ID NO: 5831827 - DNA, 25 bp, Homo sapien
agttccatccttttacagattcatt

SEQ ID NO: 5831828 - DNA, 25 bp, Homo sapien
aaaatacgtgatgaagattattttc

SEQ ID NO: 5831829 - DNA, 25 bp, Homo sapien
gaaaataatcttcatcacgtatttt

SEQ ID NO: 5831830 - DNA, 25 bp, Homo sapien
agttttgcgtggagctaggtcgtat

SEQ ID NO: 5831831 - DNA, 25 bp, Homo sapien
atacgacctagctccacgcaaaact

SEQ ID NO: 5831832 - DNA, 25 bp, Homo sapien
tgtaacttgtataaagtgtgttttt

SEQ ID NO: 5831833 - DNA, 25 bp, Homo sapien
aaaaacacactttatacaagttaca

SEQ ID NO: 5831834 - DNA, 25 bp, Homo sapien
tcagtagtcataattcgaatatcat

SEQ ID NO: 5831835 - DNA, 25 bp, Homo sapien
atgatattcgaattatgactactga

SEQ ID NO: 5831836 - DNA, 25 bp, Homo sapien
gtacttaagagaaacaatatttgat

SEQ ID NO: 5831837 - DNA, 25 bp, Homo sapien
atcaaatattgtttctcttaagtac

SEQ ID NO: 5831838 - DNA, 25 bp, Homo sapien
agtacttaagagaaacaatatttga

SEQ ID NO: 5831839 - DNA, 25 bp, Homo sapien
tcaaatattgtttctcttaagtact

SEQ ID NO: 5831840 - DNA, 25 bp, Homo sapien
tacttaagagaaacaatatttgatt

SEQ ID NO: 5831841 - DNA, 25 bp, Homo sapien
aatcaaatattgtttctcttaagta

SEQ ID NO: 5831842 - DNA, 25 bp, Homo sapien
ggtgaggacagccggaccggctccc

SEQ ID NO: 5831843 - DNA, 25 bp, Homo sapien
gggagccggtccggctgtcctcacc

SEQ ID NO: 5831844 - DNA, 25 bp, Homo sapien
aaacacgttcaggaaagaatcaaag

SEQ ID NO: 5831845 - DNA, 25 bp, Homo sapien
ctttgattctttcctgaacgtgttt

SEQ ID NO: 5831846 - DNA, 25 bp, Homo sapien
gaccttgcggcagcccgaggccccg

SEQ ID NO: 5831847 - DNA, 25 bp, Homo sapien
cggggcctcgggctgccgcaaggtc

SEQ ID NO: 5831848 - DNA, 25 bp, Homo sapien
gtcggagaccttgcggcagcccgag

SEQ ID NO: 5831849 - DNA, 25 bp, Homo sapien
ctcgggctgccgcaaggtctccgac

SEQ ID NO: 5831850 - DNA, 25 bp, Homo sapien
aagtcacctccactattattcgttt

SEQ ID NO: 5831851 - DNA, 25 bp, Homo sapien
aaacgaataatagtggaggtgactt

SEQ ID NO: 5831852 - DNA, 25 bp, Homo sapien
cacatcaaagtgaaactgtattccg

SEQ ID NO: 5831853 - DNA, 25 bp, Homo sapien
cggaatacagtttcactttgatgtg

SEQ ID NO: 5831854 - DNA, 25 bp, Homo sapien
gtcttggactgtcccgtcactcccc

SEQ ID NO: 5831855 - DNA, 25 bp, Homo sapien
ggggagtgacgggacagtccaagac

SEQ ID NO: 5831856 - DNA, 25 bp, Homo sapien
acttcgaaataaagcggttgacttc

SEQ ID NO: 5831857 - DNA, 25 bp, Homo sapien
gaagtcaaccgctttatttcgaagt

SEQ ID NO: 5831858 - DNA, 25 bp, Homo sapien
accctacctagagcgcccgccctcc

SEQ ID NO: 5831859 - DNA, 25 bp, Homo sapien
ggagggcgggcgctctaggtagggt

SEQ ID NO: 5831860 - DNA, 25 bp, Homo sapien
gagcgaggtacgcacacccctcacc

SEQ ID NO: 5831861 - DNA, 25 bp, Homo sapien
ggtgaggggtgtgcgtacctcgctc

SEQ ID NO: 5831862 - DNA, 25 bp, Homo sapien
ttgggcacacgagctgagacacggc

SEQ ID NO: 5831863 - DNA, 25 bp, Homo sapien
gccgtgtctcagctcgtgtgcccaa

SEQ ID NO: 5831864 - DNA, 25 bp, Homo sapien
ggctctcgcgacggccgcggcaccc

SEQ ID NO: 5831865 - DNA, 25 bp, Homo sapien
gggtgccgcggccgtcgcgagagcc

SEQ ID NO: 5831866 - DNA, 25 bp, Homo sapien
aacgacacatgggttgatccgtagt

SEQ ID NO: 5831867 - DNA, 25 bp, Homo sapien
actacggatcaacccatgtgtcgtt

SEQ ID NO: 5831868 - DNA, 25 bp, Homo sapien
actacacacaaagtgcagcgtgccg

SEQ ID NO: 5831869 - DNA, 25 bp, Homo sapien
cggcacgctgcactttgtgtgtagt

SEQ ID NO: 5831870 - DNA, 25 bp, Homo sapien
aaactcttatcgatcttgatttcaa

SEQ ID NO: 5831871 - DNA, 25 bp, Homo sapien
ttgaaatcaagatcgataagagttt

SEQ ID NO: 5831872 - DNA, 25 bp, Homo sapien
cgcttccaccaactcctgctgtggg

SEQ ID NO: 5831873 - DNA, 25 bp, Homo sapien
cccacagcaggagttggtggaagcg

SEQ ID NO: 5831874 - DNA, 25 bp, Homo sapien
atcactgtaggcccctccgcggggt

SEQ ID NO: 5831875 - DNA, 25 bp, Homo sapien
accccgcggaggggcctacagtgat

SEQ ID NO: 5831876 - DNA, 25 bp, Homo sapien
acaactaactcggacacgtattaga

SEQ ID NO: 5831877 - DNA, 25 bp, Homo sapien
tctaatacgtgtccgagttagttgt

SEQ ID NO: 5831878 - DNA, 25 bp, Homo sapien
tcgtctccacggagaggcgtcggtc

SEQ ID NO: 5831879 - DNA, 25 bp, Homo sapien
gaccgacgcctctccgtggagacga

SEQ ID NO: 5831880 - DNA, 25 bp, Homo sapien
ctattgagacgtagaatgggtcaag

SEQ ID NO: 5831881 - DNA, 25 bp, Homo sapien
cttgacccattctacgtctcaatag

SEQ ID NO: 5831882 - DNA, 25 bp, Homo sapien
ccattgtcgtaggtcccgcttaaat

SEQ ID NO: 5831883 - DNA, 25 bp, Homo sapien
atttaagcgggacctacgacaatgg

SEQ ID NO: 5831884 - DNA, 25 bp, Homo sapien
gacagagggattcaacaaggacagt

SEQ ID NO: 5831885 - DNA, 25 bp, Homo sapien
actgtccttgttgaatccctctgtc

SEQ ID NO: 5831886 - DNA, 25 bp, Homo sapien
ggctcggttcgaggccgacgcgccg

SEQ ID NO: 5831887 - DNA, 25 bp, Homo sapien
cggcgcgtcggcctcgaaccgagcc

SEQ ID NO: 5831888 - DNA, 25 bp, Homo sapien
gagggcaccggccgtcactcgcggg

SEQ ID NO: 5831889 - DNA, 25 bp, Homo sapien
cccgcgagtgacggccggtgccctc

SEQ ID NO: 5831890 - DNA, 25 bp, Homo sapien
ggtaccccgggcagtcactcgtggc

SEQ ID NO: 5831891 - DNA, 25 bp, Homo sapien
gccacgagtgactgcccggggtacc

SEQ ID NO: 5831892 - DNA, 25 bp, Homo sapien
acaggcctcgcaccctttcgtaccg

SEQ ID NO: 5831893 - DNA, 25 bp, Homo sapien
cggtacgaaagggtgcgaggcctgt

SEQ ID NO: 5831894 - DNA, 25 bp, Homo sapien
catgagtaatgaacgacctccgtag

SEQ ID NO: 5831895 - DNA, 25 bp, Homo sapien
ctacggaggtcgttcattactcatg

SEQ ID NO: 5831896 - DNA, 25 bp, Homo sapien
atttatcaccttacatatcttagta

SEQ ID NO: 5831897 - DNA, 25 bp, Homo sapien
tactaagatatgtaaggtgataaat

SEQ ID NO: 5831898 - DNA, 25 bp, Homo sapien
gtcttccactgaccagccatcgacg

SEQ ID NO: 5831899 - DNA, 25 bp, Homo sapien
cgtcgatggctggtcagtggaagac

SEQ ID NO: 5831900 - DNA, 25 bp, Homo sapien
ccggggacttaccctgtgtcgtctg

SEQ ID NO: 5831901 - DNA, 25 bp, Homo sapien
cagacgacacagggtaagtccccgg

SEQ ID NO: 5831902 - DNA, 25 bp, Homo sapien
agtcggtaggtcacagaccaggtgt

SEQ ID NO: 5831903 - DNA, 25 bp, Homo sapien
acacctggtctgtgacctaccgact

SEQ ID NO: 5831904 - DNA, 25 bp, Homo sapien
ttttgacttcagaattcagtagaac

SEQ ID NO: 5831905 - DNA, 25 bp, Homo sapien
gttctactgaattctgaagtcaaaa

SEQ ID NO: 5831906 - DNA, 25 bp, Homo sapien
cgtctcacgtcttatcgtccgctcc

SEQ ID NO: 5831907 - DNA, 25 bp, Homo sapien
ggagcggacgataagacgtgagacg

SEQ ID NO: 5831908 - DNA, 25 bp, Homo sapien
acgtaacgaaactatcttgtatcct

SEQ ID NO: 5831909 - DNA, 25 bp, Homo sapien
aggatacaagatagtttcgttacgt

SEQ ID NO: 5831910 - DNA, 25 bp, Homo sapien
catgtcggcacgaacatacgtaacg

SEQ ID NO: 5831911 - DNA, 25 bp, Homo sapien
cgttacgtatgttcgtgccgacatg

SEQ ID NO: 5831912 - DNA, 25 bp, Homo sapien
tagattaagtaatgaacactgtcat

SEQ ID NO: 5831913 - DNA, 25 bp, Homo sapien
atgacagtgttcattacttaatcta

SEQ ID NO: 5831914 - DNA, 25 bp, Homo sapien
aactcatataaagataaagaccaaa

SEQ ID NO: 5831915 - DNA, 25 bp, Homo sapien
tttggtctttatctttatatgagtt

SEQ ID NO: 5831916 - DNA, 25 bp, Homo sapien
agttggtcgtctatggcccagtcga

SEQ ID NO: 5831917 - DNA, 25 bp, Homo sapien
tcgactgggccatagacgaccaact

SEQ ID NO: 5831918 - DNA, 25 bp, Homo sapien
attgtacgaaatatagtagtgaaag

SEQ ID NO: 5831919 - DNA, 25 bp, Homo sapien
ctttcactactatatttcgtacaat

SEQ ID NO: 5831920 - DNA, 25 bp, Homo sapien
gataaaagatgtacagaaacctcat

SEQ ID NO: 5831921 - DNA, 25 bp, Homo sapien
atgaggtttctgtacatcttttatc

SEQ ID NO: 5831922 - DNA, 25 bp, Homo sapien
aacatctcccctgcgagccatcggg

SEQ ID NO: 5831923 - DNA, 25 bp, Homo sapien
cccgatggctcgcaggggagatgtt

SEQ ID NO: 5831924 - DNA, 25 bp, Homo sapien
cggtctaggacgctttgaggtccgg

SEQ ID NO: 5831925 - DNA, 25 bp, Homo sapien
ccggacctcaaagcgtcctagaccg

SEQ ID NO: 5831926 - DNA, 25 bp, Homo sapien
agggcgtcctccgtgctcggccggg

SEQ ID NO: 5831927 - DNA, 25 bp, Homo sapien
cccggccgagcacggaggacgccct

SEQ ID NO: 5831928 - DNA, 25 bp, Homo sapien
aagaggtgcacttcctagtcggacg

SEQ ID NO: 5831929 - DNA, 25 bp, Homo sapien
cgtccgactaggaagtgcacctctt

SEQ ID NO: 5831930 - DNA, 25 bp, Homo sapien
gcgggtctcctagtcccagccgccg

SEQ ID NO: 5831931 - DNA, 25 bp, Homo sapien
cggcggctgggactaggagacccgc

SEQ ID NO: 5831932 - DNA, 25 bp, Homo sapien
ccattactggctctcttcagtttat

SEQ ID NO: 5831933 - DNA, 25 bp, Homo sapien
ataaactgaagagagccagtaatgg

SEQ ID NO: 5831934 - DNA, 25 bp, Homo sapien
cgtttcgcgtcatggtgcacgagga

SEQ ID NO: 5831935 - DNA, 25 bp, Homo sapien
tcctcgtgcaccatgacgcgaaacg

SEQ ID NO: 5831936 - DNA, 25 bp, Homo sapien
cccgaagaccgcgacacgggccgtc

SEQ ID NO: 5831937 - DNA, 25 bp, Homo sapien
gacggcccgtgtcgcggtcttcggg

SEQ ID NO: 5831938 - DNA, 25 bp, Homo sapien
aatttcgttacagggtctataataa

SEQ ID NO: 5831939 - DNA, 25 bp, Homo sapien
ttattatagaccctgtaacgaaatt

SEQ ID NO: 5831940 - DNA, 25 bp, Homo sapien
caaccttcgttccaactcaagacgt

SEQ ID NO: 5831941 - DNA, 25 bp, Homo sapien
acgtcttgagttggaacgaaggttg

SEQ ID NO: 5831942 - DNA, 25 bp, Homo sapien
gatgccacctacgcctgcggccctc

SEQ ID NO: 5831943 - DNA, 25 bp, Homo sapien
gagggccgcaggcgtaggtggcatc

SEQ ID NO: 5831944 - DNA, 25 bp, Homo sapien
cgggagtaccgggagctgcggacag

SEQ ID NO: 5831945 - DNA, 25 bp, Homo sapien
ctgtccgcagctcccggtactcccg

SEQ ID NO: 5831946 - DNA, 25 bp, Homo sapien
actatagggaccgaactgacgtcct

SEQ ID NO: 5831947 - DNA, 25 bp, Homo sapien
aggacgtcagttcggtccctatagt

SEQ ID NO: 5831948 - DNA, 25 bp, Homo sapien
tgaccacccctaaaacggagacatg

SEQ ID NO: 5831949 - DNA, 25 bp, Homo sapien
catgtctccgttttaggggtggtca

SEQ ID NO: 5831950 - DNA, 25 bp, Homo sapien
aaagggactatcaacatgagtctgg

SEQ ID NO: 5831951 - DNA, 25 bp, Homo sapien
ccagactcatgttgatagtcccttt

SEQ ID NO: 5831952 - DNA, 25 bp, Homo sapien
ggtcacgtgctgtgttcactcttac

SEQ ID NO: 5831953 - DNA, 25 bp, Homo sapien
gtaagagtgaacacagcacgtgacc

SEQ ID NO: 5831954 - DNA, 25 bp, Homo sapien
gggtccctttgcacaacctccgacg

SEQ ID NO: 5831955 - DNA, 25 bp, Homo sapien
cgtcggaggttgtgcaaagggaccc

SEQ ID NO: 5831956 - DNA, 25 bp, Homo sapien
ccacttcgtaaaactagtagaggtg

SEQ ID NO: 5831957 - DNA, 25 bp, Homo sapien
cacctctactagttttacgaagtgg

SEQ ID NO: 5831958 - DNA, 25 bp, Homo sapien
ttgaacactgaaaactctatcatcg

SEQ ID NO: 5831959 - DNA, 25 bp, Homo sapien
cgatgatagagttttcagtgttcaa

SEQ ID NO: 5831960 - DNA, 25 bp, Homo sapien
ccggacaccctcgggcttcgtgcac

SEQ ID NO: 5831961 - DNA, 25 bp, Homo sapien
gtgcacgaagcccgagggtgtccgg

SEQ ID NO: 5831962 - DNA, 25 bp, Homo sapien
ggtgttcgttcagaggtgcacctaa

SEQ ID NO: 5831963 - DNA, 25 bp, Homo sapien
ttaggtgcacctctgaacgaacacc

SEQ ID NO: 5831964 - DNA, 25 bp, Homo sapien
acattcaggtgttattgaataggta

SEQ ID NO: 5831965 - DNA, 25 bp, Homo sapien
tacctattcaataacacctgaatgt

SEQ ID NO: 5831966 - DNA, 25 bp, Homo sapien
aagttgagatacacgtggaagggag

SEQ ID NO: 5831967 - DNA, 25 bp, Homo sapien
ctcccttccacgtgtatctcaactt

SEQ ID NO: 5831968 - DNA, 25 bp, Homo sapien
actggtttgcgatcaacttgtctac

SEQ ID NO: 5831969 - DNA, 25 bp, Homo sapien
gtagacaagttgatcgcaaaccagt

SEQ ID NO: 5831970 - DNA, 25 bp, Homo sapien
cttatatgttcaaaggaccgttagt

SEQ ID NO: 5831971 - DNA, 25 bp, Homo sapien
actaacggtcctttgaacatataag

SEQ ID NO: 5831972 - DNA, 25 bp, Homo sapien
aagaacgacaagaaactcacactat

SEQ ID NO: 5831973 - DNA, 25 bp, Homo sapien
atagtgtgagtttcttgtcgttctt

SEQ ID NO: 5831974 - DNA, 25 bp, Homo sapien
aactacatcaggatggttgtccgtc

SEQ ID NO: 5831975 - DNA, 25 bp, Homo sapien
gacggacaaccatcctgatgtagtt

SEQ ID NO: 5831976 - DNA, 25 bp, Homo sapien
acggtacttgacgtccacaggaagg

SEQ ID NO: 5831977 - DNA, 25 bp, Homo sapien
ccttcctgtggacgtcaagtaccgt

SEQ ID NO: 5831978 - DNA, 25 bp, Homo sapien
gaaagacaccatgcatctggaacgt

SEQ ID NO: 5831979 - DNA, 25 bp, Homo sapien
acgttccagatgcatggtgtctttc

SEQ ID NO: 5831980 - DNA, 25 bp, Homo sapien
tattttgaactaagaggatcatttt

SEQ ID NO: 5831981 - DNA, 25 bp, Homo sapien
aaaatgatcctcttagttcaaaata

SEQ ID NO: 5831982 - DNA, 25 bp, Homo sapien
gttcacgtatgaaggatattaaaat

SEQ ID NO: 5831983 - DNA, 25 bp, Homo sapien
attttaatatccttcatacgtgaac

SEQ ID NO: 5831984 - DNA, 25 bp, Homo sapien
gtgaataatcctgaaaactataaac

SEQ ID NO: 5831985 - DNA, 25 bp, Homo sapien
gtttatagttttcaggattattcac

SEQ ID NO: 5831986 - DNA, 25 bp, Homo sapien
acgaagaccataagctaccaaaaag

SEQ ID NO: 5831987 - DNA, 25 bp, Homo sapien
ctttttggtagcttatggtcttcgt

SEQ ID NO: 5831988 - DNA, 25 bp, Homo sapien
gactgagagccccgctagccgctgg

SEQ ID NO: 5831989 - DNA, 25 bp, Homo sapien
ccagcggctagcggggctctcagtc

SEQ ID NO: 5831990 - DNA, 25 bp, Homo sapien
acgccgcgtctcgttcatgaagaac

SEQ ID NO: 5831991 - DNA, 25 bp, Homo sapien
gttcttcatgaacgagacgcggcgt

SEQ ID NO: 5831992 - DNA, 25 bp, Homo sapien
gtcgtccggactcctcccgtgcccc

SEQ ID NO: 5831993 - DNA, 25 bp, Homo sapien
ggggcacgggaggagtccggacgac

SEQ ID NO: 5831994 - DNA, 25 bp, Homo sapien
ccggagagtcgtccggactcctccc

SEQ ID NO: 5831995 - DNA, 25 bp, Homo sapien
gggaggagtccggacgactctccgg

SEQ ID NO: 5831996 - DNA, 25 bp, Homo sapien
tgttactttccattttacatactga

SEQ ID NO: 5831997 - DNA, 25 bp, Homo sapien
tcagtatgtaaaatggaaagtaaca

SEQ ID NO: 5831998 - DNA, 25 bp, Homo sapien
caggaggaagtctaagcagaacatc

SEQ ID NO: 5831999 - DNA, 25 bp, Homo sapien
gatgttctgcttagacttcctcctg

SEQ ID NO: 5832000 - DNA, 25 bp, Homo sapien
gtttgtgccggcgagcgaagcctct

SEQ ID NO: 5832001 - DNA, 25 bp, Homo sapien
agaggcttcgctcgccggcacaaac

SEQ ID NO: 5832002 - DNA, 25 bp, Homo sapien
cgggcgccccgtttgtgccggcgag

SEQ ID NO: 5832003 - DNA, 25 bp, Homo sapien
ctcgccggcacaaacggggcgcccg

SEQ ID NO: 5832004 - DNA, 25 bp, Homo sapien
ggtcttaacgagtgttattaacttc

SEQ ID NO: 5832005 - DNA, 25 bp, Homo sapien
gaagttaataacactcgttaagacc

SEQ ID NO: 5832006 - DNA, 25 bp, Homo sapien
ccacgtcgtccacgaggtacttatt

SEQ ID NO: 5832007 - DNA, 25 bp, Homo sapien
aataagtacctcgtggacgacgtgg

SEQ ID NO: 5832008 - DNA, 25 bp, Homo sapien
cccgcagcacccacggtctctggaa

SEQ ID NO: 5832009 - DNA, 25 bp, Homo sapien
ttccagagaccgtgggtgctgcggg

SEQ ID NO: 5832010 - DNA, 25 bp, Homo sapien
ggaggaacagacttctccgcggtcc

SEQ ID NO: 5832011 - DNA, 25 bp, Homo sapien
ggaccgcggagaagtctgttcctcc

SEQ ID NO: 5832012 - DNA, 25 bp, Homo sapien
gtaaaagtcattactttttttatga

SEQ ID NO: 5832013 - DNA, 25 bp, Homo sapien
tcataaaaaaagtaatgacttttac

SEQ ID NO: 5832014 - DNA, 25 bp, Homo sapien
gggaaacacactctcctcatgacat

SEQ ID NO: 5832015 - DNA, 25 bp, Homo sapien
atgtcatgaggagagtgtgtttccc

SEQ ID NO: 5832016 - DNA, 25 bp, Homo sapien
tgagacttaagatatttgacaacct

SEQ ID NO: 5832017 - DNA, 25 bp, Homo sapien
aggttgtcaaatatcttaagtctca

SEQ ID NO: 5832018 - DNA, 25 bp, Homo sapien
cgtcggttttctacgtcatcgtcgt

SEQ ID NO: 5832019 - DNA, 25 bp, Homo sapien
acgacgatgacgtagaaaaccgacg

SEQ ID NO: 5832020 - DNA, 25 bp, Homo sapien
tccgagacaatctatgacggaagaa

SEQ ID NO: 5832021 - DNA, 25 bp, Homo sapien
ttcttccgtcatagattgtctcgga

SEQ ID NO: 5832022 - DNA, 25 bp, Homo sapien
tatgaccgactcgtgctaagtgaag

SEQ ID NO: 5832023 - DNA, 25 bp, Homo sapien
cttcacttagcacgagtcggtcata

SEQ ID NO: 5832024 - DNA, 25 bp, Homo sapien
gatagactgaccctttatcgcctat

SEQ ID NO: 5832025 - DNA, 25 bp, Homo sapien
ataggcgataaagggtcagtctatc

SEQ ID NO: 5832026 - DNA, 25 bp, Homo sapien
tagtcttgaggttgtaattaatacc

SEQ ID NO: 5832027 - DNA, 25 bp, Homo sapien
ggtattaattacaacctcaagacta

SEQ ID NO: 5832028 - DNA, 25 bp, Homo sapien
aaagacactactaataaagtctatt

SEQ ID NO: 5832029 - DNA, 25 bp, Homo sapien
aatagactttattagtagtgtcttt

SEQ ID NO: 5832030 - DNA, 25 bp, Homo sapien
taaagacactactaataaagtctat

SEQ ID NO: 5832031 - DNA, 25 bp, Homo sapien
atagactttattagtagtgtcttta

SEQ ID NO: 5832032 - DNA, 25 bp, Homo sapien
attatctcgttaatagtgacagttt

SEQ ID NO: 5832033 - DNA, 25 bp, Homo sapien
aaactgtcactattaacgagataat

SEQ ID NO: 5832034 - DNA, 25 bp, Homo sapien
gaaagcggatgagttgtccaataat

SEQ ID NO: 5832035 - DNA, 25 bp, Homo sapien
attattggacaactcatccgctttc

SEQ ID NO: 5832036 - DNA, 25 bp, Homo sapien
gtggagtcataccaatggaaggtct

SEQ ID NO: 5832037 - DNA, 25 bp, Homo sapien
agaccttccattggtatgactccac

SEQ ID NO: 5832038 - DNA, 25 bp, Homo sapien
gtccttcggtcacaggttacctaca

SEQ ID NO: 5832039 - DNA, 25 bp, Homo sapien
tgtaggtaacctgtgaccgaaggac

SEQ ID NO: 5832040 - DNA, 25 bp, Homo sapien
cggtgacttccagcgagttatacac

SEQ ID NO: 5832041 - DNA, 25 bp, Homo sapien
gtgtataactcgctggaagtcaccg

SEQ ID NO: 5832042 - DNA, 25 bp, Homo sapien
taggaaccatgaggacctactttat

SEQ ID NO: 5832043 - DNA, 25 bp, Homo sapien
ataaagtaggtcctcatggttccta

SEQ ID NO: 5832044 - DNA, 25 bp, Homo sapien
aactcacctagtttatagccatctg

SEQ ID NO: 5832045 - DNA, 25 bp, Homo sapien
cagatggctataaactaggtgagtt

SEQ ID NO: 5832046 - DNA, 25 bp, Homo sapien
catttccataggcttacaaacatat

SEQ ID NO: 5832047 - DNA, 25 bp, Homo sapien
atatgtttgtaagcctatggaaatg

SEQ ID NO: 5832048 - DNA, 25 bp, Homo sapien
gaccgcgtgtccgacggttcgtcta

SEQ ID NO: 5832049 - DNA, 25 bp, Homo sapien
tagacgaaccgtcggacacgcggtc

SEQ ID NO: 5832050 - DNA, 25 bp, Homo sapien
agtgctattgtataaaaaattgtta

SEQ ID NO: 5832051 - DNA, 25 bp, Homo sapien
taacaattttttatacaatagcact

SEQ ID NO: 5832052 - DNA, 25 bp, Homo sapien
ggtccccctggagccgaggtccagt

SEQ ID NO: 5832053 - DNA, 25 bp, Homo sapien
actggacctcggctccagggggacc

SEQ ID NO: 5832054 - DNA, 25 bp, Homo sapien
ggtggaactactaggtcactattga

SEQ ID NO: 5832055 - DNA, 25 bp, Homo sapien
tcaatagtgacctagtagttccacc

SEQ ID NO: 5832056 - DNA, 25 bp, Homo sapien
cgctctggtcgcaaacggtcgaagg

SEQ ID NO: 5832057 - DNA, 25 bp, Homo sapien
ccttcgaccgtttgcgaccagagcg

SEQ ID NO: 5832058 - DNA, 25 bp, Homo sapien
agttcgaactgagagtgccgtaagg

SEQ ID NO: 5832059 - DNA, 25 bp, Homo sapien
ccttacggcactctcagttcgaact

SEQ ID NO: 5832060 - DNA, 25 bp, Homo sapien
tcgtccgatcgactgactcccgcta

SEQ ID NO: 5832061 - DNA, 25 bp, Homo sapien
tagcgggagtcagtcgatcggacga

SEQ ID NO: 5832062 - DNA, 25 bp, Homo sapien
ggcgacgcgtctccgcgaccgagga

SEQ ID NO: 5832063 - DNA, 25 bp, Homo sapien
tcctcggtcgcggagacgcgtcgcc

SEQ ID NO: 5832064 - DNA, 25 bp, Homo sapien
cgtcggcgacgcgtctccgcgaccg

SEQ ID NO: 5832065 - DNA, 25 bp, Homo sapien
cggtcgcggagacgcgtcgccgacg

SEQ ID NO: 5832066 - DNA, 25 bp, Homo sapien
ggcgtcggcgacgcgtctccgcgac

SEQ ID NO: 5832067 - DNA, 25 bp, Homo sapien
gtcgcggagacgcgtcgccgacgcc

SEQ ID NO: 5832068 - DNA, 25 bp, Homo sapien
gtaagtgccgacgtaggtgacggag

SEQ ID NO: 5832069 - DNA, 25 bp, Homo sapien
ctccgtcacctacgtcggcacttac

SEQ ID NO: 5832070 - DNA, 25 bp, Homo sapien
gactcctgtccactcatcacttggt

SEQ ID NO: 5832071 - DNA, 25 bp, Homo sapien
accaagtgatgagtggacaggagtc

SEQ ID NO: 5832072 - DNA, 25 bp, Homo sapien
ccaaggtaatatcagtactgtaagt

SEQ ID NO: 5832073 - DNA, 25 bp, Homo sapien
acttacagtactgatattaccttgg

SEQ ID NO: 5832074 - DNA, 25 bp, Homo sapien
gaggtctcgcgcgagggcccagccg

SEQ ID NO: 5832075 - DNA, 25 bp, Homo sapien
cggctgggccctcgcgcgagacctc

SEQ ID NO: 5832076 - DNA, 25 bp, Homo sapien
agaagatggaaacgtagtagtgtac

SEQ ID NO: 5832077 - DNA, 25 bp, Homo sapien
gtacactactacgtttccatcttct

SEQ ID NO: 5832078 - DNA, 25 bp, Homo sapien
tgcctcggcggacggtggcccggta

SEQ ID NO: 5832079 - DNA, 25 bp, Homo sapien
taccgggccaccgtccgccgaggca

SEQ ID NO: 5832080 - DNA, 25 bp, Homo sapien
gggtgtccagtggtcgcgtcgtagg

SEQ ID NO: 5832081 - DNA, 25 bp, Homo sapien
cctacgacgcgaccactggacaccc

SEQ ID NO: 5832082 - DNA, 25 bp, Homo sapien
agacgactcattactacttgtctgt

SEQ ID NO: 5832083 - DNA, 25 bp, Homo sapien
acagacaagtagtaatgagtcgtct

SEQ ID NO: 5832084 - DNA, 25 bp, Homo sapien
tgagtaccgcaccacggaccgagaa

SEQ ID NO: 5832085 - DNA, 25 bp, Homo sapien
ttctcggtccgtggtgcggtactca

SEQ ID NO: 5832086 - DNA, 25 bp, Homo sapien
gacgccggcagcatctggctagaac

SEQ ID NO: 5832087 - DNA, 25 bp, Homo sapien
gttctagccagatgctgccggcgtc

SEQ ID NO: 5832088 - DNA, 25 bp, Homo sapien
gtaatgaaacagtacctccctgttt

SEQ ID NO: 5832089 - DNA, 25 bp, Homo sapien
aaacagggaggtactgtttcattac

SEQ ID NO: 5832090 - DNA, 25 bp, Homo sapien
gtcggcggccttcgaggggcccacg

SEQ ID NO: 5832091 - DNA, 25 bp, Homo sapien
cgtgggcccctcgaaggccgccgac

SEQ ID NO: 5832092 - DNA, 25 bp, Homo sapien
taggacggagtattgcgacgcgaac

SEQ ID NO: 5832093 - DNA, 25 bp, Homo sapien
gttcgcgtcgcaatactccgtccta

SEQ ID NO: 5832094 - DNA, 25 bp, Homo sapien
ctatgattgtagacacttcgattta

SEQ ID NO: 5832095 - DNA, 25 bp, Homo sapien
taaatcgaagtgtctacaatcatag

SEQ ID NO: 5832096 - DNA, 25 bp, Homo sapien
gttgtacatggtctgattcttttat

SEQ ID NO: 5832097 - DNA, 25 bp, Homo sapien
gcatatatttgttatattgtacact

SEQ ID NO: 5832098 - DNA, 25 bp, Homo sapien
ttcccaaagagatggctagcaacca

SEQ ID NO: 5832099 - DNA, 25 bp, Homo sapien
ttgccaaatctgtgttacaattctg

SEQ ID NO: 5832100 - DNA, 25 bp, Homo sapien
ttattggaagagcacagtagtttga

SEQ ID NO: 5832101 - DNA, 25 bp, Homo sapien
ttctgtgtattgtgatcacaacttt

SEQ ID NO: 5832102 - DNA, 25 bp, Homo sapien
ttgatcagtgttttttctgtgtatt

SEQ ID NO: 5832103 - DNA, 25 bp, Homo sapien
gatttaccaaagtcactggagacaa

SEQ ID NO: 5832104 - DNA, 25 bp, Homo sapien
acattaatagggaggcttttatgtt

SEQ ID NO: 5832105 - DNA, 25 bp, Homo sapien
gctagacagacagttcttgccaaat

SEQ ID NO: 5832106 - DNA, 25 bp, Homo sapien
ccccaaacatattttggtaataata

SEQ ID NO: 5832107 - DNA, 25 bp, Homo sapien
aattaagttccattgcatgagacct

SEQ ID NO: 5832108 - DNA, 25 bp, Homo sapien
gtctgattcttttatacttatttgt

SEQ ID NO: 5832109 - DNA, 25 bp, Homo sapien
gaccttttagttgtaggagtgatgg

SEQ ID NO: 5832110 - DNA, 25 bp, Homo sapien
ctgtgcatatatttgttatattgta

SEQ ID NO: 5832111 - DNA, 25 bp, Homo sapien
atttcgtcttgtatgtgtaaataat

SEQ ID NO: 5832112 - DNA, 25 bp, Homo sapien
gtggttgttgttgacgataaattca

SEQ ID NO: 5832113 - DNA, 25 bp, Homo sapien
ttggctttatgtgcaaagggaaatt

SEQ ID NO: 5832114 - DNA, 25 bp, Homo sapien
ttatgtgttgtacatggtctgattc

SEQ ID NO: 5832115 - DNA, 25 bp, Homo sapien
agagcacagtagtttgaagtcatgg

SEQ ID NO: 5832116 - DNA, 25 bp, Homo sapien
gcaaagggaaattcagtttcttatg

SEQ ID NO: 5832117 - DNA, 25 bp, Homo sapien
acacttatgtgttgtacatggtctg

SEQ ID NO: 5832118 - DNA, 25 bp, Homo sapien
aagttggcatcctctgaacaacctt

SEQ ID NO: 5832119 - DNA, 25 bp, Homo sapien
atgtcttcatcgacagtacactaaa

SEQ ID NO: 5832120 - DNA, 25 bp, Homo sapien
ctaagattttggctttatgtgcaaa

SEQ ID NO: 5832121 - DNA, 25 bp, Homo sapien
gaatgttactatgagcatttgtgtt

SEQ ID NO: 5832122 - DNA, 25 bp, Homo sapien
atgtttgatgtaattcttacagttc

SEQ ID NO: 5832123 - DNA, 25 bp, Homo sapien
tggttttcttttattctatttcgtc

SEQ ID NO: 5832124 - DNA, 25 bp, Homo sapien
tttaccaaagtcactggagacaaat

SEQ ID NO: 5832125 - DNA, 25 bp, Homo sapien
gttttgtggactacattaataggga

SEQ ID NO: 5832126 - DNA, 25 bp, Homo sapien
catggtctgattcttttatacttat

SEQ ID NO: 5832127 - DNA, 25 bp, Homo sapien
tgtagcccatacaagtccctaatgt

SEQ ID NO: 5832128 - DNA, 25 bp, Homo sapien
atacaagtccctaatgtacacttaa

SEQ ID NO: 5832129 - DNA, 25 bp, Homo sapien
cccaaagagatggctagcaaccatt

SEQ ID NO: 5832130 - DNA, 25 bp, Homo sapien
agtttgaagtcatgggaactgctgt

SEQ ID NO: 5832131 - DNA, 25 bp, Homo sapien
aaagtcactggagacaaattcagaa

SEQ ID NO: 5832132 - DNA, 25 bp, Homo sapien
gtttttacccactcgtgaatattaa

SEQ ID NO: 5832133 - DNA, 25 bp, Homo sapien
caattttctccaagttcctaagtac

SEQ ID NO: 5832134 - DNA, 25 bp, Homo sapien
aaataattttcagtctaatggcttt

SEQ ID NO: 5832135 - DNA, 25 bp, Homo sapien
gtgtttttacccactcgtgaatatt

SEQ ID NO: 5832136 - DNA, 25 bp, Homo sapien
ttgataggaaaagcattcggaagaa

SEQ ID NO: 5832137 - DNA, 25 bp, Homo sapien
ctaacacagacactgcaatgggtta

SEQ ID NO: 5832138 - DNA, 25 bp, Homo sapien
ataattctaagattttggctttatg

SEQ ID NO: 5832139 - DNA, 25 bp, Homo sapien
gtaaataattttcagtctaatggct

SEQ ID NO: 5832140 - DNA, 25 bp, Homo sapien
tcttgtatgtgtaaataattttcag

SEQ ID NO: 5832141 - DNA, 25 bp, Homo sapien
gggtttttagaccattagctgttta

SEQ ID NO: 5832142 - DNA, 25 bp, Homo sapien
aattctgaatgttactatgagcatt

SEQ ID NO: 5832143 - DNA, 25 bp, Homo sapien
aattgatcagtgttttttctgtgta

SEQ ID NO: 5832144 - DNA, 25 bp, Homo sapien
atgtgttgtacatggtctgattctt

SEQ ID NO: 5832145 - DNA, 25 bp, Homo sapien
atatatttgttatattgtacactta

SEQ ID NO: 5832146 - DNA, 25 bp, Homo sapien
ttcttttatacttatttgtcatgct

SEQ ID NO: 5832147 - DNA, 25 bp, Homo sapien
cagtagtttgaagtcatgggaactg

SEQ ID NO: 5832148 - DNA, 25 bp, Homo sapien
aaattcagtttcttatgtcttcatc

SEQ ID NO: 5832149 - DNA, 25 bp, Homo sapien
acctgccagttttgtggactacatt

SEQ ID NO: 5832150 - DNA, 25 bp, Homo sapien
cactaaatactgatttcaaataaaa

SEQ ID NO: 5832151 - DNA, 25 bp, Homo sapien
gtatgtgtaaataattttcagtcta

SEQ ID NO: 5832152 - DNA, 25 bp, Homo sapien
ccatgtctgtatatctgtgcatata

SEQ ID NO: 5832153 - DNA, 25 bp, Homo sapien
ggaaattcagtttcttatgtcttca

SEQ ID NO: 5832154 - DNA, 25 bp, Homo sapien
agaccattagctgtttatctgatct

SEQ ID NO: 5832155 - DNA, 25 bp, Homo sapien
aggtggttgttgttgacgataaatt

SEQ ID NO: 5832156 - DNA, 25 bp, Homo sapien
atagggaggcttttatgtttgatgt

SEQ ID NO: 5832157 - DNA, 25 bp, Homo sapien
aaagggaaattcagtttcttatgtc

SEQ ID NO: 5832158 - DNA, 25 bp, Homo sapien
ttctatttcgtcttgtatgtgtaaa

SEQ ID NO: 5832159 - DNA, 25 bp, Homo sapien
gattttggctttatgtgcaaaggga

SEQ ID NO: 5832160 - DNA, 25 bp, Homo sapien
aggagtgatggtctaggtaagttgg

SEQ ID NO: 5832161 - DNA, 25 bp, Homo sapien
aggcttttatgtttgatgtaattct

SEQ ID NO: 5832162 - DNA, 25 bp, Homo sapien
cagttctaagaattaagttccattg

SEQ ID NO: 5832163 - DNA, 25 bp, Homo sapien
tcatcgacagtacactaaatactga

SEQ ID NO: 5832164 - DNA, 25 bp, Homo sapien
tgtaattcttacagttctaagaatt

SEQ ID NO: 5832165 - DNA, 25 bp, Homo sapien
ttttctgtgtattgtgatcacaact

SEQ ID NO: 5832166 - DNA, 25 bp, Homo sapien
gcttttatgtttgatgtaattctta

SEQ ID NO: 5832167 - DNA, 25 bp, Homo sapien
gtcttcatcgacagtacactaaata

SEQ ID NO: 5832168 - DNA, 25 bp, Homo sapien
accctaaattgatcagtgttttttc

SEQ ID NO: 5832169 - DNA, 25 bp, Homo sapien
tttatacttatttgtcatgctgtct

SEQ ID NO: 5832170 - DNA, 25 bp, Homo sapien
ttcagaaggaatatatacctgccag

SEQ ID NO: 5832171 - DNA, 25 bp, Homo sapien
atgtctgtatatctgtgcatatatt

SEQ ID NO: 5832172 - DNA, 25 bp, Homo sapien
ttagctgtttatctgatcttgcaaa

SEQ ID NO: 5832173 - DNA, 25 bp, Homo sapien
caaagagatggctagcaaccattaa

SEQ ID NO: 5832174 - DNA, 25 bp, Homo sapien
gttactatgagcatttgtgttttta

SEQ ID NO: 5832175 - DNA, 25 bp, Homo sapien
tgttgacgataaattcattaagaat

SEQ ID NO: 5832176 - DNA, 25 bp, Homo sapien
tccaagttcctaagtactggataag

SEQ ID NO: 5832177 - DNA, 25 bp, Homo sapien
tggcatcctctgaacaacctttcta

SEQ ID NO: 5832178 - DNA, 25 bp, Homo sapien
acttttcccagctagacagacagtt

SEQ ID NO: 5832179 - DNA, 25 bp, Homo sapien
catgggaactgctgtagcccataca

SEQ ID NO: 5832180 - DNA, 25 bp, Homo sapien
agggaggcttttatgtttgatgtaa

SEQ ID NO: 5832181 - DNA, 25 bp, Homo sapien
tattgtacacttatgtgttgtacat

SEQ ID NO: 5832182 - DNA, 25 bp, Homo sapien
gagcatttgtgtttttacccactcg

SEQ ID NO: 5832183 - DNA, 25 bp, Homo sapien
tactatgagcatttgtgtttttacc

SEQ ID NO: 5832184 - DNA, 25 bp, Homo sapien
ttctgaatgttactatgagcatttg

SEQ ID NO: 5832185 - DNA, 25 bp, Homo sapien
gagatggctagcaaccattaacact

SEQ ID NO: 5832186 - DNA, 25 bp, Homo sapien
gtcatgggaactgctgtagcccata

SEQ ID NO: 5832187 - DNA, 25 bp, Homo sapien
tttcttatgtcttcatcgacagtac

SEQ ID NO: 5832188 - DNA, 25 bp, Homo sapien
tggaagagcacagtagtttgaagtc

SEQ ID NO: 5832189 - DNA, 25 bp, Homo sapien
cgacagtacactaaatactgatttc

SEQ ID NO: 5832190 - DNA, 25 bp, Homo sapien
gtgcaaagggaaattcagtttctta

SEQ ID NO: 5832191 - DNA, 25 bp, Homo sapien
ttttcagtctaatggctttttaaca

SEQ ID NO: 5832192 - DNA, 25 bp, Homo sapien
ttcccagctagacagacagttcttg

SEQ ID NO: 5832193 - DNA, 25 bp, Homo sapien
caaattcagaaggaatatatacctg

SEQ ID NO: 5832194 - DNA, 25 bp, Homo sapien
gatggctagcaaccattaacacttg

SEQ ID NO: 5832195 - DNA, 25 bp, Homo sapien
ttttatgtttgatgtaattcttaca

SEQ ID NO: 5832196 - DNA, 25 bp, Homo sapien
tttattctatttcgtcttgtatgtg

SEQ ID NO: 5832197 - DNA, 25 bp, Homo sapien
ccttttagttgtaggagtgatggtc

SEQ ID NO: 5832198 - DNA, 25 bp, Homo sapien
cactgcaatgggttaaattttccaa

SEQ ID NO: 5832199 - DNA, 25 bp, Homo sapien
ttcagtctaatggctttttaacaaa

SEQ ID NO: 5832200 - DNA, 25 bp, Homo sapien
aaacttcaagcactttaataaaaca

SEQ ID NO: 5832201 - DNA, 25 bp, Homo sapien
tagacagacagttcttgccaaatct

SEQ ID NO: 5832202 - DNA, 25 bp, Homo sapien
ctacattaatagggaggcttttatg

SEQ ID NO: 5832203 - DNA, 25 bp, Homo sapien
atgtgcaaagggaaattcagtttct

SEQ ID NO: 5832204 - DNA, 25 bp, Homo sapien
ttacaattctgaatgttactatgag

SEQ ID NO: 5832205 - DNA, 25 bp, Homo sapien
cagttcttgccaaatctgtgttaca

SEQ ID NO: 5832206 - DNA, 25 bp, Homo sapien
caaatctgtgttacaattctgaatg

SEQ ID NO: 5832207 - DNA, 25 bp, Homo sapien
agttcctaagtactggataagagtt

SEQ ID NO: 5832208 - DNA, 25 bp, Homo sapien
tcagtgttttttctgtgtattgtga

SEQ ID NO: 5832209 - DNA, 25 bp, Homo sapien
tttagttagatttaccaaagtcact

SEQ ID NO: 5832210 - DNA, 25 bp, Homo sapien
tgtacacttaagggtttttagacca

SEQ ID NO: 5832211 - DNA, 25 bp, Homo sapien
caagttcctaagtactggataagag

SEQ ID NO: 5832212 - DNA, 25 bp, Homo sapien
aatactgatttcaaataaaacccta

SEQ ID NO: 5832213 - DNA, 25 bp, Homo sapien
tgaacaacctttctacccctgaccc

SEQ ID NO: 5832214 - DNA, 25 bp, Homo sapien
gagtctaacacagacactgcaatgg

SEQ ID NO: 5832215 - DNA, 25 bp, Homo sapien
ttgatgtaattcttacagttctaag

SEQ ID NO: 5832216 - DNA, 25 bp, Homo sapien
gttatattgtacacttatgtgttgt

SEQ ID NO: 5832217 - DNA, 25 bp, Homo sapien
tgtacatggtctgattcttttatac

SEQ ID NO: 5832218 - DNA, 25 bp, Homo sapien
attggaagagcacagtagtttgaag

SEQ ID NO: 5832219 - DNA, 25 bp, Homo sapien
ttgcatgagaccttttagttgtagg

SEQ ID NO: 5832220 - DNA, 25 bp, Homo sapien
aaataaaaccctaaattgatcagtg

SEQ ID NO: 5832221 - DNA, 25 bp, Homo sapien
tattaaaaacttcaagcactttaat

SEQ ID NO: 5832222 - DNA, 25 bp, Homo sapien
tagcccatacaagtccctaatgtac

SEQ ID NO: 5832223 - DNA, 25 bp, Homo sapien
tagcaaccattaacacttgatagga

SEQ ID NO: 5832224 - DNA, 25 bp, Homo sapien
tcttatgtcttcatcgacagtacac

SEQ ID NO: 5832225 - DNA, 25 bp, Homo sapien
ttaataaaacatacttgtctgtgac

SEQ ID NO: 5832226 - DNA, 25 bp, Homo sapien
atgagcatttgtgtttttacccact

SEQ ID NO: 5832227 - DNA, 25 bp, Homo sapien
ttctgagtctaacacagacactgca

SEQ ID NO: 5832228 - DNA, 25 bp, Homo sapien
ctaatggctttttaacaaataatga

SEQ ID NO: 5832229 - DNA, 25 bp, Homo sapien
gagaccttttagttgtaggagtgat

SEQ ID NO: 5832230 - DNA, 25 bp, Homo sapien
ctgagtctaacacagacactgcaat

SEQ ID NO: 5832231 - DNA, 25 bp, Homo sapien
gttccattgcatgagaccttttagt

SEQ ID NO: 5832232 - DNA, 25 bp, Homo sapien
gctgtctgcccccaccccccattac

SEQ ID NO: 5832233 - DNA, 25 bp, Homo sapien
acttatgtgttgtacatggtctgat

SEQ ID NO: 5832234 - DNA, 25 bp, Homo sapien
cacagacactgcaatgggttaaatt

SEQ ID NO: 5832235 - DNA, 25 bp, Homo sapien
tgacccatgtctgtatatctgtgca

SEQ ID NO: 5832236 - DNA, 25 bp, Homo sapien
agaggtggttgttgttgacgataaa

SEQ ID NO: 5832237 - DNA, 25 bp, Homo sapien
agcacagtagtttgaagtcatggga

SEQ ID NO: 5832238 - DNA, 25 bp, Homo sapien
gttctaagaattaagttccattgca

SEQ ID NO: 5832239 - DNA, 25 bp, Homo sapien
cttttatacttatttgtcatgctgt

SEQ ID NO: 5832240 - DNA, 25 bp, Homo sapien
tatattgtacacttatgtgttgtac

SEQ ID NO: 5832241 - DNA, 25 bp, Homo sapien
ctttctgagtctaacacagacactg

SEQ ID NO: 5832242 - DNA, 25 bp, Homo sapien
ttcaagcactttaataaaacatact

SEQ ID NO: 5832243 - DNA, 25 bp, Homo sapien
tacaattttctccaagttcctaagt

SEQ ID NO: 5832244 - DNA, 25 bp, Homo sapien
cttacagttctaagaattaagttcc

SEQ ID NO: 5832245 - DNA, 25 bp, Homo sapien
acacttgataggaaaagcattcgga

SEQ ID NO: 5832246 - DNA, 25 bp, Homo sapien
ctgccagttttgtggactacattaa

SEQ ID NO: 5832247 - DNA, 25 bp, Homo sapien
gacagacagttcttgccaaatctgt

SEQ ID NO: 5832248 - DNA, 25 bp, Homo sapien
cacaacttttcccagctagacagac

SEQ ID NO: 5832249 - DNA, 25 bp, Homo sapien
ataattttcagtctaatggcttttt

SEQ ID NO: 5832250 - DNA, 25 bp, Homo sapien
tcaaataaaaccctaaattgatcag

SEQ ID NO: 5832251 - DNA, 25 bp, Homo sapien
cccactcgtgaatattaaaaacttc

SEQ ID NO: 5832252 - DNA, 25 bp, Homo sapien
gttcttgccaaatctgtgttacaat

SEQ ID NO: 5832253 - DNA, 25 bp, Homo sapien
aatattaaaaacttcaagcacttta

SEQ ID NO: 5832254 - DNA, 25 bp, Homo sapien
tgttacaattctgaatgttactatg

SEQ ID NO: 5832255 - DNA, 25 bp, Homo sapien
tttccaagaggtggttgttgttgac

SEQ ID NO: 5832256 - DNA, 25 bp, Homo sapien
tggactacattaatagggaggcttt

SEQ ID NO: 5832257 - DNA, 25 bp, Homo sapien
gtctgtgactttctgagtctaacac

SEQ ID NO: 5832258 - DNA, 25 bp, Homo sapien
agcactttaataaaacatacttgtc

SEQ ID NO: 5832259 - DNA, 25 bp, Homo sapien
tctacccctgacccatgtctgtata

SEQ ID NO: 5832260 - DNA, 25 bp, Homo sapien
acccatgtctgtatatctgtgcata

SEQ ID NO: 5832261 - DNA, 25 bp, Homo sapien
cactttaataaaacatacttgtctg

SEQ ID NO: 5832262 - DNA, 25 bp, Homo sapien
cagttttgtggactacattaatagg

SEQ ID NO: 5832263 - DNA, 25 bp, Homo sapien
agggaaattcagtttcttatgtctt

SEQ ID NO: 5832264 - DNA, 25 bp, Homo sapien
tctaagaattaagttccattgcatg

SEQ ID NO: 5832265 - DNA, 25 bp, Homo sapien
ctgattcttttatacttatttgtca

SEQ ID NO: 5832266 - DNA, 25 bp, Homo sapien
ggttgttgttgacgataaattcatt

SEQ ID NO: 5832267 - DNA, 25 bp, Homo sapien
gtatatctgtgcatatatttgttat

SEQ ID NO: 5832268 - DNA, 25 bp, Homo sapien
gtgtattgtgatcacaacttttccc

SEQ ID NO: 5832269 - DNA, 25 bp, Homo sapien
gtattgtgatcacaacttttcccag

SEQ ID NO: 5832270 - DNA, 25 bp, Homo sapien
tatacttatttgtcatgctgtctgc

SEQ ID NO: 5832271 - DNA, 25 bp, Homo sapien
gcattcggaagaaaacccccaaaca

SEQ ID NO: 5832272 - DNA, 25 bp, Homo sapien
aagagttccatggtcccaaggtttg

SEQ ID NO: 5832273 - DNA, 25 bp, Homo sapien
aagagatggctagcaaccattaaca

SEQ ID NO: 5832274 - DNA, 25 bp, Homo sapien
ccccattacaattttctccaagttc

SEQ ID NO: 5832275 - DNA, 25 bp, Homo sapien
ttcctaagtactggataagagttcc

SEQ ID NO: 5832276 - DNA, 25 bp, Homo sapien
agtttcttatgtcttcatcgacagt

SEQ ID NO: 5832277 - DNA, 25 bp, Homo sapien
ttctaagattttggctttatgtgca

SEQ ID NO: 5832278 - DNA, 25 bp, Homo sapien
caagaggtggttgttgttgacgata

SEQ ID NO: 5832279 - DNA, 25 bp, Homo sapien
gataggaaaagcattcggaagaaaa

SEQ ID NO: 5832280 - DNA, 25 bp, Homo sapien
attttctccaagttcctaagtactg

SEQ ID NO: 5832281 - DNA, 25 bp, Homo sapien
aataaaacatacttgtctgtgactt

SEQ ID NO: 5832282 - DNA, 25 bp, Homo sapien
tttctccaagttcctaagtactgga

SEQ ID NO: 5832283 - DNA, 25 bp, Homo sapien
tactggataagagttccatggtccc

SEQ ID NO: 5832284 - DNA, 25 bp, Homo sapien
gactttctgagtctaacacagacac

SEQ ID NO: 5832285 - DNA, 25 bp, Homo sapien
acatacttgtctgtgactttctgag

SEQ ID NO: 5832286 - DNA, 25 bp, Homo sapien
cctctgaacaacctttctacccctg

SEQ ID NO: 5832287 - DNA, 25 bp, Homo sapien
cagacactgcaatgggttaaatttt

SEQ ID NO: 5832288 - DNA, 25 bp, Homo sapien
atttgttatattgtacacttatgtg

SEQ ID NO: 5832289 - DNA, 25 bp, Homo sapien
ggaactgctgtagcccatacaagtc

SEQ ID NO: 5832290 - DNA, 25 bp, Homo sapien
ttacccactcgtgaatattaaaaac

SEQ ID NO: 5832291 - DNA, 25 bp, Homo sapien
ggataagagttccatggtcccaagg

SEQ ID NO: 5832292 - DNA, 25 bp, Homo sapien
ttagttgtaggagtgatggtctagg

SEQ ID NO: 5832293 - DNA, 25 bp, Homo sapien
tcactggagacaaattcagaaggaa

SEQ ID NO: 5832294 - DNA, 25 bp, Homo sapien
atatctgtgcatatatttgttatat

SEQ ID NO: 5832295 - DNA, 25 bp, Homo sapien
ttttagaccattagctgtttatctg

SEQ ID NO: 5832296 - DNA, 25 bp, Homo sapien
gatgtaattcttacagttctaagaa

SEQ ID NO: 5832297 - DNA, 25 bp, Homo sapien
ctcgtgaatattaaaaacttcaagc

SEQ ID NO: 5832298 - DNA, 25 bp, Homo sapien
cacagtagtttgaagtcatgggaac

SEQ ID NO: 5832299 - DNA, 25 bp, Homo sapien
aatggctttttaacaaataatgaag

SEQ ID NO: 5832300 - DNA, 25 bp, Homo sapien
gaagagcacagtagtttgaagtcat

SEQ ID NO: 5832301 - DNA, 25 bp, Homo sapien
tgtgatcacaacttttcccagctag

SEQ ID NO: 5832302 - DNA, 25 bp, Homo sapien
atgctgtctgcccccaccccccatt

SEQ ID NO: 5832303 - DNA, 25 bp, Homo sapien
tacagttctaagaattaagttccat

SEQ ID NO: 5832304 - DNA, 25 bp, Homo sapien
aagttccattgcatgagacctttta

SEQ ID NO: 5832305 - DNA, 25 bp, Homo sapien
ttaaaaacttcaagcactttaataa

SEQ ID NO: 5832306 - DNA, 25 bp, Homo sapien
ccattaacacttgataggaaaagca

SEQ ID NO: 5832307 - DNA, 25 bp, Homo sapien
gacactgcaatgggttaaattttcc

SEQ ID NO: 5832308 - DNA, 25 bp, Homo sapien
atgttactatgagcatttgtgtttt

SEQ ID NO: 5832309 - DNA, 25 bp, Homo sapien
taataattctaagattttggcttta

SEQ ID NO: 5832310 - DNA, 25 bp, Homo sapien
ttgtacacttatgtgttgtacatgg

SEQ ID NO: 5832311 - DNA, 25 bp, Homo sapien
gctgtagcccatacaagtccctaat

SEQ ID NO: 5832312 - DNA, 25 bp, Homo sapien
cccagctagacagacagttcttgcc

SEQ ID NO: 5832313 - DNA, 25 bp, Homo sapien
tttctacccctgacccatgtctgta

SEQ ID NO: 5832314 - DNA, 25 bp, Homo sapien
tactgatttcaaataaaaccctaaa

SEQ ID NO: 5832315 - DNA, 25 bp, Homo sapien
tgttcccaaagagatggctagcaac

SEQ ID NO: 5832316 - DNA, 25 bp, Homo sapien
caacttttcccagctagacagacag

SEQ ID NO: 5832317 - DNA, 25 bp, Homo sapien
ttcgtcttgtatgtgtaaataattt

SEQ ID NO: 5832318 - DNA, 25 bp, Homo sapien
cattgcatgagaccttttagttgta

SEQ ID NO: 5832319 - DNA, 25 bp, Homo sapien
taaattgatcagtgttttttctgtg

SEQ ID NO: 5832320 - DNA, 25 bp, Homo sapien
atctgtgcatatatttgttatattg

SEQ ID NO: 5832321 - DNA, 25 bp, Homo sapien
cctttctacccctgacccatgtctg

SEQ ID NO: 5832322 - DNA, 25 bp, Homo sapien
cccctgacccatgtctgtatatctg

SEQ ID NO: 5832323 - DNA, 25 bp, Homo sapien
gtctgtatatctgtgcatatatttg

SEQ ID NO: 5832324 - DNA, 25 bp, Homo sapien
ttttcttttattctatttcgtcttg

SEQ ID NO: 5832325 - DNA, 25 bp, Homo sapien
cactcgtgaatattaaaaacttcaa

SEQ ID NO: 5832326 - DNA, 25 bp, Homo sapien
cctgacccatgtctgtatatctgtg

SEQ ID NO: 5832327 - DNA, 25 bp, Homo sapien
gtagtttgaagtcatgggaactgct

SEQ ID NO: 5832328 - DNA, 25 bp, Homo sapien
aggaatatatacctgccagttttgt

SEQ ID NO: 5832329 - DNA, 25 bp, Homo sapien
tgtgttacaattctgaatgttacta

SEQ ID NO: 5832330 - DNA, 25 bp, Homo sapien
cctaaattgatcagtgttttttctg

SEQ ID NO: 5832331 - DNA, 25 bp, Homo sapien
tccatggtcccaaggtttggttttc

SEQ ID NO: 5832332 - DNA, 25 bp, Homo sapien
cagctagacagacagttcttgccaa

SEQ ID NO: 5832333 - DNA, 25 bp, Homo sapien
atgtgtaaataattttcagtctaat

SEQ ID NO: 5832334 - DNA, 25 bp, Homo sapien
gttggcatcctctgaacaacctttc

SEQ ID NO: 5832335 - DNA, 25 bp, Homo sapien
actggagacaaattcagaaggaata

SEQ ID NO: 5832336 - DNA, 25 bp, Homo sapien
aagattttggctttatgtgcaaagg

SEQ ID NO: 5832337 - DNA, 25 bp, Homo sapien
taatagggaggcttttatgtttgat

SEQ ID NO: 5832338 - DNA, 25 bp, Homo sapien
acttgataggaaaagcattcggaag

SEQ ID NO: 5832339 - DNA, 25 bp, Homo sapien
tgatttcaaataaaaccctaaattg

SEQ ID NO: 5832340 - DNA, 25 bp, Homo sapien
accattagctgtttatctgatcttg

SEQ ID NO: 5832341 - DNA, 25 bp, Homo sapien
gatggtctaggtaagttggcatcct

SEQ ID NO: 5832342 - DNA, 25 bp, Homo sapien
atcacaacttttcccagctagacag

SEQ ID NO: 5832343 - DNA, 25 bp, Homo sapien
attacaattttctccaagttcctaa

SEQ ID NO: 5832344 - DNA, 25 bp, Homo sapien
tctgtgttacaattctgaatgttac

SEQ ID NO: 5832345 - DNA, 25 bp, Homo sapien
atatacctgccagttttgtggacta

SEQ ID NO: 5832346 - DNA, 25 bp, Homo sapien
ttcttttattctatttcgtcttgta

SEQ ID NO: 5832347 - DNA, 25 bp, Homo sapien
aataataattctaagattttggctt

SEQ ID NO: 5832348 - DNA, 25 bp, Homo sapien
taatgtacacttaagggtttttaga

SEQ ID NO: 5832349 - DNA, 25 bp, Homo sapien
ggaggcttttatgtttgatgtaatt

SEQ ID NO: 5832350 - DNA, 25 bp, Homo sapien
ttttacccactcgtgaatattaaaa

SEQ ID NO: 5832351 - DNA, 25 bp, Homo sapien
gaatatatacctgccagttttgtgg

SEQ ID NO: 5832352 - DNA, 25 bp, Homo sapien
agtcactggagacaaattcagaagg

SEQ ID NO: 5832353 - DNA, 25 bp, Homo sapien
cagaaggaatatatacctgccagtt

SEQ ID NO: 5832354 - DNA, 25 bp, Homo sapien
aacctttctacccctgacccatgtc

SEQ ID NO: 5832355 - DNA, 25 bp, Homo sapien
attgtgatcacaacttttcccagct

SEQ ID NO: 5832356 - DNA, 25 bp, Homo sapien
ccaccccccattacaattttctcca

SEQ ID NO: 5832357 - DNA, 25 bp, Homo sapien
acaattctgaatgttactatgagca

SEQ ID NO: 5832358 - DNA, 25 bp, Homo sapien
agctgtttatctgatcttgcaaaag

SEQ ID NO: 5832359 - DNA, 25 bp, Homo sapien
gtctaatggctttttaacaaataat

SEQ ID NO: 5832360 - DNA, 25 bp, Homo sapien
aactgctgtagcccatacaagtccc

SEQ ID NO: 5832361 - DNA, 25 bp, Homo sapien
aaacatacttgtctgtgactttctg

SEQ ID NO: 5832362 - DNA, 25 bp, Homo sapien
tggtctgattcttttatacttattt

SEQ ID NO: 5832363 - DNA, 25 bp, Homo sapien
gacaaattcagaaggaatatatacc

SEQ ID NO: 5832364 - DNA, 25 bp, Homo sapien
ctatttcgtcttgtatgtgtaaata

SEQ ID NO: 5832365 - DNA, 25 bp, Homo sapien
taccaaagtcactggagacaaattc

SEQ ID NO: 5832366 - DNA, 25 bp, Homo sapien
ctaggtaagttggcatcctctgaac

SEQ ID NO: 5832367 - DNA, 25 bp, Homo sapien
ttgtatgtgtaaataattttcagtc

SEQ ID NO: 5832368 - DNA, 25 bp, Homo sapien
tgggaactgctgtagcccatacaag

SEQ ID NO: 5832369 - DNA, 25 bp, Homo sapien
attaatagggaggcttttatgtttg

SEQ ID NO: 5832370 - DNA, 25 bp, Homo sapien
tagatttaccaaagtcactggagac

SEQ ID NO: 5832371 - DNA, 25 bp, Homo sapien
aagattattggaagagcacagtagt

SEQ ID NO: 5832372 - DNA, 25 bp, Homo sapien
ctgcaatgggttaaattttccaaga

SEQ ID NO: 5832373 - DNA, 25 bp, Homo sapien
ttcttacagttctaagaattaagtt

SEQ ID NO: 5832374 - DNA, 25 bp, Homo sapien
gcaaccattaacacttgataggaaa

SEQ ID NO: 5832375 - DNA, 25 bp, Homo sapien
gtctaacacagacactgcaatgggt

SEQ ID NO: 5832376 - DNA, 25 bp, Homo sapien
acttgtctgtgactttctgagtcta

SEQ ID NO: 5832377 - DNA, 25 bp, Homo sapien
tgatcacaacttttcccagctagac

SEQ ID NO: 5832378 - DNA, 25 bp, Homo sapien
caagcactttaataaaacatacttg

SEQ ID NO: 5832379 - DNA, 25 bp, Homo sapien
acttcaagcactttaataaaacata

SEQ ID NO: 5832380 - DNA, 25 bp, Homo sapien
acaagtccctaatgtacacttaagg

SEQ ID NO: 5832381 - DNA, 25 bp, Homo sapien
ataagagttccatggtcccaaggtt

SEQ ID NO: 5832382 - DNA, 25 bp, Homo sapien
tacatggtctgattcttttatactt

SEQ ID NO: 5832383 - DNA, 25 bp, Homo sapien
aattcagaaggaatatatacctgcc

SEQ ID NO: 5832384 - DNA, 25 bp, Homo sapien
ttgtctgtgactttctgagtctaac

SEQ ID NO: 5832385 - DNA, 25 bp, Homo sapien
tgttttttctgtgtattgtgatcac

SEQ ID NO: 5832386 - DNA, 25 bp, Homo sapien
aacacagacactgcaatgggttaaa

SEQ ID NO: 5832387 - DNA, 25 bp, Homo sapien
tgaatattaaaaacttcaagcactt

SEQ ID NO: 5832388 - DNA, 25 bp, Homo sapien
aatctgtgttacaattctgaatgtt

SEQ ID NO: 5832389 - DNA, 25 bp, Homo sapien
ctgaatgttactatgagcatttgtg

SEQ ID NO: 5832390 - DNA, 25 bp, Homo sapien
ttttttctgtgtattgtgatcacaa

SEQ ID NO: 5832391 - DNA, 25 bp, Homo sapien
ataaaaccctaaattgatcagtgtt

SEQ ID NO: 5832392 - DNA, 25 bp, Homo sapien
tttgtcatgctgtctgcccccaccc

SEQ ID NO: 5832393 - DNA, 25 bp, Homo sapien
tacactaaatactgatttcaaataa

SEQ ID NO: 5832394 - DNA, 25 bp, Homo sapien
tatttgtcatgctgtctgcccccac

SEQ ID NO: 5832395 - DNA, 25 bp, Homo sapien
taggaaaagcattcggaagaaaacc

SEQ ID NO: 5832396 - DNA, 25 bp, Homo sapien
gtacacttatgtgttgtacatggtc

SEQ ID NO: 5832397 - DNA, 25 bp, Homo sapien
tattctatttcgtcttgtatgtgta

SEQ ID NO: 5832398 - DNA, 25 bp, Homo sapien
tctgaacaacctttctacccctgac

SEQ ID NO: 5832399 - DNA, 25 bp, Homo sapien
ataataataattctaagattttggc

SEQ ID NO: 5832400 - DNA, 25 bp, Homo sapien
agtacactaaatactgatttcaaat

SEQ ID NO: 5832401 - DNA, 25 bp, Homo sapien
tggagacaaattcagaaggaatata

SEQ ID NO: 5832402 - DNA, 25 bp, Homo sapien
gccagttttgtggactacattaata

SEQ ID NO: 5832403 - DNA, 25 bp, Homo sapien
tttgaagtcatgggaactgctgtag

SEQ ID NO: 5832404 - DNA, 25 bp, Homo sapien
tccaagaggtggttgttgttgacga

SEQ ID NO: 5832405 - DNA, 25 bp, Homo sapien
ttgtaggagtgatggtctaggtaag

SEQ ID NO: 5832406 - DNA, 25 bp, Homo sapien
aaccattaacacttgataggaaaag

SEQ ID NO: 5832407 - DNA, 25 bp, Homo sapien
gtgttgtacatggtctgattctttt

SEQ ID NO: 5832408 - DNA, 25 bp, Homo sapien
tgtggactacattaatagggaggct

SEQ ID NO: 5832409 - DNA, 25 bp, Homo sapien
gagttccatggtcccaaggtttggt

SEQ ID NO: 5832410 - DNA, 25 bp, Homo sapien
cgtcttgtatgtgtaaataattttc

SEQ ID NO: 5832411 - DNA, 25 bp, Homo sapien
atttgtgtttttacccactcgtgaa

SEQ ID NO: 5832412 - DNA, 25 bp, Homo sapien
ctttaataaaacatacttgtctgtg

SEQ ID NO: 5832413 - DNA, 25 bp, Homo sapien
taaattttccaagaggtggttgttg

SEQ ID NO: 5832414 - DNA, 25 bp, Homo sapien
taacacttgataggaaaagcattcg

SEQ ID NO: 5832415 - DNA, 25 bp, Homo sapien
gtgactttctgagtctaacacagac

SEQ ID NO: 5832416 - DNA, 25 bp, Homo sapien
tggctagcaaccattaacacttgat

SEQ ID NO: 5832417 - DNA, 25 bp, Homo sapien
taagtactggataagagttccatgg

SEQ ID NO: 5832418 - DNA, 25 bp, Homo sapien
atgagaccttttagttgtaggagtg

SEQ ID NO: 5832419 - DNA, 25 bp, Homo sapien
atatttgttatattgtacacttatg

SEQ ID NO: 5832420 - DNA, 25 bp, Homo sapien
agtgttttttctgtgtattgtgatc

SEQ ID NO: 5832421 - DNA, 25 bp, Homo sapien
acagtacactaaatactgatttcaa

SEQ ID NO: 5832422 - DNA, 25 bp, Homo sapien
agttgtaggagtgatggtctaggta

SEQ ID NO: 5832423 - DNA, 25 bp, Homo sapien
cagtctaatggctttttaacaaata

SEQ ID NO: 5832424 - DNA, 25 bp, Homo sapien
tcagtttcttatgtcttcatcgaca

SEQ ID NO: 5832425 - DNA, 25 bp, Homo sapien
gtctaggtaagttggcatcctctga

SEQ ID NO: 5832426 - DNA, 25 bp, Homo sapien
ttgttatattgtacacttatgtgtt

SEQ ID NO: 5832427 - DNA, 25 bp, Homo sapien
cgtgaatattaaaaacttcaagcac

SEQ ID NO: 5832428 - DNA, 25 bp, Homo sapien
tgaagtcatgggaactgctgtagcc

SEQ ID NO: 5832429 - DNA, 25 bp, Homo sapien
gtttttagaccattagctgtttatc

SEQ ID NO: 5832430 - DNA, 25 bp, Homo sapien
ttatgtcttcatcgacagtacacta

SEQ ID NO: 5832431 - DNA, 25 bp, Homo sapien
gcatgagaccttttagttgtaggag

SEQ ID NO: 5832432 - DNA, 25 bp, Homo sapien
tacccctgacccatgtctgtatatc

SEQ ID NO: 5832433 - DNA, 25 bp, Homo sapien
gcaatgggttaaattttccaagagg

SEQ ID NO: 5832434 - DNA, 25 bp, Homo sapien
ctatgagcatttgtgtttttaccca

SEQ ID NO: 5832435 - DNA, 25 bp, Homo sapien
gtgtaaataattttcagtctaatgg

SEQ ID NO: 5832436 - DNA, 25 bp, Homo sapien
ttttcccagctagacagacagttct

SEQ ID NO: 5832437 - DNA, 25 bp, Homo sapien
aggtaagttggcatcctctgaacaa

SEQ ID NO: 5832438 - DNA, 25 bp, Homo sapien
attttccaagaggtggttgttgttg

SEQ ID NO: 5832439 - DNA, 25 bp, Homo sapien
atacttgtctgtgactttctgagtc

SEQ ID NO: 5832440 - DNA, 25 bp, Homo sapien
ctaaatactgatttcaaataaaacc

SEQ ID NO: 5832441 - DNA, 25 bp, Homo sapien
ttttggctttatgtgcaaagggaaa

SEQ ID NO: 5832442 - DNA, 25 bp, Homo sapien
atacctgccagttttgtggactaca

SEQ ID NO: 5832443 - DNA, 25 bp, Homo sapien
gtaagttggcatcctctgaacaacc

SEQ ID NO: 5832444 - DNA, 25 bp, Homo sapien
ttaagggtttttagaccattagctg

SEQ ID NO: 5832445 - DNA, 25 bp, Homo sapien
tagttagatttaccaaagtcactgg

SEQ ID NO: 5832446 - DNA, 25 bp, Homo sapien
aattctaagattttggctttatgtg

SEQ ID NO: 5832447 - DNA, 25 bp, Homo sapien
attcagtttcttatgtcttcatcga

SEQ ID NO: 5832448 - DNA, 25 bp, Homo sapien
cctaagtactggataagagttccat

SEQ ID NO: 5832449 - DNA, 25 bp, Homo sapien
tggtctaggtaagttggcatcctct

SEQ ID NO: 5832450 - DNA, 25 bp, Homo sapien
tccattgcatgagaccttttagttg

SEQ ID NO: 5832451 - DNA, 25 bp, Homo sapien
cttcatcgacagtacactaaatact

SEQ ID NO: 5832452 - DNA, 25 bp, Homo sapien
ttgtgtttttacccactcgtgaata

SEQ ID NO: 5832453 - DNA, 25 bp, Homo sapien
gagtgatggtctaggtaagttggca

SEQ ID NO: 5832454 - DNA, 25 bp, Homo sapien
gctagcaaccattaacacttgatag

SEQ ID NO: 5832455 - DNA, 25 bp, Homo sapien
ttagaccattagctgtttatctgat

SEQ ID NO: 5832456 - DNA, 25 bp, Homo sapien
gttagatttaccaaagtcactggag

SEQ ID NO: 5832457 - DNA, 25 bp, Homo sapien
gcccatacaagtccctaatgtacac

SEQ ID NO: 5832458 - DNA, 25 bp, Homo sapien
tctgcccccaccccccattacaatt

SEQ ID NO: 5832459 - DNA, 25 bp, Homo sapien
agtactggataagagttccatggtc

SEQ ID NO: 5832460 - DNA, 25 bp, Homo sapien
attaacacttgataggaaaagcatt

SEQ ID NO: 5832461 - DNA, 25 bp, Homo sapien
atatatacctgccagttttgtggac

SEQ ID NO: 5832462 - DNA, 25 bp, Homo sapien
gactacattaatagggaggctttta

SEQ ID NO: 5832463 - DNA, 25 bp, Homo sapien
taagaattaagttccattgcatgag

SEQ ID NO: 5832464 - DNA, 25 bp, Homo sapien
gtttgatgtaattcttacagttcta

SEQ ID NO: 5832465 - DNA, 25 bp, Homo sapien
ttgttgttgacgataaattcattaa

SEQ ID NO: 5832466 - DNA, 25 bp, Homo sapien
aatgaagattattggaagagcacag

SEQ ID NO: 5832467 - DNA, 25 bp, Homo sapien
ctttatgtgcaaagggaaattcagt

SEQ ID NO: 5832468 - DNA, 25 bp, Homo sapien
ctgtgtattgtgatcacaacttttc

SEQ ID NO: 5832469 - DNA, 25 bp, Homo sapien
gcatttgtgtttttacccactcgtg

SEQ ID NO: 5832470 - DNA, 25 bp, Homo sapien
ccattacaattttctccaagttcct

SEQ ID NO: 5832471 - DNA, 25 bp, Homo sapien
gattcttttatacttatttgtcatg

SEQ ID NO: 5832472 - DNA, 25 bp, Homo sapien
tgtctgcccccaccccccattacaa

SEQ ID NO: 5832473 - DNA, 25 bp, Homo sapien
gattattggaagagcacagtagttt

SEQ ID NO: 5832474 - DNA, 25 bp, Homo sapien
ttatgtgcaaagggaaattcagttt

SEQ ID NO: 5832475 - DNA, 25 bp, Homo sapien
acaacctttctacccctgacccatg

SEQ ID NO: 5832476 - DNA, 25 bp, Homo sapien
ttaagttccattgcatgagaccttt

SEQ ID NO: 5832477 - DNA, 25 bp, Homo sapien
ctggataagagttccatggtcccaa

SEQ ID NO: 5832478 - DNA, 25 bp, Homo sapien
gaaggaatatatacctgccagtttt

SEQ ID NO: 5832479 - DNA, 25 bp, Homo sapien
ccatacaagtccctaatgtacactt

SEQ ID NO: 5832480 - DNA, 25 bp, Homo sapien
gtgatggtctaggtaagttggcatc

SEQ ID NO: 5832481 - DNA, 25 bp, Homo sapien
tacttatttgtcatgctgtctgccc

SEQ ID NO: 5832482 - DNA, 25 bp, Homo sapien
tgtcatgctgtctgcccccaccccc

SEQ ID NO: 5832483 - DNA, 25 bp, Homo sapien
gccaaatctgtgttacaattctgaa

SEQ ID NO: 5832484 - DNA, 25 bp, Homo sapien
gacagttcttgccaaatctgtgtta

SEQ ID NO: 5832485 - DNA, 25 bp, Homo sapien
ttttagttgtaggagtgatggtcta

SEQ ID NO: 5832486 - DNA, 25 bp, Homo sapien
taaaacatacttgtctgtgactttc

SEQ ID NO: 5832487 - DNA, 25 bp, Homo sapien
tttgtggactacattaatagggagg

SEQ ID NO: 5832488 - DNA, 25 bp, Homo sapien
tgaagattattggaagagcacagta

SEQ ID NO: 5832489 - DNA, 25 bp, Homo sapien
gcatcctctgaacaacctttctacc

SEQ ID NO: 5832490 - DNA, 25 bp, Homo sapien
gttgttgacgataaattcattaaga

SEQ ID NO: 5832491 - DNA, 25 bp, Homo sapien
ctgtgactttctgagtctaacacag

SEQ ID NO: 5832492 - DNA, 25 bp, Homo sapien
ggctttatgtgcaaagggaaattca

SEQ ID NO: 5832493 - DNA, 25 bp, Homo sapien
atcgacagtacactaaatactgatt

SEQ ID NO: 5832494 - DNA, 25 bp, Homo sapien
ttatgtttgatgtaattcttacagt

SEQ ID NO: 5832495 - DNA, 25 bp, Homo sapien
aattttcagtctaatggctttttaa

SEQ ID NO: 5832496 - DNA, 25 bp, Homo sapien
gtgcatatatttgttatattgtaca

SEQ ID NO: 5832497 - DNA, 25 bp, Homo sapien
cagacagttcttgccaaatctgtgt

SEQ ID NO: 5832498 - DNA, 25 bp, Homo sapien
aagtcatgggaactgctgtagccca

SEQ ID NO: 5832499 - DNA, 25 bp, Homo sapien
aatttagttagatttaccaaagtca

SEQ ID NO: 5832500 - DNA, 25 bp, Homo sapien
cattagctgtttatctgatcttgca

SEQ ID NO: 5832501 - DNA, 25 bp, Homo sapien
atcctctgaacaacctttctacccc

SEQ ID NO: 5832502 - DNA, 25 bp, Homo sapien
ataatgaagattattggaagagcac

SEQ ID NO: 5832503 - DNA, 25 bp, Homo sapien
agaattaagttccattgcatgagac

SEQ ID NO: 5832504 - DNA, 25 bp, Homo sapien
tggctttttaacaaataatgaagat

SEQ ID NO: 5832505 - DNA, 25 bp, Homo sapien
tcatgctgtctgcccccacccccca

SEQ ID NO: 5832506 - DNA, 25 bp, Homo sapien
tctccaagttcctaagtactggata

SEQ ID NO: 5832507 - DNA, 25 bp, Homo sapien
ctgctgtagcccatacaagtcccta

SEQ ID NO: 5832508 - DNA, 25 bp, Homo sapien
tcttgccaaatctgtgttacaattc

SEQ ID NO: 5832509 - DNA, 25 bp, Homo sapien
ccaaagtcactggagacaaattcag

SEQ ID NO: 5832510 - DNA, 25 bp, Homo sapien
gtaggagtgatggtctaggtaagtt

SEQ ID NO: 5832511 - DNA, 25 bp, Homo sapien
gagacaaattcagaaggaatatata

SEQ ID NO: 5832512 - DNA, 25 bp, Homo sapien
cttatttgtcatgctgtctgccccc

SEQ ID NO: 5832513 - DNA, 25 bp, Homo sapien
tttcaaataaaaccctaaattgatc

SEQ ID NO: 5832514 - DNA, 25 bp, Homo sapien
cttttattctatttcgtcttgtatg

SEQ ID NO: 5832515 - DNA, 25 bp, Homo sapien
ctgtatatctgtgcatatatttgtt

SEQ ID NO: 5832516 - DNA, 25 bp, Homo sapien
gatcagtgttttttctgtgtattgt

SEQ ID NO: 5832517 - DNA, 25 bp, Homo sapien
cttttgcaagatcagataaacagct

SEQ ID NO: 5832518 - DNA, 25 bp, Homo sapien
cacatacaagacgaaatagaataaa

SEQ ID NO: 5832519 - DNA, 25 bp, Homo sapien
tcccatgacttcaaactactgtgct

SEQ ID NO: 5832520 - DNA, 25 bp, Homo sapien
gtgatcacaatacacagaaaaaaca

SEQ ID NO: 5832521 - DNA, 25 bp, Homo sapien
atggaactcttatccagtacttagg

SEQ ID NO: 5832522 - DNA, 25 bp, Homo sapien
gggggtgggggcagacagcatgaca

SEQ ID NO: 5832523 - DNA, 25 bp, Homo sapien
tatccagtacttaggaacttggaga

SEQ ID NO: 5832524 - DNA, 25 bp, Homo sapien
cagacaagtatgttttattaaagtg

SEQ ID NO: 5832525 - DNA, 25 bp, Homo sapien
attatttacacatacaagacgaaat

SEQ ID NO: 5832526 - DNA, 25 bp, Homo sapien
gaagtttttaatattcacgagtggg

SEQ ID NO: 5832527 - DNA, 25 bp, Homo sapien
gtttttaatattcacgagtgggtaa

SEQ ID NO: 5832528 - DNA, 25 bp, Homo sapien
tacacagaaaaaacactgatcaatt

SEQ ID NO: 5832529 - DNA, 25 bp, Homo sapien
gtacttaggaacttggagaaaattg

SEQ ID NO: 5832530 - DNA, 25 bp, Homo sapien
ttaagtgtacattagggacttgtat

SEQ ID NO: 5832531 - DNA, 25 bp, Homo sapien
tttatcgtcaacaacaaccacctct

SEQ ID NO: 5832532 - DNA, 25 bp, Homo sapien
aatcagtatttagtgtactgtcgat

SEQ ID NO: 5832533 - DNA, 25 bp, Homo sapien
gtacattagggacttgtatgggcta

SEQ ID NO: 5832534 - DNA, 25 bp, Homo sapien
tttacacatacaagacgaaatagaa

SEQ ID NO: 5832535 - DNA, 25 bp, Homo sapien
tacacatacaagacgaaatagaata

SEQ ID NO: 5832536 - DNA, 25 bp, Homo sapien
tagggttttatttgaaatcagtatt

SEQ ID NO: 5832537 - DNA, 25 bp, Homo sapien
acattagggacttgtatgggctaca

SEQ ID NO: 5832538 - DNA, 25 bp, Homo sapien
cacagaaaaaacactgatcaattta

SEQ ID NO: 5832539 - DNA, 25 bp, Homo sapien
tccctattaatgtagtccacaaaac

SEQ ID NO: 5832540 - DNA, 25 bp, Homo sapien
tgttaatggttgctagccatctctt

SEQ ID NO: 5832541 - DNA, 25 bp, Homo sapien
cagaaagtcacagacaagtatgttt

SEQ ID NO: 5832542 - DNA, 25 bp, Homo sapien
aatatatgcacagatatacagacat

SEQ ID NO: 5832543 - DNA, 25 bp, Homo sapien
tttagtgtactgtcgatgaagacat

SEQ ID NO: 5832544 - DNA, 25 bp, Homo sapien
gatatacagacatgggtcaggggta

SEQ ID NO: 5832545 - DNA, 25 bp, Homo sapien
tttgcacataaagccaaaatcttag

SEQ ID NO: 5832546 - DNA, 25 bp, Homo sapien
catgcaatggaacttaattcttaga

SEQ ID NO: 5832547 - DNA, 25 bp, Homo sapien
ttccttctgaatttgtctccagtga

SEQ ID NO: 5832548 - DNA, 25 bp, Homo sapien
ggcaagaactgtctgtctagctggg

SEQ ID NO: 5832549 - DNA, 25 bp, Homo sapien
atcagataaacagctaatggtctaa

SEQ ID NO: 5832550 - DNA, 25 bp, Homo sapien
cagaattgtaacacagatttggcaa

SEQ ID NO: 5832551 - DNA, 25 bp, Homo sapien
ggtagaaaggttgttcagaggatgc

SEQ ID NO: 5832552 - DNA, 25 bp, Homo sapien
agtgtacaatataacaaatatatgc

SEQ ID NO: 5832553 - DNA, 25 bp, Homo sapien
tcagaggatgccaacttacctagac

SEQ ID NO: 5832554 - DNA, 25 bp, Homo sapien
aaaagaatcagaccatgtacaacac

SEQ ID NO: 5832555 - DNA, 25 bp, Homo sapien
aacattcagaattgtaacacagatt

SEQ ID NO: 5832556 - DNA, 25 bp, Homo sapien
tgttttattaaagtgcttgaagttt

SEQ ID NO: 5832557 - DNA, 25 bp, Homo sapien
tgacaaataagtataaaagaatcag

SEQ ID NO: 5832558 - DNA, 25 bp, Homo sapien
tgtaacacagatttggcaagaactg

SEQ ID NO: 5832559 - DNA, 25 bp, Homo sapien
caatataacaaatatatgcacagat

SEQ ID NO: 5832560 - DNA, 25 bp, Homo sapien
atttgtctccagtgactttggtaaa

SEQ ID NO: 5832561 - DNA, 25 bp, Homo sapien
tgttaaaaagccattagactgaaaa

SEQ ID NO: 5832562 - DNA, 25 bp, Homo sapien
gtccacaaaactggcaggtatatat

SEQ ID NO: 5832563 - DNA, 25 bp, Homo sapien
acccattgcagtgtctgtgttagac

SEQ ID NO: 5832564 - DNA, 25 bp, Homo sapien
agtatgttttattaaagtgcttgaa

SEQ ID NO: 5832565 - DNA, 25 bp, Homo sapien
tgccaacttacctagaccatcactc

SEQ ID NO: 5832566 - DNA, 25 bp, Homo sapien
ctcatgcaatggaacttaattctta

SEQ ID NO: 5832567 - DNA, 25 bp, Homo sapien
aacacaaatgctcatagtaacattc

SEQ ID NO: 5832568 - DNA, 25 bp, Homo sapien
tgggctacagcagttcccatgactt

SEQ ID NO: 5832569 - DNA, 25 bp, Homo sapien
agttgtgatcacaatacacagaaaa

SEQ ID NO: 5832570 - DNA, 25 bp, Homo sapien
ctgtctgtctagctgggaaaagttg

SEQ ID NO: 5832571 - DNA, 25 bp, Homo sapien
gtgctcttccaataatcttcattat

SEQ ID NO: 5832572 - DNA, 25 bp, Homo sapien
aatattcacgagtgggtaaaaacac

SEQ ID NO: 5832573 - DNA, 25 bp, Homo sapien
tccgaatgcttttcctatcaagtgt

SEQ ID NO: 5832574 - DNA, 25 bp, Homo sapien
gggacttgtatgggctacagcagtt

SEQ ID NO: 5832575 - DNA, 25 bp, Homo sapien
ttgtgatcacaatacacagaaaaaa

SEQ ID NO: 5832576 - DNA, 25 bp, Homo sapien
cttatccagtacttaggaacttgga

SEQ ID NO: 5832577 - DNA, 25 bp, Homo sapien
aatgcttttcctatcaagtgttaat

SEQ ID NO: 5832578 - DNA, 25 bp, Homo sapien
cactcctacaactaaaaggtctcat

SEQ ID NO: 5832579 - DNA, 25 bp, Homo sapien
tctaaaaacccttaagtgtacatta

SEQ ID NO: 5832580 - DNA, 25 bp, Homo sapien
cctacaactaaaaggtctcatgcaa

SEQ ID NO: 5832581 - DNA, 25 bp, Homo sapien
ccttgggaccatggaactcttatcc

SEQ ID NO: 5832582 - DNA, 25 bp, Homo sapien
tgggtaaaaacacaaatgctcatag

SEQ ID NO: 5832583 - DNA, 25 bp, Homo sapien
gaaaaccaaaccttgggaccatgga

SEQ ID NO: 5832584 - DNA, 25 bp, Homo sapien
ttggaaaatttaacccattgcagtg

SEQ ID NO: 5832585 - DNA, 25 bp, Homo sapien
agtgactttggtaaatctaactaaa

SEQ ID NO: 5832586 - DNA, 25 bp, Homo sapien
gtactgtcgatgaagacataagaaa

SEQ ID NO: 5832587 - DNA, 25 bp, Homo sapien
agccattagactgaaaattatttac

SEQ ID NO: 5832588 - DNA, 25 bp, Homo sapien
tagtaacattcagaattgtaacaca

SEQ ID NO: 5832589 - DNA, 25 bp, Homo sapien
cagaaaaaacactgatcaatttagg

SEQ ID NO: 5832590 - DNA, 25 bp, Homo sapien
agtgggtaaaaacacaaatgctcat

SEQ ID NO: 5832591 - DNA, 25 bp, Homo sapien
ttgtaatggggggtgggggcagaca

SEQ ID NO: 5832592 - DNA, 25 bp, Homo sapien
cttccgaatgcttttcctatcaagt

SEQ ID NO: 5832593 - DNA, 25 bp, Homo sapien
tcagtatttagtgtactgtcgatga

SEQ ID NO: 5832594 - DNA, 25 bp, Homo sapien
gtctgtctagctgggaaaagttgtg

SEQ ID NO: 5832595 - DNA, 25 bp, Homo sapien
atgacttcaaactactgtgctcttc

SEQ ID NO: 5832596 - DNA, 25 bp, Homo sapien
actgtaagaattacatcaaacataa

SEQ ID NO: 5832597 - DNA, 25 bp, Homo sapien
tttaacccattgcagtgtctgtgtt

SEQ ID NO: 5832598 - DNA, 25 bp, Homo sapien
aaaggtctcatgcaatggaacttaa

SEQ ID NO: 5832599 - DNA, 25 bp, Homo sapien
gaccatgtacaacacataagtgtac

SEQ ID NO: 5832600 - DNA, 25 bp, Homo sapien
gatgccaacttacctagaccatcac

SEQ ID NO: 5832601 - DNA, 25 bp, Homo sapien
aactcttatccagtacttaggaact

SEQ ID NO: 5832602 - DNA, 25 bp, Homo sapien
aactggcaggtatatattccttctg

SEQ ID NO: 5832603 - DNA, 25 bp, Homo sapien
gacatgggtcaggggtagaaaggtt

SEQ ID NO: 5832604 - DNA, 25 bp, Homo sapien
cctccctattaatgtagtccacaaa

SEQ ID NO: 5832605 - DNA, 25 bp, Homo sapien
gtgtacattagggacttgtatgggc

SEQ ID NO: 5832606 - DNA, 25 bp, Homo sapien
gtgtctgtgttagactcagaaagtc

SEQ ID NO: 5832607 - DNA, 25 bp, Homo sapien
cacataaagccaaaatcttagaatt

SEQ ID NO: 5832608 - DNA, 25 bp, Homo sapien
ctgatcaatttagggttttatttga

SEQ ID NO: 5832609 - DNA, 25 bp, Homo sapien
ctcatagtaacattcagaattgtaa

SEQ ID NO: 5832610 - DNA, 25 bp, Homo sapien
tatttagtgtactgtcgatgaagac

SEQ ID NO: 5832611 - DNA, 25 bp, Homo sapien
ccatgtacaacacataagtgtacaa

SEQ ID NO: 5832612 - DNA, 25 bp, Homo sapien
cataaagccaaaatcttagaattat

SEQ ID NO: 5832613 - DNA, 25 bp, Homo sapien
attagactgaaaattatttacacat

SEQ ID NO: 5832614 - DNA, 25 bp, Homo sapien
tcattatttgttaaaaagccattag

SEQ ID NO: 5832615 - DNA, 25 bp, Homo sapien
agatttggcaagaactgtctgtcta

SEQ ID NO: 5832616 - DNA, 25 bp, Homo sapien
caaaccttgggaccatggaactctt

SEQ ID NO: 5832617 - DNA, 25 bp, Homo sapien
taagtgtacaatataacaaatatat

SEQ ID NO: 5832618 - DNA, 25 bp, Homo sapien
cattcagaattgtaacacagatttg

SEQ ID NO: 5832619 - DNA, 25 bp, Homo sapien
aattcttagaactgtaagaattaca

SEQ ID NO: 5832620 - DNA, 25 bp, Homo sapien
ctgtgttagactcagaaagtcacag

SEQ ID NO: 5832621 - DNA, 25 bp, Homo sapien
ttacatcaaacataaaagcctccct

SEQ ID NO: 5832622 - DNA, 25 bp, Homo sapien
ttttatttgaaatcagtatttagtg

SEQ ID NO: 5832623 - DNA, 25 bp, Homo sapien
acatcaaacataaaagcctccctat

SEQ ID NO: 5832624 - DNA, 25 bp, Homo sapien
gtctcatgcaatggaacttaattct

SEQ ID NO: 5832625 - DNA, 25 bp, Homo sapien
ctagctgggaaaagttgtgatcaca

SEQ ID NO: 5832626 - DNA, 25 bp, Homo sapien
gtgcttgaagtttttaatattcacg

SEQ ID NO: 5832627 - DNA, 25 bp, Homo sapien
agatcagataaacagctaatggtct

SEQ ID NO: 5832628 - DNA, 25 bp, Homo sapien
ccaacttacctagaccatcactcct

SEQ ID NO: 5832629 - DNA, 25 bp, Homo sapien
tagaactgtaagaattacatcaaac

SEQ ID NO: 5832630 - DNA, 25 bp, Homo sapien
aactgtctgtctagctgggaaaagt

SEQ ID NO: 5832631 - DNA, 25 bp, Homo sapien
cactgatcaatttagggttttattt

SEQ ID NO: 5832632 - DNA, 25 bp, Homo sapien
atcaagtgttaatggttgctagcca

SEQ ID NO: 5832633 - DNA, 25 bp, Homo sapien
cttacctagaccatcactcctacaa

SEQ ID NO: 5832634 - DNA, 25 bp, Homo sapien
attaaagtgcttgaagtttttaata

SEQ ID NO: 5832635 - DNA, 25 bp, Homo sapien
gggaccatggaactcttatccagta

SEQ ID NO: 5832636 - DNA, 25 bp, Homo sapien
tatttgttaaaaagccattagactg

SEQ ID NO: 5832637 - DNA, 25 bp, Homo sapien
caaatatatgcacagatatacagac

SEQ ID NO: 5832638 - DNA, 25 bp, Homo sapien
ctacagcagttcccatgacttcaaa

SEQ ID NO: 5832639 - DNA, 25 bp, Homo sapien
gaattgtaacacagatttggcaaga

SEQ ID NO: 5832640 - DNA, 25 bp, Homo sapien
tcgtcaacaacaaccacctcttgga

SEQ ID NO: 5832641 - DNA, 25 bp, Homo sapien
tcacaatacacagaaaaaacactga

SEQ ID NO: 5832642 - DNA, 25 bp, Homo sapien
agaattacatcaaacataaaagcct

SEQ ID NO: 5832643 - DNA, 25 bp, Homo sapien
cagaccatgtacaacacataagtgt

SEQ ID NO: 5832644 - DNA, 25 bp, Homo sapien
gaaatcagtatttagtgtactgtcg

SEQ ID NO: 5832645 - DNA, 25 bp, Homo sapien
ttgtctccagtgactttggtaaatc

SEQ ID NO: 5832646 - DNA, 25 bp, Homo sapien
tgtaagaattacatcaaacataaaa

SEQ ID NO: 5832647 - DNA, 25 bp, Homo sapien
aaccttgggaccatggaactcttat

SEQ ID NO: 5832648 - DNA, 25 bp, Homo sapien
ggcaggtatatattccttctgaatt

SEQ ID NO: 5832649 - DNA, 25 bp, Homo sapien
gacaagtatgttttattaaagtgct

SEQ ID NO: 5832650 - DNA, 25 bp, Homo sapien
caatttagggttttatttgaaatca

SEQ ID NO: 5832651 - DNA, 25 bp, Homo sapien
cttcaaactactgtgctcttccaat

SEQ ID NO: 5832652 - DNA, 25 bp, Homo sapien
cttttcctatcaagtgttaatggtt

SEQ ID NO: 5832653 - DNA, 25 bp, Homo sapien
agacagcatgacaaataagtataaa

SEQ ID NO: 5832654 - DNA, 25 bp, Homo sapien
ttcttagaactgtaagaattacatc

SEQ ID NO: 5832655 - DNA, 25 bp, Homo sapien
aacttacctagaccatcactcctac

SEQ ID NO: 5832656 - DNA, 25 bp, Homo sapien
caagtatgttttattaaagtgcttg

SEQ ID NO: 5832657 - DNA, 25 bp, Homo sapien
aaaaagccattagactgaaaattat

SEQ ID NO: 5832658 - DNA, 25 bp, Homo sapien
aacataaaagcctccctattaatgt

SEQ ID NO: 5832659 - DNA, 25 bp, Homo sapien
aacacataagtgtacaatataacaa

SEQ ID NO: 5832660 - DNA, 25 bp, Homo sapien
gaaagtcacagacaagtatgtttta

SEQ ID NO: 5832661 - DNA, 25 bp, Homo sapien
ttttcttccgaatgcttttcctatc

SEQ ID NO: 5832662 - DNA, 25 bp, Homo sapien
gaacttggagaaaattgtaatgggg

SEQ ID NO: 5832663 - DNA, 25 bp, Homo sapien
tatgcacagatatacagacatgggt

SEQ ID NO: 5832664 - DNA, 25 bp, Homo sapien
tatattccttctgaatttgtctcca

SEQ ID NO: 5832665 - DNA, 25 bp, Homo sapien
gtcaggggtagaaaggttgttcaga

SEQ ID NO: 5832666 - DNA, 25 bp, Homo sapien
tacaactaaaaggtctcatgcaatg

SEQ ID NO: 5832667 - DNA, 25 bp, Homo sapien
tggttgctagccatctctttgggaa

SEQ ID NO: 5832668 - DNA, 25 bp, Homo sapien
catacaagacgaaatagaataaaag

SEQ ID NO: 5832669 - DNA, 25 bp, Homo sapien
atataacaaatatatgcacagatat

SEQ ID NO: 5832670 - DNA, 25 bp, Homo sapien
cgaatgcttttcctatcaagtgtta

SEQ ID NO: 5832671 - DNA, 25 bp, Homo sapien
ttgaaatcagtatttagtgtactgt

SEQ ID NO: 5832672 - DNA, 25 bp, Homo sapien
acagcatgacaaataagtataaaag

SEQ ID NO: 5832673 - DNA, 25 bp, Homo sapien
gaaaagttgtgatcacaatacacag

SEQ ID NO: 5832674 - DNA, 25 bp, Homo sapien
atcagaccatgtacaacacataagt

SEQ ID NO: 5832675 - DNA, 25 bp, Homo sapien
acagatttggcaagaactgtctgtc

SEQ ID NO: 5832676 - DNA, 25 bp, Homo sapien
tgctcatagtaacattcagaattgt

SEQ ID NO: 5832677 - DNA, 25 bp, Homo sapien
aaattatttacacatacaagacgaa

SEQ ID NO: 5832678 - DNA, 25 bp, Homo sapien
aatggttgctagccatctctttggg

SEQ ID NO: 5832679 - DNA, 25 bp, Homo sapien
catagtaacattcagaattgtaaca

SEQ ID NO: 5832680 - DNA, 25 bp, Homo sapien
gtaacattcagaattgtaacacaga

SEQ ID NO: 5832681 - DNA, 25 bp, Homo sapien
attatttgttaaaaagccattagac

SEQ ID NO: 5832682 - DNA, 25 bp, Homo sapien
tggagaaaattgtaatggggggtgg

SEQ ID NO: 5832683 - DNA, 25 bp, Homo sapien
tagaccatcactcctacaactaaaa

SEQ ID NO: 5832684 - DNA, 25 bp, Homo sapien
aaagttgtgatcacaatacacagaa

SEQ ID NO: 5832685 - DNA, 25 bp, Homo sapien
ttaatattcacgagtgggtaaaaac

SEQ ID NO: 5832686 - DNA, 25 bp, Homo sapien
aagacataagaaactgaatttccct

SEQ ID NO: 5832687 - DNA, 25 bp, Homo sapien
ttcagaattgtaacacagatttggc

SEQ ID NO: 5832688 - DNA, 25 bp, Homo sapien
agaactgtctgtctagctgggaaaa

SEQ ID NO: 5832689 - DNA, 25 bp, Homo sapien
ctgtgctcttccaataatcttcatt

SEQ ID NO: 5832690 - DNA, 25 bp, Homo sapien
aaagccattagactgaaaattattt

SEQ ID NO: 5832691 - DNA, 25 bp, Homo sapien
tttgcaagatcagataaacagctaa

SEQ ID NO: 5832692 - DNA, 25 bp, Homo sapien
gtgtactgtcgatgaagacataaga

SEQ ID NO: 5832693 - DNA, 25 bp, Homo sapien
cagataaacagctaatggtctaaaa

SEQ ID NO: 5832694 - DNA, 25 bp, Homo sapien
cctttgcacataaagccaaaatctt

SEQ ID NO: 5832695 - DNA, 25 bp, Homo sapien
taaacagctaatggtctaaaaaccc

SEQ ID NO: 5832696 - DNA, 25 bp, Homo sapien
ttcacgagtgggtaaaaacacaaat

SEQ ID NO: 5832697 - DNA, 25 bp, Homo sapien
ggggtagaaaggttgttcagaggat

SEQ ID NO: 5832698 - DNA, 25 bp, Homo sapien
caagaactgtctgtctagctgggaa

SEQ ID NO: 5832699 - DNA, 25 bp, Homo sapien
gtcaacaacaaccacctcttggaaa

SEQ ID NO: 5832700 - DNA, 25 bp, Homo sapien
tggggggtgggggcagacagcatga

SEQ ID NO: 5832701 - DNA, 25 bp, Homo sapien
ggtatatattccttctgaatttgtc

SEQ ID NO: 5832702 - DNA, 25 bp, Homo sapien
caatggaacttaattcttagaactg

SEQ ID NO: 5832703 - DNA, 25 bp, Homo sapien
atcactcctacaactaaaaggtctc

SEQ ID NO: 5832704 - DNA, 25 bp, Homo sapien
aggtctcatgcaatggaacttaatt

SEQ ID NO: 5832705 - DNA, 25 bp, Homo sapien
tagggacttgtatgggctacagcag

SEQ ID NO: 5832706 - DNA, 25 bp, Homo sapien
gttgctagccatctctttgggaaca

SEQ ID NO: 5832707 - DNA, 25 bp, Homo sapien
acaaaactggcaggtatatattcct

SEQ ID NO: 5832708 - DNA, 25 bp, Homo sapien
gggcagacagcatgacaaataagta

SEQ ID NO: 5832709 - DNA, 25 bp, Homo sapien
actactgtgctcttccaataatctt

SEQ ID NO: 5832710 - DNA, 25 bp, Homo sapien
tggtctaaaaacccttaagtgtaca

SEQ ID NO: 5832711 - DNA, 25 bp, Homo sapien
taagaaactgaatttccctttgcac

SEQ ID NO: 5832712 - DNA, 25 bp, Homo sapien
tagactgaaaattatttacacatac

SEQ ID NO: 5832713 - DNA, 25 bp, Homo sapien
aagtcacagacaagtatgttttatt

SEQ ID NO: 5832714 - DNA, 25 bp, Homo sapien
ttgaagtttttaatattcacgagtg

SEQ ID NO: 5832715 - DNA, 25 bp, Homo sapien
tatacagacatgggtcaggggtaga

SEQ ID NO: 5832716 - DNA, 25 bp, Homo sapien
tttccctttgcacataaagccaaaa

SEQ ID NO: 5832717 - DNA, 25 bp, Homo sapien
ttattaaagtgcttgaagtttttaa

SEQ ID NO: 5832718 - DNA, 25 bp, Homo sapien
aagccaaaatcttagaattattatt

SEQ ID NO: 5832719 - DNA, 25 bp, Homo sapien
cataagaaactgaatttccctttgc

SEQ ID NO: 5832720 - DNA, 25 bp, Homo sapien
ctccagtgactttggtaaatctaac

SEQ ID NO: 5832721 - DNA, 25 bp, Homo sapien
tagaaaggttgttcagaggatgcca

SEQ ID NO: 5832722 - DNA, 25 bp, Homo sapien
ttaatgtagtccacaaaactggcag

SEQ ID NO: 5832723 - DNA, 25 bp, Homo sapien
cgagtgggtaaaaacacaaatgctc

SEQ ID NO: 5832724 - DNA, 25 bp, Homo sapien
aatgaatttatcgtcaacaacaacc

SEQ ID NO: 5832725 - DNA, 25 bp, Homo sapien
cacataagtgtacaatataacaaat

SEQ ID NO: 5832726 - DNA, 25 bp, Homo sapien
atttgaaatcagtatttagtgtact

SEQ ID NO: 5832727 - DNA, 25 bp, Homo sapien
tgcttttcctatcaagtgttaatgg

SEQ ID NO: 5832728 - DNA, 25 bp, Homo sapien
acaaataagtataaaagaatcagac

SEQ ID NO: 5832729 - DNA, 25 bp, Homo sapien
tacaatataacaaatatatgcacag

SEQ ID NO: 5832730 - DNA, 25 bp, Homo sapien
ctatcaagtgttaatggttgctagc

SEQ ID NO: 5832731 - DNA, 25 bp, Homo sapien
taacacagatttggcaagaactgtc

SEQ ID NO: 5832732 - DNA, 25 bp, Homo sapien
accaaaccttgggaccatggaactc

SEQ ID NO: 5832733 - DNA, 25 bp, Homo sapien
tcgatgaagacataagaaactgaat

SEQ ID NO: 5832734 - DNA, 25 bp, Homo sapien
gaaaattatttacacatacaagacg

SEQ ID NO: 5832735 - DNA, 25 bp, Homo sapien
ccatcactcctacaactaaaaggtc

SEQ ID NO: 5832736 - DNA, 25 bp, Homo sapien
tatttacacatacaagacgaaatag

SEQ ID NO: 5832737 - DNA, 25 bp, Homo sapien
atttggcaagaactgtctgtctagc

SEQ ID NO: 5832738 - DNA, 25 bp, Homo sapien
tgtcgatgaagacataagaaactga

SEQ ID NO: 5832739 - DNA, 25 bp, Homo sapien
ggttttatttgaaatcagtatttag

SEQ ID NO: 5832740 - DNA, 25 bp, Homo sapien
ggaaaatttaacccattgcagtgtc

SEQ ID NO: 5832741 - DNA, 25 bp, Homo sapien
agtatttagtgtactgtcgatgaag

SEQ ID NO: 5832742 - DNA, 25 bp, Homo sapien
agcctccctattaatgtagtccaca

SEQ ID NO: 5832743 - DNA, 25 bp, Homo sapien
ctcttatccagtacttaggaacttg

SEQ ID NO: 5832744 - DNA, 25 bp, Homo sapien
gataaacagctaatggtctaaaaac

SEQ ID NO: 5832745 - DNA, 25 bp, Homo sapien
ttggcaagaactgtctgtctagctg

SEQ ID NO: 5832746 - DNA, 25 bp, Homo sapien
tgtagtccacaaaactggcaggtat

SEQ ID NO: 5832747 - DNA, 25 bp, Homo sapien
caaacataaaagcctccctattaat

SEQ ID NO: 5832748 - DNA, 25 bp, Homo sapien
tgtatgggctacagcagttcccatg

SEQ ID NO: 5832749 - DNA, 25 bp, Homo sapien
gtgggggcagacagcatgacaaata

SEQ ID NO: 5832750 - DNA, 25 bp, Homo sapien
aaggttgttcagaggatgccaactt

SEQ ID NO: 5832751 - DNA, 25 bp, Homo sapien
ctggcaggtatatattccttctgaa

SEQ ID NO: 5832752 - DNA, 25 bp, Homo sapien
aagaatcagaccatgtacaacacat

SEQ ID NO: 5832753 - DNA, 25 bp, Homo sapien
ctgaaaattatttacacatacaaga

SEQ ID NO: 5832754 - DNA, 25 bp, Homo sapien
ccagtgactttggtaaatctaacta

SEQ ID NO: 5832755 - DNA, 25 bp, Homo sapien
tagtgtactgtcgatgaagacataa

SEQ ID NO: 5832756 - DNA, 25 bp, Homo sapien
gccaaaatcttagaattattattat

SEQ ID NO: 5832757 - DNA, 25 bp, Homo sapien
ggtaaaaacacaaatgctcatagta

SEQ ID NO: 5832758 - DNA, 25 bp, Homo sapien
gaactgtaagaattacatcaaacat

SEQ ID NO: 5832759 - DNA, 25 bp, Homo sapien
tccagtacttaggaacttggagaaa

SEQ ID NO: 5832760 - DNA, 25 bp, Homo sapien
cagtgtctgtgttagactcagaaag

SEQ ID NO: 5832761 - DNA, 25 bp, Homo sapien
tgaatttatcgtcaacaacaaccac

SEQ ID NO: 5832762 - DNA, 25 bp, Homo sapien
tatgggctacagcagttcccatgac

SEQ ID NO: 5832763 - DNA, 25 bp, Homo sapien
ttgttcagaggatgccaacttacct

SEQ ID NO: 5832764 - DNA, 25 bp, Homo sapien
gcagacagcatgacaaataagtata

SEQ ID NO: 5832765 - DNA, 25 bp, Homo sapien
gtacaacacataagtgtacaatata

SEQ ID NO: 5832766 - DNA, 25 bp, Homo sapien
gacgaaatagaataaaagaaaacca

SEQ ID NO: 5832767 - DNA, 25 bp, Homo sapien
gactgaaaattatttacacatacaa

SEQ ID NO: 5832768 - DNA, 25 bp, Homo sapien
agctgggaaaagttgtgatcacaat

SEQ ID NO: 5832769 - DNA, 25 bp, Homo sapien
taaagtgcttgaagtttttaatatt

SEQ ID NO: 5832770 - DNA, 25 bp, Homo sapien
cacaaatgctcatagtaacattcag

SEQ ID NO: 5832771 - DNA, 25 bp, Homo sapien
gaatcagaccatgtacaacacataa

SEQ ID NO: 5832772 - DNA, 25 bp, Homo sapien
tcaaactactgtgctcttccaataa

SEQ ID NO: 5832773 - DNA, 25 bp, Homo sapien
atgtacaacacataagtgtacaata

SEQ ID NO: 5832774 - DNA, 25 bp, Homo sapien
gtaatggggggtgggggcagacagc

SEQ ID NO: 5832775 - DNA, 25 bp, Homo sapien
cataagtgtacaatataacaaatat

SEQ ID NO: 5832776 - DNA, 25 bp, Homo sapien
gcttgaagtttttaatattcacgag

SEQ ID NO: 5832777 - DNA, 25 bp, Homo sapien
gaaaaaacactgatcaatttagggt

SEQ ID NO: 5832778 - DNA, 25 bp, Homo sapien
gaaaggttgttcagaggatgccaac

SEQ ID NO: 5832779 - DNA, 25 bp, Homo sapien
aatttatcgtcaacaacaaccacct

SEQ ID NO: 5832780 - DNA, 25 bp, Homo sapien
ctgaatttgtctccagtgactttgg

SEQ ID NO: 5832781 - DNA, 25 bp, Homo sapien
gtctgtgttagactcagaaagtcac

SEQ ID NO: 5832782 - DNA, 25 bp, Homo sapien
caggggtagaaaggttgttcagagg

SEQ ID NO: 5832783 - DNA, 25 bp, Homo sapien
cagctaatggtctaaaaacccttaa

SEQ ID NO: 5832784 - DNA, 25 bp, Homo sapien
tgcaatggaacttaattcttagaac

SEQ ID NO: 5832785 - DNA, 25 bp, Homo sapien
ttatttgaaatcagtatttagtgta

SEQ ID NO: 5832786 - DNA, 25 bp, Homo sapien
gacttgtatgggctacagcagttcc

SEQ ID NO: 5832787 - DNA, 25 bp, Homo sapien
tacagacatgggtcaggggtagaaa

SEQ ID NO: 5832788 - DNA, 25 bp, Homo sapien
tatgttttattaaagtgcttgaagt

SEQ ID NO: 5832789 - DNA, 25 bp, Homo sapien
ccttaagtgtacattagggacttgt

SEQ ID NO: 5832790 - DNA, 25 bp, Homo sapien
actgaatttccctttgcacataaag

SEQ ID NO: 5832791 - DNA, 25 bp, Homo sapien
gatcaatttagggttttatttgaaa

SEQ ID NO: 5832792 - DNA, 25 bp, Homo sapien
agaaactgaatttccctttgcacat

SEQ ID NO: 5832793 - DNA, 25 bp, Homo sapien
aaataagtataaaagaatcagacca

SEQ ID NO: 5832794 - DNA, 25 bp, Homo sapien
aatacacagaaaaaacactgatcaa

SEQ ID NO: 5832795 - DNA, 25 bp, Homo sapien
atcttcattatttgttaaaaagcca

SEQ ID NO: 5832796 - DNA, 25 bp, Homo sapien
tagactcagaaagtcacagacaagt

SEQ ID NO: 5832797 - DNA, 25 bp, Homo sapien
aattgtaatggggggtgggggcaga

SEQ ID NO: 5832798 - DNA, 25 bp, Homo sapien
cttagaactgtaagaattacatcaa

SEQ ID NO: 5832799 - DNA, 25 bp, Homo sapien
cctcttggaaaatttaacccattgc

SEQ ID NO: 5832800 - DNA, 25 bp, Homo sapien
ctcagaaagtcacagacaagtatgt

SEQ ID NO: 5832801 - DNA, 25 bp, Homo sapien
tatcgtcaacaacaaccacctcttg

SEQ ID NO: 5832802 - DNA, 25 bp, Homo sapien
agcagttcccatgacttcaaactac

SEQ ID NO: 5832803 - DNA, 25 bp, Homo sapien
gggaaaagttgtgatcacaatacac

SEQ ID NO: 5832804 - DNA, 25 bp, Homo sapien
attgcagtgtctgtgttagactcag

SEQ ID NO: 5832805 - DNA, 25 bp, Homo sapien
cttgtatgggctacagcagttccca

SEQ ID NO: 5832806 - DNA, 25 bp, Homo sapien
caactaaaaggtctcatgcaatgga

SEQ ID NO: 5832807 - DNA, 25 bp, Homo sapien
gaatttgtctccagtgactttggta

SEQ ID NO: 5832808 - DNA, 25 bp, Homo sapien
tgcagtgtctgtgttagactcagaa

SEQ ID NO: 5832809 - DNA, 25 bp, Homo sapien
aaaacacaaatgctcatagtaacat

SEQ ID NO: 5832810 - DNA, 25 bp, Homo sapien
cctattaatgtagtccacaaaactg

SEQ ID NO: 5832811 - DNA, 25 bp, Homo sapien
cagtacttaggaacttggagaaaat

SEQ ID NO: 5832812 - DNA, 25 bp, Homo sapien
attagggacttgtatgggctacagc

SEQ ID NO: 5832813 - DNA, 25 bp, Homo sapien
tcttggaaaatttaacccattgcag

SEQ ID NO: 5832814 - DNA, 25 bp, Homo sapien
tgaatttccctttgcacataaagcc

SEQ ID NO: 5832815 - DNA, 25 bp, Homo sapien
actgtcgatgaagacataagaaact

SEQ ID NO: 5832816 - DNA, 25 bp, Homo sapien
ataagtataaaagaatcagaccatg

SEQ ID NO: 5832817 - DNA, 25 bp, Homo sapien
ccacaaaactggcaggtatatattc

SEQ ID NO: 5832818 - DNA, 25 bp, Homo sapien
ggttgttcagaggatgccaacttac

SEQ ID NO: 5832819 - DNA, 25 bp, Homo sapien
aaaatttaacccattgcagtgtctg

SEQ ID NO: 5832820 - DNA, 25 bp, Homo sapien
aatgctcatagtaacattcagaatt

SEQ ID NO: 5832821 - DNA, 25 bp, Homo sapien
ccattgcagtgtctgtgttagactc

SEQ ID NO: 5832822 - DNA, 25 bp, Homo sapien
ttaatgaatttatcgtcaacaacaa

SEQ ID NO: 5832823 - DNA, 25 bp, Homo sapien
tttagggttttatttgaaatcagta

SEQ ID NO: 5832824 - DNA, 25 bp, Homo sapien
caacaaccacctcttggaaaattta

SEQ ID NO: 5832825 - DNA, 25 bp, Homo sapien
tgcacagatatacagacatgggtca

SEQ ID NO: 5832826 - DNA, 25 bp, Homo sapien
aagtgtacattagggacttgtatgg

SEQ ID NO: 5832827 - DNA, 25 bp, Homo sapien
gaccatggaactcttatccagtact

SEQ ID NO: 5832828 - DNA, 25 bp, Homo sapien
aacaaatatatgcacagatatacag

SEQ ID NO: 5832829 - DNA, 25 bp, Homo sapien
tattccttctgaatttgtctccagt

SEQ ID NO: 5832830 - DNA, 25 bp, Homo sapien
ataacaaatatatgcacagatatac

SEQ ID NO: 5832831 - DNA, 25 bp, Homo sapien
ggaacttaattcttagaactgtaag

SEQ ID NO: 5832832 - DNA, 25 bp, Homo sapien
gatcacaatacacagaaaaaacact

SEQ ID NO: 5832833 - DNA, 25 bp, Homo sapien
ccattagactgaaaattatttacac

SEQ ID NO: 5832834 - DNA, 25 bp, Homo sapien
taacccattgcagtgtctgtgttag

SEQ ID NO: 5832835 - DNA, 25 bp, Homo sapien
gggtgggggcagacagcatgacaaa

SEQ ID NO: 5832836 - DNA, 25 bp, Homo sapien
ctcctacaactaaaaggtctcatgc

SEQ ID NO: 5832837 - DNA, 25 bp, Homo sapien
taaaagcctccctattaatgtagtc

SEQ ID NO: 5832838 - DNA, 25 bp, Homo sapien
acaatacacagaaaaaacactgatc

SEQ ID NO: 5832839 - DNA, 25 bp, Homo sapien
ttctgaatttgtctccagtgacttt

SEQ ID NO: 5832840 - DNA, 25 bp, Homo sapien
ccttctgaatttgtctccagtgact

SEQ ID NO: 5832841 - DNA, 25 bp, Homo sapien
tatatgcacagatatacagacatgg

SEQ ID NO: 5832842 - DNA, 25 bp, Homo sapien
gggtcaggggtagaaaggttgttca

SEQ ID NO: 5832843 - DNA, 25 bp, Homo sapien
aagtataaaagaatcagaccatgta

SEQ ID NO: 5832844 - DNA, 25 bp, Homo sapien
cagatatacagacatgggtcagggg

SEQ ID NO: 5832845 - DNA, 25 bp, Homo sapien
gttcagaggatgccaacttacctag

SEQ ID NO: 5832846 - DNA, 25 bp, Homo sapien
ccatggaactcttatccagtactta

SEQ ID NO: 5832847 - DNA, 25 bp, Homo sapien
gtataaaagaatcagaccatgtaca

SEQ ID NO: 5832848 - DNA, 25 bp, Homo sapien
aaactgaatttccctttgcacataa

SEQ ID NO: 5832849 - DNA, 25 bp, Homo sapien
ctgtctagctgggaaaagttgtgat

SEQ ID NO: 5832850 - DNA, 25 bp, Homo sapien
ttaggaacttggagaaaattgtaat

SEQ ID NO: 5832851 - DNA, 25 bp, Homo sapien
gacataagaaactgaatttcccttt

SEQ ID NO: 5832852 - DNA, 25 bp, Homo sapien
aacactgatcaatttagggttttat

SEQ ID NO: 5832853 - DNA, 25 bp, Homo sapien
tgtacaatataacaaatatatgcac

SEQ ID NO: 5832854 - DNA, 25 bp, Homo sapien
tagtccacaaaactggcaggtatat

SEQ ID NO: 5832855 - DNA, 25 bp, Homo sapien
agaggatgccaacttacctagacca

SEQ ID NO: 5832856 - DNA, 25 bp, Homo sapien
cagacatgggtcaggggtagaaagg

SEQ ID NO: 5832857 - DNA, 25 bp, Homo sapien
tgactttggtaaatctaactaaatt

SEQ ID NO: 5832858 - DNA, 25 bp, Homo sapien
taagaattacatcaaacataaaagc

SEQ ID NO: 5832859 - DNA, 25 bp, Homo sapien
aatttaacccattgcagtgtctgtg

SEQ ID NO: 5832860 - DNA, 25 bp, Homo sapien
caggtatatattccttctgaatttg

SEQ ID NO: 5832861 - DNA, 25 bp, Homo sapien
agcatgacaaataagtataaaagaa

SEQ ID NO: 5832862 - DNA, 25 bp, Homo sapien
caagacgaaatagaataaaagaaaa

SEQ ID NO: 5832863 - DNA, 25 bp, Homo sapien
acaacacataagtgtacaatataac

SEQ ID NO: 5832864 - DNA, 25 bp, Homo sapien
caaatgctcatagtaacattcagaa

SEQ ID NO: 5832865 - DNA, 25 bp, Homo sapien
actaaaaggtctcatgcaatggaac

SEQ ID NO: 5832866 - DNA, 25 bp, Homo sapien
agtgttaatggttgctagccatctc

SEQ ID NO: 5832867 - DNA, 25 bp, Homo sapien
ttcttccgaatgcttttcctatcaa

SEQ ID NO: 5832868 - DNA, 25 bp, Homo sapien
tattcacgagtgggtaaaaacacaa

SEQ ID NO: 5832869 - DNA, 25 bp, Homo sapien
caagatcagataaacagctaatggt

SEQ ID NO: 5832870 - DNA, 25 bp, Homo sapien
tcttaatgaatttatcgtcaacaac

SEQ ID NO: 5832871 - DNA, 25 bp, Homo sapien
attgtaacacagatttggcaagaac

SEQ ID NO: 5832872 - DNA, 25 bp, Homo sapien
cacagatatacagacatgggtcagg

SEQ ID NO: 5832873 - DNA, 25 bp, Homo sapien
atggaacttaattcttagaactgta

SEQ ID NO: 5832874 - DNA, 25 bp, Homo sapien
cagttcccatgacttcaaactactg

SEQ ID NO: 5832875 - DNA, 25 bp, Homo sapien
cttcattatttgttaaaaagccatt

SEQ ID NO: 5832876 - DNA, 25 bp, Homo sapien
aagtgcttgaagtttttaatattca

SEQ ID NO: 5832877 - DNA, 25 bp, Homo sapien
gactcagaaagtcacagacaagtat

SEQ ID NO: 5832878 - DNA, 25 bp, Homo sapien
attcttaatgaatttatcgtcaaca

SEQ ID NO: 5832879 - DNA, 25 bp, Homo sapien
cacagacaagtatgttttattaaag

SEQ ID NO: 5832880 - DNA, 25 bp, Homo sapien
gttagactcagaaagtcacagacaa

SEQ ID NO: 5832881 - DNA, 25 bp, Homo sapien
acagcagttcccatgacttcaaact

SEQ ID NO: 5832882 - DNA, 25 bp, Homo sapien
taaaaggtctcatgcaatggaactt

SEQ ID NO: 5832883 - DNA, 25 bp, Homo sapien
catgacaaataagtataaaagaatc

SEQ ID NO: 5832884 - DNA, 25 bp, Homo sapien
cacgagtgggtaaaaacacaaatgc

SEQ ID NO: 5832885 - DNA, 25 bp, Homo sapien
gtctccagtgactttggtaaatcta

SEQ ID NO: 5832886 - DNA, 25 bp, Homo sapien
tttgttaaaaagccattagactgaa

SEQ ID NO: 5832887 - DNA, 25 bp, Homo sapien
tactgtgctcttccaataatcttca

SEQ ID NO: 5832888 - DNA, 25 bp, Homo sapien
aattacatcaaacataaaagcctcc

SEQ ID NO: 5832889 - DNA, 25 bp, Homo sapien
gaccatcactcctacaactaaaagg

SEQ ID NO: 5832890 - DNA, 25 bp, Homo sapien
tccctttgcacataaagccaaaatc

SEQ ID NO: 5832891 - DNA, 25 bp, Homo sapien
aaactactgtgctcttccaataatc

SEQ ID NO: 5832892 - DNA, 25 bp, Homo sapien
atcaaacataaaagcctccctatta

SEQ ID NO: 5832893 - DNA, 25 bp, Homo sapien
tatatattccttctgaatttgtctc

SEQ ID NO: 5832894 - DNA, 25 bp, Homo sapien
cctagaccatcactcctacaactaa

SEQ ID NO: 5832895 - DNA, 25 bp, Homo sapien
aaaactggcaggtatatattccttc

SEQ ID NO: 5832896 - DNA, 25 bp, Homo sapien
catgggtcaggggtagaaaggttgt

SEQ ID NO: 5832897 - DNA, 25 bp, Homo sapien
tttcctatcaagtgttaatggttgc

SEQ ID NO: 5832898 - DNA, 25 bp, Homo sapien
ggctacagcagttcccatgacttca

SEQ ID NO: 5832899 - DNA, 25 bp, Homo sapien
acacagatttggcaagaactgtctg

SEQ ID NO: 5832900 - DNA, 25 bp, Homo sapien
cataaaagcctccctattaatgtag

SEQ ID NO: 5832901 - DNA, 25 bp, Homo sapien
tgtttgggggttttcttccgaatgc

SEQ ID NO: 5832902 - DNA, 25 bp, Homo sapien
gtgttagactcagaaagtcacagac

SEQ ID NO: 5832903 - DNA, 25 bp, Homo sapien
ccatgacttcaaactactgtgctct

SEQ ID NO: 5832904 - DNA, 25 bp, Homo sapien
tcctatcaagtgttaatggttgcta

SEQ ID NO: 5832905 - DNA, 25 bp, Homo sapien
tattattaccaaaatatgtttgggg

SEQ ID NO: 5832906 - DNA, 25 bp, Homo sapien
ttttaatattcacgagtgggtaaaa

SEQ ID NO: 5832907 - DNA, 25 bp, Homo sapien
aatttccctttgcacataaagccaa

SEQ ID NO: 5832908 - DNA, 25 bp, Homo sapien
gatgaagacataagaaactgaattt

SEQ ID NO: 5832909 - DNA, 25 bp, Homo sapien
gtcacagacaagtatgttttattaa

SEQ ID NO: 5832910 - DNA, 25 bp, Homo sapien
taaaaacacaaatgctcatagtaac

SEQ ID NO: 5832911 - DNA, 25 bp, Homo sapien
caagtgttaatggttgctagccatc

SEQ ID NO: 5832912 - DNA, 25 bp, Homo sapien
aacttaattcttagaactgtaagaa

SEQ ID NO: 5832913 - DNA, 25 bp, Homo sapien
aggatgccaacttacctagaccatc

SEQ ID NO: 5832914 - DNA, 25 bp, Homo sapien
tgcacataaagccaaaatcttagaa

SEQ ID NO: 5832915 - DNA, 25 bp, Homo sapien
aatgtagtccacaaaactggcaggt

SEQ ID NO: 5832916 - DNA, 25 bp, Homo sapien
tacaagacgaaatagaataaaagaa

SEQ ID NO: 5832917 - DNA, 25 bp, Homo sapien
tgaagacataagaaactgaatttcc

SEQ ID NO: 5832918 - DNA, 25 bp, Homo sapien
tacctagaccatcactcctacaact

SEQ ID NO: 5832919 - DNA, 25 bp, Homo sapien
gttcccatgacttcaaactactgtg

SEQ ID NO: 5832920 - DNA, 25 bp, Homo sapien
ttaaaaagccattagactgaaaatt

SEQ ID NO: 5832921 - DNA, 25 bp, Homo sapien
tattaatgtagtccacaaaactggc

SEQ ID NO: 5832922 - DNA, 25 bp, Homo sapien
tgcaagatcagataaacagctaatg

SEQ ID NO: 5832923 - DNA, 25 bp, Homo sapien
aaagcctccctattaatgtagtcca

SEQ ID NO: 5832924 - DNA, 25 bp, Homo sapien
ttaatggttgctagccatctctttg

SEQ ID NO: 5832925 - DNA, 25 bp, Homo sapien
aatggggggtgggggcagacagcat

SEQ ID NO: 5832926 - DNA, 25 bp, Homo sapien
gggggcagacagcatgacaaataag

SEQ ID NO: 5832927 - DNA, 25 bp, Homo sapien
ttgggaccatggaactcttatccag

SEQ ID NO: 5832928 - DNA, 25 bp, Homo sapien
gtctagctgggaaaagttgtgatca

SEQ ID NO: 5832929 - DNA, 25 bp, Homo sapien
ataaaagaatcagaccatgtacaac

SEQ ID NO: 5832930 - DNA, 25 bp, Homo sapien
ctgggaaaagttgtgatcacaatac

SEQ ID NO: 5832931 - DNA, 25 bp, Homo sapien
taaagccaaaatcttagaattatta

SEQ ID NO: 5832932 - DNA, 25 bp, Homo sapien
caacaacaaccacctcttggaaaat

SEQ ID NO: 5832933 - DNA, 25 bp, Homo sapien
ggttttcttccgaatgcttttccta

SEQ ID NO: 5832934 - DNA, 25 bp, Homo sapien
ggaactcttatccagtacttaggaa

SEQ ID NO: 5832935 - DNA, 25 bp, Homo sapien
aggaacttggagaaaattgtaatgg

SEQ ID NO: 5832936 - DNA, 25 bp, Homo sapien
acttaggaacttggagaaaattgta

SEQ ID NO: 5832937 - DNA, 25 bp, Homo sapien
gacttcaaactactgtgctcttcca

SEQ ID NO: 5832938 - DNA, 25 bp, Homo sapien
agtgctgagattgtaaaggctctca

SEQ ID NO: 5832939 - DNA, 25 bp, Homo sapien
cagaagagaaatgtaccacagtcct

SEQ ID NO: 5832940 - DNA, 25 bp, Homo sapien
acaggagtcccacacttggcactta

SEQ ID NO: 5832941 - DNA, 25 bp, Homo sapien
gtgcccagcgcagggcagccaccct

SEQ ID NO: 5832942 - DNA, 25 bp, Homo sapien
tcctcatgtggcactgtagcatccc

SEQ ID NO: 5832943 - DNA, 25 bp, Homo sapien
atggtcctgcactgtcgtggctgct

SEQ ID NO: 5832944 - DNA, 25 bp, Homo sapien
aaatgtaccacagtcctgatgtgtt

SEQ ID NO: 5832945 - DNA, 25 bp, Homo sapien
tgttctctgctgccctggagatgcc

SEQ ID NO: 5832946 - DNA, 25 bp, Homo sapien
aacaagctaactgtattagaaacta

SEQ ID NO: 5832947 - DNA, 25 bp, Homo sapien
ctgctgcaggatactctgagatgag

SEQ ID NO: 5832948 - DNA, 25 bp, Homo sapien
tattctgagacattgtctgtggtgt

SEQ ID NO: 5832949 - DNA, 25 bp, Homo sapien
gacattgtctgtggtgtccctgaaa

SEQ ID NO: 5832950 - DNA, 25 bp, Homo sapien
atgtgaaccttgaatacattacatt

SEQ ID NO: 5832951 - DNA, 25 bp, Homo sapien
ctgtggtgtccctgaaacatggtgt

SEQ ID NO: 5832952 - DNA, 25 bp, Homo sapien
gaaagaactgctgagctcctcaaag

SEQ ID NO: 5832953 - DNA, 25 bp, Homo sapien
aacagtggagtgcagtacatgcctg

SEQ ID NO: 5832954 - DNA, 25 bp, Homo sapien
gtcataaatttttaaagtgcttatg

SEQ ID NO: 5832955 - DNA, 25 bp, Homo sapien
atccttccaccagaagagaaatgta

SEQ ID NO: 5832956 - DNA, 25 bp, Homo sapien
tgtctgtgtgagttgtggtgtctta

SEQ ID NO: 5832957 - DNA, 25 bp, Homo sapien
gtgttggtgttaacattgttctgtt

SEQ ID NO: 5832958 - DNA, 25 bp, Homo sapien
tccttattctgagacattgtctgtg

SEQ ID NO: 5832959 - DNA, 25 bp, Homo sapien
tgtaaagtaatgcatgcaatcttgt

SEQ ID NO: 5832960 - DNA, 25 bp, Homo sapien
ttttaaagtgcttatgattcaatta

SEQ ID NO: 5832961 - DNA, 25 bp, Homo sapien
cagtggagtgcagtacatgcctgag

SEQ ID NO: 5832962 - DNA, 25 bp, Homo sapien
ttccaccagaagagaaatgtaccac

SEQ ID NO: 5832963 - DNA, 25 bp, Homo sapien
cgtcaccttccacccgtgtctgtgt

SEQ ID NO: 5832964 - DNA, 25 bp, Homo sapien
ccaggttccaggcaggtgacagcca

SEQ ID NO: 5832965 - DNA, 25 bp, Homo sapien
agcagcttatagtatctgtcgggta

SEQ ID NO: 5832966 - DNA, 25 bp, Homo sapien
agctaacaaatggaaatctgaattg

SEQ ID NO: 5832967 - DNA, 25 bp, Homo sapien
cccacacttggcacttacactaagg

SEQ ID NO: 5832968 - DNA, 25 bp, Homo sapien
atgccgtcaccttccacccgtgtct

SEQ ID NO: 5832969 - DNA, 25 bp, Homo sapien
gcaatgctgtcaccatggtcctgca

SEQ ID NO: 5832970 - DNA, 25 bp, Homo sapien
aaacatggtgtccatgctgtaacag

SEQ ID NO: 5832971 - DNA, 25 bp, Homo sapien
tgaattgcagtctgtcccaggttcc

SEQ ID NO: 5832972 - DNA, 25 bp, Homo sapien
gctgcaggatactctgagatgagca

SEQ ID NO: 5832973 - DNA, 25 bp, Homo sapien
ctgtctgctcacaggagtcccacac

SEQ ID NO: 5832974 - DNA, 25 bp, Homo sapien
ctcatgagtcagcagtgcttggaag

SEQ ID NO: 5832975 - DNA, 25 bp, Homo sapien
tccaggcaggtgacagccatgtgtg

SEQ ID NO: 5832976 - DNA, 25 bp, Homo sapien
aattaatctacattttggtaatcaa

SEQ ID NO: 5832977 - DNA, 25 bp, Homo sapien
caccctccttccttatccttccacc

SEQ ID NO: 5832978 - DNA, 25 bp, Homo sapien
caaatggaaatctgaattgcagtct

SEQ ID NO: 5832979 - DNA, 25 bp, Homo sapien
tgtcctgttaccagtgtaaaaacag

SEQ ID NO: 5832980 - DNA, 25 bp, Homo sapien
taacattgttctgtttgacttttgt

SEQ ID NO: 5832981 - DNA, 25 bp, Homo sapien
ggagatgccgtcaccttccacccgt

SEQ ID NO: 5832982 - DNA, 25 bp, Homo sapien
agcagtgcttggaagtgcacagctg

SEQ ID NO: 5832983 - DNA, 25 bp, Homo sapien
tccccgtcataaatttttaaagtgc

SEQ ID NO: 5832984 - DNA, 25 bp, Homo sapien
ccctggagatgccgtcaccttccac

SEQ ID NO: 5832985 - DNA, 25 bp, Homo sapien
tgttctgtttgacttttgtgtaaag

SEQ ID NO: 5832986 - DNA, 25 bp, Homo sapien
gtacaaagaagagtagctgttgaga

SEQ ID NO: 5832987 - DNA, 25 bp, Homo sapien
gtgaaccttgaatacattacatttc

SEQ ID NO: 5832988 - DNA, 25 bp, Homo sapien
aatgctgtcaccatggtcctgcact

SEQ ID NO: 5832989 - DNA, 25 bp, Homo sapien
actgtgcatcacaaagctaacaaat

SEQ ID NO: 5832990 - DNA, 25 bp, Homo sapien
aaacaggacatagtgcccagcgcag

SEQ ID NO: 5832991 - DNA, 25 bp, Homo sapien
aatgcatgcaatcttgtaatgtagc

SEQ ID NO: 5832992 - DNA, 25 bp, Homo sapien
ctcagttcctcatgtggcactgtag

SEQ ID NO: 5832993 - DNA, 25 bp, Homo sapien
agtatctgtcgggtacaaagaagag

SEQ ID NO: 5832994 - DNA, 25 bp, Homo sapien
ttttagtgacctgtaggcagtggca

SEQ ID NO: 5832995 - DNA, 25 bp, Homo sapien
agatgccgtcaccttccacccgtgt

SEQ ID NO: 5832996 - DNA, 25 bp, Homo sapien
tgggaagatgctgtctgctcacagg

SEQ ID NO: 5832997 - DNA, 25 bp, Homo sapien
cattacatttctctcaaacacaaag

SEQ ID NO: 5832998 - DNA, 25 bp, Homo sapien
tgtgagttgtggtgtcttagtgact

SEQ ID NO: 5832999 - DNA, 25 bp, Homo sapien
ctgagctcctcaaagcagtgctgag

SEQ ID NO: 5833000 - DNA, 25 bp, Homo sapien
taccatgtaagtctcatgagtcagc

SEQ ID NO: 5833001 - DNA, 25 bp, Homo sapien
ctgttaccagtgtaaaaacagcaaa

SEQ ID NO: 5833002 - DNA, 25 bp, Homo sapien
atagtatctgtcgggtacaaagaag

SEQ ID NO: 5833003 - DNA, 25 bp, Homo sapien
caggtgacagccatgtgtgtctgca

SEQ ID NO: 5833004 - DNA, 25 bp, Homo sapien
acctgtaggcagtggcaaatacaga

SEQ ID NO: 5833005 - DNA, 25 bp, Homo sapien
aactaggtatttttagtgacctgta

SEQ ID NO: 5833006 - DNA, 25 bp, Homo sapien
ctgtattagaaactattcaaaaact

SEQ ID NO: 5833007 - DNA, 25 bp, Homo sapien
atgagcaggttctttggaaagaact

SEQ ID NO: 5833008 - DNA, 25 bp, Homo sapien
tgctgaaaacaggacatagtgccca

SEQ ID NO: 5833009 - DNA, 25 bp, Homo sapien
gagcaggttctttggaaagaactgc

SEQ ID NO: 5833010 - DNA, 25 bp, Homo sapien
acatggaagctctcacactgtgcat

SEQ ID NO: 5833011 - DNA, 25 bp, Homo sapien
aaaacagcaaacatggaagctctca

SEQ ID NO: 5833012 - DNA, 25 bp, Homo sapien
aacaaatggaaatctgaattgcagt

SEQ ID NO: 5833013 - DNA, 25 bp, Homo sapien
ctgcactgtcgtggctgctgcagga

SEQ ID NO: 5833014 - DNA, 25 bp, Homo sapien
tggtgttaacattgttctgtttgac

SEQ ID NO: 5833015 - DNA, 25 bp, Homo sapien
attgttctgtttgacttttgtgtaa

SEQ ID NO: 5833016 - DNA, 25 bp, Homo sapien
ggctagtgctgaaaacaggacatag

SEQ ID NO: 5833017 - DNA, 25 bp, Homo sapien
tggaaagaactgctgagctcctcaa

SEQ ID NO: 5833018 - DNA, 25 bp, Homo sapien
atactctgagatgagcaggttcttt

SEQ ID NO: 5833019 - DNA, 25 bp, Homo sapien
tgacttagtatgtagctcactcctt

SEQ ID NO: 5833020 - DNA, 25 bp, Homo sapien
ttttccagcgtgttctctgctgccc

SEQ ID NO: 5833021 - DNA, 25 bp, Homo sapien
acagccatgtgtgtctgcaatgctg

SEQ ID NO: 5833022 - DNA, 25 bp, Homo sapien
gtgtctgcaatgctgtcaccatggt

SEQ ID NO: 5833023 - DNA, 25 bp, Homo sapien
agtatgtagctcactccttattctg

SEQ ID NO: 5833024 - DNA, 25 bp, Homo sapien
agccaccctcaccctccttccttat

SEQ ID NO: 5833025 - DNA, 25 bp, Homo sapien
tatctgtcgggtacaaagaagagta

SEQ ID NO: 5833026 - DNA, 25 bp, Homo sapien
tatgtagctcactccttattctgag

SEQ ID NO: 5833027 - DNA, 25 bp, Homo sapien
agtggcaaatacagacatgtgaacc

SEQ ID NO: 5833028 - DNA, 25 bp, Homo sapien
tgcaggatactctgagatgagcagg

SEQ ID NO: 5833029 - DNA, 25 bp, Homo sapien
acaggacatagtgcccagcgcaggg

SEQ ID NO: 5833030 - DNA, 25 bp, Homo sapien
tctcagcctcctcagttcctcatgt

SEQ ID NO: 5833031 - DNA, 25 bp, Homo sapien
ttccttatccttccaccagaagaga

SEQ ID NO: 5833032 - DNA, 25 bp, Homo sapien
gagctcctcaaagcagtgctgagat

SEQ ID NO: 5833033 - DNA, 25 bp, Homo sapien
tttggaaagaactgctgagctcctc

SEQ ID NO: 5833034 - DNA, 25 bp, Homo sapien
actaaggttaccatgtaagtctcat

SEQ ID NO: 5833035 - DNA, 25 bp, Homo sapien
aatggaaatctgaattgcagtctgt

SEQ ID NO: 5833036 - DNA, 25 bp, Homo sapien
acatggtgtccatgctgtaacagtg

SEQ ID NO: 5833037 - DNA, 25 bp, Homo sapien
tcctgttaccagtgtaaaaacagca

SEQ ID NO: 5833038 - DNA, 25 bp, Homo sapien
ttcaaaaactaggtatttttagtga

SEQ ID NO: 5833039 - DNA, 25 bp, Homo sapien
gcctgagtacacacagcagcttata

SEQ ID NO: 5833040 - DNA, 25 bp, Homo sapien
cagtcctgatgtgttggtgttaaca

SEQ ID NO: 5833041 - DNA, 25 bp, Homo sapien
taaagtaatgcatgcaatcttgtaa

SEQ ID NO: 5833042 - DNA, 25 bp, Homo sapien
gttccaggcaggtgacagccatgtg

SEQ ID NO: 5833043 - DNA, 25 bp, Homo sapien
tgtgtgagttgtggtgtcttagtga

SEQ ID NO: 5833044 - DNA, 25 bp, Homo sapien
tggcaaatacagacatgtgaacctt

SEQ ID NO: 5833045 - DNA, 25 bp, Homo sapien
gtctgctcacaggagtcccacactt

SEQ ID NO: 5833046 - DNA, 25 bp, Homo sapien
cttatgattcaattaatctacattt

SEQ ID NO: 5833047 - DNA, 25 bp, Homo sapien
aggagtcccacacttggcacttaca

SEQ ID NO: 5833048 - DNA, 25 bp, Homo sapien
ggaagtgcacagctggctagtgctg

SEQ ID NO: 5833049 - DNA, 25 bp, Homo sapien
ataaatttttaaagtgcttatgatt

SEQ ID NO: 5833050 - DNA, 25 bp, Homo sapien
ctaggtatttttagtgacctgtagg

SEQ ID NO: 5833051 - DNA, 25 bp, Homo sapien
agctaactgtattagaaactattca

SEQ ID NO: 5833052 - DNA, 25 bp, Homo sapien
agaaatgtaccacagtcctgatgtg

SEQ ID NO: 5833053 - DNA, 25 bp, Homo sapien
tcttagtgacttagtatgtagctca

SEQ ID NO: 5833054 - DNA, 25 bp, Homo sapien
ttctgagacattgtctgtggtgtcc

SEQ ID NO: 5833055 - DNA, 25 bp, Homo sapien
gcagtgctgagattgtaaaggctct

SEQ ID NO: 5833056 - DNA, 25 bp, Homo sapien
ctgagtacacacagcagcttatagt

SEQ ID NO: 5833057 - DNA, 25 bp, Homo sapien
tgattcaattaatctacattttggt

SEQ ID NO: 5833058 - DNA, 25 bp, Homo sapien
tgtgtaaagtaatgcatgcaatctt

SEQ ID NO: 5833059 - DNA, 25 bp, Homo sapien
tgtcccaggttccaggcaggtgaca

SEQ ID NO: 5833060 - DNA, 25 bp, Homo sapien
agacatgtgaaccttgaatacatta

SEQ ID NO: 5833061 - DNA, 25 bp, Homo sapien
catcacaaagctaacaaatggaaat

SEQ ID NO: 5833062 - DNA, 25 bp, Homo sapien
gtttgacttttgtgtaaagtaatgc

SEQ ID NO: 5833063 - DNA, 25 bp, Homo sapien
ttagtgacttagtatgtagctcact

SEQ ID NO: 5833064 - DNA, 25 bp, Homo sapien
agtgacttagtatgtagctcactcc

SEQ ID NO: 5833065 - DNA, 25 bp, Homo sapien
agagaaatgtaccacagtcctgatg

SEQ ID NO: 5833066 - DNA, 25 bp, Homo sapien
gaagagaaatgtaccacagtcctga

SEQ ID NO: 5833067 - DNA, 25 bp, Homo sapien
ctgtaacagtggagtgcagtacatg

SEQ ID NO: 5833068 - DNA, 25 bp, Homo sapien
actctgagatgagcaggttctttgg

SEQ ID NO: 5833069 - DNA, 25 bp, Homo sapien
gcttatagtatctgtcgggtacaaa

SEQ ID NO: 5833070 - DNA, 25 bp, Homo sapien
aagaactgctgagctcctcaaagca

SEQ ID NO: 5833071 - DNA, 25 bp, Homo sapien
gctcactccttattctgagacattg

SEQ ID NO: 5833072 - DNA, 25 bp, Homo sapien
actgtagcatccccgtcataaattt

SEQ ID NO: 5833073 - DNA, 25 bp, Homo sapien
ggtgtcttagtgacttagtatgtag

SEQ ID NO: 5833074 - DNA, 25 bp, Homo sapien
actgctgagctcctcaaagcagtgc

SEQ ID NO: 5833075 - DNA, 25 bp, Homo sapien
gtagctgttgagacagagagctgtg

SEQ ID NO: 5833076 - DNA, 25 bp, Homo sapien
aacagcaaacatggaagctctcaca

SEQ ID NO: 5833077 - DNA, 25 bp, Homo sapien
tcacaaagctaacaaatggaaatct

SEQ ID NO: 5833078 - DNA, 25 bp, Homo sapien
tcactccttattctgagacattgtc

SEQ ID NO: 5833079 - DNA, 25 bp, Homo sapien
gtcctgatgtgttggtgttaacatt

SEQ ID NO: 5833080 - DNA, 25 bp, Homo sapien
ctggagatgccgtcaccttccaccc

SEQ ID NO: 5833081 - DNA, 25 bp, Homo sapien
ctcatgtggcactgtagcatccccg

SEQ ID NO: 5833082 - DNA, 25 bp, Homo sapien
tgaaaacaagctaactgtattagaa

SEQ ID NO: 5833083 - DNA, 25 bp, Homo sapien
ggatactctgagatgagcaggttct

SEQ ID NO: 5833084 - DNA, 25 bp, Homo sapien
taaaaacagcaaacatggaagctct

SEQ ID NO: 5833085 - DNA, 25 bp, Homo sapien
aagatgctgtctgctcacaggagtc

SEQ ID NO: 5833086 - DNA, 25 bp, Homo sapien
accctgggaagatgctgtctgctca

SEQ ID NO: 5833087 - DNA, 25 bp, Homo sapien
aaaacaagctaactgtattagaaac

SEQ ID NO: 5833088 - DNA, 25 bp, Homo sapien
cagcaaacatggaagctctcacact

SEQ ID NO: 5833089 - DNA, 25 bp, Homo sapien
gcactgtcgtggctgctgcaggata

SEQ ID NO: 5833090 - DNA, 25 bp, Homo sapien
accttccacccgtgtctgtgtgagt

SEQ ID NO: 5833091 - DNA, 25 bp, Homo sapien
gcccagcgcagggcagccaccctca

SEQ ID NO: 5833092 - DNA, 25 bp, Homo sapien
cacttggcacttacactaaggttac

SEQ ID NO: 5833093 - DNA, 25 bp, Homo sapien
gaaatctgaattgcagtctgtccca

SEQ ID NO: 5833094 - DNA, 25 bp, Homo sapien
acttacactaaggttaccatgtaag

SEQ ID NO: 5833095 - DNA, 25 bp, Homo sapien
acatgcctgagtacacacagcagct

SEQ ID NO: 5833096 - DNA, 25 bp, Homo sapien
ctgttgagacagagagctgtgcttc

SEQ ID NO: 5833097 - DNA, 25 bp, Homo sapien
aagtctcatgagtcagcagtgcttg

SEQ ID NO: 5833098 - DNA, 25 bp, Homo sapien
acagcagcttatagtatctgtcggg

SEQ ID NO: 5833099 - DNA, 25 bp, Homo sapien
gggtacaaagaagagtagctgttga

SEQ ID NO: 5833100 - DNA, 25 bp, Homo sapien
tctgaattgcagtctgtcccaggtt

SEQ ID NO: 5833101 - DNA, 25 bp, Homo sapien
tgctgagctcctcaaagcagtgctg

SEQ ID NO: 5833102 - DNA, 25 bp, Homo sapien
tctacattttggtaatcaattataa

SEQ ID NO: 5833103 - DNA, 25 bp, Homo sapien
tctgagatgagcaggttctttggaa

SEQ ID NO: 5833104 - DNA, 25 bp, Homo sapien
cagcttatagtatctgtcgggtaca

SEQ ID NO: 5833105 - DNA, 25 bp, Homo sapien
ccttccaccagaagagaaatgtacc

SEQ ID NO: 5833106 - DNA, 25 bp, Homo sapien
tcaattaatctacattttggtaatc

SEQ ID NO: 5833107 - DNA, 25 bp, Homo sapien
cttgaatacattacatttctctcaa

SEQ ID NO: 5833108 - DNA, 25 bp, Homo sapien
gctcctcaaagcagtgctgagattg

SEQ ID NO: 5833109 - DNA, 25 bp, Homo sapien
ctgtttgacttttgtgtaaagtaat

SEQ ID NO: 5833110 - DNA, 25 bp, Homo sapien
caagctaactgtattagaaactatt

SEQ ID NO: 5833111 - DNA, 25 bp, Homo sapien
gttcctcatgtggcactgtagcatc

SEQ ID NO: 5833112 - DNA, 25 bp, Homo sapien
ctgtcaccatggtcctgcactgtcg

SEQ ID NO: 5833113 - DNA, 25 bp, Homo sapien
aaagtgcttatgattcaattaatct

SEQ ID NO: 5833114 - DNA, 25 bp, Homo sapien
atttctctcaaacacaaagaaacaa

SEQ ID NO: 5833115 - DNA, 25 bp, Homo sapien
gcagtggcaaatacagacatgtgaa

SEQ ID NO: 5833116 - DNA, 25 bp, Homo sapien
cagttcctcatgtggcactgtagca

SEQ ID NO: 5833117 - DNA, 25 bp, Homo sapien
tgctgtctgctcacaggagtcccac

SEQ ID NO: 5833118 - DNA, 25 bp, Homo sapien
ccagtgtaaaaacagcaaacatgga

SEQ ID NO: 5833119 - DNA, 25 bp, Homo sapien
tcgggtacaaagaagagtagctgtt

SEQ ID NO: 5833120 - DNA, 25 bp, Homo sapien
agtcagcagtgcttggaagtgcaca

SEQ ID NO: 5833121 - DNA, 25 bp, Homo sapien
gtcccacacttggcacttacactaa

SEQ ID NO: 5833122 - DNA, 25 bp, Homo sapien
gcacttacactaaggttaccatgta

SEQ ID NO: 5833123 - DNA, 25 bp, Homo sapien
acttttccagcgtgttctctgctgc

SEQ ID NO: 5833124 - DNA, 25 bp, Homo sapien
ggaagatgctgtctgctcacaggag

SEQ ID NO: 5833125 - DNA, 25 bp, Homo sapien
ccatggtcctgcactgtcgtggctg

SEQ ID NO: 5833126 - DNA, 25 bp, Homo sapien
gttaccatgtaagtctcatgagtca

SEQ ID NO: 5833127 - DNA, 25 bp, Homo sapien
tagcatccccgtcataaatttttaa

SEQ ID NO: 5833128 - DNA, 25 bp, Homo sapien
ttaccctgggaagatgctgtctgct

SEQ ID NO: 5833129 - DNA, 25 bp, Homo sapien
ttagaaactattcaaaaactaggta

SEQ ID NO: 5833130 - DNA, 25 bp, Homo sapien
tgcatgcaatcttgtaatgtagcct

SEQ ID NO: 5833131 - DNA, 25 bp, Homo sapien
ggaagctctcacactgtgcatcaca

SEQ ID NO: 5833132 - DNA, 25 bp, Homo sapien
tgaatacattacatttctctcaaac

SEQ ID NO: 5833133 - DNA, 25 bp, Homo sapien
gctgccctggagatgccgtcacctt

SEQ ID NO: 5833134 - DNA, 25 bp, Homo sapien
aagtgcacagctggctagtgctgaa

SEQ ID NO: 5833135 - DNA, 25 bp, Homo sapien
atttttagtgacctgtaggcagtgg

SEQ ID NO: 5833136 - DNA, 25 bp, Homo sapien
gatgctgtctgctcacaggagtccc

SEQ ID NO: 5833137 - DNA, 25 bp, Homo sapien
tgaaacatggtgtccatgctgtaac

SEQ ID NO: 5833138 - DNA, 25 bp, Homo sapien
atgcctgagtacacacagcagctta

SEQ ID NO: 5833139 - DNA, 25 bp, Homo sapien
gagtacacacagcagcttatagtat

SEQ ID NO: 5833140 - DNA, 25 bp, Homo sapien
tgagtcagcagtgcttggaagtgca

SEQ ID NO: 5833141 - DNA, 25 bp, Homo sapien
tctgtcccaggttccaggcaggtga

SEQ ID NO: 5833142 - DNA, 25 bp, Homo sapien
gagattgtaaaggctctcagcctcc

SEQ ID NO: 5833143 - DNA, 25 bp, Homo sapien
ggtgtccctgaaacatggtgtccat

SEQ ID NO: 5833144 - DNA, 25 bp, Homo sapien
gagtagctgttgagacagagagctg

SEQ ID NO: 5833145 - DNA, 25 bp, Homo sapien
aatctgaattgcagtctgtcccagg

SEQ ID NO: 5833146 - DNA, 25 bp, Homo sapien
cctcctcagttcctcatgtggcact

SEQ ID NO: 5833147 - DNA, 25 bp, Homo sapien
tgacctgtaggcagtggcaaataca

SEQ ID NO: 5833148 - DNA, 25 bp, Homo sapien
aaatacagacatgtgaaccttgaat

SEQ ID NO: 5833149 - DNA, 25 bp, Homo sapien
tgctgtcaccatggtcctgcactgt

SEQ ID NO: 5833150 - DNA, 25 bp, Homo sapien
tgtaatgtagcctgaaaacaagcta

SEQ ID NO: 5833151 - DNA, 25 bp, Homo sapien
tgtagcatccccgtcataaattttt

SEQ ID NO: 5833152 - DNA, 25 bp, Homo sapien
gtctgcaatgctgtcaccatggtcc

SEQ ID NO: 5833153 - DNA, 25 bp, Homo sapien
actgtcgtggctgctgcaggatact

SEQ ID NO: 5833154 - DNA, 25 bp, Homo sapien
gttaacattgttctgtttgactttt

SEQ ID NO: 5833155 - DNA, 25 bp, Homo sapien
acaaagaagagtagctgttgagaca

SEQ ID NO: 5833156 - DNA, 25 bp, Homo sapien
ccagcgtgttctctgctgccctgga

SEQ ID NO: 5833157 - DNA, 25 bp, Homo sapien
ggtgtccatgctgtaacagtggagt

SEQ ID NO: 5833158 - DNA, 25 bp, Homo sapien
aagcagtgctgagattgtaaaggct

SEQ ID NO: 5833159 - DNA, 25 bp, Homo sapien
ctagtgctgaaaacaggacatagtg

SEQ ID NO: 5833160 - DNA, 25 bp, Homo sapien
cctgggaagatgctgtctgctcaca

SEQ ID NO: 5833161 - DNA, 25 bp, Homo sapien
tgtcgtggctgctgcaggatactct

SEQ ID NO: 5833162 - DNA, 25 bp, Homo sapien
ctgaaaacaggacatagtgcccagc

SEQ ID NO: 5833163 - DNA, 25 bp, Homo sapien
tcctgcactgtcgtggctgctgcag

SEQ ID NO: 5833164 - DNA, 25 bp, Homo sapien
catgtggcactgtagcatccccgtc

SEQ ID NO: 5833165 - DNA, 25 bp, Homo sapien
tgcagtacatgcctgagtacacaca

SEQ ID NO: 5833166 - DNA, 25 bp, Homo sapien
gtacatgcctgagtacacacagcag

SEQ ID NO: 5833167 - DNA, 25 bp, Homo sapien
aattgcagtctgtcccaggttccag

SEQ ID NO: 5833168 - DNA, 25 bp, Homo sapien
aaagaagagtagctgttgagacaga

SEQ ID NO: 5833169 - DNA, 25 bp, Homo sapien
tgtcgggtacaaagaagagtagctg

SEQ ID NO: 5833170 - DNA, 25 bp, Homo sapien
tgtagctcactccttattctgagac

SEQ ID NO: 5833171 - DNA, 25 bp, Homo sapien
tttgtgtaaagtaatgcatgcaatc

SEQ ID NO: 5833172 - DNA, 25 bp, Homo sapien
ttctctgctgccctggagatgccgt

SEQ ID NO: 5833173 - DNA, 25 bp, Homo sapien
ttggaagtgcacagctggctagtgc

SEQ ID NO: 5833174 - DNA, 25 bp, Homo sapien
ctgcaatgctgtcaccatggtcctg

SEQ ID NO: 5833175 - DNA, 25 bp, Homo sapien
gcagccaccctcaccctccttcctt

SEQ ID NO: 5833176 - DNA, 25 bp, Homo sapien
cttccacccgtgtctgtgtgagttg

SEQ ID NO: 5833177 - DNA, 25 bp, Homo sapien
ttacactaaggttaccatgtaagtc

SEQ ID NO: 5833178 - DNA, 25 bp, Homo sapien
ggctgctgcaggatactctgagatg

SEQ ID NO: 5833179 - DNA, 25 bp, Homo sapien
atgtgttggtgttaacattgttctg

SEQ ID NO: 5833180 - DNA, 25 bp, Homo sapien
catagtgcccagcgcagggcagcca

SEQ ID NO: 5833181 - DNA, 25 bp, Homo sapien
aaaaacttttccagcgtgttctctg

SEQ ID NO: 5833182 - DNA, 25 bp, Homo sapien
actccttattctgagacattgtctg

SEQ ID NO: 5833183 - DNA, 25 bp, Homo sapien
caatcttgtaatgtagcctgaaaac

SEQ ID NO: 5833184 - DNA, 25 bp, Homo sapien
gggcagccaccctcaccctccttcc

SEQ ID NO: 5833185 - DNA, 25 bp, Homo sapien
ctgctcacaggagtcccacacttgg

SEQ ID NO: 5833186 - DNA, 25 bp, Homo sapien
tgcaatcttgtaatgtagcctgaaa

SEQ ID NO: 5833187 - DNA, 25 bp, Homo sapien
aagctctcacactgtgcatcacaaa

SEQ ID NO: 5833188 - DNA, 25 bp, Homo sapien
tcgtggctgctgcaggatactctga

SEQ ID NO: 5833189 - DNA, 25 bp, Homo sapien
atgtagcctgaaaacaagctaactg

SEQ ID NO: 5833190 - DNA, 25 bp, Homo sapien
gtaccacagtcctgatgtgttggtg

SEQ ID NO: 5833191 - DNA, 25 bp, Homo sapien
acagctggctagtgctgaaaacagg

SEQ ID NO: 5833192 - DNA, 25 bp, Homo sapien
gacttttgtgtaaagtaatgcatgc

SEQ ID NO: 5833193 - DNA, 25 bp, Homo sapien
tctcacactgtgcatcacaaagcta

SEQ ID NO: 5833194 - DNA, 25 bp, Homo sapien
atggtgtccatgctgtaacagtgga

SEQ ID NO: 5833195 - DNA, 25 bp, Homo sapien
gttctttggaaagaactgctgagct

SEQ ID NO: 5833196 - DNA, 25 bp, Homo sapien
cgtgtctgtgtgagttgtggtgtct

SEQ ID NO: 5833197 - DNA, 25 bp, Homo sapien
ctcaccctccttccttatccttcca

SEQ ID NO: 5833198 - DNA, 25 bp, Homo sapien
tcacactgtgcatcacaaagctaac

SEQ ID NO: 5833199 - DNA, 25 bp, Homo sapien
tgcatcacaaagctaacaaatggaa

SEQ ID NO: 5833200 - DNA, 25 bp, Homo sapien
taaggttaccatgtaagtctcatga

SEQ ID NO: 5833201 - DNA, 25 bp, Homo sapien
cctgaaacatggtgtccatgctgta

SEQ ID NO: 5833202 - DNA, 25 bp, Homo sapien
agtgctgaaaacaggacatagtgcc

SEQ ID NO: 5833203 - DNA, 25 bp, Homo sapien
gctctcagcctcctcagttcctcat

SEQ ID NO: 5833204 - DNA, 25 bp, Homo sapien
tcacaggagtcccacacttggcact

SEQ ID NO: 5833205 - DNA, 25 bp, Homo sapien
ccttatccttccaccagaagagaaa

SEQ ID NO: 5833206 - DNA, 25 bp, Homo sapien
acttagtatgtagctcactccttat

SEQ ID NO: 5833207 - DNA, 25 bp, Homo sapien
gctctcacactgtgcatcacaaagc

SEQ ID NO: 5833208 - DNA, 25 bp, Homo sapien
tgacagccatgtgtgtctgcaatgc

SEQ ID NO: 5833209 - DNA, 25 bp, Homo sapien
agtgcttatgattcaattaatctac

SEQ ID NO: 5833210 - DNA, 25 bp, Homo sapien
tgtccatgctgtaacagtggagtgc

SEQ ID NO: 5833211 - DNA, 25 bp, Homo sapien
tccatgctgtaacagtggagtgcag

SEQ ID NO: 5833212 - DNA, 25 bp, Homo sapien
ggcaggtgacagccatgtgtgtctg

SEQ ID NO: 5833213 - DNA, 25 bp, Homo sapien
cttgtaatgtagcctgaaaacaagc

SEQ ID NO: 5833214 - DNA, 25 bp, Homo sapien
aggttaccatgtaagtctcatgagt

SEQ ID NO: 5833215 - DNA, 25 bp, Homo sapien
aatctacattttggtaatcaattat

SEQ ID NO: 5833216 - DNA, 25 bp, Homo sapien
gtgttaacattgttctgtttgactt

SEQ ID NO: 5833217 - DNA, 25 bp, Homo sapien
gcagtctgtcccaggttccaggcag

SEQ ID NO: 5833218 - DNA, 25 bp, Homo sapien
aaaggctctcagcctcctcagttcc

SEQ ID NO: 5833219 - DNA, 25 bp, Homo sapien
aggctctcagcctcctcagttcctc

SEQ ID NO: 5833220 - DNA, 25 bp, Homo sapien
tctgtcgggtacaaagaagagtagc

SEQ ID NO: 5833221 - DNA, 25 bp, Homo sapien
tgccctggagatgccgtcaccttcc

SEQ ID NO: 5833222 - DNA, 25 bp, Homo sapien
ttagtatgtagctcactccttattc

SEQ ID NO: 5833223 - DNA, 25 bp, Homo sapien
caggcaggtgacagccatgtgtgtc

SEQ ID NO: 5833224 - DNA, 25 bp, Homo sapien
tgtaaaaacagcaaacatggaagct

SEQ ID NO: 5833225 - DNA, 25 bp, Homo sapien
ttgtggtgtcttagtgacttagtat

SEQ ID NO: 5833226 - DNA, 25 bp, Homo sapien
ctgagattgtaaaggctctcagcct

SEQ ID NO: 5833227 - DNA, 25 bp, Homo sapien
tggaaatctgaattgcagtctgtcc

SEQ ID NO: 5833228 - DNA, 25 bp, Homo sapien
ttttaccctgggaagatgctgtctg

SEQ ID NO: 5833229 - DNA, 25 bp, Homo sapien
tggcacttacactaaggttaccatg

SEQ ID NO: 5833230 - DNA, 25 bp, Homo sapien
ttttttttaccctgggaagatgctg

SEQ ID NO: 5833231 - DNA, 25 bp, Homo sapien
gaaaacaggacatagtgcccagcgc

SEQ ID NO: 5833232 - DNA, 25 bp, Homo sapien
atacagacatgtgaaccttgaatac

SEQ ID NO: 5833233 - DNA, 25 bp, Homo sapien
gtatttttagtgacctgtaggcagt

SEQ ID NO: 5833234 - DNA, 25 bp, Homo sapien
cccgtgtctgtgtgagttgtggtgt

SEQ ID NO: 5833235 - DNA, 25 bp, Homo sapien
ctctgctgccctggagatgccgtca

SEQ ID NO: 5833236 - DNA, 25 bp, Homo sapien
gattgtaaaggctctcagcctcctc

SEQ ID NO: 5833237 - DNA, 25 bp, Homo sapien
aaacatggaagctctcacactgtgc

SEQ ID NO: 5833238 - DNA, 25 bp, Homo sapien
ctggctagtgctgaaaacaggacat

SEQ ID NO: 5833239 - DNA, 25 bp, Homo sapien
catgagtcagcagtgcttggaagtg

SEQ ID NO: 5833240 - DNA, 25 bp, Homo sapien
ctccttccttatccttccaccagaa

SEQ ID NO: 5833241 - DNA, 25 bp, Homo sapien
agcctcctcagttcctcatgtggca

SEQ ID NO: 5833242 - DNA, 25 bp, Homo sapien
gttaccagtgtaaaaacagcaaaca

SEQ ID NO: 5833243 - DNA, 25 bp, Homo sapien
ttgacttttgtgtaaagtaatgcat

SEQ ID NO: 5833244 - DNA, 25 bp, Homo sapien
ttatccttccaccagaagagaaatg

SEQ ID NO: 5833245 - DNA, 25 bp, Homo sapien
gcaaatacagacatgtgaaccttga

SEQ ID NO: 5833246 - DNA, 25 bp, Homo sapien
atttttaaagtgcttatgattcaat

SEQ ID NO: 5833247 - DNA, 25 bp, Homo sapien
ggtgacagccatgtgtgtctgcaat

SEQ ID NO: 5833248 - DNA, 25 bp, Homo sapien
ttacatttctctcaaacacaaagaa

SEQ ID NO: 5833249 - DNA, 25 bp, Homo sapien
ttgtctgtggtgtccctgaaacatg

SEQ ID NO: 5833250 - DNA, 25 bp, Homo sapien
agcgcagggcagccaccctcaccct

SEQ ID NO: 5833251 - DNA, 25 bp, Homo sapien
atggaagctctcacactgtgcatca

SEQ ID NO: 5833252 - DNA, 25 bp, Homo sapien
ctgtaggcagtggcaaatacagaca

SEQ ID NO: 5833253 - DNA, 25 bp, Homo sapien
caccatggtcctgcactgtcgtggc

SEQ ID NO: 5833254 - DNA, 25 bp, Homo sapien
gcaaacatggaagctctcacactgt

SEQ ID NO: 5833255 - DNA, 25 bp, Homo sapien
tcctcagttcctcatgtggcactgt

SEQ ID NO: 5833256 - DNA, 25 bp, Homo sapien
acatttctctcaaacacaaagaaac

SEQ ID NO: 5833257 - DNA, 25 bp, Homo sapien
tgctgagattgtaaaggctctcagc

SEQ ID NO: 5833258 - DNA, 25 bp, Homo sapien
ttccagcgtgttctctgctgccctg

SEQ ID NO: 5833259 - DNA, 25 bp, Homo sapien
agaagagtagctgttgagacagaga

SEQ ID NO: 5833260 - DNA, 25 bp, Homo sapien
gtgtgtctgcaatgctgtcaccatg

SEQ ID NO: 5833261 - DNA, 25 bp, Homo sapien
ccatgtaagtctcatgagtcagcag

SEQ ID NO: 5833262 - DNA, 25 bp, Homo sapien
ccaccagaagagaaatgtaccacag

SEQ ID NO: 5833263 - DNA, 25 bp, Homo sapien
tcagcagtgcttggaagtgcacagc

SEQ ID NO: 5833264 - DNA, 25 bp, Homo sapien
attcaattaatctacattttggtaa

SEQ ID NO: 5833265 - DNA, 25 bp, Homo sapien
ggagtgcagtacatgcctgagtaca

SEQ ID NO: 5833266 - DNA, 25 bp, Homo sapien
gcacagctggctagtgctgaaaaca

SEQ ID NO: 5833267 - DNA, 25 bp, Homo sapien
gtacacacagcagcttatagtatct

SEQ ID NO: 5833268 - DNA, 25 bp, Homo sapien
cagggcagccaccctcaccctcctt

SEQ ID NO: 5833269 - DNA, 25 bp, Homo sapien
aaatttttaaagtgcttatgattca

SEQ ID NO: 5833270 - DNA, 25 bp, Homo sapien
ttagtgacctgtaggcagtggcaaa

SEQ ID NO: 5833271 - DNA, 25 bp, Homo sapien
gaaccttgaatacattacatttctc

SEQ ID NO: 5833272 - DNA, 25 bp, Homo sapien
ctgctgccctggagatgccgtcacc

SEQ ID NO: 5833273 - DNA, 25 bp, Homo sapien
gcaggttctttggaaagaactgctg

SEQ ID NO: 5833274 - DNA, 25 bp, Homo sapien
ccaccctcaccctccttccttatcc

SEQ ID NO: 5833275 - DNA, 25 bp, Homo sapien
gtaatgcatgcaatcttgtaatgta

SEQ ID NO: 5833276 - DNA, 25 bp, Homo sapien
aaagctaacaaatggaaatctgaat

SEQ ID NO: 5833277 - DNA, 25 bp, Homo sapien
acatgtgaaccttgaatacattaca

SEQ ID NO: 5833278 - DNA, 25 bp, Homo sapien
taatgtagcctgaaaacaagctaac

SEQ ID NO: 5833279 - DNA, 25 bp, Homo sapien
gtaggcagtggcaaatacagacatg

SEQ ID NO: 5833280 - DNA, 25 bp, Homo sapien
atactttttaaattagtattggcta

SEQ ID NO: 5833281 - DNA, 25 bp, Homo sapien
gtggtgtccctgaaacatggtgtcc

SEQ ID NO: 5833282 - DNA, 25 bp, Homo sapien
atgtaagtctcatgagtcagcagtg

SEQ ID NO: 5833283 - DNA, 25 bp, Homo sapien
aggttctttggaaagaactgctgag

SEQ ID NO: 5833284 - DNA, 25 bp, Homo sapien
agcctgaaaacaagctaactgtatt

SEQ ID NO: 5833285 - DNA, 25 bp, Homo sapien
atgtgtgtctgcaatgctgtcacca

SEQ ID NO: 5833286 - DNA, 25 bp, Homo sapien
gtggagtgcagtacatgcctgagta

SEQ ID NO: 5833287 - DNA, 25 bp, Homo sapien
cttggcacttacactaaggttacca

SEQ ID NO: 5833288 - DNA, 25 bp, Homo sapien
ttttttaccctgggaagatgctgtc

SEQ ID NO: 5833289 - DNA, 25 bp, Homo sapien
aggtatttttagtgacctgtaggca

SEQ ID NO: 5833290 - DNA, 25 bp, Homo sapien
tcagcctcctcagttcctcatgtgg

SEQ ID NO: 5833291 - DNA, 25 bp, Homo sapien
atcttgtaatgtagcctgaaaacaa

SEQ ID NO: 5833292 - DNA, 25 bp, Homo sapien
cagtgcttggaagtgcacagctggc

SEQ ID NO: 5833293 - DNA, 25 bp, Homo sapien
ttaatctacattttggtaatcaatt

SEQ ID NO: 5833294 - DNA, 25 bp, Homo sapien
tgagttgtggtgtcttagtgactta

SEQ ID NO: 5833295 - DNA, 25 bp, Homo sapien
tctgtgtgagttgtggtgtcttagt

SEQ ID NO: 5833296 - DNA, 25 bp, Homo sapien
gcatccccgtcataaatttttaaag

SEQ ID NO: 5833297 - DNA, 25 bp, Homo sapien
ctgagacattgtctgtggtgtccct

SEQ ID NO: 5833298 - DNA, 25 bp, Homo sapien
cattgtctgtggtgtccctgaaaca

SEQ ID NO: 5833299 - DNA, 25 bp, Homo sapien
acagacatgtgaaccttgaatacat

SEQ ID NO: 5833300 - DNA, 25 bp, Homo sapien
accagaagagaaatgtaccacagtc

SEQ ID NO: 5833301 - DNA, 25 bp, Homo sapien
cctgaaaacaagctaactgtattag

SEQ ID NO: 5833302 - DNA, 25 bp, Homo sapien
accacagtcctgatgtgttggtgtt

SEQ ID NO: 5833303 - DNA, 25 bp, Homo sapien
agtgtcctgttaccagtgtaaaaac

SEQ ID NO: 5833304 - DNA, 25 bp, Homo sapien
tgagatgagcaggttctttggaaag

SEQ ID NO: 5833305 - DNA, 25 bp, Homo sapien
acactgtgcatcacaaagctaacaa

SEQ ID NO: 5833306 - DNA, 25 bp, Homo sapien
ctaactgtattagaaactattcaaa

SEQ ID NO: 5833307 - DNA, 25 bp, Homo sapien
catgctgtaacagtggagtgcagta

SEQ ID NO: 5833308 - DNA, 25 bp, Homo sapien
tgctgtaacagtggagtgcagtaca

SEQ ID NO: 5833309 - DNA, 25 bp, Homo sapien
gctcacaggagtcccacacttggca

SEQ ID NO: 5833310 - DNA, 25 bp, Homo sapien
aaacttttccagcgtgttctctgct

SEQ ID NO: 5833311 - DNA, 25 bp, Homo sapien
tgatgtgttggtgttaacattgttc

SEQ ID NO: 5833312 - DNA, 25 bp, Homo sapien
taccagtgtaaaaacagcaaacatg

SEQ ID NO: 5833313 - DNA, 25 bp, Homo sapien
tgtccctgaaacatggtgtccatgc

SEQ ID NO: 5833314 - DNA, 25 bp, Homo sapien
gagtcccacacttggcacttacact

SEQ ID NO: 5833315 - DNA, 25 bp, Homo sapien
caaagcagtgctgagattgtaaagg

SEQ ID NO: 5833316 - DNA, 25 bp, Homo sapien
ctaacaaatggaaatctgaattgca

SEQ ID NO: 5833317 - DNA, 25 bp, Homo sapien
atgtaccacagtcctgatgtgttgg

SEQ ID NO: 5833318 - DNA, 25 bp, Homo sapien
agttgtggtgtcttagtgacttagt

SEQ ID NO: 5833319 - DNA, 25 bp, Homo sapien
tatgattcaattaatctacattttg

SEQ ID NO: 5833320 - DNA, 25 bp, Homo sapien
tagtgcccagcgcagggcagccacc

SEQ ID NO: 5833321 - DNA, 25 bp, Homo sapien
cacccgtgtctgtgtgagttgtggt

SEQ ID NO: 5833322 - DNA, 25 bp, Homo sapien
gtaacagtggagtgcagtacatgcc

SEQ ID NO: 5833323 - DNA, 25 bp, Homo sapien
gcttggaagtgcacagctggctagt

SEQ ID NO: 5833324 - DNA, 25 bp, Homo sapien
ccatgtgtgtctgcaatgctgtcac

SEQ ID NO: 5833325 - DNA, 25 bp, Homo sapien
caggatactctgagatgagcaggtt

SEQ ID NO: 5833326 - DNA, 25 bp, Homo sapien
ttctgtttgacttttgtgtaaagta

SEQ ID NO: 5833327 - DNA, 25 bp, Homo sapien
ctcaaagcagtgctgagattgtaaa

SEQ ID NO: 5833328 - DNA, 25 bp, Homo sapien
ccttccttatccttccaccagaaga

SEQ ID NO: 5833329 - DNA, 25 bp, Homo sapien
gtgcacagctggctagtgctgaaaa

SEQ ID NO: 5833330 - DNA, 25 bp, Homo sapien
aactgtattagaaactattcaaaaa

SEQ ID NO: 5833331 - DNA, 25 bp, Homo sapien
tcctcaaagcagtgctgagattgta

SEQ ID NO: 5833332 - DNA, 25 bp, Homo sapien
gagacattgtctgtggtgtccctga

SEQ ID NO: 5833333 - DNA, 25 bp, Homo sapien
accttgaatacattacatttctctc

SEQ ID NO: 5833334 - DNA, 25 bp, Homo sapien
gtattagaaactattcaaaaactag

SEQ ID NO: 5833335 - DNA, 25 bp, Homo sapien
agccatgtgtgtctgcaatgctgtc

SEQ ID NO: 5833336 - DNA, 25 bp, Homo sapien
ttgcagtctgtcccaggttccaggc

SEQ ID NO: 5833337 - DNA, 25 bp, Homo sapien
ccgtcataaatttttaaagtgctta

SEQ ID NO: 5833338 - DNA, 25 bp, Homo sapien
gtaagtctcatgagtcagcagtgct

SEQ ID NO: 5833339 - DNA, 25 bp, Homo sapien
ttaaagtgcttatgattcaattaat

SEQ ID NO: 5833340 - DNA, 25 bp, Homo sapien
gtagcctgaaaacaagctaactgta

SEQ ID NO: 5833341 - DNA, 25 bp, Homo sapien
aatacattacatttctctcaaacac

SEQ ID NO: 5833342 - DNA, 25 bp, Homo sapien
aagagtagctgttgagacagagagc

SEQ ID NO: 5833343 - DNA, 25 bp, Homo sapien
gtctcatgagtcagcagtgcttgga

SEQ ID NO: 5833344 - DNA, 25 bp, Homo sapien
agcgtgttctctgctgccctggaga

SEQ ID NO: 5833345 - DNA, 25 bp, Homo sapien
agatgagcaggttctttggaaagaa

SEQ ID NO: 5833346 - DNA, 25 bp, Homo sapien
catgcaatcttgtaatgtagcctga

SEQ ID NO: 5833347 - DNA, 25 bp, Homo sapien
ccctcaccctccttccttatccttc

SEQ ID NO: 5833348 - DNA, 25 bp, Homo sapien
cgtgttctctgctgccctggagatg

SEQ ID NO: 5833349 - DNA, 25 bp, Homo sapien
gtctgtggtgtccctgaaacatggt

SEQ ID NO: 5833350 - DNA, 25 bp, Homo sapien
gtcaccatggtcctgcactgtcgtg

SEQ ID NO: 5833351 - DNA, 25 bp, Homo sapien
agtctgtcccaggttccaggcaggt

SEQ ID NO: 5833352 - DNA, 25 bp, Homo sapien
gttggtgttaacattgttctgtttg

SEQ ID NO: 5833353 - DNA, 25 bp, Homo sapien
cagtacatgcctgagtacacacagc

SEQ ID NO: 5833354 - DNA, 25 bp, Homo sapien
cttttgtgtaaagtaatgcatgcaa

SEQ ID NO: 5833355 - DNA, 25 bp, Homo sapien
gtaaaggctctcagcctcctcagtt

SEQ ID NO: 5833356 - DNA, 25 bp, Homo sapien
acacagcagcttatagtatctgtcg

SEQ ID NO: 5833357 - DNA, 25 bp, Homo sapien
cacacttggcacttacactaaggtt

SEQ ID NO: 5833358 - DNA, 25 bp, Homo sapien
cttattctgagacattgtctgtggt

SEQ ID NO: 5833359 - DNA, 25 bp, Homo sapien
agtgtaaaaacagcaaacatggaag

SEQ ID NO: 5833360 - DNA, 25 bp, Homo sapien
agtgcagtacatgcctgagtacaca

SEQ ID NO: 5833361 - DNA, 25 bp, Homo sapien
tctttggaaagaactgctgagctcc

SEQ ID NO: 5833362 - DNA, 25 bp, Homo sapien
tgtggcactgtagcatccccgtcat

SEQ ID NO: 5833363 - DNA, 25 bp, Homo sapien
tagctcactccttattctgagacat

SEQ ID NO: 5833364 - DNA, 25 bp, Homo sapien
acaaagctaacaaatggaaatctga

SEQ ID NO: 5833365 - DNA, 25 bp, Homo sapien
acactaaggttaccatgtaagtctc

SEQ ID NO: 5833366 - DNA, 25 bp, Homo sapien
tggcactgtagcatccccgtcataa

SEQ ID NO: 5833367 - DNA, 25 bp, Homo sapien
gcactgtagcatccccgtcataaat

SEQ ID NO: 5833368 - DNA, 25 bp, Homo sapien
ttatagtatctgtcgggtacaaaga

SEQ ID NO: 5833369 - DNA, 25 bp, Homo sapien
ccctccttccttatccttccaccag

SEQ ID NO: 5833370 - DNA, 25 bp, Homo sapien
tgcttatgattcaattaatctacat

SEQ ID NO: 5833371 - DNA, 25 bp, Homo sapien
agctggctagtgctgaaaacaggac

SEQ ID NO: 5833372 - DNA, 25 bp, Homo sapien
ggtcctgcactgtcgtggctgctgc

SEQ ID NO: 5833373 - DNA, 25 bp, Homo sapien
acacacagcagcttatagtatctgt

SEQ ID NO: 5833374 - DNA, 25 bp, Homo sapien
tacattacatttctctcaaacacaa

SEQ ID NO: 5833375 - DNA, 25 bp, Homo sapien
gaactgctgagctcctcaaagcagt

SEQ ID NO: 5833376 - DNA, 25 bp, Homo sapien
ttctctcaaacacaaagaaacaaac

SEQ ID NO: 5833377 - DNA, 25 bp, Homo sapien
tccctgaaacatggtgtccatgctg

SEQ ID NO: 5833378 - DNA, 25 bp, Homo sapien
acagtgtcctgttaccagtgtaaaa

SEQ ID NO: 5833379 - DNA, 25 bp, Homo sapien
gccgtcaccttccacccgtgtctgt

SEQ ID NO: 5833380 - DNA, 25 bp, Homo sapien
acattgttctgtttgacttttgtgt

SEQ ID NO: 5833381 - DNA, 25 bp, Homo sapien
tgtgcatcacaaagctaacaaatgg

SEQ ID NO: 5833382 - DNA, 25 bp, Homo sapien
ttgtaaaggctctcagcctcctcag

SEQ ID NO: 5833383 - DNA, 25 bp, Homo sapien
agctgttgagacagagagctgtgct

SEQ ID NO: 5833384 - DNA, 25 bp, Homo sapien
gacatagtgcccagcgcagggcagc

SEQ ID NO: 5833385 - DNA, 25 bp, Homo sapien
tcccaggttccaggcaggtgacagc

SEQ ID NO: 5833386 - DNA, 25 bp, Homo sapien
tcaccttccacccgtgtctgtgtga

SEQ ID NO: 5833387 - DNA, 25 bp, Homo sapien
aggttccaggcaggtgacagccatg

SEQ ID NO: 5833388 - DNA, 25 bp, Homo sapien
caaaaaacttttccagcgtgttctc

SEQ ID NO: 5833389 - DNA, 25 bp, Homo sapien
tccacccgtgtctgtgtgagttgtg

SEQ ID NO: 5833390 - DNA, 25 bp, Homo sapien
cgcagggcagccaccctcaccctcc

SEQ ID NO: 5833391 - DNA, 25 bp, Homo sapien
ccagcgcagggcagccaccctcacc

SEQ ID NO: 5833392 - DNA, 25 bp, Homo sapien
agtgacctgtaggcagtggcaaata

SEQ ID NO: 5833393 - DNA, 25 bp, Homo sapien
cctgatgtgttggtgttaacattgt

SEQ ID NO: 5833394 - DNA, 25 bp, Homo sapien
cacagtcctgatgtgttggtgttaa

SEQ ID NO: 5833395 - DNA, 25 bp, Homo sapien
gtggtgtcttagtgacttagtatgt

SEQ ID NO: 5833396 - DNA, 25 bp, Homo sapien
aggcagtggcaaatacagacatgtg

SEQ ID NO: 5833397 - DNA, 25 bp, Homo sapien
tacattttggtaatcaattataaaa

SEQ ID NO: 5833398 - DNA, 25 bp, Homo sapien
tgtcttagtgacttagtatgtagct

SEQ ID NO: 5833399 - DNA, 25 bp, Homo sapien
gtgcttggaagtgcacagctggcta

SEQ ID NO: 5833400 - DNA, 25 bp, Homo sapien
gtggctgctgcaggatactctgaga

SEQ ID NO: 5833401 - DNA, 25 bp, Homo sapien
aggacatagtgcccagcgcagggca

SEQ ID NO: 5833402 - DNA, 25 bp, Homo sapien
aagtaatgcatgcaatcttgtaatg

SEQ ID NO: 5833403 - DNA, 25 bp, Homo sapien
taagctgctgtgtgtactcaggcat

SEQ ID NO: 5833404 - DNA, 25 bp, Homo sapien
aaggtgacggcatctccagggcagc

SEQ ID NO: 5833405 - DNA, 25 bp, Homo sapien
attcagatttccatttgttagcttt

SEQ ID NO: 5833406 - DNA, 25 bp, Homo sapien
gctacattacaagattgcatgcatt

SEQ ID NO: 5833407 - DNA, 25 bp, Homo sapien
gtaaccttagtgtaagtgccaagtg

SEQ ID NO: 5833408 - DNA, 25 bp, Homo sapien
tggtgacagcattgcagacacacat

SEQ ID NO: 5833409 - DNA, 25 bp, Homo sapien
tgctgtttttacactggtaacagga

SEQ ID NO: 5833410 - DNA, 25 bp, Homo sapien
catggctgtcacctgcctggaacct

SEQ ID NO: 5833411 - DNA, 25 bp, Homo sapien
ggcactatgtcctgttttcagcact

SEQ ID NO: 5833412 - DNA, 25 bp, Homo sapien
tctgtctcaacagctactcttcttt

SEQ ID NO: 5833413 - DNA, 25 bp, Homo sapien
ttaacaccaacacatcaggactgtg

SEQ ID NO: 5833414 - DNA, 25 bp, Homo sapien
actaagacaccacaactcacacaga

SEQ ID NO: 5833415 - DNA, 25 bp, Homo sapien
aacacatcaggactgtggtacattt

SEQ ID NO: 5833416 - DNA, 25 bp, Homo sapien
accacagacaatgtctcagaataag

SEQ ID NO: 5833417 - DNA, 25 bp, Homo sapien
caggaccatggtgacagcattgcag

SEQ ID NO: 5833418 - DNA, 25 bp, Homo sapien
ttgttttcaggctacattacaagat

SEQ ID NO: 5833419 - DNA, 25 bp, Homo sapien
cagacaatgtctcagaataaggagt

SEQ ID NO: 5833420 - DNA, 25 bp, Homo sapien
acagtgccacatgaggaactgagga

SEQ ID NO: 5833421 - DNA, 25 bp, Homo sapien
ttgttagctttgtgatgcacagtgt

SEQ ID NO: 5833422 - DNA, 25 bp, Homo sapien
gtgtgggactcctgtgagcagacag

SEQ ID NO: 5833423 - DNA, 25 bp, Homo sapien
actaagtcactaagacaccacaact

SEQ ID NO: 5833424 - DNA, 25 bp, Homo sapien
agcactgctgactcatgagacttac

SEQ ID NO: 5833425 - DNA, 25 bp, Homo sapien
ctgctgactcatgagacttacatgg

SEQ ID NO: 5833426 - DNA, 25 bp, Homo sapien
ccacatgaggaactgaggaggctga

SEQ ID NO: 5833427 - DNA, 25 bp, Homo sapien
tgtttcagggacaccacagacaatg

SEQ ID NO: 5833428 - DNA, 25 bp, Homo sapien
tatttgccactgcctacaggtcact

SEQ ID NO: 5833429 - DNA, 25 bp, Homo sapien
ggaacctgggacagactgcaattca

SEQ ID NO: 5833430 - DNA, 25 bp, Homo sapien
atggacaccatgtttcagggacacc

SEQ ID NO: 5833431 - DNA, 25 bp, Homo sapien
aactgaggaggctgagagcctttac

SEQ ID NO: 5833432 - DNA, 25 bp, Homo sapien
tgagctacatactaagtcactaaga

SEQ ID NO: 5833433 - DNA, 25 bp, Homo sapien
agggacaccacagacaatgtctcag

SEQ ID NO: 5833434 - DNA, 25 bp, Homo sapien
gactcctgtgagcagacagcatctt

SEQ ID NO: 5833435 - DNA, 25 bp, Homo sapien
ctcagcagttctttccaaagaacct

SEQ ID NO: 5833436 - DNA, 25 bp, Homo sapien
ctacagtgccacatgaggaactgag

SEQ ID NO: 5833437 - DNA, 25 bp, Homo sapien
cctttacaatctcagcactgctttg

SEQ ID NO: 5833438 - DNA, 25 bp, Homo sapien
cattacaagattgcatgcattactt

SEQ ID NO: 5833439 - DNA, 25 bp, Homo sapien
caatctcagcactgctttgaggagc

SEQ ID NO: 5833440 - DNA, 25 bp, Homo sapien
tgtctgtatttgccactgcctacag

SEQ ID NO: 5833441 - DNA, 25 bp, Homo sapien
ccatttgttagctttgtgatgcaca

SEQ ID NO: 5833442 - DNA, 25 bp, Homo sapien
ggaaggtgacggcatctccagggca

SEQ ID NO: 5833443 - DNA, 25 bp, Homo sapien
atgcattactttacacaaaagtcaa

SEQ ID NO: 5833444 - DNA, 25 bp, Homo sapien
cttccatgtttgctgtttttacact

SEQ ID NO: 5833445 - DNA, 25 bp, Homo sapien
ttataattgattaccaaaatgtaga

SEQ ID NO: 5833446 - DNA, 25 bp, Homo sapien
agatttccatttgttagctttgtga

SEQ ID NO: 5833447 - DNA, 25 bp, Homo sapien
agttctttccaaagaacctgctcat

SEQ ID NO: 5833448 - DNA, 25 bp, Homo sapien
agctgctgtgtgtactcaggcatgt

SEQ ID NO: 5833449 - DNA, 25 bp, Homo sapien
ccactgcctacaggtcactaaaaat

SEQ ID NO: 5833450 - DNA, 25 bp, Homo sapien
gagacttacatggtaaccttagtgt

SEQ ID NO: 5833451 - DNA, 25 bp, Homo sapien
gtattcaaggttcacatgtctgtat

SEQ ID NO: 5833452 - DNA, 25 bp, Homo sapien
tttctcttctggtggaaggataagg

SEQ ID NO: 5833453 - DNA, 25 bp, Homo sapien
cttccaagcactgctgactcatgag

SEQ ID NO: 5833454 - DNA, 25 bp, Homo sapien
tcaacagctactcttctttgtaccc

SEQ ID NO: 5833455 - DNA, 25 bp, Homo sapien
tgactcatgagacttacatggtaac

SEQ ID NO: 5833456 - DNA, 25 bp, Homo sapien
ctcagcactgctttgaggagctcag

SEQ ID NO: 5833457 - DNA, 25 bp, Homo sapien
attgaatcataagcactttaaaaat

SEQ ID NO: 5833458 - DNA, 25 bp, Homo sapien
ttgtgtttgagagaaatgtaatgta

SEQ ID NO: 5833459 - DNA, 25 bp, Homo sapien
agcacagctctctgtctcaacagct

SEQ ID NO: 5833460 - DNA, 25 bp, Homo sapien
actgcaattcagatttccatttgtt

SEQ ID NO: 5833461 - DNA, 25 bp, Homo sapien
cagccacgacagtgcaggaccatgg

SEQ ID NO: 5833462 - DNA, 25 bp, Homo sapien
tccaagcactgctgactcatgagac

SEQ ID NO: 5833463 - DNA, 25 bp, Homo sapien
acatactaagtcactaagacaccac

SEQ ID NO: 5833464 - DNA, 25 bp, Homo sapien
aacaccaacacatcaggactgtggt

SEQ ID NO: 5833465 - DNA, 25 bp, Homo sapien
ctcagaataaggagtgagctacata

SEQ ID NO: 5833466 - DNA, 25 bp, Homo sapien
gtttgtttctttgtgtttgagagaa

SEQ ID NO: 5833467 - DNA, 25 bp, Homo sapien
cctgggacagactgcaattcagatt

SEQ ID NO: 5833468 - DNA, 25 bp, Homo sapien
gtttctttgtgtttgagagaaatgt

SEQ ID NO: 5833469 - DNA, 25 bp, Homo sapien
caatgtctcagaataaggagtgagc

SEQ ID NO: 5833470 - DNA, 25 bp, Homo sapien
gcattgcagacacacatggctgtca

SEQ ID NO: 5833471 - DNA, 25 bp, Homo sapien
tacatggtaaccttagtgtaagtgc

SEQ ID NO: 5833472 - DNA, 25 bp, Homo sapien
ctcctgtgagcagacagcatcttcc

SEQ ID NO: 5833473 - DNA, 25 bp, Homo sapien
tcaaggttcacatgtctgtatttgc

SEQ ID NO: 5833474 - DNA, 25 bp, Homo sapien
tagccaatactaatttaaaaagtat

SEQ ID NO: 5833475 - DNA, 25 bp, Homo sapien
cagcactagccagctgtgcacttcc

SEQ ID NO: 5833476 - DNA, 25 bp, Homo sapien
tcagggacaccacagacaatgtctc

SEQ ID NO: 5833477 - DNA, 25 bp, Homo sapien
aacctgggacagactgcaattcaga

SEQ ID NO: 5833478 - DNA, 25 bp, Homo sapien
acagacacgggtggaaggtgacggc

SEQ ID NO: 5833479 - DNA, 25 bp, Homo sapien
cacatggctgtcacctgcctggaac

SEQ ID NO: 5833480 - DNA, 25 bp, Homo sapien
agggtggctgccctgcgctgggcac

SEQ ID NO: 5833481 - DNA, 25 bp, Homo sapien
ggtggctgccctgcgctgggcacta

SEQ ID NO: 5833482 - DNA, 25 bp, Homo sapien
catggtaaccttagtgtaagtgcca

SEQ ID NO: 5833483 - DNA, 25 bp, Homo sapien
ttttacactggtaacaggacactgt

SEQ ID NO: 5833484 - DNA, 25 bp, Homo sapien
tacagttagcttgttttcaggctac

SEQ ID NO: 5833485 - DNA, 25 bp, Homo sapien
ttgcatgcattactttacacaaaag

SEQ ID NO: 5833486 - DNA, 25 bp, Homo sapien
tcaggactgtggtacatttctcttc

SEQ ID NO: 5833487 - DNA, 25 bp, Homo sapien
gggtggaaggtgacggcatctccag

SEQ ID NO: 5833488 - DNA, 25 bp, Homo sapien
ctcatctcagagtatcctgcagcag

SEQ ID NO: 5833489 - DNA, 25 bp, Homo sapien
tacccgacagatactataagctgct

SEQ ID NO: 5833490 - DNA, 25 bp, Homo sapien
gtgtttgagagaaatgtaatgtatt

SEQ ID NO: 5833491 - DNA, 25 bp, Homo sapien
acctgcctggaacctgggacagact

SEQ ID NO: 5833492 - DNA, 25 bp, Homo sapien
aacagaacaatgttaacaccaacac

SEQ ID NO: 5833493 - DNA, 25 bp, Homo sapien
gcatgcattactttacacaaaagtc

SEQ ID NO: 5833494 - DNA, 25 bp, Homo sapien
ttctttgtgtttgagagaaatgtaa

SEQ ID NO: 5833495 - DNA, 25 bp, Homo sapien
cctgttttcagcactagccagctgt

SEQ ID NO: 5833496 - DNA, 25 bp, Homo sapien
gggcagcagagaacacgctggaaaa

SEQ ID NO: 5833497 - DNA, 25 bp, Homo sapien
gcgctgggcactatgtcctgttttc

SEQ ID NO: 5833498 - DNA, 25 bp, Homo sapien
ttatgacggggatgctacagtgcca

SEQ ID NO: 5833499 - DNA, 25 bp, Homo sapien
ggacagactgcaattcagatttcca

SEQ ID NO: 5833500 - DNA, 25 bp, Homo sapien
cagcatggacaccatgtttcaggga

SEQ ID NO: 5833501 - DNA, 25 bp, Homo sapien
ttgaggagctcagcagttctttcca

SEQ ID NO: 5833502 - DNA, 25 bp, Homo sapien
tggaaggataaggaaggagggtgag

SEQ ID NO: 5833503 - DNA, 25 bp, Homo sapien
gcagcagccacgacagtgcaggacc

SEQ ID NO: 5833504 - DNA, 25 bp, Homo sapien
gctttgtgatgcacagtgtgagagc

SEQ ID NO: 5833505 - DNA, 25 bp, Homo sapien
ggtggaaggataaggaaggagggtg

SEQ ID NO: 5833506 - DNA, 25 bp, Homo sapien
ttccatttgttagctttgtgatgca

SEQ ID NO: 5833507 - DNA, 25 bp, Homo sapien
cagcatcttcccagggtaaaaaaaa

SEQ ID NO: 5833508 - DNA, 25 bp, Homo sapien
cgacagtgcaggaccatggtgacag

SEQ ID NO: 5833509 - DNA, 25 bp, Homo sapien
accaaaatgtagattaattgaatca

SEQ ID NO: 5833510 - DNA, 25 bp, Homo sapien
gaggaggctgagagcctttacaatc

SEQ ID NO: 5833511 - DNA, 25 bp, Homo sapien
tgagggtggctgccctgcgctgggc

SEQ ID NO: 5833512 - DNA, 25 bp, Homo sapien
gccagctgtgcacttccaagcactg

SEQ ID NO: 5833513 - DNA, 25 bp, Homo sapien
tcctgcagcagccacgacagtgcag

SEQ ID NO: 5833514 - DNA, 25 bp, Homo sapien
tgtgagagcttccatgtttgctgtt

SEQ ID NO: 5833515 - DNA, 25 bp, Homo sapien
aaggaaggagggtgagggtggctgc

SEQ ID NO: 5833516 - DNA, 25 bp, Homo sapien
gacaatgtctcagaataaggagtga

SEQ ID NO: 5833517 - DNA, 25 bp, Homo sapien
gagaaatgtaatgtattcaaggttc

SEQ ID NO: 5833518 - DNA, 25 bp, Homo sapien
tttcaggctacattacaagattgca

SEQ ID NO: 5833519 - DNA, 25 bp, Homo sapien
gttagcttgttttcaggctacatta

SEQ ID NO: 5833520 - DNA, 25 bp, Homo sapien
ggaccatggtgacagcattgcagac

SEQ ID NO: 5833521 - DNA, 25 bp, Homo sapien
aaaagtcaaacagaacaatgttaac

SEQ ID NO: 5833522 - DNA, 25 bp, Homo sapien
tggtaaccttagtgtaagtgccaag

SEQ ID NO: 5833523 - DNA, 25 bp, Homo sapien
gaacaatgttaacaccaacacatca

SEQ ID NO: 5833524 - DNA, 25 bp, Homo sapien
tacatttctcttctggtggaaggat

SEQ ID NO: 5833525 - DNA, 25 bp, Homo sapien
cttacatggtaaccttagtgtaagt

SEQ ID NO: 5833526 - DNA, 25 bp, Homo sapien
cagcagttctttccaaagaacctgc

SEQ ID NO: 5833527 - DNA, 25 bp, Homo sapien
ctgcactccactgttacagcatgga

SEQ ID NO: 5833528 - DNA, 25 bp, Homo sapien
tttacaatctcagcactgctttgag

SEQ ID NO: 5833529 - DNA, 25 bp, Homo sapien
agtgtaagtgccaagtgtgggactc

SEQ ID NO: 5833530 - DNA, 25 bp, Homo sapien
tgtttgctgtttttacactggtaac

SEQ ID NO: 5833531 - DNA, 25 bp, Homo sapien
tgtaagtgccaagtgtgggactcct

SEQ ID NO: 5833532 - DNA, 25 bp, Homo sapien
tcacacagacacgggtggaaggtga

SEQ ID NO: 5833533 - DNA, 25 bp, Homo sapien
caaaatgtagattaattgaatcata

SEQ ID NO: 5833534 - DNA, 25 bp, Homo sapien
acaccacagacaatgtctcagaata

SEQ ID NO: 5833535 - DNA, 25 bp, Homo sapien
ctcaggcatgtactgcactccactg

SEQ ID NO: 5833536 - DNA, 25 bp, Homo sapien
cggggatgctacagtgccacatgag

SEQ ID NO: 5833537 - DNA, 25 bp, Homo sapien
taagtcactaagacaccacaactca

SEQ ID NO: 5833538 - DNA, 25 bp, Homo sapien
cagaataaggagtgagctacatact

SEQ ID NO: 5833539 - DNA, 25 bp, Homo sapien
acgggtggaaggtgacggcatctcc

SEQ ID NO: 5833540 - DNA, 25 bp, Homo sapien
gtctcagaataaggagtgagctaca

SEQ ID NO: 5833541 - DNA, 25 bp, Homo sapien
catctccagggcagcagagaacacg

SEQ ID NO: 5833542 - DNA, 25 bp, Homo sapien
atgacggggatgctacagtgccaca

SEQ ID NO: 5833543 - DNA, 25 bp, Homo sapien
ccttagtgtaagtgccaagtgtggg

SEQ ID NO: 5833544 - DNA, 25 bp, Homo sapien
cagagaacacgctggaaaagttttt

SEQ ID NO: 5833545 - DNA, 25 bp, Homo sapien
ctcttctttgtacccgacagatact

SEQ ID NO: 5833546 - DNA, 25 bp, Homo sapien
acacgggtggaaggtgacggcatct

SEQ ID NO: 5833547 - DNA, 25 bp, Homo sapien
aggactgtggtacatttctcttctg

SEQ ID NO: 5833548 - DNA, 25 bp, Homo sapien
tccatgtttgctgtttttacactgg

SEQ ID NO: 5833549 - DNA, 25 bp, Homo sapien
gctgccctgcgctgggcactatgtc

SEQ ID NO: 5833550 - DNA, 25 bp, Homo sapien
cagggcagcagagaacacgctggaa

SEQ ID NO: 5833551 - DNA, 25 bp, Homo sapien
ggaactgaggaggctgagagccttt

SEQ ID NO: 5833552 - DNA, 25 bp, Homo sapien
actgctttgaggagctcagcagttc

SEQ ID NO: 5833553 - DNA, 25 bp, Homo sapien
ataattgattaccaaaatgtagatt

SEQ ID NO: 5833554 - DNA, 25 bp, Homo sapien
ttttataattgattaccaaaatgta

SEQ ID NO: 5833555 - DNA, 25 bp, Homo sapien
gcactagccagctgtgcacttccaa

SEQ ID NO: 5833556 - DNA, 25 bp, Homo sapien
tgctttgaggagctcagcagttctt

SEQ ID NO: 5833557 - DNA, 25 bp, Homo sapien
tgagcagacagcatcttcccagggt

SEQ ID NO: 5833558 - DNA, 25 bp, Homo sapien
ctaatacagttagcttgttttcagg

SEQ ID NO: 5833559 - DNA, 25 bp, Homo sapien
gacacacatggctgtcacctgcctg

SEQ ID NO: 5833560 - DNA, 25 bp, Homo sapien
tgacggcatctccagggcagcagag

SEQ ID NO: 5833561 - DNA, 25 bp, Homo sapien
tgagagcttccatgtttgctgtttt

SEQ ID NO: 5833562 - DNA, 25 bp, Homo sapien
attactttacacaaaagtcaaacag

SEQ ID NO: 5833563 - DNA, 25 bp, Homo sapien
gtagattaattgaatcataagcact

SEQ ID NO: 5833564 - DNA, 25 bp, Homo sapien
tgtatttgccactgcctacaggtca

SEQ ID NO: 5833565 - DNA, 25 bp, Homo sapien
tgttaacaccaacacatcaggactg

SEQ ID NO: 5833566 - DNA, 25 bp, Homo sapien
ggaggctgagagcctttacaatctc

SEQ ID NO: 5833567 - DNA, 25 bp, Homo sapien
acagtgtgagagcttccatgtttgc

SEQ ID NO: 5833568 - DNA, 25 bp, Homo sapien
agtttttgaatagtttctaatacag

SEQ ID NO: 5833569 - DNA, 25 bp, Homo sapien
cagcattgcagacacacatggctgt

SEQ ID NO: 5833570 - DNA, 25 bp, Homo sapien
gcactccactgttacagcatggaca

SEQ ID NO: 5833571 - DNA, 25 bp, Homo sapien
taagcactttaaaaatttatgacgg

SEQ ID NO: 5833572 - DNA, 25 bp, Homo sapien
gtcaaacagaacaatgttaacacca

SEQ ID NO: 5833573 - DNA, 25 bp, Homo sapien
ctttgaggagctcagcagttctttc

SEQ ID NO: 5833574 - DNA, 25 bp, Homo sapien
actgcctacaggtcactaaaaatac

SEQ ID NO: 5833575 - DNA, 25 bp, Homo sapien
cacacatggctgtcacctgcctgga

SEQ ID NO: 5833576 - DNA, 25 bp, Homo sapien
atgtattcaaggttcacatgtctgt

SEQ ID NO: 5833577 - DNA, 25 bp, Homo sapien
tgcagacacacatggctgtcacctg

SEQ ID NO: 5833578 - DNA, 25 bp, Homo sapien
aagtcaaacagaacaatgttaacac

SEQ ID NO: 5833579 - DNA, 25 bp, Homo sapien
gcatggacaccatgtttcagggaca

SEQ ID NO: 5833580 - DNA, 25 bp, Homo sapien
tctttgtacccgacagatactataa

SEQ ID NO: 5833581 - DNA, 25 bp, Homo sapien
ctttccaaagaacctgctcatctca

SEQ ID NO: 5833582 - DNA, 25 bp, Homo sapien
gctgggcactatgtcctgttttcag

SEQ ID NO: 5833583 - DNA, 25 bp, Homo sapien
tagccagctgtgcacttccaagcac

SEQ ID NO: 5833584 - DNA, 25 bp, Homo sapien
agtcactaagacaccacaactcaca

SEQ ID NO: 5833585 - DNA, 25 bp, Homo sapien
aatagtttctaatacagttagcttg

SEQ ID NO: 5833586 - DNA, 25 bp, Homo sapien
caggcatgtactgcactccactgtt

SEQ ID NO: 5833587 - DNA, 25 bp, Homo sapien
tgagagcctttacaatctcagcact

SEQ ID NO: 5833588 - DNA, 25 bp, Homo sapien
tactcttctttgtacccgacagata

SEQ ID NO: 5833589 - DNA, 25 bp, Homo sapien
tgccactgcctacaggtcactaaaa

SEQ ID NO: 5833590 - DNA, 25 bp, Homo sapien
tctcttctggtggaaggataaggaa

SEQ ID NO: 5833591 - DNA, 25 bp, Homo sapien
gttttcaggctacattacaagattg

SEQ ID NO: 5833592 - DNA, 25 bp, Homo sapien
tgtgcacttccaagcactgctgact

SEQ ID NO: 5833593 - DNA, 25 bp, Homo sapien
ctgcagcagccacgacagtgcagga

SEQ ID NO: 5833594 - DNA, 25 bp, Homo sapien
tgtcacctgcctggaacctgggaca

SEQ ID NO: 5833595 - DNA, 25 bp, Homo sapien
tacaggtcactaaaaatacctagtt

SEQ ID NO: 5833596 - DNA, 25 bp, Homo sapien
gctgactcatgagacttacatggta

SEQ ID NO: 5833597 - DNA, 25 bp, Homo sapien
agatactataagctgctgtgtgtac

SEQ ID NO: 5833598 - DNA, 25 bp, Homo sapien
tgccaagtgtgggactcctgtgagc

SEQ ID NO: 5833599 - DNA, 25 bp, Homo sapien
aacagctactcttctttgtacccga

SEQ ID NO: 5833600 - DNA, 25 bp, Homo sapien
tctcagagtatcctgcagcagccac

SEQ ID NO: 5833601 - DNA, 25 bp, Homo sapien
cacttccaagcactgctgactcatg

SEQ ID NO: 5833602 - DNA, 25 bp, Homo sapien
acaccatgtttcagggacaccacag

SEQ ID NO: 5833603 - DNA, 25 bp, Homo sapien
gattaccaaaatgtagattaattga

SEQ ID NO: 5833604 - DNA, 25 bp, Homo sapien
atgaggaactgaggaggctgagagc

SEQ ID NO: 5833605 - DNA, 25 bp, Homo sapien
tctcaacagctactcttctttgtac

SEQ ID NO: 5833606 - DNA, 25 bp, Homo sapien
gagaacacgctggaaaagttttttg

SEQ ID NO: 5833607 - DNA, 25 bp, Homo sapien
tgctacagtgccacatgaggaactg

SEQ ID NO: 5833608 - DNA, 25 bp, Homo sapien
accacaactcacacagacacgggtg

SEQ ID NO: 5833609 - DNA, 25 bp, Homo sapien
cagctctctgtctcaacagctactc

SEQ ID NO: 5833610 - DNA, 25 bp, Homo sapien
ggaaggagggtgagggtggctgccc

SEQ ID NO: 5833611 - DNA, 25 bp, Homo sapien
gcctggaacctgggacagactgcaa

SEQ ID NO: 5833612 - DNA, 25 bp, Homo sapien
tgcacttccaagcactgctgactca

SEQ ID NO: 5833613 - DNA, 25 bp, Homo sapien
ccaaagaacctgctcatctcagagt

SEQ ID NO: 5833614 - DNA, 25 bp, Homo sapien
acacagacacgggtggaaggtgacg

SEQ ID NO: 5833615 - DNA, 25 bp, Homo sapien
tgtactcaggcatgtactgcactcc

SEQ ID NO: 5833616 - DNA, 25 bp, Homo sapien
ttgagagaaatgtaatgtattcaag

SEQ ID NO: 5833617 - DNA, 25 bp, Homo sapien
ataaggagtgagctacatactaagt

SEQ ID NO: 5833618 - DNA, 25 bp, Homo sapien
tcactaagacaccacaactcacaca

SEQ ID NO: 5833619 - DNA, 25 bp, Homo sapien
ggtgacggcatctccagggcagcag

SEQ ID NO: 5833620 - DNA, 25 bp, Homo sapien
aatgtaatgtattcaaggttcacat

SEQ ID NO: 5833621 - DNA, 25 bp, Homo sapien
ctttacacaaaagtcaaacagaaca

SEQ ID NO: 5833622 - DNA, 25 bp, Homo sapien
cactatgtcctgttttcagcactag

SEQ ID NO: 5833623 - DNA, 25 bp, Homo sapien
acaagattgcatgcattactttaca

SEQ ID NO: 5833624 - DNA, 25 bp, Homo sapien
agcagacagcatcttcccagggtaa

SEQ ID NO: 5833625 - DNA, 25 bp, Homo sapien
gaaatgtaatgtattcaaggttcac

SEQ ID NO: 5833626 - DNA, 25 bp, Homo sapien
cttctttgtacccgacagatactat

SEQ ID NO: 5833627 - DNA, 25 bp, Homo sapien
caccaacacatcaggactgtggtac

SEQ ID NO: 5833628 - DNA, 25 bp, Homo sapien
ggacaccatgtttcagggacaccac

SEQ ID NO: 5833629 - DNA, 25 bp, Homo sapien
ctggtggaaggataaggaaggaggg

SEQ ID NO: 5833630 - DNA, 25 bp, Homo sapien
acacaaaagtcaaacagaacaatgt

SEQ ID NO: 5833631 - DNA, 25 bp, Homo sapien
acaccacaactcacacagacacggg

SEQ ID NO: 5833632 - DNA, 25 bp, Homo sapien
attgcagacacacatggctgtcacc

SEQ ID NO: 5833633 - DNA, 25 bp, Homo sapien
gacagcattgcagacacacatggct

SEQ ID NO: 5833634 - DNA, 25 bp, Homo sapien
tgggacagactgcaattcagatttc

SEQ ID NO: 5833635 - DNA, 25 bp, Homo sapien
tttgctgtttttacactggtaacag

SEQ ID NO: 5833636 - DNA, 25 bp, Homo sapien
cagacagcatcttcccagggtaaaa

SEQ ID NO: 5833637 - DNA, 25 bp, Homo sapien
gcactttaaaaatttatgacgggga

SEQ ID NO: 5833638 - DNA, 25 bp, Homo sapien
agactgcaattcagatttccatttg

SEQ ID NO: 5833639 - DNA, 25 bp, Homo sapien
ataaggaaggagggtgagggtggct

SEQ ID NO: 5833640 - DNA, 25 bp, Homo sapien
gacttacatggtaaccttagtgtaa

SEQ ID NO: 5833641 - DNA, 25 bp, Homo sapien
aatcataagcactttaaaaatttat

SEQ ID NO: 5833642 - DNA, 25 bp, Homo sapien
gattgcatgcattactttacacaaa

SEQ ID NO: 5833643 - DNA, 25 bp, Homo sapien
tgtgtactcaggcatgtactgcact

SEQ ID NO: 5833644 - DNA, 25 bp, Homo sapien
acggcatctccagggcagcagagaa

SEQ ID NO: 5833645 - DNA, 25 bp, Homo sapien
tcatgagacttacatggtaacctta

SEQ ID NO: 5833646 - DNA, 25 bp, Homo sapien
cagcactgctttgaggagctcagca

SEQ ID NO: 5833647 - DNA, 25 bp, Homo sapien
cagctactcttctttgtacccgaca

SEQ ID NO: 5833648 - DNA, 25 bp, Homo sapien
agtgtgagagcttccatgtttgctg

SEQ ID NO: 5833649 - DNA, 25 bp, Homo sapien
cacgacagtgcaggaccatggtgac

SEQ ID NO: 5833650 - DNA, 25 bp, Homo sapien
cgacagatactataagctgctgtgt

SEQ ID NO: 5833651 - DNA, 25 bp, Homo sapien
gctgagagcctttacaatctcagca

SEQ ID NO: 5833652 - DNA, 25 bp, Homo sapien
tgcaggaccatggtgacagcattgc

SEQ ID NO: 5833653 - DNA, 25 bp, Homo sapien
agagtatcctgcagcagccacgaca

SEQ ID NO: 5833654 - DNA, 25 bp, Homo sapien
catgtttgctgtttttacactggta

SEQ ID NO: 5833655 - DNA, 25 bp, Homo sapien
aatgttaacaccaacacatcaggac

SEQ ID NO: 5833656 - DNA, 25 bp, Homo sapien
gctgtgtgtactcaggcatgtactg

SEQ ID NO: 5833657 - DNA, 25 bp, Homo sapien
tgggcactatgtcctgttttcagca

SEQ ID NO: 5833658 - DNA, 25 bp, Homo sapien
aagtgtgggactcctgtgagcagac

SEQ ID NO: 5833659 - DNA, 25 bp, Homo sapien
tataagctgctgtgtgtactcaggc

SEQ ID NO: 5833660 - DNA, 25 bp, Homo sapien
ctatgtcctgttttcagcactagcc

SEQ ID NO: 5833661 - DNA, 25 bp, Homo sapien
tagcttgttttcaggctacattaca

SEQ ID NO: 5833662 - DNA, 25 bp, Homo sapien
taattgaatcataagcactttaaaa

SEQ ID NO: 5833663 - DNA, 25 bp, Homo sapien
ttttcagcactagccagctgtgcac

SEQ ID NO: 5833664 - DNA, 25 bp, Homo sapien
taagacaccacaactcacacagaca

SEQ ID NO: 5833665 - DNA, 25 bp, Homo sapien
ctagtttttgaatagtttctaatac

SEQ ID NO: 5833666 - DNA, 25 bp, Homo sapien
gtggtacatttctcttctggtggaa

SEQ ID NO: 5833667 - DNA, 25 bp, Homo sapien
agtgccacatgaggaactgaggagg

SEQ ID NO: 5833668 - DNA, 25 bp, Homo sapien
cagaacaatgttaacaccaacacat

SEQ ID NO: 5833669 - DNA, 25 bp, Homo sapien
tggctgtcacctgcctggaacctgg

SEQ ID NO: 5833670 - DNA, 25 bp, Homo sapien
tcacctgcctggaacctgggacaga

SEQ ID NO: 5833671 - DNA, 25 bp, Homo sapien
cccgacagatactataagctgctgt

SEQ ID NO: 5833672 - DNA, 25 bp, Homo sapien
tgtgatgcacagtgtgagagcttcc

SEQ ID NO: 5833673 - DNA, 25 bp, Homo sapien
agtgccaagtgtgggactcctgtga

SEQ ID NO: 5833674 - DNA, 25 bp, Homo sapien
ggagtgagctacatactaagtcact

SEQ ID NO: 5833675 - DNA, 25 bp, Homo sapien
tccagggcagcagagaacacgctgg

SEQ ID NO: 5833676 - DNA, 25 bp, Homo sapien
tgtactgcactccactgttacagca

SEQ ID NO: 5833677 - DNA, 25 bp, Homo sapien
atttccatttgttagctttgtgatg

SEQ ID NO: 5833678 - DNA, 25 bp, Homo sapien
acagtgcaggaccatggtgacagca

SEQ ID NO: 5833679 - DNA, 25 bp, Homo sapien
tacaatctcagcactgctttgagga

SEQ ID NO: 5833680 - DNA, 25 bp, Homo sapien
aggctgagagcctttacaatctcag

SEQ ID NO: 5833681 - DNA, 25 bp, Homo sapien
gttacagcatggacaccatgtttca

SEQ ID NO: 5833682 - DNA, 25 bp, Homo sapien
ttacacaaaagtcaaacagaacaat

SEQ ID NO: 5833683 - DNA, 25 bp, Homo sapien
atactaagtcactaagacaccacaa

SEQ ID NO: 5833684 - DNA, 25 bp, Homo sapien
aattgattaccaaaatgtagattaa

SEQ ID NO: 5833685 - DNA, 25 bp, Homo sapien
actataagctgctgtgtgtactcag

SEQ ID NO: 5833686 - DNA, 25 bp, Homo sapien
tatcctgcagcagccacgacagtgc

SEQ ID NO: 5833687 - DNA, 25 bp, Homo sapien
ccaagtgtgggactcctgtgagcag

SEQ ID NO: 5833688 - DNA, 25 bp, Homo sapien
gaggaactgaggaggctgagagcct

SEQ ID NO: 5833689 - DNA, 25 bp, Homo sapien
tctgtatttgccactgcctacaggt

SEQ ID NO: 5833690 - DNA, 25 bp, Homo sapien
ctgaggaggctgagagcctttacaa

SEQ ID NO: 5833691 - DNA, 25 bp, Homo sapien
cctgtgagcagacagcatcttccca

SEQ ID NO: 5833692 - DNA, 25 bp, Homo sapien
gggatgctacagtgccacatgagga

SEQ ID NO: 5833693 - DNA, 25 bp, Homo sapien
catgtctgtatttgccactgcctac

SEQ ID NO: 5833694 - DNA, 25 bp, Homo sapien
gtggaaggtgacggcatctccaggg

SEQ ID NO: 5833695 - DNA, 25 bp, Homo sapien
tctccagggcagcagagaacacgct

SEQ ID NO: 5833696 - DNA, 25 bp, Homo sapien
atactataagctgctgtgtgtactc

SEQ ID NO: 5833697 - DNA, 25 bp, Homo sapien
ggtgagggtggctgccctgcgctgg

SEQ ID NO: 5833698 - DNA, 25 bp, Homo sapien
accatggtgacagcattgcagacac

SEQ ID NO: 5833699 - DNA, 25 bp, Homo sapien
gagagaaatgtaatgtattcaaggt

SEQ ID NO: 5833700 - DNA, 25 bp, Homo sapien
caactcacacagacacgggtggaag

SEQ ID NO: 5833701 - DNA, 25 bp, Homo sapien
ggcatgtactgcactccactgttac

SEQ ID NO: 5833702 - DNA, 25 bp, Homo sapien
atttatgacggggatgctacagtgc

SEQ ID NO: 5833703 - DNA, 25 bp, Homo sapien
acagatactataagctgctgtgtgt

SEQ ID NO: 5833704 - DNA, 25 bp, Homo sapien
atttgttagctttgtgatgcacagt

SEQ ID NO: 5833705 - DNA, 25 bp, Homo sapien
tgtgagcagacagcatcttcccagg

SEQ ID NO: 5833706 - DNA, 25 bp, Homo sapien
cagttagcttgttttcaggctacat

SEQ ID NO: 5833707 - DNA, 25 bp, Homo sapien
gcttgttttcaggctacattacaag

SEQ ID NO: 5833708 - DNA, 25 bp, Homo sapien
ggacaccacagacaatgtctcagaa

SEQ ID NO: 5833709 - DNA, 25 bp, Homo sapien
tgtacccgacagatactataagctg

SEQ ID NO: 5833710 - DNA, 25 bp, Homo sapien
gcattactttacacaaaagtcaaac

SEQ ID NO: 5833711 - DNA, 25 bp, Homo sapien
agtgcaggaccatggtgacagcatt

SEQ ID NO: 5833712 - DNA, 25 bp, Homo sapien
agggtgagggtggctgccctgcgct

SEQ ID NO: 5833713 - DNA, 25 bp, Homo sapien
tgtaatgtattcaaggttcacatgt

SEQ ID NO: 5833714 - DNA, 25 bp, Homo sapien
actagccagctgtgcacttccaagc

SEQ ID NO: 5833715 - DNA, 25 bp, Homo sapien
ctgcctggaacctgggacagactgc

SEQ ID NO: 5833716 - DNA, 25 bp, Homo sapien
gcacagtgtgagagcttccatgttt

SEQ ID NO: 5833717 - DNA, 25 bp, Homo sapien
agagcctttacaatctcagcactgc

SEQ ID NO: 5833718 - DNA, 25 bp, Homo sapien
ctgcgctgggcactatgtcctgttt

SEQ ID NO: 5833719 - DNA, 25 bp, Homo sapien
aaggttcacatgtctgtatttgcca

SEQ ID NO: 5833720 - DNA, 25 bp, Homo sapien
tggctgccctgcgctgggcactatg

SEQ ID NO: 5833721 - DNA, 25 bp, Homo sapien
tgctcatctcagagtatcctgcagc

SEQ ID NO: 5833722 - DNA, 25 bp, Homo sapien
tgtctcaacagctactcttctttgt

SEQ ID NO: 5833723 - DNA, 25 bp, Homo sapien
gttagctttgtgatgcacagtgtga

SEQ ID NO: 5833724 - DNA, 25 bp, Homo sapien
cctgctcatctcagagtatcctgca

SEQ ID NO: 5833725 - DNA, 25 bp, Homo sapien
ctgttacagcatggacaccatgttt

SEQ ID NO: 5833726 - DNA, 25 bp, Homo sapien
gtgggactcctgtgagcagacagca

SEQ ID NO: 5833727 - DNA, 25 bp, Homo sapien
atgtctcagaataaggagtgagcta

SEQ ID NO: 5833728 - DNA, 25 bp, Homo sapien
aatacagttagcttgttttcaggct

SEQ ID NO: 5833729 - DNA, 25 bp, Homo sapien
tgttttcagcactagccagctgtgc

SEQ ID NO: 5833730 - DNA, 25 bp, Homo sapien
ctacatactaagtcactaagacacc

SEQ ID NO: 5833731 - DNA, 25 bp, Homo sapien
agagcttccatgtttgctgttttta

SEQ ID NO: 5833732 - DNA, 25 bp, Homo sapien
acatgaggaactgaggaggctgaga

SEQ ID NO: 5833733 - DNA, 25 bp, Homo sapien
tcagatttccatttgttagctttgt

SEQ ID NO: 5833734 - DNA, 25 bp, Homo sapien
agattaattgaatcataagcacttt

SEQ ID NO: 5833735 - DNA, 25 bp, Homo sapien
aaagaacctgctcatctcagagtat

SEQ ID NO: 5833736 - DNA, 25 bp, Homo sapien
atgtagattaattgaatcataagca

SEQ ID NO: 5833737 - DNA, 25 bp, Homo sapien
tcactaaaaatacctagtttttgaa

SEQ ID NO: 5833738 - DNA, 25 bp, Homo sapien
agctcagcagttctttccaaagaac

SEQ ID NO: 5833739 - DNA, 25 bp, Homo sapien
gctactcttctttgtacccgacaga

SEQ ID NO: 5833740 - DNA, 25 bp, Homo sapien
gacggggatgctacagtgccacatg

SEQ ID NO: 5833741 - DNA, 25 bp, Homo sapien
attcaaggttcacatgtctgtattt

SEQ ID NO: 5833742 - DNA, 25 bp, Homo sapien
agcctttacaatctcagcactgctt

SEQ ID NO: 5833743 - DNA, 25 bp, Homo sapien
atgtcctgttttcagcactagccag

SEQ ID NO: 5833744 - DNA, 25 bp, Homo sapien
gaataaggagtgagctacatactaa

SEQ ID NO: 5833745 - DNA, 25 bp, Homo sapien
agacacgggtggaaggtgacggcat

SEQ ID NO: 5833746 - DNA, 25 bp, Homo sapien
aaatgtagattaattgaatcataag

SEQ ID NO: 5833747 - DNA, 25 bp, Homo sapien
agcttccatgtttgctgtttttaca

SEQ ID NO: 5833748 - DNA, 25 bp, Homo sapien
tactcaggcatgtactgcactccac

SEQ ID NO: 5833749 - DNA, 25 bp, Homo sapien
tgcaattcagatttccatttgttag

SEQ ID NO: 5833750 - DNA, 25 bp, Homo sapien
aggctacattacaagattgcatgca

SEQ ID NO: 5833751 - DNA, 25 bp, Homo sapien
tcttctggtggaaggataaggaagg

SEQ ID NO: 5833752 - DNA, 25 bp, Homo sapien
tttttgaatagtttctaatacagtt

SEQ ID NO: 5833753 - DNA, 25 bp, Homo sapien
gcactgctttgaggagctcagcagt

SEQ ID NO: 5833754 - DNA, 25 bp, Homo sapien
cacaactcacacagacacgggtgga

SEQ ID NO: 5833755 - DNA, 25 bp, Homo sapien
tgcctacaggtcactaaaaatacct

SEQ ID NO: 5833756 - DNA, 25 bp, Homo sapien
tgaatcataagcactttaaaaattt

SEQ ID NO: 5833757 - DNA, 25 bp, Homo sapien
agacaccacaactcacacagacacg

SEQ ID NO: 5833758 - DNA, 25 bp, Homo sapien
tctctgtctcaacagctactcttct

SEQ ID NO: 5833759 - DNA, 25 bp, Homo sapien
caagcactgctgactcatgagactt

SEQ ID NO: 5833760 - DNA, 25 bp, Homo sapien
catgtactgcactccactgttacag

SEQ ID NO: 5833761 - DNA, 25 bp, Homo sapien
atgcacagtgtgagagcttccatgt

SEQ ID NO: 5833762 - DNA, 25 bp, Homo sapien
gaggagctcagcagttctttccaaa

SEQ ID NO: 5833763 - DNA, 25 bp, Homo sapien
tccactgttacagcatggacaccat

SEQ ID NO: 5833764 - DNA, 25 bp, Homo sapien
tcaggctacattacaagattgcatg

SEQ ID NO: 5833765 - DNA, 25 bp, Homo sapien
aaaaatttatgacggggatgctaca

SEQ ID NO: 5833766 - DNA, 25 bp, Homo sapien
ttctggtggaaggataaggaaggag

SEQ ID NO: 5833767 - DNA, 25 bp, Homo sapien
tgccacatgaggaactgaggaggct

SEQ ID NO: 5833768 - DNA, 25 bp, Homo sapien
actccactgttacagcatggacacc

SEQ ID NO: 5833769 - DNA, 25 bp, Homo sapien
cactgttacagcatggacaccatgt

SEQ ID NO: 5833770 - DNA, 25 bp, Homo sapien
tagctttgtgatgcacagtgtgaga

SEQ ID NO: 5833771 - DNA, 25 bp, Homo sapien
ggcatctccagggcagcagagaaca

SEQ ID NO: 5833772 - DNA, 25 bp, Homo sapien
catcaggactgtggtacatttctct

SEQ ID NO: 5833773 - DNA, 25 bp, Homo sapien
gactgtggtacatttctcttctggt

SEQ ID NO: 5833774 - DNA, 25 bp, Homo sapien
acaaaagtcaaacagaacaatgtta

SEQ ID NO: 5833775 - DNA, 25 bp, Homo sapien
catggtgacagcattgcagacacac

SEQ ID NO: 5833776 - DNA, 25 bp, Homo sapien
ggtacatttctcttctggtggaagg

SEQ ID NO: 5833777 - DNA, 25 bp, Homo sapien
ttccaaagaacctgctcatctcaga

SEQ ID NO: 5833778 - DNA, 25 bp, Homo sapien
agaacctgctcatctcagagtatcc

SEQ ID NO: 5833779 - DNA, 25 bp, Homo sapien
gctgtcacctgcctggaacctggga

SEQ ID NO: 5833780 - DNA, 25 bp, Homo sapien
ttctttccaaagaacctgctcatct

SEQ ID NO: 5833781 - DNA, 25 bp, Homo sapien
cctacaggtcactaaaaatacctag

SEQ ID NO: 5833782 - DNA, 25 bp, Homo sapien
gtgacagcattgcagacacacatgg

SEQ ID NO: 5833783 - DNA, 25 bp, Homo sapien
ccctgcgctgggcactatgtcctgt

SEQ ID NO: 5833784 - DNA, 25 bp, Homo sapien
gacagcatcttcccagggtaaaaaa

SEQ ID NO: 5833785 - DNA, 25 bp, Homo sapien
ccaacacatcaggactgtggtacat

SEQ ID NO: 5833786 - DNA, 25 bp, Homo sapien
acagactgcaattcagatttccatt

SEQ ID NO: 5833787 - DNA, 25 bp, Homo sapien
catctcagagtatcctgcagcagcc

SEQ ID NO: 5833788 - DNA, 25 bp, Homo sapien
ttaccaaaatgtagattaattgaat

SEQ ID NO: 5833789 - DNA, 25 bp, Homo sapien
cagacacacatggctgtcacctgcc

SEQ ID NO: 5833790 - DNA, 25 bp, Homo sapien
aaggagggtgagggtggctgccctg

SEQ ID NO: 5833791 - DNA, 25 bp, Homo sapien
agcagccacgacagtgcaggaccat

SEQ ID NO: 5833792 - DNA, 25 bp, Homo sapien
ttcagcactagccagctgtgcactt

SEQ ID NO: 5833793 - DNA, 25 bp, Homo sapien
ggttcacatgtctgtatttgccact

SEQ ID NO: 5833794 - DNA, 25 bp, Homo sapien
ctgtggtacatttctcttctggtgg

SEQ ID NO: 5833795 - DNA, 25 bp, Homo sapien
gaaggataaggaaggagggtgaggg

SEQ ID NO: 5833796 - DNA, 25 bp, Homo sapien
agctacatactaagtcactaagaca

SEQ ID NO: 5833797 - DNA, 25 bp, Homo sapien
cacatgtctgtatttgccactgcct

SEQ ID NO: 5833798 - DNA, 25 bp, Homo sapien
cacagctctctgtctcaacagctac

SEQ ID NO: 5833799 - DNA, 25 bp, Homo sapien
aaggagtgagctacatactaagtca

SEQ ID NO: 5833800 - DNA, 25 bp, Homo sapien
aaatttatgacggggatgctacagt

SEQ ID NO: 5833801 - DNA, 25 bp, Homo sapien
atctcagcactgctttgaggagctc

SEQ ID NO: 5833802 - DNA, 25 bp, Homo sapien
tgtgtgtactcaggcatgtactgca

SEQ ID NO: 5833803 - DNA, 25 bp, Homo sapien
actcatgagacttacatggtaacct

SEQ ID NO: 5833804 - DNA, 25 bp, Homo sapien
caattcagatttccatttgttagct

SEQ ID NO: 5833805 - DNA, 25 bp, Homo sapien
tgaatagtttctaatacagttagct

SEQ ID NO: 5833806 - DNA, 25 bp, Homo sapien
taagtgccaagtgtgggactcctgt

SEQ ID NO: 5833807 - DNA, 25 bp, Homo sapien
catgtttcagggacaccacagacaa

SEQ ID NO: 5833808 - DNA, 25 bp, Homo sapien
tttgtgatgcacagtgtgagagctt

SEQ ID NO: 5833809 - DNA, 25 bp, Homo sapien
ttctaatacagttagcttgttttca

SEQ ID NO: 5833810 - DNA, 25 bp, Homo sapien
aaccttagtgtaagtgccaagtgtg

SEQ ID NO: 5833811 - DNA, 25 bp, Homo sapien
tactgcactccactgttacagcatg

SEQ ID NO: 5833812 - DNA, 25 bp, Homo sapien
tagtttctaatacagttagcttgtt

SEQ ID NO: 5833813 - DNA, 25 bp, Homo sapien
ttaaaaatttatgacggggatgcta

SEQ ID NO: 5833814 - DNA, 25 bp, Homo sapien
agtgagctacatactaagtcactaa

SEQ ID NO: 5833815 - DNA, 25 bp, Homo sapien
tttgccactgcctacaggtcactaa

SEQ ID NO: 5833816 - DNA, 25 bp, Homo sapien
ggataaggaaggagggtgagggtgg

SEQ ID NO: 5833817 - DNA, 25 bp, Homo sapien
cacagacaatgtctcagaataagga

SEQ ID NO: 5833818 - DNA, 25 bp, Homo sapien
ctttgtgtttgagagaaatgtaatg

SEQ ID NO: 5833819 - DNA, 25 bp, Homo sapien
ctgctgtgtgtactcaggcatgtac

SEQ ID NO: 5833820 - DNA, 25 bp, Homo sapien
tcagagtatcctgcagcagccacga

SEQ ID NO: 5833821 - DNA, 25 bp, Homo sapien
gtttgagagaaatgtaatgtattca

SEQ ID NO: 5833822 - DNA, 25 bp, Homo sapien
gctgtgcacttccaagcactgctga

SEQ ID NO: 5833823 - DNA, 25 bp, Homo sapien
tttgaatagtttctaatacagttag

SEQ ID NO: 5833824 - DNA, 25 bp, Homo sapien
tgatgcacagtgtgagagcttccat

SEQ ID NO: 5833825 - DNA, 25 bp, Homo sapien
gcagttctttccaaagaacctgctc

SEQ ID NO: 5833826 - DNA, 25 bp, Homo sapien
tttcagggacaccacagacaatgtc

SEQ ID NO: 5833827 - DNA, 25 bp, Homo sapien
actcacacagacacgggtggaaggt

SEQ ID NO: 5833828 - DNA, 25 bp, Homo sapien
acaatgttaacaccaacacatcagg

SEQ ID NO: 5833829 - DNA, 25 bp, Homo sapien
agtatcctgcagcagccacgacagt

SEQ ID NO: 5833830 - DNA, 25 bp, Homo sapien
gatgctacagtgccacatgaggaac

SEQ ID NO: 5833831 - DNA, 25 bp, Homo sapien
gtcctgttttcagcactagccagct

SEQ ID NO: 5833832 - DNA, 25 bp, Homo sapien
tactttacacaaaagtcaaacagaa

SEQ ID NO: 5833833 - DNA, 25 bp, Homo sapien
ttacaagattgcatgcattacttta

SEQ ID NO: 5833834 - DNA, 25 bp, Homo sapien
ctggaacctgggacagactgcaatt

SEQ ID NO: 5833835 - DNA, 25 bp, Homo sapien
tacattacaagattgcatgcattac

SEQ ID NO: 5833836 - DNA, 25 bp, Homo sapien
gaagcacagctctctgtctcaacag

SEQ ID NO: 5833837 - DNA, 25 bp, Homo sapien
ggagggtgagggtggctgccctgcg

SEQ ID NO: 5833838 - DNA, 25 bp, Homo sapien
cataagcactttaaaaatttatgac

SEQ ID NO: 5833839 - DNA, 25 bp, Homo sapien
ctgtttttacactggtaacaggaca

SEQ ID NO: 5833840 - DNA, 25 bp, Homo sapien
cactgctgactcatgagacttacat

SEQ ID NO: 5833841 - DNA, 25 bp, Homo sapien
taatgtattcaaggttcacatgtct

SEQ ID NO: 5833842 - DNA, 25 bp, Homo sapien
gtttctaatacagttagcttgtttt

SEQ ID NO: 5833843 - DNA, 25 bp, Homo sapien
ctttaaaaatttatgacggggatgc

SEQ ID NO: 5833844 - DNA, 25 bp, Homo sapien
accatgtttcagggacaccacagac

SEQ ID NO: 5833845 - DNA, 25 bp, Homo sapien
gcagcagagaacacgctggaaaagt

SEQ ID NO: 5833846 - DNA, 25 bp, Homo sapien
agcagagaacacgctggaaaagttt

SEQ ID NO: 5833847 - DNA, 25 bp, Homo sapien
cacatcaggactgtggtacatttct

SEQ ID NO: 5833848 - DNA, 25 bp, Homo sapien
catttctcttctggtggaaggataa

SEQ ID NO: 5833849 - DNA, 25 bp, Homo sapien
caaacagaacaatgttaacaccaac

SEQ ID NO: 5833850 - DNA, 25 bp, Homo sapien
tacagcatggacaccatgtttcagg

SEQ ID NO: 5833851 - DNA, 25 bp, Homo sapien
aagattgcatgcattactttacaca

SEQ ID NO: 5833852 - DNA, 25 bp, Homo sapien
ttgtttctttgtgtttgagagaaat

SEQ ID NO: 5833853 - DNA, 25 bp, Homo sapien
gctctctgtctcaacagctactctt

SEQ ID NO: 5833854 - DNA, 25 bp, Homo sapien
ttcacatgtctgtatttgccactgc

SEQ ID NO: 5833855 - DNA, 25 bp, Homo sapien
ggagctcagcagttctttccaaaga

SEQ ID NO: 5833856 - DNA, 25 bp, Homo sapien
atgagacttacatggtaaccttagt

SEQ ID NO: 5833857 - DNA, 25 bp, Homo sapien
ttgattaccaaaatgtagattaatt

SEQ ID NO: 5833858 - DNA, 25 bp, Homo sapien
gggactcctgtgagcagacagcatc

SEQ ID NO: 5833859 - DNA, 25 bp, Homo sapien
aacctgctcatctcagagtatcctg

SEQ ID NO: 5833860 - DNA, 25 bp, Homo sapien
ttagtgtaagtgccaagtgtgggac

SEQ ID NO: 5833861 - DNA, 25 bp, Homo sapien
attaattgaatcataagcactttaa

SEQ ID NO: 5833862 - DNA, 25 bp, Homo sapien
gccacgacagtgcaggaccatggtg

SEQ ID NO: 5833863 - DNA, 25 bp, Homo sapien
tttgtacccgacagatactataagc

SEQ ID NO: 5833864 - DNA, 25 bp, Homo sapien
cagctgtgcacttccaagcactgct

SEQ ID NO: 5833865 - DNA, 25 bp, Homo sapien
gtttttacactggtaacaggacact

SEQ ID NO: 5833866 - DNA, 25 bp, Homo sapien
tacctagtttttgaatagtttctaa

SEQ ID NO: 5833867 - DNA, 25 bp, Homo sapien
tgccctgcgctgggcactatgtcct

SEQ ID NO: 5833868 - DNA, 25 bp, Homo sapien
gaggatgatgacatcttcaaccgga

SEQ ID NO: 5833869 - DNA, 25 bp, Homo sapien
ccacagctccagtcattccgccctg

SEQ ID NO: 5833870 - DNA, 25 bp, Homo sapien
tggtgaccagccccgccactttgcc

SEQ ID NO: 5833871 - DNA, 25 bp, Homo sapien
ggagaccttcaaccgagccaagctg

SEQ ID NO: 5833872 - DNA, 25 bp, Homo sapien
gccgctagctccgggctgcctgaag

SEQ ID NO: 5833873 - DNA, 25 bp, Homo sapien
tctaccctgcagccagcagcagtac

SEQ ID NO: 5833874 - DNA, 25 bp, Homo sapien
acggtggcagtcatcatccccttta

SEQ ID NO: 5833875 - DNA, 25 bp, Homo sapien
ccacccgactgcaccccagcccaaa

SEQ ID NO: 5833876 - DNA, 25 bp, Homo sapien
agctccagtcattccgccctgtcct

SEQ ID NO: 5833877 - DNA, 25 bp, Homo sapien
gcagccagcagcagtaccaactgct

SEQ ID NO: 5833878 - DNA, 25 bp, Homo sapien
ggaacgggtgcagagggaaaatcca

SEQ ID NO: 5833879 - DNA, 25 bp, Homo sapien
gagcaaggcccagtttctgaggatc

SEQ ID NO: 5833880 - DNA, 25 bp, Homo sapien
gtccctatggatgaccgcaatctgt

SEQ ID NO: 5833881 - DNA, 25 bp, Homo sapien
ttggctccactatctgcaccccatg

SEQ ID NO: 5833882 - DNA, 25 bp, Homo sapien
gcaaccgctcttcaccaacatcaca

SEQ ID NO: 5833883 - DNA, 25 bp, Homo sapien
ctttgccatcgccatggacaagttt

SEQ ID NO: 5833884 - DNA, 25 bp, Homo sapien
tttggaggtgtgtcgggcctgagca

SEQ ID NO: 5833885 - DNA, 25 bp, Homo sapien
aagtgggacggcattggatccgtgc

SEQ ID NO: 5833886 - DNA, 25 bp, Homo sapien
gcaccccagcccaaacggtggcagt

SEQ ID NO: 5833887 - DNA, 25 bp, Homo sapien
tcgggcctgagcaaggcccagtttc

SEQ ID NO: 5833888 - DNA, 25 bp, Homo sapien
taccaactgctctcggcccaacgcc

SEQ ID NO: 5833889 - DNA, 25 bp, Homo sapien
ccatgcctctggaacgggtgcagag

SEQ ID NO: 5833890 - DNA, 25 bp, Homo sapien
cagcccatgccctctaccctgcagc

SEQ ID NO: 5833891 - DNA, 25 bp, Homo sapien
ccagtcattccgccctgtcctgacg

SEQ ID NO: 5833892 - DNA, 25 bp, Homo sapien
gccctctaccctgcagccagcagca

SEQ ID NO: 5833893 - DNA, 25 bp, Homo sapien
cctgaagtgcccagtgccaggcctg

SEQ ID NO: 5833894 - DNA, 25 bp, Homo sapien
gtgaccagccccgccactttgccat

SEQ ID NO: 5833895 - DNA, 25 bp, Homo sapien
gtgtctatgtcatcaaccagcatgg

SEQ ID NO: 5833896 - DNA, 25 bp, Homo sapien
ctgcagccagcagcagtaccaactg

SEQ ID NO: 5833897 - DNA, 25 bp, Homo sapien
cccagcccatgccctctaccctgca

SEQ ID NO: 5833898 - DNA, 25 bp, Homo sapien
ttcatcttcagtgatgtggacctgg

SEQ ID NO: 5833899 - DNA, 25 bp, Homo sapien
ctgcctatgactgcttcatcttcag

SEQ ID NO: 5833900 - DNA, 25 bp, Homo sapien
aagtgcccagtgccaggcctggtcc

SEQ ID NO: 5833901 - DNA, 25 bp, Homo sapien
gtcttgtgggccgagtggtcatcga

SEQ ID NO: 5833902 - DNA, 25 bp, Homo sapien
taagattcaaaacacaaagatgagc

SEQ ID NO: 5833903 - DNA, 25 bp, Homo sapien
caacgccactgccgctagctccggg

SEQ ID NO: 5833904 - DNA, 25 bp, Homo sapien
tcttcaccaacatcacagtggacat

SEQ ID NO: 5833905 - DNA, 25 bp, Homo sapien
ggctgcgctacggtgtctatgtcat

SEQ ID NO: 5833906 - DNA, 25 bp, Homo sapien
tgaagtgggacggcattggatccgt

SEQ ID NO: 5833907 - DNA, 25 bp, Homo sapien
gatgctgcctatgactgcttcatct

SEQ ID NO: 5833908 - DNA, 25 bp, Homo sapien
gcattggatccgtgcggtaccgagt

SEQ ID NO: 5833909 - DNA, 25 bp, Homo sapien
catggacaagtttggcttccggttg

SEQ ID NO: 5833910 - DNA, 25 bp, Homo sapien
ttcacctcacccatgcctctggaac

SEQ ID NO: 5833911 - DNA, 25 bp, Homo sapien
ctggggtggcgaggatgatgacatc

SEQ ID NO: 5833912 - DNA, 25 bp, Homo sapien
gaaaatccaggcgtgctcctgggcg

SEQ ID NO: 5833913 - DNA, 25 bp, Homo sapien
cttcaaccgagccaagctgctcaac

SEQ ID NO: 5833914 - DNA, 25 bp, Homo sapien
ccctttagacaccgggagcaccacc

SEQ ID NO: 5833915 - DNA, 25 bp, Homo sapien
atgccctctaccctgcagccagcag

SEQ ID NO: 5833916 - DNA, 25 bp, Homo sapien
cctgacgtgccgcctggtcttgtgg

SEQ ID NO: 5833917 - DNA, 25 bp, Homo sapien
ctttcccaacgagtactggggctgg

SEQ ID NO: 5833918 - DNA, 25 bp, Homo sapien
agtaccaactgctctcggcccaacg

SEQ ID NO: 5833919 - DNA, 25 bp, Homo sapien
gcctggtcccacagctccagtcatt

SEQ ID NO: 5833920 - DNA, 25 bp, Homo sapien
gcagtaccaactgctctcggcccaa

SEQ ID NO: 5833921 - DNA, 25 bp, Homo sapien
ctgcaccccagcccaaacggtggca

SEQ ID NO: 5833922 - DNA, 25 bp, Homo sapien
cagagggaaaatccaggcgtgctcc

SEQ ID NO: 5833923 - DNA, 25 bp, Homo sapien
cgccctgtcctgacgtgccgcctgg

SEQ ID NO: 5833924 - DNA, 25 bp, Homo sapien
aagatctcacgcccggatgtccgga

SEQ ID NO: 5833925 - DNA, 25 bp, Homo sapien
cagcccaaacggtggcagtcatcat

SEQ ID NO: 5833926 - DNA, 25 bp, Homo sapien
ctgccgctagctccgggctgcctga

SEQ ID NO: 5833927 - DNA, 25 bp, Homo sapien
tgatcaagcacgaccgggacaaaca

SEQ ID NO: 5833928 - DNA, 25 bp, Homo sapien
ttccggttgccctatgctagctact

SEQ ID NO: 5833929 - DNA, 25 bp, Homo sapien
taccgttgtggtgaccagccccgcc

SEQ ID NO: 5833930 - DNA, 25 bp, Homo sapien
gaggatcaatggctttcccaacgag

SEQ ID NO: 5833931 - DNA, 25 bp, Homo sapien
agcatggcgaggagaccttcaaccg

SEQ ID NO: 5833932 - DNA, 25 bp, Homo sapien
ctgcttcatcttcagtgatgtggac

SEQ ID NO: 5833933 - DNA, 25 bp, Homo sapien
ccatgccctctaccctgcagccagc

SEQ ID NO: 5833934 - DNA, 25 bp, Homo sapien
ctgtcctgacgtgccgcctggtctt

SEQ ID NO: 5833935 - DNA, 25 bp, Homo sapien
cgctagctccgggctgcctgaagtg

SEQ ID NO: 5833936 - DNA, 25 bp, Homo sapien
tcagaggtttaataagattcaaaac

SEQ ID NO: 5833937 - DNA, 25 bp, Homo sapien
cgagcccaaccctcagaggtttaat

SEQ ID NO: 5833938 - DNA, 25 bp, Homo sapien
caagtttggcttccggttgccctat

SEQ ID NO: 5833939 - DNA, 25 bp, Homo sapien
ggggctggggtggcgaggatgatga

SEQ ID NO: 5833940 - DNA, 25 bp, Homo sapien
ggacaaacataacgagcccaaccct

SEQ ID NO: 5833941 - DNA, 25 bp, Homo sapien
cctctaccctgcagccagcagcagt

SEQ ID NO: 5833942 - DNA, 25 bp, Homo sapien
gggatgaagatctcacgcccggatg

SEQ ID NO: 5833943 - DNA, 25 bp, Homo sapien
aacgagcccaaccctcagaggttta

SEQ ID NO: 5833944 - DNA, 25 bp, Homo sapien
acagctccagtcattccgccctgtc

SEQ ID NO: 5833945 - DNA, 25 bp, Homo sapien
tattggctccactatctgcacccca

SEQ ID NO: 5833946 - DNA, 25 bp, Homo sapien
tgccaggcctggtcccacagctcca

SEQ ID NO: 5833947 - DNA, 25 bp, Homo sapien
aaccgctcttcaccaacatcacagt

SEQ ID NO: 5833948 - DNA, 25 bp, Homo sapien
ttcaccaacatcacagtggacattg

SEQ ID NO: 5833949 - DNA, 25 bp, Homo sapien
aaccagcatggcgaggagaccttca

SEQ ID NO: 5833950 - DNA, 25 bp, Homo sapien
agtcttggaagtgtctcggcaaccg

SEQ ID NO: 5833951 - DNA, 25 bp, Homo sapien
ctctggaacgggtgcagagggaaaa

SEQ ID NO: 5833952 - DNA, 25 bp, Homo sapien
aagtgtctcggcaaccgctcttcac

SEQ ID NO: 5833953 - DNA, 25 bp, Homo sapien
cgggtgcagagggaaaatccaggcg

SEQ ID NO: 5833954 - DNA, 25 bp, Homo sapien
tggcgaggatgatgacatcttcaac

SEQ ID NO: 5833955 - DNA, 25 bp, Homo sapien
tggccgctaccgcatgatcaagcac

SEQ ID NO: 5833956 - DNA, 25 bp, Homo sapien
agcccaaccctcagaggtttaataa

SEQ ID NO: 5833957 - DNA, 25 bp, Homo sapien
aggtttaataagattcaaaacacaa

SEQ ID NO: 5833958 - DNA, 25 bp, Homo sapien
gcagtcatcatcccctttagacacc

SEQ ID NO: 5833959 - DNA, 25 bp, Homo sapien
ggatgaccgcaatctgtaccgttgt

SEQ ID NO: 5833960 - DNA, 25 bp, Homo sapien
gcggctgcgctacggtgtctatgtc

SEQ ID NO: 5833961 - DNA, 25 bp, Homo sapien
cctcagaggtttaataagattcaaa

SEQ ID NO: 5833962 - DNA, 25 bp, Homo sapien
atcatcccctttagacaccgggagc

SEQ ID NO: 5833963 - DNA, 25 bp, Homo sapien
gatgaagatctcacgcccggatgtc

SEQ ID NO: 5833964 - DNA, 25 bp, Homo sapien
agattcaaaacacaaagatgagcat

SEQ ID NO: 5833965 - DNA, 25 bp, Homo sapien
atcttcaaccggatctccctgactg

SEQ ID NO: 5833966 - DNA, 25 bp, Homo sapien
accgagtcttggaagtgtctcggca

SEQ ID NO: 5833967 - DNA, 25 bp, Homo sapien
tcctgggcggccgctattctccacc

SEQ ID NO: 5833968 - DNA, 25 bp, Homo sapien
ccaggcgtgctcctgggcggccgct

SEQ ID NO: 5833969 - DNA, 25 bp, Homo sapien
gaccgcaatctgtaccgttgtggtg

SEQ ID NO: 5833970 - DNA, 25 bp, Homo sapien
atgttgaggcggcagcggctgcgct

SEQ ID NO: 5833971 - DNA, 25 bp, Homo sapien
cgctaccgcatgatcaagcacgacc

SEQ ID NO: 5833972 - DNA, 25 bp, Homo sapien
gccactttgccatcgccatggacaa

SEQ ID NO: 5833973 - DNA, 25 bp, Homo sapien
gccactgccgctagctccgggctgc

SEQ ID NO: 5833974 - DNA, 25 bp, Homo sapien
gccaagctgctcaacgtgggcttcc

SEQ ID NO: 5833975 - DNA, 25 bp, Homo sapien
acccgactgcaccccagcccaaacg

SEQ ID NO: 5833976 - DNA, 25 bp, Homo sapien
tcgccatggacaagtttggcttccg

SEQ ID NO: 5833977 - DNA, 25 bp, Homo sapien
ctaccgcatgatcaagcacgaccgg

SEQ ID NO: 5833978 - DNA, 25 bp, Homo sapien
gatccgtgcggtaccgagtcttgga

SEQ ID NO: 5833979 - DNA, 25 bp, Homo sapien
cgcctggtcttgtgggccgagtggt

SEQ ID NO: 5833980 - DNA, 25 bp, Homo sapien
cacctcacccatgcctctggaacgg

SEQ ID NO: 5833981 - DNA, 25 bp, Homo sapien
gatctcacgcccggatgtccggatt

SEQ ID NO: 5833982 - DNA, 25 bp, Homo sapien
tatctgcaccccatgttgaggcggc

SEQ ID NO: 5833983 - DNA, 25 bp, Homo sapien
gtcctgacgtgccgcctggtcttgt

SEQ ID NO: 5833984 - DNA, 25 bp, Homo sapien
agctactttggaggtgtgtcgggcc

SEQ ID NO: 5833985 - DNA, 25 bp, Homo sapien
catgatcaagcacgaccgggacaaa

SEQ ID NO: 5833986 - DNA, 25 bp, Homo sapien
ctccctgactgggatgaagatctca

SEQ ID NO: 5833987 - DNA, 25 bp, Homo sapien
tcaaccggatctccctgactgggat

SEQ ID NO: 5833988 - DNA, 25 bp, Homo sapien
accgcatgatcaagcacgaccggga

SEQ ID NO: 5833989 - DNA, 25 bp, Homo sapien
gtgcccagtgccaggcctggtccca

SEQ ID NO: 5833990 - DNA, 25 bp, Homo sapien
gggaaaatccaggcgtgctcctggg

SEQ ID NO: 5833991 - DNA, 25 bp, Homo sapien
ccaggcctggtcccacagctccagt

SEQ ID NO: 5833992 - DNA, 25 bp, Homo sapien
gtgtctcggcaaccgctcttcacca

SEQ ID NO: 5833993 - DNA, 25 bp, Homo sapien
ccgggctgcctgaagtgcccagtgc

SEQ ID NO: 5833994 - DNA, 25 bp, Homo sapien
aacacaaagatgagcatgaagtggg

SEQ ID NO: 5833995 - DNA, 25 bp, Homo sapien
aaacggtggcagtcatcatcccctt

SEQ ID NO: 5833996 - DNA, 25 bp, Homo sapien
gcttcatcttcagtgatgtggacct

SEQ ID NO: 5833997 - DNA, 25 bp, Homo sapien
ccccgccactttgccatcgccatgg

SEQ ID NO: 5833998 - DNA, 25 bp, Homo sapien
ctatggatgaccgcaatctgtaccg

SEQ ID NO: 5833999 - DNA, 25 bp, Homo sapien
gatgtggacctggtccctatggatg

SEQ ID NO: 5834000 - DNA, 25 bp, Homo sapien
tgtaccgttgtggtgaccagccccg

SEQ ID NO: 5834001 - DNA, 25 bp, Homo sapien
agctgctcaacgtgggcttcctaga

SEQ ID NO: 5834002 - DNA, 25 bp, Homo sapien
gccctatgctagctactttggaggt

SEQ ID NO: 5834003 - DNA, 25 bp, Homo sapien
cggcattggatccgtgcggtaccga

SEQ ID NO: 5834004 - DNA, 25 bp, Homo sapien
tattctccacccgactgcaccccag

SEQ ID NO: 5834005 - DNA, 25 bp, Homo sapien
aaaacacaaagatgagcatgaagtg

SEQ ID NO: 5834006 - DNA, 25 bp, Homo sapien
ctatgactgcttcatcttcagtgat

SEQ ID NO: 5834007 - DNA, 25 bp, Homo sapien
ctgctcaacgtgggcttcctagagg

SEQ ID NO: 5834008 - DNA, 25 bp, Homo sapien
gcaaggcccagtttctgaggatcaa

SEQ ID NO: 5834009 - DNA, 25 bp, Homo sapien
gcgtgctcctgggcggccgctattc

SEQ ID NO: 5834010 - DNA, 25 bp, Homo sapien
gcggccgctattctccacccgactg

SEQ ID NO: 5834011 - DNA, 25 bp, Homo sapien
ttctgaggatcaatggctttcccaa

SEQ ID NO: 5834012 - DNA, 25 bp, Homo sapien
tcaaccgagccaagctgctcaacgt

SEQ ID NO: 5834013 - DNA, 25 bp, Homo sapien
gcggcagcggctgcgctacggtgtc

SEQ ID NO: 5834014 - DNA, 25 bp, Homo sapien
ggatcaatggctttcccaacgagta

SEQ ID NO: 5834015 - DNA, 25 bp, Homo sapien
agaccttcaaccgagccaagctgct

SEQ ID NO: 5834016 - DNA, 25 bp, Homo sapien
aactgctctcggcccaacgccactg

SEQ ID NO: 5834017 - DNA, 25 bp, Homo sapien
ccatgttgaggcggcagcggctgcg

SEQ ID NO: 5834018 - DNA, 25 bp, Homo sapien
ctagctccgggctgcctgaagtgcc

SEQ ID NO: 5834019 - DNA, 25 bp, Homo sapien
ccaactgctctcggcccaacgccac

SEQ ID NO: 5834020 - DNA, 25 bp, Homo sapien
ccccatgttgaggcggcagcggctg

SEQ ID NO: 5834021 - DNA, 25 bp, Homo sapien
ggcagcggctgcgctacggtgtcta

SEQ ID NO: 5834022 - DNA, 25 bp, Homo sapien
cggtgtctatgtcatcaaccagcat

SEQ ID NO: 5834023 - DNA, 25 bp, Homo sapien
catcaaccagcatggcgaggagacc

SEQ ID NO: 5834024 - DNA, 25 bp, Homo sapien
tgaggcggcagcggctgcgctacgg

SEQ ID NO: 5834025 - DNA, 25 bp, Homo sapien
actatctgcaccccatgttgaggcg

SEQ ID NO: 5834026 - DNA, 25 bp, Homo sapien
gaggtgtgtcgggcctgagcaaggc

SEQ ID NO: 5834027 - DNA, 25 bp, Homo sapien
caccaacatcacagtggacattgga

SEQ ID NO: 5834028 - DNA, 25 bp, Homo sapien
atggctttcccaacgagtactgggg

SEQ ID NO: 5834029 - DNA, 25 bp, Homo sapien
agctccgggctgcctgaagtgccca

SEQ ID NO: 5834030 - DNA, 25 bp, Homo sapien
agcccagcccatgccctctaccctg

SEQ ID NO: 5834031 - DNA, 25 bp, Homo sapien
gatgacatcttcaaccggatctccc

SEQ ID NO: 5834032 - DNA, 25 bp, Homo sapien
ggaagtgtctcggcaaccgctcttc

SEQ ID NO: 5834033 - DNA, 25 bp, Homo sapien
acgctattggctccactatctgcac

SEQ ID NO: 5834034 - DNA, 25 bp, Homo sapien
ttggaagtgtctcggcaaccgctct

SEQ ID NO: 5834035 - DNA, 25 bp, Homo sapien
gggctgcctgaagtgcccagtgcca

SEQ ID NO: 5834036 - DNA, 25 bp, Homo sapien
gtttctgaggatcaatggctttccc

SEQ ID NO: 5834037 - DNA, 25 bp, Homo sapien
catgaagtgggacggcattggatcc

SEQ ID NO: 5834038 - DNA, 25 bp, Homo sapien
catcccctttagacaccgggagcac

SEQ ID NO: 5834039 - DNA, 25 bp, Homo sapien
agtcattccgccctgtcctgacgtg

SEQ ID NO: 5834040 - DNA, 25 bp, Homo sapien
ctccgggctgcctgaagtgcccagt

SEQ ID NO: 5834041 - DNA, 25 bp, Homo sapien
ctgactgggatgaagatctcacgcc

SEQ ID NO: 5834042 - DNA, 25 bp, Homo sapien
atgatgacatcttcaaccggatctc

SEQ ID NO: 5834043 - DNA, 25 bp, Homo sapien
gggacggcattggatccgtgcggta

SEQ ID NO: 5834044 - DNA, 25 bp, Homo sapien
cactttgccatcgccatggacaagt

SEQ ID NO: 5834045 - DNA, 25 bp, Homo sapien
cgtgggcttcctagaggcactgaag

SEQ ID NO: 5834046 - DNA, 25 bp, Homo sapien
ccctatggatgaccgcaatctgtac

SEQ ID NO: 5834047 - DNA, 25 bp, Homo sapien
aggcactgaaggaggatgctgccta

SEQ ID NO: 5834048 - DNA, 25 bp, Homo sapien
cccagtttctgaggatcaatggctt

SEQ ID NO: 5834049 - DNA, 25 bp, Homo sapien
ccgagtggtcatcgaattcacctca

SEQ ID NO: 5834050 - DNA, 25 bp, Homo sapien
gtggtcatcgaattcacctcaccca

SEQ ID NO: 5834051 - DNA, 25 bp, Homo sapien
aaggaggatgctgcctatgactgct

SEQ ID NO: 5834052 - DNA, 25 bp, Homo sapien
tgtggacctggtccctatggatgac

SEQ ID NO: 5834053 - DNA, 25 bp, Homo sapien
tgcctgaagtgcccagtgccaggcc

SEQ ID NO: 5834054 - DNA, 25 bp, Homo sapien
gaggagaccttcaaccgagccaagc

SEQ ID NO: 5834055 - DNA, 25 bp, Homo sapien
tcatcatcccctttagacaccggga

SEQ ID NO: 5834056 - DNA, 25 bp, Homo sapien
gcactgaaggaggatgctgcctatg

SEQ ID NO: 5834057 - DNA, 25 bp, Homo sapien
aatctgtaccgttgtggtgaccagc

SEQ ID NO: 5834058 - DNA, 25 bp, Homo sapien
cagcggctgcgctacggtgtctatg

SEQ ID NO: 5834059 - DNA, 25 bp, Homo sapien
tggacctggtccctatggatgaccg

SEQ ID NO: 5834060 - DNA, 25 bp, Homo sapien
cagtttctgaggatcaatggctttc

SEQ ID NO: 5834061 - DNA, 25 bp, Homo sapien
gtccggattggccgctaccgcatga

SEQ ID NO: 5834062 - DNA, 25 bp, Homo sapien
acatcttcaaccggatctccctgac

SEQ ID NO: 5834063 - DNA, 25 bp, Homo sapien
catcgccatggacaagtttggcttc

SEQ ID NO: 5834064 - DNA, 25 bp, Homo sapien
ggatgatgacatcttcaaccggatc

SEQ ID NO: 5834065 - DNA, 25 bp, Homo sapien
cctatgctagctactttggaggtgt

SEQ ID NO: 5834066 - DNA, 25 bp, Homo sapien
tgaaggaggatgctgcctatgactg

SEQ ID NO: 5834067 - DNA, 25 bp, Homo sapien
cgggacaaacataacgagcccaacc

SEQ ID NO: 5834068 - DNA, 25 bp, Homo sapien
ccgctattctccacccgactgcacc

SEQ ID NO: 5834069 - DNA, 25 bp, Homo sapien
cctcacccatgcctctggaacgggt

SEQ ID NO: 5834070 - DNA, 25 bp, Homo sapien
ggccgagtggtcatcgaattcacct

SEQ ID NO: 5834071 - DNA, 25 bp, Homo sapien
ggatctccctgactgggatgaagat

SEQ ID NO: 5834072 - DNA, 25 bp, Homo sapien
tggcagtcatcatcccctttagaca

SEQ ID NO: 5834073 - DNA, 25 bp, Homo sapien
tctgcaccccatgttgaggcggcag

SEQ ID NO: 5834074 - DNA, 25 bp, Homo sapien
acgcccggatgtccggattggccgc

SEQ ID NO: 5834075 - DNA, 25 bp, Homo sapien
cggcaaccgctcttcaccaacatca

SEQ ID NO: 5834076 - DNA, 25 bp, Homo sapien
ggcccaacgccactgccgctagctc

SEQ ID NO: 5834077 - DNA, 25 bp, Homo sapien
cagtgatgtggacctggtccctatg

SEQ ID NO: 5834078 - DNA, 25 bp, Homo sapien
ctacgctattggctccactatctgc

SEQ ID NO: 5834079 - DNA, 25 bp, Homo sapien
aggcgtgctcctgggcggccgctat

SEQ ID NO: 5834080 - DNA, 25 bp, Homo sapien
ctgaggatcaatggctttcccaacg

SEQ ID NO: 5834081 - DNA, 25 bp, Homo sapien
ccagtgccaggcctggtcccacagc

SEQ ID NO: 5834082 - DNA, 25 bp, Homo sapien
atcaatggctttcccaacgagtact

SEQ ID NO: 5834083 - DNA, 25 bp, Homo sapien
tgacatcttcaaccggatctccctg

SEQ ID NO: 5834084 - DNA, 25 bp, Homo sapien
gaagcccagcccatgccctctaccc

SEQ ID NO: 5834085 - DNA, 25 bp, Homo sapien
aagatgagcatgaagtgggacggca

SEQ ID NO: 5834086 - DNA, 25 bp, Homo sapien
aattcacctcacccatgcctctgga

SEQ ID NO: 5834087 - DNA, 25 bp, Homo sapien
cccagcccaaacggtggcagtcatc

SEQ ID NO: 5834088 - DNA, 25 bp, Homo sapien
caagctgctcaacgtgggcttccta

SEQ ID NO: 5834089 - DNA, 25 bp, Homo sapien
attggatccgtgcggtaccgagtct

SEQ ID NO: 5834090 - DNA, 25 bp, Homo sapien
tcccacagctccagtcattccgccc

SEQ ID NO: 5834091 - DNA, 25 bp, Homo sapien
ggagcaccacctacgctattggctc

SEQ ID NO: 5834092 - DNA, 25 bp, Homo sapien
gacctggtccctatggatgaccgca

SEQ ID NO: 5834093 - DNA, 25 bp, Homo sapien
acataacgagcccaaccctcagagg

SEQ ID NO: 5834094 - DNA, 25 bp, Homo sapien
cgaattcacctcacccatgcctctg

SEQ ID NO: 5834095 - DNA, 25 bp, Homo sapien
tgcaccccatgttgaggcggcagcg

SEQ ID NO: 5834096 - DNA, 25 bp, Homo sapien
tccgccctgtcctgacgtgccgcct

SEQ ID NO: 5834097 - DNA, 25 bp, Homo sapien
tcttggaagtgtctcggcaaccgct

SEQ ID NO: 5834098 - DNA, 25 bp, Homo sapien
tggcgaggagaccttcaaccgagcc

SEQ ID NO: 5834099 - DNA, 25 bp, Homo sapien
tggtccctatggatgaccgcaatct

SEQ ID NO: 5834100 - DNA, 25 bp, Homo sapien
cccaaccctcagaggtttaataaga

SEQ ID NO: 5834101 - DNA, 25 bp, Homo sapien
tccgtgcggtaccgagtcttggaag

SEQ ID NO: 5834102 - DNA, 25 bp, Homo sapien
tatgctagctactttggaggtgtgt

SEQ ID NO: 5834103 - DNA, 25 bp, Homo sapien
ctgggatgaagatctcacgcccgga

SEQ ID NO: 5834104 - DNA, 25 bp, Homo sapien
tgcggtaccgagtcttggaagtgtc

SEQ ID NO: 5834105 - DNA, 25 bp, Homo sapien
tgtgtcgggcctgagcaaggcccag

SEQ ID NO: 5834106 - DNA, 25 bp, Homo sapien
gactgcaccccagcccaaacggtgg

SEQ ID NO: 5834107 - DNA, 25 bp, Homo sapien
acaccgggagcaccacctacgctat

SEQ ID NO: 5834108 - DNA, 25 bp, Homo sapien
gcttccggttgccctatgctagcta

SEQ ID NO: 5834109 - DNA, 25 bp, Homo sapien
gccgcctggtcttgtgggccgagtg

SEQ ID NO: 5834110 - DNA, 25 bp, Homo sapien
tctcacgcccggatgtccggattgg

SEQ ID NO: 5834111 - DNA, 25 bp, Homo sapien
gcccaaacggtggcagtcatcatcc

SEQ ID NO: 5834112 - DNA, 25 bp, Homo sapien
ttcagtgatgtggacctggtcccta

SEQ ID NO: 5834113 - DNA, 25 bp, Homo sapien
atgactgcttcatcttcagtgatgt

SEQ ID NO: 5834114 - DNA, 25 bp, Homo sapien
gtgccgcctggtcttgtgggccgag

SEQ ID NO: 5834115 - DNA, 25 bp, Homo sapien
tcaaaacacaaagatgagcatgaag

SEQ ID NO: 5834116 - DNA, 25 bp, Homo sapien
caccccatgttgaggcggcagcggc

SEQ ID NO: 5834117 - DNA, 25 bp, Homo sapien
ggcccagtttctgaggatcaatggc

SEQ ID NO: 5834118 - DNA, 25 bp, Homo sapien
tttggcttccggttgccctatgcta

SEQ ID NO: 5834119 - DNA, 25 bp, Homo sapien
atctccctgactgggatgaagatct

SEQ ID NO: 5834120 - DNA, 25 bp, Homo sapien
ttcccaacgagtactggggctgggg

SEQ ID NO: 5834121 - DNA, 25 bp, Homo sapien
gcctatgactgcttcatcttcagtg

SEQ ID NO: 5834122 - DNA, 25 bp, Homo sapien
gatgagcatgaagtgggacggcatt

SEQ ID NO: 5834123 - DNA, 25 bp, Homo sapien
cccaacgccactgccgctagctccg

SEQ ID NO: 5834124 - DNA, 25 bp, Homo sapien
gaccagccccgccactttgccatcg

SEQ ID NO: 5834125 - DNA, 25 bp, Homo sapien
ccggattggccgctaccgcatgatc

SEQ ID NO: 5834126 - DNA, 25 bp, Homo sapien
ccactatctgcaccccatgttgagg

SEQ ID NO: 5834127 - DNA, 25 bp, Homo sapien
ctcggcaaccgctcttcaccaacat

SEQ ID NO: 5834128 - DNA, 25 bp, Homo sapien
accccagcccaaacggtggcagtca

SEQ ID NO: 5834129 - DNA, 25 bp, Homo sapien
tggaggtgtgtcgggcctgagcaag

SEQ ID NO: 5834130 - DNA, 25 bp, Homo sapien
gcgctacggtgtctatgtcatcaac

SEQ ID NO: 5834131 - DNA, 25 bp, Homo sapien
cgggagcaccacctacgctattggc

SEQ ID NO: 5834132 - DNA, 25 bp, Homo sapien
ctggtcccacagctccagtcattcc

SEQ ID NO: 5834133 - DNA, 25 bp, Homo sapien
tgagcatgaagtgggacggcattgg

SEQ ID NO: 5834134 - DNA, 25 bp, Homo sapien
ccggttgccctatgctagctacttt

SEQ ID NO: 5834135 - DNA, 25 bp, Homo sapien
ccgcaatctgtaccgttgtggtgac

SEQ ID NO: 5834136 - DNA, 25 bp, Homo sapien
ctccagtcattccgccctgtcctga

SEQ ID NO: 5834137 - DNA, 25 bp, Homo sapien
agcatgaagtgggacggcattggat

SEQ ID NO: 5834138 - DNA, 25 bp, Homo sapien
ccgccactttgccatcgccatggac

SEQ ID NO: 5834139 - DNA, 25 bp, Homo sapien
aggcctggtcccacagctccagtca

SEQ ID NO: 5834140 - DNA, 25 bp, Homo sapien
ttgccatcgccatggacaagtttgg

SEQ ID NO: 5834141 - DNA, 25 bp, Homo sapien
ccggatgtccggattggccgctacc

SEQ ID NO: 5834142 - DNA, 25 bp, Homo sapien
tggacaagtttggcttccggttgcc

SEQ ID NO: 5834143 - DNA, 25 bp, Homo sapien
tcaacgtgggcttcctagaggcact

SEQ ID NO: 5834144 - DNA, 25 bp, Homo sapien
cacgaccgggacaaacataacgagc

SEQ ID NO: 5834145 - DNA, 25 bp, Homo sapien
gctattctccacccgactgcacccc

SEQ ID NO: 5834146 - DNA, 25 bp, Homo sapien
gactgggatgaagatctcacgcccg

SEQ ID NO: 5834147 - DNA, 25 bp, Homo sapien
gagccaagctgctcaacgtgggctt

SEQ ID NO: 5834148 - DNA, 25 bp, Homo sapien
cacaaagatgagcatgaagtgggac

SEQ ID NO: 5834149 - DNA, 25 bp, Homo sapien
tcatcgaattcacctcacccatgcc

SEQ ID NO: 5834150 - DNA, 25 bp, Homo sapien
gctcctgggcggccgctattctcca

SEQ ID NO: 5834151 - DNA, 25 bp, Homo sapien
atgcctctggaacgggtgcagaggg

SEQ ID NO: 5834152 - DNA, 25 bp, Homo sapien
agccccgccactttgccatcgccat

SEQ ID NO: 5834153 - DNA, 25 bp, Homo sapien
cctggtccctatggatgaccgcaat

SEQ ID NO: 5834154 - DNA, 25 bp, Homo sapien
acctacgctattggctccactatct

SEQ ID NO: 5834155 - DNA, 25 bp, Homo sapien
tcattccgccctgtcctgacgtgcc

SEQ ID NO: 5834156 - DNA, 25 bp, Homo sapien
tcacgcccggatgtccggattggcc

SEQ ID NO: 5834157 - DNA, 25 bp, Homo sapien
aggatgctgcctatgactgcttcat

SEQ ID NO: 5834158 - DNA, 25 bp, Homo sapien
tggtcttgtgggccgagtggtcatc

SEQ ID NO: 5834159 - DNA, 25 bp, Homo sapien
ctactttggaggtgtgtcgggcctg

SEQ ID NO: 5834160 - DNA, 25 bp, Homo sapien
gcctctggaacgggtgcagagggaa

SEQ ID NO: 5834161 - DNA, 25 bp, Homo sapien
ctccacccgactgcaccccagccca

SEQ ID NO: 5834162 - DNA, 25 bp, Homo sapien
attggccgctaccgcatgatcaagc

SEQ ID NO: 5834163 - DNA, 25 bp, Homo sapien
caaccctcagaggtttaataagatt

SEQ ID NO: 5834164 - DNA, 25 bp, Homo sapien
agtcatcatcccctttagacaccgg

SEQ ID NO: 5834165 - DNA, 25 bp, Homo sapien
agtttggcttccggttgccctatgc

SEQ ID NO: 5834166 - DNA, 25 bp, Homo sapien
accgggagcaccacctacgctattg

SEQ ID NO: 5834167 - DNA, 25 bp, Homo sapien
tgacgtgccgcctggtcttgtgggc

SEQ ID NO: 5834168 - DNA, 25 bp, Homo sapien
cagcagtaccaactgctctcggccc

SEQ ID NO: 5834169 - DNA, 25 bp, Homo sapien
ccagccccgccactttgccatcgcc

SEQ ID NO: 5834170 - DNA, 25 bp, Homo sapien
agaggtttaataagattcaaaacac

SEQ ID NO: 5834171 - DNA, 25 bp, Homo sapien
gtgctcctgggcggccgctattctc

SEQ ID NO: 5834172 - DNA, 25 bp, Homo sapien
cctggtcttgtgggccgagtggtca

SEQ ID NO: 5834173 - DNA, 25 bp, Homo sapien
gcgaggagaccttcaaccgagccaa

SEQ ID NO: 5834174 - DNA, 25 bp, Homo sapien
ctgctctcggcccaacgccactgcc

SEQ ID NO: 5834175 - DNA, 25 bp, Homo sapien
tgtggtgaccagccccgccactttg

SEQ ID NO: 5834176 - DNA, 25 bp, Homo sapien
atccaggcgtgctcctgggcggccg

SEQ ID NO: 5834177 - DNA, 25 bp, Homo sapien
tcccctttagacaccgggagcacca

SEQ ID NO: 5834178 - DNA, 25 bp, Homo sapien
gcccagtgccaggcctggtcccaca

SEQ ID NO: 5834179 - DNA, 25 bp, Homo sapien
aaggcccagtttctgaggatcaatg

SEQ ID NO: 5834180 - DNA, 25 bp, Homo sapien
tgtgggccgagtggtcatcgaattc

SEQ ID NO: 5834181 - DNA, 25 bp, Homo sapien
acccatgcctctggaacgggtgcag

SEQ ID NO: 5834182 - DNA, 25 bp, Homo sapien
aggcggcagcggctgcgctacggtg

SEQ ID NO: 5834183 - DNA, 25 bp, Homo sapien
cttcaaccggatctccctgactggg

SEQ ID NO: 5834184 - DNA, 25 bp, Homo sapien
cactgccgctagctccgggctgcct

SEQ ID NO: 5834185 - DNA, 25 bp, Homo sapien
tggatccgtgcggtaccgagtcttg

SEQ ID NO: 5834186 - DNA, 25 bp, Homo sapien
ggcttcctagaggcactgaaggagg

SEQ ID NO: 5834187 - DNA, 25 bp, Homo sapien
gctctcggcccaacgccactgccgc

SEQ ID NO: 5834188 - DNA, 25 bp, Homo sapien
agccagcagcagtaccaactgctct

SEQ ID NO: 5834189 - DNA, 25 bp, Homo sapien
gggcggccgctattctccacccgac

SEQ ID NO: 5834190 - DNA, 25 bp, Homo sapien
agcagcagtaccaactgctctcggc

SEQ ID NO: 5834191 - DNA, 25 bp, Homo sapien
atgtccggattggccgctaccgcat

SEQ ID NO: 5834192 - DNA, 25 bp, Homo sapien
gttgaggcggcagcggctgcgctac

SEQ ID NO: 5834193 - DNA, 25 bp, Homo sapien
tcctagaggcactgaaggaggatgc

SEQ ID NO: 5834194 - DNA, 25 bp, Homo sapien
gtgatgtggacctggtccctatgga

SEQ ID NO: 5834195 - DNA, 25 bp, Homo sapien
ctgcgctacggtgtctatgtcatca

SEQ ID NO: 5834196 - DNA, 25 bp, Homo sapien
ggtggcagtcatcatcccctttaga

SEQ ID NO: 5834197 - DNA, 25 bp, Homo sapien
gcaatctgtaccgttgtggtgacca

SEQ ID NO: 5834198 - DNA, 25 bp, Homo sapien
gctcttcaccaacatcacagtggac

SEQ ID NO: 5834199 - DNA, 25 bp, Homo sapien
ataacgagcccaaccctcagaggtt

SEQ ID NO: 5834200 - DNA, 25 bp, Homo sapien
agcaccacctacgctattggctcca

SEQ ID NO: 5834201 - DNA, 25 bp, Homo sapien
tgctagctactttggaggtgtgtcg

SEQ ID NO: 5834202 - DNA, 25 bp, Homo sapien
cggtaccgagtcttggaagtgtctc

SEQ ID NO: 5834203 - DNA, 25 bp, Homo sapien
tgaagatctcacgcccggatgtccg

SEQ ID NO: 5834204 - DNA, 25 bp, Homo sapien
ccctgactgggatgaagatctcacg

SEQ ID NO: 5834205 - DNA, 25 bp, Homo sapien
ggattggccgctaccgcatgatcaa

SEQ ID NO: 5834206 - DNA, 25 bp, Homo sapien
ccacctacgctattggctccactat

SEQ ID NO: 5834207 - DNA, 25 bp, Homo sapien
cttgtgggccgagtggtcatcgaat

SEQ ID NO: 5834208 - DNA, 25 bp, Homo sapien
ctttagacaccgggagcaccaccta

SEQ ID NO: 5834209 - DNA, 25 bp, Homo sapien
gtctatgtcatcaaccagcatggcg

SEQ ID NO: 5834210 - DNA, 25 bp, Homo sapien
ggatgtccggattggccgctaccgc

SEQ ID NO: 5834211 - DNA, 25 bp, Homo sapien
gacaagtttggcttccggttgccct

SEQ ID NO: 5834212 - DNA, 25 bp, Homo sapien
caaagatgagcatgaagtgggacgg

SEQ ID NO: 5834213 - DNA, 25 bp, Homo sapien
ccgagccaagctgctcaacgtgggc

SEQ ID NO: 5834214 - DNA, 25 bp, Homo sapien
gtgggacggcattggatccgtgcgg

SEQ ID NO: 5834215 - DNA, 25 bp, Homo sapien
gcctgagcaaggcccagtttctgag

SEQ ID NO: 5834216 - DNA, 25 bp, Homo sapien
aacgtgggcttcctagaggcactga

SEQ ID NO: 5834217 - DNA, 25 bp, Homo sapien
tgtcgggcctgagcaaggcccagtt

SEQ ID NO: 5834218 - DNA, 25 bp, Homo sapien
ccctgtcctgacgtgccgcctggtc

SEQ ID NO: 5834219 - DNA, 25 bp, Homo sapien
ccagcagcagtaccaactgctctcg

SEQ ID NO: 5834220 - DNA, 25 bp, Homo sapien
ggtgcagagggaaaatccaggcgtg

SEQ ID NO: 5834221 - DNA, 25 bp, Homo sapien
tgaagtgcccagtgccaggcctggt

SEQ ID NO: 5834222 - DNA, 25 bp, Homo sapien
cgcatgatcaagcacgaccgggaca

SEQ ID NO: 5834223 - DNA, 25 bp, Homo sapien
gcccggatgtccggattggccgcta

SEQ ID NO: 5834224 - DNA, 25 bp, Homo sapien
agaggcactgaaggaggatgctgcc

SEQ ID NO: 5834225 - DNA, 25 bp, Homo sapien
tcacccatgcctctggaacgggtgc

SEQ ID NO: 5834226 - DNA, 25 bp, Homo sapien
tcggcccaacgccactgccgctagc

SEQ ID NO: 5834227 - DNA, 25 bp, Homo sapien
ggctttcccaacgagtactggggct

SEQ ID NO: 5834228 - DNA, 25 bp, Homo sapien
ggctccactatctgcaccccatgtt

SEQ ID NO: 5834229 - DNA, 25 bp, Homo sapien
actttggaggtgtgtcgggcctgag

SEQ ID NO: 5834230 - DNA, 25 bp, Homo sapien
gtctcggcaaccgctcttcaccaac

SEQ ID NO: 5834231 - DNA, 25 bp, Homo sapien
cgtgcggtaccgagtcttggaagtg

SEQ ID NO: 5834232 - DNA, 25 bp, Homo sapien
ttagacaccgggagcaccacctacg

SEQ ID NO: 5834233 - DNA, 25 bp, Homo sapien
atcgaattcacctcacccatgcctc

SEQ ID NO: 5834234 - DNA, 25 bp, Homo sapien
tcaaccagcatggcgaggagacctt

SEQ ID NO: 5834235 - DNA, 25 bp, Homo sapien
gcccatgccctctaccctgcagcca

SEQ ID NO: 5834236 - DNA, 25 bp, Homo sapien
gccgctaccgcatgatcaagcacga

SEQ ID NO: 5834237 - DNA, 25 bp, Homo sapien
ttgccctatgctagctactttggag

SEQ ID NO: 5834238 - DNA, 25 bp, Homo sapien
accctcagaggtttaataagattca

SEQ ID NO: 5834239 - DNA, 25 bp, Homo sapien
tacggtgtctatgtcatcaaccagc

SEQ ID NO: 5834240 - DNA, 25 bp, Homo sapien
gggcctgagcaaggcccagtttctg

SEQ ID NO: 5834241 - DNA, 25 bp, Homo sapien
ccgttgtggtgaccagccccgccac

SEQ ID NO: 5834242 - DNA, 25 bp, Homo sapien
attccgccctgtcctgacgtgccgc

SEQ ID NO: 5834243 - DNA, 25 bp, Homo sapien
gctgcctgaagtgcccagtgccagg

SEQ ID NO: 5834244 - DNA, 25 bp, Homo sapien
tgcagagggaaaatccaggcgtgct

SEQ ID NO: 5834245 - DNA, 25 bp, Homo sapien
ggtggcgaggatgatgacatcttca

SEQ ID NO: 5834246 - DNA, 25 bp, Homo sapien
agcacgaccgggacaaacataacga

SEQ ID NO: 5834247 - DNA, 25 bp, Homo sapien
ctatgtcatcaaccagcatggcgag

SEQ ID NO: 5834248 - DNA, 25 bp, Homo sapien
ggtgtgtcgggcctgagcaaggccc

SEQ ID NO: 5834249 - DNA, 25 bp, Homo sapien
gagggaaaatccaggcgtgctcctg

SEQ ID NO: 5834250 - DNA, 25 bp, Homo sapien
ccctgcagccagcagcagtaccaac

SEQ ID NO: 5834251 - DNA, 25 bp, Homo sapien
atgtcatcaaccagcatggcgagga

SEQ ID NO: 5834252 - DNA, 25 bp, Homo sapien
actgaaggaggatgctgcctatgac

SEQ ID NO: 5834253 - DNA, 25 bp, Homo sapien
ggaggatgctgcctatgactgcttc

SEQ ID NO: 5834254 - DNA, 25 bp, Homo sapien
gagtggtcatcgaattcacctcacc

SEQ ID NO: 5834255 - DNA, 25 bp, Homo sapien
acgccactgccgctagctccgggct

SEQ ID NO: 5834256 - DNA, 25 bp, Homo sapien
gacggcattggatccgtgcggtacc

SEQ ID NO: 5834257 - DNA, 25 bp, Homo sapien
catcttcagtgatgtggacctggtc

SEQ ID NO: 5834258 - DNA, 25 bp, Homo sapien
tgggcttcctagaggcactgaagga

SEQ ID NO: 5834259 - DNA, 25 bp, Homo sapien
cgaccgggacaaacataacgagccc

SEQ ID NO: 5834260 - DNA, 25 bp, Homo sapien
ctagctactttggaggtgtgtcggg

SEQ ID NO: 5834261 - DNA, 25 bp, Homo sapien
gtcatcaaccagcatggcgaggaga

SEQ ID NO: 5834262 - DNA, 25 bp, Homo sapien
aaccggatctccctgactgggatga

SEQ ID NO: 5834263 - DNA, 25 bp, Homo sapien
gccatcgccatggacaagtttggct

SEQ ID NO: 5834264 - DNA, 25 bp, Homo sapien
ggggtggcgaggatgatgacatctt

SEQ ID NO: 5834265 - DNA, 25 bp, Homo sapien
tctgtaccgttgtggtgaccagccc

SEQ ID NO: 5834266 - DNA, 25 bp, Homo sapien
ccagcatggcgaggagaccttcaac

SEQ ID NO: 5834267 - DNA, 25 bp, Homo sapien
accgggacaaacataacgagcccaa

SEQ ID NO: 5834268 - DNA, 25 bp, Homo sapien
gctacggtgtctatgtcatcaacca

SEQ ID NO: 5834269 - DNA, 25 bp, Homo sapien
ccgctcttcaccaacatcacagtgg

SEQ ID NO: 5834270 - DNA, 25 bp, Homo sapien
agtgccaggcctggtcccacagctc

SEQ ID NO: 5834271 - DNA, 25 bp, Homo sapien
taccctgcagccagcagcagtacca

SEQ ID NO: 5834272 - DNA, 25 bp, Homo sapien
ctccactatctgcaccccatgttga

SEQ ID NO: 5834273 - DNA, 25 bp, Homo sapien
tctcggcccaacgccactgccgcta

SEQ ID NO: 5834274 - DNA, 25 bp, Homo sapien
aaacataacgagcccaaccctcaga

SEQ ID NO: 5834275 - DNA, 25 bp, Homo sapien
ttaataagattcaaaacacaaagat

SEQ ID NO: 5834276 - DNA, 25 bp, Homo sapien
accttcaaccgagccaagctgctca

SEQ ID NO: 5834277 - DNA, 25 bp, Homo sapien
ggctggggtggcgaggatgatgaca

SEQ ID NO: 5834278 - DNA, 25 bp, Homo sapien
aataagattcaaaacacaaagatga

SEQ ID NO: 5834279 - DNA, 25 bp, Homo sapien
aacgggtgcagagggaaaatccagg

SEQ ID NO: 5834280 - DNA, 25 bp, Homo sapien
gttgtggtgaccagccccgccactt

SEQ ID NO: 5834281 - DNA, 25 bp, Homo sapien
acaaacataacgagcccaaccctca

SEQ ID NO: 5834282 - DNA, 25 bp, Homo sapien
acgtgccgcctggtcttgtgggccg

SEQ ID NO: 5834283 - DNA, 25 bp, Homo sapien
cgagtcttggaagtgtctcggcaac

SEQ ID NO: 5834284 - DNA, 25 bp, Homo sapien
gctcaacgtgggcttcctagaggca

SEQ ID NO: 5834285 - DNA, 25 bp, Homo sapien
atgaccgcaatctgtaccgttgtgg

SEQ ID NO: 5834286 - DNA, 25 bp, Homo sapien
catggcgaggagaccttcaaccgag

SEQ ID NO: 5834287 - DNA, 25 bp, Homo sapien
ccggatctccctgactgggatgaag

SEQ ID NO: 5834288 - DNA, 25 bp, Homo sapien
ggccgctattctccacccgactgca

SEQ ID NO: 5834289 - DNA, 25 bp, Homo sapien
tgggccgagtggtcatcgaattcac

SEQ ID NO: 5834290 - DNA, 25 bp, Homo sapien
gctattggctccactatctgcaccc

SEQ ID NO: 5834291 - DNA, 25 bp, Homo sapien
atcaagcacgaccgggacaaacata

SEQ ID NO: 5834292 - DNA, 25 bp, Homo sapien
ccaaacggtggcagtcatcatcccc

SEQ ID NO: 5834293 - DNA, 25 bp, Homo sapien
ctggaacgggtgcagagggaaaatc

SEQ ID NO: 5834294 - DNA, 25 bp, Homo sapien
ccgactgcaccccagcccaaacggt

SEQ ID NO: 5834295 - DNA, 25 bp, Homo sapien
gtaccgagtcttggaagtgtctcgg

SEQ ID NO: 5834296 - DNA, 25 bp, Homo sapien
ggttgccctatgctagctactttgg

SEQ ID NO: 5834297 - DNA, 25 bp, Homo sapien
aaatccaggcgtgctcctgggcggc

SEQ ID NO: 5834298 - DNA, 25 bp, Homo sapien
ctagaggcactgaaggaggatgctg

SEQ ID NO: 5834299 - DNA, 25 bp, Homo sapien
ctgagcaaggcccagtttctgagga

SEQ ID NO: 5834300 - DNA, 25 bp, Homo sapien
caccacctacgctattggctccact

SEQ ID NO: 5834301 - DNA, 25 bp, Homo sapien
caagcacgaccgggacaaacataac

SEQ ID NO: 5834302 - DNA, 25 bp, Homo sapien
gccatggacaagtttggcttccggt

SEQ ID NO: 5834303 - DNA, 25 bp, Homo sapien
tcttcagtgatgtggacctggtccc

SEQ ID NO: 5834304 - DNA, 25 bp, Homo sapien
cttcctagaggcactgaaggaggat

SEQ ID NO: 5834305 - DNA, 25 bp, Homo sapien
aaccgagccaagctgctcaacgtgg

SEQ ID NO: 5834306 - DNA, 25 bp, Homo sapien
agacaccgggagcaccacctacgct

SEQ ID NO: 5834307 - DNA, 25 bp, Homo sapien
ctgggcggccgctattctccacccg

SEQ ID NO: 5834308 - DNA, 25 bp, Homo sapien
gactgcttcatcttcagtgatgtgg

SEQ ID NO: 5834309 - DNA, 25 bp, Homo sapien
tggcttccggttgccctatgctagc

SEQ ID NO: 5834310 - DNA, 25 bp, Homo sapien
attcaaaacacaaagatgagcatga

SEQ ID NO: 5834311 - DNA, 25 bp, Homo sapien
ttctccacccgactgcaccccagcc

SEQ ID NO: 5834312 - DNA, 25 bp, Homo sapien
atggatgaccgcaatctgtaccgtt

SEQ ID NO: 5834313 - DNA, 25 bp, Homo sapien
ggtcccacagctccagtcattccgc

SEQ ID NO: 5834314 - DNA, 25 bp, Homo sapien
ggtcatcgaattcacctcacccatg

SEQ ID NO: 5834315 - DNA, 25 bp, Homo sapien
tgctgcctatgactgcttcatcttc

SEQ ID NO: 5834316 - DNA, 25 bp, Homo sapien
gcgaggatgatgacatcttcaaccg

SEQ ID NO: 5834317 - DNA, 25 bp, Homo sapien
caatggctttcccaacgagtactgg

SEQ ID NO: 5834318 - DNA, 25 bp, Homo sapien
taccgcacggatccaatgccgtccc

SEQ ID NO: 5834319 - DNA, 25 bp, Homo sapien
ggcagcatcctccttcagtgcctct

SEQ ID NO: 5834320 - DNA, 25 bp, Homo sapien
cgcagccgctgccgcctcaacatgg

SEQ ID NO: 5834321 - DNA, 25 bp, Homo sapien
gaagatgaagcagtcataggcagca

SEQ ID NO: 5834322 - DNA, 25 bp, Homo sapien
aagtggcggggctggtcaccacaac

SEQ ID NO: 5834323 - DNA, 25 bp, Homo sapien
gtggcgttgggccgagagcagttgg

SEQ ID NO: 5834324 - DNA, 25 bp, Homo sapien
tgccgtcccacttcatgctcatctt

SEQ ID NO: 5834325 - DNA, 25 bp, Homo sapien
agatgaagcagtcataggcagcatc

SEQ ID NO: 5834326 - DNA, 25 bp, Homo sapien
gtcataggcagcatcctccttcagt

SEQ ID NO: 5834327 - DNA, 25 bp, Homo sapien
caaccggaagccaaacttgtccatg

SEQ ID NO: 5834328 - DNA, 25 bp, Homo sapien
cttcaggcagcccggagctagcggc

SEQ ID NO: 5834329 - DNA, 25 bp, Homo sapien
cagtcgggtggagaatagcggccgc

SEQ ID NO: 5834330 - DNA, 25 bp, Homo sapien
ccactgtgatgttggtgaagagcgg

SEQ ID NO: 5834331 - DNA, 25 bp, Homo sapien
cggttgccgagacacttccaagact

SEQ ID NO: 5834332 - DNA, 25 bp, Homo sapien
cctctgagggttgggctcgttatgt

SEQ ID NO: 5834333 - DNA, 25 bp, Homo sapien
cctggattttccctctgcacccgtt

SEQ ID NO: 5834334 - DNA, 25 bp, Homo sapien
gttatgtttgtcccggtcgtgcttg

SEQ ID NO: 5834335 - DNA, 25 bp, Homo sapien
acagattgcggtcatccatagggac

SEQ ID NO: 5834336 - DNA, 25 bp, Homo sapien
cggtcatccatagggaccaggtcca

SEQ ID NO: 5834337 - DNA, 25 bp, Homo sapien
tgctgctggctgcagggtagagggc

SEQ ID NO: 5834338 - DNA, 25 bp, Homo sapien
gtgaattcgatgaccactcggccca

SEQ ID NO: 5834339 - DNA, 25 bp, Homo sapien
gcacggatccaatgccgtcccactt

SEQ ID NO: 5834340 - DNA, 25 bp, Homo sapien
cttgctcaggcccgacacacctcca

SEQ ID NO: 5834341 - DNA, 25 bp, Homo sapien
gaggcatgggtgaggtgaattcgat

SEQ ID NO: 5834342 - DNA, 25 bp, Homo sapien
cagggagatccggttgaagatgtca

SEQ ID NO: 5834343 - DNA, 25 bp, Homo sapien
cctctaggaagcccacgttgagcag

SEQ ID NO: 5834344 - DNA, 25 bp, Homo sapien
actggagctgtgggaccaggcctgg

SEQ ID NO: 5834345 - DNA, 25 bp, Homo sapien
gatgaccactcggcccacaagacca

SEQ ID NO: 5834346 - DNA, 25 bp, Homo sapien
aatgccgtcccacttcatgctcatc

SEQ ID NO: 5834347 - DNA, 25 bp, Homo sapien
gatcatgcggtagcggccaatccgg

SEQ ID NO: 5834348 - DNA, 25 bp, Homo sapien
gggctggtcaccacaacggtacaga

SEQ ID NO: 5834349 - DNA, 25 bp, Homo sapien
catggggtgcagatagtggagccaa

SEQ ID NO: 5834350 - DNA, 25 bp, Homo sapien
ccgcacggatccaatgccgtcccac

SEQ ID NO: 5834351 - DNA, 25 bp, Homo sapien
tggtcaccacaacggtacagattgc

SEQ ID NO: 5834352 - DNA, 25 bp, Homo sapien
tccgggcgtgagatcttcatcccag

SEQ ID NO: 5834353 - DNA, 25 bp, Homo sapien
catagggaccaggtccacatcactg

SEQ ID NO: 5834354 - DNA, 25 bp, Homo sapien
tgcctctaggaagcccacgttgagc

SEQ ID NO: 5834355 - DNA, 25 bp, Homo sapien
gttggtgaagagcggttgccgagac

SEQ ID NO: 5834356 - DNA, 25 bp, Homo sapien
aacctctgagggttgggctcgttat

SEQ ID NO: 5834357 - DNA, 25 bp, Homo sapien
tggattttccctctgcacccgttcc

SEQ ID NO: 5834358 - DNA, 25 bp, Homo sapien
attaaacctctgagggttgggctcg

SEQ ID NO: 5834359 - DNA, 25 bp, Homo sapien
cagcatcctccttcagtgcctctag

SEQ ID NO: 5834360 - DNA, 25 bp, Homo sapien
ccgtagcgcagccgctgccgcctca

SEQ ID NO: 5834361 - DNA, 25 bp, Homo sapien
tgggctggggtgcagtcgggtggag

SEQ ID NO: 5834362 - DNA, 25 bp, Homo sapien
gaagagcggttgccgagacacttcc

SEQ ID NO: 5834363 - DNA, 25 bp, Homo sapien
ctggggtgcagtcgggtggagaata

SEQ ID NO: 5834364 - DNA, 25 bp, Homo sapien
gctggtcaccacaacggtacagatt

SEQ ID NO: 5834365 - DNA, 25 bp, Homo sapien
agccccagtactcgttgggaaagcc

SEQ ID NO: 5834366 - DNA, 25 bp, Homo sapien
tctaaaggggatgatgactgccacc

SEQ ID NO: 5834367 - DNA, 25 bp, Homo sapien
tggctgcagggtagagggcatgggc

SEQ ID NO: 5834368 - DNA, 25 bp, Homo sapien
gttttgaatcttattaaacctctga

SEQ ID NO: 5834369 - DNA, 25 bp, Homo sapien
actgggcacttcaggcagcccggag

SEQ ID NO: 5834370 - DNA, 25 bp, Homo sapien
aagaccaggcggcacgtcaggacag

SEQ ID NO: 5834371 - DNA, 25 bp, Homo sapien
acacacctccaaagtagctagcata

SEQ ID NO: 5834372 - DNA, 25 bp, Homo sapien
aggcagcccggagctagcggcagtg

SEQ ID NO: 5834373 - DNA, 25 bp, Homo sapien
cagtggcgttgggccgagagcagtt

SEQ ID NO: 5834374 - DNA, 25 bp, Homo sapien
tcggtaccgcacggatccaatgccg

SEQ ID NO: 5834375 - DNA, 25 bp, Homo sapien
cggagctagcggcagtggcgttggg

SEQ ID NO: 5834376 - DNA, 25 bp, Homo sapien
aggcggcacgtcaggacagggcgga

SEQ ID NO: 5834377 - DNA, 25 bp, Homo sapien
agcggccgcccaggagcacgcctgg

SEQ ID NO: 5834378 - DNA, 25 bp, Homo sapien
gcggtagcggccaatccggacatcc

SEQ ID NO: 5834379 - DNA, 25 bp, Homo sapien
ccaaacttgtccatggcgatggcaa

SEQ ID NO: 5834380 - DNA, 25 bp, Homo sapien
atagcggccgcccaggagcacgcct

SEQ ID NO: 5834381 - DNA, 25 bp, Homo sapien
gacagggcggaatgactggagctgt

SEQ ID NO: 5834382 - DNA, 25 bp, Homo sapien
cgccatgctggttgatgacatagac

SEQ ID NO: 5834383 - DNA, 25 bp, Homo sapien
ccacaagaccaggcggcacgtcagg

SEQ ID NO: 5834384 - DNA, 25 bp, Homo sapien
gtgttttgaatcttattaaacctct

SEQ ID NO: 5834385 - DNA, 25 bp, Homo sapien
tctgagggttgggctcgttatgttt

SEQ ID NO: 5834386 - DNA, 25 bp, Homo sapien
taggtggtgctcccggtgtctaaag

SEQ ID NO: 5834387 - DNA, 25 bp, Homo sapien
agccaaacttgtccatggcgatggc

SEQ ID NO: 5834388 - DNA, 25 bp, Homo sapien
tgagcagcttggctcggttgaaggt

SEQ ID NO: 5834389 - DNA, 25 bp, Homo sapien
ggaccaggcctggcactgggcactt

SEQ ID NO: 5834390 - DNA, 25 bp, Homo sapien
ctcgttgggaaagccattgatcctc

SEQ ID NO: 5834391 - DNA, 25 bp, Homo sapien
tcaggacagggcggaatgactggag

SEQ ID NO: 5834392 - DNA, 25 bp, Homo sapien
aatgactggagctgtgggaccaggc

SEQ ID NO: 5834393 - DNA, 25 bp, Homo sapien
ggcaaagtggcggggctggtcacca

SEQ ID NO: 5834394 - DNA, 25 bp, Homo sapien
tcatcatcctcgccaccccagcccc

SEQ ID NO: 5834395 - DNA, 25 bp, Homo sapien
gatccggttgaagatgtcatcatcc

SEQ ID NO: 5834396 - DNA, 25 bp, Homo sapien
aaacttgtccatggcgatggcaaag

SEQ ID NO: 5834397 - DNA, 25 bp, Homo sapien
tgaagatgtcatcatcctcgccacc

SEQ ID NO: 5834398 - DNA, 25 bp, Homo sapien
caccgtagcgcagccgctgccgcct

SEQ ID NO: 5834399 - DNA, 25 bp, Homo sapien
ccaatgccgtcccacttcatgctca

SEQ ID NO: 5834400 - DNA, 25 bp, Homo sapien
ccagccccagtactcgttgggaaag

SEQ ID NO: 5834401 - DNA, 25 bp, Homo sapien
tccaatgtccactgtgatgttggtg

SEQ ID NO: 5834402 - DNA, 25 bp, Homo sapien
tgtcccggtcgtgcttgatcatgcg

SEQ ID NO: 5834403 - DNA, 25 bp, Homo sapien
cgtgagatcttcatcccagtcaggg

SEQ ID NO: 5834404 - DNA, 25 bp, Homo sapien
ccgttccagaggcatgggtgaggtg

SEQ ID NO: 5834405 - DNA, 25 bp, Homo sapien
ttttccctctgcacccgttccagag

SEQ ID NO: 5834406 - DNA, 25 bp, Homo sapien
gccgcctcaacatggggtgcagata

SEQ ID NO: 5834407 - DNA, 25 bp, Homo sapien
ccaggtccacatcactgaagatgaa

SEQ ID NO: 5834408 - DNA, 25 bp, Homo sapien
cgtcaggacagggcggaatgactgg

SEQ ID NO: 5834409 - DNA, 25 bp, Homo sapien
tccaagactcggtaccgcacggatc

SEQ ID NO: 5834410 - DNA, 25 bp, Homo sapien
tggtactgctgctggctgcagggta

SEQ ID NO: 5834411 - DNA, 25 bp, Homo sapien
tgactgccaccgtttgggctggggt

SEQ ID NO: 5834412 - DNA, 25 bp, Homo sapien
cgcctcaacatggggtgcagatagt

SEQ ID NO: 5834413 - DNA, 25 bp, Homo sapien
gggcggaatgactggagctgtggga

SEQ ID NO: 5834414 - DNA, 25 bp, Homo sapien
ctgaagatgaagcagtcataggcag

SEQ ID NO: 5834415 - DNA, 25 bp, Homo sapien
tgagatcttcatcccagtcagggag

SEQ ID NO: 5834416 - DNA, 25 bp, Homo sapien
gagctagcggcagtggcgttgggcc

SEQ ID NO: 5834417 - DNA, 25 bp, Homo sapien
atgaagcagtcataggcagcatcct

SEQ ID NO: 5834418 - DNA, 25 bp, Homo sapien
ccatggcgatggcaaagtggcgggg

SEQ ID NO: 5834419 - DNA, 25 bp, Homo sapien
aggtgaattcgatgaccactcggcc

SEQ ID NO: 5834420 - DNA, 25 bp, Homo sapien
gccgagagcagttggtactgctgct

SEQ ID NO: 5834421 - DNA, 25 bp, Homo sapien
ctgccgcctcaacatggggtgcaga

SEQ ID NO: 5834422 - DNA, 25 bp, Homo sapien
ccgtcccacttcatgctcatctttg

SEQ ID NO: 5834423 - DNA, 25 bp, Homo sapien
ctcaggcccgacacacctccaaagt

SEQ ID NO: 5834424 - DNA, 25 bp, Homo sapien
ggctcggttgaaggtctcctcgcca

SEQ ID NO: 5834425 - DNA, 25 bp, Homo sapien
tttgaatcttattaaacctctgagg

SEQ ID NO: 5834426 - DNA, 25 bp, Homo sapien
ggatccaatgccgtcccacttcatg

SEQ ID NO: 5834427 - DNA, 25 bp, Homo sapien
tagacaccgtagcgcagccgctgcc

SEQ ID NO: 5834428 - DNA, 25 bp, Homo sapien
cccggagctagcggcagtggcgttg

SEQ ID NO: 5834429 - DNA, 25 bp, Homo sapien
gagacacttccaagactcggtaccg

SEQ ID NO: 5834430 - DNA, 25 bp, Homo sapien
gcagatagtggagccaatagcgtag

SEQ ID NO: 5834431 - DNA, 25 bp, Homo sapien
atgacatagacaccgtagcgcagcc

SEQ ID NO: 5834432 - DNA, 25 bp, Homo sapien
acgttgagcagcttggctcggttga

SEQ ID NO: 5834433 - DNA, 25 bp, Homo sapien
atgcggtagcggccaatccggacat

SEQ ID NO: 5834434 - DNA, 25 bp, Homo sapien
acggatccaatgccgtcccacttca

SEQ ID NO: 5834435 - DNA, 25 bp, Homo sapien
accactcggcccacaagaccaggcg

SEQ ID NO: 5834436 - DNA, 25 bp, Homo sapien
aaggtctcctcgccatgctggttga

SEQ ID NO: 5834437 - DNA, 25 bp, Homo sapien
agcagcttggctcggttgaaggtct

SEQ ID NO: 5834438 - DNA, 25 bp, Homo sapien
atgttggtgaagagcggttgccgag

SEQ ID NO: 5834439 - DNA, 25 bp, Homo sapien
cacttcatgctcatctttgtgtttt

SEQ ID NO: 5834440 - DNA, 25 bp, Homo sapien
ggtgaggtgaattcgatgaccactc

SEQ ID NO: 5834441 - DNA, 25 bp, Homo sapien
ggggatgatgactgccaccgtttgg

SEQ ID NO: 5834442 - DNA, 25 bp, Homo sapien
agactcggtaccgcacggatccaat

SEQ ID NO: 5834443 - DNA, 25 bp, Homo sapien
ccaaagtagctagcatagggcaacc

SEQ ID NO: 5834444 - DNA, 25 bp, Homo sapien
ttgggctcgttatgtttgtcccggt

SEQ ID NO: 5834445 - DNA, 25 bp, Homo sapien
atggcgatggcaaagtggcggggct

SEQ ID NO: 5834446 - DNA, 25 bp, Homo sapien
catccatagggaccaggtccacatc

SEQ ID NO: 5834447 - DNA, 25 bp, Homo sapien
ccccagtactcgttgggaaagccat

SEQ ID NO: 5834448 - DNA, 25 bp, Homo sapien
gttccagaggcatgggtgaggtgaa

SEQ ID NO: 5834449 - DNA, 25 bp, Homo sapien
atccaatgccgtcccacttcatgct

SEQ ID NO: 5834450 - DNA, 25 bp, Homo sapien
cggccgcccaggagcacgcctggat

SEQ ID NO: 5834451 - DNA, 25 bp, Homo sapien
cgtttgggctggggtgcagtcgggt

SEQ ID NO: 5834452 - DNA, 25 bp, Homo sapien
ccaccgtttgggctggggtgcagtc

SEQ ID NO: 5834453 - DNA, 25 bp, Homo sapien
gattttccctctgcacccgttccag

SEQ ID NO: 5834454 - DNA, 25 bp, Homo sapien
acccgttccagaggcatgggtgagg

SEQ ID NO: 5834455 - DNA, 25 bp, Homo sapien
cccacttcatgctcatctttgtgtt

SEQ ID NO: 5834456 - DNA, 25 bp, Homo sapien
aagccattgatcctcagaaactggg

SEQ ID NO: 5834457 - DNA, 25 bp, Homo sapien
ggcgtgagatcttcatcccagtcag

SEQ ID NO: 5834458 - DNA, 25 bp, Homo sapien
aggacagggcggaatgactggagct

SEQ ID NO: 5834459 - DNA, 25 bp, Homo sapien
cacgcctggattttccctctgcacc

SEQ ID NO: 5834460 - DNA, 25 bp, Homo sapien
cctcaacatggggtgcagatagtgg

SEQ ID NO: 5834461 - DNA, 25 bp, Homo sapien
gaagcagtcataggcagcatcctcc

SEQ ID NO: 5834462 - DNA, 25 bp, Homo sapien
gttgaaggtctcctcgccatgctgg

SEQ ID NO: 5834463 - DNA, 25 bp, Homo sapien
gtcatccatagggaccaggtccaca

SEQ ID NO: 5834464 - DNA, 25 bp, Homo sapien
tcaacatggggtgcagatagtggag

SEQ ID NO: 5834465 - DNA, 25 bp, Homo sapien
cggtacagattgcggtcatccatag

SEQ ID NO: 5834466 - DNA, 25 bp, Homo sapien
gggaaagccattgatcctcagaaac

SEQ ID NO: 5834467 - DNA, 25 bp, Homo sapien
agtgcctctaggaagcccacgttga

SEQ ID NO: 5834468 - DNA, 25 bp, Homo sapien
tggttgatgacatagacaccgtagc

SEQ ID NO: 5834469 - DNA, 25 bp, Homo sapien
gtgcttgatcatgcggtagcggcca

SEQ ID NO: 5834470 - DNA, 25 bp, Homo sapien
gaccaggtccacatcactgaagatg

SEQ ID NO: 5834471 - DNA, 25 bp, Homo sapien
gagccaatagcgtaggtggtgctcc

SEQ ID NO: 5834472 - DNA, 25 bp, Homo sapien
actgtgatgttggtgaagagcggtt

SEQ ID NO: 5834473 - DNA, 25 bp, Homo sapien
tggtgctcccggtgtctaaagggga

SEQ ID NO: 5834474 - DNA, 25 bp, Homo sapien
acatcactgaagatgaagcagtcat

SEQ ID NO: 5834475 - DNA, 25 bp, Homo sapien
cgggcgtgagatcttcatcccagtc

SEQ ID NO: 5834476 - DNA, 25 bp, Homo sapien
tgaaggtctcctcgccatgctggtt

SEQ ID NO: 5834477 - DNA, 25 bp, Homo sapien
taaacctctgagggttgggctcgtt

SEQ ID NO: 5834478 - DNA, 25 bp, Homo sapien
cactgaagatgaagcagtcataggc

SEQ ID NO: 5834479 - DNA, 25 bp, Homo sapien
cttcagtgcctctaggaagcccacg

SEQ ID NO: 5834480 - DNA, 25 bp, Homo sapien
ttggctcggttgaaggtctcctcgc

SEQ ID NO: 5834481 - DNA, 25 bp, Homo sapien
ccagtactcgttgggaaagccattg

SEQ ID NO: 5834482 - DNA, 25 bp, Homo sapien
caggcctggcactgggcacttcagg

SEQ ID NO: 5834483 - DNA, 25 bp, Homo sapien
cgcctggattttccctctgcacccg

SEQ ID NO: 5834484 - DNA, 25 bp, Homo sapien
tggagctgtgggaccaggcctggca

SEQ ID NO: 5834485 - DNA, 25 bp, Homo sapien
cgttgggaaagccattgatcctcag

SEQ ID NO: 5834486 - DNA, 25 bp, Homo sapien
tcatgcggtagcggccaatccggac

SEQ ID NO: 5834487 - DNA, 25 bp, Homo sapien
caggcccgacacacctccaaagtag

SEQ ID NO: 5834488 - DNA, 25 bp, Homo sapien
gcggaatgactggagctgtgggacc

SEQ ID NO: 5834489 - DNA, 25 bp, Homo sapien
acacctccaaagtagctagcatagg

SEQ ID NO: 5834490 - DNA, 25 bp, Homo sapien
gtcgggtggagaatagcggccgccc

SEQ ID NO: 5834491 - DNA, 25 bp, Homo sapien
tagctagcatagggcaaccggaagc

SEQ ID NO: 5834492 - DNA, 25 bp, Homo sapien
aggtccacatcactgaagatgaagc

SEQ ID NO: 5834493 - DNA, 25 bp, Homo sapien
tcctcagaaactgggccttgctcag

SEQ ID NO: 5834494 - DNA, 25 bp, Homo sapien
tcccggtgtctaaaggggatgatga

SEQ ID NO: 5834495 - DNA, 25 bp, Homo sapien
tggggtgcagatagtggagccaata

SEQ ID NO: 5834496 - DNA, 25 bp, Homo sapien
cacttcaggcagcccggagctagcg

SEQ ID NO: 5834497 - DNA, 25 bp, Homo sapien
tctaggaagcccacgttgagcagct

SEQ ID NO: 5834498 - DNA, 25 bp, Homo sapien
ggcggggctggtcaccacaacggta

SEQ ID NO: 5834499 - DNA, 25 bp, Homo sapien
tctcctcgccatgctggttgatgac

SEQ ID NO: 5834500 - DNA, 25 bp, Homo sapien
gtactgctgctggctgcagggtaga

SEQ ID NO: 5834501 - DNA, 25 bp, Homo sapien
gaaagccattgatcctcagaaactg

SEQ ID NO: 5834502 - DNA, 25 bp, Homo sapien
ggtcgtgcttgatcatgcggtagcg

SEQ ID NO: 5834503 - DNA, 25 bp, Homo sapien
tggagccaatagcgtaggtggtgct

SEQ ID NO: 5834504 - DNA, 25 bp, Homo sapien
gaccaggcggcacgtcaggacaggg

SEQ ID NO: 5834505 - DNA, 25 bp, Homo sapien
ttccctctgcacccgttccagaggc

SEQ ID NO: 5834506 - DNA, 25 bp, Homo sapien
tgtcatcatcctcgccaccccagcc

SEQ ID NO: 5834507 - DNA, 25 bp, Homo sapien
atcccagtcagggagatccggttga

SEQ ID NO: 5834508 - DNA, 25 bp, Homo sapien
acaacggtacagattgcggtcatcc

SEQ ID NO: 5834509 - DNA, 25 bp, Homo sapien
gtcaccacaacggtacagattgcgg

SEQ ID NO: 5834510 - DNA, 25 bp, Homo sapien
tgagggttgggctcgttatgtttgt

SEQ ID NO: 5834511 - DNA, 25 bp, Homo sapien
gacatagacaccgtagcgcagccgc

SEQ ID NO: 5834512 - DNA, 25 bp, Homo sapien
cgcccaggagcacgcctggattttc

SEQ ID NO: 5834513 - DNA, 25 bp, Homo sapien
gtgcagatagtggagccaatagcgt

SEQ ID NO: 5834514 - DNA, 25 bp, Homo sapien
cggacatccgggcgtgagatcttca

SEQ ID NO: 5834515 - DNA, 25 bp, Homo sapien
tcgttatgtttgtcccggtcgtgct

SEQ ID NO: 5834516 - DNA, 25 bp, Homo sapien
gccgctgccgcctcaacatggggtg

SEQ ID NO: 5834517 - DNA, 25 bp, Homo sapien
caggagcacgcctggattttccctc

SEQ ID NO: 5834518 - DNA, 25 bp, Homo sapien
cagccgctgccgcctcaacatgggg

SEQ ID NO: 5834519 - DNA, 25 bp, Homo sapien
gcggcagtggcgttgggccgagagc

SEQ ID NO: 5834520 - DNA, 25 bp, Homo sapien
ccccagccccagtactcgttgggaa

SEQ ID NO: 5834521 - DNA, 25 bp, Homo sapien
catgggtgaggtgaattcgatgacc

SEQ ID NO: 5834522 - DNA, 25 bp, Homo sapien
tcatcccagtcagggagatccggtt

SEQ ID NO: 5834523 - DNA, 25 bp, Homo sapien
gagctgtgggaccaggcctggcact

SEQ ID NO: 5834524 - DNA, 25 bp, Homo sapien
tgaggtgaattcgatgaccactcgg

SEQ ID NO: 5834525 - DNA, 25 bp, Homo sapien
gatcctcagaaactgggccttgctc

SEQ ID NO: 5834526 - DNA, 25 bp, Homo sapien
gcttgatcatgcggtagcggccaat

SEQ ID NO: 5834527 - DNA, 25 bp, Homo sapien
gctcccggtgtctaaaggggatgat

SEQ ID NO: 5834528 - DNA, 25 bp, Homo sapien
accgtttgggctggggtgcagtcgg

SEQ ID NO: 5834529 - DNA, 25 bp, Homo sapien
gctggttgatgacatagacaccgta

SEQ ID NO: 5834530 - DNA, 25 bp, Homo sapien
cagcttggctcggttgaaggtctcc

SEQ ID NO: 5834531 - DNA, 25 bp, Homo sapien
actgccaccgtttgggctggggtgc

SEQ ID NO: 5834532 - DNA, 25 bp, Homo sapien
gttgaagatgtcatcatcctcgcca

SEQ ID NO: 5834533 - DNA, 25 bp, Homo sapien
gtacagattgcggtcatccataggg

SEQ ID NO: 5834534 - DNA, 25 bp, Homo sapien
atagcgtaggtggtgctcccggtgt

SEQ ID NO: 5834535 - DNA, 25 bp, Homo sapien
ccgagacacttccaagactcggtac

SEQ ID NO: 5834536 - DNA, 25 bp, Homo sapien
catccgggcgtgagatcttcatccc

SEQ ID NO: 5834537 - DNA, 25 bp, Homo sapien
caaagtggcggggctggtcaccaca

SEQ ID NO: 5834538 - DNA, 25 bp, Homo sapien
gggaccaggtccacatcactgaaga

SEQ ID NO: 5834539 - DNA, 25 bp, Homo sapien
ccacgttgagcagcttggctcggtt

SEQ ID NO: 5834540 - DNA, 25 bp, Homo sapien
gctgtgggaccaggcctggcactgg

SEQ ID NO: 5834541 - DNA, 25 bp, Homo sapien
cgatggcaaagtggcggggctggtc

SEQ ID NO: 5834542 - DNA, 25 bp, Homo sapien
gagaatagcggccgcccaggagcac

SEQ ID NO: 5834543 - DNA, 25 bp, Homo sapien
aacatggggtgcagatagtggagcc

SEQ ID NO: 5834544 - DNA, 25 bp, Homo sapien
gttgatgacatagacaccgtagcgc

SEQ ID NO: 5834545 - DNA, 25 bp, Homo sapien
ggcacttcaggcagcccggagctag

SEQ ID NO: 5834546 - DNA, 25 bp, Homo sapien
tgcagtcgggtggagaatagcggcc

SEQ ID NO: 5834547 - DNA, 25 bp, Homo sapien
caatgtccactgtgatgttggtgaa

SEQ ID NO: 5834548 - DNA, 25 bp, Homo sapien
gcagcccggagctagcggcagtggc

SEQ ID NO: 5834549 - DNA, 25 bp, Homo sapien
atggcaaagtggcggggctggtcac

SEQ ID NO: 5834550 - DNA, 25 bp, Homo sapien
gcatagggcaaccggaagccaaact

SEQ ID NO: 5834551 - DNA, 25 bp, Homo sapien
cccagtcagggagatccggttgaag

SEQ ID NO: 5834552 - DNA, 25 bp, Homo sapien
gaaactgggccttgctcaggcccga

SEQ ID NO: 5834553 - DNA, 25 bp, Homo sapien
ggcagtggcgttgggccgagagcag

SEQ ID NO: 5834554 - DNA, 25 bp, Homo sapien
cagggcggaatgactggagctgtgg

SEQ ID NO: 5834555 - DNA, 25 bp, Homo sapien
tgtctaaaggggatgatgactgcca

SEQ ID NO: 5834556 - DNA, 25 bp, Homo sapien
taggcagcatcctccttcagtgcct

SEQ ID NO: 5834557 - DNA, 25 bp, Homo sapien
caatagcgtaggtggtgctcccggt

SEQ ID NO: 5834558 - DNA, 25 bp, Homo sapien
ggaagcccacgttgagcagcttggc

SEQ ID NO: 5834559 - DNA, 25 bp, Homo sapien
gaagccaaacttgtccatggcgatg

SEQ ID NO: 5834560 - DNA, 25 bp, Homo sapien
acaagaccaggcggcacgtcaggac

SEQ ID NO: 5834561 - DNA, 25 bp, Homo sapien
ggccaatccggacatccgggcgtga

SEQ ID NO: 5834562 - DNA, 25 bp, Homo sapien
agcagtcataggcagcatcctcctt

SEQ ID NO: 5834563 - DNA, 25 bp, Homo sapien
ggtggtgctcccggtgtctaaaggg

SEQ ID NO: 5834564 - DNA, 25 bp, Homo sapien
cgagagcagttggtactgctgctgg

SEQ ID NO: 5834565 - DNA, 25 bp, Homo sapien
aactgggccttgctcaggcccgaca

SEQ ID NO: 5834566 - DNA, 25 bp, Homo sapien
cctccttcagtgcctctaggaagcc

SEQ ID NO: 5834567 - DNA, 25 bp, Homo sapien
gtccacatcactgaagatgaagcag

SEQ ID NO: 5834568 - DNA, 25 bp, Homo sapien
gtccactgtgatgttggtgaagagc

SEQ ID NO: 5834569 - DNA, 25 bp, Homo sapien
gcccacaagaccaggcggcacgtca

SEQ ID NO: 5834570 - DNA, 25 bp, Homo sapien
taaaggggatgatgactgccaccgt

SEQ ID NO: 5834571 - DNA, 25 bp, Homo sapien
gttgagcagcttggctcggttgaag

SEQ ID NO: 5834572 - DNA, 25 bp, Homo sapien
ggtgcagtcgggtggagaatagcgg

SEQ ID NO: 5834573 - DNA, 25 bp, Homo sapien
tccggacatccgggcgtgagatctt

SEQ ID NO: 5834574 - DNA, 25 bp, Homo sapien
attcgatgaccactcggcccacaag

SEQ ID NO: 5834575 - DNA, 25 bp, Homo sapien
ggtaccgcacggatccaatgccgtc

SEQ ID NO: 5834576 - DNA, 25 bp, Homo sapien
gcttggctcggttgaaggtctcctc

SEQ ID NO: 5834577 - DNA, 25 bp, Homo sapien
ggcccgacacacctccaaagtagct

SEQ ID NO: 5834578 - DNA, 25 bp, Homo sapien
atctttgtgttttgaatcttattaa

SEQ ID NO: 5834579 - DNA, 25 bp, Homo sapien
agcgcagccgctgccgcctcaacat

SEQ ID NO: 5834580 - DNA, 25 bp, Homo sapien
gccgcccaggagcacgcctggattt

SEQ ID NO: 5834581 - DNA, 25 bp, Homo sapien
ccatgctggttgatgacatagacac

SEQ ID NO: 5834582 - DNA, 25 bp, Homo sapien
tgccaccgtttgggctggggtgcag

SEQ ID NO: 5834583 - DNA, 25 bp, Homo sapien
aatccggacatccgggcgtgagatc

SEQ ID NO: 5834584 - DNA, 25 bp, Homo sapien
ggcatgggtgaggtgaattcgatga

SEQ ID NO: 5834585 - DNA, 25 bp, Homo sapien
gtcccacttcatgctcatctttgtg

SEQ ID NO: 5834586 - DNA, 25 bp, Homo sapien
tgggaccaggcctggcactgggcac

SEQ ID NO: 5834587 - DNA, 25 bp, Homo sapien
gggccttgctcaggcccgacacacc

SEQ ID NO: 5834588 - DNA, 25 bp, Homo sapien
cataggcagcatcctccttcagtgc

SEQ ID NO: 5834589 - DNA, 25 bp, Homo sapien
aaagtagctagcatagggcaaccgg

SEQ ID NO: 5834590 - DNA, 25 bp, Homo sapien
tgctcaggcccgacacacctccaaa

SEQ ID NO: 5834591 - DNA, 25 bp, Homo sapien
agcggttgccgagacacttccaaga

SEQ ID NO: 5834592 - DNA, 25 bp, Homo sapien
accaggcctggcactgggcacttca

SEQ ID NO: 5834593 - DNA, 25 bp, Homo sapien
ccggtgtctaaaggggatgatgact

SEQ ID NO: 5834594 - DNA, 25 bp, Homo sapien
tcccggtcgtgcttgatcatgcggt

SEQ ID NO: 5834595 - DNA, 25 bp, Homo sapien
gccttgctcaggcccgacacacctc

SEQ ID NO: 5834596 - DNA, 25 bp, Homo sapien
ccctctgcacccgttccagaggcat

SEQ ID NO: 5834597 - DNA, 25 bp, Homo sapien
aacggtacagattgcggtcatccat

SEQ ID NO: 5834598 - DNA, 25 bp, Homo sapien
ccaatccggacatccgggcgtgaga

SEQ ID NO: 5834599 - DNA, 25 bp, Homo sapien
tatgtttgtcccggtcgtgcttgat

SEQ ID NO: 5834600 - DNA, 25 bp, Homo sapien
ctccaaagtagctagcatagggcaa

SEQ ID NO: 5834601 - DNA, 25 bp, Homo sapien
gtgctcccggtgtctaaaggggatg

SEQ ID NO: 5834602 - DNA, 25 bp, Homo sapien
cttcatcccagtcagggagatccgg

SEQ ID NO: 5834603 - DNA, 25 bp, Homo sapien
cttccaagactcggtaccgcacgga

SEQ ID NO: 5834604 - DNA, 25 bp, Homo sapien
cccaggagcacgcctggattttccc

SEQ ID NO: 5834605 - DNA, 25 bp, Homo sapien
agcccggagctagcggcagtggcgt

SEQ ID NO: 5834606 - DNA, 25 bp, Homo sapien
agggttgggctcgttatgtttgtcc

SEQ ID NO: 5834607 - DNA, 25 bp, Homo sapien
tttgggctggggtgcagtcgggtgg

SEQ ID NO: 5834608 - DNA, 25 bp, Homo sapien
aatcttattaaacctctgagggttg

SEQ ID NO: 5834609 - DNA, 25 bp, Homo sapien
tgtgggaccaggcctggcactgggc

SEQ ID NO: 5834610 - DNA, 25 bp, Homo sapien
gacaccgtagcgcagccgctgccgc

SEQ ID NO: 5834611 - DNA, 25 bp, Homo sapien
gaattcgatgaccactcggcccaca

SEQ ID NO: 5834612 - DNA, 25 bp, Homo sapien
ttgggaaagccattgatcctcagaa

SEQ ID NO: 5834613 - DNA, 25 bp, Homo sapien
ggtagcggccaatccggacatccgg

SEQ ID NO: 5834614 - DNA, 25 bp, Homo sapien
tggcactgggcacttcaggcagccc

SEQ ID NO: 5834615 - DNA, 25 bp, Homo sapien
cgctgccgcctcaacatggggtgca

SEQ ID NO: 5834616 - DNA, 25 bp, Homo sapien
gctcgttatgtttgtcccggtcgtg

SEQ ID NO: 5834617 - DNA, 25 bp, Homo sapien
acctccaaagtagctagcatagggc

SEQ ID NO: 5834618 - DNA, 25 bp, Homo sapien
atgctggttgatgacatagacaccg

SEQ ID NO: 5834619 - DNA, 25 bp, Homo sapien
tgactggagctgtgggaccaggcct

SEQ ID NO: 5834620 - DNA, 25 bp, Homo sapien
ctgcacccgttccagaggcatgggt

SEQ ID NO: 5834621 - DNA, 25 bp, Homo sapien
ccacatcactgaagatgaagcagtc

SEQ ID NO: 5834622 - DNA, 25 bp, Homo sapien
tgggcacttcaggcagcccggagct

SEQ ID NO: 5834623 - DNA, 25 bp, Homo sapien
tccatagggaccaggtccacatcac

SEQ ID NO: 5834624 - DNA, 25 bp, Homo sapien
cctggcactgggcacttcaggcagc

SEQ ID NO: 5834625 - DNA, 25 bp, Homo sapien
tcagtgcctctaggaagcccacgtt

SEQ ID NO: 5834626 - DNA, 25 bp, Homo sapien
caccacaacggtacagattgcggtc

SEQ ID NO: 5834627 - DNA, 25 bp, Homo sapien
agagcggttgccgagacacttccaa

SEQ ID NO: 5834628 - DNA, 25 bp, Homo sapien
tgtgatgttggtgaagagcggttgc

SEQ ID NO: 5834629 - DNA, 25 bp, Homo sapien
actcggtaccgcacggatccaatgc

SEQ ID NO: 5834630 - DNA, 25 bp, Homo sapien
accggaagccaaacttgtccatggc

SEQ ID NO: 5834631 - DNA, 25 bp, Homo sapien
tagcatagggcaaccggaagccaaa

SEQ ID NO: 5834632 - DNA, 25 bp, Homo sapien
ctcgccatgctggttgatgacatag

SEQ ID NO: 5834633 - DNA, 25 bp, Homo sapien
gcccacgttgagcagcttggctcgg

SEQ ID NO: 5834634 - DNA, 25 bp, Homo sapien
cggggctggtcaccacaacggtaca

SEQ ID NO: 5834635 - DNA, 25 bp, Homo sapien
gcggcacgtcaggacagggcggaat

SEQ ID NO: 5834636 - DNA, 25 bp, Homo sapien
ggatgatgactgccaccgtttgggc

SEQ ID NO: 5834637 - DNA, 25 bp, Homo sapien
gccattgatcctcagaaactgggcc

SEQ ID NO: 5834638 - DNA, 25 bp, Homo sapien
agtactcgttgggaaagccattgat

SEQ ID NO: 5834639 - DNA, 25 bp, Homo sapien
ctctgcacccgttccagaggcatgg

SEQ ID NO: 5834640 - DNA, 25 bp, Homo sapien
agcgtaggtggtgctcccggtgtct

SEQ ID NO: 5834641 - DNA, 25 bp, Homo sapien
tcaggcagcccggagctagcggcag

SEQ ID NO: 5834642 - DNA, 25 bp, Homo sapien
ggcgttgggccgagagcagttggta

SEQ ID NO: 5834643 - DNA, 25 bp, Homo sapien
aagcccacgttgagcagcttggctc

SEQ ID NO: 5834644 - DNA, 25 bp, Homo sapien
gggtgcagatagtggagccaatagc

SEQ ID NO: 5834645 - DNA, 25 bp, Homo sapien
ggtctcctcgccatgctggttgatg

SEQ ID NO: 5834646 - DNA, 25 bp, Homo sapien
tccagaggcatgggtgaggtgaatt

SEQ ID NO: 5834647 - DNA, 25 bp, Homo sapien
ggcacgtcaggacagggcggaatga

SEQ ID NO: 5834648 - DNA, 25 bp, Homo sapien
catagacaccgtagcgcagccgctg

SEQ ID NO: 5834649 - DNA, 25 bp, Homo sapien
agatcttcatcccagtcagggagat

SEQ ID NO: 5834650 - DNA, 25 bp, Homo sapien
ttgtccatggcgatggcaaagtggc

SEQ ID NO: 5834651 - DNA, 25 bp, Homo sapien
ggcaaccggaagccaaacttgtcca

SEQ ID NO: 5834652 - DNA, 25 bp, Homo sapien
gctagcatagggcaaccggaagcca

SEQ ID NO: 5834653 - DNA, 25 bp, Homo sapien
tcatctttgtgttttgaatcttatt

SEQ ID NO: 5834654 - DNA, 25 bp, Homo sapien
gtccatggcgatggcaaagtggcgg

SEQ ID NO: 5834655 - DNA, 25 bp, Homo sapien
ggtgtctaaaggggatgatgactgc

SEQ ID NO: 5834656 - DNA, 25 bp, Homo sapien
gtagcgcagccgctgccgcctcaac

SEQ ID NO: 5834657 - DNA, 25 bp, Homo sapien
gcacccgttccagaggcatgggtga

SEQ ID NO: 5834658 - DNA, 25 bp, Homo sapien
ggtggagaatagcggccgcccagga

SEQ ID NO: 5834659 - DNA, 25 bp, Homo sapien
gctgcagggtagagggcatgggctg

SEQ ID NO: 5834660 - DNA, 25 bp, Homo sapien
ctcggcccacaagaccaggcggcac

SEQ ID NO: 5834661 - DNA, 25 bp, Homo sapien
gatgtcatcatcctcgccaccccag

SEQ ID NO: 5834662 - DNA, 25 bp, Homo sapien
agggcaaccggaagccaaacttgtc

SEQ ID NO: 5834663 - DNA, 25 bp, Homo sapien
gcatcctccttcagtgcctctagga

SEQ ID NO: 5834664 - DNA, 25 bp, Homo sapien
agtggagccaatagcgtaggtggtg

SEQ ID NO: 5834665 - DNA, 25 bp, Homo sapien
atcctccttcagtgcctctaggaag

SEQ ID NO: 5834666 - DNA, 25 bp, Homo sapien
gcactgggcacttcaggcagcccgg

SEQ ID NO: 5834667 - DNA, 25 bp, Homo sapien
ggaatgactggagctgtgggaccag

SEQ ID NO: 5834668 - DNA, 25 bp, Homo sapien
cagggtagagggcatgggctgggct

SEQ ID NO: 5834669 - DNA, 25 bp, Homo sapien
cagtcagggagatccggttgaagat

SEQ ID NO: 5834670 - DNA, 25 bp, Homo sapien
taggaagcccacgttgagcagcttg

SEQ ID NO: 5834671 - DNA, 25 bp, Homo sapien
ttgtgttttgaatcttattaaacct

SEQ ID NO: 5834672 - DNA, 25 bp, Homo sapien
atgatgactgccaccgtttgggctg

SEQ ID NO: 5834673 - DNA, 25 bp, Homo sapien
ttattaaacctctgagggttgggct

SEQ ID NO: 5834674 - DNA, 25 bp, Homo sapien
tcgtgcttgatcatgcggtagcggc

SEQ ID NO: 5834675 - DNA, 25 bp, Homo sapien
ggagcacgcctggattttccctctg

SEQ ID NO: 5834676 - DNA, 25 bp, Homo sapien
ctcggttgaaggtctcctcgccatg

SEQ ID NO: 5834677 - DNA, 25 bp, Homo sapien
tagcggcagtggcgttgggccgaga

SEQ ID NO: 5834678 - DNA, 25 bp, Homo sapien
cattgatcctcagaaactgggcctt

SEQ ID NO: 5834679 - DNA, 25 bp, Homo sapien
gcggccaatccggacatccgggcgt

SEQ ID NO: 5834680 - DNA, 25 bp, Homo sapien
cgttgggccgagagcagttggtact

SEQ ID NO: 5834681 - DNA, 25 bp, Homo sapien
gttggtactgctgctggctgcaggg

SEQ ID NO: 5834682 - DNA, 25 bp, Homo sapien
agagcagttggtactgctgctggct

SEQ ID NO: 5834683 - DNA, 25 bp, Homo sapien
cggttgaaggtctcctcgccatgct

SEQ ID NO: 5834684 - DNA, 25 bp, Homo sapien
agatagtggagccaatagcgtaggt

SEQ ID NO: 5834685 - DNA, 25 bp, Homo sapien
atgctcatctttgtgttttgaatct

SEQ ID NO: 5834686 - DNA, 25 bp, Homo sapien
ccggtcgtgcttgatcatgcggtag

SEQ ID NO: 5834687 - DNA, 25 bp, Homo sapien
agcacgcctggattttccctctgca

SEQ ID NO: 5834688 - DNA, 25 bp, Homo sapien
gtcagggagatccggttgaagatgt

SEQ ID NO: 5834689 - DNA, 25 bp, Homo sapien
caagactcggtaccgcacggatcca

SEQ ID NO: 5834690 - DNA, 25 bp, Homo sapien
tgatgacatagacaccgtagcgcag

SEQ ID NO: 5834691 - DNA, 25 bp, Homo sapien
tcgatgaccactcggcccacaagac

SEQ ID NO: 5834692 - DNA, 25 bp, Homo sapien
cgggtggagaatagcggccgcccag

SEQ ID NO: 5834693 - DNA, 25 bp, Homo sapien
atgtccactgtgatgttggtgaaga

SEQ ID NO: 5834694 - DNA, 25 bp, Homo sapien
cactcggcccacaagaccaggcggc

SEQ ID NO: 5834695 - DNA, 25 bp, Homo sapien
gctagcggcagtggcgttgggccga

SEQ ID NO: 5834696 - DNA, 25 bp, Homo sapien
gctcatctttgtgttttgaatctta

SEQ ID NO: 5834697 - DNA, 25 bp, Homo sapien
tgaatcttattaaacctctgagggt

SEQ ID NO: 5834698 - DNA, 25 bp, Homo sapien
tgcagggtagagggcatgggctggg

SEQ ID NO: 5834699 - DNA, 25 bp, Homo sapien
cagttggtactgctgctggctgcag

SEQ ID NO: 5834700 - DNA, 25 bp, Homo sapien
ggttgggctcgttatgtttgtcccg

SEQ ID NO: 5834701 - DNA, 25 bp, Homo sapien
cggaagccaaacttgtccatggcga

SEQ ID NO: 5834702 - DNA, 25 bp, Homo sapien
cggttgaagatgtcatcatcctcgc

SEQ ID NO: 5834703 - DNA, 25 bp, Homo sapien
gggagatccggttgaagatgtcatc

SEQ ID NO: 5834704 - DNA, 25 bp, Homo sapien
cgtaggtggtgctcccggtgtctaa

SEQ ID NO: 5834705 - DNA, 25 bp, Homo sapien
cgacacacctccaaagtagctagca

SEQ ID NO: 5834706 - DNA, 25 bp, Homo sapien
gttgccgagacacttccaagactcg

SEQ ID NO: 5834707 - DNA, 25 bp, Homo sapien
agtagctagcatagggcaaccggaa

SEQ ID NO: 5834708 - DNA, 25 bp, Homo sapien
agcagttggtactgctgctggctgc

SEQ ID NO: 5834709 - DNA, 25 bp, Homo sapien
ttgatcatgcggtagcggccaatcc

SEQ ID NO: 5834710 - DNA, 25 bp, Homo sapien
cttcatgctcatctttgtgttttga

SEQ ID NO: 5834711 - DNA, 25 bp, Homo sapien
tagggaccaggtccacatcactgaa

SEQ ID NO: 5834712 - DNA, 25 bp, Homo sapien
tagcggccaatccggacatccgggc

SEQ ID NO: 5834713 - DNA, 25 bp, Homo sapien
actgctgctggctgcagggtagagg

SEQ ID NO: 5834714 - DNA, 25 bp, Homo sapien
gacacttccaagactcggtaccgca

SEQ ID NO: 5834715 - DNA, 25 bp, Homo sapien
atcactgaagatgaagcagtcatag

SEQ ID NO: 5834716 - DNA, 25 bp, Homo sapien
atagggcaaccggaagccaaacttg

SEQ ID NO: 5834717 - DNA, 25 bp, Homo sapien
tcatgctcatctttgtgttttgaat

SEQ ID NO: 5834718 - DNA, 25 bp, Homo sapien
ctcagaaactgggccttgctcaggc

SEQ ID NO: 5834719 - DNA, 25 bp, Homo sapien
ccaggcggcacgtcaggacagggcg

SEQ ID NO: 5834720 - DNA, 25 bp, Homo sapien
cacttccaagactcggtaccgcacg

SEQ ID NO: 5834721 - DNA, 25 bp, Homo sapien
ggctggggtgcagtcgggtggagaa

SEQ ID NO: 5834722 - DNA, 25 bp, Homo sapien
ctgctggctgcagggtagagggcat

SEQ ID NO: 5834723 - DNA, 25 bp, Homo sapien
gagatccggttgaagatgtcatcat

SEQ ID NO: 5834724 - DNA, 25 bp, Homo sapien
ggcgatggcaaagtggcggggctgg

SEQ ID NO: 5834725 - DNA, 25 bp, Homo sapien
tactcgttgggaaagccattgatcc

SEQ ID NO: 5834726 - DNA, 25 bp, Homo sapien
ggggtgcagtcgggtggagaatagc

SEQ ID NO: 5834727 - DNA, 25 bp, Homo sapien
ttgggccgagagcagttggtactgc

SEQ ID NO: 5834728 - DNA, 25 bp, Homo sapien
tccttcagtgcctctaggaagccca

SEQ ID NO: 5834729 - DNA, 25 bp, Homo sapien
gctggctgcagggtagagggcatgg

SEQ ID NO: 5834730 - DNA, 25 bp, Homo sapien
gtggcggggctggtcaccacaacgg

SEQ ID NO: 5834731 - DNA, 25 bp, Homo sapien
tggagaatagcggccgcccaggagc

SEQ ID NO: 5834732 - DNA, 25 bp, Homo sapien
agattgcggtcatccatagggacca

SEQ ID NO: 5834733 - DNA, 25 bp, Homo sapien
tgcggtcatccatagggaccaggtc

SEQ ID NO: 5834734 - DNA, 25 bp, Homo sapien
acttgtccatggcgatggcaaagtg

SEQ ID NO: 5834735 - DNA, 25 bp, Homo sapien
ctgggccttgctcaggcccgacaca

SEQ ID NO: 5834736 - DNA, 25 bp, Homo sapien
gtgaagagcggttgccgagacactt

SEQ ID NO: 5834737 - DNA, 25 bp, Homo sapien
cagaggcatgggtgaggtgaattcg

SEQ ID NO: 5834738 - DNA, 25 bp, Homo sapien
gacatccgggcgtgagatcttcatc

SEQ ID NO: 5834739 - DNA, 25 bp, Homo sapien
atagtggagccaatagcgtaggtgg

SEQ ID NO: 5834740 - DNA, 25 bp, Homo sapien
cagtcataggcagcatcctccttca

SEQ ID NO: 5834741 - DNA, 25 bp, Homo sapien
tcttattaaacctctgagggttggg

SEQ ID NO: 5834742 - DNA, 25 bp, Homo sapien
tccggttgaagatgtcatcatcctc

SEQ ID NO: 5834743 - DNA, 25 bp, Homo sapien
gggctcgttatgtttgtcccggtcg

SEQ ID NO: 5834744 - DNA, 25 bp, Homo sapien
gatgactgccaccgtttgggctggg

SEQ ID NO: 5834745 - DNA, 25 bp, Homo sapien
gaatagcggccgcccaggagcacgc

SEQ ID NO: 5834746 - DNA, 25 bp, Homo sapien
tgggtgaggtgaattcgatgaccac

SEQ ID NO: 5834747 - DNA, 25 bp, Homo sapien
cccgacacacctccaaagtagctag

SEQ ID NO: 5834748 - DNA, 25 bp, Homo sapien
tttgtcccggtcgtgcttgatcatg

SEQ ID NO: 5834749 - DNA, 25 bp, Homo sapien
atcttcatcccagtcagggagatcc

SEQ ID NO: 5834750 - DNA, 25 bp, Homo sapien
tgtttgtcccggtcgtgcttgatca

SEQ ID NO: 5834751 - DNA, 25 bp, Homo sapien
ggcctggcactgggcacttcaggca

SEQ ID NO: 5834752 - DNA, 25 bp, Homo sapien
tcctcgccatgctggttgatgacat

SEQ ID NO: 5834753 - DNA, 25 bp, Homo sapien
tgaccactcggcccacaagaccagg

SEQ ID NO: 5834754 - DNA, 25 bp, Homo sapien
aagatgtcatcatcctcgccacccc

SEQ ID NO: 5834755 - DNA, 25 bp, Homo sapien
tgatgttggtgaagagcggttgccg

SEQ ID NO: 5834756 - DNA, 25 bp, Homo sapien
tggtgaagagcggttgccgagacac

SEQ ID NO: 5834757 - DNA, 25 bp, Homo sapien
ttgatcctcagaaactgggccttgc

SEQ ID NO: 5834758 - DNA, 25 bp, Homo sapien
ccacaacggtacagattgcggtcat

SEQ ID NO: 5834759 - DNA, 25 bp, Homo sapien
cagaaactgggccttgctcaggccc

SEQ ID NO: 5834760 - DNA, 25 bp, Homo sapien
aaggggatgatgactgccaccgttt

SEQ ID NO: 5834761 - DNA, 25 bp, Homo sapien
gggtagagggcatgggctgggcttc

SEQ ID NO: 5834762 - DNA, 25 bp, Homo sapien
gggccgagagcagttggtactgctg

SEQ ID NO: 5834763 - DNA, 25 bp, Homo sapien
tgccgagacacttccaagactcggt

SEQ ID NO: 5834764 - DNA, 25 bp, Homo sapien
gccaatagcgtaggtggtgctcccg

SEQ ID NO: 5834765 - DNA, 25 bp, Homo sapien
cggcccacaagaccaggcggcacgt

SEQ ID NO: 5834766 - DNA, 25 bp, Homo sapien
cacgtcaggacagggcggaatgact

SEQ ID NO: 5834767 - DNA, 25 bp, Homo sapien
attgcggtcatccatagggaccagg

SEQ ID NO: 5834768 - DNA, 25 bp, Homo sapien
aaataagtacttgaagccccttaga

SEQ ID NO: 5834769 - DNA, 25 bp, Homo sapien
gaaatctaaaaacactgagttgctt

SEQ ID NO: 5834770 - DNA, 25 bp, Homo sapien
ttggctcagacaccacaaatatctt

SEQ ID NO: 5834771 - DNA, 25 bp, Homo sapien
atctcttagacagttctgcagcccc

SEQ ID NO: 5834772 - DNA, 25 bp, Homo sapien
ccttgccaaatttttatttcttcca

SEQ ID NO: 5834773 - DNA, 25 bp, Homo sapien
atcaggacccgaggactctggaccc

SEQ ID NO: 5834774 - DNA, 25 bp, Homo sapien
ttatttcttccagcttaactctggg

SEQ ID NO: 5834775 - DNA, 25 bp, Homo sapien
ggaggagccaagagttaaagaaatc

SEQ ID NO: 5834776 - DNA, 25 bp, Homo sapien
tctggacccagttctgccagccttg

SEQ ID NO: 5834777 - DNA, 25 bp, Homo sapien
gcatccggcccagggatggtctctt

SEQ ID NO: 5834778 - DNA, 25 bp, Homo sapien
tggacccagttctgccagccttgcc

SEQ ID NO: 5834779 - DNA, 25 bp, Homo sapien
cccaccagtctgccccgggaccaca

SEQ ID NO: 5834780 - DNA, 25 bp, Homo sapien
gccaggctggcatgaggctcttttt

SEQ ID NO: 5834781 - DNA, 25 bp, Homo sapien
cttttccagttgcgagccacacatc

SEQ ID NO: 5834782 - DNA, 25 bp, Homo sapien
aagactaatactaactcgctgagtg

SEQ ID NO: 5834783 - DNA, 25 bp, Homo sapien
ggctaacaatataaaggtctccttt

SEQ ID NO: 5834784 - DNA, 25 bp, Homo sapien
aagacatcgcgctgggaagatgacg

SEQ ID NO: 5834785 - DNA, 25 bp, Homo sapien
cttgtcataagctctggcgcccata

SEQ ID NO: 5834786 - DNA, 25 bp, Homo sapien
cttaagattgcttccctagctggga

SEQ ID NO: 5834787 - DNA, 25 bp, Homo sapien
ataaaggtctccttttcagctggtc

SEQ ID NO: 5834788 - DNA, 25 bp, Homo sapien
ggaagacatcgcgctgggaagatga

SEQ ID NO: 5834789 - DNA, 25 bp, Homo sapien
agaggatgaagactaatactaactc

SEQ ID NO: 5834790 - DNA, 25 bp, Homo sapien
tttatctcctccactcagaagcact

SEQ ID NO: 5834791 - DNA, 25 bp, Homo sapien
aacaatataaaggtctccttttcag

SEQ ID NO: 5834792 - DNA, 25 bp, Homo sapien
ctcgctgagtggtaagaaatacaaa

SEQ ID NO: 5834793 - DNA, 25 bp, Homo sapien
ttgccaaatttttatttcttccagc

SEQ ID NO: 5834794 - DNA, 25 bp, Homo sapien
aacaccaccactcggccaggctggc

SEQ ID NO: 5834795 - DNA, 25 bp, Homo sapien
gaggccaggttttcaaagttgttta

SEQ ID NO: 5834796 - DNA, 25 bp, Homo sapien
actgacctctatgccattgcttggc

SEQ ID NO: 5834797 - DNA, 25 bp, Homo sapien
tctgcagcccctcatctcagaggat

SEQ ID NO: 5834798 - DNA, 25 bp, Homo sapien
ccatatgcaaaggcctttcttaggc

SEQ ID NO: 5834799 - DNA, 25 bp, Homo sapien
ccccttagaggctctgtgtgcctgc

SEQ ID NO: 5834800 - DNA, 25 bp, Homo sapien
tctgccccgggaccacactataggg

SEQ ID NO: 5834801 - DNA, 25 bp, Homo sapien
cccccttttccagttgcgagccaca

SEQ ID NO: 5834802 - DNA, 25 bp, Homo sapien
gcaaaggcctttcttaggcacatct

SEQ ID NO: 5834803 - DNA, 25 bp, Homo sapien
aggtctccttttcagctggtcttgg

SEQ ID NO: 5834804 - DNA, 25 bp, Homo sapien
ggccatgagacacgcccaccagtct

SEQ ID NO: 5834805 - DNA, 25 bp, Homo sapien
tctaaaaacactgagttgctttggg

SEQ ID NO: 5834806 - DNA, 25 bp, Homo sapien
gcttggctcagacaccacaaatatc

SEQ ID NO: 5834807 - DNA, 25 bp, Homo sapien
gactggccatgagacacgcccacca

SEQ ID NO: 5834808 - DNA, 25 bp, Homo sapien
acaaatatcttaatgcttcaccgac

SEQ ID NO: 5834809 - DNA, 25 bp, Homo sapien
ccttgttccctctaagaaatgcact

SEQ ID NO: 5834810 - DNA, 25 bp, Homo sapien
aactctgggtgtgagacttccatca

SEQ ID NO: 5834811 - DNA, 25 bp, Homo sapien
tcataagctctggcgcccatatgca

SEQ ID NO: 5834812 - DNA, 25 bp, Homo sapien
tagacagttctgcagcccctcatct

SEQ ID NO: 5834813 - DNA, 25 bp, Homo sapien
gtggtaagaaatacaaaggacgagg

SEQ ID NO: 5834814 - DNA, 25 bp, Homo sapien
cttcacagtctgtggaggcaagaga

SEQ ID NO: 5834815 - DNA, 25 bp, Homo sapien
gtctcttcacagtctgtggaggcaa

SEQ ID NO: 5834816 - DNA, 25 bp, Homo sapien
attgcttccctagctgggaagacat

SEQ ID NO: 5834817 - DNA, 25 bp, Homo sapien
tctcctccactcagaagcacttgcc

SEQ ID NO: 5834818 - DNA, 25 bp, Homo sapien
atgcacttccatacaagctagctgg

SEQ ID NO: 5834819 - DNA, 25 bp, Homo sapien
ttggggagtagctcctgtcacctct

SEQ ID NO: 5834820 - DNA, 25 bp, Homo sapien
aggccgtggacttaagattgcttcc

SEQ ID NO: 5834821 - DNA, 25 bp, Homo sapien
cattgcttggctcagacaccacaaa

SEQ ID NO: 5834822 - DNA, 25 bp, Homo sapien
ctctatgccattgcttggctcagac

SEQ ID NO: 5834823 - DNA, 25 bp, Homo sapien
ccttttcagctggtcttggcagagg

SEQ ID NO: 5834824 - DNA, 25 bp, Homo sapien
acatgggcgagctgatacgaaagga

SEQ ID NO: 5834825 - DNA, 25 bp, Homo sapien
gagagtgatgtggaaaacatgggcg

SEQ ID NO: 5834826 - DNA, 25 bp, Homo sapien
atgcaaaggcctttcttaggcacat

SEQ ID NO: 5834827 - DNA, 25 bp, Homo sapien
tagctcctgtcacctctcagaacca

SEQ ID NO: 5834828 - DNA, 25 bp, Homo sapien
acctctatgccattgcttggctcag

SEQ ID NO: 5834829 - DNA, 25 bp, Homo sapien
gctctggcgcccatatgcaaaggcc

SEQ ID NO: 5834830 - DNA, 25 bp, Homo sapien
actctggacccagttctgccagcct

SEQ ID NO: 5834831 - DNA, 25 bp, Homo sapien
tctggcgcccatatgcaaaggcctt

SEQ ID NO: 5834832 - DNA, 25 bp, Homo sapien
acttgcccttgttccctctaagaaa

SEQ ID NO: 5834833 - DNA, 25 bp, Homo sapien
ctgtcacctctcagaaccaacacca

SEQ ID NO: 5834834 - DNA, 25 bp, Homo sapien
gaaaacatgggcgagctgatacgaa

SEQ ID NO: 5834835 - DNA, 25 bp, Homo sapien
ccccgggaccacactatagggcact

SEQ ID NO: 5834836 - DNA, 25 bp, Homo sapien
gatgacgtgatgacatcaggacccg

SEQ ID NO: 5834837 - DNA, 25 bp, Homo sapien
gagacacgcccaccagtctgccccg

SEQ ID NO: 5834838 - DNA, 25 bp, Homo sapien
acatctccatctcttagacagttct

SEQ ID NO: 5834839 - DNA, 25 bp, Homo sapien
aagttgtttatctcctccactcaga

SEQ ID NO: 5834840 - DNA, 25 bp, Homo sapien
ttcagctggtcttggcagaggaggc

SEQ ID NO: 5834841 - DNA, 25 bp, Homo sapien
gctgtgcaaacattgcaggtacccc

SEQ ID NO: 5834842 - DNA, 25 bp, Homo sapien
ttgcaggtacccccttttccagttg

SEQ ID NO: 5834843 - DNA, 25 bp, Homo sapien
aggaacagtgagcctgagaaagtac

SEQ ID NO: 5834844 - DNA, 25 bp, Homo sapien
tctttttgccacatctccatctctt

SEQ ID NO: 5834845 - DNA, 25 bp, Homo sapien
cccagttctgccagccttgccaaat

SEQ ID NO: 5834846 - DNA, 25 bp, Homo sapien
gcccctcatctcagaggatgaagac

SEQ ID NO: 5834847 - DNA, 25 bp, Homo sapien
actcatcaggctgtgctcttaggct

SEQ ID NO: 5834848 - DNA, 25 bp, Homo sapien
tagatgggctaacaatataaaggtc

SEQ ID NO: 5834849 - DNA, 25 bp, Homo sapien
aactcgctgagtggtaagaaataca

SEQ ID NO: 5834850 - DNA, 25 bp, Homo sapien
gacaccacaaatatcttaatgcttc

SEQ ID NO: 5834851 - DNA, 25 bp, Homo sapien
gtgaggcttgtcataagctctggcg

SEQ ID NO: 5834852 - DNA, 25 bp, Homo sapien
tgtgtgcctgcagtgaggcttgtca

SEQ ID NO: 5834853 - DNA, 25 bp, Homo sapien
ccgaggactctggacccagttctgc

SEQ ID NO: 5834854 - DNA, 25 bp, Homo sapien
tgcctgcagtgaggcttgtcataag

SEQ ID NO: 5834855 - DNA, 25 bp, Homo sapien
atcatcctagttgttctgtaatggg

SEQ ID NO: 5834856 - DNA, 25 bp, Homo sapien
acatcatcctagttgttctgtaatg

SEQ ID NO: 5834857 - DNA, 25 bp, Homo sapien
aaaggtctccttttcagctggtctt

SEQ ID NO: 5834858 - DNA, 25 bp, Homo sapien
tatagggcactcatcaggctgtgct

SEQ ID NO: 5834859 - DNA, 25 bp, Homo sapien
acgtgatgacatcaggacccgagga

SEQ ID NO: 5834860 - DNA, 25 bp, Homo sapien
ggactctggacccagttctgccagc

SEQ ID NO: 5834861 - DNA, 25 bp, Homo sapien
gtcttggcagaggaggccaggtttt

SEQ ID NO: 5834862 - DNA, 25 bp, Homo sapien
gctcctgtcacctctcagaaccaac

SEQ ID NO: 5834863 - DNA, 25 bp, Homo sapien
gttctgcagcccctcatctcagagg

SEQ ID NO: 5834864 - DNA, 25 bp, Homo sapien
tatcctatgggaaacccaaatagat

SEQ ID NO: 5834865 - DNA, 25 bp, Homo sapien
gttgcgagccacacatcatcctagt

SEQ ID NO: 5834866 - DNA, 25 bp, Homo sapien
ttttcaaagttgtttatctcctcca

SEQ ID NO: 5834867 - DNA, 25 bp, Homo sapien
tctgccagccttgccaaatttttat

SEQ ID NO: 5834868 - DNA, 25 bp, Homo sapien
ggctcagacaccacaaatatcttaa

SEQ ID NO: 5834869 - DNA, 25 bp, Homo sapien
acccgaggactctggacccagttct

SEQ ID NO: 5834870 - DNA, 25 bp, Homo sapien
tggcagaggaggccaggttttcaaa

SEQ ID NO: 5834871 - DNA, 25 bp, Homo sapien
ctatgccattgcttggctcagacac

SEQ ID NO: 5834872 - DNA, 25 bp, Homo sapien
tcagaagcacttgcccttgttccct

SEQ ID NO: 5834873 - DNA, 25 bp, Homo sapien
taatgcttcaccgactggccatgag

SEQ ID NO: 5834874 - DNA, 25 bp, Homo sapien
gtgagacttccatcactgacctcta

SEQ ID NO: 5834875 - DNA, 25 bp, Homo sapien
gtttggggagtagctcctgtcacct

SEQ ID NO: 5834876 - DNA, 25 bp, Homo sapien
taaagaaatctaaaaacactgagtt

SEQ ID NO: 5834877 - DNA, 25 bp, Homo sapien
caccgactggccatgagacacgccc

SEQ ID NO: 5834878 - DNA, 25 bp, Homo sapien
agtctgtggaggcaagagagggttt

SEQ ID NO: 5834879 - DNA, 25 bp, Homo sapien
gtacttgaagccccttagaggctct

SEQ ID NO: 5834880 - DNA, 25 bp, Homo sapien
gaagccccttagaggctctgtgtgc

SEQ ID NO: 5834881 - DNA, 25 bp, Homo sapien
gtcacctctcagaaccaacaccacc

SEQ ID NO: 5834882 - DNA, 25 bp, Homo sapien
gagggtttggggagtagctcctgtc

SEQ ID NO: 5834883 - DNA, 25 bp, Homo sapien
gggcgagctgatacgaaaggaggag

SEQ ID NO: 5834884 - DNA, 25 bp, Homo sapien
gatgggctaacaatataaaggtctc

SEQ ID NO: 5834885 - DNA, 25 bp, Homo sapien
aacccaaatagatgggctaacaata

SEQ ID NO: 5834886 - DNA, 25 bp, Homo sapien
tacccccttttccagttgcgagcca

SEQ ID NO: 5834887 - DNA, 25 bp, Homo sapien
gaaaggaggagccaagagttaaaga

SEQ ID NO: 5834888 - DNA, 25 bp, Homo sapien
ggcacatctatcctatgggaaaccc

SEQ ID NO: 5834889 - DNA, 25 bp, Homo sapien
tgaagactaatactaactcgctgag

SEQ ID NO: 5834890 - DNA, 25 bp, Homo sapien
acagtgagcctgagaaagtacggca

SEQ ID NO: 5834891 - DNA, 25 bp, Homo sapien
ggctggcatgaggctctttttgcca

SEQ ID NO: 5834892 - DNA, 25 bp, Homo sapien
caccagtctgccccgggaccacact

SEQ ID NO: 5834893 - DNA, 25 bp, Homo sapien
tctcagaggatgaagactaatacta

SEQ ID NO: 5834894 - DNA, 25 bp, Homo sapien
cccaaatagatgggctaacaatata

SEQ ID NO: 5834895 - DNA, 25 bp, Homo sapien
ctcttagacagttctgcagcccctc

SEQ ID NO: 5834896 - DNA, 25 bp, Homo sapien
tgcagtgaggcttgtcataagctct

SEQ ID NO: 5834897 - DNA, 25 bp, Homo sapien
acgaaaggaggagccaagagttaaa

SEQ ID NO: 5834898 - DNA, 25 bp, Homo sapien
gtgtgagacttccatcactgacctc

SEQ ID NO: 5834899 - DNA, 25 bp, Homo sapien
cttccagcttaactctgggtgtgag

SEQ ID NO: 5834900 - DNA, 25 bp, Homo sapien
aggctctgtgtgcctgcagtgaggc

SEQ ID NO: 5834901 - DNA, 25 bp, Homo sapien
cacctctcagaaccaacaccaccac

SEQ ID NO: 5834902 - DNA, 25 bp, Homo sapien
ctccttttcagctggtcttggcaga

SEQ ID NO: 5834903 - DNA, 25 bp, Homo sapien
gagacttccatcactgacctctatg

SEQ ID NO: 5834904 - DNA, 25 bp, Homo sapien
tgccacatctccatctcttagacag

SEQ ID NO: 5834905 - DNA, 25 bp, Homo sapien
gagctgatacgaaaggaggagccaa

SEQ ID NO: 5834906 - DNA, 25 bp, Homo sapien
ccacatctccatctcttagacagtt

SEQ ID NO: 5834907 - DNA, 25 bp, Homo sapien
ccaccactcggccaggctggcatga

SEQ ID NO: 5834908 - DNA, 25 bp, Homo sapien
caaatttttatttcttccagcttaa

SEQ ID NO: 5834909 - DNA, 25 bp, Homo sapien
gatggtctcttcacagtctgtggag

SEQ ID NO: 5834910 - DNA, 25 bp, Homo sapien
gttaaagaaatctaaaaacactgag

SEQ ID NO: 5834911 - DNA, 25 bp, Homo sapien
cagctggtcttggcagaggaggcca

SEQ ID NO: 5834912 - DNA, 25 bp, Homo sapien
gcgagctgatacgaaaggaggagcc

SEQ ID NO: 5834913 - DNA, 25 bp, Homo sapien
atgagacacgcccaccagtctgccc

SEQ ID NO: 5834914 - DNA, 25 bp, Homo sapien
atttttatttcttccagcttaactc

SEQ ID NO: 5834915 - DNA, 25 bp, Homo sapien
gggaccacactatagggcactcatc

SEQ ID NO: 5834916 - DNA, 25 bp, Homo sapien
cacgcccaccagtctgccccgggac

SEQ ID NO: 5834917 - DNA, 25 bp, Homo sapien
cctctcagaaccaacaccaccactc

SEQ ID NO: 5834918 - DNA, 25 bp, Homo sapien
gacagttctgcagcccctcatctca

SEQ ID NO: 5834919 - DNA, 25 bp, Homo sapien
tcactgacctctatgccattgcttg

SEQ ID NO: 5834920 - DNA, 25 bp, Homo sapien
actatagggcactcatcaggctgtg

SEQ ID NO: 5834921 - DNA, 25 bp, Homo sapien
ggggagtagctcctgtcacctctca

SEQ ID NO: 5834922 - DNA, 25 bp, Homo sapien
gtggctgcatccggcccagggatgg

SEQ ID NO: 5834923 - DNA, 25 bp, Homo sapien
ccatctcttagacagttctgcagcc

SEQ ID NO: 5834924 - DNA, 25 bp, Homo sapien
ctctgggtgtgagacttccatcact

SEQ ID NO: 5834925 - DNA, 25 bp, Homo sapien
tacggcaagagagtgatgtggaaaa

SEQ ID NO: 5834926 - DNA, 25 bp, Homo sapien
gacttccatcactgacctctatgcc

SEQ ID NO: 5834927 - DNA, 25 bp, Homo sapien
tctatcctatgggaaacccaaatag

SEQ ID NO: 5834928 - DNA, 25 bp, Homo sapien
gacgaggaacagtgagcctgagaaa

SEQ ID NO: 5834929 - DNA, 25 bp, Homo sapien
tcacagtctgtggaggcaagagagg

SEQ ID NO: 5834930 - DNA, 25 bp, Homo sapien
caaatagatgggctaacaatataaa

SEQ ID NO: 5834931 - DNA, 25 bp, Homo sapien
atgccattgcttggctcagacacca

SEQ ID NO: 5834932 - DNA, 25 bp, Homo sapien
ttttatttcttccagcttaactctg

SEQ ID NO: 5834933 - DNA, 25 bp, Homo sapien
ttgaagccccttagaggctctgtgt

SEQ ID NO: 5834934 - DNA, 25 bp, Homo sapien
tggcgcccatatgcaaaggcctttc

SEQ ID NO: 5834935 - DNA, 25 bp, Homo sapien
gatgaagactaatactaactcgctg

SEQ ID NO: 5834936 - DNA, 25 bp, Homo sapien
tgtcataagctctggcgcccatatg

SEQ ID NO: 5834937 - DNA, 25 bp, Homo sapien
ataagtacttgaagccccttagagg

SEQ ID NO: 5834938 - DNA, 25 bp, Homo sapien
gcagaggaggccaggttttcaaagt

SEQ ID NO: 5834939 - DNA, 25 bp, Homo sapien
tgacctctatgccattgcttggctc

SEQ ID NO: 5834940 - DNA, 25 bp, Homo sapien
ttttcagctggtcttggcagaggag

SEQ ID NO: 5834941 - DNA, 25 bp, Homo sapien
gagttgctttgggcaaataagtact

SEQ ID NO: 5834942 - DNA, 25 bp, Homo sapien
ataggccgtggacttaagattgctt

SEQ ID NO: 5834943 - DNA, 25 bp, Homo sapien
cgagccacacatcatcctagttgtt

SEQ ID NO: 5834944 - DNA, 25 bp, Homo sapien
aatactaactcgctgagtggtaaga

SEQ ID NO: 5834945 - DNA, 25 bp, Homo sapien
atgcttcaccgactggccatgagac

SEQ ID NO: 5834946 - DNA, 25 bp, Homo sapien
aaggaggagccaagagttaaagaaa

SEQ ID NO: 5834947 - DNA, 25 bp, Homo sapien
aaatgcacttccatacaagctagct

SEQ ID NO: 5834948 - DNA, 25 bp, Homo sapien
ccggcccagggatggtctcttcaca

SEQ ID NO: 5834949 - DNA, 25 bp, Homo sapien
aaaacactgagttgctttgggcaaa

SEQ ID NO: 5834950 - DNA, 25 bp, Homo sapien
gacagtggctgcatccggcccaggg

SEQ ID NO: 5834951 - DNA, 25 bp, Homo sapien
atataaaggtctccttttcagctgg

SEQ ID NO: 5834952 - DNA, 25 bp, Homo sapien
gccattgcttggctcagacaccaca

SEQ ID NO: 5834953 - DNA, 25 bp, Homo sapien
aaagtacggcaagagagtgatgtgg

SEQ ID NO: 5834954 - DNA, 25 bp, Homo sapien
atcaggctgtgctcttaggctgtgc

SEQ ID NO: 5834955 - DNA, 25 bp, Homo sapien
gttgtttatctcctccactcagaag

SEQ ID NO: 5834956 - DNA, 25 bp, Homo sapien
aggctctttttgccacatctccatc

SEQ ID NO: 5834957 - DNA, 25 bp, Homo sapien
aagaaatctaaaaacactgagttgc

SEQ ID NO: 5834958 - DNA, 25 bp, Homo sapien
ataagctctggcgcccatatgcaaa

SEQ ID NO: 5834959 - DNA, 25 bp, Homo sapien
aggcctttcttaggcacatctatcc

SEQ ID NO: 5834960 - DNA, 25 bp, Homo sapien
ttcaaagttgtttatctcctccact

SEQ ID NO: 5834961 - DNA, 25 bp, Homo sapien
aatctaaaaacactgagttgctttg

SEQ ID NO: 5834962 - DNA, 25 bp, Homo sapien
acacatcatcctagttgttctgtaa

SEQ ID NO: 5834963 - DNA, 25 bp, Homo sapien
acatcaggacccgaggactctggac

SEQ ID NO: 5834964 - DNA, 25 bp, Homo sapien
ggcccagggatggtctcttcacagt

SEQ ID NO: 5834965 - DNA, 25 bp, Homo sapien
tcctgtcacctctcagaaccaacac

SEQ ID NO: 5834966 - DNA, 25 bp, Homo sapien
aagagagtgatgtggaaaacatggg

SEQ ID NO: 5834967 - DNA, 25 bp, Homo sapien
ctgcatccggcccagggatggtctc

SEQ ID NO: 5834968 - DNA, 25 bp, Homo sapien
tgggaagacatcgcgctgggaagat

SEQ ID NO: 5834969 - DNA, 25 bp, Homo sapien
agtagctcctgtcacctctcagaac

SEQ ID NO: 5834970 - DNA, 25 bp, Homo sapien
catcgcgctgggaagatgacgtgat

SEQ ID NO: 5834971 - DNA, 25 bp, Homo sapien
ccgggaccacactatagggcactca

SEQ ID NO: 5834972 - DNA, 25 bp, Homo sapien
ggaagatgacgtgatgacatcagga

SEQ ID NO: 5834973 - DNA, 25 bp, Homo sapien
caaacattgcaggtacccccttttc

SEQ ID NO: 5834974 - DNA, 25 bp, Homo sapien
tgccagccttgccaaatttttattt

SEQ ID NO: 5834975 - DNA, 25 bp, Homo sapien
caggctggcatgaggctctttttgc

SEQ ID NO: 5834976 - DNA, 25 bp, Homo sapien
ctaactcgctgagtggtaagaaata

SEQ ID NO: 5834977 - DNA, 25 bp, Homo sapien
gctctttttgccacatctccatctc

SEQ ID NO: 5834978 - DNA, 25 bp, Homo sapien
ttgcttggctcagacaccacaaata

SEQ ID NO: 5834979 - DNA, 25 bp, Homo sapien
tgtggaaaacatgggcgagctgata

SEQ ID NO: 5834980 - DNA, 25 bp, Homo sapien
gacatcgcgctgggaagatgacgtg

SEQ ID NO: 5834981 - DNA, 25 bp, Homo sapien
gctgggaagacatcgcgctgggaag

SEQ ID NO: 5834982 - DNA, 25 bp, Homo sapien
gtaatggggacagtggctgcatccg

SEQ ID NO: 5834983 - DNA, 25 bp, Homo sapien
ggcatgaggctctttttgccacatc

SEQ ID NO: 5834984 - DNA, 25 bp, Homo sapien
ggacccgaggactctggacccagtt

SEQ ID NO: 5834985 - DNA, 25 bp, Homo sapien
catcctagttgttctgtaatgggga

SEQ ID NO: 5834986 - DNA, 25 bp, Homo sapien
cactgagttgctttgggcaaataag

SEQ ID NO: 5834987 - DNA, 25 bp, Homo sapien
atttcttccagcttaactctgggtg

SEQ ID NO: 5834988 - DNA, 25 bp, Homo sapien
agtgagcctgagaaagtacggcaag

SEQ ID NO: 5834989 - DNA, 25 bp, Homo sapien
tctgtgtgcctgcagtgaggcttgt

SEQ ID NO: 5834990 - DNA, 25 bp, Homo sapien
gcccatatgcaaaggcctttcttag

SEQ ID NO: 5834991 - DNA, 25 bp, Homo sapien
ctccatctcttagacagttctgcag

SEQ ID NO: 5834992 - DNA, 25 bp, Homo sapien
taaaaacactgagttgctttgggca

SEQ ID NO: 5834993 - DNA, 25 bp, Homo sapien
ggctgtgctcttaggctgtgcaaac

SEQ ID NO: 5834994 - DNA, 25 bp, Homo sapien
tggtctcttcacagtctgtggaggc

SEQ ID NO: 5834995 - DNA, 25 bp, Homo sapien
cttccctagctgggaagacatcgcg

SEQ ID NO: 5834996 - DNA, 25 bp, Homo sapien
aagatgacgtgatgacatcaggacc

SEQ ID NO: 5834997 - DNA, 25 bp, Homo sapien
tgcttccctagctgggaagacatcg

SEQ ID NO: 5834998 - DNA, 25 bp, Homo sapien
cagtgaggcttgtcataagctctgg

SEQ ID NO: 5834999 - DNA, 25 bp, Homo sapien
ttgcccttgttccctctaagaaatg

SEQ ID NO: 5835000 - DNA, 25 bp, Homo sapien
atgggaaacccaaatagatgggcta

SEQ ID NO: 5835001 - DNA, 25 bp, Homo sapien
aacattgcaggtacccccttttcca

SEQ ID NO: 5835002 - DNA, 25 bp, Homo sapien
ctaatactaactcgctgagtggtaa

SEQ ID NO: 5835003 - DNA, 25 bp, Homo sapien
gctctgtgtgcctgcagtgaggctt

SEQ ID NO: 5835004 - DNA, 25 bp, Homo sapien
tgcagcccctcatctcagaggatga

SEQ ID NO: 5835005 - DNA, 25 bp, Homo sapien
ctttgggcaaataagtacttgaagc

SEQ ID NO: 5835006 - DNA, 25 bp, Homo sapien
gctgatacgaaaggaggagccaaga

SEQ ID NO: 5835007 - DNA, 25 bp, Homo sapien
ttcaccgactggccatgagacacgc

SEQ ID NO: 5835008 - DNA, 25 bp, Homo sapien
ccacacatcatcctagttgttctgt

SEQ ID NO: 5835009 - DNA, 25 bp, Homo sapien
gcctttcttaggcacatctatccta

SEQ ID NO: 5835010 - DNA, 25 bp, Homo sapien
ctcatctcagaggatgaagactaat

SEQ ID NO: 5835011 - DNA, 25 bp, Homo sapien
tcatcaggctgtgctcttaggctgt

SEQ ID NO: 5835012 - DNA, 25 bp, Homo sapien
ccacaaatatcttaatgcttcaccg

SEQ ID NO: 5835013 - DNA, 25 bp, Homo sapien
gggatggtctcttcacagtctgtgg

SEQ ID NO: 5835014 - DNA, 25 bp, Homo sapien
atacaaaggacgaggaacagtgagc

SEQ ID NO: 5835015 - DNA, 25 bp, Homo sapien
tcctagttgttctgtaatggggaca

SEQ ID NO: 5835016 - DNA, 25 bp, Homo sapien
ggagtagctcctgtcacctctcaga

SEQ ID NO: 5835017 - DNA, 25 bp, Homo sapien
agaaatgcacttccatacaagctag

SEQ ID NO: 5835018 - DNA, 25 bp, Homo sapien
tgacgtgatgacatcaggacccgag

SEQ ID NO: 5835019 - DNA, 25 bp, Homo sapien
ccgactggccatgagacacgcccac

SEQ ID NO: 5835020 - DNA, 25 bp, Homo sapien
tagggcactcatcaggctgtgctct

SEQ ID NO: 5835021 - DNA, 25 bp, Homo sapien
ttgggcaaataagtacttgaagccc

SEQ ID NO: 5835022 - DNA, 25 bp, Homo sapien
ggctgcatccggcccagggatggtc

SEQ ID NO: 5835023 - DNA, 25 bp, Homo sapien
atacgaaaggaggagccaagagtta

SEQ ID NO: 5835024 - DNA, 25 bp, Homo sapien
ccagccttgccaaatttttatttct

SEQ ID NO: 5835025 - DNA, 25 bp, Homo sapien
gccaagagttaaagaaatctaaaaa

SEQ ID NO: 5835026 - DNA, 25 bp, Homo sapien
tatctcctccactcagaagcacttg

SEQ ID NO: 5835027 - DNA, 25 bp, Homo sapien
gcccttgttccctctaagaaatgca

SEQ ID NO: 5835028 - DNA, 25 bp, Homo sapien
cacatctatcctatgggaaacccaa

SEQ ID NO: 5835029 - DNA, 25 bp, Homo sapien
tgaggctctttttgccacatctcca

SEQ ID NO: 5835030 - DNA, 25 bp, Homo sapien
cagggatggtctcttcacagtctgt

SEQ ID NO: 5835031 - DNA, 25 bp, Homo sapien
ccactcagaagcacttgcccttgtt

SEQ ID NO: 5835032 - DNA, 25 bp, Homo sapien
cagttctgccagccttgccaaattt

SEQ ID NO: 5835033 - DNA, 25 bp, Homo sapien
aaatacaaaggacgaggaacagtga

SEQ ID NO: 5835034 - DNA, 25 bp, Homo sapien
agattgcttccctagctgggaagac

SEQ ID NO: 5835035 - DNA, 25 bp, Homo sapien
tttttgccacatctccatctcttag

SEQ ID NO: 5835036 - DNA, 25 bp, Homo sapien
cagacaccacaaatatcttaatgct

SEQ ID NO: 5835037 - DNA, 25 bp, Homo sapien
gcgcccatatgcaaaggcctttctt

SEQ ID NO: 5835038 - DNA, 25 bp, Homo sapien
gaaacccaaatagatgggctaacaa

SEQ ID NO: 5835039 - DNA, 25 bp, Homo sapien
tgtgcctgcagtgaggcttgtcata

SEQ ID NO: 5835040 - DNA, 25 bp, Homo sapien
gtctccttttcagctggtcttggca

SEQ ID NO: 5835041 - DNA, 25 bp, Homo sapien
aatggggacagtggctgcatccggc

SEQ ID NO: 5835042 - DNA, 25 bp, Homo sapien
taagattgcttccctagctgggaag

SEQ ID NO: 5835043 - DNA, 25 bp, Homo sapien
ttgttccctctaagaaatgcacttc

SEQ ID NO: 5835044 - DNA, 25 bp, Homo sapien
agtctgccccgggaccacactatag

SEQ ID NO: 5835045 - DNA, 25 bp, Homo sapien
gacacgcccaccagtctgccccggg

SEQ ID NO: 5835046 - DNA, 25 bp, Homo sapien
tcctccactcagaagcacttgccct

SEQ ID NO: 5835047 - DNA, 25 bp, Homo sapien
gggacagtggctgcatccggcccag

SEQ ID NO: 5835048 - DNA, 25 bp, Homo sapien
tggacttaagattgcttccctagct

SEQ ID NO: 5835049 - DNA, 25 bp, Homo sapien
gagtgatgtggaaaacatgggcgag

SEQ ID NO: 5835050 - DNA, 25 bp, Homo sapien
ccagtctgccccgggaccacactat

SEQ ID NO: 5835051 - DNA, 25 bp, Homo sapien
agccacacatcatcctagttgttct

SEQ ID NO: 5835052 - DNA, 25 bp, Homo sapien
tcagaggatgaagactaatactaac

SEQ ID NO: 5835053 - DNA, 25 bp, Homo sapien
ttcttccagcttaactctgggtgtg

SEQ ID NO: 5835054 - DNA, 25 bp, Homo sapien
catgaggctctttttgccacatctc

SEQ ID NO: 5835055 - DNA, 25 bp, Homo sapien
accactcggccaggctggcatgagg

SEQ ID NO: 5835056 - DNA, 25 bp, Homo sapien
taagaaatacaaaggacgaggaaca

SEQ ID NO: 5835057 - DNA, 25 bp, Homo sapien
tgctttgggcaaataagtacttgaa

SEQ ID NO: 5835058 - DNA, 25 bp, Homo sapien
tttgccacatctccatctcttagac

SEQ ID NO: 5835059 - DNA, 25 bp, Homo sapien
ctcttcacagtctgtggaggcaaga

SEQ ID NO: 5835060 - DNA, 25 bp, Homo sapien
aagagagggtttggggagtagctcc

SEQ ID NO: 5835061 - DNA, 25 bp, Homo sapien
cattgcaggtacccccttttccagt

SEQ ID NO: 5835062 - DNA, 25 bp, Homo sapien
cgtggacttaagattgcttccctag

SEQ ID NO: 5835063 - DNA, 25 bp, Homo sapien
ctatgggaaacccaaatagatgggc

SEQ ID NO: 5835064 - DNA, 25 bp, Homo sapien
cgaggaacagtgagcctgagaaagt

SEQ ID NO: 5835065 - DNA, 25 bp, Homo sapien
ggtacccccttttccagttgcgagc

SEQ ID NO: 5835066 - DNA, 25 bp, Homo sapien
ctttcttaggcacatctatcctatg

SEQ ID NO: 5835067 - DNA, 25 bp, Homo sapien
actcagaagcacttgcccttgttcc

SEQ ID NO: 5835068 - DNA, 25 bp, Homo sapien
gagagggtttggggagtagctcctg

SEQ ID NO: 5835069 - DNA, 25 bp, Homo sapien
gcaaataagtacttgaagcccctta

SEQ ID NO: 5835070 - DNA, 25 bp, Homo sapien
ctaacaatataaaggtctccttttc

SEQ ID NO: 5835071 - DNA, 25 bp, Homo sapien
ctggccatgagacacgcccaccagt

SEQ ID NO: 5835072 - DNA, 25 bp, Homo sapien
tccagcttaactctgggtgtgagac

SEQ ID NO: 5835073 - DNA, 25 bp, Homo sapien
cagcttaactctgggtgtgagactt

SEQ ID NO: 5835074 - DNA, 25 bp, Homo sapien
cttccatcactgacctctatgccat

SEQ ID NO: 5835075 - DNA, 25 bp, Homo sapien
gcaggtacccccttttccagttgcg

SEQ ID NO: 5835076 - DNA, 25 bp, Homo sapien
gccgtggacttaagattgcttccct

SEQ ID NO: 5835077 - DNA, 25 bp, Homo sapien
aaaggcctttcttaggcacatctat

SEQ ID NO: 5835078 - DNA, 25 bp, Homo sapien
cagttctgcagcccctcatctcaga

SEQ ID NO: 5835079 - DNA, 25 bp, Homo sapien
ccacactatagggcactcatcaggc

SEQ ID NO: 5835080 - DNA, 25 bp, Homo sapien
tccctctaagaaatgcacttccata

SEQ ID NO: 5835081 - DNA, 25 bp, Homo sapien
tgagcctgagaaagtacggcaagag

SEQ ID NO: 5835082 - DNA, 25 bp, Homo sapien
cactcggccaggctggcatgaggct

SEQ ID NO: 5835083 - DNA, 25 bp, Homo sapien
gggtttggggagtagctcctgtcac

SEQ ID NO: 5835084 - DNA, 25 bp, Homo sapien
ccaggttttcaaagttgtttatctc

SEQ ID NO: 5835085 - DNA, 25 bp, Homo sapien
atctccatctcttagacagttctgc

SEQ ID NO: 5835086 - DNA, 25 bp, Homo sapien
ttaggctgtgcaaacattgcaggta

SEQ ID NO: 5835087 - DNA, 25 bp, Homo sapien
catctcagaggatgaagactaatac

SEQ ID NO: 5835088 - DNA, 25 bp, Homo sapien
atatgcaaaggcctttcttaggcac

SEQ ID NO: 5835089 - DNA, 25 bp, Homo sapien
tggtcttggcagaggaggccaggtt

SEQ ID NO: 5835090 - DNA, 25 bp, Homo sapien
atccggcccagggatggtctcttca

SEQ ID NO: 5835091 - DNA, 25 bp, Homo sapien
aggagccaagagttaaagaaatcta

SEQ ID NO: 5835092 - DNA, 25 bp, Homo sapien
ctagttgttctgtaatggggacagt

SEQ ID NO: 5835093 - DNA, 25 bp, Homo sapien
aatagatgggctaacaatataaagg

SEQ ID NO: 5835094 - DNA, 25 bp, Homo sapien
atgggcgagctgatacgaaaggagg

SEQ ID NO: 5835095 - DNA, 25 bp, Homo sapien
cagtggctgcatccggcccagggat

SEQ ID NO: 5835096 - DNA, 25 bp, Homo sapien
acttgaagccccttagaggctctgt

SEQ ID NO: 5835097 - DNA, 25 bp, Homo sapien
gctggtcttggcagaggaggccagg

SEQ ID NO: 5835098 - DNA, 25 bp, Homo sapien
gcgctgggaagatgacgtgatgaca

SEQ ID NO: 5835099 - DNA, 25 bp, Homo sapien
aggacgaggaacagtgagcctgaga

SEQ ID NO: 5835100 - DNA, 25 bp, Homo sapien
gttctgccagccttgccaaattttt

SEQ ID NO: 5835101 - DNA, 25 bp, Homo sapien
gggtgtgagacttccatcactgacc

SEQ ID NO: 5835102 - DNA, 25 bp, Homo sapien
agaagcacttgcccttgttccctct

SEQ ID NO: 5835103 - DNA, 25 bp, Homo sapien
gggcaaataagtacttgaagcccct

SEQ ID NO: 5835104 - DNA, 25 bp, Homo sapien
tgggaagatgacgtgatgacatcag

SEQ ID NO: 5835105 - DNA, 25 bp, Homo sapien
tgcaaacattgcaggtacccccttt

SEQ ID NO: 5835106 - DNA, 25 bp, Homo sapien
gcaagagagtgatgtggaaaacatg

SEQ ID NO: 5835107 - DNA, 25 bp, Homo sapien
agaggaggccaggttttcaaagttg

SEQ ID NO: 5835108 - DNA, 25 bp, Homo sapien
atcttaatgcttcaccgactggcca

SEQ ID NO: 5835109 - DNA, 25 bp, Homo sapien
gcacttccatacaagctagctgggg

SEQ ID NO: 5835110 - DNA, 25 bp, Homo sapien
ttctgtaatggggacagtggctgca

SEQ ID NO: 5835111 - DNA, 25 bp, Homo sapien
cgcccaccagtctgccccgggacca

SEQ ID NO: 5835112 - DNA, 25 bp, Homo sapien
aacactgagttgctttgggcaaata

SEQ ID NO: 5835113 - DNA, 25 bp, Homo sapien
ttagaggctctgtgtgcctgcagtg

SEQ ID NO: 5835114 - DNA, 25 bp, Homo sapien
tgtttatctcctccactcagaagca

SEQ ID NO: 5835115 - DNA, 25 bp, Homo sapien
cttggcagaggaggccaggttttca

SEQ ID NO: 5835116 - DNA, 25 bp, Homo sapien
agaaagtacggcaagagagtgatgt

SEQ ID NO: 5835117 - DNA, 25 bp, Homo sapien
gtgctcttaggctgtgcaaacattg

SEQ ID NO: 5835118 - DNA, 25 bp, Homo sapien
caatataaaggtctccttttcagct

SEQ ID NO: 5835119 - DNA, 25 bp, Homo sapien
ctgtaatggggacagtggctgcatc

SEQ ID NO: 5835120 - DNA, 25 bp, Homo sapien
agtacggcaagagagtgatgtggaa

SEQ ID NO: 5835121 - DNA, 25 bp, Homo sapien
tttccagttgcgagccacacatcat

SEQ ID NO: 5835122 - DNA, 25 bp, Homo sapien
ccctcatctcagaggatgaagacta

SEQ ID NO: 5835123 - DNA, 25 bp, Homo sapien
cttaggcacatctatcctatgggaa

SEQ ID NO: 5835124 - DNA, 25 bp, Homo sapien
tccctagctgggaagacatcgcgct

SEQ ID NO: 5835125 - DNA, 25 bp, Homo sapien
gatgacatcaggacccgaggactct

SEQ ID NO: 5835126 - DNA, 25 bp, Homo sapien
gccaaatttttatttcttccagctt

SEQ ID NO: 5835127 - DNA, 25 bp, Homo sapien
gaacagtgagcctgagaaagtacgg

SEQ ID NO: 5835128 - DNA, 25 bp, Homo sapien
aagctctggcgcccatatgcaaagg

SEQ ID NO: 5835129 - DNA, 25 bp, Homo sapien
ccatgagacacgcccaccagtctgc

SEQ ID NO: 5835130 - DNA, 25 bp, Homo sapien
cggccaggctggcatgaggctcttt

SEQ ID NO: 5835131 - DNA, 25 bp, Homo sapien
gttgctttgggcaaataagtacttg

SEQ ID NO: 5835132 - DNA, 25 bp, Homo sapien
aaatatcttaatgcttcaccgactg

SEQ ID NO: 5835133 - DNA, 25 bp, Homo sapien
ggcttgtcataagctctggcgccca

SEQ ID NO: 5835134 - DNA, 25 bp, Homo sapien
ggttttcaaagttgtttatctcctc

SEQ ID NO: 5835135 - DNA, 25 bp, Homo sapien
gttccctctaagaaatgcacttcca

SEQ ID NO: 5835136 - DNA, 25 bp, Homo sapien
gagtggtaagaaatacaaaggacga

SEQ ID NO: 5835137 - DNA, 25 bp, Homo sapien
taagaaatgcacttccatacaagct

SEQ ID NO: 5835138 - DNA, 25 bp, Homo sapien
tctaagaaatgcacttccatacaag

SEQ ID NO: 5835139 - DNA, 25 bp, Homo sapien
gcactcatcaggctgtgctcttagg

SEQ ID NO: 5835140 - DNA, 25 bp, Homo sapien
gaccacactatagggcactcatcag

SEQ ID NO: 5835141 - DNA, 25 bp, Homo sapien
catctatcctatgggaaacccaaat

SEQ ID NO: 5835142 - DNA, 25 bp, Homo sapien
gacccagttctgccagccttgccaa

SEQ ID NO: 5835143 - DNA, 25 bp, Homo sapien
ctgagtggtaagaaatacaaaggac

SEQ ID NO: 5835144 - DNA, 25 bp, Homo sapien
tctcagaaccaacaccaccactcgg

SEQ ID NO: 5835145 - DNA, 25 bp, Homo sapien
tgtgcaaacattgcaggtaccccct

SEQ ID NO: 5835146 - DNA, 25 bp, Homo sapien
caccaccactcggccaggctggcat

SEQ ID NO: 5835147 - DNA, 25 bp, Homo sapien
ttcttaggcacatctatcctatggg

SEQ ID NO: 5835148 - DNA, 25 bp, Homo sapien
tgccccgggaccacactatagggca

SEQ ID NO: 5835149 - DNA, 25 bp, Homo sapien
aggatgaagactaatactaactcgc

SEQ ID NO: 5835150 - DNA, 25 bp, Homo sapien
aagtacttgaagccccttagaggct

SEQ ID NO: 5835151 - DNA, 25 bp, Homo sapien
caggacccgaggactctggacccag

SEQ ID NO: 5835152 - DNA, 25 bp, Homo sapien
aagcacttgcccttgttccctctaa

SEQ ID NO: 5835153 - DNA, 25 bp, Homo sapien
gacttaagattgcttccctagctgg

SEQ ID NO: 5835154 - DNA, 25 bp, Homo sapien
gtgatgacatcaggacccgaggact

SEQ ID NO: 5835155 - DNA, 25 bp, Homo sapien
cctagctgggaagacatcgcgctgg

SEQ ID NO: 5835156 - DNA, 25 bp, Homo sapien
agccttgccaaatttttatttcttc

SEQ ID NO: 5835157 - DNA, 25 bp, Homo sapien
tctgtggaggcaagagagggtttgg

SEQ ID NO: 5835158 - DNA, 25 bp, Homo sapien
tgacatcaggacccgaggactctgg

SEQ ID NO: 5835159 - DNA, 25 bp, Homo sapien
ccaacaccaccactcggccaggctg

SEQ ID NO: 5835160 - DNA, 25 bp, Homo sapien
ctccactcagaagcacttgcccttg

SEQ ID NO: 5835161 - DNA, 25 bp, Homo sapien
cggcaagagagtgatgtggaaaaca

SEQ ID NO: 5835162 - DNA, 25 bp, Homo sapien
gggcactcatcaggctgtgctctta

SEQ ID NO: 5835163 - DNA, 25 bp, Homo sapien
catcactgacctctatgccattgct

SEQ ID NO: 5835164 - DNA, 25 bp, Homo sapien
gcttaactctgggtgtgagacttcc

SEQ ID NO: 5835165 - DNA, 25 bp, Homo sapien
ctcagacaccacaaatatcttaatg

SEQ ID NO: 5835166 - DNA, 25 bp, Homo sapien
agccataggccgtggacttaagatt

SEQ ID NO: 5835167 - DNA, 25 bp, Homo sapien
ggtaagaaatacaaaggacgaggaa

SEQ ID NO: 5835168 - DNA, 25 bp, Homo sapien
agaggctctgtgtgcctgcagtgag

SEQ ID NO: 5835169 - DNA, 25 bp, Homo sapien
tgatacgaaaggaggagccaagagt

SEQ ID NO: 5835170 - DNA, 25 bp, Homo sapien
tggggacagtggctgcatccggccc

SEQ ID NO: 5835171 - DNA, 25 bp, Homo sapien
tccagttgcgagccacacatcatcc

SEQ ID NO: 5835172 - DNA, 25 bp, Homo sapien
taggcacatctatcctatgggaaac

SEQ ID NO: 5835173 - DNA, 25 bp, Homo sapien
acaaaggacgaggaacagtgagcct

SEQ ID NO: 5835174 - DNA, 25 bp, Homo sapien
gagttaaagaaatctaaaaacactg

SEQ ID NO: 5835175 - DNA, 25 bp, Homo sapien
agaaccaacaccaccactcggccag

SEQ ID NO: 5835176 - DNA, 25 bp, Homo sapien
agccccttagaggctctgtgtgcct

SEQ ID NO: 5835177 - DNA, 25 bp, Homo sapien
gctcttaggctgtgcaaacattgca

SEQ ID NO: 5835178 - DNA, 25 bp, Homo sapien
ctgggtgtgagacttccatcactga

SEQ ID NO: 5835179 - DNA, 25 bp, Homo sapien
tcctatgggaaacccaaatagatgg

SEQ ID NO: 5835180 - DNA, 25 bp, Homo sapien
tcgcgctgggaagatgacgtgatga

SEQ ID NO: 5835181 - DNA, 25 bp, Homo sapien
aaaggacgaggaacagtgagcctga

SEQ ID NO: 5835182 - DNA, 25 bp, Homo sapien
cctgagaaagtacggcaagagagtg

SEQ ID NO: 5835183 - DNA, 25 bp, Homo sapien
ctgtgctcttaggctgtgcaaacat

SEQ ID NO: 5835184 - DNA, 25 bp, Homo sapien
caggctgtgctcttaggctgtgcaa

SEQ ID NO: 5835185 - DNA, 25 bp, Homo sapien
aggctgtgcaaacattgcaggtacc

SEQ ID NO: 5835186 - DNA, 25 bp, Homo sapien
acagtctgtggaggcaagagagggt

SEQ ID NO: 5835187 - DNA, 25 bp, Homo sapien
cagcccctcatctcagaggatgaag

SEQ ID NO: 5835188 - DNA, 25 bp, Homo sapien
acactatagggcactcatcaggctg

SEQ ID NO: 5835189 - DNA, 25 bp, Homo sapien
gcacttgcccttgttccctctaaga

SEQ ID NO: 5835190 - DNA, 25 bp, Homo sapien
caaagttgtttatctcctccactca

SEQ ID NO: 5835191 - DNA, 25 bp, Homo sapien
ttaactctgggtgtgagacttccat

SEQ ID NO: 5835192 - DNA, 25 bp, Homo sapien
caccacaaatatcttaatgcttcac

SEQ ID NO: 5835193 - DNA, 25 bp, Homo sapien
ctcggccaggctggcatgaggctct

SEQ ID NO: 5835194 - DNA, 25 bp, Homo sapien
tagctgggaagacatcgcgctggga

SEQ ID NO: 5835195 - DNA, 25 bp, Homo sapien
tcttaggctgtgcaaacattgcagg

SEQ ID NO: 5835196 - DNA, 25 bp, Homo sapien
cctgcagtgaggcttgtcataagct

SEQ ID NO: 5835197 - DNA, 25 bp, Homo sapien
ggccaggttttcaaagttgtttatc

SEQ ID NO: 5835198 - DNA, 25 bp, Homo sapien
tactaactcgctgagtggtaagaaa

SEQ ID NO: 5835199 - DNA, 25 bp, Homo sapien
tccatcactgacctctatgccattg

SEQ ID NO: 5835200 - DNA, 25 bp, Homo sapien
aaccaacaccaccactcggccaggc

SEQ ID NO: 5835201 - DNA, 25 bp, Homo sapien
atatcttaatgcttcaccgactggc

SEQ ID NO: 5835202 - DNA, 25 bp, Homo sapien
gaggcttgtcataagctctggcgcc

SEQ ID NO: 5835203 - DNA, 25 bp, Homo sapien
tcagaaccaacaccaccactcggcc

SEQ ID NO: 5835204 - DNA, 25 bp, Homo sapien
tggaaaacatgggcgagctgatacg

SEQ ID NO: 5835205 - DNA, 25 bp, Homo sapien
aaacatgggcgagctgatacgaaag

SEQ ID NO: 5835206 - DNA, 25 bp, Homo sapien
agcctgagaaagtacggcaagagag

SEQ ID NO: 5835207 - DNA, 25 bp, Homo sapien
gactaatactaactcgctgagtggt

SEQ ID NO: 5835208 - DNA, 25 bp, Homo sapien
cccagggatggtctcttcacagtct

SEQ ID NO: 5835209 - DNA, 25 bp, Homo sapien
gagccaagagttaaagaaatctaaa

SEQ ID NO: 5835210 - DNA, 25 bp, Homo sapien
ttgttctgtaatggggacagtggct

SEQ ID NO: 5835211 - DNA, 25 bp, Homo sapien
cttagacagttctgcagcccctcat

SEQ ID NO: 5835212 - DNA, 25 bp, Homo sapien
cccttttccagttgcgagccacaca

SEQ ID NO: 5835213 - DNA, 25 bp, Homo sapien
cttaatgcttcaccgactggccatg

SEQ ID NO: 5835214 - DNA, 25 bp, Homo sapien
gatgtggaaaacatgggcgagctga

SEQ ID NO: 5835215 - DNA, 25 bp, Homo sapien
agaaatacaaaggacgaggaacagt

SEQ ID NO: 5835216 - DNA, 25 bp, Homo sapien
gctgggaagatgacgtgatgacatc

SEQ ID NO: 5835217 - DNA, 25 bp, Homo sapien
gcttcaccgactggccatgagacac

SEQ ID NO: 5835218 - DNA, 25 bp, Homo sapien
tgcgagccacacatcatcctagttg

SEQ ID NO: 5835219 - DNA, 25 bp, Homo sapien
cctctaagaaatgcacttccataca

SEQ ID NO: 5835220 - DNA, 25 bp, Homo sapien
ctgagttgctttgggcaaataagta

SEQ ID NO: 5835221 - DNA, 25 bp, Homo sapien
tgagaaagtacggcaagagagtgat

SEQ ID NO: 5835222 - DNA, 25 bp, Homo sapien
cgctgagtggtaagaaatacaaagg

SEQ ID NO: 5835223 - DNA, 25 bp, Homo sapien
gtgatgtggaaaacatgggcgagct

SEQ ID NO: 5835224 - DNA, 25 bp, Homo sapien
ctggcatgaggctctttttgccaca

SEQ ID NO: 5835225 - DNA, 25 bp, Homo sapien
ccttagaggctctgtgtgcctgcag

SEQ ID NO: 5835226 - DNA, 25 bp, Homo sapien
ccataggccgtggacttaagattgc

SEQ ID NO: 5835227 - DNA, 25 bp, Homo sapien
tgggctaacaatataaaggtctcct

SEQ ID NO: 5835228 - DNA, 25 bp, Homo sapien
cagttgcgagccacacatcatccta

SEQ ID NO: 5835229 - DNA, 25 bp, Homo sapien
gggaaacccaaatagatgggctaac

SEQ ID NO: 5835230 - DNA, 25 bp, Homo sapien
gaggactctggacccagttctgcca

SEQ ID NO: 5835231 - DNA, 25 bp, Homo sapien
tggtgttggttctgagaggtgacag

SEQ ID NO: 5835232 - DNA, 25 bp, Homo sapien
cctctgccaagaccagctgaaaagg

SEQ ID NO: 5835233 - DNA, 25 bp, Homo sapien
actgtccccattacagaacaactag

SEQ ID NO: 5835234 - DNA, 25 bp, Homo sapien
tttaactcttggctcctcctttcgt

SEQ ID NO: 5835235 - DNA, 25 bp, Homo sapien
gcaaaaagagcctcatgccagcctg

SEQ ID NO: 5835236 - DNA, 25 bp, Homo sapien
aactgtctaagagatggagatgtgg

SEQ ID NO: 5835237 - DNA, 25 bp, Homo sapien
ggcaaggctggcagaactgggtcca

SEQ ID NO: 5835238 - DNA, 25 bp, Homo sapien
ggcatagaggtcagtgatggaagtc

SEQ ID NO: 5835239 - DNA, 25 bp, Homo sapien
ctcttgccgtactttctcaggctca

SEQ ID NO: 5835240 - DNA, 25 bp, Homo sapien
tttgaaaacctggcctcctctgcca

SEQ ID NO: 5835241 - DNA, 25 bp, Homo sapien
gtctcacacccagagttaagctgga

SEQ ID NO: 5835242 - DNA, 25 bp, Homo sapien
tttgcccaaagcaactcagtgtttt

SEQ ID NO: 5835243 - DNA, 25 bp, Homo sapien
gaggagataaacaactttgaaaacc

SEQ ID NO: 5835244 - DNA, 25 bp, Homo sapien
tatcagctcgcccatgttttccaca

SEQ ID NO: 5835245 - DNA, 25 bp, Homo sapien
catttcttagagggaacaagggcaa

SEQ ID NO: 5835246 - DNA, 25 bp, Homo sapien
tgagaggtgacaggagctactcccc

SEQ ID NO: 5835247 - DNA, 25 bp, Homo sapien
cactctcttgccgtactttctcagg

SEQ ID NO: 5835248 - DNA, 25 bp, Homo sapien
tgagatgaggggctgcagaactgtc

SEQ ID NO: 5835249 - DNA, 25 bp, Homo sapien
aagagatggagatgtggcaaaaaga

SEQ ID NO: 5835250 - DNA, 25 bp, Homo sapien
tgtggtgtctgagccaagcaatggc

SEQ ID NO: 5835251 - DNA, 25 bp, Homo sapien
tatgggcgccagagcttatgacaag

SEQ ID NO: 5835252 - DNA, 25 bp, Homo sapien
aggagacctttatattgttagccca

SEQ ID NO: 5835253 - DNA, 25 bp, Homo sapien
cgcaactggaaaagggggtacctgc

SEQ ID NO: 5835254 - DNA, 25 bp, Homo sapien
gggcttcaagtacttatttgcccaa

SEQ ID NO: 5835255 - DNA, 25 bp, Homo sapien
gaagcattaagatatttgtggtgtc

SEQ ID NO: 5835256 - DNA, 25 bp, Homo sapien
gagttaagctggaagaaataaaaat

SEQ ID NO: 5835257 - DNA, 25 bp, Homo sapien
catggccagtcggtgaagcattaag

SEQ ID NO: 5835258 - DNA, 25 bp, Homo sapien
tctgagatgaggggctgcagaactg

SEQ ID NO: 5835259 - DNA, 25 bp, Homo sapien
caaggctggcagaactgggtccaga

SEQ ID NO: 5835260 - DNA, 25 bp, Homo sapien
agcttgtatggaagtgcatttctta

SEQ ID NO: 5835261 - DNA, 25 bp, Homo sapien
ggcgccagagcttatgacaagcctc

SEQ ID NO: 5835262 - DNA, 25 bp, Homo sapien
actaggatgatgtgtggctcgcaac

SEQ ID NO: 5835263 - DNA, 25 bp, Homo sapien
tgtatggaagtgcatttcttagagg

SEQ ID NO: 5835264 - DNA, 25 bp, Homo sapien
gaagtgcatttcttagagggaacaa

SEQ ID NO: 5835265 - DNA, 25 bp, Homo sapien
gggcagactggtgggcgtgtctcat

SEQ ID NO: 5835266 - DNA, 25 bp, Homo sapien
gagatgtggcaaaaagagcctcatg

SEQ ID NO: 5835267 - DNA, 25 bp, Homo sapien
tgtggctcgcaactggaaaaggggg

SEQ ID NO: 5835268 - DNA, 25 bp, Homo sapien
tagtattagtcttcatcctctgaga

SEQ ID NO: 5835269 - DNA, 25 bp, Homo sapien
aagatatttgtggtgtctgagccaa

SEQ ID NO: 5835270 - DNA, 25 bp, Homo sapien
ccagctagcttgtatggaagtgcat

SEQ ID NO: 5835271 - DNA, 25 bp, Homo sapien
gagtggtggtgttggttctgagagg

SEQ ID NO: 5835272 - DNA, 25 bp, Homo sapien
ttgcctccacagactgtgaagagac

SEQ ID NO: 5835273 - DNA, 25 bp, Homo sapien
ctgcagaactgtctaagagatggag

SEQ ID NO: 5835274 - DNA, 25 bp, Homo sapien
ccagagtcctcgggtcctgatgtca

SEQ ID NO: 5835275 - DNA, 25 bp, Homo sapien
cccaaagcaactcagtgtttttaga

SEQ ID NO: 5835276 - DNA, 25 bp, Homo sapien
agccactgtccccattacagaacaa

SEQ ID NO: 5835277 - DNA, 25 bp, Homo sapien
acagagcctctaaggggcttcaagt

SEQ ID NO: 5835278 - DNA, 25 bp, Homo sapien
tttcttaccactcagcgagttagta

SEQ ID NO: 5835279 - DNA, 25 bp, Homo sapien
atgccagcctggccgagtggtggtg

SEQ ID NO: 5835280 - DNA, 25 bp, Homo sapien
gtggtggtgttggttctgagaggtg

SEQ ID NO: 5835281 - DNA, 25 bp, Homo sapien
actggtgggcgtgtctcatggccag

SEQ ID NO: 5835282 - DNA, 25 bp, Homo sapien
agtgcatttcttagagggaacaagg

SEQ ID NO: 5835283 - DNA, 25 bp, Homo sapien
cagagttaagctggaagaaataaaa

SEQ ID NO: 5835284 - DNA, 25 bp, Homo sapien
actttgaaaacctggcctcctctgc

SEQ ID NO: 5835285 - DNA, 25 bp, Homo sapien
cttcatcctctgagatgaggggctg

SEQ ID NO: 5835286 - DNA, 25 bp, Homo sapien
aaaacctggcctcctctgccaagac

SEQ ID NO: 5835287 - DNA, 25 bp, Homo sapien
agcttatgacaagcctcactgcagg

SEQ ID NO: 5835288 - DNA, 25 bp, Homo sapien
ctcagtgtttttagatttctttaac

SEQ ID NO: 5835289 - DNA, 25 bp, Homo sapien
tctaaggggcttcaagtacttattt

SEQ ID NO: 5835290 - DNA, 25 bp, Homo sapien
ccagcgcgatgtcttcccagctagg

SEQ ID NO: 5835291 - DNA, 25 bp, Homo sapien
ctcgcccatgttttccacatcactc

SEQ ID NO: 5835292 - DNA, 25 bp, Homo sapien
ctgagccaagcaatggcatagaggt

SEQ ID NO: 5835293 - DNA, 25 bp, Homo sapien
gatggagatgtggcaaaaagagcct

SEQ ID NO: 5835294 - DNA, 25 bp, Homo sapien
atcctctgagatgaggggctgcaga

SEQ ID NO: 5835295 - DNA, 25 bp, Homo sapien
tgtggcaaaaagagcctcatgccag

SEQ ID NO: 5835296 - DNA, 25 bp, Homo sapien
gggtttcccataggatagatgtgcc

SEQ ID NO: 5835297 - DNA, 25 bp, Homo sapien
ttaagatatttgtggtgtctgagcc

SEQ ID NO: 5835298 - DNA, 25 bp, Homo sapien
gttggttctgagaggtgacaggagc

SEQ ID NO: 5835299 - DNA, 25 bp, Homo sapien
aagaaaggcctttgcatatgggcgc

SEQ ID NO: 5835300 - DNA, 25 bp, Homo sapien
gagacctttatattgttagcccatc

SEQ ID NO: 5835301 - DNA, 25 bp, Homo sapien
tcttagagggaacaagggcaagtgc

SEQ ID NO: 5835302 - DNA, 25 bp, Homo sapien
agcctctaaggggcttcaagtactt

SEQ ID NO: 5835303 - DNA, 25 bp, Homo sapien
gaaaggcctttgcatatgggcgcca

SEQ ID NO: 5835304 - DNA, 25 bp, Homo sapien
gcccatctatttgggtttcccatag

SEQ ID NO: 5835305 - DNA, 25 bp, Homo sapien
cctttatattgttagcccatctatt

SEQ ID NO: 5835306 - DNA, 25 bp, Homo sapien
tggagatgtggcaaaaagagcctca

SEQ ID NO: 5835307 - DNA, 25 bp, Homo sapien
tcctgatgtcatcacgtcatcttcc

SEQ ID NO: 5835308 - DNA, 25 bp, Homo sapien
cctctcttgcctccacagactgtga

SEQ ID NO: 5835309 - DNA, 25 bp, Homo sapien
cactgcaggcacacagagcctctaa

SEQ ID NO: 5835310 - DNA, 25 bp, Homo sapien
tctgccaagaccagctgaaaaggag

SEQ ID NO: 5835311 - DNA, 25 bp, Homo sapien
ccaagaccagctgaaaaggagacct

SEQ ID NO: 5835312 - DNA, 25 bp, Homo sapien
ctccacagactgtgaagagaccatc

SEQ ID NO: 5835313 - DNA, 25 bp, Homo sapien
cgccagagcttatgacaagcctcac

SEQ ID NO: 5835314 - DNA, 25 bp, Homo sapien
ggagctactccccaaaccctctctt

SEQ ID NO: 5835315 - DNA, 25 bp, Homo sapien
tggaagaaataaaaatttggcaagg

SEQ ID NO: 5835316 - DNA, 25 bp, Homo sapien
gatgagtgccctatagtgtggtccc

SEQ ID NO: 5835317 - DNA, 25 bp, Homo sapien
caactttgaaaacctggcctcctct

SEQ ID NO: 5835318 - DNA, 25 bp, Homo sapien
ccgtactttctcaggctcactgttc

SEQ ID NO: 5835319 - DNA, 25 bp, Homo sapien
aaagagcctcatgccagcctggccg

SEQ ID NO: 5835320 - DNA, 25 bp, Homo sapien
cattacagaacaactaggatgatgt

SEQ ID NO: 5835321 - DNA, 25 bp, Homo sapien
catagaggtcagtgatggaagtctc

SEQ ID NO: 5835322 - DNA, 25 bp, Homo sapien
agctgaaaaggagacctttatattg

SEQ ID NO: 5835323 - DNA, 25 bp, Homo sapien
acagactgtgaagagaccatccctg

SEQ ID NO: 5835324 - DNA, 25 bp, Homo sapien
agagcctctaaggggcttcaagtac

SEQ ID NO: 5835325 - DNA, 25 bp, Homo sapien
actggaaaagggggtacctgcaatg

SEQ ID NO: 5835326 - DNA, 25 bp, Homo sapien
tacttatttgcccaaagcaactcag

SEQ ID NO: 5835327 - DNA, 25 bp, Homo sapien
taactcttggctcctcctttcgtat

SEQ ID NO: 5835328 - DNA, 25 bp, Homo sapien
ctaagaaaggcctttgcatatgggc

SEQ ID NO: 5835329 - DNA, 25 bp, Homo sapien
tgacaagcctcactgcaggcacaca

SEQ ID NO: 5835330 - DNA, 25 bp, Homo sapien
agtcctcgggtcctgatgtcatcac

SEQ ID NO: 5835331 - DNA, 25 bp, Homo sapien
gctggcagaactgggtccagagtcc

SEQ ID NO: 5835332 - DNA, 25 bp, Homo sapien
tgccctatagtgtggtcccggggca

SEQ ID NO: 5835333 - DNA, 25 bp, Homo sapien
ggctcctcctttcgtatcagctcgc

SEQ ID NO: 5835334 - DNA, 25 bp, Homo sapien
tatttcttaccactcagcgagttag

SEQ ID NO: 5835335 - DNA, 25 bp, Homo sapien
ttgttagcccatctatttgggtttc

SEQ ID NO: 5835336 - DNA, 25 bp, Homo sapien
tgggcgccagagcttatgacaagcc

SEQ ID NO: 5835337 - DNA, 25 bp, Homo sapien
tgccgtactttctcaggctcactgt

SEQ ID NO: 5835338 - DNA, 25 bp, Homo sapien
aaaggagacctttatattgttagcc

SEQ ID NO: 5835339 - DNA, 25 bp, Homo sapien
agatgaggggctgcagaactgtcta

SEQ ID NO: 5835340 - DNA, 25 bp, Homo sapien
tggccagtcggtgaagcattaagat

SEQ ID NO: 5835341 - DNA, 25 bp, Homo sapien
tggtgggcgtgtctcatggccagtc

SEQ ID NO: 5835342 - DNA, 25 bp, Homo sapien
caagtgcttctgagtggaggagata

SEQ ID NO: 5835343 - DNA, 25 bp, Homo sapien
cacgtcatcttcccagcgcgatgtc

SEQ ID NO: 5835344 - DNA, 25 bp, Homo sapien
gcctccacagactgtgaagagacca

SEQ ID NO: 5835345 - DNA, 25 bp, Homo sapien
gtattagtcttcatcctctgagatg

SEQ ID NO: 5835346 - DNA, 25 bp, Homo sapien
gaccatccctgggccggatgcagcc

SEQ ID NO: 5835347 - DNA, 25 bp, Homo sapien
agtgccctatagtgtggtcccgggg

SEQ ID NO: 5835348 - DNA, 25 bp, Homo sapien
gtgcctaagaaaggcctttgcatat

SEQ ID NO: 5835349 - DNA, 25 bp, Homo sapien
atcacgtcatcttcccagcgcgatg

SEQ ID NO: 5835350 - DNA, 25 bp, Homo sapien
gatgtgtggctcgcaactggaaaag

SEQ ID NO: 5835351 - DNA, 25 bp, Homo sapien
gacctttatattgttagcccatcta

SEQ ID NO: 5835352 - DNA, 25 bp, Homo sapien
aaaaagagcctcatgccagcctggc

SEQ ID NO: 5835353 - DNA, 25 bp, Homo sapien
tggtcccggggcagactggtgggcg

SEQ ID NO: 5835354 - DNA, 25 bp, Homo sapien
cctggcctcctctgccaagaccagc

SEQ ID NO: 5835355 - DNA, 25 bp, Homo sapien
atagatgtgcctaagaaaggccttt

SEQ ID NO: 5835356 - DNA, 25 bp, Homo sapien
attagtcttcatcctctgagatgag

SEQ ID NO: 5835357 - DNA, 25 bp, Homo sapien
tgtgtggctcgcaactggaaaaggg

SEQ ID NO: 5835358 - DNA, 25 bp, Homo sapien
agctcgcccatgttttccacatcac

SEQ ID NO: 5835359 - DNA, 25 bp, Homo sapien
tcccagctagggaagcaatcttaag

SEQ ID NO: 5835360 - DNA, 25 bp, Homo sapien
ctatagtgtggtcccggggcagact

SEQ ID NO: 5835361 - DNA, 25 bp, Homo sapien
cgtatcagctcgcccatgttttcca

SEQ ID NO: 5835362 - DNA, 25 bp, Homo sapien
tgaaaacctggcctcctctgccaag

SEQ ID NO: 5835363 - DNA, 25 bp, Homo sapien
agtacttatttgcccaaagcaactc

SEQ ID NO: 5835364 - DNA, 25 bp, Homo sapien
tcgtcctttgtatttcttaccactc

SEQ ID NO: 5835365 - DNA, 25 bp, Homo sapien
cagcctgatgagtgccctatagtgt

SEQ ID NO: 5835366 - DNA, 25 bp, Homo sapien
aagcctcactgcaggcacacagagc

SEQ ID NO: 5835367 - DNA, 25 bp, Homo sapien
tggttctgagaggtgacaggagcta

SEQ ID NO: 5835368 - DNA, 25 bp, Homo sapien
gaccagctgaaaaggagacctttat

SEQ ID NO: 5835369 - DNA, 25 bp, Homo sapien
tatttgtggtgtctgagccaagcaa

SEQ ID NO: 5835370 - DNA, 25 bp, Homo sapien
cacagcctgatgagtgccctatagt

SEQ ID NO: 5835371 - DNA, 25 bp, Homo sapien
accctctcttgcctccacagactgt

SEQ ID NO: 5835372 - DNA, 25 bp, Homo sapien
gcacagcctaagagcacagcctgat

SEQ ID NO: 5835373 - DNA, 25 bp, Homo sapien
caaagcaactcagtgtttttagatt

SEQ ID NO: 5835374 - DNA, 25 bp, Homo sapien
tggtgtctgagccaagcaatggcat

SEQ ID NO: 5835375 - DNA, 25 bp, Homo sapien
tcagctcgcccatgttttccacatc

SEQ ID NO: 5835376 - DNA, 25 bp, Homo sapien
tttatattgttagcccatctatttg

SEQ ID NO: 5835377 - DNA, 25 bp, Homo sapien
tgtgaagagaccatccctgggccgg

SEQ ID NO: 5835378 - DNA, 25 bp, Homo sapien
tatttgcccaaagcaactcagtgtt

SEQ ID NO: 5835379 - DNA, 25 bp, Homo sapien
agtggaggagataaacaactttgaa

SEQ ID NO: 5835380 - DNA, 25 bp, Homo sapien
ctagcttgtatggaagtgcatttct

SEQ ID NO: 5835381 - DNA, 25 bp, Homo sapien
ggtacctgcaatgtttgcacagcct

SEQ ID NO: 5835382 - DNA, 25 bp, Homo sapien
agaggtgacaggagctactccccaa

SEQ ID NO: 5835383 - DNA, 25 bp, Homo sapien
cgatgtcttcccagctagggaagca

SEQ ID NO: 5835384 - DNA, 25 bp, Homo sapien
aagaccagctgaaaaggagaccttt

SEQ ID NO: 5835385 - DNA, 25 bp, Homo sapien
tatgacaagcctcactgcaggcaca

SEQ ID NO: 5835386 - DNA, 25 bp, Homo sapien
ggcctttgcatatgggcgccagagc

SEQ ID NO: 5835387 - DNA, 25 bp, Homo sapien
tggcagaactgggtccagagtcctc

SEQ ID NO: 5835388 - DNA, 25 bp, Homo sapien
ctgatgagtgccctatagtgtggtc

SEQ ID NO: 5835389 - DNA, 25 bp, Homo sapien
cctaagagcacagcctgatgagtgc

SEQ ID NO: 5835390 - DNA, 25 bp, Homo sapien
ggatgatgtgtggctcgcaactgga

SEQ ID NO: 5835391 - DNA, 25 bp, Homo sapien
agggcaagtgcttctgagtggagga

SEQ ID NO: 5835392 - DNA, 25 bp, Homo sapien
tttgtggtgtctgagccaagcaatg

SEQ ID NO: 5835393 - DNA, 25 bp, Homo sapien
agatgtgcctaagaaaggcctttgc

SEQ ID NO: 5835394 - DNA, 25 bp, Homo sapien
ccacagactgtgaagagaccatccc

SEQ ID NO: 5835395 - DNA, 25 bp, Homo sapien
ttaagctggaagaaataaaaatttg

SEQ ID NO: 5835396 - DNA, 25 bp, Homo sapien
ctcagcgagttagtattagtcttca

SEQ ID NO: 5835397 - DNA, 25 bp, Homo sapien
aggctggcagaactgggtccagagt

SEQ ID NO: 5835398 - DNA, 25 bp, Homo sapien
cctctaaggggcttcaagtacttat

SEQ ID NO: 5835399 - DNA, 25 bp, Homo sapien
agcaatggcatagaggtcagtgatg

SEQ ID NO: 5835400 - DNA, 25 bp, Homo sapien
tcaggctcactgttcctcgtccttt

SEQ ID NO: 5835401 - DNA, 25 bp, Homo sapien
agtgcttctgagtggaggagataaa

SEQ ID NO: 5835402 - DNA, 25 bp, Homo sapien
caagcaatggcatagaggtcagtga

SEQ ID NO: 5835403 - DNA, 25 bp, Homo sapien
acagcctaagagcacagcctgatga

SEQ ID NO: 5835404 - DNA, 25 bp, Homo sapien
aaagggggtacctgcaatgtttgca

SEQ ID NO: 5835405 - DNA, 25 bp, Homo sapien
cggtgaagcattaagatatttgtgg

SEQ ID NO: 5835406 - DNA, 25 bp, Homo sapien
ctcctcctttcgtatcagctcgccc

SEQ ID NO: 5835407 - DNA, 25 bp, Homo sapien
caactaggatgatgtgtggctcgca

SEQ ID NO: 5835408 - DNA, 25 bp, Homo sapien
aggcacacagagcctctaaggggct

SEQ ID NO: 5835409 - DNA, 25 bp, Homo sapien
taaggggcttcaagtacttatttgc

SEQ ID NO: 5835410 - DNA, 25 bp, Homo sapien
tctttaactcttggctcctcctttc

SEQ ID NO: 5835411 - DNA, 25 bp, Homo sapien
gtgtctcatggccagtcggtgaagc

SEQ ID NO: 5835412 - DNA, 25 bp, Homo sapien
agaaataaaaatttggcaaggctgg

SEQ ID NO: 5835413 - DNA, 25 bp, Homo sapien
taaacaactttgaaaacctggcctc

SEQ ID NO: 5835414 - DNA, 25 bp, Homo sapien
ggaagcaatcttaagtccacggcct

SEQ ID NO: 5835415 - DNA, 25 bp, Homo sapien
ttacagaacaactaggatgatgtgt

SEQ ID NO: 5835416 - DNA, 25 bp, Homo sapien
cctttgtatttcttaccactcagcg

SEQ ID NO: 5835417 - DNA, 25 bp, Homo sapien
tgcatatgggcgccagagcttatga

SEQ ID NO: 5835418 - DNA, 25 bp, Homo sapien
taggatgatgtgtggctcgcaactg

SEQ ID NO: 5835419 - DNA, 25 bp, Homo sapien
agcctcatgccagcctggccgagtg

SEQ ID NO: 5835420 - DNA, 25 bp, Homo sapien
atccctgggccggatgcagccactg

SEQ ID NO: 5835421 - DNA, 25 bp, Homo sapien
caatggcatagaggtcagtgatgga

SEQ ID NO: 5835422 - DNA, 25 bp, Homo sapien
gcgtgtctcatggccagtcggtgaa

SEQ ID NO: 5835423 - DNA, 25 bp, Homo sapien
gccagtcggtgaagcattaagatat

SEQ ID NO: 5835424 - DNA, 25 bp, Homo sapien
gtttgcacagcctaagagcacagcc

SEQ ID NO: 5835425 - DNA, 25 bp, Homo sapien
cctgcaatgtttgcacagcctaaga

SEQ ID NO: 5835426 - DNA, 25 bp, Homo sapien
atagtgtggtcccggggcagactgg

SEQ ID NO: 5835427 - DNA, 25 bp, Homo sapien
atgtgcctaagaaaggcctttgcat

SEQ ID NO: 5835428 - DNA, 25 bp, Homo sapien
tcctttcgtatcagctcgcccatgt

SEQ ID NO: 5835429 - DNA, 25 bp, Homo sapien
ccagctgaaaaggagacctttatat

SEQ ID NO: 5835430 - DNA, 25 bp, Homo sapien
tgttcctcgtcctttgtatttctta

SEQ ID NO: 5835431 - DNA, 25 bp, Homo sapien
cctcatgccagcctggccgagtggt

SEQ ID NO: 5835432 - DNA, 25 bp, Homo sapien
atgtttgcacagcctaagagcacag

SEQ ID NO: 5835433 - DNA, 25 bp, Homo sapien
cgtcatcttcccagcgcgatgtctt

SEQ ID NO: 5835434 - DNA, 25 bp, Homo sapien
ccctgggccggatgcagccactgtc

SEQ ID NO: 5835435 - DNA, 25 bp, Homo sapien
gcctcctctgccaagaccagctgaa

SEQ ID NO: 5835436 - DNA, 25 bp, Homo sapien
tatattgttagcccatctatttggg

SEQ ID NO: 5835437 - DNA, 25 bp, Homo sapien
gatgtcatcacgtcatcttcccagc

SEQ ID NO: 5835438 - DNA, 25 bp, Homo sapien
tgttttccacatcactctcttgccg

SEQ ID NO: 5835439 - DNA, 25 bp, Homo sapien
cttcccagcgcgatgtcttcccagc

SEQ ID NO: 5835440 - DNA, 25 bp, Homo sapien
gggtccagagtcctcgggtcctgat

SEQ ID NO: 5835441 - DNA, 25 bp, Homo sapien
ttttccacatcactctcttgccgta

SEQ ID NO: 5835442 - DNA, 25 bp, Homo sapien
aggggcttcaagtacttatttgccc

SEQ ID NO: 5835443 - DNA, 25 bp, Homo sapien
tgcaatgtttgcacagcctaagagc

SEQ ID NO: 5835444 - DNA, 25 bp, Homo sapien
tccccattacagaacaactaggatg

SEQ ID NO: 5835445 - DNA, 25 bp, Homo sapien
agcgcgatgtcttcccagctaggga

SEQ ID NO: 5835446 - DNA, 25 bp, Homo sapien
ttcctcgtcctttgtatttcttacc

SEQ ID NO: 5835447 - DNA, 25 bp, Homo sapien
tcatgccagcctggccgagtggtgg

SEQ ID NO: 5835448 - DNA, 25 bp, Homo sapien
tcatcctctgagatgaggggctgca

SEQ ID NO: 5835449 - DNA, 25 bp, Homo sapien
tttctttaactcttggctcctcctt

SEQ ID NO: 5835450 - DNA, 25 bp, Homo sapien
atgtcttcccagctagggaagcaat

SEQ ID NO: 5835451 - DNA, 25 bp, Homo sapien
aaaaatttggcaaggctggcagaac

SEQ ID NO: 5835452 - DNA, 25 bp, Homo sapien
aacctggcctcctctgccaagacca

SEQ ID NO: 5835453 - DNA, 25 bp, Homo sapien
tggcaaaaagagcctcatgccagcc

SEQ ID NO: 5835454 - DNA, 25 bp, Homo sapien
ggaagtctcacacccagagttaagc

SEQ ID NO: 5835455 - DNA, 25 bp, Homo sapien
ccctatagtgtggtcccggggcaga

SEQ ID NO: 5835456 - DNA, 25 bp, Homo sapien
cccattacagaacaactaggatgat

SEQ ID NO: 5835457 - DNA, 25 bp, Homo sapien
actcttggctcctcctttcgtatca

SEQ ID NO: 5835458 - DNA, 25 bp, Homo sapien
agaactgggtccagagtcctcgggt

SEQ ID NO: 5835459 - DNA, 25 bp, Homo sapien
cacacccagagttaagctggaagaa

SEQ ID NO: 5835460 - DNA, 25 bp, Homo sapien
gtctgagccaagcaatggcatagag

SEQ ID NO: 5835461 - DNA, 25 bp, Homo sapien
ttgcacagcctaagagcacagcctg

SEQ ID NO: 5835462 - DNA, 25 bp, Homo sapien
ccagctagggaagcaatcttaagtc

SEQ ID NO: 5835463 - DNA, 25 bp, Homo sapien
aaatttggcaaggctggcagaactg

SEQ ID NO: 5835464 - DNA, 25 bp, Homo sapien
ctagggaagcaatcttaagtccacg

SEQ ID NO: 5835465 - DNA, 25 bp, Homo sapien
tgtcatcacgtcatcttcccagcgc

SEQ ID NO: 5835466 - DNA, 25 bp, Homo sapien
tcatcacgtcatcttcccagcgcga

SEQ ID NO: 5835467 - DNA, 25 bp, Homo sapien
ctcgggtcctgatgtcatcacgtca

SEQ ID NO: 5835468 - DNA, 25 bp, Homo sapien
gtgtctgagccaagcaatggcatag

SEQ ID NO: 5835469 - DNA, 25 bp, Homo sapien
cactcagcgagttagtattagtctt

SEQ ID NO: 5835470 - DNA, 25 bp, Homo sapien
cagtcggtgaagcattaagatattt

SEQ ID NO: 5835471 - DNA, 25 bp, Homo sapien
agagcacagcctgatgagtgcccta

SEQ ID NO: 5835472 - DNA, 25 bp, Homo sapien
accactcagcgagttagtattagtc

SEQ ID NO: 5835473 - DNA, 25 bp, Homo sapien
ttgggtttcccataggatagatgtg

SEQ ID NO: 5835474 - DNA, 25 bp, Homo sapien
actttctcaggctcactgttcctcg

SEQ ID NO: 5835475 - DNA, 25 bp, Homo sapien
aatcttaagtccacggcctatggct

SEQ ID NO: 5835476 - DNA, 25 bp, Homo sapien
gttagcccatctatttgggtttccc

SEQ ID NO: 5835477 - DNA, 25 bp, Homo sapien
gcgagttagtattagtcttcatcct

SEQ ID NO: 5835478 - DNA, 25 bp, Homo sapien
gggcgtgtctcatggccagtcggtg

SEQ ID NO: 5835479 - DNA, 25 bp, Homo sapien
gcctggccgagtggtggtgttggtt

SEQ ID NO: 5835480 - DNA, 25 bp, Homo sapien
ggggtacctgcaatgtttgcacagc

SEQ ID NO: 5835481 - DNA, 25 bp, Homo sapien
tctcttgcctccacagactgtgaag

SEQ ID NO: 5835482 - DNA, 25 bp, Homo sapien
acaagcctcactgcaggcacacaga

SEQ ID NO: 5835483 - DNA, 25 bp, Homo sapien
gaagaaataaaaatttggcaaggct

SEQ ID NO: 5835484 - DNA, 25 bp, Homo sapien
ttcaagtacttatttgcccaaagca

SEQ ID NO: 5835485 - DNA, 25 bp, Homo sapien
ataaaaatttggcaaggctggcaga

SEQ ID NO: 5835486 - DNA, 25 bp, Homo sapien
gagatggagatgtggcaaaaagagc

SEQ ID NO: 5835487 - DNA, 25 bp, Homo sapien
atttggcaaggctggcagaactggg

SEQ ID NO: 5835488 - DNA, 25 bp, Homo sapien
tcccagcgcgatgtcttcccagcta

SEQ ID NO: 5835489 - DNA, 25 bp, Homo sapien
gtactttctcaggctcactgttcct

SEQ ID NO: 5835490 - DNA, 25 bp, Homo sapien
gagttagtattagtcttcatcctct

SEQ ID NO: 5835491 - DNA, 25 bp, Homo sapien
ctatttgggtttcccataggataga

SEQ ID NO: 5835492 - DNA, 25 bp, Homo sapien
ctcatggccagtcggtgaagcatta

SEQ ID NO: 5835493 - DNA, 25 bp, Homo sapien
ctgtctaagagatggagatgtggca

SEQ ID NO: 5835494 - DNA, 25 bp, Homo sapien
tgccaagaccagctgaaaaggagac

SEQ ID NO: 5835495 - DNA, 25 bp, Homo sapien
caatgtttgcacagcctaagagcac

SEQ ID NO: 5835496 - DNA, 25 bp, Homo sapien
tctgagtggaggagataaacaactt

SEQ ID NO: 5835497 - DNA, 25 bp, Homo sapien
ccgagtggtggtgttggttctgaga

SEQ ID NO: 5835498 - DNA, 25 bp, Homo sapien
tgcttctgagtggaggagataaaca

SEQ ID NO: 5835499 - DNA, 25 bp, Homo sapien
agtgtggtcccggggcagactggtg

SEQ ID NO: 5835500 - DNA, 25 bp, Homo sapien
tacctgcaatgtttgcacagcctaa

SEQ ID NO: 5835501 - DNA, 25 bp, Homo sapien
gccagcctggccgagtggtggtgtt

SEQ ID NO: 5835502 - DNA, 25 bp, Homo sapien
tttttagatttctttaactcttggc

SEQ ID NO: 5835503 - DNA, 25 bp, Homo sapien
cgcccatgttttccacatcactctc

SEQ ID NO: 5835504 - DNA, 25 bp, Homo sapien
gcacacagagcctctaaggggcttc

SEQ ID NO: 5835505 - DNA, 25 bp, Homo sapien
tattgttagcccatctatttgggtt

SEQ ID NO: 5835506 - DNA, 25 bp, Homo sapien
tttagatttctttaactcttggctc

SEQ ID NO: 5835507 - DNA, 25 bp, Homo sapien
cccatgttttccacatcactctctt

SEQ ID NO: 5835508 - DNA, 25 bp, Homo sapien
cccagagttaagctggaagaaataa

SEQ ID NO: 5835509 - DNA, 25 bp, Homo sapien
gaaaagggggtacctgcaatgtttg

SEQ ID NO: 5835510 - DNA, 25 bp, Homo sapien
acagaacaactaggatgatgtgtgg

SEQ ID NO: 5835511 - DNA, 25 bp, Homo sapien
agaacaactaggatgatgtgtggct

SEQ ID NO: 5835512 - DNA, 25 bp, Homo sapien
caagggcaagtgcttctgagtggag

SEQ ID NO: 5835513 - DNA, 25 bp, Homo sapien
gagataaacaactttgaaaacctgg

SEQ ID NO: 5835514 - DNA, 25 bp, Homo sapien
atcactctcttgccgtactttctca

SEQ ID NO: 5835515 - DNA, 25 bp, Homo sapien
ttggctcctcctttcgtatcagctc

SEQ ID NO: 5835516 - DNA, 25 bp, Homo sapien
tggctcgcaactggaaaagggggta

SEQ ID NO: 5835517 - DNA, 25 bp, Homo sapien
gtcggtgaagcattaagatatttgt

SEQ ID NO: 5835518 - DNA, 25 bp, Homo sapien
ctcacacccagagttaagctggaag

SEQ ID NO: 5835519 - DNA, 25 bp, Homo sapien
caagtacttatttgcccaaagcaac

SEQ ID NO: 5835520 - DNA, 25 bp, Homo sapien
ccatccctgggccggatgcagccac

SEQ ID NO: 5835521 - DNA, 25 bp, Homo sapien
cttgccgtactttctcaggctcact

SEQ ID NO: 5835522 - DNA, 25 bp, Homo sapien
atgaggggctgcagaactgtctaag

SEQ ID NO: 5835523 - DNA, 25 bp, Homo sapien
cgggtcctgatgtcatcacgtcatc

SEQ ID NO: 5835524 - DNA, 25 bp, Homo sapien
cggatgcagccactgtccccattac

SEQ ID NO: 5835525 - DNA, 25 bp, Homo sapien
agagcttatgacaagcctcactgca

SEQ ID NO: 5835526 - DNA, 25 bp, Homo sapien
ccaaaccctctcttgcctccacaga

SEQ ID NO: 5835527 - DNA, 25 bp, Homo sapien
tagtcttcatcctctgagatgaggg

SEQ ID NO: 5835528 - DNA, 25 bp, Homo sapien
atgatgtgtggctcgcaactggaaa

SEQ ID NO: 5835529 - DNA, 25 bp, Homo sapien
tgaagagaccatccctgggccggat

SEQ ID NO: 5835530 - DNA, 25 bp, Homo sapien
ggctgcagaactgtctaagagatgg

SEQ ID NO: 5835531 - DNA, 25 bp, Homo sapien
aagtctcacacccagagttaagctg

SEQ ID NO: 5835532 - DNA, 25 bp, Homo sapien
ggatagatgtgcctaagaaaggcct

SEQ ID NO: 5835533 - DNA, 25 bp, Homo sapien
tttcttagagggaacaagggcaagt

SEQ ID NO: 5835534 - DNA, 25 bp, Homo sapien
agagggaacaagggcaagtgcttct

SEQ ID NO: 5835535 - DNA, 25 bp, Homo sapien
gaggtcagtgatggaagtctcacac

SEQ ID NO: 5835536 - DNA, 25 bp, Homo sapien
ccccagctagcttgtatggaagtgc

SEQ ID NO: 5835537 - DNA, 25 bp, Homo sapien
ggcaagtgcttctgagtggaggaga

SEQ ID NO: 5835538 - DNA, 25 bp, Homo sapien
ttaccactcagcgagttagtattag

SEQ ID NO: 5835539 - DNA, 25 bp, Homo sapien
gatatttgtggtgtctgagccaagc

SEQ ID NO: 5835540 - DNA, 25 bp, Homo sapien
agcctaagagcacagcctgatgagt

SEQ ID NO: 5835541 - DNA, 25 bp, Homo sapien
aacaactaggatgatgtgtggctcg

SEQ ID NO: 5835542 - DNA, 25 bp, Homo sapien
tgcagccactgtccccattacagaa

SEQ ID NO: 5835543 - DNA, 25 bp, Homo sapien
gataaacaactttgaaaacctggcc

SEQ ID NO: 5835544 - DNA, 25 bp, Homo sapien
aagagaccatccctgggccggatgc

SEQ ID NO: 5835545 - DNA, 25 bp, Homo sapien
tgcccaaagcaactcagtgttttta

SEQ ID NO: 5835546 - DNA, 25 bp, Homo sapien
ttccacatcactctcttgccgtact

SEQ ID NO: 5835547 - DNA, 25 bp, Homo sapien
acatcactctcttgccgtactttct

SEQ ID NO: 5835548 - DNA, 25 bp, Homo sapien
gatgtggcaaaaagagcctcatgcc

SEQ ID NO: 5835549 - DNA, 25 bp, Homo sapien
gtctaagagatggagatgtggcaaa

SEQ ID NO: 5835550 - DNA, 25 bp, Homo sapien
gcagaactgtctaagagatggagat

SEQ ID NO: 5835551 - DNA, 25 bp, Homo sapien
gggccggatgcagccactgtcccca

SEQ ID NO: 5835552 - DNA, 25 bp, Homo sapien
gagccaagcaatggcatagaggtca

SEQ ID NO: 5835553 - DNA, 25 bp, Homo sapien
gtcttcccagctagggaagcaatct

SEQ ID NO: 5835554 - DNA, 25 bp, Homo sapien
gtgttggttctgagaggtgacagga

SEQ ID NO: 5835555 - DNA, 25 bp, Homo sapien
cccataggatagatgtgcctaagaa

SEQ ID NO: 5835556 - DNA, 25 bp, Homo sapien
tgcatttcttagagggaacaagggc

SEQ ID NO: 5835557 - DNA, 25 bp, Homo sapien
ctgaaaaggagacctttatattgtt

SEQ ID NO: 5835558 - DNA, 25 bp, Homo sapien
ctctcttgccgtactttctcaggct

SEQ ID NO: 5835559 - DNA, 25 bp, Homo sapien
tagatttctttaactcttggctcct

SEQ ID NO: 5835560 - DNA, 25 bp, Homo sapien
agctagcttgtatggaagtgcattt

SEQ ID NO: 5835561 - DNA, 25 bp, Homo sapien
atcttcccagcgcgatgtcttccca

SEQ ID NO: 5835562 - DNA, 25 bp, Homo sapien
acacagagcctctaaggggcttcaa

SEQ ID NO: 5835563 - DNA, 25 bp, Homo sapien
cagcgagttagtattagtcttcatc

SEQ ID NO: 5835564 - DNA, 25 bp, Homo sapien
actgtgaagagaccatccctgggcc

SEQ ID NO: 5835565 - DNA, 25 bp, Homo sapien
atctatttgggtttcccataggata

SEQ ID NO: 5835566 - DNA, 25 bp, Homo sapien
tctcaggctcactgttcctcgtcct

SEQ ID NO: 5835567 - DNA, 25 bp, Homo sapien
gctggaagaaataaaaatttggcaa

SEQ ID NO: 5835568 - DNA, 25 bp, Homo sapien
cctttgcatatgggcgccagagctt

SEQ ID NO: 5835569 - DNA, 25 bp, Homo sapien
ggtcctgatgtcatcacgtcatctt

SEQ ID NO: 5835570 - DNA, 25 bp, Homo sapien
gaaaaggagacctttatattgttag

SEQ ID NO: 5835571 - DNA, 25 bp, Homo sapien
ctttcgtatcagctcgcccatgttt

SEQ ID NO: 5835572 - DNA, 25 bp, Homo sapien
tcttaccactcagcgagttagtatt

SEQ ID NO: 5835573 - DNA, 25 bp, Homo sapien
atggaagtctcacacccagagttaa

SEQ ID NO: 5835574 - DNA, 25 bp, Homo sapien
ctgcaggcacacagagcctctaagg

SEQ ID NO: 5835575 - DNA, 25 bp, Homo sapien
gtccagagtcctcgggtcctgatgt

SEQ ID NO: 5835576 - DNA, 25 bp, Homo sapien
gtcctttgtatttcttaccactcag

SEQ ID NO: 5835577 - DNA, 25 bp, Homo sapien
tcttggctcctcctttcgtatcagc

SEQ ID NO: 5835578 - DNA, 25 bp, Homo sapien
tcagtgatggaagtctcacacccag

SEQ ID NO: 5835579 - DNA, 25 bp, Homo sapien
atggcatagaggtcagtgatggaag

SEQ ID NO: 5835580 - DNA, 25 bp, Homo sapien
cacccagagttaagctggaagaaat

SEQ ID NO: 5835581 - DNA, 25 bp, Homo sapien
tggcctcctctgccaagaccagctg

SEQ ID NO: 5835582 - DNA, 25 bp, Homo sapien
tcttgcctccacagactgtgaagag

SEQ ID NO: 5835583 - DNA, 25 bp, Homo sapien
cttctgagtggaggagataaacaac

SEQ ID NO: 5835584 - DNA, 25 bp, Homo sapien
agactgtgaagagaccatccctggg

SEQ ID NO: 5835585 - DNA, 25 bp, Homo sapien
catatgggcgccagagcttatgaca

SEQ ID NO: 5835586 - DNA, 25 bp, Homo sapien
gatgcagccactgtccccattacag

SEQ ID NO: 5835587 - DNA, 25 bp, Homo sapien
aactgggtccagagtcctcgggtcc

SEQ ID NO: 5835588 - DNA, 25 bp, Homo sapien
gcaactcagtgtttttagatttctt

SEQ ID NO: 5835589 - DNA, 25 bp, Homo sapien
agcattaagatatttgtggtgtctg

SEQ ID NO: 5835590 - DNA, 25 bp, Homo sapien
tttgtatttcttaccactcagcgag

SEQ ID NO: 5835591 - DNA, 25 bp, Homo sapien
aaaccctctcttgcctccacagact

SEQ ID NO: 5835592 - DNA, 25 bp, Homo sapien
ggtggtgttggttctgagaggtgac

SEQ ID NO: 5835593 - DNA, 25 bp, Homo sapien
aagctggaagaaataaaaatttggc

SEQ ID NO: 5835594 - DNA, 25 bp, Homo sapien
aagcaactcagtgtttttagatttc

SEQ ID NO: 5835595 - DNA, 25 bp, Homo sapien
agctagggaagcaatcttaagtcca

SEQ ID NO: 5835596 - DNA, 25 bp, Homo sapien
gaggggctgcagaactgtctaagag

SEQ ID NO: 5835597 - DNA, 25 bp, Homo sapien
ccagagcttatgacaagcctcactg

SEQ ID NO: 5835598 - DNA, 25 bp, Homo sapien
cctcctttcgtatcagctcgcccat

SEQ ID NO: 5835599 - DNA, 25 bp, Homo sapien
tcactgttcctcgtcctttgtattt

SEQ ID NO: 5835600 - DNA, 25 bp, Homo sapien
tgagtggaggagataaacaactttg

SEQ ID NO: 5835601 - DNA, 25 bp, Homo sapien
tcctcgggtcctgatgtcatcacgt

SEQ ID NO: 5835602 - DNA, 25 bp, Homo sapien
cttcccagctagggaagcaatctta

SEQ ID NO: 5835603 - DNA, 25 bp, Homo sapien
ctaagagatggagatgtggcaaaaa

SEQ ID NO: 5835604 - DNA, 25 bp, Homo sapien
agggggtacctgcaatgtttgcaca

SEQ ID NO: 5835605 - DNA, 25 bp, Homo sapien
gagaccatccctgggccggatgcag

SEQ ID NO: 5835606 - DNA, 25 bp, Homo sapien
ggaacaagggcaagtgcttctgagt

SEQ ID NO: 5835607 - DNA, 25 bp, Homo sapien
tttctcaggctcactgttcctcgtc

SEQ ID NO: 5835608 - DNA, 25 bp, Homo sapien
aaataaaaatttggcaaggctggca

SEQ ID NO: 5835609 - DNA, 25 bp, Homo sapien
tggaggagataaacaactttgaaaa

SEQ ID NO: 5835610 - DNA, 25 bp, Homo sapien
catgttttccacatcactctcttgc

SEQ ID NO: 5835611 - DNA, 25 bp, Homo sapien
cctcgtcctttgtatttcttaccac

SEQ ID NO: 5835612 - DNA, 25 bp, Homo sapien
aggtgacaggagctactccccaaac

SEQ ID NO: 5835613 - DNA, 25 bp, Homo sapien
ttggcaaggctggcagaactgggtc

SEQ ID NO: 5835614 - DNA, 25 bp, Homo sapien
ggtcagtgatggaagtctcacaccc

SEQ ID NO: 5835615 - DNA, 25 bp, Homo sapien
ctgatgtcatcacgtcatcttccca

SEQ ID NO: 5835616 - DNA, 25 bp, Homo sapien
gtttcccataggatagatgtgccta

SEQ ID NO: 5835617 - DNA, 25 bp, Homo sapien
ggggctgcagaactgtctaagagat

SEQ ID NO: 5835618 - DNA, 25 bp, Homo sapien
ccatctatttgggtttcccatagga

SEQ ID NO: 5835619 - DNA, 25 bp, Homo sapien
cttgtatggaagtgcatttcttaga

SEQ ID NO: 5835620 - DNA, 25 bp, Homo sapien
gtcccggggcagactggtgggcgtg

SEQ ID NO: 5835621 - DNA, 25 bp, Homo sapien
tttgcatatgggcgccagagcttat

SEQ ID NO: 5835622 - DNA, 25 bp, Homo sapien
cttatttgcccaaagcaactcagtg

SEQ ID NO: 5835623 - DNA, 25 bp, Homo sapien
aactcagtgtttttagatttcttta

SEQ ID NO: 5835624 - DNA, 25 bp, Homo sapien
tgagtgccctatagtgtggtcccgg

SEQ ID NO: 5835625 - DNA, 25 bp, Homo sapien
agagtcctcgggtcctgatgtcatc

SEQ ID NO: 5835626 - DNA, 25 bp, Homo sapien
agaactgtctaagagatggagatgt

SEQ ID NO: 5835627 - DNA, 25 bp, Homo sapien
agtgatggaagtctcacacccagag

SEQ ID NO: 5835628 - DNA, 25 bp, Homo sapien
tggaaaagggggtacctgcaatgtt

SEQ ID NO: 5835629 - DNA, 25 bp, Homo sapien
ctgggccggatgcagccactgtccc

SEQ ID NO: 5835630 - DNA, 25 bp, Homo sapien
agcacagcctgatgagtgccctata

SEQ ID NO: 5835631 - DNA, 25 bp, Homo sapien
tagcccatctatttgggtttcccat

SEQ ID NO: 5835632 - DNA, 25 bp, Homo sapien
gtgaagcattaagatatttgtggtg

SEQ ID NO: 5835633 - DNA, 25 bp, Homo sapien
tgtccccattacagaacaactagga

SEQ ID NO: 5835634 - DNA, 25 bp, Homo sapien
gtgggcgtgtctcatggccagtcgg

SEQ ID NO: 5835635 - DNA, 25 bp, Homo sapien
aaggcctttgcatatgggcgccaga

SEQ ID NO: 5835636 - DNA, 25 bp, Homo sapien
gtctcatggccagtcggtgaagcat

SEQ ID NO: 5835637 - DNA, 25 bp, Homo sapien
tgtggtcccggggcagactggtggg

SEQ ID NO: 5835638 - DNA, 25 bp, Homo sapien
gtgacaggagctactccccaaaccc

SEQ ID NO: 5835639 - DNA, 25 bp, Homo sapien
cctctgagatgaggggctgcagaac

SEQ ID NO: 5835640 - DNA, 25 bp, Homo sapien
ttcgtatcagctcgcccatgttttc

SEQ ID NO: 5835641 - DNA, 25 bp, Homo sapien
caggagctactccccaaaccctctc

SEQ ID NO: 5835642 - DNA, 25 bp, Homo sapien
gccggatgcagccactgtccccatt

SEQ ID NO: 5835643 - DNA, 25 bp, Homo sapien
cagcctggccgagtggtggtgttgg

SEQ ID NO: 5835644 - DNA, 25 bp, Homo sapien
gccaagcaatggcatagaggtcagt

SEQ ID NO: 5835645 - DNA, 25 bp, Homo sapien
tctgagaggtgacaggagctactcc

SEQ ID NO: 5835646 - DNA, 25 bp, Homo sapien
cgcgatgtcttcccagctagggaag

SEQ ID NO: 5835647 - DNA, 25 bp, Homo sapien
ccacatcactctcttgccgtacttt

SEQ ID NO: 5835648 - DNA, 25 bp, Homo sapien
ctgggtccagagtcctcgggtcctg

SEQ ID NO: 5835649 - DNA, 25 bp, Homo sapien
cataggatagatgtgcctaagaaag

SEQ ID NO: 5835650 - DNA, 25 bp, Homo sapien
gcaggcacacagagcctctaagggg

SEQ ID NO: 5835651 - DNA, 25 bp, Homo sapien
aggctcactgttcctcgtcctttgt

SEQ ID NO: 5835652 - DNA, 25 bp, Homo sapien
tgatggaagtctcacacccagagtt

SEQ ID NO: 5835653 - DNA, 25 bp, Homo sapien
cagtgtttttagatttctttaactc

SEQ ID NO: 5835654 - DNA, 25 bp, Homo sapien
gcctaagaaaggcctttgcatatgg

SEQ ID NO: 5835655 - DNA, 25 bp, Homo sapien
taggatagatgtgcctaagaaaggc

SEQ ID NO: 5835656 - DNA, 25 bp, Homo sapien
ttagagggaacaagggcaagtgctt

SEQ ID NO: 5835657 - DNA, 25 bp, Homo sapien
ttcccataggatagatgtgcctaag

SEQ ID NO: 5835658 - DNA, 25 bp, Homo sapien
gtcttcatcctctgagatgaggggc

SEQ ID NO: 5835659 - DNA, 25 bp, Homo sapien
gttctgagaggtgacaggagctact

SEQ ID NO: 5835660 - DNA, 25 bp, Homo sapien
gctcgcaactggaaaagggggtacc

SEQ ID NO: 5835661 - DNA, 25 bp, Homo sapien
tagaggtcagtgatggaagtctcac

SEQ ID NO: 5835662 - DNA, 25 bp, Homo sapien
gcaatcttaagtccacggcctatgg

SEQ ID NO: 5835663 - DNA, 25 bp, Homo sapien
gatttctttaactcttggctcctcc

SEQ ID NO: 5835664 - DNA, 25 bp, Homo sapien
agggaacaagggcaagtgcttctga

SEQ ID NO: 5835665 - DNA, 25 bp, Homo sapien
cattaagatatttgtggtgtctgag

SEQ ID NO: 5835666 - DNA, 25 bp, Homo sapien
tcatcttcccagcgcgatgtcttcc

SEQ ID NO: 5835667 - DNA, 25 bp, Homo sapien
gctcactgttcctcgtcctttgtat

SEQ ID NO: 5835668 - DNA, 25 bp, Homo sapien
cggggcagactggtgggcgtgtctc

SEQ ID NO: 5835669 - DNA, 25 bp, Homo sapien
atttgggtttcccataggatagatg

SEQ ID NO: 5835670 - DNA, 25 bp, Homo sapien
aacaagggcaagtgcttctgagtgg

SEQ ID NO: 5835671 - DNA, 25 bp, Homo sapien
caactggaaaagggggtacctgcaa

SEQ ID NO: 5835672 - DNA, 25 bp, Homo sapien
ctggccgagtggtggtgttggttct

SEQ ID NO: 5835673 - DNA, 25 bp, Homo sapien
ctcctctgccaagaccagctgaaaa

SEQ ID NO: 5835674 - DNA, 25 bp, Homo sapien
ggccgagtggtggtgttggttctga

SEQ ID NO: 5835675 - DNA, 25 bp, Homo sapien
aagcaatcttaagtccacggcctat

SEQ ID NO: 5835676 - DNA, 25 bp, Homo sapien
gcctgatgagtgccctatagtgtgg

SEQ ID NO: 5835677 - DNA, 25 bp, Homo sapien
agactggtgggcgtgtctcatggcc

SEQ ID NO: 5835678 - DNA, 25 bp, Homo sapien
gcagaactgggtccagagtcctcgg

SEQ ID NO: 5835679 - DNA, 25 bp, Homo sapien
cttatgacaagcctcactgcaggca

SEQ ID NO: 5835680 - DNA, 25 bp, Homo sapien
actgttcctcgtcctttgtatttct

SEQ ID NO: 5835681 - DNA, 25 bp, Homo sapien
gacaggagctactccccaaaccctc

SEQ ID NO: 5835682 - DNA, 25 bp, Homo sapien
tgtatttcttaccactcagcgagtt

SEQ ID NO: 5835683 - DNA, 25 bp, Homo sapien
tggaagtgcatttcttagagggaac

SEQ ID NO: 5835684 - DNA, 25 bp, Homo sapien
gcagactggtgggcgtgtctcatgg

SEQ ID NO: 5835685 - DNA, 25 bp, Homo sapien
gttagtattagtcttcatcctctga

SEQ ID NO: 5835686 - DNA, 25 bp, Homo sapien
agagcctcatgccagcctggccgag

SEQ ID NO: 5835687 - DNA, 25 bp, Homo sapien
gcctcactgcaggcacacagagcct

SEQ ID NO: 5835688 - DNA, 25 bp, Homo sapien
taagagcacagcctgatgagtgccc

SEQ ID NO: 5835689 - DNA, 25 bp, Homo sapien
cccggggcagactggtgggcgtgtc

SEQ ID NO: 5835690 - DNA, 25 bp, Homo sapien
agggaagcaatcttaagtccacggc

SEQ ID NO: 5835691 - DNA, 25 bp, Homo sapien
tatggaagtgcatttcttagaggga

SEQ ID NO: 5835692 - DNA, 25 bp, Homo sapien
ctcactgcaggcacacagagcctct

SEQ ID NO: 5835693 - DNA, 25 bp, Homo sapien
gcttcaagtacttatttgcccaaag

SEQ ID NO: 5835694 - DNA, 25 bp, Homo sapien
agcgtttgccaagtccaggaacttg

SEQ ID NO: 5835695 - DNA, 25 bp, Homo sapien
gtcccttcttggacttctatgtgct

SEQ ID NO: 5835696 - DNA, 25 bp, Homo sapien
gtgatgcagccggcaatccagccct

SEQ ID NO: 5835697 - DNA, 25 bp, Homo sapien
ttcctgatctgagaacaccctgccc

SEQ ID NO: 5835698 - DNA, 25 bp, Homo sapien
cacctgtgggttgggcatagccacc

SEQ ID NO: 5835699 - DNA, 25 bp, Homo sapien
agctgtactgggcaagcctggccac

SEQ ID NO: 5835700 - DNA, 25 bp, Homo sapien
acaccaactttctgcccttgtcact

SEQ ID NO: 5835701 - DNA, 25 bp, Homo sapien
ttcttaagagcgtttgccaagtcca

SEQ ID NO: 5835702 - DNA, 25 bp, Homo sapien
gagcgatccctgctctgtctgaggt

SEQ ID NO: 5835703 - DNA, 25 bp, Homo sapien
ggaatcacactattcttaagagcgt

SEQ ID NO: 5835704 - DNA, 25 bp, Homo sapien
tgaccagctccatttctctggattc

SEQ ID NO: 5835705 - DNA, 25 bp, Homo sapien
aagattatgggtgaccttgtaagtg

SEQ ID NO: 5835706 - DNA, 25 bp, Homo sapien
gaagaattttctgggaacatgaaga

SEQ ID NO: 5835707 - DNA, 25 bp, Homo sapien
tgtgaccaggcagtgatgcagccgg

SEQ ID NO: 5835708 - DNA, 25 bp, Homo sapien
gctaagctgtactgggcaagcctgg

SEQ ID NO: 5835709 - DNA, 25 bp, Homo sapien
gcttgtcccaaagattatgggtgac

SEQ ID NO: 5835710 - DNA, 25 bp, Homo sapien
attcagtgtccagagcctctgagcg

SEQ ID NO: 5835711 - DNA, 25 bp, Homo sapien
agtgggtgtgtgaccaggcagtgat

SEQ ID NO: 5835712 - DNA, 25 bp, Homo sapien
acatgaagagatggaatcacactat

SEQ ID NO: 5835713 - DNA, 25 bp, Homo sapien
agcaggtgaccagctccatttctct

SEQ ID NO: 5835714 - DNA, 25 bp, Homo sapien
tggagatccagcgtcgcctgtgtct

SEQ ID NO: 5835715 - DNA, 25 bp, Homo sapien
ggctcatggaacagtgccttctaga

SEQ ID NO: 5835716 - DNA, 25 bp, Homo sapien
tccagaccctgcctggcatccagga

SEQ ID NO: 5835717 - DNA, 25 bp, Homo sapien
taggaccaggccctggactgatggt

SEQ ID NO: 5835718 - DNA, 25 bp, Homo sapien
cctcctcagcccaaggacaccaact

SEQ ID NO: 5835719 - DNA, 25 bp, Homo sapien
aggtcccttcttggacttctatgtg

SEQ ID NO: 5835720 - DNA, 25 bp, Homo sapien
aaaaatacacatctcttaaatgctc

SEQ ID NO: 5835721 - DNA, 25 bp, Homo sapien
tgtccaaactggagcacagcctggg

SEQ ID NO: 5835722 - DNA, 25 bp, Homo sapien
tcactcctgcatctgccgatggccc

SEQ ID NO: 5835723 - DNA, 25 bp, Homo sapien
gcagattgcctgaaacatccaggtc

SEQ ID NO: 5835724 - DNA, 25 bp, Homo sapien
cctgaaacatccaggtcccttcttg

SEQ ID NO: 5835725 - DNA, 25 bp, Homo sapien
cagttaactgtcctgggtggattca

SEQ ID NO: 5835726 - DNA, 25 bp, Homo sapien
gatgcagccggcaatccagccctcc

SEQ ID NO: 5835727 - DNA, 25 bp, Homo sapien
acagtaataggtaccaggcagcaga

SEQ ID NO: 5835728 - DNA, 25 bp, Homo sapien
caggtgaccagctccatttctctgg

SEQ ID NO: 5835729 - DNA, 25 bp, Homo sapien
ccccaggagaatacaggtgccagga

SEQ ID NO: 5835730 - DNA, 25 bp, Homo sapien
acggctcatggaacagtgccttcta

SEQ ID NO: 5835731 - DNA, 25 bp, Homo sapien
ttcagcatgagagagacaaggaaca

SEQ ID NO: 5835732 - DNA, 25 bp, Homo sapien
tgtctgtccagaccctgcctggcat

SEQ ID NO: 5835733 - DNA, 25 bp, Homo sapien
tcctcagcccaaggacaccaacttt

SEQ ID NO: 5835734 - DNA, 25 bp, Homo sapien
ttgtaagtgtgcctttcctgatctg

SEQ ID NO: 5835735 - DNA, 25 bp, Homo sapien
gtaagtgtgcctttcctgatctgag

SEQ ID NO: 5835736 - DNA, 25 bp, Homo sapien
aggtgggggaagcaggtgaccagct

SEQ ID NO: 5835737 - DNA, 25 bp, Homo sapien
tgggactgcccacgccccaggagaa

SEQ ID NO: 5835738 - DNA, 25 bp, Homo sapien
ccctgtatgaaaaggacaaccaaaa

SEQ ID NO: 5835739 - DNA, 25 bp, Homo sapien
gggtgaccttgtaagtgtgcctttc

SEQ ID NO: 5835740 - DNA, 25 bp, Homo sapien
cctgtgtctgtccagaccctgcctg

SEQ ID NO: 5835741 - DNA, 25 bp, Homo sapien
aagctaagctgtactgggcaagcct

SEQ ID NO: 5835742 - DNA, 25 bp, Homo sapien
accaggccctggactgatggtagat

SEQ ID NO: 5835743 - DNA, 25 bp, Homo sapien
gccctcctcagcccaaggacaccaa

SEQ ID NO: 5835744 - DNA, 25 bp, Homo sapien
accaggcagtgatgcagccggcaat

SEQ ID NO: 5835745 - DNA, 25 bp, Homo sapien
cttctgggttctcctggctagttcc

SEQ ID NO: 5835746 - DNA, 25 bp, Homo sapien
acttccctgtatgaaaaggacaacc

SEQ ID NO: 5835747 - DNA, 25 bp, Homo sapien
gtgaccttgtaagtgtgcctttcct

SEQ ID NO: 5835748 - DNA, 25 bp, Homo sapien
tgcagccggcaatccagccctcctc

SEQ ID NO: 5835749 - DNA, 25 bp, Homo sapien
acttctatgtgcttgtcccaaagat

SEQ ID NO: 5835750 - DNA, 25 bp, Homo sapien
ttgggcatagccacccgagtatcca

SEQ ID NO: 5835751 - DNA, 25 bp, Homo sapien
ctgagcgatccctgctctgtctgag

SEQ ID NO: 5835752 - DNA, 25 bp, Homo sapien
cgcctgtgtctgtccagaccctgcc

SEQ ID NO: 5835753 - DNA, 25 bp, Homo sapien
acatccaggtcccttcttggacttc

SEQ ID NO: 5835754 - DNA, 25 bp, Homo sapien
ataggtaccaggcagcagattgcct

SEQ ID NO: 5835755 - DNA, 25 bp, Homo sapien
gatgtgcggctgcccagctgggact

SEQ ID NO: 5835756 - DNA, 25 bp, Homo sapien
gggcatagccacccgagtatccaac

SEQ ID NO: 5835757 - DNA, 25 bp, Homo sapien
ccaaccagaaccgattctgccaact

SEQ ID NO: 5835758 - DNA, 25 bp, Homo sapien
gcctggggcccctgctcaaccacct

SEQ ID NO: 5835759 - DNA, 25 bp, Homo sapien
aactggagcacagcctggggcccct

SEQ ID NO: 5835760 - DNA, 25 bp, Homo sapien
cgatggcccctgtccaaactggagc

SEQ ID NO: 5835761 - DNA, 25 bp, Homo sapien
accaggcagcagattgcctgaaaca

SEQ ID NO: 5835762 - DNA, 25 bp, Homo sapien
tgtccctaggaccaggccctggact

SEQ ID NO: 5835763 - DNA, 25 bp, Homo sapien
tgaccaggcagtgatgcagccggca

SEQ ID NO: 5835764 - DNA, 25 bp, Homo sapien
atgtgcttgtcccaaagattatggg

SEQ ID NO: 5835765 - DNA, 25 bp, Homo sapien
ctggactgatggtagatgcccctct

SEQ ID NO: 5835766 - DNA, 25 bp, Homo sapien
atttgtaaaaatacacatctcttaa

SEQ ID NO: 5835767 - DNA, 25 bp, Homo sapien
catggaacagtgccttctagagcca

SEQ ID NO: 5835768 - DNA, 25 bp, Homo sapien
ggggcccctgctcaaccacctgtgg

SEQ ID NO: 5835769 - DNA, 25 bp, Homo sapien
caagcctggccaccatgctggggat

SEQ ID NO: 5835770 - DNA, 25 bp, Homo sapien
cccttgtcactcctgcatctgccga

SEQ ID NO: 5835771 - DNA, 25 bp, Homo sapien
tcagtgtccagagcctctgagcgat

SEQ ID NO: 5835772 - DNA, 25 bp, Homo sapien
ctttcctgatctgagaacaccctgc

SEQ ID NO: 5835773 - DNA, 25 bp, Homo sapien
actgggcaagcctggccaccatgct

SEQ ID NO: 5835774 - DNA, 25 bp, Homo sapien
ttctcctggctagttcctcaaaact

SEQ ID NO: 5835775 - DNA, 25 bp, Homo sapien
cgagtgggtgtgtgaccaggcagtg

SEQ ID NO: 5835776 - DNA, 25 bp, Homo sapien
agagccattgcggggatgtggatac

SEQ ID NO: 5835777 - DNA, 25 bp, Homo sapien
tctcttcagcatgagagagacaagg

SEQ ID NO: 5835778 - DNA, 25 bp, Homo sapien
gtaccctcctctggaggactggccc

SEQ ID NO: 5835779 - DNA, 25 bp, Homo sapien
aagcaagaggctccacacttctggc

SEQ ID NO: 5835780 - DNA, 25 bp, Homo sapien
actgtcctgggtggattcagtgtcc

SEQ ID NO: 5835781 - DNA, 25 bp, Homo sapien
cagcagattgcctgaaacatccagg

SEQ ID NO: 5835782 - DNA, 25 bp, Homo sapien
ggacaccaactttctgcccttgtca

SEQ ID NO: 5835783 - DNA, 25 bp, Homo sapien
agagcgtttgccaagtccaggaact

SEQ ID NO: 5835784 - DNA, 25 bp, Homo sapien
tctgggttctcctggctagttcctc

SEQ ID NO: 5835785 - DNA, 25 bp, Homo sapien
agtgtccagagcctctgagcgatcc

SEQ ID NO: 5835786 - DNA, 25 bp, Homo sapien
tgctcacaaagcaagaggctccaca

SEQ ID NO: 5835787 - DNA, 25 bp, Homo sapien
tgcccagctgggactgcccacgccc

SEQ ID NO: 5835788 - DNA, 25 bp, Homo sapien
gtggattcagtgtccagagcctctg

SEQ ID NO: 5835789 - DNA, 25 bp, Homo sapien
ttctagagccattgcggggatgtgg

SEQ ID NO: 5835790 - DNA, 25 bp, Homo sapien
ccaggaacttgacctttgtatttgt

SEQ ID NO: 5835791 - DNA, 25 bp, Homo sapien
taagctgtactgggcaagcctggcc

SEQ ID NO: 5835792 - DNA, 25 bp, Homo sapien
cccctctccatgctcttggctgcag

SEQ ID NO: 5835793 - DNA, 25 bp, Homo sapien
agagatggaatcacactattcttaa

SEQ ID NO: 5835794 - DNA, 25 bp, Homo sapien
tttaaagctaagctgtactgggcaa

SEQ ID NO: 5835795 - DNA, 25 bp, Homo sapien
tcctgcatctgccgatggcccctgt

SEQ ID NO: 5835796 - DNA, 25 bp, Homo sapien
ttctgacccaggcttctgggttctc

SEQ ID NO: 5835797 - DNA, 25 bp, Homo sapien
ggccctggactgatggtagatgccc

SEQ ID NO: 5835798 - DNA, 25 bp, Homo sapien
atacaggtgccaggaaggtgctgcc

SEQ ID NO: 5835799 - DNA, 25 bp, Homo sapien
cagcctggggcccctgctcaaccac

SEQ ID NO: 5835800 - DNA, 25 bp, Homo sapien
cagctgggactgcccacgccccagg

SEQ ID NO: 5835801 - DNA, 25 bp, Homo sapien
gtccaggaacttgacctttgtattt

SEQ ID NO: 5835802 - DNA, 25 bp, Homo sapien
tgtcactcctgcatctgccgatggc

SEQ ID NO: 5835803 - DNA, 25 bp, Homo sapien
gctagttcctcaaaacttccctgta

SEQ ID NO: 5835804 - DNA, 25 bp, Homo sapien
cctgctcaaccacctgtgggttggg

SEQ ID NO: 5835805 - DNA, 25 bp, Homo sapien
caactggagatccagcgtcgcctgt

SEQ ID NO: 5835806 - DNA, 25 bp, Homo sapien
tagagtaccctcctctggaggactg

SEQ ID NO: 5835807 - DNA, 25 bp, Homo sapien
ccttctagagccattgcggggatgt

SEQ ID NO: 5835808 - DNA, 25 bp, Homo sapien
ttggacttctatgtgcttgtcccaa

SEQ ID NO: 5835809 - DNA, 25 bp, Homo sapien
caaggaacagtagagtaccctcctc

SEQ ID NO: 5835810 - DNA, 25 bp, Homo sapien
atgagagagacaaggaacagtagag

SEQ ID NO: 5835811 - DNA, 25 bp, Homo sapien
ctggcatccaggagccacggctcat

SEQ ID NO: 5835812 - DNA, 25 bp, Homo sapien
gtgggggaagcaggtgaccagctcc

SEQ ID NO: 5835813 - DNA, 25 bp, Homo sapien
ggcagtgatgcagccggcaatccag

SEQ ID NO: 5835814 - DNA, 25 bp, Homo sapien
ccaggtcccttcttggacttctatg

SEQ ID NO: 5835815 - DNA, 25 bp, Homo sapien
ggcaagcctggccaccatgctgggg

SEQ ID NO: 5835816 - DNA, 25 bp, Homo sapien
gacctttaaagctaagctgtactgg

SEQ ID NO: 5835817 - DNA, 25 bp, Homo sapien
ccgagtatccaaccagaaccgattc

SEQ ID NO: 5835818 - DNA, 25 bp, Homo sapien
aaatacacatctcttaaatgctcac

SEQ ID NO: 5835819 - DNA, 25 bp, Homo sapien
ggatacagggcctgccattctcagc

SEQ ID NO: 5835820 - DNA, 25 bp, Homo sapien
tctctggattctgacccaggcttct

SEQ ID NO: 5835821 - DNA, 25 bp, Homo sapien
caggccctggactgatggtagatgc

SEQ ID NO: 5835822 - DNA, 25 bp, Homo sapien
tgccattctcagcaaatgtccctag

SEQ ID NO: 5835823 - DNA, 25 bp, Homo sapien
gatccctgctctgtctgaggtgggg

SEQ ID NO: 5835824 - DNA, 25 bp, Homo sapien
ggcttctgggttctcctggctagtt

SEQ ID NO: 5835825 - DNA, 25 bp, Homo sapien
aggtaccaggcagcagattgcctga

SEQ ID NO: 5835826 - DNA, 25 bp, Homo sapien
aagtgtgcctttcctgatctgagaa

SEQ ID NO: 5835827 - DNA, 25 bp, Homo sapien
ttctgggaacatgaagagatggaat

SEQ ID NO: 5835828 - DNA, 25 bp, Homo sapien
ggagccacggctcatggaacagtgc

SEQ ID NO: 5835829 - DNA, 25 bp, Homo sapien
attgcctgaaacatccaggtccctt

SEQ ID NO: 5835830 - DNA, 25 bp, Homo sapien
gagagacaaggaacagtagagtacc

SEQ ID NO: 5835831 - DNA, 25 bp, Homo sapien
ctggcaggccagggcctttctcttc

SEQ ID NO: 5835832 - DNA, 25 bp, Homo sapien
ggtgctgccccgagtgggtgtgtga

SEQ ID NO: 5835833 - DNA, 25 bp, Homo sapien
aaacttccctgtatgaaaaggacaa

SEQ ID NO: 5835834 - DNA, 25 bp, Homo sapien
ctgccccgagtgggtgtgtgaccag

SEQ ID NO: 5835835 - DNA, 25 bp, Homo sapien
atccaaccagaaccgattctgccaa

SEQ ID NO: 5835836 - DNA, 25 bp, Homo sapien
ttccctgtatgaaaaggacaaccaa

SEQ ID NO: 5835837 - DNA, 25 bp, Homo sapien
cgccccaggagaatacaggtgccag

SEQ ID NO: 5835838 - DNA, 25 bp, Homo sapien
ggtgaccagctccatttctctggat

SEQ ID NO: 5835839 - DNA, 25 bp, Homo sapien
ggcctttctcttcagcatgagagag

SEQ ID NO: 5835840 - DNA, 25 bp, Homo sapien
acacatctcttaaatgctcacaaag

SEQ ID NO: 5835841 - DNA, 25 bp, Homo sapien
gaacaccctgcccggctgggaagaa

SEQ ID NO: 5835842 - DNA, 25 bp, Homo sapien
ttttctgggaacatgaagagatgga

SEQ ID NO: 5835843 - DNA, 25 bp, Homo sapien
tgatggtagatgcccctctccatgc

SEQ ID NO: 5835844 - DNA, 25 bp, Homo sapien
actgcccacgccccaggagaataca

SEQ ID NO: 5835845 - DNA, 25 bp, Homo sapien
aaaggacctttaaagctaagctgta

SEQ ID NO: 5835846 - DNA, 25 bp, Homo sapien
taagagcgtttgccaagtccaggaa

SEQ ID NO: 5835847 - DNA, 25 bp, Homo sapien
tgcggctgcccagctgggactgccc

SEQ ID NO: 5835848 - DNA, 25 bp, Homo sapien
gctgcagttaactgtcctgggtgga

SEQ ID NO: 5835849 - DNA, 25 bp, Homo sapien
tccagagcctctgagcgatccctgc

SEQ ID NO: 5835850 - DNA, 25 bp, Homo sapien
gagatccagcgtcgcctgtgtctgt

SEQ ID NO: 5835851 - DNA, 25 bp, Homo sapien
tggctgcagttaactgtcctgggtg

SEQ ID NO: 5835852 - DNA, 25 bp, Homo sapien
caaaacttccctgtatgaaaaggac

SEQ ID NO: 5835853 - DNA, 25 bp, Homo sapien
agcctggccaccatgctggggatag

SEQ ID NO: 5835854 - DNA, 25 bp, Homo sapien
ccctggactgatggtagatgcccct

SEQ ID NO: 5835855 - DNA, 25 bp, Homo sapien
aaccagaaccgattctgccaactgg

SEQ ID NO: 5835856 - DNA, 25 bp, Homo sapien
gtaccaggcagcagattgcctgaaa

SEQ ID NO: 5835857 - DNA, 25 bp, Homo sapien
tgtccagaccctgcctggcatccag

SEQ ID NO: 5835858 - DNA, 25 bp, Homo sapien
acttctggcaggccagggcctttct

SEQ ID NO: 5835859 - DNA, 25 bp, Homo sapien
agccattgcggggatgtggatacag

SEQ ID NO: 5835860 - DNA, 25 bp, Homo sapien
agtgacagtaataggtaccaggcag

SEQ ID NO: 5835861 - DNA, 25 bp, Homo sapien
tcctcaaaacttccctgtatgaaaa

SEQ ID NO: 5835862 - DNA, 25 bp, Homo sapien
accaactttctgcccttgtcactcc

SEQ ID NO: 5835863 - DNA, 25 bp, Homo sapien
gaacagtgccttctagagccattgc

SEQ ID NO: 5835864 - DNA, 25 bp, Homo sapien
gcaatccagccctcctcagcccaag

SEQ ID NO: 5835865 - DNA, 25 bp, Homo sapien
tgggcaagcctggccaccatgctgg

SEQ ID NO: 5835866 - DNA, 25 bp, Homo sapien
cagcccaaggacaccaactttctgc

SEQ ID NO: 5835867 - DNA, 25 bp, Homo sapien
aattttctgggaacatgaagagatg

SEQ ID NO: 5835868 - DNA, 25 bp, Homo sapien
gttcctcaaaacttccctgtatgaa

SEQ ID NO: 5835869 - DNA, 25 bp, Homo sapien
acacttctggcaggccagggccttt

SEQ ID NO: 5835870 - DNA, 25 bp, Homo sapien
gccccgagtgggtgtgtgaccaggc

SEQ ID NO: 5835871 - DNA, 25 bp, Homo sapien
taaagctaagctgtactgggcaagc

SEQ ID NO: 5835872 - DNA, 25 bp, Homo sapien
acagtgccttctagagccattgcgg

SEQ ID NO: 5835873 - DNA, 25 bp, Homo sapien
tgcccctctccatgctcttggctgc

SEQ ID NO: 5835874 - DNA, 25 bp, Homo sapien
cccagctgggactgcccacgcccca

SEQ ID NO: 5835875 - DNA, 25 bp, Homo sapien
gtatttgtaaaaatacacatctctt

SEQ ID NO: 5835876 - DNA, 25 bp, Homo sapien
gagagagacaaggaacagtagagta

SEQ ID NO: 5835877 - DNA, 25 bp, Homo sapien
ccattctcagcaaatgtccctagga

SEQ ID NO: 5835878 - DNA, 25 bp, Homo sapien
gtgcttgtcccaaagattatgggtg

SEQ ID NO: 5835879 - DNA, 25 bp, Homo sapien
cttcttggacttctatgtgcttgtc

SEQ ID NO: 5835880 - DNA, 25 bp, Homo sapien
taataggtaccaggcagcagattgc

SEQ ID NO: 5835881 - DNA, 25 bp, Homo sapien
ggggatagtgacagtaataggtacc

SEQ ID NO: 5835882 - DNA, 25 bp, Homo sapien
gggaacatgaagagatggaatcaca

SEQ ID NO: 5835883 - DNA, 25 bp, Homo sapien
tggccaccatgctggggatagtgac

SEQ ID NO: 5835884 - DNA, 25 bp, Homo sapien
ggttgggcatagccacccgagtatc

SEQ ID NO: 5835885 - DNA, 25 bp, Homo sapien
atctgagaacaccctgcccggctgg

SEQ ID NO: 5835886 - DNA, 25 bp, Homo sapien
ggcagcagattgcctgaaacatcca

SEQ ID NO: 5835887 - DNA, 25 bp, Homo sapien
ggcccctgctcaaccacctgtgggt

SEQ ID NO: 5835888 - DNA, 25 bp, Homo sapien
ctgcccggctgggaagaattttctg

SEQ ID NO: 5835889 - DNA, 25 bp, Homo sapien
gccaggaaggtgctgccccgagtgg

SEQ ID NO: 5835890 - DNA, 25 bp, Homo sapien
tcacactattcttaagagcgtttgc

SEQ ID NO: 5835891 - DNA, 25 bp, Homo sapien
taaatgctcacaaagcaagaggctc

SEQ ID NO: 5835892 - DNA, 25 bp, Homo sapien
aggaacttgacctttgtatttgtaa

SEQ ID NO: 5835893 - DNA, 25 bp, Homo sapien
ccctgcctggcatccaggagccacg

SEQ ID NO: 5835894 - DNA, 25 bp, Homo sapien
aaccgattctgccaactggagatcc

SEQ ID NO: 5835895 - DNA, 25 bp, Homo sapien
cttggctgcagttaactgtcctggg

SEQ ID NO: 5835896 - DNA, 25 bp, Homo sapien
atggcccctgtccaaactggagcac

SEQ ID NO: 5835897 - DNA, 25 bp, Homo sapien
cctggccaccatgctggggatagtg

SEQ ID NO: 5835898 - DNA, 25 bp, Homo sapien
tcttcagcatgagagagacaaggaa

SEQ ID NO: 5835899 - DNA, 25 bp, Homo sapien
gaacagtagagtaccctcctctgga

SEQ ID NO: 5835900 - DNA, 25 bp, Homo sapien
aatgctcacaaagcaagaggctcca

SEQ ID NO: 5835901 - DNA, 25 bp, Homo sapien
tgggttctcctggctagttcctcaa

SEQ ID NO: 5835902 - DNA, 25 bp, Homo sapien
tcagcaaatgtccctaggaccaggc

SEQ ID NO: 5835903 - DNA, 25 bp, Homo sapien
ctgtactgggcaagcctggccacca

SEQ ID NO: 5835904 - DNA, 25 bp, Homo sapien
caggcagcagattgcctgaaacatc

SEQ ID NO: 5835905 - DNA, 25 bp, Homo sapien
cgtttgccaagtccaggaacttgac

SEQ ID NO: 5835906 - DNA, 25 bp, Homo sapien
agaattttctgggaacatgaagaga

SEQ ID NO: 5835907 - DNA, 25 bp, Homo sapien
caaactggagcacagcctggggccc

SEQ ID NO: 5835908 - DNA, 25 bp, Homo sapien
atagccacccgagtatccaaccaga

SEQ ID NO: 5835909 - DNA, 25 bp, Homo sapien
ccggctgggaagaattttctgggaa

SEQ ID NO: 5835910 - DNA, 25 bp, Homo sapien
ctcacaaagcaagaggctccacact

SEQ ID NO: 5835911 - DNA, 25 bp, Homo sapien
tgaaacatccaggtcccttcttgga

SEQ ID NO: 5835912 - DNA, 25 bp, Homo sapien
tattcttaagagcgtttgccaagtc

SEQ ID NO: 5835913 - DNA, 25 bp, Homo sapien
ttgtcccaaagattatgggtgacct

SEQ ID NO: 5835914 - DNA, 25 bp, Homo sapien
gcaagaggctccacacttctggcag

SEQ ID NO: 5835915 - DNA, 25 bp, Homo sapien
ccacacttctggcaggccagggcct

SEQ ID NO: 5835916 - DNA, 25 bp, Homo sapien
tttctctggattctgacccaggctt

SEQ ID NO: 5835917 - DNA, 25 bp, Homo sapien
caaatgtccctaggaccaggccctg

SEQ ID NO: 5835918 - DNA, 25 bp, Homo sapien
tctggattctgacccaggcttctgg

SEQ ID NO: 5835919 - DNA, 25 bp, Homo sapien
cttaaatgctcacaaagcaagaggc

SEQ ID NO: 5835920 - DNA, 25 bp, Homo sapien
gtcccaaagattatgggtgaccttg

SEQ ID NO: 5835921 - DNA, 25 bp, Homo sapien
cccaggcttctgggttctcctggct

SEQ ID NO: 5835922 - DNA, 25 bp, Homo sapien
aggagaatacaggtgccaggaaggt

SEQ ID NO: 5835923 - DNA, 25 bp, Homo sapien
tgacagtaataggtaccaggcagca

SEQ ID NO: 5835924 - DNA, 25 bp, Homo sapien
cggcaatccagccctcctcagccca

SEQ ID NO: 5835925 - DNA, 25 bp, Homo sapien
tgctgccccgagtgggtgtgtgacc

SEQ ID NO: 5835926 - DNA, 25 bp, Homo sapien
ccatgctggggatagtgacagtaat

SEQ ID NO: 5835927 - DNA, 25 bp, Homo sapien
ggatagtgacagtaataggtaccag

SEQ ID NO: 5835928 - DNA, 25 bp, Homo sapien
atgaagagatggaatcacactattc

SEQ ID NO: 5835929 - DNA, 25 bp, Homo sapien
tccctaggaccaggccctggactga

SEQ ID NO: 5835930 - DNA, 25 bp, Homo sapien
gcggggatgtggatacagggcctgc

SEQ ID NO: 5835931 - DNA, 25 bp, Homo sapien
actgatggtagatgcccctctccat

SEQ ID NO: 5835932 - DNA, 25 bp, Homo sapien
cctgtccaaactggagcacagcctg

SEQ ID NO: 5835933 - DNA, 25 bp, Homo sapien
agtgccttctagagccattgcgggg

SEQ ID NO: 5835934 - DNA, 25 bp, Homo sapien
ggaccaggccctggactgatggtag

SEQ ID NO: 5835935 - DNA, 25 bp, Homo sapien
tccagcgtcgcctgtgtctgtccag

SEQ ID NO: 5835936 - DNA, 25 bp, Homo sapien
gcccaaggacaccaactttctgccc

SEQ ID NO: 5835937 - DNA, 25 bp, Homo sapien
accagctccatttctctggattctg

SEQ ID NO: 5835938 - DNA, 25 bp, Homo sapien
acagtagagtaccctcctctggagg

SEQ ID NO: 5835939 - DNA, 25 bp, Homo sapien
aaggacaccaactttctgcccttgt

SEQ ID NO: 5835940 - DNA, 25 bp, Homo sapien
gcatctgccgatggcccctgtccaa

SEQ ID NO: 5835941 - DNA, 25 bp, Homo sapien
cttgtcactcctgcatctgccgatg

SEQ ID NO: 5835942 - DNA, 25 bp, Homo sapien
actggagatccagcgtcgcctgtgt

SEQ ID NO: 5835943 - DNA, 25 bp, Homo sapien
ccaagtccaggaacttgacctttgt

SEQ ID NO: 5835944 - DNA, 25 bp, Homo sapien
ctgcatctgccgatggcccctgtcc

SEQ ID NO: 5835945 - DNA, 25 bp, Homo sapien
cttgacctttgtatttgtaaaaata

SEQ ID NO: 5835946 - DNA, 25 bp, Homo sapien
tgtgtctgtccagaccctgcctggc

SEQ ID NO: 5835947 - DNA, 25 bp, Homo sapien
ctgcctggcatccaggagccacggc

SEQ ID NO: 5835948 - DNA, 25 bp, Homo sapien
tagttcctcaaaacttccctgtatg

SEQ ID NO: 5835949 - DNA, 25 bp, Homo sapien
ggctgggaagaattttctgggaaca

SEQ ID NO: 5835950 - DNA, 25 bp, Homo sapien
caaagcaagaggctccacacttctg

SEQ ID NO: 5835951 - DNA, 25 bp, Homo sapien
ggttctcctggctagttcctcaaaa

SEQ ID NO: 5835952 - DNA, 25 bp, Homo sapien
aggacctttaaagctaagctgtact

SEQ ID NO: 5835953 - DNA, 25 bp, Homo sapien
ggtgtgtgaccaggcagtgatgcag

SEQ ID NO: 5835954 - DNA, 25 bp, Homo sapien
cccttcttggacttctatgtgcttg

SEQ ID NO: 5835955 - DNA, 25 bp, Homo sapien
ctcatggaacagtgccttctagagc

SEQ ID NO: 5835956 - DNA, 25 bp, Homo sapien
ggagcacagcctggggcccctgctc

SEQ ID NO: 5835957 - DNA, 25 bp, Homo sapien
ttgcggggatgtggatacagggcct

SEQ ID NO: 5835958 - DNA, 25 bp, Homo sapien
ctgggaagaattttctgggaacatg

SEQ ID NO: 5835959 - DNA, 25 bp, Homo sapien
gcctggcatccaggagccacggctc

SEQ ID NO: 5835960 - DNA, 25 bp, Homo sapien
cagtgatgcagccggcaatccagcc

SEQ ID NO: 5835961 - DNA, 25 bp, Homo sapien
tgatctgagaacaccctgcccggct

SEQ ID NO: 5835962 - DNA, 25 bp, Homo sapien
gtgtgcctttcctgatctgagaaca

SEQ ID NO: 5835963 - DNA, 25 bp, Homo sapien
ttctggcaggccagggcctttctct

SEQ ID NO: 5835964 - DNA, 25 bp, Homo sapien
ggacttctatgtgcttgtcccaaag

SEQ ID NO: 5835965 - DNA, 25 bp, Homo sapien
gtatccaaccagaaccgattctgcc

SEQ ID NO: 5835966 - DNA, 25 bp, Homo sapien
ccagaaccgattctgccaactggag

SEQ ID NO: 5835967 - DNA, 25 bp, Homo sapien
agtagagtaccctcctctggaggac

SEQ ID NO: 5835968 - DNA, 25 bp, Homo sapien
gacccaggcttctgggttctcctgg

SEQ ID NO: 5835969 - DNA, 25 bp, Homo sapien
atggtagatgcccctctccatgctc

SEQ ID NO: 5835970 - DNA, 25 bp, Homo sapien
atctcttaaatgctcacaaagcaag

SEQ ID NO: 5835971 - DNA, 25 bp, Homo sapien
tctgtccagaccctgcctggcatcc

SEQ ID NO: 5835972 - DNA, 25 bp, Homo sapien
tccaaactggagcacagcctggggc

SEQ ID NO: 5835973 - DNA, 25 bp, Homo sapien
ttatgggtgaccttgtaagtgtgcc

SEQ ID NO: 5835974 - DNA, 25 bp, Homo sapien
gtaaaaatacacatctcttaaatgc

SEQ ID NO: 5835975 - DNA, 25 bp, Homo sapien
cacagcctggggcccctgctcaacc

SEQ ID NO: 5835976 - DNA, 25 bp, Homo sapien
aagtccaggaacttgacctttgtat

SEQ ID NO: 5835977 - DNA, 25 bp, Homo sapien
tgccttctagagccattgcggggat

SEQ ID NO: 5835978 - DNA, 25 bp, Homo sapien
atgtggatacagggcctgccattct

SEQ ID NO: 5835979 - DNA, 25 bp, Homo sapien
gccaccatgctggggatagtgacag

SEQ ID NO: 5835980 - DNA, 25 bp, Homo sapien
caggccagggcctttctcttcagca

SEQ ID NO: 5835981 - DNA, 25 bp, Homo sapien
ctgggtggattcagtgtccagagcc

SEQ ID NO: 5835982 - DNA, 25 bp, Homo sapien
gatgcccctctccatgctcttggct

SEQ ID NO: 5835983 - DNA, 25 bp, Homo sapien
ccttgtaagtgtgcctttcctgatc

SEQ ID NO: 5835984 - DNA, 25 bp, Homo sapien
cccacgccccaggagaatacaggtg

SEQ ID NO: 5835985 - DNA, 25 bp, Homo sapien
gaggctccacacttctggcaggcca

SEQ ID NO: 5835986 - DNA, 25 bp, Homo sapien
agcaaatgtccctaggaccaggccc

SEQ ID NO: 5835987 - DNA, 25 bp, Homo sapien
ctgccaactggagatccagcgtcgc

SEQ ID NO: 5835988 - DNA, 25 bp, Homo sapien
gacaaggaacagtagagtaccctcc

SEQ ID NO: 5835989 - DNA, 25 bp, Homo sapien
caggagccacggctcatggaacagt

SEQ ID NO: 5835990 - DNA, 25 bp, Homo sapien
aggtgccaggaaggtgctgccccga

SEQ ID NO: 5835991 - DNA, 25 bp, Homo sapien
cattgcggggatgtggatacagggc

SEQ ID NO: 5835992 - DNA, 25 bp, Homo sapien
gattctgccaactggagatccagcg

SEQ ID NO: 5835993 - DNA, 25 bp, Homo sapien
ggatgtggatacagggcctgccatt

SEQ ID NO: 5835994 - DNA, 25 bp, Homo sapien
ctgacccaggcttctgggttctcct

SEQ ID NO: 5835995 - DNA, 25 bp, Homo sapien
gagacaaggaacagtagagtaccct

SEQ ID NO: 5835996 - DNA, 25 bp, Homo sapien
caaccacctgtgggttgggcatagc

SEQ ID NO: 5835997 - DNA, 25 bp, Homo sapien
actttctgcccttgtcactcctgca

SEQ ID NO: 5835998 - DNA, 25 bp, Homo sapien
gcgatccctgctctgtctgaggtgg

SEQ ID NO: 5835999 - DNA, 25 bp, Homo sapien
ccagggcctttctcttcagcatgag

SEQ ID NO: 5836000 - DNA, 25 bp, Homo sapien
acccgagtatccaaccagaaccgat

SEQ ID NO: 5836001 - DNA, 25 bp, Homo sapien
cctgatctgagaacaccctgcccgg

SEQ ID NO: 5836002 - DNA, 25 bp, Homo sapien
gatccagcgtcgcctgtgtctgtcc

SEQ ID NO: 5836003 - DNA, 25 bp, Homo sapien
tccctgctctgtctgaggtggggga

SEQ ID NO: 5836004 - DNA, 25 bp, Homo sapien
aagaggctccacacttctggcaggc

SEQ ID NO: 5836005 - DNA, 25 bp, Homo sapien
tggaacagtgccttctagagccatt

SEQ ID NO: 5836006 - DNA, 25 bp, Homo sapien
ggactgcccacgccccaggagaata

SEQ ID NO: 5836007 - DNA, 25 bp, Homo sapien
agattgcctgaaacatccaggtccc

SEQ ID NO: 5836008 - DNA, 25 bp, Homo sapien
cccctgctcaaccacctgtgggttg

SEQ ID NO: 5836009 - DNA, 25 bp, Homo sapien
ctctgagcgatccctgctctgtctg

SEQ ID NO: 5836010 - DNA, 25 bp, Homo sapien
agtaataggtaccaggcagcagatt

SEQ ID NO: 5836011 - DNA, 25 bp, Homo sapien
gctgcccagctgggactgcccacgc

SEQ ID NO: 5836012 - DNA, 25 bp, Homo sapien
gctgggactgcccacgccccaggag

SEQ ID NO: 5836013 - DNA, 25 bp, Homo sapien
cctaggaccaggccctggactgatg

SEQ ID NO: 5836014 - DNA, 25 bp, Homo sapien
ctagagccattgcggggatgtggat

SEQ ID NO: 5836015 - DNA, 25 bp, Homo sapien
gccgatggcccctgtccaaactgga

SEQ ID NO: 5836016 - DNA, 25 bp, Homo sapien
ggcatccaggagccacggctcatgg

SEQ ID NO: 5836017 - DNA, 25 bp, Homo sapien
gcgtcgcctgtgtctgtccagaccc

SEQ ID NO: 5836018 - DNA, 25 bp, Homo sapien
cacgccccaggagaatacaggtgcc

SEQ ID NO: 5836019 - DNA, 25 bp, Homo sapien
agccacccgagtatccaaccagaac

SEQ ID NO: 5836020 - DNA, 25 bp, Homo sapien
tctgcccttgtcactcctgcatctg

SEQ ID NO: 5836021 - DNA, 25 bp, Homo sapien
caactttctgcccttgtcactcctg

SEQ ID NO: 5836022 - DNA, 25 bp, Homo sapien
agaaccgattctgccaactggagat

SEQ ID NO: 5836023 - DNA, 25 bp, Homo sapien
ggtagatgcccctctccatgctctt

SEQ ID NO: 5836024 - DNA, 25 bp, Homo sapien
gttaactgtcctgggtggattcagt

SEQ ID NO: 5836025 - DNA, 25 bp, Homo sapien
tcttggacttctatgtgcttgtccc

SEQ ID NO: 5836026 - DNA, 25 bp, Homo sapien
ggcaggccagggcctttctcttcag

SEQ ID NO: 5836027 - DNA, 25 bp, Homo sapien
agggcctgccattctcagcaaatgt

SEQ ID NO: 5836028 - DNA, 25 bp, Homo sapien
tgtgggttgggcatagccacccgag

SEQ ID NO: 5836029 - DNA, 25 bp, Homo sapien
gtggatacagggcctgccattctca

SEQ ID NO: 5836030 - DNA, 25 bp, Homo sapien
cctgtgggttgggcatagccacccg

SEQ ID NO: 5836031 - DNA, 25 bp, Homo sapien
gctccatttctctggattctgaccc

SEQ ID NO: 5836032 - DNA, 25 bp, Homo sapien
cagcatgagagagacaaggaacagt

SEQ ID NO: 5836033 - DNA, 25 bp, Homo sapien
tgcccacgccccaggagaatacagg

SEQ ID NO: 5836034 - DNA, 25 bp, Homo sapien
actattcttaagagcgtttgccaag

SEQ ID NO: 5836035 - DNA, 25 bp, Homo sapien
gagaatacaggtgccaggaaggtgc

SEQ ID NO: 5836036 - DNA, 25 bp, Homo sapien
gtgccaggaaggtgctgccccgagt

SEQ ID NO: 5836037 - DNA, 25 bp, Homo sapien
cagcgtcgcctgtgtctgtccagac

SEQ ID NO: 5836038 - DNA, 25 bp, Homo sapien
ctggggcccctgctcaaccacctgt

SEQ ID NO: 5836039 - DNA, 25 bp, Homo sapien
ttctgccaactggagatccagcgtc

SEQ ID NO: 5836040 - DNA, 25 bp, Homo sapien
gaagagatggaatcacactattctt

SEQ ID NO: 5836041 - DNA, 25 bp, Homo sapien
gcatgagagagacaaggaacagtag

SEQ ID NO: 5836042 - DNA, 25 bp, Homo sapien
tgcccttgtcactcctgcatctgcc

SEQ ID NO: 5836043 - DNA, 25 bp, Homo sapien
acatctcttaaatgctcacaaagca

SEQ ID NO: 5836044 - DNA, 25 bp, Homo sapien
gccaactggagatccagcgtcgcct

SEQ ID NO: 5836045 - DNA, 25 bp, Homo sapien
ggattcagtgtccagagcctctgag

SEQ ID NO: 5836046 - DNA, 25 bp, Homo sapien
gggggaagcaggtgaccagctccat

SEQ ID NO: 5836047 - DNA, 25 bp, Homo sapien
atacacatctcttaaatgctcacaa

SEQ ID NO: 5836048 - DNA, 25 bp, Homo sapien
gcctctgagcgatccctgctctgtc

SEQ ID NO: 5836049 - DNA, 25 bp, Homo sapien
cggctgcccagctgggactgcccac

SEQ ID NO: 5836050 - DNA, 25 bp, Homo sapien
cctgccattctcagcaaatgtccct

SEQ ID NO: 5836051 - DNA, 25 bp, Homo sapien
ctcctggctagttcctcaaaacttc

SEQ ID NO: 5836052 - DNA, 25 bp, Homo sapien
tctccatgctcttggctgcagttaa

SEQ ID NO: 5836053 - DNA, 25 bp, Homo sapien
tgtccagagcctctgagcgatccct

SEQ ID NO: 5836054 - DNA, 25 bp, Homo sapien
caggcttctgggttctcctggctag

SEQ ID NO: 5836055 - DNA, 25 bp, Homo sapien
gacctttgtatttgtaaaaatacac

SEQ ID NO: 5836056 - DNA, 25 bp, Homo sapien
ccgattctgccaactggagatccag

SEQ ID NO: 5836057 - DNA, 25 bp, Homo sapien
actcctgcatctgccgatggcccct

SEQ ID NO: 5836058 - DNA, 25 bp, Homo sapien
agggcctttctcttcagcatgagag

SEQ ID NO: 5836059 - DNA, 25 bp, Homo sapien
cccctgtccaaactggagcacagcc

SEQ ID NO: 5836060 - DNA, 25 bp, Homo sapien
cagccctcctcagcccaaggacacc

SEQ ID NO: 5836061 - DNA, 25 bp, Homo sapien
atccaggtcccttcttggacttcta

SEQ ID NO: 5836062 - DNA, 25 bp, Homo sapien
cctgctctgtctgaggtgggggaag

SEQ ID NO: 5836063 - DNA, 25 bp, Homo sapien
gggaagaattttctgggaacatgaa

SEQ ID NO: 5836064 - DNA, 25 bp, Homo sapien
tgtgcggctgcccagctgggactgc

SEQ ID NO: 5836065 - DNA, 25 bp, Homo sapien
tgtgtgaccaggcagtgatgcagcc

SEQ ID NO: 5836066 - DNA, 25 bp, Homo sapien
aatcacactattcttaagagcgttt

SEQ ID NO: 5836067 - DNA, 25 bp, Homo sapien
aaacatccaggtcccttcttggact

SEQ ID NO: 5836068 - DNA, 25 bp, Homo sapien
gagtaccctcctctggaggactggc

SEQ ID NO: 5836069 - DNA, 25 bp, Homo sapien
ccaaggacaccaactttctgccctt

SEQ ID NO: 5836070 - DNA, 25 bp, Homo sapien
ctcaaaacttccctgtatgaaaagg

SEQ ID NO: 5836071 - DNA, 25 bp, Homo sapien
ccacggctcatggaacagtgccttc

SEQ ID NO: 5836072 - DNA, 25 bp, Homo sapien
aaggtgctgccccgagtgggtgtgt

SEQ ID NO: 5836073 - DNA, 25 bp, Homo sapien
ttgtaaaaatacacatctcttaaat

SEQ ID NO: 5836074 - DNA, 25 bp, Homo sapien
gagaacaccctgcccggctgggaag

SEQ ID NO: 5836075 - DNA, 25 bp, Homo sapien
cacaaagcaagaggctccacacttc

SEQ ID NO: 5836076 - DNA, 25 bp, Homo sapien
gtactgggcaagcctggccaccatg

SEQ ID NO: 5836077 - DNA, 25 bp, Homo sapien
catttctctggattctgacccaggc

SEQ ID NO: 5836078 - DNA, 25 bp, Homo sapien
catgctcttggctgcagttaactgt

SEQ ID NO: 5836079 - DNA, 25 bp, Homo sapien
aggatgtgcggctgcccagctggga

SEQ ID NO: 5836080 - DNA, 25 bp, Homo sapien
gtcgcctgtgtctgtccagaccctg

SEQ ID NO: 5836081 - DNA, 25 bp, Homo sapien
tccaggagccacggctcatggaaca

SEQ ID NO: 5836082 - DNA, 25 bp, Homo sapien
tttctcttcagcatgagagagacaa

SEQ ID NO: 5836083 - DNA, 25 bp, Homo sapien
gtgcctttcctgatctgagaacacc

SEQ ID NO: 5836084 - DNA, 25 bp, Homo sapien
cctggctagttcctcaaaacttccc

SEQ ID NO: 5836085 - DNA, 25 bp, Homo sapien
gggaagcaggtgaccagctccattt

SEQ ID NO: 5836086 - DNA, 25 bp, Homo sapien
tttctgcccttgtcactcctgcatc

SEQ ID NO: 5836087 - DNA, 25 bp, Homo sapien
gagtatccaaccagaaccgattctg

SEQ ID NO: 5836088 - DNA, 25 bp, Homo sapien
taactgtcctgggtggattcagtgt

SEQ ID NO: 5836089 - DNA, 25 bp, Homo sapien
tgccaagtccaggaacttgaccttt

SEQ ID NO: 5836090 - DNA, 25 bp, Homo sapien
tccatttctctggattctgacccag

SEQ ID NO: 5836091 - DNA, 25 bp, Homo sapien
tggattctgacccaggcttctgggt

SEQ ID NO: 5836092 - DNA, 25 bp, Homo sapien
cctctccatgctcttggctgcagtt

SEQ ID NO: 5836093 - DNA, 25 bp, Homo sapien
gcccggctgggaagaattttctggg

SEQ ID NO: 5836094 - DNA, 25 bp, Homo sapien
cccgagtgggtgtgtgaccaggcag

SEQ ID NO: 5836095 - DNA, 25 bp, Homo sapien
ggcccctgtccaaactggagcacag

SEQ ID NO: 5836096 - DNA, 25 bp, Homo sapien
gagcctctgagcgatccctgctctg

SEQ ID NO: 5836097 - DNA, 25 bp, Homo sapien
ggggatgtggatacagggcctgcca

SEQ ID NO: 5836098 - DNA, 25 bp, Homo sapien
catccaggagccacggctcatggaa

SEQ ID NO: 5836099 - DNA, 25 bp, Homo sapien
aatccagccctcctcagcccaagga

SEQ ID NO: 5836100 - DNA, 25 bp, Homo sapien
atctgccgatggcccctgtccaaac

SEQ ID NO: 5836101 - DNA, 25 bp, Homo sapien
cctttaaagctaagctgtactgggc

SEQ ID NO: 5836102 - DNA, 25 bp, Homo sapien
aatgtccctaggaccaggccctgga

SEQ ID NO: 5836103 - DNA, 25 bp, Homo sapien
tgctcaaccacctgtgggttgggca

SEQ ID NO: 5836104 - DNA, 25 bp, Homo sapien
ctggagcacagcctggggcccctgc

SEQ ID NO: 5836105 - DNA, 25 bp, Homo sapien
cccaaagattatgggtgaccttgta

SEQ ID NO: 5836106 - DNA, 25 bp, Homo sapien
ctatgtgcttgtcccaaagattatg

SEQ ID NO: 5836107 - DNA, 25 bp, Homo sapien
caggcagtgatgcagccggcaatcc

SEQ ID NO: 5836108 - DNA, 25 bp, Homo sapien
tgcagttaactgtcctgggtggatt

SEQ ID NO: 5836109 - DNA, 25 bp, Homo sapien
cagagcctctgagcgatccctgctc

SEQ ID NO: 5836110 - DNA, 25 bp, Homo sapien
ccctgcccggctgggaagaattttc

SEQ ID NO: 5836111 - DNA, 25 bp, Homo sapien
atgggtgaccttgtaagtgtgcctt

SEQ ID NO: 5836112 - DNA, 25 bp, Homo sapien
ctcaaccacctgtgggttgggcata

SEQ ID NO: 5836113 - DNA, 25 bp, Homo sapien
accacctgtgggttgggcatagcca

SEQ ID NO: 5836114 - DNA, 25 bp, Homo sapien
attctcagcaaatgtccctaggacc

SEQ ID NO: 5836115 - DNA, 25 bp, Homo sapien
ccacccgagtatccaaccagaaccg

SEQ ID NO: 5836116 - DNA, 25 bp, Homo sapien
ccaggagaatacaggtgccaggaag

SEQ ID NO: 5836117 - DNA, 25 bp, Homo sapien
gaacttgacctttgtatttgtaaaa

SEQ ID NO: 5836118 - DNA, 25 bp, Homo sapien
ggctccacacttctggcaggccagg

SEQ ID NO: 5836119 - DNA, 25 bp, Homo sapien
ctgggaacatgaagagatggaatca

SEQ ID NO: 5836120 - DNA, 25 bp, Homo sapien
acaccctgcccggctgggaagaatt

SEQ ID NO: 5836121 - DNA, 25 bp, Homo sapien
cttaagagcgtttgccaagtccagg

SEQ ID NO: 5836122 - DNA, 25 bp, Homo sapien
ctcttaaatgctcacaaagcaagag

SEQ ID NO: 5836123 - DNA, 25 bp, Homo sapien
gaacatgaagagatggaatcacact

SEQ ID NO: 5836124 - DNA, 25 bp, Homo sapien
ggccagggcctttctcttcagcatg

SEQ ID NO: 5836125 - DNA, 25 bp, Homo sapien
atggaatcacactattcttaagagc

SEQ ID NO: 5836126 - DNA, 25 bp, Homo sapien
ggaaggtgctgccccgagtgggtgt

SEQ ID NO: 5836127 - DNA, 25 bp, Homo sapien
ctgagaacaccctgcccggctggga

SEQ ID NO: 5836128 - DNA, 25 bp, Homo sapien
tccatgctcttggctgcagttaact

SEQ ID NO: 5836129 - DNA, 25 bp, Homo sapien
tgctcttggctgcagttaactgtcc

SEQ ID NO: 5836130 - DNA, 25 bp, Homo sapien
cctttctcttcagcatgagagagac

SEQ ID NO: 5836131 - DNA, 25 bp, Homo sapien
ctgccgatggcccctgtccaaactg

SEQ ID NO: 5836132 - DNA, 25 bp, Homo sapien
gattctgacccaggcttctgggttc

SEQ ID NO: 5836133 - DNA, 25 bp, Homo sapien
caaaaggacctttaaagctaagctg

SEQ ID NO: 5836134 - DNA, 25 bp, Homo sapien
ctccacacttctggcaggccagggc

SEQ ID NO: 5836135 - DNA, 25 bp, Homo sapien
ggcctgccattctcagcaaatgtcc

SEQ ID NO: 5836136 - DNA, 25 bp, Homo sapien
gccggcaatccagccctcctcagcc

SEQ ID NO: 5836137 - DNA, 25 bp, Homo sapien
ttctatgtgcttgtcccaaagatta

SEQ ID NO: 5836138 - DNA, 25 bp, Homo sapien
atacagggcctgccattctcagcaa

SEQ ID NO: 5836139 - DNA, 25 bp, Homo sapien
agccacggctcatggaacagtgcct

SEQ ID NO: 5836140 - DNA, 25 bp, Homo sapien
gcatagccacccgagtatccaacca

SEQ ID NO: 5836141 - DNA, 25 bp, Homo sapien
gaccctgcctggcatccaggagcca

SEQ ID NO: 5836142 - DNA, 25 bp, Homo sapien
ctcagcccaaggacaccaactttct

SEQ ID NO: 5836143 - DNA, 25 bp, Homo sapien
tgaggatgtgcggctgcccagctgg

SEQ ID NO: 5836144 - DNA, 25 bp, Homo sapien
gaagcaggtgaccagctccatttct

SEQ ID NO: 5836145 - DNA, 25 bp, Homo sapien
ctgtatgaaaaggacaaccaaaagg

SEQ ID NO: 5836146 - DNA, 25 bp, Homo sapien
cagccggcaatccagccctcctcag

SEQ ID NO: 5836147 - DNA, 25 bp, Homo sapien
tgggtgtgtgaccaggcagtgatgc

SEQ ID NO: 5836148 - DNA, 25 bp, Homo sapien
caaagattatgggtgaccttgtaag

SEQ ID NO: 5836149 - DNA, 25 bp, Homo sapien
agatggaatcacactattcttaaga

SEQ ID NO: 5836150 - DNA, 25 bp, Homo sapien
tggctagttcctcaaaacttccctg

SEQ ID NO: 5836151 - DNA, 25 bp, Homo sapien
gattatgggtgaccttgtaagtgtg

SEQ ID NO: 5836152 - DNA, 25 bp, Homo sapien
tagatgcccctctccatgctcttgg

SEQ ID NO: 5836153 - DNA, 25 bp, Homo sapien
caggaaggtgctgccccgagtgggt

SEQ ID NO: 5836154 - DNA, 25 bp, Homo sapien
aggaacagtagagtaccctcctctg

SEQ ID NO: 5836155 - DNA, 25 bp, Homo sapien
tgcctgaaacatccaggtcccttct

SEQ ID NO: 5836156 - DNA, 25 bp, Homo sapien
gcctttcctgatctgagaacaccct

SEQ ID NO: 5836157 - DNA, 25 bp, Homo sapien
gaccttgtaagtgtgcctttcctga

SEQ ID NO: 5836158 - DNA, 25 bp, Homo sapien
acactattcttaagagcgtttgcca

SEQ ID NO: 5836159 - DNA, 25 bp, Homo sapien
acagggcctgccattctcagcaaat

SEQ ID NO: 5836160 - DNA, 25 bp, Homo sapien
acaggtgccaggaaggtgctgcccc

SEQ ID NO: 5836161 - DNA, 25 bp, Homo sapien
cagctccatttctctggattctgac

SEQ ID NO: 5836162 - DNA, 25 bp, Homo sapien
gtatgaaaaggacaaccaaaaggac

SEQ ID NO: 5836163 - DNA, 25 bp, Homo sapien
tgtcctgggtggattcagtgtccag

SEQ ID NO: 5836164 - DNA, 25 bp, Homo sapien
caccatgctggggatagtgacagta

SEQ ID NO: 5836165 - DNA, 25 bp, Homo sapien
tgggttgggcatagccacccgagta

SEQ ID NO: 5836166 - DNA, 25 bp, Homo sapien
gaatacaggtgccaggaaggtgctg

SEQ ID NO: 5836167 - DNA, 25 bp, Homo sapien
tttgccaagtccaggaacttgacct

SEQ ID NO: 5836168 - DNA, 25 bp, Homo sapien
ctcttggctgcagttaactgtcctg

SEQ ID NO: 5836169 - DNA, 25 bp, Homo sapien
atagtgacagtaataggtaccaggc

SEQ ID NO: 5836170 - DNA, 25 bp, Homo sapien
cagaccctgcctggcatccaggagc

SEQ ID NO: 5836171 - DNA, 25 bp, Homo sapien
tccagccctcctcagcccaaggaca

SEQ ID NO: 5836172 - DNA, 25 bp, Homo sapien
agcacagcctggggcccctgctcaa

SEQ ID NO: 5836173 - DNA, 25 bp, Homo sapien
tcctgggtggattcagtgtccagag

SEQ ID NO: 5836174 - DNA, 25 bp, Homo sapien
tctcagcaaatgtccctaggaccag

SEQ ID NO: 5836175 - DNA, 25 bp, Homo sapien
gggtggattcagtgtccagagcctc

SEQ ID NO: 5836176 - DNA, 25 bp, Homo sapien
ggactgatggtagatgcccctctcc

SEQ ID NO: 5836177 - DNA, 25 bp, Homo sapien
aggccctgtatccacatccccgcaa

SEQ ID NO: 5836178 - DNA, 25 bp, Homo sapien
gcaaacgctcttaagaatagtgtga

SEQ ID NO: 5836179 - DNA, 25 bp, Homo sapien
actcggggcagcaccttcctggcac

SEQ ID NO: 5836180 - DNA, 25 bp, Homo sapien
ccaagagcatggagaggggcatcta

SEQ ID NO: 5836181 - DNA, 25 bp, Homo sapien
ctccagttggcagaatcggttctgg

SEQ ID NO: 5836182 - DNA, 25 bp, Homo sapien
ttttgaggaactagccaggagaacc

SEQ ID NO: 5836183 - DNA, 25 bp, Homo sapien
ctctactgttccttgtctctctcat

SEQ ID NO: 5836184 - DNA, 25 bp, Homo sapien
gtctggacagacacaggcgacgctg

SEQ ID NO: 5836185 - DNA, 25 bp, Homo sapien
tggcaggccctgtatccacatcccc

SEQ ID NO: 5836186 - DNA, 25 bp, Homo sapien
catgctgaagagaaaggccctggcc

SEQ ID NO: 5836187 - DNA, 25 bp, Homo sapien
tcagtccagggcctggtcctaggga

SEQ ID NO: 5836188 - DNA, 25 bp, Homo sapien
acacccactcggggcagcaccttcc

SEQ ID NO: 5836189 - DNA, 25 bp, Homo sapien
tgggctgaggagggctggattgccg

SEQ ID NO: 5836190 - DNA, 25 bp, Homo sapien
aggcgacgctggatctccagttggc

SEQ ID NO: 5836191 - DNA, 25 bp, Homo sapien
agccaggagaacccagaagcctggg

SEQ ID NO: 5836192 - DNA, 25 bp, Homo sapien
agccaagagcatggagaggggcatc

SEQ ID NO: 5836193 - DNA, 25 bp, Homo sapien
gggacaagcacatagaagtccaaga

SEQ ID NO: 5836194 - DNA, 25 bp, Homo sapien
ttcctggacttggcaaacgctctta

SEQ ID NO: 5836195 - DNA, 25 bp, Homo sapien
acagacacaggcgacgctggatctc

SEQ ID NO: 5836196 - DNA, 25 bp, Homo sapien
acccagaagcctgggtcagaatcca

SEQ ID NO: 5836197 - DNA, 25 bp, Homo sapien
gaaggcactgttccatgagccgtgg

SEQ ID NO: 5836198 - DNA, 25 bp, Homo sapien
ctggatgccaggcagggtctggaca

SEQ ID NO: 5836199 - DNA, 25 bp, Homo sapien
tctgctgcctggtacctattactgt

SEQ ID NO: 5836200 - DNA, 25 bp, Homo sapien
cttcccagccgggcagggtgttctc

SEQ ID NO: 5836201 - DNA, 25 bp, Homo sapien
gggtcagaatccagagaaatggagc

SEQ ID NO: 5836202 - DNA, 25 bp, Homo sapien
agcacatagaagtccaagaagggac

SEQ ID NO: 5836203 - DNA, 25 bp, Homo sapien
cagggcctggtcctagggacatttg

SEQ ID NO: 5836204 - DNA, 25 bp, Homo sapien
ttggacaggggccatcggcagatgc

SEQ ID NO: 5836205 - DNA, 25 bp, Homo sapien
agggatcgctcagaggctctggaca

SEQ ID NO: 5836206 - DNA, 25 bp, Homo sapien
ccagtacagcttagctttaaaggtc

SEQ ID NO: 5836207 - DNA, 25 bp, Homo sapien
catggtggccaggcttgcccagtac

SEQ ID NO: 5836208 - DNA, 25 bp, Homo sapien
gggcagtcccagctgggcagccgca

SEQ ID NO: 5836209 - DNA, 25 bp, Homo sapien
ctgtgctccagtttggacaggggcc

SEQ ID NO: 5836210 - DNA, 25 bp, Homo sapien
tccagaggagggtactctactgttc

SEQ ID NO: 5836211 - DNA, 25 bp, Homo sapien
cagggaagttttgaggaactagcca

SEQ ID NO: 5836212 - DNA, 25 bp, Homo sapien
atggagctggtcacctgcttccccc

SEQ ID NO: 5836213 - DNA, 25 bp, Homo sapien
cagaggctctggacactgaatccac

SEQ ID NO: 5836214 - DNA, 25 bp, Homo sapien
aagagcatggagaggggcatctacc

SEQ ID NO: 5836215 - DNA, 25 bp, Homo sapien
cagaagtgtggagcctcttgctttg

SEQ ID NO: 5836216 - DNA, 25 bp, Homo sapien
tggcctgccagaagtgtggagcctc

SEQ ID NO: 5836217 - DNA, 25 bp, Homo sapien
caagttcctggacttggcaaacgct

SEQ ID NO: 5836218 - DNA, 25 bp, Homo sapien
ttttcatacagggaagttttgagga

SEQ ID NO: 5836219 - DNA, 25 bp, Homo sapien
ctgcatcactgcctggtcacacacc

SEQ ID NO: 5836220 - DNA, 25 bp, Homo sapien
ctggcacctgtattctcctggggcg

SEQ ID NO: 5836221 - DNA, 25 bp, Homo sapien
ctgaagagaaaggccctggcctgcc

SEQ ID NO: 5836222 - DNA, 25 bp, Homo sapien
gatcaggaaaggcacacttacaagg

SEQ ID NO: 5836223 - DNA, 25 bp, Homo sapien
aaagttggtgtccttgggctgagga

SEQ ID NO: 5836224 - DNA, 25 bp, Homo sapien
atttgctgagaatggcaggccctgt

SEQ ID NO: 5836225 - DNA, 25 bp, Homo sapien
tgtggagcctcttgctttgtgagca

SEQ ID NO: 5836226 - DNA, 25 bp, Homo sapien
gaagagaaaggccctggcctgccag

SEQ ID NO: 5836227 - DNA, 25 bp, Homo sapien
gatactcgggtggctatgcccaacc

SEQ ID NO: 5836228 - DNA, 25 bp, Homo sapien
tgagaatggcaggccctgtatccac

SEQ ID NO: 5836229 - DNA, 25 bp, Homo sapien
tactctactgttccttgtctctctc

SEQ ID NO: 5836230 - DNA, 25 bp, Homo sapien
gcttgcccagtacagcttagcttta

SEQ ID NO: 5836231 - DNA, 25 bp, Homo sapien
tggggcgtgggcagtcccagctggg

SEQ ID NO: 5836232 - DNA, 25 bp, Homo sapien
gcctggtcctagggacatttgctga

SEQ ID NO: 5836233 - DNA, 25 bp, Homo sapien
tggcaaacgctcttaagaatagtgt

SEQ ID NO: 5836234 - DNA, 25 bp, Homo sapien
tcttcatgttcccagaaaattcttc

SEQ ID NO: 5836235 - DNA, 25 bp, Homo sapien
tcaggaaaggcacacttacaaggtc

SEQ ID NO: 5836236 - DNA, 25 bp, Homo sapien
atctaccatcagtccagggcctggt

SEQ ID NO: 5836237 - DNA, 25 bp, Homo sapien
tacagcttagctttaaaggtccttt

SEQ ID NO: 5836238 - DNA, 25 bp, Homo sapien
ccagaagcctgggtcagaatccaga

SEQ ID NO: 5836239 - DNA, 25 bp, Homo sapien
taatctttgggacaagcacatagaa

SEQ ID NO: 5836240 - DNA, 25 bp, Homo sapien
atgagccgtggctcctggatgccag

SEQ ID NO: 5836241 - DNA, 25 bp, Homo sapien
ggacagttaactgcagccaagagca

SEQ ID NO: 5836242 - DNA, 25 bp, Homo sapien
acaggcgacgctggatctccagttg

SEQ ID NO: 5836243 - DNA, 25 bp, Homo sapien
ggagaggggcatctaccatcagtcc

SEQ ID NO: 5836244 - DNA, 25 bp, Homo sapien
gcagggtgttctcagatcaggaaag

SEQ ID NO: 5836245 - DNA, 25 bp, Homo sapien
agggctggattgccggctgcatcac

SEQ ID NO: 5836246 - DNA, 25 bp, Homo sapien
tgttccatgagccgtggctcctgga

SEQ ID NO: 5836247 - DNA, 25 bp, Homo sapien
aggggccatcggcagatgcaggagt

SEQ ID NO: 5836248 - DNA, 25 bp, Homo sapien
agggtactctactgttccttgtctc

SEQ ID NO: 5836249 - DNA, 25 bp, Homo sapien
ctggacactgaatccacccaggaca

SEQ ID NO: 5836250 - DNA, 25 bp, Homo sapien
ttgtccttttcatacagggaagttt

SEQ ID NO: 5836251 - DNA, 25 bp, Homo sapien
ctggattgccggctgcatcactgcc

SEQ ID NO: 5836252 - DNA, 25 bp, Homo sapien
ctgtatccacatccccgcaatggct

SEQ ID NO: 5836253 - DNA, 25 bp, Homo sapien
caagcacatagaagtccaagaaggg

SEQ ID NO: 5836254 - DNA, 25 bp, Homo sapien
gtcaagttcctggacttggcaaacg

SEQ ID NO: 5836255 - DNA, 25 bp, Homo sapien
aatggctctagaaggcactgttcca

SEQ ID NO: 5836256 - DNA, 25 bp, Homo sapien
gtttggacaggggccatcggcagat

SEQ ID NO: 5836257 - DNA, 25 bp, Homo sapien
cagtttggacaggggccatcggcag

SEQ ID NO: 5836258 - DNA, 25 bp, Homo sapien
cacccataatctttgggacaagcac

SEQ ID NO: 5836259 - DNA, 25 bp, Homo sapien
ggtacctattactgtcactatcccc

SEQ ID NO: 5836260 - DNA, 25 bp, Homo sapien
ggacagacacaggcgacgctggatc

SEQ ID NO: 5836261 - DNA, 25 bp, Homo sapien
gccagaagtgtggagcctcttgctt

SEQ ID NO: 5836262 - DNA, 25 bp, Homo sapien
ggcagggtctggacagacacaggcg

SEQ ID NO: 5836263 - DNA, 25 bp, Homo sapien
tgttctcagatcaggaaaggcacac

SEQ ID NO: 5836264 - DNA, 25 bp, Homo sapien
tattctcctggggcgtgggcagtcc

SEQ ID NO: 5836265 - DNA, 25 bp, Homo sapien
ccggctgcatcactgcctggtcaca

SEQ ID NO: 5836266 - DNA, 25 bp, Homo sapien
agagaaaggccctggcctgccagaa

SEQ ID NO: 5836267 - DNA, 25 bp, Homo sapien
tggttggatactcgggtggctatgc

SEQ ID NO: 5836268 - DNA, 25 bp, Homo sapien
tcttaagaatagtgtgattccatct

SEQ ID NO: 5836269 - DNA, 25 bp, Homo sapien
tagaaggcactgttccatgagccgt

SEQ ID NO: 5836270 - DNA, 25 bp, Homo sapien
cccaggacagttaactgcagccaag

SEQ ID NO: 5836271 - DNA, 25 bp, Homo sapien
aatggcaggccctgtatccacatcc

SEQ ID NO: 5836272 - DNA, 25 bp, Homo sapien
atcgctcagaggctctggacactga

SEQ ID NO: 5836273 - DNA, 25 bp, Homo sapien
cctggggcgtgggcagtcccagctg

SEQ ID NO: 5836274 - DNA, 25 bp, Homo sapien
gggcctggtcctagggacatttgct

SEQ ID NO: 5836275 - DNA, 25 bp, Homo sapien
gaatagtgtgattccatctcttcat

SEQ ID NO: 5836276 - DNA, 25 bp, Homo sapien
atggagaggggcatctaccatcagt

SEQ ID NO: 5836277 - DNA, 25 bp, Homo sapien
tatgcccaacccacaggtggttgag

SEQ ID NO: 5836278 - DNA, 25 bp, Homo sapien
ggcagaatcggttctggttggatac

SEQ ID NO: 5836279 - DNA, 25 bp, Homo sapien
ctttgggacaagcacatagaagtcc

SEQ ID NO: 5836280 - DNA, 25 bp, Homo sapien
cagcttagctttaaaggtccttttg

SEQ ID NO: 5836281 - DNA, 25 bp, Homo sapien
ctcgggtggctatgcccaacccaca

SEQ ID NO: 5836282 - DNA, 25 bp, Homo sapien
gcagtcccagctgggcagccgcaca

SEQ ID NO: 5836283 - DNA, 25 bp, Homo sapien
ggctctggacactgaatccacccag

SEQ ID NO: 5836284 - DNA, 25 bp, Homo sapien
tactgtcactatccccagcatggtg

SEQ ID NO: 5836285 - DNA, 25 bp, Homo sapien
gggcagaaagttggtgtccttgggc

SEQ ID NO: 5836286 - DNA, 25 bp, Homo sapien
agttaactgcagccaagagcatgga

SEQ ID NO: 5836287 - DNA, 25 bp, Homo sapien
ggccaggcttgcccagtacagctta

SEQ ID NO: 5836288 - DNA, 25 bp, Homo sapien
ctggtcacacacccactcggggcag

SEQ ID NO: 5836289 - DNA, 25 bp, Homo sapien
ggctggattgccggctgcatcactg

SEQ ID NO: 5836290 - DNA, 25 bp, Homo sapien
ccccacctcagacagagcagggatc

SEQ ID NO: 5836291 - DNA, 25 bp, Homo sapien
agtccagggcctggtcctagggaca

SEQ ID NO: 5836292 - DNA, 25 bp, Homo sapien
tgctgcctggtacctattactgtca

SEQ ID NO: 5836293 - DNA, 25 bp, Homo sapien
tgctttgtgagcatttaagagatgt

SEQ ID NO: 5836294 - DNA, 25 bp, Homo sapien
ttctcctggggcgtgggcagtccca

SEQ ID NO: 5836295 - DNA, 25 bp, Homo sapien
ggcagatgcaggagtgacaagggca

SEQ ID NO: 5836296 - DNA, 25 bp, Homo sapien
caggacagttaactgcagccaagag

SEQ ID NO: 5836297 - DNA, 25 bp, Homo sapien
cagatcaggaaaggcacacttacaa

SEQ ID NO: 5836298 - DNA, 25 bp, Homo sapien
acaaaggtcaagttcctggacttgg

SEQ ID NO: 5836299 - DNA, 25 bp, Homo sapien
ccaggcttgcccagtacagcttagc

SEQ ID NO: 5836300 - DNA, 25 bp, Homo sapien
aaacgctcttaagaatagtgtgatt

SEQ ID NO: 5836301 - DNA, 25 bp, Homo sapien
gctcttaagaatagtgtgattccat

SEQ ID NO: 5836302 - DNA, 25 bp, Homo sapien
gcatggagaggggcatctaccatca

SEQ ID NO: 5836303 - DNA, 25 bp, Homo sapien
catcagtccagggcctggtcctagg

SEQ ID NO: 5836304 - DNA, 25 bp, Homo sapien
ggattgccggctgcatcactgcctg

SEQ ID NO: 5836305 - DNA, 25 bp, Homo sapien
cgggtggctatgcccaacccacagg

SEQ ID NO: 5836306 - DNA, 25 bp, Homo sapien
gcctgccagaagtgtggagcctctt

SEQ ID NO: 5836307 - DNA, 25 bp, Homo sapien
agaagggacctggatgtttcaggca

SEQ ID NO: 5836308 - DNA, 25 bp, Homo sapien
ccttttcatacagggaagttttgag

SEQ ID NO: 5836309 - DNA, 25 bp, Homo sapien
gacagagcagggatcgctcagaggc

SEQ ID NO: 5836310 - DNA, 25 bp, Homo sapien
ccagccgggcagggtgttctcagat

SEQ ID NO: 5836311 - DNA, 25 bp, Homo sapien
ttcttcccagccgggcagggtgttc

SEQ ID NO: 5836312 - DNA, 25 bp, Homo sapien
tcctagggacatttgctgagaatgg

SEQ ID NO: 5836313 - DNA, 25 bp, Homo sapien
ggttgtccttttcatacagggaagt

SEQ ID NO: 5836314 - DNA, 25 bp, Homo sapien
atttaagagatgtgtatttttacaa

SEQ ID NO: 5836315 - DNA, 25 bp, Homo sapien
agttcctggacttggcaaacgctct

SEQ ID NO: 5836316 - DNA, 25 bp, Homo sapien
cccaacccacaggtggttgagcagg

SEQ ID NO: 5836317 - DNA, 25 bp, Homo sapien
caagaagggacctggatgtttcagg

SEQ ID NO: 5836318 - DNA, 25 bp, Homo sapien
gaagttttgaggaactagccaggag

SEQ ID NO: 5836319 - DNA, 25 bp, Homo sapien
gttctggttggatactcgggtggct

SEQ ID NO: 5836320 - DNA, 25 bp, Homo sapien
gaggagggctggattgccggctgca

SEQ ID NO: 5836321 - DNA, 25 bp, Homo sapien
ttaagaatagtgtgattccatctct

SEQ ID NO: 5836322 - DNA, 25 bp, Homo sapien
atctttgggacaagcacatagaagt

SEQ ID NO: 5836323 - DNA, 25 bp, Homo sapien
aaaggccctggcctgccagaagtgt

SEQ ID NO: 5836324 - DNA, 25 bp, Homo sapien
ggtcacacacccactcggggcagca

SEQ ID NO: 5836325 - DNA, 25 bp, Homo sapien
tccagtttggacaggggccatcggc

SEQ ID NO: 5836326 - DNA, 25 bp, Homo sapien
atccacatccccgcaatggctctag

SEQ ID NO: 5836327 - DNA, 25 bp, Homo sapien
gtccttttcatacagggaagttttg

SEQ ID NO: 5836328 - DNA, 25 bp, Homo sapien
tagaagtccaagaagggacctggat

SEQ ID NO: 5836329 - DNA, 25 bp, Homo sapien
gaaaattcttcccagccgggcaggg

SEQ ID NO: 5836330 - DNA, 25 bp, Homo sapien
cttcccccacctcagacagagcagg

SEQ ID NO: 5836331 - DNA, 25 bp, Homo sapien
ttctcagatcaggaaaggcacactt

SEQ ID NO: 5836332 - DNA, 25 bp, Homo sapien
ggtgttctcagatcaggaaaggcac

SEQ ID NO: 5836333 - DNA, 25 bp, Homo sapien
ggcacacttacaaggtcacccataa

SEQ ID NO: 5836334 - DNA, 25 bp, Homo sapien
ggagctggtcacctgcttcccccac

SEQ ID NO: 5836335 - DNA, 25 bp, Homo sapien
agaaagttggtgtccttgggctgag

SEQ ID NO: 5836336 - DNA, 25 bp, Homo sapien
gctctagaaggcactgttccatgag

SEQ ID NO: 5836337 - DNA, 25 bp, Homo sapien
gtgctccagtttggacaggggccat

SEQ ID NO: 5836338 - DNA, 25 bp, Homo sapien
ttggttgtccttttcatacagggaa

SEQ ID NO: 5836339 - DNA, 25 bp, Homo sapien
gagcaggggccccaggctgtgctcc

SEQ ID NO: 5836340 - DNA, 25 bp, Homo sapien
gtgagcatttaagagatgtgtattt

SEQ ID NO: 5836341 - DNA, 25 bp, Homo sapien
ggtcctagggacatttgctgagaat

SEQ ID NO: 5836342 - DNA, 25 bp, Homo sapien
agtgacaagggcagaaagttggtgt

SEQ ID NO: 5836343 - DNA, 25 bp, Homo sapien
ccttttggttgtccttttcatacag

SEQ ID NO: 5836344 - DNA, 25 bp, Homo sapien
acacacccactcggggcagcacctt

SEQ ID NO: 5836345 - DNA, 25 bp, Homo sapien
aggtcacccataatctttgggacaa

SEQ ID NO: 5836346 - DNA, 25 bp, Homo sapien
caaggtcacccataatctttgggac

SEQ ID NO: 5836347 - DNA, 25 bp, Homo sapien
ccagctgggcagccgcacatcctca

SEQ ID NO: 5836348 - DNA, 25 bp, Homo sapien
gaagtccaagaagggacctggatgt

SEQ ID NO: 5836349 - DNA, 25 bp, Homo sapien
cagacagagcagggatcgctcagag

SEQ ID NO: 5836350 - DNA, 25 bp, Homo sapien
acctcagacagagcagggatcgctc

SEQ ID NO: 5836351 - DNA, 25 bp, Homo sapien
catctcttcatgttcccagaaaatt

SEQ ID NO: 5836352 - DNA, 25 bp, Homo sapien
ggtgtccttgggctgaggagggctg

SEQ ID NO: 5836353 - DNA, 25 bp, Homo sapien
tcggggcagcaccttcctggcacct

SEQ ID NO: 5836354 - DNA, 25 bp, Homo sapien
gtcagaatccagagaaatggagctg

SEQ ID NO: 5836355 - DNA, 25 bp, Homo sapien
ctttgtgagcatttaagagatgtgt

SEQ ID NO: 5836356 - DNA, 25 bp, Homo sapien
gccctggcctgccagaagtgtggag

SEQ ID NO: 5836357 - DNA, 25 bp, Homo sapien
aatctgctgcctggtacctattact

SEQ ID NO: 5836358 - DNA, 25 bp, Homo sapien
cagatgcaggagtgacaagggcaga

SEQ ID NO: 5836359 - DNA, 25 bp, Homo sapien
tgcaggagtgacaagggcagaaagt

SEQ ID NO: 5836360 - DNA, 25 bp, Homo sapien
gcctcttgctttgtgagcatttaag

SEQ ID NO: 5836361 - DNA, 25 bp, Homo sapien
gtatccacatccccgcaatggctct

SEQ ID NO: 5836362 - DNA, 25 bp, Homo sapien
tccacccaggacagttaactgcagc

SEQ ID NO: 5836363 - DNA, 25 bp, Homo sapien
gggccccaggctgtgctccagtttg

SEQ ID NO: 5836364 - DNA, 25 bp, Homo sapien
gcaccttcctggcacctgtattctc

SEQ ID NO: 5836365 - DNA, 25 bp, Homo sapien
ccagttggcagaatcggttctggtt

SEQ ID NO: 5836366 - DNA, 25 bp, Homo sapien
ttggcagaatcggttctggttggat

SEQ ID NO: 5836367 - DNA, 25 bp, Homo sapien
aggtggttgagcaggggccccaggc

SEQ ID NO: 5836368 - DNA, 25 bp, Homo sapien
tgtttcaggcaatctgctgcctggt

SEQ ID NO: 5836369 - DNA, 25 bp, Homo sapien
ctcttgctttgtgagcatttaagag

SEQ ID NO: 5836370 - DNA, 25 bp, Homo sapien
tcacacacccactcggggcagcacc

SEQ ID NO: 5836371 - DNA, 25 bp, Homo sapien
tacaaggtcacccataatctttggg

SEQ ID NO: 5836372 - DNA, 25 bp, Homo sapien
gtcactatccccagcatggtggcca

SEQ ID NO: 5836373 - DNA, 25 bp, Homo sapien
ttgaggaactagccaggagaaccca

SEQ ID NO: 5836374 - DNA, 25 bp, Homo sapien
cctccagaggagggtactctactgt

SEQ ID NO: 5836375 - DNA, 25 bp, Homo sapien
acagttaactgcagccaagagcatg

SEQ ID NO: 5836376 - DNA, 25 bp, Homo sapien
tctggttggatactcgggtggctat

SEQ ID NO: 5836377 - DNA, 25 bp, Homo sapien
cccataatctttgggacaagcacat

SEQ ID NO: 5836378 - DNA, 25 bp, Homo sapien
gagcatttaagagatgtgtattttt

SEQ ID NO: 5836379 - DNA, 25 bp, Homo sapien
attccatctcttcatgttcccagaa

SEQ ID NO: 5836380 - DNA, 25 bp, Homo sapien
tcccagctgggcagccgcacatcct

SEQ ID NO: 5836381 - DNA, 25 bp, Homo sapien
gacttggcaaacgctcttaagaata

SEQ ID NO: 5836382 - DNA, 25 bp, Homo sapien
ggatctccagttggcagaatcggtt

SEQ ID NO: 5836383 - DNA, 25 bp, Homo sapien
ctagccaggagaacccagaagcctg

SEQ ID NO: 5836384 - DNA, 25 bp, Homo sapien
aagggcagaaagttggtgtccttgg

SEQ ID NO: 5836385 - DNA, 25 bp, Homo sapien
tactcgggtggctatgcccaaccca

SEQ ID NO: 5836386 - DNA, 25 bp, Homo sapien
cccagaaaattcttcccagccgggc

SEQ ID NO: 5836387 - DNA, 25 bp, Homo sapien
gagccgtggctcctggatgccaggc

SEQ ID NO: 5836388 - DNA, 25 bp, Homo sapien
ttgagcaggggccccaggctgtgct

SEQ ID NO: 5836389 - DNA, 25 bp, Homo sapien
ctgaggagggctggattgccggctg

SEQ ID NO: 5836390 - DNA, 25 bp, Homo sapien
tggacttggcaaacgctcttaagaa

SEQ ID NO: 5836391 - DNA, 25 bp, Homo sapien
cctggacttggcaaacgctcttaag

SEQ ID NO: 5836392 - DNA, 25 bp, Homo sapien
ggacatttgctgagaatggcaggcc

SEQ ID NO: 5836393 - DNA, 25 bp, Homo sapien
ctcctggggcgtgggcagtcccagc

SEQ ID NO: 5836394 - DNA, 25 bp, Homo sapien
ctgggtcagaatccagagaaatgga

SEQ ID NO: 5836395 - DNA, 25 bp, Homo sapien
agggtgttctcagatcaggaaaggc

SEQ ID NO: 5836396 - DNA, 25 bp, Homo sapien
tacagggaagttttgaggaactagc

SEQ ID NO: 5836397 - DNA, 25 bp, Homo sapien
catacagggaagttttgaggaacta

SEQ ID NO: 5836398 - DNA, 25 bp, Homo sapien
atacaaaggtcaagttcctggactt

SEQ ID NO: 5836399 - DNA, 25 bp, Homo sapien
gcagaaagttggtgtccttgggctg

SEQ ID NO: 5836400 - DNA, 25 bp, Homo sapien
gcaatctgctgcctggtacctatta

SEQ ID NO: 5836401 - DNA, 25 bp, Homo sapien
agtgtggagcctcttgctttgtgag

SEQ ID NO: 5836402 - DNA, 25 bp, Homo sapien
ctaccatcagtccagggcctggtcc

SEQ ID NO: 5836403 - DNA, 25 bp, Homo sapien
gggccatcggcagatgcaggagtga

SEQ ID NO: 5836404 - DNA, 25 bp, Homo sapien
ttttacaaatacaaaggtcaagttc

SEQ ID NO: 5836405 - DNA, 25 bp, Homo sapien
gtgtatttttacaaatacaaaggtc

SEQ ID NO: 5836406 - DNA, 25 bp, Homo sapien
ttacaaatacaaaggtcaagttcct

SEQ ID NO: 5836407 - DNA, 25 bp, Homo sapien
ccagagaaatggagctggtcacctg

SEQ ID NO: 5836408 - DNA, 25 bp, Homo sapien
gtggttgagcaggggccccaggctg

SEQ ID NO: 5836409 - DNA, 25 bp, Homo sapien
cataatctttgggacaagcacatag

SEQ ID NO: 5836410 - DNA, 25 bp, Homo sapien
ctcagacagagcagggatcgctcag

SEQ ID NO: 5836411 - DNA, 25 bp, Homo sapien
gagcatggagaggggcatctaccat

SEQ ID NO: 5836412 - DNA, 25 bp, Homo sapien
caggcagggtctggacagacacagg

SEQ ID NO: 5836413 - DNA, 25 bp, Homo sapien
ttaactgcagccaagagcatggaga

SEQ ID NO: 5836414 - DNA, 25 bp, Homo sapien
agtcccagctgggcagccgcacatc

SEQ ID NO: 5836415 - DNA, 25 bp, Homo sapien
ttgcccagtacagcttagctttaaa

SEQ ID NO: 5836416 - DNA, 25 bp, Homo sapien
tgttccttgtctctctcatgctgaa

SEQ ID NO: 5836417 - DNA, 25 bp, Homo sapien
gccccaggctgtgctccagtttgga

SEQ ID NO: 5836418 - DNA, 25 bp, Homo sapien
ccccgcaatggctctagaaggcact

SEQ ID NO: 5836419 - DNA, 25 bp, Homo sapien
aggagaacccagaagcctgggtcag

SEQ ID NO: 5836420 - DNA, 25 bp, Homo sapien
aagagatgtgtatttttacaaatac

SEQ ID NO: 5836421 - DNA, 25 bp, Homo sapien
gatgtttcaggcaatctgctgcctg

SEQ ID NO: 5836422 - DNA, 25 bp, Homo sapien
aggaaaggcacacttacaaggtcac

SEQ ID NO: 5836423 - DNA, 25 bp, Homo sapien
catcggcagatgcaggagtgacaag

SEQ ID NO: 5836424 - DNA, 25 bp, Homo sapien
gcgacgctggatctccagttggcag

SEQ ID NO: 5836425 - DNA, 25 bp, Homo sapien
acatttgctgagaatggcaggccct

SEQ ID NO: 5836426 - DNA, 25 bp, Homo sapien
agctggtcacctgcttcccccacct

SEQ ID NO: 5836427 - DNA, 25 bp, Homo sapien
ttgggacaagcacatagaagtccaa

SEQ ID NO: 5836428 - DNA, 25 bp, Homo sapien
gctccagtttggacaggggccatcg

SEQ ID NO: 5836429 - DNA, 25 bp, Homo sapien
ttaagagatgtgtatttttacaaat

SEQ ID NO: 5836430 - DNA, 25 bp, Homo sapien
agaatggcaggccctgtatccacat

SEQ ID NO: 5836431 - DNA, 25 bp, Homo sapien
agtgtgattccatctcttcatgttc

SEQ ID NO: 5836432 - DNA, 25 bp, Homo sapien
ttttggttgtccttttcatacaggg

SEQ ID NO: 5836433 - DNA, 25 bp, Homo sapien
cctggcctgccagaagtgtggagcc

SEQ ID NO: 5836434 - DNA, 25 bp, Homo sapien
accatcagtccagggcctggtccta

SEQ ID NO: 5836435 - DNA, 25 bp, Homo sapien
ctctcatgctgaagagaaaggccct

SEQ ID NO: 5836436 - DNA, 25 bp, Homo sapien
aggcactgttccatgagccgtggct

SEQ ID NO: 5836437 - DNA, 25 bp, Homo sapien
cagtcctccagaggagggtactcta

SEQ ID NO: 5836438 - DNA, 25 bp, Homo sapien
acatccccgcaatggctctagaagg

SEQ ID NO: 5836439 - DNA, 25 bp, Homo sapien
tctcttcatgttcccagaaaattct

SEQ ID NO: 5836440 - DNA, 25 bp, Homo sapien
ggatcgctcagaggctctggacact

SEQ ID NO: 5836441 - DNA, 25 bp, Homo sapien
ctggtacctattactgtcactatcc

SEQ ID NO: 5836442 - DNA, 25 bp, Homo sapien
atgccaggcagggtctggacagaca

SEQ ID NO: 5836443 - DNA, 25 bp, Homo sapien
ccacctcagacagagcagggatcgc

SEQ ID NO: 5836444 - DNA, 25 bp, Homo sapien
agaaatggagctggtcacctgcttc

SEQ ID NO: 5836445 - DNA, 25 bp, Homo sapien
tggctatgcccaacccacaggtggt

SEQ ID NO: 5836446 - DNA, 25 bp, Homo sapien
acaaatacaaaggtcaagttcctgg

SEQ ID NO: 5836447 - DNA, 25 bp, Homo sapien
cacacttacaaggtcacccataatc

SEQ ID NO: 5836448 - DNA, 25 bp, Homo sapien
tatttttacaaatacaaaggtcaag

SEQ ID NO: 5836449 - DNA, 25 bp, Homo sapien
aggcttgcccagtacagcttagctt

SEQ ID NO: 5836450 - DNA, 25 bp, Homo sapien
ttccttgtctctctcatgctgaaga

SEQ ID NO: 5836451 - DNA, 25 bp, Homo sapien
gcaggggccccaggctgtgctccag

SEQ ID NO: 5836452 - DNA, 25 bp, Homo sapien
gcctggtcacacacccactcggggc

SEQ ID NO: 5836453 - DNA, 25 bp, Homo sapien
gaggagggtactctactgttccttg

SEQ ID NO: 5836454 - DNA, 25 bp, Homo sapien
gtccttttggttgtccttttcatac

SEQ ID NO: 5836455 - DNA, 25 bp, Homo sapien
acgctcttaagaatagtgtgattcc

SEQ ID NO: 5836456 - DNA, 25 bp, Homo sapien
gaatcggttctggttggatactcgg

SEQ ID NO: 5836457 - DNA, 25 bp, Homo sapien
gcaatggctctagaaggcactgttc

SEQ ID NO: 5836458 - DNA, 25 bp, Homo sapien
ggaactagccaggagaacccagaag

SEQ ID NO: 5836459 - DNA, 25 bp, Homo sapien
cacttacaaggtcacccataatctt

SEQ ID NO: 5836460 - DNA, 25 bp, Homo sapien
agacacaggcgacgctggatctcca

SEQ ID NO: 5836461 - DNA, 25 bp, Homo sapien
caggctgtgctccagtttggacagg

SEQ ID NO: 5836462 - DNA, 25 bp, Homo sapien
cagcaccttcctggcacctgtattc

SEQ ID NO: 5836463 - DNA, 25 bp, Homo sapien
gacgctggatctccagttggcagaa

SEQ ID NO: 5836464 - DNA, 25 bp, Homo sapien
ggcagcaccttcctggcacctgtat

SEQ ID NO: 5836465 - DNA, 25 bp, Homo sapien
tgaatccacccaggacagttaactg

SEQ ID NO: 5836466 - DNA, 25 bp, Homo sapien
ccccagcatggtggccaggcttgcc

SEQ ID NO: 5836467 - DNA, 25 bp, Homo sapien
cactatccccagcatggtggccagg

SEQ ID NO: 5836468 - DNA, 25 bp, Homo sapien
tggctctagaaggcactgttccatg

SEQ ID NO: 5836469 - DNA, 25 bp, Homo sapien
gccatcggcagatgcaggagtgaca

SEQ ID NO: 5836470 - DNA, 25 bp, Homo sapien
aggcaatctgctgcctggtacctat

SEQ ID NO: 5836471 - DNA, 25 bp, Homo sapien
ttcatgttcccagaaaattcttccc

SEQ ID NO: 5836472 - DNA, 25 bp, Homo sapien
attactgtcactatccccagcatgg

SEQ ID NO: 5836473 - DNA, 25 bp, Homo sapien
tgttcccagaaaattcttcccagcc

SEQ ID NO: 5836474 - DNA, 25 bp, Homo sapien
ctggatctccagttggcagaatcgg

SEQ ID NO: 5836475 - DNA, 25 bp, Homo sapien
gggaagttttgaggaactagccagg

SEQ ID NO: 5836476 - DNA, 25 bp, Homo sapien
cagaatcggttctggttggatactc

SEQ ID NO: 5836477 - DNA, 25 bp, Homo sapien
ggtactctactgttccttgtctctc

SEQ ID NO: 5836478 - DNA, 25 bp, Homo sapien
cagaatccagagaaatggagctggt

SEQ ID NO: 5836479 - DNA, 25 bp, Homo sapien
gaagtgtggagcctcttgctttgtg

SEQ ID NO: 5836480 - DNA, 25 bp, Homo sapien
agtacagcttagctttaaaggtcct

SEQ ID NO: 5836481 - DNA, 25 bp, Homo sapien
aaatggagctggtcacctgcttccc

SEQ ID NO: 5836482 - DNA, 25 bp, Homo sapien
atctccagttggcagaatcggttct

SEQ ID NO: 5836483 - DNA, 25 bp, Homo sapien
tccagggcctggtcctagggacatt

SEQ ID NO: 5836484 - DNA, 25 bp, Homo sapien
tggagcctcttgctttgtgagcatt

SEQ ID NO: 5836485 - DNA, 25 bp, Homo sapien
aagcctgggtcagaatccagagaaa

SEQ ID NO: 5836486 - DNA, 25 bp, Homo sapien
aattcttcccagccgggcagggtgt

SEQ ID NO: 5836487 - DNA, 25 bp, Homo sapien
cttgggctgaggagggctggattgc

SEQ ID NO: 5836488 - DNA, 25 bp, Homo sapien
tccaagaagggacctggatgtttca

SEQ ID NO: 5836489 - DNA, 25 bp, Homo sapien
gggccagtcctccagaggagggtac

SEQ ID NO: 5836490 - DNA, 25 bp, Homo sapien
ggatgccaggcagggtctggacaga

SEQ ID NO: 5836491 - DNA, 25 bp, Homo sapien
ctgtcactatccccagcatggtggc

SEQ ID NO: 5836492 - DNA, 25 bp, Homo sapien
ttccatgagccgtggctcctggatg

SEQ ID NO: 5836493 - DNA, 25 bp, Homo sapien
acaagggcagaaagttggtgtcctt

SEQ ID NO: 5836494 - DNA, 25 bp, Homo sapien
ccaggagaacccagaagcctgggtc

SEQ ID NO: 5836495 - DNA, 25 bp, Homo sapien
gacaagcacatagaagtccaagaag

SEQ ID NO: 5836496 - DNA, 25 bp, Homo sapien
acccactcggggcagcaccttcctg

SEQ ID NO: 5836497 - DNA, 25 bp, Homo sapien
aggggcatctaccatcagtccaggg

SEQ ID NO: 5836498 - DNA, 25 bp, Homo sapien
ggctgaggagggctggattgccggc

SEQ ID NO: 5836499 - DNA, 25 bp, Homo sapien
tggatgtttcaggcaatctgctgcc

SEQ ID NO: 5836500 - DNA, 25 bp, Homo sapien
caggagtgacaagggcagaaagttg

SEQ ID NO: 5836501 - DNA, 25 bp, Homo sapien
aggccctggcctgccagaagtgtgg

SEQ ID NO: 5836502 - DNA, 25 bp, Homo sapien
cggttctggttggatactcgggtgg

SEQ ID NO: 5836503 - DNA, 25 bp, Homo sapien
aggtcaagttcctggacttggcaaa

SEQ ID NO: 5836504 - DNA, 25 bp, Homo sapien
ctggacagacacaggcgacgctgga

SEQ ID NO: 5836505 - DNA, 25 bp, Homo sapien
gccgtggctcctggatgccaggcag

SEQ ID NO: 5836506 - DNA, 25 bp, Homo sapien
atcggttctggttggatactcgggt

SEQ ID NO: 5836507 - DNA, 25 bp, Homo sapien
ggttgagcaggggccccaggctgtg

SEQ ID NO: 5836508 - DNA, 25 bp, Homo sapien
gcagccaagagcatggagaggggca

SEQ ID NO: 5836509 - DNA, 25 bp, Homo sapien
gtctctctcatgctgaagagaaagg

SEQ ID NO: 5836510 - DNA, 25 bp, Homo sapien
gcactgttccatgagccgtggctcc

SEQ ID NO: 5836511 - DNA, 25 bp, Homo sapien
ctggtcctagggacatttgctgaga

SEQ ID NO: 5836512 - DNA, 25 bp, Homo sapien
tccttgggctgaggagggctggatt

SEQ ID NO: 5836513 - DNA, 25 bp, Homo sapien
atcactgcctggtcacacacccact

SEQ ID NO: 5836514 - DNA, 25 bp, Homo sapien
tgacaagggcagaaagttggtgtcc

SEQ ID NO: 5836515 - DNA, 25 bp, Homo sapien
tctagaaggcactgttccatgagcc

SEQ ID NO: 5836516 - DNA, 25 bp, Homo sapien
gcaggccctgtatccacatccccgc

SEQ ID NO: 5836517 - DNA, 25 bp, Homo sapien
atagtgtgattccatctcttcatgt

SEQ ID NO: 5836518 - DNA, 25 bp, Homo sapien
agttttgaggaactagccaggagaa

SEQ ID NO: 5836519 - DNA, 25 bp, Homo sapien
tcaggcaatctgctgcctggtacct

SEQ ID NO: 5836520 - DNA, 25 bp, Homo sapien
tgccggctgcatcactgcctggtca

SEQ ID NO: 5836521 - DNA, 25 bp, Homo sapien
ctctggacactgaatccacccagga

SEQ ID NO: 5836522 - DNA, 25 bp, Homo sapien
tgtgattccatctcttcatgttccc

SEQ ID NO: 5836523 - DNA, 25 bp, Homo sapien
ctgcctggtacctattactgtcact

SEQ ID NO: 5836524 - DNA, 25 bp, Homo sapien
attgccggctgcatcactgcctggt

SEQ ID NO: 5836525 - DNA, 25 bp, Homo sapien
gcctgggtcagaatccagagaaatg

SEQ ID NO: 5836526 - DNA, 25 bp, Homo sapien
gaggctctggacactgaatccaccc

SEQ ID NO: 5836527 - DNA, 25 bp, Homo sapien
gaaaggcacacttacaaggtcaccc

SEQ ID NO: 5836528 - DNA, 25 bp, Homo sapien
cttacaaggtcacccataatctttg

SEQ ID NO: 5836529 - DNA, 25 bp, Homo sapien
cacctgtattctcctggggcgtggg

SEQ ID NO: 5836530 - DNA, 25 bp, Homo sapien
cttcctggcacctgtattctcctgg

SEQ ID NO: 5836531 - DNA, 25 bp, Homo sapien
tgattccatctcttcatgttcccag

SEQ ID NO: 5836532 - DNA, 25 bp, Homo sapien
atccccgcaatggctctagaaggca

SEQ ID NO: 5836533 - DNA, 25 bp, Homo sapien
ccactcggggcagcaccttcctggc

SEQ ID NO: 5836534 - DNA, 25 bp, Homo sapien
ccagcatggtggccaggcttgccca

SEQ ID NO: 5836535 - DNA, 25 bp, Homo sapien
acaggggccatcggcagatgcagga

SEQ ID NO: 5836536 - DNA, 25 bp, Homo sapien
tggtggccaggcttgcccagtacag

SEQ ID NO: 5836537 - DNA, 25 bp, Homo sapien
gggacctggatgtttcaggcaatct

SEQ ID NO: 5836538 - DNA, 25 bp, Homo sapien
catgttcccagaaaattcttcccag

SEQ ID NO: 5836539 - DNA, 25 bp, Homo sapien
tcccagccgggcagggtgttctcag

SEQ ID NO: 5836540 - DNA, 25 bp, Homo sapien
ctatccccagcatggtggccaggct

SEQ ID NO: 5836541 - DNA, 25 bp, Homo sapien
gagcagggatcgctcagaggctctg

SEQ ID NO: 5836542 - DNA, 25 bp, Homo sapien
tgtattctcctggggcgtgggcagt

SEQ ID NO: 5836543 - DNA, 25 bp, Homo sapien
gcatcactgcctggtcacacaccca

SEQ ID NO: 5836544 - DNA, 25 bp, Homo sapien
gggcgtgggcagtcccagctgggca

SEQ ID NO: 5836545 - DNA, 25 bp, Homo sapien
aagggacctggatgtttcaggcaat

SEQ ID NO: 5836546 - DNA, 25 bp, Homo sapien
cgctcagaggctctggacactgaat

SEQ ID NO: 5836547 - DNA, 25 bp, Homo sapien
agaggggcatctaccatcagtccag

SEQ ID NO: 5836548 - DNA, 25 bp, Homo sapien
agtccaagaagggacctggatgttt

SEQ ID NO: 5836549 - DNA, 25 bp, Homo sapien
ggctgtgctccagtttggacagggg

SEQ ID NO: 5836550 - DNA, 25 bp, Homo sapien
tcccccacctcagacagagcaggga

SEQ ID NO: 5836551 - DNA, 25 bp, Homo sapien
agaaaggccctggcctgccagaagt

SEQ ID NO: 5836552 - DNA, 25 bp, Homo sapien
ctgcctggtcacacacccactcggg

SEQ ID NO: 5836553 - DNA, 25 bp, Homo sapien
agttggcagaatcggttctggttgg

SEQ ID NO: 5836554 - DNA, 25 bp, Homo sapien
ctctctcatgctgaagagaaaggcc

SEQ ID NO: 5836555 - DNA, 25 bp, Homo sapien
cactgcctggtcacacacccactcg

SEQ ID NO: 5836556 - DNA, 25 bp, Homo sapien
ttgctgagaatggcaggccctgtat

SEQ ID NO: 5836557 - DNA, 25 bp, Homo sapien
ttgtgagcatttaagagatgtgtat

SEQ ID NO: 5836558 - DNA, 25 bp, Homo sapien
gcatctaccatcagtccagggcctg

SEQ ID NO: 5836559 - DNA, 25 bp, Homo sapien
ctagggacatttgctgagaatggca

SEQ ID NO: 5836560 - DNA, 25 bp, Homo sapien
caacccacaggtggttgagcagggg

SEQ ID NO: 5836561 - DNA, 25 bp, Homo sapien
actgaatccacccaggacagttaac

SEQ ID NO: 5836562 - DNA, 25 bp, Homo sapien
ctgcagccaagagcatggagagggg

SEQ ID NO: 5836563 - DNA, 25 bp, Homo sapien
gtggccaggcttgcccagtacagct

SEQ ID NO: 5836564 - DNA, 25 bp, Homo sapien
acacaggcgacgctggatctccagt

SEQ ID NO: 5836565 - DNA, 25 bp, Homo sapien
aatccacccaggacagttaactgca

SEQ ID NO: 5836566 - DNA, 25 bp, Homo sapien
cacatagaagtccaagaagggacct

SEQ ID NO: 5836567 - DNA, 25 bp, Homo sapien
cagaaaattcttcccagccgggcag

SEQ ID NO: 5836568 - DNA, 25 bp, Homo sapien
ggacaggggccatcggcagatgcag

SEQ ID NO: 5836569 - DNA, 25 bp, Homo sapien
aactgcagccaagagcatggagagg

SEQ ID NO: 5836570 - DNA, 25 bp, Homo sapien
gcccagtacagcttagctttaaagg

SEQ ID NO: 5836571 - DNA, 25 bp, Homo sapien
agcatggtggccaggcttgcccagt

SEQ ID NO: 5836572 - DNA, 25 bp, Homo sapien
gctcctggatgccaggcagggtctg

SEQ ID NO: 5836573 - DNA, 25 bp, Homo sapien
ccacaggtggttgagcaggggcccc

SEQ ID NO: 5836574 - DNA, 25 bp, Homo sapien
ccatgagccgtggctcctggatgcc

SEQ ID NO: 5836575 - DNA, 25 bp, Homo sapien
tccatctcttcatgttcccagaaaa

SEQ ID NO: 5836576 - DNA, 25 bp, Homo sapien
cctgtattctcctggggcgtgggca

SEQ ID NO: 5836577 - DNA, 25 bp, Homo sapien
atccagagaaatggagctggtcacc

SEQ ID NO: 5836578 - DNA, 25 bp, Homo sapien
gaggaactagccaggagaacccaga

SEQ ID NO: 5836579 - DNA, 25 bp, Homo sapien
aagaatagtgtgattccatctcttc

SEQ ID NO: 5836580 - DNA, 25 bp, Homo sapien
gccagtcctccagaggagggtactc

SEQ ID NO: 5836581 - DNA, 25 bp, Homo sapien
gaatccagagaaatggagctggtca

SEQ ID NO: 5836582 - DNA, 25 bp, Homo sapien
agagaaatggagctggtcacctgct

SEQ ID NO: 5836583 - DNA, 25 bp, Homo sapien
gccctgtatccacatccccgcaatg

SEQ ID NO: 5836584 - DNA, 25 bp, Homo sapien
ctcatgctgaagagaaaggccctgg

SEQ ID NO: 5836585 - DNA, 25 bp, Homo sapien
agaagcctgggtcagaatccagaga

SEQ ID NO: 5836586 - DNA, 25 bp, Homo sapien
agttggtgtccttgggctgaggagg

SEQ ID NO: 5836587 - DNA, 25 bp, Homo sapien
gatgcaggagtgacaagggcagaaa

SEQ ID NO: 5836588 - DNA, 25 bp, Homo sapien
gggtctggacagacacaggcgacgc

SEQ ID NO: 5836589 - DNA, 25 bp, Homo sapien
ctgccagaagtgtggagcctcttgc

SEQ ID NO: 5836590 - DNA, 25 bp, Homo sapien
ggtggctatgcccaacccacaggtg

SEQ ID NO: 5836591 - DNA, 25 bp, Homo sapien
ggagggctggattgccggctgcatc

SEQ ID NO: 5836592 - DNA, 25 bp, Homo sapien
ttgtctctctcatgctgaagagaaa

SEQ ID NO: 5836593 - DNA, 25 bp, Homo sapien
aggggccccaggctgtgctccagtt

SEQ ID NO: 5836594 - DNA, 25 bp, Homo sapien
gacctggatgtttcaggcaatctgc

SEQ ID NO: 5836595 - DNA, 25 bp, Homo sapien
acccacaggtggttgagcaggggcc

SEQ ID NO: 5836596 - DNA, 25 bp, Homo sapien
actgttccttgtctctctcatgctg

SEQ ID NO: 5836597 - DNA, 25 bp, Homo sapien
gctgagaatggcaggccctgtatcc

SEQ ID NO: 5836598 - DNA, 25 bp, Homo sapien
tgcccaacccacaggtggttgagca

SEQ ID NO: 5836599 - DNA, 25 bp, Homo sapien
gcgtgggcagtcccagctgggcagc

SEQ ID NO: 5836600 - DNA, 25 bp, Homo sapien
ccttgtctctctcatgctgaagaga

SEQ ID NO: 5836601 - DNA, 25 bp, Homo sapien
tttcaggcaatctgctgcctggtac

SEQ ID NO: 5836602 - DNA, 25 bp, Homo sapien
cttgctttgtgagcatttaagagat

SEQ ID NO: 5836603 - DNA, 25 bp, Homo sapien
aaggcacacttacaaggtcacccat

SEQ ID NO: 5836604 - DNA, 25 bp, Homo sapien
accttcctggcacctgtattctcct

SEQ ID NO: 5836605 - DNA, 25 bp, Homo sapien
ccacatccccgcaatggctctagaa

SEQ ID NO: 5836606 - DNA, 25 bp, Homo sapien
gcctggtacctattactgtcactat

SEQ ID NO: 5836607 - DNA, 25 bp, Homo sapien
cagggtctggacagacacaggcgac

SEQ ID NO: 5836608 - DNA, 25 bp, Homo sapien
tggctcctggatgccaggcagggtc

SEQ ID NO: 5836609 - DNA, 25 bp, Homo sapien
gtcctccagaggagggtactctact

SEQ ID NO: 5836610 - DNA, 25 bp, Homo sapien
cttggcaaacgctcttaagaatagt

SEQ ID NO: 5836611 - DNA, 25 bp, Homo sapien
cccaggctgtgctccagtttggaca

SEQ ID NO: 5836612 - DNA, 25 bp, Homo sapien
ttcatacagggaagttttgaggaac

SEQ ID NO: 5836613 - DNA, 25 bp, Homo sapien
ctcagaggctctggacactgaatcc

SEQ ID NO: 5836614 - DNA, 25 bp, Homo sapien
atccccagcatggtggccaggcttg

SEQ ID NO: 5836615 - DNA, 25 bp, Homo sapien
tgctgaagagaaaggccctggcctg

SEQ ID NO: 5836616 - DNA, 25 bp, Homo sapien
cgctggatctccagttggcagaatc

SEQ ID NO: 5836617 - DNA, 25 bp, Homo sapien
ccgggcagggtgttctcagatcagg

SEQ ID NO: 5836618 - DNA, 25 bp, Homo sapien
gccaggcagggtctggacagacaca

SEQ ID NO: 5836619 - DNA, 25 bp, Homo sapien
ggcacctgtattctcctggggcgtg

SEQ ID NO: 5836620 - DNA, 25 bp, Homo sapien
gtgggcagtcccagctgggcagccg

SEQ ID NO: 5836621 - DNA, 25 bp, Homo sapien
ttggtgtccttgggctgaggagggc

SEQ ID NO: 5836622 - DNA, 25 bp, Homo sapien
agggacatttgctgagaatggcagg

SEQ ID NO: 5836623 - DNA, 25 bp, Homo sapien
tggatactcgggtggctatgcccaa

SEQ ID NO: 5836624 - DNA, 25 bp, Homo sapien
ctcagatcaggaaaggcacacttac

SEQ ID NO: 5836625 - DNA, 25 bp, Homo sapien
ggagtgacaagggcagaaagttggt

SEQ ID NO: 5836626 - DNA, 25 bp, Homo sapien
gggcatctaccatcagtccagggcc

SEQ ID NO: 5836627 - DNA, 25 bp, Homo sapien
cagagcagggatcgctcagaggctc

SEQ ID NO: 5836628 - DNA, 25 bp, Homo sapien
cgtggctcctggatgccaggcaggg

SEQ ID NO: 5836629 - DNA, 25 bp, Homo sapien
acactgaatccacccaggacagtta

SEQ ID NO: 5836630 - DNA, 25 bp, Homo sapien
gaacccagaagcctgggtcagaatc

SEQ ID NO: 5836631 - DNA, 25 bp, Homo sapien
tcctggatgccaggcagggtctgga

SEQ ID NO: 5836632 - DNA, 25 bp, Homo sapien
ggacactgaatccacccaggacagt

SEQ ID NO: 5836633 - DNA, 25 bp, Homo sapien
ggggcagcaccttcctggcacctgt

SEQ ID NO: 5836634 - DNA, 25 bp, Homo sapien
catagaagtccaagaagggacctgg

SEQ ID NO: 5836635 - DNA, 25 bp, Homo sapien
gcagggatcgctcagaggctctgga

SEQ ID NO: 5836636 - DNA, 25 bp, Homo sapien
tcggcagatgcaggagtgacaaggg

SEQ ID NO: 5836637 - DNA, 25 bp, Homo sapien
gcatttaagagatgtgtatttttac

SEQ ID NO: 5836638 - DNA, 25 bp, Homo sapien
tgtccttgggctgaggagggctgga

SEQ ID NO: 5836639 - DNA, 25 bp, Homo sapien
agccgggcagggtgttctcagatca

SEQ ID NO: 5836640 - DNA, 25 bp, Homo sapien
gggcagggtgttctcagatcaggaa

SEQ ID NO: 5836641 - DNA, 25 bp, Homo sapien
ggagggtactctactgttccttgtc

SEQ ID NO: 5836642 - DNA, 25 bp, Homo sapien
gctatgcccaacccacaggtggttg

SEQ ID NO: 5836643 - DNA, 25 bp, Homo sapien
gtcacccataatctttgggacaagc

SEQ ID NO: 5836644 - DNA, 25 bp, Homo sapien
gttggatactcgggtggctatgccc

SEQ ID NO: 5836645 - DNA, 25 bp, Homo sapien
aaaggtcaagttcctggacttggca

SEQ ID NO: 5836646 - DNA, 25 bp, Homo sapien
ggctgcatcactgcctggtcacaca

SEQ ID NO: 5836647 - DNA, 25 bp, Homo sapien
acaggtggttgagcaggggccccag

SEQ ID NO: 5836648 - DNA, 25 bp, Homo sapien
ccgcaatggctctagaaggcactgt

SEQ ID NO: 5836649 - DNA, 25 bp, Homo sapien
tcctggcacctgtattctcctgggg

SEQ ID NO: 5836650 - DNA, 25 bp, Homo sapien
ctactgttccttgtctctctcatgc

SEQ ID NO: 5836651 - DNA, 25 bp, Homo sapien
actgttccatgagccgtggctcctg

SEQ ID NO: 5836652 - DNA, 25 bp, Homo sapien
aaatacaaaggtcaagttcctggac

SEQ ID NO: 5836653 - DNA, 25 bp, Homo sapien
gagcctcttgctttgtgagcattta

SEQ ID NO: 5836654 - DNA, 25 bp, Homo sapien
cacccaggacagttaactgcagcca

SEQ ID NO: 5836655 - DNA, 25 bp, Homo sapien
ttcccagaaaattcttcccagccgg

SEQ ID NO: 5836656 - DNA, 25 bp, Homo sapien
aactagccaggagaacccagaagcc

SEQ ID NO: 5836657 - DNA, 25 bp, Homo sapien
cagaggagggtactctactgttcct

SEQ ID NO: 5836658 - DNA, 25 bp, Homo sapien
gagaacccagaagcctgggtcagaa

SEQ ID NO: 5836659 - DNA, 25 bp, Homo sapien
cctggatgtttcaggcaatctgctg

SEQ ID NO: 5836660 - DNA, 25 bp, Homo sapien
gggctaaatccgcagcaaactgccg

SEQ ID NO: 5836661 - DNA, 25 bp, Homo sapien
cgcagcaaactgccgtgctggcagg

SEQ ID NO: 5836662 - DNA, 25 bp, Homo sapien
acagcaacgtcttgaacaggcgctg

SEQ ID NO: 5836663 - DNA, 25 bp, Homo sapien
cgtcttgaacaggcgctgatgaccc

SEQ ID NO: 5836664 - DNA, 25 bp, Homo sapien
ggtcgcgcggatcatgatgccaacc

SEQ ID NO: 5836665 - DNA, 25 bp, Homo sapien
acaggcgctgatgaccccggacacc

SEQ ID NO: 5836666 - DNA, 25 bp, Homo sapien
ggatcatgatgccaacctcttacgt

SEQ ID NO: 5836667 - DNA, 25 bp, Homo sapien
atattacaacgcggcagcattatga

SEQ ID NO: 5836668 - DNA, 25 bp, Homo sapien
tgccaacctcttacgtgcgcctttc

SEQ ID NO: 5836669 - DNA, 25 bp, Homo sapien
gcgcctttctgccggacgcgagcag

SEQ ID NO: 5836670 - DNA, 25 bp, Homo sapien
gccggacgcgagcagatgaacgaac

SEQ ID NO: 5836671 - DNA, 25 bp, Homo sapien
cgagcagatgaacgaacagactcag

SEQ ID NO: 5836672 - DNA, 25 bp, Homo sapien
gatgaacgaacagactcaggcgatg

SEQ ID NO: 5836673 - DNA, 25 bp, Homo sapien
aacagactcaggcgatgtgctttat

SEQ ID NO: 5836674 - DNA, 25 bp, Homo sapien
tcaggcgatgtgctttatggcaggc

SEQ ID NO: 5836675 - DNA, 25 bp, Homo sapien
gtgctttatggcaggcgcaaactcg

SEQ ID NO: 5836676 - DNA, 25 bp, Homo sapien
atggcaggcgcaaactcgattttct

SEQ ID NO: 5836677 - DNA, 25 bp, Homo sapien
tacggttgcaaactgctgaccacgc

SEQ ID NO: 5836678 - DNA, 25 bp, Homo sapien
caaactgctgaccacgccgaatccg

SEQ ID NO: 5836679 - DNA, 25 bp, Homo sapien
gacctgcaactgttccgcaaactgg

SEQ ID NO: 5836680 - DNA, 25 bp, Homo sapien
gggctaaatccgcagcaaactgccg

SEQ ID NO: 5836681 - DNA, 25 bp, Homo sapien
cgcagcaaactgccgtgctggcagg

SEQ ID NO: 5836682 - DNA, 25 bp, Homo sapien
acagcaacgtcttgaacaggcgctg

SEQ ID NO: 5836683 - DNA, 25 bp, Homo sapien
cgtcttgaacaggcgctgatgaccc

SEQ ID NO: 5836684 - DNA, 25 bp, Homo sapien
ggtcgcgcggatcatgatgccaacc

SEQ ID NO: 5836685 - DNA, 25 bp, Homo sapien
acaggcgctgatgaccccggacacc

SEQ ID NO: 5836686 - DNA, 25 bp, Homo sapien
ggatcatgatgccaacctcttacgt

SEQ ID NO: 5836687 - DNA, 25 bp, Homo sapien
atattacaacgcggcagcattatga

SEQ ID NO: 5836688 - DNA, 25 bp, Homo sapien
tgccaacctcttacgtgcgcctttc

SEQ ID NO: 5836689 - DNA, 25 bp, Homo sapien
gcgcctttctgccggacgcgagcag

SEQ ID NO: 5836690 - DNA, 25 bp, Homo sapien
gccggacgcgagcagatgaacgaac

SEQ ID NO: 5836691 - DNA, 25 bp, Homo sapien
cgagcagatgaacgaacagactcag

SEQ ID NO: 5836692 - DNA, 25 bp, Homo sapien
gatgaacgaacagactcaggcgatg

SEQ ID NO: 5836693 - DNA, 25 bp, Homo sapien
aacagactcaggcgatgtgctttat

SEQ ID NO: 5836694 - DNA, 25 bp, Homo sapien
tcaggcgatgtgctttatggcaggc

SEQ ID NO: 5836695 - DNA, 25 bp, Homo sapien
gtgctttatggcaggcgcaaactcg

SEQ ID NO: 5836696 - DNA, 25 bp, Homo sapien
atggcaggcgcaaactcgattttct

SEQ ID NO: 5836697 - DNA, 25 bp, Homo sapien
tacggttgcaaactgctgaccacgc

SEQ ID NO: 5836698 - DNA, 25 bp, Homo sapien
caaactgctgaccacgccgaatccg

SEQ ID NO: 5836699 - DNA, 25 bp, Homo sapien
gacctgcaactgttccgcaaactgg

SEQ ID NO: 5836700 - DNA, 25 bp, Homo sapien
gggctaaatccgcagcaaactgccg

SEQ ID NO: 5836701 - DNA, 25 bp, Homo sapien
cgcagcaaactgccgtgctggcagg

SEQ ID NO: 5836702 - DNA, 25 bp, Homo sapien
acagcaacgtcttgaacaggcgctg

SEQ ID NO: 5836703 - DNA, 25 bp, Homo sapien
cgtcttgaacaggcgctgatgaccc

SEQ ID NO: 5836704 - DNA, 25 bp, Homo sapien
ggtcgcgcggatcatgatgccaacc

SEQ ID NO: 5836705 - DNA, 25 bp, Homo sapien
acaggcgctgatgaccccggacacc

SEQ ID NO: 5836706 - DNA, 25 bp, Homo sapien
ggatcatgatgccaacctcttacgt

SEQ ID NO: 5836707 - DNA, 25 bp, Homo sapien
atattacaacgcggcagcattatga

SEQ ID NO: 5836708 - DNA, 25 bp, Homo sapien
tgccaacctcttacgtgcgcctttc

SEQ ID NO: 5836709 - DNA, 25 bp, Homo sapien
gcgcctttctgccggacgcgagcag

SEQ ID NO: 5836710 - DNA, 25 bp, Homo sapien
gccggacgcgagcagatgaacgaac

SEQ ID NO: 5836711 - DNA, 25 bp, Homo sapien
cgagcagatgaacgaacagactcag

SEQ ID NO: 5836712 - DNA, 25 bp, Homo sapien
gatgaacgaacagactcaggcgatg

SEQ ID NO: 5836713 - DNA, 25 bp, Homo sapien
aacagactcaggcgatgtgctttat

SEQ ID NO: 5836714 - DNA, 25 bp, Homo sapien
tcaggcgatgtgctttatggcaggc

SEQ ID NO: 5836715 - DNA, 25 bp, Homo sapien
gtgctttatggcaggcgcaaactcg

SEQ ID NO: 5836716 - DNA, 25 bp, Homo sapien
atggcaggcgcaaactcgattttct

SEQ ID NO: 5836717 - DNA, 25 bp, Homo sapien
tacggttgcaaactgctgaccacgc

SEQ ID NO: 5836718 - DNA, 25 bp, Homo sapien
caaactgctgaccacgccgaatccg

SEQ ID NO: 5836719 - DNA, 25 bp, Homo sapien
gacctgcaactgttccgcaaactgg

SEQ ID NO: 5836720 - DNA, 25 bp, Homo sapien
gggctaaatccgcagcaaactgccg

SEQ ID NO: 5836721 - DNA, 25 bp, Homo sapien
cgcagcaaactgccgtgctggcagg

SEQ ID NO: 5836722 - DNA, 25 bp, Homo sapien
acagcaacgtcttgaacaggcgctg

SEQ ID NO: 5836723 - DNA, 25 bp, Homo sapien
cgtcttgaacaggcgctgatgaccc

SEQ ID NO: 5836724 - DNA, 25 bp, Homo sapien
ggtcgcgcggatcatgatgccaacc

SEQ ID NO: 5836725 - DNA, 25 bp, Homo sapien
acaggcgctgatgaccccggacacc

SEQ ID NO: 5836726 - DNA, 25 bp, Homo sapien
ggatcatgatgccaacctcttacgt

SEQ ID NO: 5836727 - DNA, 25 bp, Homo sapien
atattacaacgcggcagcattatga

SEQ ID NO: 5836728 - DNA, 25 bp, Homo sapien
tgccaacctcttacgtgcgcctttc

SEQ ID NO: 5836729 - DNA, 25 bp, Homo sapien
gcgcctttctgccggacgcgagcag

SEQ ID NO: 5836730 - DNA, 25 bp, Homo sapien
gccggacgcgagcagatgaacgaac

SEQ ID NO: 5836731 - DNA, 25 bp, Homo sapien
cgagcagatgaacgaacagactcag

SEQ ID NO: 5836732 - DNA, 25 bp, Homo sapien
gatgaacgaacagactcaggcgatg

SEQ ID NO: 5836733 - DNA, 25 bp, Homo sapien
aacagactcaggcgatgtgctttat

SEQ ID NO: 5836734 - DNA, 25 bp, Homo sapien
tcaggcgatgtgctttatggcaggc

SEQ ID NO: 5836735 - DNA, 25 bp, Homo sapien
gtgctttatggcaggcgcaaactcg

SEQ ID NO: 5836736 - DNA, 25 bp, Homo sapien
atggcaggcgcaaactcgattttct

SEQ ID NO: 5836737 - DNA, 25 bp, Homo sapien
tacggttgcaaactgctgaccacgc

SEQ ID NO: 5836738 - DNA, 25 bp, Homo sapien
caaactgctgaccacgccgaatccg

SEQ ID NO: 5836739 - DNA, 25 bp, Homo sapien
gacctgcaactgttccgcaaactgg

SEQ ID NO: 5836740 - DNA, 25 bp, Homo sapien
gggctaaatccgcagcaaactgccg

SEQ ID NO: 5836741 - DNA, 25 bp, Homo sapien
cgcagcaaactgccgtgctggcagg

SEQ ID NO: 5836742 - DNA, 25 bp, Homo sapien
acagcaacgtcttgaacaggcgctg

SEQ ID NO: 5836743 - DNA, 25 bp, Homo sapien
cgtcttgaacaggcgctgatgaccc

SEQ ID NO: 5836744 - DNA, 25 bp, Homo sapien
ggtcgcgcggatcatgatgccaacc

SEQ ID NO: 5836745 - DNA, 25 bp, Homo sapien
acaggcgctgatgaccccggacacc

SEQ ID NO: 5836746 - DNA, 25 bp, Homo sapien
ggatcatgatgccaacctcttacgt

SEQ ID NO: 5836747 - DNA, 25 bp, Homo sapien
atattacaacgcggcagcattatga

SEQ ID NO: 5836748 - DNA, 25 bp, Homo sapien
tgccaacctcttacgtgcgcctttc

SEQ ID NO: 5836749 - DNA, 25 bp, Homo sapien
gcgcctttctgccggacgcgagcag

SEQ ID NO: 5836750 - DNA, 25 bp, Homo sapien
gccggacgcgagcagatgaacgaac

SEQ ID NO: 5836751 - DNA, 25 bp, Homo sapien
cgagcagatgaacgaacagactcag

SEQ ID NO: 5836752 - DNA, 25 bp, Homo sapien
gatgaacgaacagactcaggcgatg

SEQ ID NO: 5836753 - DNA, 25 bp, Homo sapien
aacagactcaggcgatgtgctttat

SEQ ID NO: 5836754 - DNA, 25 bp, Homo sapien
tcaggcgatgtgctttatggcaggc

SEQ ID NO: 5836755 - DNA, 25 bp, Homo sapien
gtgctttatggcaggcgcaaactcg

SEQ ID NO: 5836756 - DNA, 25 bp, Homo sapien
atggcaggcgcaaactcgattttct

SEQ ID NO: 5836757 - DNA, 25 bp, Homo sapien
tacggttgcaaactgctgaccacgc

SEQ ID NO: 5836758 - DNA, 25 bp, Homo sapien
caaactgctgaccacgccgaatccg

SEQ ID NO: 5836759 - DNA, 25 bp, Homo sapien
gacctgcaactgttccgcaaactgg

SEQ ID NO: 5836760 - DNA, 25 bp, Homo sapien
gggctaaatccgcagcaaactgccg

SEQ ID NO: 5836761 - DNA, 25 bp, Homo sapien
cgcagcaaactgccgtgctggcagg

SEQ ID NO: 5836762 - DNA, 25 bp, Homo sapien
acagcaacgtcttgaacaggcgctg

SEQ ID NO: 5836763 - DNA, 25 bp, Homo sapien
cgtcttgaacaggcgctgatgaccc

SEQ ID NO: 5836764 - DNA, 25 bp, Homo sapien
ggtcgcgcggatcatgatgccaacc

SEQ ID NO: 5836765 - DNA, 25 bp, Homo sapien
acaggcgctgatgaccccggacacc

SEQ ID NO: 5836766 - DNA, 25 bp, Homo sapien
ggatcatgatgccaacctcttacgt

SEQ ID NO: 5836767 - DNA, 25 bp, Homo sapien
atattacaacgcggcagcattatga

SEQ ID NO: 5836768 - DNA, 25 bp, Homo sapien
tgccaacctcttacgtgcgcctttc

SEQ ID NO: 5836769 - DNA, 25 bp, Homo sapien
gcgcctttctgccggacgcgagcag

SEQ ID NO: 5836770 - DNA, 25 bp, Homo sapien
gccggacgcgagcagatgaacgaac

SEQ ID NO: 5836771 - DNA, 25 bp, Homo sapien
cgagcagatgaacgaacagactcag

SEQ ID NO: 5836772 - DNA, 25 bp, Homo sapien
gatgaacgaacagactcaggcgatg

SEQ ID NO: 5836773 - DNA, 25 bp, Homo sapien
aacagactcaggcgatgtgctttat

SEQ ID NO: 5836774 - DNA, 25 bp, Homo sapien
tcaggcgatgtgctttatggcaggc

SEQ ID NO: 5836775 - DNA, 25 bp, Homo sapien
gtgctttatggcaggcgcaaactcg

SEQ ID NO: 5836776 - DNA, 25 bp, Homo sapien
atggcaggcgcaaactcgattttct

SEQ ID NO: 5836777 - DNA, 25 bp, Homo sapien
tacggttgcaaactgctgaccacgc

SEQ ID NO: 5836778 - DNA, 25 bp, Homo sapien
caaactgctgaccacgccgaatccg

SEQ ID NO: 5836779 - DNA, 25 bp, Homo sapien
gacctgcaactgttccgcaaactgg

SEQ ID NO: 5836780 - DNA, 25 bp, Homo sapien
gggctaaatccgcagcaaactgccg

SEQ ID NO: 5836781 - DNA, 25 bp, Homo sapien
cgcagcaaactgccgtgctggcagg

SEQ ID NO: 5836782 - DNA, 25 bp, Homo sapien
acagcaacgtcttgaacaggcgctg

SEQ ID NO: 5836783 - DNA, 25 bp, Homo sapien
cgtcttgaacaggcgctgatgaccc

SEQ ID NO: 5836784 - DNA, 25 bp, Homo sapien
ggtcgcgcggatcatgatgccaacc

SEQ ID NO: 5836785 - DNA, 25 bp, Homo sapien
acaggcgctgatgaccccggacacc

SEQ ID NO: 5836786 - DNA, 25 bp, Homo sapien
ggatcatgatgccaacctcttacgt

SEQ ID NO: 5836787 - DNA, 25 bp, Homo sapien
atattacaacgcggcagcattatga

SEQ ID NO: 5836788 - DNA, 25 bp, Homo sapien
tgccaacctcttacgtgcgcctttc

SEQ ID NO: 5836789 - DNA, 25 bp, Homo sapien
gcgcctttctgccggacgcgagcag

SEQ ID NO: 5836790 - DNA, 25 bp, Homo sapien
gccggacgcgagcagatgaacgaac

SEQ ID NO: 5836791 - DNA, 25 bp, Homo sapien
cgagcagatgaacgaacagactcag

SEQ ID NO: 5836792 - DNA, 25 bp, Homo sapien
gatgaacgaacagactcaggcgatg

SEQ ID NO: 5836793 - DNA, 25 bp, Homo sapien
aacagactcaggcgatgtgctttat

SEQ ID NO: 5836794 - DNA, 25 bp, Homo sapien
tcaggcgatgtgctttatggcaggc

SEQ ID NO: 5836795 - DNA, 25 bp, Homo sapien
gtgctttatggcaggcgcaaactcg

SEQ ID NO: 5836796 - DNA, 25 bp, Homo sapien
atggcaggcgcaaactcgattttct

SEQ ID NO: 5836797 - DNA, 25 bp, Homo sapien
tacggttgcaaactgctgaccacgc

SEQ ID NO: 5836798 - DNA, 25 bp, Homo sapien
caaactgctgaccacgccgaatccg

SEQ ID NO: 5836799 - DNA, 25 bp, Homo sapien
gacctgcaactgttccgcaaactgg

SEQ ID NO: 5836800 - DNA, 25 bp, Homo sapien
gggctaaatccgcagcaaactgccg

SEQ ID NO: 5836801 - DNA, 25 bp, Homo sapien
cgcagcaaactgccgtgctggcagg

SEQ ID NO: 5836802 - DNA, 25 bp, Homo sapien
acagcaacgtcttgaacaggcgctg

SEQ ID NO: 5836803 - DNA, 25 bp, Homo sapien
cgtcttgaacaggcgctgatgaccc

SEQ ID NO: 5836804 - DNA, 25 bp, Homo sapien
ggtcgcgcggatcatgatgccaacc

SEQ ID NO: 5836805 - DNA, 25 bp, Homo sapien
acaggcgctgatgaccccggacacc

SEQ ID NO: 5836806 - DNA, 25 bp, Homo sapien
ggatcatgatgccaacctcttacgt

SEQ ID NO: 5836807 - DNA, 25 bp, Homo sapien
atattacaacgcggcagcattatga

SEQ ID NO: 5836808 - DNA, 25 bp, Homo sapien
tgccaacctcttacgtgcgcctttc

SEQ ID NO: 5836809 - DNA, 25 bp, Homo sapien
gcgcctttctgccggacgcgagcag

SEQ ID NO: 5836810 - DNA, 25 bp, Homo sapien
gccggacgcgagcagatgaacgaac

SEQ ID NO: 5836811 - DNA, 25 bp, Homo sapien
cgagcagatgaacgaacagactcag

SEQ ID NO: 5836812 - DNA, 25 bp, Homo sapien
gatgaacgaacagactcaggcgatg

SEQ ID NO: 5836813 - DNA, 25 bp, Homo sapien
aacagactcaggcgatgtgctttat

SEQ ID NO: 5836814 - DNA, 25 bp, Homo sapien
tcaggcgatgtgctttatggcaggc

SEQ ID NO: 5836815 - DNA, 25 bp, Homo sapien
gtgctttatggcaggcgcaaactcg

SEQ ID NO: 5836816 - DNA, 25 bp, Homo sapien
atggcaggcgcaaactcgattttct

SEQ ID NO: 5836817 - DNA, 25 bp, Homo sapien
tacggttgcaaactgctgaccacgc

SEQ ID NO: 5836818 - DNA, 25 bp, Homo sapien
caaactgctgaccacgccgaatccg

SEQ ID NO: 5836819 - DNA, 25 bp, Homo sapien
gacctgcaactgttccgcaaactgg

SEQ ID NO: 5836820 - DNA, 25 bp, Homo sapien
gggctaaatccgcagcaaactgccg

SEQ ID NO: 5836821 - DNA, 25 bp, Homo sapien
cgcagcaaactgccgtgctggcagg

SEQ ID NO: 5836822 - DNA, 25 bp, Homo sapien
acagcaacgtcttgaacaggcgctg

SEQ ID NO: 5836823 - DNA, 25 bp, Homo sapien
cgtcttgaacaggcgctgatgaccc

SEQ ID NO: 5836824 - DNA, 25 bp, Homo sapien
ggtcgcgcggatcatgatgccaacc

SEQ ID NO: 5836825 - DNA, 25 bp, Homo sapien
acaggcgctgatgaccccggacacc

SEQ ID NO: 5836826 - DNA, 25 bp, Homo sapien
ggatcatgatgccaacctcttacgt

SEQ ID NO: 5836827 - DNA, 25 bp, Homo sapien
atattacaacgcggcagcattatga

SEQ ID NO: 5836828 - DNA, 25 bp, Homo sapien
tgccaacctcttacgtgcgcctttc

SEQ ID NO: 5836829 - DNA, 25 bp, Homo sapien
gcgcctttctgccggacgcgagcag

SEQ ID NO: 5836830 - DNA, 25 bp, Homo sapien
gccggacgcgagcagatgaacgaac

SEQ ID NO: 5836831 - DNA, 25 bp, Homo sapien
cgagcagatgaacgaacagactcag

SEQ ID NO: 5836832 - DNA, 25 bp, Homo sapien
gatgaacgaacagactcaggcgatg

SEQ ID NO: 5836833 - DNA, 25 bp, Homo sapien
aacagactcaggcgatgtgctttat

SEQ ID NO: 5836834 - DNA, 25 bp, Homo sapien
tcaggcgatgtgctttatggcaggc

SEQ ID NO: 5836835 - DNA, 25 bp, Homo sapien
gtgctttatggcaggcgcaaactcg

SEQ ID NO: 5836836 - DNA, 25 bp, Homo sapien
atggcaggcgcaaactcgattttct

SEQ ID NO: 5836837 - DNA, 25 bp, Homo sapien
tacggttgcaaactgctgaccacgc

SEQ ID NO: 5836838 - DNA, 25 bp, Homo sapien
caaactgctgaccacgccgaatccg

SEQ ID NO: 5836839 - DNA, 25 bp, Homo sapien
gacctgcaactgttccgcaaactgg

SEQ ID NO: 5836840 - DNA, 25 bp, Homo sapien
gggctaaatccgcagcaaactgccg

SEQ ID NO: 5836841 - DNA, 25 bp, Homo sapien
cgcagcaaactgccgtgctggcagg

SEQ ID NO: 5836842 - DNA, 25 bp, Homo sapien
acagcaacgtcttgaacaggcgctg

SEQ ID NO: 5836843 - DNA, 25 bp, Homo sapien
cgtcttgaacaggcgctgatgaccc

SEQ ID NO: 5836844 - DNA, 25 bp, Homo sapien
ggtcgcgcggatcatgatgccaacc

SEQ ID NO: 5836845 - DNA, 25 bp, Homo sapien
acaggcgctgatgaccccggacacc

SEQ ID NO: 5836846 - DNA, 25 bp, Homo sapien
ggatcatgatgccaacctcttacgt

SEQ ID NO: 5836847 - DNA, 25 bp, Homo sapien
atattacaacgcggcagcattatga

SEQ ID NO: 5836848 - DNA, 25 bp, Homo sapien
tgccaacctcttacgtgcgcctttc

SEQ ID NO: 5836849 - DNA, 25 bp, Homo sapien
gcgcctttctgccggacgcgagcag

SEQ ID NO: 5836850 - DNA, 25 bp, Homo sapien
gccggacgcgagcagatgaacgaac

SEQ ID NO: 5836851 - DNA, 25 bp, Homo sapien
cgagcagatgaacgaacagactcag

SEQ ID NO: 5836852 - DNA, 25 bp, Homo sapien
gatgaacgaacagactcaggcgatg

SEQ ID NO: 5836853 - DNA, 25 bp, Homo sapien
aacagactcaggcgatgtgctttat

SEQ ID NO: 5836854 - DNA, 25 bp, Homo sapien
tcaggcgatgtgctttatggcaggc

SEQ ID NO: 5836855 - DNA, 25 bp, Homo sapien
gtgctttatggcaggcgcaaactcg

SEQ ID NO: 5836856 - DNA, 25 bp, Homo sapien
atggcaggcgcaaactcgattttct

SEQ ID NO: 5836857 - DNA, 25 bp, Homo sapien
tacggttgcaaactgctgaccacgc

SEQ ID NO: 5836858 - DNA, 25 bp, Homo sapien
caaactgctgaccacgccgaatccg

SEQ ID NO: 5836859 - DNA, 25 bp, Homo sapien
gacctgcaactgttccgcaaactgg

SEQ ID NO: 5836860 - DNA, 25 bp, Homo sapien
gggctaaatccgcagcaaactgccg

SEQ ID NO: 5836861 - DNA, 25 bp, Homo sapien
cgcagcaaactgccgtgctggcagg

SEQ ID NO: 5836862 - DNA, 25 bp, Homo sapien
acagcaacgtcttgaacaggcgctg

SEQ ID NO: 5836863 - DNA, 25 bp, Homo sapien
cgtcttgaacaggcgctgatgaccc

SEQ ID NO: 5836864 - DNA, 25 bp, Homo sapien
ggtcgcgcggatcatgatgccaacc

SEQ ID NO: 5836865 - DNA, 25 bp, Homo sapien
acaggcgctgatgaccccggacacc

SEQ ID NO: 5836866 - DNA, 25 bp, Homo sapien
ggatcatgatgccaacctcttacgt

SEQ ID NO: 5836867 - DNA, 25 bp, Homo sapien
atattacaacgcggcagcattatga

SEQ ID NO: 5836868 - DNA, 25 bp, Homo sapien
tgccaacctcttacgtgcgcctttc

SEQ ID NO: 5836869 - DNA, 25 bp, Homo sapien
gcgcctttctgccggacgcgagcag

SEQ ID NO: 5836870 - DNA, 25 bp, Homo sapien
gccggacgcgagcagatgaacgaac

SEQ ID NO: 5836871 - DNA, 25 bp, Homo sapien
cgagcagatgaacgaacagactcag

SEQ ID NO: 5836872 - DNA, 25 bp, Homo sapien
gatgaacgaacagactcaggcgatg

SEQ ID NO: 5836873 - DNA, 25 bp, Homo sapien
aacagactcaggcgatgtgctttat

SEQ ID NO: 5836874 - DNA, 25 bp, Homo sapien
tcaggcgatgtgctttatggcaggc

SEQ ID NO: 5836875 - DNA, 25 bp, Homo sapien
gtgctttatggcaggcgcaaactcg

SEQ ID NO: 5836876 - DNA, 25 bp, Homo sapien
atggcaggcgcaaactcgattttct

SEQ ID NO: 5836877 - DNA, 25 bp, Homo sapien
tacggttgcaaactgctgaccacgc

SEQ ID NO: 5836878 - DNA, 25 bp, Homo sapien
caaactgctgaccacgccgaatccg

SEQ ID NO: 5836879 - DNA, 25 bp, Homo sapien
gacctgcaactgttccgcaaactgg

SEQ ID NO: 5836880 - DNA, 25 bp, Homo sapien
gggctaaatccgcagcaaactgccg

SEQ ID NO: 5836881 - DNA, 25 bp, Homo sapien
cgcagcaaactgccgtgctggcagg

SEQ ID NO: 5836882 - DNA, 25 bp, Homo sapien
acagcaacgtcttgaacaggcgctg

SEQ ID NO: 5836883 - DNA, 25 bp, Homo sapien
cgtcttgaacaggcgctgatgaccc

SEQ ID NO: 5836884 - DNA, 25 bp, Homo sapien
ggtcgcgcggatcatgatgccaacc

SEQ ID NO: 5836885 - DNA, 25 bp, Homo sapien
acaggcgctgatgaccccggacacc

SEQ ID NO: 5836886 - DNA, 25 bp, Homo sapien
ggatcatgatgccaacctcttacgt

SEQ ID NO: 5836887 - DNA, 25 bp, Homo sapien
atattacaacgcggcagcattatga

SEQ ID NO: 5836888 - DNA, 25 bp, Homo sapien
tgccaacctcttacgtgcgcctttc

SEQ ID NO: 5836889 - DNA, 25 bp, Homo sapien
gcgcctttctgccggacgcgagcag

SEQ ID NO: 5836890 - DNA, 25 bp, Homo sapien
gccggacgcgagcagatgaacgaac

SEQ ID NO: 5836891 - DNA, 25 bp, Homo sapien
cgagcagatgaacgaacagactcag

SEQ ID NO: 5836892 - DNA, 25 bp, Homo sapien
gatgaacgaacagactcaggcgatg

SEQ ID NO: 5836893 - DNA, 25 bp, Homo sapien
aacagactcaggcgatgtgctttat

SEQ ID NO: 5836894 - DNA, 25 bp, Homo sapien
tcaggcgatgtgctttatggcaggc

SEQ ID NO: 5836895 - DNA, 25 bp, Homo sapien
gtgctttatggcaggcgcaaactcg

SEQ ID NO: 5836896 - DNA, 25 bp, Homo sapien
atggcaggcgcaaactcgattttct

SEQ ID NO: 5836897 - DNA, 25 bp, Homo sapien
tacggttgcaaactgctgaccacgc

SEQ ID NO: 5836898 - DNA, 25 bp, Homo sapien
caaactgctgaccacgccgaatccg

SEQ ID NO: 5836899 - DNA, 25 bp, Homo sapien
gacctgcaactgttccgcaaactgg

SEQ ID NO: 5836900 - DNA, 25 bp, Homo sapien
gggctaaatccgcagcaaactgccg

SEQ ID NO: 5836901 - DNA, 25 bp, Homo sapien
cgcagcaaactgccgtgctggcagg

SEQ ID NO: 5836902 - DNA, 25 bp, Homo sapien
acagcaacgtcttgaacaggcgctg

SEQ ID NO: 5836903 - DNA, 25 bp, Homo sapien
cgtcttgaacaggcgctgatgaccc

SEQ ID NO: 5836904 - DNA, 25 bp, Homo sapien
ggtcgcgcggatcatgatgccaacc

SEQ ID NO: 5836905 - DNA, 25 bp, Homo sapien
acaggcgctgatgaccccggacacc

SEQ ID NO: 5836906 - DNA, 25 bp, Homo sapien
ggatcatgatgccaacctcttacgt

SEQ ID NO: 5836907 - DNA, 25 bp, Homo sapien
atattacaacgcggcagcattatga

SEQ ID NO: 5836908 - DNA, 25 bp, Homo sapien
tgccaacctcttacgtgcgcctttc

SEQ ID NO: 5836909 - DNA, 25 bp, Homo sapien
gcgcctttctgccggacgcgagcag

SEQ ID NO: 5836910 - DNA, 25 bp, Homo sapien
gccggacgcgagcagatgaacgaac

SEQ ID NO: 5836911 - DNA, 25 bp, Homo sapien
cgagcagatgaacgaacagactcag

SEQ ID NO: 5836912 - DNA, 25 bp, Homo sapien
gatgaacgaacagactcaggcgatg

SEQ ID NO: 5836913 - DNA, 25 bp, Homo sapien
aacagactcaggcgatgtgctttat

SEQ ID NO: 5836914 - DNA, 25 bp, Homo sapien
tcaggcgatgtgctttatggcaggc

SEQ ID NO: 5836915 - DNA, 25 bp, Homo sapien
gtgctttatggcaggcgcaaactcg

SEQ ID NO: 5836916 - DNA, 25 bp, Homo sapien
atggcaggcgcaaactcgattttct

SEQ ID NO: 5836917 - DNA, 25 bp, Homo sapien
tacggttgcaaactgctgaccacgc

SEQ ID NO: 5836918 - DNA, 25 bp, Homo sapien
caaactgctgaccacgccgaatccg

SEQ ID NO: 5836919 - DNA, 25 bp, Homo sapien
gacctgcaactgttccgcaaactgg

SEQ ID NO: 5836920 - DNA, 25 bp, Homo sapien
gggctaaatccgcagcaaactgccg

SEQ ID NO: 5836921 - DNA, 25 bp, Homo sapien
cgcagcaaactgccgtgctggcagg

SEQ ID NO: 5836922 - DNA, 25 bp, Homo sapien
acagcaacgtcttgaacaggcgctg

SEQ ID NO: 5836923 - DNA, 25 bp, Homo sapien
cgtcttgaacaggcgctgatgaccc

SEQ ID NO: 5836924 - DNA, 25 bp, Homo sapien
ggtcgcgcggatcatgatgccaacc

SEQ ID NO: 5836925 - DNA, 25 bp, Homo sapien
acaggcgctgatgaccccggacacc

SEQ ID NO: 5836926 - DNA, 25 bp, Homo sapien
ggatcatgatgccaacctcttacgt

SEQ ID NO: 5836927 - DNA, 25 bp, Homo sapien
atattacaacgcggcagcattatga

SEQ ID NO: 5836928 - DNA, 25 bp, Homo sapien
tgccaacctcttacgtgcgcctttc

SEQ ID NO: 5836929 - DNA, 25 bp, Homo sapien
gcgcctttctgccggacgcgagcag

SEQ ID NO: 5836930 - DNA, 25 bp, Homo sapien
gccggacgcgagcagatgaacgaac

SEQ ID NO: 5836931 - DNA, 25 bp, Homo sapien
cgagcagatgaacgaacagactcag

SEQ ID NO: 5836932 - DNA, 25 bp, Homo sapien
gatgaacgaacagactcaggcgatg

SEQ ID NO: 5836933 - DNA, 25 bp, Homo sapien
aacagactcaggcgatgtgctttat

SEQ ID NO: 5836934 - DNA, 25 bp, Homo sapien
tcaggcgatgtgctttatggcaggc

SEQ ID NO: 5836935 - DNA, 25 bp, Homo sapien
gtgctttatggcaggcgcaaactcg

SEQ ID NO: 5836936 - DNA, 25 bp, Homo sapien
atggcaggcgcaaactcgattttct

SEQ ID NO: 5836937 - DNA, 25 bp, Homo sapien
tacggttgcaaactgctgaccacgc

SEQ ID NO: 5836938 - DNA, 25 bp, Homo sapien
caaactgctgaccacgccgaatccg

SEQ ID NO: 5836939 - DNA, 25 bp, Homo sapien
gacctgcaactgttccgcaaactgg

SEQ ID NO: 5836940 - DNA, 25 bp, Homo sapien
gggctaaatccgcagcaaactgccg

SEQ ID NO: 5836941 - DNA, 25 bp, Homo sapien
cgcagcaaactgccgtgctggcagg

SEQ ID NO: 5836942 - DNA, 25 bp, Homo sapien
acagcaacgtcttgaacaggcgctg

SEQ ID NO: 5836943 - DNA, 25 bp, Homo sapien
cgtcttgaacaggcgctgatgaccc

SEQ ID NO: 5836944 - DNA, 25 bp, Homo sapien
ggtcgcgcggatcatgatgccaacc

SEQ ID NO: 5836945 - DNA, 25 bp, Homo sapien
acaggcgctgatgaccccggacacc

SEQ ID NO: 5836946 - DNA, 25 bp, Homo sapien
ggatcatgatgccaacctcttacgt

SEQ ID NO: 5836947 - DNA, 25 bp, Homo sapien
atattacaacgcggcagcattatga

SEQ ID NO: 5836948 - DNA, 25 bp, Homo sapien
tgccaacctcttacgtgcgcctttc

SEQ ID NO: 5836949 - DNA, 25 bp, Homo sapien
gcgcctttctgccggacgcgagcag

SEQ ID NO: 5836950 - DNA, 25 bp, Homo sapien
gccggacgcgagcagatgaacgaac

SEQ ID NO: 5836951 - DNA, 25 bp, Homo sapien
cgagcagatgaacgaacagactcag

SEQ ID NO: 5836952 - DNA, 25 bp, Homo sapien
gatgaacgaacagactcaggcgatg

SEQ ID NO: 5836953 - DNA, 25 bp, Homo sapien
aacagactcaggcgatgtgctttat

SEQ ID NO: 5836954 - DNA, 25 bp, Homo sapien
tcaggcgatgtgctttatggcaggc

SEQ ID NO: 5836955 - DNA, 25 bp, Homo sapien
gtgctttatggcaggcgcaaactcg

SEQ ID NO: 5836956 - DNA, 25 bp, Homo sapien
atggcaggcgcaaactcgattttct

SEQ ID NO: 5836957 - DNA, 25 bp, Homo sapien
tacggttgcaaactgctgaccacgc

SEQ ID NO: 5836958 - DNA, 25 bp, Homo sapien
caaactgctgaccacgccgaatccg

SEQ ID NO: 5836959 - DNA, 25 bp, Homo sapien
gacctgcaactgttccgcaaactgg

SEQ ID NO: 5836960 - DNA, 25 bp, Homo sapien
gggctaaatccgcagcaaactgccg

SEQ ID NO: 5836961 - DNA, 25 bp, Homo sapien
cgcagcaaactgccgtgctggcagg

SEQ ID NO: 5836962 - DNA, 25 bp, Homo sapien
acagcaacgtcttgaacaggcgctg

SEQ ID NO: 5836963 - DNA, 25 bp, Homo sapien
cgtcttgaacaggcgctgatgaccc

SEQ ID NO: 5836964 - DNA, 25 bp, Homo sapien
ggtcgcgcggatcatgatgccaacc

SEQ ID NO: 5836965 - DNA, 25 bp, Homo sapien
acaggcgctgatgaccccggacacc

SEQ ID NO: 5836966 - DNA, 25 bp, Homo sapien
ggatcatgatgccaacctcttacgt

SEQ ID NO: 5836967 - DNA, 25 bp, Homo sapien
atattacaacgcggcagcattatga

SEQ ID NO: 5836968 - DNA, 25 bp, Homo sapien
tgccaacctcttacgtgcgcctttc

SEQ ID NO: 5836969 - DNA, 25 bp, Homo sapien
gcgcctttctgccggacgcgagcag

SEQ ID NO: 5836970 - DNA, 25 bp, Homo sapien
gccggacgcgagcagatgaacgaac

SEQ ID NO: 5836971 - DNA, 25 bp, Homo sapien
cgagcagatgaacgaacagactcag

SEQ ID NO: 5836972 - DNA, 25 bp, Homo sapien
gatgaacgaacagactcaggcgatg

SEQ ID NO: 5836973 - DNA, 25 bp, Homo sapien
aacagactcaggcgatgtgctttat

SEQ ID NO: 5836974 - DNA, 25 bp, Homo sapien
tcaggcgatgtgctttatggcaggc

SEQ ID NO: 5836975 - DNA, 25 bp, Homo sapien
gtgctttatggcaggcgcaaactcg

SEQ ID NO: 5836976 - DNA, 25 bp, Homo sapien
atggcaggcgcaaactcgattttct

SEQ ID NO: 5836977 - DNA, 25 bp, Homo sapien
tacggttgcaaactgctgaccacgc

SEQ ID NO: 5836978 - DNA, 25 bp, Homo sapien
caaactgctgaccacgccgaatccg

SEQ ID NO: 5836979 - DNA, 25 bp, Homo sapien
gacctgcaactgttccgcaaactgg

SEQ ID NO: 5836980 - DNA, 25 bp, Homo sapien
gggctaaatccgcagcaaactgccg

SEQ ID NO: 5836981 - DNA, 25 bp, Homo sapien
cgcagcaaactgccgtgctggcagg

SEQ ID NO: 5836982 - DNA, 25 bp, Homo sapien
acagcaacgtcttgaacaggcgctg

SEQ ID NO: 5836983 - DNA, 25 bp, Homo sapien
cgtcttgaacaggcgctgatgaccc

SEQ ID NO: 5836984 - DNA, 25 bp, Homo sapien
ggtcgcgcggatcatgatgccaacc

SEQ ID NO: 5836985 - DNA, 25 bp, Homo sapien
acaggcgctgatgaccccggacacc

SEQ ID NO: 5836986 - DNA, 25 bp, Homo sapien
ggatcatgatgccaacctcttacgt

SEQ ID NO: 5836987 - DNA, 25 bp, Homo sapien
atattacaacgcggcagcattatga

SEQ ID NO: 5836988 - DNA, 25 bp, Homo sapien
tgccaacctcttacgtgcgcctttc

SEQ ID NO: 5836989 - DNA, 25 bp, Homo sapien
gcgcctttctgccggacgcgagcag

SEQ ID NO: 5836990 - DNA, 25 bp, Homo sapien
gccggacgcgagcagatgaacgaac

SEQ ID NO: 5836991 - DNA, 25 bp, Homo sapien
cgagcagatgaacgaacagactcag

SEQ ID NO: 5836992 - DNA, 25 bp, Homo sapien
gatgaacgaacagactcaggcgatg

SEQ ID NO: 5836993 - DNA, 25 bp, Homo sapien
aacagactcaggcgatgtgctttat

SEQ ID NO: 5836994 - DNA, 25 bp, Homo sapien
tcaggcgatgtgctttatggcaggc

SEQ ID NO: 5836995 - DNA, 25 bp, Homo sapien
gtgctttatggcaggcgcaaactcg

SEQ ID NO: 5836996 - DNA, 25 bp, Homo sapien
atggcaggcgcaaactcgattttct

SEQ ID NO: 5836997 - DNA, 25 bp, Homo sapien
tacggttgcaaactgctgaccacgc

SEQ ID NO: 5836998 - DNA, 25 bp, Homo sapien
caaactgctgaccacgccgaatccg

SEQ ID NO: 5836999 - DNA, 25 bp, Homo sapien
gacctgcaactgttccgcaaactgg

SEQ ID NO: 5837000 - DNA, 25 bp, Homo sapien
gggctaaatccgcagcaaactgccg

SEQ ID NO: 5837001 - DNA, 25 bp, Homo sapien
cgcagcaaactgccgtgctggcagg

SEQ ID NO: 5837002 - DNA, 25 bp, Homo sapien
acagcaacgtcttgaacaggcgctg

SEQ ID NO: 5837003 - DNA, 25 bp, Homo sapien
cgtcttgaacaggcgctgatgaccc

SEQ ID NO: 5837004 - DNA, 25 bp, Homo sapien
ggtcgcgcggatcatgatgccaacc

SEQ ID NO: 5837005 - DNA, 25 bp, Homo sapien
acaggcgctgatgaccccggacacc

SEQ ID NO: 5837006 - DNA, 25 bp, Homo sapien
ggatcatgatgccaacctcttacgt

SEQ ID NO: 5837007 - DNA, 25 bp, Homo sapien
atattacaacgcggcagcattatga

SEQ ID NO: 5837008 - DNA, 25 bp, Homo sapien
tgccaacctcttacgtgcgcctttc

SEQ ID NO: 5837009 - DNA, 25 bp, Homo sapien
gcgcctttctgccggacgcgagcag

SEQ ID NO: 5837010 - DNA, 25 bp, Homo sapien
gccggacgcgagcagatgaacgaac

SEQ ID NO: 5837011 - DNA, 25 bp, Homo sapien
cgagcagatgaacgaacagactcag

SEQ ID NO: 5837012 - DNA, 25 bp, Homo sapien
gatgaacgaacagactcaggcgatg

SEQ ID NO: 5837013 - DNA, 25 bp, Homo sapien
aacagactcaggcgatgtgctttat

SEQ ID NO: 5837014 - DNA, 25 bp, Homo sapien
tcaggcgatgtgctttatggcaggc

SEQ ID NO: 5837015 - DNA, 25 bp, Homo sapien
gtgctttatggcaggcgcaaactcg

SEQ ID NO: 5837016 - DNA, 25 bp, Homo sapien
atggcaggcgcaaactcgattttct

SEQ ID NO: 5837017 - DNA, 25 bp, Homo sapien
tacggttgcaaactgctgaccacgc

SEQ ID NO: 5837018 - DNA, 25 bp, Homo sapien
caaactgctgaccacgccgaatccg

SEQ ID NO: 5837019 - DNA, 25 bp, Homo sapien
gacctgcaactgttccgcaaactgg

SEQ ID NO: 5837020 - DNA, 25 bp, Homo sapien
gggctaaatccgcagcaaactgccg

SEQ ID NO: 5837021 - DNA, 25 bp, Homo sapien
cgcagcaaactgccgtgctggcagg

SEQ ID NO: 5837022 - DNA, 25 bp, Homo sapien
acagcaacgtcttgaacaggcgctg

SEQ ID NO: 5837023 - DNA, 25 bp, Homo sapien
cgtcttgaacaggcgctgatgaccc

SEQ ID NO: 5837024 - DNA, 25 bp, Homo sapien
ggtcgcgcggatcatgatgccaacc

SEQ ID NO: 5837025 - DNA, 25 bp, Homo sapien
acaggcgctgatgaccccggacacc

SEQ ID NO: 5837026 - DNA, 25 bp, Homo sapien
ggatcatgatgccaacctcttacgt

SEQ ID NO: 5837027 - DNA, 25 bp, Homo sapien
atattacaacgcggcagcattatga

SEQ ID NO: 5837028 - DNA, 25 bp, Homo sapien
tgccaacctcttacgtgcgcctttc

SEQ ID NO: 5837029 - DNA, 25 bp, Homo sapien
gcgcctttctgccggacgcgagcag

SEQ ID NO: 5837030 - DNA, 25 bp, Homo sapien
gccggacgcgagcagatgaacgaac

SEQ ID NO: 5837031 - DNA, 25 bp, Homo sapien
cgagcagatgaacgaacagactcag

SEQ ID NO: 5837032 - DNA, 25 bp, Homo sapien
gatgaacgaacagactcaggcgatg

SEQ ID NO: 5837033 - DNA, 25 bp, Homo sapien
aacagactcaggcgatgtgctttat

SEQ ID NO: 5837034 - DNA, 25 bp, Homo sapien
tcaggcgatgtgctttatggcaggc

SEQ ID NO: 5837035 - DNA, 25 bp, Homo sapien
gtgctttatggcaggcgcaaactcg

SEQ ID NO: 5837036 - DNA, 25 bp, Homo sapien
atggcaggcgcaaactcgattttct

SEQ ID NO: 5837037 - DNA, 25 bp, Homo sapien
tacggttgcaaactgctgaccacgc

SEQ ID NO: 5837038 - DNA, 25 bp, Homo sapien
caaactgctgaccacgccgaatccg

SEQ ID NO: 5837039 - DNA, 25 bp, Homo sapien
gacctgcaactgttccgcaaactgg

SEQ ID NO: 5837040 - DNA, 25 bp, Homo sapien
gggctaaatccgcagcaaactgccg

SEQ ID NO: 5837041 - DNA, 25 bp, Homo sapien
cgcagcaaactgccgtgctggcagg

SEQ ID NO: 5837042 - DNA, 25 bp, Homo sapien
acagcaacgtcttgaacaggcgctg

SEQ ID NO: 5837043 - DNA, 25 bp, Homo sapien
cgtcttgaacaggcgctgatgaccc

SEQ ID NO: 5837044 - DNA, 25 bp, Homo sapien
ggtcgcgcggatcatgatgccaacc

SEQ ID NO: 5837045 - DNA, 25 bp, Homo sapien
acaggcgctgatgaccccggacacc

SEQ ID NO: 5837046 - DNA, 25 bp, Homo sapien
ggatcatgatgccaacctcttacgt

SEQ ID NO: 5837047 - DNA, 25 bp, Homo sapien
atattacaacgcggcagcattatga

SEQ ID NO: 5837048 - DNA, 25 bp, Homo sapien
tgccaacctcttacgtgcgcctttc

SEQ ID NO: 5837049 - DNA, 25 bp, Homo sapien
gcgcctttctgccggacgcgagcag

SEQ ID NO: 5837050 - DNA, 25 bp, Homo sapien
gccggacgcgagcagatgaacgaac

SEQ ID NO: 5837051 - DNA, 25 bp, Homo sapien
cgagcagatgaacgaacagactcag

SEQ ID NO: 5837052 - DNA, 25 bp, Homo sapien
gatgaacgaacagactcaggcgatg

SEQ ID NO: 5837053 - DNA, 25 bp, Homo sapien
aacagactcaggcgatgtgctttat

SEQ ID NO: 5837054 - DNA, 25 bp, Homo sapien
tcaggcgatgtgctttatggcaggc

SEQ ID NO: 5837055 - DNA, 25 bp, Homo sapien
gtgctttatggcaggcgcaaactcg

SEQ ID NO: 5837056 - DNA, 25 bp, Homo sapien
atggcaggcgcaaactcgattttct

SEQ ID NO: 5837057 - DNA, 25 bp, Homo sapien
tacggttgcaaactgctgaccacgc

SEQ ID NO: 5837058 - DNA, 25 bp, Homo sapien
caaactgctgaccacgccgaatccg

SEQ ID NO: 5837059 - DNA, 25 bp, Homo sapien
gacctgcaactgttccgcaaactgg

SEQ ID NO: 5837060 - DNA, 25 bp, Homo sapien
gggctaaatccgcagcaaactgccg

SEQ ID NO: 5837061 - DNA, 25 bp, Homo sapien
cgcagcaaactgccgtgctggcagg

SEQ ID NO: 5837062 - DNA, 25 bp, Homo sapien
acagcaacgtcttgaacaggcgctg

SEQ ID NO: 5837063 - DNA, 25 bp, Homo sapien
cgtcttgaacaggcgctgatgaccc

SEQ ID NO: 5837064 - DNA, 25 bp, Homo sapien
ggtcgcgcggatcatgatgccaacc

SEQ ID NO: 5837065 - DNA, 25 bp, Homo sapien
acaggcgctgatgaccccggacacc

SEQ ID NO: 5837066 - DNA, 25 bp, Homo sapien
ggatcatgatgccaacctcttacgt

SEQ ID NO: 5837067 - DNA, 25 bp, Homo sapien
atattacaacgcggcagcattatga

SEQ ID NO: 5837068 - DNA, 25 bp, Homo sapien
tgccaacctcttacgtgcgcctttc

SEQ ID NO: 5837069 - DNA, 25 bp, Homo sapien
gcgcctttctgccggacgcgagcag

SEQ ID NO: 5837070 - DNA, 25 bp, Homo sapien
gccggacgcgagcagatgaacgaac

SEQ ID NO: 5837071 - DNA, 25 bp, Homo sapien
cgagcagatgaacgaacagactcag

SEQ ID NO: 5837072 - DNA, 25 bp, Homo sapien
gatgaacgaacagactcaggcgatg

SEQ ID NO: 5837073 - DNA, 25 bp, Homo sapien
aacagactcaggcgatgtgctttat

SEQ ID NO: 5837074 - DNA, 25 bp, Homo sapien
tcaggcgatgtgctttatggcaggc

SEQ ID NO: 5837075 - DNA, 25 bp, Homo sapien
gtgctttatggcaggcgcaaactcg

SEQ ID NO: 5837076 - DNA, 25 bp, Homo sapien
atggcaggcgcaaactcgattttct

SEQ ID NO: 5837077 - DNA, 25 bp, Homo sapien
tacggttgcaaactgctgaccacgc

SEQ ID NO: 5837078 - DNA, 25 bp, Homo sapien
caaactgctgaccacgccgaatccg

SEQ ID NO: 5837079 - DNA, 25 bp, Homo sapien
gacctgcaactgttccgcaaactgg

SEQ ID NO: 5837080 - DNA, 25 bp, Homo sapien
gggctaaatccgcagcaaactgccg

SEQ ID NO: 5837081 - DNA, 25 bp, Homo sapien
cgcagcaaactgccgtgctggcagg

SEQ ID NO: 5837082 - DNA, 25 bp, Homo sapien
acagcaacgtcttgaacaggcgctg

SEQ ID NO: 5837083 - DNA, 25 bp, Homo sapien
cgtcttgaacaggcgctgatgaccc

SEQ ID NO: 5837084 - DNA, 25 bp, Homo sapien
ggtcgcgcggatcatgatgccaacc

SEQ ID NO: 5837085 - DNA, 25 bp, Homo sapien
acaggcgctgatgaccccggacacc

SEQ ID NO: 5837086 - DNA, 25 bp, Homo sapien
ggatcatgatgccaacctcttacgt

SEQ ID NO: 5837087 - DNA, 25 bp, Homo sapien
atattacaacgcggcagcattatga

SEQ ID NO: 5837088 - DNA, 25 bp, Homo sapien
tgccaacctcttacgtgcgcctttc

SEQ ID NO: 5837089 - DNA, 25 bp, Homo sapien
gcgcctttctgccggacgcgagcag

SEQ ID NO: 5837090 - DNA, 25 bp, Homo sapien
gccggacgcgagcagatgaacgaac

SEQ ID NO: 5837091 - DNA, 25 bp, Homo sapien
cgagcagatgaacgaacagactcag

SEQ ID NO: 5837092 - DNA, 25 bp, Homo sapien
gatgaacgaacagactcaggcgatg

SEQ ID NO: 5837093 - DNA, 25 bp, Homo sapien
aacagactcaggcgatgtgctttat

SEQ ID NO: 5837094 - DNA, 25 bp, Homo sapien
tcaggcgatgtgctttatggcaggc

SEQ ID NO: 5837095 - DNA, 25 bp, Homo sapien
gtgctttatggcaggcgcaaactcg

SEQ ID NO: 5837096 - DNA, 25 bp, Homo sapien
atggcaggcgcaaactcgattttct

SEQ ID NO: 5837097 - DNA, 25 bp, Homo sapien
tacggttgcaaactgctgaccacgc

SEQ ID NO: 5837098 - DNA, 25 bp, Homo sapien
caaactgctgaccacgccgaatccg

SEQ ID NO: 5837099 - DNA, 25 bp, Homo sapien
gacctgcaactgttccgcaaactgg

SEQ ID NO: 5837100 - DNA, 25 bp, Homo sapien
gggctaaatccgcagcaaactgccg

SEQ ID NO: 5837101 - DNA, 25 bp, Homo sapien
cgcagcaaactgccgtgctggcagg

SEQ ID NO: 5837102 - DNA, 25 bp, Homo sapien
acagcaacgtcttgaacaggcgctg

SEQ ID NO: 5837103 - DNA, 25 bp, Homo sapien
cgtcttgaacaggcgctgatgaccc

SEQ ID NO: 5837104 - DNA, 25 bp, Homo sapien
ggtcgcgcggatcatgatgccaacc

SEQ ID NO: 5837105 - DNA, 25 bp, Homo sapien
acaggcgctgatgaccccggacacc

SEQ ID NO: 5837106 - DNA, 25 bp, Homo sapien
ggatcatgatgccaacctcttacgt

SEQ ID NO: 5837107 - DNA, 25 bp, Homo sapien
atattacaacgcggcagcattatga

SEQ ID NO: 5837108 - DNA, 25 bp, Homo sapien
tgccaacctcttacgtgcgcctttc

SEQ ID NO: 5837109 - DNA, 25 bp, Homo sapien
gcgcctttctgccggacgcgagcag

SEQ ID NO: 5837110 - DNA, 25 bp, Homo sapien
gccggacgcgagcagatgaacgaac

SEQ ID NO: 5837111 - DNA, 25 bp, Homo sapien
cgagcagatgaacgaacagactcag

SEQ ID NO: 5837112 - DNA, 25 bp, Homo sapien
gatgaacgaacagactcaggcgatg

SEQ ID NO: 5837113 - DNA, 25 bp, Homo sapien
aacagactcaggcgatgtgctttat

SEQ ID NO: 5837114 - DNA, 25 bp, Homo sapien
tcaggcgatgtgctttatggcaggc

SEQ ID NO: 5837115 - DNA, 25 bp, Homo sapien
gtgctttatggcaggcgcaaactcg

SEQ ID NO: 5837116 - DNA, 25 bp, Homo sapien
atggcaggcgcaaactcgattttct

SEQ ID NO: 5837117 - DNA, 25 bp, Homo sapien
tacggttgcaaactgctgaccacgc

SEQ ID NO: 5837118 - DNA, 25 bp, Homo sapien
caaactgctgaccacgccgaatccg

SEQ ID NO: 5837119 - DNA, 25 bp, Homo sapien
gacctgcaactgttccgcaaactgg

SEQ ID NO: 5837120 - DNA, 25 bp, Homo sapien
gggctaaatccgcagcaaactgccg

SEQ ID NO: 5837121 - DNA, 25 bp, Homo sapien
cgcagcaaactgccgtgctggcagg

SEQ ID NO: 5837122 - DNA, 25 bp, Homo sapien
acagcaacgtcttgaacaggcgctg

SEQ ID NO: 5837123 - DNA, 25 bp, Homo sapien
cgtcttgaacaggcgctgatgaccc

SEQ ID NO: 5837124 - DNA, 25 bp, Homo sapien
ggtcgcgcggatcatgatgccaacc

SEQ ID NO: 5837125 - DNA, 25 bp, Homo sapien
acaggcgctgatgaccccggacacc

SEQ ID NO: 5837126 - DNA, 25 bp, Homo sapien
ggatcatgatgccaacctcttacgt

SEQ ID NO: 5837127 - DNA, 25 bp, Homo sapien
atattacaacgcggcagcattatga

SEQ ID NO: 5837128 - DNA, 25 bp, Homo sapien
tgccaacctcttacgtgcgcctttc

SEQ ID NO: 5837129 - DNA, 25 bp, Homo sapien
gcgcctttctgccggacgcgagcag

SEQ ID NO: 5837130 - DNA, 25 bp, Homo sapien
gccggacgcgagcagatgaacgaac

SEQ ID NO: 5837131 - DNA, 25 bp, Homo sapien
cgagcagatgaacgaacagactcag

SEQ ID NO: 5837132 - DNA, 25 bp, Homo sapien
gatgaacgaacagactcaggcgatg

SEQ ID NO: 5837133 - DNA, 25 bp, Homo sapien
aacagactcaggcgatgtgctttat

SEQ ID NO: 5837134 - DNA, 25 bp, Homo sapien
tcaggcgatgtgctttatggcaggc

SEQ ID NO: 5837135 - DNA, 25 bp, Homo sapien
gtgctttatggcaggcgcaaactcg

SEQ ID NO: 5837136 - DNA, 25 bp, Homo sapien
atggcaggcgcaaactcgattttct

SEQ ID NO: 5837137 - DNA, 25 bp, Homo sapien
tacggttgcaaactgctgaccacgc

SEQ ID NO: 5837138 - DNA, 25 bp, Homo sapien
caaactgctgaccacgccgaatccg

SEQ ID NO: 5837139 - DNA, 25 bp, Homo sapien
gacctgcaactgttccgcaaactgg

SEQ ID NO: 5837140 - DNA, 25 bp, Homo sapien
gggctaaatccgcagcaaactgccg

SEQ ID NO: 5837141 - DNA, 25 bp, Homo sapien
cgcagcaaactgccgtgctggcagg

SEQ ID NO: 5837142 - DNA, 25 bp, Homo sapien
acagcaacgtcttgaacaggcgctg

SEQ ID NO: 5837143 - DNA, 25 bp, Homo sapien
cgtcttgaacaggcgctgatgaccc

SEQ ID NO: 5837144 - DNA, 25 bp, Homo sapien
ggtcgcgcggatcatgatgccaacc

SEQ ID NO: 5837145 - DNA, 25 bp, Homo sapien
acaggcgctgatgaccccggacacc

SEQ ID NO: 5837146 - DNA, 25 bp, Homo sapien
ggatcatgatgccaacctcttacgt

SEQ ID NO: 5837147 - DNA, 25 bp, Homo sapien
atattacaacgcggcagcattatga

SEQ ID NO: 5837148 - DNA, 25 bp, Homo sapien
tgccaacctcttacgtgcgcctttc

SEQ ID NO: 5837149 - DNA, 25 bp, Homo sapien
gcgcctttctgccggacgcgagcag

SEQ ID NO: 5837150 - DNA, 25 bp, Homo sapien
gccggacgcgagcagatgaacgaac

SEQ ID NO: 5837151 - DNA, 25 bp, Homo sapien
cgagcagatgaacgaacagactcag

SEQ ID NO: 5837152 - DNA, 25 bp, Homo sapien
gatgaacgaacagactcaggcgatg

SEQ ID NO: 5837153 - DNA, 25 bp, Homo sapien
aacagactcaggcgatgtgctttat

SEQ ID NO: 5837154 - DNA, 25 bp, Homo sapien
tcaggcgatgtgctttatggcaggc

SEQ ID NO: 5837155 - DNA, 25 bp, Homo sapien
gtgctttatggcaggcgcaaactcg

SEQ ID NO: 5837156 - DNA, 25 bp, Homo sapien
atggcaggcgcaaactcgattttct

SEQ ID NO: 5837157 - DNA, 25 bp, Homo sapien
tacggttgcaaactgctgaccacgc

SEQ ID NO: 5837158 - DNA, 25 bp, Homo sapien
caaactgctgaccacgccgaatccg

SEQ ID NO: 5837159 - DNA, 25 bp, Homo sapien
gacctgcaactgttccgcaaactgg

SEQ ID NO: 5837160 - DNA, 25 bp, Homo sapien
gggctaaatccgcagcaaactgccg

SEQ ID NO: 5837161 - DNA, 25 bp, Homo sapien
cgcagcaaactgccgtgctggcagg

SEQ ID NO: 5837162 - DNA, 25 bp, Homo sapien
acagcaacgtcttgaacaggcgctg

SEQ ID NO: 5837163 - DNA, 25 bp, Homo sapien
cgtcttgaacaggcgctgatgaccc

SEQ ID NO: 5837164 - DNA, 25 bp, Homo sapien
ggtcgcgcggatcatgatgccaacc

SEQ ID NO: 5837165 - DNA, 25 bp, Homo sapien
acaggcgctgatgaccccggacacc

SEQ ID NO: 5837166 - DNA, 25 bp, Homo sapien
ggatcatgatgccaacctcttacgt

SEQ ID NO: 5837167 - DNA, 25 bp, Homo sapien
atattacaacgcggcagcattatga

SEQ ID NO: 5837168 - DNA, 25 bp, Homo sapien
tgccaacctcttacgtgcgcctttc

SEQ ID NO: 5837169 - DNA, 25 bp, Homo sapien
gcgcctttctgccggacgcgagcag

SEQ ID NO: 5837170 - DNA, 25 bp, Homo sapien
gccggacgcgagcagatgaacgaac

SEQ ID NO: 5837171 - DNA, 25 bp, Homo sapien
cgagcagatgaacgaacagactcag

SEQ ID NO: 5837172 - DNA, 25 bp, Homo sapien
gatgaacgaacagactcaggcgatg

SEQ ID NO: 5837173 - DNA, 25 bp, Homo sapien
aacagactcaggcgatgtgctttat

SEQ ID NO: 5837174 - DNA, 25 bp, Homo sapien
tcaggcgatgtgctttatggcaggc

SEQ ID NO: 5837175 - DNA, 25 bp, Homo sapien
gtgctttatggcaggcgcaaactcg

SEQ ID NO: 5837176 - DNA, 25 bp, Homo sapien
atggcaggcgcaaactcgattttct

SEQ ID NO: 5837177 - DNA, 25 bp, Homo sapien
tacggttgcaaactgctgaccacgc

SEQ ID NO: 5837178 - DNA, 25 bp, Homo sapien
caaactgctgaccacgccgaatccg

SEQ ID NO: 5837179 - DNA, 25 bp, Homo sapien
gacctgcaactgttccgcaaactgg

SEQ ID NO: 5837180 - DNA, 25 bp, Homo sapien
gggctaaatccgcagcaaactgccg

SEQ ID NO: 5837181 - DNA, 25 bp, Homo sapien
cgcagcaaactgccgtgctggcagg

SEQ ID NO: 5837182 - DNA, 25 bp, Homo sapien
acagcaacgtcttgaacaggcgctg

SEQ ID NO: 5837183 - DNA, 25 bp, Homo sapien
cgtcttgaacaggcgctgatgaccc

SEQ ID NO: 5837184 - DNA, 25 bp, Homo sapien
ggtcgcgcggatcatgatgccaacc

SEQ ID NO: 5837185 - DNA, 25 bp, Homo sapien
acaggcgctgatgaccccggacacc

SEQ ID NO: 5837186 - DNA, 25 bp, Homo sapien
ggatcatgatgccaacctcttacgt

SEQ ID NO: 5837187 - DNA, 25 bp, Homo sapien
atattacaacgcggcagcattatga

SEQ ID NO: 5837188 - DNA, 25 bp, Homo sapien
tgccaacctcttacgtgcgcctttc

SEQ ID NO: 5837189 - DNA, 25 bp, Homo sapien
gcgcctttctgccggacgcgagcag

SEQ ID NO: 5837190 - DNA, 25 bp, Homo sapien
gccggacgcgagcagatgaacgaac

SEQ ID NO: 5837191 - DNA, 25 bp, Homo sapien
cgagcagatgaacgaacagactcag

SEQ ID NO: 5837192 - DNA, 25 bp, Homo sapien
gatgaacgaacagactcaggcgatg

SEQ ID NO: 5837193 - DNA, 25 bp, Homo sapien
aacagactcaggcgatgtgctttat

SEQ ID NO: 5837194 - DNA, 25 bp, Homo sapien
tcaggcgatgtgctttatggcaggc

SEQ ID NO: 5837195 - DNA, 25 bp, Homo sapien
gtgctttatggcaggcgcaaactcg

SEQ ID NO: 5837196 - DNA, 25 bp, Homo sapien
atggcaggcgcaaactcgattttct

SEQ ID NO: 5837197 - DNA, 25 bp, Homo sapien
tacggttgcaaactgctgaccacgc

SEQ ID NO: 5837198 - DNA, 25 bp, Homo sapien
caaactgctgaccacgccgaatccg

SEQ ID NO: 5837199 - DNA, 25 bp, Homo sapien
gacctgcaactgttccgcaaactgg

SEQ ID NO: 5837200 - DNA, 25 bp, Homo sapien
gggctaaatccgcagcaaactgccg

SEQ ID NO: 5837201 - DNA, 25 bp, Homo sapien
cgcagcaaactgccgtgctggcagg

SEQ ID NO: 5837202 - DNA, 25 bp, Homo sapien
acagcaacgtcttgaacaggcgctg

SEQ ID NO: 5837203 - DNA, 25 bp, Homo sapien
cgtcttgaacaggcgctgatgaccc

SEQ ID NO: 5837204 - DNA, 25 bp, Homo sapien
ggtcgcgcggatcatgatgccaacc

SEQ ID NO: 5837205 - DNA, 25 bp, Homo sapien
acaggcgctgatgaccccggacacc

SEQ ID NO: 5837206 - DNA, 25 bp, Homo sapien
ggatcatgatgccaacctcttacgt

SEQ ID NO: 5837207 - DNA, 25 bp, Homo sapien
atattacaacgcggcagcattatga

SEQ ID NO: 5837208 - DNA, 25 bp, Homo sapien
tgccaacctcttacgtgcgcctttc

SEQ ID NO: 5837209 - DNA, 25 bp, Homo sapien
gcgcctttctgccggacgcgagcag

SEQ ID NO: 5837210 - DNA, 25 bp, Homo sapien
gccggacgcgagcagatgaacgaac

SEQ ID NO: 5837211 - DNA, 25 bp, Homo sapien
cgagcagatgaacgaacagactcag

SEQ ID NO: 5837212 - DNA, 25 bp, Homo sapien
gatgaacgaacagactcaggcgatg

SEQ ID NO: 5837213 - DNA, 25 bp, Homo sapien
aacagactcaggcgatgtgctttat

SEQ ID NO: 5837214 - DNA, 25 bp, Homo sapien
tcaggcgatgtgctttatggcaggc

SEQ ID NO: 5837215 - DNA, 25 bp, Homo sapien
gtgctttatggcaggcgcaaactcg

SEQ ID NO: 5837216 - DNA, 25 bp, Homo sapien
atggcaggcgcaaactcgattttct

SEQ ID NO: 5837217 - DNA, 25 bp, Homo sapien
tacggttgcaaactgctgaccacgc

SEQ ID NO: 5837218 - DNA, 25 bp, Homo sapien
caaactgctgaccacgccgaatccg

SEQ ID NO: 5837219 - DNA, 25 bp, Homo sapien
gacctgcaactgttccgcaaactgg

SEQ ID NO: 5837220 - DNA, 25 bp, Homo sapien
gggctaaatccgcagcaaactgccg

SEQ ID NO: 5837221 - DNA, 25 bp, Homo sapien
cgcagcaaactgccgtgctggcagg

SEQ ID NO: 5837222 - DNA, 25 bp, Homo sapien
acagcaacgtcttgaacaggcgctg

SEQ ID NO: 5837223 - DNA, 25 bp, Homo sapien
cgtcttgaacaggcgctgatgaccc

SEQ ID NO: 5837224 - DNA, 25 bp, Homo sapien
ggtcgcgcggatcatgatgccaacc

SEQ ID NO: 5837225 - DNA, 25 bp, Homo sapien
acaggcgctgatgaccccggacacc

SEQ ID NO: 5837226 - DNA, 25 bp, Homo sapien
ggatcatgatgccaacctcttacgt

SEQ ID NO: 5837227 - DNA, 25 bp, Homo sapien
atattacaacgcggcagcattatga

SEQ ID NO: 5837228 - DNA, 25 bp, Homo sapien
tgccaacctcttacgtgcgcctttc

SEQ ID NO: 5837229 - DNA, 25 bp, Homo sapien
gcgcctttctgccggacgcgagcag

SEQ ID NO: 5837230 - DNA, 25 bp, Homo sapien
gccggacgcgagcagatgaacgaac

SEQ ID NO: 5837231 - DNA, 25 bp, Homo sapien
cgagcagatgaacgaacagactcag

SEQ ID NO: 5837232 - DNA, 25 bp, Homo sapien
gatgaacgaacagactcaggcgatg

SEQ ID NO: 5837233 - DNA, 25 bp, Homo sapien
aacagactcaggcgatgtgctttat

SEQ ID NO: 5837234 - DNA, 25 bp, Homo sapien
tcaggcgatgtgctttatggcaggc

SEQ ID NO: 5837235 - DNA, 25 bp, Homo sapien
gtgctttatggcaggcgcaaactcg

SEQ ID NO: 5837236 - DNA, 25 bp, Homo sapien
atggcaggcgcaaactcgattttct

SEQ ID NO: 5837237 - DNA, 25 bp, Homo sapien
tacggttgcaaactgctgaccacgc

SEQ ID NO: 5837238 - DNA, 25 bp, Homo sapien
caaactgctgaccacgccgaatccg

SEQ ID NO: 5837239 - DNA, 25 bp, Homo sapien
gacctgcaactgttccgcaaactgg

SEQ ID NO: 5837240 - DNA, 25 bp, Homo sapien
gggctaaatccgcagcaaactgccg

SEQ ID NO: 5837241 - DNA, 25 bp, Homo sapien
cgcagcaaactgccgtgctggcagg

SEQ ID NO: 5837242 - DNA, 25 bp, Homo sapien
acagcaacgtcttgaacaggcgctg

SEQ ID NO: 5837243 - DNA, 25 bp, Homo sapien
cgtcttgaacaggcgctgatgaccc

SEQ ID NO: 5837244 - DNA, 25 bp, Homo sapien
ggtcgcgcggatcatgatgccaacc

SEQ ID NO: 5837245 - DNA, 25 bp, Homo sapien
acaggcgctgatgaccccggacacc

SEQ ID NO: 5837246 - DNA, 25 bp, Homo sapien
ggatcatgatgccaacctcttacgt

SEQ ID NO: 5837247 - DNA, 25 bp, Homo sapien
atattacaacgcggcagcattatga

SEQ ID NO: 5837248 - DNA, 25 bp, Homo sapien
tgccaacctcttacgtgcgcctttc

SEQ ID NO: 5837249 - DNA, 25 bp, Homo sapien
gcgcctttctgccggacgcgagcag

SEQ ID NO: 5837250 - DNA, 25 bp, Homo sapien
gccggacgcgagcagatgaacgaac

SEQ ID NO: 5837251 - DNA, 25 bp, Homo sapien
cgagcagatgaacgaacagactcag

SEQ ID NO: 5837252 - DNA, 25 bp, Homo sapien
gatgaacgaacagactcaggcgatg

SEQ ID NO: 5837253 - DNA, 25 bp, Homo sapien
aacagactcaggcgatgtgctttat

SEQ ID NO: 5837254 - DNA, 25 bp, Homo sapien
tcaggcgatgtgctttatggcaggc

SEQ ID NO: 5837255 - DNA, 25 bp, Homo sapien
gtgctttatggcaggcgcaaactcg

SEQ ID NO: 5837256 - DNA, 25 bp, Homo sapien
atggcaggcgcaaactcgattttct

SEQ ID NO: 5837257 - DNA, 25 bp, Homo sapien
tacggttgcaaactgctgaccacgc

SEQ ID NO: 5837258 - DNA, 25 bp, Homo sapien
caaactgctgaccacgccgaatccg

SEQ ID NO: 5837259 - DNA, 25 bp, Homo sapien
gacctgcaactgttccgcaaactgg

SEQ ID NO: 5837260 - DNA, 25 bp, Homo sapien
gggctaaatccgcagcaaactgccg

SEQ ID NO: 5837261 - DNA, 25 bp, Homo sapien
cgcagcaaactgccgtgctggcagg

SEQ ID NO: 5837262 - DNA, 25 bp, Homo sapien
acagcaacgtcttgaacaggcgctg

SEQ ID NO: 5837263 - DNA, 25 bp, Homo sapien
cgtcttgaacaggcgctgatgaccc

SEQ ID NO: 5837264 - DNA, 25 bp, Homo sapien
ggtcgcgcggatcatgatgccaacc

SEQ ID NO: 5837265 - DNA, 25 bp, Homo sapien
acaggcgctgatgaccccggacacc

SEQ ID NO: 5837266 - DNA, 25 bp, Homo sapien
ggatcatgatgccaacctcttacgt

SEQ ID NO: 5837267 - DNA, 25 bp, Homo sapien
atattacaacgcggcagcattatga

SEQ ID NO: 5837268 - DNA, 25 bp, Homo sapien
tgccaacctcttacgtgcgcctttc

SEQ ID NO: 5837269 - DNA, 25 bp, Homo sapien
gcgcctttctgccggacgcgagcag

SEQ ID NO: 5837270 - DNA, 25 bp, Homo sapien
gccggacgcgagcagatgaacgaac

SEQ ID NO: 5837271 - DNA, 25 bp, Homo sapien
cgagcagatgaacgaacagactcag

SEQ ID NO: 5837272 - DNA, 25 bp, Homo sapien
gatgaacgaacagactcaggcgatg

SEQ ID NO: 5837273 - DNA, 25 bp, Homo sapien
aacagactcaggcgatgtgctttat

SEQ ID NO: 5837274 - DNA, 25 bp, Homo sapien
tcaggcgatgtgctttatggcaggc

SEQ ID NO: 5837275 - DNA, 25 bp, Homo sapien
gtgctttatggcaggcgcaaactcg

SEQ ID NO: 5837276 - DNA, 25 bp, Homo sapien
atggcaggcgcaaactcgattttct

SEQ ID NO: 5837277 - DNA, 25 bp, Homo sapien
tacggttgcaaactgctgaccacgc

SEQ ID NO: 5837278 - DNA, 25 bp, Homo sapien
caaactgctgaccacgccgaatccg

SEQ ID NO: 5837279 - DNA, 25 bp, Homo sapien
gacctgcaactgttccgcaaactgg

SEQ ID NO: 5837280 - DNA, 25 bp, Homo sapien
gggctaaatccgcagcaaactgccg

SEQ ID NO: 5837281 - DNA, 25 bp, Homo sapien
cgcagcaaactgccgtgctggcagg

SEQ ID NO: 5837282 - DNA, 25 bp, Homo sapien
acagcaacgtcttgaacaggcgctg

SEQ ID NO: 5837283 - DNA, 25 bp, Homo sapien
cgtcttgaacaggcgctgatgaccc

SEQ ID NO: 5837284 - DNA, 25 bp, Homo sapien
ggtcgcgcggatcatgatgccaacc

SEQ ID NO: 5837285 - DNA, 25 bp, Homo sapien
acaggcgctgatgaccccggacacc

SEQ ID NO: 5837286 - DNA, 25 bp, Homo sapien
ggatcatgatgccaacctcttacgt

SEQ ID NO: 5837287 - DNA, 25 bp, Homo sapien
atattacaacgcggcagcattatga

SEQ ID NO: 5837288 - DNA, 25 bp, Homo sapien
tgccaacctcttacgtgcgcctttc

SEQ ID NO: 5837289 - DNA, 25 bp, Homo sapien
gcgcctttctgccggacgcgagcag

SEQ ID NO: 5837290 - DNA, 25 bp, Homo sapien
gccggacgcgagcagatgaacgaac

SEQ ID NO: 5837291 - DNA, 25 bp, Homo sapien
cgagcagatgaacgaacagactcag

SEQ ID NO: 5837292 - DNA, 25 bp, Homo sapien
gatgaacgaacagactcaggcgatg

SEQ ID NO: 5837293 - DNA, 25 bp, Homo sapien
aacagactcaggcgatgtgctttat

SEQ ID NO: 5837294 - DNA, 25 bp, Homo sapien
tcaggcgatgtgctttatggcaggc

SEQ ID NO: 5837295 - DNA, 25 bp, Homo sapien
gtgctttatggcaggcgcaaactcg

SEQ ID NO: 5837296 - DNA, 25 bp, Homo sapien
atggcaggcgcaaactcgattttct

SEQ ID NO: 5837297 - DNA, 25 bp, Homo sapien
tacggttgcaaactgctgaccacgc

SEQ ID NO: 5837298 - DNA, 25 bp, Homo sapien
caaactgctgaccacgccgaatccg

SEQ ID NO: 5837299 - DNA, 25 bp, Homo sapien
gacctgcaactgttccgcaaactgg

SEQ ID NO: 5837300 - DNA, 25 bp, Homo sapien
gggctaaatccgcagcaaactgccg

SEQ ID NO: 5837301 - DNA, 25 bp, Homo sapien
cgcagcaaactgccgtgctggcagg

SEQ ID NO: 5837302 - DNA, 25 bp, Homo sapien
acagcaacgtcttgaacaggcgctg

SEQ ID NO: 5837303 - DNA, 25 bp, Homo sapien
cgtcttgaacaggcgctgatgaccc

SEQ ID NO: 5837304 - DNA, 25 bp, Homo sapien
ggtcgcgcggatcatgatgccaacc

SEQ ID NO: 5837305 - DNA, 25 bp, Homo sapien
acaggcgctgatgaccccggacacc

SEQ ID NO: 5837306 - DNA, 25 bp, Homo sapien
ggatcatgatgccaacctcttacgt

SEQ ID NO: 5837307 - DNA, 25 bp, Homo sapien
atattacaacgcggcagcattatga

SEQ ID NO: 5837308 - DNA, 25 bp, Homo sapien
tgccaacctcttacgtgcgcctttc

SEQ ID NO: 5837309 - DNA, 25 bp, Homo sapien
gcgcctttctgccggacgcgagcag

SEQ ID NO: 5837310 - DNA, 25 bp, Homo sapien
gccggacgcgagcagatgaacgaac

SEQ ID NO: 5837311 - DNA, 25 bp, Homo sapien
cgagcagatgaacgaacagactcag

SEQ ID NO: 5837312 - DNA, 25 bp, Homo sapien
gatgaacgaacagactcaggcgatg

SEQ ID NO: 5837313 - DNA, 25 bp, Homo sapien
aacagactcaggcgatgtgctttat

SEQ ID NO: 5837314 - DNA, 25 bp, Homo sapien
tcaggcgatgtgctttatggcaggc

SEQ ID NO: 5837315 - DNA, 25 bp, Homo sapien
gtgctttatggcaggcgcaaactcg

SEQ ID NO: 5837316 - DNA, 25 bp, Homo sapien
atggcaggcgcaaactcgattttct

SEQ ID NO: 5837317 - DNA, 25 bp, Homo sapien
tacggttgcaaactgctgaccacgc

SEQ ID NO: 5837318 - DNA, 25 bp, Homo sapien
caaactgctgaccacgccgaatccg

SEQ ID NO: 5837319 - DNA, 25 bp, Homo sapien
gacctgcaactgttccgcaaactgg

SEQ ID NO: 5837320 - DNA, 25 bp, Homo sapien
gggctaaatccgcagcaaactgccg

SEQ ID NO: 5837321 - DNA, 25 bp, Homo sapien
cgcagcaaactgccgtgctggcagg

SEQ ID NO: 5837322 - DNA, 25 bp, Homo sapien
acagcaacgtcttgaacaggcgctg

SEQ ID NO: 5837323 - DNA, 25 bp, Homo sapien
cgtcttgaacaggcgctgatgaccc

SEQ ID NO: 5837324 - DNA, 25 bp, Homo sapien
ggtcgcgcggatcatgatgccaacc

SEQ ID NO: 5837325 - DNA, 25 bp, Homo sapien
acaggcgctgatgaccccggacacc

SEQ ID NO: 5837326 - DNA, 25 bp, Homo sapien
ggatcatgatgccaacctcttacgt

SEQ ID NO: 5837327 - DNA, 25 bp, Homo sapien
atattacaacgcggcagcattatga

SEQ ID NO: 5837328 - DNA, 25 bp, Homo sapien
tgccaacctcttacgtgcgcctttc

SEQ ID NO: 5837329 - DNA, 25 bp, Homo sapien
gcgcctttctgccggacgcgagcag

SEQ ID NO: 5837330 - DNA, 25 bp, Homo sapien
gccggacgcgagcagatgaacgaac

SEQ ID NO: 5837331 - DNA, 25 bp, Homo sapien
cgagcagatgaacgaacagactcag

SEQ ID NO: 5837332 - DNA, 25 bp, Homo sapien
gatgaacgaacagactcaggcgatg

SEQ ID NO: 5837333 - DNA, 25 bp, Homo sapien
aacagactcaggcgatgtgctttat

SEQ ID NO: 5837334 - DNA, 25 bp, Homo sapien
tcaggcgatgtgctttatggcaggc

SEQ ID NO: 5837335 - DNA, 25 bp, Homo sapien
gtgctttatggcaggcgcaaactcg

SEQ ID NO: 5837336 - DNA, 25 bp, Homo sapien
atggcaggcgcaaactcgattttct

SEQ ID NO: 5837337 - DNA, 25 bp, Homo sapien
tacggttgcaaactgctgaccacgc

SEQ ID NO: 5837338 - DNA, 25 bp, Homo sapien
caaactgctgaccacgccgaatccg

SEQ ID NO: 5837339 - DNA, 25 bp, Homo sapien
gacctgcaactgttccgcaaactgg

SEQ ID NO: 5837340 - DNA, 25 bp, Homo sapien
gggctaaatccgcagcaaactgccg

SEQ ID NO: 5837341 - DNA, 25 bp, Homo sapien
cgcagcaaactgccgtgctggcagg

SEQ ID NO: 5837342 - DNA, 25 bp, Homo sapien
acagcaacgtcttgaacaggcgctg

SEQ ID NO: 5837343 - DNA, 25 bp, Homo sapien
cgtcttgaacaggcgctgatgaccc

SEQ ID NO: 5837344 - DNA, 25 bp, Homo sapien
ggtcgcgcggatcatgatgccaacc

SEQ ID NO: 5837345 - DNA, 25 bp, Homo sapien
acaggcgctgatgaccccggacacc

SEQ ID NO: 5837346 - DNA, 25 bp, Homo sapien
ggatcatgatgccaacctcttacgt

SEQ ID NO: 5837347 - DNA, 25 bp, Homo sapien
atattacaacgcggcagcattatga

SEQ ID NO: 5837348 - DNA, 25 bp, Homo sapien
tgccaacctcttacgtgcgcctttc

SEQ ID NO: 5837349 - DNA, 25 bp, Homo sapien
gcgcctttctgccggacgcgagcag

SEQ ID NO: 5837350 - DNA, 25 bp, Homo sapien
gccggacgcgagcagatgaacgaac

SEQ ID NO: 5837351 - DNA, 25 bp, Homo sapien
cgagcagatgaacgaacagactcag

SEQ ID NO: 5837352 - DNA, 25 bp, Homo sapien
gatgaacgaacagactcaggcgatg

SEQ ID NO: 5837353 - DNA, 25 bp, Homo sapien
aacagactcaggcgatgtgctttat

SEQ ID NO: 5837354 - DNA, 25 bp, Homo sapien
tcaggcgatgtgctttatggcaggc

SEQ ID NO: 5837355 - DNA, 25 bp, Homo sapien
gtgctttatggcaggcgcaaactcg

SEQ ID NO: 5837356 - DNA, 25 bp, Homo sapien
atggcaggcgcaaactcgattttct

SEQ ID NO: 5837357 - DNA, 25 bp, Homo sapien
tacggttgcaaactgctgaccacgc

SEQ ID NO: 5837358 - DNA, 25 bp, Homo sapien
caaactgctgaccacgccgaatccg

SEQ ID NO: 5837359 - DNA, 25 bp, Homo sapien
gacctgcaactgttccgcaaactgg

SEQ ID NO: 5837360 - DNA, 25 bp, Homo sapien
gggctaaatccgcagcaaactgccg

SEQ ID NO: 5837361 - DNA, 25 bp, Homo sapien
cgcagcaaactgccgtgctggcagg

SEQ ID NO: 5837362 - DNA, 25 bp, Homo sapien
acagcaacgtcttgaacaggcgctg

SEQ ID NO: 5837363 - DNA, 25 bp, Homo sapien
cgtcttgaacaggcgctgatgaccc

SEQ ID NO: 5837364 - DNA, 25 bp, Homo sapien
ggtcgcgcggatcatgatgccaacc

SEQ ID NO: 5837365 - DNA, 25 bp, Homo sapien
acaggcgctgatgaccccggacacc

SEQ ID NO: 5837366 - DNA, 25 bp, Homo sapien
ggatcatgatgccaacctcttacgt

SEQ ID NO: 5837367 - DNA, 25 bp, Homo sapien
atattacaacgcggcagcattatga

SEQ ID NO: 5837368 - DNA, 25 bp, Homo sapien
tgccaacctcttacgtgcgcctttc

SEQ ID NO: 5837369 - DNA, 25 bp, Homo sapien
gcgcctttctgccggacgcgagcag

SEQ ID NO: 5837370 - DNA, 25 bp, Homo sapien
gccggacgcgagcagatgaacgaac

SEQ ID NO: 5837371 - DNA, 25 bp, Homo sapien
cgagcagatgaacgaacagactcag

SEQ ID NO: 5837372 - DNA, 25 bp, Homo sapien
gatgaacgaacagactcaggcgatg

SEQ ID NO: 5837373 - DNA, 25 bp, Homo sapien
aacagactcaggcgatgtgctttat

SEQ ID NO: 5837374 - DNA, 25 bp, Homo sapien
tcaggcgatgtgctttatggcaggc

SEQ ID NO: 5837375 - DNA, 25 bp, Homo sapien
gtgctttatggcaggcgcaaactcg

SEQ ID NO: 5837376 - DNA, 25 bp, Homo sapien
atggcaggcgcaaactcgattttct

SEQ ID NO: 5837377 - DNA, 25 bp, Homo sapien
tacggttgcaaactgctgaccacgc

SEQ ID NO: 5837378 - DNA, 25 bp, Homo sapien
caaactgctgaccacgccgaatccg

SEQ ID NO: 5837379 - DNA, 25 bp, Homo sapien
gacctgcaactgttccgcaaactgg

SEQ ID NO: 5837380 - DNA, 25 bp, Homo sapien
gggctaaatccgcagcaaactgccg

SEQ ID NO: 5837381 - DNA, 25 bp, Homo sapien
cgcagcaaactgccgtgctggcagg

SEQ ID NO: 5837382 - DNA, 25 bp, Homo sapien
acagcaacgtcttgaacaggcgctg

SEQ ID NO: 5837383 - DNA, 25 bp, Homo sapien
cgtcttgaacaggcgctgatgaccc

SEQ ID NO: 5837384 - DNA, 25 bp, Homo sapien
ggtcgcgcggatcatgatgccaacc

SEQ ID NO: 5837385 - DNA, 25 bp, Homo sapien
acaggcgctgatgaccccggacacc

SEQ ID NO: 5837386 - DNA, 25 bp, Homo sapien
ggatcatgatgccaacctcttacgt

SEQ ID NO: 5837387 - DNA, 25 bp, Homo sapien
atattacaacgcggcagcattatga

SEQ ID NO: 5837388 - DNA, 25 bp, Homo sapien
tgccaacctcttacgtgcgcctttc

SEQ ID NO: 5837389 - DNA, 25 bp, Homo sapien
gcgcctttctgccggacgcgagcag

SEQ ID NO: 5837390 - DNA, 25 bp, Homo sapien
gccggacgcgagcagatgaacgaac

SEQ ID NO: 5837391 - DNA, 25 bp, Homo sapien
cgagcagatgaacgaacagactcag

SEQ ID NO: 5837392 - DNA, 25 bp, Homo sapien
gatgaacgaacagactcaggcgatg

SEQ ID NO: 5837393 - DNA, 25 bp, Homo sapien
aacagactcaggcgatgtgctttat

SEQ ID NO: 5837394 - DNA, 25 bp, Homo sapien
tcaggcgatgtgctttatggcaggc

SEQ ID NO: 5837395 - DNA, 25 bp, Homo sapien
gtgctttatggcaggcgcaaactcg

SEQ ID NO: 5837396 - DNA, 25 bp, Homo sapien
atggcaggcgcaaactcgattttct

SEQ ID NO: 5837397 - DNA, 25 bp, Homo sapien
tacggttgcaaactgctgaccacgc

SEQ ID NO: 5837398 - DNA, 25 bp, Homo sapien
caaactgctgaccacgccgaatccg

SEQ ID NO: 5837399 - DNA, 25 bp, Homo sapien
gacctgcaactgttccgcaaactgg

SEQ ID NO: 5837400 - DNA, 25 bp, Homo sapien
gggctaaatccgcagcaaactgccg

SEQ ID NO: 5837401 - DNA, 25 bp, Homo sapien
cgcagcaaactgccgtgctggcagg

SEQ ID NO: 5837402 - DNA, 25 bp, Homo sapien
acagcaacgtcttgaacaggcgctg

SEQ ID NO: 5837403 - DNA, 25 bp, Homo sapien
cgtcttgaacaggcgctgatgaccc

SEQ ID NO: 5837404 - DNA, 25 bp, Homo sapien
ggtcgcgcggatcatgatgccaacc

SEQ ID NO: 5837405 - DNA, 25 bp, Homo sapien
acaggcgctgatgaccccggacacc

SEQ ID NO: 5837406 - DNA, 25 bp, Homo sapien
ggatcatgatgccaacctcttacgt

SEQ ID NO: 5837407 - DNA, 25 bp, Homo sapien
atattacaacgcggcagcattatga

SEQ ID NO: 5837408 - DNA, 25 bp, Homo sapien
tgccaacctcttacgtgcgcctttc

SEQ ID NO: 5837409 - DNA, 25 bp, Homo sapien
gcgcctttctgccggacgcgagcag

SEQ ID NO: 5837410 - DNA, 25 bp, Homo sapien
gccggacgcgagcagatgaacgaac

SEQ ID NO: 5837411 - DNA, 25 bp, Homo sapien
cgagcagatgaacgaacagactcag

SEQ ID NO: 5837412 - DNA, 25 bp, Homo sapien
gatgaacgaacagactcaggcgatg

SEQ ID NO: 5837413 - DNA, 25 bp, Homo sapien
aacagactcaggcgatgtgctttat

SEQ ID NO: 5837414 - DNA, 25 bp, Homo sapien
tcaggcgatgtgctttatggcaggc

SEQ ID NO: 5837415 - DNA, 25 bp, Homo sapien
gtgctttatggcaggcgcaaactcg

SEQ ID NO: 5837416 - DNA, 25 bp, Homo sapien
atggcaggcgcaaactcgattttct

SEQ ID NO: 5837417 - DNA, 25 bp, Homo sapien
tacggttgcaaactgctgaccacgc

SEQ ID NO: 5837418 - DNA, 25 bp, Homo sapien
caaactgctgaccacgccgaatccg

SEQ ID NO: 5837419 - DNA, 25 bp, Homo sapien
gacctgcaactgttccgcaaactgg

SEQ ID NO: 5837420 - DNA, 25 bp, Homo sapien
gggctaaatccgcagcaaactgccg

SEQ ID NO: 5837421 - DNA, 25 bp, Homo sapien
cgcagcaaactgccgtgctggcagg

SEQ ID NO: 5837422 - DNA, 25 bp, Homo sapien
acagcaacgtcttgaacaggcgctg

SEQ ID NO: 5837423 - DNA, 25 bp, Homo sapien
cgtcttgaacaggcgctgatgaccc

SEQ ID NO: 5837424 - DNA, 25 bp, Homo sapien
ggtcgcgcggatcatgatgccaacc

SEQ ID NO: 5837425 - DNA, 25 bp, Homo sapien
acaggcgctgatgaccccggacacc

SEQ ID NO: 5837426 - DNA, 25 bp, Homo sapien
ggatcatgatgccaacctcttacgt

SEQ ID NO: 5837427 - DNA, 25 bp, Homo sapien
atattacaacgcggcagcattatga

SEQ ID NO: 5837428 - DNA, 25 bp, Homo sapien
tgccaacctcttacgtgcgcctttc

SEQ ID NO: 5837429 - DNA, 25 bp, Homo sapien
gcgcctttctgccggacgcgagcag

SEQ ID NO: 5837430 - DNA, 25 bp, Homo sapien
gccggacgcgagcagatgaacgaac

SEQ ID NO: 5837431 - DNA, 25 bp, Homo sapien
cgagcagatgaacgaacagactcag

SEQ ID NO: 5837432 - DNA, 25 bp, Homo sapien
gatgaacgaacagactcaggcgatg

SEQ ID NO: 5837433 - DNA, 25 bp, Homo sapien
aacagactcaggcgatgtgctttat

SEQ ID NO: 5837434 - DNA, 25 bp, Homo sapien
tcaggcgatgtgctttatggcaggc

SEQ ID NO: 5837435 - DNA, 25 bp, Homo sapien
gtgctttatggcaggcgcaaactcg

SEQ ID NO: 5837436 - DNA, 25 bp, Homo sapien
atggcaggcgcaaactcgattttct

SEQ ID NO: 5837437 - DNA, 25 bp, Homo sapien
tacggttgcaaactgctgaccacgc

SEQ ID NO: 5837438 - DNA, 25 bp, Homo sapien
caaactgctgaccacgccgaatccg

SEQ ID NO: 5837439 - DNA, 25 bp, Homo sapien
gacctgcaactgttccgcaaactgg

SEQ ID NO: 5837440 - DNA, 25 bp, Homo sapien
gggctaaatccgcagcaaactgccg

SEQ ID NO: 5837441 - DNA, 25 bp, Homo sapien
cgcagcaaactgccgtgctggcagg

SEQ ID NO: 5837442 - DNA, 25 bp, Homo sapien
acagcaacgtcttgaacaggcgctg

SEQ ID NO: 5837443 - DNA, 25 bp, Homo sapien
cgtcttgaacaggcgctgatgaccc

SEQ ID NO: 5837444 - DNA, 25 bp, Homo sapien
ggtcgcgcggatcatgatgccaacc

SEQ ID NO: 5837445 - DNA, 25 bp, Homo sapien
acaggcgctgatgaccccggacacc

SEQ ID NO: 5837446 - DNA, 25 bp, Homo sapien
ggatcatgatgccaacctcttacgt

SEQ ID NO: 5837447 - DNA, 25 bp, Homo sapien
atattacaacgcggcagcattatga

SEQ ID NO: 5837448 - DNA, 25 bp, Homo sapien
tgccaacctcttacgtgcgcctttc

SEQ ID NO: 5837449 - DNA, 25 bp, Homo sapien
gcgcctttctgccggacgcgagcag

SEQ ID NO: 5837450 - DNA, 25 bp, Homo sapien
gccggacgcgagcagatgaacgaac

SEQ ID NO: 5837451 - DNA, 25 bp, Homo sapien
cgagcagatgaacgaacagactcag

SEQ ID NO: 5837452 - DNA, 25 bp, Homo sapien
gatgaacgaacagactcaggcgatg

SEQ ID NO: 5837453 - DNA, 25 bp, Homo sapien
aacagactcaggcgatgtgctttat

SEQ ID NO: 5837454 - DNA, 25 bp, Homo sapien
tcaggcgatgtgctttatggcaggc

SEQ ID NO: 5837455 - DNA, 25 bp, Homo sapien
gtgctttatggcaggcgcaaactcg

SEQ ID NO: 5837456 - DNA, 25 bp, Homo sapien
atggcaggcgcaaactcgattttct

SEQ ID NO: 5837457 - DNA, 25 bp, Homo sapien
tacggttgcaaactgctgaccacgc

SEQ ID NO: 5837458 - DNA, 25 bp, Homo sapien
caaactgctgaccacgccgaatccg

SEQ ID NO: 5837459 - DNA, 25 bp, Homo sapien
gacctgcaactgttccgcaaactgg

SEQ ID NO: 5837460 - DNA, 25 bp, Homo sapien
gggctaaatccgcagcaaactgccg

SEQ ID NO: 5837461 - DNA, 25 bp, Homo sapien
cgcagcaaactgccgtgctggcagg

SEQ ID NO: 5837462 - DNA, 25 bp, Homo sapien
acagcaacgtcttgaacaggcgctg

SEQ ID NO: 5837463 - DNA, 25 bp, Homo sapien
cgtcttgaacaggcgctgatgaccc

SEQ ID NO: 5837464 - DNA, 25 bp, Homo sapien
ggtcgcgcggatcatgatgccaacc

SEQ ID NO: 5837465 - DNA, 25 bp, Homo sapien
acaggcgctgatgaccccggacacc

SEQ ID NO: 5837466 - DNA, 25 bp, Homo sapien
ggatcatgatgccaacctcttacgt

SEQ ID NO: 5837467 - DNA, 25 bp, Homo sapien
atattacaacgcggcagcattatga

SEQ ID NO: 5837468 - DNA, 25 bp, Homo sapien
tgccaacctcttacgtgcgcctttc

SEQ ID NO: 5837469 - DNA, 25 bp, Homo sapien
gcgcctttctgccggacgcgagcag

SEQ ID NO: 5837470 - DNA, 25 bp, Homo sapien
gccggacgcgagcagatgaacgaac

SEQ ID NO: 5837471 - DNA, 25 bp, Homo sapien
cgagcagatgaacgaacagactcag

SEQ ID NO: 5837472 - DNA, 25 bp, Homo sapien
gatgaacgaacagactcaggcgatg

SEQ ID NO: 5837473 - DNA, 25 bp, Homo sapien
aacagactcaggcgatgtgctttat

SEQ ID NO: 5837474 - DNA, 25 bp, Homo sapien
tcaggcgatgtgctttatggcaggc

SEQ ID NO: 5837475 - DNA, 25 bp, Homo sapien
gtgctttatggcaggcgcaaactcg

SEQ ID NO: 5837476 - DNA, 25 bp, Homo sapien
atggcaggcgcaaactcgattttct

SEQ ID NO: 5837477 - DNA, 25 bp, Homo sapien
tacggttgcaaactgctgaccacgc

SEQ ID NO: 5837478 - DNA, 25 bp, Homo sapien
caaactgctgaccacgccgaatccg

SEQ ID NO: 5837479 - DNA, 25 bp, Homo sapien
gacctgcaactgttccgcaaactgg

SEQ ID NO: 5837480 - DNA, 25 bp, Homo sapien
gggctaaatccgcagcaaactgccg

SEQ ID NO: 5837481 - DNA, 25 bp, Homo sapien
cgcagcaaactgccgtgctggcagg

SEQ ID NO: 5837482 - DNA, 25 bp, Homo sapien
acagcaacgtcttgaacaggcgctg

SEQ ID NO: 5837483 - DNA, 25 bp, Homo sapien
cgtcttgaacaggcgctgatgaccc

SEQ ID NO: 5837484 - DNA, 25 bp, Homo sapien
ggtcgcgcggatcatgatgccaacc

SEQ ID NO: 5837485 - DNA, 25 bp, Homo sapien
acaggcgctgatgaccccggacacc

SEQ ID NO: 5837486 - DNA, 25 bp, Homo sapien
ggatcatgatgccaacctcttacgt

SEQ ID NO: 5837487 - DNA, 25 bp, Homo sapien
atattacaacgcggcagcattatga

SEQ ID NO: 5837488 - DNA, 25 bp, Homo sapien
tgccaacctcttacgtgcgcctttc

SEQ ID NO: 5837489 - DNA, 25 bp, Homo sapien
gcgcctttctgccggacgcgagcag

SEQ ID NO: 5837490 - DNA, 25 bp, Homo sapien
gccggacgcgagcagatgaacgaac

SEQ ID NO: 5837491 - DNA, 25 bp, Homo sapien
cgagcagatgaacgaacagactcag

SEQ ID NO: 5837492 - DNA, 25 bp, Homo sapien
gatgaacgaacagactcaggcgatg

SEQ ID NO: 5837493 - DNA, 25 bp, Homo sapien
aacagactcaggcgatgtgctttat

SEQ ID NO: 5837494 - DNA, 25 bp, Homo sapien
tcaggcgatgtgctttatggcaggc

SEQ ID NO: 5837495 - DNA, 25 bp, Homo sapien
gtgctttatggcaggcgcaaactcg

SEQ ID NO: 5837496 - DNA, 25 bp, Homo sapien
atggcaggcgcaaactcgattttct

SEQ ID NO: 5837497 - DNA, 25 bp, Homo sapien
tacggttgcaaactgctgaccacgc

SEQ ID NO: 5837498 - DNA, 25 bp, Homo sapien
caaactgctgaccacgccgaatccg

SEQ ID NO: 5837499 - DNA, 25 bp, Homo sapien
gacctgcaactgttccgcaaactgg

SEQ ID NO: 5837500 - DNA, 25 bp, Homo sapien
gggctaaatccgcagcaaactgccg

SEQ ID NO: 5837501 - DNA, 25 bp, Homo sapien
cgcagcaaactgccgtgctggcagg

SEQ ID NO: 5837502 - DNA, 25 bp, Homo sapien
acagcaacgtcttgaacaggcgctg

SEQ ID NO: 5837503 - DNA, 25 bp, Homo sapien
cgtcttgaacaggcgctgatgaccc

SEQ ID NO: 5837504 - DNA, 25 bp, Homo sapien
ggtcgcgcggatcatgatgccaacc

SEQ ID NO: 5837505 - DNA, 25 bp, Homo sapien
acaggcgctgatgaccccggacacc

SEQ ID NO: 5837506 - DNA, 25 bp, Homo sapien
ggatcatgatgccaacctcttacgt

SEQ ID NO: 5837507 - DNA, 25 bp, Homo sapien
atattacaacgcggcagcattatga

SEQ ID NO: 5837508 - DNA, 25 bp, Homo sapien
tgccaacctcttacgtgcgcctttc

SEQ ID NO: 5837509 - DNA, 25 bp, Homo sapien
gcgcctttctgccggacgcgagcag

SEQ ID NO: 5837510 - DNA, 25 bp, Homo sapien
gccggacgcgagcagatgaacgaac

SEQ ID NO: 5837511 - DNA, 25 bp, Homo sapien
cgagcagatgaacgaacagactcag

SEQ ID NO: 5837512 - DNA, 25 bp, Homo sapien
gatgaacgaacagactcaggcgatg

SEQ ID NO: 5837513 - DNA, 25 bp, Homo sapien
aacagactcaggcgatgtgctttat

SEQ ID NO: 5837514 - DNA, 25 bp, Homo sapien
tcaggcgatgtgctttatggcaggc

SEQ ID NO: 5837515 - DNA, 25 bp, Homo sapien
gtgctttatggcaggcgcaaactcg

SEQ ID NO: 5837516 - DNA, 25 bp, Homo sapien
atggcaggcgcaaactcgattttct

SEQ ID NO: 5837517 - DNA, 25 bp, Homo sapien
tacggttgcaaactgctgaccacgc

SEQ ID NO: 5837518 - DNA, 25 bp, Homo sapien
caaactgctgaccacgccgaatccg

SEQ ID NO: 5837519 - DNA, 25 bp, Homo sapien
gacctgcaactgttccgcaaactgg

SEQ ID NO: 5837520 - DNA, 25 bp, Homo sapien
gggctaaatccgcagcaaactgccg

SEQ ID NO: 5837521 - DNA, 25 bp, Homo sapien
cgcagcaaactgccgtgctggcagg

SEQ ID NO: 5837522 - DNA, 25 bp, Homo sapien
acagcaacgtcttgaacaggcgctg

SEQ ID NO: 5837523 - DNA, 25 bp, Homo sapien
cgtcttgaacaggcgctgatgaccc

SEQ ID NO: 5837524 - DNA, 25 bp, Homo sapien
ggtcgcgcggatcatgatgccaacc

SEQ ID NO: 5837525 - DNA, 25 bp, Homo sapien
acaggcgctgatgaccccggacacc

SEQ ID NO: 5837526 - DNA, 25 bp, Homo sapien
ggatcatgatgccaacctcttacgt

SEQ ID NO: 5837527 - DNA, 25 bp, Homo sapien
atattacaacgcggcagcattatga

SEQ ID NO: 5837528 - DNA, 25 bp, Homo sapien
tgccaacctcttacgtgcgcctttc

SEQ ID NO: 5837529 - DNA, 25 bp, Homo sapien
gcgcctttctgccggacgcgagcag

SEQ ID NO: 5837530 - DNA, 25 bp, Homo sapien
gccggacgcgagcagatgaacgaac

SEQ ID NO: 5837531 - DNA, 25 bp, Homo sapien
cgagcagatgaacgaacagactcag

SEQ ID NO: 5837532 - DNA, 25 bp, Homo sapien
gatgaacgaacagactcaggcgatg

SEQ ID NO: 5837533 - DNA, 25 bp, Homo sapien
aacagactcaggcgatgtgctttat

SEQ ID NO: 5837534 - DNA, 25 bp, Homo sapien
tcaggcgatgtgctttatggcaggc

SEQ ID NO: 5837535 - DNA, 25 bp, Homo sapien
gtgctttatggcaggcgcaaactcg

SEQ ID NO: 5837536 - DNA, 25 bp, Homo sapien
atggcaggcgcaaactcgattttct

SEQ ID NO: 5837537 - DNA, 25 bp, Homo sapien
tacggttgcaaactgctgaccacgc

SEQ ID NO: 5837538 - DNA, 25 bp, Homo sapien
caaactgctgaccacgccgaatccg

SEQ ID NO: 5837539 - DNA, 25 bp, Homo sapien
gacctgcaactgttccgcaaactgg

SEQ ID NO: 5837540 - DNA, 25 bp, Homo sapien
gggctaaatccgcagcaaactgccg

SEQ ID NO: 5837541 - DNA, 25 bp, Homo sapien
cgcagcaaactgccgtgctggcagg

SEQ ID NO: 5837542 - DNA, 25 bp, Homo sapien
acagcaacgtcttgaacaggcgctg

SEQ ID NO: 5837543 - DNA, 25 bp, Homo sapien
cgtcttgaacaggcgctgatgaccc

SEQ ID NO: 5837544 - DNA, 25 bp, Homo sapien
ggtcgcgcggatcatgatgccaacc

SEQ ID NO: 5837545 - DNA, 25 bp, Homo sapien
acaggcgctgatgaccccggacacc

SEQ ID NO: 5837546 - DNA, 25 bp, Homo sapien
ggatcatgatgccaacctcttacgt

SEQ ID NO: 5837547 - DNA, 25 bp, Homo sapien
atattacaacgcggcagcattatga

SEQ ID NO: 5837548 - DNA, 25 bp, Homo sapien
tgccaacctcttacgtgcgcctttc

SEQ ID NO: 5837549 - DNA, 25 bp, Homo sapien
gcgcctttctgccggacgcgagcag

SEQ ID NO: 5837550 - DNA, 25 bp, Homo sapien
gccggacgcgagcagatgaacgaac

SEQ ID NO: 5837551 - DNA, 25 bp, Homo sapien
cgagcagatgaacgaacagactcag

SEQ ID NO: 5837552 - DNA, 25 bp, Homo sapien
gatgaacgaacagactcaggcgatg

SEQ ID NO: 5837553 - DNA, 25 bp, Homo sapien
aacagactcaggcgatgtgctttat

SEQ ID NO: 5837554 - DNA, 25 bp, Homo sapien
tcaggcgatgtgctttatggcaggc

SEQ ID NO: 5837555 - DNA, 25 bp, Homo sapien
gtgctttatggcaggcgcaaactcg

SEQ ID NO: 5837556 - DNA, 25 bp, Homo sapien
atggcaggcgcaaactcgattttct

SEQ ID NO: 5837557 - DNA, 25 bp, Homo sapien
tacggttgcaaactgctgaccacgc

SEQ ID NO: 5837558 - DNA, 25 bp, Homo sapien
caaactgctgaccacgccgaatccg

SEQ ID NO: 5837559 - DNA, 25 bp, Homo sapien
gacctgcaactgttccgcaaactgg

SEQ ID NO: 5837560 - DNA, 25 bp, Homo sapien
gggctaaatccgcagcaaactgccg

SEQ ID NO: 5837561 - DNA, 25 bp, Homo sapien
cgcagcaaactgccgtgctggcagg

SEQ ID NO: 5837562 - DNA, 25 bp, Homo sapien
acagcaacgtcttgaacaggcgctg

SEQ ID NO: 5837563 - DNA, 25 bp, Homo sapien
cgtcttgaacaggcgctgatgaccc

SEQ ID NO: 5837564 - DNA, 25 bp, Homo sapien
ggtcgcgcggatcatgatgccaacc

SEQ ID NO: 5837565 - DNA, 25 bp, Homo sapien
acaggcgctgatgaccccggacacc

SEQ ID NO: 5837566 - DNA, 25 bp, Homo sapien
ggatcatgatgccaacctcttacgt

SEQ ID NO: 5837567 - DNA, 25 bp, Homo sapien
atattacaacgcggcagcattatga

SEQ ID NO: 5837568 - DNA, 25 bp, Homo sapien
tgccaacctcttacgtgcgcctttc

SEQ ID NO: 5837569 - DNA, 25 bp, Homo sapien
gcgcctttctgccggacgcgagcag

SEQ ID NO: 5837570 - DNA, 25 bp, Homo sapien
gccggacgcgagcagatgaacgaac

SEQ ID NO: 5837571 - DNA, 25 bp, Homo sapien
cgagcagatgaacgaacagactcag

SEQ ID NO: 5837572 - DNA, 25 bp, Homo sapien
gatgaacgaacagactcaggcgatg

SEQ ID NO: 5837573 - DNA, 25 bp, Homo sapien
aacagactcaggcgatgtgctttat

SEQ ID NO: 5837574 - DNA, 25 bp, Homo sapien
tcaggcgatgtgctttatggcaggc

SEQ ID NO: 5837575 - DNA, 25 bp, Homo sapien
gtgctttatggcaggcgcaaactcg

SEQ ID NO: 5837576 - DNA, 25 bp, Homo sapien
atggcaggcgcaaactcgattttct

SEQ ID NO: 5837577 - DNA, 25 bp, Homo sapien
tacggttgcaaactgctgaccacgc

SEQ ID NO: 5837578 - DNA, 25 bp, Homo sapien
caaactgctgaccacgccgaatccg

SEQ ID NO: 5837579 - DNA, 25 bp, Homo sapien
gacctgcaactgttccgcaaactgg

SEQ ID NO: 5837580 - DNA, 25 bp, Homo sapien
gggctaaatccgcagcaaactgccg

SEQ ID NO: 5837581 - DNA, 25 bp, Homo sapien
cgcagcaaactgccgtgctggcagg

SEQ ID NO: 5837582 - DNA, 25 bp, Homo sapien
acagcaacgtcttgaacaggcgctg

SEQ ID NO: 5837583 - DNA, 25 bp, Homo sapien
cgtcttgaacaggcgctgatgaccc

SEQ ID NO: 5837584 - DNA, 25 bp, Homo sapien
ggtcgcgcggatcatgatgccaacc

SEQ ID NO: 5837585 - DNA, 25 bp, Homo sapien
acaggcgctgatgaccccggacacc

SEQ ID NO: 5837586 - DNA, 25 bp, Homo sapien
ggatcatgatgccaacctcttacgt

SEQ ID NO: 5837587 - DNA, 25 bp, Homo sapien
atattacaacgcggcagcattatga

SEQ ID NO: 5837588 - DNA, 25 bp, Homo sapien
tgccaacctcttacgtgcgcctttc

SEQ ID NO: 5837589 - DNA, 25 bp, Homo sapien
gcgcctttctgccggacgcgagcag

SEQ ID NO: 5837590 - DNA, 25 bp, Homo sapien
gccggacgcgagcagatgaacgaac

SEQ ID NO: 5837591 - DNA, 25 bp, Homo sapien
cgagcagatgaacgaacagactcag

SEQ ID NO: 5837592 - DNA, 25 bp, Homo sapien
gatgaacgaacagactcaggcgatg

SEQ ID NO: 5837593 - DNA, 25 bp, Homo sapien
aacagactcaggcgatgtgctttat

SEQ ID NO: 5837594 - DNA, 25 bp, Homo sapien
tcaggcgatgtgctttatggcaggc

SEQ ID NO: 5837595 - DNA, 25 bp, Homo sapien
gtgctttatggcaggcgcaaactcg

SEQ ID NO: 5837596 - DNA, 25 bp, Homo sapien
atggcaggcgcaaactcgattttct

SEQ ID NO: 5837597 - DNA, 25 bp, Homo sapien
tacggttgcaaactgctgaccacgc

SEQ ID NO: 5837598 - DNA, 25 bp, Homo sapien
caaactgctgaccacgccgaatccg

SEQ ID NO: 5837599 - DNA, 25 bp, Homo sapien
gacctgcaactgttccgcaaactgg

SEQ ID NO: 5837600 - DNA, 25 bp, Homo sapien
gggctaaatccgcagcaaactgccg

SEQ ID NO: 5837601 - DNA, 25 bp, Homo sapien
cgcagcaaactgccgtgctggcagg

SEQ ID NO: 5837602 - DNA, 25 bp, Homo sapien
acagcaacgtcttgaacaggcgctg

SEQ ID NO: 5837603 - DNA, 25 bp, Homo sapien
cgtcttgaacaggcgctgatgaccc

SEQ ID NO: 5837604 - DNA, 25 bp, Homo sapien
ggtcgcgcggatcatgatgccaacc

SEQ ID NO: 5837605 - DNA, 25 bp, Homo sapien
acaggcgctgatgaccccggacacc

SEQ ID NO: 5837606 - DNA, 25 bp, Homo sapien
ggatcatgatgccaacctcttacgt

SEQ ID NO: 5837607 - DNA, 25 bp, Homo sapien
atattacaacgcggcagcattatga

SEQ ID NO: 5837608 - DNA, 25 bp, Homo sapien
tgccaacctcttacgtgcgcctttc

SEQ ID NO: 5837609 - DNA, 25 bp, Homo sapien
gcgcctttctgccggacgcgagcag

SEQ ID NO: 5837610 - DNA, 25 bp, Homo sapien
gccggacgcgagcagatgaacgaac

SEQ ID NO: 5837611 - DNA, 25 bp, Homo sapien
cgagcagatgaacgaacagactcag

SEQ ID NO: 5837612 - DNA, 25 bp, Homo sapien
gatgaacgaacagactcaggcgatg

SEQ ID NO: 5837613 - DNA, 25 bp, Homo sapien
aacagactcaggcgatgtgctttat

SEQ ID NO: 5837614 - DNA, 25 bp, Homo sapien
tcaggcgatgtgctttatggcaggc

SEQ ID NO: 5837615 - DNA, 25 bp, Homo sapien
gtgctttatggcaggcgcaaactcg

SEQ ID NO: 5837616 - DNA, 25 bp, Homo sapien
atggcaggcgcaaactcgattttct

SEQ ID NO: 5837617 - DNA, 25 bp, Homo sapien
tacggttgcaaactgctgaccacgc

SEQ ID NO: 5837618 - DNA, 25 bp, Homo sapien
caaactgctgaccacgccgaatccg

SEQ ID NO: 5837619 - DNA, 25 bp, Homo sapien
gacctgcaactgttccgcaaactgg

SEQ ID NO: 5837620 - DNA, 25 bp, Homo sapien
gggctaaatccgcagcaaactgccg

SEQ ID NO: 5837621 - DNA, 25 bp, Homo sapien
cgcagcaaactgccgtgctggcagg

SEQ ID NO: 5837622 - DNA, 25 bp, Homo sapien
acagcaacgtcttgaacaggcgctg

SEQ ID NO: 5837623 - DNA, 25 bp, Homo sapien
cgtcttgaacaggcgctgatgaccc

SEQ ID NO: 5837624 - DNA, 25 bp, Homo sapien
ggtcgcgcggatcatgatgccaacc

SEQ ID NO: 5837625 - DNA, 25 bp, Homo sapien
acaggcgctgatgaccccggacacc

SEQ ID NO: 5837626 - DNA, 25 bp, Homo sapien
ggatcatgatgccaacctcttacgt

SEQ ID NO: 5837627 - DNA, 25 bp, Homo sapien
atattacaacgcggcagcattatga

SEQ ID NO: 5837628 - DNA, 25 bp, Homo sapien
tgccaacctcttacgtgcgcctttc

SEQ ID NO: 5837629 - DNA, 25 bp, Homo sapien
gcgcctttctgccggacgcgagcag

SEQ ID NO: 5837630 - DNA, 25 bp, Homo sapien
gccggacgcgagcagatgaacgaac

SEQ ID NO: 5837631 - DNA, 25 bp, Homo sapien
cgagcagatgaacgaacagactcag

SEQ ID NO: 5837632 - DNA, 25 bp, Homo sapien
gatgaacgaacagactcaggcgatg

SEQ ID NO: 5837633 - DNA, 25 bp, Homo sapien
aacagactcaggcgatgtgctttat

SEQ ID NO: 5837634 - DNA, 25 bp, Homo sapien
tcaggcgatgtgctttatggcaggc

SEQ ID NO: 5837635 - DNA, 25 bp, Homo sapien
gtgctttatggcaggcgcaaactcg

SEQ ID NO: 5837636 - DNA, 25 bp, Homo sapien
atggcaggcgcaaactcgattttct

SEQ ID NO: 5837637 - DNA, 25 bp, Homo sapien
tacggttgcaaactgctgaccacgc

SEQ ID NO: 5837638 - DNA, 25 bp, Homo sapien
caaactgctgaccacgccgaatccg

SEQ ID NO: 5837639 - DNA, 25 bp, Homo sapien
gacctgcaactgttccgcaaactgg

SEQ ID NO: 5837640 - DNA, 25 bp, Homo sapien
gggctaaatccgcagcaaactgccg

SEQ ID NO: 5837641 - DNA, 25 bp, Homo sapien
cgcagcaaactgccgtgctggcagg

SEQ ID NO: 5837642 - DNA, 25 bp, Homo sapien
acagcaacgtcttgaacaggcgctg

SEQ ID NO: 5837643 - DNA, 25 bp, Homo sapien
cgtcttgaacaggcgctgatgaccc

SEQ ID NO: 5837644 - DNA, 25 bp, Homo sapien
ggtcgcgcggatcatgatgccaacc

SEQ ID NO: 5837645 - DNA, 25 bp, Homo sapien
acaggcgctgatgaccccggacacc

SEQ ID NO: 5837646 - DNA, 25 bp, Homo sapien
ggatcatgatgccaacctcttacgt

SEQ ID NO: 5837647 - DNA, 25 bp, Homo sapien
atattacaacgcggcagcattatga

SEQ ID NO: 5837648 - DNA, 25 bp, Homo sapien
tgccaacctcttacgtgcgcctttc

SEQ ID NO: 5837649 - DNA, 25 bp, Homo sapien
gcgcctttctgccggacgcgagcag

SEQ ID NO: 5837650 - DNA, 25 bp, Homo sapien
gccggacgcgagcagatgaacgaac

SEQ ID NO: 5837651 - DNA, 25 bp, Homo sapien
cgagcagatgaacgaacagactcag

SEQ ID NO: 5837652 - DNA, 25 bp, Homo sapien
gatgaacgaacagactcaggcgatg

SEQ ID NO: 5837653 - DNA, 25 bp, Homo sapien
aacagactcaggcgatgtgctttat

SEQ ID NO: 5837654 - DNA, 25 bp, Homo sapien
tcaggcgatgtgctttatggcaggc

SEQ ID NO: 5837655 - DNA, 25 bp, Homo sapien
gtgctttatggcaggcgcaaactcg

SEQ ID NO: 5837656 - DNA, 25 bp, Homo sapien
atggcaggcgcaaactcgattttct

SEQ ID NO: 5837657 - DNA, 25 bp, Homo sapien
tacggttgcaaactgctgaccacgc

SEQ ID NO: 5837658 - DNA, 25 bp, Homo sapien
caaactgctgaccacgccgaatccg

SEQ ID NO: 5837659 - DNA, 25 bp, Homo sapien
gacctgcaactgttccgcaaactgg

SEQ ID NO: 5837660 - DNA, 25 bp, Homo sapien
gggctaaatccgcagcaaactgccg

SEQ ID NO: 5837661 - DNA, 25 bp, Homo sapien
cgcagcaaactgccgtgctggcagg

SEQ ID NO: 5837662 - DNA, 25 bp, Homo sapien
acagcaacgtcttgaacaggcgctg

SEQ ID NO: 5837663 - DNA, 25 bp, Homo sapien
cgtcttgaacaggcgctgatgaccc

SEQ ID NO: 5837664 - DNA, 25 bp, Homo sapien
ggtcgcgcggatcatgatgccaacc

SEQ ID NO: 5837665 - DNA, 25 bp, Homo sapien
acaggcgctgatgaccccggacacc

SEQ ID NO: 5837666 - DNA, 25 bp, Homo sapien
ggatcatgatgccaacctcttacgt

SEQ ID NO: 5837667 - DNA, 25 bp, Homo sapien
atattacaacgcggcagcattatga

SEQ ID NO: 5837668 - DNA, 25 bp, Homo sapien
tgccaacctcttacgtgcgcctttc

SEQ ID NO: 5837669 - DNA, 25 bp, Homo sapien
gcgcctttctgccggacgcgagcag

SEQ ID NO: 5837670 - DNA, 25 bp, Homo sapien
gccggacgcgagcagatgaacgaac

SEQ ID NO: 5837671 - DNA, 25 bp, Homo sapien
cgagcagatgaacgaacagactcag

SEQ ID NO: 5837672 - DNA, 25 bp, Homo sapien
gatgaacgaacagactcaggcgatg

SEQ ID NO: 5837673 - DNA, 25 bp, Homo sapien
aacagactcaggcgatgtgctttat

SEQ ID NO: 5837674 - DNA, 25 bp, Homo sapien
tcaggcgatgtgctttatggcaggc

SEQ ID NO: 5837675 - DNA, 25 bp, Homo sapien
gtgctttatggcaggcgcaaactcg

SEQ ID NO: 5837676 - DNA, 25 bp, Homo sapien
atggcaggcgcaaactcgattttct

SEQ ID NO: 5837677 - DNA, 25 bp, Homo sapien
tacggttgcaaactgctgaccacgc

SEQ ID NO: 5837678 - DNA, 25 bp, Homo sapien
caaactgctgaccacgccgaatccg

SEQ ID NO: 5837679 - DNA, 25 bp, Homo sapien
gacctgcaactgttccgcaaactgg

SEQ ID NO: 5837680 - DNA, 25 bp, Homo sapien
gggctaaatccgcagcaaactgccg

SEQ ID NO: 5837681 - DNA, 25 bp, Homo sapien
cgcagcaaactgccgtgctggcagg

SEQ ID NO: 5837682 - DNA, 25 bp, Homo sapien
acagcaacgtcttgaacaggcgctg

SEQ ID NO: 5837683 - DNA, 25 bp, Homo sapien
cgtcttgaacaggcgctgatgaccc

SEQ ID NO: 5837684 - DNA, 25 bp, Homo sapien
ggtcgcgcggatcatgatgccaacc

SEQ ID NO: 5837685 - DNA, 25 bp, Homo sapien
acaggcgctgatgaccccggacacc

SEQ ID NO: 5837686 - DNA, 25 bp, Homo sapien
ggatcatgatgccaacctcttacgt

SEQ ID NO: 5837687 - DNA, 25 bp, Homo sapien
atattacaacgcggcagcattatga

SEQ ID NO: 5837688 - DNA, 25 bp, Homo sapien
tgccaacctcttacgtgcgcctttc

SEQ ID NO: 5837689 - DNA, 25 bp, Homo sapien
gcgcctttctgccggacgcgagcag

SEQ ID NO: 5837690 - DNA, 25 bp, Homo sapien
gccggacgcgagcagatgaacgaac

SEQ ID NO: 5837691 - DNA, 25 bp, Homo sapien
cgagcagatgaacgaacagactcag

SEQ ID NO: 5837692 - DNA, 25 bp, Homo sapien
gatgaacgaacagactcaggcgatg

SEQ ID NO: 5837693 - DNA, 25 bp, Homo sapien
aacagactcaggcgatgtgctttat

SEQ ID NO: 5837694 - DNA, 25 bp, Homo sapien
tcaggcgatgtgctttatggcaggc

SEQ ID NO: 5837695 - DNA, 25 bp, Homo sapien
gtgctttatggcaggcgcaaactcg

SEQ ID NO: 5837696 - DNA, 25 bp, Homo sapien
atggcaggcgcaaactcgattttct

SEQ ID NO: 5837697 - DNA, 25 bp, Homo sapien
tacggttgcaaactgctgaccacgc

SEQ ID NO: 5837698 - DNA, 25 bp, Homo sapien
caaactgctgaccacgccgaatccg

SEQ ID NO: 5837699 - DNA, 25 bp, Homo sapien
gacctgcaactgttccgcaaactgg

SEQ ID NO: 5837700 - DNA, 25 bp, Homo sapien
gggctaaatccgcagcaaactgccg

SEQ ID NO: 5837701 - DNA, 25 bp, Homo sapien
cgcagcaaactgccgtgctggcagg

SEQ ID NO: 5837702 - DNA, 25 bp, Homo sapien
acagcaacgtcttgaacaggcgctg

SEQ ID NO: 5837703 - DNA, 25 bp, Homo sapien
cgtcttgaacaggcgctgatgaccc

SEQ ID NO: 5837704 - DNA, 25 bp, Homo sapien
ggtcgcgcggatcatgatgccaacc

SEQ ID NO: 5837705 - DNA, 25 bp, Homo sapien
acaggcgctgatgaccccggacacc

SEQ ID NO: 5837706 - DNA, 25 bp, Homo sapien
ggatcatgatgccaacctcttacgt

SEQ ID NO: 5837707 - DNA, 25 bp, Homo sapien
atattacaacgcggcagcattatga

SEQ ID NO: 5837708 - DNA, 25 bp, Homo sapien
tgccaacctcttacgtgcgcctttc

SEQ ID NO: 5837709 - DNA, 25 bp, Homo sapien
gcgcctttctgccggacgcgagcag

SEQ ID NO: 5837710 - DNA, 25 bp, Homo sapien
gccggacgcgagcagatgaacgaac

SEQ ID NO: 5837711 - DNA, 25 bp, Homo sapien
cgagcagatgaacgaacagactcag

SEQ ID NO: 5837712 - DNA, 25 bp, Homo sapien
gatgaacgaacagactcaggcgatg

SEQ ID NO: 5837713 - DNA, 25 bp, Homo sapien
aacagactcaggcgatgtgctttat

SEQ ID NO: 5837714 - DNA, 25 bp, Homo sapien
tcaggcgatgtgctttatggcaggc

SEQ ID NO: 5837715 - DNA, 25 bp, Homo sapien
gtgctttatggcaggcgcaaactcg

SEQ ID NO: 5837716 - DNA, 25 bp, Homo sapien
atggcaggcgcaaactcgattttct

SEQ ID NO: 5837717 - DNA, 25 bp, Homo sapien
tacggttgcaaactgctgaccacgc

SEQ ID NO: 5837718 - DNA, 25 bp, Homo sapien
caaactgctgaccacgccgaatccg

SEQ ID NO: 5837719 - DNA, 25 bp, Homo sapien
gacctgcaactgttccgcaaactgg

SEQ ID NO: 5837720 - DNA, 25 bp, Homo sapien
gggctaaatccgcagcaaactgccg

SEQ ID NO: 5837721 - DNA, 25 bp, Homo sapien
cgcagcaaactgccgtgctggcagg

SEQ ID NO: 5837722 - DNA, 25 bp, Homo sapien
acagcaacgtcttgaacaggcgctg

SEQ ID NO: 5837723 - DNA, 25 bp, Homo sapien
cgtcttgaacaggcgctgatgaccc

SEQ ID NO: 5837724 - DNA, 25 bp, Homo sapien
ggtcgcgcggatcatgatgccaacc

SEQ ID NO: 5837725 - DNA, 25 bp, Homo sapien
acaggcgctgatgaccccggacacc

SEQ ID NO: 5837726 - DNA, 25 bp, Homo sapien
ggatcatgatgccaacctcttacgt

SEQ ID NO: 5837727 - DNA, 25 bp, Homo sapien
atattacaacgcggcagcattatga

SEQ ID NO: 5837728 - DNA, 25 bp, Homo sapien
tgccaacctcttacgtgcgcctttc

SEQ ID NO: 5837729 - DNA, 25 bp, Homo sapien
gcgcctttctgccggacgcgagcag

SEQ ID NO: 5837730 - DNA, 25 bp, Homo sapien
gccggacgcgagcagatgaacgaac

SEQ ID NO: 5837731 - DNA, 25 bp, Homo sapien
cgagcagatgaacgaacagactcag

SEQ ID NO: 5837732 - DNA, 25 bp, Homo sapien
gatgaacgaacagactcaggcgatg

SEQ ID NO: 5837733 - DNA, 25 bp, Homo sapien
aacagactcaggcgatgtgctttat

SEQ ID NO: 5837734 - DNA, 25 bp, Homo sapien
tcaggcgatgtgctttatggcaggc

SEQ ID NO: 5837735 - DNA, 25 bp, Homo sapien
gtgctttatggcaggcgcaaactcg

SEQ ID NO: 5837736 - DNA, 25 bp, Homo sapien
atggcaggcgcaaactcgattttct

SEQ ID NO: 5837737 - DNA, 25 bp, Homo sapien
tacggttgcaaactgctgaccacgc

SEQ ID NO: 5837738 - DNA, 25 bp, Homo sapien
caaactgctgaccacgccgaatccg

SEQ ID NO: 5837739 - DNA, 25 bp, Homo sapien
gacctgcaactgttccgcaaactgg

SEQ ID NO: 5837740 - DNA, 25 bp, Homo sapien
gggctaaatccgcagcaaactgccg

SEQ ID NO: 5837741 - DNA, 25 bp, Homo sapien
cgcagcaaactgccgtgctggcagg

SEQ ID NO: 5837742 - DNA, 25 bp, Homo sapien
acagcaacgtcttgaacaggcgctg

SEQ ID NO: 5837743 - DNA, 25 bp, Homo sapien
cgtcttgaacaggcgctgatgaccc

SEQ ID NO: 5837744 - DNA, 25 bp, Homo sapien
ggtcgcgcggatcatgatgccaacc

SEQ ID NO: 5837745 - DNA, 25 bp, Homo sapien
acaggcgctgatgaccccggacacc

SEQ ID NO: 5837746 - DNA, 25 bp, Homo sapien
ggatcatgatgccaacctcttacgt

SEQ ID NO: 5837747 - DNA, 25 bp, Homo sapien
atattacaacgcggcagcattatga

SEQ ID NO: 5837748 - DNA, 25 bp, Homo sapien
tgccaacctcttacgtgcgcctttc

SEQ ID NO: 5837749 - DNA, 25 bp, Homo sapien
gcgcctttctgccggacgcgagcag

SEQ ID NO: 5837750 - DNA, 25 bp, Homo sapien
gccggacgcgagcagatgaacgaac

SEQ ID NO: 5837751 - DNA, 25 bp, Homo sapien
cgagcagatgaacgaacagactcag

SEQ ID NO: 5837752 - DNA, 25 bp, Homo sapien
gatgaacgaacagactcaggcgatg

SEQ ID NO: 5837753 - DNA, 25 bp, Homo sapien
aacagactcaggcgatgtgctttat

SEQ ID NO: 5837754 - DNA, 25 bp, Homo sapien
tcaggcgatgtgctttatggcaggc

SEQ ID NO: 5837755 - DNA, 25 bp, Homo sapien
gtgctttatggcaggcgcaaactcg

SEQ ID NO: 5837756 - DNA, 25 bp, Homo sapien
atggcaggcgcaaactcgattttct

SEQ ID NO: 5837757 - DNA, 25 bp, Homo sapien
tacggttgcaaactgctgaccacgc

SEQ ID NO: 5837758 - DNA, 25 bp, Homo sapien
caaactgctgaccacgccgaatccg

SEQ ID NO: 5837759 - DNA, 25 bp, Homo sapien
gacctgcaactgttccgcaaactgg

SEQ ID NO: 5837760 - DNA, 25 bp, Homo sapien
gggctaaatccgcagcaaactgccg

SEQ ID NO: 5837761 - DNA, 25 bp, Homo sapien
cgcagcaaactgccgtgctggcagg

SEQ ID NO: 5837762 - DNA, 25 bp, Homo sapien
acagcaacgtcttgaacaggcgctg

SEQ ID NO: 5837763 - DNA, 25 bp, Homo sapien
cgtcttgaacaggcgctgatgaccc

SEQ ID NO: 5837764 - DNA, 25 bp, Homo sapien
ggtcgcgcggatcatgatgccaacc

SEQ ID NO: 5837765 - DNA, 25 bp, Homo sapien
acaggcgctgatgaccccggacacc

SEQ ID NO: 5837766 - DNA, 25 bp, Homo sapien
ggatcatgatgccaacctcttacgt

SEQ ID NO: 5837767 - DNA, 25 bp, Homo sapien
atattacaacgcggcagcattatga

SEQ ID NO: 5837768 - DNA, 25 bp, Homo sapien
tgccaacctcttacgtgcgcctttc

SEQ ID NO: 5837769 - DNA, 25 bp, Homo sapien
gcgcctttctgccggacgcgagcag

SEQ ID NO: 5837770 - DNA, 25 bp, Homo sapien
gccggacgcgagcagatgaacgaac

SEQ ID NO: 5837771 - DNA, 25 bp, Homo sapien
cgagcagatgaacgaacagactcag

SEQ ID NO: 5837772 - DNA, 25 bp, Homo sapien
gatgaacgaacagactcaggcgatg

SEQ ID NO: 5837773 - DNA, 25 bp, Homo sapien
aacagactcaggcgatgtgctttat

SEQ ID NO: 5837774 - DNA, 25 bp, Homo sapien
tcaggcgatgtgctttatggcaggc

SEQ ID NO: 5837775 - DNA, 25 bp, Homo sapien
gtgctttatggcaggcgcaaactcg

SEQ ID NO: 5837776 - DNA, 25 bp, Homo sapien
atggcaggcgcaaactcgattttct

SEQ ID NO: 5837777 - DNA, 25 bp, Homo sapien
tacggttgcaaactgctgaccacgc

SEQ ID NO: 5837778 - DNA, 25 bp, Homo sapien
caaactgctgaccacgccgaatccg

SEQ ID NO: 5837779 - DNA, 25 bp, Homo sapien
gacctgcaactgttccgcaaactgg

SEQ ID NO: 5837780 - DNA, 25 bp, Homo sapien
gggctaaatccgcagcaaactgccg

SEQ ID NO: 5837781 - DNA, 25 bp, Homo sapien
cgcagcaaactgccgtgctggcagg

SEQ ID NO: 5837782 - DNA, 25 bp, Homo sapien
acagcaacgtcttgaacaggcgctg

SEQ ID NO: 5837783 - DNA, 25 bp, Homo sapien
cgtcttgaacaggcgctgatgaccc

SEQ ID NO: 5837784 - DNA, 25 bp, Homo sapien
ggtcgcgcggatcatgatgccaacc

SEQ ID NO: 5837785 - DNA, 25 bp, Homo sapien
acaggcgctgatgaccccggacacc

SEQ ID NO: 5837786 - DNA, 25 bp, Homo sapien
ggatcatgatgccaacctcttacgt

SEQ ID NO: 5837787 - DNA, 25 bp, Homo sapien
atattacaacgcggcagcattatga

SEQ ID NO: 5837788 - DNA, 25 bp, Homo sapien
tgccaacctcttacgtgcgcctttc

SEQ ID NO: 5837789 - DNA, 25 bp, Homo sapien
gcgcctttctgccggacgcgagcag

SEQ ID NO: 5837790 - DNA, 25 bp, Homo sapien
gccggacgcgagcagatgaacgaac

SEQ ID NO: 5837791 - DNA, 25 bp, Homo sapien
cgagcagatgaacgaacagactcag

SEQ ID NO: 5837792 - DNA, 25 bp, Homo sapien
gatgaacgaacagactcaggcgatg

SEQ ID NO: 5837793 - DNA, 25 bp, Homo sapien
aacagactcaggcgatgtgctttat

SEQ ID NO: 5837794 - DNA, 25 bp, Homo sapien
tcaggcgatgtgctttatggcaggc

SEQ ID NO: 5837795 - DNA, 25 bp, Homo sapien
gtgctttatggcaggcgcaaactcg

SEQ ID NO: 5837796 - DNA, 25 bp, Homo sapien
atggcaggcgcaaactcgattttct

SEQ ID NO: 5837797 - DNA, 25 bp, Homo sapien
tacggttgcaaactgctgaccacgc

SEQ ID NO: 5837798 - DNA, 25 bp, Homo sapien
caaactgctgaccacgccgaatccg

SEQ ID NO: 5837799 - DNA, 25 bp, Homo sapien
gacctgcaactgttccgcaaactgg

SEQ ID NO: 5837800 - DNA, 25 bp, Homo sapien
gggctaaatccgcagcaaactgccg

SEQ ID NO: 5837801 - DNA, 25 bp, Homo sapien
cgcagcaaactgccgtgctggcagg

SEQ ID NO: 5837802 - DNA, 25 bp, Homo sapien
acagcaacgtcttgaacaggcgctg

SEQ ID NO: 5837803 - DNA, 25 bp, Homo sapien
cgtcttgaacaggcgctgatgaccc

SEQ ID NO: 5837804 - DNA, 25 bp, Homo sapien
ggtcgcgcggatcatgatgccaacc

SEQ ID NO: 5837805 - DNA, 25 bp, Homo sapien
acaggcgctgatgaccccggacacc

SEQ ID NO: 5837806 - DNA, 25 bp, Homo sapien
ggatcatgatgccaacctcttacgt

SEQ ID NO: 5837807 - DNA, 25 bp, Homo sapien
atattacaacgcggcagcattatga

SEQ ID NO: 5837808 - DNA, 25 bp, Homo sapien
tgccaacctcttacgtgcgcctttc

SEQ ID NO: 5837809 - DNA, 25 bp, Homo sapien
gcgcctttctgccggacgcgagcag

SEQ ID NO: 5837810 - DNA, 25 bp, Homo sapien
gccggacgcgagcagatgaacgaac

SEQ ID NO: 5837811 - DNA, 25 bp, Homo sapien
cgagcagatgaacgaacagactcag

SEQ ID NO: 5837812 - DNA, 25 bp, Homo sapien
gatgaacgaacagactcaggcgatg

SEQ ID NO: 5837813 - DNA, 25 bp, Homo sapien
aacagactcaggcgatgtgctttat

SEQ ID NO: 5837814 - DNA, 25 bp, Homo sapien
tcaggcgatgtgctttatggcaggc

SEQ ID NO: 5837815 - DNA, 25 bp, Homo sapien
gtgctttatggcaggcgcaaactcg

SEQ ID NO: 5837816 - DNA, 25 bp, Homo sapien
atggcaggcgcaaactcgattttct

SEQ ID NO: 5837817 - DNA, 25 bp, Homo sapien
tacggttgcaaactgctgaccacgc

SEQ ID NO: 5837818 - DNA, 25 bp, Homo sapien
caaactgctgaccacgccgaatccg

SEQ ID NO: 5837819 - DNA, 25 bp, Homo sapien
gacctgcaactgttccgcaaactgg

SEQ ID NO: 5837820 - DNA, 25 bp, Homo sapien
gggctaaatccgcagcaaactgccg

SEQ ID NO: 5837821 - DNA, 25 bp, Homo sapien
cgcagcaaactgccgtgctggcagg

SEQ ID NO: 5837822 - DNA, 25 bp, Homo sapien
acagcaacgtcttgaacaggcgctg

SEQ ID NO: 5837823 - DNA, 25 bp, Homo sapien
cgtcttgaacaggcgctgatgaccc

SEQ ID NO: 5837824 - DNA, 25 bp, Homo sapien
ggtcgcgcggatcatgatgccaacc

SEQ ID NO: 5837825 - DNA, 25 bp, Homo sapien
acaggcgctgatgaccccggacacc

SEQ ID NO: 5837826 - DNA, 25 bp, Homo sapien
ggatcatgatgccaacctcttacgt

SEQ ID NO: 5837827 - DNA, 25 bp, Homo sapien
atattacaacgcggcagcattatga

SEQ ID NO: 5837828 - DNA, 25 bp, Homo sapien
tgccaacctcttacgtgcgcctttc

SEQ ID NO: 5837829 - DNA, 25 bp, Homo sapien
gcgcctttctgccggacgcgagcag

SEQ ID NO: 5837830 - DNA, 25 bp, Homo sapien
gccggacgcgagcagatgaacgaac

SEQ ID NO: 5837831 - DNA, 25 bp, Homo sapien
cgagcagatgaacgaacagactcag

SEQ ID NO: 5837832 - DNA, 25 bp, Homo sapien
gatgaacgaacagactcaggcgatg

SEQ ID NO: 5837833 - DNA, 25 bp, Homo sapien
aacagactcaggcgatgtgctttat

SEQ ID NO: 5837834 - DNA, 25 bp, Homo sapien
tcaggcgatgtgctttatggcaggc

SEQ ID NO: 5837835 - DNA, 25 bp, Homo sapien
gtgctttatggcaggcgcaaactcg

SEQ ID NO: 5837836 - DNA, 25 bp, Homo sapien
atggcaggcgcaaactcgattttct

SEQ ID NO: 5837837 - DNA, 25 bp, Homo sapien
tacggttgcaaactgctgaccacgc

SEQ ID NO: 5837838 - DNA, 25 bp, Homo sapien
caaactgctgaccacgccgaatccg

SEQ ID NO: 5837839 - DNA, 25 bp, Homo sapien
gacctgcaactgttccgcaaactgg

SEQ ID NO: 5837840 - DNA, 25 bp, Homo sapien
gggctaaatccgcagcaaactgccg

SEQ ID NO: 5837841 - DNA, 25 bp, Homo sapien
cgcagcaaactgccgtgctggcagg

SEQ ID NO: 5837842 - DNA, 25 bp, Homo sapien
acagcaacgtcttgaacaggcgctg

SEQ ID NO: 5837843 - DNA, 25 bp, Homo sapien
cgtcttgaacaggcgctgatgaccc

SEQ ID NO: 5837844 - DNA, 25 bp, Homo sapien
ggtcgcgcggatcatgatgccaacc

SEQ ID NO: 5837845 - DNA, 25 bp, Homo sapien
acaggcgctgatgaccccggacacc

SEQ ID NO: 5837846 - DNA, 25 bp, Homo sapien
ggatcatgatgccaacctcttacgt

SEQ ID NO: 5837847 - DNA, 25 bp, Homo sapien
atattacaacgcggcagcattatga

SEQ ID NO: 5837848 - DNA, 25 bp, Homo sapien
tgccaacctcttacgtgcgcctttc

SEQ ID NO: 5837849 - DNA, 25 bp, Homo sapien
gcgcctttctgccggacgcgagcag

SEQ ID NO: 5837850 - DNA, 25 bp, Homo sapien
gccggacgcgagcagatgaacgaac

SEQ ID NO: 5837851 - DNA, 25 bp, Homo sapien
cgagcagatgaacgaacagactcag

SEQ ID NO: 5837852 - DNA, 25 bp, Homo sapien
gatgaacgaacagactcaggcgatg

SEQ ID NO: 5837853 - DNA, 25 bp, Homo sapien
aacagactcaggcgatgtgctttat

SEQ ID NO: 5837854 - DNA, 25 bp, Homo sapien
tcaggcgatgtgctttatggcaggc

SEQ ID NO: 5837855 - DNA, 25 bp, Homo sapien
gtgctttatggcaggcgcaaactcg

SEQ ID NO: 5837856 - DNA, 25 bp, Homo sapien
atggcaggcgcaaactcgattttct

SEQ ID NO: 5837857 - DNA, 25 bp, Homo sapien
tacggttgcaaactgctgaccacgc

SEQ ID NO: 5837858 - DNA, 25 bp, Homo sapien
caaactgctgaccacgccgaatccg

SEQ ID NO: 5837859 - DNA, 25 bp, Homo sapien
gacctgcaactgttccgcaaactgg

SEQ ID NO: 5837860 - DNA, 25 bp, Homo sapien
gggctaaatccgcagcaaactgccg

SEQ ID NO: 5837861 - DNA, 25 bp, Homo sapien
cgcagcaaactgccgtgctggcagg

SEQ ID NO: 5837862 - DNA, 25 bp, Homo sapien
acagcaacgtcttgaacaggcgctg

SEQ ID NO: 5837863 - DNA, 25 bp, Homo sapien
cgtcttgaacaggcgctgatgaccc

SEQ ID NO: 5837864 - DNA, 25 bp, Homo sapien
ggtcgcgcggatcatgatgccaacc

SEQ ID NO: 5837865 - DNA, 25 bp, Homo sapien
acaggcgctgatgaccccggacacc

SEQ ID NO: 5837866 - DNA, 25 bp, Homo sapien
ggatcatgatgccaacctcttacgt

SEQ ID NO: 5837867 - DNA, 25 bp, Homo sapien
atattacaacgcggcagcattatga

SEQ ID NO: 5837868 - DNA, 25 bp, Homo sapien
tgccaacctcttacgtgcgcctttc

SEQ ID NO: 5837869 - DNA, 25 bp, Homo sapien
gcgcctttctgccggacgcgagcag

SEQ ID NO: 5837870 - DNA, 25 bp, Homo sapien
gccggacgcgagcagatgaacgaac

SEQ ID NO: 5837871 - DNA, 25 bp, Homo sapien
cgagcagatgaacgaacagactcag

SEQ ID NO: 5837872 - DNA, 25 bp, Homo sapien
gatgaacgaacagactcaggcgatg

SEQ ID NO: 5837873 - DNA, 25 bp, Homo sapien
aacagactcaggcgatgtgctttat

SEQ ID NO: 5837874 - DNA, 25 bp, Homo sapien
tcaggcgatgtgctttatggcaggc

SEQ ID NO: 5837875 - DNA, 25 bp, Homo sapien
gtgctttatggcaggcgcaaactcg

SEQ ID NO: 5837876 - DNA, 25 bp, Homo sapien
atggcaggcgcaaactcgattttct

SEQ ID NO: 5837877 - DNA, 25 bp, Homo sapien
tacggttgcaaactgctgaccacgc

SEQ ID NO: 5837878 - DNA, 25 bp, Homo sapien
caaactgctgaccacgccgaatccg

SEQ ID NO: 5837879 - DNA, 25 bp, Homo sapien
gacctgcaactgttccgcaaactgg

SEQ ID NO: 5837880 - DNA, 25 bp, Homo sapien
gggctaaatccgcagcaaactgccg

SEQ ID NO: 5837881 - DNA, 25 bp, Homo sapien
cgcagcaaactgccgtgctggcagg

SEQ ID NO: 5837882 - DNA, 25 bp, Homo sapien
acagcaacgtcttgaacaggcgctg

SEQ ID NO: 5837883 - DNA, 25 bp, Homo sapien
cgtcttgaacaggcgctgatgaccc

SEQ ID NO: 5837884 - DNA, 25 bp, Homo sapien
ggtcgcgcggatcatgatgccaacc

SEQ ID NO: 5837885 - DNA, 25 bp, Homo sapien
acaggcgctgatgaccccggacacc

SEQ ID NO: 5837886 - DNA, 25 bp, Homo sapien
ggatcatgatgccaacctcttacgt

SEQ ID NO: 5837887 - DNA, 25 bp, Homo sapien
atattacaacgcggcagcattatga

SEQ ID NO: 5837888 - DNA, 25 bp, Homo sapien
tgccaacctcttacgtgcgcctttc

SEQ ID NO: 5837889 - DNA, 25 bp, Homo sapien
gcgcctttctgccggacgcgagcag

SEQ ID NO: 5837890 - DNA, 25 bp, Homo sapien
gccggacgcgagcagatgaacgaac

SEQ ID NO: 5837891 - DNA, 25 bp, Homo sapien
cgagcagatgaacgaacagactcag

SEQ ID NO: 5837892 - DNA, 25 bp, Homo sapien
gatgaacgaacagactcaggcgatg

SEQ ID NO: 5837893 - DNA, 25 bp, Homo sapien
aacagactcaggcgatgtgctttat

SEQ ID NO: 5837894 - DNA, 25 bp, Homo sapien
tcaggcgatgtgctttatggcaggc

SEQ ID NO: 5837895 - DNA, 25 bp, Homo sapien
gtgctttatggcaggcgcaaactcg

SEQ ID NO: 5837896 - DNA, 25 bp, Homo sapien
atggcaggcgcaaactcgattttct

SEQ ID NO: 5837897 - DNA, 25 bp, Homo sapien
tacggttgcaaactgctgaccacgc

SEQ ID NO: 5837898 - DNA, 25 bp, Homo sapien
caaactgctgaccacgccgaatccg

SEQ ID NO: 5837899 - DNA, 25 bp, Homo sapien
gacctgcaactgttccgcaaactgg

SEQ ID NO: 5837900 - DNA, 25 bp, Homo sapien
gggctaaatccgcagcaaactgccg

SEQ ID NO: 5837901 - DNA, 25 bp, Homo sapien
cgcagcaaactgccgtgctggcagg

SEQ ID NO: 5837902 - DNA, 25 bp, Homo sapien
acagcaacgtcttgaacaggcgctg

SEQ ID NO: 5837903 - DNA, 25 bp, Homo sapien
cgtcttgaacaggcgctgatgaccc

SEQ ID NO: 5837904 - DNA, 25 bp, Homo sapien
ggtcgcgcggatcatgatgccaacc

SEQ ID NO: 5837905 - DNA, 25 bp, Homo sapien
acaggcgctgatgaccccggacacc

SEQ ID NO: 5837906 - DNA, 25 bp, Homo sapien
ggatcatgatgccaacctcttacgt

SEQ ID NO: 5837907 - DNA, 25 bp, Homo sapien
atattacaacgcggcagcattatga

SEQ ID NO: 5837908 - DNA, 25 bp, Homo sapien
tgccaacctcttacgtgcgcctttc

SEQ ID NO: 5837909 - DNA, 25 bp, Homo sapien
gcgcctttctgccggacgcgagcag

SEQ ID NO: 5837910 - DNA, 25 bp, Homo sapien
gccggacgcgagcagatgaacgaac

SEQ ID NO: 5837911 - DNA, 25 bp, Homo sapien
cgagcagatgaacgaacagactcag

SEQ ID NO: 5837912 - DNA, 25 bp, Homo sapien
gatgaacgaacagactcaggcgatg

SEQ ID NO: 5837913 - DNA, 25 bp, Homo sapien
aacagactcaggcgatgtgctttat

SEQ ID NO: 5837914 - DNA, 25 bp, Homo sapien
tcaggcgatgtgctttatggcaggc

SEQ ID NO: 5837915 - DNA, 25 bp, Homo sapien
gtgctttatggcaggcgcaaactcg

SEQ ID NO: 5837916 - DNA, 25 bp, Homo sapien
atggcaggcgcaaactcgattttct

SEQ ID NO: 5837917 - DNA, 25 bp, Homo sapien
tacggttgcaaactgctgaccacgc

SEQ ID NO: 5837918 - DNA, 25 bp, Homo sapien
caaactgctgaccacgccgaatccg

SEQ ID NO: 5837919 - DNA, 25 bp, Homo sapien
gacctgcaactgttccgcaaactgg

SEQ ID NO: 5837920 - DNA, 25 bp, Homo sapien
gggctaaatccgcagcaaactgccg

SEQ ID NO: 5837921 - DNA, 25 bp, Homo sapien
cgcagcaaactgccgtgctggcagg

SEQ ID NO: 5837922 - DNA, 25 bp, Homo sapien
acagcaacgtcttgaacaggcgctg

SEQ ID NO: 5837923 - DNA, 25 bp, Homo sapien
cgtcttgaacaggcgctgatgaccc

SEQ ID NO: 5837924 - DNA, 25 bp, Homo sapien
ggtcgcgcggatcatgatgccaacc

SEQ ID NO: 5837925 - DNA, 25 bp, Homo sapien
acaggcgctgatgaccccggacacc

SEQ ID NO: 5837926 - DNA, 25 bp, Homo sapien
ggatcatgatgccaacctcttacgt

SEQ ID NO: 5837927 - DNA, 25 bp, Homo sapien
atattacaacgcggcagcattatga

SEQ ID NO: 5837928 - DNA, 25 bp, Homo sapien
tgccaacctcttacgtgcgcctttc

SEQ ID NO: 5837929 - DNA, 25 bp, Homo sapien
gcgcctttctgccggacgcgagcag

SEQ ID NO: 5837930 - DNA, 25 bp, Homo sapien
gccggacgcgagcagatgaacgaac

SEQ ID NO: 5837931 - DNA, 25 bp, Homo sapien
cgagcagatgaacgaacagactcag

SEQ ID NO: 5837932 - DNA, 25 bp, Homo sapien
gatgaacgaacagactcaggcgatg

SEQ ID NO: 5837933 - DNA, 25 bp, Homo sapien
aacagactcaggcgatgtgctttat

SEQ ID NO: 5837934 - DNA, 25 bp, Homo sapien
tcaggcgatgtgctttatggcaggc

SEQ ID NO: 5837935 - DNA, 25 bp, Homo sapien
gtgctttatggcaggcgcaaactcg

SEQ ID NO: 5837936 - DNA, 25 bp, Homo sapien
atggcaggcgcaaactcgattttct

SEQ ID NO: 5837937 - DNA, 25 bp, Homo sapien
tacggttgcaaactgctgaccacgc

SEQ ID NO: 5837938 - DNA, 25 bp, Homo sapien
caaactgctgaccacgccgaatccg

SEQ ID NO: 5837939 - DNA, 25 bp, Homo sapien
gacctgcaactgttccgcaaactgg

SEQ ID NO: 5837940 - DNA, 25 bp, Homo sapien
gggctaaatccgcagcaaactgccg

SEQ ID NO: 5837941 - DNA, 25 bp, Homo sapien
cgcagcaaactgccgtgctggcagg

SEQ ID NO: 5837942 - DNA, 25 bp, Homo sapien
acagcaacgtcttgaacaggcgctg

SEQ ID NO: 5837943 - DNA, 25 bp, Homo sapien
cgtcttgaacaggcgctgatgaccc

SEQ ID NO: 5837944 - DNA, 25 bp, Homo sapien
ggtcgcgcggatcatgatgccaacc

SEQ ID NO: 5837945 - DNA, 25 bp, Homo sapien
acaggcgctgatgaccccggacacc

SEQ ID NO: 5837946 - DNA, 25 bp, Homo sapien
ggatcatgatgccaacctcttacgt

SEQ ID NO: 5837947 - DNA, 25 bp, Homo sapien
atattacaacgcggcagcattatga

SEQ ID NO: 5837948 - DNA, 25 bp, Homo sapien
tgccaacctcttacgtgcgcctttc

SEQ ID NO: 5837949 - DNA, 25 bp, Homo sapien
gcgcctttctgccggacgcgagcag

SEQ ID NO: 5837950 - DNA, 25 bp, Homo sapien
gccggacgcgagcagatgaacgaac

SEQ ID NO: 5837951 - DNA, 25 bp, Homo sapien
cgagcagatgaacgaacagactcag

SEQ ID NO: 5837952 - DNA, 25 bp, Homo sapien
gatgaacgaacagactcaggcgatg

SEQ ID NO: 5837953 - DNA, 25 bp, Homo sapien
aacagactcaggcgatgtgctttat

SEQ ID NO: 5837954 - DNA, 25 bp, Homo sapien
tcaggcgatgtgctttatggcaggc

SEQ ID NO: 5837955 - DNA, 25 bp, Homo sapien
gtgctttatggcaggcgcaaactcg

SEQ ID NO: 5837956 - DNA, 25 bp, Homo sapien
atggcaggcgcaaactcgattttct

SEQ ID NO: 5837957 - DNA, 25 bp, Homo sapien
tacggttgcaaactgctgaccacgc

SEQ ID NO: 5837958 - DNA, 25 bp, Homo sapien
caaactgctgaccacgccgaatccg

SEQ ID NO: 5837959 - DNA, 25 bp, Homo sapien
gacctgcaactgttccgcaaactgg

SEQ ID NO: 5837960 - DNA, 25 bp, Homo sapien
gggctaaatccgcagcaaactgccg

SEQ ID NO: 5837961 - DNA, 25 bp, Homo sapien
cgcagcaaactgccgtgctggcagg

SEQ ID NO: 5837962 - DNA, 25 bp, Homo sapien
acagcaacgtcttgaacaggcgctg

SEQ ID NO: 5837963 - DNA, 25 bp, Homo sapien
cgtcttgaacaggcgctgatgaccc

SEQ ID NO: 5837964 - DNA, 25 bp, Homo sapien
ggtcgcgcggatcatgatgccaacc

SEQ ID NO: 5837965 - DNA, 25 bp, Homo sapien
acaggcgctgatgaccccggacacc

SEQ ID NO: 5837966 - DNA, 25 bp, Homo sapien
ggatcatgatgccaacctcttacgt

SEQ ID NO: 5837967 - DNA, 25 bp, Homo sapien
atattacaacgcggcagcattatga

SEQ ID NO: 5837968 - DNA, 25 bp, Homo sapien
tgccaacctcttacgtgcgcctttc

SEQ ID NO: 5837969 - DNA, 25 bp, Homo sapien
gcgcctttctgccggacgcgagcag

SEQ ID NO: 5837970 - DNA, 25 bp, Homo sapien
gccggacgcgagcagatgaacgaac

SEQ ID NO: 5837971 - DNA, 25 bp, Homo sapien
cgagcagatgaacgaacagactcag

SEQ ID NO: 5837972 - DNA, 25 bp, Homo sapien
gatgaacgaacagactcaggcgatg

SEQ ID NO: 5837973 - DNA, 25 bp, Homo sapien
aacagactcaggcgatgtgctttat

SEQ ID NO: 5837974 - DNA, 25 bp, Homo sapien
tcaggcgatgtgctttatggcaggc

SEQ ID NO: 5837975 - DNA, 25 bp, Homo sapien
gtgctttatggcaggcgcaaactcg

SEQ ID NO: 5837976 - DNA, 25 bp, Homo sapien
atggcaggcgcaaactcgattttct

SEQ ID NO: 5837977 - DNA, 25 bp, Homo sapien
tacggttgcaaactgctgaccacgc

SEQ ID NO: 5837978 - DNA, 25 bp, Homo sapien
caaactgctgaccacgccgaatccg

SEQ ID NO: 5837979 - DNA, 25 bp, Homo sapien
gacctgcaactgttccgcaaactgg

SEQ ID NO: 5837980 - DNA, 25 bp, Homo sapien
gggctaaatccgcagcaaactgccg

SEQ ID NO: 5837981 - DNA, 25 bp, Homo sapien
cgcagcaaactgccgtgctggcagg

SEQ ID NO: 5837982 - DNA, 25 bp, Homo sapien
acagcaacgtcttgaacaggcgctg

SEQ ID NO: 5837983 - DNA, 25 bp, Homo sapien
cgtcttgaacaggcgctgatgaccc

SEQ ID NO: 5837984 - DNA, 25 bp, Homo sapien
ggtcgcgcggatcatgatgccaacc

SEQ ID NO: 5837985 - DNA, 25 bp, Homo sapien
acaggcgctgatgaccccggacacc

SEQ ID NO: 5837986 - DNA, 25 bp, Homo sapien
ggatcatgatgccaacctcttacgt

SEQ ID NO: 5837987 - DNA, 25 bp, Homo sapien
atattacaacgcggcagcattatga

SEQ ID NO: 5837988 - DNA, 25 bp, Homo sapien
tgccaacctcttacgtgcgcctttc

SEQ ID NO: 5837989 - DNA, 25 bp, Homo sapien
gcgcctttctgccggacgcgagcag

SEQ ID NO: 5837990 - DNA, 25 bp, Homo sapien
gccggacgcgagcagatgaacgaac

SEQ ID NO: 5837991 - DNA, 25 bp, Homo sapien
cgagcagatgaacgaacagactcag

SEQ ID NO: 5837992 - DNA, 25 bp, Homo sapien
gatgaacgaacagactcaggcgatg

SEQ ID NO: 5837993 - DNA, 25 bp, Homo sapien
aacagactcaggcgatgtgctttat

SEQ ID NO: 5837994 - DNA, 25 bp, Homo sapien
tcaggcgatgtgctttatggcaggc

SEQ ID NO: 5837995 - DNA, 25 bp, Homo sapien
gtgctttatggcaggcgcaaactcg

SEQ ID NO: 5837996 - DNA, 25 bp, Homo sapien
atggcaggcgcaaactcgattttct

SEQ ID NO: 5837997 - DNA, 25 bp, Homo sapien
tacggttgcaaactgctgaccacgc

SEQ ID NO: 5837998 - DNA, 25 bp, Homo sapien
caaactgctgaccacgccgaatccg

SEQ ID NO: 5837999 - DNA, 25 bp, Homo sapien
gacctgcaactgttccgcaaactgg

SEQ ID NO: 5838000 - DNA, 25 bp, Homo sapien
gggctaaatccgcagcaaactgccg

SEQ ID NO: 5838001 - DNA, 25 bp, Homo sapien
cgcagcaaactgccgtgctggcagg

SEQ ID NO: 5838002 - DNA, 25 bp, Homo sapien
acagcaacgtcttgaacaggcgctg

SEQ ID NO: 5838003 - DNA, 25 bp, Homo sapien
cgtcttgaacaggcgctgatgaccc

SEQ ID NO: 5838004 - DNA, 25 bp, Homo sapien
ggtcgcgcggatcatgatgccaacc

SEQ ID NO: 5838005 - DNA, 25 bp, Homo sapien
acaggcgctgatgaccccggacacc

SEQ ID NO: 5838006 - DNA, 25 bp, Homo sapien
ggatcatgatgccaacctcttacgt

SEQ ID NO: 5838007 - DNA, 25 bp, Homo sapien
atattacaacgcggcagcattatga

SEQ ID NO: 5838008 - DNA, 25 bp, Homo sapien
tgccaacctcttacgtgcgcctttc

SEQ ID NO: 5838009 - DNA, 25 bp, Homo sapien
gcgcctttctgccggacgcgagcag

SEQ ID NO: 5838010 - DNA, 25 bp, Homo sapien
gccggacgcgagcagatgaacgaac

SEQ ID NO: 5838011 - DNA, 25 bp, Homo sapien
cgagcagatgaacgaacagactcag

SEQ ID NO: 5838012 - DNA, 25 bp, Homo sapien
gatgaacgaacagactcaggcgatg

SEQ ID NO: 5838013 - DNA, 25 bp, Homo sapien
aacagactcaggcgatgtgctttat

SEQ ID NO: 5838014 - DNA, 25 bp, Homo sapien
tcaggcgatgtgctttatggcaggc

SEQ ID NO: 5838015 - DNA, 25 bp, Homo sapien
gtgctttatggcaggcgcaaactcg

SEQ ID NO: 5838016 - DNA, 25 bp, Homo sapien
atggcaggcgcaaactcgattttct

SEQ ID NO: 5838017 - DNA, 25 bp, Homo sapien
tacggttgcaaactgctgaccacgc

SEQ ID NO: 5838018 - DNA, 25 bp, Homo sapien
caaactgctgaccacgccgaatccg

SEQ ID NO: 5838019 - DNA, 25 bp, Homo sapien
gacctgcaactgttccgcaaactgg

SEQ ID NO: 5838020 - DNA, 25 bp, Homo sapien
gggctaaatccgcagcaaactgccg

SEQ ID NO: 5838021 - DNA, 25 bp, Homo sapien
cgcagcaaactgccgtgctggcagg

SEQ ID NO: 5838022 - DNA, 25 bp, Homo sapien
acagcaacgtcttgaacaggcgctg

SEQ ID NO: 5838023 - DNA, 25 bp, Homo sapien
cgtcttgaacaggcgctgatgaccc

SEQ ID NO: 5838024 - DNA, 25 bp, Homo sapien
ggtcgcgcggatcatgatgccaacc

SEQ ID NO: 5838025 - DNA, 25 bp, Homo sapien
acaggcgctgatgaccccggacacc

SEQ ID NO: 5838026 - DNA, 25 bp, Homo sapien
ggatcatgatgccaacctcttacgt

SEQ ID NO: 5838027 - DNA, 25 bp, Homo sapien
atattacaacgcggcagcattatga

SEQ ID NO: 5838028 - DNA, 25 bp, Homo sapien
tgccaacctcttacgtgcgcctttc

SEQ ID NO: 5838029 - DNA, 25 bp, Homo sapien
gcgcctttctgccggacgcgagcag

SEQ ID NO: 5838030 - DNA, 25 bp, Homo sapien
gccggacgcgagcagatgaacgaac

SEQ ID NO: 5838031 - DNA, 25 bp, Homo sapien
cgagcagatgaacgaacagactcag

SEQ ID NO: 5838032 - DNA, 25 bp, Homo sapien
gatgaacgaacagactcaggcgatg

SEQ ID NO: 5838033 - DNA, 25 bp, Homo sapien
aacagactcaggcgatgtgctttat

SEQ ID NO: 5838034 - DNA, 25 bp, Homo sapien
tcaggcgatgtgctttatggcaggc

SEQ ID NO: 5838035 - DNA, 25 bp, Homo sapien
gtgctttatggcaggcgcaaactcg

SEQ ID NO: 5838036 - DNA, 25 bp, Homo sapien
atggcaggcgcaaactcgattttct

SEQ ID NO: 5838037 - DNA, 25 bp, Homo sapien
tacggttgcaaactgctgaccacgc

SEQ ID NO: 5838038 - DNA, 25 bp, Homo sapien
caaactgctgaccacgccgaatccg

SEQ ID NO: 5838039 - DNA, 25 bp, Homo sapien
gacctgcaactgttccgcaaactgg

SEQ ID NO: 5838040 - DNA, 25 bp, Homo sapien
gggctaaatccgcagcaaactgccg

SEQ ID NO: 5838041 - DNA, 25 bp, Homo sapien
cgcagcaaactgccgtgctggcagg

SEQ ID NO: 5838042 - DNA, 25 bp, Homo sapien
acagcaacgtcttgaacaggcgctg

SEQ ID NO: 5838043 - DNA, 25 bp, Homo sapien
cgtcttgaacaggcgctgatgaccc

SEQ ID NO: 5838044 - DNA, 25 bp, Homo sapien
ggtcgcgcggatcatgatgccaacc

SEQ ID NO: 5838045 - DNA, 25 bp, Homo sapien
acaggcgctgatgaccccggacacc

SEQ ID NO: 5838046 - DNA, 25 bp, Homo sapien
ggatcatgatgccaacctcttacgt

SEQ ID NO: 5838047 - DNA, 25 bp, Homo sapien
atattacaacgcggcagcattatga

SEQ ID NO: 5838048 - DNA, 25 bp, Homo sapien
tgccaacctcttacgtgcgcctttc

SEQ ID NO: 5838049 - DNA, 25 bp, Homo sapien
gcgcctttctgccggacgcgagcag

SEQ ID NO: 5838050 - DNA, 25 bp, Homo sapien
gccggacgcgagcagatgaacgaac

SEQ ID NO: 5838051 - DNA, 25 bp, Homo sapien
cgagcagatgaacgaacagactcag

SEQ ID NO: 5838052 - DNA, 25 bp, Homo sapien
gatgaacgaacagactcaggcgatg

SEQ ID NO: 5838053 - DNA, 25 bp, Homo sapien
aacagactcaggcgatgtgctttat

SEQ ID NO: 5838054 - DNA, 25 bp, Homo sapien
tcaggcgatgtgctttatggcaggc

SEQ ID NO: 5838055 - DNA, 25 bp, Homo sapien
gtgctttatggcaggcgcaaactcg

SEQ ID NO: 5838056 - DNA, 25 bp, Homo sapien
atggcaggcgcaaactcgattttct

SEQ ID NO: 5838057 - DNA, 25 bp, Homo sapien
tacggttgcaaactgctgaccacgc

SEQ ID NO: 5838058 - DNA, 25 bp, Homo sapien
caaactgctgaccacgccgaatccg

SEQ ID NO: 5838059 - DNA, 25 bp, Homo sapien
gacctgcaactgttccgcaaactgg

SEQ ID NO: 5838060 - DNA, 25 bp, Homo sapien
gggctaaatccgcagcaaactgccg

SEQ ID NO: 5838061 - DNA, 25 bp, Homo sapien
cgcagcaaactgccgtgctggcagg

SEQ ID NO: 5838062 - DNA, 25 bp, Homo sapien
acagcaacgtcttgaacaggcgctg

SEQ ID NO: 5838063 - DNA, 25 bp, Homo sapien
cgtcttgaacaggcgctgatgaccc

SEQ ID NO: 5838064 - DNA, 25 bp, Homo sapien
ggtcgcgcggatcatgatgccaacc

SEQ ID NO: 5838065 - DNA, 25 bp, Homo sapien
acaggcgctgatgaccccggacacc

SEQ ID NO: 5838066 - DNA, 25 bp, Homo sapien
ggatcatgatgccaacctcttacgt

SEQ ID NO: 5838067 - DNA, 25 bp, Homo sapien
atattacaacgcggcagcattatga

SEQ ID NO: 5838068 - DNA, 25 bp, Homo sapien
tgccaacctcttacgtgcgcctttc

SEQ ID NO: 5838069 - DNA, 25 bp, Homo sapien
gcgcctttctgccggacgcgagcag

SEQ ID NO: 5838070 - DNA, 25 bp, Homo sapien
gccggacgcgagcagatgaacgaac

SEQ ID NO: 5838071 - DNA, 25 bp, Homo sapien
cgagcagatgaacgaacagactcag

SEQ ID NO: 5838072 - DNA, 25 bp, Homo sapien
gatgaacgaacagactcaggcgatg

SEQ ID NO: 5838073 - DNA, 25 bp, Homo sapien
aacagactcaggcgatgtgctttat

SEQ ID NO: 5838074 - DNA, 25 bp, Homo sapien
tcaggcgatgtgctttatggcaggc

SEQ ID NO: 5838075 - DNA, 25 bp, Homo sapien
gtgctttatggcaggcgcaaactcg

SEQ ID NO: 5838076 - DNA, 25 bp, Homo sapien
atggcaggcgcaaactcgattttct

SEQ ID NO: 5838077 - DNA, 25 bp, Homo sapien
tacggttgcaaactgctgaccacgc

SEQ ID NO: 5838078 - DNA, 25 bp, Homo sapien
caaactgctgaccacgccgaatccg

SEQ ID NO: 5838079 - DNA, 25 bp, Homo sapien
gacctgcaactgttccgcaaactgg

SEQ ID NO: 5838080 - DNA, 25 bp, Homo sapien
gggctaaatccgcagcaaactgccg

SEQ ID NO: 5838081 - DNA, 25 bp, Homo sapien
cgcagcaaactgccgtgctggcagg

SEQ ID NO: 5838082 - DNA, 25 bp, Homo sapien
acagcaacgtcttgaacaggcgctg

SEQ ID NO: 5838083 - DNA, 25 bp, Homo sapien
cgtcttgaacaggcgctgatgaccc

SEQ ID NO: 5838084 - DNA, 25 bp, Homo sapien
ggtcgcgcggatcatgatgccaacc

SEQ ID NO: 5838085 - DNA, 25 bp, Homo sapien
acaggcgctgatgaccccggacacc

SEQ ID NO: 5838086 - DNA, 25 bp, Homo sapien
ggatcatgatgccaacctcttacgt

SEQ ID NO: 5838087 - DNA, 25 bp, Homo sapien
atattacaacgcggcagcattatga

SEQ ID NO: 5838088 - DNA, 25 bp, Homo sapien
tgccaacctcttacgtgcgcctttc

SEQ ID NO: 5838089 - DNA, 25 bp, Homo sapien
gcgcctttctgccggacgcgagcag

SEQ ID NO: 5838090 - DNA, 25 bp, Homo sapien
gccggacgcgagcagatgaacgaac

SEQ ID NO: 5838091 - DNA, 25 bp, Homo sapien
cgagcagatgaacgaacagactcag

SEQ ID NO: 5838092 - DNA, 25 bp, Homo sapien
gatgaacgaacagactcaggcgatg

SEQ ID NO: 5838093 - DNA, 25 bp, Homo sapien
aacagactcaggcgatgtgctttat

SEQ ID NO: 5838094 - DNA, 25 bp, Homo sapien
tcaggcgatgtgctttatggcaggc

SEQ ID NO: 5838095 - DNA, 25 bp, Homo sapien
gtgctttatggcaggcgcaaactcg

SEQ ID NO: 5838096 - DNA, 25 bp, Homo sapien
atggcaggcgcaaactcgattttct

SEQ ID NO: 5838097 - DNA, 25 bp, Homo sapien
tacggttgcaaactgctgaccacgc

SEQ ID NO: 5838098 - DNA, 25 bp, Homo sapien
caaactgctgaccacgccgaatccg

SEQ ID NO: 5838099 - DNA, 25 bp, Homo sapien
gacctgcaactgttccgcaaactgg

SEQ ID NO: 5838100 - DNA, 25 bp, Homo sapien
gggctaaatccgcagcaaactgccg

SEQ ID NO: 5838101 - DNA, 25 bp, Homo sapien
cgcagcaaactgccgtgctggcagg

SEQ ID NO: 5838102 - DNA, 25 bp, Homo sapien
acagcaacgtcttgaacaggcgctg

SEQ ID NO: 5838103 - DNA, 25 bp, Homo sapien
cgtcttgaacaggcgctgatgaccc

SEQ ID NO: 5838104 - DNA, 25 bp, Homo sapien
ggtcgcgcggatcatgatgccaacc

SEQ ID NO: 5838105 - DNA, 25 bp, Homo sapien
acaggcgctgatgaccccggacacc

SEQ ID NO: 5838106 - DNA, 25 bp, Homo sapien
ggatcatgatgccaacctcttacgt

SEQ ID NO: 5838107 - DNA, 25 bp, Homo sapien
atattacaacgcggcagcattatga

SEQ ID NO: 5838108 - DNA, 25 bp, Homo sapien
tgccaacctcttacgtgcgcctttc

SEQ ID NO: 5838109 - DNA, 25 bp, Homo sapien
gcgcctttctgccggacgcgagcag

SEQ ID NO: 5838110 - DNA, 25 bp, Homo sapien
gccggacgcgagcagatgaacgaac

SEQ ID NO: 5838111 - DNA, 25 bp, Homo sapien
cgagcagatgaacgaacagactcag

SEQ ID NO: 5838112 - DNA, 25 bp, Homo sapien
gatgaacgaacagactcaggcgatg

SEQ ID NO: 5838113 - DNA, 25 bp, Homo sapien
aacagactcaggcgatgtgctttat

SEQ ID NO: 5838114 - DNA, 25 bp, Homo sapien
tcaggcgatgtgctttatggcaggc

SEQ ID NO: 5838115 - DNA, 25 bp, Homo sapien
gtgctttatggcaggcgcaaactcg

SEQ ID NO: 5838116 - DNA, 25 bp, Homo sapien
atggcaggcgcaaactcgattttct

SEQ ID NO: 5838117 - DNA, 25 bp, Homo sapien
tacggttgcaaactgctgaccacgc

SEQ ID NO: 5838118 - DNA, 25 bp, Homo sapien
caaactgctgaccacgccgaatccg

SEQ ID NO: 5838119 - DNA, 25 bp, Homo sapien
gacctgcaactgttccgcaaactgg

SEQ ID NO: 5838120 - DNA, 25 bp, Homo sapien
gggctaaatccgcagcaaactgccg

SEQ ID NO: 5838121 - DNA, 25 bp, Homo sapien
cgcagcaaactgccgtgctggcagg

SEQ ID NO: 5838122 - DNA, 25 bp, Homo sapien
acagcaacgtcttgaacaggcgctg

SEQ ID NO: 5838123 - DNA, 25 bp, Homo sapien
cgtcttgaacaggcgctgatgaccc

SEQ ID NO: 5838124 - DNA, 25 bp, Homo sapien
ggtcgcgcggatcatgatgccaacc

SEQ ID NO: 5838125 - DNA, 25 bp, Homo sapien
acaggcgctgatgaccccggacacc

SEQ ID NO: 5838126 - DNA, 25 bp, Homo sapien
ggatcatgatgccaacctcttacgt

SEQ ID NO: 5838127 - DNA, 25 bp, Homo sapien
atattacaacgcggcagcattatga

SEQ ID NO: 5838128 - DNA, 25 bp, Homo sapien
tgccaacctcttacgtgcgcctttc

SEQ ID NO: 5838129 - DNA, 25 bp, Homo sapien
gcgcctttctgccggacgcgagcag

SEQ ID NO: 5838130 - DNA, 25 bp, Homo sapien
gccggacgcgagcagatgaacgaac

SEQ ID NO: 5838131 - DNA, 25 bp, Homo sapien
cgagcagatgaacgaacagactcag

SEQ ID NO: 5838132 - DNA, 25 bp, Homo sapien
gatgaacgaacagactcaggcgatg

SEQ ID NO: 5838133 - DNA, 25 bp, Homo sapien
aacagactcaggcgatgtgctttat

SEQ ID NO: 5838134 - DNA, 25 bp, Homo sapien
tcaggcgatgtgctttatggcaggc

SEQ ID NO: 5838135 - DNA, 25 bp, Homo sapien
gtgctttatggcaggcgcaaactcg

SEQ ID NO: 5838136 - DNA, 25 bp, Homo sapien
atggcaggcgcaaactcgattttct

SEQ ID NO: 5838137 - DNA, 25 bp, Homo sapien
tacggttgcaaactgctgaccacgc

SEQ ID NO: 5838138 - DNA, 25 bp, Homo sapien
caaactgctgaccacgccgaatccg

SEQ ID NO: 5838139 - DNA, 25 bp, Homo sapien
gacctgcaactgttccgcaaactgg

SEQ ID NO: 5838140 - DNA, 25 bp, Homo sapien
gggctaaatccgcagcaaactgccg

SEQ ID NO: 5838141 - DNA, 25 bp, Homo sapien
cgcagcaaactgccgtgctggcagg

SEQ ID NO: 5838142 - DNA, 25 bp, Homo sapien
acagcaacgtcttgaacaggcgctg

SEQ ID NO: 5838143 - DNA, 25 bp, Homo sapien
cgtcttgaacaggcgctgatgaccc

SEQ ID NO: 5838144 - DNA, 25 bp, Homo sapien
ggtcgcgcggatcatgatgccaacc

SEQ ID NO: 5838145 - DNA, 25 bp, Homo sapien
acaggcgctgatgaccccggacacc

SEQ ID NO: 5838146 - DNA, 25 bp, Homo sapien
ggatcatgatgccaacctcttacgt

SEQ ID NO: 5838147 - DNA, 25 bp, Homo sapien
atattacaacgcggcagcattatga

SEQ ID NO: 5838148 - DNA, 25 bp, Homo sapien
tgccaacctcttacgtgcgcctttc

SEQ ID NO: 5838149 - DNA, 25 bp, Homo sapien
gcgcctttctgccggacgcgagcag

SEQ ID NO: 5838150 - DNA, 25 bp, Homo sapien
gccggacgcgagcagatgaacgaac

SEQ ID NO: 5838151 - DNA, 25 bp, Homo sapien
cgagcagatgaacgaacagactcag

SEQ ID NO: 5838152 - DNA, 25 bp, Homo sapien
gatgaacgaacagactcaggcgatg

SEQ ID NO: 5838153 - DNA, 25 bp, Homo sapien
aacagactcaggcgatgtgctttat

SEQ ID NO: 5838154 - DNA, 25 bp, Homo sapien
tcaggcgatgtgctttatggcaggc

SEQ ID NO: 5838155 - DNA, 25 bp, Homo sapien
gtgctttatggcaggcgcaaactcg

SEQ ID NO: 5838156 - DNA, 25 bp, Homo sapien
atggcaggcgcaaactcgattttct

SEQ ID NO: 5838157 - DNA, 25 bp, Homo sapien
tacggttgcaaactgctgaccacgc

SEQ ID NO: 5838158 - DNA, 25 bp, Homo sapien
caaactgctgaccacgccgaatccg

SEQ ID NO: 5838159 - DNA, 25 bp, Homo sapien
gacctgcaactgttccgcaaactgg

SEQ ID NO: 5838160 - DNA, 25 bp, Homo sapien
gggctaaatccgcagcaaactgccg

SEQ ID NO: 5838161 - DNA, 25 bp, Homo sapien
cgcagcaaactgccgtgctggcagg

SEQ ID NO: 5838162 - DNA, 25 bp, Homo sapien
acagcaacgtcttgaacaggcgctg

SEQ ID NO: 5838163 - DNA, 25 bp, Homo sapien
cgtcttgaacaggcgctgatgaccc

SEQ ID NO: 5838164 - DNA, 25 bp, Homo sapien
ggtcgcgcggatcatgatgccaacc

SEQ ID NO: 5838165 - DNA, 25 bp, Homo sapien
acaggcgctgatgaccccggacacc

SEQ ID NO: 5838166 - DNA, 25 bp, Homo sapien
ggatcatgatgccaacctcttacgt

SEQ ID NO: 5838167 - DNA, 25 bp, Homo sapien
atattacaacgcggcagcattatga

SEQ ID NO: 5838168 - DNA, 25 bp, Homo sapien
tgccaacctcttacgtgcgcctttc

SEQ ID NO: 5838169 - DNA, 25 bp, Homo sapien
gcgcctttctgccggacgcgagcag

SEQ ID NO: 5838170 - DNA, 25 bp, Homo sapien
gccggacgcgagcagatgaacgaac

SEQ ID NO: 5838171 - DNA, 25 bp, Homo sapien
cgagcagatgaacgaacagactcag

SEQ ID NO: 5838172 - DNA, 25 bp, Homo sapien
gatgaacgaacagactcaggcgatg

SEQ ID NO: 5838173 - DNA, 25 bp, Homo sapien
aacagactcaggcgatgtgctttat

SEQ ID NO: 5838174 - DNA, 25 bp, Homo sapien
tcaggcgatgtgctttatggcaggc

SEQ ID NO: 5838175 - DNA, 25 bp, Homo sapien
gtgctttatggcaggcgcaaactcg

SEQ ID NO: 5838176 - DNA, 25 bp, Homo sapien
atggcaggcgcaaactcgattttct

SEQ ID NO: 5838177 - DNA, 25 bp, Homo sapien
tacggttgcaaactgctgaccacgc

SEQ ID NO: 5838178 - DNA, 25 bp, Homo sapien
caaactgctgaccacgccgaatccg

SEQ ID NO: 5838179 - DNA, 25 bp, Homo sapien
gacctgcaactgttccgcaaactgg

SEQ ID NO: 5838180 - DNA, 25 bp, Homo sapien
gggctaaatccgcagcaaactgccg

SEQ ID NO: 5838181 - DNA, 25 bp, Homo sapien
cgcagcaaactgccgtgctggcagg

SEQ ID NO: 5838182 - DNA, 25 bp, Homo sapien
acagcaacgtcttgaacaggcgctg

SEQ ID NO: 5838183 - DNA, 25 bp, Homo sapien
cgtcttgaacaggcgctgatgaccc

SEQ ID NO: 5838184 - DNA, 25 bp, Homo sapien
ggtcgcgcggatcatgatgccaacc

SEQ ID NO: 5838185 - DNA, 25 bp, Homo sapien
acaggcgctgatgaccccggacacc

SEQ ID NO: 5838186 - DNA, 25 bp, Homo sapien
ggatcatgatgccaacctcttacgt

SEQ ID NO: 5838187 - DNA, 25 bp, Homo sapien
atattacaacgcggcagcattatga

SEQ ID NO: 5838188 - DNA, 25 bp, Homo sapien
tgccaacctcttacgtgcgcctttc

SEQ ID NO: 5838189 - DNA, 25 bp, Homo sapien
gcgcctttctgccggacgcgagcag

SEQ ID NO: 5838190 - DNA, 25 bp, Homo sapien
gccggacgcgagcagatgaacgaac

SEQ ID NO: 5838191 - DNA, 25 bp, Homo sapien
cgagcagatgaacgaacagactcag

SEQ ID NO: 5838192 - DNA, 25 bp, Homo sapien
gatgaacgaacagactcaggcgatg

SEQ ID NO: 5838193 - DNA, 25 bp, Homo sapien
aacagactcaggcgatgtgctttat

SEQ ID NO: 5838194 - DNA, 25 bp, Homo sapien
tcaggcgatgtgctttatggcaggc

SEQ ID NO: 5838195 - DNA, 25 bp, Homo sapien
gtgctttatggcaggcgcaaactcg

SEQ ID NO: 5838196 - DNA, 25 bp, Homo sapien
atggcaggcgcaaactcgattttct

SEQ ID NO: 5838197 - DNA, 25 bp, Homo sapien
tacggttgcaaactgctgaccacgc

SEQ ID NO: 5838198 - DNA, 25 bp, Homo sapien
caaactgctgaccacgccgaatccg

SEQ ID NO: 5838199 - DNA, 25 bp, Homo sapien
gacctgcaactgttccgcaaactgg

SEQ ID NO: 5838200 - DNA, 25 bp, Homo sapien
gggctaaatccgcagcaaactgccg

SEQ ID NO: 5838201 - DNA, 25 bp, Homo sapien
cgcagcaaactgccgtgctggcagg

SEQ ID NO: 5838202 - DNA, 25 bp, Homo sapien
acagcaacgtcttgaacaggcgctg

SEQ ID NO: 5838203 - DNA, 25 bp, Homo sapien
cgtcttgaacaggcgctgatgaccc

SEQ ID NO: 5838204 - DNA, 25 bp, Homo sapien
ggtcgcgcggatcatgatgccaacc

SEQ ID NO: 5838205 - DNA, 25 bp, Homo sapien
acaggcgctgatgaccccggacacc

SEQ ID NO: 5838206 - DNA, 25 bp, Homo sapien
ggatcatgatgccaacctcttacgt

SEQ ID NO: 5838207 - DNA, 25 bp, Homo sapien
atattacaacgcggcagcattatga

SEQ ID NO: 5838208 - DNA, 25 bp, Homo sapien
tgccaacctcttacgtgcgcctttc

SEQ ID NO: 5838209 - DNA, 25 bp, Homo sapien
gcgcctttctgccggacgcgagcag

SEQ ID NO: 5838210 - DNA, 25 bp, Homo sapien
gccggacgcgagcagatgaacgaac

SEQ ID NO: 5838211 - DNA, 25 bp, Homo sapien
cgagcagatgaacgaacagactcag

SEQ ID NO: 5838212 - DNA, 25 bp, Homo sapien
gatgaacgaacagactcaggcgatg

SEQ ID NO: 5838213 - DNA, 25 bp, Homo sapien
aacagactcaggcgatgtgctttat

SEQ ID NO: 5838214 - DNA, 25 bp, Homo sapien
tcaggcgatgtgctttatggcaggc

SEQ ID NO: 5838215 - DNA, 25 bp, Homo sapien
gtgctttatggcaggcgcaaactcg

SEQ ID NO: 5838216 - DNA, 25 bp, Homo sapien
atggcaggcgcaaactcgattttct

SEQ ID NO: 5838217 - DNA, 25 bp, Homo sapien
tacggttgcaaactgctgaccacgc

SEQ ID NO: 5838218 - DNA, 25 bp, Homo sapien
caaactgctgaccacgccgaatccg

SEQ ID NO: 5838219 - DNA, 25 bp, Homo sapien
gacctgcaactgttccgcaaactgg

SEQ ID NO: 5838220 - DNA, 25 bp, Homo sapien
gggctaaatccgcagcaaactgccg

SEQ ID NO: 5838221 - DNA, 25 bp, Homo sapien
cgcagcaaactgccgtgctggcagg

SEQ ID NO: 5838222 - DNA, 25 bp, Homo sapien
acagcaacgtcttgaacaggcgctg

SEQ ID NO: 5838223 - DNA, 25 bp, Homo sapien
cgtcttgaacaggcgctgatgaccc

SEQ ID NO: 5838224 - DNA, 25 bp, Homo sapien
ggtcgcgcggatcatgatgccaacc

SEQ ID NO: 5838225 - DNA, 25 bp, Homo sapien
acaggcgctgatgaccccggacacc

SEQ ID NO: 5838226 - DNA, 25 bp, Homo sapien
ggatcatgatgccaacctcttacgt

SEQ ID NO: 5838227 - DNA, 25 bp, Homo sapien
atattacaacgcggcagcattatga

SEQ ID NO: 5838228 - DNA, 25 bp, Homo sapien
tgccaacctcttacgtgcgcctttc

SEQ ID NO: 5838229 - DNA, 25 bp, Homo sapien
gcgcctttctgccggacgcgagcag

SEQ ID NO: 5838230 - DNA, 25 bp, Homo sapien
gccggacgcgagcagatgaacgaac

SEQ ID NO: 5838231 - DNA, 25 bp, Homo sapien
cgagcagatgaacgaacagactcag

SEQ ID NO: 5838232 - DNA, 25 bp, Homo sapien
gatgaacgaacagactcaggcgatg

SEQ ID NO: 5838233 - DNA, 25 bp, Homo sapien
aacagactcaggcgatgtgctttat

SEQ ID NO: 5838234 - DNA, 25 bp, Homo sapien
tcaggcgatgtgctttatggcaggc

SEQ ID NO: 5838235 - DNA, 25 bp, Homo sapien
gtgctttatggcaggcgcaaactcg

SEQ ID NO: 5838236 - DNA, 25 bp, Homo sapien
atggcaggcgcaaactcgattttct

SEQ ID NO: 5838237 - DNA, 25 bp, Homo sapien
tacggttgcaaactgctgaccacgc

SEQ ID NO: 5838238 - DNA, 25 bp, Homo sapien
caaactgctgaccacgccgaatccg

SEQ ID NO: 5838239 - DNA, 25 bp, Homo sapien
gacctgcaactgttccgcaaactgg

SEQ ID NO: 5838240 - DNA, 25 bp, Homo sapien
gggctaaatccgcagcaaactgccg

SEQ ID NO: 5838241 - DNA, 25 bp, Homo sapien
cgcagcaaactgccgtgctggcagg

SEQ ID NO: 5838242 - DNA, 25 bp, Homo sapien
acagcaacgtcttgaacaggcgctg

SEQ ID NO: 5838243 - DNA, 25 bp, Homo sapien
cgtcttgaacaggcgctgatgaccc

SEQ ID NO: 5838244 - DNA, 25 bp, Homo sapien
ggtcgcgcggatcatgatgccaacc

SEQ ID NO: 5838245 - DNA, 25 bp, Homo sapien
acaggcgctgatgaccccggacacc

SEQ ID NO: 5838246 - DNA, 25 bp, Homo sapien
ggatcatgatgccaacctcttacgt

SEQ ID NO: 5838247 - DNA, 25 bp, Homo sapien
atattacaacgcggcagcattatga

SEQ ID NO: 5838248 - DNA, 25 bp, Homo sapien
tgccaacctcttacgtgcgcctttc

SEQ ID NO: 5838249 - DNA, 25 bp, Homo sapien
gcgcctttctgccggacgcgagcag

SEQ ID NO: 5838250 - DNA, 25 bp, Homo sapien
gccggacgcgagcagatgaacgaac

SEQ ID NO: 5838251 - DNA, 25 bp, Homo sapien
cgagcagatgaacgaacagactcag

SEQ ID NO: 5838252 - DNA, 25 bp, Homo sapien
gatgaacgaacagactcaggcgatg

SEQ ID NO: 5838253 - DNA, 25 bp, Homo sapien
aacagactcaggcgatgtgctttat

SEQ ID NO: 5838254 - DNA, 25 bp, Homo sapien
tcaggcgatgtgctttatggcaggc

SEQ ID NO: 5838255 - DNA, 25 bp, Homo sapien
gtgctttatggcaggcgcaaactcg

SEQ ID NO: 5838256 - DNA, 25 bp, Homo sapien
atggcaggcgcaaactcgattttct

SEQ ID NO: 5838257 - DNA, 25 bp, Homo sapien
tacggttgcaaactgctgaccacgc

SEQ ID NO: 5838258 - DNA, 25 bp, Homo sapien
caaactgctgaccacgccgaatccg

SEQ ID NO: 5838259 - DNA, 25 bp, Homo sapien
gacctgcaactgttccgcaaactgg

SEQ ID NO: 5838260 - DNA, 25 bp, Homo sapien
gggctaaatccgcagcaaactgccg

SEQ ID NO: 5838261 - DNA, 25 bp, Homo sapien
cgcagcaaactgccgtgctggcagg

SEQ ID NO: 5838262 - DNA, 25 bp, Homo sapien
acagcaacgtcttgaacaggcgctg

SEQ ID NO: 5838263 - DNA, 25 bp, Homo sapien
cgtcttgaacaggcgctgatgaccc

SEQ ID NO: 5838264 - DNA, 25 bp, Homo sapien
ggtcgcgcggatcatgatgccaacc

SEQ ID NO: 5838265 - DNA, 25 bp, Homo sapien
acaggcgctgatgaccccggacacc

SEQ ID NO: 5838266 - DNA, 25 bp, Homo sapien
ggatcatgatgccaacctcttacgt

SEQ ID NO: 5838267 - DNA, 25 bp, Homo sapien
atattacaacgcggcagcattatga

SEQ ID NO: 5838268 - DNA, 25 bp, Homo sapien
tgccaacctcttacgtgcgcctttc

SEQ ID NO: 5838269 - DNA, 25 bp, Homo sapien
gcgcctttctgccggacgcgagcag

SEQ ID NO: 5838270 - DNA, 25 bp, Homo sapien
gccggacgcgagcagatgaacgaac

SEQ ID NO: 5838271 - DNA, 25 bp, Homo sapien
cgagcagatgaacgaacagactcag

SEQ ID NO: 5838272 - DNA, 25 bp, Homo sapien
gatgaacgaacagactcaggcgatg

SEQ ID NO: 5838273 - DNA, 25 bp, Homo sapien
aacagactcaggcgatgtgctttat

SEQ ID NO: 5838274 - DNA, 25 bp, Homo sapien
tcaggcgatgtgctttatggcaggc

SEQ ID NO: 5838275 - DNA, 25 bp, Homo sapien
gtgctttatggcaggcgcaaactcg

SEQ ID NO: 5838276 - DNA, 25 bp, Homo sapien
atggcaggcgcaaactcgattttct

SEQ ID NO: 5838277 - DNA, 25 bp, Homo sapien
tacggttgcaaactgctgaccacgc

SEQ ID NO: 5838278 - DNA, 25 bp, Homo sapien
caaactgctgaccacgccgaatccg

SEQ ID NO: 5838279 - DNA, 25 bp, Homo sapien
gacctgcaactgttccgcaaactgg

SEQ ID NO: 5838280 - DNA, 25 bp, Homo sapien
gggctaaatccgcagcaaactgccg

SEQ ID NO: 5838281 - DNA, 25 bp, Homo sapien
cgcagcaaactgccgtgctggcagg

SEQ ID NO: 5838282 - DNA, 25 bp, Homo sapien
acagcaacgtcttgaacaggcgctg

SEQ ID NO: 5838283 - DNA, 25 bp, Homo sapien
cgtcttgaacaggcgctgatgaccc

SEQ ID NO: 5838284 - DNA, 25 bp, Homo sapien
ggtcgcgcggatcatgatgccaacc

SEQ ID NO: 5838285 - DNA, 25 bp, Homo sapien
acaggcgctgatgaccccggacacc

SEQ ID NO: 5838286 - DNA, 25 bp, Homo sapien
ggatcatgatgccaacctcttacgt

SEQ ID NO: 5838287 - DNA, 25 bp, Homo sapien
atattacaacgcggcagcattatga

SEQ ID NO: 5838288 - DNA, 25 bp, Homo sapien
tgccaacctcttacgtgcgcctttc

SEQ ID NO: 5838289 - DNA, 25 bp, Homo sapien
gcgcctttctgccggacgcgagcag

SEQ ID NO: 5838290 - DNA, 25 bp, Homo sapien
gccggacgcgagcagatgaacgaac

SEQ ID NO: 5838291 - DNA, 25 bp, Homo sapien
cgagcagatgaacgaacagactcag

SEQ ID NO: 5838292 - DNA, 25 bp, Homo sapien
gatgaacgaacagactcaggcgatg

SEQ ID NO: 5838293 - DNA, 25 bp, Homo sapien
aacagactcaggcgatgtgctttat

SEQ ID NO: 5838294 - DNA, 25 bp, Homo sapien
tcaggcgatgtgctttatggcaggc

SEQ ID NO: 5838295 - DNA, 25 bp, Homo sapien
gtgctttatggcaggcgcaaactcg

SEQ ID NO: 5838296 - DNA, 25 bp, Homo sapien
atggcaggcgcaaactcgattttct

SEQ ID NO: 5838297 - DNA, 25 bp, Homo sapien
tacggttgcaaactgctgaccacgc

SEQ ID NO: 5838298 - DNA, 25 bp, Homo sapien
caaactgctgaccacgccgaatccg

SEQ ID NO: 5838299 - DNA, 25 bp, Homo sapien
gacctgcaactgttccgcaaactgg

SEQ ID NO: 5838300 - DNA, 25 bp, Homo sapien
gggctaaatccgcagcaaactgccg

SEQ ID NO: 5838301 - DNA, 25 bp, Homo sapien
cgcagcaaactgccgtgctggcagg

SEQ ID NO: 5838302 - DNA, 25 bp, Homo sapien
acagcaacgtcttgaacaggcgctg

SEQ ID NO: 5838303 - DNA, 25 bp, Homo sapien
cgtcttgaacaggcgctgatgaccc

SEQ ID NO: 5838304 - DNA, 25 bp, Homo sapien
ggtcgcgcggatcatgatgccaacc

SEQ ID NO: 5838305 - DNA, 25 bp, Homo sapien
acaggcgctgatgaccccggacacc

SEQ ID NO: 5838306 - DNA, 25 bp, Homo sapien
ggatcatgatgccaacctcttacgt

SEQ ID NO: 5838307 - DNA, 25 bp, Homo sapien
atattacaacgcggcagcattatga

SEQ ID NO: 5838308 - DNA, 25 bp, Homo sapien
tgccaacctcttacgtgcgcctttc

SEQ ID NO: 5838309 - DNA, 25 bp, Homo sapien
gcgcctttctgccggacgcgagcag

SEQ ID NO: 5838310 - DNA, 25 bp, Homo sapien
gccggacgcgagcagatgaacgaac

SEQ ID NO: 5838311 - DNA, 25 bp, Homo sapien
cgagcagatgaacgaacagactcag

SEQ ID NO: 5838312 - DNA, 25 bp, Homo sapien
gatgaacgaacagactcaggcgatg

SEQ ID NO: 5838313 - DNA, 25 bp, Homo sapien
aacagactcaggcgatgtgctttat

SEQ ID NO: 5838314 - DNA, 25 bp, Homo sapien
tcaggcgatgtgctttatggcaggc

SEQ ID NO: 5838315 - DNA, 25 bp, Homo sapien
gtgctttatggcaggcgcaaactcg

SEQ ID NO: 5838316 - DNA, 25 bp, Homo sapien
atggcaggcgcaaactcgattttct

SEQ ID NO: 5838317 - DNA, 25 bp, Homo sapien
tacggttgcaaactgctgaccacgc

SEQ ID NO: 5838318 - DNA, 25 bp, Homo sapien
caaactgctgaccacgccgaatccg

SEQ ID NO: 5838319 - DNA, 25 bp, Homo sapien
gacctgcaactgttccgcaaactgg

SEQ ID NO: 5838320 - DNA, 25 bp, Homo sapien
gggctaaatccgcagcaaactgccg

SEQ ID NO: 5838321 - DNA, 25 bp, Homo sapien
cgcagcaaactgccgtgctggcagg

SEQ ID NO: 5838322 - DNA, 25 bp, Homo sapien
acagcaacgtcttgaacaggcgctg

SEQ ID NO: 5838323 - DNA, 25 bp, Homo sapien
cgtcttgaacaggcgctgatgaccc

SEQ ID NO: 5838324 - DNA, 25 bp, Homo sapien
ggtcgcgcggatcatgatgccaacc

SEQ ID NO: 5838325 - DNA, 25 bp, Homo sapien
acaggcgctgatgaccccggacacc

SEQ ID NO: 5838326 - DNA, 25 bp, Homo sapien
ggatcatgatgccaacctcttacgt

SEQ ID NO: 5838327 - DNA, 25 bp, Homo sapien
atattacaacgcggcagcattatga

SEQ ID NO: 5838328 - DNA, 25 bp, Homo sapien
tgccaacctcttacgtgcgcctttc

SEQ ID NO: 5838329 - DNA, 25 bp, Homo sapien
gcgcctttctgccggacgcgagcag

SEQ ID NO: 5838330 - DNA, 25 bp, Homo sapien
gccggacgcgagcagatgaacgaac

SEQ ID NO: 5838331 - DNA, 25 bp, Homo sapien
cgagcagatgaacgaacagactcag

SEQ ID NO: 5838332 - DNA, 25 bp, Homo sapien
gatgaacgaacagactcaggcgatg

SEQ ID NO: 5838333 - DNA, 25 bp, Homo sapien
aacagactcaggcgatgtgctttat

SEQ ID NO: 5838334 - DNA, 25 bp, Homo sapien
tcaggcgatgtgctttatggcaggc

SEQ ID NO: 5838335 - DNA, 25 bp, Homo sapien
gtgctttatggcaggcgcaaactcg

SEQ ID NO: 5838336 - DNA, 25 bp, Homo sapien
atggcaggcgcaaactcgattttct

SEQ ID NO: 5838337 - DNA, 25 bp, Homo sapien
tacggttgcaaactgctgaccacgc

SEQ ID NO: 5838338 - DNA, 25 bp, Homo sapien
caaactgctgaccacgccgaatccg

SEQ ID NO: 5838339 - DNA, 25 bp, Homo sapien
gacctgcaactgttccgcaaactgg

SEQ ID NO: 5838340 - DNA, 25 bp, Homo sapien
gggctaaatccgcagcaaactgccg

SEQ ID NO: 5838341 - DNA, 25 bp, Homo sapien
cgcagcaaactgccgtgctggcagg

SEQ ID NO: 5838342 - DNA, 25 bp, Homo sapien
acagcaacgtcttgaacaggcgctg

SEQ ID NO: 5838343 - DNA, 25 bp, Homo sapien
cgtcttgaacaggcgctgatgaccc

SEQ ID NO: 5838344 - DNA, 25 bp, Homo sapien
ggtcgcgcggatcatgatgccaacc

SEQ ID NO: 5838345 - DNA, 25 bp, Homo sapien
acaggcgctgatgaccccggacacc

SEQ ID NO: 5838346 - DNA, 25 bp, Homo sapien
ggatcatgatgccaacctcttacgt

SEQ ID NO: 5838347 - DNA, 25 bp, Homo sapien
atattacaacgcggcagcattatga

SEQ ID NO: 5838348 - DNA, 25 bp, Homo sapien
tgccaacctcttacgtgcgcctttc

SEQ ID NO: 5838349 - DNA, 25 bp, Homo sapien
gcgcctttctgccggacgcgagcag

SEQ ID NO: 5838350 - DNA, 25 bp, Homo sapien
gccggacgcgagcagatgaacgaac

SEQ ID NO: 5838351 - DNA, 25 bp, Homo sapien
cgagcagatgaacgaacagactcag

SEQ ID NO: 5838352 - DNA, 25 bp, Homo sapien
gatgaacgaacagactcaggcgatg

SEQ ID NO: 5838353 - DNA, 25 bp, Homo sapien
aacagactcaggcgatgtgctttat

SEQ ID NO: 5838354 - DNA, 25 bp, Homo sapien
tcaggcgatgtgctttatggcaggc

SEQ ID NO: 5838355 - DNA, 25 bp, Homo sapien
gtgctttatggcaggcgcaaactcg

SEQ ID NO: 5838356 - DNA, 25 bp, Homo sapien
atggcaggcgcaaactcgattttct

SEQ ID NO: 5838357 - DNA, 25 bp, Homo sapien
tacggttgcaaactgctgaccacgc

SEQ ID NO: 5838358 - DNA, 25 bp, Homo sapien
caaactgctgaccacgccgaatccg

SEQ ID NO: 5838359 - DNA, 25 bp, Homo sapien
gacctgcaactgttccgcaaactgg

SEQ ID NO: 5838360 - DNA, 25 bp, Homo sapien
gacattgtcgcaagtcacagaatta

SEQ ID NO: 5838361 - DNA, 25 bp, Homo sapien
caaagcgaaagcggcaggatcgacg

SEQ ID NO: 5838362 - DNA, 25 bp, Homo sapien
attgtcgcaagtcacagaattattt

SEQ ID NO: 5838363 - DNA, 25 bp, Homo sapien
ggcaggatcgacgcgcttctgtatg

SEQ ID NO: 5838364 - DNA, 25 bp, Homo sapien
gttgctggatctgctgtttgaagcg

SEQ ID NO: 5838365 - DNA, 25 bp, Homo sapien
ggatctgctgtttgaagcgcagcag

SEQ ID NO: 5838366 - DNA, 25 bp, Homo sapien
gcgcagcaggtgcatcgccagcatt

SEQ ID NO: 5838367 - DNA, 25 bp, Homo sapien
gcaggtgcatcgccagcatttcgat

SEQ ID NO: 5838368 - DNA, 25 bp, Homo sapien
gcatcgccagcatttcgatcctcgt

SEQ ID NO: 5838369 - DNA, 25 bp, Homo sapien
gcatttcgatcctcgtcaggtgcag

SEQ ID NO: 5838370 - DNA, 25 bp, Homo sapien
cgatcctcgtcaggtgcaggtcagc

SEQ ID NO: 5838371 - DNA, 25 bp, Homo sapien
tcgtcaggtgcaggtcagcacgttg

SEQ ID NO: 5838372 - DNA, 25 bp, Homo sapien
gcaggtcagcacgttgctgtcgatt

SEQ ID NO: 5838373 - DNA, 25 bp, Homo sapien
cagcacgttgctgtcgattaagacc

SEQ ID NO: 5838374 - DNA, 25 bp, Homo sapien
gctgtcgattaagaccggagcttgt

SEQ ID NO: 5838375 - DNA, 25 bp, Homo sapien
agcttgtccggaagattgcaaatac

SEQ ID NO: 5838376 - DNA, 25 bp, Homo sapien
agattgcaaatactgcccgcaaacg

SEQ ID NO: 5838377 - DNA, 25 bp, Homo sapien
caaatactgcccgcaaacgtcgcgc

SEQ ID NO: 5838378 - DNA, 25 bp, Homo sapien
tgaacaggtgctggagtcggcgcgc

SEQ ID NO: 5838379 - DNA, 25 bp, Homo sapien
ggagtcggcgcgcaaagcgaaagcg

SEQ ID NO: 5838380 - DNA, 25 bp, Homo sapien
gacattgtcgcaagtcacagaatta

SEQ ID NO: 5838381 - DNA, 25 bp, Homo sapien
caaagcgaaagcggcaggatcgacg

SEQ ID NO: 5838382 - DNA, 25 bp, Homo sapien
attgtcgcaagtcacagaattattt

SEQ ID NO: 5838383 - DNA, 25 bp, Homo sapien
ggcaggatcgacgcgcttctgtatg

SEQ ID NO: 5838384 - DNA, 25 bp, Homo sapien
gttgctggatctgctgtttgaagcg

SEQ ID NO: 5838385 - DNA, 25 bp, Homo sapien
ggatctgctgtttgaagcgcagcag

SEQ ID NO: 5838386 - DNA, 25 bp, Homo sapien
gcgcagcaggtgcatcgccagcatt

SEQ ID NO: 5838387 - DNA, 25 bp, Homo sapien
gcaggtgcatcgccagcatttcgat

SEQ ID NO: 5838388 - DNA, 25 bp, Homo sapien
gcatcgccagcatttcgatcctcgt

SEQ ID NO: 5838389 - DNA, 25 bp, Homo sapien
gcatttcgatcctcgtcaggtgcag

SEQ ID NO: 5838390 - DNA, 25 bp, Homo sapien
cgatcctcgtcaggtgcaggtcagc

SEQ ID NO: 5838391 - DNA, 25 bp, Homo sapien
tcgtcaggtgcaggtcagcacgttg

SEQ ID NO: 5838392 - DNA, 25 bp, Homo sapien
gcaggtcagcacgttgctgtcgatt

SEQ ID NO: 5838393 - DNA, 25 bp, Homo sapien
cagcacgttgctgtcgattaagacc

SEQ ID NO: 5838394 - DNA, 25 bp, Homo sapien
gctgtcgattaagaccggagcttgt

SEQ ID NO: 5838395 - DNA, 25 bp, Homo sapien
agcttgtccggaagattgcaaatac

SEQ ID NO: 5838396 - DNA, 25 bp, Homo sapien
agattgcaaatactgcccgcaaacg

SEQ ID NO: 5838397 - DNA, 25 bp, Homo sapien
caaatactgcccgcaaacgtcgcgc

SEQ ID NO: 5838398 - DNA, 25 bp, Homo sapien
tgaacaggtgctggagtcggcgcgc

SEQ ID NO: 5838399 - DNA, 25 bp, Homo sapien
ggagtcggcgcgcaaagcgaaagcg

SEQ ID NO: 5838400 - DNA, 25 bp, Homo sapien
gacattgtcgcaagtcacagaatta

SEQ ID NO: 5838401 - DNA, 25 bp, Homo sapien
caaagcgaaagcggcaggatcgacg

SEQ ID NO: 5838402 - DNA, 25 bp, Homo sapien
attgtcgcaagtcacagaattattt

SEQ ID NO: 5838403 - DNA, 25 bp, Homo sapien
ggcaggatcgacgcgcttctgtatg

SEQ ID NO: 5838404 - DNA, 25 bp, Homo sapien
gttgctggatctgctgtttgaagcg

SEQ ID NO: 5838405 - DNA, 25 bp, Homo sapien
ggatctgctgtttgaagcgcagcag

SEQ ID NO: 5838406 - DNA, 25 bp, Homo sapien
gcgcagcaggtgcatcgccagcatt

SEQ ID NO: 5838407 - DNA, 25 bp, Homo sapien
gcaggtgcatcgccagcatttcgat

SEQ ID NO: 5838408 - DNA, 25 bp, Homo sapien
gcatcgccagcatttcgatcctcgt

SEQ ID NO: 5838409 - DNA, 25 bp, Homo sapien
gcatttcgatcctcgtcaggtgcag

SEQ ID NO: 5838410 - DNA, 25 bp, Homo sapien
cgatcctcgtcaggtgcaggtcagc

SEQ ID NO: 5838411 - DNA, 25 bp, Homo sapien
tcgtcaggtgcaggtcagcacgttg

SEQ ID NO: 5838412 - DNA, 25 bp, Homo sapien
gcaggtcagcacgttgctgtcgatt

SEQ ID NO: 5838413 - DNA, 25 bp, Homo sapien
cagcacgttgctgtcgattaagacc

SEQ ID NO: 5838414 - DNA, 25 bp, Homo sapien
gctgtcgattaagaccggagcttgt

SEQ ID NO: 5838415 - DNA, 25 bp, Homo sapien
agcttgtccggaagattgcaaatac

SEQ ID NO: 5838416 - DNA, 25 bp, Homo sapien
agattgcaaatactgcccgcaaacg

SEQ ID NO: 5838417 - DNA, 25 bp, Homo sapien
caaatactgcccgcaaacgtcgcgc

SEQ ID NO: 5838418 - DNA, 25 bp, Homo sapien
tgaacaggtgctggagtcggcgcgc

SEQ ID NO: 5838419 - DNA, 25 bp, Homo sapien
ggagtcggcgcgcaaagcgaaagcg

SEQ ID NO: 5838420 - DNA, 25 bp, Homo sapien
gacattgtcgcaagtcacagaatta

SEQ ID NO: 5838421 - DNA, 25 bp, Homo sapien
caaagcgaaagcggcaggatcgacg

SEQ ID NO: 5838422 - DNA, 25 bp, Homo sapien
attgtcgcaagtcacagaattattt

SEQ ID NO: 5838423 - DNA, 25 bp, Homo sapien
ggcaggatcgacgcgcttctgtatg

SEQ ID NO: 5838424 - DNA, 25 bp, Homo sapien
gttgctggatctgctgtttgaagcg

SEQ ID NO: 5838425 - DNA, 25 bp, Homo sapien
ggatctgctgtttgaagcgcagcag

SEQ ID NO: 5838426 - DNA, 25 bp, Homo sapien
gcgcagcaggtgcatcgccagcatt

SEQ ID NO: 5838427 - DNA, 25 bp, Homo sapien
gcaggtgcatcgccagcatttcgat

SEQ ID NO: 5838428 - DNA, 25 bp, Homo sapien
gcatcgccagcatttcgatcctcgt

SEQ ID NO: 5838429 - DNA, 25 bp, Homo sapien
gcatttcgatcctcgtcaggtgcag

SEQ ID NO: 5838430 - DNA, 25 bp, Homo sapien
cgatcctcgtcaggtgcaggtcagc

SEQ ID NO: 5838431 - DNA, 25 bp, Homo sapien
tcgtcaggtgcaggtcagcacgttg

SEQ ID NO: 5838432 - DNA, 25 bp, Homo sapien
gcaggtcagcacgttgctgtcgatt

SEQ ID NO: 5838433 - DNA, 25 bp, Homo sapien
cagcacgttgctgtcgattaagacc

SEQ ID NO: 5838434 - DNA, 25 bp, Homo sapien
gctgtcgattaagaccggagcttgt

SEQ ID NO: 5838435 - DNA, 25 bp, Homo sapien
agcttgtccggaagattgcaaatac

SEQ ID NO: 5838436 - DNA, 25 bp, Homo sapien
agattgcaaatactgcccgcaaacg

SEQ ID NO: 5838437 - DNA, 25 bp, Homo sapien
caaatactgcccgcaaacgtcgcgc

SEQ ID NO: 5838438 - DNA, 25 bp, Homo sapien
tgaacaggtgctggagtcggcgcgc

SEQ ID NO: 5838439 - DNA, 25 bp, Homo sapien
ggagtcggcgcgcaaagcgaaagcg

SEQ ID NO: 5838440 - DNA, 25 bp, Homo sapien
gacattgtcgcaagtcacagaatta

SEQ ID NO: 5838441 - DNA, 25 bp, Homo sapien
caaagcgaaagcggcaggatcgacg

SEQ ID NO: 5838442 - DNA, 25 bp, Homo sapien
attgtcgcaagtcacagaattattt

SEQ ID NO: 5838443 - DNA, 25 bp, Homo sapien
ggcaggatcgacgcgcttctgtatg

SEQ ID NO: 5838444 - DNA, 25 bp, Homo sapien
gttgctggatctgctgtttgaagcg

SEQ ID NO: 5838445 - DNA, 25 bp, Homo sapien
ggatctgctgtttgaagcgcagcag

SEQ ID NO: 5838446 - DNA, 25 bp, Homo sapien
gcgcagcaggtgcatcgccagcatt

SEQ ID NO: 5838447 - DNA, 25 bp, Homo sapien
gcaggtgcatcgccagcatttcgat

SEQ ID NO: 5838448 - DNA, 25 bp, Homo sapien
gcatcgccagcatttcgatcctcgt

SEQ ID NO: 5838449 - DNA, 25 bp, Homo sapien
gcatttcgatcctcgtcaggtgcag

SEQ ID NO: 5838450 - DNA, 25 bp, Homo sapien
cgatcctcgtcaggtgcaggtcagc

SEQ ID NO: 5838451 - DNA, 25 bp, Homo sapien
tcgtcaggtgcaggtcagcacgttg

SEQ ID NO: 5838452 - DNA, 25 bp, Homo sapien
gcaggtcagcacgttgctgtcgatt

SEQ ID NO: 5838453 - DNA, 25 bp, Homo sapien
cagcacgttgctgtcgattaagacc

SEQ ID NO: 5838454 - DNA, 25 bp, Homo sapien
gctgtcgattaagaccggagcttgt

SEQ ID NO: 5838455 - DNA, 25 bp, Homo sapien
agcttgtccggaagattgcaaatac

SEQ ID NO: 5838456 - DNA, 25 bp, Homo sapien
agattgcaaatactgcccgcaaacg

SEQ ID NO: 5838457 - DNA, 25 bp, Homo sapien
caaatactgcccgcaaacgtcgcgc

SEQ ID NO: 5838458 - DNA, 25 bp, Homo sapien
tgaacaggtgctggagtcggcgcgc

SEQ ID NO: 5838459 - DNA, 25 bp, Homo sapien
ggagtcggcgcgcaaagcgaaagcg

SEQ ID NO: 5838460 - DNA, 25 bp, Homo sapien
gacattgtcgcaagtcacagaatta

SEQ ID NO: 5838461 - DNA, 25 bp, Homo sapien
caaagcgaaagcggcaggatcgacg

SEQ ID NO: 5838462 - DNA, 25 bp, Homo sapien
attgtcgcaagtcacagaattattt

SEQ ID NO: 5838463 - DNA, 25 bp, Homo sapien
ggcaggatcgacgcgcttctgtatg

SEQ ID NO: 5838464 - DNA, 25 bp, Homo sapien
gttgctggatctgctgtttgaagcg

SEQ ID NO: 5838465 - DNA, 25 bp, Homo sapien
ggatctgctgtttgaagcgcagcag

SEQ ID NO: 5838466 - DNA, 25 bp, Homo sapien
gcgcagcaggtgcatcgccagcatt

SEQ ID NO: 5838467 - DNA, 25 bp, Homo sapien
gcaggtgcatcgccagcatttcgat

SEQ ID NO: 5838468 - DNA, 25 bp, Homo sapien
gcatcgccagcatttcgatcctcgt

SEQ ID NO: 5838469 - DNA, 25 bp, Homo sapien
gcatttcgatcctcgtcaggtgcag

SEQ ID NO: 5838470 - DNA, 25 bp, Homo sapien
cgatcctcgtcaggtgcaggtcagc

SEQ ID NO: 5838471 - DNA, 25 bp, Homo sapien
tcgtcaggtgcaggtcagcacgttg

SEQ ID NO: 5838472 - DNA, 25 bp, Homo sapien
gcaggtcagcacgttgctgtcgatt

SEQ ID NO: 5838473 - DNA, 25 bp, Homo sapien
cagcacgttgctgtcgattaagacc

SEQ ID NO: 5838474 - DNA, 25 bp, Homo sapien
gctgtcgattaagaccggagcttgt

SEQ ID NO: 5838475 - DNA, 25 bp, Homo sapien
agcttgtccggaagattgcaaatac

SEQ ID NO: 5838476 - DNA, 25 bp, Homo sapien
agattgcaaatactgcccgcaaacg

SEQ ID NO: 5838477 - DNA, 25 bp, Homo sapien
caaatactgcccgcaaacgtcgcgc

SEQ ID NO: 5838478 - DNA, 25 bp, Homo sapien
tgaacaggtgctggagtcggcgcgc

SEQ ID NO: 5838479 - DNA, 25 bp, Homo sapien
ggagtcggcgcgcaaagcgaaagcg

SEQ ID NO: 5838480 - DNA, 25 bp, Homo sapien
gacattgtcgcaagtcacagaatta

SEQ ID NO: 5838481 - DNA, 25 bp, Homo sapien
caaagcgaaagcggcaggatcgacg

SEQ ID NO: 5838482 - DNA, 25 bp, Homo sapien
attgtcgcaagtcacagaattattt

SEQ ID NO: 5838483 - DNA, 25 bp, Homo sapien
ggcaggatcgacgcgcttctgtatg

SEQ ID NO: 5838484 - DNA, 25 bp, Homo sapien
gttgctggatctgctgtttgaagcg

SEQ ID NO: 5838485 - DNA, 25 bp, Homo sapien
ggatctgctgtttgaagcgcagcag

SEQ ID NO: 5838486 - DNA, 25 bp, Homo sapien
gcgcagcaggtgcatcgccagcatt

SEQ ID NO: 5838487 - DNA, 25 bp, Homo sapien
gcaggtgcatcgccagcatttcgat

SEQ ID NO: 5838488 - DNA, 25 bp, Homo sapien
gcatcgccagcatttcgatcctcgt

SEQ ID NO: 5838489 - DNA, 25 bp, Homo sapien
gcatttcgatcctcgtcaggtgcag

SEQ ID NO: 5838490 - DNA, 25 bp, Homo sapien
cgatcctcgtcaggtgcaggtcagc

SEQ ID NO: 5838491 - DNA, 25 bp, Homo sapien
tcgtcaggtgcaggtcagcacgttg

SEQ ID NO: 5838492 - DNA, 25 bp, Homo sapien
gcaggtcagcacgttgctgtcgatt

SEQ ID NO: 5838493 - DNA, 25 bp, Homo sapien
cagcacgttgctgtcgattaagacc

SEQ ID NO: 5838494 - DNA, 25 bp, Homo sapien
gctgtcgattaagaccggagcttgt

SEQ ID NO: 5838495 - DNA, 25 bp, Homo sapien
agcttgtccggaagattgcaaatac

SEQ ID NO: 5838496 - DNA, 25 bp, Homo sapien
agattgcaaatactgcccgcaaacg

SEQ ID NO: 5838497 - DNA, 25 bp, Homo sapien
caaatactgcccgcaaacgtcgcgc

SEQ ID NO: 5838498 - DNA, 25 bp, Homo sapien
tgaacaggtgctggagtcggcgcgc

SEQ ID NO: 5838499 - DNA, 25 bp, Homo sapien
ggagtcggcgcgcaaagcgaaagcg

SEQ ID NO: 5838500 - DNA, 25 bp, Homo sapien
gacattgtcgcaagtcacagaatta

SEQ ID NO: 5838501 - DNA, 25 bp, Homo sapien
caaagcgaaagcggcaggatcgacg

SEQ ID NO: 5838502 - DNA, 25 bp, Homo sapien
attgtcgcaagtcacagaattattt

SEQ ID NO: 5838503 - DNA, 25 bp, Homo sapien
ggcaggatcgacgcgcttctgtatg

SEQ ID NO: 5838504 - DNA, 25 bp, Homo sapien
gttgctggatctgctgtttgaagcg

SEQ ID NO: 5838505 - DNA, 25 bp, Homo sapien
ggatctgctgtttgaagcgcagcag

SEQ ID NO: 5838506 - DNA, 25 bp, Homo sapien
gcgcagcaggtgcatcgccagcatt

SEQ ID NO: 5838507 - DNA, 25 bp, Homo sapien
gcaggtgcatcgccagcatttcgat

SEQ ID NO: 5838508 - DNA, 25 bp, Homo sapien
gcatcgccagcatttcgatcctcgt

SEQ ID NO: 5838509 - DNA, 25 bp, Homo sapien
gcatttcgatcctcgtcaggtgcag

SEQ ID NO: 5838510 - DNA, 25 bp, Homo sapien
cgatcctcgtcaggtgcaggtcagc

SEQ ID NO: 5838511 - DNA, 25 bp, Homo sapien
tcgtcaggtgcaggtcagcacgttg

SEQ ID NO: 5838512 - DNA, 25 bp, Homo sapien
gcaggtcagcacgttgctgtcgatt

SEQ ID NO: 5838513 - DNA, 25 bp, Homo sapien
cagcacgttgctgtcgattaagacc

SEQ ID NO: 5838514 - DNA, 25 bp, Homo sapien
gctgtcgattaagaccggagcttgt

SEQ ID NO: 5838515 - DNA, 25 bp, Homo sapien
agcttgtccggaagattgcaaatac

SEQ ID NO: 5838516 - DNA, 25 bp, Homo sapien
agattgcaaatactgcccgcaaacg

SEQ ID NO: 5838517 - DNA, 25 bp, Homo sapien
caaatactgcccgcaaacgtcgcgc

SEQ ID NO: 5838518 - DNA, 25 bp, Homo sapien
tgaacaggtgctggagtcggcgcgc

SEQ ID NO: 5838519 - DNA, 25 bp, Homo sapien
ggagtcggcgcgcaaagcgaaagcg

SEQ ID NO: 5838520 - DNA, 25 bp, Homo sapien
gacattgtcgcaagtcacagaatta

SEQ ID NO: 5838521 - DNA, 25 bp, Homo sapien
caaagcgaaagcggcaggatcgacg

SEQ ID NO: 5838522 - DNA, 25 bp, Homo sapien
attgtcgcaagtcacagaattattt

SEQ ID NO: 5838523 - DNA, 25 bp, Homo sapien
ggcaggatcgacgcgcttctgtatg

SEQ ID NO: 5838524 - DNA, 25 bp, Homo sapien
gttgctggatctgctgtttgaagcg

SEQ ID NO: 5838525 - DNA, 25 bp, Homo sapien
ggatctgctgtttgaagcgcagcag

SEQ ID NO: 5838526 - DNA, 25 bp, Homo sapien
gcgcagcaggtgcatcgccagcatt

SEQ ID NO: 5838527 - DNA, 25 bp, Homo sapien
gcaggtgcatcgccagcatttcgat

SEQ ID NO: 5838528 - DNA, 25 bp, Homo sapien
gcatcgccagcatttcgatcctcgt

SEQ ID NO: 5838529 - DNA, 25 bp, Homo sapien
gcatttcgatcctcgtcaggtgcag

SEQ ID NO: 5838530 - DNA, 25 bp, Homo sapien
cgatcctcgtcaggtgcaggtcagc

SEQ ID NO: 5838531 - DNA, 25 bp, Homo sapien
tcgtcaggtgcaggtcagcacgttg

SEQ ID NO: 5838532 - DNA, 25 bp, Homo sapien
gcaggtcagcacgttgctgtcgatt

SEQ ID NO: 5838533 - DNA, 25 bp, Homo sapien
cagcacgttgctgtcgattaagacc

SEQ ID NO: 5838534 - DNA, 25 bp, Homo sapien
gctgtcgattaagaccggagcttgt

SEQ ID NO: 5838535 - DNA, 25 bp, Homo sapien
agcttgtccggaagattgcaaatac

SEQ ID NO: 5838536 - DNA, 25 bp, Homo sapien
agattgcaaatactgcccgcaaacg

SEQ ID NO: 5838537 - DNA, 25 bp, Homo sapien
caaatactgcccgcaaacgtcgcgc

SEQ ID NO: 5838538 - DNA, 25 bp, Homo sapien
tgaacaggtgctggagtcggcgcgc

SEQ ID NO: 5838539 - DNA, 25 bp, Homo sapien
ggagtcggcgcgcaaagcgaaagcg

SEQ ID NO: 5838540 - DNA, 25 bp, Homo sapien
gacattgtcgcaagtcacagaatta

SEQ ID NO: 5838541 - DNA, 25 bp, Homo sapien
caaagcgaaagcggcaggatcgacg

SEQ ID NO: 5838542 - DNA, 25 bp, Homo sapien
attgtcgcaagtcacagaattattt

SEQ ID NO: 5838543 - DNA, 25 bp, Homo sapien
ggcaggatcgacgcgcttctgtatg

SEQ ID NO: 5838544 - DNA, 25 bp, Homo sapien
gttgctggatctgctgtttgaagcg

SEQ ID NO: 5838545 - DNA, 25 bp, Homo sapien
ggatctgctgtttgaagcgcagcag

SEQ ID NO: 5838546 - DNA, 25 bp, Homo sapien
gcgcagcaggtgcatcgccagcatt

SEQ ID NO: 5838547 - DNA, 25 bp, Homo sapien
gcaggtgcatcgccagcatttcgat

SEQ ID NO: 5838548 - DNA, 25 bp, Homo sapien
gcatcgccagcatttcgatcctcgt

SEQ ID NO: 5838549 - DNA, 25 bp, Homo sapien
gcatttcgatcctcgtcaggtgcag

SEQ ID NO: 5838550 - DNA, 25 bp, Homo sapien
cgatcctcgtcaggtgcaggtcagc

SEQ ID NO: 5838551 - DNA, 25 bp, Homo sapien
tcgtcaggtgcaggtcagcacgttg

SEQ ID NO: 5838552 - DNA, 25 bp, Homo sapien
gcaggtcagcacgttgctgtcgatt

SEQ ID NO: 5838553 - DNA, 25 bp, Homo sapien
cagcacgttgctgtcgattaagacc

SEQ ID NO: 5838554 - DNA, 25 bp, Homo sapien
gctgtcgattaagaccggagcttgt

SEQ ID NO: 5838555 - DNA, 25 bp, Homo sapien
agcttgtccggaagattgcaaatac

SEQ ID NO: 5838556 - DNA, 25 bp, Homo sapien
agattgcaaatactgcccgcaaacg

SEQ ID NO: 5838557 - DNA, 25 bp, Homo sapien
caaatactgcccgcaaacgtcgcgc

SEQ ID NO: 5838558 - DNA, 25 bp, Homo sapien
tgaacaggtgctggagtcggcgcgc

SEQ ID NO: 5838559 - DNA, 25 bp, Homo sapien
ggagtcggcgcgcaaagcgaaagcg

SEQ ID NO: 5838560 - DNA, 25 bp, Homo sapien
gacattgtcgcaagtcacagaatta

SEQ ID NO: 5838561 - DNA, 25 bp, Homo sapien
caaagcgaaagcggcaggatcgacg

SEQ ID NO: 5838562 - DNA, 25 bp, Homo sapien
attgtcgcaagtcacagaattattt

SEQ ID NO: 5838563 - DNA, 25 bp, Homo sapien
ggcaggatcgacgcgcttctgtatg

SEQ ID NO: 5838564 - DNA, 25 bp, Homo sapien
gttgctggatctgctgtttgaagcg

SEQ ID NO: 5838565 - DNA, 25 bp, Homo sapien
ggatctgctgtttgaagcgcagcag

SEQ ID NO: 5838566 - DNA, 25 bp, Homo sapien
gcgcagcaggtgcatcgccagcatt

SEQ ID NO: 5838567 - DNA, 25 bp, Homo sapien
gcaggtgcatcgccagcatttcgat

SEQ ID NO: 5838568 - DNA, 25 bp, Homo sapien
gcatcgccagcatttcgatcctcgt

SEQ ID NO: 5838569 - DNA, 25 bp, Homo sapien
gcatttcgatcctcgtcaggtgcag

SEQ ID NO: 5838570 - DNA, 25 bp, Homo sapien
cgatcctcgtcaggtgcaggtcagc

SEQ ID NO: 5838571 - DNA, 25 bp, Homo sapien
tcgtcaggtgcaggtcagcacgttg

SEQ ID NO: 5838572 - DNA, 25 bp, Homo sapien
gcaggtcagcacgttgctgtcgatt

SEQ ID NO: 5838573 - DNA, 25 bp, Homo sapien
cagcacgttgctgtcgattaagacc

SEQ ID NO: 5838574 - DNA, 25 bp, Homo sapien
gctgtcgattaagaccggagcttgt

SEQ ID NO: 5838575 - DNA, 25 bp, Homo sapien
agcttgtccggaagattgcaaatac

SEQ ID NO: 5838576 - DNA, 25 bp, Homo sapien
agattgcaaatactgcccgcaaacg

SEQ ID NO: 5838577 - DNA, 25 bp, Homo sapien
caaatactgcccgcaaacgtcgcgc

SEQ ID NO: 5838578 - DNA, 25 bp, Homo sapien
tgaacaggtgctggagtcggcgcgc

SEQ ID NO: 5838579 - DNA, 25 bp, Homo sapien
ggagtcggcgcgcaaagcgaaagcg

SEQ ID NO: 5838580 - DNA, 25 bp, Homo sapien
gacattgtcgcaagtcacagaatta

SEQ ID NO: 5838581 - DNA, 25 bp, Homo sapien
caaagcgaaagcggcaggatcgacg

SEQ ID NO: 5838582 - DNA, 25 bp, Homo sapien
attgtcgcaagtcacagaattattt

SEQ ID NO: 5838583 - DNA, 25 bp, Homo sapien
ggcaggatcgacgcgcttctgtatg

SEQ ID NO: 5838584 - DNA, 25 bp, Homo sapien
gttgctggatctgctgtttgaagcg

SEQ ID NO: 5838585 - DNA, 25 bp, Homo sapien
ggatctgctgtttgaagcgcagcag

SEQ ID NO: 5838586 - DNA, 25 bp, Homo sapien
gcgcagcaggtgcatcgccagcatt

SEQ ID NO: 5838587 - DNA, 25 bp, Homo sapien
gcaggtgcatcgccagcatttcgat

SEQ ID NO: 5838588 - DNA, 25 bp, Homo sapien
gcatcgccagcatttcgatcctcgt

SEQ ID NO: 5838589 - DNA, 25 bp, Homo sapien
gcatttcgatcctcgtcaggtgcag

SEQ ID NO: 5838590 - DNA, 25 bp, Homo sapien
cgatcctcgtcaggtgcaggtcagc

SEQ ID NO: 5838591 - DNA, 25 bp, Homo sapien
tcgtcaggtgcaggtcagcacgttg

SEQ ID NO: 5838592 - DNA, 25 bp, Homo sapien
gcaggtcagcacgttgctgtcgatt

SEQ ID NO: 5838593 - DNA, 25 bp, Homo sapien
cagcacgttgctgtcgattaagacc

SEQ ID NO: 5838594 - DNA, 25 bp, Homo sapien
gctgtcgattaagaccggagcttgt

SEQ ID NO: 5838595 - DNA, 25 bp, Homo sapien
agcttgtccggaagattgcaaatac

SEQ ID NO: 5838596 - DNA, 25 bp, Homo sapien
agattgcaaatactgcccgcaaacg

SEQ ID NO: 5838597 - DNA, 25 bp, Homo sapien
caaatactgcccgcaaacgtcgcgc

SEQ ID NO: 5838598 - DNA, 25 bp, Homo sapien
tgaacaggtgctggagtcggcgcgc

SEQ ID NO: 5838599 - DNA, 25 bp, Homo sapien
ggagtcggcgcgcaaagcgaaagcg

SEQ ID NO: 5838600 - DNA, 25 bp, Homo sapien
gacattgtcgcaagtcacagaatta

SEQ ID NO: 5838601 - DNA, 25 bp, Homo sapien
caaagcgaaagcggcaggatcgacg

SEQ ID NO: 5838602 - DNA, 25 bp, Homo sapien
attgtcgcaagtcacagaattattt

SEQ ID NO: 5838603 - DNA, 25 bp, Homo sapien
ggcaggatcgacgcgcttctgtatg

SEQ ID NO: 5838604 - DNA, 25 bp, Homo sapien
gttgctggatctgctgtttgaagcg

SEQ ID NO: 5838605 - DNA, 25 bp, Homo sapien
ggatctgctgtttgaagcgcagcag

SEQ ID NO: 5838606 - DNA, 25 bp, Homo sapien
gcgcagcaggtgcatcgccagcatt

SEQ ID NO: 5838607 - DNA, 25 bp, Homo sapien
gcaggtgcatcgccagcatttcgat

SEQ ID NO: 5838608 - DNA, 25 bp, Homo sapien
gcatcgccagcatttcgatcctcgt

SEQ ID NO: 5838609 - DNA, 25 bp, Homo sapien
gcatttcgatcctcgtcaggtgcag

SEQ ID NO: 5838610 - DNA, 25 bp, Homo sapien
cgatcctcgtcaggtgcaggtcagc

SEQ ID NO: 5838611 - DNA, 25 bp, Homo sapien
tcgtcaggtgcaggtcagcacgttg

SEQ ID NO: 5838612 - DNA, 25 bp, Homo sapien
gcaggtcagcacgttgctgtcgatt

SEQ ID NO: 5838613 - DNA, 25 bp, Homo sapien
cagcacgttgctgtcgattaagacc

SEQ ID NO: 5838614 - DNA, 25 bp, Homo sapien
gctgtcgattaagaccggagcttgt

SEQ ID NO: 5838615 - DNA, 25 bp, Homo sapien
agcttgtccggaagattgcaaatac

SEQ ID NO: 5838616 - DNA, 25 bp, Homo sapien
agattgcaaatactgcccgcaaacg

SEQ ID NO: 5838617 - DNA, 25 bp, Homo sapien
caaatactgcccgcaaacgtcgcgc

SEQ ID NO: 5838618 - DNA, 25 bp, Homo sapien
tgaacaggtgctggagtcggcgcgc

SEQ ID NO: 5838619 - DNA, 25 bp, Homo sapien
ggagtcggcgcgcaaagcgaaagcg

SEQ ID NO: 5838620 - DNA, 25 bp, Homo sapien
gacattgtcgcaagtcacagaatta

SEQ ID NO: 5838621 - DNA, 25 bp, Homo sapien
caaagcgaaagcggcaggatcgacg

SEQ ID NO: 5838622 - DNA, 25 bp, Homo sapien
attgtcgcaagtcacagaattattt

SEQ ID NO: 5838623 - DNA, 25 bp, Homo sapien
ggcaggatcgacgcgcttctgtatg

SEQ ID NO: 5838624 - DNA, 25 bp, Homo sapien
gttgctggatctgctgtttgaagcg

SEQ ID NO: 5838625 - DNA, 25 bp, Homo sapien
ggatctgctgtttgaagcgcagcag

SEQ ID NO: 5838626 - DNA, 25 bp, Homo sapien
gcgcagcaggtgcatcgccagcatt

SEQ ID NO: 5838627 - DNA, 25 bp, Homo sapien
gcaggtgcatcgccagcatttcgat

SEQ ID NO: 5838628 - DNA, 25 bp, Homo sapien
gcatcgccagcatttcgatcctcgt

SEQ ID NO: 5838629 - DNA, 25 bp, Homo sapien
gcatttcgatcctcgtcaggtgcag

SEQ ID NO: 5838630 - DNA, 25 bp, Homo sapien
cgatcctcgtcaggtgcaggtcagc

SEQ ID NO: 5838631 - DNA, 25 bp, Homo sapien
tcgtcaggtgcaggtcagcacgttg

SEQ ID NO: 5838632 - DNA, 25 bp, Homo sapien
gcaggtcagcacgttgctgtcgatt

SEQ ID NO: 5838633 - DNA, 25 bp, Homo sapien
cagcacgttgctgtcgattaagacc

SEQ ID NO: 5838634 - DNA, 25 bp, Homo sapien
gctgtcgattaagaccggagcttgt

SEQ ID NO: 5838635 - DNA, 25 bp, Homo sapien
agcttgtccggaagattgcaaatac

SEQ ID NO: 5838636 - DNA, 25 bp, Homo sapien
agattgcaaatactgcccgcaaacg

SEQ ID NO: 5838637 - DNA, 25 bp, Homo sapien
caaatactgcccgcaaacgtcgcgc

SEQ ID NO: 5838638 - DNA, 25 bp, Homo sapien
tgaacaggtgctggagtcggcgcgc

SEQ ID NO: 5838639 - DNA, 25 bp, Homo sapien
ggagtcggcgcgcaaagcgaaagcg

SEQ ID NO: 5838640 - DNA, 25 bp, Homo sapien
gacattgtcgcaagtcacagaatta

SEQ ID NO: 5838641 - DNA, 25 bp, Homo sapien
caaagcgaaagcggcaggatcgacg

SEQ ID NO: 5838642 - DNA, 25 bp, Homo sapien
attgtcgcaagtcacagaattattt

SEQ ID NO: 5838643 - DNA, 25 bp, Homo sapien
ggcaggatcgacgcgcttctgtatg

SEQ ID NO: 5838644 - DNA, 25 bp, Homo sapien
gttgctggatctgctgtttgaagcg

SEQ ID NO: 5838645 - DNA, 25 bp, Homo sapien
ggatctgctgtttgaagcgcagcag

SEQ ID NO: 5838646 - DNA, 25 bp, Homo sapien
gcgcagcaggtgcatcgccagcatt

SEQ ID NO: 5838647 - DNA, 25 bp, Homo sapien
gcaggtgcatcgccagcatttcgat

SEQ ID NO: 5838648 - DNA, 25 bp, Homo sapien
gcatcgccagcatttcgatcctcgt

SEQ ID NO: 5838649 - DNA, 25 bp, Homo sapien
gcatttcgatcctcgtcaggtgcag

SEQ ID NO: 5838650 - DNA, 25 bp, Homo sapien
cgatcctcgtcaggtgcaggtcagc

SEQ ID NO: 5838651 - DNA, 25 bp, Homo sapien
tcgtcaggtgcaggtcagcacgttg

SEQ ID NO: 5838652 - DNA, 25 bp, Homo sapien
gcaggtcagcacgttgctgtcgatt

SEQ ID NO: 5838653 - DNA, 25 bp, Homo sapien
cagcacgttgctgtcgattaagacc

SEQ ID NO: 5838654 - DNA, 25 bp, Homo sapien
gctgtcgattaagaccggagcttgt

SEQ ID NO: 5838655 - DNA, 25 bp, Homo sapien
agcttgtccggaagattgcaaatac

SEQ ID NO: 5838656 - DNA, 25 bp, Homo sapien
agattgcaaatactgcccgcaaacg

SEQ ID NO: 5838657 - DNA, 25 bp, Homo sapien
caaatactgcccgcaaacgtcgcgc

SEQ ID NO: 5838658 - DNA, 25 bp, Homo sapien
tgaacaggtgctggagtcggcgcgc

SEQ ID NO: 5838659 - DNA, 25 bp, Homo sapien
ggagtcggcgcgcaaagcgaaagcg

SEQ ID NO: 5838660 - DNA, 25 bp, Homo sapien
gacattgtcgcaagtcacagaatta

SEQ ID NO: 5838661 - DNA, 25 bp, Homo sapien
caaagcgaaagcggcaggatcgacg

SEQ ID NO: 5838662 - DNA, 25 bp, Homo sapien
attgtcgcaagtcacagaattattt

SEQ ID NO: 5838663 - DNA, 25 bp, Homo sapien
ggcaggatcgacgcgcttctgtatg

SEQ ID NO: 5838664 - DNA, 25 bp, Homo sapien
gttgctggatctgctgtttgaagcg

SEQ ID NO: 5838665 - DNA, 25 bp, Homo sapien
ggatctgctgtttgaagcgcagcag

SEQ ID NO: 5838666 - DNA, 25 bp, Homo sapien
gcgcagcaggtgcatcgccagcatt

SEQ ID NO: 5838667 - DNA, 25 bp, Homo sapien
gcaggtgcatcgccagcatttcgat

SEQ ID NO: 5838668 - DNA, 25 bp, Homo sapien
gcatcgccagcatttcgatcctcgt

SEQ ID NO: 5838669 - DNA, 25 bp, Homo sapien
gcatttcgatcctcgtcaggtgcag

SEQ ID NO: 5838670 - DNA, 25 bp, Homo sapien
cgatcctcgtcaggtgcaggtcagc

SEQ ID NO: 5838671 - DNA, 25 bp, Homo sapien
tcgtcaggtgcaggtcagcacgttg

SEQ ID NO: 5838672 - DNA, 25 bp, Homo sapien
gcaggtcagcacgttgctgtcgatt

SEQ ID NO: 5838673 - DNA, 25 bp, Homo sapien
cagcacgttgctgtcgattaagacc

SEQ ID NO: 5838674 - DNA, 25 bp, Homo sapien
gctgtcgattaagaccggagcttgt

SEQ ID NO: 5838675 - DNA, 25 bp, Homo sapien
agcttgtccggaagattgcaaatac

SEQ ID NO: 5838676 - DNA, 25 bp, Homo sapien
agattgcaaatactgcccgcaaacg

SEQ ID NO: 5838677 - DNA, 25 bp, Homo sapien
caaatactgcccgcaaacgtcgcgc

SEQ ID NO: 5838678 - DNA, 25 bp, Homo sapien
tgaacaggtgctggagtcggcgcgc

SEQ ID NO: 5838679 - DNA, 25 bp, Homo sapien
ggagtcggcgcgcaaagcgaaagcg

SEQ ID NO: 5838680 - DNA, 25 bp, Homo sapien
gacattgtcgcaagtcacagaatta

SEQ ID NO: 5838681 - DNA, 25 bp, Homo sapien
caaagcgaaagcggcaggatcgacg

SEQ ID NO: 5838682 - DNA, 25 bp, Homo sapien
attgtcgcaagtcacagaattattt

SEQ ID NO: 5838683 - DNA, 25 bp, Homo sapien
ggcaggatcgacgcgcttctgtatg

SEQ ID NO: 5838684 - DNA, 25 bp, Homo sapien
gttgctggatctgctgtttgaagcg

SEQ ID NO: 5838685 - DNA, 25 bp, Homo sapien
ggatctgctgtttgaagcgcagcag

SEQ ID NO: 5838686 - DNA, 25 bp, Homo sapien
gcgcagcaggtgcatcgccagcatt

SEQ ID NO: 5838687 - DNA, 25 bp, Homo sapien
gcaggtgcatcgccagcatttcgat

SEQ ID NO: 5838688 - DNA, 25 bp, Homo sapien
gcatcgccagcatttcgatcctcgt

SEQ ID NO: 5838689 - DNA, 25 bp, Homo sapien
gcatttcgatcctcgtcaggtgcag

SEQ ID NO: 5838690 - DNA, 25 bp, Homo sapien
cgatcctcgtcaggtgcaggtcagc

SEQ ID NO: 5838691 - DNA, 25 bp, Homo sapien
tcgtcaggtgcaggtcagcacgttg

SEQ ID NO: 5838692 - DNA, 25 bp, Homo sapien
gcaggtcagcacgttgctgtcgatt

SEQ ID NO: 5838693 - DNA, 25 bp, Homo sapien
cagcacgttgctgtcgattaagacc

SEQ ID NO: 5838694 - DNA, 25 bp, Homo sapien
gctgtcgattaagaccggagcttgt

SEQ ID NO: 5838695 - DNA, 25 bp, Homo sapien
agcttgtccggaagattgcaaatac

SEQ ID NO: 5838696 - DNA, 25 bp, Homo sapien
agattgcaaatactgcccgcaaacg

SEQ ID NO: 5838697 - DNA, 25 bp, Homo sapien
caaatactgcccgcaaacgtcgcgc

SEQ ID NO: 5838698 - DNA, 25 bp, Homo sapien
tgaacaggtgctggagtcggcgcgc

SEQ ID NO: 5838699 - DNA, 25 bp, Homo sapien
ggagtcggcgcgcaaagcgaaagcg

SEQ ID NO: 5838700 - DNA, 25 bp, Homo sapien
gacattgtcgcaagtcacagaatta

SEQ ID NO: 5838701 - DNA, 25 bp, Homo sapien
caaagcgaaagcggcaggatcgacg

SEQ ID NO: 5838702 - DNA, 25 bp, Homo sapien
attgtcgcaagtcacagaattattt

SEQ ID NO: 5838703 - DNA, 25 bp, Homo sapien
ggcaggatcgacgcgcttctgtatg

SEQ ID NO: 5838704 - DNA, 25 bp, Homo sapien
gttgctggatctgctgtttgaagcg

SEQ ID NO: 5838705 - DNA, 25 bp, Homo sapien
ggatctgctgtttgaagcgcagcag

SEQ ID NO: 5838706 - DNA, 25 bp, Homo sapien
gcgcagcaggtgcatcgccagcatt

SEQ ID NO: 5838707 - DNA, 25 bp, Homo sapien
gcaggtgcatcgccagcatttcgat

SEQ ID NO: 5838708 - DNA, 25 bp, Homo sapien
gcatcgccagcatttcgatcctcgt

SEQ ID NO: 5838709 - DNA, 25 bp, Homo sapien
gcatttcgatcctcgtcaggtgcag

SEQ ID NO: 5838710 - DNA, 25 bp, Homo sapien
cgatcctcgtcaggtgcaggtcagc

SEQ ID NO: 5838711 - DNA, 25 bp, Homo sapien
tcgtcaggtgcaggtcagcacgttg

SEQ ID NO: 5838712 - DNA, 25 bp, Homo sapien
gcaggtcagcacgttgctgtcgatt

SEQ ID NO: 5838713 - DNA, 25 bp, Homo sapien
cagcacgttgctgtcgattaagacc

SEQ ID NO: 5838714 - DNA, 25 bp, Homo sapien
gctgtcgattaagaccggagcttgt

SEQ ID NO: 5838715 - DNA, 25 bp, Homo sapien
agcttgtccggaagattgcaaatac

SEQ ID NO: 5838716 - DNA, 25 bp, Homo sapien
agattgcaaatactgcccgcaaacg

SEQ ID NO: 5838717 - DNA, 25 bp, Homo sapien
caaatactgcccgcaaacgtcgcgc

SEQ ID NO: 5838718 - DNA, 25 bp, Homo sapien
tgaacaggtgctggagtcggcgcgc

SEQ ID NO: 5838719 - DNA, 25 bp, Homo sapien
ggagtcggcgcgcaaagcgaaagcg

SEQ ID NO: 5838720 - DNA, 25 bp, Homo sapien
gacattgtcgcaagtcacagaatta

SEQ ID NO: 5838721 - DNA, 25 bp, Homo sapien
caaagcgaaagcggcaggatcgacg

SEQ ID NO: 5838722 - DNA, 25 bp, Homo sapien
attgtcgcaagtcacagaattattt

SEQ ID NO: 5838723 - DNA, 25 bp, Homo sapien
ggcaggatcgacgcgcttctgtatg

SEQ ID NO: 5838724 - DNA, 25 bp, Homo sapien
gttgctggatctgctgtttgaagcg

SEQ ID NO: 5838725 - DNA, 25 bp, Homo sapien
ggatctgctgtttgaagcgcagcag

SEQ ID NO: 5838726 - DNA, 25 bp, Homo sapien
gcgcagcaggtgcatcgccagcatt

SEQ ID NO: 5838727 - DNA, 25 bp, Homo sapien
gcaggtgcatcgccagcatttcgat

SEQ ID NO: 5838728 - DNA, 25 bp, Homo sapien
gcatcgccagcatttcgatcctcgt

SEQ ID NO: 5838729 - DNA, 25 bp, Homo sapien
gcatttcgatcctcgtcaggtgcag

SEQ ID NO: 5838730 - DNA, 25 bp, Homo sapien
cgatcctcgtcaggtgcaggtcagc

SEQ ID NO: 5838731 - DNA, 25 bp, Homo sapien
tcgtcaggtgcaggtcagcacgttg

SEQ ID NO: 5838732 - DNA, 25 bp, Homo sapien
gcaggtcagcacgttgctgtcgatt

SEQ ID NO: 5838733 - DNA, 25 bp, Homo sapien
cagcacgttgctgtcgattaagacc

SEQ ID NO: 5838734 - DNA, 25 bp, Homo sapien
gctgtcgattaagaccggagcttgt

SEQ ID NO: 5838735 - DNA, 25 bp, Homo sapien
agcttgtccggaagattgcaaatac

SEQ ID NO: 5838736 - DNA, 25 bp, Homo sapien
agattgcaaatactgcccgcaaacg

SEQ ID NO: 5838737 - DNA, 25 bp, Homo sapien
caaatactgcccgcaaacgtcgcgc

SEQ ID NO: 5838738 - DNA, 25 bp, Homo sapien
tgaacaggtgctggagtcggcgcgc

SEQ ID NO: 5838739 - DNA, 25 bp, Homo sapien
ggagtcggcgcgcaaagcgaaagcg

SEQ ID NO: 5838740 - DNA, 25 bp, Homo sapien
gacattgtcgcaagtcacagaatta

SEQ ID NO: 5838741 - DNA, 25 bp, Homo sapien
caaagcgaaagcggcaggatcgacg

SEQ ID NO: 5838742 - DNA, 25 bp, Homo sapien
attgtcgcaagtcacagaattattt

SEQ ID NO: 5838743 - DNA, 25 bp, Homo sapien
ggcaggatcgacgcgcttctgtatg

SEQ ID NO: 5838744 - DNA, 25 bp, Homo sapien
gttgctggatctgctgtttgaagcg

SEQ ID NO: 5838745 - DNA, 25 bp, Homo sapien
ggatctgctgtttgaagcgcagcag

SEQ ID NO: 5838746 - DNA, 25 bp, Homo sapien
gcgcagcaggtgcatcgccagcatt

SEQ ID NO: 5838747 - DNA, 25 bp, Homo sapien
gcaggtgcatcgccagcatttcgat

SEQ ID NO: 5838748 - DNA, 25 bp, Homo sapien
gcatcgccagcatttcgatcctcgt

SEQ ID NO: 5838749 - DNA, 25 bp, Homo sapien
gcatttcgatcctcgtcaggtgcag

SEQ ID NO: 5838750 - DNA, 25 bp, Homo sapien
cgatcctcgtcaggtgcaggtcagc

SEQ ID NO: 5838751 - DNA, 25 bp, Homo sapien
tcgtcaggtgcaggtcagcacgttg

SEQ ID NO: 5838752 - DNA, 25 bp, Homo sapien
gcaggtcagcacgttgctgtcgatt

SEQ ID NO: 5838753 - DNA, 25 bp, Homo sapien
cagcacgttgctgtcgattaagacc

SEQ ID NO: 5838754 - DNA, 25 bp, Homo sapien
gctgtcgattaagaccggagcttgt

SEQ ID NO: 5838755 - DNA, 25 bp, Homo sapien
agcttgtccggaagattgcaaatac

SEQ ID NO: 5838756 - DNA, 25 bp, Homo sapien
agattgcaaatactgcccgcaaacg

SEQ ID NO: 5838757 - DNA, 25 bp, Homo sapien
caaatactgcccgcaaacgtcgcgc

SEQ ID NO: 5838758 - DNA, 25 bp, Homo sapien
tgaacaggtgctggagtcggcgcgc

SEQ ID NO: 5838759 - DNA, 25 bp, Homo sapien
ggagtcggcgcgcaaagcgaaagcg

SEQ ID NO: 5838760 - DNA, 25 bp, Homo sapien
gacattgtcgcaagtcacagaatta

SEQ ID NO: 5838761 - DNA, 25 bp, Homo sapien
caaagcgaaagcggcaggatcgacg

SEQ ID NO: 5838762 - DNA, 25 bp, Homo sapien
attgtcgcaagtcacagaattattt

SEQ ID NO: 5838763 - DNA, 25 bp, Homo sapien
ggcaggatcgacgcgcttctgtatg

SEQ ID NO: 5838764 - DNA, 25 bp, Homo sapien
gttgctggatctgctgtttgaagcg

SEQ ID NO: 5838765 - DNA, 25 bp, Homo sapien
ggatctgctgtttgaagcgcagcag

SEQ ID NO: 5838766 - DNA, 25 bp, Homo sapien
gcgcagcaggtgcatcgccagcatt

SEQ ID NO: 5838767 - DNA, 25 bp, Homo sapien
gcaggtgcatcgccagcatttcgat

SEQ ID NO: 5838768 - DNA, 25 bp, Homo sapien
gcatcgccagcatttcgatcctcgt

SEQ ID NO: 5838769 - DNA, 25 bp, Homo sapien
gcatttcgatcctcgtcaggtgcag

SEQ ID NO: 5838770 - DNA, 25 bp, Homo sapien
cgatcctcgtcaggtgcaggtcagc

SEQ ID NO: 5838771 - DNA, 25 bp, Homo sapien
tcgtcaggtgcaggtcagcacgttg

SEQ ID NO: 5838772 - DNA, 25 bp, Homo sapien
gcaggtcagcacgttgctgtcgatt

SEQ ID NO: 5838773 - DNA, 25 bp, Homo sapien
cagcacgttgctgtcgattaagacc

SEQ ID NO: 5838774 - DNA, 25 bp, Homo sapien
gctgtcgattaagaccggagcttgt

SEQ ID NO: 5838775 - DNA, 25 bp, Homo sapien
agcttgtccggaagattgcaaatac

SEQ ID NO: 5838776 - DNA, 25 bp, Homo sapien
agattgcaaatactgcccgcaaacg

SEQ ID NO: 5838777 - DNA, 25 bp, Homo sapien
caaatactgcccgcaaacgtcgcgc

SEQ ID NO: 5838778 - DNA, 25 bp, Homo sapien
tgaacaggtgctggagtcggcgcgc

SEQ ID NO: 5838779 - DNA, 25 bp, Homo sapien
ggagtcggcgcgcaaagcgaaagcg

SEQ ID NO: 5838780 - DNA, 25 bp, Homo sapien
gacattgtcgcaagtcacagaatta

SEQ ID NO: 5838781 - DNA, 25 bp, Homo sapien
caaagcgaaagcggcaggatcgacg

SEQ ID NO: 5838782 - DNA, 25 bp, Homo sapien
attgtcgcaagtcacagaattattt

SEQ ID NO: 5838783 - DNA, 25 bp, Homo sapien
ggcaggatcgacgcgcttctgtatg

SEQ ID NO: 5838784 - DNA, 25 bp, Homo sapien
gttgctggatctgctgtttgaagcg

SEQ ID NO: 5838785 - DNA, 25 bp, Homo sapien
ggatctgctgtttgaagcgcagcag

SEQ ID NO: 5838786 - DNA, 25 bp, Homo sapien
gcgcagcaggtgcatcgccagcatt

SEQ ID NO: 5838787 - DNA, 25 bp, Homo sapien
gcaggtgcatcgccagcatttcgat

SEQ ID NO: 5838788 - DNA, 25 bp, Homo sapien
gcatcgccagcatttcgatcctcgt

SEQ ID NO: 5838789 - DNA, 25 bp, Homo sapien
gcatttcgatcctcgtcaggtgcag

SEQ ID NO: 5838790 - DNA, 25 bp, Homo sapien
cgatcctcgtcaggtgcaggtcagc

SEQ ID NO: 5838791 - DNA, 25 bp, Homo sapien
tcgtcaggtgcaggtcagcacgttg

SEQ ID NO: 5838792 - DNA, 25 bp, Homo sapien
gcaggtcagcacgttgctgtcgatt

SEQ ID NO: 5838793 - DNA, 25 bp, Homo sapien
cagcacgttgctgtcgattaagacc

SEQ ID NO: 5838794 - DNA, 25 bp, Homo sapien
gctgtcgattaagaccggagcttgt

SEQ ID NO: 5838795 - DNA, 25 bp, Homo sapien
agcttgtccggaagattgcaaatac

SEQ ID NO: 5838796 - DNA, 25 bp, Homo sapien
agattgcaaatactgcccgcaaacg

SEQ ID NO: 5838797 - DNA, 25 bp, Homo sapien
caaatactgcccgcaaacgtcgcgc

SEQ ID NO: 5838798 - DNA, 25 bp, Homo sapien
tgaacaggtgctggagtcggcgcgc

SEQ ID NO: 5838799 - DNA, 25 bp, Homo sapien
ggagtcggcgcgcaaagcgaaagcg

SEQ ID NO: 5838800 - DNA, 25 bp, Homo sapien
gacattgtcgcaagtcacagaatta

SEQ ID NO: 5838801 - DNA, 25 bp, Homo sapien
caaagcgaaagcggcaggatcgacg

SEQ ID NO: 5838802 - DNA, 25 bp, Homo sapien
attgtcgcaagtcacagaattattt

SEQ ID NO: 5838803 - DNA, 25 bp, Homo sapien
ggcaggatcgacgcgcttctgtatg

SEQ ID NO: 5838804 - DNA, 25 bp, Homo sapien
gttgctggatctgctgtttgaagcg

SEQ ID NO: 5838805 - DNA, 25 bp, Homo sapien
ggatctgctgtttgaagcgcagcag

SEQ ID NO: 5838806 - DNA, 25 bp, Homo sapien
gcgcagcaggtgcatcgccagcatt

SEQ ID NO: 5838807 - DNA, 25 bp, Homo sapien
gcaggtgcatcgccagcatttcgat

SEQ ID NO: 5838808 - DNA, 25 bp, Homo sapien
gcatcgccagcatttcgatcctcgt

SEQ ID NO: 5838809 - DNA, 25 bp, Homo sapien
gcatttcgatcctcgtcaggtgcag

SEQ ID NO: 5838810 - DNA, 25 bp, Homo sapien
cgatcctcgtcaggtgcaggtcagc

SEQ ID NO: 5838811 - DNA, 25 bp, Homo sapien
tcgtcaggtgcaggtcagcacgttg

SEQ ID NO: 5838812 - DNA, 25 bp, Homo sapien
gcaggtcagcacgttgctgtcgatt

SEQ ID NO: 5838813 - DNA, 25 bp, Homo sapien
cagcacgttgctgtcgattaagacc

SEQ ID NO: 5838814 - DNA, 25 bp, Homo sapien
gctgtcgattaagaccggagcttgt

SEQ ID NO: 5838815 - DNA, 25 bp, Homo sapien
agcttgtccggaagattgcaaatac

SEQ ID NO: 5838816 - DNA, 25 bp, Homo sapien
agattgcaaatactgcccgcaaacg

SEQ ID NO: 5838817 - DNA, 25 bp, Homo sapien
caaatactgcccgcaaacgtcgcgc

SEQ ID NO: 5838818 - DNA, 25 bp, Homo sapien
tgaacaggtgctggagtcggcgcgc

SEQ ID NO: 5838819 - DNA, 25 bp, Homo sapien
ggagtcggcgcgcaaagcgaaagcg

SEQ ID NO: 5838820 - DNA, 25 bp, Homo sapien
gacattgtcgcaagtcacagaatta

SEQ ID NO: 5838821 - DNA, 25 bp, Homo sapien
caaagcgaaagcggcaggatcgacg

SEQ ID NO: 5838822 - DNA, 25 bp, Homo sapien
attgtcgcaagtcacagaattattt

SEQ ID NO: 5838823 - DNA, 25 bp, Homo sapien
ggcaggatcgacgcgcttctgtatg

SEQ ID NO: 5838824 - DNA, 25 bp, Homo sapien
gttgctggatctgctgtttgaagcg

SEQ ID NO: 5838825 - DNA, 25 bp, Homo sapien
ggatctgctgtttgaagcgcagcag

SEQ ID NO: 5838826 - DNA, 25 bp, Homo sapien
gcgcagcaggtgcatcgccagcatt

SEQ ID NO: 5838827 - DNA, 25 bp, Homo sapien
gcaggtgcatcgccagcatttcgat

SEQ ID NO: 5838828 - DNA, 25 bp, Homo sapien
gcatcgccagcatttcgatcctcgt

SEQ ID NO: 5838829 - DNA, 25 bp, Homo sapien
gcatttcgatcctcgtcaggtgcag

SEQ ID NO: 5838830 - DNA, 25 bp, Homo sapien
cgatcctcgtcaggtgcaggtcagc

SEQ ID NO: 5838831 - DNA, 25 bp, Homo sapien
tcgtcaggtgcaggtcagcacgttg

SEQ ID NO: 5838832 - DNA, 25 bp, Homo sapien
gcaggtcagcacgttgctgtcgatt

SEQ ID NO: 5838833 - DNA, 25 bp, Homo sapien
cagcacgttgctgtcgattaagacc

SEQ ID NO: 5838834 - DNA, 25 bp, Homo sapien
gctgtcgattaagaccggagcttgt

SEQ ID NO: 5838835 - DNA, 25 bp, Homo sapien
agcttgtccggaagattgcaaatac

SEQ ID NO: 5838836 - DNA, 25 bp, Homo sapien
agattgcaaatactgcccgcaaacg

SEQ ID NO: 5838837 - DNA, 25 bp, Homo sapien
caaatactgcccgcaaacgtcgcgc

SEQ ID NO: 5838838 - DNA, 25 bp, Homo sapien
tgaacaggtgctggagtcggcgcgc

SEQ ID NO: 5838839 - DNA, 25 bp, Homo sapien
ggagtcggcgcgcaaagcgaaagcg

SEQ ID NO: 5838840 - DNA, 25 bp, Homo sapien
gacattgtcgcaagtcacagaatta

SEQ ID NO: 5838841 - DNA, 25 bp, Homo sapien
caaagcgaaagcggcaggatcgacg

SEQ ID NO: 5838842 - DNA, 25 bp, Homo sapien
attgtcgcaagtcacagaattattt

SEQ ID NO: 5838843 - DNA, 25 bp, Homo sapien
ggcaggatcgacgcgcttctgtatg

SEQ ID NO: 5838844 - DNA, 25 bp, Homo sapien
gttgctggatctgctgtttgaagcg

SEQ ID NO: 5838845 - DNA, 25 bp, Homo sapien
ggatctgctgtttgaagcgcagcag

SEQ ID NO: 5838846 - DNA, 25 bp, Homo sapien
gcgcagcaggtgcatcgccagcatt

SEQ ID NO: 5838847 - DNA, 25 bp, Homo sapien
gcaggtgcatcgccagcatttcgat

SEQ ID NO: 5838848 - DNA, 25 bp, Homo sapien
gcatcgccagcatttcgatcctcgt

SEQ ID NO: 5838849 - DNA, 25 bp, Homo sapien
gcatttcgatcctcgtcaggtgcag

SEQ ID NO: 5838850 - DNA, 25 bp, Homo sapien
cgatcctcgtcaggtgcaggtcagc

SEQ ID NO: 5838851 - DNA, 25 bp, Homo sapien
tcgtcaggtgcaggtcagcacgttg

SEQ ID NO: 5838852 - DNA, 25 bp, Homo sapien
gcaggtcagcacgttgctgtcgatt

SEQ ID NO: 5838853 - DNA, 25 bp, Homo sapien
cagcacgttgctgtcgattaagacc

SEQ ID NO: 5838854 - DNA, 25 bp, Homo sapien
gctgtcgattaagaccggagcttgt

SEQ ID NO: 5838855 - DNA, 25 bp, Homo sapien
agcttgtccggaagattgcaaatac

SEQ ID NO: 5838856 - DNA, 25 bp, Homo sapien
agattgcaaatactgcccgcaaacg

SEQ ID NO: 5838857 - DNA, 25 bp, Homo sapien
caaatactgcccgcaaacgtcgcgc

SEQ ID NO: 5838858 - DNA, 25 bp, Homo sapien
tgaacaggtgctggagtcggcgcgc

SEQ ID NO: 5838859 - DNA, 25 bp, Homo sapien
ggagtcggcgcgcaaagcgaaagcg

SEQ ID NO: 5838860 - DNA, 25 bp, Homo sapien
gacattgtcgcaagtcacagaatta

SEQ ID NO: 5838861 - DNA, 25 bp, Homo sapien
caaagcgaaagcggcaggatcgacg

SEQ ID NO: 5838862 - DNA, 25 bp, Homo sapien
attgtcgcaagtcacagaattattt

SEQ ID NO: 5838863 - DNA, 25 bp, Homo sapien
ggcaggatcgacgcgcttctgtatg

SEQ ID NO: 5838864 - DNA, 25 bp, Homo sapien
gttgctggatctgctgtttgaagcg

SEQ ID NO: 5838865 - DNA, 25 bp, Homo sapien
ggatctgctgtttgaagcgcagcag

SEQ ID NO: 5838866 - DNA, 25 bp, Homo sapien
gcgcagcaggtgcatcgccagcatt

SEQ ID NO: 5838867 - DNA, 25 bp, Homo sapien
gcaggtgcatcgccagcatttcgat

SEQ ID NO: 5838868 - DNA, 25 bp, Homo sapien
gcatcgccagcatttcgatcctcgt

SEQ ID NO: 5838869 - DNA, 25 bp, Homo sapien
gcatttcgatcctcgtcaggtgcag

SEQ ID NO: 5838870 - DNA, 25 bp, Homo sapien
cgatcctcgtcaggtgcaggtcagc

SEQ ID NO: 5838871 - DNA, 25 bp, Homo sapien
tcgtcaggtgcaggtcagcacgttg

SEQ ID NO: 5838872 - DNA, 25 bp, Homo sapien
gcaggtcagcacgttgctgtcgatt

SEQ ID NO: 5838873 - DNA, 25 bp, Homo sapien
cagcacgttgctgtcgattaagacc

SEQ ID NO: 5838874 - DNA, 25 bp, Homo sapien
gctgtcgattaagaccggagcttgt

SEQ ID NO: 5838875 - DNA, 25 bp, Homo sapien
agcttgtccggaagattgcaaatac

SEQ ID NO: 5838876 - DNA, 25 bp, Homo sapien
agattgcaaatactgcccgcaaacg

SEQ ID NO: 5838877 - DNA, 25 bp, Homo sapien
caaatactgcccgcaaacgtcgcgc

SEQ ID NO: 5838878 - DNA, 25 bp, Homo sapien
tgaacaggtgctggagtcggcgcgc

SEQ ID NO: 5838879 - DNA, 25 bp, Homo sapien
ggagtcggcgcgcaaagcgaaagcg

SEQ ID NO: 5838880 - DNA, 25 bp, Homo sapien
gacattgtcgcaagtcacagaatta

SEQ ID NO: 5838881 - DNA, 25 bp, Homo sapien
caaagcgaaagcggcaggatcgacg

SEQ ID NO: 5838882 - DNA, 25 bp, Homo sapien
attgtcgcaagtcacagaattattt

SEQ ID NO: 5838883 - DNA, 25 bp, Homo sapien
ggcaggatcgacgcgcttctgtatg

SEQ ID NO: 5838884 - DNA, 25 bp, Homo sapien
gttgctggatctgctgtttgaagcg

SEQ ID NO: 5838885 - DNA, 25 bp, Homo sapien
ggatctgctgtttgaagcgcagcag

SEQ ID NO: 5838886 - DNA, 25 bp, Homo sapien
gcgcagcaggtgcatcgccagcatt

SEQ ID NO: 5838887 - DNA, 25 bp, Homo sapien
gcaggtgcatcgccagcatttcgat

SEQ ID NO: 5838888 - DNA, 25 bp, Homo sapien
gcatcgccagcatttcgatcctcgt

SEQ ID NO: 5838889 - DNA, 25 bp, Homo sapien
gcatttcgatcctcgtcaggtgcag

SEQ ID NO: 5838890 - DNA, 25 bp, Homo sapien
cgatcctcgtcaggtgcaggtcagc

SEQ ID NO: 5838891 - DNA, 25 bp, Homo sapien
tcgtcaggtgcaggtcagcacgttg

SEQ ID NO: 5838892 - DNA, 25 bp, Homo sapien
gcaggtcagcacgttgctgtcgatt

SEQ ID NO: 5838893 - DNA, 25 bp, Homo sapien
cagcacgttgctgtcgattaagacc

SEQ ID NO: 5838894 - DNA, 25 bp, Homo sapien
gctgtcgattaagaccggagcttgt

SEQ ID NO: 5838895 - DNA, 25 bp, Homo sapien
agcttgtccggaagattgcaaatac

SEQ ID NO: 5838896 - DNA, 25 bp, Homo sapien
agattgcaaatactgcccgcaaacg

SEQ ID NO: 5838897 - DNA, 25 bp, Homo sapien
caaatactgcccgcaaacgtcgcgc

SEQ ID NO: 5838898 - DNA, 25 bp, Homo sapien
tgaacaggtgctggagtcggcgcgc

SEQ ID NO: 5838899 - DNA, 25 bp, Homo sapien
ggagtcggcgcgcaaagcgaaagcg

SEQ ID NO: 5838900 - DNA, 25 bp, Homo sapien
gacattgtcgcaagtcacagaatta

SEQ ID NO: 5838901 - DNA, 25 bp, Homo sapien
caaagcgaaagcggcaggatcgacg

SEQ ID NO: 5838902 - DNA, 25 bp, Homo sapien
attgtcgcaagtcacagaattattt

SEQ ID NO: 5838903 - DNA, 25 bp, Homo sapien
ggcaggatcgacgcgcttctgtatg

SEQ ID NO: 5838904 - DNA, 25 bp, Homo sapien
gttgctggatctgctgtttgaagcg

SEQ ID NO: 5838905 - DNA, 25 bp, Homo sapien
ggatctgctgtttgaagcgcagcag

SEQ ID NO: 5838906 - DNA, 25 bp, Homo sapien
gcgcagcaggtgcatcgccagcatt

SEQ ID NO: 5838907 - DNA, 25 bp, Homo sapien
gcaggtgcatcgccagcatttcgat

SEQ ID NO: 5838908 - DNA, 25 bp, Homo sapien
gcatcgccagcatttcgatcctcgt

SEQ ID NO: 5838909 - DNA, 25 bp, Homo sapien
gcatttcgatcctcgtcaggtgcag

SEQ ID NO: 5838910 - DNA, 25 bp, Homo sapien
cgatcctcgtcaggtgcaggtcagc

SEQ ID NO: 5838911 - DNA, 25 bp, Homo sapien
tcgtcaggtgcaggtcagcacgttg

SEQ ID NO: 5838912 - DNA, 25 bp, Homo sapien
gcaggtcagcacgttgctgtcgatt

SEQ ID NO: 5838913 - DNA, 25 bp, Homo sapien
cagcacgttgctgtcgattaagacc

SEQ ID NO: 5838914 - DNA, 25 bp, Homo sapien
gctgtcgattaagaccggagcttgt

SEQ ID NO: 5838915 - DNA, 25 bp, Homo sapien
agcttgtccggaagattgcaaatac

SEQ ID NO: 5838916 - DNA, 25 bp, Homo sapien
agattgcaaatactgcccgcaaacg

SEQ ID NO: 5838917 - DNA, 25 bp, Homo sapien
caaatactgcccgcaaacgtcgcgc

SEQ ID NO: 5838918 - DNA, 25 bp, Homo sapien
tgaacaggtgctggagtcggcgcgc

SEQ ID NO: 5838919 - DNA, 25 bp, Homo sapien
ggagtcggcgcgcaaagcgaaagcg

SEQ ID NO: 5838920 - DNA, 25 bp, Homo sapien
gacattgtcgcaagtcacagaatta

SEQ ID NO: 5838921 - DNA, 25 bp, Homo sapien
caaagcgaaagcggcaggatcgacg

SEQ ID NO: 5838922 - DNA, 25 bp, Homo sapien
attgtcgcaagtcacagaattattt

SEQ ID NO: 5838923 - DNA, 25 bp, Homo sapien
ggcaggatcgacgcgcttctgtatg

SEQ ID NO: 5838924 - DNA, 25 bp, Homo sapien
gttgctggatctgctgtttgaagcg

SEQ ID NO: 5838925 - DNA, 25 bp, Homo sapien
ggatctgctgtttgaagcgcagcag

SEQ ID NO: 5838926 - DNA, 25 bp, Homo sapien
gcgcagcaggtgcatcgccagcatt

SEQ ID NO: 5838927 - DNA, 25 bp, Homo sapien
gcaggtgcatcgccagcatttcgat

SEQ ID NO: 5838928 - DNA, 25 bp, Homo sapien
gcatcgccagcatttcgatcctcgt

SEQ ID NO: 5838929 - DNA, 25 bp, Homo sapien
gcatttcgatcctcgtcaggtgcag

SEQ ID NO: 5838930 - DNA, 25 bp, Homo sapien
cgatcctcgtcaggtgcaggtcagc

SEQ ID NO: 5838931 - DNA, 25 bp, Homo sapien
tcgtcaggtgcaggtcagcacgttg

SEQ ID NO: 5838932 - DNA, 25 bp, Homo sapien
gcaggtcagcacgttgctgtcgatt

SEQ ID NO: 5838933 - DNA, 25 bp, Homo sapien
cagcacgttgctgtcgattaagacc

SEQ ID NO: 5838934 - DNA, 25 bp, Homo sapien
gctgtcgattaagaccggagcttgt

SEQ ID NO: 5838935 - DNA, 25 bp, Homo sapien
agcttgtccggaagattgcaaatac

SEQ ID NO: 5838936 - DNA, 25 bp, Homo sapien
agattgcaaatactgcccgcaaacg

SEQ ID NO: 5838937 - DNA, 25 bp, Homo sapien
caaatactgcccgcaaacgtcgcgc

SEQ ID NO: 5838938 - DNA, 25 bp, Homo sapien
tgaacaggtgctggagtcggcgcgc

SEQ ID NO: 5838939 - DNA, 25 bp, Homo sapien
ggagtcggcgcgcaaagcgaaagcg

SEQ ID NO: 5838940 - DNA, 25 bp, Homo sapien
gacattgtcgcaagtcacagaatta

SEQ ID NO: 5838941 - DNA, 25 bp, Homo sapien
caaagcgaaagcggcaggatcgacg

SEQ ID NO: 5838942 - DNA, 25 bp, Homo sapien
attgtcgcaagtcacagaattattt

SEQ ID NO: 5838943 - DNA, 25 bp, Homo sapien
ggcaggatcgacgcgcttctgtatg

SEQ ID NO: 5838944 - DNA, 25 bp, Homo sapien
gttgctggatctgctgtttgaagcg

SEQ ID NO: 5838945 - DNA, 25 bp, Homo sapien
ggatctgctgtttgaagcgcagcag

SEQ ID NO: 5838946 - DNA, 25 bp, Homo sapien
gcgcagcaggtgcatcgccagcatt

SEQ ID NO: 5838947 - DNA, 25 bp, Homo sapien
gcaggtgcatcgccagcatttcgat

SEQ ID NO: 5838948 - DNA, 25 bp, Homo sapien
gcatcgccagcatttcgatcctcgt

SEQ ID NO: 5838949 - DNA, 25 bp, Homo sapien
gcatttcgatcctcgtcaggtgcag

SEQ ID NO: 5838950 - DNA, 25 bp, Homo sapien
cgatcctcgtcaggtgcaggtcagc

SEQ ID NO: 5838951 - DNA, 25 bp, Homo sapien
tcgtcaggtgcaggtcagcacgttg

SEQ ID NO: 5838952 - DNA, 25 bp, Homo sapien
gcaggtcagcacgttgctgtcgatt

SEQ ID NO: 5838953 - DNA, 25 bp, Homo sapien
cagcacgttgctgtcgattaagacc

SEQ ID NO: 5838954 - DNA, 25 bp, Homo sapien
gctgtcgattaagaccggagcttgt

SEQ ID NO: 5838955 - DNA, 25 bp, Homo sapien
agcttgtccggaagattgcaaatac

SEQ ID NO: 5838956 - DNA, 25 bp, Homo sapien
agattgcaaatactgcccgcaaacg

SEQ ID NO: 5838957 - DNA, 25 bp, Homo sapien
caaatactgcccgcaaacgtcgcgc

SEQ ID NO: 5838958 - DNA, 25 bp, Homo sapien
tgaacaggtgctggagtcggcgcgc

SEQ ID NO: 5838959 - DNA, 25 bp, Homo sapien
ggagtcggcgcgcaaagcgaaagcg

SEQ ID NO: 5838960 - DNA, 25 bp, Homo sapien
gacattgtcgcaagtcacagaatta

SEQ ID NO: 5838961 - DNA, 25 bp, Homo sapien
caaagcgaaagcggcaggatcgacg

SEQ ID NO: 5838962 - DNA, 25 bp, Homo sapien
attgtcgcaagtcacagaattattt

SEQ ID NO: 5838963 - DNA, 25 bp, Homo sapien
ggcaggatcgacgcgcttctgtatg

SEQ ID NO: 5838964 - DNA, 25 bp, Homo sapien
gttgctggatctgctgtttgaagcg

SEQ ID NO: 5838965 - DNA, 25 bp, Homo sapien
ggatctgctgtttgaagcgcagcag

SEQ ID NO: 5838966 - DNA, 25 bp, Homo sapien
gcgcagcaggtgcatcgccagcatt

SEQ ID NO: 5838967 - DNA, 25 bp, Homo sapien
gcaggtgcatcgccagcatttcgat

SEQ ID NO: 5838968 - DNA, 25 bp, Homo sapien
gcatcgccagcatttcgatcctcgt

SEQ ID NO: 5838969 - DNA, 25 bp, Homo sapien
gcatttcgatcctcgtcaggtgcag

SEQ ID NO: 5838970 - DNA, 25 bp, Homo sapien
cgatcctcgtcaggtgcaggtcagc

SEQ ID NO: 5838971 - DNA, 25 bp, Homo sapien
tcgtcaggtgcaggtcagcacgttg

SEQ ID NO: 5838972 - DNA, 25 bp, Homo sapien
gcaggtcagcacgttgctgtcgatt

SEQ ID NO: 5838973 - DNA, 25 bp, Homo sapien
cagcacgttgctgtcgattaagacc

SEQ ID NO: 5838974 - DNA, 25 bp, Homo sapien
gctgtcgattaagaccggagcttgt

SEQ ID NO: 5838975 - DNA, 25 bp, Homo sapien
agcttgtccggaagattgcaaatac

SEQ ID NO: 5838976 - DNA, 25 bp, Homo sapien
agattgcaaatactgcccgcaaacg

SEQ ID NO: 5838977 - DNA, 25 bp, Homo sapien
caaatactgcccgcaaacgtcgcgc

SEQ ID NO: 5838978 - DNA, 25 bp, Homo sapien
tgaacaggtgctggagtcggcgcgc

SEQ ID NO: 5838979 - DNA, 25 bp, Homo sapien
ggagtcggcgcgcaaagcgaaagcg

SEQ ID NO: 5838980 - DNA, 25 bp, Homo sapien
gacattgtcgcaagtcacagaatta

SEQ ID NO: 5838981 - DNA, 25 bp, Homo sapien
caaagcgaaagcggcaggatcgacg

SEQ ID NO: 5838982 - DNA, 25 bp, Homo sapien
attgtcgcaagtcacagaattattt

SEQ ID NO: 5838983 - DNA, 25 bp, Homo sapien
ggcaggatcgacgcgcttctgtatg

SEQ ID NO: 5838984 - DNA, 25 bp, Homo sapien
gttgctggatctgctgtttgaagcg

SEQ ID NO: 5838985 - DNA, 25 bp, Homo sapien
ggatctgctgtttgaagcgcagcag

SEQ ID NO: 5838986 - DNA, 25 bp, Homo sapien
gcgcagcaggtgcatcgccagcatt

SEQ ID NO: 5838987 - DNA, 25 bp, Homo sapien
gcaggtgcatcgccagcatttcgat

SEQ ID NO: 5838988 - DNA, 25 bp, Homo sapien
gcatcgccagcatttcgatcctcgt

SEQ ID NO: 5838989 - DNA, 25 bp, Homo sapien
gcatttcgatcctcgtcaggtgcag

SEQ ID NO: 5838990 - DNA, 25 bp, Homo sapien
cgatcctcgtcaggtgcaggtcagc

SEQ ID NO: 5838991 - DNA, 25 bp, Homo sapien
tcgtcaggtgcaggtcagcacgttg

SEQ ID NO: 5838992 - DNA, 25 bp, Homo sapien
gcaggtcagcacgttgctgtcgatt

SEQ ID NO: 5838993 - DNA, 25 bp, Homo sapien
cagcacgttgctgtcgattaagacc

SEQ ID NO: 5838994 - DNA, 25 bp, Homo sapien
gctgtcgattaagaccggagcttgt

SEQ ID NO: 5838995 - DNA, 25 bp, Homo sapien
agcttgtccggaagattgcaaatac

SEQ ID NO: 5838996 - DNA, 25 bp, Homo sapien
agattgcaaatactgcccgcaaacg

SEQ ID NO: 5838997 - DNA, 25 bp, Homo sapien
caaatactgcccgcaaacgtcgcgc

SEQ ID NO: 5838998 - DNA, 25 bp, Homo sapien
tgaacaggtgctggagtcggcgcgc

SEQ ID NO: 5838999 - DNA, 25 bp, Homo sapien
ggagtcggcgcgcaaagcgaaagcg

SEQ ID NO: 5839000 - DNA, 25 bp, Homo sapien
gacattgtcgcaagtcacagaatta

SEQ ID NO: 5839001 - DNA, 25 bp, Homo sapien
caaagcgaaagcggcaggatcgacg

SEQ ID NO: 5839002 - DNA, 25 bp, Homo sapien
attgtcgcaagtcacagaattattt

SEQ ID NO: 5839003 - DNA, 25 bp, Homo sapien
ggcaggatcgacgcgcttctgtatg

SEQ ID NO: 5839004 - DNA, 25 bp, Homo sapien
gttgctggatctgctgtttgaagcg

SEQ ID NO: 5839005 - DNA, 25 bp, Homo sapien
ggatctgctgtttgaagcgcagcag

SEQ ID NO: 5839006 - DNA, 25 bp, Homo sapien
gcgcagcaggtgcatcgccagcatt

SEQ ID NO: 5839007 - DNA, 25 bp, Homo sapien
gcaggtgcatcgccagcatttcgat

SEQ ID NO: 5839008 - DNA, 25 bp, Homo sapien
gcatcgccagcatttcgatcctcgt

SEQ ID NO: 5839009 - DNA, 25 bp, Homo sapien
gcatttcgatcctcgtcaggtgcag

SEQ ID NO: 5839010 - DNA, 25 bp, Homo sapien
cgatcctcgtcaggtgcaggtcagc

SEQ ID NO: 5839011 - DNA, 25 bp, Homo sapien
tcgtcaggtgcaggtcagcacgttg

SEQ ID NO: 5839012 - DNA, 25 bp, Homo sapien
gcaggtcagcacgttgctgtcgatt

SEQ ID NO: 5839013 - DNA, 25 bp, Homo sapien
cagcacgttgctgtcgattaagacc

SEQ ID NO: 5839014 - DNA, 25 bp, Homo sapien
gctgtcgattaagaccggagcttgt

SEQ ID NO: 5839015 - DNA, 25 bp, Homo sapien
agcttgtccggaagattgcaaatac

SEQ ID NO: 5839016 - DNA, 25 bp, Homo sapien
agattgcaaatactgcccgcaaacg

SEQ ID NO: 5839017 - DNA, 25 bp, Homo sapien
caaatactgcccgcaaacgtcgcgc

SEQ ID NO: 5839018 - DNA, 25 bp, Homo sapien
tgaacaggtgctggagtcggcgcgc

SEQ ID NO: 5839019 - DNA, 25 bp, Homo sapien
ggagtcggcgcgcaaagcgaaagcg

SEQ ID NO: 5839020 - DNA, 25 bp, Homo sapien
gacattgtcgcaagtcacagaatta

SEQ ID NO: 5839021 - DNA, 25 bp, Homo sapien
caaagcgaaagcggcaggatcgacg

SEQ ID NO: 5839022 - DNA, 25 bp, Homo sapien
attgtcgcaagtcacagaattattt

SEQ ID NO: 5839023 - DNA, 25 bp, Homo sapien
ggcaggatcgacgcgcttctgtatg

SEQ ID NO: 5839024 - DNA, 25 bp, Homo sapien
gttgctggatctgctgtttgaagcg

SEQ ID NO: 5839025 - DNA, 25 bp, Homo sapien
ggatctgctgtttgaagcgcagcag

SEQ ID NO: 5839026 - DNA, 25 bp, Homo sapien
gcgcagcaggtgcatcgccagcatt

SEQ ID NO: 5839027 - DNA, 25 bp, Homo sapien
gcaggtgcatcgccagcatttcgat

SEQ ID NO: 5839028 - DNA, 25 bp, Homo sapien
gcatcgccagcatttcgatcctcgt

SEQ ID NO: 5839029 - DNA, 25 bp, Homo sapien
gcatttcgatcctcgtcaggtgcag

SEQ ID NO: 5839030 - DNA, 25 bp, Homo sapien
cgatcctcgtcaggtgcaggtcagc

SEQ ID NO: 5839031 - DNA, 25 bp, Homo sapien
tcgtcaggtgcaggtcagcacgttg

SEQ ID NO: 5839032 - DNA, 25 bp, Homo sapien
gcaggtcagcacgttgctgtcgatt

SEQ ID NO: 5839033 - DNA, 25 bp, Homo sapien
cagcacgttgctgtcgattaagacc

SEQ ID NO: 5839034 - DNA, 25 bp, Homo sapien
gctgtcgattaagaccggagcttgt

SEQ ID NO: 5839035 - DNA, 25 bp, Homo sapien
agcttgtccggaagattgcaaatac

SEQ ID NO: 5839036 - DNA, 25 bp, Homo sapien
agattgcaaatactgcccgcaaacg

SEQ ID NO: 5839037 - DNA, 25 bp, Homo sapien
caaatactgcccgcaaacgtcgcgc

SEQ ID NO: 5839038 - DNA, 25 bp, Homo sapien
tgaacaggtgctggagtcggcgcgc

SEQ ID NO: 5839039 - DNA, 25 bp, Homo sapien
ggagtcggcgcgcaaagcgaaagcg

SEQ ID NO: 5839040 - DNA, 25 bp, Homo sapien
gacattgtcgcaagtcacagaatta

SEQ ID NO: 5839041 - DNA, 25 bp, Homo sapien
caaagcgaaagcggcaggatcgacg

SEQ ID NO: 5839042 - DNA, 25 bp, Homo sapien
attgtcgcaagtcacagaattattt

SEQ ID NO: 5839043 - DNA, 25 bp, Homo sapien
ggcaggatcgacgcgcttctgtatg

SEQ ID NO: 5839044 - DNA, 25 bp, Homo sapien
gttgctggatctgctgtttgaagcg

SEQ ID NO: 5839045 - DNA, 25 bp, Homo sapien
ggatctgctgtttgaagcgcagcag

SEQ ID NO: 5839046 - DNA, 25 bp, Homo sapien
gcgcagcaggtgcatcgccagcatt

SEQ ID NO: 5839047 - DNA, 25 bp, Homo sapien
gcaggtgcatcgccagcatttcgat

SEQ ID NO: 5839048 - DNA, 25 bp, Homo sapien
gcatcgccagcatttcgatcctcgt

SEQ ID NO: 5839049 - DNA, 25 bp, Homo sapien
gcatttcgatcctcgtcaggtgcag

SEQ ID NO: 5839050 - DNA, 25 bp, Homo sapien
cgatcctcgtcaggtgcaggtcagc

SEQ ID NO: 5839051 - DNA, 25 bp, Homo sapien
tcgtcaggtgcaggtcagcacgttg

SEQ ID NO: 5839052 - DNA, 25 bp, Homo sapien
gcaggtcagcacgttgctgtcgatt

SEQ ID NO: 5839053 - DNA, 25 bp, Homo sapien
cagcacgttgctgtcgattaagacc

SEQ ID NO: 5839054 - DNA, 25 bp, Homo sapien
gctgtcgattaagaccggagcttgt

SEQ ID NO: 5839055 - DNA, 25 bp, Homo sapien
agcttgtccggaagattgcaaatac

SEQ ID NO: 5839056 - DNA, 25 bp, Homo sapien
agattgcaaatactgcccgcaaacg

SEQ ID NO: 5839057 - DNA, 25 bp, Homo sapien
caaatactgcccgcaaacgtcgcgc

SEQ ID NO: 5839058 - DNA, 25 bp, Homo sapien
tgaacaggtgctggagtcggcgcgc

SEQ ID NO: 5839059 - DNA, 25 bp, Homo sapien
ggagtcggcgcgcaaagcgaaagcg

SEQ ID NO: 5839060 - DNA, 25 bp, Homo sapien
gacattgtcgcaagtcacagaatta

SEQ ID NO: 5839061 - DNA, 25 bp, Homo sapien
caaagcgaaagcggcaggatcgacg

SEQ ID NO: 5839062 - DNA, 25 bp, Homo sapien
attgtcgcaagtcacagaattattt

SEQ ID NO: 5839063 - DNA, 25 bp, Homo sapien
ggcaggatcgacgcgcttctgtatg

SEQ ID NO: 5839064 - DNA, 25 bp, Homo sapien
gttgctggatctgctgtttgaagcg

SEQ ID NO: 5839065 - DNA, 25 bp, Homo sapien
ggatctgctgtttgaagcgcagcag

SEQ ID NO: 5839066 - DNA, 25 bp, Homo sapien
gcgcagcaggtgcatcgccagcatt

SEQ ID NO: 5839067 - DNA, 25 bp, Homo sapien
gcaggtgcatcgccagcatttcgat

SEQ ID NO: 5839068 - DNA, 25 bp, Homo sapien
gcatcgccagcatttcgatcctcgt

SEQ ID NO: 5839069 - DNA, 25 bp, Homo sapien
gcatttcgatcctcgtcaggtgcag

SEQ ID NO: 5839070 - DNA, 25 bp, Homo sapien
cgatcctcgtcaggtgcaggtcagc

SEQ ID NO: 5839071 - DNA, 25 bp, Homo sapien
tcgtcaggtgcaggtcagcacgttg

SEQ ID NO: 5839072 - DNA, 25 bp, Homo sapien
gcaggtcagcacgttgctgtcgatt

SEQ ID NO: 5839073 - DNA, 25 bp, Homo sapien
cagcacgttgctgtcgattaagacc

SEQ ID NO: 5839074 - DNA, 25 bp, Homo sapien
gctgtcgattaagaccggagcttgt

SEQ ID NO: 5839075 - DNA, 25 bp, Homo sapien
agcttgtccggaagattgcaaatac

SEQ ID NO: 5839076 - DNA, 25 bp, Homo sapien
agattgcaaatactgcccgcaaacg

SEQ ID NO: 5839077 - DNA, 25 bp, Homo sapien
caaatactgcccgcaaacgtcgcgc

SEQ ID NO: 5839078 - DNA, 25 bp, Homo sapien
tgaacaggtgctggagtcggcgcgc

SEQ ID NO: 5839079 - DNA, 25 bp, Homo sapien
ggagtcggcgcgcaaagcgaaagcg

SEQ ID NO: 5839080 - DNA, 25 bp, Homo sapien
gacattgtcgcaagtcacagaatta

SEQ ID NO: 5839081 - DNA, 25 bp, Homo sapien
caaagcgaaagcggcaggatcgacg

SEQ ID NO: 5839082 - DNA, 25 bp, Homo sapien
attgtcgcaagtcacagaattattt

SEQ ID NO: 5839083 - DNA, 25 bp, Homo sapien
ggcaggatcgacgcgcttctgtatg

SEQ ID NO: 5839084 - DNA, 25 bp, Homo sapien
gttgctggatctgctgtttgaagcg

SEQ ID NO: 5839085 - DNA, 25 bp, Homo sapien
ggatctgctgtttgaagcgcagcag

SEQ ID NO: 5839086 - DNA, 25 bp, Homo sapien
gcgcagcaggtgcatcgccagcatt

SEQ ID NO: 5839087 - DNA, 25 bp, Homo sapien
gcaggtgcatcgccagcatttcgat

SEQ ID NO: 5839088 - DNA, 25 bp, Homo sapien
gcatcgccagcatttcgatcctcgt

SEQ ID NO: 5839089 - DNA, 25 bp, Homo sapien
gcatttcgatcctcgtcaggtgcag

SEQ ID NO: 5839090 - DNA, 25 bp, Homo sapien
cgatcctcgtcaggtgcaggtcagc

SEQ ID NO: 5839091 - DNA, 25 bp, Homo sapien
tcgtcaggtgcaggtcagcacgttg

SEQ ID NO: 5839092 - DNA, 25 bp, Homo sapien
gcaggtcagcacgttgctgtcgatt

SEQ ID NO: 5839093 - DNA, 25 bp, Homo sapien
cagcacgttgctgtcgattaagacc

SEQ ID NO: 5839094 - DNA, 25 bp, Homo sapien
gctgtcgattaagaccggagcttgt

SEQ ID NO: 5839095 - DNA, 25 bp, Homo sapien
agcttgtccggaagattgcaaatac

SEQ ID NO: 5839096 - DNA, 25 bp, Homo sapien
agattgcaaatactgcccgcaaacg

SEQ ID NO: 5839097 - DNA, 25 bp, Homo sapien
caaatactgcccgcaaacgtcgcgc

SEQ ID NO: 5839098 - DNA, 25 bp, Homo sapien
tgaacaggtgctggagtcggcgcgc

SEQ ID NO: 5839099 - DNA, 25 bp, Homo sapien
ggagtcggcgcgcaaagcgaaagcg

SEQ ID NO: 5839100 - DNA, 25 bp, Homo sapien
gacattgtcgcaagtcacagaatta

SEQ ID NO: 5839101 - DNA, 25 bp, Homo sapien
caaagcgaaagcggcaggatcgacg

SEQ ID NO: 5839102 - DNA, 25 bp, Homo sapien
attgtcgcaagtcacagaattattt

SEQ ID NO: 5839103 - DNA, 25 bp, Homo sapien
ggcaggatcgacgcgcttctgtatg

SEQ ID NO: 5839104 - DNA, 25 bp, Homo sapien
gttgctggatctgctgtttgaagcg

SEQ ID NO: 5839105 - DNA, 25 bp, Homo sapien
ggatctgctgtttgaagcgcagcag

SEQ ID NO: 5839106 - DNA, 25 bp, Homo sapien
gcgcagcaggtgcatcgccagcatt

SEQ ID NO: 5839107 - DNA, 25 bp, Homo sapien
gcaggtgcatcgccagcatttcgat

SEQ ID NO: 5839108 - DNA, 25 bp, Homo sapien
gcatcgccagcatttcgatcctcgt

SEQ ID NO: 5839109 - DNA, 25 bp, Homo sapien
gcatttcgatcctcgtcaggtgcag

SEQ ID NO: 5839110 - DNA, 25 bp, Homo sapien
cgatcctcgtcaggtgcaggtcagc

SEQ ID NO: 5839111 - DNA, 25 bp, Homo sapien
tcgtcaggtgcaggtcagcacgttg

SEQ ID NO: 5839112 - DNA, 25 bp, Homo sapien
gcaggtcagcacgttgctgtcgatt

SEQ ID NO: 5839113 - DNA, 25 bp, Homo sapien
cagcacgttgctgtcgattaagacc

SEQ ID NO: 5839114 - DNA, 25 bp, Homo sapien
gctgtcgattaagaccggagcttgt

SEQ ID NO: 5839115 - DNA, 25 bp, Homo sapien
agcttgtccggaagattgcaaatac

SEQ ID NO: 5839116 - DNA, 25 bp, Homo sapien
agattgcaaatactgcccgcaaacg

SEQ ID NO: 5839117 - DNA, 25 bp, Homo sapien
caaatactgcccgcaaacgtcgcgc

SEQ ID NO: 5839118 - DNA, 25 bp, Homo sapien
tgaacaggtgctggagtcggcgcgc

SEQ ID NO: 5839119 - DNA, 25 bp, Homo sapien
ggagtcggcgcgcaaagcgaaagcg

SEQ ID NO: 5839120 - DNA, 25 bp, Homo sapien
gacattgtcgcaagtcacagaatta

SEQ ID NO: 5839121 - DNA, 25 bp, Homo sapien
caaagcgaaagcggcaggatcgacg

SEQ ID NO: 5839122 - DNA, 25 bp, Homo sapien
attgtcgcaagtcacagaattattt

SEQ ID NO: 5839123 - DNA, 25 bp, Homo sapien
ggcaggatcgacgcgcttctgtatg

SEQ ID NO: 5839124 - DNA, 25 bp, Homo sapien
gttgctggatctgctgtttgaagcg

SEQ ID NO: 5839125 - DNA, 25 bp, Homo sapien
ggatctgctgtttgaagcgcagcag

SEQ ID NO: 5839126 - DNA, 25 bp, Homo sapien
gcgcagcaggtgcatcgccagcatt

SEQ ID NO: 5839127 - DNA, 25 bp, Homo sapien
gcaggtgcatcgccagcatttcgat

SEQ ID NO: 5839128 - DNA, 25 bp, Homo sapien
gcatcgccagcatttcgatcctcgt

SEQ ID NO: 5839129 - DNA, 25 bp, Homo sapien
gcatttcgatcctcgtcaggtgcag

SEQ ID NO: 5839130 - DNA, 25 bp, Homo sapien
cgatcctcgtcaggtgcaggtcagc

SEQ ID NO: 5839131 - DNA, 25 bp, Homo sapien
tcgtcaggtgcaggtcagcacgttg

SEQ ID NO: 5839132 - DNA, 25 bp, Homo sapien
gcaggtcagcacgttgctgtcgatt

SEQ ID NO: 5839133 - DNA, 25 bp, Homo sapien
cagcacgttgctgtcgattaagacc

SEQ ID NO: 5839134 - DNA, 25 bp, Homo sapien
gctgtcgattaagaccggagcttgt

SEQ ID NO: 5839135 - DNA, 25 bp, Homo sapien
agcttgtccggaagattgcaaatac

SEQ ID NO: 5839136 - DNA, 25 bp, Homo sapien
agattgcaaatactgcccgcaaacg

SEQ ID NO: 5839137 - DNA, 25 bp, Homo sapien
caaatactgcccgcaaacgtcgcgc

SEQ ID NO: 5839138 - DNA, 25 bp, Homo sapien
tgaacaggtgctggagtcggcgcgc

SEQ ID NO: 5839139 - DNA, 25 bp, Homo sapien
ggagtcggcgcgcaaagcgaaagcg

SEQ ID NO: 5839140 - DNA, 25 bp, Homo sapien
gacattgtcgcaagtcacagaatta

SEQ ID NO: 5839141 - DNA, 25 bp, Homo sapien
caaagcgaaagcggcaggatcgacg

SEQ ID NO: 5839142 - DNA, 25 bp, Homo sapien
attgtcgcaagtcacagaattattt

SEQ ID NO: 5839143 - DNA, 25 bp, Homo sapien
ggcaggatcgacgcgcttctgtatg

SEQ ID NO: 5839144 - DNA, 25 bp, Homo sapien
gttgctggatctgctgtttgaagcg

SEQ ID NO: 5839145 - DNA, 25 bp, Homo sapien
ggatctgctgtttgaagcgcagcag

SEQ ID NO: 5839146 - DNA, 25 bp, Homo sapien
gcgcagcaggtgcatcgccagcatt

SEQ ID NO: 5839147 - DNA, 25 bp, Homo sapien
gcaggtgcatcgccagcatttcgat

SEQ ID NO: 5839148 - DNA, 25 bp, Homo sapien
gcatcgccagcatttcgatcctcgt

SEQ ID NO: 5839149 - DNA, 25 bp, Homo sapien
gcatttcgatcctcgtcaggtgcag

SEQ ID NO: 5839150 - DNA, 25 bp, Homo sapien
cgatcctcgtcaggtgcaggtcagc

SEQ ID NO: 5839151 - DNA, 25 bp, Homo sapien
tcgtcaggtgcaggtcagcacgttg

SEQ ID NO: 5839152 - DNA, 25 bp, Homo sapien
gcaggtcagcacgttgctgtcgatt

SEQ ID NO: 5839153 - DNA, 25 bp, Homo sapien
cagcacgttgctgtcgattaagacc

SEQ ID NO: 5839154 - DNA, 25 bp, Homo sapien
gctgtcgattaagaccggagcttgt

SEQ ID NO: 5839155 - DNA, 25 bp, Homo sapien
agcttgtccggaagattgcaaatac

SEQ ID NO: 5839156 - DNA, 25 bp, Homo sapien
agattgcaaatactgcccgcaaacg

SEQ ID NO: 5839157 - DNA, 25 bp, Homo sapien
caaatactgcccgcaaacgtcgcgc

SEQ ID NO: 5839158 - DNA, 25 bp, Homo sapien
tgaacaggtgctggagtcggcgcgc

SEQ ID NO: 5839159 - DNA, 25 bp, Homo sapien
ggagtcggcgcgcaaagcgaaagcg

SEQ ID NO: 5839160 - DNA, 25 bp, Homo sapien
gacattgtcgcaagtcacagaatta

SEQ ID NO: 5839161 - DNA, 25 bp, Homo sapien
caaagcgaaagcggcaggatcgacg

SEQ ID NO: 5839162 - DNA, 25 bp, Homo sapien
attgtcgcaagtcacagaattattt

SEQ ID NO: 5839163 - DNA, 25 bp, Homo sapien
ggcaggatcgacgcgcttctgtatg

SEQ ID NO: 5839164 - DNA, 25 bp, Homo sapien
gttgctggatctgctgtttgaagcg

SEQ ID NO: 5839165 - DNA, 25 bp, Homo sapien
ggatctgctgtttgaagcgcagcag

SEQ ID NO: 5839166 - DNA, 25 bp, Homo sapien
gcgcagcaggtgcatcgccagcatt

SEQ ID NO: 5839167 - DNA, 25 bp, Homo sapien
gcaggtgcatcgccagcatttcgat

SEQ ID NO: 5839168 - DNA, 25 bp, Homo sapien
gcatcgccagcatttcgatcctcgt

SEQ ID NO: 5839169 - DNA, 25 bp, Homo sapien
gcatttcgatcctcgtcaggtgcag

SEQ ID NO: 5839170 - DNA, 25 bp, Homo sapien
cgatcctcgtcaggtgcaggtcagc

SEQ ID NO: 5839171 - DNA, 25 bp, Homo sapien
tcgtcaggtgcaggtcagcacgttg

SEQ ID NO: 5839172 - DNA, 25 bp, Homo sapien
gcaggtcagcacgttgctgtcgatt

SEQ ID NO: 5839173 - DNA, 25 bp, Homo sapien
cagcacgttgctgtcgattaagacc

SEQ ID NO: 5839174 - DNA, 25 bp, Homo sapien
gctgtcgattaagaccggagcttgt

SEQ ID NO: 5839175 - DNA, 25 bp, Homo sapien
agcttgtccggaagattgcaaatac

SEQ ID NO: 5839176 - DNA, 25 bp, Homo sapien
agattgcaaatactgcccgcaaacg

SEQ ID NO: 5839177 - DNA, 25 bp, Homo sapien
caaatactgcccgcaaacgtcgcgc

SEQ ID NO: 5839178 - DNA, 25 bp, Homo sapien
tgaacaggtgctggagtcggcgcgc

SEQ ID NO: 5839179 - DNA, 25 bp, Homo sapien
ggagtcggcgcgcaaagcgaaagcg

SEQ ID NO: 5839180 - DNA, 25 bp, Homo sapien
gacattgtcgcaagtcacagaatta

SEQ ID NO: 5839181 - DNA, 25 bp, Homo sapien
caaagcgaaagcggcaggatcgacg

SEQ ID NO: 5839182 - DNA, 25 bp, Homo sapien
attgtcgcaagtcacagaattattt

SEQ ID NO: 5839183 - DNA, 25 bp, Homo sapien
ggcaggatcgacgcgcttctgtatg

SEQ ID NO: 5839184 - DNA, 25 bp, Homo sapien
gttgctggatctgctgtttgaagcg

SEQ ID NO: 5839185 - DNA, 25 bp, Homo sapien
ggatctgctgtttgaagcgcagcag

SEQ ID NO: 5839186 - DNA, 25 bp, Homo sapien
gcgcagcaggtgcatcgccagcatt

SEQ ID NO: 5839187 - DNA, 25 bp, Homo sapien
gcaggtgcatcgccagcatttcgat

SEQ ID NO: 5839188 - DNA, 25 bp, Homo sapien
gcatcgccagcatttcgatcctcgt

SEQ ID NO: 5839189 - DNA, 25 bp, Homo sapien
gcatttcgatcctcgtcaggtgcag

SEQ ID NO: 5839190 - DNA, 25 bp, Homo sapien
cgatcctcgtcaggtgcaggtcagc

SEQ ID NO: 5839191 - DNA, 25 bp, Homo sapien
tcgtcaggtgcaggtcagcacgttg

SEQ ID NO: 5839192 - DNA, 25 bp, Homo sapien
gcaggtcagcacgttgctgtcgatt

SEQ ID NO: 5839193 - DNA, 25 bp, Homo sapien
cagcacgttgctgtcgattaagacc

SEQ ID NO: 5839194 - DNA, 25 bp, Homo sapien
gctgtcgattaagaccggagcttgt

SEQ ID NO: 5839195 - DNA, 25 bp, Homo sapien
agcttgtccggaagattgcaaatac

SEQ ID NO: 5839196 - DNA, 25 bp, Homo sapien
agattgcaaatactgcccgcaaacg

SEQ ID NO: 5839197 - DNA, 25 bp, Homo sapien
caaatactgcccgcaaacgtcgcgc

SEQ ID NO: 5839198 - DNA, 25 bp, Homo sapien
tgaacaggtgctggagtcggcgcgc

SEQ ID NO: 5839199 - DNA, 25 bp, Homo sapien
ggagtcggcgcgcaaagcgaaagcg

SEQ ID NO: 5839200 - DNA, 25 bp, Homo sapien
gacattgtcgcaagtcacagaatta

SEQ ID NO: 5839201 - DNA, 25 bp, Homo sapien
caaagcgaaagcggcaggatcgacg

SEQ ID NO: 5839202 - DNA, 25 bp, Homo sapien
attgtcgcaagtcacagaattattt

SEQ ID NO: 5839203 - DNA, 25 bp, Homo sapien
ggcaggatcgacgcgcttctgtatg

SEQ ID NO: 5839204 - DNA, 25 bp, Homo sapien
gttgctggatctgctgtttgaagcg

SEQ ID NO: 5839205 - DNA, 25 bp, Homo sapien
ggatctgctgtttgaagcgcagcag

SEQ ID NO: 5839206 - DNA, 25 bp, Homo sapien
gcgcagcaggtgcatcgccagcatt

SEQ ID NO: 5839207 - DNA, 25 bp, Homo sapien
gcaggtgcatcgccagcatttcgat

SEQ ID NO: 5839208 - DNA, 25 bp, Homo sapien
gcatcgccagcatttcgatcctcgt

SEQ ID NO: 5839209 - DNA, 25 bp, Homo sapien
gcatttcgatcctcgtcaggtgcag

SEQ ID NO: 5839210 - DNA, 25 bp, Homo sapien
cgatcctcgtcaggtgcaggtcagc

SEQ ID NO: 5839211 - DNA, 25 bp, Homo sapien
tcgtcaggtgcaggtcagcacgttg

SEQ ID NO: 5839212 - DNA, 25 bp, Homo sapien
gcaggtcagcacgttgctgtcgatt

SEQ ID NO: 5839213 - DNA, 25 bp, Homo sapien
cagcacgttgctgtcgattaagacc

SEQ ID NO: 5839214 - DNA, 25 bp, Homo sapien
gctgtcgattaagaccggagcttgt

SEQ ID NO: 5839215 - DNA, 25 bp, Homo sapien
agcttgtccggaagattgcaaatac

SEQ ID NO: 5839216 - DNA, 25 bp, Homo sapien
agattgcaaatactgcccgcaaacg

SEQ ID NO: 5839217 - DNA, 25 bp, Homo sapien
caaatactgcccgcaaacgtcgcgc

SEQ ID NO: 5839218 - DNA, 25 bp, Homo sapien
tgaacaggtgctggagtcggcgcgc

SEQ ID NO: 5839219 - DNA, 25 bp, Homo sapien
ggagtcggcgcgcaaagcgaaagcg

SEQ ID NO: 5839220 - DNA, 25 bp, Homo sapien
gacattgtcgcaagtcacagaatta

SEQ ID NO: 5839221 - DNA, 25 bp, Homo sapien
caaagcgaaagcggcaggatcgacg

SEQ ID NO: 5839222 - DNA, 25 bp, Homo sapien
attgtcgcaagtcacagaattattt

SEQ ID NO: 5839223 - DNA, 25 bp, Homo sapien
ggcaggatcgacgcgcttctgtatg

SEQ ID NO: 5839224 - DNA, 25 bp, Homo sapien
gttgctggatctgctgtttgaagcg

SEQ ID NO: 5839225 - DNA, 25 bp, Homo sapien
ggatctgctgtttgaagcgcagcag

SEQ ID NO: 5839226 - DNA, 25 bp, Homo sapien
gcgcagcaggtgcatcgccagcatt

SEQ ID NO: 5839227 - DNA, 25 bp, Homo sapien
gcaggtgcatcgccagcatttcgat

SEQ ID NO: 5839228 - DNA, 25 bp, Homo sapien
gcatcgccagcatttcgatcctcgt

SEQ ID NO: 5839229 - DNA, 25 bp, Homo sapien
gcatttcgatcctcgtcaggtgcag

SEQ ID NO: 5839230 - DNA, 25 bp, Homo sapien
cgatcctcgtcaggtgcaggtcagc

SEQ ID NO: 5839231 - DNA, 25 bp, Homo sapien
tcgtcaggtgcaggtcagcacgttg

SEQ ID NO: 5839232 - DNA, 25 bp, Homo sapien
gcaggtcagcacgttgctgtcgatt

SEQ ID NO: 5839233 - DNA, 25 bp, Homo sapien
cagcacgttgctgtcgattaagacc

SEQ ID NO: 5839234 - DNA, 25 bp, Homo sapien
gctgtcgattaagaccggagcttgt

SEQ ID NO: 5839235 - DNA, 25 bp, Homo sapien
agcttgtccggaagattgcaaatac

SEQ ID NO: 5839236 - DNA, 25 bp, Homo sapien
agattgcaaatactgcccgcaaacg

SEQ ID NO: 5839237 - DNA, 25 bp, Homo sapien
caaatactgcccgcaaacgtcgcgc

SEQ ID NO: 5839238 - DNA, 25 bp, Homo sapien
tgaacaggtgctggagtcggcgcgc

SEQ ID NO: 5839239 - DNA, 25 bp, Homo sapien
ggagtcggcgcgcaaagcgaaagcg

SEQ ID NO: 5839240 - DNA, 25 bp, Homo sapien
gacattgtcgcaagtcacagaatta

SEQ ID NO: 5839241 - DNA, 25 bp, Homo sapien
caaagcgaaagcggcaggatcgacg

SEQ ID NO: 5839242 - DNA, 25 bp, Homo sapien
attgtcgcaagtcacagaattattt

SEQ ID NO: 5839243 - DNA, 25 bp, Homo sapien
ggcaggatcgacgcgcttctgtatg

SEQ ID NO: 5839244 - DNA, 25 bp, Homo sapien
gttgctggatctgctgtttgaagcg

SEQ ID NO: 5839245 - DNA, 25 bp, Homo sapien
ggatctgctgtttgaagcgcagcag

SEQ ID NO: 5839246 - DNA, 25 bp, Homo sapien
gcgcagcaggtgcatcgccagcatt

SEQ ID NO: 5839247 - DNA, 25 bp, Homo sapien
gcaggtgcatcgccagcatttcgat

SEQ ID NO: 5839248 - DNA, 25 bp, Homo sapien
gcatcgccagcatttcgatcctcgt

SEQ ID NO: 5839249 - DNA, 25 bp, Homo sapien
gcatttcgatcctcgtcaggtgcag

SEQ ID NO: 5839250 - DNA, 25 bp, Homo sapien
cgatcctcgtcaggtgcaggtcagc

SEQ ID NO: 5839251 - DNA, 25 bp, Homo sapien
tcgtcaggtgcaggtcagcacgttg

SEQ ID NO: 5839252 - DNA, 25 bp, Homo sapien
gcaggtcagcacgttgctgtcgatt

SEQ ID NO: 5839253 - DNA, 25 bp, Homo sapien
cagcacgttgctgtcgattaagacc

SEQ ID NO: 5839254 - DNA, 25 bp, Homo sapien
gctgtcgattaagaccggagcttgt

SEQ ID NO: 5839255 - DNA, 25 bp, Homo sapien
agcttgtccggaagattgcaaatac

SEQ ID NO: 5839256 - DNA, 25 bp, Homo sapien
agattgcaaatactgcccgcaaacg

SEQ ID NO: 5839257 - DNA, 25 bp, Homo sapien
caaatactgcccgcaaacgtcgcgc

SEQ ID NO: 5839258 - DNA, 25 bp, Homo sapien
tgaacaggtgctggagtcggcgcgc

SEQ ID NO: 5839259 - DNA, 25 bp, Homo sapien
ggagtcggcgcgcaaagcgaaagcg

SEQ ID NO: 5839260 - DNA, 25 bp, Homo sapien
gacattgtcgcaagtcacagaatta

SEQ ID NO: 5839261 - DNA, 25 bp, Homo sapien
caaagcgaaagcggcaggatcgacg

SEQ ID NO: 5839262 - DNA, 25 bp, Homo sapien
attgtcgcaagtcacagaattattt

SEQ ID NO: 5839263 - DNA, 25 bp, Homo sapien
ggcaggatcgacgcgcttctgtatg

SEQ ID NO: 5839264 - DNA, 25 bp, Homo sapien
gttgctggatctgctgtttgaagcg

SEQ ID NO: 5839265 - DNA, 25 bp, Homo sapien
ggatctgctgtttgaagcgcagcag

SEQ ID NO: 5839266 - DNA, 25 bp, Homo sapien
gcgcagcaggtgcatcgccagcatt

SEQ ID NO: 5839267 - DNA, 25 bp, Homo sapien
gcaggtgcatcgccagcatttcgat

SEQ ID NO: 5839268 - DNA, 25 bp, Homo sapien
gcatcgccagcatttcgatcctcgt

SEQ ID NO: 5839269 - DNA, 25 bp, Homo sapien
gcatttcgatcctcgtcaggtgcag

SEQ ID NO: 5839270 - DNA, 25 bp, Homo sapien
cgatcctcgtcaggtgcaggtcagc

SEQ ID NO: 5839271 - DNA, 25 bp, Homo sapien
tcgtcaggtgcaggtcagcacgttg

SEQ ID NO: 5839272 - DNA, 25 bp, Homo sapien
gcaggtcagcacgttgctgtcgatt

SEQ ID NO: 5839273 - DNA, 25 bp, Homo sapien
cagcacgttgctgtcgattaagacc

SEQ ID NO: 5839274 - DNA, 25 bp, Homo sapien
gctgtcgattaagaccggagcttgt

SEQ ID NO: 5839275 - DNA, 25 bp, Homo sapien
agcttgtccggaagattgcaaatac

SEQ ID NO: 5839276 - DNA, 25 bp, Homo sapien
agattgcaaatactgcccgcaaacg

SEQ ID NO: 5839277 - DNA, 25 bp, Homo sapien
caaatactgcccgcaaacgtcgcgc

SEQ ID NO: 5839278 - DNA, 25 bp, Homo sapien
tgaacaggtgctggagtcggcgcgc

SEQ ID NO: 5839279 - DNA, 25 bp, Homo sapien
ggagtcggcgcgcaaagcgaaagcg

SEQ ID NO: 5839280 - DNA, 25 bp, Homo sapien
gacattgtcgcaagtcacagaatta

SEQ ID NO: 5839281 - DNA, 25 bp, Homo sapien
caaagcgaaagcggcaggatcgacg

SEQ ID NO: 5839282 - DNA, 25 bp, Homo sapien
attgtcgcaagtcacagaattattt

SEQ ID NO: 5839283 - DNA, 25 bp, Homo sapien
ggcaggatcgacgcgcttctgtatg

SEQ ID NO: 5839284 - DNA, 25 bp, Homo sapien
gttgctggatctgctgtttgaagcg

SEQ ID NO: 5839285 - DNA, 25 bp, Homo sapien
ggatctgctgtttgaagcgcagcag

SEQ ID NO: 5839286 - DNA, 25 bp, Homo sapien
gcgcagcaggtgcatcgccagcatt

SEQ ID NO: 5839287 - DNA, 25 bp, Homo sapien
gcaggtgcatcgccagcatttcgat

SEQ ID NO: 5839288 - DNA, 25 bp, Homo sapien
gcatcgccagcatttcgatcctcgt

SEQ ID NO: 5839289 - DNA, 25 bp, Homo sapien
gcatttcgatcctcgtcaggtgcag

SEQ ID NO: 5839290 - DNA, 25 bp, Homo sapien
cgatcctcgtcaggtgcaggtcagc

SEQ ID NO: 5839291 - DNA, 25 bp, Homo sapien
tcgtcaggtgcaggtcagcacgttg

SEQ ID NO: 5839292 - DNA, 25 bp, Homo sapien
gcaggtcagcacgttgctgtcgatt

SEQ ID NO: 5839293 - DNA, 25 bp, Homo sapien
cagcacgttgctgtcgattaagacc

SEQ ID NO: 5839294 - DNA, 25 bp, Homo sapien
gctgtcgattaagaccggagcttgt

SEQ ID NO: 5839295 - DNA, 25 bp, Homo sapien
agcttgtccggaagattgcaaatac

SEQ ID NO: 5839296 - DNA, 25 bp, Homo sapien
agattgcaaatactgcccgcaaacg

SEQ ID NO: 5839297 - DNA, 25 bp, Homo sapien
caaatactgcccgcaaacgtcgcgc

SEQ ID NO: 5839298 - DNA, 25 bp, Homo sapien
tgaacaggtgctggagtcggcgcgc

SEQ ID NO: 5839299 - DNA, 25 bp, Homo sapien
ggagtcggcgcgcaaagcgaaagcg

SEQ ID NO: 5839300 - DNA, 25 bp, Homo sapien
gacattgtcgcaagtcacagaatta

SEQ ID NO: 5839301 - DNA, 25 bp, Homo sapien
caaagcgaaagcggcaggatcgacg

SEQ ID NO: 5839302 - DNA, 25 bp, Homo sapien
attgtcgcaagtcacagaattattt

SEQ ID NO: 5839303 - DNA, 25 bp, Homo sapien
ggcaggatcgacgcgcttctgtatg

SEQ ID NO: 5839304 - DNA, 25 bp, Homo sapien
gttgctggatctgctgtttgaagcg

SEQ ID NO: 5839305 - DNA, 25 bp, Homo sapien
ggatctgctgtttgaagcgcagcag

SEQ ID NO: 5839306 - DNA, 25 bp, Homo sapien
gcgcagcaggtgcatcgccagcatt

SEQ ID NO: 5839307 - DNA, 25 bp, Homo sapien
gcaggtgcatcgccagcatttcgat

SEQ ID NO: 5839308 - DNA, 25 bp, Homo sapien
gcatcgccagcatttcgatcctcgt

SEQ ID NO: 5839309 - DNA, 25 bp, Homo sapien
gcatttcgatcctcgtcaggtgcag

SEQ ID NO: 5839310 - DNA, 25 bp, Homo sapien
cgatcctcgtcaggtgcaggtcagc

SEQ ID NO: 5839311 - DNA, 25 bp, Homo sapien
tcgtcaggtgcaggtcagcacgttg

SEQ ID NO: 5839312 - DNA, 25 bp, Homo sapien
gcaggtcagcacgttgctgtcgatt

SEQ ID NO: 5839313 - DNA, 25 bp, Homo sapien
cagcacgttgctgtcgattaagacc

SEQ ID NO: 5839314 - DNA, 25 bp, Homo sapien
gctgtcgattaagaccggagcttgt

SEQ ID NO: 5839315 - DNA, 25 bp, Homo sapien
agcttgtccggaagattgcaaatac

SEQ ID NO: 5839316 - DNA, 25 bp, Homo sapien
agattgcaaatactgcccgcaaacg

SEQ ID NO: 5839317 - DNA, 25 bp, Homo sapien
caaatactgcccgcaaacgtcgcgc

SEQ ID NO: 5839318 - DNA, 25 bp, Homo sapien
tgaacaggtgctggagtcggcgcgc

SEQ ID NO: 5839319 - DNA, 25 bp, Homo sapien
ggagtcggcgcgcaaagcgaaagcg

SEQ ID NO: 5839320 - DNA, 25 bp, Homo sapien
gacattgtcgcaagtcacagaatta

SEQ ID NO: 5839321 - DNA, 25 bp, Homo sapien
caaagcgaaagcggcaggatcgacg

SEQ ID NO: 5839322 - DNA, 25 bp, Homo sapien
attgtcgcaagtcacagaattattt

SEQ ID NO: 5839323 - DNA, 25 bp, Homo sapien
ggcaggatcgacgcgcttctgtatg

SEQ ID NO: 5839324 - DNA, 25 bp, Homo sapien
gttgctggatctgctgtttgaagcg

SEQ ID NO: 5839325 - DNA, 25 bp, Homo sapien
ggatctgctgtttgaagcgcagcag

SEQ ID NO: 5839326 - DNA, 25 bp, Homo sapien
gcgcagcaggtgcatcgccagcatt

SEQ ID NO: 5839327 - DNA, 25 bp, Homo sapien
gcaggtgcatcgccagcatttcgat

SEQ ID NO: 5839328 - DNA, 25 bp, Homo sapien
gcatcgccagcatttcgatcctcgt

SEQ ID NO: 5839329 - DNA, 25 bp, Homo sapien
gcatttcgatcctcgtcaggtgcag

SEQ ID NO: 5839330 - DNA, 25 bp, Homo sapien
cgatcctcgtcaggtgcaggtcagc

SEQ ID NO: 5839331 - DNA, 25 bp, Homo sapien
tcgtcaggtgcaggtcagcacgttg

SEQ ID NO: 5839332 - DNA, 25 bp, Homo sapien
gcaggtcagcacgttgctgtcgatt

SEQ ID NO: 5839333 - DNA, 25 bp, Homo sapien
cagcacgttgctgtcgattaagacc

SEQ ID NO: 5839334 - DNA, 25 bp, Homo sapien
gctgtcgattaagaccggagcttgt

SEQ ID NO: 5839335 - DNA, 25 bp, Homo sapien
agcttgtccggaagattgcaaatac

SEQ ID NO: 5839336 - DNA, 25 bp, Homo sapien
agattgcaaatactgcccgcaaacg

SEQ ID NO: 5839337 - DNA, 25 bp, Homo sapien
caaatactgcccgcaaacgtcgcgc

SEQ ID NO: 5839338 - DNA, 25 bp, Homo sapien
tgaacaggtgctggagtcggcgcgc

SEQ ID NO: 5839339 - DNA, 25 bp, Homo sapien
ggagtcggcgcgcaaagcgaaagcg

SEQ ID NO: 5839340 - DNA, 25 bp, Homo sapien
gacattgtcgcaagtcacagaatta

SEQ ID NO: 5839341 - DNA, 25 bp, Homo sapien
caaagcgaaagcggcaggatcgacg

SEQ ID NO: 5839342 - DNA, 25 bp, Homo sapien
attgtcgcaagtcacagaattattt

SEQ ID NO: 5839343 - DNA, 25 bp, Homo sapien
ggcaggatcgacgcgcttctgtatg

SEQ ID NO: 5839344 - DNA, 25 bp, Homo sapien
gttgctggatctgctgtttgaagcg

SEQ ID NO: 5839345 - DNA, 25 bp, Homo sapien
ggatctgctgtttgaagcgcagcag

SEQ ID NO: 5839346 - DNA, 25 bp, Homo sapien
gcgcagcaggtgcatcgccagcatt

SEQ ID NO: 5839347 - DNA, 25 bp, Homo sapien
gcaggtgcatcgccagcatttcgat

SEQ ID NO: 5839348 - DNA, 25 bp, Homo sapien
gcatcgccagcatttcgatcctcgt

SEQ ID NO: 5839349 - DNA, 25 bp, Homo sapien
gcatttcgatcctcgtcaggtgcag

SEQ ID NO: 5839350 - DNA, 25 bp, Homo sapien
cgatcctcgtcaggtgcaggtcagc

SEQ ID NO: 5839351 - DNA, 25 bp, Homo sapien
tcgtcaggtgcaggtcagcacgttg

SEQ ID NO: 5839352 - DNA, 25 bp, Homo sapien
gcaggtcagcacgttgctgtcgatt

SEQ ID NO: 5839353 - DNA, 25 bp, Homo sapien
cagcacgttgctgtcgattaagacc

SEQ ID NO: 5839354 - DNA, 25 bp, Homo sapien
gctgtcgattaagaccggagcttgt

SEQ ID NO: 5839355 - DNA, 25 bp, Homo sapien
agcttgtccggaagattgcaaatac

SEQ ID NO: 5839356 - DNA, 25 bp, Homo sapien
agattgcaaatactgcccgcaaacg

SEQ ID NO: 5839357 - DNA, 25 bp, Homo sapien
caaatactgcccgcaaacgtcgcgc

SEQ ID NO: 5839358 - DNA, 25 bp, Homo sapien
tgaacaggtgctggagtcggcgcgc

SEQ ID NO: 5839359 - DNA, 25 bp, Homo sapien
ggagtcggcgcgcaaagcgaaagcg

SEQ ID NO: 5839360 - DNA, 25 bp, Homo sapien
gacattgtcgcaagtcacagaatta

SEQ ID NO: 5839361 - DNA, 25 bp, Homo sapien
caaagcgaaagcggcaggatcgacg

SEQ ID NO: 5839362 - DNA, 25 bp, Homo sapien
attgtcgcaagtcacagaattattt

SEQ ID NO: 5839363 - DNA, 25 bp, Homo sapien
ggcaggatcgacgcgcttctgtatg

SEQ ID NO: 5839364 - DNA, 25 bp, Homo sapien
gttgctggatctgctgtttgaagcg

SEQ ID NO: 5839365 - DNA, 25 bp, Homo sapien
ggatctgctgtttgaagcgcagcag

SEQ ID NO: 5839366 - DNA, 25 bp, Homo sapien
gcgcagcaggtgcatcgccagcatt

SEQ ID NO: 5839367 - DNA, 25 bp, Homo sapien
gcaggtgcatcgccagcatttcgat

SEQ ID NO: 5839368 - DNA, 25 bp, Homo sapien
gcatcgccagcatttcgatcctcgt

SEQ ID NO: 5839369 - DNA, 25 bp, Homo sapien
gcatttcgatcctcgtcaggtgcag

SEQ ID NO: 5839370 - DNA, 25 bp, Homo sapien
cgatcctcgtcaggtgcaggtcagc

SEQ ID NO: 5839371 - DNA, 25 bp, Homo sapien
tcgtcaggtgcaggtcagcacgttg

SEQ ID NO: 5839372 - DNA, 25 bp, Homo sapien
gcaggtcagcacgttgctgtcgatt

SEQ ID NO: 5839373 - DNA, 25 bp, Homo sapien
cagcacgttgctgtcgattaagacc

SEQ ID NO: 5839374 - DNA, 25 bp, Homo sapien
gctgtcgattaagaccggagcttgt

SEQ ID NO: 5839375 - DNA, 25 bp, Homo sapien
agcttgtccggaagattgcaaatac

SEQ ID NO: 5839376 - DNA, 25 bp, Homo sapien
agattgcaaatactgcccgcaaacg

SEQ ID NO: 5839377 - DNA, 25 bp, Homo sapien
caaatactgcccgcaaacgtcgcgc

SEQ ID NO: 5839378 - DNA, 25 bp, Homo sapien
tgaacaggtgctggagtcggcgcgc

SEQ ID NO: 5839379 - DNA, 25 bp, Homo sapien
ggagtcggcgcgcaaagcgaaagcg

SEQ ID NO: 5839380 - DNA, 25 bp, Homo sapien
gacattgtcgcaagtcacagaatta

SEQ ID NO: 5839381 - DNA, 25 bp, Homo sapien
caaagcgaaagcggcaggatcgacg

SEQ ID NO: 5839382 - DNA, 25 bp, Homo sapien
attgtcgcaagtcacagaattattt

SEQ ID NO: 5839383 - DNA, 25 bp, Homo sapien
ggcaggatcgacgcgcttctgtatg

SEQ ID NO: 5839384 - DNA, 25 bp, Homo sapien
gttgctggatctgctgtttgaagcg

SEQ ID NO: 5839385 - DNA, 25 bp, Homo sapien
ggatctgctgtttgaagcgcagcag

SEQ ID NO: 5839386 - DNA, 25 bp, Homo sapien
gcgcagcaggtgcatcgccagcatt

SEQ ID NO: 5839387 - DNA, 25 bp, Homo sapien
gcaggtgcatcgccagcatttcgat

SEQ ID NO: 5839388 - DNA, 25 bp, Homo sapien
gcatcgccagcatttcgatcctcgt

SEQ ID NO: 5839389 - DNA, 25 bp, Homo sapien
gcatttcgatcctcgtcaggtgcag

SEQ ID NO: 5839390 - DNA, 25 bp, Homo sapien
cgatcctcgtcaggtgcaggtcagc

SEQ ID NO: 5839391 - DNA, 25 bp, Homo sapien
tcgtcaggtgcaggtcagcacgttg

SEQ ID NO: 5839392 - DNA, 25 bp, Homo sapien
gcaggtcagcacgttgctgtcgatt

SEQ ID NO: 5839393 - DNA, 25 bp, Homo sapien
cagcacgttgctgtcgattaagacc

SEQ ID NO: 5839394 - DNA, 25 bp, Homo sapien
gctgtcgattaagaccggagcttgt

SEQ ID NO: 5839395 - DNA, 25 bp, Homo sapien
agcttgtccggaagattgcaaatac

SEQ ID NO: 5839396 - DNA, 25 bp, Homo sapien
agattgcaaatactgcccgcaaacg

SEQ ID NO: 5839397 - DNA, 25 bp, Homo sapien
caaatactgcccgcaaacgtcgcgc

SEQ ID NO: 5839398 - DNA, 25 bp, Homo sapien
tgaacaggtgctggagtcggcgcgc

SEQ ID NO: 5839399 - DNA, 25 bp, Homo sapien
ggagtcggcgcgcaaagcgaaagcg

SEQ ID NO: 5839400 - DNA, 25 bp, Homo sapien
gacattgtcgcaagtcacagaatta

SEQ ID NO: 5839401 - DNA, 25 bp, Homo sapien
caaagcgaaagcggcaggatcgacg

SEQ ID NO: 5839402 - DNA, 25 bp, Homo sapien
attgtcgcaagtcacagaattattt

SEQ ID NO: 5839403 - DNA, 25 bp, Homo sapien
ggcaggatcgacgcgcttctgtatg

SEQ ID NO: 5839404 - DNA, 25 bp, Homo sapien
gttgctggatctgctgtttgaagcg

SEQ ID NO: 5839405 - DNA, 25 bp, Homo sapien
ggatctgctgtttgaagcgcagcag

SEQ ID NO: 5839406 - DNA, 25 bp, Homo sapien
gcgcagcaggtgcatcgccagcatt

SEQ ID NO: 5839407 - DNA, 25 bp, Homo sapien
gcaggtgcatcgccagcatttcgat

SEQ ID NO: 5839408 - DNA, 25 bp, Homo sapien
gcatcgccagcatttcgatcctcgt

SEQ ID NO: 5839409 - DNA, 25 bp, Homo sapien
gcatttcgatcctcgtcaggtgcag

SEQ ID NO: 5839410 - DNA, 25 bp, Homo sapien
cgatcctcgtcaggtgcaggtcagc

SEQ ID NO: 5839411 - DNA, 25 bp, Homo sapien
tcgtcaggtgcaggtcagcacgttg

SEQ ID NO: 5839412 - DNA, 25 bp, Homo sapien
gcaggtcagcacgttgctgtcgatt

SEQ ID NO: 5839413 - DNA, 25 bp, Homo sapien
cagcacgttgctgtcgattaagacc

SEQ ID NO: 5839414 - DNA, 25 bp, Homo sapien
gctgtcgattaagaccggagcttgt

SEQ ID NO: 5839415 - DNA, 25 bp, Homo sapien
agcttgtccggaagattgcaaatac

SEQ ID NO: 5839416 - DNA, 25 bp, Homo sapien
agattgcaaatactgcccgcaaacg

SEQ ID NO: 5839417 - DNA, 25 bp, Homo sapien
caaatactgcccgcaaacgtcgcgc

SEQ ID NO: 5839418 - DNA, 25 bp, Homo sapien
tgaacaggtgctggagtcggcgcgc

SEQ ID NO: 5839419 - DNA, 25 bp, Homo sapien
ggagtcggcgcgcaaagcgaaagcg

SEQ ID NO: 5839420 - DNA, 25 bp, Homo sapien
gacattgtcgcaagtcacagaatta

SEQ ID NO: 5839421 - DNA, 25 bp, Homo sapien
caaagcgaaagcggcaggatcgacg

SEQ ID NO: 5839422 - DNA, 25 bp, Homo sapien
attgtcgcaagtcacagaattattt

SEQ ID NO: 5839423 - DNA, 25 bp, Homo sapien
ggcaggatcgacgcgcttctgtatg

SEQ ID NO: 5839424 - DNA, 25 bp, Homo sapien
gttgctggatctgctgtttgaagcg

SEQ ID NO: 5839425 - DNA, 25 bp, Homo sapien
ggatctgctgtttgaagcgcagcag

SEQ ID NO: 5839426 - DNA, 25 bp, Homo sapien
gcgcagcaggtgcatcgccagcatt

SEQ ID NO: 5839427 - DNA, 25 bp, Homo sapien
gcaggtgcatcgccagcatttcgat

SEQ ID NO: 5839428 - DNA, 25 bp, Homo sapien
gcatcgccagcatttcgatcctcgt

SEQ ID NO: 5839429 - DNA, 25 bp, Homo sapien
gcatttcgatcctcgtcaggtgcag

SEQ ID NO: 5839430 - DNA, 25 bp, Homo sapien
cgatcctcgtcaggtgcaggtcagc

SEQ ID NO: 5839431 - DNA, 25 bp, Homo sapien
tcgtcaggtgcaggtcagcacgttg

SEQ ID NO: 5839432 - DNA, 25 bp, Homo sapien
gcaggtcagcacgttgctgtcgatt

SEQ ID NO: 5839433 - DNA, 25 bp, Homo sapien
cagcacgttgctgtcgattaagacc

SEQ ID NO: 5839434 - DNA, 25 bp, Homo sapien
gctgtcgattaagaccggagcttgt

SEQ ID NO: 5839435 - DNA, 25 bp, Homo sapien
agcttgtccggaagattgcaaatac

SEQ ID NO: 5839436 - DNA, 25 bp, Homo sapien
agattgcaaatactgcccgcaaacg

SEQ ID NO: 5839437 - DNA, 25 bp, Homo sapien
caaatactgcccgcaaacgtcgcgc

SEQ ID NO: 5839438 - DNA, 25 bp, Homo sapien
tgaacaggtgctggagtcggcgcgc

SEQ ID NO: 5839439 - DNA, 25 bp, Homo sapien
ggagtcggcgcgcaaagcgaaagcg

SEQ ID NO: 5839440 - DNA, 25 bp, Homo sapien
gacattgtcgcaagtcacagaatta

SEQ ID NO: 5839441 - DNA, 25 bp, Homo sapien
caaagcgaaagcggcaggatcgacg

SEQ ID NO: 5839442 - DNA, 25 bp, Homo sapien
attgtcgcaagtcacagaattattt

SEQ ID NO: 5839443 - DNA, 25 bp, Homo sapien
ggcaggatcgacgcgcttctgtatg

SEQ ID NO: 5839444 - DNA, 25 bp, Homo sapien
gttgctggatctgctgtttgaagcg

SEQ ID NO: 5839445 - DNA, 25 bp, Homo sapien
ggatctgctgtttgaagcgcagcag

SEQ ID NO: 5839446 - DNA, 25 bp, Homo sapien
gcgcagcaggtgcatcgccagcatt

SEQ ID NO: 5839447 - DNA, 25 bp, Homo sapien
gcaggtgcatcgccagcatttcgat

SEQ ID NO: 5839448 - DNA, 25 bp, Homo sapien
gcatcgccagcatttcgatcctcgt

SEQ ID NO: 5839449 - DNA, 25 bp, Homo sapien
gcatttcgatcctcgtcaggtgcag

SEQ ID NO: 5839450 - DNA, 25 bp, Homo sapien
cgatcctcgtcaggtgcaggtcagc

SEQ ID NO: 5839451 - DNA, 25 bp, Homo sapien
tcgtcaggtgcaggtcagcacgttg

SEQ ID NO: 5839452 - DNA, 25 bp, Homo sapien
gcaggtcagcacgttgctgtcgatt

SEQ ID NO: 5839453 - DNA, 25 bp, Homo sapien
cagcacgttgctgtcgattaagacc

SEQ ID NO: 5839454 - DNA, 25 bp, Homo sapien
gctgtcgattaagaccggagcttgt

SEQ ID NO: 5839455 - DNA, 25 bp, Homo sapien
agcttgtccggaagattgcaaatac

SEQ ID NO: 5839456 - DNA, 25 bp, Homo sapien
agattgcaaatactgcccgcaaacg

SEQ ID NO: 5839457 - DNA, 25 bp, Homo sapien
caaatactgcccgcaaacgtcgcgc

SEQ ID NO: 5839458 - DNA, 25 bp, Homo sapien
tgaacaggtgctggagtcggcgcgc

SEQ ID NO: 5839459 - DNA, 25 bp, Homo sapien
ggagtcggcgcgcaaagcgaaagcg

SEQ ID NO: 5839460 - DNA, 25 bp, Homo sapien
gacattgtcgcaagtcacagaatta

SEQ ID NO: 5839461 - DNA, 25 bp, Homo sapien
caaagcgaaagcggcaggatcgacg

SEQ ID NO: 5839462 - DNA, 25 bp, Homo sapien
attgtcgcaagtcacagaattattt

SEQ ID NO: 5839463 - DNA, 25 bp, Homo sapien
ggcaggatcgacgcgcttctgtatg

SEQ ID NO: 5839464 - DNA, 25 bp, Homo sapien
gttgctggatctgctgtttgaagcg

SEQ ID NO: 5839465 - DNA, 25 bp, Homo sapien
ggatctgctgtttgaagcgcagcag

SEQ ID NO: 5839466 - DNA, 25 bp, Homo sapien
gcgcagcaggtgcatcgccagcatt

SEQ ID NO: 5839467 - DNA, 25 bp, Homo sapien
gcaggtgcatcgccagcatttcgat

SEQ ID NO: 5839468 - DNA, 25 bp, Homo sapien
gcatcgccagcatttcgatcctcgt

SEQ ID NO: 5839469 - DNA, 25 bp, Homo sapien
gcatttcgatcctcgtcaggtgcag

SEQ ID NO: 5839470 - DNA, 25 bp, Homo sapien
cgatcctcgtcaggtgcaggtcagc

SEQ ID NO: 5839471 - DNA, 25 bp, Homo sapien
tcgtcaggtgcaggtcagcacgttg

SEQ ID NO: 5839472 - DNA, 25 bp, Homo sapien
gcaggtcagcacgttgctgtcgatt

SEQ ID NO: 5839473 - DNA, 25 bp, Homo sapien
cagcacgttgctgtcgattaagacc

SEQ ID NO: 5839474 - DNA, 25 bp, Homo sapien
gctgtcgattaagaccggagcttgt

SEQ ID NO: 5839475 - DNA, 25 bp, Homo sapien
agcttgtccggaagattgcaaatac

SEQ ID NO: 5839476 - DNA, 25 bp, Homo sapien
agattgcaaatactgcccgcaaacg

SEQ ID NO: 5839477 - DNA, 25 bp, Homo sapien
caaatactgcccgcaaacgtcgcgc

SEQ ID NO: 5839478 - DNA, 25 bp, Homo sapien
tgaacaggtgctggagtcggcgcgc

SEQ ID NO: 5839479 - DNA, 25 bp, Homo sapien
ggagtcggcgcgcaaagcgaaagcg

SEQ ID NO: 5839480 - DNA, 25 bp, Homo sapien
gacattgtcgcaagtcacagaatta

SEQ ID NO: 5839481 - DNA, 25 bp, Homo sapien
caaagcgaaagcggcaggatcgacg

SEQ ID NO: 5839482 - DNA, 25 bp, Homo sapien
attgtcgcaagtcacagaattattt

SEQ ID NO: 5839483 - DNA, 25 bp, Homo sapien
ggcaggatcgacgcgcttctgtatg

SEQ ID NO: 5839484 - DNA, 25 bp, Homo sapien
gttgctggatctgctgtttgaagcg

SEQ ID NO: 5839485 - DNA, 25 bp, Homo sapien
ggatctgctgtttgaagcgcagcag

SEQ ID NO: 5839486 - DNA, 25 bp, Homo sapien
gcgcagcaggtgcatcgccagcatt

SEQ ID NO: 5839487 - DNA, 25 bp, Homo sapien
gcaggtgcatcgccagcatttcgat

SEQ ID NO: 5839488 - DNA, 25 bp, Homo sapien
gcatcgccagcatttcgatcctcgt

SEQ ID NO: 5839489 - DNA, 25 bp, Homo sapien
gcatttcgatcctcgtcaggtgcag

SEQ ID NO: 5839490 - DNA, 25 bp, Homo sapien
cgatcctcgtcaggtgcaggtcagc

SEQ ID NO: 5839491 - DNA, 25 bp, Homo sapien
tcgtcaggtgcaggtcagcacgttg

SEQ ID NO: 5839492 - DNA, 25 bp, Homo sapien
gcaggtcagcacgttgctgtcgatt

SEQ ID NO: 5839493 - DNA, 25 bp, Homo sapien
cagcacgttgctgtcgattaagacc

SEQ ID NO: 5839494 - DNA, 25 bp, Homo sapien
gctgtcgattaagaccggagcttgt

SEQ ID NO: 5839495 - DNA, 25 bp, Homo sapien
agcttgtccggaagattgcaaatac

SEQ ID NO: 5839496 - DNA, 25 bp, Homo sapien
agattgcaaatactgcccgcaaacg

SEQ ID NO: 5839497 - DNA, 25 bp, Homo sapien
caaatactgcccgcaaacgtcgcgc

SEQ ID NO: 5839498 - DNA, 25 bp, Homo sapien
tgaacaggtgctggagtcggcgcgc

SEQ ID NO: 5839499 - DNA, 25 bp, Homo sapien
ggagtcggcgcgcaaagcgaaagcg

SEQ ID NO: 5839500 - DNA, 25 bp, Homo sapien
gacattgtcgcaagtcacagaatta

SEQ ID NO: 5839501 - DNA, 25 bp, Homo sapien
caaagcgaaagcggcaggatcgacg

SEQ ID NO: 5839502 - DNA, 25 bp, Homo sapien
attgtcgcaagtcacagaattattt

SEQ ID NO: 5839503 - DNA, 25 bp, Homo sapien
ggcaggatcgacgcgcttctgtatg

SEQ ID NO: 5839504 - DNA, 25 bp, Homo sapien
gttgctggatctgctgtttgaagcg

SEQ ID NO: 5839505 - DNA, 25 bp, Homo sapien
ggatctgctgtttgaagcgcagcag

SEQ ID NO: 5839506 - DNA, 25 bp, Homo sapien
gcgcagcaggtgcatcgccagcatt

SEQ ID NO: 5839507 - DNA, 25 bp, Homo sapien
gcaggtgcatcgccagcatttcgat

SEQ ID NO: 5839508 - DNA, 25 bp, Homo sapien
gcatcgccagcatttcgatcctcgt

SEQ ID NO: 5839509 - DNA, 25 bp, Homo sapien
gcatttcgatcctcgtcaggtgcag

SEQ ID NO: 5839510 - DNA, 25 bp, Homo sapien
cgatcctcgtcaggtgcaggtcagc

SEQ ID NO: 5839511 - DNA, 25 bp, Homo sapien
tcgtcaggtgcaggtcagcacgttg

SEQ ID NO: 5839512 - DNA, 25 bp, Homo sapien
gcaggtcagcacgttgctgtcgatt

SEQ ID NO: 5839513 - DNA, 25 bp, Homo sapien
cagcacgttgctgtcgattaagacc

SEQ ID NO: 5839514 - DNA, 25 bp, Homo sapien
gctgtcgattaagaccggagcttgt

SEQ ID NO: 5839515 - DNA, 25 bp, Homo sapien
agcttgtccggaagattgcaaatac

SEQ ID NO: 5839516 - DNA, 25 bp, Homo sapien
agattgcaaatactgcccgcaaacg

SEQ ID NO: 5839517 - DNA, 25 bp, Homo sapien
caaatactgcccgcaaacgtcgcgc

SEQ ID NO: 5839518 - DNA, 25 bp, Homo sapien
tgaacaggtgctggagtcggcgcgc

SEQ ID NO: 5839519 - DNA, 25 bp, Homo sapien
ggagtcggcgcgcaaagcgaaagcg

SEQ ID NO: 5839520 - DNA, 25 bp, Homo sapien
gacattgtcgcaagtcacagaatta

SEQ ID NO: 5839521 - DNA, 25 bp, Homo sapien
caaagcgaaagcggcaggatcgacg

SEQ ID NO: 5839522 - DNA, 25 bp, Homo sapien
attgtcgcaagtcacagaattattt

SEQ ID NO: 5839523 - DNA, 25 bp, Homo sapien
ggcaggatcgacgcgcttctgtatg

SEQ ID NO: 5839524 - DNA, 25 bp, Homo sapien
gttgctggatctgctgtttgaagcg

SEQ ID NO: 5839525 - DNA, 25 bp, Homo sapien
ggatctgctgtttgaagcgcagcag

SEQ ID NO: 5839526 - DNA, 25 bp, Homo sapien
gcgcagcaggtgcatcgccagcatt

SEQ ID NO: 5839527 - DNA, 25 bp, Homo sapien
gcaggtgcatcgccagcatttcgat

SEQ ID NO: 5839528 - DNA, 25 bp, Homo sapien
gcatcgccagcatttcgatcctcgt

SEQ ID NO: 5839529 - DNA, 25 bp, Homo sapien
gcatttcgatcctcgtcaggtgcag

SEQ ID NO: 5839530 - DNA, 25 bp, Homo sapien
cgatcctcgtcaggtgcaggtcagc

SEQ ID NO: 5839531 - DNA, 25 bp, Homo sapien
tcgtcaggtgcaggtcagcacgttg

SEQ ID NO: 5839532 - DNA, 25 bp, Homo sapien
gcaggtcagcacgttgctgtcgatt

SEQ ID NO: 5839533 - DNA, 25 bp, Homo sapien
cagcacgttgctgtcgattaagacc

SEQ ID NO: 5839534 - DNA, 25 bp, Homo sapien
gctgtcgattaagaccggagcttgt

SEQ ID NO: 5839535 - DNA, 25 bp, Homo sapien
agcttgtccggaagattgcaaatac

SEQ ID NO: 5839536 - DNA, 25 bp, Homo sapien
agattgcaaatactgcccgcaaacg

SEQ ID NO: 5839537 - DNA, 25 bp, Homo sapien
caaatactgcccgcaaacgtcgcgc

SEQ ID NO: 5839538 - DNA, 25 bp, Homo sapien
tgaacaggtgctggagtcggcgcgc

SEQ ID NO: 5839539 - DNA, 25 bp, Homo sapien
ggagtcggcgcgcaaagcgaaagcg

SEQ ID NO: 5839540 - DNA, 25 bp, Homo sapien
gacattgtcgcaagtcacagaatta

SEQ ID NO: 5839541 - DNA, 25 bp, Homo sapien
caaagcgaaagcggcaggatcgacg

SEQ ID NO: 5839542 - DNA, 25 bp, Homo sapien
attgtcgcaagtcacagaattattt

SEQ ID NO: 5839543 - DNA, 25 bp, Homo sapien
ggcaggatcgacgcgcttctgtatg

SEQ ID NO: 5839544 - DNA, 25 bp, Homo sapien
gttgctggatctgctgtttgaagcg

SEQ ID NO: 5839545 - DNA, 25 bp, Homo sapien
ggatctgctgtttgaagcgcagcag

SEQ ID NO: 5839546 - DNA, 25 bp, Homo sapien
gcgcagcaggtgcatcgccagcatt

SEQ ID NO: 5839547 - DNA, 25 bp, Homo sapien
gcaggtgcatcgccagcatttcgat

SEQ ID NO: 5839548 - DNA, 25 bp, Homo sapien
gcatcgccagcatttcgatcctcgt

SEQ ID NO: 5839549 - DNA, 25 bp, Homo sapien
gcatttcgatcctcgtcaggtgcag

SEQ ID NO: 5839550 - DNA, 25 bp, Homo sapien
cgatcctcgtcaggtgcaggtcagc

SEQ ID NO: 5839551 - DNA, 25 bp, Homo sapien
tcgtcaggtgcaggtcagcacgttg

SEQ ID NO: 5839552 - DNA, 25 bp, Homo sapien
gcaggtcagcacgttgctgtcgatt

SEQ ID NO: 5839553 - DNA, 25 bp, Homo sapien
cagcacgttgctgtcgattaagacc

SEQ ID NO: 5839554 - DNA, 25 bp, Homo sapien
gctgtcgattaagaccggagcttgt

SEQ ID NO: 5839555 - DNA, 25 bp, Homo sapien
agcttgtccggaagattgcaaatac

SEQ ID NO: 5839556 - DNA, 25 bp, Homo sapien
agattgcaaatactgcccgcaaacg

SEQ ID NO: 5839557 - DNA, 25 bp, Homo sapien
caaatactgcccgcaaacgtcgcgc

SEQ ID NO: 5839558 - DNA, 25 bp, Homo sapien
tgaacaggtgctggagtcggcgcgc

SEQ ID NO: 5839559 - DNA, 25 bp, Homo sapien
ggagtcggcgcgcaaagcgaaagcg

SEQ ID NO: 5839560 - DNA, 25 bp, Homo sapien
gacattgtcgcaagtcacagaatta

SEQ ID NO: 5839561 - DNA, 25 bp, Homo sapien
caaagcgaaagcggcaggatcgacg

SEQ ID NO: 5839562 - DNA, 25 bp, Homo sapien
attgtcgcaagtcacagaattattt

SEQ ID NO: 5839563 - DNA, 25 bp, Homo sapien
ggcaggatcgacgcgcttctgtatg

SEQ ID NO: 5839564 - DNA, 25 bp, Homo sapien
gttgctggatctgctgtttgaagcg

SEQ ID NO: 5839565 - DNA, 25 bp, Homo sapien
ggatctgctgtttgaagcgcagcag

SEQ ID NO: 5839566 - DNA, 25 bp, Homo sapien
gcgcagcaggtgcatcgccagcatt

SEQ ID NO: 5839567 - DNA, 25 bp, Homo sapien
gcaggtgcatcgccagcatttcgat

SEQ ID NO: 5839568 - DNA, 25 bp, Homo sapien
gcatcgccagcatttcgatcctcgt

SEQ ID NO: 5839569 - DNA, 25 bp, Homo sapien
gcatttcgatcctcgtcaggtgcag

SEQ ID NO: 5839570 - DNA, 25 bp, Homo sapien
cgatcctcgtcaggtgcaggtcagc

SEQ ID NO: 5839571 - DNA, 25 bp, Homo sapien
tcgtcaggtgcaggtcagcacgttg

SEQ ID NO: 5839572 - DNA, 25 bp, Homo sapien
gcaggtcagcacgttgctgtcgatt

SEQ ID NO: 5839573 - DNA, 25 bp, Homo sapien
cagcacgttgctgtcgattaagacc

SEQ ID NO: 5839574 - DNA, 25 bp, Homo sapien
gctgtcgattaagaccggagcttgt

SEQ ID NO: 5839575 - DNA, 25 bp, Homo sapien
agcttgtccggaagattgcaaatac

SEQ ID NO: 5839576 - DNA, 25 bp, Homo sapien
agattgcaaatactgcccgcaaacg

SEQ ID NO: 5839577 - DNA, 25 bp, Homo sapien
caaatactgcccgcaaacgtcgcgc

SEQ ID NO: 5839578 - DNA, 25 bp, Homo sapien
tgaacaggtgctggagtcggcgcgc

SEQ ID NO: 5839579 - DNA, 25 bp, Homo sapien
ggagtcggcgcgcaaagcgaaagcg

SEQ ID NO: 5839580 - DNA, 25 bp, Homo sapien
gacattgtcgcaagtcacagaatta

SEQ ID NO: 5839581 - DNA, 25 bp, Homo sapien
caaagcgaaagcggcaggatcgacg

SEQ ID NO: 5839582 - DNA, 25 bp, Homo sapien
attgtcgcaagtcacagaattattt

SEQ ID NO: 5839583 - DNA, 25 bp, Homo sapien
ggcaggatcgacgcgcttctgtatg

SEQ ID NO: 5839584 - DNA, 25 bp, Homo sapien
gttgctggatctgctgtttgaagcg

SEQ ID NO: 5839585 - DNA, 25 bp, Homo sapien
ggatctgctgtttgaagcgcagcag

SEQ ID NO: 5839586 - DNA, 25 bp, Homo sapien
gcgcagcaggtgcatcgccagcatt

SEQ ID NO: 5839587 - DNA, 25 bp, Homo sapien
gcaggtgcatcgccagcatttcgat

SEQ ID NO: 5839588 - DNA, 25 bp, Homo sapien
gcatcgccagcatttcgatcctcgt

SEQ ID NO: 5839589 - DNA, 25 bp, Homo sapien
gcatttcgatcctcgtcaggtgcag

SEQ ID NO: 5839590 - DNA, 25 bp, Homo sapien
cgatcctcgtcaggtgcaggtcagc

SEQ ID NO: 5839591 - DNA, 25 bp, Homo sapien
tcgtcaggtgcaggtcagcacgttg

SEQ ID NO: 5839592 - DNA, 25 bp, Homo sapien
gcaggtcagcacgttgctgtcgatt

SEQ ID NO: 5839593 - DNA, 25 bp, Homo sapien
cagcacgttgctgtcgattaagacc

SEQ ID NO: 5839594 - DNA, 25 bp, Homo sapien
gctgtcgattaagaccggagcttgt

SEQ ID NO: 5839595 - DNA, 25 bp, Homo sapien
agcttgtccggaagattgcaaatac

SEQ ID NO: 5839596 - DNA, 25 bp, Homo sapien
agattgcaaatactgcccgcaaacg

SEQ ID NO: 5839597 - DNA, 25 bp, Homo sapien
caaatactgcccgcaaacgtcgcgc

SEQ ID NO: 5839598 - DNA, 25 bp, Homo sapien
tgaacaggtgctggagtcggcgcgc

SEQ ID NO: 5839599 - DNA, 25 bp, Homo sapien
ggagtcggcgcgcaaagcgaaagcg

SEQ ID NO: 5839600 - DNA, 25 bp, Homo sapien
gacattgtcgcaagtcacagaatta

SEQ ID NO: 5839601 - DNA, 25 bp, Homo sapien
caaagcgaaagcggcaggatcgacg

SEQ ID NO: 5839602 - DNA, 25 bp, Homo sapien
attgtcgcaagtcacagaattattt

SEQ ID NO: 5839603 - DNA, 25 bp, Homo sapien
ggcaggatcgacgcgcttctgtatg

SEQ ID NO: 5839604 - DNA, 25 bp, Homo sapien
gttgctggatctgctgtttgaagcg

SEQ ID NO: 5839605 - DNA, 25 bp, Homo sapien
ggatctgctgtttgaagcgcagcag

SEQ ID NO: 5839606 - DNA, 25 bp, Homo sapien
gcgcagcaggtgcatcgccagcatt

SEQ ID NO: 5839607 - DNA, 25 bp, Homo sapien
gcaggtgcatcgccagcatttcgat

SEQ ID NO: 5839608 - DNA, 25 bp, Homo sapien
gcatcgccagcatttcgatcctcgt

SEQ ID NO: 5839609 - DNA, 25 bp, Homo sapien
gcatttcgatcctcgtcaggtgcag

SEQ ID NO: 5839610 - DNA, 25 bp, Homo sapien
cgatcctcgtcaggtgcaggtcagc

SEQ ID NO: 5839611 - DNA, 25 bp, Homo sapien
tcgtcaggtgcaggtcagcacgttg

SEQ ID NO: 5839612 - DNA, 25 bp, Homo sapien
gcaggtcagcacgttgctgtcgatt

SEQ ID NO: 5839613 - DNA, 25 bp, Homo sapien
cagcacgttgctgtcgattaagacc

SEQ ID NO: 5839614 - DNA, 25 bp, Homo sapien
gctgtcgattaagaccggagcttgt

SEQ ID NO: 5839615 - DNA, 25 bp, Homo sapien
agcttgtccggaagattgcaaatac

SEQ ID NO: 5839616 - DNA, 25 bp, Homo sapien
agattgcaaatactgcccgcaaacg

SEQ ID NO: 5839617 - DNA, 25 bp, Homo sapien
caaatactgcccgcaaacgtcgcgc

SEQ ID NO: 5839618 - DNA, 25 bp, Homo sapien
tgaacaggtgctggagtcggcgcgc

SEQ ID NO: 5839619 - DNA, 25 bp, Homo sapien
ggagtcggcgcgcaaagcgaaagcg

SEQ ID NO: 5839620 - DNA, 25 bp, Homo sapien
gacattgtcgcaagtcacagaatta

SEQ ID NO: 5839621 - DNA, 25 bp, Homo sapien
caaagcgaaagcggcaggatcgacg

SEQ ID NO: 5839622 - DNA, 25 bp, Homo sapien
attgtcgcaagtcacagaattattt

SEQ ID NO: 5839623 - DNA, 25 bp, Homo sapien
ggcaggatcgacgcgcttctgtatg

SEQ ID NO: 5839624 - DNA, 25 bp, Homo sapien
gttgctggatctgctgtttgaagcg

SEQ ID NO: 5839625 - DNA, 25 bp, Homo sapien
ggatctgctgtttgaagcgcagcag

SEQ ID NO: 5839626 - DNA, 25 bp, Homo sapien
gcgcagcaggtgcatcgccagcatt

SEQ ID NO: 5839627 - DNA, 25 bp, Homo sapien
gcaggtgcatcgccagcatttcgat

SEQ ID NO: 5839628 - DNA, 25 bp, Homo sapien
gcatcgccagcatttcgatcctcgt

SEQ ID NO: 5839629 - DNA, 25 bp, Homo sapien
gcatttcgatcctcgtcaggtgcag

SEQ ID NO: 5839630 - DNA, 25 bp, Homo sapien
cgatcctcgtcaggtgcaggtcagc

SEQ ID NO: 5839631 - DNA, 25 bp, Homo sapien
tcgtcaggtgcaggtcagcacgttg

SEQ ID NO: 5839632 - DNA, 25 bp, Homo sapien
gcaggtcagcacgttgctgtcgatt

SEQ ID NO: 5839633 - DNA, 25 bp, Homo sapien
cagcacgttgctgtcgattaagacc

SEQ ID NO: 5839634 - DNA, 25 bp, Homo sapien
gctgtcgattaagaccggagcttgt

SEQ ID NO: 5839635 - DNA, 25 bp, Homo sapien
agcttgtccggaagattgcaaatac

SEQ ID NO: 5839636 - DNA, 25 bp, Homo sapien
agattgcaaatactgcccgcaaacg

SEQ ID NO: 5839637 - DNA, 25 bp, Homo sapien
caaatactgcccgcaaacgtcgcgc

SEQ ID NO: 5839638 - DNA, 25 bp, Homo sapien
tgaacaggtgctggagtcggcgcgc

SEQ ID NO: 5839639 - DNA, 25 bp, Homo sapien
ggagtcggcgcgcaaagcgaaagcg

SEQ ID NO: 5839640 - DNA, 25 bp, Homo sapien
gacattgtcgcaagtcacagaatta

SEQ ID NO: 5839641 - DNA, 25 bp, Homo sapien
caaagcgaaagcggcaggatcgacg

SEQ ID NO: 5839642 - DNA, 25 bp, Homo sapien
attgtcgcaagtcacagaattattt

SEQ ID NO: 5839643 - DNA, 25 bp, Homo sapien
ggcaggatcgacgcgcttctgtatg

SEQ ID NO: 5839644 - DNA, 25 bp, Homo sapien
gttgctggatctgctgtttgaagcg

SEQ ID NO: 5839645 - DNA, 25 bp, Homo sapien
ggatctgctgtttgaagcgcagcag

SEQ ID NO: 5839646 - DNA, 25 bp, Homo sapien
gcgcagcaggtgcatcgccagcatt

SEQ ID NO: 5839647 - DNA, 25 bp, Homo sapien
gcaggtgcatcgccagcatttcgat

SEQ ID NO: 5839648 - DNA, 25 bp, Homo sapien
gcatcgccagcatttcgatcctcgt

SEQ ID NO: 5839649 - DNA, 25 bp, Homo sapien
gcatttcgatcctcgtcaggtgcag

SEQ ID NO: 5839650 - DNA, 25 bp, Homo sapien
cgatcctcgtcaggtgcaggtcagc

SEQ ID NO: 5839651 - DNA, 25 bp, Homo sapien
tcgtcaggtgcaggtcagcacgttg

SEQ ID NO: 5839652 - DNA, 25 bp, Homo sapien
gcaggtcagcacgttgctgtcgatt

SEQ ID NO: 5839653 - DNA, 25 bp, Homo sapien
cagcacgttgctgtcgattaagacc

SEQ ID NO: 5839654 - DNA, 25 bp, Homo sapien
gctgtcgattaagaccggagcttgt

SEQ ID NO: 5839655 - DNA, 25 bp, Homo sapien
agcttgtccggaagattgcaaatac

SEQ ID NO: 5839656 - DNA, 25 bp, Homo sapien
agattgcaaatactgcccgcaaacg

SEQ ID NO: 5839657 - DNA, 25 bp, Homo sapien
caaatactgcccgcaaacgtcgcgc

SEQ ID NO: 5839658 - DNA, 25 bp, Homo sapien
tgaacaggtgctggagtcggcgcgc

SEQ ID NO: 5839659 - DNA, 25 bp, Homo sapien
ggagtcggcgcgcaaagcgaaagcg

SEQ ID NO: 5839660 - DNA, 25 bp, Homo sapien
gacattgtcgcaagtcacagaatta

SEQ ID NO: 5839661 - DNA, 25 bp, Homo sapien
caaagcgaaagcggcaggatcgacg

SEQ ID NO: 5839662 - DNA, 25 bp, Homo sapien
attgtcgcaagtcacagaattattt

SEQ ID NO: 5839663 - DNA, 25 bp, Homo sapien
ggcaggatcgacgcgcttctgtatg

SEQ ID NO: 5839664 - DNA, 25 bp, Homo sapien
gttgctggatctgctgtttgaagcg

SEQ ID NO: 5839665 - DNA, 25 bp, Homo sapien
ggatctgctgtttgaagcgcagcag

SEQ ID NO: 5839666 - DNA, 25 bp, Homo sapien
gcgcagcaggtgcatcgccagcatt

SEQ ID NO: 5839667 - DNA, 25 bp, Homo sapien
gcaggtgcatcgccagcatttcgat

SEQ ID NO: 5839668 - DNA, 25 bp, Homo sapien
gcatcgccagcatttcgatcctcgt

SEQ ID NO: 5839669 - DNA, 25 bp, Homo sapien
gcatttcgatcctcgtcaggtgcag

SEQ ID NO: 5839670 - DNA, 25 bp, Homo sapien
cgatcctcgtcaggtgcaggtcagc

SEQ ID NO: 5839671 - DNA, 25 bp, Homo sapien
tcgtcaggtgcaggtcagcacgttg

SEQ ID NO: 5839672 - DNA, 25 bp, Homo sapien
gcaggtcagcacgttgctgtcgatt

SEQ ID NO: 5839673 - DNA, 25 bp, Homo sapien
cagcacgttgctgtcgattaagacc

SEQ ID NO: 5839674 - DNA, 25 bp, Homo sapien
gctgtcgattaagaccggagcttgt

SEQ ID NO: 5839675 - DNA, 25 bp, Homo sapien
agcttgtccggaagattgcaaatac

SEQ ID NO: 5839676 - DNA, 25 bp, Homo sapien
agattgcaaatactgcccgcaaacg

SEQ ID NO: 5839677 - DNA, 25 bp, Homo sapien
caaatactgcccgcaaacgtcgcgc

SEQ ID NO: 5839678 - DNA, 25 bp, Homo sapien
tgaacaggtgctggagtcggcgcgc

SEQ ID NO: 5839679 - DNA, 25 bp, Homo sapien
ggagtcggcgcgcaaagcgaaagcg

SEQ ID NO: 5839680 - DNA, 25 bp, Homo sapien
gacattgtcgcaagtcacagaatta

SEQ ID NO: 5839681 - DNA, 25 bp, Homo sapien
caaagcgaaagcggcaggatcgacg

SEQ ID NO: 5839682 - DNA, 25 bp, Homo sapien
attgtcgcaagtcacagaattattt

SEQ ID NO: 5839683 - DNA, 25 bp, Homo sapien
ggcaggatcgacgcgcttctgtatg

SEQ ID NO: 5839684 - DNA, 25 bp, Homo sapien
gttgctggatctgctgtttgaagcg

SEQ ID NO: 5839685 - DNA, 25 bp, Homo sapien
ggatctgctgtttgaagcgcagcag

SEQ ID NO: 5839686 - DNA, 25 bp, Homo sapien
gcgcagcaggtgcatcgccagcatt

SEQ ID NO: 5839687 - DNA, 25 bp, Homo sapien
gcaggtgcatcgccagcatttcgat

SEQ ID NO: 5839688 - DNA, 25 bp, Homo sapien
gcatcgccagcatttcgatcctcgt

SEQ ID NO: 5839689 - DNA, 25 bp, Homo sapien
gcatttcgatcctcgtcaggtgcag

SEQ ID NO: 5839690 - DNA, 25 bp, Homo sapien
cgatcctcgtcaggtgcaggtcagc

SEQ ID NO: 5839691 - DNA, 25 bp, Homo sapien
tcgtcaggtgcaggtcagcacgttg

SEQ ID NO: 5839692 - DNA, 25 bp, Homo sapien
gcaggtcagcacgttgctgtcgatt

SEQ ID NO: 5839693 - DNA, 25 bp, Homo sapien
cagcacgttgctgtcgattaagacc

SEQ ID NO: 5839694 - DNA, 25 bp, Homo sapien
gctgtcgattaagaccggagcttgt

SEQ ID NO: 5839695 - DNA, 25 bp, Homo sapien
agcttgtccggaagattgcaaatac

SEQ ID NO: 5839696 - DNA, 25 bp, Homo sapien
agattgcaaatactgcccgcaaacg

SEQ ID NO: 5839697 - DNA, 25 bp, Homo sapien
caaatactgcccgcaaacgtcgcgc

SEQ ID NO: 5839698 - DNA, 25 bp, Homo sapien
tgaacaggtgctggagtcggcgcgc

SEQ ID NO: 5839699 - DNA, 25 bp, Homo sapien
ggagtcggcgcgcaaagcgaaagcg

SEQ ID NO: 5839700 - DNA, 25 bp, Homo sapien
gacattgtcgcaagtcacagaatta

SEQ ID NO: 5839701 - DNA, 25 bp, Homo sapien
caaagcgaaagcggcaggatcgacg

SEQ ID NO: 5839702 - DNA, 25 bp, Homo sapien
attgtcgcaagtcacagaattattt

SEQ ID NO: 5839703 - DNA, 25 bp, Homo sapien
ggcaggatcgacgcgcttctgtatg

SEQ ID NO: 5839704 - DNA, 25 bp, Homo sapien
gttgctggatctgctgtttgaagcg

SEQ ID NO: 5839705 - DNA, 25 bp, Homo sapien
ggatctgctgtttgaagcgcagcag

SEQ ID NO: 5839706 - DNA, 25 bp, Homo sapien
gcgcagcaggtgcatcgccagcatt

SEQ ID NO: 5839707 - DNA, 25 bp, Homo sapien
gcaggtgcatcgccagcatttcgat

SEQ ID NO: 5839708 - DNA, 25 bp, Homo sapien
gcatcgccagcatttcgatcctcgt

SEQ ID NO: 5839709 - DNA, 25 bp, Homo sapien
gcatttcgatcctcgtcaggtgcag

SEQ ID NO: 5839710 - DNA, 25 bp, Homo sapien
cgatcctcgtcaggtgcaggtcagc

SEQ ID NO: 5839711 - DNA, 25 bp, Homo sapien
tcgtcaggtgcaggtcagcacgttg

SEQ ID NO: 5839712 - DNA, 25 bp, Homo sapien
gcaggtcagcacgttgctgtcgatt

SEQ ID NO: 5839713 - DNA, 25 bp, Homo sapien
cagcacgttgctgtcgattaagacc

SEQ ID NO: 5839714 - DNA, 25 bp, Homo sapien
gctgtcgattaagaccggagcttgt

SEQ ID NO: 5839715 - DNA, 25 bp, Homo sapien
agcttgtccggaagattgcaaatac

SEQ ID NO: 5839716 - DNA, 25 bp, Homo sapien
agattgcaaatactgcccgcaaacg

SEQ ID NO: 5839717 - DNA, 25 bp, Homo sapien
caaatactgcccgcaaacgtcgcgc

SEQ ID NO: 5839718 - DNA, 25 bp, Homo sapien
tgaacaggtgctggagtcggcgcgc

SEQ ID NO: 5839719 - DNA, 25 bp, Homo sapien
ggagtcggcgcgcaaagcgaaagcg

SEQ ID NO: 5839720 - DNA, 25 bp, Homo sapien
gacattgtcgcaagtcacagaatta

SEQ ID NO: 5839721 - DNA, 25 bp, Homo sapien
caaagcgaaagcggcaggatcgacg

SEQ ID NO: 5839722 - DNA, 25 bp, Homo sapien
attgtcgcaagtcacagaattattt

SEQ ID NO: 5839723 - DNA, 25 bp, Homo sapien
ggcaggatcgacgcgcttctgtatg

SEQ ID NO: 5839724 - DNA, 25 bp, Homo sapien
gttgctggatctgctgtttgaagcg

SEQ ID NO: 5839725 - DNA, 25 bp, Homo sapien
ggatctgctgtttgaagcgcagcag

SEQ ID NO: 5839726 - DNA, 25 bp, Homo sapien
gcgcagcaggtgcatcgccagcatt

SEQ ID NO: 5839727 - DNA, 25 bp, Homo sapien
gcaggtgcatcgccagcatttcgat

SEQ ID NO: 5839728 - DNA, 25 bp, Homo sapien
gcatcgccagcatttcgatcctcgt

SEQ ID NO: 5839729 - DNA, 25 bp, Homo sapien
gcatttcgatcctcgtcaggtgcag

SEQ ID NO: 5839730 - DNA, 25 bp, Homo sapien
cgatcctcgtcaggtgcaggtcagc

SEQ ID NO: 5839731 - DNA, 25 bp, Homo sapien
tcgtcaggtgcaggtcagcacgttg

SEQ ID NO: 5839732 - DNA, 25 bp, Homo sapien
gcaggtcagcacgttgctgtcgatt

SEQ ID NO: 5839733 - DNA, 25 bp, Homo sapien
cagcacgttgctgtcgattaagacc

SEQ ID NO: 5839734 - DNA, 25 bp, Homo sapien
gctgtcgattaagaccggagcttgt

SEQ ID NO: 5839735 - DNA, 25 bp, Homo sapien
agcttgtccggaagattgcaaatac

SEQ ID NO: 5839736 - DNA, 25 bp, Homo sapien
agattgcaaatactgcccgcaaacg

SEQ ID NO: 5839737 - DNA, 25 bp, Homo sapien
caaatactgcccgcaaacgtcgcgc

SEQ ID NO: 5839738 - DNA, 25 bp, Homo sapien
tgaacaggtgctggagtcggcgcgc

SEQ ID NO: 5839739 - DNA, 25 bp, Homo sapien
ggagtcggcgcgcaaagcgaaagcg

SEQ ID NO: 5839740 - DNA, 25 bp, Homo sapien
gacattgtcgcaagtcacagaatta

SEQ ID NO: 5839741 - DNA, 25 bp, Homo sapien
caaagcgaaagcggcaggatcgacg

SEQ ID NO: 5839742 - DNA, 25 bp, Homo sapien
attgtcgcaagtcacagaattattt

SEQ ID NO: 5839743 - DNA, 25 bp, Homo sapien
ggcaggatcgacgcgcttctgtatg

SEQ ID NO: 5839744 - DNA, 25 bp, Homo sapien
gttgctggatctgctgtttgaagcg

SEQ ID NO: 5839745 - DNA, 25 bp, Homo sapien
ggatctgctgtttgaagcgcagcag

SEQ ID NO: 5839746 - DNA, 25 bp, Homo sapien
gcgcagcaggtgcatcgccagcatt

SEQ ID NO: 5839747 - DNA, 25 bp, Homo sapien
gcaggtgcatcgccagcatttcgat

SEQ ID NO: 5839748 - DNA, 25 bp, Homo sapien
gcatcgccagcatttcgatcctcgt

SEQ ID NO: 5839749 - DNA, 25 bp, Homo sapien
gcatttcgatcctcgtcaggtgcag

SEQ ID NO: 5839750 - DNA, 25 bp, Homo sapien
cgatcctcgtcaggtgcaggtcagc

SEQ ID NO: 5839751 - DNA, 25 bp, Homo sapien
tcgtcaggtgcaggtcagcacgttg

SEQ ID NO: 5839752 - DNA, 25 bp, Homo sapien
gcaggtcagcacgttgctgtcgatt

SEQ ID NO: 5839753 - DNA, 25 bp, Homo sapien
cagcacgttgctgtcgattaagacc

SEQ ID NO: 5839754 - DNA, 25 bp, Homo sapien
gctgtcgattaagaccggagcttgt

SEQ ID NO: 5839755 - DNA, 25 bp, Homo sapien
agcttgtccggaagattgcaaatac

SEQ ID NO: 5839756 - DNA, 25 bp, Homo sapien
agattgcaaatactgcccgcaaacg

SEQ ID NO: 5839757 - DNA, 25 bp, Homo sapien
caaatactgcccgcaaacgtcgcgc

SEQ ID NO: 5839758 - DNA, 25 bp, Homo sapien
tgaacaggtgctggagtcggcgcgc

SEQ ID NO: 5839759 - DNA, 25 bp, Homo sapien
ggagtcggcgcgcaaagcgaaagcg

SEQ ID NO: 5839760 - DNA, 25 bp, Homo sapien
gacattgtcgcaagtcacagaatta

SEQ ID NO: 5839761 - DNA, 25 bp, Homo sapien
caaagcgaaagcggcaggatcgacg

SEQ ID NO: 5839762 - DNA, 25 bp, Homo sapien
attgtcgcaagtcacagaattattt

SEQ ID NO: 5839763 - DNA, 25 bp, Homo sapien
ggcaggatcgacgcgcttctgtatg

SEQ ID NO: 5839764 - DNA, 25 bp, Homo sapien
gttgctggatctgctgtttgaagcg

SEQ ID NO: 5839765 - DNA, 25 bp, Homo sapien
ggatctgctgtttgaagcgcagcag

SEQ ID NO: 5839766 - DNA, 25 bp, Homo sapien
gcgcagcaggtgcatcgccagcatt

SEQ ID NO: 5839767 - DNA, 25 bp, Homo sapien
gcaggtgcatcgccagcatttcgat

SEQ ID NO: 5839768 - DNA, 25 bp, Homo sapien
gcatcgccagcatttcgatcctcgt

SEQ ID NO: 5839769 - DNA, 25 bp, Homo sapien
gcatttcgatcctcgtcaggtgcag

SEQ ID NO: 5839770 - DNA, 25 bp, Homo sapien
cgatcctcgtcaggtgcaggtcagc

SEQ ID NO: 5839771 - DNA, 25 bp, Homo sapien
tcgtcaggtgcaggtcagcacgttg

SEQ ID NO: 5839772 - DNA, 25 bp, Homo sapien
gcaggtcagcacgttgctgtcgatt

SEQ ID NO: 5839773 - DNA, 25 bp, Homo sapien
cagcacgttgctgtcgattaagacc

SEQ ID NO: 5839774 - DNA, 25 bp, Homo sapien
gctgtcgattaagaccggagcttgt

SEQ ID NO: 5839775 - DNA, 25 bp, Homo sapien
agcttgtccggaagattgcaaatac

SEQ ID NO: 5839776 - DNA, 25 bp, Homo sapien
agattgcaaatactgcccgcaaacg

SEQ ID NO: 5839777 - DNA, 25 bp, Homo sapien
caaatactgcccgcaaacgtcgcgc

SEQ ID NO: 5839778 - DNA, 25 bp, Homo sapien
tgaacaggtgctggagtcggcgcgc

SEQ ID NO: 5839779 - DNA, 25 bp, Homo sapien
ggagtcggcgcgcaaagcgaaagcg

SEQ ID NO: 5839780 - DNA, 25 bp, Homo sapien
gacattgtcgcaagtcacagaatta

SEQ ID NO: 5839781 - DNA, 25 bp, Homo sapien
caaagcgaaagcggcaggatcgacg

SEQ ID NO: 5839782 - DNA, 25 bp, Homo sapien
attgtcgcaagtcacagaattattt

SEQ ID NO: 5839783 - DNA, 25 bp, Homo sapien
ggcaggatcgacgcgcttctgtatg

SEQ ID NO: 5839784 - DNA, 25 bp, Homo sapien
gttgctggatctgctgtttgaagcg

SEQ ID NO: 5839785 - DNA, 25 bp, Homo sapien
ggatctgctgtttgaagcgcagcag

SEQ ID NO: 5839786 - DNA, 25 bp, Homo sapien
gcgcagcaggtgcatcgccagcatt

SEQ ID NO: 5839787 - DNA, 25 bp, Homo sapien
gcaggtgcatcgccagcatttcgat

SEQ ID NO: 5839788 - DNA, 25 bp, Homo sapien
gcatcgccagcatttcgatcctcgt

SEQ ID NO: 5839789 - DNA, 25 bp, Homo sapien
gcatttcgatcctcgtcaggtgcag

SEQ ID NO: 5839790 - DNA, 25 bp, Homo sapien
cgatcctcgtcaggtgcaggtcagc

SEQ ID NO: 5839791 - DNA, 25 bp, Homo sapien
tcgtcaggtgcaggtcagcacgttg

SEQ ID NO: 5839792 - DNA, 25 bp, Homo sapien
gcaggtcagcacgttgctgtcgatt

SEQ ID NO: 5839793 - DNA, 25 bp, Homo sapien
cagcacgttgctgtcgattaagacc

SEQ ID NO: 5839794 - DNA, 25 bp, Homo sapien
gctgtcgattaagaccggagcttgt

SEQ ID NO: 5839795 - DNA, 25 bp, Homo sapien
agcttgtccggaagattgcaaatac

SEQ ID NO: 5839796 - DNA, 25 bp, Homo sapien
agattgcaaatactgcccgcaaacg

SEQ ID NO: 5839797 - DNA, 25 bp, Homo sapien
caaatactgcccgcaaacgtcgcgc

SEQ ID NO: 5839798 - DNA, 25 bp, Homo sapien
tgaacaggtgctggagtcggcgcgc

SEQ ID NO: 5839799 - DNA, 25 bp, Homo sapien
ggagtcggcgcgcaaagcgaaagcg

SEQ ID NO: 5839800 - DNA, 25 bp, Homo sapien
gacattgtcgcaagtcacagaatta

SEQ ID NO: 5839801 - DNA, 25 bp, Homo sapien
caaagcgaaagcggcaggatcgacg

SEQ ID NO: 5839802 - DNA, 25 bp, Homo sapien
attgtcgcaagtcacagaattattt

SEQ ID NO: 5839803 - DNA, 25 bp, Homo sapien
ggcaggatcgacgcgcttctgtatg

SEQ ID NO: 5839804 - DNA, 25 bp, Homo sapien
gttgctggatctgctgtttgaagcg

SEQ ID NO: 5839805 - DNA, 25 bp, Homo sapien
ggatctgctgtttgaagcgcagcag

SEQ ID NO: 5839806 - DNA, 25 bp, Homo sapien
gcgcagcaggtgcatcgccagcatt

SEQ ID NO: 5839807 - DNA, 25 bp, Homo sapien
gcaggtgcatcgccagcatttcgat

SEQ ID NO: 5839808 - DNA, 25 bp, Homo sapien
gcatcgccagcatttcgatcctcgt

SEQ ID NO: 5839809 - DNA, 25 bp, Homo sapien
gcatttcgatcctcgtcaggtgcag

SEQ ID NO: 5839810 - DNA, 25 bp, Homo sapien
cgatcctcgtcaggtgcaggtcagc

SEQ ID NO: 5839811 - DNA, 25 bp, Homo sapien
tcgtcaggtgcaggtcagcacgttg

SEQ ID NO: 5839812 - DNA, 25 bp, Homo sapien
gcaggtcagcacgttgctgtcgatt

SEQ ID NO: 5839813 - DNA, 25 bp, Homo sapien
cagcacgttgctgtcgattaagacc

SEQ ID NO: 5839814 - DNA, 25 bp, Homo sapien
gctgtcgattaagaccggagcttgt

SEQ ID NO: 5839815 - DNA, 25 bp, Homo sapien
agcttgtccggaagattgcaaatac

SEQ ID NO: 5839816 - DNA, 25 bp, Homo sapien
agattgcaaatactgcccgcaaacg

SEQ ID NO: 5839817 - DNA, 25 bp, Homo sapien
caaatactgcccgcaaacgtcgcgc

SEQ ID NO: 5839818 - DNA, 25 bp, Homo sapien
tgaacaggtgctggagtcggcgcgc

SEQ ID NO: 5839819 - DNA, 25 bp, Homo sapien
ggagtcggcgcgcaaagcgaaagcg

SEQ ID NO: 5839820 - DNA, 25 bp, Homo sapien
gacattgtcgcaagtcacagaatta

SEQ ID NO: 5839821 - DNA, 25 bp, Homo sapien
caaagcgaaagcggcaggatcgacg

SEQ ID NO: 5839822 - DNA, 25 bp, Homo sapien
attgtcgcaagtcacagaattattt

SEQ ID NO: 5839823 - DNA, 25 bp, Homo sapien
ggcaggatcgacgcgcttctgtatg

SEQ ID NO: 5839824 - DNA, 25 bp, Homo sapien
gttgctggatctgctgtttgaagcg

SEQ ID NO: 5839825 - DNA, 25 bp, Homo sapien
ggatctgctgtttgaagcgcagcag

SEQ ID NO: 5839826 - DNA, 25 bp, Homo sapien
gcgcagcaggtgcatcgccagcatt

SEQ ID NO: 5839827 - DNA, 25 bp, Homo sapien
gcaggtgcatcgccagcatttcgat

SEQ ID NO: 5839828 - DNA, 25 bp, Homo sapien
gcatcgccagcatttcgatcctcgt

SEQ ID NO: 5839829 - DNA, 25 bp, Homo sapien
gcatttcgatcctcgtcaggtgcag

SEQ ID NO: 5839830 - DNA, 25 bp, Homo sapien
cgatcctcgtcaggtgcaggtcagc

SEQ ID NO: 5839831 - DNA, 25 bp, Homo sapien
tcgtcaggtgcaggtcagcacgttg

SEQ ID NO: 5839832 - DNA, 25 bp, Homo sapien
gcaggtcagcacgttgctgtcgatt

SEQ ID NO: 5839833 - DNA, 25 bp, Homo sapien
cagcacgttgctgtcgattaagacc

SEQ ID NO: 5839834 - DNA, 25 bp, Homo sapien
gctgtcgattaagaccggagcttgt

SEQ ID NO: 5839835 - DNA, 25 bp, Homo sapien
agcttgtccggaagattgcaaatac

SEQ ID NO: 5839836 - DNA, 25 bp, Homo sapien
agattgcaaatactgcccgcaaacg

SEQ ID NO: 5839837 - DNA, 25 bp, Homo sapien
caaatactgcccgcaaacgtcgcgc

SEQ ID NO: 5839838 - DNA, 25 bp, Homo sapien
tgaacaggtgctggagtcggcgcgc

SEQ ID NO: 5839839 - DNA, 25 bp, Homo sapien
ggagtcggcgcgcaaagcgaaagcg

SEQ ID NO: 5839840 - DNA, 25 bp, Homo sapien
gacattgtcgcaagtcacagaatta

SEQ ID NO: 5839841 - DNA, 25 bp, Homo sapien
caaagcgaaagcggcaggatcgacg

SEQ ID NO: 5839842 - DNA, 25 bp, Homo sapien
attgtcgcaagtcacagaattattt

SEQ ID NO: 5839843 - DNA, 25 bp, Homo sapien
ggcaggatcgacgcgcttctgtatg

SEQ ID NO: 5839844 - DNA, 25 bp, Homo sapien
gttgctggatctgctgtttgaagcg

SEQ ID NO: 5839845 - DNA, 25 bp, Homo sapien
ggatctgctgtttgaagcgcagcag

SEQ ID NO: 5839846 - DNA, 25 bp, Homo sapien
gcgcagcaggtgcatcgccagcatt

SEQ ID NO: 5839847 - DNA, 25 bp, Homo sapien
gcaggtgcatcgccagcatttcgat

SEQ ID NO: 5839848 - DNA, 25 bp, Homo sapien
gcatcgccagcatttcgatcctcgt

SEQ ID NO: 5839849 - DNA, 25 bp, Homo sapien
gcatttcgatcctcgtcaggtgcag

SEQ ID NO: 5839850 - DNA, 25 bp, Homo sapien
cgatcctcgtcaggtgcaggtcagc

SEQ ID NO: 5839851 - DNA, 25 bp, Homo sapien
tcgtcaggtgcaggtcagcacgttg

SEQ ID NO: 5839852 - DNA, 25 bp, Homo sapien
gcaggtcagcacgttgctgtcgatt

SEQ ID NO: 5839853 - DNA, 25 bp, Homo sapien
cagcacgttgctgtcgattaagacc

SEQ ID NO: 5839854 - DNA, 25 bp, Homo sapien
gctgtcgattaagaccggagcttgt

SEQ ID NO: 5839855 - DNA, 25 bp, Homo sapien
agcttgtccggaagattgcaaatac

SEQ ID NO: 5839856 - DNA, 25 bp, Homo sapien
agattgcaaatactgcccgcaaacg

SEQ ID NO: 5839857 - DNA, 25 bp, Homo sapien
caaatactgcccgcaaacgtcgcgc

SEQ ID NO: 5839858 - DNA, 25 bp, Homo sapien
tgaacaggtgctggagtcggcgcgc

SEQ ID NO: 5839859 - DNA, 25 bp, Homo sapien
ggagtcggcgcgcaaagcgaaagcg

SEQ ID NO: 5839860 - DNA, 25 bp, Homo sapien
gacattgtcgcaagtcacagaatta

SEQ ID NO: 5839861 - DNA, 25 bp, Homo sapien
caaagcgaaagcggcaggatcgacg

SEQ ID NO: 5839862 - DNA, 25 bp, Homo sapien
attgtcgcaagtcacagaattattt

SEQ ID NO: 5839863 - DNA, 25 bp, Homo sapien
ggcaggatcgacgcgcttctgtatg

SEQ ID NO: 5839864 - DNA, 25 bp, Homo sapien
gttgctggatctgctgtttgaagcg

SEQ ID NO: 5839865 - DNA, 25 bp, Homo sapien
ggatctgctgtttgaagcgcagcag

SEQ ID NO: 5839866 - DNA, 25 bp, Homo sapien
gcgcagcaggtgcatcgccagcatt

SEQ ID NO: 5839867 - DNA, 25 bp, Homo sapien
gcaggtgcatcgccagcatttcgat

SEQ ID NO: 5839868 - DNA, 25 bp, Homo sapien
gcatcgccagcatttcgatcctcgt

SEQ ID NO: 5839869 - DNA, 25 bp, Homo sapien
gcatttcgatcctcgtcaggtgcag

SEQ ID NO: 5839870 - DNA, 25 bp, Homo sapien
cgatcctcgtcaggtgcaggtcagc

SEQ ID NO: 5839871 - DNA, 25 bp, Homo sapien
tcgtcaggtgcaggtcagcacgttg

SEQ ID NO: 5839872 - DNA, 25 bp, Homo sapien
gcaggtcagcacgttgctgtcgatt

SEQ ID NO: 5839873 - DNA, 25 bp, Homo sapien
cagcacgttgctgtcgattaagacc

SEQ ID NO: 5839874 - DNA, 25 bp, Homo sapien
gctgtcgattaagaccggagcttgt

SEQ ID NO: 5839875 - DNA, 25 bp, Homo sapien
agcttgtccggaagattgcaaatac

SEQ ID NO: 5839876 - DNA, 25 bp, Homo sapien
agattgcaaatactgcccgcaaacg

SEQ ID NO: 5839877 - DNA, 25 bp, Homo sapien
caaatactgcccgcaaacgtcgcgc

SEQ ID NO: 5839878 - DNA, 25 bp, Homo sapien
tgaacaggtgctggagtcggcgcgc

SEQ ID NO: 5839879 - DNA, 25 bp, Homo sapien
ggagtcggcgcgcaaagcgaaagcg

SEQ ID NO: 5839880 - DNA, 25 bp, Homo sapien
gacattgtcgcaagtcacagaatta

SEQ ID NO: 5839881 - DNA, 25 bp, Homo sapien
caaagcgaaagcggcaggatcgacg

SEQ ID NO: 5839882 - DNA, 25 bp, Homo sapien
attgtcgcaagtcacagaattattt

SEQ ID NO: 5839883 - DNA, 25 bp, Homo sapien
ggcaggatcgacgcgcttctgtatg

SEQ ID NO: 5839884 - DNA, 25 bp, Homo sapien
gttgctggatctgctgtttgaagcg

SEQ ID NO: 5839885 - DNA, 25 bp, Homo sapien
ggatctgctgtttgaagcgcagcag

SEQ ID NO: 5839886 - DNA, 25 bp, Homo sapien
gcgcagcaggtgcatcgccagcatt

SEQ ID NO: 5839887 - DNA, 25 bp, Homo sapien
gcaggtgcatcgccagcatttcgat

SEQ ID NO: 5839888 - DNA, 25 bp, Homo sapien
gcatcgccagcatttcgatcctcgt

SEQ ID NO: 5839889 - DNA, 25 bp, Homo sapien
gcatttcgatcctcgtcaggtgcag

SEQ ID NO: 5839890 - DNA, 25 bp, Homo sapien
cgatcctcgtcaggtgcaggtcagc

SEQ ID NO: 5839891 - DNA, 25 bp, Homo sapien
tcgtcaggtgcaggtcagcacgttg

SEQ ID NO: 5839892 - DNA, 25 bp, Homo sapien
gcaggtcagcacgttgctgtcgatt

SEQ ID NO: 5839893 - DNA, 25 bp, Homo sapien
cagcacgttgctgtcgattaagacc

SEQ ID NO: 5839894 - DNA, 25 bp, Homo sapien
gctgtcgattaagaccggagcttgt

SEQ ID NO: 5839895 - DNA, 25 bp, Homo sapien
agcttgtccggaagattgcaaatac

SEQ ID NO: 5839896 - DNA, 25 bp, Homo sapien
agattgcaaatactgcccgcaaacg

SEQ ID NO: 5839897 - DNA, 25 bp, Homo sapien
caaatactgcccgcaaacgtcgcgc

SEQ ID NO: 5839898 - DNA, 25 bp, Homo sapien
tgaacaggtgctggagtcggcgcgc

SEQ ID NO: 5839899 - DNA, 25 bp, Homo sapien
ggagtcggcgcgcaaagcgaaagcg

SEQ ID NO: 5839900 - DNA, 25 bp, Homo sapien
gacattgtcgcaagtcacagaatta

SEQ ID NO: 5839901 - DNA, 25 bp, Homo sapien
caaagcgaaagcggcaggatcgacg

SEQ ID NO: 5839902 - DNA, 25 bp, Homo sapien
attgtcgcaagtcacagaattattt

SEQ ID NO: 5839903 - DNA, 25 bp, Homo sapien
ggcaggatcgacgcgcttctgtatg

SEQ ID NO: 5839904 - DNA, 25 bp, Homo sapien
gttgctggatctgctgtttgaagcg

SEQ ID NO: 5839905 - DNA, 25 bp, Homo sapien
ggatctgctgtttgaagcgcagcag

SEQ ID NO: 5839906 - DNA, 25 bp, Homo sapien
gcgcagcaggtgcatcgccagcatt

SEQ ID NO: 5839907 - DNA, 25 bp, Homo sapien
gcaggtgcatcgccagcatttcgat

SEQ ID NO: 5839908 - DNA, 25 bp, Homo sapien
gcatcgccagcatttcgatcctcgt

SEQ ID NO: 5839909 - DNA, 25 bp, Homo sapien
gcatttcgatcctcgtcaggtgcag

SEQ ID NO: 5839910 - DNA, 25 bp, Homo sapien
cgatcctcgtcaggtgcaggtcagc

SEQ ID NO: 5839911 - DNA, 25 bp, Homo sapien
tcgtcaggtgcaggtcagcacgttg

SEQ ID NO: 5839912 - DNA, 25 bp, Homo sapien
gcaggtcagcacgttgctgtcgatt

SEQ ID NO: 5839913 - DNA, 25 bp, Homo sapien
cagcacgttgctgtcgattaagacc

SEQ ID NO: 5839914 - DNA, 25 bp, Homo sapien
gctgtcgattaagaccggagcttgt

SEQ ID NO: 5839915 - DNA, 25 bp, Homo sapien
agcttgtccggaagattgcaaatac

SEQ ID NO: 5839916 - DNA, 25 bp, Homo sapien
agattgcaaatactgcccgcaaacg

SEQ ID NO: 5839917 - DNA, 25 bp, Homo sapien
caaatactgcccgcaaacgtcgcgc

SEQ ID NO: 5839918 - DNA, 25 bp, Homo sapien
tgaacaggtgctggagtcggcgcgc

SEQ ID NO: 5839919 - DNA, 25 bp, Homo sapien
ggagtcggcgcgcaaagcgaaagcg

SEQ ID NO: 5839920 - DNA, 25 bp, Homo sapien
gacattgtcgcaagtcacagaatta

SEQ ID NO: 5839921 - DNA, 25 bp, Homo sapien
caaagcgaaagcggcaggatcgacg

SEQ ID NO: 5839922 - DNA, 25 bp, Homo sapien
attgtcgcaagtcacagaattattt

SEQ ID NO: 5839923 - DNA, 25 bp, Homo sapien
ggcaggatcgacgcgcttctgtatg

SEQ ID NO: 5839924 - DNA, 25 bp, Homo sapien
gttgctggatctgctgtttgaagcg

SEQ ID NO: 5839925 - DNA, 25 bp, Homo sapien
ggatctgctgtttgaagcgcagcag

SEQ ID NO: 5839926 - DNA, 25 bp, Homo sapien
gcgcagcaggtgcatcgccagcatt

SEQ ID NO: 5839927 - DNA, 25 bp, Homo sapien
gcaggtgcatcgccagcatttcgat

SEQ ID NO: 5839928 - DNA, 25 bp, Homo sapien
gcatcgccagcatttcgatcctcgt

SEQ ID NO: 5839929 - DNA, 25 bp, Homo sapien
gcatttcgatcctcgtcaggtgcag

SEQ ID NO: 5839930 - DNA, 25 bp, Homo sapien
cgatcctcgtcaggtgcaggtcagc

SEQ ID NO: 5839931 - DNA, 25 bp, Homo sapien
tcgtcaggtgcaggtcagcacgttg

SEQ ID NO: 5839932 - DNA, 25 bp, Homo sapien
gcaggtcagcacgttgctgtcgatt

SEQ ID NO: 5839933 - DNA, 25 bp, Homo sapien
cagcacgttgctgtcgattaagacc

SEQ ID NO: 5839934 - DNA, 25 bp, Homo sapien
gctgtcgattaagaccggagcttgt

SEQ ID NO: 5839935 - DNA, 25 bp, Homo sapien
agcttgtccggaagattgcaaatac

SEQ ID NO: 5839936 - DNA, 25 bp, Homo sapien
agattgcaaatactgcccgcaaacg

SEQ ID NO: 5839937 - DNA, 25 bp, Homo sapien
caaatactgcccgcaaacgtcgcgc

SEQ ID NO: 5839938 - DNA, 25 bp, Homo sapien
tgaacaggtgctggagtcggcgcgc

SEQ ID NO: 5839939 - DNA, 25 bp, Homo sapien
ggagtcggcgcgcaaagcgaaagcg

SEQ ID NO: 5839940 - DNA, 25 bp, Homo sapien
gacattgtcgcaagtcacagaatta

SEQ ID NO: 5839941 - DNA, 25 bp, Homo sapien
caaagcgaaagcggcaggatcgacg

SEQ ID NO: 5839942 - DNA, 25 bp, Homo sapien
attgtcgcaagtcacagaattattt

SEQ ID NO: 5839943 - DNA, 25 bp, Homo sapien
ggcaggatcgacgcgcttctgtatg

SEQ ID NO: 5839944 - DNA, 25 bp, Homo sapien
gttgctggatctgctgtttgaagcg

SEQ ID NO: 5839945 - DNA, 25 bp, Homo sapien
ggatctgctgtttgaagcgcagcag

SEQ ID NO: 5839946 - DNA, 25 bp, Homo sapien
gcgcagcaggtgcatcgccagcatt

SEQ ID NO: 5839947 - DNA, 25 bp, Homo sapien
gcaggtgcatcgccagcatttcgat

SEQ ID NO: 5839948 - DNA, 25 bp, Homo sapien
gcatcgccagcatttcgatcctcgt

SEQ ID NO: 5839949 - DNA, 25 bp, Homo sapien
gcatttcgatcctcgtcaggtgcag

SEQ ID NO: 5839950 - DNA, 25 bp, Homo sapien
cgatcctcgtcaggtgcaggtcagc

SEQ ID NO: 5839951 - DNA, 25 bp, Homo sapien
tcgtcaggtgcaggtcagcacgttg

SEQ ID NO: 5839952 - DNA, 25 bp, Homo sapien
gcaggtcagcacgttgctgtcgatt

SEQ ID NO: 5839953 - DNA, 25 bp, Homo sapien
cagcacgttgctgtcgattaagacc

SEQ ID NO: 5839954 - DNA, 25 bp, Homo sapien
gctgtcgattaagaccggagcttgt

SEQ ID NO: 5839955 - DNA, 25 bp, Homo sapien
agcttgtccggaagattgcaaatac

SEQ ID NO: 5839956 - DNA, 25 bp, Homo sapien
agattgcaaatactgcccgcaaacg

SEQ ID NO: 5839957 - DNA, 25 bp, Homo sapien
caaatactgcccgcaaacgtcgcgc

SEQ ID NO: 5839958 - DNA, 25 bp, Homo sapien
tgaacaggtgctggagtcggcgcgc

SEQ ID NO: 5839959 - DNA, 25 bp, Homo sapien
ggagtcggcgcgcaaagcgaaagcg

SEQ ID NO: 5839960 - DNA, 25 bp, Homo sapien
gacattgtcgcaagtcacagaatta

SEQ ID NO: 5839961 - DNA, 25 bp, Homo sapien
caaagcgaaagcggcaggatcgacg

SEQ ID NO: 5839962 - DNA, 25 bp, Homo sapien
attgtcgcaagtcacagaattattt

SEQ ID NO: 5839963 - DNA, 25 bp, Homo sapien
ggcaggatcgacgcgcttctgtatg

SEQ ID NO: 5839964 - DNA, 25 bp, Homo sapien
gttgctggatctgctgtttgaagcg

SEQ ID NO: 5839965 - DNA, 25 bp, Homo sapien
ggatctgctgtttgaagcgcagcag

SEQ ID NO: 5839966 - DNA, 25 bp, Homo sapien
gcgcagcaggtgcatcgccagcatt

SEQ ID NO: 5839967 - DNA, 25 bp, Homo sapien
gcaggtgcatcgccagcatttcgat

SEQ ID NO: 5839968 - DNA, 25 bp, Homo sapien
gcatcgccagcatttcgatcctcgt

SEQ ID NO: 5839969 - DNA, 25 bp, Homo sapien
gcatttcgatcctcgtcaggtgcag

SEQ ID NO: 5839970 - DNA, 25 bp, Homo sapien
cgatcctcgtcaggtgcaggtcagc

SEQ ID NO: 5839971 - DNA, 25 bp, Homo sapien
tcgtcaggtgcaggtcagcacgttg

SEQ ID NO: 5839972 - DNA, 25 bp, Homo sapien
gcaggtcagcacgttgctgtcgatt

SEQ ID NO: 5839973 - DNA, 25 bp, Homo sapien
cagcacgttgctgtcgattaagacc

SEQ ID NO: 5839974 - DNA, 25 bp, Homo sapien
gctgtcgattaagaccggagcttgt

SEQ ID NO: 5839975 - DNA, 25 bp, Homo sapien
agcttgtccggaagattgcaaatac

SEQ ID NO: 5839976 - DNA, 25 bp, Homo sapien
agattgcaaatactgcccgcaaacg

SEQ ID NO: 5839977 - DNA, 25 bp, Homo sapien
caaatactgcccgcaaacgtcgcgc

SEQ ID NO: 5839978 - DNA, 25 bp, Homo sapien
tgaacaggtgctggagtcggcgcgc

SEQ ID NO: 5839979 - DNA, 25 bp, Homo sapien
ggagtcggcgcgcaaagcgaaagcg

SEQ ID NO: 5839980 - DNA, 25 bp, Homo sapien
gacattgtcgcaagtcacagaatta

SEQ ID NO: 5839981 - DNA, 25 bp, Homo sapien
caaagcgaaagcggcaggatcgacg

SEQ ID NO: 5839982 - DNA, 25 bp, Homo sapien
attgtcgcaagtcacagaattattt

SEQ ID NO: 5839983 - DNA, 25 bp, Homo sapien
ggcaggatcgacgcgcttctgtatg

SEQ ID NO: 5839984 - DNA, 25 bp, Homo sapien
gttgctggatctgctgtttgaagcg

SEQ ID NO: 5839985 - DNA, 25 bp, Homo sapien
ggatctgctgtttgaagcgcagcag

SEQ ID NO: 5839986 - DNA, 25 bp, Homo sapien
gcgcagcaggtgcatcgccagcatt

SEQ ID NO: 5839987 - DNA, 25 bp, Homo sapien
gcaggtgcatcgccagcatttcgat

SEQ ID NO: 5839988 - DNA, 25 bp, Homo sapien
gcatcgccagcatttcgatcctcgt

SEQ ID NO: 5839989 - DNA, 25 bp, Homo sapien
gcatttcgatcctcgtcaggtgcag

SEQ ID NO: 5839990 - DNA, 25 bp, Homo sapien
cgatcctcgtcaggtgcaggtcagc

SEQ ID NO: 5839991 - DNA, 25 bp, Homo sapien
tcgtcaggtgcaggtcagcacgttg

SEQ ID NO: 5839992 - DNA, 25 bp, Homo sapien
gcaggtcagcacgttgctgtcgatt

SEQ ID NO: 5839993 - DNA, 25 bp, Homo sapien
cagcacgttgctgtcgattaagacc

SEQ ID NO: 5839994 - DNA, 25 bp, Homo sapien
gctgtcgattaagaccggagcttgt

SEQ ID NO: 5839995 - DNA, 25 bp, Homo sapien
agcttgtccggaagattgcaaatac

SEQ ID NO: 5839996 - DNA, 25 bp, Homo sapien
agattgcaaatactgcccgcaaacg

SEQ ID NO: 5839997 - DNA, 25 bp, Homo sapien
caaatactgcccgcaaacgtcgcgc

SEQ ID NO: 5839998 - DNA, 25 bp, Homo sapien
tgaacaggtgctggagtcggcgcgc

SEQ ID NO: 5839999 - DNA, 25 bp, Homo sapien
ggagtcggcgcgcaaagcgaaagcg

SEQ ID NO: 5840000 - DNA, 25 bp, Homo sapien
gacattgtcgcaagtcacagaatta

SEQ ID NO: 5840001 - DNA, 25 bp, Homo sapien
caaagcgaaagcggcaggatcgacg

SEQ ID NO: 5840002 - DNA, 25 bp, Homo sapien
attgtcgcaagtcacagaattattt

SEQ ID NO: 5840003 - DNA, 25 bp, Homo sapien
ggcaggatcgacgcgcttctgtatg

SEQ ID NO: 5840004 - DNA, 25 bp, Homo sapien
gttgctggatctgctgtttgaagcg

SEQ ID NO: 5840005 - DNA, 25 bp, Homo sapien
ggatctgctgtttgaagcgcagcag

SEQ ID NO: 5840006 - DNA, 25 bp, Homo sapien
gcgcagcaggtgcatcgccagcatt

SEQ ID NO: 5840007 - DNA, 25 bp, Homo sapien
gcaggtgcatcgccagcatttcgat

SEQ ID NO: 5840008 - DNA, 25 bp, Homo sapien
gcatcgccagcatttcgatcctcgt

SEQ ID NO: 5840009 - DNA, 25 bp, Homo sapien
gcatttcgatcctcgtcaggtgcag

SEQ ID NO: 5840010 - DNA, 25 bp, Homo sapien
cgatcctcgtcaggtgcaggtcagc

SEQ ID NO: 5840011 - DNA, 25 bp, Homo sapien
tcgtcaggtgcaggtcagcacgttg

SEQ ID NO: 5840012 - DNA, 25 bp, Homo sapien
gcaggtcagcacgttgctgtcgatt

SEQ ID NO: 5840013 - DNA, 25 bp, Homo sapien
cagcacgttgctgtcgattaagacc

SEQ ID NO: 5840014 - DNA, 25 bp, Homo sapien
gctgtcgattaagaccggagcttgt

SEQ ID NO: 5840015 - DNA, 25 bp, Homo sapien
agcttgtccggaagattgcaaatac

SEQ ID NO: 5840016 - DNA, 25 bp, Homo sapien
agattgcaaatactgcccgcaaacg

SEQ ID NO: 5840017 - DNA, 25 bp, Homo sapien
caaatactgcccgcaaacgtcgcgc

SEQ ID NO: 5840018 - DNA, 25 bp, Homo sapien
tgaacaggtgctggagtcggcgcgc

SEQ ID NO: 5840019 - DNA, 25 bp, Homo sapien
ggagtcggcgcgcaaagcgaaagcg

SEQ ID NO: 5840020 - DNA, 25 bp, Homo sapien
gacattgtcgcaagtcacagaatta

SEQ ID NO: 5840021 - DNA, 25 bp, Homo sapien
caaagcgaaagcggcaggatcgacg

SEQ ID NO: 5840022 - DNA, 25 bp, Homo sapien
attgtcgcaagtcacagaattattt

SEQ ID NO: 5840023 - DNA, 25 bp, Homo sapien
ggcaggatcgacgcgcttctgtatg

SEQ ID NO: 5840024 - DNA, 25 bp, Homo sapien
gttgctggatctgctgtttgaagcg

SEQ ID NO: 5840025 - DNA, 25 bp, Homo sapien
ggatctgctgtttgaagcgcagcag

SEQ ID NO: 5840026 - DNA, 25 bp, Homo sapien
gcgcagcaggtgcatcgccagcatt

SEQ ID NO: 5840027 - DNA, 25 bp, Homo sapien
gcaggtgcatcgccagcatttcgat

SEQ ID NO: 5840028 - DNA, 25 bp, Homo sapien
gcatcgccagcatttcgatcctcgt

SEQ ID NO: 5840029 - DNA, 25 bp, Homo sapien
gcatttcgatcctcgtcaggtgcag

SEQ ID NO: 5840030 - DNA, 25 bp, Homo sapien
cgatcctcgtcaggtgcaggtcagc

SEQ ID NO: 5840031 - DNA, 25 bp, Homo sapien
tcgtcaggtgcaggtcagcacgttg

SEQ ID NO: 5840032 - DNA, 25 bp, Homo sapien
gcaggtcagcacgttgctgtcgatt

SEQ ID NO: 5840033 - DNA, 25 bp, Homo sapien
cagcacgttgctgtcgattaagacc

SEQ ID NO: 5840034 - DNA, 25 bp, Homo sapien
gctgtcgattaagaccggagcttgt

SEQ ID NO: 5840035 - DNA, 25 bp, Homo sapien
agcttgtccggaagattgcaaatac

SEQ ID NO: 5840036 - DNA, 25 bp, Homo sapien
agattgcaaatactgcccgcaaacg

SEQ ID NO: 5840037 - DNA, 25 bp, Homo sapien
caaatactgcccgcaaacgtcgcgc

SEQ ID NO: 5840038 - DNA, 25 bp, Homo sapien
tgaacaggtgctggagtcggcgcgc

SEQ ID NO: 5840039 - DNA, 25 bp, Homo sapien
ggagtcggcgcgcaaagcgaaagcg

SEQ ID NO: 5840040 - DNA, 25 bp, Homo sapien
gacattgtcgcaagtcacagaatta

SEQ ID NO: 5840041 - DNA, 25 bp, Homo sapien
caaagcgaaagcggcaggatcgacg

SEQ ID NO: 5840042 - DNA, 25 bp, Homo sapien
attgtcgcaagtcacagaattattt

SEQ ID NO: 5840043 - DNA, 25 bp, Homo sapien
ggcaggatcgacgcgcttctgtatg

SEQ ID NO: 5840044 - DNA, 25 bp, Homo sapien
gttgctggatctgctgtttgaagcg

SEQ ID NO: 5840045 - DNA, 25 bp, Homo sapien
ggatctgctgtttgaagcgcagcag

SEQ ID NO: 5840046 - DNA, 25 bp, Homo sapien
gcgcagcaggtgcatcgccagcatt

SEQ ID NO: 5840047 - DNA, 25 bp, Homo sapien
gcaggtgcatcgccagcatttcgat

SEQ ID NO: 5840048 - DNA, 25 bp, Homo sapien
gcatcgccagcatttcgatcctcgt

SEQ ID NO: 5840049 - DNA, 25 bp, Homo sapien
gcatttcgatcctcgtcaggtgcag

SEQ ID NO: 5840050 - DNA, 25 bp, Homo sapien
cgatcctcgtcaggtgcaggtcagc

SEQ ID NO: 5840051 - DNA, 25 bp, Homo sapien
tcgtcaggtgcaggtcagcacgttg

SEQ ID NO: 5840052 - DNA, 25 bp, Homo sapien
gcaggtcagcacgttgctgtcgatt

SEQ ID NO: 5840053 - DNA, 25 bp, Homo sapien
cagcacgttgctgtcgattaagacc

SEQ ID NO: 5840054 - DNA, 25 bp, Homo sapien
gctgtcgattaagaccggagcttgt

SEQ ID NO: 5840055 - DNA, 25 bp, Homo sapien
agcttgtccggaagattgcaaatac

SEQ ID NO: 5840056 - DNA, 25 bp, Homo sapien
agattgcaaatactgcccgcaaacg

SEQ ID NO: 5840057 - DNA, 25 bp, Homo sapien
caaatactgcccgcaaacgtcgcgc

SEQ ID NO: 5840058 - DNA, 25 bp, Homo sapien
tgaacaggtgctggagtcggcgcgc

SEQ ID NO: 5840059 - DNA, 25 bp, Homo sapien
ggagtcggcgcgcaaagcgaaagcg

SEQ ID NO: 5840060 - DNA, 25 bp, Homo sapien
tggtgaaggtgaaaggcacgccgct

SEQ ID NO: 5840061 - DNA, 25 bp, Homo sapien
acgccgcttgccgataacgatgatg

SEQ ID NO: 5840062 - DNA, 25 bp, Homo sapien
gccggagttttacggcaatatcatc

SEQ ID NO: 5840063 - DNA, 25 bp, Homo sapien
ttgccgataacgatgatgtcgatgc

SEQ ID NO: 5840064 - DNA, 25 bp, Homo sapien
gttttacggcaatatcatcaccaca

SEQ ID NO: 5840065 - DNA, 25 bp, Homo sapien
acgatgatgtcgatgcctttgattt

SEQ ID NO: 5840066 - DNA, 25 bp, Homo sapien
gcaatatcatcaccacacgcactta

SEQ ID NO: 5840067 - DNA, 25 bp, Homo sapien
atcaccacacgcacttatcaggaac

SEQ ID NO: 5840068 - DNA, 25 bp, Homo sapien
acgcacttatcaggaacgcctcgat

SEQ ID NO: 5840069 - DNA, 25 bp, Homo sapien
atacgctggaaaaagtgcgcgatgc

SEQ ID NO: 5840070 - DNA, 25 bp, Homo sapien
ggaaaaagtgcgcgatgccgggatc

SEQ ID NO: 5840071 - DNA, 25 bp, Homo sapien
agtgcgcgatgccgggatcaaagtc

SEQ ID NO: 5840072 - DNA, 25 bp, Homo sapien
gccgggatcaaagtctgttctggcg

SEQ ID NO: 5840073 - DNA, 25 bp, Homo sapien
aagtctgttctggcggcattgtggg

SEQ ID NO: 5840074 - DNA, 25 bp, Homo sapien
aagatcgcgccggattattgctgca

SEQ ID NO: 5840075 - DNA, 25 bp, Homo sapien
gccggattattgctgcaactggcaa

SEQ ID NO: 5840076 - DNA, 25 bp, Homo sapien
attgctgcaactggcaaacctgccg

SEQ ID NO: 5840077 - DNA, 25 bp, Homo sapien
cgccggaaagcgtgccaatcaacat

SEQ ID NO: 5840078 - DNA, 25 bp, Homo sapien
aagcgtgccaatcaacatgctggtg

SEQ ID NO: 5840079 - DNA, 25 bp, Homo sapien
caatcaacatgctggtgaaggtgaa

SEQ ID NO: 5840080 - DNA, 25 bp, Homo sapien
tggtgaaggtgaaaggcacgccgct

SEQ ID NO: 5840081 - DNA, 25 bp, Homo sapien
acgccgcttgccgataacgatgatg

SEQ ID NO: 5840082 - DNA, 25 bp, Homo sapien
gccggagttttacggcaatatcatc

SEQ ID NO: 5840083 - DNA, 25 bp, Homo sapien
ttgccgataacgatgatgtcgatgc

SEQ ID NO: 5840084 - DNA, 25 bp, Homo sapien
gttttacggcaatatcatcaccaca

SEQ ID NO: 5840085 - DNA, 25 bp, Homo sapien
acgatgatgtcgatgcctttgattt

SEQ ID NO: 5840086 - DNA, 25 bp, Homo sapien
gcaatatcatcaccacacgcactta

SEQ ID NO: 5840087 - DNA, 25 bp, Homo sapien
atcaccacacgcacttatcaggaac

SEQ ID NO: 5840088 - DNA, 25 bp, Homo sapien
acgcacttatcaggaacgcctcgat

SEQ ID NO: 5840089 - DNA, 25 bp, Homo sapien
atacgctggaaaaagtgcgcgatgc

SEQ ID NO: 5840090 - DNA, 25 bp, Homo sapien
ggaaaaagtgcgcgatgccgggatc

SEQ ID NO: 5840091 - DNA, 25 bp, Homo sapien
agtgcgcgatgccgggatcaaagtc

SEQ ID NO: 5840092 - DNA, 25 bp, Homo sapien
gccgggatcaaagtctgttctggcg

SEQ ID NO: 5840093 - DNA, 25 bp, Homo sapien
aagtctgttctggcggcattgtggg

SEQ ID NO: 5840094 - DNA, 25 bp, Homo sapien
aagatcgcgccggattattgctgca

SEQ ID NO: 5840095 - DNA, 25 bp, Homo sapien
gccggattattgctgcaactggcaa

SEQ ID NO: 5840096 - DNA, 25 bp, Homo sapien
attgctgcaactggcaaacctgccg

SEQ ID NO: 5840097 - DNA, 25 bp, Homo sapien
cgccggaaagcgtgccaatcaacat

SEQ ID NO: 5840098 - DNA, 25 bp, Homo sapien
aagcgtgccaatcaacatgctggtg

SEQ ID NO: 5840099 - DNA, 25 bp, Homo sapien
caatcaacatgctggtgaaggtgaa

SEQ ID NO: 5840100 - DNA, 25 bp, Homo sapien
tggtgaaggtgaaaggcacgccgct

SEQ ID NO: 5840101 - DNA, 25 bp, Homo sapien
acgccgcttgccgataacgatgatg

SEQ ID NO: 5840102 - DNA, 25 bp, Homo sapien
gccggagttttacggcaatatcatc

SEQ ID NO: 5840103 - DNA, 25 bp, Homo sapien
ttgccgataacgatgatgtcgatgc

SEQ ID NO: 5840104 - DNA, 25 bp, Homo sapien
gttttacggcaatatcatcaccaca

SEQ ID NO: 5840105 - DNA, 25 bp, Homo sapien
acgatgatgtcgatgcctttgattt

SEQ ID NO: 5840106 - DNA, 25 bp, Homo sapien
gcaatatcatcaccacacgcactta

SEQ ID NO: 5840107 - DNA, 25 bp, Homo sapien
atcaccacacgcacttatcaggaac

SEQ ID NO: 5840108 - DNA, 25 bp, Homo sapien
acgcacttatcaggaacgcctcgat

SEQ ID NO: 5840109 - DNA, 25 bp, Homo sapien
atacgctggaaaaagtgcgcgatgc

SEQ ID NO: 5840110 - DNA, 25 bp, Homo sapien
ggaaaaagtgcgcgatgccgggatc

SEQ ID NO: 5840111 - DNA, 25 bp, Homo sapien
agtgcgcgatgccgggatcaaagtc

SEQ ID NO: 5840112 - DNA, 25 bp, Homo sapien
gccgggatcaaagtctgttctggcg

SEQ ID NO: 5840113 - DNA, 25 bp, Homo sapien
aagtctgttctggcggcattgtggg

SEQ ID NO: 5840114 - DNA, 25 bp, Homo sapien
aagatcgcgccggattattgctgca

SEQ ID NO: 5840115 - DNA, 25 bp, Homo sapien
gccggattattgctgcaactggcaa

SEQ ID NO: 5840116 - DNA, 25 bp, Homo sapien
attgctgcaactggcaaacctgccg

SEQ ID NO: 5840117 - DNA, 25 bp, Homo sapien
cgccggaaagcgtgccaatcaacat

SEQ ID NO: 5840118 - DNA, 25 bp, Homo sapien
aagcgtgccaatcaacatgctggtg

SEQ ID NO: 5840119 - DNA, 25 bp, Homo sapien
caatcaacatgctggtgaaggtgaa

SEQ ID NO: 5840120 - DNA, 25 bp, Homo sapien
tggtgaaggtgaaaggcacgccgct

SEQ ID NO: 5840121 - DNA, 25 bp, Homo sapien
acgccgcttgccgataacgatgatg

SEQ ID NO: 5840122 - DNA, 25 bp, Homo sapien
gccggagttttacggcaatatcatc

SEQ ID NO: 5840123 - DNA, 25 bp, Homo sapien
ttgccgataacgatgatgtcgatgc

SEQ ID NO: 5840124 - DNA, 25 bp, Homo sapien
gttttacggcaatatcatcaccaca

SEQ ID NO: 5840125 - DNA, 25 bp, Homo sapien
acgatgatgtcgatgcctttgattt

SEQ ID NO: 5840126 - DNA, 25 bp, Homo sapien
gcaatatcatcaccacacgcactta

SEQ ID NO: 5840127 - DNA, 25 bp, Homo sapien
atcaccacacgcacttatcaggaac

SEQ ID NO: 5840128 - DNA, 25 bp, Homo sapien
acgcacttatcaggaacgcctcgat

SEQ ID NO: 5840129 - DNA, 25 bp, Homo sapien
atacgctggaaaaagtgcgcgatgc

SEQ ID NO: 5840130 - DNA, 25 bp, Homo sapien
ggaaaaagtgcgcgatgccgggatc

SEQ ID NO: 5840131 - DNA, 25 bp, Homo sapien
agtgcgcgatgccgggatcaaagtc

SEQ ID NO: 5840132 - DNA, 25 bp, Homo sapien
gccgggatcaaagtctgttctggcg

SEQ ID NO: 5840133 - DNA, 25 bp, Homo sapien
aagtctgttctggcggcattgtggg

SEQ ID NO: 5840134 - DNA, 25 bp, Homo sapien
aagatcgcgccggattattgctgca

SEQ ID NO: 5840135 - DNA, 25 bp, Homo sapien
gccggattattgctgcaactggcaa

SEQ ID NO: 5840136 - DNA, 25 bp, Homo sapien
attgctgcaactggcaaacctgccg

SEQ ID NO: 5840137 - DNA, 25 bp, Homo sapien
cgccggaaagcgtgccaatcaacat

SEQ ID NO: 5840138 - DNA, 25 bp, Homo sapien
aagcgtgccaatcaacatgctggtg

SEQ ID NO: 5840139 - DNA, 25 bp, Homo sapien
caatcaacatgctggtgaaggtgaa

SEQ ID NO: 5840140 - DNA, 25 bp, Homo sapien
tggtgaaggtgaaaggcacgccgct

SEQ ID NO: 5840141 - DNA, 25 bp, Homo sapien
acgccgcttgccgataacgatgatg

SEQ ID NO: 5840142 - DNA, 25 bp, Homo sapien
gccggagttttacggcaatatcatc

SEQ ID NO: 5840143 - DNA, 25 bp, Homo sapien
ttgccgataacgatgatgtcgatgc

SEQ ID NO: 5840144 - DNA, 25 bp, Homo sapien
gttttacggcaatatcatcaccaca

SEQ ID NO: 5840145 - DNA, 25 bp, Homo sapien
acgatgatgtcgatgcctttgattt

SEQ ID NO: 5840146 - DNA, 25 bp, Homo sapien
gcaatatcatcaccacacgcactta

SEQ ID NO: 5840147 - DNA, 25 bp, Homo sapien
atcaccacacgcacttatcaggaac

SEQ ID NO: 5840148 - DNA, 25 bp, Homo sapien
acgcacttatcaggaacgcctcgat

SEQ ID NO: 5840149 - DNA, 25 bp, Homo sapien
atacgctggaaaaagtgcgcgatgc

SEQ ID NO: 5840150 - DNA, 25 bp, Homo sapien
ggaaaaagtgcgcgatgccgggatc

SEQ ID NO: 5840151 - DNA, 25 bp, Homo sapien
agtgcgcgatgccgggatcaaagtc

SEQ ID NO: 5840152 - DNA, 25 bp, Homo sapien
gccgggatcaaagtctgttctggcg

SEQ ID NO: 5840153 - DNA, 25 bp, Homo sapien
aagtctgttctggcggcattgtggg

SEQ ID NO: 5840154 - DNA, 25 bp, Homo sapien
aagatcgcgccggattattgctgca

SEQ ID NO: 5840155 - DNA, 25 bp, Homo sapien
gccggattattgctgcaactggcaa

SEQ ID NO: 5840156 - DNA, 25 bp, Homo sapien
attgctgcaactggcaaacctgccg

SEQ ID NO: 5840157 - DNA, 25 bp, Homo sapien
cgccggaaagcgtgccaatcaacat

SEQ ID NO: 5840158 - DNA, 25 bp, Homo sapien
aagcgtgccaatcaacatgctggtg

SEQ ID NO: 5840159 - DNA, 25 bp, Homo sapien
caatcaacatgctggtgaaggtgaa

SEQ ID NO: 5840160 - DNA, 25 bp, Homo sapien
tggtgaaggtgaaaggcacgccgct

SEQ ID NO: 5840161 - DNA, 25 bp, Homo sapien
acgccgcttgccgataacgatgatg

SEQ ID NO: 5840162 - DNA, 25 bp, Homo sapien
gccggagttttacggcaatatcatc

SEQ ID NO: 5840163 - DNA, 25 bp, Homo sapien
ttgccgataacgatgatgtcgatgc

SEQ ID NO: 5840164 - DNA, 25 bp, Homo sapien
gttttacggcaatatcatcaccaca

SEQ ID NO: 5840165 - DNA, 25 bp, Homo sapien
acgatgatgtcgatgcctttgattt

SEQ ID NO: 5840166 - DNA, 25 bp, Homo sapien
gcaatatcatcaccacacgcactta

SEQ ID NO: 5840167 - DNA, 25 bp, Homo sapien
atcaccacacgcacttatcaggaac

SEQ ID NO: 5840168 - DNA, 25 bp, Homo sapien
acgcacttatcaggaacgcctcgat

SEQ ID NO: 5840169 - DNA, 25 bp, Homo sapien
atacgctggaaaaagtgcgcgatgc

SEQ ID NO: 5840170 - DNA, 25 bp, Homo sapien
ggaaaaagtgcgcgatgccgggatc

SEQ ID NO: 5840171 - DNA, 25 bp, Homo sapien
agtgcgcgatgccgggatcaaagtc

SEQ ID NO: 5840172 - DNA, 25 bp, Homo sapien
gccgggatcaaagtctgttctggcg

SEQ ID NO: 5840173 - DNA, 25 bp, Homo sapien
aagtctgttctggcggcattgtggg

SEQ ID NO: 5840174 - DNA, 25 bp, Homo sapien
aagatcgcgccggattattgctgca

SEQ ID NO: 5840175 - DNA, 25 bp, Homo sapien
gccggattattgctgcaactggcaa

SEQ ID NO: 5840176 - DNA, 25 bp, Homo sapien
attgctgcaactggcaaacctgccg

SEQ ID NO: 5840177 - DNA, 25 bp, Homo sapien
cgccggaaagcgtgccaatcaacat

SEQ ID NO: 5840178 - DNA, 25 bp, Homo sapien
aagcgtgccaatcaacatgctggtg

SEQ ID NO: 5840179 - DNA, 25 bp, Homo sapien
caatcaacatgctggtgaaggtgaa

SEQ ID NO: 5840180 - DNA, 25 bp, Homo sapien
tggtgaaggtgaaaggcacgccgct

SEQ ID NO: 5840181 - DNA, 25 bp, Homo sapien
acgccgcttgccgataacgatgatg

SEQ ID NO: 5840182 - DNA, 25 bp, Homo sapien
gccggagttttacggcaatatcatc

SEQ ID NO: 5840183 - DNA, 25 bp, Homo sapien
ttgccgataacgatgatgtcgatgc

SEQ ID NO: 5840184 - DNA, 25 bp, Homo sapien
gttttacggcaatatcatcaccaca

SEQ ID NO: 5840185 - DNA, 25 bp, Homo sapien
acgatgatgtcgatgcctttgattt

SEQ ID NO: 5840186 - DNA, 25 bp, Homo sapien
gcaatatcatcaccacacgcactta

SEQ ID NO: 5840187 - DNA, 25 bp, Homo sapien
atcaccacacgcacttatcaggaac

SEQ ID NO: 5840188 - DNA, 25 bp, Homo sapien
acgcacttatcaggaacgcctcgat

SEQ ID NO: 5840189 - DNA, 25 bp, Homo sapien
atacgctggaaaaagtgcgcgatgc

SEQ ID NO: 5840190 - DNA, 25 bp, Homo sapien
ggaaaaagtgcgcgatgccgggatc

SEQ ID NO: 5840191 - DNA, 25 bp, Homo sapien
agtgcgcgatgccgggatcaaagtc

SEQ ID NO: 5840192 - DNA, 25 bp, Homo sapien
gccgggatcaaagtctgttctggcg

SEQ ID NO: 5840193 - DNA, 25 bp, Homo sapien
aagtctgttctggcggcattgtggg

SEQ ID NO: 5840194 - DNA, 25 bp, Homo sapien
aagatcgcgccggattattgctgca

SEQ ID NO: 5840195 - DNA, 25 bp, Homo sapien
gccggattattgctgcaactggcaa

SEQ ID NO: 5840196 - DNA, 25 bp, Homo sapien
attgctgcaactggcaaacctgccg

SEQ ID NO: 5840197 - DNA, 25 bp, Homo sapien
cgccggaaagcgtgccaatcaacat

SEQ ID NO: 5840198 - DNA, 25 bp, Homo sapien
aagcgtgccaatcaacatgctggtg

SEQ ID NO: 5840199 - DNA, 25 bp, Homo sapien
caatcaacatgctggtgaaggtgaa

SEQ ID NO: 5840200 - DNA, 25 bp, Homo sapien
tggtgaaggtgaaaggcacgccgct

SEQ ID NO: 5840201 - DNA, 25 bp, Homo sapien
acgccgcttgccgataacgatgatg

SEQ ID NO: 5840202 - DNA, 25 bp, Homo sapien
gccggagttttacggcaatatcatc

SEQ ID NO: 5840203 - DNA, 25 bp, Homo sapien
ttgccgataacgatgatgtcgatgc

SEQ ID NO: 5840204 - DNA, 25 bp, Homo sapien
gttttacggcaatatcatcaccaca

SEQ ID NO: 5840205 - DNA, 25 bp, Homo sapien
acgatgatgtcgatgcctttgattt

SEQ ID NO: 5840206 - DNA, 25 bp, Homo sapien
gcaatatcatcaccacacgcactta

SEQ ID NO: 5840207 - DNA, 25 bp, Homo sapien
atcaccacacgcacttatcaggaac

SEQ ID NO: 5840208 - DNA, 25 bp, Homo sapien
acgcacttatcaggaacgcctcgat

SEQ ID NO: 5840209 - DNA, 25 bp, Homo sapien
atacgctggaaaaagtgcgcgatgc

SEQ ID NO: 5840210 - DNA, 25 bp, Homo sapien
ggaaaaagtgcgcgatgccgggatc

SEQ ID NO: 5840211 - DNA, 25 bp, Homo sapien
agtgcgcgatgccgggatcaaagtc

SEQ ID NO: 5840212 - DNA, 25 bp, Homo sapien
gccgggatcaaagtctgttctggcg

SEQ ID NO: 5840213 - DNA, 25 bp, Homo sapien
aagtctgttctggcggcattgtggg

SEQ ID NO: 5840214 - DNA, 25 bp, Homo sapien
aagatcgcgccggattattgctgca

SEQ ID NO: 5840215 - DNA, 25 bp, Homo sapien
gccggattattgctgcaactggcaa

SEQ ID NO: 5840216 - DNA, 25 bp, Homo sapien
attgctgcaactggcaaacctgccg

SEQ ID NO: 5840217 - DNA, 25 bp, Homo sapien
cgccggaaagcgtgccaatcaacat

SEQ ID NO: 5840218 - DNA, 25 bp, Homo sapien
aagcgtgccaatcaacatgctggtg

SEQ ID NO: 5840219 - DNA, 25 bp, Homo sapien
caatcaacatgctggtgaaggtgaa

SEQ ID NO: 5840220 - DNA, 25 bp, Homo sapien
tggtgaaggtgaaaggcacgccgct

SEQ ID NO: 5840221 - DNA, 25 bp, Homo sapien
acgccgcttgccgataacgatgatg

SEQ ID NO: 5840222 - DNA, 25 bp, Homo sapien
gccggagttttacggcaatatcatc

SEQ ID NO: 5840223 - DNA, 25 bp, Homo sapien
ttgccgataacgatgatgtcgatgc

SEQ ID NO: 5840224 - DNA, 25 bp, Homo sapien
gttttacggcaatatcatcaccaca

SEQ ID NO: 5840225 - DNA, 25 bp, Homo sapien
acgatgatgtcgatgcctttgattt

SEQ ID NO: 5840226 - DNA, 25 bp, Homo sapien
gcaatatcatcaccacacgcactta

SEQ ID NO: 5840227 - DNA, 25 bp, Homo sapien
atcaccacacgcacttatcaggaac

SEQ ID NO: 5840228 - DNA, 25 bp, Homo sapien
acgcacttatcaggaacgcctcgat

SEQ ID NO: 5840229 - DNA, 25 bp, Homo sapien
atacgctggaaaaagtgcgcgatgc

SEQ ID NO: 5840230 - DNA, 25 bp, Homo sapien
ggaaaaagtgcgcgatgccgggatc

SEQ ID NO: 5840231 - DNA, 25 bp, Homo sapien
agtgcgcgatgccgggatcaaagtc

SEQ ID NO: 5840232 - DNA, 25 bp, Homo sapien
gccgggatcaaagtctgttctggcg

SEQ ID NO: 5840233 - DNA, 25 bp, Homo sapien
aagtctgttctggcggcattgtggg

SEQ ID NO: 5840234 - DNA, 25 bp, Homo sapien
aagatcgcgccggattattgctgca

SEQ ID NO: 5840235 - DNA, 25 bp, Homo sapien
gccggattattgctgcaactggcaa

SEQ ID NO: 5840236 - DNA, 25 bp, Homo sapien
attgctgcaactggcaaacctgccg

SEQ ID NO: 5840237 - DNA, 25 bp, Homo sapien
cgccggaaagcgtgccaatcaacat

SEQ ID NO: 5840238 - DNA, 25 bp, Homo sapien
aagcgtgccaatcaacatgctggtg

SEQ ID NO: 5840239 - DNA, 25 bp, Homo sapien
caatcaacatgctggtgaaggtgaa

SEQ ID NO: 5840240 - DNA, 25 bp, Homo sapien
tggtgaaggtgaaaggcacgccgct

SEQ ID NO: 5840241 - DNA, 25 bp, Homo sapien
acgccgcttgccgataacgatgatg

SEQ ID NO: 5840242 - DNA, 25 bp, Homo sapien
gccggagttttacggcaatatcatc

SEQ ID NO: 5840243 - DNA, 25 bp, Homo sapien
ttgccgataacgatgatgtcgatgc

SEQ ID NO: 5840244 - DNA, 25 bp, Homo sapien
gttttacggcaatatcatcaccaca

SEQ ID NO: 5840245 - DNA, 25 bp, Homo sapien
acgatgatgtcgatgcctttgattt

SEQ ID NO: 5840246 - DNA, 25 bp, Homo sapien
gcaatatcatcaccacacgcactta

SEQ ID NO: 5840247 - DNA, 25 bp, Homo sapien
atcaccacacgcacttatcaggaac

SEQ ID NO: 5840248 - DNA, 25 bp, Homo sapien
acgcacttatcaggaacgcctcgat

SEQ ID NO: 5840249 - DNA, 25 bp, Homo sapien
atacgctggaaaaagtgcgcgatgc

SEQ ID NO: 5840250 - DNA, 25 bp, Homo sapien
ggaaaaagtgcgcgatgccgggatc

SEQ ID NO: 5840251 - DNA, 25 bp, Homo sapien
agtgcgcgatgccgggatcaaagtc

SEQ ID NO: 5840252 - DNA, 25 bp, Homo sapien
gccgggatcaaagtctgttctggcg

SEQ ID NO: 5840253 - DNA, 25 bp, Homo sapien
aagtctgttctggcggcattgtggg

SEQ ID NO: 5840254 - DNA, 25 bp, Homo sapien
aagatcgcgccggattattgctgca

SEQ ID NO: 5840255 - DNA, 25 bp, Homo sapien
gccggattattgctgcaactggcaa

SEQ ID NO: 5840256 - DNA, 25 bp, Homo sapien
attgctgcaactggcaaacctgccg

SEQ ID NO: 5840257 - DNA, 25 bp, Homo sapien
cgccggaaagcgtgccaatcaacat

SEQ ID NO: 5840258 - DNA, 25 bp, Homo sapien
aagcgtgccaatcaacatgctggtg

SEQ ID NO: 5840259 - DNA, 25 bp, Homo sapien
caatcaacatgctggtgaaggtgaa

SEQ ID NO: 5840260 - DNA, 25 bp, Homo sapien
tggtgaaggtgaaaggcacgccgct

SEQ ID NO: 5840261 - DNA, 25 bp, Homo sapien
acgccgcttgccgataacgatgatg

SEQ ID NO: 5840262 - DNA, 25 bp, Homo sapien
gccggagttttacggcaatatcatc

SEQ ID NO: 5840263 - DNA, 25 bp, Homo sapien
ttgccgataacgatgatgtcgatgc

SEQ ID NO: 5840264 - DNA, 25 bp, Homo sapien
gttttacggcaatatcatcaccaca

SEQ ID NO: 5840265 - DNA, 25 bp, Homo sapien
acgatgatgtcgatgcctttgattt

SEQ ID NO: 5840266 - DNA, 25 bp, Homo sapien
gcaatatcatcaccacacgcactta

SEQ ID NO: 5840267 - DNA, 25 bp, Homo sapien
atcaccacacgcacttatcaggaac

SEQ ID NO: 5840268 - DNA, 25 bp, Homo sapien
acgcacttatcaggaacgcctcgat

SEQ ID NO: 5840269 - DNA, 25 bp, Homo sapien
atacgctggaaaaagtgcgcgatgc

SEQ ID NO: 5840270 - DNA, 25 bp, Homo sapien
ggaaaaagtgcgcgatgccgggatc

SEQ ID NO: 5840271 - DNA, 25 bp, Homo sapien
agtgcgcgatgccgggatcaaagtc

SEQ ID NO: 5840272 - DNA, 25 bp, Homo sapien
gccgggatcaaagtctgttctggcg

SEQ ID NO: 5840273 - DNA, 25 bp, Homo sapien
aagtctgttctggcggcattgtggg

SEQ ID NO: 5840274 - DNA, 25 bp, Homo sapien
aagatcgcgccggattattgctgca

SEQ ID NO: 5840275 - DNA, 25 bp, Homo sapien
gccggattattgctgcaactggcaa

SEQ ID NO: 5840276 - DNA, 25 bp, Homo sapien
attgctgcaactggcaaacctgccg

SEQ ID NO: 5840277 - DNA, 25 bp, Homo sapien
cgccggaaagcgtgccaatcaacat

SEQ ID NO: 5840278 - DNA, 25 bp, Homo sapien
aagcgtgccaatcaacatgctggtg

SEQ ID NO: 5840279 - DNA, 25 bp, Homo sapien
caatcaacatgctggtgaaggtgaa

SEQ ID NO: 5840280 - DNA, 25 bp, Homo sapien
tggtgaaggtgaaaggcacgccgct

SEQ ID NO: 5840281 - DNA, 25 bp, Homo sapien
acgccgcttgccgataacgatgatg

SEQ ID NO: 5840282 - DNA, 25 bp, Homo sapien
gccggagttttacggcaatatcatc

SEQ ID NO: 5840283 - DNA, 25 bp, Homo sapien
ttgccgataacgatgatgtcgatgc

SEQ ID NO: 5840284 - DNA, 25 bp, Homo sapien
gttttacggcaatatcatcaccaca

SEQ ID NO: 5840285 - DNA, 25 bp, Homo sapien
acgatgatgtcgatgcctttgattt

SEQ ID NO: 5840286 - DNA, 25 bp, Homo sapien
gcaatatcatcaccacacgcactta

SEQ ID NO: 5840287 - DNA, 25 bp, Homo sapien
atcaccacacgcacttatcaggaac

SEQ ID NO: 5840288 - DNA, 25 bp, Homo sapien
acgcacttatcaggaacgcctcgat

SEQ ID NO: 5840289 - DNA, 25 bp, Homo sapien
atacgctggaaaaagtgcgcgatgc

SEQ ID NO: 5840290 - DNA, 25 bp, Homo sapien
ggaaaaagtgcgcgatgccgggatc

SEQ ID NO: 5840291 - DNA, 25 bp, Homo sapien
agtgcgcgatgccgggatcaaagtc

SEQ ID NO: 5840292 - DNA, 25 bp, Homo sapien
gccgggatcaaagtctgttctggcg

SEQ ID NO: 5840293 - DNA, 25 bp, Homo sapien
aagtctgttctggcggcattgtggg

SEQ ID NO: 5840294 - DNA, 25 bp, Homo sapien
aagatcgcgccggattattgctgca

SEQ ID NO: 5840295 - DNA, 25 bp, Homo sapien
gccggattattgctgcaactggcaa

SEQ ID NO: 5840296 - DNA, 25 bp, Homo sapien
attgctgcaactggcaaacctgccg

SEQ ID NO: 5840297 - DNA, 25 bp, Homo sapien
cgccggaaagcgtgccaatcaacat

SEQ ID NO: 5840298 - DNA, 25 bp, Homo sapien
aagcgtgccaatcaacatgctggtg

SEQ ID NO: 5840299 - DNA, 25 bp, Homo sapien
caatcaacatgctggtgaaggtgaa

SEQ ID NO: 5840300 - DNA, 25 bp, Homo sapien
tggtgaaggtgaaaggcacgccgct

SEQ ID NO: 5840301 - DNA, 25 bp, Homo sapien
acgccgcttgccgataacgatgatg

SEQ ID NO: 5840302 - DNA, 25 bp, Homo sapien
gccggagttttacggcaatatcatc

SEQ ID NO: 5840303 - DNA, 25 bp, Homo sapien
ttgccgataacgatgatgtcgatgc

SEQ ID NO: 5840304 - DNA, 25 bp, Homo sapien
gttttacggcaatatcatcaccaca

SEQ ID NO: 5840305 - DNA, 25 bp, Homo sapien
acgatgatgtcgatgcctttgattt

SEQ ID NO: 5840306 - DNA, 25 bp, Homo sapien
gcaatatcatcaccacacgcactta

SEQ ID NO: 5840307 - DNA, 25 bp, Homo sapien
atcaccacacgcacttatcaggaac

SEQ ID NO: 5840308 - DNA, 25 bp, Homo sapien
acgcacttatcaggaacgcctcgat

SEQ ID NO: 5840309 - DNA, 25 bp, Homo sapien
atacgctggaaaaagtgcgcgatgc

SEQ ID NO: 5840310 - DNA, 25 bp, Homo sapien
ggaaaaagtgcgcgatgccgggatc

SEQ ID NO: 5840311 - DNA, 25 bp, Homo sapien
agtgcgcgatgccgggatcaaagtc

SEQ ID NO: 5840312 - DNA, 25 bp, Homo sapien
gccgggatcaaagtctgttctggcg

SEQ ID NO: 5840313 - DNA, 25 bp, Homo sapien
aagtctgttctggcggcattgtggg

SEQ ID NO: 5840314 - DNA, 25 bp, Homo sapien
aagatcgcgccggattattgctgca

SEQ ID NO: 5840315 - DNA, 25 bp, Homo sapien
gccggattattgctgcaactggcaa

SEQ ID NO: 5840316 - DNA, 25 bp, Homo sapien
attgctgcaactggcaaacctgccg

SEQ ID NO: 5840317 - DNA, 25 bp, Homo sapien
cgccggaaagcgtgccaatcaacat

SEQ ID NO: 5840318 - DNA, 25 bp, Homo sapien
aagcgtgccaatcaacatgctggtg

SEQ ID NO: 5840319 - DNA, 25 bp, Homo sapien
caatcaacatgctggtgaaggtgaa

SEQ ID NO: 5840320 - DNA, 25 bp, Homo sapien
tggtgaaggtgaaaggcacgccgct

SEQ ID NO: 5840321 - DNA, 25 bp, Homo sapien
acgccgcttgccgataacgatgatg

SEQ ID NO: 5840322 - DNA, 25 bp, Homo sapien
gccggagttttacggcaatatcatc

SEQ ID NO: 5840323 - DNA, 25 bp, Homo sapien
ttgccgataacgatgatgtcgatgc

SEQ ID NO: 5840324 - DNA, 25 bp, Homo sapien
gttttacggcaatatcatcaccaca

SEQ ID NO: 5840325 - DNA, 25 bp, Homo sapien
acgatgatgtcgatgcctttgattt

SEQ ID NO: 5840326 - DNA, 25 bp, Homo sapien
gcaatatcatcaccacacgcactta

SEQ ID NO: 5840327 - DNA, 25 bp, Homo sapien
atcaccacacgcacttatcaggaac

SEQ ID NO: 5840328 - DNA, 25 bp, Homo sapien
acgcacttatcaggaacgcctcgat

SEQ ID NO: 5840329 - DNA, 25 bp, Homo sapien
atacgctggaaaaagtgcgcgatgc

SEQ ID NO: 5840330 - DNA, 25 bp, Homo sapien
ggaaaaagtgcgcgatgccgggatc

SEQ ID NO: 5840331 - DNA, 25 bp, Homo sapien
agtgcgcgatgccgggatcaaagtc

SEQ ID NO: 5840332 - DNA, 25 bp, Homo sapien
gccgggatcaaagtctgttctggcg

SEQ ID NO: 5840333 - DNA, 25 bp, Homo sapien
aagtctgttctggcggcattgtggg

SEQ ID NO: 5840334 - DNA, 25 bp, Homo sapien
aagatcgcgccggattattgctgca

SEQ ID NO: 5840335 - DNA, 25 bp, Homo sapien
gccggattattgctgcaactggcaa

SEQ ID NO: 5840336 - DNA, 25 bp, Homo sapien
attgctgcaactggcaaacctgccg

SEQ ID NO: 5840337 - DNA, 25 bp, Homo sapien
cgccggaaagcgtgccaatcaacat

SEQ ID NO: 5840338 - DNA, 25 bp, Homo sapien
aagcgtgccaatcaacatgctggtg

SEQ ID NO: 5840339 - DNA, 25 bp, Homo sapien
caatcaacatgctggtgaaggtgaa

SEQ ID NO: 5840340 - DNA, 25 bp, Homo sapien
tggtgaaggtgaaaggcacgccgct

SEQ ID NO: 5840341 - DNA, 25 bp, Homo sapien
acgccgcttgccgataacgatgatg

SEQ ID NO: 5840342 - DNA, 25 bp, Homo sapien
gccggagttttacggcaatatcatc

SEQ ID NO: 5840343 - DNA, 25 bp, Homo sapien
ttgccgataacgatgatgtcgatgc

SEQ ID NO: 5840344 - DNA, 25 bp, Homo sapien
gttttacggcaatatcatcaccaca

SEQ ID NO: 5840345 - DNA, 25 bp, Homo sapien
acgatgatgtcgatgcctttgattt

SEQ ID NO: 5840346 - DNA, 25 bp, Homo sapien
gcaatatcatcaccacacgcactta

SEQ ID NO: 5840347 - DNA, 25 bp, Homo sapien
atcaccacacgcacttatcaggaac

SEQ ID NO: 5840348 - DNA, 25 bp, Homo sapien
acgcacttatcaggaacgcctcgat

SEQ ID NO: 5840349 - DNA, 25 bp, Homo sapien
atacgctggaaaaagtgcgcgatgc

SEQ ID NO: 5840350 - DNA, 25 bp, Homo sapien
ggaaaaagtgcgcgatgccgggatc

SEQ ID NO: 5840351 - DNA, 25 bp, Homo sapien
agtgcgcgatgccgggatcaaagtc

SEQ ID NO: 5840352 - DNA, 25 bp, Homo sapien
gccgggatcaaagtctgttctggcg

SEQ ID NO: 5840353 - DNA, 25 bp, Homo sapien
aagtctgttctggcggcattgtggg

SEQ ID NO: 5840354 - DNA, 25 bp, Homo sapien
aagatcgcgccggattattgctgca

SEQ ID NO: 5840355 - DNA, 25 bp, Homo sapien
gccggattattgctgcaactggcaa

SEQ ID NO: 5840356 - DNA, 25 bp, Homo sapien
attgctgcaactggcaaacctgccg

SEQ ID NO: 5840357 - DNA, 25 bp, Homo sapien
cgccggaaagcgtgccaatcaacat

SEQ ID NO: 5840358 - DNA, 25 bp, Homo sapien
aagcgtgccaatcaacatgctggtg

SEQ ID NO: 5840359 - DNA, 25 bp, Homo sapien
caatcaacatgctggtgaaggtgaa

SEQ ID NO: 5840360 - DNA, 25 bp, Homo sapien
tggtgaaggtgaaaggcacgccgct

SEQ ID NO: 5840361 - DNA, 25 bp, Homo sapien
acgccgcttgccgataacgatgatg

SEQ ID NO: 5840362 - DNA, 25 bp, Homo sapien
gccggagttttacggcaatatcatc

SEQ ID NO: 5840363 - DNA, 25 bp, Homo sapien
ttgccgataacgatgatgtcgatgc

SEQ ID NO: 5840364 - DNA, 25 bp, Homo sapien
gttttacggcaatatcatcaccaca

SEQ ID NO: 5840365 - DNA, 25 bp, Homo sapien
acgatgatgtcgatgcctttgattt

SEQ ID NO: 5840366 - DNA, 25 bp, Homo sapien
gcaatatcatcaccacacgcactta

SEQ ID NO: 5840367 - DNA, 25 bp, Homo sapien
atcaccacacgcacttatcaggaac

SEQ ID NO: 5840368 - DNA, 25 bp, Homo sapien
acgcacttatcaggaacgcctcgat

SEQ ID NO: 5840369 - DNA, 25 bp, Homo sapien
atacgctggaaaaagtgcgcgatgc

SEQ ID NO: 5840370 - DNA, 25 bp, Homo sapien
ggaaaaagtgcgcgatgccgggatc

SEQ ID NO: 5840371 - DNA, 25 bp, Homo sapien
agtgcgcgatgccgggatcaaagtc

SEQ ID NO: 5840372 - DNA, 25 bp, Homo sapien
gccgggatcaaagtctgttctggcg

SEQ ID NO: 5840373 - DNA, 25 bp, Homo sapien
aagtctgttctggcggcattgtggg

SEQ ID NO: 5840374 - DNA, 25 bp, Homo sapien
aagatcgcgccggattattgctgca

SEQ ID NO: 5840375 - DNA, 25 bp, Homo sapien
gccggattattgctgcaactggcaa

SEQ ID NO: 5840376 - DNA, 25 bp, Homo sapien
attgctgcaactggcaaacctgccg

SEQ ID NO: 5840377 - DNA, 25 bp, Homo sapien
cgccggaaagcgtgccaatcaacat

SEQ ID NO: 5840378 - DNA, 25 bp, Homo sapien
aagcgtgccaatcaacatgctggtg

SEQ ID NO: 5840379 - DNA, 25 bp, Homo sapien
caatcaacatgctggtgaaggtgaa

SEQ ID NO: 5840380 - DNA, 25 bp, Homo sapien
tggtgaaggtgaaaggcacgccgct

SEQ ID NO: 5840381 - DNA, 25 bp, Homo sapien
acgccgcttgccgataacgatgatg

SEQ ID NO: 5840382 - DNA, 25 bp, Homo sapien
gccggagttttacggcaatatcatc

SEQ ID NO: 5840383 - DNA, 25 bp, Homo sapien
ttgccgataacgatgatgtcgatgc

SEQ ID NO: 5840384 - DNA, 25 bp, Homo sapien
gttttacggcaatatcatcaccaca

SEQ ID NO: 5840385 - DNA, 25 bp, Homo sapien
acgatgatgtcgatgcctttgattt

SEQ ID NO: 5840386 - DNA, 25 bp, Homo sapien
gcaatatcatcaccacacgcactta

SEQ ID NO: 5840387 - DNA, 25 bp, Homo sapien
atcaccacacgcacttatcaggaac

SEQ ID NO: 5840388 - DNA, 25 bp, Homo sapien
acgcacttatcaggaacgcctcgat

SEQ ID NO: 5840389 - DNA, 25 bp, Homo sapien
atacgctggaaaaagtgcgcgatgc

SEQ ID NO: 5840390 - DNA, 25 bp, Homo sapien
ggaaaaagtgcgcgatgccgggatc

SEQ ID NO: 5840391 - DNA, 25 bp, Homo sapien
agtgcgcgatgccgggatcaaagtc

SEQ ID NO: 5840392 - DNA, 25 bp, Homo sapien
gccgggatcaaagtctgttctggcg

SEQ ID NO: 5840393 - DNA, 25 bp, Homo sapien
aagtctgttctggcggcattgtggg

SEQ ID NO: 5840394 - DNA, 25 bp, Homo sapien
aagatcgcgccggattattgctgca

SEQ ID NO: 5840395 - DNA, 25 bp, Homo sapien
gccggattattgctgcaactggcaa

SEQ ID NO: 5840396 - DNA, 25 bp, Homo sapien
attgctgcaactggcaaacctgccg

SEQ ID NO: 5840397 - DNA, 25 bp, Homo sapien
cgccggaaagcgtgccaatcaacat

SEQ ID NO: 5840398 - DNA, 25 bp, Homo sapien
aagcgtgccaatcaacatgctggtg

SEQ ID NO: 5840399 - DNA, 25 bp, Homo sapien
caatcaacatgctggtgaaggtgaa

SEQ ID NO: 5840400 - DNA, 25 bp, Homo sapien
tggtgaaggtgaaaggcacgccgct

SEQ ID NO: 5840401 - DNA, 25 bp, Homo sapien
acgccgcttgccgataacgatgatg

SEQ ID NO: 5840402 - DNA, 25 bp, Homo sapien
gccggagttttacggcaatatcatc

SEQ ID NO: 5840403 - DNA, 25 bp, Homo sapien
ttgccgataacgatgatgtcgatgc

SEQ ID NO: 5840404 - DNA, 25 bp, Homo sapien
gttttacggcaatatcatcaccaca

SEQ ID NO: 5840405 - DNA, 25 bp, Homo sapien
acgatgatgtcgatgcctttgattt

SEQ ID NO: 5840406 - DNA, 25 bp, Homo sapien
gcaatatcatcaccacacgcactta

SEQ ID NO: 5840407 - DNA, 25 bp, Homo sapien
atcaccacacgcacttatcaggaac

SEQ ID NO: 5840408 - DNA, 25 bp, Homo sapien
acgcacttatcaggaacgcctcgat

SEQ ID NO: 5840409 - DNA, 25 bp, Homo sapien
atacgctggaaaaagtgcgcgatgc

SEQ ID NO: 5840410 - DNA, 25 bp, Homo sapien
ggaaaaagtgcgcgatgccgggatc

SEQ ID NO: 5840411 - DNA, 25 bp, Homo sapien
agtgcgcgatgccgggatcaaagtc

SEQ ID NO: 5840412 - DNA, 25 bp, Homo sapien
gccgggatcaaagtctgttctggcg

SEQ ID NO: 5840413 - DNA, 25 bp, Homo sapien
aagtctgttctggcggcattgtggg

SEQ ID NO: 5840414 - DNA, 25 bp, Homo sapien
aagatcgcgccggattattgctgca

SEQ ID NO: 5840415 - DNA, 25 bp, Homo sapien
gccggattattgctgcaactggcaa

SEQ ID NO: 5840416 - DNA, 25 bp, Homo sapien
attgctgcaactggcaaacctgccg

SEQ ID NO: 5840417 - DNA, 25 bp, Homo sapien
cgccggaaagcgtgccaatcaacat

SEQ ID NO: 5840418 - DNA, 25 bp, Homo sapien
aagcgtgccaatcaacatgctggtg

SEQ ID NO: 5840419 - DNA, 25 bp, Homo sapien
caatcaacatgctggtgaaggtgaa

SEQ ID NO: 5840420 - DNA, 25 bp, Homo sapien
tggtgaaggtgaaaggcacgccgct

SEQ ID NO: 5840421 - DNA, 25 bp, Homo sapien
acgccgcttgccgataacgatgatg

SEQ ID NO: 5840422 - DNA, 25 bp, Homo sapien
gccggagttttacggcaatatcatc

SEQ ID NO: 5840423 - DNA, 25 bp, Homo sapien
ttgccgataacgatgatgtcgatgc

SEQ ID NO: 5840424 - DNA, 25 bp, Homo sapien
gttttacggcaatatcatcaccaca

SEQ ID NO: 5840425 - DNA, 25 bp, Homo sapien
acgatgatgtcgatgcctttgattt

SEQ ID NO: 5840426 - DNA, 25 bp, Homo sapien
gcaatatcatcaccacacgcactta

SEQ ID NO: 5840427 - DNA, 25 bp, Homo sapien
atcaccacacgcacttatcaggaac

SEQ ID NO: 5840428 - DNA, 25 bp, Homo sapien
acgcacttatcaggaacgcctcgat

SEQ ID NO: 5840429 - DNA, 25 bp, Homo sapien
atacgctggaaaaagtgcgcgatgc

SEQ ID NO: 5840430 - DNA, 25 bp, Homo sapien
ggaaaaagtgcgcgatgccgggatc

SEQ ID NO: 5840431 - DNA, 25 bp, Homo sapien
agtgcgcgatgccgggatcaaagtc

SEQ ID NO: 5840432 - DNA, 25 bp, Homo sapien
gccgggatcaaagtctgttctggcg

SEQ ID NO: 5840433 - DNA, 25 bp, Homo sapien
aagtctgttctggcggcattgtggg

SEQ ID NO: 5840434 - DNA, 25 bp, Homo sapien
aagatcgcgccggattattgctgca

SEQ ID NO: 5840435 - DNA, 25 bp, Homo sapien
gccggattattgctgcaactggcaa

SEQ ID NO: 5840436 - DNA, 25 bp, Homo sapien
attgctgcaactggcaaacctgccg

SEQ ID NO: 5840437 - DNA, 25 bp, Homo sapien
cgccggaaagcgtgccaatcaacat

SEQ ID NO: 5840438 - DNA, 25 bp, Homo sapien
aagcgtgccaatcaacatgctggtg

SEQ ID NO: 5840439 - DNA, 25 bp, Homo sapien
caatcaacatgctggtgaaggtgaa

SEQ ID NO: 5840440 - DNA, 25 bp, Homo sapien
tggtgaaggtgaaaggcacgccgct

SEQ ID NO: 5840441 - DNA, 25 bp, Homo sapien
acgccgcttgccgataacgatgatg

SEQ ID NO: 5840442 - DNA, 25 bp, Homo sapien
gccggagttttacggcaatatcatc

SEQ ID NO: 5840443 - DNA, 25 bp, Homo sapien
ttgccgataacgatgatgtcgatgc

SEQ ID NO: 5840444 - DNA, 25 bp, Homo sapien
gttttacggcaatatcatcaccaca

SEQ ID NO: 5840445 - DNA, 25 bp, Homo sapien
acgatgatgtcgatgcctttgattt

SEQ ID NO: 5840446 - DNA, 25 bp, Homo sapien
gcaatatcatcaccacacgcactta

SEQ ID NO: 5840447 - DNA, 25 bp, Homo sapien
atcaccacacgcacttatcaggaac

SEQ ID NO: 5840448 - DNA, 25 bp, Homo sapien
acgcacttatcaggaacgcctcgat

SEQ ID NO: 5840449 - DNA, 25 bp, Homo sapien
atacgctggaaaaagtgcgcgatgc

SEQ ID NO: 5840450 - DNA, 25 bp, Homo sapien
ggaaaaagtgcgcgatgccgggatc

SEQ ID NO: 5840451 - DNA, 25 bp, Homo sapien
agtgcgcgatgccgggatcaaagtc

SEQ ID NO: 5840452 - DNA, 25 bp, Homo sapien
gccgggatcaaagtctgttctggcg

SEQ ID NO: 5840453 - DNA, 25 bp, Homo sapien
aagtctgttctggcggcattgtggg

SEQ ID NO: 5840454 - DNA, 25 bp, Homo sapien
aagatcgcgccggattattgctgca

SEQ ID NO: 5840455 - DNA, 25 bp, Homo sapien
gccggattattgctgcaactggcaa

SEQ ID NO: 5840456 - DNA, 25 bp, Homo sapien
attgctgcaactggcaaacctgccg

SEQ ID NO: 5840457 - DNA, 25 bp, Homo sapien
cgccggaaagcgtgccaatcaacat

SEQ ID NO: 5840458 - DNA, 25 bp, Homo sapien
aagcgtgccaatcaacatgctggtg

SEQ ID NO: 5840459 - DNA, 25 bp, Homo sapien
caatcaacatgctggtgaaggtgaa

SEQ ID NO: 5840460 - DNA, 25 bp, Homo sapien
tggtgaaggtgaaaggcacgccgct

SEQ ID NO: 5840461 - DNA, 25 bp, Homo sapien
acgccgcttgccgataacgatgatg

SEQ ID NO: 5840462 - DNA, 25 bp, Homo sapien
gccggagttttacggcaatatcatc

SEQ ID NO: 5840463 - DNA, 25 bp, Homo sapien
ttgccgataacgatgatgtcgatgc

SEQ ID NO: 5840464 - DNA, 25 bp, Homo sapien
gttttacggcaatatcatcaccaca

SEQ ID NO: 5840465 - DNA, 25 bp, Homo sapien
acgatgatgtcgatgcctttgattt

SEQ ID NO: 5840466 - DNA, 25 bp, Homo sapien
gcaatatcatcaccacacgcactta

SEQ ID NO: 5840467 - DNA, 25 bp, Homo sapien
atcaccacacgcacttatcaggaac

SEQ ID NO: 5840468 - DNA, 25 bp, Homo sapien
acgcacttatcaggaacgcctcgat

SEQ ID NO: 5840469 - DNA, 25 bp, Homo sapien
atacgctggaaaaagtgcgcgatgc

SEQ ID NO: 5840470 - DNA, 25 bp, Homo sapien
ggaaaaagtgcgcgatgccgggatc

SEQ ID NO: 5840471 - DNA, 25 bp, Homo sapien
agtgcgcgatgccgggatcaaagtc

SEQ ID NO: 5840472 - DNA, 25 bp, Homo sapien
gccgggatcaaagtctgttctggcg

SEQ ID NO: 5840473 - DNA, 25 bp, Homo sapien
aagtctgttctggcggcattgtggg

SEQ ID NO: 5840474 - DNA, 25 bp, Homo sapien
aagatcgcgccggattattgctgca

SEQ ID NO: 5840475 - DNA, 25 bp, Homo sapien
gccggattattgctgcaactggcaa

SEQ ID NO: 5840476 - DNA, 25 bp, Homo sapien
attgctgcaactggcaaacctgccg

SEQ ID NO: 5840477 - DNA, 25 bp, Homo sapien
cgccggaaagcgtgccaatcaacat

SEQ ID NO: 5840478 - DNA, 25 bp, Homo sapien
aagcgtgccaatcaacatgctggtg

SEQ ID NO: 5840479 - DNA, 25 bp, Homo sapien
caatcaacatgctggtgaaggtgaa

SEQ ID NO: 5840480 - DNA, 25 bp, Homo sapien
tggtgaaggtgaaaggcacgccgct

SEQ ID NO: 5840481 - DNA, 25 bp, Homo sapien
acgccgcttgccgataacgatgatg

SEQ ID NO: 5840482 - DNA, 25 bp, Homo sapien
gccggagttttacggcaatatcatc

SEQ ID NO: 5840483 - DNA, 25 bp, Homo sapien
ttgccgataacgatgatgtcgatgc

SEQ ID NO: 5840484 - DNA, 25 bp, Homo sapien
gttttacggcaatatcatcaccaca

SEQ ID NO: 5840485 - DNA, 25 bp, Homo sapien
acgatgatgtcgatgcctttgattt

SEQ ID NO: 5840486 - DNA, 25 bp, Homo sapien
gcaatatcatcaccacacgcactta

SEQ ID NO: 5840487 - DNA, 25 bp, Homo sapien
atcaccacacgcacttatcaggaac

SEQ ID NO: 5840488 - DNA, 25 bp, Homo sapien
acgcacttatcaggaacgcctcgat

SEQ ID NO: 5840489 - DNA, 25 bp, Homo sapien
atacgctggaaaaagtgcgcgatgc

SEQ ID NO: 5840490 - DNA, 25 bp, Homo sapien
ggaaaaagtgcgcgatgccgggatc

SEQ ID NO: 5840491 - DNA, 25 bp, Homo sapien
agtgcgcgatgccgggatcaaagtc

SEQ ID NO: 5840492 - DNA, 25 bp, Homo sapien
gccgggatcaaagtctgttctggcg

SEQ ID NO: 5840493 - DNA, 25 bp, Homo sapien
aagtctgttctggcggcattgtggg

SEQ ID NO: 5840494 - DNA, 25 bp, Homo sapien
aagatcgcgccggattattgctgca

SEQ ID NO: 5840495 - DNA, 25 bp, Homo sapien
gccggattattgctgcaactggcaa

SEQ ID NO: 5840496 - DNA, 25 bp, Homo sapien
attgctgcaactggcaaacctgccg

SEQ ID NO: 5840497 - DNA, 25 bp, Homo sapien
cgccggaaagcgtgccaatcaacat

SEQ ID NO: 5840498 - DNA, 25 bp, Homo sapien
aagcgtgccaatcaacatgctggtg

SEQ ID NO: 5840499 - DNA, 25 bp, Homo sapien
caatcaacatgctggtgaaggtgaa

SEQ ID NO: 5840500 - DNA, 25 bp, Homo sapien
tggtgaaggtgaaaggcacgccgct

SEQ ID NO: 5840501 - DNA, 25 bp, Homo sapien
acgccgcttgccgataacgatgatg

SEQ ID NO: 5840502 - DNA, 25 bp, Homo sapien
gccggagttttacggcaatatcatc

SEQ ID NO: 5840503 - DNA, 25 bp, Homo sapien
ttgccgataacgatgatgtcgatgc

SEQ ID NO: 5840504 - DNA, 25 bp, Homo sapien
gttttacggcaatatcatcaccaca

SEQ ID NO: 5840505 - DNA, 25 bp, Homo sapien
acgatgatgtcgatgcctttgattt

SEQ ID NO: 5840506 - DNA, 25 bp, Homo sapien
gcaatatcatcaccacacgcactta

SEQ ID NO: 5840507 - DNA, 25 bp, Homo sapien
atcaccacacgcacttatcaggaac

SEQ ID NO: 5840508 - DNA, 25 bp, Homo sapien
acgcacttatcaggaacgcctcgat

SEQ ID NO: 5840509 - DNA, 25 bp, Homo sapien
atacgctggaaaaagtgcgcgatgc

SEQ ID NO: 5840510 - DNA, 25 bp, Homo sapien
ggaaaaagtgcgcgatgccgggatc

SEQ ID NO: 5840511 - DNA, 25 bp, Homo sapien
agtgcgcgatgccgggatcaaagtc

SEQ ID NO: 5840512 - DNA, 25 bp, Homo sapien
gccgggatcaaagtctgttctggcg

SEQ ID NO: 5840513 - DNA, 25 bp, Homo sapien
aagtctgttctggcggcattgtggg

SEQ ID NO: 5840514 - DNA, 25 bp, Homo sapien
aagatcgcgccggattattgctgca

SEQ ID NO: 5840515 - DNA, 25 bp, Homo sapien
gccggattattgctgcaactggcaa

SEQ ID NO: 5840516 - DNA, 25 bp, Homo sapien
attgctgcaactggcaaacctgccg

SEQ ID NO: 5840517 - DNA, 25 bp, Homo sapien
cgccggaaagcgtgccaatcaacat

SEQ ID NO: 5840518 - DNA, 25 bp, Homo sapien
aagcgtgccaatcaacatgctggtg

SEQ ID NO: 5840519 - DNA, 25 bp, Homo sapien
caatcaacatgctggtgaaggtgaa

SEQ ID NO: 5840520 - DNA, 25 bp, Homo sapien
tggtgaaggtgaaaggcacgccgct

SEQ ID NO: 5840521 - DNA, 25 bp, Homo sapien
acgccgcttgccgataacgatgatg

SEQ ID NO: 5840522 - DNA, 25 bp, Homo sapien
gccggagttttacggcaatatcatc

SEQ ID NO: 5840523 - DNA, 25 bp, Homo sapien
ttgccgataacgatgatgtcgatgc

SEQ ID NO: 5840524 - DNA, 25 bp, Homo sapien
gttttacggcaatatcatcaccaca

SEQ ID NO: 5840525 - DNA, 25 bp, Homo sapien
acgatgatgtcgatgcctttgattt

SEQ ID NO: 5840526 - DNA, 25 bp, Homo sapien
gcaatatcatcaccacacgcactta

SEQ ID NO: 5840527 - DNA, 25 bp, Homo sapien
atcaccacacgcacttatcaggaac

SEQ ID NO: 5840528 - DNA, 25 bp, Homo sapien
acgcacttatcaggaacgcctcgat

SEQ ID NO: 5840529 - DNA, 25 bp, Homo sapien
atacgctggaaaaagtgcgcgatgc

SEQ ID NO: 5840530 - DNA, 25 bp, Homo sapien
ggaaaaagtgcgcgatgccgggatc

SEQ ID NO: 5840531 - DNA, 25 bp, Homo sapien
agtgcgcgatgccgggatcaaagtc

SEQ ID NO: 5840532 - DNA, 25 bp, Homo sapien
gccgggatcaaagtctgttctggcg

SEQ ID NO: 5840533 - DNA, 25 bp, Homo sapien
aagtctgttctggcggcattgtggg

SEQ ID NO: 5840534 - DNA, 25 bp, Homo sapien
aagatcgcgccggattattgctgca

SEQ ID NO: 5840535 - DNA, 25 bp, Homo sapien
gccggattattgctgcaactggcaa

SEQ ID NO: 5840536 - DNA, 25 bp, Homo sapien
attgctgcaactggcaaacctgccg

SEQ ID NO: 5840537 - DNA, 25 bp, Homo sapien
cgccggaaagcgtgccaatcaacat

SEQ ID NO: 5840538 - DNA, 25 bp, Homo sapien
aagcgtgccaatcaacatgctggtg

SEQ ID NO: 5840539 - DNA, 25 bp, Homo sapien
caatcaacatgctggtgaaggtgaa

SEQ ID NO: 5840540 - DNA, 25 bp, Homo sapien
tggtgaaggtgaaaggcacgccgct

SEQ ID NO: 5840541 - DNA, 25 bp, Homo sapien
acgccgcttgccgataacgatgatg

SEQ ID NO: 5840542 - DNA, 25 bp, Homo sapien
gccggagttttacggcaatatcatc

SEQ ID NO: 5840543 - DNA, 25 bp, Homo sapien
ttgccgataacgatgatgtcgatgc

SEQ ID NO: 5840544 - DNA, 25 bp, Homo sapien
gttttacggcaatatcatcaccaca

SEQ ID NO: 5840545 - DNA, 25 bp, Homo sapien
acgatgatgtcgatgcctttgattt

SEQ ID NO: 5840546 - DNA, 25 bp, Homo sapien
gcaatatcatcaccacacgcactta

SEQ ID NO: 5840547 - DNA, 25 bp, Homo sapien
atcaccacacgcacttatcaggaac

SEQ ID NO: 5840548 - DNA, 25 bp, Homo sapien
acgcacttatcaggaacgcctcgat

SEQ ID NO: 5840549 - DNA, 25 bp, Homo sapien
atacgctggaaaaagtgcgcgatgc

SEQ ID NO: 5840550 - DNA, 25 bp, Homo sapien
ggaaaaagtgcgcgatgccgggatc

SEQ ID NO: 5840551 - DNA, 25 bp, Homo sapien
agtgcgcgatgccgggatcaaagtc

SEQ ID NO: 5840552 - DNA, 25 bp, Homo sapien
gccgggatcaaagtctgttctggcg

SEQ ID NO: 5840553 - DNA, 25 bp, Homo sapien
aagtctgttctggcggcattgtggg

SEQ ID NO: 5840554 - DNA, 25 bp, Homo sapien
aagatcgcgccggattattgctgca

SEQ ID NO: 5840555 - DNA, 25 bp, Homo sapien
gccggattattgctgcaactggcaa

SEQ ID NO: 5840556 - DNA, 25 bp, Homo sapien
attgctgcaactggcaaacctgccg

SEQ ID NO: 5840557 - DNA, 25 bp, Homo sapien
cgccggaaagcgtgccaatcaacat

SEQ ID NO: 5840558 - DNA, 25 bp, Homo sapien
aagcgtgccaatcaacatgctggtg

SEQ ID NO: 5840559 - DNA, 25 bp, Homo sapien
caatcaacatgctggtgaaggtgaa

SEQ ID NO: 5840560 - DNA, 25 bp, Homo sapien
tggtgaaggtgaaaggcacgccgct

SEQ ID NO: 5840561 - DNA, 25 bp, Homo sapien
acgccgcttgccgataacgatgatg

SEQ ID NO: 5840562 - DNA, 25 bp, Homo sapien
gccggagttttacggcaatatcatc

SEQ ID NO: 5840563 - DNA, 25 bp, Homo sapien
ttgccgataacgatgatgtcgatgc

SEQ ID NO: 5840564 - DNA, 25 bp, Homo sapien
gttttacggcaatatcatcaccaca

SEQ ID NO: 5840565 - DNA, 25 bp, Homo sapien
acgatgatgtcgatgcctttgattt

SEQ ID NO: 5840566 - DNA, 25 bp, Homo sapien
gcaatatcatcaccacacgcactta

SEQ ID NO: 5840567 - DNA, 25 bp, Homo sapien
atcaccacacgcacttatcaggaac

SEQ ID NO: 5840568 - DNA, 25 bp, Homo sapien
acgcacttatcaggaacgcctcgat

SEQ ID NO: 5840569 - DNA, 25 bp, Homo sapien
atacgctggaaaaagtgcgcgatgc

SEQ ID NO: 5840570 - DNA, 25 bp, Homo sapien
ggaaaaagtgcgcgatgccgggatc

SEQ ID NO: 5840571 - DNA, 25 bp, Homo sapien
agtgcgcgatgccgggatcaaagtc

SEQ ID NO: 5840572 - DNA, 25 bp, Homo sapien
gccgggatcaaagtctgttctggcg

SEQ ID NO: 5840573 - DNA, 25 bp, Homo sapien
aagtctgttctggcggcattgtggg

SEQ ID NO: 5840574 - DNA, 25 bp, Homo sapien
aagatcgcgccggattattgctgca

SEQ ID NO: 5840575 - DNA, 25 bp, Homo sapien
gccggattattgctgcaactggcaa

SEQ ID NO: 5840576 - DNA, 25 bp, Homo sapien
attgctgcaactggcaaacctgccg

SEQ ID NO: 5840577 - DNA, 25 bp, Homo sapien
cgccggaaagcgtgccaatcaacat

SEQ ID NO: 5840578 - DNA, 25 bp, Homo sapien
aagcgtgccaatcaacatgctggtg

SEQ ID NO: 5840579 - DNA, 25 bp, Homo sapien
caatcaacatgctggtgaaggtgaa

SEQ ID NO: 5840580 - DNA, 25 bp, Homo sapien
tggtgaaggtgaaaggcacgccgct

SEQ ID NO: 5840581 - DNA, 25 bp, Homo sapien
acgccgcttgccgataacgatgatg

SEQ ID NO: 5840582 - DNA, 25 bp, Homo sapien
gccggagttttacggcaatatcatc

SEQ ID NO: 5840583 - DNA, 25 bp, Homo sapien
ttgccgataacgatgatgtcgatgc

SEQ ID NO: 5840584 - DNA, 25 bp, Homo sapien
gttttacggcaatatcatcaccaca

SEQ ID NO: 5840585 - DNA, 25 bp, Homo sapien
acgatgatgtcgatgcctttgattt

SEQ ID NO: 5840586 - DNA, 25 bp, Homo sapien
gcaatatcatcaccacacgcactta

SEQ ID NO: 5840587 - DNA, 25 bp, Homo sapien
atcaccacacgcacttatcaggaac

SEQ ID NO: 5840588 - DNA, 25 bp, Homo sapien
acgcacttatcaggaacgcctcgat

SEQ ID NO: 5840589 - DNA, 25 bp, Homo sapien
atacgctggaaaaagtgcgcgatgc

SEQ ID NO: 5840590 - DNA, 25 bp, Homo sapien
ggaaaaagtgcgcgatgccgggatc

SEQ ID NO: 5840591 - DNA, 25 bp, Homo sapien
agtgcgcgatgccgggatcaaagtc

SEQ ID NO: 5840592 - DNA, 25 bp, Homo sapien
gccgggatcaaagtctgttctggcg

SEQ ID NO: 5840593 - DNA, 25 bp, Homo sapien
aagtctgttctggcggcattgtggg

SEQ ID NO: 5840594 - DNA, 25 bp, Homo sapien
aagatcgcgccggattattgctgca

SEQ ID NO: 5840595 - DNA, 25 bp, Homo sapien
gccggattattgctgcaactggcaa

SEQ ID NO: 5840596 - DNA, 25 bp, Homo sapien
attgctgcaactggcaaacctgccg

SEQ ID NO: 5840597 - DNA, 25 bp, Homo sapien
cgccggaaagcgtgccaatcaacat

SEQ ID NO: 5840598 - DNA, 25 bp, Homo sapien
aagcgtgccaatcaacatgctggtg

SEQ ID NO: 5840599 - DNA, 25 bp, Homo sapien
caatcaacatgctggtgaaggtgaa

SEQ ID NO: 5840600 - DNA, 25 bp, Homo sapien
tggtgaaggtgaaaggcacgccgct

SEQ ID NO: 5840601 - DNA, 25 bp, Homo sapien
acgccgcttgccgataacgatgatg

SEQ ID NO: 5840602 - DNA, 25 bp, Homo sapien
gccggagttttacggcaatatcatc

SEQ ID NO: 5840603 - DNA, 25 bp, Homo sapien
ttgccgataacgatgatgtcgatgc

SEQ ID NO: 5840604 - DNA, 25 bp, Homo sapien
gttttacggcaatatcatcaccaca

SEQ ID NO: 5840605 - DNA, 25 bp, Homo sapien
acgatgatgtcgatgcctttgattt

SEQ ID NO: 5840606 - DNA, 25 bp, Homo sapien
gcaatatcatcaccacacgcactta

SEQ ID NO: 5840607 - DNA, 25 bp, Homo sapien
atcaccacacgcacttatcaggaac

SEQ ID NO: 5840608 - DNA, 25 bp, Homo sapien
acgcacttatcaggaacgcctcgat

SEQ ID NO: 5840609 - DNA, 25 bp, Homo sapien
atacgctggaaaaagtgcgcgatgc

SEQ ID NO: 5840610 - DNA, 25 bp, Homo sapien
ggaaaaagtgcgcgatgccgggatc

SEQ ID NO: 5840611 - DNA, 25 bp, Homo sapien
agtgcgcgatgccgggatcaaagtc

SEQ ID NO: 5840612 - DNA, 25 bp, Homo sapien
gccgggatcaaagtctgttctggcg

SEQ ID NO: 5840613 - DNA, 25 bp, Homo sapien
aagtctgttctggcggcattgtggg

SEQ ID NO: 5840614 - DNA, 25 bp, Homo sapien
aagatcgcgccggattattgctgca

SEQ ID NO: 5840615 - DNA, 25 bp, Homo sapien
gccggattattgctgcaactggcaa

SEQ ID NO: 5840616 - DNA, 25 bp, Homo sapien
attgctgcaactggcaaacctgccg

SEQ ID NO: 5840617 - DNA, 25 bp, Homo sapien
cgccggaaagcgtgccaatcaacat

SEQ ID NO: 5840618 - DNA, 25 bp, Homo sapien
aagcgtgccaatcaacatgctggtg

SEQ ID NO: 5840619 - DNA, 25 bp, Homo sapien
caatcaacatgctggtgaaggtgaa

SEQ ID NO: 5840620 - DNA, 25 bp, Homo sapien
tggtgaaggtgaaaggcacgccgct

SEQ ID NO: 5840621 - DNA, 25 bp, Homo sapien
acgccgcttgccgataacgatgatg

SEQ ID NO: 5840622 - DNA, 25 bp, Homo sapien
gccggagttttacggcaatatcatc

SEQ ID NO: 5840623 - DNA, 25 bp, Homo sapien
ttgccgataacgatgatgtcgatgc

SEQ ID NO: 5840624 - DNA, 25 bp, Homo sapien
gttttacggcaatatcatcaccaca

SEQ ID NO: 5840625 - DNA, 25 bp, Homo sapien
acgatgatgtcgatgcctttgattt

SEQ ID NO: 5840626 - DNA, 25 bp, Homo sapien
gcaatatcatcaccacacgcactta

SEQ ID NO: 5840627 - DNA, 25 bp, Homo sapien
atcaccacacgcacttatcaggaac

SEQ ID NO: 5840628 - DNA, 25 bp, Homo sapien
acgcacttatcaggaacgcctcgat

SEQ ID NO: 5840629 - DNA, 25 bp, Homo sapien
atacgctggaaaaagtgcgcgatgc

SEQ ID NO: 5840630 - DNA, 25 bp, Homo sapien
ggaaaaagtgcgcgatgccgggatc

SEQ ID NO: 5840631 - DNA, 25 bp, Homo sapien
agtgcgcgatgccgggatcaaagtc

SEQ ID NO: 5840632 - DNA, 25 bp, Homo sapien
gccgggatcaaagtctgttctggcg

SEQ ID NO: 5840633 - DNA, 25 bp, Homo sapien
aagtctgttctggcggcattgtggg

SEQ ID NO: 5840634 - DNA, 25 bp, Homo sapien
aagatcgcgccggattattgctgca

SEQ ID NO: 5840635 - DNA, 25 bp, Homo sapien
gccggattattgctgcaactggcaa

SEQ ID NO: 5840636 - DNA, 25 bp, Homo sapien
attgctgcaactggcaaacctgccg

SEQ ID NO: 5840637 - DNA, 25 bp, Homo sapien
cgccggaaagcgtgccaatcaacat

SEQ ID NO: 5840638 - DNA, 25 bp, Homo sapien
aagcgtgccaatcaacatgctggtg

SEQ ID NO: 5840639 - DNA, 25 bp, Homo sapien
caatcaacatgctggtgaaggtgaa

SEQ ID NO: 5840640 - DNA, 25 bp, Homo sapien
tggtgaaggtgaaaggcacgccgct

SEQ ID NO: 5840641 - DNA, 25 bp, Homo sapien
acgccgcttgccgataacgatgatg

SEQ ID NO: 5840642 - DNA, 25 bp, Homo sapien
gccggagttttacggcaatatcatc

SEQ ID NO: 5840643 - DNA, 25 bp, Homo sapien
ttgccgataacgatgatgtcgatgc

SEQ ID NO: 5840644 - DNA, 25 bp, Homo sapien
gttttacggcaatatcatcaccaca

SEQ ID NO: 5840645 - DNA, 25 bp, Homo sapien
acgatgatgtcgatgcctttgattt

SEQ ID NO: 5840646 - DNA, 25 bp, Homo sapien
gcaatatcatcaccacacgcactta

SEQ ID NO: 5840647 - DNA, 25 bp, Homo sapien
atcaccacacgcacttatcaggaac

SEQ ID NO: 5840648 - DNA, 25 bp, Homo sapien
acgcacttatcaggaacgcctcgat

SEQ ID NO: 5840649 - DNA, 25 bp, Homo sapien
atacgctggaaaaagtgcgcgatgc

SEQ ID NO: 5840650 - DNA, 25 bp, Homo sapien
ggaaaaagtgcgcgatgccgggatc

SEQ ID NO: 5840651 - DNA, 25 bp, Homo sapien
agtgcgcgatgccgggatcaaagtc

SEQ ID NO: 5840652 - DNA, 25 bp, Homo sapien
gccgggatcaaagtctgttctggcg

SEQ ID NO: 5840653 - DNA, 25 bp, Homo sapien
aagtctgttctggcggcattgtggg

SEQ ID NO: 5840654 - DNA, 25 bp, Homo sapien
aagatcgcgccggattattgctgca

SEQ ID NO: 5840655 - DNA, 25 bp, Homo sapien
gccggattattgctgcaactggcaa

SEQ ID NO: 5840656 - DNA, 25 bp, Homo sapien
attgctgcaactggcaaacctgccg

SEQ ID NO: 5840657 - DNA, 25 bp, Homo sapien
cgccggaaagcgtgccaatcaacat

SEQ ID NO: 5840658 - DNA, 25 bp, Homo sapien
aagcgtgccaatcaacatgctggtg

SEQ ID NO: 5840659 - DNA, 25 bp, Homo sapien
caatcaacatgctggtgaaggtgaa

SEQ ID NO: 5840660 - DNA, 25 bp, Homo sapien
tggtgaaggtgaaaggcacgccgct

SEQ ID NO: 5840661 - DNA, 25 bp, Homo sapien
acgccgcttgccgataacgatgatg

SEQ ID NO: 5840662 - DNA, 25 bp, Homo sapien
gccggagttttacggcaatatcatc

SEQ ID NO: 5840663 - DNA, 25 bp, Homo sapien
ttgccgataacgatgatgtcgatgc

SEQ ID NO: 5840664 - DNA, 25 bp, Homo sapien
gttttacggcaatatcatcaccaca

SEQ ID NO: 5840665 - DNA, 25 bp, Homo sapien
acgatgatgtcgatgcctttgattt

SEQ ID NO: 5840666 - DNA, 25 bp, Homo sapien
gcaatatcatcaccacacgcactta

SEQ ID NO: 5840667 - DNA, 25 bp, Homo sapien
atcaccacacgcacttatcaggaac

SEQ ID NO: 5840668 - DNA, 25 bp, Homo sapien
acgcacttatcaggaacgcctcgat

SEQ ID NO: 5840669 - DNA, 25 bp, Homo sapien
atacgctggaaaaagtgcgcgatgc

SEQ ID NO: 5840670 - DNA, 25 bp, Homo sapien
ggaaaaagtgcgcgatgccgggatc

SEQ ID NO: 5840671 - DNA, 25 bp, Homo sapien
agtgcgcgatgccgggatcaaagtc

SEQ ID NO: 5840672 - DNA, 25 bp, Homo sapien
gccgggatcaaagtctgttctggcg

SEQ ID NO: 5840673 - DNA, 25 bp, Homo sapien
aagtctgttctggcggcattgtggg

SEQ ID NO: 5840674 - DNA, 25 bp, Homo sapien
aagatcgcgccggattattgctgca

SEQ ID NO: 5840675 - DNA, 25 bp, Homo sapien
gccggattattgctgcaactggcaa

SEQ ID NO: 5840676 - DNA, 25 bp, Homo sapien
attgctgcaactggcaaacctgccg

SEQ ID NO: 5840677 - DNA, 25 bp, Homo sapien
cgccggaaagcgtgccaatcaacat

SEQ ID NO: 5840678 - DNA, 25 bp, Homo sapien
aagcgtgccaatcaacatgctggtg

SEQ ID NO: 5840679 - DNA, 25 bp, Homo sapien
caatcaacatgctggtgaaggtgaa

SEQ ID NO: 5840680 - DNA, 25 bp, Homo sapien
tggtgaaggtgaaaggcacgccgct

SEQ ID NO: 5840681 - DNA, 25 bp, Homo sapien
acgccgcttgccgataacgatgatg

SEQ ID NO: 5840682 - DNA, 25 bp, Homo sapien
gccggagttttacggcaatatcatc

SEQ ID NO: 5840683 - DNA, 25 bp, Homo sapien
ttgccgataacgatgatgtcgatgc

SEQ ID NO: 5840684 - DNA, 25 bp, Homo sapien
gttttacggcaatatcatcaccaca

SEQ ID NO: 5840685 - DNA, 25 bp, Homo sapien
acgatgatgtcgatgcctttgattt

SEQ ID NO: 5840686 - DNA, 25 bp, Homo sapien
gcaatatcatcaccacacgcactta

SEQ ID NO: 5840687 - DNA, 25 bp, Homo sapien
atcaccacacgcacttatcaggaac

SEQ ID NO: 5840688 - DNA, 25 bp, Homo sapien
acgcacttatcaggaacgcctcgat

SEQ ID NO: 5840689 - DNA, 25 bp, Homo sapien
atacgctggaaaaagtgcgcgatgc

SEQ ID NO: 5840690 - DNA, 25 bp, Homo sapien
ggaaaaagtgcgcgatgccgggatc

SEQ ID NO: 5840691 - DNA, 25 bp, Homo sapien
agtgcgcgatgccgggatcaaagtc

SEQ ID NO: 5840692 - DNA, 25 bp, Homo sapien
gccgggatcaaagtctgttctggcg

SEQ ID NO: 5840693 - DNA, 25 bp, Homo sapien
aagtctgttctggcggcattgtggg

SEQ ID NO: 5840694 - DNA, 25 bp, Homo sapien
aagatcgcgccggattattgctgca

SEQ ID NO: 5840695 - DNA, 25 bp, Homo sapien
gccggattattgctgcaactggcaa

SEQ ID NO: 5840696 - DNA, 25 bp, Homo sapien
attgctgcaactggcaaacctgccg

SEQ ID NO: 5840697 - DNA, 25 bp, Homo sapien
cgccggaaagcgtgccaatcaacat

SEQ ID NO: 5840698 - DNA, 25 bp, Homo sapien
aagcgtgccaatcaacatgctggtg

SEQ ID NO: 5840699 - DNA, 25 bp, Homo sapien
caatcaacatgctggtgaaggtgaa

SEQ ID NO: 5840700 - DNA, 25 bp, Homo sapien
tggtgaaggtgaaaggcacgccgct

SEQ ID NO: 5840701 - DNA, 25 bp, Homo sapien
acgccgcttgccgataacgatgatg

SEQ ID NO: 5840702 - DNA, 25 bp, Homo sapien
gccggagttttacggcaatatcatc

SEQ ID NO: 5840703 - DNA, 25 bp, Homo sapien
ttgccgataacgatgatgtcgatgc

SEQ ID NO: 5840704 - DNA, 25 bp, Homo sapien
gttttacggcaatatcatcaccaca

SEQ ID NO: 5840705 - DNA, 25 bp, Homo sapien
acgatgatgtcgatgcctttgattt

SEQ ID NO: 5840706 - DNA, 25 bp, Homo sapien
gcaatatcatcaccacacgcactta

SEQ ID NO: 5840707 - DNA, 25 bp, Homo sapien
atcaccacacgcacttatcaggaac

SEQ ID NO: 5840708 - DNA, 25 bp, Homo sapien
acgcacttatcaggaacgcctcgat

SEQ ID NO: 5840709 - DNA, 25 bp, Homo sapien
atacgctggaaaaagtgcgcgatgc

SEQ ID NO: 5840710 - DNA, 25 bp, Homo sapien
ggaaaaagtgcgcgatgccgggatc

SEQ ID NO: 5840711 - DNA, 25 bp, Homo sapien
agtgcgcgatgccgggatcaaagtc

SEQ ID NO: 5840712 - DNA, 25 bp, Homo sapien
gccgggatcaaagtctgttctggcg

SEQ ID NO: 5840713 - DNA, 25 bp, Homo sapien
aagtctgttctggcggcattgtggg

SEQ ID NO: 5840714 - DNA, 25 bp, Homo sapien
aagatcgcgccggattattgctgca

SEQ ID NO: 5840715 - DNA, 25 bp, Homo sapien
gccggattattgctgcaactggcaa

SEQ ID NO: 5840716 - DNA, 25 bp, Homo sapien
attgctgcaactggcaaacctgccg

SEQ ID NO: 5840717 - DNA, 25 bp, Homo sapien
cgccggaaagcgtgccaatcaacat

SEQ ID NO: 5840718 - DNA, 25 bp, Homo sapien
aagcgtgccaatcaacatgctggtg

SEQ ID NO: 5840719 - DNA, 25 bp, Homo sapien
caatcaacatgctggtgaaggtgaa

SEQ ID NO: 5840720 - DNA, 25 bp, Homo sapien
tggtgaaggtgaaaggcacgccgct

SEQ ID NO: 5840721 - DNA, 25 bp, Homo sapien
acgccgcttgccgataacgatgatg

SEQ ID NO: 5840722 - DNA, 25 bp, Homo sapien
gccggagttttacggcaatatcatc

SEQ ID NO: 5840723 - DNA, 25 bp, Homo sapien
ttgccgataacgatgatgtcgatgc

SEQ ID NO: 5840724 - DNA, 25 bp, Homo sapien
gttttacggcaatatcatcaccaca

SEQ ID NO: 5840725 - DNA, 25 bp, Homo sapien
acgatgatgtcgatgcctttgattt

SEQ ID NO: 5840726 - DNA, 25 bp, Homo sapien
gcaatatcatcaccacacgcactta

SEQ ID NO: 5840727 - DNA, 25 bp, Homo sapien
atcaccacacgcacttatcaggaac

SEQ ID NO: 5840728 - DNA, 25 bp, Homo sapien
acgcacttatcaggaacgcctcgat

SEQ ID NO: 5840729 - DNA, 25 bp, Homo sapien
atacgctggaaaaagtgcgcgatgc

SEQ ID NO: 5840730 - DNA, 25 bp, Homo sapien
ggaaaaagtgcgcgatgccgggatc

SEQ ID NO: 5840731 - DNA, 25 bp, Homo sapien
agtgcgcgatgccgggatcaaagtc

SEQ ID NO: 5840732 - DNA, 25 bp, Homo sapien
gccgggatcaaagtctgttctggcg

SEQ ID NO: 5840733 - DNA, 25 bp, Homo sapien
aagtctgttctggcggcattgtggg

SEQ ID NO: 5840734 - DNA, 25 bp, Homo sapien
aagatcgcgccggattattgctgca

SEQ ID NO: 5840735 - DNA, 25 bp, Homo sapien
gccggattattgctgcaactggcaa

SEQ ID NO: 5840736 - DNA, 25 bp, Homo sapien
attgctgcaactggcaaacctgccg

SEQ ID NO: 5840737 - DNA, 25 bp, Homo sapien
cgccggaaagcgtgccaatcaacat

SEQ ID NO: 5840738 - DNA, 25 bp, Homo sapien
aagcgtgccaatcaacatgctggtg

SEQ ID NO: 5840739 - DNA, 25 bp, Homo sapien
caatcaacatgctggtgaaggtgaa

SEQ ID NO: 5840740 - DNA, 25 bp, Homo sapien
tggtgaaggtgaaaggcacgccgct

SEQ ID NO: 5840741 - DNA, 25 bp, Homo sapien
acgccgcttgccgataacgatgatg

SEQ ID NO: 5840742 - DNA, 25 bp, Homo sapien
gccggagttttacggcaatatcatc

SEQ ID NO: 5840743 - DNA, 25 bp, Homo sapien
ttgccgataacgatgatgtcgatgc

SEQ ID NO: 5840744 - DNA, 25 bp, Homo sapien
gttttacggcaatatcatcaccaca

SEQ ID NO: 5840745 - DNA, 25 bp, Homo sapien
acgatgatgtcgatgcctttgattt

SEQ ID NO: 5840746 - DNA, 25 bp, Homo sapien
gcaatatcatcaccacacgcactta

SEQ ID NO: 5840747 - DNA, 25 bp, Homo sapien
atcaccacacgcacttatcaggaac

SEQ ID NO: 5840748 - DNA, 25 bp, Homo sapien
acgcacttatcaggaacgcctcgat

SEQ ID NO: 5840749 - DNA, 25 bp, Homo sapien
atacgctggaaaaagtgcgcgatgc

SEQ ID NO: 5840750 - DNA, 25 bp, Homo sapien
ggaaaaagtgcgcgatgccgggatc

SEQ ID NO: 5840751 - DNA, 25 bp, Homo sapien
agtgcgcgatgccgggatcaaagtc

SEQ ID NO: 5840752 - DNA, 25 bp, Homo sapien
gccgggatcaaagtctgttctggcg

SEQ ID NO: 5840753 - DNA, 25 bp, Homo sapien
aagtctgttctggcggcattgtggg

SEQ ID NO: 5840754 - DNA, 25 bp, Homo sapien
aagatcgcgccggattattgctgca

SEQ ID NO: 5840755 - DNA, 25 bp, Homo sapien
gccggattattgctgcaactggcaa

SEQ ID NO: 5840756 - DNA, 25 bp, Homo sapien
attgctgcaactggcaaacctgccg

SEQ ID NO: 5840757 - DNA, 25 bp, Homo sapien
cgccggaaagcgtgccaatcaacat

SEQ ID NO: 5840758 - DNA, 25 bp, Homo sapien
aagcgtgccaatcaacatgctggtg

SEQ ID NO: 5840759 - DNA, 25 bp, Homo sapien
caatcaacatgctggtgaaggtgaa

SEQ ID NO: 5840760 - DNA, 25 bp, Homo sapien
tggtgaaggtgaaaggcacgccgct

SEQ ID NO: 5840761 - DNA, 25 bp, Homo sapien
acgccgcttgccgataacgatgatg

SEQ ID NO: 5840762 - DNA, 25 bp, Homo sapien
gccggagttttacggcaatatcatc

SEQ ID NO: 5840763 - DNA, 25 bp, Homo sapien
ttgccgataacgatgatgtcgatgc

SEQ ID NO: 5840764 - DNA, 25 bp, Homo sapien
gttttacggcaatatcatcaccaca

SEQ ID NO: 5840765 - DNA, 25 bp, Homo sapien
acgatgatgtcgatgcctttgattt

SEQ ID NO: 5840766 - DNA, 25 bp, Homo sapien
gcaatatcatcaccacacgcactta

SEQ ID NO: 5840767 - DNA, 25 bp, Homo sapien
atcaccacacgcacttatcaggaac

SEQ ID NO: 5840768 - DNA, 25 bp, Homo sapien
acgcacttatcaggaacgcctcgat

SEQ ID NO: 5840769 - DNA, 25 bp, Homo sapien
atacgctggaaaaagtgcgcgatgc

SEQ ID NO: 5840770 - DNA, 25 bp, Homo sapien
ggaaaaagtgcgcgatgccgggatc

SEQ ID NO: 5840771 - DNA, 25 bp, Homo sapien
agtgcgcgatgccgggatcaaagtc

SEQ ID NO: 5840772 - DNA, 25 bp, Homo sapien
gccgggatcaaagtctgttctggcg

SEQ ID NO: 5840773 - DNA, 25 bp, Homo sapien
aagtctgttctggcggcattgtggg

SEQ ID NO: 5840774 - DNA, 25 bp, Homo sapien
aagatcgcgccggattattgctgca

SEQ ID NO: 5840775 - DNA, 25 bp, Homo sapien
gccggattattgctgcaactggcaa

SEQ ID NO: 5840776 - DNA, 25 bp, Homo sapien
attgctgcaactggcaaacctgccg

SEQ ID NO: 5840777 - DNA, 25 bp, Homo sapien
cgccggaaagcgtgccaatcaacat

SEQ ID NO: 5840778 - DNA, 25 bp, Homo sapien
aagcgtgccaatcaacatgctggtg

SEQ ID NO: 5840779 - DNA, 25 bp, Homo sapien
caatcaacatgctggtgaaggtgaa

SEQ ID NO: 5840780 - DNA, 25 bp, Homo sapien
tggtgaaggtgaaaggcacgccgct

SEQ ID NO: 5840781 - DNA, 25 bp, Homo sapien
acgccgcttgccgataacgatgatg

SEQ ID NO: 5840782 - DNA, 25 bp, Homo sapien
gccggagttttacggcaatatcatc

SEQ ID NO: 5840783 - DNA, 25 bp, Homo sapien
ttgccgataacgatgatgtcgatgc

SEQ ID NO: 5840784 - DNA, 25 bp, Homo sapien
gttttacggcaatatcatcaccaca

SEQ ID NO: 5840785 - DNA, 25 bp, Homo sapien
acgatgatgtcgatgcctttgattt

SEQ ID NO: 5840786 - DNA, 25 bp, Homo sapien
gcaatatcatcaccacacgcactta

SEQ ID NO: 5840787 - DNA, 25 bp, Homo sapien
atcaccacacgcacttatcaggaac

SEQ ID NO: 5840788 - DNA, 25 bp, Homo sapien
acgcacttatcaggaacgcctcgat

SEQ ID NO: 5840789 - DNA, 25 bp, Homo sapien
atacgctggaaaaagtgcgcgatgc

SEQ ID NO: 5840790 - DNA, 25 bp, Homo sapien
ggaaaaagtgcgcgatgccgggatc

SEQ ID NO: 5840791 - DNA, 25 bp, Homo sapien
agtgcgcgatgccgggatcaaagtc

SEQ ID NO: 5840792 - DNA, 25 bp, Homo sapien
gccgggatcaaagtctgttctggcg

SEQ ID NO: 5840793 - DNA, 25 bp, Homo sapien
aagtctgttctggcggcattgtggg

SEQ ID NO: 5840794 - DNA, 25 bp, Homo sapien
aagatcgcgccggattattgctgca

SEQ ID NO: 5840795 - DNA, 25 bp, Homo sapien
gccggattattgctgcaactggcaa

SEQ ID NO: 5840796 - DNA, 25 bp, Homo sapien
attgctgcaactggcaaacctgccg

SEQ ID NO: 5840797 - DNA, 25 bp, Homo sapien
cgccggaaagcgtgccaatcaacat

SEQ ID NO: 5840798 - DNA, 25 bp, Homo sapien
aagcgtgccaatcaacatgctggtg

SEQ ID NO: 5840799 - DNA, 25 bp, Homo sapien
caatcaacatgctggtgaaggtgaa

SEQ ID NO: 5840800 - DNA, 25 bp, Homo sapien
tggtgaaggtgaaaggcacgccgct

SEQ ID NO: 5840801 - DNA, 25 bp, Homo sapien
acgccgcttgccgataacgatgatg

SEQ ID NO: 5840802 - DNA, 25 bp, Homo sapien
gccggagttttacggcaatatcatc

SEQ ID NO: 5840803 - DNA, 25 bp, Homo sapien
ttgccgataacgatgatgtcgatgc

SEQ ID NO: 5840804 - DNA, 25 bp, Homo sapien
gttttacggcaatatcatcaccaca

SEQ ID NO: 5840805 - DNA, 25 bp, Homo sapien
acgatgatgtcgatgcctttgattt

SEQ ID NO: 5840806 - DNA, 25 bp, Homo sapien
gcaatatcatcaccacacgcactta

SEQ ID NO: 5840807 - DNA, 25 bp, Homo sapien
atcaccacacgcacttatcaggaac

SEQ ID NO: 5840808 - DNA, 25 bp, Homo sapien
acgcacttatcaggaacgcctcgat

SEQ ID NO: 5840809 - DNA, 25 bp, Homo sapien
atacgctggaaaaagtgcgcgatgc

SEQ ID NO: 5840810 - DNA, 25 bp, Homo sapien
ggaaaaagtgcgcgatgccgggatc

SEQ ID NO: 5840811 - DNA, 25 bp, Homo sapien
agtgcgcgatgccgggatcaaagtc

SEQ ID NO: 5840812 - DNA, 25 bp, Homo sapien
gccgggatcaaagtctgttctggcg

SEQ ID NO: 5840813 - DNA, 25 bp, Homo sapien
aagtctgttctggcggcattgtggg

SEQ ID NO: 5840814 - DNA, 25 bp, Homo sapien
aagatcgcgccggattattgctgca

SEQ ID NO: 5840815 - DNA, 25 bp, Homo sapien
gccggattattgctgcaactggcaa

SEQ ID NO: 5840816 - DNA, 25 bp, Homo sapien
attgctgcaactggcaaacctgccg

SEQ ID NO: 5840817 - DNA, 25 bp, Homo sapien
cgccggaaagcgtgccaatcaacat

SEQ ID NO: 5840818 - DNA, 25 bp, Homo sapien
aagcgtgccaatcaacatgctggtg

SEQ ID NO: 5840819 - DNA, 25 bp, Homo sapien
caatcaacatgctggtgaaggtgaa

SEQ ID NO: 5840820 - DNA, 25 bp, Homo sapien
tggtgaaggtgaaaggcacgccgct

SEQ ID NO: 5840821 - DNA, 25 bp, Homo sapien
acgccgcttgccgataacgatgatg

SEQ ID NO: 5840822 - DNA, 25 bp, Homo sapien
gccggagttttacggcaatatcatc

SEQ ID NO: 5840823 - DNA, 25 bp, Homo sapien
ttgccgataacgatgatgtcgatgc

SEQ ID NO: 5840824 - DNA, 25 bp, Homo sapien
gttttacggcaatatcatcaccaca

SEQ ID NO: 5840825 - DNA, 25 bp, Homo sapien
acgatgatgtcgatgcctttgattt

SEQ ID NO: 5840826 - DNA, 25 bp, Homo sapien
gcaatatcatcaccacacgcactta

SEQ ID NO: 5840827 - DNA, 25 bp, Homo sapien
atcaccacacgcacttatcaggaac

SEQ ID NO: 5840828 - DNA, 25 bp, Homo sapien
acgcacttatcaggaacgcctcgat

SEQ ID NO: 5840829 - DNA, 25 bp, Homo sapien
atacgctggaaaaagtgcgcgatgc

SEQ ID NO: 5840830 - DNA, 25 bp, Homo sapien
ggaaaaagtgcgcgatgccgggatc

SEQ ID NO: 5840831 - DNA, 25 bp, Homo sapien
agtgcgcgatgccgggatcaaagtc

SEQ ID NO: 5840832 - DNA, 25 bp, Homo sapien
gccgggatcaaagtctgttctggcg

SEQ ID NO: 5840833 - DNA, 25 bp, Homo sapien
aagtctgttctggcggcattgtggg

SEQ ID NO: 5840834 - DNA, 25 bp, Homo sapien
aagatcgcgccggattattgctgca

SEQ ID NO: 5840835 - DNA, 25 bp, Homo sapien
gccggattattgctgcaactggcaa

SEQ ID NO: 5840836 - DNA, 25 bp, Homo sapien
attgctgcaactggcaaacctgccg

SEQ ID NO: 5840837 - DNA, 25 bp, Homo sapien
cgccggaaagcgtgccaatcaacat

SEQ ID NO: 5840838 - DNA, 25 bp, Homo sapien
aagcgtgccaatcaacatgctggtg

SEQ ID NO: 5840839 - DNA, 25 bp, Homo sapien
caatcaacatgctggtgaaggtgaa

SEQ ID NO: 5840840 - DNA, 25 bp, Homo sapien
tggtgaaggtgaaaggcacgccgct

SEQ ID NO: 5840841 - DNA, 25 bp, Homo sapien
acgccgcttgccgataacgatgatg

SEQ ID NO: 5840842 - DNA, 25 bp, Homo sapien
gccggagttttacggcaatatcatc

SEQ ID NO: 5840843 - DNA, 25 bp, Homo sapien
ttgccgataacgatgatgtcgatgc

SEQ ID NO: 5840844 - DNA, 25 bp, Homo sapien
gttttacggcaatatcatcaccaca

SEQ ID NO: 5840845 - DNA, 25 bp, Homo sapien
acgatgatgtcgatgcctttgattt

SEQ ID NO: 5840846 - DNA, 25 bp, Homo sapien
gcaatatcatcaccacacgcactta

SEQ ID NO: 5840847 - DNA, 25 bp, Homo sapien
atcaccacacgcacttatcaggaac

SEQ ID NO: 5840848 - DNA, 25 bp, Homo sapien
acgcacttatcaggaacgcctcgat

SEQ ID NO: 5840849 - DNA, 25 bp, Homo sapien
atacgctggaaaaagtgcgcgatgc

SEQ ID NO: 5840850 - DNA, 25 bp, Homo sapien
ggaaaaagtgcgcgatgccgggatc

SEQ ID NO: 5840851 - DNA, 25 bp, Homo sapien
agtgcgcgatgccgggatcaaagtc

SEQ ID NO: 5840852 - DNA, 25 bp, Homo sapien
gccgggatcaaagtctgttctggcg

SEQ ID NO: 5840853 - DNA, 25 bp, Homo sapien
aagtctgttctggcggcattgtggg

SEQ ID NO: 5840854 - DNA, 25 bp, Homo sapien
aagatcgcgccggattattgctgca

SEQ ID NO: 5840855 - DNA, 25 bp, Homo sapien
gccggattattgctgcaactggcaa

SEQ ID NO: 5840856 - DNA, 25 bp, Homo sapien
attgctgcaactggcaaacctgccg

SEQ ID NO: 5840857 - DNA, 25 bp, Homo sapien
cgccggaaagcgtgccaatcaacat

SEQ ID NO: 5840858 - DNA, 25 bp, Homo sapien
aagcgtgccaatcaacatgctggtg

SEQ ID NO: 5840859 - DNA, 25 bp, Homo sapien
caatcaacatgctggtgaaggtgaa

SEQ ID NO: 5840860 - DNA, 25 bp, Homo sapien
tggtgaaggtgaaaggcacgccgct

SEQ ID NO: 5840861 - DNA, 25 bp, Homo sapien
acgccgcttgccgataacgatgatg

SEQ ID NO: 5840862 - DNA, 25 bp, Homo sapien
gccggagttttacggcaatatcatc

SEQ ID NO: 5840863 - DNA, 25 bp, Homo sapien
ttgccgataacgatgatgtcgatgc

SEQ ID NO: 5840864 - DNA, 25 bp, Homo sapien
gttttacggcaatatcatcaccaca

SEQ ID NO: 5840865 - DNA, 25 bp, Homo sapien
acgatgatgtcgatgcctttgattt

SEQ ID NO: 5840866 - DNA, 25 bp, Homo sapien
gcaatatcatcaccacacgcactta

SEQ ID NO: 5840867 - DNA, 25 bp, Homo sapien
atcaccacacgcacttatcaggaac

SEQ ID NO: 5840868 - DNA, 25 bp, Homo sapien
acgcacttatcaggaacgcctcgat

SEQ ID NO: 5840869 - DNA, 25 bp, Homo sapien
atacgctggaaaaagtgcgcgatgc

SEQ ID NO: 5840870 - DNA, 25 bp, Homo sapien
ggaaaaagtgcgcgatgccgggatc

SEQ ID NO: 5840871 - DNA, 25 bp, Homo sapien
agtgcgcgatgccgggatcaaagtc

SEQ ID NO: 5840872 - DNA, 25 bp, Homo sapien
gccgggatcaaagtctgttctggcg

SEQ ID NO: 5840873 - DNA, 25 bp, Homo sapien
aagtctgttctggcggcattgtggg

SEQ ID NO: 5840874 - DNA, 25 bp, Homo sapien
aagatcgcgccggattattgctgca

SEQ ID NO: 5840875 - DNA, 25 bp, Homo sapien
gccggattattgctgcaactggcaa

SEQ ID NO: 5840876 - DNA, 25 bp, Homo sapien
attgctgcaactggcaaacctgccg

SEQ ID NO: 5840877 - DNA, 25 bp, Homo sapien
cgccggaaagcgtgccaatcaacat

SEQ ID NO: 5840878 - DNA, 25 bp, Homo sapien
aagcgtgccaatcaacatgctggtg

SEQ ID NO: 5840879 - DNA, 25 bp, Homo sapien
caatcaacatgctggtgaaggtgaa

SEQ ID NO: 5840880 - DNA, 25 bp, Homo sapien
tggtgaaggtgaaaggcacgccgct

SEQ ID NO: 5840881 - DNA, 25 bp, Homo sapien
acgccgcttgccgataacgatgatg

SEQ ID NO: 5840882 - DNA, 25 bp, Homo sapien
gccggagttttacggcaatatcatc

SEQ ID NO: 5840883 - DNA, 25 bp, Homo sapien
ttgccgataacgatgatgtcgatgc

SEQ ID NO: 5840884 - DNA, 25 bp, Homo sapien
gttttacggcaatatcatcaccaca

SEQ ID NO: 5840885 - DNA, 25 bp, Homo sapien
acgatgatgtcgatgcctttgattt

SEQ ID NO: 5840886 - DNA, 25 bp, Homo sapien
gcaatatcatcaccacacgcactta

SEQ ID NO: 5840887 - DNA, 25 bp, Homo sapien
atcaccacacgcacttatcaggaac

SEQ ID NO: 5840888 - DNA, 25 bp, Homo sapien
acgcacttatcaggaacgcctcgat

SEQ ID NO: 5840889 - DNA, 25 bp, Homo sapien
atacgctggaaaaagtgcgcgatgc

SEQ ID NO: 5840890 - DNA, 25 bp, Homo sapien
ggaaaaagtgcgcgatgccgggatc

SEQ ID NO: 5840891 - DNA, 25 bp, Homo sapien
agtgcgcgatgccgggatcaaagtc

SEQ ID NO: 5840892 - DNA, 25 bp, Homo sapien
gccgggatcaaagtctgttctggcg

SEQ ID NO: 5840893 - DNA, 25 bp, Homo sapien
aagtctgttctggcggcattgtggg

SEQ ID NO: 5840894 - DNA, 25 bp, Homo sapien
aagatcgcgccggattattgctgca

SEQ ID NO: 5840895 - DNA, 25 bp, Homo sapien
gccggattattgctgcaactggcaa

SEQ ID NO: 5840896 - DNA, 25 bp, Homo sapien
attgctgcaactggcaaacctgccg

SEQ ID NO: 5840897 - DNA, 25 bp, Homo sapien
cgccggaaagcgtgccaatcaacat

SEQ ID NO: 5840898 - DNA, 25 bp, Homo sapien
aagcgtgccaatcaacatgctggtg

SEQ ID NO: 5840899 - DNA, 25 bp, Homo sapien
caatcaacatgctggtgaaggtgaa

SEQ ID NO: 5840900 - DNA, 25 bp, Homo sapien
tggtgaaggtgaaaggcacgccgct

SEQ ID NO: 5840901 - DNA, 25 bp, Homo sapien
acgccgcttgccgataacgatgatg

SEQ ID NO: 5840902 - DNA, 25 bp, Homo sapien
gccggagttttacggcaatatcatc

SEQ ID NO: 5840903 - DNA, 25 bp, Homo sapien
ttgccgataacgatgatgtcgatgc

SEQ ID NO: 5840904 - DNA, 25 bp, Homo sapien
gttttacggcaatatcatcaccaca

SEQ ID NO: 5840905 - DNA, 25 bp, Homo sapien
acgatgatgtcgatgcctttgattt

SEQ ID NO: 5840906 - DNA, 25 bp, Homo sapien
gcaatatcatcaccacacgcactta

SEQ ID NO: 5840907 - DNA, 25 bp, Homo sapien
atcaccacacgcacttatcaggaac

SEQ ID NO: 5840908 - DNA, 25 bp, Homo sapien
acgcacttatcaggaacgcctcgat

SEQ ID NO: 5840909 - DNA, 25 bp, Homo sapien
atacgctggaaaaagtgcgcgatgc

SEQ ID NO: 5840910 - DNA, 25 bp, Homo sapien
ggaaaaagtgcgcgatgccgggatc

SEQ ID NO: 5840911 - DNA, 25 bp, Homo sapien
agtgcgcgatgccgggatcaaagtc

SEQ ID NO: 5840912 - DNA, 25 bp, Homo sapien
gccgggatcaaagtctgttctggcg

SEQ ID NO: 5840913 - DNA, 25 bp, Homo sapien
aagtctgttctggcggcattgtggg

SEQ ID NO: 5840914 - DNA, 25 bp, Homo sapien
aagatcgcgccggattattgctgca

SEQ ID NO: 5840915 - DNA, 25 bp, Homo sapien
gccggattattgctgcaactggcaa

SEQ ID NO: 5840916 - DNA, 25 bp, Homo sapien
attgctgcaactggcaaacctgccg

SEQ ID NO: 5840917 - DNA, 25 bp, Homo sapien
cgccggaaagcgtgccaatcaacat

SEQ ID NO: 5840918 - DNA, 25 bp, Homo sapien
aagcgtgccaatcaacatgctggtg

SEQ ID NO: 5840919 - DNA, 25 bp, Homo sapien
caatcaacatgctggtgaaggtgaa

SEQ ID NO: 5840920 - DNA, 25 bp, Homo sapien
tggtgaaggtgaaaggcacgccgct

SEQ ID NO: 5840921 - DNA, 25 bp, Homo sapien
acgccgcttgccgataacgatgatg

SEQ ID NO: 5840922 - DNA, 25 bp, Homo sapien
gccggagttttacggcaatatcatc

SEQ ID NO: 5840923 - DNA, 25 bp, Homo sapien
ttgccgataacgatgatgtcgatgc

SEQ ID NO: 5840924 - DNA, 25 bp, Homo sapien
gttttacggcaatatcatcaccaca

SEQ ID NO: 5840925 - DNA, 25 bp, Homo sapien
acgatgatgtcgatgcctttgattt

SEQ ID NO: 5840926 - DNA, 25 bp, Homo sapien
gcaatatcatcaccacacgcactta

SEQ ID NO: 5840927 - DNA, 25 bp, Homo sapien
atcaccacacgcacttatcaggaac

SEQ ID NO: 5840928 - DNA, 25 bp, Homo sapien
acgcacttatcaggaacgcctcgat

SEQ ID NO: 5840929 - DNA, 25 bp, Homo sapien
atacgctggaaaaagtgcgcgatgc

SEQ ID NO: 5840930 - DNA, 25 bp, Homo sapien
ggaaaaagtgcgcgatgccgggatc

SEQ ID NO: 5840931 - DNA, 25 bp, Homo sapien
agtgcgcgatgccgggatcaaagtc

SEQ ID NO: 5840932 - DNA, 25 bp, Homo sapien
gccgggatcaaagtctgttctggcg

SEQ ID NO: 5840933 - DNA, 25 bp, Homo sapien
aagtctgttctggcggcattgtggg

SEQ ID NO: 5840934 - DNA, 25 bp, Homo sapien
aagatcgcgccggattattgctgca

SEQ ID NO: 5840935 - DNA, 25 bp, Homo sapien
gccggattattgctgcaactggcaa

SEQ ID NO: 5840936 - DNA, 25 bp, Homo sapien
attgctgcaactggcaaacctgccg

SEQ ID NO: 5840937 - DNA, 25 bp, Homo sapien
cgccggaaagcgtgccaatcaacat

SEQ ID NO: 5840938 - DNA, 25 bp, Homo sapien
aagcgtgccaatcaacatgctggtg

SEQ ID NO: 5840939 - DNA, 25 bp, Homo sapien
caatcaacatgctggtgaaggtgaa

SEQ ID NO: 5840940 - DNA, 25 bp, Homo sapien
tggtgaaggtgaaaggcacgccgct

SEQ ID NO: 5840941 - DNA, 25 bp, Homo sapien
acgccgcttgccgataacgatgatg

SEQ ID NO: 5840942 - DNA, 25 bp, Homo sapien
gccggagttttacggcaatatcatc

SEQ ID NO: 5840943 - DNA, 25 bp, Homo sapien
ttgccgataacgatgatgtcgatgc

SEQ ID NO: 5840944 - DNA, 25 bp, Homo sapien
gttttacggcaatatcatcaccaca

SEQ ID NO: 5840945 - DNA, 25 bp, Homo sapien
acgatgatgtcgatgcctttgattt

SEQ ID NO: 5840946 - DNA, 25 bp, Homo sapien
gcaatatcatcaccacacgcactta

SEQ ID NO: 5840947 - DNA, 25 bp, Homo sapien
atcaccacacgcacttatcaggaac

SEQ ID NO: 5840948 - DNA, 25 bp, Homo sapien
acgcacttatcaggaacgcctcgat

SEQ ID NO: 5840949 - DNA, 25 bp, Homo sapien
atacgctggaaaaagtgcgcgatgc

SEQ ID NO: 5840950 - DNA, 25 bp, Homo sapien
ggaaaaagtgcgcgatgccgggatc

SEQ ID NO: 5840951 - DNA, 25 bp, Homo sapien
agtgcgcgatgccgggatcaaagtc

SEQ ID NO: 5840952 - DNA, 25 bp, Homo sapien
gccgggatcaaagtctgttctggcg

SEQ ID NO: 5840953 - DNA, 25 bp, Homo sapien
aagtctgttctggcggcattgtggg

SEQ ID NO: 5840954 - DNA, 25 bp, Homo sapien
aagatcgcgccggattattgctgca

SEQ ID NO: 5840955 - DNA, 25 bp, Homo sapien
gccggattattgctgcaactggcaa

SEQ ID NO: 5840956 - DNA, 25 bp, Homo sapien
attgctgcaactggcaaacctgccg

SEQ ID NO: 5840957 - DNA, 25 bp, Homo sapien
cgccggaaagcgtgccaatcaacat

SEQ ID NO: 5840958 - DNA, 25 bp, Homo sapien
aagcgtgccaatcaacatgctggtg

SEQ ID NO: 5840959 - DNA, 25 bp, Homo sapien
caatcaacatgctggtgaaggtgaa

SEQ ID NO: 5840960 - DNA, 25 bp, Homo sapien
tggtgaaggtgaaaggcacgccgct

SEQ ID NO: 5840961 - DNA, 25 bp, Homo sapien
acgccgcttgccgataacgatgatg

SEQ ID NO: 5840962 - DNA, 25 bp, Homo sapien
gccggagttttacggcaatatcatc

SEQ ID NO: 5840963 - DNA, 25 bp, Homo sapien
ttgccgataacgatgatgtcgatgc

SEQ ID NO: 5840964 - DNA, 25 bp, Homo sapien
gttttacggcaatatcatcaccaca

SEQ ID NO: 5840965 - DNA, 25 bp, Homo sapien
acgatgatgtcgatgcctttgattt

SEQ ID NO: 5840966 - DNA, 25 bp, Homo sapien
gcaatatcatcaccacacgcactta

SEQ ID NO: 5840967 - DNA, 25 bp, Homo sapien
atcaccacacgcacttatcaggaac

SEQ ID NO: 5840968 - DNA, 25 bp, Homo sapien
acgcacttatcaggaacgcctcgat

SEQ ID NO: 5840969 - DNA, 25 bp, Homo sapien
atacgctggaaaaagtgcgcgatgc

SEQ ID NO: 5840970 - DNA, 25 bp, Homo sapien
ggaaaaagtgcgcgatgccgggatc

SEQ ID NO: 5840971 - DNA, 25 bp, Homo sapien
agtgcgcgatgccgggatcaaagtc

SEQ ID NO: 5840972 - DNA, 25 bp, Homo sapien
gccgggatcaaagtctgttctggcg

SEQ ID NO: 5840973 - DNA, 25 bp, Homo sapien
aagtctgttctggcggcattgtggg

SEQ ID NO: 5840974 - DNA, 25 bp, Homo sapien
aagatcgcgccggattattgctgca

SEQ ID NO: 5840975 - DNA, 25 bp, Homo sapien
gccggattattgctgcaactggcaa

SEQ ID NO: 5840976 - DNA, 25 bp, Homo sapien
attgctgcaactggcaaacctgccg

SEQ ID NO: 5840977 - DNA, 25 bp, Homo sapien
cgccggaaagcgtgccaatcaacat

SEQ ID NO: 5840978 - DNA, 25 bp, Homo sapien
aagcgtgccaatcaacatgctggtg

SEQ ID NO: 5840979 - DNA, 25 bp, Homo sapien
caatcaacatgctggtgaaggtgaa

SEQ ID NO: 5840980 - DNA, 25 bp, Homo sapien
tggtgaaggtgaaaggcacgccgct

SEQ ID NO: 5840981 - DNA, 25 bp, Homo sapien
acgccgcttgccgataacgatgatg

SEQ ID NO: 5840982 - DNA, 25 bp, Homo sapien
gccggagttttacggcaatatcatc

SEQ ID NO: 5840983 - DNA, 25 bp, Homo sapien
ttgccgataacgatgatgtcgatgc

SEQ ID NO: 5840984 - DNA, 25 bp, Homo sapien
gttttacggcaatatcatcaccaca

SEQ ID NO: 5840985 - DNA, 25 bp, Homo sapien
acgatgatgtcgatgcctttgattt

SEQ ID NO: 5840986 - DNA, 25 bp, Homo sapien
gcaatatcatcaccacacgcactta

SEQ ID NO: 5840987 - DNA, 25 bp, Homo sapien
atcaccacacgcacttatcaggaac

SEQ ID NO: 5840988 - DNA, 25 bp, Homo sapien
acgcacttatcaggaacgcctcgat

SEQ ID NO: 5840989 - DNA, 25 bp, Homo sapien
atacgctggaaaaagtgcgcgatgc

SEQ ID NO: 5840990 - DNA, 25 bp, Homo sapien
ggaaaaagtgcgcgatgccgggatc

SEQ ID NO: 5840991 - DNA, 25 bp, Homo sapien
agtgcgcgatgccgggatcaaagtc

SEQ ID NO: 5840992 - DNA, 25 bp, Homo sapien
gccgggatcaaagtctgttctggcg

SEQ ID NO: 5840993 - DNA, 25 bp, Homo sapien
aagtctgttctggcggcattgtggg

SEQ ID NO: 5840994 - DNA, 25 bp, Homo sapien
aagatcgcgccggattattgctgca

SEQ ID NO: 5840995 - DNA, 25 bp, Homo sapien
gccggattattgctgcaactggcaa

SEQ ID NO: 5840996 - DNA, 25 bp, Homo sapien
attgctgcaactggcaaacctgccg

SEQ ID NO: 5840997 - DNA, 25 bp, Homo sapien
cgccggaaagcgtgccaatcaacat

SEQ ID NO: 5840998 - DNA, 25 bp, Homo sapien
aagcgtgccaatcaacatgctggtg

SEQ ID NO: 5840999 - DNA, 25 bp, Homo sapien
caatcaacatgctggtgaaggtgaa

SEQ ID NO: 5841000 - DNA, 25 bp, Homo sapien
tggtgaaggtgaaaggcacgccgct

SEQ ID NO: 5841001 - DNA, 25 bp, Homo sapien
acgccgcttgccgataacgatgatg

SEQ ID NO: 5841002 - DNA, 25 bp, Homo sapien
gccggagttttacggcaatatcatc

SEQ ID NO: 5841003 - DNA, 25 bp, Homo sapien
ttgccgataacgatgatgtcgatgc

SEQ ID NO: 5841004 - DNA, 25 bp, Homo sapien
gttttacggcaatatcatcaccaca

SEQ ID NO: 5841005 - DNA, 25 bp, Homo sapien
acgatgatgtcgatgcctttgattt

SEQ ID NO: 5841006 - DNA, 25 bp, Homo sapien
gcaatatcatcaccacacgcactta

SEQ ID NO: 5841007 - DNA, 25 bp, Homo sapien
atcaccacacgcacttatcaggaac

SEQ ID NO: 5841008 - DNA, 25 bp, Homo sapien
acgcacttatcaggaacgcctcgat

SEQ ID NO: 5841009 - DNA, 25 bp, Homo sapien
atacgctggaaaaagtgcgcgatgc

SEQ ID NO: 5841010 - DNA, 25 bp, Homo sapien
ggaaaaagtgcgcgatgccgggatc

SEQ ID NO: 5841011 - DNA, 25 bp, Homo sapien
agtgcgcgatgccgggatcaaagtc

SEQ ID NO: 5841012 - DNA, 25 bp, Homo sapien
gccgggatcaaagtctgttctggcg

SEQ ID NO: 5841013 - DNA, 25 bp, Homo sapien
aagtctgttctggcggcattgtggg

SEQ ID NO: 5841014 - DNA, 25 bp, Homo sapien
aagatcgcgccggattattgctgca

SEQ ID NO: 5841015 - DNA, 25 bp, Homo sapien
gccggattattgctgcaactggcaa

SEQ ID NO: 5841016 - DNA, 25 bp, Homo sapien
attgctgcaactggcaaacctgccg

SEQ ID NO: 5841017 - DNA, 25 bp, Homo sapien
cgccggaaagcgtgccaatcaacat

SEQ ID NO: 5841018 - DNA, 25 bp, Homo sapien
aagcgtgccaatcaacatgctggtg

SEQ ID NO: 5841019 - DNA, 25 bp, Homo sapien
caatcaacatgctggtgaaggtgaa

SEQ ID NO: 5841020 - DNA, 25 bp, Homo sapien
tggtgaaggtgaaaggcacgccgct

SEQ ID NO: 5841021 - DNA, 25 bp, Homo sapien
acgccgcttgccgataacgatgatg

SEQ ID NO: 5841022 - DNA, 25 bp, Homo sapien
gccggagttttacggcaatatcatc

SEQ ID NO: 5841023 - DNA, 25 bp, Homo sapien
ttgccgataacgatgatgtcgatgc

SEQ ID NO: 5841024 - DNA, 25 bp, Homo sapien
gttttacggcaatatcatcaccaca

SEQ ID NO: 5841025 - DNA, 25 bp, Homo sapien
acgatgatgtcgatgcctttgattt

SEQ ID NO: 5841026 - DNA, 25 bp, Homo sapien
gcaatatcatcaccacacgcactta

SEQ ID NO: 5841027 - DNA, 25 bp, Homo sapien
atcaccacacgcacttatcaggaac

SEQ ID NO: 5841028 - DNA, 25 bp, Homo sapien
acgcacttatcaggaacgcctcgat

SEQ ID NO: 5841029 - DNA, 25 bp, Homo sapien
atacgctggaaaaagtgcgcgatgc

SEQ ID NO: 5841030 - DNA, 25 bp, Homo sapien
ggaaaaagtgcgcgatgccgggatc

SEQ ID NO: 5841031 - DNA, 25 bp, Homo sapien
agtgcgcgatgccgggatcaaagtc

SEQ ID NO: 5841032 - DNA, 25 bp, Homo sapien
gccgggatcaaagtctgttctggcg

SEQ ID NO: 5841033 - DNA, 25 bp, Homo sapien
aagtctgttctggcggcattgtggg

SEQ ID NO: 5841034 - DNA, 25 bp, Homo sapien
aagatcgcgccggattattgctgca

SEQ ID NO: 5841035 - DNA, 25 bp, Homo sapien
gccggattattgctgcaactggcaa

SEQ ID NO: 5841036 - DNA, 25 bp, Homo sapien
attgctgcaactggcaaacctgccg

SEQ ID NO: 5841037 - DNA, 25 bp, Homo sapien
cgccggaaagcgtgccaatcaacat

SEQ ID NO: 5841038 - DNA, 25 bp, Homo sapien
aagcgtgccaatcaacatgctggtg

SEQ ID NO: 5841039 - DNA, 25 bp, Homo sapien
caatcaacatgctggtgaaggtgaa

SEQ ID NO: 5841040 - DNA, 25 bp, Homo sapien
tggtgaaggtgaaaggcacgccgct

SEQ ID NO: 5841041 - DNA, 25 bp, Homo sapien
acgccgcttgccgataacgatgatg

SEQ ID NO: 5841042 - DNA, 25 bp, Homo sapien
gccggagttttacggcaatatcatc

SEQ ID NO: 5841043 - DNA, 25 bp, Homo sapien
ttgccgataacgatgatgtcgatgc

SEQ ID NO: 5841044 - DNA, 25 bp, Homo sapien
gttttacggcaatatcatcaccaca

SEQ ID NO: 5841045 - DNA, 25 bp, Homo sapien
acgatgatgtcgatgcctttgattt

SEQ ID NO: 5841046 - DNA, 25 bp, Homo sapien
gcaatatcatcaccacacgcactta

SEQ ID NO: 5841047 - DNA, 25 bp, Homo sapien
atcaccacacgcacttatcaggaac

SEQ ID NO: 5841048 - DNA, 25 bp, Homo sapien
acgcacttatcaggaacgcctcgat

SEQ ID NO: 5841049 - DNA, 25 bp, Homo sapien
atacgctggaaaaagtgcgcgatgc

SEQ ID NO: 5841050 - DNA, 25 bp, Homo sapien
ggaaaaagtgcgcgatgccgggatc

SEQ ID NO: 5841051 - DNA, 25 bp, Homo sapien
agtgcgcgatgccgggatcaaagtc

SEQ ID NO: 5841052 - DNA, 25 bp, Homo sapien
gccgggatcaaagtctgttctggcg

SEQ ID NO: 5841053 - DNA, 25 bp, Homo sapien
aagtctgttctggcggcattgtggg

SEQ ID NO: 5841054 - DNA, 25 bp, Homo sapien
aagatcgcgccggattattgctgca

SEQ ID NO: 5841055 - DNA, 25 bp, Homo sapien
gccggattattgctgcaactggcaa

SEQ ID NO: 5841056 - DNA, 25 bp, Homo sapien
attgctgcaactggcaaacctgccg

SEQ ID NO: 5841057 - DNA, 25 bp, Homo sapien
cgccggaaagcgtgccaatcaacat

SEQ ID NO: 5841058 - DNA, 25 bp, Homo sapien
aagcgtgccaatcaacatgctggtg

SEQ ID NO: 5841059 - DNA, 25 bp, Homo sapien
caatcaacatgctggtgaaggtgaa

SEQ ID NO: 5841060 - DNA, 25 bp, Homo sapien
tggtgaaggtgaaaggcacgccgct

SEQ ID NO: 5841061 - DNA, 25 bp, Homo sapien
acgccgcttgccgataacgatgatg

SEQ ID NO: 5841062 - DNA, 25 bp, Homo sapien
gccggagttttacggcaatatcatc

SEQ ID NO: 5841063 - DNA, 25 bp, Homo sapien
ttgccgataacgatgatgtcgatgc

SEQ ID NO: 5841064 - DNA, 25 bp, Homo sapien
gttttacggcaatatcatcaccaca

SEQ ID NO: 5841065 - DNA, 25 bp, Homo sapien
acgatgatgtcgatgcctttgattt

SEQ ID NO: 5841066 - DNA, 25 bp, Homo sapien
gcaatatcatcaccacacgcactta

SEQ ID NO: 5841067 - DNA, 25 bp, Homo sapien
atcaccacacgcacttatcaggaac

SEQ ID NO: 5841068 - DNA, 25 bp, Homo sapien
acgcacttatcaggaacgcctcgat

SEQ ID NO: 5841069 - DNA, 25 bp, Homo sapien
atacgctggaaaaagtgcgcgatgc

SEQ ID NO: 5841070 - DNA, 25 bp, Homo sapien
ggaaaaagtgcgcgatgccgggatc

SEQ ID NO: 5841071 - DNA, 25 bp, Homo sapien
agtgcgcgatgccgggatcaaagtc

SEQ ID NO: 5841072 - DNA, 25 bp, Homo sapien
gccgggatcaaagtctgttctggcg

SEQ ID NO: 5841073 - DNA, 25 bp, Homo sapien
aagtctgttctggcggcattgtggg

SEQ ID NO: 5841074 - DNA, 25 bp, Homo sapien
aagatcgcgccggattattgctgca

SEQ ID NO: 5841075 - DNA, 25 bp, Homo sapien
gccggattattgctgcaactggcaa

SEQ ID NO: 5841076 - DNA, 25 bp, Homo sapien
attgctgcaactggcaaacctgccg

SEQ ID NO: 5841077 - DNA, 25 bp, Homo sapien
cgccggaaagcgtgccaatcaacat

SEQ ID NO: 5841078 - DNA, 25 bp, Homo sapien
aagcgtgccaatcaacatgctggtg

SEQ ID NO: 5841079 - DNA, 25 bp, Homo sapien
caatcaacatgctggtgaaggtgaa

SEQ ID NO: 5841080 - DNA, 25 bp, Homo sapien
tggtgaaggtgaaaggcacgccgct

SEQ ID NO: 5841081 - DNA, 25 bp, Homo sapien
acgccgcttgccgataacgatgatg

SEQ ID NO: 5841082 - DNA, 25 bp, Homo sapien
gccggagttttacggcaatatcatc

SEQ ID NO: 5841083 - DNA, 25 bp, Homo sapien
ttgccgataacgatgatgtcgatgc

SEQ ID NO: 5841084 - DNA, 25 bp, Homo sapien
gttttacggcaatatcatcaccaca

SEQ ID NO: 5841085 - DNA, 25 bp, Homo sapien
acgatgatgtcgatgcctttgattt

SEQ ID NO: 5841086 - DNA, 25 bp, Homo sapien
gcaatatcatcaccacacgcactta

SEQ ID NO: 5841087 - DNA, 25 bp, Homo sapien
atcaccacacgcacttatcaggaac

SEQ ID NO: 5841088 - DNA, 25 bp, Homo sapien
acgcacttatcaggaacgcctcgat

SEQ ID NO: 5841089 - DNA, 25 bp, Homo sapien
atacgctggaaaaagtgcgcgatgc

SEQ ID NO: 5841090 - DNA, 25 bp, Homo sapien
ggaaaaagtgcgcgatgccgggatc

SEQ ID NO: 5841091 - DNA, 25 bp, Homo sapien
agtgcgcgatgccgggatcaaagtc

SEQ ID NO: 5841092 - DNA, 25 bp, Homo sapien
gccgggatcaaagtctgttctggcg

SEQ ID NO: 5841093 - DNA, 25 bp, Homo sapien
aagtctgttctggcggcattgtggg

SEQ ID NO: 5841094 - DNA, 25 bp, Homo sapien
aagatcgcgccggattattgctgca

SEQ ID NO: 5841095 - DNA, 25 bp, Homo sapien
gccggattattgctgcaactggcaa

SEQ ID NO: 5841096 - DNA, 25 bp, Homo sapien
attgctgcaactggcaaacctgccg

SEQ ID NO: 5841097 - DNA, 25 bp, Homo sapien
cgccggaaagcgtgccaatcaacat

SEQ ID NO: 5841098 - DNA, 25 bp, Homo sapien
aagcgtgccaatcaacatgctggtg

SEQ ID NO: 5841099 - DNA, 25 bp, Homo sapien
caatcaacatgctggtgaaggtgaa

SEQ ID NO: 5841100 - DNA, 25 bp, Homo sapien
tggtgaaggtgaaaggcacgccgct

SEQ ID NO: 5841101 - DNA, 25 bp, Homo sapien
acgccgcttgccgataacgatgatg

SEQ ID NO: 5841102 - DNA, 25 bp, Homo sapien
gccggagttttacggcaatatcatc

SEQ ID NO: 5841103 - DNA, 25 bp, Homo sapien
ttgccgataacgatgatgtcgatgc

SEQ ID NO: 5841104 - DNA, 25 bp, Homo sapien
gttttacggcaatatcatcaccaca

SEQ ID NO: 5841105 - DNA, 25 bp, Homo sapien
acgatgatgtcgatgcctttgattt

SEQ ID NO: 5841106 - DNA, 25 bp, Homo sapien
gcaatatcatcaccacacgcactta

SEQ ID NO: 5841107 - DNA, 25 bp, Homo sapien
atcaccacacgcacttatcaggaac

SEQ ID NO: 5841108 - DNA, 25 bp, Homo sapien
acgcacttatcaggaacgcctcgat

SEQ ID NO: 5841109 - DNA, 25 bp, Homo sapien
atacgctggaaaaagtgcgcgatgc

SEQ ID NO: 5841110 - DNA, 25 bp, Homo sapien
ggaaaaagtgcgcgatgccgggatc

SEQ ID NO: 5841111 - DNA, 25 bp, Homo sapien
agtgcgcgatgccgggatcaaagtc

SEQ ID NO: 5841112 - DNA, 25 bp, Homo sapien
gccgggatcaaagtctgttctggcg

SEQ ID NO: 5841113 - DNA, 25 bp, Homo sapien
aagtctgttctggcggcattgtggg

SEQ ID NO: 5841114 - DNA, 25 bp, Homo sapien
aagatcgcgccggattattgctgca

SEQ ID NO: 5841115 - DNA, 25 bp, Homo sapien
gccggattattgctgcaactggcaa

SEQ ID NO: 5841116 - DNA, 25 bp, Homo sapien
attgctgcaactggcaaacctgccg

SEQ ID NO: 5841117 - DNA, 25 bp, Homo sapien
cgccggaaagcgtgccaatcaacat

SEQ ID NO: 5841118 - DNA, 25 bp, Homo sapien
aagcgtgccaatcaacatgctggtg

SEQ ID NO: 5841119 - DNA, 25 bp, Homo sapien
caatcaacatgctggtgaaggtgaa

SEQ ID NO: 5841120 - DNA, 25 bp, Homo sapien
tggtgaaggtgaaaggcacgccgct

SEQ ID NO: 5841121 - DNA, 25 bp, Homo sapien
acgccgcttgccgataacgatgatg

SEQ ID NO: 5841122 - DNA, 25 bp, Homo sapien
gccggagttttacggcaatatcatc

SEQ ID NO: 5841123 - DNA, 25 bp, Homo sapien
ttgccgataacgatgatgtcgatgc

SEQ ID NO: 5841124 - DNA, 25 bp, Homo sapien
gttttacggcaatatcatcaccaca

SEQ ID NO: 5841125 - DNA, 25 bp, Homo sapien
acgatgatgtcgatgcctttgattt

SEQ ID NO: 5841126 - DNA, 25 bp, Homo sapien
gcaatatcatcaccacacgcactta

SEQ ID NO: 5841127 - DNA, 25 bp, Homo sapien
atcaccacacgcacttatcaggaac

SEQ ID NO: 5841128 - DNA, 25 bp, Homo sapien
acgcacttatcaggaacgcctcgat

SEQ ID NO: 5841129 - DNA, 25 bp, Homo sapien
atacgctggaaaaagtgcgcgatgc

SEQ ID NO: 5841130 - DNA, 25 bp, Homo sapien
ggaaaaagtgcgcgatgccgggatc

SEQ ID NO: 5841131 - DNA, 25 bp, Homo sapien
agtgcgcgatgccgggatcaaagtc

SEQ ID NO: 5841132 - DNA, 25 bp, Homo sapien
gccgggatcaaagtctgttctggcg

SEQ ID NO: 5841133 - DNA, 25 bp, Homo sapien
aagtctgttctggcggcattgtggg

SEQ ID NO: 5841134 - DNA, 25 bp, Homo sapien
aagatcgcgccggattattgctgca

SEQ ID NO: 5841135 - DNA, 25 bp, Homo sapien
gccggattattgctgcaactggcaa

SEQ ID NO: 5841136 - DNA, 25 bp, Homo sapien
attgctgcaactggcaaacctgccg

SEQ ID NO: 5841137 - DNA, 25 bp, Homo sapien
cgccggaaagcgtgccaatcaacat

SEQ ID NO: 5841138 - DNA, 25 bp, Homo sapien
aagcgtgccaatcaacatgctggtg

SEQ ID NO: 5841139 - DNA, 25 bp, Homo sapien
caatcaacatgctggtgaaggtgaa

SEQ ID NO: 5841140 - DNA, 25 bp, Homo sapien
tggtgaaggtgaaaggcacgccgct

SEQ ID NO: 5841141 - DNA, 25 bp, Homo sapien
acgccgcttgccgataacgatgatg

SEQ ID NO: 5841142 - DNA, 25 bp, Homo sapien
gccggagttttacggcaatatcatc

SEQ ID NO: 5841143 - DNA, 25 bp, Homo sapien
ttgccgataacgatgatgtcgatgc

SEQ ID NO: 5841144 - DNA, 25 bp, Homo sapien
gttttacggcaatatcatcaccaca

SEQ ID NO: 5841145 - DNA, 25 bp, Homo sapien
acgatgatgtcgatgcctttgattt

SEQ ID NO: 5841146 - DNA, 25 bp, Homo sapien
gcaatatcatcaccacacgcactta

SEQ ID NO: 5841147 - DNA, 25 bp, Homo sapien
atcaccacacgcacttatcaggaac

SEQ ID NO: 5841148 - DNA, 25 bp, Homo sapien
acgcacttatcaggaacgcctcgat

SEQ ID NO: 5841149 - DNA, 25 bp, Homo sapien
atacgctggaaaaagtgcgcgatgc

SEQ ID NO: 5841150 - DNA, 25 bp, Homo sapien
ggaaaaagtgcgcgatgccgggatc

SEQ ID NO: 5841151 - DNA, 25 bp, Homo sapien
agtgcgcgatgccgggatcaaagtc

SEQ ID NO: 5841152 - DNA, 25 bp, Homo sapien
gccgggatcaaagtctgttctggcg

SEQ ID NO: 5841153 - DNA, 25 bp, Homo sapien
aagtctgttctggcggcattgtggg

SEQ ID NO: 5841154 - DNA, 25 bp, Homo sapien
aagatcgcgccggattattgctgca

SEQ ID NO: 5841155 - DNA, 25 bp, Homo sapien
gccggattattgctgcaactggcaa

SEQ ID NO: 5841156 - DNA, 25 bp, Homo sapien
attgctgcaactggcaaacctgccg

SEQ ID NO: 5841157 - DNA, 25 bp, Homo sapien
cgccggaaagcgtgccaatcaacat

SEQ ID NO: 5841158 - DNA, 25 bp, Homo sapien
aagcgtgccaatcaacatgctggtg

SEQ ID NO: 5841159 - DNA, 25 bp, Homo sapien
caatcaacatgctggtgaaggtgaa

SEQ ID NO: 5841160 - DNA, 25 bp, Homo sapien
tggtgaaggtgaaaggcacgccgct

SEQ ID NO: 5841161 - DNA, 25 bp, Homo sapien
acgccgcttgccgataacgatgatg

SEQ ID NO: 5841162 - DNA, 25 bp, Homo sapien
gccggagttttacggcaatatcatc

SEQ ID NO: 5841163 - DNA, 25 bp, Homo sapien
ttgccgataacgatgatgtcgatgc

SEQ ID NO: 5841164 - DNA, 25 bp, Homo sapien
gttttacggcaatatcatcaccaca

SEQ ID NO: 5841165 - DNA, 25 bp, Homo sapien
acgatgatgtcgatgcctttgattt

SEQ ID NO: 5841166 - DNA, 25 bp, Homo sapien
gcaatatcatcaccacacgcactta

SEQ ID NO: 5841167 - DNA, 25 bp, Homo sapien
atcaccacacgcacttatcaggaac

SEQ ID NO: 5841168 - DNA, 25 bp, Homo sapien
acgcacttatcaggaacgcctcgat

SEQ ID NO: 5841169 - DNA, 25 bp, Homo sapien
atacgctggaaaaagtgcgcgatgc

SEQ ID NO: 5841170 - DNA, 25 bp, Homo sapien
ggaaaaagtgcgcgatgccgggatc

SEQ ID NO: 5841171 - DNA, 25 bp, Homo sapien
agtgcgcgatgccgggatcaaagtc

SEQ ID NO: 5841172 - DNA, 25 bp, Homo sapien
gccgggatcaaagtctgttctggcg

SEQ ID NO: 5841173 - DNA, 25 bp, Homo sapien
aagtctgttctggcggcattgtggg

SEQ ID NO: 5841174 - DNA, 25 bp, Homo sapien
aagatcgcgccggattattgctgca

SEQ ID NO: 5841175 - DNA, 25 bp, Homo sapien
gccggattattgctgcaactggcaa

SEQ ID NO: 5841176 - DNA, 25 bp, Homo sapien
attgctgcaactggcaaacctgccg

SEQ ID NO: 5841177 - DNA, 25 bp, Homo sapien
cgccggaaagcgtgccaatcaacat

SEQ ID NO: 5841178 - DNA, 25 bp, Homo sapien
aagcgtgccaatcaacatgctggtg

SEQ ID NO: 5841179 - DNA, 25 bp, Homo sapien
caatcaacatgctggtgaaggtgaa

SEQ ID NO: 5841180 - DNA, 25 bp, Homo sapien
tggtgaaggtgaaaggcacgccgct

SEQ ID NO: 5841181 - DNA, 25 bp, Homo sapien
acgccgcttgccgataacgatgatg

SEQ ID NO: 5841182 - DNA, 25 bp, Homo sapien
gccggagttttacggcaatatcatc

SEQ ID NO: 5841183 - DNA, 25 bp, Homo sapien
ttgccgataacgatgatgtcgatgc

SEQ ID NO: 5841184 - DNA, 25 bp, Homo sapien
gttttacggcaatatcatcaccaca

SEQ ID NO: 5841185 - DNA, 25 bp, Homo sapien
acgatgatgtcgatgcctttgattt

SEQ ID NO: 5841186 - DNA, 25 bp, Homo sapien
gcaatatcatcaccacacgcactta

SEQ ID NO: 5841187 - DNA, 25 bp, Homo sapien
atcaccacacgcacttatcaggaac

SEQ ID NO: 5841188 - DNA, 25 bp, Homo sapien
acgcacttatcaggaacgcctcgat

SEQ ID NO: 5841189 - DNA, 25 bp, Homo sapien
atacgctggaaaaagtgcgcgatgc

SEQ ID NO: 5841190 - DNA, 25 bp, Homo sapien
ggaaaaagtgcgcgatgccgggatc

SEQ ID NO: 5841191 - DNA, 25 bp, Homo sapien
agtgcgcgatgccgggatcaaagtc

SEQ ID NO: 5841192 - DNA, 25 bp, Homo sapien
gccgggatcaaagtctgttctggcg

SEQ ID NO: 5841193 - DNA, 25 bp, Homo sapien
aagtctgttctggcggcattgtggg

SEQ ID NO: 5841194 - DNA, 25 bp, Homo sapien
aagatcgcgccggattattgctgca

SEQ ID NO: 5841195 - DNA, 25 bp, Homo sapien
gccggattattgctgcaactggcaa

SEQ ID NO: 5841196 - DNA, 25 bp, Homo sapien
attgctgcaactggcaaacctgccg

SEQ ID NO: 5841197 - DNA, 25 bp, Homo sapien
cgccggaaagcgtgccaatcaacat

SEQ ID NO: 5841198 - DNA, 25 bp, Homo sapien
aagcgtgccaatcaacatgctggtg

SEQ ID NO: 5841199 - DNA, 25 bp, Homo sapien
caatcaacatgctggtgaaggtgaa

SEQ ID NO: 5841200 - DNA, 25 bp, Homo sapien
tggtgaaggtgaaaggcacgccgct

SEQ ID NO: 5841201 - DNA, 25 bp, Homo sapien
acgccgcttgccgataacgatgatg

SEQ ID NO: 5841202 - DNA, 25 bp, Homo sapien
gccggagttttacggcaatatcatc

SEQ ID NO: 5841203 - DNA, 25 bp, Homo sapien
ttgccgataacgatgatgtcgatgc

SEQ ID NO: 5841204 - DNA, 25 bp, Homo sapien
gttttacggcaatatcatcaccaca

SEQ ID NO: 5841205 - DNA, 25 bp, Homo sapien
acgatgatgtcgatgcctttgattt

SEQ ID NO: 5841206 - DNA, 25 bp, Homo sapien
gcaatatcatcaccacacgcactta

SEQ ID NO: 5841207 - DNA, 25 bp, Homo sapien
atcaccacacgcacttatcaggaac

SEQ ID NO: 5841208 - DNA, 25 bp, Homo sapien
acgcacttatcaggaacgcctcgat

SEQ ID NO: 5841209 - DNA, 25 bp, Homo sapien
atacgctggaaaaagtgcgcgatgc

SEQ ID NO: 5841210 - DNA, 25 bp, Homo sapien
ggaaaaagtgcgcgatgccgggatc

SEQ ID NO: 5841211 - DNA, 25 bp, Homo sapien
agtgcgcgatgccgggatcaaagtc

SEQ ID NO: 5841212 - DNA, 25 bp, Homo sapien
gccgggatcaaagtctgttctggcg

SEQ ID NO: 5841213 - DNA, 25 bp, Homo sapien
aagtctgttctggcggcattgtggg

SEQ ID NO: 5841214 - DNA, 25 bp, Homo sapien
aagatcgcgccggattattgctgca

SEQ ID NO: 5841215 - DNA, 25 bp, Homo sapien
gccggattattgctgcaactggcaa

SEQ ID NO: 5841216 - DNA, 25 bp, Homo sapien
attgctgcaactggcaaacctgccg

SEQ ID NO: 5841217 - DNA, 25 bp, Homo sapien
cgccggaaagcgtgccaatcaacat

SEQ ID NO: 5841218 - DNA, 25 bp, Homo sapien
aagcgtgccaatcaacatgctggtg

SEQ ID NO: 5841219 - DNA, 25 bp, Homo sapien
caatcaacatgctggtgaaggtgaa

SEQ ID NO: 5841220 - DNA, 25 bp, Homo sapien
tggtgaaggtgaaaggcacgccgct

SEQ ID NO: 5841221 - DNA, 25 bp, Homo sapien
acgccgcttgccgataacgatgatg

SEQ ID NO: 5841222 - DNA, 25 bp, Homo sapien
gccggagttttacggcaatatcatc

SEQ ID NO: 5841223 - DNA, 25 bp, Homo sapien
ttgccgataacgatgatgtcgatgc

SEQ ID NO: 5841224 - DNA, 25 bp, Homo sapien
gttttacggcaatatcatcaccaca

SEQ ID NO: 5841225 - DNA, 25 bp, Homo sapien
acgatgatgtcgatgcctttgattt

SEQ ID NO: 5841226 - DNA, 25 bp, Homo sapien
gcaatatcatcaccacacgcactta

SEQ ID NO: 5841227 - DNA, 25 bp, Homo sapien
atcaccacacgcacttatcaggaac

SEQ ID NO: 5841228 - DNA, 25 bp, Homo sapien
acgcacttatcaggaacgcctcgat

SEQ ID NO: 5841229 - DNA, 25 bp, Homo sapien
atacgctggaaaaagtgcgcgatgc

SEQ ID NO: 5841230 - DNA, 25 bp, Homo sapien
ggaaaaagtgcgcgatgccgggatc

SEQ ID NO: 5841231 - DNA, 25 bp, Homo sapien
agtgcgcgatgccgggatcaaagtc

SEQ ID NO: 5841232 - DNA, 25 bp, Homo sapien
gccgggatcaaagtctgttctggcg

SEQ ID NO: 5841233 - DNA, 25 bp, Homo sapien
aagtctgttctggcggcattgtggg

SEQ ID NO: 5841234 - DNA, 25 bp, Homo sapien
aagatcgcgccggattattgctgca

SEQ ID NO: 5841235 - DNA, 25 bp, Homo sapien
gccggattattgctgcaactggcaa

SEQ ID NO: 5841236 - DNA, 25 bp, Homo sapien
attgctgcaactggcaaacctgccg

SEQ ID NO: 5841237 - DNA, 25 bp, Homo sapien
cgccggaaagcgtgccaatcaacat

SEQ ID NO: 5841238 - DNA, 25 bp, Homo sapien
aagcgtgccaatcaacatgctggtg

SEQ ID NO: 5841239 - DNA, 25 bp, Homo sapien
caatcaacatgctggtgaaggtgaa

SEQ ID NO: 5841240 - DNA, 25 bp, Homo sapien
tggtgaaggtgaaaggcacgccgct

SEQ ID NO: 5841241 - DNA, 25 bp, Homo sapien
acgccgcttgccgataacgatgatg

SEQ ID NO: 5841242 - DNA, 25 bp, Homo sapien
gccggagttttacggcaatatcatc

SEQ ID NO: 5841243 - DNA, 25 bp, Homo sapien
ttgccgataacgatgatgtcgatgc

SEQ ID NO: 5841244 - DNA, 25 bp, Homo sapien
gttttacggcaatatcatcaccaca

SEQ ID NO: 5841245 - DNA, 25 bp, Homo sapien
acgatgatgtcgatgcctttgattt

SEQ ID NO: 5841246 - DNA, 25 bp, Homo sapien
gcaatatcatcaccacacgcactta

SEQ ID NO: 5841247 - DNA, 25 bp, Homo sapien
atcaccacacgcacttatcaggaac

SEQ ID NO: 5841248 - DNA, 25 bp, Homo sapien
acgcacttatcaggaacgcctcgat

SEQ ID NO: 5841249 - DNA, 25 bp, Homo sapien
atacgctggaaaaagtgcgcgatgc

SEQ ID NO: 5841250 - DNA, 25 bp, Homo sapien
ggaaaaagtgcgcgatgccgggatc

SEQ ID NO: 5841251 - DNA, 25 bp, Homo sapien
agtgcgcgatgccgggatcaaagtc

SEQ ID NO: 5841252 - DNA, 25 bp, Homo sapien
gccgggatcaaagtctgttctggcg

SEQ ID NO: 5841253 - DNA, 25 bp, Homo sapien
aagtctgttctggcggcattgtggg

SEQ ID NO: 5841254 - DNA, 25 bp, Homo sapien
aagatcgcgccggattattgctgca

SEQ ID NO: 5841255 - DNA, 25 bp, Homo sapien
gccggattattgctgcaactggcaa

SEQ ID NO: 5841256 - DNA, 25 bp, Homo sapien
attgctgcaactggcaaacctgccg

SEQ ID NO: 5841257 - DNA, 25 bp, Homo sapien
cgccggaaagcgtgccaatcaacat

SEQ ID NO: 5841258 - DNA, 25 bp, Homo sapien
aagcgtgccaatcaacatgctggtg

SEQ ID NO: 5841259 - DNA, 25 bp, Homo sapien
caatcaacatgctggtgaaggtgaa

SEQ ID NO: 5841260 - DNA, 25 bp, Homo sapien
tggtgaaggtgaaaggcacgccgct

SEQ ID NO: 5841261 - DNA, 25 bp, Homo sapien
acgccgcttgccgataacgatgatg

SEQ ID NO: 5841262 - DNA, 25 bp, Homo sapien
gccggagttttacggcaatatcatc

SEQ ID NO: 5841263 - DNA, 25 bp, Homo sapien
ttgccgataacgatgatgtcgatgc

SEQ ID NO: 5841264 - DNA, 25 bp, Homo sapien
gttttacggcaatatcatcaccaca

SEQ ID NO: 5841265 - DNA, 25 bp, Homo sapien
acgatgatgtcgatgcctttgattt

SEQ ID NO: 5841266 - DNA, 25 bp, Homo sapien
gcaatatcatcaccacacgcactta

SEQ ID NO: 5841267 - DNA, 25 bp, Homo sapien
atcaccacacgcacttatcaggaac

SEQ ID NO: 5841268 - DNA, 25 bp, Homo sapien
acgcacttatcaggaacgcctcgat

SEQ ID NO: 5841269 - DNA, 25 bp, Homo sapien
atacgctggaaaaagtgcgcgatgc

SEQ ID NO: 5841270 - DNA, 25 bp, Homo sapien
ggaaaaagtgcgcgatgccgggatc

SEQ ID NO: 5841271 - DNA, 25 bp, Homo sapien
agtgcgcgatgccgggatcaaagtc

SEQ ID NO: 5841272 - DNA, 25 bp, Homo sapien
gccgggatcaaagtctgttctggcg

SEQ ID NO: 5841273 - DNA, 25 bp, Homo sapien
aagtctgttctggcggcattgtggg

SEQ ID NO: 5841274 - DNA, 25 bp, Homo sapien
aagatcgcgccggattattgctgca

SEQ ID NO: 5841275 - DNA, 25 bp, Homo sapien
gccggattattgctgcaactggcaa

SEQ ID NO: 5841276 - DNA, 25 bp, Homo sapien
attgctgcaactggcaaacctgccg

SEQ ID NO: 5841277 - DNA, 25 bp, Homo sapien
cgccggaaagcgtgccaatcaacat

SEQ ID NO: 5841278 - DNA, 25 bp, Homo sapien
aagcgtgccaatcaacatgctggtg

SEQ ID NO: 5841279 - DNA, 25 bp, Homo sapien
caatcaacatgctggtgaaggtgaa

SEQ ID NO: 5841280 - DNA, 25 bp, Homo sapien
tggtgaaggtgaaaggcacgccgct

SEQ ID NO: 5841281 - DNA, 25 bp, Homo sapien
acgccgcttgccgataacgatgatg

SEQ ID NO: 5841282 - DNA, 25 bp, Homo sapien
gccggagttttacggcaatatcatc

SEQ ID NO: 5841283 - DNA, 25 bp, Homo sapien
ttgccgataacgatgatgtcgatgc

SEQ ID NO: 5841284 - DNA, 25 bp, Homo sapien
gttttacggcaatatcatcaccaca

SEQ ID NO: 5841285 - DNA, 25 bp, Homo sapien
acgatgatgtcgatgcctttgattt

SEQ ID NO: 5841286 - DNA, 25 bp, Homo sapien
gcaatatcatcaccacacgcactta

SEQ ID NO: 5841287 - DNA, 25 bp, Homo sapien
atcaccacacgcacttatcaggaac

SEQ ID NO: 5841288 - DNA, 25 bp, Homo sapien
acgcacttatcaggaacgcctcgat

SEQ ID NO: 5841289 - DNA, 25 bp, Homo sapien
atacgctggaaaaagtgcgcgatgc

SEQ ID NO: 5841290 - DNA, 25 bp, Homo sapien
ggaaaaagtgcgcgatgccgggatc

SEQ ID NO: 5841291 - DNA, 25 bp, Homo sapien
agtgcgcgatgccgggatcaaagtc

SEQ ID NO: 5841292 - DNA, 25 bp, Homo sapien
gccgggatcaaagtctgttctggcg

SEQ ID NO: 5841293 - DNA, 25 bp, Homo sapien
aagtctgttctggcggcattgtggg

SEQ ID NO: 5841294 - DNA, 25 bp, Homo sapien
aagatcgcgccggattattgctgca

SEQ ID NO: 5841295 - DNA, 25 bp, Homo sapien
gccggattattgctgcaactggcaa

SEQ ID NO: 5841296 - DNA, 25 bp, Homo sapien
attgctgcaactggcaaacctgccg

SEQ ID NO: 5841297 - DNA, 25 bp, Homo sapien
cgccggaaagcgtgccaatcaacat

SEQ ID NO: 5841298 - DNA, 25 bp, Homo sapien
aagcgtgccaatcaacatgctggtg

SEQ ID NO: 5841299 - DNA, 25 bp, Homo sapien
caatcaacatgctggtgaaggtgaa

SEQ ID NO: 5841300 - DNA, 25 bp, Homo sapien
tggtgaaggtgaaaggcacgccgct

SEQ ID NO: 5841301 - DNA, 25 bp, Homo sapien
acgccgcttgccgataacgatgatg

SEQ ID NO: 5841302 - DNA, 25 bp, Homo sapien
gccggagttttacggcaatatcatc

SEQ ID NO: 5841303 - DNA, 25 bp, Homo sapien
ttgccgataacgatgatgtcgatgc

SEQ ID NO: 5841304 - DNA, 25 bp, Homo sapien
gttttacggcaatatcatcaccaca

SEQ ID NO: 5841305 - DNA, 25 bp, Homo sapien
acgatgatgtcgatgcctttgattt

SEQ ID NO: 5841306 - DNA, 25 bp, Homo sapien
gcaatatcatcaccacacgcactta

SEQ ID NO: 5841307 - DNA, 25 bp, Homo sapien
atcaccacacgcacttatcaggaac

SEQ ID NO: 5841308 - DNA, 25 bp, Homo sapien
acgcacttatcaggaacgcctcgat

SEQ ID NO: 5841309 - DNA, 25 bp, Homo sapien
atacgctggaaaaagtgcgcgatgc

SEQ ID NO: 5841310 - DNA, 25 bp, Homo sapien
ggaaaaagtgcgcgatgccgggatc

SEQ ID NO: 5841311 - DNA, 25 bp, Homo sapien
agtgcgcgatgccgggatcaaagtc

SEQ ID NO: 5841312 - DNA, 25 bp, Homo sapien
gccgggatcaaagtctgttctggcg

SEQ ID NO: 5841313 - DNA, 25 bp, Homo sapien
aagtctgttctggcggcattgtggg

SEQ ID NO: 5841314 - DNA, 25 bp, Homo sapien
aagatcgcgccggattattgctgca

SEQ ID NO: 5841315 - DNA, 25 bp, Homo sapien
gccggattattgctgcaactggcaa

SEQ ID NO: 5841316 - DNA, 25 bp, Homo sapien
attgctgcaactggcaaacctgccg

SEQ ID NO: 5841317 - DNA, 25 bp, Homo sapien
cgccggaaagcgtgccaatcaacat

SEQ ID NO: 5841318 - DNA, 25 bp, Homo sapien
aagcgtgccaatcaacatgctggtg

SEQ ID NO: 5841319 - DNA, 25 bp, Homo sapien
caatcaacatgctggtgaaggtgaa

SEQ ID NO: 5841320 - DNA, 25 bp, Homo sapien
tggtgaaggtgaaaggcacgccgct

SEQ ID NO: 5841321 - DNA, 25 bp, Homo sapien
acgccgcttgccgataacgatgatg

SEQ ID NO: 5841322 - DNA, 25 bp, Homo sapien
gccggagttttacggcaatatcatc

SEQ ID NO: 5841323 - DNA, 25 bp, Homo sapien
ttgccgataacgatgatgtcgatgc

SEQ ID NO: 5841324 - DNA, 25 bp, Homo sapien
gttttacggcaatatcatcaccaca

SEQ ID NO: 5841325 - DNA, 25 bp, Homo sapien
acgatgatgtcgatgcctttgattt

SEQ ID NO: 5841326 - DNA, 25 bp, Homo sapien
gcaatatcatcaccacacgcactta

SEQ ID NO: 5841327 - DNA, 25 bp, Homo sapien
atcaccacacgcacttatcaggaac

SEQ ID NO: 5841328 - DNA, 25 bp, Homo sapien
acgcacttatcaggaacgcctcgat

SEQ ID NO: 5841329 - DNA, 25 bp, Homo sapien
atacgctggaaaaagtgcgcgatgc

SEQ ID NO: 5841330 - DNA, 25 bp, Homo sapien
ggaaaaagtgcgcgatgccgggatc

SEQ ID NO: 5841331 - DNA, 25 bp, Homo sapien
agtgcgcgatgccgggatcaaagtc

SEQ ID NO: 5841332 - DNA, 25 bp, Homo sapien
gccgggatcaaagtctgttctggcg

SEQ ID NO: 5841333 - DNA, 25 bp, Homo sapien
aagtctgttctggcggcattgtggg

SEQ ID NO: 5841334 - DNA, 25 bp, Homo sapien
aagatcgcgccggattattgctgca

SEQ ID NO: 5841335 - DNA, 25 bp, Homo sapien
gccggattattgctgcaactggcaa

SEQ ID NO: 5841336 - DNA, 25 bp, Homo sapien
attgctgcaactggcaaacctgccg

SEQ ID NO: 5841337 - DNA, 25 bp, Homo sapien
cgccggaaagcgtgccaatcaacat

SEQ ID NO: 5841338 - DNA, 25 bp, Homo sapien
aagcgtgccaatcaacatgctggtg

SEQ ID NO: 5841339 - DNA, 25 bp, Homo sapien
caatcaacatgctggtgaaggtgaa

SEQ ID NO: 5841340 - DNA, 25 bp, Homo sapien
tggtgaaggtgaaaggcacgccgct

SEQ ID NO: 5841341 - DNA, 25 bp, Homo sapien
acgccgcttgccgataacgatgatg

SEQ ID NO: 5841342 - DNA, 25 bp, Homo sapien
gccggagttttacggcaatatcatc

SEQ ID NO: 5841343 - DNA, 25 bp, Homo sapien
ttgccgataacgatgatgtcgatgc

SEQ ID NO: 5841344 - DNA, 25 bp, Homo sapien
gttttacggcaatatcatcaccaca

SEQ ID NO: 5841345 - DNA, 25 bp, Homo sapien
acgatgatgtcgatgcctttgattt

SEQ ID NO: 5841346 - DNA, 25 bp, Homo sapien
gcaatatcatcaccacacgcactta

SEQ ID NO: 5841347 - DNA, 25 bp, Homo sapien
atcaccacacgcacttatcaggaac

SEQ ID NO: 5841348 - DNA, 25 bp, Homo sapien
acgcacttatcaggaacgcctcgat

SEQ ID NO: 5841349 - DNA, 25 bp, Homo sapien
atacgctggaaaaagtgcgcgatgc

SEQ ID NO: 5841350 - DNA, 25 bp, Homo sapien
ggaaaaagtgcgcgatgccgggatc

SEQ ID NO: 5841351 - DNA, 25 bp, Homo sapien
agtgcgcgatgccgggatcaaagtc

SEQ ID NO: 5841352 - DNA, 25 bp, Homo sapien
gccgggatcaaagtctgttctggcg

SEQ ID NO: 5841353 - DNA, 25 bp, Homo sapien
aagtctgttctggcggcattgtggg

SEQ ID NO: 5841354 - DNA, 25 bp, Homo sapien
aagatcgcgccggattattgctgca

SEQ ID NO: 5841355 - DNA, 25 bp, Homo sapien
gccggattattgctgcaactggcaa

SEQ ID NO: 5841356 - DNA, 25 bp, Homo sapien
attgctgcaactggcaaacctgccg

SEQ ID NO: 5841357 - DNA, 25 bp, Homo sapien
cgccggaaagcgtgccaatcaacat

SEQ ID NO: 5841358 - DNA, 25 bp, Homo sapien
aagcgtgccaatcaacatgctggtg

SEQ ID NO: 5841359 - DNA, 25 bp, Homo sapien
caatcaacatgctggtgaaggtgaa

SEQ ID NO: 5841360 - DNA, 25 bp, Homo sapien
tggtgaaggtgaaaggcacgccgct

SEQ ID NO: 5841361 - DNA, 25 bp, Homo sapien
acgccgcttgccgataacgatgatg

SEQ ID NO: 5841362 - DNA, 25 bp, Homo sapien
gccggagttttacggcaatatcatc

SEQ ID NO: 5841363 - DNA, 25 bp, Homo sapien
ttgccgataacgatgatgtcgatgc

SEQ ID NO: 5841364 - DNA, 25 bp, Homo sapien
gttttacggcaatatcatcaccaca

SEQ ID NO: 5841365 - DNA, 25 bp, Homo sapien
acgatgatgtcgatgcctttgattt

SEQ ID NO: 5841366 - DNA, 25 bp, Homo sapien
gcaatatcatcaccacacgcactta

SEQ ID NO: 5841367 - DNA, 25 bp, Homo sapien
atcaccacacgcacttatcaggaac

SEQ ID NO: 5841368 - DNA, 25 bp, Homo sapien
acgcacttatcaggaacgcctcgat

SEQ ID NO: 5841369 - DNA, 25 bp, Homo sapien
atacgctggaaaaagtgcgcgatgc

SEQ ID NO: 5841370 - DNA, 25 bp, Homo sapien
ggaaaaagtgcgcgatgccgggatc

SEQ ID NO: 5841371 - DNA, 25 bp, Homo sapien
agtgcgcgatgccgggatcaaagtc

SEQ ID NO: 5841372 - DNA, 25 bp, Homo sapien
gccgggatcaaagtctgttctggcg

SEQ ID NO: 5841373 - DNA, 25 bp, Homo sapien
aagtctgttctggcggcattgtggg

SEQ ID NO: 5841374 - DNA, 25 bp, Homo sapien
aagatcgcgccggattattgctgca

SEQ ID NO: 5841375 - DNA, 25 bp, Homo sapien
gccggattattgctgcaactggcaa

SEQ ID NO: 5841376 - DNA, 25 bp, Homo sapien
attgctgcaactggcaaacctgccg

SEQ ID NO: 5841377 - DNA, 25 bp, Homo sapien
cgccggaaagcgtgccaatcaacat

SEQ ID NO: 5841378 - DNA, 25 bp, Homo sapien
aagcgtgccaatcaacatgctggtg

SEQ ID NO: 5841379 - DNA, 25 bp, Homo sapien
caatcaacatgctggtgaaggtgaa

SEQ ID NO: 5841380 - DNA, 25 bp, Homo sapien
tggtgaaggtgaaaggcacgccgct

SEQ ID NO: 5841381 - DNA, 25 bp, Homo sapien
acgccgcttgccgataacgatgatg

SEQ ID NO: 5841382 - DNA, 25 bp, Homo sapien
gccggagttttacggcaatatcatc

SEQ ID NO: 5841383 - DNA, 25 bp, Homo sapien
ttgccgataacgatgatgtcgatgc

SEQ ID NO: 5841384 - DNA, 25 bp, Homo sapien
gttttacggcaatatcatcaccaca

SEQ ID NO: 5841385 - DNA, 25 bp, Homo sapien
acgatgatgtcgatgcctttgattt

SEQ ID NO: 5841386 - DNA, 25 bp, Homo sapien
gcaatatcatcaccacacgcactta

SEQ ID NO: 5841387 - DNA, 25 bp, Homo sapien
atcaccacacgcacttatcaggaac

SEQ ID NO: 5841388 - DNA, 25 bp, Homo sapien
acgcacttatcaggaacgcctcgat

SEQ ID NO: 5841389 - DNA, 25 bp, Homo sapien
atacgctggaaaaagtgcgcgatgc

SEQ ID NO: 5841390 - DNA, 25 bp, Homo sapien
ggaaaaagtgcgcgatgccgggatc

SEQ ID NO: 5841391 - DNA, 25 bp, Homo sapien
agtgcgcgatgccgggatcaaagtc

SEQ ID NO: 5841392 - DNA, 25 bp, Homo sapien
gccgggatcaaagtctgttctggcg

SEQ ID NO: 5841393 - DNA, 25 bp, Homo sapien
aagtctgttctggcggcattgtggg

SEQ ID NO: 5841394 - DNA, 25 bp, Homo sapien
aagatcgcgccggattattgctgca

SEQ ID NO: 5841395 - DNA, 25 bp, Homo sapien
gccggattattgctgcaactggcaa

SEQ ID NO: 5841396 - DNA, 25 bp, Homo sapien
attgctgcaactggcaaacctgccg

SEQ ID NO: 5841397 - DNA, 25 bp, Homo sapien
cgccggaaagcgtgccaatcaacat

SEQ ID NO: 5841398 - DNA, 25 bp, Homo sapien
aagcgtgccaatcaacatgctggtg

SEQ ID NO: 5841399 - DNA, 25 bp, Homo sapien
caatcaacatgctggtgaaggtgaa

SEQ ID NO: 5841400 - DNA, 25 bp, Homo sapien
tggtgaaggtgaaaggcacgccgct

SEQ ID NO: 5841401 - DNA, 25 bp, Homo sapien
acgccgcttgccgataacgatgatg

SEQ ID NO: 5841402 - DNA, 25 bp, Homo sapien
gccggagttttacggcaatatcatc

SEQ ID NO: 5841403 - DNA, 25 bp, Homo sapien
ttgccgataacgatgatgtcgatgc

SEQ ID NO: 5841404 - DNA, 25 bp, Homo sapien
gttttacggcaatatcatcaccaca

SEQ ID NO: 5841405 - DNA, 25 bp, Homo sapien
acgatgatgtcgatgcctttgattt

SEQ ID NO: 5841406 - DNA, 25 bp, Homo sapien
gcaatatcatcaccacacgcactta

SEQ ID NO: 5841407 - DNA, 25 bp, Homo sapien
atcaccacacgcacttatcaggaac

SEQ ID NO: 5841408 - DNA, 25 bp, Homo sapien
acgcacttatcaggaacgcctcgat

SEQ ID NO: 5841409 - DNA, 25 bp, Homo sapien
atacgctggaaaaagtgcgcgatgc

SEQ ID NO: 5841410 - DNA, 25 bp, Homo sapien
ggaaaaagtgcgcgatgccgggatc

SEQ ID NO: 5841411 - DNA, 25 bp, Homo sapien
agtgcgcgatgccgggatcaaagtc

SEQ ID NO: 5841412 - DNA, 25 bp, Homo sapien
gccgggatcaaagtctgttctggcg

SEQ ID NO: 5841413 - DNA, 25 bp, Homo sapien
aagtctgttctggcggcattgtggg

SEQ ID NO: 5841414 - DNA, 25 bp, Homo sapien
aagatcgcgccggattattgctgca

SEQ ID NO: 5841415 - DNA, 25 bp, Homo sapien
gccggattattgctgcaactggcaa

SEQ ID NO: 5841416 - DNA, 25 bp, Homo sapien
attgctgcaactggcaaacctgccg

SEQ ID NO: 5841417 - DNA, 25 bp, Homo sapien
cgccggaaagcgtgccaatcaacat

SEQ ID NO: 5841418 - DNA, 25 bp, Homo sapien
aagcgtgccaatcaacatgctggtg

SEQ ID NO: 5841419 - DNA, 25 bp, Homo sapien
caatcaacatgctggtgaaggtgaa

SEQ ID NO: 5841420 - DNA, 25 bp, Homo sapien
tggtgaaggtgaaaggcacgccgct

SEQ ID NO: 5841421 - DNA, 25 bp, Homo sapien
acgccgcttgccgataacgatgatg

SEQ ID NO: 5841422 - DNA, 25 bp, Homo sapien
gccggagttttacggcaatatcatc

SEQ ID NO: 5841423 - DNA, 25 bp, Homo sapien
ttgccgataacgatgatgtcgatgc

SEQ ID NO: 5841424 - DNA, 25 bp, Homo sapien
gttttacggcaatatcatcaccaca

SEQ ID NO: 5841425 - DNA, 25 bp, Homo sapien
acgatgatgtcgatgcctttgattt

SEQ ID NO: 5841426 - DNA, 25 bp, Homo sapien
gcaatatcatcaccacacgcactta

SEQ ID NO: 5841427 - DNA, 25 bp, Homo sapien
atcaccacacgcacttatcaggaac

SEQ ID NO: 5841428 - DNA, 25 bp, Homo sapien
acgcacttatcaggaacgcctcgat

SEQ ID NO: 5841429 - DNA, 25 bp, Homo sapien
atacgctggaaaaagtgcgcgatgc

SEQ ID NO: 5841430 - DNA, 25 bp, Homo sapien
ggaaaaagtgcgcgatgccgggatc

SEQ ID NO: 5841431 - DNA, 25 bp, Homo sapien
agtgcgcgatgccgggatcaaagtc

SEQ ID NO: 5841432 - DNA, 25 bp, Homo sapien
gccgggatcaaagtctgttctggcg

SEQ ID NO: 5841433 - DNA, 25 bp, Homo sapien
aagtctgttctggcggcattgtggg

SEQ ID NO: 5841434 - DNA, 25 bp, Homo sapien
aagatcgcgccggattattgctgca

SEQ ID NO: 5841435 - DNA, 25 bp, Homo sapien
gccggattattgctgcaactggcaa

SEQ ID NO: 5841436 - DNA, 25 bp, Homo sapien
attgctgcaactggcaaacctgccg

SEQ ID NO: 5841437 - DNA, 25 bp, Homo sapien
cgccggaaagcgtgccaatcaacat

SEQ ID NO: 5841438 - DNA, 25 bp, Homo sapien
aagcgtgccaatcaacatgctggtg

SEQ ID NO: 5841439 - DNA, 25 bp, Homo sapien
caatcaacatgctggtgaaggtgaa

SEQ ID NO: 5841440 - DNA, 25 bp, Homo sapien
tggtgaaggtgaaaggcacgccgct

SEQ ID NO: 5841441 - DNA, 25 bp, Homo sapien
acgccgcttgccgataacgatgatg

SEQ ID NO: 5841442 - DNA, 25 bp, Homo sapien
gccggagttttacggcaatatcatc

SEQ ID NO: 5841443 - DNA, 25 bp, Homo sapien
ttgccgataacgatgatgtcgatgc

SEQ ID NO: 5841444 - DNA, 25 bp, Homo sapien
gttttacggcaatatcatcaccaca

SEQ ID NO: 5841445 - DNA, 25 bp, Homo sapien
acgatgatgtcgatgcctttgattt

SEQ ID NO: 5841446 - DNA, 25 bp, Homo sapien
gcaatatcatcaccacacgcactta

SEQ ID NO: 5841447 - DNA, 25 bp, Homo sapien
atcaccacacgcacttatcaggaac

SEQ ID NO: 5841448 - DNA, 25 bp, Homo sapien
acgcacttatcaggaacgcctcgat

SEQ ID NO: 5841449 - DNA, 25 bp, Homo sapien
atacgctggaaaaagtgcgcgatgc

SEQ ID NO: 5841450 - DNA, 25 bp, Homo sapien
ggaaaaagtgcgcgatgccgggatc

SEQ ID NO: 5841451 - DNA, 25 bp, Homo sapien
agtgcgcgatgccgggatcaaagtc

SEQ ID NO: 5841452 - DNA, 25 bp, Homo sapien
gccgggatcaaagtctgttctggcg

SEQ ID NO: 5841453 - DNA, 25 bp, Homo sapien
aagtctgttctggcggcattgtggg

SEQ ID NO: 5841454 - DNA, 25 bp, Homo sapien
aagatcgcgccggattattgctgca

SEQ ID NO: 5841455 - DNA, 25 bp, Homo sapien
gccggattattgctgcaactggcaa

SEQ ID NO: 5841456 - DNA, 25 bp, Homo sapien
attgctgcaactggcaaacctgccg

SEQ ID NO: 5841457 - DNA, 25 bp, Homo sapien
cgccggaaagcgtgccaatcaacat

SEQ ID NO: 5841458 - DNA, 25 bp, Homo sapien
aagcgtgccaatcaacatgctggtg

SEQ ID NO: 5841459 - DNA, 25 bp, Homo sapien
caatcaacatgctggtgaaggtgaa

SEQ ID NO: 5841460 - DNA, 25 bp, Homo sapien
tggtgaaggtgaaaggcacgccgct

SEQ ID NO: 5841461 - DNA, 25 bp, Homo sapien
acgccgcttgccgataacgatgatg

SEQ ID NO: 5841462 - DNA, 25 bp, Homo sapien
gccggagttttacggcaatatcatc

SEQ ID NO: 5841463 - DNA, 25 bp, Homo sapien
ttgccgataacgatgatgtcgatgc

SEQ ID NO: 5841464 - DNA, 25 bp, Homo sapien
gttttacggcaatatcatcaccaca

SEQ ID NO: 5841465 - DNA, 25 bp, Homo sapien
acgatgatgtcgatgcctttgattt

SEQ ID NO: 5841466 - DNA, 25 bp, Homo sapien
gcaatatcatcaccacacgcactta

SEQ ID NO: 5841467 - DNA, 25 bp, Homo sapien
atcaccacacgcacttatcaggaac

SEQ ID NO: 5841468 - DNA, 25 bp, Homo sapien
acgcacttatcaggaacgcctcgat

SEQ ID NO: 5841469 - DNA, 25 bp, Homo sapien
atacgctggaaaaagtgcgcgatgc

SEQ ID NO: 5841470 - DNA, 25 bp, Homo sapien
ggaaaaagtgcgcgatgccgggatc

SEQ ID NO: 5841471 - DNA, 25 bp, Homo sapien
agtgcgcgatgccgggatcaaagtc

SEQ ID NO: 5841472 - DNA, 25 bp, Homo sapien
gccgggatcaaagtctgttctggcg

SEQ ID NO: 5841473 - DNA, 25 bp, Homo sapien
aagtctgttctggcggcattgtggg

SEQ ID NO: 5841474 - DNA, 25 bp, Homo sapien
aagatcgcgccggattattgctgca

SEQ ID NO: 5841475 - DNA, 25 bp, Homo sapien
gccggattattgctgcaactggcaa

SEQ ID NO: 5841476 - DNA, 25 bp, Homo sapien
attgctgcaactggcaaacctgccg

SEQ ID NO: 5841477 - DNA, 25 bp, Homo sapien
cgccggaaagcgtgccaatcaacat

SEQ ID NO: 5841478 - DNA, 25 bp, Homo sapien
aagcgtgccaatcaacatgctggtg

SEQ ID NO: 5841479 - DNA, 25 bp, Homo sapien
caatcaacatgctggtgaaggtgaa

SEQ ID NO: 5841480 - DNA, 25 bp, Homo sapien
tggtgaaggtgaaaggcacgccgct

SEQ ID NO: 5841481 - DNA, 25 bp, Homo sapien
acgccgcttgccgataacgatgatg

SEQ ID NO: 5841482 - DNA, 25 bp, Homo sapien
gccggagttttacggcaatatcatc

SEQ ID NO: 5841483 - DNA, 25 bp, Homo sapien
ttgccgataacgatgatgtcgatgc

SEQ ID NO: 5841484 - DNA, 25 bp, Homo sapien
gttttacggcaatatcatcaccaca

SEQ ID NO: 5841485 - DNA, 25 bp, Homo sapien
acgatgatgtcgatgcctttgattt

SEQ ID NO: 5841486 - DNA, 25 bp, Homo sapien
gcaatatcatcaccacacgcactta

SEQ ID NO: 5841487 - DNA, 25 bp, Homo sapien
atcaccacacgcacttatcaggaac

SEQ ID NO: 5841488 - DNA, 25 bp, Homo sapien
acgcacttatcaggaacgcctcgat

SEQ ID NO: 5841489 - DNA, 25 bp, Homo sapien
atacgctggaaaaagtgcgcgatgc

SEQ ID NO: 5841490 - DNA, 25 bp, Homo sapien
ggaaaaagtgcgcgatgccgggatc

SEQ ID NO: 5841491 - DNA, 25 bp, Homo sapien
agtgcgcgatgccgggatcaaagtc

SEQ ID NO: 5841492 - DNA, 25 bp, Homo sapien
gccgggatcaaagtctgttctggcg

SEQ ID NO: 5841493 - DNA, 25 bp, Homo sapien
aagtctgttctggcggcattgtggg

SEQ ID NO: 5841494 - DNA, 25 bp, Homo sapien
aagatcgcgccggattattgctgca

SEQ ID NO: 5841495 - DNA, 25 bp, Homo sapien
gccggattattgctgcaactggcaa

SEQ ID NO: 5841496 - DNA, 25 bp, Homo sapien
attgctgcaactggcaaacctgccg

SEQ ID NO: 5841497 - DNA, 25 bp, Homo sapien
cgccggaaagcgtgccaatcaacat

SEQ ID NO: 5841498 - DNA, 25 bp, Homo sapien
aagcgtgccaatcaacatgctggtg

SEQ ID NO: 5841499 - DNA, 25 bp, Homo sapien
caatcaacatgctggtgaaggtgaa

SEQ ID NO: 5841500 - DNA, 25 bp, Homo sapien
tggtgaaggtgaaaggcacgccgct

SEQ ID NO: 5841501 - DNA, 25 bp, Homo sapien
acgccgcttgccgataacgatgatg

SEQ ID NO: 5841502 - DNA, 25 bp, Homo sapien
gccggagttttacggcaatatcatc

SEQ ID NO: 5841503 - DNA, 25 bp, Homo sapien
ttgccgataacgatgatgtcgatgc

SEQ ID NO: 5841504 - DNA, 25 bp, Homo sapien
gttttacggcaatatcatcaccaca

SEQ ID NO: 5841505 - DNA, 25 bp, Homo sapien
acgatgatgtcgatgcctttgattt

SEQ ID NO: 5841506 - DNA, 25 bp, Homo sapien
gcaatatcatcaccacacgcactta

SEQ ID NO: 5841507 - DNA, 25 bp, Homo sapien
atcaccacacgcacttatcaggaac

SEQ ID NO: 5841508 - DNA, 25 bp, Homo sapien
acgcacttatcaggaacgcctcgat

SEQ ID NO: 5841509 - DNA, 25 bp, Homo sapien
atacgctggaaaaagtgcgcgatgc

SEQ ID NO: 5841510 - DNA, 25 bp, Homo sapien
ggaaaaagtgcgcgatgccgggatc

SEQ ID NO: 5841511 - DNA, 25 bp, Homo sapien
agtgcgcgatgccgggatcaaagtc

SEQ ID NO: 5841512 - DNA, 25 bp, Homo sapien
gccgggatcaaagtctgttctggcg

SEQ ID NO: 5841513 - DNA, 25 bp, Homo sapien
aagtctgttctggcggcattgtggg

SEQ ID NO: 5841514 - DNA, 25 bp, Homo sapien
aagatcgcgccggattattgctgca

SEQ ID NO: 5841515 - DNA, 25 bp, Homo sapien
gccggattattgctgcaactggcaa

SEQ ID NO: 5841516 - DNA, 25 bp, Homo sapien
attgctgcaactggcaaacctgccg

SEQ ID NO: 5841517 - DNA, 25 bp, Homo sapien
cgccggaaagcgtgccaatcaacat

SEQ ID NO: 5841518 - DNA, 25 bp, Homo sapien
aagcgtgccaatcaacatgctggtg

SEQ ID NO: 5841519 - DNA, 25 bp, Homo sapien
caatcaacatgctggtgaaggtgaa

SEQ ID NO: 5841520 - DNA, 25 bp, Homo sapien
tggtgaaggtgaaaggcacgccgct

SEQ ID NO: 5841521 - DNA, 25 bp, Homo sapien
acgccgcttgccgataacgatgatg

SEQ ID NO: 5841522 - DNA, 25 bp, Homo sapien
gccggagttttacggcaatatcatc

SEQ ID NO: 5841523 - DNA, 25 bp, Homo sapien
ttgccgataacgatgatgtcgatgc

SEQ ID NO: 5841524 - DNA, 25 bp, Homo sapien
gttttacggcaatatcatcaccaca

SEQ ID NO: 5841525 - DNA, 25 bp, Homo sapien
acgatgatgtcgatgcctttgattt

SEQ ID NO: 5841526 - DNA, 25 bp, Homo sapien
gcaatatcatcaccacacgcactta

SEQ ID NO: 5841527 - DNA, 25 bp, Homo sapien
atcaccacacgcacttatcaggaac

SEQ ID NO: 5841528 - DNA, 25 bp, Homo sapien
acgcacttatcaggaacgcctcgat

SEQ ID NO: 5841529 - DNA, 25 bp, Homo sapien
atacgctggaaaaagtgcgcgatgc

SEQ ID NO: 5841530 - DNA, 25 bp, Homo sapien
ggaaaaagtgcgcgatgccgggatc

SEQ ID NO: 5841531 - DNA, 25 bp, Homo sapien
agtgcgcgatgccgggatcaaagtc

SEQ ID NO: 5841532 - DNA, 25 bp, Homo sapien
gccgggatcaaagtctgttctggcg

SEQ ID NO: 5841533 - DNA, 25 bp, Homo sapien
aagtctgttctggcggcattgtggg

SEQ ID NO: 5841534 - DNA, 25 bp, Homo sapien
aagatcgcgccggattattgctgca

SEQ ID NO: 5841535 - DNA, 25 bp, Homo sapien
gccggattattgctgcaactggcaa

SEQ ID NO: 5841536 - DNA, 25 bp, Homo sapien
attgctgcaactggcaaacctgccg

SEQ ID NO: 5841537 - DNA, 25 bp, Homo sapien
cgccggaaagcgtgccaatcaacat

SEQ ID NO: 5841538 - DNA, 25 bp, Homo sapien
aagcgtgccaatcaacatgctggtg

SEQ ID NO: 5841539 - DNA, 25 bp, Homo sapien
caatcaacatgctggtgaaggtgaa

SEQ ID NO: 5841540 - DNA, 25 bp, Homo sapien
tggtgaaggtgaaaggcacgccgct

SEQ ID NO: 5841541 - DNA, 25 bp, Homo sapien
acgccgcttgccgataacgatgatg

SEQ ID NO: 5841542 - DNA, 25 bp, Homo sapien
gccggagttttacggcaatatcatc

SEQ ID NO: 5841543 - DNA, 25 bp, Homo sapien
ttgccgataacgatgatgtcgatgc

SEQ ID NO: 5841544 - DNA, 25 bp, Homo sapien
gttttacggcaatatcatcaccaca

SEQ ID NO: 5841545 - DNA, 25 bp, Homo sapien
acgatgatgtcgatgcctttgattt

SEQ ID NO: 5841546 - DNA, 25 bp, Homo sapien
gcaatatcatcaccacacgcactta

SEQ ID NO: 5841547 - DNA, 25 bp, Homo sapien
atcaccacacgcacttatcaggaac

SEQ ID NO: 5841548 - DNA, 25 bp, Homo sapien
acgcacttatcaggaacgcctcgat

SEQ ID NO: 5841549 - DNA, 25 bp, Homo sapien
atacgctggaaaaagtgcgcgatgc

SEQ ID NO: 5841550 - DNA, 25 bp, Homo sapien
ggaaaaagtgcgcgatgccgggatc

SEQ ID NO: 5841551 - DNA, 25 bp, Homo sapien
agtgcgcgatgccgggatcaaagtc

SEQ ID NO: 5841552 - DNA, 25 bp, Homo sapien
gccgggatcaaagtctgttctggcg

SEQ ID NO: 5841553 - DNA, 25 bp, Homo sapien
aagtctgttctggcggcattgtggg

SEQ ID NO: 5841554 - DNA, 25 bp, Homo sapien
aagatcgcgccggattattgctgca

SEQ ID NO: 5841555 - DNA, 25 bp, Homo sapien
gccggattattgctgcaactggcaa

SEQ ID NO: 5841556 - DNA, 25 bp, Homo sapien
attgctgcaactggcaaacctgccg

SEQ ID NO: 5841557 - DNA, 25 bp, Homo sapien
cgccggaaagcgtgccaatcaacat

SEQ ID NO: 5841558 - DNA, 25 bp, Homo sapien
aagcgtgccaatcaacatgctggtg

SEQ ID NO: 5841559 - DNA, 25 bp, Homo sapien
caatcaacatgctggtgaaggtgaa

SEQ ID NO: 5841560 - DNA, 25 bp, Homo sapien
tggtgaaggtgaaaggcacgccgct

SEQ ID NO: 5841561 - DNA, 25 bp, Homo sapien
acgccgcttgccgataacgatgatg

SEQ ID NO: 5841562 - DNA, 25 bp, Homo sapien
gccggagttttacggcaatatcatc

SEQ ID NO: 5841563 - DNA, 25 bp, Homo sapien
ttgccgataacgatgatgtcgatgc

SEQ ID NO: 5841564 - DNA, 25 bp, Homo sapien
gttttacggcaatatcatcaccaca

SEQ ID NO: 5841565 - DNA, 25 bp, Homo sapien
acgatgatgtcgatgcctttgattt

SEQ ID NO: 5841566 - DNA, 25 bp, Homo sapien
gcaatatcatcaccacacgcactta

SEQ ID NO: 5841567 - DNA, 25 bp, Homo sapien
atcaccacacgcacttatcaggaac

SEQ ID NO: 5841568 - DNA, 25 bp, Homo sapien
acgcacttatcaggaacgcctcgat

SEQ ID NO: 5841569 - DNA, 25 bp, Homo sapien
atacgctggaaaaagtgcgcgatgc

SEQ ID NO: 5841570 - DNA, 25 bp, Homo sapien
ggaaaaagtgcgcgatgccgggatc

SEQ ID NO: 5841571 - DNA, 25 bp, Homo sapien
agtgcgcgatgccgggatcaaagtc

SEQ ID NO: 5841572 - DNA, 25 bp, Homo sapien
gccgggatcaaagtctgttctggcg

SEQ ID NO: 5841573 - DNA, 25 bp, Homo sapien
aagtctgttctggcggcattgtggg

SEQ ID NO: 5841574 - DNA, 25 bp, Homo sapien
aagatcgcgccggattattgctgca

SEQ ID NO: 5841575 - DNA, 25 bp, Homo sapien
gccggattattgctgcaactggcaa

SEQ ID NO: 5841576 - DNA, 25 bp, Homo sapien
attgctgcaactggcaaacctgccg

SEQ ID NO: 5841577 - DNA, 25 bp, Homo sapien
cgccggaaagcgtgccaatcaacat

SEQ ID NO: 5841578 - DNA, 25 bp, Homo sapien
aagcgtgccaatcaacatgctggtg

SEQ ID NO: 5841579 - DNA, 25 bp, Homo sapien
caatcaacatgctggtgaaggtgaa

SEQ ID NO: 5841580 - DNA, 25 bp, Homo sapien
tggtgaaggtgaaaggcacgccgct

SEQ ID NO: 5841581 - DNA, 25 bp, Homo sapien
acgccgcttgccgataacgatgatg

SEQ ID NO: 5841582 - DNA, 25 bp, Homo sapien
gccggagttttacggcaatatcatc

SEQ ID NO: 5841583 - DNA, 25 bp, Homo sapien
ttgccgataacgatgatgtcgatgc

SEQ ID NO: 5841584 - DNA, 25 bp, Homo sapien
gttttacggcaatatcatcaccaca

SEQ ID NO: 5841585 - DNA, 25 bp, Homo sapien
acgatgatgtcgatgcctttgattt

SEQ ID NO: 5841586 - DNA, 25 bp, Homo sapien
gcaatatcatcaccacacgcactta

SEQ ID NO: 5841587 - DNA, 25 bp, Homo sapien
atcaccacacgcacttatcaggaac

SEQ ID NO: 5841588 - DNA, 25 bp, Homo sapien
acgcacttatcaggaacgcctcgat

SEQ ID NO: 5841589 - DNA, 25 bp, Homo sapien
atacgctggaaaaagtgcgcgatgc

SEQ ID NO: 5841590 - DNA, 25 bp, Homo sapien
ggaaaaagtgcgcgatgccgggatc

SEQ ID NO: 5841591 - DNA, 25 bp, Homo sapien
agtgcgcgatgccgggatcaaagtc

SEQ ID NO: 5841592 - DNA, 25 bp, Homo sapien
gccgggatcaaagtctgttctggcg

SEQ ID NO: 5841593 - DNA, 25 bp, Homo sapien
aagtctgttctggcggcattgtggg

SEQ ID NO: 5841594 - DNA, 25 bp, Homo sapien
aagatcgcgccggattattgctgca

SEQ ID NO: 5841595 - DNA, 25 bp, Homo sapien
gccggattattgctgcaactggcaa

SEQ ID NO: 5841596 - DNA, 25 bp, Homo sapien
attgctgcaactggcaaacctgccg

SEQ ID NO: 5841597 - DNA, 25 bp, Homo sapien
cgccggaaagcgtgccaatcaacat

SEQ ID NO: 5841598 - DNA, 25 bp, Homo sapien
aagcgtgccaatcaacatgctggtg

SEQ ID NO: 5841599 - DNA, 25 bp, Homo sapien
caatcaacatgctggtgaaggtgaa

SEQ ID NO: 5841600 - DNA, 25 bp, Homo sapien
tggtgaaggtgaaaggcacgccgct

SEQ ID NO: 5841601 - DNA, 25 bp, Homo sapien
acgccgcttgccgataacgatgatg

SEQ ID NO: 5841602 - DNA, 25 bp, Homo sapien
gccggagttttacggcaatatcatc

SEQ ID NO: 5841603 - DNA, 25 bp, Homo sapien
ttgccgataacgatgatgtcgatgc

SEQ ID NO: 5841604 - DNA, 25 bp, Homo sapien
gttttacggcaatatcatcaccaca

SEQ ID NO: 5841605 - DNA, 25 bp, Homo sapien
acgatgatgtcgatgcctttgattt

SEQ ID NO: 5841606 - DNA, 25 bp, Homo sapien
gcaatatcatcaccacacgcactta

SEQ ID NO: 5841607 - DNA, 25 bp, Homo sapien
atcaccacacgcacttatcaggaac

SEQ ID NO: 5841608 - DNA, 25 bp, Homo sapien
acgcacttatcaggaacgcctcgat

SEQ ID NO: 5841609 - DNA, 25 bp, Homo sapien
atacgctggaaaaagtgcgcgatgc

SEQ ID NO: 5841610 - DNA, 25 bp, Homo sapien
ggaaaaagtgcgcgatgccgggatc

SEQ ID NO: 5841611 - DNA, 25 bp, Homo sapien
agtgcgcgatgccgggatcaaagtc

SEQ ID NO: 5841612 - DNA, 25 bp, Homo sapien
gccgggatcaaagtctgttctggcg

SEQ ID NO: 5841613 - DNA, 25 bp, Homo sapien
aagtctgttctggcggcattgtggg

SEQ ID NO: 5841614 - DNA, 25 bp, Homo sapien
aagatcgcgccggattattgctgca

SEQ ID NO: 5841615 - DNA, 25 bp, Homo sapien
gccggattattgctgcaactggcaa

SEQ ID NO: 5841616 - DNA, 25 bp, Homo sapien
attgctgcaactggcaaacctgccg

SEQ ID NO: 5841617 - DNA, 25 bp, Homo sapien
cgccggaaagcgtgccaatcaacat

SEQ ID NO: 5841618 - DNA, 25 bp, Homo sapien
aagcgtgccaatcaacatgctggtg

SEQ ID NO: 5841619 - DNA, 25 bp, Homo sapien
caatcaacatgctggtgaaggtgaa

SEQ ID NO: 5841620 - DNA, 25 bp, Homo sapien
tggtgaaggtgaaaggcacgccgct

SEQ ID NO: 5841621 - DNA, 25 bp, Homo sapien
acgccgcttgccgataacgatgatg

SEQ ID NO: 5841622 - DNA, 25 bp, Homo sapien
gccggagttttacggcaatatcatc

SEQ ID NO: 5841623 - DNA, 25 bp, Homo sapien
ttgccgataacgatgatgtcgatgc

SEQ ID NO: 5841624 - DNA, 25 bp, Homo sapien
gttttacggcaatatcatcaccaca

SEQ ID NO: 5841625 - DNA, 25 bp, Homo sapien
acgatgatgtcgatgcctttgattt

SEQ ID NO: 5841626 - DNA, 25 bp, Homo sapien
gcaatatcatcaccacacgcactta

SEQ ID NO: 5841627 - DNA, 25 bp, Homo sapien
atcaccacacgcacttatcaggaac

SEQ ID NO: 5841628 - DNA, 25 bp, Homo sapien
acgcacttatcaggaacgcctcgat

SEQ ID NO: 5841629 - DNA, 25 bp, Homo sapien
atacgctggaaaaagtgcgcgatgc

SEQ ID NO: 5841630 - DNA, 25 bp, Homo sapien
ggaaaaagtgcgcgatgccgggatc

SEQ ID NO: 5841631 - DNA, 25 bp, Homo sapien
agtgcgcgatgccgggatcaaagtc

SEQ ID NO: 5841632 - DNA, 25 bp, Homo sapien
gccgggatcaaagtctgttctggcg

SEQ ID NO: 5841633 - DNA, 25 bp, Homo sapien
aagtctgttctggcggcattgtggg

SEQ ID NO: 5841634 - DNA, 25 bp, Homo sapien
aagatcgcgccggattattgctgca

SEQ ID NO: 5841635 - DNA, 25 bp, Homo sapien
gccggattattgctgcaactggcaa

SEQ ID NO: 5841636 - DNA, 25 bp, Homo sapien
attgctgcaactggcaaacctgccg

SEQ ID NO: 5841637 - DNA, 25 bp, Homo sapien
cgccggaaagcgtgccaatcaacat

SEQ ID NO: 5841638 - DNA, 25 bp, Homo sapien
aagcgtgccaatcaacatgctggtg

SEQ ID NO: 5841639 - DNA, 25 bp, Homo sapien
caatcaacatgctggtgaaggtgaa

SEQ ID NO: 5841640 - DNA, 25 bp, Homo sapien
tggtgaaggtgaaaggcacgccgct

SEQ ID NO: 5841641 - DNA, 25 bp, Homo sapien
acgccgcttgccgataacgatgatg

SEQ ID NO: 5841642 - DNA, 25 bp, Homo sapien
gccggagttttacggcaatatcatc

SEQ ID NO: 5841643 - DNA, 25 bp, Homo sapien
ttgccgataacgatgatgtcgatgc

SEQ ID NO: 5841644 - DNA, 25 bp, Homo sapien
gttttacggcaatatcatcaccaca

SEQ ID NO: 5841645 - DNA, 25 bp, Homo sapien
acgatgatgtcgatgcctttgattt

SEQ ID NO: 5841646 - DNA, 25 bp, Homo sapien
gcaatatcatcaccacacgcactta

SEQ ID NO: 5841647 - DNA, 25 bp, Homo sapien
atcaccacacgcacttatcaggaac

SEQ ID NO: 5841648 - DNA, 25 bp, Homo sapien
acgcacttatcaggaacgcctcgat

SEQ ID NO: 5841649 - DNA, 25 bp, Homo sapien
atacgctggaaaaagtgcgcgatgc

SEQ ID NO: 5841650 - DNA, 25 bp, Homo sapien
ggaaaaagtgcgcgatgccgggatc

SEQ ID NO: 5841651 - DNA, 25 bp, Homo sapien
agtgcgcgatgccgggatcaaagtc

SEQ ID NO: 5841652 - DNA, 25 bp, Homo sapien
gccgggatcaaagtctgttctggcg

SEQ ID NO: 5841653 - DNA, 25 bp, Homo sapien
aagtctgttctggcggcattgtggg

SEQ ID NO: 5841654 - DNA, 25 bp, Homo sapien
aagatcgcgccggattattgctgca

SEQ ID NO: 5841655 - DNA, 25 bp, Homo sapien
gccggattattgctgcaactggcaa

SEQ ID NO: 5841656 - DNA, 25 bp, Homo sapien
attgctgcaactggcaaacctgccg

SEQ ID NO: 5841657 - DNA, 25 bp, Homo sapien
cgccggaaagcgtgccaatcaacat

SEQ ID NO: 5841658 - DNA, 25 bp, Homo sapien
aagcgtgccaatcaacatgctggtg

SEQ ID NO: 5841659 - DNA, 25 bp, Homo sapien
caatcaacatgctggtgaaggtgaa

SEQ ID NO: 5841660 - DNA, 25 bp, Homo sapien
tggtgaaggtgaaaggcacgccgct

SEQ ID NO: 5841661 - DNA, 25 bp, Homo sapien
acgccgcttgccgataacgatgatg

SEQ ID NO: 5841662 - DNA, 25 bp, Homo sapien
gccggagttttacggcaatatcatc

SEQ ID NO: 5841663 - DNA, 25 bp, Homo sapien
ttgccgataacgatgatgtcgatgc

SEQ ID NO: 5841664 - DNA, 25 bp, Homo sapien
gttttacggcaatatcatcaccaca

SEQ ID NO: 5841665 - DNA, 25 bp, Homo sapien
acgatgatgtcgatgcctttgattt

SEQ ID NO: 5841666 - DNA, 25 bp, Homo sapien
gcaatatcatcaccacacgcactta

SEQ ID NO: 5841667 - DNA, 25 bp, Homo sapien
atcaccacacgcacttatcaggaac

SEQ ID NO: 5841668 - DNA, 25 bp, Homo sapien
acgcacttatcaggaacgcctcgat

SEQ ID NO: 5841669 - DNA, 25 bp, Homo sapien
atacgctggaaaaagtgcgcgatgc

SEQ ID NO: 5841670 - DNA, 25 bp, Homo sapien
ggaaaaagtgcgcgatgccgggatc

SEQ ID NO: 5841671 - DNA, 25 bp, Homo sapien
agtgcgcgatgccgggatcaaagtc

SEQ ID NO: 5841672 - DNA, 25 bp, Homo sapien
gccgggatcaaagtctgttctggcg

SEQ ID NO: 5841673 - DNA, 25 bp, Homo sapien
aagtctgttctggcggcattgtggg

SEQ ID NO: 5841674 - DNA, 25 bp, Homo sapien
aagatcgcgccggattattgctgca

SEQ ID NO: 5841675 - DNA, 25 bp, Homo sapien
gccggattattgctgcaactggcaa

SEQ ID NO: 5841676 - DNA, 25 bp, Homo sapien
attgctgcaactggcaaacctgccg

SEQ ID NO: 5841677 - DNA, 25 bp, Homo sapien
cgccggaaagcgtgccaatcaacat

SEQ ID NO: 5841678 - DNA, 25 bp, Homo sapien
aagcgtgccaatcaacatgctggtg

SEQ ID NO: 5841679 - DNA, 25 bp, Homo sapien
caatcaacatgctggtgaaggtgaa

SEQ ID NO: 5841680 - DNA, 25 bp, Homo sapien
tggtgaaggtgaaaggcacgccgct

SEQ ID NO: 5841681 - DNA, 25 bp, Homo sapien
acgccgcttgccgataacgatgatg

SEQ ID NO: 5841682 - DNA, 25 bp, Homo sapien
gccggagttttacggcaatatcatc

SEQ ID NO: 5841683 - DNA, 25 bp, Homo sapien
ttgccgataacgatgatgtcgatgc

SEQ ID NO: 5841684 - DNA, 25 bp, Homo sapien
gttttacggcaatatcatcaccaca

SEQ ID NO: 5841685 - DNA, 25 bp, Homo sapien
acgatgatgtcgatgcctttgattt

SEQ ID NO: 5841686 - DNA, 25 bp, Homo sapien
gcaatatcatcaccacacgcactta

SEQ ID NO: 5841687 - DNA, 25 bp, Homo sapien
atcaccacacgcacttatcaggaac

SEQ ID NO: 5841688 - DNA, 25 bp, Homo sapien
acgcacttatcaggaacgcctcgat

SEQ ID NO: 5841689 - DNA, 25 bp, Homo sapien
atacgctggaaaaagtgcgcgatgc

SEQ ID NO: 5841690 - DNA, 25 bp, Homo sapien
ggaaaaagtgcgcgatgccgggatc

SEQ ID NO: 5841691 - DNA, 25 bp, Homo sapien
agtgcgcgatgccgggatcaaagtc

SEQ ID NO: 5841692 - DNA, 25 bp, Homo sapien
gccgggatcaaagtctgttctggcg

SEQ ID NO: 5841693 - DNA, 25 bp, Homo sapien
aagtctgttctggcggcattgtggg

SEQ ID NO: 5841694 - DNA, 25 bp, Homo sapien
aagatcgcgccggattattgctgca

SEQ ID NO: 5841695 - DNA, 25 bp, Homo sapien
gccggattattgctgcaactggcaa

SEQ ID NO: 5841696 - DNA, 25 bp, Homo sapien
attgctgcaactggcaaacctgccg

SEQ ID NO: 5841697 - DNA, 25 bp, Homo sapien
cgccggaaagcgtgccaatcaacat

SEQ ID NO: 5841698 - DNA, 25 bp, Homo sapien
aagcgtgccaatcaacatgctggtg

SEQ ID NO: 5841699 - DNA, 25 bp, Homo sapien
caatcaacatgctggtgaaggtgaa

SEQ ID NO: 5841700 - DNA, 25 bp, Homo sapien
tggtgaaggtgaaaggcacgccgct

SEQ ID NO: 5841701 - DNA, 25 bp, Homo sapien
acgccgcttgccgataacgatgatg

SEQ ID NO: 5841702 - DNA, 25 bp, Homo sapien
gccggagttttacggcaatatcatc

SEQ ID NO: 5841703 - DNA, 25 bp, Homo sapien
ttgccgataacgatgatgtcgatgc

SEQ ID NO: 5841704 - DNA, 25 bp, Homo sapien
gttttacggcaatatcatcaccaca

SEQ ID NO: 5841705 - DNA, 25 bp, Homo sapien
acgatgatgtcgatgcctttgattt

SEQ ID NO: 5841706 - DNA, 25 bp, Homo sapien
gcaatatcatcaccacacgcactta

SEQ ID NO: 5841707 - DNA, 25 bp, Homo sapien
atcaccacacgcacttatcaggaac

SEQ ID NO: 5841708 - DNA, 25 bp, Homo sapien
acgcacttatcaggaacgcctcgat

SEQ ID NO: 5841709 - DNA, 25 bp, Homo sapien
atacgctggaaaaagtgcgcgatgc

SEQ ID NO: 5841710 - DNA, 25 bp, Homo sapien
ggaaaaagtgcgcgatgccgggatc

SEQ ID NO: 5841711 - DNA, 25 bp, Homo sapien
agtgcgcgatgccgggatcaaagtc

SEQ ID NO: 5841712 - DNA, 25 bp, Homo sapien
gccgggatcaaagtctgttctggcg

SEQ ID NO: 5841713 - DNA, 25 bp, Homo sapien
aagtctgttctggcggcattgtggg

SEQ ID NO: 5841714 - DNA, 25 bp, Homo sapien
aagatcgcgccggattattgctgca

SEQ ID NO: 5841715 - DNA, 25 bp, Homo sapien
gccggattattgctgcaactggcaa

SEQ ID NO: 5841716 - DNA, 25 bp, Homo sapien
attgctgcaactggcaaacctgccg

SEQ ID NO: 5841717 - DNA, 25 bp, Homo sapien
cgccggaaagcgtgccaatcaacat

SEQ ID NO: 5841718 - DNA, 25 bp, Homo sapien
aagcgtgccaatcaacatgctggtg

SEQ ID NO: 5841719 - DNA, 25 bp, Homo sapien
caatcaacatgctggtgaaggtgaa

SEQ ID NO: 5841720 - DNA, 25 bp, Homo sapien
tggtgaaggtgaaaggcacgccgct

SEQ ID NO: 5841721 - DNA, 25 bp, Homo sapien
acgccgcttgccgataacgatgatg

SEQ ID NO: 5841722 - DNA, 25 bp, Homo sapien
gccggagttttacggcaatatcatc

SEQ ID NO: 5841723 - DNA, 25 bp, Homo sapien
ttgccgataacgatgatgtcgatgc

SEQ ID NO: 5841724 - DNA, 25 bp, Homo sapien
gttttacggcaatatcatcaccaca

SEQ ID NO: 5841725 - DNA, 25 bp, Homo sapien
acgatgatgtcgatgcctttgattt

SEQ ID NO: 5841726 - DNA, 25 bp, Homo sapien
gcaatatcatcaccacacgcactta

SEQ ID NO: 5841727 - DNA, 25 bp, Homo sapien
atcaccacacgcacttatcaggaac

SEQ ID NO: 5841728 - DNA, 25 bp, Homo sapien
acgcacttatcaggaacgcctcgat

SEQ ID NO: 5841729 - DNA, 25 bp, Homo sapien
atacgctggaaaaagtgcgcgatgc

SEQ ID NO: 5841730 - DNA, 25 bp, Homo sapien
ggaaaaagtgcgcgatgccgggatc

SEQ ID NO: 5841731 - DNA, 25 bp, Homo sapien
agtgcgcgatgccgggatcaaagtc

SEQ ID NO: 5841732 - DNA, 25 bp, Homo sapien
gccgggatcaaagtctgttctggcg

SEQ ID NO: 5841733 - DNA, 25 bp, Homo sapien
aagtctgttctggcggcattgtggg

SEQ ID NO: 5841734 - DNA, 25 bp, Homo sapien
aagatcgcgccggattattgctgca

SEQ ID NO: 5841735 - DNA, 25 bp, Homo sapien
gccggattattgctgcaactggcaa

SEQ ID NO: 5841736 - DNA, 25 bp, Homo sapien
attgctgcaactggcaaacctgccg

SEQ ID NO: 5841737 - DNA, 25 bp, Homo sapien
cgccggaaagcgtgccaatcaacat

SEQ ID NO: 5841738 - DNA, 25 bp, Homo sapien
aagcgtgccaatcaacatgctggtg

SEQ ID NO: 5841739 - DNA, 25 bp, Homo sapien
caatcaacatgctggtgaaggtgaa

SEQ ID NO: 5841740 - DNA, 25 bp, Homo sapien
tggtgaaggtgaaaggcacgccgct

SEQ ID NO: 5841741 - DNA, 25 bp, Homo sapien
acgccgcttgccgataacgatgatg

SEQ ID NO: 5841742 - DNA, 25 bp, Homo sapien
gccggagttttacggcaatatcatc

SEQ ID NO: 5841743 - DNA, 25 bp, Homo sapien
ttgccgataacgatgatgtcgatgc

SEQ ID NO: 5841744 - DNA, 25 bp, Homo sapien
gttttacggcaatatcatcaccaca

SEQ ID NO: 5841745 - DNA, 25 bp, Homo sapien
acgatgatgtcgatgcctttgattt

SEQ ID NO: 5841746 - DNA, 25 bp, Homo sapien
gcaatatcatcaccacacgcactta

SEQ ID NO: 5841747 - DNA, 25 bp, Homo sapien
atcaccacacgcacttatcaggaac

SEQ ID NO: 5841748 - DNA, 25 bp, Homo sapien
acgcacttatcaggaacgcctcgat

SEQ ID NO: 5841749 - DNA, 25 bp, Homo sapien
atacgctggaaaaagtgcgcgatgc

SEQ ID NO: 5841750 - DNA, 25 bp, Homo sapien
ggaaaaagtgcgcgatgccgggatc

SEQ ID NO: 5841751 - DNA, 25 bp, Homo sapien
agtgcgcgatgccgggatcaaagtc

SEQ ID NO: 5841752 - DNA, 25 bp, Homo sapien
gccgggatcaaagtctgttctggcg

SEQ ID NO: 5841753 - DNA, 25 bp, Homo sapien
aagtctgttctggcggcattgtggg

SEQ ID NO: 5841754 - DNA, 25 bp, Homo sapien
aagatcgcgccggattattgctgca

SEQ ID NO: 5841755 - DNA, 25 bp, Homo sapien
gccggattattgctgcaactggcaa

SEQ ID NO: 5841756 - DNA, 25 bp, Homo sapien
attgctgcaactggcaaacctgccg

SEQ ID NO: 5841757 - DNA, 25 bp, Homo sapien
cgccggaaagcgtgccaatcaacat

SEQ ID NO: 5841758 - DNA, 25 bp, Homo sapien
aagcgtgccaatcaacatgctggtg

SEQ ID NO: 5841759 - DNA, 25 bp, Homo sapien
caatcaacatgctggtgaaggtgaa

SEQ ID NO: 5841760 - DNA, 25 bp, Homo sapien
atgatgcgctcagtgccatgcgttc

SEQ ID NO: 5841761 - DNA, 25 bp, Homo sapien
ctcagtgccatgcgttcgctgaaag

SEQ ID NO: 5841762 - DNA, 25 bp, Homo sapien
catgcgttcgctgaaaggcatcggt

SEQ ID NO: 5841763 - DNA, 25 bp, Homo sapien
ctgaaaggcatcggtgccacgcatc

SEQ ID NO: 5841764 - DNA, 25 bp, Homo sapien
ggcatcggtgccacgcatcttcatg

SEQ ID NO: 5841765 - DNA, 25 bp, Homo sapien
tgccacgcatcttcatgaagggcgc

SEQ ID NO: 5841766 - DNA, 25 bp, Homo sapien
atcttcatgaagggcgcgacccgcg

SEQ ID NO: 5841767 - DNA, 25 bp, Homo sapien
attaacgcgttcgcagttgcagcga

SEQ ID NO: 5841768 - DNA, 25 bp, Homo sapien
tacccgaacgtcatcaggcgtggca

SEQ ID NO: 5841769 - DNA, 25 bp, Homo sapien
gcgttcgcagttgcagcgattgcaa

SEQ ID NO: 5841770 - DNA, 25 bp, Homo sapien
ggtggacgagcgtccgcatgctaat

SEQ ID NO: 5841771 - DNA, 25 bp, Homo sapien
agttgcagcgattgcaactggcctg

SEQ ID NO: 5841772 - DNA, 25 bp, Homo sapien
cgtccgcatgctaatcgctttttac

SEQ ID NO: 5841773 - DNA, 25 bp, Homo sapien
tttaccgccagatgaaatcgaacag

SEQ ID NO: 5841774 - DNA, 25 bp, Homo sapien
gatgaaatcgaacagtcgctgaacg

SEQ ID NO: 5841775 - DNA, 25 bp, Homo sapien
aacagtcgctgaacggcgtgcatta

SEQ ID NO: 5841776 - DNA, 25 bp, Homo sapien
acatcatattcagcccatcacgctg

SEQ ID NO: 5841777 - DNA, 25 bp, Homo sapien
ttcagcccatcacgctgtggtttga

SEQ ID NO: 5841778 - DNA, 25 bp, Homo sapien
atcacgctgtggtttgatgatgcgc

SEQ ID NO: 5841779 - DNA, 25 bp, Homo sapien
ggtttgatgatgcgctcagtgccat

SEQ ID NO: 5841780 - DNA, 25 bp, Homo sapien
atgatgcgctcagtgccatgcgttc

SEQ ID NO: 5841781 - DNA, 25 bp, Homo sapien
ctcagtgccatgcgttcgctgaaag

SEQ ID NO: 5841782 - DNA, 25 bp, Homo sapien
catgcgttcgctgaaaggcatcggt

SEQ ID NO: 5841783 - DNA, 25 bp, Homo sapien
ctgaaaggcatcggtgccacgcatc

SEQ ID NO: 5841784 - DNA, 25 bp, Homo sapien
ggcatcggtgccacgcatcttcatg

SEQ ID NO: 5841785 - DNA, 25 bp, Homo sapien
tgccacgcatcttcatgaagggcgc

SEQ ID NO: 5841786 - DNA, 25 bp, Homo sapien
atcttcatgaagggcgcgacccgcg

SEQ ID NO: 5841787 - DNA, 25 bp, Homo sapien
attaacgcgttcgcagttgcagcga

SEQ ID NO: 5841788 - DNA, 25 bp, Homo sapien
tacccgaacgtcatcaggcgtggca

SEQ ID NO: 5841789 - DNA, 25 bp, Homo sapien
gcgttcgcagttgcagcgattgcaa

SEQ ID NO: 5841790 - DNA, 25 bp, Homo sapien
ggtggacgagcgtccgcatgctaat

SEQ ID NO: 5841791 - DNA, 25 bp, Homo sapien
agttgcagcgattgcaactggcctg

SEQ ID NO: 5841792 - DNA, 25 bp, Homo sapien
cgtccgcatgctaatcgctttttac

SEQ ID NO: 5841793 - DNA, 25 bp, Homo sapien
tttaccgccagatgaaatcgaacag

SEQ ID NO: 5841794 - DNA, 25 bp, Homo sapien
gatgaaatcgaacagtcgctgaacg

SEQ ID NO: 5841795 - DNA, 25 bp, Homo sapien
aacagtcgctgaacggcgtgcatta

SEQ ID NO: 5841796 - DNA, 25 bp, Homo sapien
acatcatattcagcccatcacgctg

SEQ ID NO: 5841797 - DNA, 25 bp, Homo sapien
ttcagcccatcacgctgtggtttga

SEQ ID NO: 5841798 - DNA, 25 bp, Homo sapien
atcacgctgtggtttgatgatgcgc

SEQ ID NO: 5841799 - DNA, 25 bp, Homo sapien
ggtttgatgatgcgctcagtgccat

SEQ ID NO: 5841800 - DNA, 25 bp, Homo sapien
atgatgcgctcagtgccatgcgttc

SEQ ID NO: 5841801 - DNA, 25 bp, Homo sapien
ctcagtgccatgcgttcgctgaaag

SEQ ID NO: 5841802 - DNA, 25 bp, Homo sapien
catgcgttcgctgaaaggcatcggt

SEQ ID NO: 5841803 - DNA, 25 bp, Homo sapien
ctgaaaggcatcggtgccacgcatc

SEQ ID NO: 5841804 - DNA, 25 bp, Homo sapien
ggcatcggtgccacgcatcttcatg

SEQ ID NO: 5841805 - DNA, 25 bp, Homo sapien
tgccacgcatcttcatgaagggcgc

SEQ ID NO: 5841806 - DNA, 25 bp, Homo sapien
atcttcatgaagggcgcgacccgcg

SEQ ID NO: 5841807 - DNA, 25 bp, Homo sapien
attaacgcgttcgcagttgcagcga

SEQ ID NO: 5841808 - DNA, 25 bp, Homo sapien
tacccgaacgtcatcaggcgtggca

SEQ ID NO: 5841809 - DNA, 25 bp, Homo sapien
gcgttcgcagttgcagcgattgcaa

SEQ ID NO: 5841810 - DNA, 25 bp, Homo sapien
ggtggacgagcgtccgcatgctaat

SEQ ID NO: 5841811 - DNA, 25 bp, Homo sapien
agttgcagcgattgcaactggcctg

SEQ ID NO: 5841812 - DNA, 25 bp, Homo sapien
cgtccgcatgctaatcgctttttac

SEQ ID NO: 5841813 - DNA, 25 bp, Homo sapien
tttaccgccagatgaaatcgaacag

SEQ ID NO: 5841814 - DNA, 25 bp, Homo sapien
gatgaaatcgaacagtcgctgaacg

SEQ ID NO: 5841815 - DNA, 25 bp, Homo sapien
aacagtcgctgaacggcgtgcatta

SEQ ID NO: 5841816 - DNA, 25 bp, Homo sapien
acatcatattcagcccatcacgctg

SEQ ID NO: 5841817 - DNA, 25 bp, Homo sapien
ttcagcccatcacgctgtggtttga

SEQ ID NO: 5841818 - DNA, 25 bp, Homo sapien
atcacgctgtggtttgatgatgcgc

SEQ ID NO: 5841819 - DNA, 25 bp, Homo sapien
ggtttgatgatgcgctcagtgccat

SEQ ID NO: 5841820 - DNA, 25 bp, Homo sapien
atgatgcgctcagtgccatgcgttc

SEQ ID NO: 5841821 - DNA, 25 bp, Homo sapien
ctcagtgccatgcgttcgctgaaag

SEQ ID NO: 5841822 - DNA, 25 bp, Homo sapien
catgcgttcgctgaaaggcatcggt

SEQ ID NO: 5841823 - DNA, 25 bp, Homo sapien
ctgaaaggcatcggtgccacgcatc

SEQ ID NO: 5841824 - DNA, 25 bp, Homo sapien
ggcatcggtgccacgcatcttcatg

SEQ ID NO: 5841825 - DNA, 25 bp, Homo sapien
tgccacgcatcttcatgaagggcgc

SEQ ID NO: 5841826 - DNA, 25 bp, Homo sapien
atcttcatgaagggcgcgacccgcg

SEQ ID NO: 5841827 - DNA, 25 bp, Homo sapien
attaacgcgttcgcagttgcagcga

SEQ ID NO: 5841828 - DNA, 25 bp, Homo sapien
tacccgaacgtcatcaggcgtggca

SEQ ID NO: 5841829 - DNA, 25 bp, Homo sapien
gcgttcgcagttgcagcgattgcaa

SEQ ID NO: 5841830 - DNA, 25 bp, Homo sapien
ggtggacgagcgtccgcatgctaat

SEQ ID NO: 5841831 - DNA, 25 bp, Homo sapien
agttgcagcgattgcaactggcctg

SEQ ID NO: 5841832 - DNA, 25 bp, Homo sapien
cgtccgcatgctaatcgctttttac

SEQ ID NO: 5841833 - DNA, 25 bp, Homo sapien
tttaccgccagatgaaatcgaacag

SEQ ID NO: 5841834 - DNA, 25 bp, Homo sapien
gatgaaatcgaacagtcgctgaacg

SEQ ID NO: 5841835 - DNA, 25 bp, Homo sapien
aacagtcgctgaacggcgtgcatta

SEQ ID NO: 5841836 - DNA, 25 bp, Homo sapien
acatcatattcagcccatcacgctg

SEQ ID NO: 5841837 - DNA, 25 bp, Homo sapien
ttcagcccatcacgctgtggtttga

SEQ ID NO: 5841838 - DNA, 25 bp, Homo sapien
atcacgctgtggtttgatgatgcgc

SEQ ID NO: 5841839 - DNA, 25 bp, Homo sapien
ggtttgatgatgcgctcagtgccat

SEQ ID NO: 5841840 - DNA, 25 bp, Homo sapien
atgatgcgctcagtgccatgcgttc

SEQ ID NO: 5841841 - DNA, 25 bp, Homo sapien
ctcagtgccatgcgttcgctgaaag

SEQ ID NO: 5841842 - DNA, 25 bp, Homo sapien
catgcgttcgctgaaaggcatcggt

SEQ ID NO: 5841843 - DNA, 25 bp, Homo sapien
ctgaaaggcatcggtgccacgcatc

SEQ ID NO: 5841844 - DNA, 25 bp, Homo sapien
ggcatcggtgccacgcatcttcatg

SEQ ID NO: 5841845 - DNA, 25 bp, Homo sapien
tgccacgcatcttcatgaagggcgc

SEQ ID NO: 5841846 - DNA, 25 bp, Homo sapien
atcttcatgaagggcgcgacccgcg

SEQ ID NO: 5841847 - DNA, 25 bp, Homo sapien
attaacgcgttcgcagttgcagcga

SEQ ID NO: 5841848 - DNA, 25 bp, Homo sapien
tacccgaacgtcatcaggcgtggca

SEQ ID NO: 5841849 - DNA, 25 bp, Homo sapien
gcgttcgcagttgcagcgattgcaa

SEQ ID NO: 5841850 - DNA, 25 bp, Homo sapien
ggtggacgagcgtccgcatgctaat

SEQ ID NO: 5841851 - DNA, 25 bp, Homo sapien
agttgcagcgattgcaactggcctg

SEQ ID NO: 5841852 - DNA, 25 bp, Homo sapien
cgtccgcatgctaatcgctttttac

SEQ ID NO: 5841853 - DNA, 25 bp, Homo sapien
tttaccgccagatgaaatcgaacag

SEQ ID NO: 5841854 - DNA, 25 bp, Homo sapien
gatgaaatcgaacagtcgctgaacg

SEQ ID NO: 5841855 - DNA, 25 bp, Homo sapien
aacagtcgctgaacggcgtgcatta

SEQ ID NO: 5841856 - DNA, 25 bp, Homo sapien
acatcatattcagcccatcacgctg

SEQ ID NO: 5841857 - DNA, 25 bp, Homo sapien
ttcagcccatcacgctgtggtttga

SEQ ID NO: 5841858 - DNA, 25 bp, Homo sapien
atcacgctgtggtttgatgatgcgc

SEQ ID NO: 5841859 - DNA, 25 bp, Homo sapien
ggtttgatgatgcgctcagtgccat

SEQ ID NO: 5841860 - DNA, 25 bp, Homo sapien
atgatgcgctcagtgccatgcgttc

SEQ ID NO: 5841861 - DNA, 25 bp, Homo sapien
ctcagtgccatgcgttcgctgaaag

SEQ ID NO: 5841862 - DNA, 25 bp, Homo sapien
catgcgttcgctgaaaggcatcggt

SEQ ID NO: 5841863 - DNA, 25 bp, Homo sapien
ctgaaaggcatcggtgccacgcatc

SEQ ID NO: 5841864 - DNA, 25 bp, Homo sapien
ggcatcggtgccacgcatcttcatg

SEQ ID NO: 5841865 - DNA, 25 bp, Homo sapien
tgccacgcatcttcatgaagggcgc

SEQ ID NO: 5841866 - DNA, 25 bp, Homo sapien
atcttcatgaagggcgcgacccgcg

SEQ ID NO: 5841867 - DNA, 25 bp, Homo sapien
attaacgcgttcgcagttgcagcga

SEQ ID NO: 5841868 - DNA, 25 bp, Homo sapien
tacccgaacgtcatcaggcgtggca

SEQ ID NO: 5841869 - DNA, 25 bp, Homo sapien
gcgttcgcagttgcagcgattgcaa

SEQ ID NO: 5841870 - DNA, 25 bp, Homo sapien
ggtggacgagcgtccgcatgctaat

SEQ ID NO: 5841871 - DNA, 25 bp, Homo sapien
agttgcagcgattgcaactggcctg

SEQ ID NO: 5841872 - DNA, 25 bp, Homo sapien
cgtccgcatgctaatcgctttttac

SEQ ID NO: 5841873 - DNA, 25 bp, Homo sapien
tttaccgccagatgaaatcgaacag

SEQ ID NO: 5841874 - DNA, 25 bp, Homo sapien
gatgaaatcgaacagtcgctgaacg

SEQ ID NO: 5841875 - DNA, 25 bp, Homo sapien
aacagtcgctgaacggcgtgcatta

SEQ ID NO: 5841876 - DNA, 25 bp, Homo sapien
acatcatattcagcccatcacgctg

SEQ ID NO: 5841877 - DNA, 25 bp, Homo sapien
ttcagcccatcacgctgtggtttga

SEQ ID NO: 5841878 - DNA, 25 bp, Homo sapien
atcacgctgtggtttgatgatgcgc

SEQ ID NO: 5841879 - DNA, 25 bp, Homo sapien
ggtttgatgatgcgctcagtgccat

SEQ ID NO: 5841880 - DNA, 25 bp, Homo sapien
atgatgcgctcagtgccatgcgttc

SEQ ID NO: 5841881 - DNA, 25 bp, Homo sapien
ctcagtgccatgcgttcgctgaaag

SEQ ID NO: 5841882 - DNA, 25 bp, Homo sapien
catgcgttcgctgaaaggcatcggt

SEQ ID NO: 5841883 - DNA, 25 bp, Homo sapien
ctgaaaggcatcggtgccacgcatc

SEQ ID NO: 5841884 - DNA, 25 bp, Homo sapien
ggcatcggtgccacgcatcttcatg

SEQ ID NO: 5841885 - DNA, 25 bp, Homo sapien
tgccacgcatcttcatgaagggcgc

SEQ ID NO: 5841886 - DNA, 25 bp, Homo sapien
atcttcatgaagggcgcgacccgcg

SEQ ID NO: 5841887 - DNA, 25 bp, Homo sapien
attaacgcgttcgcagttgcagcga

SEQ ID NO: 5841888 - DNA, 25 bp, Homo sapien
tacccgaacgtcatcaggcgtggca

SEQ ID NO: 5841889 - DNA, 25 bp, Homo sapien
gcgttcgcagttgcagcgattgcaa

SEQ ID NO: 5841890 - DNA, 25 bp, Homo sapien
ggtggacgagcgtccgcatgctaat

SEQ ID NO: 5841891 - DNA, 25 bp, Homo sapien
agttgcagcgattgcaactggcctg

SEQ ID NO: 5841892 - DNA, 25 bp, Homo sapien
cgtccgcatgctaatcgctttttac

SEQ ID NO: 5841893 - DNA, 25 bp, Homo sapien
tttaccgccagatgaaatcgaacag

SEQ ID NO: 5841894 - DNA, 25 bp, Homo sapien
gatgaaatcgaacagtcgctgaacg

SEQ ID NO: 5841895 - DNA, 25 bp, Homo sapien
aacagtcgctgaacggcgtgcatta

SEQ ID NO: 5841896 - DNA, 25 bp, Homo sapien
acatcatattcagcccatcacgctg

SEQ ID NO: 5841897 - DNA, 25 bp, Homo sapien
ttcagcccatcacgctgtggtttga

SEQ ID NO: 5841898 - DNA, 25 bp, Homo sapien
atcacgctgtggtttgatgatgcgc

SEQ ID NO: 5841899 - DNA, 25 bp, Homo sapien
ggtttgatgatgcgctcagtgccat

SEQ ID NO: 5841900 - DNA, 25 bp, Homo sapien
atgatgcgctcagtgccatgcgttc

SEQ ID NO: 5841901 - DNA, 25 bp, Homo sapien
ctcagtgccatgcgttcgctgaaag

SEQ ID NO: 5841902 - DNA, 25 bp, Homo sapien
catgcgttcgctgaaaggcatcggt

SEQ ID NO: 5841903 - DNA, 25 bp, Homo sapien
ctgaaaggcatcggtgccacgcatc

SEQ ID NO: 5841904 - DNA, 25 bp, Homo sapien
ggcatcggtgccacgcatcttcatg

SEQ ID NO: 5841905 - DNA, 25 bp, Homo sapien
tgccacgcatcttcatgaagggcgc

SEQ ID NO: 5841906 - DNA, 25 bp, Homo sapien
atcttcatgaagggcgcgacccgcg

SEQ ID NO: 5841907 - DNA, 25 bp, Homo sapien
attaacgcgttcgcagttgcagcga

SEQ ID NO: 5841908 - DNA, 25 bp, Homo sapien
tacccgaacgtcatcaggcgtggca

SEQ ID NO: 5841909 - DNA, 25 bp, Homo sapien
gcgttcgcagttgcagcgattgcaa

SEQ ID NO: 5841910 - DNA, 25 bp, Homo sapien
ggtggacgagcgtccgcatgctaat

SEQ ID NO: 5841911 - DNA, 25 bp, Homo sapien
agttgcagcgattgcaactggcctg

SEQ ID NO: 5841912 - DNA, 25 bp, Homo sapien
cgtccgcatgctaatcgctttttac

SEQ ID NO: 5841913 - DNA, 25 bp, Homo sapien
tttaccgccagatgaaatcgaacag

SEQ ID NO: 5841914 - DNA, 25 bp, Homo sapien
gatgaaatcgaacagtcgctgaacg

SEQ ID NO: 5841915 - DNA, 25 bp, Homo sapien
aacagtcgctgaacggcgtgcatta

SEQ ID NO: 5841916 - DNA, 25 bp, Homo sapien
acatcatattcagcccatcacgctg

SEQ ID NO: 5841917 - DNA, 25 bp, Homo sapien
ttcagcccatcacgctgtggtttga

SEQ ID NO: 5841918 - DNA, 25 bp, Homo sapien
atcacgctgtggtttgatgatgcgc

SEQ ID NO: 5841919 - DNA, 25 bp, Homo sapien
ggtttgatgatgcgctcagtgccat

SEQ ID NO: 5841920 - DNA, 25 bp, Homo sapien
atgatgcgctcagtgccatgcgttc

SEQ ID NO: 5841921 - DNA, 25 bp, Homo sapien
ctcagtgccatgcgttcgctgaaag

SEQ ID NO: 5841922 - DNA, 25 bp, Homo sapien
catgcgttcgctgaaaggcatcggt

SEQ ID NO: 5841923 - DNA, 25 bp, Homo sapien
ctgaaaggcatcggtgccacgcatc

SEQ ID NO: 5841924 - DNA, 25 bp, Homo sapien
ggcatcggtgccacgcatcttcatg

SEQ ID NO: 5841925 - DNA, 25 bp, Homo sapien
tgccacgcatcttcatgaagggcgc

SEQ ID NO: 5841926 - DNA, 25 bp, Homo sapien
atcttcatgaagggcgcgacccgcg

SEQ ID NO: 5841927 - DNA, 25 bp, Homo sapien
attaacgcgttcgcagttgcagcga

SEQ ID NO: 5841928 - DNA, 25 bp, Homo sapien
tacccgaacgtcatcaggcgtggca

SEQ ID NO: 5841929 - DNA, 25 bp, Homo sapien
gcgttcgcagttgcagcgattgcaa

SEQ ID NO: 5841930 - DNA, 25 bp, Homo sapien
ggtggacgagcgtccgcatgctaat

SEQ ID NO: 5841931 - DNA, 25 bp, Homo sapien
agttgcagcgattgcaactggcctg

SEQ ID NO: 5841932 - DNA, 25 bp, Homo sapien
cgtccgcatgctaatcgctttttac

SEQ ID NO: 5841933 - DNA, 25 bp, Homo sapien
tttaccgccagatgaaatcgaacag

SEQ ID NO: 5841934 - DNA, 25 bp, Homo sapien
gatgaaatcgaacagtcgctgaacg

SEQ ID NO: 5841935 - DNA, 25 bp, Homo sapien
aacagtcgctgaacggcgtgcatta

SEQ ID NO: 5841936 - DNA, 25 bp, Homo sapien
acatcatattcagcccatcacgctg

SEQ ID NO: 5841937 - DNA, 25 bp, Homo sapien
ttcagcccatcacgctgtggtttga

SEQ ID NO: 5841938 - DNA, 25 bp, Homo sapien
atcacgctgtggtttgatgatgcgc

SEQ ID NO: 5841939 - DNA, 25 bp, Homo sapien
ggtttgatgatgcgctcagtgccat

SEQ ID NO: 5841940 - DNA, 25 bp, Homo sapien
atgatgcgctcagtgccatgcgttc

SEQ ID NO: 5841941 - DNA, 25 bp, Homo sapien
ctcagtgccatgcgttcgctgaaag

SEQ ID NO: 5841942 - DNA, 25 bp, Homo sapien
catgcgttcgctgaaaggcatcggt

SEQ ID NO: 5841943 - DNA, 25 bp, Homo sapien
ctgaaaggcatcggtgccacgcatc

SEQ ID NO: 5841944 - DNA, 25 bp, Homo sapien
ggcatcggtgccacgcatcttcatg

SEQ ID NO: 5841945 - DNA, 25 bp, Homo sapien
tgccacgcatcttcatgaagggcgc

SEQ ID NO: 5841946 - DNA, 25 bp, Homo sapien
atcttcatgaagggcgcgacccgcg

SEQ ID NO: 5841947 - DNA, 25 bp, Homo sapien
attaacgcgttcgcagttgcagcga

SEQ ID NO: 5841948 - DNA, 25 bp, Homo sapien
tacccgaacgtcatcaggcgtggca

SEQ ID NO: 5841949 - DNA, 25 bp, Homo sapien
gcgttcgcagttgcagcgattgcaa

SEQ ID NO: 5841950 - DNA, 25 bp, Homo sapien
ggtggacgagcgtccgcatgctaat

SEQ ID NO: 5841951 - DNA, 25 bp, Homo sapien
agttgcagcgattgcaactggcctg

SEQ ID NO: 5841952 - DNA, 25 bp, Homo sapien
cgtccgcatgctaatcgctttttac

SEQ ID NO: 5841953 - DNA, 25 bp, Homo sapien
tttaccgccagatgaaatcgaacag

SEQ ID NO: 5841954 - DNA, 25 bp, Homo sapien
gatgaaatcgaacagtcgctgaacg

SEQ ID NO: 5841955 - DNA, 25 bp, Homo sapien
aacagtcgctgaacggcgtgcatta

SEQ ID NO: 5841956 - DNA, 25 bp, Homo sapien
acatcatattcagcccatcacgctg

SEQ ID NO: 5841957 - DNA, 25 bp, Homo sapien
ttcagcccatcacgctgtggtttga

SEQ ID NO: 5841958 - DNA, 25 bp, Homo sapien
atcacgctgtggtttgatgatgcgc

SEQ ID NO: 5841959 - DNA, 25 bp, Homo sapien
ggtttgatgatgcgctcagtgccat

SEQ ID NO: 5841960 - DNA, 25 bp, Homo sapien
atgatgcgctcagtgccatgcgttc

SEQ ID NO: 5841961 - DNA, 25 bp, Homo sapien
ctcagtgccatgcgttcgctgaaag

SEQ ID NO: 5841962 - DNA, 25 bp, Homo sapien
catgcgttcgctgaaaggcatcggt

SEQ ID NO: 5841963 - DNA, 25 bp, Homo sapien
ctgaaaggcatcggtgccacgcatc

SEQ ID NO: 5841964 - DNA, 25 bp, Homo sapien
ggcatcggtgccacgcatcttcatg

SEQ ID NO: 5841965 - DNA, 25 bp, Homo sapien
tgccacgcatcttcatgaagggcgc

SEQ ID NO: 5841966 - DNA, 25 bp, Homo sapien
atcttcatgaagggcgcgacccgcg

SEQ ID NO: 5841967 - DNA, 25 bp, Homo sapien
attaacgcgttcgcagttgcagcga

SEQ ID NO: 5841968 - DNA, 25 bp, Homo sapien
tacccgaacgtcatcaggcgtggca

SEQ ID NO: 5841969 - DNA, 25 bp, Homo sapien
gcgttcgcagttgcagcgattgcaa

SEQ ID NO: 5841970 - DNA, 25 bp, Homo sapien
ggtggacgagcgtccgcatgctaat

SEQ ID NO: 5841971 - DNA, 25 bp, Homo sapien
agttgcagcgattgcaactggcctg

SEQ ID NO: 5841972 - DNA, 25 bp, Homo sapien
cgtccgcatgctaatcgctttttac

SEQ ID NO: 5841973 - DNA, 25 bp, Homo sapien
tttaccgccagatgaaatcgaacag

SEQ ID NO: 5841974 - DNA, 25 bp, Homo sapien
gatgaaatcgaacagtcgctgaacg

SEQ ID NO: 5841975 - DNA, 25 bp, Homo sapien
aacagtcgctgaacggcgtgcatta

SEQ ID NO: 5841976 - DNA, 25 bp, Homo sapien
acatcatattcagcccatcacgctg

SEQ ID NO: 5841977 - DNA, 25 bp, Homo sapien
ttcagcccatcacgctgtggtttga

SEQ ID NO: 5841978 - DNA, 25 bp, Homo sapien
atcacgctgtggtttgatgatgcgc

SEQ ID NO: 5841979 - DNA, 25 bp, Homo sapien
ggtttgatgatgcgctcagtgccat

SEQ ID NO: 5841980 - DNA, 25 bp, Homo sapien
atgatgcgctcagtgccatgcgttc

SEQ ID NO: 5841981 - DNA, 25 bp, Homo sapien
ctcagtgccatgcgttcgctgaaag

SEQ ID NO: 5841982 - DNA, 25 bp, Homo sapien
catgcgttcgctgaaaggcatcggt

SEQ ID NO: 5841983 - DNA, 25 bp, Homo sapien
ctgaaaggcatcggtgccacgcatc

SEQ ID NO: 5841984 - DNA, 25 bp, Homo sapien
ggcatcggtgccacgcatcttcatg

SEQ ID NO: 5841985 - DNA, 25 bp, Homo sapien
tgccacgcatcttcatgaagggcgc

SEQ ID NO: 5841986 - DNA, 25 bp, Homo sapien
atcttcatgaagggcgcgacccgcg

SEQ ID NO: 5841987 - DNA, 25 bp, Homo sapien
attaacgcgttcgcagttgcagcga

SEQ ID NO: 5841988 - DNA, 25 bp, Homo sapien
tacccgaacgtcatcaggcgtggca

SEQ ID NO: 5841989 - DNA, 25 bp, Homo sapien
gcgttcgcagttgcagcgattgcaa

SEQ ID NO: 5841990 - DNA, 25 bp, Homo sapien
ggtggacgagcgtccgcatgctaat

SEQ ID NO: 5841991 - DNA, 25 bp, Homo sapien
agttgcagcgattgcaactggcctg

SEQ ID NO: 5841992 - DNA, 25 bp, Homo sapien
cgtccgcatgctaatcgctttttac

SEQ ID NO: 5841993 - DNA, 25 bp, Homo sapien
tttaccgccagatgaaatcgaacag

SEQ ID NO: 5841994 - DNA, 25 bp, Homo sapien
gatgaaatcgaacagtcgctgaacg

SEQ ID NO: 5841995 - DNA, 25 bp, Homo sapien
aacagtcgctgaacggcgtgcatta

SEQ ID NO: 5841996 - DNA, 25 bp, Homo sapien
acatcatattcagcccatcacgctg

SEQ ID NO: 5841997 - DNA, 25 bp, Homo sapien
ttcagcccatcacgctgtggtttga

SEQ ID NO: 5841998 - DNA, 25 bp, Homo sapien
atcacgctgtggtttgatgatgcgc

SEQ ID NO: 5841999 - DNA, 25 bp, Homo sapien
ggtttgatgatgcgctcagtgccat

SEQ ID NO: 5842000 - DNA, 25 bp, Homo sapien
atgatgcgctcagtgccatgcgttc

SEQ ID NO: 5842001 - DNA, 25 bp, Homo sapien
ctcagtgccatgcgttcgctgaaag

SEQ ID NO: 5842002 - DNA, 25 bp, Homo sapien
catgcgttcgctgaaaggcatcggt

SEQ ID NO: 5842003 - DNA, 25 bp, Homo sapien
ctgaaaggcatcggtgccacgcatc

SEQ ID NO: 5842004 - DNA, 25 bp, Homo sapien
ggcatcggtgccacgcatcttcatg

SEQ ID NO: 5842005 - DNA, 25 bp, Homo sapien
tgccacgcatcttcatgaagggcgc

SEQ ID NO: 5842006 - DNA, 25 bp, Homo sapien
atcttcatgaagggcgcgacccgcg

SEQ ID NO: 5842007 - DNA, 25 bp, Homo sapien
attaacgcgttcgcagttgcagcga

SEQ ID NO: 5842008 - DNA, 25 bp, Homo sapien
tacccgaacgtcatcaggcgtggca

SEQ ID NO: 5842009 - DNA, 25 bp, Homo sapien
gcgttcgcagttgcagcgattgcaa

SEQ ID NO: 5842010 - DNA, 25 bp, Homo sapien
ggtggacgagcgtccgcatgctaat

SEQ ID NO: 5842011 - DNA, 25 bp, Homo sapien
agttgcagcgattgcaactggcctg

SEQ ID NO: 5842012 - DNA, 25 bp, Homo sapien
cgtccgcatgctaatcgctttttac

SEQ ID NO: 5842013 - DNA, 25 bp, Homo sapien
tttaccgccagatgaaatcgaacag

SEQ ID NO: 5842014 - DNA, 25 bp, Homo sapien
gatgaaatcgaacagtcgctgaacg

SEQ ID NO: 5842015 - DNA, 25 bp, Homo sapien
aacagtcgctgaacggcgtgcatta

SEQ ID NO: 5842016 - DNA, 25 bp, Homo sapien
acatcatattcagcccatcacgctg

SEQ ID NO: 5842017 - DNA, 25 bp, Homo sapien
ttcagcccatcacgctgtggtttga

SEQ ID NO: 5842018 - DNA, 25 bp, Homo sapien
atcacgctgtggtttgatgatgcgc

SEQ ID NO: 5842019 - DNA, 25 bp, Homo sapien
ggtttgatgatgcgctcagtgccat

SEQ ID NO: 5842020 - DNA, 25 bp, Homo sapien
atgatgcgctcagtgccatgcgttc

SEQ ID NO: 5842021 - DNA, 25 bp, Homo sapien
ctcagtgccatgcgttcgctgaaag

SEQ ID NO: 5842022 - DNA, 25 bp, Homo sapien
catgcgttcgctgaaaggcatcggt

SEQ ID NO: 5842023 - DNA, 25 bp, Homo sapien
ctgaaaggcatcggtgccacgcatc

SEQ ID NO: 5842024 - DNA, 25 bp, Homo sapien
ggcatcggtgccacgcatcttcatg

SEQ ID NO: 5842025 - DNA, 25 bp, Homo sapien
tgccacgcatcttcatgaagggcgc

SEQ ID NO: 5842026 - DNA, 25 bp, Homo sapien
atcttcatgaagggcgcgacccgcg

SEQ ID NO: 5842027 - DNA, 25 bp, Homo sapien
attaacgcgttcgcagttgcagcga

SEQ ID NO: 5842028 - DNA, 25 bp, Homo sapien
tacccgaacgtcatcaggcgtggca

SEQ ID NO: 5842029 - DNA, 25 bp, Homo sapien
gcgttcgcagttgcagcgattgcaa

SEQ ID NO: 5842030 - DNA, 25 bp, Homo sapien
ggtggacgagcgtccgcatgctaat

SEQ ID NO: 5842031 - DNA, 25 bp, Homo sapien
agttgcagcgattgcaactggcctg

SEQ ID NO: 5842032 - DNA, 25 bp, Homo sapien
cgtccgcatgctaatcgctttttac

SEQ ID NO: 5842033 - DNA, 25 bp, Homo sapien
tttaccgccagatgaaatcgaacag

SEQ ID NO: 5842034 - DNA, 25 bp, Homo sapien
gatgaaatcgaacagtcgctgaacg

SEQ ID NO: 5842035 - DNA, 25 bp, Homo sapien
aacagtcgctgaacggcgtgcatta

SEQ ID NO: 5842036 - DNA, 25 bp, Homo sapien
acatcatattcagcccatcacgctg

SEQ ID NO: 5842037 - DNA, 25 bp, Homo sapien
ttcagcccatcacgctgtggtttga

SEQ ID NO: 5842038 - DNA, 25 bp, Homo sapien
atcacgctgtggtttgatgatgcgc

SEQ ID NO: 5842039 - DNA, 25 bp, Homo sapien
ggtttgatgatgcgctcagtgccat

SEQ ID NO: 5842040 - DNA, 25 bp, Homo sapien
atgatgcgctcagtgccatgcgttc

SEQ ID NO: 5842041 - DNA, 25 bp, Homo sapien
ctcagtgccatgcgttcgctgaaag

SEQ ID NO: 5842042 - DNA, 25 bp, Homo sapien
catgcgttcgctgaaaggcatcggt

SEQ ID NO: 5842043 - DNA, 25 bp, Homo sapien
ctgaaaggcatcggtgccacgcatc

SEQ ID NO: 5842044 - DNA, 25 bp, Homo sapien
ggcatcggtgccacgcatcttcatg

SEQ ID NO: 5842045 - DNA, 25 bp, Homo sapien
tgccacgcatcttcatgaagggcgc

SEQ ID NO: 5842046 - DNA, 25 bp, Homo sapien
atcttcatgaagggcgcgacccgcg

SEQ ID NO: 5842047 - DNA, 25 bp, Homo sapien
attaacgcgttcgcagttgcagcga

SEQ ID NO: 5842048 - DNA, 25 bp, Homo sapien
tacccgaacgtcatcaggcgtggca

SEQ ID NO: 5842049 - DNA, 25 bp, Homo sapien
gcgttcgcagttgcagcgattgcaa

SEQ ID NO: 5842050 - DNA, 25 bp, Homo sapien
ggtggacgagcgtccgcatgctaat

SEQ ID NO: 5842051 - DNA, 25 bp, Homo sapien
agttgcagcgattgcaactggcctg

SEQ ID NO: 5842052 - DNA, 25 bp, Homo sapien
cgtccgcatgctaatcgctttttac

SEQ ID NO: 5842053 - DNA, 25 bp, Homo sapien
tttaccgccagatgaaatcgaacag

SEQ ID NO: 5842054 - DNA, 25 bp, Homo sapien
gatgaaatcgaacagtcgctgaacg

SEQ ID NO: 5842055 - DNA, 25 bp, Homo sapien
aacagtcgctgaacggcgtgcatta

SEQ ID NO: 5842056 - DNA, 25 bp, Homo sapien
acatcatattcagcccatcacgctg

SEQ ID NO: 5842057 - DNA, 25 bp, Homo sapien
ttcagcccatcacgctgtggtttga

SEQ ID NO: 5842058 - DNA, 25 bp, Homo sapien
atcacgctgtggtttgatgatgcgc

SEQ ID NO: 5842059 - DNA, 25 bp, Homo sapien
ggtttgatgatgcgctcagtgccat

SEQ ID NO: 5842060 - DNA, 25 bp, Homo sapien
atgatgcgctcagtgccatgcgttc

SEQ ID NO: 5842061 - DNA, 25 bp, Homo sapien
ctcagtgccatgcgttcgctgaaag

SEQ ID NO: 5842062 - DNA, 25 bp, Homo sapien
catgcgttcgctgaaaggcatcggt

SEQ ID NO: 5842063 - DNA, 25 bp, Homo sapien
ctgaaaggcatcggtgccacgcatc

SEQ ID NO: 5842064 - DNA, 25 bp, Homo sapien
ggcatcggtgccacgcatcttcatg

SEQ ID NO: 5842065 - DNA, 25 bp, Homo sapien
tgccacgcatcttcatgaagggcgc

SEQ ID NO: 5842066 - DNA, 25 bp, Homo sapien
atcttcatgaagggcgcgacccgcg

SEQ ID NO: 5842067 - DNA, 25 bp, Homo sapien
attaacgcgttcgcagttgcagcga

SEQ ID NO: 5842068 - DNA, 25 bp, Homo sapien
tacccgaacgtcatcaggcgtggca

SEQ ID NO: 5842069 - DNA, 25 bp, Homo sapien
gcgttcgcagttgcagcgattgcaa

SEQ ID NO: 5842070 - DNA, 25 bp, Homo sapien
ggtggacgagcgtccgcatgctaat

SEQ ID NO: 5842071 - DNA, 25 bp, Homo sapien
agttgcagcgattgcaactggcctg

SEQ ID NO: 5842072 - DNA, 25 bp, Homo sapien
cgtccgcatgctaatcgctttttac

SEQ ID NO: 5842073 - DNA, 25 bp, Homo sapien
tttaccgccagatgaaatcgaacag

SEQ ID NO: 5842074 - DNA, 25 bp, Homo sapien
gatgaaatcgaacagtcgctgaacg

SEQ ID NO: 5842075 - DNA, 25 bp, Homo sapien
aacagtcgctgaacggcgtgcatta

SEQ ID NO: 5842076 - DNA, 25 bp, Homo sapien
acatcatattcagcccatcacgctg

SEQ ID NO: 5842077 - DNA, 25 bp, Homo sapien
ttcagcccatcacgctgtggtttga

SEQ ID NO: 5842078 - DNA, 25 bp, Homo sapien
atcacgctgtggtttgatgatgcgc

SEQ ID NO: 5842079 - DNA, 25 bp, Homo sapien
ggtttgatgatgcgctcagtgccat

SEQ ID NO: 5842080 - DNA, 25 bp, Homo sapien
atgatgcgctcagtgccatgcgttc

SEQ ID NO: 5842081 - DNA, 25 bp, Homo sapien
ctcagtgccatgcgttcgctgaaag

SEQ ID NO: 5842082 - DNA, 25 bp, Homo sapien
catgcgttcgctgaaaggcatcggt

SEQ ID NO: 5842083 - DNA, 25 bp, Homo sapien
ctgaaaggcatcggtgccacgcatc

SEQ ID NO: 5842084 - DNA, 25 bp, Homo sapien
ggcatcggtgccacgcatcttcatg

SEQ ID NO: 5842085 - DNA, 25 bp, Homo sapien
tgccacgcatcttcatgaagggcgc

SEQ ID NO: 5842086 - DNA, 25 bp, Homo sapien
atcttcatgaagggcgcgacccgcg

SEQ ID NO: 5842087 - DNA, 25 bp, Homo sapien
attaacgcgttcgcagttgcagcga

SEQ ID NO: 5842088 - DNA, 25 bp, Homo sapien
tacccgaacgtcatcaggcgtggca

SEQ ID NO: 5842089 - DNA, 25 bp, Homo sapien
gcgttcgcagttgcagcgattgcaa

SEQ ID NO: 5842090 - DNA, 25 bp, Homo sapien
ggtggacgagcgtccgcatgctaat

SEQ ID NO: 5842091 - DNA, 25 bp, Homo sapien
agttgcagcgattgcaactggcctg

SEQ ID NO: 5842092 - DNA, 25 bp, Homo sapien
cgtccgcatgctaatcgctttttac

SEQ ID NO: 5842093 - DNA, 25 bp, Homo sapien
tttaccgccagatgaaatcgaacag

SEQ ID NO: 5842094 - DNA, 25 bp, Homo sapien
gatgaaatcgaacagtcgctgaacg

SEQ ID NO: 5842095 - DNA, 25 bp, Homo sapien
aacagtcgctgaacggcgtgcatta

SEQ ID NO: 5842096 - DNA, 25 bp, Homo sapien
acatcatattcagcccatcacgctg

SEQ ID NO: 5842097 - DNA, 25 bp, Homo sapien
ttcagcccatcacgctgtggtttga

SEQ ID NO: 5842098 - DNA, 25 bp, Homo sapien
atcacgctgtggtttgatgatgcgc

SEQ ID NO: 5842099 - DNA, 25 bp, Homo sapien
ggtttgatgatgcgctcagtgccat

SEQ ID NO: 5842100 - DNA, 25 bp, Homo sapien
atgatgcgctcagtgccatgcgttc

SEQ ID NO: 5842101 - DNA, 25 bp, Homo sapien
ctcagtgccatgcgttcgctgaaag

SEQ ID NO: 5842102 - DNA, 25 bp, Homo sapien
catgcgttcgctgaaaggcatcggt

SEQ ID NO: 5842103 - DNA, 25 bp, Homo sapien
ctgaaaggcatcggtgccacgcatc

SEQ ID NO: 5842104 - DNA, 25 bp, Homo sapien
ggcatcggtgccacgcatcttcatg

SEQ ID NO: 5842105 - DNA, 25 bp, Homo sapien
tgccacgcatcttcatgaagggcgc

SEQ ID NO: 5842106 - DNA, 25 bp, Homo sapien
atcttcatgaagggcgcgacccgcg

SEQ ID NO: 5842107 - DNA, 25 bp, Homo sapien
attaacgcgttcgcagttgcagcga

SEQ ID NO: 5842108 - DNA, 25 bp, Homo sapien
tacccgaacgtcatcaggcgtggca

SEQ ID NO: 5842109 - DNA, 25 bp, Homo sapien
gcgttcgcagttgcagcgattgcaa

SEQ ID NO: 5842110 - DNA, 25 bp, Homo sapien
ggtggacgagcgtccgcatgctaat

SEQ ID NO: 5842111 - DNA, 25 bp, Homo sapien
agttgcagcgattgcaactggcctg

SEQ ID NO: 5842112 - DNA, 25 bp, Homo sapien
cgtccgcatgctaatcgctttttac

SEQ ID NO: 5842113 - DNA, 25 bp, Homo sapien
tttaccgccagatgaaatcgaacag

SEQ ID NO: 5842114 - DNA, 25 bp, Homo sapien
gatgaaatcgaacagtcgctgaacg

SEQ ID NO: 5842115 - DNA, 25 bp, Homo sapien
aacagtcgctgaacggcgtgcatta

SEQ ID NO: 5842116 - DNA, 25 bp, Homo sapien
acatcatattcagcccatcacgctg

SEQ ID NO: 5842117 - DNA, 25 bp, Homo sapien
ttcagcccatcacgctgtggtttga

SEQ ID NO: 5842118 - DNA, 25 bp, Homo sapien
atcacgctgtggtttgatgatgcgc

SEQ ID NO: 5842119 - DNA, 25 bp, Homo sapien
ggtttgatgatgcgctcagtgccat

SEQ ID NO: 5842120 - DNA, 25 bp, Homo sapien
atgatgcgctcagtgccatgcgttc

SEQ ID NO: 5842121 - DNA, 25 bp, Homo sapien
ctcagtgccatgcgttcgctgaaag

SEQ ID NO: 5842122 - DNA, 25 bp, Homo sapien
catgcgttcgctgaaaggcatcggt

SEQ ID NO: 5842123 - DNA, 25 bp, Homo sapien
ctgaaaggcatcggtgccacgcatc

SEQ ID NO: 5842124 - DNA, 25 bp, Homo sapien
ggcatcggtgccacgcatcttcatg

SEQ ID NO: 5842125 - DNA, 25 bp, Homo sapien
tgccacgcatcttcatgaagggcgc

SEQ ID NO: 5842126 - DNA, 25 bp, Homo sapien
atcttcatgaagggcgcgacccgcg

SEQ ID NO: 5842127 - DNA, 25 bp, Homo sapien
attaacgcgttcgcagttgcagcga

SEQ ID NO: 5842128 - DNA, 25 bp, Homo sapien
tacccgaacgtcatcaggcgtggca

SEQ ID NO: 5842129 - DNA, 25 bp, Homo sapien
gcgttcgcagttgcagcgattgcaa

SEQ ID NO: 5842130 - DNA, 25 bp, Homo sapien
ggtggacgagcgtccgcatgctaat

SEQ ID NO: 5842131 - DNA, 25 bp, Homo sapien
agttgcagcgattgcaactggcctg

SEQ ID NO: 5842132 - DNA, 25 bp, Homo sapien
cgtccgcatgctaatcgctttttac

SEQ ID NO: 5842133 - DNA, 25 bp, Homo sapien
tttaccgccagatgaaatcgaacag

SEQ ID NO: 5842134 - DNA, 25 bp, Homo sapien
gatgaaatcgaacagtcgctgaacg

SEQ ID NO: 5842135 - DNA, 25 bp, Homo sapien
aacagtcgctgaacggcgtgcatta

SEQ ID NO: 5842136 - DNA, 25 bp, Homo sapien
acatcatattcagcccatcacgctg

SEQ ID NO: 5842137 - DNA, 25 bp, Homo sapien
ttcagcccatcacgctgtggtttga

SEQ ID NO: 5842138 - DNA, 25 bp, Homo sapien
atcacgctgtggtttgatgatgcgc

SEQ ID NO: 5842139 - DNA, 25 bp, Homo sapien
ggtttgatgatgcgctcagtgccat

SEQ ID NO: 5842140 - DNA, 25 bp, Homo sapien
atgatgcgctcagtgccatgcgttc

SEQ ID NO: 5842141 - DNA, 25 bp, Homo sapien
ctcagtgccatgcgttcgctgaaag

SEQ ID NO: 5842142 - DNA, 25 bp, Homo sapien
catgcgttcgctgaaaggcatcggt

SEQ ID NO: 5842143 - DNA, 25 bp, Homo sapien
ctgaaaggcatcggtgccacgcatc

SEQ ID NO: 5842144 - DNA, 25 bp, Homo sapien
ggcatcggtgccacgcatcttcatg

SEQ ID NO: 5842145 - DNA, 25 bp, Homo sapien
tgccacgcatcttcatgaagggcgc

SEQ ID NO: 5842146 - DNA, 25 bp, Homo sapien
atcttcatgaagggcgcgacccgcg

SEQ ID NO: 5842147 - DNA, 25 bp, Homo sapien
attaacgcgttcgcagttgcagcga

SEQ ID NO: 5842148 - DNA, 25 bp, Homo sapien
tacccgaacgtcatcaggcgtggca

SEQ ID NO: 5842149 - DNA, 25 bp, Homo sapien
gcgttcgcagttgcagcgattgcaa

SEQ ID NO: 5842150 - DNA, 25 bp, Homo sapien
ggtggacgagcgtccgcatgctaat

SEQ ID NO: 5842151 - DNA, 25 bp, Homo sapien
agttgcagcgattgcaactggcctg

SEQ ID NO: 5842152 - DNA, 25 bp, Homo sapien
cgtccgcatgctaatcgctttttac

SEQ ID NO: 5842153 - DNA, 25 bp, Homo sapien
tttaccgccagatgaaatcgaacag

SEQ ID NO: 5842154 - DNA, 25 bp, Homo sapien
gatgaaatcgaacagtcgctgaacg

SEQ ID NO: 5842155 - DNA, 25 bp, Homo sapien
aacagtcgctgaacggcgtgcatta

SEQ ID NO: 5842156 - DNA, 25 bp, Homo sapien
acatcatattcagcccatcacgctg

SEQ ID NO: 5842157 - DNA, 25 bp, Homo sapien
ttcagcccatcacgctgtggtttga

SEQ ID NO: 5842158 - DNA, 25 bp, Homo sapien
atcacgctgtggtttgatgatgcgc

SEQ ID NO: 5842159 - DNA, 25 bp, Homo sapien
ggtttgatgatgcgctcagtgccat

SEQ ID NO: 5842160 - DNA, 25 bp, Homo sapien
atgatgcgctcagtgccatgcgttc

SEQ ID NO: 5842161 - DNA, 25 bp, Homo sapien
ctcagtgccatgcgttcgctgaaag

SEQ ID NO: 5842162 - DNA, 25 bp, Homo sapien
catgcgttcgctgaaaggcatcggt

SEQ ID NO: 5842163 - DNA, 25 bp, Homo sapien
ctgaaaggcatcggtgccacgcatc

SEQ ID NO: 5842164 - DNA, 25 bp, Homo sapien
ggcatcggtgccacgcatcttcatg

SEQ ID NO: 5842165 - DNA, 25 bp, Homo sapien
tgccacgcatcttcatgaagggcgc

SEQ ID NO: 5842166 - DNA, 25 bp, Homo sapien
atcttcatgaagggcgcgacccgcg

SEQ ID NO: 5842167 - DNA, 25 bp, Homo sapien
attaacgcgttcgcagttgcagcga

SEQ ID NO: 5842168 - DNA, 25 bp, Homo sapien
tacccgaacgtcatcaggcgtggca

SEQ ID NO: 5842169 - DNA, 25 bp, Homo sapien
gcgttcgcagttgcagcgattgcaa

SEQ ID NO: 5842170 - DNA, 25 bp, Homo sapien
ggtggacgagcgtccgcatgctaat

SEQ ID NO: 5842171 - DNA, 25 bp, Homo sapien
agttgcagcgattgcaactggcctg

SEQ ID NO: 5842172 - DNA, 25 bp, Homo sapien
cgtccgcatgctaatcgctttttac

SEQ ID NO: 5842173 - DNA, 25 bp, Homo sapien
tttaccgccagatgaaatcgaacag

SEQ ID NO: 5842174 - DNA, 25 bp, Homo sapien
gatgaaatcgaacagtcgctgaacg

SEQ ID NO: 5842175 - DNA, 25 bp, Homo sapien
aacagtcgctgaacggcgtgcatta

SEQ ID NO: 5842176 - DNA, 25 bp, Homo sapien
acatcatattcagcccatcacgctg

SEQ ID NO: 5842177 - DNA, 25 bp, Homo sapien
ttcagcccatcacgctgtggtttga

SEQ ID NO: 5842178 - DNA, 25 bp, Homo sapien
atcacgctgtggtttgatgatgcgc

SEQ ID NO: 5842179 - DNA, 25 bp, Homo sapien
ggtttgatgatgcgctcagtgccat

SEQ ID NO: 5842180 - DNA, 25 bp, Homo sapien
atgatgcgctcagtgccatgcgttc

SEQ ID NO: 5842181 - DNA, 25 bp, Homo sapien
ctcagtgccatgcgttcgctgaaag

SEQ ID NO: 5842182 - DNA, 25 bp, Homo sapien
catgcgttcgctgaaaggcatcggt

SEQ ID NO: 5842183 - DNA, 25 bp, Homo sapien
ctgaaaggcatcggtgccacgcatc

SEQ ID NO: 5842184 - DNA, 25 bp, Homo sapien
ggcatcggtgccacgcatcttcatg

SEQ ID NO: 5842185 - DNA, 25 bp, Homo sapien
tgccacgcatcttcatgaagggcgc

SEQ ID NO: 5842186 - DNA, 25 bp, Homo sapien
atcttcatgaagggcgcgacccgcg

SEQ ID NO: 5842187 - DNA, 25 bp, Homo sapien
attaacgcgttcgcagttgcagcga

SEQ ID NO: 5842188 - DNA, 25 bp, Homo sapien
tacccgaacgtcatcaggcgtggca

SEQ ID NO: 5842189 - DNA, 25 bp, Homo sapien
gcgttcgcagttgcagcgattgcaa

SEQ ID NO: 5842190 - DNA, 25 bp, Homo sapien
ggtggacgagcgtccgcatgctaat

SEQ ID NO: 5842191 - DNA, 25 bp, Homo sapien
agttgcagcgattgcaactggcctg

SEQ ID NO: 5842192 - DNA, 25 bp, Homo sapien
cgtccgcatgctaatcgctttttac

SEQ ID NO: 5842193 - DNA, 25 bp, Homo sapien
tttaccgccagatgaaatcgaacag

SEQ ID NO: 5842194 - DNA, 25 bp, Homo sapien
gatgaaatcgaacagtcgctgaacg

SEQ ID NO: 5842195 - DNA, 25 bp, Homo sapien
aacagtcgctgaacggcgtgcatta

SEQ ID NO: 5842196 - DNA, 25 bp, Homo sapien
acatcatattcagcccatcacgctg

SEQ ID NO: 5842197 - DNA, 25 bp, Homo sapien
ttcagcccatcacgctgtggtttga

SEQ ID NO: 5842198 - DNA, 25 bp, Homo sapien
atcacgctgtggtttgatgatgcgc

SEQ ID NO: 5842199 - DNA, 25 bp, Homo sapien
ggtttgatgatgcgctcagtgccat

SEQ ID NO: 5842200 - DNA, 25 bp, Homo sapien
atgatgcgctcagtgccatgcgttc

SEQ ID NO: 5842201 - DNA, 25 bp, Homo sapien
ctcagtgccatgcgttcgctgaaag

SEQ ID NO: 5842202 - DNA, 25 bp, Homo sapien
catgcgttcgctgaaaggcatcggt

SEQ ID NO: 5842203 - DNA, 25 bp, Homo sapien
ctgaaaggcatcggtgccacgcatc

SEQ ID NO: 5842204 - DNA, 25 bp, Homo sapien
ggcatcggtgccacgcatcttcatg

SEQ ID NO: 5842205 - DNA, 25 bp, Homo sapien
tgccacgcatcttcatgaagggcgc

SEQ ID NO: 5842206 - DNA, 25 bp, Homo sapien
atcttcatgaagggcgcgacccgcg

SEQ ID NO: 5842207 - DNA, 25 bp, Homo sapien
attaacgcgttcgcagttgcagcga

SEQ ID NO: 5842208 - DNA, 25 bp, Homo sapien
tacccgaacgtcatcaggcgtggca

SEQ ID NO: 5842209 - DNA, 25 bp, Homo sapien
gcgttcgcagttgcagcgattgcaa

SEQ ID NO: 5842210 - DNA, 25 bp, Homo sapien
ggtggacgagcgtccgcatgctaat

SEQ ID NO: 5842211 - DNA, 25 bp, Homo sapien
agttgcagcgattgcaactggcctg

SEQ ID NO: 5842212 - DNA, 25 bp, Homo sapien
cgtccgcatgctaatcgctttttac

SEQ ID NO: 5842213 - DNA, 25 bp, Homo sapien
tttaccgccagatgaaatcgaacag

SEQ ID NO: 5842214 - DNA, 25 bp, Homo sapien
gatgaaatcgaacagtcgctgaacg

SEQ ID NO: 5842215 - DNA, 25 bp, Homo sapien
aacagtcgctgaacggcgtgcatta

SEQ ID NO: 5842216 - DNA, 25 bp, Homo sapien
acatcatattcagcccatcacgctg

SEQ ID NO: 5842217 - DNA, 25 bp, Homo sapien
ttcagcccatcacgctgtggtttga

SEQ ID NO: 5842218 - DNA, 25 bp, Homo sapien
atcacgctgtggtttgatgatgcgc

SEQ ID NO: 5842219 - DNA, 25 bp, Homo sapien
ggtttgatgatgcgctcagtgccat

SEQ ID NO: 5842220 - DNA, 25 bp, Homo sapien
atgatgcgctcagtgccatgcgttc

SEQ ID NO: 5842221 - DNA, 25 bp, Homo sapien
ctcagtgccatgcgttcgctgaaag

SEQ ID NO: 5842222 - DNA, 25 bp, Homo sapien
catgcgttcgctgaaaggcatcggt

SEQ ID NO: 5842223 - DNA, 25 bp, Homo sapien
ctgaaaggcatcggtgccacgcatc

SEQ ID NO: 5842224 - DNA, 25 bp, Homo sapien
ggcatcggtgccacgcatcttcatg

SEQ ID NO: 5842225 - DNA, 25 bp, Homo sapien
tgccacgcatcttcatgaagggcgc

SEQ ID NO: 5842226 - DNA, 25 bp, Homo sapien
atcttcatgaagggcgcgacccgcg

SEQ ID NO: 5842227 - DNA, 25 bp, Homo sapien
attaacgcgttcgcagttgcagcga

SEQ ID NO: 5842228 - DNA, 25 bp, Homo sapien
tacccgaacgtcatcaggcgtggca

SEQ ID NO: 5842229 - DNA, 25 bp, Homo sapien
gcgttcgcagttgcagcgattgcaa

SEQ ID NO: 5842230 - DNA, 25 bp, Homo sapien
ggtggacgagcgtccgcatgctaat

SEQ ID NO: 5842231 - DNA, 25 bp, Homo sapien
agttgcagcgattgcaactggcctg

SEQ ID NO: 5842232 - DNA, 25 bp, Homo sapien
cgtccgcatgctaatcgctttttac

SEQ ID NO: 5842233 - DNA, 25 bp, Homo sapien
tttaccgccagatgaaatcgaacag

SEQ ID NO: 5842234 - DNA, 25 bp, Homo sapien
gatgaaatcgaacagtcgctgaacg

SEQ ID NO: 5842235 - DNA, 25 bp, Homo sapien
aacagtcgctgaacggcgtgcatta

SEQ ID NO: 5842236 - DNA, 25 bp, Homo sapien
acatcatattcagcccatcacgctg

SEQ ID NO: 5842237 - DNA, 25 bp, Homo sapien
ttcagcccatcacgctgtggtttga

SEQ ID NO: 5842238 - DNA, 25 bp, Homo sapien
atcacgctgtggtttgatgatgcgc

SEQ ID NO: 5842239 - DNA, 25 bp, Homo sapien
ggtttgatgatgcgctcagtgccat

SEQ ID NO: 5842240 - DNA, 25 bp, Homo sapien
atgatgcgctcagtgccatgcgttc

SEQ ID NO: 5842241 - DNA, 25 bp, Homo sapien
ctcagtgccatgcgttcgctgaaag

SEQ ID NO: 5842242 - DNA, 25 bp, Homo sapien
catgcgttcgctgaaaggcatcggt

SEQ ID NO: 5842243 - DNA, 25 bp, Homo sapien
ctgaaaggcatcggtgccacgcatc

SEQ ID NO: 5842244 - DNA, 25 bp, Homo sapien
ggcatcggtgccacgcatcttcatg

SEQ ID NO: 5842245 - DNA, 25 bp, Homo sapien
tgccacgcatcttcatgaagggcgc

SEQ ID NO: 5842246 - DNA, 25 bp, Homo sapien
atcttcatgaagggcgcgacccgcg

SEQ ID NO: 5842247 - DNA, 25 bp, Homo sapien
attaacgcgttcgcagttgcagcga

SEQ ID NO: 5842248 - DNA, 25 bp, Homo sapien
tacccgaacgtcatcaggcgtggca

SEQ ID NO: 5842249 - DNA, 25 bp, Homo sapien
gcgttcgcagttgcagcgattgcaa

SEQ ID NO: 5842250 - DNA, 25 bp, Homo sapien
ggtggacgagcgtccgcatgctaat

SEQ ID NO: 5842251 - DNA, 25 bp, Homo sapien
agttgcagcgattgcaactggcctg

SEQ ID NO: 5842252 - DNA, 25 bp, Homo sapien
cgtccgcatgctaatcgctttttac

SEQ ID NO: 5842253 - DNA, 25 bp, Homo sapien
tttaccgccagatgaaatcgaacag

SEQ ID NO: 5842254 - DNA, 25 bp, Homo sapien
gatgaaatcgaacagtcgctgaacg

SEQ ID NO: 5842255 - DNA, 25 bp, Homo sapien
aacagtcgctgaacggcgtgcatta

SEQ ID NO: 5842256 - DNA, 25 bp, Homo sapien
acatcatattcagcccatcacgctg

SEQ ID NO: 5842257 - DNA, 25 bp, Homo sapien
ttcagcccatcacgctgtggtttga

SEQ ID NO: 5842258 - DNA, 25 bp, Homo sapien
atcacgctgtggtttgatgatgcgc

SEQ ID NO: 5842259 - DNA, 25 bp, Homo sapien
ggtttgatgatgcgctcagtgccat

SEQ ID NO: 5842260 - DNA, 25 bp, Homo sapien
atgatgcgctcagtgccatgcgttc

SEQ ID NO: 5842261 - DNA, 25 bp, Homo sapien
ctcagtgccatgcgttcgctgaaag

SEQ ID NO: 5842262 - DNA, 25 bp, Homo sapien
catgcgttcgctgaaaggcatcggt

SEQ ID NO: 5842263 - DNA, 25 bp, Homo sapien
ctgaaaggcatcggtgccacgcatc

SEQ ID NO: 5842264 - DNA, 25 bp, Homo sapien
ggcatcggtgccacgcatcttcatg

SEQ ID NO: 5842265 - DNA, 25 bp, Homo sapien
tgccacgcatcttcatgaagggcgc

SEQ ID NO: 5842266 - DNA, 25 bp, Homo sapien
atcttcatgaagggcgcgacccgcg

SEQ ID NO: 5842267 - DNA, 25 bp, Homo sapien
attaacgcgttcgcagttgcagcga

SEQ ID NO: 5842268 - DNA, 25 bp, Homo sapien
tacccgaacgtcatcaggcgtggca

SEQ ID NO: 5842269 - DNA, 25 bp, Homo sapien
gcgttcgcagttgcagcgattgcaa

SEQ ID NO: 5842270 - DNA, 25 bp, Homo sapien
ggtggacgagcgtccgcatgctaat

SEQ ID NO: 5842271 - DNA, 25 bp, Homo sapien
agttgcagcgattgcaactggcctg

SEQ ID NO: 5842272 - DNA, 25 bp, Homo sapien
cgtccgcatgctaatcgctttttac

SEQ ID NO: 5842273 - DNA, 25 bp, Homo sapien
tttaccgccagatgaaatcgaacag

SEQ ID NO: 5842274 - DNA, 25 bp, Homo sapien
gatgaaatcgaacagtcgctgaacg

SEQ ID NO: 5842275 - DNA, 25 bp, Homo sapien
aacagtcgctgaacggcgtgcatta

SEQ ID NO: 5842276 - DNA, 25 bp, Homo sapien
acatcatattcagcccatcacgctg

SEQ ID NO: 5842277 - DNA, 25 bp, Homo sapien
ttcagcccatcacgctgtggtttga

SEQ ID NO: 5842278 - DNA, 25 bp, Homo sapien
atcacgctgtggtttgatgatgcgc

SEQ ID NO: 5842279 - DNA, 25 bp, Homo sapien
ggtttgatgatgcgctcagtgccat

SEQ ID NO: 5842280 - DNA, 25 bp, Homo sapien
atgatgcgctcagtgccatgcgttc

SEQ ID NO: 5842281 - DNA, 25 bp, Homo sapien
ctcagtgccatgcgttcgctgaaag

SEQ ID NO: 5842282 - DNA, 25 bp, Homo sapien
catgcgttcgctgaaaggcatcggt

SEQ ID NO: 5842283 - DNA, 25 bp, Homo sapien
ctgaaaggcatcggtgccacgcatc

SEQ ID NO: 5842284 - DNA, 25 bp, Homo sapien
ggcatcggtgccacgcatcttcatg

SEQ ID NO: 5842285 - DNA, 25 bp, Homo sapien
tgccacgcatcttcatgaagggcgc

SEQ ID NO: 5842286 - DNA, 25 bp, Homo sapien
atcttcatgaagggcgcgacccgcg

SEQ ID NO: 5842287 - DNA, 25 bp, Homo sapien
attaacgcgttcgcagttgcagcga

SEQ ID NO: 5842288 - DNA, 25 bp, Homo sapien
tacccgaacgtcatcaggcgtggca

SEQ ID NO: 5842289 - DNA, 25 bp, Homo sapien
gcgttcgcagttgcagcgattgcaa

SEQ ID NO: 5842290 - DNA, 25 bp, Homo sapien
ggtggacgagcgtccgcatgctaat

SEQ ID NO: 5842291 - DNA, 25 bp, Homo sapien
agttgcagcgattgcaactggcctg

SEQ ID NO: 5842292 - DNA, 25 bp, Homo sapien
cgtccgcatgctaatcgctttttac

SEQ ID NO: 5842293 - DNA, 25 bp, Homo sapien
tttaccgccagatgaaatcgaacag

SEQ ID NO: 5842294 - DNA, 25 bp, Homo sapien
gatgaaatcgaacagtcgctgaacg

SEQ ID NO: 5842295 - DNA, 25 bp, Homo sapien
aacagtcgctgaacggcgtgcatta

SEQ ID NO: 5842296 - DNA, 25 bp, Homo sapien
acatcatattcagcccatcacgctg

SEQ ID NO: 5842297 - DNA, 25 bp, Homo sapien
ttcagcccatcacgctgtggtttga

SEQ ID NO: 5842298 - DNA, 25 bp, Homo sapien
atcacgctgtggtttgatgatgcgc

SEQ ID NO: 5842299 - DNA, 25 bp, Homo sapien
ggtttgatgatgcgctcagtgccat

SEQ ID NO: 5842300 - DNA, 25 bp, Homo sapien
atgatgcgctcagtgccatgcgttc

SEQ ID NO: 5842301 - DNA, 25 bp, Homo sapien
ctcagtgccatgcgttcgctgaaag

SEQ ID NO: 5842302 - DNA, 25 bp, Homo sapien
catgcgttcgctgaaaggcatcggt

SEQ ID NO: 5842303 - DNA, 25 bp, Homo sapien
ctgaaaggcatcggtgccacgcatc

SEQ ID NO: 5842304 - DNA, 25 bp, Homo sapien
ggcatcggtgccacgcatcttcatg

SEQ ID NO: 5842305 - DNA, 25 bp, Homo sapien
tgccacgcatcttcatgaagggcgc

SEQ ID NO: 5842306 - DNA, 25 bp, Homo sapien
atcttcatgaagggcgcgacccgcg

SEQ ID NO: 5842307 - DNA, 25 bp, Homo sapien
attaacgcgttcgcagttgcagcga

SEQ ID NO: 5842308 - DNA, 25 bp, Homo sapien
tacccgaacgtcatcaggcgtggca

SEQ ID NO: 5842309 - DNA, 25 bp, Homo sapien
gcgttcgcagttgcagcgattgcaa

SEQ ID NO: 5842310 - DNA, 25 bp, Homo sapien
ggtggacgagcgtccgcatgctaat

SEQ ID NO: 5842311 - DNA, 25 bp, Homo sapien
agttgcagcgattgcaactggcctg

SEQ ID NO: 5842312 - DNA, 25 bp, Homo sapien
cgtccgcatgctaatcgctttttac

SEQ ID NO: 5842313 - DNA, 25 bp, Homo sapien
tttaccgccagatgaaatcgaacag

SEQ ID NO: 5842314 - DNA, 25 bp, Homo sapien
gatgaaatcgaacagtcgctgaacg

SEQ ID NO: 5842315 - DNA, 25 bp, Homo sapien
aacagtcgctgaacggcgtgcatta

SEQ ID NO: 5842316 - DNA, 25 bp, Homo sapien
acatcatattcagcccatcacgctg

SEQ ID NO: 5842317 - DNA, 25 bp, Homo sapien
ttcagcccatcacgctgtggtttga

SEQ ID NO: 5842318 - DNA, 25 bp, Homo sapien
atcacgctgtggtttgatgatgcgc

SEQ ID NO: 5842319 - DNA, 25 bp, Homo sapien
ggtttgatgatgcgctcagtgccat

SEQ ID NO: 5842320 - DNA, 25 bp, Homo sapien
atgatgcgctcagtgccatgcgttc

SEQ ID NO: 5842321 - DNA, 25 bp, Homo sapien
ctcagtgccatgcgttcgctgaaag

SEQ ID NO: 5842322 - DNA, 25 bp, Homo sapien
catgcgttcgctgaaaggcatcggt

SEQ ID NO: 5842323 - DNA, 25 bp, Homo sapien
ctgaaaggcatcggtgccacgcatc

SEQ ID NO: 5842324 - DNA, 25 bp, Homo sapien
ggcatcggtgccacgcatcttcatg

SEQ ID NO: 5842325 - DNA, 25 bp, Homo sapien
tgccacgcatcttcatgaagggcgc

SEQ ID NO: 5842326 - DNA, 25 bp, Homo sapien
atcttcatgaagggcgcgacccgcg

SEQ ID NO: 5842327 - DNA, 25 bp, Homo sapien
attaacgcgttcgcagttgcagcga

SEQ ID NO: 5842328 - DNA, 25 bp, Homo sapien
tacccgaacgtcatcaggcgtggca

SEQ ID NO: 5842329 - DNA, 25 bp, Homo sapien
gcgttcgcagttgcagcgattgcaa

SEQ ID NO: 5842330 - DNA, 25 bp, Homo sapien
ggtggacgagcgtccgcatgctaat

SEQ ID NO: 5842331 - DNA, 25 bp, Homo sapien
agttgcagcgattgcaactggcctg

SEQ ID NO: 5842332 - DNA, 25 bp, Homo sapien
cgtccgcatgctaatcgctttttac

SEQ ID NO: 5842333 - DNA, 25 bp, Homo sapien
tttaccgccagatgaaatcgaacag

SEQ ID NO: 5842334 - DNA, 25 bp, Homo sapien
gatgaaatcgaacagtcgctgaacg

SEQ ID NO: 5842335 - DNA, 25 bp, Homo sapien
aacagtcgctgaacggcgtgcatta

SEQ ID NO: 5842336 - DNA, 25 bp, Homo sapien
acatcatattcagcccatcacgctg

SEQ ID NO: 5842337 - DNA, 25 bp, Homo sapien
ttcagcccatcacgctgtggtttga

SEQ ID NO: 5842338 - DNA, 25 bp, Homo sapien
atcacgctgtggtttgatgatgcgc

SEQ ID NO: 5842339 - DNA, 25 bp, Homo sapien
ggtttgatgatgcgctcagtgccat

SEQ ID NO: 5842340 - DNA, 25 bp, Homo sapien
atgatgcgctcagtgccatgcgttc

SEQ ID NO: 5842341 - DNA, 25 bp, Homo sapien
ctcagtgccatgcgttcgctgaaag

SEQ ID NO: 5842342 - DNA, 25 bp, Homo sapien
catgcgttcgctgaaaggcatcggt

SEQ ID NO: 5842343 - DNA, 25 bp, Homo sapien
ctgaaaggcatcggtgccacgcatc

SEQ ID NO: 5842344 - DNA, 25 bp, Homo sapien
ggcatcggtgccacgcatcttcatg

SEQ ID NO: 5842345 - DNA, 25 bp, Homo sapien
tgccacgcatcttcatgaagggcgc

SEQ ID NO: 5842346 - DNA, 25 bp, Homo sapien
atcttcatgaagggcgcgacccgcg

SEQ ID NO: 5842347 - DNA, 25 bp, Homo sapien
attaacgcgttcgcagttgcagcga

SEQ ID NO: 5842348 - DNA, 25 bp, Homo sapien
tacccgaacgtcatcaggcgtggca

SEQ ID NO: 5842349 - DNA, 25 bp, Homo sapien
gcgttcgcagttgcagcgattgcaa

SEQ ID NO: 5842350 - DNA, 25 bp, Homo sapien
ggtggacgagcgtccgcatgctaat

SEQ ID NO: 5842351 - DNA, 25 bp, Homo sapien
agttgcagcgattgcaactggcctg

SEQ ID NO: 5842352 - DNA, 25 bp, Homo sapien
cgtccgcatgctaatcgctttttac

SEQ ID NO: 5842353 - DNA, 25 bp, Homo sapien
tttaccgccagatgaaatcgaacag

SEQ ID NO: 5842354 - DNA, 25 bp, Homo sapien
gatgaaatcgaacagtcgctgaacg

SEQ ID NO: 5842355 - DNA, 25 bp, Homo sapien
aacagtcgctgaacggcgtgcatta

SEQ ID NO: 5842356 - DNA, 25 bp, Homo sapien
acatcatattcagcccatcacgctg

SEQ ID NO: 5842357 - DNA, 25 bp, Homo sapien
ttcagcccatcacgctgtggtttga

SEQ ID NO: 5842358 - DNA, 25 bp, Homo sapien
atcacgctgtggtttgatgatgcgc

SEQ ID NO: 5842359 - DNA, 25 bp, Homo sapien
ggtttgatgatgcgctcagtgccat

SEQ ID NO: 5842360 - DNA, 25 bp, Homo sapien
atgatgcgctcagtgccatgcgttc

SEQ ID NO: 5842361 - DNA, 25 bp, Homo sapien
ctcagtgccatgcgttcgctgaaag

SEQ ID NO: 5842362 - DNA, 25 bp, Homo sapien
catgcgttcgctgaaaggcatcggt

SEQ ID NO: 5842363 - DNA, 25 bp, Homo sapien
ctgaaaggcatcggtgccacgcatc

SEQ ID NO: 5842364 - DNA, 25 bp, Homo sapien
ggcatcggtgccacgcatcttcatg

SEQ ID NO: 5842365 - DNA, 25 bp, Homo sapien
tgccacgcatcttcatgaagggcgc

SEQ ID NO: 5842366 - DNA, 25 bp, Homo sapien
atcttcatgaagggcgcgacccgcg

SEQ ID NO: 5842367 - DNA, 25 bp, Homo sapien
attaacgcgttcgcagttgcagcga

SEQ ID NO: 5842368 - DNA, 25 bp, Homo sapien
tacccgaacgtcatcaggcgtggca

SEQ ID NO: 5842369 - DNA, 25 bp, Homo sapien
gcgttcgcagttgcagcgattgcaa

SEQ ID NO: 5842370 - DNA, 25 bp, Homo sapien
ggtggacgagcgtccgcatgctaat

SEQ ID NO: 5842371 - DNA, 25 bp, Homo sapien
agttgcagcgattgcaactggcctg

SEQ ID NO: 5842372 - DNA, 25 bp, Homo sapien
cgtccgcatgctaatcgctttttac

SEQ ID NO: 5842373 - DNA, 25 bp, Homo sapien
tttaccgccagatgaaatcgaacag

SEQ ID NO: 5842374 - DNA, 25 bp, Homo sapien
gatgaaatcgaacagtcgctgaacg

SEQ ID NO: 5842375 - DNA, 25 bp, Homo sapien
aacagtcgctgaacggcgtgcatta

SEQ ID NO: 5842376 - DNA, 25 bp, Homo sapien
acatcatattcagcccatcacgctg

SEQ ID NO: 5842377 - DNA, 25 bp, Homo sapien
ttcagcccatcacgctgtggtttga

SEQ ID NO: 5842378 - DNA, 25 bp, Homo sapien
atcacgctgtggtttgatgatgcgc

SEQ ID NO: 5842379 - DNA, 25 bp, Homo sapien
ggtttgatgatgcgctcagtgccat

SEQ ID NO: 5842380 - DNA, 25 bp, Homo sapien
atgatgcgctcagtgccatgcgttc

SEQ ID NO: 5842381 - DNA, 25 bp, Homo sapien
ctcagtgccatgcgttcgctgaaag

SEQ ID NO: 5842382 - DNA, 25 bp, Homo sapien
catgcgttcgctgaaaggcatcggt

SEQ ID NO: 5842383 - DNA, 25 bp, Homo sapien
ctgaaaggcatcggtgccacgcatc

SEQ ID NO: 5842384 - DNA, 25 bp, Homo sapien
ggcatcggtgccacgcatcttcatg

SEQ ID NO: 5842385 - DNA, 25 bp, Homo sapien
tgccacgcatcttcatgaagggcgc

SEQ ID NO: 5842386 - DNA, 25 bp, Homo sapien
atcttcatgaagggcgcgacccgcg

SEQ ID NO: 5842387 - DNA, 25 bp, Homo sapien
attaacgcgttcgcagttgcagcga

SEQ ID NO: 5842388 - DNA, 25 bp, Homo sapien
tacccgaacgtcatcaggcgtggca

SEQ ID NO: 5842389 - DNA, 25 bp, Homo sapien
gcgttcgcagttgcagcgattgcaa

SEQ ID NO: 5842390 - DNA, 25 bp, Homo sapien
ggtggacgagcgtccgcatgctaat

SEQ ID NO: 5842391 - DNA, 25 bp, Homo sapien
agttgcagcgattgcaactggcctg

SEQ ID NO: 5842392 - DNA, 25 bp, Homo sapien
cgtccgcatgctaatcgctttttac

SEQ ID NO: 5842393 - DNA, 25 bp, Homo sapien
tttaccgccagatgaaatcgaacag

SEQ ID NO: 5842394 - DNA, 25 bp, Homo sapien
gatgaaatcgaacagtcgctgaacg

SEQ ID NO: 5842395 - DNA, 25 bp, Homo sapien
aacagtcgctgaacggcgtgcatta

SEQ ID NO: 5842396 - DNA, 25 bp, Homo sapien
acatcatattcagcccatcacgctg

SEQ ID NO: 5842397 - DNA, 25 bp, Homo sapien
ttcagcccatcacgctgtggtttga

SEQ ID NO: 5842398 - DNA, 25 bp, Homo sapien
atcacgctgtggtttgatgatgcgc

SEQ ID NO: 5842399 - DNA, 25 bp, Homo sapien
ggtttgatgatgcgctcagtgccat

SEQ ID NO: 5842400 - DNA, 25 bp, Homo sapien
atgatgcgctcagtgccatgcgttc

SEQ ID NO: 5842401 - DNA, 25 bp, Homo sapien
ctcagtgccatgcgttcgctgaaag

SEQ ID NO: 5842402 - DNA, 25 bp, Homo sapien
catgcgttcgctgaaaggcatcggt

SEQ ID NO: 5842403 - DNA, 25 bp, Homo sapien
ctgaaaggcatcggtgccacgcatc

SEQ ID NO: 5842404 - DNA, 25 bp, Homo sapien
ggcatcggtgccacgcatcttcatg

SEQ ID NO: 5842405 - DNA, 25 bp, Homo sapien
tgccacgcatcttcatgaagggcgc

SEQ ID NO: 5842406 - DNA, 25 bp, Homo sapien
atcttcatgaagggcgcgacccgcg

SEQ ID NO: 5842407 - DNA, 25 bp, Homo sapien
attaacgcgttcgcagttgcagcga

SEQ ID NO: 5842408 - DNA, 25 bp, Homo sapien
tacccgaacgtcatcaggcgtggca

SEQ ID NO: 5842409 - DNA, 25 bp, Homo sapien
gcgttcgcagttgcagcgattgcaa

SEQ ID NO: 5842410 - DNA, 25 bp, Homo sapien
ggtggacgagcgtccgcatgctaat

SEQ ID NO: 5842411 - DNA, 25 bp, Homo sapien
agttgcagcgattgcaactggcctg

SEQ ID NO: 5842412 - DNA, 25 bp, Homo sapien
cgtccgcatgctaatcgctttttac

SEQ ID NO: 5842413 - DNA, 25 bp, Homo sapien
tttaccgccagatgaaatcgaacag

SEQ ID NO: 5842414 - DNA, 25 bp, Homo sapien
gatgaaatcgaacagtcgctgaacg

SEQ ID NO: 5842415 - DNA, 25 bp, Homo sapien
aacagtcgctgaacggcgtgcatta

SEQ ID NO: 5842416 - DNA, 25 bp, Homo sapien
acatcatattcagcccatcacgctg

SEQ ID NO: 5842417 - DNA, 25 bp, Homo sapien
ttcagcccatcacgctgtggtttga

SEQ ID NO: 5842418 - DNA, 25 bp, Homo sapien
atcacgctgtggtttgatgatgcgc

SEQ ID NO: 5842419 - DNA, 25 bp, Homo sapien
ggtttgatgatgcgctcagtgccat

SEQ ID NO: 5842420 - DNA, 25 bp, Homo sapien
atgatgcgctcagtgccatgcgttc

SEQ ID NO: 5842421 - DNA, 25 bp, Homo sapien
ctcagtgccatgcgttcgctgaaag

SEQ ID NO: 5842422 - DNA, 25 bp, Homo sapien
catgcgttcgctgaaaggcatcggt

SEQ ID NO: 5842423 - DNA, 25 bp, Homo sapien
ctgaaaggcatcggtgccacgcatc

SEQ ID NO: 5842424 - DNA, 25 bp, Homo sapien
ggcatcggtgccacgcatcttcatg

SEQ ID NO: 5842425 - DNA, 25 bp, Homo sapien
tgccacgcatcttcatgaagggcgc

SEQ ID NO: 5842426 - DNA, 25 bp, Homo sapien
atcttcatgaagggcgcgacccgcg

SEQ ID NO: 5842427 - DNA, 25 bp, Homo sapien
attaacgcgttcgcagttgcagcga

SEQ ID NO: 5842428 - DNA, 25 bp, Homo sapien
tacccgaacgtcatcaggcgtggca

SEQ ID NO: 5842429 - DNA, 25 bp, Homo sapien
gcgttcgcagttgcagcgattgcaa

SEQ ID NO: 5842430 - DNA, 25 bp, Homo sapien
ggtggacgagcgtccgcatgctaat

SEQ ID NO: 5842431 - DNA, 25 bp, Homo sapien
agttgcagcgattgcaactggcctg

SEQ ID NO: 5842432 - DNA, 25 bp, Homo sapien
cgtccgcatgctaatcgctttttac

SEQ ID NO: 5842433 - DNA, 25 bp, Homo sapien
tttaccgccagatgaaatcgaacag

SEQ ID NO: 5842434 - DNA, 25 bp, Homo sapien
gatgaaatcgaacagtcgctgaacg

SEQ ID NO: 5842435 - DNA, 25 bp, Homo sapien
aacagtcgctgaacggcgtgcatta

SEQ ID NO: 5842436 - DNA, 25 bp, Homo sapien
acatcatattcagcccatcacgctg

SEQ ID NO: 5842437 - DNA, 25 bp, Homo sapien
ttcagcccatcacgctgtggtttga

SEQ ID NO: 5842438 - DNA, 25 bp, Homo sapien
atcacgctgtggtttgatgatgcgc

SEQ ID NO: 5842439 - DNA, 25 bp, Homo sapien
ggtttgatgatgcgctcagtgccat

SEQ ID NO: 5842440 - DNA, 25 bp, Homo sapien
atgatgcgctcagtgccatgcgttc

SEQ ID NO: 5842441 - DNA, 25 bp, Homo sapien
ctcagtgccatgcgttcgctgaaag

SEQ ID NO: 5842442 - DNA, 25 bp, Homo sapien
catgcgttcgctgaaaggcatcggt

SEQ ID NO: 5842443 - DNA, 25 bp, Homo sapien
ctgaaaggcatcggtgccacgcatc

SEQ ID NO: 5842444 - DNA, 25 bp, Homo sapien
ggcatcggtgccacgcatcttcatg

SEQ ID NO: 5842445 - DNA, 25 bp, Homo sapien
tgccacgcatcttcatgaagggcgc

SEQ ID NO: 5842446 - DNA, 25 bp, Homo sapien
atcttcatgaagggcgcgacccgcg

SEQ ID NO: 5842447 - DNA, 25 bp, Homo sapien
attaacgcgttcgcagttgcagcga

SEQ ID NO: 5842448 - DNA, 25 bp, Homo sapien
tacccgaacgtcatcaggcgtggca

SEQ ID NO: 5842449 - DNA, 25 bp, Homo sapien
gcgttcgcagttgcagcgattgcaa

SEQ ID NO: 5842450 - DNA, 25 bp, Homo sapien
ggtggacgagcgtccgcatgctaat

SEQ ID NO: 5842451 - DNA, 25 bp, Homo sapien
agttgcagcgattgcaactggcctg

SEQ ID NO: 5842452 - DNA, 25 bp, Homo sapien
cgtccgcatgctaatcgctttttac

SEQ ID NO: 5842453 - DNA, 25 bp, Homo sapien
tttaccgccagatgaaatcgaacag

SEQ ID NO: 5842454 - DNA, 25 bp, Homo sapien
gatgaaatcgaacagtcgctgaacg

SEQ ID NO: 5842455 - DNA, 25 bp, Homo sapien
aacagtcgctgaacggcgtgcatta

SEQ ID NO: 5842456 - DNA, 25 bp, Homo sapien
acatcatattcagcccatcacgctg

SEQ ID NO: 5842457 - DNA, 25 bp, Homo sapien
ttcagcccatcacgctgtggtttga

SEQ ID NO: 5842458 - DNA, 25 bp, Homo sapien
atcacgctgtggtttgatgatgcgc

SEQ ID NO: 5842459 - DNA, 25 bp, Homo sapien
ggtttgatgatgcgctcagtgccat

SEQ ID NO: 5842460 - DNA, 25 bp, Homo sapien
atgatgcgctcagtgccatgcgttc

SEQ ID NO: 5842461 - DNA, 25 bp, Homo sapien
ctcagtgccatgcgttcgctgaaag

SEQ ID NO: 5842462 - DNA, 25 bp, Homo sapien
catgcgttcgctgaaaggcatcggt

SEQ ID NO: 5842463 - DNA, 25 bp, Homo sapien
ctgaaaggcatcggtgccacgcatc

SEQ ID NO: 5842464 - DNA, 25 bp, Homo sapien
ggcatcggtgccacgcatcttcatg

SEQ ID NO: 5842465 - DNA, 25 bp, Homo sapien
tgccacgcatcttcatgaagggcgc

SEQ ID NO: 5842466 - DNA, 25 bp, Homo sapien
atcttcatgaagggcgcgacccgcg

SEQ ID NO: 5842467 - DNA, 25 bp, Homo sapien
attaacgcgttcgcagttgcagcga

SEQ ID NO: 5842468 - DNA, 25 bp, Homo sapien
tacccgaacgtcatcaggcgtggca

SEQ ID NO: 5842469 - DNA, 25 bp, Homo sapien
gcgttcgcagttgcagcgattgcaa

SEQ ID NO: 5842470 - DNA, 25 bp, Homo sapien
ggtggacgagcgtccgcatgctaat

SEQ ID NO: 5842471 - DNA, 25 bp, Homo sapien
agttgcagcgattgcaactggcctg

SEQ ID NO: 5842472 - DNA, 25 bp, Homo sapien
cgtccgcatgctaatcgctttttac

SEQ ID NO: 5842473 - DNA, 25 bp, Homo sapien
tttaccgccagatgaaatcgaacag

SEQ ID NO: 5842474 - DNA, 25 bp, Homo sapien
gatgaaatcgaacagtcgctgaacg

SEQ ID NO: 5842475 - DNA, 25 bp, Homo sapien
aacagtcgctgaacggcgtgcatta

SEQ ID NO: 5842476 - DNA, 25 bp, Homo sapien
acatcatattcagcccatcacgctg

SEQ ID NO: 5842477 - DNA, 25 bp, Homo sapien
ttcagcccatcacgctgtggtttga

SEQ ID NO: 5842478 - DNA, 25 bp, Homo sapien
atcacgctgtggtttgatgatgcgc

SEQ ID NO: 5842479 - DNA, 25 bp, Homo sapien
ggtttgatgatgcgctcagtgccat

SEQ ID NO: 5842480 - DNA, 25 bp, Homo sapien
atgatgcgctcagtgccatgcgttc

SEQ ID NO: 5842481 - DNA, 25 bp, Homo sapien
ctcagtgccatgcgttcgctgaaag

SEQ ID NO: 5842482 - DNA, 25 bp, Homo sapien
catgcgttcgctgaaaggcatcggt

SEQ ID NO: 5842483 - DNA, 25 bp, Homo sapien
ctgaaaggcatcggtgccacgcatc

SEQ ID NO: 5842484 - DNA, 25 bp, Homo sapien
ggcatcggtgccacgcatcttcatg

SEQ ID NO: 5842485 - DNA, 25 bp, Homo sapien
tgccacgcatcttcatgaagggcgc

SEQ ID NO: 5842486 - DNA, 25 bp, Homo sapien
atcttcatgaagggcgcgacccgcg

SEQ ID NO: 5842487 - DNA, 25 bp, Homo sapien
attaacgcgttcgcagttgcagcga

SEQ ID NO: 5842488 - DNA, 25 bp, Homo sapien
tacccgaacgtcatcaggcgtggca

SEQ ID NO: 5842489 - DNA, 25 bp, Homo sapien
gcgttcgcagttgcagcgattgcaa

SEQ ID NO: 5842490 - DNA, 25 bp, Homo sapien
ggtggacgagcgtccgcatgctaat

SEQ ID NO: 5842491 - DNA, 25 bp, Homo sapien
agttgcagcgattgcaactggcctg

SEQ ID NO: 5842492 - DNA, 25 bp, Homo sapien
cgtccgcatgctaatcgctttttac

SEQ ID NO: 5842493 - DNA, 25 bp, Homo sapien
tttaccgccagatgaaatcgaacag

SEQ ID NO: 5842494 - DNA, 25 bp, Homo sapien
gatgaaatcgaacagtcgctgaacg

SEQ ID NO: 5842495 - DNA, 25 bp, Homo sapien
aacagtcgctgaacggcgtgcatta

SEQ ID NO: 5842496 - DNA, 25 bp, Homo sapien
acatcatattcagcccatcacgctg

SEQ ID NO: 5842497 - DNA, 25 bp, Homo sapien
ttcagcccatcacgctgtggtttga

SEQ ID NO: 5842498 - DNA, 25 bp, Homo sapien
atcacgctgtggtttgatgatgcgc

SEQ ID NO: 5842499 - DNA, 25 bp, Homo sapien
ggtttgatgatgcgctcagtgccat

SEQ ID NO: 5842500 - DNA, 25 bp, Homo sapien
atgatgcgctcagtgccatgcgttc

SEQ ID NO: 5842501 - DNA, 25 bp, Homo sapien
ctcagtgccatgcgttcgctgaaag

SEQ ID NO: 5842502 - DNA, 25 bp, Homo sapien
catgcgttcgctgaaaggcatcggt

SEQ ID NO: 5842503 - DNA, 25 bp, Homo sapien
ctgaaaggcatcggtgccacgcatc

SEQ ID NO: 5842504 - DNA, 25 bp, Homo sapien
ggcatcggtgccacgcatcttcatg

SEQ ID NO: 5842505 - DNA, 25 bp, Homo sapien
tgccacgcatcttcatgaagggcgc

SEQ ID NO: 5842506 - DNA, 25 bp, Homo sapien
atcttcatgaagggcgcgacccgcg

SEQ ID NO: 5842507 - DNA, 25 bp, Homo sapien
attaacgcgttcgcagttgcagcga

SEQ ID NO: 5842508 - DNA, 25 bp, Homo sapien
tacccgaacgtcatcaggcgtggca

SEQ ID NO: 5842509 - DNA, 25 bp, Homo sapien
gcgttcgcagttgcagcgattgcaa

SEQ ID NO: 5842510 - DNA, 25 bp, Homo sapien
ggtggacgagcgtccgcatgctaat

SEQ ID NO: 5842511 - DNA, 25 bp, Homo sapien
agttgcagcgattgcaactggcctg

SEQ ID NO: 5842512 - DNA, 25 bp, Homo sapien
cgtccgcatgctaatcgctttttac

SEQ ID NO: 5842513 - DNA, 25 bp, Homo sapien
tttaccgccagatgaaatcgaacag

SEQ ID NO: 5842514 - DNA, 25 bp, Homo sapien
gatgaaatcgaacagtcgctgaacg

SEQ ID NO: 5842515 - DNA, 25 bp, Homo sapien
aacagtcgctgaacggcgtgcatta

SEQ ID NO: 5842516 - DNA, 25 bp, Homo sapien
acatcatattcagcccatcacgctg

SEQ ID NO: 5842517 - DNA, 25 bp, Homo sapien
ttcagcccatcacgctgtggtttga

SEQ ID NO: 5842518 - DNA, 25 bp, Homo sapien
atcacgctgtggtttgatgatgcgc

SEQ ID NO: 5842519 - DNA, 25 bp, Homo sapien
ggtttgatgatgcgctcagtgccat

SEQ ID NO: 5842520 - DNA, 25 bp, Homo sapien
atgatgcgctcagtgccatgcgttc

SEQ ID NO: 5842521 - DNA, 25 bp, Homo sapien
ctcagtgccatgcgttcgctgaaag

SEQ ID NO: 5842522 - DNA, 25 bp, Homo sapien
catgcgttcgctgaaaggcatcggt

SEQ ID NO: 5842523 - DNA, 25 bp, Homo sapien
ctgaaaggcatcggtgccacgcatc

SEQ ID NO: 5842524 - DNA, 25 bp, Homo sapien
ggcatcggtgccacgcatcttcatg

SEQ ID NO: 5842525 - DNA, 25 bp, Homo sapien
tgccacgcatcttcatgaagggcgc

SEQ ID NO: 5842526 - DNA, 25 bp, Homo sapien
atcttcatgaagggcgcgacccgcg

SEQ ID NO: 5842527 - DNA, 25 bp, Homo sapien
attaacgcgttcgcagttgcagcga

SEQ ID NO: 5842528 - DNA, 25 bp, Homo sapien
tacccgaacgtcatcaggcgtggca

SEQ ID NO: 5842529 - DNA, 25 bp, Homo sapien
gcgttcgcagttgcagcgattgcaa

SEQ ID NO: 5842530 - DNA, 25 bp, Homo sapien
ggtggacgagcgtccgcatgctaat

SEQ ID NO: 5842531 - DNA, 25 bp, Homo sapien
agttgcagcgattgcaactggcctg

SEQ ID NO: 5842532 - DNA, 25 bp, Homo sapien
cgtccgcatgctaatcgctttttac

SEQ ID NO: 5842533 - DNA, 25 bp, Homo sapien
tttaccgccagatgaaatcgaacag

SEQ ID NO: 5842534 - DNA, 25 bp, Homo sapien
gatgaaatcgaacagtcgctgaacg

SEQ ID NO: 5842535 - DNA, 25 bp, Homo sapien
aacagtcgctgaacggcgtgcatta

SEQ ID NO: 5842536 - DNA, 25 bp, Homo sapien
acatcatattcagcccatcacgctg

SEQ ID NO: 5842537 - DNA, 25 bp, Homo sapien
ttcagcccatcacgctgtggtttga

SEQ ID NO: 5842538 - DNA, 25 bp, Homo sapien
atcacgctgtggtttgatgatgcgc

SEQ ID NO: 5842539 - DNA, 25 bp, Homo sapien
ggtttgatgatgcgctcagtgccat

SEQ ID NO: 5842540 - DNA, 25 bp, Homo sapien
atgatgcgctcagtgccatgcgttc

SEQ ID NO: 5842541 - DNA, 25 bp, Homo sapien
ctcagtgccatgcgttcgctgaaag

SEQ ID NO: 5842542 - DNA, 25 bp, Homo sapien
catgcgttcgctgaaaggcatcggt

SEQ ID NO: 5842543 - DNA, 25 bp, Homo sapien
ctgaaaggcatcggtgccacgcatc

SEQ ID NO: 5842544 - DNA, 25 bp, Homo sapien
ggcatcggtgccacgcatcttcatg

SEQ ID NO: 5842545 - DNA, 25 bp, Homo sapien
tgccacgcatcttcatgaagggcgc

SEQ ID NO: 5842546 - DNA, 25 bp, Homo sapien
atcttcatgaagggcgcgacccgcg

SEQ ID NO: 5842547 - DNA, 25 bp, Homo sapien
attaacgcgttcgcagttgcagcga

SEQ ID NO: 5842548 - DNA, 25 bp, Homo sapien
tacccgaacgtcatcaggcgtggca

SEQ ID NO: 5842549 - DNA, 25 bp, Homo sapien
gcgttcgcagttgcagcgattgcaa

SEQ ID NO: 5842550 - DNA, 25 bp, Homo sapien
ggtggacgagcgtccgcatgctaat

SEQ ID NO: 5842551 - DNA, 25 bp, Homo sapien
agttgcagcgattgcaactggcctg

SEQ ID NO: 5842552 - DNA, 25 bp, Homo sapien
cgtccgcatgctaatcgctttttac

SEQ ID NO: 5842553 - DNA, 25 bp, Homo sapien
tttaccgccagatgaaatcgaacag

SEQ ID NO: 5842554 - DNA, 25 bp, Homo sapien
gatgaaatcgaacagtcgctgaacg

SEQ ID NO: 5842555 - DNA, 25 bp, Homo sapien
aacagtcgctgaacggcgtgcatta

SEQ ID NO: 5842556 - DNA, 25 bp, Homo sapien
acatcatattcagcccatcacgctg

SEQ ID NO: 5842557 - DNA, 25 bp, Homo sapien
ttcagcccatcacgctgtggtttga

SEQ ID NO: 5842558 - DNA, 25 bp, Homo sapien
atcacgctgtggtttgatgatgcgc

SEQ ID NO: 5842559 - DNA, 25 bp, Homo sapien
ggtttgatgatgcgctcagtgccat

SEQ ID NO: 5842560 - DNA, 25 bp, Homo sapien
atgatgcgctcagtgccatgcgttc

SEQ ID NO: 5842561 - DNA, 25 bp, Homo sapien
ctcagtgccatgcgttcgctgaaag

SEQ ID NO: 5842562 - DNA, 25 bp, Homo sapien
catgcgttcgctgaaaggcatcggt

SEQ ID NO: 5842563 - DNA, 25 bp, Homo sapien
ctgaaaggcatcggtgccacgcatc

SEQ ID NO: 5842564 - DNA, 25 bp, Homo sapien
ggcatcggtgccacgcatcttcatg

SEQ ID NO: 5842565 - DNA, 25 bp, Homo sapien
tgccacgcatcttcatgaagggcgc

SEQ ID NO: 5842566 - DNA, 25 bp, Homo sapien
atcttcatgaagggcgcgacccgcg

SEQ ID NO: 5842567 - DNA, 25 bp, Homo sapien
attaacgcgttcgcagttgcagcga

SEQ ID NO: 5842568 - DNA, 25 bp, Homo sapien
tacccgaacgtcatcaggcgtggca

SEQ ID NO: 5842569 - DNA, 25 bp, Homo sapien
gcgttcgcagttgcagcgattgcaa

SEQ ID NO: 5842570 - DNA, 25 bp, Homo sapien
ggtggacgagcgtccgcatgctaat

SEQ ID NO: 5842571 - DNA, 25 bp, Homo sapien
agttgcagcgattgcaactggcctg

SEQ ID NO: 5842572 - DNA, 25 bp, Homo sapien
cgtccgcatgctaatcgctttttac

SEQ ID NO: 5842573 - DNA, 25 bp, Homo sapien
tttaccgccagatgaaatcgaacag

SEQ ID NO: 5842574 - DNA, 25 bp, Homo sapien
gatgaaatcgaacagtcgctgaacg

SEQ ID NO: 5842575 - DNA, 25 bp, Homo sapien
aacagtcgctgaacggcgtgcatta

SEQ ID NO: 5842576 - DNA, 25 bp, Homo sapien
acatcatattcagcccatcacgctg

SEQ ID NO: 5842577 - DNA, 25 bp, Homo sapien
ttcagcccatcacgctgtggtttga

SEQ ID NO: 5842578 - DNA, 25 bp, Homo sapien
atcacgctgtggtttgatgatgcgc

SEQ ID NO: 5842579 - DNA, 25 bp, Homo sapien
ggtttgatgatgcgctcagtgccat

SEQ ID NO: 5842580 - DNA, 25 bp, Homo sapien
atgatgcgctcagtgccatgcgttc

SEQ ID NO: 5842581 - DNA, 25 bp, Homo sapien
ctcagtgccatgcgttcgctgaaag

SEQ ID NO: 5842582 - DNA, 25 bp, Homo sapien
catgcgttcgctgaaaggcatcggt

SEQ ID NO: 5842583 - DNA, 25 bp, Homo sapien
ctgaaaggcatcggtgccacgcatc

SEQ ID NO: 5842584 - DNA, 25 bp, Homo sapien
ggcatcggtgccacgcatcttcatg

SEQ ID NO: 5842585 - DNA, 25 bp, Homo sapien
tgccacgcatcttcatgaagggcgc

SEQ ID NO: 5842586 - DNA, 25 bp, Homo sapien
atcttcatgaagggcgcgacccgcg

SEQ ID NO: 5842587 - DNA, 25 bp, Homo sapien
attaacgcgttcgcagttgcagcga

SEQ ID NO: 5842588 - DNA, 25 bp, Homo sapien
tacccgaacgtcatcaggcgtggca

SEQ ID NO: 5842589 - DNA, 25 bp, Homo sapien
gcgttcgcagttgcagcgattgcaa

SEQ ID NO: 5842590 - DNA, 25 bp, Homo sapien
ggtggacgagcgtccgcatgctaat

SEQ ID NO: 5842591 - DNA, 25 bp, Homo sapien
agttgcagcgattgcaactggcctg

SEQ ID NO: 5842592 - DNA, 25 bp, Homo sapien
cgtccgcatgctaatcgctttttac

SEQ ID NO: 5842593 - DNA, 25 bp, Homo sapien
tttaccgccagatgaaatcgaacag

SEQ ID NO: 5842594 - DNA, 25 bp, Homo sapien
gatgaaatcgaacagtcgctgaacg

SEQ ID NO: 5842595 - DNA, 25 bp, Homo sapien
aacagtcgctgaacggcgtgcatta

SEQ ID NO: 5842596 - DNA, 25 bp, Homo sapien
acatcatattcagcccatcacgctg

SEQ ID NO: 5842597 - DNA, 25 bp, Homo sapien
ttcagcccatcacgctgtggtttga

SEQ ID NO: 5842598 - DNA, 25 bp, Homo sapien
atcacgctgtggtttgatgatgcgc

SEQ ID NO: 5842599 - DNA, 25 bp, Homo sapien
ggtttgatgatgcgctcagtgccat

SEQ ID NO: 5842600 - DNA, 25 bp, Homo sapien
atgatgcgctcagtgccatgcgttc

SEQ ID NO: 5842601 - DNA, 25 bp, Homo sapien
ctcagtgccatgcgttcgctgaaag

SEQ ID NO: 5842602 - DNA, 25 bp, Homo sapien
catgcgttcgctgaaaggcatcggt

SEQ ID NO: 5842603 - DNA, 25 bp, Homo sapien
ctgaaaggcatcggtgccacgcatc

SEQ ID NO: 5842604 - DNA, 25 bp, Homo sapien
ggcatcggtgccacgcatcttcatg

SEQ ID NO: 5842605 - DNA, 25 bp, Homo sapien
tgccacgcatcttcatgaagggcgc

SEQ ID NO: 5842606 - DNA, 25 bp, Homo sapien
atcttcatgaagggcgcgacccgcg

SEQ ID NO: 5842607 - DNA, 25 bp, Homo sapien
attaacgcgttcgcagttgcagcga

SEQ ID NO: 5842608 - DNA, 25 bp, Homo sapien
tacccgaacgtcatcaggcgtggca

SEQ ID NO: 5842609 - DNA, 25 bp, Homo sapien
gcgttcgcagttgcagcgattgcaa

SEQ ID NO: 5842610 - DNA, 25 bp, Homo sapien
ggtggacgagcgtccgcatgctaat

SEQ ID NO: 5842611 - DNA, 25 bp, Homo sapien
agttgcagcgattgcaactggcctg

SEQ ID NO: 5842612 - DNA, 25 bp, Homo sapien
cgtccgcatgctaatcgctttttac

SEQ ID NO: 5842613 - DNA, 25 bp, Homo sapien
tttaccgccagatgaaatcgaacag

SEQ ID NO: 5842614 - DNA, 25 bp, Homo sapien
gatgaaatcgaacagtcgctgaacg

SEQ ID NO: 5842615 - DNA, 25 bp, Homo sapien
aacagtcgctgaacggcgtgcatta

SEQ ID NO: 5842616 - DNA, 25 bp, Homo sapien
acatcatattcagcccatcacgctg

SEQ ID NO: 5842617 - DNA, 25 bp, Homo sapien
ttcagcccatcacgctgtggtttga

SEQ ID NO: 5842618 - DNA, 25 bp, Homo sapien
atcacgctgtggtttgatgatgcgc

SEQ ID NO: 5842619 - DNA, 25 bp, Homo sapien
ggtttgatgatgcgctcagtgccat

SEQ ID NO: 5842620 - DNA, 25 bp, Homo sapien
atgatgcgctcagtgccatgcgttc

SEQ ID NO: 5842621 - DNA, 25 bp, Homo sapien
ctcagtgccatgcgttcgctgaaag

SEQ ID NO: 5842622 - DNA, 25 bp, Homo sapien
catgcgttcgctgaaaggcatcggt

SEQ ID NO: 5842623 - DNA, 25 bp, Homo sapien
ctgaaaggcatcggtgccacgcatc

SEQ ID NO: 5842624 - DNA, 25 bp, Homo sapien
ggcatcggtgccacgcatcttcatg

SEQ ID NO: 5842625 - DNA, 25 bp, Homo sapien
tgccacgcatcttcatgaagggcgc

SEQ ID NO: 5842626 - DNA, 25 bp, Homo sapien
atcttcatgaagggcgcgacccgcg

SEQ ID NO: 5842627 - DNA, 25 bp, Homo sapien
attaacgcgttcgcagttgcagcga

SEQ ID NO: 5842628 - DNA, 25 bp, Homo sapien
tacccgaacgtcatcaggcgtggca

SEQ ID NO: 5842629 - DNA, 25 bp, Homo sapien
gcgttcgcagttgcagcgattgcaa

SEQ ID NO: 5842630 - DNA, 25 bp, Homo sapien
ggtggacgagcgtccgcatgctaat

SEQ ID NO: 5842631 - DNA, 25 bp, Homo sapien
agttgcagcgattgcaactggcctg

SEQ ID NO: 5842632 - DNA, 25 bp, Homo sapien
cgtccgcatgctaatcgctttttac

SEQ ID NO: 5842633 - DNA, 25 bp, Homo sapien
tttaccgccagatgaaatcgaacag

SEQ ID NO: 5842634 - DNA, 25 bp, Homo sapien
gatgaaatcgaacagtcgctgaacg

SEQ ID NO: 5842635 - DNA, 25 bp, Homo sapien
aacagtcgctgaacggcgtgcatta

SEQ ID NO: 5842636 - DNA, 25 bp, Homo sapien
acatcatattcagcccatcacgctg

SEQ ID NO: 5842637 - DNA, 25 bp, Homo sapien
ttcagcccatcacgctgtggtttga

SEQ ID NO: 5842638 - DNA, 25 bp, Homo sapien
atcacgctgtggtttgatgatgcgc

SEQ ID NO: 5842639 - DNA, 25 bp, Homo sapien
ggtttgatgatgcgctcagtgccat

SEQ ID NO: 5842640 - DNA, 25 bp, Homo sapien
atgatgcgctcagtgccatgcgttc

SEQ ID NO: 5842641 - DNA, 25 bp, Homo sapien
ctcagtgccatgcgttcgctgaaag

SEQ ID NO: 5842642 - DNA, 25 bp, Homo sapien
catgcgttcgctgaaaggcatcggt

SEQ ID NO: 5842643 - DNA, 25 bp, Homo sapien
ctgaaaggcatcggtgccacgcatc

SEQ ID NO: 5842644 - DNA, 25 bp, Homo sapien
ggcatcggtgccacgcatcttcatg

SEQ ID NO: 5842645 - DNA, 25 bp, Homo sapien
tgccacgcatcttcatgaagggcgc

SEQ ID NO: 5842646 - DNA, 25 bp, Homo sapien
atcttcatgaagggcgcgacccgcg

SEQ ID NO: 5842647 - DNA, 25 bp, Homo sapien
attaacgcgttcgcagttgcagcga

SEQ ID NO: 5842648 - DNA, 25 bp, Homo sapien
tacccgaacgtcatcaggcgtggca

SEQ ID NO: 5842649 - DNA, 25 bp, Homo sapien
gcgttcgcagttgcagcgattgcaa

SEQ ID NO: 5842650 - DNA, 25 bp, Homo sapien
ggtggacgagcgtccgcatgctaat

SEQ ID NO: 5842651 - DNA, 25 bp, Homo sapien
agttgcagcgattgcaactggcctg

SEQ ID NO: 5842652 - DNA, 25 bp, Homo sapien
cgtccgcatgctaatcgctttttac

SEQ ID NO: 5842653 - DNA, 25 bp, Homo sapien
tttaccgccagatgaaatcgaacag

SEQ ID NO: 5842654 - DNA, 25 bp, Homo sapien
gatgaaatcgaacagtcgctgaacg

SEQ ID NO: 5842655 - DNA, 25 bp, Homo sapien
aacagtcgctgaacggcgtgcatta

SEQ ID NO: 5842656 - DNA, 25 bp, Homo sapien
acatcatattcagcccatcacgctg

SEQ ID NO: 5842657 - DNA, 25 bp, Homo sapien
ttcagcccatcacgctgtggtttga

SEQ ID NO: 5842658 - DNA, 25 bp, Homo sapien
atcacgctgtggtttgatgatgcgc

SEQ ID NO: 5842659 - DNA, 25 bp, Homo sapien
ggtttgatgatgcgctcagtgccat

SEQ ID NO: 5842660 - DNA, 25 bp, Homo sapien
atgatgcgctcagtgccatgcgttc

SEQ ID NO: 5842661 - DNA, 25 bp, Homo sapien
ctcagtgccatgcgttcgctgaaag

SEQ ID NO: 5842662 - DNA, 25 bp, Homo sapien
catgcgttcgctgaaaggcatcggt

SEQ ID NO: 5842663 - DNA, 25 bp, Homo sapien
ctgaaaggcatcggtgccacgcatc

SEQ ID NO: 5842664 - DNA, 25 bp, Homo sapien
ggcatcggtgccacgcatcttcatg

SEQ ID NO: 5842665 - DNA, 25 bp, Homo sapien
tgccacgcatcttcatgaagggcgc

SEQ ID NO: 5842666 - DNA, 25 bp, Homo sapien
atcttcatgaagggcgcgacccgcg

SEQ ID NO: 5842667 - DNA, 25 bp, Homo sapien
attaacgcgttcgcagttgcagcga

SEQ ID NO: 5842668 - DNA, 25 bp, Homo sapien
tacccgaacgtcatcaggcgtggca

SEQ ID NO: 5842669 - DNA, 25 bp, Homo sapien
gcgttcgcagttgcagcgattgcaa

SEQ ID NO: 5842670 - DNA, 25 bp, Homo sapien
ggtggacgagcgtccgcatgctaat

SEQ ID NO: 5842671 - DNA, 25 bp, Homo sapien
agttgcagcgattgcaactggcctg

SEQ ID NO: 5842672 - DNA, 25 bp, Homo sapien
cgtccgcatgctaatcgctttttac

SEQ ID NO: 5842673 - DNA, 25 bp, Homo sapien
tttaccgccagatgaaatcgaacag

SEQ ID NO: 5842674 - DNA, 25 bp, Homo sapien
gatgaaatcgaacagtcgctgaacg

SEQ ID NO: 5842675 - DNA, 25 bp, Homo sapien
aacagtcgctgaacggcgtgcatta

SEQ ID NO: 5842676 - DNA, 25 bp, Homo sapien
acatcatattcagcccatcacgctg

SEQ ID NO: 5842677 - DNA, 25 bp, Homo sapien
ttcagcccatcacgctgtggtttga

SEQ ID NO: 5842678 - DNA, 25 bp, Homo sapien
atcacgctgtggtttgatgatgcgc

SEQ ID NO: 5842679 - DNA, 25 bp, Homo sapien
ggtttgatgatgcgctcagtgccat

SEQ ID NO: 5842680 - DNA, 25 bp, Homo sapien
atgatgcgctcagtgccatgcgttc

SEQ ID NO: 5842681 - DNA, 25 bp, Homo sapien
ctcagtgccatgcgttcgctgaaag

SEQ ID NO: 5842682 - DNA, 25 bp, Homo sapien
catgcgttcgctgaaaggcatcggt

SEQ ID NO: 5842683 - DNA, 25 bp, Homo sapien
ctgaaaggcatcggtgccacgcatc

SEQ ID NO: 5842684 - DNA, 25 bp, Homo sapien
ggcatcggtgccacgcatcttcatg

SEQ ID NO: 5842685 - DNA, 25 bp, Homo sapien
tgccacgcatcttcatgaagggcgc

SEQ ID NO: 5842686 - DNA, 25 bp, Homo sapien
atcttcatgaagggcgcgacccgcg

SEQ ID NO: 5842687 - DNA, 25 bp, Homo sapien
attaacgcgttcgcagttgcagcga

SEQ ID NO: 5842688 - DNA, 25 bp, Homo sapien
tacccgaacgtcatcaggcgtggca

SEQ ID NO: 5842689 - DNA, 25 bp, Homo sapien
gcgttcgcagttgcagcgattgcaa

SEQ ID NO: 5842690 - DNA, 25 bp, Homo sapien
ggtggacgagcgtccgcatgctaat

SEQ ID NO: 5842691 - DNA, 25 bp, Homo sapien
agttgcagcgattgcaactggcctg

SEQ ID NO: 5842692 - DNA, 25 bp, Homo sapien
cgtccgcatgctaatcgctttttac

SEQ ID NO: 5842693 - DNA, 25 bp, Homo sapien
tttaccgccagatgaaatcgaacag

SEQ ID NO: 5842694 - DNA, 25 bp, Homo sapien
gatgaaatcgaacagtcgctgaacg

SEQ ID NO: 5842695 - DNA, 25 bp, Homo sapien
aacagtcgctgaacggcgtgcatta

SEQ ID NO: 5842696 - DNA, 25 bp, Homo sapien
acatcatattcagcccatcacgctg

SEQ ID NO: 5842697 - DNA, 25 bp, Homo sapien
ttcagcccatcacgctgtggtttga

SEQ ID NO: 5842698 - DNA, 25 bp, Homo sapien
atcacgctgtggtttgatgatgcgc

SEQ ID NO: 5842699 - DNA, 25 bp, Homo sapien
ggtttgatgatgcgctcagtgccat

SEQ ID NO: 5842700 - DNA, 25 bp, Homo sapien
atgatgcgctcagtgccatgcgttc

SEQ ID NO: 5842701 - DNA, 25 bp, Homo sapien
ctcagtgccatgcgttcgctgaaag

SEQ ID NO: 5842702 - DNA, 25 bp, Homo sapien
catgcgttcgctgaaaggcatcggt

SEQ ID NO: 5842703 - DNA, 25 bp, Homo sapien
ctgaaaggcatcggtgccacgcatc

SEQ ID NO: 5842704 - DNA, 25 bp, Homo sapien
ggcatcggtgccacgcatcttcatg

SEQ ID NO: 5842705 - DNA, 25 bp, Homo sapien
tgccacgcatcttcatgaagggcgc

SEQ ID NO: 5842706 - DNA, 25 bp, Homo sapien
atcttcatgaagggcgcgacccgcg

SEQ ID NO: 5842707 - DNA, 25 bp, Homo sapien
attaacgcgttcgcagttgcagcga

SEQ ID NO: 5842708 - DNA, 25 bp, Homo sapien
tacccgaacgtcatcaggcgtggca

SEQ ID NO: 5842709 - DNA, 25 bp, Homo sapien
gcgttcgcagttgcagcgattgcaa

SEQ ID NO: 5842710 - DNA, 25 bp, Homo sapien
ggtggacgagcgtccgcatgctaat

SEQ ID NO: 5842711 - DNA, 25 bp, Homo sapien
agttgcagcgattgcaactggcctg

SEQ ID NO: 5842712 - DNA, 25 bp, Homo sapien
cgtccgcatgctaatcgctttttac

SEQ ID NO: 5842713 - DNA, 25 bp, Homo sapien
tttaccgccagatgaaatcgaacag

SEQ ID NO: 5842714 - DNA, 25 bp, Homo sapien
gatgaaatcgaacagtcgctgaacg

SEQ ID NO: 5842715 - DNA, 25 bp, Homo sapien
aacagtcgctgaacggcgtgcatta

SEQ ID NO: 5842716 - DNA, 25 bp, Homo sapien
acatcatattcagcccatcacgctg

SEQ ID NO: 5842717 - DNA, 25 bp, Homo sapien
ttcagcccatcacgctgtggtttga

SEQ ID NO: 5842718 - DNA, 25 bp, Homo sapien
atcacgctgtggtttgatgatgcgc

SEQ ID NO: 5842719 - DNA, 25 bp, Homo sapien
ggtttgatgatgcgctcagtgccat

SEQ ID NO: 5842720 - DNA, 25 bp, Homo sapien
atgatgcgctcagtgccatgcgttc

SEQ ID NO: 5842721 - DNA, 25 bp, Homo sapien
ctcagtgccatgcgttcgctgaaag

SEQ ID NO: 5842722 - DNA, 25 bp, Homo sapien
catgcgttcgctgaaaggcatcggt

SEQ ID NO: 5842723 - DNA, 25 bp, Homo sapien
ctgaaaggcatcggtgccacgcatc

SEQ ID NO: 5842724 - DNA, 25 bp, Homo sapien
ggcatcggtgccacgcatcttcatg

SEQ ID NO: 5842725 - DNA, 25 bp, Homo sapien
tgccacgcatcttcatgaagggcgc

SEQ ID NO: 5842726 - DNA, 25 bp, Homo sapien
atcttcatgaagggcgcgacccgcg

SEQ ID NO: 5842727 - DNA, 25 bp, Homo sapien
attaacgcgttcgcagttgcagcga

SEQ ID NO: 5842728 - DNA, 25 bp, Homo sapien
tacccgaacgtcatcaggcgtggca

SEQ ID NO: 5842729 - DNA, 25 bp, Homo sapien
gcgttcgcagttgcagcgattgcaa

SEQ ID NO: 5842730 - DNA, 25 bp, Homo sapien
ggtggacgagcgtccgcatgctaat

SEQ ID NO: 5842731 - DNA, 25 bp, Homo sapien
agttgcagcgattgcaactggcctg

SEQ ID NO: 5842732 - DNA, 25 bp, Homo sapien
cgtccgcatgctaatcgctttttac

SEQ ID NO: 5842733 - DNA, 25 bp, Homo sapien
tttaccgccagatgaaatcgaacag

SEQ ID NO: 5842734 - DNA, 25 bp, Homo sapien
gatgaaatcgaacagtcgctgaacg

SEQ ID NO: 5842735 - DNA, 25 bp, Homo sapien
aacagtcgctgaacggcgtgcatta

SEQ ID NO: 5842736 - DNA, 25 bp, Homo sapien
acatcatattcagcccatcacgctg

SEQ ID NO: 5842737 - DNA, 25 bp, Homo sapien
ttcagcccatcacgctgtggtttga

SEQ ID NO: 5842738 - DNA, 25 bp, Homo sapien
atcacgctgtggtttgatgatgcgc

SEQ ID NO: 5842739 - DNA, 25 bp, Homo sapien
ggtttgatgatgcgctcagtgccat

SEQ ID NO: 5842740 - DNA, 25 bp, Homo sapien
atgatgcgctcagtgccatgcgttc

SEQ ID NO: 5842741 - DNA, 25 bp, Homo sapien
ctcagtgccatgcgttcgctgaaag

SEQ ID NO: 5842742 - DNA, 25 bp, Homo sapien
catgcgttcgctgaaaggcatcggt

SEQ ID NO: 5842743 - DNA, 25 bp, Homo sapien
ctgaaaggcatcggtgccacgcatc

SEQ ID NO: 5842744 - DNA, 25 bp, Homo sapien
ggcatcggtgccacgcatcttcatg

SEQ ID NO: 5842745 - DNA, 25 bp, Homo sapien
tgccacgcatcttcatgaagggcgc

SEQ ID NO: 5842746 - DNA, 25 bp, Homo sapien
atcttcatgaagggcgcgacccgcg

SEQ ID NO: 5842747 - DNA, 25 bp, Homo sapien
attaacgcgttcgcagttgcagcga

SEQ ID NO: 5842748 - DNA, 25 bp, Homo sapien
tacccgaacgtcatcaggcgtggca

SEQ ID NO: 5842749 - DNA, 25 bp, Homo sapien
gcgttcgcagttgcagcgattgcaa

SEQ ID NO: 5842750 - DNA, 25 bp, Homo sapien
ggtggacgagcgtccgcatgctaat

SEQ ID NO: 5842751 - DNA, 25 bp, Homo sapien
agttgcagcgattgcaactggcctg

SEQ ID NO: 5842752 - DNA, 25 bp, Homo sapien
cgtccgcatgctaatcgctttttac

SEQ ID NO: 5842753 - DNA, 25 bp, Homo sapien
tttaccgccagatgaaatcgaacag

SEQ ID NO: 5842754 - DNA, 25 bp, Homo sapien
gatgaaatcgaacagtcgctgaacg

SEQ ID NO: 5842755 - DNA, 25 bp, Homo sapien
aacagtcgctgaacggcgtgcatta

SEQ ID NO: 5842756 - DNA, 25 bp, Homo sapien
acatcatattcagcccatcacgctg

SEQ ID NO: 5842757 - DNA, 25 bp, Homo sapien
ttcagcccatcacgctgtggtttga

SEQ ID NO: 5842758 - DNA, 25 bp, Homo sapien
atcacgctgtggtttgatgatgcgc

SEQ ID NO: 5842759 - DNA, 25 bp, Homo sapien
ggtttgatgatgcgctcagtgccat

SEQ ID NO: 5842760 - DNA, 25 bp, Homo sapien
atgatgcgctcagtgccatgcgttc

SEQ ID NO: 5842761 - DNA, 25 bp, Homo sapien
ctcagtgccatgcgttcgctgaaag

SEQ ID NO: 5842762 - DNA, 25 bp, Homo sapien
catgcgttcgctgaaaggcatcggt

SEQ ID NO: 5842763 - DNA, 25 bp, Homo sapien
ctgaaaggcatcggtgccacgcatc

SEQ ID NO: 5842764 - DNA, 25 bp, Homo sapien
ggcatcggtgccacgcatcttcatg

SEQ ID NO: 5842765 - DNA, 25 bp, Homo sapien
tgccacgcatcttcatgaagggcgc

SEQ ID NO: 5842766 - DNA, 25 bp, Homo sapien
atcttcatgaagggcgcgacccgcg

SEQ ID NO: 5842767 - DNA, 25 bp, Homo sapien
attaacgcgttcgcagttgcagcga

SEQ ID NO: 5842768 - DNA, 25 bp, Homo sapien
tacccgaacgtcatcaggcgtggca

SEQ ID NO: 5842769 - DNA, 25 bp, Homo sapien
gcgttcgcagttgcagcgattgcaa

SEQ ID NO: 5842770 - DNA, 25 bp, Homo sapien
ggtggacgagcgtccgcatgctaat

SEQ ID NO: 5842771 - DNA, 25 bp, Homo sapien
agttgcagcgattgcaactggcctg

SEQ ID NO: 5842772 - DNA, 25 bp, Homo sapien
cgtccgcatgctaatcgctttttac

SEQ ID NO: 5842773 - DNA, 25 bp, Homo sapien
tttaccgccagatgaaatcgaacag

SEQ ID NO: 5842774 - DNA, 25 bp, Homo sapien
gatgaaatcgaacagtcgctgaacg

SEQ ID NO: 5842775 - DNA, 25 bp, Homo sapien
aacagtcgctgaacggcgtgcatta

SEQ ID NO: 5842776 - DNA, 25 bp, Homo sapien
acatcatattcagcccatcacgctg

SEQ ID NO: 5842777 - DNA, 25 bp, Homo sapien
ttcagcccatcacgctgtggtttga

SEQ ID NO: 5842778 - DNA, 25 bp, Homo sapien
atcacgctgtggtttgatgatgcgc

SEQ ID NO: 5842779 - DNA, 25 bp, Homo sapien
ggtttgatgatgcgctcagtgccat

SEQ ID NO: 5842780 - DNA, 25 bp, Homo sapien
atgatgcgctcagtgccatgcgttc

SEQ ID NO: 5842781 - DNA, 25 bp, Homo sapien
ctcagtgccatgcgttcgctgaaag

SEQ ID NO: 5842782 - DNA, 25 bp, Homo sapien
catgcgttcgctgaaaggcatcggt

SEQ ID NO: 5842783 - DNA, 25 bp, Homo sapien
ctgaaaggcatcggtgccacgcatc

SEQ ID NO: 5842784 - DNA, 25 bp, Homo sapien
ggcatcggtgccacgcatcttcatg

SEQ ID NO: 5842785 - DNA, 25 bp, Homo sapien
tgccacgcatcttcatgaagggcgc

SEQ ID NO: 5842786 - DNA, 25 bp, Homo sapien
atcttcatgaagggcgcgacccgcg

SEQ ID NO: 5842787 - DNA, 25 bp, Homo sapien
attaacgcgttcgcagttgcagcga

SEQ ID NO: 5842788 - DNA, 25 bp, Homo sapien
tacccgaacgtcatcaggcgtggca

SEQ ID NO: 5842789 - DNA, 25 bp, Homo sapien
gcgttcgcagttgcagcgattgcaa

SEQ ID NO: 5842790 - DNA, 25 bp, Homo sapien
ggtggacgagcgtccgcatgctaat

SEQ ID NO: 5842791 - DNA, 25 bp, Homo sapien
agttgcagcgattgcaactggcctg

SEQ ID NO: 5842792 - DNA, 25 bp, Homo sapien
cgtccgcatgctaatcgctttttac

SEQ ID NO: 5842793 - DNA, 25 bp, Homo sapien
tttaccgccagatgaaatcgaacag

SEQ ID NO: 5842794 - DNA, 25 bp, Homo sapien
gatgaaatcgaacagtcgctgaacg

SEQ ID NO: 5842795 - DNA, 25 bp, Homo sapien
aacagtcgctgaacggcgtgcatta

SEQ ID NO: 5842796 - DNA, 25 bp, Homo sapien
acatcatattcagcccatcacgctg

SEQ ID NO: 5842797 - DNA, 25 bp, Homo sapien
ttcagcccatcacgctgtggtttga

SEQ ID NO: 5842798 - DNA, 25 bp, Homo sapien
atcacgctgtggtttgatgatgcgc

SEQ ID NO: 5842799 - DNA, 25 bp, Homo sapien
ggtttgatgatgcgctcagtgccat

SEQ ID NO: 5842800 - DNA, 25 bp, Homo sapien
atgatgcgctcagtgccatgcgttc

SEQ ID NO: 5842801 - DNA, 25 bp, Homo sapien
ctcagtgccatgcgttcgctgaaag

SEQ ID NO: 5842802 - DNA, 25 bp, Homo sapien
catgcgttcgctgaaaggcatcggt

SEQ ID NO: 5842803 - DNA, 25 bp, Homo sapien
ctgaaaggcatcggtgccacgcatc

SEQ ID NO: 5842804 - DNA, 25 bp, Homo sapien
ggcatcggtgccacgcatcttcatg

SEQ ID NO: 5842805 - DNA, 25 bp, Homo sapien
tgccacgcatcttcatgaagggcgc

SEQ ID NO: 5842806 - DNA, 25 bp, Homo sapien
atcttcatgaagggcgcgacccgcg

SEQ ID NO: 5842807 - DNA, 25 bp, Homo sapien
attaacgcgttcgcagttgcagcga

SEQ ID NO: 5842808 - DNA, 25 bp, Homo sapien
tacccgaacgtcatcaggcgtggca

SEQ ID NO: 5842809 - DNA, 25 bp, Homo sapien
gcgttcgcagttgcagcgattgcaa

SEQ ID NO: 5842810 - DNA, 25 bp, Homo sapien
ggtggacgagcgtccgcatgctaat

SEQ ID NO: 5842811 - DNA, 25 bp, Homo sapien
agttgcagcgattgcaactggcctg

SEQ ID NO: 5842812 - DNA, 25 bp, Homo sapien
cgtccgcatgctaatcgctttttac

SEQ ID NO: 5842813 - DNA, 25 bp, Homo sapien
tttaccgccagatgaaatcgaacag

SEQ ID NO: 5842814 - DNA, 25 bp, Homo sapien
gatgaaatcgaacagtcgctgaacg

SEQ ID NO: 5842815 - DNA, 25 bp, Homo sapien
aacagtcgctgaacggcgtgcatta

SEQ ID NO: 5842816 - DNA, 25 bp, Homo sapien
acatcatattcagcccatcacgctg

SEQ ID NO: 5842817 - DNA, 25 bp, Homo sapien
ttcagcccatcacgctgtggtttga

SEQ ID NO: 5842818 - DNA, 25 bp, Homo sapien
atcacgctgtggtttgatgatgcgc

SEQ ID NO: 5842819 - DNA, 25 bp, Homo sapien
ggtttgatgatgcgctcagtgccat

SEQ ID NO: 5842820 - DNA, 25 bp, Homo sapien
atgatgcgctcagtgccatgcgttc

SEQ ID NO: 5842821 - DNA, 25 bp, Homo sapien
ctcagtgccatgcgttcgctgaaag

SEQ ID NO: 5842822 - DNA, 25 bp, Homo sapien
catgcgttcgctgaaaggcatcggt

SEQ ID NO: 5842823 - DNA, 25 bp, Homo sapien
ctgaaaggcatcggtgccacgcatc

SEQ ID NO: 5842824 - DNA, 25 bp, Homo sapien
ggcatcggtgccacgcatcttcatg

SEQ ID NO: 5842825 - DNA, 25 bp, Homo sapien
tgccacgcatcttcatgaagggcgc

SEQ ID NO: 5842826 - DNA, 25 bp, Homo sapien
atcttcatgaagggcgcgacccgcg

SEQ ID NO: 5842827 - DNA, 25 bp, Homo sapien
attaacgcgttcgcagttgcagcga

SEQ ID NO: 5842828 - DNA, 25 bp, Homo sapien
tacccgaacgtcatcaggcgtggca

SEQ ID NO: 5842829 - DNA, 25 bp, Homo sapien
gcgttcgcagttgcagcgattgcaa

SEQ ID NO: 5842830 - DNA, 25 bp, Homo sapien
ggtggacgagcgtccgcatgctaat

SEQ ID NO: 5842831 - DNA, 25 bp, Homo sapien
agttgcagcgattgcaactggcctg

SEQ ID NO: 5842832 - DNA, 25 bp, Homo sapien
cgtccgcatgctaatcgctttttac

SEQ ID NO: 5842833 - DNA, 25 bp, Homo sapien
tttaccgccagatgaaatcgaacag

SEQ ID NO: 5842834 - DNA, 25 bp, Homo sapien
gatgaaatcgaacagtcgctgaacg

SEQ ID NO: 5842835 - DNA, 25 bp, Homo sapien
aacagtcgctgaacggcgtgcatta

SEQ ID NO: 5842836 - DNA, 25 bp, Homo sapien
acatcatattcagcccatcacgctg

SEQ ID NO: 5842837 - DNA, 25 bp, Homo sapien
ttcagcccatcacgctgtggtttga

SEQ ID NO: 5842838 - DNA, 25 bp, Homo sapien
atcacgctgtggtttgatgatgcgc

SEQ ID NO: 5842839 - DNA, 25 bp, Homo sapien
ggtttgatgatgcgctcagtgccat

SEQ ID NO: 5842840 - DNA, 25 bp, Homo sapien
atgatgcgctcagtgccatgcgttc

SEQ ID NO: 5842841 - DNA, 25 bp, Homo sapien
ctcagtgccatgcgttcgctgaaag

SEQ ID NO: 5842842 - DNA, 25 bp, Homo sapien
catgcgttcgctgaaaggcatcggt

SEQ ID NO: 5842843 - DNA, 25 bp, Homo sapien
ctgaaaggcatcggtgccacgcatc

SEQ ID NO: 5842844 - DNA, 25 bp, Homo sapien
ggcatcggtgccacgcatcttcatg

SEQ ID NO: 5842845 - DNA, 25 bp, Homo sapien
tgccacgcatcttcatgaagggcgc

SEQ ID NO: 5842846 - DNA, 25 bp, Homo sapien
atcttcatgaagggcgcgacccgcg

SEQ ID NO: 5842847 - DNA, 25 bp, Homo sapien
attaacgcgttcgcagttgcagcga

SEQ ID NO: 5842848 - DNA, 25 bp, Homo sapien
tacccgaacgtcatcaggcgtggca

SEQ ID NO: 5842849 - DNA, 25 bp, Homo sapien
gcgttcgcagttgcagcgattgcaa

SEQ ID NO: 5842850 - DNA, 25 bp, Homo sapien
ggtggacgagcgtccgcatgctaat

SEQ ID NO: 5842851 - DNA, 25 bp, Homo sapien
agttgcagcgattgcaactggcctg

SEQ ID NO: 5842852 - DNA, 25 bp, Homo sapien
cgtccgcatgctaatcgctttttac

SEQ ID NO: 5842853 - DNA, 25 bp, Homo sapien
tttaccgccagatgaaatcgaacag

SEQ ID NO: 5842854 - DNA, 25 bp, Homo sapien
gatgaaatcgaacagtcgctgaacg

SEQ ID NO: 5842855 - DNA, 25 bp, Homo sapien
aacagtcgctgaacggcgtgcatta

SEQ ID NO: 5842856 - DNA, 25 bp, Homo sapien
acatcatattcagcccatcacgctg

SEQ ID NO: 5842857 - DNA, 25 bp, Homo sapien
ttcagcccatcacgctgtggtttga

SEQ ID NO: 5842858 - DNA, 25 bp, Homo sapien
atcacgctgtggtttgatgatgcgc

SEQ ID NO: 5842859 - DNA, 25 bp, Homo sapien
ggtttgatgatgcgctcagtgccat

SEQ ID NO: 5842860 - DNA, 25 bp, Homo sapien
atgatgcgctcagtgccatgcgttc

SEQ ID NO: 5842861 - DNA, 25 bp, Homo sapien
ctcagtgccatgcgttcgctgaaag

SEQ ID NO: 5842862 - DNA, 25 bp, Homo sapien
catgcgttcgctgaaaggcatcggt

SEQ ID NO: 5842863 - DNA, 25 bp, Homo sapien
ctgaaaggcatcggtgccacgcatc

SEQ ID NO: 5842864 - DNA, 25 bp, Homo sapien
ggcatcggtgccacgcatcttcatg

SEQ ID NO: 5842865 - DNA, 25 bp, Homo sapien
tgccacgcatcttcatgaagggcgc

SEQ ID NO: 5842866 - DNA, 25 bp, Homo sapien
atcttcatgaagggcgcgacccgcg

SEQ ID NO: 5842867 - DNA, 25 bp, Homo sapien
attaacgcgttcgcagttgcagcga

SEQ ID NO: 5842868 - DNA, 25 bp, Homo sapien
tacccgaacgtcatcaggcgtggca

SEQ ID NO: 5842869 - DNA, 25 bp, Homo sapien
gcgttcgcagttgcagcgattgcaa

SEQ ID NO: 5842870 - DNA, 25 bp, Homo sapien
ggtggacgagcgtccgcatgctaat

SEQ ID NO: 5842871 - DNA, 25 bp, Homo sapien
agttgcagcgattgcaactggcctg

SEQ ID NO: 5842872 - DNA, 25 bp, Homo sapien
cgtccgcatgctaatcgctttttac

SEQ ID NO: 5842873 - DNA, 25 bp, Homo sapien
tttaccgccagatgaaatcgaacag

SEQ ID NO: 5842874 - DNA, 25 bp, Homo sapien
gatgaaatcgaacagtcgctgaacg

SEQ ID NO: 5842875 - DNA, 25 bp, Homo sapien
aacagtcgctgaacggcgtgcatta

SEQ ID NO: 5842876 - DNA, 25 bp, Homo sapien
acatcatattcagcccatcacgctg

SEQ ID NO: 5842877 - DNA, 25 bp, Homo sapien
ttcagcccatcacgctgtggtttga

SEQ ID NO: 5842878 - DNA, 25 bp, Homo sapien
atcacgctgtggtttgatgatgcgc

SEQ ID NO: 5842879 - DNA, 25 bp, Homo sapien
ggtttgatgatgcgctcagtgccat

SEQ ID NO: 5842880 - DNA, 25 bp, Homo sapien
atgatgcgctcagtgccatgcgttc

SEQ ID NO: 5842881 - DNA, 25 bp, Homo sapien
ctcagtgccatgcgttcgctgaaag

SEQ ID NO: 5842882 - DNA, 25 bp, Homo sapien
catgcgttcgctgaaaggcatcggt

SEQ ID NO: 5842883 - DNA, 25 bp, Homo sapien
ctgaaaggcatcggtgccacgcatc

SEQ ID NO: 5842884 - DNA, 25 bp, Homo sapien
ggcatcggtgccacgcatcttcatg

SEQ ID NO: 5842885 - DNA, 25 bp, Homo sapien
tgccacgcatcttcatgaagggcgc

SEQ ID NO: 5842886 - DNA, 25 bp, Homo sapien
atcttcatgaagggcgcgacccgcg

SEQ ID NO: 5842887 - DNA, 25 bp, Homo sapien
attaacgcgttcgcagttgcagcga

SEQ ID NO: 5842888 - DNA, 25 bp, Homo sapien
tacccgaacgtcatcaggcgtggca

SEQ ID NO: 5842889 - DNA, 25 bp, Homo sapien
gcgttcgcagttgcagcgattgcaa

SEQ ID NO: 5842890 - DNA, 25 bp, Homo sapien
ggtggacgagcgtccgcatgctaat

SEQ ID NO: 5842891 - DNA, 25 bp, Homo sapien
agttgcagcgattgcaactggcctg

SEQ ID NO: 5842892 - DNA, 25 bp, Homo sapien
cgtccgcatgctaatcgctttttac

SEQ ID NO: 5842893 - DNA, 25 bp, Homo sapien
tttaccgccagatgaaatcgaacag

SEQ ID NO: 5842894 - DNA, 25 bp, Homo sapien
gatgaaatcgaacagtcgctgaacg

SEQ ID NO: 5842895 - DNA, 25 bp, Homo sapien
aacagtcgctgaacggcgtgcatta

SEQ ID NO: 5842896 - DNA, 25 bp, Homo sapien
acatcatattcagcccatcacgctg

SEQ ID NO: 5842897 - DNA, 25 bp, Homo sapien
ttcagcccatcacgctgtggtttga

SEQ ID NO: 5842898 - DNA, 25 bp, Homo sapien
atcacgctgtggtttgatgatgcgc

SEQ ID NO: 5842899 - DNA, 25 bp, Homo sapien
ggtttgatgatgcgctcagtgccat

SEQ ID NO: 5842900 - DNA, 25 bp, Homo sapien
atgatgcgctcagtgccatgcgttc

SEQ ID NO: 5842901 - DNA, 25 bp, Homo sapien
ctcagtgccatgcgttcgctgaaag

SEQ ID NO: 5842902 - DNA, 25 bp, Homo sapien
catgcgttcgctgaaaggcatcggt

SEQ ID NO: 5842903 - DNA, 25 bp, Homo sapien
ctgaaaggcatcggtgccacgcatc

SEQ ID NO: 5842904 - DNA, 25 bp, Homo sapien
ggcatcggtgccacgcatcttcatg

SEQ ID NO: 5842905 - DNA, 25 bp, Homo sapien
tgccacgcatcttcatgaagggcgc

SEQ ID NO: 5842906 - DNA, 25 bp, Homo sapien
atcttcatgaagggcgcgacccgcg

SEQ ID NO: 5842907 - DNA, 25 bp, Homo sapien
attaacgcgttcgcagttgcagcga

SEQ ID NO: 5842908 - DNA, 25 bp, Homo sapien
tacccgaacgtcatcaggcgtggca

SEQ ID NO: 5842909 - DNA, 25 bp, Homo sapien
gcgttcgcagttgcagcgattgcaa

SEQ ID NO: 5842910 - DNA, 25 bp, Homo sapien
ggtggacgagcgtccgcatgctaat

SEQ ID NO: 5842911 - DNA, 25 bp, Homo sapien
agttgcagcgattgcaactggcctg

SEQ ID NO: 5842912 - DNA, 25 bp, Homo sapien
cgtccgcatgctaatcgctttttac

SEQ ID NO: 5842913 - DNA, 25 bp, Homo sapien
tttaccgccagatgaaatcgaacag

SEQ ID NO: 5842914 - DNA, 25 bp, Homo sapien
gatgaaatcgaacagtcgctgaacg

SEQ ID NO: 5842915 - DNA, 25 bp, Homo sapien
aacagtcgctgaacggcgtgcatta

SEQ ID NO: 5842916 - DNA, 25 bp, Homo sapien
acatcatattcagcccatcacgctg

SEQ ID NO: 5842917 - DNA, 25 bp, Homo sapien
ttcagcccatcacgctgtggtttga

SEQ ID NO: 5842918 - DNA, 25 bp, Homo sapien
atcacgctgtggtttgatgatgcgc

SEQ ID NO: 5842919 - DNA, 25 bp, Homo sapien
ggtttgatgatgcgctcagtgccat

SEQ ID NO: 5842920 - DNA, 25 bp, Homo sapien
atgatgcgctcagtgccatgcgttc

SEQ ID NO: 5842921 - DNA, 25 bp, Homo sapien
ctcagtgccatgcgttcgctgaaag

SEQ ID NO: 5842922 - DNA, 25 bp, Homo sapien
catgcgttcgctgaaaggcatcggt

SEQ ID NO: 5842923 - DNA, 25 bp, Homo sapien
ctgaaaggcatcggtgccacgcatc

SEQ ID NO: 5842924 - DNA, 25 bp, Homo sapien
ggcatcggtgccacgcatcttcatg

SEQ ID NO: 5842925 - DNA, 25 bp, Homo sapien
tgccacgcatcttcatgaagggcgc

SEQ ID NO: 5842926 - DNA, 25 bp, Homo sapien
atcttcatgaagggcgcgacccgcg

SEQ ID NO: 5842927 - DNA, 25 bp, Homo sapien
attaacgcgttcgcagttgcagcga

SEQ ID NO: 5842928 - DNA, 25 bp, Homo sapien
tacccgaacgtcatcaggcgtggca

SEQ ID NO: 5842929 - DNA, 25 bp, Homo sapien
gcgttcgcagttgcagcgattgcaa

SEQ ID NO: 5842930 - DNA, 25 bp, Homo sapien
ggtggacgagcgtccgcatgctaat

SEQ ID NO: 5842931 - DNA, 25 bp, Homo sapien
agttgcagcgattgcaactggcctg

SEQ ID NO: 5842932 - DNA, 25 bp, Homo sapien
cgtccgcatgctaatcgctttttac

SEQ ID NO: 5842933 - DNA, 25 bp, Homo sapien
tttaccgccagatgaaatcgaacag

SEQ ID NO: 5842934 - DNA, 25 bp, Homo sapien
gatgaaatcgaacagtcgctgaacg

SEQ ID NO: 5842935 - DNA, 25 bp, Homo sapien
aacagtcgctgaacggcgtgcatta

SEQ ID NO: 5842936 - DNA, 25 bp, Homo sapien
acatcatattcagcccatcacgctg

SEQ ID NO: 5842937 - DNA, 25 bp, Homo sapien
ttcagcccatcacgctgtggtttga

SEQ ID NO: 5842938 - DNA, 25 bp, Homo sapien
atcacgctgtggtttgatgatgcgc

SEQ ID NO: 5842939 - DNA, 25 bp, Homo sapien
ggtttgatgatgcgctcagtgccat

SEQ ID NO: 5842940 - DNA, 25 bp, Homo sapien
atgatgcgctcagtgccatgcgttc

SEQ ID NO: 5842941 - DNA, 25 bp, Homo sapien
ctcagtgccatgcgttcgctgaaag

SEQ ID NO: 5842942 - DNA, 25 bp, Homo sapien
catgcgttcgctgaaaggcatcggt

SEQ ID NO: 5842943 - DNA, 25 bp, Homo sapien
ctgaaaggcatcggtgccacgcatc

SEQ ID NO: 5842944 - DNA, 25 bp, Homo sapien
ggcatcggtgccacgcatcttcatg

SEQ ID NO: 5842945 - DNA, 25 bp, Homo sapien
tgccacgcatcttcatgaagggcgc

SEQ ID NO: 5842946 - DNA, 25 bp, Homo sapien
atcttcatgaagggcgcgacccgcg

SEQ ID NO: 5842947 - DNA, 25 bp, Homo sapien
attaacgcgttcgcagttgcagcga

SEQ ID NO: 5842948 - DNA, 25 bp, Homo sapien
tacccgaacgtcatcaggcgtggca

SEQ ID NO: 5842949 - DNA, 25 bp, Homo sapien
gcgttcgcagttgcagcgattgcaa

SEQ ID NO: 5842950 - DNA, 25 bp, Homo sapien
ggtggacgagcgtccgcatgctaat

SEQ ID NO: 5842951 - DNA, 25 bp, Homo sapien
agttgcagcgattgcaactggcctg

SEQ ID NO: 5842952 - DNA, 25 bp, Homo sapien
cgtccgcatgctaatcgctttttac

SEQ ID NO: 5842953 - DNA, 25 bp, Homo sapien
tttaccgccagatgaaatcgaacag

SEQ ID NO: 5842954 - DNA, 25 bp, Homo sapien
gatgaaatcgaacagtcgctgaacg

SEQ ID NO: 5842955 - DNA, 25 bp, Homo sapien
aacagtcgctgaacggcgtgcatta

SEQ ID NO: 5842956 - DNA, 25 bp, Homo sapien
acatcatattcagcccatcacgctg

SEQ ID NO: 5842957 - DNA, 25 bp, Homo sapien
ttcagcccatcacgctgtggtttga

SEQ ID NO: 5842958 - DNA, 25 bp, Homo sapien
atcacgctgtggtttgatgatgcgc

SEQ ID NO: 5842959 - DNA, 25 bp, Homo sapien
ggtttgatgatgcgctcagtgccat

SEQ ID NO: 5842960 - DNA, 25 bp, Homo sapien
atgatgcgctcagtgccatgcgttc

SEQ ID NO: 5842961 - DNA, 25 bp, Homo sapien
ctcagtgccatgcgttcgctgaaag

SEQ ID NO: 5842962 - DNA, 25 bp, Homo sapien
catgcgttcgctgaaaggcatcggt

SEQ ID NO: 5842963 - DNA, 25 bp, Homo sapien
ctgaaaggcatcggtgccacgcatc

SEQ ID NO: 5842964 - DNA, 25 bp, Homo sapien
ggcatcggtgccacgcatcttcatg

SEQ ID NO: 5842965 - DNA, 25 bp, Homo sapien
tgccacgcatcttcatgaagggcgc

SEQ ID NO: 5842966 - DNA, 25 bp, Homo sapien
atcttcatgaagggcgcgacccgcg

SEQ ID NO: 5842967 - DNA, 25 bp, Homo sapien
attaacgcgttcgcagttgcagcga

SEQ ID NO: 5842968 - DNA, 25 bp, Homo sapien
tacccgaacgtcatcaggcgtggca

SEQ ID NO: 5842969 - DNA, 25 bp, Homo sapien
gcgttcgcagttgcagcgattgcaa

SEQ ID NO: 5842970 - DNA, 25 bp, Homo sapien
ggtggacgagcgtccgcatgctaat

SEQ ID NO: 5842971 - DNA, 25 bp, Homo sapien
agttgcagcgattgcaactggcctg

SEQ ID NO: 5842972 - DNA, 25 bp, Homo sapien
cgtccgcatgctaatcgctttttac

SEQ ID NO: 5842973 - DNA, 25 bp, Homo sapien
tttaccgccagatgaaatcgaacag

SEQ ID NO: 5842974 - DNA, 25 bp, Homo sapien
gatgaaatcgaacagtcgctgaacg

SEQ ID NO: 5842975 - DNA, 25 bp, Homo sapien
aacagtcgctgaacggcgtgcatta

SEQ ID NO: 5842976 - DNA, 25 bp, Homo sapien
acatcatattcagcccatcacgctg

SEQ ID NO: 5842977 - DNA, 25 bp, Homo sapien
ttcagcccatcacgctgtggtttga

SEQ ID NO: 5842978 - DNA, 25 bp, Homo sapien
atcacgctgtggtttgatgatgcgc

SEQ ID NO: 5842979 - DNA, 25 bp, Homo sapien
ggtttgatgatgcgctcagtgccat

SEQ ID NO: 5842980 - DNA, 25 bp, Homo sapien
atgatgcgctcagtgccatgcgttc

SEQ ID NO: 5842981 - DNA, 25 bp, Homo sapien
ctcagtgccatgcgttcgctgaaag

SEQ ID NO: 5842982 - DNA, 25 bp, Homo sapien
catgcgttcgctgaaaggcatcggt

SEQ ID NO: 5842983 - DNA, 25 bp, Homo sapien
ctgaaaggcatcggtgccacgcatc

SEQ ID NO: 5842984 - DNA, 25 bp, Homo sapien
ggcatcggtgccacgcatcttcatg

SEQ ID NO: 5842985 - DNA, 25 bp, Homo sapien
tgccacgcatcttcatgaagggcgc

SEQ ID NO: 5842986 - DNA, 25 bp, Homo sapien
atcttcatgaagggcgcgacccgcg

SEQ ID NO: 5842987 - DNA, 25 bp, Homo sapien
attaacgcgttcgcagttgcagcga

SEQ ID NO: 5842988 - DNA, 25 bp, Homo sapien
tacccgaacgtcatcaggcgtggca

SEQ ID NO: 5842989 - DNA, 25 bp, Homo sapien
gcgttcgcagttgcagcgattgcaa

SEQ ID NO: 5842990 - DNA, 25 bp, Homo sapien
ggtggacgagcgtccgcatgctaat

SEQ ID NO: 5842991 - DNA, 25 bp, Homo sapien
agttgcagcgattgcaactggcctg

SEQ ID NO: 5842992 - DNA, 25 bp, Homo sapien
cgtccgcatgctaatcgctttttac

SEQ ID NO: 5842993 - DNA, 25 bp, Homo sapien
tttaccgccagatgaaatcgaacag

SEQ ID NO: 5842994 - DNA, 25 bp, Homo sapien
gatgaaatcgaacagtcgctgaacg

SEQ ID NO: 5842995 - DNA, 25 bp, Homo sapien
aacagtcgctgaacggcgtgcatta

SEQ ID NO: 5842996 - DNA, 25 bp, Homo sapien
acatcatattcagcccatcacgctg

SEQ ID NO: 5842997 - DNA, 25 bp, Homo sapien
ttcagcccatcacgctgtggtttga

SEQ ID NO: 5842998 - DNA, 25 bp, Homo sapien
atcacgctgtggtttgatgatgcgc

SEQ ID NO: 5842999 - DNA, 25 bp, Homo sapien
ggtttgatgatgcgctcagtgccat

SEQ ID NO: 5843000 - DNA, 25 bp, Homo sapien
atgatgcgctcagtgccatgcgttc

SEQ ID NO: 5843001 - DNA, 25 bp, Homo sapien
ctcagtgccatgcgttcgctgaaag

SEQ ID NO: 5843002 - DNA, 25 bp, Homo sapien
catgcgttcgctgaaaggcatcggt

SEQ ID NO: 5843003 - DNA, 25 bp, Homo sapien
ctgaaaggcatcggtgccacgcatc

SEQ ID NO: 5843004 - DNA, 25 bp, Homo sapien
ggcatcggtgccacgcatcttcatg

SEQ ID NO: 5843005 - DNA, 25 bp, Homo sapien
tgccacgcatcttcatgaagggcgc

SEQ ID NO: 5843006 - DNA, 25 bp, Homo sapien
atcttcatgaagggcgcgacccgcg

SEQ ID NO: 5843007 - DNA, 25 bp, Homo sapien
attaacgcgttcgcagttgcagcga

SEQ ID NO: 5843008 - DNA, 25 bp, Homo sapien
tacccgaacgtcatcaggcgtggca

SEQ ID NO: 5843009 - DNA, 25 bp, Homo sapien
gcgttcgcagttgcagcgattgcaa

SEQ ID NO: 5843010 - DNA, 25 bp, Homo sapien
ggtggacgagcgtccgcatgctaat

SEQ ID NO: 5843011 - DNA, 25 bp, Homo sapien
agttgcagcgattgcaactggcctg

SEQ ID NO: 5843012 - DNA, 25 bp, Homo sapien
cgtccgcatgctaatcgctttttac

SEQ ID NO: 5843013 - DNA, 25 bp, Homo sapien
tttaccgccagatgaaatcgaacag

SEQ ID NO: 5843014 - DNA, 25 bp, Homo sapien
gatgaaatcgaacagtcgctgaacg

SEQ ID NO: 5843015 - DNA, 25 bp, Homo sapien
aacagtcgctgaacggcgtgcatta

SEQ ID NO: 5843016 - DNA, 25 bp, Homo sapien
acatcatattcagcccatcacgctg

SEQ ID NO: 5843017 - DNA, 25 bp, Homo sapien
ttcagcccatcacgctgtggtttga

SEQ ID NO: 5843018 - DNA, 25 bp, Homo sapien
atcacgctgtggtttgatgatgcgc

SEQ ID NO: 5843019 - DNA, 25 bp, Homo sapien
ggtttgatgatgcgctcagtgccat

SEQ ID NO: 5843020 - DNA, 25 bp, Homo sapien
atgatgcgctcagtgccatgcgttc

SEQ ID NO: 5843021 - DNA, 25 bp, Homo sapien
ctcagtgccatgcgttcgctgaaag

SEQ ID NO: 5843022 - DNA, 25 bp, Homo sapien
catgcgttcgctgaaaggcatcggt

SEQ ID NO: 5843023 - DNA, 25 bp, Homo sapien
ctgaaaggcatcggtgccacgcatc

SEQ ID NO: 5843024 - DNA, 25 bp, Homo sapien
ggcatcggtgccacgcatcttcatg

SEQ ID NO: 5843025 - DNA, 25 bp, Homo sapien
tgccacgcatcttcatgaagggcgc

SEQ ID NO: 5843026 - DNA, 25 bp, Homo sapien
atcttcatgaagggcgcgacccgcg

SEQ ID NO: 5843027 - DNA, 25 bp, Homo sapien
attaacgcgttcgcagttgcagcga

SEQ ID NO: 5843028 - DNA, 25 bp, Homo sapien
tacccgaacgtcatcaggcgtggca

SEQ ID NO: 5843029 - DNA, 25 bp, Homo sapien
gcgttcgcagttgcagcgattgcaa

SEQ ID NO: 5843030 - DNA, 25 bp, Homo sapien
ggtggacgagcgtccgcatgctaat

SEQ ID NO: 5843031 - DNA, 25 bp, Homo sapien
agttgcagcgattgcaactggcctg

SEQ ID NO: 5843032 - DNA, 25 bp, Homo sapien
cgtccgcatgctaatcgctttttac

SEQ ID NO: 5843033 - DNA, 25 bp, Homo sapien
tttaccgccagatgaaatcgaacag

SEQ ID NO: 5843034 - DNA, 25 bp, Homo sapien
gatgaaatcgaacagtcgctgaacg

SEQ ID NO: 5843035 - DNA, 25 bp, Homo sapien
aacagtcgctgaacggcgtgcatta

SEQ ID NO: 5843036 - DNA, 25 bp, Homo sapien
acatcatattcagcccatcacgctg

SEQ ID NO: 5843037 - DNA, 25 bp, Homo sapien
ttcagcccatcacgctgtggtttga

SEQ ID NO: 5843038 - DNA, 25 bp, Homo sapien
atcacgctgtggtttgatgatgcgc

SEQ ID NO: 5843039 - DNA, 25 bp, Homo sapien
ggtttgatgatgcgctcagtgccat

SEQ ID NO: 5843040 - DNA, 25 bp, Homo sapien
atgatgcgctcagtgccatgcgttc

SEQ ID NO: 5843041 - DNA, 25 bp, Homo sapien
ctcagtgccatgcgttcgctgaaag

SEQ ID NO: 5843042 - DNA, 25 bp, Homo sapien
catgcgttcgctgaaaggcatcggt

SEQ ID NO: 5843043 - DNA, 25 bp, Homo sapien
ctgaaaggcatcggtgccacgcatc

SEQ ID NO: 5843044 - DNA, 25 bp, Homo sapien
ggcatcggtgccacgcatcttcatg

SEQ ID NO: 5843045 - DNA, 25 bp, Homo sapien
tgccacgcatcttcatgaagggcgc

SEQ ID NO: 5843046 - DNA, 25 bp, Homo sapien
atcttcatgaagggcgcgacccgcg

SEQ ID NO: 5843047 - DNA, 25 bp, Homo sapien
attaacgcgttcgcagttgcagcga

SEQ ID NO: 5843048 - DNA, 25 bp, Homo sapien
tacccgaacgtcatcaggcgtggca

SEQ ID NO: 5843049 - DNA, 25 bp, Homo sapien
gcgttcgcagttgcagcgattgcaa

SEQ ID NO: 5843050 - DNA, 25 bp, Homo sapien
ggtggacgagcgtccgcatgctaat

SEQ ID NO: 5843051 - DNA, 25 bp, Homo sapien
agttgcagcgattgcaactggcctg

SEQ ID NO: 5843052 - DNA, 25 bp, Homo sapien
cgtccgcatgctaatcgctttttac

SEQ ID NO: 5843053 - DNA, 25 bp, Homo sapien
tttaccgccagatgaaatcgaacag

SEQ ID NO: 5843054 - DNA, 25 bp, Homo sapien
gatgaaatcgaacagtcgctgaacg

SEQ ID NO: 5843055 - DNA, 25 bp, Homo sapien
aacagtcgctgaacggcgtgcatta

SEQ ID NO: 5843056 - DNA, 25 bp, Homo sapien
acatcatattcagcccatcacgctg

SEQ ID NO: 5843057 - DNA, 25 bp, Homo sapien
ttcagcccatcacgctgtggtttga

SEQ ID NO: 5843058 - DNA, 25 bp, Homo sapien
atcacgctgtggtttgatgatgcgc

SEQ ID NO: 5843059 - DNA, 25 bp, Homo sapien
ggtttgatgatgcgctcagtgccat

SEQ ID NO: 5843060 - DNA, 25 bp, Homo sapien
atgatgcgctcagtgccatgcgttc

SEQ ID NO: 5843061 - DNA, 25 bp, Homo sapien
ctcagtgccatgcgttcgctgaaag

SEQ ID NO: 5843062 - DNA, 25 bp, Homo sapien
catgcgttcgctgaaaggcatcggt

SEQ ID NO: 5843063 - DNA, 25 bp, Homo sapien
ctgaaaggcatcggtgccacgcatc

SEQ ID NO: 5843064 - DNA, 25 bp, Homo sapien
ggcatcggtgccacgcatcttcatg

SEQ ID NO: 5843065 - DNA, 25 bp, Homo sapien
tgccacgcatcttcatgaagggcgc

SEQ ID NO: 5843066 - DNA, 25 bp, Homo sapien
atcttcatgaagggcgcgacccgcg

SEQ ID NO: 5843067 - DNA, 25 bp, Homo sapien
attaacgcgttcgcagttgcagcga

SEQ ID NO: 5843068 - DNA, 25 bp, Homo sapien
tacccgaacgtcatcaggcgtggca

SEQ ID NO: 5843069 - DNA, 25 bp, Homo sapien
gcgttcgcagttgcagcgattgcaa

SEQ ID NO: 5843070 - DNA, 25 bp, Homo sapien
ggtggacgagcgtccgcatgctaat

SEQ ID NO: 5843071 - DNA, 25 bp, Homo sapien
agttgcagcgattgcaactggcctg

SEQ ID NO: 5843072 - DNA, 25 bp, Homo sapien
cgtccgcatgctaatcgctttttac

SEQ ID NO: 5843073 - DNA, 25 bp, Homo sapien
tttaccgccagatgaaatcgaacag

SEQ ID NO: 5843074 - DNA, 25 bp, Homo sapien
gatgaaatcgaacagtcgctgaacg

SEQ ID NO: 5843075 - DNA, 25 bp, Homo sapien
aacagtcgctgaacggcgtgcatta

SEQ ID NO: 5843076 - DNA, 25 bp, Homo sapien
acatcatattcagcccatcacgctg

SEQ ID NO: 5843077 - DNA, 25 bp, Homo sapien
ttcagcccatcacgctgtggtttga

SEQ ID NO: 5843078 - DNA, 25 bp, Homo sapien
atcacgctgtggtttgatgatgcgc

SEQ ID NO: 5843079 - DNA, 25 bp, Homo sapien
ggtttgatgatgcgctcagtgccat

SEQ ID NO: 5843080 - DNA, 25 bp, Homo sapien
atgatgcgctcagtgccatgcgttc

SEQ ID NO: 5843081 - DNA, 25 bp, Homo sapien
ctcagtgccatgcgttcgctgaaag

SEQ ID NO: 5843082 - DNA, 25 bp, Homo sapien
catgcgttcgctgaaaggcatcggt

SEQ ID NO: 5843083 - DNA, 25 bp, Homo sapien
ctgaaaggcatcggtgccacgcatc

SEQ ID NO: 5843084 - DNA, 25 bp, Homo sapien
ggcatcggtgccacgcatcttcatg

SEQ ID NO: 5843085 - DNA, 25 bp, Homo sapien
tgccacgcatcttcatgaagggcgc

SEQ ID NO: 5843086 - DNA, 25 bp, Homo sapien
atcttcatgaagggcgcgacccgcg

SEQ ID NO: 5843087 - DNA, 25 bp, Homo sapien
attaacgcgttcgcagttgcagcga

SEQ ID NO: 5843088 - DNA, 25 bp, Homo sapien
tacccgaacgtcatcaggcgtggca

SEQ ID NO: 5843089 - DNA, 25 bp, Homo sapien
gcgttcgcagttgcagcgattgcaa

SEQ ID NO: 5843090 - DNA, 25 bp, Homo sapien
ggtggacgagcgtccgcatgctaat

SEQ ID NO: 5843091 - DNA, 25 bp, Homo sapien
agttgcagcgattgcaactggcctg

SEQ ID NO: 5843092 - DNA, 25 bp, Homo sapien
cgtccgcatgctaatcgctttttac

SEQ ID NO: 5843093 - DNA, 25 bp, Homo sapien
tttaccgccagatgaaatcgaacag

SEQ ID NO: 5843094 - DNA, 25 bp, Homo sapien
gatgaaatcgaacagtcgctgaacg

SEQ ID NO: 5843095 - DNA, 25 bp, Homo sapien
aacagtcgctgaacggcgtgcatta

SEQ ID NO: 5843096 - DNA, 25 bp, Homo sapien
acatcatattcagcccatcacgctg

SEQ ID NO: 5843097 - DNA, 25 bp, Homo sapien
ttcagcccatcacgctgtggtttga

SEQ ID NO: 5843098 - DNA, 25 bp, Homo sapien
atcacgctgtggtttgatgatgcgc

SEQ ID NO: 5843099 - DNA, 25 bp, Homo sapien
ggtttgatgatgcgctcagtgccat

SEQ ID NO: 5843100 - DNA, 25 bp, Homo sapien
atgatgcgctcagtgccatgcgttc

SEQ ID NO: 5843101 - DNA, 25 bp, Homo sapien
ctcagtgccatgcgttcgctgaaag

SEQ ID NO: 5843102 - DNA, 25 bp, Homo sapien
catgcgttcgctgaaaggcatcggt

SEQ ID NO: 5843103 - DNA, 25 bp, Homo sapien
ctgaaaggcatcggtgccacgcatc

SEQ ID NO: 5843104 - DNA, 25 bp, Homo sapien
ggcatcggtgccacgcatcttcatg

SEQ ID NO: 5843105 - DNA, 25 bp, Homo sapien
tgccacgcatcttcatgaagggcgc

SEQ ID NO: 5843106 - DNA, 25 bp, Homo sapien
atcttcatgaagggcgcgacccgcg

SEQ ID NO: 5843107 - DNA, 25 bp, Homo sapien
attaacgcgttcgcagttgcagcga

SEQ ID NO: 5843108 - DNA, 25 bp, Homo sapien
tacccgaacgtcatcaggcgtggca

SEQ ID NO: 5843109 - DNA, 25 bp, Homo sapien
gcgttcgcagttgcagcgattgcaa

SEQ ID NO: 5843110 - DNA, 25 bp, Homo sapien
ggtggacgagcgtccgcatgctaat

SEQ ID NO: 5843111 - DNA, 25 bp, Homo sapien
agttgcagcgattgcaactggcctg

SEQ ID NO: 5843112 - DNA, 25 bp, Homo sapien
cgtccgcatgctaatcgctttttac

SEQ ID NO: 5843113 - DNA, 25 bp, Homo sapien
tttaccgccagatgaaatcgaacag

SEQ ID NO: 5843114 - DNA, 25 bp, Homo sapien
gatgaaatcgaacagtcgctgaacg

SEQ ID NO: 5843115 - DNA, 25 bp, Homo sapien
aacagtcgctgaacggcgtgcatta

SEQ ID NO: 5843116 - DNA, 25 bp, Homo sapien
acatcatattcagcccatcacgctg

SEQ ID NO: 5843117 - DNA, 25 bp, Homo sapien
ttcagcccatcacgctgtggtttga

SEQ ID NO: 5843118 - DNA, 25 bp, Homo sapien
atcacgctgtggtttgatgatgcgc

SEQ ID NO: 5843119 - DNA, 25 bp, Homo sapien
ggtttgatgatgcgctcagtgccat

SEQ ID NO: 5843120 - DNA, 25 bp, Homo sapien
atgatgcgctcagtgccatgcgttc

SEQ ID NO: 5843121 - DNA, 25 bp, Homo sapien
ctcagtgccatgcgttcgctgaaag

SEQ ID NO: 5843122 - DNA, 25 bp, Homo sapien
catgcgttcgctgaaaggcatcggt

SEQ ID NO: 5843123 - DNA, 25 bp, Homo sapien
ctgaaaggcatcggtgccacgcatc

SEQ ID NO: 5843124 - DNA, 25 bp, Homo sapien
ggcatcggtgccacgcatcttcatg

SEQ ID NO: 5843125 - DNA, 25 bp, Homo sapien
tgccacgcatcttcatgaagggcgc

SEQ ID NO: 5843126 - DNA, 25 bp, Homo sapien
atcttcatgaagggcgcgacccgcg

SEQ ID NO: 5843127 - DNA, 25 bp, Homo sapien
attaacgcgttcgcagttgcagcga

SEQ ID NO: 5843128 - DNA, 25 bp, Homo sapien
tacccgaacgtcatcaggcgtggca

SEQ ID NO: 5843129 - DNA, 25 bp, Homo sapien
gcgttcgcagttgcagcgattgcaa

SEQ ID NO: 5843130 - DNA, 25 bp, Homo sapien
ggtggacgagcgtccgcatgctaat

SEQ ID NO: 5843131 - DNA, 25 bp, Homo sapien
agttgcagcgattgcaactggcctg

SEQ ID NO: 5843132 - DNA, 25 bp, Homo sapien
cgtccgcatgctaatcgctttttac

SEQ ID NO: 5843133 - DNA, 25 bp, Homo sapien
tttaccgccagatgaaatcgaacag

SEQ ID NO: 5843134 - DNA, 25 bp, Homo sapien
gatgaaatcgaacagtcgctgaacg

SEQ ID NO: 5843135 - DNA, 25 bp, Homo sapien
aacagtcgctgaacggcgtgcatta

SEQ ID NO: 5843136 - DNA, 25 bp, Homo sapien
acatcatattcagcccatcacgctg

SEQ ID NO: 5843137 - DNA, 25 bp, Homo sapien
ttcagcccatcacgctgtggtttga

SEQ ID NO: 5843138 - DNA, 25 bp, Homo sapien
atcacgctgtggtttgatgatgcgc

SEQ ID NO: 5843139 - DNA, 25 bp, Homo sapien
ggtttgatgatgcgctcagtgccat

SEQ ID NO: 5843140 - DNA, 25 bp, Homo sapien
atgatgcgctcagtgccatgcgttc

SEQ ID NO: 5843141 - DNA, 25 bp, Homo sapien
ctcagtgccatgcgttcgctgaaag

SEQ ID NO: 5843142 - DNA, 25 bp, Homo sapien
catgcgttcgctgaaaggcatcggt

SEQ ID NO: 5843143 - DNA, 25 bp, Homo sapien
ctgaaaggcatcggtgccacgcatc

SEQ ID NO: 5843144 - DNA, 25 bp, Homo sapien
ggcatcggtgccacgcatcttcatg

SEQ ID NO: 5843145 - DNA, 25 bp, Homo sapien
tgccacgcatcttcatgaagggcgc

SEQ ID NO: 5843146 - DNA, 25 bp, Homo sapien
atcttcatgaagggcgcgacccgcg

SEQ ID NO: 5843147 - DNA, 25 bp, Homo sapien
attaacgcgttcgcagttgcagcga

SEQ ID NO: 5843148 - DNA, 25 bp, Homo sapien
tacccgaacgtcatcaggcgtggca

SEQ ID NO: 5843149 - DNA, 25 bp, Homo sapien
gcgttcgcagttgcagcgattgcaa

SEQ ID NO: 5843150 - DNA, 25 bp, Homo sapien
ggtggacgagcgtccgcatgctaat

SEQ ID NO: 5843151 - DNA, 25 bp, Homo sapien
agttgcagcgattgcaactggcctg

SEQ ID NO: 5843152 - DNA, 25 bp, Homo sapien
cgtccgcatgctaatcgctttttac

SEQ ID NO: 5843153 - DNA, 25 bp, Homo sapien
tttaccgccagatgaaatcgaacag

SEQ ID NO: 5843154 - DNA, 25 bp, Homo sapien
gatgaaatcgaacagtcgctgaacg

SEQ ID NO: 5843155 - DNA, 25 bp, Homo sapien
aacagtcgctgaacggcgtgcatta

SEQ ID NO: 5843156 - DNA, 25 bp, Homo sapien
acatcatattcagcccatcacgctg

SEQ ID NO: 5843157 - DNA, 25 bp, Homo sapien
ttcagcccatcacgctgtggtttga

SEQ ID NO: 5843158 - DNA, 25 bp, Homo sapien
atcacgctgtggtttgatgatgcgc

SEQ ID NO: 5843159 - DNA, 25 bp, Homo sapien
ggtttgatgatgcgctcagtgccat

SEQ ID NO: 5843160 - DNA, 25 bp, Homo sapien
atgatgcgctcagtgccatgcgttc

SEQ ID NO: 5843161 - DNA, 25 bp, Homo sapien
ctcagtgccatgcgttcgctgaaag

SEQ ID NO: 5843162 - DNA, 25 bp, Homo sapien
catgcgttcgctgaaaggcatcggt

SEQ ID NO: 5843163 - DNA, 25 bp, Homo sapien
ctgaaaggcatcggtgccacgcatc

SEQ ID NO: 5843164 - DNA, 25 bp, Homo sapien
ggcatcggtgccacgcatcttcatg

SEQ ID NO: 5843165 - DNA, 25 bp, Homo sapien
tgccacgcatcttcatgaagggcgc

SEQ ID NO: 5843166 - DNA, 25 bp, Homo sapien
atcttcatgaagggcgcgacccgcg

SEQ ID NO: 5843167 - DNA, 25 bp, Homo sapien
attaacgcgttcgcagttgcagcga

SEQ ID NO: 5843168 - DNA, 25 bp, Homo sapien
tacccgaacgtcatcaggcgtggca

SEQ ID NO: 5843169 - DNA, 25 bp, Homo sapien
gcgttcgcagttgcagcgattgcaa

SEQ ID NO: 5843170 - DNA, 25 bp, Homo sapien
ggtggacgagcgtccgcatgctaat

SEQ ID NO: 5843171 - DNA, 25 bp, Homo sapien
agttgcagcgattgcaactggcctg

SEQ ID NO: 5843172 - DNA, 25 bp, Homo sapien
cgtccgcatgctaatcgctttttac

SEQ ID NO: 5843173 - DNA, 25 bp, Homo sapien
tttaccgccagatgaaatcgaacag

SEQ ID NO: 5843174 - DNA, 25 bp, Homo sapien
gatgaaatcgaacagtcgctgaacg

SEQ ID NO: 5843175 - DNA, 25 bp, Homo sapien
aacagtcgctgaacggcgtgcatta

SEQ ID NO: 5843176 - DNA, 25 bp, Homo sapien
acatcatattcagcccatcacgctg

SEQ ID NO: 5843177 - DNA, 25 bp, Homo sapien
ttcagcccatcacgctgtggtttga

SEQ ID NO: 5843178 - DNA, 25 bp, Homo sapien
atcacgctgtggtttgatgatgcgc

SEQ ID NO: 5843179 - DNA, 25 bp, Homo sapien
ggtttgatgatgcgctcagtgccat

SEQ ID NO: 5843180 - DNA, 25 bp, Homo sapien
atgatgcgctcagtgccatgcgttc

SEQ ID NO: 5843181 - DNA, 25 bp, Homo sapien
ctcagtgccatgcgttcgctgaaag

SEQ ID NO: 5843182 - DNA, 25 bp, Homo sapien
catgcgttcgctgaaaggcatcggt

SEQ ID NO: 5843183 - DNA, 25 bp, Homo sapien
ctgaaaggcatcggtgccacgcatc

SEQ ID NO: 5843184 - DNA, 25 bp, Homo sapien
ggcatcggtgccacgcatcttcatg

SEQ ID NO: 5843185 - DNA, 25 bp, Homo sapien
tgccacgcatcttcatgaagggcgc

SEQ ID NO: 5843186 - DNA, 25 bp, Homo sapien
atcttcatgaagggcgcgacccgcg

SEQ ID NO: 5843187 - DNA, 25 bp, Homo sapien
attaacgcgttcgcagttgcagcga

SEQ ID NO: 5843188 - DNA, 25 bp, Homo sapien
tacccgaacgtcatcaggcgtggca

SEQ ID NO: 5843189 - DNA, 25 bp, Homo sapien
gcgttcgcagttgcagcgattgcaa

SEQ ID NO: 5843190 - DNA, 25 bp, Homo sapien
ggtggacgagcgtccgcatgctaat

SEQ ID NO: 5843191 - DNA, 25 bp, Homo sapien
agttgcagcgattgcaactggcctg

SEQ ID NO: 5843192 - DNA, 25 bp, Homo sapien
cgtccgcatgctaatcgctttttac

SEQ ID NO: 5843193 - DNA, 25 bp, Homo sapien
tttaccgccagatgaaatcgaacag

SEQ ID NO: 5843194 - DNA, 25 bp, Homo sapien
gatgaaatcgaacagtcgctgaacg

SEQ ID NO: 5843195 - DNA, 25 bp, Homo sapien
aacagtcgctgaacggcgtgcatta

SEQ ID NO: 5843196 - DNA, 25 bp, Homo sapien
acatcatattcagcccatcacgctg

SEQ ID NO: 5843197 - DNA, 25 bp, Homo sapien
ttcagcccatcacgctgtggtttga

SEQ ID NO: 5843198 - DNA, 25 bp, Homo sapien
atcacgctgtggtttgatgatgcgc

SEQ ID NO: 5843199 - DNA, 25 bp, Homo sapien
ggtttgatgatgcgctcagtgccat

SEQ ID NO: 5843200 - DNA, 25 bp, Homo sapien
atgatgcgctcagtgccatgcgttc

SEQ ID NO: 5843201 - DNA, 25 bp, Homo sapien
ctcagtgccatgcgttcgctgaaag

SEQ ID NO: 5843202 - DNA, 25 bp, Homo sapien
catgcgttcgctgaaaggcatcggt

SEQ ID NO: 5843203 - DNA, 25 bp, Homo sapien
ctgaaaggcatcggtgccacgcatc

SEQ ID NO: 5843204 - DNA, 25 bp, Homo sapien
ggcatcggtgccacgcatcttcatg

SEQ ID NO: 5843205 - DNA, 25 bp, Homo sapien
tgccacgcatcttcatgaagggcgc

SEQ ID NO: 5843206 - DNA, 25 bp, Homo sapien
atcttcatgaagggcgcgacccgcg

SEQ ID NO: 5843207 - DNA, 25 bp, Homo sapien
attaacgcgttcgcagttgcagcga

SEQ ID NO: 5843208 - DNA, 25 bp, Homo sapien
tacccgaacgtcatcaggcgtggca

SEQ ID NO: 5843209 - DNA, 25 bp, Homo sapien
gcgttcgcagttgcagcgattgcaa

SEQ ID NO: 5843210 - DNA, 25 bp, Homo sapien
ggtggacgagcgtccgcatgctaat

SEQ ID NO: 5843211 - DNA, 25 bp, Homo sapien
agttgcagcgattgcaactggcctg

SEQ ID NO: 5843212 - DNA, 25 bp, Homo sapien
cgtccgcatgctaatcgctttttac

SEQ ID NO: 5843213 - DNA, 25 bp, Homo sapien
tttaccgccagatgaaatcgaacag

SEQ ID NO: 5843214 - DNA, 25 bp, Homo sapien
gatgaaatcgaacagtcgctgaacg

SEQ ID NO: 5843215 - DNA, 25 bp, Homo sapien
aacagtcgctgaacggcgtgcatta

SEQ ID NO: 5843216 - DNA, 25 bp, Homo sapien
acatcatattcagcccatcacgctg

SEQ ID NO: 5843217 - DNA, 25 bp, Homo sapien
ttcagcccatcacgctgtggtttga

SEQ ID NO: 5843218 - DNA, 25 bp, Homo sapien
atcacgctgtggtttgatgatgcgc

SEQ ID NO: 5843219 - DNA, 25 bp, Homo sapien
ggtttgatgatgcgctcagtgccat

SEQ ID NO: 5843220 - DNA, 25 bp, Homo sapien
atgatgcgctcagtgccatgcgttc

SEQ ID NO: 5843221 - DNA, 25 bp, Homo sapien
ctcagtgccatgcgttcgctgaaag

SEQ ID NO: 5843222 - DNA, 25 bp, Homo sapien
catgcgttcgctgaaaggcatcggt

SEQ ID NO: 5843223 - DNA, 25 bp, Homo sapien
ctgaaaggcatcggtgccacgcatc

SEQ ID NO: 5843224 - DNA, 25 bp, Homo sapien
ggcatcggtgccacgcatcttcatg

SEQ ID NO: 5843225 - DNA, 25 bp, Homo sapien
tgccacgcatcttcatgaagggcgc

SEQ ID NO: 5843226 - DNA, 25 bp, Homo sapien
atcttcatgaagggcgcgacccgcg

SEQ ID NO: 5843227 - DNA, 25 bp, Homo sapien
attaacgcgttcgcagttgcagcga

SEQ ID NO: 5843228 - DNA, 25 bp, Homo sapien
tacccgaacgtcatcaggcgtggca

SEQ ID NO: 5843229 - DNA, 25 bp, Homo sapien
gcgttcgcagttgcagcgattgcaa

SEQ ID NO: 5843230 - DNA, 25 bp, Homo sapien
ggtggacgagcgtccgcatgctaat

SEQ ID NO: 5843231 - DNA, 25 bp, Homo sapien
agttgcagcgattgcaactggcctg

SEQ ID NO: 5843232 - DNA, 25 bp, Homo sapien
cgtccgcatgctaatcgctttttac

SEQ ID NO: 5843233 - DNA, 25 bp, Homo sapien
tttaccgccagatgaaatcgaacag

SEQ ID NO: 5843234 - DNA, 25 bp, Homo sapien
gatgaaatcgaacagtcgctgaacg

SEQ ID NO: 5843235 - DNA, 25 bp, Homo sapien
aacagtcgctgaacggcgtgcatta

SEQ ID NO: 5843236 - DNA, 25 bp, Homo sapien
acatcatattcagcccatcacgctg

SEQ ID NO: 5843237 - DNA, 25 bp, Homo sapien
ttcagcccatcacgctgtggtttga

SEQ ID NO: 5843238 - DNA, 25 bp, Homo sapien
atcacgctgtggtttgatgatgcgc

SEQ ID NO: 5843239 - DNA, 25 bp, Homo sapien
ggtttgatgatgcgctcagtgccat

SEQ ID NO: 5843240 - DNA, 25 bp, Homo sapien
atgatgcgctcagtgccatgcgttc

SEQ ID NO: 5843241 - DNA, 25 bp, Homo sapien
ctcagtgccatgcgttcgctgaaag

SEQ ID NO: 5843242 - DNA, 25 bp, Homo sapien
catgcgttcgctgaaaggcatcggt

SEQ ID NO: 5843243 - DNA, 25 bp, Homo sapien
ctgaaaggcatcggtgccacgcatc

SEQ ID NO: 5843244 - DNA, 25 bp, Homo sapien
ggcatcggtgccacgcatcttcatg

SEQ ID NO: 5843245 - DNA, 25 bp, Homo sapien
tgccacgcatcttcatgaagggcgc

SEQ ID NO: 5843246 - DNA, 25 bp, Homo sapien
atcttcatgaagggcgcgacccgcg

SEQ ID NO: 5843247 - DNA, 25 bp, Homo sapien
attaacgcgttcgcagttgcagcga

SEQ ID NO: 5843248 - DNA, 25 bp, Homo sapien
tacccgaacgtcatcaggcgtggca

SEQ ID NO: 5843249 - DNA, 25 bp, Homo sapien
gcgttcgcagttgcagcgattgcaa

SEQ ID NO: 5843250 - DNA, 25 bp, Homo sapien
ggtggacgagcgtccgcatgctaat

SEQ ID NO: 5843251 - DNA, 25 bp, Homo sapien
agttgcagcgattgcaactggcctg

SEQ ID NO: 5843252 - DNA, 25 bp, Homo sapien
cgtccgcatgctaatcgctttttac

SEQ ID NO: 5843253 - DNA, 25 bp, Homo sapien
tttaccgccagatgaaatcgaacag

SEQ ID NO: 5843254 - DNA, 25 bp, Homo sapien
gatgaaatcgaacagtcgctgaacg

SEQ ID NO: 5843255 - DNA, 25 bp, Homo sapien
aacagtcgctgaacggcgtgcatta

SEQ ID NO: 5843256 - DNA, 25 bp, Homo sapien
acatcatattcagcccatcacgctg

SEQ ID NO: 5843257 - DNA, 25 bp, Homo sapien
ttcagcccatcacgctgtggtttga

SEQ ID NO: 5843258 - DNA, 25 bp, Homo sapien
atcacgctgtggtttgatgatgcgc

SEQ ID NO: 5843259 - DNA, 25 bp, Homo sapien
ggtttgatgatgcgctcagtgccat

SEQ ID NO: 5843260 - DNA, 25 bp, Homo sapien
atgatgcgctcagtgccatgcgttc

SEQ ID NO: 5843261 - DNA, 25 bp, Homo sapien
ctcagtgccatgcgttcgctgaaag

SEQ ID NO: 5843262 - DNA, 25 bp, Homo sapien
catgcgttcgctgaaaggcatcggt

SEQ ID NO: 5843263 - DNA, 25 bp, Homo sapien
ctgaaaggcatcggtgccacgcatc

SEQ ID NO: 5843264 - DNA, 25 bp, Homo sapien
ggcatcggtgccacgcatcttcatg

SEQ ID NO: 5843265 - DNA, 25 bp, Homo sapien
tgccacgcatcttcatgaagggcgc

SEQ ID NO: 5843266 - DNA, 25 bp, Homo sapien
atcttcatgaagggcgcgacccgcg

SEQ ID NO: 5843267 - DNA, 25 bp, Homo sapien
attaacgcgttcgcagttgcagcga

SEQ ID NO: 5843268 - DNA, 25 bp, Homo sapien
tacccgaacgtcatcaggcgtggca

SEQ ID NO: 5843269 - DNA, 25 bp, Homo sapien
gcgttcgcagttgcagcgattgcaa

SEQ ID NO: 5843270 - DNA, 25 bp, Homo sapien
ggtggacgagcgtccgcatgctaat

SEQ ID NO: 5843271 - DNA, 25 bp, Homo sapien
agttgcagcgattgcaactggcctg

SEQ ID NO: 5843272 - DNA, 25 bp, Homo sapien
cgtccgcatgctaatcgctttttac

SEQ ID NO: 5843273 - DNA, 25 bp, Homo sapien
tttaccgccagatgaaatcgaacag

SEQ ID NO: 5843274 - DNA, 25 bp, Homo sapien
gatgaaatcgaacagtcgctgaacg

SEQ ID NO: 5843275 - DNA, 25 bp, Homo sapien
aacagtcgctgaacggcgtgcatta

SEQ ID NO: 5843276 - DNA, 25 bp, Homo sapien
acatcatattcagcccatcacgctg

SEQ ID NO: 5843277 - DNA, 25 bp, Homo sapien
ttcagcccatcacgctgtggtttga

SEQ ID NO: 5843278 - DNA, 25 bp, Homo sapien
atcacgctgtggtttgatgatgcgc

SEQ ID NO: 5843279 - DNA, 25 bp, Homo sapien
ggtttgatgatgcgctcagtgccat

SEQ ID NO: 5843280 - DNA, 25 bp, Homo sapien
atgatgcgctcagtgccatgcgttc

SEQ ID NO: 5843281 - DNA, 25 bp, Homo sapien
ctcagtgccatgcgttcgctgaaag

SEQ ID NO: 5843282 - DNA, 25 bp, Homo sapien
catgcgttcgctgaaaggcatcggt

SEQ ID NO: 5843283 - DNA, 25 bp, Homo sapien
ctgaaaggcatcggtgccacgcatc

SEQ ID NO: 5843284 - DNA, 25 bp, Homo sapien
ggcatcggtgccacgcatcttcatg

SEQ ID NO: 5843285 - DNA, 25 bp, Homo sapien
tgccacgcatcttcatgaagggcgc

SEQ ID NO: 5843286 - DNA, 25 bp, Homo sapien
atcttcatgaagggcgcgacccgcg

SEQ ID NO: 5843287 - DNA, 25 bp, Homo sapien
attaacgcgttcgcagttgcagcga

SEQ ID NO: 5843288 - DNA, 25 bp, Homo sapien
tacccgaacgtcatcaggcgtggca

SEQ ID NO: 5843289 - DNA, 25 bp, Homo sapien
gcgttcgcagttgcagcgattgcaa

SEQ ID NO: 5843290 - DNA, 25 bp, Homo sapien
ggtggacgagcgtccgcatgctaat

SEQ ID NO: 5843291 - DNA, 25 bp, Homo sapien
agttgcagcgattgcaactggcctg

SEQ ID NO: 5843292 - DNA, 25 bp, Homo sapien
cgtccgcatgctaatcgctttttac

SEQ ID NO: 5843293 - DNA, 25 bp, Homo sapien
tttaccgccagatgaaatcgaacag

SEQ ID NO: 5843294 - DNA, 25 bp, Homo sapien
gatgaaatcgaacagtcgctgaacg

SEQ ID NO: 5843295 - DNA, 25 bp, Homo sapien
aacagtcgctgaacggcgtgcatta

SEQ ID NO: 5843296 - DNA, 25 bp, Homo sapien
acatcatattcagcccatcacgctg

SEQ ID NO: 5843297 - DNA, 25 bp, Homo sapien
ttcagcccatcacgctgtggtttga

SEQ ID NO: 5843298 - DNA, 25 bp, Homo sapien
atcacgctgtggtttgatgatgcgc

SEQ ID NO: 5843299 - DNA, 25 bp, Homo sapien
ggtttgatgatgcgctcagtgccat

SEQ ID NO: 5843300 - DNA, 25 bp, Homo sapien
atgatgcgctcagtgccatgcgttc

SEQ ID NO: 5843301 - DNA, 25 bp, Homo sapien
ctcagtgccatgcgttcgctgaaag

SEQ ID NO: 5843302 - DNA, 25 bp, Homo sapien
catgcgttcgctgaaaggcatcggt

SEQ ID NO: 5843303 - DNA, 25 bp, Homo sapien
ctgaaaggcatcggtgccacgcatc

SEQ ID NO: 5843304 - DNA, 25 bp, Homo sapien
ggcatcggtgccacgcatcttcatg

SEQ ID NO: 5843305 - DNA, 25 bp, Homo sapien
tgccacgcatcttcatgaagggcgc

SEQ ID NO: 5843306 - DNA, 25 bp, Homo sapien
atcttcatgaagggcgcgacccgcg

SEQ ID NO: 5843307 - DNA, 25 bp, Homo sapien
attaacgcgttcgcagttgcagcga

SEQ ID NO: 5843308 - DNA, 25 bp, Homo sapien
tacccgaacgtcatcaggcgtggca

SEQ ID NO: 5843309 - DNA, 25 bp, Homo sapien
gcgttcgcagttgcagcgattgcaa

SEQ ID NO: 5843310 - DNA, 25 bp, Homo sapien
ggtggacgagcgtccgcatgctaat

SEQ ID NO: 5843311 - DNA, 25 bp, Homo sapien
agttgcagcgattgcaactggcctg

SEQ ID NO: 5843312 - DNA, 25 bp, Homo sapien
cgtccgcatgctaatcgctttttac

SEQ ID NO: 5843313 - DNA, 25 bp, Homo sapien
tttaccgccagatgaaatcgaacag

SEQ ID NO: 5843314 - DNA, 25 bp, Homo sapien
gatgaaatcgaacagtcgctgaacg

SEQ ID NO: 5843315 - DNA, 25 bp, Homo sapien
aacagtcgctgaacggcgtgcatta

SEQ ID NO: 5843316 - DNA, 25 bp, Homo sapien
acatcatattcagcccatcacgctg

SEQ ID NO: 5843317 - DNA, 25 bp, Homo sapien
ttcagcccatcacgctgtggtttga

SEQ ID NO: 5843318 - DNA, 25 bp, Homo sapien
atcacgctgtggtttgatgatgcgc

SEQ ID NO: 5843319 - DNA, 25 bp, Homo sapien
ggtttgatgatgcgctcagtgccat

SEQ ID NO: 5843320 - DNA, 25 bp, Homo sapien
atgatgcgctcagtgccatgcgttc

SEQ ID NO: 5843321 - DNA, 25 bp, Homo sapien
ctcagtgccatgcgttcgctgaaag

SEQ ID NO: 5843322 - DNA, 25 bp, Homo sapien
catgcgttcgctgaaaggcatcggt

SEQ ID NO: 5843323 - DNA, 25 bp, Homo sapien
ctgaaaggcatcggtgccacgcatc

SEQ ID NO: 5843324 - DNA, 25 bp, Homo sapien
ggcatcggtgccacgcatcttcatg

SEQ ID NO: 5843325 - DNA, 25 bp, Homo sapien
tgccacgcatcttcatgaagggcgc

SEQ ID NO: 5843326 - DNA, 25 bp, Homo sapien
atcttcatgaagggcgcgacccgcg

SEQ ID NO: 5843327 - DNA, 25 bp, Homo sapien
attaacgcgttcgcagttgcagcga

SEQ ID NO: 5843328 - DNA, 25 bp, Homo sapien
tacccgaacgtcatcaggcgtggca

SEQ ID NO: 5843329 - DNA, 25 bp, Homo sapien
gcgttcgcagttgcagcgattgcaa

SEQ ID NO: 5843330 - DNA, 25 bp, Homo sapien
ggtggacgagcgtccgcatgctaat

SEQ ID NO: 5843331 - DNA, 25 bp, Homo sapien
agttgcagcgattgcaactggcctg

SEQ ID NO: 5843332 - DNA, 25 bp, Homo sapien
cgtccgcatgctaatcgctttttac

SEQ ID NO: 5843333 - DNA, 25 bp, Homo sapien
tttaccgccagatgaaatcgaacag

SEQ ID NO: 5843334 - DNA, 25 bp, Homo sapien
gatgaaatcgaacagtcgctgaacg

SEQ ID NO: 5843335 - DNA, 25 bp, Homo sapien
aacagtcgctgaacggcgtgcatta

SEQ ID NO: 5843336 - DNA, 25 bp, Homo sapien
acatcatattcagcccatcacgctg

SEQ ID NO: 5843337 - DNA, 25 bp, Homo sapien
ttcagcccatcacgctgtggtttga

SEQ ID NO: 5843338 - DNA, 25 bp, Homo sapien
atcacgctgtggtttgatgatgcgc

SEQ ID NO: 5843339 - DNA, 25 bp, Homo sapien
ggtttgatgatgcgctcagtgccat

SEQ ID NO: 5843340 - DNA, 25 bp, Homo sapien
atgatgcgctcagtgccatgcgttc

SEQ ID NO: 5843341 - DNA, 25 bp, Homo sapien
ctcagtgccatgcgttcgctgaaag

SEQ ID NO: 5843342 - DNA, 25 bp, Homo sapien
catgcgttcgctgaaaggcatcggt

SEQ ID NO: 5843343 - DNA, 25 bp, Homo sapien
ctgaaaggcatcggtgccacgcatc

SEQ ID NO: 5843344 - DNA, 25 bp, Homo sapien
ggcatcggtgccacgcatcttcatg

SEQ ID NO: 5843345 - DNA, 25 bp, Homo sapien
tgccacgcatcttcatgaagggcgc

SEQ ID NO: 5843346 - DNA, 25 bp, Homo sapien
atcttcatgaagggcgcgacccgcg

SEQ ID NO: 5843347 - DNA, 25 bp, Homo sapien
attaacgcgttcgcagttgcagcga

SEQ ID NO: 5843348 - DNA, 25 bp, Homo sapien
tacccgaacgtcatcaggcgtggca

SEQ ID NO: 5843349 - DNA, 25 bp, Homo sapien
gcgttcgcagttgcagcgattgcaa

SEQ ID NO: 5843350 - DNA, 25 bp, Homo sapien
ggtggacgagcgtccgcatgctaat

SEQ ID NO: 5843351 - DNA, 25 bp, Homo sapien
agttgcagcgattgcaactggcctg

SEQ ID NO: 5843352 - DNA, 25 bp, Homo sapien
cgtccgcatgctaatcgctttttac

SEQ ID NO: 5843353 - DNA, 25 bp, Homo sapien
tttaccgccagatgaaatcgaacag

SEQ ID NO: 5843354 - DNA, 25 bp, Homo sapien
gatgaaatcgaacagtcgctgaacg

SEQ ID NO: 5843355 - DNA, 25 bp, Homo sapien
aacagtcgctgaacggcgtgcatta

SEQ ID NO: 5843356 - DNA, 25 bp, Homo sapien
acatcatattcagcccatcacgctg

SEQ ID NO: 5843357 - DNA, 25 bp, Homo sapien
ttcagcccatcacgctgtggtttga

SEQ ID NO: 5843358 - DNA, 25 bp, Homo sapien
atcacgctgtggtttgatgatgcgc

SEQ ID NO: 5843359 - DNA, 25 bp, Homo sapien
ggtttgatgatgcgctcagtgccat

SEQ ID NO: 5843360 - DNA, 25 bp, Homo sapien
atgatgcgctcagtgccatgcgttc

SEQ ID NO: 5843361 - DNA, 25 bp, Homo sapien
ctcagtgccatgcgttcgctgaaag

SEQ ID NO: 5843362 - DNA, 25 bp, Homo sapien
catgcgttcgctgaaaggcatcggt

SEQ ID NO: 5843363 - DNA, 25 bp, Homo sapien
ctgaaaggcatcggtgccacgcatc

SEQ ID NO: 5843364 - DNA, 25 bp, Homo sapien
ggcatcggtgccacgcatcttcatg

SEQ ID NO: 5843365 - DNA, 25 bp, Homo sapien
tgccacgcatcttcatgaagggcgc

SEQ ID NO: 5843366 - DNA, 25 bp, Homo sapien
atcttcatgaagggcgcgacccgcg

SEQ ID NO: 5843367 - DNA, 25 bp, Homo sapien
attaacgcgttcgcagttgcagcga

SEQ ID NO: 5843368 - DNA, 25 bp, Homo sapien
tacccgaacgtcatcaggcgtggca

SEQ ID NO: 5843369 - DNA, 25 bp, Homo sapien
gcgttcgcagttgcagcgattgcaa

SEQ ID NO: 5843370 - DNA, 25 bp, Homo sapien
ggtggacgagcgtccgcatgctaat

SEQ ID NO: 5843371 - DNA, 25 bp, Homo sapien
agttgcagcgattgcaactggcctg

SEQ ID NO: 5843372 - DNA, 25 bp, Homo sapien
cgtccgcatgctaatcgctttttac

SEQ ID NO: 5843373 - DNA, 25 bp, Homo sapien
tttaccgccagatgaaatcgaacag

SEQ ID NO: 5843374 - DNA, 25 bp, Homo sapien
gatgaaatcgaacagtcgctgaacg

SEQ ID NO: 5843375 - DNA, 25 bp, Homo sapien
aacagtcgctgaacggcgtgcatta

SEQ ID NO: 5843376 - DNA, 25 bp, Homo sapien
acatcatattcagcccatcacgctg

SEQ ID NO: 5843377 - DNA, 25 bp, Homo sapien
ttcagcccatcacgctgtggtttga

SEQ ID NO: 5843378 - DNA, 25 bp, Homo sapien
atcacgctgtggtttgatgatgcgc

SEQ ID NO: 5843379 - DNA, 25 bp, Homo sapien
ggtttgatgatgcgctcagtgccat

SEQ ID NO: 5843380 - DNA, 25 bp, Homo sapien
atgatgcgctcagtgccatgcgttc

SEQ ID NO: 5843381 - DNA, 25 bp, Homo sapien
ctcagtgccatgcgttcgctgaaag

SEQ ID NO: 5843382 - DNA, 25 bp, Homo sapien
catgcgttcgctgaaaggcatcggt

SEQ ID NO: 5843383 - DNA, 25 bp, Homo sapien
ctgaaaggcatcggtgccacgcatc

SEQ ID NO: 5843384 - DNA, 25 bp, Homo sapien
ggcatcggtgccacgcatcttcatg

SEQ ID NO: 5843385 - DNA, 25 bp, Homo sapien
tgccacgcatcttcatgaagggcgc

SEQ ID NO: 5843386 - DNA, 25 bp, Homo sapien
atcttcatgaagggcgcgacccgcg

SEQ ID NO: 5843387 - DNA, 25 bp, Homo sapien
attaacgcgttcgcagttgcagcga

SEQ ID NO: 5843388 - DNA, 25 bp, Homo sapien
tacccgaacgtcatcaggcgtggca

SEQ ID NO: 5843389 - DNA, 25 bp, Homo sapien
gcgttcgcagttgcagcgattgcaa

SEQ ID NO: 5843390 - DNA, 25 bp, Homo sapien
ggtggacgagcgtccgcatgctaat

SEQ ID NO: 5843391 - DNA, 25 bp, Homo sapien
agttgcagcgattgcaactggcctg

SEQ ID NO: 5843392 - DNA, 25 bp, Homo sapien
cgtccgcatgctaatcgctttttac

SEQ ID NO: 5843393 - DNA, 25 bp, Homo sapien
tttaccgccagatgaaatcgaacag

SEQ ID NO: 5843394 - DNA, 25 bp, Homo sapien
gatgaaatcgaacagtcgctgaacg

SEQ ID NO: 5843395 - DNA, 25 bp, Homo sapien
aacagtcgctgaacggcgtgcatta

SEQ ID NO: 5843396 - DNA, 25 bp, Homo sapien
acatcatattcagcccatcacgctg

SEQ ID NO: 5843397 - DNA, 25 bp, Homo sapien
ttcagcccatcacgctgtggtttga

SEQ ID NO: 5843398 - DNA, 25 bp, Homo sapien
atcacgctgtggtttgatgatgcgc

SEQ ID NO: 5843399 - DNA, 25 bp, Homo sapien
ggtttgatgatgcgctcagtgccat

SEQ ID NO: 5843400 - DNA, 25 bp, Homo sapien
atgatgcgctcagtgccatgcgttc

SEQ ID NO: 5843401 - DNA, 25 bp, Homo sapien
ctcagtgccatgcgttcgctgaaag

SEQ ID NO: 5843402 - DNA, 25 bp, Homo sapien
catgcgttcgctgaaaggcatcggt

SEQ ID NO: 5843403 - DNA, 25 bp, Homo sapien
ctgaaaggcatcggtgccacgcatc

SEQ ID NO: 5843404 - DNA, 25 bp, Homo sapien
ggcatcggtgccacgcatcttcatg

SEQ ID NO: 5843405 - DNA, 25 bp, Homo sapien
tgccacgcatcttcatgaagggcgc

SEQ ID NO: 5843406 - DNA, 25 bp, Homo sapien
atcttcatgaagggcgcgacccgcg

SEQ ID NO: 5843407 - DNA, 25 bp, Homo sapien
attaacgcgttcgcagttgcagcga

SEQ ID NO: 5843408 - DNA, 25 bp, Homo sapien
tacccgaacgtcatcaggcgtggca

SEQ ID NO: 5843409 - DNA, 25 bp, Homo sapien
gcgttcgcagttgcagcgattgcaa

SEQ ID NO: 5843410 - DNA, 25 bp, Homo sapien
ggtggacgagcgtccgcatgctaat

SEQ ID NO: 5843411 - DNA, 25 bp, Homo sapien
agttgcagcgattgcaactggcctg

SEQ ID NO: 5843412 - DNA, 25 bp, Homo sapien
cgtccgcatgctaatcgctttttac

SEQ ID NO: 5843413 - DNA, 25 bp, Homo sapien
tttaccgccagatgaaatcgaacag

SEQ ID NO: 5843414 - DNA, 25 bp, Homo sapien
gatgaaatcgaacagtcgctgaacg

SEQ ID NO: 5843415 - DNA, 25 bp, Homo sapien
aacagtcgctgaacggcgtgcatta

SEQ ID NO: 5843416 - DNA, 25 bp, Homo sapien
acatcatattcagcccatcacgctg

SEQ ID NO: 5843417 - DNA, 25 bp, Homo sapien
ttcagcccatcacgctgtggtttga

SEQ ID NO: 5843418 - DNA, 25 bp, Homo sapien
atcacgctgtggtttgatgatgcgc

SEQ ID NO: 5843419 - DNA, 25 bp, Homo sapien
ggtttgatgatgcgctcagtgccat

SEQ ID NO: 5843420 - DNA, 25 bp, Homo sapien
atgatgcgctcagtgccatgcgttc

SEQ ID NO: 5843421 - DNA, 25 bp, Homo sapien
ctcagtgccatgcgttcgctgaaag

SEQ ID NO: 5843422 - DNA, 25 bp, Homo sapien
catgcgttcgctgaaaggcatcggt

SEQ ID NO: 5843423 - DNA, 25 bp, Homo sapien
ctgaaaggcatcggtgccacgcatc

SEQ ID NO: 5843424 - DNA, 25 bp, Homo sapien
ggcatcggtgccacgcatcttcatg

SEQ ID NO: 5843425 - DNA, 25 bp, Homo sapien
tgccacgcatcttcatgaagggcgc

SEQ ID NO: 5843426 - DNA, 25 bp, Homo sapien
atcttcatgaagggcgcgacccgcg

SEQ ID NO: 5843427 - DNA, 25 bp, Homo sapien
attaacgcgttcgcagttgcagcga

SEQ ID NO: 5843428 - DNA, 25 bp, Homo sapien
tacccgaacgtcatcaggcgtggca

SEQ ID NO: 5843429 - DNA, 25 bp, Homo sapien
gcgttcgcagttgcagcgattgcaa

SEQ ID NO: 5843430 - DNA, 25 bp, Homo sapien
ggtggacgagcgtccgcatgctaat

SEQ ID NO: 5843431 - DNA, 25 bp, Homo sapien
agttgcagcgattgcaactggcctg

SEQ ID NO: 5843432 - DNA, 25 bp, Homo sapien
cgtccgcatgctaatcgctttttac

SEQ ID NO: 5843433 - DNA, 25 bp, Homo sapien
tttaccgccagatgaaatcgaacag

SEQ ID NO: 5843434 - DNA, 25 bp, Homo sapien
gatgaaatcgaacagtcgctgaacg

SEQ ID NO: 5843435 - DNA, 25 bp, Homo sapien
aacagtcgctgaacggcgtgcatta

SEQ ID NO: 5843436 - DNA, 25 bp, Homo sapien
acatcatattcagcccatcacgctg

SEQ ID NO: 5843437 - DNA, 25 bp, Homo sapien
ttcagcccatcacgctgtggtttga

SEQ ID NO: 5843438 - DNA, 25 bp, Homo sapien
atcacgctgtggtttgatgatgcgc

SEQ ID NO: 5843439 - DNA, 25 bp, Homo sapien
ggtttgatgatgcgctcagtgccat

SEQ ID NO: 5843440 - DNA, 25 bp, Homo sapien
atgatgcgctcagtgccatgcgttc

SEQ ID NO: 5843441 - DNA, 25 bp, Homo sapien
ctcagtgccatgcgttcgctgaaag

SEQ ID NO: 5843442 - DNA, 25 bp, Homo sapien
catgcgttcgctgaaaggcatcggt

SEQ ID NO: 5843443 - DNA, 25 bp, Homo sapien
ctgaaaggcatcggtgccacgcatc

SEQ ID NO: 5843444 - DNA, 25 bp, Homo sapien
ggcatcggtgccacgcatcttcatg

SEQ ID NO: 5843445 - DNA, 25 bp, Homo sapien
tgccacgcatcttcatgaagggcgc

SEQ ID NO: 5843446 - DNA, 25 bp, Homo sapien
atcttcatgaagggcgcgacccgcg

SEQ ID NO: 5843447 - DNA, 25 bp, Homo sapien
attaacgcgttcgcagttgcagcga

SEQ ID NO: 5843448 - DNA, 25 bp, Homo sapien
tacccgaacgtcatcaggcgtggca

SEQ ID NO: 5843449 - DNA, 25 bp, Homo sapien
gcgttcgcagttgcagcgattgcaa

SEQ ID NO: 5843450 - DNA, 25 bp, Homo sapien
ggtggacgagcgtccgcatgctaat

SEQ ID NO: 5843451 - DNA, 25 bp, Homo sapien
agttgcagcgattgcaactggcctg

SEQ ID NO: 5843452 - DNA, 25 bp, Homo sapien
cgtccgcatgctaatcgctttttac

SEQ ID NO: 5843453 - DNA, 25 bp, Homo sapien
tttaccgccagatgaaatcgaacag

SEQ ID NO: 5843454 - DNA, 25 bp, Homo sapien
gatgaaatcgaacagtcgctgaacg

SEQ ID NO: 5843455 - DNA, 25 bp, Homo sapien
aacagtcgctgaacggcgtgcatta

SEQ ID NO: 5843456 - DNA, 25 bp, Homo sapien
acatcatattcagcccatcacgctg

SEQ ID NO: 5843457 - DNA, 25 bp, Homo sapien
ttcagcccatcacgctgtggtttga

SEQ ID NO: 5843458 - DNA, 25 bp, Homo sapien
atcacgctgtggtttgatgatgcgc

SEQ ID NO: 5843459 - DNA, 25 bp, Homo sapien
ggtttgatgatgcgctcagtgccat

SEQ ID NO: 5843460 - DNA, 25 bp, Homo sapien
tgttcaggcacgccagaaggatgcc

SEQ ID NO: 5843461 - DNA, 25 bp, Homo sapien
agaaggatgccgcagaccattatct

SEQ ID NO: 5843462 - DNA, 25 bp, Homo sapien
gccgcagaccattatctggcgggag

SEQ ID NO: 5843463 - DNA, 25 bp, Homo sapien
cgttagcgactgcgacgttcgatct

SEQ ID NO: 5843464 - DNA, 25 bp, Homo sapien
cgacgttcgatcttgcatggagcaa

SEQ ID NO: 5843465 - DNA, 25 bp, Homo sapien
gatcttgcatggagcaatctcgcag

SEQ ID NO: 5843466 - DNA, 25 bp, Homo sapien
cagcggcatttggtcgggcagccgc

SEQ ID NO: 5843467 - DNA, 25 bp, Homo sapien
caatctcgcagtgcagtggtgcggt

SEQ ID NO: 5843468 - DNA, 25 bp, Homo sapien
gtcgggcagccgcacactatgagca

SEQ ID NO: 5843469 - DNA, 25 bp, Homo sapien
atttatccacggcactccgcgagct

SEQ ID NO: 5843470 - DNA, 25 bp, Homo sapien
cgcacactatgagcaacatgcagat

SEQ ID NO: 5843471 - DNA, 25 bp, Homo sapien
aacatgcagatctacagcgccagag

SEQ ID NO: 5843472 - DNA, 25 bp, Homo sapien
tacagcgccagagtgctgacgcctt

SEQ ID NO: 5843473 - DNA, 25 bp, Homo sapien
gagtgctgacgccttactggcaatg

SEQ ID NO: 5843474 - DNA, 25 bp, Homo sapien
tactggcaatgcttccacagcgtaa

SEQ ID NO: 5843475 - DNA, 25 bp, Homo sapien
gggttgtggacctggctggatgagc

SEQ ID NO: 5843476 - DNA, 25 bp, Homo sapien
tgagccgccactggcgggaacgtca

SEQ ID NO: 5843477 - DNA, 25 bp, Homo sapien
gcgcaggtgacggccttagatctct

SEQ ID NO: 5843478 - DNA, 25 bp, Homo sapien
gccttagatctctcgccgccaatgc

SEQ ID NO: 5843479 - DNA, 25 bp, Homo sapien
gccgccaatgcttgttcaggcacgc

SEQ ID NO: 5843480 - DNA, 25 bp, Homo sapien
tgttcaggcacgccagaaggatgcc

SEQ ID NO: 5843481 - DNA, 25 bp, Homo sapien
agaaggatgccgcagaccattatct

SEQ ID NO: 5843482 - DNA, 25 bp, Homo sapien
gccgcagaccattatctggcgggag

SEQ ID NO: 5843483 - DNA, 25 bp, Homo sapien
cgttagcgactgcgacgttcgatct

SEQ ID NO: 5843484 - DNA, 25 bp, Homo sapien
cgacgttcgatcttgcatggagcaa

SEQ ID NO: 5843485 - DNA, 25 bp, Homo sapien
gatcttgcatggagcaatctcgcag

SEQ ID NO: 5843486 - DNA, 25 bp, Homo sapien
cagcggcatttggtcgggcagccgc

SEQ ID NO: 5843487 - DNA, 25 bp, Homo sapien
caatctcgcagtgcagtggtgcggt

SEQ ID NO: 5843488 - DNA, 25 bp, Homo sapien
gtcgggcagccgcacactatgagca

SEQ ID NO: 5843489 - DNA, 25 bp, Homo sapien
atttatccacggcactccgcgagct

SEQ ID NO: 5843490 - DNA, 25 bp, Homo sapien
cgcacactatgagcaacatgcagat

SEQ ID NO: 5843491 - DNA, 25 bp, Homo sapien
aacatgcagatctacagcgccagag

SEQ ID NO: 5843492 - DNA, 25 bp, Homo sapien
tacagcgccagagtgctgacgcctt

SEQ ID NO: 5843493 - DNA, 25 bp, Homo sapien
gagtgctgacgccttactggcaatg

SEQ ID NO: 5843494 - DNA, 25 bp, Homo sapien
tactggcaatgcttccacagcgtaa

SEQ ID NO: 5843495 - DNA, 25 bp, Homo sapien
gggttgtggacctggctggatgagc

SEQ ID NO: 5843496 - DNA, 25 bp, Homo sapien
tgagccgccactggcgggaacgtca

SEQ ID NO: 5843497 - DNA, 25 bp, Homo sapien
gcgcaggtgacggccttagatctct

SEQ ID NO: 5843498 - DNA, 25 bp, Homo sapien
gccttagatctctcgccgccaatgc

SEQ ID NO: 5843499 - DNA, 25 bp, Homo sapien
gccgccaatgcttgttcaggcacgc

SEQ ID NO: 5843500 - DNA, 25 bp, Homo sapien
tgttcaggcacgccagaaggatgcc

SEQ ID NO: 5843501 - DNA, 25 bp, Homo sapien
agaaggatgccgcagaccattatct

SEQ ID NO: 5843502 - DNA, 25 bp, Homo sapien
gccgcagaccattatctggcgggag

SEQ ID NO: 5843503 - DNA, 25 bp, Homo sapien
cgttagcgactgcgacgttcgatct

SEQ ID NO: 5843504 - DNA, 25 bp, Homo sapien
cgacgttcgatcttgcatggagcaa

SEQ ID NO: 5843505 - DNA, 25 bp, Homo sapien
gatcttgcatggagcaatctcgcag

SEQ ID NO: 5843506 - DNA, 25 bp, Homo sapien
cagcggcatttggtcgggcagccgc

SEQ ID NO: 5843507 - DNA, 25 bp, Homo sapien
caatctcgcagtgcagtggtgcggt

SEQ ID NO: 5843508 - DNA, 25 bp, Homo sapien
gtcgggcagccgcacactatgagca

SEQ ID NO: 5843509 - DNA, 25 bp, Homo sapien
atttatccacggcactccgcgagct

SEQ ID NO: 5843510 - DNA, 25 bp, Homo sapien
cgcacactatgagcaacatgcagat

SEQ ID NO: 5843511 - DNA, 25 bp, Homo sapien
aacatgcagatctacagcgccagag

SEQ ID NO: 5843512 - DNA, 25 bp, Homo sapien
tacagcgccagagtgctgacgcctt

SEQ ID NO: 5843513 - DNA, 25 bp, Homo sapien
gagtgctgacgccttactggcaatg

SEQ ID NO: 5843514 - DNA, 25 bp, Homo sapien
tactggcaatgcttccacagcgtaa

SEQ ID NO: 5843515 - DNA, 25 bp, Homo sapien
gggttgtggacctggctggatgagc

SEQ ID NO: 5843516 - DNA, 25 bp, Homo sapien
tgagccgccactggcgggaacgtca

SEQ ID NO: 5843517 - DNA, 25 bp, Homo sapien
gcgcaggtgacggccttagatctct

SEQ ID NO: 5843518 - DNA, 25 bp, Homo sapien
gccttagatctctcgccgccaatgc

SEQ ID NO: 5843519 - DNA, 25 bp, Homo sapien
gccgccaatgcttgttcaggcacgc

SEQ ID NO: 5843520 - DNA, 25 bp, Homo sapien
tgttcaggcacgccagaaggatgcc

SEQ ID NO: 5843521 - DNA, 25 bp, Homo sapien
agaaggatgccgcagaccattatct

SEQ ID NO: 5843522 - DNA, 25 bp, Homo sapien
gccgcagaccattatctggcgggag

SEQ ID NO: 5843523 - DNA, 25 bp, Homo sapien
cgttagcgactgcgacgttcgatct

SEQ ID NO: 5843524 - DNA, 25 bp, Homo sapien
cgacgttcgatcttgcatggagcaa

SEQ ID NO: 5843525 - DNA, 25 bp, Homo sapien
gatcttgcatggagcaatctcgcag

SEQ ID NO: 5843526 - DNA, 25 bp, Homo sapien
cagcggcatttggtcgggcagccgc

SEQ ID NO: 5843527 - DNA, 25 bp, Homo sapien
caatctcgcagtgcagtggtgcggt

SEQ ID NO: 5843528 - DNA, 25 bp, Homo sapien
gtcgggcagccgcacactatgagca

SEQ ID NO: 5843529 - DNA, 25 bp, Homo sapien
atttatccacggcactccgcgagct

SEQ ID NO: 5843530 - DNA, 25 bp, Homo sapien
cgcacactatgagcaacatgcagat

SEQ ID NO: 5843531 - DNA, 25 bp, Homo sapien
aacatgcagatctacagcgccagag

SEQ ID NO: 5843532 - DNA, 25 bp, Homo sapien
tacagcgccagagtgctgacgcctt

SEQ ID NO: 5843533 - DNA, 25 bp, Homo sapien
gagtgctgacgccttactggcaatg

SEQ ID NO: 5843534 - DNA, 25 bp, Homo sapien
tactggcaatgcttccacagcgtaa

SEQ ID NO: 5843535 - DNA, 25 bp, Homo sapien
gggttgtggacctggctggatgagc

SEQ ID NO: 5843536 - DNA, 25 bp, Homo sapien
tgagccgccactggcgggaacgtca

SEQ ID NO: 5843537 - DNA, 25 bp, Homo sapien
gcgcaggtgacggccttagatctct

SEQ ID NO: 5843538 - DNA, 25 bp, Homo sapien
gccttagatctctcgccgccaatgc

SEQ ID NO: 5843539 - DNA, 25 bp, Homo sapien
gccgccaatgcttgttcaggcacgc

SEQ ID NO: 5843540 - DNA, 25 bp, Homo sapien
tgttcaggcacgccagaaggatgcc

SEQ ID NO: 5843541 - DNA, 25 bp, Homo sapien
agaaggatgccgcagaccattatct

SEQ ID NO: 5843542 - DNA, 25 bp, Homo sapien
gccgcagaccattatctggcgggag

SEQ ID NO: 5843543 - DNA, 25 bp, Homo sapien
cgttagcgactgcgacgttcgatct

SEQ ID NO: 5843544 - DNA, 25 bp, Homo sapien
cgacgttcgatcttgcatggagcaa

SEQ ID NO: 5843545 - DNA, 25 bp, Homo sapien
gatcttgcatggagcaatctcgcag

SEQ ID NO: 5843546 - DNA, 25 bp, Homo sapien
cagcggcatttggtcgggcagccgc

SEQ ID NO: 5843547 - DNA, 25 bp, Homo sapien
caatctcgcagtgcagtggtgcggt

SEQ ID NO: 5843548 - DNA, 25 bp, Homo sapien
gtcgggcagccgcacactatgagca

SEQ ID NO: 5843549 - DNA, 25 bp, Homo sapien
atttatccacggcactccgcgagct

SEQ ID NO: 5843550 - DNA, 25 bp, Homo sapien
cgcacactatgagcaacatgcagat

SEQ ID NO: 5843551 - DNA, 25 bp, Homo sapien
aacatgcagatctacagcgccagag

SEQ ID NO: 5843552 - DNA, 25 bp, Homo sapien
tacagcgccagagtgctgacgcctt

SEQ ID NO: 5843553 - DNA, 25 bp, Homo sapien
gagtgctgacgccttactggcaatg

SEQ ID NO: 5843554 - DNA, 25 bp, Homo sapien
tactggcaatgcttccacagcgtaa

SEQ ID NO: 5843555 - DNA, 25 bp, Homo sapien
gggttgtggacctggctggatgagc

SEQ ID NO: 5843556 - DNA, 25 bp, Homo sapien
tgagccgccactggcgggaacgtca

SEQ ID NO: 5843557 - DNA, 25 bp, Homo sapien
gcgcaggtgacggccttagatctct

SEQ ID NO: 5843558 - DNA, 25 bp, Homo sapien
gccttagatctctcgccgccaatgc

SEQ ID NO: 5843559 - DNA, 25 bp, Homo sapien
gccgccaatgcttgttcaggcacgc

SEQ ID NO: 5843560 - DNA, 25 bp, Homo sapien
tgttcaggcacgccagaaggatgcc

SEQ ID NO: 5843561 - DNA, 25 bp, Homo sapien
agaaggatgccgcagaccattatct

SEQ ID NO: 5843562 - DNA, 25 bp, Homo sapien
gccgcagaccattatctggcgggag

SEQ ID NO: 5843563 - DNA, 25 bp, Homo sapien
cgttagcgactgcgacgttcgatct

SEQ ID NO: 5843564 - DNA, 25 bp, Homo sapien
cgacgttcgatcttgcatggagcaa

SEQ ID NO: 5843565 - DNA, 25 bp, Homo sapien
gatcttgcatggagcaatctcgcag

SEQ ID NO: 5843566 - DNA, 25 bp, Homo sapien
cagcggcatttggtcgggcagccgc

SEQ ID NO: 5843567 - DNA, 25 bp, Homo sapien
caatctcgcagtgcagtggtgcggt

SEQ ID NO: 5843568 - DNA, 25 bp, Homo sapien
gtcgggcagccgcacactatgagca

SEQ ID NO: 5843569 - DNA, 25 bp, Homo sapien
atttatccacggcactccgcgagct

SEQ ID NO: 5843570 - DNA, 25 bp, Homo sapien
cgcacactatgagcaacatgcagat

SEQ ID NO: 5843571 - DNA, 25 bp, Homo sapien
aacatgcagatctacagcgccagag

SEQ ID NO: 5843572 - DNA, 25 bp, Homo sapien
tacagcgccagagtgctgacgcctt

SEQ ID NO: 5843573 - DNA, 25 bp, Homo sapien
gagtgctgacgccttactggcaatg

SEQ ID NO: 5843574 - DNA, 25 bp, Homo sapien
tactggcaatgcttccacagcgtaa

SEQ ID NO: 5843575 - DNA, 25 bp, Homo sapien
gggttgtggacctggctggatgagc

SEQ ID NO: 5843576 - DNA, 25 bp, Homo sapien
tgagccgccactggcgggaacgtca

SEQ ID NO: 5843577 - DNA, 25 bp, Homo sapien
gcgcaggtgacggccttagatctct

SEQ ID NO: 5843578 - DNA, 25 bp, Homo sapien
gccttagatctctcgccgccaatgc

SEQ ID NO: 5843579 - DNA, 25 bp, Homo sapien
gccgccaatgcttgttcaggcacgc

SEQ ID NO: 5843580 - DNA, 25 bp, Homo sapien
tgttcaggcacgccagaaggatgcc

SEQ ID NO: 5843581 - DNA, 25 bp, Homo sapien
agaaggatgccgcagaccattatct

SEQ ID NO: 5843582 - DNA, 25 bp, Homo sapien
gccgcagaccattatctggcgggag

SEQ ID NO: 5843583 - DNA, 25 bp, Homo sapien
cgttagcgactgcgacgttcgatct

SEQ ID NO: 5843584 - DNA, 25 bp, Homo sapien
cgacgttcgatcttgcatggagcaa

SEQ ID NO: 5843585 - DNA, 25 bp, Homo sapien
gatcttgcatggagcaatctcgcag

SEQ ID NO: 5843586 - DNA, 25 bp, Homo sapien
cagcggcatttggtcgggcagccgc

SEQ ID NO: 5843587 - DNA, 25 bp, Homo sapien
caatctcgcagtgcagtggtgcggt

SEQ ID NO: 5843588 - DNA, 25 bp, Homo sapien
gtcgggcagccgcacactatgagca

SEQ ID NO: 5843589 - DNA, 25 bp, Homo sapien
atttatccacggcactccgcgagct

SEQ ID NO: 5843590 - DNA, 25 bp, Homo sapien
cgcacactatgagcaacatgcagat

SEQ ID NO: 5843591 - DNA, 25 bp, Homo sapien
aacatgcagatctacagcgccagag

SEQ ID NO: 5843592 - DNA, 25 bp, Homo sapien
tacagcgccagagtgctgacgcctt

SEQ ID NO: 5843593 - DNA, 25 bp, Homo sapien
gagtgctgacgccttactggcaatg

SEQ ID NO: 5843594 - DNA, 25 bp, Homo sapien
tactggcaatgcttccacagcgtaa

SEQ ID NO: 5843595 - DNA, 25 bp, Homo sapien
gggttgtggacctggctggatgagc

SEQ ID NO: 5843596 - DNA, 25 bp, Homo sapien
tgagccgccactggcgggaacgtca

SEQ ID NO: 5843597 - DNA, 25 bp, Homo sapien
gcgcaggtgacggccttagatctct

SEQ ID NO: 5843598 - DNA, 25 bp, Homo sapien
gccttagatctctcgccgccaatgc

SEQ ID NO: 5843599 - DNA, 25 bp, Homo sapien
gccgccaatgcttgttcaggcacgc

SEQ ID NO: 5843600 - DNA, 25 bp, Homo sapien
tgttcaggcacgccagaaggatgcc

SEQ ID NO: 5843601 - DNA, 25 bp, Homo sapien
agaaggatgccgcagaccattatct

SEQ ID NO: 5843602 - DNA, 25 bp, Homo sapien
gccgcagaccattatctggcgggag

SEQ ID NO: 5843603 - DNA, 25 bp, Homo sapien
cgttagcgactgcgacgttcgatct

SEQ ID NO: 5843604 - DNA, 25 bp, Homo sapien
cgacgttcgatcttgcatggagcaa

SEQ ID NO: 5843605 - DNA, 25 bp, Homo sapien
gatcttgcatggagcaatctcgcag

SEQ ID NO: 5843606 - DNA, 25 bp, Homo sapien
cagcggcatttggtcgggcagccgc

SEQ ID NO: 5843607 - DNA, 25 bp, Homo sapien
caatctcgcagtgcagtggtgcggt

SEQ ID NO: 5843608 - DNA, 25 bp, Homo sapien
gtcgggcagccgcacactatgagca

SEQ ID NO: 5843609 - DNA, 25 bp, Homo sapien
atttatccacggcactccgcgagct

SEQ ID NO: 5843610 - DNA, 25 bp, Homo sapien
cgcacactatgagcaacatgcagat

SEQ ID NO: 5843611 - DNA, 25 bp, Homo sapien
aacatgcagatctacagcgccagag

SEQ ID NO: 5843612 - DNA, 25 bp, Homo sapien
tacagcgccagagtgctgacgcctt

SEQ ID NO: 5843613 - DNA, 25 bp, Homo sapien
gagtgctgacgccttactggcaatg

SEQ ID NO: 5843614 - DNA, 25 bp, Homo sapien
tactggcaatgcttccacagcgtaa

SEQ ID NO: 5843615 - DNA, 25 bp, Homo sapien
gggttgtggacctggctggatgagc

SEQ ID NO: 5843616 - DNA, 25 bp, Homo sapien
tgagccgccactggcgggaacgtca

SEQ ID NO: 5843617 - DNA, 25 bp, Homo sapien
gcgcaggtgacggccttagatctct

SEQ ID NO: 5843618 - DNA, 25 bp, Homo sapien
gccttagatctctcgccgccaatgc

SEQ ID NO: 5843619 - DNA, 25 bp, Homo sapien
gccgccaatgcttgttcaggcacgc

SEQ ID NO: 5843620 - DNA, 25 bp, Homo sapien
tgttcaggcacgccagaaggatgcc

SEQ ID NO: 5843621 - DNA, 25 bp, Homo sapien
agaaggatgccgcagaccattatct

SEQ ID NO: 5843622 - DNA, 25 bp, Homo sapien
gccgcagaccattatctggcgggag

SEQ ID NO: 5843623 - DNA, 25 bp, Homo sapien
cgttagcgactgcgacgttcgatct

SEQ ID NO: 5843624 - DNA, 25 bp, Homo sapien
cgacgttcgatcttgcatggagcaa

SEQ ID NO: 5843625 - DNA, 25 bp, Homo sapien
gatcttgcatggagcaatctcgcag

SEQ ID NO: 5843626 - DNA, 25 bp, Homo sapien
cagcggcatttggtcgggcagccgc

SEQ ID NO: 5843627 - DNA, 25 bp, Homo sapien
caatctcgcagtgcagtggtgcggt

SEQ ID NO: 5843628 - DNA, 25 bp, Homo sapien
gtcgggcagccgcacactatgagca

SEQ ID NO: 5843629 - DNA, 25 bp, Homo sapien
atttatccacggcactccgcgagct

SEQ ID NO: 5843630 - DNA, 25 bp, Homo sapien
cgcacactatgagcaacatgcagat

SEQ ID NO: 5843631 - DNA, 25 bp, Homo sapien
aacatgcagatctacagcgccagag

SEQ ID NO: 5843632 - DNA, 25 bp, Homo sapien
tacagcgccagagtgctgacgcctt

SEQ ID NO: 5843633 - DNA, 25 bp, Homo sapien
gagtgctgacgccttactggcaatg

SEQ ID NO: 5843634 - DNA, 25 bp, Homo sapien
tactggcaatgcttccacagcgtaa

SEQ ID NO: 5843635 - DNA, 25 bp, Homo sapien
gggttgtggacctggctggatgagc

SEQ ID NO: 5843636 - DNA, 25 bp, Homo sapien
tgagccgccactggcgggaacgtca

SEQ ID NO: 5843637 - DNA, 25 bp, Homo sapien
gcgcaggtgacggccttagatctct

SEQ ID NO: 5843638 - DNA, 25 bp, Homo sapien
gccttagatctctcgccgccaatgc

SEQ ID NO: 5843639 - DNA, 25 bp, Homo sapien
gccgccaatgcttgttcaggcacgc

SEQ ID NO: 5843640 - DNA, 25 bp, Homo sapien
tgttcaggcacgccagaaggatgcc

SEQ ID NO: 5843641 - DNA, 25 bp, Homo sapien
agaaggatgccgcagaccattatct

SEQ ID NO: 5843642 - DNA, 25 bp, Homo sapien
gccgcagaccattatctggcgggag

SEQ ID NO: 5843643 - DNA, 25 bp, Homo sapien
cgttagcgactgcgacgttcgatct

SEQ ID NO: 5843644 - DNA, 25 bp, Homo sapien
cgacgttcgatcttgcatggagcaa

SEQ ID NO: 5843645 - DNA, 25 bp, Homo sapien
gatcttgcatggagcaatctcgcag

SEQ ID NO: 5843646 - DNA, 25 bp, Homo sapien
cagcggcatttggtcgggcagccgc

SEQ ID NO: 5843647 - DNA, 25 bp, Homo sapien
caatctcgcagtgcagtggtgcggt

SEQ ID NO: 5843648 - DNA, 25 bp, Homo sapien
gtcgggcagccgcacactatgagca

SEQ ID NO: 5843649 - DNA, 25 bp, Homo sapien
atttatccacggcactccgcgagct

SEQ ID NO: 5843650 - DNA, 25 bp, Homo sapien
cgcacactatgagcaacatgcagat

SEQ ID NO: 5843651 - DNA, 25 bp, Homo sapien
aacatgcagatctacagcgccagag

SEQ ID NO: 5843652 - DNA, 25 bp, Homo sapien
tacagcgccagagtgctgacgcctt

SEQ ID NO: 5843653 - DNA, 25 bp, Homo sapien
gagtgctgacgccttactggcaatg

SEQ ID NO: 5843654 - DNA, 25 bp, Homo sapien
tactggcaatgcttccacagcgtaa

SEQ ID NO: 5843655 - DNA, 25 bp, Homo sapien
gggttgtggacctggctggatgagc

SEQ ID NO: 5843656 - DNA, 25 bp, Homo sapien
tgagccgccactggcgggaacgtca

SEQ ID NO: 5843657 - DNA, 25 bp, Homo sapien
gcgcaggtgacggccttagatctct

SEQ ID NO: 5843658 - DNA, 25 bp, Homo sapien
gccttagatctctcgccgccaatgc

SEQ ID NO: 5843659 - DNA, 25 bp, Homo sapien
gccgccaatgcttgttcaggcacgc

SEQ ID NO: 5843660 - DNA, 25 bp, Homo sapien
tgttcaggcacgccagaaggatgcc

SEQ ID NO: 5843661 - DNA, 25 bp, Homo sapien
agaaggatgccgcagaccattatct

SEQ ID NO: 5843662 - DNA, 25 bp, Homo sapien
gccgcagaccattatctggcgggag

SEQ ID NO: 5843663 - DNA, 25 bp, Homo sapien
cgttagcgactgcgacgttcgatct

SEQ ID NO: 5843664 - DNA, 25 bp, Homo sapien
cgacgttcgatcttgcatggagcaa

SEQ ID NO: 5843665 - DNA, 25 bp, Homo sapien
gatcttgcatggagcaatctcgcag

SEQ ID NO: 5843666 - DNA, 25 bp, Homo sapien
cagcggcatttggtcgggcagccgc

SEQ ID NO: 5843667 - DNA, 25 bp, Homo sapien
caatctcgcagtgcagtggtgcggt

SEQ ID NO: 5843668 - DNA, 25 bp, Homo sapien
gtcgggcagccgcacactatgagca

SEQ ID NO: 5843669 - DNA, 25 bp, Homo sapien
atttatccacggcactccgcgagct

SEQ ID NO: 5843670 - DNA, 25 bp, Homo sapien
cgcacactatgagcaacatgcagat

SEQ ID NO: 5843671 - DNA, 25 bp, Homo sapien
aacatgcagatctacagcgccagag

SEQ ID NO: 5843672 - DNA, 25 bp, Homo sapien
tacagcgccagagtgctgacgcctt

SEQ ID NO: 5843673 - DNA, 25 bp, Homo sapien
gagtgctgacgccttactggcaatg

SEQ ID NO: 5843674 - DNA, 25 bp, Homo sapien
tactggcaatgcttccacagcgtaa

SEQ ID NO: 5843675 - DNA, 25 bp, Homo sapien
gggttgtggacctggctggatgagc

SEQ ID NO: 5843676 - DNA, 25 bp, Homo sapien
tgagccgccactggcgggaacgtca

SEQ ID NO: 5843677 - DNA, 25 bp, Homo sapien
gcgcaggtgacggccttagatctct

SEQ ID NO: 5843678 - DNA, 25 bp, Homo sapien
gccttagatctctcgccgccaatgc

SEQ ID NO: 5843679 - DNA, 25 bp, Homo sapien
gccgccaatgcttgttcaggcacgc

SEQ ID NO: 5843680 - DNA, 25 bp, Homo sapien
tgttcaggcacgccagaaggatgcc

SEQ ID NO: 5843681 - DNA, 25 bp, Homo sapien
agaaggatgccgcagaccattatct

SEQ ID NO: 5843682 - DNA, 25 bp, Homo sapien
gccgcagaccattatctggcgggag

SEQ ID NO: 5843683 - DNA, 25 bp, Homo sapien
cgttagcgactgcgacgttcgatct

SEQ ID NO: 5843684 - DNA, 25 bp, Homo sapien
cgacgttcgatcttgcatggagcaa

SEQ ID NO: 5843685 - DNA, 25 bp, Homo sapien
gatcttgcatggagcaatctcgcag

SEQ ID NO: 5843686 - DNA, 25 bp, Homo sapien
cagcggcatttggtcgggcagccgc

SEQ ID NO: 5843687 - DNA, 25 bp, Homo sapien
caatctcgcagtgcagtggtgcggt

SEQ ID NO: 5843688 - DNA, 25 bp, Homo sapien
gtcgggcagccgcacactatgagca

SEQ ID NO: 5843689 - DNA, 25 bp, Homo sapien
atttatccacggcactccgcgagct

SEQ ID NO: 5843690 - DNA, 25 bp, Homo sapien
cgcacactatgagcaacatgcagat

SEQ ID NO: 5843691 - DNA, 25 bp, Homo sapien
aacatgcagatctacagcgccagag

SEQ ID NO: 5843692 - DNA, 25 bp, Homo sapien
tacagcgccagagtgctgacgcctt

SEQ ID NO: 5843693 - DNA, 25 bp, Homo sapien
gagtgctgacgccttactggcaatg

SEQ ID NO: 5843694 - DNA, 25 bp, Homo sapien
tactggcaatgcttccacagcgtaa

SEQ ID NO: 5843695 - DNA, 25 bp, Homo sapien
gggttgtggacctggctggatgagc

SEQ ID NO: 5843696 - DNA, 25 bp, Homo sapien
tgagccgccactggcgggaacgtca

SEQ ID NO: 5843697 - DNA, 25 bp, Homo sapien
gcgcaggtgacggccttagatctct

SEQ ID NO: 5843698 - DNA, 25 bp, Homo sapien
gccttagatctctcgccgccaatgc

SEQ ID NO: 5843699 - DNA, 25 bp, Homo sapien
gccgccaatgcttgttcaggcacgc

SEQ ID NO: 5843700 - DNA, 25 bp, Homo sapien
tgttcaggcacgccagaaggatgcc

SEQ ID NO: 5843701 - DNA, 25 bp, Homo sapien
agaaggatgccgcagaccattatct

SEQ ID NO: 5843702 - DNA, 25 bp, Homo sapien
gccgcagaccattatctggcgggag

SEQ ID NO: 5843703 - DNA, 25 bp, Homo sapien
cgttagcgactgcgacgttcgatct

SEQ ID NO: 5843704 - DNA, 25 bp, Homo sapien
cgacgttcgatcttgcatggagcaa

SEQ ID NO: 5843705 - DNA, 25 bp, Homo sapien
gatcttgcatggagcaatctcgcag

SEQ ID NO: 5843706 - DNA, 25 bp, Homo sapien
cagcggcatttggtcgggcagccgc

SEQ ID NO: 5843707 - DNA, 25 bp, Homo sapien
caatctcgcagtgcagtggtgcggt

SEQ ID NO: 5843708 - DNA, 25 bp, Homo sapien
gtcgggcagccgcacactatgagca

SEQ ID NO: 5843709 - DNA, 25 bp, Homo sapien
atttatccacggcactccgcgagct

SEQ ID NO: 5843710 - DNA, 25 bp, Homo sapien
cgcacactatgagcaacatgcagat

SEQ ID NO: 5843711 - DNA, 25 bp, Homo sapien
aacatgcagatctacagcgccagag

SEQ ID NO: 5843712 - DNA, 25 bp, Homo sapien
tacagcgccagagtgctgacgcctt

SEQ ID NO: 5843713 - DNA, 25 bp, Homo sapien
gagtgctgacgccttactggcaatg

SEQ ID NO: 5843714 - DNA, 25 bp, Homo sapien
tactggcaatgcttccacagcgtaa

SEQ ID NO: 5843715 - DNA, 25 bp, Homo sapien
gggttgtggacctggctggatgagc

SEQ ID NO: 5843716 - DNA, 25 bp, Homo sapien
tgagccgccactggcgggaacgtca

SEQ ID NO: 5843717 - DNA, 25 bp, Homo sapien
gcgcaggtgacggccttagatctct

SEQ ID NO: 5843718 - DNA, 25 bp, Homo sapien
gccttagatctctcgccgccaatgc

SEQ ID NO: 5843719 - DNA, 25 bp, Homo sapien
gccgccaatgcttgttcaggcacgc

SEQ ID NO: 5843720 - DNA, 25 bp, Homo sapien
tgttcaggcacgccagaaggatgcc

SEQ ID NO: 5843721 - DNA, 25 bp, Homo sapien
agaaggatgccgcagaccattatct

SEQ ID NO: 5843722 - DNA, 25 bp, Homo sapien
gccgcagaccattatctggcgggag

SEQ ID NO: 5843723 - DNA, 25 bp, Homo sapien
cgttagcgactgcgacgttcgatct

SEQ ID NO: 5843724 - DNA, 25 bp, Homo sapien
cgacgttcgatcttgcatggagcaa

SEQ ID NO: 5843725 - DNA, 25 bp, Homo sapien
gatcttgcatggagcaatctcgcag

SEQ ID NO: 5843726 - DNA, 25 bp, Homo sapien
cagcggcatttggtcgggcagccgc

SEQ ID NO: 5843727 - DNA, 25 bp, Homo sapien
caatctcgcagtgcagtggtgcggt

SEQ ID NO: 5843728 - DNA, 25 bp, Homo sapien
gtcgggcagccgcacactatgagca

SEQ ID NO: 5843729 - DNA, 25 bp, Homo sapien
atttatccacggcactccgcgagct

SEQ ID NO: 5843730 - DNA, 25 bp, Homo sapien
cgcacactatgagcaacatgcagat

SEQ ID NO: 5843731 - DNA, 25 bp, Homo sapien
aacatgcagatctacagcgccagag

SEQ ID NO: 5843732 - DNA, 25 bp, Homo sapien
tacagcgccagagtgctgacgcctt

SEQ ID NO: 5843733 - DNA, 25 bp, Homo sapien
gagtgctgacgccttactggcaatg

SEQ ID NO: 5843734 - DNA, 25 bp, Homo sapien
tactggcaatgcttccacagcgtaa

SEQ ID NO: 5843735 - DNA, 25 bp, Homo sapien
gggttgtggacctggctggatgagc

SEQ ID NO: 5843736 - DNA, 25 bp, Homo sapien
tgagccgccactggcgggaacgtca

SEQ ID NO: 5843737 - DNA, 25 bp, Homo sapien
gcgcaggtgacggccttagatctct

SEQ ID NO: 5843738 - DNA, 25 bp, Homo sapien
gccttagatctctcgccgccaatgc

SEQ ID NO: 5843739 - DNA, 25 bp, Homo sapien
gccgccaatgcttgttcaggcacgc

SEQ ID NO: 5843740 - DNA, 25 bp, Homo sapien
tgttcaggcacgccagaaggatgcc

SEQ ID NO: 5843741 - DNA, 25 bp, Homo sapien
agaaggatgccgcagaccattatct

SEQ ID NO: 5843742 - DNA, 25 bp, Homo sapien
gccgcagaccattatctggcgggag

SEQ ID NO: 5843743 - DNA, 25 bp, Homo sapien
cgttagcgactgcgacgttcgatct

SEQ ID NO: 5843744 - DNA, 25 bp, Homo sapien
cgacgttcgatcttgcatggagcaa

SEQ ID NO: 5843745 - DNA, 25 bp, Homo sapien
gatcttgcatggagcaatctcgcag

SEQ ID NO: 5843746 - DNA, 25 bp, Homo sapien
cagcggcatttggtcgggcagccgc

SEQ ID NO: 5843747 - DNA, 25 bp, Homo sapien
caatctcgcagtgcagtggtgcggt

SEQ ID NO: 5843748 - DNA, 25 bp, Homo sapien
gtcgggcagccgcacactatgagca

SEQ ID NO: 5843749 - DNA, 25 bp, Homo sapien
atttatccacggcactccgcgagct

SEQ ID NO: 5843750 - DNA, 25 bp, Homo sapien
cgcacactatgagcaacatgcagat

SEQ ID NO: 5843751 - DNA, 25 bp, Homo sapien
aacatgcagatctacagcgccagag

SEQ ID NO: 5843752 - DNA, 25 bp, Homo sapien
tacagcgccagagtgctgacgcctt

SEQ ID NO: 5843753 - DNA, 25 bp, Homo sapien
gagtgctgacgccttactggcaatg

SEQ ID NO: 5843754 - DNA, 25 bp, Homo sapien
tactggcaatgcttccacagcgtaa

SEQ ID NO: 5843755 - DNA, 25 bp, Homo sapien
gggttgtggacctggctggatgagc

SEQ ID NO: 5843756 - DNA, 25 bp, Homo sapien
tgagccgccactggcgggaacgtca

SEQ ID NO: 5843757 - DNA, 25 bp, Homo sapien
gcgcaggtgacggccttagatctct

SEQ ID NO: 5843758 - DNA, 25 bp, Homo sapien
gccttagatctctcgccgccaatgc

SEQ ID NO: 5843759 - DNA, 25 bp, Homo sapien
gccgccaatgcttgttcaggcacgc

SEQ ID NO: 5843760 - DNA, 25 bp, Homo sapien
tgttcaggcacgccagaaggatgcc

SEQ ID NO: 5843761 - DNA, 25 bp, Homo sapien
agaaggatgccgcagaccattatct

SEQ ID NO: 5843762 - DNA, 25 bp, Homo sapien
gccgcagaccattatctggcgggag

SEQ ID NO: 5843763 - DNA, 25 bp, Homo sapien
cgttagcgactgcgacgttcgatct

SEQ ID NO: 5843764 - DNA, 25 bp, Homo sapien
cgacgttcgatcttgcatggagcaa

SEQ ID NO: 5843765 - DNA, 25 bp, Homo sapien
gatcttgcatggagcaatctcgcag

SEQ ID NO: 5843766 - DNA, 25 bp, Homo sapien
cagcggcatttggtcgggcagccgc

SEQ ID NO: 5843767 - DNA, 25 bp, Homo sapien
caatctcgcagtgcagtggtgcggt

SEQ ID NO: 5843768 - DNA, 25 bp, Homo sapien
gtcgggcagccgcacactatgagca

SEQ ID NO: 5843769 - DNA, 25 bp, Homo sapien
atttatccacggcactccgcgagct

SEQ ID NO: 5843770 - DNA, 25 bp, Homo sapien
cgcacactatgagcaacatgcagat

SEQ ID NO: 5843771 - DNA, 25 bp, Homo sapien
aacatgcagatctacagcgccagag

SEQ ID NO: 5843772 - DNA, 25 bp, Homo sapien
tacagcgccagagtgctgacgcctt

SEQ ID NO: 5843773 - DNA, 25 bp, Homo sapien
gagtgctgacgccttactggcaatg

SEQ ID NO: 5843774 - DNA, 25 bp, Homo sapien
tactggcaatgcttccacagcgtaa

SEQ ID NO: 5843775 - DNA, 25 bp, Homo sapien
gggttgtggacctggctggatgagc

SEQ ID NO: 5843776 - DNA, 25 bp, Homo sapien
tgagccgccactggcgggaacgtca

SEQ ID NO: 5843777 - DNA, 25 bp, Homo sapien
gcgcaggtgacggccttagatctct

SEQ ID NO: 5843778 - DNA, 25 bp, Homo sapien
gccttagatctctcgccgccaatgc

SEQ ID NO: 5843779 - DNA, 25 bp, Homo sapien
gccgccaatgcttgttcaggcacgc

SEQ ID NO: 5843780 - DNA, 25 bp, Homo sapien
tgttcaggcacgccagaaggatgcc

SEQ ID NO: 5843781 - DNA, 25 bp, Homo sapien
agaaggatgccgcagaccattatct

SEQ ID NO: 5843782 - DNA, 25 bp, Homo sapien
gccgcagaccattatctggcgggag

SEQ ID NO: 5843783 - DNA, 25 bp, Homo sapien
cgttagcgactgcgacgttcgatct

SEQ ID NO: 5843784 - DNA, 25 bp, Homo sapien
cgacgttcgatcttgcatggagcaa

SEQ ID NO: 5843785 - DNA, 25 bp, Homo sapien
gatcttgcatggagcaatctcgcag

SEQ ID NO: 5843786 - DNA, 25 bp, Homo sapien
cagcggcatttggtcgggcagccgc

SEQ ID NO: 5843787 - DNA, 25 bp, Homo sapien
caatctcgcagtgcagtggtgcggt

SEQ ID NO: 5843788 - DNA, 25 bp, Homo sapien
gtcgggcagccgcacactatgagca

SEQ ID NO: 5843789 - DNA, 25 bp, Homo sapien
atttatccacggcactccgcgagct

SEQ ID NO: 5843790 - DNA, 25 bp, Homo sapien
cgcacactatgagcaacatgcagat

SEQ ID NO: 5843791 - DNA, 25 bp, Homo sapien
aacatgcagatctacagcgccagag

SEQ ID NO: 5843792 - DNA, 25 bp, Homo sapien
tacagcgccagagtgctgacgcctt

SEQ ID NO: 5843793 - DNA, 25 bp, Homo sapien
gagtgctgacgccttactggcaatg

SEQ ID NO: 5843794 - DNA, 25 bp, Homo sapien
tactggcaatgcttccacagcgtaa

SEQ ID NO: 5843795 - DNA, 25 bp, Homo sapien
gggttgtggacctggctggatgagc

SEQ ID NO: 5843796 - DNA, 25 bp, Homo sapien
tgagccgccactggcgggaacgtca

SEQ ID NO: 5843797 - DNA, 25 bp, Homo sapien
gcgcaggtgacggccttagatctct

SEQ ID NO: 5843798 - DNA, 25 bp, Homo sapien
gccttagatctctcgccgccaatgc

SEQ ID NO: 5843799 - DNA, 25 bp, Homo sapien
gccgccaatgcttgttcaggcacgc

SEQ ID NO: 5843800 - DNA, 25 bp, Homo sapien
tgttcaggcacgccagaaggatgcc

SEQ ID NO: 5843801 - DNA, 25 bp, Homo sapien
agaaggatgccgcagaccattatct

SEQ ID NO: 5843802 - DNA, 25 bp, Homo sapien
gccgcagaccattatctggcgggag

SEQ ID NO: 5843803 - DNA, 25 bp, Homo sapien
cgttagcgactgcgacgttcgatct

SEQ ID NO: 5843804 - DNA, 25 bp, Homo sapien
cgacgttcgatcttgcatggagcaa

SEQ ID NO: 5843805 - DNA, 25 bp, Homo sapien
gatcttgcatggagcaatctcgcag

SEQ ID NO: 5843806 - DNA, 25 bp, Homo sapien
cagcggcatttggtcgggcagccgc

SEQ ID NO: 5843807 - DNA, 25 bp, Homo sapien
caatctcgcagtgcagtggtgcggt

SEQ ID NO: 5843808 - DNA, 25 bp, Homo sapien
gtcgggcagccgcacactatgagca

SEQ ID NO: 5843809 - DNA, 25 bp, Homo sapien
atttatccacggcactccgcgagct

SEQ ID NO: 5843810 - DNA, 25 bp, Homo sapien
cgcacactatgagcaacatgcagat

SEQ ID NO: 5843811 - DNA, 25 bp, Homo sapien
aacatgcagatctacagcgccagag

SEQ ID NO: 5843812 - DNA, 25 bp, Homo sapien
tacagcgccagagtgctgacgcctt

SEQ ID NO: 5843813 - DNA, 25 bp, Homo sapien
gagtgctgacgccttactggcaatg

SEQ ID NO: 5843814 - DNA, 25 bp, Homo sapien
tactggcaatgcttccacagcgtaa

SEQ ID NO: 5843815 - DNA, 25 bp, Homo sapien
gggttgtggacctggctggatgagc

SEQ ID NO: 5843816 - DNA, 25 bp, Homo sapien
tgagccgccactggcgggaacgtca

SEQ ID NO: 5843817 - DNA, 25 bp, Homo sapien
gcgcaggtgacggccttagatctct

SEQ ID NO: 5843818 - DNA, 25 bp, Homo sapien
gccttagatctctcgccgccaatgc

SEQ ID NO: 5843819 - DNA, 25 bp, Homo sapien
gccgccaatgcttgttcaggcacgc

SEQ ID NO: 5843820 - DNA, 25 bp, Homo sapien
tgttcaggcacgccagaaggatgcc

SEQ ID NO: 5843821 - DNA, 25 bp, Homo sapien
agaaggatgccgcagaccattatct

SEQ ID NO: 5843822 - DNA, 25 bp, Homo sapien
gccgcagaccattatctggcgggag

SEQ ID NO: 5843823 - DNA, 25 bp, Homo sapien
cgttagcgactgcgacgttcgatct

SEQ ID NO: 5843824 - DNA, 25 bp, Homo sapien
cgacgttcgatcttgcatggagcaa

SEQ ID NO: 5843825 - DNA, 25 bp, Homo sapien
gatcttgcatggagcaatctcgcag

SEQ ID NO: 5843826 - DNA, 25 bp, Homo sapien
cagcggcatttggtcgggcagccgc

SEQ ID NO: 5843827 - DNA, 25 bp, Homo sapien
caatctcgcagtgcagtggtgcggt

SEQ ID NO: 5843828 - DNA, 25 bp, Homo sapien
gtcgggcagccgcacactatgagca

SEQ ID NO: 5843829 - DNA, 25 bp, Homo sapien
atttatccacggcactccgcgagct

SEQ ID NO: 5843830 - DNA, 25 bp, Homo sapien
cgcacactatgagcaacatgcagat

SEQ ID NO: 5843831 - DNA, 25 bp, Homo sapien
aacatgcagatctacagcgccagag

SEQ ID NO: 5843832 - DNA, 25 bp, Homo sapien
tacagcgccagagtgctgacgcctt

SEQ ID NO: 5843833 - DNA, 25 bp, Homo sapien
gagtgctgacgccttactggcaatg

SEQ ID NO: 5843834 - DNA, 25 bp, Homo sapien
tactggcaatgcttccacagcgtaa

SEQ ID NO: 5843835 - DNA, 25 bp, Homo sapien
gggttgtggacctggctggatgagc

SEQ ID NO: 5843836 - DNA, 25 bp, Homo sapien
tgagccgccactggcgggaacgtca

SEQ ID NO: 5843837 - DNA, 25 bp, Homo sapien
gcgcaggtgacggccttagatctct

SEQ ID NO: 5843838 - DNA, 25 bp, Homo sapien
gccttagatctctcgccgccaatgc

SEQ ID NO: 5843839 - DNA, 25 bp, Homo sapien
gccgccaatgcttgttcaggcacgc

SEQ ID NO: 5843840 - DNA, 25 bp, Homo sapien
tgttcaggcacgccagaaggatgcc

SEQ ID NO: 5843841 - DNA, 25 bp, Homo sapien
agaaggatgccgcagaccattatct

SEQ ID NO: 5843842 - DNA, 25 bp, Homo sapien
gccgcagaccattatctggcgggag

SEQ ID NO: 5843843 - DNA, 25 bp, Homo sapien
cgttagcgactgcgacgttcgatct

SEQ ID NO: 5843844 - DNA, 25 bp, Homo sapien
cgacgttcgatcttgcatggagcaa

SEQ ID NO: 5843845 - DNA, 25 bp, Homo sapien
gatcttgcatggagcaatctcgcag

SEQ ID NO: 5843846 - DNA, 25 bp, Homo sapien
cagcggcatttggtcgggcagccgc

SEQ ID NO: 5843847 - DNA, 25 bp, Homo sapien
caatctcgcagtgcagtggtgcggt

SEQ ID NO: 5843848 - DNA, 25 bp, Homo sapien
gtcgggcagccgcacactatgagca

SEQ ID NO: 5843849 - DNA, 25 bp, Homo sapien
atttatccacggcactccgcgagct

SEQ ID NO: 5843850 - DNA, 25 bp, Homo sapien
cgcacactatgagcaacatgcagat

SEQ ID NO: 5843851 - DNA, 25 bp, Homo sapien
aacatgcagatctacagcgccagag

SEQ ID NO: 5843852 - DNA, 25 bp, Homo sapien
tacagcgccagagtgctgacgcctt

SEQ ID NO: 5843853 - DNA, 25 bp, Homo sapien
gagtgctgacgccttactggcaatg

SEQ ID NO: 5843854 - DNA, 25 bp, Homo sapien
tactggcaatgcttccacagcgtaa

SEQ ID NO: 5843855 - DNA, 25 bp, Homo sapien
gggttgtggacctggctggatgagc

SEQ ID NO: 5843856 - DNA, 25 bp, Homo sapien
tgagccgccactggcgggaacgtca

SEQ ID NO: 5843857 - DNA, 25 bp, Homo sapien
gcgcaggtgacggccttagatctct

SEQ ID NO: 5843858 - DNA, 25 bp, Homo sapien
gccttagatctctcgccgccaatgc

SEQ ID NO: 5843859 - DNA, 25 bp, Homo sapien
gccgccaatgcttgttcaggcacgc

SEQ ID NO: 5843860 - DNA, 25 bp, Homo sapien
tgttcaggcacgccagaaggatgcc

SEQ ID NO: 5843861 - DNA, 25 bp, Homo sapien
agaaggatgccgcagaccattatct

SEQ ID NO: 5843862 - DNA, 25 bp, Homo sapien
gccgcagaccattatctggcgggag

SEQ ID NO: 5843863 - DNA, 25 bp, Homo sapien
cgttagcgactgcgacgttcgatct

SEQ ID NO: 5843864 - DNA, 25 bp, Homo sapien
cgacgttcgatcttgcatggagcaa

SEQ ID NO: 5843865 - DNA, 25 bp, Homo sapien
gatcttgcatggagcaatctcgcag

SEQ ID NO: 5843866 - DNA, 25 bp, Homo sapien
cagcggcatttggtcgggcagccgc

SEQ ID NO: 5843867 - DNA, 25 bp, Homo sapien
caatctcgcagtgcagtggtgcggt

SEQ ID NO: 5843868 - DNA, 25 bp, Homo sapien
gtcgggcagccgcacactatgagca

SEQ ID NO: 5843869 - DNA, 25 bp, Homo sapien
atttatccacggcactccgcgagct

SEQ ID NO: 5843870 - DNA, 25 bp, Homo sapien
cgcacactatgagcaacatgcagat

SEQ ID NO: 5843871 - DNA, 25 bp, Homo sapien
aacatgcagatctacagcgccagag

SEQ ID NO: 5843872 - DNA, 25 bp, Homo sapien
tacagcgccagagtgctgacgcctt

SEQ ID NO: 5843873 - DNA, 25 bp, Homo sapien
gagtgctgacgccttactggcaatg

SEQ ID NO: 5843874 - DNA, 25 bp, Homo sapien
tactggcaatgcttccacagcgtaa

SEQ ID NO: 5843875 - DNA, 25 bp, Homo sapien
gggttgtggacctggctggatgagc

SEQ ID NO: 5843876 - DNA, 25 bp, Homo sapien
tgagccgccactggcgggaacgtca

SEQ ID NO: 5843877 - DNA, 25 bp, Homo sapien
gcgcaggtgacggccttagatctct

SEQ ID NO: 5843878 - DNA, 25 bp, Homo sapien
gccttagatctctcgccgccaatgc

SEQ ID NO: 5843879 - DNA, 25 bp, Homo sapien
gccgccaatgcttgttcaggcacgc

SEQ ID NO: 5843880 - DNA, 25 bp, Homo sapien
tgttcaggcacgccagaaggatgcc

SEQ ID NO: 5843881 - DNA, 25 bp, Homo sapien
agaaggatgccgcagaccattatct

SEQ ID NO: 5843882 - DNA, 25 bp, Homo sapien
gccgcagaccattatctggcgggag

SEQ ID NO: 5843883 - DNA, 25 bp, Homo sapien
cgttagcgactgcgacgttcgatct

SEQ ID NO: 5843884 - DNA, 25 bp, Homo sapien
cgacgttcgatcttgcatggagcaa

SEQ ID NO: 5843885 - DNA, 25 bp, Homo sapien
gatcttgcatggagcaatctcgcag

SEQ ID NO: 5843886 - DNA, 25 bp, Homo sapien
cagcggcatttggtcgggcagccgc

SEQ ID NO: 5843887 - DNA, 25 bp, Homo sapien
caatctcgcagtgcagtggtgcggt

SEQ ID NO: 5843888 - DNA, 25 bp, Homo sapien
gtcgggcagccgcacactatgagca

SEQ ID NO: 5843889 - DNA, 25 bp, Homo sapien
atttatccacggcactccgcgagct

SEQ ID NO: 5843890 - DNA, 25 bp, Homo sapien
cgcacactatgagcaacatgcagat

SEQ ID NO: 5843891 - DNA, 25 bp, Homo sapien
aacatgcagatctacagcgccagag

SEQ ID NO: 5843892 - DNA, 25 bp, Homo sapien
tacagcgccagagtgctgacgcctt

SEQ ID NO: 5843893 - DNA, 25 bp, Homo sapien
gagtgctgacgccttactggcaatg

SEQ ID NO: 5843894 - DNA, 25 bp, Homo sapien
tactggcaatgcttccacagcgtaa

SEQ ID NO: 5843895 - DNA, 25 bp, Homo sapien
gggttgtggacctggctggatgagc

SEQ ID NO: 5843896 - DNA, 25 bp, Homo sapien
tgagccgccactggcgggaacgtca

SEQ ID NO: 5843897 - DNA, 25 bp, Homo sapien
gcgcaggtgacggccttagatctct

SEQ ID NO: 5843898 - DNA, 25 bp, Homo sapien
gccttagatctctcgccgccaatgc

SEQ ID NO: 5843899 - DNA, 25 bp, Homo sapien
gccgccaatgcttgttcaggcacgc

SEQ ID NO: 5843900 - DNA, 25 bp, Homo sapien
tgttcaggcacgccagaaggatgcc

SEQ ID NO: 5843901 - DNA, 25 bp, Homo sapien
agaaggatgccgcagaccattatct

SEQ ID NO: 5843902 - DNA, 25 bp, Homo sapien
gccgcagaccattatctggcgggag

SEQ ID NO: 5843903 - DNA, 25 bp, Homo sapien
cgttagcgactgcgacgttcgatct

SEQ ID NO: 5843904 - DNA, 25 bp, Homo sapien
cgacgttcgatcttgcatggagcaa

SEQ ID NO: 5843905 - DNA, 25 bp, Homo sapien
gatcttgcatggagcaatctcgcag

SEQ ID NO: 5843906 - DNA, 25 bp, Homo sapien
cagcggcatttggtcgggcagccgc

SEQ ID NO: 5843907 - DNA, 25 bp, Homo sapien
caatctcgcagtgcagtggtgcggt

SEQ ID NO: 5843908 - DNA, 25 bp, Homo sapien
gtcgggcagccgcacactatgagca

SEQ ID NO: 5843909 - DNA, 25 bp, Homo sapien
atttatccacggcactccgcgagct

SEQ ID NO: 5843910 - DNA, 25 bp, Homo sapien
cgcacactatgagcaacatgcagat

SEQ ID NO: 5843911 - DNA, 25 bp, Homo sapien
aacatgcagatctacagcgccagag

SEQ ID NO: 5843912 - DNA, 25 bp, Homo sapien
tacagcgccagagtgctgacgcctt

SEQ ID NO: 5843913 - DNA, 25 bp, Homo sapien
gagtgctgacgccttactggcaatg

SEQ ID NO: 5843914 - DNA, 25 bp, Homo sapien
tactggcaatgcttccacagcgtaa

SEQ ID NO: 5843915 - DNA, 25 bp, Homo sapien
gggttgtggacctggctggatgagc

SEQ ID NO: 5843916 - DNA, 25 bp, Homo sapien
tgagccgccactggcgggaacgtca

SEQ ID NO: 5843917 - DNA, 25 bp, Homo sapien
gcgcaggtgacggccttagatctct

SEQ ID NO: 5843918 - DNA, 25 bp, Homo sapien
gccttagatctctcgccgccaatgc

SEQ ID NO: 5843919 - DNA, 25 bp, Homo sapien
gccgccaatgcttgttcaggcacgc

SEQ ID NO: 5843920 - DNA, 25 bp, Homo sapien
tgttcaggcacgccagaaggatgcc

SEQ ID NO: 5843921 - DNA, 25 bp, Homo sapien
agaaggatgccgcagaccattatct

SEQ ID NO: 5843922 - DNA, 25 bp, Homo sapien
gccgcagaccattatctggcgggag

SEQ ID NO: 5843923 - DNA, 25 bp, Homo sapien
cgttagcgactgcgacgttcgatct

SEQ ID NO: 5843924 - DNA, 25 bp, Homo sapien
cgacgttcgatcttgcatggagcaa

SEQ ID NO: 5843925 - DNA, 25 bp, Homo sapien
gatcttgcatggagcaatctcgcag

SEQ ID NO: 5843926 - DNA, 25 bp, Homo sapien
cagcggcatttggtcgggcagccgc

SEQ ID NO: 5843927 - DNA, 25 bp, Homo sapien
caatctcgcagtgcagtggtgcggt

SEQ ID NO: 5843928 - DNA, 25 bp, Homo sapien
gtcgggcagccgcacactatgagca

SEQ ID NO: 5843929 - DNA, 25 bp, Homo sapien
atttatccacggcactccgcgagct

SEQ ID NO: 5843930 - DNA, 25 bp, Homo sapien
cgcacactatgagcaacatgcagat

SEQ ID NO: 5843931 - DNA, 25 bp, Homo sapien
aacatgcagatctacagcgccagag

SEQ ID NO: 5843932 - DNA, 25 bp, Homo sapien
tacagcgccagagtgctgacgcctt

SEQ ID NO: 5843933 - DNA, 25 bp, Homo sapien
gagtgctgacgccttactggcaatg

SEQ ID NO: 5843934 - DNA, 25 bp, Homo sapien
tactggcaatgcttccacagcgtaa

SEQ ID NO: 5843935 - DNA, 25 bp, Homo sapien
gggttgtggacctggctggatgagc

SEQ ID NO: 5843936 - DNA, 25 bp, Homo sapien
tgagccgccactggcgggaacgtca

SEQ ID NO: 5843937 - DNA, 25 bp, Homo sapien
gcgcaggtgacggccttagatctct

SEQ ID NO: 5843938 - DNA, 25 bp, Homo sapien
gccttagatctctcgccgccaatgc

SEQ ID NO: 5843939 - DNA, 25 bp, Homo sapien
gccgccaatgcttgttcaggcacgc

SEQ ID NO: 5843940 - DNA, 25 bp, Homo sapien
tgttcaggcacgccagaaggatgcc

SEQ ID NO: 5843941 - DNA, 25 bp, Homo sapien
agaaggatgccgcagaccattatct

SEQ ID NO: 5843942 - DNA, 25 bp, Homo sapien
gccgcagaccattatctggcgggag

SEQ ID NO: 5843943 - DNA, 25 bp, Homo sapien
cgttagcgactgcgacgttcgatct

SEQ ID NO: 5843944 - DNA, 25 bp, Homo sapien
cgacgttcgatcttgcatggagcaa

SEQ ID NO: 5843945 - DNA, 25 bp, Homo sapien
gatcttgcatggagcaatctcgcag

SEQ ID NO: 5843946 - DNA, 25 bp, Homo sapien
cagcggcatttggtcgggcagccgc

SEQ ID NO: 5843947 - DNA, 25 bp, Homo sapien
caatctcgcagtgcagtggtgcggt

SEQ ID NO: 5843948 - DNA, 25 bp, Homo sapien
gtcgggcagccgcacactatgagca

SEQ ID NO: 5843949 - DNA, 25 bp, Homo sapien
atttatccacggcactccgcgagct

SEQ ID NO: 5843950 - DNA, 25 bp, Homo sapien
cgcacactatgagcaacatgcagat

SEQ ID NO: 5843951 - DNA, 25 bp, Homo sapien
aacatgcagatctacagcgccagag

SEQ ID NO: 5843952 - DNA, 25 bp, Homo sapien
tacagcgccagagtgctgacgcctt

SEQ ID NO: 5843953 - DNA, 25 bp, Homo sapien
gagtgctgacgccttactggcaatg

SEQ ID NO: 5843954 - DNA, 25 bp, Homo sapien
tactggcaatgcttccacagcgtaa

SEQ ID NO: 5843955 - DNA, 25 bp, Homo sapien
gggttgtggacctggctggatgagc

SEQ ID NO: 5843956 - DNA, 25 bp, Homo sapien
tgagccgccactggcgggaacgtca

SEQ ID NO: 5843957 - DNA, 25 bp, Homo sapien
gcgcaggtgacggccttagatctct

SEQ ID NO: 5843958 - DNA, 25 bp, Homo sapien
gccttagatctctcgccgccaatgc

SEQ ID NO: 5843959 - DNA, 25 bp, Homo sapien
gccgccaatgcttgttcaggcacgc

SEQ ID NO: 5843960 - DNA, 25 bp, Homo sapien
tgttcaggcacgccagaaggatgcc

SEQ ID NO: 5843961 - DNA, 25 bp, Homo sapien
agaaggatgccgcagaccattatct

SEQ ID NO: 5843962 - DNA, 25 bp, Homo sapien
gccgcagaccattatctggcgggag

SEQ ID NO: 5843963 - DNA, 25 bp, Homo sapien
cgttagcgactgcgacgttcgatct

SEQ ID NO: 5843964 - DNA, 25 bp, Homo sapien
cgacgttcgatcttgcatggagcaa

SEQ ID NO: 5843965 - DNA, 25 bp, Homo sapien
gatcttgcatggagcaatctcgcag

SEQ ID NO: 5843966 - DNA, 25 bp, Homo sapien
cagcggcatttggtcgggcagccgc

SEQ ID NO: 5843967 - DNA, 25 bp, Homo sapien
caatctcgcagtgcagtggtgcggt

SEQ ID NO: 5843968 - DNA, 25 bp, Homo sapien
gtcgggcagccgcacactatgagca

SEQ ID NO: 5843969 - DNA, 25 bp, Homo sapien
atttatccacggcactccgcgagct

SEQ ID NO: 5843970 - DNA, 25 bp, Homo sapien
cgcacactatgagcaacatgcagat

SEQ ID NO: 5843971 - DNA, 25 bp, Homo sapien
aacatgcagatctacagcgccagag

SEQ ID NO: 5843972 - DNA, 25 bp, Homo sapien
tacagcgccagagtgctgacgcctt

SEQ ID NO: 5843973 - DNA, 25 bp, Homo sapien
gagtgctgacgccttactggcaatg

SEQ ID NO: 5843974 - DNA, 25 bp, Homo sapien
tactggcaatgcttccacagcgtaa

SEQ ID NO: 5843975 - DNA, 25 bp, Homo sapien
gggttgtggacctggctggatgagc

SEQ ID NO: 5843976 - DNA, 25 bp, Homo sapien
tgagccgccactggcgggaacgtca

SEQ ID NO: 5843977 - DNA, 25 bp, Homo sapien
gcgcaggtgacggccttagatctct

SEQ ID NO: 5843978 - DNA, 25 bp, Homo sapien
gccttagatctctcgccgccaatgc

SEQ ID NO: 5843979 - DNA, 25 bp, Homo sapien
gccgccaatgcttgttcaggcacgc

SEQ ID NO: 5843980 - DNA, 25 bp, Homo sapien
tgttcaggcacgccagaaggatgcc

SEQ ID NO: 5843981 - DNA, 25 bp, Homo sapien
agaaggatgccgcagaccattatct

SEQ ID NO: 5843982 - DNA, 25 bp, Homo sapien
gccgcagaccattatctggcgggag

SEQ ID NO: 5843983 - DNA, 25 bp, Homo sapien
cgttagcgactgcgacgttcgatct

SEQ ID NO: 5843984 - DNA, 25 bp, Homo sapien
cgacgttcgatcttgcatggagcaa

SEQ ID NO: 5843985 - DNA, 25 bp, Homo sapien
gatcttgcatggagcaatctcgcag

SEQ ID NO: 5843986 - DNA, 25 bp, Homo sapien
cagcggcatttggtcgggcagccgc

SEQ ID NO: 5843987 - DNA, 25 bp, Homo sapien
caatctcgcagtgcagtggtgcggt

SEQ ID NO: 5843988 - DNA, 25 bp, Homo sapien
gtcgggcagccgcacactatgagca

SEQ ID NO: 5843989 - DNA, 25 bp, Homo sapien
atttatccacggcactccgcgagct

SEQ ID NO: 5843990 - DNA, 25 bp, Homo sapien
cgcacactatgagcaacatgcagat

SEQ ID NO: 5843991 - DNA, 25 bp, Homo sapien
aacatgcagatctacagcgccagag

SEQ ID NO: 5843992 - DNA, 25 bp, Homo sapien
tacagcgccagagtgctgacgcctt

SEQ ID NO: 5843993 - DNA, 25 bp, Homo sapien
gagtgctgacgccttactggcaatg

SEQ ID NO: 5843994 - DNA, 25 bp, Homo sapien
tactggcaatgcttccacagcgtaa

SEQ ID NO: 5843995 - DNA, 25 bp, Homo sapien
gggttgtggacctggctggatgagc

SEQ ID NO: 5843996 - DNA, 25 bp, Homo sapien
tgagccgccactggcgggaacgtca

SEQ ID NO: 5843997 - DNA, 25 bp, Homo sapien
gcgcaggtgacggccttagatctct

SEQ ID NO: 5843998 - DNA, 25 bp, Homo sapien
gccttagatctctcgccgccaatgc

SEQ ID NO: 5843999 - DNA, 25 bp, Homo sapien
gccgccaatgcttgttcaggcacgc

SEQ ID NO: 5844000 - DNA, 25 bp, Homo sapien
tgttcaggcacgccagaaggatgcc

SEQ ID NO: 5844001 - DNA, 25 bp, Homo sapien
agaaggatgccgcagaccattatct

SEQ ID NO: 5844002 - DNA, 25 bp, Homo sapien
gccgcagaccattatctggcgggag

SEQ ID NO: 5844003 - DNA, 25 bp, Homo sapien
cgttagcgactgcgacgttcgatct

SEQ ID NO: 5844004 - DNA, 25 bp, Homo sapien
cgacgttcgatcttgcatggagcaa

SEQ ID NO: 5844005 - DNA, 25 bp, Homo sapien
gatcttgcatggagcaatctcgcag

SEQ ID NO: 5844006 - DNA, 25 bp, Homo sapien
cagcggcatttggtcgggcagccgc

SEQ ID NO: 5844007 - DNA, 25 bp, Homo sapien
caatctcgcagtgcagtggtgcggt

SEQ ID NO: 5844008 - DNA, 25 bp, Homo sapien
gtcgggcagccgcacactatgagca

SEQ ID NO: 5844009 - DNA, 25 bp, Homo sapien
atttatccacggcactccgcgagct

SEQ ID NO: 5844010 - DNA, 25 bp, Homo sapien
cgcacactatgagcaacatgcagat

SEQ ID NO: 5844011 - DNA, 25 bp, Homo sapien
aacatgcagatctacagcgccagag

SEQ ID NO: 5844012 - DNA, 25 bp, Homo sapien
tacagcgccagagtgctgacgcctt

SEQ ID NO: 5844013 - DNA, 25 bp, Homo sapien
gagtgctgacgccttactggcaatg

SEQ ID NO: 5844014 - DNA, 25 bp, Homo sapien
tactggcaatgcttccacagcgtaa

SEQ ID NO: 5844015 - DNA, 25 bp, Homo sapien
gggttgtggacctggctggatgagc

SEQ ID NO: 5844016 - DNA, 25 bp, Homo sapien
tgagccgccactggcgggaacgtca

SEQ ID NO: 5844017 - DNA, 25 bp, Homo sapien
gcgcaggtgacggccttagatctct

SEQ ID NO: 5844018 - DNA, 25 bp, Homo sapien
gccttagatctctcgccgccaatgc

SEQ ID NO: 5844019 - DNA, 25 bp, Homo sapien
gccgccaatgcttgttcaggcacgc

SEQ ID NO: 5844020 - DNA, 25 bp, Homo sapien
tgttcaggcacgccagaaggatgcc

SEQ ID NO: 5844021 - DNA, 25 bp, Homo sapien
agaaggatgccgcagaccattatct

SEQ ID NO: 5844022 - DNA, 25 bp, Homo sapien
gccgcagaccattatctggcgggag

SEQ ID NO: 5844023 - DNA, 25 bp, Homo sapien
cgttagcgactgcgacgttcgatct

SEQ ID NO: 5844024 - DNA, 25 bp, Homo sapien
cgacgttcgatcttgcatggagcaa

SEQ ID NO: 5844025 - DNA, 25 bp, Homo sapien
gatcttgcatggagcaatctcgcag

SEQ ID NO: 5844026 - DNA, 25 bp, Homo sapien
cagcggcatttggtcgggcagccgc

SEQ ID NO: 5844027 - DNA, 25 bp, Homo sapien
caatctcgcagtgcagtggtgcggt

SEQ ID NO: 5844028 - DNA, 25 bp, Homo sapien
gtcgggcagccgcacactatgagca

SEQ ID NO: 5844029 - DNA, 25 bp, Homo sapien
atttatccacggcactccgcgagct

SEQ ID NO: 5844030 - DNA, 25 bp, Homo sapien
cgcacactatgagcaacatgcagat

SEQ ID NO: 5844031 - DNA, 25 bp, Homo sapien
aacatgcagatctacagcgccagag

SEQ ID NO: 5844032 - DNA, 25 bp, Homo sapien
tacagcgccagagtgctgacgcctt

SEQ ID NO: 5844033 - DNA, 25 bp, Homo sapien
gagtgctgacgccttactggcaatg

SEQ ID NO: 5844034 - DNA, 25 bp, Homo sapien
tactggcaatgcttccacagcgtaa

SEQ ID NO: 5844035 - DNA, 25 bp, Homo sapien
gggttgtggacctggctggatgagc

SEQ ID NO: 5844036 - DNA, 25 bp, Homo sapien
tgagccgccactggcgggaacgtca

SEQ ID NO: 5844037 - DNA, 25 bp, Homo sapien
gcgcaggtgacggccttagatctct

SEQ ID NO: 5844038 - DNA, 25 bp, Homo sapien
gccttagatctctcgccgccaatgc

SEQ ID NO: 5844039 - DNA, 25 bp, Homo sapien
gccgccaatgcttgttcaggcacgc

SEQ ID NO: 5844040 - DNA, 25 bp, Homo sapien
tgttcaggcacgccagaaggatgcc

SEQ ID NO: 5844041 - DNA, 25 bp, Homo sapien
agaaggatgccgcagaccattatct

SEQ ID NO: 5844042 - DNA, 25 bp, Homo sapien
gccgcagaccattatctggcgggag

SEQ ID NO: 5844043 - DNA, 25 bp, Homo sapien
cgttagcgactgcgacgttcgatct

SEQ ID NO: 5844044 - DNA, 25 bp, Homo sapien
cgacgttcgatcttgcatggagcaa

SEQ ID NO: 5844045 - DNA, 25 bp, Homo sapien
gatcttgcatggagcaatctcgcag

SEQ ID NO: 5844046 - DNA, 25 bp, Homo sapien
cagcggcatttggtcgggcagccgc

SEQ ID NO: 5844047 - DNA, 25 bp, Homo sapien
caatctcgcagtgcagtggtgcggt

SEQ ID NO: 5844048 - DNA, 25 bp, Homo sapien
gtcgggcagccgcacactatgagca

SEQ ID NO: 5844049 - DNA, 25 bp, Homo sapien
atttatccacggcactccgcgagct

SEQ ID NO: 5844050 - DNA, 25 bp, Homo sapien
cgcacactatgagcaacatgcagat

SEQ ID NO: 5844051 - DNA, 25 bp, Homo sapien
aacatgcagatctacagcgccagag

SEQ ID NO: 5844052 - DNA, 25 bp, Homo sapien
tacagcgccagagtgctgacgcctt

SEQ ID NO: 5844053 - DNA, 25 bp, Homo sapien
gagtgctgacgccttactggcaatg

SEQ ID NO: 5844054 - DNA, 25 bp, Homo sapien
tactggcaatgcttccacagcgtaa

SEQ ID NO: 5844055 - DNA, 25 bp, Homo sapien
gggttgtggacctggctggatgagc

SEQ ID NO: 5844056 - DNA, 25 bp, Homo sapien
tgagccgccactggcgggaacgtca

SEQ ID NO: 5844057 - DNA, 25 bp, Homo sapien
gcgcaggtgacggccttagatctct

SEQ ID NO: 5844058 - DNA, 25 bp, Homo sapien
gccttagatctctcgccgccaatgc

SEQ ID NO: 5844059 - DNA, 25 bp, Homo sapien
gccgccaatgcttgttcaggcacgc

SEQ ID NO: 5844060 - DNA, 25 bp, Homo sapien
tgttcaggcacgccagaaggatgcc

SEQ ID NO: 5844061 - DNA, 25 bp, Homo sapien
agaaggatgccgcagaccattatct

SEQ ID NO: 5844062 - DNA, 25 bp, Homo sapien
gccgcagaccattatctggcgggag

SEQ ID NO: 5844063 - DNA, 25 bp, Homo sapien
cgttagcgactgcgacgttcgatct

SEQ ID NO: 5844064 - DNA, 25 bp, Homo sapien
cgacgttcgatcttgcatggagcaa

SEQ ID NO: 5844065 - DNA, 25 bp, Homo sapien
gatcttgcatggagcaatctcgcag

SEQ ID NO: 5844066 - DNA, 25 bp, Homo sapien
cagcggcatttggtcgggcagccgc

SEQ ID NO: 5844067 - DNA, 25 bp, Homo sapien
caatctcgcagtgcagtggtgcggt

SEQ ID NO: 5844068 - DNA, 25 bp, Homo sapien
gtcgggcagccgcacactatgagca

SEQ ID NO: 5844069 - DNA, 25 bp, Homo sapien
atttatccacggcactccgcgagct

SEQ ID NO: 5844070 - DNA, 25 bp, Homo sapien
cgcacactatgagcaacatgcagat

SEQ ID NO: 5844071 - DNA, 25 bp, Homo sapien
aacatgcagatctacagcgccagag

SEQ ID NO: 5844072 - DNA, 25 bp, Homo sapien
tacagcgccagagtgctgacgcctt

SEQ ID NO: 5844073 - DNA, 25 bp, Homo sapien
gagtgctgacgccttactggcaatg

SEQ ID NO: 5844074 - DNA, 25 bp, Homo sapien
tactggcaatgcttccacagcgtaa

SEQ ID NO: 5844075 - DNA, 25 bp, Homo sapien
gggttgtggacctggctggatgagc

SEQ ID NO: 5844076 - DNA, 25 bp, Homo sapien
tgagccgccactggcgggaacgtca

SEQ ID NO: 5844077 - DNA, 25 bp, Homo sapien
gcgcaggtgacggccttagatctct

SEQ ID NO: 5844078 - DNA, 25 bp, Homo sapien
gccttagatctctcgccgccaatgc

SEQ ID NO: 5844079 - DNA, 25 bp, Homo sapien
gccgccaatgcttgttcaggcacgc

SEQ ID NO: 5844080 - DNA, 25 bp, Homo sapien
tgttcaggcacgccagaaggatgcc

SEQ ID NO: 5844081 - DNA, 25 bp, Homo sapien
agaaggatgccgcagaccattatct

SEQ ID NO: 5844082 - DNA, 25 bp, Homo sapien
gccgcagaccattatctggcgggag

SEQ ID NO: 5844083 - DNA, 25 bp, Homo sapien
cgttagcgactgcgacgttcgatct

SEQ ID NO: 5844084 - DNA, 25 bp, Homo sapien
cgacgttcgatcttgcatggagcaa

SEQ ID NO: 5844085 - DNA, 25 bp, Homo sapien
gatcttgcatggagcaatctcgcag

SEQ ID NO: 5844086 - DNA, 25 bp, Homo sapien
cagcggcatttggtcgggcagccgc

SEQ ID NO: 5844087 - DNA, 25 bp, Homo sapien
caatctcgcagtgcagtggtgcggt

SEQ ID NO: 5844088 - DNA, 25 bp, Homo sapien
gtcgggcagccgcacactatgagca

SEQ ID NO: 5844089 - DNA, 25 bp, Homo sapien
atttatccacggcactccgcgagct

SEQ ID NO: 5844090 - DNA, 25 bp, Homo sapien
cgcacactatgagcaacatgcagat

SEQ ID NO: 5844091 - DNA, 25 bp, Homo sapien
aacatgcagatctacagcgccagag

SEQ ID NO: 5844092 - DNA, 25 bp, Homo sapien
tacagcgccagagtgctgacgcctt

SEQ ID NO: 5844093 - DNA, 25 bp, Homo sapien
gagtgctgacgccttactggcaatg

SEQ ID NO: 5844094 - DNA, 25 bp, Homo sapien
tactggcaatgcttccacagcgtaa

SEQ ID NO: 5844095 - DNA, 25 bp, Homo sapien
gggttgtggacctggctggatgagc

SEQ ID NO: 5844096 - DNA, 25 bp, Homo sapien
tgagccgccactggcgggaacgtca

SEQ ID NO: 5844097 - DNA, 25 bp, Homo sapien
gcgcaggtgacggccttagatctct

SEQ ID NO: 5844098 - DNA, 25 bp, Homo sapien
gccttagatctctcgccgccaatgc

SEQ ID NO: 5844099 - DNA, 25 bp, Homo sapien
gccgccaatgcttgttcaggcacgc

SEQ ID NO: 5844100 - DNA, 25 bp, Homo sapien
tgttcaggcacgccagaaggatgcc

SEQ ID NO: 5844101 - DNA, 25 bp, Homo sapien
agaaggatgccgcagaccattatct

SEQ ID NO: 5844102 - DNA, 25 bp, Homo sapien
gccgcagaccattatctggcgggag

SEQ ID NO: 5844103 - DNA, 25 bp, Homo sapien
cgttagcgactgcgacgttcgatct

SEQ ID NO: 5844104 - DNA, 25 bp, Homo sapien
cgacgttcgatcttgcatggagcaa

SEQ ID NO: 5844105 - DNA, 25 bp, Homo sapien
gatcttgcatggagcaatctcgcag

SEQ ID NO: 5844106 - DNA, 25 bp, Homo sapien
cagcggcatttggtcgggcagccgc

SEQ ID NO: 5844107 - DNA, 25 bp, Homo sapien
caatctcgcagtgcagtggtgcggt

SEQ ID NO: 5844108 - DNA, 25 bp, Homo sapien
gtcgggcagccgcacactatgagca

SEQ ID NO: 5844109 - DNA, 25 bp, Homo sapien
atttatccacggcactccgcgagct

SEQ ID NO: 5844110 - DNA, 25 bp, Homo sapien
cgcacactatgagcaacatgcagat

SEQ ID NO: 5844111 - DNA, 25 bp, Homo sapien
aacatgcagatctacagcgccagag

SEQ ID NO: 5844112 - DNA, 25 bp, Homo sapien
tacagcgccagagtgctgacgcctt

SEQ ID NO: 5844113 - DNA, 25 bp, Homo sapien
gagtgctgacgccttactggcaatg

SEQ ID NO: 5844114 - DNA, 25 bp, Homo sapien
tactggcaatgcttccacagcgtaa

SEQ ID NO: 5844115 - DNA, 25 bp, Homo sapien
gggttgtggacctggctggatgagc

SEQ ID NO: 5844116 - DNA, 25 bp, Homo sapien
tgagccgccactggcgggaacgtca

SEQ ID NO: 5844117 - DNA, 25 bp, Homo sapien
gcgcaggtgacggccttagatctct

SEQ ID NO: 5844118 - DNA, 25 bp, Homo sapien
gccttagatctctcgccgccaatgc

SEQ ID NO: 5844119 - DNA, 25 bp, Homo sapien
gccgccaatgcttgttcaggcacgc

SEQ ID NO: 5844120 - DNA, 25 bp, Homo sapien
tgttcaggcacgccagaaggatgcc

SEQ ID NO: 5844121 - DNA, 25 bp, Homo sapien
agaaggatgccgcagaccattatct

SEQ ID NO: 5844122 - DNA, 25 bp, Homo sapien
gccgcagaccattatctggcgggag

SEQ ID NO: 5844123 - DNA, 25 bp, Homo sapien
cgttagcgactgcgacgttcgatct

SEQ ID NO: 5844124 - DNA, 25 bp, Homo sapien
cgacgttcgatcttgcatggagcaa

SEQ ID NO: 5844125 - DNA, 25 bp, Homo sapien
gatcttgcatggagcaatctcgcag

SEQ ID NO: 5844126 - DNA, 25 bp, Homo sapien
cagcggcatttggtcgggcagccgc

SEQ ID NO: 5844127 - DNA, 25 bp, Homo sapien
caatctcgcagtgcagtggtgcggt

SEQ ID NO: 5844128 - DNA, 25 bp, Homo sapien
gtcgggcagccgcacactatgagca

SEQ ID NO: 5844129 - DNA, 25 bp, Homo sapien
atttatccacggcactccgcgagct

SEQ ID NO: 5844130 - DNA, 25 bp, Homo sapien
cgcacactatgagcaacatgcagat

SEQ ID NO: 5844131 - DNA, 25 bp, Homo sapien
aacatgcagatctacagcgccagag

SEQ ID NO: 5844132 - DNA, 25 bp, Homo sapien
tacagcgccagagtgctgacgcctt

SEQ ID NO: 5844133 - DNA, 25 bp, Homo sapien
gagtgctgacgccttactggcaatg

SEQ ID NO: 5844134 - DNA, 25 bp, Homo sapien
tactggcaatgcttccacagcgtaa

SEQ ID NO: 5844135 - DNA, 25 bp, Homo sapien
gggttgtggacctggctggatgagc

SEQ ID NO: 5844136 - DNA, 25 bp, Homo sapien
tgagccgccactggcgggaacgtca

SEQ ID NO: 5844137 - DNA, 25 bp, Homo sapien
gcgcaggtgacggccttagatctct

SEQ ID NO: 5844138 - DNA, 25 bp, Homo sapien
gccttagatctctcgccgccaatgc

SEQ ID NO: 5844139 - DNA, 25 bp, Homo sapien
gccgccaatgcttgttcaggcacgc

SEQ ID NO: 5844140 - DNA, 25 bp, Homo sapien
tgttcaggcacgccagaaggatgcc

SEQ ID NO: 5844141 - DNA, 25 bp, Homo sapien
agaaggatgccgcagaccattatct

SEQ ID NO: 5844142 - DNA, 25 bp, Homo sapien
gccgcagaccattatctggcgggag

SEQ ID NO: 5844143 - DNA, 25 bp, Homo sapien
cgttagcgactgcgacgttcgatct

SEQ ID NO: 5844144 - DNA, 25 bp, Homo sapien
cgacgttcgatcttgcatggagcaa

SEQ ID NO: 5844145 - DNA, 25 bp, Homo sapien
gatcttgcatggagcaatctcgcag

SEQ ID NO: 5844146 - DNA, 25 bp, Homo sapien
cagcggcatttggtcgggcagccgc

SEQ ID NO: 5844147 - DNA, 25 bp, Homo sapien
caatctcgcagtgcagtggtgcggt

SEQ ID NO: 5844148 - DNA, 25 bp, Homo sapien
gtcgggcagccgcacactatgagca

SEQ ID NO: 5844149 - DNA, 25 bp, Homo sapien
atttatccacggcactccgcgagct

SEQ ID NO: 5844150 - DNA, 25 bp, Homo sapien
cgcacactatgagcaacatgcagat

SEQ ID NO: 5844151 - DNA, 25 bp, Homo sapien
aacatgcagatctacagcgccagag

SEQ ID NO: 5844152 - DNA, 25 bp, Homo sapien
tacagcgccagagtgctgacgcctt

SEQ ID NO: 5844153 - DNA, 25 bp, Homo sapien
gagtgctgacgccttactggcaatg

SEQ ID NO: 5844154 - DNA, 25 bp, Homo sapien
tactggcaatgcttccacagcgtaa

SEQ ID NO: 5844155 - DNA, 25 bp, Homo sapien
gggttgtggacctggctggatgagc

SEQ ID NO: 5844156 - DNA, 25 bp, Homo sapien
tgagccgccactggcgggaacgtca

SEQ ID NO: 5844157 - DNA, 25 bp, Homo sapien
gcgcaggtgacggccttagatctct

SEQ ID NO: 5844158 - DNA, 25 bp, Homo sapien
gccttagatctctcgccgccaatgc

SEQ ID NO: 5844159 - DNA, 25 bp, Homo sapien
gccgccaatgcttgttcaggcacgc

SEQ ID NO: 5844160 - DNA, 25 bp, Homo sapien
tgttcaggcacgccagaaggatgcc

SEQ ID NO: 5844161 - DNA, 25 bp, Homo sapien
agaaggatgccgcagaccattatct

SEQ ID NO: 5844162 - DNA, 25 bp, Homo sapien
gccgcagaccattatctggcgggag

SEQ ID NO: 5844163 - DNA, 25 bp, Homo sapien
cgttagcgactgcgacgttcgatct

SEQ ID NO: 5844164 - DNA, 25 bp, Homo sapien
cgacgttcgatcttgcatggagcaa

SEQ ID NO: 5844165 - DNA, 25 bp, Homo sapien
gatcttgcatggagcaatctcgcag

SEQ ID NO: 5844166 - DNA, 25 bp, Homo sapien
cagcggcatttggtcgggcagccgc

SEQ ID NO: 5844167 - DNA, 25 bp, Homo sapien
caatctcgcagtgcagtggtgcggt

SEQ ID NO: 5844168 - DNA, 25 bp, Homo sapien
gtcgggcagccgcacactatgagca

SEQ ID NO: 5844169 - DNA, 25 bp, Homo sapien
atttatccacggcactccgcgagct

SEQ ID NO: 5844170 - DNA, 25 bp, Homo sapien
cgcacactatgagcaacatgcagat

SEQ ID NO: 5844171 - DNA, 25 bp, Homo sapien
aacatgcagatctacagcgccagag

SEQ ID NO: 5844172 - DNA, 25 bp, Homo sapien
tacagcgccagagtgctgacgcctt

SEQ ID NO: 5844173 - DNA, 25 bp, Homo sapien
gagtgctgacgccttactggcaatg

SEQ ID NO: 5844174 - DNA, 25 bp, Homo sapien
tactggcaatgcttccacagcgtaa

SEQ ID NO: 5844175 - DNA, 25 bp, Homo sapien
gggttgtggacctggctggatgagc

SEQ ID NO: 5844176 - DNA, 25 bp, Homo sapien
tgagccgccactggcgggaacgtca

SEQ ID NO: 5844177 - DNA, 25 bp, Homo sapien
gcgcaggtgacggccttagatctct

SEQ ID NO: 5844178 - DNA, 25 bp, Homo sapien
gccttagatctctcgccgccaatgc

SEQ ID NO: 5844179 - DNA, 25 bp, Homo sapien
gccgccaatgcttgttcaggcacgc

SEQ ID NO: 5844180 - DNA, 25 bp, Homo sapien
tgttcaggcacgccagaaggatgcc

SEQ ID NO: 5844181 - DNA, 25 bp, Homo sapien
agaaggatgccgcagaccattatct

SEQ ID NO: 5844182 - DNA, 25 bp, Homo sapien
gccgcagaccattatctggcgggag

SEQ ID NO: 5844183 - DNA, 25 bp, Homo sapien
cgttagcgactgcgacgttcgatct

SEQ ID NO: 5844184 - DNA, 25 bp, Homo sapien
cgacgttcgatcttgcatggagcaa

SEQ ID NO: 5844185 - DNA, 25 bp, Homo sapien
gatcttgcatggagcaatctcgcag

SEQ ID NO: 5844186 - DNA, 25 bp, Homo sapien
cagcggcatttggtcgggcagccgc

SEQ ID NO: 5844187 - DNA, 25 bp, Homo sapien
caatctcgcagtgcagtggtgcggt

SEQ ID NO: 5844188 - DNA, 25 bp, Homo sapien
gtcgggcagccgcacactatgagca

SEQ ID NO: 5844189 - DNA, 25 bp, Homo sapien
atttatccacggcactccgcgagct

SEQ ID NO: 5844190 - DNA, 25 bp, Homo sapien
cgcacactatgagcaacatgcagat

SEQ ID NO: 5844191 - DNA, 25 bp, Homo sapien
aacatgcagatctacagcgccagag

SEQ ID NO: 5844192 - DNA, 25 bp, Homo sapien
tacagcgccagagtgctgacgcctt

SEQ ID NO: 5844193 - DNA, 25 bp, Homo sapien
gagtgctgacgccttactggcaatg

SEQ ID NO: 5844194 - DNA, 25 bp, Homo sapien
tactggcaatgcttccacagcgtaa

SEQ ID NO: 5844195 - DNA, 25 bp, Homo sapien
gggttgtggacctggctggatgagc

SEQ ID NO: 5844196 - DNA, 25 bp, Homo sapien
tgagccgccactggcgggaacgtca

SEQ ID NO: 5844197 - DNA, 25 bp, Homo sapien
gcgcaggtgacggccttagatctct

SEQ ID NO: 5844198 - DNA, 25 bp, Homo sapien
gccttagatctctcgccgccaatgc

SEQ ID NO: 5844199 - DNA, 25 bp, Homo sapien
gccgccaatgcttgttcaggcacgc

SEQ ID NO: 5844200 - DNA, 25 bp, Homo sapien
tgttcaggcacgccagaaggatgcc

SEQ ID NO: 5844201 - DNA, 25 bp, Homo sapien
agaaggatgccgcagaccattatct

SEQ ID NO: 5844202 - DNA, 25 bp, Homo sapien
gccgcagaccattatctggcgggag

SEQ ID NO: 5844203 - DNA, 25 bp, Homo sapien
cgttagcgactgcgacgttcgatct

SEQ ID NO: 5844204 - DNA, 25 bp, Homo sapien
cgacgttcgatcttgcatggagcaa

SEQ ID NO: 5844205 - DNA, 25 bp, Homo sapien
gatcttgcatggagcaatctcgcag

SEQ ID NO: 5844206 - DNA, 25 bp, Homo sapien
cagcggcatttggtcgggcagccgc

SEQ ID NO: 5844207 - DNA, 25 bp, Homo sapien
caatctcgcagtgcagtggtgcggt

SEQ ID NO: 5844208 - DNA, 25 bp, Homo sapien
gtcgggcagccgcacactatgagca

SEQ ID NO: 5844209 - DNA, 25 bp, Homo sapien
atttatccacggcactccgcgagct

SEQ ID NO: 5844210 - DNA, 25 bp, Homo sapien
cgcacactatgagcaacatgcagat

SEQ ID NO: 5844211 - DNA, 25 bp, Homo sapien
aacatgcagatctacagcgccagag

SEQ ID NO: 5844212 - DNA, 25 bp, Homo sapien
tacagcgccagagtgctgacgcctt

SEQ ID NO: 5844213 - DNA, 25 bp, Homo sapien
gagtgctgacgccttactggcaatg

SEQ ID NO: 5844214 - DNA, 25 bp, Homo sapien
tactggcaatgcttccacagcgtaa

SEQ ID NO: 5844215 - DNA, 25 bp, Homo sapien
gggttgtggacctggctggatgagc

SEQ ID NO: 5844216 - DNA, 25 bp, Homo sapien
tgagccgccactggcgggaacgtca

SEQ ID NO: 5844217 - DNA, 25 bp, Homo sapien
gcgcaggtgacggccttagatctct

SEQ ID NO: 5844218 - DNA, 25 bp, Homo sapien
gccttagatctctcgccgccaatgc

SEQ ID NO: 5844219 - DNA, 25 bp, Homo sapien
gccgccaatgcttgttcaggcacgc

SEQ ID NO: 5844220 - DNA, 25 bp, Homo sapien
tgttcaggcacgccagaaggatgcc

SEQ ID NO: 5844221 - DNA, 25 bp, Homo sapien
agaaggatgccgcagaccattatct

SEQ ID NO: 5844222 - DNA, 25 bp, Homo sapien
gccgcagaccattatctggcgggag

SEQ ID NO: 5844223 - DNA, 25 bp, Homo sapien
cgttagcgactgcgacgttcgatct

SEQ ID NO: 5844224 - DNA, 25 bp, Homo sapien
cgacgttcgatcttgcatggagcaa

SEQ ID NO: 5844225 - DNA, 25 bp, Homo sapien
gatcttgcatggagcaatctcgcag

SEQ ID NO: 5844226 - DNA, 25 bp, Homo sapien
cagcggcatttggtcgggcagccgc

SEQ ID NO: 5844227 - DNA, 25 bp, Homo sapien
caatctcgcagtgcagtggtgcggt

SEQ ID NO: 5844228 - DNA, 25 bp, Homo sapien
gtcgggcagccgcacactatgagca

SEQ ID NO: 5844229 - DNA, 25 bp, Homo sapien
atttatccacggcactccgcgagct

SEQ ID NO: 5844230 - DNA, 25 bp, Homo sapien
cgcacactatgagcaacatgcagat

SEQ ID NO: 5844231 - DNA, 25 bp, Homo sapien
aacatgcagatctacagcgccagag

SEQ ID NO: 5844232 - DNA, 25 bp, Homo sapien
tacagcgccagagtgctgacgcctt

SEQ ID NO: 5844233 - DNA, 25 bp, Homo sapien
gagtgctgacgccttactggcaatg

SEQ ID NO: 5844234 - DNA, 25 bp, Homo sapien
tactggcaatgcttccacagcgtaa

SEQ ID NO: 5844235 - DNA, 25 bp, Homo sapien
gggttgtggacctggctggatgagc

SEQ ID NO: 5844236 - DNA, 25 bp, Homo sapien
tgagccgccactggcgggaacgtca

SEQ ID NO: 5844237 - DNA, 25 bp, Homo sapien
gcgcaggtgacggccttagatctct

SEQ ID NO: 5844238 - DNA, 25 bp, Homo sapien
gccttagatctctcgccgccaatgc

SEQ ID NO: 5844239 - DNA, 25 bp, Homo sapien
gccgccaatgcttgttcaggcacgc

SEQ ID NO: 5844240 - DNA, 25 bp, Homo sapien
tgttcaggcacgccagaaggatgcc

SEQ ID NO: 5844241 - DNA, 25 bp, Homo sapien
agaaggatgccgcagaccattatct

SEQ ID NO: 5844242 - DNA, 25 bp, Homo sapien
gccgcagaccattatctggcgggag

SEQ ID NO: 5844243 - DNA, 25 bp, Homo sapien
cgttagcgactgcgacgttcgatct

SEQ ID NO: 5844244 - DNA, 25 bp, Homo sapien
cgacgttcgatcttgcatggagcaa

SEQ ID NO: 5844245 - DNA, 25 bp, Homo sapien
gatcttgcatggagcaatctcgcag

SEQ ID NO: 5844246 - DNA, 25 bp, Homo sapien
cagcggcatttggtcgggcagccgc

SEQ ID NO: 5844247 - DNA, 25 bp, Homo sapien
caatctcgcagtgcagtggtgcggt

SEQ ID NO: 5844248 - DNA, 25 bp, Homo sapien
gtcgggcagccgcacactatgagca

SEQ ID NO: 5844249 - DNA, 25 bp, Homo sapien
atttatccacggcactccgcgagct

SEQ ID NO: 5844250 - DNA, 25 bp, Homo sapien
cgcacactatgagcaacatgcagat

SEQ ID NO: 5844251 - DNA, 25 bp, Homo sapien
aacatgcagatctacagcgccagag

SEQ ID NO: 5844252 - DNA, 25 bp, Homo sapien
tacagcgccagagtgctgacgcctt

SEQ ID NO: 5844253 - DNA, 25 bp, Homo sapien
gagtgctgacgccttactggcaatg

SEQ ID NO: 5844254 - DNA, 25 bp, Homo sapien
tactggcaatgcttccacagcgtaa

SEQ ID NO: 5844255 - DNA, 25 bp, Homo sapien
gggttgtggacctggctggatgagc

SEQ ID NO: 5844256 - DNA, 25 bp, Homo sapien
tgagccgccactggcgggaacgtca

SEQ ID NO: 5844257 - DNA, 25 bp, Homo sapien
gcgcaggtgacggccttagatctct

SEQ ID NO: 5844258 - DNA, 25 bp, Homo sapien
gccttagatctctcgccgccaatgc

SEQ ID NO: 5844259 - DNA, 25 bp, Homo sapien
gccgccaatgcttgttcaggcacgc

SEQ ID NO: 5844260 - DNA, 25 bp, Homo sapien
tgttcaggcacgccagaaggatgcc

SEQ ID NO: 5844261 - DNA, 25 bp, Homo sapien
agaaggatgccgcagaccattatct

SEQ ID NO: 5844262 - DNA, 25 bp, Homo sapien
gccgcagaccattatctggcgggag

SEQ ID NO: 5844263 - DNA, 25 bp, Homo sapien
cgttagcgactgcgacgttcgatct

SEQ ID NO: 5844264 - DNA, 25 bp, Homo sapien
cgacgttcgatcttgcatggagcaa

SEQ ID NO: 5844265 - DNA, 25 bp, Homo sapien
gatcttgcatggagcaatctcgcag

SEQ ID NO: 5844266 - DNA, 25 bp, Homo sapien
cagcggcatttggtcgggcagccgc

SEQ ID NO: 5844267 - DNA, 25 bp, Homo sapien
caatctcgcagtgcagtggtgcggt

SEQ ID NO: 5844268 - DNA, 25 bp, Homo sapien
gtcgggcagccgcacactatgagca

SEQ ID NO: 5844269 - DNA, 25 bp, Homo sapien
atttatccacggcactccgcgagct

SEQ ID NO: 5844270 - DNA, 25 bp, Homo sapien
cgcacactatgagcaacatgcagat

SEQ ID NO: 5844271 - DNA, 25 bp, Homo sapien
aacatgcagatctacagcgccagag

SEQ ID NO: 5844272 - DNA, 25 bp, Homo sapien
tacagcgccagagtgctgacgcctt

SEQ ID NO: 5844273 - DNA, 25 bp, Homo sapien
gagtgctgacgccttactggcaatg

SEQ ID NO: 5844274 - DNA, 25 bp, Homo sapien
tactggcaatgcttccacagcgtaa

SEQ ID NO: 5844275 - DNA, 25 bp, Homo sapien
gggttgtggacctggctggatgagc

SEQ ID NO: 5844276 - DNA, 25 bp, Homo sapien
tgagccgccactggcgggaacgtca

SEQ ID NO: 5844277 - DNA, 25 bp, Homo sapien
gcgcaggtgacggccttagatctct

SEQ ID NO: 5844278 - DNA, 25 bp, Homo sapien
gccttagatctctcgccgccaatgc

SEQ ID NO: 5844279 - DNA, 25 bp, Homo sapien
gccgccaatgcttgttcaggcacgc

SEQ ID NO: 5844280 - DNA, 25 bp, Homo sapien
tgttcaggcacgccagaaggatgcc

SEQ ID NO: 5844281 - DNA, 25 bp, Homo sapien
agaaggatgccgcagaccattatct

SEQ ID NO: 5844282 - DNA, 25 bp, Homo sapien
gccgcagaccattatctggcgggag

SEQ ID NO: 5844283 - DNA, 25 bp, Homo sapien
cgttagcgactgcgacgttcgatct

SEQ ID NO: 5844284 - DNA, 25 bp, Homo sapien
cgacgttcgatcttgcatggagcaa

SEQ ID NO: 5844285 - DNA, 25 bp, Homo sapien
gatcttgcatggagcaatctcgcag

SEQ ID NO: 5844286 - DNA, 25 bp, Homo sapien
cagcggcatttggtcgggcagccgc

SEQ ID NO: 5844287 - DNA, 25 bp, Homo sapien
caatctcgcagtgcagtggtgcggt

SEQ ID NO: 5844288 - DNA, 25 bp, Homo sapien
gtcgggcagccgcacactatgagca

SEQ ID NO: 5844289 - DNA, 25 bp, Homo sapien
atttatccacggcactccgcgagct

SEQ ID NO: 5844290 - DNA, 25 bp, Homo sapien
cgcacactatgagcaacatgcagat

SEQ ID NO: 5844291 - DNA, 25 bp, Homo sapien
aacatgcagatctacagcgccagag

SEQ ID NO: 5844292 - DNA, 25 bp, Homo sapien
tacagcgccagagtgctgacgcctt

SEQ ID NO: 5844293 - DNA, 25 bp, Homo sapien
gagtgctgacgccttactggcaatg

SEQ ID NO: 5844294 - DNA, 25 bp, Homo sapien
tactggcaatgcttccacagcgtaa

SEQ ID NO: 5844295 - DNA, 25 bp, Homo sapien
gggttgtggacctggctggatgagc

SEQ ID NO: 5844296 - DNA, 25 bp, Homo sapien
tgagccgccactggcgggaacgtca

SEQ ID NO: 5844297 - DNA, 25 bp, Homo sapien
gcgcaggtgacggccttagatctct

SEQ ID NO: 5844298 - DNA, 25 bp, Homo sapien
gccttagatctctcgccgccaatgc

SEQ ID NO: 5844299 - DNA, 25 bp, Homo sapien
gccgccaatgcttgttcaggcacgc

SEQ ID NO: 5844300 - DNA, 25 bp, Homo sapien
tgttcaggcacgccagaaggatgcc

SEQ ID NO: 5844301 - DNA, 25 bp, Homo sapien
agaaggatgccgcagaccattatct

SEQ ID NO: 5844302 - DNA, 25 bp, Homo sapien
gccgcagaccattatctggcgggag

SEQ ID NO: 5844303 - DNA, 25 bp, Homo sapien
cgttagcgactgcgacgttcgatct

SEQ ID NO: 5844304 - DNA, 25 bp, Homo sapien
cgacgttcgatcttgcatggagcaa

SEQ ID NO: 5844305 - DNA, 25 bp, Homo sapien
gatcttgcatggagcaatctcgcag

SEQ ID NO: 5844306 - DNA, 25 bp, Homo sapien
cagcggcatttggtcgggcagccgc

SEQ ID NO: 5844307 - DNA, 25 bp, Homo sapien
caatctcgcagtgcagtggtgcggt

SEQ ID NO: 5844308 - DNA, 25 bp, Homo sapien
gtcgggcagccgcacactatgagca

SEQ ID NO: 5844309 - DNA, 25 bp, Homo sapien
atttatccacggcactccgcgagct

SEQ ID NO: 5844310 - DNA, 25 bp, Homo sapien
cgcacactatgagcaacatgcagat

SEQ ID NO: 5844311 - DNA, 25 bp, Homo sapien
aacatgcagatctacagcgccagag

SEQ ID NO: 5844312 - DNA, 25 bp, Homo sapien
tacagcgccagagtgctgacgcctt

SEQ ID NO: 5844313 - DNA, 25 bp, Homo sapien
gagtgctgacgccttactggcaatg

SEQ ID NO: 5844314 - DNA, 25 bp, Homo sapien
tactggcaatgcttccacagcgtaa

SEQ ID NO: 5844315 - DNA, 25 bp, Homo sapien
gggttgtggacctggctggatgagc

SEQ ID NO: 5844316 - DNA, 25 bp, Homo sapien
tgagccgccactggcgggaacgtca

SEQ ID NO: 5844317 - DNA, 25 bp, Homo sapien
gcgcaggtgacggccttagatctct

SEQ ID NO: 5844318 - DNA, 25 bp, Homo sapien
gccttagatctctcgccgccaatgc

SEQ ID NO: 5844319 - DNA, 25 bp, Homo sapien
gccgccaatgcttgttcaggcacgc

SEQ ID NO: 5844320 - DNA, 25 bp, Homo sapien
tgttcaggcacgccagaaggatgcc

SEQ ID NO: 5844321 - DNA, 25 bp, Homo sapien
agaaggatgccgcagaccattatct

SEQ ID NO: 5844322 - DNA, 25 bp, Homo sapien
gccgcagaccattatctggcgggag

SEQ ID NO: 5844323 - DNA, 25 bp, Homo sapien
cgttagcgactgcgacgttcgatct

SEQ ID NO: 5844324 - DNA, 25 bp, Homo sapien
cgacgttcgatcttgcatggagcaa

SEQ ID NO: 5844325 - DNA, 25 bp, Homo sapien
gatcttgcatggagcaatctcgcag

SEQ ID NO: 5844326 - DNA, 25 bp, Homo sapien
cagcggcatttggtcgggcagccgc

SEQ ID NO: 5844327 - DNA, 25 bp, Homo sapien
caatctcgcagtgcagtggtgcggt

SEQ ID NO: 5844328 - DNA, 25 bp, Homo sapien
gtcgggcagccgcacactatgagca

SEQ ID NO: 5844329 - DNA, 25 bp, Homo sapien
atttatccacggcactccgcgagct

SEQ ID NO: 5844330 - DNA, 25 bp, Homo sapien
cgcacactatgagcaacatgcagat

SEQ ID NO: 5844331 - DNA, 25 bp, Homo sapien
aacatgcagatctacagcgccagag

SEQ ID NO: 5844332 - DNA, 25 bp, Homo sapien
tacagcgccagagtgctgacgcctt

SEQ ID NO: 5844333 - DNA, 25 bp, Homo sapien
gagtgctgacgccttactggcaatg

SEQ ID NO: 5844334 - DNA, 25 bp, Homo sapien
tactggcaatgcttccacagcgtaa

SEQ ID NO: 5844335 - DNA, 25 bp, Homo sapien
gggttgtggacctggctggatgagc

SEQ ID NO: 5844336 - DNA, 25 bp, Homo sapien
tgagccgccactggcgggaacgtca

SEQ ID NO: 5844337 - DNA, 25 bp, Homo sapien
gcgcaggtgacggccttagatctct

SEQ ID NO: 5844338 - DNA, 25 bp, Homo sapien
gccttagatctctcgccgccaatgc

SEQ ID NO: 5844339 - DNA, 25 bp, Homo sapien
gccgccaatgcttgttcaggcacgc

SEQ ID NO: 5844340 - DNA, 25 bp, Homo sapien
tgttcaggcacgccagaaggatgcc

SEQ ID NO: 5844341 - DNA, 25 bp, Homo sapien
agaaggatgccgcagaccattatct

SEQ ID NO: 5844342 - DNA, 25 bp, Homo sapien
gccgcagaccattatctggcgggag

SEQ ID NO: 5844343 - DNA, 25 bp, Homo sapien
cgttagcgactgcgacgttcgatct

SEQ ID NO: 5844344 - DNA, 25 bp, Homo sapien
cgacgttcgatcttgcatggagcaa

SEQ ID NO: 5844345 - DNA, 25 bp, Homo sapien
gatcttgcatggagcaatctcgcag

SEQ ID NO: 5844346 - DNA, 25 bp, Homo sapien
cagcggcatttggtcgggcagccgc

SEQ ID NO: 5844347 - DNA, 25 bp, Homo sapien
caatctcgcagtgcagtggtgcggt

SEQ ID NO: 5844348 - DNA, 25 bp, Homo sapien
gtcgggcagccgcacactatgagca

SEQ ID NO: 5844349 - DNA, 25 bp, Homo sapien
atttatccacggcactccgcgagct

SEQ ID NO: 5844350 - DNA, 25 bp, Homo sapien
cgcacactatgagcaacatgcagat

SEQ ID NO: 5844351 - DNA, 25 bp, Homo sapien
aacatgcagatctacagcgccagag

SEQ ID NO: 5844352 - DNA, 25 bp, Homo sapien
tacagcgccagagtgctgacgcctt

SEQ ID NO: 5844353 - DNA, 25 bp, Homo sapien
gagtgctgacgccttactggcaatg

SEQ ID NO: 5844354 - DNA, 25 bp, Homo sapien
tactggcaatgcttccacagcgtaa

SEQ ID NO: 5844355 - DNA, 25 bp, Homo sapien
gggttgtggacctggctggatgagc

SEQ ID NO: 5844356 - DNA, 25 bp, Homo sapien
tgagccgccactggcgggaacgtca

SEQ ID NO: 5844357 - DNA, 25 bp, Homo sapien
gcgcaggtgacggccttagatctct

SEQ ID NO: 5844358 - DNA, 25 bp, Homo sapien
gccttagatctctcgccgccaatgc

SEQ ID NO: 5844359 - DNA, 25 bp, Homo sapien
gccgccaatgcttgttcaggcacgc

SEQ ID NO: 5844360 - DNA, 25 bp, Homo sapien
tgttcaggcacgccagaaggatgcc

SEQ ID NO: 5844361 - DNA, 25 bp, Homo sapien
agaaggatgccgcagaccattatct

SEQ ID NO: 5844362 - DNA, 25 bp, Homo sapien
gccgcagaccattatctggcgggag

SEQ ID NO: 5844363 - DNA, 25 bp, Homo sapien
cgttagcgactgcgacgttcgatct

SEQ ID NO: 5844364 - DNA, 25 bp, Homo sapien
cgacgttcgatcttgcatggagcaa

SEQ ID NO: 5844365 - DNA, 25 bp, Homo sapien
gatcttgcatggagcaatctcgcag

SEQ ID NO: 5844366 - DNA, 25 bp, Homo sapien
cagcggcatttggtcgggcagccgc

SEQ ID NO: 5844367 - DNA, 25 bp, Homo sapien
caatctcgcagtgcagtggtgcggt

SEQ ID NO: 5844368 - DNA, 25 bp, Homo sapien
gtcgggcagccgcacactatgagca

SEQ ID NO: 5844369 - DNA, 25 bp, Homo sapien
atttatccacggcactccgcgagct

SEQ ID NO: 5844370 - DNA, 25 bp, Homo sapien
cgcacactatgagcaacatgcagat

SEQ ID NO: 5844371 - DNA, 25 bp, Homo sapien
aacatgcagatctacagcgccagag

SEQ ID NO: 5844372 - DNA, 25 bp, Homo sapien
tacagcgccagagtgctgacgcctt

SEQ ID NO: 5844373 - DNA, 25 bp, Homo sapien
gagtgctgacgccttactggcaatg

SEQ ID NO: 5844374 - DNA, 25 bp, Homo sapien
tactggcaatgcttccacagcgtaa

SEQ ID NO: 5844375 - DNA, 25 bp, Homo sapien
gggttgtggacctggctggatgagc

SEQ ID NO: 5844376 - DNA, 25 bp, Homo sapien
tgagccgccactggcgggaacgtca

SEQ ID NO: 5844377 - DNA, 25 bp, Homo sapien
gcgcaggtgacggccttagatctct

SEQ ID NO: 5844378 - DNA, 25 bp, Homo sapien
gccttagatctctcgccgccaatgc

SEQ ID NO: 5844379 - DNA, 25 bp, Homo sapien
gccgccaatgcttgttcaggcacgc

SEQ ID NO: 5844380 - DNA, 25 bp, Homo sapien
tgttcaggcacgccagaaggatgcc

SEQ ID NO: 5844381 - DNA, 25 bp, Homo sapien
agaaggatgccgcagaccattatct

SEQ ID NO: 5844382 - DNA, 25 bp, Homo sapien
gccgcagaccattatctggcgggag

SEQ ID NO: 5844383 - DNA, 25 bp, Homo sapien
cgttagcgactgcgacgttcgatct

SEQ ID NO: 5844384 - DNA, 25 bp, Homo sapien
cgacgttcgatcttgcatggagcaa

SEQ ID NO: 5844385 - DNA, 25 bp, Homo sapien
gatcttgcatggagcaatctcgcag

SEQ ID NO: 5844386 - DNA, 25 bp, Homo sapien
cagcggcatttggtcgggcagccgc

SEQ ID NO: 5844387 - DNA, 25 bp, Homo sapien
caatctcgcagtgcagtggtgcggt

SEQ ID NO: 5844388 - DNA, 25 bp, Homo sapien
gtcgggcagccgcacactatgagca

SEQ ID NO: 5844389 - DNA, 25 bp, Homo sapien
atttatccacggcactccgcgagct

SEQ ID NO: 5844390 - DNA, 25 bp, Homo sapien
cgcacactatgagcaacatgcagat

SEQ ID NO: 5844391 - DNA, 25 bp, Homo sapien
aacatgcagatctacagcgccagag

SEQ ID NO: 5844392 - DNA, 25 bp, Homo sapien
tacagcgccagagtgctgacgcctt

SEQ ID NO: 5844393 - DNA, 25 bp, Homo sapien
gagtgctgacgccttactggcaatg

SEQ ID NO: 5844394 - DNA, 25 bp, Homo sapien
tactggcaatgcttccacagcgtaa

SEQ ID NO: 5844395 - DNA, 25 bp, Homo sapien
gggttgtggacctggctggatgagc

SEQ ID NO: 5844396 - DNA, 25 bp, Homo sapien
tgagccgccactggcgggaacgtca

SEQ ID NO: 5844397 - DNA, 25 bp, Homo sapien
gcgcaggtgacggccttagatctct

SEQ ID NO: 5844398 - DNA, 25 bp, Homo sapien
gccttagatctctcgccgccaatgc

SEQ ID NO: 5844399 - DNA, 25 bp, Homo sapien
gccgccaatgcttgttcaggcacgc

SEQ ID NO: 5844400 - DNA, 25 bp, Homo sapien
tgttcaggcacgccagaaggatgcc

SEQ ID NO: 5844401 - DNA, 25 bp, Homo sapien
agaaggatgccgcagaccattatct

SEQ ID NO: 5844402 - DNA, 25 bp, Homo sapien
gccgcagaccattatctggcgggag

SEQ ID NO: 5844403 - DNA, 25 bp, Homo sapien
cgttagcgactgcgacgttcgatct

SEQ ID NO: 5844404 - DNA, 25 bp, Homo sapien
cgacgttcgatcttgcatggagcaa

SEQ ID NO: 5844405 - DNA, 25 bp, Homo sapien
gatcttgcatggagcaatctcgcag

SEQ ID NO: 5844406 - DNA, 25 bp, Homo sapien
cagcggcatttggtcgggcagccgc

SEQ ID NO: 5844407 - DNA, 25 bp, Homo sapien
caatctcgcagtgcagtggtgcggt

SEQ ID NO: 5844408 - DNA, 25 bp, Homo sapien
gtcgggcagccgcacactatgagca

SEQ ID NO: 5844409 - DNA, 25 bp, Homo sapien
atttatccacggcactccgcgagct

SEQ ID NO: 5844410 - DNA, 25 bp, Homo sapien
cgcacactatgagcaacatgcagat

SEQ ID NO: 5844411 - DNA, 25 bp, Homo sapien
aacatgcagatctacagcgccagag

SEQ ID NO: 5844412 - DNA, 25 bp, Homo sapien
tacagcgccagagtgctgacgcctt

SEQ ID NO: 5844413 - DNA, 25 bp, Homo sapien
gagtgctgacgccttactggcaatg

SEQ ID NO: 5844414 - DNA, 25 bp, Homo sapien
tactggcaatgcttccacagcgtaa

SEQ ID NO: 5844415 - DNA, 25 bp, Homo sapien
gggttgtggacctggctggatgagc

SEQ ID NO: 5844416 - DNA, 25 bp, Homo sapien
tgagccgccactggcgggaacgtca

SEQ ID NO: 5844417 - DNA, 25 bp, Homo sapien
gcgcaggtgacggccttagatctct

SEQ ID NO: 5844418 - DNA, 25 bp, Homo sapien
gccttagatctctcgccgccaatgc

SEQ ID NO: 5844419 - DNA, 25 bp, Homo sapien
gccgccaatgcttgttcaggcacgc

SEQ ID NO: 5844420 - DNA, 25 bp, Homo sapien
tgttcaggcacgccagaaggatgcc

SEQ ID NO: 5844421 - DNA, 25 bp, Homo sapien
agaaggatgccgcagaccattatct

SEQ ID NO: 5844422 - DNA, 25 bp, Homo sapien
gccgcagaccattatctggcgggag

SEQ ID NO: 5844423 - DNA, 25 bp, Homo sapien
cgttagcgactgcgacgttcgatct

SEQ ID NO: 5844424 - DNA, 25 bp, Homo sapien
cgacgttcgatcttgcatggagcaa

SEQ ID NO: 5844425 - DNA, 25 bp, Homo sapien
gatcttgcatggagcaatctcgcag

SEQ ID NO: 5844426 - DNA, 25 bp, Homo sapien
cagcggcatttggtcgggcagccgc

SEQ ID NO: 5844427 - DNA, 25 bp, Homo sapien
caatctcgcagtgcagtggtgcggt

SEQ ID NO: 5844428 - DNA, 25 bp, Homo sapien
gtcgggcagccgcacactatgagca

SEQ ID NO: 5844429 - DNA, 25 bp, Homo sapien
atttatccacggcactccgcgagct

SEQ ID NO: 5844430 - DNA, 25 bp, Homo sapien
cgcacactatgagcaacatgcagat

SEQ ID NO: 5844431 - DNA, 25 bp, Homo sapien
aacatgcagatctacagcgccagag

SEQ ID NO: 5844432 - DNA, 25 bp, Homo sapien
tacagcgccagagtgctgacgcctt

SEQ ID NO: 5844433 - DNA, 25 bp, Homo sapien
gagtgctgacgccttactggcaatg

SEQ ID NO: 5844434 - DNA, 25 bp, Homo sapien
tactggcaatgcttccacagcgtaa

SEQ ID NO: 5844435 - DNA, 25 bp, Homo sapien
gggttgtggacctggctggatgagc

SEQ ID NO: 5844436 - DNA, 25 bp, Homo sapien
tgagccgccactggcgggaacgtca

SEQ ID NO: 5844437 - DNA, 25 bp, Homo sapien
gcgcaggtgacggccttagatctct

SEQ ID NO: 5844438 - DNA, 25 bp, Homo sapien
gccttagatctctcgccgccaatgc

SEQ ID NO: 5844439 - DNA, 25 bp, Homo sapien
gccgccaatgcttgttcaggcacgc

SEQ ID NO: 5844440 - DNA, 25 bp, Homo sapien
tgttcaggcacgccagaaggatgcc

SEQ ID NO: 5844441 - DNA, 25 bp, Homo sapien
agaaggatgccgcagaccattatct

SEQ ID NO: 5844442 - DNA, 25 bp, Homo sapien
gccgcagaccattatctggcgggag

SEQ ID NO: 5844443 - DNA, 25 bp, Homo sapien
cgttagcgactgcgacgttcgatct

SEQ ID NO: 5844444 - DNA, 25 bp, Homo sapien
cgacgttcgatcttgcatggagcaa

SEQ ID NO: 5844445 - DNA, 25 bp, Homo sapien
gatcttgcatggagcaatctcgcag

SEQ ID NO: 5844446 - DNA, 25 bp, Homo sapien
cagcggcatttggtcgggcagccgc

SEQ ID NO: 5844447 - DNA, 25 bp, Homo sapien
caatctcgcagtgcagtggtgcggt

SEQ ID NO: 5844448 - DNA, 25 bp, Homo sapien
gtcgggcagccgcacactatgagca

SEQ ID NO: 5844449 - DNA, 25 bp, Homo sapien
atttatccacggcactccgcgagct

SEQ ID NO: 5844450 - DNA, 25 bp, Homo sapien
cgcacactatgagcaacatgcagat

SEQ ID NO: 5844451 - DNA, 25 bp, Homo sapien
aacatgcagatctacagcgccagag

SEQ ID NO: 5844452 - DNA, 25 bp, Homo sapien
tacagcgccagagtgctgacgcctt

SEQ ID NO: 5844453 - DNA, 25 bp, Homo sapien
gagtgctgacgccttactggcaatg

SEQ ID NO: 5844454 - DNA, 25 bp, Homo sapien
tactggcaatgcttccacagcgtaa

SEQ ID NO: 5844455 - DNA, 25 bp, Homo sapien
gggttgtggacctggctggatgagc

SEQ ID NO: 5844456 - DNA, 25 bp, Homo sapien
tgagccgccactggcgggaacgtca

SEQ ID NO: 5844457 - DNA, 25 bp, Homo sapien
gcgcaggtgacggccttagatctct

SEQ ID NO: 5844458 - DNA, 25 bp, Homo sapien
gccttagatctctcgccgccaatgc

SEQ ID NO: 5844459 - DNA, 25 bp, Homo sapien
gccgccaatgcttgttcaggcacgc

SEQ ID NO: 5844460 - DNA, 25 bp, Homo sapien
tgttcaggcacgccagaaggatgcc

SEQ ID NO: 5844461 - DNA, 25 bp, Homo sapien
agaaggatgccgcagaccattatct

SEQ ID NO: 5844462 - DNA, 25 bp, Homo sapien
gccgcagaccattatctggcgggag

SEQ ID NO: 5844463 - DNA, 25 bp, Homo sapien
cgttagcgactgcgacgttcgatct

SEQ ID NO: 5844464 - DNA, 25 bp, Homo sapien
cgacgttcgatcttgcatggagcaa

SEQ ID NO: 5844465 - DNA, 25 bp, Homo sapien
gatcttgcatggagcaatctcgcag

SEQ ID NO: 5844466 - DNA, 25 bp, Homo sapien
cagcggcatttggtcgggcagccgc

SEQ ID NO: 5844467 - DNA, 25 bp, Homo sapien
caatctcgcagtgcagtggtgcggt

SEQ ID NO: 5844468 - DNA, 25 bp, Homo sapien
gtcgggcagccgcacactatgagca

SEQ ID NO: 5844469 - DNA, 25 bp, Homo sapien
atttatccacggcactccgcgagct

SEQ ID NO: 5844470 - DNA, 25 bp, Homo sapien
cgcacactatgagcaacatgcagat

SEQ ID NO: 5844471 - DNA, 25 bp, Homo sapien
aacatgcagatctacagcgccagag

SEQ ID NO: 5844472 - DNA, 25 bp, Homo sapien
tacagcgccagagtgctgacgcctt

SEQ ID NO: 5844473 - DNA, 25 bp, Homo sapien
gagtgctgacgccttactggcaatg

SEQ ID NO: 5844474 - DNA, 25 bp, Homo sapien
tactggcaatgcttccacagcgtaa

SEQ ID NO: 5844475 - DNA, 25 bp, Homo sapien
gggttgtggacctggctggatgagc

SEQ ID NO: 5844476 - DNA, 25 bp, Homo sapien
tgagccgccactggcgggaacgtca

SEQ ID NO: 5844477 - DNA, 25 bp, Homo sapien
gcgcaggtgacggccttagatctct

SEQ ID NO: 5844478 - DNA, 25 bp, Homo sapien
gccttagatctctcgccgccaatgc

SEQ ID NO: 5844479 - DNA, 25 bp, Homo sapien
gccgccaatgcttgttcaggcacgc

SEQ ID NO: 5844480 - DNA, 25 bp, Homo sapien
tgttcaggcacgccagaaggatgcc

SEQ ID NO: 5844481 - DNA, 25 bp, Homo sapien
agaaggatgccgcagaccattatct

SEQ ID NO: 5844482 - DNA, 25 bp, Homo sapien
gccgcagaccattatctggcgggag

SEQ ID NO: 5844483 - DNA, 25 bp, Homo sapien
cgttagcgactgcgacgttcgatct

SEQ ID NO: 5844484 - DNA, 25 bp, Homo sapien
cgacgttcgatcttgcatggagcaa

SEQ ID NO: 5844485 - DNA, 25 bp, Homo sapien
gatcttgcatggagcaatctcgcag

SEQ ID NO: 5844486 - DNA, 25 bp, Homo sapien
cagcggcatttggtcgggcagccgc

SEQ ID NO: 5844487 - DNA, 25 bp, Homo sapien
caatctcgcagtgcagtggtgcggt

SEQ ID NO: 5844488 - DNA, 25 bp, Homo sapien
gtcgggcagccgcacactatgagca

SEQ ID NO: 5844489 - DNA, 25 bp, Homo sapien
atttatccacggcactccgcgagct

SEQ ID NO: 5844490 - DNA, 25 bp, Homo sapien
cgcacactatgagcaacatgcagat

SEQ ID NO: 5844491 - DNA, 25 bp, Homo sapien
aacatgcagatctacagcgccagag

SEQ ID NO: 5844492 - DNA, 25 bp, Homo sapien
tacagcgccagagtgctgacgcctt

SEQ ID NO: 5844493 - DNA, 25 bp, Homo sapien
gagtgctgacgccttactggcaatg

SEQ ID NO: 5844494 - DNA, 25 bp, Homo sapien
tactggcaatgcttccacagcgtaa

SEQ ID NO: 5844495 - DNA, 25 bp, Homo sapien
gggttgtggacctggctggatgagc

SEQ ID NO: 5844496 - DNA, 25 bp, Homo sapien
tgagccgccactggcgggaacgtca

SEQ ID NO: 5844497 - DNA, 25 bp, Homo sapien
gcgcaggtgacggccttagatctct

SEQ ID NO: 5844498 - DNA, 25 bp, Homo sapien
gccttagatctctcgccgccaatgc

SEQ ID NO: 5844499 - DNA, 25 bp, Homo sapien
gccgccaatgcttgttcaggcacgc

SEQ ID NO: 5844500 - DNA, 25 bp, Homo sapien
tgttcaggcacgccagaaggatgcc

SEQ ID NO: 5844501 - DNA, 25 bp, Homo sapien
agaaggatgccgcagaccattatct

SEQ ID NO: 5844502 - DNA, 25 bp, Homo sapien
gccgcagaccattatctggcgggag

SEQ ID NO: 5844503 - DNA, 25 bp, Homo sapien
cgttagcgactgcgacgttcgatct

SEQ ID NO: 5844504 - DNA, 25 bp, Homo sapien
cgacgttcgatcttgcatggagcaa

SEQ ID NO: 5844505 - DNA, 25 bp, Homo sapien
gatcttgcatggagcaatctcgcag

SEQ ID NO: 5844506 - DNA, 25 bp, Homo sapien
cagcggcatttggtcgggcagccgc

SEQ ID NO: 5844507 - DNA, 25 bp, Homo sapien
caatctcgcagtgcagtggtgcggt

SEQ ID NO: 5844508 - DNA, 25 bp, Homo sapien
gtcgggcagccgcacactatgagca

SEQ ID NO: 5844509 - DNA, 25 bp, Homo sapien
atttatccacggcactccgcgagct

SEQ ID NO: 5844510 - DNA, 25 bp, Homo sapien
cgcacactatgagcaacatgcagat

SEQ ID NO: 5844511 - DNA, 25 bp, Homo sapien
aacatgcagatctacagcgccagag

SEQ ID NO: 5844512 - DNA, 25 bp, Homo sapien
tacagcgccagagtgctgacgcctt

SEQ ID NO: 5844513 - DNA, 25 bp, Homo sapien
gagtgctgacgccttactggcaatg

SEQ ID NO: 5844514 - DNA, 25 bp, Homo sapien
tactggcaatgcttccacagcgtaa

SEQ ID NO: 5844515 - DNA, 25 bp, Homo sapien
gggttgtggacctggctggatgagc

SEQ ID NO: 5844516 - DNA, 25 bp, Homo sapien
tgagccgccactggcgggaacgtca

SEQ ID NO: 5844517 - DNA, 25 bp, Homo sapien
gcgcaggtgacggccttagatctct

SEQ ID NO: 5844518 - DNA, 25 bp, Homo sapien
gccttagatctctcgccgccaatgc

SEQ ID NO: 5844519 - DNA, 25 bp, Homo sapien
gccgccaatgcttgttcaggcacgc

SEQ ID NO: 5844520 - DNA, 25 bp, Homo sapien
tgttcaggcacgccagaaggatgcc

SEQ ID NO: 5844521 - DNA, 25 bp, Homo sapien
agaaggatgccgcagaccattatct

SEQ ID NO: 5844522 - DNA, 25 bp, Homo sapien
gccgcagaccattatctggcgggag

SEQ ID NO: 5844523 - DNA, 25 bp, Homo sapien
cgttagcgactgcgacgttcgatct

SEQ ID NO: 5844524 - DNA, 25 bp, Homo sapien
cgacgttcgatcttgcatggagcaa

SEQ ID NO: 5844525 - DNA, 25 bp, Homo sapien
gatcttgcatggagcaatctcgcag

SEQ ID NO: 5844526 - DNA, 25 bp, Homo sapien
cagcggcatttggtcgggcagccgc

SEQ ID NO: 5844527 - DNA, 25 bp, Homo sapien
caatctcgcagtgcagtggtgcggt

SEQ ID NO: 5844528 - DNA, 25 bp, Homo sapien
gtcgggcagccgcacactatgagca

SEQ ID NO: 5844529 - DNA, 25 bp, Homo sapien
atttatccacggcactccgcgagct

SEQ ID NO: 5844530 - DNA, 25 bp, Homo sapien
cgcacactatgagcaacatgcagat

SEQ ID NO: 5844531 - DNA, 25 bp, Homo sapien
aacatgcagatctacagcgccagag

SEQ ID NO: 5844532 - DNA, 25 bp, Homo sapien
tacagcgccagagtgctgacgcctt

SEQ ID NO: 5844533 - DNA, 25 bp, Homo sapien
gagtgctgacgccttactggcaatg

SEQ ID NO: 5844534 - DNA, 25 bp, Homo sapien
tactggcaatgcttccacagcgtaa

SEQ ID NO: 5844535 - DNA, 25 bp, Homo sapien
gggttgtggacctggctggatgagc

SEQ ID NO: 5844536 - DNA, 25 bp, Homo sapien
tgagccgccactggcgggaacgtca

SEQ ID NO: 5844537 - DNA, 25 bp, Homo sapien
gcgcaggtgacggccttagatctct

SEQ ID NO: 5844538 - DNA, 25 bp, Homo sapien
gccttagatctctcgccgccaatgc

SEQ ID NO: 5844539 - DNA, 25 bp, Homo sapien
gccgccaatgcttgttcaggcacgc

SEQ ID NO: 5844540 - DNA, 25 bp, Homo sapien
tgttcaggcacgccagaaggatgcc

SEQ ID NO: 5844541 - DNA, 25 bp, Homo sapien
agaaggatgccgcagaccattatct

SEQ ID NO: 5844542 - DNA, 25 bp, Homo sapien
gccgcagaccattatctggcgggag

SEQ ID NO: 5844543 - DNA, 25 bp, Homo sapien
cgttagcgactgcgacgttcgatct

SEQ ID NO: 5844544 - DNA, 25 bp, Homo sapien
cgacgttcgatcttgcatggagcaa

SEQ ID NO: 5844545 - DNA, 25 bp, Homo sapien
gatcttgcatggagcaatctcgcag

SEQ ID NO: 5844546 - DNA, 25 bp, Homo sapien
cagcggcatttggtcgggcagccgc

SEQ ID NO: 5844547 - DNA, 25 bp, Homo sapien
caatctcgcagtgcagtggtgcggt

SEQ ID NO: 5844548 - DNA, 25 bp, Homo sapien
gtcgggcagccgcacactatgagca

SEQ ID NO: 5844549 - DNA, 25 bp, Homo sapien
atttatccacggcactccgcgagct

SEQ ID NO: 5844550 - DNA, 25 bp, Homo sapien
cgcacactatgagcaacatgcagat

SEQ ID NO: 5844551 - DNA, 25 bp, Homo sapien
aacatgcagatctacagcgccagag

SEQ ID NO: 5844552 - DNA, 25 bp, Homo sapien
tacagcgccagagtgctgacgcctt

SEQ ID NO: 5844553 - DNA, 25 bp, Homo sapien
gagtgctgacgccttactggcaatg

SEQ ID NO: 5844554 - DNA, 25 bp, Homo sapien
tactggcaatgcttccacagcgtaa

SEQ ID NO: 5844555 - DNA, 25 bp, Homo sapien
gggttgtggacctggctggatgagc

SEQ ID NO: 5844556 - DNA, 25 bp, Homo sapien
tgagccgccactggcgggaacgtca

SEQ ID NO: 5844557 - DNA, 25 bp, Homo sapien
gcgcaggtgacggccttagatctct

SEQ ID NO: 5844558 - DNA, 25 bp, Homo sapien
gccttagatctctcgccgccaatgc

SEQ ID NO: 5844559 - DNA, 25 bp, Homo sapien
gccgccaatgcttgttcaggcacgc

SEQ ID NO: 5844560 - DNA, 25 bp, Homo sapien
tgttcaggcacgccagaaggatgcc

SEQ ID NO: 5844561 - DNA, 25 bp, Homo sapien
agaaggatgccgcagaccattatct

SEQ ID NO: 5844562 - DNA, 25 bp, Homo sapien
gccgcagaccattatctggcgggag

SEQ ID NO: 5844563 - DNA, 25 bp, Homo sapien
cgttagcgactgcgacgttcgatct

SEQ ID NO: 5844564 - DNA, 25 bp, Homo sapien
cgacgttcgatcttgcatggagcaa

SEQ ID NO: 5844565 - DNA, 25 bp, Homo sapien
gatcttgcatggagcaatctcgcag

SEQ ID NO: 5844566 - DNA, 25 bp, Homo sapien
cagcggcatttggtcgggcagccgc

SEQ ID NO: 5844567 - DNA, 25 bp, Homo sapien
caatctcgcagtgcagtggtgcggt

SEQ ID NO: 5844568 - DNA, 25 bp, Homo sapien
gtcgggcagccgcacactatgagca

SEQ ID NO: 5844569 - DNA, 25 bp, Homo sapien
atttatccacggcactccgcgagct

SEQ ID NO: 5844570 - DNA, 25 bp, Homo sapien
cgcacactatgagcaacatgcagat

SEQ ID NO: 5844571 - DNA, 25 bp, Homo sapien
aacatgcagatctacagcgccagag

SEQ ID NO: 5844572 - DNA, 25 bp, Homo sapien
tacagcgccagagtgctgacgcctt

SEQ ID NO: 5844573 - DNA, 25 bp, Homo sapien
gagtgctgacgccttactggcaatg

SEQ ID NO: 5844574 - DNA, 25 bp, Homo sapien
tactggcaatgcttccacagcgtaa

SEQ ID NO: 5844575 - DNA, 25 bp, Homo sapien
gggttgtggacctggctggatgagc

SEQ ID NO: 5844576 - DNA, 25 bp, Homo sapien
tgagccgccactggcgggaacgtca

SEQ ID NO: 5844577 - DNA, 25 bp, Homo sapien
gcgcaggtgacggccttagatctct

SEQ ID NO: 5844578 - DNA, 25 bp, Homo sapien
gccttagatctctcgccgccaatgc

SEQ ID NO: 5844579 - DNA, 25 bp, Homo sapien
gccgccaatgcttgttcaggcacgc

SEQ ID NO: 5844580 - DNA, 25 bp, Homo sapien
tgttcaggcacgccagaaggatgcc

SEQ ID NO: 5844581 - DNA, 25 bp, Homo sapien
agaaggatgccgcagaccattatct

SEQ ID NO: 5844582 - DNA, 25 bp, Homo sapien
gccgcagaccattatctggcgggag

SEQ ID NO: 5844583 - DNA, 25 bp, Homo sapien
cgttagcgactgcgacgttcgatct

SEQ ID NO: 5844584 - DNA, 25 bp, Homo sapien
cgacgttcgatcttgcatggagcaa

SEQ ID NO: 5844585 - DNA, 25 bp, Homo sapien
gatcttgcatggagcaatctcgcag

SEQ ID NO: 5844586 - DNA, 25 bp, Homo sapien
cagcggcatttggtcgggcagccgc

SEQ ID NO: 5844587 - DNA, 25 bp, Homo sapien
caatctcgcagtgcagtggtgcggt

SEQ ID NO: 5844588 - DNA, 25 bp, Homo sapien
gtcgggcagccgcacactatgagca

SEQ ID NO: 5844589 - DNA, 25 bp, Homo sapien
atttatccacggcactccgcgagct

SEQ ID NO: 5844590 - DNA, 25 bp, Homo sapien
cgcacactatgagcaacatgcagat

SEQ ID NO: 5844591 - DNA, 25 bp, Homo sapien
aacatgcagatctacagcgccagag

SEQ ID NO: 5844592 - DNA, 25 bp, Homo sapien
tacagcgccagagtgctgacgcctt

SEQ ID NO: 5844593 - DNA, 25 bp, Homo sapien
gagtgctgacgccttactggcaatg

SEQ ID NO: 5844594 - DNA, 25 bp, Homo sapien
tactggcaatgcttccacagcgtaa

SEQ ID NO: 5844595 - DNA, 25 bp, Homo sapien
gggttgtggacctggctggatgagc

SEQ ID NO: 5844596 - DNA, 25 bp, Homo sapien
tgagccgccactggcgggaacgtca

SEQ ID NO: 5844597 - DNA, 25 bp, Homo sapien
gcgcaggtgacggccttagatctct

SEQ ID NO: 5844598 - DNA, 25 bp, Homo sapien
gccttagatctctcgccgccaatgc

SEQ ID NO: 5844599 - DNA, 25 bp, Homo sapien
gccgccaatgcttgttcaggcacgc

SEQ ID NO: 5844600 - DNA, 25 bp, Homo sapien
tgttcaggcacgccagaaggatgcc

SEQ ID NO: 5844601 - DNA, 25 bp, Homo sapien
agaaggatgccgcagaccattatct

SEQ ID NO: 5844602 - DNA, 25 bp, Homo sapien
gccgcagaccattatctggcgggag

SEQ ID NO: 5844603 - DNA, 25 bp, Homo sapien
cgttagcgactgcgacgttcgatct

SEQ ID NO: 5844604 - DNA, 25 bp, Homo sapien
cgacgttcgatcttgcatggagcaa

SEQ ID NO: 5844605 - DNA, 25 bp, Homo sapien
gatcttgcatggagcaatctcgcag

SEQ ID NO: 5844606 - DNA, 25 bp, Homo sapien
cagcggcatttggtcgggcagccgc

SEQ ID NO: 5844607 - DNA, 25 bp, Homo sapien
caatctcgcagtgcagtggtgcggt

SEQ ID NO: 5844608 - DNA, 25 bp, Homo sapien
gtcgggcagccgcacactatgagca

SEQ ID NO: 5844609 - DNA, 25 bp, Homo sapien
atttatccacggcactccgcgagct

SEQ ID NO: 5844610 - DNA, 25 bp, Homo sapien
cgcacactatgagcaacatgcagat

SEQ ID NO: 5844611 - DNA, 25 bp, Homo sapien
aacatgcagatctacagcgccagag

SEQ ID NO: 5844612 - DNA, 25 bp, Homo sapien
tacagcgccagagtgctgacgcctt

SEQ ID NO: 5844613 - DNA, 25 bp, Homo sapien
gagtgctgacgccttactggcaatg

SEQ ID NO: 5844614 - DNA, 25 bp, Homo sapien
tactggcaatgcttccacagcgtaa

SEQ ID NO: 5844615 - DNA, 25 bp, Homo sapien
gggttgtggacctggctggatgagc

SEQ ID NO: 5844616 - DNA, 25 bp, Homo sapien
tgagccgccactggcgggaacgtca

SEQ ID NO: 5844617 - DNA, 25 bp, Homo sapien
gcgcaggtgacggccttagatctct

SEQ ID NO: 5844618 - DNA, 25 bp, Homo sapien
gccttagatctctcgccgccaatgc

SEQ ID NO: 5844619 - DNA, 25 bp, Homo sapien
gccgccaatgcttgttcaggcacgc

SEQ ID NO: 5844620 - DNA, 25 bp, Homo sapien
tgttcaggcacgccagaaggatgcc

SEQ ID NO: 5844621 - DNA, 25 bp, Homo sapien
agaaggatgccgcagaccattatct

SEQ ID NO: 5844622 - DNA, 25 bp, Homo sapien
gccgcagaccattatctggcgggag

SEQ ID NO: 5844623 - DNA, 25 bp, Homo sapien
cgttagcgactgcgacgttcgatct

SEQ ID NO: 5844624 - DNA, 25 bp, Homo sapien
cgacgttcgatcttgcatggagcaa

SEQ ID NO: 5844625 - DNA, 25 bp, Homo sapien
gatcttgcatggagcaatctcgcag

SEQ ID NO: 5844626 - DNA, 25 bp, Homo sapien
cagcggcatttggtcgggcagccgc

SEQ ID NO: 5844627 - DNA, 25 bp, Homo sapien
caatctcgcagtgcagtggtgcggt

SEQ ID NO: 5844628 - DNA, 25 bp, Homo sapien
gtcgggcagccgcacactatgagca

SEQ ID NO: 5844629 - DNA, 25 bp, Homo sapien
atttatccacggcactccgcgagct

SEQ ID NO: 5844630 - DNA, 25 bp, Homo sapien
cgcacactatgagcaacatgcagat

SEQ ID NO: 5844631 - DNA, 25 bp, Homo sapien
aacatgcagatctacagcgccagag

SEQ ID NO: 5844632 - DNA, 25 bp, Homo sapien
tacagcgccagagtgctgacgcctt

SEQ ID NO: 5844633 - DNA, 25 bp, Homo sapien
gagtgctgacgccttactggcaatg

SEQ ID NO: 5844634 - DNA, 25 bp, Homo sapien
tactggcaatgcttccacagcgtaa

SEQ ID NO: 5844635 - DNA, 25 bp, Homo sapien
gggttgtggacctggctggatgagc

SEQ ID NO: 5844636 - DNA, 25 bp, Homo sapien
tgagccgccactggcgggaacgtca

SEQ ID NO: 5844637 - DNA, 25 bp, Homo sapien
gcgcaggtgacggccttagatctct

SEQ ID NO: 5844638 - DNA, 25 bp, Homo sapien
gccttagatctctcgccgccaatgc

SEQ ID NO: 5844639 - DNA, 25 bp, Homo sapien
gccgccaatgcttgttcaggcacgc

SEQ ID NO: 5844640 - DNA, 25 bp, Homo sapien
tgttcaggcacgccagaaggatgcc

SEQ ID NO: 5844641 - DNA, 25 bp, Homo sapien
agaaggatgccgcagaccattatct

SEQ ID NO: 5844642 - DNA, 25 bp, Homo sapien
gccgcagaccattatctggcgggag

SEQ ID NO: 5844643 - DNA, 25 bp, Homo sapien
cgttagcgactgcgacgttcgatct

SEQ ID NO: 5844644 - DNA, 25 bp, Homo sapien
cgacgttcgatcttgcatggagcaa

SEQ ID NO: 5844645 - DNA, 25 bp, Homo sapien
gatcttgcatggagcaatctcgcag

SEQ ID NO: 5844646 - DNA, 25 bp, Homo sapien
cagcggcatttggtcgggcagccgc

SEQ ID NO: 5844647 - DNA, 25 bp, Homo sapien
caatctcgcagtgcagtggtgcggt

SEQ ID NO: 5844648 - DNA, 25 bp, Homo sapien
gtcgggcagccgcacactatgagca

SEQ ID NO: 5844649 - DNA, 25 bp, Homo sapien
atttatccacggcactccgcgagct

SEQ ID NO: 5844650 - DNA, 25 bp, Homo sapien
cgcacactatgagcaacatgcagat

SEQ ID NO: 5844651 - DNA, 25 bp, Homo sapien
aacatgcagatctacagcgccagag

SEQ ID NO: 5844652 - DNA, 25 bp, Homo sapien
tacagcgccagagtgctgacgcctt

SEQ ID NO: 5844653 - DNA, 25 bp, Homo sapien
gagtgctgacgccttactggcaatg

SEQ ID NO: 5844654 - DNA, 25 bp, Homo sapien
tactggcaatgcttccacagcgtaa

SEQ ID NO: 5844655 - DNA, 25 bp, Homo sapien
gggttgtggacctggctggatgagc

SEQ ID NO: 5844656 - DNA, 25 bp, Homo sapien
tgagccgccactggcgggaacgtca

SEQ ID NO: 5844657 - DNA, 25 bp, Homo sapien
gcgcaggtgacggccttagatctct

SEQ ID NO: 5844658 - DNA, 25 bp, Homo sapien
gccttagatctctcgccgccaatgc

SEQ ID NO: 5844659 - DNA, 25 bp, Homo sapien
gccgccaatgcttgttcaggcacgc

SEQ ID NO: 5844660 - DNA, 25 bp, Homo sapien
tgttcaggcacgccagaaggatgcc

SEQ ID NO: 5844661 - DNA, 25 bp, Homo sapien
agaaggatgccgcagaccattatct

SEQ ID NO: 5844662 - DNA, 25 bp, Homo sapien
gccgcagaccattatctggcgggag

SEQ ID NO: 5844663 - DNA, 25 bp, Homo sapien
cgttagcgactgcgacgttcgatct

SEQ ID NO: 5844664 - DNA, 25 bp, Homo sapien
cgacgttcgatcttgcatggagcaa

SEQ ID NO: 5844665 - DNA, 25 bp, Homo sapien
gatcttgcatggagcaatctcgcag

SEQ ID NO: 5844666 - DNA, 25 bp, Homo sapien
cagcggcatttggtcgggcagccgc

SEQ ID NO: 5844667 - DNA, 25 bp, Homo sapien
caatctcgcagtgcagtggtgcggt

SEQ ID NO: 5844668 - DNA, 25 bp, Homo sapien
gtcgggcagccgcacactatgagca

SEQ ID NO: 5844669 - DNA, 25 bp, Homo sapien
atttatccacggcactccgcgagct

SEQ ID NO: 5844670 - DNA, 25 bp, Homo sapien
cgcacactatgagcaacatgcagat

SEQ ID NO: 5844671 - DNA, 25 bp, Homo sapien
aacatgcagatctacagcgccagag

SEQ ID NO: 5844672 - DNA, 25 bp, Homo sapien
tacagcgccagagtgctgacgcctt

SEQ ID NO: 5844673 - DNA, 25 bp, Homo sapien
gagtgctgacgccttactggcaatg

SEQ ID NO: 5844674 - DNA, 25 bp, Homo sapien
tactggcaatgcttccacagcgtaa

SEQ ID NO: 5844675 - DNA, 25 bp, Homo sapien
gggttgtggacctggctggatgagc

SEQ ID NO: 5844676 - DNA, 25 bp, Homo sapien
tgagccgccactggcgggaacgtca

SEQ ID NO: 5844677 - DNA, 25 bp, Homo sapien
gcgcaggtgacggccttagatctct

SEQ ID NO: 5844678 - DNA, 25 bp, Homo sapien
gccttagatctctcgccgccaatgc

SEQ ID NO: 5844679 - DNA, 25 bp, Homo sapien
gccgccaatgcttgttcaggcacgc

SEQ ID NO: 5844680 - DNA, 25 bp, Homo sapien
tgttcaggcacgccagaaggatgcc

SEQ ID NO: 5844681 - DNA, 25 bp, Homo sapien
agaaggatgccgcagaccattatct

SEQ ID NO: 5844682 - DNA, 25 bp, Homo sapien
gccgcagaccattatctggcgggag

SEQ ID NO: 5844683 - DNA, 25 bp, Homo sapien
cgttagcgactgcgacgttcgatct

SEQ ID NO: 5844684 - DNA, 25 bp, Homo sapien
cgacgttcgatcttgcatggagcaa

SEQ ID NO: 5844685 - DNA, 25 bp, Homo sapien
gatcttgcatggagcaatctcgcag

SEQ ID NO: 5844686 - DNA, 25 bp, Homo sapien
cagcggcatttggtcgggcagccgc

SEQ ID NO: 5844687 - DNA, 25 bp, Homo sapien
caatctcgcagtgcagtggtgcggt

SEQ ID NO: 5844688 - DNA, 25 bp, Homo sapien
gtcgggcagccgcacactatgagca

SEQ ID NO: 5844689 - DNA, 25 bp, Homo sapien
atttatccacggcactccgcgagct

SEQ ID NO: 5844690 - DNA, 25 bp, Homo sapien
cgcacactatgagcaacatgcagat

SEQ ID NO: 5844691 - DNA, 25 bp, Homo sapien
aacatgcagatctacagcgccagag

SEQ ID NO: 5844692 - DNA, 25 bp, Homo sapien
tacagcgccagagtgctgacgcctt

SEQ ID NO: 5844693 - DNA, 25 bp, Homo sapien
gagtgctgacgccttactggcaatg

SEQ ID NO: 5844694 - DNA, 25 bp, Homo sapien
tactggcaatgcttccacagcgtaa

SEQ ID NO: 5844695 - DNA, 25 bp, Homo sapien
gggttgtggacctggctggatgagc

SEQ ID NO: 5844696 - DNA, 25 bp, Homo sapien
tgagccgccactggcgggaacgtca

SEQ ID NO: 5844697 - DNA, 25 bp, Homo sapien
gcgcaggtgacggccttagatctct

SEQ ID NO: 5844698 - DNA, 25 bp, Homo sapien
gccttagatctctcgccgccaatgc

SEQ ID NO: 5844699 - DNA, 25 bp, Homo sapien
gccgccaatgcttgttcaggcacgc

SEQ ID NO: 5844700 - DNA, 25 bp, Homo sapien
tgttcaggcacgccagaaggatgcc

SEQ ID NO: 5844701 - DNA, 25 bp, Homo sapien
agaaggatgccgcagaccattatct

SEQ ID NO: 5844702 - DNA, 25 bp, Homo sapien
gccgcagaccattatctggcgggag

SEQ ID NO: 5844703 - DNA, 25 bp, Homo sapien
cgttagcgactgcgacgttcgatct

SEQ ID NO: 5844704 - DNA, 25 bp, Homo sapien
cgacgttcgatcttgcatggagcaa

SEQ ID NO: 5844705 - DNA, 25 bp, Homo sapien
gatcttgcatggagcaatctcgcag

SEQ ID NO: 5844706 - DNA, 25 bp, Homo sapien
cagcggcatttggtcgggcagccgc

SEQ ID NO: 5844707 - DNA, 25 bp, Homo sapien
caatctcgcagtgcagtggtgcggt

SEQ ID NO: 5844708 - DNA, 25 bp, Homo sapien
gtcgggcagccgcacactatgagca

SEQ ID NO: 5844709 - DNA, 25 bp, Homo sapien
atttatccacggcactccgcgagct

SEQ ID NO: 5844710 - DNA, 25 bp, Homo sapien
cgcacactatgagcaacatgcagat

SEQ ID NO: 5844711 - DNA, 25 bp, Homo sapien
aacatgcagatctacagcgccagag

SEQ ID NO: 5844712 - DNA, 25 bp, Homo sapien
tacagcgccagagtgctgacgcctt

SEQ ID NO: 5844713 - DNA, 25 bp, Homo sapien
gagtgctgacgccttactggcaatg

SEQ ID NO: 5844714 - DNA, 25 bp, Homo sapien
tactggcaatgcttccacagcgtaa

SEQ ID NO: 5844715 - DNA, 25 bp, Homo sapien
gggttgtggacctggctggatgagc

SEQ ID NO: 5844716 - DNA, 25 bp, Homo sapien
tgagccgccactggcgggaacgtca

SEQ ID NO: 5844717 - DNA, 25 bp, Homo sapien
gcgcaggtgacggccttagatctct

SEQ ID NO: 5844718 - DNA, 25 bp, Homo sapien
gccttagatctctcgccgccaatgc

SEQ ID NO: 5844719 - DNA, 25 bp, Homo sapien
gccgccaatgcttgttcaggcacgc

SEQ ID NO: 5844720 - DNA, 25 bp, Homo sapien
tgttcaggcacgccagaaggatgcc

SEQ ID NO: 5844721 - DNA, 25 bp, Homo sapien
agaaggatgccgcagaccattatct

SEQ ID NO: 5844722 - DNA, 25 bp, Homo sapien
gccgcagaccattatctggcgggag

SEQ ID NO: 5844723 - DNA, 25 bp, Homo sapien
cgttagcgactgcgacgttcgatct

SEQ ID NO: 5844724 - DNA, 25 bp, Homo sapien
cgacgttcgatcttgcatggagcaa

SEQ ID NO: 5844725 - DNA, 25 bp, Homo sapien
gatcttgcatggagcaatctcgcag

SEQ ID NO: 5844726 - DNA, 25 bp, Homo sapien
cagcggcatttggtcgggcagccgc

SEQ ID NO: 5844727 - DNA, 25 bp, Homo sapien
caatctcgcagtgcagtggtgcggt

SEQ ID NO: 5844728 - DNA, 25 bp, Homo sapien
gtcgggcagccgcacactatgagca

SEQ ID NO: 5844729 - DNA, 25 bp, Homo sapien
atttatccacggcactccgcgagct

SEQ ID NO: 5844730 - DNA, 25 bp, Homo sapien
cgcacactatgagcaacatgcagat

SEQ ID NO: 5844731 - DNA, 25 bp, Homo sapien
aacatgcagatctacagcgccagag

SEQ ID NO: 5844732 - DNA, 25 bp, Homo sapien
tacagcgccagagtgctgacgcctt

SEQ ID NO: 5844733 - DNA, 25 bp, Homo sapien
gagtgctgacgccttactggcaatg

SEQ ID NO: 5844734 - DNA, 25 bp, Homo sapien
tactggcaatgcttccacagcgtaa

SEQ ID NO: 5844735 - DNA, 25 bp, Homo sapien
gggttgtggacctggctggatgagc

SEQ ID NO: 5844736 - DNA, 25 bp, Homo sapien
tgagccgccactggcgggaacgtca

SEQ ID NO: 5844737 - DNA, 25 bp, Homo sapien
gcgcaggtgacggccttagatctct

SEQ ID NO: 5844738 - DNA, 25 bp, Homo sapien
gccttagatctctcgccgccaatgc

SEQ ID NO: 5844739 - DNA, 25 bp, Homo sapien
gccgccaatgcttgttcaggcacgc

SEQ ID NO: 5844740 - DNA, 25 bp, Homo sapien
tgttcaggcacgccagaaggatgcc

SEQ ID NO: 5844741 - DNA, 25 bp, Homo sapien
agaaggatgccgcagaccattatct

SEQ ID NO: 5844742 - DNA, 25 bp, Homo sapien
gccgcagaccattatctggcgggag

SEQ ID NO: 5844743 - DNA, 25 bp, Homo sapien
cgttagcgactgcgacgttcgatct

SEQ ID NO: 5844744 - DNA, 25 bp, Homo sapien
cgacgttcgatcttgcatggagcaa

SEQ ID NO: 5844745 - DNA, 25 bp, Homo sapien
gatcttgcatggagcaatctcgcag

SEQ ID NO: 5844746 - DNA, 25 bp, Homo sapien
cagcggcatttggtcgggcagccgc

SEQ ID NO: 5844747 - DNA, 25 bp, Homo sapien
caatctcgcagtgcagtggtgcggt

SEQ ID NO: 5844748 - DNA, 25 bp, Homo sapien
gtcgggcagccgcacactatgagca

SEQ ID NO: 5844749 - DNA, 25 bp, Homo sapien
atttatccacggcactccgcgagct

SEQ ID NO: 5844750 - DNA, 25 bp, Homo sapien
cgcacactatgagcaacatgcagat

SEQ ID NO: 5844751 - DNA, 25 bp, Homo sapien
aacatgcagatctacagcgccagag

SEQ ID NO: 5844752 - DNA, 25 bp, Homo sapien
tacagcgccagagtgctgacgcctt

SEQ ID NO: 5844753 - DNA, 25 bp, Homo sapien
gagtgctgacgccttactggcaatg

SEQ ID NO: 5844754 - DNA, 25 bp, Homo sapien
tactggcaatgcttccacagcgtaa

SEQ ID NO: 5844755 - DNA, 25 bp, Homo sapien
gggttgtggacctggctggatgagc

SEQ ID NO: 5844756 - DNA, 25 bp, Homo sapien
tgagccgccactggcgggaacgtca

SEQ ID NO: 5844757 - DNA, 25 bp, Homo sapien
gcgcaggtgacggccttagatctct

SEQ ID NO: 5844758 - DNA, 25 bp, Homo sapien
gccttagatctctcgccgccaatgc

SEQ ID NO: 5844759 - DNA, 25 bp, Homo sapien
gccgccaatgcttgttcaggcacgc

SEQ ID NO: 5844760 - DNA, 25 bp, Homo sapien
tgttcaggcacgccagaaggatgcc

SEQ ID NO: 5844761 - DNA, 25 bp, Homo sapien
agaaggatgccgcagaccattatct

SEQ ID NO: 5844762 - DNA, 25 bp, Homo sapien
gccgcagaccattatctggcgggag

SEQ ID NO: 5844763 - DNA, 25 bp, Homo sapien
cgttagcgactgcgacgttcgatct

SEQ ID NO: 5844764 - DNA, 25 bp, Homo sapien
cgacgttcgatcttgcatggagcaa

SEQ ID NO: 5844765 - DNA, 25 bp, Homo sapien
gatcttgcatggagcaatctcgcag

SEQ ID NO: 5844766 - DNA, 25 bp, Homo sapien
cagcggcatttggtcgggcagccgc

SEQ ID NO: 5844767 - DNA, 25 bp, Homo sapien
caatctcgcagtgcagtggtgcggt

SEQ ID NO: 5844768 - DNA, 25 bp, Homo sapien
gtcgggcagccgcacactatgagca

SEQ ID NO: 5844769 - DNA, 25 bp, Homo sapien
atttatccacggcactccgcgagct

SEQ ID NO: 5844770 - DNA, 25 bp, Homo sapien
cgcacactatgagcaacatgcagat

SEQ ID NO: 5844771 - DNA, 25 bp, Homo sapien
aacatgcagatctacagcgccagag

SEQ ID NO: 5844772 - DNA, 25 bp, Homo sapien
tacagcgccagagtgctgacgcctt

SEQ ID NO: 5844773 - DNA, 25 bp, Homo sapien
gagtgctgacgccttactggcaatg

SEQ ID NO: 5844774 - DNA, 25 bp, Homo sapien
tactggcaatgcttccacagcgtaa

SEQ ID NO: 5844775 - DNA, 25 bp, Homo sapien
gggttgtggacctggctggatgagc

SEQ ID NO: 5844776 - DNA, 25 bp, Homo sapien
tgagccgccactggcgggaacgtca

SEQ ID NO: 5844777 - DNA, 25 bp, Homo sapien
gcgcaggtgacggccttagatctct

SEQ ID NO: 5844778 - DNA, 25 bp, Homo sapien
gccttagatctctcgccgccaatgc

SEQ ID NO: 5844779 - DNA, 25 bp, Homo sapien
gccgccaatgcttgttcaggcacgc

SEQ ID NO: 5844780 - DNA, 25 bp, Homo sapien
tgttcaggcacgccagaaggatgcc

SEQ ID NO: 5844781 - DNA, 25 bp, Homo sapien
agaaggatgccgcagaccattatct

SEQ ID NO: 5844782 - DNA, 25 bp, Homo sapien
gccgcagaccattatctggcgggag

SEQ ID NO: 5844783 - DNA, 25 bp, Homo sapien
cgttagcgactgcgacgttcgatct

SEQ ID NO: 5844784 - DNA, 25 bp, Homo sapien
cgacgttcgatcttgcatggagcaa

SEQ ID NO: 5844785 - DNA, 25 bp, Homo sapien
gatcttgcatggagcaatctcgcag

SEQ ID NO: 5844786 - DNA, 25 bp, Homo sapien
cagcggcatttggtcgggcagccgc

SEQ ID NO: 5844787 - DNA, 25 bp, Homo sapien
caatctcgcagtgcagtggtgcggt

SEQ ID NO: 5844788 - DNA, 25 bp, Homo sapien
gtcgggcagccgcacactatgagca

SEQ ID NO: 5844789 - DNA, 25 bp, Homo sapien
atttatccacggcactccgcgagct

SEQ ID NO: 5844790 - DNA, 25 bp, Homo sapien
cgcacactatgagcaacatgcagat

SEQ ID NO: 5844791 - DNA, 25 bp, Homo sapien
aacatgcagatctacagcgccagag

SEQ ID NO: 5844792 - DNA, 25 bp, Homo sapien
tacagcgccagagtgctgacgcctt

SEQ ID NO: 5844793 - DNA, 25 bp, Homo sapien
gagtgctgacgccttactggcaatg

SEQ ID NO: 5844794 - DNA, 25 bp, Homo sapien
tactggcaatgcttccacagcgtaa

SEQ ID NO: 5844795 - DNA, 25 bp, Homo sapien
gggttgtggacctggctggatgagc

SEQ ID NO: 5844796 - DNA, 25 bp, Homo sapien
tgagccgccactggcgggaacgtca

SEQ ID NO: 5844797 - DNA, 25 bp, Homo sapien
gcgcaggtgacggccttagatctct

SEQ ID NO: 5844798 - DNA, 25 bp, Homo sapien
gccttagatctctcgccgccaatgc

SEQ ID NO: 5844799 - DNA, 25 bp, Homo sapien
gccgccaatgcttgttcaggcacgc

SEQ ID NO: 5844800 - DNA, 25 bp, Homo sapien
tgttcaggcacgccagaaggatgcc

SEQ ID NO: 5844801 - DNA, 25 bp, Homo sapien
agaaggatgccgcagaccattatct

SEQ ID NO: 5844802 - DNA, 25 bp, Homo sapien
gccgcagaccattatctggcgggag

SEQ ID NO: 5844803 - DNA, 25 bp, Homo sapien
cgttagcgactgcgacgttcgatct

SEQ ID NO: 5844804 - DNA, 25 bp, Homo sapien
cgacgttcgatcttgcatggagcaa

SEQ ID NO: 5844805 - DNA, 25 bp, Homo sapien
gatcttgcatggagcaatctcgcag

SEQ ID NO: 5844806 - DNA, 25 bp, Homo sapien
cagcggcatttggtcgggcagccgc

SEQ ID NO: 5844807 - DNA, 25 bp, Homo sapien
caatctcgcagtgcagtggtgcggt

SEQ ID NO: 5844808 - DNA, 25 bp, Homo sapien
gtcgggcagccgcacactatgagca

SEQ ID NO: 5844809 - DNA, 25 bp, Homo sapien
atttatccacggcactccgcgagct

SEQ ID NO: 5844810 - DNA, 25 bp, Homo sapien
cgcacactatgagcaacatgcagat

SEQ ID NO: 5844811 - DNA, 25 bp, Homo sapien
aacatgcagatctacagcgccagag

SEQ ID NO: 5844812 - DNA, 25 bp, Homo sapien
tacagcgccagagtgctgacgcctt

SEQ ID NO: 5844813 - DNA, 25 bp, Homo sapien
gagtgctgacgccttactggcaatg

SEQ ID NO: 5844814 - DNA, 25 bp, Homo sapien
tactggcaatgcttccacagcgtaa

SEQ ID NO: 5844815 - DNA, 25 bp, Homo sapien
gggttgtggacctggctggatgagc

SEQ ID NO: 5844816 - DNA, 25 bp, Homo sapien
tgagccgccactggcgggaacgtca

SEQ ID NO: 5844817 - DNA, 25 bp, Homo sapien
gcgcaggtgacggccttagatctct

SEQ ID NO: 5844818 - DNA, 25 bp, Homo sapien
gccttagatctctcgccgccaatgc

SEQ ID NO: 5844819 - DNA, 25 bp, Homo sapien
gccgccaatgcttgttcaggcacgc

SEQ ID NO: 5844820 - DNA, 25 bp, Homo sapien
tgttcaggcacgccagaaggatgcc

SEQ ID NO: 5844821 - DNA, 25 bp, Homo sapien
agaaggatgccgcagaccattatct

SEQ ID NO: 5844822 - DNA, 25 bp, Homo sapien
gccgcagaccattatctggcgggag

SEQ ID NO: 5844823 - DNA, 25 bp, Homo sapien
cgttagcgactgcgacgttcgatct

SEQ ID NO: 5844824 - DNA, 25 bp, Homo sapien
cgacgttcgatcttgcatggagcaa

SEQ ID NO: 5844825 - DNA, 25 bp, Homo sapien
gatcttgcatggagcaatctcgcag

SEQ ID NO: 5844826 - DNA, 25 bp, Homo sapien
cagcggcatttggtcgggcagccgc

SEQ ID NO: 5844827 - DNA, 25 bp, Homo sapien
caatctcgcagtgcagtggtgcggt

SEQ ID NO: 5844828 - DNA, 25 bp, Homo sapien
gtcgggcagccgcacactatgagca

SEQ ID NO: 5844829 - DNA, 25 bp, Homo sapien
atttatccacggcactccgcgagct

SEQ ID NO: 5844830 - DNA, 25 bp, Homo sapien
cgcacactatgagcaacatgcagat

SEQ ID NO: 5844831 - DNA, 25 bp, Homo sapien
aacatgcagatctacagcgccagag

SEQ ID NO: 5844832 - DNA, 25 bp, Homo sapien
tacagcgccagagtgctgacgcctt

SEQ ID NO: 5844833 - DNA, 25 bp, Homo sapien
gagtgctgacgccttactggcaatg

SEQ ID NO: 5844834 - DNA, 25 bp, Homo sapien
tactggcaatgcttccacagcgtaa

SEQ ID NO: 5844835 - DNA, 25 bp, Homo sapien
gggttgtggacctggctggatgagc

SEQ ID NO: 5844836 - DNA, 25 bp, Homo sapien
tgagccgccactggcgggaacgtca

SEQ ID NO: 5844837 - DNA, 25 bp, Homo sapien
gcgcaggtgacggccttagatctct

SEQ ID NO: 5844838 - DNA, 25 bp, Homo sapien
gccttagatctctcgccgccaatgc

SEQ ID NO: 5844839 - DNA, 25 bp, Homo sapien
gccgccaatgcttgttcaggcacgc

SEQ ID NO: 5844840 - DNA, 25 bp, Homo sapien
tgttcaggcacgccagaaggatgcc

SEQ ID NO: 5844841 - DNA, 25 bp, Homo sapien
agaaggatgccgcagaccattatct

SEQ ID NO: 5844842 - DNA, 25 bp, Homo sapien
gccgcagaccattatctggcgggag

SEQ ID NO: 5844843 - DNA, 25 bp, Homo sapien
cgttagcgactgcgacgttcgatct

SEQ ID NO: 5844844 - DNA, 25 bp, Homo sapien
cgacgttcgatcttgcatggagcaa

SEQ ID NO: 5844845 - DNA, 25 bp, Homo sapien
gatcttgcatggagcaatctcgcag

SEQ ID NO: 5844846 - DNA, 25 bp, Homo sapien
cagcggcatttggtcgggcagccgc

SEQ ID NO: 5844847 - DNA, 25 bp, Homo sapien
caatctcgcagtgcagtggtgcggt

SEQ ID NO: 5844848 - DNA, 25 bp, Homo sapien
gtcgggcagccgcacactatgagca

SEQ ID NO: 5844849 - DNA, 25 bp, Homo sapien
atttatccacggcactccgcgagct

SEQ ID NO: 5844850 - DNA, 25 bp, Homo sapien
cgcacactatgagcaacatgcagat

SEQ ID NO: 5844851 - DNA, 25 bp, Homo sapien
aacatgcagatctacagcgccagag

SEQ ID NO: 5844852 - DNA, 25 bp, Homo sapien
tacagcgccagagtgctgacgcctt

SEQ ID NO: 5844853 - DNA, 25 bp, Homo sapien
gagtgctgacgccttactggcaatg

SEQ ID NO: 5844854 - DNA, 25 bp, Homo sapien
tactggcaatgcttccacagcgtaa

SEQ ID NO: 5844855 - DNA, 25 bp, Homo sapien
gggttgtggacctggctggatgagc

SEQ ID NO: 5844856 - DNA, 25 bp, Homo sapien
tgagccgccactggcgggaacgtca

SEQ ID NO: 5844857 - DNA, 25 bp, Homo sapien
gcgcaggtgacggccttagatctct

SEQ ID NO: 5844858 - DNA, 25 bp, Homo sapien
gccttagatctctcgccgccaatgc

SEQ ID NO: 5844859 - DNA, 25 bp, Homo sapien
gccgccaatgcttgttcaggcacgc

SEQ ID NO: 5844860 - DNA, 25 bp, Homo sapien
tgttcaggcacgccagaaggatgcc

SEQ ID NO: 5844861 - DNA, 25 bp, Homo sapien
agaaggatgccgcagaccattatct

SEQ ID NO: 5844862 - DNA, 25 bp, Homo sapien
gccgcagaccattatctggcgggag

SEQ ID NO: 5844863 - DNA, 25 bp, Homo sapien
cgttagcgactgcgacgttcgatct

SEQ ID NO: 5844864 - DNA, 25 bp, Homo sapien
cgacgttcgatcttgcatggagcaa

SEQ ID NO: 5844865 - DNA, 25 bp, Homo sapien
gatcttgcatggagcaatctcgcag

SEQ ID NO: 5844866 - DNA, 25 bp, Homo sapien
cagcggcatttggtcgggcagccgc

SEQ ID NO: 5844867 - DNA, 25 bp, Homo sapien
caatctcgcagtgcagtggtgcggt

SEQ ID NO: 5844868 - DNA, 25 bp, Homo sapien
gtcgggcagccgcacactatgagca

SEQ ID NO: 5844869 - DNA, 25 bp, Homo sapien
atttatccacggcactccgcgagct

SEQ ID NO: 5844870 - DNA, 25 bp, Homo sapien
cgcacactatgagcaacatgcagat

SEQ ID NO: 5844871 - DNA, 25 bp, Homo sapien
aacatgcagatctacagcgccagag

SEQ ID NO: 5844872 - DNA, 25 bp, Homo sapien
tacagcgccagagtgctgacgcctt

SEQ ID NO: 5844873 - DNA, 25 bp, Homo sapien
gagtgctgacgccttactggcaatg

SEQ ID NO: 5844874 - DNA, 25 bp, Homo sapien
tactggcaatgcttccacagcgtaa

SEQ ID NO: 5844875 - DNA, 25 bp, Homo sapien
gggttgtggacctggctggatgagc

SEQ ID NO: 5844876 - DNA, 25 bp, Homo sapien
tgagccgccactggcgggaacgtca

SEQ ID NO: 5844877 - DNA, 25 bp, Homo sapien
gcgcaggtgacggccttagatctct

SEQ ID NO: 5844878 - DNA, 25 bp, Homo sapien
gccttagatctctcgccgccaatgc

SEQ ID NO: 5844879 - DNA, 25 bp, Homo sapien
gccgccaatgcttgttcaggcacgc

SEQ ID NO: 5844880 - DNA, 25 bp, Homo sapien
tgttcaggcacgccagaaggatgcc

SEQ ID NO: 5844881 - DNA, 25 bp, Homo sapien
agaaggatgccgcagaccattatct

SEQ ID NO: 5844882 - DNA, 25 bp, Homo sapien
gccgcagaccattatctggcgggag

SEQ ID NO: 5844883 - DNA, 25 bp, Homo sapien
cgttagcgactgcgacgttcgatct

SEQ ID NO: 5844884 - DNA, 25 bp, Homo sapien
cgacgttcgatcttgcatggagcaa

SEQ ID NO: 5844885 - DNA, 25 bp, Homo sapien
gatcttgcatggagcaatctcgcag

SEQ ID NO: 5844886 - DNA, 25 bp, Homo sapien
cagcggcatttggtcgggcagccgc

SEQ ID NO: 5844887 - DNA, 25 bp, Homo sapien
caatctcgcagtgcagtggtgcggt

SEQ ID NO: 5844888 - DNA, 25 bp, Homo sapien
gtcgggcagccgcacactatgagca

SEQ ID NO: 5844889 - DNA, 25 bp, Homo sapien
atttatccacggcactccgcgagct

SEQ ID NO: 5844890 - DNA, 25 bp, Homo sapien
cgcacactatgagcaacatgcagat

SEQ ID NO: 5844891 - DNA, 25 bp, Homo sapien
aacatgcagatctacagcgccagag

SEQ ID NO: 5844892 - DNA, 25 bp, Homo sapien
tacagcgccagagtgctgacgcctt

SEQ ID NO: 5844893 - DNA, 25 bp, Homo sapien
gagtgctgacgccttactggcaatg

SEQ ID NO: 5844894 - DNA, 25 bp, Homo sapien
tactggcaatgcttccacagcgtaa

SEQ ID NO: 5844895 - DNA, 25 bp, Homo sapien
gggttgtggacctggctggatgagc

SEQ ID NO: 5844896 - DNA, 25 bp, Homo sapien
tgagccgccactggcgggaacgtca

SEQ ID NO: 5844897 - DNA, 25 bp, Homo sapien
gcgcaggtgacggccttagatctct

SEQ ID NO: 5844898 - DNA, 25 bp, Homo sapien
gccttagatctctcgccgccaatgc

SEQ ID NO: 5844899 - DNA, 25 bp, Homo sapien
gccgccaatgcttgttcaggcacgc

SEQ ID NO: 5844900 - DNA, 25 bp, Homo sapien
tgttcaggcacgccagaaggatgcc

SEQ ID NO: 5844901 - DNA, 25 bp, Homo sapien
agaaggatgccgcagaccattatct

SEQ ID NO: 5844902 - DNA, 25 bp, Homo sapien
gccgcagaccattatctggcgggag

SEQ ID NO: 5844903 - DNA, 25 bp, Homo sapien
cgttagcgactgcgacgttcgatct

SEQ ID NO: 5844904 - DNA, 25 bp, Homo sapien
cgacgttcgatcttgcatggagcaa

SEQ ID NO: 5844905 - DNA, 25 bp, Homo sapien
gatcttgcatggagcaatctcgcag

SEQ ID NO: 5844906 - DNA, 25 bp, Homo sapien
cagcggcatttggtcgggcagccgc

SEQ ID NO: 5844907 - DNA, 25 bp, Homo sapien
caatctcgcagtgcagtggtgcggt

SEQ ID NO: 5844908 - DNA, 25 bp, Homo sapien
gtcgggcagccgcacactatgagca

SEQ ID NO: 5844909 - DNA, 25 bp, Homo sapien
atttatccacggcactccgcgagct

SEQ ID NO: 5844910 - DNA, 25 bp, Homo sapien
cgcacactatgagcaacatgcagat

SEQ ID NO: 5844911 - DNA, 25 bp, Homo sapien
aacatgcagatctacagcgccagag

SEQ ID NO: 5844912 - DNA, 25 bp, Homo sapien
tacagcgccagagtgctgacgcctt

SEQ ID NO: 5844913 - DNA, 25 bp, Homo sapien
gagtgctgacgccttactggcaatg

SEQ ID NO: 5844914 - DNA, 25 bp, Homo sapien
tactggcaatgcttccacagcgtaa

SEQ ID NO: 5844915 - DNA, 25 bp, Homo sapien
gggttgtggacctggctggatgagc

SEQ ID NO: 5844916 - DNA, 25 bp, Homo sapien
tgagccgccactggcgggaacgtca

SEQ ID NO: 5844917 - DNA, 25 bp, Homo sapien
gcgcaggtgacggccttagatctct

SEQ ID NO: 5844918 - DNA, 25 bp, Homo sapien
gccttagatctctcgccgccaatgc

SEQ ID NO: 5844919 - DNA, 25 bp, Homo sapien
gccgccaatgcttgttcaggcacgc

SEQ ID NO: 5844920 - DNA, 25 bp, Homo sapien
tgttcaggcacgccagaaggatgcc

SEQ ID NO: 5844921 - DNA, 25 bp, Homo sapien
agaaggatgccgcagaccattatct

SEQ ID NO: 5844922 - DNA, 25 bp, Homo sapien
gccgcagaccattatctggcgggag

SEQ ID NO: 5844923 - DNA, 25 bp, Homo sapien
cgttagcgactgcgacgttcgatct

SEQ ID NO: 5844924 - DNA, 25 bp, Homo sapien
cgacgttcgatcttgcatggagcaa

SEQ ID NO: 5844925 - DNA, 25 bp, Homo sapien
gatcttgcatggagcaatctcgcag

SEQ ID NO: 5844926 - DNA, 25 bp, Homo sapien
cagcggcatttggtcgggcagccgc

SEQ ID NO: 5844927 - DNA, 25 bp, Homo sapien
caatctcgcagtgcagtggtgcggt

SEQ ID NO: 5844928 - DNA, 25 bp, Homo sapien
gtcgggcagccgcacactatgagca

SEQ ID NO: 5844929 - DNA, 25 bp, Homo sapien
atttatccacggcactccgcgagct

SEQ ID NO: 5844930 - DNA, 25 bp, Homo sapien
cgcacactatgagcaacatgcagat

SEQ ID NO: 5844931 - DNA, 25 bp, Homo sapien
aacatgcagatctacagcgccagag

SEQ ID NO: 5844932 - DNA, 25 bp, Homo sapien
tacagcgccagagtgctgacgcctt

SEQ ID NO: 5844933 - DNA, 25 bp, Homo sapien
gagtgctgacgccttactggcaatg

SEQ ID NO: 5844934 - DNA, 25 bp, Homo sapien
tactggcaatgcttccacagcgtaa

SEQ ID NO: 5844935 - DNA, 25 bp, Homo sapien
gggttgtggacctggctggatgagc

SEQ ID NO: 5844936 - DNA, 25 bp, Homo sapien
tgagccgccactggcgggaacgtca

SEQ ID NO: 5844937 - DNA, 25 bp, Homo sapien
gcgcaggtgacggccttagatctct

SEQ ID NO: 5844938 - DNA, 25 bp, Homo sapien
gccttagatctctcgccgccaatgc

SEQ ID NO: 5844939 - DNA, 25 bp, Homo sapien
gccgccaatgcttgttcaggcacgc

SEQ ID NO: 5844940 - DNA, 25 bp, Homo sapien
tgttcaggcacgccagaaggatgcc

SEQ ID NO: 5844941 - DNA, 25 bp, Homo sapien
agaaggatgccgcagaccattatct

SEQ ID NO: 5844942 - DNA, 25 bp, Homo sapien
gccgcagaccattatctggcgggag

SEQ ID NO: 5844943 - DNA, 25 bp, Homo sapien
cgttagcgactgcgacgttcgatct

SEQ ID NO: 5844944 - DNA, 25 bp, Homo sapien
cgacgttcgatcttgcatggagcaa

SEQ ID NO: 5844945 - DNA, 25 bp, Homo sapien
gatcttgcatggagcaatctcgcag

SEQ ID NO: 5844946 - DNA, 25 bp, Homo sapien
cagcggcatttggtcgggcagccgc

SEQ ID NO: 5844947 - DNA, 25 bp, Homo sapien
caatctcgcagtgcagtggtgcggt

SEQ ID NO: 5844948 - DNA, 25 bp, Homo sapien
gtcgggcagccgcacactatgagca

SEQ ID NO: 5844949 - DNA, 25 bp, Homo sapien
atttatccacggcactccgcgagct

SEQ ID NO: 5844950 - DNA, 25 bp, Homo sapien
cgcacactatgagcaacatgcagat

SEQ ID NO: 5844951 - DNA, 25 bp, Homo sapien
aacatgcagatctacagcgccagag

SEQ ID NO: 5844952 - DNA, 25 bp, Homo sapien
tacagcgccagagtgctgacgcctt

SEQ ID NO: 5844953 - DNA, 25 bp, Homo sapien
gagtgctgacgccttactggcaatg

SEQ ID NO: 5844954 - DNA, 25 bp, Homo sapien
tactggcaatgcttccacagcgtaa

SEQ ID NO: 5844955 - DNA, 25 bp, Homo sapien
gggttgtggacctggctggatgagc

SEQ ID NO: 5844956 - DNA, 25 bp, Homo sapien
tgagccgccactggcgggaacgtca

SEQ ID NO: 5844957 - DNA, 25 bp, Homo sapien
gcgcaggtgacggccttagatctct

SEQ ID NO: 5844958 - DNA, 25 bp, Homo sapien
gccttagatctctcgccgccaatgc

SEQ ID NO: 5844959 - DNA, 25 bp, Homo sapien
gccgccaatgcttgttcaggcacgc

SEQ ID NO: 5844960 - DNA, 25 bp, Homo sapien
tgttcaggcacgccagaaggatgcc

SEQ ID NO: 5844961 - DNA, 25 bp, Homo sapien
agaaggatgccgcagaccattatct

SEQ ID NO: 5844962 - DNA, 25 bp, Homo sapien
gccgcagaccattatctggcgggag

SEQ ID NO: 5844963 - DNA, 25 bp, Homo sapien
cgttagcgactgcgacgttcgatct

SEQ ID NO: 5844964 - DNA, 25 bp, Homo sapien
cgacgttcgatcttgcatggagcaa

SEQ ID NO: 5844965 - DNA, 25 bp, Homo sapien
gatcttgcatggagcaatctcgcag

SEQ ID NO: 5844966 - DNA, 25 bp, Homo sapien
cagcggcatttggtcgggcagccgc

SEQ ID NO: 5844967 - DNA, 25 bp, Homo sapien
caatctcgcagtgcagtggtgcggt

SEQ ID NO: 5844968 - DNA, 25 bp, Homo sapien
gtcgggcagccgcacactatgagca

SEQ ID NO: 5844969 - DNA, 25 bp, Homo sapien
atttatccacggcactccgcgagct

SEQ ID NO: 5844970 - DNA, 25 bp, Homo sapien
cgcacactatgagcaacatgcagat

SEQ ID NO: 5844971 - DNA, 25 bp, Homo sapien
aacatgcagatctacagcgccagag

SEQ ID NO: 5844972 - DNA, 25 bp, Homo sapien
tacagcgccagagtgctgacgcctt

SEQ ID NO: 5844973 - DNA, 25 bp, Homo sapien
gagtgctgacgccttactggcaatg

SEQ ID NO: 5844974 - DNA, 25 bp, Homo sapien
tactggcaatgcttccacagcgtaa

SEQ ID NO: 5844975 - DNA, 25 bp, Homo sapien
gggttgtggacctggctggatgagc

SEQ ID NO: 5844976 - DNA, 25 bp, Homo sapien
tgagccgccactggcgggaacgtca

SEQ ID NO: 5844977 - DNA, 25 bp, Homo sapien
gcgcaggtgacggccttagatctct

SEQ ID NO: 5844978 - DNA, 25 bp, Homo sapien
gccttagatctctcgccgccaatgc

SEQ ID NO: 5844979 - DNA, 25 bp, Homo sapien
gccgccaatgcttgttcaggcacgc

SEQ ID NO: 5844980 - DNA, 25 bp, Homo sapien
tgttcaggcacgccagaaggatgcc

SEQ ID NO: 5844981 - DNA, 25 bp, Homo sapien
agaaggatgccgcagaccattatct

SEQ ID NO: 5844982 - DNA, 25 bp, Homo sapien
gccgcagaccattatctggcgggag

SEQ ID NO: 5844983 - DNA, 25 bp, Homo sapien
cgttagcgactgcgacgttcgatct

SEQ ID NO: 5844984 - DNA, 25 bp, Homo sapien
cgacgttcgatcttgcatggagcaa

SEQ ID NO: 5844985 - DNA, 25 bp, Homo sapien
gatcttgcatggagcaatctcgcag

SEQ ID NO: 5844986 - DNA, 25 bp, Homo sapien
cagcggcatttggtcgggcagccgc

SEQ ID NO: 5844987 - DNA, 25 bp, Homo sapien
caatctcgcagtgcagtggtgcggt

SEQ ID NO: 5844988 - DNA, 25 bp, Homo sapien
gtcgggcagccgcacactatgagca

SEQ ID NO: 5844989 - DNA, 25 bp, Homo sapien
atttatccacggcactccgcgagct

SEQ ID NO: 5844990 - DNA, 25 bp, Homo sapien
cgcacactatgagcaacatgcagat

SEQ ID NO: 5844991 - DNA, 25 bp, Homo sapien
aacatgcagatctacagcgccagag

SEQ ID NO: 5844992 - DNA, 25 bp, Homo sapien
tacagcgccagagtgctgacgcctt

SEQ ID NO: 5844993 - DNA, 25 bp, Homo sapien
gagtgctgacgccttactggcaatg

SEQ ID NO: 5844994 - DNA, 25 bp, Homo sapien
tactggcaatgcttccacagcgtaa

SEQ ID NO: 5844995 - DNA, 25 bp, Homo sapien
gggttgtggacctggctggatgagc

SEQ ID NO: 5844996 - DNA, 25 bp, Homo sapien
tgagccgccactggcgggaacgtca

SEQ ID NO: 5844997 - DNA, 25 bp, Homo sapien
gcgcaggtgacggccttagatctct

SEQ ID NO: 5844998 - DNA, 25 bp, Homo sapien
gccttagatctctcgccgccaatgc

SEQ ID NO: 5844999 - DNA, 25 bp, Homo sapien
gccgccaatgcttgttcaggcacgc

SEQ ID NO: 5845000 - DNA, 25 bp, Homo sapien
tgttcaggcacgccagaaggatgcc

SEQ ID NO: 5845001 - DNA, 25 bp, Homo sapien
agaaggatgccgcagaccattatct

SEQ ID NO: 5845002 - DNA, 25 bp, Homo sapien
gccgcagaccattatctggcgggag

SEQ ID NO: 5845003 - DNA, 25 bp, Homo sapien
cgttagcgactgcgacgttcgatct

SEQ ID NO: 5845004 - DNA, 25 bp, Homo sapien
cgacgttcgatcttgcatggagcaa

SEQ ID NO: 5845005 - DNA, 25 bp, Homo sapien
gatcttgcatggagcaatctcgcag

SEQ ID NO: 5845006 - DNA, 25 bp, Homo sapien
cagcggcatttggtcgggcagccgc

SEQ ID NO: 5845007 - DNA, 25 bp, Homo sapien
caatctcgcagtgcagtggtgcggt

SEQ ID NO: 5845008 - DNA, 25 bp, Homo sapien
gtcgggcagccgcacactatgagca

SEQ ID NO: 5845009 - DNA, 25 bp, Homo sapien
atttatccacggcactccgcgagct

SEQ ID NO: 5845010 - DNA, 25 bp, Homo sapien
cgcacactatgagcaacatgcagat

SEQ ID NO: 5845011 - DNA, 25 bp, Homo sapien
aacatgcagatctacagcgccagag

SEQ ID NO: 5845012 - DNA, 25 bp, Homo sapien
tacagcgccagagtgctgacgcctt

SEQ ID NO: 5845013 - DNA, 25 bp, Homo sapien
gagtgctgacgccttactggcaatg

SEQ ID NO: 5845014 - DNA, 25 bp, Homo sapien
tactggcaatgcttccacagcgtaa

SEQ ID NO: 5845015 - DNA, 25 bp, Homo sapien
gggttgtggacctggctggatgagc

SEQ ID NO: 5845016 - DNA, 25 bp, Homo sapien
tgagccgccactggcgggaacgtca

SEQ ID NO: 5845017 - DNA, 25 bp, Homo sapien
gcgcaggtgacggccttagatctct

SEQ ID NO: 5845018 - DNA, 25 bp, Homo sapien
gccttagatctctcgccgccaatgc

SEQ ID NO: 5845019 - DNA, 25 bp, Homo sapien
gccgccaatgcttgttcaggcacgc

SEQ ID NO: 5845020 - DNA, 25 bp, Homo sapien
tgttcaggcacgccagaaggatgcc

SEQ ID NO: 5845021 - DNA, 25 bp, Homo sapien
agaaggatgccgcagaccattatct

SEQ ID NO: 5845022 - DNA, 25 bp, Homo sapien
gccgcagaccattatctggcgggag

SEQ ID NO: 5845023 - DNA, 25 bp, Homo sapien
cgttagcgactgcgacgttcgatct

SEQ ID NO: 5845024 - DNA, 25 bp, Homo sapien
cgacgttcgatcttgcatggagcaa

SEQ ID NO: 5845025 - DNA, 25 bp, Homo sapien
gatcttgcatggagcaatctcgcag

SEQ ID NO: 5845026 - DNA, 25 bp, Homo sapien
cagcggcatttggtcgggcagccgc

SEQ ID NO: 5845027 - DNA, 25 bp, Homo sapien
caatctcgcagtgcagtggtgcggt

SEQ ID NO: 5845028 - DNA, 25 bp, Homo sapien
gtcgggcagccgcacactatgagca

SEQ ID NO: 5845029 - DNA, 25 bp, Homo sapien
atttatccacggcactccgcgagct

SEQ ID NO: 5845030 - DNA, 25 bp, Homo sapien
cgcacactatgagcaacatgcagat

SEQ ID NO: 5845031 - DNA, 25 bp, Homo sapien
aacatgcagatctacagcgccagag

SEQ ID NO: 5845032 - DNA, 25 bp, Homo sapien
tacagcgccagagtgctgacgcctt

SEQ ID NO: 5845033 - DNA, 25 bp, Homo sapien
gagtgctgacgccttactggcaatg

SEQ ID NO: 5845034 - DNA, 25 bp, Homo sapien
tactggcaatgcttccacagcgtaa

SEQ ID NO: 5845035 - DNA, 25 bp, Homo sapien
gggttgtggacctggctggatgagc

SEQ ID NO: 5845036 - DNA, 25 bp, Homo sapien
tgagccgccactggcgggaacgtca

SEQ ID NO: 5845037 - DNA, 25 bp, Homo sapien
gcgcaggtgacggccttagatctct

SEQ ID NO: 5845038 - DNA, 25 bp, Homo sapien
gccttagatctctcgccgccaatgc

SEQ ID NO: 5845039 - DNA, 25 bp, Homo sapien
gccgccaatgcttgttcaggcacgc

SEQ ID NO: 5845040 - DNA, 25 bp, Homo sapien
tgttcaggcacgccagaaggatgcc

SEQ ID NO: 5845041 - DNA, 25 bp, Homo sapien
agaaggatgccgcagaccattatct

SEQ ID NO: 5845042 - DNA, 25 bp, Homo sapien
gccgcagaccattatctggcgggag

SEQ ID NO: 5845043 - DNA, 25 bp, Homo sapien
cgttagcgactgcgacgttcgatct

SEQ ID NO: 5845044 - DNA, 25 bp, Homo sapien
cgacgttcgatcttgcatggagcaa

SEQ ID NO: 5845045 - DNA, 25 bp, Homo sapien
gatcttgcatggagcaatctcgcag

SEQ ID NO: 5845046 - DNA, 25 bp, Homo sapien
cagcggcatttggtcgggcagccgc

SEQ ID NO: 5845047 - DNA, 25 bp, Homo sapien
caatctcgcagtgcagtggtgcggt

SEQ ID NO: 5845048 - DNA, 25 bp, Homo sapien
gtcgggcagccgcacactatgagca

SEQ ID NO: 5845049 - DNA, 25 bp, Homo sapien
atttatccacggcactccgcgagct

SEQ ID NO: 5845050 - DNA, 25 bp, Homo sapien
cgcacactatgagcaacatgcagat

SEQ ID NO: 5845051 - DNA, 25 bp, Homo sapien
aacatgcagatctacagcgccagag

SEQ ID NO: 5845052 - DNA, 25 bp, Homo sapien
tacagcgccagagtgctgacgcctt

SEQ ID NO: 5845053 - DNA, 25 bp, Homo sapien
gagtgctgacgccttactggcaatg

SEQ ID NO: 5845054 - DNA, 25 bp, Homo sapien
tactggcaatgcttccacagcgtaa

SEQ ID NO: 5845055 - DNA, 25 bp, Homo sapien
gggttgtggacctggctggatgagc

SEQ ID NO: 5845056 - DNA, 25 bp, Homo sapien
tgagccgccactggcgggaacgtca

SEQ ID NO: 5845057 - DNA, 25 bp, Homo sapien
gcgcaggtgacggccttagatctct

SEQ ID NO: 5845058 - DNA, 25 bp, Homo sapien
gccttagatctctcgccgccaatgc

SEQ ID NO: 5845059 - DNA, 25 bp, Homo sapien
gccgccaatgcttgttcaggcacgc

SEQ ID NO: 5845060 - DNA, 25 bp, Homo sapien
tgttcaggcacgccagaaggatgcc

SEQ ID NO: 5845061 - DNA, 25 bp, Homo sapien
agaaggatgccgcagaccattatct

SEQ ID NO: 5845062 - DNA, 25 bp, Homo sapien
gccgcagaccattatctggcgggag

SEQ ID NO: 5845063 - DNA, 25 bp, Homo sapien
cgttagcgactgcgacgttcgatct

SEQ ID NO: 5845064 - DNA, 25 bp, Homo sapien
cgacgttcgatcttgcatggagcaa

SEQ ID NO: 5845065 - DNA, 25 bp, Homo sapien
gatcttgcatggagcaatctcgcag

SEQ ID NO: 5845066 - DNA, 25 bp, Homo sapien
cagcggcatttggtcgggcagccgc

SEQ ID NO: 5845067 - DNA, 25 bp, Homo sapien
caatctcgcagtgcagtggtgcggt

SEQ ID NO: 5845068 - DNA, 25 bp, Homo sapien
gtcgggcagccgcacactatgagca

SEQ ID NO: 5845069 - DNA, 25 bp, Homo sapien
atttatccacggcactccgcgagct

SEQ ID NO: 5845070 - DNA, 25 bp, Homo sapien
cgcacactatgagcaacatgcagat

SEQ ID NO: 5845071 - DNA, 25 bp, Homo sapien
aacatgcagatctacagcgccagag

SEQ ID NO: 5845072 - DNA, 25 bp, Homo sapien
tacagcgccagagtgctgacgcctt

SEQ ID NO: 5845073 - DNA, 25 bp, Homo sapien
gagtgctgacgccttactggcaatg

SEQ ID NO: 5845074 - DNA, 25 bp, Homo sapien
tactggcaatgcttccacagcgtaa

SEQ ID NO: 5845075 - DNA, 25 bp, Homo sapien
gggttgtggacctggctggatgagc

SEQ ID NO: 5845076 - DNA, 25 bp, Homo sapien
tgagccgccactggcgggaacgtca

SEQ ID NO: 5845077 - DNA, 25 bp, Homo sapien
gcgcaggtgacggccttagatctct

SEQ ID NO: 5845078 - DNA, 25 bp, Homo sapien
gccttagatctctcgccgccaatgc

SEQ ID NO: 5845079 - DNA, 25 bp, Homo sapien
gccgccaatgcttgttcaggcacgc

SEQ ID NO: 5845080 - DNA, 25 bp, Homo sapien
tgttcaggcacgccagaaggatgcc

SEQ ID NO: 5845081 - DNA, 25 bp, Homo sapien
agaaggatgccgcagaccattatct

SEQ ID NO: 5845082 - DNA, 25 bp, Homo sapien
gccgcagaccattatctggcgggag

SEQ ID NO: 5845083 - DNA, 25 bp, Homo sapien
cgttagcgactgcgacgttcgatct

SEQ ID NO: 5845084 - DNA, 25 bp, Homo sapien
cgacgttcgatcttgcatggagcaa

SEQ ID NO: 5845085 - DNA, 25 bp, Homo sapien
gatcttgcatggagcaatctcgcag

SEQ ID NO: 5845086 - DNA, 25 bp, Homo sapien
cagcggcatttggtcgggcagccgc

SEQ ID NO: 5845087 - DNA, 25 bp, Homo sapien
caatctcgcagtgcagtggtgcggt

SEQ ID NO: 5845088 - DNA, 25 bp, Homo sapien
gtcgggcagccgcacactatgagca

SEQ ID NO: 5845089 - DNA, 25 bp, Homo sapien
atttatccacggcactccgcgagct

SEQ ID NO: 5845090 - DNA, 25 bp, Homo sapien
cgcacactatgagcaacatgcagat

SEQ ID NO: 5845091 - DNA, 25 bp, Homo sapien
aacatgcagatctacagcgccagag

SEQ ID NO: 5845092 - DNA, 25 bp, Homo sapien
tacagcgccagagtgctgacgcctt

SEQ ID NO: 5845093 - DNA, 25 bp, Homo sapien
gagtgctgacgccttactggcaatg

SEQ ID NO: 5845094 - DNA, 25 bp, Homo sapien
tactggcaatgcttccacagcgtaa

SEQ ID NO: 5845095 - DNA, 25 bp, Homo sapien
gggttgtggacctggctggatgagc

SEQ ID NO: 5845096 - DNA, 25 bp, Homo sapien
tgagccgccactggcgggaacgtca

SEQ ID NO: 5845097 - DNA, 25 bp, Homo sapien
gcgcaggtgacggccttagatctct

SEQ ID NO: 5845098 - DNA, 25 bp, Homo sapien
gccttagatctctcgccgccaatgc

SEQ ID NO: 5845099 - DNA, 25 bp, Homo sapien
gccgccaatgcttgttcaggcacgc

SEQ ID NO: 5845100 - DNA, 25 bp, Homo sapien
tgttcaggcacgccagaaggatgcc

SEQ ID NO: 5845101 - DNA, 25 bp, Homo sapien
agaaggatgccgcagaccattatct

SEQ ID NO: 5845102 - DNA, 25 bp, Homo sapien
gccgcagaccattatctggcgggag

SEQ ID NO: 5845103 - DNA, 25 bp, Homo sapien
cgttagcgactgcgacgttcgatct

SEQ ID NO: 5845104 - DNA, 25 bp, Homo sapien
cgacgttcgatcttgcatggagcaa

SEQ ID NO: 5845105 - DNA, 25 bp, Homo sapien
gatcttgcatggagcaatctcgcag

SEQ ID NO: 5845106 - DNA, 25 bp, Homo sapien
cagcggcatttggtcgggcagccgc

SEQ ID NO: 5845107 - DNA, 25 bp, Homo sapien
caatctcgcagtgcagtggtgcggt

SEQ ID NO: 5845108 - DNA, 25 bp, Homo sapien
gtcgggcagccgcacactatgagca

SEQ ID NO: 5845109 - DNA, 25 bp, Homo sapien
atttatccacggcactccgcgagct

SEQ ID NO: 5845110 - DNA, 25 bp, Homo sapien
cgcacactatgagcaacatgcagat

SEQ ID NO: 5845111 - DNA, 25 bp, Homo sapien
aacatgcagatctacagcgccagag

SEQ ID NO: 5845112 - DNA, 25 bp, Homo sapien
tacagcgccagagtgctgacgcctt

SEQ ID NO: 5845113 - DNA, 25 bp, Homo sapien
gagtgctgacgccttactggcaatg

SEQ ID NO: 5845114 - DNA, 25 bp, Homo sapien
tactggcaatgcttccacagcgtaa

SEQ ID NO: 5845115 - DNA, 25 bp, Homo sapien
gggttgtggacctggctggatgagc

SEQ ID NO: 5845116 - DNA, 25 bp, Homo sapien
tgagccgccactggcgggaacgtca

SEQ ID NO: 5845117 - DNA, 25 bp, Homo sapien
gcgcaggtgacggccttagatctct

SEQ ID NO: 5845118 - DNA, 25 bp, Homo sapien
gccttagatctctcgccgccaatgc

SEQ ID NO: 5845119 - DNA, 25 bp, Homo sapien
gccgccaatgcttgttcaggcacgc

SEQ ID NO: 5845120 - DNA, 25 bp, Homo sapien
tgttcaggcacgccagaaggatgcc

SEQ ID NO: 5845121 - DNA, 25 bp, Homo sapien
agaaggatgccgcagaccattatct

SEQ ID NO: 5845122 - DNA, 25 bp, Homo sapien
gccgcagaccattatctggcgggag

SEQ ID NO: 5845123 - DNA, 25 bp, Homo sapien
cgttagcgactgcgacgttcgatct

SEQ ID NO: 5845124 - DNA, 25 bp, Homo sapien
cgacgttcgatcttgcatggagcaa

SEQ ID NO: 5845125 - DNA, 25 bp, Homo sapien
gatcttgcatggagcaatctcgcag

SEQ ID NO: 5845126 - DNA, 25 bp, Homo sapien
cagcggcatttggtcgggcagccgc

SEQ ID NO: 5845127 - DNA, 25 bp, Homo sapien
caatctcgcagtgcagtggtgcggt

SEQ ID NO: 5845128 - DNA, 25 bp, Homo sapien
gtcgggcagccgcacactatgagca

SEQ ID NO: 5845129 - DNA, 25 bp, Homo sapien
atttatccacggcactccgcgagct

SEQ ID NO: 5845130 - DNA, 25 bp, Homo sapien
cgcacactatgagcaacatgcagat

SEQ ID NO: 5845131 - DNA, 25 bp, Homo sapien
aacatgcagatctacagcgccagag

SEQ ID NO: 5845132 - DNA, 25 bp, Homo sapien
tacagcgccagagtgctgacgcctt

SEQ ID NO: 5845133 - DNA, 25 bp, Homo sapien
gagtgctgacgccttactggcaatg

SEQ ID NO: 5845134 - DNA, 25 bp, Homo sapien
tactggcaatgcttccacagcgtaa

SEQ ID NO: 5845135 - DNA, 25 bp, Homo sapien
gggttgtggacctggctggatgagc

SEQ ID NO: 5845136 - DNA, 25 bp, Homo sapien
tgagccgccactggcgggaacgtca

SEQ ID NO: 5845137 - DNA, 25 bp, Homo sapien
gcgcaggtgacggccttagatctct

SEQ ID NO: 5845138 - DNA, 25 bp, Homo sapien
gccttagatctctcgccgccaatgc

SEQ ID NO: 5845139 - DNA, 25 bp, Homo sapien
gccgccaatgcttgttcaggcacgc

SEQ ID NO: 5845140 - DNA, 25 bp, Homo sapien
tgttcaggcacgccagaaggatgcc

SEQ ID NO: 5845141 - DNA, 25 bp, Homo sapien
agaaggatgccgcagaccattatct

SEQ ID NO: 5845142 - DNA, 25 bp, Homo sapien
gccgcagaccattatctggcgggag

SEQ ID NO: 5845143 - DNA, 25 bp, Homo sapien
cgttagcgactgcgacgttcgatct

SEQ ID NO: 5845144 - DNA, 25 bp, Homo sapien
cgacgttcgatcttgcatggagcaa

SEQ ID NO: 5845145 - DNA, 25 bp, Homo sapien
gatcttgcatggagcaatctcgcag

SEQ ID NO: 5845146 - DNA, 25 bp, Homo sapien
cagcggcatttggtcgggcagccgc

SEQ ID NO: 5845147 - DNA, 25 bp, Homo sapien
caatctcgcagtgcagtggtgcggt

SEQ ID NO: 5845148 - DNA, 25 bp, Homo sapien
gtcgggcagccgcacactatgagca

SEQ ID NO: 5845149 - DNA, 25 bp, Homo sapien
atttatccacggcactccgcgagct

SEQ ID NO: 5845150 - DNA, 25 bp, Homo sapien
cgcacactatgagcaacatgcagat

SEQ ID NO: 5845151 - DNA, 25 bp, Homo sapien
aacatgcagatctacagcgccagag

SEQ ID NO: 5845152 - DNA, 25 bp, Homo sapien
tacagcgccagagtgctgacgcctt

SEQ ID NO: 5845153 - DNA, 25 bp, Homo sapien
gagtgctgacgccttactggcaatg

SEQ ID NO: 5845154 - DNA, 25 bp, Homo sapien
tactggcaatgcttccacagcgtaa

SEQ ID NO: 5845155 - DNA, 25 bp, Homo sapien
gggttgtggacctggctggatgagc

SEQ ID NO: 5845156 - DNA, 25 bp, Homo sapien
tgagccgccactggcgggaacgtca

SEQ ID NO: 5845157 - DNA, 25 bp, Homo sapien
gcgcaggtgacggccttagatctct

SEQ ID NO: 5845158 - DNA, 25 bp, Homo sapien
gccttagatctctcgccgccaatgc

SEQ ID NO: 5845159 - DNA, 25 bp, Homo sapien
gccgccaatgcttgttcaggcacgc

SEQ ID NO: 5845160 - DNA, 25 bp, Homo sapien
cgtcacgctgaatatatgaccacgc

SEQ ID NO: 5845161 - DNA, 25 bp, Homo sapien
acgctgaatatatgaccacgctcac

SEQ ID NO: 5845162 - DNA, 25 bp, Homo sapien
ctgaatatatgaccacgctcacccg

SEQ ID NO: 5845163 - DNA, 25 bp, Homo sapien
gaatatatgaccacgctcacccgca

SEQ ID NO: 5845164 - DNA, 25 bp, Homo sapien
cccgcatgattcccgcgccgctgct

SEQ ID NO: 5845165 - DNA, 25 bp, Homo sapien
catgattcccgcgccgctgctggga

SEQ ID NO: 5845166 - DNA, 25 bp, Homo sapien
gattcccgcgccgctgctgggagag

SEQ ID NO: 5845167 - DNA, 25 bp, Homo sapien
cgcgccgctgctgggagagatcccc

SEQ ID NO: 5845168 - DNA, 25 bp, Homo sapien
ccgctgctgggagagatcccctggc

SEQ ID NO: 5845169 - DNA, 25 bp, Homo sapien
ctgctgggagagatcccctggcttg

SEQ ID NO: 5845170 - DNA, 25 bp, Homo sapien
gctgggagagatcccctggcttgca

SEQ ID NO: 5845171 - DNA, 25 bp, Homo sapien
ggagagatcccctggcttgcagaaa

SEQ ID NO: 5845172 - DNA, 25 bp, Homo sapien
ggtgctggcggctggtttacgccgc

SEQ ID NO: 5845173 - DNA, 25 bp, Homo sapien
gagatcccctggcttgcagaaaatc

SEQ ID NO: 5845174 - DNA, 25 bp, Homo sapien
ctttctgacactttcacttttgcag

SEQ ID NO: 5845175 - DNA, 25 bp, Homo sapien
atcccctggcttgcagaaaatccag

SEQ ID NO: 5845176 - DNA, 25 bp, Homo sapien
tgacactttcacttttgcagattgg

SEQ ID NO: 5845177 - DNA, 25 bp, Homo sapien
tttgcagattgggtaacacaggaac

SEQ ID NO: 5845178 - DNA, 25 bp, Homo sapien
gaaaacgtcacgctgaatatatgac

SEQ ID NO: 5845179 - DNA, 25 bp, Homo sapien
aaacgtcacgctgaatatatgacca

SEQ ID NO: 5845180 - DNA, 25 bp, Homo sapien
cgtcacgctgaatatatgaccacgc

SEQ ID NO: 5845181 - DNA, 25 bp, Homo sapien
acgctgaatatatgaccacgctcac

SEQ ID NO: 5845182 - DNA, 25 bp, Homo sapien
ctgaatatatgaccacgctcacccg

SEQ ID NO: 5845183 - DNA, 25 bp, Homo sapien
gaatatatgaccacgctcacccgca

SEQ ID NO: 5845184 - DNA, 25 bp, Homo sapien
cccgcatgattcccgcgccgctgct

SEQ ID NO: 5845185 - DNA, 25 bp, Homo sapien
catgattcccgcgccgctgctggga

SEQ ID NO: 5845186 - DNA, 25 bp, Homo sapien
gattcccgcgccgctgctgggagag

SEQ ID NO: 5845187 - DNA, 25 bp, Homo sapien
cgcgccgctgctgggagagatcccc

SEQ ID NO: 5845188 - DNA, 25 bp, Homo sapien
ccgctgctgggagagatcccctggc

SEQ ID NO: 5845189 - DNA, 25 bp, Homo sapien
ctgctgggagagatcccctggcttg

SEQ ID NO: 5845190 - DNA, 25 bp, Homo sapien
gctgggagagatcccctggcttgca

SEQ ID NO: 5845191 - DNA, 25 bp, Homo sapien
ggagagatcccctggcttgcagaaa

SEQ ID NO: 5845192 - DNA, 25 bp, Homo sapien
ggtgctggcggctggtttacgccgc

SEQ ID NO: 5845193 - DNA, 25 bp, Homo sapien
gagatcccctggcttgcagaaaatc

SEQ ID NO: 5845194 - DNA, 25 bp, Homo sapien
ctttctgacactttcacttttgcag

SEQ ID NO: 5845195 - DNA, 25 bp, Homo sapien
atcccctggcttgcagaaaatccag

SEQ ID NO: 5845196 - DNA, 25 bp, Homo sapien
tgacactttcacttttgcagattgg

SEQ ID NO: 5845197 - DNA, 25 bp, Homo sapien
tttgcagattgggtaacacaggaac

SEQ ID NO: 5845198 - DNA, 25 bp, Homo sapien
gaaaacgtcacgctgaatatatgac

SEQ ID NO: 5845199 - DNA, 25 bp, Homo sapien
aaacgtcacgctgaatatatgacca

SEQ ID NO: 5845200 - DNA, 25 bp, Homo sapien
cgtcacgctgaatatatgaccacgc

SEQ ID NO: 5845201 - DNA, 25 bp, Homo sapien
acgctgaatatatgaccacgctcac

SEQ ID NO: 5845202 - DNA, 25 bp, Homo sapien
ctgaatatatgaccacgctcacccg

SEQ ID NO: 5845203 - DNA, 25 bp, Homo sapien
gaatatatgaccacgctcacccgca

SEQ ID NO: 5845204 - DNA, 25 bp, Homo sapien
cccgcatgattcccgcgccgctgct

SEQ ID NO: 5845205 - DNA, 25 bp, Homo sapien
catgattcccgcgccgctgctggga

SEQ ID NO: 5845206 - DNA, 25 bp, Homo sapien
gattcccgcgccgctgctgggagag

SEQ ID NO: 5845207 - DNA, 25 bp, Homo sapien
cgcgccgctgctgggagagatcccc

SEQ ID NO: 5845208 - DNA, 25 bp, Homo sapien
ccgctgctgggagagatcccctggc

SEQ ID NO: 5845209 - DNA, 25 bp, Homo sapien
ctgctgggagagatcccctggcttg

SEQ ID NO: 5845210 - DNA, 25 bp, Homo sapien
gctgggagagatcccctggcttgca

SEQ ID NO: 5845211 - DNA, 25 bp, Homo sapien
ggagagatcccctggcttgcagaaa

SEQ ID NO: 5845212 - DNA, 25 bp, Homo sapien
ggtgctggcggctggtttacgccgc

SEQ ID NO: 5845213 - DNA, 25 bp, Homo sapien
gagatcccctggcttgcagaaaatc

SEQ ID NO: 5845214 - DNA, 25 bp, Homo sapien
ctttctgacactttcacttttgcag

SEQ ID NO: 5845215 - DNA, 25 bp, Homo sapien
atcccctggcttgcagaaaatccag

SEQ ID NO: 5845216 - DNA, 25 bp, Homo sapien
tgacactttcacttttgcagattgg

SEQ ID NO: 5845217 - DNA, 25 bp, Homo sapien
tttgcagattgggtaacacaggaac

SEQ ID NO: 5845218 - DNA, 25 bp, Homo sapien
gaaaacgtcacgctgaatatatgac

SEQ ID NO: 5845219 - DNA, 25 bp, Homo sapien
aaacgtcacgctgaatatatgacca

SEQ ID NO: 5845220 - DNA, 25 bp, Homo sapien
cgtcacgctgaatatatgaccacgc

SEQ ID NO: 5845221 - DNA, 25 bp, Homo sapien
acgctgaatatatgaccacgctcac

SEQ ID NO: 5845222 - DNA, 25 bp, Homo sapien
ctgaatatatgaccacgctcacccg

SEQ ID NO: 5845223 - DNA, 25 bp, Homo sapien
gaatatatgaccacgctcacccgca

SEQ ID NO: 5845224 - DNA, 25 bp, Homo sapien
cccgcatgattcccgcgccgctgct

SEQ ID NO: 5845225 - DNA, 25 bp, Homo sapien
catgattcccgcgccgctgctggga

SEQ ID NO: 5845226 - DNA, 25 bp, Homo sapien
gattcccgcgccgctgctgggagag

SEQ ID NO: 5845227 - DNA, 25 bp, Homo sapien
cgcgccgctgctgggagagatcccc

SEQ ID NO: 5845228 - DNA, 25 bp, Homo sapien
ccgctgctgggagagatcccctggc

SEQ ID NO: 5845229 - DNA, 25 bp, Homo sapien
ctgctgggagagatcccctggcttg

SEQ ID NO: 5845230 - DNA, 25 bp, Homo sapien
gctgggagagatcccctggcttgca

SEQ ID NO: 5845231 - DNA, 25 bp, Homo sapien
ggagagatcccctggcttgcagaaa

SEQ ID NO: 5845232 - DNA, 25 bp, Homo sapien
ggtgctggcggctggtttacgccgc

SEQ ID NO: 5845233 - DNA, 25 bp, Homo sapien
gagatcccctggcttgcagaaaatc

SEQ ID NO: 5845234 - DNA, 25 bp, Homo sapien
ctttctgacactttcacttttgcag

SEQ ID NO: 5845235 - DNA, 25 bp, Homo sapien
atcccctggcttgcagaaaatccag

SEQ ID NO: 5845236 - DNA, 25 bp, Homo sapien
tgacactttcacttttgcagattgg

SEQ ID NO: 5845237 - DNA, 25 bp, Homo sapien
tttgcagattgggtaacacaggaac

SEQ ID NO: 5845238 - DNA, 25 bp, Homo sapien
gaaaacgtcacgctgaatatatgac

SEQ ID NO: 5845239 - DNA, 25 bp, Homo sapien
aaacgtcacgctgaatatatgacca

SEQ ID NO: 5845240 - DNA, 25 bp, Homo sapien
cgtcacgctgaatatatgaccacgc

SEQ ID NO: 5845241 - DNA, 25 bp, Homo sapien
acgctgaatatatgaccacgctcac

SEQ ID NO: 5845242 - DNA, 25 bp, Homo sapien
ctgaatatatgaccacgctcacccg

SEQ ID NO: 5845243 - DNA, 25 bp, Homo sapien
gaatatatgaccacgctcacccgca

SEQ ID NO: 5845244 - DNA, 25 bp, Homo sapien
cccgcatgattcccgcgccgctgct

SEQ ID NO: 5845245 - DNA, 25 bp, Homo sapien
catgattcccgcgccgctgctggga

SEQ ID NO: 5845246 - DNA, 25 bp, Homo sapien
gattcccgcgccgctgctgggagag

SEQ ID NO: 5845247 - DNA, 25 bp, Homo sapien
cgcgccgctgctgggagagatcccc

SEQ ID NO: 5845248 - DNA, 25 bp, Homo sapien
ccgctgctgggagagatcccctggc

SEQ ID NO: 5845249 - DNA, 25 bp, Homo sapien
ctgctgggagagatcccctggcttg

SEQ ID NO: 5845250 - DNA, 25 bp, Homo sapien
gctgggagagatcccctggcttgca

SEQ ID NO: 5845251 - DNA, 25 bp, Homo sapien
ggagagatcccctggcttgcagaaa

SEQ ID NO: 5845252 - DNA, 25 bp, Homo sapien
ggtgctggcggctggtttacgccgc

SEQ ID NO: 5845253 - DNA, 25 bp, Homo sapien
gagatcccctggcttgcagaaaatc

SEQ ID NO: 5845254 - DNA, 25 bp, Homo sapien
ctttctgacactttcacttttgcag

SEQ ID NO: 5845255 - DNA, 25 bp, Homo sapien
atcccctggcttgcagaaaatccag

SEQ ID NO: 5845256 - DNA, 25 bp, Homo sapien
tgacactttcacttttgcagattgg

SEQ ID NO: 5845257 - DNA, 25 bp, Homo sapien
tttgcagattgggtaacacaggaac

SEQ ID NO: 5845258 - DNA, 25 bp, Homo sapien
gaaaacgtcacgctgaatatatgac

SEQ ID NO: 5845259 - DNA, 25 bp, Homo sapien
aaacgtcacgctgaatatatgacca

SEQ ID NO: 5845260 - DNA, 25 bp, Homo sapien
cgtcacgctgaatatatgaccacgc

SEQ ID NO: 5845261 - DNA, 25 bp, Homo sapien
acgctgaatatatgaccacgctcac

SEQ ID NO: 5845262 - DNA, 25 bp, Homo sapien
ctgaatatatgaccacgctcacccg

SEQ ID NO: 5845263 - DNA, 25 bp, Homo sapien
gaatatatgaccacgctcacccgca

SEQ ID NO: 5845264 - DNA, 25 bp, Homo sapien
cccgcatgattcccgcgccgctgct

SEQ ID NO: 5845265 - DNA, 25 bp, Homo sapien
catgattcccgcgccgctgctggga

SEQ ID NO: 5845266 - DNA, 25 bp, Homo sapien
gattcccgcgccgctgctgggagag

SEQ ID NO: 5845267 - DNA, 25 bp, Homo sapien
cgcgccgctgctgggagagatcccc

SEQ ID NO: 5845268 - DNA, 25 bp, Homo sapien
ccgctgctgggagagatcccctggc

SEQ ID NO: 5845269 - DNA, 25 bp, Homo sapien
ctgctgggagagatcccctggcttg

SEQ ID NO: 5845270 - DNA, 25 bp, Homo sapien
gctgggagagatcccctggcttgca

SEQ ID NO: 5845271 - DNA, 25 bp, Homo sapien
ggagagatcccctggcttgcagaaa

SEQ ID NO: 5845272 - DNA, 25 bp, Homo sapien
ggtgctggcggctggtttacgccgc

SEQ ID NO: 5845273 - DNA, 25 bp, Homo sapien
gagatcccctggcttgcagaaaatc

SEQ ID NO: 5845274 - DNA, 25 bp, Homo sapien
ctttctgacactttcacttttgcag

SEQ ID NO: 5845275 - DNA, 25 bp, Homo sapien
atcccctggcttgcagaaaatccag

SEQ ID NO: 5845276 - DNA, 25 bp, Homo sapien
tgacactttcacttttgcagattgg

SEQ ID NO: 5845277 - DNA, 25 bp, Homo sapien
tttgcagattgggtaacacaggaac

SEQ ID NO: 5845278 - DNA, 25 bp, Homo sapien
gaaaacgtcacgctgaatatatgac

SEQ ID NO: 5845279 - DNA, 25 bp, Homo sapien
aaacgtcacgctgaatatatgacca

SEQ ID NO: 5845280 - DNA, 25 bp, Homo sapien
cgtcacgctgaatatatgaccacgc

SEQ ID NO: 5845281 - DNA, 25 bp, Homo sapien
acgctgaatatatgaccacgctcac

SEQ ID NO: 5845282 - DNA, 25 bp, Homo sapien
ctgaatatatgaccacgctcacccg

SEQ ID NO: 5845283 - DNA, 25 bp, Homo sapien
gaatatatgaccacgctcacccgca

SEQ ID NO: 5845284 - DNA, 25 bp, Homo sapien
cccgcatgattcccgcgccgctgct

SEQ ID NO: 5845285 - DNA, 25 bp, Homo sapien
catgattcccgcgccgctgctggga

SEQ ID NO: 5845286 - DNA, 25 bp, Homo sapien
gattcccgcgccgctgctgggagag

SEQ ID NO: 5845287 - DNA, 25 bp, Homo sapien
cgcgccgctgctgggagagatcccc

SEQ ID NO: 5845288 - DNA, 25 bp, Homo sapien
ccgctgctgggagagatcccctggc

SEQ ID NO: 5845289 - DNA, 25 bp, Homo sapien
ctgctgggagagatcccctggcttg

SEQ ID NO: 5845290 - DNA, 25 bp, Homo sapien
gctgggagagatcccctggcttgca

SEQ ID NO: 5845291 - DNA, 25 bp, Homo sapien
ggagagatcccctggcttgcagaaa

SEQ ID NO: 5845292 - DNA, 25 bp, Homo sapien
ggtgctggcggctggtttacgccgc

SEQ ID NO: 5845293 - DNA, 25 bp, Homo sapien
gagatcccctggcttgcagaaaatc

SEQ ID NO: 5845294 - DNA, 25 bp, Homo sapien
ctttctgacactttcacttttgcag

SEQ ID NO: 5845295 - DNA, 25 bp, Homo sapien
atcccctggcttgcagaaaatccag

SEQ ID NO: 5845296 - DNA, 25 bp, Homo sapien
tgacactttcacttttgcagattgg

SEQ ID NO: 5845297 - DNA, 25 bp, Homo sapien
tttgcagattgggtaacacaggaac

SEQ ID NO: 5845298 - DNA, 25 bp, Homo sapien
gaaaacgtcacgctgaatatatgac

SEQ ID NO: 5845299 - DNA, 25 bp, Homo sapien
aaacgtcacgctgaatatatgacca

SEQ ID NO: 5845300 - DNA, 25 bp, Homo sapien
cgtcacgctgaatatatgaccacgc

SEQ ID NO: 5845301 - DNA, 25 bp, Homo sapien
acgctgaatatatgaccacgctcac

SEQ ID NO: 5845302 - DNA, 25 bp, Homo sapien
ctgaatatatgaccacgctcacccg

SEQ ID NO: 5845303 - DNA, 25 bp, Homo sapien
gaatatatgaccacgctcacccgca

SEQ ID NO: 5845304 - DNA, 25 bp, Homo sapien
cccgcatgattcccgcgccgctgct

SEQ ID NO: 5845305 - DNA, 25 bp, Homo sapien
catgattcccgcgccgctgctggga

SEQ ID NO: 5845306 - DNA, 25 bp, Homo sapien
gattcccgcgccgctgctgggagag

SEQ ID NO: 5845307 - DNA, 25 bp, Homo sapien
cgcgccgctgctgggagagatcccc

SEQ ID NO: 5845308 - DNA, 25 bp, Homo sapien
ccgctgctgggagagatcccctggc

SEQ ID NO: 5845309 - DNA, 25 bp, Homo sapien
ctgctgggagagatcccctggcttg

SEQ ID NO: 5845310 - DNA, 25 bp, Homo sapien
gctgggagagatcccctggcttgca

SEQ ID NO: 5845311 - DNA, 25 bp, Homo sapien
ggagagatcccctggcttgcagaaa

SEQ ID NO: 5845312 - DNA, 25 bp, Homo sapien
ggtgctggcggctggtttacgccgc

SEQ ID NO: 5845313 - DNA, 25 bp, Homo sapien
gagatcccctggcttgcagaaaatc

SEQ ID NO: 5845314 - DNA, 25 bp, Homo sapien
ctttctgacactttcacttttgcag

SEQ ID NO: 5845315 - DNA, 25 bp, Homo sapien
atcccctggcttgcagaaaatccag

SEQ ID NO: 5845316 - DNA, 25 bp, Homo sapien
tgacactttcacttttgcagattgg

SEQ ID NO: 5845317 - DNA, 25 bp, Homo sapien
tttgcagattgggtaacacaggaac

SEQ ID NO: 5845318 - DNA, 25 bp, Homo sapien
gaaaacgtcacgctgaatatatgac

SEQ ID NO: 5845319 - DNA, 25 bp, Homo sapien
aaacgtcacgctgaatatatgacca

SEQ ID NO: 5845320 - DNA, 25 bp, Homo sapien
cgtcacgctgaatatatgaccacgc

SEQ ID NO: 5845321 - DNA, 25 bp, Homo sapien
acgctgaatatatgaccacgctcac

SEQ ID NO: 5845322 - DNA, 25 bp, Homo sapien
ctgaatatatgaccacgctcacccg

SEQ ID NO: 5845323 - DNA, 25 bp, Homo sapien
gaatatatgaccacgctcacccgca

SEQ ID NO: 5845324 - DNA, 25 bp, Homo sapien
cccgcatgattcccgcgccgctgct

SEQ ID NO: 5845325 - DNA, 25 bp, Homo sapien
catgattcccgcgccgctgctggga

SEQ ID NO: 5845326 - DNA, 25 bp, Homo sapien
gattcccgcgccgctgctgggagag

SEQ ID NO: 5845327 - DNA, 25 bp, Homo sapien
cgcgccgctgctgggagagatcccc

SEQ ID NO: 5845328 - DNA, 25 bp, Homo sapien
ccgctgctgggagagatcccctggc

SEQ ID NO: 5845329 - DNA, 25 bp, Homo sapien
ctgctgggagagatcccctggcttg

SEQ ID NO: 5845330 - DNA, 25 bp, Homo sapien
gctgggagagatcccctggcttgca

SEQ ID NO: 5845331 - DNA, 25 bp, Homo sapien
ggagagatcccctggcttgcagaaa

SEQ ID NO: 5845332 - DNA, 25 bp, Homo sapien
ggtgctggcggctggtttacgccgc

SEQ ID NO: 5845333 - DNA, 25 bp, Homo sapien
gagatcccctggcttgcagaaaatc

SEQ ID NO: 5845334 - DNA, 25 bp, Homo sapien
ctttctgacactttcacttttgcag

SEQ ID NO: 5845335 - DNA, 25 bp, Homo sapien
atcccctggcttgcagaaaatccag

SEQ ID NO: 5845336 - DNA, 25 bp, Homo sapien
tgacactttcacttttgcagattgg

SEQ ID NO: 5845337 - DNA, 25 bp, Homo sapien
tttgcagattgggtaacacaggaac

SEQ ID NO: 5845338 - DNA, 25 bp, Homo sapien
gaaaacgtcacgctgaatatatgac

SEQ ID NO: 5845339 - DNA, 25 bp, Homo sapien
aaacgtcacgctgaatatatgacca

SEQ ID NO: 5845340 - DNA, 25 bp, Homo sapien
cgtcacgctgaatatatgaccacgc

SEQ ID NO: 5845341 - DNA, 25 bp, Homo sapien
acgctgaatatatgaccacgctcac

SEQ ID NO: 5845342 - DNA, 25 bp, Homo sapien
ctgaatatatgaccacgctcacccg

SEQ ID NO: 5845343 - DNA, 25 bp, Homo sapien
gaatatatgaccacgctcacccgca

SEQ ID NO: 5845344 - DNA, 25 bp, Homo sapien
cccgcatgattcccgcgccgctgct

SEQ ID NO: 5845345 - DNA, 25 bp, Homo sapien
catgattcccgcgccgctgctggga

SEQ ID NO: 5845346 - DNA, 25 bp, Homo sapien
gattcccgcgccgctgctgggagag

SEQ ID NO: 5845347 - DNA, 25 bp, Homo sapien
cgcgccgctgctgggagagatcccc

SEQ ID NO: 5845348 - DNA, 25 bp, Homo sapien
ccgctgctgggagagatcccctggc

SEQ ID NO: 5845349 - DNA, 25 bp, Homo sapien
ctgctgggagagatcccctggcttg

SEQ ID NO: 5845350 - DNA, 25 bp, Homo sapien
gctgggagagatcccctggcttgca

SEQ ID NO: 5845351 - DNA, 25 bp, Homo sapien
ggagagatcccctggcttgcagaaa

SEQ ID NO: 5845352 - DNA, 25 bp, Homo sapien
ggtgctggcggctggtttacgccgc

SEQ ID NO: 5845353 - DNA, 25 bp, Homo sapien
gagatcccctggcttgcagaaaatc

SEQ ID NO: 5845354 - DNA, 25 bp, Homo sapien
ctttctgacactttcacttttgcag

SEQ ID NO: 5845355 - DNA, 25 bp, Homo sapien
atcccctggcttgcagaaaatccag

SEQ ID NO: 5845356 - DNA, 25 bp, Homo sapien
tgacactttcacttttgcagattgg

SEQ ID NO: 5845357 - DNA, 25 bp, Homo sapien
tttgcagattgggtaacacaggaac

SEQ ID NO: 5845358 - DNA, 25 bp, Homo sapien
gaaaacgtcacgctgaatatatgac

SEQ ID NO: 5845359 - DNA, 25 bp, Homo sapien
aaacgtcacgctgaatatatgacca

SEQ ID NO: 5845360 - DNA, 25 bp, Homo sapien
cgtcacgctgaatatatgaccacgc

SEQ ID NO: 5845361 - DNA, 25 bp, Homo sapien
acgctgaatatatgaccacgctcac

SEQ ID NO: 5845362 - DNA, 25 bp, Homo sapien
ctgaatatatgaccacgctcacccg

SEQ ID NO: 5845363 - DNA, 25 bp, Homo sapien
gaatatatgaccacgctcacccgca

SEQ ID NO: 5845364 - DNA, 25 bp, Homo sapien
cccgcatgattcccgcgccgctgct

SEQ ID NO: 5845365 - DNA, 25 bp, Homo sapien
catgattcccgcgccgctgctggga

SEQ ID NO: 5845366 - DNA, 25 bp, Homo sapien
gattcccgcgccgctgctgggagag

SEQ ID NO: 5845367 - DNA, 25 bp, Homo sapien
cgcgccgctgctgggagagatcccc

SEQ ID NO: 5845368 - DNA, 25 bp, Homo sapien
ccgctgctgggagagatcccctggc

SEQ ID NO: 5845369 - DNA, 25 bp, Homo sapien
ctgctgggagagatcccctggcttg

SEQ ID NO: 5845370 - DNA, 25 bp, Homo sapien
gctgggagagatcccctggcttgca

SEQ ID NO: 5845371 - DNA, 25 bp, Homo sapien
ggagagatcccctggcttgcagaaa

SEQ ID NO: 5845372 - DNA, 25 bp, Homo sapien
ggtgctggcggctggtttacgccgc

SEQ ID NO: 5845373 - DNA, 25 bp, Homo sapien
gagatcccctggcttgcagaaaatc

SEQ ID NO: 5845374 - DNA, 25 bp, Homo sapien
ctttctgacactttcacttttgcag

SEQ ID NO: 5845375 - DNA, 25 bp, Homo sapien
atcccctggcttgcagaaaatccag

SEQ ID NO: 5845376 - DNA, 25 bp, Homo sapien
tgacactttcacttttgcagattgg

SEQ ID NO: 5845377 - DNA, 25 bp, Homo sapien
tttgcagattgggtaacacaggaac

SEQ ID NO: 5845378 - DNA, 25 bp, Homo sapien
gaaaacgtcacgctgaatatatgac

SEQ ID NO: 5845379 - DNA, 25 bp, Homo sapien
aaacgtcacgctgaatatatgacca

SEQ ID NO: 5845380 - DNA, 25 bp, Homo sapien
cgtcacgctgaatatatgaccacgc

SEQ ID NO: 5845381 - DNA, 25 bp, Homo sapien
acgctgaatatatgaccacgctcac

SEQ ID NO: 5845382 - DNA, 25 bp, Homo sapien
ctgaatatatgaccacgctcacccg

SEQ ID NO: 5845383 - DNA, 25 bp, Homo sapien
gaatatatgaccacgctcacccgca

SEQ ID NO: 5845384 - DNA, 25 bp, Homo sapien
cccgcatgattcccgcgccgctgct

SEQ ID NO: 5845385 - DNA, 25 bp, Homo sapien
catgattcccgcgccgctgctggga

SEQ ID NO: 5845386 - DNA, 25 bp, Homo sapien
gattcccgcgccgctgctgggagag

SEQ ID NO: 5845387 - DNA, 25 bp, Homo sapien
cgcgccgctgctgggagagatcccc

SEQ ID NO: 5845388 - DNA, 25 bp, Homo sapien
ccgctgctgggagagatcccctggc

SEQ ID NO: 5845389 - DNA, 25 bp, Homo sapien
ctgctgggagagatcccctggcttg

SEQ ID NO: 5845390 - DNA, 25 bp, Homo sapien
gctgggagagatcccctggcttgca

SEQ ID NO: 5845391 - DNA, 25 bp, Homo sapien
ggagagatcccctggcttgcagaaa

SEQ ID NO: 5845392 - DNA, 25 bp, Homo sapien
ggtgctggcggctggtttacgccgc

SEQ ID NO: 5845393 - DNA, 25 bp, Homo sapien
gagatcccctggcttgcagaaaatc

SEQ ID NO: 5845394 - DNA, 25 bp, Homo sapien
ctttctgacactttcacttttgcag

SEQ ID NO: 5845395 - DNA, 25 bp, Homo sapien
atcccctggcttgcagaaaatccag

SEQ ID NO: 5845396 - DNA, 25 bp, Homo sapien
tgacactttcacttttgcagattgg

SEQ ID NO: 5845397 - DNA, 25 bp, Homo sapien
tttgcagattgggtaacacaggaac

SEQ ID NO: 5845398 - DNA, 25 bp, Homo sapien
gaaaacgtcacgctgaatatatgac

SEQ ID NO: 5845399 - DNA, 25 bp, Homo sapien
aaacgtcacgctgaatatatgacca

SEQ ID NO: 5845400 - DNA, 25 bp, Homo sapien
cgtcacgctgaatatatgaccacgc

SEQ ID NO: 5845401 - DNA, 25 bp, Homo sapien
acgctgaatatatgaccacgctcac

SEQ ID NO: 5845402 - DNA, 25 bp, Homo sapien
ctgaatatatgaccacgctcacccg

SEQ ID NO: 5845403 - DNA, 25 bp, Homo sapien
gaatatatgaccacgctcacccgca

SEQ ID NO: 5845404 - DNA, 25 bp, Homo sapien
cccgcatgattcccgcgccgctgct

SEQ ID NO: 5845405 - DNA, 25 bp, Homo sapien
catgattcccgcgccgctgctggga

SEQ ID NO: 5845406 - DNA, 25 bp, Homo sapien
gattcccgcgccgctgctgggagag

SEQ ID NO: 5845407 - DNA, 25 bp, Homo sapien
cgcgccgctgctgggagagatcccc

SEQ ID NO: 5845408 - DNA, 25 bp, Homo sapien
ccgctgctgggagagatcccctggc

SEQ ID NO: 5845409 - DNA, 25 bp, Homo sapien
ctgctgggagagatcccctggcttg

SEQ ID NO: 5845410 - DNA, 25 bp, Homo sapien
gctgggagagatcccctggcttgca

SEQ ID NO: 5845411 - DNA, 25 bp, Homo sapien
ggagagatcccctggcttgcagaaa

SEQ ID NO: 5845412 - DNA, 25 bp, Homo sapien
ggtgctggcggctggtttacgccgc

SEQ ID NO: 5845413 - DNA, 25 bp, Homo sapien
gagatcccctggcttgcagaaaatc

SEQ ID NO: 5845414 - DNA, 25 bp, Homo sapien
ctttctgacactttcacttttgcag

SEQ ID NO: 5845415 - DNA, 25 bp, Homo sapien
atcccctggcttgcagaaaatccag

SEQ ID NO: 5845416 - DNA, 25 bp, Homo sapien
tgacactttcacttttgcagattgg

SEQ ID NO: 5845417 - DNA, 25 bp, Homo sapien
tttgcagattgggtaacacaggaac

SEQ ID NO: 5845418 - DNA, 25 bp, Homo sapien
gaaaacgtcacgctgaatatatgac

SEQ ID NO: 5845419 - DNA, 25 bp, Homo sapien
aaacgtcacgctgaatatatgacca

SEQ ID NO: 5845420 - DNA, 25 bp, Homo sapien
cgtcacgctgaatatatgaccacgc

SEQ ID NO: 5845421 - DNA, 25 bp, Homo sapien
acgctgaatatatgaccacgctcac

SEQ ID NO: 5845422 - DNA, 25 bp, Homo sapien
ctgaatatatgaccacgctcacccg

SEQ ID NO: 5845423 - DNA, 25 bp, Homo sapien
gaatatatgaccacgctcacccgca

SEQ ID NO: 5845424 - DNA, 25 bp, Homo sapien
cccgcatgattcccgcgccgctgct

SEQ ID NO: 5845425 - DNA, 25 bp, Homo sapien
catgattcccgcgccgctgctggga

SEQ ID NO: 5845426 - DNA, 25 bp, Homo sapien
gattcccgcgccgctgctgggagag

SEQ ID NO: 5845427 - DNA, 25 bp, Homo sapien
cgcgccgctgctgggagagatcccc

SEQ ID NO: 5845428 - DNA, 25 bp, Homo sapien
ccgctgctgggagagatcccctggc

SEQ ID NO: 5845429 - DNA, 25 bp, Homo sapien
ctgctgggagagatcccctggcttg

SEQ ID NO: 5845430 - DNA, 25 bp, Homo sapien
gctgggagagatcccctggcttgca

SEQ ID NO: 5845431 - DNA, 25 bp, Homo sapien
ggagagatcccctggcttgcagaaa

SEQ ID NO: 5845432 - DNA, 25 bp, Homo sapien
ggtgctggcggctggtttacgccgc

SEQ ID NO: 5845433 - DNA, 25 bp, Homo sapien
gagatcccctggcttgcagaaaatc

SEQ ID NO: 5845434 - DNA, 25 bp, Homo sapien
ctttctgacactttcacttttgcag

SEQ ID NO: 5845435 - DNA, 25 bp, Homo sapien
atcccctggcttgcagaaaatccag

SEQ ID NO: 5845436 - DNA, 25 bp, Homo sapien
tgacactttcacttttgcagattgg

SEQ ID NO: 5845437 - DNA, 25 bp, Homo sapien
tttgcagattgggtaacacaggaac

SEQ ID NO: 5845438 - DNA, 25 bp, Homo sapien
gaaaacgtcacgctgaatatatgac

SEQ ID NO: 5845439 - DNA, 25 bp, Homo sapien
aaacgtcacgctgaatatatgacca

SEQ ID NO: 5845440 - DNA, 25 bp, Homo sapien
cgtcacgctgaatatatgaccacgc

SEQ ID NO: 5845441 - DNA, 25 bp, Homo sapien
acgctgaatatatgaccacgctcac

SEQ ID NO: 5845442 - DNA, 25 bp, Homo sapien
ctgaatatatgaccacgctcacccg

SEQ ID NO: 5845443 - DNA, 25 bp, Homo sapien
gaatatatgaccacgctcacccgca

SEQ ID NO: 5845444 - DNA, 25 bp, Homo sapien
cccgcatgattcccgcgccgctgct

SEQ ID NO: 5845445 - DNA, 25 bp, Homo sapien
catgattcccgcgccgctgctggga

SEQ ID NO: 5845446 - DNA, 25 bp, Homo sapien
gattcccgcgccgctgctgggagag

SEQ ID NO: 5845447 - DNA, 25 bp, Homo sapien
cgcgccgctgctgggagagatcccc

SEQ ID NO: 5845448 - DNA, 25 bp, Homo sapien
ccgctgctgggagagatcccctggc

SEQ ID NO: 5845449 - DNA, 25 bp, Homo sapien
ctgctgggagagatcccctggcttg

SEQ ID NO: 5845450 - DNA, 25 bp, Homo sapien
gctgggagagatcccctggcttgca

SEQ ID NO: 5845451 - DNA, 25 bp, Homo sapien
ggagagatcccctggcttgcagaaa

SEQ ID NO: 5845452 - DNA, 25 bp, Homo sapien
ggtgctggcggctggtttacgccgc

SEQ ID NO: 5845453 - DNA, 25 bp, Homo sapien
gagatcccctggcttgcagaaaatc

SEQ ID NO: 5845454 - DNA, 25 bp, Homo sapien
ctttctgacactttcacttttgcag

SEQ ID NO: 5845455 - DNA, 25 bp, Homo sapien
atcccctggcttgcagaaaatccag

SEQ ID NO: 5845456 - DNA, 25 bp, Homo sapien
tgacactttcacttttgcagattgg

SEQ ID NO: 5845457 - DNA, 25 bp, Homo sapien
tttgcagattgggtaacacaggaac

SEQ ID NO: 5845458 - DNA, 25 bp, Homo sapien
gaaaacgtcacgctgaatatatgac

SEQ ID NO: 5845459 - DNA, 25 bp, Homo sapien
aaacgtcacgctgaatatatgacca

SEQ ID NO: 5845460 - DNA, 25 bp, Homo sapien
cgtcacgctgaatatatgaccacgc

SEQ ID NO: 5845461 - DNA, 25 bp, Homo sapien
acgctgaatatatgaccacgctcac

SEQ ID NO: 5845462 - DNA, 25 bp, Homo sapien
ctgaatatatgaccacgctcacccg

SEQ ID NO: 5845463 - DNA, 25 bp, Homo sapien
gaatatatgaccacgctcacccgca

SEQ ID NO: 5845464 - DNA, 25 bp, Homo sapien
cccgcatgattcccgcgccgctgct

SEQ ID NO: 5845465 - DNA, 25 bp, Homo sapien
catgattcccgcgccgctgctggga

SEQ ID NO: 5845466 - DNA, 25 bp, Homo sapien
gattcccgcgccgctgctgggagag

SEQ ID NO: 5845467 - DNA, 25 bp, Homo sapien
cgcgccgctgctgggagagatcccc

SEQ ID NO: 5845468 - DNA, 25 bp, Homo sapien
ccgctgctgggagagatcccctggc

SEQ ID NO: 5845469 - DNA, 25 bp, Homo sapien
ctgctgggagagatcccctggcttg

SEQ ID NO: 5845470 - DNA, 25 bp, Homo sapien
gctgggagagatcccctggcttgca

SEQ ID NO: 5845471 - DNA, 25 bp, Homo sapien
ggagagatcccctggcttgcagaaa

SEQ ID NO: 5845472 - DNA, 25 bp, Homo sapien
ggtgctggcggctggtttacgccgc

SEQ ID NO: 5845473 - DNA, 25 bp, Homo sapien
gagatcccctggcttgcagaaaatc

SEQ ID NO: 5845474 - DNA, 25 bp, Homo sapien
ctttctgacactttcacttttgcag

SEQ ID NO: 5845475 - DNA, 25 bp, Homo sapien
atcccctggcttgcagaaaatccag

SEQ ID NO: 5845476 - DNA, 25 bp, Homo sapien
tgacactttcacttttgcagattgg

SEQ ID NO: 5845477 - DNA, 25 bp, Homo sapien
tttgcagattgggtaacacaggaac

SEQ ID NO: 5845478 - DNA, 25 bp, Homo sapien
gaaaacgtcacgctgaatatatgac

SEQ ID NO: 5845479 - DNA, 25 bp, Homo sapien
aaacgtcacgctgaatatatgacca

SEQ ID NO: 5845480 - DNA, 25 bp, Homo sapien
cgtcacgctgaatatatgaccacgc

SEQ ID NO: 5845481 - DNA, 25 bp, Homo sapien
acgctgaatatatgaccacgctcac

SEQ ID NO: 5845482 - DNA, 25 bp, Homo sapien
ctgaatatatgaccacgctcacccg

SEQ ID NO: 5845483 - DNA, 25 bp, Homo sapien
gaatatatgaccacgctcacccgca

SEQ ID NO: 5845484 - DNA, 25 bp, Homo sapien
cccgcatgattcccgcgccgctgct

SEQ ID NO: 5845485 - DNA, 25 bp, Homo sapien
catgattcccgcgccgctgctggga

SEQ ID NO: 5845486 - DNA, 25 bp, Homo sapien
gattcccgcgccgctgctgggagag

SEQ ID NO: 5845487 - DNA, 25 bp, Homo sapien
cgcgccgctgctgggagagatcccc

SEQ ID NO: 5845488 - DNA, 25 bp, Homo sapien
ccgctgctgggagagatcccctggc

SEQ ID NO: 5845489 - DNA, 25 bp, Homo sapien
ctgctgggagagatcccctggcttg

SEQ ID NO: 5845490 - DNA, 25 bp, Homo sapien
gctgggagagatcccctggcttgca

SEQ ID NO: 5845491 - DNA, 25 bp, Homo sapien
ggagagatcccctggcttgcagaaa

SEQ ID NO: 5845492 - DNA, 25 bp, Homo sapien
ggtgctggcggctggtttacgccgc

SEQ ID NO: 5845493 - DNA, 25 bp, Homo sapien
gagatcccctggcttgcagaaaatc

SEQ ID NO: 5845494 - DNA, 25 bp, Homo sapien
ctttctgacactttcacttttgcag

SEQ ID NO: 5845495 - DNA, 25 bp, Homo sapien
atcccctggcttgcagaaaatccag

SEQ ID NO: 5845496 - DNA, 25 bp, Homo sapien
tgacactttcacttttgcagattgg

SEQ ID NO: 5845497 - DNA, 25 bp, Homo sapien
tttgcagattgggtaacacaggaac

SEQ ID NO: 5845498 - DNA, 25 bp, Homo sapien
gaaaacgtcacgctgaatatatgac

SEQ ID NO: 5845499 - DNA, 25 bp, Homo sapien
aaacgtcacgctgaatatatgacca

SEQ ID NO: 5845500 - DNA, 25 bp, Homo sapien
cgtcacgctgaatatatgaccacgc

SEQ ID NO: 5845501 - DNA, 25 bp, Homo sapien
acgctgaatatatgaccacgctcac

SEQ ID NO: 5845502 - DNA, 25 bp, Homo sapien
ctgaatatatgaccacgctcacccg

SEQ ID NO: 5845503 - DNA, 25 bp, Homo sapien
gaatatatgaccacgctcacccgca

SEQ ID NO: 5845504 - DNA, 25 bp, Homo sapien
cccgcatgattcccgcgccgctgct

SEQ ID NO: 5845505 - DNA, 25 bp, Homo sapien
catgattcccgcgccgctgctggga

SEQ ID NO: 5845506 - DNA, 25 bp, Homo sapien
gattcccgcgccgctgctgggagag

SEQ ID NO: 5845507 - DNA, 25 bp, Homo sapien
cgcgccgctgctgggagagatcccc

SEQ ID NO: 5845508 - DNA, 25 bp, Homo sapien
ccgctgctgggagagatcccctggc

SEQ ID NO: 5845509 - DNA, 25 bp, Homo sapien
ctgctgggagagatcccctggcttg

SEQ ID NO: 5845510 - DNA, 25 bp, Homo sapien
gctgggagagatcccctggcttgca

SEQ ID NO: 5845511 - DNA, 25 bp, Homo sapien
ggagagatcccctggcttgcagaaa

SEQ ID NO: 5845512 - DNA, 25 bp, Homo sapien
ggtgctggcggctggtttacgccgc

SEQ ID NO: 5845513 - DNA, 25 bp, Homo sapien
gagatcccctggcttgcagaaaatc

SEQ ID NO: 5845514 - DNA, 25 bp, Homo sapien
ctttctgacactttcacttttgcag

SEQ ID NO: 5845515 - DNA, 25 bp, Homo sapien
atcccctggcttgcagaaaatccag

SEQ ID NO: 5845516 - DNA, 25 bp, Homo sapien
tgacactttcacttttgcagattgg

SEQ ID NO: 5845517 - DNA, 25 bp, Homo sapien
tttgcagattgggtaacacaggaac

SEQ ID NO: 5845518 - DNA, 25 bp, Homo sapien
gaaaacgtcacgctgaatatatgac

SEQ ID NO: 5845519 - DNA, 25 bp, Homo sapien
aaacgtcacgctgaatatatgacca

SEQ ID NO: 5845520 - DNA, 25 bp, Homo sapien
cgtcacgctgaatatatgaccacgc

SEQ ID NO: 5845521 - DNA, 25 bp, Homo sapien
acgctgaatatatgaccacgctcac

SEQ ID NO: 5845522 - DNA, 25 bp, Homo sapien
ctgaatatatgaccacgctcacccg

SEQ ID NO: 5845523 - DNA, 25 bp, Homo sapien
gaatatatgaccacgctcacccgca

SEQ ID NO: 5845524 - DNA, 25 bp, Homo sapien
cccgcatgattcccgcgccgctgct

SEQ ID NO: 5845525 - DNA, 25 bp, Homo sapien
catgattcccgcgccgctgctggga

SEQ ID NO: 5845526 - DNA, 25 bp, Homo sapien
gattcccgcgccgctgctgggagag

SEQ ID NO: 5845527 - DNA, 25 bp, Homo sapien
cgcgccgctgctgggagagatcccc

SEQ ID NO: 5845528 - DNA, 25 bp, Homo sapien
ccgctgctgggagagatcccctggc

SEQ ID NO: 5845529 - DNA, 25 bp, Homo sapien
ctgctgggagagatcccctggcttg

SEQ ID NO: 5845530 - DNA, 25 bp, Homo sapien
gctgggagagatcccctggcttgca

SEQ ID NO: 5845531 - DNA, 25 bp, Homo sapien
ggagagatcccctggcttgcagaaa

SEQ ID NO: 5845532 - DNA, 25 bp, Homo sapien
ggtgctggcggctggtttacgccgc

SEQ ID NO: 5845533 - DNA, 25 bp, Homo sapien
gagatcccctggcttgcagaaaatc

SEQ ID NO: 5845534 - DNA, 25 bp, Homo sapien
ctttctgacactttcacttttgcag

SEQ ID NO: 5845535 - DNA, 25 bp, Homo sapien
atcccctggcttgcagaaaatccag

SEQ ID NO: 5845536 - DNA, 25 bp, Homo sapien
tgacactttcacttttgcagattgg

SEQ ID NO: 5845537 - DNA, 25 bp, Homo sapien
tttgcagattgggtaacacaggaac

SEQ ID NO: 5845538 - DNA, 25 bp, Homo sapien
gaaaacgtcacgctgaatatatgac

SEQ ID NO: 5845539 - DNA, 25 bp, Homo sapien
aaacgtcacgctgaatatatgacca

SEQ ID NO: 5845540 - DNA, 25 bp, Homo sapien
cgtcacgctgaatatatgaccacgc

SEQ ID NO: 5845541 - DNA, 25 bp, Homo sapien
acgctgaatatatgaccacgctcac

SEQ ID NO: 5845542 - DNA, 25 bp, Homo sapien
ctgaatatatgaccacgctcacccg

SEQ ID NO: 5845543 - DNA, 25 bp, Homo sapien
gaatatatgaccacgctcacccgca

SEQ ID NO: 5845544 - DNA, 25 bp, Homo sapien
cccgcatgattcccgcgccgctgct

SEQ ID NO: 5845545 - DNA, 25 bp, Homo sapien
catgattcccgcgccgctgctggga

SEQ ID NO: 5845546 - DNA, 25 bp, Homo sapien
gattcccgcgccgctgctgggagag

SEQ ID NO: 5845547 - DNA, 25 bp, Homo sapien
cgcgccgctgctgggagagatcccc

SEQ ID NO: 5845548 - DNA, 25 bp, Homo sapien
ccgctgctgggagagatcccctggc

SEQ ID NO: 5845549 - DNA, 25 bp, Homo sapien
ctgctgggagagatcccctggcttg

SEQ ID NO: 5845550 - DNA, 25 bp, Homo sapien
gctgggagagatcccctggcttgca

SEQ ID NO: 5845551 - DNA, 25 bp, Homo sapien
ggagagatcccctggcttgcagaaa

SEQ ID NO: 5845552 - DNA, 25 bp, Homo sapien
ggtgctggcggctggtttacgccgc

SEQ ID NO: 5845553 - DNA, 25 bp, Homo sapien
gagatcccctggcttgcagaaaatc

SEQ ID NO: 5845554 - DNA, 25 bp, Homo sapien
ctttctgacactttcacttttgcag

SEQ ID NO: 5845555 - DNA, 25 bp, Homo sapien
atcccctggcttgcagaaaatccag

SEQ ID NO: 5845556 - DNA, 25 bp, Homo sapien
tgacactttcacttttgcagattgg

SEQ ID NO: 5845557 - DNA, 25 bp, Homo sapien
tttgcagattgggtaacacaggaac

SEQ ID NO: 5845558 - DNA, 25 bp, Homo sapien
gaaaacgtcacgctgaatatatgac

SEQ ID NO: 5845559 - DNA, 25 bp, Homo sapien
aaacgtcacgctgaatatatgacca

SEQ ID NO: 5845560 - DNA, 25 bp, Homo sapien
cgtcacgctgaatatatgaccacgc

SEQ ID NO: 5845561 - DNA, 25 bp, Homo sapien
acgctgaatatatgaccacgctcac

SEQ ID NO: 5845562 - DNA, 25 bp, Homo sapien
ctgaatatatgaccacgctcacccg

SEQ ID NO: 5845563 - DNA, 25 bp, Homo sapien
gaatatatgaccacgctcacccgca

SEQ ID NO: 5845564 - DNA, 25 bp, Homo sapien
cccgcatgattcccgcgccgctgct

SEQ ID NO: 5845565 - DNA, 25 bp, Homo sapien
catgattcccgcgccgctgctggga

SEQ ID NO: 5845566 - DNA, 25 bp, Homo sapien
gattcccgcgccgctgctgggagag

SEQ ID NO: 5845567 - DNA, 25 bp, Homo sapien
cgcgccgctgctgggagagatcccc

SEQ ID NO: 5845568 - DNA, 25 bp, Homo sapien
ccgctgctgggagagatcccctggc

SEQ ID NO: 5845569 - DNA, 25 bp, Homo sapien
ctgctgggagagatcccctggcttg

SEQ ID NO: 5845570 - DNA, 25 bp, Homo sapien
gctgggagagatcccctggcttgca

SEQ ID NO: 5845571 - DNA, 25 bp, Homo sapien
ggagagatcccctggcttgcagaaa

SEQ ID NO: 5845572 - DNA, 25 bp, Homo sapien
ggtgctggcggctggtttacgccgc

SEQ ID NO: 5845573 - DNA, 25 bp, Homo sapien
gagatcccctggcttgcagaaaatc

SEQ ID NO: 5845574 - DNA, 25 bp, Homo sapien
ctttctgacactttcacttttgcag

SEQ ID NO: 5845575 - DNA, 25 bp, Homo sapien
atcccctggcttgcagaaaatccag

SEQ ID NO: 5845576 - DNA, 25 bp, Homo sapien
tgacactttcacttttgcagattgg

SEQ ID NO: 5845577 - DNA, 25 bp, Homo sapien
tttgcagattgggtaacacaggaac

SEQ ID NO: 5845578 - DNA, 25 bp, Homo sapien
gaaaacgtcacgctgaatatatgac

SEQ ID NO: 5845579 - DNA, 25 bp, Homo sapien
aaacgtcacgctgaatatatgacca

SEQ ID NO: 5845580 - DNA, 25 bp, Homo sapien
cgtcacgctgaatatatgaccacgc

SEQ ID NO: 5845581 - DNA, 25 bp, Homo sapien
acgctgaatatatgaccacgctcac

SEQ ID NO: 5845582 - DNA, 25 bp, Homo sapien
ctgaatatatgaccacgctcacccg

SEQ ID NO: 5845583 - DNA, 25 bp, Homo sapien
gaatatatgaccacgctcacccgca

SEQ ID NO: 5845584 - DNA, 25 bp, Homo sapien
cccgcatgattcccgcgccgctgct

SEQ ID NO: 5845585 - DNA, 25 bp, Homo sapien
catgattcccgcgccgctgctggga

SEQ ID NO: 5845586 - DNA, 25 bp, Homo sapien
gattcccgcgccgctgctgggagag

SEQ ID NO: 5845587 - DNA, 25 bp, Homo sapien
cgcgccgctgctgggagagatcccc

SEQ ID NO: 5845588 - DNA, 25 bp, Homo sapien
ccgctgctgggagagatcccctggc

SEQ ID NO: 5845589 - DNA, 25 bp, Homo sapien
ctgctgggagagatcccctggcttg

SEQ ID NO: 5845590 - DNA, 25 bp, Homo sapien
gctgggagagatcccctggcttgca

SEQ ID NO: 5845591 - DNA, 25 bp, Homo sapien
ggagagatcccctggcttgcagaaa

SEQ ID NO: 5845592 - DNA, 25 bp, Homo sapien
ggtgctggcggctggtttacgccgc

SEQ ID NO: 5845593 - DNA, 25 bp, Homo sapien
gagatcccctggcttgcagaaaatc

SEQ ID NO: 5845594 - DNA, 25 bp, Homo sapien
ctttctgacactttcacttttgcag

SEQ ID NO: 5845595 - DNA, 25 bp, Homo sapien
atcccctggcttgcagaaaatccag

SEQ ID NO: 5845596 - DNA, 25 bp, Homo sapien
tgacactttcacttttgcagattgg

SEQ ID NO: 5845597 - DNA, 25 bp, Homo sapien
tttgcagattgggtaacacaggaac

SEQ ID NO: 5845598 - DNA, 25 bp, Homo sapien
gaaaacgtcacgctgaatatatgac

SEQ ID NO: 5845599 - DNA, 25 bp, Homo sapien
aaacgtcacgctgaatatatgacca

SEQ ID NO: 5845600 - DNA, 25 bp, Homo sapien
cgtcacgctgaatatatgaccacgc

SEQ ID NO: 5845601 - DNA, 25 bp, Homo sapien
acgctgaatatatgaccacgctcac

SEQ ID NO: 5845602 - DNA, 25 bp, Homo sapien
ctgaatatatgaccacgctcacccg

SEQ ID NO: 5845603 - DNA, 25 bp, Homo sapien
gaatatatgaccacgctcacccgca

SEQ ID NO: 5845604 - DNA, 25 bp, Homo sapien
cccgcatgattcccgcgccgctgct

SEQ ID NO: 5845605 - DNA, 25 bp, Homo sapien
catgattcccgcgccgctgctggga

SEQ ID NO: 5845606 - DNA, 25 bp, Homo sapien
gattcccgcgccgctgctgggagag

SEQ ID NO: 5845607 - DNA, 25 bp, Homo sapien
cgcgccgctgctgggagagatcccc

SEQ ID NO: 5845608 - DNA, 25 bp, Homo sapien
ccgctgctgggagagatcccctggc

SEQ ID NO: 5845609 - DNA, 25 bp, Homo sapien
ctgctgggagagatcccctggcttg

SEQ ID NO: 5845610 - DNA, 25 bp, Homo sapien
gctgggagagatcccctggcttgca

SEQ ID NO: 5845611 - DNA, 25 bp, Homo sapien
ggagagatcccctggcttgcagaaa

SEQ ID NO: 5845612 - DNA, 25 bp, Homo sapien
ggtgctggcggctggtttacgccgc

SEQ ID NO: 5845613 - DNA, 25 bp, Homo sapien
gagatcccctggcttgcagaaaatc

SEQ ID NO: 5845614 - DNA, 25 bp, Homo sapien
ctttctgacactttcacttttgcag

SEQ ID NO: 5845615 - DNA, 25 bp, Homo sapien
atcccctggcttgcagaaaatccag

SEQ ID NO: 5845616 - DNA, 25 bp, Homo sapien
tgacactttcacttttgcagattgg

SEQ ID NO: 5845617 - DNA, 25 bp, Homo sapien
tttgcagattgggtaacacaggaac

SEQ ID NO: 5845618 - DNA, 25 bp, Homo sapien
gaaaacgtcacgctgaatatatgac

SEQ ID NO: 5845619 - DNA, 25 bp, Homo sapien
aaacgtcacgctgaatatatgacca

SEQ ID NO: 5845620 - DNA, 25 bp, Homo sapien
cgtcacgctgaatatatgaccacgc

SEQ ID NO: 5845621 - DNA, 25 bp, Homo sapien
acgctgaatatatgaccacgctcac

SEQ ID NO: 5845622 - DNA, 25 bp, Homo sapien
ctgaatatatgaccacgctcacccg

SEQ ID NO: 5845623 - DNA, 25 bp, Homo sapien
gaatatatgaccacgctcacccgca

SEQ ID NO: 5845624 - DNA, 25 bp, Homo sapien
cccgcatgattcccgcgccgctgct

SEQ ID NO: 5845625 - DNA, 25 bp, Homo sapien
catgattcccgcgccgctgctggga

SEQ ID NO: 5845626 - DNA, 25 bp, Homo sapien
gattcccgcgccgctgctgggagag

SEQ ID NO: 5845627 - DNA, 25 bp, Homo sapien
cgcgccgctgctgggagagatcccc

SEQ ID NO: 5845628 - DNA, 25 bp, Homo sapien
ccgctgctgggagagatcccctggc

SEQ ID NO: 5845629 - DNA, 25 bp, Homo sapien
ctgctgggagagatcccctggcttg

SEQ ID NO: 5845630 - DNA, 25 bp, Homo sapien
gctgggagagatcccctggcttgca

SEQ ID NO: 5845631 - DNA, 25 bp, Homo sapien
ggagagatcccctggcttgcagaaa

SEQ ID NO: 5845632 - DNA, 25 bp, Homo sapien
ggtgctggcggctggtttacgccgc

SEQ ID NO: 5845633 - DNA, 25 bp, Homo sapien
gagatcccctggcttgcagaaaatc

SEQ ID NO: 5845634 - DNA, 25 bp, Homo sapien
ctttctgacactttcacttttgcag

SEQ ID NO: 5845635 - DNA, 25 bp, Homo sapien
atcccctggcttgcagaaaatccag

SEQ ID NO: 5845636 - DNA, 25 bp, Homo sapien
tgacactttcacttttgcagattgg

SEQ ID NO: 5845637 - DNA, 25 bp, Homo sapien
tttgcagattgggtaacacaggaac

SEQ ID NO: 5845638 - DNA, 25 bp, Homo sapien
gaaaacgtcacgctgaatatatgac

SEQ ID NO: 5845639 - DNA, 25 bp, Homo sapien
aaacgtcacgctgaatatatgacca

SEQ ID NO: 5845640 - DNA, 25 bp, Homo sapien
cgtcacgctgaatatatgaccacgc

SEQ ID NO: 5845641 - DNA, 25 bp, Homo sapien
acgctgaatatatgaccacgctcac

SEQ ID NO: 5845642 - DNA, 25 bp, Homo sapien
ctgaatatatgaccacgctcacccg

SEQ ID NO: 5845643 - DNA, 25 bp, Homo sapien
gaatatatgaccacgctcacccgca

SEQ ID NO: 5845644 - DNA, 25 bp, Homo sapien
cccgcatgattcccgcgccgctgct

SEQ ID NO: 5845645 - DNA, 25 bp, Homo sapien
catgattcccgcgccgctgctggga

SEQ ID NO: 5845646 - DNA, 25 bp, Homo sapien
gattcccgcgccgctgctgggagag

SEQ ID NO: 5845647 - DNA, 25 bp, Homo sapien
cgcgccgctgctgggagagatcccc

SEQ ID NO: 5845648 - DNA, 25 bp, Homo sapien
ccgctgctgggagagatcccctggc

SEQ ID NO: 5845649 - DNA, 25 bp, Homo sapien
ctgctgggagagatcccctggcttg

SEQ ID NO: 5845650 - DNA, 25 bp, Homo sapien
gctgggagagatcccctggcttgca

SEQ ID NO: 5845651 - DNA, 25 bp, Homo sapien
ggagagatcccctggcttgcagaaa

SEQ ID NO: 5845652 - DNA, 25 bp, Homo sapien
ggtgctggcggctggtttacgccgc

SEQ ID NO: 5845653 - DNA, 25 bp, Homo sapien
gagatcccctggcttgcagaaaatc

SEQ ID NO: 5845654 - DNA, 25 bp, Homo sapien
ctttctgacactttcacttttgcag

SEQ ID NO: 5845655 - DNA, 25 bp, Homo sapien
atcccctggcttgcagaaaatccag

SEQ ID NO: 5845656 - DNA, 25 bp, Homo sapien
tgacactttcacttttgcagattgg

SEQ ID NO: 5845657 - DNA, 25 bp, Homo sapien
tttgcagattgggtaacacaggaac

SEQ ID NO: 5845658 - DNA, 25 bp, Homo sapien
gaaaacgtcacgctgaatatatgac

SEQ ID NO: 5845659 - DNA, 25 bp, Homo sapien
aaacgtcacgctgaatatatgacca

SEQ ID NO: 5845660 - DNA, 25 bp, Homo sapien
cgtcacgctgaatatatgaccacgc

SEQ ID NO: 5845661 - DNA, 25 bp, Homo sapien
acgctgaatatatgaccacgctcac

SEQ ID NO: 5845662 - DNA, 25 bp, Homo sapien
ctgaatatatgaccacgctcacccg

SEQ ID NO: 5845663 - DNA, 25 bp, Homo sapien
gaatatatgaccacgctcacccgca

SEQ ID NO: 5845664 - DNA, 25 bp, Homo sapien
cccgcatgattcccgcgccgctgct

SEQ ID NO: 5845665 - DNA, 25 bp, Homo sapien
catgattcccgcgccgctgctggga

SEQ ID NO: 5845666 - DNA, 25 bp, Homo sapien
gattcccgcgccgctgctgggagag

SEQ ID NO: 5845667 - DNA, 25 bp, Homo sapien
cgcgccgctgctgggagagatcccc

SEQ ID NO: 5845668 - DNA, 25 bp, Homo sapien
ccgctgctgggagagatcccctggc

SEQ ID NO: 5845669 - DNA, 25 bp, Homo sapien
ctgctgggagagatcccctggcttg

SEQ ID NO: 5845670 - DNA, 25 bp, Homo sapien
gctgggagagatcccctggcttgca

SEQ ID NO: 5845671 - DNA, 25 bp, Homo sapien
ggagagatcccctggcttgcagaaa

SEQ ID NO: 5845672 - DNA, 25 bp, Homo sapien
ggtgctggcggctggtttacgccgc

SEQ ID NO: 5845673 - DNA, 25 bp, Homo sapien
gagatcccctggcttgcagaaaatc

SEQ ID NO: 5845674 - DNA, 25 bp, Homo sapien
ctttctgacactttcacttttgcag

SEQ ID NO: 5845675 - DNA, 25 bp, Homo sapien
atcccctggcttgcagaaaatccag

SEQ ID NO: 5845676 - DNA, 25 bp, Homo sapien
tgacactttcacttttgcagattgg

SEQ ID NO: 5845677 - DNA, 25 bp, Homo sapien
tttgcagattgggtaacacaggaac

SEQ ID NO: 5845678 - DNA, 25 bp, Homo sapien
gaaaacgtcacgctgaatatatgac

SEQ ID NO: 5845679 - DNA, 25 bp, Homo sapien
aaacgtcacgctgaatatatgacca

SEQ ID NO: 5845680 - DNA, 25 bp, Homo sapien
cgtcacgctgaatatatgaccacgc

SEQ ID NO: 5845681 - DNA, 25 bp, Homo sapien
acgctgaatatatgaccacgctcac

SEQ ID NO: 5845682 - DNA, 25 bp, Homo sapien
ctgaatatatgaccacgctcacccg

SEQ ID NO: 5845683 - DNA, 25 bp, Homo sapien
gaatatatgaccacgctcacccgca

SEQ ID NO: 5845684 - DNA, 25 bp, Homo sapien
cccgcatgattcccgcgccgctgct

SEQ ID NO: 5845685 - DNA, 25 bp, Homo sapien
catgattcccgcgccgctgctggga

SEQ ID NO: 5845686 - DNA, 25 bp, Homo sapien
gattcccgcgccgctgctgggagag

SEQ ID NO: 5845687 - DNA, 25 bp, Homo sapien
cgcgccgctgctgggagagatcccc

SEQ ID NO: 5845688 - DNA, 25 bp, Homo sapien
ccgctgctgggagagatcccctggc

SEQ ID NO: 5845689 - DNA, 25 bp, Homo sapien
ctgctgggagagatcccctggcttg

SEQ ID NO: 5845690 - DNA, 25 bp, Homo sapien
gctgggagagatcccctggcttgca

SEQ ID NO: 5845691 - DNA, 25 bp, Homo sapien
ggagagatcccctggcttgcagaaa

SEQ ID NO: 5845692 - DNA, 25 bp, Homo sapien
ggtgctggcggctggtttacgccgc

SEQ ID NO: 5845693 - DNA, 25 bp, Homo sapien
gagatcccctggcttgcagaaaatc

SEQ ID NO: 5845694 - DNA, 25 bp, Homo sapien
ctttctgacactttcacttttgcag

SEQ ID NO: 5845695 - DNA, 25 bp, Homo sapien
atcccctggcttgcagaaaatccag

SEQ ID NO: 5845696 - DNA, 25 bp, Homo sapien
tgacactttcacttttgcagattgg

SEQ ID NO: 5845697 - DNA, 25 bp, Homo sapien
tttgcagattgggtaacacaggaac

SEQ ID NO: 5845698 - DNA, 25 bp, Homo sapien
gaaaacgtcacgctgaatatatgac

SEQ ID NO: 5845699 - DNA, 25 bp, Homo sapien
aaacgtcacgctgaatatatgacca

SEQ ID NO: 5845700 - DNA, 25 bp, Homo sapien
cgtcacgctgaatatatgaccacgc

SEQ ID NO: 5845701 - DNA, 25 bp, Homo sapien
acgctgaatatatgaccacgctcac

SEQ ID NO: 5845702 - DNA, 25 bp, Homo sapien
ctgaatatatgaccacgctcacccg

SEQ ID NO: 5845703 - DNA, 25 bp, Homo sapien
gaatatatgaccacgctcacccgca

SEQ ID NO: 5845704 - DNA, 25 bp, Homo sapien
cccgcatgattcccgcgccgctgct

SEQ ID NO: 5845705 - DNA, 25 bp, Homo sapien
catgattcccgcgccgctgctggga

SEQ ID NO: 5845706 - DNA, 25 bp, Homo sapien
gattcccgcgccgctgctgggagag

SEQ ID NO: 5845707 - DNA, 25 bp, Homo sapien
cgcgccgctgctgggagagatcccc

SEQ ID NO: 5845708 - DNA, 25 bp, Homo sapien
ccgctgctgggagagatcccctggc

SEQ ID NO: 5845709 - DNA, 25 bp, Homo sapien
ctgctgggagagatcccctggcttg

SEQ ID NO: 5845710 - DNA, 25 bp, Homo sapien
gctgggagagatcccctggcttgca

SEQ ID NO: 5845711 - DNA, 25 bp, Homo sapien
ggagagatcccctggcttgcagaaa

SEQ ID NO: 5845712 - DNA, 25 bp, Homo sapien
ggtgctggcggctggtttacgccgc

SEQ ID NO: 5845713 - DNA, 25 bp, Homo sapien
gagatcccctggcttgcagaaaatc

SEQ ID NO: 5845714 - DNA, 25 bp, Homo sapien
ctttctgacactttcacttttgcag

SEQ ID NO: 5845715 - DNA, 25 bp, Homo sapien
atcccctggcttgcagaaaatccag

SEQ ID NO: 5845716 - DNA, 25 bp, Homo sapien
tgacactttcacttttgcagattgg

SEQ ID NO: 5845717 - DNA, 25 bp, Homo sapien
tttgcagattgggtaacacaggaac

SEQ ID NO: 5845718 - DNA, 25 bp, Homo sapien
gaaaacgtcacgctgaatatatgac

SEQ ID NO: 5845719 - DNA, 25 bp, Homo sapien
aaacgtcacgctgaatatatgacca

SEQ ID NO: 5845720 - DNA, 25 bp, Homo sapien
cgtcacgctgaatatatgaccacgc

SEQ ID NO: 5845721 - DNA, 25 bp, Homo sapien
acgctgaatatatgaccacgctcac

SEQ ID NO: 5845722 - DNA, 25 bp, Homo sapien
ctgaatatatgaccacgctcacccg

SEQ ID NO: 5845723 - DNA, 25 bp, Homo sapien
gaatatatgaccacgctcacccgca

SEQ ID NO: 5845724 - DNA, 25 bp, Homo sapien
cccgcatgattcccgcgccgctgct

SEQ ID NO: 5845725 - DNA, 25 bp, Homo sapien
catgattcccgcgccgctgctggga

SEQ ID NO: 5845726 - DNA, 25 bp, Homo sapien
gattcccgcgccgctgctgggagag

SEQ ID NO: 5845727 - DNA, 25 bp, Homo sapien
cgcgccgctgctgggagagatcccc

SEQ ID NO: 5845728 - DNA, 25 bp, Homo sapien
ccgctgctgggagagatcccctggc

SEQ ID NO: 5845729 - DNA, 25 bp, Homo sapien
ctgctgggagagatcccctggcttg

SEQ ID NO: 5845730 - DNA, 25 bp, Homo sapien
gctgggagagatcccctggcttgca

SEQ ID NO: 5845731 - DNA, 25 bp, Homo sapien
ggagagatcccctggcttgcagaaa

SEQ ID NO: 5845732 - DNA, 25 bp, Homo sapien
ggtgctggcggctggtttacgccgc

SEQ ID NO: 5845733 - DNA, 25 bp, Homo sapien
gagatcccctggcttgcagaaaatc

SEQ ID NO: 5845734 - DNA, 25 bp, Homo sapien
ctttctgacactttcacttttgcag

SEQ ID NO: 5845735 - DNA, 25 bp, Homo sapien
atcccctggcttgcagaaaatccag

SEQ ID NO: 5845736 - DNA, 25 bp, Homo sapien
tgacactttcacttttgcagattgg

SEQ ID NO: 5845737 - DNA, 25 bp, Homo sapien
tttgcagattgggtaacacaggaac

SEQ ID NO: 5845738 - DNA, 25 bp, Homo sapien
gaaaacgtcacgctgaatatatgac

SEQ ID NO: 5845739 - DNA, 25 bp, Homo sapien
aaacgtcacgctgaatatatgacca

SEQ ID NO: 5845740 - DNA, 25 bp, Homo sapien
cgtcacgctgaatatatgaccacgc

SEQ ID NO: 5845741 - DNA, 25 bp, Homo sapien
acgctgaatatatgaccacgctcac

SEQ ID NO: 5845742 - DNA, 25 bp, Homo sapien
ctgaatatatgaccacgctcacccg

SEQ ID NO: 5845743 - DNA, 25 bp, Homo sapien
gaatatatgaccacgctcacccgca

SEQ ID NO: 5845744 - DNA, 25 bp, Homo sapien
cccgcatgattcccgcgccgctgct

SEQ ID NO: 5845745 - DNA, 25 bp, Homo sapien
catgattcccgcgccgctgctggga

SEQ ID NO: 5845746 - DNA, 25 bp, Homo sapien
gattcccgcgccgctgctgggagag

SEQ ID NO: 5845747 - DNA, 25 bp, Homo sapien
cgcgccgctgctgggagagatcccc

SEQ ID NO: 5845748 - DNA, 25 bp, Homo sapien
ccgctgctgggagagatcccctggc

SEQ ID NO: 5845749 - DNA, 25 bp, Homo sapien
ctgctgggagagatcccctggcttg

SEQ ID NO: 5845750 - DNA, 25 bp, Homo sapien
gctgggagagatcccctggcttgca

SEQ ID NO: 5845751 - DNA, 25 bp, Homo sapien
ggagagatcccctggcttgcagaaa

SEQ ID NO: 5845752 - DNA, 25 bp, Homo sapien
ggtgctggcggctggtttacgccgc

SEQ ID NO: 5845753 - DNA, 25 bp, Homo sapien
gagatcccctggcttgcagaaaatc

SEQ ID NO: 5845754 - DNA, 25 bp, Homo sapien
ctttctgacactttcacttttgcag

SEQ ID NO: 5845755 - DNA, 25 bp, Homo sapien
atcccctggcttgcagaaaatccag

SEQ ID NO: 5845756 - DNA, 25 bp, Homo sapien
tgacactttcacttttgcagattgg

SEQ ID NO: 5845757 - DNA, 25 bp, Homo sapien
tttgcagattgggtaacacaggaac

SEQ ID NO: 5845758 - DNA, 25 bp, Homo sapien
gaaaacgtcacgctgaatatatgac

SEQ ID NO: 5845759 - DNA, 25 bp, Homo sapien
aaacgtcacgctgaatatatgacca

SEQ ID NO: 5845760 - DNA, 25 bp, Homo sapien
cgtcacgctgaatatatgaccacgc

SEQ ID NO: 5845761 - DNA, 25 bp, Homo sapien
acgctgaatatatgaccacgctcac

SEQ ID NO: 5845762 - DNA, 25 bp, Homo sapien
ctgaatatatgaccacgctcacccg

SEQ ID NO: 5845763 - DNA, 25 bp, Homo sapien
gaatatatgaccacgctcacccgca

SEQ ID NO: 5845764 - DNA, 25 bp, Homo sapien
cccgcatgattcccgcgccgctgct

SEQ ID NO: 5845765 - DNA, 25 bp, Homo sapien
catgattcccgcgccgctgctggga

SEQ ID NO: 5845766 - DNA, 25 bp, Homo sapien
gattcccgcgccgctgctgggagag

SEQ ID NO: 5845767 - DNA, 25 bp, Homo sapien
cgcgccgctgctgggagagatcccc

SEQ ID NO: 5845768 - DNA, 25 bp, Homo sapien
ccgctgctgggagagatcccctggc

SEQ ID NO: 5845769 - DNA, 25 bp, Homo sapien
ctgctgggagagatcccctggcttg

SEQ ID NO: 5845770 - DNA, 25 bp, Homo sapien
gctgggagagatcccctggcttgca

SEQ ID NO: 5845771 - DNA, 25 bp, Homo sapien
ggagagatcccctggcttgcagaaa

SEQ ID NO: 5845772 - DNA, 25 bp, Homo sapien
ggtgctggcggctggtttacgccgc

SEQ ID NO: 5845773 - DNA, 25 bp, Homo sapien
gagatcccctggcttgcagaaaatc

SEQ ID NO: 5845774 - DNA, 25 bp, Homo sapien
ctttctgacactttcacttttgcag

SEQ ID NO: 5845775 - DNA, 25 bp, Homo sapien
atcccctggcttgcagaaaatccag

SEQ ID NO: 5845776 - DNA, 25 bp, Homo sapien
tgacactttcacttttgcagattgg

SEQ ID NO: 5845777 - DNA, 25 bp, Homo sapien
tttgcagattgggtaacacaggaac

SEQ ID NO: 5845778 - DNA, 25 bp, Homo sapien
gaaaacgtcacgctgaatatatgac

SEQ ID NO: 5845779 - DNA, 25 bp, Homo sapien
aaacgtcacgctgaatatatgacca

SEQ ID NO: 5845780 - DNA, 25 bp, Homo sapien
cgtcacgctgaatatatgaccacgc

SEQ ID NO: 5845781 - DNA, 25 bp, Homo sapien
acgctgaatatatgaccacgctcac

SEQ ID NO: 5845782 - DNA, 25 bp, Homo sapien
ctgaatatatgaccacgctcacccg

SEQ ID NO: 5845783 - DNA, 25 bp, Homo sapien
gaatatatgaccacgctcacccgca

SEQ ID NO: 5845784 - DNA, 25 bp, Homo sapien
cccgcatgattcccgcgccgctgct

SEQ ID NO: 5845785 - DNA, 25 bp, Homo sapien
catgattcccgcgccgctgctggga

SEQ ID NO: 5845786 - DNA, 25 bp, Homo sapien
gattcccgcgccgctgctgggagag

SEQ ID NO: 5845787 - DNA, 25 bp, Homo sapien
cgcgccgctgctgggagagatcccc

SEQ ID NO: 5845788 - DNA, 25 bp, Homo sapien
ccgctgctgggagagatcccctggc

SEQ ID NO: 5845789 - DNA, 25 bp, Homo sapien
ctgctgggagagatcccctggcttg

SEQ ID NO: 5845790 - DNA, 25 bp, Homo sapien
gctgggagagatcccctggcttgca

SEQ ID NO: 5845791 - DNA, 25 bp, Homo sapien
ggagagatcccctggcttgcagaaa

SEQ ID NO: 5845792 - DNA, 25 bp, Homo sapien
ggtgctggcggctggtttacgccgc

SEQ ID NO: 5845793 - DNA, 25 bp, Homo sapien
gagatcccctggcttgcagaaaatc

SEQ ID NO: 5845794 - DNA, 25 bp, Homo sapien
ctttctgacactttcacttttgcag

SEQ ID NO: 5845795 - DNA, 25 bp, Homo sapien
atcccctggcttgcagaaaatccag

SEQ ID NO: 5845796 - DNA, 25 bp, Homo sapien
tgacactttcacttttgcagattgg

SEQ ID NO: 5845797 - DNA, 25 bp, Homo sapien
tttgcagattgggtaacacaggaac

SEQ ID NO: 5845798 - DNA, 25 bp, Homo sapien
gaaaacgtcacgctgaatatatgac

SEQ ID NO: 5845799 - DNA, 25 bp, Homo sapien
aaacgtcacgctgaatatatgacca

SEQ ID NO: 5845800 - DNA, 25 bp, Homo sapien
cgtcacgctgaatatatgaccacgc

SEQ ID NO: 5845801 - DNA, 25 bp, Homo sapien
acgctgaatatatgaccacgctcac

SEQ ID NO: 5845802 - DNA, 25 bp, Homo sapien
ctgaatatatgaccacgctcacccg

SEQ ID NO: 5845803 - DNA, 25 bp, Homo sapien
gaatatatgaccacgctcacccgca

SEQ ID NO: 5845804 - DNA, 25 bp, Homo sapien
cccgcatgattcccgcgccgctgct

SEQ ID NO: 5845805 - DNA, 25 bp, Homo sapien
catgattcccgcgccgctgctggga

SEQ ID NO: 5845806 - DNA, 25 bp, Homo sapien
gattcccgcgccgctgctgggagag

SEQ ID NO: 5845807 - DNA, 25 bp, Homo sapien
cgcgccgctgctgggagagatcccc

SEQ ID NO: 5845808 - DNA, 25 bp, Homo sapien
ccgctgctgggagagatcccctggc

SEQ ID NO: 5845809 - DNA, 25 bp, Homo sapien
ctgctgggagagatcccctggcttg

SEQ ID NO: 5845810 - DNA, 25 bp, Homo sapien
gctgggagagatcccctggcttgca

SEQ ID NO: 5845811 - DNA, 25 bp, Homo sapien
ggagagatcccctggcttgcagaaa

SEQ ID NO: 5845812 - DNA, 25 bp, Homo sapien
ggtgctggcggctggtttacgccgc

SEQ ID NO: 5845813 - DNA, 25 bp, Homo sapien
gagatcccctggcttgcagaaaatc

SEQ ID NO: 5845814 - DNA, 25 bp, Homo sapien
ctttctgacactttcacttttgcag

SEQ ID NO: 5845815 - DNA, 25 bp, Homo sapien
atcccctggcttgcagaaaatccag

SEQ ID NO: 5845816 - DNA, 25 bp, Homo sapien
tgacactttcacttttgcagattgg

SEQ ID NO: 5845817 - DNA, 25 bp, Homo sapien
tttgcagattgggtaacacaggaac

SEQ ID NO: 5845818 - DNA, 25 bp, Homo sapien
gaaaacgtcacgctgaatatatgac

SEQ ID NO: 5845819 - DNA, 25 bp, Homo sapien
aaacgtcacgctgaatatatgacca

SEQ ID NO: 5845820 - DNA, 25 bp, Homo sapien
cgtcacgctgaatatatgaccacgc

SEQ ID NO: 5845821 - DNA, 25 bp, Homo sapien
acgctgaatatatgaccacgctcac

SEQ ID NO: 5845822 - DNA, 25 bp, Homo sapien
ctgaatatatgaccacgctcacccg

SEQ ID NO: 5845823 - DNA, 25 bp, Homo sapien
gaatatatgaccacgctcacccgca

SEQ ID NO: 5845824 - DNA, 25 bp, Homo sapien
cccgcatgattcccgcgccgctgct

SEQ ID NO: 5845825 - DNA, 25 bp, Homo sapien
catgattcccgcgccgctgctggga

SEQ ID NO: 5845826 - DNA, 25 bp, Homo sapien
gattcccgcgccgctgctgggagag

SEQ ID NO: 5845827 - DNA, 25 bp, Homo sapien
cgcgccgctgctgggagagatcccc

SEQ ID NO: 5845828 - DNA, 25 bp, Homo sapien
ccgctgctgggagagatcccctggc

SEQ ID NO: 5845829 - DNA, 25 bp, Homo sapien
ctgctgggagagatcccctggcttg

SEQ ID NO: 5845830 - DNA, 25 bp, Homo sapien
gctgggagagatcccctggcttgca

SEQ ID NO: 5845831 - DNA, 25 bp, Homo sapien
ggagagatcccctggcttgcagaaa

SEQ ID NO: 5845832 - DNA, 25 bp, Homo sapien
ggtgctggcggctggtttacgccgc

SEQ ID NO: 5845833 - DNA, 25 bp, Homo sapien
gagatcccctggcttgcagaaaatc

SEQ ID NO: 5845834 - DNA, 25 bp, Homo sapien
ctttctgacactttcacttttgcag

SEQ ID NO: 5845835 - DNA, 25 bp, Homo sapien
atcccctggcttgcagaaaatccag

SEQ ID NO: 5845836 - DNA, 25 bp, Homo sapien
tgacactttcacttttgcagattgg

SEQ ID NO: 5845837 - DNA, 25 bp, Homo sapien
tttgcagattgggtaacacaggaac

SEQ ID NO: 5845838 - DNA, 25 bp, Homo sapien
gaaaacgtcacgctgaatatatgac

SEQ ID NO: 5845839 - DNA, 25 bp, Homo sapien
aaacgtcacgctgaatatatgacca

SEQ ID NO: 5845840 - DNA, 25 bp, Homo sapien
cgtcacgctgaatatatgaccacgc

SEQ ID NO: 5845841 - DNA, 25 bp, Homo sapien
acgctgaatatatgaccacgctcac

SEQ ID NO: 5845842 - DNA, 25 bp, Homo sapien
ctgaatatatgaccacgctcacccg

SEQ ID NO: 5845843 - DNA, 25 bp, Homo sapien
gaatatatgaccacgctcacccgca

SEQ ID NO: 5845844 - DNA, 25 bp, Homo sapien
cccgcatgattcccgcgccgctgct

SEQ ID NO: 5845845 - DNA, 25 bp, Homo sapien
catgattcccgcgccgctgctggga

SEQ ID NO: 5845846 - DNA, 25 bp, Homo sapien
gattcccgcgccgctgctgggagag

SEQ ID NO: 5845847 - DNA, 25 bp, Homo sapien
cgcgccgctgctgggagagatcccc

SEQ ID NO: 5845848 - DNA, 25 bp, Homo sapien
ccgctgctgggagagatcccctggc

SEQ ID NO: 5845849 - DNA, 25 bp, Homo sapien
ctgctgggagagatcccctggcttg

SEQ ID NO: 5845850 - DNA, 25 bp, Homo sapien
gctgggagagatcccctggcttgca

SEQ ID NO: 5845851 - DNA, 25 bp, Homo sapien
ggagagatcccctggcttgcagaaa

SEQ ID NO: 5845852 - DNA, 25 bp, Homo sapien
ggtgctggcggctggtttacgccgc

SEQ ID NO: 5845853 - DNA, 25 bp, Homo sapien
gagatcccctggcttgcagaaaatc

SEQ ID NO: 5845854 - DNA, 25 bp, Homo sapien
ctttctgacactttcacttttgcag

SEQ ID NO: 5845855 - DNA, 25 bp, Homo sapien
atcccctggcttgcagaaaatccag

SEQ ID NO: 5845856 - DNA, 25 bp, Homo sapien
tgacactttcacttttgcagattgg

SEQ ID NO: 5845857 - DNA, 25 bp, Homo sapien
tttgcagattgggtaacacaggaac

SEQ ID NO: 5845858 - DNA, 25 bp, Homo sapien
gaaaacgtcacgctgaatatatgac

SEQ ID NO: 5845859 - DNA, 25 bp, Homo sapien
aaacgtcacgctgaatatatgacca

SEQ ID NO: 5845860 - DNA, 25 bp, Homo sapien
cgtcacgctgaatatatgaccacgc

SEQ ID NO: 5845861 - DNA, 25 bp, Homo sapien
acgctgaatatatgaccacgctcac

SEQ ID NO: 5845862 - DNA, 25 bp, Homo sapien
ctgaatatatgaccacgctcacccg

SEQ ID NO: 5845863 - DNA, 25 bp, Homo sapien
gaatatatgaccacgctcacccgca

SEQ ID NO: 5845864 - DNA, 25 bp, Homo sapien
cccgcatgattcccgcgccgctgct

SEQ ID NO: 5845865 - DNA, 25 bp, Homo sapien
catgattcccgcgccgctgctggga

SEQ ID NO: 5845866 - DNA, 25 bp, Homo sapien
gattcccgcgccgctgctgggagag

SEQ ID NO: 5845867 - DNA, 25 bp, Homo sapien
cgcgccgctgctgggagagatcccc

SEQ ID NO: 5845868 - DNA, 25 bp, Homo sapien
ccgctgctgggagagatcccctggc

SEQ ID NO: 5845869 - DNA, 25 bp, Homo sapien
ctgctgggagagatcccctggcttg

SEQ ID NO: 5845870 - DNA, 25 bp, Homo sapien
gctgggagagatcccctggcttgca

SEQ ID NO: 5845871 - DNA, 25 bp, Homo sapien
ggagagatcccctggcttgcagaaa

SEQ ID NO: 5845872 - DNA, 25 bp, Homo sapien
ggtgctggcggctggtttacgccgc

SEQ ID NO: 5845873 - DNA, 25 bp, Homo sapien
gagatcccctggcttgcagaaaatc

SEQ ID NO: 5845874 - DNA, 25 bp, Homo sapien
ctttctgacactttcacttttgcag

SEQ ID NO: 5845875 - DNA, 25 bp, Homo sapien
atcccctggcttgcagaaaatccag

SEQ ID NO: 5845876 - DNA, 25 bp, Homo sapien
tgacactttcacttttgcagattgg

SEQ ID NO: 5845877 - DNA, 25 bp, Homo sapien
tttgcagattgggtaacacaggaac

SEQ ID NO: 5845878 - DNA, 25 bp, Homo sapien
gaaaacgtcacgctgaatatatgac

SEQ ID NO: 5845879 - DNA, 25 bp, Homo sapien
aaacgtcacgctgaatatatgacca

SEQ ID NO: 5845880 - DNA, 25 bp, Homo sapien
cgtcacgctgaatatatgaccacgc

SEQ ID NO: 5845881 - DNA, 25 bp, Homo sapien
acgctgaatatatgaccacgctcac

SEQ ID NO: 5845882 - DNA, 25 bp, Homo sapien
ctgaatatatgaccacgctcacccg

SEQ ID NO: 5845883 - DNA, 25 bp, Homo sapien
gaatatatgaccacgctcacccgca

SEQ ID NO: 5845884 - DNA, 25 bp, Homo sapien
cccgcatgattcccgcgccgctgct

SEQ ID NO: 5845885 - DNA, 25 bp, Homo sapien
catgattcccgcgccgctgctggga

SEQ ID NO: 5845886 - DNA, 25 bp, Homo sapien
gattcccgcgccgctgctgggagag

SEQ ID NO: 5845887 - DNA, 25 bp, Homo sapien
cgcgccgctgctgggagagatcccc

SEQ ID NO: 5845888 - DNA, 25 bp, Homo sapien
ccgctgctgggagagatcccctggc

SEQ ID NO: 5845889 - DNA, 25 bp, Homo sapien
ctgctgggagagatcccctggcttg

SEQ ID NO: 5845890 - DNA, 25 bp, Homo sapien
gctgggagagatcccctggcttgca

SEQ ID NO: 5845891 - DNA, 25 bp, Homo sapien
ggagagatcccctggcttgcagaaa

SEQ ID NO: 5845892 - DNA, 25 bp, Homo sapien
ggtgctggcggctggtttacgccgc

SEQ ID NO: 5845893 - DNA, 25 bp, Homo sapien
gagatcccctggcttgcagaaaatc

SEQ ID NO: 5845894 - DNA, 25 bp, Homo sapien
ctttctgacactttcacttttgcag

SEQ ID NO: 5845895 - DNA, 25 bp, Homo sapien
atcccctggcttgcagaaaatccag

SEQ ID NO: 5845896 - DNA, 25 bp, Homo sapien
tgacactttcacttttgcagattgg

SEQ ID NO: 5845897 - DNA, 25 bp, Homo sapien
tttgcagattgggtaacacaggaac

SEQ ID NO: 5845898 - DNA, 25 bp, Homo sapien
gaaaacgtcacgctgaatatatgac

SEQ ID NO: 5845899 - DNA, 25 bp, Homo sapien
aaacgtcacgctgaatatatgacca

SEQ ID NO: 5845900 - DNA, 25 bp, Homo sapien
cgtcacgctgaatatatgaccacgc

SEQ ID NO: 5845901 - DNA, 25 bp, Homo sapien
acgctgaatatatgaccacgctcac

SEQ ID NO: 5845902 - DNA, 25 bp, Homo sapien
ctgaatatatgaccacgctcacccg

SEQ ID NO: 5845903 - DNA, 25 bp, Homo sapien
gaatatatgaccacgctcacccgca

SEQ ID NO: 5845904 - DNA, 25 bp, Homo sapien
cccgcatgattcccgcgccgctgct

SEQ ID NO: 5845905 - DNA, 25 bp, Homo sapien
catgattcccgcgccgctgctggga

SEQ ID NO: 5845906 - DNA, 25 bp, Homo sapien
gattcccgcgccgctgctgggagag

SEQ ID NO: 5845907 - DNA, 25 bp, Homo sapien
cgcgccgctgctgggagagatcccc

SEQ ID NO: 5845908 - DNA, 25 bp, Homo sapien
ccgctgctgggagagatcccctggc

SEQ ID NO: 5845909 - DNA, 25 bp, Homo sapien
ctgctgggagagatcccctggcttg

SEQ ID NO: 5845910 - DNA, 25 bp, Homo sapien
gctgggagagatcccctggcttgca

SEQ ID NO: 5845911 - DNA, 25 bp, Homo sapien
ggagagatcccctggcttgcagaaa

SEQ ID NO: 5845912 - DNA, 25 bp, Homo sapien
ggtgctggcggctggtttacgccgc

SEQ ID NO: 5845913 - DNA, 25 bp, Homo sapien
gagatcccctggcttgcagaaaatc

SEQ ID NO: 5845914 - DNA, 25 bp, Homo sapien
ctttctgacactttcacttttgcag

SEQ ID NO: 5845915 - DNA, 25 bp, Homo sapien
atcccctggcttgcagaaaatccag

SEQ ID NO: 5845916 - DNA, 25 bp, Homo sapien
tgacactttcacttttgcagattgg

SEQ ID NO: 5845917 - DNA, 25 bp, Homo sapien
tttgcagattgggtaacacaggaac

SEQ ID NO: 5845918 - DNA, 25 bp, Homo sapien
gaaaacgtcacgctgaatatatgac

SEQ ID NO: 5845919 - DNA, 25 bp, Homo sapien
aaacgtcacgctgaatatatgacca

SEQ ID NO: 5845920 - DNA, 25 bp, Homo sapien
cgtcacgctgaatatatgaccacgc

SEQ ID NO: 5845921 - DNA, 25 bp, Homo sapien
acgctgaatatatgaccacgctcac

SEQ ID NO: 5845922 - DNA, 25 bp, Homo sapien
ctgaatatatgaccacgctcacccg

SEQ ID NO: 5845923 - DNA, 25 bp, Homo sapien
gaatatatgaccacgctcacccgca

SEQ ID NO: 5845924 - DNA, 25 bp, Homo sapien
cccgcatgattcccgcgccgctgct

SEQ ID NO: 5845925 - DNA, 25 bp, Homo sapien
catgattcccgcgccgctgctggga

SEQ ID NO: 5845926 - DNA, 25 bp, Homo sapien
gattcccgcgccgctgctgggagag

SEQ ID NO: 5845927 - DNA, 25 bp, Homo sapien
cgcgccgctgctgggagagatcccc

SEQ ID NO: 5845928 - DNA, 25 bp, Homo sapien
ccgctgctgggagagatcccctggc

SEQ ID NO: 5845929 - DNA, 25 bp, Homo sapien
ctgctgggagagatcccctggcttg

SEQ ID NO: 5845930 - DNA, 25 bp, Homo sapien
gctgggagagatcccctggcttgca

SEQ ID NO: 5845931 - DNA, 25 bp, Homo sapien
ggagagatcccctggcttgcagaaa

SEQ ID NO: 5845932 - DNA, 25 bp, Homo sapien
ggtgctggcggctggtttacgccgc

SEQ ID NO: 5845933 - DNA, 25 bp, Homo sapien
gagatcccctggcttgcagaaaatc

SEQ ID NO: 5845934 - DNA, 25 bp, Homo sapien
ctttctgacactttcacttttgcag

SEQ ID NO: 5845935 - DNA, 25 bp, Homo sapien
atcccctggcttgcagaaaatccag

SEQ ID NO: 5845936 - DNA, 25 bp, Homo sapien
tgacactttcacttttgcagattgg

SEQ ID NO: 5845937 - DNA, 25 bp, Homo sapien
tttgcagattgggtaacacaggaac

SEQ ID NO: 5845938 - DNA, 25 bp, Homo sapien
gaaaacgtcacgctgaatatatgac

SEQ ID NO: 5845939 - DNA, 25 bp, Homo sapien
aaacgtcacgctgaatatatgacca

SEQ ID NO: 5845940 - DNA, 25 bp, Homo sapien
cgtcacgctgaatatatgaccacgc

SEQ ID NO: 5845941 - DNA, 25 bp, Homo sapien
acgctgaatatatgaccacgctcac

SEQ ID NO: 5845942 - DNA, 25 bp, Homo sapien
ctgaatatatgaccacgctcacccg

SEQ ID NO: 5845943 - DNA, 25 bp, Homo sapien
gaatatatgaccacgctcacccgca

SEQ ID NO: 5845944 - DNA, 25 bp, Homo sapien
cccgcatgattcccgcgccgctgct

SEQ ID NO: 5845945 - DNA, 25 bp, Homo sapien
catgattcccgcgccgctgctggga

SEQ ID NO: 5845946 - DNA, 25 bp, Homo sapien
gattcccgcgccgctgctgggagag

SEQ ID NO: 5845947 - DNA, 25 bp, Homo sapien
cgcgccgctgctgggagagatcccc

SEQ ID NO: 5845948 - DNA, 25 bp, Homo sapien
ccgctgctgggagagatcccctggc

SEQ ID NO: 5845949 - DNA, 25 bp, Homo sapien
ctgctgggagagatcccctggcttg

SEQ ID NO: 5845950 - DNA, 25 bp, Homo sapien
gctgggagagatcccctggcttgca

SEQ ID NO: 5845951 - DNA, 25 bp, Homo sapien
ggagagatcccctggcttgcagaaa

SEQ ID NO: 5845952 - DNA, 25 bp, Homo sapien
ggtgctggcggctggtttacgccgc

SEQ ID NO: 5845953 - DNA, 25 bp, Homo sapien
gagatcccctggcttgcagaaaatc

SEQ ID NO: 5845954 - DNA, 25 bp, Homo sapien
ctttctgacactttcacttttgcag

SEQ ID NO: 5845955 - DNA, 25 bp, Homo sapien
atcccctggcttgcagaaaatccag

SEQ ID NO: 5845956 - DNA, 25 bp, Homo sapien
tgacactttcacttttgcagattgg

SEQ ID NO: 5845957 - DNA, 25 bp, Homo sapien
tttgcagattgggtaacacaggaac

SEQ ID NO: 5845958 - DNA, 25 bp, Homo sapien
gaaaacgtcacgctgaatatatgac

SEQ ID NO: 5845959 - DNA, 25 bp, Homo sapien
aaacgtcacgctgaatatatgacca

SEQ ID NO: 5845960 - DNA, 25 bp, Homo sapien
cgtcacgctgaatatatgaccacgc

SEQ ID NO: 5845961 - DNA, 25 bp, Homo sapien
acgctgaatatatgaccacgctcac

SEQ ID NO: 5845962 - DNA, 25 bp, Homo sapien
ctgaatatatgaccacgctcacccg

SEQ ID NO: 5845963 - DNA, 25 bp, Homo sapien
gaatatatgaccacgctcacccgca

SEQ ID NO: 5845964 - DNA, 25 bp, Homo sapien
cccgcatgattcccgcgccgctgct

SEQ ID NO: 5845965 - DNA, 25 bp, Homo sapien
catgattcccgcgccgctgctggga

SEQ ID NO: 5845966 - DNA, 25 bp, Homo sapien
gattcccgcgccgctgctgggagag

SEQ ID NO: 5845967 - DNA, 25 bp, Homo sapien
cgcgccgctgctgggagagatcccc

SEQ ID NO: 5845968 - DNA, 25 bp, Homo sapien
ccgctgctgggagagatcccctggc

SEQ ID NO: 5845969 - DNA, 25 bp, Homo sapien
ctgctgggagagatcccctggcttg

SEQ ID NO: 5845970 - DNA, 25 bp, Homo sapien
gctgggagagatcccctggcttgca

SEQ ID NO: 5845971 - DNA, 25 bp, Homo sapien
ggagagatcccctggcttgcagaaa

SEQ ID NO: 5845972 - DNA, 25 bp, Homo sapien
ggtgctggcggctggtttacgccgc

SEQ ID NO: 5845973 - DNA, 25 bp, Homo sapien
gagatcccctggcttgcagaaaatc

SEQ ID NO: 5845974 - DNA, 25 bp, Homo sapien
ctttctgacactttcacttttgcag

SEQ ID NO: 5845975 - DNA, 25 bp, Homo sapien
atcccctggcttgcagaaaatccag

SEQ ID NO: 5845976 - DNA, 25 bp, Homo sapien
tgacactttcacttttgcagattgg

SEQ ID NO: 5845977 - DNA, 25 bp, Homo sapien
tttgcagattgggtaacacaggaac

SEQ ID NO: 5845978 - DNA, 25 bp, Homo sapien
gaaaacgtcacgctgaatatatgac

SEQ ID NO: 5845979 - DNA, 25 bp, Homo sapien
aaacgtcacgctgaatatatgacca

SEQ ID NO: 5845980 - DNA, 25 bp, Homo sapien
cgtcacgctgaatatatgaccacgc

SEQ ID NO: 5845981 - DNA, 25 bp, Homo sapien
acgctgaatatatgaccacgctcac

SEQ ID NO: 5845982 - DNA, 25 bp, Homo sapien
ctgaatatatgaccacgctcacccg

SEQ ID NO: 5845983 - DNA, 25 bp, Homo sapien
gaatatatgaccacgctcacccgca

SEQ ID NO: 5845984 - DNA, 25 bp, Homo sapien
cccgcatgattcccgcgccgctgct

SEQ ID NO: 5845985 - DNA, 25 bp, Homo sapien
catgattcccgcgccgctgctggga

SEQ ID NO: 5845986 - DNA, 25 bp, Homo sapien
gattcccgcgccgctgctgggagag

SEQ ID NO: 5845987 - DNA, 25 bp, Homo sapien
cgcgccgctgctgggagagatcccc

SEQ ID NO: 5845988 - DNA, 25 bp, Homo sapien
ccgctgctgggagagatcccctggc

SEQ ID NO: 5845989 - DNA, 25 bp, Homo sapien
ctgctgggagagatcccctggcttg

SEQ ID NO: 5845990 - DNA, 25 bp, Homo sapien
gctgggagagatcccctggcttgca

SEQ ID NO: 5845991 - DNA, 25 bp, Homo sapien
ggagagatcccctggcttgcagaaa

SEQ ID NO: 5845992 - DNA, 25 bp, Homo sapien
ggtgctggcggctggtttacgccgc

SEQ ID NO: 5845993 - DNA, 25 bp, Homo sapien
gagatcccctggcttgcagaaaatc

SEQ ID NO: 5845994 - DNA, 25 bp, Homo sapien
ctttctgacactttcacttttgcag

SEQ ID NO: 5845995 - DNA, 25 bp, Homo sapien
atcccctggcttgcagaaaatccag

SEQ ID NO: 5845996 - DNA, 25 bp, Homo sapien
tgacactttcacttttgcagattgg

SEQ ID NO: 5845997 - DNA, 25 bp, Homo sapien
tttgcagattgggtaacacaggaac

SEQ ID NO: 5845998 - DNA, 25 bp, Homo sapien
gaaaacgtcacgctgaatatatgac

SEQ ID NO: 5845999 - DNA, 25 bp, Homo sapien
aaacgtcacgctgaatatatgacca

SEQ ID NO: 5846000 - DNA, 25 bp, Homo sapien
cgtcacgctgaatatatgaccacgc

SEQ ID NO: 5846001 - DNA, 25 bp, Homo sapien
acgctgaatatatgaccacgctcac

SEQ ID NO: 5846002 - DNA, 25 bp, Homo sapien
ctgaatatatgaccacgctcacccg

SEQ ID NO: 5846003 - DNA, 25 bp, Homo sapien
gaatatatgaccacgctcacccgca

SEQ ID NO: 5846004 - DNA, 25 bp, Homo sapien
cccgcatgattcccgcgccgctgct

SEQ ID NO: 5846005 - DNA, 25 bp, Homo sapien
catgattcccgcgccgctgctggga

SEQ ID NO: 5846006 - DNA, 25 bp, Homo sapien
gattcccgcgccgctgctgggagag

SEQ ID NO: 5846007 - DNA, 25 bp, Homo sapien
cgcgccgctgctgggagagatcccc

SEQ ID NO: 5846008 - DNA, 25 bp, Homo sapien
ccgctgctgggagagatcccctggc

SEQ ID NO: 5846009 - DNA, 25 bp, Homo sapien
ctgctgggagagatcccctggcttg

SEQ ID NO: 5846010 - DNA, 25 bp, Homo sapien
gctgggagagatcccctggcttgca

SEQ ID NO: 5846011 - DNA, 25 bp, Homo sapien
ggagagatcccctggcttgcagaaa

SEQ ID NO: 5846012 - DNA, 25 bp, Homo sapien
ggtgctggcggctggtttacgccgc

SEQ ID NO: 5846013 - DNA, 25 bp, Homo sapien
gagatcccctggcttgcagaaaatc

SEQ ID NO: 5846014 - DNA, 25 bp, Homo sapien
ctttctgacactttcacttttgcag

SEQ ID NO: 5846015 - DNA, 25 bp, Homo sapien
atcccctggcttgcagaaaatccag

SEQ ID NO: 5846016 - DNA, 25 bp, Homo sapien
tgacactttcacttttgcagattgg

SEQ ID NO: 5846017 - DNA, 25 bp, Homo sapien
tttgcagattgggtaacacaggaac

SEQ ID NO: 5846018 - DNA, 25 bp, Homo sapien
gaaaacgtcacgctgaatatatgac

SEQ ID NO: 5846019 - DNA, 25 bp, Homo sapien
aaacgtcacgctgaatatatgacca

SEQ ID NO: 5846020 - DNA, 25 bp, Homo sapien
cgtcacgctgaatatatgaccacgc

SEQ ID NO: 5846021 - DNA, 25 bp, Homo sapien
acgctgaatatatgaccacgctcac

SEQ ID NO: 5846022 - DNA, 25 bp, Homo sapien
ctgaatatatgaccacgctcacccg

SEQ ID NO: 5846023 - DNA, 25 bp, Homo sapien
gaatatatgaccacgctcacccgca

SEQ ID NO: 5846024 - DNA, 25 bp, Homo sapien
cccgcatgattcccgcgccgctgct

SEQ ID NO: 5846025 - DNA, 25 bp, Homo sapien
catgattcccgcgccgctgctggga

SEQ ID NO: 5846026 - DNA, 25 bp, Homo sapien
gattcccgcgccgctgctgggagag

SEQ ID NO: 5846027 - DNA, 25 bp, Homo sapien
cgcgccgctgctgggagagatcccc

SEQ ID NO: 5846028 - DNA, 25 bp, Homo sapien
ccgctgctgggagagatcccctggc

SEQ ID NO: 5846029 - DNA, 25 bp, Homo sapien
ctgctgggagagatcccctggcttg

SEQ ID NO: 5846030 - DNA, 25 bp, Homo sapien
gctgggagagatcccctggcttgca

SEQ ID NO: 5846031 - DNA, 25 bp, Homo sapien
ggagagatcccctggcttgcagaaa

SEQ ID NO: 5846032 - DNA, 25 bp, Homo sapien
ggtgctggcggctggtttacgccgc

SEQ ID NO: 5846033 - DNA, 25 bp, Homo sapien
gagatcccctggcttgcagaaaatc

SEQ ID NO: 5846034 - DNA, 25 bp, Homo sapien
ctttctgacactttcacttttgcag

SEQ ID NO: 5846035 - DNA, 25 bp, Homo sapien
atcccctggcttgcagaaaatccag

SEQ ID NO: 5846036 - DNA, 25 bp, Homo sapien
tgacactttcacttttgcagattgg

SEQ ID NO: 5846037 - DNA, 25 bp, Homo sapien
tttgcagattgggtaacacaggaac

SEQ ID NO: 5846038 - DNA, 25 bp, Homo sapien
gaaaacgtcacgctgaatatatgac

SEQ ID NO: 5846039 - DNA, 25 bp, Homo sapien
aaacgtcacgctgaatatatgacca

SEQ ID NO: 5846040 - DNA, 25 bp, Homo sapien
cgtcacgctgaatatatgaccacgc

SEQ ID NO: 5846041 - DNA, 25 bp, Homo sapien
acgctgaatatatgaccacgctcac

SEQ ID NO: 5846042 - DNA, 25 bp, Homo sapien
ctgaatatatgaccacgctcacccg

SEQ ID NO: 5846043 - DNA, 25 bp, Homo sapien
gaatatatgaccacgctcacccgca

SEQ ID NO: 5846044 - DNA, 25 bp, Homo sapien
cccgcatgattcccgcgccgctgct

SEQ ID NO: 5846045 - DNA, 25 bp, Homo sapien
catgattcccgcgccgctgctggga

SEQ ID NO: 5846046 - DNA, 25 bp, Homo sapien
gattcccgcgccgctgctgggagag

SEQ ID NO: 5846047 - DNA, 25 bp, Homo sapien
cgcgccgctgctgggagagatcccc

SEQ ID NO: 5846048 - DNA, 25 bp, Homo sapien
ccgctgctgggagagatcccctggc

SEQ ID NO: 5846049 - DNA, 25 bp, Homo sapien
ctgctgggagagatcccctggcttg

SEQ ID NO: 5846050 - DNA, 25 bp, Homo sapien
gctgggagagatcccctggcttgca

SEQ ID NO: 5846051 - DNA, 25 bp, Homo sapien
ggagagatcccctggcttgcagaaa

SEQ ID NO: 5846052 - DNA, 25 bp, Homo sapien
ggtgctggcggctggtttacgccgc

SEQ ID NO: 5846053 - DNA, 25 bp, Homo sapien
gagatcccctggcttgcagaaaatc

SEQ ID NO: 5846054 - DNA, 25 bp, Homo sapien
ctttctgacactttcacttttgcag

SEQ ID NO: 5846055 - DNA, 25 bp, Homo sapien
atcccctggcttgcagaaaatccag

SEQ ID NO: 5846056 - DNA, 25 bp, Homo sapien
tgacactttcacttttgcagattgg

SEQ ID NO: 5846057 - DNA, 25 bp, Homo sapien
tttgcagattgggtaacacaggaac

SEQ ID NO: 5846058 - DNA, 25 bp, Homo sapien
gaaaacgtcacgctgaatatatgac

SEQ ID NO: 5846059 - DNA, 25 bp, Homo sapien
aaacgtcacgctgaatatatgacca

SEQ ID NO: 5846060 - DNA, 25 bp, Homo sapien
cgtcacgctgaatatatgaccacgc

SEQ ID NO: 5846061 - DNA, 25 bp, Homo sapien
acgctgaatatatgaccacgctcac

SEQ ID NO: 5846062 - DNA, 25 bp, Homo sapien
ctgaatatatgaccacgctcacccg

SEQ ID NO: 5846063 - DNA, 25 bp, Homo sapien
gaatatatgaccacgctcacccgca

SEQ ID NO: 5846064 - DNA, 25 bp, Homo sapien
cccgcatgattcccgcgccgctgct

SEQ ID NO: 5846065 - DNA, 25 bp, Homo sapien
catgattcccgcgccgctgctggga

SEQ ID NO: 5846066 - DNA, 25 bp, Homo sapien
gattcccgcgccgctgctgggagag

SEQ ID NO: 5846067 - DNA, 25 bp, Homo sapien
cgcgccgctgctgggagagatcccc

SEQ ID NO: 5846068 - DNA, 25 bp, Homo sapien
ccgctgctgggagagatcccctggc

SEQ ID NO: 5846069 - DNA, 25 bp, Homo sapien
ctgctgggagagatcccctggcttg

SEQ ID NO: 5846070 - DNA, 25 bp, Homo sapien
gctgggagagatcccctggcttgca

SEQ ID NO: 5846071 - DNA, 25 bp, Homo sapien
ggagagatcccctggcttgcagaaa

SEQ ID NO: 5846072 - DNA, 25 bp, Homo sapien
ggtgctggcggctggtttacgccgc

SEQ ID NO: 5846073 - DNA, 25 bp, Homo sapien
gagatcccctggcttgcagaaaatc

SEQ ID NO: 5846074 - DNA, 25 bp, Homo sapien
ctttctgacactttcacttttgcag

SEQ ID NO: 5846075 - DNA, 25 bp, Homo sapien
atcccctggcttgcagaaaatccag

SEQ ID NO: 5846076 - DNA, 25 bp, Homo sapien
tgacactttcacttttgcagattgg

SEQ ID NO: 5846077 - DNA, 25 bp, Homo sapien
tttgcagattgggtaacacaggaac

SEQ ID NO: 5846078 - DNA, 25 bp, Homo sapien
gaaaacgtcacgctgaatatatgac

SEQ ID NO: 5846079 - DNA, 25 bp, Homo sapien
aaacgtcacgctgaatatatgacca

SEQ ID NO: 5846080 - DNA, 25 bp, Homo sapien
cgtcacgctgaatatatgaccacgc

SEQ ID NO: 5846081 - DNA, 25 bp, Homo sapien
acgctgaatatatgaccacgctcac

SEQ ID NO: 5846082 - DNA, 25 bp, Homo sapien
ctgaatatatgaccacgctcacccg

SEQ ID NO: 5846083 - DNA, 25 bp, Homo sapien
gaatatatgaccacgctcacccgca

SEQ ID NO: 5846084 - DNA, 25 bp, Homo sapien
cccgcatgattcccgcgccgctgct

SEQ ID NO: 5846085 - DNA, 25 bp, Homo sapien
catgattcccgcgccgctgctggga

SEQ ID NO: 5846086 - DNA, 25 bp, Homo sapien
gattcccgcgccgctgctgggagag

SEQ ID NO: 5846087 - DNA, 25 bp, Homo sapien
cgcgccgctgctgggagagatcccc

SEQ ID NO: 5846088 - DNA, 25 bp, Homo sapien
ccgctgctgggagagatcccctggc

SEQ ID NO: 5846089 - DNA, 25 bp, Homo sapien
ctgctgggagagatcccctggcttg

SEQ ID NO: 5846090 - DNA, 25 bp, Homo sapien
gctgggagagatcccctggcttgca

SEQ ID NO: 5846091 - DNA, 25 bp, Homo sapien
ggagagatcccctggcttgcagaaa

SEQ ID NO: 5846092 - DNA, 25 bp, Homo sapien
ggtgctggcggctggtttacgccgc

SEQ ID NO: 5846093 - DNA, 25 bp, Homo sapien
gagatcccctggcttgcagaaaatc

SEQ ID NO: 5846094 - DNA, 25 bp, Homo sapien
ctttctgacactttcacttttgcag

SEQ ID NO: 5846095 - DNA, 25 bp, Homo sapien
atcccctggcttgcagaaaatccag

SEQ ID NO: 5846096 - DNA, 25 bp, Homo sapien
tgacactttcacttttgcagattgg

SEQ ID NO: 5846097 - DNA, 25 bp, Homo sapien
tttgcagattgggtaacacaggaac

SEQ ID NO: 5846098 - DNA, 25 bp, Homo sapien
gaaaacgtcacgctgaatatatgac

SEQ ID NO: 5846099 - DNA, 25 bp, Homo sapien
aaacgtcacgctgaatatatgacca

SEQ ID NO: 5846100 - DNA, 25 bp, Homo sapien
cgtcacgctgaatatatgaccacgc

SEQ ID NO: 5846101 - DNA, 25 bp, Homo sapien
acgctgaatatatgaccacgctcac

SEQ ID NO: 5846102 - DNA, 25 bp, Homo sapien
ctgaatatatgaccacgctcacccg

SEQ ID NO: 5846103 - DNA, 25 bp, Homo sapien
gaatatatgaccacgctcacccgca

SEQ ID NO: 5846104 - DNA, 25 bp, Homo sapien
cccgcatgattcccgcgccgctgct

SEQ ID NO: 5846105 - DNA, 25 bp, Homo sapien
catgattcccgcgccgctgctggga

SEQ ID NO: 5846106 - DNA, 25 bp, Homo sapien
gattcccgcgccgctgctgggagag

SEQ ID NO: 5846107 - DNA, 25 bp, Homo sapien
cgcgccgctgctgggagagatcccc

SEQ ID NO: 5846108 - DNA, 25 bp, Homo sapien
ccgctgctgggagagatcccctggc

SEQ ID NO: 5846109 - DNA, 25 bp, Homo sapien
ctgctgggagagatcccctggcttg

SEQ ID NO: 5846110 - DNA, 25 bp, Homo sapien
gctgggagagatcccctggcttgca

SEQ ID NO: 5846111 - DNA, 25 bp, Homo sapien
ggagagatcccctggcttgcagaaa

SEQ ID NO: 5846112 - DNA, 25 bp, Homo sapien
ggtgctggcggctggtttacgccgc

SEQ ID NO: 5846113 - DNA, 25 bp, Homo sapien
gagatcccctggcttgcagaaaatc

SEQ ID NO: 5846114 - DNA, 25 bp, Homo sapien
ctttctgacactttcacttttgcag

SEQ ID NO: 5846115 - DNA, 25 bp, Homo sapien
atcccctggcttgcagaaaatccag

SEQ ID NO: 5846116 - DNA, 25 bp, Homo sapien
tgacactttcacttttgcagattgg

SEQ ID NO: 5846117 - DNA, 25 bp, Homo sapien
tttgcagattgggtaacacaggaac

SEQ ID NO: 5846118 - DNA, 25 bp, Homo sapien
gaaaacgtcacgctgaatatatgac

SEQ ID NO: 5846119 - DNA, 25 bp, Homo sapien
aaacgtcacgctgaatatatgacca

SEQ ID NO: 5846120 - DNA, 25 bp, Homo sapien
cgtcacgctgaatatatgaccacgc

SEQ ID NO: 5846121 - DNA, 25 bp, Homo sapien
acgctgaatatatgaccacgctcac

SEQ ID NO: 5846122 - DNA, 25 bp, Homo sapien
ctgaatatatgaccacgctcacccg

SEQ ID NO: 5846123 - DNA, 25 bp, Homo sapien
gaatatatgaccacgctcacccgca

SEQ ID NO: 5846124 - DNA, 25 bp, Homo sapien
cccgcatgattcccgcgccgctgct

SEQ ID NO: 5846125 - DNA, 25 bp, Homo sapien
catgattcccgcgccgctgctggga

SEQ ID NO: 5846126 - DNA, 25 bp, Homo sapien
gattcccgcgccgctgctgggagag

SEQ ID NO: 5846127 - DNA, 25 bp, Homo sapien
cgcgccgctgctgggagagatcccc

SEQ ID NO: 5846128 - DNA, 25 bp, Homo sapien
ccgctgctgggagagatcccctggc

SEQ ID NO: 5846129 - DNA, 25 bp, Homo sapien
ctgctgggagagatcccctggcttg

SEQ ID NO: 5846130 - DNA, 25 bp, Homo sapien
gctgggagagatcccctggcttgca

SEQ ID NO: 5846131 - DNA, 25 bp, Homo sapien
ggagagatcccctggcttgcagaaa

SEQ ID NO: 5846132 - DNA, 25 bp, Homo sapien
ggtgctggcggctggtttacgccgc

SEQ ID NO: 5846133 - DNA, 25 bp, Homo sapien
gagatcccctggcttgcagaaaatc

SEQ ID NO: 5846134 - DNA, 25 bp, Homo sapien
ctttctgacactttcacttttgcag

SEQ ID NO: 5846135 - DNA, 25 bp, Homo sapien
atcccctggcttgcagaaaatccag

SEQ ID NO: 5846136 - DNA, 25 bp, Homo sapien
tgacactttcacttttgcagattgg

SEQ ID NO: 5846137 - DNA, 25 bp, Homo sapien
tttgcagattgggtaacacaggaac

SEQ ID NO: 5846138 - DNA, 25 bp, Homo sapien
gaaaacgtcacgctgaatatatgac

SEQ ID NO: 5846139 - DNA, 25 bp, Homo sapien
aaacgtcacgctgaatatatgacca

SEQ ID NO: 5846140 - DNA, 25 bp, Homo sapien
cgtcacgctgaatatatgaccacgc

SEQ ID NO: 5846141 - DNA, 25 bp, Homo sapien
acgctgaatatatgaccacgctcac

SEQ ID NO: 5846142 - DNA, 25 bp, Homo sapien
ctgaatatatgaccacgctcacccg

SEQ ID NO: 5846143 - DNA, 25 bp, Homo sapien
gaatatatgaccacgctcacccgca

SEQ ID NO: 5846144 - DNA, 25 bp, Homo sapien
cccgcatgattcccgcgccgctgct

SEQ ID NO: 5846145 - DNA, 25 bp, Homo sapien
catgattcccgcgccgctgctggga

SEQ ID NO: 5846146 - DNA, 25 bp, Homo sapien
gattcccgcgccgctgctgggagag

SEQ ID NO: 5846147 - DNA, 25 bp, Homo sapien
cgcgccgctgctgggagagatcccc

SEQ ID NO: 5846148 - DNA, 25 bp, Homo sapien
ccgctgctgggagagatcccctggc

SEQ ID NO: 5846149 - DNA, 25 bp, Homo sapien
ctgctgggagagatcccctggcttg

SEQ ID NO: 5846150 - DNA, 25 bp, Homo sapien
gctgggagagatcccctggcttgca

SEQ ID NO: 5846151 - DNA, 25 bp, Homo sapien
ggagagatcccctggcttgcagaaa

SEQ ID NO: 5846152 - DNA, 25 bp, Homo sapien
ggtgctggcggctggtttacgccgc

SEQ ID NO: 5846153 - DNA, 25 bp, Homo sapien
gagatcccctggcttgcagaaaatc

SEQ ID NO: 5846154 - DNA, 25 bp, Homo sapien
ctttctgacactttcacttttgcag

SEQ ID NO: 5846155 - DNA, 25 bp, Homo sapien
atcccctggcttgcagaaaatccag

SEQ ID NO: 5846156 - DNA, 25 bp, Homo sapien
tgacactttcacttttgcagattgg

SEQ ID NO: 5846157 - DNA, 25 bp, Homo sapien
tttgcagattgggtaacacaggaac

SEQ ID NO: 5846158 - DNA, 25 bp, Homo sapien
gaaaacgtcacgctgaatatatgac

SEQ ID NO: 5846159 - DNA, 25 bp, Homo sapien
aaacgtcacgctgaatatatgacca

SEQ ID NO: 5846160 - DNA, 25 bp, Homo sapien
cgtcacgctgaatatatgaccacgc

SEQ ID NO: 5846161 - DNA, 25 bp, Homo sapien
acgctgaatatatgaccacgctcac

SEQ ID NO: 5846162 - DNA, 25 bp, Homo sapien
ctgaatatatgaccacgctcacccg

SEQ ID NO: 5846163 - DNA, 25 bp, Homo sapien
gaatatatgaccacgctcacccgca

SEQ ID NO: 5846164 - DNA, 25 bp, Homo sapien
cccgcatgattcccgcgccgctgct

SEQ ID NO: 5846165 - DNA, 25 bp, Homo sapien
catgattcccgcgccgctgctggga

SEQ ID NO: 5846166 - DNA, 25 bp, Homo sapien
gattcccgcgccgctgctgggagag

SEQ ID NO: 5846167 - DNA, 25 bp, Homo sapien
cgcgccgctgctgggagagatcccc

SEQ ID NO: 5846168 - DNA, 25 bp, Homo sapien
ccgctgctgggagagatcccctggc

SEQ ID NO: 5846169 - DNA, 25 bp, Homo sapien
ctgctgggagagatcccctggcttg

SEQ ID NO: 5846170 - DNA, 25 bp, Homo sapien
gctgggagagatcccctggcttgca

SEQ ID NO: 5846171 - DNA, 25 bp, Homo sapien
ggagagatcccctggcttgcagaaa

SEQ ID NO: 5846172 - DNA, 25 bp, Homo sapien
ggtgctggcggctggtttacgccgc

SEQ ID NO: 5846173 - DNA, 25 bp, Homo sapien
gagatcccctggcttgcagaaaatc

SEQ ID NO: 5846174 - DNA, 25 bp, Homo sapien
ctttctgacactttcacttttgcag

SEQ ID NO: 5846175 - DNA, 25 bp, Homo sapien
atcccctggcttgcagaaaatccag

SEQ ID NO: 5846176 - DNA, 25 bp, Homo sapien
tgacactttcacttttgcagattgg

SEQ ID NO: 5846177 - DNA, 25 bp, Homo sapien
tttgcagattgggtaacacaggaac

SEQ ID NO: 5846178 - DNA, 25 bp, Homo sapien
gaaaacgtcacgctgaatatatgac

SEQ ID NO: 5846179 - DNA, 25 bp, Homo sapien
aaacgtcacgctgaatatatgacca

SEQ ID NO: 5846180 - DNA, 25 bp, Homo sapien
cgtcacgctgaatatatgaccacgc

SEQ ID NO: 5846181 - DNA, 25 bp, Homo sapien
acgctgaatatatgaccacgctcac

SEQ ID NO: 5846182 - DNA, 25 bp, Homo sapien
ctgaatatatgaccacgctcacccg

SEQ ID NO: 5846183 - DNA, 25 bp, Homo sapien
gaatatatgaccacgctcacccgca

SEQ ID NO: 5846184 - DNA, 25 bp, Homo sapien
cccgcatgattcccgcgccgctgct

SEQ ID NO: 5846185 - DNA, 25 bp, Homo sapien
catgattcccgcgccgctgctggga

SEQ ID NO: 5846186 - DNA, 25 bp, Homo sapien
gattcccgcgccgctgctgggagag

SEQ ID NO: 5846187 - DNA, 25 bp, Homo sapien
cgcgccgctgctgggagagatcccc

SEQ ID NO: 5846188 - DNA, 25 bp, Homo sapien
ccgctgctgggagagatcccctggc

SEQ ID NO: 5846189 - DNA, 25 bp, Homo sapien
ctgctgggagagatcccctggcttg

SEQ ID NO: 5846190 - DNA, 25 bp, Homo sapien
gctgggagagatcccctggcttgca

SEQ ID NO: 5846191 - DNA, 25 bp, Homo sapien
ggagagatcccctggcttgcagaaa

SEQ ID NO: 5846192 - DNA, 25 bp, Homo sapien
ggtgctggcggctggtttacgccgc

SEQ ID NO: 5846193 - DNA, 25 bp, Homo sapien
gagatcccctggcttgcagaaaatc

SEQ ID NO: 5846194 - DNA, 25 bp, Homo sapien
ctttctgacactttcacttttgcag

SEQ ID NO: 5846195 - DNA, 25 bp, Homo sapien
atcccctggcttgcagaaaatccag

SEQ ID NO: 5846196 - DNA, 25 bp, Homo sapien
tgacactttcacttttgcagattgg

SEQ ID NO: 5846197 - DNA, 25 bp, Homo sapien
tttgcagattgggtaacacaggaac

SEQ ID NO: 5846198 - DNA, 25 bp, Homo sapien
gaaaacgtcacgctgaatatatgac

SEQ ID NO: 5846199 - DNA, 25 bp, Homo sapien
aaacgtcacgctgaatatatgacca

SEQ ID NO: 5846200 - DNA, 25 bp, Homo sapien
cgtcacgctgaatatatgaccacgc

SEQ ID NO: 5846201 - DNA, 25 bp, Homo sapien
acgctgaatatatgaccacgctcac

SEQ ID NO: 5846202 - DNA, 25 bp, Homo sapien
ctgaatatatgaccacgctcacccg

SEQ ID NO: 5846203 - DNA, 25 bp, Homo sapien
gaatatatgaccacgctcacccgca

SEQ ID NO: 5846204 - DNA, 25 bp, Homo sapien
cccgcatgattcccgcgccgctgct

SEQ ID NO: 5846205 - DNA, 25 bp, Homo sapien
catgattcccgcgccgctgctggga

SEQ ID NO: 5846206 - DNA, 25 bp, Homo sapien
gattcccgcgccgctgctgggagag

SEQ ID NO: 5846207 - DNA, 25 bp, Homo sapien
cgcgccgctgctgggagagatcccc

SEQ ID NO: 5846208 - DNA, 25 bp, Homo sapien
ccgctgctgggagagatcccctggc

SEQ ID NO: 5846209 - DNA, 25 bp, Homo sapien
ctgctgggagagatcccctggcttg

SEQ ID NO: 5846210 - DNA, 25 bp, Homo sapien
gctgggagagatcccctggcttgca

SEQ ID NO: 5846211 - DNA, 25 bp, Homo sapien
ggagagatcccctggcttgcagaaa

SEQ ID NO: 5846212 - DNA, 25 bp, Homo sapien
ggtgctggcggctggtttacgccgc

SEQ ID NO: 5846213 - DNA, 25 bp, Homo sapien
gagatcccctggcttgcagaaaatc

SEQ ID NO: 5846214 - DNA, 25 bp, Homo sapien
ctttctgacactttcacttttgcag

SEQ ID NO: 5846215 - DNA, 25 bp, Homo sapien
atcccctggcttgcagaaaatccag

SEQ ID NO: 5846216 - DNA, 25 bp, Homo sapien
tgacactttcacttttgcagattgg

SEQ ID NO: 5846217 - DNA, 25 bp, Homo sapien
tttgcagattgggtaacacaggaac

SEQ ID NO: 5846218 - DNA, 25 bp, Homo sapien
gaaaacgtcacgctgaatatatgac

SEQ ID NO: 5846219 - DNA, 25 bp, Homo sapien
aaacgtcacgctgaatatatgacca

SEQ ID NO: 5846220 - DNA, 25 bp, Homo sapien
cgtcacgctgaatatatgaccacgc

SEQ ID NO: 5846221 - DNA, 25 bp, Homo sapien
acgctgaatatatgaccacgctcac

SEQ ID NO: 5846222 - DNA, 25 bp, Homo sapien
ctgaatatatgaccacgctcacccg

SEQ ID NO: 5846223 - DNA, 25 bp, Homo sapien
gaatatatgaccacgctcacccgca

SEQ ID NO: 5846224 - DNA, 25 bp, Homo sapien
cccgcatgattcccgcgccgctgct

SEQ ID NO: 5846225 - DNA, 25 bp, Homo sapien
catgattcccgcgccgctgctggga

SEQ ID NO: 5846226 - DNA, 25 bp, Homo sapien
gattcccgcgccgctgctgggagag

SEQ ID NO: 5846227 - DNA, 25 bp, Homo sapien
cgcgccgctgctgggagagatcccc

SEQ ID NO: 5846228 - DNA, 25 bp, Homo sapien
ccgctgctgggagagatcccctggc

SEQ ID NO: 5846229 - DNA, 25 bp, Homo sapien
ctgctgggagagatcccctggcttg

SEQ ID NO: 5846230 - DNA, 25 bp, Homo sapien
gctgggagagatcccctggcttgca

SEQ ID NO: 5846231 - DNA, 25 bp, Homo sapien
ggagagatcccctggcttgcagaaa

SEQ ID NO: 5846232 - DNA, 25 bp, Homo sapien
ggtgctggcggctggtttacgccgc

SEQ ID NO: 5846233 - DNA, 25 bp, Homo sapien
gagatcccctggcttgcagaaaatc

SEQ ID NO: 5846234 - DNA, 25 bp, Homo sapien
ctttctgacactttcacttttgcag

SEQ ID NO: 5846235 - DNA, 25 bp, Homo sapien
atcccctggcttgcagaaaatccag

SEQ ID NO: 5846236 - DNA, 25 bp, Homo sapien
tgacactttcacttttgcagattgg

SEQ ID NO: 5846237 - DNA, 25 bp, Homo sapien
tttgcagattgggtaacacaggaac

SEQ ID NO: 5846238 - DNA, 25 bp, Homo sapien
gaaaacgtcacgctgaatatatgac

SEQ ID NO: 5846239 - DNA, 25 bp, Homo sapien
aaacgtcacgctgaatatatgacca

SEQ ID NO: 5846240 - DNA, 25 bp, Homo sapien
cgtcacgctgaatatatgaccacgc

SEQ ID NO: 5846241 - DNA, 25 bp, Homo sapien
acgctgaatatatgaccacgctcac

SEQ ID NO: 5846242 - DNA, 25 bp, Homo sapien
ctgaatatatgaccacgctcacccg

SEQ ID NO: 5846243 - DNA, 25 bp, Homo sapien
gaatatatgaccacgctcacccgca

SEQ ID NO: 5846244 - DNA, 25 bp, Homo sapien
cccgcatgattcccgcgccgctgct

SEQ ID NO: 5846245 - DNA, 25 bp, Homo sapien
catgattcccgcgccgctgctggga

SEQ ID NO: 5846246 - DNA, 25 bp, Homo sapien
gattcccgcgccgctgctgggagag

SEQ ID NO: 5846247 - DNA, 25 bp, Homo sapien
cgcgccgctgctgggagagatcccc

SEQ ID NO: 5846248 - DNA, 25 bp, Homo sapien
ccgctgctgggagagatcccctggc

SEQ ID NO: 5846249 - DNA, 25 bp, Homo sapien
ctgctgggagagatcccctggcttg

SEQ ID NO: 5846250 - DNA, 25 bp, Homo sapien
gctgggagagatcccctggcttgca

SEQ ID NO: 5846251 - DNA, 25 bp, Homo sapien
ggagagatcccctggcttgcagaaa

SEQ ID NO: 5846252 - DNA, 25 bp, Homo sapien
ggtgctggcggctggtttacgccgc

SEQ ID NO: 5846253 - DNA, 25 bp, Homo sapien
gagatcccctggcttgcagaaaatc

SEQ ID NO: 5846254 - DNA, 25 bp, Homo sapien
ctttctgacactttcacttttgcag

SEQ ID NO: 5846255 - DNA, 25 bp, Homo sapien
atcccctggcttgcagaaaatccag

SEQ ID NO: 5846256 - DNA, 25 bp, Homo sapien
tgacactttcacttttgcagattgg

SEQ ID NO: 5846257 - DNA, 25 bp, Homo sapien
tttgcagattgggtaacacaggaac

SEQ ID NO: 5846258 - DNA, 25 bp, Homo sapien
gaaaacgtcacgctgaatatatgac

SEQ ID NO: 5846259 - DNA, 25 bp, Homo sapien
aaacgtcacgctgaatatatgacca

SEQ ID NO: 5846260 - DNA, 25 bp, Homo sapien
cgtcacgctgaatatatgaccacgc

SEQ ID NO: 5846261 - DNA, 25 bp, Homo sapien
acgctgaatatatgaccacgctcac

SEQ ID NO: 5846262 - DNA, 25 bp, Homo sapien
ctgaatatatgaccacgctcacccg

SEQ ID NO: 5846263 - DNA, 25 bp, Homo sapien
gaatatatgaccacgctcacccgca

SEQ ID NO: 5846264 - DNA, 25 bp, Homo sapien
cccgcatgattcccgcgccgctgct

SEQ ID NO: 5846265 - DNA, 25 bp, Homo sapien
catgattcccgcgccgctgctggga

SEQ ID NO: 5846266 - DNA, 25 bp, Homo sapien
gattcccgcgccgctgctgggagag

SEQ ID NO: 5846267 - DNA, 25 bp, Homo sapien
cgcgccgctgctgggagagatcccc

SEQ ID NO: 5846268 - DNA, 25 bp, Homo sapien
ccgctgctgggagagatcccctggc

SEQ ID NO: 5846269 - DNA, 25 bp, Homo sapien
ctgctgggagagatcccctggcttg

SEQ ID NO: 5846270 - DNA, 25 bp, Homo sapien
gctgggagagatcccctggcttgca

SEQ ID NO: 5846271 - DNA, 25 bp, Homo sapien
ggagagatcccctggcttgcagaaa

SEQ ID NO: 5846272 - DNA, 25 bp, Homo sapien
ggtgctggcggctggtttacgccgc

SEQ ID NO: 5846273 - DNA, 25 bp, Homo sapien
gagatcccctggcttgcagaaaatc

SEQ ID NO: 5846274 - DNA, 25 bp, Homo sapien
ctttctgacactttcacttttgcag

SEQ ID NO: 5846275 - DNA, 25 bp, Homo sapien
atcccctggcttgcagaaaatccag

SEQ ID NO: 5846276 - DNA, 25 bp, Homo sapien
tgacactttcacttttgcagattgg

SEQ ID NO: 5846277 - DNA, 25 bp, Homo sapien
tttgcagattgggtaacacaggaac

SEQ ID NO: 5846278 - DNA, 25 bp, Homo sapien
gaaaacgtcacgctgaatatatgac

SEQ ID NO: 5846279 - DNA, 25 bp, Homo sapien
aaacgtcacgctgaatatatgacca

SEQ ID NO: 5846280 - DNA, 25 bp, Homo sapien
cgtcacgctgaatatatgaccacgc

SEQ ID NO: 5846281 - DNA, 25 bp, Homo sapien
acgctgaatatatgaccacgctcac

SEQ ID NO: 5846282 - DNA, 25 bp, Homo sapien
ctgaatatatgaccacgctcacccg

SEQ ID NO: 5846283 - DNA, 25 bp, Homo sapien
gaatatatgaccacgctcacccgca

SEQ ID NO: 5846284 - DNA, 25 bp, Homo sapien
cccgcatgattcccgcgccgctgct

SEQ ID NO: 5846285 - DNA, 25 bp, Homo sapien
catgattcccgcgccgctgctggga

SEQ ID NO: 5846286 - DNA, 25 bp, Homo sapien
gattcccgcgccgctgctgggagag

SEQ ID NO: 5846287 - DNA, 25 bp, Homo sapien
cgcgccgctgctgggagagatcccc

SEQ ID NO: 5846288 - DNA, 25 bp, Homo sapien
ccgctgctgggagagatcccctggc

SEQ ID NO: 5846289 - DNA, 25 bp, Homo sapien
ctgctgggagagatcccctggcttg

SEQ ID NO: 5846290 - DNA, 25 bp, Homo sapien
gctgggagagatcccctggcttgca

SEQ ID NO: 5846291 - DNA, 25 bp, Homo sapien
ggagagatcccctggcttgcagaaa

SEQ ID NO: 5846292 - DNA, 25 bp, Homo sapien
ggtgctggcggctggtttacgccgc

SEQ ID NO: 5846293 - DNA, 25 bp, Homo sapien
gagatcccctggcttgcagaaaatc

SEQ ID NO: 5846294 - DNA, 25 bp, Homo sapien
ctttctgacactttcacttttgcag

SEQ ID NO: 5846295 - DNA, 25 bp, Homo sapien
atcccctggcttgcagaaaatccag

SEQ ID NO: 5846296 - DNA, 25 bp, Homo sapien
tgacactttcacttttgcagattgg

SEQ ID NO: 5846297 - DNA, 25 bp, Homo sapien
tttgcagattgggtaacacaggaac

SEQ ID NO: 5846298 - DNA, 25 bp, Homo sapien
gaaaacgtcacgctgaatatatgac

SEQ ID NO: 5846299 - DNA, 25 bp, Homo sapien
aaacgtcacgctgaatatatgacca

SEQ ID NO: 5846300 - DNA, 25 bp, Homo sapien
cgtcacgctgaatatatgaccacgc

SEQ ID NO: 5846301 - DNA, 25 bp, Homo sapien
acgctgaatatatgaccacgctcac

SEQ ID NO: 5846302 - DNA, 25 bp, Homo sapien
ctgaatatatgaccacgctcacccg

SEQ ID NO: 5846303 - DNA, 25 bp, Homo sapien
gaatatatgaccacgctcacccgca

SEQ ID NO: 5846304 - DNA, 25 bp, Homo sapien
cccgcatgattcccgcgccgctgct

SEQ ID NO: 5846305 - DNA, 25 bp, Homo sapien
catgattcccgcgccgctgctggga

SEQ ID NO: 5846306 - DNA, 25 bp, Homo sapien
gattcccgcgccgctgctgggagag

SEQ ID NO: 5846307 - DNA, 25 bp, Homo sapien
cgcgccgctgctgggagagatcccc

SEQ ID NO: 5846308 - DNA, 25 bp, Homo sapien
ccgctgctgggagagatcccctggc

SEQ ID NO: 5846309 - DNA, 25 bp, Homo sapien
ctgctgggagagatcccctggcttg

SEQ ID NO: 5846310 - DNA, 25 bp, Homo sapien
gctgggagagatcccctggcttgca

SEQ ID NO: 5846311 - DNA, 25 bp, Homo sapien
ggagagatcccctggcttgcagaaa

SEQ ID NO: 5846312 - DNA, 25 bp, Homo sapien
ggtgctggcggctggtttacgccgc

SEQ ID NO: 5846313 - DNA, 25 bp, Homo sapien
gagatcccctggcttgcagaaaatc

SEQ ID NO: 5846314 - DNA, 25 bp, Homo sapien
ctttctgacactttcacttttgcag

SEQ ID NO: 5846315 - DNA, 25 bp, Homo sapien
atcccctggcttgcagaaaatccag

SEQ ID NO: 5846316 - DNA, 25 bp, Homo sapien
tgacactttcacttttgcagattgg

SEQ ID NO: 5846317 - DNA, 25 bp, Homo sapien
tttgcagattgggtaacacaggaac

SEQ ID NO: 5846318 - DNA, 25 bp, Homo sapien
gaaaacgtcacgctgaatatatgac

SEQ ID NO: 5846319 - DNA, 25 bp, Homo sapien
aaacgtcacgctgaatatatgacca

SEQ ID NO: 5846320 - DNA, 25 bp, Homo sapien
cgtcacgctgaatatatgaccacgc

SEQ ID NO: 5846321 - DNA, 25 bp, Homo sapien
acgctgaatatatgaccacgctcac

SEQ ID NO: 5846322 - DNA, 25 bp, Homo sapien
ctgaatatatgaccacgctcacccg

SEQ ID NO: 5846323 - DNA, 25 bp, Homo sapien
gaatatatgaccacgctcacccgca

SEQ ID NO: 5846324 - DNA, 25 bp, Homo sapien
cccgcatgattcccgcgccgctgct

SEQ ID NO: 5846325 - DNA, 25 bp, Homo sapien
catgattcccgcgccgctgctggga

SEQ ID NO: 5846326 - DNA, 25 bp, Homo sapien
gattcccgcgccgctgctgggagag

SEQ ID NO: 5846327 - DNA, 25 bp, Homo sapien
cgcgccgctgctgggagagatcccc

SEQ ID NO: 5846328 - DNA, 25 bp, Homo sapien
ccgctgctgggagagatcccctggc

SEQ ID NO: 5846329 - DNA, 25 bp, Homo sapien
ctgctgggagagatcccctggcttg

SEQ ID NO: 5846330 - DNA, 25 bp, Homo sapien
gctgggagagatcccctggcttgca

SEQ ID NO: 5846331 - DNA, 25 bp, Homo sapien
ggagagatcccctggcttgcagaaa

SEQ ID NO: 5846332 - DNA, 25 bp, Homo sapien
ggtgctggcggctggtttacgccgc

SEQ ID NO: 5846333 - DNA, 25 bp, Homo sapien
gagatcccctggcttgcagaaaatc

SEQ ID NO: 5846334 - DNA, 25 bp, Homo sapien
ctttctgacactttcacttttgcag

SEQ ID NO: 5846335 - DNA, 25 bp, Homo sapien
atcccctggcttgcagaaaatccag

SEQ ID NO: 5846336 - DNA, 25 bp, Homo sapien
tgacactttcacttttgcagattgg

SEQ ID NO: 5846337 - DNA, 25 bp, Homo sapien
tttgcagattgggtaacacaggaac

SEQ ID NO: 5846338 - DNA, 25 bp, Homo sapien
gaaaacgtcacgctgaatatatgac

SEQ ID NO: 5846339 - DNA, 25 bp, Homo sapien
aaacgtcacgctgaatatatgacca

SEQ ID NO: 5846340 - DNA, 25 bp, Homo sapien
cgtcacgctgaatatatgaccacgc

SEQ ID NO: 5846341 - DNA, 25 bp, Homo sapien
acgctgaatatatgaccacgctcac

SEQ ID NO: 5846342 - DNA, 25 bp, Homo sapien
ctgaatatatgaccacgctcacccg

SEQ ID NO: 5846343 - DNA, 25 bp, Homo sapien
gaatatatgaccacgctcacccgca

SEQ ID NO: 5846344 - DNA, 25 bp, Homo sapien
cccgcatgattcccgcgccgctgct

SEQ ID NO: 5846345 - DNA, 25 bp, Homo sapien
catgattcccgcgccgctgctggga

SEQ ID NO: 5846346 - DNA, 25 bp, Homo sapien
gattcccgcgccgctgctgggagag

SEQ ID NO: 5846347 - DNA, 25 bp, Homo sapien
cgcgccgctgctgggagagatcccc

SEQ ID NO: 5846348 - DNA, 25 bp, Homo sapien
ccgctgctgggagagatcccctggc

SEQ ID NO: 5846349 - DNA, 25 bp, Homo sapien
ctgctgggagagatcccctggcttg

SEQ ID NO: 5846350 - DNA, 25 bp, Homo sapien
gctgggagagatcccctggcttgca

SEQ ID NO: 5846351 - DNA, 25 bp, Homo sapien
ggagagatcccctggcttgcagaaa

SEQ ID NO: 5846352 - DNA, 25 bp, Homo sapien
ggtgctggcggctggtttacgccgc

SEQ ID NO: 5846353 - DNA, 25 bp, Homo sapien
gagatcccctggcttgcagaaaatc

SEQ ID NO: 5846354 - DNA, 25 bp, Homo sapien
ctttctgacactttcacttttgcag

SEQ ID NO: 5846355 - DNA, 25 bp, Homo sapien
atcccctggcttgcagaaaatccag

SEQ ID NO: 5846356 - DNA, 25 bp, Homo sapien
tgacactttcacttttgcagattgg

SEQ ID NO: 5846357 - DNA, 25 bp, Homo sapien
tttgcagattgggtaacacaggaac

SEQ ID NO: 5846358 - DNA, 25 bp, Homo sapien
gaaaacgtcacgctgaatatatgac

SEQ ID NO: 5846359 - DNA, 25 bp, Homo sapien
aaacgtcacgctgaatatatgacca

SEQ ID NO: 5846360 - DNA, 25 bp, Homo sapien
cgtcacgctgaatatatgaccacgc

SEQ ID NO: 5846361 - DNA, 25 bp, Homo sapien
acgctgaatatatgaccacgctcac

SEQ ID NO: 5846362 - DNA, 25 bp, Homo sapien
ctgaatatatgaccacgctcacccg

SEQ ID NO: 5846363 - DNA, 25 bp, Homo sapien
gaatatatgaccacgctcacccgca

SEQ ID NO: 5846364 - DNA, 25 bp, Homo sapien
cccgcatgattcccgcgccgctgct

SEQ ID NO: 5846365 - DNA, 25 bp, Homo sapien
catgattcccgcgccgctgctggga

SEQ ID NO: 5846366 - DNA, 25 bp, Homo sapien
gattcccgcgccgctgctgggagag

SEQ ID NO: 5846367 - DNA, 25 bp, Homo sapien
cgcgccgctgctgggagagatcccc

SEQ ID NO: 5846368 - DNA, 25 bp, Homo sapien
ccgctgctgggagagatcccctggc

SEQ ID NO: 5846369 - DNA, 25 bp, Homo sapien
ctgctgggagagatcccctggcttg

SEQ ID NO: 5846370 - DNA, 25 bp, Homo sapien
gctgggagagatcccctggcttgca

SEQ ID NO: 5846371 - DNA, 25 bp, Homo sapien
ggagagatcccctggcttgcagaaa

SEQ ID NO: 5846372 - DNA, 25 bp, Homo sapien
ggtgctggcggctggtttacgccgc

SEQ ID NO: 5846373 - DNA, 25 bp, Homo sapien
gagatcccctggcttgcagaaaatc

SEQ ID NO: 5846374 - DNA, 25 bp, Homo sapien
ctttctgacactttcacttttgcag

SEQ ID NO: 5846375 - DNA, 25 bp, Homo sapien
atcccctggcttgcagaaaatccag

SEQ ID NO: 5846376 - DNA, 25 bp, Homo sapien
tgacactttcacttttgcagattgg

SEQ ID NO: 5846377 - DNA, 25 bp, Homo sapien
tttgcagattgggtaacacaggaac

SEQ ID NO: 5846378 - DNA, 25 bp, Homo sapien
gaaaacgtcacgctgaatatatgac

SEQ ID NO: 5846379 - DNA, 25 bp, Homo sapien
aaacgtcacgctgaatatatgacca

SEQ ID NO: 5846380 - DNA, 25 bp, Homo sapien
cgtcacgctgaatatatgaccacgc

SEQ ID NO: 5846381 - DNA, 25 bp, Homo sapien
acgctgaatatatgaccacgctcac

SEQ ID NO: 5846382 - DNA, 25 bp, Homo sapien
ctgaatatatgaccacgctcacccg

SEQ ID NO: 5846383 - DNA, 25 bp, Homo sapien
gaatatatgaccacgctcacccgca

SEQ ID NO: 5846384 - DNA, 25 bp, Homo sapien
cccgcatgattcccgcgccgctgct

SEQ ID NO: 5846385 - DNA, 25 bp, Homo sapien
catgattcccgcgccgctgctggga

SEQ ID NO: 5846386 - DNA, 25 bp, Homo sapien
gattcccgcgccgctgctgggagag

SEQ ID NO: 5846387 - DNA, 25 bp, Homo sapien
cgcgccgctgctgggagagatcccc

SEQ ID NO: 5846388 - DNA, 25 bp, Homo sapien
ccgctgctgggagagatcccctggc

SEQ ID NO: 5846389 - DNA, 25 bp, Homo sapien
ctgctgggagagatcccctggcttg

SEQ ID NO: 5846390 - DNA, 25 bp, Homo sapien
gctgggagagatcccctggcttgca

SEQ ID NO: 5846391 - DNA, 25 bp, Homo sapien
ggagagatcccctggcttgcagaaa

SEQ ID NO: 5846392 - DNA, 25 bp, Homo sapien
ggtgctggcggctggtttacgccgc

SEQ ID NO: 5846393 - DNA, 25 bp, Homo sapien
gagatcccctggcttgcagaaaatc

SEQ ID NO: 5846394 - DNA, 25 bp, Homo sapien
ctttctgacactttcacttttgcag

SEQ ID NO: 5846395 - DNA, 25 bp, Homo sapien
atcccctggcttgcagaaaatccag

SEQ ID NO: 5846396 - DNA, 25 bp, Homo sapien
tgacactttcacttttgcagattgg

SEQ ID NO: 5846397 - DNA, 25 bp, Homo sapien
tttgcagattgggtaacacaggaac

SEQ ID NO: 5846398 - DNA, 25 bp, Homo sapien
gaaaacgtcacgctgaatatatgac

SEQ ID NO: 5846399 - DNA, 25 bp, Homo sapien
aaacgtcacgctgaatatatgacca

SEQ ID NO: 5846400 - DNA, 25 bp, Homo sapien
cgtcacgctgaatatatgaccacgc

SEQ ID NO: 5846401 - DNA, 25 bp, Homo sapien
acgctgaatatatgaccacgctcac

SEQ ID NO: 5846402 - DNA, 25 bp, Homo sapien
ctgaatatatgaccacgctcacccg

SEQ ID NO: 5846403 - DNA, 25 bp, Homo sapien
gaatatatgaccacgctcacccgca

SEQ ID NO: 5846404 - DNA, 25 bp, Homo sapien
cccgcatgattcccgcgccgctgct

SEQ ID NO: 5846405 - DNA, 25 bp, Homo sapien
catgattcccgcgccgctgctggga

SEQ ID NO: 5846406 - DNA, 25 bp, Homo sapien
gattcccgcgccgctgctgggagag

SEQ ID NO: 5846407 - DNA, 25 bp, Homo sapien
cgcgccgctgctgggagagatcccc

SEQ ID NO: 5846408 - DNA, 25 bp, Homo sapien
ccgctgctgggagagatcccctggc

SEQ ID NO: 5846409 - DNA, 25 bp, Homo sapien
ctgctgggagagatcccctggcttg

SEQ ID NO: 5846410 - DNA, 25 bp, Homo sapien
gctgggagagatcccctggcttgca

SEQ ID NO: 5846411 - DNA, 25 bp, Homo sapien
ggagagatcccctggcttgcagaaa

SEQ ID NO: 5846412 - DNA, 25 bp, Homo sapien
ggtgctggcggctggtttacgccgc

SEQ ID NO: 5846413 - DNA, 25 bp, Homo sapien
gagatcccctggcttgcagaaaatc

SEQ ID NO: 5846414 - DNA, 25 bp, Homo sapien
ctttctgacactttcacttttgcag

SEQ ID NO: 5846415 - DNA, 25 bp, Homo sapien
atcccctggcttgcagaaaatccag

SEQ ID NO: 5846416 - DNA, 25 bp, Homo sapien
tgacactttcacttttgcagattgg

SEQ ID NO: 5846417 - DNA, 25 bp, Homo sapien
tttgcagattgggtaacacaggaac

SEQ ID NO: 5846418 - DNA, 25 bp, Homo sapien
gaaaacgtcacgctgaatatatgac

SEQ ID NO: 5846419 - DNA, 25 bp, Homo sapien
aaacgtcacgctgaatatatgacca

SEQ ID NO: 5846420 - DNA, 25 bp, Homo sapien
cgtcacgctgaatatatgaccacgc

SEQ ID NO: 5846421 - DNA, 25 bp, Homo sapien
acgctgaatatatgaccacgctcac

SEQ ID NO: 5846422 - DNA, 25 bp, Homo sapien
ctgaatatatgaccacgctcacccg

SEQ ID NO: 5846423 - DNA, 25 bp, Homo sapien
gaatatatgaccacgctcacccgca

SEQ ID NO: 5846424 - DNA, 25 bp, Homo sapien
cccgcatgattcccgcgccgctgct

SEQ ID NO: 5846425 - DNA, 25 bp, Homo sapien
catgattcccgcgccgctgctggga

SEQ ID NO: 5846426 - DNA, 25 bp, Homo sapien
gattcccgcgccgctgctgggagag

SEQ ID NO: 5846427 - DNA, 25 bp, Homo sapien
cgcgccgctgctgggagagatcccc

SEQ ID NO: 5846428 - DNA, 25 bp, Homo sapien
ccgctgctgggagagatcccctggc

SEQ ID NO: 5846429 - DNA, 25 bp, Homo sapien
ctgctgggagagatcccctggcttg

SEQ ID NO: 5846430 - DNA, 25 bp, Homo sapien
gctgggagagatcccctggcttgca

SEQ ID NO: 5846431 - DNA, 25 bp, Homo sapien
ggagagatcccctggcttgcagaaa

SEQ ID NO: 5846432 - DNA, 25 bp, Homo sapien
ggtgctggcggctggtttacgccgc

SEQ ID NO: 5846433 - DNA, 25 bp, Homo sapien
gagatcccctggcttgcagaaaatc

SEQ ID NO: 5846434 - DNA, 25 bp, Homo sapien
ctttctgacactttcacttttgcag

SEQ ID NO: 5846435 - DNA, 25 bp, Homo sapien
atcccctggcttgcagaaaatccag

SEQ ID NO: 5846436 - DNA, 25 bp, Homo sapien
tgacactttcacttttgcagattgg

SEQ ID NO: 5846437 - DNA, 25 bp, Homo sapien
tttgcagattgggtaacacaggaac

SEQ ID NO: 5846438 - DNA, 25 bp, Homo sapien
gaaaacgtcacgctgaatatatgac

SEQ ID NO: 5846439 - DNA, 25 bp, Homo sapien
aaacgtcacgctgaatatatgacca

SEQ ID NO: 5846440 - DNA, 25 bp, Homo sapien
cgtcacgctgaatatatgaccacgc

SEQ ID NO: 5846441 - DNA, 25 bp, Homo sapien
acgctgaatatatgaccacgctcac

SEQ ID NO: 5846442 - DNA, 25 bp, Homo sapien
ctgaatatatgaccacgctcacccg

SEQ ID NO: 5846443 - DNA, 25 bp, Homo sapien
gaatatatgaccacgctcacccgca

SEQ ID NO: 5846444 - DNA, 25 bp, Homo sapien
cccgcatgattcccgcgccgctgct

SEQ ID NO: 5846445 - DNA, 25 bp, Homo sapien
catgattcccgcgccgctgctggga

SEQ ID NO: 5846446 - DNA, 25 bp, Homo sapien
gattcccgcgccgctgctgggagag

SEQ ID NO: 5846447 - DNA, 25 bp, Homo sapien
cgcgccgctgctgggagagatcccc

SEQ ID NO: 5846448 - DNA, 25 bp, Homo sapien
ccgctgctgggagagatcccctggc

SEQ ID NO: 5846449 - DNA, 25 bp, Homo sapien
ctgctgggagagatcccctggcttg

SEQ ID NO: 5846450 - DNA, 25 bp, Homo sapien
gctgggagagatcccctggcttgca

SEQ ID NO: 5846451 - DNA, 25 bp, Homo sapien
ggagagatcccctggcttgcagaaa

SEQ ID NO: 5846452 - DNA, 25 bp, Homo sapien
ggtgctggcggctggtttacgccgc

SEQ ID NO: 5846453 - DNA, 25 bp, Homo sapien
gagatcccctggcttgcagaaaatc

SEQ ID NO: 5846454 - DNA, 25 bp, Homo sapien
ctttctgacactttcacttttgcag

SEQ ID NO: 5846455 - DNA, 25 bp, Homo sapien
atcccctggcttgcagaaaatccag

SEQ ID NO: 5846456 - DNA, 25 bp, Homo sapien
tgacactttcacttttgcagattgg

SEQ ID NO: 5846457 - DNA, 25 bp, Homo sapien
tttgcagattgggtaacacaggaac

SEQ ID NO: 5846458 - DNA, 25 bp, Homo sapien
gaaaacgtcacgctgaatatatgac

SEQ ID NO: 5846459 - DNA, 25 bp, Homo sapien
aaacgtcacgctgaatatatgacca

SEQ ID NO: 5846460 - DNA, 25 bp, Homo sapien
cgtcacgctgaatatatgaccacgc

SEQ ID NO: 5846461 - DNA, 25 bp, Homo sapien
acgctgaatatatgaccacgctcac

SEQ ID NO: 5846462 - DNA, 25 bp, Homo sapien
ctgaatatatgaccacgctcacccg

SEQ ID NO: 5846463 - DNA, 25 bp, Homo sapien
gaatatatgaccacgctcacccgca

SEQ ID NO: 5846464 - DNA, 25 bp, Homo sapien
cccgcatgattcccgcgccgctgct

SEQ ID NO: 5846465 - DNA, 25 bp, Homo sapien
catgattcccgcgccgctgctggga

SEQ ID NO: 5846466 - DNA, 25 bp, Homo sapien
gattcccgcgccgctgctgggagag

SEQ ID NO: 5846467 - DNA, 25 bp, Homo sapien
cgcgccgctgctgggagagatcccc

SEQ ID NO: 5846468 - DNA, 25 bp, Homo sapien
ccgctgctgggagagatcccctggc

SEQ ID NO: 5846469 - DNA, 25 bp, Homo sapien
ctgctgggagagatcccctggcttg

SEQ ID NO: 5846470 - DNA, 25 bp, Homo sapien
gctgggagagatcccctggcttgca

SEQ ID NO: 5846471 - DNA, 25 bp, Homo sapien
ggagagatcccctggcttgcagaaa

SEQ ID NO: 5846472 - DNA, 25 bp, Homo sapien
ggtgctggcggctggtttacgccgc

SEQ ID NO: 5846473 - DNA, 25 bp, Homo sapien
gagatcccctggcttgcagaaaatc

SEQ ID NO: 5846474 - DNA, 25 bp, Homo sapien
ctttctgacactttcacttttgcag

SEQ ID NO: 5846475 - DNA, 25 bp, Homo sapien
atcccctggcttgcagaaaatccag

SEQ ID NO: 5846476 - DNA, 25 bp, Homo sapien
tgacactttcacttttgcagattgg

SEQ ID NO: 5846477 - DNA, 25 bp, Homo sapien
tttgcagattgggtaacacaggaac

SEQ ID NO: 5846478 - DNA, 25 bp, Homo sapien
gaaaacgtcacgctgaatatatgac

SEQ ID NO: 5846479 - DNA, 25 bp, Homo sapien
aaacgtcacgctgaatatatgacca

SEQ ID NO: 5846480 - DNA, 25 bp, Homo sapien
cgtcacgctgaatatatgaccacgc

SEQ ID NO: 5846481 - DNA, 25 bp, Homo sapien
acgctgaatatatgaccacgctcac

SEQ ID NO: 5846482 - DNA, 25 bp, Homo sapien
ctgaatatatgaccacgctcacccg

SEQ ID NO: 5846483 - DNA, 25 bp, Homo sapien
gaatatatgaccacgctcacccgca

SEQ ID NO: 5846484 - DNA, 25 bp, Homo sapien
cccgcatgattcccgcgccgctgct

SEQ ID NO: 5846485 - DNA, 25 bp, Homo sapien
catgattcccgcgccgctgctggga

SEQ ID NO: 5846486 - DNA, 25 bp, Homo sapien
gattcccgcgccgctgctgggagag

SEQ ID NO: 5846487 - DNA, 25 bp, Homo sapien
cgcgccgctgctgggagagatcccc

SEQ ID NO: 5846488 - DNA, 25 bp, Homo sapien
ccgctgctgggagagatcccctggc

SEQ ID NO: 5846489 - DNA, 25 bp, Homo sapien
ctgctgggagagatcccctggcttg

SEQ ID NO: 5846490 - DNA, 25 bp, Homo sapien
gctgggagagatcccctggcttgca

SEQ ID NO: 5846491 - DNA, 25 bp, Homo sapien
ggagagatcccctggcttgcagaaa

SEQ ID NO: 5846492 - DNA, 25 bp, Homo sapien
ggtgctggcggctggtttacgccgc

SEQ ID NO: 5846493 - DNA, 25 bp, Homo sapien
gagatcccctggcttgcagaaaatc

SEQ ID NO: 5846494 - DNA, 25 bp, Homo sapien
ctttctgacactttcacttttgcag

SEQ ID NO: 5846495 - DNA, 25 bp, Homo sapien
atcccctggcttgcagaaaatccag

SEQ ID NO: 5846496 - DNA, 25 bp, Homo sapien
tgacactttcacttttgcagattgg

SEQ ID NO: 5846497 - DNA, 25 bp, Homo sapien
tttgcagattgggtaacacaggaac

SEQ ID NO: 5846498 - DNA, 25 bp, Homo sapien
gaaaacgtcacgctgaatatatgac

SEQ ID NO: 5846499 - DNA, 25 bp, Homo sapien
aaacgtcacgctgaatatatgacca

SEQ ID NO: 5846500 - DNA, 25 bp, Homo sapien
cgtcacgctgaatatatgaccacgc

SEQ ID NO: 5846501 - DNA, 25 bp, Homo sapien
acgctgaatatatgaccacgctcac

SEQ ID NO: 5846502 - DNA, 25 bp, Homo sapien
ctgaatatatgaccacgctcacccg

SEQ ID NO: 5846503 - DNA, 25 bp, Homo sapien
gaatatatgaccacgctcacccgca

SEQ ID NO: 5846504 - DNA, 25 bp, Homo sapien
cccgcatgattcccgcgccgctgct

SEQ ID NO: 5846505 - DNA, 25 bp, Homo sapien
catgattcccgcgccgctgctggga

SEQ ID NO: 5846506 - DNA, 25 bp, Homo sapien
gattcccgcgccgctgctgggagag

SEQ ID NO: 5846507 - DNA, 25 bp, Homo sapien
cgcgccgctgctgggagagatcccc

SEQ ID NO: 5846508 - DNA, 25 bp, Homo sapien
ccgctgctgggagagatcccctggc

SEQ ID NO: 5846509 - DNA, 25 bp, Homo sapien
ctgctgggagagatcccctggcttg

SEQ ID NO: 5846510 - DNA, 25 bp, Homo sapien
gctgggagagatcccctggcttgca

SEQ ID NO: 5846511 - DNA, 25 bp, Homo sapien
ggagagatcccctggcttgcagaaa

SEQ ID NO: 5846512 - DNA, 25 bp, Homo sapien
ggtgctggcggctggtttacgccgc

SEQ ID NO: 5846513 - DNA, 25 bp, Homo sapien
gagatcccctggcttgcagaaaatc

SEQ ID NO: 5846514 - DNA, 25 bp, Homo sapien
ctttctgacactttcacttttgcag

SEQ ID NO: 5846515 - DNA, 25 bp, Homo sapien
atcccctggcttgcagaaaatccag

SEQ ID NO: 5846516 - DNA, 25 bp, Homo sapien
tgacactttcacttttgcagattgg

SEQ ID NO: 5846517 - DNA, 25 bp, Homo sapien
tttgcagattgggtaacacaggaac

SEQ ID NO: 5846518 - DNA, 25 bp, Homo sapien
gaaaacgtcacgctgaatatatgac

SEQ ID NO: 5846519 - DNA, 25 bp, Homo sapien
aaacgtcacgctgaatatatgacca

SEQ ID NO: 5846520 - DNA, 25 bp, Homo sapien
cgtcacgctgaatatatgaccacgc

SEQ ID NO: 5846521 - DNA, 25 bp, Homo sapien
acgctgaatatatgaccacgctcac

SEQ ID NO: 5846522 - DNA, 25 bp, Homo sapien
ctgaatatatgaccacgctcacccg

SEQ ID NO: 5846523 - DNA, 25 bp, Homo sapien
gaatatatgaccacgctcacccgca

SEQ ID NO: 5846524 - DNA, 25 bp, Homo sapien
cccgcatgattcccgcgccgctgct

SEQ ID NO: 5846525 - DNA, 25 bp, Homo sapien
catgattcccgcgccgctgctggga

SEQ ID NO: 5846526 - DNA, 25 bp, Homo sapien
gattcccgcgccgctgctgggagag

SEQ ID NO: 5846527 - DNA, 25 bp, Homo sapien
cgcgccgctgctgggagagatcccc

SEQ ID NO: 5846528 - DNA, 25 bp, Homo sapien
ccgctgctgggagagatcccctggc

SEQ ID NO: 5846529 - DNA, 25 bp, Homo sapien
ctgctgggagagatcccctggcttg

SEQ ID NO: 5846530 - DNA, 25 bp, Homo sapien
gctgggagagatcccctggcttgca

SEQ ID NO: 5846531 - DNA, 25 bp, Homo sapien
ggagagatcccctggcttgcagaaa

SEQ ID NO: 5846532 - DNA, 25 bp, Homo sapien
ggtgctggcggctggtttacgccgc

SEQ ID NO: 5846533 - DNA, 25 bp, Homo sapien
gagatcccctggcttgcagaaaatc

SEQ ID NO: 5846534 - DNA, 25 bp, Homo sapien
ctttctgacactttcacttttgcag

SEQ ID NO: 5846535 - DNA, 25 bp, Homo sapien
atcccctggcttgcagaaaatccag

SEQ ID NO: 5846536 - DNA, 25 bp, Homo sapien
tgacactttcacttttgcagattgg

SEQ ID NO: 5846537 - DNA, 25 bp, Homo sapien
tttgcagattgggtaacacaggaac

SEQ ID NO: 5846538 - DNA, 25 bp, Homo sapien
gaaaacgtcacgctgaatatatgac

SEQ ID NO: 5846539 - DNA, 25 bp, Homo sapien
aaacgtcacgctgaatatatgacca

SEQ ID NO: 5846540 - DNA, 25 bp, Homo sapien
cgtcacgctgaatatatgaccacgc

SEQ ID NO: 5846541 - DNA, 25 bp, Homo sapien
acgctgaatatatgaccacgctcac

SEQ ID NO: 5846542 - DNA, 25 bp, Homo sapien
ctgaatatatgaccacgctcacccg

SEQ ID NO: 5846543 - DNA, 25 bp, Homo sapien
gaatatatgaccacgctcacccgca

SEQ ID NO: 5846544 - DNA, 25 bp, Homo sapien
cccgcatgattcccgcgccgctgct

SEQ ID NO: 5846545 - DNA, 25 bp, Homo sapien
catgattcccgcgccgctgctggga

SEQ ID NO: 5846546 - DNA, 25 bp, Homo sapien
gattcccgcgccgctgctgggagag

SEQ ID NO: 5846547 - DNA, 25 bp, Homo sapien
cgcgccgctgctgggagagatcccc

SEQ ID NO: 5846548 - DNA, 25 bp, Homo sapien
ccgctgctgggagagatcccctggc

SEQ ID NO: 5846549 - DNA, 25 bp, Homo sapien
ctgctgggagagatcccctggcttg

SEQ ID NO: 5846550 - DNA, 25 bp, Homo sapien
gctgggagagatcccctggcttgca

SEQ ID NO: 5846551 - DNA, 25 bp, Homo sapien
ggagagatcccctggcttgcagaaa

SEQ ID NO: 5846552 - DNA, 25 bp, Homo sapien
ggtgctggcggctggtttacgccgc

SEQ ID NO: 5846553 - DNA, 25 bp, Homo sapien
gagatcccctggcttgcagaaaatc

SEQ ID NO: 5846554 - DNA, 25 bp, Homo sapien
ctttctgacactttcacttttgcag

SEQ ID NO: 5846555 - DNA, 25 bp, Homo sapien
atcccctggcttgcagaaaatccag

SEQ ID NO: 5846556 - DNA, 25 bp, Homo sapien
tgacactttcacttttgcagattgg

SEQ ID NO: 5846557 - DNA, 25 bp, Homo sapien
tttgcagattgggtaacacaggaac

SEQ ID NO: 5846558 - DNA, 25 bp, Homo sapien
gaaaacgtcacgctgaatatatgac

SEQ ID NO: 5846559 - DNA, 25 bp, Homo sapien
aaacgtcacgctgaatatatgacca

SEQ ID NO: 5846560 - DNA, 25 bp, Homo sapien
cgtcacgctgaatatatgaccacgc

SEQ ID NO: 5846561 - DNA, 25 bp, Homo sapien
acgctgaatatatgaccacgctcac

SEQ ID NO: 5846562 - DNA, 25 bp, Homo sapien
ctgaatatatgaccacgctcacccg

SEQ ID NO: 5846563 - DNA, 25 bp, Homo sapien
gaatatatgaccacgctcacccgca

SEQ ID NO: 5846564 - DNA, 25 bp, Homo sapien
cccgcatgattcccgcgccgctgct

SEQ ID NO: 5846565 - DNA, 25 bp, Homo sapien
catgattcccgcgccgctgctggga

SEQ ID NO: 5846566 - DNA, 25 bp, Homo sapien
gattcccgcgccgctgctgggagag

SEQ ID NO: 5846567 - DNA, 25 bp, Homo sapien
cgcgccgctgctgggagagatcccc

SEQ ID NO: 5846568 - DNA, 25 bp, Homo sapien
ccgctgctgggagagatcccctggc

SEQ ID NO: 5846569 - DNA, 25 bp, Homo sapien
ctgctgggagagatcccctggcttg

SEQ ID NO: 5846570 - DNA, 25 bp, Homo sapien
gctgggagagatcccctggcttgca

SEQ ID NO: 5846571 - DNA, 25 bp, Homo sapien
ggagagatcccctggcttgcagaaa

SEQ ID NO: 5846572 - DNA, 25 bp, Homo sapien
ggtgctggcggctggtttacgccgc

SEQ ID NO: 5846573 - DNA, 25 bp, Homo sapien
gagatcccctggcttgcagaaaatc

SEQ ID NO: 5846574 - DNA, 25 bp, Homo sapien
ctttctgacactttcacttttgcag

SEQ ID NO: 5846575 - DNA, 25 bp, Homo sapien
atcccctggcttgcagaaaatccag

SEQ ID NO: 5846576 - DNA, 25 bp, Homo sapien
tgacactttcacttttgcagattgg

SEQ ID NO: 5846577 - DNA, 25 bp, Homo sapien
tttgcagattgggtaacacaggaac

SEQ ID NO: 5846578 - DNA, 25 bp, Homo sapien
gaaaacgtcacgctgaatatatgac

SEQ ID NO: 5846579 - DNA, 25 bp, Homo sapien
aaacgtcacgctgaatatatgacca

SEQ ID NO: 5846580 - DNA, 25 bp, Homo sapien
cgtcacgctgaatatatgaccacgc

SEQ ID NO: 5846581 - DNA, 25 bp, Homo sapien
acgctgaatatatgaccacgctcac

SEQ ID NO: 5846582 - DNA, 25 bp, Homo sapien
ctgaatatatgaccacgctcacccg

SEQ ID NO: 5846583 - DNA, 25 bp, Homo sapien
gaatatatgaccacgctcacccgca

SEQ ID NO: 5846584 - DNA, 25 bp, Homo sapien
cccgcatgattcccgcgccgctgct

SEQ ID NO: 5846585 - DNA, 25 bp, Homo sapien
catgattcccgcgccgctgctggga

SEQ ID NO: 5846586 - DNA, 25 bp, Homo sapien
gattcccgcgccgctgctgggagag

SEQ ID NO: 5846587 - DNA, 25 bp, Homo sapien
cgcgccgctgctgggagagatcccc

SEQ ID NO: 5846588 - DNA, 25 bp, Homo sapien
ccgctgctgggagagatcccctggc

SEQ ID NO: 5846589 - DNA, 25 bp, Homo sapien
ctgctgggagagatcccctggcttg

SEQ ID NO: 5846590 - DNA, 25 bp, Homo sapien
gctgggagagatcccctggcttgca

SEQ ID NO: 5846591 - DNA, 25 bp, Homo sapien
ggagagatcccctggcttgcagaaa

SEQ ID NO: 5846592 - DNA, 25 bp, Homo sapien
ggtgctggcggctggtttacgccgc

SEQ ID NO: 5846593 - DNA, 25 bp, Homo sapien
gagatcccctggcttgcagaaaatc

SEQ ID NO: 5846594 - DNA, 25 bp, Homo sapien
ctttctgacactttcacttttgcag

SEQ ID NO: 5846595 - DNA, 25 bp, Homo sapien
atcccctggcttgcagaaaatccag

SEQ ID NO: 5846596 - DNA, 25 bp, Homo sapien
tgacactttcacttttgcagattgg

SEQ ID NO: 5846597 - DNA, 25 bp, Homo sapien
tttgcagattgggtaacacaggaac

SEQ ID NO: 5846598 - DNA, 25 bp, Homo sapien
gaaaacgtcacgctgaatatatgac

SEQ ID NO: 5846599 - DNA, 25 bp, Homo sapien
aaacgtcacgctgaatatatgacca

SEQ ID NO: 5846600 - DNA, 25 bp, Homo sapien
cgtcacgctgaatatatgaccacgc

SEQ ID NO: 5846601 - DNA, 25 bp, Homo sapien
acgctgaatatatgaccacgctcac

SEQ ID NO: 5846602 - DNA, 25 bp, Homo sapien
ctgaatatatgaccacgctcacccg

SEQ ID NO: 5846603 - DNA, 25 bp, Homo sapien
gaatatatgaccacgctcacccgca

SEQ ID NO: 5846604 - DNA, 25 bp, Homo sapien
cccgcatgattcccgcgccgctgct

SEQ ID NO: 5846605 - DNA, 25 bp, Homo sapien
catgattcccgcgccgctgctggga

SEQ ID NO: 5846606 - DNA, 25 bp, Homo sapien
gattcccgcgccgctgctgggagag

SEQ ID NO: 5846607 - DNA, 25 bp, Homo sapien
cgcgccgctgctgggagagatcccc

SEQ ID NO: 5846608 - DNA, 25 bp, Homo sapien
ccgctgctgggagagatcccctggc

SEQ ID NO: 5846609 - DNA, 25 bp, Homo sapien
ctgctgggagagatcccctggcttg

SEQ ID NO: 5846610 - DNA, 25 bp, Homo sapien
gctgggagagatcccctggcttgca

SEQ ID NO: 5846611 - DNA, 25 bp, Homo sapien
ggagagatcccctggcttgcagaaa

SEQ ID NO: 5846612 - DNA, 25 bp, Homo sapien
ggtgctggcggctggtttacgccgc

SEQ ID NO: 5846613 - DNA, 25 bp, Homo sapien
gagatcccctggcttgcagaaaatc

SEQ ID NO: 5846614 - DNA, 25 bp, Homo sapien
ctttctgacactttcacttttgcag

SEQ ID NO: 5846615 - DNA, 25 bp, Homo sapien
atcccctggcttgcagaaaatccag

SEQ ID NO: 5846616 - DNA, 25 bp, Homo sapien
tgacactttcacttttgcagattgg

SEQ ID NO: 5846617 - DNA, 25 bp, Homo sapien
tttgcagattgggtaacacaggaac

SEQ ID NO: 5846618 - DNA, 25 bp, Homo sapien
gaaaacgtcacgctgaatatatgac

SEQ ID NO: 5846619 - DNA, 25 bp, Homo sapien
aaacgtcacgctgaatatatgacca

SEQ ID NO: 5846620 - DNA, 25 bp, Homo sapien
cgtcacgctgaatatatgaccacgc

SEQ ID NO: 5846621 - DNA, 25 bp, Homo sapien
acgctgaatatatgaccacgctcac

SEQ ID NO: 5846622 - DNA, 25 bp, Homo sapien
ctgaatatatgaccacgctcacccg

SEQ ID NO: 5846623 - DNA, 25 bp, Homo sapien
gaatatatgaccacgctcacccgca

SEQ ID NO: 5846624 - DNA, 25 bp, Homo sapien
cccgcatgattcccgcgccgctgct

SEQ ID NO: 5846625 - DNA, 25 bp, Homo sapien
catgattcccgcgccgctgctggga

SEQ ID NO: 5846626 - DNA, 25 bp, Homo sapien
gattcccgcgccgctgctgggagag

SEQ ID NO: 5846627 - DNA, 25 bp, Homo sapien
cgcgccgctgctgggagagatcccc

SEQ ID NO: 5846628 - DNA, 25 bp, Homo sapien
ccgctgctgggagagatcccctggc

SEQ ID NO: 5846629 - DNA, 25 bp, Homo sapien
ctgctgggagagatcccctggcttg

SEQ ID NO: 5846630 - DNA, 25 bp, Homo sapien
gctgggagagatcccctggcttgca

SEQ ID NO: 5846631 - DNA, 25 bp, Homo sapien
ggagagatcccctggcttgcagaaa

SEQ ID NO: 5846632 - DNA, 25 bp, Homo sapien
ggtgctggcggctggtttacgccgc

SEQ ID NO: 5846633 - DNA, 25 bp, Homo sapien
gagatcccctggcttgcagaaaatc

SEQ ID NO: 5846634 - DNA, 25 bp, Homo sapien
ctttctgacactttcacttttgcag

SEQ ID NO: 5846635 - DNA, 25 bp, Homo sapien
atcccctggcttgcagaaaatccag

SEQ ID NO: 5846636 - DNA, 25 bp, Homo sapien
tgacactttcacttttgcagattgg

SEQ ID NO: 5846637 - DNA, 25 bp, Homo sapien
tttgcagattgggtaacacaggaac

SEQ ID NO: 5846638 - DNA, 25 bp, Homo sapien
gaaaacgtcacgctgaatatatgac

SEQ ID NO: 5846639 - DNA, 25 bp, Homo sapien
aaacgtcacgctgaatatatgacca

SEQ ID NO: 5846640 - DNA, 25 bp, Homo sapien
cgtcacgctgaatatatgaccacgc

SEQ ID NO: 5846641 - DNA, 25 bp, Homo sapien
acgctgaatatatgaccacgctcac

SEQ ID NO: 5846642 - DNA, 25 bp, Homo sapien
ctgaatatatgaccacgctcacccg

SEQ ID NO: 5846643 - DNA, 25 bp, Homo sapien
gaatatatgaccacgctcacccgca

SEQ ID NO: 5846644 - DNA, 25 bp, Homo sapien
cccgcatgattcccgcgccgctgct

SEQ ID NO: 5846645 - DNA, 25 bp, Homo sapien
catgattcccgcgccgctgctggga

SEQ ID NO: 5846646 - DNA, 25 bp, Homo sapien
gattcccgcgccgctgctgggagag

SEQ ID NO: 5846647 - DNA, 25 bp, Homo sapien
cgcgccgctgctgggagagatcccc

SEQ ID NO: 5846648 - DNA, 25 bp, Homo sapien
ccgctgctgggagagatcccctggc

SEQ ID NO: 5846649 - DNA, 25 bp, Homo sapien
ctgctgggagagatcccctggcttg

SEQ ID NO: 5846650 - DNA, 25 bp, Homo sapien
gctgggagagatcccctggcttgca

SEQ ID NO: 5846651 - DNA, 25 bp, Homo sapien
ggagagatcccctggcttgcagaaa

SEQ ID NO: 5846652 - DNA, 25 bp, Homo sapien
ggtgctggcggctggtttacgccgc

SEQ ID NO: 5846653 - DNA, 25 bp, Homo sapien
gagatcccctggcttgcagaaaatc

SEQ ID NO: 5846654 - DNA, 25 bp, Homo sapien
ctttctgacactttcacttttgcag

SEQ ID NO: 5846655 - DNA, 25 bp, Homo sapien
atcccctggcttgcagaaaatccag

SEQ ID NO: 5846656 - DNA, 25 bp, Homo sapien
tgacactttcacttttgcagattgg

SEQ ID NO: 5846657 - DNA, 25 bp, Homo sapien
tttgcagattgggtaacacaggaac

SEQ ID NO: 5846658 - DNA, 25 bp, Homo sapien
gaaaacgtcacgctgaatatatgac

SEQ ID NO: 5846659 - DNA, 25 bp, Homo sapien
aaacgtcacgctgaatatatgacca

SEQ ID NO: 5846660 - DNA, 25 bp, Homo sapien
cgtcacgctgaatatatgaccacgc

SEQ ID NO: 5846661 - DNA, 25 bp, Homo sapien
acgctgaatatatgaccacgctcac

SEQ ID NO: 5846662 - DNA, 25 bp, Homo sapien
ctgaatatatgaccacgctcacccg

SEQ ID NO: 5846663 - DNA, 25 bp, Homo sapien
gaatatatgaccacgctcacccgca

SEQ ID NO: 5846664 - DNA, 25 bp, Homo sapien
cccgcatgattcccgcgccgctgct

SEQ ID NO: 5846665 - DNA, 25 bp, Homo sapien
catgattcccgcgccgctgctggga

SEQ ID NO: 5846666 - DNA, 25 bp, Homo sapien
gattcccgcgccgctgctgggagag

SEQ ID NO: 5846667 - DNA, 25 bp, Homo sapien
cgcgccgctgctgggagagatcccc

SEQ ID NO: 5846668 - DNA, 25 bp, Homo sapien
ccgctgctgggagagatcccctggc

SEQ ID NO: 5846669 - DNA, 25 bp, Homo sapien
ctgctgggagagatcccctggcttg

SEQ ID NO: 5846670 - DNA, 25 bp, Homo sapien
gctgggagagatcccctggcttgca

SEQ ID NO: 5846671 - DNA, 25 bp, Homo sapien
ggagagatcccctggcttgcagaaa

SEQ ID NO: 5846672 - DNA, 25 bp, Homo sapien
ggtgctggcggctggtttacgccgc

SEQ ID NO: 5846673 - DNA, 25 bp, Homo sapien
gagatcccctggcttgcagaaaatc

SEQ ID NO: 5846674 - DNA, 25 bp, Homo sapien
ctttctgacactttcacttttgcag

SEQ ID NO: 5846675 - DNA, 25 bp, Homo sapien
atcccctggcttgcagaaaatccag

SEQ ID NO: 5846676 - DNA, 25 bp, Homo sapien
tgacactttcacttttgcagattgg

SEQ ID NO: 5846677 - DNA, 25 bp, Homo sapien
tttgcagattgggtaacacaggaac

SEQ ID NO: 5846678 - DNA, 25 bp, Homo sapien
gaaaacgtcacgctgaatatatgac

SEQ ID NO: 5846679 - DNA, 25 bp, Homo sapien
aaacgtcacgctgaatatatgacca

SEQ ID NO: 5846680 - DNA, 25 bp, Homo sapien
cgtcacgctgaatatatgaccacgc

SEQ ID NO: 5846681 - DNA, 25 bp, Homo sapien
acgctgaatatatgaccacgctcac

SEQ ID NO: 5846682 - DNA, 25 bp, Homo sapien
ctgaatatatgaccacgctcacccg

SEQ ID NO: 5846683 - DNA, 25 bp, Homo sapien
gaatatatgaccacgctcacccgca

SEQ ID NO: 5846684 - DNA, 25 bp, Homo sapien
cccgcatgattcccgcgccgctgct

SEQ ID NO: 5846685 - DNA, 25 bp, Homo sapien
catgattcccgcgccgctgctggga

SEQ ID NO: 5846686 - DNA, 25 bp, Homo sapien
gattcccgcgccgctgctgggagag

SEQ ID NO: 5846687 - DNA, 25 bp, Homo sapien
cgcgccgctgctgggagagatcccc

SEQ ID NO: 5846688 - DNA, 25 bp, Homo sapien
ccgctgctgggagagatcccctggc

SEQ ID NO: 5846689 - DNA, 25 bp, Homo sapien
ctgctgggagagatcccctggcttg

SEQ ID NO: 5846690 - DNA, 25 bp, Homo sapien
gctgggagagatcccctggcttgca

SEQ ID NO: 5846691 - DNA, 25 bp, Homo sapien
ggagagatcccctggcttgcagaaa

SEQ ID NO: 5846692 - DNA, 25 bp, Homo sapien
ggtgctggcggctggtttacgccgc

SEQ ID NO: 5846693 - DNA, 25 bp, Homo sapien
gagatcccctggcttgcagaaaatc

SEQ ID NO: 5846694 - DNA, 25 bp, Homo sapien
ctttctgacactttcacttttgcag

SEQ ID NO: 5846695 - DNA, 25 bp, Homo sapien
atcccctggcttgcagaaaatccag

SEQ ID NO: 5846696 - DNA, 25 bp, Homo sapien
tgacactttcacttttgcagattgg

SEQ ID NO: 5846697 - DNA, 25 bp, Homo sapien
tttgcagattgggtaacacaggaac

SEQ ID NO: 5846698 - DNA, 25 bp, Homo sapien
gaaaacgtcacgctgaatatatgac

SEQ ID NO: 5846699 - DNA, 25 bp, Homo sapien
aaacgtcacgctgaatatatgacca

SEQ ID NO: 5846700 - DNA, 25 bp, Homo sapien
cgtcacgctgaatatatgaccacgc

SEQ ID NO: 5846701 - DNA, 25 bp, Homo sapien
acgctgaatatatgaccacgctcac

SEQ ID NO: 5846702 - DNA, 25 bp, Homo sapien
ctgaatatatgaccacgctcacccg

SEQ ID NO: 5846703 - DNA, 25 bp, Homo sapien
gaatatatgaccacgctcacccgca

SEQ ID NO: 5846704 - DNA, 25 bp, Homo sapien
cccgcatgattcccgcgccgctgct

SEQ ID NO: 5846705 - DNA, 25 bp, Homo sapien
catgattcccgcgccgctgctggga

SEQ ID NO: 5846706 - DNA, 25 bp, Homo sapien
gattcccgcgccgctgctgggagag

SEQ ID NO: 5846707 - DNA, 25 bp, Homo sapien
cgcgccgctgctgggagagatcccc

SEQ ID NO: 5846708 - DNA, 25 bp, Homo sapien
ccgctgctgggagagatcccctggc

SEQ ID NO: 5846709 - DNA, 25 bp, Homo sapien
ctgctgggagagatcccctggcttg

SEQ ID NO: 5846710 - DNA, 25 bp, Homo sapien
gctgggagagatcccctggcttgca

SEQ ID NO: 5846711 - DNA, 25 bp, Homo sapien
ggagagatcccctggcttgcagaaa

SEQ ID NO: 5846712 - DNA, 25 bp, Homo sapien
ggtgctggcggctggtttacgccgc

SEQ ID NO: 5846713 - DNA, 25 bp, Homo sapien
gagatcccctggcttgcagaaaatc

SEQ ID NO: 5846714 - DNA, 25 bp, Homo sapien
ctttctgacactttcacttttgcag

SEQ ID NO: 5846715 - DNA, 25 bp, Homo sapien
atcccctggcttgcagaaaatccag

SEQ ID NO: 5846716 - DNA, 25 bp, Homo sapien
tgacactttcacttttgcagattgg

SEQ ID NO: 5846717 - DNA, 25 bp, Homo sapien
tttgcagattgggtaacacaggaac

SEQ ID NO: 5846718 - DNA, 25 bp, Homo sapien
gaaaacgtcacgctgaatatatgac

SEQ ID NO: 5846719 - DNA, 25 bp, Homo sapien
aaacgtcacgctgaatatatgacca

SEQ ID NO: 5846720 - DNA, 25 bp, Homo sapien
cgtcacgctgaatatatgaccacgc

SEQ ID NO: 5846721 - DNA, 25 bp, Homo sapien
acgctgaatatatgaccacgctcac

SEQ ID NO: 5846722 - DNA, 25 bp, Homo sapien
ctgaatatatgaccacgctcacccg

SEQ ID NO: 5846723 - DNA, 25 bp, Homo sapien
gaatatatgaccacgctcacccgca

SEQ ID NO: 5846724 - DNA, 25 bp, Homo sapien
cccgcatgattcccgcgccgctgct

SEQ ID NO: 5846725 - DNA, 25 bp, Homo sapien
catgattcccgcgccgctgctggga

SEQ ID NO: 5846726 - DNA, 25 bp, Homo sapien
gattcccgcgccgctgctgggagag

SEQ ID NO: 5846727 - DNA, 25 bp, Homo sapien
cgcgccgctgctgggagagatcccc

SEQ ID NO: 5846728 - DNA, 25 bp, Homo sapien
ccgctgctgggagagatcccctggc

SEQ ID NO: 5846729 - DNA, 25 bp, Homo sapien
ctgctgggagagatcccctggcttg

SEQ ID NO: 5846730 - DNA, 25 bp, Homo sapien
gctgggagagatcccctggcttgca

SEQ ID NO: 5846731 - DNA, 25 bp, Homo sapien
ggagagatcccctggcttgcagaaa

SEQ ID NO: 5846732 - DNA, 25 bp, Homo sapien
ggtgctggcggctggtttacgccgc

SEQ ID NO: 5846733 - DNA, 25 bp, Homo sapien
gagatcccctggcttgcagaaaatc

SEQ ID NO: 5846734 - DNA, 25 bp, Homo sapien
ctttctgacactttcacttttgcag

SEQ ID NO: 5846735 - DNA, 25 bp, Homo sapien
atcccctggcttgcagaaaatccag

SEQ ID NO: 5846736 - DNA, 25 bp, Homo sapien
tgacactttcacttttgcagattgg

SEQ ID NO: 5846737 - DNA, 25 bp, Homo sapien
tttgcagattgggtaacacaggaac

SEQ ID NO: 5846738 - DNA, 25 bp, Homo sapien
gaaaacgtcacgctgaatatatgac

SEQ ID NO: 5846739 - DNA, 25 bp, Homo sapien
aaacgtcacgctgaatatatgacca

SEQ ID NO: 5846740 - DNA, 25 bp, Homo sapien
cgtcacgctgaatatatgaccacgc

SEQ ID NO: 5846741 - DNA, 25 bp, Homo sapien
acgctgaatatatgaccacgctcac

SEQ ID NO: 5846742 - DNA, 25 bp, Homo sapien
ctgaatatatgaccacgctcacccg

SEQ ID NO: 5846743 - DNA, 25 bp, Homo sapien
gaatatatgaccacgctcacccgca

SEQ ID NO: 5846744 - DNA, 25 bp, Homo sapien
cccgcatgattcccgcgccgctgct

SEQ ID NO: 5846745 - DNA, 25 bp, Homo sapien
catgattcccgcgccgctgctggga

SEQ ID NO: 5846746 - DNA, 25 bp, Homo sapien
gattcccgcgccgctgctgggagag

SEQ ID NO: 5846747 - DNA, 25 bp, Homo sapien
cgcgccgctgctgggagagatcccc

SEQ ID NO: 5846748 - DNA, 25 bp, Homo sapien
ccgctgctgggagagatcccctggc

SEQ ID NO: 5846749 - DNA, 25 bp, Homo sapien
ctgctgggagagatcccctggcttg

SEQ ID NO: 5846750 - DNA, 25 bp, Homo sapien
gctgggagagatcccctggcttgca

SEQ ID NO: 5846751 - DNA, 25 bp, Homo sapien
ggagagatcccctggcttgcagaaa

SEQ ID NO: 5846752 - DNA, 25 bp, Homo sapien
ggtgctggcggctggtttacgccgc

SEQ ID NO: 5846753 - DNA, 25 bp, Homo sapien
gagatcccctggcttgcagaaaatc

SEQ ID NO: 5846754 - DNA, 25 bp, Homo sapien
ctttctgacactttcacttttgcag

SEQ ID NO: 5846755 - DNA, 25 bp, Homo sapien
atcccctggcttgcagaaaatccag

SEQ ID NO: 5846756 - DNA, 25 bp, Homo sapien
tgacactttcacttttgcagattgg

SEQ ID NO: 5846757 - DNA, 25 bp, Homo sapien
tttgcagattgggtaacacaggaac

SEQ ID NO: 5846758 - DNA, 25 bp, Homo sapien
gaaaacgtcacgctgaatatatgac

SEQ ID NO: 5846759 - DNA, 25 bp, Homo sapien
aaacgtcacgctgaatatatgacca

SEQ ID NO: 5846760 - DNA, 25 bp, Homo sapien
cgtcacgctgaatatatgaccacgc

SEQ ID NO: 5846761 - DNA, 25 bp, Homo sapien
acgctgaatatatgaccacgctcac

SEQ ID NO: 5846762 - DNA, 25 bp, Homo sapien
ctgaatatatgaccacgctcacccg

SEQ ID NO: 5846763 - DNA, 25 bp, Homo sapien
gaatatatgaccacgctcacccgca

SEQ ID NO: 5846764 - DNA, 25 bp, Homo sapien
cccgcatgattcccgcgccgctgct

SEQ ID NO: 5846765 - DNA, 25 bp, Homo sapien
catgattcccgcgccgctgctggga

SEQ ID NO: 5846766 - DNA, 25 bp, Homo sapien
gattcccgcgccgctgctgggagag

SEQ ID NO: 5846767 - DNA, 25 bp, Homo sapien
cgcgccgctgctgggagagatcccc

SEQ ID NO: 5846768 - DNA, 25 bp, Homo sapien
ccgctgctgggagagatcccctggc

SEQ ID NO: 5846769 - DNA, 25 bp, Homo sapien
ctgctgggagagatcccctggcttg

SEQ ID NO: 5846770 - DNA, 25 bp, Homo sapien
gctgggagagatcccctggcttgca

SEQ ID NO: 5846771 - DNA, 25 bp, Homo sapien
ggagagatcccctggcttgcagaaa

SEQ ID NO: 5846772 - DNA, 25 bp, Homo sapien
ggtgctggcggctggtttacgccgc

SEQ ID NO: 5846773 - DNA, 25 bp, Homo sapien
gagatcccctggcttgcagaaaatc

SEQ ID NO: 5846774 - DNA, 25 bp, Homo sapien
ctttctgacactttcacttttgcag

SEQ ID NO: 5846775 - DNA, 25 bp, Homo sapien
atcccctggcttgcagaaaatccag

SEQ ID NO: 5846776 - DNA, 25 bp, Homo sapien
tgacactttcacttttgcagattgg

SEQ ID NO: 5846777 - DNA, 25 bp, Homo sapien
tttgcagattgggtaacacaggaac

SEQ ID NO: 5846778 - DNA, 25 bp, Homo sapien
gaaaacgtcacgctgaatatatgac

SEQ ID NO: 5846779 - DNA, 25 bp, Homo sapien
aaacgtcacgctgaatatatgacca

SEQ ID NO: 5846780 - DNA, 25 bp, Homo sapien
cgtcacgctgaatatatgaccacgc

SEQ ID NO: 5846781 - DNA, 25 bp, Homo sapien
acgctgaatatatgaccacgctcac

SEQ ID NO: 5846782 - DNA, 25 bp, Homo sapien
ctgaatatatgaccacgctcacccg

SEQ ID NO: 5846783 - DNA, 25 bp, Homo sapien
gaatatatgaccacgctcacccgca

SEQ ID NO: 5846784 - DNA, 25 bp, Homo sapien
cccgcatgattcccgcgccgctgct

SEQ ID NO: 5846785 - DNA, 25 bp, Homo sapien
catgattcccgcgccgctgctggga

SEQ ID NO: 5846786 - DNA, 25 bp, Homo sapien
gattcccgcgccgctgctgggagag

SEQ ID NO: 5846787 - DNA, 25 bp, Homo sapien
cgcgccgctgctgggagagatcccc

SEQ ID NO: 5846788 - DNA, 25 bp, Homo sapien
ccgctgctgggagagatcccctggc

SEQ ID NO: 5846789 - DNA, 25 bp, Homo sapien
ctgctgggagagatcccctggcttg

SEQ ID NO: 5846790 - DNA, 25 bp, Homo sapien
gctgggagagatcccctggcttgca

SEQ ID NO: 5846791 - DNA, 25 bp, Homo sapien
ggagagatcccctggcttgcagaaa

SEQ ID NO: 5846792 - DNA, 25 bp, Homo sapien
ggtgctggcggctggtttacgccgc

SEQ ID NO: 5846793 - DNA, 25 bp, Homo sapien
gagatcccctggcttgcagaaaatc

SEQ ID NO: 5846794 - DNA, 25 bp, Homo sapien
ctttctgacactttcacttttgcag

SEQ ID NO: 5846795 - DNA, 25 bp, Homo sapien
atcccctggcttgcagaaaatccag

SEQ ID NO: 5846796 - DNA, 25 bp, Homo sapien
tgacactttcacttttgcagattgg

SEQ ID NO: 5846797 - DNA, 25 bp, Homo sapien
tttgcagattgggtaacacaggaac

SEQ ID NO: 5846798 - DNA, 25 bp, Homo sapien
gaaaacgtcacgctgaatatatgac

SEQ ID NO: 5846799 - DNA, 25 bp, Homo sapien
aaacgtcacgctgaatatatgacca

SEQ ID NO: 5846800 - DNA, 25 bp, Homo sapien
cgtcacgctgaatatatgaccacgc

SEQ ID NO: 5846801 - DNA, 25 bp, Homo sapien
acgctgaatatatgaccacgctcac

SEQ ID NO: 5846802 - DNA, 25 bp, Homo sapien
ctgaatatatgaccacgctcacccg

SEQ ID NO: 5846803 - DNA, 25 bp, Homo sapien
gaatatatgaccacgctcacccgca

SEQ ID NO: 5846804 - DNA, 25 bp, Homo sapien
cccgcatgattcccgcgccgctgct

SEQ ID NO: 5846805 - DNA, 25 bp, Homo sapien
catgattcccgcgccgctgctggga

SEQ ID NO: 5846806 - DNA, 25 bp, Homo sapien
gattcccgcgccgctgctgggagag

SEQ ID NO: 5846807 - DNA, 25 bp, Homo sapien
cgcgccgctgctgggagagatcccc

SEQ ID NO: 5846808 - DNA, 25 bp, Homo sapien
ccgctgctgggagagatcccctggc

SEQ ID NO: 5846809 - DNA, 25 bp, Homo sapien
ctgctgggagagatcccctggcttg

SEQ ID NO: 5846810 - DNA, 25 bp, Homo sapien
gctgggagagatcccctggcttgca

SEQ ID NO: 5846811 - DNA, 25 bp, Homo sapien
ggagagatcccctggcttgcagaaa

SEQ ID NO: 5846812 - DNA, 25 bp, Homo sapien
ggtgctggcggctggtttacgccgc

SEQ ID NO: 5846813 - DNA, 25 bp, Homo sapien
gagatcccctggcttgcagaaaatc

SEQ ID NO: 5846814 - DNA, 25 bp, Homo sapien
ctttctgacactttcacttttgcag

SEQ ID NO: 5846815 - DNA, 25 bp, Homo sapien
atcccctggcttgcagaaaatccag

SEQ ID NO: 5846816 - DNA, 25 bp, Homo sapien
tgacactttcacttttgcagattgg

SEQ ID NO: 5846817 - DNA, 25 bp, Homo sapien
tttgcagattgggtaacacaggaac

SEQ ID NO: 5846818 - DNA, 25 bp, Homo sapien
gaaaacgtcacgctgaatatatgac

SEQ ID NO: 5846819 - DNA, 25 bp, Homo sapien
aaacgtcacgctgaatatatgacca

SEQ ID NO: 5846820 - DNA, 25 bp, Homo sapien
cgtcacgctgaatatatgaccacgc

SEQ ID NO: 5846821 - DNA, 25 bp, Homo sapien
acgctgaatatatgaccacgctcac

SEQ ID NO: 5846822 - DNA, 25 bp, Homo sapien
ctgaatatatgaccacgctcacccg

SEQ ID NO: 5846823 - DNA, 25 bp, Homo sapien
gaatatatgaccacgctcacccgca

SEQ ID NO: 5846824 - DNA, 25 bp, Homo sapien
cccgcatgattcccgcgccgctgct

SEQ ID NO: 5846825 - DNA, 25 bp, Homo sapien
catgattcccgcgccgctgctggga

SEQ ID NO: 5846826 - DNA, 25 bp, Homo sapien
gattcccgcgccgctgctgggagag

SEQ ID NO: 5846827 - DNA, 25 bp, Homo sapien
cgcgccgctgctgggagagatcccc

SEQ ID NO: 5846828 - DNA, 25 bp, Homo sapien
ccgctgctgggagagatcccctggc

SEQ ID NO: 5846829 - DNA, 25 bp, Homo sapien
ctgctgggagagatcccctggcttg

SEQ ID NO: 5846830 - DNA, 25 bp, Homo sapien
gctgggagagatcccctggcttgca

SEQ ID NO: 5846831 - DNA, 25 bp, Homo sapien
ggagagatcccctggcttgcagaaa

SEQ ID NO: 5846832 - DNA, 25 bp, Homo sapien
ggtgctggcggctggtttacgccgc

SEQ ID NO: 5846833 - DNA, 25 bp, Homo sapien
gagatcccctggcttgcagaaaatc

SEQ ID NO: 5846834 - DNA, 25 bp, Homo sapien
ctttctgacactttcacttttgcag

SEQ ID NO: 5846835 - DNA, 25 bp, Homo sapien
atcccctggcttgcagaaaatccag

SEQ ID NO: 5846836 - DNA, 25 bp, Homo sapien
tgacactttcacttttgcagattgg

SEQ ID NO: 5846837 - DNA, 25 bp, Homo sapien
tttgcagattgggtaacacaggaac

SEQ ID NO: 5846838 - DNA, 25 bp, Homo sapien
gaaaacgtcacgctgaatatatgac

SEQ ID NO: 5846839 - DNA, 25 bp, Homo sapien
aaacgtcacgctgaatatatgacca

SEQ ID NO: 5846840 - DNA, 25 bp, Homo sapien
cgtcacgctgaatatatgaccacgc

SEQ ID NO: 5846841 - DNA, 25 bp, Homo sapien
acgctgaatatatgaccacgctcac

SEQ ID NO: 5846842 - DNA, 25 bp, Homo sapien
ctgaatatatgaccacgctcacccg

SEQ ID NO: 5846843 - DNA, 25 bp, Homo sapien
gaatatatgaccacgctcacccgca

SEQ ID NO: 5846844 - DNA, 25 bp, Homo sapien
cccgcatgattcccgcgccgctgct

SEQ ID NO: 5846845 - DNA, 25 bp, Homo sapien
catgattcccgcgccgctgctggga

SEQ ID NO: 5846846 - DNA, 25 bp, Homo sapien
gattcccgcgccgctgctgggagag

SEQ ID NO: 5846847 - DNA, 25 bp, Homo sapien
cgcgccgctgctgggagagatcccc

SEQ ID NO: 5846848 - DNA, 25 bp, Homo sapien
ccgctgctgggagagatcccctggc

SEQ ID NO: 5846849 - DNA, 25 bp, Homo sapien
ctgctgggagagatcccctggcttg

SEQ ID NO: 5846850 - DNA, 25 bp, Homo sapien
gctgggagagatcccctggcttgca

SEQ ID NO: 5846851 - DNA, 25 bp, Homo sapien
ggagagatcccctggcttgcagaaa

SEQ ID NO: 5846852 - DNA, 25 bp, Homo sapien
ggtgctggcggctggtttacgccgc

SEQ ID NO: 5846853 - DNA, 25 bp, Homo sapien
gagatcccctggcttgcagaaaatc

SEQ ID NO: 5846854 - DNA, 25 bp, Homo sapien
ctttctgacactttcacttttgcag

SEQ ID NO: 5846855 - DNA, 25 bp, Homo sapien
atcccctggcttgcagaaaatccag

SEQ ID NO: 5846856 - DNA, 25 bp, Homo sapien
tgacactttcacttttgcagattgg

SEQ ID NO: 5846857 - DNA, 25 bp, Homo sapien
tttgcagattgggtaacacaggaac

SEQ ID NO: 5846858 - DNA, 25 bp, Homo sapien
gaaaacgtcacgctgaatatatgac

SEQ ID NO: 5846859 - DNA, 25 bp, Homo sapien
aaacgtcacgctgaatatatgacca

SEQ ID NO: 5846860 - DNA, 25 bp, Homo sapien
gcgctggcgttacagcgcaacagca

SEQ ID NO: 5846861 - DNA, 25 bp, Homo sapien
cgttacagcgcaacagcagcctgca

SEQ ID NO: 5846862 - DNA, 25 bp, Homo sapien
agcgcaacagcagcctgcagctgga

SEQ ID NO: 5846863 - DNA, 25 bp, Homo sapien
cagcagcctgcagctggattacgca

SEQ ID NO: 5846864 - DNA, 25 bp, Homo sapien
ctgcagctggattacgcaacagtaa

SEQ ID NO: 5846865 - DNA, 25 bp, Homo sapien
catcagcgcgcaagagggcagaccg

SEQ ID NO: 5846866 - DNA, 25 bp, Homo sapien
cgcaagagggcagaccgatagaatc

SEQ ID NO: 5846867 - DNA, 25 bp, Homo sapien
gggcagaccgatagaatcattggta

SEQ ID NO: 5846868 - DNA, 25 bp, Homo sapien
gaccgatagaatcattggtaatgag

SEQ ID NO: 5846869 - DNA, 25 bp, Homo sapien
agaatcattggtaatgagcgccgga

SEQ ID NO: 5846870 - DNA, 25 bp, Homo sapien
gggaaaactgtcgccagttgtgcac

SEQ ID NO: 5846871 - DNA, 25 bp, Homo sapien
ttggtaatgagcgccggattacgcg

SEQ ID NO: 5846872 - DNA, 25 bp, Homo sapien
cgccagttgtgcacttttacaagcc

SEQ ID NO: 5846873 - DNA, 25 bp, Homo sapien
atgagcgccggattacgcgcgcttg

SEQ ID NO: 5846874 - DNA, 25 bp, Homo sapien
cacttttacaagccgcaaaggcagc

SEQ ID NO: 5846875 - DNA, 25 bp, Homo sapien
caagccgcaaaggcagcaggctacc

SEQ ID NO: 5846876 - DNA, 25 bp, Homo sapien
gcaaaggcagcaggctaccggacgg

SEQ ID NO: 5846877 - DNA, 25 bp, Homo sapien
aggtttacgcaatagcgacgcgctg

SEQ ID NO: 5846878 - DNA, 25 bp, Homo sapien
cgcaatagcgacgcgctggcgttac

SEQ ID NO: 5846879 - DNA, 25 bp, Homo sapien
gcgacgcgctggcgttacagcgcaa

SEQ ID NO: 5846880 - DNA, 25 bp, Homo sapien
gcgctggcgttacagcgcaacagca

SEQ ID NO: 5846881 - DNA, 25 bp, Homo sapien
cgttacagcgcaacagcagcctgca

SEQ ID NO: 5846882 - DNA, 25 bp, Homo sapien
agcgcaacagcagcctgcagctgga

SEQ ID NO: 5846883 - DNA, 25 bp, Homo sapien
cagcagcctgcagctggattacgca

SEQ ID NO: 5846884 - DNA, 25 bp, Homo sapien
ctgcagctggattacgcaacagtaa

SEQ ID NO: 5846885 - DNA, 25 bp, Homo sapien
catcagcgcgcaagagggcagaccg

SEQ ID NO: 5846886 - DNA, 25 bp, Homo sapien
cgcaagagggcagaccgatagaatc

SEQ ID NO: 5846887 - DNA, 25 bp, Homo sapien
gggcagaccgatagaatcattggta

SEQ ID NO: 5846888 - DNA, 25 bp, Homo sapien
gaccgatagaatcattggtaatgag

SEQ ID NO: 5846889 - DNA, 25 bp, Homo sapien
agaatcattggtaatgagcgccgga

SEQ ID NO: 5846890 - DNA, 25 bp, Homo sapien
gggaaaactgtcgccagttgtgcac

SEQ ID NO: 5846891 - DNA, 25 bp, Homo sapien
ttggtaatgagcgccggattacgcg

SEQ ID NO: 5846892 - DNA, 25 bp, Homo sapien
cgccagttgtgcacttttacaagcc

SEQ ID NO: 5846893 - DNA, 25 bp, Homo sapien
atgagcgccggattacgcgcgcttg

SEQ ID NO: 5846894 - DNA, 25 bp, Homo sapien
cacttttacaagccgcaaaggcagc

SEQ ID NO: 5846895 - DNA, 25 bp, Homo sapien
caagccgcaaaggcagcaggctacc

SEQ ID NO: 5846896 - DNA, 25 bp, Homo sapien
gcaaaggcagcaggctaccggacgg

SEQ ID NO: 5846897 - DNA, 25 bp, Homo sapien
aggtttacgcaatagcgacgcgctg

SEQ ID NO: 5846898 - DNA, 25 bp, Homo sapien
cgcaatagcgacgcgctggcgttac

SEQ ID NO: 5846899 - DNA, 25 bp, Homo sapien
gcgacgcgctggcgttacagcgcaa

SEQ ID NO: 5846900 - DNA, 25 bp, Homo sapien
gcgctggcgttacagcgcaacagca

SEQ ID NO: 5846901 - DNA, 25 bp, Homo sapien
cgttacagcgcaacagcagcctgca

SEQ ID NO: 5846902 - DNA, 25 bp, Homo sapien
agcgcaacagcagcctgcagctgga

SEQ ID NO: 5846903 - DNA, 25 bp, Homo sapien
cagcagcctgcagctggattacgca

SEQ ID NO: 5846904 - DNA, 25 bp, Homo sapien
ctgcagctggattacgcaacagtaa

SEQ ID NO: 5846905 - DNA, 25 bp, Homo sapien
catcagcgcgcaagagggcagaccg

SEQ ID NO: 5846906 - DNA, 25 bp, Homo sapien
cgcaagagggcagaccgatagaatc

SEQ ID NO: 5846907 - DNA, 25 bp, Homo sapien
gggcagaccgatagaatcattggta

SEQ ID NO: 5846908 - DNA, 25 bp, Homo sapien
gaccgatagaatcattggtaatgag

SEQ ID NO: 5846909 - DNA, 25 bp, Homo sapien
agaatcattggtaatgagcgccgga

SEQ ID NO: 5846910 - DNA, 25 bp, Homo sapien
gggaaaactgtcgccagttgtgcac

SEQ ID NO: 5846911 - DNA, 25 bp, Homo sapien
ttggtaatgagcgccggattacgcg

SEQ ID NO: 5846912 - DNA, 25 bp, Homo sapien
cgccagttgtgcacttttacaagcc

SEQ ID NO: 5846913 - DNA, 25 bp, Homo sapien
atgagcgccggattacgcgcgcttg

SEQ ID NO: 5846914 - DNA, 25 bp, Homo sapien
cacttttacaagccgcaaaggcagc

SEQ ID NO: 5846915 - DNA, 25 bp, Homo sapien
caagccgcaaaggcagcaggctacc

SEQ ID NO: 5846916 - DNA, 25 bp, Homo sapien
gcaaaggcagcaggctaccggacgg

SEQ ID NO: 5846917 - DNA, 25 bp, Homo sapien
aggtttacgcaatagcgacgcgctg

SEQ ID NO: 5846918 - DNA, 25 bp, Homo sapien
cgcaatagcgacgcgctggcgttac

SEQ ID NO: 5846919 - DNA, 25 bp, Homo sapien
gcgacgcgctggcgttacagcgcaa

SEQ ID NO: 5846920 - DNA, 25 bp, Homo sapien
gcgctggcgttacagcgcaacagca

SEQ ID NO: 5846921 - DNA, 25 bp, Homo sapien
cgttacagcgcaacagcagcctgca

SEQ ID NO: 5846922 - DNA, 25 bp, Homo sapien
agcgcaacagcagcctgcagctgga

SEQ ID NO: 5846923 - DNA, 25 bp, Homo sapien
cagcagcctgcagctggattacgca

SEQ ID NO: 5846924 - DNA, 25 bp, Homo sapien
ctgcagctggattacgcaacagtaa

SEQ ID NO: 5846925 - DNA, 25 bp, Homo sapien
catcagcgcgcaagagggcagaccg

SEQ ID NO: 5846926 - DNA, 25 bp, Homo sapien
cgcaagagggcagaccgatagaatc

SEQ ID NO: 5846927 - DNA, 25 bp, Homo sapien
gggcagaccgatagaatcattggta

SEQ ID NO: 5846928 - DNA, 25 bp, Homo sapien
gaccgatagaatcattggtaatgag

SEQ ID NO: 5846929 - DNA, 25 bp, Homo sapien
agaatcattggtaatgagcgccgga

SEQ ID NO: 5846930 - DNA, 25 bp, Homo sapien
gggaaaactgtcgccagttgtgcac

SEQ ID NO: 5846931 - DNA, 25 bp, Homo sapien
ttggtaatgagcgccggattacgcg

SEQ ID NO: 5846932 - DNA, 25 bp, Homo sapien
cgccagttgtgcacttttacaagcc

SEQ ID NO: 5846933 - DNA, 25 bp, Homo sapien
atgagcgccggattacgcgcgcttg

SEQ ID NO: 5846934 - DNA, 25 bp, Homo sapien
cacttttacaagccgcaaaggcagc

SEQ ID NO: 5846935 - DNA, 25 bp, Homo sapien
caagccgcaaaggcagcaggctacc

SEQ ID NO: 5846936 - DNA, 25 bp, Homo sapien
gcaaaggcagcaggctaccggacgg

SEQ ID NO: 5846937 - DNA, 25 bp, Homo sapien
aggtttacgcaatagcgacgcgctg

SEQ ID NO: 5846938 - DNA, 25 bp, Homo sapien
cgcaatagcgacgcgctggcgttac

SEQ ID NO: 5846939 - DNA, 25 bp, Homo sapien
gcgacgcgctggcgttacagcgcaa

SEQ ID NO: 5846940 - DNA, 25 bp, Homo sapien
gcgctggcgttacagcgcaacagca

SEQ ID NO: 5846941 - DNA, 25 bp, Homo sapien
cgttacagcgcaacagcagcctgca

SEQ ID NO: 5846942 - DNA, 25 bp, Homo sapien
agcgcaacagcagcctgcagctgga

SEQ ID NO: 5846943 - DNA, 25 bp, Homo sapien
cagcagcctgcagctggattacgca

SEQ ID NO: 5846944 - DNA, 25 bp, Homo sapien
ctgcagctggattacgcaacagtaa

SEQ ID NO: 5846945 - DNA, 25 bp, Homo sapien
catcagcgcgcaagagggcagaccg

SEQ ID NO: 5846946 - DNA, 25 bp, Homo sapien
cgcaagagggcagaccgatagaatc

SEQ ID NO: 5846947 - DNA, 25 bp, Homo sapien
gggcagaccgatagaatcattggta

SEQ ID NO: 5846948 - DNA, 25 bp, Homo sapien
gaccgatagaatcattggtaatgag

SEQ ID NO: 5846949 - DNA, 25 bp, Homo sapien
agaatcattggtaatgagcgccgga

SEQ ID NO: 5846950 - DNA, 25 bp, Homo sapien
gggaaaactgtcgccagttgtgcac

SEQ ID NO: 5846951 - DNA, 25 bp, Homo sapien
ttggtaatgagcgccggattacgcg

SEQ ID NO: 5846952 - DNA, 25 bp, Homo sapien
cgccagttgtgcacttttacaagcc

SEQ ID NO: 5846953 - DNA, 25 bp, Homo sapien
atgagcgccggattacgcgcgcttg

SEQ ID NO: 5846954 - DNA, 25 bp, Homo sapien
cacttttacaagccgcaaaggcagc

SEQ ID NO: 5846955 - DNA, 25 bp, Homo sapien
caagccgcaaaggcagcaggctacc

SEQ ID NO: 5846956 - DNA, 25 bp, Homo sapien
gcaaaggcagcaggctaccggacgg

SEQ ID NO: 5846957 - DNA, 25 bp, Homo sapien
aggtttacgcaatagcgacgcgctg

SEQ ID NO: 5846958 - DNA, 25 bp, Homo sapien
cgcaatagcgacgcgctggcgttac

SEQ ID NO: 5846959 - DNA, 25 bp, Homo sapien
gcgacgcgctggcgttacagcgcaa

SEQ ID NO: 5846960 - DNA, 25 bp, Homo sapien
gcgctggcgttacagcgcaacagca

SEQ ID NO: 5846961 - DNA, 25 bp, Homo sapien
cgttacagcgcaacagcagcctgca

SEQ ID NO: 5846962 - DNA, 25 bp, Homo sapien
agcgcaacagcagcctgcagctgga

SEQ ID NO: 5846963 - DNA, 25 bp, Homo sapien
cagcagcctgcagctggattacgca

SEQ ID NO: 5846964 - DNA, 25 bp, Homo sapien
ctgcagctggattacgcaacagtaa

SEQ ID NO: 5846965 - DNA, 25 bp, Homo sapien
catcagcgcgcaagagggcagaccg

SEQ ID NO: 5846966 - DNA, 25 bp, Homo sapien
cgcaagagggcagaccgatagaatc

SEQ ID NO: 5846967 - DNA, 25 bp, Homo sapien
gggcagaccgatagaatcattggta

SEQ ID NO: 5846968 - DNA, 25 bp, Homo sapien
gaccgatagaatcattggtaatgag

SEQ ID NO: 5846969 - DNA, 25 bp, Homo sapien
agaatcattggtaatgagcgccgga

SEQ ID NO: 5846970 - DNA, 25 bp, Homo sapien
gggaaaactgtcgccagttgtgcac

SEQ ID NO: 5846971 - DNA, 25 bp, Homo sapien
ttggtaatgagcgccggattacgcg

SEQ ID NO: 5846972 - DNA, 25 bp, Homo sapien
cgccagttgtgcacttttacaagcc

SEQ ID NO: 5846973 - DNA, 25 bp, Homo sapien
atgagcgccggattacgcgcgcttg

SEQ ID NO: 5846974 - DNA, 25 bp, Homo sapien
cacttttacaagccgcaaaggcagc

SEQ ID NO: 5846975 - DNA, 25 bp, Homo sapien
caagccgcaaaggcagcaggctacc

SEQ ID NO: 5846976 - DNA, 25 bp, Homo sapien
gcaaaggcagcaggctaccggacgg

SEQ ID NO: 5846977 - DNA, 25 bp, Homo sapien
aggtttacgcaatagcgacgcgctg

SEQ ID NO: 5846978 - DNA, 25 bp, Homo sapien
cgcaatagcgacgcgctggcgttac

SEQ ID NO: 5846979 - DNA, 25 bp, Homo sapien
gcgacgcgctggcgttacagcgcaa

SEQ ID NO: 5846980 - DNA, 25 bp, Homo sapien
gcgctggcgttacagcgcaacagca

SEQ ID NO: 5846981 - DNA, 25 bp, Homo sapien
cgttacagcgcaacagcagcctgca

SEQ ID NO: 5846982 - DNA, 25 bp, Homo sapien
agcgcaacagcagcctgcagctgga

SEQ ID NO: 5846983 - DNA, 25 bp, Homo sapien
cagcagcctgcagctggattacgca

SEQ ID NO: 5846984 - DNA, 25 bp, Homo sapien
ctgcagctggattacgcaacagtaa

SEQ ID NO: 5846985 - DNA, 25 bp, Homo sapien
catcagcgcgcaagagggcagaccg

SEQ ID NO: 5846986 - DNA, 25 bp, Homo sapien
cgcaagagggcagaccgatagaatc

SEQ ID NO: 5846987 - DNA, 25 bp, Homo sapien
gggcagaccgatagaatcattggta

SEQ ID NO: 5846988 - DNA, 25 bp, Homo sapien
gaccgatagaatcattggtaatgag

SEQ ID NO: 5846989 - DNA, 25 bp, Homo sapien
agaatcattggtaatgagcgccgga

SEQ ID NO: 5846990 - DNA, 25 bp, Homo sapien
gggaaaactgtcgccagttgtgcac

SEQ ID NO: 5846991 - DNA, 25 bp, Homo sapien
ttggtaatgagcgccggattacgcg

SEQ ID NO: 5846992 - DNA, 25 bp, Homo sapien
cgccagttgtgcacttttacaagcc

SEQ ID NO: 5846993 - DNA, 25 bp, Homo sapien
atgagcgccggattacgcgcgcttg

SEQ ID NO: 5846994 - DNA, 25 bp, Homo sapien
cacttttacaagccgcaaaggcagc

SEQ ID NO: 5846995 - DNA, 25 bp, Homo sapien
caagccgcaaaggcagcaggctacc

SEQ ID NO: 5846996 - DNA, 25 bp, Homo sapien
gcaaaggcagcaggctaccggacgg

SEQ ID NO: 5846997 - DNA, 25 bp, Homo sapien
aggtttacgcaatagcgacgcgctg

SEQ ID NO: 5846998 - DNA, 25 bp, Homo sapien
cgcaatagcgacgcgctggcgttac

SEQ ID NO: 5846999 - DNA, 25 bp, Homo sapien
gcgacgcgctggcgttacagcgcaa

SEQ ID NO: 5847000 - DNA, 25 bp, Homo sapien
gcgctggcgttacagcgcaacagca

SEQ ID NO: 5847001 - DNA, 25 bp, Homo sapien
cgttacagcgcaacagcagcctgca

SEQ ID NO: 5847002 - DNA, 25 bp, Homo sapien
agcgcaacagcagcctgcagctgga

SEQ ID NO: 5847003 - DNA, 25 bp, Homo sapien
cagcagcctgcagctggattacgca

SEQ ID NO: 5847004 - DNA, 25 bp, Homo sapien
ctgcagctggattacgcaacagtaa

SEQ ID NO: 5847005 - DNA, 25 bp, Homo sapien
catcagcgcgcaagagggcagaccg

SEQ ID NO: 5847006 - DNA, 25 bp, Homo sapien
cgcaagagggcagaccgatagaatc

SEQ ID NO: 5847007 - DNA, 25 bp, Homo sapien
gggcagaccgatagaatcattggta

SEQ ID NO: 5847008 - DNA, 25 bp, Homo sapien
gaccgatagaatcattggtaatgag

SEQ ID NO: 5847009 - DNA, 25 bp, Homo sapien
agaatcattggtaatgagcgccgga

SEQ ID NO: 5847010 - DNA, 25 bp, Homo sapien
gggaaaactgtcgccagttgtgcac

SEQ ID NO: 5847011 - DNA, 25 bp, Homo sapien
ttggtaatgagcgccggattacgcg

SEQ ID NO: 5847012 - DNA, 25 bp, Homo sapien
cgccagttgtgcacttttacaagcc

SEQ ID NO: 5847013 - DNA, 25 bp, Homo sapien
atgagcgccggattacgcgcgcttg

SEQ ID NO: 5847014 - DNA, 25 bp, Homo sapien
cacttttacaagccgcaaaggcagc

SEQ ID NO: 5847015 - DNA, 25 bp, Homo sapien
caagccgcaaaggcagcaggctacc

SEQ ID NO: 5847016 - DNA, 25 bp, Homo sapien
gcaaaggcagcaggctaccggacgg

SEQ ID NO: 5847017 - DNA, 25 bp, Homo sapien
aggtttacgcaatagcgacgcgctg

SEQ ID NO: 5847018 - DNA, 25 bp, Homo sapien
cgcaatagcgacgcgctggcgttac

SEQ ID NO: 5847019 - DNA, 25 bp, Homo sapien
gcgacgcgctggcgttacagcgcaa

SEQ ID NO: 5847020 - DNA, 25 bp, Homo sapien
gcgctggcgttacagcgcaacagca

SEQ ID NO: 5847021 - DNA, 25 bp, Homo sapien
cgttacagcgcaacagcagcctgca

SEQ ID NO: 5847022 - DNA, 25 bp, Homo sapien
agcgcaacagcagcctgcagctgga

SEQ ID NO: 5847023 - DNA, 25 bp, Homo sapien
cagcagcctgcagctggattacgca

SEQ ID NO: 5847024 - DNA, 25 bp, Homo sapien
ctgcagctggattacgcaacagtaa

SEQ ID NO: 5847025 - DNA, 25 bp, Homo sapien
catcagcgcgcaagagggcagaccg

SEQ ID NO: 5847026 - DNA, 25 bp, Homo sapien
cgcaagagggcagaccgatagaatc

SEQ ID NO: 5847027 - DNA, 25 bp, Homo sapien
gggcagaccgatagaatcattggta

SEQ ID NO: 5847028 - DNA, 25 bp, Homo sapien
gaccgatagaatcattggtaatgag

SEQ ID NO: 5847029 - DNA, 25 bp, Homo sapien
agaatcattggtaatgagcgccgga

SEQ ID NO: 5847030 - DNA, 25 bp, Homo sapien
gggaaaactgtcgccagttgtgcac

SEQ ID NO: 5847031 - DNA, 25 bp, Homo sapien
ttggtaatgagcgccggattacgcg

SEQ ID NO: 5847032 - DNA, 25 bp, Homo sapien
cgccagttgtgcacttttacaagcc

SEQ ID NO: 5847033 - DNA, 25 bp, Homo sapien
atgagcgccggattacgcgcgcttg

SEQ ID NO: 5847034 - DNA, 25 bp, Homo sapien
cacttttacaagccgcaaaggcagc

SEQ ID NO: 5847035 - DNA, 25 bp, Homo sapien
caagccgcaaaggcagcaggctacc

SEQ ID NO: 5847036 - DNA, 25 bp, Homo sapien
gcaaaggcagcaggctaccggacgg

SEQ ID NO: 5847037 - DNA, 25 bp, Homo sapien
aggtttacgcaatagcgacgcgctg

SEQ ID NO: 5847038 - DNA, 25 bp, Homo sapien
cgcaatagcgacgcgctggcgttac

SEQ ID NO: 5847039 - DNA, 25 bp, Homo sapien
gcgacgcgctggcgttacagcgcaa

SEQ ID NO: 5847040 - DNA, 25 bp, Homo sapien
gcgctggcgttacagcgcaacagca

SEQ ID NO: 5847041 - DNA, 25 bp, Homo sapien
cgttacagcgcaacagcagcctgca

SEQ ID NO: 5847042 - DNA, 25 bp, Homo sapien
agcgcaacagcagcctgcagctgga

SEQ ID NO: 5847043 - DNA, 25 bp, Homo sapien
cagcagcctgcagctggattacgca

SEQ ID NO: 5847044 - DNA, 25 bp, Homo sapien
ctgcagctggattacgcaacagtaa

SEQ ID NO: 5847045 - DNA, 25 bp, Homo sapien
catcagcgcgcaagagggcagaccg

SEQ ID NO: 5847046 - DNA, 25 bp, Homo sapien
cgcaagagggcagaccgatagaatc

SEQ ID NO: 5847047 - DNA, 25 bp, Homo sapien
gggcagaccgatagaatcattggta

SEQ ID NO: 5847048 - DNA, 25 bp, Homo sapien
gaccgatagaatcattggtaatgag

SEQ ID NO: 5847049 - DNA, 25 bp, Homo sapien
agaatcattggtaatgagcgccgga

SEQ ID NO: 5847050 - DNA, 25 bp, Homo sapien
gggaaaactgtcgccagttgtgcac

SEQ ID NO: 5847051 - DNA, 25 bp, Homo sapien
ttggtaatgagcgccggattacgcg

SEQ ID NO: 5847052 - DNA, 25 bp, Homo sapien
cgccagttgtgcacttttacaagcc

SEQ ID NO: 5847053 - DNA, 25 bp, Homo sapien
atgagcgccggattacgcgcgcttg

SEQ ID NO: 5847054 - DNA, 25 bp, Homo sapien
cacttttacaagccgcaaaggcagc

SEQ ID NO: 5847055 - DNA, 25 bp, Homo sapien
caagccgcaaaggcagcaggctacc

SEQ ID NO: 5847056 - DNA, 25 bp, Homo sapien
gcaaaggcagcaggctaccggacgg

SEQ ID NO: 5847057 - DNA, 25 bp, Homo sapien
aggtttacgcaatagcgacgcgctg

SEQ ID NO: 5847058 - DNA, 25 bp, Homo sapien
cgcaatagcgacgcgctggcgttac

SEQ ID NO: 5847059 - DNA, 25 bp, Homo sapien
gcgacgcgctggcgttacagcgcaa

SEQ ID NO: 5847060 - DNA, 25 bp, Homo sapien
gcgctggcgttacagcgcaacagca

SEQ ID NO: 5847061 - DNA, 25 bp, Homo sapien
cgttacagcgcaacagcagcctgca

SEQ ID NO: 5847062 - DNA, 25 bp, Homo sapien
agcgcaacagcagcctgcagctgga

SEQ ID NO: 5847063 - DNA, 25 bp, Homo sapien
cagcagcctgcagctggattacgca

SEQ ID NO: 5847064 - DNA, 25 bp, Homo sapien
ctgcagctggattacgcaacagtaa

SEQ ID NO: 5847065 - DNA, 25 bp, Homo sapien
catcagcgcgcaagagggcagaccg

SEQ ID NO: 5847066 - DNA, 25 bp, Homo sapien
cgcaagagggcagaccgatagaatc

SEQ ID NO: 5847067 - DNA, 25 bp, Homo sapien
gggcagaccgatagaatcattggta

SEQ ID NO: 5847068 - DNA, 25 bp, Homo sapien
gaccgatagaatcattggtaatgag

SEQ ID NO: 5847069 - DNA, 25 bp, Homo sapien
agaatcattggtaatgagcgccgga

SEQ ID NO: 5847070 - DNA, 25 bp, Homo sapien
gggaaaactgtcgccagttgtgcac

SEQ ID NO: 5847071 - DNA, 25 bp, Homo sapien
ttggtaatgagcgccggattacgcg

SEQ ID NO: 5847072 - DNA, 25 bp, Homo sapien
cgccagttgtgcacttttacaagcc

SEQ ID NO: 5847073 - DNA, 25 bp, Homo sapien
atgagcgccggattacgcgcgcttg

SEQ ID NO: 5847074 - DNA, 25 bp, Homo sapien
cacttttacaagccgcaaaggcagc

SEQ ID NO: 5847075 - DNA, 25 bp, Homo sapien
caagccgcaaaggcagcaggctacc

SEQ ID NO: 5847076 - DNA, 25 bp, Homo sapien
gcaaaggcagcaggctaccggacgg

SEQ ID NO: 5847077 - DNA, 25 bp, Homo sapien
aggtttacgcaatagcgacgcgctg

SEQ ID NO: 5847078 - DNA, 25 bp, Homo sapien
cgcaatagcgacgcgctggcgttac

SEQ ID NO: 5847079 - DNA, 25 bp, Homo sapien
gcgacgcgctggcgttacagcgcaa

SEQ ID NO: 5847080 - DNA, 25 bp, Homo sapien
gcgctggcgttacagcgcaacagca

SEQ ID NO: 5847081 - DNA, 25 bp, Homo sapien
cgttacagcgcaacagcagcctgca

SEQ ID NO: 5847082 - DNA, 25 bp, Homo sapien
agcgcaacagcagcctgcagctgga

SEQ ID NO: 5847083 - DNA, 25 bp, Homo sapien
cagcagcctgcagctggattacgca

SEQ ID NO: 5847084 - DNA, 25 bp, Homo sapien
ctgcagctggattacgcaacagtaa

SEQ ID NO: 5847085 - DNA, 25 bp, Homo sapien
catcagcgcgcaagagggcagaccg

SEQ ID NO: 5847086 - DNA, 25 bp, Homo sapien
cgcaagagggcagaccgatagaatc

SEQ ID NO: 5847087 - DNA, 25 bp, Homo sapien
gggcagaccgatagaatcattggta

SEQ ID NO: 5847088 - DNA, 25 bp, Homo sapien
gaccgatagaatcattggtaatgag

SEQ ID NO: 5847089 - DNA, 25 bp, Homo sapien
agaatcattggtaatgagcgccgga

SEQ ID NO: 5847090 - DNA, 25 bp, Homo sapien
gggaaaactgtcgccagttgtgcac

SEQ ID NO: 5847091 - DNA, 25 bp, Homo sapien
ttggtaatgagcgccggattacgcg

SEQ ID NO: 5847092 - DNA, 25 bp, Homo sapien
cgccagttgtgcacttttacaagcc

SEQ ID NO: 5847093 - DNA, 25 bp, Homo sapien
atgagcgccggattacgcgcgcttg

SEQ ID NO: 5847094 - DNA, 25 bp, Homo sapien
cacttttacaagccgcaaaggcagc

SEQ ID NO: 5847095 - DNA, 25 bp, Homo sapien
caagccgcaaaggcagcaggctacc

SEQ ID NO: 5847096 - DNA, 25 bp, Homo sapien
gcaaaggcagcaggctaccggacgg

SEQ ID NO: 5847097 - DNA, 25 bp, Homo sapien
aggtttacgcaatagcgacgcgctg

SEQ ID NO: 5847098 - DNA, 25 bp, Homo sapien
cgcaatagcgacgcgctggcgttac

SEQ ID NO: 5847099 - DNA, 25 bp, Homo sapien
gcgacgcgctggcgttacagcgcaa

SEQ ID NO: 5847100 - DNA, 25 bp, Homo sapien
gcgctggcgttacagcgcaacagca

SEQ ID NO: 5847101 - DNA, 25 bp, Homo sapien
cgttacagcgcaacagcagcctgca

SEQ ID NO: 5847102 - DNA, 25 bp, Homo sapien
agcgcaacagcagcctgcagctgga

SEQ ID NO: 5847103 - DNA, 25 bp, Homo sapien
cagcagcctgcagctggattacgca

SEQ ID NO: 5847104 - DNA, 25 bp, Homo sapien
ctgcagctggattacgcaacagtaa

SEQ ID NO: 5847105 - DNA, 25 bp, Homo sapien
catcagcgcgcaagagggcagaccg

SEQ ID NO: 5847106 - DNA, 25 bp, Homo sapien
cgcaagagggcagaccgatagaatc

SEQ ID NO: 5847107 - DNA, 25 bp, Homo sapien
gggcagaccgatagaatcattggta

SEQ ID NO: 5847108 - DNA, 25 bp, Homo sapien
gaccgatagaatcattggtaatgag

SEQ ID NO: 5847109 - DNA, 25 bp, Homo sapien
agaatcattggtaatgagcgccgga

SEQ ID NO: 5847110 - DNA, 25 bp, Homo sapien
gggaaaactgtcgccagttgtgcac

SEQ ID NO: 5847111 - DNA, 25 bp, Homo sapien
ttggtaatgagcgccggattacgcg

SEQ ID NO: 5847112 - DNA, 25 bp, Homo sapien
cgccagttgtgcacttttacaagcc

SEQ ID NO: 5847113 - DNA, 25 bp, Homo sapien
atgagcgccggattacgcgcgcttg

SEQ ID NO: 5847114 - DNA, 25 bp, Homo sapien
cacttttacaagccgcaaaggcagc

SEQ ID NO: 5847115 - DNA, 25 bp, Homo sapien
caagccgcaaaggcagcaggctacc

SEQ ID NO: 5847116 - DNA, 25 bp, Homo sapien
gcaaaggcagcaggctaccggacgg

SEQ ID NO: 5847117 - DNA, 25 bp, Homo sapien
aggtttacgcaatagcgacgcgctg

SEQ ID NO: 5847118 - DNA, 25 bp, Homo sapien
cgcaatagcgacgcgctggcgttac

SEQ ID NO: 5847119 - DNA, 25 bp, Homo sapien
gcgacgcgctggcgttacagcgcaa

SEQ ID NO: 5847120 - DNA, 25 bp, Homo sapien
gcgctggcgttacagcgcaacagca

SEQ ID NO: 5847121 - DNA, 25 bp, Homo sapien
cgttacagcgcaacagcagcctgca

SEQ ID NO: 5847122 - DNA, 25 bp, Homo sapien
agcgcaacagcagcctgcagctgga

SEQ ID NO: 5847123 - DNA, 25 bp, Homo sapien
cagcagcctgcagctggattacgca

SEQ ID NO: 5847124 - DNA, 25 bp, Homo sapien
ctgcagctggattacgcaacagtaa

SEQ ID NO: 5847125 - DNA, 25 bp, Homo sapien
catcagcgcgcaagagggcagaccg

SEQ ID NO: 5847126 - DNA, 25 bp, Homo sapien
cgcaagagggcagaccgatagaatc

SEQ ID NO: 5847127 - DNA, 25 bp, Homo sapien
gggcagaccgatagaatcattggta

SEQ ID NO: 5847128 - DNA, 25 bp, Homo sapien
gaccgatagaatcattggtaatgag

SEQ ID NO: 5847129 - DNA, 25 bp, Homo sapien
agaatcattggtaatgagcgccgga

SEQ ID NO: 5847130 - DNA, 25 bp, Homo sapien
gggaaaactgtcgccagttgtgcac

SEQ ID NO: 5847131 - DNA, 25 bp, Homo sapien
ttggtaatgagcgccggattacgcg

SEQ ID NO: 5847132 - DNA, 25 bp, Homo sapien
cgccagttgtgcacttttacaagcc

SEQ ID NO: 5847133 - DNA, 25 bp, Homo sapien
atgagcgccggattacgcgcgcttg

SEQ ID NO: 5847134 - DNA, 25 bp, Homo sapien
cacttttacaagccgcaaaggcagc

SEQ ID NO: 5847135 - DNA, 25 bp, Homo sapien
caagccgcaaaggcagcaggctacc

SEQ ID NO: 5847136 - DNA, 25 bp, Homo sapien
gcaaaggcagcaggctaccggacgg

SEQ ID NO: 5847137 - DNA, 25 bp, Homo sapien
aggtttacgcaatagcgacgcgctg

SEQ ID NO: 5847138 - DNA, 25 bp, Homo sapien
cgcaatagcgacgcgctggcgttac

SEQ ID NO: 5847139 - DNA, 25 bp, Homo sapien
gcgacgcgctggcgttacagcgcaa

SEQ ID NO: 5847140 - DNA, 25 bp, Homo sapien
gcgctggcgttacagcgcaacagca

SEQ ID NO: 5847141 - DNA, 25 bp, Homo sapien
cgttacagcgcaacagcagcctgca

SEQ ID NO: 5847142 - DNA, 25 bp, Homo sapien
agcgcaacagcagcctgcagctgga

SEQ ID NO: 5847143 - DNA, 25 bp, Homo sapien
cagcagcctgcagctggattacgca

SEQ ID NO: 5847144 - DNA, 25 bp, Homo sapien
ctgcagctggattacgcaacagtaa

SEQ ID NO: 5847145 - DNA, 25 bp, Homo sapien
catcagcgcgcaagagggcagaccg

SEQ ID NO: 5847146 - DNA, 25 bp, Homo sapien
cgcaagagggcagaccgatagaatc

SEQ ID NO: 5847147 - DNA, 25 bp, Homo sapien
gggcagaccgatagaatcattggta

SEQ ID NO: 5847148 - DNA, 25 bp, Homo sapien
gaccgatagaatcattggtaatgag

SEQ ID NO: 5847149 - DNA, 25 bp, Homo sapien
agaatcattggtaatgagcgccgga

SEQ ID NO: 5847150 - DNA, 25 bp, Homo sapien
gggaaaactgtcgccagttgtgcac

SEQ ID NO: 5847151 - DNA, 25 bp, Homo sapien
ttggtaatgagcgccggattacgcg

SEQ ID NO: 5847152 - DNA, 25 bp, Homo sapien
cgccagttgtgcacttttacaagcc

SEQ ID NO: 5847153 - DNA, 25 bp, Homo sapien
atgagcgccggattacgcgcgcttg

SEQ ID NO: 5847154 - DNA, 25 bp, Homo sapien
cacttttacaagccgcaaaggcagc

SEQ ID NO: 5847155 - DNA, 25 bp, Homo sapien
caagccgcaaaggcagcaggctacc

SEQ ID NO: 5847156 - DNA, 25 bp, Homo sapien
gcaaaggcagcaggctaccggacgg

SEQ ID NO: 5847157 - DNA, 25 bp, Homo sapien
aggtttacgcaatagcgacgcgctg

SEQ ID NO: 5847158 - DNA, 25 bp, Homo sapien
cgcaatagcgacgcgctggcgttac

SEQ ID NO: 5847159 - DNA, 25 bp, Homo sapien
gcgacgcgctggcgttacagcgcaa

SEQ ID NO: 5847160 - DNA, 25 bp, Homo sapien
gcgctggcgttacagcgcaacagca

SEQ ID NO: 5847161 - DNA, 25 bp, Homo sapien
cgttacagcgcaacagcagcctgca

SEQ ID NO: 5847162 - DNA, 25 bp, Homo sapien
agcgcaacagcagcctgcagctgga

SEQ ID NO: 5847163 - DNA, 25 bp, Homo sapien
cagcagcctgcagctggattacgca

SEQ ID NO: 5847164 - DNA, 25 bp, Homo sapien
ctgcagctggattacgcaacagtaa

SEQ ID NO: 5847165 - DNA, 25 bp, Homo sapien
catcagcgcgcaagagggcagaccg

SEQ ID NO: 5847166 - DNA, 25 bp, Homo sapien
cgcaagagggcagaccgatagaatc

SEQ ID NO: 5847167 - DNA, 25 bp, Homo sapien
gggcagaccgatagaatcattggta

SEQ ID NO: 5847168 - DNA, 25 bp, Homo sapien
gaccgatagaatcattggtaatgag

SEQ ID NO: 5847169 - DNA, 25 bp, Homo sapien
agaatcattggtaatgagcgccgga

SEQ ID NO: 5847170 - DNA, 25 bp, Homo sapien
gggaaaactgtcgccagttgtgcac

SEQ ID NO: 5847171 - DNA, 25 bp, Homo sapien
ttggtaatgagcgccggattacgcg

SEQ ID NO: 5847172 - DNA, 25 bp, Homo sapien
cgccagttgtgcacttttacaagcc

SEQ ID NO: 5847173 - DNA, 25 bp, Homo sapien
atgagcgccggattacgcgcgcttg

SEQ ID NO: 5847174 - DNA, 25 bp, Homo sapien
cacttttacaagccgcaaaggcagc

SEQ ID NO: 5847175 - DNA, 25 bp, Homo sapien
caagccgcaaaggcagcaggctacc

SEQ ID NO: 5847176 - DNA, 25 bp, Homo sapien
gcaaaggcagcaggctaccggacgg

SEQ ID NO: 5847177 - DNA, 25 bp, Homo sapien
aggtttacgcaatagcgacgcgctg

SEQ ID NO: 5847178 - DNA, 25 bp, Homo sapien
cgcaatagcgacgcgctggcgttac

SEQ ID NO: 5847179 - DNA, 25 bp, Homo sapien
gcgacgcgctggcgttacagcgcaa

SEQ ID NO: 5847180 - DNA, 25 bp, Homo sapien
gcgctggcgttacagcgcaacagca

SEQ ID NO: 5847181 - DNA, 25 bp, Homo sapien
cgttacagcgcaacagcagcctgca

SEQ ID NO: 5847182 - DNA, 25 bp, Homo sapien
agcgcaacagcagcctgcagctgga

SEQ ID NO: 5847183 - DNA, 25 bp, Homo sapien
cagcagcctgcagctggattacgca

SEQ ID NO: 5847184 - DNA, 25 bp, Homo sapien
ctgcagctggattacgcaacagtaa

SEQ ID NO: 5847185 - DNA, 25 bp, Homo sapien
catcagcgcgcaagagggcagaccg

SEQ ID NO: 5847186 - DNA, 25 bp, Homo sapien
cgcaagagggcagaccgatagaatc

SEQ ID NO: 5847187 - DNA, 25 bp, Homo sapien
gggcagaccgatagaatcattggta

SEQ ID NO: 5847188 - DNA, 25 bp, Homo sapien
gaccgatagaatcattggtaatgag

SEQ ID NO: 5847189 - DNA, 25 bp, Homo sapien
agaatcattggtaatgagcgccgga

SEQ ID NO: 5847190 - DNA, 25 bp, Homo sapien
gggaaaactgtcgccagttgtgcac

SEQ ID NO: 5847191 - DNA, 25 bp, Homo sapien
ttggtaatgagcgccggattacgcg

SEQ ID NO: 5847192 - DNA, 25 bp, Homo sapien
cgccagttgtgcacttttacaagcc

SEQ ID NO: 5847193 - DNA, 25 bp, Homo sapien
atgagcgccggattacgcgcgcttg

SEQ ID NO: 5847194 - DNA, 25 bp, Homo sapien
cacttttacaagccgcaaaggcagc

SEQ ID NO: 5847195 - DNA, 25 bp, Homo sapien
caagccgcaaaggcagcaggctacc

SEQ ID NO: 5847196 - DNA, 25 bp, Homo sapien
gcaaaggcagcaggctaccggacgg

SEQ ID NO: 5847197 - DNA, 25 bp, Homo sapien
aggtttacgcaatagcgacgcgctg

SEQ ID NO: 5847198 - DNA, 25 bp, Homo sapien
cgcaatagcgacgcgctggcgttac

SEQ ID NO: 5847199 - DNA, 25 bp, Homo sapien
gcgacgcgctggcgttacagcgcaa

SEQ ID NO: 5847200 - DNA, 25 bp, Homo sapien
gcgctggcgttacagcgcaacagca

SEQ ID NO: 5847201 - DNA, 25 bp, Homo sapien
cgttacagcgcaacagcagcctgca

SEQ ID NO: 5847202 - DNA, 25 bp, Homo sapien
agcgcaacagcagcctgcagctgga

SEQ ID NO: 5847203 - DNA, 25 bp, Homo sapien
cagcagcctgcagctggattacgca

SEQ ID NO: 5847204 - DNA, 25 bp, Homo sapien
ctgcagctggattacgcaacagtaa

SEQ ID NO: 5847205 - DNA, 25 bp, Homo sapien
catcagcgcgcaagagggcagaccg

SEQ ID NO: 5847206 - DNA, 25 bp, Homo sapien
cgcaagagggcagaccgatagaatc

SEQ ID NO: 5847207 - DNA, 25 bp, Homo sapien
gggcagaccgatagaatcattggta

SEQ ID NO: 5847208 - DNA, 25 bp, Homo sapien
gaccgatagaatcattggtaatgag

SEQ ID NO: 5847209 - DNA, 25 bp, Homo sapien
agaatcattggtaatgagcgccgga

SEQ ID NO: 5847210 - DNA, 25 bp, Homo sapien
gggaaaactgtcgccagttgtgcac

SEQ ID NO: 5847211 - DNA, 25 bp, Homo sapien
ttggtaatgagcgccggattacgcg

SEQ ID NO: 5847212 - DNA, 25 bp, Homo sapien
cgccagttgtgcacttttacaagcc

SEQ ID NO: 5847213 - DNA, 25 bp, Homo sapien
atgagcgccggattacgcgcgcttg

SEQ ID NO: 5847214 - DNA, 25 bp, Homo sapien
cacttttacaagccgcaaaggcagc

SEQ ID NO: 5847215 - DNA, 25 bp, Homo sapien
caagccgcaaaggcagcaggctacc

SEQ ID NO: 5847216 - DNA, 25 bp, Homo sapien
gcaaaggcagcaggctaccggacgg

SEQ ID NO: 5847217 - DNA, 25 bp, Homo sapien
aggtttacgcaatagcgacgcgctg

SEQ ID NO: 5847218 - DNA, 25 bp, Homo sapien
cgcaatagcgacgcgctggcgttac

SEQ ID NO: 5847219 - DNA, 25 bp, Homo sapien
gcgacgcgctggcgttacagcgcaa

SEQ ID NO: 5847220 - DNA, 25 bp, Homo sapien
gcgctggcgttacagcgcaacagca

SEQ ID NO: 5847221 - DNA, 25 bp, Homo sapien
cgttacagcgcaacagcagcctgca

SEQ ID NO: 5847222 - DNA, 25 bp, Homo sapien
agcgcaacagcagcctgcagctgga

SEQ ID NO: 5847223 - DNA, 25 bp, Homo sapien
cagcagcctgcagctggattacgca

SEQ ID NO: 5847224 - DNA, 25 bp, Homo sapien
ctgcagctggattacgcaacagtaa

SEQ ID NO: 5847225 - DNA, 25 bp, Homo sapien
catcagcgcgcaagagggcagaccg

SEQ ID NO: 5847226 - DNA, 25 bp, Homo sapien
cgcaagagggcagaccgatagaatc

SEQ ID NO: 5847227 - DNA, 25 bp, Homo sapien
gggcagaccgatagaatcattggta

SEQ ID NO: 5847228 - DNA, 25 bp, Homo sapien
gaccgatagaatcattggtaatgag

SEQ ID NO: 5847229 - DNA, 25 bp, Homo sapien
agaatcattggtaatgagcgccgga

SEQ ID NO: 5847230 - DNA, 25 bp, Homo sapien
gggaaaactgtcgccagttgtgcac

SEQ ID NO: 5847231 - DNA, 25 bp, Homo sapien
ttggtaatgagcgccggattacgcg

SEQ ID NO: 5847232 - DNA, 25 bp, Homo sapien
cgccagttgtgcacttttacaagcc

SEQ ID NO: 5847233 - DNA, 25 bp, Homo sapien
atgagcgccggattacgcgcgcttg

SEQ ID NO: 5847234 - DNA, 25 bp, Homo sapien
cacttttacaagccgcaaaggcagc

SEQ ID NO: 5847235 - DNA, 25 bp, Homo sapien
caagccgcaaaggcagcaggctacc

SEQ ID NO: 5847236 - DNA, 25 bp, Homo sapien
gcaaaggcagcaggctaccggacgg

SEQ ID NO: 5847237 - DNA, 25 bp, Homo sapien
aggtttacgcaatagcgacgcgctg

SEQ ID NO: 5847238 - DNA, 25 bp, Homo sapien
cgcaatagcgacgcgctggcgttac

SEQ ID NO: 5847239 - DNA, 25 bp, Homo sapien
gcgacgcgctggcgttacagcgcaa

SEQ ID NO: 5847240 - DNA, 25 bp, Homo sapien
gcgctggcgttacagcgcaacagca

SEQ ID NO: 5847241 - DNA, 25 bp, Homo sapien
cgttacagcgcaacagcagcctgca

SEQ ID NO: 5847242 - DNA, 25 bp, Homo sapien
agcgcaacagcagcctgcagctgga

SEQ ID NO: 5847243 - DNA, 25 bp, Homo sapien
cagcagcctgcagctggattacgca

SEQ ID NO: 5847244 - DNA, 25 bp, Homo sapien
ctgcagctggattacgcaacagtaa

SEQ ID NO: 5847245 - DNA, 25 bp, Homo sapien
catcagcgcgcaagagggcagaccg

SEQ ID NO: 5847246 - DNA, 25 bp, Homo sapien
cgcaagagggcagaccgatagaatc

SEQ ID NO: 5847247 - DNA, 25 bp, Homo sapien
gggcagaccgatagaatcattggta

SEQ ID NO: 5847248 - DNA, 25 bp, Homo sapien
gaccgatagaatcattggtaatgag

SEQ ID NO: 5847249 - DNA, 25 bp, Homo sapien
agaatcattggtaatgagcgccgga

SEQ ID NO: 5847250 - DNA, 25 bp, Homo sapien
gggaaaactgtcgccagttgtgcac

SEQ ID NO: 5847251 - DNA, 25 bp, Homo sapien
ttggtaatgagcgccggattacgcg

SEQ ID NO: 5847252 - DNA, 25 bp, Homo sapien
cgccagttgtgcacttttacaagcc

SEQ ID NO: 5847253 - DNA, 25 bp, Homo sapien
atgagcgccggattacgcgcgcttg

SEQ ID NO: 5847254 - DNA, 25 bp, Homo sapien
cacttttacaagccgcaaaggcagc

SEQ ID NO: 5847255 - DNA, 25 bp, Homo sapien
caagccgcaaaggcagcaggctacc

SEQ ID NO: 5847256 - DNA, 25 bp, Homo sapien
gcaaaggcagcaggctaccggacgg

SEQ ID NO: 5847257 - DNA, 25 bp, Homo sapien
aggtttacgcaatagcgacgcgctg

SEQ ID NO: 5847258 - DNA, 25 bp, Homo sapien
cgcaatagcgacgcgctggcgttac

SEQ ID NO: 5847259 - DNA, 25 bp, Homo sapien
gcgacgcgctggcgttacagcgcaa

SEQ ID NO: 5847260 - DNA, 25 bp, Homo sapien
gcgctggcgttacagcgcaacagca

SEQ ID NO: 5847261 - DNA, 25 bp, Homo sapien
cgttacagcgcaacagcagcctgca

SEQ ID NO: 5847262 - DNA, 25 bp, Homo sapien
agcgcaacagcagcctgcagctgga

SEQ ID NO: 5847263 - DNA, 25 bp, Homo sapien
cagcagcctgcagctggattacgca

SEQ ID NO: 5847264 - DNA, 25 bp, Homo sapien
ctgcagctggattacgcaacagtaa

SEQ ID NO: 5847265 - DNA, 25 bp, Homo sapien
catcagcgcgcaagagggcagaccg

SEQ ID NO: 5847266 - DNA, 25 bp, Homo sapien
cgcaagagggcagaccgatagaatc

SEQ ID NO: 5847267 - DNA, 25 bp, Homo sapien
gggcagaccgatagaatcattggta

SEQ ID NO: 5847268 - DNA, 25 bp, Homo sapien
gaccgatagaatcattggtaatgag

SEQ ID NO: 5847269 - DNA, 25 bp, Homo sapien
agaatcattggtaatgagcgccgga

SEQ ID NO: 5847270 - DNA, 25 bp, Homo sapien
gggaaaactgtcgccagttgtgcac

SEQ ID NO: 5847271 - DNA, 25 bp, Homo sapien
ttggtaatgagcgccggattacgcg

SEQ ID NO: 5847272 - DNA, 25 bp, Homo sapien
cgccagttgtgcacttttacaagcc

SEQ ID NO: 5847273 - DNA, 25 bp, Homo sapien
atgagcgccggattacgcgcgcttg

SEQ ID NO: 5847274 - DNA, 25 bp, Homo sapien
cacttttacaagccgcaaaggcagc

SEQ ID NO: 5847275 - DNA, 25 bp, Homo sapien
caagccgcaaaggcagcaggctacc

SEQ ID NO: 5847276 - DNA, 25 bp, Homo sapien
gcaaaggcagcaggctaccggacgg

SEQ ID NO: 5847277 - DNA, 25 bp, Homo sapien
aggtttacgcaatagcgacgcgctg

SEQ ID NO: 5847278 - DNA, 25 bp, Homo sapien
cgcaatagcgacgcgctggcgttac

SEQ ID NO: 5847279 - DNA, 25 bp, Homo sapien
gcgacgcgctggcgttacagcgcaa

SEQ ID NO: 5847280 - DNA, 25 bp, Homo sapien
gcgctggcgttacagcgcaacagca

SEQ ID NO: 5847281 - DNA, 25 bp, Homo sapien
cgttacagcgcaacagcagcctgca

SEQ ID NO: 5847282 - DNA, 25 bp, Homo sapien
agcgcaacagcagcctgcagctgga

SEQ ID NO: 5847283 - DNA, 25 bp, Homo sapien
cagcagcctgcagctggattacgca

SEQ ID NO: 5847284 - DNA, 25 bp, Homo sapien
ctgcagctggattacgcaacagtaa

SEQ ID NO: 5847285 - DNA, 25 bp, Homo sapien
catcagcgcgcaagagggcagaccg

SEQ ID NO: 5847286 - DNA, 25 bp, Homo sapien
cgcaagagggcagaccgatagaatc

SEQ ID NO: 5847287 - DNA, 25 bp, Homo sapien
gggcagaccgatagaatcattggta

SEQ ID NO: 5847288 - DNA, 25 bp, Homo sapien
gaccgatagaatcattggtaatgag

SEQ ID NO: 5847289 - DNA, 25 bp, Homo sapien
agaatcattggtaatgagcgccgga

SEQ ID NO: 5847290 - DNA, 25 bp, Homo sapien
gggaaaactgtcgccagttgtgcac

SEQ ID NO: 5847291 - DNA, 25 bp, Homo sapien
ttggtaatgagcgccggattacgcg

SEQ ID NO: 5847292 - DNA, 25 bp, Homo sapien
cgccagttgtgcacttttacaagcc

SEQ ID NO: 5847293 - DNA, 25 bp, Homo sapien
atgagcgccggattacgcgcgcttg

SEQ ID NO: 5847294 - DNA, 25 bp, Homo sapien
cacttttacaagccgcaaaggcagc

SEQ ID NO: 5847295 - DNA, 25 bp, Homo sapien
caagccgcaaaggcagcaggctacc

SEQ ID NO: 5847296 - DNA, 25 bp, Homo sapien
gcaaaggcagcaggctaccggacgg

SEQ ID NO: 5847297 - DNA, 25 bp, Homo sapien
aggtttacgcaatagcgacgcgctg

SEQ ID NO: 5847298 - DNA, 25 bp, Homo sapien
cgcaatagcgacgcgctggcgttac

SEQ ID NO: 5847299 - DNA, 25 bp, Homo sapien
gcgacgcgctggcgttacagcgcaa

SEQ ID NO: 5847300 - DNA, 25 bp, Homo sapien
gcgctggcgttacagcgcaacagca

SEQ ID NO: 5847301 - DNA, 25 bp, Homo sapien
cgttacagcgcaacagcagcctgca

SEQ ID NO: 5847302 - DNA, 25 bp, Homo sapien
agcgcaacagcagcctgcagctgga

SEQ ID NO: 5847303 - DNA, 25 bp, Homo sapien
cagcagcctgcagctggattacgca

SEQ ID NO: 5847304 - DNA, 25 bp, Homo sapien
ctgcagctggattacgcaacagtaa

SEQ ID NO: 5847305 - DNA, 25 bp, Homo sapien
catcagcgcgcaagagggcagaccg

SEQ ID NO: 5847306 - DNA, 25 bp, Homo sapien
cgcaagagggcagaccgatagaatc

SEQ ID NO: 5847307 - DNA, 25 bp, Homo sapien
gggcagaccgatagaatcattggta

SEQ ID NO: 5847308 - DNA, 25 bp, Homo sapien
gaccgatagaatcattggtaatgag

SEQ ID NO: 5847309 - DNA, 25 bp, Homo sapien
agaatcattggtaatgagcgccgga

SEQ ID NO: 5847310 - DNA, 25 bp, Homo sapien
gggaaaactgtcgccagttgtgcac

SEQ ID NO: 5847311 - DNA, 25 bp, Homo sapien
ttggtaatgagcgccggattacgcg

SEQ ID NO: 5847312 - DNA, 25 bp, Homo sapien
cgccagttgtgcacttttacaagcc

SEQ ID NO: 5847313 - DNA, 25 bp, Homo sapien
atgagcgccggattacgcgcgcttg

SEQ ID NO: 5847314 - DNA, 25 bp, Homo sapien
cacttttacaagccgcaaaggcagc

SEQ ID NO: 5847315 - DNA, 25 bp, Homo sapien
caagccgcaaaggcagcaggctacc

SEQ ID NO: 5847316 - DNA, 25 bp, Homo sapien
gcaaaggcagcaggctaccggacgg

SEQ ID NO: 5847317 - DNA, 25 bp, Homo sapien
aggtttacgcaatagcgacgcgctg

SEQ ID NO: 5847318 - DNA, 25 bp, Homo sapien
cgcaatagcgacgcgctggcgttac

SEQ ID NO: 5847319 - DNA, 25 bp, Homo sapien
gcgacgcgctggcgttacagcgcaa

SEQ ID NO: 5847320 - DNA, 25 bp, Homo sapien
gcgctggcgttacagcgcaacagca

SEQ ID NO: 5847321 - DNA, 25 bp, Homo sapien
cgttacagcgcaacagcagcctgca

SEQ ID NO: 5847322 - DNA, 25 bp, Homo sapien
agcgcaacagcagcctgcagctgga

SEQ ID NO: 5847323 - DNA, 25 bp, Homo sapien
cagcagcctgcagctggattacgca

SEQ ID NO: 5847324 - DNA, 25 bp, Homo sapien
ctgcagctggattacgcaacagtaa

SEQ ID NO: 5847325 - DNA, 25 bp, Homo sapien
catcagcgcgcaagagggcagaccg

SEQ ID NO: 5847326 - DNA, 25 bp, Homo sapien
cgcaagagggcagaccgatagaatc

SEQ ID NO: 5847327 - DNA, 25 bp, Homo sapien
gggcagaccgatagaatcattggta

SEQ ID NO: 5847328 - DNA, 25 bp, Homo sapien
gaccgatagaatcattggtaatgag

SEQ ID NO: 5847329 - DNA, 25 bp, Homo sapien
agaatcattggtaatgagcgccgga

SEQ ID NO: 5847330 - DNA, 25 bp, Homo sapien
gggaaaactgtcgccagttgtgcac

SEQ ID NO: 5847331 - DNA, 25 bp, Homo sapien
ttggtaatgagcgccggattacgcg

SEQ ID NO: 5847332 - DNA, 25 bp, Homo sapien
cgccagttgtgcacttttacaagcc

SEQ ID NO: 5847333 - DNA, 25 bp, Homo sapien
atgagcgccggattacgcgcgcttg

SEQ ID NO: 5847334 - DNA, 25 bp, Homo sapien
cacttttacaagccgcaaaggcagc

SEQ ID NO: 5847335 - DNA, 25 bp, Homo sapien
caagccgcaaaggcagcaggctacc

SEQ ID NO: 5847336 - DNA, 25 bp, Homo sapien
gcaaaggcagcaggctaccggacgg

SEQ ID NO: 5847337 - DNA, 25 bp, Homo sapien
aggtttacgcaatagcgacgcgctg

SEQ ID NO: 5847338 - DNA, 25 bp, Homo sapien
cgcaatagcgacgcgctggcgttac

SEQ ID NO: 5847339 - DNA, 25 bp, Homo sapien
gcgacgcgctggcgttacagcgcaa

SEQ ID NO: 5847340 - DNA, 25 bp, Homo sapien
gcgctggcgttacagcgcaacagca

SEQ ID NO: 5847341 - DNA, 25 bp, Homo sapien
cgttacagcgcaacagcagcctgca

SEQ ID NO: 5847342 - DNA, 25 bp, Homo sapien
agcgcaacagcagcctgcagctgga

SEQ ID NO: 5847343 - DNA, 25 bp, Homo sapien
cagcagcctgcagctggattacgca

SEQ ID NO: 5847344 - DNA, 25 bp, Homo sapien
ctgcagctggattacgcaacagtaa

SEQ ID NO: 5847345 - DNA, 25 bp, Homo sapien
catcagcgcgcaagagggcagaccg

SEQ ID NO: 5847346 - DNA, 25 bp, Homo sapien
cgcaagagggcagaccgatagaatc

SEQ ID NO: 5847347 - DNA, 25 bp, Homo sapien
gggcagaccgatagaatcattggta

SEQ ID NO: 5847348 - DNA, 25 bp, Homo sapien
gaccgatagaatcattggtaatgag

SEQ ID NO: 5847349 - DNA, 25 bp, Homo sapien
agaatcattggtaatgagcgccgga

SEQ ID NO: 5847350 - DNA, 25 bp, Homo sapien
gggaaaactgtcgccagttgtgcac

SEQ ID NO: 5847351 - DNA, 25 bp, Homo sapien
ttggtaatgagcgccggattacgcg

SEQ ID NO: 5847352 - DNA, 25 bp, Homo sapien
cgccagttgtgcacttttacaagcc

SEQ ID NO: 5847353 - DNA, 25 bp, Homo sapien
atgagcgccggattacgcgcgcttg

SEQ ID NO: 5847354 - DNA, 25 bp, Homo sapien
cacttttacaagccgcaaaggcagc

SEQ ID NO: 5847355 - DNA, 25 bp, Homo sapien
caagccgcaaaggcagcaggctacc

SEQ ID NO: 5847356 - DNA, 25 bp, Homo sapien
gcaaaggcagcaggctaccggacgg

SEQ ID NO: 5847357 - DNA, 25 bp, Homo sapien
aggtttacgcaatagcgacgcgctg

SEQ ID NO: 5847358 - DNA, 25 bp, Homo sapien
cgcaatagcgacgcgctggcgttac

SEQ ID NO: 5847359 - DNA, 25 bp, Homo sapien
gcgacgcgctggcgttacagcgcaa

SEQ ID NO: 5847360 - DNA, 25 bp, Homo sapien
gcgctggcgttacagcgcaacagca

SEQ ID NO: 5847361 - DNA, 25 bp, Homo sapien
cgttacagcgcaacagcagcctgca

SEQ ID NO: 5847362 - DNA, 25 bp, Homo sapien
agcgcaacagcagcctgcagctgga

SEQ ID NO: 5847363 - DNA, 25 bp, Homo sapien
cagcagcctgcagctggattacgca

SEQ ID NO: 5847364 - DNA, 25 bp, Homo sapien
ctgcagctggattacgcaacagtaa

SEQ ID NO: 5847365 - DNA, 25 bp, Homo sapien
catcagcgcgcaagagggcagaccg

SEQ ID NO: 5847366 - DNA, 25 bp, Homo sapien
cgcaagagggcagaccgatagaatc

SEQ ID NO: 5847367 - DNA, 25 bp, Homo sapien
gggcagaccgatagaatcattggta

SEQ ID NO: 5847368 - DNA, 25 bp, Homo sapien
gaccgatagaatcattggtaatgag

SEQ ID NO: 5847369 - DNA, 25 bp, Homo sapien
agaatcattggtaatgagcgccgga

SEQ ID NO: 5847370 - DNA, 25 bp, Homo sapien
gggaaaactgtcgccagttgtgcac

SEQ ID NO: 5847371 - DNA, 25 bp, Homo sapien
ttggtaatgagcgccggattacgcg

SEQ ID NO: 5847372 - DNA, 25 bp, Homo sapien
cgccagttgtgcacttttacaagcc

SEQ ID NO: 5847373 - DNA, 25 bp, Homo sapien
atgagcgccggattacgcgcgcttg

SEQ ID NO: 5847374 - DNA, 25 bp, Homo sapien
cacttttacaagccgcaaaggcagc

SEQ ID NO: 5847375 - DNA, 25 bp, Homo sapien
caagccgcaaaggcagcaggctacc

SEQ ID NO: 5847376 - DNA, 25 bp, Homo sapien
gcaaaggcagcaggctaccggacgg

SEQ ID NO: 5847377 - DNA, 25 bp, Homo sapien
aggtttacgcaatagcgacgcgctg

SEQ ID NO: 5847378 - DNA, 25 bp, Homo sapien
cgcaatagcgacgcgctggcgttac

SEQ ID NO: 5847379 - DNA, 25 bp, Homo sapien
gcgacgcgctggcgttacagcgcaa

SEQ ID NO: 5847380 - DNA, 25 bp, Homo sapien
gcgctggcgttacagcgcaacagca

SEQ ID NO: 5847381 - DNA, 25 bp, Homo sapien
cgttacagcgcaacagcagcctgca

SEQ ID NO: 5847382 - DNA, 25 bp, Homo sapien
agcgcaacagcagcctgcagctgga

SEQ ID NO: 5847383 - DNA, 25 bp, Homo sapien
cagcagcctgcagctggattacgca

SEQ ID NO: 5847384 - DNA, 25 bp, Homo sapien
ctgcagctggattacgcaacagtaa

SEQ ID NO: 5847385 - DNA, 25 bp, Homo sapien
catcagcgcgcaagagggcagaccg

SEQ ID NO: 5847386 - DNA, 25 bp, Homo sapien
cgcaagagggcagaccgatagaatc

SEQ ID NO: 5847387 - DNA, 25 bp, Homo sapien
gggcagaccgatagaatcattggta

SEQ ID NO: 5847388 - DNA, 25 bp, Homo sapien
gaccgatagaatcattggtaatgag

SEQ ID NO: 5847389 - DNA, 25 bp, Homo sapien
agaatcattggtaatgagcgccgga

SEQ ID NO: 5847390 - DNA, 25 bp, Homo sapien
gggaaaactgtcgccagttgtgcac

SEQ ID NO: 5847391 - DNA, 25 bp, Homo sapien
ttggtaatgagcgccggattacgcg

SEQ ID NO: 5847392 - DNA, 25 bp, Homo sapien
cgccagttgtgcacttttacaagcc

SEQ ID NO: 5847393 - DNA, 25 bp, Homo sapien
atgagcgccggattacgcgcgcttg

SEQ ID NO: 5847394 - DNA, 25 bp, Homo sapien
cacttttacaagccgcaaaggcagc

SEQ ID NO: 5847395 - DNA, 25 bp, Homo sapien
caagccgcaaaggcagcaggctacc

SEQ ID NO: 5847396 - DNA, 25 bp, Homo sapien
gcaaaggcagcaggctaccggacgg

SEQ ID NO: 5847397 - DNA, 25 bp, Homo sapien
aggtttacgcaatagcgacgcgctg

SEQ ID NO: 5847398 - DNA, 25 bp, Homo sapien
cgcaatagcgacgcgctggcgttac

SEQ ID NO: 5847399 - DNA, 25 bp, Homo sapien
gcgacgcgctggcgttacagcgcaa

SEQ ID NO: 5847400 - DNA, 25 bp, Homo sapien
gcgctggcgttacagcgcaacagca

SEQ ID NO: 5847401 - DNA, 25 bp, Homo sapien
cgttacagcgcaacagcagcctgca

SEQ ID NO: 5847402 - DNA, 25 bp, Homo sapien
agcgcaacagcagcctgcagctgga

SEQ ID NO: 5847403 - DNA, 25 bp, Homo sapien
cagcagcctgcagctggattacgca

SEQ ID NO: 5847404 - DNA, 25 bp, Homo sapien
ctgcagctggattacgcaacagtaa

SEQ ID NO: 5847405 - DNA, 25 bp, Homo sapien
catcagcgcgcaagagggcagaccg

SEQ ID NO: 5847406 - DNA, 25 bp, Homo sapien
cgcaagagggcagaccgatagaatc

SEQ ID NO: 5847407 - DNA, 25 bp, Homo sapien
gggcagaccgatagaatcattggta

SEQ ID NO: 5847408 - DNA, 25 bp, Homo sapien
gaccgatagaatcattggtaatgag

SEQ ID NO: 5847409 - DNA, 25 bp, Homo sapien
agaatcattggtaatgagcgccgga

SEQ ID NO: 5847410 - DNA, 25 bp, Homo sapien
gggaaaactgtcgccagttgtgcac

SEQ ID NO: 5847411 - DNA, 25 bp, Homo sapien
ttggtaatgagcgccggattacgcg

SEQ ID NO: 5847412 - DNA, 25 bp, Homo sapien
cgccagttgtgcacttttacaagcc

SEQ ID NO: 5847413 - DNA, 25 bp, Homo sapien
atgagcgccggattacgcgcgcttg

SEQ ID NO: 5847414 - DNA, 25 bp, Homo sapien
cacttttacaagccgcaaaggcagc

SEQ ID NO: 5847415 - DNA, 25 bp, Homo sapien
caagccgcaaaggcagcaggctacc

SEQ ID NO: 5847416 - DNA, 25 bp, Homo sapien
gcaaaggcagcaggctaccggacgg

SEQ ID NO: 5847417 - DNA, 25 bp, Homo sapien
aggtttacgcaatagcgacgcgctg

SEQ ID NO: 5847418 - DNA, 25 bp, Homo sapien
cgcaatagcgacgcgctggcgttac

SEQ ID NO: 5847419 - DNA, 25 bp, Homo sapien
gcgacgcgctggcgttacagcgcaa

SEQ ID NO: 5847420 - DNA, 25 bp, Homo sapien
gcgctggcgttacagcgcaacagca

SEQ ID NO: 5847421 - DNA, 25 bp, Homo sapien
cgttacagcgcaacagcagcctgca

SEQ ID NO: 5847422 - DNA, 25 bp, Homo sapien
agcgcaacagcagcctgcagctgga

SEQ ID NO: 5847423 - DNA, 25 bp, Homo sapien
cagcagcctgcagctggattacgca

SEQ ID NO: 5847424 - DNA, 25 bp, Homo sapien
ctgcagctggattacgcaacagtaa

SEQ ID NO: 5847425 - DNA, 25 bp, Homo sapien
catcagcgcgcaagagggcagaccg

SEQ ID NO: 5847426 - DNA, 25 bp, Homo sapien
cgcaagagggcagaccgatagaatc

SEQ ID NO: 5847427 - DNA, 25 bp, Homo sapien
gggcagaccgatagaatcattggta

SEQ ID NO: 5847428 - DNA, 25 bp, Homo sapien
gaccgatagaatcattggtaatgag

SEQ ID NO: 5847429 - DNA, 25 bp, Homo sapien
agaatcattggtaatgagcgccgga

SEQ ID NO: 5847430 - DNA, 25 bp, Homo sapien
gggaaaactgtcgccagttgtgcac

SEQ ID NO: 5847431 - DNA, 25 bp, Homo sapien
ttggtaatgagcgccggattacgcg

SEQ ID NO: 5847432 - DNA, 25 bp, Homo sapien
cgccagttgtgcacttttacaagcc

SEQ ID NO: 5847433 - DNA, 25 bp, Homo sapien
atgagcgccggattacgcgcgcttg

SEQ ID NO: 5847434 - DNA, 25 bp, Homo sapien
cacttttacaagccgcaaaggcagc

SEQ ID NO: 5847435 - DNA, 25 bp, Homo sapien
caagccgcaaaggcagcaggctacc

SEQ ID NO: 5847436 - DNA, 25 bp, Homo sapien
gcaaaggcagcaggctaccggacgg

SEQ ID NO: 5847437 - DNA, 25 bp, Homo sapien
aggtttacgcaatagcgacgcgctg

SEQ ID NO: 5847438 - DNA, 25 bp, Homo sapien
cgcaatagcgacgcgctggcgttac

SEQ ID NO: 5847439 - DNA, 25 bp, Homo sapien
gcgacgcgctggcgttacagcgcaa

SEQ ID NO: 5847440 - DNA, 25 bp, Homo sapien
gcgctggcgttacagcgcaacagca

SEQ ID NO: 5847441 - DNA, 25 bp, Homo sapien
cgttacagcgcaacagcagcctgca

SEQ ID NO: 5847442 - DNA, 25 bp, Homo sapien
agcgcaacagcagcctgcagctgga

SEQ ID NO: 5847443 - DNA, 25 bp, Homo sapien
cagcagcctgcagctggattacgca

SEQ ID NO: 5847444 - DNA, 25 bp, Homo sapien
ctgcagctggattacgcaacagtaa

SEQ ID NO: 5847445 - DNA, 25 bp, Homo sapien
catcagcgcgcaagagggcagaccg

SEQ ID NO: 5847446 - DNA, 25 bp, Homo sapien
cgcaagagggcagaccgatagaatc

SEQ ID NO: 5847447 - DNA, 25 bp, Homo sapien
gggcagaccgatagaatcattggta

SEQ ID NO: 5847448 - DNA, 25 bp, Homo sapien
gaccgatagaatcattggtaatgag

SEQ ID NO: 5847449 - DNA, 25 bp, Homo sapien
agaatcattggtaatgagcgccgga

SEQ ID NO: 5847450 - DNA, 25 bp, Homo sapien
gggaaaactgtcgccagttgtgcac

SEQ ID NO: 5847451 - DNA, 25 bp, Homo sapien
ttggtaatgagcgccggattacgcg

SEQ ID NO: 5847452 - DNA, 25 bp, Homo sapien
cgccagttgtgcacttttacaagcc

SEQ ID NO: 5847453 - DNA, 25 bp, Homo sapien
atgagcgccggattacgcgcgcttg

SEQ ID NO: 5847454 - DNA, 25 bp, Homo sapien
cacttttacaagccgcaaaggcagc

SEQ ID NO: 5847455 - DNA, 25 bp, Homo sapien
caagccgcaaaggcagcaggctacc

SEQ ID NO: 5847456 - DNA, 25 bp, Homo sapien
gcaaaggcagcaggctaccggacgg

SEQ ID NO: 5847457 - DNA, 25 bp, Homo sapien
aggtttacgcaatagcgacgcgctg

SEQ ID NO: 5847458 - DNA, 25 bp, Homo sapien
cgcaatagcgacgcgctggcgttac

SEQ ID NO: 5847459 - DNA, 25 bp, Homo sapien
gcgacgcgctggcgttacagcgcaa

SEQ ID NO: 5847460 - DNA, 25 bp, Homo sapien
gcgctggcgttacagcgcaacagca

SEQ ID NO: 5847461 - DNA, 25 bp, Homo sapien
cgttacagcgcaacagcagcctgca

SEQ ID NO: 5847462 - DNA, 25 bp, Homo sapien
agcgcaacagcagcctgcagctgga

SEQ ID NO: 5847463 - DNA, 25 bp, Homo sapien
cagcagcctgcagctggattacgca

SEQ ID NO: 5847464 - DNA, 25 bp, Homo sapien
ctgcagctggattacgcaacagtaa

SEQ ID NO: 5847465 - DNA, 25 bp, Homo sapien
catcagcgcgcaagagggcagaccg

SEQ ID NO: 5847466 - DNA, 25 bp, Homo sapien
cgcaagagggcagaccgatagaatc

SEQ ID NO: 5847467 - DNA, 25 bp, Homo sapien
gggcagaccgatagaatcattggta

SEQ ID NO: 5847468 - DNA, 25 bp, Homo sapien
gaccgatagaatcattggtaatgag

SEQ ID NO: 5847469 - DNA, 25 bp, Homo sapien
agaatcattggtaatgagcgccgga

SEQ ID NO: 5847470 - DNA, 25 bp, Homo sapien
gggaaaactgtcgccagttgtgcac

SEQ ID NO: 5847471 - DNA, 25 bp, Homo sapien
ttggtaatgagcgccggattacgcg

SEQ ID NO: 5847472 - DNA, 25 bp, Homo sapien
cgccagttgtgcacttttacaagcc

SEQ ID NO: 5847473 - DNA, 25 bp, Homo sapien
atgagcgccggattacgcgcgcttg

SEQ ID NO: 5847474 - DNA, 25 bp, Homo sapien
cacttttacaagccgcaaaggcagc

SEQ ID NO: 5847475 - DNA, 25 bp, Homo sapien
caagccgcaaaggcagcaggctacc

SEQ ID NO: 5847476 - DNA, 25 bp, Homo sapien
gcaaaggcagcaggctaccggacgg

SEQ ID NO: 5847477 - DNA, 25 bp, Homo sapien
aggtttacgcaatagcgacgcgctg

SEQ ID NO: 5847478 - DNA, 25 bp, Homo sapien
cgcaatagcgacgcgctggcgttac

SEQ ID NO: 5847479 - DNA, 25 bp, Homo sapien
gcgacgcgctggcgttacagcgcaa

SEQ ID NO: 5847480 - DNA, 25 bp, Homo sapien
gcgctggcgttacagcgcaacagca

SEQ ID NO: 5847481 - DNA, 25 bp, Homo sapien
cgttacagcgcaacagcagcctgca

SEQ ID NO: 5847482 - DNA, 25 bp, Homo sapien
agcgcaacagcagcctgcagctgga

SEQ ID NO: 5847483 - DNA, 25 bp, Homo sapien
cagcagcctgcagctggattacgca

SEQ ID NO: 5847484 - DNA, 25 bp, Homo sapien
ctgcagctggattacgcaacagtaa

SEQ ID NO: 5847485 - DNA, 25 bp, Homo sapien
catcagcgcgcaagagggcagaccg

SEQ ID NO: 5847486 - DNA, 25 bp, Homo sapien
cgcaagagggcagaccgatagaatc

SEQ ID NO: 5847487 - DNA, 25 bp, Homo sapien
gggcagaccgatagaatcattggta

SEQ ID NO: 5847488 - DNA, 25 bp, Homo sapien
gaccgatagaatcattggtaatgag

SEQ ID NO: 5847489 - DNA, 25 bp, Homo sapien
agaatcattggtaatgagcgccgga

SEQ ID NO: 5847490 - DNA, 25 bp, Homo sapien
gggaaaactgtcgccagttgtgcac

SEQ ID NO: 5847491 - DNA, 25 bp, Homo sapien
ttggtaatgagcgccggattacgcg

SEQ ID NO: 5847492 - DNA, 25 bp, Homo sapien
cgccagttgtgcacttttacaagcc

SEQ ID NO: 5847493 - DNA, 25 bp, Homo sapien
atgagcgccggattacgcgcgcttg

SEQ ID NO: 5847494 - DNA, 25 bp, Homo sapien
cacttttacaagccgcaaaggcagc

SEQ ID NO: 5847495 - DNA, 25 bp, Homo sapien
caagccgcaaaggcagcaggctacc

SEQ ID NO: 5847496 - DNA, 25 bp, Homo sapien
gcaaaggcagcaggctaccggacgg

SEQ ID NO: 5847497 - DNA, 25 bp, Homo sapien
aggtttacgcaatagcgacgcgctg

SEQ ID NO: 5847498 - DNA, 25 bp, Homo sapien
cgcaatagcgacgcgctggcgttac

SEQ ID NO: 5847499 - DNA, 25 bp, Homo sapien
gcgacgcgctggcgttacagcgcaa

SEQ ID NO: 5847500 - DNA, 25 bp, Homo sapien
gcgctggcgttacagcgcaacagca

SEQ ID NO: 5847501 - DNA, 25 bp, Homo sapien
cgttacagcgcaacagcagcctgca

SEQ ID NO: 5847502 - DNA, 25 bp, Homo sapien
agcgcaacagcagcctgcagctgga

SEQ ID NO: 5847503 - DNA, 25 bp, Homo sapien
cagcagcctgcagctggattacgca

SEQ ID NO: 5847504 - DNA, 25 bp, Homo sapien
ctgcagctggattacgcaacagtaa

SEQ ID NO: 5847505 - DNA, 25 bp, Homo sapien
catcagcgcgcaagagggcagaccg

SEQ ID NO: 5847506 - DNA, 25 bp, Homo sapien
cgcaagagggcagaccgatagaatc

SEQ ID NO: 5847507 - DNA, 25 bp, Homo sapien
gggcagaccgatagaatcattggta

SEQ ID NO: 5847508 - DNA, 25 bp, Homo sapien
gaccgatagaatcattggtaatgag

SEQ ID NO: 5847509 - DNA, 25 bp, Homo sapien
agaatcattggtaatgagcgccgga

SEQ ID NO: 5847510 - DNA, 25 bp, Homo sapien
gggaaaactgtcgccagttgtgcac

SEQ ID NO: 5847511 - DNA, 25 bp, Homo sapien
ttggtaatgagcgccggattacgcg

SEQ ID NO: 5847512 - DNA, 25 bp, Homo sapien
cgccagttgtgcacttttacaagcc

SEQ ID NO: 5847513 - DNA, 25 bp, Homo sapien
atgagcgccggattacgcgcgcttg

SEQ ID NO: 5847514 - DNA, 25 bp, Homo sapien
cacttttacaagccgcaaaggcagc

SEQ ID NO: 5847515 - DNA, 25 bp, Homo sapien
caagccgcaaaggcagcaggctacc

SEQ ID NO: 5847516 - DNA, 25 bp, Homo sapien
gcaaaggcagcaggctaccggacgg

SEQ ID NO: 5847517 - DNA, 25 bp, Homo sapien
aggtttacgcaatagcgacgcgctg

SEQ ID NO: 5847518 - DNA, 25 bp, Homo sapien
cgcaatagcgacgcgctggcgttac

SEQ ID NO: 5847519 - DNA, 25 bp, Homo sapien
gcgacgcgctggcgttacagcgcaa

SEQ ID NO: 5847520 - DNA, 25 bp, Homo sapien
gcgctggcgttacagcgcaacagca

SEQ ID NO: 5847521 - DNA, 25 bp, Homo sapien
cgttacagcgcaacagcagcctgca

SEQ ID NO: 5847522 - DNA, 25 bp, Homo sapien
agcgcaacagcagcctgcagctgga

SEQ ID NO: 5847523 - DNA, 25 bp, Homo sapien
cagcagcctgcagctggattacgca

SEQ ID NO: 5847524 - DNA, 25 bp, Homo sapien
ctgcagctggattacgcaacagtaa

SEQ ID NO: 5847525 - DNA, 25 bp, Homo sapien
catcagcgcgcaagagggcagaccg

SEQ ID NO: 5847526 - DNA, 25 bp, Homo sapien
cgcaagagggcagaccgatagaatc

SEQ ID NO: 5847527 - DNA, 25 bp, Homo sapien
gggcagaccgatagaatcattggta

SEQ ID NO: 5847528 - DNA, 25 bp, Homo sapien
gaccgatagaatcattggtaatgag

SEQ ID NO: 5847529 - DNA, 25 bp, Homo sapien
agaatcattggtaatgagcgccgga

SEQ ID NO: 5847530 - DNA, 25 bp, Homo sapien
gggaaaactgtcgccagttgtgcac

SEQ ID NO: 5847531 - DNA, 25 bp, Homo sapien
ttggtaatgagcgccggattacgcg

SEQ ID NO: 5847532 - DNA, 25 bp, Homo sapien
cgccagttgtgcacttttacaagcc

SEQ ID NO: 5847533 - DNA, 25 bp, Homo sapien
atgagcgccggattacgcgcgcttg

SEQ ID NO: 5847534 - DNA, 25 bp, Homo sapien
cacttttacaagccgcaaaggcagc

SEQ ID NO: 5847535 - DNA, 25 bp, Homo sapien
caagccgcaaaggcagcaggctacc

SEQ ID NO: 5847536 - DNA, 25 bp, Homo sapien
gcaaaggcagcaggctaccggacgg

SEQ ID NO: 5847537 - DNA, 25 bp, Homo sapien
aggtttacgcaatagcgacgcgctg

SEQ ID NO: 5847538 - DNA, 25 bp, Homo sapien
cgcaatagcgacgcgctggcgttac

SEQ ID NO: 5847539 - DNA, 25 bp, Homo sapien
gcgacgcgctggcgttacagcgcaa

SEQ ID NO: 5847540 - DNA, 25 bp, Homo sapien
gcgctggcgttacagcgcaacagca

SEQ ID NO: 5847541 - DNA, 25 bp, Homo sapien
cgttacagcgcaacagcagcctgca

SEQ ID NO: 5847542 - DNA, 25 bp, Homo sapien
agcgcaacagcagcctgcagctgga

SEQ ID NO: 5847543 - DNA, 25 bp, Homo sapien
cagcagcctgcagctggattacgca

SEQ ID NO: 5847544 - DNA, 25 bp, Homo sapien
ctgcagctggattacgcaacagtaa

SEQ ID NO: 5847545 - DNA, 25 bp, Homo sapien
catcagcgcgcaagagggcagaccg

SEQ ID NO: 5847546 - DNA, 25 bp, Homo sapien
cgcaagagggcagaccgatagaatc

SEQ ID NO: 5847547 - DNA, 25 bp, Homo sapien
gggcagaccgatagaatcattggta

SEQ ID NO: 5847548 - DNA, 25 bp, Homo sapien
gaccgatagaatcattggtaatgag

SEQ ID NO: 5847549 - DNA, 25 bp, Homo sapien
agaatcattggtaatgagcgccgga

SEQ ID NO: 5847550 - DNA, 25 bp, Homo sapien
gggaaaactgtcgccagttgtgcac

SEQ ID NO: 5847551 - DNA, 25 bp, Homo sapien
ttggtaatgagcgccggattacgcg

SEQ ID NO: 5847552 - DNA, 25 bp, Homo sapien
cgccagttgtgcacttttacaagcc

SEQ ID NO: 5847553 - DNA, 25 bp, Homo sapien
atgagcgccggattacgcgcgcttg

SEQ ID NO: 5847554 - DNA, 25 bp, Homo sapien
cacttttacaagccgcaaaggcagc

SEQ ID NO: 5847555 - DNA, 25 bp, Homo sapien
caagccgcaaaggcagcaggctacc

SEQ ID NO: 5847556 - DNA, 25 bp, Homo sapien
gcaaaggcagcaggctaccggacgg

SEQ ID NO: 5847557 - DNA, 25 bp, Homo sapien
aggtttacgcaatagcgacgcgctg

SEQ ID NO: 5847558 - DNA, 25 bp, Homo sapien
cgcaatagcgacgcgctggcgttac

SEQ ID NO: 5847559 - DNA, 25 bp, Homo sapien
gcgacgcgctggcgttacagcgcaa

SEQ ID NO: 5847560 - DNA, 25 bp, Homo sapien
gcgctggcgttacagcgcaacagca

SEQ ID NO: 5847561 - DNA, 25 bp, Homo sapien
cgttacagcgcaacagcagcctgca

SEQ ID NO: 5847562 - DNA, 25 bp, Homo sapien
agcgcaacagcagcctgcagctgga

SEQ ID NO: 5847563 - DNA, 25 bp, Homo sapien
cagcagcctgcagctggattacgca

SEQ ID NO: 5847564 - DNA, 25 bp, Homo sapien
ctgcagctggattacgcaacagtaa

SEQ ID NO: 5847565 - DNA, 25 bp, Homo sapien
catcagcgcgcaagagggcagaccg

SEQ ID NO: 5847566 - DNA, 25 bp, Homo sapien
cgcaagagggcagaccgatagaatc

SEQ ID NO: 5847567 - DNA, 25 bp, Homo sapien
gggcagaccgatagaatcattggta

SEQ ID NO: 5847568 - DNA, 25 bp, Homo sapien
gaccgatagaatcattggtaatgag

SEQ ID NO: 5847569 - DNA, 25 bp, Homo sapien
agaatcattggtaatgagcgccgga

SEQ ID NO: 5847570 - DNA, 25 bp, Homo sapien
gggaaaactgtcgccagttgtgcac

SEQ ID NO: 5847571 - DNA, 25 bp, Homo sapien
ttggtaatgagcgccggattacgcg

SEQ ID NO: 5847572 - DNA, 25 bp, Homo sapien
cgccagttgtgcacttttacaagcc

SEQ ID NO: 5847573 - DNA, 25 bp, Homo sapien
atgagcgccggattacgcgcgcttg

SEQ ID NO: 5847574 - DNA, 25 bp, Homo sapien
cacttttacaagccgcaaaggcagc

SEQ ID NO: 5847575 - DNA, 25 bp, Homo sapien
caagccgcaaaggcagcaggctacc

SEQ ID NO: 5847576 - DNA, 25 bp, Homo sapien
gcaaaggcagcaggctaccggacgg

SEQ ID NO: 5847577 - DNA, 25 bp, Homo sapien
aggtttacgcaatagcgacgcgctg

SEQ ID NO: 5847578 - DNA, 25 bp, Homo sapien
cgcaatagcgacgcgctggcgttac

SEQ ID NO: 5847579 - DNA, 25 bp, Homo sapien
gcgacgcgctggcgttacagcgcaa

SEQ ID NO: 5847580 - DNA, 25 bp, Homo sapien
gcgctggcgttacagcgcaacagca

SEQ ID NO: 5847581 - DNA, 25 bp, Homo sapien
cgttacagcgcaacagcagcctgca

SEQ ID NO: 5847582 - DNA, 25 bp, Homo sapien
agcgcaacagcagcctgcagctgga

SEQ ID NO: 5847583 - DNA, 25 bp, Homo sapien
cagcagcctgcagctggattacgca

SEQ ID NO: 5847584 - DNA, 25 bp, Homo sapien
ctgcagctggattacgcaacagtaa

SEQ ID NO: 5847585 - DNA, 25 bp, Homo sapien
catcagcgcgcaagagggcagaccg

SEQ ID NO: 5847586 - DNA, 25 bp, Homo sapien
cgcaagagggcagaccgatagaatc

SEQ ID NO: 5847587 - DNA, 25 bp, Homo sapien
gggcagaccgatagaatcattggta

SEQ ID NO: 5847588 - DNA, 25 bp, Homo sapien
gaccgatagaatcattggtaatgag

SEQ ID NO: 5847589 - DNA, 25 bp, Homo sapien
agaatcattggtaatgagcgccgga

SEQ ID NO: 5847590 - DNA, 25 bp, Homo sapien
gggaaaactgtcgccagttgtgcac

SEQ ID NO: 5847591 - DNA, 25 bp, Homo sapien
ttggtaatgagcgccggattacgcg

SEQ ID NO: 5847592 - DNA, 25 bp, Homo sapien
cgccagttgtgcacttttacaagcc

SEQ ID NO: 5847593 - DNA, 25 bp, Homo sapien
atgagcgccggattacgcgcgcttg

SEQ ID NO: 5847594 - DNA, 25 bp, Homo sapien
cacttttacaagccgcaaaggcagc

SEQ ID NO: 5847595 - DNA, 25 bp, Homo sapien
caagccgcaaaggcagcaggctacc

SEQ ID NO: 5847596 - DNA, 25 bp, Homo sapien
gcaaaggcagcaggctaccggacgg

SEQ ID NO: 5847597 - DNA, 25 bp, Homo sapien
aggtttacgcaatagcgacgcgctg

SEQ ID NO: 5847598 - DNA, 25 bp, Homo sapien
cgcaatagcgacgcgctggcgttac

SEQ ID NO: 5847599 - DNA, 25 bp, Homo sapien
gcgacgcgctggcgttacagcgcaa

SEQ ID NO: 5847600 - DNA, 25 bp, Homo sapien
gcgctggcgttacagcgcaacagca

SEQ ID NO: 5847601 - DNA, 25 bp, Homo sapien
cgttacagcgcaacagcagcctgca

SEQ ID NO: 5847602 - DNA, 25 bp, Homo sapien
agcgcaacagcagcctgcagctgga

SEQ ID NO: 5847603 - DNA, 25 bp, Homo sapien
cagcagcctgcagctggattacgca

SEQ ID NO: 5847604 - DNA, 25 bp, Homo sapien
ctgcagctggattacgcaacagtaa

SEQ ID NO: 5847605 - DNA, 25 bp, Homo sapien
catcagcgcgcaagagggcagaccg

SEQ ID NO: 5847606 - DNA, 25 bp, Homo sapien
cgcaagagggcagaccgatagaatc

SEQ ID NO: 5847607 - DNA, 25 bp, Homo sapien
gggcagaccgatagaatcattggta

SEQ ID NO: 5847608 - DNA, 25 bp, Homo sapien
gaccgatagaatcattggtaatgag

SEQ ID NO: 5847609 - DNA, 25 bp, Homo sapien
agaatcattggtaatgagcgccgga

SEQ ID NO: 5847610 - DNA, 25 bp, Homo sapien
gggaaaactgtcgccagttgtgcac

SEQ ID NO: 5847611 - DNA, 25 bp, Homo sapien
ttggtaatgagcgccggattacgcg

SEQ ID NO: 5847612 - DNA, 25 bp, Homo sapien
cgccagttgtgcacttttacaagcc

SEQ ID NO: 5847613 - DNA, 25 bp, Homo sapien
atgagcgccggattacgcgcgcttg

SEQ ID NO: 5847614 - DNA, 25 bp, Homo sapien
cacttttacaagccgcaaaggcagc

SEQ ID NO: 5847615 - DNA, 25 bp, Homo sapien
caagccgcaaaggcagcaggctacc

SEQ ID NO: 5847616 - DNA, 25 bp, Homo sapien
gcaaaggcagcaggctaccggacgg

SEQ ID NO: 5847617 - DNA, 25 bp, Homo sapien
aggtttacgcaatagcgacgcgctg

SEQ ID NO: 5847618 - DNA, 25 bp, Homo sapien
cgcaatagcgacgcgctggcgttac

SEQ ID NO: 5847619 - DNA, 25 bp, Homo sapien
gcgacgcgctggcgttacagcgcaa

SEQ ID NO: 5847620 - DNA, 25 bp, Homo sapien
gcgctggcgttacagcgcaacagca

SEQ ID NO: 5847621 - DNA, 25 bp, Homo sapien
cgttacagcgcaacagcagcctgca

SEQ ID NO: 5847622 - DNA, 25 bp, Homo sapien
agcgcaacagcagcctgcagctgga

SEQ ID NO: 5847623 - DNA, 25 bp, Homo sapien
cagcagcctgcagctggattacgca

SEQ ID NO: 5847624 - DNA, 25 bp, Homo sapien
ctgcagctggattacgcaacagtaa

SEQ ID NO: 5847625 - DNA, 25 bp, Homo sapien
catcagcgcgcaagagggcagaccg

SEQ ID NO: 5847626 - DNA, 25 bp, Homo sapien
cgcaagagggcagaccgatagaatc

SEQ ID NO: 5847627 - DNA, 25 bp, Homo sapien
gggcagaccgatagaatcattggta

SEQ ID NO: 5847628 - DNA, 25 bp, Homo sapien
gaccgatagaatcattggtaatgag

SEQ ID NO: 5847629 - DNA, 25 bp, Homo sapien
agaatcattggtaatgagcgccgga

SEQ ID NO: 5847630 - DNA, 25 bp, Homo sapien
gggaaaactgtcgccagttgtgcac

SEQ ID NO: 5847631 - DNA, 25 bp, Homo sapien
ttggtaatgagcgccggattacgcg

SEQ ID NO: 5847632 - DNA, 25 bp, Homo sapien
cgccagttgtgcacttttacaagcc

SEQ ID NO: 5847633 - DNA, 25 bp, Homo sapien
atgagcgccggattacgcgcgcttg

SEQ ID NO: 5847634 - DNA, 25 bp, Homo sapien
cacttttacaagccgcaaaggcagc

SEQ ID NO: 5847635 - DNA, 25 bp, Homo sapien
caagccgcaaaggcagcaggctacc

SEQ ID NO: 5847636 - DNA, 25 bp, Homo sapien
gcaaaggcagcaggctaccggacgg

SEQ ID NO: 5847637 - DNA, 25 bp, Homo sapien
aggtttacgcaatagcgacgcgctg

SEQ ID NO: 5847638 - DNA, 25 bp, Homo sapien
cgcaatagcgacgcgctggcgttac

SEQ ID NO: 5847639 - DNA, 25 bp, Homo sapien
gcgacgcgctggcgttacagcgcaa

SEQ ID NO: 5847640 - DNA, 25 bp, Homo sapien
gcgctggcgttacagcgcaacagca

SEQ ID NO: 5847641 - DNA, 25 bp, Homo sapien
cgttacagcgcaacagcagcctgca

SEQ ID NO: 5847642 - DNA, 25 bp, Homo sapien
agcgcaacagcagcctgcagctgga

SEQ ID NO: 5847643 - DNA, 25 bp, Homo sapien
cagcagcctgcagctggattacgca

SEQ ID NO: 5847644 - DNA, 25 bp, Homo sapien
ctgcagctggattacgcaacagtaa

SEQ ID NO: 5847645 - DNA, 25 bp, Homo sapien
catcagcgcgcaagagggcagaccg

SEQ ID NO: 5847646 - DNA, 25 bp, Homo sapien
cgcaagagggcagaccgatagaatc

SEQ ID NO: 5847647 - DNA, 25 bp, Homo sapien
gggcagaccgatagaatcattggta

SEQ ID NO: 5847648 - DNA, 25 bp, Homo sapien
gaccgatagaatcattggtaatgag

SEQ ID NO: 5847649 - DNA, 25 bp, Homo sapien
agaatcattggtaatgagcgccgga

SEQ ID NO: 5847650 - DNA, 25 bp, Homo sapien
gggaaaactgtcgccagttgtgcac

SEQ ID NO: 5847651 - DNA, 25 bp, Homo sapien
ttggtaatgagcgccggattacgcg

SEQ ID NO: 5847652 - DNA, 25 bp, Homo sapien
cgccagttgtgcacttttacaagcc

SEQ ID NO: 5847653 - DNA, 25 bp, Homo sapien
atgagcgccggattacgcgcgcttg

SEQ ID NO: 5847654 - DNA, 25 bp, Homo sapien
cacttttacaagccgcaaaggcagc

SEQ ID NO: 5847655 - DNA, 25 bp, Homo sapien
caagccgcaaaggcagcaggctacc

SEQ ID NO: 5847656 - DNA, 25 bp, Homo sapien
gcaaaggcagcaggctaccggacgg

SEQ ID NO: 5847657 - DNA, 25 bp, Homo sapien
aggtttacgcaatagcgacgcgctg

SEQ ID NO: 5847658 - DNA, 25 bp, Homo sapien
cgcaatagcgacgcgctggcgttac

SEQ ID NO: 5847659 - DNA, 25 bp, Homo sapien
gcgacgcgctggcgttacagcgcaa

SEQ ID NO: 5847660 - DNA, 25 bp, Homo sapien
gcgctggcgttacagcgcaacagca

SEQ ID NO: 5847661 - DNA, 25 bp, Homo sapien
cgttacagcgcaacagcagcctgca

SEQ ID NO: 5847662 - DNA, 25 bp, Homo sapien
agcgcaacagcagcctgcagctgga

SEQ ID NO: 5847663 - DNA, 25 bp, Homo sapien
cagcagcctgcagctggattacgca

SEQ ID NO: 5847664 - DNA, 25 bp, Homo sapien
ctgcagctggattacgcaacagtaa

SEQ ID NO: 5847665 - DNA, 25 bp, Homo sapien
catcagcgcgcaagagggcagaccg

SEQ ID NO: 5847666 - DNA, 25 bp, Homo sapien
cgcaagagggcagaccgatagaatc

SEQ ID NO: 5847667 - DNA, 25 bp, Homo sapien
gggcagaccgatagaatcattggta

SEQ ID NO: 5847668 - DNA, 25 bp, Homo sapien
gaccgatagaatcattggtaatgag

SEQ ID NO: 5847669 - DNA, 25 bp, Homo sapien
agaatcattggtaatgagcgccgga

SEQ ID NO: 5847670 - DNA, 25 bp, Homo sapien
gggaaaactgtcgccagttgtgcac

SEQ ID NO: 5847671 - DNA, 25 bp, Homo sapien
ttggtaatgagcgccggattacgcg

SEQ ID NO: 5847672 - DNA, 25 bp, Homo sapien
cgccagttgtgcacttttacaagcc

SEQ ID NO: 5847673 - DNA, 25 bp, Homo sapien
atgagcgccggattacgcgcgcttg

SEQ ID NO: 5847674 - DNA, 25 bp, Homo sapien
cacttttacaagccgcaaaggcagc

SEQ ID NO: 5847675 - DNA, 25 bp, Homo sapien
caagccgcaaaggcagcaggctacc

SEQ ID NO: 5847676 - DNA, 25 bp, Homo sapien
gcaaaggcagcaggctaccggacgg

SEQ ID NO: 5847677 - DNA, 25 bp, Homo sapien
aggtttacgcaatagcgacgcgctg

SEQ ID NO: 5847678 - DNA, 25 bp, Homo sapien
cgcaatagcgacgcgctggcgttac

SEQ ID NO: 5847679 - DNA, 25 bp, Homo sapien
gcgacgcgctggcgttacagcgcaa

SEQ ID NO: 5847680 - DNA, 25 bp, Homo sapien
gcgctggcgttacagcgcaacagca

SEQ ID NO: 5847681 - DNA, 25 bp, Homo sapien
cgttacagcgcaacagcagcctgca

SEQ ID NO: 5847682 - DNA, 25 bp, Homo sapien
agcgcaacagcagcctgcagctgga

SEQ ID NO: 5847683 - DNA, 25 bp, Homo sapien
cagcagcctgcagctggattacgca

SEQ ID NO: 5847684 - DNA, 25 bp, Homo sapien
ctgcagctggattacgcaacagtaa

SEQ ID NO: 5847685 - DNA, 25 bp, Homo sapien
catcagcgcgcaagagggcagaccg

SEQ ID NO: 5847686 - DNA, 25 bp, Homo sapien
cgcaagagggcagaccgatagaatc

SEQ ID NO: 5847687 - DNA, 25 bp, Homo sapien
gggcagaccgatagaatcattggta

SEQ ID NO: 5847688 - DNA, 25 bp, Homo sapien
gaccgatagaatcattggtaatgag

SEQ ID NO: 5847689 - DNA, 25 bp, Homo sapien
agaatcattggtaatgagcgccgga

SEQ ID NO: 5847690 - DNA, 25 bp, Homo sapien
gggaaaactgtcgccagttgtgcac

SEQ ID NO: 5847691 - DNA, 25 bp, Homo sapien
ttggtaatgagcgccggattacgcg

SEQ ID NO: 5847692 - DNA, 25 bp, Homo sapien
cgccagttgtgcacttttacaagcc

SEQ ID NO: 5847693 - DNA, 25 bp, Homo sapien
atgagcgccggattacgcgcgcttg

SEQ ID NO: 5847694 - DNA, 25 bp, Homo sapien
cacttttacaagccgcaaaggcagc

SEQ ID NO: 5847695 - DNA, 25 bp, Homo sapien
caagccgcaaaggcagcaggctacc

SEQ ID NO: 5847696 - DNA, 25 bp, Homo sapien
gcaaaggcagcaggctaccggacgg

SEQ ID NO: 5847697 - DNA, 25 bp, Homo sapien
aggtttacgcaatagcgacgcgctg

SEQ ID NO: 5847698 - DNA, 25 bp, Homo sapien
cgcaatagcgacgcgctggcgttac

SEQ ID NO: 5847699 - DNA, 25 bp, Homo sapien
gcgacgcgctggcgttacagcgcaa

SEQ ID NO: 5847700 - DNA, 25 bp, Homo sapien
gcgctggcgttacagcgcaacagca

SEQ ID NO: 5847701 - DNA, 25 bp, Homo sapien
cgttacagcgcaacagcagcctgca

SEQ ID NO: 5847702 - DNA, 25 bp, Homo sapien
agcgcaacagcagcctgcagctgga

SEQ ID NO: 5847703 - DNA, 25 bp, Homo sapien
cagcagcctgcagctggattacgca

SEQ ID NO: 5847704 - DNA, 25 bp, Homo sapien
ctgcagctggattacgcaacagtaa

SEQ ID NO: 5847705 - DNA, 25 bp, Homo sapien
catcagcgcgcaagagggcagaccg

SEQ ID NO: 5847706 - DNA, 25 bp, Homo sapien
cgcaagagggcagaccgatagaatc

SEQ ID NO: 5847707 - DNA, 25 bp, Homo sapien
gggcagaccgatagaatcattggta

SEQ ID NO: 5847708 - DNA, 25 bp, Homo sapien
gaccgatagaatcattggtaatgag

SEQ ID NO: 5847709 - DNA, 25 bp, Homo sapien
agaatcattggtaatgagcgccgga

SEQ ID NO: 5847710 - DNA, 25 bp, Homo sapien
gggaaaactgtcgccagttgtgcac

SEQ ID NO: 5847711 - DNA, 25 bp, Homo sapien
ttggtaatgagcgccggattacgcg

SEQ ID NO: 5847712 - DNA, 25 bp, Homo sapien
cgccagttgtgcacttttacaagcc

SEQ ID NO: 5847713 - DNA, 25 bp, Homo sapien
atgagcgccggattacgcgcgcttg

SEQ ID NO: 5847714 - DNA, 25 bp, Homo sapien
cacttttacaagccgcaaaggcagc

SEQ ID NO: 5847715 - DNA, 25 bp, Homo sapien
caagccgcaaaggcagcaggctacc

SEQ ID NO: 5847716 - DNA, 25 bp, Homo sapien
gcaaaggcagcaggctaccggacgg

SEQ ID NO: 5847717 - DNA, 25 bp, Homo sapien
aggtttacgcaatagcgacgcgctg

SEQ ID NO: 5847718 - DNA, 25 bp, Homo sapien
cgcaatagcgacgcgctggcgttac

SEQ ID NO: 5847719 - DNA, 25 bp, Homo sapien
gcgacgcgctggcgttacagcgcaa

SEQ ID NO: 5847720 - DNA, 25 bp, Homo sapien
gcgctggcgttacagcgcaacagca

SEQ ID NO: 5847721 - DNA, 25 bp, Homo sapien
cgttacagcgcaacagcagcctgca

SEQ ID NO: 5847722 - DNA, 25 bp, Homo sapien
agcgcaacagcagcctgcagctgga

SEQ ID NO: 5847723 - DNA, 25 bp, Homo sapien
cagcagcctgcagctggattacgca

SEQ ID NO: 5847724 - DNA, 25 bp, Homo sapien
ctgcagctggattacgcaacagtaa

SEQ ID NO: 5847725 - DNA, 25 bp, Homo sapien
catcagcgcgcaagagggcagaccg

SEQ ID NO: 5847726 - DNA, 25 bp, Homo sapien
cgcaagagggcagaccgatagaatc

SEQ ID NO: 5847727 - DNA, 25 bp, Homo sapien
gggcagaccgatagaatcattggta

SEQ ID NO: 5847728 - DNA, 25 bp, Homo sapien
gaccgatagaatcattggtaatgag

SEQ ID NO: 5847729 - DNA, 25 bp, Homo sapien
agaatcattggtaatgagcgccgga

SEQ ID NO: 5847730 - DNA, 25 bp, Homo sapien
gggaaaactgtcgccagttgtgcac

SEQ ID NO: 5847731 - DNA, 25 bp, Homo sapien
ttggtaatgagcgccggattacgcg

SEQ ID NO: 5847732 - DNA, 25 bp, Homo sapien
cgccagttgtgcacttttacaagcc

SEQ ID NO: 5847733 - DNA, 25 bp, Homo sapien
atgagcgccggattacgcgcgcttg

SEQ ID NO: 5847734 - DNA, 25 bp, Homo sapien
cacttttacaagccgcaaaggcagc

SEQ ID NO: 5847735 - DNA, 25 bp, Homo sapien
caagccgcaaaggcagcaggctacc

SEQ ID NO: 5847736 - DNA, 25 bp, Homo sapien
gcaaaggcagcaggctaccggacgg

SEQ ID NO: 5847737 - DNA, 25 bp, Homo sapien
aggtttacgcaatagcgacgcgctg

SEQ ID NO: 5847738 - DNA, 25 bp, Homo sapien
cgcaatagcgacgcgctggcgttac

SEQ ID NO: 5847739 - DNA, 25 bp, Homo sapien
gcgacgcgctggcgttacagcgcaa

SEQ ID NO: 5847740 - DNA, 25 bp, Homo sapien
gcgctggcgttacagcgcaacagca

SEQ ID NO: 5847741 - DNA, 25 bp, Homo sapien
cgttacagcgcaacagcagcctgca

SEQ ID NO: 5847742 - DNA, 25 bp, Homo sapien
agcgcaacagcagcctgcagctgga

SEQ ID NO: 5847743 - DNA, 25 bp, Homo sapien
cagcagcctgcagctggattacgca

SEQ ID NO: 5847744 - DNA, 25 bp, Homo sapien
ctgcagctggattacgcaacagtaa

SEQ ID NO: 5847745 - DNA, 25 bp, Homo sapien
catcagcgcgcaagagggcagaccg

SEQ ID NO: 5847746 - DNA, 25 bp, Homo sapien
cgcaagagggcagaccgatagaatc

SEQ ID NO: 5847747 - DNA, 25 bp, Homo sapien
gggcagaccgatagaatcattggta

SEQ ID NO: 5847748 - DNA, 25 bp, Homo sapien
gaccgatagaatcattggtaatgag

SEQ ID NO: 5847749 - DNA, 25 bp, Homo sapien
agaatcattggtaatgagcgccgga

SEQ ID NO: 5847750 - DNA, 25 bp, Homo sapien
gggaaaactgtcgccagttgtgcac

SEQ ID NO: 5847751 - DNA, 25 bp, Homo sapien
ttggtaatgagcgccggattacgcg

SEQ ID NO: 5847752 - DNA, 25 bp, Homo sapien
cgccagttgtgcacttttacaagcc

SEQ ID NO: 5847753 - DNA, 25 bp, Homo sapien
atgagcgccggattacgcgcgcttg

SEQ ID NO: 5847754 - DNA, 25 bp, Homo sapien
cacttttacaagccgcaaaggcagc

SEQ ID NO: 5847755 - DNA, 25 bp, Homo sapien
caagccgcaaaggcagcaggctacc

SEQ ID NO: 5847756 - DNA, 25 bp, Homo sapien
gcaaaggcagcaggctaccggacgg

SEQ ID NO: 5847757 - DNA, 25 bp, Homo sapien
aggtttacgcaatagcgacgcgctg

SEQ ID NO: 5847758 - DNA, 25 bp, Homo sapien
cgcaatagcgacgcgctggcgttac

SEQ ID NO: 5847759 - DNA, 25 bp, Homo sapien
gcgacgcgctggcgttacagcgcaa

SEQ ID NO: 5847760 - DNA, 25 bp, Homo sapien
gcgctggcgttacagcgcaacagca

SEQ ID NO: 5847761 - DNA, 25 bp, Homo sapien
cgttacagcgcaacagcagcctgca

SEQ ID NO: 5847762 - DNA, 25 bp, Homo sapien
agcgcaacagcagcctgcagctgga

SEQ ID NO: 5847763 - DNA, 25 bp, Homo sapien
cagcagcctgcagctggattacgca

SEQ ID NO: 5847764 - DNA, 25 bp, Homo sapien
ctgcagctggattacgcaacagtaa

SEQ ID NO: 5847765 - DNA, 25 bp, Homo sapien
catcagcgcgcaagagggcagaccg

SEQ ID NO: 5847766 - DNA, 25 bp, Homo sapien
cgcaagagggcagaccgatagaatc

SEQ ID NO: 5847767 - DNA, 25 bp, Homo sapien
gggcagaccgatagaatcattggta

SEQ ID NO: 5847768 - DNA, 25 bp, Homo sapien
gaccgatagaatcattggtaatgag

SEQ ID NO: 5847769 - DNA, 25 bp, Homo sapien
agaatcattggtaatgagcgccgga

SEQ ID NO: 5847770 - DNA, 25 bp, Homo sapien
gggaaaactgtcgccagttgtgcac

SEQ ID NO: 5847771 - DNA, 25 bp, Homo sapien
ttggtaatgagcgccggattacgcg

SEQ ID NO: 5847772 - DNA, 25 bp, Homo sapien
cgccagttgtgcacttttacaagcc

SEQ ID NO: 5847773 - DNA, 25 bp, Homo sapien
atgagcgccggattacgcgcgcttg

SEQ ID NO: 5847774 - DNA, 25 bp, Homo sapien
cacttttacaagccgcaaaggcagc

SEQ ID NO: 5847775 - DNA, 25 bp, Homo sapien
caagccgcaaaggcagcaggctacc

SEQ ID NO: 5847776 - DNA, 25 bp, Homo sapien
gcaaaggcagcaggctaccggacgg

SEQ ID NO: 5847777 - DNA, 25 bp, Homo sapien
aggtttacgcaatagcgacgcgctg

SEQ ID NO: 5847778 - DNA, 25 bp, Homo sapien
cgcaatagcgacgcgctggcgttac

SEQ ID NO: 5847779 - DNA, 25 bp, Homo sapien
gcgacgcgctggcgttacagcgcaa

SEQ ID NO: 5847780 - DNA, 25 bp, Homo sapien
gcgctggcgttacagcgcaacagca

SEQ ID NO: 5847781 - DNA, 25 bp, Homo sapien
cgttacagcgcaacagcagcctgca

SEQ ID NO: 5847782 - DNA, 25 bp, Homo sapien
agcgcaacagcagcctgcagctgga

SEQ ID NO: 5847783 - DNA, 25 bp, Homo sapien
cagcagcctgcagctggattacgca

SEQ ID NO: 5847784 - DNA, 25 bp, Homo sapien
ctgcagctggattacgcaacagtaa

SEQ ID NO: 5847785 - DNA, 25 bp, Homo sapien
catcagcgcgcaagagggcagaccg

SEQ ID NO: 5847786 - DNA, 25 bp, Homo sapien
cgcaagagggcagaccgatagaatc

SEQ ID NO: 5847787 - DNA, 25 bp, Homo sapien
gggcagaccgatagaatcattggta

SEQ ID NO: 5847788 - DNA, 25 bp, Homo sapien
gaccgatagaatcattggtaatgag

SEQ ID NO: 5847789 - DNA, 25 bp, Homo sapien
agaatcattggtaatgagcgccgga

SEQ ID NO: 5847790 - DNA, 25 bp, Homo sapien
gggaaaactgtcgccagttgtgcac

SEQ ID NO: 5847791 - DNA, 25 bp, Homo sapien
ttggtaatgagcgccggattacgcg

SEQ ID NO: 5847792 - DNA, 25 bp, Homo sapien
cgccagttgtgcacttttacaagcc

SEQ ID NO: 5847793 - DNA, 25 bp, Homo sapien
atgagcgccggattacgcgcgcttg

SEQ ID NO: 5847794 - DNA, 25 bp, Homo sapien
cacttttacaagccgcaaaggcagc

SEQ ID NO: 5847795 - DNA, 25 bp, Homo sapien
caagccgcaaaggcagcaggctacc

SEQ ID NO: 5847796 - DNA, 25 bp, Homo sapien
gcaaaggcagcaggctaccggacgg

SEQ ID NO: 5847797 - DNA, 25 bp, Homo sapien
aggtttacgcaatagcgacgcgctg

SEQ ID NO: 5847798 - DNA, 25 bp, Homo sapien
cgcaatagcgacgcgctggcgttac

SEQ ID NO: 5847799 - DNA, 25 bp, Homo sapien
gcgacgcgctggcgttacagcgcaa

SEQ ID NO: 5847800 - DNA, 25 bp, Homo sapien
gcgctggcgttacagcgcaacagca

SEQ ID NO: 5847801 - DNA, 25 bp, Homo sapien
cgttacagcgcaacagcagcctgca

SEQ ID NO: 5847802 - DNA, 25 bp, Homo sapien
agcgcaacagcagcctgcagctgga

SEQ ID NO: 5847803 - DNA, 25 bp, Homo sapien
cagcagcctgcagctggattacgca

SEQ ID NO: 5847804 - DNA, 25 bp, Homo sapien
ctgcagctggattacgcaacagtaa

SEQ ID NO: 5847805 - DNA, 25 bp, Homo sapien
catcagcgcgcaagagggcagaccg

SEQ ID NO: 5847806 - DNA, 25 bp, Homo sapien
cgcaagagggcagaccgatagaatc

SEQ ID NO: 5847807 - DNA, 25 bp, Homo sapien
gggcagaccgatagaatcattggta

SEQ ID NO: 5847808 - DNA, 25 bp, Homo sapien
gaccgatagaatcattggtaatgag

SEQ ID NO: 5847809 - DNA, 25 bp, Homo sapien
agaatcattggtaatgagcgccgga

SEQ ID NO: 5847810 - DNA, 25 bp, Homo sapien
gggaaaactgtcgccagttgtgcac

SEQ ID NO: 5847811 - DNA, 25 bp, Homo sapien
ttggtaatgagcgccggattacgcg

SEQ ID NO: 5847812 - DNA, 25 bp, Homo sapien
cgccagttgtgcacttttacaagcc

SEQ ID NO: 5847813 - DNA, 25 bp, Homo sapien
atgagcgccggattacgcgcgcttg

SEQ ID NO: 5847814 - DNA, 25 bp, Homo sapien
cacttttacaagccgcaaaggcagc

SEQ ID NO: 5847815 - DNA, 25 bp, Homo sapien
caagccgcaaaggcagcaggctacc

SEQ ID NO: 5847816 - DNA, 25 bp, Homo sapien
gcaaaggcagcaggctaccggacgg

SEQ ID NO: 5847817 - DNA, 25 bp, Homo sapien
aggtttacgcaatagcgacgcgctg

SEQ ID NO: 5847818 - DNA, 25 bp, Homo sapien
cgcaatagcgacgcgctggcgttac

SEQ ID NO: 5847819 - DNA, 25 bp, Homo sapien
gcgacgcgctggcgttacagcgcaa

SEQ ID NO: 5847820 - DNA, 25 bp, Homo sapien
gcgctggcgttacagcgcaacagca

SEQ ID NO: 5847821 - DNA, 25 bp, Homo sapien
cgttacagcgcaacagcagcctgca

SEQ ID NO: 5847822 - DNA, 25 bp, Homo sapien
agcgcaacagcagcctgcagctgga

SEQ ID NO: 5847823 - DNA, 25 bp, Homo sapien
cagcagcctgcagctggattacgca

SEQ ID NO: 5847824 - DNA, 25 bp, Homo sapien
ctgcagctggattacgcaacagtaa

SEQ ID NO: 5847825 - DNA, 25 bp, Homo sapien
catcagcgcgcaagagggcagaccg

SEQ ID NO: 5847826 - DNA, 25 bp, Homo sapien
cgcaagagggcagaccgatagaatc

SEQ ID NO: 5847827 - DNA, 25 bp, Homo sapien
gggcagaccgatagaatcattggta

SEQ ID NO: 5847828 - DNA, 25 bp, Homo sapien
gaccgatagaatcattggtaatgag

SEQ ID NO: 5847829 - DNA, 25 bp, Homo sapien
agaatcattggtaatgagcgccgga

SEQ ID NO: 5847830 - DNA, 25 bp, Homo sapien
gggaaaactgtcgccagttgtgcac

SEQ ID NO: 5847831 - DNA, 25 bp, Homo sapien
ttggtaatgagcgccggattacgcg

SEQ ID NO: 5847832 - DNA, 25 bp, Homo sapien
cgccagttgtgcacttttacaagcc

SEQ ID NO: 5847833 - DNA, 25 bp, Homo sapien
atgagcgccggattacgcgcgcttg

SEQ ID NO: 5847834 - DNA, 25 bp, Homo sapien
cacttttacaagccgcaaaggcagc

SEQ ID NO: 5847835 - DNA, 25 bp, Homo sapien
caagccgcaaaggcagcaggctacc

SEQ ID NO: 5847836 - DNA, 25 bp, Homo sapien
gcaaaggcagcaggctaccggacgg

SEQ ID NO: 5847837 - DNA, 25 bp, Homo sapien
aggtttacgcaatagcgacgcgctg

SEQ ID NO: 5847838 - DNA, 25 bp, Homo sapien
cgcaatagcgacgcgctggcgttac

SEQ ID NO: 5847839 - DNA, 25 bp, Homo sapien
gcgacgcgctggcgttacagcgcaa

SEQ ID NO: 5847840 - DNA, 25 bp, Homo sapien
gcgctggcgttacagcgcaacagca

SEQ ID NO: 5847841 - DNA, 25 bp, Homo sapien
cgttacagcgcaacagcagcctgca

SEQ ID NO: 5847842 - DNA, 25 bp, Homo sapien
agcgcaacagcagcctgcagctgga

SEQ ID NO: 5847843 - DNA, 25 bp, Homo sapien
cagcagcctgcagctggattacgca

SEQ ID NO: 5847844 - DNA, 25 bp, Homo sapien
ctgcagctggattacgcaacagtaa

SEQ ID NO: 5847845 - DNA, 25 bp, Homo sapien
catcagcgcgcaagagggcagaccg

SEQ ID NO: 5847846 - DNA, 25 bp, Homo sapien
cgcaagagggcagaccgatagaatc

SEQ ID NO: 5847847 - DNA, 25 bp, Homo sapien
gggcagaccgatagaatcattggta

SEQ ID NO: 5847848 - DNA, 25 bp, Homo sapien
gaccgatagaatcattggtaatgag

SEQ ID NO: 5847849 - DNA, 25 bp, Homo sapien
agaatcattggtaatgagcgccgga

SEQ ID NO: 5847850 - DNA, 25 bp, Homo sapien
gggaaaactgtcgccagttgtgcac

SEQ ID NO: 5847851 - DNA, 25 bp, Homo sapien
ttggtaatgagcgccggattacgcg

SEQ ID NO: 5847852 - DNA, 25 bp, Homo sapien
cgccagttgtgcacttttacaagcc

SEQ ID NO: 5847853 - DNA, 25 bp, Homo sapien
atgagcgccggattacgcgcgcttg

SEQ ID NO: 5847854 - DNA, 25 bp, Homo sapien
cacttttacaagccgcaaaggcagc

SEQ ID NO: 5847855 - DNA, 25 bp, Homo sapien
caagccgcaaaggcagcaggctacc

SEQ ID NO: 5847856 - DNA, 25 bp, Homo sapien
gcaaaggcagcaggctaccggacgg

SEQ ID NO: 5847857 - DNA, 25 bp, Homo sapien
aggtttacgcaatagcgacgcgctg

SEQ ID NO: 5847858 - DNA, 25 bp, Homo sapien
cgcaatagcgacgcgctggcgttac

SEQ ID NO: 5847859 - DNA, 25 bp, Homo sapien
gcgacgcgctggcgttacagcgcaa

SEQ ID NO: 5847860 - DNA, 25 bp, Homo sapien
gcgctggcgttacagcgcaacagca

SEQ ID NO: 5847861 - DNA, 25 bp, Homo sapien
cgttacagcgcaacagcagcctgca

SEQ ID NO: 5847862 - DNA, 25 bp, Homo sapien
agcgcaacagcagcctgcagctgga

SEQ ID NO: 5847863 - DNA, 25 bp, Homo sapien
cagcagcctgcagctggattacgca

SEQ ID NO: 5847864 - DNA, 25 bp, Homo sapien
ctgcagctggattacgcaacagtaa

SEQ ID NO: 5847865 - DNA, 25 bp, Homo sapien
catcagcgcgcaagagggcagaccg

SEQ ID NO: 5847866 - DNA, 25 bp, Homo sapien
cgcaagagggcagaccgatagaatc

SEQ ID NO: 5847867 - DNA, 25 bp, Homo sapien
gggcagaccgatagaatcattggta

SEQ ID NO: 5847868 - DNA, 25 bp, Homo sapien
gaccgatagaatcattggtaatgag

SEQ ID NO: 5847869 - DNA, 25 bp, Homo sapien
agaatcattggtaatgagcgccgga

SEQ ID NO: 5847870 - DNA, 25 bp, Homo sapien
gggaaaactgtcgccagttgtgcac

SEQ ID NO: 5847871 - DNA, 25 bp, Homo sapien
ttggtaatgagcgccggattacgcg

SEQ ID NO: 5847872 - DNA, 25 bp, Homo sapien
cgccagttgtgcacttttacaagcc

SEQ ID NO: 5847873 - DNA, 25 bp, Homo sapien
atgagcgccggattacgcgcgcttg

SEQ ID NO: 5847874 - DNA, 25 bp, Homo sapien
cacttttacaagccgcaaaggcagc

SEQ ID NO: 5847875 - DNA, 25 bp, Homo sapien
caagccgcaaaggcagcaggctacc

SEQ ID NO: 5847876 - DNA, 25 bp, Homo sapien
gcaaaggcagcaggctaccggacgg

SEQ ID NO: 5847877 - DNA, 25 bp, Homo sapien
aggtttacgcaatagcgacgcgctg

SEQ ID NO: 5847878 - DNA, 25 bp, Homo sapien
cgcaatagcgacgcgctggcgttac

SEQ ID NO: 5847879 - DNA, 25 bp, Homo sapien
gcgacgcgctggcgttacagcgcaa

SEQ ID NO: 5847880 - DNA, 25 bp, Homo sapien
gcgctggcgttacagcgcaacagca

SEQ ID NO: 5847881 - DNA, 25 bp, Homo sapien
cgttacagcgcaacagcagcctgca

SEQ ID NO: 5847882 - DNA, 25 bp, Homo sapien
agcgcaacagcagcctgcagctgga

SEQ ID NO: 5847883 - DNA, 25 bp, Homo sapien
cagcagcctgcagctggattacgca

SEQ ID NO: 5847884 - DNA, 25 bp, Homo sapien
ctgcagctggattacgcaacagtaa

SEQ ID NO: 5847885 - DNA, 25 bp, Homo sapien
catcagcgcgcaagagggcagaccg

SEQ ID NO: 5847886 - DNA, 25 bp, Homo sapien
cgcaagagggcagaccgatagaatc

SEQ ID NO: 5847887 - DNA, 25 bp, Homo sapien
gggcagaccgatagaatcattggta

SEQ ID NO: 5847888 - DNA, 25 bp, Homo sapien
gaccgatagaatcattggtaatgag

SEQ ID NO: 5847889 - DNA, 25 bp, Homo sapien
agaatcattggtaatgagcgccgga

SEQ ID NO: 5847890 - DNA, 25 bp, Homo sapien
gggaaaactgtcgccagttgtgcac

SEQ ID NO: 5847891 - DNA, 25 bp, Homo sapien
ttggtaatgagcgccggattacgcg

SEQ ID NO: 5847892 - DNA, 25 bp, Homo sapien
cgccagttgtgcacttttacaagcc

SEQ ID NO: 5847893 - DNA, 25 bp, Homo sapien
atgagcgccggattacgcgcgcttg

SEQ ID NO: 5847894 - DNA, 25 bp, Homo sapien
cacttttacaagccgcaaaggcagc

SEQ ID NO: 5847895 - DNA, 25 bp, Homo sapien
caagccgcaaaggcagcaggctacc

SEQ ID NO: 5847896 - DNA, 25 bp, Homo sapien
gcaaaggcagcaggctaccggacgg

SEQ ID NO: 5847897 - DNA, 25 bp, Homo sapien
aggtttacgcaatagcgacgcgctg

SEQ ID NO: 5847898 - DNA, 25 bp, Homo sapien
cgcaatagcgacgcgctggcgttac

SEQ ID NO: 5847899 - DNA, 25 bp, Homo sapien
gcgacgcgctggcgttacagcgcaa

SEQ ID NO: 5847900 - DNA, 25 bp, Homo sapien
gcgctggcgttacagcgcaacagca

SEQ ID NO: 5847901 - DNA, 25 bp, Homo sapien
cgttacagcgcaacagcagcctgca

SEQ ID NO: 5847902 - DNA, 25 bp, Homo sapien
agcgcaacagcagcctgcagctgga

SEQ ID NO: 5847903 - DNA, 25 bp, Homo sapien
cagcagcctgcagctggattacgca

SEQ ID NO: 5847904 - DNA, 25 bp, Homo sapien
ctgcagctggattacgcaacagtaa

SEQ ID NO: 5847905 - DNA, 25 bp, Homo sapien
catcagcgcgcaagagggcagaccg

SEQ ID NO: 5847906 - DNA, 25 bp, Homo sapien
cgcaagagggcagaccgatagaatc

SEQ ID NO: 5847907 - DNA, 25 bp, Homo sapien
gggcagaccgatagaatcattggta

SEQ ID NO: 5847908 - DNA, 25 bp, Homo sapien
gaccgatagaatcattggtaatgag

SEQ ID NO: 5847909 - DNA, 25 bp, Homo sapien
agaatcattggtaatgagcgccgga

SEQ ID NO: 5847910 - DNA, 25 bp, Homo sapien
gggaaaactgtcgccagttgtgcac

SEQ ID NO: 5847911 - DNA, 25 bp, Homo sapien
ttggtaatgagcgccggattacgcg

SEQ ID NO: 5847912 - DNA, 25 bp, Homo sapien
cgccagttgtgcacttttacaagcc

SEQ ID NO: 5847913 - DNA, 25 bp, Homo sapien
atgagcgccggattacgcgcgcttg

SEQ ID NO: 5847914 - DNA, 25 bp, Homo sapien
cacttttacaagccgcaaaggcagc

SEQ ID NO: 5847915 - DNA, 25 bp, Homo sapien
caagccgcaaaggcagcaggctacc

SEQ ID NO: 5847916 - DNA, 25 bp, Homo sapien
gcaaaggcagcaggctaccggacgg

SEQ ID NO: 5847917 - DNA, 25 bp, Homo sapien
aggtttacgcaatagcgacgcgctg

SEQ ID NO: 5847918 - DNA, 25 bp, Homo sapien
cgcaatagcgacgcgctggcgttac

SEQ ID NO: 5847919 - DNA, 25 bp, Homo sapien
gcgacgcgctggcgttacagcgcaa

SEQ ID NO: 5847920 - DNA, 25 bp, Homo sapien
gcgctggcgttacagcgcaacagca

SEQ ID NO: 5847921 - DNA, 25 bp, Homo sapien
cgttacagcgcaacagcagcctgca

SEQ ID NO: 5847922 - DNA, 25 bp, Homo sapien
agcgcaacagcagcctgcagctgga

SEQ ID NO: 5847923 - DNA, 25 bp, Homo sapien
cagcagcctgcagctggattacgca

SEQ ID NO: 5847924 - DNA, 25 bp, Homo sapien
ctgcagctggattacgcaacagtaa

SEQ ID NO: 5847925 - DNA, 25 bp, Homo sapien
catcagcgcgcaagagggcagaccg

SEQ ID NO: 5847926 - DNA, 25 bp, Homo sapien
cgcaagagggcagaccgatagaatc

SEQ ID NO: 5847927 - DNA, 25 bp, Homo sapien
gggcagaccgatagaatcattggta

SEQ ID NO: 5847928 - DNA, 25 bp, Homo sapien
gaccgatagaatcattggtaatgag

SEQ ID NO: 5847929 - DNA, 25 bp, Homo sapien
agaatcattggtaatgagcgccgga

SEQ ID NO: 5847930 - DNA, 25 bp, Homo sapien
gggaaaactgtcgccagttgtgcac

SEQ ID NO: 5847931 - DNA, 25 bp, Homo sapien
ttggtaatgagcgccggattacgcg

SEQ ID NO: 5847932 - DNA, 25 bp, Homo sapien
cgccagttgtgcacttttacaagcc

SEQ ID NO: 5847933 - DNA, 25 bp, Homo sapien
atgagcgccggattacgcgcgcttg

SEQ ID NO: 5847934 - DNA, 25 bp, Homo sapien
cacttttacaagccgcaaaggcagc

SEQ ID NO: 5847935 - DNA, 25 bp, Homo sapien
caagccgcaaaggcagcaggctacc

SEQ ID NO: 5847936 - DNA, 25 bp, Homo sapien
gcaaaggcagcaggctaccggacgg

SEQ ID NO: 5847937 - DNA, 25 bp, Homo sapien
aggtttacgcaatagcgacgcgctg

SEQ ID NO: 5847938 - DNA, 25 bp, Homo sapien
cgcaatagcgacgcgctggcgttac

SEQ ID NO: 5847939 - DNA, 25 bp, Homo sapien
gcgacgcgctggcgttacagcgcaa

SEQ ID NO: 5847940 - DNA, 25 bp, Homo sapien
gcgctggcgttacagcgcaacagca

SEQ ID NO: 5847941 - DNA, 25 bp, Homo sapien
cgttacagcgcaacagcagcctgca

SEQ ID NO: 5847942 - DNA, 25 bp, Homo sapien
agcgcaacagcagcctgcagctgga

SEQ ID NO: 5847943 - DNA, 25 bp, Homo sapien
cagcagcctgcagctggattacgca

SEQ ID NO: 5847944 - DNA, 25 bp, Homo sapien
ctgcagctggattacgcaacagtaa

SEQ ID NO: 5847945 - DNA, 25 bp, Homo sapien
catcagcgcgcaagagggcagaccg

SEQ ID NO: 5847946 - DNA, 25 bp, Homo sapien
cgcaagagggcagaccgatagaatc

SEQ ID NO: 5847947 - DNA, 25 bp, Homo sapien
gggcagaccgatagaatcattggta

SEQ ID NO: 5847948 - DNA, 25 bp, Homo sapien
gaccgatagaatcattggtaatgag

SEQ ID NO: 5847949 - DNA, 25 bp, Homo sapien
agaatcattggtaatgagcgccgga

SEQ ID NO: 5847950 - DNA, 25 bp, Homo sapien
gggaaaactgtcgccagttgtgcac

SEQ ID NO: 5847951 - DNA, 25 bp, Homo sapien
ttggtaatgagcgccggattacgcg

SEQ ID NO: 5847952 - DNA, 25 bp, Homo sapien
cgccagttgtgcacttttacaagcc

SEQ ID NO: 5847953 - DNA, 25 bp, Homo sapien
atgagcgccggattacgcgcgcttg

SEQ ID NO: 5847954 - DNA, 25 bp, Homo sapien
cacttttacaagccgcaaaggcagc

SEQ ID NO: 5847955 - DNA, 25 bp, Homo sapien
caagccgcaaaggcagcaggctacc

SEQ ID NO: 5847956 - DNA, 25 bp, Homo sapien
gcaaaggcagcaggctaccggacgg

SEQ ID NO: 5847957 - DNA, 25 bp, Homo sapien
aggtttacgcaatagcgacgcgctg

SEQ ID NO: 5847958 - DNA, 25 bp, Homo sapien
cgcaatagcgacgcgctggcgttac

SEQ ID NO: 5847959 - DNA, 25 bp, Homo sapien
gcgacgcgctggcgttacagcgcaa

SEQ ID NO: 5847960 - DNA, 25 bp, Homo sapien
gcgctggcgttacagcgcaacagca

SEQ ID NO: 5847961 - DNA, 25 bp, Homo sapien
cgttacagcgcaacagcagcctgca

SEQ ID NO: 5847962 - DNA, 25 bp, Homo sapien
agcgcaacagcagcctgcagctgga

SEQ ID NO: 5847963 - DNA, 25 bp, Homo sapien
cagcagcctgcagctggattacgca

SEQ ID NO: 5847964 - DNA, 25 bp, Homo sapien
ctgcagctggattacgcaacagtaa

SEQ ID NO: 5847965 - DNA, 25 bp, Homo sapien
catcagcgcgcaagagggcagaccg

SEQ ID NO: 5847966 - DNA, 25 bp, Homo sapien
cgcaagagggcagaccgatagaatc

SEQ ID NO: 5847967 - DNA, 25 bp, Homo sapien
gggcagaccgatagaatcattggta

SEQ ID NO: 5847968 - DNA, 25 bp, Homo sapien
gaccgatagaatcattggtaatgag

SEQ ID NO: 5847969 - DNA, 25 bp, Homo sapien
agaatcattggtaatgagcgccgga

SEQ ID NO: 5847970 - DNA, 25 bp, Homo sapien
gggaaaactgtcgccagttgtgcac

SEQ ID NO: 5847971 - DNA, 25 bp, Homo sapien
ttggtaatgagcgccggattacgcg

SEQ ID NO: 5847972 - DNA, 25 bp, Homo sapien
cgccagttgtgcacttttacaagcc

SEQ ID NO: 5847973 - DNA, 25 bp, Homo sapien
atgagcgccggattacgcgcgcttg

SEQ ID NO: 5847974 - DNA, 25 bp, Homo sapien
cacttttacaagccgcaaaggcagc

SEQ ID NO: 5847975 - DNA, 25 bp, Homo sapien
caagccgcaaaggcagcaggctacc

SEQ ID NO: 5847976 - DNA, 25 bp, Homo sapien
gcaaaggcagcaggctaccggacgg

SEQ ID NO: 5847977 - DNA, 25 bp, Homo sapien
aggtttacgcaatagcgacgcgctg

SEQ ID NO: 5847978 - DNA, 25 bp, Homo sapien
cgcaatagcgacgcgctggcgttac

SEQ ID NO: 5847979 - DNA, 25 bp, Homo sapien
gcgacgcgctggcgttacagcgcaa

SEQ ID NO: 5847980 - DNA, 25 bp, Homo sapien
gcgctggcgttacagcgcaacagca

SEQ ID NO: 5847981 - DNA, 25 bp, Homo sapien
cgttacagcgcaacagcagcctgca

SEQ ID NO: 5847982 - DNA, 25 bp, Homo sapien
agcgcaacagcagcctgcagctgga

SEQ ID NO: 5847983 - DNA, 25 bp, Homo sapien
cagcagcctgcagctggattacgca

SEQ ID NO: 5847984 - DNA, 25 bp, Homo sapien
ctgcagctggattacgcaacagtaa

SEQ ID NO: 5847985 - DNA, 25 bp, Homo sapien
catcagcgcgcaagagggcagaccg

SEQ ID NO: 5847986 - DNA, 25 bp, Homo sapien
cgcaagagggcagaccgatagaatc

SEQ ID NO: 5847987 - DNA, 25 bp, Homo sapien
gggcagaccgatagaatcattggta

SEQ ID NO: 5847988 - DNA, 25 bp, Homo sapien
gaccgatagaatcattggtaatgag

SEQ ID NO: 5847989 - DNA, 25 bp, Homo sapien
agaatcattggtaatgagcgccgga

SEQ ID NO: 5847990 - DNA, 25 bp, Homo sapien
gggaaaactgtcgccagttgtgcac

SEQ ID NO: 5847991 - DNA, 25 bp, Homo sapien
ttggtaatgagcgccggattacgcg

SEQ ID NO: 5847992 - DNA, 25 bp, Homo sapien
cgccagttgtgcacttttacaagcc

SEQ ID NO: 5847993 - DNA, 25 bp, Homo sapien
atgagcgccggattacgcgcgcttg

SEQ ID NO: 5847994 - DNA, 25 bp, Homo sapien
cacttttacaagccgcaaaggcagc

SEQ ID NO: 5847995 - DNA, 25 bp, Homo sapien
caagccgcaaaggcagcaggctacc

SEQ ID NO: 5847996 - DNA, 25 bp, Homo sapien
gcaaaggcagcaggctaccggacgg

SEQ ID NO: 5847997 - DNA, 25 bp, Homo sapien
aggtttacgcaatagcgacgcgctg

SEQ ID NO: 5847998 - DNA, 25 bp, Homo sapien
cgcaatagcgacgcgctggcgttac

SEQ ID NO: 5847999 - DNA, 25 bp, Homo sapien
gcgacgcgctggcgttacagcgcaa

SEQ ID NO: 5848000 - DNA, 25 bp, Homo sapien
gcgctggcgttacagcgcaacagca

SEQ ID NO: 5848001 - DNA, 25 bp, Homo sapien
cgttacagcgcaacagcagcctgca

SEQ ID NO: 5848002 - DNA, 25 bp, Homo sapien
agcgcaacagcagcctgcagctgga

SEQ ID NO: 5848003 - DNA, 25 bp, Homo sapien
cagcagcctgcagctggattacgca

SEQ ID NO: 5848004 - DNA, 25 bp, Homo sapien
ctgcagctggattacgcaacagtaa

SEQ ID NO: 5848005 - DNA, 25 bp, Homo sapien
catcagcgcgcaagagggcagaccg

SEQ ID NO: 5848006 - DNA, 25 bp, Homo sapien
cgcaagagggcagaccgatagaatc

SEQ ID NO: 5848007 - DNA, 25 bp, Homo sapien
gggcagaccgatagaatcattggta

SEQ ID NO: 5848008 - DNA, 25 bp, Homo sapien
gaccgatagaatcattggtaatgag

SEQ ID NO: 5848009 - DNA, 25 bp, Homo sapien
agaatcattggtaatgagcgccgga

SEQ ID NO: 5848010 - DNA, 25 bp, Homo sapien
gggaaaactgtcgccagttgtgcac

SEQ ID NO: 5848011 - DNA, 25 bp, Homo sapien
ttggtaatgagcgccggattacgcg

SEQ ID NO: 5848012 - DNA, 25 bp, Homo sapien
cgccagttgtgcacttttacaagcc

SEQ ID NO: 5848013 - DNA, 25 bp, Homo sapien
atgagcgccggattacgcgcgcttg

SEQ ID NO: 5848014 - DNA, 25 bp, Homo sapien
cacttttacaagccgcaaaggcagc

SEQ ID NO: 5848015 - DNA, 25 bp, Homo sapien
caagccgcaaaggcagcaggctacc

SEQ ID NO: 5848016 - DNA, 25 bp, Homo sapien
gcaaaggcagcaggctaccggacgg

SEQ ID NO: 5848017 - DNA, 25 bp, Homo sapien
aggtttacgcaatagcgacgcgctg

SEQ ID NO: 5848018 - DNA, 25 bp, Homo sapien
cgcaatagcgacgcgctggcgttac

SEQ ID NO: 5848019 - DNA, 25 bp, Homo sapien
gcgacgcgctggcgttacagcgcaa

SEQ ID NO: 5848020 - DNA, 25 bp, Homo sapien
gcgctggcgttacagcgcaacagca

SEQ ID NO: 5848021 - DNA, 25 bp, Homo sapien
cgttacagcgcaacagcagcctgca

SEQ ID NO: 5848022 - DNA, 25 bp, Homo sapien
agcgcaacagcagcctgcagctgga

SEQ ID NO: 5848023 - DNA, 25 bp, Homo sapien
cagcagcctgcagctggattacgca

SEQ ID NO: 5848024 - DNA, 25 bp, Homo sapien
ctgcagctggattacgcaacagtaa

SEQ ID NO: 5848025 - DNA, 25 bp, Homo sapien
catcagcgcgcaagagggcagaccg

SEQ ID NO: 5848026 - DNA, 25 bp, Homo sapien
cgcaagagggcagaccgatagaatc

SEQ ID NO: 5848027 - DNA, 25 bp, Homo sapien
gggcagaccgatagaatcattggta

SEQ ID NO: 5848028 - DNA, 25 bp, Homo sapien
gaccgatagaatcattggtaatgag

SEQ ID NO: 5848029 - DNA, 25 bp, Homo sapien
agaatcattggtaatgagcgccgga

SEQ ID NO: 5848030 - DNA, 25 bp, Homo sapien
gggaaaactgtcgccagttgtgcac

SEQ ID NO: 5848031 - DNA, 25 bp, Homo sapien
ttggtaatgagcgccggattacgcg

SEQ ID NO: 5848032 - DNA, 25 bp, Homo sapien
cgccagttgtgcacttttacaagcc

SEQ ID NO: 5848033 - DNA, 25 bp, Homo sapien
atgagcgccggattacgcgcgcttg

SEQ ID NO: 5848034 - DNA, 25 bp, Homo sapien
cacttttacaagccgcaaaggcagc

SEQ ID NO: 5848035 - DNA, 25 bp, Homo sapien
caagccgcaaaggcagcaggctacc

SEQ ID NO: 5848036 - DNA, 25 bp, Homo sapien
gcaaaggcagcaggctaccggacgg

SEQ ID NO: 5848037 - DNA, 25 bp, Homo sapien
aggtttacgcaatagcgacgcgctg

SEQ ID NO: 5848038 - DNA, 25 bp, Homo sapien
cgcaatagcgacgcgctggcgttac

SEQ ID NO: 5848039 - DNA, 25 bp, Homo sapien
gcgacgcgctggcgttacagcgcaa

SEQ ID NO: 5848040 - DNA, 25 bp, Homo sapien
gcgctggcgttacagcgcaacagca

SEQ ID NO: 5848041 - DNA, 25 bp, Homo sapien
cgttacagcgcaacagcagcctgca

SEQ ID NO: 5848042 - DNA, 25 bp, Homo sapien
agcgcaacagcagcctgcagctgga

SEQ ID NO: 5848043 - DNA, 25 bp, Homo sapien
cagcagcctgcagctggattacgca

SEQ ID NO: 5848044 - DNA, 25 bp, Homo sapien
ctgcagctggattacgcaacagtaa

SEQ ID NO: 5848045 - DNA, 25 bp, Homo sapien
catcagcgcgcaagagggcagaccg

SEQ ID NO: 5848046 - DNA, 25 bp, Homo sapien
cgcaagagggcagaccgatagaatc

SEQ ID NO: 5848047 - DNA, 25 bp, Homo sapien
gggcagaccgatagaatcattggta

SEQ ID NO: 5848048 - DNA, 25 bp, Homo sapien
gaccgatagaatcattggtaatgag

SEQ ID NO: 5848049 - DNA, 25 bp, Homo sapien
agaatcattggtaatgagcgccgga

SEQ ID NO: 5848050 - DNA, 25 bp, Homo sapien
gggaaaactgtcgccagttgtgcac

SEQ ID NO: 5848051 - DNA, 25 bp, Homo sapien
ttggtaatgagcgccggattacgcg

SEQ ID NO: 5848052 - DNA, 25 bp, Homo sapien
cgccagttgtgcacttttacaagcc

SEQ ID NO: 5848053 - DNA, 25 bp, Homo sapien
atgagcgccggattacgcgcgcttg

SEQ ID NO: 5848054 - DNA, 25 bp, Homo sapien
cacttttacaagccgcaaaggcagc

SEQ ID NO: 5848055 - DNA, 25 bp, Homo sapien
caagccgcaaaggcagcaggctacc

SEQ ID NO: 5848056 - DNA, 25 bp, Homo sapien
gcaaaggcagcaggctaccggacgg

SEQ ID NO: 5848057 - DNA, 25 bp, Homo sapien
aggtttacgcaatagcgacgcgctg

SEQ ID NO: 5848058 - DNA, 25 bp, Homo sapien
cgcaatagcgacgcgctggcgttac

SEQ ID NO: 5848059 - DNA, 25 bp, Homo sapien
gcgacgcgctggcgttacagcgcaa

SEQ ID NO: 5848060 - DNA, 25 bp, Homo sapien
gcgctggcgttacagcgcaacagca

SEQ ID NO: 5848061 - DNA, 25 bp, Homo sapien
cgttacagcgcaacagcagcctgca

SEQ ID NO: 5848062 - DNA, 25 bp, Homo sapien
agcgcaacagcagcctgcagctgga

SEQ ID NO: 5848063 - DNA, 25 bp, Homo sapien
cagcagcctgcagctggattacgca

SEQ ID NO: 5848064 - DNA, 25 bp, Homo sapien
ctgcagctggattacgcaacagtaa

SEQ ID NO: 5848065 - DNA, 25 bp, Homo sapien
catcagcgcgcaagagggcagaccg

SEQ ID NO: 5848066 - DNA, 25 bp, Homo sapien
cgcaagagggcagaccgatagaatc

SEQ ID NO: 5848067 - DNA, 25 bp, Homo sapien
gggcagaccgatagaatcattggta

SEQ ID NO: 5848068 - DNA, 25 bp, Homo sapien
gaccgatagaatcattggtaatgag

SEQ ID NO: 5848069 - DNA, 25 bp, Homo sapien
agaatcattggtaatgagcgccgga

SEQ ID NO: 5848070 - DNA, 25 bp, Homo sapien
gggaaaactgtcgccagttgtgcac

SEQ ID NO: 5848071 - DNA, 25 bp, Homo sapien
ttggtaatgagcgccggattacgcg

SEQ ID NO: 5848072 - DNA, 25 bp, Homo sapien
cgccagttgtgcacttttacaagcc

SEQ ID NO: 5848073 - DNA, 25 bp, Homo sapien
atgagcgccggattacgcgcgcttg

SEQ ID NO: 5848074 - DNA, 25 bp, Homo sapien
cacttttacaagccgcaaaggcagc

SEQ ID NO: 5848075 - DNA, 25 bp, Homo sapien
caagccgcaaaggcagcaggctacc

SEQ ID NO: 5848076 - DNA, 25 bp, Homo sapien
gcaaaggcagcaggctaccggacgg

SEQ ID NO: 5848077 - DNA, 25 bp, Homo sapien
aggtttacgcaatagcgacgcgctg

SEQ ID NO: 5848078 - DNA, 25 bp, Homo sapien
cgcaatagcgacgcgctggcgttac

SEQ ID NO: 5848079 - DNA, 25 bp, Homo sapien
gcgacgcgctggcgttacagcgcaa

SEQ ID NO: 5848080 - DNA, 25 bp, Homo sapien
gcgctggcgttacagcgcaacagca

SEQ ID NO: 5848081 - DNA, 25 bp, Homo sapien
cgttacagcgcaacagcagcctgca

SEQ ID NO: 5848082 - DNA, 25 bp, Homo sapien
agcgcaacagcagcctgcagctgga

SEQ ID NO: 5848083 - DNA, 25 bp, Homo sapien
cagcagcctgcagctggattacgca

SEQ ID NO: 5848084 - DNA, 25 bp, Homo sapien
ctgcagctggattacgcaacagtaa

SEQ ID NO: 5848085 - DNA, 25 bp, Homo sapien
catcagcgcgcaagagggcagaccg

SEQ ID NO: 5848086 - DNA, 25 bp, Homo sapien
cgcaagagggcagaccgatagaatc

SEQ ID NO: 5848087 - DNA, 25 bp, Homo sapien
gggcagaccgatagaatcattggta

SEQ ID NO: 5848088 - DNA, 25 bp, Homo sapien
gaccgatagaatcattggtaatgag

SEQ ID NO: 5848089 - DNA, 25 bp, Homo sapien
agaatcattggtaatgagcgccgga

SEQ ID NO: 5848090 - DNA, 25 bp, Homo sapien
gggaaaactgtcgccagttgtgcac

SEQ ID NO: 5848091 - DNA, 25 bp, Homo sapien
ttggtaatgagcgccggattacgcg

SEQ ID NO: 5848092 - DNA, 25 bp, Homo sapien
cgccagttgtgcacttttacaagcc

SEQ ID NO: 5848093 - DNA, 25 bp, Homo sapien
atgagcgccggattacgcgcgcttg

SEQ ID NO: 5848094 - DNA, 25 bp, Homo sapien
cacttttacaagccgcaaaggcagc

SEQ ID NO: 5848095 - DNA, 25 bp, Homo sapien
caagccgcaaaggcagcaggctacc

SEQ ID NO: 5848096 - DNA, 25 bp, Homo sapien
gcaaaggcagcaggctaccggacgg

SEQ ID NO: 5848097 - DNA, 25 bp, Homo sapien
aggtttacgcaatagcgacgcgctg

SEQ ID NO: 5848098 - DNA, 25 bp, Homo sapien
cgcaatagcgacgcgctggcgttac

SEQ ID NO: 5848099 - DNA, 25 bp, Homo sapien
gcgacgcgctggcgttacagcgcaa

SEQ ID NO: 5848100 - DNA, 25 bp, Homo sapien
gcgctggcgttacagcgcaacagca

SEQ ID NO: 5848101 - DNA, 25 bp, Homo sapien
cgttacagcgcaacagcagcctgca

SEQ ID NO: 5848102 - DNA, 25 bp, Homo sapien
agcgcaacagcagcctgcagctgga

SEQ ID NO: 5848103 - DNA, 25 bp, Homo sapien
cagcagcctgcagctggattacgca

SEQ ID NO: 5848104 - DNA, 25 bp, Homo sapien
ctgcagctggattacgcaacagtaa

SEQ ID NO: 5848105 - DNA, 25 bp, Homo sapien
catcagcgcgcaagagggcagaccg

SEQ ID NO: 5848106 - DNA, 25 bp, Homo sapien
cgcaagagggcagaccgatagaatc

SEQ ID NO: 5848107 - DNA, 25 bp, Homo sapien
gggcagaccgatagaatcattggta

SEQ ID NO: 5848108 - DNA, 25 bp, Homo sapien
gaccgatagaatcattggtaatgag

SEQ ID NO: 5848109 - DNA, 25 bp, Homo sapien
agaatcattggtaatgagcgccgga

SEQ ID NO: 5848110 - DNA, 25 bp, Homo sapien
gggaaaactgtcgccagttgtgcac

SEQ ID NO: 5848111 - DNA, 25 bp, Homo sapien
ttggtaatgagcgccggattacgcg

SEQ ID NO: 5848112 - DNA, 25 bp, Homo sapien
cgccagttgtgcacttttacaagcc

SEQ ID NO: 5848113 - DNA, 25 bp, Homo sapien
atgagcgccggattacgcgcgcttg

SEQ ID NO: 5848114 - DNA, 25 bp, Homo sapien
cacttttacaagccgcaaaggcagc

SEQ ID NO: 5848115 - DNA, 25 bp, Homo sapien
caagccgcaaaggcagcaggctacc

SEQ ID NO: 5848116 - DNA, 25 bp, Homo sapien
gcaaaggcagcaggctaccggacgg

SEQ ID NO: 5848117 - DNA, 25 bp, Homo sapien
aggtttacgcaatagcgacgcgctg

SEQ ID NO: 5848118 - DNA, 25 bp, Homo sapien
cgcaatagcgacgcgctggcgttac

SEQ ID NO: 5848119 - DNA, 25 bp, Homo sapien
gcgacgcgctggcgttacagcgcaa

SEQ ID NO: 5848120 - DNA, 25 bp, Homo sapien
gcgctggcgttacagcgcaacagca

SEQ ID NO: 5848121 - DNA, 25 bp, Homo sapien
cgttacagcgcaacagcagcctgca

SEQ ID NO: 5848122 - DNA, 25 bp, Homo sapien
agcgcaacagcagcctgcagctgga

SEQ ID NO: 5848123 - DNA, 25 bp, Homo sapien
cagcagcctgcagctggattacgca

SEQ ID NO: 5848124 - DNA, 25 bp, Homo sapien
ctgcagctggattacgcaacagtaa

SEQ ID NO: 5848125 - DNA, 25 bp, Homo sapien
catcagcgcgcaagagggcagaccg

SEQ ID NO: 5848126 - DNA, 25 bp, Homo sapien
cgcaagagggcagaccgatagaatc

SEQ ID NO: 5848127 - DNA, 25 bp, Homo sapien
gggcagaccgatagaatcattggta

SEQ ID NO: 5848128 - DNA, 25 bp, Homo sapien
gaccgatagaatcattggtaatgag

SEQ ID NO: 5848129 - DNA, 25 bp, Homo sapien
agaatcattggtaatgagcgccgga

SEQ ID NO: 5848130 - DNA, 25 bp, Homo sapien
gggaaaactgtcgccagttgtgcac

SEQ ID NO: 5848131 - DNA, 25 bp, Homo sapien
ttggtaatgagcgccggattacgcg

SEQ ID NO: 5848132 - DNA, 25 bp, Homo sapien
cgccagttgtgcacttttacaagcc

SEQ ID NO: 5848133 - DNA, 25 bp, Homo sapien
atgagcgccggattacgcgcgcttg

SEQ ID NO: 5848134 - DNA, 25 bp, Homo sapien
cacttttacaagccgcaaaggcagc

SEQ ID NO: 5848135 - DNA, 25 bp, Homo sapien
caagccgcaaaggcagcaggctacc

SEQ ID NO: 5848136 - DNA, 25 bp, Homo sapien
gcaaaggcagcaggctaccggacgg

SEQ ID NO: 5848137 - DNA, 25 bp, Homo sapien
aggtttacgcaatagcgacgcgctg

SEQ ID NO: 5848138 - DNA, 25 bp, Homo sapien
cgcaatagcgacgcgctggcgttac

SEQ ID NO: 5848139 - DNA, 25 bp, Homo sapien
gcgacgcgctggcgttacagcgcaa

SEQ ID NO: 5848140 - DNA, 25 bp, Homo sapien
gcgctggcgttacagcgcaacagca

SEQ ID NO: 5848141 - DNA, 25 bp, Homo sapien
cgttacagcgcaacagcagcctgca

SEQ ID NO: 5848142 - DNA, 25 bp, Homo sapien
agcgcaacagcagcctgcagctgga

SEQ ID NO: 5848143 - DNA, 25 bp, Homo sapien
cagcagcctgcagctggattacgca

SEQ ID NO: 5848144 - DNA, 25 bp, Homo sapien
ctgcagctggattacgcaacagtaa

SEQ ID NO: 5848145 - DNA, 25 bp, Homo sapien
catcagcgcgcaagagggcagaccg

SEQ ID NO: 5848146 - DNA, 25 bp, Homo sapien
cgcaagagggcagaccgatagaatc

SEQ ID NO: 5848147 - DNA, 25 bp, Homo sapien
gggcagaccgatagaatcattggta

SEQ ID NO: 5848148 - DNA, 25 bp, Homo sapien
gaccgatagaatcattggtaatgag

SEQ ID NO: 5848149 - DNA, 25 bp, Homo sapien
agaatcattggtaatgagcgccgga

SEQ ID NO: 5848150 - DNA, 25 bp, Homo sapien
gggaaaactgtcgccagttgtgcac

SEQ ID NO: 5848151 - DNA, 25 bp, Homo sapien
ttggtaatgagcgccggattacgcg

SEQ ID NO: 5848152 - DNA, 25 bp, Homo sapien
cgccagttgtgcacttttacaagcc

SEQ ID NO: 5848153 - DNA, 25 bp, Homo sapien
atgagcgccggattacgcgcgcttg

SEQ ID NO: 5848154 - DNA, 25 bp, Homo sapien
cacttttacaagccgcaaaggcagc

SEQ ID NO: 5848155 - DNA, 25 bp, Homo sapien
caagccgcaaaggcagcaggctacc

SEQ ID NO: 5848156 - DNA, 25 bp, Homo sapien
gcaaaggcagcaggctaccggacgg

SEQ ID NO: 5848157 - DNA, 25 bp, Homo sapien
aggtttacgcaatagcgacgcgctg

SEQ ID NO: 5848158 - DNA, 25 bp, Homo sapien
cgcaatagcgacgcgctggcgttac

SEQ ID NO: 5848159 - DNA, 25 bp, Homo sapien
gcgacgcgctggcgttacagcgcaa

SEQ ID NO: 5848160 - DNA, 25 bp, Homo sapien
gcgctggcgttacagcgcaacagca

SEQ ID NO: 5848161 - DNA, 25 bp, Homo sapien
cgttacagcgcaacagcagcctgca

SEQ ID NO: 5848162 - DNA, 25 bp, Homo sapien
agcgcaacagcagcctgcagctgga

SEQ ID NO: 5848163 - DNA, 25 bp, Homo sapien
cagcagcctgcagctggattacgca

SEQ ID NO: 5848164 - DNA, 25 bp, Homo sapien
ctgcagctggattacgcaacagtaa

SEQ ID NO: 5848165 - DNA, 25 bp, Homo sapien
catcagcgcgcaagagggcagaccg

SEQ ID NO: 5848166 - DNA, 25 bp, Homo sapien
cgcaagagggcagaccgatagaatc

SEQ ID NO: 5848167 - DNA, 25 bp, Homo sapien
gggcagaccgatagaatcattggta

SEQ ID NO: 5848168 - DNA, 25 bp, Homo sapien
gaccgatagaatcattggtaatgag

SEQ ID NO: 5848169 - DNA, 25 bp, Homo sapien
agaatcattggtaatgagcgccgga

SEQ ID NO: 5848170 - DNA, 25 bp, Homo sapien
gggaaaactgtcgccagttgtgcac

SEQ ID NO: 5848171 - DNA, 25 bp, Homo sapien
ttggtaatgagcgccggattacgcg

SEQ ID NO: 5848172 - DNA, 25 bp, Homo sapien
cgccagttgtgcacttttacaagcc

SEQ ID NO: 5848173 - DNA, 25 bp, Homo sapien
atgagcgccggattacgcgcgcttg

SEQ ID NO: 5848174 - DNA, 25 bp, Homo sapien
cacttttacaagccgcaaaggcagc

SEQ ID NO: 5848175 - DNA, 25 bp, Homo sapien
caagccgcaaaggcagcaggctacc

SEQ ID NO: 5848176 - DNA, 25 bp, Homo sapien
gcaaaggcagcaggctaccggacgg

SEQ ID NO: 5848177 - DNA, 25 bp, Homo sapien
aggtttacgcaatagcgacgcgctg

SEQ ID NO: 5848178 - DNA, 25 bp, Homo sapien
cgcaatagcgacgcgctggcgttac

SEQ ID NO: 5848179 - DNA, 25 bp, Homo sapien
gcgacgcgctggcgttacagcgcaa

SEQ ID NO: 5848180 - DNA, 25 bp, Homo sapien
gcgctggcgttacagcgcaacagca

SEQ ID NO: 5848181 - DNA, 25 bp, Homo sapien
cgttacagcgcaacagcagcctgca

SEQ ID NO: 5848182 - DNA, 25 bp, Homo sapien
agcgcaacagcagcctgcagctgga

SEQ ID NO: 5848183 - DNA, 25 bp, Homo sapien
cagcagcctgcagctggattacgca

SEQ ID NO: 5848184 - DNA, 25 bp, Homo sapien
ctgcagctggattacgcaacagtaa

SEQ ID NO: 5848185 - DNA, 25 bp, Homo sapien
catcagcgcgcaagagggcagaccg

SEQ ID NO: 5848186 - DNA, 25 bp, Homo sapien
cgcaagagggcagaccgatagaatc

SEQ ID NO: 5848187 - DNA, 25 bp, Homo sapien
gggcagaccgatagaatcattggta

SEQ ID NO: 5848188 - DNA, 25 bp, Homo sapien
gaccgatagaatcattggtaatgag

SEQ ID NO: 5848189 - DNA, 25 bp, Homo sapien
agaatcattggtaatgagcgccgga

SEQ ID NO: 5848190 - DNA, 25 bp, Homo sapien
gggaaaactgtcgccagttgtgcac

SEQ ID NO: 5848191 - DNA, 25 bp, Homo sapien
ttggtaatgagcgccggattacgcg

SEQ ID NO: 5848192 - DNA, 25 bp, Homo sapien
cgccagttgtgcacttttacaagcc

SEQ ID NO: 5848193 - DNA, 25 bp, Homo sapien
atgagcgccggattacgcgcgcttg

SEQ ID NO: 5848194 - DNA, 25 bp, Homo sapien
cacttttacaagccgcaaaggcagc

SEQ ID NO: 5848195 - DNA, 25 bp, Homo sapien
caagccgcaaaggcagcaggctacc

SEQ ID NO: 5848196 - DNA, 25 bp, Homo sapien
gcaaaggcagcaggctaccggacgg

SEQ ID NO: 5848197 - DNA, 25 bp, Homo sapien
aggtttacgcaatagcgacgcgctg

SEQ ID NO: 5848198 - DNA, 25 bp, Homo sapien
cgcaatagcgacgcgctggcgttac

SEQ ID NO: 5848199 - DNA, 25 bp, Homo sapien
gcgacgcgctggcgttacagcgcaa

SEQ ID NO: 5848200 - DNA, 25 bp, Homo sapien
gcgctggcgttacagcgcaacagca

SEQ ID NO: 5848201 - DNA, 25 bp, Homo sapien
cgttacagcgcaacagcagcctgca

SEQ ID NO: 5848202 - DNA, 25 bp, Homo sapien
agcgcaacagcagcctgcagctgga

SEQ ID NO: 5848203 - DNA, 25 bp, Homo sapien
cagcagcctgcagctggattacgca

SEQ ID NO: 5848204 - DNA, 25 bp, Homo sapien
ctgcagctggattacgcaacagtaa

SEQ ID NO: 5848205 - DNA, 25 bp, Homo sapien
catcagcgcgcaagagggcagaccg

SEQ ID NO: 5848206 - DNA, 25 bp, Homo sapien
cgcaagagggcagaccgatagaatc

SEQ ID NO: 5848207 - DNA, 25 bp, Homo sapien
gggcagaccgatagaatcattggta

SEQ ID NO: 5848208 - DNA, 25 bp, Homo sapien
gaccgatagaatcattggtaatgag

SEQ ID NO: 5848209 - DNA, 25 bp, Homo sapien
agaatcattggtaatgagcgccgga

SEQ ID NO: 5848210 - DNA, 25 bp, Homo sapien
gggaaaactgtcgccagttgtgcac

SEQ ID NO: 5848211 - DNA, 25 bp, Homo sapien
ttggtaatgagcgccggattacgcg

SEQ ID NO: 5848212 - DNA, 25 bp, Homo sapien
cgccagttgtgcacttttacaagcc

SEQ ID NO: 5848213 - DNA, 25 bp, Homo sapien
atgagcgccggattacgcgcgcttg

SEQ ID NO: 5848214 - DNA, 25 bp, Homo sapien
cacttttacaagccgcaaaggcagc

SEQ ID NO: 5848215 - DNA, 25 bp, Homo sapien
caagccgcaaaggcagcaggctacc

SEQ ID NO: 5848216 - DNA, 25 bp, Homo sapien
gcaaaggcagcaggctaccggacgg

SEQ ID NO: 5848217 - DNA, 25 bp, Homo sapien
aggtttacgcaatagcgacgcgctg

SEQ ID NO: 5848218 - DNA, 25 bp, Homo sapien
cgcaatagcgacgcgctggcgttac

SEQ ID NO: 5848219 - DNA, 25 bp, Homo sapien
gcgacgcgctggcgttacagcgcaa

SEQ ID NO: 5848220 - DNA, 25 bp, Homo sapien
gcgctggcgttacagcgcaacagca

SEQ ID NO: 5848221 - DNA, 25 bp, Homo sapien
cgttacagcgcaacagcagcctgca

SEQ ID NO: 5848222 - DNA, 25 bp, Homo sapien
agcgcaacagcagcctgcagctgga

SEQ ID NO: 5848223 - DNA, 25 bp, Homo sapien
cagcagcctgcagctggattacgca

SEQ ID NO: 5848224 - DNA, 25 bp, Homo sapien
ctgcagctggattacgcaacagtaa

SEQ ID NO: 5848225 - DNA, 25 bp, Homo sapien
catcagcgcgcaagagggcagaccg

SEQ ID NO: 5848226 - DNA, 25 bp, Homo sapien
cgcaagagggcagaccgatagaatc

SEQ ID NO: 5848227 - DNA, 25 bp, Homo sapien
gggcagaccgatagaatcattggta

SEQ ID NO: 5848228 - DNA, 25 bp, Homo sapien
gaccgatagaatcattggtaatgag

SEQ ID NO: 5848229 - DNA, 25 bp, Homo sapien
agaatcattggtaatgagcgccgga

SEQ ID NO: 5848230 - DNA, 25 bp, Homo sapien
gggaaaactgtcgccagttgtgcac

SEQ ID NO: 5848231 - DNA, 25 bp, Homo sapien
ttggtaatgagcgccggattacgcg

SEQ ID NO: 5848232 - DNA, 25 bp, Homo sapien
cgccagttgtgcacttttacaagcc

SEQ ID NO: 5848233 - DNA, 25 bp, Homo sapien
atgagcgccggattacgcgcgcttg

SEQ ID NO: 5848234 - DNA, 25 bp, Homo sapien
cacttttacaagccgcaaaggcagc

SEQ ID NO: 5848235 - DNA, 25 bp, Homo sapien
caagccgcaaaggcagcaggctacc

SEQ ID NO: 5848236 - DNA, 25 bp, Homo sapien
gcaaaggcagcaggctaccggacgg

SEQ ID NO: 5848237 - DNA, 25 bp, Homo sapien
aggtttacgcaatagcgacgcgctg

SEQ ID NO: 5848238 - DNA, 25 bp, Homo sapien
cgcaatagcgacgcgctggcgttac

SEQ ID NO: 5848239 - DNA, 25 bp, Homo sapien
gcgacgcgctggcgttacagcgcaa

SEQ ID NO: 5848240 - DNA, 25 bp, Homo sapien
gcgctggcgttacagcgcaacagca

SEQ ID NO: 5848241 - DNA, 25 bp, Homo sapien
cgttacagcgcaacagcagcctgca

SEQ ID NO: 5848242 - DNA, 25 bp, Homo sapien
agcgcaacagcagcctgcagctgga

SEQ ID NO: 5848243 - DNA, 25 bp, Homo sapien
cagcagcctgcagctggattacgca

SEQ ID NO: 5848244 - DNA, 25 bp, Homo sapien
ctgcagctggattacgcaacagtaa

SEQ ID NO: 5848245 - DNA, 25 bp, Homo sapien
catcagcgcgcaagagggcagaccg

SEQ ID NO: 5848246 - DNA, 25 bp, Homo sapien
cgcaagagggcagaccgatagaatc

SEQ ID NO: 5848247 - DNA, 25 bp, Homo sapien
gggcagaccgatagaatcattggta

SEQ ID NO: 5848248 - DNA, 25 bp, Homo sapien
gaccgatagaatcattggtaatgag

SEQ ID NO: 5848249 - DNA, 25 bp, Homo sapien
agaatcattggtaatgagcgccgga

SEQ ID NO: 5848250 - DNA, 25 bp, Homo sapien
gggaaaactgtcgccagttgtgcac

SEQ ID NO: 5848251 - DNA, 25 bp, Homo sapien
ttggtaatgagcgccggattacgcg

SEQ ID NO: 5848252 - DNA, 25 bp, Homo sapien
cgccagttgtgcacttttacaagcc

SEQ ID NO: 5848253 - DNA, 25 bp, Homo sapien
atgagcgccggattacgcgcgcttg

SEQ ID NO: 5848254 - DNA, 25 bp, Homo sapien
cacttttacaagccgcaaaggcagc

SEQ ID NO: 5848255 - DNA, 25 bp, Homo sapien
caagccgcaaaggcagcaggctacc

SEQ ID NO: 5848256 - DNA, 25 bp, Homo sapien
gcaaaggcagcaggctaccggacgg

SEQ ID NO: 5848257 - DNA, 25 bp, Homo sapien
aggtttacgcaatagcgacgcgctg

SEQ ID NO: 5848258 - DNA, 25 bp, Homo sapien
cgcaatagcgacgcgctggcgttac

SEQ ID NO: 5848259 - DNA, 25 bp, Homo sapien
gcgacgcgctggcgttacagcgcaa

SEQ ID NO: 5848260 - DNA, 25 bp, Homo sapien
gcgctggcgttacagcgcaacagca

SEQ ID NO: 5848261 - DNA, 25 bp, Homo sapien
cgttacagcgcaacagcagcctgca

SEQ ID NO: 5848262 - DNA, 25 bp, Homo sapien
agcgcaacagcagcctgcagctgga

SEQ ID NO: 5848263 - DNA, 25 bp, Homo sapien
cagcagcctgcagctggattacgca

SEQ ID NO: 5848264 - DNA, 25 bp, Homo sapien
ctgcagctggattacgcaacagtaa

SEQ ID NO: 5848265 - DNA, 25 bp, Homo sapien
catcagcgcgcaagagggcagaccg

SEQ ID NO: 5848266 - DNA, 25 bp, Homo sapien
cgcaagagggcagaccgatagaatc

SEQ ID NO: 5848267 - DNA, 25 bp, Homo sapien
gggcagaccgatagaatcattggta

SEQ ID NO: 5848268 - DNA, 25 bp, Homo sapien
gaccgatagaatcattggtaatgag

SEQ ID NO: 5848269 - DNA, 25 bp, Homo sapien
agaatcattggtaatgagcgccgga

SEQ ID NO: 5848270 - DNA, 25 bp, Homo sapien
gggaaaactgtcgccagttgtgcac

SEQ ID NO: 5848271 - DNA, 25 bp, Homo sapien
ttggtaatgagcgccggattacgcg

SEQ ID NO: 5848272 - DNA, 25 bp, Homo sapien
cgccagttgtgcacttttacaagcc

SEQ ID NO: 5848273 - DNA, 25 bp, Homo sapien
atgagcgccggattacgcgcgcttg

SEQ ID NO: 5848274 - DNA, 25 bp, Homo sapien
cacttttacaagccgcaaaggcagc

SEQ ID NO: 5848275 - DNA, 25 bp, Homo sapien
caagccgcaaaggcagcaggctacc

SEQ ID NO: 5848276 - DNA, 25 bp, Homo sapien
gcaaaggcagcaggctaccggacgg

SEQ ID NO: 5848277 - DNA, 25 bp, Homo sapien
aggtttacgcaatagcgacgcgctg

SEQ ID NO: 5848278 - DNA, 25 bp, Homo sapien
cgcaatagcgacgcgctggcgttac

SEQ ID NO: 5848279 - DNA, 25 bp, Homo sapien
gcgacgcgctggcgttacagcgcaa

SEQ ID NO: 5848280 - DNA, 25 bp, Homo sapien
gcgctggcgttacagcgcaacagca

SEQ ID NO: 5848281 - DNA, 25 bp, Homo sapien
cgttacagcgcaacagcagcctgca

SEQ ID NO: 5848282 - DNA, 25 bp, Homo sapien
agcgcaacagcagcctgcagctgga

SEQ ID NO: 5848283 - DNA, 25 bp, Homo sapien
cagcagcctgcagctggattacgca

SEQ ID NO: 5848284 - DNA, 25 bp, Homo sapien
ctgcagctggattacgcaacagtaa

SEQ ID NO: 5848285 - DNA, 25 bp, Homo sapien
catcagcgcgcaagagggcagaccg

SEQ ID NO: 5848286 - DNA, 25 bp, Homo sapien
cgcaagagggcagaccgatagaatc

SEQ ID NO: 5848287 - DNA, 25 bp, Homo sapien
gggcagaccgatagaatcattggta

SEQ ID NO: 5848288 - DNA, 25 bp, Homo sapien
gaccgatagaatcattggtaatgag

SEQ ID NO: 5848289 - DNA, 25 bp, Homo sapien
agaatcattggtaatgagcgccgga

SEQ ID NO: 5848290 - DNA, 25 bp, Homo sapien
gggaaaactgtcgccagttgtgcac

SEQ ID NO: 5848291 - DNA, 25 bp, Homo sapien
ttggtaatgagcgccggattacgcg

SEQ ID NO: 5848292 - DNA, 25 bp, Homo sapien
cgccagttgtgcacttttacaagcc

SEQ ID NO: 5848293 - DNA, 25 bp, Homo sapien
atgagcgccggattacgcgcgcttg

SEQ ID NO: 5848294 - DNA, 25 bp, Homo sapien
cacttttacaagccgcaaaggcagc

SEQ ID NO: 5848295 - DNA, 25 bp, Homo sapien
caagccgcaaaggcagcaggctacc

SEQ ID NO: 5848296 - DNA, 25 bp, Homo sapien
gcaaaggcagcaggctaccggacgg

SEQ ID NO: 5848297 - DNA, 25 bp, Homo sapien
aggtttacgcaatagcgacgcgctg

SEQ ID NO: 5848298 - DNA, 25 bp, Homo sapien
cgcaatagcgacgcgctggcgttac

SEQ ID NO: 5848299 - DNA, 25 bp, Homo sapien
gcgacgcgctggcgttacagcgcaa

SEQ ID NO: 5848300 - DNA, 25 bp, Homo sapien
gcgctggcgttacagcgcaacagca

SEQ ID NO: 5848301 - DNA, 25 bp, Homo sapien
cgttacagcgcaacagcagcctgca

SEQ ID NO: 5848302 - DNA, 25 bp, Homo sapien
agcgcaacagcagcctgcagctgga

SEQ ID NO: 5848303 - DNA, 25 bp, Homo sapien
cagcagcctgcagctggattacgca

SEQ ID NO: 5848304 - DNA, 25 bp, Homo sapien
ctgcagctggattacgcaacagtaa

SEQ ID NO: 5848305 - DNA, 25 bp, Homo sapien
catcagcgcgcaagagggcagaccg

SEQ ID NO: 5848306 - DNA, 25 bp, Homo sapien
cgcaagagggcagaccgatagaatc

SEQ ID NO: 5848307 - DNA, 25 bp, Homo sapien
gggcagaccgatagaatcattggta

SEQ ID NO: 5848308 - DNA, 25 bp, Homo sapien
gaccgatagaatcattggtaatgag

SEQ ID NO: 5848309 - DNA, 25 bp, Homo sapien
agaatcattggtaatgagcgccgga

SEQ ID NO: 5848310 - DNA, 25 bp, Homo sapien
gggaaaactgtcgccagttgtgcac

SEQ ID NO: 5848311 - DNA, 25 bp, Homo sapien
ttggtaatgagcgccggattacgcg

SEQ ID NO: 5848312 - DNA, 25 bp, Homo sapien
cgccagttgtgcacttttacaagcc

SEQ ID NO: 5848313 - DNA, 25 bp, Homo sapien
atgagcgccggattacgcgcgcttg

SEQ ID NO: 5848314 - DNA, 25 bp, Homo sapien
cacttttacaagccgcaaaggcagc

SEQ ID NO: 5848315 - DNA, 25 bp, Homo sapien
caagccgcaaaggcagcaggctacc

SEQ ID NO: 5848316 - DNA, 25 bp, Homo sapien
gcaaaggcagcaggctaccggacgg

SEQ ID NO: 5848317 - DNA, 25 bp, Homo sapien
aggtttacgcaatagcgacgcgctg

SEQ ID NO: 5848318 - DNA, 25 bp, Homo sapien
cgcaatagcgacgcgctggcgttac

SEQ ID NO: 5848319 - DNA, 25 bp, Homo sapien
gcgacgcgctggcgttacagcgcaa

SEQ ID NO: 5848320 - DNA, 25 bp, Homo sapien
gcgctggcgttacagcgcaacagca

SEQ ID NO: 5848321 - DNA, 25 bp, Homo sapien
cgttacagcgcaacagcagcctgca

SEQ ID NO: 5848322 - DNA, 25 bp, Homo sapien
agcgcaacagcagcctgcagctgga

SEQ ID NO: 5848323 - DNA, 25 bp, Homo sapien
cagcagcctgcagctggattacgca

SEQ ID NO: 5848324 - DNA, 25 bp, Homo sapien
ctgcagctggattacgcaacagtaa

SEQ ID NO: 5848325 - DNA, 25 bp, Homo sapien
catcagcgcgcaagagggcagaccg

SEQ ID NO: 5848326 - DNA, 25 bp, Homo sapien
cgcaagagggcagaccgatagaatc

SEQ ID NO: 5848327 - DNA, 25 bp, Homo sapien
gggcagaccgatagaatcattggta

SEQ ID NO: 5848328 - DNA, 25 bp, Homo sapien
gaccgatagaatcattggtaatgag

SEQ ID NO: 5848329 - DNA, 25 bp, Homo sapien
agaatcattggtaatgagcgccgga

SEQ ID NO: 5848330 - DNA, 25 bp, Homo sapien
gggaaaactgtcgccagttgtgcac

SEQ ID NO: 5848331 - DNA, 25 bp, Homo sapien
ttggtaatgagcgccggattacgcg

SEQ ID NO: 5848332 - DNA, 25 bp, Homo sapien
cgccagttgtgcacttttacaagcc

SEQ ID NO: 5848333 - DNA, 25 bp, Homo sapien
atgagcgccggattacgcgcgcttg

SEQ ID NO: 5848334 - DNA, 25 bp, Homo sapien
cacttttacaagccgcaaaggcagc

SEQ ID NO: 5848335 - DNA, 25 bp, Homo sapien
caagccgcaaaggcagcaggctacc

SEQ ID NO: 5848336 - DNA, 25 bp, Homo sapien
gcaaaggcagcaggctaccggacgg

SEQ ID NO: 5848337 - DNA, 25 bp, Homo sapien
aggtttacgcaatagcgacgcgctg

SEQ ID NO: 5848338 - DNA, 25 bp, Homo sapien
cgcaatagcgacgcgctggcgttac

SEQ ID NO: 5848339 - DNA, 25 bp, Homo sapien
gcgacgcgctggcgttacagcgcaa

SEQ ID NO: 5848340 - DNA, 25 bp, Homo sapien
gcgctggcgttacagcgcaacagca

SEQ ID NO: 5848341 - DNA, 25 bp, Homo sapien
cgttacagcgcaacagcagcctgca

SEQ ID NO: 5848342 - DNA, 25 bp, Homo sapien
agcgcaacagcagcctgcagctgga

SEQ ID NO: 5848343 - DNA, 25 bp, Homo sapien
cagcagcctgcagctggattacgca

SEQ ID NO: 5848344 - DNA, 25 bp, Homo sapien
ctgcagctggattacgcaacagtaa

SEQ ID NO: 5848345 - DNA, 25 bp, Homo sapien
catcagcgcgcaagagggcagaccg

SEQ ID NO: 5848346 - DNA, 25 bp, Homo sapien
cgcaagagggcagaccgatagaatc

SEQ ID NO: 5848347 - DNA, 25 bp, Homo sapien
gggcagaccgatagaatcattggta

SEQ ID NO: 5848348 - DNA, 25 bp, Homo sapien
gaccgatagaatcattggtaatgag

SEQ ID NO: 5848349 - DNA, 25 bp, Homo sapien
agaatcattggtaatgagcgccgga

SEQ ID NO: 5848350 - DNA, 25 bp, Homo sapien
gggaaaactgtcgccagttgtgcac

SEQ ID NO: 5848351 - DNA, 25 bp, Homo sapien
ttggtaatgagcgccggattacgcg

SEQ ID NO: 5848352 - DNA, 25 bp, Homo sapien
cgccagttgtgcacttttacaagcc

SEQ ID NO: 5848353 - DNA, 25 bp, Homo sapien
atgagcgccggattacgcgcgcttg

SEQ ID NO: 5848354 - DNA, 25 bp, Homo sapien
cacttttacaagccgcaaaggcagc

SEQ ID NO: 5848355 - DNA, 25 bp, Homo sapien
caagccgcaaaggcagcaggctacc

SEQ ID NO: 5848356 - DNA, 25 bp, Homo sapien
gcaaaggcagcaggctaccggacgg

SEQ ID NO: 5848357 - DNA, 25 bp, Homo sapien
aggtttacgcaatagcgacgcgctg

SEQ ID NO: 5848358 - DNA, 25 bp, Homo sapien
cgcaatagcgacgcgctggcgttac

SEQ ID NO: 5848359 - DNA, 25 bp, Homo sapien
gcgacgcgctggcgttacagcgcaa

SEQ ID NO: 5848360 - DNA, 25 bp, Homo sapien
gcgctggcgttacagcgcaacagca

SEQ ID NO: 5848361 - DNA, 25 bp, Homo sapien
cgttacagcgcaacagcagcctgca

SEQ ID NO: 5848362 - DNA, 25 bp, Homo sapien
agcgcaacagcagcctgcagctgga

SEQ ID NO: 5848363 - DNA, 25 bp, Homo sapien
cagcagcctgcagctggattacgca

SEQ ID NO: 5848364 - DNA, 25 bp, Homo sapien
ctgcagctggattacgcaacagtaa

SEQ ID NO: 5848365 - DNA, 25 bp, Homo sapien
catcagcgcgcaagagggcagaccg

SEQ ID NO: 5848366 - DNA, 25 bp, Homo sapien
cgcaagagggcagaccgatagaatc

SEQ ID NO: 5848367 - DNA, 25 bp, Homo sapien
gggcagaccgatagaatcattggta

SEQ ID NO: 5848368 - DNA, 25 bp, Homo sapien
gaccgatagaatcattggtaatgag

SEQ ID NO: 5848369 - DNA, 25 bp, Homo sapien
agaatcattggtaatgagcgccgga

SEQ ID NO: 5848370 - DNA, 25 bp, Homo sapien
gggaaaactgtcgccagttgtgcac

SEQ ID NO: 5848371 - DNA, 25 bp, Homo sapien
ttggtaatgagcgccggattacgcg

SEQ ID NO: 5848372 - DNA, 25 bp, Homo sapien
cgccagttgtgcacttttacaagcc

SEQ ID NO: 5848373 - DNA, 25 bp, Homo sapien
atgagcgccggattacgcgcgcttg

SEQ ID NO: 5848374 - DNA, 25 bp, Homo sapien
cacttttacaagccgcaaaggcagc

SEQ ID NO: 5848375 - DNA, 25 bp, Homo sapien
caagccgcaaaggcagcaggctacc

SEQ ID NO: 5848376 - DNA, 25 bp, Homo sapien
gcaaaggcagcaggctaccggacgg

SEQ ID NO: 5848377 - DNA, 25 bp, Homo sapien
aggtttacgcaatagcgacgcgctg

SEQ ID NO: 5848378 - DNA, 25 bp, Homo sapien
cgcaatagcgacgcgctggcgttac

SEQ ID NO: 5848379 - DNA, 25 bp, Homo sapien
gcgacgcgctggcgttacagcgcaa

SEQ ID NO: 5848380 - DNA, 25 bp, Homo sapien
gcgctggcgttacagcgcaacagca

SEQ ID NO: 5848381 - DNA, 25 bp, Homo sapien
cgttacagcgcaacagcagcctgca

SEQ ID NO: 5848382 - DNA, 25 bp, Homo sapien
agcgcaacagcagcctgcagctgga

SEQ ID NO: 5848383 - DNA, 25 bp, Homo sapien
cagcagcctgcagctggattacgca

SEQ ID NO: 5848384 - DNA, 25 bp, Homo sapien
ctgcagctggattacgcaacagtaa

SEQ ID NO: 5848385 - DNA, 25 bp, Homo sapien
catcagcgcgcaagagggcagaccg

SEQ ID NO: 5848386 - DNA, 25 bp, Homo sapien
cgcaagagggcagaccgatagaatc

SEQ ID NO: 5848387 - DNA, 25 bp, Homo sapien
gggcagaccgatagaatcattggta

SEQ ID NO: 5848388 - DNA, 25 bp, Homo sapien
gaccgatagaatcattggtaatgag

SEQ ID NO: 5848389 - DNA, 25 bp, Homo sapien
agaatcattggtaatgagcgccgga

SEQ ID NO: 5848390 - DNA, 25 bp, Homo sapien
gggaaaactgtcgccagttgtgcac

SEQ ID NO: 5848391 - DNA, 25 bp, Homo sapien
ttggtaatgagcgccggattacgcg

SEQ ID NO: 5848392 - DNA, 25 bp, Homo sapien
cgccagttgtgcacttttacaagcc

SEQ ID NO: 5848393 - DNA, 25 bp, Homo sapien
atgagcgccggattacgcgcgcttg

SEQ ID NO: 5848394 - DNA, 25 bp, Homo sapien
cacttttacaagccgcaaaggcagc

SEQ ID NO: 5848395 - DNA, 25 bp, Homo sapien
caagccgcaaaggcagcaggctacc

SEQ ID NO: 5848396 - DNA, 25 bp, Homo sapien
gcaaaggcagcaggctaccggacgg

SEQ ID NO: 5848397 - DNA, 25 bp, Homo sapien
aggtttacgcaatagcgacgcgctg

SEQ ID NO: 5848398 - DNA, 25 bp, Homo sapien
cgcaatagcgacgcgctggcgttac

SEQ ID NO: 5848399 - DNA, 25 bp, Homo sapien
gcgacgcgctggcgttacagcgcaa

SEQ ID NO: 5848400 - DNA, 25 bp, Homo sapien
gcgctggcgttacagcgcaacagca

SEQ ID NO: 5848401 - DNA, 25 bp, Homo sapien
cgttacagcgcaacagcagcctgca

SEQ ID NO: 5848402 - DNA, 25 bp, Homo sapien
agcgcaacagcagcctgcagctgga

SEQ ID NO: 5848403 - DNA, 25 bp, Homo sapien
cagcagcctgcagctggattacgca

SEQ ID NO: 5848404 - DNA, 25 bp, Homo sapien
ctgcagctggattacgcaacagtaa

SEQ ID NO: 5848405 - DNA, 25 bp, Homo sapien
catcagcgcgcaagagggcagaccg

SEQ ID NO: 5848406 - DNA, 25 bp, Homo sapien
cgcaagagggcagaccgatagaatc

SEQ ID NO: 5848407 - DNA, 25 bp, Homo sapien
gggcagaccgatagaatcattggta

SEQ ID NO: 5848408 - DNA, 25 bp, Homo sapien
gaccgatagaatcattggtaatgag

SEQ ID NO: 5848409 - DNA, 25 bp, Homo sapien
agaatcattggtaatgagcgccgga

SEQ ID NO: 5848410 - DNA, 25 bp, Homo sapien
gggaaaactgtcgccagttgtgcac

SEQ ID NO: 5848411 - DNA, 25 bp, Homo sapien
ttggtaatgagcgccggattacgcg

SEQ ID NO: 5848412 - DNA, 25 bp, Homo sapien
cgccagttgtgcacttttacaagcc

SEQ ID NO: 5848413 - DNA, 25 bp, Homo sapien
atgagcgccggattacgcgcgcttg

SEQ ID NO: 5848414 - DNA, 25 bp, Homo sapien
cacttttacaagccgcaaaggcagc

SEQ ID NO: 5848415 - DNA, 25 bp, Homo sapien
caagccgcaaaggcagcaggctacc

SEQ ID NO: 5848416 - DNA, 25 bp, Homo sapien
gcaaaggcagcaggctaccggacgg

SEQ ID NO: 5848417 - DNA, 25 bp, Homo sapien
aggtttacgcaatagcgacgcgctg

SEQ ID NO: 5848418 - DNA, 25 bp, Homo sapien
cgcaatagcgacgcgctggcgttac

SEQ ID NO: 5848419 - DNA, 25 bp, Homo sapien
gcgacgcgctggcgttacagcgcaa

SEQ ID NO: 5848420 - DNA, 25 bp, Homo sapien
gcgctggcgttacagcgcaacagca

SEQ ID NO: 5848421 - DNA, 25 bp, Homo sapien
cgttacagcgcaacagcagcctgca

SEQ ID NO: 5848422 - DNA, 25 bp, Homo sapien
agcgcaacagcagcctgcagctgga

SEQ ID NO: 5848423 - DNA, 25 bp, Homo sapien
cagcagcctgcagctggattacgca

SEQ ID NO: 5848424 - DNA, 25 bp, Homo sapien
ctgcagctggattacgcaacagtaa

SEQ ID NO: 5848425 - DNA, 25 bp, Homo sapien
catcagcgcgcaagagggcagaccg

SEQ ID NO: 5848426 - DNA, 25 bp, Homo sapien
cgcaagagggcagaccgatagaatc

SEQ ID NO: 5848427 - DNA, 25 bp, Homo sapien
gggcagaccgatagaatcattggta

SEQ ID NO: 5848428 - DNA, 25 bp, Homo sapien
gaccgatagaatcattggtaatgag

SEQ ID NO: 5848429 - DNA, 25 bp, Homo sapien
agaatcattggtaatgagcgccgga

SEQ ID NO: 5848430 - DNA, 25 bp, Homo sapien
gggaaaactgtcgccagttgtgcac

SEQ ID NO: 5848431 - DNA, 25 bp, Homo sapien
ttggtaatgagcgccggattacgcg

SEQ ID NO: 5848432 - DNA, 25 bp, Homo sapien
cgccagttgtgcacttttacaagcc

SEQ ID NO: 5848433 - DNA, 25 bp, Homo sapien
atgagcgccggattacgcgcgcttg

SEQ ID NO: 5848434 - DNA, 25 bp, Homo sapien
cacttttacaagccgcaaaggcagc

SEQ ID NO: 5848435 - DNA, 25 bp, Homo sapien
caagccgcaaaggcagcaggctacc

SEQ ID NO: 5848436 - DNA, 25 bp, Homo sapien
gcaaaggcagcaggctaccggacgg

SEQ ID NO: 5848437 - DNA, 25 bp, Homo sapien
aggtttacgcaatagcgacgcgctg

SEQ ID NO: 5848438 - DNA, 25 bp, Homo sapien
cgcaatagcgacgcgctggcgttac

SEQ ID NO: 5848439 - DNA, 25 bp, Homo sapien
gcgacgcgctggcgttacagcgcaa

SEQ ID NO: 5848440 - DNA, 25 bp, Homo sapien
gcgctggcgttacagcgcaacagca

SEQ ID NO: 5848441 - DNA, 25 bp, Homo sapien
cgttacagcgcaacagcagcctgca

SEQ ID NO: 5848442 - DNA, 25 bp, Homo sapien
agcgcaacagcagcctgcagctgga

SEQ ID NO: 5848443 - DNA, 25 bp, Homo sapien
cagcagcctgcagctggattacgca

SEQ ID NO: 5848444 - DNA, 25 bp, Homo sapien
ctgcagctggattacgcaacagtaa

SEQ ID NO: 5848445 - DNA, 25 bp, Homo sapien
catcagcgcgcaagagggcagaccg

SEQ ID NO: 5848446 - DNA, 25 bp, Homo sapien
cgcaagagggcagaccgatagaatc

SEQ ID NO: 5848447 - DNA, 25 bp, Homo sapien
gggcagaccgatagaatcattggta

SEQ ID NO: 5848448 - DNA, 25 bp, Homo sapien
gaccgatagaatcattggtaatgag

SEQ ID NO: 5848449 - DNA, 25 bp, Homo sapien
agaatcattggtaatgagcgccgga

SEQ ID NO: 5848450 - DNA, 25 bp, Homo sapien
gggaaaactgtcgccagttgtgcac

SEQ ID NO: 5848451 - DNA, 25 bp, Homo sapien
ttggtaatgagcgccggattacgcg

SEQ ID NO: 5848452 - DNA, 25 bp, Homo sapien
cgccagttgtgcacttttacaagcc

SEQ ID NO: 5848453 - DNA, 25 bp, Homo sapien
atgagcgccggattacgcgcgcttg

SEQ ID NO: 5848454 - DNA, 25 bp, Homo sapien
cacttttacaagccgcaaaggcagc

SEQ ID NO: 5848455 - DNA, 25 bp, Homo sapien
caagccgcaaaggcagcaggctacc

SEQ ID NO: 5848456 - DNA, 25 bp, Homo sapien
gcaaaggcagcaggctaccggacgg

SEQ ID NO: 5848457 - DNA, 25 bp, Homo sapien
aggtttacgcaatagcgacgcgctg

SEQ ID NO: 5848458 - DNA, 25 bp, Homo sapien
cgcaatagcgacgcgctggcgttac

SEQ ID NO: 5848459 - DNA, 25 bp, Homo sapien
gcgacgcgctggcgttacagcgcaa

SEQ ID NO: 5848460 - DNA, 25 bp, Homo sapien
gcgctggcgttacagcgcaacagca

SEQ ID NO: 5848461 - DNA, 25 bp, Homo sapien
cgttacagcgcaacagcagcctgca

SEQ ID NO: 5848462 - DNA, 25 bp, Homo sapien
agcgcaacagcagcctgcagctgga

SEQ ID NO: 5848463 - DNA, 25 bp, Homo sapien
cagcagcctgcagctggattacgca

SEQ ID NO: 5848464 - DNA, 25 bp, Homo sapien
ctgcagctggattacgcaacagtaa

SEQ ID NO: 5848465 - DNA, 25 bp, Homo sapien
catcagcgcgcaagagggcagaccg

SEQ ID NO: 5848466 - DNA, 25 bp, Homo sapien
cgcaagagggcagaccgatagaatc

SEQ ID NO: 5848467 - DNA, 25 bp, Homo sapien
gggcagaccgatagaatcattggta

SEQ ID NO: 5848468 - DNA, 25 bp, Homo sapien
gaccgatagaatcattggtaatgag

SEQ ID NO: 5848469 - DNA, 25 bp, Homo sapien
agaatcattggtaatgagcgccgga

SEQ ID NO: 5848470 - DNA, 25 bp, Homo sapien
gggaaaactgtcgccagttgtgcac

SEQ ID NO: 5848471 - DNA, 25 bp, Homo sapien
ttggtaatgagcgccggattacgcg

SEQ ID NO: 5848472 - DNA, 25 bp, Homo sapien
cgccagttgtgcacttttacaagcc

SEQ ID NO: 5848473 - DNA, 25 bp, Homo sapien
atgagcgccggattacgcgcgcttg

SEQ ID NO: 5848474 - DNA, 25 bp, Homo sapien
cacttttacaagccgcaaaggcagc

SEQ ID NO: 5848475 - DNA, 25 bp, Homo sapien
caagccgcaaaggcagcaggctacc

SEQ ID NO: 5848476 - DNA, 25 bp, Homo sapien
gcaaaggcagcaggctaccggacgg

SEQ ID NO: 5848477 - DNA, 25 bp, Homo sapien
aggtttacgcaatagcgacgcgctg

SEQ ID NO: 5848478 - DNA, 25 bp, Homo sapien
cgcaatagcgacgcgctggcgttac

SEQ ID NO: 5848479 - DNA, 25 bp, Homo sapien
gcgacgcgctggcgttacagcgcaa

SEQ ID NO: 5848480 - DNA, 25 bp, Homo sapien
gcgctggcgttacagcgcaacagca

SEQ ID NO: 5848481 - DNA, 25 bp, Homo sapien
cgttacagcgcaacagcagcctgca

SEQ ID NO: 5848482 - DNA, 25 bp, Homo sapien
agcgcaacagcagcctgcagctgga

SEQ ID NO: 5848483 - DNA, 25 bp, Homo sapien
cagcagcctgcagctggattacgca

SEQ ID NO: 5848484 - DNA, 25 bp, Homo sapien
ctgcagctggattacgcaacagtaa

SEQ ID NO: 5848485 - DNA, 25 bp, Homo sapien
catcagcgcgcaagagggcagaccg

SEQ ID NO: 5848486 - DNA, 25 bp, Homo sapien
cgcaagagggcagaccgatagaatc

SEQ ID NO: 5848487 - DNA, 25 bp, Homo sapien
gggcagaccgatagaatcattggta

SEQ ID NO: 5848488 - DNA, 25 bp, Homo sapien
gaccgatagaatcattggtaatgag

SEQ ID NO: 5848489 - DNA, 25 bp, Homo sapien
agaatcattggtaatgagcgccgga

SEQ ID NO: 5848490 - DNA, 25 bp, Homo sapien
gggaaaactgtcgccagttgtgcac

SEQ ID NO: 5848491 - DNA, 25 bp, Homo sapien
ttggtaatgagcgccggattacgcg

SEQ ID NO: 5848492 - DNA, 25 bp, Homo sapien
cgccagttgtgcacttttacaagcc

SEQ ID NO: 5848493 - DNA, 25 bp, Homo sapien
atgagcgccggattacgcgcgcttg

SEQ ID NO: 5848494 - DNA, 25 bp, Homo sapien
cacttttacaagccgcaaaggcagc

SEQ ID NO: 5848495 - DNA, 25 bp, Homo sapien
caagccgcaaaggcagcaggctacc

SEQ ID NO: 5848496 - DNA, 25 bp, Homo sapien
gcaaaggcagcaggctaccggacgg

SEQ ID NO: 5848497 - DNA, 25 bp, Homo sapien
aggtttacgcaatagcgacgcgctg

SEQ ID NO: 5848498 - DNA, 25 bp, Homo sapien
cgcaatagcgacgcgctggcgttac

SEQ ID NO: 5848499 - DNA, 25 bp, Homo sapien
gcgacgcgctggcgttacagcgcaa

SEQ ID NO: 5848500 - DNA, 25 bp, Homo sapien
gcgctggcgttacagcgcaacagca

SEQ ID NO: 5848501 - DNA, 25 bp, Homo sapien
cgttacagcgcaacagcagcctgca

SEQ ID NO: 5848502 - DNA, 25 bp, Homo sapien
agcgcaacagcagcctgcagctgga

SEQ ID NO: 5848503 - DNA, 25 bp, Homo sapien
cagcagcctgcagctggattacgca

SEQ ID NO: 5848504 - DNA, 25 bp, Homo sapien
ctgcagctggattacgcaacagtaa

SEQ ID NO: 5848505 - DNA, 25 bp, Homo sapien
catcagcgcgcaagagggcagaccg

SEQ ID NO: 5848506 - DNA, 25 bp, Homo sapien
cgcaagagggcagaccgatagaatc

SEQ ID NO: 5848507 - DNA, 25 bp, Homo sapien
gggcagaccgatagaatcattggta

SEQ ID NO: 5848508 - DNA, 25 bp, Homo sapien
gaccgatagaatcattggtaatgag

SEQ ID NO: 5848509 - DNA, 25 bp, Homo sapien
agaatcattggtaatgagcgccgga

SEQ ID NO: 5848510 - DNA, 25 bp, Homo sapien
gggaaaactgtcgccagttgtgcac

SEQ ID NO: 5848511 - DNA, 25 bp, Homo sapien
ttggtaatgagcgccggattacgcg

SEQ ID NO: 5848512 - DNA, 25 bp, Homo sapien
cgccagttgtgcacttttacaagcc

SEQ ID NO: 5848513 - DNA, 25 bp, Homo sapien
atgagcgccggattacgcgcgcttg

SEQ ID NO: 5848514 - DNA, 25 bp, Homo sapien
cacttttacaagccgcaaaggcagc

SEQ ID NO: 5848515 - DNA, 25 bp, Homo sapien
caagccgcaaaggcagcaggctacc

SEQ ID NO: 5848516 - DNA, 25 bp, Homo sapien
gcaaaggcagcaggctaccggacgg

SEQ ID NO: 5848517 - DNA, 25 bp, Homo sapien
aggtttacgcaatagcgacgcgctg

SEQ ID NO: 5848518 - DNA, 25 bp, Homo sapien
cgcaatagcgacgcgctggcgttac

SEQ ID NO: 5848519 - DNA, 25 bp, Homo sapien
gcgacgcgctggcgttacagcgcaa

SEQ ID NO: 5848520 - DNA, 25 bp, Homo sapien
gcgctggcgttacagcgcaacagca

SEQ ID NO: 5848521 - DNA, 25 bp, Homo sapien
cgttacagcgcaacagcagcctgca

SEQ ID NO: 5848522 - DNA, 25 bp, Homo sapien
agcgcaacagcagcctgcagctgga

SEQ ID NO: 5848523 - DNA, 25 bp, Homo sapien
cagcagcctgcagctggattacgca

SEQ ID NO: 5848524 - DNA, 25 bp, Homo sapien
ctgcagctggattacgcaacagtaa

SEQ ID NO: 5848525 - DNA, 25 bp, Homo sapien
catcagcgcgcaagagggcagaccg

SEQ ID NO: 5848526 - DNA, 25 bp, Homo sapien
cgcaagagggcagaccgatagaatc

SEQ ID NO: 5848527 - DNA, 25 bp, Homo sapien
gggcagaccgatagaatcattggta

SEQ ID NO: 5848528 - DNA, 25 bp, Homo sapien
gaccgatagaatcattggtaatgag

SEQ ID NO: 5848529 - DNA, 25 bp, Homo sapien
agaatcattggtaatgagcgccgga

SEQ ID NO: 5848530 - DNA, 25 bp, Homo sapien
gggaaaactgtcgccagttgtgcac

SEQ ID NO: 5848531 - DNA, 25 bp, Homo sapien
ttggtaatgagcgccggattacgcg

SEQ ID NO: 5848532 - DNA, 25 bp, Homo sapien
cgccagttgtgcacttttacaagcc

SEQ ID NO: 5848533 - DNA, 25 bp, Homo sapien
atgagcgccggattacgcgcgcttg

SEQ ID NO: 5848534 - DNA, 25 bp, Homo sapien
cacttttacaagccgcaaaggcagc

SEQ ID NO: 5848535 - DNA, 25 bp, Homo sapien
caagccgcaaaggcagcaggctacc

SEQ ID NO: 5848536 - DNA, 25 bp, Homo sapien
gcaaaggcagcaggctaccggacgg

SEQ ID NO: 5848537 - DNA, 25 bp, Homo sapien
aggtttacgcaatagcgacgcgctg

SEQ ID NO: 5848538 - DNA, 25 bp, Homo sapien
cgcaatagcgacgcgctggcgttac

SEQ ID NO: 5848539 - DNA, 25 bp, Homo sapien
gcgacgcgctggcgttacagcgcaa

SEQ ID NO: 5848540 - DNA, 25 bp, Homo sapien
gcgctggcgttacagcgcaacagca

SEQ ID NO: 5848541 - DNA, 25 bp, Homo sapien
cgttacagcgcaacagcagcctgca

SEQ ID NO: 5848542 - DNA, 25 bp, Homo sapien
agcgcaacagcagcctgcagctgga

SEQ ID NO: 5848543 - DNA, 25 bp, Homo sapien
cagcagcctgcagctggattacgca

SEQ ID NO: 5848544 - DNA, 25 bp, Homo sapien
ctgcagctggattacgcaacagtaa

SEQ ID NO: 5848545 - DNA, 25 bp, Homo sapien
catcagcgcgcaagagggcagaccg

SEQ ID NO: 5848546 - DNA, 25 bp, Homo sapien
cgcaagagggcagaccgatagaatc

SEQ ID NO: 5848547 - DNA, 25 bp, Homo sapien
gggcagaccgatagaatcattggta

SEQ ID NO: 5848548 - DNA, 25 bp, Homo sapien
gaccgatagaatcattggtaatgag

SEQ ID NO: 5848549 - DNA, 25 bp, Homo sapien
agaatcattggtaatgagcgccgga

SEQ ID NO: 5848550 - DNA, 25 bp, Homo sapien
gggaaaactgtcgccagttgtgcac

SEQ ID NO: 5848551 - DNA, 25 bp, Homo sapien
ttggtaatgagcgccggattacgcg

SEQ ID NO: 5848552 - DNA, 25 bp, Homo sapien
cgccagttgtgcacttttacaagcc

SEQ ID NO: 5848553 - DNA, 25 bp, Homo sapien
atgagcgccggattacgcgcgcttg

SEQ ID NO: 5848554 - DNA, 25 bp, Homo sapien
cacttttacaagccgcaaaggcagc

SEQ ID NO: 5848555 - DNA, 25 bp, Homo sapien
caagccgcaaaggcagcaggctacc

SEQ ID NO: 5848556 - DNA, 25 bp, Homo sapien
gcaaaggcagcaggctaccggacgg

SEQ ID NO: 5848557 - DNA, 25 bp, Homo sapien
aggtttacgcaatagcgacgcgctg

SEQ ID NO: 5848558 - DNA, 25 bp, Homo sapien
cgcaatagcgacgcgctggcgttac

SEQ ID NO: 5848559 - DNA, 25 bp, Homo sapien
gcgacgcgctggcgttacagcgcaa

SEQ ID NO: 5848560 - DNA, 25 bp, Homo sapien
gaagcggatttttattttcatcaag

SEQ ID NO: 5848561 - DNA, 25 bp, Homo sapien
ccggcaaataaagcggcgagcgcta

SEQ ID NO: 5848562 - DNA, 25 bp, Homo sapien
cacgcttttcagcatcaccaattca

SEQ ID NO: 5848563 - DNA, 25 bp, Homo sapien
ggcatggggatcaatggagttaatc

SEQ ID NO: 5848564 - DNA, 25 bp, Homo sapien
aatgatgacgcaggcatcgaaagca

SEQ ID NO: 5848565 - DNA, 25 bp, Homo sapien
gcgcggaagcggatttttattttca

SEQ ID NO: 5848566 - DNA, 25 bp, Homo sapien
aatggtgacgccccgttccatttct

SEQ ID NO: 5848567 - DNA, 25 bp, Homo sapien
cccgttccatttcttcaagaatctt

SEQ ID NO: 5848568 - DNA, 25 bp, Homo sapien
tattttcatcaagcgtaaatccttc

SEQ ID NO: 5848569 - DNA, 25 bp, Homo sapien
tacatcgcttctttataggagagat

SEQ ID NO: 5848570 - DNA, 25 bp, Homo sapien
ttttcgaagagatgatcgtagcgcc

SEQ ID NO: 5848571 - DNA, 25 bp, Homo sapien
tgatcgtagcgcctttagcagcgta

SEQ ID NO: 5848572 - DNA, 25 bp, Homo sapien
ccatttcttcaagaatctttttctg

SEQ ID NO: 5848573 - DNA, 25 bp, Homo sapien
ggtcagccgccttttttctattaca

SEQ ID NO: 5848574 - DNA, 25 bp, Homo sapien
catcaagcgtaaatccttctccgag

SEQ ID NO: 5848575 - DNA, 25 bp, Homo sapien
tacatctatatcctcttttgtgtag

SEQ ID NO: 5848576 - DNA, 25 bp, Homo sapien
aagagatgatcgtagcgcctttagc

SEQ ID NO: 5848577 - DNA, 25 bp, Homo sapien
catcgcttaccgctacaaaggcatg

SEQ ID NO: 5848578 - DNA, 25 bp, Homo sapien
ctttagcagcgtatccgccttcctg

SEQ ID NO: 5848579 - DNA, 25 bp, Homo sapien
tattacatgtcagcgcggaagcgga

SEQ ID NO: 5848580 - DNA, 25 bp, Homo sapien
gcgtaaatccttctccgagcacatc

SEQ ID NO: 5848581 - DNA, 25 bp, Homo sapien
gaaccttgtcctttcaaaatggtga

SEQ ID NO: 5848582 - DNA, 25 bp, Homo sapien
gcttctttataggagagataagtaa

SEQ ID NO: 5848583 - DNA, 25 bp, Homo sapien
ttaccgctacaaaggcatggggatc

SEQ ID NO: 5848584 - DNA, 25 bp, Homo sapien
gggatcaatggagttaatcacgctt

SEQ ID NO: 5848585 - DNA, 25 bp, Homo sapien
gaaagcaaacatcgttctgcccatc

SEQ ID NO: 5848586 - DNA, 25 bp, Homo sapien
tgtcctttcaaaatggtgacgcccc

SEQ ID NO: 5848587 - DNA, 25 bp, Homo sapien
ggcaccacacaataaagtacatcta

SEQ ID NO: 5848588 - DNA, 25 bp, Homo sapien
gcacatcgtgaacatcgcttaccgc

SEQ ID NO: 5848589 - DNA, 25 bp, Homo sapien
ccgccttttttctattacatgtcag

SEQ ID NO: 5848590 - DNA, 25 bp, Homo sapien
ggtcgtttttcgaagagatgatcgt

SEQ ID NO: 5848591 - DNA, 25 bp, Homo sapien
aatacgccggcaaataaagcggcga

SEQ ID NO: 5848592 - DNA, 25 bp, Homo sapien
gcgtatacatcgcttctttatagga

SEQ ID NO: 5848593 - DNA, 25 bp, Homo sapien
gaataaaatcgattaatcttgccgc

SEQ ID NO: 5848594 - DNA, 25 bp, Homo sapien
agcaaagacaaaatgatgacgcagg

SEQ ID NO: 5848595 - DNA, 25 bp, Homo sapien
ccggctccgatgaatacgccggcaa

SEQ ID NO: 5848596 - DNA, 25 bp, Homo sapien
tgacgccccgttccatttcttcaag

SEQ ID NO: 5848597 - DNA, 25 bp, Homo sapien
cttcctgaataaaatcgattaatct

SEQ ID NO: 5848598 - DNA, 25 bp, Homo sapien
aaacatcgttctgcccatcggaatc

SEQ ID NO: 5848599 - DNA, 25 bp, Homo sapien
ggcatcgaaagcaaacatcgttctg

SEQ ID NO: 5848600 - DNA, 25 bp, Homo sapien
tagcgcctttagcagcgtatccgcc

SEQ ID NO: 5848601 - DNA, 25 bp, Homo sapien
ctacaaatacagctaccagcgtata

SEQ ID NO: 5848602 - DNA, 25 bp, Homo sapien
tatcaacaccgcctgtcgtaccgcc

SEQ ID NO: 5848603 - DNA, 25 bp, Homo sapien
cgtgaacatcgcttaccgctacaaa

SEQ ID NO: 5848604 - DNA, 25 bp, Homo sapien
aatcgattaatcttgccgctacaaa

SEQ ID NO: 5848605 - DNA, 25 bp, Homo sapien
aataaagcggcgagcgctaagtcgt

SEQ ID NO: 5848606 - DNA, 25 bp, Homo sapien
aacgtgcgatgatatcaacaccgcc

SEQ ID NO: 5848607 - DNA, 25 bp, Homo sapien
ctccgagcacatcgtgaacatcgct

SEQ ID NO: 5848608 - DNA, 25 bp, Homo sapien
gaatcccaaaatacttattcactaa

SEQ ID NO: 5848609 - DNA, 25 bp, Homo sapien
gaatctttttctgaatcaggtcgtt

SEQ ID NO: 5848610 - DNA, 25 bp, Homo sapien
agacaaaatgatgacgcaggcatcg

SEQ ID NO: 5848611 - DNA, 25 bp, Homo sapien
gaatcaggtcgtttttcgaagagat

SEQ ID NO: 5848612 - DNA, 25 bp, Homo sapien
taagtaagcaaagacaaaatgatga

SEQ ID NO: 5848613 - DNA, 25 bp, Homo sapien
cttattcactaaacgtgcgatgata

SEQ ID NO: 5848614 - DNA, 25 bp, Homo sapien
gagagataagtaagcaaagacaaaa

SEQ ID NO: 5848615 - DNA, 25 bp, Homo sapien
ttcaaaatggtgacgccccgttcca

SEQ ID NO: 5848616 - DNA, 25 bp, Homo sapien
ttgccgctacaaatacagctaccag

SEQ ID NO: 5848617 - DNA, 25 bp, Homo sapien
tttttcggcaccacacaataaagta

SEQ ID NO: 5848618 - DNA, 25 bp, Homo sapien
caattcatttttcggcaccacacaa

SEQ ID NO: 5848619 - DNA, 25 bp, Homo sapien
atacagctaccagcgtatacatcgc

SEQ ID NO: 5848620 - DNA, 25 bp, Homo sapien
gcggcgagcgctaagtcgtgctgaa

SEQ ID NO: 5848621 - DNA, 25 bp, Homo sapien
aaaatacttattcactaaacgtgcg

SEQ ID NO: 5848622 - DNA, 25 bp, Homo sapien
ctacaaaggcatggggatcaatgga

SEQ ID NO: 5848623 - DNA, 25 bp, Homo sapien
ccgatgaatacgccggcaaataaag

SEQ ID NO: 5848624 - DNA, 25 bp, Homo sapien
ccatcggaatcccaaaatacttatt

SEQ ID NO: 5848625 - DNA, 25 bp, Homo sapien
ataatacccagtccggctccgatga

SEQ ID NO: 5848626 - DNA, 25 bp, Homo sapien
gacgcaggcatcgaaagcaaacatc

SEQ ID NO: 5848627 - DNA, 25 bp, Homo sapien
cttcaagaatctttttctgaatcag

SEQ ID NO: 5848628 - DNA, 25 bp, Homo sapien
tgtgtaggaaccttgtcctttcaaa

SEQ ID NO: 5848629 - DNA, 25 bp, Homo sapien
ttctgcccatcggaatcccaaaata

SEQ ID NO: 5848630 - DNA, 25 bp, Homo sapien
cagcgtatccgccttcctgaataaa

SEQ ID NO: 5848631 - DNA, 25 bp, Homo sapien
ctcttttgtgtaggaaccttgtcct

SEQ ID NO: 5848632 - DNA, 25 bp, Homo sapien
gttaatcacgcttttcagcatcacc

SEQ ID NO: 5848633 - DNA, 25 bp, Homo sapien
atgtcagcgcggaagcggattttta

SEQ ID NO: 5848634 - DNA, 25 bp, Homo sapien
taaagtacatctatatcctcttttg

SEQ ID NO: 5848635 - DNA, 25 bp, Homo sapien
ttaatcttgccgctacaaatacagc

SEQ ID NO: 5848636 - DNA, 25 bp, Homo sapien
aatggagttaatcacgcttttcagc

SEQ ID NO: 5848637 - DNA, 25 bp, Homo sapien
cgatgatatcaacaccgcctgtcgt

SEQ ID NO: 5848638 - DNA, 25 bp, Homo sapien
acacaataaagtacatctatatcct

SEQ ID NO: 5848639 - DNA, 25 bp, Homo sapien
ttttctgaatcaggtcgtttttcga

SEQ ID NO: 5848640 - DNA, 25 bp, Homo sapien
tttttctattacatgtcagcgcgga

SEQ ID NO: 5848641 - DNA, 25 bp, Homo sapien
cactaaacgtgcgatgatatcaaca

SEQ ID NO: 5848642 - DNA, 25 bp, Homo sapien
atccgccttcctgaataaaatcgat

SEQ ID NO: 5848643 - DNA, 25 bp, Homo sapien
cccagtccggctccgatgaatacgc

SEQ ID NO: 5848644 - DNA, 25 bp, Homo sapien
caccgcctgtcgtaccgccgaactt

SEQ ID NO: 5848645 - DNA, 25 bp, Homo sapien
ttataggagagataagtaagcaaag

SEQ ID NO: 5848646 - DNA, 25 bp, Homo sapien
tttcagcatcaccaattcatttttc

SEQ ID NO: 5848647 - DNA, 25 bp, Homo sapien
catcaccaattcatttttcggcacc

SEQ ID NO: 5848648 - DNA, 25 bp, Homo sapien
atccttctccgagcacatcgtgaac

SEQ ID NO: 5848649 - DNA, 25 bp, Homo sapien
tatatcctcttttgtgtaggaacct

SEQ ID NO: 5848650 - DNA, 25 bp, Homo sapien
ctaccagcgtatacatcgcttcttt

SEQ ID NO: 5848651 - DNA, 25 bp, Homo sapien
atgccttcgttcgtttctaaaagca

SEQ ID NO: 5848652 - DNA, 25 bp, Homo sapien
gtgcgtcatataatcccggtaccgt

SEQ ID NO: 5848653 - DNA, 25 bp, Homo sapien
gtttctcaaagcatagtaaaatatg

SEQ ID NO: 5848654 - DNA, 25 bp, Homo sapien
gaggcttgtcgcgatgtccttcaat

SEQ ID NO: 5848655 - DNA, 25 bp, Homo sapien
atgccgatcccaatgatcactgaac

SEQ ID NO: 5848656 - DNA, 25 bp, Homo sapien
ctttctaaagttcggcgagtttcat

SEQ ID NO: 5848657 - DNA, 25 bp, Homo sapien
atcccaatgatcactgaacgtacgc

SEQ ID NO: 5848658 - DNA, 25 bp, Homo sapien
tcatctggaaaatcattaggctgct

SEQ ID NO: 5848659 - DNA, 25 bp, Homo sapien
aaatccgtgcgtcatataatcccgg

SEQ ID NO: 5848660 - DNA, 25 bp, Homo sapien
atagtaaaatatgctggatgacgcc

SEQ ID NO: 5848661 - DNA, 25 bp, Homo sapien
caaaatcaacgggcttgtaccaaca

SEQ ID NO: 5848662 - DNA, 25 bp, Homo sapien
gtataccaaaatcaacgggcttgta

SEQ ID NO: 5848663 - DNA, 25 bp, Homo sapien
tgacgccggcccgatcaattttttc

SEQ ID NO: 5848664 - DNA, 25 bp, Homo sapien
cgtacgcggtcttcttcagcctgca

SEQ ID NO: 5848665 - DNA, 25 bp, Homo sapien
ggtaccgtttctcaaagcatagtaa

SEQ ID NO: 5848666 - DNA, 25 bp, Homo sapien
ttagtgccaataccgagcgcatagc

SEQ ID NO: 5848667 - DNA, 25 bp, Homo sapien
tcttcactttctaaagttcggcgag

SEQ ID NO: 5848668 - DNA, 25 bp, Homo sapien
tggttaacgttaatgccgatcccaa

SEQ ID NO: 5848669 - DNA, 25 bp, Homo sapien
caaagcatagtaaaatatgctggat

SEQ ID NO: 5848670 - DNA, 25 bp, Homo sapien
gatgtccttcaattcatctggaaaa

SEQ ID NO: 5848671 - DNA, 25 bp, Homo sapien
acgttctggctctcatattagtgcc

SEQ ID NO: 5848672 - DNA, 25 bp, Homo sapien
gcccgatcaattttttccccagcag

SEQ ID NO: 5848673 - DNA, 25 bp, Homo sapien
ctaaagttcggcgagtttcatccct

SEQ ID NO: 5848674 - DNA, 25 bp, Homo sapien
cgcaggcgatactgcccaatggaag

SEQ ID NO: 5848675 - DNA, 25 bp, Homo sapien
cgatactgcccaatggaagtatacc

SEQ ID NO: 5848676 - DNA, 25 bp, Homo sapien
caacgggcttgtaccaacacattag

SEQ ID NO: 5848677 - DNA, 25 bp, Homo sapien
cggcgtaaatccgtgcgtcatataa

SEQ ID NO: 5848678 - DNA, 25 bp, Homo sapien
gttcggcgagtttcatccctctgtc

SEQ ID NO: 5848679 - DNA, 25 bp, Homo sapien
tgtctatctattttaataataggtg

SEQ ID NO: 5848680 - DNA, 25 bp, Homo sapien
acattagcccaattcgatatcggca

SEQ ID NO: 5848681 - DNA, 25 bp, Homo sapien
ccgagcgcatagctttcccataaaa

SEQ ID NO: 5848682 - DNA, 25 bp, Homo sapien
aggattcttcactttctaaagttcg

SEQ ID NO: 5848683 - DNA, 25 bp, Homo sapien
cgagtttcatccctctgtcccagtc

SEQ ID NO: 5848684 - DNA, 25 bp, Homo sapien
cgtttaacgttctggctctcatatt

SEQ ID NO: 5848685 - DNA, 25 bp, Homo sapien
ggaaaatcattaggctgctggttaa

SEQ ID NO: 5848686 - DNA, 25 bp, Homo sapien
ctttcccataaaagcttaatcggcg

SEQ ID NO: 5848687 - DNA, 25 bp, Homo sapien
tgcccaatggaagtataccaaaatc

SEQ ID NO: 5848688 - DNA, 25 bp, Homo sapien
aaatatgctggatgacgccggcccg

SEQ ID NO: 5848689 - DNA, 25 bp, Homo sapien
ataggtgcagttcgcaggcgatact

SEQ ID NO: 5848690 - DNA, 25 bp, Homo sapien
gttccgtttaacgttctggctctca

SEQ ID NO: 5848691 - DNA, 25 bp, Homo sapien
ttcgatatcggcagaatagattttt

SEQ ID NO: 5848692 - DNA, 25 bp, Homo sapien
ggctgctggttaacgttaatgccga

SEQ ID NO: 5848693 - DNA, 25 bp, Homo sapien
tcttcagcctgcatttccgttagga

SEQ ID NO: 5848694 - DNA, 25 bp, Homo sapien
gcatagctttcccataaaagcttaa

SEQ ID NO: 5848695 - DNA, 25 bp, Homo sapien
gaacgccttcatcatctatacctaa

SEQ ID NO: 5848696 - DNA, 25 bp, Homo sapien
tcatattagtgccaataccgagcgc

SEQ ID NO: 5848697 - DNA, 25 bp, Homo sapien
agactgctgcaatgtctatctattt

SEQ ID NO: 5848698 - DNA, 25 bp, Homo sapien
tcatccctctgtcccagtccttttt

SEQ ID NO: 5848699 - DNA, 25 bp, Homo sapien
cttaatcggcgtaaatccgtgcgtc

SEQ ID NO: 5848700 - DNA, 25 bp, Homo sapien
caaggcagactgctgcaatgtctat

SEQ ID NO: 5848701 - DNA, 25 bp, Homo sapien
catataatcccggtaccgtttctca

SEQ ID NO: 5848702 - DNA, 25 bp, Homo sapien
ttggatcaaggcagactgctgcaat

SEQ ID NO: 5848703 - DNA, 25 bp, Homo sapien
tctattttaataataggtgcagttc

SEQ ID NO: 5848704 - DNA, 25 bp, Homo sapien
ccttttttggatcaaggcagactgc

SEQ ID NO: 5848705 - DNA, 25 bp, Homo sapien
gcttgtaccaacacattagcccaat

SEQ ID NO: 5848706 - DNA, 25 bp, Homo sapien
gcccaattcgatatcggcagaatag

SEQ ID NO: 5848707 - DNA, 25 bp, Homo sapien
cccagtccttttttggatcaaggca

SEQ ID NO: 5848708 - DNA, 25 bp, Homo sapien
cataaaagcttaatcggcgtaaatc

SEQ ID NO: 5848709 - DNA, 25 bp, Homo sapien
caataccgagcgcatagctttccca

SEQ ID NO: 5848710 - DNA, 25 bp, Homo sapien
tttctaaaagcagaacgccttcatc

SEQ ID NO: 5848711 - DNA, 25 bp, Homo sapien
actgaacgtacgcggtcttcttcag

SEQ ID NO: 5848712 - DNA, 25 bp, Homo sapien
ttaataataggtgcagttcgcaggc

SEQ ID NO: 5848713 - DNA, 25 bp, Homo sapien
cagcagcttggctgaggcttgtcgc

SEQ ID NO: 5848714 - DNA, 25 bp, Homo sapien
atggaagtataccaaaatcaacggg

SEQ ID NO: 5848715 - DNA, 25 bp, Homo sapien
catctatacctaacgccttaccgta

SEQ ID NO: 5848716 - DNA, 25 bp, Homo sapien
atgatcactgaacgtacgcggtctt

SEQ ID NO: 5848717 - DNA, 25 bp, Homo sapien
tggctctcatattagtgccaatacc

SEQ ID NO: 5848718 - DNA, 25 bp, Homo sapien
atcccggtaccgtttctcaaagcat

SEQ ID NO: 5848719 - DNA, 25 bp, Homo sapien
catttccgttaggataccgactgtt

SEQ ID NO: 5848720 - DNA, 25 bp, Homo sapien
cttcatcatctatacctaacgcctt

SEQ ID NO: 5848721 - DNA, 25 bp, Homo sapien
tgtcgcgatgtccttcaattcatct

SEQ ID NO: 5848722 - DNA, 25 bp, Homo sapien
ctgcaatgtctatctattttaataa

SEQ ID NO: 5848723 - DNA, 25 bp, Homo sapien
tcattaggctgctggttaacgttaa

SEQ ID NO: 5848724 - DNA, 25 bp, Homo sapien
ctctgtcccagtccttttttggatc

SEQ ID NO: 5848725 - DNA, 25 bp, Homo sapien
acgttaatgccgatcccaatgatca

SEQ ID NO: 5848726 - DNA, 25 bp, Homo sapien
gctggatgacgccggcccgatcaat

SEQ ID NO: 5848727 - DNA, 25 bp, Homo sapien
cagttcgcaggcgatactgcccaat

SEQ ID NO: 5848728 - DNA, 25 bp, Homo sapien
gcctgcatttccgttaggataccga

SEQ ID NO: 5848729 - DNA, 25 bp, Homo sapien
tttccccagcagcttggctgaggct

SEQ ID NO: 5848730 - DNA, 25 bp, Homo sapien
agaatagatttttttaatgccttcg

SEQ ID NO: 5848731 - DNA, 25 bp, Homo sapien
aaagcagaacgccttcatcatctat

SEQ ID NO: 5848732 - DNA, 25 bp, Homo sapien
accaacacattagcccaattcgata

SEQ ID NO: 5848733 - DNA, 25 bp, Homo sapien
caattttttccccagcagcttggct

SEQ ID NO: 5848734 - DNA, 25 bp, Homo sapien
ttggctgaggcttgtcgcgatgtcc

SEQ ID NO: 5848735 - DNA, 25 bp, Homo sapien
cggtcttcttcagcctgcatttccg

SEQ ID NO: 5848736 - DNA, 25 bp, Homo sapien
ttcaattcatctggaaaatcattag

SEQ ID NO: 5848737 - DNA, 25 bp, Homo sapien
tcgttcgtttctaaaagcagaacgc

SEQ ID NO: 5848738 - DNA, 25 bp, Homo sapien
atcggcagaatagatttttttaatg

SEQ ID NO: 5848739 - DNA, 25 bp, Homo sapien
gagtatgataatgtatgtcttaatt

SEQ ID NO: 5848740 - DNA, 25 bp, Homo sapien
gtgcttgtcccgacagcgaaacctg

SEQ ID NO: 5848741 - DNA, 25 bp, Homo sapien
attctcatcagtcgcaatgattcag

SEQ ID NO: 5848742 - DNA, 25 bp, Homo sapien
gtcatcggatttacagtgctaatta

SEQ ID NO: 5848743 - DNA, 25 bp, Homo sapien
tgctctctatttagcggagaaatat

SEQ ID NO: 5848744 - DNA, 25 bp, Homo sapien
aactgtcctttcatccataagcgga

SEQ ID NO: 5848745 - DNA, 25 bp, Homo sapien
cgcaatgattcagctcgctgaggaa

SEQ ID NO: 5848746 - DNA, 25 bp, Homo sapien
gttcttacacggcacaagcagacaa

SEQ ID NO: 5848747 - DNA, 25 bp, Homo sapien
ggatttacagtgctaattatgccat

SEQ ID NO: 5848748 - DNA, 25 bp, Homo sapien
attcagctcgctgaggaagagggac

SEQ ID NO: 5848749 - DNA, 25 bp, Homo sapien
acaccgtacttatggccgctgattc

SEQ ID NO: 5848750 - DNA, 25 bp, Homo sapien
atggtacacctctttacgtatatga

SEQ ID NO: 5848751 - DNA, 25 bp, Homo sapien
agcgtgctaaaagctttaagcaggc

SEQ ID NO: 5848752 - DNA, 25 bp, Homo sapien
taatgtatgtcttaattatgaaggg

SEQ ID NO: 5848753 - DNA, 25 bp, Homo sapien
gaaagcacaggtggcatatgcgagc

SEQ ID NO: 5848754 - DNA, 25 bp, Homo sapien
tacgtgagcgtgctaaaagctttaa

SEQ ID NO: 5848755 - DNA, 25 bp, Homo sapien
aaatcaacatggtcatttagaaatc

SEQ ID NO: 5848756 - DNA, 25 bp, Homo sapien
caaagcattctcatcagtcgcaatg

SEQ ID NO: 5848757 - DNA, 25 bp, Homo sapien
agagggactttctttagatgtcgta

SEQ ID NO: 5848758 - DNA, 25 bp, Homo sapien
aagcggagaaagagggaatgacatt

SEQ ID NO: 5848759 - DNA, 25 bp, Homo sapien
tttacgtatatgatgtggctttaat

SEQ ID NO: 5848760 - DNA, 25 bp, Homo sapien
acagtgctaattatgccatggcaag

SEQ ID NO: 5848761 - DNA, 25 bp, Homo sapien
acccagcatcgttcaccccaaaaat

SEQ ID NO: 5848762 - DNA, 25 bp, Homo sapien
tggcaagcatcaaatcccttcagac

SEQ ID NO: 5848763 - DNA, 25 bp, Homo sapien
ccaattcataatcgcattgaaactg

SEQ ID NO: 5848764 - DNA, 25 bp, Homo sapien
agggctgaaagcacaggtggcatat

SEQ ID NO: 5848765 - DNA, 25 bp, Homo sapien
taattatgaagggacagtccataaa

SEQ ID NO: 5848766 - DNA, 25 bp, Homo sapien
atgccatggcaagcatcaaatccct

SEQ ID NO: 5848767 - DNA, 25 bp, Homo sapien
agcggagaaatatggtacacctctt

SEQ ID NO: 5848768 - DNA, 25 bp, Homo sapien
gcgcaaaagtaagacccagcatcgt

SEQ ID NO: 5848769 - DNA, 25 bp, Homo sapien
ccaaaaatcgcttaaggcagcctac

SEQ ID NO: 5848770 - DNA, 25 bp, Homo sapien
aaactgactgaagagtatgataatg

SEQ ID NO: 5848771 - DNA, 25 bp, Homo sapien
tgaggaagagggactttctttagat

SEQ ID NO: 5848772 - DNA, 25 bp, Homo sapien
cgctgtggcaggtgcttgtcccgac

SEQ ID NO: 5848773 - DNA, 25 bp, Homo sapien
atcgcttaaggcagcctaccaattc

SEQ ID NO: 5848774 - DNA, 25 bp, Homo sapien
tgaagggacagtccataaaactgtc

SEQ ID NO: 5848775 - DNA, 25 bp, Homo sapien
tcatttagaaatcggaggtgtggat

SEQ ID NO: 5848776 - DNA, 25 bp, Homo sapien
aaatcccttcagacaccgtacttat

SEQ ID NO: 5848777 - DNA, 25 bp, Homo sapien
tttcatataaaagggctcgtcatcg

SEQ ID NO: 5848778 - DNA, 25 bp, Homo sapien
ctcgttgctttatttcatataaaag

SEQ ID NO: 5848779 - DNA, 25 bp, Homo sapien
tacttatggccgctgattcccttta

SEQ ID NO: 5848780 - DNA, 25 bp, Homo sapien
cggaggtgtggatgctctctattta

SEQ ID NO: 5848781 - DNA, 25 bp, Homo sapien
gacattgttcttacacggcacaagc

SEQ ID NO: 5848782 - DNA, 25 bp, Homo sapien
aagtaagacccagcatcgttcaccc

SEQ ID NO: 5848783 - DNA, 25 bp, Homo sapien
tggcaggtgcttgtcccgacagcga

SEQ ID NO: 5848784 - DNA, 25 bp, Homo sapien
atgtcttaattatgaagggacagtc

SEQ ID NO: 5848785 - DNA, 25 bp, Homo sapien
atcagtcgcaatgattcagctcgct

SEQ ID NO: 5848786 - DNA, 25 bp, Homo sapien
cacaagcagacaaaatcaacatggt

SEQ ID NO: 5848787 - DNA, 25 bp, Homo sapien
gacagtccataaaactgtcctttca

SEQ ID NO: 5848788 - DNA, 25 bp, Homo sapien
ctttaacggaaaggcgctgtggcag

SEQ ID NO: 5848789 - DNA, 25 bp, Homo sapien
gtttatttctgcagggctgaaagca

SEQ ID NO: 5848790 - DNA, 25 bp, Homo sapien
ctttaatacgtgagcgtgctaaaag

SEQ ID NO: 5848791 - DNA, 25 bp, Homo sapien
gaaagagggaatgacattgttctta

SEQ ID NO: 5848792 - DNA, 25 bp, Homo sapien
ctaattatgccatggcaagcatcaa

SEQ ID NO: 5848793 - DNA, 25 bp, Homo sapien
gtcccgacagcgaaacctggcgcaa

SEQ ID NO: 5848794 - DNA, 25 bp, Homo sapien
acatggtcatttagaaatcggaggt

SEQ ID NO: 5848795 - DNA, 25 bp, Homo sapien
agaaatcggaggtgtggatgctctc

SEQ ID NO: 5848796 - DNA, 25 bp, Homo sapien
gcatcaaatcccttcagacaccgta

SEQ ID NO: 5848797 - DNA, 25 bp, Homo sapien
ggcatatgcgagcaaagcattctca

SEQ ID NO: 5848798 - DNA, 25 bp, Homo sapien
gctttatttcatataaaagggctcg

SEQ ID NO: 5848799 - DNA, 25 bp, Homo sapien
ttctgcagggctgaaagcacaggtg

SEQ ID NO: 5848800 - DNA, 25 bp, Homo sapien
taaggcagcctaccaattcataatc

SEQ ID NO: 5848801 - DNA, 25 bp, Homo sapien
tgtggatgctctctatttagcggag

SEQ ID NO: 5848802 - DNA, 25 bp, Homo sapien
atgtggctttaatacgtgagcgtgc

SEQ ID NO: 5848803 - DNA, 25 bp, Homo sapien
taaaagggctcgtcatcggatttac

SEQ ID NO: 5848804 - DNA, 25 bp, Homo sapien
cacctctttacgtatatgatgtggc

SEQ ID NO: 5848805 - DNA, 25 bp, Homo sapien
atgatactcgttgctttatttcata

SEQ ID NO: 5848806 - DNA, 25 bp, Homo sapien
gctcgctgaggaagagggactttct

SEQ ID NO: 5848807 - DNA, 25 bp, Homo sapien
tgcgagcaaagcattctcatcagtc

SEQ ID NO: 5848808 - DNA, 25 bp, Homo sapien
ctttaagcaggcgtttatttctgca

SEQ ID NO: 5848809 - DNA, 25 bp, Homo sapien
gcaggcgtttatttctgcagggctg

SEQ ID NO: 5848810 - DNA, 25 bp, Homo sapien
acaggtggcatatgcgagcaaagca

SEQ ID NO: 5848811 - DNA, 25 bp, Homo sapien
ctatttagcggagaaatatggtaca

SEQ ID NO: 5848812 - DNA, 25 bp, Homo sapien
cgcattgaaactgactgaagagtat

SEQ ID NO: 5848813 - DNA, 25 bp, Homo sapien
cttcagacaccgtacttatggccgc

SEQ ID NO: 5848814 - DNA, 25 bp, Homo sapien
cataatcgcattgaaactgactgaa

SEQ ID NO: 5848815 - DNA, 25 bp, Homo sapien
ggctcgtcatcggatttacagtgct

SEQ ID NO: 5848816 - DNA, 25 bp, Homo sapien
aacctggcgcaaaagtaagacccag

SEQ ID NO: 5848817 - DNA, 25 bp, Homo sapien
actgaagagtatgataatgtatgtc

SEQ ID NO: 5848818 - DNA, 25 bp, Homo sapien
ttcaccccaaaaatcgcttaaggca

SEQ ID NO: 5848819 - DNA, 25 bp, Homo sapien
cctttcatccataagcggagaaaga

SEQ ID NO: 5848820 - DNA, 25 bp, Homo sapien
ccataaaactgtcctttcatccata

SEQ ID NO: 5848821 - DNA, 25 bp, Homo sapien
acacggcacaagcagacaaaatcaa

SEQ ID NO: 5848822 - DNA, 25 bp, Homo sapien
atccataagcggagaaagagggaat

SEQ ID NO: 5848823 - DNA, 25 bp, Homo sapien
agcctaccaattcataatcgcattg

SEQ ID NO: 5848824 - DNA, 25 bp, Homo sapien
gaaaggcgctgtggcaggtgcttgt

SEQ ID NO: 5848825 - DNA, 25 bp, Homo sapien
gaaatatggtacacctctttacgta

SEQ ID NO: 5848826 - DNA, 25 bp, Homo sapien
tatatgatgtggctttaatacgtga

SEQ ID NO: 5848827 - DNA, 25 bp, Homo sapien
ctaaaagctttaagcaggcgtttat

SEQ ID NO: 5848828 - DNA, 25 bp, Homo sapien
catcgttcaccccaaaaatcgctta

SEQ ID NO: 5848829 - DNA, 25 bp, Homo sapien
tggccgctgattccctttaacggaa

SEQ ID NO: 5848830 - DNA, 25 bp, Homo sapien
acagcgaaacctggcgcaaaagtaa

SEQ ID NO: 5848831 - DNA, 25 bp, Homo sapien
cagacaaaatcaacatggtcattta

SEQ ID NO: 5848832 - DNA, 25 bp, Homo sapien
gggaatgacattgttcttacacggc

SEQ ID NO: 5848833 - DNA, 25 bp, Homo sapien
aaggtgcttgaaggagcagaaatac

SEQ ID NO: 5848834 - DNA, 25 bp, Homo sapien
cagcttcgataattttttcaacgta

SEQ ID NO: 5848835 - DNA, 25 bp, Homo sapien
ctttcacagcttcgataattttttc

SEQ ID NO: 5848836 - DNA, 25 bp, Homo sapien
tccattgaaatttcttccaattcgc

SEQ ID NO: 5848837 - DNA, 25 bp, Homo sapien
cattttctttcacagcttcgataat

SEQ ID NO: 5848838 - DNA, 25 bp, Homo sapien
gatacaaatgaatatgaatctctcc

SEQ ID NO: 5848839 - DNA, 25 bp, Homo sapien
acaggcgcaatgagacctttcttaa

SEQ ID NO: 5848840 - DNA, 25 bp, Homo sapien
ttttgaagattttttccgctgctaa

SEQ ID NO: 5848841 - DNA, 25 bp, Homo sapien
ggagcagaaatacgcgtaagcttta

SEQ ID NO: 5848842 - DNA, 25 bp, Homo sapien
caacgtattcagtggcatgaagcgg

SEQ ID NO: 5848843 - DNA, 25 bp, Homo sapien
attcgcacgccgaatgatgaaacga

SEQ ID NO: 5848844 - DNA, 25 bp, Homo sapien
cggttcgatccaaatttccggaatg

SEQ ID NO: 5848845 - DNA, 25 bp, Homo sapien
aactgtccgcaaaaccggctgaatc

SEQ ID NO: 5848846 - DNA, 25 bp, Homo sapien
ccgcaaaaccggctgaatccattga

SEQ ID NO: 5848847 - DNA, 25 bp, Homo sapien
cgaataccgaaacctcctccaagat

SEQ ID NO: 5848848 - DNA, 25 bp, Homo sapien
ccaaccgtataaagagttgtgcctg

SEQ ID NO: 5848849 - DNA, 25 bp, Homo sapien
agattttttccgctgctaacacaaa

SEQ ID NO: 5848850 - DNA, 25 bp, Homo sapien
gtataaagagttgtgcctgcgtctc

SEQ ID NO: 5848851 - DNA, 25 bp, Homo sapien
cgtctcccacgagagaacggcccgg

SEQ ID NO: 5848852 - DNA, 25 bp, Homo sapien
tggcatgaagcggttcatcatcttc

SEQ ID NO: 5848853 - DNA, 25 bp, Homo sapien
ctcctccaagattcagcaccttgga

SEQ ID NO: 5848854 - DNA, 25 bp, Homo sapien
gaaacgattgtacagcttatccact

SEQ ID NO: 5848855 - DNA, 25 bp, Homo sapien
catcttccgtataacgaataccgaa

SEQ ID NO: 5848856 - DNA, 25 bp, Homo sapien
caacaacgttgtaaaactgtccgca

SEQ ID NO: 5848857 - DNA, 25 bp, Homo sapien
ttcttaattcgcacgccgaatgatg

SEQ ID NO: 5848858 - DNA, 25 bp, Homo sapien
tttagtccaaaatatatgctggatg

SEQ ID NO: 5848859 - DNA, 25 bp, Homo sapien
gaagcggttcatcatcttccgtata

SEQ ID NO: 5848860 - DNA, 25 bp, Homo sapien
gaaatttcttccaattcgccagaaa

SEQ ID NO: 5848861 - DNA, 25 bp, Homo sapien
atctcttttagtccaaaatatatgc

SEQ ID NO: 5848862 - DNA, 25 bp, Homo sapien
gagagaacggcccggttcgatccaa

SEQ ID NO: 5848863 - DNA, 25 bp, Homo sapien
accttggatacaaatgaatatgaat

SEQ ID NO: 5848864 - DNA, 25 bp, Homo sapien
tagctagagagggacgcaacaacgt

SEQ ID NO: 5848865 - DNA, 25 bp, Homo sapien
caattgttgcggatcaaattgaagg

SEQ ID NO: 5848866 - DNA, 25 bp, Homo sapien
gtgcctgcgtctcccacgagagaac

SEQ ID NO: 5848867 - DNA, 25 bp, Homo sapien
gctgaatccattgaaatttcttcca

SEQ ID NO: 5848868 - DNA, 25 bp, Homo sapien
aaaccggccgtatcaaagatttgcg

SEQ ID NO: 5848869 - DNA, 25 bp, Homo sapien
tcggtaaagttgtggaagcaattgt

SEQ ID NO: 5848870 - DNA, 25 bp, Homo sapien
cttccaattcgccagaaatcggtaa

SEQ ID NO: 5848871 - DNA, 25 bp, Homo sapien
agacctttcttaattcgcacgccga

SEQ ID NO: 5848872 - DNA, 25 bp, Homo sapien
acacaaaaccggccgtatcaaagat

SEQ ID NO: 5848873 - DNA, 25 bp, Homo sapien
cattcgtctagttttttgaagattt

SEQ ID NO: 5848874 - DNA, 25 bp, Homo sapien
ttttttcaacgtattcagtggcatg

SEQ ID NO: 5848875 - DNA, 25 bp, Homo sapien
gcaatgagacctttcttaattcgca

SEQ ID NO: 5848876 - DNA, 25 bp, Homo sapien
agagttgtgcctgcgtctcccacga

SEQ ID NO: 5848877 - DNA, 25 bp, Homo sapien
aatgatgaaacgattgtacagctta

SEQ ID NO: 5848878 - DNA, 25 bp, Homo sapien
acgccgaatgatgaaacgattgtac

SEQ ID NO: 5848879 - DNA, 25 bp, Homo sapien
gctttacaggcgcaatgagaccttt

SEQ ID NO: 5848880 - DNA, 25 bp, Homo sapien
tgagagccaaccgtataaagagttg

SEQ ID NO: 5848881 - DNA, 25 bp, Homo sapien
ccaagattcagcaccttggatacaa

SEQ ID NO: 5848882 - DNA, 25 bp, Homo sapien
cagaaatcggtaaagttgtggaagc

SEQ ID NO: 5848883 - DNA, 25 bp, Homo sapien
ttcagcaccttggatacaaatgaat

SEQ ID NO: 5848884 - DNA, 25 bp, Homo sapien
gccgtatcaaagatttgcgagccga

SEQ ID NO: 5848885 - DNA, 25 bp, Homo sapien
cttgaaggagcagaaatacgcgtaa

SEQ ID NO: 5848886 - DNA, 25 bp, Homo sapien
gaggaattaaatatctcttttagtc

SEQ ID NO: 5848887 - DNA, 25 bp, Homo sapien
ctggatgcactaaaggtgcttgaag

SEQ ID NO: 5848888 - DNA, 25 bp, Homo sapien
gagagggacgcaacaacgttgtaaa

SEQ ID NO: 5848889 - DNA, 25 bp, Homo sapien
attgtacagcttatccacttctttt

SEQ ID NO: 5848890 - DNA, 25 bp, Homo sapien
atccacttctttttgagagccaacc

SEQ ID NO: 5848891 - DNA, 25 bp, Homo sapien
attcgccagaaatcggtaaagttgt

SEQ ID NO: 5848892 - DNA, 25 bp, Homo sapien
ttctttttgagagccaaccgtataa

SEQ ID NO: 5848893 - DNA, 25 bp, Homo sapien
gaaggtgaggaattaaatatctctt

SEQ ID NO: 5848894 - DNA, 25 bp, Homo sapien
aatgaatatgaatctctccattcgt

SEQ ID NO: 5848895 - DNA, 25 bp, Homo sapien
tttccgctgctaacacaaaaccggc

SEQ ID NO: 5848896 - DNA, 25 bp, Homo sapien
tggaagcaattgttgcggatcaaat

SEQ ID NO: 5848897 - DNA, 25 bp, Homo sapien
tatgaatctctccattcgtctagtt

SEQ ID NO: 5848898 - DNA, 25 bp, Homo sapien
cttttagctagagagggacgcaaca

SEQ ID NO: 5848899 - DNA, 25 bp, Homo sapien
atgtcaaaaccgtaacgggaagcat

SEQ ID NO: 5848900 - DNA, 25 bp, Homo sapien
atcaaattgaaggtgaggaattaaa

SEQ ID NO: 5848901 - DNA, 25 bp, Homo sapien
cgaaacctcctccaagattcagcac

SEQ ID NO: 5848902 - DNA, 25 bp, Homo sapien
gatccaaatttccggaatgtcaaaa

SEQ ID NO: 5848903 - DNA, 25 bp, Homo sapien
gtaacgggaagcattttctttcaca

SEQ ID NO: 5848904 - DNA, 25 bp, Homo sapien
cagcttatccacttctttttgagag

SEQ ID NO: 5848905 - DNA, 25 bp, Homo sapien
taaatatctcttttagtccaaaata

SEQ ID NO: 5848906 - DNA, 25 bp, Homo sapien
gttcatcatcttccgtataacgaat

SEQ ID NO: 5848907 - DNA, 25 bp, Homo sapien
gacgcaacaacgttgtaaaactgtc

SEQ ID NO: 5848908 - DNA, 25 bp, Homo sapien
gggaagcattttctttcacagcttc

SEQ ID NO: 5848909 - DNA, 25 bp, Homo sapien
gcactaaaggtgcttgaaggagcag

SEQ ID NO: 5848910 - DNA, 25 bp, Homo sapien
ccaaaatatatgctggatgcactaa

SEQ ID NO: 5848911 - DNA, 25 bp, Homo sapien
gcgtaagctttacaggcgcaatgag

SEQ ID NO: 5848912 - DNA, 25 bp, Homo sapien
aagttgtggaagcaattgttgcgga

SEQ ID NO: 5848913 - DNA, 25 bp, Homo sapien
attcagtggcatgaagcggttcatc

SEQ ID NO: 5848914 - DNA, 25 bp, Homo sapien
ctgctaacacaaaaccggccgtatc

SEQ ID NO: 5848915 - DNA, 25 bp, Homo sapien
cgataattttttcaacgtattcagt

SEQ ID NO: 5848916 - DNA, 25 bp, Homo sapien
ttgcggatcaaattgaaggtgagga

SEQ ID NO: 5848917 - DNA, 25 bp, Homo sapien
tctctccattcgtctagttttttga

SEQ ID NO: 5848918 - DNA, 25 bp, Homo sapien
tcaaagatttgcgagccgatatggc

SEQ ID NO: 5848919 - DNA, 25 bp, Homo sapien
tatatgctggatgcactaaaggtgc

SEQ ID NO: 5848920 - DNA, 25 bp, Homo sapien
aaatacgcgtaagctttacaggcgc

SEQ ID NO: 5848921 - DNA, 25 bp, Homo sapien
aaaccggctgaatccattgaaattt

SEQ ID NO: 5848922 - DNA, 25 bp, Homo sapien
ccacgagagaacggcccggttcgat

SEQ ID NO: 5848923 - DNA, 25 bp, Homo sapien
taacggtttcgcttcaaacggatca

SEQ ID NO: 5848924 - DNA, 25 bp, Homo sapien
gcattaacaaacgaactgattcatc

SEQ ID NO: 5848925 - DNA, 25 bp, Homo sapien
aagctctcaaacctgaaaacaccgc

SEQ ID NO: 5848926 - DNA, 25 bp, Homo sapien
cgttttgaaatcacgagtcacgaat

SEQ ID NO: 5848927 - DNA, 25 bp, Homo sapien
ggatgaataagctgcagctgattaa

SEQ ID NO: 5848928 - DNA, 25 bp, Homo sapien
gttatagacgcaaagcacgaatcaa

SEQ ID NO: 5848929 - DNA, 25 bp, Homo sapien
gatgtttcaaaaaatcaagaagaaa

SEQ ID NO: 5848930 - DNA, 25 bp, Homo sapien
cacggcgcctttgccgatccatctg

SEQ ID NO: 5848931 - DNA, 25 bp, Homo sapien
tggatatgaggacgttgatatcatg

SEQ ID NO: 5848932 - DNA, 25 bp, Homo sapien
aattaaggatttgtcggcttatgat

SEQ ID NO: 5848933 - DNA, 25 bp, Homo sapien
taccttgattttcacggcgcctttg

SEQ ID NO: 5848934 - DNA, 25 bp, Homo sapien
gacgcaaagcacgaatcaaagctct

SEQ ID NO: 5848935 - DNA, 25 bp, Homo sapien
gccattcccggcatgattggatgaa

SEQ ID NO: 5848936 - DNA, 25 bp, Homo sapien
ttaaatgattgggagtgcgaaaatg

SEQ ID NO: 5848937 - DNA, 25 bp, Homo sapien
ttacagaagtatgaccgtgtctttg

SEQ ID NO: 5848938 - DNA, 25 bp, Homo sapien
gcttttgatgatattcggcagaatg

SEQ ID NO: 5848939 - DNA, 25 bp, Homo sapien
ggatttgtcggcttatgatcaaaag

SEQ ID NO: 5848940 - DNA, 25 bp, Homo sapien
catcctgacagacagctgattctgt

SEQ ID NO: 5848941 - DNA, 25 bp, Homo sapien
aaaatcaagaagaaaatataagcga

SEQ ID NO: 5848942 - DNA, 25 bp, Homo sapien
cccggcatgattggatgaataagct

SEQ ID NO: 5848943 - DNA, 25 bp, Homo sapien
cccattatatgacgcttgaatatga

SEQ ID NO: 5848944 - DNA, 25 bp, Homo sapien
cggagaaattaaggatttgtcggct

SEQ ID NO: 5848945 - DNA, 25 bp, Homo sapien
agttctcggagaaattaaggatttg

SEQ ID NO: 5848946 - DNA, 25 bp, Homo sapien
tgcagctgattaaaggaaacttaag

SEQ ID NO: 5848947 - DNA, 25 bp, Homo sapien
cgttgatatcatgcgttttgaaatc

SEQ ID NO: 5848948 - DNA, 25 bp, Homo sapien
gattttcacggcgcctttgccgatc

SEQ ID NO: 5848949 - DNA, 25 bp, Homo sapien
attcatctgcttggccattcccggc

SEQ ID NO: 5848950 - DNA, 25 bp, Homo sapien
atgattggatgaataagctgcagct

SEQ ID NO: 5848951 - DNA, 25 bp, Homo sapien
gaaatggttatagacgcaaagcacg

SEQ ID NO: 5848952 - DNA, 25 bp, Homo sapien
aagcacgaatcaaagctctcaaacc

SEQ ID NO: 5848953 - DNA, 25 bp, Homo sapien
tgattaaaggaaacttaagcttaca

SEQ ID NO: 5848954 - DNA, 25 bp, Homo sapien
gcagaatggatatgaggacgttgat

SEQ ID NO: 5848955 - DNA, 25 bp, Homo sapien
gcgaaaatgaaggatgtttcaaaaa

SEQ ID NO: 5848956 - DNA, 25 bp, Homo sapien
ttaagcttacagaagtatgaccgtg

SEQ ID NO: 5848957 - DNA, 25 bp, Homo sapien
gcttgaatatgaagttctcggagaa

SEQ ID NO: 5848958 - DNA, 25 bp, Homo sapien
aacaccgcatttggcgtttgatttt

SEQ ID NO: 5848959 - DNA, 25 bp, Homo sapien
acgagtcacgaatgtctgattgaaa

SEQ ID NO: 5848960 - DNA, 25 bp, Homo sapien
tgaggacgttgatatcatgcgtttt

SEQ ID NO: 5848961 - DNA, 25 bp, Homo sapien
agaaattaaatgattgggagtgcga

SEQ ID NO: 5848962 - DNA, 25 bp, Homo sapien
ctgaaaacaccgcatttggcgtttg

SEQ ID NO: 5848963 - DNA, 25 bp, Homo sapien
tattcggcagaatggatatgaggac

SEQ ID NO: 5848964 - DNA, 25 bp, Homo sapien
tgcttggccattcccggcatgattg

SEQ ID NO: 5848965 - DNA, 25 bp, Homo sapien
ggagtgcgaaaatgaaggatgtttc

SEQ ID NO: 5848966 - DNA, 25 bp, Homo sapien
attctgtaccttgattttcacggcg

SEQ ID NO: 5848967 - DNA, 25 bp, Homo sapien
aaaatataagcgacacggcattaac

SEQ ID NO: 5848968 - DNA, 25 bp, Homo sapien
ttatgatcaaaagctggcgaaactg

SEQ ID NO: 5848969 - DNA, 25 bp, Homo sapien
agcagtcagcagagagagtgaaaat

SEQ ID NO: 5848970 - DNA, 25 bp, Homo sapien
ggaaacttaagcttacagaagtatg

SEQ ID NO: 5848971 - DNA, 25 bp, Homo sapien
gaccgtgtctttgaaatgattgaag

SEQ ID NO: 5848972 - DNA, 25 bp, Homo sapien
gaaactgatgagaaagctgtttcat

SEQ ID NO: 5848973 - DNA, 25 bp, Homo sapien
tctgtttgatcaagcagtcagcaga

SEQ ID NO: 5848974 - DNA, 25 bp, Homo sapien
gccgatccatctgcttttgatgata

SEQ ID NO: 5848975 - DNA, 25 bp, Homo sapien
atatgaagttctcggagaaattaag

SEQ ID NO: 5848976 - DNA, 25 bp, Homo sapien
acaaacgaactgattcatctgcttg

SEQ ID NO: 5848977 - DNA, 25 bp, Homo sapien
gtctttgaaatgattgaagaaatgg

SEQ ID NO: 5848978 - DNA, 25 bp, Homo sapien
tatgacgcttgaatatgaagttctc

SEQ ID NO: 5848979 - DNA, 25 bp, Homo sapien
gctggcgaaactgatgagaaagctg

SEQ ID NO: 5848980 - DNA, 25 bp, Homo sapien
attgaagaaatggttatagacgcaa

SEQ ID NO: 5848981 - DNA, 25 bp, Homo sapien
cacgaatgtctgattgaaattgggt

SEQ ID NO: 5848982 - DNA, 25 bp, Homo sapien
tcaaaaaatcaagaagaaaatataa

SEQ ID NO: 5848983 - DNA, 25 bp, Homo sapien
gacacggcattaacaaacgaactga

SEQ ID NO: 5848984 - DNA, 25 bp, Homo sapien
gtttcatctgtttgatcaagcagtc

SEQ ID NO: 5848985 - DNA, 25 bp, Homo sapien
ataagctgcagctgattaaaggaaa

SEQ ID NO: 5848986 - DNA, 25 bp, Homo sapien
ccatctgcttttgatgatattcggc

SEQ ID NO: 5848987 - DNA, 25 bp, Homo sapien
aaagctgtttcatctgtttgatcaa

SEQ ID NO: 5848988 - DNA, 25 bp, Homo sapien
gatgatattcggcagaatggatatg

SEQ ID NO: 5848989 - DNA, 25 bp, Homo sapien
atcatgcgttttgaaatcacgagtc

SEQ ID NO: 5848990 - DNA, 25 bp, Homo sapien
taagcgacacggcattaacaaacga

SEQ ID NO: 5848991 - DNA, 25 bp, Homo sapien
catttggcgtttgattttcttacgt

SEQ ID NO: 5848992 - DNA, 25 bp, Homo sapien
gaactgattcatctgcttggccatt

SEQ ID NO: 5848993 - DNA, 25 bp, Homo sapien
cagctgattctgtaccttgattttc

SEQ ID NO: 5848994 - DNA, 25 bp, Homo sapien
gaaatgattgaagaaatggttatag

SEQ ID NO: 5848995 - DNA, 25 bp, Homo sapien
gtttcgcttcaaacggatcatcctg

SEQ ID NO: 5848996 - DNA, 25 bp, Homo sapien
aagaagaaaatataagcgacacggc

SEQ ID NO: 5848997 - DNA, 25 bp, Homo sapien
aagtatgaccgtgtctttgaaatga

SEQ ID NO: 5848998 - DNA, 25 bp, Homo sapien
gcctttgccgatccatctgcttttg

SEQ ID NO: 5848999 - DNA, 25 bp, Homo sapien
ggaaaacccattatatgacgcttga

SEQ ID NO: 5849000 - DNA, 25 bp, Homo sapien
gaaatcacgagtcacgaatgtctga

SEQ ID NO: 5849001 - DNA, 25 bp, Homo sapien
tgatcaagcagtcagcagagagagt

SEQ ID NO: 5849002 - DNA, 25 bp, Homo sapien
gatgagaaagctgtttcatctgttt

SEQ ID NO: 5849003 - DNA, 25 bp, Homo sapien
cttcaaacggatcatcctgacagac

SEQ ID NO: 5849004 - DNA, 25 bp, Homo sapien
agagagtgaaaatcatttaacggtt

SEQ ID NO: 5849005 - DNA, 25 bp, Homo sapien
acggatcatcctgacagacagctga

SEQ ID NO: 5849006 - DNA, 25 bp, Homo sapien
gaatcaaagctctcaaacctgaaaa

SEQ ID NO: 5849007 - DNA, 25 bp, Homo sapien
gacagacagctgattctgtaccttg

SEQ ID NO: 5849008 - DNA, 25 bp, Homo sapien
gattgggagtgcgaaaatgaaggat

SEQ ID NO: 5849009 - DNA, 25 bp, Homo sapien
tcaaaagctggcgaaactgatgaga

SEQ ID NO: 5849010 - DNA, 25 bp, Homo sapien
gtcggcttatgatcaaaagctggcg

SEQ ID NO: 5849011 - DNA, 25 bp, Homo sapien
atgaaggatgtttcaaaaaatcaag

SEQ ID NO: 5849012 - DNA, 25 bp, Homo sapien
tcaaacctgaaaacaccgcatttgg

SEQ ID NO: 5849013 - DNA, 25 bp, Homo sapien
ttaattggaaaacccattatatgac

SEQ ID NO: 5849014 - DNA, 25 bp, Homo sapien
cagcagagagagtgaaaatcattta

SEQ ID NO: 5849015 - DNA, 25 bp, Homo sapien
ctggaatcaatacatcatcaaacgc

SEQ ID NO: 5849016 - DNA, 25 bp, Homo sapien
gctttctcaatatcaataataaaga

SEQ ID NO: 5849017 - DNA, 25 bp, Homo sapien
tgggcctagagctcaattttgaatt

SEQ ID NO: 5849018 - DNA, 25 bp, Homo sapien
aatttatggcattgcgcaatcgcgt

SEQ ID NO: 5849019 - DNA, 25 bp, Homo sapien
cgatattcagctcgggatggtcact

SEQ ID NO: 5849020 - DNA, 25 bp, Homo sapien
atcctgcggcagcatgaccattaag

SEQ ID NO: 5849021 - DNA, 25 bp, Homo sapien
ggcaatgaccccgatattcagctcg

SEQ ID NO: 5849022 - DNA, 25 bp, Homo sapien
actgatcatcctgcggcagcatgac

SEQ ID NO: 5849023 - DNA, 25 bp, Homo sapien
gtagaattggcgtattcatatggaa

SEQ ID NO: 5849024 - DNA, 25 bp, Homo sapien
agaagctgccatatcattggcaatg

SEQ ID NO: 5849025 - DNA, 25 bp, Homo sapien
gcagcgccccggactgatcatcctg

SEQ ID NO: 5849026 - DNA, 25 bp, Homo sapien
gatttttaattcgtatgtagaagct

SEQ ID NO: 5849027 - DNA, 25 bp, Homo sapien
gactggtatgcacccagaagcctca

SEQ ID NO: 5849028 - DNA, 25 bp, Homo sapien
ccccggactgatcatcctgcggcag

SEQ ID NO: 5849029 - DNA, 25 bp, Homo sapien
catgaccattaaggtcgttttgggc

SEQ ID NO: 5849030 - DNA, 25 bp, Homo sapien
tccggttttagtcggacgtgactca

SEQ ID NO: 5849031 - DNA, 25 bp, Homo sapien
tggcattgcgcaatcgcgtgtgaat

SEQ ID NO: 5849032 - DNA, 25 bp, Homo sapien
ttgaattcacttcaaaagatatgtt

SEQ ID NO: 5849033 - DNA, 25 bp, Homo sapien
tgcgcaatcgcgtgtgaatgtgagt

SEQ ID NO: 5849034 - DNA, 25 bp, Homo sapien
ttcatcgggagacaggataataaat

SEQ ID NO: 5849035 - DNA, 25 bp, Homo sapien
tatggaacggaaggaaaatgtcgat

SEQ ID NO: 5849036 - DNA, 25 bp, Homo sapien
atcgcgtgtgaatgtgagtaaattt

SEQ ID NO: 5849037 - DNA, 25 bp, Homo sapien
atgcacccagaagcctcactttgca

SEQ ID NO: 5849038 - DNA, 25 bp, Homo sapien
catcatcaaacgctttctcaatatc

SEQ ID NO: 5849039 - DNA, 25 bp, Homo sapien
tcaattttgaattcacttcaaaaga

SEQ ID NO: 5849040 - DNA, 25 bp, Homo sapien
tcttgtatgattgtccctataatcc

SEQ ID NO: 5849041 - DNA, 25 bp, Homo sapien
atcattggcaatgaccccgatattc

SEQ ID NO: 5849042 - DNA, 25 bp, Homo sapien
gcattctctcttgagggatggacga

SEQ ID NO: 5849043 - DNA, 25 bp, Homo sapien
taaggtcgttttgggcctagagctc

SEQ ID NO: 5849044 - DNA, 25 bp, Homo sapien
tgacaggtttaaatttctccaagaa

SEQ ID NO: 5849045 - DNA, 25 bp, Homo sapien
gccccggtagaattggcgtattcat

SEQ ID NO: 5849046 - DNA, 25 bp, Homo sapien
aataaatcttgtatgattgtcccta

SEQ ID NO: 5849047 - DNA, 25 bp, Homo sapien
actttgcagccgagtgcttcaagct

SEQ ID NO: 5849048 - DNA, 25 bp, Homo sapien
gtatgtagaagctgccatatcattg

SEQ ID NO: 5849049 - DNA, 25 bp, Homo sapien
agctctttccatgcattctctcttg

SEQ ID NO: 5849050 - DNA, 25 bp, Homo sapien
tgactcaatttttgacaggtttaaa

SEQ ID NO: 5849051 - DNA, 25 bp, Homo sapien
tttaaatttctccaagaaaatgcag

SEQ ID NO: 5849052 - DNA, 25 bp, Homo sapien
ataaagaaataatggcctaatccgg

SEQ ID NO: 5849053 - DNA, 25 bp, Homo sapien
caaaagatatgttttcatcgggaga

SEQ ID NO: 5849054 - DNA, 25 bp, Homo sapien
cgggatggtcactgacaaactttgc

SEQ ID NO: 5849055 - DNA, 25 bp, Homo sapien
ggaaaatgtcgatgaagaaatttat

SEQ ID NO: 5849056 - DNA, 25 bp, Homo sapien
actctatgcagcgccccggactgat

SEQ ID NO: 5849057 - DNA, 25 bp, Homo sapien
tgacaaactttgctgccgccccggt

SEQ ID NO: 5849058 - DNA, 25 bp, Homo sapien
tcagctcgggatggtcactgacaaa

SEQ ID NO: 5849059 - DNA, 25 bp, Homo sapien
cggacgtgactcaatttttgacagg

SEQ ID NO: 5849060 - DNA, 25 bp, Homo sapien
tctcttgagggatggacgagcaagt

SEQ ID NO: 5849061 - DNA, 25 bp, Homo sapien
aatgcagacagcactctatgcagcg

SEQ ID NO: 5849062 - DNA, 25 bp, Homo sapien
ttagtcggacgtgactcaatttttg

SEQ ID NO: 5849063 - DNA, 25 bp, Homo sapien
tttgtcgagctctttccatgcattc

SEQ ID NO: 5849064 - DNA, 25 bp, Homo sapien
ggtcactgacaaactttgctgccgc

SEQ ID NO: 5849065 - DNA, 25 bp, Homo sapien
gctgccgccccggtagaattggcgt

SEQ ID NO: 5849066 - DNA, 25 bp, Homo sapien
tcaaacgctttctcaatatcaataa

SEQ ID NO: 5849067 - DNA, 25 bp, Homo sapien
ttccatgcattctctcttgagggat

SEQ ID NO: 5849068 - DNA, 25 bp, Homo sapien
tgtcgatgaagaaatttatggcatt

SEQ ID NO: 5849069 - DNA, 25 bp, Homo sapien
tcacttcaaaagatatgttttcatc

SEQ ID NO: 5849070 - DNA, 25 bp, Homo sapien
caatatcaataataaagaaataatg

SEQ ID NO: 5849071 - DNA, 25 bp, Homo sapien
caagctcctgcatggcccctggaat

SEQ ID NO: 5849072 - DNA, 25 bp, Homo sapien
tttctccaagaaaatgcagacagca

SEQ ID NO: 5849073 - DNA, 25 bp, Homo sapien
tattcatatggaacggaaggaaaat

SEQ ID NO: 5849074 - DNA, 25 bp, Homo sapien
caggataataaatcttgtatgattg

SEQ ID NO: 5849075 - DNA, 25 bp, Homo sapien
aactttgctgccgccccggtagaat

SEQ ID NO: 5849076 - DNA, 25 bp, Homo sapien
cagccgagtgcttcaagctcctgca

SEQ ID NO: 5849077 - DNA, 25 bp, Homo sapien
tgaccccgatattcagctcgggatg

SEQ ID NO: 5849078 - DNA, 25 bp, Homo sapien
tgtgaatgtgagtaaattttgtcga

SEQ ID NO: 5849079 - DNA, 25 bp, Homo sapien
gtaaattttgtcgagctctttccat

SEQ ID NO: 5849080 - DNA, 25 bp, Homo sapien
tcaataataaagaaataatggccta

SEQ ID NO: 5849081 - DNA, 25 bp, Homo sapien
tggtaagactggtatgcacccagaa

SEQ ID NO: 5849082 - DNA, 25 bp, Homo sapien
tagagctcaattttgaattcacttc

SEQ ID NO: 5849083 - DNA, 25 bp, Homo sapien
tgccatatcattggcaatgaccccg

SEQ ID NO: 5849084 - DNA, 25 bp, Homo sapien
gggagacaggataataaatcttgta

SEQ ID NO: 5849085 - DNA, 25 bp, Homo sapien
tcgttttgggcctagagctcaattt

SEQ ID NO: 5849086 - DNA, 25 bp, Homo sapien
agtgcttcaagctcctgcatggccc

SEQ ID NO: 5849087 - DNA, 25 bp, Homo sapien
gacagcactctatgcagcgccccgg

SEQ ID NO: 5849088 - DNA, 25 bp, Homo sapien
ccagaagcctcactttgcagccgag

SEQ ID NO: 5849089 - DNA, 25 bp, Homo sapien
tcaatacatcatcaaacgctttctc

SEQ ID NO: 5849090 - DNA, 25 bp, Homo sapien
tgtgagtaaattttgtcgagctctt

SEQ ID NO: 5849091 - DNA, 25 bp, Homo sapien
agcctcactttgcagccgagtgctt

SEQ ID NO: 5849092 - DNA, 25 bp, Homo sapien
cggcagcatgaccattaaggtcgtt

SEQ ID NO: 5849093 - DNA, 25 bp, Homo sapien
acggaaggaaaatgtcgatgaagaa

SEQ ID NO: 5849094 - DNA, 25 bp, Homo sapien
tggcccctggaatcaatacatcatc

SEQ ID NO: 5849095 - DNA, 25 bp, Homo sapien
taattcgtatgtagaagctgccata

SEQ ID NO: 5849096 - DNA, 25 bp, Homo sapien
tgaagaaatttatggcattgcgcaa

SEQ ID NO: 5849097 - DNA, 25 bp, Homo sapien
atatgttttcatcgggagacaggat

SEQ ID NO: 5849098 - DNA, 25 bp, Homo sapien
ttcacgatttttaattcgtatgtag

SEQ ID NO: 5849099 - DNA, 25 bp, Homo sapien
cctgcatggcccctggaatcaatac

SEQ ID NO: 5849100 - DNA, 25 bp, Homo sapien
caagaaaatgcagacagcactctat

SEQ ID NO: 5849101 - DNA, 25 bp, Homo sapien
ttggcgtattcatatggaacggaag

SEQ ID NO: 5849102 - DNA, 25 bp, Homo sapien
tatgcagcccgtgctaacatgaaat

SEQ ID NO: 5849103 - DNA, 25 bp, Homo sapien
gttcaagaagtcaaaagcacatatc

SEQ ID NO: 5849104 - DNA, 25 bp, Homo sapien
gctgcggcagcatatgcagcccgtg

SEQ ID NO: 5849105 - DNA, 25 bp, Homo sapien
aacaccggcgctaactttacatgaa

SEQ ID NO: 5849106 - DNA, 25 bp, Homo sapien
aggaaacacacctcttattcacctg

SEQ ID NO: 5849107 - DNA, 25 bp, Homo sapien
ttggaaaactcgctcaagctgtcat

SEQ ID NO: 5849108 - DNA, 25 bp, Homo sapien
tcgaaaattacatctgtgttctcag

SEQ ID NO: 5849109 - DNA, 25 bp, Homo sapien
aaaagcacatatcgtgtagaaggga

SEQ ID NO: 5849110 - DNA, 25 bp, Homo sapien
aatcctacgggatcatttaaagatc

SEQ ID NO: 5849111 - DNA, 25 bp, Homo sapien
cagagcggggcgtgacgtttgaaaa

SEQ ID NO: 5849112 - DNA, 25 bp, Homo sapien
ctgtcatgtacggagccgagattat

SEQ ID NO: 5849113 - DNA, 25 bp, Homo sapien
gtcacacatcatacatcagaagctg

SEQ ID NO: 5849114 - DNA, 25 bp, Homo sapien
gctaacatgaaatgcattgtcatca

SEQ ID NO: 5849115 - DNA, 25 bp, Homo sapien
cacacctcttattcacctgccgaag

SEQ ID NO: 5849116 - DNA, 25 bp, Homo sapien
agaatttttacctgtaacagatcaa

SEQ ID NO: 5849117 - DNA, 25 bp, Homo sapien
catcaatataaagaatttttacctg

SEQ ID NO: 5849118 - DNA, 25 bp, Homo sapien
atcccgaacggaaaaattgcatttg

SEQ ID NO: 5849119 - DNA, 25 bp, Homo sapien
cggaatggttatggctgtggcaaag

SEQ ID NO: 5849120 - DNA, 25 bp, Homo sapien
acggaaggcgtcaatcctacgggat

SEQ ID NO: 5849121 - DNA, 25 bp, Homo sapien
ctcggaattgagcttcatgtcaaaa

SEQ ID NO: 5849122 - DNA, 25 bp, Homo sapien
atgaaatgcattgtcatcatcccga

SEQ ID NO: 5849123 - DNA, 25 bp, Homo sapien
aagatcgcggaatggttatggctgt

SEQ ID NO: 5849124 - DNA, 25 bp, Homo sapien
agatcaaacaccggcgctaacttta

SEQ ID NO: 5849125 - DNA, 25 bp, Homo sapien
caggtaacacttccgctgctgcggc

SEQ ID NO: 5849126 - DNA, 25 bp, Homo sapien
acacttccgctgctgcggcagcata

SEQ ID NO: 5849127 - DNA, 25 bp, Homo sapien
ggccatgatgagttagctgaaatcg

SEQ ID NO: 5849128 - DNA, 25 bp, Homo sapien
cgtgtagaagggaacggttggagct

SEQ ID NO: 5849129 - DNA, 25 bp, Homo sapien
ttagctgaaatcgtaattgtcacac

SEQ ID NO: 5849130 - DNA, 25 bp, Homo sapien
ctaaatgatttggaagtcgttcaag

SEQ ID NO: 5849131 - DNA, 25 bp, Homo sapien
aactcgctcaagctgtcatgtacgg

SEQ ID NO: 5849132 - DNA, 25 bp, Homo sapien
caaaacctaaatgatttggaagtcg

SEQ ID NO: 5849133 - DNA, 25 bp, Homo sapien
tcttattcacctgccgaagctgtct

SEQ ID NO: 5849134 - DNA, 25 bp, Homo sapien
gaaatcgtaattgtcacacatcata

SEQ ID NO: 5849135 - DNA, 25 bp, Homo sapien
gatgagttagctgaaatcgtaattg

SEQ ID NO: 5849136 - DNA, 25 bp, Homo sapien
cttcatgtcaaaacggaaggcgtca

SEQ ID NO: 5849137 - DNA, 25 bp, Homo sapien
tcatttaaagatcgcggaatggtta

SEQ ID NO: 5849138 - DNA, 25 bp, Homo sapien
tgtaacagatcaaacaccggcgcta

SEQ ID NO: 5849139 - DNA, 25 bp, Homo sapien
aggcaatgacacgattatgtgcgcg

SEQ ID NO: 5849140 - DNA, 25 bp, Homo sapien
agtgatatcctgcaaaacctaaatg

SEQ ID NO: 5849141 - DNA, 25 bp, Homo sapien
tgtacggagccgagattatcgcaat

SEQ ID NO: 5849142 - DNA, 25 bp, Homo sapien
ggcgtcaatcctacgggatcattta

SEQ ID NO: 5849143 - DNA, 25 bp, Homo sapien
acatgaaggaaacacacctcttatt

SEQ ID NO: 5849144 - DNA, 25 bp, Homo sapien
aactttacatgaaggaaacacacct

SEQ ID NO: 5849145 - DNA, 25 bp, Homo sapien
attacatctgtgttctcagagcggg

SEQ ID NO: 5849146 - DNA, 25 bp, Homo sapien
gcccgtgctaacatgaaatgcattg

SEQ ID NO: 5849147 - DNA, 25 bp, Homo sapien
attaaaggccatgatgagttagctg

SEQ ID NO: 5849148 - DNA, 25 bp, Homo sapien
gatttcagtgatatcctgcaaaacc

SEQ ID NO: 5849149 - DNA, 25 bp, Homo sapien
acgggatcatttaaagatcgcggaa

SEQ ID NO: 5849150 - DNA, 25 bp, Homo sapien
ttgcatttggaaaactcgctcaagc

SEQ ID NO: 5849151 - DNA, 25 bp, Homo sapien
gaagctgatttcagtgatatcctgc

SEQ ID NO: 5849152 - DNA, 25 bp, Homo sapien
gaagtcaaaagcacatatcgtgtag

SEQ ID NO: 5849153 - DNA, 25 bp, Homo sapien
ggcgctaactttacatgaaggaaac

SEQ ID NO: 5849154 - DNA, 25 bp, Homo sapien
gaagggaacggttggagctaatgtg

SEQ ID NO: 5849155 - DNA, 25 bp, Homo sapien
ggctgtggcaaaggcaaaagaagaa

SEQ ID NO: 5849156 - DNA, 25 bp, Homo sapien
ggcaaaggcaaaagaagaaggcaat

SEQ ID NO: 5849157 - DNA, 25 bp, Homo sapien
ccgaagctgtctgagcagctcggaa

SEQ ID NO: 5849158 - DNA, 25 bp, Homo sapien
taatgtggaaaggacttatccatca

SEQ ID NO: 5849159 - DNA, 25 bp, Homo sapien
acatcagaagctgatttcagtgata

SEQ ID NO: 5849160 - DNA, 25 bp, Homo sapien
tgcattgtcatcatcccgaacggaa

SEQ ID NO: 5849161 - DNA, 25 bp, Homo sapien
agaagaaggcaatgacacgattatg

SEQ ID NO: 5849162 - DNA, 25 bp, Homo sapien
ctgccaattaaaggccatgatgagt

SEQ ID NO: 5849163 - DNA, 25 bp, Homo sapien
gtaattgtcacacatcatacatcag

SEQ ID NO: 5849164 - DNA, 25 bp, Homo sapien
ccgctgctgcggcagcatatgcagc

SEQ ID NO: 5849165 - DNA, 25 bp, Homo sapien
gcagcatatgcagcccgtgctaaca

SEQ ID NO: 5849166 - DNA, 25 bp, Homo sapien
aacggttggagctaatgtggaaagg

SEQ ID NO: 5849167 - DNA, 25 bp, Homo sapien
tttacctgtaacagatcaaacaccg

SEQ ID NO: 5849168 - DNA, 25 bp, Homo sapien
gtcaaaacggaaggcgtcaatccta

SEQ ID NO: 5849169 - DNA, 25 bp, Homo sapien
gagcagctcggaattgagcttcatg

SEQ ID NO: 5849170 - DNA, 25 bp, Homo sapien
gaaaaattgcatttggaaaactcgc

SEQ ID NO: 5849171 - DNA, 25 bp, Homo sapien
gacttatccatcaatataaagaatt

SEQ ID NO: 5849172 - DNA, 25 bp, Homo sapien
cacctgccgaagctgtctgagcagc

SEQ ID NO: 5849173 - DNA, 25 bp, Homo sapien
gaagtcgttcaagaagtcaaaagca

SEQ ID NO: 5849174 - DNA, 25 bp, Homo sapien
tttgaaaaaatccttcagctgccaa

SEQ ID NO: 5849175 - DNA, 25 bp, Homo sapien
ctcaagctgtcatgtacggagccga

SEQ ID NO: 5849176 - DNA, 25 bp, Homo sapien
ctgtctgagcagctcggaattgagc

SEQ ID NO: 5849177 - DNA, 25 bp, Homo sapien
ggcaaaagaagaaggcaatgacacg

SEQ ID NO: 5849178 - DNA, 25 bp, Homo sapien
gtgacgtttgaaaaaatccttcagc

SEQ ID NO: 5849179 - DNA, 25 bp, Homo sapien
gattatgtgcgcgtcaacaggtaac

SEQ ID NO: 5849180 - DNA, 25 bp, Homo sapien
tgtgcgcgtcaacaggtaacacttc

SEQ ID NO: 5849181 - DNA, 25 bp, Homo sapien
cgtcaacaggtaacacttccgctgc

SEQ ID NO: 5849182 - DNA, 25 bp, Homo sapien
acatatcgtgtagaagggaacggtt

SEQ ID NO: 5849183 - DNA, 25 bp, Homo sapien
tgacacgattatgtgcgcgtcaaca

SEQ ID NO: 5849184 - DNA, 25 bp, Homo sapien
gatttggaagtcgttcaagaagtca

SEQ ID NO: 5849185 - DNA, 25 bp, Homo sapien
aaaatccttcagctgccaattaaag

SEQ ID NO: 5849186 - DNA, 25 bp, Homo sapien
ggaaaggacttatccatcaatataa

SEQ ID NO: 5849187 - DNA, 25 bp, Homo sapien
atcctgcaaaacctaaatgatttgg

SEQ ID NO: 5849188 - DNA, 25 bp, Homo sapien
cttcagctgccaattaaaggccatg

SEQ ID NO: 5849189 - DNA, 25 bp, Homo sapien
gtcatcatcccgaacggaaaaattg

SEQ ID NO: 5849190 - DNA, 25 bp, Homo sapien
tggagctaatgtggaaaggacttat

SEQ ID NO: 5849191 - DNA, 25 bp, Homo sapien
attgagcttcatgtcaaaacggaag

SEQ ID NO: 5849192 - DNA, 25 bp, Homo sapien
ggttatggctgtggcaaaggcaaaa

SEQ ID NO: 5849193 - DNA, 25 bp, Homo sapien
catcatacatcagaagctgatttca

SEQ ID NO: 5849194 - DNA, 25 bp, Homo sapien
gtctcttgtcagcacttcataaaaa

SEQ ID NO: 5849195 - DNA, 25 bp, Homo sapien
aggcacaagcatcgcccggtacggc

SEQ ID NO: 5849196 - DNA, 25 bp, Homo sapien
tctacttttgacagctcaggcacaa

SEQ ID NO: 5849197 - DNA, 25 bp, Homo sapien
cctttacatgtattcgtttctaata

SEQ ID NO: 5849198 - DNA, 25 bp, Homo sapien
ttcatctcggcgacgtgctctactt

SEQ ID NO: 5849199 - DNA, 25 bp, Homo sapien
gcgagctgttcttttagctcttctc

SEQ ID NO: 5849200 - DNA, 25 bp, Homo sapien
ttttcatattcatctcctcctttac

SEQ ID NO: 5849201 - DNA, 25 bp, Homo sapien
gtcaaagcgtctacttcacaatgag

SEQ ID NO: 5849202 - DNA, 25 bp, Homo sapien
atcagcttttcatattcatctcctc

SEQ ID NO: 5849203 - DNA, 25 bp, Homo sapien
tcaatgtcagcattcgggacgcgga

SEQ ID NO: 5849204 - DNA, 25 bp, Homo sapien
tttgacagctcaggcacaagcatcg

SEQ ID NO: 5849205 - DNA, 25 bp, Homo sapien
gcgtctacttcacaatgagggaaat

SEQ ID NO: 5849206 - DNA, 25 bp, Homo sapien
tggaaactccttcggaagcacgtct

SEQ ID NO: 5849207 - DNA, 25 bp, Homo sapien
ggaagcacgtctctcgcgtctcttg

SEQ ID NO: 5849208 - DNA, 25 bp, Homo sapien
cctccgctgacgctgaggaacgctt

SEQ ID NO: 5849209 - DNA, 25 bp, Homo sapien
tctccctttcctttttcggtcatga

SEQ ID NO: 5849210 - DNA, 25 bp, Homo sapien
tctcgcgtctcttgtcagcacttca

SEQ ID NO: 5849211 - DNA, 25 bp, Homo sapien
tctcctcctttacatgtattcgttt

SEQ ID NO: 5849212 - DNA, 25 bp, Homo sapien
aagcatcgcccggtacggctgatgg

SEQ ID NO: 5849213 - DNA, 25 bp, Homo sapien
gtgatgtcgtctgcggttatcagct

SEQ ID NO: 5849214 - DNA, 25 bp, Homo sapien
aataaaactcctttatctccagcaa

SEQ ID NO: 5849215 - DNA, 25 bp, Homo sapien
tgatataaaggatttcgctctatta

SEQ ID NO: 5849216 - DNA, 25 bp, Homo sapien
ctgatggaacatatccttcttcatg

SEQ ID NO: 5849217 - DNA, 25 bp, Homo sapien
ttgggcctgctccgctgagagccgt

SEQ ID NO: 5849218 - DNA, 25 bp, Homo sapien
caatgagggaaatgaagcgcgagct

SEQ ID NO: 5849219 - DNA, 25 bp, Homo sapien
aatccttggacatgatcgcagcaat

SEQ ID NO: 5849220 - DNA, 25 bp, Homo sapien
gcgcccttcatctcggcgacgtgct

SEQ ID NO: 5849221 - DNA, 25 bp, Homo sapien
tggacatgatcgcagcaatgaggat

SEQ ID NO: 5849222 - DNA, 25 bp, Homo sapien
tttcgctctattatacttccctctt

SEQ ID NO: 5849223 - DNA, 25 bp, Homo sapien
tcggcgacgtgctctacttttgaca

SEQ ID NO: 5849224 - DNA, 25 bp, Homo sapien
gcggttatcagcttttcatattcat

SEQ ID NO: 5849225 - DNA, 25 bp, Homo sapien
tgacagcacttgcttttacggcatc

SEQ ID NO: 5849226 - DNA, 25 bp, Homo sapien
acgtgctctacttttgacagctcag

SEQ ID NO: 5849227 - DNA, 25 bp, Homo sapien
tttacttgatataaaggatttcgct

SEQ ID NO: 5849228 - DNA, 25 bp, Homo sapien
cgacaagcggccaatccttggacat

SEQ ID NO: 5849229 - DNA, 25 bp, Homo sapien
cggtcatgacgagaatcgttgggcc

SEQ ID NO: 5849230 - DNA, 25 bp, Homo sapien
cctttcctttttcggtcatgacgag

SEQ ID NO: 5849231 - DNA, 25 bp, Homo sapien
tgacgagaatcgttgggcctgctcc

SEQ ID NO: 5849232 - DNA, 25 bp, Homo sapien
aaaggatttcgctctattatacttc

SEQ ID NO: 5849233 - DNA, 25 bp, Homo sapien
cttcatgattttcccgacaagcggc

SEQ ID NO: 5849234 - DNA, 25 bp, Homo sapien
gaacatatccttcttcatgattttc

SEQ ID NO: 5849235 - DNA, 25 bp, Homo sapien
ccatatgcgcccttcatctcggcga

SEQ ID NO: 5849236 - DNA, 25 bp, Homo sapien
agctcaggcacaagcatcgcccggt

SEQ ID NO: 5849237 - DNA, 25 bp, Homo sapien
catgtattcgtttctaataaaactc

SEQ ID NO: 5849238 - DNA, 25 bp, Homo sapien
ccagcaaaaaaaggcgccctccgct

SEQ ID NO: 5849239 - DNA, 25 bp, Homo sapien
tgttcttttagctcttctccctttc

SEQ ID NO: 5849240 - DNA, 25 bp, Homo sapien
ttctaataaaactcctttatctcca

SEQ ID NO: 5849241 - DNA, 25 bp, Homo sapien
actacgtcaatgtcagcattcggga

SEQ ID NO: 5849242 - DNA, 25 bp, Homo sapien
acactttttacttgatataaaggat

SEQ ID NO: 5849243 - DNA, 25 bp, Homo sapien
tattgctgacagcacttgcttttac

SEQ ID NO: 5849244 - DNA, 25 bp, Homo sapien
acgtctctcgcgtctcttgtcagca

SEQ ID NO: 5849245 - DNA, 25 bp, Homo sapien
tggcatgatctatacactttttact

SEQ ID NO: 5849246 - DNA, 25 bp, Homo sapien
cgcccggtacggctgatggaacata

SEQ ID NO: 5849247 - DNA, 25 bp, Homo sapien
actcctttatctccagcaaaaaaag

SEQ ID NO: 5849248 - DNA, 25 bp, Homo sapien
ctgacgctgaggaacgcttggcatg

SEQ ID NO: 5849249 - DNA, 25 bp, Homo sapien
cagcaatgaggatattgctgacagc

SEQ ID NO: 5849250 - DNA, 25 bp, Homo sapien
attttcccgacaagcggccaatcct

SEQ ID NO: 5849251 - DNA, 25 bp, Homo sapien
tattcatctcctcctttacatgtat

SEQ ID NO: 5849252 - DNA, 25 bp, Homo sapien
atccttcttcatgattttcccgaca

SEQ ID NO: 5849253 - DNA, 25 bp, Homo sapien
ggcatcggcatatggaaactccttc

SEQ ID NO: 5849254 - DNA, 25 bp, Homo sapien
ggaacggtcaaagcgtctacttcac

SEQ ID NO: 5849255 - DNA, 25 bp, Homo sapien
ctgaggaacgcttggcatgatctat

SEQ ID NO: 5849256 - DNA, 25 bp, Homo sapien
cacttcataaaaaggaatgacaacg

SEQ ID NO: 5849257 - DNA, 25 bp, Homo sapien
cttttacggcatcggcatatggaaa

SEQ ID NO: 5849258 - DNA, 25 bp, Homo sapien
tctattatacttccctctttcggaa

SEQ ID NO: 5849259 - DNA, 25 bp, Homo sapien
gtacggctgatggaacatatccttc

SEQ ID NO: 5849260 - DNA, 25 bp, Homo sapien
aaaaaaggcgccctccgctgacgct

SEQ ID NO: 5849261 - DNA, 25 bp, Homo sapien
gggaaatgaagcgcgagctgttctt

SEQ ID NO: 5849262 - DNA, 25 bp, Homo sapien
cgctgagagccgttccatatgcgcc

SEQ ID NO: 5849263 - DNA, 25 bp, Homo sapien
ctttttcggtcatgacgagaatcgt

SEQ ID NO: 5849264 - DNA, 25 bp, Homo sapien
cacttgcttttacggcatcggcata

SEQ ID NO: 5849265 - DNA, 25 bp, Homo sapien
ggcatatggaaactccttcggaagc

SEQ ID NO: 5849266 - DNA, 25 bp, Homo sapien
gaatcgttgggcctgctccgctgag

SEQ ID NO: 5849267 - DNA, 25 bp, Homo sapien
tgatcgcagcaatgaggatattgct

SEQ ID NO: 5849268 - DNA, 25 bp, Homo sapien
tgtcagcacttcataaaaaggaatg

SEQ ID NO: 5849269 - DNA, 25 bp, Homo sapien
ctgctccgctgagagccgttccata

SEQ ID NO: 5849270 - DNA, 25 bp, Homo sapien
atcgctgtgatgtcgtctgcggtta

SEQ ID NO: 5849271 - DNA, 25 bp, Homo sapien
ttatctccagcaaaaaaaggcgccc

SEQ ID NO: 5849272 - DNA, 25 bp, Homo sapien
acaacgactacgtcaatgtcagcat

SEQ ID NO: 5849273 - DNA, 25 bp, Homo sapien
tgaagcgcgagctgttcttttagct

SEQ ID NO: 5849274 - DNA, 25 bp, Homo sapien
tcgtctgcggttatcagcttttcat

SEQ ID NO: 5849275 - DNA, 25 bp, Homo sapien
tgaggatattgctgacagcacttgc

SEQ ID NO: 5849276 - DNA, 25 bp, Homo sapien
aggcgccctccgctgacgctgagga

SEQ ID NO: 5849277 - DNA, 25 bp, Homo sapien
ggaatgacaacgactacgtcaatgt

SEQ ID NO: 5849278 - DNA, 25 bp, Homo sapien
tctttcggaacggtcaaagcgtcta

SEQ ID NO: 5849279 - DNA, 25 bp, Homo sapien
ataaaaaggaatgacaacgactacg

SEQ ID NO: 5849280 - DNA, 25 bp, Homo sapien
acttcacaatgagggaaatgaagcg

SEQ ID NO: 5849281 - DNA, 25 bp, Homo sapien
aacgcttggcatgatctatacactt

SEQ ID NO: 5849282 - DNA, 25 bp, Homo sapien
gcggccaatccttggacatgatcgc

SEQ ID NO: 5849283 - DNA, 25 bp, Homo sapien
gatctatacactttttacttgatat

SEQ ID NO: 5849284 - DNA, 25 bp, Homo sapien
gagccgttccatatgcgcccttcat

SEQ ID NO: 5849285 - DNA, 25 bp, Homo sapien
tccttcggaagcacgtctctcgcgt

SEQ ID NO: 5849286 - DNA, 25 bp, Homo sapien
gacaatcgctgtgatgtcgtctgcg

SEQ ID NO: 5849287 - DNA, 25 bp, Homo sapien
caggtaacacttccgctgctgcggc

SEQ ID NO: 5849288 - DNA, 25 bp, Homo sapien
gttcaagaagtcaaaagcacatatc

SEQ ID NO: 5849289 - DNA, 25 bp, Homo sapien
ctgtcatgtacggagccgagattat

SEQ ID NO: 5849290 - DNA, 25 bp, Homo sapien
gctgcggcagcatatgcagcccgtg

SEQ ID NO: 5849291 - DNA, 25 bp, Homo sapien
aacaccggcgctaactttacatgaa

SEQ ID NO: 5849292 - DNA, 25 bp, Homo sapien
aggaaacacacctcttattcacctg

SEQ ID NO: 5849293 - DNA, 25 bp, Homo sapien
ttggaaaactcgctcaagctgtcat

SEQ ID NO: 5849294 - DNA, 25 bp, Homo sapien
tcgaaaattacatctgtgttctcag

SEQ ID NO: 5849295 - DNA, 25 bp, Homo sapien
aatcctacgggatcatttaaagatc

SEQ ID NO: 5849296 - DNA, 25 bp, Homo sapien
cagagcggggcgtgacgtttgaaaa

SEQ ID NO: 5849297 - DNA, 25 bp, Homo sapien
aaaagcacatatcgtgtagaaggga

SEQ ID NO: 5849298 - DNA, 25 bp, Homo sapien
gtcacacatcatacatcagaagctg

SEQ ID NO: 5849299 - DNA, 25 bp, Homo sapien
cggaatggttatggctgtggcaaag

SEQ ID NO: 5849300 - DNA, 25 bp, Homo sapien
cacacctcttattcacctgccgaag

SEQ ID NO: 5849301 - DNA, 25 bp, Homo sapien
catcaatataaagaatttttacctg

SEQ ID NO: 5849302 - DNA, 25 bp, Homo sapien
agaatttttacctgtaacagatcaa

SEQ ID NO: 5849303 - DNA, 25 bp, Homo sapien
atcccgaacggaaaaattgcatttg

SEQ ID NO: 5849304 - DNA, 25 bp, Homo sapien
gctaacatgaaatgcattgtcatca

SEQ ID NO: 5849305 - DNA, 25 bp, Homo sapien
ctcggaattgagcttcatgtcaaaa

SEQ ID NO: 5849306 - DNA, 25 bp, Homo sapien
atgaaatgcattgtcatcatcccga

SEQ ID NO: 5849307 - DNA, 25 bp, Homo sapien
acggaaggcgtcaatcctacgggat

SEQ ID NO: 5849308 - DNA, 25 bp, Homo sapien
aagatcgcggaatggttatggctgt

SEQ ID NO: 5849309 - DNA, 25 bp, Homo sapien
agatcaaacaccggcgctaacttta

SEQ ID NO: 5849310 - DNA, 25 bp, Homo sapien
acacttccgctgctgcggcagcata

SEQ ID NO: 5849311 - DNA, 25 bp, Homo sapien
cgtgtagaagggaacggttggagct

SEQ ID NO: 5849312 - DNA, 25 bp, Homo sapien
ggccatgatgagttagctgaaatcg

SEQ ID NO: 5849313 - DNA, 25 bp, Homo sapien
ttagctgaaatcgtaattgtcacac

SEQ ID NO: 5849314 - DNA, 25 bp, Homo sapien
ctaaatgatttggaagtcgttcaag

SEQ ID NO: 5849315 - DNA, 25 bp, Homo sapien
tcatttaaagatcgcggaatggtta

SEQ ID NO: 5849316 - DNA, 25 bp, Homo sapien
aactcgctcaagctgtcatgtacgg

SEQ ID NO: 5849317 - DNA, 25 bp, Homo sapien
caaaacctaaatgatttggaagtcg

SEQ ID NO: 5849318 - DNA, 25 bp, Homo sapien
tcttattcacctgccgaagctgtct

SEQ ID NO: 5849319 - DNA, 25 bp, Homo sapien
gaaatcgtaattgtcacacatcata

SEQ ID NO: 5849320 - DNA, 25 bp, Homo sapien
gatgagttagctgaaatcgtaattg

SEQ ID NO: 5849321 - DNA, 25 bp, Homo sapien
cttcatgtcaaaacggaaggcgtca

SEQ ID NO: 5849322 - DNA, 25 bp, Homo sapien
tatgcagcccgtgctaacatgaaat

SEQ ID NO: 5849323 - DNA, 25 bp, Homo sapien
tgtaacagatcaaacaccggcgcta

SEQ ID NO: 5849324 - DNA, 25 bp, Homo sapien
aggcaatgacacgattatgtgcgcg

SEQ ID NO: 5849325 - DNA, 25 bp, Homo sapien
agtgatatcctgcaaaacctaaatg

SEQ ID NO: 5849326 - DNA, 25 bp, Homo sapien
tgtacggagccgagattatcgcaat

SEQ ID NO: 5849327 - DNA, 25 bp, Homo sapien
ggcgtcaatcctacgggatcattta

SEQ ID NO: 5849328 - DNA, 25 bp, Homo sapien
aactttacatgaaggaaacacacct

SEQ ID NO: 5849329 - DNA, 25 bp, Homo sapien
attacatctgtgttctcagagcggg

SEQ ID NO: 5849330 - DNA, 25 bp, Homo sapien
gcccgtgctaacatgaaatgcattg

SEQ ID NO: 5849331 - DNA, 25 bp, Homo sapien
attaaaggccatgatgagttagctg

SEQ ID NO: 5849332 - DNA, 25 bp, Homo sapien
gatttcagtgatatcctgcaaaacc

SEQ ID NO: 5849333 - DNA, 25 bp, Homo sapien
acatgaaggaaacacacctcttatt

SEQ ID NO: 5849334 - DNA, 25 bp, Homo sapien
acgggatcatttaaagatcgcggaa

SEQ ID NO: 5849335 - DNA, 25 bp, Homo sapien
ttgcatttggaaaactcgctcaagc

SEQ ID NO: 5849336 - DNA, 25 bp, Homo sapien
gaagctgatttcagtgatatcctgc

SEQ ID NO: 5849337 - DNA, 25 bp, Homo sapien
ggcgctaactttacatgaaggaaac

SEQ ID NO: 5849338 - DNA, 25 bp, Homo sapien
gaagtcaaaagcacatatcgtgtag

SEQ ID NO: 5849339 - DNA, 25 bp, Homo sapien
gaagggaacggttggagctaatgtg

SEQ ID NO: 5849340 - DNA, 25 bp, Homo sapien
ggctgtggcaaaggcaaaagaagaa

SEQ ID NO: 5849341 - DNA, 25 bp, Homo sapien
ggcaaaggcaaaagaagaaggcaat

SEQ ID NO: 5849342 - DNA, 25 bp, Homo sapien
ccgaagctgtctgagcagctcggaa

SEQ ID NO: 5849343 - DNA, 25 bp, Homo sapien
tgcattgtcatcatcccgaacggaa

SEQ ID NO: 5849344 - DNA, 25 bp, Homo sapien
taatgtggaaaggacttatccatca

SEQ ID NO: 5849345 - DNA, 25 bp, Homo sapien
acatcagaagctgatttcagtgata

SEQ ID NO: 5849346 - DNA, 25 bp, Homo sapien
agaagaaggcaatgacacgattatg

SEQ ID NO: 5849347 - DNA, 25 bp, Homo sapien
ctgccaattaaaggccatgatgagt

SEQ ID NO: 5849348 - DNA, 25 bp, Homo sapien
cacctgccgaagctgtctgagcagc

SEQ ID NO: 5849349 - DNA, 25 bp, Homo sapien
gaagtcgttcaagaagtcaaaagca

SEQ ID NO: 5849350 - DNA, 25 bp, Homo sapien
gtaattgtcacacatcatacatcag

SEQ ID NO: 5849351 - DNA, 25 bp, Homo sapien
ccgctgctgcggcagcatatgcagc

SEQ ID NO: 5849352 - DNA, 25 bp, Homo sapien
aacggttggagctaatgtggaaagg

SEQ ID NO: 5849353 - DNA, 25 bp, Homo sapien
tttacctgtaacagatcaaacaccg

SEQ ID NO: 5849354 - DNA, 25 bp, Homo sapien
gcagcatatgcagcccgtgctaaca

SEQ ID NO: 5849355 - DNA, 25 bp, Homo sapien
gtcaaaacggaaggcgtcaatccta

SEQ ID NO: 5849356 - DNA, 25 bp, Homo sapien
gagcagctcggaattgagcttcatg

SEQ ID NO: 5849357 - DNA, 25 bp, Homo sapien
gaaaaattgcatttggaaaactcgc

SEQ ID NO: 5849358 - DNA, 25 bp, Homo sapien
gacttatccatcaatataaagaatt

SEQ ID NO: 5849359 - DNA, 25 bp, Homo sapien
ctcaagctgtcatgtacggagccga

SEQ ID NO: 5849360 - DNA, 25 bp, Homo sapien
tttgaaaaaatccttcagctgccaa

SEQ ID NO: 5849361 - DNA, 25 bp, Homo sapien
ctgtctgagcagctcggaattgagc

SEQ ID NO: 5849362 - DNA, 25 bp, Homo sapien
ggcaaaagaagaaggcaatgacacg

SEQ ID NO: 5849363 - DNA, 25 bp, Homo sapien
gtgacgtttgaaaaaatccttcagc

SEQ ID NO: 5849364 - DNA, 25 bp, Homo sapien
tgtgcgcgtcaacaggtaacacttc

SEQ ID NO: 5849365 - DNA, 25 bp, Homo sapien
cgtcaacaggtaacacttccgctgc

SEQ ID NO: 5849366 - DNA, 25 bp, Homo sapien
gattatgtgcgcgtcaacaggtaac

SEQ ID NO: 5849367 - DNA, 25 bp, Homo sapien
acatatcgtgtagaagggaacggtt

SEQ ID NO: 5849368 - DNA, 25 bp, Homo sapien
tgacacgattatgtgcgcgtcaaca

SEQ ID NO: 5849369 - DNA, 25 bp, Homo sapien
gatttggaagtcgttcaagaagtca

SEQ ID NO: 5849370 - DNA, 25 bp, Homo sapien
aaaatccttcagctgccaattaaag

SEQ ID NO: 5849371 - DNA, 25 bp, Homo sapien
ggaaaggacttatccatcaatataa

SEQ ID NO: 5849372 - DNA, 25 bp, Homo sapien
atcctgcaaaacctaaatgatttgg

SEQ ID NO: 5849373 - DNA, 25 bp, Homo sapien
gtcatcatcccgaacggaaaaattg

SEQ ID NO: 5849374 - DNA, 25 bp, Homo sapien
tggagctaatgtggaaaggacttat

SEQ ID NO: 5849375 - DNA, 25 bp, Homo sapien
ggttatggctgtggcaaaggcaaaa

SEQ ID NO: 5849376 - DNA, 25 bp, Homo sapien
attgagcttcatgtcaaaacggaag

SEQ ID NO: 5849377 - DNA, 25 bp, Homo sapien
cttcagctgccaattaaaggccatg

SEQ ID NO: 5849378 - DNA, 25 bp, Homo sapien
catcatacatcagaagctgatttca

SEQ ID NO: 5849379 - DNA, 25 bp, Homo sapien
gtctcttgtcagcacttcataaaaa

SEQ ID NO: 5849380 - DNA, 25 bp, Homo sapien
aggcacaagcatcgcccggtacggc

SEQ ID NO: 5849381 - DNA, 25 bp, Homo sapien
tctacttttgacagctcaggcacaa

SEQ ID NO: 5849382 - DNA, 25 bp, Homo sapien
ttcatctcggcgacgtgctctactt

SEQ ID NO: 5849383 - DNA, 25 bp, Homo sapien
cctttacatgtattcgtttctaata

SEQ ID NO: 5849384 - DNA, 25 bp, Homo sapien
atcagcttttcatattcatctcctc

SEQ ID NO: 5849385 - DNA, 25 bp, Homo sapien
tttgacagctcaggcacaagcatcg

SEQ ID NO: 5849386 - DNA, 25 bp, Homo sapien
tcaatgtcagcattcgggacgcgga

SEQ ID NO: 5849387 - DNA, 25 bp, Homo sapien
tggaaactccttcggaagcacgtct

SEQ ID NO: 5849388 - DNA, 25 bp, Homo sapien
gcgtctacttcacaatgagggaaat

SEQ ID NO: 5849389 - DNA, 25 bp, Homo sapien
ggaagcacgtctctcgcgtctcttg

SEQ ID NO: 5849390 - DNA, 25 bp, Homo sapien
ttttcatattcatctcctcctttac

SEQ ID NO: 5849391 - DNA, 25 bp, Homo sapien
cctccgctgacgctgaggaacgctt

SEQ ID NO: 5849392 - DNA, 25 bp, Homo sapien
tctccctttcctttttcggtcatga

SEQ ID NO: 5849393 - DNA, 25 bp, Homo sapien
aagcatcgcccggtacggctgatgg

SEQ ID NO: 5849394 - DNA, 25 bp, Homo sapien
tctcgcgtctcttgtcagcacttca

SEQ ID NO: 5849395 - DNA, 25 bp, Homo sapien
tctcctcctttacatgtattcgttt

SEQ ID NO: 5849396 - DNA, 25 bp, Homo sapien
gtgatgtcgtctgcggttatcagct

SEQ ID NO: 5849397 - DNA, 25 bp, Homo sapien
aataaaactcctttatctccagcaa

SEQ ID NO: 5849398 - DNA, 25 bp, Homo sapien
tgatataaaggatttcgctctatta

SEQ ID NO: 5849399 - DNA, 25 bp, Homo sapien
ttgggcctgctccgctgagagccgt

SEQ ID NO: 5849400 - DNA, 25 bp, Homo sapien
ctgatggaacatatccttcttcatg

SEQ ID NO: 5849401 - DNA, 25 bp, Homo sapien
aatccttggacatgatcgcagcaat

SEQ ID NO: 5849402 - DNA, 25 bp, Homo sapien
caatgagggaaatgaagcgcgagct

SEQ ID NO: 5849403 - DNA, 25 bp, Homo sapien
gcgcccttcatctcggcgacgtgct

SEQ ID NO: 5849404 - DNA, 25 bp, Homo sapien
tggacatgatcgcagcaatgaggat

SEQ ID NO: 5849405 - DNA, 25 bp, Homo sapien
tttcgctctattatacttccctctt

SEQ ID NO: 5849406 - DNA, 25 bp, Homo sapien
acgtgctctacttttgacagctcag

SEQ ID NO: 5849407 - DNA, 25 bp, Homo sapien
tcggcgacgtgctctacttttgaca

SEQ ID NO: 5849408 - DNA, 25 bp, Homo sapien
gcggttatcagcttttcatattcat

SEQ ID NO: 5849409 - DNA, 25 bp, Homo sapien
tgacagcacttgcttttacggcatc

SEQ ID NO: 5849410 - DNA, 25 bp, Homo sapien
tttacttgatataaaggatttcgct

SEQ ID NO: 5849411 - DNA, 25 bp, Homo sapien
cggtcatgacgagaatcgttgggcc

SEQ ID NO: 5849412 - DNA, 25 bp, Homo sapien
cgacaagcggccaatccttggacat

SEQ ID NO: 5849413 - DNA, 25 bp, Homo sapien
cctttcctttttcggtcatgacgag

SEQ ID NO: 5849414 - DNA, 25 bp, Homo sapien
gtcaaagcgtctacttcacaatgag

SEQ ID NO: 5849415 - DNA, 25 bp, Homo sapien
cttcatgattttcccgacaagcggc

SEQ ID NO: 5849416 - DNA, 25 bp, Homo sapien
gaacatatccttcttcatgattttc

SEQ ID NO: 5849417 - DNA, 25 bp, Homo sapien
tgacgagaatcgttgggcctgctcc

SEQ ID NO: 5849418 - DNA, 25 bp, Homo sapien
catgtattcgtttctaataaaactc

SEQ ID NO: 5849419 - DNA, 25 bp, Homo sapien
ccatatgcgcccttcatctcggcga

SEQ ID NO: 5849420 - DNA, 25 bp, Homo sapien
agctcaggcacaagcatcgcccggt

SEQ ID NO: 5849421 - DNA, 25 bp, Homo sapien
aaaggatttcgctctattatacttc

SEQ ID NO: 5849422 - DNA, 25 bp, Homo sapien
ccagcaaaaaaaggcgccctccgct

SEQ ID NO: 5849423 - DNA, 25 bp, Homo sapien
tgttcttttagctcttctccctttc

SEQ ID NO: 5849424 - DNA, 25 bp, Homo sapien
actacgtcaatgtcagcattcggga

SEQ ID NO: 5849425 - DNA, 25 bp, Homo sapien
ttctaataaaactcctttatctcca

SEQ ID NO: 5849426 - DNA, 25 bp, Homo sapien
tattgctgacagcacttgcttttac

SEQ ID NO: 5849427 - DNA, 25 bp, Homo sapien
acgtctctcgcgtctcttgtcagca

SEQ ID NO: 5849428 - DNA, 25 bp, Homo sapien
actcctttatctccagcaaaaaaag

SEQ ID NO: 5849429 - DNA, 25 bp, Homo sapien
cgcccggtacggctgatggaacata

SEQ ID NO: 5849430 - DNA, 25 bp, Homo sapien
tggcatgatctatacactttttact

SEQ ID NO: 5849431 - DNA, 25 bp, Homo sapien
acactttttacttgatataaaggat

SEQ ID NO: 5849432 - DNA, 25 bp, Homo sapien
ctgacgctgaggaacgcttggcatg

SEQ ID NO: 5849433 - DNA, 25 bp, Homo sapien
cagcaatgaggatattgctgacagc

SEQ ID NO: 5849434 - DNA, 25 bp, Homo sapien
attttcccgacaagcggccaatcct

SEQ ID NO: 5849435 - DNA, 25 bp, Homo sapien
tattcatctcctcctttacatgtat

SEQ ID NO: 5849436 - DNA, 25 bp, Homo sapien
atccttcttcatgattttcccgaca

SEQ ID NO: 5849437 - DNA, 25 bp, Homo sapien
ggcatcggcatatggaaactccttc

SEQ ID NO: 5849438 - DNA, 25 bp, Homo sapien
ggaacggtcaaagcgtctacttcac

SEQ ID NO: 5849439 - DNA, 25 bp, Homo sapien
ctgaggaacgcttggcatgatctat

SEQ ID NO: 5849440 - DNA, 25 bp, Homo sapien
cttttacggcatcggcatatggaaa

SEQ ID NO: 5849441 - DNA, 25 bp, Homo sapien
tctattatacttccctctttcggaa

SEQ ID NO: 5849442 - DNA, 25 bp, Homo sapien
aaaaaaggcgccctccgctgacgct

SEQ ID NO: 5849443 - DNA, 25 bp, Homo sapien
gtacggctgatggaacatatccttc

SEQ ID NO: 5849444 - DNA, 25 bp, Homo sapien
gggaaatgaagcgcgagctgttctt

SEQ ID NO: 5849445 - DNA, 25 bp, Homo sapien
cacttcataaaaaggaatgacaacg

SEQ ID NO: 5849446 - DNA, 25 bp, Homo sapien
cgctgagagccgttccatatgcgcc

SEQ ID NO: 5849447 - DNA, 25 bp, Homo sapien
gcgagctgttcttttagctcttctc

SEQ ID NO: 5849448 - DNA, 25 bp, Homo sapien
ctttttcggtcatgacgagaatcgt

SEQ ID NO: 5849449 - DNA, 25 bp, Homo sapien
cacttgcttttacggcatcggcata

SEQ ID NO: 5849450 - DNA, 25 bp, Homo sapien
gaatcgttgggcctgctccgctgag

SEQ ID NO: 5849451 - DNA, 25 bp, Homo sapien
ggcatatggaaactccttcggaagc

SEQ ID NO: 5849452 - DNA, 25 bp, Homo sapien
tgtcagcacttcataaaaaggaatg

SEQ ID NO: 5849453 - DNA, 25 bp, Homo sapien
ctgctccgctgagagccgttccata

SEQ ID NO: 5849454 - DNA, 25 bp, Homo sapien
tgatcgcagcaatgaggatattgct

SEQ ID NO: 5849455 - DNA, 25 bp, Homo sapien
atcgctgtgatgtcgtctgcggtta

SEQ ID NO: 5849456 - DNA, 25 bp, Homo sapien
ttatctccagcaaaaaaaggcgccc

SEQ ID NO: 5849457 - DNA, 25 bp, Homo sapien
tgaagcgcgagctgttcttttagct

SEQ ID NO: 5849458 - DNA, 25 bp, Homo sapien
tcgtctgcggttatcagcttttcat

SEQ ID NO: 5849459 - DNA, 25 bp, Homo sapien
tgaggatattgctgacagcacttgc

SEQ ID NO: 5849460 - DNA, 25 bp, Homo sapien
aggcgccctccgctgacgctgagga

SEQ ID NO: 5849461 - DNA, 25 bp, Homo sapien
acaacgactacgtcaatgtcagcat

SEQ ID NO: 5849462 - DNA, 25 bp, Homo sapien
ggaatgacaacgactacgtcaatgt

SEQ ID NO: 5849463 - DNA, 25 bp, Homo sapien
tctttcggaacggtcaaagcgtcta

SEQ ID NO: 5849464 - DNA, 25 bp, Homo sapien
acttcacaatgagggaaatgaagcg

SEQ ID NO: 5849465 - DNA, 25 bp, Homo sapien
ataaaaaggaatgacaacgactacg

SEQ ID NO: 5849466 - DNA, 25 bp, Homo sapien
gagccgttccatatgcgcccttcat

SEQ ID NO: 5849467 - DNA, 25 bp, Homo sapien
aacgcttggcatgatctatacactt

SEQ ID NO: 5849468 - DNA, 25 bp, Homo sapien
gcggccaatccttggacatgatcgc

SEQ ID NO: 5849469 - DNA, 25 bp, Homo sapien
gatctatacactttttacttgatat

SEQ ID NO: 5849470 - DNA, 25 bp, Homo sapien
tccttcggaagcacgtctctcgcgt

SEQ ID NO: 5849471 - DNA, 25 bp, Homo sapien
gacaatcgctgtgatgtcgtctgcg

SEQ ID NO: 5849472 - DNA, 25 bp, Homo sapien
gaaaacgattcatattgcagaagac

SEQ ID NO: 5849473 - DNA, 25 bp, Homo sapien
agtcgatggacttcctgatattgtt

SEQ ID NO: 5849474 - DNA, 25 bp, Homo sapien
agctgatgaacagatttctacaatt

SEQ ID NO: 5849475 - DNA, 25 bp, Homo sapien
gtttgacgggaatatcgactcttgt

SEQ ID NO: 5849476 - DNA, 25 bp, Homo sapien
ttctaaaagcggaagcgctgatgtt

SEQ ID NO: 5849477 - DNA, 25 bp, Homo sapien
gccgaatacgaagaaagctgtaata

SEQ ID NO: 5849478 - DNA, 25 bp, Homo sapien
tattgcagaagacatgtttcatagc

SEQ ID NO: 5849479 - DNA, 25 bp, Homo sapien
tcatagcaaggaggataaagctgat

SEQ ID NO: 5849480 - DNA, 25 bp, Homo sapien
tcgctctgtctcttctaaaagcgga

SEQ ID NO: 5849481 - DNA, 25 bp, Homo sapien
ccacttttaatatctcaacggcctc

SEQ ID NO: 5849482 - DNA, 25 bp, Homo sapien
tctgttccggaagccgaatacgaag

SEQ ID NO: 5849483 - DNA, 25 bp, Homo sapien
aagagcttgcgggttttgtgaaggc

SEQ ID NO: 5849484 - DNA, 25 bp, Homo sapien
cggtgttgcatcgatacaggcaggt

SEQ ID NO: 5849485 - DNA, 25 bp, Homo sapien
gctgaaacgctgatgaatatgatga

SEQ ID NO: 5849486 - DNA, 25 bp, Homo sapien
taagcatggcaatcgctctgtctct

SEQ ID NO: 5849487 - DNA, 25 bp, Homo sapien
ggtgaggctgaaacgctgatgaata

SEQ ID NO: 5849488 - DNA, 25 bp, Homo sapien
aaagccggtgcgctgctgaaaacga

SEQ ID NO: 5849489 - DNA, 25 bp, Homo sapien
tgcgaaaatcgctaagcatggcaat

SEQ ID NO: 5849490 - DNA, 25 bp, Homo sapien
tgcatcgatacaggcaggtgctggc

SEQ ID NO: 5849491 - DNA, 25 bp, Homo sapien
aatcgctaagcatggcaatcgctct

SEQ ID NO: 5849492 - DNA, 25 bp, Homo sapien
ggcctcggcaattgttgcctcggca

SEQ ID NO: 5849493 - DNA, 25 bp, Homo sapien
gggagacgccagaagagcttgcggg

SEQ ID NO: 5849494 - DNA, 25 bp, Homo sapien
cgccagaagagcttgcgggttttgt

SEQ ID NO: 5849495 - DNA, 25 bp, Homo sapien
gctgctgaaaacgattcatattgca

SEQ ID NO: 5849496 - DNA, 25 bp, Homo sapien
gtgtattgcctacattgggtttgac

SEQ ID NO: 5849497 - DNA, 25 bp, Homo sapien
acacgctcttacagtcgatggactt

SEQ ID NO: 5849498 - DNA, 25 bp, Homo sapien
aaagaacggtgttgcatcgatacag

SEQ ID NO: 5849499 - DNA, 25 bp, Homo sapien
aaagctgtaataaagccggtgcgct

SEQ ID NO: 5849500 - DNA, 25 bp, Homo sapien
catgtttcatagcaaggaggataaa

SEQ ID NO: 5849501 - DNA, 25 bp, Homo sapien
ccttctgaaatgggggggatattgt

SEQ ID NO: 5849502 - DNA, 25 bp, Homo sapien
tctcaacggcctcggcaattgttgc

SEQ ID NO: 5849503 - DNA, 25 bp, Homo sapien
gtatttccacttttaatatctcaac

SEQ ID NO: 5849504 - DNA, 25 bp, Homo sapien
gatttctacaattgtgcgttgacgg

SEQ ID NO: 5849505 - DNA, 25 bp, Homo sapien
tattgttgatacatgcggaacaggg

SEQ ID NO: 5849506 - DNA, 25 bp, Homo sapien
ctcggcagctggtgcgaaaatcgct

SEQ ID NO: 5849507 - DNA, 25 bp, Homo sapien
cacgatgagtgtaaagaacggtgtt

SEQ ID NO: 5849508 - DNA, 25 bp, Homo sapien
gagtgtaaagaacggtgttgcatcg

SEQ ID NO: 5849509 - DNA, 25 bp, Homo sapien
tgaacagatttctacaattgtgcgt

SEQ ID NO: 5849510 - DNA, 25 bp, Homo sapien
aagcggaagcgctgatgttttagag

SEQ ID NO: 5849511 - DNA, 25 bp, Homo sapien
atgatgatggcagcggaaatgactc

SEQ ID NO: 5849512 - DNA, 25 bp, Homo sapien
cttgcgggttttgtgaaggcaatgc

SEQ ID NO: 5849513 - DNA, 25 bp, Homo sapien
cattgggtttgacgggaatatcgac

SEQ ID NO: 5849514 - DNA, 25 bp, Homo sapien
caaggaggataaagctgatgaacag

SEQ ID NO: 5849515 - DNA, 25 bp, Homo sapien
gctggcattgttgctgattctgttc

SEQ ID NO: 5849516 - DNA, 25 bp, Homo sapien
gatattgtcaattcttgctcatcgg

SEQ ID NO: 5849517 - DNA, 25 bp, Homo sapien
cgggaatatcgactcttgtattacg

SEQ ID NO: 5849518 - DNA, 25 bp, Homo sapien
atggcagcggaaatgactccttctg

SEQ ID NO: 5849519 - DNA, 25 bp, Homo sapien
ttaatatctcaacggcctcggcaat

SEQ ID NO: 5849520 - DNA, 25 bp, Homo sapien
ggcaatgcgggcacacgctcttaca

SEQ ID NO: 5849521 - DNA, 25 bp, Homo sapien
atgactccttctgaaatggggggga

SEQ ID NO: 5849522 - DNA, 25 bp, Homo sapien
atacaggcaggtgctggcattgttg

SEQ ID NO: 5849523 - DNA, 25 bp, Homo sapien
tacaattgtgcgttgacggaaaaac

SEQ ID NO: 5849524 - DNA, 25 bp, Homo sapien
tggacttcctgatattgttgataca

SEQ ID NO: 5849525 - DNA, 25 bp, Homo sapien
acgaagaaagctgtaataaagccgg

SEQ ID NO: 5849526 - DNA, 25 bp, Homo sapien
tattacgattcgcacgatgagtgta

SEQ ID NO: 5849527 - DNA, 25 bp, Homo sapien
aacccttactgccggtgaggctgaa

SEQ ID NO: 5849528 - DNA, 25 bp, Homo sapien
tgtgaaggcaatgcgggcacacgct

SEQ ID NO: 5849529 - DNA, 25 bp, Homo sapien
ggcaattgttgcctcggcagctggt

SEQ ID NO: 5849530 - DNA, 25 bp, Homo sapien
tcttacagtcgatggacttcctgat

SEQ ID NO: 5849531 - DNA, 25 bp, Homo sapien
acgctgatgaatatgatgatggcag

SEQ ID NO: 5849532 - DNA, 25 bp, Homo sapien
gggggggatattgtcaattcttgct

SEQ ID NO: 5849533 - DNA, 25 bp, Homo sapien
cggtgcgctgctgaaaacgattcat

SEQ ID NO: 5849534 - DNA, 25 bp, Homo sapien
ggataaagctgatgaacagatttct

SEQ ID NO: 5849535 - DNA, 25 bp, Homo sapien
aagcgctgatgttttagaggagcta

SEQ ID NO: 5849536 - DNA, 25 bp, Homo sapien
gtaataaagccggtgcgctgctgaa

SEQ ID NO: 5849537 - DNA, 25 bp, Homo sapien
tcctgatattgttgatacatgcgga

SEQ ID NO: 5849538 - DNA, 25 bp, Homo sapien
gattcatattgcagaagacatgttt

SEQ ID NO: 5849539 - DNA, 25 bp, Homo sapien
tgtctcttctaaaagcggaagcgct

SEQ ID NO: 5849540 - DNA, 25 bp, Homo sapien
atcggggggagacgccagaagagct

SEQ ID NO: 5849541 - DNA, 25 bp, Homo sapien
gattcgcacgatgagtgtaaagaac

SEQ ID NO: 5849542 - DNA, 25 bp, Homo sapien
tcttgctcatcggggggagacgcca

SEQ ID NO: 5849543 - DNA, 25 bp, Homo sapien
atgaatatgatgatggcagcggaaa

SEQ ID NO: 5849544 - DNA, 25 bp, Homo sapien
tgttgcctcggcagctggtgcgaaa

SEQ ID NO: 5849545 - DNA, 25 bp, Homo sapien
ccggaagccgaatacgaagaaagct

SEQ ID NO: 5849546 - DNA, 25 bp, Homo sapien
gtcaattcttgctcatcggggggag

SEQ ID NO: 5849547 - DNA, 25 bp, Homo sapien
attgttgctgattctgttccggaag

SEQ ID NO: 5849548 - DNA, 25 bp, Homo sapien
gggttttgtgaaggcaatgcgggca

SEQ ID NO: 5849549 - DNA, 25 bp, Homo sapien
tatcgactcttgtattacgattcgc

SEQ ID NO: 5849550 - DNA, 25 bp, Homo sapien
gcggaaatgactccttctgaaatgg

SEQ ID NO: 5849551 - DNA, 25 bp, Homo sapien
gaaatgggggggatattgtcaattc

SEQ ID NO: 5849552 - DNA, 25 bp, Homo sapien
agctggtgcgaaaatcgctaagcat

SEQ ID NO: 5849553 - DNA, 25 bp, Homo sapien
gcaggtgctggcattgttgctgatt

SEQ ID NO: 5849554 - DNA, 25 bp, Homo sapien
gctgattctgttccggaagccgaat

SEQ ID NO: 5849555 - DNA, 25 bp, Homo sapien
tggcaatcgctctgtctcttctaaa

SEQ ID NO: 5849556 - DNA, 25 bp, Homo sapien
agaagacatgtttcatagcaaggag

SEQ ID NO: 5849557 - DNA, 25 bp, Homo sapien
tgcctacattgggtttgacgggaat

SEQ ID NO: 5849558 - DNA, 25 bp, Homo sapien
ctcttgtattacgattcgcacgatg

SEQ ID NO: 5849559 - DNA, 25 bp, Homo sapien
gcgggcacacgctcttacagtcgat

SEQ ID NO: 5849560 - DNA, 25 bp, Homo sapien
tactgccggtgaggctgaaacgctg

SEQ ID NO: 5849561 - DNA, 25 bp, Homo sapien
aatagccgcctgctgatattccggc

SEQ ID NO: 5849562 - DNA, 25 bp, Homo sapien
catcgtctctattgattcattaaca

SEQ ID NO: 5849563 - DNA, 25 bp, Homo sapien
aaacaaagcatggattgctttacgc

SEQ ID NO: 5849564 - DNA, 25 bp, Homo sapien
tgattcattaacaaaaacacctgca

SEQ ID NO: 5849565 - DNA, 25 bp, Homo sapien
ttccgcctctagacccttttacaga

SEQ ID NO: 5849566 - DNA, 25 bp, Homo sapien
cagcctgtgattccgccgcaagctg

SEQ ID NO: 5849567 - DNA, 25 bp, Homo sapien
gaagctgaatgacgtcgagcttcaa

SEQ ID NO: 5849568 - DNA, 25 bp, Homo sapien
atgaatcaatcacaaagccgtcaac

SEQ ID NO: 5849569 - DNA, 25 bp, Homo sapien
attttttcacatcttccggagatac

SEQ ID NO: 5849570 - DNA, 25 bp, Homo sapien
cgtcaacattatctttaaagcgggc

SEQ ID NO: 5849571 - DNA, 25 bp, Homo sapien
ttcaccgataagtacagctcgcgcc

SEQ ID NO: 5849572 - DNA, 25 bp, Homo sapien
acccttttacagatgaatcaatcac

SEQ ID NO: 5849573 - DNA, 25 bp, Homo sapien
ctttaaagcgggctatttcttgagt

SEQ ID NO: 5849574 - DNA, 25 bp, Homo sapien
gattgctttacgctgagaagtttgt

SEQ ID NO: 5849575 - DNA, 25 bp, Homo sapien
attccggcacacattcccaagaaaa

SEQ ID NO: 5849576 - DNA, 25 bp, Homo sapien
agcgggctatttcttgagttgtgtt

SEQ ID NO: 5849577 - DNA, 25 bp, Homo sapien
cattatctttaaagcgggctatttc

SEQ ID NO: 5849578 - DNA, 25 bp, Homo sapien
cttcaagctcttggcaatacgtgac

SEQ ID NO: 5849579 - DNA, 25 bp, Homo sapien
gtcgagcttcaagctcttggcaata

SEQ ID NO: 5849580 - DNA, 25 bp, Homo sapien
acctcactccctaaacaaagcatgg

SEQ ID NO: 5849581 - DNA, 25 bp, Homo sapien
cgcctgctgatattccggcacacat

SEQ ID NO: 5849582 - DNA, 25 bp, Homo sapien
gcttgcgaagagcagcagcatccgc

SEQ ID NO: 5849583 - DNA, 25 bp, Homo sapien
caatgattcaccgataagtacagct

SEQ ID NO: 5849584 - DNA, 25 bp, Homo sapien
tcagccattttttcacatcttccgg

SEQ ID NO: 5849585 - DNA, 25 bp, Homo sapien
catccgccggtttttcatcaccgtg

SEQ ID NO: 5849586 - DNA, 25 bp, Homo sapien
ccgcaatattttaatgccggtttct

SEQ ID NO: 5849587 - DNA, 25 bp, Homo sapien
tgcaacctgtttttcgacacgaact

SEQ ID NO: 5849588 - DNA, 25 bp, Homo sapien
ttcattgacaaatgttaaatgttct

SEQ ID NO: 5849589 - DNA, 25 bp, Homo sapien
agcatggattgctttacgctgagaa

SEQ ID NO: 5849590 - DNA, 25 bp, Homo sapien
cccatgttcattgacaaatgttaaa

SEQ ID NO: 5849591 - DNA, 25 bp, Homo sapien
gtgattccgccgcaagctgcaaatc

SEQ ID NO: 5849592 - DNA, 25 bp, Homo sapien
tgtttttcgacacgaacttggttca

SEQ ID NO: 5849593 - DNA, 25 bp, Homo sapien
gatacttttcgtttgcttttagcaa

SEQ ID NO: 5849594 - DNA, 25 bp, Homo sapien
cgaataccgcaatattttaatgccg

SEQ ID NO: 5849595 - DNA, 25 bp, Homo sapien
ctgatattccggcacacattcccaa

SEQ ID NO: 5849596 - DNA, 25 bp, Homo sapien
caagctgcaaatcctttagtgaccg

SEQ ID NO: 5849597 - DNA, 25 bp, Homo sapien
aaataaatcctaggtaatcagcctg

SEQ ID NO: 5849598 - DNA, 25 bp, Homo sapien
ggtttcttcacaacctcactcccta

SEQ ID NO: 5849599 - DNA, 25 bp, Homo sapien
tctcatcaatgattcaccgataagt

SEQ ID NO: 5849600 - DNA, 25 bp, Homo sapien
attaacaaaaacacctgcaacctgt

SEQ ID NO: 5849601 - DNA, 25 bp, Homo sapien
gcaaatcctttagtgaccgaatacc

SEQ ID NO: 5849602 - DNA, 25 bp, Homo sapien
tgcttttagcaaaaataaatcctag

SEQ ID NO: 5849603 - DNA, 25 bp, Homo sapien
ctccctaaacaaagcatggattgct

SEQ ID NO: 5849604 - DNA, 25 bp, Homo sapien
caccgtgaagctgaatgacgtcgag

SEQ ID NO: 5849605 - DNA, 25 bp, Homo sapien
cttggttcagccattttttcacatc

SEQ ID NO: 5849606 - DNA, 25 bp, Homo sapien
ttacagatgaatcaatcacaaagcc

SEQ ID NO: 5849607 - DNA, 25 bp, Homo sapien
cacagcctgtcagcttgcgaagagc

SEQ ID NO: 5849608 - DNA, 25 bp, Homo sapien
aacacctgcaacctgtttttcgaca

SEQ ID NO: 5849609 - DNA, 25 bp, Homo sapien
gataagtacagctcgcgccccatgt

SEQ ID NO: 5849610 - DNA, 25 bp, Homo sapien
gaagagcagcagcatccgccggttt

SEQ ID NO: 5849611 - DNA, 25 bp, Homo sapien
ccggtttttcatcaccgtgaagctg

SEQ ID NO: 5849612 - DNA, 25 bp, Homo sapien
tttcgacacgaacttggttcagcca

SEQ ID NO: 5849613 - DNA, 25 bp, Homo sapien
attcccaagaaaatgcaacaccagt

SEQ ID NO: 5849614 - DNA, 25 bp, Homo sapien
ccgccgcaagctgcaaatcctttag

SEQ ID NO: 5849615 - DNA, 25 bp, Homo sapien
tcacatcttccggagatacttttcg

SEQ ID NO: 5849616 - DNA, 25 bp, Homo sapien
ctgagaagtttgtctcatcaatgat

SEQ ID NO: 5849617 - DNA, 25 bp, Homo sapien
ttgtgttatcttgatggtgaagcgc

SEQ ID NO: 5849618 - DNA, 25 bp, Homo sapien
ggcaatacgtgacatcgtctctatt

SEQ ID NO: 5849619 - DNA, 25 bp, Homo sapien
caatcacaaagccgtcaacattatc

SEQ ID NO: 5849620 - DNA, 25 bp, Homo sapien
ccttccatatttcacagcctgtcag

SEQ ID NO: 5849621 - DNA, 25 bp, Homo sapien
ggtaatcagcctgtgattccgccgc

SEQ ID NO: 5849622 - DNA, 25 bp, Homo sapien
atgcaacaccagttccgcctctaga

SEQ ID NO: 5849623 - DNA, 25 bp, Homo sapien
agtttgtctcatcaatgattcaccg

SEQ ID NO: 5849624 - DNA, 25 bp, Homo sapien
tacagctcgcgccccatgttcattg

SEQ ID NO: 5849625 - DNA, 25 bp, Homo sapien
atggtgaagcgccttccatatttca

SEQ ID NO: 5849626 - DNA, 25 bp, Homo sapien
cctttagtgaccgaataccgcaata

SEQ ID NO: 5849627 - DNA, 25 bp, Homo sapien
atcctaggtaatcagcctgtgattc

SEQ ID NO: 5849628 - DNA, 25 bp, Homo sapien
aagaaaatgcaacaccagttccgcc

SEQ ID NO: 5849629 - DNA, 25 bp, Homo sapien
tattttaatgccggtttcttcacaa

SEQ ID NO: 5849630 - DNA, 25 bp, Homo sapien
tttcatcaccgtgaagctgaatgac

SEQ ID NO: 5849631 - DNA, 25 bp, Homo sapien
tttacgctgagaagtttgtctcatc

SEQ ID NO: 5849632 - DNA, 25 bp, Homo sapien
ctgtcagcttgcgaagagcagcagc

SEQ ID NO: 5849633 - DNA, 25 bp, Homo sapien
ctctattgattcattaacaaaaaca

SEQ ID NO: 5849634 - DNA, 25 bp, Homo sapien
tcgcgccccatgttcattgacaaat

SEQ ID NO: 5849635 - DNA, 25 bp, Homo sapien
gaagcgccttccatatttcacagcc

SEQ ID NO: 5849636 - DNA, 25 bp, Homo sapien
gctcttggcaatacgtgacatcgtc

SEQ ID NO: 5849637 - DNA, 25 bp, Homo sapien
cacgaacttggttcagccatttttt

SEQ ID NO: 5849638 - DNA, 25 bp, Homo sapien
atatttcacagcctgtcagcttgcg

SEQ ID NO: 5849639 - DNA, 25 bp, Homo sapien
aatgccggtttcttcacaacctcac

SEQ ID NO: 5849640 - DNA, 25 bp, Homo sapien
ctctagacccttttacagatgaatc

SEQ ID NO: 5849641 - DNA, 25 bp, Homo sapien
cttgagttgtgttatcttgatggtg

SEQ ID NO: 5849642 - DNA, 25 bp, Homo sapien
ttaccaatagccgcctgctgatatt

SEQ ID NO: 5849643 - DNA, 25 bp, Homo sapien
acgtgacatcgtctctattgattca

SEQ ID NO: 5849644 - DNA, 25 bp, Homo sapien
agtgaccgaataccgcaatatttta

SEQ ID NO: 5849645 - DNA, 25 bp, Homo sapien
gacaaatgttaaatgttctaaagaa

SEQ ID NO: 5849646 - DNA, 25 bp, Homo sapien
cagcagcatccgccggtttttcatc

SEQ ID NO: 5849647 - DNA, 25 bp, Homo sapien
caaagccgtcaacattatctttaaa

SEQ ID NO: 5849648 - DNA, 25 bp, Homo sapien
ctatttcttgagttgtgttatcttg

SEQ ID NO: 5849649 - DNA, 25 bp, Homo sapien
gaatgacgtcgagcttcaagctctt

SEQ ID NO: 5849650 - DNA, 25 bp, Homo sapien
tatcttgatggtgaagcgccttcca

SEQ ID NO: 5849651 - DNA, 25 bp, Homo sapien
cttccggagatacttttcgtttgct

SEQ ID NO: 5849652 - DNA, 25 bp, Homo sapien
gcacacattcccaagaaaatgcaac

SEQ ID NO: 5849653 - DNA, 25 bp, Homo sapien
tagcaaaaataaatcctaggtaatc

SEQ ID NO: 5849654 - DNA, 25 bp, Homo sapien
ttcacaacctcactccctaaacaaa

SEQ ID NO: 5849655 - DNA, 25 bp, Homo sapien
tggtcgagcgatggatttccgtctc

SEQ ID NO: 5849656 - DNA, 25 bp, Homo sapien
atggatttccgtctctggtgtagct

SEQ ID NO: 5849657 - DNA, 25 bp, Homo sapien
gtctctggtgtagctgatgatccga

SEQ ID NO: 5849658 - DNA, 25 bp, Homo sapien
tgtagctgatgatccgaataactac

SEQ ID NO: 5849659 - DNA, 25 bp, Homo sapien
accagccagctatcaactcgcgccc

SEQ ID NO: 5849660 - DNA, 25 bp, Homo sapien
gcaactcatcgattgatttacggcg

SEQ ID NO: 5849661 - DNA, 25 bp, Homo sapien
gattgatttacggcgctaaggatga

SEQ ID NO: 5849662 - DNA, 25 bp, Homo sapien
taaggatgactctggtcagagatac

SEQ ID NO: 5849663 - DNA, 25 bp, Homo sapien
tggtcagagatacctggcctggtct

SEQ ID NO: 5849664 - DNA, 25 bp, Homo sapien
ctggtctggacacagtgcccgtgtc

SEQ ID NO: 5849665 - DNA, 25 bp, Homo sapien
gtgcccgtgtcggagccgcgcgaga

SEQ ID NO: 5849666 - DNA, 25 bp, Homo sapien
cgagatatggcccgcgctggagttt

SEQ ID NO: 5849667 - DNA, 25 bp, Homo sapien
ggagtttcaataccggagatcatgc

SEQ ID NO: 5849668 - DNA, 25 bp, Homo sapien
ggagatcatgcaagctggtggctgg

SEQ ID NO: 5849669 - DNA, 25 bp, Homo sapien
ctggtggctggaccaatgtaaatat

SEQ ID NO: 5849670 - DNA, 25 bp, Homo sapien
ccaatgtaaatattgtcatgaacta

SEQ ID NO: 5849671 - DNA, 25 bp, Homo sapien
cgctggttagcaccgcaggtgtaga

SEQ ID NO: 5849672 - DNA, 25 bp, Homo sapien
ttgtcatgaactatatccgtaacct

SEQ ID NO: 5849673 - DNA, 25 bp, Homo sapien
caccgcaggtgtagagaaggcactt

SEQ ID NO: 5849674 - DNA, 25 bp, Homo sapien
tagtgaaacaggggcaatggtgcgc

SEQ ID NO: 5849675 - DNA, 25 bp, Homo sapien
tggtcgagcgatggatttccgtctc

SEQ ID NO: 5849676 - DNA, 25 bp, Homo sapien
atggatttccgtctctggtgtagct

SEQ ID NO: 5849677 - DNA, 25 bp, Homo sapien
gtctctggtgtagctgatgatccga

SEQ ID NO: 5849678 - DNA, 25 bp, Homo sapien
tgtagctgatgatccgaataactac

SEQ ID NO: 5849679 - DNA, 25 bp, Homo sapien
accagccagctatcaactcgcgccc

SEQ ID NO: 5849680 - DNA, 25 bp, Homo sapien
gcaactcatcgattgatttacggcg

SEQ ID NO: 5849681 - DNA, 25 bp, Homo sapien
gattgatttacggcgctaaggatga

SEQ ID NO: 5849682 - DNA, 25 bp, Homo sapien
taaggatgactctggtcagagatac

SEQ ID NO: 5849683 - DNA, 25 bp, Homo sapien
tggtcagagatacctggcctggtct

SEQ ID NO: 5849684 - DNA, 25 bp, Homo sapien
ctggtctggacacagtgcccgtgtc

SEQ ID NO: 5849685 - DNA, 25 bp, Homo sapien
gtgcccgtgtcggagccgcgcgaga

SEQ ID NO: 5849686 - DNA, 25 bp, Homo sapien
cgagatatggcccgcgctggagttt

SEQ ID NO: 5849687 - DNA, 25 bp, Homo sapien
ggagtttcaataccggagatcatgc

SEQ ID NO: 5849688 - DNA, 25 bp, Homo sapien
ggagatcatgcaagctggtggctgg

SEQ ID NO: 5849689 - DNA, 25 bp, Homo sapien
ctggtggctggaccaatgtaaatat

SEQ ID NO: 5849690 - DNA, 25 bp, Homo sapien
ccaatgtaaatattgtcatgaacta

SEQ ID NO: 5849691 - DNA, 25 bp, Homo sapien
cgctggttagcaccgcaggtgtaga

SEQ ID NO: 5849692 - DNA, 25 bp, Homo sapien
ttgtcatgaactatatccgtaacct

SEQ ID NO: 5849693 - DNA, 25 bp, Homo sapien
caccgcaggtgtagagaaggcactt

SEQ ID NO: 5849694 - DNA, 25 bp, Homo sapien
tagtgaaacaggggcaatggtgcgc

SEQ ID NO: 5849695 - DNA, 25 bp, Homo sapien
tggtcgagcgatggatttccgtctc

SEQ ID NO: 5849696 - DNA, 25 bp, Homo sapien
atggatttccgtctctggtgtagct

SEQ ID NO: 5849697 - DNA, 25 bp, Homo sapien
gtctctggtgtagctgatgatccga

SEQ ID NO: 5849698 - DNA, 25 bp, Homo sapien
tgtagctgatgatccgaataactac

SEQ ID NO: 5849699 - DNA, 25 bp, Homo sapien
accagccagctatcaactcgcgccc

SEQ ID NO: 5849700 - DNA, 25 bp, Homo sapien
gcaactcatcgattgatttacggcg

SEQ ID NO: 5849701 - DNA, 25 bp, Homo sapien
gattgatttacggcgctaaggatga

SEQ ID NO: 5849702 - DNA, 25 bp, Homo sapien
taaggatgactctggtcagagatac

SEQ ID NO: 5849703 - DNA, 25 bp, Homo sapien
tggtcagagatacctggcctggtct

SEQ ID NO: 5849704 - DNA, 25 bp, Homo sapien
ctggtctggacacagtgcccgtgtc

SEQ ID NO: 5849705 - DNA, 25 bp, Homo sapien
gtgcccgtgtcggagccgcgcgaga

SEQ ID NO: 5849706 - DNA, 25 bp, Homo sapien
cgagatatggcccgcgctggagttt

SEQ ID NO: 5849707 - DNA, 25 bp, Homo sapien
ggagtttcaataccggagatcatgc

SEQ ID NO: 5849708 - DNA, 25 bp, Homo sapien
ggagatcatgcaagctggtggctgg

SEQ ID NO: 5849709 - DNA, 25 bp, Homo sapien
ctggtggctggaccaatgtaaatat

SEQ ID NO: 5849710 - DNA, 25 bp, Homo sapien
ccaatgtaaatattgtcatgaacta

SEQ ID NO: 5849711 - DNA, 25 bp, Homo sapien
cgctggttagcaccgcaggtgtaga

SEQ ID NO: 5849712 - DNA, 25 bp, Homo sapien
ttgtcatgaactatatccgtaacct

SEQ ID NO: 5849713 - DNA, 25 bp, Homo sapien
caccgcaggtgtagagaaggcactt

SEQ ID NO: 5849714 - DNA, 25 bp, Homo sapien
tagtgaaacaggggcaatggtgcgc

SEQ ID NO: 5849715 - DNA, 25 bp, Homo sapien
tggtcgagcgatggatttccgtctc

SEQ ID NO: 5849716 - DNA, 25 bp, Homo sapien
atggatttccgtctctggtgtagct

SEQ ID NO: 5849717 - DNA, 25 bp, Homo sapien
gtctctggtgtagctgatgatccga

SEQ ID NO: 5849718 - DNA, 25 bp, Homo sapien
tgtagctgatgatccgaataactac

SEQ ID NO: 5849719 - DNA, 25 bp, Homo sapien
accagccagctatcaactcgcgccc

SEQ ID NO: 5849720 - DNA, 25 bp, Homo sapien
gcaactcatcgattgatttacggcg

SEQ ID NO: 5849721 - DNA, 25 bp, Homo sapien
gattgatttacggcgctaaggatga

SEQ ID NO: 5849722 - DNA, 25 bp, Homo sapien
taaggatgactctggtcagagatac

SEQ ID NO: 5849723 - DNA, 25 bp, Homo sapien
tggtcagagatacctggcctggtct

SEQ ID NO: 5849724 - DNA, 25 bp, Homo sapien
ctggtctggacacagtgcccgtgtc

SEQ ID NO: 5849725 - DNA, 25 bp, Homo sapien
gtgcccgtgtcggagccgcgcgaga

SEQ ID NO: 5849726 - DNA, 25 bp, Homo sapien
cgagatatggcccgcgctggagttt

SEQ ID NO: 5849727 - DNA, 25 bp, Homo sapien
ggagtttcaataccggagatcatgc

SEQ ID NO: 5849728 - DNA, 25 bp, Homo sapien
ggagatcatgcaagctggtggctgg

SEQ ID NO: 5849729 - DNA, 25 bp, Homo sapien
ctggtggctggaccaatgtaaatat

SEQ ID NO: 5849730 - DNA, 25 bp, Homo sapien
ccaatgtaaatattgtcatgaacta

SEQ ID NO: 5849731 - DNA, 25 bp, Homo sapien
cgctggttagcaccgcaggtgtaga

SEQ ID NO: 5849732 - DNA, 25 bp, Homo sapien
ttgtcatgaactatatccgtaacct

SEQ ID NO: 5849733 - DNA, 25 bp, Homo sapien
caccgcaggtgtagagaaggcactt

SEQ ID NO: 5849734 - DNA, 25 bp, Homo sapien
tagtgaaacaggggcaatggtgcgc

SEQ ID NO: 5849735 - DNA, 25 bp, Homo sapien
tggtcgagcgatggatttccgtctc

SEQ ID NO: 5849736 - DNA, 25 bp, Homo sapien
atggatttccgtctctggtgtagct

SEQ ID NO: 5849737 - DNA, 25 bp, Homo sapien
gtctctggtgtagctgatgatccga

SEQ ID NO: 5849738 - DNA, 25 bp, Homo sapien
tgtagctgatgatccgaataactac

SEQ ID NO: 5849739 - DNA, 25 bp, Homo sapien
accagccagctatcaactcgcgccc

SEQ ID NO: 5849740 - DNA, 25 bp, Homo sapien
gcaactcatcgattgatttacggcg

SEQ ID NO: 5849741 - DNA, 25 bp, Homo sapien
gattgatttacggcgctaaggatga

SEQ ID NO: 5849742 - DNA, 25 bp, Homo sapien
taaggatgactctggtcagagatac

SEQ ID NO: 5849743 - DNA, 25 bp, Homo sapien
tggtcagagatacctggcctggtct

SEQ ID NO: 5849744 - DNA, 25 bp, Homo sapien
ctggtctggacacagtgcccgtgtc

SEQ ID NO: 5849745 - DNA, 25 bp, Homo sapien
gtgcccgtgtcggagccgcgcgaga

SEQ ID NO: 5849746 - DNA, 25 bp, Homo sapien
cgagatatggcccgcgctggagttt

SEQ ID NO: 5849747 - DNA, 25 bp, Homo sapien
ggagtttcaataccggagatcatgc

SEQ ID NO: 5849748 - DNA, 25 bp, Homo sapien
ggagatcatgcaagctggtggctgg

SEQ ID NO: 5849749 - DNA, 25 bp, Homo sapien
ctggtggctggaccaatgtaaatat

SEQ ID NO: 5849750 - DNA, 25 bp, Homo sapien
ccaatgtaaatattgtcatgaacta

SEQ ID NO: 5849751 - DNA, 25 bp, Homo sapien
cgctggttagcaccgcaggtgtaga

SEQ ID NO: 5849752 - DNA, 25 bp, Homo sapien
ttgtcatgaactatatccgtaacct

SEQ ID NO: 5849753 - DNA, 25 bp, Homo sapien
caccgcaggtgtagagaaggcactt

SEQ ID NO: 5849754 - DNA, 25 bp, Homo sapien
tagtgaaacaggggcaatggtgcgc

SEQ ID NO: 5849755 - DNA, 25 bp, Homo sapien
tggtcgagcgatggatttccgtctc

SEQ ID NO: 5849756 - DNA, 25 bp, Homo sapien
atggatttccgtctctggtgtagct

SEQ ID NO: 5849757 - DNA, 25 bp, Homo sapien
gtctctggtgtagctgatgatccga

SEQ ID NO: 5849758 - DNA, 25 bp, Homo sapien
tgtagctgatgatccgaataactac

SEQ ID NO: 5849759 - DNA, 25 bp, Homo sapien
accagccagctatcaactcgcgccc

SEQ ID NO: 5849760 - DNA, 25 bp, Homo sapien
gcaactcatcgattgatttacggcg

SEQ ID NO: 5849761 - DNA, 25 bp, Homo sapien
gattgatttacggcgctaaggatga

SEQ ID NO: 5849762 - DNA, 25 bp, Homo sapien
taaggatgactctggtcagagatac

SEQ ID NO: 5849763 - DNA, 25 bp, Homo sapien
tggtcagagatacctggcctggtct

SEQ ID NO: 5849764 - DNA, 25 bp, Homo sapien
ctggtctggacacagtgcccgtgtc

SEQ ID NO: 5849765 - DNA, 25 bp, Homo sapien
gtgcccgtgtcggagccgcgcgaga

SEQ ID NO: 5849766 - DNA, 25 bp, Homo sapien
cgagatatggcccgcgctggagttt

SEQ ID NO: 5849767 - DNA, 25 bp, Homo sapien
ggagtttcaataccggagatcatgc

SEQ ID NO: 5849768 - DNA, 25 bp, Homo sapien
ggagatcatgcaagctggtggctgg

SEQ ID NO: 5849769 - DNA, 25 bp, Homo sapien
ctggtggctggaccaatgtaaatat

SEQ ID NO: 5849770 - DNA, 25 bp, Homo sapien
ccaatgtaaatattgtcatgaacta

SEQ ID NO: 5849771 - DNA, 25 bp, Homo sapien
cgctggttagcaccgcaggtgtaga

SEQ ID NO: 5849772 - DNA, 25 bp, Homo sapien
ttgtcatgaactatatccgtaacct

SEQ ID NO: 5849773 - DNA, 25 bp, Homo sapien
caccgcaggtgtagagaaggcactt

SEQ ID NO: 5849774 - DNA, 25 bp, Homo sapien
tagtgaaacaggggcaatggtgcgc

SEQ ID NO: 5849775 - DNA, 25 bp, Homo sapien
tggtcgagcgatggatttccgtctc

SEQ ID NO: 5849776 - DNA, 25 bp, Homo sapien
atggatttccgtctctggtgtagct

SEQ ID NO: 5849777 - DNA, 25 bp, Homo sapien
gtctctggtgtagctgatgatccga

SEQ ID NO: 5849778 - DNA, 25 bp, Homo sapien
tgtagctgatgatccgaataactac

SEQ ID NO: 5849779 - DNA, 25 bp, Homo sapien
accagccagctatcaactcgcgccc

SEQ ID NO: 5849780 - DNA, 25 bp, Homo sapien
gcaactcatcgattgatttacggcg

SEQ ID NO: 5849781 - DNA, 25 bp, Homo sapien
gattgatttacggcgctaaggatga

SEQ ID NO: 5849782 - DNA, 25 bp, Homo sapien
taaggatgactctggtcagagatac

SEQ ID NO: 5849783 - DNA, 25 bp, Homo sapien
tggtcagagatacctggcctggtct

SEQ ID NO: 5849784 - DNA, 25 bp, Homo sapien
ctggtctggacacagtgcccgtgtc

SEQ ID NO: 5849785 - DNA, 25 bp, Homo sapien
gtgcccgtgtcggagccgcgcgaga

SEQ ID NO: 5849786 - DNA, 25 bp, Homo sapien
cgagatatggcccgcgctggagttt

SEQ ID NO: 5849787 - DNA, 25 bp, Homo sapien
ggagtttcaataccggagatcatgc

SEQ ID NO: 5849788 - DNA, 25 bp, Homo sapien
ggagatcatgcaagctggtggctgg

SEQ ID NO: 5849789 - DNA, 25 bp, Homo sapien
ctggtggctggaccaatgtaaatat

SEQ ID NO: 5849790 - DNA, 25 bp, Homo sapien
ccaatgtaaatattgtcatgaacta

SEQ ID NO: 5849791 - DNA, 25 bp, Homo sapien
cgctggttagcaccgcaggtgtaga

SEQ ID NO: 5849792 - DNA, 25 bp, Homo sapien
ttgtcatgaactatatccgtaacct

SEQ ID NO: 5849793 - DNA, 25 bp, Homo sapien
caccgcaggtgtagagaaggcactt

SEQ ID NO: 5849794 - DNA, 25 bp, Homo sapien
tagtgaaacaggggcaatggtgcgc

SEQ ID NO: 5849795 - DNA, 25 bp, Homo sapien
tggtcgagcgatggatttccgtctc

SEQ ID NO: 5849796 - DNA, 25 bp, Homo sapien
atggatttccgtctctggtgtagct

SEQ ID NO: 5849797 - DNA, 25 bp, Homo sapien
gtctctggtgtagctgatgatccga

SEQ ID NO: 5849798 - DNA, 25 bp, Homo sapien
tgtagctgatgatccgaataactac

SEQ ID NO: 5849799 - DNA, 25 bp, Homo sapien
accagccagctatcaactcgcgccc

SEQ ID NO: 5849800 - DNA, 25 bp, Homo sapien
gcaactcatcgattgatttacggcg

SEQ ID NO: 5849801 - DNA, 25 bp, Homo sapien
gattgatttacggcgctaaggatga

SEQ ID NO: 5849802 - DNA, 25 bp, Homo sapien
taaggatgactctggtcagagatac

SEQ ID NO: 5849803 - DNA, 25 bp, Homo sapien
tggtcagagatacctggcctggtct

SEQ ID NO: 5849804 - DNA, 25 bp, Homo sapien
ctggtctggacacagtgcccgtgtc

SEQ ID NO: 5849805 - DNA, 25 bp, Homo sapien
gtgcccgtgtcggagccgcgcgaga

SEQ ID NO: 5849806 - DNA, 25 bp, Homo sapien
cgagatatggcccgcgctggagttt

SEQ ID NO: 5849807 - DNA, 25 bp, Homo sapien
ggagtttcaataccggagatcatgc

SEQ ID NO: 5849808 - DNA, 25 bp, Homo sapien
ggagatcatgcaagctggtggctgg

SEQ ID NO: 5849809 - DNA, 25 bp, Homo sapien
ctggtggctggaccaatgtaaatat

SEQ ID NO: 5849810 - DNA, 25 bp, Homo sapien
ccaatgtaaatattgtcatgaacta

SEQ ID NO: 5849811 - DNA, 25 bp, Homo sapien
cgctggttagcaccgcaggtgtaga

SEQ ID NO: 5849812 - DNA, 25 bp, Homo sapien
ttgtcatgaactatatccgtaacct

SEQ ID NO: 5849813 - DNA, 25 bp, Homo sapien
caccgcaggtgtagagaaggcactt

SEQ ID NO: 5849814 - DNA, 25 bp, Homo sapien
tagtgaaacaggggcaatggtgcgc

SEQ ID NO: 5849815 - DNA, 25 bp, Homo sapien
tggtcgagcgatggatttccgtctc

SEQ ID NO: 5849816 - DNA, 25 bp, Homo sapien
atggatttccgtctctggtgtagct

SEQ ID NO: 5849817 - DNA, 25 bp, Homo sapien
gtctctggtgtagctgatgatccga

SEQ ID NO: 5849818 - DNA, 25 bp, Homo sapien
tgtagctgatgatccgaataactac

SEQ ID NO: 5849819 - DNA, 25 bp, Homo sapien
accagccagctatcaactcgcgccc

SEQ ID NO: 5849820 - DNA, 25 bp, Homo sapien
gcaactcatcgattgatttacggcg

SEQ ID NO: 5849821 - DNA, 25 bp, Homo sapien
gattgatttacggcgctaaggatga

SEQ ID NO: 5849822 - DNA, 25 bp, Homo sapien
taaggatgactctggtcagagatac

SEQ ID NO: 5849823 - DNA, 25 bp, Homo sapien
tggtcagagatacctggcctggtct

SEQ ID NO: 5849824 - DNA, 25 bp, Homo sapien
ctggtctggacacagtgcccgtgtc

SEQ ID NO: 5849825 - DNA, 25 bp, Homo sapien
gtgcccgtgtcggagccgcgcgaga

SEQ ID NO: 5849826 - DNA, 25 bp, Homo sapien
cgagatatggcccgcgctggagttt

SEQ ID NO: 5849827 - DNA, 25 bp, Homo sapien
ggagtttcaataccggagatcatgc

SEQ ID NO: 5849828 - DNA, 25 bp, Homo sapien
ggagatcatgcaagctggtggctgg

SEQ ID NO: 5849829 - DNA, 25 bp, Homo sapien
ctggtggctggaccaatgtaaatat

SEQ ID NO: 5849830 - DNA, 25 bp, Homo sapien
ccaatgtaaatattgtcatgaacta

SEQ ID NO: 5849831 - DNA, 25 bp, Homo sapien
cgctggttagcaccgcaggtgtaga

SEQ ID NO: 5849832 - DNA, 25 bp, Homo sapien
ttgtcatgaactatatccgtaacct

SEQ ID NO: 5849833 - DNA, 25 bp, Homo sapien
caccgcaggtgtagagaaggcactt

SEQ ID NO: 5849834 - DNA, 25 bp, Homo sapien
tagtgaaacaggggcaatggtgcgc

SEQ ID NO: 5849835 - DNA, 25 bp, Homo sapien
tggtcgagcgatggatttccgtctc

SEQ ID NO: 5849836 - DNA, 25 bp, Homo sapien
atggatttccgtctctggtgtagct

SEQ ID NO: 5849837 - DNA, 25 bp, Homo sapien
gtctctggtgtagctgatgatccga

SEQ ID NO: 5849838 - DNA, 25 bp, Homo sapien
tgtagctgatgatccgaataactac

SEQ ID NO: 5849839 - DNA, 25 bp, Homo sapien
accagccagctatcaactcgcgccc

SEQ ID NO: 5849840 - DNA, 25 bp, Homo sapien
gcaactcatcgattgatttacggcg

SEQ ID NO: 5849841 - DNA, 25 bp, Homo sapien
gattgatttacggcgctaaggatga

SEQ ID NO: 5849842 - DNA, 25 bp, Homo sapien
taaggatgactctggtcagagatac

SEQ ID NO: 5849843 - DNA, 25 bp, Homo sapien
tggtcagagatacctggcctggtct

SEQ ID NO: 5849844 - DNA, 25 bp, Homo sapien
ctggtctggacacagtgcccgtgtc

SEQ ID NO: 5849845 - DNA, 25 bp, Homo sapien
gtgcccgtgtcggagccgcgcgaga

SEQ ID NO: 5849846 - DNA, 25 bp, Homo sapien
cgagatatggcccgcgctggagttt

SEQ ID NO: 5849847 - DNA, 25 bp, Homo sapien
ggagtttcaataccggagatcatgc

SEQ ID NO: 5849848 - DNA, 25 bp, Homo sapien
ggagatcatgcaagctggtggctgg

SEQ ID NO: 5849849 - DNA, 25 bp, Homo sapien
ctggtggctggaccaatgtaaatat

SEQ ID NO: 5849850 - DNA, 25 bp, Homo sapien
ccaatgtaaatattgtcatgaacta

SEQ ID NO: 5849851 - DNA, 25 bp, Homo sapien
cgctggttagcaccgcaggtgtaga

SEQ ID NO: 5849852 - DNA, 25 bp, Homo sapien
ttgtcatgaactatatccgtaacct

SEQ ID NO: 5849853 - DNA, 25 bp, Homo sapien
caccgcaggtgtagagaaggcactt

SEQ ID NO: 5849854 - DNA, 25 bp, Homo sapien
tagtgaaacaggggcaatggtgcgc

SEQ ID NO: 5849855 - DNA, 25 bp, Homo sapien
tggtcgagcgatggatttccgtctc

SEQ ID NO: 5849856 - DNA, 25 bp, Homo sapien
atggatttccgtctctggtgtagct

SEQ ID NO: 5849857 - DNA, 25 bp, Homo sapien
gtctctggtgtagctgatgatccga

SEQ ID NO: 5849858 - DNA, 25 bp, Homo sapien
tgtagctgatgatccgaataactac

SEQ ID NO: 5849859 - DNA, 25 bp, Homo sapien
accagccagctatcaactcgcgccc

SEQ ID NO: 5849860 - DNA, 25 bp, Homo sapien
gcaactcatcgattgatttacggcg

SEQ ID NO: 5849861 - DNA, 25 bp, Homo sapien
gattgatttacggcgctaaggatga

SEQ ID NO: 5849862 - DNA, 25 bp, Homo sapien
taaggatgactctggtcagagatac

SEQ ID NO: 5849863 - DNA, 25 bp, Homo sapien
tggtcagagatacctggcctggtct

SEQ ID NO: 5849864 - DNA, 25 bp, Homo sapien
ctggtctggacacagtgcccgtgtc

SEQ ID NO: 5849865 - DNA, 25 bp, Homo sapien
gtgcccgtgtcggagccgcgcgaga

SEQ ID NO: 5849866 - DNA, 25 bp, Homo sapien
cgagatatggcccgcgctggagttt

SEQ ID NO: 5849867 - DNA, 25 bp, Homo sapien
ggagtttcaataccggagatcatgc

SEQ ID NO: 5849868 - DNA, 25 bp, Homo sapien
ggagatcatgcaagctggtggctgg

SEQ ID NO: 5849869 - DNA, 25 bp, Homo sapien
ctggtggctggaccaatgtaaatat

SEQ ID NO: 5849870 - DNA, 25 bp, Homo sapien
ccaatgtaaatattgtcatgaacta

SEQ ID NO: 5849871 - DNA, 25 bp, Homo sapien
cgctggttagcaccgcaggtgtaga

SEQ ID NO: 5849872 - DNA, 25 bp, Homo sapien
ttgtcatgaactatatccgtaacct

SEQ ID NO: 5849873 - DNA, 25 bp, Homo sapien
caccgcaggtgtagagaaggcactt

SEQ ID NO: 5849874 - DNA, 25 bp, Homo sapien
tagtgaaacaggggcaatggtgcgc

SEQ ID NO: 5849875 - DNA, 25 bp, Homo sapien
tggtcgagcgatggatttccgtctc

SEQ ID NO: 5849876 - DNA, 25 bp, Homo sapien
atggatttccgtctctggtgtagct

SEQ ID NO: 5849877 - DNA, 25 bp, Homo sapien
gtctctggtgtagctgatgatccga

SEQ ID NO: 5849878 - DNA, 25 bp, Homo sapien
tgtagctgatgatccgaataactac

SEQ ID NO: 5849879 - DNA, 25 bp, Homo sapien
accagccagctatcaactcgcgccc

SEQ ID NO: 5849880 - DNA, 25 bp, Homo sapien
gcaactcatcgattgatttacggcg

SEQ ID NO: 5849881 - DNA, 25 bp, Homo sapien
gattgatttacggcgctaaggatga

SEQ ID NO: 5849882 - DNA, 25 bp, Homo sapien
taaggatgactctggtcagagatac

SEQ ID NO: 5849883 - DNA, 25 bp, Homo sapien
tggtcagagatacctggcctggtct

SEQ ID NO: 5849884 - DNA, 25 bp, Homo sapien
ctggtctggacacagtgcccgtgtc

SEQ ID NO: 5849885 - DNA, 25 bp, Homo sapien
gtgcccgtgtcggagccgcgcgaga

SEQ ID NO: 5849886 - DNA, 25 bp, Homo sapien
cgagatatggcccgcgctggagttt

SEQ ID NO: 5849887 - DNA, 25 bp, Homo sapien
ggagtttcaataccggagatcatgc

SEQ ID NO: 5849888 - DNA, 25 bp, Homo sapien
ggagatcatgcaagctggtggctgg

SEQ ID NO: 5849889 - DNA, 25 bp, Homo sapien
ctggtggctggaccaatgtaaatat

SEQ ID NO: 5849890 - DNA, 25 bp, Homo sapien
ccaatgtaaatattgtcatgaacta

SEQ ID NO: 5849891 - DNA, 25 bp, Homo sapien
cgctggttagcaccgcaggtgtaga

SEQ ID NO: 5849892 - DNA, 25 bp, Homo sapien
ttgtcatgaactatatccgtaacct

SEQ ID NO: 5849893 - DNA, 25 bp, Homo sapien
caccgcaggtgtagagaaggcactt

SEQ ID NO: 5849894 - DNA, 25 bp, Homo sapien
tagtgaaacaggggcaatggtgcgc

SEQ ID NO: 5849895 - DNA, 25 bp, Homo sapien
tggtcgagcgatggatttccgtctc

SEQ ID NO: 5849896 - DNA, 25 bp, Homo sapien
atggatttccgtctctggtgtagct

SEQ ID NO: 5849897 - DNA, 25 bp, Homo sapien
gtctctggtgtagctgatgatccga

SEQ ID NO: 5849898 - DNA, 25 bp, Homo sapien
tgtagctgatgatccgaataactac

SEQ ID NO: 5849899 - DNA, 25 bp, Homo sapien
accagccagctatcaactcgcgccc

SEQ ID NO: 5849900 - DNA, 25 bp, Homo sapien
gcaactcatcgattgatttacggcg

SEQ ID NO: 5849901 - DNA, 25 bp, Homo sapien
gattgatttacggcgctaaggatga

SEQ ID NO: 5849902 - DNA, 25 bp, Homo sapien
taaggatgactctggtcagagatac

SEQ ID NO: 5849903 - DNA, 25 bp, Homo sapien
tggtcagagatacctggcctggtct

SEQ ID NO: 5849904 - DNA, 25 bp, Homo sapien
ctggtctggacacagtgcccgtgtc

SEQ ID NO: 5849905 - DNA, 25 bp, Homo sapien
gtgcccgtgtcggagccgcgcgaga

SEQ ID NO: 5849906 - DNA, 25 bp, Homo sapien
cgagatatggcccgcgctggagttt

SEQ ID NO: 5849907 - DNA, 25 bp, Homo sapien
ggagtttcaataccggagatcatgc

SEQ ID NO: 5849908 - DNA, 25 bp, Homo sapien
ggagatcatgcaagctggtggctgg

SEQ ID NO: 5849909 - DNA, 25 bp, Homo sapien
ctggtggctggaccaatgtaaatat

SEQ ID NO: 5849910 - DNA, 25 bp, Homo sapien
ccaatgtaaatattgtcatgaacta

SEQ ID NO: 5849911 - DNA, 25 bp, Homo sapien
cgctggttagcaccgcaggtgtaga

SEQ ID NO: 5849912 - DNA, 25 bp, Homo sapien
ttgtcatgaactatatccgtaacct

SEQ ID NO: 5849913 - DNA, 25 bp, Homo sapien
caccgcaggtgtagagaaggcactt

SEQ ID NO: 5849914 - DNA, 25 bp, Homo sapien
tagtgaaacaggggcaatggtgcgc

SEQ ID NO: 5849915 - DNA, 25 bp, Homo sapien
tggtcgagcgatggatttccgtctc

SEQ ID NO: 5849916 - DNA, 25 bp, Homo sapien
atggatttccgtctctggtgtagct

SEQ ID NO: 5849917 - DNA, 25 bp, Homo sapien
gtctctggtgtagctgatgatccga

SEQ ID NO: 5849918 - DNA, 25 bp, Homo sapien
tgtagctgatgatccgaataactac

SEQ ID NO: 5849919 - DNA, 25 bp, Homo sapien
accagccagctatcaactcgcgccc

SEQ ID NO: 5849920 - DNA, 25 bp, Homo sapien
gcaactcatcgattgatttacggcg

SEQ ID NO: 5849921 - DNA, 25 bp, Homo sapien
gattgatttacggcgctaaggatga

SEQ ID NO: 5849922 - DNA, 25 bp, Homo sapien
taaggatgactctggtcagagatac

SEQ ID NO: 5849923 - DNA, 25 bp, Homo sapien
tggtcagagatacctggcctggtct

SEQ ID NO: 5849924 - DNA, 25 bp, Homo sapien
ctggtctggacacagtgcccgtgtc

SEQ ID NO: 5849925 - DNA, 25 bp, Homo sapien
gtgcccgtgtcggagccgcgcgaga

SEQ ID NO: 5849926 - DNA, 25 bp, Homo sapien
cgagatatggcccgcgctggagttt

SEQ ID NO: 5849927 - DNA, 25 bp, Homo sapien
ggagtttcaataccggagatcatgc

SEQ ID NO: 5849928 - DNA, 25 bp, Homo sapien
ggagatcatgcaagctggtggctgg

SEQ ID NO: 5849929 - DNA, 25 bp, Homo sapien
ctggtggctggaccaatgtaaatat

SEQ ID NO: 5849930 - DNA, 25 bp, Homo sapien
ccaatgtaaatattgtcatgaacta

SEQ ID NO: 5849931 - DNA, 25 bp, Homo sapien
cgctggttagcaccgcaggtgtaga

SEQ ID NO: 5849932 - DNA, 25 bp, Homo sapien
ttgtcatgaactatatccgtaacct

SEQ ID NO: 5849933 - DNA, 25 bp, Homo sapien
caccgcaggtgtagagaaggcactt

SEQ ID NO: 5849934 - DNA, 25 bp, Homo sapien
tagtgaaacaggggcaatggtgcgc

SEQ ID NO: 5849935 - DNA, 25 bp, Homo sapien
tggtcgagcgatggatttccgtctc

SEQ ID NO: 5849936 - DNA, 25 bp, Homo sapien
atggatttccgtctctggtgtagct

SEQ ID NO: 5849937 - DNA, 25 bp, Homo sapien
gtctctggtgtagctgatgatccga

SEQ ID NO: 5849938 - DNA, 25 bp, Homo sapien
tgtagctgatgatccgaataactac

SEQ ID NO: 5849939 - DNA, 25 bp, Homo sapien
accagccagctatcaactcgcgccc

SEQ ID NO: 5849940 - DNA, 25 bp, Homo sapien
gcaactcatcgattgatttacggcg

SEQ ID NO: 5849941 - DNA, 25 bp, Homo sapien
gattgatttacggcgctaaggatga

SEQ ID NO: 5849942 - DNA, 25 bp, Homo sapien
taaggatgactctggtcagagatac

SEQ ID NO: 5849943 - DNA, 25 bp, Homo sapien
tggtcagagatacctggcctggtct

SEQ ID NO: 5849944 - DNA, 25 bp, Homo sapien
ctggtctggacacagtgcccgtgtc

SEQ ID NO: 5849945 - DNA, 25 bp, Homo sapien
gtgcccgtgtcggagccgcgcgaga

SEQ ID NO: 5849946 - DNA, 25 bp, Homo sapien
cgagatatggcccgcgctggagttt

SEQ ID NO: 5849947 - DNA, 25 bp, Homo sapien
ggagtttcaataccggagatcatgc

SEQ ID NO: 5849948 - DNA, 25 bp, Homo sapien
ggagatcatgcaagctggtggctgg

SEQ ID NO: 5849949 - DNA, 25 bp, Homo sapien
ctggtggctggaccaatgtaaatat

SEQ ID NO: 5849950 - DNA, 25 bp, Homo sapien
ccaatgtaaatattgtcatgaacta

SEQ ID NO: 5849951 - DNA, 25 bp, Homo sapien
cgctggttagcaccgcaggtgtaga

SEQ ID NO: 5849952 - DNA, 25 bp, Homo sapien
ttgtcatgaactatatccgtaacct

SEQ ID NO: 5849953 - DNA, 25 bp, Homo sapien
caccgcaggtgtagagaaggcactt

SEQ ID NO: 5849954 - DNA, 25 bp, Homo sapien
tagtgaaacaggggcaatggtgcgc

SEQ ID NO: 5849955 - DNA, 25 bp, Homo sapien
tggtcgagcgatggatttccgtctc

SEQ ID NO: 5849956 - DNA, 25 bp, Homo sapien
atggatttccgtctctggtgtagct

SEQ ID NO: 5849957 - DNA, 25 bp, Homo sapien
gtctctggtgtagctgatgatccga

SEQ ID NO: 5849958 - DNA, 25 bp, Homo sapien
tgtagctgatgatccgaataactac

SEQ ID NO: 5849959 - DNA, 25 bp, Homo sapien
accagccagctatcaactcgcgccc

SEQ ID NO: 5849960 - DNA, 25 bp, Homo sapien
gcaactcatcgattgatttacggcg

SEQ ID NO: 5849961 - DNA, 25 bp, Homo sapien
gattgatttacggcgctaaggatga

SEQ ID NO: 5849962 - DNA, 25 bp, Homo sapien
taaggatgactctggtcagagatac

SEQ ID NO: 5849963 - DNA, 25 bp, Homo sapien
tggtcagagatacctggcctggtct

SEQ ID NO: 5849964 - DNA, 25 bp, Homo sapien
ctggtctggacacagtgcccgtgtc

SEQ ID NO: 5849965 - DNA, 25 bp, Homo sapien
gtgcccgtgtcggagccgcgcgaga

SEQ ID NO: 5849966 - DNA, 25 bp, Homo sapien
cgagatatggcccgcgctggagttt

SEQ ID NO: 5849967 - DNA, 25 bp, Homo sapien
ggagtttcaataccggagatcatgc

SEQ ID NO: 5849968 - DNA, 25 bp, Homo sapien
ggagatcatgcaagctggtggctgg

SEQ ID NO: 5849969 - DNA, 25 bp, Homo sapien
ctggtggctggaccaatgtaaatat

SEQ ID NO: 5849970 - DNA, 25 bp, Homo sapien
ccaatgtaaatattgtcatgaacta

SEQ ID NO: 5849971 - DNA, 25 bp, Homo sapien
cgctggttagcaccgcaggtgtaga

SEQ ID NO: 5849972 - DNA, 25 bp, Homo sapien
ttgtcatgaactatatccgtaacct

SEQ ID NO: 5849973 - DNA, 25 bp, Homo sapien
caccgcaggtgtagagaaggcactt

SEQ ID NO: 5849974 - DNA, 25 bp, Homo sapien
tagtgaaacaggggcaatggtgcgc

SEQ ID NO: 5849975 - DNA, 25 bp, Homo sapien
tggtcgagcgatggatttccgtctc

SEQ ID NO: 5849976 - DNA, 25 bp, Homo sapien
atggatttccgtctctggtgtagct

SEQ ID NO: 5849977 - DNA, 25 bp, Homo sapien
gtctctggtgtagctgatgatccga

SEQ ID NO: 5849978 - DNA, 25 bp, Homo sapien
tgtagctgatgatccgaataactac

SEQ ID NO: 5849979 - DNA, 25 bp, Homo sapien
accagccagctatcaactcgcgccc

SEQ ID NO: 5849980 - DNA, 25 bp, Homo sapien
gcaactcatcgattgatttacggcg

SEQ ID NO: 5849981 - DNA, 25 bp, Homo sapien
gattgatttacggcgctaaggatga

SEQ ID NO: 5849982 - DNA, 25 bp, Homo sapien
taaggatgactctggtcagagatac

SEQ ID NO: 5849983 - DNA, 25 bp, Homo sapien
tggtcagagatacctggcctggtct

SEQ ID NO: 5849984 - DNA, 25 bp, Homo sapien
ctggtctggacacagtgcccgtgtc

SEQ ID NO: 5849985 - DNA, 25 bp, Homo sapien
gtgcccgtgtcggagccgcgcgaga

SEQ ID NO: 5849986 - DNA, 25 bp, Homo sapien
cgagatatggcccgcgctggagttt

SEQ ID NO: 5849987 - DNA, 25 bp, Homo sapien
ggagtttcaataccggagatcatgc

SEQ ID NO: 5849988 - DNA, 25 bp, Homo sapien
ggagatcatgcaagctggtggctgg

SEQ ID NO: 5849989 - DNA, 25 bp, Homo sapien
ctggtggctggaccaatgtaaatat

SEQ ID NO: 5849990 - DNA, 25 bp, Homo sapien
ccaatgtaaatattgtcatgaacta

SEQ ID NO: 5849991 - DNA, 25 bp, Homo sapien
cgctggttagcaccgcaggtgtaga

SEQ ID NO: 5849992 - DNA, 25 bp, Homo sapien
ttgtcatgaactatatccgtaacct

SEQ ID NO: 5849993 - DNA, 25 bp, Homo sapien
caccgcaggtgtagagaaggcactt

SEQ ID NO: 5849994 - DNA, 25 bp, Homo sapien
tagtgaaacaggggcaatggtgcgc

SEQ ID NO: 5849995 - DNA, 25 bp, Homo sapien
tggtcgagcgatggatttccgtctc

SEQ ID NO: 5849996 - DNA, 25 bp, Homo sapien
atggatttccgtctctggtgtagct

SEQ ID NO: 5849997 - DNA, 25 bp, Homo sapien
gtctctggtgtagctgatgatccga

SEQ ID NO: 5849998 - DNA, 25 bp, Homo sapien
tgtagctgatgatccgaataactac

SEQ ID NO: 5849999 - DNA, 25 bp, Homo sapien
accagccagctatcaactcgcgccc

SEQ ID NO: 5850000 - DNA, 25 bp, Homo sapien
gcaactcatcgattgatttacggcg

SEQ ID NO: 5850001 - DNA, 25 bp, Homo sapien
gattgatttacggcgctaaggatga

SEQ ID NO: 5850002 - DNA, 25 bp, Homo sapien
taaggatgactctggtcagagatac

SEQ ID NO: 5850003 - DNA, 25 bp, Homo sapien
tggtcagagatacctggcctggtct

SEQ ID NO: 5850004 - DNA, 25 bp, Homo sapien
ctggtctggacacagtgcccgtgtc

SEQ ID NO: 5850005 - DNA, 25 bp, Homo sapien
gtgcccgtgtcggagccgcgcgaga

SEQ ID NO: 5850006 - DNA, 25 bp, Homo sapien
cgagatatggcccgcgctggagttt

SEQ ID NO: 5850007 - DNA, 25 bp, Homo sapien
ggagtttcaataccggagatcatgc

SEQ ID NO: 5850008 - DNA, 25 bp, Homo sapien
ggagatcatgcaagctggtggctgg

SEQ ID NO: 5850009 - DNA, 25 bp, Homo sapien
ctggtggctggaccaatgtaaatat

SEQ ID NO: 5850010 - DNA, 25 bp, Homo sapien
ccaatgtaaatattgtcatgaacta

SEQ ID NO: 5850011 - DNA, 25 bp, Homo sapien
cgctggttagcaccgcaggtgtaga

SEQ ID NO: 5850012 - DNA, 25 bp, Homo sapien
ttgtcatgaactatatccgtaacct

SEQ ID NO: 5850013 - DNA, 25 bp, Homo sapien
caccgcaggtgtagagaaggcactt

SEQ ID NO: 5850014 - DNA, 25 bp, Homo sapien
tagtgaaacaggggcaatggtgcgc

SEQ ID NO: 5850015 - DNA, 25 bp, Homo sapien
tggtcgagcgatggatttccgtctc

SEQ ID NO: 5850016 - DNA, 25 bp, Homo sapien
atggatttccgtctctggtgtagct

SEQ ID NO: 5850017 - DNA, 25 bp, Homo sapien
gtctctggtgtagctgatgatccga

SEQ ID NO: 5850018 - DNA, 25 bp, Homo sapien
tgtagctgatgatccgaataactac

SEQ ID NO: 5850019 - DNA, 25 bp, Homo sapien
accagccagctatcaactcgcgccc

SEQ ID NO: 5850020 - DNA, 25 bp, Homo sapien
gcaactcatcgattgatttacggcg

SEQ ID NO: 5850021 - DNA, 25 bp, Homo sapien
gattgatttacggcgctaaggatga

SEQ ID NO: 5850022 - DNA, 25 bp, Homo sapien
taaggatgactctggtcagagatac

SEQ ID NO: 5850023 - DNA, 25 bp, Homo sapien
tggtcagagatacctggcctggtct

SEQ ID NO: 5850024 - DNA, 25 bp, Homo sapien
ctggtctggacacagtgcccgtgtc

SEQ ID NO: 5850025 - DNA, 25 bp, Homo sapien
gtgcccgtgtcggagccgcgcgaga

SEQ ID NO: 5850026 - DNA, 25 bp, Homo sapien
cgagatatggcccgcgctggagttt

SEQ ID NO: 5850027 - DNA, 25 bp, Homo sapien
ggagtttcaataccggagatcatgc

SEQ ID NO: 5850028 - DNA, 25 bp, Homo sapien
ggagatcatgcaagctggtggctgg

SEQ ID NO: 5850029 - DNA, 25 bp, Homo sapien
ctggtggctggaccaatgtaaatat

SEQ ID NO: 5850030 - DNA, 25 bp, Homo sapien
ccaatgtaaatattgtcatgaacta

SEQ ID NO: 5850031 - DNA, 25 bp, Homo sapien
cgctggttagcaccgcaggtgtaga

SEQ ID NO: 5850032 - DNA, 25 bp, Homo sapien
ttgtcatgaactatatccgtaacct

SEQ ID NO: 5850033 - DNA, 25 bp, Homo sapien
caccgcaggtgtagagaaggcactt

SEQ ID NO: 5850034 - DNA, 25 bp, Homo sapien
tagtgaaacaggggcaatggtgcgc

SEQ ID NO: 5850035 - DNA, 25 bp, Homo sapien
tggtcgagcgatggatttccgtctc

SEQ ID NO: 5850036 - DNA, 25 bp, Homo sapien
atggatttccgtctctggtgtagct

SEQ ID NO: 5850037 - DNA, 25 bp, Homo sapien
gtctctggtgtagctgatgatccga

SEQ ID NO: 5850038 - DNA, 25 bp, Homo sapien
tgtagctgatgatccgaataactac

SEQ ID NO: 5850039 - DNA, 25 bp, Homo sapien
accagccagctatcaactcgcgccc

SEQ ID NO: 5850040 - DNA, 25 bp, Homo sapien
gcaactcatcgattgatttacggcg

SEQ ID NO: 5850041 - DNA, 25 bp, Homo sapien
gattgatttacggcgctaaggatga

SEQ ID NO: 5850042 - DNA, 25 bp, Homo sapien
taaggatgactctggtcagagatac

SEQ ID NO: 5850043 - DNA, 25 bp, Homo sapien
tggtcagagatacctggcctggtct

SEQ ID NO: 5850044 - DNA, 25 bp, Homo sapien
ctggtctggacacagtgcccgtgtc

SEQ ID NO: 5850045 - DNA, 25 bp, Homo sapien
gtgcccgtgtcggagccgcgcgaga

SEQ ID NO: 5850046 - DNA, 25 bp, Homo sapien
cgagatatggcccgcgctggagttt

SEQ ID NO: 5850047 - DNA, 25 bp, Homo sapien
ggagtttcaataccggagatcatgc

SEQ ID NO: 5850048 - DNA, 25 bp, Homo sapien
ggagatcatgcaagctggtggctgg

SEQ ID NO: 5850049 - DNA, 25 bp, Homo sapien
ctggtggctggaccaatgtaaatat

SEQ ID NO: 5850050 - DNA, 25 bp, Homo sapien
ccaatgtaaatattgtcatgaacta

SEQ ID NO: 5850051 - DNA, 25 bp, Homo sapien
cgctggttagcaccgcaggtgtaga

SEQ ID NO: 5850052 - DNA, 25 bp, Homo sapien
ttgtcatgaactatatccgtaacct

SEQ ID NO: 5850053 - DNA, 25 bp, Homo sapien
caccgcaggtgtagagaaggcactt

SEQ ID NO: 5850054 - DNA, 25 bp, Homo sapien
tagtgaaacaggggcaatggtgcgc

SEQ ID NO: 5850055 - DNA, 25 bp, Homo sapien
tggtcgagcgatggatttccgtctc

SEQ ID NO: 5850056 - DNA, 25 bp, Homo sapien
atggatttccgtctctggtgtagct

SEQ ID NO: 5850057 - DNA, 25 bp, Homo sapien
gtctctggtgtagctgatgatccga

SEQ ID NO: 5850058 - DNA, 25 bp, Homo sapien
tgtagctgatgatccgaataactac

SEQ ID NO: 5850059 - DNA, 25 bp, Homo sapien
accagccagctatcaactcgcgccc

SEQ ID NO: 5850060 - DNA, 25 bp, Homo sapien
gcaactcatcgattgatttacggcg

SEQ ID NO: 5850061 - DNA, 25 bp, Homo sapien
gattgatttacggcgctaaggatga

SEQ ID NO: 5850062 - DNA, 25 bp, Homo sapien
taaggatgactctggtcagagatac

SEQ ID NO: 5850063 - DNA, 25 bp, Homo sapien
tggtcagagatacctggcctggtct

SEQ ID NO: 5850064 - DNA, 25 bp, Homo sapien
ctggtctggacacagtgcccgtgtc

SEQ ID NO: 5850065 - DNA, 25 bp, Homo sapien
gtgcccgtgtcggagccgcgcgaga

SEQ ID NO: 5850066 - DNA, 25 bp, Homo sapien
cgagatatggcccgcgctggagttt

SEQ ID NO: 5850067 - DNA, 25 bp, Homo sapien
ggagtttcaataccggagatcatgc

SEQ ID NO: 5850068 - DNA, 25 bp, Homo sapien
ggagatcatgcaagctggtggctgg

SEQ ID NO: 5850069 - DNA, 25 bp, Homo sapien
ctggtggctggaccaatgtaaatat

SEQ ID NO: 5850070 - DNA, 25 bp, Homo sapien
ccaatgtaaatattgtcatgaacta

SEQ ID NO: 5850071 - DNA, 25 bp, Homo sapien
cgctggttagcaccgcaggtgtaga

SEQ ID NO: 5850072 - DNA, 25 bp, Homo sapien
ttgtcatgaactatatccgtaacct

SEQ ID NO: 5850073 - DNA, 25 bp, Homo sapien
caccgcaggtgtagagaaggcactt

SEQ ID NO: 5850074 - DNA, 25 bp, Homo sapien
tagtgaaacaggggcaatggtgcgc

SEQ ID NO: 5850075 - DNA, 25 bp, Homo sapien
tggtcgagcgatggatttccgtctc

SEQ ID NO: 5850076 - DNA, 25 bp, Homo sapien
atggatttccgtctctggtgtagct

SEQ ID NO: 5850077 - DNA, 25 bp, Homo sapien
gtctctggtgtagctgatgatccga

SEQ ID NO: 5850078 - DNA, 25 bp, Homo sapien
tgtagctgatgatccgaataactac

SEQ ID NO: 5850079 - DNA, 25 bp, Homo sapien
accagccagctatcaactcgcgccc

SEQ ID NO: 5850080 - DNA, 25 bp, Homo sapien
gcaactcatcgattgatttacggcg

SEQ ID NO: 5850081 - DNA, 25 bp, Homo sapien
gattgatttacggcgctaaggatga

SEQ ID NO: 5850082 - DNA, 25 bp, Homo sapien
taaggatgactctggtcagagatac

SEQ ID NO: 5850083 - DNA, 25 bp, Homo sapien
tggtcagagatacctggcctggtct

SEQ ID NO: 5850084 - DNA, 25 bp, Homo sapien
ctggtctggacacagtgcccgtgtc

SEQ ID NO: 5850085 - DNA, 25 bp, Homo sapien
gtgcccgtgtcggagccgcgcgaga

SEQ ID NO: 5850086 - DNA, 25 bp, Homo sapien
cgagatatggcccgcgctggagttt

SEQ ID NO: 5850087 - DNA, 25 bp, Homo sapien
ggagtttcaataccggagatcatgc

SEQ ID NO: 5850088 - DNA, 25 bp, Homo sapien
ggagatcatgcaagctggtggctgg

SEQ ID NO: 5850089 - DNA, 25 bp, Homo sapien
ctggtggctggaccaatgtaaatat

SEQ ID NO: 5850090 - DNA, 25 bp, Homo sapien
ccaatgtaaatattgtcatgaacta

SEQ ID NO: 5850091 - DNA, 25 bp, Homo sapien
cgctggttagcaccgcaggtgtaga

SEQ ID NO: 5850092 - DNA, 25 bp, Homo sapien
ttgtcatgaactatatccgtaacct

SEQ ID NO: 5850093 - DNA, 25 bp, Homo sapien
caccgcaggtgtagagaaggcactt

SEQ ID NO: 5850094 - DNA, 25 bp, Homo sapien
tagtgaaacaggggcaatggtgcgc

SEQ ID NO: 5850095 - DNA, 25 bp, Homo sapien
tggtcgagcgatggatttccgtctc

SEQ ID NO: 5850096 - DNA, 25 bp, Homo sapien
atggatttccgtctctggtgtagct

SEQ ID NO: 5850097 - DNA, 25 bp, Homo sapien
gtctctggtgtagctgatgatccga

SEQ ID NO: 5850098 - DNA, 25 bp, Homo sapien
tgtagctgatgatccgaataactac

SEQ ID NO: 5850099 - DNA, 25 bp, Homo sapien
accagccagctatcaactcgcgccc

SEQ ID NO: 5850100 - DNA, 25 bp, Homo sapien
gcaactcatcgattgatttacggcg

SEQ ID NO: 5850101 - DNA, 25 bp, Homo sapien
gattgatttacggcgctaaggatga

SEQ ID NO: 5850102 - DNA, 25 bp, Homo sapien
taaggatgactctggtcagagatac

SEQ ID NO: 5850103 - DNA, 25 bp, Homo sapien
tggtcagagatacctggcctggtct

SEQ ID NO: 5850104 - DNA, 25 bp, Homo sapien
ctggtctggacacagtgcccgtgtc

SEQ ID NO: 5850105 - DNA, 25 bp, Homo sapien
gtgcccgtgtcggagccgcgcgaga

SEQ ID NO: 5850106 - DNA, 25 bp, Homo sapien
cgagatatggcccgcgctggagttt

SEQ ID NO: 5850107 - DNA, 25 bp, Homo sapien
ggagtttcaataccggagatcatgc

SEQ ID NO: 5850108 - DNA, 25 bp, Homo sapien
ggagatcatgcaagctggtggctgg

SEQ ID NO: 5850109 - DNA, 25 bp, Homo sapien
ctggtggctggaccaatgtaaatat

SEQ ID NO: 5850110 - DNA, 25 bp, Homo sapien
ccaatgtaaatattgtcatgaacta

SEQ ID NO: 5850111 - DNA, 25 bp, Homo sapien
cgctggttagcaccgcaggtgtaga

SEQ ID NO: 5850112 - DNA, 25 bp, Homo sapien
ttgtcatgaactatatccgtaacct

SEQ ID NO: 5850113 - DNA, 25 bp, Homo sapien
caccgcaggtgtagagaaggcactt

SEQ ID NO: 5850114 - DNA, 25 bp, Homo sapien
tagtgaaacaggggcaatggtgcgc

SEQ ID NO: 5850115 - DNA, 25 bp, Homo sapien
tggtcgagcgatggatttccgtctc

SEQ ID NO: 5850116 - DNA, 25 bp, Homo sapien
atggatttccgtctctggtgtagct

SEQ ID NO: 5850117 - DNA, 25 bp, Homo sapien
gtctctggtgtagctgatgatccga

SEQ ID NO: 5850118 - DNA, 25 bp, Homo sapien
tgtagctgatgatccgaataactac

SEQ ID NO: 5850119 - DNA, 25 bp, Homo sapien
accagccagctatcaactcgcgccc

SEQ ID NO: 5850120 - DNA, 25 bp, Homo sapien
gcaactcatcgattgatttacggcg

SEQ ID NO: 5850121 - DNA, 25 bp, Homo sapien
gattgatttacggcgctaaggatga

SEQ ID NO: 5850122 - DNA, 25 bp, Homo sapien
taaggatgactctggtcagagatac

SEQ ID NO: 5850123 - DNA, 25 bp, Homo sapien
tggtcagagatacctggcctggtct

SEQ ID NO: 5850124 - DNA, 25 bp, Homo sapien
ctggtctggacacagtgcccgtgtc

SEQ ID NO: 5850125 - DNA, 25 bp, Homo sapien
gtgcccgtgtcggagccgcgcgaga

SEQ ID NO: 5850126 - DNA, 25 bp, Homo sapien
cgagatatggcccgcgctggagttt

SEQ ID NO: 5850127 - DNA, 25 bp, Homo sapien
ggagtttcaataccggagatcatgc

SEQ ID NO: 5850128 - DNA, 25 bp, Homo sapien
ggagatcatgcaagctggtggctgg

SEQ ID NO: 5850129 - DNA, 25 bp, Homo sapien
ctggtggctggaccaatgtaaatat

SEQ ID NO: 5850130 - DNA, 25 bp, Homo sapien
ccaatgtaaatattgtcatgaacta

SEQ ID NO: 5850131 - DNA, 25 bp, Homo sapien
cgctggttagcaccgcaggtgtaga

SEQ ID NO: 5850132 - DNA, 25 bp, Homo sapien
ttgtcatgaactatatccgtaacct

SEQ ID NO: 5850133 - DNA, 25 bp, Homo sapien
caccgcaggtgtagagaaggcactt

SEQ ID NO: 5850134 - DNA, 25 bp, Homo sapien
tagtgaaacaggggcaatggtgcgc

SEQ ID NO: 5850135 - DNA, 25 bp, Homo sapien
tggtcgagcgatggatttccgtctc

SEQ ID NO: 5850136 - DNA, 25 bp, Homo sapien
atggatttccgtctctggtgtagct

SEQ ID NO: 5850137 - DNA, 25 bp, Homo sapien
gtctctggtgtagctgatgatccga

SEQ ID NO: 5850138 - DNA, 25 bp, Homo sapien
tgtagctgatgatccgaataactac

SEQ ID NO: 5850139 - DNA, 25 bp, Homo sapien
accagccagctatcaactcgcgccc

SEQ ID NO: 5850140 - DNA, 25 bp, Homo sapien
gcaactcatcgattgatttacggcg

SEQ ID NO: 5850141 - DNA, 25 bp, Homo sapien
gattgatttacggcgctaaggatga

SEQ ID NO: 5850142 - DNA, 25 bp, Homo sapien
taaggatgactctggtcagagatac

SEQ ID NO: 5850143 - DNA, 25 bp, Homo sapien
tggtcagagatacctggcctggtct

SEQ ID NO: 5850144 - DNA, 25 bp, Homo sapien
ctggtctggacacagtgcccgtgtc

SEQ ID NO: 5850145 - DNA, 25 bp, Homo sapien
gtgcccgtgtcggagccgcgcgaga

SEQ ID NO: 5850146 - DNA, 25 bp, Homo sapien
cgagatatggcccgcgctggagttt

SEQ ID NO: 5850147 - DNA, 25 bp, Homo sapien
ggagtttcaataccggagatcatgc

SEQ ID NO: 5850148 - DNA, 25 bp, Homo sapien
ggagatcatgcaagctggtggctgg

SEQ ID NO: 5850149 - DNA, 25 bp, Homo sapien
ctggtggctggaccaatgtaaatat

SEQ ID NO: 5850150 - DNA, 25 bp, Homo sapien
ccaatgtaaatattgtcatgaacta

SEQ ID NO: 5850151 - DNA, 25 bp, Homo sapien
cgctggttagcaccgcaggtgtaga

SEQ ID NO: 5850152 - DNA, 25 bp, Homo sapien
ttgtcatgaactatatccgtaacct

SEQ ID NO: 5850153 - DNA, 25 bp, Homo sapien
caccgcaggtgtagagaaggcactt

SEQ ID NO: 5850154 - DNA, 25 bp, Homo sapien
tagtgaaacaggggcaatggtgcgc

SEQ ID NO: 5850155 - DNA, 25 bp, Homo sapien
tggtcgagcgatggatttccgtctc

SEQ ID NO: 5850156 - DNA, 25 bp, Homo sapien
atggatttccgtctctggtgtagct

SEQ ID NO: 5850157 - DNA, 25 bp, Homo sapien
gtctctggtgtagctgatgatccga

SEQ ID NO: 5850158 - DNA, 25 bp, Homo sapien
tgtagctgatgatccgaataactac

SEQ ID NO: 5850159 - DNA, 25 bp, Homo sapien
accagccagctatcaactcgcgccc

SEQ ID NO: 5850160 - DNA, 25 bp, Homo sapien
gcaactcatcgattgatttacggcg

SEQ ID NO: 5850161 - DNA, 25 bp, Homo sapien
gattgatttacggcgctaaggatga

SEQ ID NO: 5850162 - DNA, 25 bp, Homo sapien
taaggatgactctggtcagagatac

SEQ ID NO: 5850163 - DNA, 25 bp, Homo sapien
tggtcagagatacctggcctggtct

SEQ ID NO: 5850164 - DNA, 25 bp, Homo sapien
ctggtctggacacagtgcccgtgtc

SEQ ID NO: 5850165 - DNA, 25 bp, Homo sapien
gtgcccgtgtcggagccgcgcgaga

SEQ ID NO: 5850166 - DNA, 25 bp, Homo sapien
cgagatatggcccgcgctggagttt

SEQ ID NO: 5850167 - DNA, 25 bp, Homo sapien
ggagtttcaataccggagatcatgc

SEQ ID NO: 5850168 - DNA, 25 bp, Homo sapien
ggagatcatgcaagctggtggctgg

SEQ ID NO: 5850169 - DNA, 25 bp, Homo sapien
ctggtggctggaccaatgtaaatat

SEQ ID NO: 5850170 - DNA, 25 bp, Homo sapien
ccaatgtaaatattgtcatgaacta

SEQ ID NO: 5850171 - DNA, 25 bp, Homo sapien
cgctggttagcaccgcaggtgtaga

SEQ ID NO: 5850172 - DNA, 25 bp, Homo sapien
ttgtcatgaactatatccgtaacct

SEQ ID NO: 5850173 - DNA, 25 bp, Homo sapien
caccgcaggtgtagagaaggcactt

SEQ ID NO: 5850174 - DNA, 25 bp, Homo sapien
tagtgaaacaggggcaatggtgcgc

SEQ ID NO: 5850175 - DNA, 25 bp, Homo sapien
tggtcgagcgatggatttccgtctc

SEQ ID NO: 5850176 - DNA, 25 bp, Homo sapien
atggatttccgtctctggtgtagct

SEQ ID NO: 5850177 - DNA, 25 bp, Homo sapien
gtctctggtgtagctgatgatccga

SEQ ID NO: 5850178 - DNA, 25 bp, Homo sapien
tgtagctgatgatccgaataactac

SEQ ID NO: 5850179 - DNA, 25 bp, Homo sapien
accagccagctatcaactcgcgccc

SEQ ID NO: 5850180 - DNA, 25 bp, Homo sapien
gcaactcatcgattgatttacggcg

SEQ ID NO: 5850181 - DNA, 25 bp, Homo sapien
gattgatttacggcgctaaggatga

SEQ ID NO: 5850182 - DNA, 25 bp, Homo sapien
taaggatgactctggtcagagatac

SEQ ID NO: 5850183 - DNA, 25 bp, Homo sapien
tggtcagagatacctggcctggtct

SEQ ID NO: 5850184 - DNA, 25 bp, Homo sapien
ctggtctggacacagtgcccgtgtc

SEQ ID NO: 5850185 - DNA, 25 bp, Homo sapien
gtgcccgtgtcggagccgcgcgaga

SEQ ID NO: 5850186 - DNA, 25 bp, Homo sapien
cgagatatggcccgcgctggagttt

SEQ ID NO: 5850187 - DNA, 25 bp, Homo sapien
ggagtttcaataccggagatcatgc

SEQ ID NO: 5850188 - DNA, 25 bp, Homo sapien
ggagatcatgcaagctggtggctgg

SEQ ID NO: 5850189 - DNA, 25 bp, Homo sapien
ctggtggctggaccaatgtaaatat

SEQ ID NO: 5850190 - DNA, 25 bp, Homo sapien
ccaatgtaaatattgtcatgaacta

SEQ ID NO: 5850191 - DNA, 25 bp, Homo sapien
cgctggttagcaccgcaggtgtaga

SEQ ID NO: 5850192 - DNA, 25 bp, Homo sapien
ttgtcatgaactatatccgtaacct

SEQ ID NO: 5850193 - DNA, 25 bp, Homo sapien
caccgcaggtgtagagaaggcactt

SEQ ID NO: 5850194 - DNA, 25 bp, Homo sapien
tagtgaaacaggggcaatggtgcgc

SEQ ID NO: 5850195 - DNA, 25 bp, Homo sapien
tggtcgagcgatggatttccgtctc

SEQ ID NO: 5850196 - DNA, 25 bp, Homo sapien
atggatttccgtctctggtgtagct

SEQ ID NO: 5850197 - DNA, 25 bp, Homo sapien
gtctctggtgtagctgatgatccga

SEQ ID NO: 5850198 - DNA, 25 bp, Homo sapien
tgtagctgatgatccgaataactac

SEQ ID NO: 5850199 - DNA, 25 bp, Homo sapien
accagccagctatcaactcgcgccc

SEQ ID NO: 5850200 - DNA, 25 bp, Homo sapien
gcaactcatcgattgatttacggcg

SEQ ID NO: 5850201 - DNA, 25 bp, Homo sapien
gattgatttacggcgctaaggatga

SEQ ID NO: 5850202 - DNA, 25 bp, Homo sapien
taaggatgactctggtcagagatac

SEQ ID NO: 5850203 - DNA, 25 bp, Homo sapien
tggtcagagatacctggcctggtct

SEQ ID NO: 5850204 - DNA, 25 bp, Homo sapien
ctggtctggacacagtgcccgtgtc

SEQ ID NO: 5850205 - DNA, 25 bp, Homo sapien
gtgcccgtgtcggagccgcgcgaga

SEQ ID NO: 5850206 - DNA, 25 bp, Homo sapien
cgagatatggcccgcgctggagttt

SEQ ID NO: 5850207 - DNA, 25 bp, Homo sapien
ggagtttcaataccggagatcatgc

SEQ ID NO: 5850208 - DNA, 25 bp, Homo sapien
ggagatcatgcaagctggtggctgg

SEQ ID NO: 5850209 - DNA, 25 bp, Homo sapien
ctggtggctggaccaatgtaaatat

SEQ ID NO: 5850210 - DNA, 25 bp, Homo sapien
ccaatgtaaatattgtcatgaacta

SEQ ID NO: 5850211 - DNA, 25 bp, Homo sapien
cgctggttagcaccgcaggtgtaga

SEQ ID NO: 5850212 - DNA, 25 bp, Homo sapien
ttgtcatgaactatatccgtaacct

SEQ ID NO: 5850213 - DNA, 25 bp, Homo sapien
caccgcaggtgtagagaaggcactt

SEQ ID NO: 5850214 - DNA, 25 bp, Homo sapien
tagtgaaacaggggcaatggtgcgc

SEQ ID NO: 5850215 - DNA, 25 bp, Homo sapien
tggtcgagcgatggatttccgtctc

SEQ ID NO: 5850216 - DNA, 25 bp, Homo sapien
atggatttccgtctctggtgtagct

SEQ ID NO: 5850217 - DNA, 25 bp, Homo sapien
gtctctggtgtagctgatgatccga

SEQ ID NO: 5850218 - DNA, 25 bp, Homo sapien
tgtagctgatgatccgaataactac

SEQ ID NO: 5850219 - DNA, 25 bp, Homo sapien
accagccagctatcaactcgcgccc

SEQ ID NO: 5850220 - DNA, 25 bp, Homo sapien
gcaactcatcgattgatttacggcg

SEQ ID NO: 5850221 - DNA, 25 bp, Homo sapien
gattgatttacggcgctaaggatga

SEQ ID NO: 5850222 - DNA, 25 bp, Homo sapien
taaggatgactctggtcagagatac

SEQ ID NO: 5850223 - DNA, 25 bp, Homo sapien
tggtcagagatacctggcctggtct

SEQ ID NO: 5850224 - DNA, 25 bp, Homo sapien
ctggtctggacacagtgcccgtgtc

SEQ ID NO: 5850225 - DNA, 25 bp, Homo sapien
gtgcccgtgtcggagccgcgcgaga

SEQ ID NO: 5850226 - DNA, 25 bp, Homo sapien
cgagatatggcccgcgctggagttt

SEQ ID NO: 5850227 - DNA, 25 bp, Homo sapien
ggagtttcaataccggagatcatgc

SEQ ID NO: 5850228 - DNA, 25 bp, Homo sapien
ggagatcatgcaagctggtggctgg

SEQ ID NO: 5850229 - DNA, 25 bp, Homo sapien
ctggtggctggaccaatgtaaatat

SEQ ID NO: 5850230 - DNA, 25 bp, Homo sapien
ccaatgtaaatattgtcatgaacta

SEQ ID NO: 5850231 - DNA, 25 bp, Homo sapien
cgctggttagcaccgcaggtgtaga

SEQ ID NO: 5850232 - DNA, 25 bp, Homo sapien
ttgtcatgaactatatccgtaacct

SEQ ID NO: 5850233 - DNA, 25 bp, Homo sapien
caccgcaggtgtagagaaggcactt

SEQ ID NO: 5850234 - DNA, 25 bp, Homo sapien
tagtgaaacaggggcaatggtgcgc

SEQ ID NO: 5850235 - DNA, 25 bp, Homo sapien
tggtcgagcgatggatttccgtctc

SEQ ID NO: 5850236 - DNA, 25 bp, Homo sapien
atggatttccgtctctggtgtagct

SEQ ID NO: 5850237 - DNA, 25 bp, Homo sapien
gtctctggtgtagctgatgatccga

SEQ ID NO: 5850238 - DNA, 25 bp, Homo sapien
tgtagctgatgatccgaataactac

SEQ ID NO: 5850239 - DNA, 25 bp, Homo sapien
accagccagctatcaactcgcgccc

SEQ ID NO: 5850240 - DNA, 25 bp, Homo sapien
gcaactcatcgattgatttacggcg

SEQ ID NO: 5850241 - DNA, 25 bp, Homo sapien
gattgatttacggcgctaaggatga

SEQ ID NO: 5850242 - DNA, 25 bp, Homo sapien
taaggatgactctggtcagagatac

SEQ ID NO: 5850243 - DNA, 25 bp, Homo sapien
tggtcagagatacctggcctggtct

SEQ ID NO: 5850244 - DNA, 25 bp, Homo sapien
ctggtctggacacagtgcccgtgtc

SEQ ID NO: 5850245 - DNA, 25 bp, Homo sapien
gtgcccgtgtcggagccgcgcgaga

SEQ ID NO: 5850246 - DNA, 25 bp, Homo sapien
cgagatatggcccgcgctggagttt

SEQ ID NO: 5850247 - DNA, 25 bp, Homo sapien
ggagtttcaataccggagatcatgc

SEQ ID NO: 5850248 - DNA, 25 bp, Homo sapien
ggagatcatgcaagctggtggctgg

SEQ ID NO: 5850249 - DNA, 25 bp, Homo sapien
ctggtggctggaccaatgtaaatat

SEQ ID NO: 5850250 - DNA, 25 bp, Homo sapien
ccaatgtaaatattgtcatgaacta

SEQ ID NO: 5850251 - DNA, 25 bp, Homo sapien
cgctggttagcaccgcaggtgtaga

SEQ ID NO: 5850252 - DNA, 25 bp, Homo sapien
ttgtcatgaactatatccgtaacct

SEQ ID NO: 5850253 - DNA, 25 bp, Homo sapien
caccgcaggtgtagagaaggcactt

SEQ ID NO: 5850254 - DNA, 25 bp, Homo sapien
tagtgaaacaggggcaatggtgcgc

SEQ ID NO: 5850255 - DNA, 25 bp, Homo sapien
tggtcgagcgatggatttccgtctc

SEQ ID NO: 5850256 - DNA, 25 bp, Homo sapien
atggatttccgtctctggtgtagct

SEQ ID NO: 5850257 - DNA, 25 bp, Homo sapien
gtctctggtgtagctgatgatccga

SEQ ID NO: 5850258 - DNA, 25 bp, Homo sapien
tgtagctgatgatccgaataactac

SEQ ID NO: 5850259 - DNA, 25 bp, Homo sapien
accagccagctatcaactcgcgccc

SEQ ID NO: 5850260 - DNA, 25 bp, Homo sapien
gcaactcatcgattgatttacggcg

SEQ ID NO: 5850261 - DNA, 25 bp, Homo sapien
gattgatttacggcgctaaggatga

SEQ ID NO: 5850262 - DNA, 25 bp, Homo sapien
taaggatgactctggtcagagatac

SEQ ID NO: 5850263 - DNA, 25 bp, Homo sapien
tggtcagagatacctggcctggtct

SEQ ID NO: 5850264 - DNA, 25 bp, Homo sapien
ctggtctggacacagtgcccgtgtc

SEQ ID NO: 5850265 - DNA, 25 bp, Homo sapien
gtgcccgtgtcggagccgcgcgaga

SEQ ID NO: 5850266 - DNA, 25 bp, Homo sapien
cgagatatggcccgcgctggagttt

SEQ ID NO: 5850267 - DNA, 25 bp, Homo sapien
ggagtttcaataccggagatcatgc

SEQ ID NO: 5850268 - DNA, 25 bp, Homo sapien
ggagatcatgcaagctggtggctgg

SEQ ID NO: 5850269 - DNA, 25 bp, Homo sapien
ctggtggctggaccaatgtaaatat

SEQ ID NO: 5850270 - DNA, 25 bp, Homo sapien
ccaatgtaaatattgtcatgaacta

SEQ ID NO: 5850271 - DNA, 25 bp, Homo sapien
cgctggttagcaccgcaggtgtaga

SEQ ID NO: 5850272 - DNA, 25 bp, Homo sapien
ttgtcatgaactatatccgtaacct

SEQ ID NO: 5850273 - DNA, 25 bp, Homo sapien
caccgcaggtgtagagaaggcactt

SEQ ID NO: 5850274 - DNA, 25 bp, Homo sapien
tagtgaaacaggggcaatggtgcgc

SEQ ID NO: 5850275 - DNA, 25 bp, Homo sapien
tggtcgagcgatggatttccgtctc

SEQ ID NO: 5850276 - DNA, 25 bp, Homo sapien
atggatttccgtctctggtgtagct

SEQ ID NO: 5850277 - DNA, 25 bp, Homo sapien
gtctctggtgtagctgatgatccga

SEQ ID NO: 5850278 - DNA, 25 bp, Homo sapien
tgtagctgatgatccgaataactac

SEQ ID NO: 5850279 - DNA, 25 bp, Homo sapien
accagccagctatcaactcgcgccc

SEQ ID NO: 5850280 - DNA, 25 bp, Homo sapien
gcaactcatcgattgatttacggcg

SEQ ID NO: 5850281 - DNA, 25 bp, Homo sapien
gattgatttacggcgctaaggatga

SEQ ID NO: 5850282 - DNA, 25 bp, Homo sapien
taaggatgactctggtcagagatac

SEQ ID NO: 5850283 - DNA, 25 bp, Homo sapien
tggtcagagatacctggcctggtct

SEQ ID NO: 5850284 - DNA, 25 bp, Homo sapien
ctggtctggacacagtgcccgtgtc

SEQ ID NO: 5850285 - DNA, 25 bp, Homo sapien
gtgcccgtgtcggagccgcgcgaga

SEQ ID NO: 5850286 - DNA, 25 bp, Homo sapien
cgagatatggcccgcgctggagttt

SEQ ID NO: 5850287 - DNA, 25 bp, Homo sapien
ggagtttcaataccggagatcatgc

SEQ ID NO: 5850288 - DNA, 25 bp, Homo sapien
ggagatcatgcaagctggtggctgg

SEQ ID NO: 5850289 - DNA, 25 bp, Homo sapien
ctggtggctggaccaatgtaaatat

SEQ ID NO: 5850290 - DNA, 25 bp, Homo sapien
ccaatgtaaatattgtcatgaacta

SEQ ID NO: 5850291 - DNA, 25 bp, Homo sapien
cgctggttagcaccgcaggtgtaga

SEQ ID NO: 5850292 - DNA, 25 bp, Homo sapien
ttgtcatgaactatatccgtaacct

SEQ ID NO: 5850293 - DNA, 25 bp, Homo sapien
caccgcaggtgtagagaaggcactt

SEQ ID NO: 5850294 - DNA, 25 bp, Homo sapien
tagtgaaacaggggcaatggtgcgc

SEQ ID NO: 5850295 - DNA, 25 bp, Homo sapien
tggtcgagcgatggatttccgtctc

SEQ ID NO: 5850296 - DNA, 25 bp, Homo sapien
atggatttccgtctctggtgtagct

SEQ ID NO: 5850297 - DNA, 25 bp, Homo sapien
gtctctggtgtagctgatgatccga

SEQ ID NO: 5850298 - DNA, 25 bp, Homo sapien
tgtagctgatgatccgaataactac

SEQ ID NO: 5850299 - DNA, 25 bp, Homo sapien
accagccagctatcaactcgcgccc

SEQ ID NO: 5850300 - DNA, 25 bp, Homo sapien
gcaactcatcgattgatttacggcg

SEQ ID NO: 5850301 - DNA, 25 bp, Homo sapien
gattgatttacggcgctaaggatga

SEQ ID NO: 5850302 - DNA, 25 bp, Homo sapien
taaggatgactctggtcagagatac

SEQ ID NO: 5850303 - DNA, 25 bp, Homo sapien
tggtcagagatacctggcctggtct

SEQ ID NO: 5850304 - DNA, 25 bp, Homo sapien
ctggtctggacacagtgcccgtgtc

SEQ ID NO: 5850305 - DNA, 25 bp, Homo sapien
gtgcccgtgtcggagccgcgcgaga

SEQ ID NO: 5850306 - DNA, 25 bp, Homo sapien
cgagatatggcccgcgctggagttt

SEQ ID NO: 5850307 - DNA, 25 bp, Homo sapien
ggagtttcaataccggagatcatgc

SEQ ID NO: 5850308 - DNA, 25 bp, Homo sapien
ggagatcatgcaagctggtggctgg

SEQ ID NO: 5850309 - DNA, 25 bp, Homo sapien
ctggtggctggaccaatgtaaatat

SEQ ID NO: 5850310 - DNA, 25 bp, Homo sapien
ccaatgtaaatattgtcatgaacta

SEQ ID NO: 5850311 - DNA, 25 bp, Homo sapien
cgctggttagcaccgcaggtgtaga

SEQ ID NO: 5850312 - DNA, 25 bp, Homo sapien
ttgtcatgaactatatccgtaacct

SEQ ID NO: 5850313 - DNA, 25 bp, Homo sapien
caccgcaggtgtagagaaggcactt

SEQ ID NO: 5850314 - DNA, 25 bp, Homo sapien
tagtgaaacaggggcaatggtgcgc

SEQ ID NO: 5850315 - DNA, 25 bp, Homo sapien
tggtcgagcgatggatttccgtctc

SEQ ID NO: 5850316 - DNA, 25 bp, Homo sapien
atggatttccgtctctggtgtagct

SEQ ID NO: 5850317 - DNA, 25 bp, Homo sapien
gtctctggtgtagctgatgatccga

SEQ ID NO: 5850318 - DNA, 25 bp, Homo sapien
tgtagctgatgatccgaataactac

SEQ ID NO: 5850319 - DNA, 25 bp, Homo sapien
accagccagctatcaactcgcgccc

SEQ ID NO: 5850320 - DNA, 25 bp, Homo sapien
gcaactcatcgattgatttacggcg

SEQ ID NO: 5850321 - DNA, 25 bp, Homo sapien
gattgatttacggcgctaaggatga

SEQ ID NO: 5850322 - DNA, 25 bp, Homo sapien
taaggatgactctggtcagagatac

SEQ ID NO: 5850323 - DNA, 25 bp, Homo sapien
tggtcagagatacctggcctggtct

SEQ ID NO: 5850324 - DNA, 25 bp, Homo sapien
ctggtctggacacagtgcccgtgtc

SEQ ID NO: 5850325 - DNA, 25 bp, Homo sapien
gtgcccgtgtcggagccgcgcgaga

SEQ ID NO: 5850326 - DNA, 25 bp, Homo sapien
cgagatatggcccgcgctggagttt

SEQ ID NO: 5850327 - DNA, 25 bp, Homo sapien
ggagtttcaataccggagatcatgc

SEQ ID NO: 5850328 - DNA, 25 bp, Homo sapien
ggagatcatgcaagctggtggctgg

SEQ ID NO: 5850329 - DNA, 25 bp, Homo sapien
ctggtggctggaccaatgtaaatat

SEQ ID NO: 5850330 - DNA, 25 bp, Homo sapien
ccaatgtaaatattgtcatgaacta

SEQ ID NO: 5850331 - DNA, 25 bp, Homo sapien
cgctggttagcaccgcaggtgtaga

SEQ ID NO: 5850332 - DNA, 25 bp, Homo sapien
ttgtcatgaactatatccgtaacct

SEQ ID NO: 5850333 - DNA, 25 bp, Homo sapien
caccgcaggtgtagagaaggcactt

SEQ ID NO: 5850334 - DNA, 25 bp, Homo sapien
tagtgaaacaggggcaatggtgcgc

SEQ ID NO: 5850335 - DNA, 25 bp, Homo sapien
tggtcgagcgatggatttccgtctc

SEQ ID NO: 5850336 - DNA, 25 bp, Homo sapien
atggatttccgtctctggtgtagct

SEQ ID NO: 5850337 - DNA, 25 bp, Homo sapien
gtctctggtgtagctgatgatccga

SEQ ID NO: 5850338 - DNA, 25 bp, Homo sapien
tgtagctgatgatccgaataactac

SEQ ID NO: 5850339 - DNA, 25 bp, Homo sapien
accagccagctatcaactcgcgccc

SEQ ID NO: 5850340 - DNA, 25 bp, Homo sapien
gcaactcatcgattgatttacggcg

SEQ ID NO: 5850341 - DNA, 25 bp, Homo sapien
gattgatttacggcgctaaggatga

SEQ ID NO: 5850342 - DNA, 25 bp, Homo sapien
taaggatgactctggtcagagatac

SEQ ID NO: 5850343 - DNA, 25 bp, Homo sapien
tggtcagagatacctggcctggtct

SEQ ID NO: 5850344 - DNA, 25 bp, Homo sapien
ctggtctggacacagtgcccgtgtc

SEQ ID NO: 5850345 - DNA, 25 bp, Homo sapien
gtgcccgtgtcggagccgcgcgaga

SEQ ID NO: 5850346 - DNA, 25 bp, Homo sapien
cgagatatggcccgcgctggagttt

SEQ ID NO: 5850347 - DNA, 25 bp, Homo sapien
ggagtttcaataccggagatcatgc

SEQ ID NO: 5850348 - DNA, 25 bp, Homo sapien
ggagatcatgcaagctggtggctgg

SEQ ID NO: 5850349 - DNA, 25 bp, Homo sapien
ctggtggctggaccaatgtaaatat

SEQ ID NO: 5850350 - DNA, 25 bp, Homo sapien
ccaatgtaaatattgtcatgaacta

SEQ ID NO: 5850351 - DNA, 25 bp, Homo sapien
cgctggttagcaccgcaggtgtaga

SEQ ID NO: 5850352 - DNA, 25 bp, Homo sapien
ttgtcatgaactatatccgtaacct

SEQ ID NO: 5850353 - DNA, 25 bp, Homo sapien
caccgcaggtgtagagaaggcactt

SEQ ID NO: 5850354 - DNA, 25 bp, Homo sapien
tagtgaaacaggggcaatggtgcgc

SEQ ID NO: 5850355 - DNA, 25 bp, Homo sapien
tggtcgagcgatggatttccgtctc

SEQ ID NO: 5850356 - DNA, 25 bp, Homo sapien
atggatttccgtctctggtgtagct

SEQ ID NO: 5850357 - DNA, 25 bp, Homo sapien
gtctctggtgtagctgatgatccga

SEQ ID NO: 5850358 - DNA, 25 bp, Homo sapien
tgtagctgatgatccgaataactac

SEQ ID NO: 5850359 - DNA, 25 bp, Homo sapien
accagccagctatcaactcgcgccc

SEQ ID NO: 5850360 - DNA, 25 bp, Homo sapien
gcaactcatcgattgatttacggcg

SEQ ID NO: 5850361 - DNA, 25 bp, Homo sapien
gattgatttacggcgctaaggatga

SEQ ID NO: 5850362 - DNA, 25 bp, Homo sapien
taaggatgactctggtcagagatac

SEQ ID NO: 5850363 - DNA, 25 bp, Homo sapien
tggtcagagatacctggcctggtct

SEQ ID NO: 5850364 - DNA, 25 bp, Homo sapien
ctggtctggacacagtgcccgtgtc

SEQ ID NO: 5850365 - DNA, 25 bp, Homo sapien
gtgcccgtgtcggagccgcgcgaga

SEQ ID NO: 5850366 - DNA, 25 bp, Homo sapien
cgagatatggcccgcgctggagttt

SEQ ID NO: 5850367 - DNA, 25 bp, Homo sapien
ggagtttcaataccggagatcatgc

SEQ ID NO: 5850368 - DNA, 25 bp, Homo sapien
ggagatcatgcaagctggtggctgg

SEQ ID NO: 5850369 - DNA, 25 bp, Homo sapien
ctggtggctggaccaatgtaaatat

SEQ ID NO: 5850370 - DNA, 25 bp, Homo sapien
ccaatgtaaatattgtcatgaacta

SEQ ID NO: 5850371 - DNA, 25 bp, Homo sapien
cgctggttagcaccgcaggtgtaga

SEQ ID NO: 5850372 - DNA, 25 bp, Homo sapien
ttgtcatgaactatatccgtaacct

SEQ ID NO: 5850373 - DNA, 25 bp, Homo sapien
caccgcaggtgtagagaaggcactt

SEQ ID NO: 5850374 - DNA, 25 bp, Homo sapien
tagtgaaacaggggcaatggtgcgc

SEQ ID NO: 5850375 - DNA, 25 bp, Homo sapien
tggtcgagcgatggatttccgtctc

SEQ ID NO: 5850376 - DNA, 25 bp, Homo sapien
atggatttccgtctctggtgtagct

SEQ ID NO: 5850377 - DNA, 25 bp, Homo sapien
gtctctggtgtagctgatgatccga

SEQ ID NO: 5850378 - DNA, 25 bp, Homo sapien
tgtagctgatgatccgaataactac

SEQ ID NO: 5850379 - DNA, 25 bp, Homo sapien
accagccagctatcaactcgcgccc

SEQ ID NO: 5850380 - DNA, 25 bp, Homo sapien
gcaactcatcgattgatttacggcg

SEQ ID NO: 5850381 - DNA, 25 bp, Homo sapien
gattgatttacggcgctaaggatga

SEQ ID NO: 5850382 - DNA, 25 bp, Homo sapien
taaggatgactctggtcagagatac

SEQ ID NO: 5850383 - DNA, 25 bp, Homo sapien
tggtcagagatacctggcctggtct

SEQ ID NO: 5850384 - DNA, 25 bp, Homo sapien
ctggtctggacacagtgcccgtgtc

SEQ ID NO: 5850385 - DNA, 25 bp, Homo sapien
gtgcccgtgtcggagccgcgcgaga

SEQ ID NO: 5850386 - DNA, 25 bp, Homo sapien
cgagatatggcccgcgctggagttt

SEQ ID NO: 5850387 - DNA, 25 bp, Homo sapien
ggagtttcaataccggagatcatgc

SEQ ID NO: 5850388 - DNA, 25 bp, Homo sapien
ggagatcatgcaagctggtggctgg

SEQ ID NO: 5850389 - DNA, 25 bp, Homo sapien
ctggtggctggaccaatgtaaatat

SEQ ID NO: 5850390 - DNA, 25 bp, Homo sapien
ccaatgtaaatattgtcatgaacta

SEQ ID NO: 5850391 - DNA, 25 bp, Homo sapien
cgctggttagcaccgcaggtgtaga

SEQ ID NO: 5850392 - DNA, 25 bp, Homo sapien
ttgtcatgaactatatccgtaacct

SEQ ID NO: 5850393 - DNA, 25 bp, Homo sapien
caccgcaggtgtagagaaggcactt

SEQ ID NO: 5850394 - DNA, 25 bp, Homo sapien
tagtgaaacaggggcaatggtgcgc

SEQ ID NO: 5850395 - DNA, 25 bp, Homo sapien
tggtcgagcgatggatttccgtctc

SEQ ID NO: 5850396 - DNA, 25 bp, Homo sapien
atggatttccgtctctggtgtagct

SEQ ID NO: 5850397 - DNA, 25 bp, Homo sapien
gtctctggtgtagctgatgatccga

SEQ ID NO: 5850398 - DNA, 25 bp, Homo sapien
tgtagctgatgatccgaataactac

SEQ ID NO: 5850399 - DNA, 25 bp, Homo sapien
accagccagctatcaactcgcgccc

SEQ ID NO: 5850400 - DNA, 25 bp, Homo sapien
gcaactcatcgattgatttacggcg

SEQ ID NO: 5850401 - DNA, 25 bp, Homo sapien
gattgatttacggcgctaaggatga

SEQ ID NO: 5850402 - DNA, 25 bp, Homo sapien
taaggatgactctggtcagagatac

SEQ ID NO: 5850403 - DNA, 25 bp, Homo sapien
tggtcagagatacctggcctggtct

SEQ ID NO: 5850404 - DNA, 25 bp, Homo sapien
ctggtctggacacagtgcccgtgtc

SEQ ID NO: 5850405 - DNA, 25 bp, Homo sapien
gtgcccgtgtcggagccgcgcgaga

SEQ ID NO: 5850406 - DNA, 25 bp, Homo sapien
cgagatatggcccgcgctggagttt

SEQ ID NO: 5850407 - DNA, 25 bp, Homo sapien
ggagtttcaataccggagatcatgc

SEQ ID NO: 5850408 - DNA, 25 bp, Homo sapien
ggagatcatgcaagctggtggctgg

SEQ ID NO: 5850409 - DNA, 25 bp, Homo sapien
ctggtggctggaccaatgtaaatat

SEQ ID NO: 5850410 - DNA, 25 bp, Homo sapien
ccaatgtaaatattgtcatgaacta

SEQ ID NO: 5850411 - DNA, 25 bp, Homo sapien
cgctggttagcaccgcaggtgtaga

SEQ ID NO: 5850412 - DNA, 25 bp, Homo sapien
ttgtcatgaactatatccgtaacct

SEQ ID NO: 5850413 - DNA, 25 bp, Homo sapien
caccgcaggtgtagagaaggcactt

SEQ ID NO: 5850414 - DNA, 25 bp, Homo sapien
tagtgaaacaggggcaatggtgcgc

SEQ ID NO: 5850415 - DNA, 25 bp, Homo sapien
tggtcgagcgatggatttccgtctc

SEQ ID NO: 5850416 - DNA, 25 bp, Homo sapien
atggatttccgtctctggtgtagct

SEQ ID NO: 5850417 - DNA, 25 bp, Homo sapien
gtctctggtgtagctgatgatccga

SEQ ID NO: 5850418 - DNA, 25 bp, Homo sapien
tgtagctgatgatccgaataactac

SEQ ID NO: 5850419 - DNA, 25 bp, Homo sapien
accagccagctatcaactcgcgccc

SEQ ID NO: 5850420 - DNA, 25 bp, Homo sapien
gcaactcatcgattgatttacggcg

SEQ ID NO: 5850421 - DNA, 25 bp, Homo sapien
gattgatttacggcgctaaggatga

SEQ ID NO: 5850422 - DNA, 25 bp, Homo sapien
taaggatgactctggtcagagatac

SEQ ID NO: 5850423 - DNA, 25 bp, Homo sapien
tggtcagagatacctggcctggtct

SEQ ID NO: 5850424 - DNA, 25 bp, Homo sapien
ctggtctggacacagtgcccgtgtc

SEQ ID NO: 5850425 - DNA, 25 bp, Homo sapien
gtgcccgtgtcggagccgcgcgaga

SEQ ID NO: 5850426 - DNA, 25 bp, Homo sapien
cgagatatggcccgcgctggagttt

SEQ ID NO: 5850427 - DNA, 25 bp, Homo sapien
ggagtttcaataccggagatcatgc

SEQ ID NO: 5850428 - DNA, 25 bp, Homo sapien
ggagatcatgcaagctggtggctgg

SEQ ID NO: 5850429 - DNA, 25 bp, Homo sapien
ctggtggctggaccaatgtaaatat

SEQ ID NO: 5850430 - DNA, 25 bp, Homo sapien
ccaatgtaaatattgtcatgaacta

SEQ ID NO: 5850431 - DNA, 25 bp, Homo sapien
cgctggttagcaccgcaggtgtaga

SEQ ID NO: 5850432 - DNA, 25 bp, Homo sapien
ttgtcatgaactatatccgtaacct

SEQ ID NO: 5850433 - DNA, 25 bp, Homo sapien
caccgcaggtgtagagaaggcactt

SEQ ID NO: 5850434 - DNA, 25 bp, Homo sapien
tagtgaaacaggggcaatggtgcgc

SEQ ID NO: 5850435 - DNA, 25 bp, Homo sapien
tggtcgagcgatggatttccgtctc

SEQ ID NO: 5850436 - DNA, 25 bp, Homo sapien
atggatttccgtctctggtgtagct

SEQ ID NO: 5850437 - DNA, 25 bp, Homo sapien
gtctctggtgtagctgatgatccga

SEQ ID NO: 5850438 - DNA, 25 bp, Homo sapien
tgtagctgatgatccgaataactac

SEQ ID NO: 5850439 - DNA, 25 bp, Homo sapien
accagccagctatcaactcgcgccc

SEQ ID NO: 5850440 - DNA, 25 bp, Homo sapien
gcaactcatcgattgatttacggcg

SEQ ID NO: 5850441 - DNA, 25 bp, Homo sapien
gattgatttacggcgctaaggatga

SEQ ID NO: 5850442 - DNA, 25 bp, Homo sapien
taaggatgactctggtcagagatac

SEQ ID NO: 5850443 - DNA, 25 bp, Homo sapien
tggtcagagatacctggcctggtct

SEQ ID NO: 5850444 - DNA, 25 bp, Homo sapien
ctggtctggacacagtgcccgtgtc

SEQ ID NO: 5850445 - DNA, 25 bp, Homo sapien
gtgcccgtgtcggagccgcgcgaga

SEQ ID NO: 5850446 - DNA, 25 bp, Homo sapien
cgagatatggcccgcgctggagttt

SEQ ID NO: 5850447 - DNA, 25 bp, Homo sapien
ggagtttcaataccggagatcatgc

SEQ ID NO: 5850448 - DNA, 25 bp, Homo sapien
ggagatcatgcaagctggtggctgg

SEQ ID NO: 5850449 - DNA, 25 bp, Homo sapien
ctggtggctggaccaatgtaaatat

SEQ ID NO: 5850450 - DNA, 25 bp, Homo sapien
ccaatgtaaatattgtcatgaacta

SEQ ID NO: 5850451 - DNA, 25 bp, Homo sapien
cgctggttagcaccgcaggtgtaga

SEQ ID NO: 5850452 - DNA, 25 bp, Homo sapien
ttgtcatgaactatatccgtaacct

SEQ ID NO: 5850453 - DNA, 25 bp, Homo sapien
caccgcaggtgtagagaaggcactt

SEQ ID NO: 5850454 - DNA, 25 bp, Homo sapien
tagtgaaacaggggcaatggtgcgc

SEQ ID NO: 5850455 - DNA, 25 bp, Homo sapien
tggtcgagcgatggatttccgtctc

SEQ ID NO: 5850456 - DNA, 25 bp, Homo sapien
atggatttccgtctctggtgtagct

SEQ ID NO: 5850457 - DNA, 25 bp, Homo sapien
gtctctggtgtagctgatgatccga

SEQ ID NO: 5850458 - DNA, 25 bp, Homo sapien
tgtagctgatgatccgaataactac

SEQ ID NO: 5850459 - DNA, 25 bp, Homo sapien
accagccagctatcaactcgcgccc

SEQ ID NO: 5850460 - DNA, 25 bp, Homo sapien
gcaactcatcgattgatttacggcg

SEQ ID NO: 5850461 - DNA, 25 bp, Homo sapien
gattgatttacggcgctaaggatga

SEQ ID NO: 5850462 - DNA, 25 bp, Homo sapien
taaggatgactctggtcagagatac

SEQ ID NO: 5850463 - DNA, 25 bp, Homo sapien
tggtcagagatacctggcctggtct

SEQ ID NO: 5850464 - DNA, 25 bp, Homo sapien
ctggtctggacacagtgcccgtgtc

SEQ ID NO: 5850465 - DNA, 25 bp, Homo sapien
gtgcccgtgtcggagccgcgcgaga

SEQ ID NO: 5850466 - DNA, 25 bp, Homo sapien
cgagatatggcccgcgctggagttt

SEQ ID NO: 5850467 - DNA, 25 bp, Homo sapien
ggagtttcaataccggagatcatgc

SEQ ID NO: 5850468 - DNA, 25 bp, Homo sapien
ggagatcatgcaagctggtggctgg

SEQ ID NO: 5850469 - DNA, 25 bp, Homo sapien
ctggtggctggaccaatgtaaatat

SEQ ID NO: 5850470 - DNA, 25 bp, Homo sapien
ccaatgtaaatattgtcatgaacta

SEQ ID NO: 5850471 - DNA, 25 bp, Homo sapien
cgctggttagcaccgcaggtgtaga

SEQ ID NO: 5850472 - DNA, 25 bp, Homo sapien
ttgtcatgaactatatccgtaacct

SEQ ID NO: 5850473 - DNA, 25 bp, Homo sapien
caccgcaggtgtagagaaggcactt

SEQ ID NO: 5850474 - DNA, 25 bp, Homo sapien
tagtgaaacaggggcaatggtgcgc

SEQ ID NO: 5850475 - DNA, 25 bp, Homo sapien
tggtcgagcgatggatttccgtctc

SEQ ID NO: 5850476 - DNA, 25 bp, Homo sapien
atggatttccgtctctggtgtagct

SEQ ID NO: 5850477 - DNA, 25 bp, Homo sapien
gtctctggtgtagctgatgatccga

SEQ ID NO: 5850478 - DNA, 25 bp, Homo sapien
tgtagctgatgatccgaataactac

SEQ ID NO: 5850479 - DNA, 25 bp, Homo sapien
accagccagctatcaactcgcgccc

SEQ ID NO: 5850480 - DNA, 25 bp, Homo sapien
gcaactcatcgattgatttacggcg

SEQ ID NO: 5850481 - DNA, 25 bp, Homo sapien
gattgatttacggcgctaaggatga

SEQ ID NO: 5850482 - DNA, 25 bp, Homo sapien
taaggatgactctggtcagagatac

SEQ ID NO: 5850483 - DNA, 25 bp, Homo sapien
tggtcagagatacctggcctggtct

SEQ ID NO: 5850484 - DNA, 25 bp, Homo sapien
ctggtctggacacagtgcccgtgtc

SEQ ID NO: 5850485 - DNA, 25 bp, Homo sapien
gtgcccgtgtcggagccgcgcgaga

SEQ ID NO: 5850486 - DNA, 25 bp, Homo sapien
cgagatatggcccgcgctggagttt

SEQ ID NO: 5850487 - DNA, 25 bp, Homo sapien
ggagtttcaataccggagatcatgc

SEQ ID NO: 5850488 - DNA, 25 bp, Homo sapien
ggagatcatgcaagctggtggctgg

SEQ ID NO: 5850489 - DNA, 25 bp, Homo sapien
ctggtggctggaccaatgtaaatat

SEQ ID NO: 5850490 - DNA, 25 bp, Homo sapien
ccaatgtaaatattgtcatgaacta

SEQ ID NO: 5850491 - DNA, 25 bp, Homo sapien
cgctggttagcaccgcaggtgtaga

SEQ ID NO: 5850492 - DNA, 25 bp, Homo sapien
ttgtcatgaactatatccgtaacct

SEQ ID NO: 5850493 - DNA, 25 bp, Homo sapien
caccgcaggtgtagagaaggcactt

SEQ ID NO: 5850494 - DNA, 25 bp, Homo sapien
tagtgaaacaggggcaatggtgcgc

SEQ ID NO: 5850495 - DNA, 25 bp, Homo sapien
tggtcgagcgatggatttccgtctc

SEQ ID NO: 5850496 - DNA, 25 bp, Homo sapien
atggatttccgtctctggtgtagct

SEQ ID NO: 5850497 - DNA, 25 bp, Homo sapien
gtctctggtgtagctgatgatccga

SEQ ID NO: 5850498 - DNA, 25 bp, Homo sapien
tgtagctgatgatccgaataactac

SEQ ID NO: 5850499 - DNA, 25 bp, Homo sapien
accagccagctatcaactcgcgccc

SEQ ID NO: 5850500 - DNA, 25 bp, Homo sapien
gcaactcatcgattgatttacggcg

SEQ ID NO: 5850501 - DNA, 25 bp, Homo sapien
gattgatttacggcgctaaggatga

SEQ ID NO: 5850502 - DNA, 25 bp, Homo sapien
taaggatgactctggtcagagatac

SEQ ID NO: 5850503 - DNA, 25 bp, Homo sapien
tggtcagagatacctggcctggtct

SEQ ID NO: 5850504 - DNA, 25 bp, Homo sapien
ctggtctggacacagtgcccgtgtc

SEQ ID NO: 5850505 - DNA, 25 bp, Homo sapien
gtgcccgtgtcggagccgcgcgaga

SEQ ID NO: 5850506 - DNA, 25 bp, Homo sapien
cgagatatggcccgcgctggagttt

SEQ ID NO: 5850507 - DNA, 25 bp, Homo sapien
ggagtttcaataccggagatcatgc

SEQ ID NO: 5850508 - DNA, 25 bp, Homo sapien
ggagatcatgcaagctggtggctgg

SEQ ID NO: 5850509 - DNA, 25 bp, Homo sapien
ctggtggctggaccaatgtaaatat

SEQ ID NO: 5850510 - DNA, 25 bp, Homo sapien
ccaatgtaaatattgtcatgaacta

SEQ ID NO: 5850511 - DNA, 25 bp, Homo sapien
cgctggttagcaccgcaggtgtaga

SEQ ID NO: 5850512 - DNA, 25 bp, Homo sapien
ttgtcatgaactatatccgtaacct

SEQ ID NO: 5850513 - DNA, 25 bp, Homo sapien
caccgcaggtgtagagaaggcactt

SEQ ID NO: 5850514 - DNA, 25 bp, Homo sapien
tagtgaaacaggggcaatggtgcgc

SEQ ID NO: 5850515 - DNA, 25 bp, Homo sapien
tggtcgagcgatggatttccgtctc

SEQ ID NO: 5850516 - DNA, 25 bp, Homo sapien
atggatttccgtctctggtgtagct

SEQ ID NO: 5850517 - DNA, 25 bp, Homo sapien
gtctctggtgtagctgatgatccga

SEQ ID NO: 5850518 - DNA, 25 bp, Homo sapien
tgtagctgatgatccgaataactac

SEQ ID NO: 5850519 - DNA, 25 bp, Homo sapien
accagccagctatcaactcgcgccc

SEQ ID NO: 5850520 - DNA, 25 bp, Homo sapien
gcaactcatcgattgatttacggcg

SEQ ID NO: 5850521 - DNA, 25 bp, Homo sapien
gattgatttacggcgctaaggatga

SEQ ID NO: 5850522 - DNA, 25 bp, Homo sapien
taaggatgactctggtcagagatac

SEQ ID NO: 5850523 - DNA, 25 bp, Homo sapien
tggtcagagatacctggcctggtct

SEQ ID NO: 5850524 - DNA, 25 bp, Homo sapien
ctggtctggacacagtgcccgtgtc

SEQ ID NO: 5850525 - DNA, 25 bp, Homo sapien
gtgcccgtgtcggagccgcgcgaga

SEQ ID NO: 5850526 - DNA, 25 bp, Homo sapien
cgagatatggcccgcgctggagttt

SEQ ID NO: 5850527 - DNA, 25 bp, Homo sapien
ggagtttcaataccggagatcatgc

SEQ ID NO: 5850528 - DNA, 25 bp, Homo sapien
ggagatcatgcaagctggtggctgg

SEQ ID NO: 5850529 - DNA, 25 bp, Homo sapien
ctggtggctggaccaatgtaaatat

SEQ ID NO: 5850530 - DNA, 25 bp, Homo sapien
ccaatgtaaatattgtcatgaacta

SEQ ID NO: 5850531 - DNA, 25 bp, Homo sapien
cgctggttagcaccgcaggtgtaga

SEQ ID NO: 5850532 - DNA, 25 bp, Homo sapien
ttgtcatgaactatatccgtaacct

SEQ ID NO: 5850533 - DNA, 25 bp, Homo sapien
caccgcaggtgtagagaaggcactt

SEQ ID NO: 5850534 - DNA, 25 bp, Homo sapien
tagtgaaacaggggcaatggtgcgc

SEQ ID NO: 5850535 - DNA, 25 bp, Homo sapien
tggtcgagcgatggatttccgtctc

SEQ ID NO: 5850536 - DNA, 25 bp, Homo sapien
atggatttccgtctctggtgtagct

SEQ ID NO: 5850537 - DNA, 25 bp, Homo sapien
gtctctggtgtagctgatgatccga

SEQ ID NO: 5850538 - DNA, 25 bp, Homo sapien
tgtagctgatgatccgaataactac

SEQ ID NO: 5850539 - DNA, 25 bp, Homo sapien
accagccagctatcaactcgcgccc

SEQ ID NO: 5850540 - DNA, 25 bp, Homo sapien
gcaactcatcgattgatttacggcg

SEQ ID NO: 5850541 - DNA, 25 bp, Homo sapien
gattgatttacggcgctaaggatga

SEQ ID NO: 5850542 - DNA, 25 bp, Homo sapien
taaggatgactctggtcagagatac

SEQ ID NO: 5850543 - DNA, 25 bp, Homo sapien
tggtcagagatacctggcctggtct

SEQ ID NO: 5850544 - DNA, 25 bp, Homo sapien
ctggtctggacacagtgcccgtgtc

SEQ ID NO: 5850545 - DNA, 25 bp, Homo sapien
gtgcccgtgtcggagccgcgcgaga

SEQ ID NO: 5850546 - DNA, 25 bp, Homo sapien
cgagatatggcccgcgctggagttt

SEQ ID NO: 5850547 - DNA, 25 bp, Homo sapien
ggagtttcaataccggagatcatgc

SEQ ID NO: 5850548 - DNA, 25 bp, Homo sapien
ggagatcatgcaagctggtggctgg

SEQ ID NO: 5850549 - DNA, 25 bp, Homo sapien
ctggtggctggaccaatgtaaatat

SEQ ID NO: 5850550 - DNA, 25 bp, Homo sapien
ccaatgtaaatattgtcatgaacta

SEQ ID NO: 5850551 - DNA, 25 bp, Homo sapien
cgctggttagcaccgcaggtgtaga

SEQ ID NO: 5850552 - DNA, 25 bp, Homo sapien
ttgtcatgaactatatccgtaacct

SEQ ID NO: 5850553 - DNA, 25 bp, Homo sapien
caccgcaggtgtagagaaggcactt

SEQ ID NO: 5850554 - DNA, 25 bp, Homo sapien
tagtgaaacaggggcaatggtgcgc

SEQ ID NO: 5850555 - DNA, 25 bp, Homo sapien
tggtcgagcgatggatttccgtctc

SEQ ID NO: 5850556 - DNA, 25 bp, Homo sapien
atggatttccgtctctggtgtagct

SEQ ID NO: 5850557 - DNA, 25 bp, Homo sapien
gtctctggtgtagctgatgatccga

SEQ ID NO: 5850558 - DNA, 25 bp, Homo sapien
tgtagctgatgatccgaataactac

SEQ ID NO: 5850559 - DNA, 25 bp, Homo sapien
accagccagctatcaactcgcgccc

SEQ ID NO: 5850560 - DNA, 25 bp, Homo sapien
gcaactcatcgattgatttacggcg

SEQ ID NO: 5850561 - DNA, 25 bp, Homo sapien
gattgatttacggcgctaaggatga

SEQ ID NO: 5850562 - DNA, 25 bp, Homo sapien
taaggatgactctggtcagagatac

SEQ ID NO: 5850563 - DNA, 25 bp, Homo sapien
tggtcagagatacctggcctggtct

SEQ ID NO: 5850564 - DNA, 25 bp, Homo sapien
ctggtctggacacagtgcccgtgtc

SEQ ID NO: 5850565 - DNA, 25 bp, Homo sapien
gtgcccgtgtcggagccgcgcgaga

SEQ ID NO: 5850566 - DNA, 25 bp, Homo sapien
cgagatatggcccgcgctggagttt

SEQ ID NO: 5850567 - DNA, 25 bp, Homo sapien
ggagtttcaataccggagatcatgc

SEQ ID NO: 5850568 - DNA, 25 bp, Homo sapien
ggagatcatgcaagctggtggctgg

SEQ ID NO: 5850569 - DNA, 25 bp, Homo sapien
ctggtggctggaccaatgtaaatat

SEQ ID NO: 5850570 - DNA, 25 bp, Homo sapien
ccaatgtaaatattgtcatgaacta

SEQ ID NO: 5850571 - DNA, 25 bp, Homo sapien
cgctggttagcaccgcaggtgtaga

SEQ ID NO: 5850572 - DNA, 25 bp, Homo sapien
ttgtcatgaactatatccgtaacct

SEQ ID NO: 5850573 - DNA, 25 bp, Homo sapien
caccgcaggtgtagagaaggcactt

SEQ ID NO: 5850574 - DNA, 25 bp, Homo sapien
tagtgaaacaggggcaatggtgcgc

SEQ ID NO: 5850575 - DNA, 25 bp, Homo sapien
tggtcgagcgatggatttccgtctc

SEQ ID NO: 5850576 - DNA, 25 bp, Homo sapien
atggatttccgtctctggtgtagct

SEQ ID NO: 5850577 - DNA, 25 bp, Homo sapien
gtctctggtgtagctgatgatccga

SEQ ID NO: 5850578 - DNA, 25 bp, Homo sapien
tgtagctgatgatccgaataactac

SEQ ID NO: 5850579 - DNA, 25 bp, Homo sapien
accagccagctatcaactcgcgccc

SEQ ID NO: 5850580 - DNA, 25 bp, Homo sapien
gcaactcatcgattgatttacggcg

SEQ ID NO: 5850581 - DNA, 25 bp, Homo sapien
gattgatttacggcgctaaggatga

SEQ ID NO: 5850582 - DNA, 25 bp, Homo sapien
taaggatgactctggtcagagatac

SEQ ID NO: 5850583 - DNA, 25 bp, Homo sapien
tggtcagagatacctggcctggtct

SEQ ID NO: 5850584 - DNA, 25 bp, Homo sapien
ctggtctggacacagtgcccgtgtc

SEQ ID NO: 5850585 - DNA, 25 bp, Homo sapien
gtgcccgtgtcggagccgcgcgaga

SEQ ID NO: 5850586 - DNA, 25 bp, Homo sapien
cgagatatggcccgcgctggagttt

SEQ ID NO: 5850587 - DNA, 25 bp, Homo sapien
ggagtttcaataccggagatcatgc

SEQ ID NO: 5850588 - DNA, 25 bp, Homo sapien
ggagatcatgcaagctggtggctgg

SEQ ID NO: 5850589 - DNA, 25 bp, Homo sapien
ctggtggctggaccaatgtaaatat

SEQ ID NO: 5850590 - DNA, 25 bp, Homo sapien
ccaatgtaaatattgtcatgaacta

SEQ ID NO: 5850591 - DNA, 25 bp, Homo sapien
cgctggttagcaccgcaggtgtaga

SEQ ID NO: 5850592 - DNA, 25 bp, Homo sapien
ttgtcatgaactatatccgtaacct

SEQ ID NO: 5850593 - DNA, 25 bp, Homo sapien
caccgcaggtgtagagaaggcactt

SEQ ID NO: 5850594 - DNA, 25 bp, Homo sapien
tagtgaaacaggggcaatggtgcgc

SEQ ID NO: 5850595 - DNA, 25 bp, Homo sapien
tggtcgagcgatggatttccgtctc

SEQ ID NO: 5850596 - DNA, 25 bp, Homo sapien
atggatttccgtctctggtgtagct

SEQ ID NO: 5850597 - DNA, 25 bp, Homo sapien
gtctctggtgtagctgatgatccga

SEQ ID NO: 5850598 - DNA, 25 bp, Homo sapien
tgtagctgatgatccgaataactac

SEQ ID NO: 5850599 - DNA, 25 bp, Homo sapien
accagccagctatcaactcgcgccc

SEQ ID NO: 5850600 - DNA, 25 bp, Homo sapien
gcaactcatcgattgatttacggcg

SEQ ID NO: 5850601 - DNA, 25 bp, Homo sapien
gattgatttacggcgctaaggatga

SEQ ID NO: 5850602 - DNA, 25 bp, Homo sapien
taaggatgactctggtcagagatac

SEQ ID NO: 5850603 - DNA, 25 bp, Homo sapien
tggtcagagatacctggcctggtct

SEQ ID NO: 5850604 - DNA, 25 bp, Homo sapien
ctggtctggacacagtgcccgtgtc

SEQ ID NO: 5850605 - DNA, 25 bp, Homo sapien
gtgcccgtgtcggagccgcgcgaga

SEQ ID NO: 5850606 - DNA, 25 bp, Homo sapien
cgagatatggcccgcgctggagttt

SEQ ID NO: 5850607 - DNA, 25 bp, Homo sapien
ggagtttcaataccggagatcatgc

SEQ ID NO: 5850608 - DNA, 25 bp, Homo sapien
ggagatcatgcaagctggtggctgg

SEQ ID NO: 5850609 - DNA, 25 bp, Homo sapien
ctggtggctggaccaatgtaaatat

SEQ ID NO: 5850610 - DNA, 25 bp, Homo sapien
ccaatgtaaatattgtcatgaacta

SEQ ID NO: 5850611 - DNA, 25 bp, Homo sapien
cgctggttagcaccgcaggtgtaga

SEQ ID NO: 5850612 - DNA, 25 bp, Homo sapien
ttgtcatgaactatatccgtaacct

SEQ ID NO: 5850613 - DNA, 25 bp, Homo sapien
caccgcaggtgtagagaaggcactt

SEQ ID NO: 5850614 - DNA, 25 bp, Homo sapien
tagtgaaacaggggcaatggtgcgc

SEQ ID NO: 5850615 - DNA, 25 bp, Homo sapien
tggtcgagcgatggatttccgtctc

SEQ ID NO: 5850616 - DNA, 25 bp, Homo sapien
atggatttccgtctctggtgtagct

SEQ ID NO: 5850617 - DNA, 25 bp, Homo sapien
gtctctggtgtagctgatgatccga

SEQ ID NO: 5850618 - DNA, 25 bp, Homo sapien
tgtagctgatgatccgaataactac

SEQ ID NO: 5850619 - DNA, 25 bp, Homo sapien
accagccagctatcaactcgcgccc

SEQ ID NO: 5850620 - DNA, 25 bp, Homo sapien
gcaactcatcgattgatttacggcg

SEQ ID NO: 5850621 - DNA, 25 bp, Homo sapien
gattgatttacggcgctaaggatga

SEQ ID NO: 5850622 - DNA, 25 bp, Homo sapien
taaggatgactctggtcagagatac

SEQ ID NO: 5850623 - DNA, 25 bp, Homo sapien
tggtcagagatacctggcctggtct

SEQ ID NO: 5850624 - DNA, 25 bp, Homo sapien
ctggtctggacacagtgcccgtgtc

SEQ ID NO: 5850625 - DNA, 25 bp, Homo sapien
gtgcccgtgtcggagccgcgcgaga

SEQ ID NO: 5850626 - DNA, 25 bp, Homo sapien
cgagatatggcccgcgctggagttt

SEQ ID NO: 5850627 - DNA, 25 bp, Homo sapien
ggagtttcaataccggagatcatgc

SEQ ID NO: 5850628 - DNA, 25 bp, Homo sapien
ggagatcatgcaagctggtggctgg

SEQ ID NO: 5850629 - DNA, 25 bp, Homo sapien
ctggtggctggaccaatgtaaatat

SEQ ID NO: 5850630 - DNA, 25 bp, Homo sapien
ccaatgtaaatattgtcatgaacta

SEQ ID NO: 5850631 - DNA, 25 bp, Homo sapien
cgctggttagcaccgcaggtgtaga

SEQ ID NO: 5850632 - DNA, 25 bp, Homo sapien
ttgtcatgaactatatccgtaacct

SEQ ID NO: 5850633 - DNA, 25 bp, Homo sapien
caccgcaggtgtagagaaggcactt

SEQ ID NO: 5850634 - DNA, 25 bp, Homo sapien
tagtgaaacaggggcaatggtgcgc

SEQ ID NO: 5850635 - DNA, 25 bp, Homo sapien
tggtcgagcgatggatttccgtctc

SEQ ID NO: 5850636 - DNA, 25 bp, Homo sapien
atggatttccgtctctggtgtagct

SEQ ID NO: 5850637 - DNA, 25 bp, Homo sapien
gtctctggtgtagctgatgatccga

SEQ ID NO: 5850638 - DNA, 25 bp, Homo sapien
tgtagctgatgatccgaataactac

SEQ ID NO: 5850639 - DNA, 25 bp, Homo sapien
accagccagctatcaactcgcgccc

SEQ ID NO: 5850640 - DNA, 25 bp, Homo sapien
gcaactcatcgattgatttacggcg

SEQ ID NO: 5850641 - DNA, 25 bp, Homo sapien
gattgatttacggcgctaaggatga

SEQ ID NO: 5850642 - DNA, 25 bp, Homo sapien
taaggatgactctggtcagagatac

SEQ ID NO: 5850643 - DNA, 25 bp, Homo sapien
tggtcagagatacctggcctggtct

SEQ ID NO: 5850644 - DNA, 25 bp, Homo sapien
ctggtctggacacagtgcccgtgtc

SEQ ID NO: 5850645 - DNA, 25 bp, Homo sapien
gtgcccgtgtcggagccgcgcgaga

SEQ ID NO: 5850646 - DNA, 25 bp, Homo sapien
cgagatatggcccgcgctggagttt

SEQ ID NO: 5850647 - DNA, 25 bp, Homo sapien
ggagtttcaataccggagatcatgc

SEQ ID NO: 5850648 - DNA, 25 bp, Homo sapien
ggagatcatgcaagctggtggctgg

SEQ ID NO: 5850649 - DNA, 25 bp, Homo sapien
ctggtggctggaccaatgtaaatat

SEQ ID NO: 5850650 - DNA, 25 bp, Homo sapien
ccaatgtaaatattgtcatgaacta

SEQ ID NO: 5850651 - DNA, 25 bp, Homo sapien
cgctggttagcaccgcaggtgtaga

SEQ ID NO: 5850652 - DNA, 25 bp, Homo sapien
ttgtcatgaactatatccgtaacct

SEQ ID NO: 5850653 - DNA, 25 bp, Homo sapien
caccgcaggtgtagagaaggcactt

SEQ ID NO: 5850654 - DNA, 25 bp, Homo sapien
tagtgaaacaggggcaatggtgcgc

SEQ ID NO: 5850655 - DNA, 25 bp, Homo sapien
tggtcgagcgatggatttccgtctc

SEQ ID NO: 5850656 - DNA, 25 bp, Homo sapien
atggatttccgtctctggtgtagct

SEQ ID NO: 5850657 - DNA, 25 bp, Homo sapien
gtctctggtgtagctgatgatccga

SEQ ID NO: 5850658 - DNA, 25 bp, Homo sapien
tgtagctgatgatccgaataactac

SEQ ID NO: 5850659 - DNA, 25 bp, Homo sapien
accagccagctatcaactcgcgccc

SEQ ID NO: 5850660 - DNA, 25 bp, Homo sapien
gcaactcatcgattgatttacggcg

SEQ ID NO: 5850661 - DNA, 25 bp, Homo sapien
gattgatttacggcgctaaggatga

SEQ ID NO: 5850662 - DNA, 25 bp, Homo sapien
taaggatgactctggtcagagatac

SEQ ID NO: 5850663 - DNA, 25 bp, Homo sapien
tggtcagagatacctggcctggtct

SEQ ID NO: 5850664 - DNA, 25 bp, Homo sapien
ctggtctggacacagtgcccgtgtc

SEQ ID NO: 5850665 - DNA, 25 bp, Homo sapien
gtgcccgtgtcggagccgcgcgaga

SEQ ID NO: 5850666 - DNA, 25 bp, Homo sapien
cgagatatggcccgcgctggagttt

SEQ ID NO: 5850667 - DNA, 25 bp, Homo sapien
ggagtttcaataccggagatcatgc

SEQ ID NO: 5850668 - DNA, 25 bp, Homo sapien
ggagatcatgcaagctggtggctgg

SEQ ID NO: 5850669 - DNA, 25 bp, Homo sapien
ctggtggctggaccaatgtaaatat

SEQ ID NO: 5850670 - DNA, 25 bp, Homo sapien
ccaatgtaaatattgtcatgaacta

SEQ ID NO: 5850671 - DNA, 25 bp, Homo sapien
cgctggttagcaccgcaggtgtaga

SEQ ID NO: 5850672 - DNA, 25 bp, Homo sapien
ttgtcatgaactatatccgtaacct

SEQ ID NO: 5850673 - DNA, 25 bp, Homo sapien
caccgcaggtgtagagaaggcactt

SEQ ID NO: 5850674 - DNA, 25 bp, Homo sapien
tagtgaaacaggggcaatggtgcgc

SEQ ID NO: 5850675 - DNA, 25 bp, Homo sapien
tggtcgagcgatggatttccgtctc

SEQ ID NO: 5850676 - DNA, 25 bp, Homo sapien
atggatttccgtctctggtgtagct

SEQ ID NO: 5850677 - DNA, 25 bp, Homo sapien
gtctctggtgtagctgatgatccga

SEQ ID NO: 5850678 - DNA, 25 bp, Homo sapien
tgtagctgatgatccgaataactac

SEQ ID NO: 5850679 - DNA, 25 bp, Homo sapien
accagccagctatcaactcgcgccc

SEQ ID NO: 5850680 - DNA, 25 bp, Homo sapien
gcaactcatcgattgatttacggcg

SEQ ID NO: 5850681 - DNA, 25 bp, Homo sapien
gattgatttacggcgctaaggatga

SEQ ID NO: 5850682 - DNA, 25 bp, Homo sapien
taaggatgactctggtcagagatac

SEQ ID NO: 5850683 - DNA, 25 bp, Homo sapien
tggtcagagatacctggcctggtct

SEQ ID NO: 5850684 - DNA, 25 bp, Homo sapien
ctggtctggacacagtgcccgtgtc

SEQ ID NO: 5850685 - DNA, 25 bp, Homo sapien
gtgcccgtgtcggagccgcgcgaga

SEQ ID NO: 5850686 - DNA, 25 bp, Homo sapien
cgagatatggcccgcgctggagttt

SEQ ID NO: 5850687 - DNA, 25 bp, Homo sapien
ggagtttcaataccggagatcatgc

SEQ ID NO: 5850688 - DNA, 25 bp, Homo sapien
ggagatcatgcaagctggtggctgg

SEQ ID NO: 5850689 - DNA, 25 bp, Homo sapien
ctggtggctggaccaatgtaaatat

SEQ ID NO: 5850690 - DNA, 25 bp, Homo sapien
ccaatgtaaatattgtcatgaacta

SEQ ID NO: 5850691 - DNA, 25 bp, Homo sapien
cgctggttagcaccgcaggtgtaga

SEQ ID NO: 5850692 - DNA, 25 bp, Homo sapien
ttgtcatgaactatatccgtaacct

SEQ ID NO: 5850693 - DNA, 25 bp, Homo sapien
caccgcaggtgtagagaaggcactt

SEQ ID NO: 5850694 - DNA, 25 bp, Homo sapien
tagtgaaacaggggcaatggtgcgc

SEQ ID NO: 5850695 - DNA, 25 bp, Homo sapien
tggtcgagcgatggatttccgtctc

SEQ ID NO: 5850696 - DNA, 25 bp, Homo sapien
atggatttccgtctctggtgtagct

SEQ ID NO: 5850697 - DNA, 25 bp, Homo sapien
gtctctggtgtagctgatgatccga

SEQ ID NO: 5850698 - DNA, 25 bp, Homo sapien
tgtagctgatgatccgaataactac

SEQ ID NO: 5850699 - DNA, 25 bp, Homo sapien
accagccagctatcaactcgcgccc

SEQ ID NO: 5850700 - DNA, 25 bp, Homo sapien
gcaactcatcgattgatttacggcg

SEQ ID NO: 5850701 - DNA, 25 bp, Homo sapien
gattgatttacggcgctaaggatga

SEQ ID NO: 5850702 - DNA, 25 bp, Homo sapien
taaggatgactctggtcagagatac

SEQ ID NO: 5850703 - DNA, 25 bp, Homo sapien
tggtcagagatacctggcctggtct

SEQ ID NO: 5850704 - DNA, 25 bp, Homo sapien
ctggtctggacacagtgcccgtgtc

SEQ ID NO: 5850705 - DNA, 25 bp, Homo sapien
gtgcccgtgtcggagccgcgcgaga

SEQ ID NO: 5850706 - DNA, 25 bp, Homo sapien
cgagatatggcccgcgctggagttt

SEQ ID NO: 5850707 - DNA, 25 bp, Homo sapien
ggagtttcaataccggagatcatgc

SEQ ID NO: 5850708 - DNA, 25 bp, Homo sapien
ggagatcatgcaagctggtggctgg

SEQ ID NO: 5850709 - DNA, 25 bp, Homo sapien
ctggtggctggaccaatgtaaatat

SEQ ID NO: 5850710 - DNA, 25 bp, Homo sapien
ccaatgtaaatattgtcatgaacta

SEQ ID NO: 5850711 - DNA, 25 bp, Homo sapien
cgctggttagcaccgcaggtgtaga

SEQ ID NO: 5850712 - DNA, 25 bp, Homo sapien
ttgtcatgaactatatccgtaacct

SEQ ID NO: 5850713 - DNA, 25 bp, Homo sapien
caccgcaggtgtagagaaggcactt

SEQ ID NO: 5850714 - DNA, 25 bp, Homo sapien
tagtgaaacaggggcaatggtgcgc

SEQ ID NO: 5850715 - DNA, 25 bp, Homo sapien
tggtcgagcgatggatttccgtctc

SEQ ID NO: 5850716 - DNA, 25 bp, Homo sapien
atggatttccgtctctggtgtagct

SEQ ID NO: 5850717 - DNA, 25 bp, Homo sapien
gtctctggtgtagctgatgatccga

SEQ ID NO: 5850718 - DNA, 25 bp, Homo sapien
tgtagctgatgatccgaataactac

SEQ ID NO: 5850719 - DNA, 25 bp, Homo sapien
accagccagctatcaactcgcgccc

SEQ ID NO: 5850720 - DNA, 25 bp, Homo sapien
gcaactcatcgattgatttacggcg

SEQ ID NO: 5850721 - DNA, 25 bp, Homo sapien
gattgatttacggcgctaaggatga

SEQ ID NO: 5850722 - DNA, 25 bp, Homo sapien
taaggatgactctggtcagagatac

SEQ ID NO: 5850723 - DNA, 25 bp, Homo sapien
tggtcagagatacctggcctggtct

SEQ ID NO: 5850724 - DNA, 25 bp, Homo sapien
ctggtctggacacagtgcccgtgtc

SEQ ID NO: 5850725 - DNA, 25 bp, Homo sapien
gtgcccgtgtcggagccgcgcgaga

SEQ ID NO: 5850726 - DNA, 25 bp, Homo sapien
cgagatatggcccgcgctggagttt

SEQ ID NO: 5850727 - DNA, 25 bp, Homo sapien
ggagtttcaataccggagatcatgc

SEQ ID NO: 5850728 - DNA, 25 bp, Homo sapien
ggagatcatgcaagctggtggctgg

SEQ ID NO: 5850729 - DNA, 25 bp, Homo sapien
ctggtggctggaccaatgtaaatat

SEQ ID NO: 5850730 - DNA, 25 bp, Homo sapien
ccaatgtaaatattgtcatgaacta

SEQ ID NO: 5850731 - DNA, 25 bp, Homo sapien
cgctggttagcaccgcaggtgtaga

SEQ ID NO: 5850732 - DNA, 25 bp, Homo sapien
ttgtcatgaactatatccgtaacct

SEQ ID NO: 5850733 - DNA, 25 bp, Homo sapien
caccgcaggtgtagagaaggcactt

SEQ ID NO: 5850734 - DNA, 25 bp, Homo sapien
tagtgaaacaggggcaatggtgcgc

SEQ ID NO: 5850735 - DNA, 25 bp, Homo sapien
tggtcgagcgatggatttccgtctc

SEQ ID NO: 5850736 - DNA, 25 bp, Homo sapien
atggatttccgtctctggtgtagct

SEQ ID NO: 5850737 - DNA, 25 bp, Homo sapien
gtctctggtgtagctgatgatccga

SEQ ID NO: 5850738 - DNA, 25 bp, Homo sapien
tgtagctgatgatccgaataactac

SEQ ID NO: 5850739 - DNA, 25 bp, Homo sapien
accagccagctatcaactcgcgccc

SEQ ID NO: 5850740 - DNA, 25 bp, Homo sapien
gcaactcatcgattgatttacggcg

SEQ ID NO: 5850741 - DNA, 25 bp, Homo sapien
gattgatttacggcgctaaggatga

SEQ ID NO: 5850742 - DNA, 25 bp, Homo sapien
taaggatgactctggtcagagatac

SEQ ID NO: 5850743 - DNA, 25 bp, Homo sapien
tggtcagagatacctggcctggtct

SEQ ID NO: 5850744 - DNA, 25 bp, Homo sapien
ctggtctggacacagtgcccgtgtc

SEQ ID NO: 5850745 - DNA, 25 bp, Homo sapien
gtgcccgtgtcggagccgcgcgaga

SEQ ID NO: 5850746 - DNA, 25 bp, Homo sapien
cgagatatggcccgcgctggagttt

SEQ ID NO: 5850747 - DNA, 25 bp, Homo sapien
ggagtttcaataccggagatcatgc

SEQ ID NO: 5850748 - DNA, 25 bp, Homo sapien
ggagatcatgcaagctggtggctgg

SEQ ID NO: 5850749 - DNA, 25 bp, Homo sapien
ctggtggctggaccaatgtaaatat

SEQ ID NO: 5850750 - DNA, 25 bp, Homo sapien
ccaatgtaaatattgtcatgaacta

SEQ ID NO: 5850751 - DNA, 25 bp, Homo sapien
cgctggttagcaccgcaggtgtaga

SEQ ID NO: 5850752 - DNA, 25 bp, Homo sapien
ttgtcatgaactatatccgtaacct

SEQ ID NO: 5850753 - DNA, 25 bp, Homo sapien
caccgcaggtgtagagaaggcactt

SEQ ID NO: 5850754 - DNA, 25 bp, Homo sapien
tagtgaaacaggggcaatggtgcgc

SEQ ID NO: 5850755 - DNA, 25 bp, Homo sapien
tggtcgagcgatggatttccgtctc

SEQ ID NO: 5850756 - DNA, 25 bp, Homo sapien
atggatttccgtctctggtgtagct

SEQ ID NO: 5850757 - DNA, 25 bp, Homo sapien
gtctctggtgtagctgatgatccga

SEQ ID NO: 5850758 - DNA, 25 bp, Homo sapien
tgtagctgatgatccgaataactac

SEQ ID NO: 5850759 - DNA, 25 bp, Homo sapien
accagccagctatcaactcgcgccc

SEQ ID NO: 5850760 - DNA, 25 bp, Homo sapien
gcaactcatcgattgatttacggcg

SEQ ID NO: 5850761 - DNA, 25 bp, Homo sapien
gattgatttacggcgctaaggatga

SEQ ID NO: 5850762 - DNA, 25 bp, Homo sapien
taaggatgactctggtcagagatac

SEQ ID NO: 5850763 - DNA, 25 bp, Homo sapien
tggtcagagatacctggcctggtct

SEQ ID NO: 5850764 - DNA, 25 bp, Homo sapien
ctggtctggacacagtgcccgtgtc

SEQ ID NO: 5850765 - DNA, 25 bp, Homo sapien
gtgcccgtgtcggagccgcgcgaga

SEQ ID NO: 5850766 - DNA, 25 bp, Homo sapien
cgagatatggcccgcgctggagttt

SEQ ID NO: 5850767 - DNA, 25 bp, Homo sapien
ggagtttcaataccggagatcatgc

SEQ ID NO: 5850768 - DNA, 25 bp, Homo sapien
ggagatcatgcaagctggtggctgg

SEQ ID NO: 5850769 - DNA, 25 bp, Homo sapien
ctggtggctggaccaatgtaaatat

SEQ ID NO: 5850770 - DNA, 25 bp, Homo sapien
ccaatgtaaatattgtcatgaacta

SEQ ID NO: 5850771 - DNA, 25 bp, Homo sapien
cgctggttagcaccgcaggtgtaga

SEQ ID NO: 5850772 - DNA, 25 bp, Homo sapien
ttgtcatgaactatatccgtaacct

SEQ ID NO: 5850773 - DNA, 25 bp, Homo sapien
caccgcaggtgtagagaaggcactt

SEQ ID NO: 5850774 - DNA, 25 bp, Homo sapien
tagtgaaacaggggcaatggtgcgc

SEQ ID NO: 5850775 - DNA, 25 bp, Homo sapien
tggtcgagcgatggatttccgtctc

SEQ ID NO: 5850776 - DNA, 25 bp, Homo sapien
atggatttccgtctctggtgtagct

SEQ ID NO: 5850777 - DNA, 25 bp, Homo sapien
gtctctggtgtagctgatgatccga

SEQ ID NO: 5850778 - DNA, 25 bp, Homo sapien
tgtagctgatgatccgaataactac

SEQ ID NO: 5850779 - DNA, 25 bp, Homo sapien
accagccagctatcaactcgcgccc

SEQ ID NO: 5850780 - DNA, 25 bp, Homo sapien
gcaactcatcgattgatttacggcg

SEQ ID NO: 5850781 - DNA, 25 bp, Homo sapien
gattgatttacggcgctaaggatga

SEQ ID NO: 5850782 - DNA, 25 bp, Homo sapien
taaggatgactctggtcagagatac

SEQ ID NO: 5850783 - DNA, 25 bp, Homo sapien
tggtcagagatacctggcctggtct

SEQ ID NO: 5850784 - DNA, 25 bp, Homo sapien
ctggtctggacacagtgcccgtgtc

SEQ ID NO: 5850785 - DNA, 25 bp, Homo sapien
gtgcccgtgtcggagccgcgcgaga

SEQ ID NO: 5850786 - DNA, 25 bp, Homo sapien
cgagatatggcccgcgctggagttt

SEQ ID NO: 5850787 - DNA, 25 bp, Homo sapien
ggagtttcaataccggagatcatgc

SEQ ID NO: 5850788 - DNA, 25 bp, Homo sapien
ggagatcatgcaagctggtggctgg

SEQ ID NO: 5850789 - DNA, 25 bp, Homo sapien
ctggtggctggaccaatgtaaatat

SEQ ID NO: 5850790 - DNA, 25 bp, Homo sapien
ccaatgtaaatattgtcatgaacta

SEQ ID NO: 5850791 - DNA, 25 bp, Homo sapien
cgctggttagcaccgcaggtgtaga

SEQ ID NO: 5850792 - DNA, 25 bp, Homo sapien
ttgtcatgaactatatccgtaacct

SEQ ID NO: 5850793 - DNA, 25 bp, Homo sapien
caccgcaggtgtagagaaggcactt

SEQ ID NO: 5850794 - DNA, 25 bp, Homo sapien
tagtgaaacaggggcaatggtgcgc

SEQ ID NO: 5850795 - DNA, 25 bp, Homo sapien
tggtcgagcgatggatttccgtctc

SEQ ID NO: 5850796 - DNA, 25 bp, Homo sapien
atggatttccgtctctggtgtagct

SEQ ID NO: 5850797 - DNA, 25 bp, Homo sapien
gtctctggtgtagctgatgatccga

SEQ ID NO: 5850798 - DNA, 25 bp, Homo sapien
tgtagctgatgatccgaataactac

SEQ ID NO: 5850799 - DNA, 25 bp, Homo sapien
accagccagctatcaactcgcgccc

SEQ ID NO: 5850800 - DNA, 25 bp, Homo sapien
gcaactcatcgattgatttacggcg

SEQ ID NO: 5850801 - DNA, 25 bp, Homo sapien
gattgatttacggcgctaaggatga

SEQ ID NO: 5850802 - DNA, 25 bp, Homo sapien
taaggatgactctggtcagagatac

SEQ ID NO: 5850803 - DNA, 25 bp, Homo sapien
tggtcagagatacctggcctggtct

SEQ ID NO: 5850804 - DNA, 25 bp, Homo sapien
ctggtctggacacagtgcccgtgtc

SEQ ID NO: 5850805 - DNA, 25 bp, Homo sapien
gtgcccgtgtcggagccgcgcgaga

SEQ ID NO: 5850806 - DNA, 25 bp, Homo sapien
cgagatatggcccgcgctggagttt

SEQ ID NO: 5850807 - DNA, 25 bp, Homo sapien
ggagtttcaataccggagatcatgc

SEQ ID NO: 5850808 - DNA, 25 bp, Homo sapien
ggagatcatgcaagctggtggctgg

SEQ ID NO: 5850809 - DNA, 25 bp, Homo sapien
ctggtggctggaccaatgtaaatat

SEQ ID NO: 5850810 - DNA, 25 bp, Homo sapien
ccaatgtaaatattgtcatgaacta

SEQ ID NO: 5850811 - DNA, 25 bp, Homo sapien
cgctggttagcaccgcaggtgtaga

SEQ ID NO: 5850812 - DNA, 25 bp, Homo sapien
ttgtcatgaactatatccgtaacct

SEQ ID NO: 5850813 - DNA, 25 bp, Homo sapien
caccgcaggtgtagagaaggcactt

SEQ ID NO: 5850814 - DNA, 25 bp, Homo sapien
tagtgaaacaggggcaatggtgcgc

SEQ ID NO: 5850815 - DNA, 25 bp, Homo sapien
tggtcgagcgatggatttccgtctc

SEQ ID NO: 5850816 - DNA, 25 bp, Homo sapien
atggatttccgtctctggtgtagct

SEQ ID NO: 5850817 - DNA, 25 bp, Homo sapien
gtctctggtgtagctgatgatccga

SEQ ID NO: 5850818 - DNA, 25 bp, Homo sapien
tgtagctgatgatccgaataactac

SEQ ID NO: 5850819 - DNA, 25 bp, Homo sapien
accagccagctatcaactcgcgccc

SEQ ID NO: 5850820 - DNA, 25 bp, Homo sapien
gcaactcatcgattgatttacggcg

SEQ ID NO: 5850821 - DNA, 25 bp, Homo sapien
gattgatttacggcgctaaggatga

SEQ ID NO: 5850822 - DNA, 25 bp, Homo sapien
taaggatgactctggtcagagatac

SEQ ID NO: 5850823 - DNA, 25 bp, Homo sapien
tggtcagagatacctggcctggtct

SEQ ID NO: 5850824 - DNA, 25 bp, Homo sapien
ctggtctggacacagtgcccgtgtc

SEQ ID NO: 5850825 - DNA, 25 bp, Homo sapien
gtgcccgtgtcggagccgcgcgaga

SEQ ID NO: 5850826 - DNA, 25 bp, Homo sapien
cgagatatggcccgcgctggagttt

SEQ ID NO: 5850827 - DNA, 25 bp, Homo sapien
ggagtttcaataccggagatcatgc

SEQ ID NO: 5850828 - DNA, 25 bp, Homo sapien
ggagatcatgcaagctggtggctgg

SEQ ID NO: 5850829 - DNA, 25 bp, Homo sapien
ctggtggctggaccaatgtaaatat

SEQ ID NO: 5850830 - DNA, 25 bp, Homo sapien
ccaatgtaaatattgtcatgaacta

SEQ ID NO: 5850831 - DNA, 25 bp, Homo sapien
cgctggttagcaccgcaggtgtaga

SEQ ID NO: 5850832 - DNA, 25 bp, Homo sapien
ttgtcatgaactatatccgtaacct

SEQ ID NO: 5850833 - DNA, 25 bp, Homo sapien
caccgcaggtgtagagaaggcactt

SEQ ID NO: 5850834 - DNA, 25 bp, Homo sapien
tagtgaaacaggggcaatggtgcgc

SEQ ID NO: 5850835 - DNA, 25 bp, Homo sapien
tggtcgagcgatggatttccgtctc

SEQ ID NO: 5850836 - DNA, 25 bp, Homo sapien
atggatttccgtctctggtgtagct

SEQ ID NO: 5850837 - DNA, 25 bp, Homo sapien
gtctctggtgtagctgatgatccga

SEQ ID NO: 5850838 - DNA, 25 bp, Homo sapien
tgtagctgatgatccgaataactac

SEQ ID NO: 5850839 - DNA, 25 bp, Homo sapien
accagccagctatcaactcgcgccc

SEQ ID NO: 5850840 - DNA, 25 bp, Homo sapien
gcaactcatcgattgatttacggcg

SEQ ID NO: 5850841 - DNA, 25 bp, Homo sapien
gattgatttacggcgctaaggatga

SEQ ID NO: 5850842 - DNA, 25 bp, Homo sapien
taaggatgactctggtcagagatac

SEQ ID NO: 5850843 - DNA, 25 bp, Homo sapien
tggtcagagatacctggcctggtct

SEQ ID NO: 5850844 - DNA, 25 bp, Homo sapien
ctggtctggacacagtgcccgtgtc

SEQ ID NO: 5850845 - DNA, 25 bp, Homo sapien
gtgcccgtgtcggagccgcgcgaga

SEQ ID NO: 5850846 - DNA, 25 bp, Homo sapien
cgagatatggcccgcgctggagttt

SEQ ID NO: 5850847 - DNA, 25 bp, Homo sapien
ggagtttcaataccggagatcatgc

SEQ ID NO: 5850848 - DNA, 25 bp, Homo sapien
ggagatcatgcaagctggtggctgg

SEQ ID NO: 5850849 - DNA, 25 bp, Homo sapien
ctggtggctggaccaatgtaaatat

SEQ ID NO: 5850850 - DNA, 25 bp, Homo sapien
ccaatgtaaatattgtcatgaacta

SEQ ID NO: 5850851 - DNA, 25 bp, Homo sapien
cgctggttagcaccgcaggtgtaga

SEQ ID NO: 5850852 - DNA, 25 bp, Homo sapien
ttgtcatgaactatatccgtaacct

SEQ ID NO: 5850853 - DNA, 25 bp, Homo sapien
caccgcaggtgtagagaaggcactt

SEQ ID NO: 5850854 - DNA, 25 bp, Homo sapien
tagtgaaacaggggcaatggtgcgc

SEQ ID NO: 5850855 - DNA, 25 bp, Homo sapien
tggtcgagcgatggatttccgtctc

SEQ ID NO: 5850856 - DNA, 25 bp, Homo sapien
atggatttccgtctctggtgtagct

SEQ ID NO: 5850857 - DNA, 25 bp, Homo sapien
gtctctggtgtagctgatgatccga

SEQ ID NO: 5850858 - DNA, 25 bp, Homo sapien
tgtagctgatgatccgaataactac

SEQ ID NO: 5850859 - DNA, 25 bp, Homo sapien
accagccagctatcaactcgcgccc

SEQ ID NO: 5850860 - DNA, 25 bp, Homo sapien
gcaactcatcgattgatttacggcg

SEQ ID NO: 5850861 - DNA, 25 bp, Homo sapien
gattgatttacggcgctaaggatga

SEQ ID NO: 5850862 - DNA, 25 bp, Homo sapien
taaggatgactctggtcagagatac

SEQ ID NO: 5850863 - DNA, 25 bp, Homo sapien
tggtcagagatacctggcctggtct

SEQ ID NO: 5850864 - DNA, 25 bp, Homo sapien
ctggtctggacacagtgcccgtgtc

SEQ ID NO: 5850865 - DNA, 25 bp, Homo sapien
gtgcccgtgtcggagccgcgcgaga

SEQ ID NO: 5850866 - DNA, 25 bp, Homo sapien
cgagatatggcccgcgctggagttt

SEQ ID NO: 5850867 - DNA, 25 bp, Homo sapien
ggagtttcaataccggagatcatgc

SEQ ID NO: 5850868 - DNA, 25 bp, Homo sapien
ggagatcatgcaagctggtggctgg

SEQ ID NO: 5850869 - DNA, 25 bp, Homo sapien
ctggtggctggaccaatgtaaatat

SEQ ID NO: 5850870 - DNA, 25 bp, Homo sapien
ccaatgtaaatattgtcatgaacta

SEQ ID NO: 5850871 - DNA, 25 bp, Homo sapien
cgctggttagcaccgcaggtgtaga

SEQ ID NO: 5850872 - DNA, 25 bp, Homo sapien
ttgtcatgaactatatccgtaacct

SEQ ID NO: 5850873 - DNA, 25 bp, Homo sapien
caccgcaggtgtagagaaggcactt

SEQ ID NO: 5850874 - DNA, 25 bp, Homo sapien
tagtgaaacaggggcaatggtgcgc

SEQ ID NO: 5850875 - DNA, 25 bp, Homo sapien
tggtcgagcgatggatttccgtctc

SEQ ID NO: 5850876 - DNA, 25 bp, Homo sapien
atggatttccgtctctggtgtagct

SEQ ID NO: 5850877 - DNA, 25 bp, Homo sapien
gtctctggtgtagctgatgatccga

SEQ ID NO: 5850878 - DNA, 25 bp, Homo sapien
tgtagctgatgatccgaataactac

SEQ ID NO: 5850879 - DNA, 25 bp, Homo sapien
accagccagctatcaactcgcgccc

SEQ ID NO: 5850880 - DNA, 25 bp, Homo sapien
gcaactcatcgattgatttacggcg

SEQ ID NO: 5850881 - DNA, 25 bp, Homo sapien
gattgatttacggcgctaaggatga

SEQ ID NO: 5850882 - DNA, 25 bp, Homo sapien
taaggatgactctggtcagagatac

SEQ ID NO: 5850883 - DNA, 25 bp, Homo sapien
tggtcagagatacctggcctggtct

SEQ ID NO: 5850884 - DNA, 25 bp, Homo sapien
ctggtctggacacagtgcccgtgtc

SEQ ID NO: 5850885 - DNA, 25 bp, Homo sapien
gtgcccgtgtcggagccgcgcgaga

SEQ ID NO: 5850886 - DNA, 25 bp, Homo sapien
cgagatatggcccgcgctggagttt

SEQ ID NO: 5850887 - DNA, 25 bp, Homo sapien
ggagtttcaataccggagatcatgc

SEQ ID NO: 5850888 - DNA, 25 bp, Homo sapien
ggagatcatgcaagctggtggctgg

SEQ ID NO: 5850889 - DNA, 25 bp, Homo sapien
ctggtggctggaccaatgtaaatat

SEQ ID NO: 5850890 - DNA, 25 bp, Homo sapien
ccaatgtaaatattgtcatgaacta

SEQ ID NO: 5850891 - DNA, 25 bp, Homo sapien
cgctggttagcaccgcaggtgtaga

SEQ ID NO: 5850892 - DNA, 25 bp, Homo sapien
ttgtcatgaactatatccgtaacct

SEQ ID NO: 5850893 - DNA, 25 bp, Homo sapien
caccgcaggtgtagagaaggcactt

SEQ ID NO: 5850894 - DNA, 25 bp, Homo sapien
tagtgaaacaggggcaatggtgcgc

SEQ ID NO: 5850895 - DNA, 25 bp, Homo sapien
tggtcgagcgatggatttccgtctc

SEQ ID NO: 5850896 - DNA, 25 bp, Homo sapien
atggatttccgtctctggtgtagct

SEQ ID NO: 5850897 - DNA, 25 bp, Homo sapien
gtctctggtgtagctgatgatccga

SEQ ID NO: 5850898 - DNA, 25 bp, Homo sapien
tgtagctgatgatccgaataactac

SEQ ID NO: 5850899 - DNA, 25 bp, Homo sapien
accagccagctatcaactcgcgccc

SEQ ID NO: 5850900 - DNA, 25 bp, Homo sapien
gcaactcatcgattgatttacggcg

SEQ ID NO: 5850901 - DNA, 25 bp, Homo sapien
gattgatttacggcgctaaggatga

SEQ ID NO: 5850902 - DNA, 25 bp, Homo sapien
taaggatgactctggtcagagatac

SEQ ID NO: 5850903 - DNA, 25 bp, Homo sapien
tggtcagagatacctggcctggtct

SEQ ID NO: 5850904 - DNA, 25 bp, Homo sapien
ctggtctggacacagtgcccgtgtc

SEQ ID NO: 5850905 - DNA, 25 bp, Homo sapien
gtgcccgtgtcggagccgcgcgaga

SEQ ID NO: 5850906 - DNA, 25 bp, Homo sapien
cgagatatggcccgcgctggagttt

SEQ ID NO: 5850907 - DNA, 25 bp, Homo sapien
ggagtttcaataccggagatcatgc

SEQ ID NO: 5850908 - DNA, 25 bp, Homo sapien
ggagatcatgcaagctggtggctgg

SEQ ID NO: 5850909 - DNA, 25 bp, Homo sapien
ctggtggctggaccaatgtaaatat

SEQ ID NO: 5850910 - DNA, 25 bp, Homo sapien
ccaatgtaaatattgtcatgaacta

SEQ ID NO: 5850911 - DNA, 25 bp, Homo sapien
cgctggttagcaccgcaggtgtaga

SEQ ID NO: 5850912 - DNA, 25 bp, Homo sapien
ttgtcatgaactatatccgtaacct

SEQ ID NO: 5850913 - DNA, 25 bp, Homo sapien
caccgcaggtgtagagaaggcactt

SEQ ID NO: 5850914 - DNA, 25 bp, Homo sapien
tagtgaaacaggggcaatggtgcgc

SEQ ID NO: 5850915 - DNA, 25 bp, Homo sapien
tggtcgagcgatggatttccgtctc

SEQ ID NO: 5850916 - DNA, 25 bp, Homo sapien
atggatttccgtctctggtgtagct

SEQ ID NO: 5850917 - DNA, 25 bp, Homo sapien
gtctctggtgtagctgatgatccga

SEQ ID NO: 5850918 - DNA, 25 bp, Homo sapien
tgtagctgatgatccgaataactac

SEQ ID NO: 5850919 - DNA, 25 bp, Homo sapien
accagccagctatcaactcgcgccc

SEQ ID NO: 5850920 - DNA, 25 bp, Homo sapien
gcaactcatcgattgatttacggcg

SEQ ID NO: 5850921 - DNA, 25 bp, Homo sapien
gattgatttacggcgctaaggatga

SEQ ID NO: 5850922 - DNA, 25 bp, Homo sapien
taaggatgactctggtcagagatac

SEQ ID NO: 5850923 - DNA, 25 bp, Homo sapien
tggtcagagatacctggcctggtct

SEQ ID NO: 5850924 - DNA, 25 bp, Homo sapien
ctggtctggacacagtgcccgtgtc

SEQ ID NO: 5850925 - DNA, 25 bp, Homo sapien
gtgcccgtgtcggagccgcgcgaga

SEQ ID NO: 5850926 - DNA, 25 bp, Homo sapien
cgagatatggcccgcgctggagttt

SEQ ID NO: 5850927 - DNA, 25 bp, Homo sapien
ggagtttcaataccggagatcatgc

SEQ ID NO: 5850928 - DNA, 25 bp, Homo sapien
ggagatcatgcaagctggtggctgg

SEQ ID NO: 5850929 - DNA, 25 bp, Homo sapien
ctggtggctggaccaatgtaaatat

SEQ ID NO: 5850930 - DNA, 25 bp, Homo sapien
ccaatgtaaatattgtcatgaacta

SEQ ID NO: 5850931 - DNA, 25 bp, Homo sapien
cgctggttagcaccgcaggtgtaga

SEQ ID NO: 5850932 - DNA, 25 bp, Homo sapien
ttgtcatgaactatatccgtaacct

SEQ ID NO: 5850933 - DNA, 25 bp, Homo sapien
caccgcaggtgtagagaaggcactt

SEQ ID NO: 5850934 - DNA, 25 bp, Homo sapien
tagtgaaacaggggcaatggtgcgc

SEQ ID NO: 5850935 - DNA, 25 bp, Homo sapien
tggtcgagcgatggatttccgtctc

SEQ ID NO: 5850936 - DNA, 25 bp, Homo sapien
atggatttccgtctctggtgtagct

SEQ ID NO: 5850937 - DNA, 25 bp, Homo sapien
gtctctggtgtagctgatgatccga

SEQ ID NO: 5850938 - DNA, 25 bp, Homo sapien
tgtagctgatgatccgaataactac

SEQ ID NO: 5850939 - DNA, 25 bp, Homo sapien
accagccagctatcaactcgcgccc

SEQ ID NO: 5850940 - DNA, 25 bp, Homo sapien
gcaactcatcgattgatttacggcg

SEQ ID NO: 5850941 - DNA, 25 bp, Homo sapien
gattgatttacggcgctaaggatga

SEQ ID NO: 5850942 - DNA, 25 bp, Homo sapien
taaggatgactctggtcagagatac

SEQ ID NO: 5850943 - DNA, 25 bp, Homo sapien
tggtcagagatacctggcctggtct

SEQ ID NO: 5850944 - DNA, 25 bp, Homo sapien
ctggtctggacacagtgcccgtgtc

SEQ ID NO: 5850945 - DNA, 25 bp, Homo sapien
gtgcccgtgtcggagccgcgcgaga

SEQ ID NO: 5850946 - DNA, 25 bp, Homo sapien
cgagatatggcccgcgctggagttt

SEQ ID NO: 5850947 - DNA, 25 bp, Homo sapien
ggagtttcaataccggagatcatgc

SEQ ID NO: 5850948 - DNA, 25 bp, Homo sapien
ggagatcatgcaagctggtggctgg

SEQ ID NO: 5850949 - DNA, 25 bp, Homo sapien
ctggtggctggaccaatgtaaatat

SEQ ID NO: 5850950 - DNA, 25 bp, Homo sapien
ccaatgtaaatattgtcatgaacta

SEQ ID NO: 5850951 - DNA, 25 bp, Homo sapien
cgctggttagcaccgcaggtgtaga

SEQ ID NO: 5850952 - DNA, 25 bp, Homo sapien
ttgtcatgaactatatccgtaacct

SEQ ID NO: 5850953 - DNA, 25 bp, Homo sapien
caccgcaggtgtagagaaggcactt

SEQ ID NO: 5850954 - DNA, 25 bp, Homo sapien
tagtgaaacaggggcaatggtgcgc

SEQ ID NO: 5850955 - DNA, 25 bp, Homo sapien
tggtcgagcgatggatttccgtctc

SEQ ID NO: 5850956 - DNA, 25 bp, Homo sapien
atggatttccgtctctggtgtagct

SEQ ID NO: 5850957 - DNA, 25 bp, Homo sapien
gtctctggtgtagctgatgatccga

SEQ ID NO: 5850958 - DNA, 25 bp, Homo sapien
tgtagctgatgatccgaataactac

SEQ ID NO: 5850959 - DNA, 25 bp, Homo sapien
accagccagctatcaactcgcgccc

SEQ ID NO: 5850960 - DNA, 25 bp, Homo sapien
gcaactcatcgattgatttacggcg

SEQ ID NO: 5850961 - DNA, 25 bp, Homo sapien
gattgatttacggcgctaaggatga

SEQ ID NO: 5850962 - DNA, 25 bp, Homo sapien
taaggatgactctggtcagagatac

SEQ ID NO: 5850963 - DNA, 25 bp, Homo sapien
tggtcagagatacctggcctggtct

SEQ ID NO: 5850964 - DNA, 25 bp, Homo sapien
ctggtctggacacagtgcccgtgtc

SEQ ID NO: 5850965 - DNA, 25 bp, Homo sapien
gtgcccgtgtcggagccgcgcgaga

SEQ ID NO: 5850966 - DNA, 25 bp, Homo sapien
cgagatatggcccgcgctggagttt

SEQ ID NO: 5850967 - DNA, 25 bp, Homo sapien
ggagtttcaataccggagatcatgc

SEQ ID NO: 5850968 - DNA, 25 bp, Homo sapien
ggagatcatgcaagctggtggctgg

SEQ ID NO: 5850969 - DNA, 25 bp, Homo sapien
ctggtggctggaccaatgtaaatat

SEQ ID NO: 5850970 - DNA, 25 bp, Homo sapien
ccaatgtaaatattgtcatgaacta

SEQ ID NO: 5850971 - DNA, 25 bp, Homo sapien
cgctggttagcaccgcaggtgtaga

SEQ ID NO: 5850972 - DNA, 25 bp, Homo sapien
ttgtcatgaactatatccgtaacct

SEQ ID NO: 5850973 - DNA, 25 bp, Homo sapien
caccgcaggtgtagagaaggcactt

SEQ ID NO: 5850974 - DNA, 25 bp, Homo sapien
tagtgaaacaggggcaatggtgcgc

SEQ ID NO: 5850975 - DNA, 25 bp, Homo sapien
tggtcgagcgatggatttccgtctc

SEQ ID NO: 5850976 - DNA, 25 bp, Homo sapien
atggatttccgtctctggtgtagct

SEQ ID NO: 5850977 - DNA, 25 bp, Homo sapien
gtctctggtgtagctgatgatccga

SEQ ID NO: 5850978 - DNA, 25 bp, Homo sapien
tgtagctgatgatccgaataactac

SEQ ID NO: 5850979 - DNA, 25 bp, Homo sapien
accagccagctatcaactcgcgccc

SEQ ID NO: 5850980 - DNA, 25 bp, Homo sapien
gcaactcatcgattgatttacggcg

SEQ ID NO: 5850981 - DNA, 25 bp, Homo sapien
gattgatttacggcgctaaggatga

SEQ ID NO: 5850982 - DNA, 25 bp, Homo sapien
taaggatgactctggtcagagatac

SEQ ID NO: 5850983 - DNA, 25 bp, Homo sapien
tggtcagagatacctggcctggtct

SEQ ID NO: 5850984 - DNA, 25 bp, Homo sapien
ctggtctggacacagtgcccgtgtc

SEQ ID NO: 5850985 - DNA, 25 bp, Homo sapien
gtgcccgtgtcggagccgcgcgaga

SEQ ID NO: 5850986 - DNA, 25 bp, Homo sapien
cgagatatggcccgcgctggagttt

SEQ ID NO: 5850987 - DNA, 25 bp, Homo sapien
ggagtttcaataccggagatcatgc

SEQ ID NO: 5850988 - DNA, 25 bp, Homo sapien
ggagatcatgcaagctggtggctgg

SEQ ID NO: 5850989 - DNA, 25 bp, Homo sapien
ctggtggctggaccaatgtaaatat

SEQ ID NO: 5850990 - DNA, 25 bp, Homo sapien
ccaatgtaaatattgtcatgaacta

SEQ ID NO: 5850991 - DNA, 25 bp, Homo sapien
cgctggttagcaccgcaggtgtaga

SEQ ID NO: 5850992 - DNA, 25 bp, Homo sapien
ttgtcatgaactatatccgtaacct

SEQ ID NO: 5850993 - DNA, 25 bp, Homo sapien
caccgcaggtgtagagaaggcactt

SEQ ID NO: 5850994 - DNA, 25 bp, Homo sapien
tagtgaaacaggggcaatggtgcgc

SEQ ID NO: 5850995 - DNA, 25 bp, Homo sapien
tggtcgagcgatggatttccgtctc

SEQ ID NO: 5850996 - DNA, 25 bp, Homo sapien
atggatttccgtctctggtgtagct

SEQ ID NO: 5850997 - DNA, 25 bp, Homo sapien
gtctctggtgtagctgatgatccga

SEQ ID NO: 5850998 - DNA, 25 bp, Homo sapien
tgtagctgatgatccgaataactac

SEQ ID NO: 5850999 - DNA, 25 bp, Homo sapien
accagccagctatcaactcgcgccc

SEQ ID NO: 5851000 - DNA, 25 bp, Homo sapien
gcaactcatcgattgatttacggcg

SEQ ID NO: 5851001 - DNA, 25 bp, Homo sapien
gattgatttacggcgctaaggatga

SEQ ID NO: 5851002 - DNA, 25 bp, Homo sapien
taaggatgactctggtcagagatac

SEQ ID NO: 5851003 - DNA, 25 bp, Homo sapien
tggtcagagatacctggcctggtct

SEQ ID NO: 5851004 - DNA, 25 bp, Homo sapien
ctggtctggacacagtgcccgtgtc

SEQ ID NO: 5851005 - DNA, 25 bp, Homo sapien
gtgcccgtgtcggagccgcgcgaga

SEQ ID NO: 5851006 - DNA, 25 bp, Homo sapien
cgagatatggcccgcgctggagttt

SEQ ID NO: 5851007 - DNA, 25 bp, Homo sapien
ggagtttcaataccggagatcatgc

SEQ ID NO: 5851008 - DNA, 25 bp, Homo sapien
ggagatcatgcaagctggtggctgg

SEQ ID NO: 5851009 - DNA, 25 bp, Homo sapien
ctggtggctggaccaatgtaaatat

SEQ ID NO: 5851010 - DNA, 25 bp, Homo sapien
ccaatgtaaatattgtcatgaacta

SEQ ID NO: 5851011 - DNA, 25 bp, Homo sapien
cgctggttagcaccgcaggtgtaga

SEQ ID NO: 5851012 - DNA, 25 bp, Homo sapien
ttgtcatgaactatatccgtaacct

SEQ ID NO: 5851013 - DNA, 25 bp, Homo sapien
caccgcaggtgtagagaaggcactt

SEQ ID NO: 5851014 - DNA, 25 bp, Homo sapien
tagtgaaacaggggcaatggtgcgc

SEQ ID NO: 5851015 - DNA, 25 bp, Homo sapien
tggtcgagcgatggatttccgtctc

SEQ ID NO: 5851016 - DNA, 25 bp, Homo sapien
atggatttccgtctctggtgtagct

SEQ ID NO: 5851017 - DNA, 25 bp, Homo sapien
gtctctggtgtagctgatgatccga

SEQ ID NO: 5851018 - DNA, 25 bp, Homo sapien
tgtagctgatgatccgaataactac

SEQ ID NO: 5851019 - DNA, 25 bp, Homo sapien
accagccagctatcaactcgcgccc

SEQ ID NO: 5851020 - DNA, 25 bp, Homo sapien
gcaactcatcgattgatttacggcg

SEQ ID NO: 5851021 - DNA, 25 bp, Homo sapien
gattgatttacggcgctaaggatga

SEQ ID NO: 5851022 - DNA, 25 bp, Homo sapien
taaggatgactctggtcagagatac

SEQ ID NO: 5851023 - DNA, 25 bp, Homo sapien
tggtcagagatacctggcctggtct

SEQ ID NO: 5851024 - DNA, 25 bp, Homo sapien
ctggtctggacacagtgcccgtgtc

SEQ ID NO: 5851025 - DNA, 25 bp, Homo sapien
gtgcccgtgtcggagccgcgcgaga

SEQ ID NO: 5851026 - DNA, 25 bp, Homo sapien
cgagatatggcccgcgctggagttt

SEQ ID NO: 5851027 - DNA, 25 bp, Homo sapien
ggagtttcaataccggagatcatgc

SEQ ID NO: 5851028 - DNA, 25 bp, Homo sapien
ggagatcatgcaagctggtggctgg

SEQ ID NO: 5851029 - DNA, 25 bp, Homo sapien
ctggtggctggaccaatgtaaatat

SEQ ID NO: 5851030 - DNA, 25 bp, Homo sapien
ccaatgtaaatattgtcatgaacta

SEQ ID NO: 5851031 - DNA, 25 bp, Homo sapien
cgctggttagcaccgcaggtgtaga

SEQ ID NO: 5851032 - DNA, 25 bp, Homo sapien
ttgtcatgaactatatccgtaacct

SEQ ID NO: 5851033 - DNA, 25 bp, Homo sapien
caccgcaggtgtagagaaggcactt

SEQ ID NO: 5851034 - DNA, 25 bp, Homo sapien
tagtgaaacaggggcaatggtgcgc

SEQ ID NO: 5851035 - DNA, 25 bp, Homo sapien
tggtcgagcgatggatttccgtctc

SEQ ID NO: 5851036 - DNA, 25 bp, Homo sapien
atggatttccgtctctggtgtagct

SEQ ID NO: 5851037 - DNA, 25 bp, Homo sapien
gtctctggtgtagctgatgatccga

SEQ ID NO: 5851038 - DNA, 25 bp, Homo sapien
tgtagctgatgatccgaataactac

SEQ ID NO: 5851039 - DNA, 25 bp, Homo sapien
accagccagctatcaactcgcgccc

SEQ ID NO: 5851040 - DNA, 25 bp, Homo sapien
gcaactcatcgattgatttacggcg

SEQ ID NO: 5851041 - DNA, 25 bp, Homo sapien
gattgatttacggcgctaaggatga

SEQ ID NO: 5851042 - DNA, 25 bp, Homo sapien
taaggatgactctggtcagagatac

SEQ ID NO: 5851043 - DNA, 25 bp, Homo sapien
tggtcagagatacctggcctggtct

SEQ ID NO: 5851044 - DNA, 25 bp, Homo sapien
ctggtctggacacagtgcccgtgtc

SEQ ID NO: 5851045 - DNA, 25 bp, Homo sapien
gtgcccgtgtcggagccgcgcgaga

SEQ ID NO: 5851046 - DNA, 25 bp, Homo sapien
cgagatatggcccgcgctggagttt

SEQ ID NO: 5851047 - DNA, 25 bp, Homo sapien
ggagtttcaataccggagatcatgc

SEQ ID NO: 5851048 - DNA, 25 bp, Homo sapien
ggagatcatgcaagctggtggctgg

SEQ ID NO: 5851049 - DNA, 25 bp, Homo sapien
ctggtggctggaccaatgtaaatat

SEQ ID NO: 5851050 - DNA, 25 bp, Homo sapien
ccaatgtaaatattgtcatgaacta

SEQ ID NO: 5851051 - DNA, 25 bp, Homo sapien
cgctggttagcaccgcaggtgtaga

SEQ ID NO: 5851052 - DNA, 25 bp, Homo sapien
ttgtcatgaactatatccgtaacct

SEQ ID NO: 5851053 - DNA, 25 bp, Homo sapien
caccgcaggtgtagagaaggcactt

SEQ ID NO: 5851054 - DNA, 25 bp, Homo sapien
tagtgaaacaggggcaatggtgcgc

SEQ ID NO: 5851055 - DNA, 25 bp, Homo sapien
tggtcgagcgatggatttccgtctc

SEQ ID NO: 5851056 - DNA, 25 bp, Homo sapien
atggatttccgtctctggtgtagct

SEQ ID NO: 5851057 - DNA, 25 bp, Homo sapien
gtctctggtgtagctgatgatccga

SEQ ID NO: 5851058 - DNA, 25 bp, Homo sapien
tgtagctgatgatccgaataactac

SEQ ID NO: 5851059 - DNA, 25 bp, Homo sapien
accagccagctatcaactcgcgccc

SEQ ID NO: 5851060 - DNA, 25 bp, Homo sapien
gcaactcatcgattgatttacggcg

SEQ ID NO: 5851061 - DNA, 25 bp, Homo sapien
gattgatttacggcgctaaggatga

SEQ ID NO: 5851062 - DNA, 25 bp, Homo sapien
taaggatgactctggtcagagatac

SEQ ID NO: 5851063 - DNA, 25 bp, Homo sapien
tggtcagagatacctggcctggtct

SEQ ID NO: 5851064 - DNA, 25 bp, Homo sapien
ctggtctggacacagtgcccgtgtc

SEQ ID NO: 5851065 - DNA, 25 bp, Homo sapien
gtgcccgtgtcggagccgcgcgaga

SEQ ID NO: 5851066 - DNA, 25 bp, Homo sapien
cgagatatggcccgcgctggagttt

SEQ ID NO: 5851067 - DNA, 25 bp, Homo sapien
ggagtttcaataccggagatcatgc

SEQ ID NO: 5851068 - DNA, 25 bp, Homo sapien
ggagatcatgcaagctggtggctgg

SEQ ID NO: 5851069 - DNA, 25 bp, Homo sapien
ctggtggctggaccaatgtaaatat

SEQ ID NO: 5851070 - DNA, 25 bp, Homo sapien
ccaatgtaaatattgtcatgaacta

SEQ ID NO: 5851071 - DNA, 25 bp, Homo sapien
cgctggttagcaccgcaggtgtaga

SEQ ID NO: 5851072 - DNA, 25 bp, Homo sapien
ttgtcatgaactatatccgtaacct

SEQ ID NO: 5851073 - DNA, 25 bp, Homo sapien
caccgcaggtgtagagaaggcactt

SEQ ID NO: 5851074 - DNA, 25 bp, Homo sapien
tagtgaaacaggggcaatggtgcgc

SEQ ID NO: 5851075 - DNA, 25 bp, Homo sapien
tggtcgagcgatggatttccgtctc

SEQ ID NO: 5851076 - DNA, 25 bp, Homo sapien
atggatttccgtctctggtgtagct

SEQ ID NO: 5851077 - DNA, 25 bp, Homo sapien
gtctctggtgtagctgatgatccga

SEQ ID NO: 5851078 - DNA, 25 bp, Homo sapien
tgtagctgatgatccgaataactac

SEQ ID NO: 5851079 - DNA, 25 bp, Homo sapien
accagccagctatcaactcgcgccc

SEQ ID NO: 5851080 - DNA, 25 bp, Homo sapien
gcaactcatcgattgatttacggcg

SEQ ID NO: 5851081 - DNA, 25 bp, Homo sapien
gattgatttacggcgctaaggatga

SEQ ID NO: 5851082 - DNA, 25 bp, Homo sapien
taaggatgactctggtcagagatac

SEQ ID NO: 5851083 - DNA, 25 bp, Homo sapien
tggtcagagatacctggcctggtct

SEQ ID NO: 5851084 - DNA, 25 bp, Homo sapien
ctggtctggacacagtgcccgtgtc

SEQ ID NO: 5851085 - DNA, 25 bp, Homo sapien
gtgcccgtgtcggagccgcgcgaga

SEQ ID NO: 5851086 - DNA, 25 bp, Homo sapien
cgagatatggcccgcgctggagttt

SEQ ID NO: 5851087 - DNA, 25 bp, Homo sapien
ggagtttcaataccggagatcatgc

SEQ ID NO: 5851088 - DNA, 25 bp, Homo sapien
ggagatcatgcaagctggtggctgg

SEQ ID NO: 5851089 - DNA, 25 bp, Homo sapien
ctggtggctggaccaatgtaaatat

SEQ ID NO: 5851090 - DNA, 25 bp, Homo sapien
ccaatgtaaatattgtcatgaacta

SEQ ID NO: 5851091 - DNA, 25 bp, Homo sapien
cgctggttagcaccgcaggtgtaga

SEQ ID NO: 5851092 - DNA, 25 bp, Homo sapien
ttgtcatgaactatatccgtaacct

SEQ ID NO: 5851093 - DNA, 25 bp, Homo sapien
caccgcaggtgtagagaaggcactt

SEQ ID NO: 5851094 - DNA, 25 bp, Homo sapien
tagtgaaacaggggcaatggtgcgc

SEQ ID NO: 5851095 - DNA, 25 bp, Homo sapien
tggtcgagcgatggatttccgtctc

SEQ ID NO: 5851096 - DNA, 25 bp, Homo sapien
atggatttccgtctctggtgtagct

SEQ ID NO: 5851097 - DNA, 25 bp, Homo sapien
gtctctggtgtagctgatgatccga

SEQ ID NO: 5851098 - DNA, 25 bp, Homo sapien
tgtagctgatgatccgaataactac

SEQ ID NO: 5851099 - DNA, 25 bp, Homo sapien
accagccagctatcaactcgcgccc

SEQ ID NO: 5851100 - DNA, 25 bp, Homo sapien
gcaactcatcgattgatttacggcg

SEQ ID NO: 5851101 - DNA, 25 bp, Homo sapien
gattgatttacggcgctaaggatga

SEQ ID NO: 5851102 - DNA, 25 bp, Homo sapien
taaggatgactctggtcagagatac

SEQ ID NO: 5851103 - DNA, 25 bp, Homo sapien
tggtcagagatacctggcctggtct

SEQ ID NO: 5851104 - DNA, 25 bp, Homo sapien
ctggtctggacacagtgcccgtgtc

SEQ ID NO: 5851105 - DNA, 25 bp, Homo sapien
gtgcccgtgtcggagccgcgcgaga

SEQ ID NO: 5851106 - DNA, 25 bp, Homo sapien
cgagatatggcccgcgctggagttt

SEQ ID NO: 5851107 - DNA, 25 bp, Homo sapien
ggagtttcaataccggagatcatgc

SEQ ID NO: 5851108 - DNA, 25 bp, Homo sapien
ggagatcatgcaagctggtggctgg

SEQ ID NO: 5851109 - DNA, 25 bp, Homo sapien
ctggtggctggaccaatgtaaatat

SEQ ID NO: 5851110 - DNA, 25 bp, Homo sapien
ccaatgtaaatattgtcatgaacta

SEQ ID NO: 5851111 - DNA, 25 bp, Homo sapien
cgctggttagcaccgcaggtgtaga

SEQ ID NO: 5851112 - DNA, 25 bp, Homo sapien
ttgtcatgaactatatccgtaacct

SEQ ID NO: 5851113 - DNA, 25 bp, Homo sapien
caccgcaggtgtagagaaggcactt

SEQ ID NO: 5851114 - DNA, 25 bp, Homo sapien
tagtgaaacaggggcaatggtgcgc

SEQ ID NO: 5851115 - DNA, 25 bp, Homo sapien
tggtcgagcgatggatttccgtctc

SEQ ID NO: 5851116 - DNA, 25 bp, Homo sapien
atggatttccgtctctggtgtagct

SEQ ID NO: 5851117 - DNA, 25 bp, Homo sapien
gtctctggtgtagctgatgatccga

SEQ ID NO: 5851118 - DNA, 25 bp, Homo sapien
tgtagctgatgatccgaataactac

SEQ ID NO: 5851119 - DNA, 25 bp, Homo sapien
accagccagctatcaactcgcgccc

SEQ ID NO: 5851120 - DNA, 25 bp, Homo sapien
gcaactcatcgattgatttacggcg

SEQ ID NO: 5851121 - DNA, 25 bp, Homo sapien
gattgatttacggcgctaaggatga

SEQ ID NO: 5851122 - DNA, 25 bp, Homo sapien
taaggatgactctggtcagagatac

SEQ ID NO: 5851123 - DNA, 25 bp, Homo sapien
tggtcagagatacctggcctggtct

SEQ ID NO: 5851124 - DNA, 25 bp, Homo sapien
ctggtctggacacagtgcccgtgtc

SEQ ID NO: 5851125 - DNA, 25 bp, Homo sapien
gtgcccgtgtcggagccgcgcgaga

SEQ ID NO: 5851126 - DNA, 25 bp, Homo sapien
cgagatatggcccgcgctggagttt

SEQ ID NO: 5851127 - DNA, 25 bp, Homo sapien
ggagtttcaataccggagatcatgc

SEQ ID NO: 5851128 - DNA, 25 bp, Homo sapien
ggagatcatgcaagctggtggctgg

SEQ ID NO: 5851129 - DNA, 25 bp, Homo sapien
ctggtggctggaccaatgtaaatat

SEQ ID NO: 5851130 - DNA, 25 bp, Homo sapien
ccaatgtaaatattgtcatgaacta

SEQ ID NO: 5851131 - DNA, 25 bp, Homo sapien
cgctggttagcaccgcaggtgtaga

SEQ ID NO: 5851132 - DNA, 25 bp, Homo sapien
ttgtcatgaactatatccgtaacct

SEQ ID NO: 5851133 - DNA, 25 bp, Homo sapien
caccgcaggtgtagagaaggcactt

SEQ ID NO: 5851134 - DNA, 25 bp, Homo sapien
tagtgaaacaggggcaatggtgcgc

SEQ ID NO: 5851135 - DNA, 25 bp, Homo sapien
tggtcgagcgatggatttccgtctc

SEQ ID NO: 5851136 - DNA, 25 bp, Homo sapien
atggatttccgtctctggtgtagct

SEQ ID NO: 5851137 - DNA, 25 bp, Homo sapien
gtctctggtgtagctgatgatccga

SEQ ID NO: 5851138 - DNA, 25 bp, Homo sapien
tgtagctgatgatccgaataactac

SEQ ID NO: 5851139 - DNA, 25 bp, Homo sapien
accagccagctatcaactcgcgccc

SEQ ID NO: 5851140 - DNA, 25 bp, Homo sapien
gcaactcatcgattgatttacggcg

SEQ ID NO: 5851141 - DNA, 25 bp, Homo sapien
gattgatttacggcgctaaggatga

SEQ ID NO: 5851142 - DNA, 25 bp, Homo sapien
taaggatgactctggtcagagatac

SEQ ID NO: 5851143 - DNA, 25 bp, Homo sapien
tggtcagagatacctggcctggtct

SEQ ID NO: 5851144 - DNA, 25 bp, Homo sapien
ctggtctggacacagtgcccgtgtc

SEQ ID NO: 5851145 - DNA, 25 bp, Homo sapien
gtgcccgtgtcggagccgcgcgaga

SEQ ID NO: 5851146 - DNA, 25 bp, Homo sapien
cgagatatggcccgcgctggagttt

SEQ ID NO: 5851147 - DNA, 25 bp, Homo sapien
ggagtttcaataccggagatcatgc

SEQ ID NO: 5851148 - DNA, 25 bp, Homo sapien
ggagatcatgcaagctggtggctgg

SEQ ID NO: 5851149 - DNA, 25 bp, Homo sapien
ctggtggctggaccaatgtaaatat

SEQ ID NO: 5851150 - DNA, 25 bp, Homo sapien
ccaatgtaaatattgtcatgaacta

SEQ ID NO: 5851151 - DNA, 25 bp, Homo sapien
cgctggttagcaccgcaggtgtaga

SEQ ID NO: 5851152 - DNA, 25 bp, Homo sapien
ttgtcatgaactatatccgtaacct

SEQ ID NO: 5851153 - DNA, 25 bp, Homo sapien
caccgcaggtgtagagaaggcactt

SEQ ID NO: 5851154 - DNA, 25 bp, Homo sapien
tagtgaaacaggggcaatggtgcgc

SEQ ID NO: 5851155 - DNA, 25 bp, Homo sapien
tggtcgagcgatggatttccgtctc

SEQ ID NO: 5851156 - DNA, 25 bp, Homo sapien
atggatttccgtctctggtgtagct

SEQ ID NO: 5851157 - DNA, 25 bp, Homo sapien
gtctctggtgtagctgatgatccga

SEQ ID NO: 5851158 - DNA, 25 bp, Homo sapien
tgtagctgatgatccgaataactac

SEQ ID NO: 5851159 - DNA, 25 bp, Homo sapien
accagccagctatcaactcgcgccc

SEQ ID NO: 5851160 - DNA, 25 bp, Homo sapien
gcaactcatcgattgatttacggcg

SEQ ID NO: 5851161 - DNA, 25 bp, Homo sapien
gattgatttacggcgctaaggatga

SEQ ID NO: 5851162 - DNA, 25 bp, Homo sapien
taaggatgactctggtcagagatac

SEQ ID NO: 5851163 - DNA, 25 bp, Homo sapien
tggtcagagatacctggcctggtct

SEQ ID NO: 5851164 - DNA, 25 bp, Homo sapien
ctggtctggacacagtgcccgtgtc

SEQ ID NO: 5851165 - DNA, 25 bp, Homo sapien
gtgcccgtgtcggagccgcgcgaga

SEQ ID NO: 5851166 - DNA, 25 bp, Homo sapien
cgagatatggcccgcgctggagttt

SEQ ID NO: 5851167 - DNA, 25 bp, Homo sapien
ggagtttcaataccggagatcatgc

SEQ ID NO: 5851168 - DNA, 25 bp, Homo sapien
ggagatcatgcaagctggtggctgg

SEQ ID NO: 5851169 - DNA, 25 bp, Homo sapien
ctggtggctggaccaatgtaaatat

SEQ ID NO: 5851170 - DNA, 25 bp, Homo sapien
ccaatgtaaatattgtcatgaacta

SEQ ID NO: 5851171 - DNA, 25 bp, Homo sapien
cgctggttagcaccgcaggtgtaga

SEQ ID NO: 5851172 - DNA, 25 bp, Homo sapien
ttgtcatgaactatatccgtaacct

SEQ ID NO: 5851173 - DNA, 25 bp, Homo sapien
caccgcaggtgtagagaaggcactt

SEQ ID NO: 5851174 - DNA, 25 bp, Homo sapien
tagtgaaacaggggcaatggtgcgc

SEQ ID NO: 5851175 - DNA, 25 bp, Homo sapien
tggtcgagcgatggatttccgtctc

SEQ ID NO: 5851176 - DNA, 25 bp, Homo sapien
atggatttccgtctctggtgtagct

SEQ ID NO: 5851177 - DNA, 25 bp, Homo sapien
gtctctggtgtagctgatgatccga

SEQ ID NO: 5851178 - DNA, 25 bp, Homo sapien
tgtagctgatgatccgaataactac

SEQ ID NO: 5851179 - DNA, 25 bp, Homo sapien
accagccagctatcaactcgcgccc

SEQ ID NO: 5851180 - DNA, 25 bp, Homo sapien
gcaactcatcgattgatttacggcg

SEQ ID NO: 5851181 - DNA, 25 bp, Homo sapien
gattgatttacggcgctaaggatga

SEQ ID NO: 5851182 - DNA, 25 bp, Homo sapien
taaggatgactctggtcagagatac

SEQ ID NO: 5851183 - DNA, 25 bp, Homo sapien
tggtcagagatacctggcctggtct

SEQ ID NO: 5851184 - DNA, 25 bp, Homo sapien
ctggtctggacacagtgcccgtgtc

SEQ ID NO: 5851185 - DNA, 25 bp, Homo sapien
gtgcccgtgtcggagccgcgcgaga

SEQ ID NO: 5851186 - DNA, 25 bp, Homo sapien
cgagatatggcccgcgctggagttt

SEQ ID NO: 5851187 - DNA, 25 bp, Homo sapien
ggagtttcaataccggagatcatgc

SEQ ID NO: 5851188 - DNA, 25 bp, Homo sapien
ggagatcatgcaagctggtggctgg

SEQ ID NO: 5851189 - DNA, 25 bp, Homo sapien
ctggtggctggaccaatgtaaatat

SEQ ID NO: 5851190 - DNA, 25 bp, Homo sapien
ccaatgtaaatattgtcatgaacta

SEQ ID NO: 5851191 - DNA, 25 bp, Homo sapien
cgctggttagcaccgcaggtgtaga

SEQ ID NO: 5851192 - DNA, 25 bp, Homo sapien
ttgtcatgaactatatccgtaacct

SEQ ID NO: 5851193 - DNA, 25 bp, Homo sapien
caccgcaggtgtagagaaggcactt

SEQ ID NO: 5851194 - DNA, 25 bp, Homo sapien
tagtgaaacaggggcaatggtgcgc

SEQ ID NO: 5851195 - DNA, 25 bp, Homo sapien
tggtcgagcgatggatttccgtctc

SEQ ID NO: 5851196 - DNA, 25 bp, Homo sapien
atggatttccgtctctggtgtagct

SEQ ID NO: 5851197 - DNA, 25 bp, Homo sapien
gtctctggtgtagctgatgatccga

SEQ ID NO: 5851198 - DNA, 25 bp, Homo sapien
tgtagctgatgatccgaataactac

SEQ ID NO: 5851199 - DNA, 25 bp, Homo sapien
accagccagctatcaactcgcgccc

SEQ ID NO: 5851200 - DNA, 25 bp, Homo sapien
gcaactcatcgattgatttacggcg

SEQ ID NO: 5851201 - DNA, 25 bp, Homo sapien
gattgatttacggcgctaaggatga

SEQ ID NO: 5851202 - DNA, 25 bp, Homo sapien
taaggatgactctggtcagagatac

SEQ ID NO: 5851203 - DNA, 25 bp, Homo sapien
tggtcagagatacctggcctggtct

SEQ ID NO: 5851204 - DNA, 25 bp, Homo sapien
ctggtctggacacagtgcccgtgtc

SEQ ID NO: 5851205 - DNA, 25 bp, Homo sapien
gtgcccgtgtcggagccgcgcgaga

SEQ ID NO: 5851206 - DNA, 25 bp, Homo sapien
cgagatatggcccgcgctggagttt

SEQ ID NO: 5851207 - DNA, 25 bp, Homo sapien
ggagtttcaataccggagatcatgc

SEQ ID NO: 5851208 - DNA, 25 bp, Homo sapien
ggagatcatgcaagctggtggctgg

SEQ ID NO: 5851209 - DNA, 25 bp, Homo sapien
ctggtggctggaccaatgtaaatat

SEQ ID NO: 5851210 - DNA, 25 bp, Homo sapien
ccaatgtaaatattgtcatgaacta

SEQ ID NO: 5851211 - DNA, 25 bp, Homo sapien
cgctggttagcaccgcaggtgtaga

SEQ ID NO: 5851212 - DNA, 25 bp, Homo sapien
ttgtcatgaactatatccgtaacct

SEQ ID NO: 5851213 - DNA, 25 bp, Homo sapien
caccgcaggtgtagagaaggcactt

SEQ ID NO: 5851214 - DNA, 25 bp, Homo sapien
tagtgaaacaggggcaatggtgcgc

SEQ ID NO: 5851215 - DNA, 25 bp, Homo sapien
tggtcgagcgatggatttccgtctc

SEQ ID NO: 5851216 - DNA, 25 bp, Homo sapien
atggatttccgtctctggtgtagct

SEQ ID NO: 5851217 - DNA, 25 bp, Homo sapien
gtctctggtgtagctgatgatccga

SEQ ID NO: 5851218 - DNA, 25 bp, Homo sapien
tgtagctgatgatccgaataactac

SEQ ID NO: 5851219 - DNA, 25 bp, Homo sapien
accagccagctatcaactcgcgccc

SEQ ID NO: 5851220 - DNA, 25 bp, Homo sapien
gcaactcatcgattgatttacggcg

SEQ ID NO: 5851221 - DNA, 25 bp, Homo sapien
gattgatttacggcgctaaggatga

SEQ ID NO: 5851222 - DNA, 25 bp, Homo sapien
taaggatgactctggtcagagatac

SEQ ID NO: 5851223 - DNA, 25 bp, Homo sapien
tggtcagagatacctggcctggtct

SEQ ID NO: 5851224 - DNA, 25 bp, Homo sapien
ctggtctggacacagtgcccgtgtc

SEQ ID NO: 5851225 - DNA, 25 bp, Homo sapien
gtgcccgtgtcggagccgcgcgaga

SEQ ID NO: 5851226 - DNA, 25 bp, Homo sapien
cgagatatggcccgcgctggagttt

SEQ ID NO: 5851227 - DNA, 25 bp, Homo sapien
ggagtttcaataccggagatcatgc

SEQ ID NO: 5851228 - DNA, 25 bp, Homo sapien
ggagatcatgcaagctggtggctgg

SEQ ID NO: 5851229 - DNA, 25 bp, Homo sapien
ctggtggctggaccaatgtaaatat

SEQ ID NO: 5851230 - DNA, 25 bp, Homo sapien
ccaatgtaaatattgtcatgaacta

SEQ ID NO: 5851231 - DNA, 25 bp, Homo sapien
cgctggttagcaccgcaggtgtaga

SEQ ID NO: 5851232 - DNA, 25 bp, Homo sapien
ttgtcatgaactatatccgtaacct

SEQ ID NO: 5851233 - DNA, 25 bp, Homo sapien
caccgcaggtgtagagaaggcactt

SEQ ID NO: 5851234 - DNA, 25 bp, Homo sapien
tagtgaaacaggggcaatggtgcgc

SEQ ID NO: 5851235 - DNA, 25 bp, Homo sapien
tggtcgagcgatggatttccgtctc

SEQ ID NO: 5851236 - DNA, 25 bp, Homo sapien
atggatttccgtctctggtgtagct

SEQ ID NO: 5851237 - DNA, 25 bp, Homo sapien
gtctctggtgtagctgatgatccga

SEQ ID NO: 5851238 - DNA, 25 bp, Homo sapien
tgtagctgatgatccgaataactac

SEQ ID NO: 5851239 - DNA, 25 bp, Homo sapien
accagccagctatcaactcgcgccc

SEQ ID NO: 5851240 - DNA, 25 bp, Homo sapien
gcaactcatcgattgatttacggcg

SEQ ID NO: 5851241 - DNA, 25 bp, Homo sapien
gattgatttacggcgctaaggatga

SEQ ID NO: 5851242 - DNA, 25 bp, Homo sapien
taaggatgactctggtcagagatac

SEQ ID NO: 5851243 - DNA, 25 bp, Homo sapien
tggtcagagatacctggcctggtct

SEQ ID NO: 5851244 - DNA, 25 bp, Homo sapien
ctggtctggacacagtgcccgtgtc

SEQ ID NO: 5851245 - DNA, 25 bp, Homo sapien
gtgcccgtgtcggagccgcgcgaga

SEQ ID NO: 5851246 - DNA, 25 bp, Homo sapien
cgagatatggcccgcgctggagttt

SEQ ID NO: 5851247 - DNA, 25 bp, Homo sapien
ggagtttcaataccggagatcatgc

SEQ ID NO: 5851248 - DNA, 25 bp, Homo sapien
ggagatcatgcaagctggtggctgg

SEQ ID NO: 5851249 - DNA, 25 bp, Homo sapien
ctggtggctggaccaatgtaaatat

SEQ ID NO: 5851250 - DNA, 25 bp, Homo sapien
ccaatgtaaatattgtcatgaacta

SEQ ID NO: 5851251 - DNA, 25 bp, Homo sapien
cgctggttagcaccgcaggtgtaga

SEQ ID NO: 5851252 - DNA, 25 bp, Homo sapien
ttgtcatgaactatatccgtaacct

SEQ ID NO: 5851253 - DNA, 25 bp, Homo sapien
caccgcaggtgtagagaaggcactt

SEQ ID NO: 5851254 - DNA, 25 bp, Homo sapien
tagtgaaacaggggcaatggtgcgc

SEQ ID NO: 5851255 - DNA, 25 bp, Homo sapien
tggtcgagcgatggatttccgtctc

SEQ ID NO: 5851256 - DNA, 25 bp, Homo sapien
atggatttccgtctctggtgtagct

SEQ ID NO: 5851257 - DNA, 25 bp, Homo sapien
gtctctggtgtagctgatgatccga

SEQ ID NO: 5851258 - DNA, 25 bp, Homo sapien
tgtagctgatgatccgaataactac

SEQ ID NO: 5851259 - DNA, 25 bp, Homo sapien
accagccagctatcaactcgcgccc

SEQ ID NO: 5851260 - DNA, 25 bp, Homo sapien
gcaactcatcgattgatttacggcg

SEQ ID NO: 5851261 - DNA, 25 bp, Homo sapien
gattgatttacggcgctaaggatga

SEQ ID NO: 5851262 - DNA, 25 bp, Homo sapien
taaggatgactctggtcagagatac

SEQ ID NO: 5851263 - DNA, 25 bp, Homo sapien
tggtcagagatacctggcctggtct

SEQ ID NO: 5851264 - DNA, 25 bp, Homo sapien
ctggtctggacacagtgcccgtgtc

SEQ ID NO: 5851265 - DNA, 25 bp, Homo sapien
gtgcccgtgtcggagccgcgcgaga

SEQ ID NO: 5851266 - DNA, 25 bp, Homo sapien
cgagatatggcccgcgctggagttt

SEQ ID NO: 5851267 - DNA, 25 bp, Homo sapien
ggagtttcaataccggagatcatgc

SEQ ID NO: 5851268 - DNA, 25 bp, Homo sapien
ggagatcatgcaagctggtggctgg

SEQ ID NO: 5851269 - DNA, 25 bp, Homo sapien
ctggtggctggaccaatgtaaatat

SEQ ID NO: 5851270 - DNA, 25 bp, Homo sapien
ccaatgtaaatattgtcatgaacta

SEQ ID NO: 5851271 - DNA, 25 bp, Homo sapien
cgctggttagcaccgcaggtgtaga

SEQ ID NO: 5851272 - DNA, 25 bp, Homo sapien
ttgtcatgaactatatccgtaacct

SEQ ID NO: 5851273 - DNA, 25 bp, Homo sapien
caccgcaggtgtagagaaggcactt

SEQ ID NO: 5851274 - DNA, 25 bp, Homo sapien
tagtgaaacaggggcaatggtgcgc

SEQ ID NO: 5851275 - DNA, 25 bp, Homo sapien
tggtcgagcgatggatttccgtctc

SEQ ID NO: 5851276 - DNA, 25 bp, Homo sapien
atggatttccgtctctggtgtagct

SEQ ID NO: 5851277 - DNA, 25 bp, Homo sapien
gtctctggtgtagctgatgatccga

SEQ ID NO: 5851278 - DNA, 25 bp, Homo sapien
tgtagctgatgatccgaataactac

SEQ ID NO: 5851279 - DNA, 25 bp, Homo sapien
accagccagctatcaactcgcgccc

SEQ ID NO: 5851280 - DNA, 25 bp, Homo sapien
gcaactcatcgattgatttacggcg

SEQ ID NO: 5851281 - DNA, 25 bp, Homo sapien
gattgatttacggcgctaaggatga

SEQ ID NO: 5851282 - DNA, 25 bp, Homo sapien
taaggatgactctggtcagagatac

SEQ ID NO: 5851283 - DNA, 25 bp, Homo sapien
tggtcagagatacctggcctggtct

SEQ ID NO: 5851284 - DNA, 25 bp, Homo sapien
ctggtctggacacagtgcccgtgtc

SEQ ID NO: 5851285 - DNA, 25 bp, Homo sapien
gtgcccgtgtcggagccgcgcgaga

SEQ ID NO: 5851286 - DNA, 25 bp, Homo sapien
cgagatatggcccgcgctggagttt

SEQ ID NO: 5851287 - DNA, 25 bp, Homo sapien
ggagtttcaataccggagatcatgc

SEQ ID NO: 5851288 - DNA, 25 bp, Homo sapien
ggagatcatgcaagctggtggctgg

SEQ ID NO: 5851289 - DNA, 25 bp, Homo sapien
ctggtggctggaccaatgtaaatat

SEQ ID NO: 5851290 - DNA, 25 bp, Homo sapien
ccaatgtaaatattgtcatgaacta

SEQ ID NO: 5851291 - DNA, 25 bp, Homo sapien
cgctggttagcaccgcaggtgtaga

SEQ ID NO: 5851292 - DNA, 25 bp, Homo sapien
ttgtcatgaactatatccgtaacct

SEQ ID NO: 5851293 - DNA, 25 bp, Homo sapien
caccgcaggtgtagagaaggcactt

SEQ ID NO: 5851294 - DNA, 25 bp, Homo sapien
tagtgaaacaggggcaatggtgcgc

SEQ ID NO: 5851295 - DNA, 25 bp, Homo sapien
tggtcgagcgatggatttccgtctc

SEQ ID NO: 5851296 - DNA, 25 bp, Homo sapien
atggatttccgtctctggtgtagct

SEQ ID NO: 5851297 - DNA, 25 bp, Homo sapien
gtctctggtgtagctgatgatccga

SEQ ID NO: 5851298 - DNA, 25 bp, Homo sapien
tgtagctgatgatccgaataactac

SEQ ID NO: 5851299 - DNA, 25 bp, Homo sapien
accagccagctatcaactcgcgccc

SEQ ID NO: 5851300 - DNA, 25 bp, Homo sapien
gcaactcatcgattgatttacggcg

SEQ ID NO: 5851301 - DNA, 25 bp, Homo sapien
gattgatttacggcgctaaggatga

SEQ ID NO: 5851302 - DNA, 25 bp, Homo sapien
taaggatgactctggtcagagatac

SEQ ID NO: 5851303 - DNA, 25 bp, Homo sapien
tggtcagagatacctggcctggtct

SEQ ID NO: 5851304 - DNA, 25 bp, Homo sapien
ctggtctggacacagtgcccgtgtc

SEQ ID NO: 5851305 - DNA, 25 bp, Homo sapien
gtgcccgtgtcggagccgcgcgaga

SEQ ID NO: 5851306 - DNA, 25 bp, Homo sapien
cgagatatggcccgcgctggagttt

SEQ ID NO: 5851307 - DNA, 25 bp, Homo sapien
ggagtttcaataccggagatcatgc

SEQ ID NO: 5851308 - DNA, 25 bp, Homo sapien
ggagatcatgcaagctggtggctgg

SEQ ID NO: 5851309 - DNA, 25 bp, Homo sapien
ctggtggctggaccaatgtaaatat

SEQ ID NO: 5851310 - DNA, 25 bp, Homo sapien
ccaatgtaaatattgtcatgaacta

SEQ ID NO: 5851311 - DNA, 25 bp, Homo sapien
cgctggttagcaccgcaggtgtaga

SEQ ID NO: 5851312 - DNA, 25 bp, Homo sapien
ttgtcatgaactatatccgtaacct

SEQ ID NO: 5851313 - DNA, 25 bp, Homo sapien
caccgcaggtgtagagaaggcactt

SEQ ID NO: 5851314 - DNA, 25 bp, Homo sapien
tagtgaaacaggggcaatggtgcgc

SEQ ID NO: 5851315 - DNA, 25 bp, Homo sapien
tggtcgagcgatggatttccgtctc

SEQ ID NO: 5851316 - DNA, 25 bp, Homo sapien
atggatttccgtctctggtgtagct

SEQ ID NO: 5851317 - DNA, 25 bp, Homo sapien
gtctctggtgtagctgatgatccga

SEQ ID NO: 5851318 - DNA, 25 bp, Homo sapien
tgtagctgatgatccgaataactac

SEQ ID NO: 5851319 - DNA, 25 bp, Homo sapien
accagccagctatcaactcgcgccc

SEQ ID NO: 5851320 - DNA, 25 bp, Homo sapien
gcaactcatcgattgatttacggcg

SEQ ID NO: 5851321 - DNA, 25 bp, Homo sapien
gattgatttacggcgctaaggatga

SEQ ID NO: 5851322 - DNA, 25 bp, Homo sapien
taaggatgactctggtcagagatac

SEQ ID NO: 5851323 - DNA, 25 bp, Homo sapien
tggtcagagatacctggcctggtct

SEQ ID NO: 5851324 - DNA, 25 bp, Homo sapien
ctggtctggacacagtgcccgtgtc

SEQ ID NO: 5851325 - DNA, 25 bp, Homo sapien
gtgcccgtgtcggagccgcgcgaga

SEQ ID NO: 5851326 - DNA, 25 bp, Homo sapien
cgagatatggcccgcgctggagttt

SEQ ID NO: 5851327 - DNA, 25 bp, Homo sapien
ggagtttcaataccggagatcatgc

SEQ ID NO: 5851328 - DNA, 25 bp, Homo sapien
ggagatcatgcaagctggtggctgg

SEQ ID NO: 5851329 - DNA, 25 bp, Homo sapien
ctggtggctggaccaatgtaaatat

SEQ ID NO: 5851330 - DNA, 25 bp, Homo sapien
ccaatgtaaatattgtcatgaacta

SEQ ID NO: 5851331 - DNA, 25 bp, Homo sapien
cgctggttagcaccgcaggtgtaga

SEQ ID NO: 5851332 - DNA, 25 bp, Homo sapien
ttgtcatgaactatatccgtaacct

SEQ ID NO: 5851333 - DNA, 25 bp, Homo sapien
caccgcaggtgtagagaaggcactt

SEQ ID NO: 5851334 - DNA, 25 bp, Homo sapien
tagtgaaacaggggcaatggtgcgc

SEQ ID NO: 5851335 - DNA, 25 bp, Homo sapien
tggtcgagcgatggatttccgtctc

SEQ ID NO: 5851336 - DNA, 25 bp, Homo sapien
atggatttccgtctctggtgtagct

SEQ ID NO: 5851337 - DNA, 25 bp, Homo sapien
gtctctggtgtagctgatgatccga

SEQ ID NO: 5851338 - DNA, 25 bp, Homo sapien
tgtagctgatgatccgaataactac

SEQ ID NO: 5851339 - DNA, 25 bp, Homo sapien
accagccagctatcaactcgcgccc

SEQ ID NO: 5851340 - DNA, 25 bp, Homo sapien
gcaactcatcgattgatttacggcg

SEQ ID NO: 5851341 - DNA, 25 bp, Homo sapien
gattgatttacggcgctaaggatga

SEQ ID NO: 5851342 - DNA, 25 bp, Homo sapien
taaggatgactctggtcagagatac

SEQ ID NO: 5851343 - DNA, 25 bp, Homo sapien
tggtcagagatacctggcctggtct

SEQ ID NO: 5851344 - DNA, 25 bp, Homo sapien
ctggtctggacacagtgcccgtgtc

SEQ ID NO: 5851345 - DNA, 25 bp, Homo sapien
gtgcccgtgtcggagccgcgcgaga

SEQ ID NO: 5851346 - DNA, 25 bp, Homo sapien
cgagatatggcccgcgctggagttt

SEQ ID NO: 5851347 - DNA, 25 bp, Homo sapien
ggagtttcaataccggagatcatgc

SEQ ID NO: 5851348 - DNA, 25 bp, Homo sapien
ggagatcatgcaagctggtggctgg

SEQ ID NO: 5851349 - DNA, 25 bp, Homo sapien
ctggtggctggaccaatgtaaatat

SEQ ID NO: 5851350 - DNA, 25 bp, Homo sapien
ccaatgtaaatattgtcatgaacta

SEQ ID NO: 5851351 - DNA, 25 bp, Homo sapien
cgctggttagcaccgcaggtgtaga

SEQ ID NO: 5851352 - DNA, 25 bp, Homo sapien
ttgtcatgaactatatccgtaacct

SEQ ID NO: 5851353 - DNA, 25 bp, Homo sapien
caccgcaggtgtagagaaggcactt

SEQ ID NO: 5851354 - DNA, 25 bp, Homo sapien
tagtgaaacaggggcaatggtgcgc

SEQ ID NO: 5851355 - DNA, 25 bp, Homo sapien
gacatgttcagggatcgccaggcgt

SEQ ID NO: 5851356 - DNA, 25 bp, Homo sapien
gccaggcgttttctgagcatacctg

SEQ ID NO: 5851357 - DNA, 25 bp, Homo sapien
gcggcatggtgcaagttgaataacc

SEQ ID NO: 5851358 - DNA, 25 bp, Homo sapien
gaagatgttcgcgattatcttctat

SEQ ID NO: 5851359 - DNA, 25 bp, Homo sapien
tctatatcttcaggcgcgcggtctg

SEQ ID NO: 5851360 - DNA, 25 bp, Homo sapien
gcaacatttgggccagctaaacatg

SEQ ID NO: 5851361 - DNA, 25 bp, Homo sapien
ccagctaaacatgcttcatcgtcgg

SEQ ID NO: 5851362 - DNA, 25 bp, Homo sapien
ccgggctgccacgaccaagtgacag

SEQ ID NO: 5851363 - DNA, 25 bp, Homo sapien
gaccaagtgacagcaatgctgtttc

SEQ ID NO: 5851364 - DNA, 25 bp, Homo sapien
aatgctgtttcactggttatgcggc

SEQ ID NO: 5851365 - DNA, 25 bp, Homo sapien
atgccggtgaacgtgcaaaacaggc

SEQ ID NO: 5851366 - DNA, 25 bp, Homo sapien
acgtgcaaaacaggctctagcgttc

SEQ ID NO: 5851367 - DNA, 25 bp, Homo sapien
ctctagcgttcgaacgcactgattt

SEQ ID NO: 5851368 - DNA, 25 bp, Homo sapien
tcgttcactcatggaaaatagcgat

SEQ ID NO: 5851369 - DNA, 25 bp, Homo sapien
atttgcctgcattaccggtcgatgc

SEQ ID NO: 5851370 - DNA, 25 bp, Homo sapien
atggaaaatagcgatcgctgccagg

SEQ ID NO: 5851371 - DNA, 25 bp, Homo sapien
taccggtcgatgcaacgagtgatga

SEQ ID NO: 5851372 - DNA, 25 bp, Homo sapien
tcagggttaaagatatctcacgtac

SEQ ID NO: 5851373 - DNA, 25 bp, Homo sapien
gagtgatgaggttcgcaagaacctg

SEQ ID NO: 5851374 - DNA, 25 bp, Homo sapien
gcaagaacctgatggacatgttcag

SEQ ID NO: 5851375 - DNA, 25 bp, Homo sapien
gacatgttcagggatcgccaggcgt

SEQ ID NO: 5851376 - DNA, 25 bp, Homo sapien
gccaggcgttttctgagcatacctg

SEQ ID NO: 5851377 - DNA, 25 bp, Homo sapien
gcggcatggtgcaagttgaataacc

SEQ ID NO: 5851378 - DNA, 25 bp, Homo sapien
gaagatgttcgcgattatcttctat

SEQ ID NO: 5851379 - DNA, 25 bp, Homo sapien
tctatatcttcaggcgcgcggtctg

SEQ ID NO: 5851380 - DNA, 25 bp, Homo sapien
gcaacatttgggccagctaaacatg

SEQ ID NO: 5851381 - DNA, 25 bp, Homo sapien
ccagctaaacatgcttcatcgtcgg

SEQ ID NO: 5851382 - DNA, 25 bp, Homo sapien
ccgggctgccacgaccaagtgacag

SEQ ID NO: 5851383 - DNA, 25 bp, Homo sapien
gaccaagtgacagcaatgctgtttc

SEQ ID NO: 5851384 - DNA, 25 bp, Homo sapien
aatgctgtttcactggttatgcggc

SEQ ID NO: 5851385 - DNA, 25 bp, Homo sapien
atgccggtgaacgtgcaaaacaggc

SEQ ID NO: 5851386 - DNA, 25 bp, Homo sapien
acgtgcaaaacaggctctagcgttc

SEQ ID NO: 5851387 - DNA, 25 bp, Homo sapien
ctctagcgttcgaacgcactgattt

SEQ ID NO: 5851388 - DNA, 25 bp, Homo sapien
tcgttcactcatggaaaatagcgat

SEQ ID NO: 5851389 - DNA, 25 bp, Homo sapien
atttgcctgcattaccggtcgatgc

SEQ ID NO: 5851390 - DNA, 25 bp, Homo sapien
atggaaaatagcgatcgctgccagg

SEQ ID NO: 5851391 - DNA, 25 bp, Homo sapien
taccggtcgatgcaacgagtgatga

SEQ ID NO: 5851392 - DNA, 25 bp, Homo sapien
tcagggttaaagatatctcacgtac

SEQ ID NO: 5851393 - DNA, 25 bp, Homo sapien
gagtgatgaggttcgcaagaacctg

SEQ ID NO: 5851394 - DNA, 25 bp, Homo sapien
gcaagaacctgatggacatgttcag

SEQ ID NO: 5851395 - DNA, 25 bp, Homo sapien
gacatgttcagggatcgccaggcgt

SEQ ID NO: 5851396 - DNA, 25 bp, Homo sapien
gccaggcgttttctgagcatacctg

SEQ ID NO: 5851397 - DNA, 25 bp, Homo sapien
gcggcatggtgcaagttgaataacc

SEQ ID NO: 5851398 - DNA, 25 bp, Homo sapien
gaagatgttcgcgattatcttctat

SEQ ID NO: 5851399 - DNA, 25 bp, Homo sapien
tctatatcttcaggcgcgcggtctg

SEQ ID NO: 5851400 - DNA, 25 bp, Homo sapien
gcaacatttgggccagctaaacatg

SEQ ID NO: 5851401 - DNA, 25 bp, Homo sapien
ccagctaaacatgcttcatcgtcgg

SEQ ID NO: 5851402 - DNA, 25 bp, Homo sapien
ccgggctgccacgaccaagtgacag

SEQ ID NO: 5851403 - DNA, 25 bp, Homo sapien
gaccaagtgacagcaatgctgtttc

SEQ ID NO: 5851404 - DNA, 25 bp, Homo sapien
aatgctgtttcactggttatgcggc

SEQ ID NO: 5851405 - DNA, 25 bp, Homo sapien
atgccggtgaacgtgcaaaacaggc

SEQ ID NO: 5851406 - DNA, 25 bp, Homo sapien
acgtgcaaaacaggctctagcgttc

SEQ ID NO: 5851407 - DNA, 25 bp, Homo sapien
ctctagcgttcgaacgcactgattt

SEQ ID NO: 5851408 - DNA, 25 bp, Homo sapien
tcgttcactcatggaaaatagcgat

SEQ ID NO: 5851409 - DNA, 25 bp, Homo sapien
atttgcctgcattaccggtcgatgc

SEQ ID NO: 5851410 - DNA, 25 bp, Homo sapien
atggaaaatagcgatcgctgccagg

SEQ ID NO: 5851411 - DNA, 25 bp, Homo sapien
taccggtcgatgcaacgagtgatga

SEQ ID NO: 5851412 - DNA, 25 bp, Homo sapien
tcagggttaaagatatctcacgtac

SEQ ID NO: 5851413 - DNA, 25 bp, Homo sapien
gagtgatgaggttcgcaagaacctg

SEQ ID NO: 5851414 - DNA, 25 bp, Homo sapien
gcaagaacctgatggacatgttcag

SEQ ID NO: 5851415 - DNA, 25 bp, Homo sapien
gacatgttcagggatcgccaggcgt

SEQ ID NO: 5851416 - DNA, 25 bp, Homo sapien
gccaggcgttttctgagcatacctg

SEQ ID NO: 5851417 - DNA, 25 bp, Homo sapien
gcggcatggtgcaagttgaataacc

SEQ ID NO: 5851418 - DNA, 25 bp, Homo sapien
gaagatgttcgcgattatcttctat

SEQ ID NO: 5851419 - DNA, 25 bp, Homo sapien
tctatatcttcaggcgcgcggtctg

SEQ ID NO: 5851420 - DNA, 25 bp, Homo sapien
gcaacatttgggccagctaaacatg

SEQ ID NO: 5851421 - DNA, 25 bp, Homo sapien
ccagctaaacatgcttcatcgtcgg

SEQ ID NO: 5851422 - DNA, 25 bp, Homo sapien
ccgggctgccacgaccaagtgacag

SEQ ID NO: 5851423 - DNA, 25 bp, Homo sapien
gaccaagtgacagcaatgctgtttc

SEQ ID NO: 5851424 - DNA, 25 bp, Homo sapien
aatgctgtttcactggttatgcggc

SEQ ID NO: 5851425 - DNA, 25 bp, Homo sapien
atgccggtgaacgtgcaaaacaggc

SEQ ID NO: 5851426 - DNA, 25 bp, Homo sapien
acgtgcaaaacaggctctagcgttc

SEQ ID NO: 5851427 - DNA, 25 bp, Homo sapien
ctctagcgttcgaacgcactgattt

SEQ ID NO: 5851428 - DNA, 25 bp, Homo sapien
tcgttcactcatggaaaatagcgat

SEQ ID NO: 5851429 - DNA, 25 bp, Homo sapien
atttgcctgcattaccggtcgatgc

SEQ ID NO: 5851430 - DNA, 25 bp, Homo sapien
atggaaaatagcgatcgctgccagg

SEQ ID NO: 5851431 - DNA, 25 bp, Homo sapien
taccggtcgatgcaacgagtgatga

SEQ ID NO: 5851432 - DNA, 25 bp, Homo sapien
tcagggttaaagatatctcacgtac

SEQ ID NO: 5851433 - DNA, 25 bp, Homo sapien
gagtgatgaggttcgcaagaacctg

SEQ ID NO: 5851434 - DNA, 25 bp, Homo sapien
gcaagaacctgatggacatgttcag

SEQ ID NO: 5851435 - DNA, 25 bp, Homo sapien
gacatgttcagggatcgccaggcgt

SEQ ID NO: 5851436 - DNA, 25 bp, Homo sapien
gccaggcgttttctgagcatacctg

SEQ ID NO: 5851437 - DNA, 25 bp, Homo sapien
gcggcatggtgcaagttgaataacc

SEQ ID NO: 5851438 - DNA, 25 bp, Homo sapien
gaagatgttcgcgattatcttctat

SEQ ID NO: 5851439 - DNA, 25 bp, Homo sapien
tctatatcttcaggcgcgcggtctg

SEQ ID NO: 5851440 - DNA, 25 bp, Homo sapien
gcaacatttgggccagctaaacatg

SEQ ID NO: 5851441 - DNA, 25 bp, Homo sapien
ccagctaaacatgcttcatcgtcgg

SEQ ID NO: 5851442 - DNA, 25 bp, Homo sapien
ccgggctgccacgaccaagtgacag

SEQ ID NO: 5851443 - DNA, 25 bp, Homo sapien
gaccaagtgacagcaatgctgtttc

SEQ ID NO: 5851444 - DNA, 25 bp, Homo sapien
aatgctgtttcactggttatgcggc

SEQ ID NO: 5851445 - DNA, 25 bp, Homo sapien
atgccggtgaacgtgcaaaacaggc

SEQ ID NO: 5851446 - DNA, 25 bp, Homo sapien
acgtgcaaaacaggctctagcgttc

SEQ ID NO: 5851447 - DNA, 25 bp, Homo sapien
ctctagcgttcgaacgcactgattt

SEQ ID NO: 5851448 - DNA, 25 bp, Homo sapien
tcgttcactcatggaaaatagcgat

SEQ ID NO: 5851449 - DNA, 25 bp, Homo sapien
atttgcctgcattaccggtcgatgc

SEQ ID NO: 5851450 - DNA, 25 bp, Homo sapien
atggaaaatagcgatcgctgccagg

SEQ ID NO: 5851451 - DNA, 25 bp, Homo sapien
taccggtcgatgcaacgagtgatga

SEQ ID NO: 5851452 - DNA, 25 bp, Homo sapien
tcagggttaaagatatctcacgtac

SEQ ID NO: 5851453 - DNA, 25 bp, Homo sapien
gagtgatgaggttcgcaagaacctg

SEQ ID NO: 5851454 - DNA, 25 bp, Homo sapien
gcaagaacctgatggacatgttcag

SEQ ID NO: 5851455 - DNA, 25 bp, Homo sapien
gacatgttcagggatcgccaggcgt

SEQ ID NO: 5851456 - DNA, 25 bp, Homo sapien
gccaggcgttttctgagcatacctg

SEQ ID NO: 5851457 - DNA, 25 bp, Homo sapien
gcggcatggtgcaagttgaataacc

SEQ ID NO: 5851458 - DNA, 25 bp, Homo sapien
gaagatgttcgcgattatcttctat

SEQ ID NO: 5851459 - DNA, 25 bp, Homo sapien
tctatatcttcaggcgcgcggtctg

SEQ ID NO: 5851460 - DNA, 25 bp, Homo sapien
gcaacatttgggccagctaaacatg

SEQ ID NO: 5851461 - DNA, 25 bp, Homo sapien
ccagctaaacatgcttcatcgtcgg

SEQ ID NO: 5851462 - DNA, 25 bp, Homo sapien
ccgggctgccacgaccaagtgacag

SEQ ID NO: 5851463 - DNA, 25 bp, Homo sapien
gaccaagtgacagcaatgctgtttc

SEQ ID NO: 5851464 - DNA, 25 bp, Homo sapien
aatgctgtttcactggttatgcggc

SEQ ID NO: 5851465 - DNA, 25 bp, Homo sapien
atgccggtgaacgtgcaaaacaggc

SEQ ID NO: 5851466 - DNA, 25 bp, Homo sapien
acgtgcaaaacaggctctagcgttc

SEQ ID NO: 5851467 - DNA, 25 bp, Homo sapien
ctctagcgttcgaacgcactgattt

SEQ ID NO: 5851468 - DNA, 25 bp, Homo sapien
tcgttcactcatggaaaatagcgat

SEQ ID NO: 5851469 - DNA, 25 bp, Homo sapien
atttgcctgcattaccggtcgatgc

SEQ ID NO: 5851470 - DNA, 25 bp, Homo sapien
atggaaaatagcgatcgctgccagg

SEQ ID NO: 5851471 - DNA, 25 bp, Homo sapien
taccggtcgatgcaacgagtgatga

SEQ ID NO: 5851472 - DNA, 25 bp, Homo sapien
tcagggttaaagatatctcacgtac

SEQ ID NO: 5851473 - DNA, 25 bp, Homo sapien
gagtgatgaggttcgcaagaacctg

SEQ ID NO: 5851474 - DNA, 25 bp, Homo sapien
gcaagaacctgatggacatgttcag

SEQ ID NO: 5851475 - DNA, 25 bp, Homo sapien
gacatgttcagggatcgccaggcgt

SEQ ID NO: 5851476 - DNA, 25 bp, Homo sapien
gccaggcgttttctgagcatacctg

SEQ ID NO: 5851477 - DNA, 25 bp, Homo sapien
gcggcatggtgcaagttgaataacc

SEQ ID NO: 5851478 - DNA, 25 bp, Homo sapien
gaagatgttcgcgattatcttctat

SEQ ID NO: 5851479 - DNA, 25 bp, Homo sapien
tctatatcttcaggcgcgcggtctg

SEQ ID NO: 5851480 - DNA, 25 bp, Homo sapien
gcaacatttgggccagctaaacatg

SEQ ID NO: 5851481 - DNA, 25 bp, Homo sapien
ccagctaaacatgcttcatcgtcgg

SEQ ID NO: 5851482 - DNA, 25 bp, Homo sapien
ccgggctgccacgaccaagtgacag

SEQ ID NO: 5851483 - DNA, 25 bp, Homo sapien
gaccaagtgacagcaatgctgtttc

SEQ ID NO: 5851484 - DNA, 25 bp, Homo sapien
aatgctgtttcactggttatgcggc

SEQ ID NO: 5851485 - DNA, 25 bp, Homo sapien
atgccggtgaacgtgcaaaacaggc

SEQ ID NO: 5851486 - DNA, 25 bp, Homo sapien
acgtgcaaaacaggctctagcgttc

SEQ ID NO: 5851487 - DNA, 25 bp, Homo sapien
ctctagcgttcgaacgcactgattt

SEQ ID NO: 5851488 - DNA, 25 bp, Homo sapien
tcgttcactcatggaaaatagcgat

SEQ ID NO: 5851489 - DNA, 25 bp, Homo sapien
atttgcctgcattaccggtcgatgc

SEQ ID NO: 5851490 - DNA, 25 bp, Homo sapien
atggaaaatagcgatcgctgccagg

SEQ ID NO: 5851491 - DNA, 25 bp, Homo sapien
taccggtcgatgcaacgagtgatga

SEQ ID NO: 5851492 - DNA, 25 bp, Homo sapien
tcagggttaaagatatctcacgtac

SEQ ID NO: 5851493 - DNA, 25 bp, Homo sapien
gagtgatgaggttcgcaagaacctg

SEQ ID NO: 5851494 - DNA, 25 bp, Homo sapien
gcaagaacctgatggacatgttcag

SEQ ID NO: 5851495 - DNA, 25 bp, Homo sapien
gacatgttcagggatcgccaggcgt

SEQ ID NO: 5851496 - DNA, 25 bp, Homo sapien
gccaggcgttttctgagcatacctg

SEQ ID NO: 5851497 - DNA, 25 bp, Homo sapien
gcggcatggtgcaagttgaataacc

SEQ ID NO: 5851498 - DNA, 25 bp, Homo sapien
gaagatgttcgcgattatcttctat

SEQ ID NO: 5851499 - DNA, 25 bp, Homo sapien
tctatatcttcaggcgcgcggtctg

SEQ ID NO: 5851500 - DNA, 25 bp, Homo sapien
gcaacatttgggccagctaaacatg

SEQ ID NO: 5851501 - DNA, 25 bp, Homo sapien
ccagctaaacatgcttcatcgtcgg

SEQ ID NO: 5851502 - DNA, 25 bp, Homo sapien
ccgggctgccacgaccaagtgacag

SEQ ID NO: 5851503 - DNA, 25 bp, Homo sapien
gaccaagtgacagcaatgctgtttc

SEQ ID NO: 5851504 - DNA, 25 bp, Homo sapien
aatgctgtttcactggttatgcggc

SEQ ID NO: 5851505 - DNA, 25 bp, Homo sapien
atgccggtgaacgtgcaaaacaggc

SEQ ID NO: 5851506 - DNA, 25 bp, Homo sapien
acgtgcaaaacaggctctagcgttc

SEQ ID NO: 5851507 - DNA, 25 bp, Homo sapien
ctctagcgttcgaacgcactgattt

SEQ ID NO: 5851508 - DNA, 25 bp, Homo sapien
tcgttcactcatggaaaatagcgat

SEQ ID NO: 5851509 - DNA, 25 bp, Homo sapien
atttgcctgcattaccggtcgatgc

SEQ ID NO: 5851510 - DNA, 25 bp, Homo sapien
atggaaaatagcgatcgctgccagg

SEQ ID NO: 5851511 - DNA, 25 bp, Homo sapien
taccggtcgatgcaacgagtgatga

SEQ ID NO: 5851512 - DNA, 25 bp, Homo sapien
tcagggttaaagatatctcacgtac

SEQ ID NO: 5851513 - DNA, 25 bp, Homo sapien
gagtgatgaggttcgcaagaacctg

SEQ ID NO: 5851514 - DNA, 25 bp, Homo sapien
gcaagaacctgatggacatgttcag

SEQ ID NO: 5851515 - DNA, 25 bp, Homo sapien
gacatgttcagggatcgccaggcgt

SEQ ID NO: 5851516 - DNA, 25 bp, Homo sapien
gccaggcgttttctgagcatacctg

SEQ ID NO: 5851517 - DNA, 25 bp, Homo sapien
gcggcatggtgcaagttgaataacc

SEQ ID NO: 5851518 - DNA, 25 bp, Homo sapien
gaagatgttcgcgattatcttctat

SEQ ID NO: 5851519 - DNA, 25 bp, Homo sapien
tctatatcttcaggcgcgcggtctg

SEQ ID NO: 5851520 - DNA, 25 bp, Homo sapien
gcaacatttgggccagctaaacatg

SEQ ID NO: 5851521 - DNA, 25 bp, Homo sapien
ccagctaaacatgcttcatcgtcgg

SEQ ID NO: 5851522 - DNA, 25 bp, Homo sapien
ccgggctgccacgaccaagtgacag

SEQ ID NO: 5851523 - DNA, 25 bp, Homo sapien
gaccaagtgacagcaatgctgtttc

SEQ ID NO: 5851524 - DNA, 25 bp, Homo sapien
aatgctgtttcactggttatgcggc

SEQ ID NO: 5851525 - DNA, 25 bp, Homo sapien
atgccggtgaacgtgcaaaacaggc

SEQ ID NO: 5851526 - DNA, 25 bp, Homo sapien
acgtgcaaaacaggctctagcgttc

SEQ ID NO: 5851527 - DNA, 25 bp, Homo sapien
ctctagcgttcgaacgcactgattt

SEQ ID NO: 5851528 - DNA, 25 bp, Homo sapien
tcgttcactcatggaaaatagcgat

SEQ ID NO: 5851529 - DNA, 25 bp, Homo sapien
atttgcctgcattaccggtcgatgc

SEQ ID NO: 5851530 - DNA, 25 bp, Homo sapien
atggaaaatagcgatcgctgccagg

SEQ ID NO: 5851531 - DNA, 25 bp, Homo sapien
taccggtcgatgcaacgagtgatga

SEQ ID NO: 5851532 - DNA, 25 bp, Homo sapien
tcagggttaaagatatctcacgtac

SEQ ID NO: 5851533 - DNA, 25 bp, Homo sapien
gagtgatgaggttcgcaagaacctg

SEQ ID NO: 5851534 - DNA, 25 bp, Homo sapien
gcaagaacctgatggacatgttcag

SEQ ID NO: 5851535 - DNA, 25 bp, Homo sapien
gacatgttcagggatcgccaggcgt

SEQ ID NO: 5851536 - DNA, 25 bp, Homo sapien
gccaggcgttttctgagcatacctg

SEQ ID NO: 5851537 - DNA, 25 bp, Homo sapien
gcggcatggtgcaagttgaataacc

SEQ ID NO: 5851538 - DNA, 25 bp, Homo sapien
gaagatgttcgcgattatcttctat

SEQ ID NO: 5851539 - DNA, 25 bp, Homo sapien
tctatatcttcaggcgcgcggtctg

SEQ ID NO: 5851540 - DNA, 25 bp, Homo sapien
gcaacatttgggccagctaaacatg

SEQ ID NO: 5851541 - DNA, 25 bp, Homo sapien
ccagctaaacatgcttcatcgtcgg

SEQ ID NO: 5851542 - DNA, 25 bp, Homo sapien
ccgggctgccacgaccaagtgacag

SEQ ID NO: 5851543 - DNA, 25 bp, Homo sapien
gaccaagtgacagcaatgctgtttc

SEQ ID NO: 5851544 - DNA, 25 bp, Homo sapien
aatgctgtttcactggttatgcggc

SEQ ID NO: 5851545 - DNA, 25 bp, Homo sapien
atgccggtgaacgtgcaaaacaggc

SEQ ID NO: 5851546 - DNA, 25 bp, Homo sapien
acgtgcaaaacaggctctagcgttc

SEQ ID NO: 5851547 - DNA, 25 bp, Homo sapien
ctctagcgttcgaacgcactgattt

SEQ ID NO: 5851548 - DNA, 25 bp, Homo sapien
tcgttcactcatggaaaatagcgat

SEQ ID NO: 5851549 - DNA, 25 bp, Homo sapien
atttgcctgcattaccggtcgatgc

SEQ ID NO: 5851550 - DNA, 25 bp, Homo sapien
atggaaaatagcgatcgctgccagg

SEQ ID NO: 5851551 - DNA, 25 bp, Homo sapien
taccggtcgatgcaacgagtgatga

SEQ ID NO: 5851552 - DNA, 25 bp, Homo sapien
tcagggttaaagatatctcacgtac

SEQ ID NO: 5851553 - DNA, 25 bp, Homo sapien
gagtgatgaggttcgcaagaacctg

SEQ ID NO: 5851554 - DNA, 25 bp, Homo sapien
gcaagaacctgatggacatgttcag

SEQ ID NO: 5851555 - DNA, 25 bp, Homo sapien
gacatgttcagggatcgccaggcgt

SEQ ID NO: 5851556 - DNA, 25 bp, Homo sapien
gccaggcgttttctgagcatacctg

SEQ ID NO: 5851557 - DNA, 25 bp, Homo sapien
gcggcatggtgcaagttgaataacc

SEQ ID NO: 5851558 - DNA, 25 bp, Homo sapien
gaagatgttcgcgattatcttctat

SEQ ID NO: 5851559 - DNA, 25 bp, Homo sapien
tctatatcttcaggcgcgcggtctg

SEQ ID NO: 5851560 - DNA, 25 bp, Homo sapien
gcaacatttgggccagctaaacatg

SEQ ID NO: 5851561 - DNA, 25 bp, Homo sapien
ccagctaaacatgcttcatcgtcgg

SEQ ID NO: 5851562 - DNA, 25 bp, Homo sapien
ccgggctgccacgaccaagtgacag

SEQ ID NO: 5851563 - DNA, 25 bp, Homo sapien
gaccaagtgacagcaatgctgtttc

SEQ ID NO: 5851564 - DNA, 25 bp, Homo sapien
aatgctgtttcactggttatgcggc

SEQ ID NO: 5851565 - DNA, 25 bp, Homo sapien
atgccggtgaacgtgcaaaacaggc

SEQ ID NO: 5851566 - DNA, 25 bp, Homo sapien
acgtgcaaaacaggctctagcgttc

SEQ ID NO: 5851567 - DNA, 25 bp, Homo sapien
ctctagcgttcgaacgcactgattt

SEQ ID NO: 5851568 - DNA, 25 bp, Homo sapien
tcgttcactcatggaaaatagcgat

SEQ ID NO: 5851569 - DNA, 25 bp, Homo sapien
atttgcctgcattaccggtcgatgc

SEQ ID NO: 5851570 - DNA, 25 bp, Homo sapien
atggaaaatagcgatcgctgccagg

SEQ ID NO: 5851571 - DNA, 25 bp, Homo sapien
taccggtcgatgcaacgagtgatga

SEQ ID NO: 5851572 - DNA, 25 bp, Homo sapien
tcagggttaaagatatctcacgtac

SEQ ID NO: 5851573 - DNA, 25 bp, Homo sapien
gagtgatgaggttcgcaagaacctg

SEQ ID NO: 5851574 - DNA, 25 bp, Homo sapien
gcaagaacctgatggacatgttcag

SEQ ID NO: 5851575 - DNA, 25 bp, Homo sapien
gacatgttcagggatcgccaggcgt

SEQ ID NO: 5851576 - DNA, 25 bp, Homo sapien
gccaggcgttttctgagcatacctg

SEQ ID NO: 5851577 - DNA, 25 bp, Homo sapien
gcggcatggtgcaagttgaataacc

SEQ ID NO: 5851578 - DNA, 25 bp, Homo sapien
gaagatgttcgcgattatcttctat

SEQ ID NO: 5851579 - DNA, 25 bp, Homo sapien
tctatatcttcaggcgcgcggtctg

SEQ ID NO: 5851580 - DNA, 25 bp, Homo sapien
gcaacatttgggccagctaaacatg

SEQ ID NO: 5851581 - DNA, 25 bp, Homo sapien
ccagctaaacatgcttcatcgtcgg

SEQ ID NO: 5851582 - DNA, 25 bp, Homo sapien
ccgggctgccacgaccaagtgacag

SEQ ID NO: 5851583 - DNA, 25 bp, Homo sapien
gaccaagtgacagcaatgctgtttc

SEQ ID NO: 5851584 - DNA, 25 bp, Homo sapien
aatgctgtttcactggttatgcggc

SEQ ID NO: 5851585 - DNA, 25 bp, Homo sapien
atgccggtgaacgtgcaaaacaggc

SEQ ID NO: 5851586 - DNA, 25 bp, Homo sapien
acgtgcaaaacaggctctagcgttc

SEQ ID NO: 5851587 - DNA, 25 bp, Homo sapien
ctctagcgttcgaacgcactgattt

SEQ ID NO: 5851588 - DNA, 25 bp, Homo sapien
tcgttcactcatggaaaatagcgat

SEQ ID NO: 5851589 - DNA, 25 bp, Homo sapien
atttgcctgcattaccggtcgatgc

SEQ ID NO: 5851590 - DNA, 25 bp, Homo sapien
atggaaaatagcgatcgctgccagg

SEQ ID NO: 5851591 - DNA, 25 bp, Homo sapien
taccggtcgatgcaacgagtgatga

SEQ ID NO: 5851592 - DNA, 25 bp, Homo sapien
tcagggttaaagatatctcacgtac

SEQ ID NO: 5851593 - DNA, 25 bp, Homo sapien
gagtgatgaggttcgcaagaacctg

SEQ ID NO: 5851594 - DNA, 25 bp, Homo sapien
gcaagaacctgatggacatgttcag

SEQ ID NO: 5851595 - DNA, 25 bp, Homo sapien
gacatgttcagggatcgccaggcgt

SEQ ID NO: 5851596 - DNA, 25 bp, Homo sapien
gccaggcgttttctgagcatacctg

SEQ ID NO: 5851597 - DNA, 25 bp, Homo sapien
gcggcatggtgcaagttgaataacc

SEQ ID NO: 5851598 - DNA, 25 bp, Homo sapien
gaagatgttcgcgattatcttctat

SEQ ID NO: 5851599 - DNA, 25 bp, Homo sapien
tctatatcttcaggcgcgcggtctg

SEQ ID NO: 5851600 - DNA, 25 bp, Homo sapien
gcaacatttgggccagctaaacatg

SEQ ID NO: 5851601 - DNA, 25 bp, Homo sapien
ccagctaaacatgcttcatcgtcgg

SEQ ID NO: 5851602 - DNA, 25 bp, Homo sapien
ccgggctgccacgaccaagtgacag

SEQ ID NO: 5851603 - DNA, 25 bp, Homo sapien
gaccaagtgacagcaatgctgtttc

SEQ ID NO: 5851604 - DNA, 25 bp, Homo sapien
aatgctgtttcactggttatgcggc

SEQ ID NO: 5851605 - DNA, 25 bp, Homo sapien
atgccggtgaacgtgcaaaacaggc

SEQ ID NO: 5851606 - DNA, 25 bp, Homo sapien
acgtgcaaaacaggctctagcgttc

SEQ ID NO: 5851607 - DNA, 25 bp, Homo sapien
ctctagcgttcgaacgcactgattt

SEQ ID NO: 5851608 - DNA, 25 bp, Homo sapien
tcgttcactcatggaaaatagcgat

SEQ ID NO: 5851609 - DNA, 25 bp, Homo sapien
atttgcctgcattaccggtcgatgc

SEQ ID NO: 5851610 - DNA, 25 bp, Homo sapien
atggaaaatagcgatcgctgccagg

SEQ ID NO: 5851611 - DNA, 25 bp, Homo sapien
taccggtcgatgcaacgagtgatga

SEQ ID NO: 5851612 - DNA, 25 bp, Homo sapien
tcagggttaaagatatctcacgtac

SEQ ID NO: 5851613 - DNA, 25 bp, Homo sapien
gagtgatgaggttcgcaagaacctg

SEQ ID NO: 5851614 - DNA, 25 bp, Homo sapien
gcaagaacctgatggacatgttcag

SEQ ID NO: 5851615 - DNA, 25 bp, Homo sapien
gacatgttcagggatcgccaggcgt

SEQ ID NO: 5851616 - DNA, 25 bp, Homo sapien
gccaggcgttttctgagcatacctg

SEQ ID NO: 5851617 - DNA, 25 bp, Homo sapien
gcggcatggtgcaagttgaataacc

SEQ ID NO: 5851618 - DNA, 25 bp, Homo sapien
gaagatgttcgcgattatcttctat

SEQ ID NO: 5851619 - DNA, 25 bp, Homo sapien
tctatatcttcaggcgcgcggtctg

SEQ ID NO: 5851620 - DNA, 25 bp, Homo sapien
gcaacatttgggccagctaaacatg

SEQ ID NO: 5851621 - DNA, 25 bp, Homo sapien
ccagctaaacatgcttcatcgtcgg

SEQ ID NO: 5851622 - DNA, 25 bp, Homo sapien
ccgggctgccacgaccaagtgacag

SEQ ID NO: 5851623 - DNA, 25 bp, Homo sapien
gaccaagtgacagcaatgctgtttc

SEQ ID NO: 5851624 - DNA, 25 bp, Homo sapien
aatgctgtttcactggttatgcggc

SEQ ID NO: 5851625 - DNA, 25 bp, Homo sapien
atgccggtgaacgtgcaaaacaggc

SEQ ID NO: 5851626 - DNA, 25 bp, Homo sapien
acgtgcaaaacaggctctagcgttc

SEQ ID NO: 5851627 - DNA, 25 bp, Homo sapien
ctctagcgttcgaacgcactgattt

SEQ ID NO: 5851628 - DNA, 25 bp, Homo sapien
tcgttcactcatggaaaatagcgat

SEQ ID NO: 5851629 - DNA, 25 bp, Homo sapien
atttgcctgcattaccggtcgatgc

SEQ ID NO: 5851630 - DNA, 25 bp, Homo sapien
atggaaaatagcgatcgctgccagg

SEQ ID NO: 5851631 - DNA, 25 bp, Homo sapien
taccggtcgatgcaacgagtgatga

SEQ ID NO: 5851632 - DNA, 25 bp, Homo sapien
tcagggttaaagatatctcacgtac

SEQ ID NO: 5851633 - DNA, 25 bp, Homo sapien
gagtgatgaggttcgcaagaacctg

SEQ ID NO: 5851634 - DNA, 25 bp, Homo sapien
gcaagaacctgatggacatgttcag

SEQ ID NO: 5851635 - DNA, 25 bp, Homo sapien
gacatgttcagggatcgccaggcgt

SEQ ID NO: 5851636 - DNA, 25 bp, Homo sapien
gccaggcgttttctgagcatacctg

SEQ ID NO: 5851637 - DNA, 25 bp, Homo sapien
gcggcatggtgcaagttgaataacc

SEQ ID NO: 5851638 - DNA, 25 bp, Homo sapien
gaagatgttcgcgattatcttctat

SEQ ID NO: 5851639 - DNA, 25 bp, Homo sapien
tctatatcttcaggcgcgcggtctg

SEQ ID NO: 5851640 - DNA, 25 bp, Homo sapien
gcaacatttgggccagctaaacatg

SEQ ID NO: 5851641 - DNA, 25 bp, Homo sapien
ccagctaaacatgcttcatcgtcgg

SEQ ID NO: 5851642 - DNA, 25 bp, Homo sapien
ccgggctgccacgaccaagtgacag

SEQ ID NO: 5851643 - DNA, 25 bp, Homo sapien
gaccaagtgacagcaatgctgtttc

SEQ ID NO: 5851644 - DNA, 25 bp, Homo sapien
aatgctgtttcactggttatgcggc

SEQ ID NO: 5851645 - DNA, 25 bp, Homo sapien
atgccggtgaacgtgcaaaacaggc

SEQ ID NO: 5851646 - DNA, 25 bp, Homo sapien
acgtgcaaaacaggctctagcgttc

SEQ ID NO: 5851647 - DNA, 25 bp, Homo sapien
ctctagcgttcgaacgcactgattt

SEQ ID NO: 5851648 - DNA, 25 bp, Homo sapien
tcgttcactcatggaaaatagcgat

SEQ ID NO: 5851649 - DNA, 25 bp, Homo sapien
atttgcctgcattaccggtcgatgc

SEQ ID NO: 5851650 - DNA, 25 bp, Homo sapien
atggaaaatagcgatcgctgccagg

SEQ ID NO: 5851651 - DNA, 25 bp, Homo sapien
taccggtcgatgcaacgagtgatga

SEQ ID NO: 5851652 - DNA, 25 bp, Homo sapien
tcagggttaaagatatctcacgtac

SEQ ID NO: 5851653 - DNA, 25 bp, Homo sapien
gagtgatgaggttcgcaagaacctg

SEQ ID NO: 5851654 - DNA, 25 bp, Homo sapien
gcaagaacctgatggacatgttcag

SEQ ID NO: 5851655 - DNA, 25 bp, Homo sapien
gacatgttcagggatcgccaggcgt

SEQ ID NO: 5851656 - DNA, 25 bp, Homo sapien
gccaggcgttttctgagcatacctg

SEQ ID NO: 5851657 - DNA, 25 bp, Homo sapien
gcggcatggtgcaagttgaataacc

SEQ ID NO: 5851658 - DNA, 25 bp, Homo sapien
gaagatgttcgcgattatcttctat

SEQ ID NO: 5851659 - DNA, 25 bp, Homo sapien
tctatatcttcaggcgcgcggtctg

SEQ ID NO: 5851660 - DNA, 25 bp, Homo sapien
gcaacatttgggccagctaaacatg

SEQ ID NO: 5851661 - DNA, 25 bp, Homo sapien
ccagctaaacatgcttcatcgtcgg

SEQ ID NO: 5851662 - DNA, 25 bp, Homo sapien
ccgggctgccacgaccaagtgacag

SEQ ID NO: 5851663 - DNA, 25 bp, Homo sapien
gaccaagtgacagcaatgctgtttc

SEQ ID NO: 5851664 - DNA, 25 bp, Homo sapien
aatgctgtttcactggttatgcggc

SEQ ID NO: 5851665 - DNA, 25 bp, Homo sapien
atgccggtgaacgtgcaaaacaggc

SEQ ID NO: 5851666 - DNA, 25 bp, Homo sapien
acgtgcaaaacaggctctagcgttc

SEQ ID NO: 5851667 - DNA, 25 bp, Homo sapien
ctctagcgttcgaacgcactgattt

SEQ ID NO: 5851668 - DNA, 25 bp, Homo sapien
tcgttcactcatggaaaatagcgat

SEQ ID NO: 5851669 - DNA, 25 bp, Homo sapien
atttgcctgcattaccggtcgatgc

SEQ ID NO: 5851670 - DNA, 25 bp, Homo sapien
atggaaaatagcgatcgctgccagg

SEQ ID NO: 5851671 - DNA, 25 bp, Homo sapien
taccggtcgatgcaacgagtgatga

SEQ ID NO: 5851672 - DNA, 25 bp, Homo sapien
tcagggttaaagatatctcacgtac

SEQ ID NO: 5851673 - DNA, 25 bp, Homo sapien
gagtgatgaggttcgcaagaacctg

SEQ ID NO: 5851674 - DNA, 25 bp, Homo sapien
gcaagaacctgatggacatgttcag

SEQ ID NO: 5851675 - DNA, 25 bp, Homo sapien
gacatgttcagggatcgccaggcgt

SEQ ID NO: 5851676 - DNA, 25 bp, Homo sapien
gccaggcgttttctgagcatacctg

SEQ ID NO: 5851677 - DNA, 25 bp, Homo sapien
gcggcatggtgcaagttgaataacc

SEQ ID NO: 5851678 - DNA, 25 bp, Homo sapien
gaagatgttcgcgattatcttctat

SEQ ID NO: 5851679 - DNA, 25 bp, Homo sapien
tctatatcttcaggcgcgcggtctg

SEQ ID NO: 5851680 - DNA, 25 bp, Homo sapien
gcaacatttgggccagctaaacatg

SEQ ID NO: 5851681 - DNA, 25 bp, Homo sapien
ccagctaaacatgcttcatcgtcgg

SEQ ID NO: 5851682 - DNA, 25 bp, Homo sapien
ccgggctgccacgaccaagtgacag

SEQ ID NO: 5851683 - DNA, 25 bp, Homo sapien
gaccaagtgacagcaatgctgtttc

SEQ ID NO: 5851684 - DNA, 25 bp, Homo sapien
aatgctgtttcactggttatgcggc

SEQ ID NO: 5851685 - DNA, 25 bp, Homo sapien
atgccggtgaacgtgcaaaacaggc

SEQ ID NO: 5851686 - DNA, 25 bp, Homo sapien
acgtgcaaaacaggctctagcgttc

SEQ ID NO: 5851687 - DNA, 25 bp, Homo sapien
ctctagcgttcgaacgcactgattt

SEQ ID NO: 5851688 - DNA, 25 bp, Homo sapien
tcgttcactcatggaaaatagcgat

SEQ ID NO: 5851689 - DNA, 25 bp, Homo sapien
atttgcctgcattaccggtcgatgc

SEQ ID NO: 5851690 - DNA, 25 bp, Homo sapien
atggaaaatagcgatcgctgccagg

SEQ ID NO: 5851691 - DNA, 25 bp, Homo sapien
taccggtcgatgcaacgagtgatga

SEQ ID NO: 5851692 - DNA, 25 bp, Homo sapien
tcagggttaaagatatctcacgtac

SEQ ID NO: 5851693 - DNA, 25 bp, Homo sapien
gagtgatgaggttcgcaagaacctg

SEQ ID NO: 5851694 - DNA, 25 bp, Homo sapien
gcaagaacctgatggacatgttcag

SEQ ID NO: 5851695 - DNA, 25 bp, Homo sapien
gacatgttcagggatcgccaggcgt

SEQ ID NO: 5851696 - DNA, 25 bp, Homo sapien
gccaggcgttttctgagcatacctg

SEQ ID NO: 5851697 - DNA, 25 bp, Homo sapien
gcggcatggtgcaagttgaataacc

SEQ ID NO: 5851698 - DNA, 25 bp, Homo sapien
gaagatgttcgcgattatcttctat

SEQ ID NO: 5851699 - DNA, 25 bp, Homo sapien
tctatatcttcaggcgcgcggtctg

SEQ ID NO: 5851700 - DNA, 25 bp, Homo sapien
gcaacatttgggccagctaaacatg

SEQ ID NO: 5851701 - DNA, 25 bp, Homo sapien
ccagctaaacatgcttcatcgtcgg

SEQ ID NO: 5851702 - DNA, 25 bp, Homo sapien
ccgggctgccacgaccaagtgacag

SEQ ID NO: 5851703 - DNA, 25 bp, Homo sapien
gaccaagtgacagcaatgctgtttc

SEQ ID NO: 5851704 - DNA, 25 bp, Homo sapien
aatgctgtttcactggttatgcggc

SEQ ID NO: 5851705 - DNA, 25 bp, Homo sapien
atgccggtgaacgtgcaaaacaggc

SEQ ID NO: 5851706 - DNA, 25 bp, Homo sapien
acgtgcaaaacaggctctagcgttc

SEQ ID NO: 5851707 - DNA, 25 bp, Homo sapien
ctctagcgttcgaacgcactgattt

SEQ ID NO: 5851708 - DNA, 25 bp, Homo sapien
tcgttcactcatggaaaatagcgat

SEQ ID NO: 5851709 - DNA, 25 bp, Homo sapien
atttgcctgcattaccggtcgatgc

SEQ ID NO: 5851710 - DNA, 25 bp, Homo sapien
atggaaaatagcgatcgctgccagg

SEQ ID NO: 5851711 - DNA, 25 bp, Homo sapien
taccggtcgatgcaacgagtgatga

SEQ ID NO: 5851712 - DNA, 25 bp, Homo sapien
tcagggttaaagatatctcacgtac

SEQ ID NO: 5851713 - DNA, 25 bp, Homo sapien
gagtgatgaggttcgcaagaacctg

SEQ ID NO: 5851714 - DNA, 25 bp, Homo sapien
gcaagaacctgatggacatgttcag

SEQ ID NO: 5851715 - DNA, 25 bp, Homo sapien
gacatgttcagggatcgccaggcgt

SEQ ID NO: 5851716 - DNA, 25 bp, Homo sapien
gccaggcgttttctgagcatacctg

SEQ ID NO: 5851717 - DNA, 25 bp, Homo sapien
gcggcatggtgcaagttgaataacc

SEQ ID NO: 5851718 - DNA, 25 bp, Homo sapien
gaagatgttcgcgattatcttctat

SEQ ID NO: 5851719 - DNA, 25 bp, Homo sapien
tctatatcttcaggcgcgcggtctg

SEQ ID NO: 5851720 - DNA, 25 bp, Homo sapien
gcaacatttgggccagctaaacatg

SEQ ID NO: 5851721 - DNA, 25 bp, Homo sapien
ccagctaaacatgcttcatcgtcgg

SEQ ID NO: 5851722 - DNA, 25 bp, Homo sapien
ccgggctgccacgaccaagtgacag

SEQ ID NO: 5851723 - DNA, 25 bp, Homo sapien
gaccaagtgacagcaatgctgtttc

SEQ ID NO: 5851724 - DNA, 25 bp, Homo sapien
aatgctgtttcactggttatgcggc

SEQ ID NO: 5851725 - DNA, 25 bp, Homo sapien
atgccggtgaacgtgcaaaacaggc

SEQ ID NO: 5851726 - DNA, 25 bp, Homo sapien
acgtgcaaaacaggctctagcgttc

SEQ ID NO: 5851727 - DNA, 25 bp, Homo sapien
ctctagcgttcgaacgcactgattt

SEQ ID NO: 5851728 - DNA, 25 bp, Homo sapien
tcgttcactcatggaaaatagcgat

SEQ ID NO: 5851729 - DNA, 25 bp, Homo sapien
atttgcctgcattaccggtcgatgc

SEQ ID NO: 5851730 - DNA, 25 bp, Homo sapien
atggaaaatagcgatcgctgccagg

SEQ ID NO: 5851731 - DNA, 25 bp, Homo sapien
taccggtcgatgcaacgagtgatga

SEQ ID NO: 5851732 - DNA, 25 bp, Homo sapien
tcagggttaaagatatctcacgtac

SEQ ID NO: 5851733 - DNA, 25 bp, Homo sapien
gagtgatgaggttcgcaagaacctg

SEQ ID NO: 5851734 - DNA, 25 bp, Homo sapien
gcaagaacctgatggacatgttcag

SEQ ID NO: 5851735 - DNA, 25 bp, Homo sapien
gacatgttcagggatcgccaggcgt

SEQ ID NO: 5851736 - DNA, 25 bp, Homo sapien
gccaggcgttttctgagcatacctg

SEQ ID NO: 5851737 - DNA, 25 bp, Homo sapien
gcggcatggtgcaagttgaataacc

SEQ ID NO: 5851738 - DNA, 25 bp, Homo sapien
gaagatgttcgcgattatcttctat

SEQ ID NO: 5851739 - DNA, 25 bp, Homo sapien
tctatatcttcaggcgcgcggtctg

SEQ ID NO: 5851740 - DNA, 25 bp, Homo sapien
gcaacatttgggccagctaaacatg

SEQ ID NO: 5851741 - DNA, 25 bp, Homo sapien
ccagctaaacatgcttcatcgtcgg

SEQ ID NO: 5851742 - DNA, 25 bp, Homo sapien
ccgggctgccacgaccaagtgacag

SEQ ID NO: 5851743 - DNA, 25 bp, Homo sapien
gaccaagtgacagcaatgctgtttc

SEQ ID NO: 5851744 - DNA, 25 bp, Homo sapien
aatgctgtttcactggttatgcggc

SEQ ID NO: 5851745 - DNA, 25 bp, Homo sapien
atgccggtgaacgtgcaaaacaggc

SEQ ID NO: 5851746 - DNA, 25 bp, Homo sapien
acgtgcaaaacaggctctagcgttc

SEQ ID NO: 5851747 - DNA, 25 bp, Homo sapien
ctctagcgttcgaacgcactgattt

SEQ ID NO: 5851748 - DNA, 25 bp, Homo sapien
tcgttcactcatggaaaatagcgat

SEQ ID NO: 5851749 - DNA, 25 bp, Homo sapien
atttgcctgcattaccggtcgatgc

SEQ ID NO: 5851750 - DNA, 25 bp, Homo sapien
atggaaaatagcgatcgctgccagg

SEQ ID NO: 5851751 - DNA, 25 bp, Homo sapien
taccggtcgatgcaacgagtgatga

SEQ ID NO: 5851752 - DNA, 25 bp, Homo sapien
tcagggttaaagatatctcacgtac

SEQ ID NO: 5851753 - DNA, 25 bp, Homo sapien
gagtgatgaggttcgcaagaacctg

SEQ ID NO: 5851754 - DNA, 25 bp, Homo sapien
gcaagaacctgatggacatgttcag

SEQ ID NO: 5851755 - DNA, 25 bp, Homo sapien
gacatgttcagggatcgccaggcgt

SEQ ID NO: 5851756 - DNA, 25 bp, Homo sapien
gccaggcgttttctgagcatacctg

SEQ ID NO: 5851757 - DNA, 25 bp, Homo sapien
gcggcatggtgcaagttgaataacc

SEQ ID NO: 5851758 - DNA, 25 bp, Homo sapien
gaagatgttcgcgattatcttctat

SEQ ID NO: 5851759 - DNA, 25 bp, Homo sapien
tctatatcttcaggcgcgcggtctg

SEQ ID NO: 5851760 - DNA, 25 bp, Homo sapien
gcaacatttgggccagctaaacatg

SEQ ID NO: 5851761 - DNA, 25 bp, Homo sapien
ccagctaaacatgcttcatcgtcgg

SEQ ID NO: 5851762 - DNA, 25 bp, Homo sapien
ccgggctgccacgaccaagtgacag

SEQ ID NO: 5851763 - DNA, 25 bp, Homo sapien
gaccaagtgacagcaatgctgtttc

SEQ ID NO: 5851764 - DNA, 25 bp, Homo sapien
aatgctgtttcactggttatgcggc

SEQ ID NO: 5851765 - DNA, 25 bp, Homo sapien
atgccggtgaacgtgcaaaacaggc

SEQ ID NO: 5851766 - DNA, 25 bp, Homo sapien
acgtgcaaaacaggctctagcgttc

SEQ ID NO: 5851767 - DNA, 25 bp, Homo sapien
ctctagcgttcgaacgcactgattt

SEQ ID NO: 5851768 - DNA, 25 bp, Homo sapien
tcgttcactcatggaaaatagcgat

SEQ ID NO: 5851769 - DNA, 25 bp, Homo sapien
atttgcctgcattaccggtcgatgc

SEQ ID NO: 5851770 - DNA, 25 bp, Homo sapien
atggaaaatagcgatcgctgccagg

SEQ ID NO: 5851771 - DNA, 25 bp, Homo sapien
taccggtcgatgcaacgagtgatga

SEQ ID NO: 5851772 - DNA, 25 bp, Homo sapien
tcagggttaaagatatctcacgtac

SEQ ID NO: 5851773 - DNA, 25 bp, Homo sapien
gagtgatgaggttcgcaagaacctg

SEQ ID NO: 5851774 - DNA, 25 bp, Homo sapien
gcaagaacctgatggacatgttcag

SEQ ID NO: 5851775 - DNA, 25 bp, Homo sapien
gacatgttcagggatcgccaggcgt

SEQ ID NO: 5851776 - DNA, 25 bp, Homo sapien
gccaggcgttttctgagcatacctg

SEQ ID NO: 5851777 - DNA, 25 bp, Homo sapien
gcggcatggtgcaagttgaataacc

SEQ ID NO: 5851778 - DNA, 25 bp, Homo sapien
gaagatgttcgcgattatcttctat

SEQ ID NO: 5851779 - DNA, 25 bp, Homo sapien
tctatatcttcaggcgcgcggtctg

SEQ ID NO: 5851780 - DNA, 25 bp, Homo sapien
gcaacatttgggccagctaaacatg

SEQ ID NO: 5851781 - DNA, 25 bp, Homo sapien
ccagctaaacatgcttcatcgtcgg

SEQ ID NO: 5851782 - DNA, 25 bp, Homo sapien
ccgggctgccacgaccaagtgacag

SEQ ID NO: 5851783 - DNA, 25 bp, Homo sapien
gaccaagtgacagcaatgctgtttc

SEQ ID NO: 5851784 - DNA, 25 bp, Homo sapien
aatgctgtttcactggttatgcggc

SEQ ID NO: 5851785 - DNA, 25 bp, Homo sapien
atgccggtgaacgtgcaaaacaggc

SEQ ID NO: 5851786 - DNA, 25 bp, Homo sapien
acgtgcaaaacaggctctagcgttc

SEQ ID NO: 5851787 - DNA, 25 bp, Homo sapien
ctctagcgttcgaacgcactgattt

SEQ ID NO: 5851788 - DNA, 25 bp, Homo sapien
tcgttcactcatggaaaatagcgat

SEQ ID NO: 5851789 - DNA, 25 bp, Homo sapien
atttgcctgcattaccggtcgatgc

SEQ ID NO: 5851790 - DNA, 25 bp, Homo sapien
atggaaaatagcgatcgctgccagg

SEQ ID NO: 5851791 - DNA, 25 bp, Homo sapien
taccggtcgatgcaacgagtgatga

SEQ ID NO: 5851792 - DNA, 25 bp, Homo sapien
tcagggttaaagatatctcacgtac

SEQ ID NO: 5851793 - DNA, 25 bp, Homo sapien
gagtgatgaggttcgcaagaacctg

SEQ ID NO: 5851794 - DNA, 25 bp, Homo sapien
gcaagaacctgatggacatgttcag

SEQ ID NO: 5851795 - DNA, 25 bp, Homo sapien
gacatgttcagggatcgccaggcgt

SEQ ID NO: 5851796 - DNA, 25 bp, Homo sapien
gccaggcgttttctgagcatacctg

SEQ ID NO: 5851797 - DNA, 25 bp, Homo sapien
gcggcatggtgcaagttgaataacc

SEQ ID NO: 5851798 - DNA, 25 bp, Homo sapien
gaagatgttcgcgattatcttctat

SEQ ID NO: 5851799 - DNA, 25 bp, Homo sapien
tctatatcttcaggcgcgcggtctg

SEQ ID NO: 5851800 - DNA, 25 bp, Homo sapien
gcaacatttgggccagctaaacatg

SEQ ID NO: 5851801 - DNA, 25 bp, Homo sapien
ccagctaaacatgcttcatcgtcgg

SEQ ID NO: 5851802 - DNA, 25 bp, Homo sapien
ccgggctgccacgaccaagtgacag

SEQ ID NO: 5851803 - DNA, 25 bp, Homo sapien
gaccaagtgacagcaatgctgtttc

SEQ ID NO: 5851804 - DNA, 25 bp, Homo sapien
aatgctgtttcactggttatgcggc

SEQ ID NO: 5851805 - DNA, 25 bp, Homo sapien
atgccggtgaacgtgcaaaacaggc

SEQ ID NO: 5851806 - DNA, 25 bp, Homo sapien
acgtgcaaaacaggctctagcgttc

SEQ ID NO: 5851807 - DNA, 25 bp, Homo sapien
ctctagcgttcgaacgcactgattt

SEQ ID NO: 5851808 - DNA, 25 bp, Homo sapien
tcgttcactcatggaaaatagcgat

SEQ ID NO: 5851809 - DNA, 25 bp, Homo sapien
atttgcctgcattaccggtcgatgc

SEQ ID NO: 5851810 - DNA, 25 bp, Homo sapien
atggaaaatagcgatcgctgccagg

SEQ ID NO: 5851811 - DNA, 25 bp, Homo sapien
taccggtcgatgcaacgagtgatga

SEQ ID NO: 5851812 - DNA, 25 bp, Homo sapien
tcagggttaaagatatctcacgtac

SEQ ID NO: 5851813 - DNA, 25 bp, Homo sapien
gagtgatgaggttcgcaagaacctg

SEQ ID NO: 5851814 - DNA, 25 bp, Homo sapien
gcaagaacctgatggacatgttcag

SEQ ID NO: 5851815 - DNA, 25 bp, Homo sapien
gacatgttcagggatcgccaggcgt

SEQ ID NO: 5851816 - DNA, 25 bp, Homo sapien
gccaggcgttttctgagcatacctg

SEQ ID NO: 5851817 - DNA, 25 bp, Homo sapien
gcggcatggtgcaagttgaataacc

SEQ ID NO: 5851818 - DNA, 25 bp, Homo sapien
gaagatgttcgcgattatcttctat

SEQ ID NO: 5851819 - DNA, 25 bp, Homo sapien
tctatatcttcaggcgcgcggtctg

SEQ ID NO: 5851820 - DNA, 25 bp, Homo sapien
gcaacatttgggccagctaaacatg

SEQ ID NO: 5851821 - DNA, 25 bp, Homo sapien
ccagctaaacatgcttcatcgtcgg

SEQ ID NO: 5851822 - DNA, 25 bp, Homo sapien
ccgggctgccacgaccaagtgacag

SEQ ID NO: 5851823 - DNA, 25 bp, Homo sapien
gaccaagtgacagcaatgctgtttc

SEQ ID NO: 5851824 - DNA, 25 bp, Homo sapien
aatgctgtttcactggttatgcggc

SEQ ID NO: 5851825 - DNA, 25 bp, Homo sapien
atgccggtgaacgtgcaaaacaggc

SEQ ID NO: 5851826 - DNA, 25 bp, Homo sapien
acgtgcaaaacaggctctagcgttc

SEQ ID NO: 5851827 - DNA, 25 bp, Homo sapien
ctctagcgttcgaacgcactgattt

SEQ ID NO: 5851828 - DNA, 25 bp, Homo sapien
tcgttcactcatggaaaatagcgat

SEQ ID NO: 5851829 - DNA, 25 bp, Homo sapien
atttgcctgcattaccggtcgatgc

SEQ ID NO: 5851830 - DNA, 25 bp, Homo sapien
atggaaaatagcgatcgctgccagg

SEQ ID NO: 5851831 - DNA, 25 bp, Homo sapien
taccggtcgatgcaacgagtgatga

SEQ ID NO: 5851832 - DNA, 25 bp, Homo sapien
tcagggttaaagatatctcacgtac

SEQ ID NO: 5851833 - DNA, 25 bp, Homo sapien
gagtgatgaggttcgcaagaacctg

SEQ ID NO: 5851834 - DNA, 25 bp, Homo sapien
gcaagaacctgatggacatgttcag

SEQ ID NO: 5851835 - DNA, 25 bp, Homo sapien
gacatgttcagggatcgccaggcgt

SEQ ID NO: 5851836 - DNA, 25 bp, Homo sapien
gccaggcgttttctgagcatacctg

SEQ ID NO: 5851837 - DNA, 25 bp, Homo sapien
gcggcatggtgcaagttgaataacc

SEQ ID NO: 5851838 - DNA, 25 bp, Homo sapien
gaagatgttcgcgattatcttctat

SEQ ID NO: 5851839 - DNA, 25 bp, Homo sapien
tctatatcttcaggcgcgcggtctg

SEQ ID NO: 5851840 - DNA, 25 bp, Homo sapien
gcaacatttgggccagctaaacatg

SEQ ID NO: 5851841 - DNA, 25 bp, Homo sapien
ccagctaaacatgcttcatcgtcgg

SEQ ID NO: 5851842 - DNA, 25 bp, Homo sapien
ccgggctgccacgaccaagtgacag

SEQ ID NO: 5851843 - DNA, 25 bp, Homo sapien
gaccaagtgacagcaatgctgtttc

SEQ ID NO: 5851844 - DNA, 25 bp, Homo sapien
aatgctgtttcactggttatgcggc

SEQ ID NO: 5851845 - DNA, 25 bp, Homo sapien
atgccggtgaacgtgcaaaacaggc

SEQ ID NO: 5851846 - DNA, 25 bp, Homo sapien
acgtgcaaaacaggctctagcgttc

SEQ ID NO: 5851847 - DNA, 25 bp, Homo sapien
ctctagcgttcgaacgcactgattt

SEQ ID NO: 5851848 - DNA, 25 bp, Homo sapien
tcgttcactcatggaaaatagcgat

SEQ ID NO: 5851849 - DNA, 25 bp, Homo sapien
atttgcctgcattaccggtcgatgc

SEQ ID NO: 5851850 - DNA, 25 bp, Homo sapien
atggaaaatagcgatcgctgccagg

SEQ ID NO: 5851851 - DNA, 25 bp, Homo sapien
taccggtcgatgcaacgagtgatga

SEQ ID NO: 5851852 - DNA, 25 bp, Homo sapien
tcagggttaaagatatctcacgtac

SEQ ID NO: 5851853 - DNA, 25 bp, Homo sapien
gagtgatgaggttcgcaagaacctg

SEQ ID NO: 5851854 - DNA, 25 bp, Homo sapien
gcaagaacctgatggacatgttcag

SEQ ID NO: 5851855 - DNA, 25 bp, Homo sapien
gacatgttcagggatcgccaggcgt

SEQ ID NO: 5851856 - DNA, 25 bp, Homo sapien
gccaggcgttttctgagcatacctg

SEQ ID NO: 5851857 - DNA, 25 bp, Homo sapien
gcggcatggtgcaagttgaataacc

SEQ ID NO: 5851858 - DNA, 25 bp, Homo sapien
gaagatgttcgcgattatcttctat

SEQ ID NO: 5851859 - DNA, 25 bp, Homo sapien
tctatatcttcaggcgcgcggtctg

SEQ ID NO: 5851860 - DNA, 25 bp, Homo sapien
gcaacatttgggccagctaaacatg

SEQ ID NO: 5851861 - DNA, 25 bp, Homo sapien
ccagctaaacatgcttcatcgtcgg

SEQ ID NO: 5851862 - DNA, 25 bp, Homo sapien
ccgggctgccacgaccaagtgacag

SEQ ID NO: 5851863 - DNA, 25 bp, Homo sapien
gaccaagtgacagcaatgctgtttc

SEQ ID NO: 5851864 - DNA, 25 bp, Homo sapien
aatgctgtttcactggttatgcggc

SEQ ID NO: 5851865 - DNA, 25 bp, Homo sapien
atgccggtgaacgtgcaaaacaggc

SEQ ID NO: 5851866 - DNA, 25 bp, Homo sapien
acgtgcaaaacaggctctagcgttc

SEQ ID NO: 5851867 - DNA, 25 bp, Homo sapien
ctctagcgttcgaacgcactgattt

SEQ ID NO: 5851868 - DNA, 25 bp, Homo sapien
tcgttcactcatggaaaatagcgat

SEQ ID NO: 5851869 - DNA, 25 bp, Homo sapien
atttgcctgcattaccggtcgatgc

SEQ ID NO: 5851870 - DNA, 25 bp, Homo sapien
atggaaaatagcgatcgctgccagg

SEQ ID NO: 5851871 - DNA, 25 bp, Homo sapien
taccggtcgatgcaacgagtgatga

SEQ ID NO: 5851872 - DNA, 25 bp, Homo sapien
tcagggttaaagatatctcacgtac

SEQ ID NO: 5851873 - DNA, 25 bp, Homo sapien
gagtgatgaggttcgcaagaacctg

SEQ ID NO: 5851874 - DNA, 25 bp, Homo sapien
gcaagaacctgatggacatgttcag

SEQ ID NO: 5851875 - DNA, 25 bp, Homo sapien
gacatgttcagggatcgccaggcgt

SEQ ID NO: 5851876 - DNA, 25 bp, Homo sapien
gccaggcgttttctgagcatacctg

SEQ ID NO: 5851877 - DNA, 25 bp, Homo sapien
gcggcatggtgcaagttgaataacc

SEQ ID NO: 5851878 - DNA, 25 bp, Homo sapien
gaagatgttcgcgattatcttctat

SEQ ID NO: 5851879 - DNA, 25 bp, Homo sapien
tctatatcttcaggcgcgcggtctg

SEQ ID NO: 5851880 - DNA, 25 bp, Homo sapien
gcaacatttgggccagctaaacatg

SEQ ID NO: 5851881 - DNA, 25 bp, Homo sapien
ccagctaaacatgcttcatcgtcgg

SEQ ID NO: 5851882 - DNA, 25 bp, Homo sapien
ccgggctgccacgaccaagtgacag

SEQ ID NO: 5851883 - DNA, 25 bp, Homo sapien
gaccaagtgacagcaatgctgtttc

SEQ ID NO: 5851884 - DNA, 25 bp, Homo sapien
aatgctgtttcactggttatgcggc

SEQ ID NO: 5851885 - DNA, 25 bp, Homo sapien
atgccggtgaacgtgcaaaacaggc

SEQ ID NO: 5851886 - DNA, 25 bp, Homo sapien
acgtgcaaaacaggctctagcgttc

SEQ ID NO: 5851887 - DNA, 25 bp, Homo sapien
ctctagcgttcgaacgcactgattt

SEQ ID NO: 5851888 - DNA, 25 bp, Homo sapien
tcgttcactcatggaaaatagcgat

SEQ ID NO: 5851889 - DNA, 25 bp, Homo sapien
atttgcctgcattaccggtcgatgc

SEQ ID NO: 5851890 - DNA, 25 bp, Homo sapien
atggaaaatagcgatcgctgccagg

SEQ ID NO: 5851891 - DNA, 25 bp, Homo sapien
taccggtcgatgcaacgagtgatga

SEQ ID NO: 5851892 - DNA, 25 bp, Homo sapien
tcagggttaaagatatctcacgtac

SEQ ID NO: 5851893 - DNA, 25 bp, Homo sapien
gagtgatgaggttcgcaagaacctg

SEQ ID NO: 5851894 - DNA, 25 bp, Homo sapien
gcaagaacctgatggacatgttcag

SEQ ID NO: 5851895 - DNA, 25 bp, Homo sapien
gacatgttcagggatcgccaggcgt

SEQ ID NO: 5851896 - DNA, 25 bp, Homo sapien
gccaggcgttttctgagcatacctg

SEQ ID NO: 5851897 - DNA, 25 bp, Homo sapien
gcggcatggtgcaagttgaataacc

SEQ ID NO: 5851898 - DNA, 25 bp, Homo sapien
gaagatgttcgcgattatcttctat

SEQ ID NO: 5851899 - DNA, 25 bp, Homo sapien
tctatatcttcaggcgcgcggtctg

SEQ ID NO: 5851900 - DNA, 25 bp, Homo sapien
gcaacatttgggccagctaaacatg

SEQ ID NO: 5851901 - DNA, 25 bp, Homo sapien
ccagctaaacatgcttcatcgtcgg

SEQ ID NO: 5851902 - DNA, 25 bp, Homo sapien
ccgggctgccacgaccaagtgacag

SEQ ID NO: 5851903 - DNA, 25 bp, Homo sapien
gaccaagtgacagcaatgctgtttc

SEQ ID NO: 5851904 - DNA, 25 bp, Homo sapien
aatgctgtttcactggttatgcggc

SEQ ID NO: 5851905 - DNA, 25 bp, Homo sapien
atgccggtgaacgtgcaaaacaggc

SEQ ID NO: 5851906 - DNA, 25 bp, Homo sapien
acgtgcaaaacaggctctagcgttc

SEQ ID NO: 5851907 - DNA, 25 bp, Homo sapien
ctctagcgttcgaacgcactgattt

SEQ ID NO: 5851908 - DNA, 25 bp, Homo sapien
tcgttcactcatggaaaatagcgat

SEQ ID NO: 5851909 - DNA, 25 bp, Homo sapien
atttgcctgcattaccggtcgatgc

SEQ ID NO: 5851910 - DNA, 25 bp, Homo sapien
atggaaaatagcgatcgctgccagg

SEQ ID NO: 5851911 - DNA, 25 bp, Homo sapien
taccggtcgatgcaacgagtgatga

SEQ ID NO: 5851912 - DNA, 25 bp, Homo sapien
tcagggttaaagatatctcacgtac

SEQ ID NO: 5851913 - DNA, 25 bp, Homo sapien
gagtgatgaggttcgcaagaacctg

SEQ ID NO: 5851914 - DNA, 25 bp, Homo sapien
gcaagaacctgatggacatgttcag

SEQ ID NO: 5851915 - DNA, 25 bp, Homo sapien
gacatgttcagggatcgccaggcgt

SEQ ID NO: 5851916 - DNA, 25 bp, Homo sapien
gccaggcgttttctgagcatacctg

SEQ ID NO: 5851917 - DNA, 25 bp, Homo sapien
gcggcatggtgcaagttgaataacc

SEQ ID NO: 5851918 - DNA, 25 bp, Homo sapien
gaagatgttcgcgattatcttctat

SEQ ID NO: 5851919 - DNA, 25 bp, Homo sapien
tctatatcttcaggcgcgcggtctg

SEQ ID NO: 5851920 - DNA, 25 bp, Homo sapien
gcaacatttgggccagctaaacatg

SEQ ID NO: 5851921 - DNA, 25 bp, Homo sapien
ccagctaaacatgcttcatcgtcgg

SEQ ID NO: 5851922 - DNA, 25 bp, Homo sapien
ccgggctgccacgaccaagtgacag

SEQ ID NO: 5851923 - DNA, 25 bp, Homo sapien
gaccaagtgacagcaatgctgtttc

SEQ ID NO: 5851924 - DNA, 25 bp, Homo sapien
aatgctgtttcactggttatgcggc

SEQ ID NO: 5851925 - DNA, 25 bp, Homo sapien
atgccggtgaacgtgcaaaacaggc

SEQ ID NO: 5851926 - DNA, 25 bp, Homo sapien
acgtgcaaaacaggctctagcgttc

SEQ ID NO: 5851927 - DNA, 25 bp, Homo sapien
ctctagcgttcgaacgcactgattt

SEQ ID NO: 5851928 - DNA, 25 bp, Homo sapien
tcgttcactcatggaaaatagcgat

SEQ ID NO: 5851929 - DNA, 25 bp, Homo sapien
atttgcctgcattaccggtcgatgc

SEQ ID NO: 5851930 - DNA, 25 bp, Homo sapien
atggaaaatagcgatcgctgccagg

SEQ ID NO: 5851931 - DNA, 25 bp, Homo sapien
taccggtcgatgcaacgagtgatga

SEQ ID NO: 5851932 - DNA, 25 bp, Homo sapien
tcagggttaaagatatctcacgtac

SEQ ID NO: 5851933 - DNA, 25 bp, Homo sapien
gagtgatgaggttcgcaagaacctg

SEQ ID NO: 5851934 - DNA, 25 bp, Homo sapien
gcaagaacctgatggacatgttcag

SEQ ID NO: 5851935 - DNA, 25 bp, Homo sapien
gacatgttcagggatcgccaggcgt

SEQ ID NO: 5851936 - DNA, 25 bp, Homo sapien
gccaggcgttttctgagcatacctg

SEQ ID NO: 5851937 - DNA, 25 bp, Homo sapien
gcggcatggtgcaagttgaataacc

SEQ ID NO: 5851938 - DNA, 25 bp, Homo sapien
gaagatgttcgcgattatcttctat

SEQ ID NO: 5851939 - DNA, 25 bp, Homo sapien
tctatatcttcaggcgcgcggtctg

SEQ ID NO: 5851940 - DNA, 25 bp, Homo sapien
gcaacatttgggccagctaaacatg

SEQ ID NO: 5851941 - DNA, 25 bp, Homo sapien
ccagctaaacatgcttcatcgtcgg

SEQ ID NO: 5851942 - DNA, 25 bp, Homo sapien
ccgggctgccacgaccaagtgacag

SEQ ID NO: 5851943 - DNA, 25 bp, Homo sapien
gaccaagtgacagcaatgctgtttc

SEQ ID NO: 5851944 - DNA, 25 bp, Homo sapien
aatgctgtttcactggttatgcggc

SEQ ID NO: 5851945 - DNA, 25 bp, Homo sapien
atgccggtgaacgtgcaaaacaggc

SEQ ID NO: 5851946 - DNA, 25 bp, Homo sapien
acgtgcaaaacaggctctagcgttc

SEQ ID NO: 5851947 - DNA, 25 bp, Homo sapien
ctctagcgttcgaacgcactgattt

SEQ ID NO: 5851948 - DNA, 25 bp, Homo sapien
tcgttcactcatggaaaatagcgat

SEQ ID NO: 5851949 - DNA, 25 bp, Homo sapien
atttgcctgcattaccggtcgatgc

SEQ ID NO: 5851950 - DNA, 25 bp, Homo sapien
atggaaaatagcgatcgctgccagg

SEQ ID NO: 5851951 - DNA, 25 bp, Homo sapien
taccggtcgatgcaacgagtgatga

SEQ ID NO: 5851952 - DNA, 25 bp, Homo sapien
tcagggttaaagatatctcacgtac

SEQ ID NO: 5851953 - DNA, 25 bp, Homo sapien
gagtgatgaggttcgcaagaacctg

SEQ ID NO: 5851954 - DNA, 25 bp, Homo sapien
gcaagaacctgatggacatgttcag

SEQ ID NO: 5851955 - DNA, 25 bp, Homo sapien
gacatgttcagggatcgccaggcgt

SEQ ID NO: 5851956 - DNA, 25 bp, Homo sapien
gccaggcgttttctgagcatacctg

SEQ ID NO: 5851957 - DNA, 25 bp, Homo sapien
gcggcatggtgcaagttgaataacc

SEQ ID NO: 5851958 - DNA, 25 bp, Homo sapien
gaagatgttcgcgattatcttctat

SEQ ID NO: 5851959 - DNA, 25 bp, Homo sapien
tctatatcttcaggcgcgcggtctg

SEQ ID NO: 5851960 - DNA, 25 bp, Homo sapien
gcaacatttgggccagctaaacatg

SEQ ID NO: 5851961 - DNA, 25 bp, Homo sapien
ccagctaaacatgcttcatcgtcgg

SEQ ID NO: 5851962 - DNA, 25 bp, Homo sapien
ccgggctgccacgaccaagtgacag

SEQ ID NO: 5851963 - DNA, 25 bp, Homo sapien
gaccaagtgacagcaatgctgtttc

SEQ ID NO: 5851964 - DNA, 25 bp, Homo sapien
aatgctgtttcactggttatgcggc

SEQ ID NO: 5851965 - DNA, 25 bp, Homo sapien
atgccggtgaacgtgcaaaacaggc

SEQ ID NO: 5851966 - DNA, 25 bp, Homo sapien
acgtgcaaaacaggctctagcgttc

SEQ ID NO: 5851967 - DNA, 25 bp, Homo sapien
ctctagcgttcgaacgcactgattt

SEQ ID NO: 5851968 - DNA, 25 bp, Homo sapien
tcgttcactcatggaaaatagcgat

SEQ ID NO: 5851969 - DNA, 25 bp, Homo sapien
atttgcctgcattaccggtcgatgc

SEQ ID NO: 5851970 - DNA, 25 bp, Homo sapien
atggaaaatagcgatcgctgccagg

SEQ ID NO: 5851971 - DNA, 25 bp, Homo sapien
taccggtcgatgcaacgagtgatga

SEQ ID NO: 5851972 - DNA, 25 bp, Homo sapien
tcagggttaaagatatctcacgtac

SEQ ID NO: 5851973 - DNA, 25 bp, Homo sapien
gagtgatgaggttcgcaagaacctg

SEQ ID NO: 5851974 - DNA, 25 bp, Homo sapien
gcaagaacctgatggacatgttcag

SEQ ID NO: 5851975 - DNA, 25 bp, Homo sapien
gacatgttcagggatcgccaggcgt

SEQ ID NO: 5851976 - DNA, 25 bp, Homo sapien
gccaggcgttttctgagcatacctg

SEQ ID NO: 5851977 - DNA, 25 bp, Homo sapien
gcggcatggtgcaagttgaataacc

SEQ ID NO: 5851978 - DNA, 25 bp, Homo sapien
gaagatgttcgcgattatcttctat

SEQ ID NO: 5851979 - DNA, 25 bp, Homo sapien
tctatatcttcaggcgcgcggtctg

SEQ ID NO: 5851980 - DNA, 25 bp, Homo sapien
gcaacatttgggccagctaaacatg

SEQ ID NO: 5851981 - DNA, 25 bp, Homo sapien
ccagctaaacatgcttcatcgtcgg

SEQ ID NO: 5851982 - DNA, 25 bp, Homo sapien
ccgggctgccacgaccaagtgacag

SEQ ID NO: 5851983 - DNA, 25 bp, Homo sapien
gaccaagtgacagcaatgctgtttc

SEQ ID NO: 5851984 - DNA, 25 bp, Homo sapien
aatgctgtttcactggttatgcggc

SEQ ID NO: 5851985 - DNA, 25 bp, Homo sapien
atgccggtgaacgtgcaaaacaggc

SEQ ID NO: 5851986 - DNA, 25 bp, Homo sapien
acgtgcaaaacaggctctagcgttc

SEQ ID NO: 5851987 - DNA, 25 bp, Homo sapien
ctctagcgttcgaacgcactgattt

SEQ ID NO: 5851988 - DNA, 25 bp, Homo sapien
tcgttcactcatggaaaatagcgat

SEQ ID NO: 5851989 - DNA, 25 bp, Homo sapien
atttgcctgcattaccggtcgatgc

SEQ ID NO: 5851990 - DNA, 25 bp, Homo sapien
atggaaaatagcgatcgctgccagg

SEQ ID NO: 5851991 - DNA, 25 bp, Homo sapien
taccggtcgatgcaacgagtgatga

SEQ ID NO: 5851992 - DNA, 25 bp, Homo sapien
tcagggttaaagatatctcacgtac

SEQ ID NO: 5851993 - DNA, 25 bp, Homo sapien
gagtgatgaggttcgcaagaacctg

SEQ ID NO: 5851994 - DNA, 25 bp, Homo sapien
gcaagaacctgatggacatgttcag

SEQ ID NO: 5851995 - DNA, 25 bp, Homo sapien
gacatgttcagggatcgccaggcgt

SEQ ID NO: 5851996 - DNA, 25 bp, Homo sapien
gccaggcgttttctgagcatacctg

SEQ ID NO: 5851997 - DNA, 25 bp, Homo sapien
gcggcatggtgcaagttgaataacc

SEQ ID NO: 5851998 - DNA, 25 bp, Homo sapien
gaagatgttcgcgattatcttctat

SEQ ID NO: 5851999 - DNA, 25 bp, Homo sapien
tctatatcttcaggcgcgcggtctg

SEQ ID NO: 5852000 - DNA, 25 bp, Homo sapien
gcaacatttgggccagctaaacatg

SEQ ID NO: 5852001 - DNA, 25 bp, Homo sapien
ccagctaaacatgcttcatcgtcgg

SEQ ID NO: 5852002 - DNA, 25 bp, Homo sapien
ccgggctgccacgaccaagtgacag

SEQ ID NO: 5852003 - DNA, 25 bp, Homo sapien
gaccaagtgacagcaatgctgtttc

SEQ ID NO: 5852004 - DNA, 25 bp, Homo sapien
aatgctgtttcactggttatgcggc

SEQ ID NO: 5852005 - DNA, 25 bp, Homo sapien
atgccggtgaacgtgcaaaacaggc

SEQ ID NO: 5852006 - DNA, 25 bp, Homo sapien
acgtgcaaaacaggctctagcgttc

SEQ ID NO: 5852007 - DNA, 25 bp, Homo sapien
ctctagcgttcgaacgcactgattt

SEQ ID NO: 5852008 - DNA, 25 bp, Homo sapien
tcgttcactcatggaaaatagcgat

SEQ ID NO: 5852009 - DNA, 25 bp, Homo sapien
atttgcctgcattaccggtcgatgc

SEQ ID NO: 5852010 - DNA, 25 bp, Homo sapien
atggaaaatagcgatcgctgccagg

SEQ ID NO: 5852011 - DNA, 25 bp, Homo sapien
taccggtcgatgcaacgagtgatga

SEQ ID NO: 5852012 - DNA, 25 bp, Homo sapien
tcagggttaaagatatctcacgtac

SEQ ID NO: 5852013 - DNA, 25 bp, Homo sapien
gagtgatgaggttcgcaagaacctg

SEQ ID NO: 5852014 - DNA, 25 bp, Homo sapien
gcaagaacctgatggacatgttcag

SEQ ID NO: 5852015 - DNA, 25 bp, Homo sapien
gacatgttcagggatcgccaggcgt

SEQ ID NO: 5852016 - DNA, 25 bp, Homo sapien
gccaggcgttttctgagcatacctg

SEQ ID NO: 5852017 - DNA, 25 bp, Homo sapien
gcggcatggtgcaagttgaataacc

SEQ ID NO: 5852018 - DNA, 25 bp, Homo sapien
gaagatgttcgcgattatcttctat

SEQ ID NO: 5852019 - DNA, 25 bp, Homo sapien
tctatatcttcaggcgcgcggtctg

SEQ ID NO: 5852020 - DNA, 25 bp, Homo sapien
gcaacatttgggccagctaaacatg

SEQ ID NO: 5852021 - DNA, 25 bp, Homo sapien
ccagctaaacatgcttcatcgtcgg

SEQ ID NO: 5852022 - DNA, 25 bp, Homo sapien
ccgggctgccacgaccaagtgacag

SEQ ID NO: 5852023 - DNA, 25 bp, Homo sapien
gaccaagtgacagcaatgctgtttc

SEQ ID NO: 5852024 - DNA, 25 bp, Homo sapien
aatgctgtttcactggttatgcggc

SEQ ID NO: 5852025 - DNA, 25 bp, Homo sapien
atgccggtgaacgtgcaaaacaggc

SEQ ID NO: 5852026 - DNA, 25 bp, Homo sapien
acgtgcaaaacaggctctagcgttc

SEQ ID NO: 5852027 - DNA, 25 bp, Homo sapien
ctctagcgttcgaacgcactgattt

SEQ ID NO: 5852028 - DNA, 25 bp, Homo sapien
tcgttcactcatggaaaatagcgat

SEQ ID NO: 5852029 - DNA, 25 bp, Homo sapien
atttgcctgcattaccggtcgatgc

SEQ ID NO: 5852030 - DNA, 25 bp, Homo sapien
atggaaaatagcgatcgctgccagg

SEQ ID NO: 5852031 - DNA, 25 bp, Homo sapien
taccggtcgatgcaacgagtgatga

SEQ ID NO: 5852032 - DNA, 25 bp, Homo sapien
tcagggttaaagatatctcacgtac

SEQ ID NO: 5852033 - DNA, 25 bp, Homo sapien
gagtgatgaggttcgcaagaacctg

SEQ ID NO: 5852034 - DNA, 25 bp, Homo sapien
gcaagaacctgatggacatgttcag

SEQ ID NO: 5852035 - DNA, 25 bp, Homo sapien
gacatgttcagggatcgccaggcgt

SEQ ID NO: 5852036 - DNA, 25 bp, Homo sapien
gccaggcgttttctgagcatacctg

SEQ ID NO: 5852037 - DNA, 25 bp, Homo sapien
gcggcatggtgcaagttgaataacc

SEQ ID NO: 5852038 - DNA, 25 bp, Homo sapien
gaagatgttcgcgattatcttctat

SEQ ID NO: 5852039 - DNA, 25 bp, Homo sapien
tctatatcttcaggcgcgcggtctg

SEQ ID NO: 5852040 - DNA, 25 bp, Homo sapien
gcaacatttgggccagctaaacatg

SEQ ID NO: 5852041 - DNA, 25 bp, Homo sapien
ccagctaaacatgcttcatcgtcgg

SEQ ID NO: 5852042 - DNA, 25 bp, Homo sapien
ccgggctgccacgaccaagtgacag

SEQ ID NO: 5852043 - DNA, 25 bp, Homo sapien
gaccaagtgacagcaatgctgtttc

SEQ ID NO: 5852044 - DNA, 25 bp, Homo sapien
aatgctgtttcactggttatgcggc

SEQ ID NO: 5852045 - DNA, 25 bp, Homo sapien
atgccggtgaacgtgcaaaacaggc

SEQ ID NO: 5852046 - DNA, 25 bp, Homo sapien
acgtgcaaaacaggctctagcgttc

SEQ ID NO: 5852047 - DNA, 25 bp, Homo sapien
ctctagcgttcgaacgcactgattt

SEQ ID NO: 5852048 - DNA, 25 bp, Homo sapien
tcgttcactcatggaaaatagcgat

SEQ ID NO: 5852049 - DNA, 25 bp, Homo sapien
atttgcctgcattaccggtcgatgc

SEQ ID NO: 5852050 - DNA, 25 bp, Homo sapien
atggaaaatagcgatcgctgccagg

SEQ ID NO: 5852051 - DNA, 25 bp, Homo sapien
taccggtcgatgcaacgagtgatga

SEQ ID NO: 5852052 - DNA, 25 bp, Homo sapien
tcagggttaaagatatctcacgtac

SEQ ID NO: 5852053 - DNA, 25 bp, Homo sapien
gagtgatgaggttcgcaagaacctg

SEQ ID NO: 5852054 - DNA, 25 bp, Homo sapien
gcaagaacctgatggacatgttcag

SEQ ID NO: 5852055 - DNA, 25 bp, Homo sapien
gacatgttcagggatcgccaggcgt

SEQ ID NO: 5852056 - DNA, 25 bp, Homo sapien
gccaggcgttttctgagcatacctg

SEQ ID NO: 5852057 - DNA, 25 bp, Homo sapien
gcggcatggtgcaagttgaataacc

SEQ ID NO: 5852058 - DNA, 25 bp, Homo sapien
gaagatgttcgcgattatcttctat

SEQ ID NO: 5852059 - DNA, 25 bp, Homo sapien
tctatatcttcaggcgcgcggtctg

SEQ ID NO: 5852060 - DNA, 25 bp, Homo sapien
gcaacatttgggccagctaaacatg

SEQ ID NO: 5852061 - DNA, 25 bp, Homo sapien
ccagctaaacatgcttcatcgtcgg

SEQ ID NO: 5852062 - DNA, 25 bp, Homo sapien
ccgggctgccacgaccaagtgacag

SEQ ID NO: 5852063 - DNA, 25 bp, Homo sapien
gaccaagtgacagcaatgctgtttc

SEQ ID NO: 5852064 - DNA, 25 bp, Homo sapien
aatgctgtttcactggttatgcggc

SEQ ID NO: 5852065 - DNA, 25 bp, Homo sapien
atgccggtgaacgtgcaaaacaggc

SEQ ID NO: 5852066 - DNA, 25 bp, Homo sapien
acgtgcaaaacaggctctagcgttc

SEQ ID NO: 5852067 - DNA, 25 bp, Homo sapien
ctctagcgttcgaacgcactgattt

SEQ ID NO: 5852068 - DNA, 25 bp, Homo sapien
tcgttcactcatggaaaatagcgat

SEQ ID NO: 5852069 - DNA, 25 bp, Homo sapien
atttgcctgcattaccggtcgatgc

SEQ ID NO: 5852070 - DNA, 25 bp, Homo sapien
atggaaaatagcgatcgctgccagg

SEQ ID NO: 5852071 - DNA, 25 bp, Homo sapien
taccggtcgatgcaacgagtgatga

SEQ ID NO: 5852072 - DNA, 25 bp, Homo sapien
tcagggttaaagatatctcacgtac

SEQ ID NO: 5852073 - DNA, 25 bp, Homo sapien
gagtgatgaggttcgcaagaacctg

SEQ ID NO: 5852074 - DNA, 25 bp, Homo sapien
gcaagaacctgatggacatgttcag

SEQ ID NO: 5852075 - DNA, 25 bp, Homo sapien
gacatgttcagggatcgccaggcgt

SEQ ID NO: 5852076 - DNA, 25 bp, Homo sapien
gccaggcgttttctgagcatacctg

SEQ ID NO: 5852077 - DNA, 25 bp, Homo sapien
gcggcatggtgcaagttgaataacc

SEQ ID NO: 5852078 - DNA, 25 bp, Homo sapien
gaagatgttcgcgattatcttctat

SEQ ID NO: 5852079 - DNA, 25 bp, Homo sapien
tctatatcttcaggcgcgcggtctg

SEQ ID NO: 5852080 - DNA, 25 bp, Homo sapien
gcaacatttgggccagctaaacatg

SEQ ID NO: 5852081 - DNA, 25 bp, Homo sapien
ccagctaaacatgcttcatcgtcgg

SEQ ID NO: 5852082 - DNA, 25 bp, Homo sapien
ccgggctgccacgaccaagtgacag

SEQ ID NO: 5852083 - DNA, 25 bp, Homo sapien
gaccaagtgacagcaatgctgtttc

SEQ ID NO: 5852084 - DNA, 25 bp, Homo sapien
aatgctgtttcactggttatgcggc

SEQ ID NO: 5852085 - DNA, 25 bp, Homo sapien
atgccggtgaacgtgcaaaacaggc

SEQ ID NO: 5852086 - DNA, 25 bp, Homo sapien
acgtgcaaaacaggctctagcgttc

SEQ ID NO: 5852087 - DNA, 25 bp, Homo sapien
ctctagcgttcgaacgcactgattt

SEQ ID NO: 5852088 - DNA, 25 bp, Homo sapien
tcgttcactcatggaaaatagcgat

SEQ ID NO: 5852089 - DNA, 25 bp, Homo sapien
atttgcctgcattaccggtcgatgc

SEQ ID NO: 5852090 - DNA, 25 bp, Homo sapien
atggaaaatagcgatcgctgccagg

SEQ ID NO: 5852091 - DNA, 25 bp, Homo sapien
taccggtcgatgcaacgagtgatga

SEQ ID NO: 5852092 - DNA, 25 bp, Homo sapien
tcagggttaaagatatctcacgtac

SEQ ID NO: 5852093 - DNA, 25 bp, Homo sapien
gagtgatgaggttcgcaagaacctg

SEQ ID NO: 5852094 - DNA, 25 bp, Homo sapien
gcaagaacctgatggacatgttcag

SEQ ID NO: 5852095 - DNA, 25 bp, Homo sapien
gacatgttcagggatcgccaggcgt

SEQ ID NO: 5852096 - DNA, 25 bp, Homo sapien
gccaggcgttttctgagcatacctg

SEQ ID NO: 5852097 - DNA, 25 bp, Homo sapien
gcggcatggtgcaagttgaataacc

SEQ ID NO: 5852098 - DNA, 25 bp, Homo sapien
gaagatgttcgcgattatcttctat

SEQ ID NO: 5852099 - DNA, 25 bp, Homo sapien
tctatatcttcaggcgcgcggtctg

SEQ ID NO: 5852100 - DNA, 25 bp, Homo sapien
gcaacatttgggccagctaaacatg

SEQ ID NO: 5852101 - DNA, 25 bp, Homo sapien
ccagctaaacatgcttcatcgtcgg

SEQ ID NO: 5852102 - DNA, 25 bp, Homo sapien
ccgggctgccacgaccaagtgacag

SEQ ID NO: 5852103 - DNA, 25 bp, Homo sapien
gaccaagtgacagcaatgctgtttc

SEQ ID NO: 5852104 - DNA, 25 bp, Homo sapien
aatgctgtttcactggttatgcggc

SEQ ID NO: 5852105 - DNA, 25 bp, Homo sapien
atgccggtgaacgtgcaaaacaggc

SEQ ID NO: 5852106 - DNA, 25 bp, Homo sapien
acgtgcaaaacaggctctagcgttc

SEQ ID NO: 5852107 - DNA, 25 bp, Homo sapien
ctctagcgttcgaacgcactgattt

SEQ ID NO: 5852108 - DNA, 25 bp, Homo sapien
tcgttcactcatggaaaatagcgat

SEQ ID NO: 5852109 - DNA, 25 bp, Homo sapien
atttgcctgcattaccggtcgatgc

SEQ ID NO: 5852110 - DNA, 25 bp, Homo sapien
atggaaaatagcgatcgctgccagg

SEQ ID NO: 5852111 - DNA, 25 bp, Homo sapien
taccggtcgatgcaacgagtgatga

SEQ ID NO: 5852112 - DNA, 25 bp, Homo sapien
tcagggttaaagatatctcacgtac

SEQ ID NO: 5852113 - DNA, 25 bp, Homo sapien
gagtgatgaggttcgcaagaacctg

SEQ ID NO: 5852114 - DNA, 25 bp, Homo sapien
gcaagaacctgatggacatgttcag

SEQ ID NO: 5852115 - DNA, 25 bp, Homo sapien
gacatgttcagggatcgccaggcgt

SEQ ID NO: 5852116 - DNA, 25 bp, Homo sapien
gccaggcgttttctgagcatacctg

SEQ ID NO: 5852117 - DNA, 25 bp, Homo sapien
gcggcatggtgcaagttgaataacc

SEQ ID NO: 5852118 - DNA, 25 bp, Homo sapien
gaagatgttcgcgattatcttctat

SEQ ID NO: 5852119 - DNA, 25 bp, Homo sapien
tctatatcttcaggcgcgcggtctg

SEQ ID NO: 5852120 - DNA, 25 bp, Homo sapien
gcaacatttgggccagctaaacatg

SEQ ID NO: 5852121 - DNA, 25 bp, Homo sapien
ccagctaaacatgcttcatcgtcgg

SEQ ID NO: 5852122 - DNA, 25 bp, Homo sapien
ccgggctgccacgaccaagtgacag

SEQ ID NO: 5852123 - DNA, 25 bp, Homo sapien
gaccaagtgacagcaatgctgtttc

SEQ ID NO: 5852124 - DNA, 25 bp, Homo sapien
aatgctgtttcactggttatgcggc

SEQ ID NO: 5852125 - DNA, 25 bp, Homo sapien
atgccggtgaacgtgcaaaacaggc

SEQ ID NO: 5852126 - DNA, 25 bp, Homo sapien
acgtgcaaaacaggctctagcgttc

SEQ ID NO: 5852127 - DNA, 25 bp, Homo sapien
ctctagcgttcgaacgcactgattt

SEQ ID NO: 5852128 - DNA, 25 bp, Homo sapien
tcgttcactcatggaaaatagcgat

SEQ ID NO: 5852129 - DNA, 25 bp, Homo sapien
atttgcctgcattaccggtcgatgc

SEQ ID NO: 5852130 - DNA, 25 bp, Homo sapien
atggaaaatagcgatcgctgccagg

SEQ ID NO: 5852131 - DNA, 25 bp, Homo sapien
taccggtcgatgcaacgagtgatga

SEQ ID NO: 5852132 - DNA, 25 bp, Homo sapien
tcagggttaaagatatctcacgtac

SEQ ID NO: 5852133 - DNA, 25 bp, Homo sapien
gagtgatgaggttcgcaagaacctg

SEQ ID NO: 5852134 - DNA, 25 bp, Homo sapien
gcaagaacctgatggacatgttcag

SEQ ID NO: 5852135 - DNA, 25 bp, Homo sapien
gacatgttcagggatcgccaggcgt

SEQ ID NO: 5852136 - DNA, 25 bp, Homo sapien
gccaggcgttttctgagcatacctg

SEQ ID NO: 5852137 - DNA, 25 bp, Homo sapien
gcggcatggtgcaagttgaataacc

SEQ ID NO: 5852138 - DNA, 25 bp, Homo sapien
gaagatgttcgcgattatcttctat

SEQ ID NO: 5852139 - DNA, 25 bp, Homo sapien
tctatatcttcaggcgcgcggtctg

SEQ ID NO: 5852140 - DNA, 25 bp, Homo sapien
gcaacatttgggccagctaaacatg

SEQ ID NO: 5852141 - DNA, 25 bp, Homo sapien
ccagctaaacatgcttcatcgtcgg

SEQ ID NO: 5852142 - DNA, 25 bp, Homo sapien
ccgggctgccacgaccaagtgacag

SEQ ID NO: 5852143 - DNA, 25 bp, Homo sapien
gaccaagtgacagcaatgctgtttc

SEQ ID NO: 5852144 - DNA, 25 bp, Homo sapien
aatgctgtttcactggttatgcggc

SEQ ID NO: 5852145 - DNA, 25 bp, Homo sapien
atgccggtgaacgtgcaaaacaggc

SEQ ID NO: 5852146 - DNA, 25 bp, Homo sapien
acgtgcaaaacaggctctagcgttc

SEQ ID NO: 5852147 - DNA, 25 bp, Homo sapien
ctctagcgttcgaacgcactgattt

SEQ ID NO: 5852148 - DNA, 25 bp, Homo sapien
tcgttcactcatggaaaatagcgat

SEQ ID NO: 5852149 - DNA, 25 bp, Homo sapien
atttgcctgcattaccggtcgatgc

SEQ ID NO: 5852150 - DNA, 25 bp, Homo sapien
atggaaaatagcgatcgctgccagg

SEQ ID NO: 5852151 - DNA, 25 bp, Homo sapien
taccggtcgatgcaacgagtgatga

SEQ ID NO: 5852152 - DNA, 25 bp, Homo sapien
tcagggttaaagatatctcacgtac

SEQ ID NO: 5852153 - DNA, 25 bp, Homo sapien
gagtgatgaggttcgcaagaacctg

SEQ ID NO: 5852154 - DNA, 25 bp, Homo sapien
gcaagaacctgatggacatgttcag

SEQ ID NO: 5852155 - DNA, 25 bp, Homo sapien
gacatgttcagggatcgccaggcgt

SEQ ID NO: 5852156 - DNA, 25 bp, Homo sapien
gccaggcgttttctgagcatacctg

SEQ ID NO: 5852157 - DNA, 25 bp, Homo sapien
gcggcatggtgcaagttgaataacc

SEQ ID NO: 5852158 - DNA, 25 bp, Homo sapien
gaagatgttcgcgattatcttctat

SEQ ID NO: 5852159 - DNA, 25 bp, Homo sapien
tctatatcttcaggcgcgcggtctg

SEQ ID NO: 5852160 - DNA, 25 bp, Homo sapien
gcaacatttgggccagctaaacatg

SEQ ID NO: 5852161 - DNA, 25 bp, Homo sapien
ccagctaaacatgcttcatcgtcgg

SEQ ID NO: 5852162 - DNA, 25 bp, Homo sapien
ccgggctgccacgaccaagtgacag

SEQ ID NO: 5852163 - DNA, 25 bp, Homo sapien
gaccaagtgacagcaatgctgtttc

SEQ ID NO: 5852164 - DNA, 25 bp, Homo sapien
aatgctgtttcactggttatgcggc

SEQ ID NO: 5852165 - DNA, 25 bp, Homo sapien
atgccggtgaacgtgcaaaacaggc

SEQ ID NO: 5852166 - DNA, 25 bp, Homo sapien
acgtgcaaaacaggctctagcgttc

SEQ ID NO: 5852167 - DNA, 25 bp, Homo sapien
ctctagcgttcgaacgcactgattt

SEQ ID NO: 5852168 - DNA, 25 bp, Homo sapien
tcgttcactcatggaaaatagcgat

SEQ ID NO: 5852169 - DNA, 25 bp, Homo sapien
atttgcctgcattaccggtcgatgc

SEQ ID NO: 5852170 - DNA, 25 bp, Homo sapien
atggaaaatagcgatcgctgccagg

SEQ ID NO: 5852171 - DNA, 25 bp, Homo sapien
taccggtcgatgcaacgagtgatga

SEQ ID NO: 5852172 - DNA, 25 bp, Homo sapien
tcagggttaaagatatctcacgtac

SEQ ID NO: 5852173 - DNA, 25 bp, Homo sapien
gagtgatgaggttcgcaagaacctg

SEQ ID NO: 5852174 - DNA, 25 bp, Homo sapien
gcaagaacctgatggacatgttcag

SEQ ID NO: 5852175 - DNA, 25 bp, Homo sapien
gacatgttcagggatcgccaggcgt

SEQ ID NO: 5852176 - DNA, 25 bp, Homo sapien
gccaggcgttttctgagcatacctg

SEQ ID NO: 5852177 - DNA, 25 bp, Homo sapien
gcggcatggtgcaagttgaataacc

SEQ ID NO: 5852178 - DNA, 25 bp, Homo sapien
gaagatgttcgcgattatcttctat

SEQ ID NO: 5852179 - DNA, 25 bp, Homo sapien
tctatatcttcaggcgcgcggtctg

SEQ ID NO: 5852180 - DNA, 25 bp, Homo sapien
gcaacatttgggccagctaaacatg

SEQ ID NO: 5852181 - DNA, 25 bp, Homo sapien
ccagctaaacatgcttcatcgtcgg

SEQ ID NO: 5852182 - DNA, 25 bp, Homo sapien
ccgggctgccacgaccaagtgacag

SEQ ID NO: 5852183 - DNA, 25 bp, Homo sapien
gaccaagtgacagcaatgctgtttc

SEQ ID NO: 5852184 - DNA, 25 bp, Homo sapien
aatgctgtttcactggttatgcggc

SEQ ID NO: 5852185 - DNA, 25 bp, Homo sapien
atgccggtgaacgtgcaaaacaggc

SEQ ID NO: 5852186 - DNA, 25 bp, Homo sapien
acgtgcaaaacaggctctagcgttc

SEQ ID NO: 5852187 - DNA, 25 bp, Homo sapien
ctctagcgttcgaacgcactgattt

SEQ ID NO: 5852188 - DNA, 25 bp, Homo sapien
tcgttcactcatggaaaatagcgat

SEQ ID NO: 5852189 - DNA, 25 bp, Homo sapien
atttgcctgcattaccggtcgatgc

SEQ ID NO: 5852190 - DNA, 25 bp, Homo sapien
atggaaaatagcgatcgctgccagg

SEQ ID NO: 5852191 - DNA, 25 bp, Homo sapien
taccggtcgatgcaacgagtgatga

SEQ ID NO: 5852192 - DNA, 25 bp, Homo sapien
tcagggttaaagatatctcacgtac

SEQ ID NO: 5852193 - DNA, 25 bp, Homo sapien
gagtgatgaggttcgcaagaacctg

SEQ ID NO: 5852194 - DNA, 25 bp, Homo sapien
gcaagaacctgatggacatgttcag

SEQ ID NO: 5852195 - DNA, 25 bp, Homo sapien
gacatgttcagggatcgccaggcgt

SEQ ID NO: 5852196 - DNA, 25 bp, Homo sapien
gccaggcgttttctgagcatacctg

SEQ ID NO: 5852197 - DNA, 25 bp, Homo sapien
gcggcatggtgcaagttgaataacc

SEQ ID NO: 5852198 - DNA, 25 bp, Homo sapien
gaagatgttcgcgattatcttctat

SEQ ID NO: 5852199 - DNA, 25 bp, Homo sapien
tctatatcttcaggcgcgcggtctg

SEQ ID NO: 5852200 - DNA, 25 bp, Homo sapien
gcaacatttgggccagctaaacatg

SEQ ID NO: 5852201 - DNA, 25 bp, Homo sapien
ccagctaaacatgcttcatcgtcgg

SEQ ID NO: 5852202 - DNA, 25 bp, Homo sapien
ccgggctgccacgaccaagtgacag

SEQ ID NO: 5852203 - DNA, 25 bp, Homo sapien
gaccaagtgacagcaatgctgtttc

SEQ ID NO: 5852204 - DNA, 25 bp, Homo sapien
aatgctgtttcactggttatgcggc

SEQ ID NO: 5852205 - DNA, 25 bp, Homo sapien
atgccggtgaacgtgcaaaacaggc

SEQ ID NO: 5852206 - DNA, 25 bp, Homo sapien
acgtgcaaaacaggctctagcgttc

SEQ ID NO: 5852207 - DNA, 25 bp, Homo sapien
ctctagcgttcgaacgcactgattt

SEQ ID NO: 5852208 - DNA, 25 bp, Homo sapien
tcgttcactcatggaaaatagcgat

SEQ ID NO: 5852209 - DNA, 25 bp, Homo sapien
atttgcctgcattaccggtcgatgc

SEQ ID NO: 5852210 - DNA, 25 bp, Homo sapien
atggaaaatagcgatcgctgccagg

SEQ ID NO: 5852211 - DNA, 25 bp, Homo sapien
taccggtcgatgcaacgagtgatga

SEQ ID NO: 5852212 - DNA, 25 bp, Homo sapien
tcagggttaaagatatctcacgtac

SEQ ID NO: 5852213 - DNA, 25 bp, Homo sapien
gagtgatgaggttcgcaagaacctg

SEQ ID NO: 5852214 - DNA, 25 bp, Homo sapien
gcaagaacctgatggacatgttcag

SEQ ID NO: 5852215 - DNA, 25 bp, Homo sapien
gacatgttcagggatcgccaggcgt

SEQ ID NO: 5852216 - DNA, 25 bp, Homo sapien
gccaggcgttttctgagcatacctg

SEQ ID NO: 5852217 - DNA, 25 bp, Homo sapien
gcggcatggtgcaagttgaataacc

SEQ ID NO: 5852218 - DNA, 25 bp, Homo sapien
gaagatgttcgcgattatcttctat

SEQ ID NO: 5852219 - DNA, 25 bp, Homo sapien
tctatatcttcaggcgcgcggtctg

SEQ ID NO: 5852220 - DNA, 25 bp, Homo sapien
gcaacatttgggccagctaaacatg

SEQ ID NO: 5852221 - DNA, 25 bp, Homo sapien
ccagctaaacatgcttcatcgtcgg

SEQ ID NO: 5852222 - DNA, 25 bp, Homo sapien
ccgggctgccacgaccaagtgacag

SEQ ID NO: 5852223 - DNA, 25 bp, Homo sapien
gaccaagtgacagcaatgctgtttc

SEQ ID NO: 5852224 - DNA, 25 bp, Homo sapien
aatgctgtttcactggttatgcggc

SEQ ID NO: 5852225 - DNA, 25 bp, Homo sapien
atgccggtgaacgtgcaaaacaggc

SEQ ID NO: 5852226 - DNA, 25 bp, Homo sapien
acgtgcaaaacaggctctagcgttc

SEQ ID NO: 5852227 - DNA, 25 bp, Homo sapien
ctctagcgttcgaacgcactgattt

SEQ ID NO: 5852228 - DNA, 25 bp, Homo sapien
tcgttcactcatggaaaatagcgat

SEQ ID NO: 5852229 - DNA, 25 bp, Homo sapien
atttgcctgcattaccggtcgatgc

SEQ ID NO: 5852230 - DNA, 25 bp, Homo sapien
atggaaaatagcgatcgctgccagg

SEQ ID NO: 5852231 - DNA, 25 bp, Homo sapien
taccggtcgatgcaacgagtgatga

SEQ ID NO: 5852232 - DNA, 25 bp, Homo sapien
tcagggttaaagatatctcacgtac

SEQ ID NO: 5852233 - DNA, 25 bp, Homo sapien
gagtgatgaggttcgcaagaacctg

SEQ ID NO: 5852234 - DNA, 25 bp, Homo sapien
gcaagaacctgatggacatgttcag

SEQ ID NO: 5852235 - DNA, 25 bp, Homo sapien
gacatgttcagggatcgccaggcgt

SEQ ID NO: 5852236 - DNA, 25 bp, Homo sapien
gccaggcgttttctgagcatacctg

SEQ ID NO: 5852237 - DNA, 25 bp, Homo sapien
gcggcatggtgcaagttgaataacc

SEQ ID NO: 5852238 - DNA, 25 bp, Homo sapien
gaagatgttcgcgattatcttctat

SEQ ID NO: 5852239 - DNA, 25 bp, Homo sapien
tctatatcttcaggcgcgcggtctg

SEQ ID NO: 5852240 - DNA, 25 bp, Homo sapien
gcaacatttgggccagctaaacatg

SEQ ID NO: 5852241 - DNA, 25 bp, Homo sapien
ccagctaaacatgcttcatcgtcgg

SEQ ID NO: 5852242 - DNA, 25 bp, Homo sapien
ccgggctgccacgaccaagtgacag

SEQ ID NO: 5852243 - DNA, 25 bp, Homo sapien
gaccaagtgacagcaatgctgtttc

SEQ ID NO: 5852244 - DNA, 25 bp, Homo sapien
aatgctgtttcactggttatgcggc

SEQ ID NO: 5852245 - DNA, 25 bp, Homo sapien
atgccggtgaacgtgcaaaacaggc

SEQ ID NO: 5852246 - DNA, 25 bp, Homo sapien
acgtgcaaaacaggctctagcgttc

SEQ ID NO: 5852247 - DNA, 25 bp, Homo sapien
ctctagcgttcgaacgcactgattt

SEQ ID NO: 5852248 - DNA, 25 bp, Homo sapien
tcgttcactcatggaaaatagcgat

SEQ ID NO: 5852249 - DNA, 25 bp, Homo sapien
atttgcctgcattaccggtcgatgc

SEQ ID NO: 5852250 - DNA, 25 bp, Homo sapien
atggaaaatagcgatcgctgccagg

SEQ ID NO: 5852251 - DNA, 25 bp, Homo sapien
taccggtcgatgcaacgagtgatga

SEQ ID NO: 5852252 - DNA, 25 bp, Homo sapien
tcagggttaaagatatctcacgtac

SEQ ID NO: 5852253 - DNA, 25 bp, Homo sapien
gagtgatgaggttcgcaagaacctg

SEQ ID NO: 5852254 - DNA, 25 bp, Homo sapien
gcaagaacctgatggacatgttcag

SEQ ID NO: 5852255 - DNA, 25 bp, Homo sapien
gacatgttcagggatcgccaggcgt

SEQ ID NO: 5852256 - DNA, 25 bp, Homo sapien
gccaggcgttttctgagcatacctg

SEQ ID NO: 5852257 - DNA, 25 bp, Homo sapien
gcggcatggtgcaagttgaataacc

SEQ ID NO: 5852258 - DNA, 25 bp, Homo sapien
gaagatgttcgcgattatcttctat

SEQ ID NO: 5852259 - DNA, 25 bp, Homo sapien
tctatatcttcaggcgcgcggtctg

SEQ ID NO: 5852260 - DNA, 25 bp, Homo sapien
gcaacatttgggccagctaaacatg

SEQ ID NO: 5852261 - DNA, 25 bp, Homo sapien
ccagctaaacatgcttcatcgtcgg

SEQ ID NO: 5852262 - DNA, 25 bp, Homo sapien
ccgggctgccacgaccaagtgacag

SEQ ID NO: 5852263 - DNA, 25 bp, Homo sapien
gaccaagtgacagcaatgctgtttc

SEQ ID NO: 5852264 - DNA, 25 bp, Homo sapien
aatgctgtttcactggttatgcggc

SEQ ID NO: 5852265 - DNA, 25 bp, Homo sapien
atgccggtgaacgtgcaaaacaggc

SEQ ID NO: 5852266 - DNA, 25 bp, Homo sapien
acgtgcaaaacaggctctagcgttc

SEQ ID NO: 5852267 - DNA, 25 bp, Homo sapien
ctctagcgttcgaacgcactgattt

SEQ ID NO: 5852268 - DNA, 25 bp, Homo sapien
tcgttcactcatggaaaatagcgat

SEQ ID NO: 5852269 - DNA, 25 bp, Homo sapien
atttgcctgcattaccggtcgatgc

SEQ ID NO: 5852270 - DNA, 25 bp, Homo sapien
atggaaaatagcgatcgctgccagg

SEQ ID NO: 5852271 - DNA, 25 bp, Homo sapien
taccggtcgatgcaacgagtgatga

SEQ ID NO: 5852272 - DNA, 25 bp, Homo sapien
tcagggttaaagatatctcacgtac

SEQ ID NO: 5852273 - DNA, 25 bp, Homo sapien
gagtgatgaggttcgcaagaacctg

SEQ ID NO: 5852274 - DNA, 25 bp, Homo sapien
gcaagaacctgatggacatgttcag

SEQ ID NO: 5852275 - DNA, 25 bp, Homo sapien
gacatgttcagggatcgccaggcgt

SEQ ID NO: 5852276 - DNA, 25 bp, Homo sapien
gccaggcgttttctgagcatacctg

SEQ ID NO: 5852277 - DNA, 25 bp, Homo sapien
gcggcatggtgcaagttgaataacc

SEQ ID NO: 5852278 - DNA, 25 bp, Homo sapien
gaagatgttcgcgattatcttctat

SEQ ID NO: 5852279 - DNA, 25 bp, Homo sapien
tctatatcttcaggcgcgcggtctg

SEQ ID NO: 5852280 - DNA, 25 bp, Homo sapien
gcaacatttgggccagctaaacatg

SEQ ID NO: 5852281 - DNA, 25 bp, Homo sapien
ccagctaaacatgcttcatcgtcgg

SEQ ID NO: 5852282 - DNA, 25 bp, Homo sapien
ccgggctgccacgaccaagtgacag

SEQ ID NO: 5852283 - DNA, 25 bp, Homo sapien
gaccaagtgacagcaatgctgtttc

SEQ ID NO: 5852284 - DNA, 25 bp, Homo sapien
aatgctgtttcactggttatgcggc

SEQ ID NO: 5852285 - DNA, 25 bp, Homo sapien
atgccggtgaacgtgcaaaacaggc

SEQ ID NO: 5852286 - DNA, 25 bp, Homo sapien
acgtgcaaaacaggctctagcgttc

SEQ ID NO: 5852287 - DNA, 25 bp, Homo sapien
ctctagcgttcgaacgcactgattt

SEQ ID NO: 5852288 - DNA, 25 bp, Homo sapien
tcgttcactcatggaaaatagcgat

SEQ ID NO: 5852289 - DNA, 25 bp, Homo sapien
atttgcctgcattaccggtcgatgc

SEQ ID NO: 5852290 - DNA, 25 bp, Homo sapien
atggaaaatagcgatcgctgccagg

SEQ ID NO: 5852291 - DNA, 25 bp, Homo sapien
taccggtcgatgcaacgagtgatga

SEQ ID NO: 5852292 - DNA, 25 bp, Homo sapien
tcagggttaaagatatctcacgtac

SEQ ID NO: 5852293 - DNA, 25 bp, Homo sapien
gagtgatgaggttcgcaagaacctg

SEQ ID NO: 5852294 - DNA, 25 bp, Homo sapien
gcaagaacctgatggacatgttcag

SEQ ID NO: 5852295 - DNA, 25 bp, Homo sapien
gacatgttcagggatcgccaggcgt

SEQ ID NO: 5852296 - DNA, 25 bp, Homo sapien
gccaggcgttttctgagcatacctg

SEQ ID NO: 5852297 - DNA, 25 bp, Homo sapien
gcggcatggtgcaagttgaataacc

SEQ ID NO: 5852298 - DNA, 25 bp, Homo sapien
gaagatgttcgcgattatcttctat

SEQ ID NO: 5852299 - DNA, 25 bp, Homo sapien
tctatatcttcaggcgcgcggtctg

SEQ ID NO: 5852300 - DNA, 25 bp, Homo sapien
gcaacatttgggccagctaaacatg

SEQ ID NO: 5852301 - DNA, 25 bp, Homo sapien
ccagctaaacatgcttcatcgtcgg

SEQ ID NO: 5852302 - DNA, 25 bp, Homo sapien
ccgggctgccacgaccaagtgacag

SEQ ID NO: 5852303 - DNA, 25 bp, Homo sapien
gaccaagtgacagcaatgctgtttc

SEQ ID NO: 5852304 - DNA, 25 bp, Homo sapien
aatgctgtttcactggttatgcggc

SEQ ID NO: 5852305 - DNA, 25 bp, Homo sapien
atgccggtgaacgtgcaaaacaggc

SEQ ID NO: 5852306 - DNA, 25 bp, Homo sapien
acgtgcaaaacaggctctagcgttc

SEQ ID NO: 5852307 - DNA, 25 bp, Homo sapien
ctctagcgttcgaacgcactgattt

SEQ ID NO: 5852308 - DNA, 25 bp, Homo sapien
tcgttcactcatggaaaatagcgat

SEQ ID NO: 5852309 - DNA, 25 bp, Homo sapien
atttgcctgcattaccggtcgatgc

SEQ ID NO: 5852310 - DNA, 25 bp, Homo sapien
atggaaaatagcgatcgctgccagg

SEQ ID NO: 5852311 - DNA, 25 bp, Homo sapien
taccggtcgatgcaacgagtgatga

SEQ ID NO: 5852312 - DNA, 25 bp, Homo sapien
tcagggttaaagatatctcacgtac

SEQ ID NO: 5852313 - DNA, 25 bp, Homo sapien
gagtgatgaggttcgcaagaacctg

SEQ ID NO: 5852314 - DNA, 25 bp, Homo sapien
gcaagaacctgatggacatgttcag

SEQ ID NO: 5852315 - DNA, 25 bp, Homo sapien
gacatgttcagggatcgccaggcgt

SEQ ID NO: 5852316 - DNA, 25 bp, Homo sapien
gccaggcgttttctgagcatacctg

SEQ ID NO: 5852317 - DNA, 25 bp, Homo sapien
gcggcatggtgcaagttgaataacc

SEQ ID NO: 5852318 - DNA, 25 bp, Homo sapien
gaagatgttcgcgattatcttctat

SEQ ID NO: 5852319 - DNA, 25 bp, Homo sapien
tctatatcttcaggcgcgcggtctg

SEQ ID NO: 5852320 - DNA, 25 bp, Homo sapien
gcaacatttgggccagctaaacatg

SEQ ID NO: 5852321 - DNA, 25 bp, Homo sapien
ccagctaaacatgcttcatcgtcgg

SEQ ID NO: 5852322 - DNA, 25 bp, Homo sapien
ccgggctgccacgaccaagtgacag

SEQ ID NO: 5852323 - DNA, 25 bp, Homo sapien
gaccaagtgacagcaatgctgtttc

SEQ ID NO: 5852324 - DNA, 25 bp, Homo sapien
aatgctgtttcactggttatgcggc

SEQ ID NO: 5852325 - DNA, 25 bp, Homo sapien
atgccggtgaacgtgcaaaacaggc

SEQ ID NO: 5852326 - DNA, 25 bp, Homo sapien
acgtgcaaaacaggctctagcgttc

SEQ ID NO: 5852327 - DNA, 25 bp, Homo sapien
ctctagcgttcgaacgcactgattt

SEQ ID NO: 5852328 - DNA, 25 bp, Homo sapien
tcgttcactcatggaaaatagcgat

SEQ ID NO: 5852329 - DNA, 25 bp, Homo sapien
atttgcctgcattaccggtcgatgc

SEQ ID NO: 5852330 - DNA, 25 bp, Homo sapien
atggaaaatagcgatcgctgccagg

SEQ ID NO: 5852331 - DNA, 25 bp, Homo sapien
taccggtcgatgcaacgagtgatga

SEQ ID NO: 5852332 - DNA, 25 bp, Homo sapien
tcagggttaaagatatctcacgtac

SEQ ID NO: 5852333 - DNA, 25 bp, Homo sapien
gagtgatgaggttcgcaagaacctg

SEQ ID NO: 5852334 - DNA, 25 bp, Homo sapien
gcaagaacctgatggacatgttcag

SEQ ID NO: 5852335 - DNA, 25 bp, Homo sapien
gacatgttcagggatcgccaggcgt

SEQ ID NO: 5852336 - DNA, 25 bp, Homo sapien
gccaggcgttttctgagcatacctg

SEQ ID NO: 5852337 - DNA, 25 bp, Homo sapien
gcggcatggtgcaagttgaataacc

SEQ ID NO: 5852338 - DNA, 25 bp, Homo sapien
gaagatgttcgcgattatcttctat

SEQ ID NO: 5852339 - DNA, 25 bp, Homo sapien
tctatatcttcaggcgcgcggtctg

SEQ ID NO: 5852340 - DNA, 25 bp, Homo sapien
gcaacatttgggccagctaaacatg

SEQ ID NO: 5852341 - DNA, 25 bp, Homo sapien
ccagctaaacatgcttcatcgtcgg

SEQ ID NO: 5852342 - DNA, 25 bp, Homo sapien
ccgggctgccacgaccaagtgacag

SEQ ID NO: 5852343 - DNA, 25 bp, Homo sapien
gaccaagtgacagcaatgctgtttc

SEQ ID NO: 5852344 - DNA, 25 bp, Homo sapien
aatgctgtttcactggttatgcggc

SEQ ID NO: 5852345 - DNA, 25 bp, Homo sapien
atgccggtgaacgtgcaaaacaggc

SEQ ID NO: 5852346 - DNA, 25 bp, Homo sapien
acgtgcaaaacaggctctagcgttc

SEQ ID NO: 5852347 - DNA, 25 bp, Homo sapien
ctctagcgttcgaacgcactgattt

SEQ ID NO: 5852348 - DNA, 25 bp, Homo sapien
tcgttcactcatggaaaatagcgat

SEQ ID NO: 5852349 - DNA, 25 bp, Homo sapien
atttgcctgcattaccggtcgatgc

SEQ ID NO: 5852350 - DNA, 25 bp, Homo sapien
atggaaaatagcgatcgctgccagg

SEQ ID NO: 5852351 - DNA, 25 bp, Homo sapien
taccggtcgatgcaacgagtgatga

SEQ ID NO: 5852352 - DNA, 25 bp, Homo sapien
tcagggttaaagatatctcacgtac

SEQ ID NO: 5852353 - DNA, 25 bp, Homo sapien
gagtgatgaggttcgcaagaacctg

SEQ ID NO: 5852354 - DNA, 25 bp, Homo sapien
gcaagaacctgatggacatgttcag

SEQ ID NO: 5852355 - DNA, 25 bp, Homo sapien
gacatgttcagggatcgccaggcgt

SEQ ID NO: 5852356 - DNA, 25 bp, Homo sapien
gccaggcgttttctgagcatacctg

SEQ ID NO: 5852357 - DNA, 25 bp, Homo sapien
gcggcatggtgcaagttgaataacc

SEQ ID NO: 5852358 - DNA, 25 bp, Homo sapien
gaagatgttcgcgattatcttctat

SEQ ID NO: 5852359 - DNA, 25 bp, Homo sapien
tctatatcttcaggcgcgcggtctg

SEQ ID NO: 5852360 - DNA, 25 bp, Homo sapien
gcaacatttgggccagctaaacatg

SEQ ID NO: 5852361 - DNA, 25 bp, Homo sapien
ccagctaaacatgcttcatcgtcgg

SEQ ID NO: 5852362 - DNA, 25 bp, Homo sapien
ccgggctgccacgaccaagtgacag

SEQ ID NO: 5852363 - DNA, 25 bp, Homo sapien
gaccaagtgacagcaatgctgtttc

SEQ ID NO: 5852364 - DNA, 25 bp, Homo sapien
aatgctgtttcactggttatgcggc

SEQ ID NO: 5852365 - DNA, 25 bp, Homo sapien
atgccggtgaacgtgcaaaacaggc

SEQ ID NO: 5852366 - DNA, 25 bp, Homo sapien
acgtgcaaaacaggctctagcgttc

SEQ ID NO: 5852367 - DNA, 25 bp, Homo sapien
ctctagcgttcgaacgcactgattt

SEQ ID NO: 5852368 - DNA, 25 bp, Homo sapien
tcgttcactcatggaaaatagcgat

SEQ ID NO: 5852369 - DNA, 25 bp, Homo sapien
atttgcctgcattaccggtcgatgc

SEQ ID NO: 5852370 - DNA, 25 bp, Homo sapien
atggaaaatagcgatcgctgccagg

SEQ ID NO: 5852371 - DNA, 25 bp, Homo sapien
taccggtcgatgcaacgagtgatga

SEQ ID NO: 5852372 - DNA, 25 bp, Homo sapien
tcagggttaaagatatctcacgtac

SEQ ID NO: 5852373 - DNA, 25 bp, Homo sapien
gagtgatgaggttcgcaagaacctg

SEQ ID NO: 5852374 - DNA, 25 bp, Homo sapien
gcaagaacctgatggacatgttcag

SEQ ID NO: 5852375 - DNA, 25 bp, Homo sapien
gacatgttcagggatcgccaggcgt

SEQ ID NO: 5852376 - DNA, 25 bp, Homo sapien
gccaggcgttttctgagcatacctg

SEQ ID NO: 5852377 - DNA, 25 bp, Homo sapien
gcggcatggtgcaagttgaataacc

SEQ ID NO: 5852378 - DNA, 25 bp, Homo sapien
gaagatgttcgcgattatcttctat

SEQ ID NO: 5852379 - DNA, 25 bp, Homo sapien
tctatatcttcaggcgcgcggtctg

SEQ ID NO: 5852380 - DNA, 25 bp, Homo sapien
gcaacatttgggccagctaaacatg

SEQ ID NO: 5852381 - DNA, 25 bp, Homo sapien
ccagctaaacatgcttcatcgtcgg

SEQ ID NO: 5852382 - DNA, 25 bp, Homo sapien
ccgggctgccacgaccaagtgacag

SEQ ID NO: 5852383 - DNA, 25 bp, Homo sapien
gaccaagtgacagcaatgctgtttc

SEQ ID NO: 5852384 - DNA, 25 bp, Homo sapien
aatgctgtttcactggttatgcggc

SEQ ID NO: 5852385 - DNA, 25 bp, Homo sapien
atgccggtgaacgtgcaaaacaggc

SEQ ID NO: 5852386 - DNA, 25 bp, Homo sapien
acgtgcaaaacaggctctagcgttc

SEQ ID NO: 5852387 - DNA, 25 bp, Homo sapien
ctctagcgttcgaacgcactgattt

SEQ ID NO: 5852388 - DNA, 25 bp, Homo sapien
tcgttcactcatggaaaatagcgat

SEQ ID NO: 5852389 - DNA, 25 bp, Homo sapien
atttgcctgcattaccggtcgatgc

SEQ ID NO: 5852390 - DNA, 25 bp, Homo sapien
atggaaaatagcgatcgctgccagg

SEQ ID NO: 5852391 - DNA, 25 bp, Homo sapien
taccggtcgatgcaacgagtgatga

SEQ ID NO: 5852392 - DNA, 25 bp, Homo sapien
tcagggttaaagatatctcacgtac

SEQ ID NO: 5852393 - DNA, 25 bp, Homo sapien
gagtgatgaggttcgcaagaacctg

SEQ ID NO: 5852394 - DNA, 25 bp, Homo sapien
gcaagaacctgatggacatgttcag

SEQ ID NO: 5852395 - DNA, 25 bp, Homo sapien
gacatgttcagggatcgccaggcgt

SEQ ID NO: 5852396 - DNA, 25 bp, Homo sapien
gccaggcgttttctgagcatacctg

SEQ ID NO: 5852397 - DNA, 25 bp, Homo sapien
gcggcatggtgcaagttgaataacc

SEQ ID NO: 5852398 - DNA, 25 bp, Homo sapien
gaagatgttcgcgattatcttctat

SEQ ID NO: 5852399 - DNA, 25 bp, Homo sapien
tctatatcttcaggcgcgcggtctg

SEQ ID NO: 5852400 - DNA, 25 bp, Homo sapien
gcaacatttgggccagctaaacatg

SEQ ID NO: 5852401 - DNA, 25 bp, Homo sapien
ccagctaaacatgcttcatcgtcgg

SEQ ID NO: 5852402 - DNA, 25 bp, Homo sapien
ccgggctgccacgaccaagtgacag

SEQ ID NO: 5852403 - DNA, 25 bp, Homo sapien
gaccaagtgacagcaatgctgtttc

SEQ ID NO: 5852404 - DNA, 25 bp, Homo sapien
aatgctgtttcactggttatgcggc

SEQ ID NO: 5852405 - DNA, 25 bp, Homo sapien
atgccggtgaacgtgcaaaacaggc

SEQ ID NO: 5852406 - DNA, 25 bp, Homo sapien
acgtgcaaaacaggctctagcgttc

SEQ ID NO: 5852407 - DNA, 25 bp, Homo sapien
ctctagcgttcgaacgcactgattt

SEQ ID NO: 5852408 - DNA, 25 bp, Homo sapien
tcgttcactcatggaaaatagcgat

SEQ ID NO: 5852409 - DNA, 25 bp, Homo sapien
atttgcctgcattaccggtcgatgc

SEQ ID NO: 5852410 - DNA, 25 bp, Homo sapien
atggaaaatagcgatcgctgccagg

SEQ ID NO: 5852411 - DNA, 25 bp, Homo sapien
taccggtcgatgcaacgagtgatga

SEQ ID NO: 5852412 - DNA, 25 bp, Homo sapien
tcagggttaaagatatctcacgtac

SEQ ID NO: 5852413 - DNA, 25 bp, Homo sapien
gagtgatgaggttcgcaagaacctg

SEQ ID NO: 5852414 - DNA, 25 bp, Homo sapien
gcaagaacctgatggacatgttcag

SEQ ID NO: 5852415 - DNA, 25 bp, Homo sapien
gacatgttcagggatcgccaggcgt

SEQ ID NO: 5852416 - DNA, 25 bp, Homo sapien
gccaggcgttttctgagcatacctg

SEQ ID NO: 5852417 - DNA, 25 bp, Homo sapien
gcggcatggtgcaagttgaataacc

SEQ ID NO: 5852418 - DNA, 25 bp, Homo sapien
gaagatgttcgcgattatcttctat

SEQ ID NO: 5852419 - DNA, 25 bp, Homo sapien
tctatatcttcaggcgcgcggtctg

SEQ ID NO: 5852420 - DNA, 25 bp, Homo sapien
gcaacatttgggccagctaaacatg

SEQ ID NO: 5852421 - DNA, 25 bp, Homo sapien
ccagctaaacatgcttcatcgtcgg

SEQ ID NO: 5852422 - DNA, 25 bp, Homo sapien
ccgggctgccacgaccaagtgacag

SEQ ID NO: 5852423 - DNA, 25 bp, Homo sapien
gaccaagtgacagcaatgctgtttc

SEQ ID NO: 5852424 - DNA, 25 bp, Homo sapien
aatgctgtttcactggttatgcggc

SEQ ID NO: 5852425 - DNA, 25 bp, Homo sapien
atgccggtgaacgtgcaaaacaggc

SEQ ID NO: 5852426 - DNA, 25 bp, Homo sapien
acgtgcaaaacaggctctagcgttc

SEQ ID NO: 5852427 - DNA, 25 bp, Homo sapien
ctctagcgttcgaacgcactgattt

SEQ ID NO: 5852428 - DNA, 25 bp, Homo sapien
tcgttcactcatggaaaatagcgat

SEQ ID NO: 5852429 - DNA, 25 bp, Homo sapien
atttgcctgcattaccggtcgatgc

SEQ ID NO: 5852430 - DNA, 25 bp, Homo sapien
atggaaaatagcgatcgctgccagg

SEQ ID NO: 5852431 - DNA, 25 bp, Homo sapien
taccggtcgatgcaacgagtgatga

SEQ ID NO: 5852432 - DNA, 25 bp, Homo sapien
tcagggttaaagatatctcacgtac

SEQ ID NO: 5852433 - DNA, 25 bp, Homo sapien
gagtgatgaggttcgcaagaacctg

SEQ ID NO: 5852434 - DNA, 25 bp, Homo sapien
gcaagaacctgatggacatgttcag

SEQ ID NO: 5852435 - DNA, 25 bp, Homo sapien
gacatgttcagggatcgccaggcgt

SEQ ID NO: 5852436 - DNA, 25 bp, Homo sapien
gccaggcgttttctgagcatacctg

SEQ ID NO: 5852437 - DNA, 25 bp, Homo sapien
gcggcatggtgcaagttgaataacc

SEQ ID NO: 5852438 - DNA, 25 bp, Homo sapien
gaagatgttcgcgattatcttctat

SEQ ID NO: 5852439 - DNA, 25 bp, Homo sapien
tctatatcttcaggcgcgcggtctg

SEQ ID NO: 5852440 - DNA, 25 bp, Homo sapien
gcaacatttgggccagctaaacatg

SEQ ID NO: 5852441 - DNA, 25 bp, Homo sapien
ccagctaaacatgcttcatcgtcgg

SEQ ID NO: 5852442 - DNA, 25 bp, Homo sapien
ccgggctgccacgaccaagtgacag

SEQ ID NO: 5852443 - DNA, 25 bp, Homo sapien
gaccaagtgacagcaatgctgtttc

SEQ ID NO: 5852444 - DNA, 25 bp, Homo sapien
aatgctgtttcactggttatgcggc

SEQ ID NO: 5852445 - DNA, 25 bp, Homo sapien
atgccggtgaacgtgcaaaacaggc

SEQ ID NO: 5852446 - DNA, 25 bp, Homo sapien
acgtgcaaaacaggctctagcgttc

SEQ ID NO: 5852447 - DNA, 25 bp, Homo sapien
ctctagcgttcgaacgcactgattt

SEQ ID NO: 5852448 - DNA, 25 bp, Homo sapien
tcgttcactcatggaaaatagcgat

SEQ ID NO: 5852449 - DNA, 25 bp, Homo sapien
atttgcctgcattaccggtcgatgc

SEQ ID NO: 5852450 - DNA, 25 bp, Homo sapien
atggaaaatagcgatcgctgccagg

SEQ ID NO: 5852451 - DNA, 25 bp, Homo sapien
taccggtcgatgcaacgagtgatga

SEQ ID NO: 5852452 - DNA, 25 bp, Homo sapien
tcagggttaaagatatctcacgtac

SEQ ID NO: 5852453 - DNA, 25 bp, Homo sapien
gagtgatgaggttcgcaagaacctg

SEQ ID NO: 5852454 - DNA, 25 bp, Homo sapien
gcaagaacctgatggacatgttcag

SEQ ID NO: 5852455 - DNA, 25 bp, Homo sapien
gacatgttcagggatcgccaggcgt

SEQ ID NO: 5852456 - DNA, 25 bp, Homo sapien
gccaggcgttttctgagcatacctg

SEQ ID NO: 5852457 - DNA, 25 bp, Homo sapien
gcggcatggtgcaagttgaataacc

SEQ ID NO: 5852458 - DNA, 25 bp, Homo sapien
gaagatgttcgcgattatcttctat

SEQ ID NO: 5852459 - DNA, 25 bp, Homo sapien
tctatatcttcaggcgcgcggtctg

SEQ ID NO: 5852460 - DNA, 25 bp, Homo sapien
gcaacatttgggccagctaaacatg

SEQ ID NO: 5852461 - DNA, 25 bp, Homo sapien
ccagctaaacatgcttcatcgtcgg

SEQ ID NO: 5852462 - DNA, 25 bp, Homo sapien
ccgggctgccacgaccaagtgacag

SEQ ID NO: 5852463 - DNA, 25 bp, Homo sapien
gaccaagtgacagcaatgctgtttc

SEQ ID NO: 5852464 - DNA, 25 bp, Homo sapien
aatgctgtttcactggttatgcggc

SEQ ID NO: 5852465 - DNA, 25 bp, Homo sapien
atgccggtgaacgtgcaaaacaggc

SEQ ID NO: 5852466 - DNA, 25 bp, Homo sapien
acgtgcaaaacaggctctagcgttc

SEQ ID NO: 5852467 - DNA, 25 bp, Homo sapien
ctctagcgttcgaacgcactgattt

SEQ ID NO: 5852468 - DNA, 25 bp, Homo sapien
tcgttcactcatggaaaatagcgat

SEQ ID NO: 5852469 - DNA, 25 bp, Homo sapien
atttgcctgcattaccggtcgatgc

SEQ ID NO: 5852470 - DNA, 25 bp, Homo sapien
atggaaaatagcgatcgctgccagg

SEQ ID NO: 5852471 - DNA, 25 bp, Homo sapien
taccggtcgatgcaacgagtgatga

SEQ ID NO: 5852472 - DNA, 25 bp, Homo sapien
tcagggttaaagatatctcacgtac

SEQ ID NO: 5852473 - DNA, 25 bp, Homo sapien
gagtgatgaggttcgcaagaacctg

SEQ ID NO: 5852474 - DNA, 25 bp, Homo sapien
gcaagaacctgatggacatgttcag

SEQ ID NO: 5852475 - DNA, 25 bp, Homo sapien
gacatgttcagggatcgccaggcgt

SEQ ID NO: 5852476 - DNA, 25 bp, Homo sapien
gccaggcgttttctgagcatacctg

SEQ ID NO: 5852477 - DNA, 25 bp, Homo sapien
gcggcatggtgcaagttgaataacc

SEQ ID NO: 5852478 - DNA, 25 bp, Homo sapien
gaagatgttcgcgattatcttctat

SEQ ID NO: 5852479 - DNA, 25 bp, Homo sapien
tctatatcttcaggcgcgcggtctg

SEQ ID NO: 5852480 - DNA, 25 bp, Homo sapien
gcaacatttgggccagctaaacatg

SEQ ID NO: 5852481 - DNA, 25 bp, Homo sapien
ccagctaaacatgcttcatcgtcgg

SEQ ID NO: 5852482 - DNA, 25 bp, Homo sapien
ccgggctgccacgaccaagtgacag

SEQ ID NO: 5852483 - DNA, 25 bp, Homo sapien
gaccaagtgacagcaatgctgtttc

SEQ ID NO: 5852484 - DNA, 25 bp, Homo sapien
aatgctgtttcactggttatgcggc

SEQ ID NO: 5852485 - DNA, 25 bp, Homo sapien
atgccggtgaacgtgcaaaacaggc

SEQ ID NO: 5852486 - DNA, 25 bp, Homo sapien
acgtgcaaaacaggctctagcgttc

SEQ ID NO: 5852487 - DNA, 25 bp, Homo sapien
ctctagcgttcgaacgcactgattt

SEQ ID NO: 5852488 - DNA, 25 bp, Homo sapien
tcgttcactcatggaaaatagcgat

SEQ ID NO: 5852489 - DNA, 25 bp, Homo sapien
atttgcctgcattaccggtcgatgc

SEQ ID NO: 5852490 - DNA, 25 bp, Homo sapien
atggaaaatagcgatcgctgccagg

SEQ ID NO: 5852491 - DNA, 25 bp, Homo sapien
taccggtcgatgcaacgagtgatga

SEQ ID NO: 5852492 - DNA, 25 bp, Homo sapien
tcagggttaaagatatctcacgtac

SEQ ID NO: 5852493 - DNA, 25 bp, Homo sapien
gagtgatgaggttcgcaagaacctg

SEQ ID NO: 5852494 - DNA, 25 bp, Homo sapien
gcaagaacctgatggacatgttcag

SEQ ID NO: 5852495 - DNA, 25 bp, Homo sapien
gacatgttcagggatcgccaggcgt

SEQ ID NO: 5852496 - DNA, 25 bp, Homo sapien
gccaggcgttttctgagcatacctg

SEQ ID NO: 5852497 - DNA, 25 bp, Homo sapien
gcggcatggtgcaagttgaataacc

SEQ ID NO: 5852498 - DNA, 25 bp, Homo sapien
gaagatgttcgcgattatcttctat

SEQ ID NO: 5852499 - DNA, 25 bp, Homo sapien
tctatatcttcaggcgcgcggtctg

SEQ ID NO: 5852500 - DNA, 25 bp, Homo sapien
gcaacatttgggccagctaaacatg

SEQ ID NO: 5852501 - DNA, 25 bp, Homo sapien
ccagctaaacatgcttcatcgtcgg

SEQ ID NO: 5852502 - DNA, 25 bp, Homo sapien
ccgggctgccacgaccaagtgacag

SEQ ID NO: 5852503 - DNA, 25 bp, Homo sapien
gaccaagtgacagcaatgctgtttc

SEQ ID NO: 5852504 - DNA, 25 bp, Homo sapien
aatgctgtttcactggttatgcggc

SEQ ID NO: 5852505 - DNA, 25 bp, Homo sapien
atgccggtgaacgtgcaaaacaggc

SEQ ID NO: 5852506 - DNA, 25 bp, Homo sapien
acgtgcaaaacaggctctagcgttc

SEQ ID NO: 5852507 - DNA, 25 bp, Homo sapien
ctctagcgttcgaacgcactgattt

SEQ ID NO: 5852508 - DNA, 25 bp, Homo sapien
tcgttcactcatggaaaatagcgat

SEQ ID NO: 5852509 - DNA, 25 bp, Homo sapien
atttgcctgcattaccggtcgatgc

SEQ ID NO: 5852510 - DNA, 25 bp, Homo sapien
atggaaaatagcgatcgctgccagg

SEQ ID NO: 5852511 - DNA, 25 bp, Homo sapien
taccggtcgatgcaacgagtgatga

SEQ ID NO: 5852512 - DNA, 25 bp, Homo sapien
tcagggttaaagatatctcacgtac

SEQ ID NO: 5852513 - DNA, 25 bp, Homo sapien
gagtgatgaggttcgcaagaacctg

SEQ ID NO: 5852514 - DNA, 25 bp, Homo sapien
gcaagaacctgatggacatgttcag

SEQ ID NO: 5852515 - DNA, 25 bp, Homo sapien
gacatgttcagggatcgccaggcgt

SEQ ID NO: 5852516 - DNA, 25 bp, Homo sapien
gccaggcgttttctgagcatacctg

SEQ ID NO: 5852517 - DNA, 25 bp, Homo sapien
gcggcatggtgcaagttgaataacc

SEQ ID NO: 5852518 - DNA, 25 bp, Homo sapien
gaagatgttcgcgattatcttctat

SEQ ID NO: 5852519 - DNA, 25 bp, Homo sapien
tctatatcttcaggcgcgcggtctg

SEQ ID NO: 5852520 - DNA, 25 bp, Homo sapien
gcaacatttgggccagctaaacatg

SEQ ID NO: 5852521 - DNA, 25 bp, Homo sapien
ccagctaaacatgcttcatcgtcgg

SEQ ID NO: 5852522 - DNA, 25 bp, Homo sapien
ccgggctgccacgaccaagtgacag

SEQ ID NO: 5852523 - DNA, 25 bp, Homo sapien
gaccaagtgacagcaatgctgtttc

SEQ ID NO: 5852524 - DNA, 25 bp, Homo sapien
aatgctgtttcactggttatgcggc

SEQ ID NO: 5852525 - DNA, 25 bp, Homo sapien
atgccggtgaacgtgcaaaacaggc

SEQ ID NO: 5852526 - DNA, 25 bp, Homo sapien
acgtgcaaaacaggctctagcgttc

SEQ ID NO: 5852527 - DNA, 25 bp, Homo sapien
ctctagcgttcgaacgcactgattt

SEQ ID NO: 5852528 - DNA, 25 bp, Homo sapien
tcgttcactcatggaaaatagcgat

SEQ ID NO: 5852529 - DNA, 25 bp, Homo sapien
atttgcctgcattaccggtcgatgc

SEQ ID NO: 5852530 - DNA, 25 bp, Homo sapien
atggaaaatagcgatcgctgccagg

SEQ ID NO: 5852531 - DNA, 25 bp, Homo sapien
taccggtcgatgcaacgagtgatga

SEQ ID NO: 5852532 - DNA, 25 bp, Homo sapien
tcagggttaaagatatctcacgtac

SEQ ID NO: 5852533 - DNA, 25 bp, Homo sapien
gagtgatgaggttcgcaagaacctg

SEQ ID NO: 5852534 - DNA, 25 bp, Homo sapien
gcaagaacctgatggacatgttcag

SEQ ID NO: 5852535 - DNA, 25 bp, Homo sapien
gacatgttcagggatcgccaggcgt

SEQ ID NO: 5852536 - DNA, 25 bp, Homo sapien
gccaggcgttttctgagcatacctg

SEQ ID NO: 5852537 - DNA, 25 bp, Homo sapien
gcggcatggtgcaagttgaataacc

SEQ ID NO: 5852538 - DNA, 25 bp, Homo sapien
gaagatgttcgcgattatcttctat

SEQ ID NO: 5852539 - DNA, 25 bp, Homo sapien
tctatatcttcaggcgcgcggtctg

SEQ ID NO: 5852540 - DNA, 25 bp, Homo sapien
gcaacatttgggccagctaaacatg

SEQ ID NO: 5852541 - DNA, 25 bp, Homo sapien
ccagctaaacatgcttcatcgtcgg

SEQ ID NO: 5852542 - DNA, 25 bp, Homo sapien
ccgggctgccacgaccaagtgacag

SEQ ID NO: 5852543 - DNA, 25 bp, Homo sapien
gaccaagtgacagcaatgctgtttc

SEQ ID NO: 5852544 - DNA, 25 bp, Homo sapien
aatgctgtttcactggttatgcggc

SEQ ID NO: 5852545 - DNA, 25 bp, Homo sapien
atgccggtgaacgtgcaaaacaggc

SEQ ID NO: 5852546 - DNA, 25 bp, Homo sapien
acgtgcaaaacaggctctagcgttc

SEQ ID NO: 5852547 - DNA, 25 bp, Homo sapien
ctctagcgttcgaacgcactgattt

SEQ ID NO: 5852548 - DNA, 25 bp, Homo sapien
tcgttcactcatggaaaatagcgat

SEQ ID NO: 5852549 - DNA, 25 bp, Homo sapien
atttgcctgcattaccggtcgatgc

SEQ ID NO: 5852550 - DNA, 25 bp, Homo sapien
atggaaaatagcgatcgctgccagg

SEQ ID NO: 5852551 - DNA, 25 bp, Homo sapien
taccggtcgatgcaacgagtgatga

SEQ ID NO: 5852552 - DNA, 25 bp, Homo sapien
tcagggttaaagatatctcacgtac

SEQ ID NO: 5852553 - DNA, 25 bp, Homo sapien
gagtgatgaggttcgcaagaacctg

SEQ ID NO: 5852554 - DNA, 25 bp, Homo sapien
gcaagaacctgatggacatgttcag

SEQ ID NO: 5852555 - DNA, 25 bp, Homo sapien
gacatgttcagggatcgccaggcgt

SEQ ID NO: 5852556 - DNA, 25 bp, Homo sapien
gccaggcgttttctgagcatacctg

SEQ ID NO: 5852557 - DNA, 25 bp, Homo sapien
gcggcatggtgcaagttgaataacc

SEQ ID NO: 5852558 - DNA, 25 bp, Homo sapien
gaagatgttcgcgattatcttctat

SEQ ID NO: 5852559 - DNA, 25 bp, Homo sapien
tctatatcttcaggcgcgcggtctg

SEQ ID NO: 5852560 - DNA, 25 bp, Homo sapien
gcaacatttgggccagctaaacatg

SEQ ID NO: 5852561 - DNA, 25 bp, Homo sapien
ccagctaaacatgcttcatcgtcgg

SEQ ID NO: 5852562 - DNA, 25 bp, Homo sapien
ccgggctgccacgaccaagtgacag

SEQ ID NO: 5852563 - DNA, 25 bp, Homo sapien
gaccaagtgacagcaatgctgtttc

SEQ ID NO: 5852564 - DNA, 25 bp, Homo sapien
aatgctgtttcactggttatgcggc

SEQ ID NO: 5852565 - DNA, 25 bp, Homo sapien
atgccggtgaacgtgcaaaacaggc

SEQ ID NO: 5852566 - DNA, 25 bp, Homo sapien
acgtgcaaaacaggctctagcgttc

SEQ ID NO: 5852567 - DNA, 25 bp, Homo sapien
ctctagcgttcgaacgcactgattt

SEQ ID NO: 5852568 - DNA, 25 bp, Homo sapien
tcgttcactcatggaaaatagcgat

SEQ ID NO: 5852569 - DNA, 25 bp, Homo sapien
atttgcctgcattaccggtcgatgc

SEQ ID NO: 5852570 - DNA, 25 bp, Homo sapien
atggaaaatagcgatcgctgccagg

SEQ ID NO: 5852571 - DNA, 25 bp, Homo sapien
taccggtcgatgcaacgagtgatga

SEQ ID NO: 5852572 - DNA, 25 bp, Homo sapien
tcagggttaaagatatctcacgtac

SEQ ID NO: 5852573 - DNA, 25 bp, Homo sapien
gagtgatgaggttcgcaagaacctg

SEQ ID NO: 5852574 - DNA, 25 bp, Homo sapien
gcaagaacctgatggacatgttcag

SEQ ID NO: 5852575 - DNA, 25 bp, Homo sapien
gacatgttcagggatcgccaggcgt

SEQ ID NO: 5852576 - DNA, 25 bp, Homo sapien
gccaggcgttttctgagcatacctg

SEQ ID NO: 5852577 - DNA, 25 bp, Homo sapien
gcggcatggtgcaagttgaataacc

SEQ ID NO: 5852578 - DNA, 25 bp, Homo sapien
gaagatgttcgcgattatcttctat

SEQ ID NO: 5852579 - DNA, 25 bp, Homo sapien
tctatatcttcaggcgcgcggtctg

SEQ ID NO: 5852580 - DNA, 25 bp, Homo sapien
gcaacatttgggccagctaaacatg

SEQ ID NO: 5852581 - DNA, 25 bp, Homo sapien
ccagctaaacatgcttcatcgtcgg

SEQ ID NO: 5852582 - DNA, 25 bp, Homo sapien
ccgggctgccacgaccaagtgacag

SEQ ID NO: 5852583 - DNA, 25 bp, Homo sapien
gaccaagtgacagcaatgctgtttc

SEQ ID NO: 5852584 - DNA, 25 bp, Homo sapien
aatgctgtttcactggttatgcggc

SEQ ID NO: 5852585 - DNA, 25 bp, Homo sapien
atgccggtgaacgtgcaaaacaggc

SEQ ID NO: 5852586 - DNA, 25 bp, Homo sapien
acgtgcaaaacaggctctagcgttc

SEQ ID NO: 5852587 - DNA, 25 bp, Homo sapien
ctctagcgttcgaacgcactgattt

SEQ ID NO: 5852588 - DNA, 25 bp, Homo sapien
tcgttcactcatggaaaatagcgat

SEQ ID NO: 5852589 - DNA, 25 bp, Homo sapien
atttgcctgcattaccggtcgatgc

SEQ ID NO: 5852590 - DNA, 25 bp, Homo sapien
atggaaaatagcgatcgctgccagg

SEQ ID NO: 5852591 - DNA, 25 bp, Homo sapien
taccggtcgatgcaacgagtgatga

SEQ ID NO: 5852592 - DNA, 25 bp, Homo sapien
tcagggttaaagatatctcacgtac

SEQ ID NO: 5852593 - DNA, 25 bp, Homo sapien
gagtgatgaggttcgcaagaacctg

SEQ ID NO: 5852594 - DNA, 25 bp, Homo sapien
gcaagaacctgatggacatgttcag

SEQ ID NO: 5852595 - DNA, 25 bp, Homo sapien
gacatgttcagggatcgccaggcgt

SEQ ID NO: 5852596 - DNA, 25 bp, Homo sapien
gccaggcgttttctgagcatacctg

SEQ ID NO: 5852597 - DNA, 25 bp, Homo sapien
gcggcatggtgcaagttgaataacc

SEQ ID NO: 5852598 - DNA, 25 bp, Homo sapien
gaagatgttcgcgattatcttctat

SEQ ID NO: 5852599 - DNA, 25 bp, Homo sapien
tctatatcttcaggcgcgcggtctg

SEQ ID NO: 5852600 - DNA, 25 bp, Homo sapien
gcaacatttgggccagctaaacatg

SEQ ID NO: 5852601 - DNA, 25 bp, Homo sapien
ccagctaaacatgcttcatcgtcgg

SEQ ID NO: 5852602 - DNA, 25 bp, Homo sapien
ccgggctgccacgaccaagtgacag

SEQ ID NO: 5852603 - DNA, 25 bp, Homo sapien
gaccaagtgacagcaatgctgtttc

SEQ ID NO: 5852604 - DNA, 25 bp, Homo sapien
aatgctgtttcactggttatgcggc

SEQ ID NO: 5852605 - DNA, 25 bp, Homo sapien
atgccggtgaacgtgcaaaacaggc

SEQ ID NO: 5852606 - DNA, 25 bp, Homo sapien
acgtgcaaaacaggctctagcgttc

SEQ ID NO: 5852607 - DNA, 25 bp, Homo sapien
ctctagcgttcgaacgcactgattt

SEQ ID NO: 5852608 - DNA, 25 bp, Homo sapien
tcgttcactcatggaaaatagcgat

SEQ ID NO: 5852609 - DNA, 25 bp, Homo sapien
atttgcctgcattaccggtcgatgc

SEQ ID NO: 5852610 - DNA, 25 bp, Homo sapien
atggaaaatagcgatcgctgccagg

SEQ ID NO: 5852611 - DNA, 25 bp, Homo sapien
taccggtcgatgcaacgagtgatga

SEQ ID NO: 5852612 - DNA, 25 bp, Homo sapien
tcagggttaaagatatctcacgtac

SEQ ID NO: 5852613 - DNA, 25 bp, Homo sapien
gagtgatgaggttcgcaagaacctg

SEQ ID NO: 5852614 - DNA, 25 bp, Homo sapien
gcaagaacctgatggacatgttcag

SEQ ID NO: 5852615 - DNA, 25 bp, Homo sapien
gacatgttcagggatcgccaggcgt

SEQ ID NO: 5852616 - DNA, 25 bp, Homo sapien
gccaggcgttttctgagcatacctg

SEQ ID NO: 5852617 - DNA, 25 bp, Homo sapien
gcggcatggtgcaagttgaataacc

SEQ ID NO: 5852618 - DNA, 25 bp, Homo sapien
gaagatgttcgcgattatcttctat

SEQ ID NO: 5852619 - DNA, 25 bp, Homo sapien
tctatatcttcaggcgcgcggtctg

SEQ ID NO: 5852620 - DNA, 25 bp, Homo sapien
gcaacatttgggccagctaaacatg

SEQ ID NO: 5852621 - DNA, 25 bp, Homo sapien
ccagctaaacatgcttcatcgtcgg

SEQ ID NO: 5852622 - DNA, 25 bp, Homo sapien
ccgggctgccacgaccaagtgacag

SEQ ID NO: 5852623 - DNA, 25 bp, Homo sapien
gaccaagtgacagcaatgctgtttc

SEQ ID NO: 5852624 - DNA, 25 bp, Homo sapien
aatgctgtttcactggttatgcggc

SEQ ID NO: 5852625 - DNA, 25 bp, Homo sapien
atgccggtgaacgtgcaaaacaggc

SEQ ID NO: 5852626 - DNA, 25 bp, Homo sapien
acgtgcaaaacaggctctagcgttc

SEQ ID NO: 5852627 - DNA, 25 bp, Homo sapien
ctctagcgttcgaacgcactgattt

SEQ ID NO: 5852628 - DNA, 25 bp, Homo sapien
tcgttcactcatggaaaatagcgat

SEQ ID NO: 5852629 - DNA, 25 bp, Homo sapien
atttgcctgcattaccggtcgatgc

SEQ ID NO: 5852630 - DNA, 25 bp, Homo sapien
atggaaaatagcgatcgctgccagg

SEQ ID NO: 5852631 - DNA, 25 bp, Homo sapien
taccggtcgatgcaacgagtgatga

SEQ ID NO: 5852632 - DNA, 25 bp, Homo sapien
tcagggttaaagatatctcacgtac

SEQ ID NO: 5852633 - DNA, 25 bp, Homo sapien
gagtgatgaggttcgcaagaacctg

SEQ ID NO: 5852634 - DNA, 25 bp, Homo sapien
gcaagaacctgatggacatgttcag

SEQ ID NO: 5852635 - DNA, 25 bp, Homo sapien
gacatgttcagggatcgccaggcgt

SEQ ID NO: 5852636 - DNA, 25 bp, Homo sapien
gccaggcgttttctgagcatacctg

SEQ ID NO: 5852637 - DNA, 25 bp, Homo sapien
gcggcatggtgcaagttgaataacc

SEQ ID NO: 5852638 - DNA, 25 bp, Homo sapien
gaagatgttcgcgattatcttctat

SEQ ID NO: 5852639 - DNA, 25 bp, Homo sapien
tctatatcttcaggcgcgcggtctg

SEQ ID NO: 5852640 - DNA, 25 bp, Homo sapien
gcaacatttgggccagctaaacatg

SEQ ID NO: 5852641 - DNA, 25 bp, Homo sapien
ccagctaaacatgcttcatcgtcgg

SEQ ID NO: 5852642 - DNA, 25 bp, Homo sapien
ccgggctgccacgaccaagtgacag

SEQ ID NO: 5852643 - DNA, 25 bp, Homo sapien
gaccaagtgacagcaatgctgtttc

SEQ ID NO: 5852644 - DNA, 25 bp, Homo sapien
aatgctgtttcactggttatgcggc

SEQ ID NO: 5852645 - DNA, 25 bp, Homo sapien
atgccggtgaacgtgcaaaacaggc

SEQ ID NO: 5852646 - DNA, 25 bp, Homo sapien
acgtgcaaaacaggctctagcgttc

SEQ ID NO: 5852647 - DNA, 25 bp, Homo sapien
ctctagcgttcgaacgcactgattt

SEQ ID NO: 5852648 - DNA, 25 bp, Homo sapien
tcgttcactcatggaaaatagcgat

SEQ ID NO: 5852649 - DNA, 25 bp, Homo sapien
atttgcctgcattaccggtcgatgc

SEQ ID NO: 5852650 - DNA, 25 bp, Homo sapien
atggaaaatagcgatcgctgccagg

SEQ ID NO: 5852651 - DNA, 25 bp, Homo sapien
taccggtcgatgcaacgagtgatga

SEQ ID NO: 5852652 - DNA, 25 bp, Homo sapien
tcagggttaaagatatctcacgtac

SEQ ID NO: 5852653 - DNA, 25 bp, Homo sapien
gagtgatgaggttcgcaagaacctg

SEQ ID NO: 5852654 - DNA, 25 bp, Homo sapien
gcaagaacctgatggacatgttcag

SEQ ID NO: 5852655 - DNA, 25 bp, Homo sapien
gacatgttcagggatcgccaggcgt

SEQ ID NO: 5852656 - DNA, 25 bp, Homo sapien
gccaggcgttttctgagcatacctg

SEQ ID NO: 5852657 - DNA, 25 bp, Homo sapien
gcggcatggtgcaagttgaataacc

SEQ ID NO: 5852658 - DNA, 25 bp, Homo sapien
gaagatgttcgcgattatcttctat

SEQ ID NO: 5852659 - DNA, 25 bp, Homo sapien
tctatatcttcaggcgcgcggtctg

SEQ ID NO: 5852660 - DNA, 25 bp, Homo sapien
gcaacatttgggccagctaaacatg

SEQ ID NO: 5852661 - DNA, 25 bp, Homo sapien
ccagctaaacatgcttcatcgtcgg

SEQ ID NO: 5852662 - DNA, 25 bp, Homo sapien
ccgggctgccacgaccaagtgacag

SEQ ID NO: 5852663 - DNA, 25 bp, Homo sapien
gaccaagtgacagcaatgctgtttc

SEQ ID NO: 5852664 - DNA, 25 bp, Homo sapien
aatgctgtttcactggttatgcggc

SEQ ID NO: 5852665 - DNA, 25 bp, Homo sapien
atgccggtgaacgtgcaaaacaggc

SEQ ID NO: 5852666 - DNA, 25 bp, Homo sapien
acgtgcaaaacaggctctagcgttc

SEQ ID NO: 5852667 - DNA, 25 bp, Homo sapien
ctctagcgttcgaacgcactgattt

SEQ ID NO: 5852668 - DNA, 25 bp, Homo sapien
tcgttcactcatggaaaatagcgat

SEQ ID NO: 5852669 - DNA, 25 bp, Homo sapien
atttgcctgcattaccggtcgatgc

SEQ ID NO: 5852670 - DNA, 25 bp, Homo sapien
atggaaaatagcgatcgctgccagg

SEQ ID NO: 5852671 - DNA, 25 bp, Homo sapien
taccggtcgatgcaacgagtgatga

SEQ ID NO: 5852672 - DNA, 25 bp, Homo sapien
tcagggttaaagatatctcacgtac

SEQ ID NO: 5852673 - DNA, 25 bp, Homo sapien
gagtgatgaggttcgcaagaacctg

SEQ ID NO: 5852674 - DNA, 25 bp, Homo sapien
gcaagaacctgatggacatgttcag

SEQ ID NO: 5852675 - DNA, 25 bp, Homo sapien
gacatgttcagggatcgccaggcgt

SEQ ID NO: 5852676 - DNA, 25 bp, Homo sapien
gccaggcgttttctgagcatacctg

SEQ ID NO: 5852677 - DNA, 25 bp, Homo sapien
gcggcatggtgcaagttgaataacc

SEQ ID NO: 5852678 - DNA, 25 bp, Homo sapien
gaagatgttcgcgattatcttctat

SEQ ID NO: 5852679 - DNA, 25 bp, Homo sapien
tctatatcttcaggcgcgcggtctg

SEQ ID NO: 5852680 - DNA, 25 bp, Homo sapien
gcaacatttgggccagctaaacatg

SEQ ID NO: 5852681 - DNA, 25 bp, Homo sapien
ccagctaaacatgcttcatcgtcgg

SEQ ID NO: 5852682 - DNA, 25 bp, Homo sapien
ccgggctgccacgaccaagtgacag

SEQ ID NO: 5852683 - DNA, 25 bp, Homo sapien
gaccaagtgacagcaatgctgtttc

SEQ ID NO: 5852684 - DNA, 25 bp, Homo sapien
aatgctgtttcactggttatgcggc

SEQ ID NO: 5852685 - DNA, 25 bp, Homo sapien
atgccggtgaacgtgcaaaacaggc

SEQ ID NO: 5852686 - DNA, 25 bp, Homo sapien
acgtgcaaaacaggctctagcgttc

SEQ ID NO: 5852687 - DNA, 25 bp, Homo sapien
ctctagcgttcgaacgcactgattt

SEQ ID NO: 5852688 - DNA, 25 bp, Homo sapien
tcgttcactcatggaaaatagcgat

SEQ ID NO: 5852689 - DNA, 25 bp, Homo sapien
atttgcctgcattaccggtcgatgc

SEQ ID NO: 5852690 - DNA, 25 bp, Homo sapien
atggaaaatagcgatcgctgccagg

SEQ ID NO: 5852691 - DNA, 25 bp, Homo sapien
taccggtcgatgcaacgagtgatga

SEQ ID NO: 5852692 - DNA, 25 bp, Homo sapien
tcagggttaaagatatctcacgtac

SEQ ID NO: 5852693 - DNA, 25 bp, Homo sapien
gagtgatgaggttcgcaagaacctg

SEQ ID NO: 5852694 - DNA, 25 bp, Homo sapien
gcaagaacctgatggacatgttcag

SEQ ID NO: 5852695 - DNA, 25 bp, Homo sapien
gacatgttcagggatcgccaggcgt

SEQ ID NO: 5852696 - DNA, 25 bp, Homo sapien
gccaggcgttttctgagcatacctg

SEQ ID NO: 5852697 - DNA, 25 bp, Homo sapien
gcggcatggtgcaagttgaataacc

SEQ ID NO: 5852698 - DNA, 25 bp, Homo sapien
gaagatgttcgcgattatcttctat

SEQ ID NO: 5852699 - DNA, 25 bp, Homo sapien
tctatatcttcaggcgcgcggtctg

SEQ ID NO: 5852700 - DNA, 25 bp, Homo sapien
gcaacatttgggccagctaaacatg

SEQ ID NO: 5852701 - DNA, 25 bp, Homo sapien
ccagctaaacatgcttcatcgtcgg

SEQ ID NO: 5852702 - DNA, 25 bp, Homo sapien
ccgggctgccacgaccaagtgacag

SEQ ID NO: 5852703 - DNA, 25 bp, Homo sapien
gaccaagtgacagcaatgctgtttc

SEQ ID NO: 5852704 - DNA, 25 bp, Homo sapien
aatgctgtttcactggttatgcggc

SEQ ID NO: 5852705 - DNA, 25 bp, Homo sapien
atgccggtgaacgtgcaaaacaggc

SEQ ID NO: 5852706 - DNA, 25 bp, Homo sapien
acgtgcaaaacaggctctagcgttc

SEQ ID NO: 5852707 - DNA, 25 bp, Homo sapien
ctctagcgttcgaacgcactgattt

SEQ ID NO: 5852708 - DNA, 25 bp, Homo sapien
tcgttcactcatggaaaatagcgat

SEQ ID NO: 5852709 - DNA, 25 bp, Homo sapien
atttgcctgcattaccggtcgatgc

SEQ ID NO: 5852710 - DNA, 25 bp, Homo sapien
atggaaaatagcgatcgctgccagg

SEQ ID NO: 5852711 - DNA, 25 bp, Homo sapien
taccggtcgatgcaacgagtgatga

SEQ ID NO: 5852712 - DNA, 25 bp, Homo sapien
tcagggttaaagatatctcacgtac

SEQ ID NO: 5852713 - DNA, 25 bp, Homo sapien
gagtgatgaggttcgcaagaacctg

SEQ ID NO: 5852714 - DNA, 25 bp, Homo sapien
gcaagaacctgatggacatgttcag

SEQ ID NO: 5852715 - DNA, 25 bp, Homo sapien
gacatgttcagggatcgccaggcgt

SEQ ID NO: 5852716 - DNA, 25 bp, Homo sapien
gccaggcgttttctgagcatacctg

SEQ ID NO: 5852717 - DNA, 25 bp, Homo sapien
gcggcatggtgcaagttgaataacc

SEQ ID NO: 5852718 - DNA, 25 bp, Homo sapien
gaagatgttcgcgattatcttctat

SEQ ID NO: 5852719 - DNA, 25 bp, Homo sapien
tctatatcttcaggcgcgcggtctg

SEQ ID NO: 5852720 - DNA, 25 bp, Homo sapien
gcaacatttgggccagctaaacatg

SEQ ID NO: 5852721 - DNA, 25 bp, Homo sapien
ccagctaaacatgcttcatcgtcgg

SEQ ID NO: 5852722 - DNA, 25 bp, Homo sapien
ccgggctgccacgaccaagtgacag

SEQ ID NO: 5852723 - DNA, 25 bp, Homo sapien
gaccaagtgacagcaatgctgtttc

SEQ ID NO: 5852724 - DNA, 25 bp, Homo sapien
aatgctgtttcactggttatgcggc

SEQ ID NO: 5852725 - DNA, 25 bp, Homo sapien
atgccggtgaacgtgcaaaacaggc

SEQ ID NO: 5852726 - DNA, 25 bp, Homo sapien
acgtgcaaaacaggctctagcgttc

SEQ ID NO: 5852727 - DNA, 25 bp, Homo sapien
ctctagcgttcgaacgcactgattt

SEQ ID NO: 5852728 - DNA, 25 bp, Homo sapien
tcgttcactcatggaaaatagcgat

SEQ ID NO: 5852729 - DNA, 25 bp, Homo sapien
atttgcctgcattaccggtcgatgc

SEQ ID NO: 5852730 - DNA, 25 bp, Homo sapien
atggaaaatagcgatcgctgccagg

SEQ ID NO: 5852731 - DNA, 25 bp, Homo sapien
taccggtcgatgcaacgagtgatga

SEQ ID NO: 5852732 - DNA, 25 bp, Homo sapien
tcagggttaaagatatctcacgtac

SEQ ID NO: 5852733 - DNA, 25 bp, Homo sapien
gagtgatgaggttcgcaagaacctg

SEQ ID NO: 5852734 - DNA, 25 bp, Homo sapien
gcaagaacctgatggacatgttcag

SEQ ID NO: 5852735 - DNA, 25 bp, Homo sapien
gacatgttcagggatcgccaggcgt

SEQ ID NO: 5852736 - DNA, 25 bp, Homo sapien
gccaggcgttttctgagcatacctg

SEQ ID NO: 5852737 - DNA, 25 bp, Homo sapien
gcggcatggtgcaagttgaataacc

SEQ ID NO: 5852738 - DNA, 25 bp, Homo sapien
gaagatgttcgcgattatcttctat

SEQ ID NO: 5852739 - DNA, 25 bp, Homo sapien
tctatatcttcaggcgcgcggtctg

SEQ ID NO: 5852740 - DNA, 25 bp, Homo sapien
gcaacatttgggccagctaaacatg

SEQ ID NO: 5852741 - DNA, 25 bp, Homo sapien
ccagctaaacatgcttcatcgtcgg

SEQ ID NO: 5852742 - DNA, 25 bp, Homo sapien
ccgggctgccacgaccaagtgacag

SEQ ID NO: 5852743 - DNA, 25 bp, Homo sapien
gaccaagtgacagcaatgctgtttc

SEQ ID NO: 5852744 - DNA, 25 bp, Homo sapien
aatgctgtttcactggttatgcggc

SEQ ID NO: 5852745 - DNA, 25 bp, Homo sapien
atgccggtgaacgtgcaaaacaggc

SEQ ID NO: 5852746 - DNA, 25 bp, Homo sapien
acgtgcaaaacaggctctagcgttc

SEQ ID NO: 5852747 - DNA, 25 bp, Homo sapien
ctctagcgttcgaacgcactgattt

SEQ ID NO: 5852748 - DNA, 25 bp, Homo sapien
tcgttcactcatggaaaatagcgat

SEQ ID NO: 5852749 - DNA, 25 bp, Homo sapien
atttgcctgcattaccggtcgatgc

SEQ ID NO: 5852750 - DNA, 25 bp, Homo sapien
atggaaaatagcgatcgctgccagg

SEQ ID NO: 5852751 - DNA, 25 bp, Homo sapien
taccggtcgatgcaacgagtgatga

SEQ ID NO: 5852752 - DNA, 25 bp, Homo sapien
tcagggttaaagatatctcacgtac

SEQ ID NO: 5852753 - DNA, 25 bp, Homo sapien
gagtgatgaggttcgcaagaacctg

SEQ ID NO: 5852754 - DNA, 25 bp, Homo sapien
gcaagaacctgatggacatgttcag

SEQ ID NO: 5852755 - DNA, 25 bp, Homo sapien
gacatgttcagggatcgccaggcgt

SEQ ID NO: 5852756 - DNA, 25 bp, Homo sapien
gccaggcgttttctgagcatacctg

SEQ ID NO: 5852757 - DNA, 25 bp, Homo sapien
gcggcatggtgcaagttgaataacc

SEQ ID NO: 5852758 - DNA, 25 bp, Homo sapien
gaagatgttcgcgattatcttctat

SEQ ID NO: 5852759 - DNA, 25 bp, Homo sapien
tctatatcttcaggcgcgcggtctg

SEQ ID NO: 5852760 - DNA, 25 bp, Homo sapien
gcaacatttgggccagctaaacatg

SEQ ID NO: 5852761 - DNA, 25 bp, Homo sapien
ccagctaaacatgcttcatcgtcgg

SEQ ID NO: 5852762 - DNA, 25 bp, Homo sapien
ccgggctgccacgaccaagtgacag

SEQ ID NO: 5852763 - DNA, 25 bp, Homo sapien
gaccaagtgacagcaatgctgtttc

SEQ ID NO: 5852764 - DNA, 25 bp, Homo sapien
aatgctgtttcactggttatgcggc

SEQ ID NO: 5852765 - DNA, 25 bp, Homo sapien
atgccggtgaacgtgcaaaacaggc

SEQ ID NO: 5852766 - DNA, 25 bp, Homo sapien
acgtgcaaaacaggctctagcgttc

SEQ ID NO: 5852767 - DNA, 25 bp, Homo sapien
ctctagcgttcgaacgcactgattt

SEQ ID NO: 5852768 - DNA, 25 bp, Homo sapien
tcgttcactcatggaaaatagcgat

SEQ ID NO: 5852769 - DNA, 25 bp, Homo sapien
atttgcctgcattaccggtcgatgc

SEQ ID NO: 5852770 - DNA, 25 bp, Homo sapien
atggaaaatagcgatcgctgccagg

SEQ ID NO: 5852771 - DNA, 25 bp, Homo sapien
taccggtcgatgcaacgagtgatga

SEQ ID NO: 5852772 - DNA, 25 bp, Homo sapien
tcagggttaaagatatctcacgtac

SEQ ID NO: 5852773 - DNA, 25 bp, Homo sapien
gagtgatgaggttcgcaagaacctg

SEQ ID NO: 5852774 - DNA, 25 bp, Homo sapien
gcaagaacctgatggacatgttcag

SEQ ID NO: 5852775 - DNA, 25 bp, Homo sapien
gacatgttcagggatcgccaggcgt

SEQ ID NO: 5852776 - DNA, 25 bp, Homo sapien
gccaggcgttttctgagcatacctg

SEQ ID NO: 5852777 - DNA, 25 bp, Homo sapien
gcggcatggtgcaagttgaataacc

SEQ ID NO: 5852778 - DNA, 25 bp, Homo sapien
gaagatgttcgcgattatcttctat

SEQ ID NO: 5852779 - DNA, 25 bp, Homo sapien
tctatatcttcaggcgcgcggtctg

SEQ ID NO: 5852780 - DNA, 25 bp, Homo sapien
gcaacatttgggccagctaaacatg

SEQ ID NO: 5852781 - DNA, 25 bp, Homo sapien
ccagctaaacatgcttcatcgtcgg

SEQ ID NO: 5852782 - DNA, 25 bp, Homo sapien
ccgggctgccacgaccaagtgacag

SEQ ID NO: 5852783 - DNA, 25 bp, Homo sapien
gaccaagtgacagcaatgctgtttc

SEQ ID NO: 5852784 - DNA, 25 bp, Homo sapien
aatgctgtttcactggttatgcggc

SEQ ID NO: 5852785 - DNA, 25 bp, Homo sapien
atgccggtgaacgtgcaaaacaggc

SEQ ID NO: 5852786 - DNA, 25 bp, Homo sapien
acgtgcaaaacaggctctagcgttc

SEQ ID NO: 5852787 - DNA, 25 bp, Homo sapien
ctctagcgttcgaacgcactgattt

SEQ ID NO: 5852788 - DNA, 25 bp, Homo sapien
tcgttcactcatggaaaatagcgat

SEQ ID NO: 5852789 - DNA, 25 bp, Homo sapien
atttgcctgcattaccggtcgatgc

SEQ ID NO: 5852790 - DNA, 25 bp, Homo sapien
atggaaaatagcgatcgctgccagg

SEQ ID NO: 5852791 - DNA, 25 bp, Homo sapien
taccggtcgatgcaacgagtgatga

SEQ ID NO: 5852792 - DNA, 25 bp, Homo sapien
tcagggttaaagatatctcacgtac

SEQ ID NO: 5852793 - DNA, 25 bp, Homo sapien
gagtgatgaggttcgcaagaacctg

SEQ ID NO: 5852794 - DNA, 25 bp, Homo sapien
gcaagaacctgatggacatgttcag

SEQ ID NO: 5852795 - DNA, 25 bp, Homo sapien
gacatgttcagggatcgccaggcgt

SEQ ID NO: 5852796 - DNA, 25 bp, Homo sapien
gccaggcgttttctgagcatacctg

SEQ ID NO: 5852797 - DNA, 25 bp, Homo sapien
gcggcatggtgcaagttgaataacc

SEQ ID NO: 5852798 - DNA, 25 bp, Homo sapien
gaagatgttcgcgattatcttctat

SEQ ID NO: 5852799 - DNA, 25 bp, Homo sapien
tctatatcttcaggcgcgcggtctg

SEQ ID NO: 5852800 - DNA, 25 bp, Homo sapien
gcaacatttgggccagctaaacatg

SEQ ID NO: 5852801 - DNA, 25 bp, Homo sapien
ccagctaaacatgcttcatcgtcgg

SEQ ID NO: 5852802 - DNA, 25 bp, Homo sapien
ccgggctgccacgaccaagtgacag

SEQ ID NO: 5852803 - DNA, 25 bp, Homo sapien
gaccaagtgacagcaatgctgtttc

SEQ ID NO: 5852804 - DNA, 25 bp, Homo sapien
aatgctgtttcactggttatgcggc

SEQ ID NO: 5852805 - DNA, 25 bp, Homo sapien
atgccggtgaacgtgcaaaacaggc

SEQ ID NO: 5852806 - DNA, 25 bp, Homo sapien
acgtgcaaaacaggctctagcgttc

SEQ ID NO: 5852807 - DNA, 25 bp, Homo sapien
ctctagcgttcgaacgcactgattt

SEQ ID NO: 5852808 - DNA, 25 bp, Homo sapien
tcgttcactcatggaaaatagcgat

SEQ ID NO: 5852809 - DNA, 25 bp, Homo sapien
atttgcctgcattaccggtcgatgc

SEQ ID NO: 5852810 - DNA, 25 bp, Homo sapien
atggaaaatagcgatcgctgccagg

SEQ ID NO: 5852811 - DNA, 25 bp, Homo sapien
taccggtcgatgcaacgagtgatga

SEQ ID NO: 5852812 - DNA, 25 bp, Homo sapien
tcagggttaaagatatctcacgtac

SEQ ID NO: 5852813 - DNA, 25 bp, Homo sapien
gagtgatgaggttcgcaagaacctg

SEQ ID NO: 5852814 - DNA, 25 bp, Homo sapien
gcaagaacctgatggacatgttcag

SEQ ID NO: 5852815 - DNA, 25 bp, Homo sapien
gacatgttcagggatcgccaggcgt

SEQ ID NO: 5852816 - DNA, 25 bp, Homo sapien
gccaggcgttttctgagcatacctg

SEQ ID NO: 5852817 - DNA, 25 bp, Homo sapien
gcggcatggtgcaagttgaataacc

SEQ ID NO: 5852818 - DNA, 25 bp, Homo sapien
gaagatgttcgcgattatcttctat

SEQ ID NO: 5852819 - DNA, 25 bp, Homo sapien
tctatatcttcaggcgcgcggtctg

SEQ ID NO: 5852820 - DNA, 25 bp, Homo sapien
gcaacatttgggccagctaaacatg

SEQ ID NO: 5852821 - DNA, 25 bp, Homo sapien
ccagctaaacatgcttcatcgtcgg

SEQ ID NO: 5852822 - DNA, 25 bp, Homo sapien
ccgggctgccacgaccaagtgacag

SEQ ID NO: 5852823 - DNA, 25 bp, Homo sapien
gaccaagtgacagcaatgctgtttc

SEQ ID NO: 5852824 - DNA, 25 bp, Homo sapien
aatgctgtttcactggttatgcggc

SEQ ID NO: 5852825 - DNA, 25 bp, Homo sapien
atgccggtgaacgtgcaaaacaggc

SEQ ID NO: 5852826 - DNA, 25 bp, Homo sapien
acgtgcaaaacaggctctagcgttc

SEQ ID NO: 5852827 - DNA, 25 bp, Homo sapien
ctctagcgttcgaacgcactgattt

SEQ ID NO: 5852828 - DNA, 25 bp, Homo sapien
tcgttcactcatggaaaatagcgat

SEQ ID NO: 5852829 - DNA, 25 bp, Homo sapien
atttgcctgcattaccggtcgatgc

SEQ ID NO: 5852830 - DNA, 25 bp, Homo sapien
atggaaaatagcgatcgctgccagg

SEQ ID NO: 5852831 - DNA, 25 bp, Homo sapien
taccggtcgatgcaacgagtgatga

SEQ ID NO: 5852832 - DNA, 25 bp, Homo sapien
tcagggttaaagatatctcacgtac

SEQ ID NO: 5852833 - DNA, 25 bp, Homo sapien
gagtgatgaggttcgcaagaacctg

SEQ ID NO: 5852834 - DNA, 25 bp, Homo sapien
gcaagaacctgatggacatgttcag

SEQ ID NO: 5852835 - DNA, 25 bp, Homo sapien
gacatgttcagggatcgccaggcgt

SEQ ID NO: 5852836 - DNA, 25 bp, Homo sapien
gccaggcgttttctgagcatacctg

SEQ ID NO: 5852837 - DNA, 25 bp, Homo sapien
gcggcatggtgcaagttgaataacc

SEQ ID NO: 5852838 - DNA, 25 bp, Homo sapien
gaagatgttcgcgattatcttctat

SEQ ID NO: 5852839 - DNA, 25 bp, Homo sapien
tctatatcttcaggcgcgcggtctg

SEQ ID NO: 5852840 - DNA, 25 bp, Homo sapien
gcaacatttgggccagctaaacatg

SEQ ID NO: 5852841 - DNA, 25 bp, Homo sapien
ccagctaaacatgcttcatcgtcgg

SEQ ID NO: 5852842 - DNA, 25 bp, Homo sapien
ccgggctgccacgaccaagtgacag

SEQ ID NO: 5852843 - DNA, 25 bp, Homo sapien
gaccaagtgacagcaatgctgtttc

SEQ ID NO: 5852844 - DNA, 25 bp, Homo sapien
aatgctgtttcactggttatgcggc

SEQ ID NO: 5852845 - DNA, 25 bp, Homo sapien
atgccggtgaacgtgcaaaacaggc

SEQ ID NO: 5852846 - DNA, 25 bp, Homo sapien
acgtgcaaaacaggctctagcgttc

SEQ ID NO: 5852847 - DNA, 25 bp, Homo sapien
ctctagcgttcgaacgcactgattt

SEQ ID NO: 5852848 - DNA, 25 bp, Homo sapien
tcgttcactcatggaaaatagcgat

SEQ ID NO: 5852849 - DNA, 25 bp, Homo sapien
atttgcctgcattaccggtcgatgc

SEQ ID NO: 5852850 - DNA, 25 bp, Homo sapien
atggaaaatagcgatcgctgccagg

SEQ ID NO: 5852851 - DNA, 25 bp, Homo sapien
taccggtcgatgcaacgagtgatga

SEQ ID NO: 5852852 - DNA, 25 bp, Homo sapien
tcagggttaaagatatctcacgtac

SEQ ID NO: 5852853 - DNA, 25 bp, Homo sapien
gagtgatgaggttcgcaagaacctg

SEQ ID NO: 5852854 - DNA, 25 bp, Homo sapien
gcaagaacctgatggacatgttcag

SEQ ID NO: 5852855 - DNA, 25 bp, Homo sapien
gacatgttcagggatcgccaggcgt

SEQ ID NO: 5852856 - DNA, 25 bp, Homo sapien
gccaggcgttttctgagcatacctg

SEQ ID NO: 5852857 - DNA, 25 bp, Homo sapien
gcggcatggtgcaagttgaataacc

SEQ ID NO: 5852858 - DNA, 25 bp, Homo sapien
gaagatgttcgcgattatcttctat

SEQ ID NO: 5852859 - DNA, 25 bp, Homo sapien
tctatatcttcaggcgcgcggtctg

SEQ ID NO: 5852860 - DNA, 25 bp, Homo sapien
gcaacatttgggccagctaaacatg

SEQ ID NO: 5852861 - DNA, 25 bp, Homo sapien
ccagctaaacatgcttcatcgtcgg

SEQ ID NO: 5852862 - DNA, 25 bp, Homo sapien
ccgggctgccacgaccaagtgacag

SEQ ID NO: 5852863 - DNA, 25 bp, Homo sapien
gaccaagtgacagcaatgctgtttc

SEQ ID NO: 5852864 - DNA, 25 bp, Homo sapien
aatgctgtttcactggttatgcggc

SEQ ID NO: 5852865 - DNA, 25 bp, Homo sapien
atgccggtgaacgtgcaaaacaggc

SEQ ID NO: 5852866 - DNA, 25 bp, Homo sapien
acgtgcaaaacaggctctagcgttc

SEQ ID NO: 5852867 - DNA, 25 bp, Homo sapien
ctctagcgttcgaacgcactgattt

SEQ ID NO: 5852868 - DNA, 25 bp, Homo sapien
tcgttcactcatggaaaatagcgat

SEQ ID NO: 5852869 - DNA, 25 bp, Homo sapien
atttgcctgcattaccggtcgatgc

SEQ ID NO: 5852870 - DNA, 25 bp, Homo sapien
atggaaaatagcgatcgctgccagg

SEQ ID NO: 5852871 - DNA, 25 bp, Homo sapien
taccggtcgatgcaacgagtgatga

SEQ ID NO: 5852872 - DNA, 25 bp, Homo sapien
tcagggttaaagatatctcacgtac

SEQ ID NO: 5852873 - DNA, 25 bp, Homo sapien
gagtgatgaggttcgcaagaacctg

SEQ ID NO: 5852874 - DNA, 25 bp, Homo sapien
gcaagaacctgatggacatgttcag

SEQ ID NO: 5852875 - DNA, 25 bp, Homo sapien
gacatgttcagggatcgccaggcgt

SEQ ID NO: 5852876 - DNA, 25 bp, Homo sapien
gccaggcgttttctgagcatacctg

SEQ ID NO: 5852877 - DNA, 25 bp, Homo sapien
gcggcatggtgcaagttgaataacc

SEQ ID NO: 5852878 - DNA, 25 bp, Homo sapien
gaagatgttcgcgattatcttctat

SEQ ID NO: 5852879 - DNA, 25 bp, Homo sapien
tctatatcttcaggcgcgcggtctg

SEQ ID NO: 5852880 - DNA, 25 bp, Homo sapien
gcaacatttgggccagctaaacatg

SEQ ID NO: 5852881 - DNA, 25 bp, Homo sapien
ccagctaaacatgcttcatcgtcgg

SEQ ID NO: 5852882 - DNA, 25 bp, Homo sapien
ccgggctgccacgaccaagtgacag

SEQ ID NO: 5852883 - DNA, 25 bp, Homo sapien
gaccaagtgacagcaatgctgtttc

SEQ ID NO: 5852884 - DNA, 25 bp, Homo sapien
aatgctgtttcactggttatgcggc

SEQ ID NO: 5852885 - DNA, 25 bp, Homo sapien
atgccggtgaacgtgcaaaacaggc

SEQ ID NO: 5852886 - DNA, 25 bp, Homo sapien
acgtgcaaaacaggctctagcgttc

SEQ ID NO: 5852887 - DNA, 25 bp, Homo sapien
ctctagcgttcgaacgcactgattt

SEQ ID NO: 5852888 - DNA, 25 bp, Homo sapien
tcgttcactcatggaaaatagcgat

SEQ ID NO: 5852889 - DNA, 25 bp, Homo sapien
atttgcctgcattaccggtcgatgc

SEQ ID NO: 5852890 - DNA, 25 bp, Homo sapien
atggaaaatagcgatcgctgccagg

SEQ ID NO: 5852891 - DNA, 25 bp, Homo sapien
taccggtcgatgcaacgagtgatga

SEQ ID NO: 5852892 - DNA, 25 bp, Homo sapien
tcagggttaaagatatctcacgtac

SEQ ID NO: 5852893 - DNA, 25 bp, Homo sapien
gagtgatgaggttcgcaagaacctg

SEQ ID NO: 5852894 - DNA, 25 bp, Homo sapien
gcaagaacctgatggacatgttcag

SEQ ID NO: 5852895 - DNA, 25 bp, Homo sapien
gacatgttcagggatcgccaggcgt

SEQ ID NO: 5852896 - DNA, 25 bp, Homo sapien
gccaggcgttttctgagcatacctg

SEQ ID NO: 5852897 - DNA, 25 bp, Homo sapien
gcggcatggtgcaagttgaataacc

SEQ ID NO: 5852898 - DNA, 25 bp, Homo sapien
gaagatgttcgcgattatcttctat

SEQ ID NO: 5852899 - DNA, 25 bp, Homo sapien
tctatatcttcaggcgcgcggtctg

SEQ ID NO: 5852900 - DNA, 25 bp, Homo sapien
gcaacatttgggccagctaaacatg

SEQ ID NO: 5852901 - DNA, 25 bp, Homo sapien
ccagctaaacatgcttcatcgtcgg

SEQ ID NO: 5852902 - DNA, 25 bp, Homo sapien
ccgggctgccacgaccaagtgacag

SEQ ID NO: 5852903 - DNA, 25 bp, Homo sapien
gaccaagtgacagcaatgctgtttc

SEQ ID NO: 5852904 - DNA, 25 bp, Homo sapien
aatgctgtttcactggttatgcggc

SEQ ID NO: 5852905 - DNA, 25 bp, Homo sapien
atgccggtgaacgtgcaaaacaggc

SEQ ID NO: 5852906 - DNA, 25 bp, Homo sapien
acgtgcaaaacaggctctagcgttc

SEQ ID NO: 5852907 - DNA, 25 bp, Homo sapien
ctctagcgttcgaacgcactgattt

SEQ ID NO: 5852908 - DNA, 25 bp, Homo sapien
tcgttcactcatggaaaatagcgat

SEQ ID NO: 5852909 - DNA, 25 bp, Homo sapien
atttgcctgcattaccggtcgatgc

SEQ ID NO: 5852910 - DNA, 25 bp, Homo sapien
atggaaaatagcgatcgctgccagg

SEQ ID NO: 5852911 - DNA, 25 bp, Homo sapien
taccggtcgatgcaacgagtgatga

SEQ ID NO: 5852912 - DNA, 25 bp, Homo sapien
tcagggttaaagatatctcacgtac

SEQ ID NO: 5852913 - DNA, 25 bp, Homo sapien
gagtgatgaggttcgcaagaacctg

SEQ ID NO: 5852914 - DNA, 25 bp, Homo sapien
gcaagaacctgatggacatgttcag

SEQ ID NO: 5852915 - DNA, 25 bp, Homo sapien
gacatgttcagggatcgccaggcgt

SEQ ID NO: 5852916 - DNA, 25 bp, Homo sapien
gccaggcgttttctgagcatacctg

SEQ ID NO: 5852917 - DNA, 25 bp, Homo sapien
gcggcatggtgcaagttgaataacc

SEQ ID NO: 5852918 - DNA, 25 bp, Homo sapien
gaagatgttcgcgattatcttctat

SEQ ID NO: 5852919 - DNA, 25 bp, Homo sapien
tctatatcttcaggcgcgcggtctg

SEQ ID NO: 5852920 - DNA, 25 bp, Homo sapien
gcaacatttgggccagctaaacatg

SEQ ID NO: 5852921 - DNA, 25 bp, Homo sapien
ccagctaaacatgcttcatcgtcgg

SEQ ID NO: 5852922 - DNA, 25 bp, Homo sapien
ccgggctgccacgaccaagtgacag

SEQ ID NO: 5852923 - DNA, 25 bp, Homo sapien
gaccaagtgacagcaatgctgtttc

SEQ ID NO: 5852924 - DNA, 25 bp, Homo sapien
aatgctgtttcactggttatgcggc

SEQ ID NO: 5852925 - DNA, 25 bp, Homo sapien
atgccggtgaacgtgcaaaacaggc

SEQ ID NO: 5852926 - DNA, 25 bp, Homo sapien
acgtgcaaaacaggctctagcgttc

SEQ ID NO: 5852927 - DNA, 25 bp, Homo sapien
ctctagcgttcgaacgcactgattt

SEQ ID NO: 5852928 - DNA, 25 bp, Homo sapien
tcgttcactcatggaaaatagcgat

SEQ ID NO: 5852929 - DNA, 25 bp, Homo sapien
atttgcctgcattaccggtcgatgc

SEQ ID NO: 5852930 - DNA, 25 bp, Homo sapien
atggaaaatagcgatcgctgccagg

SEQ ID NO: 5852931 - DNA, 25 bp, Homo sapien
taccggtcgatgcaacgagtgatga

SEQ ID NO: 5852932 - DNA, 25 bp, Homo sapien
tcagggttaaagatatctcacgtac

SEQ ID NO: 5852933 - DNA, 25 bp, Homo sapien
gagtgatgaggttcgcaagaacctg

SEQ ID NO: 5852934 - DNA, 25 bp, Homo sapien
gcaagaacctgatggacatgttcag

SEQ ID NO: 5852935 - DNA, 25 bp, Homo sapien
gacatgttcagggatcgccaggcgt

SEQ ID NO: 5852936 - DNA, 25 bp, Homo sapien
gccaggcgttttctgagcatacctg

SEQ ID NO: 5852937 - DNA, 25 bp, Homo sapien
gcggcatggtgcaagttgaataacc

SEQ ID NO: 5852938 - DNA, 25 bp, Homo sapien
gaagatgttcgcgattatcttctat

SEQ ID NO: 5852939 - DNA, 25 bp, Homo sapien
tctatatcttcaggcgcgcggtctg

SEQ ID NO: 5852940 - DNA, 25 bp, Homo sapien
gcaacatttgggccagctaaacatg

SEQ ID NO: 5852941 - DNA, 25 bp, Homo sapien
ccagctaaacatgcttcatcgtcgg

SEQ ID NO: 5852942 - DNA, 25 bp, Homo sapien
ccgggctgccacgaccaagtgacag

SEQ ID NO: 5852943 - DNA, 25 bp, Homo sapien
gaccaagtgacagcaatgctgtttc

SEQ ID NO: 5852944 - DNA, 25 bp, Homo sapien
aatgctgtttcactggttatgcggc

SEQ ID NO: 5852945 - DNA, 25 bp, Homo sapien
atgccggtgaacgtgcaaaacaggc

SEQ ID NO: 5852946 - DNA, 25 bp, Homo sapien
acgtgcaaaacaggctctagcgttc

SEQ ID NO: 5852947 - DNA, 25 bp, Homo sapien
ctctagcgttcgaacgcactgattt

SEQ ID NO: 5852948 - DNA, 25 bp, Homo sapien
tcgttcactcatggaaaatagcgat

SEQ ID NO: 5852949 - DNA, 25 bp, Homo sapien
atttgcctgcattaccggtcgatgc

SEQ ID NO: 5852950 - DNA, 25 bp, Homo sapien
atggaaaatagcgatcgctgccagg

SEQ ID NO: 5852951 - DNA, 25 bp, Homo sapien
taccggtcgatgcaacgagtgatga

SEQ ID NO: 5852952 - DNA, 25 bp, Homo sapien
tcagggttaaagatatctcacgtac

SEQ ID NO: 5852953 - DNA, 25 bp, Homo sapien
gagtgatgaggttcgcaagaacctg

SEQ ID NO: 5852954 - DNA, 25 bp, Homo sapien
gcaagaacctgatggacatgttcag

SEQ ID NO: 5852955 - DNA, 25 bp, Homo sapien
gacatgttcagggatcgccaggcgt

SEQ ID NO: 5852956 - DNA, 25 bp, Homo sapien
gccaggcgttttctgagcatacctg

SEQ ID NO: 5852957 - DNA, 25 bp, Homo sapien
gcggcatggtgcaagttgaataacc

SEQ ID NO: 5852958 - DNA, 25 bp, Homo sapien
gaagatgttcgcgattatcttctat

SEQ ID NO: 5852959 - DNA, 25 bp, Homo sapien
tctatatcttcaggcgcgcggtctg

SEQ ID NO: 5852960 - DNA, 25 bp, Homo sapien
gcaacatttgggccagctaaacatg

SEQ ID NO: 5852961 - DNA, 25 bp, Homo sapien
ccagctaaacatgcttcatcgtcgg

SEQ ID NO: 5852962 - DNA, 25 bp, Homo sapien
ccgggctgccacgaccaagtgacag

SEQ ID NO: 5852963 - DNA, 25 bp, Homo sapien
gaccaagtgacagcaatgctgtttc

SEQ ID NO: 5852964 - DNA, 25 bp, Homo sapien
aatgctgtttcactggttatgcggc

SEQ ID NO: 5852965 - DNA, 25 bp, Homo sapien
atgccggtgaacgtgcaaaacaggc

SEQ ID NO: 5852966 - DNA, 25 bp, Homo sapien
acgtgcaaaacaggctctagcgttc

SEQ ID NO: 5852967 - DNA, 25 bp, Homo sapien
ctctagcgttcgaacgcactgattt

SEQ ID NO: 5852968 - DNA, 25 bp, Homo sapien
tcgttcactcatggaaaatagcgat

SEQ ID NO: 5852969 - DNA, 25 bp, Homo sapien
atttgcctgcattaccggtcgatgc

SEQ ID NO: 5852970 - DNA, 25 bp, Homo sapien
atggaaaatagcgatcgctgccagg

SEQ ID NO: 5852971 - DNA, 25 bp, Homo sapien
taccggtcgatgcaacgagtgatga

SEQ ID NO: 5852972 - DNA, 25 bp, Homo sapien
tcagggttaaagatatctcacgtac

SEQ ID NO: 5852973 - DNA, 25 bp, Homo sapien
gagtgatgaggttcgcaagaacctg

SEQ ID NO: 5852974 - DNA, 25 bp, Homo sapien
gcaagaacctgatggacatgttcag

SEQ ID NO: 5852975 - DNA, 25 bp, Homo sapien
gacatgttcagggatcgccaggcgt

SEQ ID NO: 5852976 - DNA, 25 bp, Homo sapien
gccaggcgttttctgagcatacctg

SEQ ID NO: 5852977 - DNA, 25 bp, Homo sapien
gcggcatggtgcaagttgaataacc

SEQ ID NO: 5852978 - DNA, 25 bp, Homo sapien
gaagatgttcgcgattatcttctat

SEQ ID NO: 5852979 - DNA, 25 bp, Homo sapien
tctatatcttcaggcgcgcggtctg

SEQ ID NO: 5852980 - DNA, 25 bp, Homo sapien
gcaacatttgggccagctaaacatg

SEQ ID NO: 5852981 - DNA, 25 bp, Homo sapien
ccagctaaacatgcttcatcgtcgg

SEQ ID NO: 5852982 - DNA, 25 bp, Homo sapien
ccgggctgccacgaccaagtgacag

SEQ ID NO: 5852983 - DNA, 25 bp, Homo sapien
gaccaagtgacagcaatgctgtttc

SEQ ID NO: 5852984 - DNA, 25 bp, Homo sapien
aatgctgtttcactggttatgcggc

SEQ ID NO: 5852985 - DNA, 25 bp, Homo sapien
atgccggtgaacgtgcaaaacaggc

SEQ ID NO: 5852986 - DNA, 25 bp, Homo sapien
acgtgcaaaacaggctctagcgttc

SEQ ID NO: 5852987 - DNA, 25 bp, Homo sapien
ctctagcgttcgaacgcactgattt

SEQ ID NO: 5852988 - DNA, 25 bp, Homo sapien
tcgttcactcatggaaaatagcgat

SEQ ID NO: 5852989 - DNA, 25 bp, Homo sapien
atttgcctgcattaccggtcgatgc

SEQ ID NO: 5852990 - DNA, 25 bp, Homo sapien
atggaaaatagcgatcgctgccagg

SEQ ID NO: 5852991 - DNA, 25 bp, Homo sapien
taccggtcgatgcaacgagtgatga

SEQ ID NO: 5852992 - DNA, 25 bp, Homo sapien
tcagggttaaagatatctcacgtac

SEQ ID NO: 5852993 - DNA, 25 bp, Homo sapien
gagtgatgaggttcgcaagaacctg

SEQ ID NO: 5852994 - DNA, 25 bp, Homo sapien
gcaagaacctgatggacatgttcag

SEQ ID NO: 5852995 - DNA, 25 bp, Homo sapien
gacatgttcagggatcgccaggcgt

SEQ ID NO: 5852996 - DNA, 25 bp, Homo sapien
gccaggcgttttctgagcatacctg

SEQ ID NO: 5852997 - DNA, 25 bp, Homo sapien
gcggcatggtgcaagttgaataacc

SEQ ID NO: 5852998 - DNA, 25 bp, Homo sapien
gaagatgttcgcgattatcttctat

SEQ ID NO: 5852999 - DNA, 25 bp, Homo sapien
tctatatcttcaggcgcgcggtctg

SEQ ID NO: 5853000 - DNA, 25 bp, Homo sapien
gcaacatttgggccagctaaacatg

SEQ ID NO: 5853001 - DNA, 25 bp, Homo sapien
ccagctaaacatgcttcatcgtcgg

SEQ ID NO: 5853002 - DNA, 25 bp, Homo sapien
ccgggctgccacgaccaagtgacag

SEQ ID NO: 5853003 - DNA, 25 bp, Homo sapien
gaccaagtgacagcaatgctgtttc

SEQ ID NO: 5853004 - DNA, 25 bp, Homo sapien
aatgctgtttcactggttatgcggc

SEQ ID NO: 5853005 - DNA, 25 bp, Homo sapien
atgccggtgaacgtgcaaaacaggc

SEQ ID NO: 5853006 - DNA, 25 bp, Homo sapien
acgtgcaaaacaggctctagcgttc

SEQ ID NO: 5853007 - DNA, 25 bp, Homo sapien
ctctagcgttcgaacgcactgattt

SEQ ID NO: 5853008 - DNA, 25 bp, Homo sapien
tcgttcactcatggaaaatagcgat

SEQ ID NO: 5853009 - DNA, 25 bp, Homo sapien
atttgcctgcattaccggtcgatgc

SEQ ID NO: 5853010 - DNA, 25 bp, Homo sapien
atggaaaatagcgatcgctgccagg

SEQ ID NO: 5853011 - DNA, 25 bp, Homo sapien
taccggtcgatgcaacgagtgatga

SEQ ID NO: 5853012 - DNA, 25 bp, Homo sapien
tcagggttaaagatatctcacgtac

SEQ ID NO: 5853013 - DNA, 25 bp, Homo sapien
gagtgatgaggttcgcaagaacctg

SEQ ID NO: 5853014 - DNA, 25 bp, Homo sapien
gcaagaacctgatggacatgttcag

SEQ ID NO: 5853015 - DNA, 25 bp, Homo sapien
gacatgttcagggatcgccaggcgt

SEQ ID NO: 5853016 - DNA, 25 bp, Homo sapien
gccaggcgttttctgagcatacctg

SEQ ID NO: 5853017 - DNA, 25 bp, Homo sapien
gcggcatggtgcaagttgaataacc

SEQ ID NO: 5853018 - DNA, 25 bp, Homo sapien
gaagatgttcgcgattatcttctat

SEQ ID NO: 5853019 - DNA, 25 bp, Homo sapien
tctatatcttcaggcgcgcggtctg

SEQ ID NO: 5853020 - DNA, 25 bp, Homo sapien
gcaacatttgggccagctaaacatg

SEQ ID NO: 5853021 - DNA, 25 bp, Homo sapien
ccagctaaacatgcttcatcgtcgg

SEQ ID NO: 5853022 - DNA, 25 bp, Homo sapien
ccgggctgccacgaccaagtgacag

SEQ ID NO: 5853023 - DNA, 25 bp, Homo sapien
gaccaagtgacagcaatgctgtttc

SEQ ID NO: 5853024 - DNA, 25 bp, Homo sapien
aatgctgtttcactggttatgcggc

SEQ ID NO: 5853025 - DNA, 25 bp, Homo sapien
atgccggtgaacgtgcaaaacaggc

SEQ ID NO: 5853026 - DNA, 25 bp, Homo sapien
acgtgcaaaacaggctctagcgttc

SEQ ID NO: 5853027 - DNA, 25 bp, Homo sapien
ctctagcgttcgaacgcactgattt

SEQ ID NO: 5853028 - DNA, 25 bp, Homo sapien
tcgttcactcatggaaaatagcgat

SEQ ID NO: 5853029 - DNA, 25 bp, Homo sapien
atttgcctgcattaccggtcgatgc

SEQ ID NO: 5853030 - DNA, 25 bp, Homo sapien
atggaaaatagcgatcgctgccagg

SEQ ID NO: 5853031 - DNA, 25 bp, Homo sapien
taccggtcgatgcaacgagtgatga

SEQ ID NO: 5853032 - DNA, 25 bp, Homo sapien
tcagggttaaagatatctcacgtac

SEQ ID NO: 5853033 - DNA, 25 bp, Homo sapien
gagtgatgaggttcgcaagaacctg

SEQ ID NO: 5853034 - DNA, 25 bp, Homo sapien
gcaagaacctgatggacatgttcag

SEQ ID NO: 5853035 - DNA, 25 bp, Homo sapien
gacatgttcagggatcgccaggcgt

SEQ ID NO: 5853036 - DNA, 25 bp, Homo sapien
gccaggcgttttctgagcatacctg

SEQ ID NO: 5853037 - DNA, 25 bp, Homo sapien
gcggcatggtgcaagttgaataacc

SEQ ID NO: 5853038 - DNA, 25 bp, Homo sapien
gaagatgttcgcgattatcttctat

SEQ ID NO: 5853039 - DNA, 25 bp, Homo sapien
tctatatcttcaggcgcgcggtctg

SEQ ID NO: 5853040 - DNA, 25 bp, Homo sapien
gcaacatttgggccagctaaacatg

SEQ ID NO: 5853041 - DNA, 25 bp, Homo sapien
ccagctaaacatgcttcatcgtcgg

SEQ ID NO: 5853042 - DNA, 25 bp, Homo sapien
ccgggctgccacgaccaagtgacag

SEQ ID NO: 5853043 - DNA, 25 bp, Homo sapien
gaccaagtgacagcaatgctgtttc

SEQ ID NO: 5853044 - DNA, 25 bp, Homo sapien
aatgctgtttcactggttatgcggc

SEQ ID NO: 5853045 - DNA, 25 bp, Homo sapien
atgccggtgaacgtgcaaaacaggc

SEQ ID NO: 5853046 - DNA, 25 bp, Homo sapien
acgtgcaaaacaggctctagcgttc

SEQ ID NO: 5853047 - DNA, 25 bp, Homo sapien
ctctagcgttcgaacgcactgattt

SEQ ID NO: 5853048 - DNA, 25 bp, Homo sapien
tcgttcactcatggaaaatagcgat

SEQ ID NO: 5853049 - DNA, 25 bp, Homo sapien
atttgcctgcattaccggtcgatgc

SEQ ID NO: 5853050 - DNA, 25 bp, Homo sapien
atggaaaatagcgatcgctgccagg

SEQ ID NO: 5853051 - DNA, 25 bp, Homo sapien
taccggtcgatgcaacgagtgatga

SEQ ID NO: 5853052 - DNA, 25 bp, Homo sapien
tcagggttaaagatatctcacgtac

SEQ ID NO: 5853053 - DNA, 25 bp, Homo sapien
gagtgatgaggttcgcaagaacctg

SEQ ID NO: 5853054 - DNA, 25 bp, Homo sapien
gcaagaacctgatggacatgttcag

SEQ ID NO: 5853055 - DNA, 25 bp, Homo sapien
gatctgctgtttgaagcgcagcagg

SEQ ID NO: 5853056 - DNA, 25 bp, Homo sapien
atggtgcagggggtaaaagcgatgg

SEQ ID NO: 5853057 - DNA, 25 bp, Homo sapien
catttcgatcctcgtcaggtgcagg

SEQ ID NO: 5853058 - DNA, 25 bp, Homo sapien
ttacggcaatatcatcaccacacgc

SEQ ID NO: 5853059 - DNA, 25 bp, Homo sapien
gctggaaaaagtgcgcgatgccggg

SEQ ID NO: 5853060 - DNA, 25 bp, Homo sapien
acgcgatatgccgtacctggaacaa

SEQ ID NO: 5853061 - DNA, 25 bp, Homo sapien
gcacttatcaggaacgcctcgatac

SEQ ID NO: 5853062 - DNA, 25 bp, Homo sapien
aaagcgatggggctggaggcgtgta

SEQ ID NO: 5853063 - DNA, 25 bp, Homo sapien
acgttgctgtcgattaagaccggag

SEQ ID NO: 5853064 - DNA, 25 bp, Homo sapien
accggagcttgtccggaagattgca

SEQ ID NO: 5853065 - DNA, 25 bp, Homo sapien
tgcagggggtaaaagcgatggggct

SEQ ID NO: 5853066 - DNA, 25 bp, Homo sapien
atgggcgcggcgtggaagaatcccc

SEQ ID NO: 5853067 - DNA, 25 bp, Homo sapien
gaatccccacgaacgcgatatgccg

SEQ ID NO: 5853068 - DNA, 25 bp, Homo sapien
aagccgagcggttgatggaagttga

SEQ ID NO: 5853069 - DNA, 25 bp, Homo sapien
tttgaaaaaccgttgctggatctgc

SEQ ID NO: 5853070 - DNA, 25 bp, Homo sapien
aggatcgacgcgcttctgtatgggc

SEQ ID NO: 5853071 - DNA, 25 bp, Homo sapien
tcgcgctacaaaaccgggctggaag

SEQ ID NO: 5853072 - DNA, 25 bp, Homo sapien
ttctgtatgggcgcggcgtggaaga

SEQ ID NO: 5853073 - DNA, 25 bp, Homo sapien
tggaagaatccccacgaacgcgata

SEQ ID NO: 5853074 - DNA, 25 bp, Homo sapien
cgatacgctggaaaaagtgcgcgat

SEQ ID NO: 5853075 - DNA, 25 bp, Homo sapien
gcgtgtatgacgctgggcacgttga

SEQ ID NO: 5853076 - DNA, 25 bp, Homo sapien
gggtaaaagcgatggggctggaggc

SEQ ID NO: 5853077 - DNA, 25 bp, Homo sapien
tatgacgctgggcacgttgagtgaa

SEQ ID NO: 5853078 - DNA, 25 bp, Homo sapien
tgctggagtcggcgcgcaaagcgaa

SEQ ID NO: 5853079 - DNA, 25 bp, Homo sapien
tgagtgaatctcaggcgcagcgcct

SEQ ID NO: 5853080 - DNA, 25 bp, Homo sapien
aatctcaggcgcagcgcctcgcgaa

SEQ ID NO: 5853081 - DNA, 25 bp, Homo sapien
cagcaggtgcatcgccagcatttcg

SEQ ID NO: 5853082 - DNA, 25 bp, Homo sapien
gacacctcgccggagttttacggca

SEQ ID NO: 5853083 - DNA, 25 bp, Homo sapien
cgtacctggaacaaatggtgcaggg

SEQ ID NO: 5853084 - DNA, 25 bp, Homo sapien
ctgtcgattaagaccggagcttgtc

SEQ ID NO: 5853085 - DNA, 25 bp, Homo sapien
gcggcgtggaagaatccccacgaac

SEQ ID NO: 5853086 - DNA, 25 bp, Homo sapien
tgaagcgcagcaggtgcatcgccag

SEQ ID NO: 5853087 - DNA, 25 bp, Homo sapien
tggcggcattgtgggcttaggcgaa

SEQ ID NO: 5853088 - DNA, 25 bp, Homo sapien
attactacaaccacaacctggacac

SEQ ID NO: 5853089 - DNA, 25 bp, Homo sapien
tgcccgcaaacgtcgcgctacaaaa

SEQ ID NO: 5853090 - DNA, 25 bp, Homo sapien
tacaaaaccgggctggaagccgagc

SEQ ID NO: 5853091 - DNA, 25 bp, Homo sapien
aaatactgcccgcaaacgtcgcgct

SEQ ID NO: 5853092 - DNA, 25 bp, Homo sapien
gatcctcgtcaggtgcaggtcagca

SEQ ID NO: 5853093 - DNA, 25 bp, Homo sapien
gcttgtccggaagattgcaaatact

SEQ ID NO: 5853094 - DNA, 25 bp, Homo sapien
agcggcaggatcgacgcgcttctgt

SEQ ID NO: 5853095 - DNA, 25 bp, Homo sapien
agtcggcgcgcaaagcgaaagcggc

SEQ ID NO: 5853096 - DNA, 25 bp, Homo sapien
agcgaaagcggcaggatcgacgcgc

SEQ ID NO: 5853097 - DNA, 25 bp, Homo sapien
atcaaagtctgttctggcggcattg

SEQ ID NO: 5853098 - DNA, 25 bp, Homo sapien
aaaccgttgctggatctgctgtttg

SEQ ID NO: 5853099 - DNA, 25 bp, Homo sapien
acggtaaaagatcgcgccggattat

SEQ ID NO: 5853100 - DNA, 25 bp, Homo sapien
caacctggacacctcgccggagttt

SEQ ID NO: 5853101 - DNA, 25 bp, Homo sapien
tcgcgaacgccgggctggattacta

SEQ ID NO: 5853102 - DNA, 25 bp, Homo sapien
cgcgcaaagcgaaagcggcaggatc

SEQ ID NO: 5853103 - DNA, 25 bp, Homo sapien
aagttgaacaggtgctggagtcggc

SEQ ID NO: 5853104 - DNA, 25 bp, Homo sapien
ctcgccggagttttacggcaatatc

SEQ ID NO: 5853105 - DNA, 25 bp, Homo sapien
ggagttttacggcaatatcatcacc

SEQ ID NO: 5853106 - DNA, 25 bp, Homo sapien
catcaccacacgcacttatcaggaa

SEQ ID NO: 5853107 - DNA, 25 bp, Homo sapien
gctggaagccgagcggttgatggaa

SEQ ID NO: 5853108 - DNA, 25 bp, Homo sapien
aacaggtgctggagtcggcgcgcaa

SEQ ID NO: 5853109 - DNA, 25 bp, Homo sapien
agaattatttgaaaaaccgttgctg

SEQ ID NO: 5853110 - DNA, 25 bp, Homo sapien
gattgcaaatactgcccgcaaacgt

SEQ ID NO: 5853111 - DNA, 25 bp, Homo sapien
ccacgaacgcgatatgccgtacctg

SEQ ID NO: 5853112 - DNA, 25 bp, Homo sapien
ccggaagattgcaaatactgcccgc

SEQ ID NO: 5853113 - DNA, 25 bp, Homo sapien
aaccgggctggaagccgagcggttg

SEQ ID NO: 5853114 - DNA, 25 bp, Homo sapien
ttgctggatctgctgtttgaagcgc

SEQ ID NO: 5853115 - DNA, 25 bp, Homo sapien
gtcagcacgttgctgtcgattaaga

SEQ ID NO: 5853116 - DNA, 25 bp, Homo sapien
cgctgggcacgttgagtgaatctca

SEQ ID NO: 5853117 - DNA, 25 bp, Homo sapien
attaagaccggagcttgtccggaag

SEQ ID NO: 5853118 - DNA, 25 bp, Homo sapien
acgccgggctggattactacaacca

SEQ ID NO: 5853119 - DNA, 25 bp, Homo sapien
cgcgatgccgggatcaaagtctgtt

SEQ ID NO: 5853120 - DNA, 25 bp, Homo sapien
gtgcaggtcagcacgttgctgtcga

SEQ ID NO: 5853121 - DNA, 25 bp, Homo sapien
ccacacgcacttatcaggaacgcct

SEQ ID NO: 5853122 - DNA, 25 bp, Homo sapien
gatggggctggaggcgtgtatgacg

SEQ ID NO: 5853123 - DNA, 25 bp, Homo sapien
ctggaggcgtgtatgacgctgggca

SEQ ID NO: 5853124 - DNA, 25 bp, Homo sapien
gcacgttgagtgaatctcaggcgca

SEQ ID NO: 5853125 - DNA, 25 bp, Homo sapien
atatgccgtacctggaacaaatggt

SEQ ID NO: 5853126 - DNA, 25 bp, Homo sapien
cattgtgggcttaggcgaaacggta

SEQ ID NO: 5853127 - DNA, 25 bp, Homo sapien
acgcgcttctgtatgggcgcggcgt

SEQ ID NO: 5853128 - DNA, 25 bp, Homo sapien
aaagtgcgcgatgccgggatcaaag

SEQ ID NO: 5853129 - DNA, 25 bp, Homo sapien
cgcgccggattattgctgcaactgg

SEQ ID NO: 5853130 - DNA, 25 bp, Homo sapien
aagatcgcgccggattattgctgca

SEQ ID NO: 5853131 - DNA, 25 bp, Homo sapien
ctgtttgaagcgcagcaggtgcatc

SEQ ID NO: 5853132 - DNA, 25 bp, Homo sapien
gtgcatcgccagcatttcgatcctc

SEQ ID NO: 5853133 - DNA, 25 bp, Homo sapien
cgccagcatttcgatcctcgtcagg

SEQ ID NO: 5853134 - DNA, 25 bp, Homo sapien
taggcgaaacggtaaaagatcgcgc

SEQ ID NO: 5853135 - DNA, 25 bp, Homo sapien
caatatcatcaccacacgcacttat

SEQ ID NO: 5853136 - DNA, 25 bp, Homo sapien
tgatggaagttgaacaggtgctgga

SEQ ID NO: 5853137 - DNA, 25 bp, Homo sapien
aacgcctcgatacgctggaaaaagt

SEQ ID NO: 5853138 - DNA, 25 bp, Homo sapien
caaccacaacctggacacctcgccg

SEQ ID NO: 5853139 - DNA, 25 bp, Homo sapien
agtcacagaattatttgaaaaaccg

SEQ ID NO: 5853140 - DNA, 25 bp, Homo sapien
agcgcctcgcgaacgccgggctgga

SEQ ID NO: 5853141 - DNA, 25 bp, Homo sapien
agcggttgatggaagttgaacaggt

SEQ ID NO: 5853142 - DNA, 25 bp, Homo sapien
gccgggatcaaagtctgttctggcg

SEQ ID NO: 5853143 - DNA, 25 bp, Homo sapien
cgtcaggtgcaggtcagcacgttgc

SEQ ID NO: 5853144 - DNA, 25 bp, Homo sapien
ggctggattactacaaccacaacct

SEQ ID NO: 5853145 - DNA, 25 bp, Homo sapien
atcaggaacgcctcgatacgctgga

SEQ ID NO: 5853146 - DNA, 25 bp, Homo sapien
aacgtcgcgctacaaaaccgggctg

SEQ ID NO: 5853147 - DNA, 25 bp, Homo sapien
tgccgtaaaactccggcgaggtgtc

SEQ ID NO: 5853148 - DNA, 25 bp, Homo sapien
agaggttggcatcatgatccgcgcg

SEQ ID NO: 5853149 - DNA, 25 bp, Homo sapien
gaggtgtccaggttgtggttgtagt

SEQ ID NO: 5853150 - DNA, 25 bp, Homo sapien
gcgtatcgaggcgttcctgataagt

SEQ ID NO: 5853151 - DNA, 25 bp, Homo sapien
cgttatcggcaagcggcgtgccttt

SEQ ID NO: 5853152 - DNA, 25 bp, Homo sapien
tccggcgaggtgtccaggttgtggt

SEQ ID NO: 5853153 - DNA, 25 bp, Homo sapien
agaaaatcgagtttgcgcctgccat

SEQ ID NO: 5853154 - DNA, 25 bp, Homo sapien
aaggcgcacgtaagaggttggcatc

SEQ ID NO: 5853155 - DNA, 25 bp, Homo sapien
tgcagcaataatccggcgcgatctt

SEQ ID NO: 5853156 - DNA, 25 bp, Homo sapien
gcgcgatcttttaccgtttcgccta

SEQ ID NO: 5853157 - DNA, 25 bp, Homo sapien
gtcagcagtttgcaaccgtagaaaa

SEQ ID NO: 5853158 - DNA, 25 bp, Homo sapien
tcatcagcgcctgttcaagacgttg

SEQ ID NO: 5853159 - DNA, 25 bp, Homo sapien
ggatttagccccagtttgcggaaca

SEQ ID NO: 5853160 - DNA, 25 bp, Homo sapien
atgttgattggcacgctttccggcg

SEQ ID NO: 5853161 - DNA, 25 bp, Homo sapien
tggcatcatgatccgcgcgaccgca

SEQ ID NO: 5853162 - DNA, 25 bp, Homo sapien
gacgttgctgttgttcgttatcccc

SEQ ID NO: 5853163 - DNA, 25 bp, Homo sapien
tttccagcgtatcgaggcgttcctg

SEQ ID NO: 5853164 - DNA, 25 bp, Homo sapien
tattcgtcggtgtccggggtcatca

SEQ ID NO: 5853165 - DNA, 25 bp, Homo sapien
cctttcaccttcaccagcatgttga

SEQ ID NO: 5853166 - DNA, 25 bp, Homo sapien
cctgagtctgttcgttcatctgctc

SEQ ID NO: 5853167 - DNA, 25 bp, Homo sapien
ggcagaaaggcgcacgtaagaggtt

SEQ ID NO: 5853168 - DNA, 25 bp, Homo sapien
ggcaagcggcgtgcctttcaccttc

SEQ ID NO: 5853169 - DNA, 25 bp, Homo sapien
ctgccagcacggcagtttgctgcgg

SEQ ID NO: 5853170 - DNA, 25 bp, Homo sapien
gttcctgataagtgcgtgtggtgat

SEQ ID NO: 5853171 - DNA, 25 bp, Homo sapien
catgatccgcgcgaccgcaatggtg

SEQ ID NO: 5853172 - DNA, 25 bp, Homo sapien
gataagtgcgtgtggtgatgatatt

SEQ ID NO: 5853173 - DNA, 25 bp, Homo sapien
acagactttgatcccggcatcgcgc

SEQ ID NO: 5853174 - DNA, 25 bp, Homo sapien
tgctgcggatttagccccagtttgc

SEQ ID NO: 5853175 - DNA, 25 bp, Homo sapien
accttcaccagcatgttgattggca

SEQ ID NO: 5853176 - DNA, 25 bp, Homo sapien
cccggcatcgcgcactttttccagc

SEQ ID NO: 5853177 - DNA, 25 bp, Homo sapien
ccggggtcatcagcgcctgttcaag

SEQ ID NO: 5853178 - DNA, 25 bp, Homo sapien
accagcatgttgattggcacgcttt

SEQ ID NO: 5853179 - DNA, 25 bp, Homo sapien
ggcgtgcctttcaccttcaccagca

SEQ ID NO: 5853180 - DNA, 25 bp, Homo sapien
gccagaacagactttgatcccggca

SEQ ID NO: 5853181 - DNA, 25 bp, Homo sapien
gccagttgcagcaataatccggcgc

SEQ ID NO: 5853182 - DNA, 25 bp, Homo sapien
cgttcatctgctcgcgtccggcaga

SEQ ID NO: 5853183 - DNA, 25 bp, Homo sapien
caaccgtagaaaatcgagtttgcgc

SEQ ID NO: 5853184 - DNA, 25 bp, Homo sapien
tatcttcttccggattcggcgtggt

SEQ ID NO: 5853185 - DNA, 25 bp, Homo sapien
ggcgtggtcagcagtttgcaaccgt

SEQ ID NO: 5853186 - DNA, 25 bp, Homo sapien
cagtttgctgcggatttagccccag

SEQ ID NO: 5853187 - DNA, 25 bp, Homo sapien
gattcggcgtggtcagcagtttgca

SEQ ID NO: 5853188 - DNA, 25 bp, Homo sapien
aatgccgccagaacagactttgatc

SEQ ID NO: 5853189 - DNA, 25 bp, Homo sapien
cggaacagttgcaggtctttatctt

SEQ ID NO: 5853190 - DNA, 25 bp, Homo sapien
caatggtgcgaataaaatcaaaggc

SEQ ID NO: 5853191 - DNA, 25 bp, Homo sapien
gttcaagacgttgctgttgttcgtt

SEQ ID NO: 5853192 - DNA, 25 bp, Homo sapien
acatcgcctgagtctgttcgttcat

SEQ ID NO: 5853193 - DNA, 25 bp, Homo sapien
gcactttttccagcgtatcgaggcg

SEQ ID NO: 5853194 - DNA, 25 bp, Homo sapien
taatccagcccggcgttcgcgaggc

SEQ ID NO: 5853195 - DNA, 25 bp, Homo sapien
tggtgatgatattgccgtaaaactc

SEQ ID NO: 5853196 - DNA, 25 bp, Homo sapien
agtttgcaaccgtagaaaatcgagt

SEQ ID NO: 5853197 - DNA, 25 bp, Homo sapien
tgccataaagcacatcgcctgagtc

SEQ ID NO: 5853198 - DNA, 25 bp, Homo sapien
tttccggcggcgtcggcaggtttgc

SEQ ID NO: 5853199 - DNA, 25 bp, Homo sapien
aggtttgccagttgcagcaataatc

SEQ ID NO: 5853200 - DNA, 25 bp, Homo sapien
cgaggcgttcctgataagtgcgtgt

SEQ ID NO: 5853201 - DNA, 25 bp, Homo sapien
ccacaatgccgccagaacagacttt

SEQ ID NO: 5853202 - DNA, 25 bp, Homo sapien
aaactccggcgaggtgtccaggttg

SEQ ID NO: 5853203 - DNA, 25 bp, Homo sapien
tgcgaataaaatcaaaggcatcgac

SEQ ID NO: 5853204 - DNA, 25 bp, Homo sapien
gtcggcaggtttgccagttgcagca

SEQ ID NO: 5853205 - DNA, 25 bp, Homo sapien
cacgtaagaggttggcatcatgatc

SEQ ID NO: 5853206 - DNA, 25 bp, Homo sapien
aaagcacatcgcctgagtctgttcg

SEQ ID NO: 5853207 - DNA, 25 bp, Homo sapien
caaaggcatcgacatcatcgttatc

SEQ ID NO: 5853208 - DNA, 25 bp, Homo sapien
taccgtttcgcctaagcccacaatg

SEQ ID NO: 5853209 - DNA, 25 bp, Homo sapien
ttgtagtaatccagcccggcgttcg

SEQ ID NO: 5853210 - DNA, 25 bp, Homo sapien
catcgacatcatcgttatcggcaag

SEQ ID NO: 5853211 - DNA, 25 bp, Homo sapien
catcgcgcactttttccagcgtatc

SEQ ID NO: 5853212 - DNA, 25 bp, Homo sapien
tcgagtttgcgcctgccataaagca

SEQ ID NO: 5853213 - DNA, 25 bp, Homo sapien
cgaccgcaatggtgcgaataaaatc

SEQ ID NO: 5853214 - DNA, 25 bp, Homo sapien
tatcccctgccagcacggcagtttg

SEQ ID NO: 5853215 - DNA, 25 bp, Homo sapien
cttccggattcggcgtggtcagcag

SEQ ID NO: 5853216 - DNA, 25 bp, Homo sapien
tccgcgcgaccgcaatggtgcgaat

SEQ ID NO: 5853217 - DNA, 25 bp, Homo sapien
tagccccagtttgcggaacagttgc

SEQ ID NO: 5853218 - DNA, 25 bp, Homo sapien
gcgtccggcagaaaggcgcacgtaa

SEQ ID NO: 5853219 - DNA, 25 bp, Homo sapien
tttgatcccggcatcgcgcactttt

SEQ ID NO: 5853220 - DNA, 25 bp, Homo sapien
gcacggcagtttgctgcggatttag

SEQ ID NO: 5853221 - DNA, 25 bp, Homo sapien
attggcacgctttccggcggcgtcg

SEQ ID NO: 5853222 - DNA, 25 bp, Homo sapien
ttcgcctaagcccacaatgccgcca

SEQ ID NO: 5853223 - DNA, 25 bp, Homo sapien
agttgcaggtctttatcttcttccg

SEQ ID NO: 5853224 - DNA, 25 bp, Homo sapien
ggcggcgtcggcaggtttgccagtt

SEQ ID NO: 5853225 - DNA, 25 bp, Homo sapien
ctgctcgcgtccggcagaaaggcgc

SEQ ID NO: 5853226 - DNA, 25 bp, Homo sapien
gcgcctgttcaagacgttgctgttg

SEQ ID NO: 5853227 - DNA, 25 bp, Homo sapien
ttgcgcctgccataaagcacatcgc

SEQ ID NO: 5853228 - DNA, 25 bp, Homo sapien
ataatccggcgcgatcttttaccgt

SEQ ID NO: 5853229 - DNA, 25 bp, Homo sapien
tctgttcgttcatctgctcgcgtcc

SEQ ID NO: 5853230 - DNA, 25 bp, Homo sapien
taagcccacaatgccgccagaacag

SEQ ID NO: 5853231 - DNA, 25 bp, Homo sapien
gttcgttatcccctgccagcacggc

SEQ ID NO: 5853232 - DNA, 25 bp, Homo sapien
tgatattgccgtaaaactccggcga

SEQ ID NO: 5853233 - DNA, 25 bp, Homo sapien
ttgtggttgtagtaatccagcccgg

SEQ ID NO: 5853234 - DNA, 25 bp, Homo sapien
agtttgcggaacagttgcaggtctt

SEQ ID NO: 5853235 - DNA, 25 bp, Homo sapien
gctgttgttcgttatcccctgccag

SEQ ID NO: 5853236 - DNA, 25 bp, Homo sapien
taaaatcaaaggcatcgacatcatc

SEQ ID NO: 5853237 - DNA, 25 bp, Homo sapien
catcatcgttatcggcaagcggcgt

SEQ ID NO: 5853238 - DNA, 25 bp, Homo sapien
tcggtgtccggggtcatcagcgcct

SEQ ID NO: 5853239 - DNA, 25 bp, Homo sapien
tgcgtgtggtgatgatattgccgta

SEQ ID NO: 5853240 - DNA, 25 bp, Homo sapien
aggtctttatcttcttccggattcg

SEQ ID NO: 5853241 - DNA, 25 bp, Homo sapien
tccaggttgtggttgtagtaatcca

SEQ ID NO: 5853242 - DNA, 25 bp, Homo sapien
gaacggcgtgcattatcaacatcat

SEQ ID NO: 5853243 - DNA, 25 bp, Homo sapien
tcaggcgtggcaggcggtggacgag

SEQ ID NO: 5853244 - DNA, 25 bp, Homo sapien
ggcggtggacgagcgtccgcatgct

SEQ ID NO: 5853245 - DNA, 25 bp, Homo sapien
gtcgggcagccgcacactatgagca

SEQ ID NO: 5853246 - DNA, 25 bp, Homo sapien
ctgtatcgggtggtgcgccccaaag

SEQ ID NO: 5853247 - DNA, 25 bp, Homo sapien
tgcagtggtgcggtaatttatccac

SEQ ID NO: 5853248 - DNA, 25 bp, Homo sapien
acggcactccgcgagctgtatcggg

SEQ ID NO: 5853249 - DNA, 25 bp, Homo sapien
tcgctgaaaggcatcggtgccacgc

SEQ ID NO: 5853250 - DNA, 25 bp, Homo sapien
tcaggcacgccagaaggatgccgca

SEQ ID NO: 5853251 - DNA, 25 bp, Homo sapien
agaccattatctggcgggagatatc

SEQ ID NO: 5853252 - DNA, 25 bp, Homo sapien
tgccgcagaccattatctggcggga

SEQ ID NO: 5853253 - DNA, 25 bp, Homo sapien
ggccttagatctctcgccgccaatg

SEQ ID NO: 5853254 - DNA, 25 bp, Homo sapien
agatctctcgccgccaatgcttgtt

SEQ ID NO: 5853255 - DNA, 25 bp, Homo sapien
acgttcgatcttgcatggagcaatc

SEQ ID NO: 5853256 - DNA, 25 bp, Homo sapien
agtgccatgcgttcgctgaaaggca

SEQ ID NO: 5853257 - DNA, 25 bp, Homo sapien
ttccacagcgtaaatacacccacgt

SEQ ID NO: 5853258 - DNA, 25 bp, Homo sapien
gtggcaggcggtggacgagcgtccg

SEQ ID NO: 5853259 - DNA, 25 bp, Homo sapien
actgcgacgttcgatcttgcatgga

SEQ ID NO: 5853260 - DNA, 25 bp, Homo sapien
tggatgagccgccactggcgggaac

SEQ ID NO: 5853261 - DNA, 25 bp, Homo sapien
gtggtcgcgtttaccacgctggtgc

SEQ ID NO: 5853262 - DNA, 25 bp, Homo sapien
gcggcatttggtcgggcagccgcac

SEQ ID NO: 5853263 - DNA, 25 bp, Homo sapien
ttagcgactgcgacgttcgatcttg

SEQ ID NO: 5853264 - DNA, 25 bp, Homo sapien
ctggacgcgggttgtggacctggct

SEQ ID NO: 5853265 - DNA, 25 bp, Homo sapien
atcgttacccgaacgtcatcaggcg

SEQ ID NO: 5853266 - DNA, 25 bp, Homo sapien
gcgggagatatcgaatccctgccgt

SEQ ID NO: 5853267 - DNA, 25 bp, Homo sapien
gcatgctaatcgctttttaccgcca

SEQ ID NO: 5853268 - DNA, 25 bp, Homo sapien
acgccagaaggatgccgcagaccat

SEQ ID NO: 5853269 - DNA, 25 bp, Homo sapien
gccaatgcttgttcaggcacgccag

SEQ ID NO: 5853270 - DNA, 25 bp, Homo sapien
gaaatcgaacagtcgctgaacggcg

SEQ ID NO: 5853271 - DNA, 25 bp, Homo sapien
tacagcgccagagtgctgacgcctt

SEQ ID NO: 5853272 - DNA, 25 bp, Homo sapien
gcgggttgtggacctggctggatga

SEQ ID NO: 5853273 - DNA, 25 bp, Homo sapien
gctggtgcagggatcgttacccgaa

SEQ ID NO: 5853274 - DNA, 25 bp, Homo sapien
cctggctggatgagccgccactggc

SEQ ID NO: 5853275 - DNA, 25 bp, Homo sapien
aacatgcagatctacagcgccagag

SEQ ID NO: 5853276 - DNA, 25 bp, Homo sapien
gaacgtcacgcgcaggtgacggcct

SEQ ID NO: 5853277 - DNA, 25 bp, Homo sapien
tgcgccccaaaggcgtggtcgcgtt

SEQ ID NO: 5853278 - DNA, 25 bp, Homo sapien
ggtggtgcgccccaaaggcgtggtc

SEQ ID NO: 5853279 - DNA, 25 bp, Homo sapien
agcaatctcgcagtgcagtggtgcg

SEQ ID NO: 5853280 - DNA, 25 bp, Homo sapien
tggtttgatgatgcgctcagtgcca

SEQ ID NO: 5853281 - DNA, 25 bp, Homo sapien
caatgcttccacagcgtaaatacac

SEQ ID NO: 5853282 - DNA, 25 bp, Homo sapien
ttatcaacatcatattcagcccatc

SEQ ID NO: 5853283 - DNA, 25 bp, Homo sapien
tcgcagtgcagtggtgcggtaattt

SEQ ID NO: 5853284 - DNA, 25 bp, Homo sapien
gatcttgcatggagcaatctcgcag

SEQ ID NO: 5853285 - DNA, 25 bp, Homo sapien
cactccgcgagctgtatcgggtggt

SEQ ID NO: 5853286 - DNA, 25 bp, Homo sapien
tggtgcggtaatttatccacggcac

SEQ ID NO: 5853287 - DNA, 25 bp, Homo sapien
acccgaacgtcatcaggcgtggcag

SEQ ID NO: 5853288 - DNA, 25 bp, Homo sapien
acgtcatcaggcgtggcaggcggtg

SEQ ID NO: 5853289 - DNA, 25 bp, Homo sapien
acccacgtactggacgcgggttgtg

SEQ ID NO: 5853290 - DNA, 25 bp, Homo sapien
gatatcgaatccctgccgttagcga

SEQ ID NO: 5853291 - DNA, 25 bp, Homo sapien
acgccttactggcaatgcttccaca

SEQ ID NO: 5853292 - DNA, 25 bp, Homo sapien
acgctgtggtttgatgatgcgctca

SEQ ID NO: 5853293 - DNA, 25 bp, Homo sapien
gaacagtcgctgaacggcgtgcatt

SEQ ID NO: 5853294 - DNA, 25 bp, Homo sapien
cccatcacgctgtggtttgatgatg

SEQ ID NO: 5853295 - DNA, 25 bp, Homo sapien
acgcgcaggtgacggccttagatct

SEQ ID NO: 5853296 - DNA, 25 bp, Homo sapien
aaaggcatcggtgccacgcatcttc

SEQ ID NO: 5853297 - DNA, 25 bp, Homo sapien
atgcgttcgctgaaaggcatcggtg

SEQ ID NO: 5853298 - DNA, 25 bp, Homo sapien
ctaatcgctttttaccgccagatga

SEQ ID NO: 5853299 - DNA, 25 bp, Homo sapien
atgagcaacatgcagatctacagcg

SEQ ID NO: 5853300 - DNA, 25 bp, Homo sapien
ctcgccgccaatgcttgttcaggca

SEQ ID NO: 5853301 - DNA, 25 bp, Homo sapien
tgagccgccactggcgggaacgtca

SEQ ID NO: 5853302 - DNA, 25 bp, Homo sapien
gcgtccgcatgctaatcgcttttta

SEQ ID NO: 5853303 - DNA, 25 bp, Homo sapien
gaatccctgccgttagcgactgcga

SEQ ID NO: 5853304 - DNA, 25 bp, Homo sapien
gccactggcgggaacgtcacgcgca

SEQ ID NO: 5853305 - DNA, 25 bp, Homo sapien
gctttttaccgccagatgaaatcga

SEQ ID NO: 5853306 - DNA, 25 bp, Homo sapien
gcgtttaccacgctggtgcagggat

SEQ ID NO: 5853307 - DNA, 25 bp, Homo sapien
gtgctgacgccttactggcaatgct

SEQ ID NO: 5853308 - DNA, 25 bp, Homo sapien
caaaggcgtggtcgcgtttaccacg

SEQ ID NO: 5853309 - DNA, 25 bp, Homo sapien
tgtggacctggctggatgagccgcc

SEQ ID NO: 5853310 - DNA, 25 bp, Homo sapien
ggtgacggccttagatctctcgccg

SEQ ID NO: 5853311 - DNA, 25 bp, Homo sapien
ctgccgttagcgactgcgacgttcg

SEQ ID NO: 5853312 - DNA, 25 bp, Homo sapien
ggacgagcgtccgcatgctaatcgc

SEQ ID NO: 5853313 - DNA, 25 bp, Homo sapien
gccagagtgctgacgccttactggc

SEQ ID NO: 5853314 - DNA, 25 bp, Homo sapien
acatcatattcagcccatcacgctg

SEQ ID NO: 5853315 - DNA, 25 bp, Homo sapien
cagatctacagcgccagagtgctga

SEQ ID NO: 5853316 - DNA, 25 bp, Homo sapien
cagcgtaaatacacccacgtactgg

SEQ ID NO: 5853317 - DNA, 25 bp, Homo sapien
gcatggagcaatctcgcagtgcagt

SEQ ID NO: 5853318 - DNA, 25 bp, Homo sapien
gaaggatgccgcagaccattatctg

SEQ ID NO: 5853319 - DNA, 25 bp, Homo sapien
aaatacacccacgtactggacgcgg

SEQ ID NO: 5853320 - DNA, 25 bp, Homo sapien
cagccgcacactatgagcaacatgc

SEQ ID NO: 5853321 - DNA, 25 bp, Homo sapien
taccacgctggtgcagggatcgtta

SEQ ID NO: 5853322 - DNA, 25 bp, Homo sapien
cacactatgagcaacatgcagatct

SEQ ID NO: 5853323 - DNA, 25 bp, Homo sapien
ttatccacggcactccgcgagctgt

SEQ ID NO: 5853324 - DNA, 25 bp, Homo sapien
gatgatgcgctcagtgccatgcgtt

SEQ ID NO: 5853325 - DNA, 25 bp, Homo sapien
gcgctcagtgccatgcgttcgctga

SEQ ID NO: 5853326 - DNA, 25 bp, Homo sapien
ggtaatttatccacggcactccgcg

SEQ ID NO: 5853327 - DNA, 25 bp, Homo sapien
tactggcaatgcttccacagcgtaa

SEQ ID NO: 5853328 - DNA, 25 bp, Homo sapien
catttggtcgggcagccgcacacta

SEQ ID NO: 5853329 - DNA, 25 bp, Homo sapien
tatctggcgggagatatcgaatccc

SEQ ID NO: 5853330 - DNA, 25 bp, Homo sapien
gcagggatcgttacccgaacgtcat

SEQ ID NO: 5853331 - DNA, 25 bp, Homo sapien
attcagcccatcacgctgtggtttg

SEQ ID NO: 5853332 - DNA, 25 bp, Homo sapien
gcttgttcaggcacgccagaaggat

SEQ ID NO: 5853333 - DNA, 25 bp, Homo sapien
ccagatgaaatcgaacagtcgctga

SEQ ID NO: 5853334 - DNA, 25 bp, Homo sapien
cgcgagctgtatcgggtggtgcgcc

SEQ ID NO: 5853335 - DNA, 25 bp, Homo sapien
tcgctgaacggcgtgcattatcaac

SEQ ID NO: 5853336 - DNA, 25 bp, Homo sapien
tggcgggaacgtcacgcgcaggtga

SEQ ID NO: 5853337 - DNA, 25 bp, Homo sapien
ttaccgccagatgaaatcgaacagt

SEQ ID NO: 5853338 - DNA, 25 bp, Homo sapien
cgtgcattatcaacatcatattcag

SEQ ID NO: 5853339 - DNA, 25 bp, Homo sapien
cgatgcctttcagcgaacgcatggc

SEQ ID NO: 5853340 - DNA, 25 bp, Homo sapien
cgttcagcgactgttcgatttcatc

SEQ ID NO: 5853341 - DNA, 25 bp, Homo sapien
ctcccgccagataatggtctgcggc

SEQ ID NO: 5853342 - DNA, 25 bp, Homo sapien
ccacagcgtgatgggctgaatatga

SEQ ID NO: 5853343 - DNA, 25 bp, Homo sapien
cgttaatattcgcgggtcgcgccct

SEQ ID NO: 5853344 - DNA, 25 bp, Homo sapien
tgccacgcctgatgacgttcgggta

SEQ ID NO: 5853345 - DNA, 25 bp, Homo sapien
gcacgccgttcagcgactgttcgat

SEQ ID NO: 5853346 - DNA, 25 bp, Homo sapien
tctggcggtaaaaagcgattagcat

SEQ ID NO: 5853347 - DNA, 25 bp, Homo sapien
aactgcgaacgcgttaatattcgcg

SEQ ID NO: 5853348 - DNA, 25 bp, Homo sapien
tccagtacgtgggtgtatttacgct

SEQ ID NO: 5853349 - DNA, 25 bp, Homo sapien
attcgcgggtcgcgcccttcatgaa

SEQ ID NO: 5853350 - DNA, 25 bp, Homo sapien
atccagccaggtccacaacccgcgt

SEQ ID NO: 5853351 - DNA, 25 bp, Homo sapien
gacgttcccgccagtggcggctcat

SEQ ID NO: 5853352 - DNA, 25 bp, Homo sapien
tcgcggagtgccgtggataaattac

SEQ ID NO: 5853353 - DNA, 25 bp, Homo sapien
tcgctaacggcagggattcgatatc

SEQ ID NO: 5853354 - DNA, 25 bp, Homo sapien
cgtggtaaacgcgaccacgcctttg

SEQ ID NO: 5853355 - DNA, 25 bp, Homo sapien
tcatgaagatgcgtggcaccgatgc

SEQ ID NO: 5853356 - DNA, 25 bp, Homo sapien
catccttctggcgtgcctgaacaag

SEQ ID NO: 5853357 - DNA, 25 bp, Homo sapien
ctgttgcggccaggccagttgcaat

SEQ ID NO: 5853358 - DNA, 25 bp, Homo sapien
tggcaccgatgcctttcagcgaacg

SEQ ID NO: 5853359 - DNA, 25 bp, Homo sapien
atgttgataatgcacgccgttcagc

SEQ ID NO: 5853360 - DNA, 25 bp, Homo sapien
cgaacgtcgcagtcgctaacggcag

SEQ ID NO: 5853361 - DNA, 25 bp, Homo sapien
gcgaacgcatggcactgagcgcatc

SEQ ID NO: 5853362 - DNA, 25 bp, Homo sapien
cgaacgcgttaatattcgcgggtcg

SEQ ID NO: 5853363 - DNA, 25 bp, Homo sapien
aaggccgtcacctgcgcgtgacgtt

SEQ ID NO: 5853364 - DNA, 25 bp, Homo sapien
gggtcgcgcccttcatgaagatgcg

SEQ ID NO: 5853365 - DNA, 25 bp, Homo sapien
ctgcgagattgctccatgcaagatc

SEQ ID NO: 5853366 - DNA, 25 bp, Homo sapien
ctgcggcatccttctggcgtgcctg

SEQ ID NO: 5853367 - DNA, 25 bp, Homo sapien
tctggcgtgcctgaacaagcattgg

SEQ ID NO: 5853368 - DNA, 25 bp, Homo sapien
agatctaaggccgtcacctgcgcgt

SEQ ID NO: 5853369 - DNA, 25 bp, Homo sapien
ccctgcaccagcgtggtaaacgcga

SEQ ID NO: 5853370 - DNA, 25 bp, Homo sapien
ggtaaaaagcgattagcatgcggac

SEQ ID NO: 5853371 - DNA, 25 bp, Homo sapien
aacgatccctgcaccagcgtggtaa

SEQ ID NO: 5853372 - DNA, 25 bp, Homo sapien
ttggggcgcaccacccgatacagct

SEQ ID NO: 5853373 - DNA, 25 bp, Homo sapien
gtcacctgcgcgtgacgttcccgcc

SEQ ID NO: 5853374 - DNA, 25 bp, Homo sapien
gcggctcatccagccaggtccacaa

SEQ ID NO: 5853375 - DNA, 25 bp, Homo sapien
gcctgatgacgttcgggtaacgatc

SEQ ID NO: 5853376 - DNA, 25 bp, Homo sapien
tgcctgaacaagcattggcggcgag

SEQ ID NO: 5853377 - DNA, 25 bp, Homo sapien
cggcagggattcgatatctcccgcc

SEQ ID NO: 5853378 - DNA, 25 bp, Homo sapien
acgcctttggggcgcaccacccgat

SEQ ID NO: 5853379 - DNA, 25 bp, Homo sapien
gccagttgcaatcgctgcaactgcg

SEQ ID NO: 5853380 - DNA, 25 bp, Homo sapien
caagatcgaacgtcgcagtcgctaa

SEQ ID NO: 5853381 - DNA, 25 bp, Homo sapien
ggcgagagatctaaggccgtcacct

SEQ ID NO: 5853382 - DNA, 25 bp, Homo sapien
gatatctcccgccagataatggtct

SEQ ID NO: 5853383 - DNA, 25 bp, Homo sapien
ggccaggccagttgcaatcgctgca

SEQ ID NO: 5853384 - DNA, 25 bp, Homo sapien
aacaagcattggcggcgagagatct

SEQ ID NO: 5853385 - DNA, 25 bp, Homo sapien
agatgcgtggcaccgatgcctttca

SEQ ID NO: 5853386 - DNA, 25 bp, Homo sapien
tcgggtaacgatccctgcaccagcg

SEQ ID NO: 5853387 - DNA, 25 bp, Homo sapien
cacaacccgcgtccagtacgtgggt

SEQ ID NO: 5853388 - DNA, 25 bp, Homo sapien
tttcagcgaacgcatggcactgagc

SEQ ID NO: 5853389 - DNA, 25 bp, Homo sapien
ccaggtccacaacccgcgtccagta

SEQ ID NO: 5853390 - DNA, 25 bp, Homo sapien
gttcgatttcatctggcggtaaaaa

SEQ ID NO: 5853391 - DNA, 25 bp, Homo sapien
aatatgatgttgataatgcacgccg

SEQ ID NO: 5853392 - DNA, 25 bp, Homo sapien
tgcaatcgctgcaactgcgaacgcg

SEQ ID NO: 5853393 - DNA, 25 bp, Homo sapien
ccctgctgttgcggccaggccagtt

SEQ ID NO: 5853394 - DNA, 25 bp, Homo sapien
acccgatacagctcgcggagtgccg

SEQ ID NO: 5853395 - DNA, 25 bp, Homo sapien
tatcgcccctgctgttgcggccagg

SEQ ID NO: 5853396 - DNA, 25 bp, Homo sapien
tcgtccaccgcctgccacgcctgat

SEQ ID NO: 5853397 - DNA, 25 bp, Homo sapien
ccagtggcggctcatccagccaggt

SEQ ID NO: 5853398 - DNA, 25 bp, Homo sapien
caccagcgtggtaaacgcgaccacg

SEQ ID NO: 5853399 - DNA, 25 bp, Homo sapien
gattgctccatgcaagatcgaacgt

SEQ ID NO: 5853400 - DNA, 25 bp, Homo sapien
aattaccgcaccactgcactgcgag

SEQ ID NO: 5853401 - DNA, 25 bp, Homo sapien
ttagcatgcggacgctcgtccaccg

SEQ ID NO: 5853402 - DNA, 25 bp, Homo sapien
cgcaccactgcactgcgagattgct

SEQ ID NO: 5853403 - DNA, 25 bp, Homo sapien
agaggatatcgcccctgctgttgcg

SEQ ID NO: 5853404 - DNA, 25 bp, Homo sapien
catcaaaccacagcgtgatgggctg

SEQ ID NO: 5853405 - DNA, 25 bp, Homo sapien
gcgactgttcgatttcatctggcgg

SEQ ID NO: 5853406 - DNA, 25 bp, Homo sapien
gcatggcactgagcgcatcatcaaa

SEQ ID NO: 5853407 - DNA, 25 bp, Homo sapien
cactgagcgcatcatcaaaccacag

SEQ ID NO: 5853408 - DNA, 25 bp, Homo sapien
gtgatgggctgaatatgatgttgat

SEQ ID NO: 5853409 - DNA, 25 bp, Homo sapien
caccgcctgccacgcctgatgacgt

SEQ ID NO: 5853410 - DNA, 25 bp, Homo sapien
tacagctcgcggagtgccgtggata

SEQ ID NO: 5853411 - DNA, 25 bp, Homo sapien
tcgcagtcgctaacggcagggattc

SEQ ID NO: 5853412 - DNA, 25 bp, Homo sapien
agtgccgtggataaattaccgcacc

SEQ ID NO: 5853413 - DNA, 25 bp, Homo sapien
cgcccttcatgaagatgcgtggcac

SEQ ID NO: 5853414 - DNA, 25 bp, Homo sapien
gcgcatcatcaaaccacagcgtgat

SEQ ID NO: 5853415 - DNA, 25 bp, Homo sapien
cgcaccacccgatacagctcgcgga

SEQ ID NO: 5853416 - DNA, 25 bp, Homo sapien
actgcactgcgagattgctccatgc

SEQ ID NO: 5853417 - DNA, 25 bp, Homo sapien
tgcgcgtgacgttcccgccagtggc

SEQ ID NO: 5853418 - DNA, 25 bp, Homo sapien
ggattcgatatctcccgccagataa

SEQ ID NO: 5853419 - DNA, 25 bp, Homo sapien
tgacgttcgggtaacgatccctgca

SEQ ID NO: 5853420 - DNA, 25 bp, Homo sapien
cgctgcaactgcgaacgcgttaata

SEQ ID NO: 5853421 - DNA, 25 bp, Homo sapien
tttcatctggcggtaaaaagcgatt

SEQ ID NO: 5853422 - DNA, 25 bp, Homo sapien
cattggcggcgagagatctaaggcc

SEQ ID NO: 5853423 - DNA, 25 bp, Homo sapien
cccgcgtccagtacgtgggtgtatt

SEQ ID NO: 5853424 - DNA, 25 bp, Homo sapien
aatggtctgcggcatccttctggcg

SEQ ID NO: 5853425 - DNA, 25 bp, Homo sapien
ggctgaatatgatgttgataatgca

SEQ ID NO: 5853426 - DNA, 25 bp, Homo sapien
ccagataatggtctgcggcatcctt

SEQ ID NO: 5853427 - DNA, 25 bp, Homo sapien
gtggataaattaccgcaccactgca

SEQ ID NO: 5853428 - DNA, 25 bp, Homo sapien
ataatgcacgccgttcagcgactgt

SEQ ID NO: 5853429 - DNA, 25 bp, Homo sapien
tccatgcaagatcgaacgtcgcagt

SEQ ID NO: 5853430 - DNA, 25 bp, Homo sapien
aagcgattagcatgcggacgctcgt

SEQ ID NO: 5853431 - DNA, 25 bp, Homo sapien
agttgtgcacttttacaagccgcaa

SEQ ID NO: 5853432 - DNA, 25 bp, Homo sapien
tattaatcacgcgatgttgactgca

SEQ ID NO: 5853433 - DNA, 25 bp, Homo sapien
agattgggtaacacaggaacaactg

SEQ ID NO: 5853434 - DNA, 25 bp, Homo sapien
tgctgggagagatcccctggcttgc

SEQ ID NO: 5853435 - DNA, 25 bp, Homo sapien
cggactgactctggcgggttgggtg

SEQ ID NO: 5853436 - DNA, 25 bp, Homo sapien
cgcaacagcagcctgcagctggatt

SEQ ID NO: 5853437 - DNA, 25 bp, Homo sapien
gtggaaggtgctggcggctggttta

SEQ ID NO: 5853438 - DNA, 25 bp, Homo sapien
gaaactcggctgtattaatcacgcg

SEQ ID NO: 5853439 - DNA, 25 bp, Homo sapien
aaaccggtcgcctctggcagcgaaa

SEQ ID NO: 5853440 - DNA, 25 bp, Homo sapien
gagagatcccctggcttgcagaaaa

SEQ ID NO: 5853441 - DNA, 25 bp, Homo sapien
cgacgcgctggcgttacagcgcaac

SEQ ID NO: 5853442 - DNA, 25 bp, Homo sapien
caactgccggtgatactggtagttg

SEQ ID NO: 5853443 - DNA, 25 bp, Homo sapien
atcatcagcgcgcaagagggcagac

SEQ ID NO: 5853444 - DNA, 25 bp, Homo sapien
gacactttcacttttgcagattggg

SEQ ID NO: 5853445 - DNA, 25 bp, Homo sapien
gccggattacgcgcgcttgaacaac

SEQ ID NO: 5853446 - DNA, 25 bp, Homo sapien
aaaacgtcacgctgaatatatgacc

SEQ ID NO: 5853447 - DNA, 25 bp, Homo sapien
tcccctggcttgcagaaaatccaga

SEQ ID NO: 5853448 - DNA, 25 bp, Homo sapien
tgaatatatgaccacgctcacccgc

SEQ ID NO: 5853449 - DNA, 25 bp, Homo sapien
tcacgcgatgttgactgcacaggta

SEQ ID NO: 5853450 - DNA, 25 bp, Homo sapien
gtcgcctctggcagcgaaaagaccc

SEQ ID NO: 5853451 - DNA, 25 bp, Homo sapien
caggctaccggacggcaggttataa

SEQ ID NO: 5853452 - DNA, 25 bp, Homo sapien
tacgcaacagtaaatccttacacct

SEQ ID NO: 5853453 - DNA, 25 bp, Homo sapien
acgcctccgggaaaacgtcacgctg

SEQ ID NO: 5853454 - DNA, 25 bp, Homo sapien
tacaccttcgcagaacccacttcgc

SEQ ID NO: 5853455 - DNA, 25 bp, Homo sapien
gcgcttgaacaacaggctgactggg

SEQ ID NO: 5853456 - DNA, 25 bp, Homo sapien
ccgcacatcatcagcgcgcaagagg

SEQ ID NO: 5853457 - DNA, 25 bp, Homo sapien
gcgaacgatgttacgcctccgggaa

SEQ ID NO: 5853458 - DNA, 25 bp, Homo sapien
ttggtaatgagcgccggattacgcg

SEQ ID NO: 5853459 - DNA, 25 bp, Homo sapien
gatgttgactgcacaggtaatacaa

SEQ ID NO: 5853460 - DNA, 25 bp, Homo sapien
gctggcgttacagcgcaacagcagc

SEQ ID NO: 5853461 - DNA, 25 bp, Homo sapien
cagcgcgcaagagggcagaccgata

SEQ ID NO: 5853462 - DNA, 25 bp, Homo sapien
agcagcctgcagctggattacgcaa

SEQ ID NO: 5853463 - DNA, 25 bp, Homo sapien
gtagttggtgtgaaactcggctgta

SEQ ID NO: 5853464 - DNA, 25 bp, Homo sapien
acttcgccgcacatcatcagcgcgc

SEQ ID NO: 5853465 - DNA, 25 bp, Homo sapien
gaaggtttacgcaatagcgacgcgc

SEQ ID NO: 5853466 - DNA, 25 bp, Homo sapien
tcacccgcatgattcccgcgccgct

SEQ ID NO: 5853467 - DNA, 25 bp, Homo sapien
ttacgcgcgcttgaacaacaggctg

SEQ ID NO: 5853468 - DNA, 25 bp, Homo sapien
tggggaaaactgtcgccagttgtgc

SEQ ID NO: 5853469 - DNA, 25 bp, Homo sapien
ttcacttttgcagattgggtaacac

SEQ ID NO: 5853470 - DNA, 25 bp, Homo sapien
gtgttagtggaaggtgctggcggct

SEQ ID NO: 5853471 - DNA, 25 bp, Homo sapien
tgggtggcgaacgatgttacgcctc

SEQ ID NO: 5853472 - DNA, 25 bp, Homo sapien
acaggtaatacaacacgccggactg

SEQ ID NO: 5853473 - DNA, 25 bp, Homo sapien
ggcagaccgatagaatcattggtaa

SEQ ID NO: 5853474 - DNA, 25 bp, Homo sapien
ccggtgatactggtagttggtgtga

SEQ ID NO: 5853475 - DNA, 25 bp, Homo sapien
ccgatagaatcattggtaatgagcg

SEQ ID NO: 5853476 - DNA, 25 bp, Homo sapien
caagagggcagaccgatagaatcat

SEQ ID NO: 5853477 - DNA, 25 bp, Homo sapien
aaaactgtcgccagttgtgcacttt

SEQ ID NO: 5853478 - DNA, 25 bp, Homo sapien
tatgaccacgctcacccgcatgatt

SEQ ID NO: 5853479 - DNA, 25 bp, Homo sapien
acgccgctttctgacactttcactt

SEQ ID NO: 5853480 - DNA, 25 bp, Homo sapien
gcacttttacaagccgcaaaggcag

SEQ ID NO: 5853481 - DNA, 25 bp, Homo sapien
ggcggctggtttacgccgctttctg

SEQ ID NO: 5853482 - DNA, 25 bp, Homo sapien
tacaagccgcaaaggcagcaggcta

SEQ ID NO: 5853483 - DNA, 25 bp, Homo sapien
aatagcgacgcgctggcgttacagc

SEQ ID NO: 5853484 - DNA, 25 bp, Homo sapien
acacgccggactgactctggcgggt

SEQ ID NO: 5853485 - DNA, 25 bp, Homo sapien
caggctgactgggtgttagtggaag

SEQ ID NO: 5853486 - DNA, 25 bp, Homo sapien
tggtttacgccgctttctgacactt

SEQ ID NO: 5853487 - DNA, 25 bp, Homo sapien
gcgggttgggtggcgaacgatgtta

SEQ ID NO: 5853488 - DNA, 25 bp, Homo sapien
ctggcagcgaaaagaccccggaagg

SEQ ID NO: 5853489 - DNA, 25 bp, Homo sapien
tcacgctgaatatatgaccacgctc

SEQ ID NO: 5853490 - DNA, 25 bp, Homo sapien
ccgcaaaggcagcaggctaccggac

SEQ ID NO: 5853491 - DNA, 25 bp, Homo sapien
gaatcattggtaatgagcgccggat

SEQ ID NO: 5853492 - DNA, 25 bp, Homo sapien
gactgcacaggtaatacaacacgcc

SEQ ID NO: 5853493 - DNA, 25 bp, Homo sapien
gtcgccagttgtgcacttttacaag

SEQ ID NO: 5853494 - DNA, 25 bp, Homo sapien
actctggcgggttgggtggcgaacg

SEQ ID NO: 5853495 - DNA, 25 bp, Homo sapien
tggtgtgaaactcggctgtattaat

SEQ ID NO: 5853496 - DNA, 25 bp, Homo sapien
ttcgcagaacccacttcgccgcaca

SEQ ID NO: 5853497 - DNA, 25 bp, Homo sapien
aatacaacacgccggactgactctg

SEQ ID NO: 5853498 - DNA, 25 bp, Homo sapien
ctttctgacactttcacttttgcag

SEQ ID NO: 5853499 - DNA, 25 bp, Homo sapien
ttacagcgcaacagcagcctgcagc

SEQ ID NO: 5853500 - DNA, 25 bp, Homo sapien
cggctgtattaatcacgcgatgttg

SEQ ID NO: 5853501 - DNA, 25 bp, Homo sapien
ggtgctggcggctggtttacgccgc

SEQ ID NO: 5853502 - DNA, 25 bp, Homo sapien
ggttataaaccggtcgcctctggca

SEQ ID NO: 5853503 - DNA, 25 bp, Homo sapien
gaacaacaggctgactgggtgttag

SEQ ID NO: 5853504 - DNA, 25 bp, Homo sapien
tccgggaaaacgtcacgctgaatat

SEQ ID NO: 5853505 - DNA, 25 bp, Homo sapien
tttgcagattgggtaacacaggaac

SEQ ID NO: 5853506 - DNA, 25 bp, Homo sapien
aggcagcaggctaccggacggcagg

SEQ ID NO: 5853507 - DNA, 25 bp, Homo sapien
gaacccacttcgccgcacatcatca

SEQ ID NO: 5853508 - DNA, 25 bp, Homo sapien
ctgcagctggattacgcaacagtaa

SEQ ID NO: 5853509 - DNA, 25 bp, Homo sapien
atgagcgccggattacgcgcgcttg

SEQ ID NO: 5853510 - DNA, 25 bp, Homo sapien
cgccgctgctgggagagatcccctg

SEQ ID NO: 5853511 - DNA, 25 bp, Homo sapien
acaggaacaactgccggtgatactg

SEQ ID NO: 5853512 - DNA, 25 bp, Homo sapien
ttcccgcgccgctgctgggagagat

SEQ ID NO: 5853513 - DNA, 25 bp, Homo sapien
ggtaacacaggaacaactgccggtg

SEQ ID NO: 5853514 - DNA, 25 bp, Homo sapien
gactgggtgttagtggaaggtgctg

SEQ ID NO: 5853515 - DNA, 25 bp, Homo sapien
cacgctcacccgcatgattcccgcg

SEQ ID NO: 5853516 - DNA, 25 bp, Homo sapien
atactggtagttggtgtgaaactcg

SEQ ID NO: 5853517 - DNA, 25 bp, Homo sapien
gcatgattcccgcgccgctgctggg

SEQ ID NO: 5853518 - DNA, 25 bp, Homo sapien
ctggattacgcaacagtaaatcctt

SEQ ID NO: 5853519 - DNA, 25 bp, Homo sapien
acagtaaatccttacaccttcgcag

SEQ ID NO: 5853520 - DNA, 25 bp, Homo sapien
ttacgcaatagcgacgcgctggcgt

SEQ ID NO: 5853521 - DNA, 25 bp, Homo sapien
aatccttacaccttcgcagaaccca

SEQ ID NO: 5853522 - DNA, 25 bp, Homo sapien
taaggatttactgttgcgtaatcca

SEQ ID NO: 5853523 - DNA, 25 bp, Homo sapien
cgcgtgattaatacagccgagtttc

SEQ ID NO: 5853524 - DNA, 25 bp, Homo sapien
ctgcctttgcggcttgtaaaagtgc

SEQ ID NO: 5853525 - DNA, 25 bp, Homo sapien
caggggatctctcccagcagcggcg

SEQ ID NO: 5853526 - DNA, 25 bp, Homo sapien
cactaacacccagtcagcctgttgt

SEQ ID NO: 5853527 - DNA, 25 bp, Homo sapien
gtaatccggcgctcattaccaatga

SEQ ID NO: 5853528 - DNA, 25 bp, Homo sapien
tgagcgtggtcatatattcagcgtg

SEQ ID NO: 5853529 - DNA, 25 bp, Homo sapien
cagagtcagtccggcgtgttgtatt

SEQ ID NO: 5853530 - DNA, 25 bp, Homo sapien
attctatcggtctgccctcttgcgc

SEQ ID NO: 5853531 - DNA, 25 bp, Homo sapien
cggcgctcattaccaatgattctat

SEQ ID NO: 5853532 - DNA, 25 bp, Homo sapien
aaaagtgcacaactggcgacagttt

SEQ ID NO: 5853533 - DNA, 25 bp, Homo sapien
tgcagtcaacatcgcgtgattaata

SEQ ID NO: 5853534 - DNA, 25 bp, Homo sapien
gttcgccacccaacccgccagagtc

SEQ ID NO: 5853535 - DNA, 25 bp, Homo sapien
gaaggtgtaaggatttactgttgcg

SEQ ID NO: 5853536 - DNA, 25 bp, Homo sapien
agcctgctgcctttgcggcttgtaa

SEQ ID NO: 5853537 - DNA, 25 bp, Homo sapien
tcaccggcagttgttcctgtgttac

SEQ ID NO: 5853538 - DNA, 25 bp, Homo sapien
taaaccagccgccagcaccttccac

SEQ ID NO: 5853539 - DNA, 25 bp, Homo sapien
cacccaacccgccagagtcagtccg

SEQ ID NO: 5853540 - DNA, 25 bp, Homo sapien
tgatgtgcggcgaagtgggttctgc

SEQ ID NO: 5853541 - DNA, 25 bp, Homo sapien
tacctgtgcagtcaacatcgcgtga

SEQ ID NO: 5853542 - DNA, 25 bp, Homo sapien
gccagcaccttccactaacacccag

SEQ ID NO: 5853543 - DNA, 25 bp, Homo sapien
gttcctgtgttacccaatctgcaaa

SEQ ID NO: 5853544 - DNA, 25 bp, Homo sapien
tgttgcgtaatccagctgcaggctg

SEQ ID NO: 5853545 - DNA, 25 bp, Homo sapien
aggcgtaacatcgttcgccacccaa

SEQ ID NO: 5853546 - DNA, 25 bp, Homo sapien
cttgcgcgctgatgatgtgcggcga

SEQ ID NO: 5853547 - DNA, 25 bp, Homo sapien
ctggcgacagttttccccacttcgg

SEQ ID NO: 5853548 - DNA, 25 bp, Homo sapien
tgccgtccggtagcctgctgccttt

SEQ ID NO: 5853549 - DNA, 25 bp, Homo sapien
cagctgcaggctgctgttgcgctgt

SEQ ID NO: 5853550 - DNA, 25 bp, Homo sapien
acccgccagagtcagtccggcgtgt

SEQ ID NO: 5853551 - DNA, 25 bp, Homo sapien
attaatacagccgagtttcacacca

SEQ ID NO: 5853552 - DNA, 25 bp, Homo sapien
tccggtagcctgctgcctttgcggc

SEQ ID NO: 5853553 - DNA, 25 bp, Homo sapien
accttccactaacacccagtcagcc

SEQ ID NO: 5853554 - DNA, 25 bp, Homo sapien
taacgccagcgcgtcgctattgcgt

SEQ ID NO: 5853555 - DNA, 25 bp, Homo sapien
tcattaccaatgattctatcggtct

SEQ ID NO: 5853556 - DNA, 25 bp, Homo sapien
cggcgaagtgggttctgcgaaggtg

SEQ ID NO: 5853557 - DNA, 25 bp, Homo sapien
cagaggcgaccggtttataacctgc

SEQ ID NO: 5853558 - DNA, 25 bp, Homo sapien
cagcggcgcgggaatcatgcgggtg

SEQ ID NO: 5853559 - DNA, 25 bp, Homo sapien
aatcatgcgggtgagcgtggtcata

SEQ ID NO: 5853560 - DNA, 25 bp, Homo sapien
tttctgcaagccaggggatctctcc

SEQ ID NO: 5853561 - DNA, 25 bp, Homo sapien
gtaatccagctgcaggctgctgttg

SEQ ID NO: 5853562 - DNA, 25 bp, Homo sapien
cttttcgctgccagaggcgaccggt

SEQ ID NO: 5853563 - DNA, 25 bp, Homo sapien
ccagcgcgtcgctattgcgtaaacc

SEQ ID NO: 5853564 - DNA, 25 bp, Homo sapien
tgcgggtgagcgtggtcatatattc

SEQ ID NO: 5853565 - DNA, 25 bp, Homo sapien
gatctctcccagcagcggcgcggga

SEQ ID NO: 5853566 - DNA, 25 bp, Homo sapien
ccaatgattctatcggtctgccctc

SEQ ID NO: 5853567 - DNA, 25 bp, Homo sapien
tcagaaagcggcgtaaaccagccgc

SEQ ID NO: 5853568 - DNA, 25 bp, Homo sapien
gtgttacccaatctgcaaaagtgaa

SEQ ID NO: 5853569 - DNA, 25 bp, Homo sapien
agcgcgcgtaatccggcgctcatta

SEQ ID NO: 5853570 - DNA, 25 bp, Homo sapien
gcagttgttcctgtgttacccaatc

SEQ ID NO: 5853571 - DNA, 25 bp, Homo sapien
cacccagtcagcctgttgttcaagc

SEQ ID NO: 5853572 - DNA, 25 bp, Homo sapien
gctgttgcgctgtaacgccagcgcg

SEQ ID NO: 5853573 - DNA, 25 bp, Homo sapien
aagtgtcagaaagcggcgtaaacca

SEQ ID NO: 5853574 - DNA, 25 bp, Homo sapien
tggtcatatattcagcgtgacgttt

SEQ ID NO: 5853575 - DNA, 25 bp, Homo sapien
gagtttcacaccaactaccagtatc

SEQ ID NO: 5853576 - DNA, 25 bp, Homo sapien
gctgccagaggcgaccggtttataa

SEQ ID NO: 5853577 - DNA, 25 bp, Homo sapien
ttgtattacctgtgcagtcaacatc

SEQ ID NO: 5853578 - DNA, 25 bp, Homo sapien
ccagccgccagcaccttccactaac

SEQ ID NO: 5853579 - DNA, 25 bp, Homo sapien
ttctgcgaaggtgtaaggatttact

SEQ ID NO: 5853580 - DNA, 25 bp, Homo sapien
agtgggttctgcgaaggtgtaagga

SEQ ID NO: 5853581 - DNA, 25 bp, Homo sapien
gcgctgtaacgccagcgcgtcgcta

SEQ ID NO: 5853582 - DNA, 25 bp, Homo sapien
tcggtctgccctcttgcgcgctgat

SEQ ID NO: 5853583 - DNA, 25 bp, Homo sapien
agtcagcctgttgttcaagcgcgcg

SEQ ID NO: 5853584 - DNA, 25 bp, Homo sapien
cttccggggtcttttcgctgccaga

SEQ ID NO: 5853585 - DNA, 25 bp, Homo sapien
tttactgttgcgtaatccagctgca

SEQ ID NO: 5853586 - DNA, 25 bp, Homo sapien
cagcgtgacgttttcccggaggcgt

SEQ ID NO: 5853587 - DNA, 25 bp, Homo sapien
gcacaactggcgacagttttcccca

SEQ ID NO: 5853588 - DNA, 25 bp, Homo sapien
cccaatctgcaaaagtgaaagtgtc

SEQ ID NO: 5853589 - DNA, 25 bp, Homo sapien
aagcggcgtaaaccagccgccagca

SEQ ID NO: 5853590 - DNA, 25 bp, Homo sapien
cacaccaactaccagtatcaccggc

SEQ ID NO: 5853591 - DNA, 25 bp, Homo sapien
cgctgatgatgtgcggcgaagtggg

SEQ ID NO: 5853592 - DNA, 25 bp, Homo sapien
tcccggaggcgtaacatcgttcgcc

SEQ ID NO: 5853593 - DNA, 25 bp, Homo sapien
aagtgaaagtgtcagaaagcggcgt

SEQ ID NO: 5853594 - DNA, 25 bp, Homo sapien
tgccctcttgcgcgctgatgatgtg

SEQ ID NO: 5853595 - DNA, 25 bp, Homo sapien
cagtatcaccggcagttgttcctgt

SEQ ID NO: 5853596 - DNA, 25 bp, Homo sapien
caggctgctgttgcgctgtaacgcc

SEQ ID NO: 5853597 - DNA, 25 bp, Homo sapien
tacagccgagtttcacaccaactac

SEQ ID NO: 5853598 - DNA, 25 bp, Homo sapien
ataacctgccgtccggtagcctgct

SEQ ID NO: 5853599 - DNA, 25 bp, Homo sapien
cctgttgttcaagcgcgcgtaatcc

SEQ ID NO: 5853600 - DNA, 25 bp, Homo sapien
caacatcgcgtgattaatacagccg

SEQ ID NO: 5853601 - DNA, 25 bp, Homo sapien
aactaccagtatcaccggcagttgt

SEQ ID NO: 5853602 - DNA, 25 bp, Homo sapien
gttcaagcgcgcgtaatccggcgct

SEQ ID NO: 5853603 - DNA, 25 bp, Homo sapien
ggcgtgttgtattacctgtgcagtc

SEQ ID NO: 5853604 - DNA, 25 bp, Homo sapien
gcttgtaaaagtgcacaactggcga

SEQ ID NO: 5853605 - DNA, 25 bp, Homo sapien
cgtcgctattgcgtaaaccttccgg

SEQ ID NO: 5853606 - DNA, 25 bp, Homo sapien
tcccagcagcggcgcgggaatcatg

SEQ ID NO: 5853607 - DNA, 25 bp, Homo sapien
tttgcggcttgtaaaagtgcacaac

SEQ ID NO: 5853608 - DNA, 25 bp, Homo sapien
gcaagccaggggatctctcccagca

SEQ ID NO: 5853609 - DNA, 25 bp, Homo sapien
cgcgggaatcatgcgggtgagcgtg

SEQ ID NO: 5853610 - DNA, 25 bp, Homo sapien
tatattcagcgtgacgttttcccgg

SEQ ID NO: 5853611 - DNA, 25 bp, Homo sapien
cagtccggcgtgttgtattacctgt

SEQ ID NO: 5853612 - DNA, 25 bp, Homo sapien
gggtcttttcgctgccagaggcgac

SEQ ID NO: 5853613 - DNA, 25 bp, Homo sapien
ctgcaaaagtgaaagtgtcagaaag

SEQ ID NO: 5853614 - DNA, 25 bp, Homo sapien
agctaaacatgcttcatcgtcggtc

SEQ ID NO: 5853615 - DNA, 25 bp, Homo sapien
atagcgatcgctgccaggatatacg

SEQ ID NO: 5853616 - DNA, 25 bp, Homo sapien
ttgatgccggtgaacgtgcaaaaca

SEQ ID NO: 5853617 - DNA, 25 bp, Homo sapien
aaactatccagcaacatttgggcca

SEQ ID NO: 5853618 - DNA, 25 bp, Homo sapien
gatgttcgcgattatcttctatatc

SEQ ID NO: 5853619 - DNA, 25 bp, Homo sapien
aagaacctgatggacatgttcaggg

SEQ ID NO: 5853620 - DNA, 25 bp, Homo sapien
cgctggttagcaccgcaggtgtaga

SEQ ID NO: 5853621 - DNA, 25 bp, Homo sapien
acgtatagccgaaattgccaggatc

SEQ ID NO: 5853622 - DNA, 25 bp, Homo sapien
caatgctgtttcactggttatgcgg

SEQ ID NO: 5853623 - DNA, 25 bp, Homo sapien
taacaccctgttacgtatagccgaa

SEQ ID NO: 5853624 - DNA, 25 bp, Homo sapien
acatgcttcatcgtcggtccgggct

SEQ ID NO: 5853625 - DNA, 25 bp, Homo sapien
tggggattgcttataacaccctgtt

SEQ ID NO: 5853626 - DNA, 25 bp, Homo sapien
ttgcttataacaccctgttacgtat

SEQ ID NO: 5853627 - DNA, 25 bp, Homo sapien
cgcactgatttcgaccaggttcgtt

SEQ ID NO: 5853628 - DNA, 25 bp, Homo sapien
tatgcggcggatccgaaaagaaaac

SEQ ID NO: 5853629 - DNA, 25 bp, Homo sapien
tgcaagttgaataaccggaaatggt

SEQ ID NO: 5853630 - DNA, 25 bp, Homo sapien
actggttatgcggcggatccgaaaa

SEQ ID NO: 5853631 - DNA, 25 bp, Homo sapien
catttctggggattgcttataacac

SEQ ID NO: 5853632 - DNA, 25 bp, Homo sapien
gtccgtttgccggtcgtgggcggca

SEQ ID NO: 5853633 - DNA, 25 bp, Homo sapien
cactcatggaaaatagcgatcgctg

SEQ ID NO: 5853634 - DNA, 25 bp, Homo sapien
cggatccgaaaagaaaacgttgatg

SEQ ID NO: 5853635 - DNA, 25 bp, Homo sapien
caggatcagggttaaagatatctca

SEQ ID NO: 5853636 - DNA, 25 bp, Homo sapien
atatacgtaatctggcatttctggg

SEQ ID NO: 5853637 - DNA, 25 bp, Homo sapien
tatatcttcaggcgcgcggtctggc

SEQ ID NO: 5853638 - DNA, 25 bp, Homo sapien
cgaaaacgctggttagcaccgcagg

SEQ ID NO: 5853639 - DNA, 25 bp, Homo sapien
tgggccagctaaacatgcttcatcg

SEQ ID NO: 5853640 - DNA, 25 bp, Homo sapien
tgacagcaatgctgtttcactggtt

SEQ ID NO: 5853641 - DNA, 25 bp, Homo sapien
tgggagaatgttaatccatattggc

SEQ ID NO: 5853642 - DNA, 25 bp, Homo sapien
cgcgcggtctggcagtaaaaactat

SEQ ID NO: 5853643 - DNA, 25 bp, Homo sapien
aattgccaggatcagggttaaagat

SEQ ID NO: 5853644 - DNA, 25 bp, Homo sapien
gatgcaacgagtgatgaggttcgca

SEQ ID NO: 5853645 - DNA, 25 bp, Homo sapien
ctagcgttcgaacgcactgatttcg

SEQ ID NO: 5853646 - DNA, 25 bp, Homo sapien
ggtcgtgggcggcatggtgcaagtt

SEQ ID NO: 5853647 - DNA, 25 bp, Homo sapien
gcttctgtccgtttgccggtcgtgg

SEQ ID NO: 5853648 - DNA, 25 bp, Homo sapien
gcgattatcttctatatcttcaggc

SEQ ID NO: 5853649 - DNA, 25 bp, Homo sapien
cctgttacgtatagccgaaattgcc

SEQ ID NO: 5853650 - DNA, 25 bp, Homo sapien
aatccatattggcagaacgaaaacg

SEQ ID NO: 5853651 - DNA, 25 bp, Homo sapien
tgcattaccggtcgatgcaacgagt

SEQ ID NO: 5853652 - DNA, 25 bp, Homo sapien
accggtcgatgcaacgagtgatgag

SEQ ID NO: 5853653 - DNA, 25 bp, Homo sapien
gatgaggttcgcaagaacctgatgg

SEQ ID NO: 5853654 - DNA, 25 bp, Homo sapien
taaagatatctcacgtactgacggt

SEQ ID NO: 5853655 - DNA, 25 bp, Homo sapien
tttgccggtcgtgggcggcatggtg

SEQ ID NO: 5853656 - DNA, 25 bp, Homo sapien
aacgtgcaaaacaggctctagcgtt

SEQ ID NO: 5853657 - DNA, 25 bp, Homo sapien
tgacggtgggagaatgttaatccat

SEQ ID NO: 5853658 - DNA, 25 bp, Homo sapien
tgtttcactggttatgcggcggatc

SEQ ID NO: 5853659 - DNA, 25 bp, Homo sapien
ttcatcgtcggtccgggctgccacg

SEQ ID NO: 5853660 - DNA, 25 bp, Homo sapien
ttcgttcactcatggaaaatagcga

SEQ ID NO: 5853661 - DNA, 25 bp, Homo sapien
aatgttaatccatattggcagaacg

SEQ ID NO: 5853662 - DNA, 25 bp, Homo sapien
tatctcacgtactgacggtgggaga

SEQ ID NO: 5853663 - DNA, 25 bp, Homo sapien
gaccaggttcgttcactcatggaaa

SEQ ID NO: 5853664 - DNA, 25 bp, Homo sapien
caaaacaggctctagcgttcgaacg

SEQ ID NO: 5853665 - DNA, 25 bp, Homo sapien
atattggcagaacgaaaacgctggt

SEQ ID NO: 5853666 - DNA, 25 bp, Homo sapien
agccgaaattgccaggatcagggtt

SEQ ID NO: 5853667 - DNA, 25 bp, Homo sapien
ctgatggacatgttcagggatcgcc

SEQ ID NO: 5853668 - DNA, 25 bp, Homo sapien
ttcagggatcgccaggcgttttctg

SEQ ID NO: 5853669 - DNA, 25 bp, Homo sapien
cagggttaaagatatctcacgtact

SEQ ID NO: 5853670 - DNA, 25 bp, Homo sapien
gttcgcaagaacctgatggacatgt

SEQ ID NO: 5853671 - DNA, 25 bp, Homo sapien
cgaaaagaaaacgttgatgccggtg

SEQ ID NO: 5853672 - DNA, 25 bp, Homo sapien
tgagcatacctggaaaatgcttctg

SEQ ID NO: 5853673 - DNA, 25 bp, Homo sapien
ttgcctgcattaccggtcgatgcaa

SEQ ID NO: 5853674 - DNA, 25 bp, Homo sapien
acgagtgatgaggttcgcaagaacc

SEQ ID NO: 5853675 - DNA, 25 bp, Homo sapien
ttcaggcgcgcggtctggcagtaaa

SEQ ID NO: 5853676 - DNA, 25 bp, Homo sapien
gaaaacgttgatgccggtgaacgtg

SEQ ID NO: 5853677 - DNA, 25 bp, Homo sapien
aaatggtttcccgcagaacctgaag

SEQ ID NO: 5853678 - DNA, 25 bp, Homo sapien
cgggctgccacgaccaagtgacagc

SEQ ID NO: 5853679 - DNA, 25 bp, Homo sapien
accaagtgacagcaatgctgtttca

SEQ ID NO: 5853680 - DNA, 25 bp, Homo sapien
gccaggatatacgtaatctggcatt

SEQ ID NO: 5853681 - DNA, 25 bp, Homo sapien
tcggtccgggctgccacgaccaagt

SEQ ID NO: 5853682 - DNA, 25 bp, Homo sapien
tggaaaatagcgatcgctgccagga

SEQ ID NO: 5853683 - DNA, 25 bp, Homo sapien
cagtaaaaactatccagcaacattt

SEQ ID NO: 5853684 - DNA, 25 bp, Homo sapien
ggatcgccaggcgttttctgagcat

SEQ ID NO: 5853685 - DNA, 25 bp, Homo sapien
acgtactgacggtgggagaatgtta

SEQ ID NO: 5853686 - DNA, 25 bp, Homo sapien
gttttctgagcatacctggaaaatg

SEQ ID NO: 5853687 - DNA, 25 bp, Homo sapien
ccggtgaacgtgcaaaacaggctct

SEQ ID NO: 5853688 - DNA, 25 bp, Homo sapien
gatttcgaccaggttcgttcactca

SEQ ID NO: 5853689 - DNA, 25 bp, Homo sapien
tccagcaacatttgggccagctaaa

SEQ ID NO: 5853690 - DNA, 25 bp, Homo sapien
atcttctatatcttcaggcgcgcgg

SEQ ID NO: 5853691 - DNA, 25 bp, Homo sapien
atcgctgccaggatatacgtaatct

SEQ ID NO: 5853692 - DNA, 25 bp, Homo sapien
caggctctagcgttcgaacgcactg

SEQ ID NO: 5853693 - DNA, 25 bp, Homo sapien
ttcgaacgcactgatttcgaccagg

SEQ ID NO: 5853694 - DNA, 25 bp, Homo sapien
gaaaatgcttctgtccgtttgccgg

SEQ ID NO: 5853695 - DNA, 25 bp, Homo sapien
aacatttgggccagctaaacatgct

SEQ ID NO: 5853696 - DNA, 25 bp, Homo sapien
ccaggcgttttctgagcatacctgg

SEQ ID NO: 5853697 - DNA, 25 bp, Homo sapien
gcagaacctgaagatgttcgcgatt

SEQ ID NO: 5853698 - DNA, 25 bp, Homo sapien
gccacgaccaagtgacagcaatgct

SEQ ID NO: 5853699 - DNA, 25 bp, Homo sapien
tgggcggcatggtgcaagttgaata

SEQ ID NO: 5853700 - DNA, 25 bp, Homo sapien
gtctggcagtaaaaactatccagca

SEQ ID NO: 5853701 - DNA, 25 bp, Homo sapien
tttcccgcagaacctgaagatgttc

SEQ ID NO: 5853702 - DNA, 25 bp, Homo sapien
gcatggtgcaagttgaataaccgga

SEQ ID NO: 5853703 - DNA, 25 bp, Homo sapien
gcagaacgaaaacgctggttagcac

SEQ ID NO: 5853704 - DNA, 25 bp, Homo sapien
tacctggaaaatgcttctgtccgtt

SEQ ID NO: 5853705 - DNA, 25 bp, Homo sapien
gacatgttcagggatcgccaggcgt

SEQ ID NO: 5853706 - DNA, 25 bp, Homo sapien
cctgaagatgttcgcgattatcttc

SEQ ID NO: 5853707 - DNA, 25 bp, Homo sapien
ctatacgtaacagggtgttataagc

SEQ ID NO: 5853708 - DNA, 25 bp, Homo sapien
ctgacccggcaaaacaggtagttat

SEQ ID NO: 5853709 - DNA, 25 bp, Homo sapien
acccccaggctaagtgccttctcta

SEQ ID NO: 5853710 - DNA, 25 bp, Homo sapien
taacattctcccaccgtcagtacgt

SEQ ID NO: 5853711 - DNA, 25 bp, Homo sapien
gtttcactatccaggttacggatat

SEQ ID NO: 5853712 - DNA, 25 bp, Homo sapien
ttcggctatacgtaacagggtgtta

SEQ ID NO: 5853713 - DNA, 25 bp, Homo sapien
cggtgctaaccagcgttttcgttct

SEQ ID NO: 5853714 - DNA, 25 bp, Homo sapien
gtgtccagaccaggccaggtatctc

SEQ ID NO: 5853715 - DNA, 25 bp, Homo sapien
ccagcgcgggccatatctcgcgcgg

SEQ ID NO: 5853716 - DNA, 25 bp, Homo sapien
caatccccagaaatgccagattacg

SEQ ID NO: 5853717 - DNA, 25 bp, Homo sapien
taacagggtgttataagcaatcccc

SEQ ID NO: 5853718 - DNA, 25 bp, Homo sapien
atgatctccggtattgaaactccag

SEQ ID NO: 5853719 - DNA, 25 bp, Homo sapien
cattggtccagccaccagcttgcat

SEQ ID NO: 5853720 - DNA, 25 bp, Homo sapien
caggtagttattcggatcatcagct

SEQ ID NO: 5853721 - DNA, 25 bp, Homo sapien
tgagtgaacgaacctggtcgaaatc

SEQ ID NO: 5853722 - DNA, 25 bp, Homo sapien
accgtcagtacgtgagatatcttta

SEQ ID NO: 5853723 - DNA, 25 bp, Homo sapien
gagacggaaatccatcgctcgacca

SEQ ID NO: 5853724 - DNA, 25 bp, Homo sapien
cattttttctgacccggcaaaacag

SEQ ID NO: 5853725 - DNA, 25 bp, Homo sapien
ggttacggatatagttcatgacaat

SEQ ID NO: 5853726 - DNA, 25 bp, Homo sapien
cctggcagcgatcgctattttccat

SEQ ID NO: 5853727 - DNA, 25 bp, Homo sapien
ggatatagttcatgacaatatttac

SEQ ID NO: 5853728 - DNA, 25 bp, Homo sapien
gattacgtatatcctggcagcgatc

SEQ ID NO: 5853729 - DNA, 25 bp, Homo sapien
tatttacattggtccagccaccagc

SEQ ID NO: 5853730 - DNA, 25 bp, Homo sapien
agtgccttctctacacctgcggtgc

SEQ ID NO: 5853731 - DNA, 25 bp, Homo sapien
ggctccgacacgggcactgtgtcca

SEQ ID NO: 5853732 - DNA, 25 bp, Homo sapien
cgctattttccatgagtgaacgaac

SEQ ID NO: 5853733 - DNA, 25 bp, Homo sapien
ttattcggatcatcagctacaccag

SEQ ID NO: 5853734 - DNA, 25 bp, Homo sapien
aaccctgatcctggcaatttcggct

SEQ ID NO: 5853735 - DNA, 25 bp, Homo sapien
cacctgcggtgctaaccagcgtttt

SEQ ID NO: 5853736 - DNA, 25 bp, Homo sapien
ctggtggcagatggcgcggcaacac

SEQ ID NO: 5853737 - DNA, 25 bp, Homo sapien
atctttaaccctgatcctggcaatt

SEQ ID NO: 5853738 - DNA, 25 bp, Homo sapien
atgccagattacgtatatcctggca

SEQ ID NO: 5853739 - DNA, 25 bp, Homo sapien
ttctctacacctgcggtgctaacca

SEQ ID NO: 5853740 - DNA, 25 bp, Homo sapien
gcccctgtttcactatccaggttac

SEQ ID NO: 5853741 - DNA, 25 bp, Homo sapien
tcagctacaccagagacggaaatcc

SEQ ID NO: 5853742 - DNA, 25 bp, Homo sapien
gaccaggccaggtatctctgaccag

SEQ ID NO: 5853743 - DNA, 25 bp, Homo sapien
cgggccatatctcgcgcggctccga

SEQ ID NO: 5853744 - DNA, 25 bp, Homo sapien
caacaccattttttctgacccggca

SEQ ID NO: 5853745 - DNA, 25 bp, Homo sapien
tttccatgagtgaacgaacctggtc

SEQ ID NO: 5853746 - DNA, 25 bp, Homo sapien
tgaccagagtcatccttagcgccgt

SEQ ID NO: 5853747 - DNA, 25 bp, Homo sapien
aggctaagtgccttctctacacctg

SEQ ID NO: 5853748 - DNA, 25 bp, Homo sapien
gagttgatagctggctggtggcaga

SEQ ID NO: 5853749 - DNA, 25 bp, Homo sapien
gccaggtatctctgaccagagtcat

SEQ ID NO: 5853750 - DNA, 25 bp, Homo sapien
tctcccaccgtcagtacgtgagata

SEQ ID NO: 5853751 - DNA, 25 bp, Homo sapien
agcgatcgctattttccatgagtga

SEQ ID NO: 5853752 - DNA, 25 bp, Homo sapien
acaccagagacggaaatccatcgct

SEQ ID NO: 5853753 - DNA, 25 bp, Homo sapien
gatcctggcaatttcggctatacgt

SEQ ID NO: 5853754 - DNA, 25 bp, Homo sapien
gagttgcttcaaaaatcccttccag

SEQ ID NO: 5853755 - DNA, 25 bp, Homo sapien
gagtcatccttagcgccgtaaatca

SEQ ID NO: 5853756 - DNA, 25 bp, Homo sapien
gccaatatggattaacattctccca

SEQ ID NO: 5853757 - DNA, 25 bp, Homo sapien
cgaaatcagtgcgttcgaacgctag

SEQ ID NO: 5853758 - DNA, 25 bp, Homo sapien
gtccagccaccagcttgcatgatct

SEQ ID NO: 5853759 - DNA, 25 bp, Homo sapien
cttccagggcgcgagttgatagctg

SEQ ID NO: 5853760 - DNA, 25 bp, Homo sapien
cgccgtaaatcaatcgatgagttgc

SEQ ID NO: 5853761 - DNA, 25 bp, Homo sapien
ggatcatcagctacaccagagacgg

SEQ ID NO: 5853762 - DNA, 25 bp, Homo sapien
cttcaaaaatcccttccagggcgcg

SEQ ID NO: 5853763 - DNA, 25 bp, Homo sapien
cagatggcgcggcaacaccattttt

SEQ ID NO: 5853764 - DNA, 25 bp, Homo sapien
gcttgcatgatctccggtattgaaa

SEQ ID NO: 5853765 - DNA, 25 bp, Homo sapien
atcgatgagttgcttcaaaaatccc

SEQ ID NO: 5853766 - DNA, 25 bp, Homo sapien
atggattaacattctcccaccgtca

SEQ ID NO: 5853767 - DNA, 25 bp, Homo sapien
ggcactgtgtccagaccaggccagg

SEQ ID NO: 5853768 - DNA, 25 bp, Homo sapien
gaaatccatcgctcgaccagtttag

SEQ ID NO: 5853769 - DNA, 25 bp, Homo sapien
gggcgcgagttgatagctggctggt

SEQ ID NO: 5853770 - DNA, 25 bp, Homo sapien
agtacgtgagatatctttaaccctg

SEQ ID NO: 5853771 - DNA, 25 bp, Homo sapien
agttcatgacaatatttacattggt

SEQ ID NO: 5853772 - DNA, 25 bp, Homo sapien
aaccagcgttttcgttctgccaata

SEQ ID NO: 5853773 - DNA, 25 bp, Homo sapien
cctggtcgaaatcagtgcgttcgaa

SEQ ID NO: 5853774 - DNA, 25 bp, Homo sapien
ccttagcgccgtaaatcaatcgatg

SEQ ID NO: 5853775 - DNA, 25 bp, Homo sapien
aacgaacctggtcgaaatcagtgcg

SEQ ID NO: 5853776 - DNA, 25 bp, Homo sapien
tagctggctggtggcagatggcgcg

SEQ ID NO: 5853777 - DNA, 25 bp, Homo sapien
cgttttcgttctgccaatatggatt

SEQ ID NO: 5853778 - DNA, 25 bp, Homo sapien
tcgcgcggctccgacacgggcactg

SEQ ID NO: 5853779 - DNA, 25 bp, Homo sapien
ggcaatttcggctatacgtaacagg

SEQ ID NO: 5853780 - DNA, 25 bp, Homo sapien
cgttctgccaatatggattaacatt

SEQ ID NO: 5853781 - DNA, 25 bp, Homo sapien
ctatccaggttacggatatagttca

SEQ ID NO: 5853782 - DNA, 25 bp, Homo sapien
ccagaaatgccagattacgtatatc

SEQ ID NO: 5853783 - DNA, 25 bp, Homo sapien
ccaccagcttgcatgatctccggta

SEQ ID NO: 5853784 - DNA, 25 bp, Homo sapien
catcgctcgaccagtttagttaccc

SEQ ID NO: 5853785 - DNA, 25 bp, Homo sapien
gtatatcctggcagcgatcgctatt

SEQ ID NO: 5853786 - DNA, 25 bp, Homo sapien
gacacgggcactgtgtccagaccag

SEQ ID NO: 5853787 - DNA, 25 bp, Homo sapien
atatctcgcgcggctccgacacggg

SEQ ID NO: 5853788 - DNA, 25 bp, Homo sapien
attgaaactccagcgcgggccatat

SEQ ID NO: 5853789 - DNA, 25 bp, Homo sapien
tatctctgaccagagtcatccttag

SEQ ID NO: 5853790 - DNA, 25 bp, Homo sapien
gcaaaacaggtagttattcggatca

SEQ ID NO: 5853791 - DNA, 25 bp, Homo sapien
tgacaatatttacattggtccagcc

SEQ ID NO: 5853792 - DNA, 25 bp, Homo sapien
tccggtattgaaactccagcgcggg

SEQ ID NO: 5853793 - DNA, 25 bp, Homo sapien
tgagatatctttaaccctgatcctg

SEQ ID NO: 5853794 - DNA, 25 bp, Homo sapien
ataagcaatccccagaaatgccaga

SEQ ID NO: 5853795 - DNA, 25 bp, Homo sapien
gcgcggcaacaccattttttctgac

SEQ ID NO: 5853796 - DNA, 25 bp, Homo sapien
aaatcccttccagggcgcgagttga

SEQ ID NO: 5853797 - DNA, 25 bp, Homo sapien
aaatcaatcgatgagttgcttcaaa

SEQ ID NO: 5853798 - DNA, 25 bp, Homo sapien
ggtgttataagcaatccccagaaat

SEQ ID NO: 5853799 - DNA, 25 bp, Homo sapien
aagaattcagctaacgcttccagac

SEQ ID NO: 5853800 - DNA, 25 bp, Homo sapien
aagaattcagctaacgcttccagac

SEQ ID NO: 5853801 - DNA, 25 bp, Homo sapien
atctcggatacaatagaggcaaaga

SEQ ID NO: 5853802 - DNA, 25 bp, Homo sapien
atctcggatacaatagaggcaaaga

SEQ ID NO: 5853803 - DNA, 25 bp, Homo sapien
tcatcagccggattttgttattgat

SEQ ID NO: 5853804 - DNA, 25 bp, Homo sapien
tcatcagccggattttgttattgat

SEQ ID NO: 5853805 - DNA, 25 bp, Homo sapien
tatcccgtcaaaggattccgtttct

SEQ ID NO: 5853806 - DNA, 25 bp, Homo sapien
tatcccgtcaaaggattccgtttct

SEQ ID NO: 5853807 - DNA, 25 bp, Homo sapien
gatttgacagaagcggaactctctt

SEQ ID NO: 5853808 - DNA, 25 bp, Homo sapien
gatttgacagaagcggaactctctt

SEQ ID NO: 5853809 - DNA, 25 bp, Homo sapien
gaagcgatcttttccgccggaatcc

SEQ ID NO: 5853810 - DNA, 25 bp, Homo sapien
ttccggcgcataaagtcagcaaggt

SEQ ID NO: 5853811 - DNA, 25 bp, Homo sapien
ttccggcgcataaagtcagcaaggt

SEQ ID NO: 5853812 - DNA, 25 bp, Homo sapien
gaagcgatcttttccgccggaatcc

SEQ ID NO: 5853813 - DNA, 25 bp, Homo sapien
gctgaagcagcccgcatattaggcg

SEQ ID NO: 5853814 - DNA, 25 bp, Homo sapien
caattcggtcaattgtcactgtcat

SEQ ID NO: 5853815 - DNA, 25 bp, Homo sapien
gtacggtcagtttgcgtaaagaaga

SEQ ID NO: 5853816 - DNA, 25 bp, Homo sapien
gtacggtcagtttgcgtaaagaaga

SEQ ID NO: 5853817 - DNA, 25 bp, Homo sapien
gctgaagcagcccgcatattaggcg

SEQ ID NO: 5853818 - DNA, 25 bp, Homo sapien
caattcggtcaattgtcactgtcat

SEQ ID NO: 5853819 - DNA, 25 bp, Homo sapien
ttcatcagccggattttgttattga

SEQ ID NO: 5853820 - DNA, 25 bp, Homo sapien
ttcatcagccggattttgttattga

SEQ ID NO: 5853821 - DNA, 25 bp, Homo sapien
tcaataacaaaatccggctgatgaa

SEQ ID NO: 5853822 - DNA, 25 bp, Homo sapien
tcaataacaaaatccggctgatgaa

SEQ ID NO: 5853823 - DNA, 25 bp, Homo sapien
gtctggaagcgttagctgaattctt

SEQ ID NO: 5853824 - DNA, 25 bp, Homo sapien
gtctggaagcgttagctgaattctt

SEQ ID NO: 5853825 - DNA, 25 bp, Homo sapien
cgcctaatatgcgggctgcttcagc

SEQ ID NO: 5853826 - DNA, 25 bp, Homo sapien
cgcctaatatgcgggctgcttcagc

SEQ ID NO: 5853827 - DNA, 25 bp, Homo sapien
aagagagttccgcttctgtcaaatc

SEQ ID NO: 5853828 - DNA, 25 bp, Homo sapien
aagagagttccgcttctgtcaaatc

SEQ ID NO: 5853829 - DNA, 25 bp, Homo sapien
tctttgcctctattgtatccgagat

SEQ ID NO: 5853830 - DNA, 25 bp, Homo sapien
tctttgcctctattgtatccgagat

SEQ ID NO: 5853831 - DNA, 25 bp, Homo sapien
tcttctttacgcaaactgaccgtac

SEQ ID NO: 5853832 - DNA, 25 bp, Homo sapien
tcttctttacgcaaactgaccgtac

SEQ ID NO: 5853833 - DNA, 25 bp, Homo sapien
accttgctgactttatgcgccggaa

SEQ ID NO: 5853834 - DNA, 25 bp, Homo sapien
agaaacggaatcctttgacgggata

SEQ ID NO: 5853835 - DNA, 25 bp, Homo sapien
agaaacggaatcctttgacgggata

SEQ ID NO: 5853836 - DNA, 25 bp, Homo sapien
accttgctgactttatgcgccggaa

SEQ ID NO: 5853837 - DNA, 25 bp, Homo sapien
atgacagtgacaattgaccgaattg

SEQ ID NO: 5853838 - DNA, 25 bp, Homo sapien
atgacagtgacaattgaccgaattg

SEQ ID NO: 5853839 - DNA, 25 bp, Homo sapien
ggattccggcggaaaagatcgcttc

SEQ ID NO: 5853840 - DNA, 25 bp, Homo sapien
ggattccggcggaaaagatcgcttc

SEQ ID NO: 5853841 - DNA, 25 bp, Homo sapien
atcaataacaaaatccggctgatga

SEQ ID NO: 5853842 - DNA, 25 bp, Homo sapien
atcaataacaaaatccggctgatga

SEQ ID NO: 5853843 - DNA, 25 bp, Homo sapien
acaaccggatgtcttgattgattta

SEQ ID NO: 5853844 - DNA, 25 bp, Homo sapien
acaaccggatgtcttgattgattta

SEQ ID NO: 5853845 - DNA, 25 bp, Homo sapien
ggccatagaccatacatacgatcag

SEQ ID NO: 5853846 - DNA, 25 bp, Homo sapien
ggccatagaccatacatacgatcag

SEQ ID NO: 5853847 - DNA, 25 bp, Homo sapien
ctcggtgcgatactgatgatgaaat

SEQ ID NO: 5853848 - DNA, 25 bp, Homo sapien
ctcggtgcgatactgatgatgaaat

SEQ ID NO: 5853849 - DNA, 25 bp, Homo sapien
attatctgatgtgatgcctgttgag

SEQ ID NO: 5853850 - DNA, 25 bp, Homo sapien
attatctgatgtgatgcctgttgag

SEQ ID NO: 5853851 - DNA, 25 bp, Homo sapien
acaaccggtttctcagaagctgatt

SEQ ID NO: 5853852 - DNA, 25 bp, Homo sapien
acaaccggtttctcagaagctgatt

SEQ ID NO: 5853853 - DNA, 25 bp, Homo sapien
gaaaaagggatcggagccatcatcg

SEQ ID NO: 5853854 - DNA, 25 bp, Homo sapien
gaaaaagggatcggagccatcatcg

SEQ ID NO: 5853855 - DNA, 25 bp, Homo sapien
acaccacattttgaccttgtagggg

SEQ ID NO: 5853856 - DNA, 25 bp, Homo sapien
acaccacattttgaccttgtagggg

SEQ ID NO: 5853857 - DNA, 25 bp, Homo sapien
ttagagcacggagtccgtccagttg

SEQ ID NO: 5853858 - DNA, 25 bp, Homo sapien
ttagagcacggagtccgtccagttg

SEQ ID NO: 5853859 - DNA, 25 bp, Homo sapien
tcatcatgaccagaagcttgacgca

SEQ ID NO: 5853860 - DNA, 25 bp, Homo sapien
tcatcatgaccagaagcttgacgca

SEQ ID NO: 5853861 - DNA, 25 bp, Homo sapien
tcttgattgatttaacaacgcccga

SEQ ID NO: 5853862 - DNA, 25 bp, Homo sapien
tcttgattgatttaacaacgcccga

SEQ ID NO: 5853863 - DNA, 25 bp, Homo sapien
ccaaattttgcgctcggtgcgatac

SEQ ID NO: 5853864 - DNA, 25 bp, Homo sapien
ccaaattttgcgctcggtgcgatac

SEQ ID NO: 5853865 - DNA, 25 bp, Homo sapien
atttcatcatcagtatcgcaccgag

SEQ ID NO: 5853866 - DNA, 25 bp, Homo sapien
atttcatcatcagtatcgcaccgag

SEQ ID NO: 5853867 - DNA, 25 bp, Homo sapien
caactggacggactccgtgctctaa

SEQ ID NO: 5853868 - DNA, 25 bp, Homo sapien
caactggacggactccgtgctctaa

SEQ ID NO: 5853869 - DNA, 25 bp, Homo sapien
ctcaacaggcatcacatcagataat

SEQ ID NO: 5853870 - DNA, 25 bp, Homo sapien
ctcaacaggcatcacatcagataat

SEQ ID NO: 5853871 - DNA, 25 bp, Homo sapien
tgcgtcaagcttctggtcatgatga

SEQ ID NO: 5853872 - DNA, 25 bp, Homo sapien
tgcgtcaagcttctggtcatgatga

SEQ ID NO: 5853873 - DNA, 25 bp, Homo sapien
taaatcaatcaagacatccggttgt

SEQ ID NO: 5853874 - DNA, 25 bp, Homo sapien
cccctacaaggtcaaaatgtggtgt

SEQ ID NO: 5853875 - DNA, 25 bp, Homo sapien
cccctacaaggtcaaaatgtggtgt

SEQ ID NO: 5853876 - DNA, 25 bp, Homo sapien
tcgggcgttgttaaatcaatcaaga

SEQ ID NO: 5853877 - DNA, 25 bp, Homo sapien
tcgggcgttgttaaatcaatcaaga

SEQ ID NO: 5853878 - DNA, 25 bp, Homo sapien
taaatcaatcaagacatccggttgt

SEQ ID NO: 5853879 - DNA, 25 bp, Homo sapien
cgatgatggctccgatccctttttc

SEQ ID NO: 5853880 - DNA, 25 bp, Homo sapien
cgatgatggctccgatccctttttc

SEQ ID NO: 5853881 - DNA, 25 bp, Homo sapien
aatcagcttctgagaaaccggttgt

SEQ ID NO: 5853882 - DNA, 25 bp, Homo sapien
gtatcgcaccgagcgcaaaatttgg

SEQ ID NO: 5853883 - DNA, 25 bp, Homo sapien
gtatcgcaccgagcgcaaaatttgg

SEQ ID NO: 5853884 - DNA, 25 bp, Homo sapien
ctgatcgtatgtatggtctatggcc

SEQ ID NO: 5853885 - DNA, 25 bp, Homo sapien
ctgatcgtatgtatggtctatggcc

SEQ ID NO: 5853886 - DNA, 25 bp, Homo sapien
aatcagcttctgagaaaccggttgt

SEQ ID NO: 5853887 - DNA, 25 bp, Homo sapien
gtcatttttttgcgcgacccgctga

SEQ ID NO: 5853888 - DNA, 25 bp, Homo sapien
gtcatttttttgcgcgacccgctga

SEQ ID NO: 5853889 - DNA, 25 bp, Homo sapien
ccgtttatgtgatgtgtattccatt

SEQ ID NO: 5853890 - DNA, 25 bp, Homo sapien
ccgtttatgtgatgtgtattccatt

SEQ ID NO: 5853891 - DNA, 25 bp, Homo sapien
atgaaggtgttttcgaattccgtga

SEQ ID NO: 5853892 - DNA, 25 bp, Homo sapien
ccgaatgtataatgctgacgttctt

SEQ ID NO: 5853893 - DNA, 25 bp, Homo sapien
ccgaatgtataatgctgacgttctt

SEQ ID NO: 5853894 - DNA, 25 bp, Homo sapien
cccacagtgatgatgtcgagatcgg

SEQ ID NO: 5853895 - DNA, 25 bp, Homo sapien
cccacagtgatgatgtcgagatcgg

SEQ ID NO: 5853896 - DNA, 25 bp, Homo sapien
gaaaattgctttgatcgcgcatgac

SEQ ID NO: 5853897 - DNA, 25 bp, Homo sapien
gaaaattgctttgatcgcgcatgac

SEQ ID NO: 5853898 - DNA, 25 bp, Homo sapien
gcggaaattcttgtgcgcacacttg

SEQ ID NO: 5853899 - DNA, 25 bp, Homo sapien
gcggaaattcttgtgcgcacacttg

SEQ ID NO: 5853900 - DNA, 25 bp, Homo sapien
tgaaccggatgtctcggcattaatc

SEQ ID NO: 5853901 - DNA, 25 bp, Homo sapien
tgaaccggatgtctcggcattaatc

SEQ ID NO: 5853902 - DNA, 25 bp, Homo sapien
ctgcggaaattcttgtgcgcacact

SEQ ID NO: 5853903 - DNA, 25 bp, Homo sapien
tgaagattgatcagcttgtgtatgg

SEQ ID NO: 5853904 - DNA, 25 bp, Homo sapien
ctgcggaaattcttgtgcgcacact

SEQ ID NO: 5853905 - DNA, 25 bp, Homo sapien
tgaagattgatcagcttgtgtatgg

SEQ ID NO: 5853906 - DNA, 25 bp, Homo sapien
aaagaatcatgatctatacgcaacc

SEQ ID NO: 5853907 - DNA, 25 bp, Homo sapien
aaagaatcatgatctatacgcaacc

SEQ ID NO: 5853908 - DNA, 25 bp, Homo sapien
atgaaggtgttttcgaattccgtga

SEQ ID NO: 5853909 - DNA, 25 bp, Homo sapien
ggttgcgtatagatcatgattcttt

SEQ ID NO: 5853910 - DNA, 25 bp, Homo sapien
ggttgcgtatagatcatgattcttt

SEQ ID NO: 5853911 - DNA, 25 bp, Homo sapien
tcagcgggtcgcgcaaaaaaatgac

SEQ ID NO: 5853912 - DNA, 25 bp, Homo sapien
tcagcgggtcgcgcaaaaaaatgac

SEQ ID NO: 5853913 - DNA, 25 bp, Homo sapien
aatggaatacacatcacataaacgg

SEQ ID NO: 5853914 - DNA, 25 bp, Homo sapien
aatggaatacacatcacataaacgg

SEQ ID NO: 5853915 - DNA, 25 bp, Homo sapien
gattaatgccgagacatccggttca

SEQ ID NO: 5853916 - DNA, 25 bp, Homo sapien
gattaatgccgagacatccggttca

SEQ ID NO: 5853917 - DNA, 25 bp, Homo sapien
agtgtgcgcacaagaatttccgcag

SEQ ID NO: 5853918 - DNA, 25 bp, Homo sapien
agtgtgcgcacaagaatttccgcag

SEQ ID NO: 5853919 - DNA, 25 bp, Homo sapien
caagtgtgcgcacaagaatttccgc

SEQ ID NO: 5853920 - DNA, 25 bp, Homo sapien
caagtgtgcgcacaagaatttccgc

SEQ ID NO: 5853921 - DNA, 25 bp, Homo sapien
tcacggaattcgaaaacaccttcat

SEQ ID NO: 5853922 - DNA, 25 bp, Homo sapien
tcacggaattcgaaaacaccttcat

SEQ ID NO: 5853923 - DNA, 25 bp, Homo sapien
ccgatctcgacatcatcactgtggg

SEQ ID NO: 5853924 - DNA, 25 bp, Homo sapien
ccgatctcgacatcatcactgtggg

SEQ ID NO: 5853925 - DNA, 25 bp, Homo sapien
gtcatgcgcgatcaaagcaattttc

SEQ ID NO: 5853926 - DNA, 25 bp, Homo sapien
gtcatgcgcgatcaaagcaattttc

SEQ ID NO: 5853927 - DNA, 25 bp, Homo sapien
aagaacgtcagcattatacattcgg

SEQ ID NO: 5853928 - DNA, 25 bp, Homo sapien
aagaacgtcagcattatacattcgg

SEQ ID NO: 5853929 - DNA, 25 bp, Homo sapien
ccatacacaagctgatcaatcttca

SEQ ID NO: 5853930 - DNA, 25 bp, Homo sapien
ccatacacaagctgatcaatcttca

SEQ ID NO: 5853931 - DNA, 25 bp, Homo sapien
atgccactgaatacgttgaaaaaat

SEQ ID NO: 5853932 - DNA, 25 bp, Homo sapien
atgccactgaatacgttgaaaaaat

SEQ ID NO: 5853933 - DNA, 25 bp, Homo sapien
tattcatttgtatccaaggtgctga

SEQ ID NO: 5853934 - DNA, 25 bp, Homo sapien
tattcatttgtatccaaggtgctga

SEQ ID NO: 5853935 - DNA, 25 bp, Homo sapien
ttgtatccaaggtgctgaatcttgg

SEQ ID NO: 5853936 - DNA, 25 bp, Homo sapien
ttgtatccaaggtgctgaatcttgg

SEQ ID NO: 5853937 - DNA, 25 bp, Homo sapien
gtgctgaatcttggaggaggtttcg

SEQ ID NO: 5853938 - DNA, 25 bp, Homo sapien
gtgctgaatcttggaggaggtttcg

SEQ ID NO: 5853939 - DNA, 25 bp, Homo sapien
gaaccgggccgttctctcgtgggag

SEQ ID NO: 5853940 - DNA, 25 bp, Homo sapien
gaaccgggccgttctctcgtgggag

SEQ ID NO: 5853941 - DNA, 25 bp, Homo sapien
tcatgccactgaatacgttgaaaaa

SEQ ID NO: 5853942 - DNA, 25 bp, Homo sapien
ggccggttttgtgttagcagcggaa

SEQ ID NO: 5853943 - DNA, 25 bp, Homo sapien
ggccggttttgtgttagcagcggaa

SEQ ID NO: 5853944 - DNA, 25 bp, Homo sapien
tcatgccactgaatacgttgaaaaa

SEQ ID NO: 5853945 - DNA, 25 bp, Homo sapien
cgggccgttctctcgtgggagacgc

SEQ ID NO: 5853946 - DNA, 25 bp, Homo sapien
cgggccgttctctcgtgggagacgc

SEQ ID NO: 5853947 - DNA, 25 bp, Homo sapien
ttcatttgtatccaaggtgctgaat

SEQ ID NO: 5853948 - DNA, 25 bp, Homo sapien
ttcatttgtatccaaggtgctgaat

SEQ ID NO: 5853949 - DNA, 25 bp, Homo sapien
atacggccggttttgtgttagcagc

SEQ ID NO: 5853950 - DNA, 25 bp, Homo sapien
atacggccggttttgtgttagcagc

SEQ ID NO: 5853951 - DNA, 25 bp, Homo sapien
gttttgtgttagcagcggaaaaaat

SEQ ID NO: 5853952 - DNA, 25 bp, Homo sapien
gttttgtgttagcagcggaaaaaat

SEQ ID NO: 5853953 - DNA, 25 bp, Homo sapien
attttttcaacgtattcagtggcat

SEQ ID NO: 5853954 - DNA, 25 bp, Homo sapien
attttttcaacgtattcagtggcat

SEQ ID NO: 5853955 - DNA, 25 bp, Homo sapien
ctcccacgagagaacggcccggttc

SEQ ID NO: 5853956 - DNA, 25 bp, Homo sapien
ctcccacgagagaacggcccggttc

SEQ ID NO: 5853957 - DNA, 25 bp, Homo sapien
attttttccgctgctaacacaaaac

SEQ ID NO: 5853958 - DNA, 25 bp, Homo sapien
attttttccgctgctaacacaaaac

SEQ ID NO: 5853959 - DNA, 25 bp, Homo sapien
gctgctaacacaaaaccggccgtat

SEQ ID NO: 5853960 - DNA, 25 bp, Homo sapien
gctgctaacacaaaaccggccgtat

SEQ ID NO: 5853961 - DNA, 25 bp, Homo sapien
attcagcaccttggatacaaatgaa

SEQ ID NO: 5853962 - DNA, 25 bp, Homo sapien
attcagcaccttggatacaaatgaa

SEQ ID NO: 5853963 - DNA, 25 bp, Homo sapien
tttttcaacgtattcagtggcatga

SEQ ID NO: 5853964 - DNA, 25 bp, Homo sapien
gcgtctcccacgagagaacggcccg

SEQ ID NO: 5853965 - DNA, 25 bp, Homo sapien
tttttcaacgtattcagtggcatga

SEQ ID NO: 5853966 - DNA, 25 bp, Homo sapien
gcgtctcccacgagagaacggcccg

SEQ ID NO: 5853967 - DNA, 25 bp, Homo sapien
ttccgctgctaacacaaaaccggcc

SEQ ID NO: 5853968 - DNA, 25 bp, Homo sapien
ttccgctgctaacacaaaaccggcc

SEQ ID NO: 5853969 - DNA, 25 bp, Homo sapien
ccaagattcagcaccttggatacaa

SEQ ID NO: 5853970 - DNA, 25 bp, Homo sapien
ccaagattcagcaccttggatacaa

SEQ ID NO: 5853971 - DNA, 25 bp, Homo sapien
cgaaacctcctccaagattcagcac

SEQ ID NO: 5853972 - DNA, 25 bp, Homo sapien
cgaaacctcctccaagattcagcac

SEQ ID NO: 5853973 - DNA, 25 bp, Homo sapien
tcagcaccttggatacaaatgaata

SEQ ID NO: 5853974 - DNA, 25 bp, Homo sapien
tcagcaccttggatacaaatgaata

SEQ ID NO: 5853975 - DNA, 25 bp, Homo sapien
ggactttctttagatgtcgtatccg

SEQ ID NO: 5853976 - DNA, 25 bp, Homo sapien
ggactttctttagatgtcgtatccg

SEQ ID NO: 5853977 - DNA, 25 bp, Homo sapien
tagaaatcggaggtgtggatgctct

SEQ ID NO: 5853978 - DNA, 25 bp, Homo sapien
tagaaatcggaggtgtggatgctct

SEQ ID NO: 5853979 - DNA, 25 bp, Homo sapien
ggctttaatacgtgagcgtgctaaa

SEQ ID NO: 5853980 - DNA, 25 bp, Homo sapien
ggctttaatacgtgagcgtgctaaa

SEQ ID NO: 5853981 - DNA, 25 bp, Homo sapien
agcggagaaatatggtacacctctt

SEQ ID NO: 5853982 - DNA, 25 bp, Homo sapien
agcggagaaatatggtacacctctt

SEQ ID NO: 5853983 - DNA, 25 bp, Homo sapien
atcagtcgcaatgattcagctcgct

SEQ ID NO: 5853984 - DNA, 25 bp, Homo sapien
atcagtcgcaatgattcagctcgct

SEQ ID NO: 5853985 - DNA, 25 bp, Homo sapien
tacacctctttacgtatatgatgtg

SEQ ID NO: 5853986 - DNA, 25 bp, Homo sapien
tacacctctttacgtatatgatgtg

SEQ ID NO: 5853987 - DNA, 25 bp, Homo sapien
cacctctttacgtatatgatgtggc

SEQ ID NO: 5853988 - DNA, 25 bp, Homo sapien
cacctctttacgtatatgatgtggc

SEQ ID NO: 5853989 - DNA, 25 bp, Homo sapien
ggagaaatatggtacacctctttac

SEQ ID NO: 5853990 - DNA, 25 bp, Homo sapien
ggagaaatatggtacacctctttac

SEQ ID NO: 5853991 - DNA, 25 bp, Homo sapien
gagagctatatacggctgttgcagc

SEQ ID NO: 5853992 - DNA, 25 bp, Homo sapien
gcaggcgtttatttctgcagggctg

SEQ ID NO: 5853993 - DNA, 25 bp, Homo sapien
gagagctatatacggctgttgcagc

SEQ ID NO: 5853994 - DNA, 25 bp, Homo sapien
gcaggcgtttatttctgcagggctg

SEQ ID NO: 5853995 - DNA, 25 bp, Homo sapien
ggatgctctctatttagcggagaaa

SEQ ID NO: 5853996 - DNA, 25 bp, Homo sapien
ggatgctctctatttagcggagaaa

SEQ ID NO: 5853997 - DNA, 25 bp, Homo sapien
gccacatcatatacgtaaagaggtg

SEQ ID NO: 5853998 - DNA, 25 bp, Homo sapien
cagccctgcagaaataaacgcctgc

SEQ ID NO: 5853999 - DNA, 25 bp, Homo sapien
cagccctgcagaaataaacgcctgc

SEQ ID NO: 5854000 - DNA, 25 bp, Homo sapien
tttctccgctaaatagagagcatcc

SEQ ID NO: 5854001 - DNA, 25 bp, Homo sapien
tttctccgctaaatagagagcatcc

SEQ ID NO: 5854002 - DNA, 25 bp, Homo sapien
gtaaagaggtgtaccatatttctcc

SEQ ID NO: 5854003 - DNA, 25 bp, Homo sapien
gtaaagaggtgtaccatatttctcc

SEQ ID NO: 5854004 - DNA, 25 bp, Homo sapien
agcgagctgaatcattgcgactgat

SEQ ID NO: 5854005 - DNA, 25 bp, Homo sapien
agcgagctgaatcattgcgactgat

SEQ ID NO: 5854006 - DNA, 25 bp, Homo sapien
agagcatccacacctccgatttcta

SEQ ID NO: 5854007 - DNA, 25 bp, Homo sapien
agagcatccacacctccgatttcta

SEQ ID NO: 5854008 - DNA, 25 bp, Homo sapien
gctgcaacagccgtatatagctctc

SEQ ID NO: 5854009 - DNA, 25 bp, Homo sapien
gccacatcatatacgtaaagaggtg

SEQ ID NO: 5854010 - DNA, 25 bp, Homo sapien
gctgcaacagccgtatatagctctc

SEQ ID NO: 5854011 - DNA, 25 bp, Homo sapien
cggatacgacatctaaagaaagtcc

SEQ ID NO: 5854012 - DNA, 25 bp, Homo sapien
cggatacgacatctaaagaaagtcc

SEQ ID NO: 5854013 - DNA, 25 bp, Homo sapien
aagaggtgtaccatatttctccgct

SEQ ID NO: 5854014 - DNA, 25 bp, Homo sapien
aagaggtgtaccatatttctccgct

SEQ ID NO: 5854015 - DNA, 25 bp, Homo sapien
tttagcacgctcacgtattaaagcc

SEQ ID NO: 5854016 - DNA, 25 bp, Homo sapien
tttagcacgctcacgtattaaagcc

SEQ ID NO: 5854017 - DNA, 25 bp, Homo sapien
cacatcatatacgtaaagaggtgta

SEQ ID NO: 5854018 - DNA, 25 bp, Homo sapien
cacatcatatacgtaaagaggtgta

SEQ ID NO: 5854019 - DNA, 25 bp, Homo sapien
agtttggtttcgatcttcataacgg

SEQ ID NO: 5854020 - DNA, 25 bp, Homo sapien
agtttggtttcgatcttcataacgg

SEQ ID NO: 5854021 - DNA, 25 bp, Homo sapien
actgaacgggccattgaacaagtat

SEQ ID NO: 5854022 - DNA, 25 bp, Homo sapien
actgaacgggccattgaacaagtat

SEQ ID NO: 5854023 - DNA, 25 bp, Homo sapien
tttcgatcttcataacggacaaact

SEQ ID NO: 5854024 - DNA, 25 bp, Homo sapien
tttcgatcttcataacggacaaact

SEQ ID NO: 5854025 - DNA, 25 bp, Homo sapien
tacgcatgactacattacaacgggc

SEQ ID NO: 5854026 - DNA, 25 bp, Homo sapien
tacgcatgactacattacaacgggc

SEQ ID NO: 5854027 - DNA, 25 bp, Homo sapien
tccattgccatatcggctcgcaaat

SEQ ID NO: 5854028 - DNA, 25 bp, Homo sapien
ctgaacgggccattgaacaagtatt

SEQ ID NO: 5854029 - DNA, 25 bp, Homo sapien
tccattgccatatcggctcgcaaat

SEQ ID NO: 5854030 - DNA, 25 bp, Homo sapien
ctgaacgggccattgaacaagtatt

SEQ ID NO: 5854031 - DNA, 25 bp, Homo sapien
cttcggatcacgcccggagtagaag

SEQ ID NO: 5854032 - DNA, 25 bp, Homo sapien
cttcggatcacgcccggagtagaag

SEQ ID NO: 5854033 - DNA, 25 bp, Homo sapien
gcttcttgaagacctatgtaaagaa

SEQ ID NO: 5854034 - DNA, 25 bp, Homo sapien
gcttcttgaagacctatgtaaagaa

SEQ ID NO: 5854035 - DNA, 25 bp, Homo sapien
tgactacattacaacgggccaggaa

SEQ ID NO: 5854036 - DNA, 25 bp, Homo sapien
tgactacattacaacgggccaggaa

SEQ ID NO: 5854037 - DNA, 25 bp, Homo sapien
gaacgcatccactttcatggaaaca

SEQ ID NO: 5854038 - DNA, 25 bp, Homo sapien
gaacgcatccactttcatggaaaca

SEQ ID NO: 5854039 - DNA, 25 bp, Homo sapien
gactacattacaacgggccaggaag

SEQ ID NO: 5854040 - DNA, 25 bp, Homo sapien
gactacattacaacgggccaggaag

SEQ ID NO: 5854041 - DNA, 25 bp, Homo sapien
atacttgttcaatggcccgttcagt

SEQ ID NO: 5854042 - DNA, 25 bp, Homo sapien
atacttgttcaatggcccgttcagt

SEQ ID NO: 5854043 - DNA, 25 bp, Homo sapien
tgtttccatgaaagtggatgcgttc

SEQ ID NO: 5854044 - DNA, 25 bp, Homo sapien
agtttgtccgttatgaagatcgaaa

SEQ ID NO: 5854045 - DNA, 25 bp, Homo sapien
tgtttccatgaaagtggatgcgttc

SEQ ID NO: 5854046 - DNA, 25 bp, Homo sapien
agtttgtccgttatgaagatcgaaa

SEQ ID NO: 5854047 - DNA, 25 bp, Homo sapien
ccgttatgaagatcgaaaccaaact

SEQ ID NO: 5854048 - DNA, 25 bp, Homo sapien
ccgttatgaagatcgaaaccaaact

SEQ ID NO: 5854049 - DNA, 25 bp, Homo sapien
atttgcgagccgatatggcaatgga

SEQ ID NO: 5854050 - DNA, 25 bp, Homo sapien
atttgcgagccgatatggcaatgga

SEQ ID NO: 5854051 - DNA, 25 bp, Homo sapien
cttctactccgggcgtgatccgaag

SEQ ID NO: 5854052 - DNA, 25 bp, Homo sapien
cttctactccgggcgtgatccgaag

SEQ ID NO: 5854053 - DNA, 25 bp, Homo sapien
ttctttacataggtcttcaagaagc

SEQ ID NO: 5854054 - DNA, 25 bp, Homo sapien
ttctttacataggtcttcaagaagc

SEQ ID NO: 5854055 - DNA, 25 bp, Homo sapien
ttcctggcccgttgtaatgtagtca

SEQ ID NO: 5854056 - DNA, 25 bp, Homo sapien
ttcctggcccgttgtaatgtagtca

SEQ ID NO: 5854057 - DNA, 25 bp, Homo sapien
gcccgttgtaatgtagtcatgcgta

SEQ ID NO: 5854058 - DNA, 25 bp, Homo sapien
gcccgttgtaatgtagtcatgcgta

SEQ ID NO: 5854059 - DNA, 25 bp, Homo sapien
cttcctggcccgttgtaatgtagtc

SEQ ID NO: 5854060 - DNA, 25 bp, Homo sapien
cttcctggcccgttgtaatgtagtc

SEQ ID NO: 5854061 - DNA, 25 bp, Homo sapien
aatacttgttcaatggcccgttcag

SEQ ID NO: 5854062 - DNA, 25 bp, Homo sapien
aatacttgttcaatggcccgttcag

SEQ ID NO: 5854063 - DNA, 25 bp, Homo sapien
atggtcatgctgccgcaggatgatc

SEQ ID NO: 5854064 - DNA, 25 bp, Homo sapien
atggtcatgctgccgcaggatgatc

SEQ ID NO: 5854065 - DNA, 25 bp, Homo sapien
cctgtcaaaaattgagtcacgtccg

SEQ ID NO: 5854066 - DNA, 25 bp, Homo sapien
cctgtcaaaaattgagtcacgtccg

SEQ ID NO: 5854067 - DNA, 25 bp, Homo sapien
ctgtcaaaaattgagtcacgtccga

SEQ ID NO: 5854068 - DNA, 25 bp, Homo sapien
ctgtctcccgatgaaaacatatctt

SEQ ID NO: 5854069 - DNA, 25 bp, Homo sapien
ctgtctcccgatgaaaacatatctt

SEQ ID NO: 5854070 - DNA, 25 bp, Homo sapien
ctgtcaaaaattgagtcacgtccga

SEQ ID NO: 5854071 - DNA, 25 bp, Homo sapien
gagtcacgtccgactaaaaccggat

SEQ ID NO: 5854072 - DNA, 25 bp, Homo sapien
gagtcacgtccgactaaaaccggat

SEQ ID NO: 5854073 - DNA, 25 bp, Homo sapien
gtctgcattttcttggagaaattta

SEQ ID NO: 5854074 - DNA, 25 bp, Homo sapien
gaccatcccgagctgaatatcgggg

SEQ ID NO: 5854075 - DNA, 25 bp, Homo sapien
gaccatcccgagctgaatatcgggg

SEQ ID NO: 5854076 - DNA, 25 bp, Homo sapien
tccggggcgctgcatagagtgctgt

SEQ ID NO: 5854077 - DNA, 25 bp, Homo sapien
tccggggcgctgcatagagtgctgt

SEQ ID NO: 5854078 - DNA, 25 bp, Homo sapien
tcaaaaattgagtcacgtccgacta

SEQ ID NO: 5854079 - DNA, 25 bp, Homo sapien
tcaaaaattgagtcacgtccgacta

SEQ ID NO: 5854080 - DNA, 25 bp, Homo sapien
gagctctaggcccaaaacgacctta

SEQ ID NO: 5854081 - DNA, 25 bp, Homo sapien
gagctctaggcccaaaacgacctta

SEQ ID NO: 5854082 - DNA, 25 bp, Homo sapien
gtctgcattttcttggagaaattta

SEQ ID NO: 5854083 - DNA, 25 bp, Homo sapien
atcggggtcattgccaatgatatgg

SEQ ID NO: 5854084 - DNA, 25 bp, Homo sapien
atcggggtcattgccaatgatatgg

SEQ ID NO: 5854085 - DNA, 25 bp, Homo sapien
atccggttttagtcggacgtgactc

SEQ ID NO: 5854086 - DNA, 25 bp, Homo sapien
gatcatcctgcggcagcatgaccat

SEQ ID NO: 5854087 - DNA, 25 bp, Homo sapien
gatcatcctgcggcagcatgaccat

SEQ ID NO: 5854088 - DNA, 25 bp, Homo sapien
tcggacgtgactcaatttttgacag

SEQ ID NO: 5854089 - DNA, 25 bp, Homo sapien
ccccgatattcagctcgggatggtc

SEQ ID NO: 5854090 - DNA, 25 bp, Homo sapien
ccccgatattcagctcgggatggtc

SEQ ID NO: 5854091 - DNA, 25 bp, Homo sapien
tcggacgtgactcaatttttgacag

SEQ ID NO: 5854092 - DNA, 25 bp, Homo sapien
taaatttctccaagaaaatgcagac

SEQ ID NO: 5854093 - DNA, 25 bp, Homo sapien
taaggtcgttttgggcctagagctc

SEQ ID NO: 5854094 - DNA, 25 bp, Homo sapien
taaggtcgttttgggcctagagctc

SEQ ID NO: 5854095 - DNA, 25 bp, Homo sapien
aagatatgttttcatcgggagacag

SEQ ID NO: 5854096 - DNA, 25 bp, Homo sapien
taaatttctccaagaaaatgcagac

SEQ ID NO: 5854097 - DNA, 25 bp, Homo sapien
aagatatgttttcatcgggagacag

SEQ ID NO: 5854098 - DNA, 25 bp, Homo sapien
cggacgtgactcaatttttgacagg

SEQ ID NO: 5854099 - DNA, 25 bp, Homo sapien
cggacgtgactcaatttttgacagg

SEQ ID NO: 5854100 - DNA, 25 bp, Homo sapien
ccatatcattggcaatgaccccgat

SEQ ID NO: 5854101 - DNA, 25 bp, Homo sapien
ccatatcattggcaatgaccccgat

SEQ ID NO: 5854102 - DNA, 25 bp, Homo sapien
tagtcggacgtgactcaatttttga

SEQ ID NO: 5854103 - DNA, 25 bp, Homo sapien
tagtcggacgtgactcaatttttga

SEQ ID NO: 5854104 - DNA, 25 bp, Homo sapien
acagcactctatgcagcgccccgga

SEQ ID NO: 5854105 - DNA, 25 bp, Homo sapien
acagcactctatgcagcgccccgga

SEQ ID NO: 5854106 - DNA, 25 bp, Homo sapien
atccggttttagtcggacgtgactc

SEQ ID NO: 5854107 - DNA, 25 bp, Homo sapien
gtgacactgtctatcagtacgtcgg

SEQ ID NO: 5854108 - DNA, 25 bp, Homo sapien
gtgacactgtctatcagtacgtcgg

SEQ ID NO: 5854109 - DNA, 25 bp, Homo sapien
gtagctgattctggaagcaacgttc

SEQ ID NO: 5854110 - DNA, 25 bp, Homo sapien
gtagctgattctggaagcaacgttc

SEQ ID NO: 5854111 - DNA, 25 bp, Homo sapien
gattcagtagcagatgccgttcaaa

SEQ ID NO: 5854112 - DNA, 25 bp, Homo sapien
gattcagtagcagatgccgttcaaa

SEQ ID NO: 5854113 - DNA, 25 bp, Homo sapien
aggtcgatttaagtagaagtgcgtt

SEQ ID NO: 5854114 - DNA, 25 bp, Homo sapien
aggtcgatttaagtagaagtgcgtt

SEQ ID NO: 5854115 - DNA, 25 bp, Homo sapien
tatcagtacgtcggcaatggaagaa

SEQ ID NO: 5854116 - DNA, 25 bp, Homo sapien
tatcagtacgtcggcaatggaagaa

SEQ ID NO: 5854117 - DNA, 25 bp, Homo sapien
tgacactgtctatcagtacgtcggc

SEQ ID NO: 5854118 - DNA, 25 bp, Homo sapien
tgacactgtctatcagtacgtcggc

SEQ ID NO: 5854119 - DNA, 25 bp, Homo sapien
ctggaagcaacgttctttccattca

SEQ ID NO: 5854120 - DNA, 25 bp, Homo sapien
ctggaagcaacgttctttccattca

SEQ ID NO: 5854121 - DNA, 25 bp, Homo sapien
tttggaggataggtcaggtgcgtta

SEQ ID NO: 5854122 - DNA, 25 bp, Homo sapien
tttggaggataggtcaggtgcgtta

SEQ ID NO: 5854123 - DNA, 25 bp, Homo sapien
ggaggataggtcaggtgcgttatct

SEQ ID NO: 5854124 - DNA, 25 bp, Homo sapien
ggaggataggtcaggtgcgttatct

SEQ ID NO: 5854125 - DNA, 25 bp, Homo sapien
ttttccattctacaccatggtaaaa

SEQ ID NO: 5854126 - DNA, 25 bp, Homo sapien
ttttccattctacaccatggtaaaa

SEQ ID NO: 5854127 - DNA, 25 bp, Homo sapien
gcagatgccgttcaaaaggtcgatt

SEQ ID NO: 5854128 - DNA, 25 bp, Homo sapien
gcagatgccgttcaaaaggtcgatt

SEQ ID NO: 5854129 - DNA, 25 bp, Homo sapien
agataacgcacctgacctatcctcc

SEQ ID NO: 5854130 - DNA, 25 bp, Homo sapien
aacgcacttctacttaaatcgacct

SEQ ID NO: 5854131 - DNA, 25 bp, Homo sapien
aacgcacttctacttaaatcgacct

SEQ ID NO: 5854132 - DNA, 25 bp, Homo sapien
ttttaccatggtgtagaatggaaaa

SEQ ID NO: 5854133 - DNA, 25 bp, Homo sapien
ttttaccatggtgtagaatggaaaa

SEQ ID NO: 5854134 - DNA, 25 bp, Homo sapien
gccgacgtactgatagacagtgtca

SEQ ID NO: 5854135 - DNA, 25 bp, Homo sapien
gccgacgtactgatagacagtgtca

SEQ ID NO: 5854136 - DNA, 25 bp, Homo sapien
ttcttccattgccgacgtactgata

SEQ ID NO: 5854137 - DNA, 25 bp, Homo sapien
ttcttccattgccgacgtactgata

SEQ ID NO: 5854138 - DNA, 25 bp, Homo sapien
tgaatggaaagaacgttgcttccag

SEQ ID NO: 5854139 - DNA, 25 bp, Homo sapien
tgaatggaaagaacgttgcttccag

SEQ ID NO: 5854140 - DNA, 25 bp, Homo sapien
gaacgttgcttccagaatcagctac

SEQ ID NO: 5854141 - DNA, 25 bp, Homo sapien
gaacgttgcttccagaatcagctac

SEQ ID NO: 5854142 - DNA, 25 bp, Homo sapien
tttgaacggcatctgctactgaatc

SEQ ID NO: 5854143 - DNA, 25 bp, Homo sapien
aatcgaccttttgaacggcatctgc

SEQ ID NO: 5854144 - DNA, 25 bp, Homo sapien
tttgaacggcatctgctactgaatc

SEQ ID NO: 5854145 - DNA, 25 bp, Homo sapien
aatcgaccttttgaacggcatctgc

SEQ ID NO: 5854146 - DNA, 25 bp, Homo sapien
taacgcacctgacctatcctccaaa

SEQ ID NO: 5854147 - DNA, 25 bp, Homo sapien
taacgcacctgacctatcctccaaa

SEQ ID NO: 5854148 - DNA, 25 bp, Homo sapien
ccgacgtactgatagacagtgtcac

SEQ ID NO: 5854149 - DNA, 25 bp, Homo sapien
ccgacgtactgatagacagtgtcac

SEQ ID NO: 5854150 - DNA, 25 bp, Homo sapien
agataacgcacctgacctatcctcc

SEQ ID NO: 5854151 - DNA, 25 bp, Homo sapien
gttgcaggcgaagttgattttgctt

SEQ ID NO: 5854152 - DNA, 25 bp, Homo sapien
gttgcaggcgaagttgattttgctt

SEQ ID NO: 5854153 - DNA, 25 bp, Homo sapien
ctacatttacacatctagcagtcag

SEQ ID NO: 5854154 - DNA, 25 bp, Homo sapien
gctcgacaaaatttactcacattca

SEQ ID NO: 5854155 - DNA, 25 bp, Homo sapien
ctacatttacacatctagcagtcag

SEQ ID NO: 5854156 - DNA, 25 bp, Homo sapien
atttcttcatcgacattttccttcc

SEQ ID NO: 5854157 - DNA, 25 bp, Homo sapien
atttcttcatcgacattttccttcc

SEQ ID NO: 5854158 - DNA, 25 bp, Homo sapien
atatgaatacgccaattctaccggg

SEQ ID NO: 5854159 - DNA, 25 bp, Homo sapien
atatgaatacgccaattctaccggg

SEQ ID NO: 5854160 - DNA, 25 bp, Homo sapien
ccgaacatgttgcttaccgcaccat

SEQ ID NO: 5854161 - DNA, 25 bp, Homo sapien
ccgaacatgttgcttaccgcaccat

SEQ ID NO: 5854162 - DNA, 25 bp, Homo sapien
tcggttatttaggtccagcagctac

SEQ ID NO: 5854163 - DNA, 25 bp, Homo sapien
tcggttatttaggtccagcagctac

SEQ ID NO: 5854164 - DNA, 25 bp, Homo sapien
ggagtgtatagatgcagccgttgca

SEQ ID NO: 5854165 - DNA, 25 bp, Homo sapien
ggagtgtatagatgcagccgttgca

SEQ ID NO: 5854166 - DNA, 25 bp, Homo sapien
aatcgtgggtgaaatgacgttgccg

SEQ ID NO: 5854167 - DNA, 25 bp, Homo sapien
gaacatgttgcttaccgcaccattc

SEQ ID NO: 5854168 - DNA, 25 bp, Homo sapien
gaacatgttgcttaccgcaccattc

SEQ ID NO: 5854169 - DNA, 25 bp, Homo sapien
aatcgtgggtgaaatgacgttgccg

SEQ ID NO: 5854170 - DNA, 25 bp, Homo sapien
tacatttacacatctagcagtcagt

SEQ ID NO: 5854171 - DNA, 25 bp, Homo sapien
tacatttacacatctagcagtcagt

SEQ ID NO: 5854172 - DNA, 25 bp, Homo sapien
gctcgacaaaatttactcacattca

SEQ ID NO: 5854173 - DNA, 25 bp, Homo sapien
gtagctgctggacctaaataaccga

SEQ ID NO: 5854174 - DNA, 25 bp, Homo sapien
gtagctgctggacctaaataaccga

SEQ ID NO: 5854175 - DNA, 25 bp, Homo sapien
cggcaacgtcatttcacccacgatt

SEQ ID NO: 5854176 - DNA, 25 bp, Homo sapien
cggcaacgtcatttcacccacgatt

SEQ ID NO: 5854177 - DNA, 25 bp, Homo sapien
tgaatgtgagtaaattttgtcgagc

SEQ ID NO: 5854178 - DNA, 25 bp, Homo sapien
tgaatgtgagtaaattttgtcgagc

SEQ ID NO: 5854179 - DNA, 25 bp, Homo sapien
aagcaaaatcaacttcgcctgcaac

SEQ ID NO: 5854180 - DNA, 25 bp, Homo sapien
aagcaaaatcaacttcgcctgcaac

SEQ ID NO: 5854181 - DNA, 25 bp, Homo sapien
tgcaacggctgcatctatacactcc

SEQ ID NO: 5854182 - DNA, 25 bp, Homo sapien
tgcaacggctgcatctatacactcc

SEQ ID NO: 5854183 - DNA, 25 bp, Homo sapien
actgactgctagatgtgtaaatgta

SEQ ID NO: 5854184 - DNA, 25 bp, Homo sapien
actgactgctagatgtgtaaatgta

SEQ ID NO: 5854185 - DNA, 25 bp, Homo sapien
ctgactgctagatgtgtaaatgtag

SEQ ID NO: 5854186 - DNA, 25 bp, Homo sapien
ctgactgctagatgtgtaaatgtag

SEQ ID NO: 5854187 - DNA, 25 bp, Homo sapien
gaatggtgcggtaagcaacatgttc

SEQ ID NO: 5854188 - DNA, 25 bp, Homo sapien
gaatggtgcggtaagcaacatgttc

SEQ ID NO: 5854189 - DNA, 25 bp, Homo sapien
cccggtagaattggcgtattcatat

SEQ ID NO: 5854190 - DNA, 25 bp, Homo sapien
cccggtagaattggcgtattcatat

SEQ ID NO: 5854191 - DNA, 25 bp, Homo sapien
ggaaggaaaatgtcgatgaagaaat

SEQ ID NO: 5854192 - DNA, 25 bp, Homo sapien
ggaaggaaaatgtcgatgaagaaat

SEQ ID NO: 5854193 - DNA, 25 bp, Homo sapien
atggtgcggtaagcaacatgttcgg

SEQ ID NO: 5854194 - DNA, 25 bp, Homo sapien
atggtgcggtaagcaacatgttcgg

SEQ ID NO: 5854195 - DNA, 25 bp, Homo sapien
gaaggatatgttccatcagccgtac

SEQ ID NO: 5854196 - DNA, 25 bp, Homo sapien
gaaggatatgttccatcagccgtac

SEQ ID NO: 5854197 - DNA, 25 bp, Homo sapien
gtgatcggcctgcatgaggatgacg

SEQ ID NO: 5854198 - DNA, 25 bp, Homo sapien
gtgatcggcctgcatgaggatgacg

SEQ ID NO: 5854199 - DNA, 25 bp, Homo sapien
atgcttgtgcctgagctgtcaaaag

SEQ ID NO: 5854200 - DNA, 25 bp, Homo sapien
atgcttgtgcctgagctgtcaaaag

SEQ ID NO: 5854201 - DNA, 25 bp, Homo sapien
gaaggagtttccatatgccgatgcc

SEQ ID NO: 5854202 - DNA, 25 bp, Homo sapien
gaaggagtttccatatgccgatgcc

SEQ ID NO: 5854203 - DNA, 25 bp, Homo sapien
gacgtagtcgttgtcattccttttt

SEQ ID NO: 5854204 - DNA, 25 bp, Homo sapien
gacgtagtcgttgtcattccttttt

SEQ ID NO: 5854205 - DNA, 25 bp, Homo sapien
tcctcattgctgcgatcatgtccaa

SEQ ID NO: 5854206 - DNA, 25 bp, Homo sapien
tcctcattgctgcgatcatgtccaa

SEQ ID NO: 5854207 - DNA, 25 bp, Homo sapien
gaagggcgcatatggaacggctctc

SEQ ID NO: 5854208 - DNA, 25 bp, Homo sapien
gaagggcgcatatggaacggctctc

SEQ ID NO: 5854209 - DNA, 25 bp, Homo sapien
acgcgagagacgtgcttccgaagga

SEQ ID NO: 5854210 - DNA, 25 bp, Homo sapien
acgcgagagacgtgcttccgaagga

SEQ ID NO: 5854211 - DNA, 25 bp, Homo sapien
gacgagacccaaatgatccgcgtcc

SEQ ID NO: 5854212 - DNA, 25 bp, Homo sapien
gacgagacccaaatgatccgcgtcc

SEQ ID NO: 5854213 - DNA, 25 bp, Homo sapien
aaagaacagctcgcgcttcatttcc

SEQ ID NO: 5854214 - DNA, 25 bp, Homo sapien
aaagaacagctcgcgcttcatttcc

SEQ ID NO: 5854215 - DNA, 25 bp, Homo sapien
ggattggccgcttgtcgggaaaatc

SEQ ID NO: 5854216 - DNA, 25 bp, Homo sapien
ggattggccgcttgtcgggaaaatc

SEQ ID NO: 5854217 - DNA, 25 bp, Homo sapien
cgtcatcctcatgcaggccgatcac

SEQ ID NO: 5854218 - DNA, 25 bp, Homo sapien
cgtcatcctcatgcaggccgatcac

SEQ ID NO: 5854219 - DNA, 25 bp, Homo sapien
gattttcccgacaagcggccaatcc

SEQ ID NO: 5854220 - DNA, 25 bp, Homo sapien
ttggacatgatcgcagcaatgagga

SEQ ID NO: 5854221 - DNA, 25 bp, Homo sapien
ttggacatgatcgcagcaatgagga

SEQ ID NO: 5854222 - DNA, 25 bp, Homo sapien
ggcatcggcatatggaaactccttc

SEQ ID NO: 5854223 - DNA, 25 bp, Homo sapien
ggcatcggcatatggaaactccttc

SEQ ID NO: 5854224 - DNA, 25 bp, Homo sapien
gtacggctgatggaacatatccttc

SEQ ID NO: 5854225 - DNA, 25 bp, Homo sapien
gtacggctgatggaacatatccttc

SEQ ID NO: 5854226 - DNA, 25 bp, Homo sapien
aaaaaggaatgacaacgactacgtc

SEQ ID NO: 5854227 - DNA, 25 bp, Homo sapien
aaaaaggaatgacaacgactacgtc

SEQ ID NO: 5854228 - DNA, 25 bp, Homo sapien
gattttcccgacaagcggccaatcc

SEQ ID NO: 5854229 - DNA, 25 bp, Homo sapien
ggaaatgaagcgcgagctgttcttt

SEQ ID NO: 5854230 - DNA, 25 bp, Homo sapien
gagagccgttccatatgcgcccttc

SEQ ID NO: 5854231 - DNA, 25 bp, Homo sapien
gagagccgttccatatgcgcccttc

SEQ ID NO: 5854232 - DNA, 25 bp, Homo sapien
ggaaatgaagcgcgagctgttcttt

SEQ ID NO: 5854233 - DNA, 25 bp, Homo sapien
ggacgcggatcatttgggtctcgtc

SEQ ID NO: 5854234 - DNA, 25 bp, Homo sapien
ggacgcggatcatttgggtctcgtc

SEQ ID NO: 5854235 - DNA, 25 bp, Homo sapien
cttttgacagctcaggcacaagcat

SEQ ID NO: 5854236 - DNA, 25 bp, Homo sapien
cttttgacagctcaggcacaagcat

SEQ ID NO: 5854237 - DNA, 25 bp, Homo sapien
tccttcggaagcacgtctctcgcgt

SEQ ID NO: 5854238 - DNA, 25 bp, Homo sapien
tccttcggaagcacgtctctcgcgt

SEQ ID NO: 5854239 - DNA, 25 bp, Homo sapien
aaactgctgccttcgaagtgtgcga

SEQ ID NO: 5854240 - DNA, 25 bp, Homo sapien
gtcaacccttaccgcattgaaggcc

SEQ ID NO: 5854241 - DNA, 25 bp, Homo sapien
gtcaacccttaccgcattgaaggcc

SEQ ID NO: 5854242 - DNA, 25 bp, Homo sapien
gaaatgcattgtcatcatcccgaac

SEQ ID NO: 5854243 - DNA, 25 bp, Homo sapien
gaaatgcattgtcatcatcccgaac

SEQ ID NO: 5854244 - DNA, 25 bp, Homo sapien
aactcgctcaagctgtcatgtacgg

SEQ ID NO: 5854245 - DNA, 25 bp, Homo sapien
aactcgctcaagctgtcatgtacgg

SEQ ID NO: 5854246 - DNA, 25 bp, Homo sapien
gtaacagatcaaacaccggcgctaa

SEQ ID NO: 5854247 - DNA, 25 bp, Homo sapien
gtaacagatcaaacaccggcgctaa

SEQ ID NO: 5854248 - DNA, 25 bp, Homo sapien
gatgcgcttaaaattgtccgttcca

SEQ ID NO: 5854249 - DNA, 25 bp, Homo sapien
gatgcgcttaaaattgtccgttcca

SEQ ID NO: 5854250 - DNA, 25 bp, Homo sapien
gtcaacaggtaacacttccgctgct

SEQ ID NO: 5854251 - DNA, 25 bp, Homo sapien
gtcaacaggtaacacttccgctgct

SEQ ID NO: 5854252 - DNA, 25 bp, Homo sapien
gcatatgcagcccgtgctaacatga

SEQ ID NO: 5854253 - DNA, 25 bp, Homo sapien
gcatatgcagcccgtgctaacatga

SEQ ID NO: 5854254 - DNA, 25 bp, Homo sapien
agcgcctgatgttttagcgatcccg

SEQ ID NO: 5854255 - DNA, 25 bp, Homo sapien
agcgcctgatgttttagcgatcccg

SEQ ID NO: 5854256 - DNA, 25 bp, Homo sapien
caggccttccgaaaatgcgcggctt

SEQ ID NO: 5854257 - DNA, 25 bp, Homo sapien
caggccttccgaaaatgcgcggctt

SEQ ID NO: 5854258 - DNA, 25 bp, Homo sapien
aaactgctgccttcgaagtgtgcga

SEQ ID NO: 5854259 - DNA, 25 bp, Homo sapien
gacggaaactttgacgatgcgctta

SEQ ID NO: 5854260 - DNA, 25 bp, Homo sapien
gacggaaactttgacgatgcgctta

SEQ ID NO: 5854261 - DNA, 25 bp, Homo sapien
tcatgttagcacgggctgcatatgc

SEQ ID NO: 5854262 - DNA, 25 bp, Homo sapien
tcatgttagcacgggctgcatatgc

SEQ ID NO: 5854263 - DNA, 25 bp, Homo sapien
ggccttcaatgcggtaagggttgac

SEQ ID NO: 5854264 - DNA, 25 bp, Homo sapien
ggccttcaatgcggtaagggttgac

SEQ ID NO: 5854265 - DNA, 25 bp, Homo sapien
agcagcggaagtgttacctgttgac

SEQ ID NO: 5854266 - DNA, 25 bp, Homo sapien
agcagcggaagtgttacctgttgac

SEQ ID NO: 5854267 - DNA, 25 bp, Homo sapien
gttcgggatgatgacaatgcatttc

SEQ ID NO: 5854268 - DNA, 25 bp, Homo sapien
gttcgggatgatgacaatgcatttc

SEQ ID NO: 5854269 - DNA, 25 bp, Homo sapien
ttagcgccggtgtttgatctgttac

SEQ ID NO: 5854270 - DNA, 25 bp, Homo sapien
ttagcgccggtgtttgatctgttac

SEQ ID NO: 5854271 - DNA, 25 bp, Homo sapien
aagccgcgcattttcggaaggcctg

SEQ ID NO: 5854272 - DNA, 25 bp, Homo sapien
aagccgcgcattttcggaaggcctg

SEQ ID NO: 5854273 - DNA, 25 bp, Homo sapien
tcgcacacttcgaaggcagcagttt

SEQ ID NO: 5854274 - DNA, 25 bp, Homo sapien
tcgcacacttcgaaggcagcagttt

SEQ ID NO: 5854275 - DNA, 25 bp, Homo sapien
taagcgcatcgtcaaagtttccgtc

SEQ ID NO: 5854276 - DNA, 25 bp, Homo sapien
taagcgcatcgtcaaagtttccgtc

SEQ ID NO: 5854277 - DNA, 25 bp, Homo sapien
cgggatcgctaaaacatcaggcgct

SEQ ID NO: 5854278 - DNA, 25 bp, Homo sapien
cgggatcgctaaaacatcaggcgct

SEQ ID NO: 5854279 - DNA, 25 bp, Homo sapien
tggaacggacaattttaagcgcatc

SEQ ID NO: 5854280 - DNA, 25 bp, Homo sapien
tggaacggacaattttaagcgcatc

SEQ ID NO: 5854281 - DNA, 25 bp, Homo sapien
ccgtacatgacagcttgagcgagtt

SEQ ID NO: 5854282 - DNA, 25 bp, Homo sapien
ccgtacatgacagcttgagcgagtt

SEQ ID NO: 5854283 - DNA, 25 bp, Homo sapien
aaatgcctcctgtccatgtgaaggt

SEQ ID NO: 5854284 - DNA, 25 bp, Homo sapien
tcagtcggaatggcgctcagcagat

SEQ ID NO: 5854285 - DNA, 25 bp, Homo sapien
gttcttgcgcgtctatcgcaggagt

SEQ ID NO: 5854286 - DNA, 25 bp, Homo sapien
tcagtcggaatggcgctcagcagat

SEQ ID NO: 5854287 - DNA, 25 bp, Homo sapien
gttcttgcgcgtctatcgcaggagt

SEQ ID NO: 5854288 - DNA, 25 bp, Homo sapien
aaatgcctcctgtccatgtgaaggt

SEQ ID NO: 5854289 - DNA, 25 bp, Homo sapien
tatcagctgatcgcccgtgtagaag

SEQ ID NO: 5854290 - DNA, 25 bp, Homo sapien
tatcagctgatcgcccgtgtagaag

SEQ ID NO: 5854291 - DNA, 25 bp, Homo sapien
gataacctgatctaccaagtggcta

SEQ ID NO: 5854292 - DNA, 25 bp, Homo sapien
gataacctgatctaccaagtggcta

SEQ ID NO: 5854293 - DNA, 25 bp, Homo sapien
tctgtcactgttcccggaagcacag

SEQ ID NO: 5854294 - DNA, 25 bp, Homo sapien
tctgtcactgttcccggaagcacag

SEQ ID NO: 5854295 - DNA, 25 bp, Homo sapien
tgaaatccttcacgcatatcagctg

SEQ ID NO: 5854296 - DNA, 25 bp, Homo sapien
tgaaatccttcacgcatatcagctg

SEQ ID NO: 5854297 - DNA, 25 bp, Homo sapien
agatccgaacacagcggtcgacatt

SEQ ID NO: 5854298 - DNA, 25 bp, Homo sapien
agatccgaacacagcggtcgacatt

SEQ ID NO: 5854299 - DNA, 25 bp, Homo sapien
gaacgaagccgacatgctgttctct

SEQ ID NO: 5854300 - DNA, 25 bp, Homo sapien
gaacgaagccgacatgctgttctct

SEQ ID NO: 5854301 - DNA, 25 bp, Homo sapien
aaatcaagcctgtcacattgccgac

SEQ ID NO: 5854302 - DNA, 25 bp, Homo sapien
aaatcaagcctgtcacattgccgac

SEQ ID NO: 5854303 - DNA, 25 bp, Homo sapien
gccccggctttgattcagtcggaat

SEQ ID NO: 5854304 - DNA, 25 bp, Homo sapien
gccccggctttgattcagtcggaat

SEQ ID NO: 5854305 - DNA, 25 bp, Homo sapien
gtcggcaatgtgacaggcttgattt

SEQ ID NO: 5854306 - DNA, 25 bp, Homo sapien
cagctgatatgcgtgaaggatttca

SEQ ID NO: 5854307 - DNA, 25 bp, Homo sapien
aatgtcgaccgctgtgttcggatct

SEQ ID NO: 5854308 - DNA, 25 bp, Homo sapien
aatgtcgaccgctgtgttcggatct

SEQ ID NO: 5854309 - DNA, 25 bp, Homo sapien
accttcacatggacaggaggcattt

SEQ ID NO: 5854310 - DNA, 25 bp, Homo sapien
agagaacagcatgtcggcttcgttc

SEQ ID NO: 5854311 - DNA, 25 bp, Homo sapien
agagaacagcatgtcggcttcgttc

SEQ ID NO: 5854312 - DNA, 25 bp, Homo sapien
accttcacatggacaggaggcattt

SEQ ID NO: 5854313 - DNA, 25 bp, Homo sapien
cttctacacgggcgatcagctgata

SEQ ID NO: 5854314 - DNA, 25 bp, Homo sapien
cttctacacgggcgatcagctgata

SEQ ID NO: 5854315 - DNA, 25 bp, Homo sapien
atctgctgagcgccattccgactga

SEQ ID NO: 5854316 - DNA, 25 bp, Homo sapien
atctgctgagcgccattccgactga

SEQ ID NO: 5854317 - DNA, 25 bp, Homo sapien
attccgactgaatcaaagccggggc

SEQ ID NO: 5854318 - DNA, 25 bp, Homo sapien
ctgtgcttccgggaacagtgacaga

SEQ ID NO: 5854319 - DNA, 25 bp, Homo sapien
attccgactgaatcaaagccggggc

SEQ ID NO: 5854320 - DNA, 25 bp, Homo sapien
ctgtgcttccgggaacagtgacaga

SEQ ID NO: 5854321 - DNA, 25 bp, Homo sapien
tagccacttggtagatcaggttatc

SEQ ID NO: 5854322 - DNA, 25 bp, Homo sapien
tagccacttggtagatcaggttatc

SEQ ID NO: 5854323 - DNA, 25 bp, Homo sapien
gtcggcaatgtgacaggcttgattt

SEQ ID NO: 5854324 - DNA, 25 bp, Homo sapien
actcctgcgatagacgcgcaagaac

SEQ ID NO: 5854325 - DNA, 25 bp, Homo sapien
actcctgcgatagacgcgcaagaac

SEQ ID NO: 5854326 - DNA, 25 bp, Homo sapien
cagctgatatgcgtgaaggatttca

SEQ ID NO: 5854327 - DNA, 25 bp, Homo sapien
gggataacgaacaacagcaacgtct

SEQ ID NO: 5854328 - DNA, 25 bp, Homo sapien
gggataacgaacaacagcaacgtct

SEQ ID NO: 5854329 - DNA, 25 bp, Homo sapien
gcaaactcgattttctacggttgca

SEQ ID NO: 5854330 - DNA, 25 bp, Homo sapien
gcaaactcgattttctacggttgca

SEQ ID NO: 5854331 - DNA, 25 bp, Homo sapien
actggggctaaatccgcagcaaact

SEQ ID NO: 5854332 - DNA, 25 bp, Homo sapien
actggggctaaatccgcagcaaact

SEQ ID NO: 5854333 - DNA, 25 bp, Homo sapien
tttctacggttgcaaactgctgacc

SEQ ID NO: 5854334 - DNA, 25 bp, Homo sapien
tttctacggttgcaaactgctgacc

SEQ ID NO: 5854335 - DNA, 25 bp, Homo sapien
gcaaactggggctaaatccgcagca

SEQ ID NO: 5854336 - DNA, 25 bp, Homo sapien
gcaaactggggctaaatccgcagca

SEQ ID NO: 5854337 - DNA, 25 bp, Homo sapien
acaacagcaacgtcttgaacaggcg

SEQ ID NO: 5854338 - DNA, 25 bp, Homo sapien
acaacagcaacgtcttgaacaggcg

SEQ ID NO: 5854339 - DNA, 25 bp, Homo sapien
agactcaggcgatgtgctttatggc

SEQ ID NO: 5854340 - DNA, 25 bp, Homo sapien
agactcaggcgatgtgctttatggc

SEQ ID NO: 5854341 - DNA, 25 bp, Homo sapien
tatggcaggcgcaaactcgattttc

SEQ ID NO: 5854342 - DNA, 25 bp, Homo sapien
tatggcaggcgcaaactcgattttc

SEQ ID NO: 5854343 - DNA, 25 bp, Homo sapien
caacctcttacgtgcgcctttctgc

SEQ ID NO: 5854344 - DNA, 25 bp, Homo sapien
caacctcttacgtgcgcctttctgc

SEQ ID NO: 5854345 - DNA, 25 bp, Homo sapien
gaacagactcaggcgatgtgcttta

SEQ ID NO: 5854346 - DNA, 25 bp, Homo sapien
gaacagactcaggcgatgtgcttta

SEQ ID NO: 5854347 - DNA, 25 bp, Homo sapien
tgccaacctcttacgtgcgcctttc

SEQ ID NO: 5854348 - DNA, 25 bp, Homo sapien
tgccaacctcttacgtgcgcctttc

SEQ ID NO: 5854349 - DNA, 25 bp, Homo sapien
cgcctgttcaagacgttgctgttgt

SEQ ID NO: 5854350 - DNA, 25 bp, Homo sapien
cgcctgttcaagacgttgctgttgt

SEQ ID NO: 5854351 - DNA, 25 bp, Homo sapien
tgctgcggatttagccccagtttgc

SEQ ID NO: 5854352 - DNA, 25 bp, Homo sapien
tgctgcggatttagccccagtttgc

SEQ ID NO: 5854353 - DNA, 25 bp, Homo sapien
agacgttgctgttgttcgttatccc

SEQ ID NO: 5854354 - DNA, 25 bp, Homo sapien
agacgttgctgttgttcgttatccc

SEQ ID NO: 5854355 - DNA, 25 bp, Homo sapien
taaagcacatcgcctgagtctgttc

SEQ ID NO: 5854356 - DNA, 25 bp, Homo sapien
taaagcacatcgcctgagtctgttc

SEQ ID NO: 5854357 - DNA, 25 bp, Homo sapien
gcagaaaggcgcacgtaagaggttg

SEQ ID NO: 5854358 - DNA, 25 bp, Homo sapien
gcagaaaggcgcacgtaagaggttg

SEQ ID NO: 5854359 - DNA, 25 bp, Homo sapien
agtttgctgcggatttagccccagt

SEQ ID NO: 5854360 - DNA, 25 bp, Homo sapien
agtttgctgcggatttagccccagt

SEQ ID NO: 5854361 - DNA, 25 bp, Homo sapien
tgcaaccgtagaaaatcgagtttgc

SEQ ID NO: 5854362 - DNA, 25 bp, Homo sapien
ggtcagcagtttgcaaccgtagaaa

SEQ ID NO: 5854363 - DNA, 25 bp, Homo sapien
ggtcagcagtttgcaaccgtagaaa

SEQ ID NO: 5854364 - DNA, 25 bp, Homo sapien
tgcaaccgtagaaaatcgagtttgc

SEQ ID NO: 5854365 - DNA, 25 bp, Homo sapien
gccataaagcacatcgcctgagtct

SEQ ID NO: 5854366 - DNA, 25 bp, Homo sapien
gaaaatcgagtttgcgcctgccata

SEQ ID NO: 5854367 - DNA, 25 bp, Homo sapien
gccataaagcacatcgcctgagtct

SEQ ID NO: 5854368 - DNA, 25 bp, Homo sapien
gaaaatcgagtttgcgcctgccata

SEQ ID NO: 5854369 - DNA, 25 bp, Homo sapien
gaaaggcgcacgtaagaggttggca

SEQ ID NO: 5854370 - DNA, 25 bp, Homo sapien
gaaaggcgcacgtaagaggttggca

SEQ ID NO: 5854371 - DNA, 25 bp, Homo sapien
catttcgatcctcgtcaggtgcagg

SEQ ID NO: 5854372 - DNA, 25 bp, Homo sapien
catttcgatcctcgtcaggtgcagg

SEQ ID NO: 5854373 - DNA, 25 bp, Homo sapien
aagccgagcggttgatggaagttga

SEQ ID NO: 5854374 - DNA, 25 bp, Homo sapien
aagccgagcggttgatggaagttga

SEQ ID NO: 5854375 - DNA, 25 bp, Homo sapien
tcgatcctcgtcaggtgcaggtcag

SEQ ID NO: 5854376 - DNA, 25 bp, Homo sapien
tcgatcctcgtcaggtgcaggtcag

SEQ ID NO: 5854377 - DNA, 25 bp, Homo sapien
tttcgatcctcgtcaggtgcaggtc

SEQ ID NO: 5854378 - DNA, 25 bp, Homo sapien
tttcgatcctcgtcaggtgcaggtc

SEQ ID NO: 5854379 - DNA, 25 bp, Homo sapien
tcgcgctacaaaaccgggctggaag

SEQ ID NO: 5854380 - DNA, 25 bp, Homo sapien
ttcgatcctcgtcaggtgcaggtca

SEQ ID NO: 5854381 - DNA, 25 bp, Homo sapien
ttcgatcctcgtcaggtgcaggtca

SEQ ID NO: 5854382 - DNA, 25 bp, Homo sapien
tcgcgctacaaaaccgggctggaag

SEQ ID NO: 5854383 - DNA, 25 bp, Homo sapien
cgcgctacaaaaccgggctggaagc

SEQ ID NO: 5854384 - DNA, 25 bp, Homo sapien
cgcgctacaaaaccgggctggaagc

SEQ ID NO: 5854385 - DNA, 25 bp, Homo sapien
cggcaggatcgacgcgcttctgtat

SEQ ID NO: 5854386 - DNA, 25 bp, Homo sapien
cggcaggatcgacgcgcttctgtat

SEQ ID NO: 5854387 - DNA, 25 bp, Homo sapien
gagcggttgatggaagttgaacagg

SEQ ID NO: 5854388 - DNA, 25 bp, Homo sapien
gagcggttgatggaagttgaacagg

SEQ ID NO: 5854389 - DNA, 25 bp, Homo sapien
gctggatctgctgtttgaagcgcag

SEQ ID NO: 5854390 - DNA, 25 bp, Homo sapien
gctggatctgctgtttgaagcgcag

SEQ ID NO: 5854391 - DNA, 25 bp, Homo sapien
ctggatctgctgtttgaagcgcagc

SEQ ID NO: 5854392 - DNA, 25 bp, Homo sapien
ctggatctgctgtttgaagcgcagc

SEQ ID NO: 5854393 - DNA, 25 bp, Homo sapien
ctgacctgcacctgacgaggatcga

SEQ ID NO: 5854394 - DNA, 25 bp, Homo sapien
ctgacctgcacctgacgaggatcga

SEQ ID NO: 5854395 - DNA, 25 bp, Homo sapien
tgacctgcacctgacgaggatcgaa

SEQ ID NO: 5854396 - DNA, 25 bp, Homo sapien
tgacctgcacctgacgaggatcgaa

SEQ ID NO: 5854397 - DNA, 25 bp, Homo sapien
cttccagcccggttttgtagcgcga

SEQ ID NO: 5854398 - DNA, 25 bp, Homo sapien
cttccagcccggttttgtagcgcga

SEQ ID NO: 5854399 - DNA, 25 bp, Homo sapien
cctgttcaacttccatcaaccgctc

SEQ ID NO: 5854400 - DNA, 25 bp, Homo sapien
cctgttcaacttccatcaaccgctc

SEQ ID NO: 5854401 - DNA, 25 bp, Homo sapien
gctgcgcttcaaacagcagatccag

SEQ ID NO: 5854402 - DNA, 25 bp, Homo sapien
gctgcgcttcaaacagcagatccag

SEQ ID NO: 5854403 - DNA, 25 bp, Homo sapien
gcttccagcccggttttgtagcgcg

SEQ ID NO: 5854404 - DNA, 25 bp, Homo sapien
gcttccagcccggttttgtagcgcg

SEQ ID NO: 5854405 - DNA, 25 bp, Homo sapien
cctgcacctgacgaggatcgaaatg

SEQ ID NO: 5854406 - DNA, 25 bp, Homo sapien
cctgcacctgacgaggatcgaaatg

SEQ ID NO: 5854407 - DNA, 25 bp, Homo sapien
gacctgcacctgacgaggatcgaaa

SEQ ID NO: 5854408 - DNA, 25 bp, Homo sapien
gacctgcacctgacgaggatcgaaa

SEQ ID NO: 5854409 - DNA, 25 bp, Homo sapien
ctgcgcttcaaacagcagatccagc

SEQ ID NO: 5854410 - DNA, 25 bp, Homo sapien
ctgcgcttcaaacagcagatccagc

SEQ ID NO: 5854411 - DNA, 25 bp, Homo sapien
atacagaagcgcgtcgatcctgccg

SEQ ID NO: 5854412 - DNA, 25 bp, Homo sapien
atacagaagcgcgtcgatcctgccg

SEQ ID NO: 5854413 - DNA, 25 bp, Homo sapien
tcaacttccatcaaccgctcggctt

SEQ ID NO: 5854414 - DNA, 25 bp, Homo sapien
tcaacttccatcaaccgctcggctt

SEQ ID NO: 5854415 - DNA, 25 bp, Homo sapien
cggaaagcgtgccaatcaacatgct

SEQ ID NO: 5854416 - DNA, 25 bp, Homo sapien
cggaaagcgtgccaatcaacatgct

SEQ ID NO: 5854417 - DNA, 25 bp, Homo sapien
aaaagatcgcgccggattattgctg

SEQ ID NO: 5854418 - DNA, 25 bp, Homo sapien
aaaagatcgcgccggattattgctg

SEQ ID NO: 5854419 - DNA, 25 bp, Homo sapien
cgggatcaaagtctgttctggcggc

SEQ ID NO: 5854420 - DNA, 25 bp, Homo sapien
cgggatcaaagtctgttctggcggc

SEQ ID NO: 5854421 - DNA, 25 bp, Homo sapien
tgccgggatcaaagtctgttctggc

SEQ ID NO: 5854422 - DNA, 25 bp, Homo sapien
tgccgggatcaaagtctgttctggc

SEQ ID NO: 5854423 - DNA, 25 bp, Homo sapien
ccgggatcaaagtctgttctggcgg

SEQ ID NO: 5854424 - DNA, 25 bp, Homo sapien
ccgggatcaaagtctgttctggcgg

SEQ ID NO: 5854425 - DNA, 25 bp, Homo sapien
ccggattattgctgcaactggcaaa

SEQ ID NO: 5854426 - DNA, 25 bp, Homo sapien
agatcgcgccggattattgctgcaa

SEQ ID NO: 5854427 - DNA, 25 bp, Homo sapien
ccggattattgctgcaactggcaaa

SEQ ID NO: 5854428 - DNA, 25 bp, Homo sapien
agatcgcgccggattattgctgcaa

SEQ ID NO: 5854429 - DNA, 25 bp, Homo sapien
cacgcacttatcaggaacgcctcga

SEQ ID NO: 5854430 - DNA, 25 bp, Homo sapien
cacgcacttatcaggaacgcctcga

SEQ ID NO: 5854431 - DNA, 25 bp, Homo sapien
gctgggcacgttgagtgaatctcag

SEQ ID NO: 5854432 - DNA, 25 bp, Homo sapien
gctgggcacgttgagtgaatctcag

SEQ ID NO: 5854433 - DNA, 25 bp, Homo sapien
tgtatgacgctgggcacgttgagtg

SEQ ID NO: 5854434 - DNA, 25 bp, Homo sapien
tgtatgacgctgggcacgttgagtg

SEQ ID NO: 5854435 - DNA, 25 bp, Homo sapien
gcattgtgggcttaggcgaaacggt

SEQ ID NO: 5854436 - DNA, 25 bp, Homo sapien
gcattgtgggcttaggcgaaacggt

SEQ ID NO: 5854437 - DNA, 25 bp, Homo sapien
tttgccagttgcagcaataatccgg

SEQ ID NO: 5854438 - DNA, 25 bp, Homo sapien
tttgccagttgcagcaataatccgg

SEQ ID NO: 5854439 - DNA, 25 bp, Homo sapien
ccgccagaacagactttgatcccgg

SEQ ID NO: 5854440 - DNA, 25 bp, Homo sapien
ccgccagaacagactttgatcccgg

SEQ ID NO: 5854441 - DNA, 25 bp, Homo sapien
agcatgttgattggcacgctttccg

SEQ ID NO: 5854442 - DNA, 25 bp, Homo sapien
agcatgttgattggcacgctttccg

SEQ ID NO: 5854443 - DNA, 25 bp, Homo sapien
gccagaacagactttgatcccggca

SEQ ID NO: 5854444 - DNA, 25 bp, Homo sapien
gccagaacagactttgatcccggca

SEQ ID NO: 5854445 - DNA, 25 bp, Homo sapien
ctgagattcactcaacgtgcccagc

SEQ ID NO: 5854446 - DNA, 25 bp, Homo sapien
ctgagattcactcaacgtgcccagc

SEQ ID NO: 5854447 - DNA, 25 bp, Homo sapien
cactcaacgtgcccagcgtcataca

SEQ ID NO: 5854448 - DNA, 25 bp, Homo sapien
cactcaacgtgcccagcgtcataca

SEQ ID NO: 5854449 - DNA, 25 bp, Homo sapien
ttgcagcaataatccggcgcgatct

SEQ ID NO: 5854450 - DNA, 25 bp, Homo sapien
ttgcagcaataatccggcgcgatct

SEQ ID NO: 5854451 - DNA, 25 bp, Homo sapien
gccgccagaacagactttgatcccg

SEQ ID NO: 5854452 - DNA, 25 bp, Homo sapien
gccgccagaacagactttgatcccg

SEQ ID NO: 5854453 - DNA, 25 bp, Homo sapien
cagcaataatccggcgcgatctttt

SEQ ID NO: 5854454 - DNA, 25 bp, Homo sapien
cagcaataatccggcgcgatctttt

SEQ ID NO: 5854455 - DNA, 25 bp, Homo sapien
accgtttcgcctaagcccacaatgc

SEQ ID NO: 5854456 - DNA, 25 bp, Homo sapien
accgtttcgcctaagcccacaatgc

SEQ ID NO: 5854457 - DNA, 25 bp, Homo sapien
tcgaggcgttcctgataagtgcgtg

SEQ ID NO: 5854458 - DNA, 25 bp, Homo sapien
tcgaggcgttcctgataagtgcgtg

SEQ ID NO: 5854459 - DNA, 25 bp, Homo sapien
gaacggcgtgcattatcaacatcat

SEQ ID NO: 5854460 - DNA, 25 bp, Homo sapien
atcaacatcatattcagcccatcac

SEQ ID NO: 5854461 - DNA, 25 bp, Homo sapien
atcaacatcatattcagcccatcac

SEQ ID NO: 5854462 - DNA, 25 bp, Homo sapien
accgccagatgaaatcgaacagtcg

SEQ ID NO: 5854463 - DNA, 25 bp, Homo sapien
accgccagatgaaatcgaacagtcg

SEQ ID NO: 5854464 - DNA, 25 bp, Homo sapien
tcatattcagcccatcacgctgtgg

SEQ ID NO: 5854465 - DNA, 25 bp, Homo sapien
tcatattcagcccatcacgctgtgg

SEQ ID NO: 5854466 - DNA, 25 bp, Homo sapien
cgctggtgcagggatcgttacccga

SEQ ID NO: 5854467 - DNA, 25 bp, Homo sapien
cggtgccacgcatcttcatgaaggg

SEQ ID NO: 5854468 - DNA, 25 bp, Homo sapien
cggtgccacgcatcttcatgaaggg

SEQ ID NO: 5854469 - DNA, 25 bp, Homo sapien
agtgccatgcgttcgctgaaaggca

SEQ ID NO: 5854470 - DNA, 25 bp, Homo sapien
agtgccatgcgttcgctgaaaggca

SEQ ID NO: 5854471 - DNA, 25 bp, Homo sapien
gtggacgagcgtccgcatgctaatc

SEQ ID NO: 5854472 - DNA, 25 bp, Homo sapien
gtggacgagcgtccgcatgctaatc

SEQ ID NO: 5854473 - DNA, 25 bp, Homo sapien
gaacggcgtgcattatcaacatcat

SEQ ID NO: 5854474 - DNA, 25 bp, Homo sapien
cagcgattgcaactggcctggccgc

SEQ ID NO: 5854475 - DNA, 25 bp, Homo sapien
cagcgattgcaactggcctggccgc

SEQ ID NO: 5854476 - DNA, 25 bp, Homo sapien
tattaacgcgttcgcagttgcagcg

SEQ ID NO: 5854477 - DNA, 25 bp, Homo sapien
tattaacgcgttcgcagttgcagcg

SEQ ID NO: 5854478 - DNA, 25 bp, Homo sapien
cgctggtgcagggatcgttacccga

SEQ ID NO: 5854479 - DNA, 25 bp, Homo sapien
cacgctgtggtttgatgatgcgctc

SEQ ID NO: 5854480 - DNA, 25 bp, Homo sapien
cacgctgtggtttgatgatgcgctc

SEQ ID NO: 5854481 - DNA, 25 bp, Homo sapien
ccacagcgtgatgggctgaatatga

SEQ ID NO: 5854482 - DNA, 25 bp, Homo sapien
ccacagcgtgatgggctgaatatga

SEQ ID NO: 5854483 - DNA, 25 bp, Homo sapien
gagcgcatcatcaaaccacagcgtg

SEQ ID NO: 5854484 - DNA, 25 bp, Homo sapien
gagcgcatcatcaaaccacagcgtg

SEQ ID NO: 5854485 - DNA, 25 bp, Homo sapien
gattagcatgcggacgctcgtccac

SEQ ID NO: 5854486 - DNA, 25 bp, Homo sapien
gattagcatgcggacgctcgtccac

SEQ ID NO: 5854487 - DNA, 25 bp, Homo sapien
cgactgttcgatttcatctggcggt

SEQ ID NO: 5854488 - DNA, 25 bp, Homo sapien
cgactgttcgatttcatctggcggt

SEQ ID NO: 5854489 - DNA, 25 bp, Homo sapien
atgatgttgataatgcacgccgttc

SEQ ID NO: 5854490 - DNA, 25 bp, Homo sapien
atgatgttgataatgcacgccgttc

SEQ ID NO: 5854491 - DNA, 25 bp, Homo sapien
gcggccaggccagttgcaatcgctg

SEQ ID NO: 5854492 - DNA, 25 bp, Homo sapien
gcggccaggccagttgcaatcgctg

SEQ ID NO: 5854493 - DNA, 25 bp, Homo sapien
cccttcatgaagatgcgtggcaccg

SEQ ID NO: 5854494 - DNA, 25 bp, Homo sapien
cccttcatgaagatgcgtggcaccg

SEQ ID NO: 5854495 - DNA, 25 bp, Homo sapien
tcgggtaacgatccctgcaccagcg

SEQ ID NO: 5854496 - DNA, 25 bp, Homo sapien
tcgggtaacgatccctgcaccagcg

SEQ ID NO: 5854497 - DNA, 25 bp, Homo sapien
tgcctttcagcgaacgcatggcact

SEQ ID NO: 5854498 - DNA, 25 bp, Homo sapien
tgcctttcagcgaacgcatggcact

SEQ ID NO: 5854499 - DNA, 25 bp, Homo sapien
gtgatgggctgaatatgatgttgat

SEQ ID NO: 5854500 - DNA, 25 bp, Homo sapien
gtgatgggctgaatatgatgttgat

SEQ ID NO: 5854501 - DNA, 25 bp, Homo sapien
cgctgcaactgcgaacgcgttaata

SEQ ID NO: 5854502 - DNA, 25 bp, Homo sapien
cgctgcaactgcgaacgcgttaata

SEQ ID NO: 5854503 - DNA, 25 bp, Homo sapien
atggagcaatctcgcagtgcagtgg

SEQ ID NO: 5854504 - DNA, 25 bp, Homo sapien
cacggcactccgcgagctgtatcgg

SEQ ID NO: 5854505 - DNA, 25 bp, Homo sapien
cacggcactccgcgagctgtatcgg

SEQ ID NO: 5854506 - DNA, 25 bp, Homo sapien
acgttcgatcttgcatggagcaatc

SEQ ID NO: 5854507 - DNA, 25 bp, Homo sapien
acgttcgatcttgcatggagcaatc

SEQ ID NO: 5854508 - DNA, 25 bp, Homo sapien
acgcgggttgtggacctggctggat

SEQ ID NO: 5854509 - DNA, 25 bp, Homo sapien
acgcgggttgtggacctggctggat

SEQ ID NO: 5854510 - DNA, 25 bp, Homo sapien
cgccgccaatgcttgttcaggcacg

SEQ ID NO: 5854511 - DNA, 25 bp, Homo sapien
cgccgccaatgcttgttcaggcacg

SEQ ID NO: 5854512 - DNA, 25 bp, Homo sapien
aggatgccgcagaccattatctggc

SEQ ID NO: 5854513 - DNA, 25 bp, Homo sapien
ctgccgttagcgactgcgacgttcg

SEQ ID NO: 5854514 - DNA, 25 bp, Homo sapien
atgcagatctacagcgccagagtgc

SEQ ID NO: 5854515 - DNA, 25 bp, Homo sapien
ctgccgttagcgactgcgacgttcg

SEQ ID NO: 5854516 - DNA, 25 bp, Homo sapien
atgcagatctacagcgccagagtgc

SEQ ID NO: 5854517 - DNA, 25 bp, Homo sapien
aggatgccgcagaccattatctggc

SEQ ID NO: 5854518 - DNA, 25 bp, Homo sapien
gcatggagcaatctcgcagtgcagt

SEQ ID NO: 5854519 - DNA, 25 bp, Homo sapien
gcatggagcaatctcgcagtgcagt

SEQ ID NO: 5854520 - DNA, 25 bp, Homo sapien
gtaaatacacccacgtactggacgc

SEQ ID NO: 5854521 - DNA, 25 bp, Homo sapien
gtaaatacacccacgtactggacgc

SEQ ID NO: 5854522 - DNA, 25 bp, Homo sapien
ccagaaggatgccgcagaccattat

SEQ ID NO: 5854523 - DNA, 25 bp, Homo sapien
ccagaaggatgccgcagaccattat

SEQ ID NO: 5854524 - DNA, 25 bp, Homo sapien
atggagcaatctcgcagtgcagtgg

SEQ ID NO: 5854525 - DNA, 25 bp, Homo sapien
atccagccaggtccacaacccgcgt

SEQ ID NO: 5854526 - DNA, 25 bp, Homo sapien
atccagccaggtccacaacccgcgt

SEQ ID NO: 5854527 - DNA, 25 bp, Homo sapien
gcgtccagtacgtgggtgtatttac

SEQ ID NO: 5854528 - DNA, 25 bp, Homo sapien
gcgtccagtacgtgggtgtatttac

SEQ ID NO: 5854529 - DNA, 25 bp, Homo sapien
cgaacgtcgcagtcgctaacggcag

SEQ ID NO: 5854530 - DNA, 25 bp, Homo sapien
cgaacgtcgcagtcgctaacggcag

SEQ ID NO: 5854531 - DNA, 25 bp, Homo sapien
ataatggtctgcggcatccttctgg

SEQ ID NO: 5854532 - DNA, 25 bp, Homo sapien
ataatggtctgcggcatccttctgg

SEQ ID NO: 5854533 - DNA, 25 bp, Homo sapien
ccgatacagctcgcggagtgccgtg

SEQ ID NO: 5854534 - DNA, 25 bp, Homo sapien
gccagataatggtctgcggcatcct

SEQ ID NO: 5854535 - DNA, 25 bp, Homo sapien
gccagataatggtctgcggcatcct

SEQ ID NO: 5854536 - DNA, 25 bp, Homo sapien
ccgatacagctcgcggagtgccgtg

SEQ ID NO: 5854537 - DNA, 25 bp, Homo sapien
gcactctggcgctgtagatctgcat

SEQ ID NO: 5854538 - DNA, 25 bp, Homo sapien
gcactctggcgctgtagatctgcat

SEQ ID NO: 5854539 - DNA, 25 bp, Homo sapien
gattgctccatgcaagatcgaacgt

SEQ ID NO: 5854540 - DNA, 25 bp, Homo sapien
gattgctccatgcaagatcgaacgt

SEQ ID NO: 5854541 - DNA, 25 bp, Homo sapien
actgcactgcgagattgctccatgc

SEQ ID NO: 5854542 - DNA, 25 bp, Homo sapien
actgcactgcgagattgctccatgc

SEQ ID NO: 5854543 - DNA, 25 bp, Homo sapien
ccactgcactgcgagattgctccat

SEQ ID NO: 5854544 - DNA, 25 bp, Homo sapien
ccactgcactgcgagattgctccat

SEQ ID NO: 5854545 - DNA, 25 bp, Homo sapien
cgtgcctgaacaagcattggcggcg

SEQ ID NO: 5854546 - DNA, 25 bp, Homo sapien
cgtgcctgaacaagcattggcggcg

SEQ ID NO: 5854547 - DNA, 25 bp, Homo sapien
tgctgggagagatcccctggcttgc

SEQ ID NO: 5854548 - DNA, 25 bp, Homo sapien
tgctgggagagatcccctggcttgc

SEQ ID NO: 5854549 - DNA, 25 bp, Homo sapien
aactcggctgtattaatcacgcgat

SEQ ID NO: 5854550 - DNA, 25 bp, Homo sapien
ttctgacactttcacttttgcagat

SEQ ID NO: 5854551 - DNA, 25 bp, Homo sapien
aactcggctgtattaatcacgcgat

SEQ ID NO: 5854552 - DNA, 25 bp, Homo sapien
ttctgacactttcacttttgcagat

SEQ ID NO: 5854553 - DNA, 25 bp, Homo sapien
tgacactttcacttttgcagattgg

SEQ ID NO: 5854554 - DNA, 25 bp, Homo sapien
tgacactttcacttttgcagattgg

SEQ ID NO: 5854555 - DNA, 25 bp, Homo sapien
acttttgcagattgggtaacacagg

SEQ ID NO: 5854556 - DNA, 25 bp, Homo sapien
acttttgcagattgggtaacacagg

SEQ ID NO: 5854557 - DNA, 25 bp, Homo sapien
aacaactgccggtgatactggtagt

SEQ ID NO: 5854558 - DNA, 25 bp, Homo sapien
aacaactgccggtgatactggtagt

SEQ ID NO: 5854559 - DNA, 25 bp, Homo sapien
gccggtgatactggtagttggtgtg

SEQ ID NO: 5854560 - DNA, 25 bp, Homo sapien
gccggtgatactggtagttggtgtg

SEQ ID NO: 5854561 - DNA, 25 bp, Homo sapien
gtcacgctgaatatatgaccacgct

SEQ ID NO: 5854562 - DNA, 25 bp, Homo sapien
gtcacgctgaatatatgaccacgct

SEQ ID NO: 5854563 - DNA, 25 bp, Homo sapien
cacaggtaatacaacacgccggact

SEQ ID NO: 5854564 - DNA, 25 bp, Homo sapien
tcacgctgaatatatgaccacgctc

SEQ ID NO: 5854565 - DNA, 25 bp, Homo sapien
cacaggtaatacaacacgccggact

SEQ ID NO: 5854566 - DNA, 25 bp, Homo sapien
tcacgctgaatatatgaccacgctc

SEQ ID NO: 5854567 - DNA, 25 bp, Homo sapien
acaacacgccggactgactctggcg

SEQ ID NO: 5854568 - DNA, 25 bp, Homo sapien
acaacacgccggactgactctggcg

SEQ ID NO: 5854569 - DNA, 25 bp, Homo sapien
atctgcaaaagtgaaagtgtcagaa

SEQ ID NO: 5854570 - DNA, 25 bp, Homo sapien
atctgcaaaagtgaaagtgtcagaa

SEQ ID NO: 5854571 - DNA, 25 bp, Homo sapien
agcgtggtcatatattcagcgtgac

SEQ ID NO: 5854572 - DNA, 25 bp, Homo sapien
agcgtggtcatatattcagcgtgac

SEQ ID NO: 5854573 - DNA, 25 bp, Homo sapien
gagcgtggtcatatattcagcgtga

SEQ ID NO: 5854574 - DNA, 25 bp, Homo sapien
gagcgtggtcatatattcagcgtga

SEQ ID NO: 5854575 - DNA, 25 bp, Homo sapien
cctgtgttacccaatctgcaaaagt

SEQ ID NO: 5854576 - DNA, 25 bp, Homo sapien
cctgtgttacccaatctgcaaaagt

SEQ ID NO: 5854577 - DNA, 25 bp, Homo sapien
agtccggcgtgttgtattacctgtg

SEQ ID NO: 5854578 - DNA, 25 bp, Homo sapien
agtccggcgtgttgtattacctgtg

SEQ ID NO: 5854579 - DNA, 25 bp, Homo sapien
ccaatctgcaaaagtgaaagtgtca

SEQ ID NO: 5854580 - DNA, 25 bp, Homo sapien
ccaatctgcaaaagtgaaagtgtca

SEQ ID NO: 5854581 - DNA, 25 bp, Homo sapien
cacaccaactaccagtatcaccggc

SEQ ID NO: 5854582 - DNA, 25 bp, Homo sapien
cacaccaactaccagtatcaccggc

SEQ ID NO: 5854583 - DNA, 25 bp, Homo sapien
gcaagccaggggatctctcccagca

SEQ ID NO: 5854584 - DNA, 25 bp, Homo sapien
gcaagccaggggatctctcccagca

SEQ ID NO: 5854585 - DNA, 25 bp, Homo sapien
atcgcgtgattaatacagccgagtt

SEQ ID NO: 5854586 - DNA, 25 bp, Homo sapien
atcgcgtgattaatacagccgagtt

SEQ ID NO: 5854587 - DNA, 25 bp, Homo sapien
actaccagtatcaccggcagttgtt

SEQ ID NO: 5854588 - DNA, 25 bp, Homo sapien
actaccagtatcaccggcagttgtt

SEQ ID NO: 5854589 - DNA, 25 bp, Homo sapien
cgccagagtcagtccggcgtgttgt

SEQ ID NO: 5854590 - DNA, 25 bp, Homo sapien
cgccagagtcagtccggcgtgttgt

SEQ ID NO: 5854591 - DNA, 25 bp, Homo sapien
acgcaacagtaaatccttacacctt

SEQ ID NO: 5854592 - DNA, 25 bp, Homo sapien
acgcaacagtaaatccttacacctt

SEQ ID NO: 5854593 - DNA, 25 bp, Homo sapien
gggcagaccgatagaatcattggta

SEQ ID NO: 5854594 - DNA, 25 bp, Homo sapien
cgcaacagtaaatccttacaccttc

SEQ ID NO: 5854595 - DNA, 25 bp, Homo sapien
gggcagaccgatagaatcattggta

SEQ ID NO: 5854596 - DNA, 25 bp, Homo sapien
cgcaacagtaaatccttacaccttc

SEQ ID NO: 5854597 - DNA, 25 bp, Homo sapien
cttacaccttcgcagaacccacttc

SEQ ID NO: 5854598 - DNA, 25 bp, Homo sapien
cctctggcagcgaaaagaccccgga

SEQ ID NO: 5854599 - DNA, 25 bp, Homo sapien
cttacaccttcgcagaacccacttc

SEQ ID NO: 5854600 - DNA, 25 bp, Homo sapien
cctctggcagcgaaaagaccccgga

SEQ ID NO: 5854601 - DNA, 25 bp, Homo sapien
gcagcaggctaccggacggcaggtt

SEQ ID NO: 5854602 - DNA, 25 bp, Homo sapien
gcagcaggctaccggacggcaggtt

SEQ ID NO: 5854603 - DNA, 25 bp, Homo sapien
ctggcagcgaaaagaccccggaagg

SEQ ID NO: 5854604 - DNA, 25 bp, Homo sapien
ctggcagcgaaaagaccccggaagg

SEQ ID NO: 5854605 - DNA, 25 bp, Homo sapien
gaatcattggtaatgagcgccggat

SEQ ID NO: 5854606 - DNA, 25 bp, Homo sapien
gaatcattggtaatgagcgccggat

SEQ ID NO: 5854607 - DNA, 25 bp, Homo sapien
cctgcagctggattacgcaacagta

SEQ ID NO: 5854608 - DNA, 25 bp, Homo sapien
cctgcagctggattacgcaacagta

SEQ ID NO: 5854609 - DNA, 25 bp, Homo sapien
gtaaatccttacaccttcgcagaac

SEQ ID NO: 5854610 - DNA, 25 bp, Homo sapien
gtaaatccttacaccttcgcagaac

SEQ ID NO: 5854611 - DNA, 25 bp, Homo sapien
agcctgcagctggattacgcaacag

SEQ ID NO: 5854612 - DNA, 25 bp, Homo sapien
agcctgcagctggattacgcaacag

SEQ ID NO: 5854613 - DNA, 25 bp, Homo sapien
gaaggtgtaaggatttactgttgcg

SEQ ID NO: 5854614 - DNA, 25 bp, Homo sapien
gttctgcgaaggtgtaaggatttac

SEQ ID NO: 5854615 - DNA, 25 bp, Homo sapien
gaaggtgtaaggatttactgttgcg

SEQ ID NO: 5854616 - DNA, 25 bp, Homo sapien
gttctgcgaaggtgtaaggatttac

SEQ ID NO: 5854617 - DNA, 25 bp, Homo sapien
aaggtgtaaggatttactgttgcgt

SEQ ID NO: 5854618 - DNA, 25 bp, Homo sapien
aaggtgtaaggatttactgttgcgt

SEQ ID NO: 5854619 - DNA, 25 bp, Homo sapien
aacctgccgtccggtagcctgctgc

SEQ ID NO: 5854620 - DNA, 25 bp, Homo sapien
aacctgccgtccggtagcctgctgc

SEQ ID NO: 5854621 - DNA, 25 bp, Homo sapien
ccttccggggtcttttcgctgccag

SEQ ID NO: 5854622 - DNA, 25 bp, Homo sapien
ccttccggggtcttttcgctgccag

SEQ ID NO: 5854623 - DNA, 25 bp, Homo sapien
tccggggtcttttcgctgccagagg

SEQ ID NO: 5854624 - DNA, 25 bp, Homo sapien
taccaatgattctatcggtctgccc

SEQ ID NO: 5854625 - DNA, 25 bp, Homo sapien
atccggcgctcattaccaatgattc

SEQ ID NO: 5854626 - DNA, 25 bp, Homo sapien
taccaatgattctatcggtctgccc

SEQ ID NO: 5854627 - DNA, 25 bp, Homo sapien
atccggcgctcattaccaatgattc

SEQ ID NO: 5854628 - DNA, 25 bp, Homo sapien
ctgttgcgtaatccagctgcaggct

SEQ ID NO: 5854629 - DNA, 25 bp, Homo sapien
ctgttgcgtaatccagctgcaggct

SEQ ID NO: 5854630 - DNA, 25 bp, Homo sapien
tccggggtcttttcgctgccagagg

SEQ ID NO: 5854631 - DNA, 25 bp, Homo sapien
gaagtgggttctgcgaaggtgtaag

SEQ ID NO: 5854632 - DNA, 25 bp, Homo sapien
gaagtgggttctgcgaaggtgtaag

SEQ ID NO: 5854633 - DNA, 25 bp, Homo sapien
tactgttgcgtaatccagctgcagg

SEQ ID NO: 5854634 - DNA, 25 bp, Homo sapien
tactgttgcgtaatccagctgcagg

SEQ ID NO: 5854635 - DNA, 25 bp, Homo sapien
gttaatccatattggcagaacgaaa

SEQ ID NO: 5854636 - DNA, 25 bp, Homo sapien
gttaatccatattggcagaacgaaa

SEQ ID NO: 5854637 - DNA, 25 bp, Homo sapien
aagatatctcacgtactgacggtgg

SEQ ID NO: 5854638 - DNA, 25 bp, Homo sapien
aagatatctcacgtactgacggtgg

SEQ ID NO: 5854639 - DNA, 25 bp, Homo sapien
cgctggttagcaccgcaggtgtaga

SEQ ID NO: 5854640 - DNA, 25 bp, Homo sapien
cgctggttagcaccgcaggtgtaga

SEQ ID NO: 5854641 - DNA, 25 bp, Homo sapien
aacgaaaacgctggttagcaccgca

SEQ ID NO: 5854642 - DNA, 25 bp, Homo sapien
aacgaaaacgctggttagcaccgca

SEQ ID NO: 5854643 - DNA, 25 bp, Homo sapien
ggtcgagcgatggatttccgtctct

SEQ ID NO: 5854644 - DNA, 25 bp, Homo sapien
ggtcgagcgatggatttccgtctct

SEQ ID NO: 5854645 - DNA, 25 bp, Homo sapien
aaaaaatggtgttgccgcgccatct

SEQ ID NO: 5854646 - DNA, 25 bp, Homo sapien
aaaaaatggtgttgccgcgccatct

SEQ ID NO: 5854647 - DNA, 25 bp, Homo sapien
tagctgatgatccgaataactacct

SEQ ID NO: 5854648 - DNA, 25 bp, Homo sapien
tagctgatgatccgaataactacct

SEQ ID NO: 5854649 - DNA, 25 bp, Homo sapien
ctgttttgccgggtcagaaaaaatg

SEQ ID NO: 5854650 - DNA, 25 bp, Homo sapien
ctgttttgccgggtcagaaaaaatg

SEQ ID NO: 5854651 - DNA, 25 bp, Homo sapien
atgatccgaataactacctgttttg

SEQ ID NO: 5854652 - DNA, 25 bp, Homo sapien
ccagctatcaactcgcgccctggaa

SEQ ID NO: 5854653 - DNA, 25 bp, Homo sapien
atgatccgaataactacctgttttg

SEQ ID NO: 5854654 - DNA, 25 bp, Homo sapien
ccagctatcaactcgcgccctggaa

SEQ ID NO: 5854655 - DNA, 25 bp, Homo sapien
ataactacctgttttgccgggtcag

SEQ ID NO: 5854656 - DNA, 25 bp, Homo sapien
ataactacctgttttgccgggtcag

SEQ ID NO: 5854657 - DNA, 25 bp, Homo sapien
tctacacctgcggtgctaaccagcg

SEQ ID NO: 5854658 - DNA, 25 bp, Homo sapien
ctgacccggcaaaacaggtagttat

SEQ ID NO: 5854659 - DNA, 25 bp, Homo sapien
ctgacccggcaaaacaggtagttat

SEQ ID NO: 5854660 - DNA, 25 bp, Homo sapien
cattttttctgacccggcaaaacag

SEQ ID NO: 5854661 - DNA, 25 bp, Homo sapien
cattttttctgacccggcaaaacag

SEQ ID NO: 5854662 - DNA, 25 bp, Homo sapien
tgcggtgctaaccagcgttttcgtt

SEQ ID NO: 5854663 - DNA, 25 bp, Homo sapien
tgcggtgctaaccagcgttttcgtt

SEQ ID NO: 5854664 - DNA, 25 bp, Homo sapien
tttcgttctgccaatatggattaac

SEQ ID NO: 5854665 - DNA, 25 bp, Homo sapien
tttcgttctgccaatatggattaac

SEQ ID NO: 5854666 - DNA, 25 bp, Homo sapien
ttccagggcgcgagttgatagctgg

SEQ ID NO: 5854667 - DNA, 25 bp, Homo sapien
caaaacaggtagttattcggatcat

SEQ ID NO: 5854668 - DNA, 25 bp, Homo sapien
caaaacaggtagttattcggatcat

SEQ ID NO: 5854669 - DNA, 25 bp, Homo sapien
ttccagggcgcgagttgatagctgg

SEQ ID NO: 5854670 - DNA, 25 bp, Homo sapien
ccaccgtcagtacgtgagatatctt

SEQ ID NO: 5854671 - DNA, 25 bp, Homo sapien
aggtagttattcggatcatcagcta

SEQ ID NO: 5854672 - DNA, 25 bp, Homo sapien
aggtagttattcggatcatcagcta

SEQ ID NO: 5854673 - DNA, 25 bp, Homo sapien
ccaccgtcagtacgtgagatatctt

SEQ ID NO: 5854674 - DNA, 25 bp, Homo sapien
agatggcgcggcaacaccatttttt

SEQ ID NO: 5854675 - DNA, 25 bp, Homo sapien
agatggcgcggcaacaccatttttt

SEQ ID NO: 5854676 - DNA, 25 bp, Homo sapien
agagacggaaatccatcgctcgacc

SEQ ID NO: 5854677 - DNA, 25 bp, Homo sapien
agagacggaaatccatcgctcgacc

SEQ ID NO: 5854678 - DNA, 25 bp, Homo sapien
tctacacctgcggtgctaaccagcg

SEQ ID NO: 5854679 - DNA, 25 bp, Homo sapien
gatgttcgcgattatcttctatatc

SEQ ID NO: 5854680 - DNA, 25 bp, Homo sapien
gatgttcgcgattatcttctatatc

SEQ ID NO: 5854681 - DNA, 25 bp, Homo sapien
gggattgcttataacaccctgttac

SEQ ID NO: 5854682 - DNA, 25 bp, Homo sapien
gggattgcttataacaccctgttac

SEQ ID NO: 5854683 - DNA, 25 bp, Homo sapien
tctgtccgtttgccggtcgtgggcg

SEQ ID NO: 5854684 - DNA, 25 bp, Homo sapien
tctgtccgtttgccggtcgtgggcg

SEQ ID NO: 5854685 - DNA, 25 bp, Homo sapien
gcaaaacaggctctagcgttcgaac

SEQ ID NO: 5854686 - DNA, 25 bp, Homo sapien
gcaaaacaggctctagcgttcgaac

SEQ ID NO: 5854687 - DNA, 25 bp, Homo sapien
gatcgccaggcgttttctgagcata

SEQ ID NO: 5854688 - DNA, 25 bp, Homo sapien
gatcgccaggcgttttctgagcata

SEQ ID NO: 5854689 - DNA, 25 bp, Homo sapien
cggaaatggtttcccgcagaacctg

SEQ ID NO: 5854690 - DNA, 25 bp, Homo sapien
cggaaatggtttcccgcagaacctg

SEQ ID NO: 5854691 - DNA, 25 bp, Homo sapien
gcactgatttcgaccaggttcgttc

SEQ ID NO: 5854692 - DNA, 25 bp, Homo sapien
gcactgatttcgaccaggttcgttc

SEQ ID NO: 5854693 - DNA, 25 bp, Homo sapien
gccggtgaacgtgcaaaacaggctc

SEQ ID NO: 5854694 - DNA, 25 bp, Homo sapien
gctgtttcactggttatgcggcgga

SEQ ID NO: 5854695 - DNA, 25 bp, Homo sapien
gctgtttcactggttatgcggcgga

SEQ ID NO: 5854696 - DNA, 25 bp, Homo sapien
gccggtgaacgtgcaaaacaggctc

SEQ ID NO: 5854697 - DNA, 25 bp, Homo sapien
ttgggccagctaaacatgcttcatc

SEQ ID NO: 5854698 - DNA, 25 bp, Homo sapien
ttgggccagctaaacatgcttcatc

SEQ ID NO: 5854699 - DNA, 25 bp, Homo sapien
atcgctgccaggatatacgtaatct

SEQ ID NO: 5854700 - DNA, 25 bp, Homo sapien
atcgctgccaggatatacgtaatct

SEQ ID NO: 5854701 - DNA, 25 bp, Homo sapien
tccgccgcataaccagtgaaacagc

SEQ ID NO: 5854702 - DNA, 25 bp, Homo sapien
gatgaagcatgtttagctggcccaa

SEQ ID NO: 5854703 - DNA, 25 bp, Homo sapien
gatgaagcatgtttagctggcccaa

SEQ ID NO: 5854704 - DNA, 25 bp, Homo sapien
agattacgtatatcctggcagcgat

SEQ ID NO: 5854705 - DNA, 25 bp, Homo sapien
agattacgtatatcctggcagcgat

SEQ ID NO: 5854706 - DNA, 25 bp, Homo sapien
gtaacagggtgttataagcaatccc

SEQ ID NO: 5854707 - DNA, 25 bp, Homo sapien
gtaacagggtgttataagcaatccc

SEQ ID NO: 5854708 - DNA, 25 bp, Homo sapien
tatgctcagaaaacgcctggcgatc

SEQ ID NO: 5854709 - DNA, 25 bp, Homo sapien
tatgctcagaaaacgcctggcgatc

SEQ ID NO: 5854710 - DNA, 25 bp, Homo sapien
caggttctgcgggaaaccatttccg

SEQ ID NO: 5854711 - DNA, 25 bp, Homo sapien
caggttctgcgggaaaccatttccg

SEQ ID NO: 5854712 - DNA, 25 bp, Homo sapien
gatatagaagataatcgcgaacatc

SEQ ID NO: 5854713 - DNA, 25 bp, Homo sapien
gatatagaagataatcgcgaacatc

SEQ ID NO: 5854714 - DNA, 25 bp, Homo sapien
gttcgaacgctagagcctgttttgc

SEQ ID NO: 5854715 - DNA, 25 bp, Homo sapien
gagcctgttttgcacgttcaccggc

SEQ ID NO: 5854716 - DNA, 25 bp, Homo sapien
gttcgaacgctagagcctgttttgc

SEQ ID NO: 5854717 - DNA, 25 bp, Homo sapien
gagcctgttttgcacgttcaccggc

SEQ ID NO: 5854718 - DNA, 25 bp, Homo sapien
tccgccgcataaccagtgaaacagc

SEQ ID NO: 5854719 - DNA, 25 bp, Homo sapien
gaacgaacctggtcgaaatcagtgc

SEQ ID NO: 5854720 - DNA, 25 bp, Homo sapien
gaacgaacctggtcgaaatcagtgc

SEQ ID NO: 5854721 - DNA, 25 bp, Homo sapien
cgcccacgaccggcaaacggacaga

SEQ ID NO: 5854722 - DNA, 25 bp, Homo sapien
cgcccacgaccggcaaacggacaga

SEQ ID NO: 5854723 - DNA, 25 bp, Homo sapien
ttcaagtaccttagctcgtcggacg

SEQ ID NO: 5854724 - DNA, 25 bp, Homo sapien
taatctcagaatccgtacagccgca

SEQ ID NO: 5854725 - DNA, 25 bp, Homo sapien
tctctctaggagcggcttcgcacaa

SEQ ID NO: 5854726 - DNA, 25 bp, Homo sapien
gcgccggttaagccgctattagcgt

SEQ ID NO: 5854727 - DNA, 25 bp, Homo sapien
gctcaatcctagatacgttgcgctc

SEQ ID NO: 5854728 - DNA, 25 bp, Homo sapien
gggtcggctcaacagtgtatccggt

SEQ ID NO: 5854729 - DNA, 25 bp, Homo sapien
acgatggcaagtcgtgcctcgttct

SEQ ID NO: 5854730 - DNA, 25 bp, Homo sapien
gtatcgcttcgcgtgtcatgacttg

SEQ ID NO: 5854731 - DNA, 25 bp, Homo sapien
gttgcgctctttggtaaacggctca

SEQ ID NO: 5854732 - DNA, 25 bp, Homo sapien
gcactgacacgcgatgacgttcgtc

SEQ ID NO: 5854733 - DNA, 25 bp, Homo sapien
ggctcagatcttagcactcgtgcag

SEQ ID NO: 5854734 - DNA, 25 bp, Homo sapien
cgtccgacgagctaaggtacttgaa

SEQ ID NO: 5854735 - DNA, 25 bp, Homo sapien
gagcgcaacgtatctaggattgagc

SEQ ID NO: 5854736 - DNA, 25 bp, Homo sapien
accggatacactgttgagccgaccc

SEQ ID NO: 5854737 - DNA, 25 bp, Homo sapien
agaacgaggcacgacttgccatcgt

SEQ ID NO: 5854738 - DNA, 25 bp, Homo sapien
gacgaacgtcatcgcgtgtcagtgc

SEQ ID NO: 5854739 - DNA, 25 bp, Homo sapien
ttgtgcgaagccgctcctagagaga

SEQ ID NO: 5854740 - DNA, 25 bp, Homo sapien
acgctaatagcggcttaaccggcgc

SEQ ID NO: 5854741 - DNA, 25 bp, Homo sapien
caagtcatgacacgcgaagcgatac

SEQ ID NO: 5854742 - DNA, 25 bp, Homo sapien
tgcggctgtacggattctgagatta

SEQ ID NO: 5854743 - DNA, 25 bp, Homo sapien
tgagccgtttaccaaagagcgcaac

SEQ ID NO: 5854744 - DNA, 25 bp, Homo sapien
ctgcacgagtgctaagatctgagcc

SEQ ID NO: 5854745 - DNA, 25 bp, Homo sapien
ccaatgaccatatacggcgtattaa

SEQ ID NO: 5854746 - DNA, 25 bp, Homo sapien
aacttgtcgtatgggactttcaagt

SEQ ID NO: 5854747 - DNA, 25 bp, Homo sapien
tgtcgtatgggactttcaagtacct

SEQ ID NO: 5854748 - DNA, 25 bp, Homo sapien
atgacttatccatagtcctaagtcc

SEQ ID NO: 5854749 - DNA, 25 bp, Homo sapien
ggttaagccgctattagcgtgtgtg

SEQ ID NO: 5854750 - DNA, 25 bp, Homo sapien
tctacgatggcaagtcgtgcctcgt

SEQ ID NO: 5854751 - DNA, 25 bp, Homo sapien
ttctcgtgtagaatatcagctaata

SEQ ID NO: 5854752 - DNA, 25 bp, Homo sapien
gtagaatatcagctaatagggtcgg

SEQ ID NO: 5854753 - DNA, 25 bp, Homo sapien
tgacgttcgtcaagagtcgcataat

SEQ ID NO: 5854754 - DNA, 25 bp, Homo sapien
tcaagagtcgcataatctcagaatc

SEQ ID NO: 5854755 - DNA, 25 bp, Homo sapien
gttcacggctataaaacagcgtcat

SEQ ID NO: 5854756 - DNA, 25 bp, Homo sapien
tgagtcttcgatgtatgcgctcgtt

SEQ ID NO: 5854757 - DNA, 25 bp, Homo sapien
gatcgaaggtcggaactccagtgcc

SEQ ID NO: 5854758 - DNA, 25 bp, Homo sapien
actagcatctaagcactcggctcta

SEQ ID NO: 5854759 - DNA, 25 bp, Homo sapien
gtgctatatccttaccgcgtatgga

SEQ ID NO: 5854760 - DNA, 25 bp, Homo sapien
catttgtctaccttaccgtcaagaa

SEQ ID NO: 5854761 - DNA, 25 bp, Homo sapien
gggccgccagagttatgtttgagtc

SEQ ID NO: 5854762 - DNA, 25 bp, Homo sapien
gatggctcacgtcttatttgggccg

SEQ ID NO: 5854763 - DNA, 25 bp, Homo sapien
tacaggcgcgacgaaccttatactc

SEQ ID NO: 5854764 - DNA, 25 bp, Homo sapien
ttaactcgactgccgcgtgaacaac

SEQ ID NO: 5854765 - DNA, 25 bp, Homo sapien
cacgtatcatatccctaattcgctg

SEQ ID NO: 5854766 - DNA, 25 bp, Homo sapien
gagaccgggctaaggcacgtatcat

SEQ ID NO: 5854767 - DNA, 25 bp, Homo sapien
tagagccgagtgcttagatgctagt

SEQ ID NO: 5854768 - DNA, 25 bp, Homo sapien
gactcaaacataactctggcggccc

SEQ ID NO: 5854769 - DNA, 25 bp, Homo sapien
aacgagcgcatacatcgaagactca

SEQ ID NO: 5854770 - DNA, 25 bp, Homo sapien
ttcttgacggtaaggtagacaaatg

SEQ ID NO: 5854771 - DNA, 25 bp, Homo sapien
cggcccaaataagacgtgagccatc

SEQ ID NO: 5854772 - DNA, 25 bp, Homo sapien
atgatacgtgccttagcccggtctc

SEQ ID NO: 5854773 - DNA, 25 bp, Homo sapien
ggcactggagttccgaccttcgatc

SEQ ID NO: 5854774 - DNA, 25 bp, Homo sapien
gttgttcacgcggcagtcgagttaa

SEQ ID NO: 5854775 - DNA, 25 bp, Homo sapien
gagtataaggttcgtcgcgcctgta

SEQ ID NO: 5854776 - DNA, 25 bp, Homo sapien
tccatacgcggtaaggatatagcac

SEQ ID NO: 5854777 - DNA, 25 bp, Homo sapien
cagcgaattagggatatgatacgtg

SEQ ID NO: 5854778 - DNA, 25 bp, Homo sapien
gaactagcatctaagcactcggctc

SEQ ID NO: 5854779 - DNA, 25 bp, Homo sapien
tcggctctaatgttaagtgctcgac

SEQ ID NO: 5854780 - DNA, 25 bp, Homo sapien
aatgttaagtgctcgaccacagatc

SEQ ID NO: 5854781 - DNA, 25 bp, Homo sapien
gtgccaagtacgatggctcacgtct

SEQ ID NO: 5854782 - DNA, 25 bp, Homo sapien
ttatttgggccgccagagttatgtt

SEQ ID NO: 5854783 - DNA, 25 bp, Homo sapien
tattgaccaaactgcggtgcgatta

SEQ ID NO: 5854784 - DNA, 25 bp, Homo sapien
cggtgcgattaactcgactgccgcg

SEQ ID NO: 5854785 - DNA, 25 bp, Homo sapien
acatatcctaatacaggcgcgacga

SEQ ID NO: 5854786 - DNA, 25 bp, Homo sapien
cgacgaaccttatactcgatggaag

SEQ ID NO: 5854787 - DNA, 25 bp, Homo sapien
ctcgatggaagacagttatacccat

SEQ ID NO: 5854788 - DNA, 25 bp, Homo sapien
actccgagaactagcatctaagcac

SEQ ID NO: 5854789 - DNA, 25 bp, Homo sapien
tacggctgattctctaggcttacgc

SEQ ID NO: 5854790 - DNA, 25 bp, Homo sapien
acgtgcctaagtaatctggtccgcg

SEQ ID NO: 5854791 - DNA, 25 bp, Homo sapien
tgcgtagttctgtcatagcgtcgag

SEQ ID NO: 5854792 - DNA, 25 bp, Homo sapien
caaagttacgtcgcattctctcacg

SEQ ID NO: 5854793 - DNA, 25 bp, Homo sapien
aagcgtccaatgtacctatatcgtg

SEQ ID NO: 5854794 - DNA, 25 bp, Homo sapien
gctaagccattacgcgacattctgc

SEQ ID NO: 5854795 - DNA, 25 bp, Homo sapien
ttattggatggcgttccgtcctatt

SEQ ID NO: 5854796 - DNA, 25 bp, Homo sapien
cttacgcgcatgagctctaggttcc

SEQ ID NO: 5854797 - DNA, 25 bp, Homo sapien
ggctgtgcctaacgaatctgggacg

SEQ ID NO: 5854798 - DNA, 25 bp, Homo sapien
gtacggtgatcgtggacgcttgacc

SEQ ID NO: 5854799 - DNA, 25 bp, Homo sapien
tctgaacctgtccatagtatcctgt

SEQ ID NO: 5854800 - DNA, 25 bp, Homo sapien
acaggatactatggacaggttcaga

SEQ ID NO: 5854801 - DNA, 25 bp, Homo sapien
cacgatataggtacattggacgctt

SEQ ID NO: 5854802 - DNA, 25 bp, Homo sapien
ctcgacgctatgacagaactacgca

SEQ ID NO: 5854803 - DNA, 25 bp, Homo sapien
aataggacggaacgccatccaataa

SEQ ID NO: 5854804 - DNA, 25 bp, Homo sapien
gcgtaagcctagagaatcagccgta

SEQ ID NO: 5854805 - DNA, 25 bp, Homo sapien
ggaacctagagctcatgcgcgtaag

SEQ ID NO: 5854806 - DNA, 25 bp, Homo sapien
ggtcaagcgtccacgatcaccgtac

SEQ ID NO: 5854807 - DNA, 25 bp, Homo sapien
gcagaatgtcgcgtaatggcttagc

SEQ ID NO: 5854808 - DNA, 25 bp, Homo sapien
cgtgagagaatgcgacgtaactttg

SEQ ID NO: 5854809 - DNA, 25 bp, Homo sapien
cgtcccagattcgttaggcacagcc

SEQ ID NO: 5854810 - DNA, 25 bp, Homo sapien
cgcggaccagattacttaggcacgt

SEQ ID NO: 5854811 - DNA, 25 bp, Homo sapien
gtgataatttcgacgaggcgttaca

SEQ ID NO: 5854812 - DNA, 25 bp, Homo sapien
ttcgacgaggcgttacatattctga

SEQ ID NO: 5854813 - DNA, 25 bp, Homo sapien
tatatcgtggacccaaagtcgatac

SEQ ID NO: 5854814 - DNA, 25 bp, Homo sapien
gtcgatacgtccgattaagcgacgt

SEQ ID NO: 5854815 - DNA, 25 bp, Homo sapien
tataccctcgggttacgaattatgg

SEQ ID NO: 5854816 - DNA, 25 bp, Homo sapien
atggctgtgcctaacgaatctggga

SEQ ID NO: 5854817 - DNA, 25 bp, Homo sapien
ccgtcctattggatactattccgtg

SEQ ID NO: 5854818 - DNA, 25 bp, Homo sapien
ccgtcactatgtaacgcttgacgta

SEQ ID NO: 5854819 - DNA, 25 bp, Homo sapien
ggttacgatgactgctaagccatta

SEQ ID NO: 5854820 - DNA, 25 bp, Homo sapien
ttacgcgacattctgcaaagttacg

SEQ ID NO: 5854821 - DNA, 25 bp, Homo sapien
taggcttacgcgcatgagctctagg

SEQ ID NO: 5854822 - DNA, 25 bp, Homo sapien
atgccgcatattcggaacgtcgcct

SEQ ID NO: 5854823 - DNA, 25 bp, Homo sapien
aattatcggaactcgtcgcttattt

SEQ ID NO: 5854824 - DNA, 25 bp, Homo sapien
gagtcgggtactacattcgtgcgat

SEQ ID NO: 5854825 - DNA, 25 bp, Homo sapien
acgcgagatacgtcttaccgcacat

SEQ ID NO: 5854826 - DNA, 25 bp, Homo sapien
ggaacagtctaacctacgcgagata

SEQ ID NO: 5854827 - DNA, 25 bp, Homo sapien
accttgggagccgttcctaaagctg

SEQ ID NO: 5854828 - DNA, 25 bp, Homo sapien
actagcctgccggtcaataactgat

SEQ ID NO: 5854829 - DNA, 25 bp, Homo sapien
gccttattccggtgctatgagtatc

SEQ ID NO: 5854830 - DNA, 25 bp, Homo sapien
ttcgtgactagcaggccttattccg

SEQ ID NO: 5854831 - DNA, 25 bp, Homo sapien
gtctatgaggtctcgtcttcgtgag

SEQ ID NO: 5854832 - DNA, 25 bp, Homo sapien
acgcggagtcaacctgataacccat

SEQ ID NO: 5854833 - DNA, 25 bp, Homo sapien
atgggttatcaggttgactccgcgt

SEQ ID NO: 5854834 - DNA, 25 bp, Homo sapien
atcgcacgaatgtagtacccgactc

SEQ ID NO: 5854835 - DNA, 25 bp, Homo sapien
atgtgcggtaagacgtatctcgcgt

SEQ ID NO: 5854836 - DNA, 25 bp, Homo sapien
atcagttattgaccggcaggctagt

SEQ ID NO: 5854837 - DNA, 25 bp, Homo sapien
cggaataaggcctgctagtcacgaa

SEQ ID NO: 5854838 - DNA, 25 bp, Homo sapien
tatctcgcgtaggttagactgttcc

SEQ ID NO: 5854839 - DNA, 25 bp, Homo sapien
aggcgacgttccgaatatgcggcat

SEQ ID NO: 5854840 - DNA, 25 bp, Homo sapien
aaataagcgacgagttccgataatt

SEQ ID NO: 5854841 - DNA, 25 bp, Homo sapien
cagctttaggaacggctcccaaggt

SEQ ID NO: 5854842 - DNA, 25 bp, Homo sapien
gatactcatagcaccggaataaggc

SEQ ID NO: 5854843 - DNA, 25 bp, Homo sapien
ctcacgaagacgagacctcatagac

SEQ ID NO: 5854844 - DNA, 25 bp, Homo sapien
cataggtaacctattcgtgactagc

SEQ ID NO: 5854845 - DNA, 25 bp, Homo sapien
tatctaattcgtgagtcgggtacta

SEQ ID NO: 5854846 - DNA, 25 bp, Homo sapien
gtatccgaagtcgtagtgataatat

SEQ ID NO: 5854847 - DNA, 25 bp, Homo sapien
aacgtatgccgcatattcggaacgt

SEQ ID NO: 5854848 - DNA, 25 bp, Homo sapien
ccacctagatcgaaattatcggaac

SEQ ID NO: 5854849 - DNA, 25 bp, Homo sapien
gaactcgtcgcttatttacgaacct

SEQ ID NO: 5854850 - DNA, 25 bp, Homo sapien
agtctggtttcttattagcgaggag

SEQ ID NO: 5854851 - DNA, 25 bp, Homo sapien
tcttattagcgaggagcatttcgtg

SEQ ID NO: 5854852 - DNA, 25 bp, Homo sapien
atactgagccgaatatcgtaagaca

SEQ ID NO: 5854853 - DNA, 25 bp, Homo sapien
aatatcgtaagacatccgcgagcga

SEQ ID NO: 5854854 - DNA, 25 bp, Homo sapien
atgacgcggagtcaacctgataacc

SEQ ID NO: 5854855 - DNA, 25 bp, Homo sapien
ggcgcgttcgacataattgccgacg

SEQ ID NO: 5854856 - DNA, 25 bp, Homo sapien
agtcactctcgacctagcgtaagga

SEQ ID NO: 5854857 - DNA, 25 bp, Homo sapien
ttaccgagctgacgtcgcgttagac

SEQ ID NO: 5854858 - DNA, 25 bp, Homo sapien
tgcgaggttcgcttacgttgcatag

SEQ ID NO: 5854859 - DNA, 25 bp, Homo sapien
gagtcctgcacgttagaacactggc

SEQ ID NO: 5854860 - DNA, 25 bp, Homo sapien
gatcacgttagatccactgcgtcac

SEQ ID NO: 5854861 - DNA, 25 bp, Homo sapien
gtcgtctagcttaatacctctgcgt

SEQ ID NO: 5854862 - DNA, 25 bp, Homo sapien
gcgttagacagctcattcgtcacgt

SEQ ID NO: 5854863 - DNA, 25 bp, Homo sapien
tacagcttacctactatgcgtgcaa

SEQ ID NO: 5854864 - DNA, 25 bp, Homo sapien
ggatcgcttaacctctatgcgtaca

SEQ ID NO: 5854865 - DNA, 25 bp, Homo sapien
tgcgtcacgttacctacatgatcga

SEQ ID NO: 5854866 - DNA, 25 bp, Homo sapien
tgtacgcatagaggttaagcgatcc

SEQ ID NO: 5854867 - DNA, 25 bp, Homo sapien
gtctaacgcgacgtcagctcggtaa

SEQ ID NO: 5854868 - DNA, 25 bp, Homo sapien
tccttacgctaggtcgagagtgact

SEQ ID NO: 5854869 - DNA, 25 bp, Homo sapien
tcgatcatgtaggtaacgtgacgca

SEQ ID NO: 5854870 - DNA, 25 bp, Homo sapien
ttgcacgcatagtaggtaagctgta

SEQ ID NO: 5854871 - DNA, 25 bp, Homo sapien
gtgacgcagtggatctaacgtgatc

SEQ ID NO: 5854872 - DNA, 25 bp, Homo sapien
ctatgcaacgtaagcgaacctcgca

SEQ ID NO: 5854873 - DNA, 25 bp, Homo sapien
acgcagaggtattaagctagacgac

SEQ ID NO: 5854874 - DNA, 25 bp, Homo sapien
acgtgacgaatgagctgtctaacgc

SEQ ID NO: 5854875 - DNA, 25 bp, Homo sapien
cgtcggcaattatgtcgaacgcgcc

SEQ ID NO: 5854876 - DNA, 25 bp, Homo sapien
gccagtgttctaacgtgcaggactc

SEQ ID NO: 5854877 - DNA, 25 bp, Homo sapien
acatgatcgatccgattacaggccg

SEQ ID NO: 5854878 - DNA, 25 bp, Homo sapien
gatccgattacaggccgatccatcg

SEQ ID NO: 5854879 - DNA, 25 bp, Homo sapien
tcgctggagatcgaatacgcccagc

SEQ ID NO: 5854880 - DNA, 25 bp, Homo sapien
tcgacctagcgtaaggatccacgat

SEQ ID NO: 5854881 - DNA, 25 bp, Homo sapien
tacggcggttgacttagttatgcga

SEQ ID NO: 5854882 - DNA, 25 bp, Homo sapien
ggttgacttagttatgcgaggttcg

SEQ ID NO: 5854883 - DNA, 25 bp, Homo sapien
accgagctgacgtcgcgttagacag

SEQ ID NO: 5854884 - DNA, 25 bp, Homo sapien
gtcacgtttaggactatgtcgaagc

SEQ ID NO: 5854885 - DNA, 25 bp, Homo sapien
cgaccatgtcgtctagcttaatacc

SEQ ID NO: 5854886 - DNA, 25 bp, Homo sapien
tatacttacacagcaggcgatcacg

SEQ ID NO: 5854887 - DNA, 25 bp, Homo sapien
caggcgatcacgttagatccactgc

SEQ ID NO: 5854888 - DNA, 25 bp, Homo sapien
gtgtcaccacgcggtacatgagtca

SEQ ID NO: 5854889 - DNA, 25 bp, Homo sapien
caattcgggctagtcgtacctgaac

SEQ ID NO: 5854890 - DNA, 25 bp, Homo sapien
gtatgcagtgcggtatggttcctct

SEQ ID NO: 5854891 - DNA, 25 bp, Homo sapien
ttcctctcagtcacgtatggttcgc

SEQ ID NO: 5854892 - DNA, 25 bp, Homo sapien
gtctaatcgccgttggtctgtatgc

SEQ ID NO: 5854893 - DNA, 25 bp, Homo sapien
aacctatccctgagtctatatgcgt

SEQ ID NO: 5854894 - DNA, 25 bp, Homo sapien
ggcgtcggattagaccggatcaccc

SEQ ID NO: 5854895 - DNA, 25 bp, Homo sapien
attcggcggtgcctcacaatattcc

SEQ ID NO: 5854896 - DNA, 25 bp, Homo sapien
aacgggcatcagtcgaatctcttcg

SEQ ID NO: 5854897 - DNA, 25 bp, Homo sapien
agcccgctatggtgagtctaatcgc

SEQ ID NO: 5854898 - DNA, 25 bp, Homo sapien
tgacacatctcctcgttggtagtac

SEQ ID NO: 5854899 - DNA, 25 bp, Homo sapien
acgcatatagactcagggataggtt

SEQ ID NO: 5854900 - DNA, 25 bp, Homo sapien
agaggaaccataccgcactgcatac

SEQ ID NO: 5854901 - DNA, 25 bp, Homo sapien
gtactaccaacgaggagatgtgtca

SEQ ID NO: 5854902 - DNA, 25 bp, Homo sapien
gcgaaccatacgtgactgagaggaa

SEQ ID NO: 5854903 - DNA, 25 bp, Homo sapien
gcatacagaccaacggcgattagac

SEQ ID NO: 5854904 - DNA, 25 bp, Homo sapien
gcgattagactcaccatagcgggct

SEQ ID NO: 5854905 - DNA, 25 bp, Homo sapien
tgactcatgtaccgcgtggtgacac

SEQ ID NO: 5854906 - DNA, 25 bp, Homo sapien
cgaagagattcgactgatgcccgtt

SEQ ID NO: 5854907 - DNA, 25 bp, Homo sapien
gttcaggtacgactagcccgaattg

SEQ ID NO: 5854908 - DNA, 25 bp, Homo sapien
gggtgatccggtctaatccgacgcc

SEQ ID NO: 5854909 - DNA, 25 bp, Homo sapien
ggaatattgtgaggcaccgccgaat

SEQ ID NO: 5854910 - DNA, 25 bp, Homo sapien
ctagttatggcgtcggattagaccg

SEQ ID NO: 5854911 - DNA, 25 bp, Homo sapien
attagaccggatcacccggacatgg

SEQ ID NO: 5854912 - DNA, 25 bp, Homo sapien
gacatggacgttaagtatccggcct

SEQ ID NO: 5854913 - DNA, 25 bp, Homo sapien
cggcctggacgacaataattcggcg

SEQ ID NO: 5854914 - DNA, 25 bp, Homo sapien
ggcctggacgacaataattcggcgg

SEQ ID NO: 5854915 - DNA, 25 bp, Homo sapien
gacgacaataattcggcggtgcctc

SEQ ID NO: 5854916 - DNA, 25 bp, Homo sapien
tcacaatattccgagaactctgcat

SEQ ID NO: 5854917 - DNA, 25 bp, Homo sapien
gtacatgagtcaaagtccgaatagc

SEQ ID NO: 5854918 - DNA, 25 bp, Homo sapien
tcgcctgttactaggttagacagtc

SEQ ID NO: 5854919 - DNA, 25 bp, Homo sapien
ggttagactgatggtcaacgaccta

SEQ ID NO: 5854920 - DNA, 25 bp, Homo sapien
cgtgacgactgcatagtggtcggtc

SEQ ID NO: 5854921 - DNA, 25 bp, Homo sapien
gacatctacgggcggctattgacga

SEQ ID NO: 5854922 - DNA, 25 bp, Homo sapien
gtgacatgagtctagcttcgcggtc

SEQ ID NO: 5854923 - DNA, 25 bp, Homo sapien
gtgcgccgaatgtgtctgtaatgcc

SEQ ID NO: 5854924 - DNA, 25 bp, Homo sapien
gatcctcgctaagtattcagccacc

SEQ ID NO: 5854925 - DNA, 25 bp, Homo sapien
tcagccacctcgtatagtattcgcg

SEQ ID NO: 5854926 - DNA, 25 bp, Homo sapien
gctgatacgctagggtgcttgctac

SEQ ID NO: 5854927 - DNA, 25 bp, Homo sapien
gcctgcgaatgagtcgtcagtgccc

SEQ ID NO: 5854928 - DNA, 25 bp, Homo sapien
agatccggtcttatcgctgaatgtc

SEQ ID NO: 5854929 - DNA, 25 bp, Homo sapien
atatggcgactgtgtccgtctatac

SEQ ID NO: 5854930 - DNA, 25 bp, Homo sapien
gagcgtctcctaaatagatccggtc

SEQ ID NO: 5854931 - DNA, 25 bp, Homo sapien
ttgacgaactctccggtatatgctc

SEQ ID NO: 5854932 - DNA, 25 bp, Homo sapien
gtagcaagcaccctagcgtatcagc

SEQ ID NO: 5854933 - DNA, 25 bp, Homo sapien
gagcatataccggagagttcgtcaa

SEQ ID NO: 5854934 - DNA, 25 bp, Homo sapien
ggcattacagacacattcggcgcac

SEQ ID NO: 5854935 - DNA, 25 bp, Homo sapien
gaccggatctatttaggagacgctc

SEQ ID NO: 5854936 - DNA, 25 bp, Homo sapien
gggcactgacgactcattcgcaggc

SEQ ID NO: 5854937 - DNA, 25 bp, Homo sapien
gaccgcgaagctagactcatgtcac

SEQ ID NO: 5854938 - DNA, 25 bp, Homo sapien
ggtggctgaatacttagcgaggatc

SEQ ID NO: 5854939 - DNA, 25 bp, Homo sapien
gtatagacggacacagtcgccatat

SEQ ID NO: 5854940 - DNA, 25 bp, Homo sapien
cgcgaatactatacgaggtggctga

SEQ ID NO: 5854941 - DNA, 25 bp, Homo sapien
gacattcagcgataagaccggatct

SEQ ID NO: 5854942 - DNA, 25 bp, Homo sapien
tcgtcaatagccgcccgtagatgtc

SEQ ID NO: 5854943 - DNA, 25 bp, Homo sapien
gtgaagtgctaggctagtattgaca

SEQ ID NO: 5854944 - DNA, 25 bp, Homo sapien
ctaggctagtattgacatctacggg

SEQ ID NO: 5854945 - DNA, 25 bp, Homo sapien
ggctagtattgacatctacgggcgg

SEQ ID NO: 5854946 - DNA, 25 bp, Homo sapien
ccgaccatatatgggtcttgctgat

SEQ ID NO: 5854947 - DNA, 25 bp, Homo sapien
actggtccacatatagacatacttc

SEQ ID NO: 5854948 - DNA, 25 bp, Homo sapien
agcgtgctcctacatagcacgagcg

SEQ ID NO: 5854949 - DNA, 25 bp, Homo sapien
tcttatcgctgaatgtctaggattc

SEQ ID NO: 5854950 - DNA, 25 bp, Homo sapien
gattctcgtcaatgatctacgatcc

SEQ ID NO: 5854951 - DNA, 25 bp, Homo sapien
cctgaggatttattcacctgactcg

SEQ ID NO: 5854952 - DNA, 25 bp, Homo sapien
atgagactactctgtactagatggt

SEQ ID NO: 5854953 - DNA, 25 bp, Homo sapien
tcgaatgtgtaatcgtcaactcgta

SEQ ID NO: 5854954 - DNA, 25 bp, Homo sapien
gtcaggcaatgtgtccgaacggcga

SEQ ID NO: 5854955 - DNA, 25 bp, Homo sapien
tatcgccatgtctgtcaactgtact

SEQ ID NO: 5854956 - DNA, 25 bp, Homo sapien
ttggatggtgcagcttacttcgcgt

SEQ ID NO: 5854957 - DNA, 25 bp, Homo sapien
tcggacctaaaccgtagctctcggc

SEQ ID NO: 5854958 - DNA, 25 bp, Homo sapien
tagtgccgtcggttcaggtcatatg

SEQ ID NO: 5854959 - DNA, 25 bp, Homo sapien
agtcctctgcatctataatcgcgta

SEQ ID NO: 5854960 - DNA, 25 bp, Homo sapien
agatcgtcctcgtctcgaatatagc

SEQ ID NO: 5854961 - DNA, 25 bp, Homo sapien
tctaagcgctcgatattccacctaa

SEQ ID NO: 5854962 - DNA, 25 bp, Homo sapien
tggcagccgaatggactatcgctcc

SEQ ID NO: 5854963 - DNA, 25 bp, Homo sapien
gtcaccgctatctcgtaaggggtcc

SEQ ID NO: 5854964 - DNA, 25 bp, Homo sapien
acgtcgcctcacggagtaatcgcgt

SEQ ID NO: 5854965 - DNA, 25 bp, Homo sapien
agtacagttgacagacatggcgata

SEQ ID NO: 5854966 - DNA, 25 bp, Homo sapien
catatgacctgaaccgacggcacta

SEQ ID NO: 5854967 - DNA, 25 bp, Homo sapien
gccgagagctacggtttaggtccga

SEQ ID NO: 5854968 - DNA, 25 bp, Homo sapien
tcgccgttcggacacattgcctgac

SEQ ID NO: 5854969 - DNA, 25 bp, Homo sapien
acgcgaagtaagctgcaccatccaa

SEQ ID NO: 5854970 - DNA, 25 bp, Homo sapien
gctatattcgagacgaggacgatct

SEQ ID NO: 5854971 - DNA, 25 bp, Homo sapien
tacgcgattatagatgcagaggact

SEQ ID NO: 5854972 - DNA, 25 bp, Homo sapien
ttaggtggaatatcgagcgcttaga

SEQ ID NO: 5854973 - DNA, 25 bp, Homo sapien
acgcgattactccgtgaggcgacgt

SEQ ID NO: 5854974 - DNA, 25 bp, Homo sapien
ggaccccttacgagatagcggtgac

SEQ ID NO: 5854975 - DNA, 25 bp, Homo sapien
ggagcgatagtccattcggctgcca

SEQ ID NO: 5854976 - DNA, 25 bp, Homo sapien
gacactgatctgagagtcgcttaaa

SEQ ID NO: 5854977 - DNA, 25 bp, Homo sapien
cgcttaaatcatctgcgtgtcttag

SEQ ID NO: 5854978 - DNA, 25 bp, Homo sapien
tcttagagcttatcgccatgtctgt

SEQ ID NO: 5854979 - DNA, 25 bp, Homo sapien
aggcaatgtgtccgaacggcgagct

SEQ ID NO: 5854980 - DNA, 25 bp, Homo sapien
tcaggtcatatgtcgcgggttctgc

SEQ ID NO: 5854981 - DNA, 25 bp, Homo sapien
cgctatctcgtaaggggtccgtctg

SEQ ID NO: 5854982 - DNA, 25 bp, Homo sapien
catatagccatctaagcgctcgata

SEQ ID NO: 5854983 - DNA, 25 bp, Homo sapien
atcgctcctcgatatgtacggatag

SEQ ID NO: 5854984 - DNA, 25 bp, Homo sapien
gtacggataggccacggcatgtacg

SEQ ID NO: 5854985 - DNA, 25 bp, Homo sapien
ataggccacggcatgtacgagcata

SEQ ID NO: 5854986 - DNA, 25 bp, Homo sapien
gcataagccgaactgcacgagcata

SEQ ID NO: 5854987 - DNA, 25 bp, Homo sapien
gacagcagctcagcatctatgcatc

SEQ ID NO: 5854988 - DNA, 25 bp, Homo sapien
attctcggtggtgctcagtacatcc

SEQ ID NO: 5854989 - DNA, 25 bp, Homo sapien
acatccagtggtgagtcgctacatc

SEQ ID NO: 5854990 - DNA, 25 bp, Homo sapien
gacattcctacgacttatcagcacg

SEQ ID NO: 5854991 - DNA, 25 bp, Homo sapien
gtaatgacgctgcatcgctcagtat

SEQ ID NO: 5854992 - DNA, 25 bp, Homo sapien
gtcgctcacagtgtctggtgttcga

SEQ ID NO: 5854993 - DNA, 25 bp, Homo sapien
taggtggctctaatctgcgttggtt

SEQ ID NO: 5854994 - DNA, 25 bp, Homo sapien
aaacctctgggcatccgtattaagc

SEQ ID NO: 5854995 - DNA, 25 bp, Homo sapien
agagatgcttagtacgccttcgaat

SEQ ID NO: 5854996 - DNA, 25 bp, Homo sapien
gcatcatgtgcctcactaggacatc

SEQ ID NO: 5854997 - DNA, 25 bp, Homo sapien
ctaggacatcatgctcgactctgag

SEQ ID NO: 5854998 - DNA, 25 bp, Homo sapien
atactgagcgatgcagcgtcattac

SEQ ID NO: 5854999 - DNA, 25 bp, Homo sapien
ctcagagtcgagcatgatgtcctag

SEQ ID NO: 5855000 - DNA, 25 bp, Homo sapien
ggatgtactgagcaccaccgagaat

SEQ ID NO: 5855001 - DNA, 25 bp, Homo sapien
tcgaacaccagacactgtgagcgac

SEQ ID NO: 5855002 - DNA, 25 bp, Homo sapien
aaccaacgcagattagagccaccta

SEQ ID NO: 5855003 - DNA, 25 bp, Homo sapien
gatgtcctagtgaggcacatgatgc

SEQ ID NO: 5855004 - DNA, 25 bp, Homo sapien
attcgaaggcgtactaagcatctct

SEQ ID NO: 5855005 - DNA, 25 bp, Homo sapien
gatgtagcgactcaccactggatgt

SEQ ID NO: 5855006 - DNA, 25 bp, Homo sapien
gcttaatacggatgcccagaggttt

SEQ ID NO: 5855007 - DNA, 25 bp, Homo sapien
cgtgctgataagtcgtaggaatgtc

SEQ ID NO: 5855008 - DNA, 25 bp, Homo sapien
gatgcatagatgctgagctgctgtc

SEQ ID NO: 5855009 - DNA, 25 bp, Homo sapien
tggtgttcgatacccggatcgggtt

SEQ ID NO: 5855010 - DNA, 25 bp, Homo sapien
tacggtataacaaggcgtgctacgg

SEQ ID NO: 5855011 - DNA, 25 bp, Homo sapien
ctaacgacgctggtagcagtctatc

SEQ ID NO: 5855012 - DNA, 25 bp, Homo sapien
gcagtctatcagatcgctagtacga

SEQ ID NO: 5855013 - DNA, 25 bp, Homo sapien
gatcgctagtacgagttagagatgc

SEQ ID NO: 5855014 - DNA, 25 bp, Homo sapien
gcactcgcgtaatgacgctgcatcg

SEQ ID NO: 5855015 - DNA, 25 bp, Homo sapien
cgctcagtatgatccatgagcgccg

SEQ ID NO: 5855016 - DNA, 25 bp, Homo sapien
tcacatgatacatcgctctaaatca

SEQ ID NO: 5855017 - DNA, 25 bp, Homo sapien
gctctaaatcatcatgcgacagtct

SEQ ID NO: 5855018 - DNA, 25 bp, Homo sapien
catgctcgactctgagacactgatc

SEQ ID NO: 5855019 - DNA, 25 bp, Homo sapien
tctgagacactgatcgagcattaag

SEQ ID NO: 5855020 - DNA, 25 bp, Homo sapien
tataatggcgtctgtcgtgctcata

SEQ ID NO: 5855021 - DNA, 25 bp, Homo sapien
tgaatagtgtcgtaggctctcgggc

SEQ ID NO: 5855022 - DNA, 25 bp, Homo sapien
gtgctccgtgcgaaatacgcggtca

SEQ ID NO: 5855023 - DNA, 25 bp, Homo sapien
gcacgttgttaaactgttgccgcca

SEQ ID NO: 5855024 - DNA, 25 bp, Homo sapien
agactcgtccctcgatatcaatact

SEQ ID NO: 5855025 - DNA, 25 bp, Homo sapien
tatcaatactcgtccgcaggtgaac

SEQ ID NO: 5855026 - DNA, 25 bp, Homo sapien
gtcgatctaggtgactacgcacgcc

SEQ ID NO: 5855027 - DNA, 25 bp, Homo sapien
ggtcaatgtcagtacggatcgcgtc

SEQ ID NO: 5855028 - DNA, 25 bp, Homo sapien
gctgcatagctatacttcgagtcac

SEQ ID NO: 5855029 - DNA, 25 bp, Homo sapien
tgctagacgtgtccatcgagctgca

SEQ ID NO: 5855030 - DNA, 25 bp, Homo sapien
gtcagttgccactcgttgatagtca

SEQ ID NO: 5855031 - DNA, 25 bp, Homo sapien
tggcggcaacagtttaacaacgtgc

SEQ ID NO: 5855032 - DNA, 25 bp, Homo sapien
tgactatcaacgagtggcaactgac

SEQ ID NO: 5855033 - DNA, 25 bp, Homo sapien
tatgagcacgacagacgccattata

SEQ ID NO: 5855034 - DNA, 25 bp, Homo sapien
tgaccgcgtatttcgcacggagcac

SEQ ID NO: 5855035 - DNA, 25 bp, Homo sapien
ggcgtgcgtagtcacctagatcgac

SEQ ID NO: 5855036 - DNA, 25 bp, Homo sapien
gtgactcgaagtatagctatgcagc

SEQ ID NO: 5855037 - DNA, 25 bp, Homo sapien
gttcacctgcggacgagtattgata

SEQ ID NO: 5855038 - DNA, 25 bp, Homo sapien
agtattgatatcgagggacgagtct

SEQ ID NO: 5855039 - DNA, 25 bp, Homo sapien
gcccgagagcctacgacactattca

SEQ ID NO: 5855040 - DNA, 25 bp, Homo sapien
gacgcgatccgtactgacattgacc

SEQ ID NO: 5855041 - DNA, 25 bp, Homo sapien
tgcagctcgatggacacgtctagca

SEQ ID NO: 5855042 - DNA, 25 bp, Homo sapien
gggcacgttgttaaactgttgccgc

SEQ ID NO: 5855043 - DNA, 25 bp, Homo sapien
ccaattcaagattagtccagctcgt

SEQ ID NO: 5855044 - DNA, 25 bp, Homo sapien
actcgttgatagtcaaccaagctcg

SEQ ID NO: 5855045 - DNA, 25 bp, Homo sapien
tacgagatgagctacgtaactacag

SEQ ID NO: 5855046 - DNA, 25 bp, Homo sapien
atgagctacgtaactacagtgatag

SEQ ID NO: 5855047 - DNA, 25 bp, Homo sapien
ctacagtgatagcatatagggtacg

SEQ ID NO: 5855048 - DNA, 25 bp, Homo sapien
aggtcgtagtcgaattagtcaggtt

SEQ ID NO: 5855049 - DNA, 25 bp, Homo sapien
actagttgacttggagtatgccatg

SEQ ID NO: 5855050 - DNA, 25 bp, Homo sapien
atgtactatggagcggtcaatgtca

SEQ ID NO: 5855051 - DNA, 25 bp, Homo sapien
agtcatcgtgagtagtatgaacgtg

SEQ ID NO: 5855052 - DNA, 25 bp, Homo sapien
gatacttcgatagcgttgtgaatag

SEQ ID NO: 5855053 - DNA, 25 bp, Homo sapien
gatccagatcgcagggtatcgcatc

SEQ ID NO: 5855054 - DNA, 25 bp, Homo sapien
cttagccgatcttcttacttacgag

SEQ ID NO: 5855055 - DNA, 25 bp, Homo sapien
tcgtcgtgacgaacgtgctactcgc

SEQ ID NO: 5855056 - DNA, 25 bp, Homo sapien
acttctcggtatgtgtcctcaatta

SEQ ID NO: 5855057 - DNA, 25 bp, Homo sapien
cactatgccacctctggtctaatat

SEQ ID NO: 5855058 - DNA, 25 bp, Homo sapien
tatagcgccctgtggtcgtataatc

SEQ ID NO: 5855059 - DNA, 25 bp, Homo sapien
tcgcggctcactaattgtctgcggt

SEQ ID NO: 5855060 - DNA, 25 bp, Homo sapien
ggctcagtggtccgacatagtgccc

SEQ ID NO: 5855061 - DNA, 25 bp, Homo sapien
gagccgatggtcagcaatagcgcct

SEQ ID NO: 5855062 - DNA, 25 bp, Homo sapien
ttatcgggcctgctacatcagtggc

SEQ ID NO: 5855063 - DNA, 25 bp, Homo sapien
gtggcgatgttcgtaacccttagcc

SEQ ID NO: 5855064 - DNA, 25 bp, Homo sapien
atattagaccagaggtggcatagtg

SEQ ID NO: 5855065 - DNA, 25 bp, Homo sapien
ggctaagggttacgaacatcgccac

SEQ ID NO: 5855066 - DNA, 25 bp, Homo sapien
gatgcgataccctgcgatctggatc

SEQ ID NO: 5855067 - DNA, 25 bp, Homo sapien
ctcgtaagtaagaagatcggctaag

SEQ ID NO: 5855068 - DNA, 25 bp, Homo sapien
gcgagtagcacgttcgtcacgacga

SEQ ID NO: 5855069 - DNA, 25 bp, Homo sapien
accgcagacaattagtgagccgcga

SEQ ID NO: 5855070 - DNA, 25 bp, Homo sapien
gccactgatgtagcaggcccgataa

SEQ ID NO: 5855071 - DNA, 25 bp, Homo sapien
gattatacgaccacagggcgctata

SEQ ID NO: 5855072 - DNA, 25 bp, Homo sapien
gggcactatgtcggaccactgagcc

SEQ ID NO: 5855073 - DNA, 25 bp, Homo sapien
taattgaggacacataccgagaagt

SEQ ID NO: 5855074 - DNA, 25 bp, Homo sapien
aggcgctattgctgaccatcggctc

SEQ ID NO: 5855075 - DNA, 25 bp, Homo sapien
ccacctctggtctaatatagcgccc

SEQ ID NO: 5855076 - DNA, 25 bp, Homo sapien
ccctgtggtcgtataatcgagcgcg

SEQ ID NO: 5855077 - DNA, 25 bp, Homo sapien
ggtgtctaatacatcgtgatacggg

SEQ ID NO: 5855078 - DNA, 25 bp, Homo sapien
gatacgggcgatataatgctcgata

SEQ ID NO: 5855079 - DNA, 25 bp, Homo sapien
tgctcgatacggcaaatatagctcc

SEQ ID NO: 5855080 - DNA, 25 bp, Homo sapien
tgctacatcagtggcgatgttcgta

SEQ ID NO: 5855081 - DNA, 25 bp, Homo sapien
cttacttacgaggctactattcgat

SEQ ID NO: 5855082 - DNA, 25 bp, Homo sapien
ctatctggtaataactgcggtgatc

SEQ ID NO: 5855083 - DNA, 25 bp, Homo sapien
atctggtaataactgcggtgatctg

SEQ ID NO: 5855084 - DNA, 25 bp, Homo sapien
cctggtagcaaatacggcgagctgg

SEQ ID NO: 5855085 - DNA, 25 bp, Homo sapien
caatataacacgcagtcgtcaatca

SEQ ID NO: 5855086 - DNA, 25 bp, Homo sapien
tgtcgtaagccagtgtgtcgtgtct

SEQ ID NO: 5855087 - DNA, 25 bp, Homo sapien
gagtctatctggatcaacgtcgcac

SEQ ID NO: 5855088 - DNA, 25 bp, Homo sapien
gacacgcgcttgacacgactgaatc

SEQ ID NO: 5855089 - DNA, 25 bp, Homo sapien
cgtggctccctgtatatcgaggtga

SEQ ID NO: 5855090 - DNA, 25 bp, Homo sapien
gagtctctcttagcatagtgtccgc

SEQ ID NO: 5855091 - DNA, 25 bp, Homo sapien
ataggatgcggcgatctcatacagc

SEQ ID NO: 5855092 - DNA, 25 bp, Homo sapien
taatatctgaccacgccttgtaatc

SEQ ID NO: 5855093 - DNA, 25 bp, Homo sapien
cgttacggtcgctgcgtactgtata

SEQ ID NO: 5855094 - DNA, 25 bp, Homo sapien
gtcggcaagcacttagtcgtgtcgt

SEQ ID NO: 5855095 - DNA, 25 bp, Homo sapien
tcggctgatataggtcgtggctccc

SEQ ID NO: 5855096 - DNA, 25 bp, Homo sapien
gaatccagcttaagagccctgcaac

SEQ ID NO: 5855097 - DNA, 25 bp, Homo sapien
tcacctcgatatacagggagccacg

SEQ ID NO: 5855098 - DNA, 25 bp, Homo sapien
acgacacgactaagtgcttgccgac

SEQ ID NO: 5855099 - DNA, 25 bp, Homo sapien
tatacagtacgcagcgaccgtaacg

SEQ ID NO: 5855100 - DNA, 25 bp, Homo sapien
agacacgacacactggcttacgaca

SEQ ID NO: 5855101 - DNA, 25 bp, Homo sapien
gctgtatgagatcgccgcatcctat

SEQ ID NO: 5855102 - DNA, 25 bp, Homo sapien
gattacaaggcgtggtcagatatta

SEQ ID NO: 5855103 - DNA, 25 bp, Homo sapien
gtgcgacgttgatccagatagactc

SEQ ID NO: 5855104 - DNA, 25 bp, Homo sapien
gcggacactatgctaagagagactc

SEQ ID NO: 5855105 - DNA, 25 bp, Homo sapien
gggagccacgacctatatcagccga

SEQ ID NO: 5855106 - DNA, 25 bp, Homo sapien
gttgcagggctcttaagctggattc

SEQ ID NO: 5855107 - DNA, 25 bp, Homo sapien
gattcagtcgtgtcaagcgcgtgtc

SEQ ID NO: 5855108 - DNA, 25 bp, Homo sapien
tgtatatcgaggtgagtctatctgg

SEQ ID NO: 5855109 - DNA, 25 bp, Homo sapien
tgtcgtccatgtatagacagtgcgc

SEQ ID NO: 5855110 - DNA, 25 bp, Homo sapien
atcatataggatgcggcgatctcat

SEQ ID NO: 5855111 - DNA, 25 bp, Homo sapien
ctcatacagcgttacggtcgctgcg

SEQ ID NO: 5855112 - DNA, 25 bp, Homo sapien
tcatcggtccgatcaattagtctag

SEQ ID NO: 5855113 - DNA, 25 bp, Homo sapien
atcgagtgagtacatgattcgtcag

SEQ ID NO: 5855114 - DNA, 25 bp, Homo sapien
tgtggatcaattacagttaggccgc

SEQ ID NO: 5855115 - DNA, 25 bp, Homo sapien
ccgctgacacattagtaacgtcggc

SEQ ID NO: 5855116 - DNA, 25 bp, Homo sapien
tgtgattctcgagcgatttatacat

SEQ ID NO: 5855117 - DNA, 25 bp, Homo sapien
ctgacagactggttggttatccaat

SEQ ID NO: 5855118 - DNA, 25 bp, Homo sapien
cacgactgaatccagcttaagagcc

SEQ ID NO: 5855119 - DNA, 25 bp, Homo sapien
cgatgatggtcacgactctgtcgat

SEQ ID NO: 5855120 - DNA, 25 bp, Homo sapien
gcctagtacgctgacggcattcaga

SEQ ID NO: 5855121 - DNA, 25 bp, Homo sapien
aacgctatggcgtgctagtcgtctc

SEQ ID NO: 5855122 - DNA, 25 bp, Homo sapien
agggctgcgaactgtcgatgatggt

SEQ ID NO: 5855123 - DNA, 25 bp, Homo sapien
acgtctgatgacctcgtatcatgtt

SEQ ID NO: 5855124 - DNA, 25 bp, Homo sapien
gtgacgcagctcttagcgcaatgta

SEQ ID NO: 5855125 - DNA, 25 bp, Homo sapien
gcagcctatatgatacgcagtcgca

SEQ ID NO: 5855126 - DNA, 25 bp, Homo sapien
tcgcatcctatcttacgtgtcagta

SEQ ID NO: 5855127 - DNA, 25 bp, Homo sapien
atgataggctagtctcgcgcagtac

SEQ ID NO: 5855128 - DNA, 25 bp, Homo sapien
agagtacgctgatcggcttatgacg

SEQ ID NO: 5855129 - DNA, 25 bp, Homo sapien
gctagtcgtctcatatacgtctgat

SEQ ID NO: 5855130 - DNA, 25 bp, Homo sapien
accatcatcgacagttcgcagccct

SEQ ID NO: 5855131 - DNA, 25 bp, Homo sapien
cgtcataagccgatcagcgtactct

SEQ ID NO: 5855132 - DNA, 25 bp, Homo sapien
gagacgactagcacgccatagcgtt

SEQ ID NO: 5855133 - DNA, 25 bp, Homo sapien
tctgaatgccgtcagcgtactaggc

SEQ ID NO: 5855134 - DNA, 25 bp, Homo sapien
atcgacagagtcgtgaccatcatcg

SEQ ID NO: 5855135 - DNA, 25 bp, Homo sapien
tgcgactgcgtatcatataggctgc

SEQ ID NO: 5855136 - DNA, 25 bp, Homo sapien
atcagacgtatatgagacgactagc

SEQ ID NO: 5855137 - DNA, 25 bp, Homo sapien
tacattgcgctaagagctgcgtcac

SEQ ID NO: 5855138 - DNA, 25 bp, Homo sapien
tactgacacgtaagataggatgcga

SEQ ID NO: 5855139 - DNA, 25 bp, Homo sapien
gtactgcgcgagactagcctatcat

SEQ ID NO: 5855140 - DNA, 25 bp, Homo sapien
aacatgatacgaggtcatcagacgt

SEQ ID NO: 5855141 - DNA, 25 bp, Homo sapien
aatgtatgtgctgttatcgaagcct

SEQ ID NO: 5855142 - DNA, 25 bp, Homo sapien
tggctgagtatgtaacgctatggcg

SEQ ID NO: 5855143 - DNA, 25 bp, Homo sapien
gtatgtaacgctatggcgtgctagt

SEQ ID NO: 5855144 - DNA, 25 bp, Homo sapien
ctgatgacctcgtatcatgttatag

SEQ ID NO: 5855145 - DNA, 25 bp, Homo sapien
tatcatgttatagggctgcgaactg

SEQ ID NO: 5855146 - DNA, 25 bp, Homo sapien
gaactgtcgatgatggtcacgactc

SEQ ID NO: 5855147 - DNA, 25 bp, Homo sapien
agaaggtgtgcagcctatatgatac

SEQ ID NO: 5855148 - DNA, 25 bp, Homo sapien
cagtacatggtagttcagccaatag

SEQ ID NO: 5855149 - DNA, 25 bp, Homo sapien
tcagccaatagatgcctagtacgct

SEQ ID NO: 5855150 - DNA, 25 bp, Homo sapien
ctgatcggcttatgacgtatgtgac

SEQ ID NO: 5855151 - DNA, 25 bp, Homo sapien
atgtgacgcagctcttagcgcaatg

SEQ ID NO: 5855152 - DNA, 25 bp, Homo sapien
atataccgctgctgcactgatatga

SEQ ID NO: 5855153 - DNA, 25 bp, Homo sapien
tctatcccgtggactcaacgtgcat

SEQ ID NO: 5855154 - DNA, 25 bp, Homo sapien
gagtgctacgcctaaactggctgtc

SEQ ID NO: 5855155 - DNA, 25 bp, Homo sapien
gatcacggtgccacaacatgctaca

SEQ ID NO: 5855156 - DNA, 25 bp, Homo sapien
tgaccttatcgacgcgcatgtgagc

SEQ ID NO: 5855157 - DNA, 25 bp, Homo sapien
tagcccgacactgtgctcgataaga

SEQ ID NO: 5855158 - DNA, 25 bp, Homo sapien
actggctgtctagcactgtagctgg

SEQ ID NO: 5855159 - DNA, 25 bp, Homo sapien
cgatgtgagcactctcatctgcgga

SEQ ID NO: 5855160 - DNA, 25 bp, Homo sapien
gtagctggtgcatgtactcgactgc

SEQ ID NO: 5855161 - DNA, 25 bp, Homo sapien
atcagcttgcgcctattatatgcct

SEQ ID NO: 5855162 - DNA, 25 bp, Homo sapien
ctatgctgagcgcgtatctgtgtac

SEQ ID NO: 5855163 - DNA, 25 bp, Homo sapien
aggcatataataggcgcaagctgat

SEQ ID NO: 5855164 - DNA, 25 bp, Homo sapien
tccgcagatgagagtgctcacatcg

SEQ ID NO: 5855165 - DNA, 25 bp, Homo sapien
ccagctacagtgctagacagccagt

SEQ ID NO: 5855166 - DNA, 25 bp, Homo sapien
tgtagcatgttgtggcaccgtgatc

SEQ ID NO: 5855167 - DNA, 25 bp, Homo sapien
tcttatcgagcacagtgtcgggcta

SEQ ID NO: 5855168 - DNA, 25 bp, Homo sapien
tcatatcagtgcagcagcggtatat

SEQ ID NO: 5855169 - DNA, 25 bp, Homo sapien
gctcacatgcgcgtcgataaggtca

SEQ ID NO: 5855170 - DNA, 25 bp, Homo sapien
atgcacgttgagtccacgggataga

SEQ ID NO: 5855171 - DNA, 25 bp, Homo sapien
gcagtcgagtacatgcaccagctac

SEQ ID NO: 5855172 - DNA, 25 bp, Homo sapien
gtacacagatacgcgctcagcatag

SEQ ID NO: 5855173 - DNA, 25 bp, Homo sapien
gacagccagtttaggcgtagcactc

SEQ ID NO: 5855174 - DNA, 25 bp, Homo sapien
atatgacgagactgtgcgctcatag

SEQ ID NO: 5855175 - DNA, 25 bp, Homo sapien
cagtgatacacgctgatgcacgtag

SEQ ID NO: 5855176 - DNA, 25 bp, Homo sapien
tcggctataacagcgagtgctacgc

SEQ ID NO: 5855177 - DNA, 25 bp, Homo sapien
cgagtgctacgcctaaactggctgt

SEQ ID NO: 5855178 - DNA, 25 bp, Homo sapien
cgcctaaactggctgtctagcactg

SEQ ID NO: 5855179 - DNA, 25 bp, Homo sapien
ctgtctagcactgtagctggtgcat

SEQ ID NO: 5855180 - DNA, 25 bp, Homo sapien
gcgtataggctgatacattagctcg

SEQ ID NO: 5855181 - DNA, 25 bp, Homo sapien
tgatacattagctcggatgctatca

SEQ ID NO: 5855182 - DNA, 25 bp, Homo sapien
gctatcagcttgcgcctattatatg

SEQ ID NO: 5855183 - DNA, 25 bp, Homo sapien
tgcgcctattatatgcctgacgcgg

SEQ ID NO: 5855184 - DNA, 25 bp, Homo sapien
gccgtgatcgttatatgacgagact

SEQ ID NO: 5855185 - DNA, 25 bp, Homo sapien
tgccatgcgtgctgtcagtatgcca

SEQ ID NO: 5855186 - DNA, 25 bp, Homo sapien
gtatcctgatcgtgcgtgcgatgtc

SEQ ID NO: 5855187 - DNA, 25 bp, Homo sapien
gagccgcaatgcacgactgatactc

SEQ ID NO: 5855188 - DNA, 25 bp, Homo sapien
ggagctatataagccgctgttgcgt

SEQ ID NO: 5855189 - DNA, 25 bp, Homo sapien
tcaacggcatgatccctatgaccgc

SEQ ID NO: 5855190 - DNA, 25 bp, Homo sapien
gagttgtcgcagtgtctgtaccaat

SEQ ID NO: 5855191 - DNA, 25 bp, Homo sapien
catgctaactgatacacgctgctcg

SEQ ID NO: 5855192 - DNA, 25 bp, Homo sapien
gctgctcgaacagtgatacgcacac

SEQ ID NO: 5855193 - DNA, 25 bp, Homo sapien
gagcagcagtcggctatgatttgca

SEQ ID NO: 5855194 - DNA, 25 bp, Homo sapien
cgatgtctgataatacgctcgcatg

SEQ ID NO: 5855195 - DNA, 25 bp, Homo sapien
gatatgtattgcgctcagatgctgg

SEQ ID NO: 5855196 - DNA, 25 bp, Homo sapien
catgcgagcgtattatcagacatcg

SEQ ID NO: 5855197 - DNA, 25 bp, Homo sapien
gcggtcatagggatcatgccgttga

SEQ ID NO: 5855198 - DNA, 25 bp, Homo sapien
tggcatactgacagcacgcatggca

SEQ ID NO: 5855199 - DNA, 25 bp, Homo sapien
cgagcagcgtgtatcagttagcatg

SEQ ID NO: 5855200 - DNA, 25 bp, Homo sapien
ccagcatctgagcgcaatacatatc

SEQ ID NO: 5855201 - DNA, 25 bp, Homo sapien
gacatcgcacgcacgatcaggatac

SEQ ID NO: 5855202 - DNA, 25 bp, Homo sapien
gagtatcagtcgtgcattgcggctc

SEQ ID NO: 5855203 - DNA, 25 bp, Homo sapien
attggtacagacactgcgacaactc

SEQ ID NO: 5855204 - DNA, 25 bp, Homo sapien
tgcaaatcatagccgactgctgctc

SEQ ID NO: 5855205 - DNA, 25 bp, Homo sapien
acgcaacagcggcttatatagctcc

SEQ ID NO: 5855206 - DNA, 25 bp, Homo sapien
gtgtgcgtatcactgttcgagcagc

SEQ ID NO: 5855207 - DNA, 25 bp, Homo sapien
tggtggagctatataagccgctgtt

SEQ ID NO: 5855208 - DNA, 25 bp, Homo sapien
ctatgaccgcgtcatgctaactgat

SEQ ID NO: 5855209 - DNA, 25 bp, Homo sapien
acactgataactatgcgcagacgct

SEQ ID NO: 5855210 - DNA, 25 bp, Homo sapien
tgcgcagacgcttgaaacgatgtga

SEQ ID NO: 5855211 - DNA, 25 bp, Homo sapien
cttctagagtatgagccgcaatgca

SEQ ID NO: 5855212 - DNA, 25 bp, Homo sapien
tatgagccgcaatgcacgactgata

SEQ ID NO: 5855213 - DNA, 25 bp, Homo sapien
tgcaatgcttgcagtatgtatcctg

SEQ ID NO: 5855214 - DNA, 25 bp, Homo sapien
tgcgatgtctgataatacgctcgca

SEQ ID NO: 5855215 - DNA, 25 bp, Homo sapien
acgctcgcatgatatgtattgcgct

SEQ ID NO: 5855216 - DNA, 25 bp, Homo sapien
ctcgcatgatatgtattgcgctcag

SEQ ID NO: 5855217 - DNA, 25 bp, Homo sapien
catgatatgtattgcgctcagatgc

SEQ ID NO: 5855218 - DNA, 25 bp, Homo sapien
gcggcctatgtctcattagcgagtc

SEQ ID NO: 5855219 - DNA, 25 bp, Homo sapien
gtatcagtttccctattggtacgtc

SEQ ID NO: 5855220 - DNA, 25 bp, Homo sapien
gctatacccgatgtcaacgcgagtt

SEQ ID NO: 5855221 - DNA, 25 bp, Homo sapien
taggcaaacgtctgtcggtcatggc

SEQ ID NO: 5855222 - DNA, 25 bp, Homo sapien
gtgatgttctcggatcgacactgct

SEQ ID NO: 5855223 - DNA, 25 bp, Homo sapien
ggatgcacgttatcgtcgagtggcc

SEQ ID NO: 5855224 - DNA, 25 bp, Homo sapien
gacactgctggtctgcgaatgactc

SEQ ID NO: 5855225 - DNA, 25 bp, Homo sapien
atatgggctcggttgacctctattg

SEQ ID NO: 5855226 - DNA, 25 bp, Homo sapien
gtcaagcgtgctcctacgttagtat

SEQ ID NO: 5855227 - DNA, 25 bp, Homo sapien
gtagaccgacgttatcgcgctatac

SEQ ID NO: 5855228 - DNA, 25 bp, Homo sapien
gattcgcacgacttcagaggatggc

SEQ ID NO: 5855229 - DNA, 25 bp, Homo sapien
agcagtgtcgatccgagaacatcac

SEQ ID NO: 5855230 - DNA, 25 bp, Homo sapien
atactaacgtaggagcacgcttgac

SEQ ID NO: 5855231 - DNA, 25 bp, Homo sapien
caatagaggtcaaccgagcccatat

SEQ ID NO: 5855232 - DNA, 25 bp, Homo sapien
gccatcctctgaagtcgtgcgaatc

SEQ ID NO: 5855233 - DNA, 25 bp, Homo sapien
aactcgcgttgacatcgggtatagc

SEQ ID NO: 5855234 - DNA, 25 bp, Homo sapien
gccatgaccgacagacgtttgccta

SEQ ID NO: 5855235 - DNA, 25 bp, Homo sapien
gacgtaccaatagggaaactgatac

SEQ ID NO: 5855236 - DNA, 25 bp, Homo sapien
gactcgctaatgagacataggccgc

SEQ ID NO: 5855237 - DNA, 25 bp, Homo sapien
gagtcattcgcagaccagcagtgtc

SEQ ID NO: 5855238 - DNA, 25 bp, Homo sapien
gtatagcgcgataacgtcggtctac

SEQ ID NO: 5855239 - DNA, 25 bp, Homo sapien
ggccactcgacgataacgtgcatcc

SEQ ID NO: 5855240 - DNA, 25 bp, Homo sapien
cgagtcgtatgtatcatgtcgggct

SEQ ID NO: 5855241 - DNA, 25 bp, Homo sapien
cgtagccacaaatgtcgttaggtag

SEQ ID NO: 5855242 - DNA, 25 bp, Homo sapien
gatgtcaacgcgagttagaccgtat

SEQ ID NO: 5855243 - DNA, 25 bp, Homo sapien
tggcgtacttctgaaacgtgatggg

SEQ ID NO: 5855244 - DNA, 25 bp, Homo sapien
ttgggcgttgttgacccgaattcgg

SEQ ID NO: 5855245 - DNA, 25 bp, Homo sapien
acgtcgtctgctataggcaaacgtc

SEQ ID NO: 5855246 - DNA, 25 bp, Homo sapien
agaggatggcactcgtcattagagt

SEQ ID NO: 5855247 - DNA, 25 bp, Homo sapien
cattagagtgatgttctcggatcga

SEQ ID NO: 5855248 - DNA, 25 bp, Homo sapien
attcactaacatggagcatcgttat

SEQ ID NO: 5855249 - DNA, 25 bp, Homo sapien
taacatggagcatcgttatctaaag

SEQ ID NO: 5855250 - DNA, 25 bp, Homo sapien
attagcgagtcgtatgtatcatgtc

SEQ ID NO: 5855251 - DNA, 25 bp, Homo sapien
gcaccgctataatgcgaggctctcc

SEQ ID NO: 5855252 - DNA, 25 bp, Homo sapien
gtatgatgctgtaccatcctgcgat

SEQ ID NO: 5855253 - DNA, 25 bp, Homo sapien
tcagaacctcagctcatcatgtatg

SEQ ID NO: 5855254 - DNA, 25 bp, Homo sapien
gataacgatgccgctgactctacgg

SEQ ID NO: 5855255 - DNA, 25 bp, Homo sapien
agcgagtcgaatccaatgccgtagc

SEQ ID NO: 5855256 - DNA, 25 bp, Homo sapien
ggtgcaaggctcctagcatgtagtc

SEQ ID NO: 5855257 - DNA, 25 bp, Homo sapien
aggtctgcgactgatcctagtgcaa

SEQ ID NO: 5855258 - DNA, 25 bp, Homo sapien
tgcgtctgagcctgagctacagcga

SEQ ID NO: 5855259 - DNA, 25 bp, Homo sapien
gcacgatcctctacattgatagcag

SEQ ID NO: 5855260 - DNA, 25 bp, Homo sapien
gagcgtatttgctgtcagaacctca

SEQ ID NO: 5855261 - DNA, 25 bp, Homo sapien
gactctacggtaatgcacgatcctc

SEQ ID NO: 5855262 - DNA, 25 bp, Homo sapien
ccgtagagtcagcggcatcgttatc

SEQ ID NO: 5855263 - DNA, 25 bp, Homo sapien
gctacggcattggattcgactcgct

SEQ ID NO: 5855264 - DNA, 25 bp, Homo sapien
ggagagcctcgcattatagcggtgc

SEQ ID NO: 5855265 - DNA, 25 bp, Homo sapien
tgaggttctgacagcaaatacgctc

SEQ ID NO: 5855266 - DNA, 25 bp, Homo sapien
tcgctgtagctcaggctcagacgca

SEQ ID NO: 5855267 - DNA, 25 bp, Homo sapien
gactacatgctaggagccttgcacc

SEQ ID NO: 5855268 - DNA, 25 bp, Homo sapien
catacatgatgagctgaggttctga

SEQ ID NO: 5855269 - DNA, 25 bp, Homo sapien
ctgctatcaatgtagaggatcgtgc

SEQ ID NO: 5855270 - DNA, 25 bp, Homo sapien
gaggatcgtgcattaccgtagagtc

SEQ ID NO: 5855271 - DNA, 25 bp, Homo sapien
atcgcaggatggtacagcatcatac

SEQ ID NO: 5855272 - DNA, 25 bp, Homo sapien
ttgcactaggatcagtcgcagacct

SEQ ID NO: 5855273 - DNA, 25 bp, Homo sapien
tacagcgatatagcctggattgtga

SEQ ID NO: 5855274 - DNA, 25 bp, Homo sapien
attgtgagcgtatttgctgtcagaa

SEQ ID NO: 5855275 - DNA, 25 bp, Homo sapien
aacctcagctcatcatgtatgatgc

SEQ ID NO: 5855276 - DNA, 25 bp, Homo sapien
accatcctgcgatactgaagatgca

SEQ ID NO: 5855277 - DNA, 25 bp, Homo sapien
ctgcgatactgaagatgcaccgcta

SEQ ID NO: 5855278 - DNA, 25 bp, Homo sapien
gcgatactgaagatgcaccgctata

SEQ ID NO: 5855279 - DNA, 25 bp, Homo sapien
gctgctcgttctcaatgcgagcgag

SEQ ID NO: 5855280 - DNA, 25 bp, Homo sapien
cctctacattgatagcagatagtct

SEQ ID NO: 5855281 - DNA, 25 bp, Homo sapien
atagcagatagtctaacgggatagc

SEQ ID NO: 5855282 - DNA, 25 bp, Homo sapien
gatagtctaacgggatagcataggt

SEQ ID NO: 5855283 - DNA, 25 bp, Homo sapien
gcataggtgcaaggctcctagcatg

SEQ ID NO: 5855284 - DNA, 25 bp, Homo sapien
actcttgtagatagatgctaaatgc

SEQ ID NO: 5855285 - DNA, 25 bp, Homo sapien
aggtgaaatgataattcgtgtcaaa

SEQ ID NO: 5855286 - DNA, 25 bp, Homo sapien
ggaagcaatggagagagggaagcaa

SEQ ID NO: 5855287 - DNA, 25 bp, Homo sapien
cattgaaatttcagctctgagtttg

SEQ ID NO: 5855288 - DNA, 25 bp, Homo sapien
gtaatattatgaggcctgagtcgca

SEQ ID NO: 5855289 - DNA, 25 bp, Homo sapien
catcatcctatttcccacaggctaa

SEQ ID NO: 5855290 - DNA, 25 bp, Homo sapien
tgtttctttttctttttttgcattg

SEQ ID NO: 5855291 - DNA, 25 bp, Homo sapien
aaactcttgtagatagatgctaaat

SEQ ID NO: 5855292 - DNA, 25 bp, Homo sapien
gctaacccaagggatgctctgtgcc

SEQ ID NO: 5855293 - DNA, 25 bp, Homo sapien
gttgttttgttgctgatgtttccat

SEQ ID NO: 5855294 - DNA, 25 bp, Homo sapien
gtagatgttgtccttaaaagatcag

SEQ ID NO: 5855295 - DNA, 25 bp, Homo sapien
taacttattaatgtgtgaattacat

SEQ ID NO: 5855296 - DNA, 25 bp, Homo sapien
tcatcctatttcccacaggctaacc

SEQ ID NO: 5855297 - DNA, 25 bp, Homo sapien
cctattatttatgaacccatgggag

SEQ ID NO: 5855298 - DNA, 25 bp, Homo sapien
gaaaggaaccagaaggctggcatca

SEQ ID NO: 5855299 - DNA, 25 bp, Homo sapien
tatttcccacaggctaacccaaggg

SEQ ID NO: 5855300 - DNA, 25 bp, Homo sapien
ggctgaagggtaaggatcagcggga

SEQ ID NO: 5855301 - DNA, 25 bp, Homo sapien
tatcctgaactgtgcgtaaagtaat

SEQ ID NO: 5855302 - DNA, 25 bp, Homo sapien
ctgagtttgtgcacatgaatactta

SEQ ID NO: 5855303 - DNA, 25 bp, Homo sapien
ttggttacttaacccaaatatcctg

SEQ ID NO: 5855304 - DNA, 25 bp, Homo sapien
atttttttcctgcattgtaatatta

SEQ ID NO: 5855305 - DNA, 25 bp, Homo sapien
tttaatttcacagtgacctagagct

SEQ ID NO: 5855306 - DNA, 25 bp, Homo sapien
gatgtttccattgaaatttcagctc

SEQ ID NO: 5855307 - DNA, 25 bp, Homo sapien
ctcttctcttcttttcttttttctg

SEQ ID NO: 5855308 - DNA, 25 bp, Homo sapien
ctctgagtttgtgcacatgaatact

SEQ ID NO: 5855309 - DNA, 25 bp, Homo sapien
agggtaaggatcagcgggaggccat

SEQ ID NO: 5855310 - DNA, 25 bp, Homo sapien
aggagccacaagtattttctttctt

SEQ ID NO: 5855311 - DNA, 25 bp, Homo sapien
ctgtgtaaatcaaatcaaaatagcc

SEQ ID NO: 5855312 - DNA, 25 bp, Homo sapien
cattgtagatgttgtccttaaaaga

SEQ ID NO: 5855313 - DNA, 25 bp, Homo sapien
gctttagggtctcaatagtgtcacc

SEQ ID NO: 5855314 - DNA, 25 bp, Homo sapien
tggcttcttctgtgggtctccctct

SEQ ID NO: 5855315 - DNA, 25 bp, Homo sapien
gaggctgaagggtaaggatcagcgg

SEQ ID NO: 5855316 - DNA, 25 bp, Homo sapien
tcagctctgagtttgtgcacatgaa

SEQ ID NO: 5855317 - DNA, 25 bp, Homo sapien
atttatgaacccatgggagacttta

SEQ ID NO: 5855318 - DNA, 25 bp, Homo sapien
gaaagcagtatggcttcttctgtgg

SEQ ID NO: 5855319 - DNA, 25 bp, Homo sapien
ggttgtggcaataggagccacaagt

SEQ ID NO: 5855320 - DNA, 25 bp, Homo sapien
tagacaaggtgaaatgataattcgt

SEQ ID NO: 5855321 - DNA, 25 bp, Homo sapien
tctcttcttttcttttttctgtttc

SEQ ID NO: 5855322 - DNA, 25 bp, Homo sapien
acatgaatacttacttgtgtttacc

SEQ ID NO: 5855323 - DNA, 25 bp, Homo sapien
agatgctaaatgcccaggcccactt

SEQ ID NO: 5855324 - DNA, 25 bp, Homo sapien
tttttttgcattgtagatgttgtcc

SEQ ID NO: 5855325 - DNA, 25 bp, Homo sapien
catttgggtaatctgatgtatagtt

SEQ ID NO: 5855326 - DNA, 25 bp, Homo sapien
cttgtgtttaccaaaggtctaaggc

SEQ ID NO: 5855327 - DNA, 25 bp, Homo sapien
ttgtaatattatgaggcctgagtcg

SEQ ID NO: 5855328 - DNA, 25 bp, Homo sapien
tttgactcccacattggttgatcac

SEQ ID NO: 5855329 - DNA, 25 bp, Homo sapien
gtgcacatgaatacttacttgtgtt

SEQ ID NO: 5855330 - DNA, 25 bp, Homo sapien
taatttcacagtgacctagagctaa

SEQ ID NO: 5855331 - DNA, 25 bp, Homo sapien
cttacttgtgtttaccaaaggtcta

SEQ ID NO: 5855332 - DNA, 25 bp, Homo sapien
agcgggaggccatccatgtaggaga

SEQ ID NO: 5855333 - DNA, 25 bp, Homo sapien
agatcagggcagtgactttcacagc

SEQ ID NO: 5855334 - DNA, 25 bp, Homo sapien
gtctcaatagtgtcacctgtgtaaa

SEQ ID NO: 5855335 - DNA, 25 bp, Homo sapien
gagctaaggtgctcccggttgtggc

SEQ ID NO: 5855336 - DNA, 25 bp, Homo sapien
tgatcacacaaaactgtcagcattt

SEQ ID NO: 5855337 - DNA, 25 bp, Homo sapien
ttgaaatttcagctctgagtttgtg

SEQ ID NO: 5855338 - DNA, 25 bp, Homo sapien
gcacatgaatacttacttgtgttta

SEQ ID NO: 5855339 - DNA, 25 bp, Homo sapien
gatgtatagttgttttgttgctgat

SEQ ID NO: 5855340 - DNA, 25 bp, Homo sapien
ctcaatagtgtcacctgtgtaaatc

SEQ ID NO: 5855341 - DNA, 25 bp, Homo sapien
ccacattggttgatcacacaaaact

SEQ ID NO: 5855342 - DNA, 25 bp, Homo sapien
atcctatttcccacaggctaaccca

SEQ ID NO: 5855343 - DNA, 25 bp, Homo sapien
tttccattgaaatttcagctctgag

SEQ ID NO: 5855344 - DNA, 25 bp, Homo sapien
tggtagatttgaaagcagtatggct

SEQ ID NO: 5855345 - DNA, 25 bp, Homo sapien
cacacaaaactgtcagcatttgggt

SEQ ID NO: 5855346 - DNA, 25 bp, Homo sapien
tgggtaatctgatgtatagttgttt

SEQ ID NO: 5855347 - DNA, 25 bp, Homo sapien
ccggttgtggcaataggagccacaa

SEQ ID NO: 5855348 - DNA, 25 bp, Homo sapien
tgataattcgtgtcaaattaatgtg

SEQ ID NO: 5855349 - DNA, 25 bp, Homo sapien
tcccacattggttgatcacacaaaa

SEQ ID NO: 5855350 - DNA, 25 bp, Homo sapien
ggcatcatcctatttcccacaggct

SEQ ID NO: 5855351 - DNA, 25 bp, Homo sapien
gctaaggtgctcccggttgtggcaa

SEQ ID NO: 5855352 - DNA, 25 bp, Homo sapien
caaaactgtcagcatttgggtaatc

SEQ ID NO: 5855353 - DNA, 25 bp, Homo sapien
tgcgtaaagtaatagagaaaagctt

SEQ ID NO: 5855354 - DNA, 25 bp, Homo sapien
tcccggttgtggcaataggagccac

SEQ ID NO: 5855355 - DNA, 25 bp, Homo sapien
tgctgatgtttccattgaaatttca

SEQ ID NO: 5855356 - DNA, 25 bp, Homo sapien
agggaagcaagaaaggaaccagaag

SEQ ID NO: 5855357 - DNA, 25 bp, Homo sapien
tacttacttgtgtttaccaaaggtc

SEQ ID NO: 5855358 - DNA, 25 bp, Homo sapien
ttcctgcattgtaatattatgaggc

SEQ ID NO: 5855359 - DNA, 25 bp, Homo sapien
tttccttttcttttctcttctcttc

SEQ ID NO: 5855360 - DNA, 25 bp, Homo sapien
caatagtgtcacctgtgtaaatcaa

SEQ ID NO: 5855361 - DNA, 25 bp, Homo sapien
gttgatcacacaaaactgtcagcat

SEQ ID NO: 5855362 - DNA, 25 bp, Homo sapien
agaaggctggcatcatcctatttcc

SEQ ID NO: 5855363 - DNA, 25 bp, Homo sapien
cccaaatatcctgaactgtgcgtaa

SEQ ID NO: 5855364 - DNA, 25 bp, Homo sapien
gaacccatgggagactttaaactct

SEQ ID NO: 5855365 - DNA, 25 bp, Homo sapien
aaactgtcagcatttgggtaatctg

SEQ ID NO: 5855366 - DNA, 25 bp, Homo sapien
taatctgatgtatagttgttttgtt

SEQ ID NO: 5855367 - DNA, 25 bp, Homo sapien
gggagactttaaactcttgtagata

SEQ ID NO: 5855368 - DNA, 25 bp, Homo sapien
tatttaatttcacagtgacctagag

SEQ ID NO: 5855369 - DNA, 25 bp, Homo sapien
caggactttgactcccacattggtt

SEQ ID NO: 5855370 - DNA, 25 bp, Homo sapien
tagggtctcaatagtgtcacctgtg

SEQ ID NO: 5855371 - DNA, 25 bp, Homo sapien
gcgagggaagcaatggagagaggga

SEQ ID NO: 5855372 - DNA, 25 bp, Homo sapien
gtgaaatgataattcgtgtcaaatt

SEQ ID NO: 5855373 - DNA, 25 bp, Homo sapien
tatagttgttttgttgctgatgttt

SEQ ID NO: 5855374 - DNA, 25 bp, Homo sapien
tgactttcacagcaggactttgact

SEQ ID NO: 5855375 - DNA, 25 bp, Homo sapien
tccattgaaatttcagctctgagtt

SEQ ID NO: 5855376 - DNA, 25 bp, Homo sapien
tagccttccctattatttatgaacc

SEQ ID NO: 5855377 - DNA, 25 bp, Homo sapien
attaaaacgaggagcgagggaagca

SEQ ID NO: 5855378 - DNA, 25 bp, Homo sapien
gcagtgactttcacagcaggacttt

SEQ ID NO: 5855379 - DNA, 25 bp, Homo sapien
aatgcccaggcccacttaacttatt

SEQ ID NO: 5855380 - DNA, 25 bp, Homo sapien
tgttttgttgctgatgtttccattg

SEQ ID NO: 5855381 - DNA, 25 bp, Homo sapien
aatatcctgaactgtgcgtaaagta

SEQ ID NO: 5855382 - DNA, 25 bp, Homo sapien
gagaattaaaacgaggagcgaggga

SEQ ID NO: 5855383 - DNA, 25 bp, Homo sapien
actagacaaggtgaaatgataattc

SEQ ID NO: 5855384 - DNA, 25 bp, Homo sapien
gggtctcaatagtgtcacctgtgta

SEQ ID NO: 5855385 - DNA, 25 bp, Homo sapien
acgaggagcgagggaagcaatggag

SEQ ID NO: 5855386 - DNA, 25 bp, Homo sapien
cctcttactagacaaggtgaaatga

SEQ ID NO: 5855387 - DNA, 25 bp, Homo sapien
atagagaaaagctttagggtctcaa

SEQ ID NO: 5855388 - DNA, 25 bp, Homo sapien
ttcacagtgacctagagctaaggtg

SEQ ID NO: 5855389 - DNA, 25 bp, Homo sapien
catgtaggagagagaattaaaacga

SEQ ID NO: 5855390 - DNA, 25 bp, Homo sapien
cagggcagtgactttcacagcagga

SEQ ID NO: 5855391 - DNA, 25 bp, Homo sapien
gcagttgagtttgaaatttgtattt

SEQ ID NO: 5855392 - DNA, 25 bp, Homo sapien
tcacagcaggactttgactcccaca

SEQ ID NO: 5855393 - DNA, 25 bp, Homo sapien
aaccagaaggctggcatcatcctat

SEQ ID NO: 5855394 - DNA, 25 bp, Homo sapien
taaatgcccaggcccacttaactta

SEQ ID NO: 5855395 - DNA, 25 bp, Homo sapien
tgcccaggcccacttaacttattaa

SEQ ID NO: 5855396 - DNA, 25 bp, Homo sapien
ctgatgtttccattgaaatttcagc

SEQ ID NO: 5855397 - DNA, 25 bp, Homo sapien
atagatgctaaatgcccaggcccac

SEQ ID NO: 5855398 - DNA, 25 bp, Homo sapien
gaggcctgagtcgcagttgagtttg

SEQ ID NO: 5855399 - DNA, 25 bp, Homo sapien
tatggcttcttctgtgggtctccct

SEQ ID NO: 5855400 - DNA, 25 bp, Homo sapien
aagctttagggtctcaatagtgtca

SEQ ID NO: 5855401 - DNA, 25 bp, Homo sapien
tgtatagttgttttgttgctgatgt

SEQ ID NO: 5855402 - DNA, 25 bp, Homo sapien
aggatcagcgggaggccatccatgt

SEQ ID NO: 5855403 - DNA, 25 bp, Homo sapien
gggtgaactggtagatttgaaagca

SEQ ID NO: 5855404 - DNA, 25 bp, Homo sapien
gaggagcgagggaagcaatggagag

SEQ ID NO: 5855405 - DNA, 25 bp, Homo sapien
tgtgaaatttttttcctgcattgta

SEQ ID NO: 5855406 - DNA, 25 bp, Homo sapien
cgtgtcaaattaatgtgaaattttt

SEQ ID NO: 5855407 - DNA, 25 bp, Homo sapien
agctctgagtttgtgcacatgaata

SEQ ID NO: 5855408 - DNA, 25 bp, Homo sapien
aaggtctaaggcatttggttactta

SEQ ID NO: 5855409 - DNA, 25 bp, Homo sapien
gcttcttctgtgggtctccctctta

SEQ ID NO: 5855410 - DNA, 25 bp, Homo sapien
cttaacttattaatgtgtgaattac

SEQ ID NO: 5855411 - DNA, 25 bp, Homo sapien
tattatgaggcctgagtcgcagttg

SEQ ID NO: 5855412 - DNA, 25 bp, Homo sapien
caaggtgaaatgataattcgtgtca

SEQ ID NO: 5855413 - DNA, 25 bp, Homo sapien
atgaatacttacttgtgtttaccaa

SEQ ID NO: 5855414 - DNA, 25 bp, Homo sapien
aatgtgaaatttttttcctgcattg

SEQ ID NO: 5855415 - DNA, 25 bp, Homo sapien
gagactttaaactcttgtagataga

SEQ ID NO: 5855416 - DNA, 25 bp, Homo sapien
aaggaaccagaaggctggcatcatc

SEQ ID NO: 5855417 - DNA, 25 bp, Homo sapien
gcaatggagagagggaagcaagaaa

SEQ ID NO: 5855418 - DNA, 25 bp, Homo sapien
gttgctgatgtttccattgaaattt

SEQ ID NO: 5855419 - DNA, 25 bp, Homo sapien
gaaatttcagctctgagtttgtgca

SEQ ID NO: 5855420 - DNA, 25 bp, Homo sapien
caaatatcctgaactgtgcgtaaag

SEQ ID NO: 5855421 - DNA, 25 bp, Homo sapien
agttgagtttgaaatttgtatttaa

SEQ ID NO: 5855422 - DNA, 25 bp, Homo sapien
ggcaataggagccacaagtattttc

SEQ ID NO: 5855423 - DNA, 25 bp, Homo sapien
actcccacattggttgatcacacaa

SEQ ID NO: 5855424 - DNA, 25 bp, Homo sapien
aaggctggcatcatcctatttccca

SEQ ID NO: 5855425 - DNA, 25 bp, Homo sapien
ttgtagatgttgtccttaaaagatc

SEQ ID NO: 5855426 - DNA, 25 bp, Homo sapien
tccttccttccttccttccttcttc

SEQ ID NO: 5855427 - DNA, 25 bp, Homo sapien
taccaaaggtctaaggcatttggtt

SEQ ID NO: 5855428 - DNA, 25 bp, Homo sapien
aatgataattcgtgtcaaattaatg

SEQ ID NO: 5855429 - DNA, 25 bp, Homo sapien
gccatccatgtaggagagagaatta

SEQ ID NO: 5855430 - DNA, 25 bp, Homo sapien
tgtgtttaccaaaggtctaaggcat

SEQ ID NO: 5855431 - DNA, 25 bp, Homo sapien
tgtttccattgaaatttcagctctg

SEQ ID NO: 5855432 - DNA, 25 bp, Homo sapien
gctaaatgcccaggcccacttaact

SEQ ID NO: 5855433 - DNA, 25 bp, Homo sapien
ttcttttctcttctcttcttttctt

SEQ ID NO: 5855434 - DNA, 25 bp, Homo sapien
gcaagaaaggaaccagaaggctggc

SEQ ID NO: 5855435 - DNA, 25 bp, Homo sapien
tcctgaactgtgcgtaaagtaatag

SEQ ID NO: 5855436 - DNA, 25 bp, Homo sapien
tttcccacaggctaacccaagggat

SEQ ID NO: 5855437 - DNA, 25 bp, Homo sapien
caaatcaaaatagccttccctatta

SEQ ID NO: 5855438 - DNA, 25 bp, Homo sapien
cctgcattgtaatattatgaggcct

SEQ ID NO: 5855439 - DNA, 25 bp, Homo sapien
cacaagtattttctttctttctttc

SEQ ID NO: 5855440 - DNA, 25 bp, Homo sapien
gagagaattaaaacgaggagcgagg

SEQ ID NO: 5855441 - DNA, 25 bp, Homo sapien
gtgctcccggttgtggcaataggag

SEQ ID NO: 5855442 - DNA, 25 bp, Homo sapien
aggctaacccaagggatgctctgtg

SEQ ID NO: 5855443 - DNA, 25 bp, Homo sapien
tttttgcattgtagatgttgtcctt

SEQ ID NO: 5855444 - DNA, 25 bp, Homo sapien
tctaaggcatttggttacttaaccc

SEQ ID NO: 5855445 - DNA, 25 bp, Homo sapien
ttactagacaaggtgaaatgataat

SEQ ID NO: 5855446 - DNA, 25 bp, Homo sapien
aagcaagaaaggaaccagaaggctg

SEQ ID NO: 5855447 - DNA, 25 bp, Homo sapien
agtgtcacctgtgtaaatcaaatca

SEQ ID NO: 5855448 - DNA, 25 bp, Homo sapien
agagagggaagcaagaaaggaacca

SEQ ID NO: 5855449 - DNA, 25 bp, Homo sapien
cacaaaactgtcagcatttgggtaa

SEQ ID NO: 5855450 - DNA, 25 bp, Homo sapien
gtagatttgaaagcagtatggcttc

SEQ ID NO: 5855451 - DNA, 25 bp, Homo sapien
atctgatgtatagttgttttgttgc

SEQ ID NO: 5855452 - DNA, 25 bp, Homo sapien
ggcctgagtcgcagttgagtttgaa

SEQ ID NO: 5855453 - DNA, 25 bp, Homo sapien
aaaagctttagggtctcaatagtgt

SEQ ID NO: 5855454 - DNA, 25 bp, Homo sapien
tttttctttttttgcattgtagatg

SEQ ID NO: 5855455 - DNA, 25 bp, Homo sapien
gacaaggtgaaatgataattcgtgt

SEQ ID NO: 5855456 - DNA, 25 bp, Homo sapien
agtaatagagaaaagctttagggtc

SEQ ID NO: 5855457 - DNA, 25 bp, Homo sapien
tgtgcgtaaagtaatagagaaaagc

SEQ ID NO: 5855458 - DNA, 25 bp, Homo sapien
atttgaaagcagtatggcttcttct

SEQ ID NO: 5855459 - DNA, 25 bp, Homo sapien
ccaaaggtctaaggcatttggttac

SEQ ID NO: 5855460 - DNA, 25 bp, Homo sapien
ttgttgctgatgtttccattgaaat

SEQ ID NO: 5855461 - DNA, 25 bp, Homo sapien
agagaaaagctttagggtctcaata

SEQ ID NO: 5855462 - DNA, 25 bp, Homo sapien
ccatgggagactttaaactcttgta

SEQ ID NO: 5855463 - DNA, 25 bp, Homo sapien
ggcatttggttacttaacccaaata

SEQ ID NO: 5855464 - DNA, 25 bp, Homo sapien
ttaacccaaatatcctgaactgtgc

SEQ ID NO: 5855465 - DNA, 25 bp, Homo sapien
tctttttttgcattgtagatgttgt

SEQ ID NO: 5855466 - DNA, 25 bp, Homo sapien
tcccacaggctaacccaagggatgc

SEQ ID NO: 5855467 - DNA, 25 bp, Homo sapien
tttcagctctgagtttgtgcacatg

SEQ ID NO: 5855468 - DNA, 25 bp, Homo sapien
ggaagggggtgaactggtagatttg

SEQ ID NO: 5855469 - DNA, 25 bp, Homo sapien
tccttttcttttctcttctcttctt

SEQ ID NO: 5855470 - DNA, 25 bp, Homo sapien
attggttgatcacacaaaactgtca

SEQ ID NO: 5855471 - DNA, 25 bp, Homo sapien
aagggggtgaactggtagatttgaa

SEQ ID NO: 5855472 - DNA, 25 bp, Homo sapien
tgcattgtagatgttgtccttaaaa

SEQ ID NO: 5855473 - DNA, 25 bp, Homo sapien
ccaagggatgctctgtgcctttcct

SEQ ID NO: 5855474 - DNA, 25 bp, Homo sapien
cttaaaagatcagggcagtgacttt

SEQ ID NO: 5855475 - DNA, 25 bp, Homo sapien
atgggagactttaaactcttgtaga

SEQ ID NO: 5855476 - DNA, 25 bp, Homo sapien
aggagagagaattaaaacgaggagc

SEQ ID NO: 5855477 - DNA, 25 bp, Homo sapien
tgtcacctgtgtaaatcaaatcaaa

SEQ ID NO: 5855478 - DNA, 25 bp, Homo sapien
gtaggagagagaattaaaacgagga

SEQ ID NO: 5855479 - DNA, 25 bp, Homo sapien
tttcacagcaggactttgactccca

SEQ ID NO: 5855480 - DNA, 25 bp, Homo sapien
tcaaaatagccttccctattattta

SEQ ID NO: 5855481 - DNA, 25 bp, Homo sapien
cctatttcccacaggctaacccaag

SEQ ID NO: 5855482 - DNA, 25 bp, Homo sapien
cattgtaatattatgaggcctgagt

SEQ ID NO: 5855483 - DNA, 25 bp, Homo sapien
ggtaatctgatgtatagttgttttg

SEQ ID NO: 5855484 - DNA, 25 bp, Homo sapien
taacccaagggatgctctgtgcctt

SEQ ID NO: 5855485 - DNA, 25 bp, Homo sapien
tttagggtctcaatagtgtcacctg

SEQ ID NO: 5855486 - DNA, 25 bp, Homo sapien
actgtgcgtaaagtaatagagaaaa

SEQ ID NO: 5855487 - DNA, 25 bp, Homo sapien
atcagggcagtgactttcacagcag

SEQ ID NO: 5855488 - DNA, 25 bp, Homo sapien
agggaagcaatggagagagggaagc

SEQ ID NO: 5855489 - DNA, 25 bp, Homo sapien
gggggtgaactggtagatttgaaag

SEQ ID NO: 5855490 - DNA, 25 bp, Homo sapien
ctgaagggtaaggatcagcgggagg

SEQ ID NO: 5855491 - DNA, 25 bp, Homo sapien
gaagggtaaggatcagcgggaggcc

SEQ ID NO: 5855492 - DNA, 25 bp, Homo sapien
cttctgtgggtctccctcttactag

SEQ ID NO: 5855493 - DNA, 25 bp, Homo sapien
gaaatttgtatttaatttcacagtg

SEQ ID NO: 5855494 - DNA, 25 bp, Homo sapien
gtagatagatgctaaatgcccaggc

SEQ ID NO: 5855495 - DNA, 25 bp, Homo sapien
ccagaaggctggcatcatcctattt

SEQ ID NO: 5855496 - DNA, 25 bp, Homo sapien
aatcaaaatagccttccctattatt

SEQ ID NO: 5855497 - DNA, 25 bp, Homo sapien
ttttgttgctgatgtttccattgaa

SEQ ID NO: 5855498 - DNA, 25 bp, Homo sapien
atgaacccatgggagactttaaact

SEQ ID NO: 5855499 - DNA, 25 bp, Homo sapien
atagtgtcacctgtgtaaatcaaat

SEQ ID NO: 5855500 - DNA, 25 bp, Homo sapien
actgtcagcatttgggtaatctgat

SEQ ID NO: 5855501 - DNA, 25 bp, Homo sapien
taaggcatttggttacttaacccaa

SEQ ID NO: 5855502 - DNA, 25 bp, Homo sapien
actttgactcccacattggttgatc

SEQ ID NO: 5855503 - DNA, 25 bp, Homo sapien
aagcaatggagagagggaagcaaga

SEQ ID NO: 5855504 - DNA, 25 bp, Homo sapien
ggactttgactcccacattggttga

SEQ ID NO: 5855505 - DNA, 25 bp, Homo sapien
tttaccaaaggtctaaggcatttgg

SEQ ID NO: 5855506 - DNA, 25 bp, Homo sapien
aagcagtatggcttcttctgtgggt

SEQ ID NO: 5855507 - DNA, 25 bp, Homo sapien
tgcattgtaatattatgaggcctga

SEQ ID NO: 5855508 - DNA, 25 bp, Homo sapien
gaactgtgcgtaaagtaatagagaa

SEQ ID NO: 5855509 - DNA, 25 bp, Homo sapien
gatgctctgtgcctttcctggggag

SEQ ID NO: 5855510 - DNA, 25 bp, Homo sapien
tcctttccttttcttttctcttctc

SEQ ID NO: 5855511 - DNA, 25 bp, Homo sapien
tgactcccacattggttgatcacac

SEQ ID NO: 5855512 - DNA, 25 bp, Homo sapien
gttgtccttaaaagatcagggcagt

SEQ ID NO: 5855513 - DNA, 25 bp, Homo sapien
gaactggtagatttgaaagcagtat

SEQ ID NO: 5855514 - DNA, 25 bp, Homo sapien
tcacctgtgtaaatcaaatcaaaat

SEQ ID NO: 5855515 - DNA, 25 bp, Homo sapien
tcgcagttgagtttgaaatttgtat

SEQ ID NO: 5855516 - DNA, 25 bp, Homo sapien
tcagcgggaggccatccatgtagga

SEQ ID NO: 5855517 - DNA, 25 bp, Homo sapien
tccctcttactagacaaggtgaaat

SEQ ID NO: 5855518 - DNA, 25 bp, Homo sapien
ggagcgagggaagcaatggagagag

SEQ ID NO: 5855519 - DNA, 25 bp, Homo sapien
agagggaagcaagaaaggaaccaga

SEQ ID NO: 5855520 - DNA, 25 bp, Homo sapien
ataggagccacaagtattttctttc

SEQ ID NO: 5855521 - DNA, 25 bp, Homo sapien
ttttcttttctcttctcttcttttc

SEQ ID NO: 5855522 - DNA, 25 bp, Homo sapien
gggatgctctgtgcctttcctgggg

SEQ ID NO: 5855523 - DNA, 25 bp, Homo sapien
atgctaaatgcccaggcccacttaa

SEQ ID NO: 5855524 - DNA, 25 bp, Homo sapien
ttttcctgcattgtaatattatgag

SEQ ID NO: 5855525 - DNA, 25 bp, Homo sapien
caggcccacttaacttattaatgtg

SEQ ID NO: 5855526 - DNA, 25 bp, Homo sapien
agtgactttcacagcaggactttga

SEQ ID NO: 5855527 - DNA, 25 bp, Homo sapien
gtggcaataggagccacaagtattt

SEQ ID NO: 5855528 - DNA, 25 bp, Homo sapien
aaacgaggagcgagggaagcaatgg

SEQ ID NO: 5855529 - DNA, 25 bp, Homo sapien
tgagtcgcagttgagtttgaaattt

SEQ ID NO: 5855530 - DNA, 25 bp, Homo sapien
gagtttgtgcacatgaatacttact

SEQ ID NO: 5855531 - DNA, 25 bp, Homo sapien
agcatttgggtaatctgatgtatag

SEQ ID NO: 5855532 - DNA, 25 bp, Homo sapien
aatttgtatttaatttcacagtgac

SEQ ID NO: 5855533 - DNA, 25 bp, Homo sapien
gtttgtgcacatgaatacttacttg

SEQ ID NO: 5855534 - DNA, 25 bp, Homo sapien
tacttgtgtttaccaaaggtctaag

SEQ ID NO: 5855535 - DNA, 25 bp, Homo sapien
ggctggcatcatcctatttcccaca

SEQ ID NO: 5855536 - DNA, 25 bp, Homo sapien
tgctctgtgcctttcctggggaggg

SEQ ID NO: 5855537 - DNA, 25 bp, Homo sapien
ttttttcctgcattgtaatattatg

SEQ ID NO: 5855538 - DNA, 25 bp, Homo sapien
agaaaagctttagggtctcaatagt

SEQ ID NO: 5855539 - DNA, 25 bp, Homo sapien
cccacttaacttattaatgtgtgaa

SEQ ID NO: 5855540 - DNA, 25 bp, Homo sapien
ttgtagatagatgctaaatgcccag

SEQ ID NO: 5855541 - DNA, 25 bp, Homo sapien
acctgtgtaaatcaaatcaaaatag

SEQ ID NO: 5855542 - DNA, 25 bp, Homo sapien
taaggtgctcccggttgtggcaata

SEQ ID NO: 5855543 - DNA, 25 bp, Homo sapien
gtgacctagagctaaggtgctcccg

SEQ ID NO: 5855544 - DNA, 25 bp, Homo sapien
ataattcgtgtcaaattaatgtgaa

SEQ ID NO: 5855545 - DNA, 25 bp, Homo sapien
tctccctcttactagacaaggtgaa

SEQ ID NO: 5855546 - DNA, 25 bp, Homo sapien
acccaagggatgctctgtgcctttc

SEQ ID NO: 5855547 - DNA, 25 bp, Homo sapien
tttgcattgtagatgttgtccttaa

SEQ ID NO: 5855548 - DNA, 25 bp, Homo sapien
tagttgttttgttgctgatgtttcc

SEQ ID NO: 5855549 - DNA, 25 bp, Homo sapien
gatcagcgggaggccatccatgtag

SEQ ID NO: 5855550 - DNA, 25 bp, Homo sapien
ttaatgtgaaatttttttcctgcat

SEQ ID NO: 5855551 - DNA, 25 bp, Homo sapien
aattcgtgtcaaattaatgtgaaat

SEQ ID NO: 5855552 - DNA, 25 bp, Homo sapien
catttggttacttaacccaaatatc

SEQ ID NO: 5855553 - DNA, 25 bp, Homo sapien
gaatacttacttgtgtttaccaaag

SEQ ID NO: 5855554 - DNA, 25 bp, Homo sapien
ttaaactcttgtagatagatgctaa

SEQ ID NO: 5855555 - DNA, 25 bp, Homo sapien
aatattatgaggcctgagtcgcagt

SEQ ID NO: 5855556 - DNA, 25 bp, Homo sapien
atgaggcctgagtcgcagttgagtt

SEQ ID NO: 5855557 - DNA, 25 bp, Homo sapien
ggttacttaacccaaatatcctgaa

SEQ ID NO: 5855558 - DNA, 25 bp, Homo sapien
cccaggcccacttaacttattaatg

SEQ ID NO: 5855559 - DNA, 25 bp, Homo sapien
aacccaaatatcctgaactgtgcgt

SEQ ID NO: 5855560 - DNA, 25 bp, Homo sapien
gccttccctattatttatgaaccca

SEQ ID NO: 5855561 - DNA, 25 bp, Homo sapien
ggagagagggaagcaagaaaggaac

SEQ ID NO: 5855562 - DNA, 25 bp, Homo sapien
ggaaccagaaggctggcatcatcct

SEQ ID NO: 5855563 - DNA, 25 bp, Homo sapien
ttcttctgtgggtctccctcttact

SEQ ID NO: 5855564 - DNA, 25 bp, Homo sapien
aattaatgtgaaatttttttcctgc

SEQ ID NO: 5855565 - DNA, 25 bp, Homo sapien
tctttttctttttttgcattgtaga

SEQ ID NO: 5855566 - DNA, 25 bp, Homo sapien
gtaaatcaaatcaaaatagccttcc

SEQ ID NO: 5855567 - DNA, 25 bp, Homo sapien
actggtagatttgaaagcagtatgg

SEQ ID NO: 5855568 - DNA, 25 bp, Homo sapien
tttctttttttgcattgtagatgtt

SEQ ID NO: 5855569 - DNA, 25 bp, Homo sapien
atcaaatcaaaatagccttccctat

SEQ ID NO: 5855570 - DNA, 25 bp, Homo sapien
tttgggtaatctgatgtatagttgt

SEQ ID NO: 5855571 - DNA, 25 bp, Homo sapien
tgtccttaaaagatcagggcagtga

SEQ ID NO: 5855572 - DNA, 25 bp, Homo sapien
aaagatcagggcagtgactttcaca

SEQ ID NO: 5855573 - DNA, 25 bp, Homo sapien
ggtaaggatcagcgggaggccatcc

SEQ ID NO: 5855574 - DNA, 25 bp, Homo sapien
tgaaatttttttcctgcattgtaat

SEQ ID NO: 5855575 - DNA, 25 bp, Homo sapien
aaatcaaatcaaaatagccttccct

SEQ ID NO: 5855576 - DNA, 25 bp, Homo sapien
aggccatccatgtaggagagagaat

SEQ ID NO: 5855577 - DNA, 25 bp, Homo sapien
atttcacagtgacctagagctaagg

SEQ ID NO: 5855578 - DNA, 25 bp, Homo sapien
tgtgggtctccctcttactagacaa

SEQ ID NO: 5855579 - DNA, 25 bp, Homo sapien
tccctattatttatgaacccatggg

SEQ ID NO: 5855580 - DNA, 25 bp, Homo sapien
agtcgcagttgagtttgaaatttgt

SEQ ID NO: 5855581 - DNA, 25 bp, Homo sapien
tcttactagacaaggtgaaatgata

SEQ ID NO: 5855582 - DNA, 25 bp, Homo sapien
tctgtgggtctccctcttactagac

SEQ ID NO: 5855583 - DNA, 25 bp, Homo sapien
catccatgtaggagagagaattaaa

SEQ ID NO: 5855584 - DNA, 25 bp, Homo sapien
aatttcagctctgagtttgtgcaca

SEQ ID NO: 5855585 - DNA, 25 bp, Homo sapien
tccttaaaagatcagggcagtgact

SEQ ID NO: 5855586 - DNA, 25 bp, Homo sapien
gactttaaactcttgtagatagatg

SEQ ID NO: 5855587 - DNA, 25 bp, Homo sapien
atcacacaaaactgtcagcatttgg

SEQ ID NO: 5855588 - DNA, 25 bp, Homo sapien
aaaatagccttccctattatttatg

SEQ ID NO: 5855589 - DNA, 25 bp, Homo sapien
tttgtatttaatttcacagtgacct

SEQ ID NO: 5855590 - DNA, 25 bp, Homo sapien
taaaacgaggagcgagggaagcaat

SEQ ID NO: 5855591 - DNA, 25 bp, Homo sapien
ctggcatcatcctatttcccacagg

SEQ ID NO: 5855592 - DNA, 25 bp, Homo sapien
taaggatcagcgggaggccatccat

SEQ ID NO: 5855593 - DNA, 25 bp, Homo sapien
tattatttatgaacccatgggagac

SEQ ID NO: 5855594 - DNA, 25 bp, Homo sapien
ggtctccctcttactagacaaggtg

SEQ ID NO: 5855595 - DNA, 25 bp, Homo sapien
tttctttttctttttttgcattgta

SEQ ID NO: 5855596 - DNA, 25 bp, Homo sapien
ttcgtgtcaaattaatgtgaaattt

SEQ ID NO: 5855597 - DNA, 25 bp, Homo sapien
gaaatgataattcgtgtcaaattaa

SEQ ID NO: 5855598 - DNA, 25 bp, Homo sapien
ctttaaactcttgtagatagatgct

SEQ ID NO: 5855599 - DNA, 25 bp, Homo sapien
ttatttatgaacccatgggagactt

SEQ ID NO: 5855600 - DNA, 25 bp, Homo sapien
gagagagaattaaaacgaggagcga

SEQ ID NO: 5855601 - DNA, 25 bp, Homo sapien
aagggatgctctgtgcctttcctgg

SEQ ID NO: 5855602 - DNA, 25 bp, Homo sapien
aaatttttttcctgcattgtaatat

SEQ ID NO: 5855603 - DNA, 25 bp, Homo sapien
ctgatgtatagttgttttgttgctg

SEQ ID NO: 5855604 - DNA, 25 bp, Homo sapien
tgggtctccctcttactagacaagg

SEQ ID NO: 5855605 - DNA, 25 bp, Homo sapien
acattggttgatcacacaaaactgt

SEQ ID NO: 5855606 - DNA, 25 bp, Homo sapien
ttgtggcaataggagccacaagtat

SEQ ID NO: 5855607 - DNA, 25 bp, Homo sapien
agatttgaaagcagtatggcttctt

SEQ ID NO: 5855608 - DNA, 25 bp, Homo sapien
gtgtaaatcaaatcaaaatagcctt

SEQ ID NO: 5855609 - DNA, 25 bp, Homo sapien
cttccctattatttatgaacccatg

SEQ ID NO: 5855610 - DNA, 25 bp, Homo sapien
cagtgacctagagctaaggtgctcc

SEQ ID NO: 5855611 - DNA, 25 bp, Homo sapien
gctcccggttgtggcaataggagcc

SEQ ID NO: 5855612 - DNA, 25 bp, Homo sapien
aggtgctcccggttgtggcaatagg

SEQ ID NO: 5855613 - DNA, 25 bp, Homo sapien
taatagagaaaagctttagggtctc

SEQ ID NO: 5855614 - DNA, 25 bp, Homo sapien
cgggaggccatccatgtaggagaga

SEQ ID NO: 5855615 - DNA, 25 bp, Homo sapien
tgtcagcatttgggtaatctgatgt

SEQ ID NO: 5855616 - DNA, 25 bp, Homo sapien
caataggagccacaagtattttctt

SEQ ID NO: 5855617 - DNA, 25 bp, Homo sapien
ttgtgcacatgaatacttacttgtg

SEQ ID NO: 5855618 - DNA, 25 bp, Homo sapien
ttacttaacccaaatatcctgaact

SEQ ID NO: 5855619 - DNA, 25 bp, Homo sapien
tgtttaccaaaggtctaaggcattt

SEQ ID NO: 5855620 - DNA, 25 bp, Homo sapien
tggttgatcacacaaaactgtcagc

SEQ ID NO: 5855621 - DNA, 25 bp, Homo sapien
ggaggccatccatgtaggagagaga

SEQ ID NO: 5855622 - DNA, 25 bp, Homo sapien
acaggctaacccaagggatgctctg

SEQ ID NO: 5855623 - DNA, 25 bp, Homo sapien
tagagctaaggtgctcccggttgtg

SEQ ID NO: 5855624 - DNA, 25 bp, Homo sapien
tcttgtagatagatgctaaatgccc

SEQ ID NO: 5855625 - DNA, 25 bp, Homo sapien
gagccacaagtattttctttctttc

SEQ ID NO: 5855626 - DNA, 25 bp, Homo sapien
ggcccacttaacttattaatgtgtg

SEQ ID NO: 5855627 - DNA, 25 bp, Homo sapien
gaattaaaacgaggagcgagggaag

SEQ ID NO: 5855628 - DNA, 25 bp, Homo sapien
cctagagctaaggtgctcccggttg

SEQ ID NO: 5855629 - DNA, 25 bp, Homo sapien
tcagcatttgggtaatctgatgtat

SEQ ID NO: 5855630 - DNA, 25 bp, Homo sapien
tgtatttaatttcacagtgacctag

SEQ ID NO: 5855631 - DNA, 25 bp, Homo sapien
cctgagtcgcagttgagtttgaaat

SEQ ID NO: 5855632 - DNA, 25 bp, Homo sapien
acttaacccaaatatcctgaactgt

SEQ ID NO: 5855633 - DNA, 25 bp, Homo sapien
ctgtgcctttcctggggagggaagg

SEQ ID NO: 5855634 - DNA, 25 bp, Homo sapien
actttcacagcaggactttgactcc

SEQ ID NO: 5855635 - DNA, 25 bp, Homo sapien
ggtctaaggcatttggttacttaac

SEQ ID NO: 5855636 - DNA, 25 bp, Homo sapien
agcaggactttgactcccacattgg

SEQ ID NO: 5855637 - DNA, 25 bp, Homo sapien
gccacaagtattttctttctttctt

SEQ ID NO: 5855638 - DNA, 25 bp, Homo sapien
agatagatgctaaatgcccaggccc

SEQ ID NO: 5855639 - DNA, 25 bp, Homo sapien
gcagtatggcttcttctgtgggtct

SEQ ID NO: 5855640 - DNA, 25 bp, Homo sapien
acccatgggagactttaaactcttg

SEQ ID NO: 5855641 - DNA, 25 bp, Homo sapien
aatagccttccctattatttatgaa

SEQ ID NO: 5855642 - DNA, 25 bp, Homo sapien
ttctcttctcttcttttcttttttc

SEQ ID NO: 5855643 - DNA, 25 bp, Homo sapien
ctgaactgtgcgtaaagtaatagag

SEQ ID NO: 5855644 - DNA, 25 bp, Homo sapien
acagcaggactttgactcccacatt

SEQ ID NO: 5855645 - DNA, 25 bp, Homo sapien
taaaagatcagggcagtgactttca

SEQ ID NO: 5855646 - DNA, 25 bp, Homo sapien
ttatgaacccatgggagactttaaa

SEQ ID NO: 5855647 - DNA, 25 bp, Homo sapien
agtatggcttcttctgtgggtctcc

SEQ ID NO: 5855648 - DNA, 25 bp, Homo sapien
ttatgaggcctgagtcgcagttgag

SEQ ID NO: 5855649 - DNA, 25 bp, Homo sapien
ggaagcaagaaaggaaccagaaggc

SEQ ID NO: 5855650 - DNA, 25 bp, Homo sapien
ccacaggctaacccaagggatgctc

SEQ ID NO: 5855651 - DNA, 25 bp, Homo sapien
cacagtgacctagagctaaggtgct

SEQ ID NO: 5855652 - DNA, 25 bp, Homo sapien
tccatgtaggagagagaattaaaac

SEQ ID NO: 5855653 - DNA, 25 bp, Homo sapien
gacctagagctaaggtgctcccggt

SEQ ID NO: 5855654 - DNA, 25 bp, Homo sapien
gggcagtgactttcacagcaggact

SEQ ID NO: 5855655 - DNA, 25 bp, Homo sapien
aagaaaggaaccagaaggctggcat

SEQ ID NO: 5855656 - DNA, 25 bp, Homo sapien
atgttgtccttaaaagatcagggca

SEQ ID NO: 5855657 - DNA, 25 bp, Homo sapien
gtgaactggtagatttgaaagcagt

SEQ ID NO: 5855658 - DNA, 25 bp, Homo sapien
ctctgtgcctttcctggggagggaa

SEQ ID NO: 5855659 - DNA, 25 bp, Homo sapien
ttctgtttctttttctttttttgca

SEQ ID NO: 5855660 - DNA, 25 bp, Homo sapien
cacttaacttattaatgtgtgaatt

SEQ ID NO: 5855661 - DNA, 25 bp, Homo sapien
agatgttgtccttaaaagatcaggg

SEQ ID NO: 5855662 - DNA, 25 bp, Homo sapien
ttgaaagcagtatggcttcttctgt

SEQ ID NO: 5855663 - DNA, 25 bp, Homo sapien
ctcagagctgaaatttcaatggaaa

SEQ ID NO: 5855664 - DNA, 25 bp, Homo sapien
tcgctcctcgttttaattctctctc

SEQ ID NO: 5855665 - DNA, 25 bp, Homo sapien
atgctgacagttttgtgtgatcaac

SEQ ID NO: 5855666 - DNA, 25 bp, Homo sapien
attctctctcctacatggatggcct

SEQ ID NO: 5855667 - DNA, 25 bp, Homo sapien
tttcttgcttccctctctccattgc

SEQ ID NO: 5855668 - DNA, 25 bp, Homo sapien
aagaaagaaaatacttgtggctcct

SEQ ID NO: 5855669 - DNA, 25 bp, Homo sapien
ttccctccccaggaaaggcacagag

SEQ ID NO: 5855670 - DNA, 25 bp, Homo sapien
agcaccttagctctaggtcactgtg

SEQ ID NO: 5855671 - DNA, 25 bp, Homo sapien
tcttttaaggacaacatctacaatg

SEQ ID NO: 5855672 - DNA, 25 bp, Homo sapien
atcccttgggttagcctgtgggaaa

SEQ ID NO: 5855673 - DNA, 25 bp, Homo sapien
cagccttctggttcctttcttgctt

SEQ ID NO: 5855674 - DNA, 25 bp, Homo sapien
ctctctccattgcttccctcgctcc

SEQ ID NO: 5855675 - DNA, 25 bp, Homo sapien
tcactgccctgatcttttaaggaca

SEQ ID NO: 5855676 - DNA, 25 bp, Homo sapien
ggaaacatcagcaacaaaacaacta

SEQ ID NO: 5855677 - DNA, 25 bp, Homo sapien
gctcctcgttttaattctctctcct

SEQ ID NO: 5855678 - DNA, 25 bp, Homo sapien
tcgttttaattctctctcctacatg

SEQ ID NO: 5855679 - DNA, 25 bp, Homo sapien
actcaggcctcataatattacaatg

SEQ ID NO: 5855680 - DNA, 25 bp, Homo sapien
gaaagaaaatacttgtggctcctat

SEQ ID NO: 5855681 - DNA, 25 bp, Homo sapien
taatattacaatgcaggaaaaaaat

SEQ ID NO: 5855682 - DNA, 25 bp, Homo sapien
cattaataagttaagtgggcctggg

SEQ ID NO: 5855683 - DNA, 25 bp, Homo sapien
cctattgccacaaccgggagcacct

SEQ ID NO: 5855684 - DNA, 25 bp, Homo sapien
gcctcataatattacaatgcaggaa

SEQ ID NO: 5855685 - DNA, 25 bp, Homo sapien
ctttggtaaacacaagtaagtattc

SEQ ID NO: 5855686 - DNA, 25 bp, Homo sapien
tgaaagtcactgccctgatctttta

SEQ ID NO: 5855687 - DNA, 25 bp, Homo sapien
acgaattatcatttcaccttgtcta

SEQ ID NO: 5855688 - DNA, 25 bp, Homo sapien
tcttgcttccctctctccattgctt

SEQ ID NO: 5855689 - DNA, 25 bp, Homo sapien
aacacaagtaagtattcatgtgcac

SEQ ID NO: 5855690 - DNA, 25 bp, Homo sapien
ttaagtgggcctgggcatttagcat

SEQ ID NO: 5855691 - DNA, 25 bp, Homo sapien
attttgatttgatttacacaggtga

SEQ ID NO: 5855692 - DNA, 25 bp, Homo sapien
ccctccccaggaaaggcacagagca

SEQ ID NO: 5855693 - DNA, 25 bp, Homo sapien
acaacatctacaatgcaaaaaaaga

SEQ ID NO: 5855694 - DNA, 25 bp, Homo sapien
aatgtgggagtcaaagtcctgctgt

SEQ ID NO: 5855695 - DNA, 25 bp, Homo sapien
aactatacatcagattacccaaatg

SEQ ID NO: 5855696 - DNA, 25 bp, Homo sapien
ttgtggctcctattgccacaaccgg

SEQ ID NO: 5855697 - DNA, 25 bp, Homo sapien
acttgtggctcctattgccacaacc

SEQ ID NO: 5855698 - DNA, 25 bp, Homo sapien
gttttaattctctctcctacatgga

SEQ ID NO: 5855699 - DNA, 25 bp, Homo sapien
aaatacaaatttcaaactcaactgc

SEQ ID NO: 5855700 - DNA, 25 bp, Homo sapien
cacagagcatcccttgggttagcct

SEQ ID NO: 5855701 - DNA, 25 bp, Homo sapien
tgcgactcaggcctcataatattac

SEQ ID NO: 5855702 - DNA, 25 bp, Homo sapien
tctcctacatggatggcctcccgct

SEQ ID NO: 5855703 - DNA, 25 bp, Homo sapien
ggaaataggatgatgccagccttct

SEQ ID NO: 5855704 - DNA, 25 bp, Homo sapien
gagcatcccttgggttagcctgtgg

SEQ ID NO: 5855705 - DNA, 25 bp, Homo sapien
catgggttcataaataatagggaag

SEQ ID NO: 5855706 - DNA, 25 bp, Homo sapien
ttgatttacacaggtgacactattg

SEQ ID NO: 5855707 - DNA, 25 bp, Homo sapien
tgggaaataggatgatgccagcctt

SEQ ID NO: 5855708 - DNA, 25 bp, Homo sapien
ttgggttaagtaaccaaatgcctta

SEQ ID NO: 5855709 - DNA, 25 bp, Homo sapien
ccacagaagaagccatactgctttc

SEQ ID NO: 5855710 - DNA, 25 bp, Homo sapien
tctacaatgcaaaaaaagaaaaaga

SEQ ID NO: 5855711 - DNA, 25 bp, Homo sapien
cctgtgggaaataggatgatgccag

SEQ ID NO: 5855712 - DNA, 25 bp, Homo sapien
ggcacagagcatcccttgggttagc

SEQ ID NO: 5855713 - DNA, 25 bp, Homo sapien
caatggaaacatcagcaacaaaaca

SEQ ID NO: 5855714 - DNA, 25 bp, Homo sapien
cataatattacaatgcaggaaaaaa

SEQ ID NO: 5855715 - DNA, 25 bp, Homo sapien
attgcttccctcgctcctcgtttta

SEQ ID NO: 5855716 - DNA, 25 bp, Homo sapien
aaataggatgatgccagccttctgg

SEQ ID NO: 5855717 - DNA, 25 bp, Homo sapien
agttcaggatatttgggttaagtaa

SEQ ID NO: 5855718 - DNA, 25 bp, Homo sapien
ctacatggatggcctcccgctgatc

SEQ ID NO: 5855719 - DNA, 25 bp, Homo sapien
ctaggtcactgtgaaattaaataca

SEQ ID NO: 5855720 - DNA, 25 bp, Homo sapien
gaaaagaagagaagagaaaagaaaa

SEQ ID NO: 5855721 - DNA, 25 bp, Homo sapien
caaccgggagcaccttagctctagg

SEQ ID NO: 5855722 - DNA, 25 bp, Homo sapien
agggagacccacagaagaagccata

SEQ ID NO: 5855723 - DNA, 25 bp, Homo sapien
aaggctattttgatttgatttacac

SEQ ID NO: 5855724 - DNA, 25 bp, Homo sapien
ttttaaggacaacatctacaatgca

SEQ ID NO: 5855725 - DNA, 25 bp, Homo sapien
gttaagtaaccaaatgccttagacc

SEQ ID NO: 5855726 - DNA, 25 bp, Homo sapien
tttacacaggtgacactattgagac

SEQ ID NO: 5855727 - DNA, 25 bp, Homo sapien
tgccctgatcttttaaggacaacat

SEQ ID NO: 5855728 - DNA, 25 bp, Homo sapien
atggaaacatcagcaacaaaacaac

SEQ ID NO: 5855729 - DNA, 25 bp, Homo sapien
ttaaggacaacatctacaatgcaaa

SEQ ID NO: 5855730 - DNA, 25 bp, Homo sapien
attatcatttcaccttgtctagtaa

SEQ ID NO: 5855731 - DNA, 25 bp, Homo sapien
gccttctggttcctttcttgcttcc

SEQ ID NO: 5855732 - DNA, 25 bp, Homo sapien
gcctgggcatttagcatctatctac

SEQ ID NO: 5855733 - DNA, 25 bp, Homo sapien
atcagattacccaaatgctgacagt

SEQ ID NO: 5855734 - DNA, 25 bp, Homo sapien
catctatctacaagagtttaaagtc

SEQ ID NO: 5855735 - DNA, 25 bp, Homo sapien
gcatttagcatctatctacaagagt

SEQ ID NO: 5855736 - DNA, 25 bp, Homo sapien
gggcctgggcatttagcatctatct

SEQ ID NO: 5855737 - DNA, 25 bp, Homo sapien
taatagggaaggctattttgatttg

SEQ ID NO: 5855738 - DNA, 25 bp, Homo sapien
cttgggttagcctgtgggaaatagg

SEQ ID NO: 5855739 - DNA, 25 bp, Homo sapien
agttaagtgggcctgggcatttagc

SEQ ID NO: 5855740 - DNA, 25 bp, Homo sapien
ctccattgcttccctcgctcctcgt

SEQ ID NO: 5855741 - DNA, 25 bp, Homo sapien
tttgatttgatttacacaggtgaca

SEQ ID NO: 5855742 - DNA, 25 bp, Homo sapien
ctcctattgccacaaccgggagcac

SEQ ID NO: 5855743 - DNA, 25 bp, Homo sapien
ctagtaagagggagacccacagaag

SEQ ID NO: 5855744 - DNA, 25 bp, Homo sapien
aactcaactgcgactcaggcctcat

SEQ ID NO: 5855745 - DNA, 25 bp, Homo sapien
ctccccaggaaaggcacagagcatc

SEQ ID NO: 5855746 - DNA, 25 bp, Homo sapien
atttcaatggaaacatcagcaacaa

SEQ ID NO: 5855747 - DNA, 25 bp, Homo sapien
caggtgacactattgagaccctaaa

SEQ ID NO: 5855748 - DNA, 25 bp, Homo sapien
ttcaggatatttgggttaagtaacc

SEQ ID NO: 5855749 - DNA, 25 bp, Homo sapien
gaagaaggaaggaaggaaggaagga

SEQ ID NO: 5855750 - DNA, 25 bp, Homo sapien
aaatttcaaactcaactgcgactca

SEQ ID NO: 5855751 - DNA, 25 bp, Homo sapien
attacaatgcaggaaaaaaatttca

SEQ ID NO: 5855752 - DNA, 25 bp, Homo sapien
tgatttgatttacacaggtgacact

SEQ ID NO: 5855753 - DNA, 25 bp, Homo sapien
ctctccattgcttccctcgctcctc

SEQ ID NO: 5855754 - DNA, 25 bp, Homo sapien
ttgccacaaccgggagcaccttagc

SEQ ID NO: 5855755 - DNA, 25 bp, Homo sapien
aggaaaggcacagagcatcccttgg

SEQ ID NO: 5855756 - DNA, 25 bp, Homo sapien
agagtttaaagtctcccatgggttc

SEQ ID NO: 5855757 - DNA, 25 bp, Homo sapien
ggagacccacagaagaagccatact

SEQ ID NO: 5855758 - DNA, 25 bp, Homo sapien
ccattgcttccctcgctcctcgttt

SEQ ID NO: 5855759 - DNA, 25 bp, Homo sapien
tgcaaaaaaagaaaaagaaacagaa

SEQ ID NO: 5855760 - DNA, 25 bp, Homo sapien
ttgtctagtaagagggagacccaca

SEQ ID NO: 5855761 - DNA, 25 bp, Homo sapien
gggcatttagcatctatctacaaga

SEQ ID NO: 5855762 - DNA, 25 bp, Homo sapien
caccttagctctaggtcactgtgaa

SEQ ID NO: 5855763 - DNA, 25 bp, Homo sapien
aagaaaatacttgtggctcctattg

SEQ ID NO: 5855764 - DNA, 25 bp, Homo sapien
ggctcctattgccacaaccgggagc

SEQ ID NO: 5855765 - DNA, 25 bp, Homo sapien
ctgctgtgaaagtcactgccctgat

SEQ ID NO: 5855766 - DNA, 25 bp, Homo sapien
cacacattaataagttaagtgggcc

SEQ ID NO: 5855767 - DNA, 25 bp, Homo sapien
atggatggcctcccgctgatcctta

SEQ ID NO: 5855768 - DNA, 25 bp, Homo sapien
cttccctcgctcctcgttttaattc

SEQ ID NO: 5855769 - DNA, 25 bp, Homo sapien
ttcaatggaaacatcagcaacaaaa

SEQ ID NO: 5855770 - DNA, 25 bp, Homo sapien
ctctattactttacgcacagttcag

SEQ ID NO: 5855771 - DNA, 25 bp, Homo sapien
atttgatttacacaggtgacactat

SEQ ID NO: 5855772 - DNA, 25 bp, Homo sapien
tgatgccagccttctggttcctttc

SEQ ID NO: 5855773 - DNA, 25 bp, Homo sapien
ggcctcccgctgatccttacccttc

SEQ ID NO: 5855774 - DNA, 25 bp, Homo sapien
aacaaaacaactatacatcagatta

SEQ ID NO: 5855775 - DNA, 25 bp, Homo sapien
atttcacattaatttgacacgaatt

SEQ ID NO: 5855776 - DNA, 25 bp, Homo sapien
acagttcaggatatttgggttaagt

SEQ ID NO: 5855777 - DNA, 25 bp, Homo sapien
gcatcccttgggttagcctgtggga

SEQ ID NO: 5855778 - DNA, 25 bp, Homo sapien
gtctagtaagagggagacccacaga

SEQ ID NO: 5855779 - DNA, 25 bp, Homo sapien
agtattcatgtgcacaaactcagag

SEQ ID NO: 5855780 - DNA, 25 bp, Homo sapien
cagagcatcccttgggttagcctgt

SEQ ID NO: 5855781 - DNA, 25 bp, Homo sapien
ccccaggaaaggcacagagcatccc

SEQ ID NO: 5855782 - DNA, 25 bp, Homo sapien
gaccctaaagcttttctctattact

SEQ ID NO: 5855783 - DNA, 25 bp, Homo sapien
ttagcatctatctacaagagtttaa

SEQ ID NO: 5855784 - DNA, 25 bp, Homo sapien
tctggttcctttcttgcttccctct

SEQ ID NO: 5855785 - DNA, 25 bp, Homo sapien
tacacaggtgacactattgagaccc

SEQ ID NO: 5855786 - DNA, 25 bp, Homo sapien
atttagcatctatctacaagagttt

SEQ ID NO: 5855787 - DNA, 25 bp, Homo sapien
tcctcgttttaattctctctcctac

SEQ ID NO: 5855788 - DNA, 25 bp, Homo sapien
ttcacattaatttgacacgaattat

SEQ ID NO: 5855789 - DNA, 25 bp, Homo sapien
aataatagggaaggctattttgatt

SEQ ID NO: 5855790 - DNA, 25 bp, Homo sapien
gttcctttcttgcttccctctctcc

SEQ ID NO: 5855791 - DNA, 25 bp, Homo sapien
agttttgtgtgatcaaccaatgtgg

SEQ ID NO: 5855792 - DNA, 25 bp, Homo sapien
ttcacacattaataagttaagtggg

SEQ ID NO: 5855793 - DNA, 25 bp, Homo sapien
cttagacctttggtaaacacaagta

SEQ ID NO: 5855794 - DNA, 25 bp, Homo sapien
aagaaaagaagagaagagaaaagaa

SEQ ID NO: 5855795 - DNA, 25 bp, Homo sapien
tatctacaagagtttaaagtctccc

SEQ ID NO: 5855796 - DNA, 25 bp, Homo sapien
cgggagcaccttagctctaggtcac

SEQ ID NO: 5855797 - DNA, 25 bp, Homo sapien
ttggtaaacacaagtaagtattcat

SEQ ID NO: 5855798 - DNA, 25 bp, Homo sapien
ttcaaatctaccagttcaccccctt

SEQ ID NO: 5855799 - DNA, 25 bp, Homo sapien
aaatgctgacagttttgtgtgatca

SEQ ID NO: 5855800 - DNA, 25 bp, Homo sapien
caagtaagtattcatgtgcacaaac

SEQ ID NO: 5855801 - DNA, 25 bp, Homo sapien
tttaattctctctcctacatggatg

SEQ ID NO: 5855802 - DNA, 25 bp, Homo sapien
tcaaccaatgtgggagtcaaagtcc

SEQ ID NO: 5855803 - DNA, 25 bp, Homo sapien
atacttgtggctcctattgccacaa

SEQ ID NO: 5855804 - DNA, 25 bp, Homo sapien
acccaaatgctgacagttttgtgtg

SEQ ID NO: 5855805 - DNA, 25 bp, Homo sapien
taaagtctcccatgggttcataaat

SEQ ID NO: 5855806 - DNA, 25 bp, Homo sapien
ttaaatacaaatttcaaactcaact

SEQ ID NO: 5855807 - DNA, 25 bp, Homo sapien
gaattatcatttcaccttgtctagt

SEQ ID NO: 5855808 - DNA, 25 bp, Homo sapien
tacaagagtttaaagtctcccatgg

SEQ ID NO: 5855809 - DNA, 25 bp, Homo sapien
gccttagacctttggtaaacacaag

SEQ ID NO: 5855810 - DNA, 25 bp, Homo sapien
gccacaaccgggagcaccttagctc

SEQ ID NO: 5855811 - DNA, 25 bp, Homo sapien
ccttccctccccaggaaaggcacag

SEQ ID NO: 5855812 - DNA, 25 bp, Homo sapien
gccagccttctggttcctttcttgc

SEQ ID NO: 5855813 - DNA, 25 bp, Homo sapien
ataggatgatgccagccttctggtt

SEQ ID NO: 5855814 - DNA, 25 bp, Homo sapien
atgtaattcacacattaataagtta

SEQ ID NO: 5855815 - DNA, 25 bp, Homo sapien
tccctctctccattgcttccctcgc

SEQ ID NO: 5855816 - DNA, 25 bp, Homo sapien
gaaaaaagaaaagaagagaagagaa

SEQ ID NO: 5855817 - DNA, 25 bp, Homo sapien
gctgtgaaagtcactgccctgatct

SEQ ID NO: 5855818 - DNA, 25 bp, Homo sapien
tctatctacaagagtttaaagtctc

SEQ ID NO: 5855819 - DNA, 25 bp, Homo sapien
ccgctgatccttacccttcagcctc

SEQ ID NO: 5855820 - DNA, 25 bp, Homo sapien
gcaggaaaaaaatttcacattaatt

SEQ ID NO: 5855821 - DNA, 25 bp, Homo sapien
tacaatgcaaaaaaagaaaaagaaa

SEQ ID NO: 5855822 - DNA, 25 bp, Homo sapien
acaactatacatcagattacccaaa

SEQ ID NO: 5855823 - DNA, 25 bp, Homo sapien
aacatctacaatgcaaaaaaagaaa

SEQ ID NO: 5855824 - DNA, 25 bp, Homo sapien
caagagtttaaagtctcccatgggt

SEQ ID NO: 5855825 - DNA, 25 bp, Homo sapien
acagttttgtgtgatcaaccaatgt

SEQ ID NO: 5855826 - DNA, 25 bp, Homo sapien
tactttacgcacagttcaggatatt

SEQ ID NO: 5855827 - DNA, 25 bp, Homo sapien
gacctttggtaaacacaagtaagta

SEQ ID NO: 5855828 - DNA, 25 bp, Homo sapien
taagtaaccaaatgccttagacctt

SEQ ID NO: 5855829 - DNA, 25 bp, Homo sapien
tgacagttttgtgtgatcaaccaat

SEQ ID NO: 5855830 - DNA, 25 bp, Homo sapien
gagctgaaatttcaatggaaacatc

SEQ ID NO: 5855831 - DNA, 25 bp, Homo sapien
ccctgatcttttaaggacaacatct

SEQ ID NO: 5855832 - DNA, 25 bp, Homo sapien
actgcgactcaggcctcataatatt

SEQ ID NO: 5855833 - DNA, 25 bp, Homo sapien
ggtaaacacaagtaagtattcatgt

SEQ ID NO: 5855834 - DNA, 25 bp, Homo sapien
cccttgggttagcctgtgggaaata

SEQ ID NO: 5855835 - DNA, 25 bp, Homo sapien
atgccagccttctggttcctttctt

SEQ ID NO: 5855836 - DNA, 25 bp, Homo sapien
ggctattttgatttgatttacacag

SEQ ID NO: 5855837 - DNA, 25 bp, Homo sapien
agggaaggctattttgatttgattt

SEQ ID NO: 5855838 - DNA, 25 bp, Homo sapien
cacaggtgacactattgagacccta

SEQ ID NO: 5855839 - DNA, 25 bp, Homo sapien
tttgacacgaattatcatttcacct

SEQ ID NO: 5855840 - DNA, 25 bp, Homo sapien
caaactcaactgcgactcaggcctc

SEQ ID NO: 5855841 - DNA, 25 bp, Homo sapien
aggatgatgccagccttctggttcc

SEQ ID NO: 5855842 - DNA, 25 bp, Homo sapien
gaaaatacttgtggctcctattgcc

SEQ ID NO: 5855843 - DNA, 25 bp, Homo sapien
cacattaataagttaagtgggcctg

SEQ ID NO: 5855844 - DNA, 25 bp, Homo sapien
ccaggaaaggcacagagcatccctt

SEQ ID NO: 5855845 - DNA, 25 bp, Homo sapien
agctctaggtcactgtgaaattaaa

SEQ ID NO: 5855846 - DNA, 25 bp, Homo sapien
cttctggttcctttcttgcttccct

SEQ ID NO: 5855847 - DNA, 25 bp, Homo sapien
ccatactgctttcaaatctaccagt

SEQ ID NO: 5855848 - DNA, 25 bp, Homo sapien
aaatttcacattaatttgacacgaa

SEQ ID NO: 5855849 - DNA, 25 bp, Homo sapien
acgcacagttcaggatatttgggtt

SEQ ID NO: 5855850 - DNA, 25 bp, Homo sapien
caaatctaccagttcacccccttcc

SEQ ID NO: 5855851 - DNA, 25 bp, Homo sapien
agtcctgctgtgaaagtcactgccc

SEQ ID NO: 5855852 - DNA, 25 bp, Homo sapien
ttgtgtgatcaaccaatgtgggagt

SEQ ID NO: 5855853 - DNA, 25 bp, Homo sapien
tctctctcctacatggatggcctcc

SEQ ID NO: 5855854 - DNA, 25 bp, Homo sapien
atgcaggaaaaaaatttcacattaa

SEQ ID NO: 5855855 - DNA, 25 bp, Homo sapien
gcttccctctctccattgcttccct

SEQ ID NO: 5855856 - DNA, 25 bp, Homo sapien
aagtgggcctgggcatttagcatct

SEQ ID NO: 5855857 - DNA, 25 bp, Homo sapien
tgtgcacaaactcagagctgaaatt

SEQ ID NO: 5855858 - DNA, 25 bp, Homo sapien
tgggttagcctgtgggaaataggat

SEQ ID NO: 5855859 - DNA, 25 bp, Homo sapien
ttagctctaggtcactgtgaaatta

SEQ ID NO: 5855860 - DNA, 25 bp, Homo sapien
catctacaatgcaaaaaaagaaaaa

SEQ ID NO: 5855861 - DNA, 25 bp, Homo sapien
aaatttcaatggaaacatcagcaac

SEQ ID NO: 5855862 - DNA, 25 bp, Homo sapien
ttcaccttgtctagtaagagggaga

SEQ ID NO: 5855863 - DNA, 25 bp, Homo sapien
tgtgggaaataggatgatgccagcc

SEQ ID NO: 5855864 - DNA, 25 bp, Homo sapien
ttacgcacagttcaggatatttggg

SEQ ID NO: 5855865 - DNA, 25 bp, Homo sapien
atcagcaacaaaacaactatacatc

SEQ ID NO: 5855866 - DNA, 25 bp, Homo sapien
aaccaatgtgggagtcaaagtcctg

SEQ ID NO: 5855867 - DNA, 25 bp, Homo sapien
aataagttaagtgggcctgggcatt

SEQ ID NO: 5855868 - DNA, 25 bp, Homo sapien
tcaaagtcctgctgtgaaagtcact

SEQ ID NO: 5855869 - DNA, 25 bp, Homo sapien
tattgccacaaccgggagcacctta

SEQ ID NO: 5855870 - DNA, 25 bp, Homo sapien
tgacacgaattatcatttcaccttg

SEQ ID NO: 5855871 - DNA, 25 bp, Homo sapien
aggcctcataatattacaatgcagg

SEQ ID NO: 5855872 - DNA, 25 bp, Homo sapien
ttagcctgtgggaaataggatgatg

SEQ ID NO: 5855873 - DNA, 25 bp, Homo sapien
ccttagctctaggtcactgtgaaat

SEQ ID NO: 5855874 - DNA, 25 bp, Homo sapien
acactattgagaccctaaagctttt

SEQ ID NO: 5855875 - DNA, 25 bp, Homo sapien
tgggagtcaaagtcctgctgtgaaa

SEQ ID NO: 5855876 - DNA, 25 bp, Homo sapien
cataaataatagggaaggctatttt

SEQ ID NO: 5855877 - DNA, 25 bp, Homo sapien
gaaagaaagaaagaaaatacttgtg

SEQ ID NO: 5855878 - DNA, 25 bp, Homo sapien
tgcacaaactcagagctgaaatttc

SEQ ID NO: 5855879 - DNA, 25 bp, Homo sapien
atactgctttcaaatctaccagttc

SEQ ID NO: 5855880 - DNA, 25 bp, Homo sapien
ggagcaccttagctctaggtcactg

SEQ ID NO: 5855881 - DNA, 25 bp, Homo sapien
ccaaatgccttagacctttggtaaa

SEQ ID NO: 5855882 - DNA, 25 bp, Homo sapien
cagaaaaaagaaaagaagagaagag

SEQ ID NO: 5855883 - DNA, 25 bp, Homo sapien
ctctaggtcactgtgaaattaaata

SEQ ID NO: 5855884 - DNA, 25 bp, Homo sapien
aactcagagctgaaatttcaatgga

SEQ ID NO: 5855885 - DNA, 25 bp, Homo sapien
ttctctattactttacgcacagttc

SEQ ID NO: 5855886 - DNA, 25 bp, Homo sapien
atgccttagacctttggtaaacaca

SEQ ID NO: 5855887 - DNA, 25 bp, Homo sapien
taagttaagtgggcctgggcattta

SEQ ID NO: 5855888 - DNA, 25 bp, Homo sapien
tatcatttcaccttgtctagtaaga

SEQ ID NO: 5855889 - DNA, 25 bp, Homo sapien
tacaatgcaggaaaaaaatttcaca

SEQ ID NO: 5855890 - DNA, 25 bp, Homo sapien
caatgcaggaaaaaaatttcacatt

SEQ ID NO: 5855891 - DNA, 25 bp, Homo sapien
agtaagagggagacccacagaagaa

SEQ ID NO: 5855892 - DNA, 25 bp, Homo sapien
ctgggcatttagcatctatctacaa

SEQ ID NO: 5855893 - DNA, 25 bp, Homo sapien
cagattacccaaatgctgacagttt

SEQ ID NO: 5855894 - DNA, 25 bp, Homo sapien
aagcttttctctattactttacgca

SEQ ID NO: 5855895 - DNA, 25 bp, Homo sapien
ttttctctattactttacgcacagt

SEQ ID NO: 5855896 - DNA, 25 bp, Homo sapien
aagaagccatactgctttcaaatct

SEQ ID NO: 5855897 - DNA, 25 bp, Homo sapien
gaaaggcacagagcatcccttgggt

SEQ ID NO: 5855898 - DNA, 25 bp, Homo sapien
ctcaactgcgactcaggcctcataa

SEQ ID NO: 5855899 - DNA, 25 bp, Homo sapien
tgctttcaaatctaccagttcaccc

SEQ ID NO: 5855900 - DNA, 25 bp, Homo sapien
ggatggcctcccgctgatccttacc

SEQ ID NO: 5855901 - DNA, 25 bp, Homo sapien
ctattactttacgcacagttcagga

SEQ ID NO: 5855902 - DNA, 25 bp, Homo sapien
acatggatggcctcccgctgatcct

SEQ ID NO: 5855903 - DNA, 25 bp, Homo sapien
taaataatagggaaggctattttga

SEQ ID NO: 5855904 - DNA, 25 bp, Homo sapien
caggatatttgggttaagtaaccaa

SEQ ID NO: 5855905 - DNA, 25 bp, Homo sapien
atacaaatttcaaactcaactgcga

SEQ ID NO: 5855906 - DNA, 25 bp, Homo sapien
gatcttttaaggacaacatctacaa

SEQ ID NO: 5855907 - DNA, 25 bp, Homo sapien
ggttagcctgtgggaaataggatga

SEQ ID NO: 5855908 - DNA, 25 bp, Homo sapien
actattgagaccctaaagcttttct

SEQ ID NO: 5855909 - DNA, 25 bp, Homo sapien
gtctcccatgggttcataaataata

SEQ ID NO: 5855910 - DNA, 25 bp, Homo sapien
gaaagaaagaaaatacttgtggctc

SEQ ID NO: 5855911 - DNA, 25 bp, Homo sapien
agagggagacccacagaagaagcca

SEQ ID NO: 5855912 - DNA, 25 bp, Homo sapien
tttaaagtctcccatgggttcataa

SEQ ID NO: 5855913 - DNA, 25 bp, Homo sapien
agtcactgccctgatcttttaagga

SEQ ID NO: 5855914 - DNA, 25 bp, Homo sapien
gatatttgggttaagtaaccaaatg

SEQ ID NO: 5855915 - DNA, 25 bp, Homo sapien
ttcaaactcaactgcgactcaggcc

SEQ ID NO: 5855916 - DNA, 25 bp, Homo sapien
taagagggagacccacagaagaagc

SEQ ID NO: 5855917 - DNA, 25 bp, Homo sapien
ttgagaccctaaagcttttctctat

SEQ ID NO: 5855918 - DNA, 25 bp, Homo sapien
tccctcgctcctcgttttaattctc

SEQ ID NO: 5855919 - DNA, 25 bp, Homo sapien
ggaaggctattttgatttgatttac

SEQ ID NO: 5855920 - DNA, 25 bp, Homo sapien
tgaaatttcaatggaaacatcagca

SEQ ID NO: 5855921 - DNA, 25 bp, Homo sapien
caatgcaaaaaaagaaaaagaaaca

SEQ ID NO: 5855922 - DNA, 25 bp, Homo sapien
gatgatgccagccttctggttcctt

SEQ ID NO: 5855923 - DNA, 25 bp, Homo sapien
aaagtcctgctgtgaaagtcactgc

SEQ ID NO: 5855924 - DNA, 25 bp, Homo sapien
taagtattcatgtgcacaaactcag

SEQ ID NO: 5855925 - DNA, 25 bp, Homo sapien
ctcccatgggttcataaataatagg

SEQ ID NO: 5855926 - DNA, 25 bp, Homo sapien
acatcagcaacaaaacaactataca

SEQ ID NO: 5855927 - DNA, 25 bp, Homo sapien
tgacactattgagaccctaaagctt

SEQ ID NO: 5855928 - DNA, 25 bp, Homo sapien
tgcttccctcgctcctcgttttaat

SEQ ID NO: 5855929 - DNA, 25 bp, Homo sapien
ccttgtctagtaagagggagaccca

SEQ ID NO: 5855930 - DNA, 25 bp, Homo sapien
ttaatttgacacgaattatcatttc

SEQ ID NO: 5855931 - DNA, 25 bp, Homo sapien
actgctttcaaatctaccagttcac

SEQ ID NO: 5855932 - DNA, 25 bp, Homo sapien
agtaagtattcatgtgcacaaactc

SEQ ID NO: 5855933 - DNA, 25 bp, Homo sapien
caaaacaactatacatcagattacc

SEQ ID NO: 5855934 - DNA, 25 bp, Homo sapien
ctttcaaatctaccagttcaccccc

SEQ ID NO: 5855935 - DNA, 25 bp, Homo sapien
ctttacgcacagttcaggatatttg

SEQ ID NO: 5855936 - DNA, 25 bp, Homo sapien
cctcgctcctcgttttaattctctc

SEQ ID NO: 5855937 - DNA, 25 bp, Homo sapien
aaccaaatgccttagacctttggta

SEQ ID NO: 5855938 - DNA, 25 bp, Homo sapien
ttacccaaatgctgacagttttgtg

SEQ ID NO: 5855939 - DNA, 25 bp, Homo sapien
tgtgggagtcaaagtcctgctgtga

SEQ ID NO: 5855940 - DNA, 25 bp, Homo sapien
tgtgaaagtcactgccctgatcttt

SEQ ID NO: 5855941 - DNA, 25 bp, Homo sapien
ggacaacatctacaatgcaaaaaaa

SEQ ID NO: 5855942 - DNA, 25 bp, Homo sapien
cactgtgaaattaaatacaaatttc

SEQ ID NO: 5855943 - DNA, 25 bp, Homo sapien
aaatgccttagacctttggtaaaca

SEQ ID NO: 5855944 - DNA, 25 bp, Homo sapien
aaaaatttcacattaatttgacacg

SEQ ID NO: 5855945 - DNA, 25 bp, Homo sapien
gtaattcacacattaataagttaag

SEQ ID NO: 5855946 - DNA, 25 bp, Homo sapien
caactgcgactcaggcctcataata

SEQ ID NO: 5855947 - DNA, 25 bp, Homo sapien
agtcaaagtcctgctgtgaaagtca

SEQ ID NO: 5855948 - DNA, 25 bp, Homo sapien
gcttttctctattactttacgcaca

SEQ ID NO: 5855949 - DNA, 25 bp, Homo sapien
aaacaactatacatcagattaccca

SEQ ID NO: 5855950 - DNA, 25 bp, Homo sapien
ggtgacactattgagaccctaaagc

SEQ ID NO: 5855951 - DNA, 25 bp, Homo sapien
gaagagaagagaaaagaaaaggaaa

SEQ ID NO: 5855952 - DNA, 25 bp, Homo sapien
attactttacgcacagttcaggata

SEQ ID NO: 5855953 - DNA, 25 bp, Homo sapien
tagacctttggtaaacacaagtaag

SEQ ID NO: 5855954 - DNA, 25 bp, Homo sapien
aaagtcactgccctgatcttttaag

SEQ ID NO: 5855955 - DNA, 25 bp, Homo sapien
aagtctcccatgggttcataaataa

SEQ ID NO: 5855956 - DNA, 25 bp, Homo sapien
cgactcaggcctcataatattacaa

SEQ ID NO: 5855957 - DNA, 25 bp, Homo sapien
gaagccatactgctttcaaatctac

SEQ ID NO: 5855958 - DNA, 25 bp, Homo sapien
acccacagaagaagccatactgctt

SEQ ID NO: 5855959 - DNA, 25 bp, Homo sapien
cctcccgctgatccttacccttcag

SEQ ID NO: 5855960 - DNA, 25 bp, Homo sapien
atacatcagattacccaaatgctga

SEQ ID NO: 5855961 - DNA, 25 bp, Homo sapien
aaggacaacatctacaatgcaaaaa

SEQ ID NO: 5855962 - DNA, 25 bp, Homo sapien
ccaaatgctgacagttttgtgtgat

SEQ ID NO: 5855963 - DNA, 25 bp, Homo sapien
acagaagaagccatactgctttcaa

SEQ ID NO: 5855964 - DNA, 25 bp, Homo sapien
taaacacaagtaagtattcatgtgc

SEQ ID NO: 5855965 - DNA, 25 bp, Homo sapien
tctctcctacatggatggcctcccg

SEQ ID NO: 5855966 - DNA, 25 bp, Homo sapien
aattcacacattaataagttaagtg

SEQ ID NO: 5855967 - DNA, 25 bp, Homo sapien
gtcactgtgaaattaaatacaaatt

SEQ ID NO: 5855968 - DNA, 25 bp, Homo sapien
ctatacatcagattacccaaatgct

SEQ ID NO: 5855969 - DNA, 25 bp, Homo sapien
tattcatgtgcacaaactcagagct

SEQ ID NO: 5855970 - DNA, 25 bp, Homo sapien
ctgatcttttaaggacaacatctac

SEQ ID NO: 5855971 - DNA, 25 bp, Homo sapien
ttgcttccctctctccattgcttcc

SEQ ID NO: 5855972 - DNA, 25 bp, Homo sapien
ctcataatattacaatgcaggaaaa

SEQ ID NO: 5855973 - DNA, 25 bp, Homo sapien
ggttcataaataatagggaaggcta

SEQ ID NO: 5855974 - DNA, 25 bp, Homo sapien
aagaaagaaagaaaatacttgtggc

SEQ ID NO: 5855975 - DNA, 25 bp, Homo sapien
aagaagagaagagaaaagaaaagga

SEQ ID NO: 5855976 - DNA, 25 bp, Homo sapien
cacaaactcagagctgaaatttcaa

SEQ ID NO: 5855977 - DNA, 25 bp, Homo sapien
gcacagttcaggatatttgggttaa

SEQ ID NO: 5855978 - DNA, 25 bp, Homo sapien
gagaagagaaaagaaaaggaaagga

SEQ ID NO: 5855979 - DNA, 25 bp, Homo sapien
agcctgtgggaaataggatgatgcc

SEQ ID NO: 5855980 - DNA, 25 bp, Homo sapien
atttcaccttgtctagtaagaggga

SEQ ID NO: 5855981 - DNA, 25 bp, Homo sapien
agcatctatctacaagagtttaaag

SEQ ID NO: 5855982 - DNA, 25 bp, Homo sapien
ttaataagttaagtgggcctgggca

SEQ ID NO: 5855983 - DNA, 25 bp, Homo sapien
aggtcactgtgaaattaaatacaaa

SEQ ID NO: 5855984 - DNA, 25 bp, Homo sapien
cagagctgaaatttcaatggaaaca

SEQ ID NO: 5855985 - DNA, 25 bp, Homo sapien
gtgggcctgggcatttagcatctat

SEQ ID NO: 5855986 - DNA, 25 bp, Homo sapien
tcccgctgatccttacccttcagcc

SEQ ID NO: 5855987 - DNA, 25 bp, Homo sapien
cacaagtaagtattcatgtgcacaa

SEQ ID NO: 5855988 - DNA, 25 bp, Homo sapien
agccatactgctttcaaatctacca

SEQ ID NO: 5855989 - DNA, 25 bp, Homo sapien
atagggaaggctattttgatttgat

SEQ ID NO: 5855990 - DNA, 25 bp, Homo sapien
gattacccaaatgctgacagttttg

SEQ ID NO: 5855991 - DNA, 25 bp, Homo sapien
caccttgtctagtaagagggagacc

SEQ ID NO: 5855992 - DNA, 25 bp, Homo sapien
acatcagattacccaaatgctgaca

SEQ ID NO: 5855993 - DNA, 25 bp, Homo sapien
ggagtcaaagtcctgctgtgaaagt

SEQ ID NO: 5855994 - DNA, 25 bp, Homo sapien
gatttacacaggtgacactattgag

SEQ ID NO: 5855995 - DNA, 25 bp, Homo sapien
gatcaaccaatgtgggagtcaaagt

SEQ ID NO: 5855996 - DNA, 25 bp, Homo sapien
actgccctgatcttttaaggacaac

SEQ ID NO: 5855997 - DNA, 25 bp, Homo sapien
ccaatgtgggagtcaaagtcctgct

SEQ ID NO: 5855998 - DNA, 25 bp, Homo sapien
aatttgacacgaattatcatttcac

SEQ ID NO: 5855999 - DNA, 25 bp, Homo sapien
aaatacttgtggctcctattgccac

SEQ ID NO: 5856000 - DNA, 25 bp, Homo sapien
caaactcagagctgaaatttcaatg

SEQ ID NO: 5856001 - DNA, 25 bp, Homo sapien
gagaccctaaagcttttctctatta

SEQ ID NO: 5856002 - DNA, 25 bp, Homo sapien
ttcatgtgcacaaactcagagctga

SEQ ID NO: 5856003 - DNA, 25 bp, Homo sapien
tatttgggttaagtaaccaaatgcc

SEQ ID NO: 5856004 - DNA, 25 bp, Homo sapien
gtgatcaaccaatgtgggagtcaaa

SEQ ID NO: 5856005 - DNA, 25 bp, Homo sapien
tcctacatggatggcctcccgctga

SEQ ID NO: 5856006 - DNA, 25 bp, Homo sapien
taattctctctcctacatggatggc

SEQ ID NO: 5856007 - DNA, 25 bp, Homo sapien
gtggctcctattgccacaaccggga

SEQ ID NO: 5856008 - DNA, 25 bp, Homo sapien
gctgacagttttgtgtgatcaacca

SEQ ID NO: 5856009 - DNA, 25 bp, Homo sapien
tcctgctgtgaaagtcactgccctg

SEQ ID NO: 5856010 - DNA, 25 bp, Homo sapien
catgtgcacaaactcagagctgaaa

SEQ ID NO: 5856011 - DNA, 25 bp, Homo sapien
gtaaccaaatgccttagacctttgg

SEQ ID NO: 5856012 - DNA, 25 bp, Homo sapien
tctacaagagtttaaagtctcccat

SEQ ID NO: 5856013 - DNA, 25 bp, Homo sapien
tgggttcataaataatagggaaggc

SEQ ID NO: 5856014 - DNA, 25 bp, Homo sapien
tcatttcaccttgtctagtaagagg

SEQ ID NO: 5856015 - DNA, 25 bp, Homo sapien
agaagaagccatactgctttcaaat

SEQ ID NO: 5856016 - DNA, 25 bp, Homo sapien
cccatgggttcataaataataggga

SEQ ID NO: 5856017 - DNA, 25 bp, Homo sapien
gaaacagaaaaaagaaaagaagaga

SEQ ID NO: 5856018 - DNA, 25 bp, Homo sapien
agacccacagaagaagccatactgc

SEQ ID NO: 5856019 - DNA, 25 bp, Homo sapien
cattaatttgacacgaattatcatt

SEQ ID NO: 5856020 - DNA, 25 bp, Homo sapien
accgggagcaccttagctctaggtc

SEQ ID NO: 5856021 - DNA, 25 bp, Homo sapien
aaggcacagagcatcccttgggtta

SEQ ID NO: 5856022 - DNA, 25 bp, Homo sapien
cacattaatttgacacgaattatca

SEQ ID NO: 5856023 - DNA, 25 bp, Homo sapien
agtttaaagtctcccatgggttcat

SEQ ID NO: 5856024 - DNA, 25 bp, Homo sapien
ttttgtgtgatcaaccaatgtggga

SEQ ID NO: 5856025 - DNA, 25 bp, Homo sapien
gctgaaatttcaatggaaacatcag

SEQ ID NO: 5856026 - DNA, 25 bp, Homo sapien
tggttcctttcttgcttccctctct

SEQ ID NO: 5856027 - DNA, 25 bp, Homo sapien
acaaatttcaaactcaactgcgact

SEQ ID NO: 5856028 - DNA, 25 bp, Homo sapien
tcaggcctcataatattacaatgca

SEQ ID NO: 5856029 - DNA, 25 bp, Homo sapien
gcaacaaaacaactatacatcagat

SEQ ID NO: 5856030 - DNA, 25 bp, Homo sapien
atttcaaactcaactgcgactcagg

SEQ ID NO: 5856031 - DNA, 25 bp, Homo sapien
acacgaattatcatttcaccttgtc

SEQ ID NO: 5856032 - DNA, 25 bp, Homo sapien
aaacatcagcaacaaaacaactata

SEQ ID NO: 5856033 - DNA, 25 bp, Homo sapien
atattacaatgcaggaaaaaaattt

SEQ ID NO: 5856034 - DNA, 25 bp, Homo sapien
tattgagaccctaaagcttttctct

SEQ ID NO: 5856035 - DNA, 25 bp, Homo sapien
ttcataaataatagggaaggctatt

SEQ ID NO: 5856036 - DNA, 25 bp, Homo sapien
gtgtgatcaaccaatgtgggagtca

SEQ ID NO: 5856037 - DNA, 25 bp, Homo sapien
cagcaacaaaacaactatacatcag

SEQ ID NO: 5856038 - DNA, 25 bp, Homo sapien
ctattttgatttgatttacacaggt

SEQ ID NO: 5856039 - DNA, 25 bp, Homo sapien
cacaaccgggagcaccttagctcta

SEQ ID NO: 5856040 - DNA, 25 bp, Homo sapien
atggcctcccgctgatccttaccct

SEQ ID NO: 5856041 - DNA, 25 bp, Homo sapien
gggttaagtaaccaaatgccttaga

SEQ ID NO: 5856042 - DNA, 25 bp, Homo sapien
catgaagggagcagggacacgtgat

SEQ ID NO: 5856043 - DNA, 25 bp, Homo sapien
gtggttactacaagactgccctgct

SEQ ID NO: 5856044 - DNA, 25 bp, Homo sapien
gcacacagatgccttggctctgacc

SEQ ID NO: 5856045 - DNA, 25 bp, Homo sapien
gatcgtggtctccgagcctgaagaa

SEQ ID NO: 5856046 - DNA, 25 bp, Homo sapien
acctctgaaaatgtcaaaaaataga

SEQ ID NO: 5856047 - DNA, 25 bp, Homo sapien
taggaagatgtacggcaagactctc

SEQ ID NO: 5856048 - DNA, 25 bp, Homo sapien
cgtcctgacccaagtacgctgtggt

SEQ ID NO: 5856049 - DNA, 25 bp, Homo sapien
gttgcccagtttctgatgcttctca

SEQ ID NO: 5856050 - DNA, 25 bp, Homo sapien
tggctctgacccatctactgagtca

SEQ ID NO: 5856051 - DNA, 25 bp, Homo sapien
ggtcttcagaggaagaaccaaggaa

SEQ ID NO: 5856052 - DNA, 25 bp, Homo sapien
gaaccaaggaacatggatttctagc

SEQ ID NO: 5856053 - DNA, 25 bp, Homo sapien
ctgaagcttgcagactagggagccg

SEQ ID NO: 5856054 - DNA, 25 bp, Homo sapien
agcttgcagactagggagccgccca

SEQ ID NO: 5856055 - DNA, 25 bp, Homo sapien
acctctgagcaaacggaaacatcaa

SEQ ID NO: 5856056 - DNA, 25 bp, Homo sapien
caagaagtgtgagcccagcccctgc

SEQ ID NO: 5856057 - DNA, 25 bp, Homo sapien
gtttctgatgcttctcatcccatgc

SEQ ID NO: 5856058 - DNA, 25 bp, Homo sapien
agcattacctctgagcaaacggaaa

SEQ ID NO: 5856059 - DNA, 25 bp, Homo sapien
cctccatgctgaagcttgcagacta

SEQ ID NO: 5856060 - DNA, 25 bp, Homo sapien
cagtttctgatgcttctcatcccat

SEQ ID NO: 5856061 - DNA, 25 bp, Homo sapien
ccccttcacacaaaatctcctgggc

SEQ ID NO: 5856062 - DNA, 25 bp, Homo sapien
tcacttaacggaaattgttaggctc

SEQ ID NO: 5856063 - DNA, 25 bp, Homo sapien
tccctccatgctgaagcttgcagac

SEQ ID NO: 5856064 - DNA, 25 bp, Homo sapien
gcccagccctgagcatgaatcccat

SEQ ID NO: 5856065 - DNA, 25 bp, Homo sapien
acttaacggaaattgttaggctcta

SEQ ID NO: 5856066 - DNA, 25 bp, Homo sapien
gttaggctctaggtggaggaaaatt

SEQ ID NO: 5856067 - DNA, 25 bp, Homo sapien
aattgttaggctctaggtggaggaa

SEQ ID NO: 5856068 - DNA, 25 bp, Homo sapien
gattgacttaaatcttatcaagggt

SEQ ID NO: 5856069 - DNA, 25 bp, Homo sapien
ctgttgcccagtttctgatgcttct

SEQ ID NO: 5856070 - DNA, 25 bp, Homo sapien
caatcgggacactcacttaacggaa

SEQ ID NO: 5856071 - DNA, 25 bp, Homo sapien
gtgtgagcccagcccctgcagcttc

SEQ ID NO: 5856072 - DNA, 25 bp, Homo sapien
gggagcagggacacgtgatggaacg

SEQ ID NO: 5856073 - DNA, 25 bp, Homo sapien
tgagtcagggtcttcagaggaagaa

SEQ ID NO: 5856074 - DNA, 25 bp, Homo sapien
agaaagaagcttgcagtgtcctgtg

SEQ ID NO: 5856075 - DNA, 25 bp, Homo sapien
aacgtccacagctactttgcagaga

SEQ ID NO: 5856076 - DNA, 25 bp, Homo sapien
atttctaggtatgtgtataccgccc

SEQ ID NO: 5856077 - DNA, 25 bp, Homo sapien
ttcagaggaagaaccaaggaacatg

SEQ ID NO: 5856078 - DNA, 25 bp, Homo sapien
acaccatcctaatagcacgcattag

SEQ ID NO: 5856079 - DNA, 25 bp, Homo sapien
atcccatcctctgatcgtggtctcc

SEQ ID NO: 5856080 - DNA, 25 bp, Homo sapien
catctggcttttagtcttctgttgc

SEQ ID NO: 5856081 - DNA, 25 bp, Homo sapien
aagatgtacggcaagactctcagca

SEQ ID NO: 5856082 - DNA, 25 bp, Homo sapien
gctctgacccatctactgagtcagg

SEQ ID NO: 5856083 - DNA, 25 bp, Homo sapien
ttctgttgcccagtttctgatgctt

SEQ ID NO: 5856084 - DNA, 25 bp, Homo sapien
tcttatcaagggtcagtttaggaag

SEQ ID NO: 5856085 - DNA, 25 bp, Homo sapien
gttgtcttagctgctaagcatcatt

SEQ ID NO: 5856086 - DNA, 25 bp, Homo sapien
agtacgctgtggtctgagaaactcg

SEQ ID NO: 5856087 - DNA, 25 bp, Homo sapien
ctgtgggtcattccttccccttcac

SEQ ID NO: 5856088 - DNA, 25 bp, Homo sapien
gtgggcactgacctctgaaaatgtc

SEQ ID NO: 5856089 - DNA, 25 bp, Homo sapien
agtcatttctaggtatgtgtatacc

SEQ ID NO: 5856090 - DNA, 25 bp, Homo sapien
cacagggcacacagatgccttggct

SEQ ID NO: 5856091 - DNA, 25 bp, Homo sapien
tctgacccggatgatgagaccagcc

SEQ ID NO: 5856092 - DNA, 25 bp, Homo sapien
atctcctgggcacagggcacacaga

SEQ ID NO: 5856093 - DNA, 25 bp, Homo sapien
ggtaggggacacctcatctggcttt

SEQ ID NO: 5856094 - DNA, 25 bp, Homo sapien
tcagggtcttcagaggaagaaccaa

SEQ ID NO: 5856095 - DNA, 25 bp, Homo sapien
agactgccctgctgaaccttgtggg

SEQ ID NO: 5856096 - DNA, 25 bp, Homo sapien
gcagtgtcctgtgggtcattccttc

SEQ ID NO: 5856097 - DNA, 25 bp, Homo sapien
atagctctgccaatcgggacactca

SEQ ID NO: 5856098 - DNA, 25 bp, Homo sapien
atcatggccgacaccagtggttact

SEQ ID NO: 5856099 - DNA, 25 bp, Homo sapien
ctagcagttgtcttagctgctaagc

SEQ ID NO: 5856100 - DNA, 25 bp, Homo sapien
cctgaagaacatgacagaactcttc

SEQ ID NO: 5856101 - DNA, 25 bp, Homo sapien
cacggccgtggatctgagaaagggt

SEQ ID NO: 5856102 - DNA, 25 bp, Homo sapien
ggacacgtgatggaacgctgataag

SEQ ID NO: 5856103 - DNA, 25 bp, Homo sapien
agcagttgtcttagctgctaagcat

SEQ ID NO: 5856104 - DNA, 25 bp, Homo sapien
ggttactacaagactgccctgctga

SEQ ID NO: 5856105 - DNA, 25 bp, Homo sapien
tctccgagcctgaagaacatgacag

SEQ ID NO: 5856106 - DNA, 25 bp, Homo sapien
gaggaagaaccaaggaacatggatt

SEQ ID NO: 5856107 - DNA, 25 bp, Homo sapien
taaatcttatcaagggtcagtttag

SEQ ID NO: 5856108 - DNA, 25 bp, Homo sapien
tacgctgtggtctgagaaactcggg

SEQ ID NO: 5856109 - DNA, 25 bp, Homo sapien
taggctctaggtggaggaaaattct

SEQ ID NO: 5856110 - DNA, 25 bp, Homo sapien
gcagagagactctactacgccatga

SEQ ID NO: 5856111 - DNA, 25 bp, Homo sapien
atgatgagaccagcctgggtttccc

SEQ ID NO: 5856112 - DNA, 25 bp, Homo sapien
catggccgacaccagtggttactac

SEQ ID NO: 5856113 - DNA, 25 bp, Homo sapien
tcctctgatcgtggtctccgagcct

SEQ ID NO: 5856114 - DNA, 25 bp, Homo sapien
ccggatgatgagaccagcctgggtt

SEQ ID NO: 5856115 - DNA, 25 bp, Homo sapien
agtcattccctccatgctgaagctt

SEQ ID NO: 5856116 - DNA, 25 bp, Homo sapien
gctgaaccttgtgggcactgacctc

SEQ ID NO: 5856117 - DNA, 25 bp, Homo sapien
gcttgcagtgtcctgtgggtcattc

SEQ ID NO: 5856118 - DNA, 25 bp, Homo sapien
cattccttccccttcacacaaaatc

SEQ ID NO: 5856119 - DNA, 25 bp, Homo sapien
ctcagcagcatgatcatggccgaca

SEQ ID NO: 5856120 - DNA, 25 bp, Homo sapien
aaaaatagaacaagggcaagaagtg

SEQ ID NO: 5856121 - DNA, 25 bp, Homo sapien
agccctgagcatgaatcccatcctc

SEQ ID NO: 5856122 - DNA, 25 bp, Homo sapien
cttctgacccggatgatgagaccag

SEQ ID NO: 5856123 - DNA, 25 bp, Homo sapien
ccaggagtgagattgacttaaatct

SEQ ID NO: 5856124 - DNA, 25 bp, Homo sapien
aaattcttacaccatcctaatagca

SEQ ID NO: 5856125 - DNA, 25 bp, Homo sapien
attccctccatgctgaagcttgcag

SEQ ID NO: 5856126 - DNA, 25 bp, Homo sapien
tttaggaagatgtacggcaagactc

SEQ ID NO: 5856127 - DNA, 25 bp, Homo sapien
aaatctcctgggcacagggcacaca

SEQ ID NO: 5856128 - DNA, 25 bp, Homo sapien
tgagaggacacggccgtggatctga

SEQ ID NO: 5856129 - DNA, 25 bp, Homo sapien
tcaaaaaatagaacaagggcaagaa

SEQ ID NO: 5856130 - DNA, 25 bp, Homo sapien
ccatctactgagtcagggtcttcag

SEQ ID NO: 5856131 - DNA, 25 bp, Homo sapien
ctcccgtcagtcatttctaggtatg

SEQ ID NO: 5856132 - DNA, 25 bp, Homo sapien
caagtacgctgtggtctgagaaact

SEQ ID NO: 5856133 - DNA, 25 bp, Homo sapien
ttctgatgcttctcatcccatgctt

SEQ ID NO: 5856134 - DNA, 25 bp, Homo sapien
gcagccagtgagcatgtgggagagc

SEQ ID NO: 5856135 - DNA, 25 bp, Homo sapien
ttatcaagggtcagtttaggaagat

SEQ ID NO: 5856136 - DNA, 25 bp, Homo sapien
cgtggatctgagaaagggtcacata

SEQ ID NO: 5856137 - DNA, 25 bp, Homo sapien
ctagggagccgcccagccctgagca

SEQ ID NO: 5856138 - DNA, 25 bp, Homo sapien
agatgccttggctctgacccatcta

SEQ ID NO: 5856139 - DNA, 25 bp, Homo sapien
tctggcttttagtcttctgttgccc

SEQ ID NO: 5856140 - DNA, 25 bp, Homo sapien
gtgggtcattccttccccttcacac

SEQ ID NO: 5856141 - DNA, 25 bp, Homo sapien
ctgtggtctgagaaactcgggcttg

SEQ ID NO: 5856142 - DNA, 25 bp, Homo sapien
tgagaaactcgggcttgtccagtca

SEQ ID NO: 5856143 - DNA, 25 bp, Homo sapien
ttgtttccaggagtgagattgactt

SEQ ID NO: 5856144 - DNA, 25 bp, Homo sapien
catgatcatggccgacaccagtggt

SEQ ID NO: 5856145 - DNA, 25 bp, Homo sapien
ggaaacatcaacatgaagaaagaag

SEQ ID NO: 5856146 - DNA, 25 bp, Homo sapien
tgaagggagcagggacacgtgatgg

SEQ ID NO: 5856147 - DNA, 25 bp, Homo sapien
ttgcagagagactctactacgccat

SEQ ID NO: 5856148 - DNA, 25 bp, Homo sapien
agactctactacgccatgaagggag

SEQ ID NO: 5856149 - DNA, 25 bp, Homo sapien
cagactagggagccgcccagccctg

SEQ ID NO: 5856150 - DNA, 25 bp, Homo sapien
tatgagaggacacggccgtggatct

SEQ ID NO: 5856151 - DNA, 25 bp, Homo sapien
acaccagtggttactacaagactgc

SEQ ID NO: 5856152 - DNA, 25 bp, Homo sapien
agcatgtgggagagcacctctatga

SEQ ID NO: 5856153 - DNA, 25 bp, Homo sapien
tctgacccatctactgagtcagggt

SEQ ID NO: 5856154 - DNA, 25 bp, Homo sapien
ttccttccccttcacacaaaatctc

SEQ ID NO: 5856155 - DNA, 25 bp, Homo sapien
acgcattagatgggattacaaatcc

SEQ ID NO: 5856156 - DNA, 25 bp, Homo sapien
tcccttccacctctcccgtcagtca

SEQ ID NO: 5856157 - DNA, 25 bp, Homo sapien
attacaaatccccgtcctgacccaa

SEQ ID NO: 5856158 - DNA, 25 bp, Homo sapien
ttacaccatcctaatagcacgcatt

SEQ ID NO: 5856159 - DNA, 25 bp, Homo sapien
tacggcaagactctcagcagcatga

SEQ ID NO: 5856160 - DNA, 25 bp, Homo sapien
gcattagatgggattacaaatcccc

SEQ ID NO: 5856161 - DNA, 25 bp, Homo sapien
ggtctccgagcctgaagaacatgac

SEQ ID NO: 5856162 - DNA, 25 bp, Homo sapien
attagatgggattacaaatccccgt

SEQ ID NO: 5856163 - DNA, 25 bp, Homo sapien
aagaaccaaggaacatggatttcta

SEQ ID NO: 5856164 - DNA, 25 bp, Homo sapien
ctctgccaatcgggacactcactta

SEQ ID NO: 5856165 - DNA, 25 bp, Homo sapien
gcaagactctcagcagcatgatcat

SEQ ID NO: 5856166 - DNA, 25 bp, Homo sapien
gcagcatgatcatggccgacaccag

SEQ ID NO: 5856167 - DNA, 25 bp, Homo sapien
ctaatagcacgcattagatgggatt

SEQ ID NO: 5856168 - DNA, 25 bp, Homo sapien
aatccccgtcctgacccaagtacgc

SEQ ID NO: 5856169 - DNA, 25 bp, Homo sapien
aacggaaattgttaggctctaggtg

SEQ ID NO: 5856170 - DNA, 25 bp, Homo sapien
ttgacttaaatcttatcaagggtca

SEQ ID NO: 5856171 - DNA, 25 bp, Homo sapien
caaaatctcctgggcacagggcaca

SEQ ID NO: 5856172 - DNA, 25 bp, Homo sapien
agggtcagtttaggaagatgtacgg

SEQ ID NO: 5856173 - DNA, 25 bp, Homo sapien
tttcccttccacctctcccgtcagt

SEQ ID NO: 5856174 - DNA, 25 bp, Homo sapien
aaggaacattgtttccaggagtgag

SEQ ID NO: 5856175 - DNA, 25 bp, Homo sapien
catcctctgatcgtggtctccgagc

SEQ ID NO: 5856176 - DNA, 25 bp, Homo sapien
agggagccgcccagccctgagcatg

SEQ ID NO: 5856177 - DNA, 25 bp, Homo sapien
agtgagcatgtgggagagcacctct

SEQ ID NO: 5856178 - DNA, 25 bp, Homo sapien
cacctctatgagaggacacggccgt

SEQ ID NO: 5856179 - DNA, 25 bp, Homo sapien
agaccagcctgggtttcccttccac

SEQ ID NO: 5856180 - DNA, 25 bp, Homo sapien
gcactgacctctgaaaatgtcaaaa

SEQ ID NO: 5856181 - DNA, 25 bp, Homo sapien
gatgcttctcatcccatgcttctga

SEQ ID NO: 5856182 - DNA, 25 bp, Homo sapien
gagtgagattgacttaaatcttatc

SEQ ID NO: 5856183 - DNA, 25 bp, Homo sapien
cccatgcttctgacccggatgatga

SEQ ID NO: 5856184 - DNA, 25 bp, Homo sapien
tagcacgcattagatgggattacaa

SEQ ID NO: 5856185 - DNA, 25 bp, Homo sapien
aggacacggccgtggatctgagaaa

SEQ ID NO: 5856186 - DNA, 25 bp, Homo sapien
ggaagatgtacggcaagactctcag

SEQ ID NO: 5856187 - DNA, 25 bp, Homo sapien
ctaggtggaggaaaattcttacacc

SEQ ID NO: 5856188 - DNA, 25 bp, Homo sapien
accatcctaatagcacgcattagat

SEQ ID NO: 5856189 - DNA, 25 bp, Homo sapien
ccttccacctctcccgtcagtcatt

SEQ ID NO: 5856190 - DNA, 25 bp, Homo sapien
taagcatcattatcaggcagccagt

SEQ ID NO: 5856191 - DNA, 25 bp, Homo sapien
cgagcctgaagaacatgacagaact

SEQ ID NO: 5856192 - DNA, 25 bp, Homo sapien
tgcttctgacccggatgatgagacc

SEQ ID NO: 5856193 - DNA, 25 bp, Homo sapien
ccctagcattacctctgagcaaacg

SEQ ID NO: 5856194 - DNA, 25 bp, Homo sapien
tccatgctgaagcttgcagactagg

SEQ ID NO: 5856195 - DNA, 25 bp, Homo sapien
gcttcagccccgaccatgggtgggg

SEQ ID NO: 5856196 - DNA, 25 bp, Homo sapien
gtggtctgagaaactcgggcttgtc

SEQ ID NO: 5856197 - DNA, 25 bp, Homo sapien
ccttccccttcacacaaaatctcct

SEQ ID NO: 5856198 - DNA, 25 bp, Homo sapien
gcagggacacgtgatggaacgctga

SEQ ID NO: 5856199 - DNA, 25 bp, Homo sapien
agcctgaagaacatgacagaactct

SEQ ID NO: 5856200 - DNA, 25 bp, Homo sapien
tccgagcctgaagaacatgacagaa

SEQ ID NO: 5856201 - DNA, 25 bp, Homo sapien
tcatttctaggtatgtgtataccgc

SEQ ID NO: 5856202 - DNA, 25 bp, Homo sapien
ctgacccaagtacgctgtggtctga

SEQ ID NO: 5856203 - DNA, 25 bp, Homo sapien
ttcacacaaaatctcctgggcacag

SEQ ID NO: 5856204 - DNA, 25 bp, Homo sapien
aagcttgcagtgtcctgtgggtcat

SEQ ID NO: 5856205 - DNA, 25 bp, Homo sapien
ttgtccagtcattccctccatgctg

SEQ ID NO: 5856206 - DNA, 25 bp, Homo sapien
agctgctaagcatcattatcaggca

SEQ ID NO: 5856207 - DNA, 25 bp, Homo sapien
attcttacaccatcctaatagcacg

SEQ ID NO: 5856208 - DNA, 25 bp, Homo sapien
cagaggaagaaccaaggaacatgga

SEQ ID NO: 5856209 - DNA, 25 bp, Homo sapien
taggggacacctcatctggctttta

SEQ ID NO: 5856210 - DNA, 25 bp, Homo sapien
ccttcacacaaaatctcctgggcac

SEQ ID NO: 5856211 - DNA, 25 bp, Homo sapien
atgccttggctctgacccatctact

SEQ ID NO: 5856212 - DNA, 25 bp, Homo sapien
gatgtacggcaagactctcagcagc

SEQ ID NO: 5856213 - DNA, 25 bp, Homo sapien
gccgacaccagtggttactacaaga

SEQ ID NO: 5856214 - DNA, 25 bp, Homo sapien
agcatgatcatggccgacaccagtg

SEQ ID NO: 5856215 - DNA, 25 bp, Homo sapien
aatagcacgcattagatgggattac

SEQ ID NO: 5856216 - DNA, 25 bp, Homo sapien
ctctcccgtcagtcatttctaggta

SEQ ID NO: 5856217 - DNA, 25 bp, Homo sapien
atcccatgcttctgacccggatgat

SEQ ID NO: 5856218 - DNA, 25 bp, Homo sapien
aatgtcaaaaaatagaacaagggca

SEQ ID NO: 5856219 - DNA, 25 bp, Homo sapien
ggatttctagcagttgtcttagctg

SEQ ID NO: 5856220 - DNA, 25 bp, Homo sapien
ctgctaagcatcattatcaggcagc

SEQ ID NO: 5856221 - DNA, 25 bp, Homo sapien
tctcatcccatgcttctgacccgga

SEQ ID NO: 5856222 - DNA, 25 bp, Homo sapien
aaagggtcacatagctctgccaatc

SEQ ID NO: 5856223 - DNA, 25 bp, Homo sapien
tacaagactgccctgctgaaccttg

SEQ ID NO: 5856224 - DNA, 25 bp, Homo sapien
tactacgccatgaagggagcaggga

SEQ ID NO: 5856225 - DNA, 25 bp, Homo sapien
ctcatctggcttttagtcttctgtt

SEQ ID NO: 5856226 - DNA, 25 bp, Homo sapien
tggccgacaccagtggttactacaa

SEQ ID NO: 5856227 - DNA, 25 bp, Homo sapien
acatagctctgccaatcgggacact

SEQ ID NO: 5856228 - DNA, 25 bp, Homo sapien
catgtgggagagcacctctatgaga

SEQ ID NO: 5856229 - DNA, 25 bp, Homo sapien
agggtcacatagctctgccaatcgg

SEQ ID NO: 5856230 - DNA, 25 bp, Homo sapien
aaactcgggcttgtccagtcattcc

SEQ ID NO: 5856231 - DNA, 25 bp, Homo sapien
ggagccgcccagccctgagcatgaa

SEQ ID NO: 5856232 - DNA, 25 bp, Homo sapien
cacagctactttgcagagagactct

SEQ ID NO: 5856233 - DNA, 25 bp, Homo sapien
cccctgcagcttcagccccgaccat

SEQ ID NO: 5856234 - DNA, 25 bp, Homo sapien
tcctaatagcacgcattagatggga

SEQ ID NO: 5856235 - DNA, 25 bp, Homo sapien
ccctgctgaaccttgtgggcactga

SEQ ID NO: 5856236 - DNA, 25 bp, Homo sapien
ccgcccagccctgagcatgaatccc

SEQ ID NO: 5856237 - DNA, 25 bp, Homo sapien
tcctgtgggtcattccttccccttc

SEQ ID NO: 5856238 - DNA, 25 bp, Homo sapien
agccagtgagcatgtgggagagcac

SEQ ID NO: 5856239 - DNA, 25 bp, Homo sapien
ggtttcccttccacctctcccgtca

SEQ ID NO: 5856240 - DNA, 25 bp, Homo sapien
cgacaccagtggttactacaagact

SEQ ID NO: 5856241 - DNA, 25 bp, Homo sapien
acatgaagaaagaagcttgcagtgt

SEQ ID NO: 5856242 - DNA, 25 bp, Homo sapien
gtgtataccgcccaccctagcatta

SEQ ID NO: 5856243 - DNA, 25 bp, Homo sapien
ttctaggtatgtgtataccgcccac

SEQ ID NO: 5856244 - DNA, 25 bp, Homo sapien
cagcagcatgatcatggccgacacc

SEQ ID NO: 5856245 - DNA, 25 bp, Homo sapien
ctacgccatgaagggagcagggaca

SEQ ID NO: 5856246 - DNA, 25 bp, Homo sapien
aacaagggcaagaagtgtgagccca

SEQ ID NO: 5856247 - DNA, 25 bp, Homo sapien
ccagcctgggtttcccttccacctc

SEQ ID NO: 5856248 - DNA, 25 bp, Homo sapien
aggaacatggatttctagcagttgt

SEQ ID NO: 5856249 - DNA, 25 bp, Homo sapien
actacaagactgccctgctgaacct

SEQ ID NO: 5856250 - DNA, 25 bp, Homo sapien
cgtccacagctactttgcagagaga

SEQ ID NO: 5856251 - DNA, 25 bp, Homo sapien
cacaaaatctcctgggcacagggca

SEQ ID NO: 5856252 - DNA, 25 bp, Homo sapien
agtcagggtcttcagaggaagaacc

SEQ ID NO: 5856253 - DNA, 25 bp, Homo sapien
ataaggaacattgtttccaggagtg

SEQ ID NO: 5856254 - DNA, 25 bp, Homo sapien
aggtatgtgtataccgcccacccta

SEQ ID NO: 5856255 - DNA, 25 bp, Homo sapien
cagtggttactacaagactgccctg

SEQ ID NO: 5856256 - DNA, 25 bp, Homo sapien
ttctagcagttgtcttagctgctaa

SEQ ID NO: 5856257 - DNA, 25 bp, Homo sapien
aggcagccagtgagcatgtgggaga

SEQ ID NO: 5856258 - DNA, 25 bp, Homo sapien
gtcattccttccccttcacacaaaa

SEQ ID NO: 5856259 - DNA, 25 bp, Homo sapien
ggacacctcatctggcttttagtct

SEQ ID NO: 5856260 - DNA, 25 bp, Homo sapien
ggtcacatagctctgccaatcggga

SEQ ID NO: 5856261 - DNA, 25 bp, Homo sapien
gacttaaatcttatcaagggtcagt

SEQ ID NO: 5856262 - DNA, 25 bp, Homo sapien
cgggacactcacttaacggaaattg

SEQ ID NO: 5856263 - DNA, 25 bp, Homo sapien
cattgtttccaggagtgagattgac

SEQ ID NO: 5856264 - DNA, 25 bp, Homo sapien
gcacgcattagatgggattacaaat

SEQ ID NO: 5856265 - DNA, 25 bp, Homo sapien
gcatgaatcccatcctctgatcgtg

SEQ ID NO: 5856266 - DNA, 25 bp, Homo sapien
acatggatttctagcagttgtctta

SEQ ID NO: 5856267 - DNA, 25 bp, Homo sapien
tgaaccttgtgggcactgacctctg

SEQ ID NO: 5856268 - DNA, 25 bp, Homo sapien
aagggagcagggacacgtgatggaa

SEQ ID NO: 5856269 - DNA, 25 bp, Homo sapien
tgagaccagcctgggtttcccttcc

SEQ ID NO: 5856270 - DNA, 25 bp, Homo sapien
tctgagaaagggtcacatagctctg

SEQ ID NO: 5856271 - DNA, 25 bp, Homo sapien
gaacgctgataaggaacattgtttc

SEQ ID NO: 5856272 - DNA, 25 bp, Homo sapien
caaggaacatggatttctagcagtt

SEQ ID NO: 5856273 - DNA, 25 bp, Homo sapien
attatcaggcagccagtgagcatgt

SEQ ID NO: 5856274 - DNA, 25 bp, Homo sapien
agaaactcgggcttgtccagtcatt

SEQ ID NO: 5856275 - DNA, 25 bp, Homo sapien
agggcaagaagtgtgagcccagccc

SEQ ID NO: 5856276 - DNA, 25 bp, Homo sapien
cagggcacacagatgccttggctct

SEQ ID NO: 5856277 - DNA, 25 bp, Homo sapien
accagtggttactacaagactgccc

SEQ ID NO: 5856278 - DNA, 25 bp, Homo sapien
acatcaacatgaagaaagaagcttg

SEQ ID NO: 5856279 - DNA, 25 bp, Homo sapien
gtgagcccagcccctgcagcttcag

SEQ ID NO: 5856280 - DNA, 25 bp, Homo sapien
cttaaatcttatcaagggtcagttt

SEQ ID NO: 5856281 - DNA, 25 bp, Homo sapien
agccgcccagccctgagcatgaatc

SEQ ID NO: 5856282 - DNA, 25 bp, Homo sapien
caccctagcattacctctgagcaaa

SEQ ID NO: 5856283 - DNA, 25 bp, Homo sapien
cccagtttctgatgcttctcatccc

SEQ ID NO: 5856284 - DNA, 25 bp, Homo sapien
ctctgatcgtggtctccgagcctga

SEQ ID NO: 5856285 - DNA, 25 bp, Homo sapien
cctctatgagaggacacggccgtgg

SEQ ID NO: 5856286 - DNA, 25 bp, Homo sapien
acggaaacatcaacatgaagaaaga

SEQ ID NO: 5856287 - DNA, 25 bp, Homo sapien
gctactttgcagagagactctacta

SEQ ID NO: 5856288 - DNA, 25 bp, Homo sapien
gccaatcgggacactcacttaacgg

SEQ ID NO: 5856289 - DNA, 25 bp, Homo sapien
agcctgggtttcccttccacctctc

SEQ ID NO: 5856290 - DNA, 25 bp, Homo sapien
gcacccggaacgtccacagctactt

SEQ ID NO: 5856291 - DNA, 25 bp, Homo sapien
atagaacaagggcaagaagtgtgag

SEQ ID NO: 5856292 - DNA, 25 bp, Homo sapien
ttagctgctaagcatcattatcagg

SEQ ID NO: 5856293 - DNA, 25 bp, Homo sapien
agcccctgcagcttcagccccgacc

SEQ ID NO: 5856294 - DNA, 25 bp, Homo sapien
cagcttcagccccgaccatgggtgg

SEQ ID NO: 5856295 - DNA, 25 bp, Homo sapien
gatctgagaaagggtcacatagctc

SEQ ID NO: 5856296 - DNA, 25 bp, Homo sapien
gagcagggacacgtgatggaacgct

SEQ ID NO: 5856297 - DNA, 25 bp, Homo sapien
tgcagcttcagccccgaccatgggt

SEQ ID NO: 5856298 - DNA, 25 bp, Homo sapien
ggagagcacctctatgagaggacac

SEQ ID NO: 5856299 - DNA, 25 bp, Homo sapien
gtgatggaacgctgataaggaacat

SEQ ID NO: 5856300 - DNA, 25 bp, Homo sapien
acacctcatctggcttttagtcttc

SEQ ID NO: 5856301 - DNA, 25 bp, Homo sapien
gggtcattccttccccttcacacaa

SEQ ID NO: 5856302 - DNA, 25 bp, Homo sapien
cttggctctgacccatctactgagt

SEQ ID NO: 5856303 - DNA, 25 bp, Homo sapien
ctctgagcaaacggaaacatcaaca

SEQ ID NO: 5856304 - DNA, 25 bp, Homo sapien
tcagtttaggaagatgtacggcaag

SEQ ID NO: 5856305 - DNA, 25 bp, Homo sapien
tcattatcaggcagccagtgagcat

SEQ ID NO: 5856306 - DNA, 25 bp, Homo sapien
accgcccaccctagcattacctctg

SEQ ID NO: 5856307 - DNA, 25 bp, Homo sapien
ccagtcattccctccatgctgaagc

SEQ ID NO: 5856308 - DNA, 25 bp, Homo sapien
ggcaagaagtgtgagcccagcccct

SEQ ID NO: 5856309 - DNA, 25 bp, Homo sapien
atgaagaaagaagcttgcagtgtcc

SEQ ID NO: 5856310 - DNA, 25 bp, Homo sapien
ctctaggtggaggaaaattcttaca

SEQ ID NO: 5856311 - DNA, 25 bp, Homo sapien
gagattgacttaaatcttatcaagg

SEQ ID NO: 5856312 - DNA, 25 bp, Homo sapien
atttctagcagttgtcttagctgct

SEQ ID NO: 5856313 - DNA, 25 bp, Homo sapien
gtccagtcattccctccatgctgaa

SEQ ID NO: 5856314 - DNA, 25 bp, Homo sapien
tcaggcagccagtgagcatgtggga

SEQ ID NO: 5856315 - DNA, 25 bp, Homo sapien
agaagcttgcagtgtcctgtgggtc

SEQ ID NO: 5856316 - DNA, 25 bp, Homo sapien
ttagtcttctgttgcccagtttctg

SEQ ID NO: 5856317 - DNA, 25 bp, Homo sapien
cctgcagcttcagccccgaccatgg

SEQ ID NO: 5856318 - DNA, 25 bp, Homo sapien
ctttgcagagagactctactacgcc

SEQ ID NO: 5856319 - DNA, 25 bp, Homo sapien
ggattacaaatccccgtcctgaccc

SEQ ID NO: 5856320 - DNA, 25 bp, Homo sapien
ttactacaagactgccctgctgaac

SEQ ID NO: 5856321 - DNA, 25 bp, Homo sapien
tcttacaccatcctaatagcacgca

SEQ ID NO: 5856322 - DNA, 25 bp, Homo sapien
tatcaggcagccagtgagcatgtgg

SEQ ID NO: 5856323 - DNA, 25 bp, Homo sapien
tctatgagaggacacggccgtggat

SEQ ID NO: 5856324 - DNA, 25 bp, Homo sapien
ctgccaatcgggacactcacttaac

SEQ ID NO: 5856325 - DNA, 25 bp, Homo sapien
gggcactgacctctgaaaatgtcaa

SEQ ID NO: 5856326 - DNA, 25 bp, Homo sapien
tctactacgccatgaagggagcagg

SEQ ID NO: 5856327 - DNA, 25 bp, Homo sapien
atctactgagtcagggtcttcagag

SEQ ID NO: 5856328 - DNA, 25 bp, Homo sapien
cagctactttgcagagagactctac

SEQ ID NO: 5856329 - DNA, 25 bp, Homo sapien
tcagtcatttctaggtatgtgtata

SEQ ID NO: 5856330 - DNA, 25 bp, Homo sapien
tgataaggaacattgtttccaggag

SEQ ID NO: 5856331 - DNA, 25 bp, Homo sapien
gctaagcatcattatcaggcagcca

SEQ ID NO: 5856332 - DNA, 25 bp, Homo sapien
atgaatcccatcctctgatcgtggt

SEQ ID NO: 5856333 - DNA, 25 bp, Homo sapien
ttaacggaaattgttaggctctagg

SEQ ID NO: 5856334 - DNA, 25 bp, Homo sapien
cccgtcagtcatttctaggtatgtg

SEQ ID NO: 5856335 - DNA, 25 bp, Homo sapien
agggtcttcagaggaagaaccaagg

SEQ ID NO: 5856336 - DNA, 25 bp, Homo sapien
cccgtcctgacccaagtacgctgtg

SEQ ID NO: 5856337 - DNA, 25 bp, Homo sapien
gtggtctccgagcctgaagaacatg

SEQ ID NO: 5856338 - DNA, 25 bp, Homo sapien
acgtgatggaacgctgataaggaac

SEQ ID NO: 5856339 - DNA, 25 bp, Homo sapien
caagactgccctgctgaaccttgtg

SEQ ID NO: 5856340 - DNA, 25 bp, Homo sapien
gatggaacgctgataaggaacattg

SEQ ID NO: 5856341 - DNA, 25 bp, Homo sapien
aggagtgagattgacttaaatctta

SEQ ID NO: 5856342 - DNA, 25 bp, Homo sapien
acctctcccgtcagtcatttctagg

SEQ ID NO: 5856343 - DNA, 25 bp, Homo sapien
gaagaaagaagcttgcagtgtcctg

SEQ ID NO: 5856344 - DNA, 25 bp, Homo sapien
tcctgacccaagtacgctgtggtct

SEQ ID NO: 5856345 - DNA, 25 bp, Homo sapien
ttgcagtgtcctgtgggtcattcct

SEQ ID NO: 5856346 - DNA, 25 bp, Homo sapien
agcatcattatcaggcagccagtga

SEQ ID NO: 5856347 - DNA, 25 bp, Homo sapien
agtcttctgttgcccagtttctgat

SEQ ID NO: 5856348 - DNA, 25 bp, Homo sapien
gaagcttgcagactagggagccgcc

SEQ ID NO: 5856349 - DNA, 25 bp, Homo sapien
tgggattacaaatccccgtcctgac

SEQ ID NO: 5856350 - DNA, 25 bp, Homo sapien
gaaaattcttacaccatcctaatag

SEQ ID NO: 5856351 - DNA, 25 bp, Homo sapien
tgcccagtttctgatgcttctcatc

SEQ ID NO: 5856352 - DNA, 25 bp, Homo sapien
tgcttctcatcccatgcttctgacc

SEQ ID NO: 5856353 - DNA, 25 bp, Homo sapien
ctgagcatgaatcccatcctctgat

SEQ ID NO: 5856354 - DNA, 25 bp, Homo sapien
ctgctgaaccttgtgggcactgacc

SEQ ID NO: 5856355 - DNA, 25 bp, Homo sapien
tggcttttagtcttctgttgcccag

SEQ ID NO: 5856356 - DNA, 25 bp, Homo sapien
actgagtcagggtcttcagaggaag

SEQ ID NO: 5856357 - DNA, 25 bp, Homo sapien
ccagcccctgcagcttcagccccga

SEQ ID NO: 5856358 - DNA, 25 bp, Homo sapien
gactctcagcagcatgatcatggcc

SEQ ID NO: 5856359 - DNA, 25 bp, Homo sapien
ggaacattgtttccaggagtgagat

SEQ ID NO: 5856360 - DNA, 25 bp, Homo sapien
gtttccaggagtgagattgacttaa

SEQ ID NO: 5856361 - DNA, 25 bp, Homo sapien
catgcttctgacccggatgatgaga

SEQ ID NO: 5856362 - DNA, 25 bp, Homo sapien
cgcccaccctagcattacctctgag

SEQ ID NO: 5856363 - DNA, 25 bp, Homo sapien
tccacagctactttgcagagagact

SEQ ID NO: 5856364 - DNA, 25 bp, Homo sapien
tgggcacagggcacacagatgcctt

SEQ ID NO: 5856365 - DNA, 25 bp, Homo sapien
gccttggctctgacccatctactga

SEQ ID NO: 5856366 - DNA, 25 bp, Homo sapien
tcattccctccatgctgaagcttgc

SEQ ID NO: 5856367 - DNA, 25 bp, Homo sapien
agagagactctactacgccatgaag

SEQ ID NO: 5856368 - DNA, 25 bp, Homo sapien
gtggaggaaaattcttacaccatcc

SEQ ID NO: 5856369 - DNA, 25 bp, Homo sapien
acctcatctggcttttagtcttctg

SEQ ID NO: 5856370 - DNA, 25 bp, Homo sapien
ggcacagggcacacagatgccttgg

SEQ ID NO: 5856371 - DNA, 25 bp, Homo sapien
atcgggacactcacttaacggaaat

SEQ ID NO: 5856372 - DNA, 25 bp, Homo sapien
catcattatcaggcagccagtgagc

SEQ ID NO: 5856373 - DNA, 25 bp, Homo sapien
ctagcattacctctgagcaaacgga

SEQ ID NO: 5856374 - DNA, 25 bp, Homo sapien
acactcacttaacggaaattgttag

SEQ ID NO: 5856375 - DNA, 25 bp, Homo sapien
acccggaacgtccacagctactttg

SEQ ID NO: 5856376 - DNA, 25 bp, Homo sapien
gtgagattgacttaaatcttatcaa

SEQ ID NO: 5856377 - DNA, 25 bp, Homo sapien
tctgagaaactcgggcttgtccagt

SEQ ID NO: 5856378 - DNA, 25 bp, Homo sapien
ccttgtgggcactgacctctgaaaa

SEQ ID NO: 5856379 - DNA, 25 bp, Homo sapien
gtataccgcccaccctagcattacc

SEQ ID NO: 5856380 - DNA, 25 bp, Homo sapien
tactttgcagagagactctactacg

SEQ ID NO: 5856381 - DNA, 25 bp, Homo sapien
ggggtaggggacacctcatctggct

SEQ ID NO: 5856382 - DNA, 25 bp, Homo sapien
cccaagtacgctgtggtctgagaaa

SEQ ID NO: 5856383 - DNA, 25 bp, Homo sapien
agagactctactacgccatgaaggg

SEQ ID NO: 5856384 - DNA, 25 bp, Homo sapien
tggaacgctgataaggaacattgtt

SEQ ID NO: 5856385 - DNA, 25 bp, Homo sapien
gtatgtgtataccgcccaccctagc

SEQ ID NO: 5856386 - DNA, 25 bp, Homo sapien
agaacaagggcaagaagtgtgagcc

SEQ ID NO: 5856387 - DNA, 25 bp, Homo sapien
agggacacgtgatggaacgctgata

SEQ ID NO: 5856388 - DNA, 25 bp, Homo sapien
aatcttatcaagggtcagtttagga

SEQ ID NO: 5856389 - DNA, 25 bp, Homo sapien
tgctgaagcttgcagactagggagc

SEQ ID NO: 5856390 - DNA, 25 bp, Homo sapien
tgagaaagggtcacatagctctgcc

SEQ ID NO: 5856391 - DNA, 25 bp, Homo sapien
acgctgataaggaacattgtttcca

SEQ ID NO: 5856392 - DNA, 25 bp, Homo sapien
tgtcctgtgggtcattccttcccct

SEQ ID NO: 5856393 - DNA, 25 bp, Homo sapien
cggccgtggatctgagaaagggtca

SEQ ID NO: 5856394 - DNA, 25 bp, Homo sapien
ggaggaaaattcttacaccatccta

SEQ ID NO: 5856395 - DNA, 25 bp, Homo sapien
gaaattgttaggctctaggtggagg

SEQ ID NO: 5856396 - DNA, 25 bp, Homo sapien
ctctcagcagcatgatcatggccga

SEQ ID NO: 5856397 - DNA, 25 bp, Homo sapien
agtgtcctgtgggtcattccttccc

SEQ ID NO: 5856398 - DNA, 25 bp, Homo sapien
atgcacccggaacgtccacagctac

SEQ ID NO: 5856399 - DNA, 25 bp, Homo sapien
ggtgggggtaggggacacctcatct

SEQ ID NO: 5856400 - DNA, 25 bp, Homo sapien
ccagccctgagcatgaatcccatcc

SEQ ID NO: 5856401 - DNA, 25 bp, Homo sapien
tgatcatggccgacaccagtggtta

SEQ ID NO: 5856402 - DNA, 25 bp, Homo sapien
ttccccttcacacaaaatctcctgg

SEQ ID NO: 5856403 - DNA, 25 bp, Homo sapien
ccctgagcatgaatcccatcctctg

SEQ ID NO: 5856404 - DNA, 25 bp, Homo sapien
tccccgtcctgacccaagtacgctg

SEQ ID NO: 5856405 - DNA, 25 bp, Homo sapien
ttacctctgagcaaacggaaacatc

SEQ ID NO: 5856406 - DNA, 25 bp, Homo sapien
cgctgtggtctgagaaactcgggct

SEQ ID NO: 5856407 - DNA, 25 bp, Homo sapien
agcacctctatgagaggacacggcc

SEQ ID NO: 5856408 - DNA, 25 bp, Homo sapien
ataccgcccaccctagcattacctc

SEQ ID NO: 5856409 - DNA, 25 bp, Homo sapien
aagactctcagcagcatgatcatgg

SEQ ID NO: 5856410 - DNA, 25 bp, Homo sapien
cttctcatcccatgcttctgacccg

SEQ ID NO: 5856411 - DNA, 25 bp, Homo sapien
caacatgaagaaagaagcttgcagt

SEQ ID NO: 5856412 - DNA, 25 bp, Homo sapien
ttcagccccgaccatgggtgggggt

SEQ ID NO: 5856413 - DNA, 25 bp, Homo sapien
gacccaagtacgctgtggtctgaga

SEQ ID NO: 5856414 - DNA, 25 bp, Homo sapien
ggatgatgagaccagcctgggtttc

SEQ ID NO: 5856415 - DNA, 25 bp, Homo sapien
tcatcccatgcttctgacccggatg

SEQ ID NO: 5856416 - DNA, 25 bp, Homo sapien
aaagaagcttgcagtgtcctgtggg

SEQ ID NO: 5856417 - DNA, 25 bp, Homo sapien
aggaaaattcttacaccatcctaat

SEQ ID NO: 5856418 - DNA, 25 bp, Homo sapien
cccatcctctgatcgtggtctccga

SEQ ID NO: 5856419 - DNA, 25 bp, Homo sapien
atcaacatgaagaaagaagcttgca

SEQ ID NO: 5856420 - DNA, 25 bp, Homo sapien
agaaagggtcacatagctctgccaa

SEQ ID NO: 5856421 - DNA, 25 bp, Homo sapien
gacacggccgtggatctgagaaagg

SEQ ID NO: 5856422 - DNA, 25 bp, Homo sapien
tgagcatgtgggagagcacctctat

SEQ ID NO: 5856423 - DNA, 25 bp, Homo sapien
gggcttgtccagtcattccctccat

SEQ ID NO: 5856424 - DNA, 25 bp, Homo sapien
agaagtgtgagcccagcccctgcag

SEQ ID NO: 5856425 - DNA, 25 bp, Homo sapien
aaatgcacccggaacgtccacagct

SEQ ID NO: 5856426 - DNA, 25 bp, Homo sapien
caagggtcagtttaggaagatgtac

SEQ ID NO: 5856427 - DNA, 25 bp, Homo sapien
cccaccctagcattacctctgagca

SEQ ID NO: 5856428 - DNA, 25 bp, Homo sapien
ctaggtatgtgtataccgcccaccc

SEQ ID NO: 5856429 - DNA, 25 bp, Homo sapien
aacattgtttccaggagtgagattg

SEQ ID NO: 5856430 - DNA, 25 bp, Homo sapien
gccgtggatctgagaaagggtcaca

SEQ ID NO: 5856431 - DNA, 25 bp, Homo sapien
acacgtgatggaacgctgataagga

SEQ ID NO: 5856432 - DNA, 25 bp, Homo sapien
tcttagctgctaagcatcattatca

SEQ ID NO: 5856433 - DNA, 25 bp, Homo sapien
tgtcttagctgctaagcatcattat

SEQ ID NO: 5856434 - DNA, 25 bp, Homo sapien
tgggagagcacctctatgagaggac

SEQ ID NO: 5856435 - DNA, 25 bp, Homo sapien
agtttaggaagatgtacggcaagac

SEQ ID NO: 5856436 - DNA, 25 bp, Homo sapien
tcttctgttgcccagtttctgatgc

SEQ ID NO: 5856437 - DNA, 25 bp, Homo sapien
aaatagaacaagggcaagaagtgtg

SEQ ID NO: 5856438 - DNA, 25 bp, Homo sapien
agagcacctctatgagaggacacgg

SEQ ID NO: 5856439 - DNA, 25 bp, Homo sapien
acagatgccttggctctgacccatc

SEQ ID NO: 5856440 - DNA, 25 bp, Homo sapien
actgacctctgaaaatgtcaaaaaa

SEQ ID NO: 5856441 - DNA, 25 bp, Homo sapien
ccagtgagcatgtgggagagcacct

SEQ ID NO: 5856442 - DNA, 25 bp, Homo sapien
tgcagactagggagccgcccagccc

SEQ ID NO: 5856443 - DNA, 25 bp, Homo sapien
tggatctgagaaagggtcacatagc

SEQ ID NO: 5856444 - DNA, 25 bp, Homo sapien
ggacactcacttaacggaaattgtt

SEQ ID NO: 5856445 - DNA, 25 bp, Homo sapien
gatgggattacaaatccccgtcctg

SEQ ID NO: 5856446 - DNA, 25 bp, Homo sapien
tcacatagctctgccaatcgggaca

SEQ ID NO: 5856447 - DNA, 25 bp, Homo sapien
tcttcagaggaagaaccaaggaaca

SEQ ID NO: 5856448 - DNA, 25 bp, Homo sapien
gagcatgaatcccatcctctgatcg

SEQ ID NO: 5856449 - DNA, 25 bp, Homo sapien
tgtgggagagcacctctatgagagg

SEQ ID NO: 5856450 - DNA, 25 bp, Homo sapien
ggctctaggtggaggaaaattctta

SEQ ID NO: 5856451 - DNA, 25 bp, Homo sapien
gagcccagcccctgcagcttcagcc

SEQ ID NO: 5856452 - DNA, 25 bp, Homo sapien
acacagatgccttggctctgaccca

SEQ ID NO: 5856453 - DNA, 25 bp, Homo sapien
gggcacacagatgccttggctctga

SEQ ID NO: 5856454 - DNA, 25 bp, Homo sapien
aaacatcaacatgaagaaagaagct

SEQ ID NO: 5856455 - DNA, 25 bp, Homo sapien
acccggatgatgagaccagcctggg

SEQ ID NO: 5856456 - DNA, 25 bp, Homo sapien
actcacttaacggaaattgttaggc

SEQ ID NO: 5856457 - DNA, 25 bp, Homo sapien
ctcctgggcacagggcacacagatg

SEQ ID NO: 5856458 - DNA, 25 bp, Homo sapien
aggtggaggaaaattcttacaccat

SEQ ID NO: 5856459 - DNA, 25 bp, Homo sapien
atggatttctagcagttgtcttagc

SEQ ID NO: 5856460 - DNA, 25 bp, Homo sapien
tcgggcttgtccagtcattccctcc

SEQ ID NO: 5856461 - DNA, 25 bp, Homo sapien
gaatcccatcctctgatcgtggtct

SEQ ID NO: 5856462 - DNA, 25 bp, Homo sapien
aaccttgtgggcactgacctctgaa

SEQ ID NO: 5856463 - DNA, 25 bp, Homo sapien
tgtcaaaaaatagaacaagggcaag

SEQ ID NO: 5856464 - DNA, 25 bp, Homo sapien
ccggaacgtccacagctactttgca

SEQ ID NO: 5856465 - DNA, 25 bp, Homo sapien
tgccctgctgaaccttgtgggcact

SEQ ID NO: 5856466 - DNA, 25 bp, Homo sapien
gcccagcccctgcagcttcagcccc

SEQ ID NO: 5856467 - DNA, 25 bp, Homo sapien
actctactacgccatgaagggagca

SEQ ID NO: 5856468 - DNA, 25 bp, Homo sapien
gactagggagccgcccagccctgag

SEQ ID NO: 5856469 - DNA, 25 bp, Homo sapien
tgacccatctactgagtcagggtct

SEQ ID NO: 5856470 - DNA, 25 bp, Homo sapien
gcttgtccagtcattccctccatgc

SEQ ID NO: 5856471 - DNA, 25 bp, Homo sapien
gatgagaccagcctgggtttccctt

SEQ ID NO: 5856472 - DNA, 25 bp, Homo sapien
actcgggcttgtccagtcattccct

SEQ ID NO: 5856473 - DNA, 25 bp, Homo sapien
ggggacacctcatctggcttttagt

SEQ ID NO: 5856474 - DNA, 25 bp, Homo sapien
catgctgaagcttgcagactaggga

SEQ ID NO: 5856475 - DNA, 25 bp, Homo sapien
ggtctgagaaactcgggcttgtcca

SEQ ID NO: 5856476 - DNA, 25 bp, Homo sapien
actgccctgctgaaccttgtgggca

SEQ ID NO: 5856477 - DNA, 25 bp, Homo sapien
ttccacctctcccgtcagtcatttc

SEQ ID NO: 5856478 - DNA, 25 bp, Homo sapien
ttgtgggcactgacctctgaaaatg

SEQ ID NO: 5856479 - DNA, 25 bp, Homo sapien
cggcaagactctcagcagcatgatc

SEQ ID NO: 5856480 - DNA, 25 bp, Homo sapien
cggaaattgttaggctctaggtgga

SEQ ID NO: 5856481 - DNA, 25 bp, Homo sapien
caaatccccgtcctgacccaagtac

SEQ ID NO: 5856482 - DNA, 25 bp, Homo sapien
tgggggtaggggacacctcatctgg

SEQ ID NO: 5856483 - DNA, 25 bp, Homo sapien
ttgttaggctctaggtggaggaaaa

SEQ ID NO: 5856484 - DNA, 25 bp, Homo sapien
atcaagggtcagtttaggaagatgt

SEQ ID NO: 5856485 - DNA, 25 bp, Homo sapien
ccacctctcccgtcagtcatttcta

SEQ ID NO: 5856486 - DNA, 25 bp, Homo sapien
tgacccggatgatgagaccagcctg

SEQ ID NO: 5856487 - DNA, 25 bp, Homo sapien
accaaggaacatggatttctagcag

SEQ ID NO: 5856488 - DNA, 25 bp, Homo sapien
cctgggcacagggcacacagatgcc

SEQ ID NO: 5856489 - DNA, 25 bp, Homo sapien
ctgatcgtggtctccgagcctgaag

SEQ ID NO: 5856490 - DNA, 25 bp, Homo sapien
gccatgaagggagcagggacacgtg

SEQ ID NO: 5856491 - DNA, 25 bp, Homo sapien
catcctaatagcacgcattagatgg

SEQ ID NO: 5856492 - DNA, 25 bp, Homo sapien
gaacatggatttctagcagttgtct

SEQ ID NO: 5856493 - DNA, 25 bp, Homo sapien
tcgtggtctccgagcctgaagaaca

SEQ ID NO: 5856494 - DNA, 25 bp, Homo sapien
cttgcagactagggagccgcccagc

SEQ ID NO: 5856495 - DNA, 25 bp, Homo sapien
cgtcagtcatttctaggtatgtgta

SEQ ID NO: 5856496 - DNA, 25 bp, Homo sapien
acccatctactgagtcagggtcttc

SEQ ID NO: 5856497 - DNA, 25 bp, Homo sapien
agctctgccaatcgggacactcact

SEQ ID NO: 5856498 - DNA, 25 bp, Homo sapien
caagggcaagaagtgtgagcccagc

SEQ ID NO: 5856499 - DNA, 25 bp, Homo sapien
tgacctctgaaaatgtcaaaaaata

SEQ ID NO: 5856500 - DNA, 25 bp, Homo sapien
aaacggaaacatcaacatgaagaaa

SEQ ID NO: 5856501 - DNA, 25 bp, Homo sapien
aagtgtgagcccagcccctgcagct

SEQ ID NO: 5856502 - DNA, 25 bp, Homo sapien
ctgagcaaacggaaacatcaacatg

SEQ ID NO: 5856503 - DNA, 25 bp, Homo sapien
tgtacggcaagactctcagcagcat

SEQ ID NO: 5856504 - DNA, 25 bp, Homo sapien
cattacctctgagcaaacggaaaca

SEQ ID NO: 5856505 - DNA, 25 bp, Homo sapien
cagttgtcttagctgctaagcatca

SEQ ID NO: 5856506 - DNA, 25 bp, Homo sapien
gctgataaggaacattgtttccagg

SEQ ID NO: 5856507 - DNA, 25 bp, Homo sapien
tagatgggattacaaatccccgtcc

SEQ ID NO: 5856508 - DNA, 25 bp, Homo sapien
gcttttagtcttctgttgcccagtt

SEQ ID NO: 5856509 - DNA, 25 bp, Homo sapien
ctactgagtcagggtcttcagagga

SEQ ID NO: 5856510 - DNA, 25 bp, Homo sapien
ttccaggagtgagattgacttaaat

SEQ ID NO: 5856511 - DNA, 25 bp, Homo sapien
tacaaatccccgtcctgacccaagt

SEQ ID NO: 5856512 - DNA, 25 bp, Homo sapien
gagcaaacggaaacatcaacatgaa

SEQ ID NO: 5856513 - DNA, 25 bp, Homo sapien
ctgatgcttctcatcccatgcttct

SEQ ID NO: 5856514 - DNA, 25 bp, Homo sapien
acgccatgaagggagcagggacacg

SEQ ID NO: 5856515 - DNA, 25 bp, Homo sapien
agaggacacggccgtggatctgaga

SEQ ID NO: 5856516 - DNA, 25 bp, Homo sapien
ggtcagtttaggaagatgtacggca

SEQ ID NO: 5856517 - DNA, 25 bp, Homo sapien
atgtgtataccgcccaccctagcat

SEQ ID NO: 5856518 - DNA, 25 bp, Homo sapien
ttttagtcttctgttgcccagtttc

SEQ ID NO: 5856519 - DNA, 25 bp, Homo sapien
cacacaaaatctcctgggcacaggg

SEQ ID NO: 5856520 - DNA, 25 bp, Homo sapien
gcaaacggaaacatcaacatgaaga

SEQ ID NO: 5856521 - DNA, 25 bp, Homo sapien
ggaacgtccacagctactttgcaga

SEQ ID NO: 5856522 - DNA, 25 bp, Homo sapien
ggaagaaccaaggaacatggatttc

SEQ ID NO: 5856523 - DNA, 25 bp, Homo sapien
gctcactggctgcctgataatgatg

SEQ ID NO: 5856524 - DNA, 25 bp, Homo sapien
ccacccatggtcggggctgaagctg

SEQ ID NO: 5856525 - DNA, 25 bp, Homo sapien
ccatctaatgcgtgctattaggatg

SEQ ID NO: 5856526 - DNA, 25 bp, Homo sapien
tccgggtcagaagcatgggatgaga

SEQ ID NO: 5856527 - DNA, 25 bp, Homo sapien
gagagtcttgccgtacatcttccta

SEQ ID NO: 5856528 - DNA, 25 bp, Homo sapien
atgctgctgagagtcttgccgtaca

SEQ ID NO: 5856529 - DNA, 25 bp, Homo sapien
tgttgatgtttccgtttgctcagag

SEQ ID NO: 5856530 - DNA, 25 bp, Homo sapien
atgggattcatgctcagggctgggc

SEQ ID NO: 5856531 - DNA, 25 bp, Homo sapien
tcggccatgatcatgctgctgagag

SEQ ID NO: 5856532 - DNA, 25 bp, Homo sapien
gaaggaatgacccacaggacactgc

SEQ ID NO: 5856533 - DNA, 25 bp, Homo sapien
ctgagagtcttgccgtacatcttcc

SEQ ID NO: 5856534 - DNA, 25 bp, Homo sapien
tcagaagcatgggatgagaagcatc

SEQ ID NO: 5856535 - DNA, 25 bp, Homo sapien
gcaacagaagactaaaagccagatg

SEQ ID NO: 5856536 - DNA, 25 bp, Homo sapien
cagaagactaaaagccagatgaggt

SEQ ID NO: 5856537 - DNA, 25 bp, Homo sapien
tgctgagagtcttgccgtacatctt

SEQ ID NO: 5856538 - DNA, 25 bp, Homo sapien
cacatacctagaaatgactgacggg

SEQ ID NO: 5856539 - DNA, 25 bp, Homo sapien
accactggtgtcggccatgatcatg

SEQ ID NO: 5856540 - DNA, 25 bp, Homo sapien
ggtatacacatacctagaaatgact

SEQ ID NO: 5856541 - DNA, 25 bp, Homo sapien
tccttatcagcgttccatcacgtgt

SEQ ID NO: 5856542 - DNA, 25 bp, Homo sapien
aatgatgcttagcagctaagacaac

SEQ ID NO: 5856543 - DNA, 25 bp, Homo sapien
cagaggtaatgctagggtgggcggt

SEQ ID NO: 5856544 - DNA, 25 bp, Homo sapien
cactggtgtcggccatgatcatgct

SEQ ID NO: 5856545 - DNA, 25 bp, Homo sapien
cagggctgggcggctccctagtctg

SEQ ID NO: 5856546 - DNA, 25 bp, Homo sapien
tgggcggctccctagtctgcaagct

SEQ ID NO: 5856547 - DNA, 25 bp, Homo sapien
tctctgcaaagtagctgtggacgtt

SEQ ID NO: 5856548 - DNA, 25 bp, Homo sapien
tcggggctgaagctgcaggggctgg

SEQ ID NO: 5856549 - DNA, 25 bp, Homo sapien
gatcatgctgctgagagtcttgccg

SEQ ID NO: 5856550 - DNA, 25 bp, Homo sapien
tgacccttgataagatttaagtcaa

SEQ ID NO: 5856551 - DNA, 25 bp, Homo sapien
ccgattggcagagctatgtgaccct

SEQ ID NO: 5856552 - DNA, 25 bp, Homo sapien
gatgggtcagagccaaggcatctgt

SEQ ID NO: 5856553 - DNA, 25 bp, Homo sapien
gcggtatacacatacctagaaatga

SEQ ID NO: 5856554 - DNA, 25 bp, Homo sapien
agaattttcctccacctagagccta

SEQ ID NO: 5856555 - DNA, 25 bp, Homo sapien
gtacatcttcctaaactgacccttg

SEQ ID NO: 5856556 - DNA, 25 bp, Homo sapien
tctctctgcaaagtagctgtggacg

SEQ ID NO: 5856557 - DNA, 25 bp, Homo sapien
cagaggatgggattcatgctcaggg

SEQ ID NO: 5856558 - DNA, 25 bp, Homo sapien
cgtgtccctgctcccttcatggcgt

SEQ ID NO: 5856559 - DNA, 25 bp, Homo sapien
tcagtagatgggtcagagccaaggc

SEQ ID NO: 5856560 - DNA, 25 bp, Homo sapien
ttttgtgtgaaggggaaggaatgac

SEQ ID NO: 5856561 - DNA, 25 bp, Homo sapien
agcgttccatcacgtgtccctgctc

SEQ ID NO: 5856562 - DNA, 25 bp, Homo sapien
gataagatttaagtcaatctcactc

SEQ ID NO: 5856563 - DNA, 25 bp, Homo sapien
tcactggctgcctgataatgatgct

SEQ ID NO: 5856564 - DNA, 25 bp, Homo sapien
gcaagcttcagcatggagggaatga

SEQ ID NO: 5856565 - DNA, 25 bp, Homo sapien
aatgcgtgctattaggatggtgtaa

SEQ ID NO: 5856566 - DNA, 25 bp, Homo sapien
tgagaagcatcagaaactgggcaac

SEQ ID NO: 5856567 - DNA, 25 bp, Homo sapien
tgggctcacacttcttgcccttgtt

SEQ ID NO: 5856568 - DNA, 25 bp, Homo sapien
agatgaggtgtcccctacccccacc

SEQ ID NO: 5856569 - DNA, 25 bp, Homo sapien
caagcttctttcttcatgttgatgt

SEQ ID NO: 5856570 - DNA, 25 bp, Homo sapien
atcagaggatgggattcatgctcag

SEQ ID NO: 5856571 - DNA, 25 bp, Homo sapien
cgatcagaggatgggattcatgctc

SEQ ID NO: 5856572 - DNA, 25 bp, Homo sapien
cccaggctggtctcatcatccgggt

SEQ ID NO: 5856573 - DNA, 25 bp, Homo sapien
cttgccgtacatcttcctaaactga

SEQ ID NO: 5856574 - DNA, 25 bp, Homo sapien
aagcatcagaaactgggcaacagaa

SEQ ID NO: 5856575 - DNA, 25 bp, Homo sapien
gaggtaatgctagggtgggcggtat

SEQ ID NO: 5856576 - DNA, 25 bp, Homo sapien
gattggcagagctatgtgacccttt

SEQ ID NO: 5856577 - DNA, 25 bp, Homo sapien
aggttcagcagggcagtcttgtagt

SEQ ID NO: 5856578 - DNA, 25 bp, Homo sapien
ggttcttcctctgaagaccctgact

SEQ ID NO: 5856579 - DNA, 25 bp, Homo sapien
gttccttatcagcgttccatcacgt

SEQ ID NO: 5856580 - DNA, 25 bp, Homo sapien
ttttcagaggtcagtgcccacaagg

SEQ ID NO: 5856581 - DNA, 25 bp, Homo sapien
gaggatgggattcatgctcagggct

SEQ ID NO: 5856582 - DNA, 25 bp, Homo sapien
ggacggggatttgtaatcccatcta

SEQ ID NO: 5856583 - DNA, 25 bp, Homo sapien
cctgctcccttcatggcgtagtaga

SEQ ID NO: 5856584 - DNA, 25 bp, Homo sapien
gctagaaatccatgttccttggttc

SEQ ID NO: 5856585 - DNA, 25 bp, Homo sapien
ttccttggttcttcctctgaagacc

SEQ ID NO: 5856586 - DNA, 25 bp, Homo sapien
tcagaccacagcgtacttgggtcag

SEQ ID NO: 5856587 - DNA, 25 bp, Homo sapien
ccacggccgtgtcctctcatagagg

SEQ ID NO: 5856588 - DNA, 25 bp, Homo sapien
gaggtcagtgcccacaaggttcagc

SEQ ID NO: 5856589 - DNA, 25 bp, Homo sapien
ttcttcctctgaagaccctgactca

SEQ ID NO: 5856590 - DNA, 25 bp, Homo sapien
cagaggtcagtgcccacaaggttca

SEQ ID NO: 5856591 - DNA, 25 bp, Homo sapien
agggaatgactggacaagcccgagt

SEQ ID NO: 5856592 - DNA, 25 bp, Homo sapien
acttgggtcaggacggggatttgta

SEQ ID NO: 5856593 - DNA, 25 bp, Homo sapien
tatgtgaccctttctcagatccacg

SEQ ID NO: 5856594 - DNA, 25 bp, Homo sapien
ttctgtcatgttcttcaggctcgga

SEQ ID NO: 5856595 - DNA, 25 bp, Homo sapien
tctcagatccacggccgtgtcctct

SEQ ID NO: 5856596 - DNA, 25 bp, Homo sapien
agttctgtcatgttcttcaggctcg

SEQ ID NO: 5856597 - DNA, 25 bp, Homo sapien
tctgcaaagtagctgtggacgttcc

SEQ ID NO: 5856598 - DNA, 25 bp, Homo sapien
agctgtggacgttccgggtgcattt

SEQ ID NO: 5856599 - DNA, 25 bp, Homo sapien
cctggaaacaatgttccttatcagc

SEQ ID NO: 5856600 - DNA, 25 bp, Homo sapien
ggccatgatcatgctgctgagagtc

SEQ ID NO: 5856601 - DNA, 25 bp, Homo sapien
tgactcagtagatgggtcagagcca

SEQ ID NO: 5856602 - DNA, 25 bp, Homo sapien
tgcgtgctattaggatggtgtaaga

SEQ ID NO: 5856603 - DNA, 25 bp, Homo sapien
tattttttgacattttcagaggtca

SEQ ID NO: 5856604 - DNA, 25 bp, Homo sapien
aacccaggctggtctcatcatccgg

SEQ ID NO: 5856605 - DNA, 25 bp, Homo sapien
ttagcagctaagacaactgctagaa

SEQ ID NO: 5856606 - DNA, 25 bp, Homo sapien
ggctcacacttcttgcccttgttct

SEQ ID NO: 5856607 - DNA, 25 bp, Homo sapien
ttttttgacattttcagaggtcagt

SEQ ID NO: 5856608 - DNA, 25 bp, Homo sapien
ggctgaagctgcaggggctgggctc

SEQ ID NO: 5856609 - DNA, 25 bp, Homo sapien
aggaatgacccacaggacactgcaa

SEQ ID NO: 5856610 - DNA, 25 bp, Homo sapien
gttcagcagggcagtcttgtagtaa

SEQ ID NO: 5856611 - DNA, 25 bp, Homo sapien
gtcatgttcttcaggctcggagacc

SEQ ID NO: 5856612 - DNA, 25 bp, Homo sapien
gcttagcagctaagacaactgctag

SEQ ID NO: 5856613 - DNA, 25 bp, Homo sapien
gaagaccctgactcagtagatgggt

SEQ ID NO: 5856614 - DNA, 25 bp, Homo sapien
acggccgtgtcctctcatagaggtg

SEQ ID NO: 5856615 - DNA, 25 bp, Homo sapien
aaagccagatgaggtgtcccctacc

SEQ ID NO: 5856616 - DNA, 25 bp, Homo sapien
gtgggcggtatacacatacctagaa

SEQ ID NO: 5856617 - DNA, 25 bp, Homo sapien
tcatggcgtagtagagtctctctgc

SEQ ID NO: 5856618 - DNA, 25 bp, Homo sapien
aacagaagactaaaagccagatgag

SEQ ID NO: 5856619 - DNA, 25 bp, Homo sapien
ttgatgtttccgtttgctcagaggt

SEQ ID NO: 5856620 - DNA, 25 bp, Homo sapien
ttcagaggtcagtgcccacaaggtt

SEQ ID NO: 5856621 - DNA, 25 bp, Homo sapien
atagaggtgctctcccacatgctca

SEQ ID NO: 5856622 - DNA, 25 bp, Homo sapien
cggctccctagtctgcaagcttcag

SEQ ID NO: 5856623 - DNA, 25 bp, Homo sapien
gagtcttgccgtacatcttcctaaa

SEQ ID NO: 5856624 - DNA, 25 bp, Homo sapien
gtacttgggtcaggacggggatttg

SEQ ID NO: 5856625 - DNA, 25 bp, Homo sapien
gtctgcaagcttcagcatggaggga

SEQ ID NO: 5856626 - DNA, 25 bp, Homo sapien
cttgcccttgttctattttttgaca

SEQ ID NO: 5856627 - DNA, 25 bp, Homo sapien
cctagagcctaacaatttccgttaa

SEQ ID NO: 5856628 - DNA, 25 bp, Homo sapien
ctcagaggtaatgctagggtgggcg

SEQ ID NO: 5856629 - DNA, 25 bp, Homo sapien
acggggatttgtaatcccatctaat

SEQ ID NO: 5856630 - DNA, 25 bp, Homo sapien
cagaaactgggcaacagaagactaa

SEQ ID NO: 5856631 - DNA, 25 bp, Homo sapien
cagggcagtcttgtagtaaccactg

SEQ ID NO: 5856632 - DNA, 25 bp, Homo sapien
aggctcggagaccacgatcagagga

SEQ ID NO: 5856633 - DNA, 25 bp, Homo sapien
tgtccctgctcccttcatggcgtag

SEQ ID NO: 5856634 - DNA, 25 bp, Homo sapien
gaaacccaggctggtctcatcatcc

SEQ ID NO: 5856635 - DNA, 25 bp, Homo sapien
cacaaggttcagcagggcagtcttg

SEQ ID NO: 5856636 - DNA, 25 bp, Homo sapien
tgccctgtgcccaggagattttgtg

SEQ ID NO: 5856637 - DNA, 25 bp, Homo sapien
tgcccttgttctattttttgacatt

SEQ ID NO: 5856638 - DNA, 25 bp, Homo sapien
tgcctgataatgatgcttagcagct

SEQ ID NO: 5856639 - DNA, 25 bp, Homo sapien
taagaattttcctccacctagagcc

SEQ ID NO: 5856640 - DNA, 25 bp, Homo sapien
tgaccctttctcagatccacggccg

SEQ ID NO: 5856641 - DNA, 25 bp, Homo sapien
ttccatcacgtgtccctgctccctt

SEQ ID NO: 5856642 - DNA, 25 bp, Homo sapien
gaaacaatgttccttatcagcgttc

SEQ ID NO: 5856643 - DNA, 25 bp, Homo sapien
ccccacccatggtcggggctgaagc

SEQ ID NO: 5856644 - DNA, 25 bp, Homo sapien
cctagtctgcaagcttcagcatgga

SEQ ID NO: 5856645 - DNA, 25 bp, Homo sapien
cttcctctgaagaccctgactcagt

SEQ ID NO: 5856646 - DNA, 25 bp, Homo sapien
tacctagaaatgactgacgggagag

SEQ ID NO: 5856647 - DNA, 25 bp, Homo sapien
cacgatcagaggatgggattcatgc

SEQ ID NO: 5856648 - DNA, 25 bp, Homo sapien
ttgtgtgaaggggaaggaatgaccc

SEQ ID NO: 5856649 - DNA, 25 bp, Homo sapien
taagatttaagtcaatctcactcct

SEQ ID NO: 5856650 - DNA, 25 bp, Homo sapien
catctgtgtgccctgtgcccaggag

SEQ ID NO: 5856651 - DNA, 25 bp, Homo sapien
tctttcttcatgttgatgtttccgt

SEQ ID NO: 5856652 - DNA, 25 bp, Homo sapien
ctggtctcatcatccgggtcagaag

SEQ ID NO: 5856653 - DNA, 25 bp, Homo sapien
tcttgtagtaaccactggtgtcggc

SEQ ID NO: 5856654 - DNA, 25 bp, Homo sapien
tgcccacaaggttcagcagggcagt

SEQ ID NO: 5856655 - DNA, 25 bp, Homo sapien
tatacacatacctagaaatgactga

SEQ ID NO: 5856656 - DNA, 25 bp, Homo sapien
actggacaagcccgagtttctcaga

SEQ ID NO: 5856657 - DNA, 25 bp, Homo sapien
cccgagtttctcagaccacagcgta

SEQ ID NO: 5856658 - DNA, 25 bp, Homo sapien
tagagcctaacaatttccgttaagt

SEQ ID NO: 5856659 - DNA, 25 bp, Homo sapien
cacttcttgcccttgttctattttt

SEQ ID NO: 5856660 - DNA, 25 bp, Homo sapien
atctaatgcgtgctattaggatggt

SEQ ID NO: 5856661 - DNA, 25 bp, Homo sapien
agccaaggcatctgtgtgccctgtg

SEQ ID NO: 5856662 - DNA, 25 bp, Homo sapien
atgggatgagaagcatcagaaactg

SEQ ID NO: 5856663 - DNA, 25 bp, Homo sapien
tcagcagggcagtcttgtagtaacc

SEQ ID NO: 5856664 - DNA, 25 bp, Homo sapien
gagaggtggaagggaaacccaggct

SEQ ID NO: 5856665 - DNA, 25 bp, Homo sapien
tttctcagatccacggccgtgtcct

SEQ ID NO: 5856666 - DNA, 25 bp, Homo sapien
cccacaaggttcagcagggcagtct

SEQ ID NO: 5856667 - DNA, 25 bp, Homo sapien
gtgaaggggaaggaatgacccacag

SEQ ID NO: 5856668 - DNA, 25 bp, Homo sapien
acatgctcactggctgcctgataat

SEQ ID NO: 5856669 - DNA, 25 bp, Homo sapien
cattttcagaggtcagtgcccacaa

SEQ ID NO: 5856670 - DNA, 25 bp, Homo sapien
gaagagttctgtcatgttcttcagg

SEQ ID NO: 5856671 - DNA, 25 bp, Homo sapien
tagtagagtctctctgcaaagtagc

SEQ ID NO: 5856672 - DNA, 25 bp, Homo sapien
gggatgagaagcatcagaaactggg

SEQ ID NO: 5856673 - DNA, 25 bp, Homo sapien
accacgatcagaggatgggattcat

SEQ ID NO: 5856674 - DNA, 25 bp, Homo sapien
ttccgttaagtgagtgtcccgattg

SEQ ID NO: 5856675 - DNA, 25 bp, Homo sapien
catgctcagggctgggcggctccct

SEQ ID NO: 5856676 - DNA, 25 bp, Homo sapien
tctcagaccacagcgtacttgggtc

SEQ ID NO: 5856677 - DNA, 25 bp, Homo sapien
tagggtgggcggtatacacatacct

SEQ ID NO: 5856678 - DNA, 25 bp, Homo sapien
caaggttcagcagggcagtcttgta

SEQ ID NO: 5856679 - DNA, 25 bp, Homo sapien
ggtcggggctgaagctgcaggggct

SEQ ID NO: 5856680 - DNA, 25 bp, Homo sapien
atgcttagcagctaagacaactgct

SEQ ID NO: 5856681 - DNA, 25 bp, Homo sapien
ttgacattttcagaggtcagtgccc

SEQ ID NO: 5856682 - DNA, 25 bp, Homo sapien
cttcctaaactgacccttgataaga

SEQ ID NO: 5856683 - DNA, 25 bp, Homo sapien
cctctcatagaggtgctctcccaca

SEQ ID NO: 5856684 - DNA, 25 bp, Homo sapien
atcatccgggtcagaagcatgggat

SEQ ID NO: 5856685 - DNA, 25 bp, Homo sapien
tttcttcatgttgatgtttccgttt

SEQ ID NO: 5856686 - DNA, 25 bp, Homo sapien
gcatggagggaatgactggacaagc

SEQ ID NO: 5856687 - DNA, 25 bp, Homo sapien
ggagaccacgatcagaggatgggat

SEQ ID NO: 5856688 - DNA, 25 bp, Homo sapien
ccctgtgcccaggagattttgtgtg

SEQ ID NO: 5856689 - DNA, 25 bp, Homo sapien
tgatgcttagcagctaagacaactg

SEQ ID NO: 5856690 - DNA, 25 bp, Homo sapien
tcctctgaagaccctgactcagtag

SEQ ID NO: 5856691 - DNA, 25 bp, Homo sapien
ctggtgtcggccatgatcatgctgc

SEQ ID NO: 5856692 - DNA, 25 bp, Homo sapien
gggaaacccaggctggtctcatcat

SEQ ID NO: 5856693 - DNA, 25 bp, Homo sapien
tgtaagaattttcctccacctagag

SEQ ID NO: 5856694 - DNA, 25 bp, Homo sapien
tttgctcagaggtaatgctagggtg

SEQ ID NO: 5856695 - DNA, 25 bp, Homo sapien
caggacactgcaagcttctttcttc

SEQ ID NO: 5856696 - DNA, 25 bp, Homo sapien
agaccctgactcagtagatgggtca

SEQ ID NO: 5856697 - DNA, 25 bp, Homo sapien
gaggtggaagggaaacccaggctgg

SEQ ID NO: 5856698 - DNA, 25 bp, Homo sapien
actgcaagcttctttcttcatgttg

SEQ ID NO: 5856699 - DNA, 25 bp, Homo sapien
actgacccttgataagatttaagtc

SEQ ID NO: 5856700 - DNA, 25 bp, Homo sapien
actaaaagccagatgaggtgtcccc

SEQ ID NO: 5856701 - DNA, 25 bp, Homo sapien
cacgtgtccctgctcccttcatggc

SEQ ID NO: 5856702 - DNA, 25 bp, Homo sapien
caatctcactcctggaaacaatgtt

SEQ ID NO: 5856703 - DNA, 25 bp, Homo sapien
caggacggggatttgtaatcccatc

SEQ ID NO: 5856704 - DNA, 25 bp, Homo sapien
caggctggtctcatcatccgggtca

SEQ ID NO: 5856705 - DNA, 25 bp, Homo sapien
gagctatgtgaccctttctcagatc

SEQ ID NO: 5856706 - DNA, 25 bp, Homo sapien
ggccgtgtcctctcatagaggtgct

SEQ ID NO: 5856707 - DNA, 25 bp, Homo sapien
tcggagaccacgatcagaggatggg

SEQ ID NO: 5856708 - DNA, 25 bp, Homo sapien
agcagggcagtcttgtagtaaccac

SEQ ID NO: 5856709 - DNA, 25 bp, Homo sapien
ctcacacttcttgcccttgttctat

SEQ ID NO: 5856710 - DNA, 25 bp, Homo sapien
aatgactggacaagcccgagtttct

SEQ ID NO: 5856711 - DNA, 25 bp, Homo sapien
agcttctttcttcatgttgatgttt

SEQ ID NO: 5856712 - DNA, 25 bp, Homo sapien
cagctaagacaactgctagaaatcc

SEQ ID NO: 5856713 - DNA, 25 bp, Homo sapien
gtagctgtggacgttccgggtgcat

SEQ ID NO: 5856714 - DNA, 25 bp, Homo sapien
cgtttgctcagaggtaatgctaggg

SEQ ID NO: 5856715 - DNA, 25 bp, Homo sapien
gattttgtgtgaaggggaaggaatg

SEQ ID NO: 5856716 - DNA, 25 bp, Homo sapien
catgttgatgtttccgtttgctcag

SEQ ID NO: 5856717 - DNA, 25 bp, Homo sapien
agatccacggccgtgtcctctcata

SEQ ID NO: 5856718 - DNA, 25 bp, Homo sapien
cctgactcagtagatgggtcagagc

SEQ ID NO: 5856719 - DNA, 25 bp, Homo sapien
tatcagcgttccatcacgtgtccct

SEQ ID NO: 5856720 - DNA, 25 bp, Homo sapien
ttcatgttgatgtttccgtttgctc

SEQ ID NO: 5856721 - DNA, 25 bp, Homo sapien
ctcccttcatggcgtagtagagtct

SEQ ID NO: 5856722 - DNA, 25 bp, Homo sapien
tcctaaactgacccttgataagatt

SEQ ID NO: 5856723 - DNA, 25 bp, Homo sapien
agatttaagtcaatctcactcctgg

SEQ ID NO: 5856724 - DNA, 25 bp, Homo sapien
tcatagaggtgctctcccacatgct

SEQ ID NO: 5856725 - DNA, 25 bp, Homo sapien
gctctcccacatgctcactggctgc

SEQ ID NO: 5856726 - DNA, 25 bp, Homo sapien
cactcctggaaacaatgttccttat

SEQ ID NO: 5856727 - DNA, 25 bp, Homo sapien
atttaagtcaatctcactcctggaa

SEQ ID NO: 5856728 - DNA, 25 bp, Homo sapien
gatgtttccgtttgctcagaggtaa

SEQ ID NO: 5856729 - DNA, 25 bp, Homo sapien
gggaaggaatgacccacaggacact

SEQ ID NO: 5856730 - DNA, 25 bp, Homo sapien
catacctagaaatgactgacgggag

SEQ ID NO: 5856731 - DNA, 25 bp, Homo sapien
aggtgctctcccacatgctcactgg

SEQ ID NO: 5856732 - DNA, 25 bp, Homo sapien
ttcttcaggctcggagaccacgatc

SEQ ID NO: 5856733 - DNA, 25 bp, Homo sapien
cctgataatgatgcttagcagctaa

SEQ ID NO: 5856734 - DNA, 25 bp, Homo sapien
actcagtagatgggtcagagccaag

SEQ ID NO: 5856735 - DNA, 25 bp, Homo sapien
gctagggtgggcggtatacacatac

SEQ ID NO: 5856736 - DNA, 25 bp, Homo sapien
agaagcatcagaaactgggcaacag

SEQ ID NO: 5856737 - DNA, 25 bp, Homo sapien
atggcgtagtagagtctctctgcaa

SEQ ID NO: 5856738 - DNA, 25 bp, Homo sapien
cagcgtacttgggtcaggacgggga

SEQ ID NO: 5856739 - DNA, 25 bp, Homo sapien
gtcaggacggggatttgtaatccca

SEQ ID NO: 5856740 - DNA, 25 bp, Homo sapien
aagtcaatctcactcctggaaacaa

SEQ ID NO: 5856741 - DNA, 25 bp, Homo sapien
taatgctagggtgggcggtatacac

SEQ ID NO: 5856742 - DNA, 25 bp, Homo sapien
ctcactcctggaaacaatgttcctt

SEQ ID NO: 5856743 - DNA, 25 bp, Homo sapien
aattttcctccacctagagcctaac

SEQ ID NO: 5856744 - DNA, 25 bp, Homo sapien
atttccgttaagtgagtgtcccgat

SEQ ID NO: 5856745 - DNA, 25 bp, Homo sapien
ggggctgaagctgcaggggctgggc

SEQ ID NO: 5856746 - DNA, 25 bp, Homo sapien
gcaggggctgggctcacacttcttg

SEQ ID NO: 5856747 - DNA, 25 bp, Homo sapien
cgtagtagagtctctctgcaaagta

SEQ ID NO: 5856748 - DNA, 25 bp, Homo sapien
ttggttcttcctctgaagaccctga

SEQ ID NO: 5856749 - DNA, 25 bp, Homo sapien
taaccactggtgtcggccatgatca

SEQ ID NO: 5856750 - DNA, 25 bp, Homo sapien
ctgcaagcttcagcatggagggaat

SEQ ID NO: 5856751 - DNA, 25 bp, Homo sapien
tggaaacaatgttccttatcagcgt

SEQ ID NO: 5856752 - DNA, 25 bp, Homo sapien
cgggtcagaagcatgggatgagaag

SEQ ID NO: 5856753 - DNA, 25 bp, Homo sapien
agtaaccactggtgtcggccatgat

SEQ ID NO: 5856754 - DNA, 25 bp, Homo sapien
tagaaatccatgttccttggttctt

SEQ ID NO: 5856755 - DNA, 25 bp, Homo sapien
ccatggtcggggctgaagctgcagg

SEQ ID NO: 5856756 - DNA, 25 bp, Homo sapien
ccttgataagatttaagtcaatctc

SEQ ID NO: 5856757 - DNA, 25 bp, Homo sapien
taagtgagtgtcccgattggcagag

SEQ ID NO: 5856758 - DNA, 25 bp, Homo sapien
tccgtttgctcagaggtaatgctag

SEQ ID NO: 5856759 - DNA, 25 bp, Homo sapien
ggaagggaaacccaggctggtctca

SEQ ID NO: 5856760 - DNA, 25 bp, Homo sapien
gctgggcggctccctagtctgcaag

SEQ ID NO: 5856761 - DNA, 25 bp, Homo sapien
gggctgggctcacacttcttgccct

SEQ ID NO: 5856762 - DNA, 25 bp, Homo sapien
ctaatgcgtgctattaggatggtgt

SEQ ID NO: 5856763 - DNA, 25 bp, Homo sapien
ttcttgcccttgttctattttttga

SEQ ID NO: 5856764 - DNA, 25 bp, Homo sapien
attaggatggtgtaagaattttcct

SEQ ID NO: 5856765 - DNA, 25 bp, Homo sapien
ccacatgctcactggctgcctgata

SEQ ID NO: 5856766 - DNA, 25 bp, Homo sapien
gcagtcttgtagtaaccactggtgt

SEQ ID NO: 5856767 - DNA, 25 bp, Homo sapien
cgtgctattaggatggtgtaagaat

SEQ ID NO: 5856768 - DNA, 25 bp, Homo sapien
ggaatgactggacaagcccgagttt

SEQ ID NO: 5856769 - DNA, 25 bp, Homo sapien
atgatcatgctgctgagagtcttgc

SEQ ID NO: 5856770 - DNA, 25 bp, Homo sapien
gctccctagtctgcaagcttcagca

SEQ ID NO: 5856771 - DNA, 25 bp, Homo sapien
gtagagtctctctgcaaagtagctg

SEQ ID NO: 5856772 - DNA, 25 bp, Homo sapien
ccatcacgtgtccctgctcccttca

SEQ ID NO: 5856773 - DNA, 25 bp, Homo sapien
ataatgatgcttagcagctaagaca

SEQ ID NO: 5856774 - DNA, 25 bp, Homo sapien
taaaagccagatgaggtgtccccta

SEQ ID NO: 5856775 - DNA, 25 bp, Homo sapien
tagtctgcaagcttcagcatggagg

SEQ ID NO: 5856776 - DNA, 25 bp, Homo sapien
accctttctcagatccacggccgtg

SEQ ID NO: 5856777 - DNA, 25 bp, Homo sapien
gtcttgccgtacatcttcctaaact

SEQ ID NO: 5856778 - DNA, 25 bp, Homo sapien
acactgcaagcttctttcttcatgt

SEQ ID NO: 5856779 - DNA, 25 bp, Homo sapien
aatcccatctaatgcgtgctattag

SEQ ID NO: 5856780 - DNA, 25 bp, Homo sapien
cccacaggacactgcaagcttcttt

SEQ ID NO: 5856781 - DNA, 25 bp, Homo sapien
gctatgtgaccctttctcagatcca

SEQ ID NO: 5856782 - DNA, 25 bp, Homo sapien
ttggcagagctatgtgaccctttct

SEQ ID NO: 5856783 - DNA, 25 bp, Homo sapien
aacaatgttccttatcagcgttcca

SEQ ID NO: 5856784 - DNA, 25 bp, Homo sapien
tgttcttcaggctcggagaccacga

SEQ ID NO: 5856785 - DNA, 25 bp, Homo sapien
agtcttgtagtaaccactggtgtcg

SEQ ID NO: 5856786 - DNA, 25 bp, Homo sapien
agactaaaagccagatgaggtgtcc

SEQ ID NO: 5856787 - DNA, 25 bp, Homo sapien
cccttcatggcgtagtagagtctct

SEQ ID NO: 5856788 - DNA, 25 bp, Homo sapien
tcccacatgctcactggctgcctga

SEQ ID NO: 5856789 - DNA, 25 bp, Homo sapien
cacagcgtacttgggtcaggacggg

SEQ ID NO: 5856790 - DNA, 25 bp, Homo sapien
cttatcagcgttccatcacgtgtcc

SEQ ID NO: 5856791 - DNA, 25 bp, Homo sapien
aggagattttgtgtgaaggggaagg

SEQ ID NO: 5856792 - DNA, 25 bp, Homo sapien
cttcaggctcggagaccacgatcag

SEQ ID NO: 5856793 - DNA, 25 bp, Homo sapien
gctgctgagagtcttgccgtacatc

SEQ ID NO: 5856794 - DNA, 25 bp, Homo sapien
cctagaaatgactgacgggagaggt

SEQ ID NO: 5856795 - DNA, 25 bp, Homo sapien
tgacgggagaggtggaagggaaacc

SEQ ID NO: 5856796 - DNA, 25 bp, Homo sapien
gtcaatctcactcctggaaacaatg

SEQ ID NO: 5856797 - DNA, 25 bp, Homo sapien
tgccgtacatcttcctaaactgacc

SEQ ID NO: 5856798 - DNA, 25 bp, Homo sapien
agagccaaggcatctgtgtgccctg

SEQ ID NO: 5856799 - DNA, 25 bp, Homo sapien
gaagactaaaagccagatgaggtgt

SEQ ID NO: 5856800 - DNA, 25 bp, Homo sapien
tctattttttgacattttcagaggt

SEQ ID NO: 5856801 - DNA, 25 bp, Homo sapien
gctaagacaactgctagaaatccat

SEQ ID NO: 5856802 - DNA, 25 bp, Homo sapien
acaactgctagaaatccatgttcct

SEQ ID NO: 5856803 - DNA, 25 bp, Homo sapien
atctcactcctggaaacaatgttcc

SEQ ID NO: 5856804 - DNA, 25 bp, Homo sapien
gaatgacccacaggacactgcaagc

SEQ ID NO: 5856805 - DNA, 25 bp, Homo sapien
gattcatgctcagggctgggcggct

SEQ ID NO: 5856806 - DNA, 25 bp, Homo sapien
gacaagcccgagtttctcagaccac

SEQ ID NO: 5856807 - DNA, 25 bp, Homo sapien
gtcctctcatagaggtgctctccca

SEQ ID NO: 5856808 - DNA, 25 bp, Homo sapien
agtagatgggtcagagccaaggcat

SEQ ID NO: 5856809 - DNA, 25 bp, Homo sapien
ggagggaatgactggacaagcccga

SEQ ID NO: 5856810 - DNA, 25 bp, Homo sapien
ctgaagaccctgactcagtagatgg

SEQ ID NO: 5856811 - DNA, 25 bp, Homo sapien
atccacggccgtgtcctctcataga

SEQ ID NO: 5856812 - DNA, 25 bp, Homo sapien
tgggtcagagccaaggcatctgtgt

SEQ ID NO: 5856813 - DNA, 25 bp, Homo sapien
gggattcatgctcagggctgggcgg

SEQ ID NO: 5856814 - DNA, 25 bp, Homo sapien
aagtagctgtggacgttccgggtgc

SEQ ID NO: 5856815 - DNA, 25 bp, Homo sapien
ctgtcatgttcttcaggctcggaga

SEQ ID NO: 5856816 - DNA, 25 bp, Homo sapien
ccgttaagtgagtgtcccgattggc

SEQ ID NO: 5856817 - DNA, 25 bp, Homo sapien
accacagcgtacttgggtcaggacg

SEQ ID NO: 5856818 - DNA, 25 bp, Homo sapien
atgctagggtgggcggtatacacat

SEQ ID NO: 5856819 - DNA, 25 bp, Homo sapien
ggatttgtaatcccatctaatgcgt

SEQ ID NO: 5856820 - DNA, 25 bp, Homo sapien
gtgtcctctcatagaggtgctctcc

SEQ ID NO: 5856821 - DNA, 25 bp, Homo sapien
ggatgggattcatgctcagggctgg

SEQ ID NO: 5856822 - DNA, 25 bp, Homo sapien
agtctctctgcaaagtagctgtgga

SEQ ID NO: 5856823 - DNA, 25 bp, Homo sapien
ccagatgaggtgtcccctaccccca

SEQ ID NO: 5856824 - DNA, 25 bp, Homo sapien
tagatgggtcagagccaaggcatct

SEQ ID NO: 5856825 - DNA, 25 bp, Homo sapien
aacaatttccgttaagtgagtgtcc

SEQ ID NO: 5856826 - DNA, 25 bp, Homo sapien
agtgagtgtcccgattggcagagct

SEQ ID NO: 5856827 - DNA, 25 bp, Homo sapien
tgctcagggctgggcggctccctag

SEQ ID NO: 5856828 - DNA, 25 bp, Homo sapien
ctattaggatggtgtaagaattttc

SEQ ID NO: 5856829 - DNA, 25 bp, Homo sapien
gcgtacttgggtcaggacggggatt

SEQ ID NO: 5856830 - DNA, 25 bp, Homo sapien
catccgggtcagaagcatgggatga

SEQ ID NO: 5856831 - DNA, 25 bp, Homo sapien
tgtgtgccctgtgcccaggagattt

SEQ ID NO: 5856832 - DNA, 25 bp, Homo sapien
agaccacagcgtacttgggtcagga

SEQ ID NO: 5856833 - DNA, 25 bp, Homo sapien
ggcggctccctagtctgcaagcttc

SEQ ID NO: 5856834 - DNA, 25 bp, Homo sapien
ccaggagattttgtgtgaaggggaa

SEQ ID NO: 5856835 - DNA, 25 bp, Homo sapien
ggcagagctatgtgaccctttctca

SEQ ID NO: 5856836 - DNA, 25 bp, Homo sapien
tgtcccgattggcagagctatgtga

SEQ ID NO: 5856837 - DNA, 25 bp, Homo sapien
atggtgtaagaattttcctccacct

SEQ ID NO: 5856838 - DNA, 25 bp, Homo sapien
ttaagtcaatctcactcctggaaac

SEQ ID NO: 5856839 - DNA, 25 bp, Homo sapien
ctaaactgacccttgataagattta

SEQ ID NO: 5856840 - DNA, 25 bp, Homo sapien
catgttccttggttcttcctctgaa

SEQ ID NO: 5856841 - DNA, 25 bp, Homo sapien
caagcccgagtttctcagaccacag

SEQ ID NO: 5856842 - DNA, 25 bp, Homo sapien
tgactggacaagcccgagtttctca

SEQ ID NO: 5856843 - DNA, 25 bp, Homo sapien
atgttccttatcagcgttccatcac

SEQ ID NO: 5856844 - DNA, 25 bp, Homo sapien
aagcatgggatgagaagcatcagaa

SEQ ID NO: 5856845 - DNA, 25 bp, Homo sapien
aaggcatctgtgtgccctgtgccca

SEQ ID NO: 5856846 - DNA, 25 bp, Homo sapien
agaggtgctctcccacatgctcact

SEQ ID NO: 5856847 - DNA, 25 bp, Homo sapien
gctcggagaccacgatcagaggatg

SEQ ID NO: 5856848 - DNA, 25 bp, Homo sapien
aggggctgggctcacacttcttgcc

SEQ ID NO: 5856849 - DNA, 25 bp, Homo sapien
atttgtaatcccatctaatgcgtgc

SEQ ID NO: 5856850 - DNA, 25 bp, Homo sapien
aatccatgttccttggttcttcctc

SEQ ID NO: 5856851 - DNA, 25 bp, Homo sapien
ggtaatgctagggtgggcggtatac

SEQ ID NO: 5856852 - DNA, 25 bp, Homo sapien
tgtgccctgtgcccaggagattttg

SEQ ID NO: 5856853 - DNA, 25 bp, Homo sapien
tcagcgttccatcacgtgtccctgc

SEQ ID NO: 5856854 - DNA, 25 bp, Homo sapien
cgttccatcacgtgtccctgctccc

SEQ ID NO: 5856855 - DNA, 25 bp, Homo sapien
ctctgaagaccctgactcagtagat

SEQ ID NO: 5856856 - DNA, 25 bp, Homo sapien
gggtcaggacggggatttgtaatcc

SEQ ID NO: 5856857 - DNA, 25 bp, Homo sapien
ggcatctgtgtgccctgtgcccagg

SEQ ID NO: 5856858 - DNA, 25 bp, Homo sapien
tcagatccacggccgtgtcctctca

SEQ ID NO: 5856859 - DNA, 25 bp, Homo sapien
gaagctgcaggggctgggctcacac

SEQ ID NO: 5856860 - DNA, 25 bp, Homo sapien
ttcatgctcagggctgggcggctcc

SEQ ID NO: 5856861 - DNA, 25 bp, Homo sapien
aagggaaacccaggctggtctcatc

SEQ ID NO: 5856862 - DNA, 25 bp, Homo sapien
tcatgctgctgagagtcttgccgta

SEQ ID NO: 5856863 - DNA, 25 bp, Homo sapien
gcatgggatgagaagcatcagaaac

SEQ ID NO: 5856864 - DNA, 25 bp, Homo sapien
ggacactgcaagcttctttcttcat

SEQ ID NO: 5856865 - DNA, 25 bp, Homo sapien
gagattttgtgtgaaggggaaggaa

SEQ ID NO: 5856866 - DNA, 25 bp, Homo sapien
acccatggtcggggctgaagctgca

SEQ ID NO: 5856867 - DNA, 25 bp, Homo sapien
gcttcagcatggagggaatgactgg

SEQ ID NO: 5856868 - DNA, 25 bp, Homo sapien
ccaaggcatctgtgtgccctgtgcc

SEQ ID NO: 5856869 - DNA, 25 bp, Homo sapien
ttcctccacctagagcctaacaatt

SEQ ID NO: 5856870 - DNA, 25 bp, Homo sapien
tcttcatgttgatgtttccgtttgc

SEQ ID NO: 5856871 - DNA, 25 bp, Homo sapien
aactgggcaacagaagactaaaagc

SEQ ID NO: 5856872 - DNA, 25 bp, Homo sapien
ctgggcaacagaagactaaaagcca

SEQ ID NO: 5856873 - DNA, 25 bp, Homo sapien
tcagtgcccacaaggttcagcaggg

SEQ ID NO: 5856874 - DNA, 25 bp, Homo sapien
gttaagtgagtgtcccgattggcag

SEQ ID NO: 5856875 - DNA, 25 bp, Homo sapien
tgttccttggttcttcctctgaaga

SEQ ID NO: 5856876 - DNA, 25 bp, Homo sapien
ccatgatcatgctgctgagagtctt

SEQ ID NO: 5856877 - DNA, 25 bp, Homo sapien
ccgtgtcctctcatagaggtgctct

SEQ ID NO: 5856878 - DNA, 25 bp, Homo sapien
gggctgggcggctccctagtctgca

SEQ ID NO: 5856879 - DNA, 25 bp, Homo sapien
ctcagggctgggcggctccctagtc

SEQ ID NO: 5856880 - DNA, 25 bp, Homo sapien
acccttgataagatttaagtcaatc

SEQ ID NO: 5856881 - DNA, 25 bp, Homo sapien
agcccgagtttctcagaccacagcg

SEQ ID NO: 5856882 - DNA, 25 bp, Homo sapien
cctccacctagagcctaacaatttc

SEQ ID NO: 5856883 - DNA, 25 bp, Homo sapien
acatcttcctaaactgacccttgat

SEQ ID NO: 5856884 - DNA, 25 bp, Homo sapien
actggctgcctgataatgatgctta

SEQ ID NO: 5856885 - DNA, 25 bp, Homo sapien
ggtcagagccaaggcatctgtgtgc

SEQ ID NO: 5856886 - DNA, 25 bp, Homo sapien
gtagtaaccactggtgtcggccatg

SEQ ID NO: 5856887 - DNA, 25 bp, Homo sapien
atggtcggggctgaagctgcagggg

SEQ ID NO: 5856888 - DNA, 25 bp, Homo sapien
ggtgtcggccatgatcatgctgctg

SEQ ID NO: 5856889 - DNA, 25 bp, Homo sapien
ggcgtagtagagtctctctgcaaag

SEQ ID NO: 5856890 - DNA, 25 bp, Homo sapien
ctcctggaaacaatgttccttatca

SEQ ID NO: 5856891 - DNA, 25 bp, Homo sapien
tcagagccaaggcatctgtgtgccc

SEQ ID NO: 5856892 - DNA, 25 bp, Homo sapien
gaaggggaaggaatgacccacagga

SEQ ID NO: 5856893 - DNA, 25 bp, Homo sapien
tctcatcatccgggtcagaagcatg

SEQ ID NO: 5856894 - DNA, 25 bp, Homo sapien
agaagcatgggatgagaagcatcag

SEQ ID NO: 5856895 - DNA, 25 bp, Homo sapien
tgctcagaggtaatgctagggtggg

SEQ ID NO: 5856896 - DNA, 25 bp, Homo sapien
gaaatgactgacgggagaggtggaa

SEQ ID NO: 5856897 - DNA, 25 bp, Homo sapien
gcatcagaaactgggcaacagaaga

SEQ ID NO: 5856898 - DNA, 25 bp, Homo sapien
tctgtgtgccctgtgcccaggagat

SEQ ID NO: 5856899 - DNA, 25 bp, Homo sapien
cgagtttctcagaccacagcgtact

SEQ ID NO: 5856900 - DNA, 25 bp, Homo sapien
ttcagcatggagggaatgactggac

SEQ ID NO: 5856901 - DNA, 25 bp, Homo sapien
caatgttccttatcagcgttccatc

SEQ ID NO: 5856902 - DNA, 25 bp, Homo sapien
agtttctcagaccacagcgtacttg

SEQ ID NO: 5856903 - DNA, 25 bp, Homo sapien
gatgagaagcatcagaaactgggca

SEQ ID NO: 5856904 - DNA, 25 bp, Homo sapien
tgataatgatgcttagcagctaaga

SEQ ID NO: 5856905 - DNA, 25 bp, Homo sapien
cttcatggcgtagtagagtctctct

SEQ ID NO: 5856906 - DNA, 25 bp, Homo sapien
acccccacccatggtcggggctgaa

SEQ ID NO: 5856907 - DNA, 25 bp, Homo sapien
tctcatagaggtgctctcccacatg

SEQ ID NO: 5856908 - DNA, 25 bp, Homo sapien
cctttctcagatccacggccgtgtc

SEQ ID NO: 5856909 - DNA, 25 bp, Homo sapien
tcccgattggcagagctatgtgacc

SEQ ID NO: 5856910 - DNA, 25 bp, Homo sapien
gtgctctcccacatgctcactggct

SEQ ID NO: 5856911 - DNA, 25 bp, Homo sapien
cagcatggagggaatgactggacaa

SEQ ID NO: 5856912 - DNA, 25 bp, Homo sapien
aatgactgacgggagaggtggaagg

SEQ ID NO: 5856913 - DNA, 25 bp, Homo sapien
taggatggtgtaagaattttcctcc

SEQ ID NO: 5856914 - DNA, 25 bp, Homo sapien
agagttctgtcatgttcttcaggct

SEQ ID NO: 5856915 - DNA, 25 bp, Homo sapien
agaccacgatcagaggatgggattc

SEQ ID NO: 5856916 - DNA, 25 bp, Homo sapien
ggggatttgtaatcccatctaatgc

SEQ ID NO: 5856917 - DNA, 25 bp, Homo sapien
tccctgctcccttcatggcgtagta

SEQ ID NO: 5856918 - DNA, 25 bp, Homo sapien
cacaggacactgcaagcttctttct

SEQ ID NO: 5856919 - DNA, 25 bp, Homo sapien
ctgctagaaatccatgttccttggt

SEQ ID NO: 5856920 - DNA, 25 bp, Homo sapien
gggtgggcggtatacacatacctag

SEQ ID NO: 5856921 - DNA, 25 bp, Homo sapien
gctgcctgataatgatgcttagcag

SEQ ID NO: 5856922 - DNA, 25 bp, Homo sapien
gggcagtcttgtagtaaccactggt

SEQ ID NO: 5856923 - DNA, 25 bp, Homo sapien
ggtcagtgcccacaaggttcagcag

SEQ ID NO: 5856924 - DNA, 25 bp, Homo sapien
gggcggtatacacatacctagaaat

SEQ ID NO: 5856925 - DNA, 25 bp, Homo sapien
tgagtgtcccgattggcagagctat

SEQ ID NO: 5856926 - DNA, 25 bp, Homo sapien
cacacttcttgcccttgttctattt

SEQ ID NO: 5856927 - DNA, 25 bp, Homo sapien
ggatggtgtaagaattttcctccac

SEQ ID NO: 5856928 - DNA, 25 bp, Homo sapien
taagacaactgctagaaatccatgt

SEQ ID NO: 5856929 - DNA, 25 bp, Homo sapien
aactgctagaaatccatgttccttg

SEQ ID NO: 5856930 - DNA, 25 bp, Homo sapien
ctgaagctgcaggggctgggctcac

SEQ ID NO: 5856931 - DNA, 25 bp, Homo sapien
aaactgacccttgataagatttaag

SEQ ID NO: 5856932 - DNA, 25 bp, Homo sapien
tgtttccgtttgctcagaggtaatg

SEQ ID NO: 5856933 - DNA, 25 bp, Homo sapien
gcccaggagattttgtgtgaagggg

SEQ ID NO: 5856934 - DNA, 25 bp, Homo sapien
tggacaagcccgagtttctcagacc

SEQ ID NO: 5856935 - DNA, 25 bp, Homo sapien
gaaactgggcaacagaagactaaaa

SEQ ID NO: 5856936 - DNA, 25 bp, Homo sapien
accctgactcagtagatgggtcaga

SEQ ID NO: 5856937 - DNA, 25 bp, Homo sapien
gtgtgaaggggaaggaatgacccac

SEQ ID NO: 5856938 - DNA, 25 bp, Homo sapien
ttgggtcaggacggggatttgtaat

SEQ ID NO: 5856939 - DNA, 25 bp, Homo sapien
ctgtgcccaggagattttgtgtgaa

SEQ ID NO: 5856940 - DNA, 25 bp, Homo sapien
tgcaaagtagctgtggacgttccgg

SEQ ID NO: 5856941 - DNA, 25 bp, Homo sapien
atgacccacaggacactgcaagctt

SEQ ID NO: 5856942 - DNA, 25 bp, Homo sapien
tcaggctcggagaccacgatcagag

SEQ ID NO: 5856943 - DNA, 25 bp, Homo sapien
ttgtaatcccatctaatgcgtgcta

SEQ ID NO: 5856944 - DNA, 25 bp, Homo sapien
aagcttcagcatggagggaatgact

SEQ ID NO: 5856945 - DNA, 25 bp, Homo sapien
ggctggtctcatcatccgggtcaga

SEQ ID NO: 5856946 - DNA, 25 bp, Homo sapien
tccctagtctgcaagcttcagcatg

SEQ ID NO: 5856947 - DNA, 25 bp, Homo sapien
ggtgtaagaattttcctccacctag

SEQ ID NO: 5856948 - DNA, 25 bp, Homo sapien
tgtgaccctttctcagatccacggc

SEQ ID NO: 5856949 - DNA, 25 bp, Homo sapien
ctaacaatttccgttaagtgagtgt

SEQ ID NO: 5856950 - DNA, 25 bp, Homo sapien
gaaatccatgttccttggttcttcc

SEQ ID NO: 5856951 - DNA, 25 bp, Homo sapien
gacattttcagaggtcagtgcccac

SEQ ID NO: 5856952 - DNA, 25 bp, Homo sapien
caatttccgttaagtgagtgtcccg

SEQ ID NO: 5856953 - DNA, 25 bp, Homo sapien
gagcctaacaatttccgttaagtga

SEQ ID NO: 5856954 - DNA, 25 bp, Homo sapien
ctgcaggggctgggctcacacttct

SEQ ID NO: 5856955 - DNA, 25 bp, Homo sapien
tggctgcctgataatgatgcttagc

SEQ ID NO: 5856956 - DNA, 25 bp, Homo sapien
cagagctatgtgaccctttctcaga

SEQ ID NO: 5856957 - DNA, 25 bp, Homo sapien
tctcccacatgctcactggctgcct

SEQ ID NO: 5856958 - DNA, 25 bp, Homo sapien
gcctaacaatttccgttaagtgagt

SEQ ID NO: 5856959 - DNA, 25 bp, Homo sapien
gtggaagggaaacccaggctggtct

SEQ ID NO: 5856960 - DNA, 25 bp, Homo sapien
gtgcccaggagattttgtgtgaagg

SEQ ID NO: 5856961 - DNA, 25 bp, Homo sapien
atcacgtgtccctgctcccttcatg

SEQ ID NO: 5856962 - DNA, 25 bp, Homo sapien
tcatcatccgggtcagaagcatggg

SEQ ID NO: 5856963 - DNA, 25 bp, Homo sapien
ttttgacattttcagaggtcagtgc

SEQ ID NO: 5856964 - DNA, 25 bp, Homo sapien
caaagtagctgtggacgttccgggt

SEQ ID NO: 5856965 - DNA, 25 bp, Homo sapien
ggtctcatcatccgggtcagaagca

SEQ ID NO: 5856966 - DNA, 25 bp, Homo sapien
agcagctaagacaactgctagaaat

SEQ ID NO: 5856967 - DNA, 25 bp, Homo sapien
gacccacaggacactgcaagcttct

SEQ ID NO: 5856968 - DNA, 25 bp, Homo sapien
tcccatctaatgcgtgctattagga

SEQ ID NO: 5856969 - DNA, 25 bp, Homo sapien
ttttcctccacctagagcctaacaa

SEQ ID NO: 5856970 - DNA, 25 bp, Homo sapien
tccatgttccttggttcttcctctg

SEQ ID NO: 5856971 - DNA, 25 bp, Homo sapien
catgttcttcaggctcggagaccac

SEQ ID NO: 5856972 - DNA, 25 bp, Homo sapien
tgctattaggatggtgtaagaattt

SEQ ID NO: 5856973 - DNA, 25 bp, Homo sapien
tacacatacctagaaatgactgacg

SEQ ID NO: 5856974 - DNA, 25 bp, Homo sapien
tttccgtttgctcagaggtaatgct

SEQ ID NO: 5856975 - DNA, 25 bp, Homo sapien
cttctttcttcatgttgatgtttcc

SEQ ID NO: 5856976 - DNA, 25 bp, Homo sapien
tgtcggccatgatcatgctgctgag

SEQ ID NO: 5856977 - DNA, 25 bp, Homo sapien
aggggaaggaatgacccacaggaca

SEQ ID NO: 5856978 - DNA, 25 bp, Homo sapien
gggcaacagaagactaaaagccaga

SEQ ID NO: 5856979 - DNA, 25 bp, Homo sapien
tgactgacgggagaggtggaaggga

SEQ ID NO: 5856980 - DNA, 25 bp, Homo sapien
tgctcccttcatggcgtagtagagt

SEQ ID NO: 5856981 - DNA, 25 bp, Homo sapien
cacctagagcctaacaatttccgtt

SEQ ID NO: 5856982 - DNA, 25 bp, Homo sapien
ttgtagtaaccactggtgtcggcca

SEQ ID NO: 5856983 - DNA, 25 bp, Homo sapien
atcagaaactgggcaacagaagact

SEQ ID NO: 5856984 - DNA, 25 bp, Homo sapien
atggagggaatgactggacaagccc

SEQ ID NO: 5856985 - DNA, 25 bp, Homo sapien
agtgtcccgattggcagagctatgt

SEQ ID NO: 5856986 - DNA, 25 bp, Homo sapien
agctgcaggggctgggctcacactt

SEQ ID NO: 5856987 - DNA, 25 bp, Homo sapien
ccttggttcttcctctgaagaccct

SEQ ID NO: 5856988 - DNA, 25 bp, Homo sapien
ttgataagatttaagtcaatctcac

SEQ ID NO: 5856989 - DNA, 25 bp, Homo sapien
ccgtacatcttcctaaactgaccct

SEQ ID NO: 5856990 - DNA, 25 bp, Homo sapien
agtgcccacaaggttcagcagggca

SEQ ID NO: 5856991 - DNA, 25 bp, Homo sapien
tgcaagcttctttcttcatgttgat

SEQ ID NO: 5856992 - DNA, 25 bp, Homo sapien
tccacctagagcctaacaatttccg

SEQ ID NO: 5856993 - DNA, 25 bp, Homo sapien
gtaatcccatctaatgcgtgctatt

SEQ ID NO: 5856994 - DNA, 25 bp, Homo sapien
tagaaatgactgacgggagaggtgg

SEQ ID NO: 5856995 - DNA, 25 bp, Homo sapien
agacaactgctagaaatccatgttc

SEQ ID NO: 5856996 - DNA, 25 bp, Homo sapien
tttctcagaccacagcgtacttggg

SEQ ID NO: 5856997 - DNA, 25 bp, Homo sapien
agagtctctctgcaaagtagctgtg

SEQ ID NO: 5856998 - DNA, 25 bp, Homo sapien
atgctcactggctgcctgataatga

SEQ ID NO: 5856999 - DNA, 25 bp, Homo sapien
atcttcctaaactgacccttgataa

SEQ ID NO: 5857000 - DNA, 25 bp, Homo sapien
gctgggctcacacttcttgcccttg

SEQ ID NO: 5857001 - DNA, 25 bp, Homo sapien
ggtcagaagcatgggatgagaagca

SEQ ID NO: 5857002 - DNA, 25 bp, Homo sapien
agccagatgaggtgtcccctacccc

SEQ ID NO: 5857003 - DNA, 25 bp, Homo sapien
actgacgggagaggtggaagggaaa

SEQ ID NO: 5857004 - DNA, 25 bp, Homo sapien
gtccaagtgttggcacgaacctctt

SEQ ID NO: 5857005 - DNA, 25 bp, Homo sapien
atcaacacccctcagcagcagtggc

SEQ ID NO: 5857006 - DNA, 25 bp, Homo sapien
gaaatatgagtccaaacactatatg

SEQ ID NO: 5857007 - DNA, 25 bp, Homo sapien
aagcttcctacgatggaaatgtatc

SEQ ID NO: 5857008 - DNA, 25 bp, Homo sapien
ccctcagcagcagtggccctgcaag

SEQ ID NO: 5857009 - DNA, 25 bp, Homo sapien
cttgttttgttttgagttgtttgaa

SEQ ID NO: 5857010 - DNA, 25 bp, Homo sapien
gacccattttctttactcttcacta

SEQ ID NO: 5857011 - DNA, 25 bp, Homo sapien
cccattttctttactcttcactatt

SEQ ID NO: 5857012 - DNA, 25 bp, Homo sapien
ttagtttcccctcaggacctgtcca

SEQ ID NO: 5857013 - DNA, 25 bp, Homo sapien
acttagtttcccctcaggacctgtc

SEQ ID NO: 5857014 - DNA, 25 bp, Homo sapien
atgcaactcacattttctatggacc

SEQ ID NO: 5857015 - DNA, 25 bp, Homo sapien
gagctgatgaacttagtttcccctc

SEQ ID NO: 5857016 - DNA, 25 bp, Homo sapien
gtacccatatggacagcaacccaag

SEQ ID NO: 5857017 - DNA, 25 bp, Homo sapien
cccgtggaggatgttcctgggtgaa

SEQ ID NO: 5857018 - DNA, 25 bp, Homo sapien
cacttgtatgactacattgaagcca

SEQ ID NO: 5857019 - DNA, 25 bp, Homo sapien
ggactacagaaatatgagtccaaac

SEQ ID NO: 5857020 - DNA, 25 bp, Homo sapien
aagtttccactctctagatccagta

SEQ ID NO: 5857021 - DNA, 25 bp, Homo sapien
agaagtccaatttgaacacttgtat

SEQ ID NO: 5857022 - DNA, 25 bp, Homo sapien
gtcagggcttctggatattcccatt

SEQ ID NO: 5857023 - DNA, 25 bp, Homo sapien
tgaacacttgtatgactacattgaa

SEQ ID NO: 5857024 - DNA, 25 bp, Homo sapien
ctatggaccatcaccaagccacaag

SEQ ID NO: 5857025 - DNA, 25 bp, Homo sapien
cacaaagccacagaccaagtcaggg

SEQ ID NO: 5857026 - DNA, 25 bp, Homo sapien
gccacagaccaagtcagggcttctg

SEQ ID NO: 5857027 - DNA, 25 bp, Homo sapien
aagtaagagcaataaagcttcctac

SEQ ID NO: 5857028 - DNA, 25 bp, Homo sapien
gaaaaatcaactccctcgatcaaca

SEQ ID NO: 5857029 - DNA, 25 bp, Homo sapien
ccactggaagaaatgggtcaggtat

SEQ ID NO: 5857030 - DNA, 25 bp, Homo sapien
tatgattcccttcttgggcctatag

SEQ ID NO: 5857031 - DNA, 25 bp, Homo sapien
ggcctatagaagaacttgaacagtt

SEQ ID NO: 5857032 - DNA, 25 bp, Homo sapien
tatgacagggactacagaaatatga

SEQ ID NO: 5857033 - DNA, 25 bp, Homo sapien
aatgaagagtttaacatcatcacaa

SEQ ID NO: 5857034 - DNA, 25 bp, Homo sapien
gatgaacactgagaccacctgattc

SEQ ID NO: 5857035 - DNA, 25 bp, Homo sapien
tctcatatggacattacacatgagg

SEQ ID NO: 5857036 - DNA, 25 bp, Homo sapien
catcaccaagccacaaggaaagggc

SEQ ID NO: 5857037 - DNA, 25 bp, Homo sapien
gaagacactggacccattttcttta

SEQ ID NO: 5857038 - DNA, 25 bp, Homo sapien
ctgtccaagtgttggcacgaacctc

SEQ ID NO: 5857039 - DNA, 25 bp, Homo sapien
attacacatgagggacctgaaggag

SEQ ID NO: 5857040 - DNA, 25 bp, Homo sapien
gatccagtactatgacagggactac

SEQ ID NO: 5857041 - DNA, 25 bp, Homo sapien
acacccctcagcagcagtggccctg

SEQ ID NO: 5857042 - DNA, 25 bp, Homo sapien
tctagatccagtactatgacaggga

SEQ ID NO: 5857043 - DNA, 25 bp, Homo sapien
gaaggagggatgaattggttgttta

SEQ ID NO: 5857044 - DNA, 25 bp, Homo sapien
gtccaatttgaacacttgtatgact

SEQ ID NO: 5857045 - DNA, 25 bp, Homo sapien
ggccctgcaagtcaagcacccgtgg

SEQ ID NO: 5857046 - DNA, 25 bp, Homo sapien
gaccaagtcagggcttctggatatt

SEQ ID NO: 5857047 - DNA, 25 bp, Homo sapien
tgaattggttgtttattctcaaagt

SEQ ID NO: 5857048 - DNA, 25 bp, Homo sapien
ttcactattaatgttgtgtttacat

SEQ ID NO: 5857049 - DNA, 25 bp, Homo sapien
ccttagctgttgagaaagtaagagc

SEQ ID NO: 5857050 - DNA, 25 bp, Homo sapien
aactacttcagcactcacagaaggt

SEQ ID NO: 5857051 - DNA, 25 bp, Homo sapien
tcccattgctttttaacagttatgg

SEQ ID NO: 5857052 - DNA, 25 bp, Homo sapien
tgccacctagctgggtacccatatg

SEQ ID NO: 5857053 - DNA, 25 bp, Homo sapien
tcactgttgaaagtgagggagctga

SEQ ID NO: 5857054 - DNA, 25 bp, Homo sapien
tgctttttaacagttatgggtcaaa

SEQ ID NO: 5857055 - DNA, 25 bp, Homo sapien
tcattgtgcatatggaagacactgg

SEQ ID NO: 5857056 - DNA, 25 bp, Homo sapien
atatgcaactcacattttctatgga

SEQ ID NO: 5857057 - DNA, 25 bp, Homo sapien
gaagaacttgaacagttcacagaag

SEQ ID NO: 5857058 - DNA, 25 bp, Homo sapien
gcacgaacctcttcattgtgcatat

SEQ ID NO: 5857059 - DNA, 25 bp, Homo sapien
gagggagctgatgaacttagtttcc

SEQ ID NO: 5857060 - DNA, 25 bp, Homo sapien
aaagggcttcatggaactacttcag

SEQ ID NO: 5857061 - DNA, 25 bp, Homo sapien
tacagaaatatgagtccaaacacta

SEQ ID NO: 5857062 - DNA, 25 bp, Homo sapien
atggacattacacatgagggacctg

SEQ ID NO: 5857063 - DNA, 25 bp, Homo sapien
acatctggagactctcatatggaca

SEQ ID NO: 5857064 - DNA, 25 bp, Homo sapien
gaagcaaatgaagagtttaacatca

SEQ ID NO: 5857065 - DNA, 25 bp, Homo sapien
atcacaaagccacagaccaagtcag

SEQ ID NO: 5857066 - DNA, 25 bp, Homo sapien
aaagtcactcttgttttgttttgag

SEQ ID NO: 5857067 - DNA, 25 bp, Homo sapien
tctgtgttcttccctgcctcactgt

SEQ ID NO: 5857068 - DNA, 25 bp, Homo sapien
cattgaagccactggaagaaatggg

SEQ ID NO: 5857069 - DNA, 25 bp, Homo sapien
tccaaacactatatgcaactcacat

SEQ ID NO: 5857070 - DNA, 25 bp, Homo sapien
agctgggtacccatatggacagcaa

SEQ ID NO: 5857071 - DNA, 25 bp, Homo sapien
ctgcaagtcaagcacccgtggagga

SEQ ID NO: 5857072 - DNA, 25 bp, Homo sapien
acagaaggtatgattcccttcttgg

SEQ ID NO: 5857073 - DNA, 25 bp, Homo sapien
aacactgagaccacctgattccaag

SEQ ID NO: 5857074 - DNA, 25 bp, Homo sapien
gaacttagtttcccctcaggacctg

SEQ ID NO: 5857075 - DNA, 25 bp, Homo sapien
acagcttccttcatgatgaacactg

SEQ ID NO: 5857076 - DNA, 25 bp, Homo sapien
ctgggtgaacagcttccttcatgat

SEQ ID NO: 5857077 - DNA, 25 bp, Homo sapien
tccctgcctcactgttgaaagtgag

SEQ ID NO: 5857078 - DNA, 25 bp, Homo sapien
aagagtttaacatcatcacaaagcc

SEQ ID NO: 5857079 - DNA, 25 bp, Homo sapien
agaacttgaacagttcacagaagtc

SEQ ID NO: 5857080 - DNA, 25 bp, Homo sapien
tacattgatgagaacaagagctaat

SEQ ID NO: 5857081 - DNA, 25 bp, Homo sapien
accatcaccaagccacaaggaaagg

SEQ ID NO: 5857082 - DNA, 25 bp, Homo sapien
cacattttctatggaccatcaccaa

SEQ ID NO: 5857083 - DNA, 25 bp, Homo sapien
agcaaatgaagagtttaacatcatc

SEQ ID NO: 5857084 - DNA, 25 bp, Homo sapien
atgtatcctgccacctagctgggta

SEQ ID NO: 5857085 - DNA, 25 bp, Homo sapien
ccaagtttccactctctagatccag

SEQ ID NO: 5857086 - DNA, 25 bp, Homo sapien
atttgggggattttgttcattttga

SEQ ID NO: 5857087 - DNA, 25 bp, Homo sapien
taaagcttcctacgatggaaatgta

SEQ ID NO: 5857088 - DNA, 25 bp, Homo sapien
acctagctgggtacccatatggaca

SEQ ID NO: 5857089 - DNA, 25 bp, Homo sapien
ctggatattcccattgctttttaac

SEQ ID NO: 5857090 - DNA, 25 bp, Homo sapien
tctctgtgttcttccctgcctcact

SEQ ID NO: 5857091 - DNA, 25 bp, Homo sapien
ccctgcaagtcaagcacccgtggag

SEQ ID NO: 5857092 - DNA, 25 bp, Homo sapien
ttgggggattttgttcattttgatc

SEQ ID NO: 5857093 - DNA, 25 bp, Homo sapien
aataaagcttcctacgatggaaatg

SEQ ID NO: 5857094 - DNA, 25 bp, Homo sapien
gtactatgacagggactacagaaat

SEQ ID NO: 5857095 - DNA, 25 bp, Homo sapien
cctgccacctagctgggtacccata

SEQ ID NO: 5857096 - DNA, 25 bp, Homo sapien
gttcctgggtgaacagcttccttca

SEQ ID NO: 5857097 - DNA, 25 bp, Homo sapien
actcttcactattaatgttgtgttt

SEQ ID NO: 5857098 - DNA, 25 bp, Homo sapien
gatgaattggttgtttattctcaaa

SEQ ID NO: 5857099 - DNA, 25 bp, Homo sapien
cacagaccaagtcagggcttctgga
